United States Patent Application Publication US 2021/0199660 A1 - sequence listing, part 65

SEQ ID NO: 936933 - DNA, 120 bp, Artificial Sequence
  ENSG00000259572_10 (sequence is synthesized)
tttttccctcaccatgagaagcttttgttcagctttcctcaatgaagacaaaataataataattaaaatatcagtagctaatatctgtagggtacttactagtgccagtgctgcctaaac

SEQ ID NO: 936934 - DNA, 120 bp, Artificial Sequence
  ENSG00000259572_11 (sequence is synthesized)
actagtttaatcttcacaagtcccctaaaagagatacatatggttattgactccatttaacagatttggaaactgagtatagtttagtctttggcagagggcaaattcataccgtgtata

SEQ ID NO: 936935 - DNA, 120 bp, Artificial Sequence
  ENSG00000259572_12 (sequence is synthesized)
ggttaataagcggcagagatcatgatacaactgcaggcccactggctttggagcctcccacccacctgcaaaaactatcgcaaaagcaaagacatgaaataaatttattttagttgatgc

SEQ ID NO: 936936 - DNA, 120 bp, Artificial Sequence
  ENSG00000259572_13 (sequence is synthesized)
atctgcaggcagatgctgaaaccatgaatacagagggacaactatgtccacaagatataatgctgagaaaggctaataaatcaagccaatctaatgtctaaatacagaatagaaaaatgt

SEQ ID NO: 936937 - DNA, 120 bp, Artificial Sequence
  ENSG00000259572_14 (sequence is synthesized)
gactggatgaatacgtaaccactgctctgaatggaagacttcgactggaagactttttcacatgacccagggaaaggcacaaagaaacaaagcttgtgatgctctaaaataatcaattca

SEQ ID NO: 936938 - DNA, 120 bp, Artificial Sequence
  ENSG00000259572_15 (sequence is synthesized)
tttggccaacaccatgcacagaatggaaagcttttgcctcatttttcttccccccgccttcagattttcaaagtgttttataaaagcaagtgctaataaactgtggcattaactagagaa

SEQ ID NO: 936939 - DNA, 120 bp, Artificial Sequence
  ENSG00000259572_16 (sequence is synthesized)
gaccacagaaaaagtagccagcccaccatccctagatgattttgcagtctttgcacaccagtgtggccataggcttgttttctcctggactgagcctgcagatcctatgagcaaaatctg

SEQ ID NO: 936940 - DNA, 120 bp, Artificial Sequence
  ENSG00000259577_0 (sequence is synthesized)
gatgacgccagcagctgcgggcccggctgctgcgcctgagccccaagaccccgcacctgggcgcgcgctctggcgcagtgcctggtgcgatgtccgcgtcagcctctctcctccgggaga

SEQ ID NO: 936941 - DNA, 120 bp, Artificial Sequence
  ENSG00000259577_1 (sequence is synthesized)
ggcagggagtgtgacgcccattttaccagcgggcaaactgtggcttagggatgctgggtgatttgcccgaggacgcacacagagggaagggccaagccgggattccaactcgggactccc

SEQ ID NO: 936942 - DNA, 120 bp, Artificial Sequence
  ENSG00000259577_2 (sequence is synthesized)
cgcttctggggagaccggtgaggcccccgcgacatggccctcccatccccaagcctctcgtgcagatctccgctctgtgggacttgattgcgggctgcgggcccgtggctcctgcaggca

SEQ ID NO: 936943 - DNA, 120 bp, Artificial Sequence
  ENSG00000259577_3 (sequence is synthesized)
gagagaggacgggagaggagacggctacgaggcttggccgcaggaatcaggtccctggcctgggggcggcaaaaggagatggcggtgggtcaagtgggcgcgcaggctcagacctggggc

SEQ ID NO: 936944 - DNA, 120 bp, Artificial Sequence
  ENSG00000259577_4 (sequence is synthesized)
ttctgagcccacgcccaggcatctcggacctctcacttctgaggccacctcctgccctttagaatgaagggctggcacagttctgccaggatgcacgtttagcgacttctgtcagactga

SEQ ID NO: 936945 - DNA, 120 bp, Artificial Sequence
  ENSG00000259577_5 (sequence is synthesized)
agcatcccctctccgcaagcgcctgaagtgtgagaggcactgttctaagtgctttaatttgcacttgtttaatcctcacaggagtcaacttgaatgggcacacttattcccactttacag

SEQ ID NO: 936946 - DNA, 120 bp, Artificial Sequence
  ENSG00000259577_6 (sequence is synthesized)
aagaggaaactggggcacagaaagactgagtaattgctcagggggcatgctccaagaaagagggagagacaggatttggacccagacaggctggctccctagtgctctggactttggtgt

SEQ ID NO: 936947 - DNA, 120 bp, Artificial Sequence
  ENSG00000259577_7 (sequence is synthesized)
ggatgatccaactcaagccttctcctttttccctcctatgtgatcttgcatgcgtttgtgcagagaatgagaaggcagatcaaagttacagatgctgcgagaacatcgccaagcagaatc

SEQ ID NO: 936948 - DNA, 120 bp, Artificial Sequence
  ENSG00000259577_8 (sequence is synthesized)
tgaaggagcacatgtccttgcgcaggaagaggctgttcagcgtgaccgccccgatcaagaagaagagctgcttcaccgcctgcctcacaagctcggggtccaggccgttctggcacatgg

SEQ ID NO: 936949 - DNA, 120 bp, Artificial Sequence
  ENSG00000259577_9 (sequence is synthesized)
tggtgtaaaagtagctcagctgttgcaggacggaggtcatggtgtagccgtccgtgtcgtctatgctagaggagcgcttccggaagcctgtgggcttcaggccggaaatgccctgcaggc

SEQ ID NO: 936950 - DNA, 120 bp, Artificial Sequence
  ENSG00000259577_10 (sequence is synthesized)
tctcatactccagcattcccggaactgcggagagacagggaggctgtgctgacacgccaggagacacacgcggaacgttcccgacgctcttcggtttgtttcaggagatgggacattttt

SEQ ID NO: 936951 - DNA, 120 bp, Artificial Sequence
  ENSG00000259577_11 (sequence is synthesized)
ctacaagagtcagtggatgtacttatgatagagaaagcaaaagaatcaagggtttgggacaccagggtgtgtgtcagggttagggatggacggctgtttccagcggggctgcagctcctc

SEQ ID NO: 936952 - DNA, 120 bp, Artificial Sequence
  ENSG00000259577_12 (sequence is synthesized)
ttgtaggtttgaagcagcacgtttttcagcttcacaggaaagaaagctgcttagcatgacaaatcatggcctgggcattaaagcctaaagtatttaaatttcaggaaattaaggaaagta

SEQ ID NO: 936953 - DNA, 120 bp, Artificial Sequence
  ENSG00000259577_13 (sequence is synthesized)
tacaagaattcgaatggggctttaggatttcaaaaatacttggctacgccaagaagtagaagtaccacataaatagcagtagtagaagtttccccaagttttttccttcaggataaatca

SEQ ID NO: 936954 - DNA, 120 bp, Artificial Sequence
  ENSG00000259577_14 (sequence is synthesized)
tccttatataaagaaaactaccaacagcgtactattatttatggaatcattataagcaagcaaagaattaaaaggcagatatctacatgattatatttccttggctttttaaacaatgtt

SEQ ID NO: 936955 - DNA, 120 bp, Artificial Sequence
  ENSG00000259577_15 (sequence is synthesized)
acacataatcacacattacacataccaagtttatgttttaaaaagtcttaatgttactataaatattttttggtcatccattctcttcttacctattatcggttggatattcttttccat

SEQ ID NO: 936956 - DNA, 120 bp, Artificial Sequence
  ENSG00000259577_16 (sequence is synthesized)
tatgataataaattgatgatatattcgtatagccacatcactgagaatctgtctgtattctgaaaggtcaaaattgttcaagcaattcttattctgctgtggactattatgcttcatgaa

SEQ ID NO: 936957 - DNA, 120 bp, Artificial Sequence
  ENSG00000259577_17 (sequence is synthesized)
aaatatacaaaaataaaactagttgctgggttctcagacggagtctctgcggcattaggaggcccacccttattttctcttttcttcacgcaggaatcaggtccctggcctgggggcggc

SEQ ID NO: 936958 - DNA, 120 bp, Artificial Sequence
  ENSG00000259577_18 (sequence is synthesized)
aatgagttcatgatgcttggggtagcatgtaccttctataagaaaaaaattgcactgatttcctgtatgatcacagtctatcacactgtcattgtcccacccacttccctacaaacattg

SEQ ID NO: 936959 - DNA, 120 bp, Artificial Sequence
  ENSG00000259577_19 (sequence is synthesized)
tccctggaacctatagactaaatggaaaagctcgtagaaggcccatggaagcgcataggaaaatgaaacaaaactgcagagcattcaaggaaacaaactgctatgaagaggtaagtggat

SEQ ID NO: 936960 - DNA, 120 bp, Artificial Sequence
  ENSG00000259577_20 (sequence is synthesized)
acaataaatgagattcataaccttataatttacagggtacaaagttgaaatattttaaagtgtgtgttatggattttatgtgtcttcctaaaaatcatacattgaagccctaacccccta

SEQ ID NO: 936961 - DNA, 120 bp, Artificial Sequence
  ENSG00000259577_21 (sequence is synthesized)
gtgtggctgtatttggagatggggcctttagggaggtaatgaggttaaatgaggtcatgaggatagggccgtgatctaataataagattgatgtccttataagaagagacaccagagaga

SEQ ID NO: 936962 - DNA, 120 bp, Artificial Sequence
  ENSG00000259577_22 (sequence is synthesized)
gcttgccctctctctccctcttcctgacccatgcacccaggaaaggtcctgtgaggacacagggatggagaaagtggctgtcagcaagccaggaagagagccctcaccaggaagtgacca

SEQ ID NO: 936963 - DNA, 120 bp, Artificial Sequence
  ENSG00000259577_23 (sequence is synthesized)
tgctggcaccctgatctcagatgtttagcctccagaactgtgaggaaacaaatctcttgtttaagccacccagcctgcggtattttgttatagtagcctgagtgaactaatggaatatgt

SEQ ID NO: 936964 - DNA, 120 bp, Artificial Sequence
  ENSG00000259577_24 (sequence is synthesized)
ttgttatagtagcctgagtgaactaatggaatatgtttaacatgttcaaagagactaaagaaaaagaaaaaattaagaatagaacattatagggctgggcgtggtggcttacgcctgtaa

SEQ ID NO: 936965 - DNA, 120 bp, Artificial Sequence
  ENSG00000259575_0 (sequence is synthesized)
cagcaatggcaatcccacccagtcataaccaagctttgtcgttccattgactaacatgggacctgacacatagtaagtgcacaagaatatttgatggatcaatgcaaggaggcgatatat

SEQ ID NO: 936966 - DNA, 120 bp, Artificial Sequence
  ENSG00000259575_1 (sequence is synthesized)
tctattatactgcccttaaacatttgaaactttcgaggaatagattttcttgcttcatcccagtcctccctcagctggctcatctttcacatattgattctaaactgcacgtcactagca

SEQ ID NO: 936967 - DNA, 120 bp, Artificial Sequence
  ENSG00000259575_2 (sequence is synthesized)
cctgagggcattcaccgaatgctcatgtaaaaggcagagagatatgggacagaacactgaagacaatctataacctggctcccaaggaactgagaccaatgagaagataaacacagctga

SEQ ID NO: 936968 - DNA, 120 bp, Artificial Sequence
  ENSG00000259575_3 (sequence is synthesized)
agtcgcaaaatgtgaatccaatgaggactataactaatgagagctaaaaccagagtgtgtttgctactaagaaaataataatggaaaagaccaattaataaagagatgttgtcaaacgcc

SEQ ID NO: 936969 - DNA, 120 bp, Artificial Sequence
  ENSG00000259579_0 (sequence is synthesized)
aagaggtgccatgcactccaggagaagagctgactggatcctatactcaaagaatgggccacggatccctacctgtccactgtttgttactgggctgggaagctgcaagacccgatgctg

SEQ ID NO: 936970 - DNA, 120 bp, Artificial Sequence
  ENSG00000259579_1 (sequence is synthesized)
gggagcccaccatgaaatctgtcccaaatcatggaaccccgaggtgaaaggcccccaggcatgccaacacatggcagacaaatccagttgtgtccagggatggcgttccctccagttttc

SEQ ID NO: 936971 - DNA, 120 bp, Artificial Sequence
  ENSG00000259579_2 (sequence is synthesized)
ggatgtgctccttaaaaatgagggagtaagccgagaaagaggaagatgtgggctctagaaaatggaatccaatgcagcaaaaggtaaaggggatttttagaatcacgaccaagagaactc

SEQ ID NO: 936972 - DNA, 120 bp, Artificial Sequence
  ENSG00000259579_3 (sequence is synthesized)
tgaggtcaacagctgtgcagcaggcctagagaatgatctgtgaagatgggtacaggaggaggagggactctaggtgggagggctctatcatgtggtggtactggtgtcagcccattggag

SEQ ID NO: 936973 - DNA, 120 bp, Artificial Sequence
  ENSG00000259579_4 (sequence is synthesized)
ccaattgttaaatatttgggaatgttgtaagccagtttttaaacacagtcattatttaaaaagtaaattataaaaggcttaatcatattagaaataaagatgataaatattccaaattca

SEQ ID NO: 936974 - DNA, 120 bp, Artificial Sequence
  ENSG00000258220_0 (sequence is synthesized)
aagctccctgctctcaggagaatctggcacagcaccatcaccaactcagagggagggaagcaaccttgagtcagctcccaggcagtaatgagtgttcaagggagatataactctaaggaa

SEQ ID NO: 936975 - DNA, 120 bp, Artificial Sequence
  ENSG00000258220_1 (sequence is synthesized)
aaggattgaggtcaaggaattagaagaaacagatggaagaatcatttgaaccatatccaggtcttttgaaaatgatgagacagaagagaaagcgaaaattgcttcagacagttttgctga

SEQ ID NO: 936976 - DNA, 120 bp, Artificial Sequence
  ENSG00000258220_2 (sequence is synthesized)
gaaatttgtctcagataaattttggagtaaggtcagagacctaagataagaaaacccctaggcagaggtgggaaaaaatagaaaaaagaaaacgaaaagagcaaatacattcttccttcc

SEQ ID NO: 936977 - DNA, 120 bp, Artificial Sequence
  ENSG00000258220_3 (sequence is synthesized)
tatcttccacttgccagagtagctttactaagatgctgcctgatcatttctctccagacacttttgccaatgatattaatactataaaggagcatttctggacttgattcattaatgatt

SEQ ID NO: 936978 - DNA, 120 bp, Artificial Sequence
  ENSG00000258220_4 (sequence is synthesized)
agaaagctcgtaacagattagatgaccaggctacagtctcacctgccaggcagtgcagctgcagatcttggctgaccatcatgtcagcacctactatgtgccagtcactgtgccaggagt

SEQ ID NO: 936979 - DNA, 120 bp, Artificial Sequence
  ENSG00000258220_5 (sequence is synthesized)
ggaacatcataaaacatgtttactgtcaagtccttgtcattatcaaaaatatctccagattgatgtcattctgagaaaagtgatttcatactgaaaaaaattctacaaaaatagtaaaac

SEQ ID NO: 936980 - DNA, 120 bp, Artificial Sequence
  ENSG00000258220_6 (sequence is synthesized)
tcttcttctcaattttcagaacttggatggggttgggggcaggtgctttcatctattttcatcttgtcctggtagaaattatttgcttgattaacattttggtggagaagttcagtctct

SEQ ID NO: 936981 - DNA, 120 bp, Artificial Sequence
  ENSG00000258220_7 (sequence is synthesized)
aaggctacagatgagaagatcagttactggatgggttcctaacttcaatgtcaaatccaagagcctgaaaataaaggatggaaagaaagggaaacaaagaaaagttatcagacaatgtga

SEQ ID NO: 936982 - DNA, 120 bp, Artificial Sequence
  ENSG00000258220_8 (sequence is synthesized)
agacattttatggagaggaagaaagagtgagtgagcacaggaaaaatcacaaagcagtatatgaagaaaagaaagagataacagttattagtaagtaaagagataattaagagataatcc

SEQ ID NO: 936983 - DNA, 120 bp, Artificial Sequence
  ENSG00000258220_9 (sequence is synthesized)
tttcagtggcatgaacaccatagtttgtgacatcactggtcattaatgatttgtgagaagcagtgtctcaactatgtttctgttacattaattatacccaaaataaaatatttgcacacc

SEQ ID NO: 936984 - DNA, 120 bp, Artificial Sequence
  ENSG00000258225_0 (sequence is synthesized)
gacacacagtgattttccagctcatactctcggattctgggctgagattttggggctgcctcctacgtaagccaacaagggcacactgcataagctgatgagcaataagtccagcacatc

SEQ ID NO: 936985 - DNA, 120 bp, Artificial Sequence
  ENSG00000258225_1 (sequence is synthesized)
ctgggtatcctcgcacaatcatccttgagctaagaccagcctcatcatctgctgatcagatcttagcatcttccgcacaggtcgtgtcacccttcaaacataagcttttcatgaatgaag

SEQ ID NO: 936986 - DNA, 120 bp, Artificial Sequence
  ENSG00000260172_0 (sequence is synthesized)
cggtactgagagcagccatcttggagcttggaaacggagacgcatgtgaagccgtttgcacagtatttttcccttaaaatatgggtggggaacaaggggctgtcatttgtctttttcttt

SEQ ID NO: 936987 - DNA, 120 bp, Artificial Sequence
  ENSG00000260172_1 (sequence is synthesized)
gggatggtgagcagtgagcagggcacgccgcgaggagcaaactgcagcccaagcacacgcggtcagcacgcggagcacaggtggggagaagcggctgacggtggcgtggccccgcgtacc

SEQ ID NO: 936988 - DNA, 120 bp, Artificial Sequence
  ENSG00000260172_2 (sequence is synthesized)
tgggtgtggacgccccgccgccccgcaggggaaagctcctggagtctggggtctgctgccccgagctctgggtgtccagcctctgcctcaactgaaatctgaagatcaggccaatttcgt

SEQ ID NO: 936989 - DNA, 120 bp, Artificial Sequence
  ENSG00000260172_3 (sequence is synthesized)
ggtctctcagacgtcggtaaacaagaggccttggctcctcaggagaccgagagtctctcactgtacttccttctcttggctccaaggacatagaacggttgctatggggattccttcatt

SEQ ID NO: 936990 - DNA, 120 bp, Artificial Sequence
  ENSG00000260172_4 (sequence is synthesized)
agtgaagaatggcctggagcactgggtctccgccccagctgcctgggagaaactgtgttgaaggagccataccccctggcctcccctccagactccagacaaccccagtcagctggctgg

SEQ ID NO: 936991 - DNA, 120 bp, Artificial Sequence
  ENSG00000260172_5 (sequence is synthesized)
gagggaggcagaagagaaacaggggtgcacctggggctcctgcaggggtccagccaggagatgggggcaacttggacagggacgatcctgggaagggcaggaggaggagtgagacctggc

SEQ ID NO: 936992 - DNA, 120 bp, Artificial Sequence
  ENSG00000260172_6 (sequence is synthesized)
ctgccctctccctagaggctcatcagctccctggagacagacacgccctggttcctttccctatgcctggagcctgggtaccagctattgaaaactgcttttctccttgttcattcaaac

SEQ ID NO: 936993 - DNA, 120 bp, Artificial Sequence
  ENSG00000260172_7 (sequence is synthesized)
atattcacacataaaggttgtcattcctttttgtcactatttgacaaaaattggatcataccgtatacaattctctgctatttgttttgctcacctaacaataaatacactgtgaaaaat

SEQ ID NO: 936994 - DNA, 120 bp, Artificial Sequence
  ENSG00000260171_0 (sequence is synthesized)
ggtaacgttgcatgtcccaccttatttgctcctcaccttatatagcaggattatcatccccactttgtagatgagaacactgaggcaagaggttaagtaacttaggtcgaagaacattgc

SEQ ID NO: 936995 - DNA, 120 bp, Artificial Sequence
  ENSG00000260171_1 (sequence is synthesized)
tggtgacagcatcggcatcaaagccaggtctgtgtgacattctctttactctgtcatagaacctccctacatagcccactctcctgactcctaacaagaactaatgattctgtcactcca

SEQ ID NO: 936996 - DNA, 120 bp, Artificial Sequence
  ENSG00000260171_2 (sequence is synthesized)
agaatagcatttccagagtgacacccatgaactgagcccacgctggcctgtacttagtggaaattattggccactttattgtgcttaagcatatgatgggcaactgaattaggtgactca

SEQ ID NO: 936997 - DNA, 120 bp, Artificial Sequence
  ENSG00000260171_3 (sequence is synthesized)
gggtattaaagctggaagggtctatatagatcatttagcatcactctactcatttttgaggtgagaacattaaaactggccagagtcacaccagtgagttgcactgctaaggactgaaca

SEQ ID NO: 936998 - DNA, 120 bp, Artificial Sequence
  ENSG00000260171_4 (sequence is synthesized)
taggtgctcttcctctgcagcacctctcagttttctctttccaaatcttttccaaatccagcttaaattccattgtgttcttacagcattccatgattttccaaatgagaattagtcatt

SEQ ID NO: 936999 - DNA, 120 bp, Artificial Sequence
  ENSG00000260171_5 (sequence is synthesized)
ctttgctctcagcttacattatactttaaacctctgttttagcacttcattccttctgctttatattaattttgtatgttggtcaccctttctaaactataaacctgttaagaacttatt

SEQ ID NO: 937000 - DNA, 120 bp, Artificial Sequence
  ENSG00000260171_6 (sequence is synthesized)
tttgtataaccttcaagtatctagttcattgttttgtccatactaggtgttcaacatgtacttattgaatgaataatgatttaacaatattttagcatttctttaattcaaatgtttcca

SEQ ID NO: 937001 - DNA, 120 bp, Artificial Sequence
  ENSG00000260171_7 (sequence is synthesized)
tcaaaagttatctctctctaggctggaaaataagcaaaactgtgctgatttctctgtatttgttcttttcatattgtgcttttttggtttgtttccctatttgaagcatcctccagtaga

SEQ ID NO: 937002 - DNA, 120 bp, Artificial Sequence
  ENSG00000260171_8 (sequence is synthesized)
atgcaagatctgcataaacaaacttatttacatttgcccctgccatccctaaggctcagcattgtttctgatacagagccagtacccaaacacccaataaatgataaacaagtgaatgaa

SEQ ID NO: 937003 - DNA, 120 bp, Artificial Sequence; identical to SEQ ID NO: 846022
  ENSG00000260176_0 (sequence is synthesized)

SEQ ID NO: 937004 - DNA, 120 bp, Artificial Sequence; identical to SEQ ID NO: 846023
  ENSG00000260176_1 (sequence is synthesized)

SEQ ID NO: 937005 - DNA, 120 bp, Artificial Sequence; identical to SEQ ID NO: 846024
  ENSG00000260176_2 (sequence is synthesized)

SEQ ID NO: 937006 - DNA, 120 bp, Artificial Sequence; identical to SEQ ID NO: 846025
  ENSG00000260176_3 (sequence is synthesized)

SEQ ID NO: 937007 - DNA, 120 bp, Artificial Sequence
  ENSG00000260177_0 (sequence is synthesized)
cgggtgtctgcgcagaacacggctcctttgagagaactgtcggtgccacttttgtttccgacacatgtatgcgtatgtctgtggatttctgaacgaagcagagctcagctcttgccctct

SEQ ID NO: 937008 - DNA, 120 bp, Artificial Sequence
  ENSG00000260177_1 (sequence is synthesized)
cacatcctttgaagatgaccaccttgaagattaggatgaaaagcaaaccctcggctcctggcctgagctcttggcaatcatgtctctcaccaggcaggaagcaaaagaagattgtttctg

SEQ ID NO: 937009 - DNA, 120 bp, Artificial Sequence
  ENSG00000260177_2 (sequence is synthesized)
cactcatttgttttcagaacagtggagcaaacagtcatttactggtctccatagacactgaagagacaccaggtggcggtgactctgcgggttgcaaatgtccccagcgtcagattcata

SEQ ID NO: 937010 - DNA, 120 bp, Artificial Sequence
  ENSG00000260177_3 (sequence is synthesized)
ggagagctgggcagaacaccttggtggggtctcagggctccagcggtgaccactgctgggtcggaccagcaaatggaaaggagcccacgtgtgctctctgtggcccgggcggtaaagagg

SEQ ID NO: 937011 - DNA, 120 bp, Artificial Sequence
  ENSG00000260177_4 (sequence is synthesized)
aggtggatcccggggctgtgggtgagagcagtgggaataccaggtactatttcttccctccattaatcctcccaaaagattgctatgtctgcaccaaagtccctgcttaaaactttggaa

SEQ ID NO: 937012 - DNA, 64 bp, Artificial Sequence
  ENSG00000260177_5 (sequence is synthesized)
tgctatgtctgcaccaaagtccctgcttaaaactttggaacaagaatgtagcttcaaccggatc

SEQ ID NO: 937013 - DNA, 120 bp, Artificial Sequence
  ENSG00000260179_0 (sequence is synthesized)
ggcacgtctgaccctctgtccccgtctcccttagaggaatcgtgggcccctctgttcttgtgttgtcaccggtggaggccgtccttgacttccccctgggagcacggtgtgtcccctcgc

SEQ ID NO: 937014 - DNA, 120 bp, Artificial Sequence
  ENSG00000260179_1 (sequence is synthesized)
catgcagagcacactgtgaagtcttttaatgaggagagaaaagccccttaaaagttgatattctgcagacaggtgagcacgtggcctcgtggtcacaggaaagaagaggcgtttcctgtg

SEQ ID NO: 937015 - DNA, 120 bp, Artificial Sequence
  ENSG00000260179_2 (sequence is synthesized)
ttctggcaacctcgagcttctctgtgagcgcatgcccaggcctgcctgagtgctgatgaaccagccggcacagcagagcactccgggtctgagggagctgctctccctgcagcaggcggc

SEQ ID NO: 937016 - DNA, 120 bp, Artificial Sequence
  ENSG00000260179_3 (sequence is synthesized)
tgggcagggcaccgtggtcctttgccatttttccagggccggggggtgtcagggtgtctgcgttggggggtgcagggggtgagcagagccagcagctgcacctgagcctccccttgtgag

SEQ ID NO: 937017 - DNA, 120 bp, Artificial Sequence
  ENSG00000260179_4 (sequence is synthesized)
cagctcgtggctgtggcccagggtaccctggatccttggtgggtgacccagagggtggggtcctcttggtcgtcttctagagggagcatgggggctgagtgttcctgcctgggtgccagg

SEQ ID NO: 937018 - DNA, 120 bp, Artificial Sequence
  ENSG00000260179_5 (sequence is synthesized)
ctcagctcattttaaaggtgcctggggttgggaacacgaagccacatccttcccagttaggcccagcctcccagggtgagggcagcaagtcacccaggtgccgagggaagagaccgaggg

SEQ ID NO: 937019 - DNA, 75 bp, Artificial Sequence
  ENSG00000260179_6 (sequence is synthesized)
gtagtaattactaggaaaaaccaggccataccgagataggagctgaggggacatggtgagaagtgaccagaagac

SEQ ID NO: 937020 - DNA, 120 bp, Artificial Sequence
  ENSG00000260179_7 (sequence is synthesized)
accagagggctccttggtctagcagtaacgccagcgcctgggaaggcacccgtgacctaagcagaccgtggtctagcggtagcgtcagtgtcaagggaaaacacccgctacttagcagac

SEQ ID NO: 937021 - DNA, 89 bp, Artificial Sequence
  ENSG00000260179_8 (sequence is synthesized)
caggcccacccacagttatccgaaggcctaaccgtctccctatgatgctgtgcttcagcggtcacactcctagtccgccttcacgttcc

SEQ ID NO: 937022 - DNA, 120 bp, Artificial Sequence
  ENSG00000260179_9 (sequence is synthesized)
agttatccgaaggcctaaccgtctccctatgatgctgtgcttcagcggtcacactcctagtccgccttcacgttccatcctgtacacctggctttgccttttagataacagtagcaaaat

SEQ ID NO: 937023 - DNA, 120 bp, Artificial Sequence
  ENSG00000260179_10 (sequence is synthesized)
aatggcgtaagctgtctctctctctccctggcccctgccttggctgccaaacagggaagggcccccgtccagtggacacgtgacccacgtgactttacctatcactggagatggctcacg

SEQ ID NO: 937024 - DNA, 85 bp, Artificial Sequence
  ENSG00000260179_11 (sequence is synthesized)
agatggctcacgctcacagcgcagcctggcattcggggccactaccggtctccacatcttggtggtagtggtcccccgggcccag

SEQ ID NO: 937025 - DNA, 120 bp, Artificial Sequence
  ENSG00000234880_0 (sequence is synthesized)
ctcaccctcgatggtgccctcgacctgtcctccctcagcagcctgtggcatccagaccagttcgtggcccctaggaggggaaactgagtcccagccccagggtcctccctcggcttcact

SEQ ID NO: 937026 - DNA, 120 bp, Artificial Sequence
  ENSG00000234880_1 (sequence is synthesized)
gggtgccccatggaggagacagccagggtgtgtcacctgacaggctcaccagaaccagcacagcagctgctgagttttggctcccggaccctggagcccctgctgccgaggctggggatg

SEQ ID NO: 937027 - DNA, 120 bp, Artificial Sequence
  ENSG00000234880_2 (sequence is synthesized)
gcggctccagaggtcattcctcccccggaagacacacgctggccttgggccaggggaccctcagcgacggggtcaccccaatgttctggaggctgcggttctgcttcctcctggggctga

SEQ ID NO: 937028 - DNA, 120 bp, Artificial Sequence
  ENSG00000234880_3 (sequence is synthesized)
gctgagcaagctctagctctcgggccgagcgcaaggagggcaggagtgatgtctccaactgtgctgaggtctgccctgggtgcaagggccctgtgttttcagcgctgccgtgtggcccat

SEQ ID NO: 937029 - DNA, 120 bp, Artificial Sequence
  ENSG00000234880_4 (sequence is synthesized)
ggatgccccaggcccctggacagttgatgcctggggtccacactcctggacagggctctggacagttgatgcctggggtccacactcctggacaggcccccggacagttgattcctgggg

SEQ ID NO: 937030 - DNA, 120 bp, Artificial Sequence
  ENSG00000234880_5 (sequence is synthesized)
tccacactcctggacagggctctggtcagttgatgcctggggtccacactcctggacagggctctggtcagttgatgcctggggtccacactcctggacaggcccctggacagttgatgc

SEQ ID NO: 937031 - DNA, 120 bp, Artificial Sequence
  ENSG00000234880_6 (sequence is synthesized)
ctggggtccacactcctggacagggctgaggaggtggtgtccccagacttgccccagcacagctgtggggggcacccggacacccgccccggcctcagtctcccatcccagctggccctg

SEQ ID NO: 937032 - DNA, 120 bp, Artificial Sequence
  ENSG00000234880_7 (sequence is synthesized)
acacgggtgcatgtgatgccctcctggtcttggcctctcagacccagctcagccacggccatccagacccttgggctccggtgtcttcccaaagctctgagaagcacccccttggggcag

SEQ ID NO: 937033 - DNA, 120 bp, Artificial Sequence
  ENSG00000234880_8 (sequence is synthesized)
ggcaccggcagtgctgtggaaggcccatggggcggctcagtggtccccagggacctcagccttcgggaaagtgcagcagagacctcaaggccccccacgctcagctaacgttgccctcgc

SEQ ID NO: 937034 - DNA, 120 bp, Artificial Sequence
  ENSG00000234880_9 (sequence is synthesized)
tcatccagagcacagcccgagctgcaggagggccaggagggcagatgctccacagctcggacagcatccataagacccgcgtggagaaaatagcaaaggccagtgtggaacggagaggac

SEQ ID NO: 937035 - DNA, 120 bp, Artificial Sequence
  ENSG00000234880_10 (sequence is synthesized)
gtgaacggcgagtgctcggagaacaagcacgccagcagcgaacccagggggaccagcccgacagccagtgcgctgagacaccggccaacggcaacgccccatcctcaccgcgaacgccac

SEQ ID NO: 937036 - DNA, 120 bp, Artificial Sequence
  ENSG00000234880_11 (sequence is synthesized)
tgtgacgcgctgacagtggatgcgaatgcgtgacacagacagcgagtgccagtgtgaccgtcacggctgatgctgagcactgcaccgacacaccacagaatctgcaggcccagggctcag

SEQ ID NO: 937037 - DNA, 120 bp, Artificial Sequence
  ENSG00000234880_12 (sequence is synthesized)
ctcctgcttgcggggcgcaggccggccccaccgtccgacgtacagaccagcatgggcaccttaggcctctccaccctcctctgcccagagcctgccaccatccgtgttacacaagagcca

SEQ ID NO: 937038 - DNA, 120 bp, Artificial Sequence
  ENSG00000234880_13 (sequence is synthesized)
ggtgctgcacagagaggccacgtgccttgccccaggctgccagctccagagaatggtccggggacgccatggtcatccggccccaggactgctcctgaccctcctgggacggatcctccg

SEQ ID NO: 937039 - DNA, 120 bp, Artificial Sequence
  ENSG00000234880_14 (sequence is synthesized)
ggcagagaggggacgccgtggtcatccggccccagggctgctcctgaccctcctgggacggatcctccgggcagagagggaatgaatcacattccggatggtggcttcaggtcagaaagc

SEQ ID NO: 937040 - DNA, 120 bp, Artificial Sequence
  ENSG00000234880_15 (sequence is synthesized)
tgtcaggtcacccaggtgccatgcgagctgctccccggagacggctttcggccttgggtttatcacagcggctgttttccgtctgccaagccaagcctggctttcatctcccctcgcaca

SEQ ID NO: 937041 - DNA, 120 bp, Artificial Sequence
  ENSG00000234880_16 (sequence is synthesized)
acggtctgcttcctcagcctctgggcttatagtggttttcttttctactgtctgaaattgaatgtttagttcatctattttctattctctcatttataataaaaacatttcagatgagaa

SEQ ID NO: 937042 - DNA, 120 bp, Artificial Sequence
  ENSG00000176320_0 (sequence is synthesized)
acctgcagtaacagctgttcatctgttgggacccttatcttaactcaccactttcagaagagcagacaaactcaatttggtacttacggagtttcgctcttattgcccagactagagtgc

SEQ ID NO: 937043 - DNA, 69 bp, Artificial Sequence
  ENSG00000176320_1 (sequence is synthesized)
gtgaggctggtctcgaactcctgaccttgttatccgcccgcctaaagcctaatgtctttgatcttatca

SEQ ID NO: 937044 - DNA, 120 bp, Artificial Sequence
  ENSG00000176320_2 (sequence is synthesized)
gcctccaaagcctaatgtctttgatcttatcaatgttcaatcctggagcctagtgtgtcttggacctgcgttttaccttttgaatcagtaggagcagaactctgttcccaggcaccacaa

SEQ ID NO: 937045 - DNA, 63 bp, Artificial Sequence
  ENSG00000176320_3 (sequence is synthesized)
tgaatcagtaggagcagaactctgttcccaggcaccacaagaatacgtaagactagaaagttg

SEQ ID NO: 937046 - DNA, 120 bp, Artificial Sequence
  ENSG00000176320_4 (sequence is synthesized)
gcctgtttctgctttttagcctcaccctattctcagtaaaatgggaatgggacgccagaaagcatttctgagttaagtatattattgctgcatttgggagtcttctagactccagtgtcc

SEQ ID NO: 937047 - DNA, 120 bp, Artificial Sequence
  ENSG00000176320_5 (sequence is synthesized)
ctgccactgcttaacggtcactcacaaagggctcccctctctgaaaattagtccttctggacttttcttgcaactaccattcttcagtagtttcataaatgagtaagagttttataacat

SEQ ID NO: 937048 - DNA, 120 bp, Artificial Sequence
  ENSG00000176320_6 (sequence is synthesized)
ctgaggggtgggggtttttttatgttaccataggagcaaatgtgttccacatcctttcacacgctacacagaaaattgtatgttgtgtttaaatcatagccaaattgcaaagaaaattat

SEQ ID NO: 937049 - DNA, 120 bp, Artificial Sequence
  ENSG00000176320_7 (sequence is synthesized)
ggtttctttattttgttcataactgatctaatctttctcataattatctccttctaggttgaaaggattataaaatgtaattatgtttaaaattccatgtgatctaaaattccatcattc

SEQ ID NO: 937050 - DNA, 120 bp, Artificial Sequence
  ENSG00000176320_8 (sequence is synthesized)
tatcatgagcccaggagctcctgctacataaaacatatgctaatcaataaatgtgatacatcacatcaacagaataaaaaacaaaaaaaaccatatgatcatctccatagatgcagaaaa

SEQ ID NO: 937051 - DNA, 120 bp, Artificial Sequence
  ENSG00000176320_9 (sequence is synthesized)
agcatttgataaaattcaatatcccttcataataaatactggcaacaaattaggcatagaaggaacatatttccacataacaaaggccatatatgacaaacccacagctaacattatact

SEQ ID NO: 937052 - DNA, 120 bp, Artificial Sequence
  ENSG00000176320_10 (sequence is synthesized)
gaatggggagaagctgaatgcctttcttccaagaactggaacaaaacaaatatgctctctttcaccactcttattcaacacagtgctagaagttctgtctaaagcaatcaggcaagagaa

SEQ ID NO: 937053 - DNA, 120 bp, Artificial Sequence
  ENSG00000176320_11 (sequence is synthesized)
agaaataaaggttttccgaattagaaaagaggaagtctaattgccccctctttgaagattacatgatcttatatctagaaaaatgtagagactccaccaaaaactctcagaactgatcaa

SEQ ID NO: 937054 - DNA, 120 bp, Artificial Sequence
  ENSG00000176320_12 (sequence is synthesized)
cacagtaaagttgcaagatacaaaatcagtcaacatgcaaaagtcagaagcatttctatacaccaacaacatggtagctgaaaaagaaatcaagaaagcaatcccatttataatagctac

SEQ ID NO: 937055 - DNA, 120 bp, Artificial Sequence
  ENSG00000234840_0 (sequence is synthesized)
attcactgatgagaagatctccatagctacctgtgtgagtcacatgtcagtgcaatttctggaggtcaattgtagccctgaagtctcagaacaatggcaaaaagaaatacggagggcatg

SEQ ID NO: 937056 - DNA, 120 bp, Artificial Sequence
  ENSG00000234840_1 (sequence is synthesized)
gcaaaaagaaatacggagggcatgatacatttgttttagtggaacttccacatcttcaggtgagacctctagacagtaaccaccaaatgattgtgagaggtgaagccagctggacttcct

SEQ ID NO: 937057 - DNA, 82 bp, Artificial Sequence
  ENSG00000234840_2 (sequence is synthesized)
gctggacttcctgggtcaagtggggagttggagaacttttctgtctggctagaggattataaatgcaccaatcagcactctg

SEQ ID NO: 937058 - DNA, 86 bp, Artificial Sequence
  ENSG00000234840_3 (sequence is synthesized)
aataaaagctggccacgcaagctagcagcggcaatcctctcgggtagccttccgctctgtggaagctttgttcttttgctgttcat

SEQ ID NO: 937059 - DNA, 120 bp, Artificial Sequence
  ENSG00000234840_4 (sequence is synthesized)
cggcttcattcctgaagtctgcgagaccaggaacccaccgggaggaacaaacaactctggacacaccacctttaagagctgtgacaatcacttgcgaaagtctgcaacttcactcctgaa

SEQ ID NO: 937060 - DNA, 120 bp, Artificial Sequence
  ENSG00000234840_5 (sequence is synthesized)
tgaagtcagcaagaccgtgaacccaccagaaggaagaaactcgggacacatctgaatatctgaaggagaaaacactccagacacaccgtccttaagaactgtaacactcactgcgagggt

SEQ ID NO: 937061 - DNA, 120 bp, Artificial Sequence
  ENSG00000234840_6 (sequence is synthesized)
agaacccaccggaaggaaccaattctggagacaattggagctttgaaaactatttaactaaattatagtgggttcagtataaaagattgttttcttccctcccttctctttttttttttc

SEQ ID NO: 937062 - DNA, 120 bp, Artificial Sequence
  ENSG00000234840_7 (sequence is synthesized)
tcttccctcccttctctttttttttttccttattcctatcctgctatagtattttctgccatgttatgcacgtacatttaaaaaattactcaccaatccaataaaaaacatactgctgcc

SEQ ID NO: 937063 - DNA, 120 bp, Artificial Sequence
  ENSG00000234840_8 (sequence is synthesized)
cttttattttctgttcctctaagggaagagagaccaaagagaattctactttgaccctggcttaagagtggaacatagatgtctataaaactatgtggtaccagcatgttatgaagaata

SEQ ID NO: 937064 - DNA, 120 bp, Artificial Sequence
  ENSG00000234840_9 (sequence is synthesized)
agcaagaagaaagagaaggagaagaagcaggaggaggaggagagaaggaaagggaggaggaggaggagaaaaagatggtggtagaggaggaggagaagaagaagaaggaggagaaggaga

SEQ ID NO: 937065 - DNA, 120 bp, Artificial Sequence
  ENSG00000234840_10 (sequence is synthesized)
aggagaagaaggagcaggaggaggaggaagaagaagaagaggagaagggaactcacatgctacctgtgtgagtcacatgtcagtgcaatttctggaggtcaattgtagccctgaagtctc

SEQ ID NO: 937066 - DNA, 120 bp, Artificial Sequence
  ENSG00000234840_11 (sequence is synthesized)
agaacaatggcaaaaagaaatacggagggcatgatacatttggcagactaaaattctcaagattcctatgcagtcgagttttaccatatgactgagttccaacaaagaaatatgagtaga

SEQ ID NO: 937067 - DNA, 80 bp, Artificial Sequence
  ENSG00000234840_12 (sequence is synthesized)
ttaccatatgactgagttccaacaaagaaatatgagtagaagattgtataagcatcatttttgacccagggctttaagaa

SEQ ID NO: 937068 - DNA, 120 bp, Artificial Sequence
  ENSG00000234840_13 (sequence is synthesized)
cagagacaactctcaaaacatcagcaacacatttggcgcgggaactgctaatgaacgtacagtggagtggtggttcaagaagttttgcgaaggaaacgagaggcttgaagacgaagagtg

SEQ ID NO: 937069 - DNA, 120 bp, Artificial Sequence
  ENSG00000234840_14 (sequence is synthesized)
tagtggccagccattggaagtagacaacgacaaattgagagcaatcattgaagctgatcctcttacaactacaggagaagttgccaaggaactcaccatcaatcattctatagtagtttg

SEQ ID NO: 937070 - DNA, 120 bp, Artificial Sequence
  ENSG00000234840_15 (sequence is synthesized)
gcatttgaagcagatcggaaaggtgaaaaagcttgataagtgaatgcctcatgaacagagcaaaaattttaaaacattgttgttttgaagtgacgtcttctcttattttacacaacaatg

SEQ ID NO: 937071 - DNA, 120 bp, Artificial Sequence
  ENSG00000234840_16 (sequence is synthesized)
aaccatttctggatcgaattatgacatgtgatgaaaagtggattttatatgacaagctgcaaaaaccagctcagtggttggatggagaagaagcttcaaagcacttcccaaagctgaact

SEQ ID NO: 937072 - DNA, 120 bp, Artificial Sequence
  ENSG00000234840_17 (sequence is synthesized)
gaatcccagcgaaaccattatgtctgagaaatatgctcagcaaatcgatgagatgtgccaaaaacttcaaggcctgcagccggcattggtcaaccaaaaggatccaattcttctctacca

SEQ ID NO: 937073 - DNA, 120 bp, Artificial Sequence
  ENSG00000234840_18 (sequence is synthesized)
caacgcctgaccacatgtcacataaccaacccttcaaaagttgaataaattggtctacaaaattgccttatctgccatattcacctgacctctcaccaaccaactaccacttcttcagtt

SEQ ID NO: 937074 - DNA, 82 bp, Artificial Sequence
  ENSG00000234840_19 (sequence is synthesized)
tcacctgacctctcaccaaccaactaccacttcttcagtttgtctcttccagaatcaaagctataaaactacaaatggttct

SEQ ID NO: 937075 - DNA, 120 bp, Artificial Sequence
  ENSG00000234840_20 (sequence is synthesized)
attaatgacatcaaaggcacccctcccgaggaaatctcaactgcatgacacctactacgccccaattcagcaggaagcagttagagtggtcgttggccaacctccccaacagcacttggg

SEQ ID NO: 937076 - DNA, 77 bp, Artificial Sequence
  ENSG00000234840_21 (sequence is synthesized)
gtcatctatcgcctgacagcacaaggggcgggacaatgatcaggatataaactcaggcattcaagccagcaatggct

SEQ ID NO: 937077 - DNA, 84 bp, Artificial Sequence
  ENSG00000234840_22 (sequence is synthesized)
ccagtcatctatcgcctgacagcacaaggggcgggacaatgatcaggatataaactcaggcattcaagccagcaatggctaccc

SEQ ID NO: 937078 - DNA, 120 bp, Artificial Sequence
  ENSG00000234840_23 (sequence is synthesized)
aagaaaagaaaaacaattaacttttttatatatcagttaaattcatccatgatgttttttatgttttctgtattcttactggtcatttttctatttgttctatcaagtatccaggaatat

SEQ ID NO: 937079 - DNA, 120 bp, Artificial Sequence
  ENSG00000234840_24 (sequence is synthesized)
gtgttaaagatgtccacttcaattgtgaatttcttgagttgttctttcagttttgttctttttttaccttatgcattttgaagttgtattatttcctgcatacaaatgtagaattgtggt

SEQ ID NO: 937080 - DNA, 120 bp, Artificial Sequence
  ENSG00000234840_25 (sequence is synthesized)
gtcattcttttggagtaaaccatgatcattactggcatgacttacttacttactatctatctagacatgttgattgcttcaatttctactttaatcttaataaaaatacaccaacttttt

SEQ ID NO: 937081 - DNA, 120 bp, Artificial Sequence
  ENSG00000234840_26 (sequence is synthesized)
gaagttgtgagagggagggattaaaattaggcaactattttacaaaacaatacttgcgtgtcactttgctcagtaatgtctttttagccatgtggatttttagttcatcaagtctaattc

SEQ ID NO: 937082 - DNA, 89 bp, Artificial Sequence
  ENSG00000234848_0 (sequence is synthesized)
tacgcttgatgcaccactacctttctaacctcacaccctcacctgtttacccctacgtcctcaagatgtgggctcccagagctcagggc

SEQ ID NO: 937083 - DNA, 120 bp, Artificial Sequence
  ENSG00000234848_1 (sequence is synthesized)
cttcgcagcatccataccagcgttggccccctggacccaccttatgcactcttaacttgtcttttctcattcctttgactacgctggagtttgtagcccccacggcctggtgttgggtct

SEQ ID NO: 937084 - DNA, 120 bp, Artificial Sequence
  ENSG00000234848_2 (sequence is synthesized)
gacacccaaggacgactgaaagaagcttggtggaattcatataaagttgcgagtttcaggttggttggctctgactgatcacctgtattatggaccatctgtgtgattatggggaaaagt

SEQ ID NO: 937085 - DNA, 120 bp, Artificial Sequence
  ENSG00000234848_3 (sequence is synthesized)
tcaggacaccagcaacctacattggataggaccacctctgactccagggattgccactcaatctttctgagattagcacccacatccaacaaggtgtgatcctggtgatctttgaaaaaa

SEQ ID NO: 937086 - DNA, 120 bp, Artificial Sequence
  ENSG00000234848_4 (sequence is synthesized)
aggcactgaaacaaccatgatttaagtttttggtattatgaatgcatgagaaattttctgggaaaaaatcataactatattaagaataaaaaataaaaaattcctaaggaaaatacttga

SEQ ID NO: 937087 - DNA, 120 bp, Artificial Sequence
  ENSG00000267992_0 (sequence is synthesized)
aggcaaggagcatctcattcattcacagacaagactgagctgggccaaaggtctctgtactggatctcatcttctgtcttccaatccacatccttttgggcatgagcagaaagactgagt

SEQ ID NO: 937088 - DNA, 64 bp, Artificial Sequence
  ENSG00000267992_1 (sequence is synthesized)
ggagtgtagtggtgggactacaggtgtgcactaccaggcccggctaattttttttttgtatttt

SEQ ID NO: 937089 - DNA, 120 bp, Artificial Sequence
  ENSG00000267992_2 (sequence is synthesized)
cataaaaaggccatgtcacatgcagtcagtgcttagcaaggggctattttaatcgtcacactcaccagtcagagacacaaatctcaatcctgccactatccagcagttctggccacagac

SEQ ID NO: 937090 - DNA, 120 bp, Artificial Sequence
  ENSG00000267992_3 (sequence is synthesized)
cctcctcctctaggtccaagacctgcttcttgcaacaccagctgggaatgcaggagacagggtaatgagaacaggcaggcctttctcaacaaggggccggacctttggatagcaggggca

SEQ ID NO: 937091 - DNA, 120 bp, Artificial Sequence
  ENSG00000267992_4 (sequence is synthesized)
ttcacctgaatgaagtcacgaagcacgtctgagaaggggccccaggcacggttgtcctgttttcctccaccacccagccgtccccaccgtgttgcaccatccactttcggaggccttctg

SEQ ID NO: 937092 - DNA, 88 bp, Artificial Sequence
  ENSG00000239381_0 (sequence is synthesized)
acccctcgctcgacttcccgcagaaaccctcccaccttccagcttcgccatgctctgtaattccttctctcaggcagctcactgcaga

SEQ ID NO: 937093 - DNA, 90 bp, Artificial Sequence
  ENSG00000239381_1 (sequence is synthesized)
caggctggagtgcactggcatgatcacagctcactgcagactcgatctttcccaagtagctgcgactacaggcacatgccaccacacctg

SEQ ID NO: 937094 - DNA, 89 bp, Artificial Sequence
  ENSG00000239381_2 (sequence is synthesized)
ctcctgtcccagcctacactctgggctctacatgcttatttcaacaaggcagtggtatatggaaagagtatggacctgaggaatcaggg

SEQ ID NO: 937095 - DNA, 120 bp, Artificial Sequence
  ENSG00000239381_3 (sequence is synthesized)
cagtggtatatggaaagagtatggacctgaggaatcagggtaacattcttgttatgtagaacacacaggacttcctattatgatgaatgacaacttccattgattgagcagctcccatac

SEQ ID NO: 937096 - DNA, 120 bp, Artificial Sequence
  ENSG00000239381_4 (sequence is synthesized)
accaaacacagtgctaggcctttaaaagcatgaacacatttcatcattatcatcatccttagttctgagcagaagggaaaacgaggcttgaagataagacctggagaagggagaaatacg

SEQ ID NO: 937097 - DNA, 120 bp, Artificial Sequence
  ENSG00000239381_5 (sequence is synthesized)
aatatcccagagaattcagctcagcactgattcacagaactcacatgtgacacatccatgatgaaaaatgcagacggtgtctccctctgtcgccaggctggagtacaatggcacaatctc

SEQ ID NO: 937098 - DNA, 120 bp, Artificial Sequence
  ENSG00000239381_6 (sequence is synthesized)
ttcccctgcctcagcctcctgagtagctagtagcagctgccaaaggtcatctgacataatagctgatgaattcaagcccagtggatttcatttgcaattttcaatttactgaggcctcca

SEQ ID NO: 937099 - DNA, 120 bp, Artificial Sequence
  ENSG00000239381_7 (sequence is synthesized)
ctgaggcctccaaaccccacggtgataaaagcttcccctatcgtggcctgtcacaaacatcaagaaactgcacaaacccacaagaaagaaaaaagagaaagctgtgcatcatcacagcta

SEQ ID NO: 937100 - DNA, 120 bp, Artificial Sequence
  ENSG00000239381_8 (sequence is synthesized)
tagataaggagaacaggaagaaatggtatcatgcaggaagatggggagcagcctgtgtggctagttctctaaatgccaattgaaacgaaaagactatgaggaacaatcaaataacttcca

SEQ ID NO: 937101 - DNA, 120 bp, Artificial Sequence
  ENSG00000239381_9 (sequence is synthesized)
cagaataacaacatgtttctttggagcttttatgtgaaaattgccttctaatctctgacttgacatgctcccacacaaaaatgtaagtgtaaatatgcaaataaataaatgaataaataa

SEQ ID NO: 937102 - DNA, 120 bp, Artificial Sequence
  ENSG00000239381_10 (sequence is synthesized)
ttttcagattgctcctgtgtttcatagatgggaaatcatactgatgactcaaccatatatagcattattttgctggttcatgctacctcagcggaaacagctgccaaaggtcatctgaca

SEQ ID NO: 937103 - DNA, 120 bp, Artificial Sequence
  ENSG00000239381_11 (sequence is synthesized)
ctgacatagcaactacttgtaagtggatctagatgtagtacatatcaaagatgcattagcaagaagaagaaagccatttttccccctgtcaaactatttacaatgaacttaggcaggatc

SEQ ID NO: 937104 - DNA, 120 bp, Artificial Sequence
  ENSG00000239381_12 (sequence is synthesized)
gggaactgaatcctgttcccaggcagttgttcaaattgagcaaaccatatgtgtgtttcttggagaatagcaagtttgataactcagcaggtcacctttgtcctatcctacttgactcat

SEQ ID NO: 937105 - DNA, 120 bp, Artificial Sequence
  ENSG00000239381_13 (sequence is synthesized)
attgctcctgtgtttcatagatgggaaatcatactgatgactcaaccatatatagcattattttgctggttcatgctacctcagcggaaactgccaaaggtcatctgacataatagctga

SEQ ID NO: 937106 - DNA, 120 bp, Artificial Sequence
  ENSG00000236572_0 (sequence is synthesized)
tttattattattattagtttaatgtttgcatgatggcttgcatatttttgaaacaagttatttagtataaacattaggcagtttatatttactgtatttactgtttgctttatcaacagg

SEQ ID NO: 937107 - DNA, 120 bp, Artificial Sequence
  ENSG00000236572_1 (sequence is synthesized)
agttcgctgacgttactctcaaaatactttcaggtaattgttgtcaaacaagagttgacaatttgcattttcttgattactaatggtgagtattttttctttttattttattttatttat

SEQ ID NO: 937108 - DNA, 120 bp, Artificial Sequence
  ENSG00000236572_2 (sequence is synthesized)
ttttatttttaattttttttgagatggcgtctccctctgtcacctaggctgggttaggttatttgccagacaaacaataatgacaaataaccttggaaaagaaagtatgttaatatctct

SEQ ID NO: 937109 - DNA, 120 bp, Artificial Sequence
  ENSG00000224671_0 (sequence is synthesized)
catcccatctgcattcagacttaatgacctagcacataactgcaagtacctgaagggcgaagacgaagtctggttcaaaatcatcttcctagcacctaccacagtacctggcacacacct

SEQ ID NO: 937110 - DNA, 120 bp, Artificial Sequence
  ENSG00000224671_1 (sequence is synthesized)
tcagagccaactcgcccctgaacaatgaagccattctccctcctgttccaagagcactgcctcacagacagctccgcagtggggattggaatggcgcccatcctataaactgagacccgc

SEQ ID NO: 937111 - DNA, 120 bp, Artificial Sequence
  ENSG00000256013_0 (sequence is synthesized)
ggcacaggtggatgtgggcactgaatgttgtacagcagtggcaaccagccgggaaaatccataggatcatttcagaccgcattcaacacagatactcatgtagccccgacgtttcttgtg

SEQ ID NO: 937112 - DNA, 120 bp, Artificial Sequence
  ENSG00000256013_1 (sequence is synthesized)
tgtgaagggaattgatgtattgcttgagggggtcgatctctggttctaaggtgttttgtttgtttccatcgtgactaccagaaaattatagaaggccagacgcagtggctcatgcctgta

SEQ ID NO: 937113 - DNA, 120 bp, Artificial Sequence
  ENSG00000256013_2 (sequence is synthesized)
gtagcatgaagggctggacaagaagggagaggccttctgggataagatgggaaggaggctgtaccccacaccctgaaggtgtctatgagttcacatggctcaggaatggagttttggggc

SEQ ID NO: 937114 - DNA, 120 bp, Artificial Sequence
  ENSG00000256013_3 (sequence is synthesized)
cctagatgtagacagctgtggcgatggaggccaaggttttggcctgctgtgggggttgcattcacctccccatctccacatgacgataccccagcatttacgaggcagctctgctgacct

SEQ ID NO: 937115 - DNA, 120 bp, Artificial Sequence
  ENSG00000224675_0 (sequence is synthesized)
agacgaaagcacagttctgagcatgagagctcacattctgtttctaccaggtgctgaagaaaagcaagacaggtggttaagactgaagagttgatcctgcgctgtgctgtggagtgggca

SEQ ID NO: 937116 - DNA, 120 bp, Artificial Sequence
  ENSG00000224675_1 (sequence is synthesized)
gctgtgctgtggagtgggcagcttctctccatcttctctcaccctgacacactgtcttaggattccagtctcagaagccagtcttgaggctgaagtgcagtggtgtgatcctggctcact

SEQ ID NO: 937117 - DNA, 120 bp, Artificial Sequence
  ENSG00000224675_2 (sequence is synthesized)
tcaagcaattctctcacatcagcctcccaagtagttggaattacaggaacataagctccaggaaagccacagactatggccacctacatcttgaagctccgtgcctgcccttgggagaca

SEQ ID NO: 937118 - DNA, 120 bp, Artificial Sequence
  ENSG00000224675_3 (sequence is synthesized)
tacatcttgaagctccgtgcctgcccttgggagacactaaatggagtcttgctctgtcgtcaggctggagtgcactggcgtaatctgggcttactgcaacctccgcctcccggattcaag

SEQ ID NO: 937119 - DNA, 120 bp, Artificial Sequence
  ENSG00000224675_4 (sequence is synthesized)
ttacaggtgtgagccgccatgcccagcctcatgagggttattaagcacataattatagaatgtgttttcttcttttaactacgataagcattgttcagtattctgtgggtttttctttct

SEQ ID NO: 937120 - DNA, 120 bp, Artificial Sequence
  ENSG00000224675_5 (sequence is synthesized)
gtttttctttctccttgcaatgtcaacagaatacataatgagaaaggtcatgtcagggtctttttgtttctcaaagatatctgatgaaatctgaggaagtcagctttacaaataacataa

SEQ ID NO: 937121 - DNA, 120 bp, Artificial Sequence
  ENSG00000224675_6 (sequence is synthesized)
actctggagctccgtaagctgaacgagttagtcttggaagagttgcctctgcagcattgctactcagaacttctatgaaaaccacaagaagtggtgagaggaagcggcaaaatcaatgac

SEQ ID NO: 937122 - DNA, 120 bp, Artificial Sequence
  ENSG00000224675_7 (sequence is synthesized)
ggtgagaggaagcggcaaaatcaatgacagaacacaaataccctcttctgccaaccgcttaaaaggaaattatggggggctgggtcggtggttcggtggctcacgcctgtaatcccaaca

SEQ ID NO: 937123 - DNA, 120 bp, Artificial Sequence
  ENSG00000224675_8 (sequence is synthesized)
agcatggtggtacacgcctgttgtccccactacttgggaggctgagtgggagaggctgaggttggcagattgcttgagccatgatcacaccactgcactcagtctgggtgacagagcaag

SEQ ID NO: 937124 - DNA, 120 bp, Artificial Sequence
  ENSG00000224675_9 (sequence is synthesized)
tcaaaacaacaacaacaacaacaacaaaacccagaaaattcttcacaaaggttatacattttctcaataatatacaaatttgagaaatgtgaagtacatttaattgaattatgtaaaata

SEQ ID NO: 937125 - DNA, 120 bp, Artificial Sequence
  ENSG00000224675_10 (sequence is synthesized)
gtaaaatataacacagacttcatatattcaattcacaaataaattttctaggttctttactttttcatgttcatatgttttttatgaagaacatatggtcacctaagaagaataaaataa

SEQ ID NO: 937126 - DNA, 120 bp, Artificial Sequence
  ENSG00000224675_11 (sequence is synthesized)
aaacccatcaaacagaaatattcatatcctccccaaaccgtattatcttaaacacaattacaaacttatttaattacacaagtgagaatcttaagctgagagaagaaaatttctagagaa

SEQ ID NO: 937127 - DNA, 120 bp, Artificial Sequence
  ENSG00000224675_12 (sequence is synthesized)
atttcttttgttcattataggattatttcaatactgaaggatagtcttcgacattagaattgcttccttttaaagtgtacaaatgccagtgtaaaaggaaacatcataacatccatttca

SEQ ID NO: 937128 - DNA, 120 bp, Artificial Sequence
  ENSG00000224675_13 (sequence is synthesized)
gccttaattttctaatggctcaggccgtttttatacagtgtattcttctccagtgtcttaagatagtttggaaacagtacctgttgaacctttcagagagcagtctaccatatatccctt

SEQ ID NO: 937129 - DNA, 120 bp, Artificial Sequence
  ENSG00000224675_14 (sequence is synthesized)
gatcctcaatttctaatttagattcatttgtggttgttacagttataagtaacgtacatttaagaaagatatatctgtagaacagtttctgcacttatatgtgtatataaattatatgtc

SEQ ID NO: 937130 - DNA, 120 bp, Artificial Sequence
  ENSG00000224675_15 (sequence is synthesized)
tgctaaattttttttggcctttgtacttgaaaaaaaattaacagatgttaaaatatttggctcacaagcaatgttaaaaacaatctgtagataatgcttccttatttttcttggattaat

SEQ ID NO: 937131 - DNA, 120 bp, Artificial Sequence
  ENSG00000224675_16 (sequence is synthesized)
gtaaaatcaggattaatttgctttgtgtacctgggaaataatctcgtttgtatgcttgtttctaggatgtcttttactcttcataataataaaaaagtcagtgcatgtcagtatatacat

SEQ ID NO: 937132 - DNA, 120 bp, Artificial Sequence
  ENSG00000224675_17 (sequence is synthesized)
atccttcttgattttatctggaaattattaggtttgatctcaattatttatcatttatatccattagctttttaacccataattgtcattattaaaatttttttcatgtttactactgtg

SEQ ID NO: 937133 - DNA, 120 bp, Artificial Sequence
  ENSG00000246851_0 (sequence is synthesized)
gagacagaatcttgctctatctcacacacacacacacgcaaagttcaaattgcagatttcaaactagctttaaaatataacgaaccaagcacatcaaatatactaaataatgtaataact

SEQ ID NO: 937134 - DNA, 120 bp, Artificial Sequence
  ENSG00000246851_1 (sequence is synthesized)
tagacacctttgcccatcatattaaaaataaaaaaaaaaacacaacctttcttagtgaaaaaattttatctaatagtgtcaagccattgattcaatgaccccaccttttctgggttattt

SEQ ID NO: 937135 - DNA, 120 bp, Artificial Sequence
  ENSG00000246851_2 (sequence is synthesized)
taaaaatgggaagagggccaggtgcagtggctcgtgcctacaatcccagcactttgggaggctaaggattataggcatgagccaccatgtttgtccagcaaagtcaatttgaatgtcaca

SEQ ID NO: 937136 - DNA, 120 bp, Artificial Sequence
  ENSG00000246851_3 (sequence is synthesized)
tctagcccccaaaatggtgtcagaatggaaacatctcagtgtgacaaactagatgaactacagaatttagcagactcattactcaaagaaaatgaggcttaggctaaaaaacaaaacaga

SEQ ID NO: 937137 - DNA, 120 bp, Artificial Sequence
  ENSG00000246851_4 (sequence is synthesized)
tacacaaatatgtaacaaacaagtattaacttgaattgcaaagggaaaatcgatttacatgagaacattaaactattgccactatcatcacatgtattactgccacggtaagaactctgg

SEQ ID NO: 937138 - DNA, 120 bp, Artificial Sequence
  ENSG00000246851_5 (sequence is synthesized)
gttcatacacatttaataagtaaataaatatatctataattgtaagatttggggaagctaattgctagtaatttgccataaaacttaagttcattactgaccctgatggagaaaatgaga

SEQ ID NO: 937139 - DNA, 120 bp, Artificial Sequence
  ENSG00000246851_6 (sequence is synthesized)
ctgaccctgatggagaaaatgagaaaggcttgctgaactgcccagaagcagatggggttgaagtcacagctgtttctatcttggctgtccctgaaattatggaaaaaaaaaaaaaaaaaa

SEQ ID NO: 937140 - DNA, 120 bp, Artificial Sequence
  ENSG00000246851_7 (sequence is synthesized)
cagaaacactgttccagtgtataattccctgtagctcagcctgtgaggtgctgcttagcaccacatgtgccttctgtgacacgtcagtggccatggggagtgagcacgttgcctcacttg

SEQ ID NO: 937141 - DNA, 120 bp, Artificial Sequence
  ENSG00000246851_8 (sequence is synthesized)
tgtttgaggtctctgaaattgctccgtggctctgtcaatgttaattccagtctaaggtgtgccatcttctcctttacagaaaatatatcaaaataattctagtatagtttaaatgtacag

SEQ ID NO: 937142 - DNA, 120 bp, Artificial Sequence
  ENSG00000246851_9 (sequence is synthesized)
ttttaaaagtacactcttatatatttcaatggtatgggaaaatgcttataatgtgaggctaagccccctccccacaaaagtaaataaaactatatataatgtagctttataattatttga

SEQ ID NO: 937143 - DNA, 120 bp, Artificial Sequence
  ENSG00000246851_10 (sequence is synthesized)
aattaatctatgctgaaggacaaaaatccaaaagagaaataggttcataagctaaatatttctgagtagtgactttaaggctgtttacttctatatacatttctgcattttccacagatt

SEQ ID NO: 937144 - DNA, 120 bp, Artificial Sequence
  ENSG00000246851_11 (sequence is synthesized)
ttgttggcatttaacaaataatcgtgttctttttttaaaattacagatgtaaaacatgattgctataatatggagacatgcaaaaaggttaaaagtgcaatccatcattctccccatgtt

SEQ ID NO: 937145 - DNA, 120 bp, Artificial Sequence
  ENSG00000246851_12 (sequence is synthesized)
tgctaggattacagacatgagccaccaggcctggccttgctccacttcaaaagggggaaaggaaagaggaaaactatttaaaagcccaaatcaaacgaaactaaaccaaacaacaacaag

SEQ ID NO: 937146 - DNA, 120 bp, Artificial Sequence
  ENSG00000246851_13 (sequence is synthesized)
aacaacaacaagaaaaaaaaaacaccaaccttctaaaataaacaaacacagggtagatggcagtacaaatatttttaaaactactgatatacaatgtaaaatgtacaggatgaaaagtca

SEQ ID NO: 937147 - DNA, 120 bp, Artificial Sequence
  ENSG00000246851_14 (sequence is synthesized)
caatctaaatcatcagcagagtactagttaaatttaacagggtataactacacaatgaggttgtagacagctcttaaaatgagtaaggtggatctgtatcagacctgcagagaccaagac

SEQ ID NO: 937148 - DNA, 120 bp, Artificial Sequence
  ENSG00000246851_15 (sequence is synthesized)
atttattgtaagagggggcagagaaggggaaataagttacaaaatcaatatatataggatatacagtatataggatatttttctttaaaaaacaatgaagtaacctcaagagatatacat

SEQ ID NO: 937149 - DNA, 120 bp, Artificial Sequence
  ENSG00000246851_16 (sequence is synthesized)
gaaatcatgatctctggaatacagaatctatagggcagctttcacattctacattatatatctctacaccataggctttttctgggcatgtaatagttttacaatcagaaaaacaatgaa

SEQ ID NO: 937150 - DNA, 120 bp, Artificial Sequence
  ENSG00000246851_17 (sequence is synthesized)
ggtatttccattactaataagagaactattctctagaggttttagaaatgctctttttcaaaaagaaactttttgcaaactcttaagcagcacctttcagggaagttttcctaccaaaag

SEQ ID NO: 937151 - DNA, 120 bp, Artificial Sequence
  ENSG00000246851_18 (sequence is synthesized)
aaaaaagttcttttctaaaccttgattacctggcaagtgaaaacagaagtgaacacctcgtaacaaaagagaggatttcatgatcagcaatgaatggtgaatctcggaaatttcttgcaa

SEQ ID NO: 937152 - DNA, 120 bp, Artificial Sequence
  ENSG00000246851_19 (sequence is synthesized)
gtcacactacttgcccagacatgcataaagcaaagttccttaggtttctttgattctaactccaagagtgacaaaaacctctccaatgaagtccttgaaaaaagagtatatgatctttca

SEQ ID NO: 937153 - DNA, 120 bp, Artificial Sequence
  ENSG00000246851_20 (sequence is synthesized)
aaacctttttgtaaaatactcaagtctttgacagttctactatataattttccttttaacataaagctttaggccccggtcgagaagtgctagatacctccttctcatgtgaggcgtaca

SEQ ID NO: 937154 - DNA, 120 bp, Artificial Sequence
  ENSG00000246851_21 (sequence is synthesized)
tgataccaactgtggttccatatcactccgaattctagaatacaactctggcttatgcaataatggcttccttctgcaaggaatagctactaaagataaatccagtatccaatcagaaag

SEQ ID NO: 937155 - DNA, 120 bp, Artificial Sequence
  ENSG00000246851_22 (sequence is synthesized)
tttgggattacagagaaagtcagaatgactgtatgattaagattatgagacgcaggctgctaatgtatgaagttcaatttctaacagaatttgcttgaaggcccacttaagagcatgatt

SEQ ID NO: 937156 - DNA, 120 bp, Artificial Sequence
  ENSG00000238039_0 (sequence is synthesized)
caggtaccctgcaggggagagggtggggccctgagctggactccacccaacactgccacctccccagcctgtgtcctccctaccacccgaggagctgaaggacccaacagcacaccctca

SEQ ID NO: 937157 - DNA, 120 bp, Artificial Sequence
  ENSG00000238039_1 (sequence is synthesized)
gtggtttctgaaaggaagcaaagttctttctaccctttttcactttgggtgaaaacatgtggctgggttgacaagtcggttttttagaaaggaagcactgactagcgaaggactcgccca

SEQ ID NO: 937158 - DNA, 120 bp, Artificial Sequence
  ENSG00000238039_2 (sequence is synthesized)
cagacaccacaaaccaagagaacccagactctggacgtggagcagtaccagggtgaaagacttttcccaccgacatggtcacatagccattctccttgaagtactgggggatggtggaga

SEQ ID NO: 937159 - DNA, 120 bp, Artificial Sequence
  ENSG00000238039_3 (sequence is synthesized)
agtttccagcgtgcaccctccagtaggagttgaagtcgtacaggcgggtggtgtcaggtctcctgccagtgaggaaagaaacgcggctcggggcgcacactgcttgctgttagggagcag

SEQ ID NO: 937160 - DNA, 120 bp, Artificial Sequence
  ENSG00000238039_4 (sequence is synthesized)
aagcagaggggggacatctgctgcttcccaaatgccacatttcttcaaataaaaagcagaagacagcatgcagtacataaggaactcatgtcttggtaaagacaaaattgaaattctttt

SEQ ID NO: 937161 - DNA, 120 bp, Artificial Sequence
  ENSG00000235009_0 (sequence is synthesized)
cctaacttccagctttgaaataggactgaagatgaaccatgctcctggcaccccctgttgagagcccaagttcagcagattgcggccatgggggactgaaaatggagccctggacaaaga

SEQ ID NO: 937162 - DNA, 120 bp, Artificial Sequence
  ENSG00000235009_1 (sequence is synthesized)
gcaagactttccatgtacactatgaatgccaagtgctgtgaataccaacccatgctttcaaagagcctgctgcctcagagcatgtgatgtggaactttctggtggcctcggcgtggaggt

SEQ ID NO: 937163 - DNA, 120 bp, Artificial Sequence
  ENSG00000235009_2 (sequence is synthesized)
tctcaacctcagctgcacactgtgtttagttggtctggagcgagatctaggcatcagtatattttttaagctccccatgtgattgtaatatgcagccaagaataaaaaaaaaaaacactg

SEQ ID NO: 937164 - DNA, 120 bp, Artificial Sequence
  ENSG00000246859_0 (sequence is synthesized)
gtggcagcatctcggtcacttaccacaaggaaacaatgagtttcaaactacttctatacatcaaaagagtacatggataaaatatagagatatacagacaattgatgaacataaactact

SEQ ID NO: 937165 - DNA, 120 bp, Artificial Sequence
  ENSG00000246859_1 (sequence is synthesized)
agaataactcaatctcagtgtgactactgatccgccgccacgtggcttcccggacacactgctgcagcgccaacagtggagaggagctctccatcacaaccagacagcagaagcacagca

SEQ ID NO: 937166 - DNA, 120 bp, Artificial Sequence
  ENSG00000246859_2 (sequence is synthesized)
atttacaacagatagattttatgccctgtacaggtatgaacacagtgaagatttgacgatggtctctctttcagctgaactctggagttttaattactgacattttcttggaagaaatta

SEQ ID NO: 937167 - DNA, 120 bp, Artificial Sequence
  ENSG00000246859_3 (sequence is synthesized)
tcctttgtggttttaaaacatgtgggcttttttttttgttgctcaagtcacatgttctaacaagacagttttaataagccagtttgactagatgtaaagtacttggattaaagtgataat

SEQ ID NO: 937168 - DNA, 120 bp, Artificial Sequence
  ENSG00000246859_4 (sequence is synthesized)
caggtaaatgttttaaatgccattctgaacccattctgaacttccttttactaattcagtcttttattcccttatcttgaccttatatcaggaaattatccaactctaacatttacacgt

SEQ ID NO: 937169 - DNA, 120 bp, Artificial Sequence
  ENSG00000246859_5 (sequence is synthesized)
cagagagaacaggcaccacttaaccttatcagaatataataggttcatataaaagattttatactcttgtcagtcccatggccaaatgctgagtaatgtccacctccatgtttttccttt

SEQ ID NO: 937170 - DNA, 120 bp, Artificial Sequence
  ENSG00000246859_6 (sequence is synthesized)
aatctttttgttcatgttttctatgcccatgcttttgaagctatcactagtggtgatagtggctgccatcatagggagggcagctgtctcaagttacttttcttgaggccatctatcagc

SEQ ID NO: 937171 - DNA, 120 bp, Artificial Sequence
  ENSG00000246859_7 (sequence is synthesized)
accatagtcttgaccaatccaactccaattattctcaaatatctgtcacagtgagatggcataggttctattttaaatatggaacataataaaacatttaacctgtaatgtaaagtgaat

SEQ ID NO: 937172 - DNA, 120 bp, Artificial Sequence
  ENSG00000246859_8 (sequence is synthesized)
gccataaaaatctgtttggacttttgtagtacgactaggtcagaattcacttgttaaagaaatgcaggtatcagaacggtctaaccttgcattacttgattaatatggttttcacttccg

SEQ ID NO: 937173 - DNA, 120 bp, Artificial Sequence
  ENSG00000246859_9 (sequence is synthesized)
tcaacagcttcagtttaacatgccatggactttccccaatgtcatacaaaccaaagctttgtaaattaaattatattttctaactaacataaaaatttcagcatatgcttgatttccaat

SEQ ID NO: 937174 - DNA, 120 bp, Artificial Sequence
  ENSG00000246859_10 (sequence is synthesized)
caatgttgaactgttaagttttctaactcagacaagtacagcagcttctcattttttgagactggctctggcaggagctcactatttaaagaaatgcaacatggaagtatatttctacaa

SEQ ID NO: 937175 - DNA, 120 bp, Artificial Sequence
  ENSG00000246859_11 (sequence is synthesized)
tatgaatagtgagccaacttactgttcaaacccctaatgctctaatacttgattaaaaaaaaaacctaatgctctgtacttgattttaaaaaataacaataacatttattgatcacttac

SEQ ID NO: 937176 - DNA, 120 bp, Artificial Sequence
  ENSG00000246859_12 (sequence is synthesized)
tacatggtcagtccttctggctgctttacattgcatttattttatttaatcctcacaacagtaatagtcctccttgagaaaatgtgtttcattatggtaaaggaattttagttattcaga

SEQ ID NO: 937177 - DNA, 120 bp, Artificial Sequence
  ENSG00000246859_13 (sequence is synthesized)
agctctaggattggtgtaaatgggcatactttagatatcttgaggtcttccataagtgagaatagtagcttaatgtctatacattttccctgttttacagaaagggaaaatagcaacagg

SEQ ID NO: 937178 - DNA, 120 bp, Artificial Sequence
  ENSG00000246859_14 (sequence is synthesized)
aaggttgagtcacttgtccaagatcacacagttcataagtgatggagccagaattccaacccagggcgtctgacttcagagcctaaagctctctcttgtaaaactgtggaagctgatcac

SEQ ID NO: 937179 - DNA, 120 bp, Artificial Sequence
  ENSG00000246859_15 (sequence is synthesized)
aggctggaaaagacttcatataaaaaacctgggcccaccaaatatttgtcaagttttgtcctggctgctgaacctaaaaatctaaggtaatctttctcaagtgtaaattcgggaaaacaa

SEQ ID NO: 937180 - DNA, 120 bp, Artificial Sequence
  ENSG00000246859_16 (sequence is synthesized)
tgacactgatttggtgagaaattatttgagttaatacatttagcagggaccttggaaggcagtaagccctgggaaaactttgtctcttgtctttggcatcacctccgcgaagcctggtgg

SEQ ID NO: 937181 - DNA, 120 bp, Artificial Sequence
  ENSG00000246859_17 (sequence is synthesized)
gacgcggctgcccctgcgctgtctgtgcacctcctaagaaccaggaagcgcggtgacctccaaagaacaggactgtcccaaatcaagcgggattaccaccgcccctctcccatttaacag

SEQ ID NO: 937182 - DNA, 120 bp, Artificial Sequence
  ENSG00000246859_18 (sequence is synthesized)
ctgaggacactgaggtctaatggattccaagtacttaaataggtgagcggcgcgcaggggcgagttgcaagccctgggatccttccagctcgccgcttcccctcccaggggctcaggttt

SEQ ID NO: 937183 - DNA, 120 bp, Artificial Sequence
  ENSG00000246859_19 (sequence is synthesized)
ctctttcatctgtgaggtcctctcccgcccggacgccggggcccgccatccccaacgtccaccgcgagctccccagatccatggtctggagcaggtccagaagacgcacctggcaggacg

SEQ ID NO: 937184 - DNA, 120 bp, Artificial Sequence
  ENSG00000246859_20 (sequence is synthesized)
ccccgggcgccacagtcgccctccacacgggccaccccaatcctgccgcggctccgtggctctccttacctttacctgaggtgaagcaaggacgtggaagcagctacggcgcgctaccaa

SEQ ID NO: 937185 - DNA, 120 bp, Artificial Sequence
  ENSG00000246859_21 (sequence is synthesized)
ctcaacagtactgctcagcctcccggcccgccgatgcgcaggcgacagcagccaacttgatgctcttcacttcttacaaattggcatgccaggctgctgctcaggtaatctgcctcttgg

SEQ ID NO: 937186 - DNA, 120 bp, Artificial Sequence
  ENSG00000246859_22 (sequence is synthesized)
accggctctgaaaatgggacaatgatcagtgcaagatccctgagatgctgagacacgatgggatggaagaaagctatgggacaagtggcctttcataggaggaggagctccttgtcaaat

SEQ ID NO: 937187 - DNA, 120 bp, Artificial Sequence
  ENSG00000246859_23 (sequence is synthesized)
gtgaggagcgaagcaggacaggagcatgagaacaggaagccagaagttatggggacactcaagcagcactagggagaggctcatgagtagaagaactgaggcatcctgcaaacagccatg

SEQ ID NO: 937188 - DNA, 120 bp, Artificial Sequence
  ENSG00000246859_24 (sequence is synthesized)
gactaacctgtattgggagcagattctccagctccacgtctgttccttagtctctgttgaggtgaaactccaatatctgaacccaccagccaaataagcaacctgtgtacaagccaagtt

SEQ ID NO: 937189 - DNA, 120 bp, Artificial Sequence
  ENSG00000246859_25 (sequence is synthesized)
aaaatttcactcccgtaatggatgaggagaaaccagaagacatttctcatgcacagggagtgcatgaatcccctgaattgccaggtttcagggtcacatgagacctctagaaggctctgc

SEQ ID NO: 937190 - DNA, 120 bp, Artificial Sequence
  ENSG00000246859_26 (sequence is synthesized)
tcatcatcaccttatcatctgctgatatacctattctaacgaaggagggagaggagtaatgcacaagaaactcaggccaatgggggagcaagaagaaaacgaagaagtgcagtgcatgcg

SEQ ID NO: 937191 - DNA, 120 bp, Artificial Sequence
  ENSG00000246859_27 (sequence is synthesized)
tcatcggtgtttaacagtcagaagcgaaacagttcagaacaaggcctgccctgtcaaaagaagagctaaagacagttatataaaaattaaggtgggctttcagactggctaacacaacaa

SEQ ID NO: 937192 - DNA, 120 bp, Artificial Sequence
  ENSG00000246859_28 (sequence is synthesized)
cattccatgagtagatggtaatttatttttgtttatccatttcgttgggagcaaggacaaaaatgtaaatctacaccttgcttatcaaaattgccgaaaaaagaatgctctgccttttaa

SEQ ID NO: 937193 - DNA, 120 bp, Artificial Sequence
  ENSG00000246859_29 (sequence is synthesized)
aaaagtatcatgattttgtagaccttgttttccaatttaatatttggaaaaggtgtcattttcatattcccactcagatgccagtgttttgggtttttttccagggggagtttatttaaa

SEQ ID NO: 937194 - DNA, 120 bp, Artificial Sequence
  ENSG00000246859_30 (sequence is synthesized)
acggttttgctctttttttcgacaaatatcctttcaaacagaaagaacccaaagagacacctcaaaatgcctgtaaaattattgcttttctttctctaagtcaggcaggcgaggctacgg

SEQ ID NO: 937195 - DNA, 120 bp, Artificial Sequence
  ENSG00000246859_31 (sequence is synthesized)
aaaggaagagatttggtaagtaaattacagttttgtgattgctcccgctaccgtgactgcatgtccgtgagcgccagccaacgagacaatggtctctcacactctggtagcattcgctca

SEQ ID NO: 937196 - DNA, 120 bp, Artificial Sequence
  ENSG00000246859_32 (sequence is synthesized)
acctacaacactgaggaagaaagccacactgaagacacaaggaaaacaagtcaatccagtctagagaacaacattcagggaaacagagtaccaacaccttcttagaacatggaaataaaa

SEQ ID NO: 937197 - DNA, 120 bp, Artificial Sequence
  ENSG00000246859_33 (sequence is synthesized)
ctctcagcctctgcaagaagcagtcgggagctgtgtgagtgaaaaggcaggagtggaccggttgtgtgagcgcggtgggagtttgagttgtggaagacattgttgtagcgaaccaggcct

SEQ ID NO: 937198 - DNA, 120 bp, Artificial Sequence
  ENSG00000246859_34 (sequence is synthesized)
gaaggcccacctgtaagggttgtaaacgtggattcacagtgtgaaattctgagcgttttcacttgagtcagaatgattaaaaactggtttgatgacacctatttgtccactgtaaattct

SEQ ID NO: 937199 - DNA, 120 bp, Artificial Sequence
  ENSG00000246859_35 (sequence is synthesized)
ctaaagcaaggctcagagtcccatagtttcttcttatacttgatgatttacacagaaaaaaatcccatatatgataccatgacctcatcaatacccatacaccatatgtaatacaaatgg

SEQ ID NO: 937200 - DNA, 120 bp, Artificial Sequence
  ENSG00000246859_36 (sequence is synthesized)
aggtgttacgattaaaaaaagtggaggtaactgattcttggggagcggagttcactgctgcccagtggagtcagggaggcagcgtttgtctcatcgttcttcttgcggttcacttccttt

SEQ ID NO: 937201 - DNA, 120 bp, Artificial Sequence
  ENSG00000246859_37 (sequence is synthesized)
tgccagccatgtgtgaggcagcattccccagtgtcaggtttcttgggacagtttctagtatcagatagggcccaaccttagactgggtgattgatagatactcacaggagtgtcagttga

SEQ ID NO: 937202 - DNA, 120 bp, Artificial Sequence
  ENSG00000246859_38 (sequence is synthesized)
taattataaaaaaaaaaaaaaagagtccagtgggtgtgatgaagacgggttaacaatctattttctaatatgtaataaaaatatttaaaaacgtatctcaacttgcatcaatcttatcta

SEQ ID NO: 937203 - DNA, 120 bp, Artificial Sequence
  ENSG00000246859_39 (sequence is synthesized)
tgtatggcttattctatgtgcaatcggcgcatgacagaagtggctaccaaagatgggaagtgtctgtctgggagagaaatgatgtgagggtgcccagacagcggtcataggaaagtgggg

SEQ ID NO: 937204 - DNA, 120 bp, Artificial Sequence
  ENSG00000246859_40 (sequence is synthesized)
aagcacacctgcccacatgatgcacaatacaggctttctgccccaactaaaggaattttaggcttctgcaacaagtggaggaggcattttgaagatgggacacaaagaagtcttctttct

SEQ ID NO: 937205 - DNA, 120 bp, Artificial Sequence
  ENSG00000246859_41 (sequence is synthesized)
ccagatccagaagtcaggccttgtaagaattcaagccaaaaaaagttcatccatgggaaaaacggttcttctatcatccagcacgtatttgtgccaacagagctgagggacttgagtaat

SEQ ID NO: 937206 - DNA, 120 bp, Artificial Sequence
  ENSG00000246859_42 (sequence is synthesized)
tcaagaggctaggggttggggggcagatgtgtccagtggctcccacagccccgccgtcctgaaagtcacgccagttaatgtgcctcggggtggatcagccctcccgacagatgactacta

SEQ ID NO: 937207 - DNA, 120 bp, Artificial Sequence
  ENSG00000246859_43 (sequence is synthesized)
ggaaattaatccccagttaataatgtgctttggaccaagtaagtcaagattatttttcctacaattatacaaagatatgcttttccagaagggaacttctggaaaaagaacaaataacac

SEQ ID NO: 937208 - DNA, 120 bp, Artificial Sequence
  ENSG00000246859_44 (sequence is synthesized)
tatgcttaaaatattattcacatatttagagaagaaagaacttaaaatagcagaagacctgaataccatgatccacggtgcccacccctgggagcatgtctttgtgtgagacaagaccta

SEQ ID NO: 937209 - DNA, 120 bp, Artificial Sequence
  ENSG00000246859_45 (sequence is synthesized)
gcacagcagggctggctttctaagggtacggtgaggcaccactgaactcatcaaggaactatgcctagtcttgcccctctggtttatgtcaccagtatcaaagagagaggacctctggat

SEQ ID NO: 937210 - DNA, 120 bp, Artificial Sequence
  ENSG00000246859_46 (sequence is synthesized)
gatctggcacagtgacgaatgtctgtggttatactgctcgtgccgctggtgtgctgctggtgaggtggtggggtgtgggtgtcttttaaggaaagcgctactattttagctctcttccac

SEQ ID NO: 937211 - DNA, 120 bp, Artificial Sequence
  ENSG00000246859_47 (sequence is synthesized)
tccagctctacaaatcagtgcaagtctagttcaggcagggtcaaaccattttgttcacctactttcctgccagtgatttcaaccttgaccttcaaaaatgctctgcaagattaaaagtga

SEQ ID NO: 937212 - DNA, 120 bp, Artificial Sequence
  ENSG00000246859_48 (sequence is synthesized)
tttaagattgttttctttcagtgcaaactgccagttgatacaacctcttcagtttctgcctgccagtataagatagggaattgttgatactatttagtgtaaataaaataatttcttaaa

SEQ ID NO: 937213 - DNA, 120 bp, Artificial Sequence
  ENSG00000246859_49 (sequence is synthesized)
cattgaaataccagtaacagctgggggaggactcaccgttagtcaattacacttatgaaactttcaaatagaaattttattttcagtggattctgtttttctttcttaactgcaaaatca

SEQ ID NO: 937214 - DNA, 120 bp, Artificial Sequence
  ENSG00000246859_50 (sequence is synthesized)
gcaagtcattggttaaaaagtatactctccccgcttgaagtcaaacaagtattcaccctaagaggcaaagtccagtatctacagtaaaaactgtattttgagactctaaagtgaagagct

SEQ ID NO: 937215 - DNA, 120 bp, Artificial Sequence
  ENSG00000246859_51 (sequence is synthesized)
taagagaaaagatctattgacaatcattaattacctttgctctcaaatgattcagacctgacctttggtattccgcaagggcctgaacttccattccattcccagtgctggatgtggaga

SEQ ID NO: 937216 - DNA, 120 bp, Artificial Sequence
  ENSG00000246859_52 (sequence is synthesized)
atgggtgatcccaagcaacaatcatttgcctttctgtcaaaagctgtctcggtttaaatgtactgtattttctttgcctcttcttctcatcggaacatgttctagtctactcgccaggtg

SEQ ID NO: 937217 - DNA, 120 bp, Artificial Sequence
  ENSG00000246859_53 (sequence is synthesized)
ctacttctggcagtcagaaatagtgccacttttcaacttcaagtttcttaccaaccttttttgcattcatgcagcaagagttcatgaaatagctgcaaagtgctggacactgttaggttg

SEQ ID NO: 937218 - DNA, 120 bp, Artificial Sequence
  ENSG00000246859_54 (sequence is synthesized)
tgggaattgcaagagaaacagagtttctgccttctagatgctcacgtctgggggtggggcaggtacagcaggggtgatcaatccacaaaaatttacttttaaaaatgtgttatgggctga

SEQ ID NO: 937219 - DNA, 120 bp, Artificial Sequence
  ENSG00000246859_55 (sequence is synthesized)
cttgtatcacctcaaaattcatatggggaagtcctaaccaccaatacctcagaatgtgattgtatttggaaacaggatctttgcagaggcaattaagttaaaataaggacatcatcaggg

SEQ ID NO: 937220 - DNA, 120 bp, Artificial Sequence
  ENSG00000246859_56 (sequence is synthesized)
tgggccctaatctcaagtgacccatgtccttctaagaagagattaggacacagatacacagaggaaagaccatatgaagacacagggagaagacagccatctacaagcccagaagggagg

SEQ ID NO: 937221 - DNA, 120 bp, Artificial Sequence
  ENSG00000246859_57 (sequence is synthesized)
actttgtggcctataaattaacacatctgaatttctttttaagaattcagaaaccagtaacttccaaacaacttgaaattgaataaatattttcagcaacccaggggtgaactaaatgca

SEQ ID NO: 937222 - DNA, 120 bp, Artificial Sequence
  ENSG00000246859_58 (sequence is synthesized)
acagattattcaactttaaaaagtcttacttactgtacagattttccatattaaacatctggtatgcctcaattttttacttaaaagtctcggactttgagagcatacagcattttttgc

SEQ ID NO: 937223 - DNA, 120 bp, Artificial Sequence
  ENSG00000246859_59 (sequence is synthesized)
acatatataaccatgatgtactttaatattccaatcttaggttgtgattttagaggttgttttggtatcattaaataccaatgggaccaaaccagaaaattaaataaaaatataattcac

SEQ ID NO: 937224 - DNA, 120 bp, Artificial Sequence
  ENSG00000246859_60 (sequence is synthesized)
cactcacacacccttaagggtctagattcaatttccaaaagcataatattgggtagttacttgcagttgtgaaaataatttcaatcttggaatcttggtacacagtcccaaaatttaaaa

SEQ ID NO: 937225 - DNA, 120 bp, Artificial Sequence
  ENSG00000246859_61 (sequence is synthesized)
aaaaaaaaaaaaaaaggaaatccactgtaatcccagtgtctttaaaataatgctgccagcccgaccccacctcaccccacagtcaaccagttaccatggttcaggataggacaaacttag

SEQ ID NO: 937226 - DNA, 120 bp, Artificial Sequence
  ENSG00000246859_62 (sequence is synthesized)
gttttggacaaatgaagagttcaatggctgttaattgtcacaggcaagaaaagaaggaaaaccaaaagttgataaatgttaactcaacaattatagtctttacacagcttgccttaaaac

SEQ ID NO: 937227 - DNA, 120 bp, Artificial Sequence
  ENSG00000246859_63 (sequence is synthesized)
tgctccagttcagacttactctgttcaaaagtgaatatacagaacgttagtgtatctctctatttaaatctcagtctcagtactaatcttctacctccatgaaacatacacaacaaaaca

SEQ ID NO: 937228 - DNA, 120 bp, Artificial Sequence
  ENSG00000246859_64 (sequence is synthesized)
aaaggaagagctagggatttgggaagaggcacttccagaaaaaaagaaagtgacgattatttcagatttgaatttaccatttttaccattttttctgtttcaaggtcccagataatatac

SEQ ID NO: 937229 - DNA, 120 bp, Artificial Sequence
  ENSG00000246859_65 (sequence is synthesized)
atttcttcattaattattcattttctgagtgcctactatggctggagtactctattcgatttcaagcttagagagagattgaaacagaaacagtaacagtccctgcccatctcacccttc

SEQ ID NO: 937230 - DNA, 120 bp, Artificial Sequence
  ENSG00000246859_66 (sequence is synthesized)
attaacttgctgtgtggaagacaagcatacagactggaccctcatgaggcaatggtagtagggcccacagggaggtgtgctactgaagcaccctgagggcctggagcccaccatgcccgt

SEQ ID NO: 937231 - DNA, 120 bp, Artificial Sequence
  ENSG00000246859_67 (sequence is synthesized)
ggagagaggtgctcctgaggagacagagttctgtgcgttctccctatggagtcctgcatttactagatttcaatcctcttcccctgactgatttcaatccacacaccctcccactatttt

SEQ ID NO: 937232 - DNA, 120 bp, Artificial Sequence
  ENSG00000246859_68 (sequence is synthesized)
gacttccagcgtccagattgttagaaaataaatttctgttgtgtaagctgcccagtctgtggcactttgttatggcagccctcgcaaactaaacacagtgtgctttttaagggcaacaac

SEQ ID NO: 937233 - DNA, 120 bp, Artificial Sequence
  ENSG00000246859_69 (sequence is synthesized)
aaaaaagaaatatataggttaagtcaaatgtaatagctgctggaacatctatcaacagactaaacaacaaacaaaaccaacatttagcataatatccagtagtgctgtcaacaaaggaaa

SEQ ID NO: 937234 - DNA, 120 bp, Artificial Sequence
  ENSG00000246859_70 (sequence is synthesized)
tgggggtggcagtgagcacatctgggagggcatttgatggctgtcagaatcagccaaggaagatgatagaagggtgagggataagtgcagaataagctccatgcaggcaagtggccctgt

SEQ ID NO: 937235 - DNA, 120 bp, Artificial Sequence
  ENSG00000246859_71 (sequence is synthesized)
agccaggtctccctgcagctcctaggggccacagcagtaacaagacccacatgaacccatgagtttctgtgccctcagttttctaactagttcagaatattaggaactgacaatgaccct

SEQ ID NO: 937236 - DNA, 120 bp, Artificial Sequence
  ENSG00000246859_72 (sequence is synthesized)
atcactgaagcttttgagtgctgataatatgagggtcagaaaactggtaagctgatccatctatctagagtccatctgtgcttgctgaactgtaaagctgcccattcttcttggtgctca

SEQ ID NO: 937237 - DNA, 120 bp, Artificial Sequence
  ENSG00000246859_73 (sequence is synthesized)
tcaactgacactccaaacatggacacgtggctgatactgcattccattcattcattgtctgaattcaagtttgtgtttttcatgaaggccaattaaattaactttctttttgacacttca

SEQ ID NO: 937238 - DNA, 120 bp, Artificial Sequence
  ENSG00000235005_0 (sequence is synthesized)
gggcctcaatggattctgacccatggatttgttcctgagggaagaatgcatgttgcattttgccaagttgctctcagctttttcctgcctgtatgccatctttctgcaaactaccagcgc

SEQ ID NO: 937239 - DNA, 120 bp, Artificial Sequence
  ENSG00000235005_1 (sequence is synthesized)
ctgagagttataaattcaagatgagaattgagatgttgccaaggcttcacagagtccctgatttactaggaaattgttccctagccttgactgctggccctgttatgcaagggactttgt

SEQ ID NO: 937240 - DNA, 120 bp, Artificial Sequence
  ENSG00000235005_2 (sequence is synthesized)
gtgggctggggggatggttgaaggaaagacaaaaaataaaagaccagaagccagtgtttaggcacagtggataggacattccctaccccactgcatttggtcacctatggtctgctattt

SEQ ID NO: 937241 - DNA, 120 bp, Artificial Sequence
  ENSG00000235007_0 (sequence is synthesized)
ggaaacgctgtcaagatgtcaaaaatacgcggaaagggaaaaaaggaattgctacggaaagagaggtgggagaggaacccagtcaatttcacctgctccccttcctccaggaagaatcgg

SEQ ID NO: 937242 - DNA, 120 bp, Artificial Sequence
  ENSG00000235007_1 (sequence is synthesized)
aaccgaaagcttaataagtgtggttgttttgatattcgaatcatgagacccaaggcatcgtaggggacctcgcctgcatccattcgcctatccatcctacagcagcgactgcacccctga

SEQ ID NO: 937243 - DNA, 120 bp, Artificial Sequence
  ENSG00000235007_2 (sequence is synthesized)
ttgtgatgacgaatgcacccccatccttgggctccgtgcccactgctgggctgggctgctccctcaggtgcggcagccagaggaggtgtggactcccatcccacgcgtttatcctcctgc

SEQ ID NO: 937244 - DNA, 120 bp, Artificial Sequence
  ENSG00000235007_3 (sequence is synthesized)
agcctctcgagcttggtggcatagccgtccttccagtccccaagccagatgtccttgatgccccttctcccagccccatccccatcgccagttgtatcagttttctattgctactgtaac

SEQ ID NO: 937245 - DNA, 120 bp, Artificial Sequence
  ENSG00000235007_4 (sequence is synthesized)
ctacaaattgagtggcttaaaacaacacacatctactctcttacagttctataggtcagaaatctgacatggtctcagagggctaaattcaaggtgtctgcaggacagtgttcctgctgg

SEQ ID NO: 937246 - DNA, 120 bp, Artificial Sequence
  ENSG00000235007_5 (sequence is synthesized)
aggctcttgagggagaatcggtttccttgccttttccaagtatagaggccgcccacattggcccccttccgtcttcaaagccagcaatagctccgagtctttcctccctagcatcgctgt

SEQ ID NO: 937247 - DNA, 120 bp, Artificial Sequence
  ENSG00000235007_6 (sequence is synthesized)
gacgctgactctcctgcctccctcttccacatttaagaaccttgtgattacattggtcctcccagataatccagaataatctccccatcgcaaaatcagctgattagcaacctcaattcc

SEQ ID NO: 937248 - DNA, 120 bp, Artificial Sequence
  ENSG00000235007_7 (sequence is synthesized)
acctgcaaccttaattctcccctgtcatgaaatataagaaggagatccatatgttccggggattgggatgcagacattttggaggcattgttctgccgaccacgccatcctgacagtttt

SEQ ID NO: 937249 - DNA, 120 bp, Artificial Sequence
  ENSG00000238034_0 (sequence is synthesized)
aggtatggacaaggttctgacccttattattggaactcaaatccagatggagtttgttgggacttcacatcattggaaggtgaatagaaaagtatgtcttaagaatttcaccatgttttg

SEQ ID NO: 937250 - DNA, 120 bp, Artificial Sequence
  ENSG00000238034_1 (sequence is synthesized)
gaagaattgcagcaagaaaaaaagaactcctttgtttccaccccatttcttttaaggaaaacctggaatatctgagggtgcaagctgagaaaagtctgcttatctgttccctactctggc

SEQ ID NO: 937251 - DNA, 120 bp, Artificial Sequence
  ENSG00000238034_2 (sequence is synthesized)
gctatcctaacaaggacgagcccttattaaataattcactgtggttgggaaatggtgaggaagccatcttcttttgtcttcttttctctgaaaataaaattttgtctaattttgtattaa

SEQ ID NO: 937252 - DNA, 120 bp, Artificial Sequence
  ENSG00000238034_3 (sequence is synthesized)
ggacatttgggcttcactttattacattctctactttctttaatagctcgaagctcatgacagtacatgtctggtcttgcaaaacaagatgaatttgttaaattaaacttttaaaaaaaa

SEQ ID NO: 937253 - DNA, 82 bp, Artificial Sequence
  ENSG00000238035_0 (sequence is synthesized)
cctccaggcccagcctctgcctcccgtcagcctctacagtcccaacgtctgcctcacagcagattcttcacgcccagcatct

SEQ ID NO: 937254 - DNA, 75 bp, Artificial Sequence
  ENSG00000238035_1 (sequence is synthesized)
agatgactctgaagaatggcgtgggttggttcctttcaaatgcacttgagcagggatctaccatgaaagacttgt

SEQ ID NO: 937255 - DNA, 120 bp, Artificial Sequence; identical to SEQ ID NO: 901943
  ENSG00000280441_0 (sequence is synthesized)

SEQ ID NO: 937256 - DNA, 120 bp, Artificial Sequence; identical to SEQ ID NO: 901944
  ENSG00000280441_1 (sequence is synthesized)

SEQ ID NO: 937257 - DNA, 120 bp, Artificial Sequence; identical to SEQ ID NO: 901945
  ENSG00000280441_2 (sequence is synthesized)

SEQ ID NO: 937258 - DNA, 120 bp, Artificial Sequence; identical to SEQ ID NO: 901946
  ENSG00000280441_3 (sequence is synthesized)

SEQ ID NO: 937259 - DNA, 120 bp, Artificial Sequence; identical to SEQ ID NO: 901947
  ENSG00000280441_4 (sequence is synthesized)

SEQ ID NO: 937260 - DNA, 120 bp, Artificial Sequence; identical to SEQ ID NO: 901948
  ENSG00000280441_5 (sequence is synthesized)

SEQ ID NO: 937261 - DNA, 88 bp, Artificial Sequence; identical to SEQ ID NO: 901949
  ENSG00000280441_6 (sequence is synthesized)

SEQ ID NO: 937262 - DNA, 120 bp, Artificial Sequence; identical to SEQ ID NO: 901950
  ENSG00000280441_7 (sequence is synthesized)

SEQ ID NO: 937263 - DNA, 90 bp, Artificial Sequence; identical to SEQ ID NO: 901951
  ENSG00000280441_8 (sequence is synthesized)

SEQ ID NO: 937264 - DNA, 120 bp, Artificial Sequence; identical to SEQ ID NO: 901952
  ENSG00000280441_9 (sequence is synthesized)

SEQ ID NO: 937265 - DNA, 120 bp, Artificial Sequence; identical to SEQ ID NO: 901953
  ENSG00000280441_10 (sequence is synthesized)

SEQ ID NO: 937266 - DNA, 120 bp, Artificial Sequence; identical to SEQ ID NO: 901954
  ENSG00000280441_11 (sequence is synthesized)

SEQ ID NO: 937267 - DNA, 120 bp, Artificial Sequence; identical to SEQ ID NO: 901955
  ENSG00000280441_12 (sequence is synthesized)

SEQ ID NO: 937268 - DNA, 120 bp, Artificial Sequence; identical to SEQ ID NO: 901956
  ENSG00000280441_13 (sequence is synthesized)

SEQ ID NO: 937269 - DNA, 120 bp, Artificial Sequence; identical to SEQ ID NO: 901957
  ENSG00000280441_14 (sequence is synthesized)

SEQ ID NO: 937270 - DNA, 120 bp, Artificial Sequence; identical to SEQ ID NO: 901958
  ENSG00000280441_15 (sequence is synthesized)

SEQ ID NO: 937271 - DNA, 120 bp, Artificial Sequence; identical to SEQ ID NO: 901959
  ENSG00000280441_16 (sequence is synthesized)

SEQ ID NO: 937272 - DNA, 120 bp, Artificial Sequence; identical to SEQ ID NO: 901960
  ENSG00000280441_17 (sequence is synthesized)

SEQ ID NO: 937273 - DNA, 120 bp, Artificial Sequence
  ENSG00000280445_0 (sequence is synthesized)
tgacccataactgcaagccgagtggacagatggagacaatgacatcatccacaacaatagcaataacaaaaaccttttgtttctactctgggccaccctaggtgtcatgcaagcattttg

SEQ ID NO: 937274 - DNA, 120 bp, Artificial Sequence
  ENSG00000280445_1 (sequence is synthesized)
agtgacttgaccaagggaaccgattggtaagtggcagtgcaagaatttgagcccgggtctgtctgaatcccagcactgggccagaatggcaagacgacgctggagttacgggcttggttt

SEQ ID NO: 937275 - DNA, 120 bp, Artificial Sequence
  ENSG00000280445_2 (sequence is synthesized)
tattactgtcgagatgagatggactggagagagctcatacagcttttataggaactattttatttataagaattttcctaatgtcagatggatgtgacatgcctggtttctttctgcccg

SEQ ID NO: 937276 - DNA, 120 bp, Artificial Sequence
  ENSG00000280445_3 (sequence is synthesized)
gatgctaggtgaagacctactatgtgccacacacctggcagggtcagttacactcctgcagttactgagcccttgcaagtcttgagtgaaagctaagattttgcattaaaaaagaggacg

SEQ ID NO: 937277 - DNA, 120 bp, Artificial Sequence
  ENSG00000280445_4 (sequence is synthesized)
ctgggatttactatcaccacgactagacaacttgcctgaagctcatggaagttgggaaccttgtatcaaaatagaacaactggggacctaagccaatatgggaacccagatctgactcct

SEQ ID NO: 937278 - DNA, 120 bp, Artificial Sequence
  ENSG00000280445_5 (sequence is synthesized)
gaatttaagccctgccttgcctcatggacctacttcattgcatccttcctggccaccattcctcaaccaaaccttcttcttaaggaagggggaaaaatgagctaacagctgctaggagat

SEQ ID NO: 937279 - DNA, 120 bp, Artificial Sequence
  ENSG00000280445_6 (sequence is synthesized)
ggttaaaatggagaccaagggaaattcatatgattccactttcctcatctctctggatccctcatcgagccagtaatgtattcccccttcttgctaacacactttttaaaatgttaatag

SEQ ID NO: 937280 - DNA, 120 bp, Artificial Sequence
  ENSG00000286842_0 (sequence is synthesized)
ggctgtggctgcctgaggtgtcattcagttcgttagggaggaagaagggaaaatgaatattgcagaggcagctggtggtctctgccacagaccatcccacccccctgcagtctttcatgt

SEQ ID NO: 937281 - DNA, 120 bp, Artificial Sequence
  ENSG00000286842_1 (sequence is synthesized)
ctctccctgctctattatcagaagtttcctggcctgtctatgattcccagctcttaaattttttttggtggaggagtgggaagaagctaacatgttagagtctatgagggtttaatattt

SEQ ID NO: 937282 - DNA, 120 bp, Artificial Sequence
  ENSG00000286842_2 (sequence is synthesized)
gttatgaaagggttactgtatggatgaacttttaatagcataatttcaggtatttgcggtaatctgaaggagaagagacattatgaggcaactacactttgcacatggaaggccacactg

SEQ ID NO: 937283 - DNA, 120 bp, Artificial Sequence
  ENSG00000286842_3 (sequence is synthesized)
gatgtcacctcctccccagggtcccacagacttgctggcctcccctcggctctccattgatttttcagagctggatctaacagagcctcctcacctccagtcttcaagctgctccagttt

SEQ ID NO: 937284 - DNA, 120 bp, Artificial Sequence
  ENSG00000286842_4 (sequence is synthesized)
ccaacaagcattcatgggtctaggaatcaaggggcagaagtggaagtggcaccacttaccatcacccctagtgacccactagcaaaatatttgcttcctgttcccatgactttgtgcctt

SEQ ID NO: 937285 - DNA, 120 bp, Artificial Sequence
  ENSG00000286842_5 (sequence is synthesized)
gctggcctagaggccttagttccagagaaaagaatgcttccttcaggagacacaacaatgagtccgttgaactggaagttaagactgccacccgactgctttgggttcttcatgcctctg

SEQ ID NO: 937286 - DNA, 120 bp, Artificial Sequence
  ENSG00000286842_6 (sequence is synthesized)
ggtcatcaggccaggaagggaattatggtgttggctggcatgttgatcttgactaccaagggaaaattctactactacaccacaatagaggtagaacccagaaaactttccctttactcc

SEQ ID NO: 937287 - DNA, 120 bp, Artificial Sequence
  ENSG00000286842_7 (sequence is synthesized)
aaaatctgatgaaattgactgcagttgaaatgggctccttgatgtcagtgtggttgagagaagccagggtgtctgagtccaaatgacagcaaaagcacggtggatgtggtcactgaatta

SEQ ID NO: 937288 - DNA, 120 bp, Artificial Sequence
  ENSG00000286842_8 (sequence is synthesized)
tgcagcagagcaagcacagtgtgaagactttaagtgattatccggcattcatacatttctggctgtcattttttaaattgtgagaatctcaagaatgaaacccacaggcagcccatggct

SEQ ID NO: 937289 - DNA, 120 bp, Artificial Sequence
  ENSG00000286842_9 (sequence is synthesized)
ggatggaaaaaacaaactggcttaaactatcacattacaaaataagatttcttattttatttatttttatttcttgagactgagtttcgcccttgtttcctaggctggagtgattggtgc

SEQ ID NO: 937290 - DNA, 75 bp, Artificial Sequence
  ENSG00000286842_10 (sequence is synthesized)
taccaccatacccagctaatttttgtgtttgttggccatgctagtctcgaacgcctgacctcaggtgatccaccc

SEQ ID NO: 937291 - DNA, 120 bp, Artificial Sequence
  ENSG00000286842_11 (sequence is synthesized)
atccacccatctcggcctcccaaagtgccgggtttacagttgtcaaccaccacgccctgcctagacgacaagatttcttaatcaattctacaatacgagtctgttaaaaaattcagaacc

SEQ ID NO: 937292 - DNA, 120 bp, Artificial Sequence
  ENSG00000286842_12 (sequence is synthesized)
tacaatacgagtctgttaaaaaattcagaaccatttgaatggaggtgcagctgagcaccattgatgaaaggctgtgctgttactacctatgtctagtaagttccttctggcatcccatta

SEQ ID NO: 937293 - DNA, 120 bp, Artificial Sequence
  ENSG00000286842_13 (sequence is synthesized)
aaataaccgtggctattttattgggagaaactactggatatcaagaaagattaagtgaattctcaggaatatagaatgttattgttgtttgctgagcagggtgattggccatattcactg

SEQ ID NO: 937294 - DNA, 120 bp, Artificial Sequence
  ENSG00000286843_0 (sequence is synthesized)
aatggcagtgaatcctttgagacccaactcttcatttttatatcagaaaggatattcttagataactgcctcctgagggtgattctggttttgctcactccacggagatggacctggcag

SEQ ID NO: 937295 - DNA, 120 bp, Artificial Sequence
  ENSG00000286843_1 (sequence is synthesized)
aggcttcaacaaaaaagtcaaaaccccaagctcttgggaactgacgtagaaggaagcaggaagaaggaagatgaggcctggtggagtttcttgactggaaacaattagctgcattgtttt

SEQ ID NO: 937296 - DNA, 120 bp, Artificial Sequence
  ENSG00000286843_2 (sequence is synthesized)
ttatacggtttctccagctgcaccctctttcctgagcattgaaaaatacagatgagaagcagagggaggttgtagtttctatttggtcacagagagtaatcaagtggaagccagatcacc

SEQ ID NO: 937297 - DNA, 120 bp, Artificial Sequence
  ENSG00000286843_3 (sequence is synthesized)
acaagaaagactgaatgggagatttggacatgtacgattctatgagactgtgtgaaatgtgtattcacatagtactctgttaccatagtaaccagtcacgtcaggcttcctaggagtcta

SEQ ID NO: 937298 - DNA, 120 bp, Artificial Sequence
  ENSG00000286843_4 (sequence is synthesized)
gggaggagctgtcaactttcacaactagttcattcacaaacaacccttcttacaaaatgctttgtgatggcagtgaccacgtagttaatcatccaaagcaggtcactttttacaatacaa

SEQ ID NO: 937299 - DNA, 120 bp, Artificial Sequence
  ENSG00000286843_5 (sequence is synthesized)
gtagatgctcttaacaatttagaaggtacaacaagtatcaaccagaactgtcccaagcaaactgatttacattggaatttatgtctaagtaaagaagaaccatcaagaaacaataactat

SEQ ID NO: 937300 - DNA, 120 bp, Artificial Sequence
  ENSG00000286843_6 (sequence is synthesized)
tacactgtgtaacattactacgtacattatatccccacatgatcaccaaaccattcagggcttttctttcttctatatttataaaaataaaaagtaacaaaattatggcttcatgaaaat

SEQ ID NO: 937301 - DNA, 120 bp, Artificial Sequence
  ENSG00000286840_0 (sequence is synthesized)
attcctagtcaggctaagttaaaattggttgatttttaaatccaagagttggaaaagacggaaaaacatgaacagttaagaaagtattgcaagatttctggcaagaatgagtacaggctg

SEQ ID NO: 937302 - DNA, 120 bp, Artificial Sequence
  ENSG00000286840_1 (sequence is synthesized)
tcttgtaaagaagaactgaagtagagaggagactcaatgtgaaaggtcaggactgagacctgagcttctgcccctaagtgatgccagtgctgatgggttctgcgcgtgttacctaagaaa

SEQ ID NO: 937303 - DNA, 120 bp, Artificial Sequence
  ENSG00000286840_2 (sequence is synthesized)
tcttttcttctatatgccataaagatttaacttatttcacattttctcttaacattgtgaattatatcaatttttttttctaaggttaaactgagatgaccacaatcattcaatctatat

SEQ ID NO: 937304 - DNA, 120 bp, Artificial Sequence
  ENSG00000286840_3 (sequence is synthesized)
tcttttatatattgctggatttattttttaaaacttacgatttatgagctttgcatctaccttcatcactgacattgatttaacattttctttcttcaatctttttcatgttgcattatc

SEQ ID NO: 937305 - DNA, 120 bp, Artificial Sequence
  ENSG00000286840_4 (sequence is synthesized)
taagcgctacagctctgggcctctttgaacagctctcttccaaaattaactcggttgtagccctgcatgaataatagctttgcagcaacagtttagagaaatatattgttaataattgcc

SEQ ID NO: 937306 - DNA, 120 bp, Artificial Sequence
  ENSG00000286840_5 (sequence is synthesized)
atcttgctgagcaaaatgctggagcaaattttacataacagtacaagacaaaatagaaaggtgagtttgtgaagctctgaaatacacagtttgcagttcacttttgtttctaagactcct

SEQ ID NO: 937307 - DNA, 120 bp, Artificial Sequence
  ENSG00000286840_6 (sequence is synthesized)
aaacagtaaagttcctgctgacattcttataagacatgtggacaaactggaggaattaatgatcaagatgccttttgctaaaaacaagatgaacatccgtcactctgtagtcaggactga

SEQ ID NO: 937308 - DNA, 120 bp, Artificial Sequence
  ENSG00000286841_0 (sequence is synthesized)
aacacacaacagcgctcgagctccgctgcacccagaggcgcggcctcccgttcgtgggcctccttggggctccctcccttctcttctattttccaataatccttaacccttttctcccag

SEQ ID NO: 937309 - DNA, 120 bp, Artificial Sequence
  ENSG00000286841_1 (sequence is synthesized)
ctggaggtgtgagtgggggaagggacaaggcggtggagccttctgattttctggaggtcttgcatttgcaagagccagaaaacacactgagccattcctgattatccgggagtgcatcca

SEQ ID NO: 937310 - DNA, 120 bp, Artificial Sequence
  ENSG00000286841_2 (sequence is synthesized)
gagagaagttggaaattttctcctaattgcattgcactgtactaggagaagggctctgagaagtgagtatcataaattttcctaagagaattccattcagacggcattgtgcttgcctgg

SEQ ID NO: 937311 - DNA, 120 bp, Artificial Sequence
  ENSG00000286841_3 (sequence is synthesized)
tgacgtctctgggggagcaggaaaatctgagtcttcctattctgccattttgctgatgtcattgctcaaaattgatgttttttaaactaaaatatagtagaagtaataaaaattttgcca

SEQ ID NO: 937312 - DNA, 120 bp, Artificial Sequence
  ENSG00000286841_4 (sequence is synthesized)
aaaccccgtttcaactatattctgaataatatgaacaatgcttcctatataaccagtaaatatacaaaaatagtcattgttgggtttgaacctttatgcattaatatattattaatgaca

SEQ ID NO: 937313 - DNA, 120 bp, Artificial Sequence
  ENSG00000286841_5 (sequence is synthesized)
tttactttattttatgttgcacatttagttaagagacttgactttcaatagcataaatgcattttattagcaatttttatatttccctaagcactactattttgttttctcttttaatct

SEQ ID NO: 937314 - DNA, 120 bp, Artificial Sequence
  ENSG00000286841_6 (sequence is synthesized)
gtatattacagatagtgtaagtgatgactttgataataacacatatactaagctttgcaattttacaaacacccaaaactctagcagcacactttttctactaacatctcacctgacaca

SEQ ID NO: 937315 - DNA, 120 bp, Artificial Sequence
  ENSG00000286846_0 (sequence is synthesized)
gtgacccgataatagtgagttaccccttgtgaaccttaactggggcatctgcaacatgggcatattgatacatacctggctgaactgttgtgggaagaaaatgtataatgcttaaaccta

SEQ ID NO: 937316 - DNA, 120 bp, Artificial Sequence
  ENSG00000286846_1 (sequence is synthesized)
tgtgaagtgtctaacatgtaatgctacaacaaatatatgtattggctttccctgtgttttctcttccacaaaagacgtagtttacatgaacatctcctagaggtcaattagagttgaagc

SEQ ID NO: 937317 - DNA, 120 bp, Artificial Sequence
  ENSG00000286846_2 (sequence is synthesized)
agcaggaaataaaatgtttacatatttctatgagagaaaagcttttctgtcttttctttgtagaagttacctgatgcatggagtggaggagaaagaaaataatttcattattttttattt

SEQ ID NO: 937318 - DNA, 120 bp, Artificial Sequence
  ENSG00000286846_3 (sequence is synthesized)
gatgtccttttctaacatcttcatttaccttctatttggacattggaatagcaacctctcattgagcctcagaaaggagacagcacagaatgacagaccatgaagatgggtctgctggga

SEQ ID NO: 937319 - DNA, 120 bp, Artificial Sequence
  ENSG00000286846_4 (sequence is synthesized)
aacagatgatatcaggagagctgggtcccaaataccagatctgtccttatgtacagaaccatggggagtcacttctctcctggcctcaaccctttcacaggaaaagattttatttcccaa

SEQ ID NO: 937320 - DNA, 120 bp, Artificial Sequence
  ENSG00000286846_5 (sequence is synthesized)
tagtggggaggtgtggctttggagtcagatagagtgggtagaatatttgggcacaattaataactagtttaatgatctttagcaaatgttaggtctgcagataaatgaaatccatgtgta

SEQ ID NO: 937321 - DNA, 120 bp, Artificial Sequence
  ENSG00000286846_6 (sequence is synthesized)
atgcatatacattaaatatgtctgcatagagaatcaaatgggaggtaattcacaaaaatgatacattttaaaaaatcagccgtggggttattgattaatttatcctggagctcattatgt

SEQ ID NO: 937322 - DNA, 120 bp, Artificial Sequence
  ENSG00000286846_7 (sequence is synthesized)
ttcctaaaatttcacattagtagggatctcttttgaattcagaatcaaatatagaaacagtagtttttattaaatatttcagaaatacacaaaattatagaatataagaaacttctatgt

SEQ ID NO: 937323 - DNA, 120 bp, Artificial Sequence
  ENSG00000286846_8 (sequence is synthesized)
taacataaaacatatgcaattaaaattcactttgaagtgttctctaactaattagtttccttcttcctcacaggtaaccactatgcaaaatttggggtttacatttttaagacatttctc

SEQ ID NO: 937324 - DNA, 120 bp, Artificial Sequence
  ENSG00000286846_9 (sequence is synthesized)
aagacatttctctatatttttattacatttgtatagatctacacatgaaatatggtatttttaatggtatgattttgttaactgaaatatcaccaatttatagattttaaaaaggatagc

SEQ ID NO: 937325 - DNA, 120 bp, Artificial Sequence
  ENSG00000286846_10 (sequence is synthesized)
aaaaggttacagcctgcagagtggccattctgatgggctgagaatgtagccgttggaagaagcccagaagcaggcactttgagggagtgagaggtaagacaggaatttaagctgaagggg

SEQ ID NO: 937326 - DNA, 120 bp, Artificial Sequence
  ENSG00000286846_11 (sequence is synthesized)
ttggacaaagatacatactcaacacgttataggaggagctatgaatattaatgaagggggtcctggcacatgggtactgaacaaacatgtatgttatacatatggaccaggttcaccttg

SEQ ID NO: 937327 - DNA, 120 bp, Artificial Sequence
  ENSG00000286846_12 (sequence is synthesized)
gggtggagacttcacatttaaatgtattacaattaggccctatacgttaaaagaacttttcagaacacaaaggcactcaagtcctgccctctttaaactggccagaaccggtccatggtt

SEQ ID NO: 937328 - DNA, 120 bp, Artificial Sequence
  ENSG00000286846_13 (sequence is synthesized)
ggtgatcttctaatcagaataaagttaccaaaatcagtctcttgtccaatcaaaactgtagctattgctggtggaacaggggctggggatcagcatctagtggtggatgagctgcaagtt

SEQ ID NO: 937329 - DNA, 120 bp, Artificial Sequence
  ENSG00000286846_14 (sequence is synthesized)
gttttaatattgcttatcttgaggccagtacttgtttagctgctggagaaaaatgcaaaggaaagcttgtgtcaattagaacacagtttattctttaagtgtagagtgtgtgacttaacc

SEQ ID NO: 937330 - DNA, 120 bp, Artificial Sequence
  ENSG00000286846_15 (sequence is synthesized)
atctaaaccacaaaagggagggagcataacaagttctatctgaccccacttcctgtcatgcccaggaactcagttttaaggattttggggggtcctcttggccatgaggtttgttcagtc

SEQ ID NO: 937331 - DNA, 120 bp, Artificial Sequence
  ENSG00000286846_16 (sequence is synthesized)
ggttggggggcttaaggttttacttttaatttacatttttatctctaaatgcatgaatacctcatggaataagaggaaggaagaaacataaggagaacaaatacatgttcagatttcaac

SEQ ID NO: 937332 - DNA, 120 bp, Artificial Sequence
  ENSG00000286846_17 (sequence is synthesized)
agtgggatttgccatatatgcctacatgtcatgtatactctctttccaacttgccaaaacagacaggctcatttacccagtttatatgcttagggagcattaataaaatctgcagatatt

SEQ ID NO: 937333 - DNA, 120 bp, Artificial Sequence
  ENSG00000286846_18 (sequence is synthesized)
attttcaagcccactttttttcctgatgtattcaaacacctagagtttccctggagtgaactagcctaaaacaatgacttagtgtattctttcatgaaacaccttctatttgtccagact

SEQ ID NO: 937334 - DNA, 120 bp, Artificial Sequence
  ENSG00000286846_19 (sequence is synthesized)
acttgtacttaactcaaactgtaactcatgtggggttaccctgtacatctggaacctaatctgggccaagctgatgaaagaagacagtgattccctgcagttagttttcatatgtccaaa

SEQ ID NO: 937335 - DNA, 120 bp, Artificial Sequence
  ENSG00000286846_20 (sequence is synthesized)
ctactatcgaaatcccttgattggtttaaggatgcatctcatttagaacctgatctaattttgtttgacggttgttatgacatgagtacacttttccatttcatttattattttttaatt

SEQ ID NO: 937336 - DNA, 120 bp, Artificial Sequence
  ENSG00000286846_21 (sequence is synthesized)
gcacaagaaacacacttcagaggtgtttgagttcacatgtgttacttgatgttgtggacagaggccatagtgcagtgggatagtcagtggaaagtggagaatattaacagggaatgtaga

SEQ ID NO: 937337 - DNA, 120 bp, Artificial Sequence
  ENSG00000286846_22 (sequence is synthesized)
aaactctttatggaactttgaatgtaaagaaaaagaaaccaagaaagaggaggagacaaagagagaaagaaagagagcaataaagagagacagaagagatatctccatcatgtggctgca

SEQ ID NO: 937338 - DNA, 120 bp, Artificial Sequence
  ENSG00000286846_23 (sequence is synthesized)
atggatgctggtaagtccaacgaatgacatttgaaaatcttaaattacttgaaacttgatcaagtttaaaattattgggcagtagaaaaattcaaaagaaaaaataatgggaaggagcca

SEQ ID NO: 937339 - DNA, 120 bp, Artificial Sequence
  ENSG00000286846_24 (sequence is synthesized)
tctcatctcaatttaacatttgaagttgcccatatattcatatcttttcttaccctctcatttccactttagagctaatgagatgcctccaccgggacagcatgaaatctgagctcaata

SEQ ID NO: 937340 - DNA, 120 bp, Artificial Sequence
  ENSG00000286846_25 (sequence is synthesized)
aacatttagttattacctaacaaaagaatagacaattatgtgtaaaaaattctgctaactattggatttgtgcctctccagaaggcagcaggtggctgaaatcctggtgtgatgtggctg

SEQ ID NO: 937341 - DNA, 120 bp, Artificial Sequence
  ENSG00000286846_26 (sequence is synthesized)
gataatacatggcctgaggactcctgcattgatgactgcaggatgggtccagaattttcctatacataaattaaaatactaagcagtccagaaggagccattagcagacatcacactttg

SEQ ID NO: 937342 - DNA, 120 bp, Artificial Sequence
  ENSG00000286846_27 (sequence is synthesized)
cttactttgctatctatcactgagatcaccagacccttcttgatagagttcgataatggtggtaccgtggtgccctctcgtgacagaaggctgaactacagctagaacatcgcgagcagg

SEQ ID NO: 937343 - DNA, 120 bp, Artificial Sequence
  ENSG00000286846_28 (sequence is synthesized)
aaggtgggagggagaggctgtggcccaagcccaccttacagagctttctggaactctgggtggcaaagcggacattctcagtattcccagggacattgatgggctcaagacagaaatcgt

SEQ ID NO: 937344 - DNA, 120 bp, Artificial Sequence
  ENSG00000286846_29 (sequence is synthesized)
tatctcttactgtgctgaaaagagagttctatatcagaagaaaaaggtcattttaatttttattctttgaccactggaaaatcagagacctaaatgagggaaaaatggatccagactact

SEQ ID NO: 937345 - DNA, 120 bp, Artificial Sequence
  ENSG00000286847_0 (sequence is synthesized)
accggagcctgagaccgcgccgcggcttgcgagcccggtgacgtcacagcgcgagcctggaatccgcagctccgcgggttacctggaagcggtgcgagcgcccaatacctgacaagaact

SEQ ID NO: 937346 - DNA, 120 bp, Artificial Sequence
  ENSG00000286847_1 (sequence is synthesized)
gagcctgactattaccatgattgcagccttcgcagaacctgagcgagaacccagtgatgccatggctgtgctgggacttccgactttcagaactgtgggctattaaatgggtgttgtttt

SEQ ID NO: 937347 - DNA, 120 bp, Artificial Sequence
  ENSG00000286847_2 (sequence is synthesized)
aagctgttagaaatctggactttgctgtctctgaaaatcaccatttgcctttgggagatgtgtgttggcaagaagaggagacatattcaaaccccactggctaggacatcaggagctcag

SEQ ID NO: 937348 - DNA, 120 bp, Artificial Sequence
  ENSG00000286847_3 (sequence is synthesized)
tatggaatgcaaaggccaccctagactgtcctgctaatgctgactcttctgcccatctctgttttgaagttctccatggcttttattctagtgtaagtttgatgttaacatataatttga

SEQ ID NO: 937349 - DNA, 120 bp, Artificial Sequence
  ENSG00000286847_4 (sequence is synthesized)
cctttgattcactcctatattgtaagtccgttaaattagccctagtttttgataaatctgctccatccacatagccttgtggttatgcagtaggaggaggtaggcagagagggaagcgta

SEQ ID NO: 937350 - DNA, 120 bp, Artificial Sequence
  ENSG00000286847_5 (sequence is synthesized)
gctggttccacattcacccttcacctgaacgcaaggtcgtctcattgtatcaagagggactgtagaccccaggttccaggagacggtggtcaggagagaggtgtttgatttgtcacagtt

SEQ ID NO: 937351 - DNA, 120 bp, Artificial Sequence
  ENSG00000286847_6 (sequence is synthesized)
gtgatgggagaggtgaaaagaccataggatctggagaagtaactcccaggagagcaacacaggagggatgagagctgtcttctccctgcactgtgctccagaacagtgagcccagcagtg

SEQ ID NO: 937352 - DNA, 120 bp, Artificial Sequence
  ENSG00000286847_7 (sequence is synthesized)
gggcggggaggataagtagagggcagacatgagttaagcctgcgccatagtttatgtgtcactgcaactagagtctgaaagaaaatcaagttggaagatcagcgaaaagttgaagatcta

SEQ ID NO: 937353 - DNA, 120 bp, Artificial Sequence
  ENSG00000286847_8 (sequence is synthesized)
tataaatgagtcattgtgatttaccccaactgcccagtaaagctctggaaaaggatttccttcagccttcctacaaaattcattctgaattttgtttctgaatcttccaaacttagtttt

SEQ ID NO: 937354 - DNA, 120 bp, Artificial Sequence
  ENSG00000286847_9 (sequence is synthesized)
ttacattttggctacaattgccttcaaaacatgcctagctgatcacattcacctggtaaacattttccttttatatatatcaaagaaacagaaatacttatgatttagtttttagcttct

SEQ ID NO: 937355 - DNA, 120 bp, Artificial Sequence
  ENSG00000286847_10 (sequence is synthesized)
ttattcatttgaacacttcaatattctgtcttcttcaatgattcccccttgcccgtattttcagctggaacagtttctcattttccctatttctgaacactttcaggggcttccttcagt

SEQ ID NO: 937356 - DNA, 120 bp, Artificial Sequence
  ENSG00000286847_11 (sequence is synthesized)
gaagcccaacacacaaaacgtccctttcagcaaaatctcagcggtggtgctaagggactaacacagactttaaggtcacaaaaccattgttttaacatttttctctgtttcttttctgat

SEQ ID NO: 937357 - DNA, 120 bp, Artificial Sequence
  ENSG00000286847_12 (sequence is synthesized)
aatgatgacagttctgtctctattatatttgctgaaacttactaggacccagtgatactagctcatcctctagagagaggtcccaagagcattacaccagatctcctacgaagatgtggg

SEQ ID NO: 937358 - DNA, 120 bp, Artificial Sequence
  ENSG00000286847_13 (sequence is synthesized)
atttcctctaggaaaaggtgtgtatccaggtaatttactaagccagaagctgctgtgattctatggcagccttatctcttatgacacgtccatttactaagatttggtgatctggatgat

SEQ ID NO: 937359 - DNA, 120 bp, Artificial Sequence
  ENSG00000286847_14 (sequence is synthesized)
ggcacagagtgctgtactaaagcctgccccagatggtgggtgtgcatgtcatcagctatgataatgggaaactggctgatggaaagagcacagctccgatatgtgacacaatggaaacat

SEQ ID NO: 937360 - DNA, 120 bp, Artificial Sequence
  ENSG00000286847_15 (sequence is synthesized)
ttgggcattagaaagacttcaaattatgacttcgccactaattaattgtgtgatcttggataagttacttaacccctgcaaaccccagttttctcatctgtaaaaatggaataaggacat

SEQ ID NO: 937361 - DNA, 120 bp, Artificial Sequence
  ENSG00000286847_16 (sequence is synthesized)
atgtcttatgaacttataaggatctgagaaaataaatatgtgagtgtgtgagagagtgagatgggggagggatgcaatgaataaacaagtttctaaaaatgtgaggaatttgactatata

SEQ ID NO: 937362 - DNA, 120 bp, Artificial Sequence
  ENSG00000286847_17 (sequence is synthesized)
cccaaagttcttatagcagtgacctttggtctataatgcatgtagaagtattgacttaattctagattttgttaaatcaggtgtacatgttgaaaattttaaggtgtatcaattagaaat

SEQ ID NO: 937363 - DNA, 120 bp, Artificial Sequence
  ENSG00000286844_0 (sequence is synthesized)
ggcaacccacttgggtcccattccatgctgtggaaggtttgttcttttgcacttcacaataaatcttgctgctgctcgctctttgggtccgcaccacctttatgagctatatcactcact

SEQ ID NO: 937364 - DNA, 120 bp, Artificial Sequence
  ENSG00000286844_1 (sequence is synthesized)
cgaacccaccaggaggaacaaacaactctggacgcgccacctttaagagctgtagcaaccactgcgaaggtttgtgtcttcactcctgaagtcacgccagaccacaaacccactggaagg

SEQ ID NO: 937365 - DNA, 120 bp, Artificial Sequence
  ENSG00000286844_2 (sequence is synthesized)
ctggaaggaagaaactccagacacatctggacatctgaaggaacagactcaggaaacaatctttaagaactgtaacactcaccgccagggttcatggctccattcttgaagtcagccaga

SEQ ID NO: 937366 - DNA, 120 bp, Artificial Sequence
  ENSG00000286844_3 (sequence is synthesized)
ggttcatggctccattcttgaagtcagccagaccaagaagccaccagaaggaaccaattccagacacgggagcacagatgtaccctgaatatatgccttcgttacagaagctttttgagg

SEQ ID NO: 937367 - DNA, 120 bp, Artificial Sequence
  ENSG00000286844_4 (sequence is synthesized)
tactggacacgtttctgaatttgctttaccctgaacaaacgtaggcaactcaaaacctaattctgaactctggtctataccatgttatttttaagatttatgtgcgcatttaattaatta

SEQ ID NO: 937368 - DNA, 120 bp, Artificial Sequence
  ENSG00000286844_5 (sequence is synthesized)
aaagatattatatcttgtactatcagctgccttgtacctccatttttttttttactttacaattgctttcctgactatagtaaatttatattcatactagctttaaaatccctctgttta

SEQ ID NO: 937369 - DNA, 120 bp, Artificial Sequence
  ENSG00000286844_6 (sequence is synthesized)
gtttctacaaagagtttattttttaattgactttattaggttataatttatacagagtataataatttttatcacattgttcaacagattttgcctatttaactacccctacatttaaga

SEQ ID NO: 937370 - DNA, 120 bp, Artificial Sequence
  ENSG00000286844_7 (sequence is synthesized)
tagaaaacatttttcatcacgcaaaaggttctttaatatctcttcccagttagtcactagccgctactggtcctgctactgctgctctgctgtctatccttgcagattaaatttgtcttt

SEQ ID NO: 937371 - DNA, 120 bp, Artificial Sequence
  ENSG00000286844_8 (sequence is synthesized)
tttagtgtttcacattaatggaatgacacgcatatgctcatttgtgtctggattctttcattgattataaggtttttagattgatcatgtggttatgtctatccagttcattatttgttt

SEQ ID NO: 937372 - DNA, 120 bp, Artificial Sequence
  ENSG00000286844_9 (sequence is synthesized)
ttaatttctgagtagtatttcattgcatgctgtatcacaatttgtttatgcattcatttgttggtagacattgttaggattgttttttgactattatggataaagcttcgctagacaacc

SEQ ID NO: 937373 - DNA, 120 bp, Artificial Sequence
  ENSG00000286845_0 (sequence is synthesized)
tggtatacatggctgctgagaatgtatcaattagctcagatactactgacttgacaagaaacccttatcataagcaggatgacaatgtatattcaagaaggtgctgagagagaagttttt

SEQ ID NO: 937374 - DNA, 120 bp, Artificial Sequence
  ENSG00000286845_1 (sequence is synthesized)
ccatcagcctcatctgaatgagacatacttccccaaagaaatgcttatttttcagcacgtcaacctccatcttgacagacgaagaggcaaaaactggagtcatattgagtaggtctgaaa

SEQ ID NO: 937375 - DNA, 120 bp, Artificial Sequence
  ENSG00000286845_2 (sequence is synthesized)
ttgtctactgtgctaagatcatgttcagtttgtcatctactttcctcaagaagaatcgccagccatggagaaataggaagatagagatcaggggaagttgagattcagaagctctaagca

SEQ ID NO: 937376 - DNA, 120 bp, Artificial Sequence
  ENSG00000286845_3 (sequence is synthesized)
aaggcaatgggtaagatctagtcccttgcctctagagcaaatgtcagggtggccctcggaggctgagccagtcgcaaatgtatggtcaagtacccaaagggctgaaaggcaaaaaggaga

SEQ ID NO: 937377 - DNA, 120 bp, Artificial Sequence
  ENSG00000286845_4 (sequence is synthesized)
agactacaagggagaaaagcaggttgcacactgggaagaaggttctggaagcagctcttgtcccgggcaatagtgttggcatggggatgctctcctagaatgatctggtacaatccagag

SEQ ID NO: 937378 - DNA, 120 bp, Artificial Sequence
  ENSG00000286845_5 (sequence is synthesized)
tatgggtaaaactttgcactggtgactaggaaggcaacaacgttctggatagctcataggaaaacacccgcccttcttactctagggtgaaaagccactgccccagcctggaccgctacc

SEQ ID NO: 937379 - DNA, 120 bp, Artificial Sequence
  ENSG00000286845_6 (sequence is synthesized)
cagccttttgaacaatgcctacctcaatccttccagttcttgtcatctccagtaatcaaaaaagaaggctttggccaagccaccttccaccccaggttgtccattgactgccctggtcat

SEQ ID NO: 937380 - DNA, 120 bp, Artificial Sequence
  ENSG00000286845_7 (sequence is synthesized)
gagtgttatgggtaccatgggctaccaggaccaagagtgttccaagtcgcttctgttatcttctgcttaggtcaagcaaaggaactcctgtgagtaattcataaagtacttatactcgaa

SEQ ID NO: 937381 - DNA, 120 bp, Artificial Sequence
  ENSG00000286848_0 (sequence is synthesized)
cgaacgtggttttctcctgtgttcactgtgtttttcacttctcagaggttaccaccaccaggttatggacgcccaccaatcagcaatgaagaagggggggatcttcggaagaacggatga

SEQ ID NO: 937382 - DNA, 120 bp, Artificial Sequence
  ENSG00000286848_1 (sequence is synthesized)
tcctggaagtaatccgggcacacttacatttgttgtcaacaagaacaatcctttcatcttcttgggcttgaaagatgcagagaggtgttcataaagagcaatatcagatggcaccccaaa

SEQ ID NO: 937383 - DNA, 120 bp, Artificial Sequence
  ENSG00000286848_2 (sequence is synthesized)
ggaactctaaagatttagttggaaaagtagcaccgggtttacatcatacactgccttgtattccagtaatctgtatgagtgtcttcttttctacctgattatacagtccttaactggctg

SEQ ID NO: 937384 - DNA, 120 bp, Artificial Sequence
  ENSG00000286848_3 (sequence is synthesized)
attcatcactattgtctgtagcattctacaacaaacagtaagcagttaatatctgctaaatgacaaaatgtactaaaatttacattaaaaaataaattcatgcttaccatcagaacataa

SEQ ID NO: 937385 - DNA, 120 bp, Artificial Sequence
  ENSG00000286848_4 (sequence is synthesized)
agctacactcatgttcattcattcaacaaatatgtattgagtacttccatgtgccagacactgttccagatggtgaggaaacatcaatgggcaaaagtgcgtgccttcgtggagattaca

SEQ ID NO: 937386 - DNA, 120 bp, Artificial Sequence
  ENSG00000286848_5 (sequence is synthesized)
atcttcggaagaacggatgatcctggaagtaatccgggcacacttacatttgttgtcaacaagaacaatcctttcatcttcttgggcttgaaagagatggagtttcaccatgttgcccag

SEQ ID NO: 937387 - DNA, 85 bp, Artificial Sequence
  ENSG00000286848_6 (sequence is synthesized)
gcctcccaaagtgctgggattacagagccaccgcacctgaccttgataagtattgcaaggaataaacaaaggaaattttgtatca

SEQ ID NO: 937388 - DNA, 120 bp, Artificial Sequence
  ENSG00000286849_0 (sequence is synthesized)
ggggcaggcaggctctctgtcacctgcagaggctgagacaacctcaagccagaggagtcctgcctaagaaattgggaaagagagcggagaagacaaaaagcaggtttgggaaggctgcag

SEQ ID NO: 937389 - DNA, 120 bp, Artificial Sequence
  ENSG00000286849_1 (sequence is synthesized)
ggagctgatgagtcatttgatcatctggaaagcagatgggaagacaagtggagaccaggaggccctggggaagagaagctgtgttcacgccaaccttccccagcaggcctcagaagctgg

SEQ ID NO: 937390 - DNA, 120 bp, Artificial Sequence
  ENSG00000286849_2 (sequence is synthesized)
gggtcaaaagggaccacaacgcccatttaaacaaggaggaagatgctgaacagctaaagggttaattcaaaagaaaaaacaaaagaagaaatggccatttcttttccttgttcactcaat

SEQ ID NO: 937391 - DNA, 120 bp, Artificial Sequence
  ENSG00000286849_3 (sequence is synthesized)
gttccttcaacaaattattctatgtgcttggaatatatgaggccctgggttgggtgtggtatgcaacagaaaaataaaacataagaacatagtatgtctcttcccacagggtcatatggt

SEQ ID NO: 937392 - DNA, 120 bp, Artificial Sequence
  ENSG00000286849_4 (sequence is synthesized)
atagtatgtctcttcccacagggtcatatggtctttcgaaagtcacccttttaatttgaaaccttttgctgcttctttatttttattttttaatttaatttttttgagacagagtcttgc

SEQ ID NO: 937393 - DNA, 60 bp, Artificial Sequence
  ENSG00000286849_5 (sequence is synthesized)
cctcccctgccaccaccccagctagtttttatatttttaggagagatggggtttcgccat

SEQ ID NO: 937394 - DNA, 120 bp, Artificial Sequence
  ENSG00000286849_6 (sequence is synthesized)
caaagtgctaggattacaggcaggagccactgcgtccagcctatttattcttattttaaaaatttatatatatgtgtatatatataaggggtataacacagcgttatttttaaggaataa

SEQ ID NO: 937395 - DNA, 120 bp, Artificial Sequence
  ENSG00000286849_7 (sequence is synthesized)
cacagcgttatttttaaggaataagagatattttgcttttcaaagtgcctgctaagcccagtgacatacgcttggttagcaatcactaaatgtggacacattataaatcctctatatatt

SEQ ID NO: 937396 - DNA, 120 bp, Artificial Sequence
  ENSG00000286849_8 (sequence is synthesized)
agagatggggtcttgctatgttgcccagtatggacatgcgttcctgggctcaactgatcctcctgctcagcctcccatgtgctgggattataggcatgagacagcagcactcagtctctt

SEQ ID NO: 937397 - DNA, 120 bp, Artificial Sequence
  ENSG00000286849_9 (sequence is synthesized)
tctttgtttatttctctgcctgctccccacccatctgtgtgacccctactaaaataaccactgcatggtgttcaaggaagagtatggccttgggattcaggcaggtctgcattctaaccc

SEQ ID NO: 937398 - DNA, 120 bp, Artificial Sequence
  ENSG00000286849_10 (sequence is synthesized)
tctaacccagggccttctaccttctggctatgtgcccctgagcaagtaacttggcctctgctatggcttagatgtgtgtcccctccaaaccgcatgttgaaatttgatccccagtgttgg

SEQ ID NO: 937399 - DNA, 120 bp, Artificial Sequence
  ENSG00000286849_11 (sequence is synthesized)
tctaatgggaggtgtttgggttttgagggtggatccctcatgaatagatcaataccctccttctattagttctgcaagagctggatgtttacaaacagtctggccttcccctccctctct

SEQ ID NO: 937400 - DNA, 120 bp, Artificial Sequence
  ENSG00000286849_12 (sequence is synthesized)
cttgctttcttgcttacctgtaatatctgcacatgccaactccccttcaccttccactgtgagtgaagctgtcggaggccctcgccagatgcagatgcctaatcttgaacttaccagcca

SEQ ID NO: 937401 - DNA, 120 bp, Artificial Sequence
  ENSG00000203288_0 (sequence is synthesized)
cttggaggaaaatctgcgctccagcagctgggaccgaggcatgagagcgttgaatcatgagtggcaccgttcgcaaaaattggtgtctttgtacaaagacagtgccacaacacaactcag

SEQ ID NO: 937402 - DNA, 120 bp, Artificial Sequence
  ENSG00000203288_1 (sequence is synthesized)
tgaccatcgggagagcagcctcatgatgggcgatgctccatcagttttctcttgcgatcttttgcatagatcggtcccgccccgcatatggcgatgaggactcaagagacacggaaaacg

SEQ ID NO: 937403 - DNA, 120 bp, Artificial Sequence
  ENSG00000203288_2 (sequence is synthesized)
ttttctttctggaaaacatgaaataggctttgtagatggacaggaagtcaagggacaagcggtgcgccgcagagagcgaggacccactcttctattcctttgcggaggcacggacacacg

SEQ ID NO: 937404 - DNA, 88 bp, Artificial Sequence
  ENSG00000203288_3 (sequence is synthesized)
gacccactcttctattcctttgcggaggcacggacacacggtgtggcccgaaacagcggcaggagagtgagacccgggctccgaccgc

SEQ ID NO: 937405 - DNA, 120 bp, Artificial Sequence
  ENSG00000203288_4 (sequence is synthesized)
ggcatgagccactgcgcccggcctaaaaattttttaaattgtatacattatggtttttttttttaccacaatttaaaaaattaatttataatatacatgcagaaaaatgcacaaatgaca

SEQ ID NO: 937406 - DNA, 120 bp, Artificial Sequence
  ENSG00000203288_5 (sequence is synthesized)
atacatgcagaaaaatgcacaaatgacaagtatatatcttgatgaattttcacaaatggaatacatttgtgtaaccagcagcagatcaagaaacagaacattgctagtgccccagaagcc

SEQ ID NO: 937407 - DNA, 120 bp, Artificial Sequence
  ENSG00000203288_6 (sequence is synthesized)
acttgtgtgttccctctcagtcactgctcttctcaaggacaaccactcttctgactcctgataccataaactaattttgcctgttcttgctttttatataaagagaatcacagagtatgt

SEQ ID NO: 937408 - DNA, 120 bp, Artificial Sequence
  ENSG00000203288_7 (sequence is synthesized)
accgcggtgacgctgtcctggtccctggacggttaggaacggttgggtcctgctactgcctccgtggggcagggagcctcgcgagaccagcactgcgccctactcggtccaccctgtccc

SEQ ID NO: 937409 - DNA, 120 bp, Artificial Sequence
  ENSG00000266222_0 (sequence is synthesized)
agggcttaagaactgtcagtagctgacaacatttcagcctgattagctcctggggtgaggagatggggatatgttcatatgctgctctgtgcttccttgtgaactggcaacatctcaaga

SEQ ID NO: 937410 - DNA, 88 bp, Artificial Sequence
  ENSG00000266222_1 (sequence is synthesized)
gactggtctgaaattcctggaatgctggaattataggcatgagtctccatcctggctgcactacagtaaagtttagtcttcaacctca

SEQ ID NO: 937411 - DNA, 120 bp, Artificial Sequence
  ENSG00000197989_0 (sequence is synthesized)
ccggtgtcgacttactagctgcaagcctctgcctgccttcctgcgcgccgttccccgctagtcgctgctgctggcgcgcactcgccgggtttttcctcccacggcctcgagatggtggtg

SEQ ID NO: 937412 - DNA, 120 bp, Artificial Sequence
  ENSG00000197989_1 (sequence is synthesized)
aatgtggcacggaggagccgggccttccaacccggtgggcccgagctccgaaaggccccctcggcagtgagaggggcgggagcccgcgggggccgcgcccttctctcgcttcggactgcg

SEQ ID NO: 937413 - DNA, 120 bp, Artificial Sequence
  ENSG00000197989_2 (sequence is synthesized)
agtctacagagatcccggcgtacttaagcaggtagtaatgatggacagatgaagactcttaagatgacagaaggtgatttttctggtgatcgaggacttccggggtaatgacagtgatga

SEQ ID NO: 937414 - DNA, 120 bp, Artificial Sequence
  ENSG00000197989_3 (sequence is synthesized)
aatgcaggggacctggtaggtttcttttggagactaactgggggctgcctggtgggacagaacagcatgtttccaagggctgtggctggtcatagccatgggatctccaactgcatgcaa

SEQ ID NO: 937415 - DNA, 120 bp, Artificial Sequence
  ENSG00000197989_4 (sequence is synthesized)
gagcaacctggaaagactttgacagcgcaggtcagtacaatacctgcaagctgccactcagctttcctataatgtttcaggaccagggctggaagccttccatgtgtcaacttcaatgta

SEQ ID NO: 937416 - DNA, 120 bp, Artificial Sequence
  ENSG00000197989_5 (sequence is synthesized)
tgactgacttagtctacagagatcccggcgtacttaagcaggtagtaatgatggacaggtgaggctttaggcggccgccctgggatctgaattgccccttggcccttatcgaagctgcag

SEQ ID NO: 937417 - DNA, 120 bp, Artificial Sequence
  ENSG00000197989_6 (sequence is synthesized)
atagctgctgtggtcaaaaaggagcccagagtgacagttttccttgacggtcgccgttctgtttgttgtaactgatctgcaacattttgggaaaatacagttccattgtacctgccacct

SEQ ID NO: 937418 - DNA, 120 bp, Artificial Sequence
  ENSG00000197989_7 (sequence is synthesized)
ttcagctgtagccagagacctttatcaaaatgggcttgtttccacagaacagcagaacggttgggggtttgcatgtacagttaaccagcataagactcgtactgggaaaatccagctggg

SEQ ID NO: 937419 - DNA, 120 bp, Artificial Sequence
  ENSG00000197989_8 (sequence is synthesized)
atgtgacacagcttaactgatagcttaaggcatcagtattgggaccaaaggctggtcagatttgtatcattctgaggaccaaatgatgggaacaataaaattgttcatgacagttgttct

SEQ ID NO: 937420 - DNA, 120 bp, Artificial Sequence
  ENSG00000197989_9 (sequence is synthesized)
ggcagtgtgtgatactgaggaggtgagcttgtttctggagctgtgctttaaggtaaagttgatcagcttaatcctcctgatccctttcccatcggatctgaacactggtcttggtggtcg

SEQ ID NO: 937421 - DNA, 120 bp, Artificial Sequence
  ENSG00000197989_10 (sequence is synthesized)
gaatccctgggcctgaagtgtcttaattcagggggaggccgcatgctggtgtcaggatggcctccagttgaatctgtgacatttaccagctaggtgattttgggactggtgactacgcgc

SEQ ID NO: 937422 - DNA, 120 bp, Artificial Sequence
  ENSG00000197989_11 (sequence is synthesized)
gagacctctggaggtcgccctggtagacacggttttcagaaggacgggttttaggcattcagacccttgcgtgcatcccagcttgttgctttcagcctcgctaagtgactaagcgacctt

SEQ ID NO: 937423 - DNA, 120 bp, Artificial Sequence
  ENSG00000197989_12 (sequence is synthesized)
caggaagtaacttaatcggtctaaacctcttacctgtaataggcggataaaacggtcccatcaagactgagaaaaagcacaccagctattggcacagcgtgggcagtggggcctacagga

SEQ ID NO: 937424 - DNA, 120 bp, Artificial Sequence
  ENSG00000197989_13 (sequence is synthesized)
ggatctctgaaattgtaaaatgaagtataatcttaggctaagggaaggatgcgtgtgaagctctggaggttggtatagtaatagctgacctattactgcatttgggagggatctgtcata

SEQ ID NO: 937425 - DNA, 120 bp, Artificial Sequence
  ENSG00000197989_14 (sequence is synthesized)
gcttccttgcctcttaattaagggtggtgtttttttcttttagattcatgttacatgtaaagctgtcctcatttgtgactatggacctatggagttgggacaatctctatgggaagcaga

SEQ ID NO: 937426 - DNA, 120 bp, Artificial Sequence
  ENSG00000197989_15 (sequence is synthesized)
aggcaaggaccccggtcattttaggtagaaacaacagcatgctaatgcaaaaaattatgcagtgtgctactgaacttcagaggtgatcaataaaagaagaataaaaagactaataaaagt

SEQ ID NO: 937427 - DNA, 120 bp, Artificial Sequence
  ENSG00000197989_16 (sequence is synthesized)
agctaattttcttgtatttttagtagagatggttttcaccatgttggctagatgggtctcgaacttctgacctcgggtgatccgcccgactcggcctccccttccaaagtgctgggatta

SEQ ID NO: 937428 - DNA, 120 bp, Artificial Sequence
  ENSG00000197989_17 (sequence is synthesized)
cccaaagtgctgggattacaggcgtgagtaaccgcacccggcagtagtacctactttttaaagtgtaagcaaggaaagttggcccgcacctgtagtcccatctacctgggaggctgaggt

SEQ ID NO: 937429 - DNA, 120 bp, Artificial Sequence
  ENSG00000197989_18 (sequence is synthesized)
ggaaagttggcccgcacctgtagtcccatctacctgggaggctgaggtggaagaattgcttgagcccagttggtcgaggctgcaatgagccttgatcacgccactgcactccagcctggg

SEQ ID NO: 937430 - DNA, 120 bp, Artificial Sequence
  ENSG00000197989_19 (sequence is synthesized)
accctgtctcaaacaaaaaagtgtatgtaagaataaaaattaatagattaggcacaggatgggtgtttaattctcggcaatcaccactaagttttcatactgaggcttattcattccatg

SEQ ID NO: 937431 - DNA, 120 bp, Artificial Sequence
  ENSG00000197989_20 (sequence is synthesized)
ggcaaaacattgcgctatgtgtggtgcctggggtgggctccaaattccagtcctctcctcgcttgcgatagctgtgtgatccattcctaagtttccttatttgtccacagagcgtacaca

SEQ ID NO: 937432 - DNA, 120 bp, Artificial Sequence
  ENSG00000197989_21 (sequence is synthesized)
gggtttttatgaaaactagatcagataatcagacacagttaaaatagcacgcgctcagtaaaattacatattagtggaagagacaagccttgaataaatcgcctttcggggagtatgacc

SEQ ID NO: 937433 - DNA, 120 bp, Artificial Sequence
  ENSG00000197989_22 (sequence is synthesized)
ccctccccgaaacccactcaggcgctgctcgctcgcacgcccactgagctcggagcggagcccgagccctttcccagcacacagggttcatttccagactgaaagacatcccagagacaa

SEQ ID NO: 937434 - DNA, 120 bp, Artificial Sequence
  ENSG00000197989_23 (sequence is synthesized)
tccgctcggaggaaagcctctggcggttctcgcttcgcgggctcgggatggacacgcgcgtagggctggggaggtgacgcgcggacaacgccggggcgagcaaactacaactcccaggca

SEQ ID NO: 937435 - DNA, 67 bp, Artificial Sequence
  ENSG00000197989_24 (sequence is synthesized)
ccacgacctgctaaagtagtacttacagagtgcagtgacgcgatctcggctctctgcaagctccgcc

SEQ ID NO: 937436 - DNA, 120 bp, Artificial Sequence
  ENSG00000197989_25 (sequence is synthesized)
gtttctggagctgtgctttaagattcatgttacatgtaaagctgtcctcatttgtgactatggacctatggagttgggtaagttagtgactacccaaagctttgtcacaacttggtgtgt

SEQ ID NO: 937437 - DNA, 120 bp, Artificial Sequence
  ENSG00000197989_26 (sequence is synthesized)
agctgcaggtagtgctcaactatctgggatcctgtcctaagtagtcaacctaatagaactataaggttacttaggtctgtgtcaaagttacagctttttttttttttttttttgagacag

SEQ ID NO: 937438 - DNA, 120 bp, Artificial Sequence
  ENSG00000197989_27 (sequence is synthesized)
aggcatgaaccactgtgccgggccagaaagtcttagcatcttagtaacatttacatttggcctccctcgtgtgcccttagctattcattaccagagggcaaagatggttagaacatgatt

SEQ ID NO: 937439 - DNA, 120 bp, Artificial Sequence
  ENSG00000197989_28 (sequence is synthesized)
atgagccaccgctcctggccagtttagttttcacgctaagctttttgttctgcaggttgcccccaagtttcctggcagtgtgtgatactgaggagattcatgttacatgtaaagctgtcc

SEQ ID NO: 937440 - DNA, 68 bp, Artificial Sequence
  ENSG00000253481_0 (sequence is synthesized)
acggacgcgagggcccccactcagctcctggggctcctggggctctggctgccaggtaccagacgtga

SEQ ID NO: 937441 - DNA, 120 bp, Artificial Sequence
  ENSG00000253481_1 (sequence is synthesized)
gtcactatcacttgccaggtgagtcacagcattagtaataaattagtctggtatcagcagaaaccagggaaagcccctactctcctaattcatgctgcaacaaaactgcagacgggggtc

SEQ ID NO: 937442 - DNA, 76 bp, Artificial Sequence
  ENSG00000253481_2 (sequence is synthesized)
tctcctaattcatgctgcaacaaaactgcagacgggggtcccatcctggttcagtagcagtcacagcgtgatgatt

SEQ ID NO: 937443 - DNA, 120 bp, Artificial Sequence
  ENSG00000235381_0 (sequence is synthesized)
tcgctcaggatgtcactctctttgatgagattgtcggcaaaatctgccaagccggggtgtgggtatttcccgggagaagtgctcttggagtcctgcctgccctcagccgtggggcagccg

SEQ ID NO: 937444 - DNA, 120 bp, Artificial Sequence
  ENSG00000235381_1 (sequence is synthesized)
ctgctctgggtgccgctgctcaagctgccctcgtcagagtccagcaaggttcccttgccagtctcaccggtccactcgttgctggaggaattcttcaggacttttaaagacctggatgaa

SEQ ID NO: 937445 - DNA, 120 bp, Artificial Sequence
  ENSG00000235381_2 (sequence is synthesized)
gctacagtgagaaaaacacatttcgctgtgatacagaaacaggttacacaatgtgtaatgtttgcctcaaagcttgtgtaagatttaacattaagattttattttatgatatgacttcag

SEQ ID NO: 937446 - DNA, 120 bp, Artificial Sequence
  ENSG00000235381_3 (sequence is synthesized)
ttagcaactatcctggtaattaggcaaaaatgtagctactgaaaacatggacatttttgacttaggtttacagttgtaagttaggcaattcagcatttttagattaccagagctcaatta

SEQ ID NO: 937447 - DNA, 120 bp, Artificial Sequence
  ENSG00000235381_4 (sequence is synthesized)
tgtaaatagaactagacactagaaactactacatgggctaagattcttattttgccaaggagtaagttgaaaagttaattggtaataataaatctaggctcctttctttcactaaggtgc

SEQ ID NO: 937448 - DNA, 120 bp, Artificial Sequence
  ENSG00000235381_5 (sequence is synthesized)
tttgtaatttgatcatgaagatcacaccatattcctatgcatcttctcaccttgtggatttcccttgctgctcaattaaaagtagaaaatgcccctccccccccctttttttttaaagac

SEQ ID NO: 937449 - DNA, 69 bp, Artificial Sequence
  ENSG00000235381_6 (sequence is synthesized)
gatcctcccatctcagcctcctgagtagttgggactataggtgcgcatgatcacgcctggctaattttt

SEQ ID NO: 937450 - DNA, 120 bp, Artificial Sequence
  ENSG00000235381_7 (sequence is synthesized)
ggcatgagccaccatgcccagcctagaaaatgctctttatctctcatatgagaactgtctctgctggaatttcaaaacaactttctgaaattttatgttataggtgtgtgtgtgtgtgtg

SEQ ID NO: 937451 - DNA, 120 bp, Artificial Sequence
  ENSG00000235381_8 (sequence is synthesized)
gttataggtgtgtgtgtgtgtgtgtgtagttctgttctcttggattgaaagaaggaagggagttctcagttttggtgtttctacaaagtaataacagcatgttattttgatggccagttt

SEQ ID NO: 937452 - DNA, 120 bp, Artificial Sequence
  ENSG00000235381_9 (sequence is synthesized)
attttgacaatggagaaaatagtaaatatgtggtagatctgaagaggtcacactgatttgacatgaaaaagcgaagttttacattttctaagcctaaaaacaagaaagataataacaaaa

SEQ ID NO: 937453 - DNA, 120 bp, Artificial Sequence
  ENSG00000235381_10 (sequence is synthesized)
tagttaatgtagaaataaggttctgaaaacttaagctgaaattttagaaacaagcagaaagaacaacgtgatttgaaatgcttacttggtgccctatcgattaagaacgagtataagagg

SEQ ID NO: 937454 - DNA, 120 bp, Artificial Sequence
  ENSG00000235381_11 (sequence is synthesized)
aaccactgcggcttagcctagcctgccttcagtgtgctcagaacacttacattagcctatggttgggcagaacacaaggcctgttttataattaagtgttgagtatctcatgaaatgtat

SEQ ID NO: 937455 - DNA, 120 bp, Artificial Sequence
  ENSG00000235381_12 (sequence is synthesized)
tgaatgctgcactagaagcaaaaaacagaatggttgtctgggtactcgaagtacgatttctactgaatgtgtgtcactttcacaccacggtaaagtcgaaaaattgtaggttgaaccatc

SEQ ID NO: 937456 - DNA, 120 bp, Artificial Sequence
  ENSG00000235381_13 (sequence is synthesized)
agaaggtggagaccctctgtgtaaggttcttgatcttcattcagcattgaccttcaggatgcctggcactgttctgagcactgggaatacagcagtgaggaaaacaaagtccctggaccc

SEQ ID NO: 937457 - DNA, 120 bp, Artificial Sequence
  ENSG00000235381_14 (sequence is synthesized)
atgcacatcttagtggaagaaacaaaatcgtacatttggactatgtcagcgggtaggaagacaagggactgggggttgggggtggctgtattttacagtagaacgtctgggagcaagagg

SEQ ID NO: 937458 - DNA, 120 bp, Artificial Sequence
  ENSG00000235381_15 (sequence is synthesized)
catgtttaggtttcttaaaaggagataaaggtacctcgatgacttacaaagtgaaaagtcacagctatgttacaagagcatatatccttttcagaagctcataatattttgttgaataaa

SEQ ID NO: 937459 - DNA, 120 bp, Artificial Sequence
  ENSG00000235381_16 (sequence is synthesized)
cacaaggctagcaaaattctcacctaatttggccgaaacaggaactcggttcttaagaggtaccaggcgatccttacacgttttctccagtggtaattcacactttatgtgacgcctgaa

SEQ ID NO: 937460 - DNA, 120 bp, Artificial Sequence
  ENSG00000235381_17 (sequence is synthesized)
gttctccctcagaatagaacgaatcaccttaacaatgttggttttgctttcactgtcactgggtggggggggagagaaaacagcagaagtgtccacagtgttcatcgtgcttccattcca

SEQ ID NO: 937461 - DNA, 120 bp, Artificial Sequence
  ENSG00000235381_18 (sequence is synthesized)
cgcccgcctgtgttcctgtgccttgcacctgctggaccaggctgccagccagccacccagcagcagtgccatgtggcctcccgtacagaaggagattttcctccatctgaactgccttca

SEQ ID NO: 937462 - DNA, 120 bp, Artificial Sequence
  ENSG00000235381_19 (sequence is synthesized)
ccctctctctggagcccctctctggggaagaggagattcagtggatcctattcttcaacctcctttgcagttttgccctttccttggaaggaacaggagctggggtacttgaggtaaaag

SEQ ID NO: 937463 - DNA, 120 bp, Artificial Sequence
  ENSG00000235381_20 (sequence is synthesized)
aggcctgccccaaatgtggtcattttctcgaaaacataagcacttctgacaaaagttaaacagaagcccagcaggtcactgcatgactcagcctgctggcctcttctgtcaccagatacc

SEQ ID NO: 937464 - DNA, 120 bp, Artificial Sequence
  ENSG00000235381_21 (sequence is synthesized)
tgtcaccaaaacaaggttactctggaaggatctctgaacattttccagagtcaaagatttttttctttttatatcacctacagtactacctaaccttaaggaattttctgctatattcta

SEQ ID NO: 937465 - DNA, 120 bp, Artificial Sequence
  ENSG00000235381_22 (sequence is synthesized)
aatttgtaaaaacataaatttgtggatctttgttcttctaacacattttagggtatcaaggcagaaaggaaaatgttgaaaactattgatagggaaaataaggaaacaatgaaaggcatt

SEQ ID NO: 937466 - DNA, 120 bp, Artificial Sequence
  ENSG00000235381_23 (sequence is synthesized)
tggcaaagaaaaagctatccaccagcatttagtttctcccagaagtctgctaaggaacatcaaaacaacctctcttgtcctcattttccttgtctataaaataaaaggcaccaaaaatta

SEQ ID NO: 937467 - DNA, 120 bp, Artificial Sequence
  ENSG00000264924_0 (sequence is synthesized)
ccaatgttccaggtgtggaaagggaagggaccatatttcatccccgtgtgcgcccagccctggcccagaagtctctcaatcgctactgagtgaatgcacgaagccgctccattagcccag

SEQ ID NO: 937468 - DNA, 120 bp, Artificial Sequence
  ENSG00000264924_1 (sequence is synthesized)
ttctcagtgagctcttcaccatacagttgatagtttgcttctataccctagaatgctgttctccaattgcttctgctcatcaaatctcctctcccgacacttcagaaattccctgaggat

SEQ ID NO: 937469 - DNA, 120 bp, Artificial Sequence
  ENSG00000264924_2 (sequence is synthesized)
cacataacactgtctgggacccagcaaactctcaaatgtccgctctacttactcccagtgaaatacatttcgttttcccgccgctgaagatgtcactcagggtctgccaacacgatgcca

SEQ ID NO: 937470 - DNA, 120 bp, Artificial Sequence
  ENSG00000264924_3 (sequence is synthesized)
caagtacccaagaggagcagctcaaaagcatgatcaggattcaaagcatcagtttaatcttaggcattgagaaatgctaaatgtcacataccattaataaataaatcttaaacagccaga

SEQ ID NO: 937471 - DNA, 120 bp, Artificial Sequence
  ENSG00000225075_0 (sequence is synthesized)
cagaagaggtgtgggaagaaagactccggtcgtacagcctggcagagggaccaggaatgtgaacttgaagtcatccagtgacccagaggcctccctgactccaccccctgtgcccacact

SEQ ID NO: 937472 - DNA, 120 bp, Artificial Sequence
  ENSG00000225075_1 (sequence is synthesized)
agagcatgggccacagcagccagcgccctgtcagctccagggcacggtgctggactcgcagcggctggcggttgaaggagtcaggggaagaggaagaagacaaatcctccgaagctgccc

SEQ ID NO: 937473 - DNA, 120 bp, Artificial Sequence
  ENSG00000225075_2 (sequence is synthesized)
agagatgccgagcccaggaacccggagcctccagtgcagctgccctcttggccagctcagttcctgctctgcctataaaaatcctgttcatcagttaatcgggttgctaaaaaaataatt

SEQ ID NO: 937474 - DNA, 120 bp, Artificial Sequence
  ENSG00000225077_0 (sequence is synthesized)
aatcaacccacaggcacgaaatcacaagggctgaaatgtgagcaactagggggaagccaggagacttcgtttccagagaaccctgaacagccttctgccggtcacagatgagacagggat

SEQ ID NO: 937475 - DNA, 120 bp, Artificial Sequence
  ENSG00000225077_1 (sequence is synthesized)
gaggaaatgccgctacagaccctctgatctgtccaccctcgcctgaaaaccagtatttccgaaggaattcttaccagccaaagtgactccaagaagactggctaaaacttagcagcgtgc

SEQ ID NO: 937476 - DNA, 120 bp, Artificial Sequence
  ENSG00000225077_2 (sequence is synthesized)
cgcagccgaacacaaaccccaggaaacaagctcggatggctatctgaaaggaacccaagagaagctcagtcattcacagtcctcagagtacagatctgggctgctgaccttcccggaata

SEQ ID NO: 937477 - DNA, 120 bp, Artificial Sequence
  ENSG00000225077_3 (sequence is synthesized)
ggcaacccacagacacagggtctcactgtgttggccaggctggagtgcggcagtctggaactcctgggcccaagtgatcctccaatcagcctcacaaagcactggaattacagatggagt

SEQ ID NO: 937478 - DNA, 120 bp, Artificial Sequence
  ENSG00000225077_4 (sequence is synthesized)
ataggcatgagccaccgtgcccggcccatagattacttttataatcaagtttttctttactttttaaagagtaaattctctcacctcaggtagctcagagagctgcgctggaggagaaaa

SEQ ID NO: 937479 - DNA, 120 bp, Artificial Sequence
  ENSG00000225077_5 (sequence is synthesized)
ggagaaaagccagtcctggcaggagctctggtacctgggaagctggatggagagcctgggccagaatcccggacccctcacctctgcggcctagctttgtgaccttggcaaatccattct

SEQ ID NO: 937480 - DNA, 120 bp, Artificial Sequence
  ENSG00000225077_6 (sequence is synthesized)
atgcacctccatttcctgtacagtggggatccttatttctctggcacagattggtatttgttctgtaaagcccagtaccactttattttattttagttattgatttttttgagacagggc

SEQ ID NO: 937481 - DNA, 120 bp, Artificial Sequence
  ENSG00000225077_7 (sequence is synthesized)
caccactgcgcctagctccagtaccatgtttaaacggtgctcagaaaacgtgctaaacttggtggatgggaattgaaaagagatttaatgttttaaaaatcaaagtcactcagctgcagt

SEQ ID NO: 937482 - DNA, 120 bp, Artificial Sequence
  ENSG00000225077_8 (sequence is synthesized)
gccacatgggaaggaggcctggatgtgaatgttcctgggagctgagagctcctgtgactgtcgccagtttcctgtggtctcccacagactcaggacatctccctctgctccaggacacct

SEQ ID NO: 937483 - DNA, 120 bp, Artificial Sequence
  ENSG00000225077_9 (sequence is synthesized)
caggaccaccagagggcactcatcgcaccttcacccctggaagggagctggtcctggggccaaaacccactgtgcctgggaagcccttcctggcttctgctctcctcaatgtatgacagc

SEQ ID NO: 937484 - DNA, 120 bp, Artificial Sequence
  ENSG00000225077_10 (sequence is synthesized)
cctgatttacccccagggactgttgccactcggggttgtagagtaatatgtaaccagactggagaaccacagcaatgctctctcctctgcccatcacctccccttggcccctccctcttc

SEQ ID NO: 937485 - DNA, 120 bp, Artificial Sequence
  ENSG00000225077_11 (sequence is synthesized)
atcagccccattttggagaagggagaaagaagggagaggcagcagtctcctcccaggtggggccggactccagggaaggagaattttcagaagttgctggagttgccgaatctgtcaggg

SEQ ID NO: 937486 - DNA, 120 bp, Artificial Sequence
  ENSG00000225077_12 (sequence is synthesized)
cccagggttcacagagcagtgatggaggagaaaggagaggaagcagatctaagcacacatgggcatcaaaccagaggaacaaagtcacatgcagagggctgcacatagacacagggaaac

SEQ ID NO: 937487 - DNA, 120 bp, Artificial Sequence
  ENSG00000225077_13 (sequence is synthesized)
acacacacggagatgcacagaaacacgcagaccccatgcagggacctgctttcccgccacagaggaaagcaatctgatcaaacagacccactgtgcacccagccctccatgcttggggac

SEQ ID NO: 937488 - DNA, 76 bp, Artificial Sequence
  ENSG00000225077_14 (sequence is synthesized)
tgcctatattaggtttttaaatagcaggaggcaaagcttttcggtgtgatcctgacttcacttggggaaaaagggc

SEQ ID NO: 937489 - DNA, 120 bp, Artificial Sequence
  ENSG00000225077_15 (sequence is synthesized)
cttttcggtgtgatcctgacttcacttggggaaaaagggcagacacagggtctcactgtgttggccaggctggagtgcggcagtctggaactcctgggcccaagtgatcctccaatcagc

SEQ ID NO: 937490 - DNA, 120 bp, Artificial Sequence
  ENSG00000226527_0 (sequence is synthesized)
aggaaagctctatttgtcagtggctgggtggagggcaggaggacacccggggcctgacctgtgcacagcaggaccttgctatcccaccagaccggagtacacaggctgcatgtgaaggaa

SEQ ID NO: 937491 - DNA, 120 bp, Artificial Sequence
  ENSG00000226527_1 (sequence is synthesized)
gaggctgatctttgggctttccaaaagctgcagttctgggacctgggggaaaattggagtgcctggcttccaaacaggcataatggctctctgcaagaccaagtatgtacaaacatccct

SEQ ID NO: 937492 - DNA, 120 bp, Artificial Sequence
  ENSG00000226527_2 (sequence is synthesized)
tgagcagccctgcaagcctgatgcttcaccaatgggcacccgggcttcataactgctgaaaatcatggtgttgattatcagcacagtgacggtgccaggtgctgcggaatcagcttggat

SEQ ID NO: 937493 - DNA, 120 bp, Artificial Sequence
  ENSG00000226527_3 (sequence is synthesized)
tttgattttgcttcctttatgtgaagccaggagagagcttagcgcccagtactccgtgccccacccccaccacatcgcagcctcccacagtcaccaggaaaagtgggggctttcagcggc

SEQ ID NO: 937494 - DNA, 120 bp, Artificial Sequence
  ENSG00000226527_4 (sequence is synthesized)
agccagaaggaattcagaaacatcacatttcatttcgggaagaattggatcagcaccagtttggtgttgaggccatgagattgtggcatttttatcccaaatttatcctcccttggtctc

SEQ ID NO: 937495 - DNA, 120 bp, Artificial Sequence
  ENSG00000226527_5 (sequence is synthesized)
tctcagtgtgtgtgtctgtaggaagtcatcgtgtagcattatgctatgaagaaagcatcccacacttattcaattgcatcgtcccacattctggatcgggagacacagactcaagtcaac

SEQ ID NO: 937496 - DNA, 120 bp, Artificial Sequence
  ENSG00000226527_6 (sequence is synthesized)
gcagggaagcagccatcctgatgtttgcaggttggaggcctccaagtgacacacatcaggaagaaatgggctctccaatcccagatgagctgaaacacaaacgttttctgagggaacagt

SEQ ID NO: 937497 - DNA, 120 bp, Artificial Sequence
  ENSG00000226527_7 (sequence is synthesized)
caggagtcctatctttctgagcccttttcgatgcaagcaaccattgatgaagaagcatttatgcttgatacctatggcaggtgttcttcggtgtggagatgttgtcaatgaaagattcaa

SEQ ID NO: 937498 - DNA, 120 bp, Artificial Sequence
  ENSG00000226527_8 (sequence is synthesized)
aagtggttcaattatcagaagaccctatttgtttgcttttgcccagcttttgtttgctctgtcactcagggagaatataaacaactttggcgaggtaagatggaaaaacagccggtacgg

SEQ ID NO: 937499 - DNA, 120 bp, Artificial Sequence
  ENSG00000226527_9 (sequence is synthesized)
aaatgttcgatggacaaatgagaggacttggcagaagtttggcttagaagatgaatgatagagccccggacagaatgcaatagtggcaataggcatgcattctttgcagatgtgcaccga

SEQ ID NO: 937500 - DNA, 120 bp, Artificial Sequence
  ENSG00000226527_10 (sequence is synthesized)
aggctacaggctactgtgtctttttcttctggcttctctcttgagcttctgacactgcacagaaagtgggtcggtcctctgacaggcttgaaaaatgcaaaagtttaccaccaactggtg

SEQ ID NO: 937501 - DNA, 120 bp, Artificial Sequence
  ENSG00000226527_11 (sequence is synthesized)
ggaatacatgcaacacatgcataaaacagagcatcagtggtgaaatgcagcctgcagtttctctccgacagttatccagatagttcatctcaaaataatgattttgccataaacatacag

SEQ ID NO: 937502 - DNA, 120 bp, Artificial Sequence
  ENSG00000226527_12 (sequence is synthesized)
atattgcaggcaaaagccatcacaattcaaaagccgtaacaagaatggcttattcttttaagggttccttgttaactacagaaaatgatccacatgtcccattgaggtgctctaagatct

SEQ ID NO: 937503 - DNA, 120 bp, Artificial Sequence
  ENSG00000226527_13 (sequence is synthesized)
atggcctgcccacccaccgccccataataggcttaaatggctgctgtctataccacctgctgataatttttgactggttttcctaacttgaaaagatgagtgggaccctctaaattcttc

SEQ ID NO: 937504 - DNA, 120 bp, Artificial Sequence
  ENSG00000226527_14 (sequence is synthesized)
ttgtggggattggaattggaagagtgagagaatcagtcaagtgaaggcaggtgatactgcaaaaggacatgtagggtgcagggtacggtggcccatgagggccatgtgcgaattgcagga

SEQ ID NO: 937505 - DNA, 120 bp, Artificial Sequence
  ENSG00000226527_15 (sequence is synthesized)
ttcaggctccagaggggatttttctttttggtctgaagggtgaagcttgtctggtcggcagcttttgcaaactacagccgctcagttgagctcattcctctgaggtctctgtgctgcccc

SEQ ID NO: 937506 - DNA, 120 bp, Artificial Sequence
  ENSG00000226527_16 (sequence is synthesized)
aaaatggctcttctgggcctgatggaaaacctgagccaagcgctttaagtagacacaatgccccagagagacatccgatcctcaggcgggtgcaccagccacctgggccccttactctgc

SEQ ID NO: 937507 - DNA, 120 bp, Artificial Sequence
  ENSG00000226527_17 (sequence is synthesized)
ctgtggtcccactcctggcctttgctctgggattcctgctctctgggatgcctggacttgtctccctctgtccccgggataggaagcgtcgtctttgccgagggcccagggctgctcttt

SEQ ID NO: 937508 - DNA, 120 bp, Artificial Sequence
  ENSG00000226527_18 (sequence is synthesized)
gtgttttcaggggttcgagtctcctctctactgcttccctgtagtatgatcttaggcaaattatttaaccccccgtacctcagtttacccacctgtaaaaatgggctaatagtatccaac

SEQ ID NO: 937509 - DNA, 120 bp, Artificial Sequence
  ENSG00000226527_19 (sequence is synthesized)
ctcagggagctgttgggaggcttaagtgggttaatttatgcaaaggacttagaaccctgcctggtgcatagtaacaattattatctcccctgttagtctttaaactccttcaagcctcca

SEQ ID NO: 937510 - DNA, 120 bp, Artificial Sequence
  ENSG00000226526_0 (sequence is synthesized)
ctgccaggcctccaggcctcgcaagacctggctgtgtgcatcacaggctcacgagacccgggctatttgcagcagcaggaagcacgagagtgaagcctgagggggctcctctggatccca

SEQ ID NO: 937511 - DNA, 120 bp, Artificial Sequence
  ENSG00000226526_1 (sequence is synthesized)
gaaaggcagcactgaaggggccgtgacatcacccaggctgggggttctgcaccccctgacactgtagatcatgaaaccgaggccgagagaggggcaaggactttttcagaacccacctgt

SEQ ID NO: 937512 - DNA, 120 bp, Artificial Sequence
  ENSG00000226526_2 (sequence is synthesized)
gccgtatccttccaggcaccctctggtaccgccccaactgccgcctggctccggccatcctctgcctgggactgtggggacggctccaggctggggaagcaggtgagggttactctcgag

SEQ ID NO: 937513 - DNA, 120 bp, Artificial Sequence
  ENSG00000226526_3 (sequence is synthesized)
ctctgggagctgccctggcacctccctgtgctcacagagccatcttccctccctaggatgggaggcgccagagtcagcctttatgggggggccgagggttggggaagttggggaggccag

SEQ ID NO: 937514 - DNA, 120 bp, Artificial Sequence
  ENSG00000226526_4 (sequence is synthesized)
ggtagcaggggcttctgggaaggggcaatggggctgcctcacctgccctcgccgatggcctcagtctgcacctggacagtgaagagctgccaggaactatcctggaacacagaggtatgg

SEQ ID NO: 937515 - DNA, 120 bp, Artificial Sequence
  ENSG00000149443_0 (sequence is synthesized)
gctggagcagccagtgaggacactcagcacagtgtgggcaaccggacaggatggatttgaatttataaagaacctgccttccttccttcatggtccaagcaaatgttccaggtatttaag

SEQ ID NO: 937516 - DNA, 120 bp, Artificial Sequence
  ENSG00000149443_1 (sequence is synthesized)
ccacatgctggagaggattataaatatccaagggaaacagagaccatctggagtcatccctacgttgtggaggggtcccacaagagcccattagagagtttgtcacttcacggctgcctg

SEQ ID NO: 937517 - DNA, 120 bp, Artificial Sequence
  ENSG00000149443_2 (sequence is synthesized)
atggctccttccatcacatcctcagaagacagcagcccaagccaaagggacaaaaaagacctctccttggacctattgcttaccagaaagaaaaggtcccaaggcctccactggtctcac

SEQ ID NO: 937518 - DNA, 120 bp, Artificial Sequence
  ENSG00000149443_3 (sequence is synthesized)
tggcaaggactgaatcacatgtccatcaggattcacacccctgagcagggctccccgtcccttggacagaattggagttggggtaacaggaaagaaaagggtgttgcacagcgacaagtg

SEQ ID NO: 937519 - DNA, 120 bp, Artificial Sequence
  ENSG00000149443_4 (sequence is synthesized)
cccaccacaggtacccacagcttcttccattgcacctcggaaggcaacaaggagaaaccccatcatttttgagagctttggtgtcattacatttcaataacaaaggtcatttcccttttt

SEQ ID NO: 937520 - DNA, 120 bp, Artificial Sequence
  ENSG00000149443_5 (sequence is synthesized)
ggaatgttgcagaagaatgaaaaaggcttcaaagtacatttgcaaagatggatgagctgctgttatcaaagctgagcagttaaacaaagcccagtgtcttccaaaaccatgttcttgcca

SEQ ID NO: 937521 - DNA, 120 bp, Artificial Sequence
  ENSG00000226520_0 (sequence is synthesized)
aagaaggaaaagtccagaaggaaaaacagccagagaaagaagagagagaggagagaagataaacagagcaagacgaggccaggcgggaagagatgcagccaagagcagcaccgaagagga

SEQ ID NO: 937522 - DNA, 120 bp, Artificial Sequence
  ENSG00000226520_1 (sequence is synthesized)
gaagcagaggccagagggcctggagcaggtgagaaaaccagaaagaagtagtctcatacctggaatttcatccagtagctggagtacctgtcctatgtggtagaggctgtccagccatgc

SEQ ID NO: 937523 - DNA, 120 bp, Artificial Sequence
  ENSG00000226520_2 (sequence is synthesized)
tcatcctggtccaaagtggacgataatcccattgttaagacatgtctcattaagacttctctaagatggagccagcaaacagcccagtagcatcgaggctgctgcctgggaaagagtccc

SEQ ID NO: 937524 - DNA, 120 bp, Artificial Sequence
  ENSG00000226520_3 (sequence is synthesized)
ctcctctcccctgttcattaatgattatgggaggttttattccccccaacaaaagtgttaattagacatcatcggaacagggatattacacaaatgaattaaactcaaaccaatcaacaa

SEQ ID NO: 937525 - DNA, 120 bp, Artificial Sequence
  ENSG00000283400_0 (sequence is synthesized)
tttgctgagatggaggagggagagaaaacttctagtatgaaggagagttgtcctatcctaaatgccaatagggtccttgttgagaaatactttaccccccgtcaggtgatctggagacag

SEQ ID NO: 937526 - DNA, 120 bp, Artificial Sequence
  ENSG00000283400_1 (sequence is synthesized)
ttatgtgcaattcatattcagaaggtttaactacacaaacaaaatatgtcaagcaagtgaaagcagatttaaggagcgtattcagaaagaagtgtagttaagcctgtttttggacattta

SEQ ID NO: 937527 - DNA, 120 bp, Artificial Sequence
  ENSG00000283400_2 (sequence is synthesized)
tgttgaaatttcaaatgtgggcgaggaagctggctgaaatgcaatgattcccagggaaacttggaacccatgtgttgaaggtggtagcacttccatcagcctgggtcctgaatgcctgca

SEQ ID NO: 937528 - DNA, 120 bp, Artificial Sequence
  ENSG00000283400_3 (sequence is synthesized)
ggagaatatccttttgatccatgtacctgccgaggactgatggggtcttgttctgtcgcccaggctggagtgtagtggctcgactggctcactgcaaccttcgtctcctgagctcaagtg

SEQ ID NO: 937529 - DNA, 120 bp, Artificial Sequence
  ENSG00000283405_0 (sequence is synthesized)
ttagtctgtggttttgtgacaacctagtgatgttaagagaaaattaaatactcgataaaatagcttatttgaaaagattacaagcgaaggcgtctagatttgggcttctcctgcaacatt

SEQ ID NO: 937530 - DNA, 120 bp, Artificial Sequence
  ENSG00000283405_1 (sequence is synthesized)
aaacatgaggattcactgtccaaatatgggttccgcatataagagagctgctgttttctcctgcgctgacaggcaatgctatgtgatatgttggcaaacaattttactgttttcctctct

SEQ ID NO: 937531 - DNA, 120 bp, Artificial Sequence
  ENSG00000283405_2 (sequence is synthesized)
taaatgaagatctgggtgttgaaagacatttacataagtgctgtttgtgaacaggaaggccagttcttctattatcgccagaacatttaaatcttaatgactggcattgttgtctaaaag

SEQ ID NO: 937532 - DNA, 120 bp, Artificial Sequence
  ENSG00000283405_3 (sequence is synthesized)
acggtgtttttcctgctgagaaactgcattagattcaagaaacgaagctcatttccattctctcagcagtcttctctagaaatgacatgcagtgcttgaaactgtttatttccaaattca

SEQ ID NO: 937533 - DNA, 120 bp, Artificial Sequence
  ENSG00000283405_4 (sequence is synthesized)
atgtgcggatgaaaaggtgcaaaatagcttggacttcattagcatgcagggcctggctgttcatttgccggctgcggatggaagttctgacactcggagcttgctgcaaaatgagaaaag

SEQ ID NO: 937534 - DNA, 120 bp, Artificial Sequence
  ENSG00000283405_5 (sequence is synthesized)
tcctcttcaggggagatgaggtccttggtggtgaggaaaggtcatcaaaaagacagccgctgcccttgctccctgctctccatgactgcttattgattccaggaacacctcattacacgc

SEQ ID NO: 937535 - DNA, 120 bp, Artificial Sequence
  ENSG00000283405_6 (sequence is synthesized)
cggatcaacatattattgccatgttctgggactgaattgtttacaagtgtctttatcgccagcaaaggcctgcccggagatgcatgactacactcatttggctgtgacccgccaattatg

SEQ ID NO: 937536 - DNA, 120 bp, Artificial Sequence
  ENSG00000283405_7 (sequence is synthesized)
tgttatccgatatgttgctgggtatcttgatctttgcccgggtcttctcctggcatcaacacagtcccatttactacttctttctaaccactctttgggaaagtagccattagcctgtca

SEQ ID NO: 937537 - DNA, 120 bp, Artificial Sequence
  ENSG00000283405_8 (sequence is synthesized)
gtgcgtgtgtgtgtgtgtgtgtgtgtgttacctctgctacaggaaatctgagcatcgatgctccattgcttgctattcatgaggtgcataatcatttgggggaaagaaattctcactcac

SEQ ID NO: 937538 - DNA, 120 bp, Artificial Sequence
  ENSG00000283405_9 (sequence is synthesized)
acacaatttgcaatcagtatgcacaacagagagcataatgcagcttgttagcagctccctctgcttacatataggcccgacgagagagccgtcatattttatttgggcatagctactgca

SEQ ID NO: 937539 - DNA, 120 bp, Artificial Sequence
  ENSG00000283405_10 (sequence is synthesized)
aaccactgcacaggaccattttaatctttcattacagacacttctatggctccataaaagaaagagtggactagcaacttgattaaaaacttagtaaagagattgtgcaaaccctcccat

SEQ ID NO: 937540 - DNA, 120 bp, Artificial Sequence
  ENSG00000283405_11 (sequence is synthesized)
ccctgaaaagtggagccacagccttagtttcttactgacgccactctgcaatgcaaatgtgacttccatttccctccaatggtgactactgacataaatttaatgatgctgagaattgac

SEQ ID NO: 937541 - DNA, 120 bp, Artificial Sequence
  ENSG00000283405_12 (sequence is synthesized)
aacttctattaatttttgtgaatattgcttggagaaggtttaacgactccaccaaacattaggaccgtctcaaccaaatactaaaaaggggtccatttcatttacatttcctgttgccat

SEQ ID NO: 937542 - DNA, 120 bp, Artificial Sequence
  ENSG00000283405_13 (sequence is synthesized)
caagaatggctctttaatgagttttccgcagcaggatgtagagacacagatgccaagaaacttgcctttattttcttggaagcatatatccttggcaatgggcacatattaatatgatga

SEQ ID NO: 937543 - DNA, 120 bp, Artificial Sequence
  ENSG00000283405_14 (sequence is synthesized)
gtgaactgaaactcaagaatctaactgccttcagaaaagtgacatctgtatgcacattcatttccagcaatttcccagatttctttggtatttgtctttctttaattttttccaggtatt

SEQ ID NO: 937544 - DNA, 120 bp, Artificial Sequence
  ENSG00000283405_15 (sequence is synthesized)
ttttttctctttccaattttgagagaggagttttgtaaagatactgagttcttttggttctttccaaaatcccttagttttggctttctgacaaatcactattaataactggaaaaggct

SEQ ID NO: 937545 - DNA, 120 bp, Artificial Sequence
  ENSG00000283405_16 (sequence is synthesized)
gattaagaccccctcgtcagggtgcttcaactcaattaaagagtccatcaggagatgtttactccacccagtgttcaaggactctgctaattctgtactattctgtactattatcaacca

SEQ ID NO: 937546 - DNA, 120 bp, Artificial Sequence
  ENSG00000283405_17 (sequence is synthesized)
ataaataccctttggaagagaaagaggtgattggaaggattactcttggtttatttcggggggtactattgcacgagaagcttgatcaagggataaagatggaacaaaaaggagtgttta

SEQ ID NO: 937547 - DNA, 120 bp, Artificial Sequence
  ENSG00000283405_18 (sequence is synthesized)
ccaacattcgtatctgacgatcaagtctcagtgtggttggaactcagagaaggacaaaaagggtaactttcaataactaggagtcatccaaaaggaaaggggcttctttacaaatttaca

SEQ ID NO: 937548 - DNA, 120 bp, Artificial Sequence
  ENSG00000283405_19 (sequence is synthesized)
agaaattgtaatgatgcagcagtgggaatgcccaggcggtaggcactttgaggttgaatgccctaggtagaagggagagccacatccaggagcttctgccaattgttataaccagatcat

SEQ ID NO: 937549 - DNA, 120 bp, Artificial Sequence
  ENSG00000283408_0 (sequence is synthesized)
tttctttgcctgccgccatccacgtagaatgtgacttgctcctcttcgccttctgccatgattctgaggcctcccagccacgtcgaactacagaagaaggagatgccagtgacaagcaaa

SEQ ID NO: 937550 - DNA, 120 bp, Artificial Sequence
  ENSG00000283408_1 (sequence is synthesized)
gtaactcccccacggcatgggaagagccagcatctgctgctgtccaggaatacagtctcactgctgcagtcaaggaaggccaaagaagccaccggggaaaaccaacccatcccggggaca

SEQ ID NO: 937551 - DNA, 120 bp, Artificial Sequence
  ENSG00000283408_2 (sequence is synthesized)
ctggaggctcactccttcctcgctgcattctgaggctgctgctttggagtgagagattatcctctgcttctcctgaaagagaaggtgatatgcccaggacccttcctgagtaagatgtgt

SEQ ID NO: 937552 - DNA, 120 bp, Artificial Sequence
  ENSG00000283408_3 (sequence is synthesized)
tggtggagaagcttttgggaacttgctggggcaggctccaatcagcttaaagtccttgcaaagaaagaaattgtgccctgtctctcagcgtcgaccatagcagagagcctgggacatgaa

SEQ ID NO: 937553 - DNA, 120 bp, Artificial Sequence
  ENSG00000283408_4 (sequence is synthesized)
tgggtgtcattatttatctgctgaacaaatagcaaattatctggattttacagaggaaggaggacattgaagattagaggttgcatagcctgaccatgtttacatctactgcagatgaag

SEQ ID NO: 937554 - DNA, 120 bp, Artificial Sequence
  ENSG00000283408_5 (sequence is synthesized)
agattgcttcgcttcaaacctcctgactgccatggaaccatctggcacatacacgtgtgtgggtaggtgagactccagctaacactaatttaccacttcataccacatctgggtacagag

SEQ ID NO: 937555 - DNA, 120 bp, Artificial Sequence
  ENSG00000283408_6 (sequence is synthesized)
acaaaccgtttctttgcctgccgccatccacgtagaatgtgacttgctcctcttcgccttctgccatgattctgaggcctcccagccacgtcgaactggcctaaaatagcaacctgaaat

SEQ ID NO: 937556 - DNA, 120 bp, Artificial Sequence
  ENSG00000283408_7 (sequence is synthesized)
atactggatacacaaaaaaactgtgttttatggaatctaagaagccatcggttcaacatggttgtaagggtttgaacttgtgattgaggatgtgctggactcatcgtgctgagagaaact

SEQ ID NO: 937557 - DNA, 120 bp, Artificial Sequence
  ENSG00000283408_8 (sequence is synthesized)
tcaaagcttaaatcagtcaagaggtgagacactttctctctagaaactcgggtcatagccacccctctgagatattcttccctctgctgatgtcatgtggtgtggaaaccctcttctcgt

SEQ ID NO: 937558 - DNA, 120 bp, Artificial Sequence
  ENSG00000283408_9 (sequence is synthesized)
tgaatagttaaatggctgcctctcaacttgcacaatgtcacattgaatttgaaacagggaactttttatattttttccctgattgtgctggcacctggcagatgcctatttaccacaggc

SEQ ID NO: 937559 - DNA, 120 bp, Artificial Sequence
  ENSG00000283408_10 (sequence is synthesized)
atcaatacacatagtaatcaaaggaaatcagaggcacagattagcaacagctgcaagtcattagtgacagacacgggaaagcacaattctgcacccaactttgaaataaccaatatgagt

SEQ ID NO: 937560 - DNA, 120 bp, Artificial Sequence
  ENSG00000283408_11 (sequence is synthesized)
atttcagagcacgagggttaccgcagggcactcgctaacatgagagcagccaaacaatagctgggcttgtctctccagagagcactcttctcaaaggcagcaccacacactccgtattat

SEQ ID NO: 937561 - DNA, 120 bp, Artificial Sequence
  ENSG00000283408_12 (sequence is synthesized)
aaaccaatcaatcacatgatattggtccactgaacgttagccctttgcagagtccatgtgctgatctgatcttctgaccaaaggttgttgaactgaaaaataacctctggctggtggaaa

SEQ ID NO: 937562 - DNA, 120 bp, Artificial Sequence
  ENSG00000283408_13 (sequence is synthesized)
actttgttatcgcctgtcataattttagtggtgggagtttgagtgtatttctgatgacttaattatatgattgacctagttggaaaggggcatatagaggggaaaacaagacattcccct

SEQ ID NO: 937563 - DNA, 120 bp, Artificial Sequence
  ENSG00000283408_14 (sequence is synthesized)
ttcgcatttaatctcatttttccccaaatttctatttgaaaatcagctatgattgatagccgttctcttggtagttacatattttcattggcaacactaaccttagcctactccaaaaaa

SEQ ID NO: 937564 - DNA, 120 bp, Artificial Sequence
  ENSG00000247810_0 (sequence is synthesized)
tggtacctccagcccaccagcaggcaatgatggcatcagactagaggatcaccagtaaatcattgtaaacattcttgaatatgagtcagtctggtatgaacatacctctaacagcctcgc

SEQ ID NO: 937565 - DNA, 120 bp, Artificial Sequence
  ENSG00000247810_1 (sequence is synthesized)
atacacacttgctgatctcccccttacaagcaacagaaaacaggtcttgacccagagccttcaacaaacaagcgtggaaagagagaaagtccactttaagcgatggaaaatcagccccaa

SEQ ID NO: 937566 - DNA, 120 bp, Artificial Sequence
  ENSG00000247810_2 (sequence is synthesized)
ttctgaaggaacaaccatgaacagatgatttaaggagaatcaattctttgctctttgcagaaggagccaacagagtgagatgaaggggacaacttcagatactcaggcagaaggaattct

SEQ ID NO: 937567 - DNA, 120 bp, Artificial Sequence
  ENSG00000247810_3 (sequence is synthesized)
gcaggttcttgcaggactccacatattgtctatcacagcatattgcagacaggttcccaggaagcagattctgagttggtgatttgcatgcaggaagtttatggagaattgtttctgaaa

SEQ ID NO: 937568 - DNA, 120 bp, Artificial Sequence
  ENSG00000247810_4 (sequence is synthesized)
tcagctcctgtggggaaatgaagacagcaggactgggcaaaaggaaacattgaactgggatgagatcacaaagaaggcatcagggagggctggagccagactgggacttcagagtggccc

SEQ ID NO: 937569 - DNA, 120 bp, Artificial Sequence
  ENSG00000247810_5 (sequence is synthesized)
cacattgaagaagagaagcttggtttttaaactcacactctctccccaaccaggacaagttatgcaggtggtcccccagaagaaactgtgactttggagttggtggcgtttttcagcaaa

SEQ ID NO: 937570 - DNA, 120 bp, Artificial Sequence
  ENSG00000247810_6 (sequence is synthesized)
tggcaattcccaaaaagggatccagctgcatgcagttgctgtcaatgctctcagcagctgagggaatgagtgcctgcgtcatggagaggaatgcaggtggtacgccccgacactcactac

SEQ ID NO: 937571 - DNA, 120 bp, Artificial Sequence
  ENSG00000247810_7 (sequence is synthesized)
gtggcagaataatggcccctgaagatatctatgctgtgattcccaaagcctgtgactatgttacattacatggcaaaaggcctttgcagatgtgattaaggttaaggaccttgagatggg

SEQ ID NO: 937572 - DNA, 120 bp, Artificial Sequence
  ENSG00000247810_8 (sequence is synthesized)
ttgattatcctggattatagagtgaacttggctccatgcattgatggagaagaaagacacccgagggctccattctgcaggatgagtctgcagggatctccttgccagctatggaagtca

SEQ ID NO: 937573 - DNA, 120 bp, Artificial Sequence
  ENSG00000247810_9 (sequence is synthesized)
gtatgacagcttcagctacctacagtccacttgccaggaaaaaagcagagttctctatgaccatgttggagaagcaccgaacccaactttagatggtcagggaagaattctcctaagaaa

SEQ ID NO: 937574 - DNA, 120 bp, Artificial Sequence
  ENSG00000247810_10 (sequence is synthesized)
caacactgaaactgagacttaagaatgcatagaaattgtctagacaaaaagagtaatggcaaagactgttccaagcaaatggaatgtggacaactgcagaggcaacacataagtccccac

SEQ ID NO: 937575 - DNA, 120 bp, Artificial Sequence
  ENSG00000247810_11 (sequence is synthesized)
ctgctgacctgctgcctgctatcttaacacgaattcttcatctgaatggatgagcttttcacagagttccaaactaaggaatccaggagtggccaatccagagattcattccttatcttt

SEQ ID NO: 937576 - DNA, 120 bp, Artificial Sequence
  ENSG00000247810_12 (sequence is synthesized)
gacgaacatctgaactcctggctcatcctgtggaattcaggccatacaggagatcaaggtcatttgctttgggttaaatgaatgttgccaggtggaggttgctagagggagagtgctatg

SEQ ID NO: 937577 - DNA, 120 bp, Artificial Sequence
  ENSG00000247810_13 (sequence is synthesized)
tgaaagtgctgtataaactgcttgcttttcacaaacagtagtgattctttatcctgtccagcctgccacaactggaccatcctgtatgtaagtccccttaataaatcctgtgtctcattc

SEQ ID NO: 937578 - DNA, 120 bp, Artificial Sequence
  ENSG00000247810_14 (sequence is synthesized)
acagttgagaaccgttacttgactggtacctccagcccaccagcaggcaatgatggcatcagactagaggatcaccagtaaatcattgtaaacaagcgtggaaagagagaaagtccactt

SEQ ID NO: 937579 - DNA, 120 bp, Artificial Sequence
  ENSG00000247810_15 (sequence is synthesized)
tcttcctgggcctcttgaacgtggtgccacctgtattgaagtcaacagaagttcagcacaacacaggtcaaaatgaagattctgactcagtaggtcaggatgttctaacgagctctagct

SEQ ID NO: 937580 - DNA, 120 bp, Artificial Sequence
  ENSG00000247810_16 (sequence is synthesized)
gacatgatacgtcagggctgcagactagctttgagcaacaaggtgctagagaaatacctatagaacaacagagatgcaagacaaatgagttggaagttaaaagatttaaattcttgtctt

SEQ ID NO: 937581 - DNA, 120 bp, Artificial Sequence
  ENSG00000247810_17 (sequence is synthesized)
agttttctcattaaagaaaagctgtgtgactatgaaaaaaaatggctctctgagacttttgtttgctcatccaagatgaaaatattgaaatgtattatacaataaacatttgcaaacagt

SEQ ID NO: 937582 - DNA, 120 bp, Artificial Sequence
  ENSG00000247810_18 (sequence is synthesized)
gacccaggaagtccagccaacttagccacttagtccctcagccctggcttgtggaagcagagattcctaatacggccctcacttctccactttctccactggggttggaagcagtaggag

SEQ ID NO: 937583 - DNA, 120 bp, Artificial Sequence
  ENSG00000247810_19 (sequence is synthesized)
ctccactttctccactggggttggaagcagtaggagtagctatagaggatgtattaacaccaatttacagagatcctattgaatttacatctctccagcaggtgtgatgcaaggaaaaca

SEQ ID NO: 937584 - DNA, 120 bp, Artificial Sequence
  ENSG00000247810_20 (sequence is synthesized)
gttacttgactggtacctccagcccaccagcaggcaatgatggcatcagactagaggatcaccagtaaatcattgtaaacaaaggagccaacagagtgagatgaaggggacaacttcaga

SEQ ID NO: 937585 - DNA, 120 bp, Artificial Sequence
  ENSG00000247810_21 (sequence is synthesized)
cccaagagctggagaagctaaaggcgggaccagggaaaggtggagcggttgcagactcagctgctggcccacatcaacaaggtgagccagcagatccttccaccccacttgctgatacag

SEQ ID NO: 937586 - DNA, 120 bp, Artificial Sequence
  ENSG00000247810_22 (sequence is synthesized)
cttcaacaaagaagggtgttcaccaactgactacaagaatcattgctaaccagggatgactcattctcacatccatcctaaatagacttccttggatacaaaaaatccagagtttgccgt

SEQ ID NO: 937587 - DNA, 120 bp, Artificial Sequence
  ENSG00000247810_23 (sequence is synthesized)
ggacacttacttcttgggaaactcacttccattttcctaataaggttccctttgaagactaagaatttctccaagacaaaattcatgtaagccaaaataccagacatcaggcctgtaatt

SEQ ID NO: 937588 - DNA, 120 bp, Artificial Sequence
  ENSG00000247810_24 (sequence is synthesized)
gtggtcaccctggccacagccaagttgtcaccttcactcacgatcatctttctgccctctgctacttgtagaataatgatcataaagtattgttgtctgaagcccctttagaaaagttga

SEQ ID NO: 937589 - DNA, 120 bp, Artificial Sequence
  ENSG00000247810_25 (sequence is synthesized)
tttacagcagcccatgagagaggtagattagagatgaccaatgtcctgagaacaccaagaagcactcatctttgattctcagggcttgacatttcagaaacaaatccagacacattataa

SEQ ID NO: 937590 - DNA, 120 bp, Artificial Sequence
  ENSG00000247810_26 (sequence is synthesized)
taatgaccctggtccattgtgagcccattagaaaacactcacaaataagtattcaaaattttccagttattttgactcctaaaaatgtcttccaagatatatcaaagtttccgtaatttt

SEQ ID NO: 937591 - DNA, 120 bp, Artificial Sequence
  ENSG00000247810_27 (sequence is synthesized)
gcaatcaacttggtttttatttaaaccaagtagcaactctctctgtagcaaccctgacttttcttgttattaaatcactctataattaaatataaagttattggtgacattcacagaaaa

SEQ ID NO: 937592 - DNA, 120 bp, Artificial Sequence
  ENSG00000247810_28 (sequence is synthesized)
gagcttttcacagtgtctatgtgaattcacgccaagtcatgtgacagtttgcataatgaagtgtcagcagatgtgatggaaacagaagtaaataaaatatttgcacgttgctgcttgctc

SEQ ID NO: 937593 - DNA, 120 bp, Artificial Sequence
  ENSG00000247810_29 (sequence is synthesized)
agacacgtcaaccagagctggtgtcccagtcacccaagccaaggccattctacctaagcccacagctaattcacctccagaaatgtgagcaagcctagccaagatcagccaagccaagct

SEQ ID NO: 937594 - DNA, 120 bp, Artificial Sequence
  ENSG00000247810_30 (sequence is synthesized)
cagagagacaatttagcacaaactatcaaaagctttaaaagatgtctttatctatagttagaattacacatttaagaatctaccttattgggaaaaatacagtcaaagattttatagaaa

SEQ ID NO: 937595 - DNA, 120 bp, Artificial Sequence
  ENSG00000228587_0 (sequence is synthesized)
cacaccaccgaacatggaggtccaatgccgattcatgaccctgagagctccatcctgagggggcgggcccggaacttatcatttactctgatgctttcctgaaagcacttgcaaatcgct

SEQ ID NO: 937596 - DNA, 120 bp, Artificial Sequence
  ENSG00000228587_1 (sequence is synthesized)
atgacacaaaacttcaagagattcataaaaaaaagactcaagcacaggtgtctgataacttttaaatcacactgttgaacccattaaactggggttgttcttagccttacagccctgtga

SEQ ID NO: 937597 - DNA, 120 bp, Artificial Sequence
  ENSG00000228587_2 (sequence is synthesized)
tgggagctggatgacttcatagagacttcagagaaattgctacaacagtttatacctggacaaccttggtgcctgaggctgtgttggccacacagaaagttcaccagaaacctgatgata

SEQ ID NO: 937598 - DNA, 120 bp, Artificial Sequence
  ENSG00000228587_3 (sequence is synthesized)
tcaccagagacatccaagctgcaagccgggaacacccatcggattgaaactgccacaccagaagaagaaaaaacaaatgctatttctatatgaatacatcaggaatagatgcccaaatct

SEQ ID NO: 937599 - DNA, 120 bp, Artificial Sequence
  ENSG00000228587_4 (sequence is synthesized)
gggatctttagaaatataaaaggccaggtccaggtgctccaccagacgtgggaaataccgtcgactgatctagttaaatcaagagattaaatctcggctcttggggaccctagtttcagg

SEQ ID NO: 937600 - DNA, 120 bp, Artificial Sequence
  ENSG00000250417_0 (sequence is synthesized)
cagattttgagtcatgccaggggctccggtgaaaatgtcatgggaagccagccctccgcgtctaacatttcagcttgagggtgaccgggagctctggggtggccctagacctgggaatgg

SEQ ID NO: 937601 - DNA, 120 bp, Artificial Sequence
  ENSG00000250417_1 (sequence is synthesized)
actcccaggcgcagtggcaggcatttctcttgctttttctttatgattgacctgggctggccatgtccccgtcaatgcagctggttctcaaaggccccactcttccccgcggctccgttt

SEQ ID NO: 937602 - DNA, 120 bp, Artificial Sequence
  ENSG00000250417_2 (sequence is synthesized)
ttgtcccgtggcacttagagggagacctgctcctcctgagaatccaggaaggaactgaagagacgacgttgctttctgatctttctcaggccagaggaagtttgtgggccaagtgatatt

SEQ ID NO: 937603 - DNA, 120 bp, Artificial Sequence
  ENSG00000250417_3 (sequence is synthesized)
cctaattcaaactttattatgtaattatagtacaaaacatattatttttctctttatttttcctctctcagttaatggtaaattgtattgcataaataaattacacatgctgtaattcat

SEQ ID NO: 937604 - DNA, 120 bp, Artificial Sequence
  ENSG00000250415_0 (sequence is synthesized)
gggttcctggagggcctctccgggactcgaggaaaacgaccttttcccttgcagcggcgggagagggcgaagtggaggactgctgctcggttccgtatccaaaagagacccaaggctcca

SEQ ID NO: 937605 - DNA, 120 bp, Artificial Sequence
  ENSG00000250415_1 (sequence is synthesized)
ggcaaaatagattggacattttcactttctcaagccagggccaccggtcgcccaaccagcagccactgagggtggtatcggggcgccccttcccctggcagcgtatttcagcccccagag

SEQ ID NO: 937606 - DNA, 120 bp, Artificial Sequence
  ENSG00000250415_2 (sequence is synthesized)
gaagtgcacgttggcccgcgcgtgcggggagctgagaagcaagagattggaactttgcacgtgtcaagcaaggtttggcctgctttgaagacagtaatttcagagccactccggtctctg

SEQ ID NO: 937607 - DNA, 120 bp, Artificial Sequence
  ENSG00000250415_3 (sequence is synthesized)
cgtcacaagcgggcatcagggcagtggtggggcggcaggggatcctgagacctcccatgccctctctttggccccggtgcttctgggcttcaaaatggttaactgaaaagaacggaggtc

SEQ ID NO: 937608 - DNA, 120 bp, Artificial Sequence
  ENSG00000250415_4 (sequence is synthesized)
acatgacaacatgagtatatcccccaaggaagcctacctgtctatccccaggaatctgaaccagcagacaaagcactgtcgggtccttgctgcaacctcttccccccaccccctttgatg

SEQ ID NO: 937609 - DNA, 120 bp, Artificial Sequence
  ENSG00000250413_0 (sequence is synthesized)
tggcacagggaagaacgcagtccagaagtccttaaaaaagtacccattgttgaaccaggccctctgaagttagggccccacaagaacaaaattccacaatcccagcagtgctacctaatg

SEQ ID NO: 937610 - DNA, 120 bp, Artificial Sequence
  ENSG00000250413_1 (sequence is synthesized)
cagacaggagaaaataatagaatataccatttatgctgggaaatgcattgagtcaacttaattgctctacagaaaccctgggcttaaatactaacaccatgaaggacaagagtctgtgtc

SEQ ID NO: 937611 - DNA, 120 bp, Artificial Sequence
  ENSG00000250413_2 (sequence is synthesized)
tcccctcccaagaagacaaaacatggctaactcaaaaaccactggaaaagtgagtaatttcttatcaaagccaagccattcagtattatttctgtggctgccagtgttgtttcaaataag

SEQ ID NO: 937612 - DNA, 120 bp, Artificial Sequence
  ENSG00000250410_0 (sequence is synthesized)
attgccatgcctctgccgatgaactccgggagacagtctgtgacctgggcgatcatggggatgtcgtgaacctcatcatagtcagcgatcctgagaggatgtagagttgtgaaatggaaa

SEQ ID NO: 937613 - DNA, 120 bp, Artificial Sequence
  ENSG00000250410_1 (sequence is synthesized)
agacatcagttatgggtccatgtaggcacctcataccaggagaagatgagcttcccagagtggtgacttcacatgtctctgtaattatgctcagcaggctcaataaccactggaaaacaa

SEQ ID NO: 937614 - DNA, 120 bp, Artificial Sequence
  ENSG00000250410_2 (sequence is synthesized)
gcagtcggcacgtcttacgaggaaatgaagcgtgttggataagcagaccaaacagctgtgagaacgctgccactgtgagagctttaagtggcctcaattcctcttttttgaagtacactt

SEQ ID NO: 937615 - DNA, 120 bp, Artificial Sequence
  ENSG00000250410_3 (sequence is synthesized)
tatgttttacaataatttgagatgtacagaaaagctgcaaggataccacagagtgtccctcagtgtcccccactgttaacatcacattataatagtatgtttgccacaactaggaaacca

SEQ ID NO: 937616 - DNA, 120 bp, Artificial Sequence
  ENSG00000267175_0 (sequence is synthesized)
aaggaggaagacctgaggagatacagggcagaaaaaggaataacatcactattggaaaatcttagatcagtgcttgagatattttgccaacactgaaattgatggaccagctggcaccac

SEQ ID NO: 937617 - DNA, 120 bp, Artificial Sequence
  ENSG00000267175_1 (sequence is synthesized)
ccagattgacaaaatggctcatctgatcttgtgccccctcaacccaggaactgactcaacagaagagcacagctttgactccgtatgatttcatttccaacacaaccaatcagcactcct

SEQ ID NO: 937618 - DNA, 120 bp, Artificial Sequence
  ENSG00000267175_2 (sequence is synthesized)
ctgaatgctcggcaagactgatttgagtaataatatttcagtctcctgcacagccgactctgtgtggataactctttctctattgcagctctcctgtcttgataaattggctctgtctag

SEQ ID NO: 937619 - DNA, 120 bp, Artificial Sequence
  ENSG00000267175_3 (sequence is synthesized)
gttactgtagcctccacctaatagaattctaatttagtgcctcgtagaaagaatgaagtccttcagtgatcagcatgggaatcattttgcttagcttatctcacctaggaaccatgctcc

SEQ ID NO: 937620 - DNA, 120 bp, Artificial Sequence
  ENSG00000267175_4 (sequence is synthesized)
aagcatacaaacctcatcaaataaaacggaggaacaagtccactctggcttctgagaactccaggaactcctggaagaaggtgcttcatctctgcagtgcttggaaccctggctgacaag

SEQ ID NO: 937621 - DNA, 120 bp, Artificial Sequence
  ENSG00000267175_5 (sequence is synthesized)
gaaaacgagaatgctgagtgtaacaatgaccccaggaattcaagccaaggagcccaagaggggccagatggcgccttcattcctggtgccagaactgtggcgtttctctgaatcaagtgg

SEQ ID NO: 937622 - DNA, 120 bp, Artificial Sequence
  ENSG00000267175_6 (sequence is synthesized)
tattcctggaaatggagagtcctgacatgatggccccatgatgaaaagaacccaggttcctgagtcacgacgtggacatgaggcaccaaggagaaaacacgtgaaccttaataagtttgg

SEQ ID NO: 937623 - DNA, 120 bp, Artificial Sequence
  ENSG00000267175_7 (sequence is synthesized)
ggtgagagagaaataaaccttaagtatgttaagcttctgtcatttcaaggtaatacagtgtggaaggcagaaaaatgacccactctcccctgatatccattaaagatgtccaaatcctca

SEQ ID NO: 937624 - DNA, 120 bp, Artificial Sequence
  ENSG00000267174_0 (sequence is synthesized)
tcttctccttcctgccaccttgtgaagaagataaaaataaaaatgaagtcaccagccctcaggggtctgtcaaggcaacacacaaaatctccagttaccttctggtggatgacgtttgga

SEQ ID NO: 937625 - DNA, 120 bp, Artificial Sequence
  ENSG00000267174_1 (sequence is synthesized)
gacacatcgcgtccgtcacaggacacacttccgatggatttacagcaactcctgggggtcacgaaggtgtgttccaaggccacatctccaacctcacagagaggacaggaagtgatcagt

SEQ ID NO: 937626 - DNA, 120 bp, Artificial Sequence
  ENSG00000267174_2 (sequence is synthesized)
cgtccctcgtgctgccttcatttttcctaccctcagctcaggggtctgtgctagaggaagacacacgaaggctactgtgcccccaccacaagagagggaaacagggagacgcgtgggtct

SEQ ID NO: 937627 - DNA, 120 bp, Artificial Sequence
  ENSG00000267174_3 (sequence is synthesized)
ggagccaagcgtatctctctgtacccatcgcacacgaatttgaatcatctgctctttggaatcgcctacaccctgctgcacccacgatgtggctgtaactccattaaagaattgaatatc

SEQ ID NO: 937628 - DNA, 120 bp, Artificial Sequence
  ENSG00000267172_0 (sequence is synthesized)
ttaaatggtttgtaaccaatgtttgatttgtcaaatccataattctggtaagacaataaaaacttcaggtgatacatttctagcacctgttggatatttgaacacttacagatggatttt

SEQ ID NO: 937629 - DNA, 120 bp, Artificial Sequence
  ENSG00000267172_1 (sequence is synthesized)
cttcagttgccactttccatgcatgttttctgcttgcctaaaagattttccatgcaggaaggctaatgctataacagtagctaaatgcttactagaacatatgttttccttatggggcat

SEQ ID NO: 937630 - DNA, 120 bp, Artificial Sequence
  ENSG00000267172_2 (sequence is synthesized)
tcctggagaattttccagtcatagaggtactcatttcactggacaagttgtaaaacagttaagtaaggtattacaaacacaatggtattaagcaaagctaatagaatcaattgtattacc

SEQ ID NO: 937631 - DNA, 120 bp, Artificial Sequence
  ENSG00000267172_3 (sequence is synthesized)
ttggtaaaaggtattactgactgatggcaatcagacctacccttagtggaaaatacagattaactccttatgaaatagctactggaaggcctatcctcctaataatagaagctcacatgt

SEQ ID NO: 937632 - DNA, 120 bp, Artificial Sequence
  ENSG00000267172_4 (sequence is synthesized)
ctcctgctcttacaaactctgacatgacacagtattgcaaggctttaatgcattatgccaaagtactagagaaagattgcccttgaactccattgaagggatcatcctaagtttttctct

SEQ ID NO: 937633 - DNA, 120 bp, Artificial Sequence
  ENSG00000267172_5 (sequence is synthesized)
gtagcaaaattttagggcctcgagtcttggatccttgagttgtggggcttctctcaactcaaaaaggcacctccagactcttacaggctcactggagacctcaaggtaaaactgaccgga

SEQ ID NO: 937634 - DNA, 120 bp, Artificial Sequence
  ENSG00000267172_6 (sequence is synthesized)
gaggtttctcttcagaagcagatggcatcctagatgttgacagctttcccaaaatcacagatcatcaagacttctctcttctgtcactgtaagatctttgtcctctttctccttgtattt

SEQ ID NO: 937635 - DNA, 120 bp, Artificial Sequence
  ENSG00000267172_7 (sequence is synthesized)
gttttctgtttatatgtggcaagataatgtgataactaagatttcataattgatagcttctgcagggaacttaactgaatgctgggcagatcatgttaaatctaaattattatgtgacct

SEQ ID NO: 937636 - DNA, 120 bp, Artificial Sequence
  ENSG00000267172_8 (sequence is synthesized)
tagagattctctggttcaccctgtaacaaatttcactgatattccaagtgtggctatctgttcaaattgctcatctggtcctttatgtagggttaggtttttagatttatgggttcagat

SEQ ID NO: 937637 - DNA, 120 bp, Artificial Sequence
  ENSG00000267172_9 (sequence is synthesized)
tccctgtttaaatctaagagtagacaaaatctataatgagggttttgcagtaaaattatgccagaaattgactgagaaaaccaaagtaaagataattcaacagtttgtagacaaattaat

SEQ ID NO: 937638 - DNA, 120 bp, Artificial Sequence
  ENSG00000267172_10 (sequence is synthesized)
ctagtgcttccctactgatgactcttaatgcataagacatcccacagggatctgtctgttgtgcccctctaggatatatttttatctgtgcaagatttaataacaaccatatgtgtgggc

SEQ ID NO: 937639 - DNA, 120 bp, Artificial Sequence
  ENSG00000267172_11 (sequence is synthesized)
aagttcatgtctcaataattaaaaaataaaaaggaccaatgtggattaaggatcctaataatagtgtcactccataaccaattggaaacttcacattggtctaaacctcgtaatttgtag

SEQ ID NO: 937640 - DNA, 120 bp, Artificial Sequence
  ENSG00000267172_12 (sequence is synthesized)
tatgaaataaagaggaatttgccagaaggtataaatgcctctaaatgggcatcttttggcagaatactcctttcttggtttggtataaatgtaaataaagtttgattagaaatctatgtt

SEQ ID NO: 937641 - DNA, 120 bp, Artificial Sequence
  ENSG00000267172_13 (sequence is synthesized)
aaacattagctactatagctgactctactgaaaaggatatagttatccagcaaacttctttaaattttcttgcttgagttgttttagataacataattgctttggactatctgttggctg

SEQ ID NO: 937642 - DNA, 120 bp, Artificial Sequence
  ENSG00000267172_14 (sequence is synthesized)
aatggggggagtgtgtgtgatagctaacacctcctgctgcacttggataaatacatctggtatggcagaaactccgttgcaagaaatcaacaaacaagctacttgattaaaacaagtaga

SEQ ID NO: 937643 - DNA, 120 bp, Artificial Sequence
  ENSG00000267172_15 (sequence is synthesized)
ttccttttctggttcatttttgatatatttgattttgaccagttcaatctgtgggggcccctgttaaggaatatacttcaatctctcagcattattttctgataaccatcataatagtct

SEQ ID NO: 937644 - DNA, 120 bp, Artificial Sequence
  ENSG00000267172_16 (sequence is synthesized)
ccctgaggatatgtgccatatcctctcaggaggtttaaatgttcatatgtagccatccgttgtatgtcaaatggtctcactacagttagaaaaacaaaaatatgaagagaatataaagag

SEQ ID NO: 937645 - DNA, 120 bp, Artificial Sequence
  ENSG00000267172_17 (sequence is synthesized)
tcatccaagtgacttgttgttgtgaagtatgaatctcatactgagaacaaacaaccattgttatggtgacagagggtggcatcaatgcccaaggttttggtcaatctctcaaaatggaga

SEQ ID NO: 937646 - DNA, 120 bp, Artificial Sequence
  ENSG00000267172_18 (sequence is synthesized)
aggagaccaaagaggggaaattgttttaaattaattttggcttaaagctgtttctgtatgtaacaactgcaacctaacttaagagtatattcttgtgataagtagctgagtctcagccaa

SEQ ID NO: 937647 - DNA, 120 bp, Artificial Sequence
  ENSG00000267172_19 (sequence is synthesized)
tcatagcagctgagcttcagccaatcatagcagctgagcttcagccaatgaaaggttgccgactgatcagaccacgtccatataaggcaaacgctgagctgtaaccaatcaagctgtttc

SEQ ID NO: 937648 - DNA, 120 bp, Artificial Sequence
  ENSG00000267172_20 (sequence is synthesized)
tgttgtcactttatttttctgtctgtaaatatgcctgcccacattgctgggtagaggaggttctaagtgcttcccaattcataaattgttctctgctcaaataaactctgctaaatttaa

SEQ ID NO: 937649 - DNA, 120 bp, Artificial Sequence
  ENSG00000250418_0 (sequence is synthesized)
attattgagcattttcttactttctgacaaaacaaaatatttcaaggtcatcttgaatttttctgacagcagtcctggtacaaccaccatgtcaaggaactctagcttcttttattggaa

SEQ ID NO: 937650 - DNA, 120 bp, Artificial Sequence
  ENSG00000250418_1 (sequence is synthesized)
tgtcagaaatgggtaaaagatgtggggagcaagcagctgtgacccaactcacccagaacaatgccaactgaccttggactctgagaagttacttagaatgaaccaggggtataatttata

SEQ ID NO: 937651 - DNA, 120 bp, Artificial Sequence
  ENSG00000250418_2 (sequence is synthesized)
cctgatcttgacctcacatcttaaggatgagaagaggatatttgttataaacaataagctttcccattcagaaattactccttagtatctctactataaacaggtggaagacactttgca

SEQ ID NO: 937652 - DNA, 120 bp, Artificial Sequence
  ENSG00000239801_0 (sequence is synthesized)
ccagcttatttttcagcttcaagacaaggtctactgtttctacttctgtgtgtttctggatccagagaaaaaactgcccttcaattctaatctcacctcaaaaacagaatgaggaaacta

SEQ ID NO: 937653 - DNA, 120 bp, Artificial Sequence
  ENSG00000239801_1 (sequence is synthesized)
tgtgatcaagaaagctgaaaccaaaggcgtggtccatggaatagaccttgacctagtgaaaggagcgcctacactcaactgtatctctgctactcaaattcaaatgcctttctaggtctc

SEQ ID NO: 937654 - DNA, 120 bp, Artificial Sequence
  ENSG00000239801_2 (sequence is synthesized)
tttactttgctttcaagctcagtcttggtgtaaatctatcaccttcaatataactggataaatatgtaaactttcattcacactaataaacgtgaaatgtaagctctacagaaacaaaaa

SEQ ID NO: 937655 - DNA, 120 bp, Artificial Sequence
  ENSG00000263884_0 (sequence is synthesized)
agttgggagtttccctagcgactcagttcgggtgggcgttgggcgcctgagtcagccaaacagcctactcggggttcttgggtagcctttggggtgaggggacttgggcggccttggtct

SEQ ID NO: 937656 - DNA, 120 bp, Artificial Sequence
  ENSG00000263884_1 (sequence is synthesized)
gtaagctctgcgttcccgggcgtggaagagactggccgcgcacatgcgtttctgtggttttcctggtttggggaaagcgggtaaatggtggctggttgcggctaactgggccgcgctaaa

SEQ ID NO: 937657 - DNA, 120 bp, Artificial Sequence
  ENSG00000263884_2 (sequence is synthesized)
aggtaacccaaggcaggtggattacctggggaaacagctggagcagtggtcctgggccgccagtccgcggtcatcccgggagcttaagatgcggagtggtgataggctccggatgtatga

SEQ ID NO: 937658 - DNA, 120 bp, Artificial Sequence
  ENSG00000263884_3 (sequence is synthesized)
gccctgtggctcaagggcgctgttctctctgctccgaaatagaaataatacctgtctcacagagctgttgaaaagctccactgaaataatgaccgcaagtgtgaactgtaaagcaatgta

SEQ ID NO: 937659 - DNA, 120 bp, Artificial Sequence
  ENSG00000263884_4 (sequence is synthesized)
agtagtatttattattaaaaggtctctactgaaagaaagagacctaggaggaatgcagtgcccggcgctgattggaaaacgggtggcgctgcgtcctgggccgaggcttccctagcgaaa

SEQ ID NO: 937660 - DNA, 120 bp, Artificial Sequence
  ENSG00000263884_5 (sequence is synthesized)
accttgtctccctccatttcgtcccttgcctgccttcccaggagagacgtggccgatagaagccgagtggcagtaactctaagttggagttacacggtggagaaggaagcactgactcag

SEQ ID NO: 937661 - DNA, 120 bp, Artificial Sequence
  ENSG00000263884_6 (sequence is synthesized)
actcgggtaacttcctcttattccctcacacgtgtatcttgttcccttcttcgaagtctgtaaatttaaaatcctaagccccccaacaactgaacagacccccgtgaggccaaggggaca

SEQ ID NO: 937662 - DNA, 120 bp, Artificial Sequence
  ENSG00000263884_7 (sequence is synthesized)
ccagcaaaatcttaacaactgagttcccagtcataacgggatgggaggtcagacggacctggttataccctctcccttttgtgatttagaggagatagctgactggccataaagttaaaa

SEQ ID NO: 937663 - DNA, 84 bp, Artificial Sequence
  ENSG00000263884_8 (sequence is synthesized)
ttcaaaaaaaaaaacggagatgataggactgacggaattgactccatggcaataagataccaaagtataaacaggacctaagcc

SEQ ID NO: 937664 - DNA, 120 bp, Artificial Sequence
  ENSG00000263884_9 (sequence is synthesized)
catggcaataagataccaaagtataaacaggacctaagcccatgccaagcaagggttaaaagtcatgcatccctacgcttgaaaaataaactatgttctcactatgcttcaaggtttttc

SEQ ID NO: 937665 - DNA, 120 bp, Artificial Sequence
  ENSG00000263884_10 (sequence is synthesized)
tttagcagctaaacaagcgctggcctcacagtattaaaacaatttgcagttcatcgaccaccagacactaacaaccctctcccaccagccgtaactacagcttttattgatttcagttac

SEQ ID NO: 937666 - DNA, 120 bp, Artificial Sequence
  ENSG00000263884_11 (sequence is synthesized)
tttctcctgataagaaggtcactgaccatggacttgttctggccaatttgtagtgattgcatgcttacgtaacttcctgaaaagatattttgatgtataggaccaaactgtaaatacatt

SEQ ID NO: 937667 - DNA, 120 bp, Artificial Sequence
  ENSG00000263884_12 (sequence is synthesized)
taaatgttaagtctccaccccaaagtgaacatggattgtctgttaaacatgcatatttgtttaatatgcatgtgtcaagaccactttcatgaatattcatagccgctcctctaacttgtt

SEQ ID NO: 937668 - DNA, 120 bp, Artificial Sequence
  ENSG00000263884_13 (sequence is synthesized)
gaatatgtatgtttagccaaccagttaagcataaagttcctactccaactcctcctctgaagtgtctgtatgtggtcttggctggaggcatgcttcccagcctgcagaatggccaccttg

SEQ ID NO: 937669 - DNA, 120 bp, Artificial Sequence
  ENSG00000263884_14 (sequence is synthesized)
caggctgtaactccttataagaaacaaagtctctccttttctaaatctatagatcttatgattttttagttaacatgcacaataagaatacaggaagctaaggaaaagataactgcagaa

SEQ ID NO: 937670 - DNA, 120 bp, Artificial Sequence
  ENSG00000263884_15 (sequence is synthesized)
tcttactcctaagtgggaattgtgaacaataatgactacctgaaatgttacaggctttttaagaatcagcaagatcattcaggtttggttgtatacattaaatttacaaattggcaaaat

SEQ ID NO: 937671 - DNA, 120 bp, Artificial Sequence
  ENSG00000286150_0 (sequence is synthesized)
gggagactggagaagcagaagatgtactctagattataattaaatcctcattcactcattacattttttagtactttataatgaagttaccaaaatatatataacccaacggggattgct

SEQ ID NO: 937672 - DNA, 120 bp, Artificial Sequence
  ENSG00000286150_1 (sequence is synthesized)
ttagtcctaatgctggctttctaaaacactcacaaatttctttctataataataccttaaaactagaaaaggcataaaataatgtaagtagataccacagtgaagatgattcttgaaaat

SEQ ID NO: 937673 - DNA, 120 bp, Artificial Sequence
  ENSG00000286150_2 (sequence is synthesized)
gaacatgattcaagagagatgtgtatgtgtgtctgtttgggggagtgatgttgctgcagtaacttaggactatggaaatgatgttagacaaaaacaaatccaagcgattttcttatttga

SEQ ID NO: 937674 - DNA, 120 bp, Artificial Sequence
  ENSG00000286150_3 (sequence is synthesized)
gttcaaaatgggtcgtaaaagaagcgcagacaactcacgatataaacaaagcatttgtctcaggaattgctaacgaacatacagtgcattcaagaagttcaagaagttttgcaaaggaaa

SEQ ID NO: 937675 - DNA, 120 bp, Artificial Sequence
  ENSG00000286150_4 (sequence is synthesized)
agagatccttgtagatgaggagcatagtggccagacatcggaagtccacaatgaccatttgagagcaatcattgaagctgtttctctaacaactacatgagaagttgccaaagaactcaa

SEQ ID NO: 937676 - DNA, 120 bp, Artificial Sequence
  ENSG00000286150_5 (sequence is synthesized)
agccctttagcatttgaagcaaattggaaagctgggaaaatctcgctaagtgggtgcctcatgagctgagcgaaaattaaaaaatcctcgttttgaagtgtcatcttctcttattctaca

SEQ ID NO: 937677 - DNA, 120 bp, Artificial Sequence
  ENSG00000286150_6 (sequence is synthesized)
attctacacgacaaaccatttcttgatctgattgtgatgtgcgacaaaaagtgacaactggcaacaactagctcagtggttggagtgagaaaaagctccaaagcacttcccaaagccaaa

SEQ ID NO: 937678 - DNA, 120 bp, Artificial Sequence
  ENSG00000286150_7 (sequence is synthesized)
aaataaaggtcatggtcactgtttggtggtcgggtccactgcagctttctgaatcttcaggcttcaaaagatactatcaacaaaattaaaagataacctatagaatgggaaaaatatttg

SEQ ID NO: 937679 - DNA, 120 bp, Artificial Sequence
  ENSG00000286150_8 (sequence is synthesized)
caaattatctatcttgtaaacttctagtcttgaatgtatacagaactcttgcaactcgacaataagaggacaaatagccaaatttttaaaaagatagacaaagaatttgagcggacattt

SEQ ID NO: 937680 - DNA, 120 bp, Artificial Sequence
  ENSG00000286150_9 (sequence is synthesized)
ttccaaggacaatacacaaatggctaccaaacacatgaaatatgttcaacatcattaatcattagagaaatataactcagagtcacaatgagataccagttcacacccactgagataatt

SEQ ID NO: 937681 - DNA, 120 bp, Artificial Sequence
  ENSG00000286150_10 (sequence is synthesized)
ataattaagacagacaagtgttagctagaatatagagatattggaactcttgtatgttgctggtggaaatgtaatatagtacagctgctttggaaatcagttccttaaaatgttaaacat

SEQ ID NO: 937682 - DNA, 120 bp, Artificial Sequence
  ENSG00000286152_0 (sequence is synthesized)
aactaacgcctgatgatctgagttgggacagtttcatcccacccccactcccatatgtggaaaaattgtcttccaggaaactgatccttgatgccaaaaagctctactctcattggtatg

SEQ ID NO: 937683 - DNA, 120 bp, Artificial Sequence
  ENSG00000286152_1 (sequence is synthesized)
ttgacctctgtcttcactgccgagtcatataagagcccaaatggaatgaaaggccaggacccaaaacctaacaagtgtctgcagacctgcaactaaattcctcaagatggagtctcgctc

SEQ ID NO: 937684 - DNA, 82 bp, Artificial Sequence
  ENSG00000286152_2 (sequence is synthesized)
gcagacctgcaactaaattcctcaagatggagtctcgctctgttgccaggttggagcgcagtggggcgatctctgctcactg

SEQ ID NO: 937685 - DNA, 120 bp, Artificial Sequence
  ENSG00000286152_3 (sequence is synthesized)
tcttccacaaggccacactgtatgagggcaattttcccacacgcagcctatgaggtgtggatggcgtaagccacagatcaggaagaagcaagattagaccaccagaataacgatgacctt

SEQ ID NO: 937686 - DNA, 120 bp, Artificial Sequence
  ENSG00000286152_4 (sequence is synthesized)
gtgataacgatgtttaggaaaattctcacttacatgggacctgagacaattttagagctcttgaggacatcgtcaaaccttgagttcaagccacatgtatggacttgtcagtgttcccac

SEQ ID NO: 937687 - DNA, 120 bp, Artificial Sequence
  ENSG00000286152_5 (sequence is synthesized)
tgtgttgccacctctggtctatagttcctgagggcagcagaggttactcttaaaccacacttcaggagtgatgatcgttccttgcatggatggtactactcttcttgttctacccatggc

SEQ ID NO: 937688 - DNA, 120 bp, Artificial Sequence
  ENSG00000286152_6 (sequence is synthesized)
tccttgaatggcaatatgcagaaggaagtagttgcattcatcactgaaagagaccacattctggtaatgaaatgattacaatcttacagttccagagaagttgcaattggaagatgtgct

SEQ ID NO: 937689 - DNA, 120 bp, Artificial Sequence
  ENSG00000286152_7 (sequence is synthesized)
attctacacctacacattccaaaagctaaatttaacatgaccagaaaacaaaatatcacacacattttgctgcatgctctgggcaagtgttgaaattgtgatcattatcaaagaaacaca

SEQ ID NO: 937690 - DNA, 120 bp, Artificial Sequence
  ENSG00000286152_8 (sequence is synthesized)
ctaacaactgtaaaaggagttgttggaagccagtattcatgggagggacagatgatagatgatgcagcctcataattaatgatgtaaccaggtttaaatacatgatattggagaactgca

SEQ ID NO: 937691 - DNA, 120 bp, Artificial Sequence
  ENSG00000286153_0 (sequence is synthesized)
aagcaccggctttgtggatgaaaggccatggggccaggtcttgcagcaacccccatcatccctttccctcagaagtatgaaaatgtcttttttctagagcgctctgtgttggtcagccat

SEQ ID NO: 937692 - DNA, 120 bp, Artificial Sequence
  ENSG00000286153_1 (sequence is synthesized)
ggtgtgactcagtgcctctggatgaagccttccttagctcctccctcctcttatctctgccatagatccttggcttcctgatgatcaaactgaaaaatctgcagttttcttgcagaaaaa

SEQ ID NO: 937693 - DNA, 120 bp, Artificial Sequence
  ENSG00000286153_2 (sequence is synthesized)
caaacaattccaatggaacaaccattcaaaacataataactcagccctttaacctcctaccacagtctaatgcctggcattacgagttggggtaaagaagaaggcaggaacaatgattgt

SEQ ID NO: 937694 - DNA, 120 bp, Artificial Sequence
  ENSG00000286153_3 (sequence is synthesized)
ggagagctctatctgcctcagaaataatgccagtcggcaaaggctgccggcaggttttgtgctcatttcaaaacttcacattcctcaggcacttagtggcatttttgaagaacactgtgt

SEQ ID NO: 937695 - DNA, 120 bp, Artificial Sequence
  ENSG00000286153_4 (sequence is synthesized)
caaggacagtgggtgacccaggagagtgatgtgagcgaggtcattctgaatacacagcacttgacgtggtagagtctacagccacagcttggaaaaacagctcttggcagttgtgtctct

SEQ ID NO: 937696 - DNA, 120 bp, Artificial Sequence
  ENSG00000286153_5 (sequence is synthesized)
cttagccagcaagcgtggggacctgtgccacggagacacccaacaggaatcatcattccaggttttgtcactgatgggcaatatggagagaatgtaaaaatatctaacttcaaacagaaa

SEQ ID NO: 937697 - DNA, 120 bp, Artificial Sequence
  ENSG00000286153_6 (sequence is synthesized)
aaagaaacaactggaatgaaaagctataaacaataggtaaggaaacacaaacatttacattttaacacagaccaaacaggcaagaagggacttgctggccaaagatatctcatattttgt

SEQ ID NO: 937698 - DNA, 120 bp, Artificial Sequence
  ENSG00000286153_7 (sequence is synthesized)
tttacttctctgtttttaaagtatcaggaagttgggccaaatatcaactctcttctatattacatggacctcccaatactgttcttggctagcctgttcacggtccaaactggcatttta

SEQ ID NO: 937699 - DNA, 120 bp, Artificial Sequence
  ENSG00000286153_8 (sequence is synthesized)
aattacagttacaattcatttacttcaaatccgttaaccttccagtgttgcaaagaaggctgtggagtggaacacagaattcagctgagatgatatttaaggcatagctagggactgtga

SEQ ID NO: 937700 - DNA, 120 bp, Artificial Sequence
  ENSG00000286153_9 (sequence is synthesized)
tcttgccgacaaaaatattacttatttcctttttatgaaaagaatattaccatcagaatccaagacctccgaacttccctgctgaaggcacgtttacgtctttggactctggtgtaccag

SEQ ID NO: 937701 - DNA, 120 bp, Artificial Sequence
  ENSG00000286153_10 (sequence is synthesized)
ggcctgaacaagctataacaccatggtattaccaaatacatcctaagtcatcaaaacagctttttaggctaattctgtaagtacagcaaaacacacagcaaacttaaggttttcttagta

SEQ ID NO: 937702 - DNA, 120 bp, Artificial Sequence
  ENSG00000286153_11 (sequence is synthesized)
gtaaaaaacatgtatctctcatactgtaaaaaataaaggtgttccatgggagggaaggagtagggggagaacaggttggggctcaaaataagcaagtagggttattgtaatctattttaa

SEQ ID NO: 937703 - DNA, 120 bp, Artificial Sequence
  ENSG00000286153_12 (sequence is synthesized)
agaaaattcataattttaaatctctctttagttcagaagattgacgtagaggatttacctacagaacttcaggagattcctaagaaggccttcagtgatcttttcatcaatatcatcagg

SEQ ID NO: 937704 - DNA, 120 bp, Artificial Sequence
  ENSG00000286153_13 (sequence is synthesized)
ccttatcattgtttcacatttgcttctctttaccatagggaatataataattatttactggttaacttcctagggagattgcctgcggcttatttaagatccaaattttaaagtaataat

SEQ ID NO: 937705 - DNA, 120 bp, Artificial Sequence
  ENSG00000286153_14 (sequence is synthesized)
ttctgttgaagctgcttgtgaggtggttgggtgggcagatagagtgaagccagggacacacactaaatgagcccgggatgtaggcaggttttgatgttttgcttgcttttatccctaaca

SEQ ID NO: 937706 - DNA, 120 bp, Artificial Sequence
  ENSG00000286153_15 (sequence is synthesized)
ttttatcccttcacgtttactgtctcactgaacattttgtctactcttctagttatgcagtgagcaggtctcctccaggaagaagcctctttttatgaggattggggtggtgacagacaa

SEQ ID NO: 937707 - DNA, 120 bp, Artificial Sequence
  ENSG00000286153_16 (sequence is synthesized)
taatcaaatggtctgatttctctgctatcctttcctttcccctaaatgttctcaggggatctgcttgaacttttttcaagagctctgtatttggatttttagtagcctatagattatcac

SEQ ID NO: 937708 - DNA, 120 bp, Artificial Sequence
  ENSG00000286154_0 (sequence is synthesized)
aaacagaaatgtgagtgcttcctcacttttgacaagctgctagaacaacgttccaaaaagcagcacaaactcatgcatcctgagaatcaaagctctttgaatgagcaagaaatagtaaag

SEQ ID NO: 937709 - DNA, 120 bp, Artificial Sequence
  ENSG00000286154_1 (sequence is synthesized)
accttataggaagtaaataaataattagcagatggaaaaagcatggagtaacaacgcaagtagttctgtttcttcacatcttaacctagtcttttttttttttaattttctttttaattc

SEQ ID NO: 937710 - DNA, 120 bp, Artificial Sequence
  ENSG00000286154_2 (sequence is synthesized)
tcagcaaggcaagttacttctatggagggtgcacccttacagatggagcaatggctgcgttactttgccatagcaccgttaagaccttccatataaacaaaggcttggactcagccttcc

SEQ ID NO: 937711 - DNA, 120 bp, Artificial Sequence
  ENSG00000286154_3 (sequence is synthesized)
gcctccccatcttcctcagaggtgtcccaagacagcttctcatcacctctcaggttctgagatatggactttctgccttattctccctcagaaaagagtcgcagaacataaaaccccttg

SEQ ID NO: 937712 - DNA, 120 bp, Artificial Sequence
  ENSG00000286154_4 (sequence is synthesized)
gctgcggtctagcaggagtttctcagcaatggaggtaccccacaacttgcattgcagtcatctgtctccttgtgttttggcaagatcttacccccgtcaagatgaacaggactagggcag

SEQ ID NO: 937713 - DNA, 120 bp, Artificial Sequence
  ENSG00000286154_5 (sequence is synthesized)
aaacccaagtccctccttctctaaggaggatcagaggctttatgcactgatcaaggtgtgctggggacttgatggcaaccacagttgtcgaacctgttcagccttttccgacactgggca

SEQ ID NO: 937714 - DNA, 120 bp, Artificial Sequence
  ENSG00000286154_6 (sequence is synthesized)
caagtcattggggcaccgagaaatacccatggttatggtcaaaaaattactttaactggatttggaagaaactctcagattggacagtggactgatgtaattttgtggatatattaataa

SEQ ID NO: 937715 - DNA, 120 bp, Artificial Sequence
  ENSG00000286157_0 (sequence is synthesized)
ggggacccagagctggctggggtggaaaccgcggcctactttcccgcctccagcaaactctgcaattgctgaggttgatttagcagcacccaagggatctgggtcggcaagagcacctca

SEQ ID NO: 937716 - DNA, 120 bp, Artificial Sequence
  ENSG00000286157_1 (sequence is synthesized)
gtgacagcctggcaccggggtccgcaggagaaggccaggctggggccagggagctgaggctgaggaggagcgtttgcacaggctagggagacacggcacagcagtatccgcctcagacat

SEQ ID NO: 937717 - DNA, 120 bp, Artificial Sequence
  ENSG00000286157_2 (sequence is synthesized)
ttgtagcaccgttagtcctgccactttctctcactgtagcttcgcaacagacttgggaaccaagcaaggcatggctgaggaagcttaagcccagtctgggctcgcggaagaagctggtgg

SEQ ID NO: 937718 - DNA, 120 bp, Artificial Sequence
  ENSG00000286157_3 (sequence is synthesized)
atccaaatatctgcttcctgcctccacccacccctccccgctcccgtggttggggaactccagagccccacatcacagttcagcacgtgcctcaggagcttcagcacctccttcgtgaaa

SEQ ID NO: 937719 - DNA, 120 bp, Artificial Sequence
  ENSG00000286157_4 (sequence is synthesized)
ggagagtctgccggtaacgggggaagcaggccatcagcctgcccagcttcatctcaggccgcttccaacagcgccaagcaaactcccttggcaagatccatgcaaggccgcggctgacca

SEQ ID NO: 937720 - DNA, 120 bp, Artificial Sequence
  ENSG00000286157_5 (sequence is synthesized)
agccatctgccgcacccacccttcactcccagtcccatctccccatagcacagatttccctatcatgagcccagacgtggcctgcatctcctcttgccttcctctgcccaaggaatccct

SEQ ID NO: 937721 - DNA, 120 bp, Artificial Sequence
  ENSG00000286157_6 (sequence is synthesized)
acagagattctttctctatcttcctttatacatttccacagaattgtttccccagggcccctccccttgaagaaattagacaggaagctggagtagatggttccctctttcccacctctc

SEQ ID NO: 937722 - DNA, 120 bp, Artificial Sequence
  ENSG00000286157_7 (sequence is synthesized)
acactcccaagctctggttaactctctgtgggccagtggctagattccccaacacagatgacaactgaacaatacacatgcagcgtaagaatgttgtcgctgccaccagccacttacaga

SEQ ID NO: 937723 - DNA, 120 bp, Artificial Sequence
  ENSG00000286157_8 (sequence is synthesized)
tacaccattgctaaggtccacccaactggactgtttcccccttccatagactaagccccaaaggccaaaaataaaaccccctaccccaaacctgcctataactgtttgaccagaggccag

SEQ ID NO: 937724 - DNA, 120 bp, Artificial Sequence
  ENSG00000286157_9 (sequence is synthesized)
ctgtcccaggatgcggttaagatgtctaccttgcacaacagaactggcaagaaaaacatctccaggaagcggtcagatacacggcacaaaggactcccccctccccgcttttccttttcc

SEQ ID NO: 937725 - DNA, 120 bp, Artificial Sequence
  ENSG00000286157_10 (sequence is synthesized)
ttcaccctgacccagttctacgccctgtaagacgttgctccagcctataagtggggctgcctcctctgcttttgtcaagagatagcccggcaggactgacaataaatcagtttgcctgaa

SEQ ID NO: 937726 - DNA, 120 bp, Artificial Sequence
  ENSG00000286158_0 (sequence is synthesized)
gatccatccagcatgcctcatcgcactagctgtcgtgtctctctgggctcctcttggctggggcggtttctcacatagcaacatgacatcactgttggtgctgcgtcaggtttctctact

SEQ ID NO: 937727 - DNA, 89 bp, Artificial Sequence
  ENSG00000286158_1 (sequence is synthesized)
acatgacatcactgttggtgctgcgtcaggtttctctactggaaaagataaggtcttgccatgttgcccagactgatacaactcccggc

SEQ ID NO: 937728 - DNA, 120 bp, Artificial Sequence
  ENSG00000286158_2 (sequence is synthesized)
ctgacagaacaaagaaatatatctgtatataccaatgtgtatatatatacacacatatctatatttccatttgtaaccatctgtatatatattaagctaaacatgagttcctgtttatat

SEQ ID NO: 937729 - DNA, 120 bp, Artificial Sequence
  ENSG00000286158_3 (sequence is synthesized)
ttaccacttgaatccagggatcatttggcttgcttcctgcttgcttatctctaaattcccactccaataacgggaaacctggttcccatcatccacatccaccatccatttacttaattg

SEQ ID NO: 937730 - DNA, 120 bp, Artificial Sequence
  ENSG00000286158_4 (sequence is synthesized)
ttcaagtccagtatacatgtgtaggattatcaaaattgttaacccatacccctgtgggaaactttatcaagtagagtacattcttctgaacactttcttttgcctttagtgttccagcag

SEQ ID NO: 937731 - DNA, 120 bp, Artificial Sequence
  ENSG00000286159_0 (sequence is synthesized)
gggcggcgggagcagaaggactggttgaggatggactccacctctgaaaacggccgcaggaacaccaggtcctcattgatggagtagatcttcctccccacctgcaggccagccacctgg

SEQ ID NO: 937732 - DNA, 120 bp, Artificial Sequence
  ENSG00000286159_1 (sequence is synthesized)
gtagggacggcagaggacagacgtgcacaccagttactaagctccttccctcctcaccaaggaagctcaaatgtgttcagcagaagggtgctggcccaagggatccagcaggactgggtg

SEQ ID NO: 937733 - DNA, 120 bp, Artificial Sequence
  ENSG00000286159_2 (sequence is synthesized)
actgcgtgctgtctgtgggcctggcgaagaaagatgaagacctgctgacccgaaccaagattcacaactgcctccttccaaccgctcacatcactggcaaggtcaacctagccgctccgg

SEQ ID NO: 937734 - DNA, 120 bp, Artificial Sequence
  ENSG00000286159_3 (sequence is synthesized)
ccatgggtatgtcgctccttgcagcccaaagcattcctaattgccacaggggcaagctgggctccagccagcacggcaggtgcatctcccccacccacctgcacacgccccaggcaaagc

SEQ ID NO: 937735 - DNA, 120 bp, Artificial Sequence
  ENSG00000286159_4 (sequence is synthesized)
cggaaggccccagggctgaatcctcggccagccacaccctcactctcctaacctatcctcctgtaggctttgcatcagacagcaatgagcttatcttattcaagccactgtgactggttg

SEQ ID NO: 937736 - DNA, 120 bp, Artificial Sequence
  ENSG00000286159_5 (sequence is synthesized)
cagaaaactgagacacctgcttttttcctgtacctccccacaatgtccagcagagggcagtggtggaacacaccaggagcacagccccgggactctgcactcactcccagctactgtagc

SEQ ID NO: 937737 - DNA, 120 bp, Artificial Sequence
  ENSG00000286159_6 (sequence is synthesized)
cactgcagacagtgggtcctggactcagtttctccacgtgagcaatgagagaagaggagtcagcgatcattccagaatctcctgggctgggctgcctcaaggagggtgaagagagacacc

SEQ ID NO: 937738 - DNA, 120 bp, Artificial Sequence
  ENSG00000286159_7 (sequence is synthesized)
ggacttcaccaccacagccttgttcttctcctcgatgtcaaagccatagtcctcctcctggggcaggatctgggggcccagggcagaaggaacccggtcagggagcgaggtgggcctacg

SEQ ID NO: 937739 - DNA, 120 bp, Artificial Sequence
  ENSG00000286159_8 (sequence is synthesized)
gccagccccaccgtggcccccacaggaccatgacctcgtcccaggtctagtagggaagtggccagatccaggtgggcgagacagagcaaaacgcaaacagcacctggcagagccagtgct

SEQ ID NO: 937740 - DNA, 120 bp, Artificial Sequence
  ENSG00000286159_9 (sequence is synthesized)
cactctgtgcctgccactggcttaacgaatcacacggatccaaaggtgtccagccaccaagaatgtggagtcagggagtttagggaggagcggtcccaccccagggcaggatggcaggca

SEQ ID NO: 937741 - DNA, 120 bp, Artificial Sequence
  ENSG00000286159_10 (sequence is synthesized)
tgctagaaacaggtctgggggttccccagtgcgggggatacagggaaaggcactcattcagtcaacagacattgattgagatgctgcccatcacacgggccaggcagttctcatgggtgc

SEQ ID NO: 937742 - DNA, 120 bp, Artificial Sequence
  ENSG00000286159_11 (sequence is synthesized)
tggagacaccatctagaacaagacaaacaagcccagccctgcttagtgcgggaggccaactataaacaaataaacaaaagaaatacaggatgtgatgcagggagtgtacgtagttggaat

SEQ ID NO: 937743 - DNA, 120 bp, Artificial Sequence
  ENSG00000286159_12 (sequence is synthesized)
taaagcacttaatgggatagggcacggcaagggggcagagaaggtgctatcggagctgaggcctgaacgaaatgaaaaacaaaacttcataaagagtggaggaacatgctccaggcagca

SEQ ID NO: 937744 - DNA, 120 bp, Artificial Sequence
  ENSG00000286159_13 (sequence is synthesized)
ggaacatgctccaggcagcagacacagcacgtacaaaggtcctgagggaggccccaaggcactggaggataagaaaagagatcaggaggtcaggcgcaatggctcacgcttgtaatccca

SEQ ID NO: 937745 - DNA, 120 bp, Artificial Sequence
  ENSG00000205537_0 (sequence is synthesized)
aaaacagaaagccagggaagttgcggctgatgaggaaacacctacctgaaggagcagggggcaggctccaaaccttcggggggctttgctaaaagacacccaacctcgaattagttccac

SEQ ID NO: 937746 - DNA, 120 bp, Artificial Sequence
  ENSG00000205537_1 (sequence is synthesized)
tccatttccagtttcccaggctgtgcacgtggtttcaacaaagccggtcagacctcaaatggagttcattataatggaattttacctgaggcagcccctcccccacttcttaacatcatg

SEQ ID NO: 937747 - DNA, 120 bp, Artificial Sequence
  ENSG00000205537_2 (sequence is synthesized)
gcacccaagatatgggtgtgcttgccaaagaggctgggcagaagtcacttcctgcccctggcagaagtccggaaattcagagccgtttggaacaaagaactctgccccgaaggtgttttc

SEQ ID NO: 937748 - DNA, 120 bp, Artificial Sequence
  ENSG00000205537_3 (sequence is synthesized)
cagcatctccctggccagattggaactgccccattcaccctcgtaccacctgctgcgttttttccagccctcctagacaggaaggggaggagggaagactgagctgaatgaccaggacac

SEQ ID NO: 937749 - DNA, 120 bp, Artificial Sequence
  ENSG00000205537_4 (sequence is synthesized)
tgcaggaaaggcaatgcacaaaaatgaagcctgtatcaagtgttgaaaaggatggagaacaatggagactttcatccactgctggaagtgttttttgggacaaccactttggaaagctgt

SEQ ID NO: 937750 - DNA, 120 bp, Artificial Sequence
  ENSG00000205537_5 (sequence is synthesized)
agtttctcatgaaccagaagacaagtataacatgtacacccctagcagtactgtcctatcgtaatagctcaactggaaacaacccaaatgtccatcagtgagaggaggatatacaaatcg

SEQ ID NO: 937751 - DNA, 120 bp, Artificial Sequence
  ENSG00000205537_6 (sequence is synthesized)
tggtgtatttttccaatggaattctacacagcagtgcaaactcatgaactgcagtggtgtgcatcgacatggatgaacctcagaaaactcatattgactcaaagaagagtgcatcacaga

SEQ ID NO: 937752 - DNA, 120 bp, Artificial Sequence
  ENSG00000205537_7 (sequence is synthesized)
gaacacacagtgagaatgacttccttcctggcagagtaactgagagtcactacatggtcatcgtggcggctctgctccctccacgcctatgcccgatcacccacaggctggacctctggg

SEQ ID NO: 937753 - DNA, 120 bp, Artificial Sequence
  ENSG00000205537_8 (sequence is synthesized)
gatcccaccctttgcatctggaccatgaggacccaggacccagaaggcaggacagtttctcttccacatgtcgccacagcgggatgcaggcactgccatcaacgcctgtcacttggattg

SEQ ID NO: 937754 - DNA, 120 bp, Artificial Sequence
  ENSG00000205537_9 (sequence is synthesized)
agcaagaacagcctctccccaccctggaccatttccccaatagtcagaccagaccaaagaggcaaactctagtgtctttgggaactgactctgtctcctgcaatgcagcttctccctggc

SEQ ID NO: 937755 - DNA, 120 bp, Artificial Sequence
  ENSG00000229188_0 (sequence is synthesized)
tcaccgggccaccgagtgtggaccccgcctcacttgaacgaccaagtctacaccgaccttatatccgccgcacacgcggaacttcccatccctattatctaaatccgcatccccatctca

SEQ ID NO: 937756 - DNA, 120 bp, Artificial Sequence
  ENSG00000229188_1 (sequence is synthesized)
ccacagcacattttacaaagaagtgcacaggtgggcctagcagaagattccaaagtctgaccaagcagttacagcaagcaaagaatctttgtcaccatcaatcatgaatctctcccatga

SEQ ID NO: 937757 - DNA, 120 bp, Artificial Sequence
  ENSG00000229188_2 (sequence is synthesized)
tcatggccacatcgtcatacaacgggacaaccatggattggactctaaatgttctcattggttttactaaaatacctattttagcctcagctaaataaataacaaatatcataattttca

SEQ ID NO: 937758 - DNA, 120 bp, Artificial Sequence
  ENSG00000253295_0 (sequence is synthesized)
atgttgaatcttcctattggaggagaagctcccgactcccttctagtcatggcagagcacggaattcagaacaattctactggtgaggacaaggcctctattgtagtcagagtcctctca

SEQ ID NO: 937759 - DNA, 120 bp, Artificial Sequence
  ENSG00000253295_1 (sequence is synthesized)
gcacgcagtgcactcccgacctggccgctggaggcgcggctcccatcacctgcaccgcgactgctagggactgtcaaagcggcagcatgccatcgccttctccagcccttctccagcagc

SEQ ID NO: 937760 - DNA, 120 bp, Artificial Sequence
  ENSG00000253295_2 (sequence is synthesized)
acaaccagtcctcccagctggtcctctgaggaccagccgtcatggcgacgtggtggcaatgtccccaggcagccgaccatcctgggcttctctttggacaggcctgggccaggaccttag

SEQ ID NO: 937761 - DNA, 120 bp, Artificial Sequence
  ENSG00000253295_3 (sequence is synthesized)
acaatggtctgtaagtggtctatcaagtgctgaggacacaggacacatgaacctttattctaggagtccttgggggagcttctcatttagtgccatccttggtacttcctactttcccca

SEQ ID NO: 937762 - DNA, 120 bp, Artificial Sequence
  ENSG00000253295_4 (sequence is synthesized)
accttaaaggggatgttaggcccctgagtgagggtgggattcacccttgtcttgcctggtacagtggaaggccctgccaggcttaggtcttggaccacacactgtgttaaacctgagctg

SEQ ID NO: 937763 - DNA, 120 bp, Artificial Sequence
  ENSG00000253295_5 (sequence is synthesized)
tgggagacacacaactacgcagtgacaagtgccaggaaggtggctgttgagagctctgcgggagtcccgagaagaatccccagcggtcactagaggccttgacgaaagagatttccagga

SEQ ID NO: 937764 - DNA, 120 bp, Artificial Sequence
  ENSG00000278239_0 (sequence is synthesized)
tgggttaggcattttctgtgcattacctcgttcatccttactacaaccttattaaatagatgtcatcacttctgtatttgcattttacaggcgaggacacaggcttaactcctcaaggcc

SEQ ID NO: 937765 - DNA, 120 bp, Artificial Sequence
  ENSG00000278239_1 (sequence is synthesized)
acggagctgacctttgttagtagcttgagcaagtggggtctgaagcacacgtgcctgcacctggcctcagaagtgggactgacacgaggtttcggttaccatggacctctgtgacctcca

SEQ ID NO: 937766 - DNA, 120 bp, Artificial Sequence
  ENSG00000278239_2 (sequence is synthesized)
tgaccaatctaggttctggaaggggtggttgggaagccagaatagtcacagcaagtggaacagggctaggtggagaccagcgagcctacgacaagaggctttaggtcatagagggaggtt

SEQ ID NO: 937767 - DNA, 120 bp, Artificial Sequence
  ENSG00000278239_3 (sequence is synthesized)
ttagtagatgagttttatcagtgggcttcgcccacctcttcctaacatctgaccagctgggctattagttttagaaggctgagctgaggcctgggtgggccaagacatacttccacagat

SEQ ID NO: 937768 - DNA, 120 bp, Artificial Sequence
  ENSG00000278239_4 (sequence is synthesized)
tgtcttcatcccactagccaaggtggttgaggacatcaatgaccttcaaagggaattaacaagtcaaaggaaatggtgtcctaggtgtcacaaatggatggcttaatcctgataccaggg

SEQ ID NO: 937769 - DNA, 120 bp, Artificial Sequence
  ENSG00000278239_5 (sequence is synthesized)
acaggacatatttgctacatacaaaggattatatgtaacaaaaatattggatgtggagtgtgatttaacaaaccccatggactcatcacttagcccaagaaatggagcatcaggagtaac

SEQ ID NO: 937770 - DNA, 120 bp, Artificial Sequence
  ENSG00000278239_6 (sequence is synthesized)
ttgctttttacctgtgttcttttccccatccactcctttgcctcctcccatgaggaagcaatattttatttagtttggcttggattggatttttatatactttgtcatgtatgtattata

SEQ ID NO: 937771 - DNA, 120 bp, Artificial Sequence
  ENSG00000278239_7 (sequence is synthesized)
cctttaaacaataaatattgtttagatttgcctggttttgagctctgtaaaaatggtatcatatgtagttttctggaacttgctttttatattattattgttatttttagagacagggtc

SEQ ID NO: 937772 - DNA, 73 bp, Artificial Sequence
  ENSG00000278239_8 (sequence is synthesized)
tgctttttatattattattgttatttttagagacagggtcttgctgtatcacccaggctggaacttagtgaca

SEQ ID NO: 937773 - DNA, 120 bp, Artificial Sequence
  ENSG00000278239_9 (sequence is synthesized)
cattcacccacgttcccgtgtgggactttgttcttccattttcactgttgtatgacatcctactgtgctattgtacagtaggatctgtacaattgatctattctctgtcaattatgtgtg

SEQ ID NO: 937774 - DNA, 120 bp, Artificial Sequence
  ENSG00000278239_10 (sequence is synthesized)
gatttcttccccagtttttggatactctggctactgccgctatgaatattcttatgcatgtcctcttgtacatgtcttgtacatatgtgtaagagtttctcataggtatacacccaggag

SEQ ID NO: 937775 - DNA, 120 bp, Artificial Sequence
  ENSG00000278239_11 (sequence is synthesized)
tacaattgctggctgtagggtttgttcagctttgggagtaaatgctaaattgttttccaaaatggttgtagcagttatacattactggtgagagggtaaagaatttttgttgaaatacat

SEQ ID NO: 937776 - DNA, 120 bp, Artificial Sequence
  ENSG00000278239_12 (sequence is synthesized)
gcccttcaactgttcacacttaaaaatttttgccactctgttgggtatgaaatgatatctcattagggtctgaatttgtattttcctggttactaagtaggttgagcttcttttcatatg

SEQ ID NO: 937777 - DNA, 120 bp, Artificial Sequence
  ENSG00000278239_13 (sequence is synthesized)
tgcattgactgtgctgcttttgtaaaatgaccattttggtgggggctgtattgttctatagggttaactttttcttcttgatatgtaagctttcttttatattttatatattatatacta

SEQ ID NO: 937778 - DNA, 120 bp, Artificial Sequence
  ENSG00000278239_14 (sequence is synthesized)
ctggcctctcaattttttaaggtcgttaatatttttcaataaagttaaaaagttttctgtattaggatttggtacatcttttgttatatttagtctaaaataatctgtagtatttattgt

SEQ ID NO: 937779 - DNA, 120 bp, Artificial Sequence
  ENSG00000253297_0 (sequence is synthesized)
ggaggttcagaagaaatagcacagagtgaggacagcagaggtaaacatgcctgcagaaacctttctcttggcatgcagagcaaatactataatccaggtgtctcagccaatgaggcattt

SEQ ID NO: 937780 - DNA, 120 bp, Artificial Sequence
  ENSG00000253297_1 (sequence is synthesized)
aaacagatacagaaaaatcattaaagaggatttcagaagggtatgctcacctggacagattgcactccatccttccagtgtctcctgaactgctctccaggaatcattttcatcagaatc

SEQ ID NO: 937781 - DNA, 120 bp, Artificial Sequence
  ENSG00000253297_2 (sequence is synthesized)
actggggcatttatgattcaaaaatgctttgaatgtggcagtgcctgaatctacagttttccatgtgatttttagatatactaatgtttgagaaccactgctgtcaacagcataattctg

SEQ ID NO: 937782 - DNA, 120 bp, Artificial Sequence
  ENSG00000253297_3 (sequence is synthesized)
taagattcaaaatactagttgtaaagagttaatttagctgaaatgcaaattttgatttgacctgctcccaattccagacctctgaaatcagtaatgacaagaacctttgggcattttcag

SEQ ID NO: 937783 - DNA, 120 bp, Artificial Sequence
  ENSG00000253297_4 (sequence is synthesized)
gctcagtcttcagaggcttatcctatagagaagaggaataatttctgtagccacatcccaaagtaggggagatgggccactaggtacacagctgcctttgtgaagaagcagagtaggaaa

SEQ ID NO: 937784 - DNA, 120 bp, Artificial Sequence
  ENSG00000253297_5 (sequence is synthesized)
tatctaccctgcaatgattggggcacaggaaagctggaatccaccttattacaacagctggttaatgtcatactgtgaactcattgagcacctgctttgtgagtattcattttctatttt

SEQ ID NO: 937785 - DNA, 120 bp, Artificial Sequence
  ENSG00000253297_6 (sequence is synthesized)
taaattttgcatcaaccttgtgaggtttttggtatgtttatctccattatacagatgaggctgctgaggctaagagaagtcaagtaatttgcccaaggtcatattggtagttaatagaac

SEQ ID NO: 937786 - DNA, 120 bp, Artificial Sequence
  ENSG00000253297_7 (sequence is synthesized)
ttgaatcaggggttggcaaactatctggcccactgcctgtttttgtgtggcttgcaagcaaaaaaaaagatgtttacattttttaattgttcaagaaaatcaaaaggagaataatatttt

SEQ ID NO: 937787 - DNA, 120 bp, Artificial Sequence
  ENSG00000253297_8 (sequence is synthesized)
gtgacaagtgtaaattacataaaattcaaatttctatgtccatgtatttagttttattggaacacagccatgtccatcatttatgtattgttaatggctgttttcatactacacagcaga

SEQ ID NO: 937788 - DNA, 120 bp, Artificial Sequence
  ENSG00000253297_9 (sequence is synthesized)
gttgagtagttgtgacagtgaccttatgctcttgaaagcctaaaatatttggtaaatagccatttacagaaaaaagtgccacctcccacttgaaccattatgcctgcatttctcaaactt

SEQ ID NO: 937789 - DNA, 120 bp, Artificial Sequence
  ENSG00000253297_10 (sequence is synthesized)
cagccatttgaattctactccttcatgattcttgccaccttttcataccatctggaacattaactgtgtgacatttttctttagatcaattaattttccttaaataaatttattttataa

SEQ ID NO: 937790 - DNA, 120 bp, Artificial Sequence
  ENSG00000253297_11 (sequence is synthesized)
agaaacaaaaatgaaagcgaaaaccagtaccaattgcaagaaatagaagaaaactgtaaaaacaaatacaatataccaagaacagtgtattcatattagatttcagctaaatagctggaa

SEQ ID NO: 937791 - DNA, 120 bp, Artificial Sequence
  ENSG00000253297_12 (sequence is synthesized)
cagacaatgttggtgttgcttcatttccctgcagatcccctgaccatttctctgtaagccatcagacttccaatgatggacctgaaacatttttggagggctgctctcagtctactggaa

SEQ ID NO: 937792 - DNA, 120 bp, Artificial Sequence
  ENSG00000253297_13 (sequence is synthesized)
tcccctttgcacacaagcacaataaattgggggtgcctgagaatccaagttccactgtggatagctctaaccaacaaattgtgggtgcgggagtatccacatcccaccttcctatcccct

SEQ ID NO: 937793 - DNA, 120 bp, Artificial Sequence
  ENSG00000259631_0 (sequence is synthesized)
agctctcagcctggttctcatgttgaccctggaaggttcacccacctctgttgggtggagatggcgtcctgggagcctagaagactgtccaggcacagagcaagggcagctgtctttcca

SEQ ID NO: 937794 - DNA, 120 bp, Artificial Sequence
  ENSG00000259631_1 (sequence is synthesized)
ctgctgaggacagcagggctgcttggcaccctgggtccctgaatggctctgtggagcactgcctgatggcccaccctggactgttgcctgagacagaaataaacttttatcttgtttcaa

SEQ ID NO: 937795 - DNA, 120 bp, Artificial Sequence
  ENSG00000278231_0 (sequence is synthesized)
gaatcaaacaatacggcctgggtggtatttatggagcatctgctgtatatcctgggcagtgttctgggccacgagaatgaagtcatcaacaggtcgttgtccttataagaaggacaaccc

SEQ ID NO: 937796 - DNA, 120 bp, Artificial Sequence
  ENSG00000278231_1 (sequence is synthesized)
gattctacaactcattcttcagacaaaccttctggaagcctacctacttttattctggtgtttgccctggtagcaatttaactgtcactttaagaagacgcgaatggggttggtgtctct

SEQ ID NO: 937797 - DNA, 120 bp, Artificial Sequence
  ENSG00000278231_2 (sequence is synthesized)
ggcttttgagacttcagggcacccctttcttggagagaaagatactcctttatcaggccagagagctgaagacctgttgggcttggggccactccctttaataaagaaacccacatccta

SEQ ID NO: 937798 - DNA, 120 bp, Artificial Sequence
  ENSG00000259635_0 (sequence is synthesized)
attacctggggagctttaaaactatatgctaataatcaggacactctaggccaatgagaccaatctttgaagcctgtgagcatttccactcgtctgccaaggcagagacagccccatcca

SEQ ID NO: 937799 - DNA, 120 bp, Artificial Sequence
  ENSG00000259635_1 (sequence is synthesized)
gaagcaagaatgagacctcggggccctggcgcccttgagccaaccccatctctgttctcacaacttgccttgcctgacctctggagaaaaacttcagaaaatatcaccctttcttcccac

SEQ ID NO: 937800 - DNA, 120 bp, Artificial Sequence
  ENSG00000259635_2 (sequence is synthesized)
ctgctcccgctggccaaaatccccatcaaagcctggcttcagcccctcagactgggaactctatccaaatggagtgtggggagtgtgggtgaggaaggacggaaggaagtaggtcacacg

SEQ ID NO: 937801 - DNA, 120 bp, Artificial Sequence
  ENSG00000259635_3 (sequence is synthesized)
ctggctaccgcacaacggggaagaggccaacctcggaaaggcagaagagtggccgccatgccgagcttccagagatggagagaaggtctaggaagccaccttggggaagccgcctgagca

SEQ ID NO: 937802 - DNA, 120 bp, Artificial Sequence
  ENSG00000259635_4 (sequence is synthesized)
ggagcggggcagccagggatcagagcccacggcctgctggggacccatcctgggcacggggctctgggctctgtgcccattctctgatgtgccacattgttctgctacttccttctctgg

SEQ ID NO: 937803 - DNA, 120 bp, Artificial Sequence
  ENSG00000259635_5 (sequence is synthesized)
aagtaataagggggttgggggtgggacagcacggccaggagtagatggagcggggtggagctgccagtgggggaggaggctgcggttcattcccacgaccagctgcccttctggccgccc

SEQ ID NO: 937804 - DNA, 120 bp, Artificial Sequence
  ENSG00000259635_6 (sequence is synthesized)
tgtgtgtgtgtgtgtgtgtgtgttttcatgtgtctgactcccttgcttggcttcagtcacaggacaaagccctttgagaaacagtcaccaacctgtgttcccactgggctctgtcctggg

SEQ ID NO: 937805 - DNA, 120 bp, Artificial Sequence
  ENSG00000259635_7 (sequence is synthesized)
ctctgtcctgggagaggcacaagaacccgccctgacgcctgagagaaagactctgaaggcctcaggaccaaatccctggaggggtcttggcgtctaatgaatctagattgactgacttcc

SEQ ID NO: 937806 - DNA, 120 bp, Artificial Sequence
  ENSG00000259635_8 (sequence is synthesized)
ctgggatgcttctggaaccttctgctaagccctcagcttcttggcagagctctattactaactggatatcagaatatgggtgcaaactagacatggggagtgaagtcagccattctcaca

SEQ ID NO: 937807 - DNA, 120 bp, Artificial Sequence
  ENSG00000259635_9 (sequence is synthesized)
gcatctacctaagaaggccaggatcctccacagccacgtagatcgtagagccagtggcatgccggggatgatatacaaagacaagaaactctgaaacagagaacacaaactaacagccca

SEQ ID NO: 937808 - DNA, 120 bp, Artificial Sequence
  ENSG00000259635_10 (sequence is synthesized)
cccataggccaaatgcagcccgcaggcacatggcttatttggccaacacagcatttaagaaatgtttgagccgaggctgggtgaggtggctcaggcctataatcccagtactttgggagg

SEQ ID NO: 937809 - DNA, 69 bp, Artificial Sequence
  ENSG00000259635_11 (sequence is synthesized)
gaattagccaggtgtggtggtccatgcctgcagtcccagctacccagctgcgtgagctgagatcacacc

SEQ ID NO: 937810 - DNA, 120 bp, Artificial Sequence
  ENSG00000253298_0 (sequence is synthesized)
atatgagacacaattgtacacaagaagaaatgaaaagaagtctgctaggaatccttgcagactaaaaggagatacatgagagagactttctttctgtctctggacattgtcatctgtctg

SEQ ID NO: 937811 - DNA, 120 bp, Artificial Sequence
  ENSG00000253298_1 (sequence is synthesized)
gagtacctagaactgcagcagtcttcatagaatcatgagagtaagcttttgtgttttagataaagtggcagatctgatttgttgatagcaattccctggagtgttgcattgagaagattc

SEQ ID NO: 937812 - DNA, 120 bp, Artificial Sequence
  ENSG00000253298_2 (sequence is synthesized)
tgaggccttggtctactatctgtgactgccatggaatcctgagtggagcgaaattaagttcccagacttgttataccctcctgacttgttctccccttccttgggaagggcatctgttcc

SEQ ID NO: 937813 - DNA, 120 bp, Artificial Sequence
  ENSG00000253298_3 (sequence is synthesized)
aggcaggtaacacctgtcatcctggctggtctaggtaacacccaatgtcatggctgggcattggcttttttccttatcacacacacttctaaagtgtccacagctgatgcgacagtggca

SEQ ID NO: 937814 - DNA, 120 bp, Artificial Sequence
  ENSG00000253298_4 (sequence is synthesized)
cctccctgtgactcggcctccacttggttctcttgatcctgttgtgctctctctctcagccccaacttttggctcatccatactaagactctgccacagtgtcccctcaaaccacatcac

SEQ ID NO: 937815 - DNA, 120 bp, Artificial Sequence
  ENSG00000253298_5 (sequence is synthesized)
aatgatcccatgcaaataactggttctgacttcttaactaccttcctctactctaccacagggcattgaacattttcagatctcacacacacccactggacctgagggaaactcagagac

SEQ ID NO: 937816 - DNA, 120 bp, Artificial Sequence
  ENSG00000253298_6 (sequence is synthesized)
agagtactggggaatatctcaaatcctttccactcaaaatgccagcatactgctcaactgaggccacctcatgttggcatggggcaccccaacagacaagtggtctcttcccaggattta

SEQ ID NO: 937817 - DNA, 120 bp, Artificial Sequence
  ENSG00000253298_7 (sequence is synthesized)
gatcctgtttttagatctccagccctctccactccttgatgggttctacacaaagcaggagggaaggggcaggtagaggataatcattctatcttcaacctgttcagagtgttgatgtga

SEQ ID NO: 937818 - DNA, 120 bp, Artificial Sequence
  ENSG00000253298_8 (sequence is synthesized)
atccttagagtatccaaggagaaaatgtacataagacattaagcatggggcctggcacagagaaagtgctctatccatcttacaaagattaaagtatcctcatcagctagcacagtctaa

SEQ ID NO: 937819 - DNA, 120 bp, Artificial Sequence
  ENSG00000253298_9 (sequence is synthesized)
gtcatcctggctggtctagctgtgttctcgtcacccatgccggcacagtaccttacacgtaagaagagctcagaaattctttgctgaattcattcattttgaggcataaaatccaatctt

SEQ ID NO: 937820 - DNA, 120 bp, Artificial Sequence
  ENSG00000253298_10 (sequence is synthesized)
cctgaagataagtcctttccactgaactggtggggtgtggggaaaggggttgctggtacttcatctggggaccccgaagggaccaggatatgagttggctagaaaaggggcaggtaagta

SEQ ID NO: 937821 - DNA, 120 bp, Artificial Sequence
  ENSG00000253298_11 (sequence is synthesized)
tggggctttcccacccacagtagtcctgcttcatgttcttctttcacaattatttgacagggcaccccatgaaatcaagtggctaagtcagatttaggaagtggttttgaaattgatggg

SEQ ID NO: 937822 - DNA, 120 bp, Artificial Sequence
  ENSG00000253298_12 (sequence is synthesized)
tgcagggaagtacccttgagtcaaaatcagaagaaatgggggaatgccgaagaaacactcagagttaatgagatgaatccccctacatgagcattgtgggatgtctgcccaacccacaca

SEQ ID NO: 937823 - DNA, 120 bp, Artificial Sequence
  ENSG00000253298_13 (sequence is synthesized)
gccaagatatgctccttcaggtgtgtcctgcccaccgaccacagctgactgaaccacagaatttccttttaccccgggctgctcccctttttgtgttcagcccagcagtctgccttcatt

SEQ ID NO: 937824 - DNA, 120 bp, Artificial Sequence
  ENSG00000253298_14 (sequence is synthesized)
gcaaataggaaggcttcgtgcacatacaacatatttgagagaatatgagtggagtaaagatctctgccaaatgtaaacatgagcatcgccgctctgtgtaagactcttcagtgactcccc

SEQ ID NO: 937825 - DNA, 120 bp, Artificial Sequence
  ENSG00000253298_15 (sequence is synthesized)
cttgccttccagataaagtccatgtttcttaacatggttccaaggccttgcttgatccagtgactatgcatccattacaggctgaattgtgtcccataaaattcatacattgaagcccca

SEQ ID NO: 937826 - DNA, 120 bp, Artificial Sequence
  ENSG00000253298_16 (sequence is synthesized)
gcctccagtaattcagaacatgactgtatttgtagatagagtctttaacgaggtaattaagttaaaatgaggtcatgtgtgggggcccttaattcaatatgcctgacgtctttatacaaa

SEQ ID NO: 937827 - DNA, 120 bp, Artificial Sequence
  ENSG00000253298_17 (sequence is synthesized)
aaggagataaggacacagacacgaacagagggaagcccatgtgaaggcaaagaggaaaatggccattaccacccaaggagagaggcctcaggagaaaccaacccagctaacacctggatc

SEQ ID NO: 937828 - DNA, 120 bp, Artificial Sequence
  ENSG00000253298_18 (sequence is synthesized)
tcaaacttcctgcctccagaatgatgagaacatacatttctgttgttttaaccacccagtcggtgatactttgctctggcagccctagcatctctctccttcacctccctaaaccgccct

SEQ ID NO: 937829 - DNA, 120 bp, Artificial Sequence
  ENSG00000253298_19 (sequence is synthesized)
ccccaggttatgacactctagctgtgtgctcaatgccctctccactccaggctggccccactctcacctgggcatctacattgctcccaccactcttcatccagctaactccttcctcca

SEQ ID NO: 937830 - DNA, 120 bp, Artificial Sequence
  ENSG00000253298_20 (sequence is synthesized)
tgaagccatccctgacctttaagtatctcctaagatacccgcttccttcccctctcagagccccatgttacgactacccatttactctgtgtcaataccacactgtgtgctacattagaa

SEQ ID NO: 937831 - DNA, 120 bp, Artificial Sequence
  ENSG00000253298_21 (sequence is synthesized)
caggggccatatgtatcttgctcacatctgtgcctagaacagtgtctggtacctacaagtgctcaataaattcttttggatgactggcaattaatgaaaataaatcaaataattcaaagc

SEQ ID NO: 937832 - DNA, 120 bp, Artificial Sequence
  ENSG00000259636_0 (sequence is synthesized)
ttctggtcttgactgtctgtgagagccttcctggtggaaacagaattgttagtcagctgtcatctccatggtgattttttaaggctaagtgctgaaccagatttcttttcattatgggag

SEQ ID NO: 937833 - DNA, 120 bp, Artificial Sequence
  ENSG00000259636_1 (sequence is synthesized)
agaagcctttggaaaagttgttgaagagtcacgtgcacaagtgatgtgctgagcagactggatcttgcctgatggccagaaaattaaaacaacactgaaattaataaaaattcaaactcc

SEQ ID NO: 937834 - DNA, 120 bp, Artificial Sequence
  ENSG00000227695_0 (sequence is synthesized)
aggggaagacgggagaagaggaagggacaggacattccacttagacaatcaaacttgaagtgtttacggtctagggtagatgtccaacagggagcagggactatcaatctggaactcaga

SEQ ID NO: 937835 - DNA, 120 bp, Artificial Sequence
  ENSG00000227695_1 (sequence is synthesized)
gacgaaaccatggagtgacaggtgcaggttaagagcctgttaggtccaaaatggtgccccagaaattcaagttaagtcaagcccatgttggaagaccaccaggtgttctccaaacaatcc

SEQ ID NO: 937836 - DNA, 120 bp, Artificial Sequence
  ENSG00000227695_2 (sequence is synthesized)
aaagaagtttccgggatcctggcaaggctgccttcctggggcagagccatggtttcctccacccgtgtgtcaggacataatttcacaaaccggggtatctacttcaccattaacaatgca

SEQ ID NO: 937837 - DNA, 120 bp, Artificial Sequence
  ENSG00000227695_3 (sequence is synthesized)
gtcatcttgatttccagaacttactgactcatccacagtcctcaggggccccaacagctctacaaaaccttctggaaaaatgcctcttcggccctctaactccccttcaaaccagcctgg

SEQ ID NO: 937838 - DNA, 120 bp, Artificial Sequence
  ENSG00000227695_4 (sequence is synthesized)
ttcaggaactccaataatggtgatcacatccccttccctgaagtccagctcttcatccagctgagcagaaagccccattagggcccgggcttgtcccatggaatattccggaatctgaaa

SEQ ID NO: 937839 - DNA, 120 bp, Artificial Sequence
  ENSG00000227695_5 (sequence is synthesized)
cagggcgctctgggagtgccactgccggctctgtgaggagaggcagagctcgcggacacatgaagatgggaagaagccccgtgcgccccagcagcttcggccctgcagccagcctgcagt

SEQ ID NO: 937840 - DNA, 120 bp, Artificial Sequence
  ENSG00000227695_6 (sequence is synthesized)
gggaatgccatcgagaatcaccaggtcacctaaagaaaagaggagcagagatggtgacctcagtcatcacccagcagaacattatcacgactaatagtgcaacctctcattttaaacagc

SEQ ID NO: 937841 - DNA, 120 bp, Artificial Sequence
  ENSG00000227695_7 (sequence is synthesized)
taccaaattcaaggaaatacacctagagctttaggagcatgaacaattttgacaatttattgaattggagcagttctataaacctgtagttttcagagtgttccatggaaccctacaggt

SEQ ID NO: 937842 - DNA, 120 bp, Artificial Sequence
  ENSG00000227695_8 (sequence is synthesized)
gggtctccaagatcctagcagagaatctgtgaggtcaaaaccattctcataataacactaagactttatctacatattttactctgctgacttttgtaatctctgtgaaaaagcaatggt

SEQ ID NO: 937843 - DNA, 89 bp, Artificial Sequence
  ENSG00000227695_9 (sequence is synthesized)
actctgctgacttttgtaatctctgtgaaaaagcaatggtgattaaaactgctggccagctaggtgctgtggcttacaccagaaatccg

SEQ ID NO: 937844 - DNA, 120 bp, Artificial Sequence
  ENSG00000227695_10 (sequence is synthesized)
gaggctgaggtgggaggatagcttgaacccaggaggtcaaggctgcagtaagctgtgatttcaccactacgctccagtctgggtgacagagcaacacttgtctcaaaaataaaaataaaa

SEQ ID NO: 937845 - DNA, 120 bp, Artificial Sequence
  ENSG00000227695_11 (sequence is synthesized)
aagactccatctcaaaaaaataataaattaattaaaaactgctggcaattcataagcaaaggcagtagccacaaattacatgaatagtcactgtatggtcatcgtattcttcacaaccat

SEQ ID NO: 937846 - DNA, 120 bp, Artificial Sequence
  ENSG00000227695_12 (sequence is synthesized)
ggtcatcgtattcttcacaaccatgtactcacagtttttaaaaaagccattttcagttaagaagcaatacaaattatgcactgtgctaaatctcaacccttaagaacaattcttttgtaa

SEQ ID NO: 937847 - DNA, 120 bp, Artificial Sequence
  ENSG00000227695_13 (sequence is synthesized)
tattctgtgtgacaatataggaattacacataaagcacttttactgctgaggagaagcacgagtaactgagttatatgcctgaaccgtctgtttattttcacataacaccattttatgtg

SEQ ID NO: 937848 - DNA, 120 bp, Artificial Sequence
  ENSG00000227695_14 (sequence is synthesized)
caagaatgaataacagacaactatgtttattcagacttagatatctggcagatgtttcctccaaaatgaaagtgagtctgaaacatcaaggagaacaaatgacagtatttgttgccaatg

SEQ ID NO: 937849 - DNA, 120 bp, Artificial Sequence
  ENSG00000227695_15 (sequence is synthesized)
ataaaattccaacttccaagagaaaatgagaattttggaaaacttgtatctactaccatgggcttggcagctttcccatacttaaagattcttctgatgagatagtaacaaatatgattt

SEQ ID NO: 937850 - DNA, 120 bp, Artificial Sequence
  ENSG00000227695_16 (sequence is synthesized)
tttcacattgtatgttgaaatggtcaacatttggaataactgagtagctaattgaatcaatatttcctaaatgacaaatgcatgctggtataaaatcattcatggctaaaagattcacac

SEQ ID NO: 937851 - DNA, 120 bp, Artificial Sequence
  ENSG00000227695_17 (sequence is synthesized)
tccaaaagcaagatagattaatgaattttagtgtaatattatgaaagttcaccgacgtagtttcagatcccacactgcaattaactcgtaagaaattaccaatcgttgaattttggtgca

SEQ ID NO: 937852 - DNA, 120 bp, Artificial Sequence
  ENSG00000227695_18 (sequence is synthesized)
gtgtcaacgatgaatatttgcaattatttgaaaagactattaaaataccttttcctgtctcccattgcatatttgtgtaaggctggattttcttcacataattccatgaaaacaacacat

SEQ ID NO: 937853 - DNA, 120 bp, Artificial Sequence
  ENSG00000227695_19 (sequence is synthesized)
aaaaaaacctcagatggaggcctcaggagaatgactgatcaggccggtgagaaaggaaagcctgggggaaaacttggcttcctgcctgggggagaggctggagagcagccactgaacaga

SEQ ID NO: 937854 - DNA, 120 bp, Artificial Sequence
  ENSG00000227695_20 (sequence is synthesized)
tgttggaagaccaccagatgttcttctctaatgacgagctctgaggaatccccaaatgatgtcctccttgttctcccctggtacactgagtctgcagaccatccagaaggatcctgctgc

SEQ ID NO: 937855 - DNA, 120 bp, Artificial Sequence
  ENSG00000227698_0 (sequence is synthesized)
aacagtcctgccattttgcagattgaagggagatttaaggcaactgtgtcttccacccgtgcgctcaagaggttgggatgtgaatggagagagggctgcacctggtggacctaatgttct

SEQ ID NO: 937856 - DNA, 120 bp, Artificial Sequence
  ENSG00000227698_1 (sequence is synthesized)
aaagtgctgggatgacaggtgtcagcctgtcctggagtcctccaagcccgtggggtctgatgagcacagacggctcagctcttccttgcttccatacccttacataaaactggagctcgg

SEQ ID NO: 937857 - DNA, 120 bp, Artificial Sequence
  ENSG00000227698_2 (sequence is synthesized)
ctttctcagagaggatgcttttatttgcctgagatgcaccatctgttactggctccgtttgaccgatctccttgttcatcgtggtccaggtctgcacctgacagctctgagtgctgacct

SEQ ID NO: 937858 - DNA, 120 bp, Artificial Sequence
  ENSG00000276101_0 (sequence is synthesized)
agtgacaatgccgcaggtgttttaaaggggagcaagggagataaaacggtaatcacaagccatgtgacgatgccgcaggtgtttaaaggggagtaaggcagataaaaggttcccagaaag

SEQ ID NO: 937859 - DNA, 120 bp, Artificial Sequence
  ENSG00000276101_1 (sequence is synthesized)
caagctgctgatgggaagggagcagaaagctctccgaggggtctgctcagcaggcggctggaaagagaaggggggcctggcagggctcccgaggatgacctgggcatcaccccagggctg

SEQ ID NO: 937860 - DNA, 120 bp, Artificial Sequence
  ENSG00000276101_2 (sequence is synthesized)
ctgccgctccctgggcctgaggcaggcggctgtagggcggaggccttaccctccagctggctggccgcctggtttccacccgctcgctccacgtccctctgctcgcgaggctcgggcggc

SEQ ID NO: 937861 - DNA, 120 bp, Artificial Sequence
  ENSG00000276101_3 (sequence is synthesized)
agcccaggccctggagccggcttctccgctgggaggggaggcttcccacctgcacacacggtgaagactcagaaggttttgcaggaaagtcaagggagggtttggggggttgggggacag

SEQ ID NO: 937862 - DNA, 120 bp, Artificial Sequence
  ENSG00000276101_4 (sequence is synthesized)
aaggcaagggcgggacaaaaggaagtggcagatgtttctaaagtgacacccccgtcagcacagtttatattcaacctgatgattactagcgaagcaataaaaaaatatttaacaacctca

SEQ ID NO: 937863 - DNA, 120 bp, Artificial Sequence
  ENSG00000244541_0 (sequence is synthesized)
gggaaggccatagaaaggaccggcgaatgctggcattgatgtgtgttattttaacatttctgaaatcctgttcttagtctgcacaccttgtccgaggctccgatgttatccaggtcacca

SEQ ID NO: 937864 - DNA, 120 bp, Artificial Sequence
  ENSG00000244541_1 (sequence is synthesized)
ggtatgcccctgggctcctgccgcagctgatcgggtgctaggtgctgaggatacacggtgagttccttctctcccctcaggggccggtgtctggatgggtaactttaatatgatgtcgga

SEQ ID NO: 937865 - DNA, 120 bp, Artificial Sequence
  ENSG00000244541_2 (sequence is synthesized)
gcaatttgcaggaagaaaggagttacccagtctgggagaaagcaattggaagaaatgcaaagctcttcaaaggagacctataaagtcatctttgttttgttcattcttctcatgtttctg

SEQ ID NO: 937866 - DNA, 120 bp, Artificial Sequence
  ENSG00000244541_3 (sequence is synthesized)
cattctgggcattctcctaaattggggagaaaccaaaatgcccagaagtcaaattctgcaactgtcatcatgcaaaatgtcaaatgagagaaccaaagtatgctggattctatattgtta

SEQ ID NO: 937867 - DNA, 120 bp, Artificial Sequence
  ENSG00000244541_4 (sequence is synthesized)
ggaagggatggttaatttgattgactcttgggagctatttttctagcattaagtaattctagggaacccttctgtgatcatctctgagtaaataaagaagtgaaattgcaattcaaataa

SEQ ID NO: 937868 - DNA, 120 bp, Artificial Sequence
  ENSG00000244541_5 (sequence is synthesized)
ctcgtatcaggttctcctaaagaaaggaagccattaaacaagaaaagaaaccaacattccgttatggattaaaaatatgctgtcattcacctattagctcttctacattggccaggatgg

SEQ ID NO: 937869 - DNA, 120 bp, Artificial Sequence
  ENSG00000244541_6 (sequence is synthesized)
ctggttttcttatctttcctcttgttttagcagaatttgaggaatctgcttaaccatttgtactttgttctactgccagtccaaacaatttcaatcaatggattcccaagccaagcttct

SEQ ID NO: 937870 - DNA, 120 bp, Artificial Sequence
  ENSG00000244541_7 (sequence is synthesized)
aactacagctcaccaggcatcctagttggactgattttgtttttgttttgagaaattatgaaataggcaagttgtcttacatgtaagtattgaccatttgggaaaagctgttatttgcct

SEQ ID NO: 937871 - DNA, 120 bp, Artificial Sequence
  ENSG00000244541_8 (sequence is synthesized)
tcagttaaaatatgcaagaaaaggagatggatgggtttggggacttgccttaaactcaactaatcaagatggtaattcctaagtaattcatggttcctagcggtcttcttaatcagtggg

SEQ ID NO: 937872 - DNA, 120 bp, Artificial Sequence
  ENSG00000244541_9 (sequence is synthesized)
tgggattcctggcctcatattttgccccagctactagtccaattctctgatgtctgttcacccacaccacagccctggactctggctgcaagagtagaaatattctgttgtttcctctaa

SEQ ID NO: 937873 - DNA, 120 bp, Artificial Sequence
  ENSG00000244541_10 (sequence is synthesized)
tcttgtacgttcatttgtgcatcaactatgtgccagtcatcctaaagaaacttacagccaagttgaagacagacaagttaaagggcaattttatattaaaaaagagaactctatggagtg

SEQ ID NO: 937874 - DNA, 120 bp, Artificial Sequence
  ENSG00000244541_11 (sequence is synthesized)
tgggcagaaatgcaccagggaaaggacataacgaaactggttttatcagaacagcctgcctgagagagatcaagcagggcacaggtcaccaggtatgcccctgggctcctgccgcagctg

SEQ ID NO: 937875 - DNA, 120 bp, Artificial Sequence
  ENSG00000244545_0 (sequence is synthesized)
agtttaatagaagttccacatatcttgaaaacaaaactaatatttgaggagcttatgggagggaaaactctattgccttcattccctacccaagacataaaaggcacaggagagaaagtg

SEQ ID NO: 937876 - DNA, 120 bp, Artificial Sequence
  ENSG00000244545_1 (sequence is synthesized)
aagagggtttggcttttttgagacacaaatttcattatttttcagtttgggacaataattgttttctttcctaatatctaaaattgtaaacaattaaaatattatgtcagtaacaagtgt

SEQ ID NO: 937877 - DNA, 120 bp, Artificial Sequence
  ENSG00000244545_2 (sequence is synthesized)
tctggcaaatcaatatctttacttaacacaatctctggagtccattacttattactttgtcgtatgattgggttcctgctgaatctcaccaaatcgcaccaaaagggtgacaaaacaact

SEQ ID NO: 937878 - DNA, 120 bp, Artificial Sequence
  ENSG00000244545_3 (sequence is synthesized)
tcctgtaagcaaaggacaaacagttaagtaagggctccagctgggtgaactatggggcatttgcccggagttcatgctcagcatcagggtcaaagcaaagggaactctgacaatgattcc

SEQ ID NO: 937879 - DNA, 120 bp, Artificial Sequence
  ENSG00000229236_0 (sequence is synthesized)
agaagttcgtgggtcatttaactgtaaacgcctaaattttaagagagcccttactcttatacagtgaatttggaggactggcttaggacaaggccctctatgttcagaatgtttatcact

SEQ ID NO: 937880 - DNA, 88 bp, Artificial Sequence
  ENSG00000229236_1 (sequence is synthesized)
gcttaggacaaggccctctatgttcagaatgtttatcacttttctctcttttttttttttttttttgacaacgaggggcgcgatctgc

SEQ ID NO: 937881 - DNA, 120 bp, Artificial Sequence
  ENSG00000229236_2 (sequence is synthesized)
catgttggccaggctctcaaacccctgacctagtgatcctcccgcctctgccgcccaaattcctgggattgcagtagtgagccaccgcgcccggcctatttttttcagtcttatcttctc

SEQ ID NO: 937882 - DNA, 120 bp, Artificial Sequence
  ENSG00000229236_3 (sequence is synthesized)
tacctcaccacctcacagtaaagcatataggttcgacaacatcaccaaggaccaaacattgtggtagatgtacatgcaatgtacatgcagagtacaggttgatgcctgaataaagagatg

SEQ ID NO: 937883 - DNA, 120 bp, Artificial Sequence
  ENSG00000229236_4 (sequence is synthesized)
ctgggtgagtgtctgaacctagatgacatggaggagtcctgcagaaaatatttgctattgaattcaaaggtctatagagagttctcaactaatgaaaaatcattgcattatcttgagagc

SEQ ID NO: 937884 - DNA, 120 bp, Artificial Sequence
  ENSG00000229236_5 (sequence is synthesized)
aatagcaatgatcatgccaacagtaattcagactgtgtcataagttgggtcacacagtccctattttcaaactttgtggatgtctgtcaactggcagtgaattgtattcaggagaaaaga

SEQ ID NO: 937885 - DNA, 120 bp, Artificial Sequence
  ENSG00000229236_6 (sequence is synthesized)
gaaatgtacaaaggttgaagagtgctctggctgtagagggtccccacgatctgtcatctagtaactcaccagatacataagatattttgcctgctatgaagccattggagaatcaggtcc

SEQ ID NO: 937886 - DNA, 120 bp, Artificial Sequence
  ENSG00000229236_7 (sequence is synthesized)
agctgtgtcctacagatttataccctcactttggatgcactgtgaatcttgaaacaattcattttatacttaaccctttaagtataaagtatatacttcaagtataaagtgtaaggttgc

SEQ ID NO: 937887 - DNA, 120 bp, Artificial Sequence
  ENSG00000229236_8 (sequence is synthesized)
ttcatttcatgggcccacccaggatttaaaggtgtattccctgaaagaattggttccttccggtgggttcctggctgacttcaagaatgaagctgcagacacttatggactgggaggagg

SEQ ID NO: 937888 - DNA, 120 bp, Artificial Sequence
  ENSG00000229236_9 (sequence is synthesized)
cccacgagaaaaacaggaagaacaagagaaaggctgaggctctagtggctgctttgcagacttgcagagtccaggatcccccaggaacttccactgattgctacctgttaccagtgttaa

SEQ ID NO: 937889 - DNA, 120 bp, Artificial Sequence
  ENSG00000229236_10 (sequence is synthesized)
agccagggcactttaagaagaattgcccaagccacaagaaaaagccaccttgaccacttttgtggtgaagaccactggagattgcactactgaccaccaagacagaggtcagtgagtacg

SEQ ID NO: 937890 - DNA, 120 bp, Artificial Sequence
  ENSG00000229236_11 (sequence is synthesized)
gaatcattctcacagatgctccagcaggactgatgggttctggggctgaaacccctggttccaatggttcaaacatccattactgctcaggagtcctgggtgataatggaaattgaaggg

SEQ ID NO: 937891 - DNA, 120 bp, Artificial Sequence
  ENSG00000229236_12 (sequence is synthesized)
aggagggcaagcctcccactggattctggagccagtctttctgttctcctcaccaatccatgcctctcctcttcccatgtcacaacaatggtgggtgtcttaaaaaagactctaacttga

SEQ ID NO: 937892 - DNA, 120 bp, Artificial Sequence
  ENSG00000229236_13 (sequence is synthesized)
atccagcccctctctgccacagcctcagagcaggattggtaactccaaaagacaccaggacacatcctaattttcttaaattttatttatttgtttatttatttattattattatacttt

SEQ ID NO: 937893 - DNA, 74 bp, Artificial Sequence
  ENSG00000229236_14 (sequence is synthesized)
gtgccatgctggtgtgctgcacccactgactcgtcatctagcattaggtatatctcacaatgctatccctcccc

SEQ ID NO: 937894 - DNA, 120 bp, Artificial Sequence
  ENSG00000229236_15 (sequence is synthesized)
caatagatatcctaattttgatgccagaagaaggtttagatatcttagtctttgatgacataacattgtatgtcaattctagcatggctcagtaaaagaatgaggcaatatgaaaggccc

SEQ ID NO: 937895 - DNA, 120 bp, Artificial Sequence
  ENSG00000229236_16 (sequence is synthesized)
agggacctgtctgtacataagagtagttctcccaactatcatagatagccacacctttcagcacaaatgctgaaaaccccactgtttgcaagtcatgaagaaaatatttgtcttagtgcc

SEQ ID NO: 937896 - DNA, 120 bp, Artificial Sequence
  ENSG00000229236_17 (sequence is synthesized)
agcccccaaagtccatgaccttggagacgaacagatctccccaggatacagatagaactccagtctactagttctcctggtaactggactgtaaaattcagtttttattgtgcaccaagt

SEQ ID NO: 937897 - DNA, 120 bp, Artificial Sequence
  ENSG00000229236_18 (sequence is synthesized)
ttagccaggagacctacttagaactcacaaaactgtaatcccaaaggcaatatcttcagcacaaaagcctaatagagaaaaacttcaaacctaaaccagtctgtaagactcaatgcaaac

SEQ ID NO: 937898 - DNA, 120 bp, Artificial Sequence
  ENSG00000229236_19 (sequence is synthesized)
acctaaaccagtctgtaagactcaatgcaaacatataatcagataaagaatattaataaaactaataaagaatattaatacatcttttaaaaaattacaaaaatgaatttcctgaaacag

SEQ ID NO: 937899 - DNA, 120 bp, Artificial Sequence
  ENSG00000229236_20 (sequence is synthesized)
acctcacagtaaagcatcctatatgtgtctttgcctataaaacaggtttcttgaagacagcatactaatggattttggttttttattcaacctgccatgttgggtttttaaattggggca

SEQ ID NO: 937900 - DNA, 120 bp, Artificial Sequence
  ENSG00000229236_21 (sequence is synthesized)
tgtgagagatacctgcagctgttaagatgtctgggaatagacacacaaactctctctcccagataagcaacacaaagcagcacagagcaacagagactgaaagtctgcctacctgatcag

SEQ ID NO: 937901 - DNA, 120 bp, Artificial Sequence
  ENSG00000229236_22 (sequence is synthesized)
ggaataaggtgagagttgataaagactctgctctatacagaaagcatacctggttccaactaaatcatcaggttttatgaggataagacatcctctcctcactagtgccctcctcattag

SEQ ID NO: 937902 - DNA, 120 bp, Artificial Sequence
  ENSG00000229236_23 (sequence is synthesized)
cccatttacaaaaaccctgagattttagcacagcttggcaacctactcagggctcctctctatgctgaagagctgttctttttgtctattaaactcctgctctaaactcattctatgggt

SEQ ID NO: 937903 - DNA, 120 bp, Artificial Sequence
  ENSG00000229236_24 (sequence is synthesized)
gtgtgtatccacagccttgatccacttggctgtgagactaagatccttggtatttaccacagacaattaggttgtttcagaaatttcctgtttaaaaaaaaaaaagacatagatctaaaa

SEQ ID NO: 937904 - DNA, 120 bp, Artificial Sequence
  ENSG00000229236_25 (sequence is synthesized)
ctaagccaggagctgcttaggcattaaggcttctatacccagaatcgtgtgctaagctttctctccaagtcagcacaacaaagcaaaccagagcatcgtaccaacaacctgaaaggtcac

SEQ ID NO: 937905 - DNA, 120 bp, Artificial Sequence
  ENSG00000229236_26 (sequence is synthesized)
atttcatcagcaactccaggatggcaggccgttatcctgaaacctatcagaacagctcctgcttggcttccaaaatatcacaattttggaaatgtacaaaggttagttttcacagtcctt

SEQ ID NO: 937906 - DNA, 120 bp, Artificial Sequence
  ENSG00000229236_27 (sequence is synthesized)
gaagcctctttccaccctggccatagcccatgtcagcagtaacctatgtctttgttttacatatcatgttgttttactcacctggtgcctccagtgccctatagggtccctgagctgtcc

SEQ ID NO: 937907 - DNA, 120 bp, Artificial Sequence
  ENSG00000229236_28 (sequence is synthesized)
tgatactctttcttagatcctgtcaaaacactcacttcaacaaattctgcccttggactctgatgggaggttctgataaagaaaattattgaaaaccgcattatttaaatgtggttatat

SEQ ID NO: 937908 - DNA, 120 bp, Artificial Sequence
  ENSG00000229236_29 (sequence is synthesized)
ttcagctggacctggaaataaagacgaaatactgcttcgtgactgtgctttaaggaatttttgcttctaggagatgattgtgagccaggcagaggtgaaggagcaggagcaaatagccaa

SEQ ID NO: 937909 - DNA, 120 bp, Artificial Sequence
  ENSG00000229236_30 (sequence is synthesized)
ctgcttcctggtatccctaccctcaccttttcgttatcttttcatctctctaatcattgagaaaaagagtacaaaaagccagattttgcagttccctattttgtattccaggttgaagag

SEQ ID NO: 937910 - DNA, 120 bp, Artificial Sequence
  ENSG00000229236_31 (sequence is synthesized)
gattgttttgtttctgtttgttttctcattgtgcttaaaatgtctgagtttgactttgtatgcatataatacttttactaggggaattactgtaaaatatttgtatatggatggctctta

SEQ ID NO: 937911 - DNA, 120 bp, Artificial Sequence
  ENSG00000229236_32 (sequence is synthesized)
accctatatcattggcacatgtaagagcatggaagaataagactcaaacaagaaaggattgaccatttaatggcatggtaagtacactgccacatccagcttgagagacaactcacatag

SEQ ID NO: 937912 - DNA, 120 bp, Artificial Sequence
  ENSG00000229236_33 (sequence is synthesized)
acacaaaaacaaaaactagtcaacattatgtttctgctcctctagacttcagaactgtaagatagttacccattttaaagtcacttattaggcaataaacgagagaagaaaagcagaaaa

SEQ ID NO: 937913 - DNA, 120 bp, Artificial Sequence
  ENSG00000229236_34 (sequence is synthesized)
agatcatcaaagtaaggaagacaatttcttaatgacatatcaatgaatcagatgaggtagatcacagaactgctcttctccagctccctgatagtcttttagggcttttattgggtatat

SEQ ID NO: 937914 - DNA, 120 bp, Artificial Sequence
  ENSG00000229236_35 (sequence is synthesized)
gccacacttcaaaataatgctgctctgacaatgtgacaactcattttctttgttgctaaatgctgtaagctaacacagatagccccctaaatagaagaataatggaacctaaaccctgtg

SEQ ID NO: 937915 - DNA, 120 bp, Artificial Sequence
  ENSG00000229236_36 (sequence is synthesized)
tgagaaatatttatgtgaaggaattttgtcatggaagccagaggttgtttatctgaagaataattatgcaagtaatttctcacgattggctattagaagaattgatgtctgtcttttcca

SEQ ID NO: 937916 - DNA, 120 bp, Artificial Sequence
  ENSG00000273233_0 (sequence is synthesized)
gccccccgcccgcccgagcctcggccgcgggcctccctcctccgttatcccgcctgcccgcgcaaaactcacacaaccctcttcattcgacctacctcccttgggcacgtctcgcagtca

SEQ ID NO: 937917 - DNA, 120 bp, Artificial Sequence
  ENSG00000273233_1 (sequence is synthesized)
cctcccctccccgcccggcacacgcgggcacagcgtggttaccctggttactcaaaaggaagaggccgcttgaactgagaaaagcacaacgtgtgaatacggtggcttcttgtgagaagg

SEQ ID NO: 937918 - DNA, 120 bp, Artificial Sequence
  ENSG00000273233_2 (sequence is synthesized)
ggccattctattgtaactgtgaatctgcagcagtaatctttttggctttgtcctagcctttgactacgtgggtgcttaatacatgcatgttgaatgaacaaataaaaagaattctaaaca

SEQ ID NO: 937919 - DNA, 120 bp, Artificial Sequence
  ENSG00000229233_0 (sequence is synthesized)
gtggaatgaaaaaactaaagagacaactgacttaccacacaaatggactatggtagaagctgctgtcccttagtattgaatatctctattttcttttaatcatagaattcactgatattt

SEQ ID NO: 937920 - DNA, 120 bp, Artificial Sequence
  ENSG00000229233_1 (sequence is synthesized)
acccaattctgacatttgcctaaaggaaaatttacctaaaaaggcgttttcttgctatggcagtgtaacctgtactaataaatatagtgctagtcctgcatgcaacaaaaatgatggttt

SEQ ID NO: 937921 - DNA, 120 bp, Artificial Sequence
  ENSG00000229233_2 (sequence is synthesized)
taacctgcccaaaggatggaaaaagaagaacataagcataatttctgaatgcatcacggcaaagatgcatgtactcatgaagcataaaattaaaaatatgatacattcactacatgaaaa

SEQ ID NO: 937922 - DNA, 120 bp, Artificial Sequence
  ENSG00000253999_0 (sequence is synthesized)
catggaagctgcagctcagctgctctgattcttgttactctggctcgacagtctccagcctccctgtctttatctctaggggaaaaagccaccctcacctacagagccaagtagactatt

SEQ ID NO: 937923 - DNA, 120 bp, Artificial Sequence
  ENSG00000253999_1 (sequence is synthesized)
tctcaggctcctcatccatggtgcatccaccaggaccaccaatgtcccagcctggtggagtggcagtgggttcggggaaaacttcagtctcattatcagcaggctggagcatgaagattt

SEQ ID NO: 937924 - DNA, 120 bp, Artificial Sequence
  ENSG00000227342_0 (sequence is synthesized)
taattatatagccctgggaaatggatcttcaactgaattaaggaaaagaggcctccttccttgtcctgagaaggacttccctgtcagtatccctgcaaccccctcctctcaactgtgatc

SEQ ID NO: 937925 - DNA, 120 bp, Artificial Sequence
  ENSG00000227342_1 (sequence is synthesized)
gacgtttcaggcgctgccaccttccgggaagaaagagaagcattgtgttcaatggggaaaagatcctgaaattatgtaagggaacaccaaataggacccagcaagtaaaaaagtgaagga

SEQ ID NO: 937926 - DNA, 120 bp, Artificial Sequence
  ENSG00000227342_2 (sequence is synthesized)
aactacttccaatatggcaaagttgatcctcaaattcagaactattctttcccagccctgcagacaagttcaacatcttaagcatgggaaaacaaaccagataaacaaaaccacaaaaca

SEQ ID NO: 937927 - DNA, 120 bp, Artificial Sequence
  ENSG00000287405_0 (sequence is synthesized)
gagcgtggaggagatgcgctcacttggatgccaaggaggacaggcagcgccctctgaaggaatttgtcaactggactgagagacaatcaaaacagtcagacacggaacatgctgagcgcc

SEQ ID NO: 937928 - DNA, 120 bp, Artificial Sequence
  ENSG00000287405_1 (sequence is synthesized)
acgctgctgccggggaattctcttctgaagcttgggtgacgctcctgcccgcctcacaggcacacagctgaacctcctgtgcgtgcatcacctgaacggtcacagctcgacccaagtctg

SEQ ID NO: 937929 - DNA, 120 bp, Artificial Sequence
  ENSG00000287405_2 (sequence is synthesized)
ctcttaaattccaccacctgtgaaacagccagcgagcagcctggcccagcactccccactcccaaaagacaggaccctatgggggaagaaactgctgcccaaatcttctgaatgtcgctt

SEQ ID NO: 937930 - DNA, 120 bp, Artificial Sequence
  ENSG00000287405_3 (sequence is synthesized)
acaaactcctttttctgctaaaaccttccattctgtgacagcacagagaggatgatgcagactgcagctgggaagctgcttcctactcctccaggcccctgctgggtcaccctagagctg

SEQ ID NO: 937931 - DNA, 120 bp, Artificial Sequence
  ENSG00000287405_4 (sequence is synthesized)
ccaaggccagcaactgaggaggaggagggcaggcaggcagggctccttccagccactccagcttctccagcagtttagcgcatgctggaaggtgctggcgctgatccgcccctggcagtg

SEQ ID NO: 937932 - DNA, 120 bp, Artificial Sequence
  ENSG00000287405_5 (sequence is synthesized)
ctggtgagagaggcaagttactcctcgcagatctgtgtctccagctcggtgcgcgtctccctacggacatggaagagtgcgggtcccctgaggagcagggaggcgaggggccctgcagag

SEQ ID NO: 937933 - DNA, 120 bp, Artificial Sequence
  ENSG00000287405_6 (sequence is synthesized)
cagccaccttctgctgagaaggagcctggactcactggcacagtgcagccagagggggcttcggtgggcaccgaggctggggagtcgggctcaccaatgcgcagaatgctgtcgctgttc

SEQ ID NO: 937934 - DNA, 120 bp, Artificial Sequence
  ENSG00000287405_7 (sequence is synthesized)
tcactacggcacctcctgcattttcactcattgtggggaagggatgttcacactgccttggtttaccggactgccacgtgaaactccactatctgctaaagtaagctaagagcagagcag

SEQ ID NO: 937935 - DNA, 120 bp, Artificial Sequence
  ENSG00000287405_8 (sequence is synthesized)
agaaaatcaacagcagcacacgccgcctgcatcccatgcgcacctccggccacggccattgctcacctctgaagacaatgctgcatttatgttggattcaataacacaaatggagcgttc

SEQ ID NO: 937936 - DNA, 120 bp, Artificial Sequence
  ENSG00000287405_9 (sequence is synthesized)
acagggcaaggagacccaccccagggctcctgagggcttcctaatgaggatcctgggagccgggtgggtggggatgaggcccaagctgtcccaggcccggccccacacaccagctgcaga

SEQ ID NO: 937937 - DNA, 120 bp, Artificial Sequence
  ENSG00000287405_10 (sequence is synthesized)
gatgagaaccacaatcgcattcacgcattcgtgcgcctacggctgtgtcagacgtgacttgtgctatttctgtatcaaaaaccattcaaaatgccacgagttcccaacagaagctgctag

SEQ ID NO: 937938 - DNA, 120 bp, Artificial Sequence
  ENSG00000287405_11 (sequence is synthesized)
tgcttttgacccaaagcaccctgaagaaaacaataaaaccttctctccttaaagaatgcagcatcaaaacaaaaaagtctgtattctcatgaatattctacggtacagcagaaaacggct

SEQ ID NO: 937939 - DNA, 120 bp, Artificial Sequence
  ENSG00000287405_12 (sequence is synthesized)
tttataggttgtgccttgagaaacatattaagacaatcagactcctgacgtcagtgagagcacaaaggccgcattcagagtccaatgggagacggtcagtgtgctgtgaatgaattctca

SEQ ID NO: 937940 - DNA, 120 bp, Artificial Sequence
  ENSG00000287405_13 (sequence is synthesized)
atttcatgccatcatacagatatggaagaaaaagaggcactattctttaggtaacacagtcaatgtttagggtctcttcaagtaaagaatgactcattcaaatcaagggaaaaataatag

SEQ ID NO: 937941 - DNA, 120 bp, Artificial Sequence
  ENSG00000287405_14 (sequence is synthesized)
atatttcaactatgtaaccatgatttcctcttacactgatattttgcctctatgtgggggtggggggaagagagaggatgggacagaagaggagggagacagcacatcagaaatgcatga

SEQ ID NO: 937942 - DNA, 120 bp, Artificial Sequence
  ENSG00000287405_15 (sequence is synthesized)
cttagctacaatgtccttcaccctttatttattgtgcagtgtgccatccatgctgaagaacaagtatgtttagtaaaagaacagtaatgaaaccagcaccagtgcatcctccgcttcaat

SEQ ID NO: 937943 - DNA, 120 bp, Artificial Sequence
  ENSG00000287405_16 (sequence is synthesized)
gaggcccaaacgtcaccctctgcgtcccttcaaaccacatgcaccccctaccccgtgagcaacatcctgaccttgttaagtgtcctcttgctttgctatgataataacatctgcatatat

SEQ ID NO: 937944 - DNA, 120 bp, Artificial Sequence
  ENSG00000287405_17 (sequence is synthesized)
gtggccctgaaaacacgtcctttgctttctgaagactgaaggcagcaacaccagtgcagtggaaggaggagttgacgatggttcccgggacaggacagtctcgagtccgagtctgccgtc

SEQ ID NO: 937945 - DNA, 120 bp, Artificial Sequence
  ENSG00000287405_18 (sequence is synthesized)
agcttctgggacaggggaccagagcttcttctggggtgaagccacgggtgacccccaggaaaccaagtacaccccgtctaacatctggcagggcagtcatgtggaccagaaccaggtgcc

SEQ ID NO: 937946 - DNA, 120 bp, Artificial Sequence
  ENSG00000287405_19 (sequence is synthesized)
agaaggtgtggtctggggggtgagctgccctccatggtggccacctccagctctcaggtgggaactgggcagaagacccccttggagaaatgagtgacctcggggaatcgaggcagtggg

SEQ ID NO: 937947 - DNA, 120 bp, Artificial Sequence
  ENSG00000287405_20 (sequence is synthesized)
gcaaggaagagagagtggggccatgtggtcaacagaggtcaggcacagacaagcggctgagtgttgcatcctcaggtttaggcagcgaggcaggcagtctggtgaggccggcccagacgc

SEQ ID NO: 937948 - DNA, 120 bp, Artificial Sequence
  ENSG00000287405_21 (sequence is synthesized)
tgcctccgaagctgtgccactcaccccgggcaggcgctccctctgtctgcactgctgctggcctggacgggtccaactcctccaggggattccctctgtctctgccctaccttaagtctc

SEQ ID NO: 937949 - DNA, 120 bp, Artificial Sequence
  ENSG00000287405_22 (sequence is synthesized)
ccgcttcctttgtcccagccatcgtcttccttggtttattttctcactctgcagaactcaggctccagctgtgtcttaaaaagggaggcatgagagtaagttctgcacatctgaaaacgt

SEQ ID NO: 937950 - DNA, 120 bp, Artificial Sequence
  ENSG00000287405_23 (sequence is synthesized)
gtcgattctccccttcacgcgtcctgactttggctgggtatagaattccagcttgaagaccatccttcgccttcgggattctgaaggcgcaactctgttgtcttcctctcccagtactgt

SEQ ID NO: 937951 - DNA, 120 bp, Artificial Sequence
  ENSG00000287405_24 (sequence is synthesized)
caggaaaatgggcgccacgtgatgctgcaccttgagtgtgactcgatgtctctctccgggtatctataaggtcttctccaggcccccagcgttccgaaatttcgaagccgtgtggtttgg

SEQ ID NO: 937952 - DNA, 120 bp, Artificial Sequence
  ENSG00000287405_25 (sequence is synthesized)
tgaagacctttcacacccactgctgggcgcctggctggtcctttggagacggcagctcccgtgctcccatcgtagggggctccctgaagcacttcatcaagggttcccctttcccattct

SEQ ID NO: 937953 - DNA, 120 bp, Artificial Sequence
  ENSG00000287405_26 (sequence is synthesized)
ctccttctggaacttctaccccttgagtaggagatctcccagaacaatactgggtcttttccatcctccctgttttccttgtctttgtcttacacgcttcttcatgtgtgatttccttaa

SEQ ID NO: 937954 - DNA, 120 bp, Artificial Sequence
  ENSG00000287404_0 (sequence is synthesized)
tctctctttgtagtgacgactaggcagttctgccagtgagagtggggccacaggcctgggatttgaacaggaagtgaggccaatcctaaatgaaatcaaactgtgaataaaggaggatta

SEQ ID NO: 937955 - DNA, 120 bp, Artificial Sequence
  ENSG00000287404_1 (sequence is synthesized)
aaataaaaattgacagcatagttcacagagccagtgccgtggtgcagctgcctggaactcgctgccatcatacgctttggacaggagacatgaaacactgcctggatagctcctggctga

SEQ ID NO: 937956 - DNA, 120 bp, Artificial Sequence
  ENSG00000287404_2 (sequence is synthesized)
ttgtctgcacattgtggtgcctgtgacaccgggaagagatggaggtcacagggggaagaaaaaccctggatttccagaacactgctacccctctcaccaattggtcgccagtatggagac

SEQ ID NO: 937957 - DNA, 120 bp, Artificial Sequence
  ENSG00000287404_3 (sequence is synthesized)
tgatttcatgaaggtccagcgtctgctgcgggcagtgacctcggtccctttctgggtcaaacggcagagtgaagctgcagccaaattgagggtaaataacagtcacagcaggaagtaggg

SEQ ID NO: 937958 - DNA, 120 bp, Artificial Sequence
  ENSG00000287407_0 (sequence is synthesized)
ctggccacgcccccggaagggccgcccacagacatccttttggctgagttctgctgcctgaaaacttctgtcaaaacacagaatcgtttctggaagtgagacgattgaactggtttcttg

SEQ ID NO: 937959 - DNA, 120 bp, Artificial Sequence
  ENSG00000287407_1 (sequence is synthesized)
ccaacaggtgtcccagaaggagcgttcgcagctccctggaggcgggaacggagtcccccggggagagagtggtccagggtttgccctcaggcgtccacactgtccgccggcgaggctggt

SEQ ID NO: 937960 - DNA, 120 bp, Artificial Sequence
  ENSG00000287407_2 (sequence is synthesized)
cactcagaagaatcacgctggcctaggagatggacggcggcgtgcgggagggtgagtctgctgacttttgcctgcaaaccctgagatgcggtgacataaaaagtgagaaaatcgccattc

SEQ ID NO: 937961 - DNA, 120 bp, Artificial Sequence
  ENSG00000287407_3 (sequence is synthesized)
cctctcagcagcgcaggtgagcttgagaaccgcctgcccccacggggccgcagcgcccgacccgtctctaaaacagcaacagcggcgcctgcaccgacgtctgcttctaggcccggataa

SEQ ID NO: 937962 - DNA, 120 bp, Artificial Sequence
  ENSG00000287407_4 (sequence is synthesized)
cctaatgcaccttaacgcactttgccaacgctgctgggagcacaaatgcggatttattataattgacaatgagtcttgtttccatcggtgcagtgtaaatatatgtgaaatttactagga

SEQ ID NO: 937963 - DNA, 120 bp, Artificial Sequence
  ENSG00000287406_0 (sequence is synthesized)
gaaggatgccaatgcagtagtaatgcaccttgcttctctttgtggctaccaacattttgttgttgttgttgttgggatctattacatactttgaaaaatttcctctgaaaacaaacttga

SEQ ID NO: 937964 - DNA, 120 bp, Artificial Sequence
  ENSG00000287406_1 (sequence is synthesized)
cagtactctgaggccaatgtaatgagacagacatcaagacttcatttgaaattgatcatgaccaccaacagaaggaatcaataacaatggtggcaccagtccaaggttgaataggcagtt

SEQ ID NO: 937965 - DNA, 120 bp, Artificial Sequence
  ENSG00000287406_2 (sequence is synthesized)
gctgggcagatgtcctcacagaagtattctttcggtctcactcattttgctgctcagcagaaggattgtaaaaatgaaaaataaaaaaaaggcttttacatcaaatattgataacgataa

SEQ ID NO: 937966 - DNA, 120 bp, Artificial Sequence
  ENSG00000287406_3 (sequence is synthesized)
taatgattaacacatgtggagcacttaccatctctcaagcactgctctagagctttccatgaaagaatccctctaatcttcagaacaatcctgtgagaactggctgaagtttactttttg

SEQ ID NO: 937967 - DNA, 120 bp, Artificial Sequence
  ENSG00000287406_4 (sequence is synthesized)
gagacctagcttcttcttgccttcttccaatgtggtctatttaatctcctgtcgtgtgggaaattatgttcaaaatctccgtgatcctctgtccatagagctgctgccaaatcaacacct

SEQ ID NO: 937968 - DNA, 120 bp, Artificial Sequence
  ENSG00000287406_5 (sequence is synthesized)
cgatatgtttgttcttggagagaaatgagctaaggaggaagaccgtctaaaaataccactggacaatttgtactcactggagtggtctctatggggcaaaaggtttttagagtggctcgt

SEQ ID NO: 937969 - DNA, 120 bp, Artificial Sequence
  ENSG00000287406_6 (sequence is synthesized)
ggattttctggcaagtggcaaaccatacaagagctacgtcaggccaggaagacaggtacagccctgtcggtgtcaaagaagaacaccggtagcagaagagctaagagtgaatgaaaatgg

SEQ ID NO: 937970 - DNA, 120 bp, Artificial Sequence
  ENSG00000287406_7 (sequence is synthesized)
aattatctttacttctaggacttgtctattgagaaacagcagcgctggcaaccatttactaccaacaagaggcagttgcaagagaagaatataaaatatgctctgctcaaccccacaaaa

SEQ ID NO: 937971 - DNA, 120 bp, Artificial Sequence
  ENSG00000287401_0 (sequence is synthesized)
gggttattataggggatggcagagccacagggcagaagggagtctgggtaactgaatctctgcaaggaggggagctgccctcctgccaggaagactcactgctgacagttacatgagcaa

SEQ ID NO: 937972 - DNA, 120 bp, Artificial Sequence
  ENSG00000287401_1 (sequence is synthesized)
gaaatcggcctctggtgctgcagccttcttaaatggatggtgtctattacagcagctagcagcagccctaacctatgcagacaacaaatggagtagggcatgcatgctctcaccagaaga

SEQ ID NO: 937973 - DNA, 120 bp, Artificial Sequence
  ENSG00000287401_2 (sequence is synthesized)
tcctcacgcttctgctctcaaggacaatgttagaactggctctccttggagaatacgttcatattcattttctacatgcactgctctttttaaaattcttctgtgattcaatatacactc

SEQ ID NO: 937974 - DNA, 120 bp, Artificial Sequence
  ENSG00000287401_3 (sequence is synthesized)
acactcaatgcctggaagcatggaagccactttgagatacaaagacgagagatgcatactaaggatatagagctaaagtcaggagaggcctgggacattggtgacatcacagagctgctg

SEQ ID NO: 937975 - DNA, 120 bp, Artificial Sequence
  ENSG00000287401_4 (sequence is synthesized)
ctgtccagccctagtctggaccattaggaggattttccccatgacctttctggtctcattctttccacccattatataggaatccagaggaattctcacacacaaggcaagacgtatgag

SEQ ID NO: 937976 - DNA, 120 bp, Artificial Sequence
  ENSG00000287401_5 (sequence is synthesized)
gatgttgctgcagcatcgttactagtgttggaaataagatgttccccctttctccttctgatatgagaagatacttgttagccctcaagctgctcagatgagggactttcctgccgagaa

SEQ ID NO: 937977 - DNA, 120 bp, Artificial Sequence
  ENSG00000287401_6 (sequence is synthesized)
ccaacgtgaagagtgcagcttctataaaggatttcactggatttttgtactaatgaacaaattttatttggatgagtagatatttaatgtgctgttattaccactggagttaaaagtata

SEQ ID NO: 937978 - DNA, 120 bp, Artificial Sequence
  ENSG00000287401_7 (sequence is synthesized)
caactgttctagcagcatctgtctgacacaactattttaaaactttggggtctattgaaagctagcaacttctaggggaaaagttgtacagtaagctgcagttaatttcagtgaatttca

SEQ ID NO: 937979 - DNA, 120 bp, Artificial Sequence
  ENSG00000287401_8 (sequence is synthesized)
gcacagtaatagccaatagtagccaaaccctactcctcagccctgtgtcaggcagctgtgtatgtgttcctggaccagtttgcacacaacttgctggaatcaaggttgaaaaaaaaaaac

SEQ ID NO: 937980 - DNA, 120 bp, Artificial Sequence
  ENSG00000287401_9 (sequence is synthesized)
tgtcctccaaatattagggctctgattgctgattgttgctttacaaaggtgcagaagaagaaatgacagccattgttttgttgttgcaccttcccccccattgtggcaaactccacctcc

SEQ ID NO: 937981 - DNA, 120 bp, Artificial Sequence
  ENSG00000287401_10 (sequence is synthesized)
tctggctgaagcaccttccaggggatttaaacgatgagcctttttctgcccttcatttttctctttttctccatttttggaagccagacattgaaggctatgacattcaaaacaactgta

SEQ ID NO: 937982 - DNA, 120 bp, Artificial Sequence
  ENSG00000287401_11 (sequence is synthesized)
tatacacttgttacagaagatattagaaagtcactgtgcgtgcccagggacaggcttagaaaagacccaagaagactgtaagcttatatttcaggctaatcctcagcacagagacagcct

SEQ ID NO: 937983 - DNA, 120 bp, Artificial Sequence
  ENSG00000287401_12 (sequence is synthesized)
ataacaataaaaaacaaaaagctagtaaaccctggggaaggaaaataatctgattttcagaattaccagattattagattcaaaagtctagttttcaacaacaacaacaacaaaaacaaa

SEQ ID NO: 937984 - DNA, 120 bp, Artificial Sequence
  ENSG00000287401_13 (sequence is synthesized)
aacacaagagatacaaagaaacaagcaaatatggcccattcaaaggaaaaaataaaccaacagaaactgtccttgaaaaggatctgatggaggatctattagacaaagactttaaaacaa

SEQ ID NO: 937985 - DNA, 120 bp, Artificial Sequence
  ENSG00000287401_14 (sequence is synthesized)
ctgtcttaaagttacccaaagaactaaaggaagatgtggaaaatgtcaagaaaatgatgtatgaacataatggaaatatcaataaagagagagaaaacctaaaaagaaaccaaaaagaaa

SEQ ID NO: 937986 - DNA, 80 bp, Artificial Sequence
  ENSG00000287400_0 (sequence is synthesized)
gggcagtcctggcggcgtcagggccgcgaccggaccgtgggccccgcccgcccgaccgcagatgcagagccggcctccgg

SEQ ID NO: 937987 - DNA, 120 bp, Artificial Sequence
  ENSG00000287400_1 (sequence is synthesized)
ccgcgcggaccacagactggcaggccggccagacagacggacaggctgaccccggcccgggggagcaggcgcagcggctgcgcagctgcataatatttcattgtatggataaactacaca

SEQ ID NO: 937988 - DNA, 120 bp, Artificial Sequence
  ENSG00000287400_2 (sequence is synthesized)
gttcccagtgatgaagaccaagattgttcccaatctgtttgctattataaacagtgttgcaacaaacaggctttgtgtgtatcatttcatatgagtacaagagtttctgtagacttgaca

SEQ ID NO: 937989 - DNA, 120 bp, Artificial Sequence
  ENSG00000287400_3 (sequence is synthesized)
ataaaaagataacccaattgaaaaaacagacaaaggatttgaatagtcattgctccaaagaagatatgataagtatattaaaaagttgctcaccatcattacccattagggaaatgcaaa

SEQ ID NO: 937990 - DNA, 120 bp, Artificial Sequence
  ENSG00000287400_4 (sequence is synthesized)
tcaaaaccacagtgagatactgcacattcactaggatggctataatcaaaaagacacataataacaagtgtcttagttcatttcagctgctataacaaaatatcgcagactggttggctc

SEQ ID NO: 937991 - DNA, 120 bp, Artificial Sequence
  ENSG00000287400_5 (sequence is synthesized)
tctggaggctgggaagtccaagatcaaggggctggctgatttggtttctggtgagccctctcttctgggcctgtagaggaccactgttgcactgagtacctaggacctttttttcctctg

SEQ ID NO: 937992 - DNA, 120 bp, Artificial Sequence
  ENSG00000287400_6 (sequence is synthesized)
tgagtacctaggacctttttttcctctgcatgtgtagagagagagagacagaaagagagcacacaaatgtatgctggtgtttctttctcttttatttttatcaacttaatttaattttta

SEQ ID NO: 937993 - DNA, 120 bp, Artificial Sequence
  ENSG00000287400_7 (sequence is synthesized)
gatttcaaattatgaaatatttaaagaatacagtaaagtacagaaaaatataattgacctctatatagcccattcacttgatttaacaaatgtgtggtattttgccatgtttacttcaga

SEQ ID NO: 937994 - DNA, 120 bp, Artificial Sequence
  ENSG00000287400_8 (sequence is synthesized)
actcgctctttttgtagaaaataaaaatattaaatacatagctaaagcccaatctcatcccttcccgctccctctcctcatgttaaccactagcctgaaattatgtttttatacttttat

SEQ ID NO: 937995 - DNA, 120 bp, Artificial Sequence
  ENSG00000287400_9 (sequence is synthesized)
tgcatatttgaatgagatcataaataatacattggcagcttttttccaatatttttattgtgctaaaatacatacaacatgaaatttaccatcttaaccattttaaagcatatagttcag

SEQ ID NO: 937996 - DNA, 120 bp, Artificial Sequence
  ENSG00000287400_10 (sequence is synthesized)
tggcattaaacacgttcataaagttgtgtgaccgttaccccaattcatctccataactcttttcatcttacaaaattgaaactccattaaacaataactccccatttccacttcccccta

SEQ ID NO: 937997 - DNA, 120 bp, Artificial Sequence
  ENSG00000287400_11 (sequence is synthesized)
gcccctggaaaccaccattgtactttctatcattatgattttgaccactctaagtaccttatgtaagtggaatcatacagaatttgtctttttgtggctggcttatttcactagtataat

SEQ ID NO: 937998 - DNA, 120 bp, Artificial Sequence
  ENSG00000287400_12 (sequence is synthesized)
gtcctcagggttcatccatgttataacatattgcagaatctccttccttttttagggctgaggaatattccattgtatggacatatcatcttttgcttatctattcatccactgatggac

SEQ ID NO: 937999 - DNA, 120 bp, Artificial Sequence
  ENSG00000287400_13 (sequence is synthesized)
atctggggtgcttccacactgtagctattgtgagtaataccgctatgaacatgggttgataaatatcttcctcttcttataagtgcacctataagagccatattagggcctcacccttat

SEQ ID NO: 938000 - DNA, 120 bp, Artificial Sequence
  ENSG00000287400_14 (sequence is synthesized)
gataaaggtataacctttatcaccttctcacaggtcctatctctaatacaatgacatagagcttcaacacatatattttgaagggacacaaacatttagtccaagacaatggatgagaat

SEQ ID NO: 938001 - DNA, 120 bp, Artificial Sequence
  ENSG00000287400_15 (sequence is synthesized)
atggagaaattggaactctaatacattgctggtgggaatgtaaaatggtacagcaaatttggaaaacagtttggaagttcttcaaaatgttaacatggagttatcatgtgacccagaaat

SEQ ID NO: 938002 - DNA, 120 bp, Artificial Sequence
  ENSG00000287400_16 (sequence is synthesized)
tatcctaggtatacaactaagagaaataataacacgttcataaaattgcacaaaagcttgtacatgactgttcatagcagcattattcataatagcaaaaaataaaaataatccagatgt

SEQ ID NO: 938003 - DNA, 120 bp, Artificial Sequence
  ENSG00000287400_17 (sequence is synthesized)
catcaactgatgaatggataaacgtggcatattcatatgatgaaatatgatttggcaataaaaagaaatgaagtactgatacaggctacaacacagatgaaccttaaaaacattatgcta

SEQ ID NO: 938004 - DNA, 120 bp, Artificial Sequence
  ENSG00000287400_18 (sequence is synthesized)
ggtagaaaatggaagtgactccttaatgggtatgaaatgttaggggagagatgaaaatgttttaaaataaattgtggtaaaggttgcacaactctgaaaacaaactaaaatttgttgact

SEQ ID NO: 938005 - DNA, 120 bp, Artificial Sequence
  ENSG00000287400_19 (sequence is synthesized)
tatacactttaaatgggtgaattgtgtggtatgggaattagatcttagaagagctgttaaagaaaaaaaaagtttcttgtagaataaattcccagaactgggactgttgggtcaaaggga

SEQ ID NO: 938006 - DNA, 120 bp, Artificial Sequence
  ENSG00000287400_20 (sequence is synthesized)
aaatgcatttaaaattttttacatttttaccctcatcagcaatgtatgaaatagcaaggcaggtacattttatgtaggaggaaactgaggcacggacaatccaaaatcacataattaata

SEQ ID NO: 938007 - DNA, 120 bp, Artificial Sequence
  ENSG00000287400_21 (sequence is synthesized)
acacccgagctgtgactgaaatcaggtctgttggactccaaaacatgtgctctgctgcagacaattcatttggtatttttccaatagtcatttgatcttctttaaaaaaaaaaaaaaaaa

SEQ ID NO: 938008 - DNA, 120 bp, Artificial Sequence
  ENSG00000287400_22 (sequence is synthesized)
cgtaacttttgattgcattgattttctttgttgctttttcgtttttctatatcatttatttctgctctgatctttattatttcctttttttctgctgattttggttaaattcactcttct

SEQ ID NO: 938009 - DNA, 120 bp, Artificial Sequence
  ENSG00000287400_23 (sequence is synthesized)
tttttctatttcttaagatagaagctgataacactatttgagacctttcttcttttctaatataggtgtctagtcctataaatttccccctaagtactgctttagtggtatcctacaaat

SEQ ID NO: 938010 - DNA, 120 bp, Artificial Sequence
  ENSG00000287400_24 (sequence is synthesized)
tctgatatgttgcatttttattttcacttggatcaaaatactttctaatgtctcttttgatttttttttaacttggaggttatttaaagtgtcttattttgttctcaactatttggggat

SEQ ID NO: 938011 - DNA, 120 bp, Artificial Sequence
  ENSG00000287400_25 (sequence is synthesized)
tttccagatccctttttgttattgatttgtaatttaattccactgtggtcagagaacatgctttgactaattttagatgtattgaaatttgttttatggtcagaatatggtctatcttga

SEQ ID NO: 938012 - DNA, 120 bp, Artificial Sequence
  ENSG00000287400_26 (sequence is synthesized)
taaatgtttttatgtacactgaaaaatgtgtattcttctgttgttgggtaaagtgttttataaatgtcagttaagttggttgatagtgttgttcaagtttactatacattcttgatgatt

SEQ ID NO: 938013 - DNA, 120 bp, Artificial Sequence
  ENSG00000287400_27 (sequence is synthesized)
ttctgcctgcttgttctatcaattattgagagagggacattgaaatatctccaactgtaattgtagatttgtacatttttccttgtaattctatcaggttttacttaatgtattttgaaa

SEQ ID NO: 938014 - DNA, 120 bp, Artificial Sequence
  ENSG00000287400_28 (sequence is synthesized)
ctctgctattaggtgtataaatgtttggcactgttatattttcttaatgaactaaacactttatcattatgaaatgactctttatctctggtaatattcttcacttgaaatctactttgt

SEQ ID NO: 938015 - DNA, 120 bp, Artificial Sequence
  ENSG00000287400_29 (sequence is synthesized)
attatattaatatagccatttcagttttctgttgattattgttagcacagtacatctttactcataatttttacttactttaacttatttcatatttaaagtggatttctttctttcttc

SEQ ID NO: 938016 - DNA, 71 bp, Artificial Sequence
  ENSG00000287400_30 (sequence is synthesized)
ttgccatggattcaagcgcttctcctgtctcagcctcccaggtagccaccacacccagctaatttttgtat

SEQ ID NO: 938017 - DNA, 120 bp, Artificial Sequence
  ENSG00000287400_31 (sequence is synthesized)
ttataggcatgagccactgagcccagcctaaagtggatttcttagaaatccactatgaatcaagattcatagaattgaatcttgctctgtacaaacaatctgacagtttggctttttaac

SEQ ID NO: 938018 - DNA, 120 bp, Artificial Sequence
  ENSG00000287400_32 (sequence is synthesized)
taactgtggtatttagaccatttatactgaatgcgattattgatatgattaggtttaaatctacctgcttgctatttgttccatgtattgtttcttctcttttccctctttttctgcctt

SEQ ID NO: 938019 - DNA, 120 bp, Artificial Sequence
  ENSG00000287400_33 (sequence is synthesized)
ttttggattggatattttgtgacttcattttatctcctttattagcttaattagatacaactactttttagtggttacttttgggtttatagtgtacatcctcaatcccaaaccactttg

SEQ ID NO: 938020 - DNA, 120 bp, Artificial Sequence
  ENSG00000287400_34 (sequence is synthesized)
agtaatattataccacttcacacagagtaagaaccttacaacagcatgcttctctttcctccttcacaacctttaggctattgttgtcatgtgtttaatttctatatatgttataaaccc

SEQ ID NO: 938021 - DNA, 120 bp, Artificial Sequence
  ENSG00000287403_0 (sequence is synthesized)
gcataatgtttcttctgccggttgaaggtgaaaccccaaagccacccaggccatcggcaacagcagggcgagttctagctgtgtggctggtggagcccacaggtgtgcccagtggccagc

SEQ ID NO: 938022 - DNA, 120 bp, Artificial Sequence
  ENSG00000287403_1 (sequence is synthesized)
ggtgacggcacgggggcccaccctgtgcaccccactggaggagccctgcccttcaccactcctggcctggttcttcttcagtcttcatccctgatgtccgtcaaacccaaccatggggac

SEQ ID NO: 938023 - DNA, 120 bp, Artificial Sequence
  ENSG00000287403_2 (sequence is synthesized)
acagtgacacccggcagaagggtgccagggaccaggaggaggccagggcggtgcttccctgccccagcctagcaattaagggcatcgccgctgtgattctacatgaacacagttcactcc

SEQ ID NO: 938024 - DNA, 120 bp, Artificial Sequence
  ENSG00000287403_3 (sequence is synthesized)
gctgtacctgggctgggccggaggccctggctgctggcagtggctgcaccagtgaccgctacagtggccgggtgccgctggctgctctcttctagtccagacctgcggttactgccacag

SEQ ID NO: 938025 - DNA, 120 bp, Artificial Sequence
  ENSG00000287403_4 (sequence is synthesized)
gcctcagcagggcctggtgacgagctctgcacagccggccgggaagtgtcactttcccggatgaggagaggaaacatgtttcttgcaaatgggctgtgcgcttgtggaagagctcctctg

SEQ ID NO: 938026 - DNA, 120 bp, Artificial Sequence
  ENSG00000287403_5 (sequence is synthesized)
cactgcgcttcctccgctcccaagggccccatcaaaatggggctggggtaacagcagccccagacagcccaccctgcaacaaccaggagaagaacgcgcccgaaagggaagcgggaggac

SEQ ID NO: 938027 - DNA, 120 bp, Artificial Sequence
  ENSG00000287403_6 (sequence is synthesized)
acgacaccgcaggctgcttgtggtgggatgatggaccatgcgggctggatcactaaaggcgcacattagcccaagcggagcctctgacacactcagggaggtcagaaccaggagaggaga

SEQ ID NO: 938028 - DNA, 120 bp, Artificial Sequence
  ENSG00000287403_7 (sequence is synthesized)
aaagccggagtgtccacagtgaccgtcaggaagaggggctgcgaggcacccttgtgatgctgtccccaggctctctgggcctctgtggattgcgacatcacctcatgattctctagtgca

SEQ ID NO: 938029 - DNA, 120 bp, Artificial Sequence
  ENSG00000287403_8 (sequence is synthesized)
accgataagcacaggtgagggctggctctgtgaggctccagggagcagagtctgcagaatagctggccttttttctgggcagggaagggcagccccagcaacgctgggagaggctgcagc

SEQ ID NO: 938030 - DNA, 120 bp, Artificial Sequence
  ENSG00000287403_9 (sequence is synthesized)
taggcctagacaaggaccttctataaagcagcactgatataaatgctggcactcagaaaacttctgaggggccagtcctagaaagcagtctctagacagagatgtgggatgtggctgccc

SEQ ID NO: 938031 - DNA, 120 bp, Artificial Sequence
  ENSG00000287403_10 (sequence is synthesized)
tgccaacctcgccacgcggcctctagatggagaggtgggatgtggctgccctgtgccgaactcgccacgcggcctctggagggagaggtgggatgtggctgccccacgctggcctcgcca

SEQ ID NO: 938032 - DNA, 120 bp, Artificial Sequence
  ENSG00000287403_11 (sequence is synthesized)
cgcggcctctagatggagaggtgggatgtggctgccccacgctggcctcgccacgcggcctctagatggagaggtgggatgtggctgccccatactggcctcgccacgtggcctctagag

SEQ ID NO: 938033 - DNA, 120 bp, Artificial Sequence
  ENSG00000287403_12 (sequence is synthesized)
agagaggtgggatgtggctgccccacgctgacctcgccacgtggcctctagatggagaggtgggatgtggctgccccatactggcctcgccacgcggcctctagatggagaggtgggatg

SEQ ID NO: 938034 - DNA, 120 bp, Artificial Sequence
  ENSG00000287403_13 (sequence is synthesized)
tggctgccccacgctggcctcgccacgcggcctctagatggagaggtgggatgtggctgccccacgccggccttgccacatgcccctccctgcacctgtcctcgcctgctcatccctcct

SEQ ID NO: 938035 - DNA, 120 bp, Artificial Sequence
  ENSG00000287403_14 (sequence is synthesized)
ggctcctctctgtgctctggctctggtctttgaccacggactccaatgtgatgtcactgtctttaactctgcgcagctgagcacatcagataggaggtgcttttacatctggagaaaaca

SEQ ID NO: 938036 - DNA, 120 bp, Artificial Sequence
  ENSG00000287403_15 (sequence is synthesized)
tacgctagaaggaaaaaggtttccatggactgattcctggtaagggaacctgcaagtctggaggccctgcccaccccgctccgagtgctcaaccggctcccagtgctgaactagtttttg

SEQ ID NO: 938037 - DNA, 120 bp, Artificial Sequence
  ENSG00000287403_16 (sequence is synthesized)
atccaggatctgatgtggcactgaccccttcagctttttttttctttttccttcctcttttaaaataaatgtattacaataacctgtcttagaggaaatagagacaggatttaaggcctt

SEQ ID NO: 938038 - DNA, 120 bp, Artificial Sequence
  ENSG00000287403_17 (sequence is synthesized)
acttttcttaaaggaataaggccattttgagaatatactctttcaaaaatgctctaagtatttatttttaaaaaatgttcattttaaatatttattctaagtattgcaaaggcttttcaa

SEQ ID NO: 938039 - DNA, 120 bp, Artificial Sequence
  ENSG00000287403_18 (sequence is synthesized)
acacctgtctcttttacagctctgttattcatggattcgtgaaaaataaatgtgcggtggttttatttacacattatttaaatggtttacttcaatttccttttctccttatcagggttc

SEQ ID NO: 938040 - DNA, 120 bp, Artificial Sequence
  ENSG00000287403_19 (sequence is synthesized)
tctattttatcttacagagtcttaagaaggatacagatcatgcatgctttaacttttgctgtttaaagtccaagtgctatgctgggtataatgtattttgatctatcgcatataaatatt

SEQ ID NO: 938041 - DNA, 120 bp, Artificial Sequence
  ENSG00000287409_0 (sequence is synthesized)
atgcgcactaagagaggcaaaatggcagttaaactggtttccgactttcctctggaacgctcgactgcttaagagaaaaatgcctcaaatgagcatgtgcacaactccagcaaacacgct

SEQ ID NO: 938042 - DNA, 120 bp, Artificial Sequence
  ENSG00000287409_1 (sequence is synthesized)
ggacatgcggcctctcccaagtgctggcaggccactgcacatgtggacccacgggaagaatcaggagagaagaaatgcaaaccccagagtcatgccaagagcttgtgctacagaactgct

SEQ ID NO: 938043 - DNA, 120 bp, Artificial Sequence
  ENSG00000287409_2 (sequence is synthesized)
acagtaggagcagttgtggttgctgataatagcgtgccgtacacaggattcttatctgctcatcagatgctatttttacattatggttgaaactttttcctcctgcacttaaagtggcat

SEQ ID NO: 938044 - DNA, 120 bp, Artificial Sequence
  ENSG00000287409_3 (sequence is synthesized)
ataatgagcaatctcaattaagctgaacctcaagatgtccaacttttcaataaagtaataaattagacttgatggcaagtgactttgacatgtaccatcacaccatatcaaaccaaaggc

SEQ ID NO: 938045 - DNA, 120 bp, Artificial Sequence
  ENSG00000287409_4 (sequence is synthesized)
atttacaacacttgtaatccacttggaatttggatggaaaacttaccaatagatttttcaggaaattcaagaactgttggaattaaagaggttaggtgaagtttcttctactgaaacttg

SEQ ID NO: 938046 - DNA, 120 bp, Artificial Sequence
  ENSG00000287409_5 (sequence is synthesized)
ttccattctccctgtaacctaatgagaaaataacaagcacaggcttaagtcttcagggagtaatgtggcttgaatatgagaagaacagaaacagtataacctgatagttgagactgaatt

SEQ ID NO: 938047 - DNA, 120 bp, Artificial Sequence
  ENSG00000287409_6 (sequence is synthesized)
gagaaaatgtagccttgatttctaaaagtcaaataattttcacctcaaaaacattagcaatacacaatttgttaacttgatcactcagttgtaaatttaataaactagaggtggcagtgc

SEQ ID NO: 938048 - DNA, 120 bp, Artificial Sequence
  ENSG00000254418_0 (sequence is synthesized)
catagctgtacgctatacgtaatgatcccacttaacaggtccaagacttagcccagtgcagaaccctgcctgtcctggagaccacccaggctgacacttgggagccatacctgggaactg

SEQ ID NO: 938049 - DNA, 120 bp, Artificial Sequence
  ENSG00000254418_1 (sequence is synthesized)
ctccccttcagactcttccttcagctgctcactccgccggctctctcgggcctccctccagcgtagcttttggatggatggatttcgaaggcattttcggatgcggcacttttttcgctg

SEQ ID NO: 938050 - DNA, 120 bp, Artificial Sequence
  ENSG00000254419_0 (sequence is synthesized)
gggccgcaagggcagggccgtgcctgtgctgtctctgtctcacgtcttccagccgtgcagacctcagcactgtttgccccaggactgcagctcgctcgtcttctaagccagcacttctca

SEQ ID NO: 938051 - DNA, 120 bp, Artificial Sequence
  ENSG00000254419_1 (sequence is synthesized)
agaggacttcagggctcccctcctttgttggtggagctcatctctgtggcgtccatggcctggagccccatggcctcatcctgtgacctcagggtcatgctgtcatttattcgttgttcc

SEQ ID NO: 938052 - DNA, 120 bp, Artificial Sequence
  ENSG00000254419_2 (sequence is synthesized)
tctggggaggagctctgagaggaggaggctgagggtcctgaagcccctgccccgtgtccctgacacaggctgggctgcgagagtgggagcgggggacttggggcccttgtggagctgaca

SEQ ID NO: 938053 - DNA, 120 bp, Artificial Sequence
  ENSG00000254419_3 (sequence is synthesized)
ggtggctccgatatcatcaccctgaggctggtggggttctttcccctgtgctgcgtgggggtgcggggccatctgtgaggctcaaggactgagcggggacccagggaggtctcagggact

SEQ ID NO: 938054 - DNA, 120 bp, Artificial Sequence
  ENSG00000251426_0 (sequence is synthesized)
atgggccagcaggcacaactggacactgctgctctactcctgaccagtgctttctcatatgctagtcactggctgaacgcggccgctgagcagtcgaaagtagactagtctgaattgaaa

SEQ ID NO: 938055 - DNA, 120 bp, Artificial Sequence
  ENSG00000251426_1 (sequence is synthesized)
tgtgctttctttattacagtgggaagtcccatggaccgaattcaattgtcctatgaagcggaactttcgtcctaaaaatcagaagtagctggtgttggactcaacatgatcccaaactca

SEQ ID NO: 938056 - DNA, 120 bp, Artificial Sequence
  ENSG00000251426_2 (sequence is synthesized)
gctcatggaacttcattaaaagttccatgtttggccaaaaccccagaaaaaaaaaatcagtcagtattttcaaggtcccacctggcttggttcatcatccacaatgaaacgattgaaaaa

SEQ ID NO: 938057 - DNA, 120 bp, Artificial Sequence
  ENSG00000251426_3 (sequence is synthesized)
aatgcatgtgcctgacccaggttcttactcataatgtttctgtctgaaatgtgaagttgctgtcacctgcctgtagacagaatatttaaaaacgagagttcatggttttagttgagactg

SEQ ID NO: 938058 - DNA, 120 bp, Artificial Sequence
  ENSG00000254416_0 (sequence is synthesized)
acagacaggctgccagccctcagcatggacccggcacatggaatctgtgatcttaaaagagtcaagtgactacctttggcaaccaaaagagacactgccttttagaaggcatatcatctg

SEQ ID NO: 938059 - DNA, 120 bp, Artificial Sequence
  ENSG00000254416_1 (sequence is synthesized)
aaactggctgaaagagctgtcttacttaggaagaaaaatctctcctttggaaagagctggaacttttagtaaaactgaacagtgaggtggcggaagtagagatgatgtcttgccacattg

SEQ ID NO: 938060 - DNA, 120 bp, Artificial Sequence
  ENSG00000254416_2 (sequence is synthesized)
cccaggctggtctcaaactccaggcctaaagggatcttctgactttggcctcccaaagtgctgagattataggatcgaggctatcaagctacagatgatcttacaaatggaaccccaaat

SEQ ID NO: 938061 - DNA, 80 bp, Artificial Sequence
  ENSG00000254416_3 (sequence is synthesized)
ctatcaagctacagatgaccaaggacccctggaccaacccgctggccctttcaatggcctaaagagttcccctctggagg

SEQ ID NO: 938062 - DNA, 85 bp, Artificial Sequence
  ENSG00000254416_4 (sequence is synthesized)
cagggtcctggtcatcacccaattcccaacagcagttggggtgtcttgttaagtggggagattgagaggtgaagccagctgggct

SEQ ID NO: 938063 - DNA, 83 bp, Artificial Sequence
  ENSG00000254416_5 (sequence is synthesized)
tcactctttgggtccacaccacctttatgagctgcaacactcactgcgaaggtctttggggaggaacaatcgacttcagacat

SEQ ID NO: 938064 - DNA, 90 bp, Artificial Sequence
  ENSG00000254416_6 (sequence is synthesized)
accacgaacccactggaaggaagaaatttcggacacatctgaacatctgaatgaacaaactctggacacgccatctcatgggttcattct

SEQ ID NO: 938065 - DNA, 68 bp, Artificial Sequence
  ENSG00000254416_7 (sequence is synthesized)
ttgggatacatgtgtgagccactgtgcccggcctcctctggattagttcttacaggaatagattagtt

SEQ ID NO: 938066 - DNA, 120 bp, Artificial Sequence
  ENSG00000254416_8 (sequence is synthesized)
cggcctcctctggattagttcttacaggaatagattagttcttgctcgagcaagttgttataaaagtgaggttgcctctagtgttttgcatcctcacatatgtctgcttacctcttgacc

SEQ ID NO: 938067 - DNA, 120 bp, Artificial Sequence
  ENSG00000254416_9 (sequence is synthesized)
tctctctgtgttatgacccagcacaaaagcccttaccagaagccaagcagatgctgatgccacaccccttggacttctcagtctacagagccatgaaacgaataaacctctctttataaa

SEQ ID NO: 938068 - DNA, 120 bp, Artificial Sequence
  ENSG00000254416_10 (sequence is synthesized)
ccaacctgaagtgtagcactgtggtgacctggcgggatctgctctccagtcactcccgagggcccttctggggacaaggagacttttctgtgcggcctgttgatttgagtaggatcgagg

SEQ ID NO: 938069 - DNA, 120 bp, Artificial Sequence
  ENSG00000254416_11 (sequence is synthesized)
ggatttgagtcctacaggctcagcacttatgaaaaaggataaagtccttcccagcctggcaggagaaggaaaagcctgtggtgggggaagggagtgaaggcgtgtgcctcctcatggaac

SEQ ID NO: 938070 - DNA, 86 bp, Artificial Sequence
  ENSG00000254416_12 (sequence is synthesized)
tgagatcacatctctgcaccccacaaaaactgtatttcattcaaacataatctgttttagagtctccaattcatagatatttaagt

SEQ ID NO: 938071 - DNA, 120 bp, Artificial Sequence
  ENSG00000254416_13 (sequence is synthesized)
ataatctgttttagagtctccaattcatagatatttaagtcatctctgtttttgctatttcttattcaatgatggaaatctttgtacataaattgttgtacataaatctttgtacataaa

SEQ ID NO: 938072 - DNA, 120 bp, Artificial Sequence
  ENSG00000254417_0 (sequence is synthesized)
aatagtcaccggggatgcaagcatcagggaagaatacctcagagcacgggccaagctgtctgcaactcagtgggaagttgaacaaaccaaactttacaaagggaggaagaacgaggtgcc

SEQ ID NO: 938073 - DNA, 120 bp, Artificial Sequence
  ENSG00000254417_1 (sequence is synthesized)
ccaaattatggagacacagggactggttaccaagaccatggaccggaacaagaacctcgctccccattaaccaaccgcatggccttggtgtgcctagatttcctcttttgtaaagtgagg

SEQ ID NO: 938074 - DNA, 120 bp, Artificial Sequence
  ENSG00000254417_2 (sequence is synthesized)
gatggtaggcgaggaccaagaggcccagcgcctggcggtgacatgatacagcttctgatagagaaggacaggtcctggtcctcctgtcctctggcctgaggggctgaaggtgacttgagg

SEQ ID NO: 938075 - DNA, 120 bp, Artificial Sequence
  ENSG00000254417_3 (sequence is synthesized)
tcccaagaccgtggagctgggacataggttggcacccctgcactgttgagagtacaagaaccccatgagagccgctctcagccacagactcatccctgtaccttccacggggtgtacgcc

SEQ ID NO: 938076 - DNA, 120 bp, Artificial Sequence
  ENSG00000254417_4 (sequence is synthesized)
tttgcgcaggggccatactaatcttctctgtatcattccaattttagtatacgtgctgccgaagcgagcactttgcggacattttaatagtcaccggggatgcaagcatcaggtgacaag

SEQ ID NO: 938077 - DNA, 120 bp, Artificial Sequence
  ENSG00000254417_5 (sequence is synthesized)
gagcgcagaccaacaagctgtcaggagggtggcttcctggtaggaggcagcacaggggagcccttttcaacgatattttatttccatcccgttggcattgcccacagggaagaatacctc

SEQ ID NO: 938078 - DNA, 120 bp, Artificial Sequence
  ENSG00000254417_6 (sequence is synthesized)
cctaaagaccgaagtctaatgcctgagatggatcctaacgttacaggcactggctgcagcaagcctctgactctggggcgaatcctctggggcctcatcacaccctcccctccccaaagt

SEQ ID NO: 938079 - DNA, 120 bp, Artificial Sequence
  ENSG00000254417_7 (sequence is synthesized)
caaggaagccacacctcctgggccgactgtgaggctcagttatctttataggaaatcctgacgctttcctgcaaaaccctgtggttggaataaaagatgttccagaattttgttatgcca

SEQ ID NO: 938080 - DNA, 120 bp, Artificial Sequence
  ENSG00000251423_0 (sequence is synthesized)
gcagtaatgtgcagtcagaagactaagttccacatcaacagtgcttaatttagcggaacactggaatgatctcatagctgaacactggaatcatctcgccagcattaaaaattactgatg

SEQ ID NO: 938081 - DNA, 120 bp, Artificial Sequence
  ENSG00000251423_1 (sequence is synthesized)
cctgcctgggtcctacgtacagagactctgattcaatgggtctgggaagtggccctggcattgggatttttttaagttccttcagtgtatctggtacgttgcaaagattgagaacaactc

SEQ ID NO: 938082 - DNA, 120 bp, Artificial Sequence
  ENSG00000251423_2 (sequence is synthesized)
ttctacatgaaatactataagttctacaaggacaagaattttgtctgctttgtccagtgagcctgaaccagtgcctggcacataggagataataaatcaatatctatctaattagttgtt

SEQ ID NO: 938083 - DNA, 120 bp, Artificial Sequence
  ENSG00000251423_3 (sequence is synthesized)
atcagaaggatttttcatctgaaatgggcattctcatctttcactgaaagttaaactgtcttccaaggaagagatgaagaaacaaattctcagctactttggcatatctgcaaaagcctg

SEQ ID NO: 938084 - DNA, 120 bp, Artificial Sequence
  ENSG00000251423_4 (sequence is synthesized)
aaagctctgtcaaatattcagcacaataattctgcaacacttcagatggtcacctaaacctgccaatagatctgctttgaccagctactcaggttgagcagaaacttttaactctcaacc

SEQ ID NO: 938085 - DNA, 120 bp, Artificial Sequence
  ENSG00000251423_5 (sequence is synthesized)
tccaagataataaatgttaatgagatgataatttactcccttgaattgtcatttaaaacattctttgatcctcttcccttcatgggggaggggggaaccacatcccctttttttgaatct

SEQ ID NO: 938086 - DNA, 120 bp, Artificial Sequence
  ENSG00000251423_6 (sequence is synthesized)
gggtaggtttacagtccaacagagtacaacagagatgatgctgtgagacatctgaggctattataaagaccatgtgacttctttattgttcactgtagcgcttgttcttgaaaccctgag

SEQ ID NO: 938087 - DNA, 120 bp, Artificial Sequence
  ENSG00000251423_7 (sequence is synthesized)
ctgccatataagaaattctactagccagaggcctccatactggaaggccatgtatagatgtgcctgttcacagtcccactggagtgtaccttccagctttcctcaggaaagaaacagaaa

SEQ ID NO: 938088 - DNA, 120 bp, Artificial Sequence
  ENSG00000251423_8 (sequence is synthesized)
ctagaagaacccttcttggaccttacagattgaacatctgccagttgaataccaataaacaacctttgtcaacaatacatggaacagaagaatcacctatgcaagccccactcaagttct

SEQ ID NO: 938089 - DNA, 120 bp, Artificial Sequence
  ENSG00000251423_9 (sequence is synthesized)
ttacccataaagtcatgatataatgatacggttattgtaaaccctacaacgtgcttacaagtgtttgttgcctgaaacagacaagtgaaacaacaactctgcaaatacaattaaattatc

SEQ ID NO: 938090 - DNA, 120 bp, Artificial Sequence
  ENSG00000251423_10 (sequence is synthesized)
agtaattccataatcttataattatagtttcttagtaaaaatattattttctttatgaatatgtaaattgactaagtgagtttcctaatgtgaaagagtctaaaagggaatctcaacatg

SEQ ID NO: 938091 - DNA, 120 bp, Artificial Sequence
  ENSG00000251423_11 (sequence is synthesized)
ctgactggtattttatgagtctacatttgaggaatgtctgtccattgccaatacaactttttaatatgacatgaagtggtgggaagacgatggactacaagtctgggttctggtcttact

SEQ ID NO: 938092 - DNA, 120 bp, Artificial Sequence
  ENSG00000251423_12 (sequence is synthesized)
tctgccactttgtagctatgagacctttgctaaatcttttaacttctctaagccacagttttgtcatctacgaaataaaataatagtattctgtcctacttacctaacgtagtggtagaa

SEQ ID NO: 938093 - DNA, 120 bp, Artificial Sequence
  ENSG00000251423_13 (sequence is synthesized)
aagatcagatgaaataatgagcatgaaaatggctttaaatgtaaagtacagtgcaagtgcatggacttagtattgtcacgtgatgttaaccactatgaaattttaacaatggtttccatg

SEQ ID NO: 938094 - DNA, 120 bp, Artificial Sequence
  ENSG00000251423_14 (sequence is synthesized)
ttgtcagattccatggccgcatctctgatctcaccttcttcatcccctgggtagcagcatttgccactggtgaccagtccctctctcagtagccttttcatacccttggcttcctttttt

SEQ ID NO: 938095 - DNA, 120 bp, Artificial Sequence
  ENSG00000251423_15 (sequence is synthesized)
ggtctccttgacacttggtttcttcccagctcagaggtcagtcctctgttttatttgcacacctgtcttcttctttcagatctgttaatactggaacaacccaatgcttggcccagtggc

SEQ ID NO: 938096 - DNA, 120 bp, Artificial Sequence
  ENSG00000251423_16 (sequence is synthesized)
cctccattcttctctgtctgtattctctcccctaagagatctcatccaggacaatgacattaaataacaatgatattctgataactctcagaagcatgcctcccactttggcttctccac

SEQ ID NO: 938097 - DNA, 120 bp, Artificial Sequence
  ENSG00000251423_17 (sequence is synthesized)
tgaactccagacttaagtatccaactgcatggacaacactgccacttggctgtctaaaaactatcttgtacttaaatgggaactactgattccctcctgctgctccaaatacactagttt

SEQ ID NO: 938098 - DNA, 120 bp, Artificial Sequence
  ENSG00000251423_18 (sequence is synthesized)
cggttttcgccatctccataacttgaacttacagtcagggcccctgcatggtattgtgcaagttatgaagaatgcaacctacacagcattctacggcacccctgctttaattcatggaac

SEQ ID NO: 938099 - DNA, 120 bp, Artificial Sequence
  ENSG00000251423_19 (sequence is synthesized)
tgctcacaccaaaaccacaggtattattcctgagttctcttataacctgactgttgacataactctaaattctccaaacaactctgctgccatcccagttcaagctctcatcttcatcct

SEQ ID NO: 938100 - DNA, 120 bp, Artificial Sequence
  ENSG00000251423_20 (sequence is synthesized)
gggccagtgcaacacttcacaaacaggcttcccgctgatacccctcgtccctcttaacatccattttccacccagcagtaagaataacttttattataaaaagagatcgtgcctttttca

SEQ ID NO: 938101 - DNA, 120 bp, Artificial Sequence
  ENSG00000251423_21 (sequence is synthesized)
gtggctcgaaatcctccaatggtttcctggtacactcaaaataaaacccaagcttctcatcttggcctgcaagacctgtaacggcctggccccagccaactctgcagctgcaccccatgg

SEQ ID NO: 938102 - DNA, 120 bp, Artificial Sequence
  ENSG00000251423_22 (sequence is synthesized)
cactgtcccctcagtcactccattcatcctggccactttctgctccttgaatatgacacatcaccatatttttttataatacattccagagctagccaagaatggggggaaaaaataaaa

SEQ ID NO: 938103 - DNA, 120 bp, Artificial Sequence
  ENSG00000251423_23 (sequence is synthesized)
gtagtataccttcatgttactgaagttccttttgtatctatctcgtttctggaagagggaagttgccagtggagagacttccagacccatctgggccatgcactctgtttctctaaataa

SEQ ID NO: 938104 - DNA, 120 bp, Artificial Sequence
  ENSG00000251423_24 (sequence is synthesized)
gattaatatctgagggtcaaagtttacaaacaattcccctgtgcctggagccttcaccaataatgaagcctcaagacctacatgaatttcttcaatctgtgggaagaaaccaacatcatt

SEQ ID NO: 938105 - DNA, 120 bp, Artificial Sequence
  ENSG00000251423_25 (sequence is synthesized)
actatcagaaagttcaattcatgcagagtatctagctcagctatctctaggaataaggatcattaaatgttcttccatggatttgagcttcctaaattaagggcaataagatcactcact

SEQ ID NO: 938106 - DNA, 120 bp, Artificial Sequence
  ENSG00000251423_26 (sequence is synthesized)
cttctcctaaatccagtctcatacaatagccttcaagttcttggtgttgatgttgggcagtcaattcaataaaacctttcaatgactctaacactgataaataagtggacactgcaacag

SEQ ID NO: 938107 - DNA, 120 bp, Artificial Sequence
  ENSG00000251423_27 (sequence is synthesized)
tggtggcgtctcaaaagccatttagctacctgataccttcatgcctactctattattcttcctaataaaagtttcgtaagacctcctaaactcagtttttacttatctagaaaaacaatg

SEQ ID NO: 938108 - DNA, 120 bp, Artificial Sequence
  ENSG00000251423_28 (sequence is synthesized)
aacacagctatggagacatcgcatcctgacagcctacaaagaaatacatgtattggtaggatatgctatgattaaccagttgtacaacaaaagaaaatttgaaactttgtttaacagatg

SEQ ID NO: 938109 - DNA, 120 bp, Artificial Sequence
  ENSG00000251423_29 (sequence is synthesized)
tgctagtgtttactgacatatttaggatctgactgaattttaaaaagcaagatatcctaatagattgggcataggaaccaataaacaagatcttctcactttggagttcgtaaattaaat

SEQ ID NO: 938110 - DNA, 120 bp, Artificial Sequence
  ENSG00000256814_0 (sequence is synthesized)
ccttctttctctctgtagcctccctgtgcctgtctcctgctcccaccccagcacaacagagtctaggtctgttttccgctgctaagtgtgtgataatttattatgcagcaatagagcact

SEQ ID NO: 938111 - DNA, 120 bp, Artificial Sequence
  ENSG00000256814_1 (sequence is synthesized)
aacacactcggccagtggcccaggcctcagtgtgcggcacactctacttagcacctccacatgtgtgagttctgtcttctcagccccactccggtccttgagggtgggaatcttcctcct

SEQ ID NO: 938112 - DNA, 120 bp, Artificial Sequence
  ENSG00000256814_2 (sequence is synthesized)
gaggcaagtgacagaaagccatctctcatcactggcttcaggcacagcaggatatagggctgggtcaatgtaatcaggattcaacatctctcatggcatctgtatgggcagtagggcata

SEQ ID NO: 938113 - DNA, 120 bp, Artificial Sequence
  ENSG00000256814_3 (sequence is synthesized)
gtggttaagaccatgggctctggaattgggttgctggataaaatacaggacacccagttaaatgcttcagtctttgtctttttgccgaagttccaacaaaaggcccgaagaggagtccca

SEQ ID NO: 938114 - DNA, 120 bp, Artificial Sequence
  ENSG00000256810_0 (sequence is synthesized)
gcacttgcagtcagaactccgggcccctcggggcgtgactgcccagctgtgtcacccggagcagctcatgctgcttctaagctcagcttccttgttggcaaagggccctactgtgtggca

SEQ ID NO: 938115 - DNA, 120 bp, Artificial Sequence
  ENSG00000256810_1 (sequence is synthesized)
cacgccgtgcacgtcaggacaagcacaacgcatggcgcacaccacctgctgggagaggcaattgtgcactctacagccacagggacaggacacagcgcggtgagcccacccggtccagga

SEQ ID NO: 938116 - DNA, 120 bp, Artificial Sequence
  ENSG00000256810_2 (sequence is synthesized)
gcgctgggaaagggccccaggagaggcagcagagctgagacaggacgacgaccaggagcgaccaggaaggggaggaggagagtgctctgggcagaggggacagcgtgtacaaaggcccgg

SEQ ID NO: 938117 - DNA, 120 bp, Artificial Sequence
  ENSG00000256810_3 (sequence is synthesized)
agtctcagtgtgccacattgaggtgtcacgcgccacactccatggcatccacgctacagatgccaaaggccacgggaaagcgagttcgccattctgctgaggtgggcaggctactattcc

SEQ ID NO: 938118 - DNA, 120 bp, Artificial Sequence
  ENSG00000256810_4 (sequence is synthesized)
ccgggacgtggctgacacccctcacctgccccgatgtgcagctgaagagacccctcgtccggccttggcctcaggggagggacgatgtccagcaagcttctgtctgaccctgtgtctgcc

SEQ ID NO: 938119 - DNA, 120 bp, Artificial Sequence
  ENSG00000256810_5 (sequence is synthesized)
acatcaactggagcagagacaactggatacagaaaatcccattcaccaaggtgggtgccctcaggaggaagggcctgcgcacgctgcaacgttggggatgcattctgagatctagctgca

SEQ ID NO: 938120 - DNA, 120 bp, Artificial Sequence
  ENSG00000256810_6 (sequence is synthesized)
ttctcggagatagagccactgccccaacaatttcagcggcacagtctggaagggctccccacagattcttaatttaccctctgcagctgacaaaacacaatccccaccctccaccagagg

SEQ ID NO: 938121 - DNA, 120 bp, Artificial Sequence
  ENSG00000256810_7 (sequence is synthesized)
cgggtccacaacctaaccccagagcctggaaatgtcaccataagaggggtccacatcctaaccccagagcctgggaatgttaccataagaggggtccacaacctaaccccagagcctggg

SEQ ID NO: 938122 - DNA, 120 bp, Artificial Sequence
  ENSG00000256810_8 (sequence is synthesized)
aacctaaccccagagcctgggaatgtcaccgaacgaggggtccacaacctaatcccagagcctgggaatgtcaccgaacgaggggtccgcaacctaatcccagagcctgggaatgtcacc

SEQ ID NO: 938123 - DNA, 85 bp, Artificial Sequence
  ENSG00000256810_9 (sequence is synthesized)
ggaatgtcaccgaacgaggggtccgcaacctaatcccagagcctgggaatgtcaccgttaagagaccgaacaaggggtccacaac

SEQ ID NO: 938124 - DNA, 120 bp, Artificial Sequence
  ENSG00000256810_10 (sequence is synthesized)
accgaacgaggggtccacaacctaatcccagagcctgggaatgtcaccatacgaggggtccataacctaaccccagagcctgggaatgtcacctacgacgggtccacaacctaaccccag

SEQ ID NO: 938125 - DNA, 89 bp, Artificial Sequence
  ENSG00000256810_11 (sequence is synthesized)
aacctaaccccagagcctgggaatgtcaccgaacgaggggtccacaacctaatcccagagcctgggaatgtcaccgtacgagagtcact

SEQ ID NO: 938126 - DNA, 120 bp, Artificial Sequence
  ENSG00000256810_12 (sequence is synthesized)
gcctgggaatgtcactttacatggcaaaagggacctttctgatgtgggtaaattaaacgtctggaggtgggaggtgatcctggattagccacatgtatccagtgtgatcccaaggatctt

SEQ ID NO: 938127 - DNA, 120 bp, Artificial Sequence
  ENSG00000256810_13 (sequence is synthesized)
gacagagggaggcaggagcagaggagggggaggcacagaggctggggtcaggggaacggattcgcactgcaggttcaagtgttcatccgcactgactataatagtcaatataaaaataag

SEQ ID NO: 938128 - DNA, 120 bp, Artificial Sequence
  ENSG00000256810_14 (sequence is synthesized)
cctggtagattacagcagcaggcaatgagttaacgttggaactacatcgagagctctcagaagtcactaacaaaacaaacactccactggagaaatcaggaaagaaggtggttacaacat

SEQ ID NO: 938129 - DNA, 120 bp, Artificial Sequence
  ENSG00000256811_0 (sequence is synthesized)
gactgatggggtccccatggcagacggaggccttcctctctcagtccacccaggtgctttcttacctgcacgatgtagtcacaatcttccacctcgaacgcaatgtccttcactccgtca

SEQ ID NO: 938130 - DNA, 120 bp, Artificial Sequence
  ENSG00000256811_1 (sequence is synthesized)
acccacagagccatgcgtccaccctccccgggcacctcacctttgttccaggggttgagcgctgaggagaggacaaacacaatctaagataggaggagaaggaggttttctgagcacctg

SEQ ID NO: 938131 - DNA, 120 bp, Artificial Sequence
  ENSG00000256811_2 (sequence is synthesized)
tggggtcagtgttgggccaggctgaggaggaaacgaaactaggaagggccgtgttgcatggctgtacaaagatgccagcggaggggtcggtgggagctgaattatatgtttttgttgttg

SEQ ID NO: 938132 - DNA, 120 bp, Artificial Sequence
  ENSG00000256813_0 (sequence is synthesized)
tgcattttgcttgtttattatgttttctctccatcagaatgaaagctcctcgagggcagggactttggtctattgtctgtatttgccggtgcctaggattgtgcctgtatgcaacaggca

SEQ ID NO: 938133 - DNA, 120 bp, Artificial Sequence
  ENSG00000256813_1 (sequence is synthesized)
ctcaataaatatttttgctgtagactggacaggcatgagttagattctctggggcttctgcagagactggtttgggaaagtgggtgctagggaaaagctctgctccctgcaacctcccca

SEQ ID NO: 938134 - DNA, 120 bp, Artificial Sequence
  ENSG00000256813_2 (sequence is synthesized)
cagtattgaaaagtggagaggaaccggattcagtctgctggggacagaggcagtggggtgtggagaggcgggaccggggttggggagagtggggctcagcatgcgcatgcgcaattcgcg

SEQ ID NO: 938135 - DNA, 120 bp, Artificial Sequence
  ENSG00000256813_3 (sequence is synthesized)
cgagcgcagtcaacatgtgattgatgagccagtctttttcctgggattcgcttttgcctttcttgcaaagtttcctggggaaagaagagcgagcaagtagaaaagggaaagtgggaggac

SEQ ID NO: 938136 - DNA, 120 bp, Artificial Sequence
  ENSG00000231265_0 (sequence is synthesized)
ctgtggcagagacggagaagatgaacagggattttataccaggcgtcagaagggaaccagtgctaaagaaaatgaaaacaccaggccgggagaggcagctggcatgcgggccgtggtggt

SEQ ID NO: 938137 - DNA, 120 bp, Artificial Sequence
  ENSG00000231265_1 (sequence is synthesized)
cactccgcctggaaatcctccacctcggggcctctctttgcccagacctggcccaggaggagcacatgggagccgggaccttcccaacaatccttgccgttggctccacaaacctcagcc

SEQ ID NO: 938138 - DNA, 120 bp, Artificial Sequence
  ENSG00000231265_2 (sequence is synthesized)
agtcctgcaacctgggatgccttttccaccaggatgcctgctactgtcactgttgtcattagataattaatgaactataattagaaatcatatcaataaaatttcacagtctaaggctgt

SEQ ID NO: 938139 - DNA, 120 bp, Artificial Sequence
  ENSG00000231266_0 (sequence is synthesized)
gtgaggcaggaactgagaggtgctggcgtgtcccatacctctctcaccttcagaactccctgaggcctcatgttctttctgtctgtcatcagaggctgagcagtacagcagttgagagaa

SEQ ID NO: 938140 - DNA, 120 bp, Artificial Sequence
  ENSG00000231266_1 (sequence is synthesized)
cggtgtgcgttggcaccaccagcggctgtcattctcaggagacaatgggattggagcgccaagggggagagttctccatgcagaatttccctgcttaatccgctcttgtgcgctggcacc

SEQ ID NO: 938141 - DNA, 120 bp, Artificial Sequence
  ENSG00000231266_2 (sequence is synthesized)
aagtcaacaaaggaaaggaaccaaattacccgggcggctttggcaggctgcaccactgtcagcgggccagaagttaattccctcatcttcccccgtgccaccaactcagggggcaggtct

SEQ ID NO: 938142 - DNA, 120 bp, Artificial Sequence
  ENSG00000283384_0 (sequence is synthesized)
attaacacccagcaaccaggagaggagagaggcctggggaagacagccaccaccaagtacacaaaggttgaaagaggacgtttgtgggaagtagacatttgtgaatgtggatttagaaga

SEQ ID NO: 938143 - DNA, 120 bp, Artificial Sequence
  ENSG00000283384_1 (sequence is synthesized)
tttttccctgtgatgagctgagtcatgggtgagagctggagaaaacagagcaacacaggcagcccaggggctgagcaggtcctcctacctgatccatcgctctgtctgcaagctctcctg

SEQ ID NO: 938144 - DNA, 120 bp, Artificial Sequence
  ENSG00000283384_2 (sequence is synthesized)
catcactgaatgttggttgtgcctcaggaaacagtctggttgccagatacagactggccaagaaaatggacgtgattagtcctcttttggtccgtataatgtgaagacggtcatgtgagc

SEQ ID NO: 938145 - DNA, 120 bp, Artificial Sequence
  ENSG00000283384_3 (sequence is synthesized)
taatgtgtgctgagcaaagggaggatttggattcttttgctttatcggtcaatcctcttctcccatcaaatcaatgtggaaatcaacagagtcccaatggccttctttggtaaagccctt

SEQ ID NO: 938146 - DNA, 120 bp, Artificial Sequence
  ENSG00000283384_4 (sequence is synthesized)
atgatgatccacttccacttaatgaatagagttcctggttgttacacttaaattgatccaagagagggtatttctttttctggaggccaattgaatggtgaaatggagttgcaaagcatt

SEQ ID NO: 938147 - DNA, 120 bp, Artificial Sequence
  ENSG00000283384_5 (sequence is synthesized)
ggccaattgaatggtgaaatggagttgcaaagcatttggcagcatattgatttcactggactatttaagtcctgtgaagaggtgccttccacgatgattgtaagtttcctgaggcctccc

SEQ ID NO: 938148 - DNA, 120 bp, Artificial Sequence
  ENSG00000283384_6 (sequence is synthesized)
tgcttccctacaccaaactgctgcggcttcaacctctgggcaggccacccctcggaggataatttcttcccactgctggggctctctctgacactgtgacagcaaggccctcccgggtga

SEQ ID NO: 938149 - DNA, 120 bp, Artificial Sequence
  ENSG00000283384_7 (sequence is synthesized)
gcttcccccaacctcgggctcccacagctgcccgttctccgctgtcagaacaggcgcctgccttgctgtagctcacagtggggtagaattaggcttgagttattcagcacaggaaggata

SEQ ID NO: 938150 - DNA, 120 bp, Artificial Sequence
  ENSG00000283384_8 (sequence is synthesized)
gggaggaggaagagaaagaggagaagcaagacctattgagcagttttaagtagcaggacaaattaagaaatatggagctttcagttccaatttgattgctcctcaaaaaactccttggtg

SEQ ID NO: 938151 - DNA, 90 bp, Artificial Sequence
  ENSG00000283384_9 (sequence is synthesized)
tccttggcatctctttggttgtagaagctgaagggctacagctgacttcagctagtggagcatgaaatggcctcttgcttcctaatgggc

SEQ ID NO: 938152 - DNA, 120 bp, Artificial Sequence
  ENSG00000283384_10 (sequence is synthesized)
gctagtggagcatgaaatggcctcttgcttcctaatgggctgaggggctaggatcaggtacagcaaaacactacttgggtttctcttaaagggatgtggattttgaagaggttcaaagca

SEQ ID NO: 938153 - DNA, 120 bp, Artificial Sequence
  ENSG00000283384_11 (sequence is synthesized)
ttagttacttacgttatttccaatttttccttgatgagtaatgcttcgatgaacattcctgtaaaaagtatatgatagtttccttaggatccatttctagaattgaaataaattgctggt

SEQ ID NO: 938154 - DNA, 120 bp, Artificial Sequence
  ENSG00000283384_12 (sequence is synthesized)
tgaaacactgaataattttaaagctacacatatacatgcagatacatacatacgcacacacacacaaaactgtcctaaaagtaaactagctttttaccatatgtaatatatatagtaaag

SEQ ID NO: 938155 - DNA, 120 bp, Artificial Sequence
  ENSG00000283384_13 (sequence is synthesized)
caaagaaatacaagaaccatcttataacacaaagagaagaatcatatacctatatatctgtacctctacatatcacatacataggtttactcaggatatctagaagcatgcctaacacag

SEQ ID NO: 938156 - DNA, 77 bp, Artificial Sequence
  ENSG00000283384_14 (sequence is synthesized)
ccctgtgatgagctgagtcatgggtgagagctggagaaaacagagtcctgtgaagaggtgccttccacgcagagtct

SEQ ID NO: 938157 - DNA, 120 bp, Artificial Sequence
  ENSG00000283384_15 (sequence is synthesized)
ctgcctcagcctcccgagtagctgagactgcaggcatgcaccaccactcccagatgtaaccaatttaagatgatgtcgtgctggattcgggaagatcaagatgcagaaacccagagacac

SEQ ID NO: 938158 - DNA, 120 bp, Artificial Sequence
  ENSG00000283384_16 (sequence is synthesized)
ctggattcgggaagatcaagatgcagaaacccagagacacaaagggagaggtagagattggagtggtatatctacccaccaggaaagccaaagattgccattaatccacagaagccagga

SEQ ID NO: 938159 - DNA, 120 bp, Artificial Sequence
  ENSG00000283384_17 (sequence is synthesized)
ggaggcaaggatgggtcctcccccggagccttcaaagaatgcatgaacctaaaaacatcctgatttcagacttctggcctagaactgtgagagaataaatttttgttgtttcaagccacc

SEQ ID NO: 938160 - DNA, 120 bp, Artificial Sequence
  ENSG00000283384_18 (sequence is synthesized)
tggtttatggtattttgttatggcaaccctaggaaaagcatacggctgccagtgagtaaagatgctcagcacactaggtgagcactttgctgcactctggggaaaatttgagaaattttg

SEQ ID NO: 938161 - DNA, 120 bp, Artificial Sequence
  ENSG00000283384_19 (sequence is synthesized)
aataaatcattgtattttctttacattgtataattgttgaaataaaattatccatgagtcttccacaatattgcatgtcttataaacataaatattgatatttgtggaagatactgtcat

SEQ ID NO: 938162 - DNA, 120 bp, Artificial Sequence
  ENSG00000283384_20 (sequence is synthesized)
cccctgtagcaaaaggccaacgtgcttactgtccagtgtaaaatatatgaattctctaagctcagggttgctcttccacagtacaacccagtgcatgtatggatgttgctggctctgttt

SEQ ID NO: 938163 - DNA, 120 bp, Artificial Sequence
  ENSG00000283384_21 (sequence is synthesized)
atgccaccctgtgggacttgggaaatgatacaaaaataataacattactctggatactgctactgctgtgagtaaaaaactttcttttgtctttgacccatgaatctcatgccttctgcc

SEQ ID NO: 938164 - DNA, 120 bp, Artificial Sequence
  ENSG00000283384_22 (sequence is synthesized)
actatccataaaatgggcaggctaacttgtttgcttgcaaatgtaataaaatctcagagtctttacagttcttgacagtgcttatgacaaatattaagatgcaaatattagaaatgataa

SEQ ID NO: 938165 - DNA, 120 bp, Artificial Sequence
  ENSG00000283384_23 (sequence is synthesized)
gtaatgaatttatgttaacctttcaaataacctttcaaaacttttgatgataaacttggtcctgtgcacttaaattttatatcaagatttttgctgaaaatgtccacgtttcaatttctg

SEQ ID NO: 938166 - DNA, 120 bp, Artificial Sequence
  ENSG00000283384_24 (sequence is synthesized)
gtgaaagcagtttaattttgatcacctgacattcttgtcactttcaacaagaaactttgttcgtgcaagtcaatggcagacttttcaaaataatgtattatagccatttaaaaatgtcca

SEQ ID NO: 938167 - DNA, 120 bp, Artificial Sequence
  ENSG00000283383_0 (sequence is synthesized)
aaataaatctacatgcaaattcacaaagagccctttcattcttggggcatacaaaaacgcagaattaggcctgaagttctgagtcccttctaccttccatcggctgaatgagctacagga

SEQ ID NO: 938168 - DNA, 120 bp, Artificial Sequence
  ENSG00000283383_1 (sequence is synthesized)
attcacttaataggcctttggaaggatccttcgtggcaaacccgaccgtgaccgccactgggccagcctcagcgggacccctctgtcctcccgactgctcccgtgccccagcttgtctga

SEQ ID NO: 938169 - DNA, 120 bp, Artificial Sequence
  ENSG00000283383_2 (sequence is synthesized)
actagtctcttgggttgagtccaataagcacatcatcttccccagctctacagactggctccagttttgagacctttcagacttttccattttgtgatttcttagcttcgtgtgttaggg

SEQ ID NO: 938170 - DNA, 120 bp, Artificial Sequence
  ENSG00000283383_3 (sequence is synthesized)
aagtttgaacttcatttgtattgtcaccttaattaacatggctggaccagaatccagtagaccacgttagtcaacactggacaaggaggaagagtcggaggtgcatgatctcagctctga

SEQ ID NO: 938171 - DNA, 120 bp, Artificial Sequence
  ENSG00000283380_0 (sequence is synthesized)
agagcccggggtcggtcaatcaggtgcgggcggctggagcatggctttgtgaggcctctgaggggacccggcggtggcggccacggcgggacgggccgcccaccagttgaactccgacag

SEQ ID NO: 938172 - DNA, 120 bp, Artificial Sequence
  ENSG00000283380_1 (sequence is synthesized)
ctgaggcggctgaggagattagactccagagataatgatattaggaaatccaaactgaaatggaccccagagcaattgaagaaagaaagagtcaagggttctcattggtgcaccactgaa

SEQ ID NO: 938173 - DNA, 120 bp, Artificial Sequence
  ENSG00000283380_2 (sequence is synthesized)
aactacttacaaagagccacaaggattactcaagagcaagagacattcacatttgtgcccttaaatggcatgagaaaacaaactgttaccaatgtgaattctcagctcttctttccaaac

SEQ ID NO: 938174 - DNA, 120 bp, Artificial Sequence
  ENSG00000283380_3 (sequence is synthesized)
aacagctatgccatttcacatgccatctttcttctggagcagcagcttctctaattaatttcataacaatattgttgtaacaaggatgggctatttgttctggatgggctatatcattct

SEQ ID NO: 938175 - DNA, 120 bp, Artificial Sequence
  ENSG00000283380_4 (sequence is synthesized)
gaaaaatttgaaagggcagagtgtttaaatgaagaagtttaaattttgaaaaatatgaaaagcagagtatagtgatatgaaggcatccaaatagaatcaccagtgcttccctgaggcaaa

SEQ ID NO: 938176 - DNA, 120 bp, Artificial Sequence
  ENSG00000283380_5 (sequence is synthesized)
attgaaatatagggacaatttgtctccatctttcctctatcatccttttcaaatctctcccttgccattgagaaaatgggtccttacactttaccatgtccgcctggactctctccgtta

SEQ ID NO: 938177 - DNA, 120 bp, Artificial Sequence
  ENSG00000283380_6 (sequence is synthesized)
tgtaacaccatctggacttgcaaccactggaccaggcctcatcccttgtctgctcttcttctatcaaaatgtacttgttttgtgtcgtatgtcttactgtaatgaagtgacacattcatt

SEQ ID NO: 938178 - DNA, 120 bp, Artificial Sequence
  ENSG00000283380_7 (sequence is synthesized)
tacttgaatttatggacggaaaattattgctggtttactattttgacctcttggaattattagtatgttcacaggcactccagggaagataatttttaactcaaagggagaactgtaatt

SEQ ID NO: 938179 - DNA, 120 bp, Artificial Sequence
  ENSG00000283380_8 (sequence is synthesized)
tcaagccatcgctaggttagtggagtcaatattttggagagggaggtttaagtctgtaacagagaagttgccctctttgtttatgtattagctggccctgtaatgtggccattattttgg

SEQ ID NO: 938180 - DNA, 120 bp, Artificial Sequence
  ENSG00000283380_9 (sequence is synthesized)
ctgttggaagaaaacatatgcttttgctgagaataacttttctacattatgttctccttttcgtgaattattttttacaaagagaatgaaacatctcttccatcttccttcagtttcaca

SEQ ID NO: 938181 - DNA, 120 bp, Artificial Sequence
  ENSG00000283380_10 (sequence is synthesized)
atcagagtgtccatttttgttacgctcaatcagctctaatcattaatttgaaaatctgaaatgtgttaacccaggtacattgctcatcctgctgactctatgagtagcacatttatcaat

SEQ ID NO: 938182 - DNA, 120 bp, Artificial Sequence
  ENSG00000283380_11 (sequence is synthesized)
tctgccatgtgcaatgttcaatgctatgttggttgctgcatgcaactaattttttttctttttggcagaaactggctgactgctatttaatcaagggaatgtagtggcagcttcaagttt

SEQ ID NO: 938183 - DNA, 120 bp, Artificial Sequence
  ENSG00000283380_12 (sequence is synthesized)
aaaatattttgaaatgatacaagagcgattctcttcacttgactccaaggttgtctgttccttagaaataaatttactcaagtctatagttttgggggttcagcagaatggacattaagt

SEQ ID NO: 938184 - DNA, 120 bp, Artificial Sequence
  ENSG00000283380_13 (sequence is synthesized)
aaattattaatatttttatatattgctggcaaaatgtatctattaaatgtgtgaacatttttacagttgaatcagaagagaattgccaatgggggcaaagcattgccaaatagatgtata

SEQ ID NO: 938185 - DNA, 120 bp, Artificial Sequence
  ENSG00000283380_14 (sequence is synthesized)
atttgtcatcataatacagctaatacttcttccttgacttggcactgaacaggacagaatctgtagcacattttgagactgtactgttttctaccttctgtgtcttatgacctttctcaa

SEQ ID NO: 938186 - DNA, 120 bp, Artificial Sequence
  ENSG00000283380_15 (sequence is synthesized)
attcctttgctgaatcagtatctataaaatattacaaaaagcatttgatgtgtaagccattaaaatgggctgatgagcattttcccccaagaggccttaaataattggtaattgtttatg

SEQ ID NO: 938187 - DNA, 120 bp, Artificial Sequence
  ENSG00000283380_16 (sequence is synthesized)
tcattattattattactgttatcattcattcttagatgaaatttcagtcccattagcactataggattaataagcaacccgactttccaaacctagccttttgtgtacttggtagctaga

SEQ ID NO: 938188 - DNA, 120 bp, Artificial Sequence
  ENSG00000283380_17 (sequence is synthesized)
aactaagtcaaggcaggctccatctatgttgacatttttctaaatgtttaaaaaacttacttgagcacaaatggtctgtatggaaacatatgtaggaaaacatcctgagtatttaataaa

SEQ ID NO: 938189 - DNA, 120 bp, Artificial Sequence
  ENSG00000283380_18 (sequence is synthesized)
aaaggaagggacatttttatggactacatctctgcctggatggctgtctctaactggattttgccaatatatgctgaggggagatatgaaattatccaggaatggcaatttgaccacaaa

SEQ ID NO: 938190 - DNA, 120 bp, Artificial Sequence
  ENSG00000283380_19 (sequence is synthesized)
atacatgaacagatggttcttgcctttgaatgggaaaagatgctgcctagtccatcttgtattggaaaatgttgtgactcagtgcaaattttacacttttggatgcatttggatttcttg

SEQ ID NO: 938191 - DNA, 86 bp, Artificial Sequence
  ENSG00000283380_20 (sequence is synthesized)
agtgcaaattttacacttttggatgcatttggatttcttggatgttgtaagcacttctccttcctgccaccacgtgaagaaggaca

SEQ ID NO: 938192 - DNA, 120 bp, Artificial Sequence
  ENSG00000283380_21 (sequence is synthesized)
ctatctgtgatgctatcttgtgaccatgaggagtgctaagctgaatcacaaatccaccatgctgaggacagcacaacaaagacttggggacttaatggtttcaaccagtcactgggttaa

SEQ ID NO: 938193 - DNA, 120 bp, Artificial Sequence
  ENSG00000283380_22 (sequence is synthesized)
caaaccctggaacaatcccacctcaaaacttcagttacctgtcctgctgacgtcagacccagcaccaggtgcagaagcaaccatcatacaaaaatcaagcttccttaattatgtctactg

SEQ ID NO: 938194 - DNA, 120 bp, Artificial Sequence
  ENSG00000283380_23 (sequence is synthesized)
cagtttgctgggggtccactccaaaccctgtttgcctgggtatcaccagtgaaggctgcagaacagtgaagattgcttcctgctccttcctccagaagctttttcacagaggggcatcac

SEQ ID NO: 938195 - DNA, 120 bp, Artificial Sequence
  ENSG00000283380_24 (sequence is synthesized)
cctgatgccagccagaactctcctgtataaggtgcctggtgacccctgttgggaggtctcacccagtcagcaggcctgggatcagggacctgcttaaggaagcaggctggctatccctta

SEQ ID NO: 938196 - DNA, 120 bp, Artificial Sequence
  ENSG00000283380_25 (sequence is synthesized)
tagctggtacactgtgctgggtgaatcccccttgtccggatcacccaaattcttcagagccagcaggcaggaaagattaagtccactgaacctgagactgcaggcacccctccccacagg

SEQ ID NO: 938197 - DNA, 120 bp, Artificial Sequence
  ENSG00000283380_26 (sequence is synthesized)
gctctgtcgtagggagatgagagttctgtctataagcccctcactggagtgctggaattcctgcagggaggccctgcccagtgacgaggaatggatccaagtcccacctaaataatcagt

SEQ ID NO: 938198 - DNA, 120 bp, Artificial Sequence
  ENSG00000283380_27 (sequence is synthesized)
ctggctacgatctgccacagccactgtgctgcactgtggggagtaccacccagtccaaactgcccagccttcctagcactggcaggcgaaaactgctgattagagccacagtgatggtgg

SEQ ID NO: 938199 - DNA, 120 bp, Artificial Sequence
  ENSG00000283380_28 (sequence is synthesized)
ttgcccctccccccaggaactccgtcatcttaggccaactccaggctgctgtgactggccagcagggattccaagccagtgggtcttagtttgcagggttccatgggagtgggtcccact

SEQ ID NO: 938200 - DNA, 120 bp, Artificial Sequence
  ENSG00000283380_29 (sequence is synthesized)
gagcaaggttgtttggctccctggtttcagccccctttcaaaaggagtggaaggttctcctacctcacaagagttccgagagcaaccggagtatgtaacaactcctgctgctcagtgctt

SEQ ID NO: 938201 - DNA, 120 bp, Artificial Sequence
  ENSG00000283380_30 (sequence is synthesized)
ccctgaacggctgctgactggagcagccgccatgggtctgcccagttttgtgcttgagacccaaggcactggtggtgtaggcttacgagggaatctcctgatgcatggattgcaaaaatc

SEQ ID NO: 938202 - DNA, 120 bp, Artificial Sequence
  ENSG00000283380_31 (sequence is synthesized)
cgtaggaaaagcctactaccccagacgggtagcacattccctcactgccttccttggctgggggagggagtttcctcccaggtgaaccgttattccacctgctgcttttccttgctcttt

SEQ ID NO: 938203 - DNA, 86 bp, Artificial Sequence
  ENSG00000283380_32 (sequence is synthesized)
cgccttttgcattcgtctcaatgggagctgcagaacagagctgtttctactcagccatcttggcccctccccccaaaagaaaattt

SEQ ID NO: 938204 - DNA, 120 bp, Artificial Sequence
  ENSG00000283380_33 (sequence is synthesized)
ctactcagccatcttggcccctccccccaaaagaaaattttgaaagaagccagggaaaaaacatacagtatatacagatgaacaaagaaaaggattatacggccgggcacagtggctcac

SEQ ID NO: 938205 - DNA, 90 bp, Artificial Sequence
  ENSG00000283380_34 (sequence is synthesized)
ttgcaaggagtccctcctccttgatgttttggaatagcttcagtaggattcataccaactcttatttatgcatctggtagaattcagctg

SEQ ID NO: 938206 - DNA, 120 bp, Artificial Sequence
  ENSG00000283380_35 (sequence is synthesized)
aggccggagcccagggtctgtctggcaggcagacaggtgccagcagctcgcagcctggcgttcccgctctgggggccgtccgggaacagaggcgcgcgaagtgcgcgtgcgcggcggcgg

SEQ ID NO: 938207 - DNA, 120 bp, Artificial Sequence
  ENSG00000283380_36 (sequence is synthesized)
ggtttgcttcagtttcccccccccacacacacaaatttcaactcaaattgtaatccccacgggtcgagtgaaggacccggtgcaaggtgatgggatcatgggggcagtttcccccatgct

SEQ ID NO: 938208 - DNA, 120 bp, Artificial Sequence
  ENSG00000283380_37 (sequence is synthesized)
atgagttctcttgaaatcttatggttttaaagtgtggcacttttccccttgctctctctctctctcttctgccacattgtgaaggaggtgcttgcttttacttcaccttctaccatgatt

SEQ ID NO: 938209 - DNA, 120 bp, Artificial Sequence
  ENSG00000283380_38 (sequence is synthesized)
aaacctctttttctttataaattacccaatctcaggtagttctttatagtgatgtgaaaatgaactaatacagtatgtatgtggaaggacaggtaattatagtgggttctgtagcccatt

SEQ ID NO: 938210 - DNA, 120 bp, Artificial Sequence
  ENSG00000283380_39 (sequence is synthesized)
aaggacaggtaattatagtgggttctgtagcccattgacataaacaactgctggccatgagcagtattcctaggaagaagcactgttcacatggataattgggggagagaccagcaaaaa

SEQ ID NO: 938211 - DNA, 120 bp, Artificial Sequence
  ENSG00000283380_40 (sequence is synthesized)
ccttataaactggaaataatttctgcaggtccgatagcaattcatggcctctctctttcactacatttatttaagaacaattcccaagcccttcctagttttttccctcctccagaacta

SEQ ID NO: 938212 - DNA, 120 bp, Artificial Sequence
  ENSG00000283380_41 (sequence is synthesized)
tttatacatttgttgttccttgatctacactggcagtgctggctctcattggacagtaggctactggaaaatatgatgaaaaaatgtcctacagcagactgagcatgtgctagtacatgc

SEQ ID NO: 938213 - DNA, 120 bp, Artificial Sequence
  ENSG00000283380_42 (sequence is synthesized)
agctcctgccatctgtttgtctgctttgacagatgttattgaatgagcaggtaaagatagtgagaagtgaagcagagacatttaatagacagcatcacattagcagatccataaacagct

SEQ ID NO: 938214 - DNA, 120 bp, Artificial Sequence
  ENSG00000283380_43 (sequence is synthesized)
ggcaatgaaaagtagccactgtttgtatccagatgtccatattaggagacaaaatagttctatatatactaccactctaatggtggagaaagatcctggagggacatgggtcattatctg

SEQ ID NO: 938215 - DNA, 120 bp, Artificial Sequence
  ENSG00000283380_44 (sequence is synthesized)
gagtacttacatgatatagaccatcagtgtttttgcaaaaaaaaactttaactttaacctacctttggaaactaactctaacctacctttggtacttcgtcttaccaaaatgttatgtac

SEQ ID NO: 938216 - DNA, 90 bp, Artificial Sequence
  ENSG00000283380_45 (sequence is synthesized)
ggaagggacatttttatggactacatctctgcctggatggctgtctctaactggattttgccaatatatgctgatttgagtcgcagtggt

SEQ ID NO: 938217 - DNA, 120 bp, Artificial Sequence
  ENSG00000283380_46 (sequence is synthesized)
tgctgggattacaggtgtgagtcactgaacctagacttgactttagcttcttgaagaggaaattttgatctttgcttttaaacctttctcatttcaaatacaaatatttaaaactgtaca

SEQ ID NO: 938218 - DNA, 120 bp, Artificial Sequence
  ENSG00000283380_47 (sequence is synthesized)
ttttccactaaacacagcttttgattgggtctcacataatttggtataatgtattttaatttttattcagttttaaatatgtgctaatttccctttggatttcttttttgatccatagta

SEQ ID NO: 938219 - DNA, 120 bp, Artificial Sequence
  ENSG00000237844_0 (sequence is synthesized)
gggggtccaggaagaggaggcgcctagagcgagcgaggtctgtgaggactgccagcaggctgtcacctctcaatattatcggtagctcattttgaatgaagaaaaagttaaccataactc

SEQ ID NO: 938220 - DNA, 120 bp, Artificial Sequence
  ENSG00000237844_1 (sequence is synthesized)
ctcctttgcccatctaataagaaagaatgaaagttgaaagccgctctcagaaatggacatgtaagaagacatacacagcacttccccttactgctgccatgtgaagaaggacgtgttgtt

SEQ ID NO: 938221 - DNA, 120 bp, Artificial Sequence
  ENSG00000237844_2 (sequence is synthesized)
agaaggacgtgttgtttccccttccaccaggattataagtctcctgaggcctcccaagccctgcagaactgtatcaattcatatatccatacaggaaagaaggaaggaaggaaggaagga

SEQ ID NO: 938222 - DNA, 120 bp, Artificial Sequence
  ENSG00000237844_3 (sequence is synthesized)
aggaaggaaggaaggaaggaaggaggataccccaagtataaatggattcaagctacttggaatttggttgagagtcattattcctatctgttgccaactaataggaaagagtacaaaaaa

SEQ ID NO: 938223 - DNA, 120 bp, Artificial Sequence
  ENSG00000237844_4 (sequence is synthesized)
ggatagatagtaggagagaggcctggaacagatccttccctagcatcttcagagggagcatggacctacctacaccttgatctcataatccagtctccaaaatggaaggacacttctata

SEQ ID NO: 938224 - DNA, 120 bp, Artificial Sequence
  ENSG00000237844_5 (sequence is synthesized)
aaagacggagttggttgtacttcccatgaaaccattattgaagacacacatttgcataacagcaatgagagaaaaattgccgtggccaaaatcatctgaagaaattagaagcatgagact

SEQ ID NO: 938225 - DNA, 120 bp, Artificial Sequence
  ENSG00000237844_6 (sequence is synthesized)
ccccaagtataaatggattcaagctacttggaatttggtaagtgtgattctcacttgagggtgaggtggtctagacctatgtatgccacaggggagaagcagtcaaacttaagtctgata

SEQ ID NO: 938226 - DNA, 120 bp, Artificial Sequence
  ENSG00000237844_7 (sequence is synthesized)
aagaatcatcacaggtcatgttaaaagtagattccagtattctcctcaaagattctgattcatttggtctggaaaaggatcctgtaacctctccagattaatctaaaatatagggtcgag

SEQ ID NO: 938227 - DNA, 77 bp, Artificial Sequence
  ENSG00000197644_0 (sequence is synthesized)
ttagtaaactccagaagcagacagggccctagatataacggcatctaagtcctgtataagagtctgcacctagattg

SEQ ID NO: 938228 - DNA, 120 bp, Artificial Sequence
  ENSG00000255433_0 (sequence is synthesized)
agtatactaaggacctggaggcaatcttgccagacttcctctgcaggcatctttaattttcttgtatcataaatttttatcttacattctatacaagggggaatcactgagctgatgagt

SEQ ID NO: 938229 - DNA, 120 bp, Artificial Sequence
  ENSG00000255433_1 (sequence is synthesized)
gagcctaaccatttgcccgacaccattgcagaaactggttattttaccaaggctttgactggaatagtgtgcttccctttaaggaatcaaacttgacttttggagctaataaaagcccct

SEQ ID NO: 938230 - DNA, 120 bp, Artificial Sequence
  ENSG00000255433_2 (sequence is synthesized)
tgggaaaactgctctcttaccttgtctacacagtctctggacagagttcctgacctgtgtatccagaatgagtgatccttgaaaatctcaaattggatcatgtccttcagctacttaaaa

SEQ ID NO: 938231 - DNA, 120 bp, Artificial Sequence
  ENSG00000255433_3 (sequence is synthesized)
cctgtcaatgatgaccagttgtacttcaagtaaaatccaaatcctctcaaggtaccaaggggagaaggaagaaacaatacaagaattggccccaggaaatatttattctaaatccggcac

SEQ ID NO: 938232 - DNA, 120 bp, Artificial Sequence
  ENSG00000255433_4 (sequence is synthesized)
atgcaaaaccccgagatagccatcaaggacaaaaatcgtcactgggaggtgggaagccctgaaggaaaagcactagtcttggtgtcagaagacctatgcttgtgttttcacgctgacagg

SEQ ID NO: 938233 - DNA, 120 bp, Artificial Sequence
  ENSG00000255433_5 (sequence is synthesized)
acatgtgtatctcaacaagtatcttcatcttctgaacctatttcctcatctataaaaggtcactaacacccattttgaaaaaccacatgtaggttaggaggattcaatgtatgtgaaaga

SEQ ID NO: 938234 - DNA, 120 bp, Artificial Sequence
  ENSG00000255433_6 (sequence is synthesized)
gttcttcaaactcctaagcacttgctgtgctgatggtaaaggtgataatgaggaggaaggagtgtctgctatgggaaaaccactgtcctaaaacttttaaatacattgttaattaatctg

SEQ ID NO: 938235 - DNA, 120 bp, Artificial Sequence
  ENSG00000255433_7 (sequence is synthesized)
caccaataagtctacgaattagattctatcataatctcaattttacagatgaggttcagagagatgacaaattttccccaatatcacacagtcattttaatggtggaacagaaattttaa

SEQ ID NO: 938236 - DNA, 120 bp, Artificial Sequence
  ENSG00000255433_8 (sequence is synthesized)
acagatcctgggtacagcctgggtctgtaacttactcaatgtataatgctgggtaagtcttaacctctctgtgcctcatctgttaaatgaaagagttgaactctaggatctctcaagttc

SEQ ID NO: 938237 - DNA, 120 bp, Artificial Sequence
  ENSG00000255433_9 (sequence is synthesized)
attccctttgagttcatctaacattatacggtcttcgttcttgttggtacaatagtttattaggtaattgtttattagataattaacagtccatgtcaccttggctatctgccaaatgaa

SEQ ID NO: 938238 - DNA, 120 bp, Artificial Sequence
  ENSG00000255433_10 (sequence is synthesized)
tagaagcacactacagatattagagagggagggttgaagggaaaagatttccaagggctttggcaggtggagaaggctttttggagaggataggcctgaaccgtttcaccattaaaagca

SEQ ID NO: 938239 - DNA, 120 bp, Artificial Sequence
  ENSG00000255433_11 (sequence is synthesized)
cttttattatttttctccatagtcactatatttacaaagattttatgtttacttaacattgtgtcatggtctggcaaaagagagcatctgcagcccctccaggaaagaagagaaatcctg

SEQ ID NO: 938240 - DNA, 120 bp, Artificial Sequence
  ENSG00000255433_12 (sequence is synthesized)
taatccctagagagagtcaggcaggaggacaaaattagtggctgcatgcttactgcagaccagcacggtatgagaacagtattttgtcatcagctgtgagtcagctaaaagttgaagcca

SEQ ID NO: 938241 - DNA, 120 bp, Artificial Sequence
  ENSG00000255433_13 (sequence is synthesized)
aatgttcaagcattgttaggagttgagtcttttctttgatgaagcatatgggagcctcattcatccacactttccttgcctccacatccttgccattatgggaatggcatataagccagt

SEQ ID NO: 938242 - DNA, 120 bp, Artificial Sequence
  ENSG00000255433_14 (sequence is synthesized)
gatgctcaaccagaagtgactttgtcccttatgaactataggcgatatccgaagacagactaaatgccatgacttggctggggaggaagtgggagcttgttcctgatatctagtggatag

SEQ ID NO: 938243 - DNA, 120 bp, Artificial Sequence
  ENSG00000255433_15 (sequence is synthesized)
aggccaacaatacttagggcaggctccccaccctccatccccagcaacagagaagtatctggtccaaaatttcaatagtgctgaggctgaaaaactctgatacaagggaacagcagttac

SEQ ID NO: 938244 - DNA, 120 bp, Artificial Sequence
  ENSG00000255433_16 (sequence is synthesized)
aagagcagctgtaaatagaaacatcttatttttactttctcctctcctccccagcattaaaaggaatagaaaggaaagcacttggaatccccaggacagcttgtggaaggttttggggta

SEQ ID NO: 938245 - DNA, 120 bp, Artificial Sequence
  ENSG00000255433_17 (sequence is synthesized)
gtgtgggtggagctttaaactgaatatgagattgatttttaaaataacttcttattttgaaacagtttaagactcacaagagttgcaaaaattatagtataaagtccccatatactcttt

SEQ ID NO: 938246 - DNA, 120 bp, Artificial Sequence
  ENSG00000255433_18 (sequence is synthesized)
agctaacttcttccaataataatgttatataaccatagtaaatggccaaaaccagaaaagtgactgtgatgcaataatactgttaactcaggtgcagatattatttggatttcaccagga

SEQ ID NO: 938247 - DNA, 120 bp, Artificial Sequence
  ENSG00000255433_19 (sequence is synthesized)
tatacgtgcactctttttgtctatttgttttggtatatagttctgtgacattttatcacatggctagactcaagtacccatcaccataatcaagatacagaactgctccaaatccacaaa

SEQ ID NO: 938248 - DNA, 120 bp, Artificial Sequence
  ENSG00000255433_20 (sequence is synthesized)
gaaactctctcatgtgttaccccttaataggcgcacgcttccttcaaccccagtctctaataaacactgatctgttctttattactgtaatttagtcattccaataattgtatataaata

SEQ ID NO: 938249 - DNA, 120 bp, Artificial Sequence
  ENSG00000255433_21 (sequence is synthesized)
taattttacagtatattgccctttgaggttttgtttactgttttatttttcattcagcataatgcacttgagtcatctaagttgttgtatgtatcaatagtttattccttattactgatg

SEQ ID NO: 938250 - DNA, 120 bp, Artificial Sequence
  ENSG00000255433_22 (sequence is synthesized)
aataggagcccattgtatggatgtaccaaagtttatttaacaatttacttgttgaaggatatctggattatttccatttcttggctgttataaataaagctgctatgagcttttgtgttc

SEQ ID NO: 938251 - DNA, 120 bp, Artificial Sequence
  ENSG00000255435_0 (sequence is synthesized)
ccagatcctccagggcgcctgcgggaccgacgagacgggcggggcgggggtcagcggaggccagggcggccttgcccgagccccagcccacctgcggccgcgcggatcaccgtggttctt

SEQ ID NO: 938252 - DNA, 120 bp, Artificial Sequence
  ENSG00000255435_1 (sequence is synthesized)
gccgcgcggatcaccgtggttcttgcggctcccgggcgtggccatttacaacccgcctcgcacctgctagagaaaagaccccggccatggatgggagacctaggacaaagatggaaaaga

SEQ ID NO: 938253 - DNA, 120 bp, Artificial Sequence
  ENSG00000255435_2 (sequence is synthesized)
gaatcaactctgccttaggcgaacaatttaccataatattctgagacaggagtggaataacacctccagccattacctgcaaatgagagctgctttaggcgggcatttgatcgagcttcc

SEQ ID NO: 938254 - DNA, 120 bp, Artificial Sequence
  ENSG00000255435_3 (sequence is synthesized)
tggactttatctgtcaatgacttccaggcatctgaaaggaaataaagaaaacccgtaagccagaaaatatgcacgtaaacccttcttaataccaatgatgtgcacaagcactgcttagaa

SEQ ID NO: 938255 - DNA, 120 bp, Artificial Sequence
  ENSG00000255435_4 (sequence is synthesized)
tccctacagtgtgaacacttgccctcctagagcagtgttttgttatttttcttagagtttaagtcagttcattacatgtgaaaggagccgaaaaggtacactccccagcagggcttcttt

SEQ ID NO: 938256 - DNA, 120 bp, Artificial Sequence
  ENSG00000255435_5 (sequence is synthesized)
ctgttggaggacacagaagcactaaggaaagtcagaccttctgaaatgaactctgaatccccaacgcattcacatcccttgatggaagtctgggtctcacacctgaatgtttggtatttt

SEQ ID NO: 938257 - DNA, 120 bp, Artificial Sequence
  ENSG00000255435_6 (sequence is synthesized)
tatgttccctgtacccctaatcaaaacagcactagtaataatgatttaagcaggactgtgggaagatcataacctctctgttccttaaagttaagaggcagaactagaaaatccttacag

SEQ ID NO: 938258 - DNA, 120 bp, Artificial Sequence
  ENSG00000255435_7 (sequence is synthesized)
ttccttccagctctaacccaagattctgtgatcttttcctgtctgctaggcatttccacatggatttcttacatcactccacatcaatgtcttctgtggaacccccatactccttactta

SEQ ID NO: 938259 - DNA, 120 bp, Artificial Sequence
  ENSG00000255435_8 (sequence is synthesized)
gttttagtcacccaggcctgaatctttagggtcatctttgactctcccctctccatattccaccaagtgtactcattcttctttcctttcctttcttttcccaccgaatgtgggctttat

SEQ ID NO: 938260 - DNA, 120 bp, Artificial Sequence
  ENSG00000255435_9 (sequence is synthesized)
taccagacatctctactctagcaatactctcattagtaaactctcgtctttgagcatctccagttcatgctcaatctgtctcatatagagagcttatcacattatgtttcctgaaattct

SEQ ID NO: 938261 - DNA, 120 bp, Artificial Sequence
  ENSG00000255435_10 (sequence is synthesized)
gcttctattcactccctcaagttttcaaagtcctcaaggtttggcactgaaagccctctaaaacctgtgccctatccaccttcccaattttctctttcactattacctcacatggatttc

SEQ ID NO: 938262 - DNA, 120 bp, Artificial Sequence
  ENSG00000255435_11 (sequence is synthesized)
aatgccatctcacctgacactactctaaacccaccaaatgcagtcctgcctttctaactttgcttacctcccttcttcttcctagagagccctgcattcttctttgcctaacccaaattc

SEQ ID NO: 938263 - DNA, 120 bp, Artificial Sequence
  ENSG00000255435_12 (sequence is synthesized)
cattttctcctttaatagaatcttctatttatcttcatgggtttttgataaccctaactcacccatggtgacctttctcttctttgaactcttctagtacttacagcctagagaacattt

SEQ ID NO: 938264 - DNA, 120 bp, Artificial Sequence
  ENSG00000255435_13 (sequence is synthesized)
actagtccttcaaaggtggatgaacacttagatgcttgcgatacaaagatgaataagaaaataaaattccagcccttatggagagctcgctgttgagtgagtgataaaagtaaacaaaca

SEQ ID NO: 938265 - DNA, 120 bp, Artificial Sequence
  ENSG00000255435_14 (sequence is synthesized)
cggacaaaacaaaatgtaagctatgagagaagaacatgtaagattcaaaaggagggagagggagggcttagctacctcagaaggtcagggaagaccgtctgagctggatcttgaagggtg

SEQ ID NO: 938266 - DNA, 120 bp, Artificial Sequence
  ENSG00000255435_15 (sequence is synthesized)
agctggagctcaccaggtgattgagggcagggagagaactccaggcagaggagaaagcacgtgtgaaggcacacaagggagagagaagggcacagaaggcgcatgagggaatggcaaaaa

SEQ ID NO: 938267 - DNA, 120 bp, Artificial Sequence
  ENSG00000255435_16 (sequence is synthesized)
acaaggctggagggggaagcagagttctcaggggctccgctaaggtgtgtgcaatgttgaaaacataatctgtatcattaacttttcatgtaaaatatggctatttctccaataagacaa

SEQ ID NO: 938268 - DNA, 120 bp, Artificial Sequence
  ENSG00000255435_17 (sequence is synthesized)
cggatcaccgtggttcttgcggctcccgggcgtggccatttacaacccgcctcgcacctgctagaggtccaatccaacaatgtctccaaatggggtgtcagggttgaagatggcctgcag

SEQ ID NO: 938269 - DNA, 120 bp, Artificial Sequence
  ENSG00000255435_18 (sequence is synthesized)
agaagaatcagaagcaccagggaagtgaggagcgcagtcaacaggaaacagcatggtcctacagaaatgcctatgctatagtcactctgccagaggctgctccagggtgaattatagtac

SEQ ID NO: 938270 - DNA, 120 bp, Artificial Sequence
  ENSG00000255435_19 (sequence is synthesized)
gcggatcaccgtggttcttgcggctcccgggcgtggccatttacaacccgcctcgcacctgctagagaaaagaccccggccatggatgggagacctaggacaaagatggaaaagaggtca

SEQ ID NO: 938271 - DNA, 120 bp, Artificial Sequence
  ENSG00000255434_0 (sequence is synthesized)
gtctgcctggagggaacccagagtggcagggaaagacctgaactaggggctggccccagatcttgattcgacttttgtaaaatgcagagatgccactgctttctggggctaaggtcttct

SEQ ID NO: 938272 - DNA, 120 bp, Artificial Sequence
  ENSG00000255434_1 (sequence is synthesized)
ttttcagggtcggctgaatgctaggaagtaaacctggtgggtagggggagctgtgcagtgggagtagccagccaggttgttgggggcctgggcccagaggggcaactctctaaggagatg

SEQ ID NO: 938273 - DNA, 120 bp, Artificial Sequence
  ENSG00000255434_2 (sequence is synthesized)
ctcaagccgagcccagtccaggcatctacagacaaatttggaatctctatatctgtatattccacaaggagggatactatagagaggaaagagctcctccattaaggtcctgactttgcc

SEQ ID NO: 938274 - DNA, 120 bp, Artificial Sequence
  ENSG00000255434_3 (sequence is synthesized)
cgaactcactgtgtgactttgggcaacttacttcagctttctgcaccgcgttttcgcttctggaaggtgaggagagggctttctgtctgcctggctgacaccattgttgtgagaatcaaa

SEQ ID NO: 938275 - DNA, 120 bp, Artificial Sequence
  ENSG00000255438_0 (sequence is synthesized)
gctcgcctggctggagcctctgggaggccacaggggaagggctccgctgccagaggtgcaagccaggagttgaagtagcacctggaggccaggaacctggtggctgttaagagcgctggc

SEQ ID NO: 938276 - DNA, 120 bp, Artificial Sequence
  ENSG00000255438_1 (sequence is synthesized)
caccagatgtcgctgcggccacaccagcctccccgccctgactcagcccacctcccacctgtctgacttgctcaccctcacggttcctattctgcctctctggacacctaggaatatgtt

SEQ ID NO: 938277 - DNA, 120 bp, Artificial Sequence
  ENSG00000255438_2 (sequence is synthesized)
cccatcacaccctccagcattaaagttatggggcgtggtgagtcagcatctgaattcccagagctacatccagacttgctgggatacctccgacacgtcactcaatcgctttgggattca

SEQ ID NO: 938278 - DNA, 120 bp, Artificial Sequence
  ENSG00000255438_3 (sequence is synthesized)
gattccaaactgcaggtcaatgtcccggccccctcaacacctgccctgctccgtcctcaccgattcaccggccgctccgtgtccagcagcttgaggatggatttcccgtccatatccgca

SEQ ID NO: 938279 - DNA, 120 bp, Artificial Sequence
  ENSG00000255438_4 (sequence is synthesized)
ggaaaaccctgaagggccaggaggtctcggccctggcctggctgggggttcggagccacgcccaccaagaggcatgcagcgggcgcctaccgtctccatggagtcgtccaccgacatgag

SEQ ID NO: 938280 - DNA, 120 bp, Artificial Sequence
  ENSG00000255438_5 (sequence is synthesized)
ggtctgcaagcgcttccgctggagcatgttggtgaattccatgtggatgggcttcatgggccccgtgtagcgcatgatccagtgtttgtccgggttgggcgcgtagttgtagctcggcgt

SEQ ID NO: 938281 - DNA, 120 bp, Artificial Sequence
  ENSG00000255438_6 (sequence is synthesized)
gctggtgggcaaggacatacacatcggtcaaacccagggacagcctggaccctgcctggcccccgccagacccgcccggatgagcagccaccctgtgctgtgtctgcagcccagggccag

SEQ ID NO: 938282 - DNA, 120 bp, Artificial Sequence
  ENSG00000255438_7 (sequence is synthesized)
gtgtgatctcctggtgggaaaggggacattggcatgtcaggggcttatccaaaccctgtttcagcgtttctccacgtgtgaagtgtgcacttgggaagctcctaagaggcacagcattca

SEQ ID NO: 938283 - DNA, 120 bp, Artificial Sequence
  ENSG00000255438_8 (sequence is synthesized)
gtgaccttgagtgacaaagtgagacagccagtcccttgtcggctctctcagggcaaagtctgtttggtgctagtgtttctttaacacctctctagactttgctcgtcttccttttgaaaa

SEQ ID NO: 938284 - DNA, 120 bp, Artificial Sequence
  ENSG00000255438_9 (sequence is synthesized)
aagggaagaaagtcaagttcagagccttcatcgggaaccagtacccaactcaaattccatagcattgctttgtgtgccttgtacctattattggtagatggcagttacctttggtgaatg

SEQ ID NO: 938285 - DNA, 120 bp, Artificial Sequence
  ENSG00000255438_10 (sequence is synthesized)
aatatccttttgcaatagattttagtttgaaataatagaaatggatttaaaaatgaaataagtcatagttttatgtgtaaggccagaattgtgaggaaggcacctgaatgtgcacatttg

SEQ ID NO: 938286 - DNA, 73 bp, Artificial Sequence
  ENSG00000255438_11 (sequence is synthesized)
ggccagaattgtgaggaaggcacctgaatgtgcacatttgggacatgccacattcttttttattttttgagac

SEQ ID NO: 938287 - DNA, 75 bp, Artificial Sequence
  ENSG00000255438_12 (sequence is synthesized)
ctgcatagtagctgggactacgggcttgtgtcaacacacctggctaattcttgtagttttagtagagatggggtt

SEQ ID NO: 938288 - DNA, 77 bp, Artificial Sequence
  ENSG00000255438_13 (sequence is synthesized)
ttggcattacaagcatgagccactgcacctggcatgctgcttaatcgtgcagcaggagtgtgttgggcaaagttctg

SEQ ID NO: 938289 - DNA, 120 bp, Artificial Sequence
  ENSG00000255438_14 (sequence is synthesized)
tgcttaatcgtgcagcaggagtgtgttgggcaaagttctgtctgagcacctgtgatgtgagggatggagggaccccaagcaggtatctatgatgatatcatggcagtggttgactatacc

SEQ ID NO: 938290 - DNA, 120 bp, Artificial Sequence
  ENSG00000255438_15 (sequence is synthesized)
agctgctggggttcgagccccagttctgtctttggccagttagtcccctcccaaggcatcagttccctcatttcctacccaaggagaatacagacagtgccagttcccaggaaggttgtg

SEQ ID NO: 938291 - DNA, 120 bp, Artificial Sequence
  ENSG00000255438_16 (sequence is synthesized)
agcactgagggagaggctgtaaggggaacccttctaaccatggccagtgcgtgatgactgcttgggagaggttatcattggtgtgtccctttgtcattagtaatcacgggtgactccacg

SEQ ID NO: 938292 - DNA, 120 bp, Artificial Sequence
  ENSG00000255438_17 (sequence is synthesized)
gcagaagtcaggtacactgggtctgtcactcactccgtgagacagcgggcaggtccccaaacttctctgatcctctctatttcctggttagtcaatgggagattaaaccaaaaccagagg

SEQ ID NO: 938293 - DNA, 120 bp, Artificial Sequence
  ENSG00000246334_0 (sequence is synthesized)
gaggacagctcagggaagcttcttgggaaatgaattctgggagttccctctgccaaggacccactgtgttaagagctttaaggtgaatgtccacttcgaggccggctcaaccaccgtctt

SEQ ID NO: 938294 - DNA, 120 bp, Artificial Sequence
  ENSG00000246334_1 (sequence is synthesized)
cagagaactctcccacactggccacagcctatctgccagcgtcacccactgtctaggtctttgcccataatgtgtcaagggcaaaacagaggggtggatatgatgcacgtgcctcagccc

SEQ ID NO: 938295 - DNA, 120 bp, Artificial Sequence
  ENSG00000246334_2 (sequence is synthesized)
ccaggtaacgcaggcctggggcagacattccttacacagctcccaccctactcttacgtccacatttaggcagccaggccaccttagccttggaggggaggacaccaacggggcccgcct

SEQ ID NO: 938296 - DNA, 120 bp, Artificial Sequence
  ENSG00000246334_3 (sequence is synthesized)
taccagcagtcagaaacagacccacatcccagtgggtacccaaggcttctttccttaggccccatcccatttaggaagttgggaaacccactgggtgagcccaaaggctaccaaagcctg

SEQ ID NO: 938297 - DNA, 120 bp, Artificial Sequence
  ENSG00000246334_4 (sequence is synthesized)
ggtcccgctgttcccacgtctgcctccctaccagactgagctccaagctgccaggggcctcgtctccatctgggtcccagttcccaccatagagctgggcatggaggacagctcagggaa

SEQ ID NO: 938298 - DNA, 120 bp, Artificial Sequence
  ENSG00000246334_5 (sequence is synthesized)
agcaagaaagaggcaggcaggggcggctagccaggtttgtgctcggactattcacacagagacatgtggcagcttacgttggacaaaacgagtaataaaaattggctttaaatatggaaa

SEQ ID NO: 938299 - DNA, 120 bp, Artificial Sequence
  ENSG00000246334_6 (sequence is synthesized)
gttaagagctttaaggtatagaccaagagaaatggcggcatctgcacacacaaaaacttgtacaggaatgttcacagcagcaataacagccaaaaagtgggaacaatcttaatgtctacc

SEQ ID NO: 938300 - DNA, 120 bp, Artificial Sequence
  ENSG00000246334_7 (sequence is synthesized)
caggagttcgagaccagcctggccagcggttccagtgaggcccatgtgaggcagtcactcagggcagtagccccctcactggcctccccacttccactcacacccactatggcccactcc

SEQ ID NO: 938301 - DNA, 120 bp, Artificial Sequence
  ENSG00000246334_8 (sequence is synthesized)
ggcctccccacttccactcacacccactatggcccactccccacacctcacattcctgcccagggtcccccagcggtcccatcttgctgagaacctgccggcactcctctttgcctgcac

SEQ ID NO: 938302 - DNA, 120 bp, Artificial Sequence
  ENSG00000246334_9 (sequence is synthesized)
gggctcactcagccacacaggtgtcctcgcggctgctccacctcacagggctggcccctgcctcaggactgcaatacccggctgtttcttctgcctggaatgctcacaccccaaaccttg

SEQ ID NO: 938303 - DNA, 120 bp, Artificial Sequence
  ENSG00000246334_10 (sequence is synthesized)
cacgtgcctcggccgtgaggaggaggagggatgcaagcttcgctcctctaccctggtgcccagcaggcgtacaccaccacatgcctactaggaagccacggggaggaggacctagtgccg

SEQ ID NO: 938304 - DNA, 120 bp, Artificial Sequence
  ENSG00000246334_11 (sequence is synthesized)
ccctagagagcgccccactgtctaccccgaggtccaagcttgcagaggccactctgaagttggctgtccatcggcctcttaactgggctgtttttcgtccaacttctctactgcacttaa

SEQ ID NO: 938305 - DNA, 120 bp, Artificial Sequence
  ENSG00000246334_12 (sequence is synthesized)
gatgatttgccaaaaacccctccaccaccatattagctggaacatttggggttgaagtgacagaactcccaaacaaataggtttgagctgtaccccgtctctaccaaaaaaaaaaaaaaa

SEQ ID NO: 938306 - DNA, 120 bp, Artificial Sequence
  ENSG00000246331_0 (sequence is synthesized)
gcttgtcgggtgttagttccgggcccagcttgggctggtggtaggtcgggagagggcgcggtctcccagcctttgcgcagattgcggggcaccaggtggggccgaggcgacgccgaacgc

SEQ ID NO: 938307 - DNA, 120 bp, Artificial Sequence
  ENSG00000246331_1 (sequence is synthesized)
cggcaggccggaaaccgcgcagccccgctggacctcgctgattgccggcggcaccggtggtttcgcgaccttgaacaggacacctaacatgatgcagcagaatttcttctaggaatctaa

SEQ ID NO: 938308 - DNA, 120 bp, Artificial Sequence
  ENSG00000246331_2 (sequence is synthesized)
agggaccatatggagcaagttatattcaagaaaaacaggactgtgaggcttagagtaccagagaggaggcaacaactgcaagtacaaaaagtcccatttggcaaaagaaatatgaagagc

SEQ ID NO: 938309 - DNA, 120 bp, Artificial Sequence
  ENSG00000246331_3 (sequence is synthesized)
acagtgtcctgcaccaggctccattacagcctggagtaaggcgaagttgttggggaaatcagacagcagggagaatggggccactgcagcccctctgaccttctttccctggactttctc

SEQ ID NO: 938310 - DNA, 120 bp, Artificial Sequence
  ENSG00000246331_4 (sequence is synthesized)
aacatactttcctgctctgctgtcattgcagctgcaggtactcactccagggtggcagccaggggctcaggtggagctgggccccacacctctgcacattcccgacctgaaaaccactcc

SEQ ID NO: 938311 - DNA, 120 bp, Artificial Sequence
  ENSG00000246331_5 (sequence is synthesized)
aggctcccagccttgactatcggttccctgagggtcttggacgctgccccagcacagggatgtcccttctgcctgggaaccaccagaggcaagctccaaggatgtagtttggcaccttct

SEQ ID NO: 938312 - DNA, 120 bp, Artificial Sequence
  ENSG00000246331_6 (sequence is synthesized)
aatgcctcttaagcccctgatgatgggtgttagtttccttacaaaggtgaacatgcttctcagaagatgctcctgccaccttctgcatcaataagcgaagtttggaggacaaagtacagg

SEQ ID NO: 938313 - DNA, 120 bp, Artificial Sequence
  ENSG00000246331_7 (sequence is synthesized)
ttacttttggaacaataggatcctctctccctctggcgttttgacagattttcagaagtagaagggaaagacctaagacactatccaaacccatgggatctatcactacctatagggtgt

SEQ ID NO: 938314 - DNA, 120 bp, Artificial Sequence
  ENSG00000246331_8 (sequence is synthesized)
gacatgtcacactagctgagccacctggccttagctgcatgtctgccaaacagccacttgaaagctacctgttagaaagcaatgtgcttgatactagatactgcctgttaaatgtgttac

SEQ ID NO: 938315 - DNA, 120 bp, Artificial Sequence
  ENSG00000246331_9 (sequence is synthesized)
actagatactgcctgttaaatgtgttacatgaattctaaaaaagataaataaataaatcttatttttggtaaatattgtcagtctctaagacagagtatactttaaatcttatactataa

SEQ ID NO: 938316 - DNA, 120 bp, Artificial Sequence
  ENSG00000246331_10 (sequence is synthesized)
ttccacctgtatttgatttatgtatattgaaaatctgtggttggttccacataagatcttaactgttacgtctttttggataaatgtttcttttatcattacaaaatgtttttctttatc

SEQ ID NO: 938317 - DNA, 120 bp, Artificial Sequence
  ENSG00000246331_11 (sequence is synthesized)
tcttttagtctttttaatctgtagtactacctctgttattacatctgtagtactacgtctgttatcacatctgttattatttgcttgatatttattttttaaaatatatcttttatctca

SEQ ID NO: 938318 - DNA, 120 bp, Artificial Sequence
  ENSG00000246339_0 (sequence is synthesized)
ctttatctttcctaacccagaaactcaaaacctggcatcatctttgacttctctctttaccttcacattcaacagtttccaagacttaaaggctttatttgtaggatctctaccactgat

SEQ ID NO: 938319 - DNA, 120 bp, Artificial Sequence
  ENSG00000246339_1 (sequence is synthesized)
cctctacagtttcacacctacatcccattctcgttcccaaatccccataactcctctcctggcccatcccttaacactgaaatcctggcttggaaaatatggtcacattcacagcagctg

SEQ ID NO: 938320 - DNA, 120 bp, Artificial Sequence
  ENSG00000246339_2 (sequence is synthesized)
ggagaaactcactgccatgttgtgacaacactatggagacgcccaggtgagggactgaggcttcctgccaacagccacatgaataagattgggaacagatcctccagccccagtcaagcc

SEQ ID NO: 938321 - DNA, 89 bp, Artificial Sequence
  ENSG00000246339_3 (sequence is synthesized)
gaataagattgggaacagatcctccagccccagtcaagccttcagatgactgcagtctcatgaaagaccctgtgccaaaaccacccagc

SEQ ID NO: 938322 - DNA, 120 bp, Artificial Sequence
  ENSG00000246339_4 (sequence is synthesized)
gaacttaaaagttaaaacaaaaccaccaccaccaccaccaccacccagaaaaaacacccagctaagccacttctgaattcctaacctacagaaactatgaaataataaatatttgtattt

SEQ ID NO: 938323 - DNA, 120 bp, Artificial Sequence
  ENSG00000246339_5 (sequence is synthesized)
tgcaccccagagacaggctcgcagctgccgaccttatccactcgccctttctgctggagcccaggcccagtgctccagcaaggaggctgagaaaatgctgaagactgatgcccacggggg

SEQ ID NO: 938324 - DNA, 120 bp, Artificial Sequence
  ENSG00000246339_6 (sequence is synthesized)
acagcttgggctaaggataacttcctctacttggctctcctccaaaggtacgcggccacagcaggcaggggcttggcagtgtgggaggagacaccacagaagacagggaagaactaccag

SEQ ID NO: 938325 - DNA, 120 bp, Artificial Sequence
  ENSG00000246339_7 (sequence is synthesized)
gagctgagacttcaagaagctaaataaggtgtccaacaccacagagcatggagcaaaggacacgggactgcaaatcttcctaactcgtgtgctcatctggctatctcaccagggccttaa

SEQ ID NO: 938326 - DNA, 120 bp, Artificial Sequence
  ENSG00000246339_8 (sequence is synthesized)
gaggaagcccaacagctgcagccgagcgtccaaaaaaagaacacagggcttctactccagggtttcctcgccagggaaccccaaacacacaggacctggagaagccgggtagagctggct

SEQ ID NO: 938327 - DNA, 120 bp, Artificial Sequence
  ENSG00000246339_9 (sequence is synthesized)
atctctccacccccaaactagtcccgactcggatcctccttttcctatcctctttctcttgctctcccgtctcctattcacttttcttctcctttcctcttgattattataaacaaatgc

SEQ ID NO: 938328 - DNA, 120 bp, Artificial Sequence
  ENSG00000246339_10 (sequence is synthesized)
tttccaagtcttaccgccatcatatgtgtacatatgcaacccttactgttaccaatttgttgaagtcaagacaggaggaggcaaagtttaaaaatcagaagtattgcaggaaatgaaaat

SEQ ID NO: 938329 - DNA, 75 bp, Artificial Sequence
  ENSG00000246339_11 (sequence is synthesized)
ctccatctagggaacaacaacaacaaaaagattatgaagccttaggaagaacagggatattcacctgctgctgag

SEQ ID NO: 938330 - DNA, 120 bp, Artificial Sequence
  ENSG00000246339_12 (sequence is synthesized)
gtcgagaagacccgaccgcagatggcggggaggatgctcccggcggcgtgggaaccgggtctgactcccgagccaccgccgcttccgcaggggcgccggccccgggaaagtcaagtcata

SEQ ID NO: 938331 - DNA, 120 bp, Artificial Sequence
  ENSG00000246339_13 (sequence is synthesized)
aatccctgaatctaaaactccattctcagagaaaaggcctccaaggacgggcgccgtgcgcggcaactgcctgcagttttgaagccctttgactatttcataacaaagacaaggccgggc

SEQ ID NO: 938332 - DNA, 120 bp, Artificial Sequence
  ENSG00000246339_14 (sequence is synthesized)
ggcttggacgcttaggaaaatcctggggctttgcaaaaacaacaggttaatctagtcgtgtgggatgatcaccaaaacaagacaggaaagaagaacaccgtgtcaatgctgaaaagccag

SEQ ID NO: 938333 - DNA, 120 bp, Artificial Sequence
  ENSG00000246339_15 (sequence is synthesized)
acgttttccacagtcccaaggaacacgtgactgtgtgtttccacacttgagaagtcaggataagaccccttggataatggaacaggggatgggggtgggagcaagcaccctacctggtca

SEQ ID NO: 938334 - DNA, 120 bp, Artificial Sequence
  ENSG00000246339_16 (sequence is synthesized)
cctgcttaacttagaaaccagcttttaaaacctgtaactgcagtatgagctacgatcaaatttgtcttaacgtattttttttaatgtttttaatacccagaacacagggcttctactcca

SEQ ID NO: 938335 - DNA, 120 bp, Artificial Sequence
  ENSG00000246339_17 (sequence is synthesized)
acgtgcagttacctgctacctgttcgactcagtcttttacgttggagtaacttaacacattgctgcccttaactttgacttacttgcttttaaagatgatgaagctggccaggcgccgtg

SEQ ID NO: 938336 - DNA, 63 bp, Artificial Sequence
  ENSG00000246339_18 (sequence is synthesized)
tacttgcttttaaagatgatgaagctggccaggcgccgtgactcatacctataatcccagcat

SEQ ID NO: 938337 - DNA, 120 bp, Artificial Sequence
  ENSG00000246339_19 (sequence is synthesized)
atattttgacattttacagcacttattatctctactttgtattttgaaactgaatccaaaatagttttgcatttgttgtttaacagtcatgtatgtagtttttttttttttttctttttt

SEQ ID NO: 938338 - DNA, 81 bp, Artificial Sequence
  ENSG00000246339_20 (sequence is synthesized)
cgtgcctccctgagcagctgggaatacaagcatacaccaccatgcccagctaatttatttttagtagagatgggatttcac

SEQ ID NO: 938339 - DNA, 61 bp, Artificial Sequence
  ENSG00000246339_21 (sequence is synthesized)
ctgggaatacaagcatacaccaccatgcccagctaatgtcaggcaatctgcccacctcagc

SEQ ID NO: 938340 - DNA, 120 bp, Artificial Sequence
  ENSG00000246339_22 (sequence is synthesized)
cagcccctccatgtgtgtagatatttatccacatccaaaaattaggaaaagcaggacgcattgaacctttggtacccagcagcaggagcctgtgggtcttctgtctggagcacaatcaca

SEQ ID NO: 938341 - DNA, 120 bp, Artificial Sequence
  ENSG00000246339_23 (sequence is synthesized)
aggaccgagcatcagcagcatccactgtcctttcagctccaaattttaaactcccgtaagagagacattattggcccagcttgggtcgtgtgtccacccctttaatcaatcagctttggc

SEQ ID NO: 938342 - DNA, 120 bp, Artificial Sequence
  ENSG00000246339_24 (sequence is synthesized)
caagcagcaggtcatcctggtccaaacatcacagttgggggcctcacttgtaaatagagcttgttcccaaaaaagagggaggcacacaccattcatttgtttattcattcattcaatcag

SEQ ID NO: 938343 - DNA, 120 bp, Artificial Sequence
  ENSG00000246339_25 (sequence is synthesized)
caaatagttgagcatctatagaaatatatttaaggttctattatgtacacaaaatgtataaaacatggccctgccctcacaccatgaaagttaccacataaaaagaagtcaccagataaa

SEQ ID NO: 938344 - DNA, 120 bp, Artificial Sequence
  ENSG00000246339_26 (sequence is synthesized)
aaaagcataacagtattcataagtactcatgagtgaccatcaattcagttacacatgatggaagataattcattatacctagtataagccagtgacggtaaaaatagttagcagcaatgt

SEQ ID NO: 938345 - DNA, 120 bp, Artificial Sequence
  ENSG00000246339_27 (sequence is synthesized)
gtacatgatcaacaaaagctcacagcagcaccatttacacaaaaacagaaaagtacccagatgtccatcagaggtagaccagataaaatataaaatataccaccacacaatggctaacac

SEQ ID NO: 938346 - DNA, 120 bp, Artificial Sequence
  ENSG00000246339_28 (sequence is synthesized)
aaaaagcgagattccatctcgaaaaaaaaaaagtgtatatgtatagtgtatgcatgcacagaatactttacagcaataagaatgagtgttctgcaaatatacacaatattgctgactctc

SEQ ID NO: 938347 - DNA, 120 bp, Artificial Sequence
  ENSG00000246339_29 (sequence is synthesized)
ccaatgttaaacaaaagcatccagacacacaacaatgtgtacagtatatgattccattgatagaaagcttaaaaacaggcaaaattaattcacccttatggagtcttaagtaaggggaac

SEQ ID NO: 938348 - DNA, 120 bp, Artificial Sequence
  ENSG00000246339_30 (sequence is synthesized)
aaaaggggccatctgggcagtgataatgctgtttcttgagctgggtgctgggttcacaggtgtgttcagtttgtcacattcatcaagcttacacttctcatacatcttcttttctatatg

SEQ ID NO: 938349 - DNA, 120 bp, Artificial Sequence
  ENSG00000246339_31 (sequence is synthesized)
gccggcgttcgcgagcgggggcgcggacgcgggcgcgcgctcgccactttcccgaccgcgtccgaagaccgccgaggcctcccgcagctccgcggtgacacccggttcctctacttggct

SEQ ID NO: 938350 - DNA, 120 bp, Artificial Sequence
  ENSG00000240476_0 (sequence is synthesized)
agaagctcttgggagcatgtggacagttgtggctgctcctgagctgacactaactgctcatgactcctctgtgggagaagtaggtggtttcctagaggaagaagtttgggtaatgaagcc

SEQ ID NO: 938351 - DNA, 120 bp, Artificial Sequence
  ENSG00000240476_1 (sequence is synthesized)
acagagatttgctgatacatttgctaggcacgacttctggtcatttagaaagctattttgtggcttcatcaataaggtattccccagctgtgttactccttcgcattgttatctctttcc

SEQ ID NO: 938352 - DNA, 120 bp, Artificial Sequence
  ENSG00000240476_2 (sequence is synthesized)
ctggaattgaaggcttcctggtctgaggcaaggacaattattccctcactgtcaaccctgatctctggctgcagtaatgagtagaggaaatgaagaaataagaatggaagcataatcatt

SEQ ID NO: 938353 - DNA, 120 bp, Artificial Sequence
  ENSG00000240476_3 (sequence is synthesized)
tgtccgaggtcacagagggagatgattacacagctggaatgtaagcctcagtactttactgaatccttggctttgtccatgggcccagctacaggcataaagcttttctcttccccagca

SEQ ID NO: 938354 - DNA, 120 bp, Artificial Sequence
  ENSG00000240476_4 (sequence is synthesized)
gacttcgagtaccagctttcaaatttatttgacattgaatctaagctttgtgaccagtatgtagaaggagaagaaggggaggaattacttatcctttggcatacattagcatgcaaataa

SEQ ID NO: 938355 - DNA, 120 bp, Artificial Sequence
  ENSG00000240476_5 (sequence is synthesized)
atcctttctctgcattgtggaagggtctgaaattatcacatatacaatgtatcttttatcaatggccttgcatacaaattttactttgaagaatccagatttagaggtcttctccaaaca

SEQ ID NO: 938356 - DNA, 120 bp, Artificial Sequence
  ENSG00000240476_6 (sequence is synthesized)
tttgcattgtttctttttcttaggatcagaacttctacctattgtcattttaagaaaaaagatcatgaattaattaatttattcattatttacacccttatattctttcccaaatgtttt

SEQ ID NO: 938357 - DNA, 120 bp, Artificial Sequence
  ENSG00000240476_7 (sequence is synthesized)
aatgtggcttacattgtatacatgtacacaataaatatttatatttaaataagttataatcacagaatgagaatattattacaaccactcatactcattcaaatagcttgattatatcat

SEQ ID NO: 938358 - DNA, 120 bp, Artificial Sequence
  ENSG00000240478_0 (sequence is synthesized)
ttttggtatctagggtatctctgagtagtcgatttttgatctctacccatcctcaaaactgaaaaccagtcctccatttctccagggcttaccttttcatcacttgaagaccagtggtta

SEQ ID NO: 938359 - DNA, 120 bp, Artificial Sequence
  ENSG00000240478_1 (sequence is synthesized)
agtattgctgagtactttgcaatatgaattcctgcaatttgcaggaatttgccacgcttttcaggtgatcatgcttggcactgtatgccacaatgtggaaacttgacggtatcctcaaga

SEQ ID NO: 938360 - DNA, 120 bp, Artificial Sequence
  ENSG00000240478_2 (sequence is synthesized)
cactagagagcatgaccaggggatgatgccagggtgggcaagacatagcatgcattatacctgtgtagctaaagtgcccacaagagactgcaaaacttctctaagcagcaggtatgtcat

SEQ ID NO: 938361 - DNA, 120 bp, Artificial Sequence
  ENSG00000276500_0 (sequence is synthesized)
ggaagaactgtccttaaatccagagcatgagccactgcacccggctgactgaggccattctaaggaatatacagcaagctcttcactacccatttttgttaactgaggtataactaaatg

SEQ ID NO: 938362 - DNA, 120 bp, Artificial Sequence
  ENSG00000276500_1 (sequence is synthesized)
caagctcttcactacccatttttgttaactgaggtataactaaatgatacacaggcccagcacagtggcacgaacctatagtcacagcaacttgggaagctgaggtgggaggattgcttg

SEQ ID NO: 938363 - DNA, 120 bp, Artificial Sequence
  ENSG00000276500_2 (sequence is synthesized)
tgagtccagcctgggcaacacacgtgtataggtctatgagtctggaagaatgtatatagccatggaatcactaccatgtcaaaacatagggtatttccattatcccaacaagttccctcc

SEQ ID NO: 938364 - DNA, 120 bp, Artificial Sequence
  ENSG00000276500_3 (sequence is synthesized)
tgcccctctgcagtcaaacacttccctcccccagctcctggcaactgctgatctgaactgtagacctgaaaatgtcattcagaacccatttcatctggacccttctctctgtgtcaacat

SEQ ID NO: 938365 - DNA, 120 bp, Artificial Sequence
  ENSG00000287614_0 (sequence is synthesized)
cagagaatgaaagatggaagaaatgaagtagtggacaagcaaacatcaatgtggagacagattctcattttccccatttggtcttggctgcttaagaaaaggtgaaaagcaggagaagat

SEQ ID NO: 938366 - DNA, 120 bp, Artificial Sequence
  ENSG00000287614_1 (sequence is synthesized)
gcttcccggtactgcaacgtagggcaaagtggagctgacaaatggaaagaatgtgaccttgggaatgagattcttgccttttctgagatactcgtacctggctggtatcagttctgtcag

SEQ ID NO: 938367 - DNA, 120 bp, Artificial Sequence
  ENSG00000287614_2 (sequence is synthesized)
acacagcacttcccacgtaagagggaacacgcccaggtggacagcggtactgcaggacgcgagatgcacaaggcagaggaagagcaagggcactgcaggcactcgggaaggtgtctctag

SEQ ID NO: 938368 - DNA, 120 bp, Artificial Sequence
  ENSG00000287614_3 (sequence is synthesized)
aaagtctaatctggattccgcgggataggaaagtgccctctccgggagagctaagaatagagacaagtcagccggggtcggggccagtacccagaaaacggcatggcctattctagggat

SEQ ID NO: 938369 - DNA, 120 bp, Artificial Sequence
  ENSG00000287614_4 (sequence is synthesized)
tcaaagatattcaccagcatttagaatgtgggggtgggagattacaaaagattggcaagggtaaaatcttgcaagatatttgaaccatattaaaccaacttttgcctgaaagcaatagaa

SEQ ID NO: 938370 - DNA, 120 bp, Artificial Sequence
  ENSG00000287614_5 (sequence is synthesized)
agccattgaaaaattttaggcagaggaatagattcttgtcatctctacattgaaaataatccacccaaattaccatttgatccagcaatgccccttctgggtgtatatatacccaaaaga

SEQ ID NO: 938371 - DNA, 120 bp, Artificial Sequence
  ENSG00000287614_6 (sequence is synthesized)
attaaaagcagggtctcaaagggatatttgtacactcttgtttatggcagcattattgacaatagctgagaggtggaagcagccaaatgtccatcaacagatgaaaggaaaaaccagatg

SEQ ID NO: 938372 - DNA, 69 bp, Artificial Sequence
  ENSG00000276502_0 (sequence is synthesized)
cttctgggcactggatcagcggatggctgaggagaggcactccctgcagggcaaatctggagattttct

SEQ ID NO: 938373 - DNA, 120 bp, Artificial Sequence
  ENSG00000276502_1 (sequence is synthesized)
tccctgcagggcaaatctggagattttctcaagcctctttatgaaaatggagagacctcacaagagatgctaatggacagctgaccctgctccctgctccatcacaggtgcgtagtatac

SEQ ID NO: 938374 - DNA, 120 bp, Artificial Sequence
  ENSG00000276502_2 (sequence is synthesized)
aaacctctactaacttcttgggcttctgaataaaggaaaggactacctaatgacagtaatagcttgactgctgaagaattatgtcaattaataaaaattgcttcataggaaaaagatgaa

SEQ ID NO: 938375 - DNA, 120 bp, Artificial Sequence
  ENSG00000276505_0 (sequence is synthesized)
attctttctgtaacctcaagatggtataaaatcatcaaccatctggctatctctttgacttcctatatttttttgactcccttgcatattagttcttctactaatctgccttttttcagt

SEQ ID NO: 938376 - DNA, 120 bp, Artificial Sequence
  ENSG00000276505_1 (sequence is synthesized)
ggtcgtggtggtaacgggtgccagcctggaccagtcctgcatcgtggagcttcactctggacattctaaggggcagactgtggctggggcgtgagggataataaaggtggtgtgaccgaa

SEQ ID NO: 938377 - DNA, 120 bp, Artificial Sequence
  ENSG00000276508_0 (sequence is synthesized)
tagggatgggttgggagagaagggagtggattttttaacacgtcataccacacccttctgggcttggtcttgggtccaagctgccctggaatttggagttcggggtcttgtacttccact

SEQ ID NO: 938378 - DNA, 120 bp, Artificial Sequence
  ENSG00000276508_1 (sequence is synthesized)
ctccatagcaactgtttactgaccccttcctctactccctctgagaccctggccatcctcctggggtcttcagtgggcaaagcttcggccctctggctcgaagcgtctctgtttcttgca

SEQ ID NO: 938379 - DNA, 120 bp, Artificial Sequence
  ENSG00000276508_2 (sequence is synthesized)
tttctgcctgcatgctggggaggcctggaaacactcaccctggttcctcaatagaactgctgtgacaattagaattcttttgtcaaactgttctttatctaaattcagagagtaaattta

SEQ ID NO: 938380 - DNA, 120 bp, Artificial Sequence
  ENSG00000276509_0 (sequence is synthesized)
aactcttatggcctggaatccttgcgtttctgctgatgactgtcattttagagtacttactaaagacaatggttggggaaatagatattttaaaaataagggaaaaagtgggtagggtaa

SEQ ID NO: 938381 - DNA, 120 bp, Artificial Sequence
  ENSG00000276509_1 (sequence is synthesized)
atagatattttaaaaataagggaaaaagtgggtagggtaaacccaggcttacttatgtaaactctgagtgctgaagttagaagacaacttttaagattaaaaaaaaaaaaaaaaaaaaag

SEQ ID NO: 938382 - DNA, 120 bp, Artificial Sequence
  ENSG00000276509_2 (sequence is synthesized)
ctgagcctccagaacccagatgacaccttgatttcagacttctggcctccaaaactgtgagagaagaaatgtgttgttttaaggcacccagctggtgacagttcatcacagtagccacag

SEQ ID NO: 938383 - DNA, 120 bp, Artificial Sequence
  ENSG00000276509_3 (sequence is synthesized)
gaaactaatacccagccccatggcaggcataggtcaagcctggcacagtctggatctcagtccctgactcagaccctggatgctcgctgccttgtacagaaacaacctgctcaaccaaac

SEQ ID NO: 938384 - DNA, 120 bp, Artificial Sequence
  ENSG00000276509_4 (sequence is synthesized)
agggtgaccctgctgaagccgcaaatgtccaacagtcctgccaaccgtggatgcttctgtagcttccctttagctctccctcctggcatgaaaccagacacagactacccagaagatgaa

SEQ ID NO: 938385 - DNA, 120 bp, Artificial Sequence
  ENSG00000276509_5 (sequence is synthesized)
ctgagcactctgcaatgggcccagcacgctgctgcatctgagaccatcttctcggccctaacaaccctggcaggctcttctctctggtggggaaattgggcttagggaaaggacatcttt

SEQ ID NO: 938386 - DNA, 120 bp, Artificial Sequence
  ENSG00000276509_6 (sequence is synthesized)
aggacagtcatcccaccaagtagaatgactctatgcagcctgaatactgtttccctgggaggaaaaaaatccaaagcataaacttttataagctgttttaattaaaacactctttgtaaa

SEQ ID NO: 938387 - DNA, 120 bp, Artificial Sequence
  ENSG00000276509_7 (sequence is synthesized)
gtgatgtatttgaagcaagggaggagaaaggttttctggcaaaagtgtcttttgtggtgtttctttggtgagcaaaaggaactcaactgatgaaaacaccaaagcacaaacattctgtgg

SEQ ID NO: 938388 - DNA, 120 bp, Artificial Sequence
  ENSG00000276509_8 (sequence is synthesized)
ctccataaagggctttggagggcaggaggagcaccaccaacattttaaatgtgaggccaaccataaaacgattcatgattagtccactaaaatgtgtttattggcaaataggaaagagat

SEQ ID NO: 938389 - DNA, 120 bp, Artificial Sequence
  ENSG00000276509_9 (sequence is synthesized)
ccctgaaaataagcaggaacaggtgattttcaaggctgacttaggtctcctattcagctactcaacaattatatccgagctacgtgcagtggctcaccctgtaatcccagcactttggag

SEQ ID NO: 938390 - DNA, 120 bp, Artificial Sequence
  ENSG00000276509_10 (sequence is synthesized)
gctgagacaagaggcgaaaagttcgagaccagcctgggcaacctagcgagacaccatctctatgaaaaatttaaaaattagcctagcatgtgtcttgtgcctgtggtcccagctactcag

SEQ ID NO: 938391 - DNA, 68 bp, Artificial Sequence
  ENSG00000276509_11 (sequence is synthesized)
ggttaactgtctcaagaaaaaacaaaaattaaaacaaacaataacaacaacaacaacaacaaaaaaaa

SEQ ID NO: 938392 - DNA, 120 bp, Artificial Sequence
  ENSG00000276509_12 (sequence is synthesized)
ttaaaacaaacaataacaacaacaacaacaacaaaaaaaaacggcaaagttagaacacacaaaagatagtatagttccttacccatccaccacttggttttgaggagaaaagggaagtaa

SEQ ID NO: 938393 - DNA, 120 bp, Artificial Sequence
  ENSG00000276509_13 (sequence is synthesized)
gaagagttgaagagaagaaaaacagaacagaagagtgggaaaggaagatgaaagggtgctatggagtactatgcacctgtttagaagtggggaagtagcacaaacactagcaaaagaaga

SEQ ID NO: 938394 - DNA, 120 bp, Artificial Sequence
  ENSG00000276509_14 (sequence is synthesized)
accaccatggagttcctccttgcacatctctctcccctcctgaaggcctagggtgagcccacagcattgttccagcagtgagggagtcttcactgcctcctgagactctctcacggctct

SEQ ID NO: 938395 - DNA, 120 bp, Artificial Sequence
  ENSG00000276509_15 (sequence is synthesized)
taagatacctccctgaagtccctccaaagaattcaatgtgcccctagtctaaatcagtttcctccatcataaatactcatagatgacgcaacaataaagcgttaataacgataatggcaa

SEQ ID NO: 938396 - DNA, 120 bp, Artificial Sequence; identical to SEQ ID NO: 912989
  ENSG00000230606_0 (sequence is synthesized)

SEQ ID NO: 938397 - DNA, 120 bp, Artificial Sequence
  ENSG00000230606_1 (sequence is synthesized)
tgcctggaatcccaaagtgtcagatttactgaagaatatttcattgtaattactttttatactttataggtcaagagctctgttttaaatacaaaatttattgaatatactttttcaaac

SEQ ID NO: 938398 - DNA, 120 bp, Artificial Sequence
  ENSG00000230606_2 (sequence is synthesized)
atctacaaagggaaccccattaggctaacagcagatctctcagctgaaatcctacaagccagaagggattgggggactatatttaacattattaaagaaaatcttcaaccaagaatttca

SEQ ID NO: 938399 - DNA, 120 bp, Artificial Sequence
  ENSG00000230606_3 (sequence is synthesized)
taaagaaaatcttcaaccaagaatttcatatacagctaaactaagctttctaaatgaaggagaaatgagatcatttacagacaagcaaattctgagcactattcacaatagcaaagacat

SEQ ID NO: 938400 - DNA, 89 bp, Artificial Sequence
  ENSG00000230606_4 (sequence is synthesized)
ggacatggatgaagctggaagccataaacttcagctaattaacacaggaacaggaaaccaaacaccacatgttctcataagtgggaacc

SEQ ID NO: 938401 - DNA, 120 bp, Artificial Sequence
  ENSG00000230606_5 (sequence is synthesized)
agcctgttgggaagtttctccacagacactacccaaagcagtgcttcactacagtggcagacagacctgaaaattttcatctgaagcagcagagtgaactgcagaggcaggtcaccaacc

SEQ ID NO: 938402 - DNA, 84 bp, Artificial Sequence; identical to SEQ ID NO: 912982
  ENSG00000230606_6 (sequence is synthesized)

SEQ ID NO: 938403 - DNA, 120 bp, Artificial Sequence; identical to SEQ ID NO: 912983
  ENSG00000230606_7 (sequence is synthesized)

SEQ ID NO: 938404 - DNA, 120 bp, Artificial Sequence; identical to SEQ ID NO: 912984
  ENSG00000230606_8 (sequence is synthesized)

SEQ ID NO: 938405 - DNA, 120 bp, Artificial Sequence; identical to SEQ ID NO: 912985
  ENSG00000230606_9 (sequence is synthesized)

SEQ ID NO: 938406 - DNA, 120 bp, Artificial Sequence; identical to SEQ ID NO: 912986
  ENSG00000230606_10 (sequence is synthesized)

SEQ ID NO: 938407 - DNA, 77 bp, Artificial Sequence; identical to SEQ ID NO: 912987
  ENSG00000230606_11 (sequence is synthesized)

SEQ ID NO: 938408 - DNA, 120 bp, Artificial Sequence; identical to SEQ ID NO: 912988
  ENSG00000230606_12 (sequence is synthesized)

SEQ ID NO: 938409 - DNA, 120 bp, Artificial Sequence
  ENSG00000230606_13 (sequence is synthesized)
agactatggggctttctagatatagaaacatgtcatctgtaaacagagacagtttgacttcctgtctattcctctcttccctcctctgtttggatgcccttccagttttgcacattcagt

SEQ ID NO: 938410 - DNA, 120 bp, Artificial Sequence
  ENSG00000230606_14 (sequence is synthesized)
gtaatgttggctgtgggtttgtcatggctagctctcatcattttggcacttctgactagaagggcaagaggggccagtgttgttgttacctgaaaggtaagtgcagcccacaaaaatgca

SEQ ID NO: 938411 - DNA, 120 bp, Artificial Sequence
  ENSG00000230606_15 (sequence is synthesized)
gtgaagaagaagatgtattatgcatatgtttaagttaatacaattgagatatatttagcagacagaatcaatagagttgatgagtgactgactggatgtgtggggagtttatatcactcc

SEQ ID NO: 938412 - DNA, 120 bp, Artificial Sequence
  ENSG00000230606_16 (sequence is synthesized)
ggactggggtagggctgaacagctgcattcgaggctggtggagggtgggctgggcatgggatgcacaaatggaaattccactgggtctgcagctcacacataggcatgaccagcatagag

SEQ ID NO: 938413 - DNA, 120 bp, Artificial Sequence
  ENSG00000230606_17 (sequence is synthesized)
atagagaggccccagtgctgctgagtaactgtgattccccaggtgatggcatcagctgagaagggaaggaagcccatgagaggacactgaagaaggagtgagcagacaataagaagccca

SEQ ID NO: 938414 - DNA, 120 bp, Artificial Sequence
  ENSG00000230606_18 (sequence is synthesized)
cagaagacagagaaggaacaactagagggagaagccaaggcaggcgtgtgtggtaacacataggaactgagggagaggacatttcaagatggtggggatgccatacaacaggactatgtg

SEQ ID NO: 938415 - DNA, 120 bp, Artificial Sequence
  ENSG00000230606_19 (sequence is synthesized)
atggtttttggctgtgtccataggaagtcacaacaggcaagggaaagaaaccagaacccagtcatggagttaagaagtgagtcagagagtagatgggtagggacagtgaggtaaggcctc

SEQ ID NO: 938416 - DNA, 120 bp, Artificial Sequence
  ENSG00000230606_20 (sequence is synthesized)
tttctaaggaagtttggctgaaggatagactagctggacacatgctggctgtgtggggtagagggaggaatgatggagggtaggagagccttgagcctgcgagaagagtctcttagaata

SEQ ID NO: 938417 - DNA, 120 bp, Artificial Sequence
  ENSG00000230606_21 (sequence is synthesized)
gagaagctgaagttaaagttgtggaagagagtggggataactgagtgacagataatcaggagaagaaaaggagatccagactcatgacagagagatgacctttgccaagagcacagccgt

SEQ ID NO: 938418 - DNA, 120 bp, Artificial Sequence
  ENSG00000230606_22 (sequence is synthesized)
aataaacatgagatgctctctttccagaatttctcttgcctgacacagcataggaagatgctgaacggccacacagtgatccattggtcagtggtgacataaggaggtcagaggggagga

SEQ ID NO: 938419 - DNA, 120 bp, Artificial Sequence
  ENSG00000230606_23 (sequence is synthesized)
gtgaggagaagtagggaagactaggtggttgtaggcctccttcatctgttcattggctgtggcattaggccagctactctttgcacttctgtaaagtgagacggtcgatcttgtctgcct

SEQ ID NO: 938420 - DNA, 120 bp, Artificial Sequence
  ENSG00000230606_24 (sequence is synthesized)
ctctagaggatggttgcaggtgtcaaatggggtagttaggtgggagggcatttcacaaagttaaaaaatatgactttggaggcttgttatattgatgaggattataatccctgagaattc

SEQ ID NO: 938421 - DNA, 120 bp, Artificial Sequence
  ENSG00000230606_25 (sequence is synthesized)
taaatatgtatgcacccaatacaggagaacccagattcacaaaacaagttcttagagacctacaaagagactcaggctaccacacaacaatagtgggagacattaacaccccattgtcaa

SEQ ID NO: 938422 - DNA, 120 bp, Artificial Sequence
  ENSG00000230606_26 (sequence is synthesized)
aatagtgggagacattaacaccccattgtcaatattggatcatctaggcagaaaattgaccagaaaggacttgaacacagctctggatcaagtgaatctcatagatatctacagaactct

SEQ ID NO: 938423 - DNA, 120 bp, Artificial Sequence
  ENSG00000230606_27 (sequence is synthesized)
atagatatctacagaactctccaacacgaaacaacagactatatattattcttagtggcatatgacactctaaaattgatcacaaaattagaattaaaacactcctcagcaaatgcaaaa

SEQ ID NO: 938424 - DNA, 120 bp, Artificial Sequence
  ENSG00000230606_28 (sequence is synthesized)
ctcactcaaaaccacacaactacatggatattgaacaacgtgctcctgagtgacttctgggtaaataataaaattaaggcagaaatcaagaagctctttgaaaccaatgagaacaaagag

SEQ ID NO: 938425 - DNA, 120 bp, Artificial Sequence
  ENSG00000230606_29 (sequence is synthesized)
gacactacccaaagcagtgcttcactacagtggcagacagacctgaaaattttcatctgaagcagcagagtgaactgcagaggcagagatagaatctcactatgttgaccaggctggtct

SEQ ID NO: 938426 - DNA, 120 bp, Artificial Sequence
  ENSG00000230606_30 (sequence is synthesized)
aaatatatattcatccaatgcaggagcacccagattcataagtaaagttcttagagacctacaaagtatgtttcacagtaatagtgggagatttccacactccaatgacagtattagaca

SEQ ID NO: 938427 - DNA, 120 bp, Artificial Sequence
  ENSG00000230606_31 (sequence is synthesized)
gatgattgaggcaaaaaaatgaacaaagatattcaggacctgaactcaacattggatcaaatggatctgatagacctttacagaactctgcactcaaaaacaacagaatatgcattcctc

SEQ ID NO: 938428 - DNA, 120 bp, Artificial Sequence
  ENSG00000230606_32 (sequence is synthesized)
acatcatcatatgccacatactctaaaatcaaccacataattggacataaagcaatcctcagcaaatgcaaaacaactgaaatcataccaaatacatactgagatcacagtgcagtaaaa

SEQ ID NO: 938429 - DNA, 120 bp, Artificial Sequence
  ENSG00000230606_33 (sequence is synthesized)
tcacagtgcagtaaaaatagaagactaagaaaattgctgaaaatcatgcaattacatggaaatcaatcaacatgctcctgaatgactttttaataaataatgaaattaaggcagaaatca

SEQ ID NO: 938430 - DNA, 120 bp, Artificial Sequence
  ENSG00000230606_34 (sequence is synthesized)
tagagcctctggacacagctaagacaatgttaggagggaaatttatagcactaaatcccacatcaaaaagttaggaagaactcaaattaataacctaacatcacaactgaaagaactaga

SEQ ID NO: 938431 - DNA, 120 bp, Artificial Sequence
  ENSG00000230606_35 (sequence is synthesized)
gaagcaagacaaaaccccaaagctagaggaagacaagaaataactgaaaatctgagctgaactgaaagaaaccgagacatgaaaaaaagaaattcaaaagatctatgaattccggtttct

SEQ ID NO: 938432 - DNA, 120 bp, Artificial Sequence
  ENSG00000230606_36 (sequence is synthesized)
cacatatatagggaaaaacagggagttaacttggcccagcagcactgtttgtggggctaacaccctgtctgtgtatctcacaccaaccctaagctttgtttctctcctgtcactttgctc

SEQ ID NO: 938433 - DNA, 120 bp, Artificial Sequence
  ENSG00000230606_37 (sequence is synthesized)
ctatttctttcatgtgaaagaatgttcattttctttgaaaatgagctcatttcctcattttctttccatatttcagcaggaacaaagatcaccacaactggctccccttcaactatgtta

SEQ ID NO: 938434 - DNA, 120 bp, Artificial Sequence
  ENSG00000230606_38 (sequence is synthesized)
aaaatcttcaaccaagaatttcatatacagctaaactaagctttctaaatgaaggagaaatgagatcatttacagacaagcaaattctgaggtgatggcatcagctgagaagggaaggaa

SEQ ID NO: 938435 - DNA, 120 bp, Artificial Sequence
  ENSG00000230606_39 (sequence is synthesized)
tggtcttgatctcttgacctcaagatccacctgcatcagcctcccaaagtgctgagattatagacatgagccactgcacttggccaggattccctatttaaatggtgctgggaaaactga

SEQ ID NO: 938436 - DNA, 77 bp, Artificial Sequence
  ENSG00000230606_40 (sequence is synthesized)
catgaaaccccgaactgtaaaaaaccctagaagaaaatctaggaagttccattcaggacataggcatgagcaaagat

SEQ ID NO: 938437 - DNA, 120 bp, Artificial Sequence
  ENSG00000230606_41 (sequence is synthesized)
aaccccgaactgtaaaaaaccctagaagaaaatctaggaagttccattcaggacataggcatgagcaaagattttacgatgaaatcatcaatagcaattgcaacaaaagcaaaaattgat

SEQ ID NO: 938438 - DNA, 71 bp, Artificial Sequence
  ENSG00000230606_42 (sequence is synthesized)
aaattgataaatgggatctaattaaacgtaagcacttctgcacaggatttttgcaatctaccaatctgaca

SEQ ID NO: 938439 - DNA, 120 bp, Artificial Sequence
  ENSG00000230606_43 (sequence is synthesized)
ttacaagaaaataacaaccccatcaaaacatgggcaaaggtcacgaacagacattctgaaaagaagacatttatgcgtccgacaaacatatgaaaaaaaaagctcaacactagtgtttat

SEQ ID NO: 938440 - DNA, 69 bp, Artificial Sequence
  ENSG00000230606_44 (sequence is synthesized)
aagacagtgtggcaattcctgttatatccaaagaaatataaatcattctgttttaaagatacatgcaca

SEQ ID NO: 938441 - DNA, 66 bp, Artificial Sequence
  ENSG00000230606_45 (sequence is synthesized)
atttgacccagcaatcccattactaggtttatatccaaagaaatataaatcattctgttttaaaga

SEQ ID NO: 938442 - DNA, 120 bp, Artificial Sequence
  ENSG00000230600_0 (sequence is synthesized)
aggagctgctctctggatggggagatgggagctagcagctcacaatggggtcacaagatgcatggtgaatatttgatgttttagaacaaaaatgtatttacaaatctcatttgatgcaga

SEQ ID NO: 938443 - DNA, 120 bp, Artificial Sequence
  ENSG00000230600_1 (sequence is synthesized)
aacccagaggagtaatcaaagtgagaagccagtgccgcctccaggtactggatgatcacagggacctcaggctttggggattattcaactaccttcttggaataaacaacaaaaaaagta

SEQ ID NO: 938444 - DNA, 86 bp, Artificial Sequence
  ENSG00000287618_0 (sequence is synthesized)
aggtggaagtggaagtggcaccattcatcattatccctagtgaccccctagcaacatttttacttcctgttcccgcgacattatgt

SEQ ID NO: 938445 - DNA, 120 bp, Artificial Sequence
  ENSG00000287618_1 (sequence is synthesized)
cctagcaacatttttacttcctgttcccgcgacattatgttctgctggcctagaggtctcagttccagagggaggaatgtgccaccaggagacacagcaacaatgccattgagttaagat

SEQ ID NO: 938446 - DNA, 120 bp, Artificial Sequence
  ENSG00000287618_2 (sequence is synthesized)
ccacgatgcagctgggtcagaggttcattgtgatgactcaggctacgcaagggccgtggaatggacgtgcagctgtacttctaaattccaatgggacatcagactggggaggattatgac

SEQ ID NO: 938447 - DNA, 120 bp, Artificial Sequence
  ENSG00000287618_3 (sequence is synthesized)
cgggaaattcatacccaactggagccaagactctaggcactgatgccagacaaagaactcgtggtggaatcttgacttttcaattcatttcatctataaattctatttaacttaacatgc

SEQ ID NO: 938448 - DNA, 120 bp, Artificial Sequence
  ENSG00000287619_0 (sequence is synthesized)
gacttttgactgggaaagaacagaactgaataagcctcaatgaaatagaatacaaatttcagagtccagagagcttgggttctgaagcaatttcatcctgatatcagcactacattaaat

SEQ ID NO: 938449 - DNA, 120 bp, Artificial Sequence
  ENSG00000287619_1 (sequence is synthesized)
ttcttgggcatcatgaatgattttcttatcgacatctttgagcacatcaccaccaaggctggctgccaggttgctacactgagtgctccactatcacctccagagagatccagaccaccc

SEQ ID NO: 938450 - DNA, 120 bp, Artificial Sequence
  ENSG00000287619_2 (sequence is synthesized)
gagcctgatgctgtctggggatatccacaaacacgctgtattgaaaaccaaagggctctgagacagtcctcctttcttgaggagacaaactccagcctgtgactgattgcagagtcttct

SEQ ID NO: 938451 - DNA, 120 bp, Artificial Sequence
  ENSG00000287619_3 (sequence is synthesized)
ggcaagcttcagagtaaaacaaaaactatttgtggatgacaaaggcttaaaatgggactgtggttaattttttgatggtaattttcggaagtgaaagaactgatgtgtctataacaggaa

SEQ ID NO: 938452 - DNA, 120 bp, Artificial Sequence
  ENSG00000287619_4 (sequence is synthesized)
taatgcaatcgacagaaaatttggttatttctgtgacacaaaggtaataaagttaatccacaaagttttaaacacaatgtatttaaagatagtcattatacagattttcagtgaagacag

SEQ ID NO: 938453 - DNA, 120 bp, Artificial Sequence
  ENSG00000287619_5 (sequence is synthesized)
acagtgaatattacatctgatttacaaaaaagatgaacataatttttataaaggaaaaatatttggatttaataattcaagaacacacaatgtacataatataccatgagtatattaaga

SEQ ID NO: 938454 - DNA, 120 bp, Artificial Sequence
  ENSG00000287619_6 (sequence is synthesized)
agtagtaatatataccaatagaatatcaagttgagattcagtaagtccagagtagatcctaaacatctataatttagtaaagcctcataggaaatattttacagatgtatgtacacaggt

SEQ ID NO: 938455 - DNA, 120 bp, Artificial Sequence
  ENSG00000287619_7 (sequence is synthesized)
caccaaatattgtttctgaaatttatctacattctaattgctgtagctttagtacattcatttttactggtatattgtattccattgtatgattgtagtatgatttatccagaataatct

SEQ ID NO: 938456 - DNA, 120 bp, Artificial Sequence
  ENSG00000287619_8 (sequence is synthesized)
gttgatggacatttcaattgttttcggatttgtgctgttaaaaacagtggtgcacaaatattaattttacctgttttttaaacataccagtgggattatacagtattccctgtttttgct

SEQ ID NO: 938457 - DNA, 120 bp, Artificial Sequence
  ENSG00000287619_9 (sequence is synthesized)
agtgggattatacagtattccctgtttttgcttggcttcttttgtgtttttttaaatttaaaatttttaatttctgcgggtgcctagtagatgtatatatttatgggatacatgagatgt

SEQ ID NO: 938458 - DNA, 82 bp, Artificial Sequence
  ENSG00000287619_10 (sequence is synthesized)
tgagatgttttggtacagttatacaatgtgaaataatcacatcacagaacatgaagtatccattccctcaagcatttatccc

SEQ ID NO: 938459 - DNA, 120 bp, Artificial Sequence
  ENSG00000287619_11 (sequence is synthesized)
ctgttgtgctaccaaatactaggtcttattcattctgactactttttgtgcccgttaaccatccctccttccccttcatccttccactaccttctccagcctctggtaaccatccttcta

SEQ ID NO: 938460 - DNA, 120 bp, Artificial Sequence
  ENSG00000287619_12 (sequence is synthesized)
ctctctatttccatgagttcaactttcttttgctcaacatgtctgtgacacttaagaaacatatcaaccaagtgcaatatggggcccttgtttggaccataattggaacaaaccaactgt

SEQ ID NO: 938461 - DNA, 120 bp, Artificial Sequence
  ENSG00000287619_13 (sequence is synthesized)
acaaaaagcatttgtgcaacaattgatattgatatttgatattaatgagttactatcaaattttttctaggtgtgacaatggtattgtgcttatgtttaaaagagctctcatcttttaga

SEQ ID NO: 938462 - DNA, 120 bp, Artificial Sequence
  ENSG00000287619_14 (sequence is synthesized)
gattcatactgaaatacttatggatgaaaatatattatttgcttcaaaatggtggaggtgggaaaatgtggagtatatggctgtgaattgataattcttggaattaggtgatgagaaatg

SEQ ID NO: 938463 - DNA, 120 bp, Artificial Sequence
  ENSG00000248664_0 (sequence is synthesized)
tgggacataagttatgtcccctgaggtgaagtatttcacaagtaaatatcttacatatttgagaaatcttccattacaaggcttaagtttaatccttgtagggccttcaatttgcttagt

SEQ ID NO: 938464 - DNA, 120 bp, Artificial Sequence
  ENSG00000248664_1 (sequence is synthesized)
taagtgatgacaagaagacagaggcagctaaaaggaaatgaagagagagggcaagtaataaaagagaaggcctgaaagaaaagtggcggagattgagggccttttactggacctggaaat

SEQ ID NO: 938465 - DNA, 120 bp, Artificial Sequence
  ENSG00000248664_2 (sequence is synthesized)
tgaagccaagattatgcaaaactgaagtgccaatgggtttacatggttcactccaggtggaatgaatccctttaccatcatacttccatgaaattagaaaaaagttacctacataggcag

SEQ ID NO: 938466 - DNA, 120 bp, Artificial Sequence
  ENSG00000248664_3 (sequence is synthesized)
cttgataagcagcttggaatgtcaaatatataacaagaaaggaaatattctactttaaaggaacatgcacatcagatgtcacctgtatatgaattgttcctgccacaatactagcagaat

SEQ ID NO: 938467 - DNA, 120 bp, Artificial Sequence
  ENSG00000248664_4 (sequence is synthesized)
gacgccaaaaatgagggtctcgttgtcacagaaagaacaatgacccatgggcacaagagaagcacagaaacaagatgagataaagcttgaagacgtttagctccaccaacgtcgacagag

SEQ ID NO: 938468 - DNA, 120 bp, Artificial Sequence
  ENSG00000248664_5 (sequence is synthesized)
agctttctggaagctgtatgaaaaccaactttacaacacaaagccagtactagcaataatactccaccctgcttctagttttcctcaagacttgaaacaactctgatctattccaaaagg

SEQ ID NO: 938469 - DNA, 120 bp, Artificial Sequence
  ENSG00000248664_6 (sequence is synthesized)
atacggtgttcagccattttagccatgagatcatcattgtcaaaaagcaataaacagatcacagcaataatgaaaaaagcagctccccttgtctgaaaataaagaaaacaacatcaagga

SEQ ID NO: 938470 - DNA, 120 bp, Artificial Sequence
  ENSG00000267737_0 (sequence is synthesized)
gtcctctttccctgtcccacacctccttcctcctgcatcaggcctggggaggggggcgtgccgatgtcacccccaacccccaggcctagagtcctggacacatggacgcccctgccagag

SEQ ID NO: 938471 - DNA, 120 bp, Artificial Sequence
  ENSG00000267737_1 (sequence is synthesized)
ctcccctccccgcgcttggggttactttgaaccccgcctcctacaagaggatggtccagcctattgtcggaacctgcaggaatcccaggctgcgacccaagaatattagcggaggcccag

SEQ ID NO: 938472 - DNA, 120 bp, Artificial Sequence
  ENSG00000267737_2 (sequence is synthesized)
ctgctccgggaaagacgtttacctgctgcccagagctgggactgcagaccctgattggcgagggcttggagagtagctgagaaccttcccttcagctactgaagaccagacagggctttc

SEQ ID NO: 938473 - DNA, 120 bp, Artificial Sequence
  ENSG00000267737_3 (sequence is synthesized)
tgtatcacgctgcctgacgatgatgagggtgcagtgactaagagtgcagatgaaaggcccagctctccaaccaggtggatggatttgcaaggagcttctatctgggcgtggtggctcatg

SEQ ID NO: 938474 - DNA, 120 bp, Artificial Sequence
  ENSG00000267737_4 (sequence is synthesized)
attgactcctctccaggcatctctccttccagccacagagcctggcctgatggtcccagggccccagggccccaggtgaaggcctctctcctcccccactcaggtctgaccagctctgtt

SEQ ID NO: 938475 - DNA, 120 bp, Artificial Sequence
  ENSG00000267737_5 (sequence is synthesized)
tccatcctggtgtgggcacaaggtctcttgctgcagctgggccagtttgctgaccttctcagctccttctcttagactggagaggcctggaagggtgcccgagggagggtctgggctgct

SEQ ID NO: 938476 - DNA, 120 bp, Artificial Sequence
  ENSG00000267737_6 (sequence is synthesized)
ctcctgggctcctcccctccactccaggactctggctggagcctggtcagggtccttactgagttctcagccaagcgccagccctgtgatggcctgaggggtctggtggggaagccccaa

SEQ ID NO: 938477 - DNA, 120 bp, Artificial Sequence
  ENSG00000248667_0 (sequence is synthesized)
ttaatacaacagccattttattttatcttatggatcaggaatttgaagaagcttaattaggatgggttttctctgctccctattgagggtggagtatcattattacttcatatatctgac

SEQ ID NO: 938478 - DNA, 120 bp, Artificial Sequence
  ENSG00000248667_1 (sequence is synthesized)
cttttctctccttgtagttttgcattctaccaaccttcagggtatttatttccatctagcctcaccagcatgacagtctagattgctttatatggtagctgagccttcctaagagagtga

SEQ ID NO: 938479 - DNA, 120 bp, Artificial Sequence
  ENSG00000248667_2 (sequence is synthesized)
aaaaggaagttacaagacctctgaaaacttactctcagaagtaatttctgcctcattctactggtaaaagcaaatcaaacgaccaaccaagattcaatagaggaaaaatagataccacct

SEQ ID NO: 938480 - DNA, 120 bp, Artificial Sequence
  ENSG00000248663_0 (sequence is synthesized)
gaaagcatctctgccaactctagagagtttagatatctacttatttatatctacatctatctatatttatattaaacaaaagtgacaggacatggtaatagatgcaatgtataggtgaat

SEQ ID NO: 938481 - DNA, 120 bp, Artificial Sequence
  ENSG00000248663_1 (sequence is synthesized)
tagagagaggtatcaagcttgactcccaggtttctgatagaatggctgaattgatggcaatacctttcactgagaggaaacattggcagaaaaccagttttgaatgaagaggatgcttcc

SEQ ID NO: 938482 - DNA, 120 bp, Artificial Sequence
  ENSG00000248663_2 (sequence is synthesized)
atgttaatactcttggataatgtatttaaggatgcttaagttcatcatgggtcctctggaaatctcctacctttgtgagcaaagattactgcagggtggaagacaggtccatgattgccc

SEQ ID NO: 938483 - DNA, 120 bp, Artificial Sequence
  ENSG00000248663_3 (sequence is synthesized)
aggctgcagtgcaagaaggtgagcacatttcagtttatctccctacattagaaggaagaaacttctaggttaacaatcagatgcatcttcacatcctaatgaccccaataagattaactt

SEQ ID NO: 938484 - DNA, 120 bp, Artificial Sequence
  ENSG00000248663_4 (sequence is synthesized)
tctatcttcaagctgcaatgaagctgagagccacagaaaacacctgtaccatggtttcagggaggagtctcttccctcagccgaaaacagacagctttgctggtcatctgttctccactg

SEQ ID NO: 938485 - DNA, 120 bp, Artificial Sequence
  ENSG00000248663_5 (sequence is synthesized)
cgaggacgctgccactcagtgtggagagaggaaggggttctgcctatggtgcaagaaggtcggactcggcagttaatactcttggataatgtatttaaggatgcttaagaaattgcaaca

SEQ ID NO: 938486 - DNA, 120 bp, Artificial Sequence
  ENSG00000248663_6 (sequence is synthesized)
caaccaccatactgatcagtagtcatcaacattgagacgagactgtacaccagcaaaaagatcccaactcaatgaaggctcagatgattttagcatttttttagcaataaagcattttta

SEQ ID NO: 938487 - DNA, 120 bp, Artificial Sequence
  ENSG00000248663_7 (sequence is synthesized)
aattaaactatatacattgttgttttagacaagtttttgcacattcagaatacagtaaagtgtaaacatgacttttatatacactggggaaaccaaaaaatttgtgtgacttactttatt

SEQ ID NO: 938488 - DNA, 120 bp, Artificial Sequence
  ENSG00000248663_8 (sequence is synthesized)
gcaatatttgttttattgtgctgatctggagctaaatatatctgagatatgcttgtactgatgattattttaacaccaagatattttaaaattcattaaataaatgtttatttaaataga

SEQ ID NO: 938489 - DNA, 120 bp, Artificial Sequence
  ENSG00000237950_0 (sequence is synthesized)
gggaccacccaataagcaaccgggaaaccacataccatggacagtgctcggggaatttcggctcctcctcatccctggaggttccagggatctggcagagaaagaagcccagtctcacag

SEQ ID NO: 938490 - DNA, 120 bp, Artificial Sequence
  ENSG00000237950_1 (sequence is synthesized)
caatgactcctgaacatcctttgcaaacactatttaggacagatggactgaagtaggccctggggagagttgggggcatttccggaggccagaccaaaggtgatctccaggagatttgga

SEQ ID NO: 938491 - DNA, 120 bp, Artificial Sequence
  ENSG00000237950_2 (sequence is synthesized)
tgcaggatagctcagagccaagtggcagataagtctttgggagccagaagggctctttcttctctaaggaacaagtgtagacctataggggcaagaacctgtggcaaccctgggagaggt

SEQ ID NO: 938492 - DNA, 120 bp, Artificial Sequence
  ENSG00000237950_3 (sequence is synthesized)
ctgcagattcaggagggaacatcccaaaactcagcagaggaggagagggagcttttgttggtcacctggaaccactaccaatccatgttcatgtcaaattaaatgatcactttgaagttt

SEQ ID NO: 938493 - DNA, 120 bp, Artificial Sequence
  ENSG00000237950_4 (sequence is synthesized)
tgggggcatttccggagggaacatcccaaaactcagcagaggaggagagggagcttttgttggtcacctggaaccactaccaatccatgttcatgtcaaattaaatgatcactttgaagt

SEQ ID NO: 938494 - DNA, 120 bp, Artificial Sequence
  ENSG00000237950_5 (sequence is synthesized)
cagaccggcgcggggcgctgcggcccaactccttagtaggacgacgtgactcgaggggccggaggacggagggctcctcctcatccctggaggttccagggatctggcagagaaagaagc

SEQ ID NO: 938495 - DNA, 88 bp, Artificial Sequence
  ENSG00000237950_6 (sequence is synthesized)
agggcctgaaatccaaatttaacaggatgtcttttacttttatttgctaccctacccctacttccatctccaagtatagtttccttga

SEQ ID NO: 938496 - DNA, 120 bp, Artificial Sequence
  ENSG00000237950_7 (sequence is synthesized)
accctacccctacttccatctccaagtatagtttccttgatggcaaaacatgtttctcactggtctctgaatccctgaaactagcccagtgcacgacagttcatgctcggttaatatgaa

SEQ ID NO: 938497 - DNA, 120 bp, Artificial Sequence
  ENSG00000237950_8 (sequence is synthesized)
gagaaggcaacttatctggctgcagcgctgagaatggttggagggagttgtgactggagacagtgagaccaggtaggaggatgaggaataaaccatccaaaaaattatgaaggcttcagc

SEQ ID NO: 938498 - DNA, 120 bp, Artificial Sequence
  ENSG00000237950_9 (sequence is synthesized)
agaatagcactggggatagggaaaggggatggatctgcaggatctaaggatttggtgaccaatgcttaagggacatgacagagcttaaggagcctaggagattgcccaagtttctggctg

SEQ ID NO: 938499 - DNA, 120 bp, Artificial Sequence
  ENSG00000237950_10 (sequence is synthesized)
tgtcactggatgaggttggtgcactcactgagcagggaacactggggagggtctggaagctggacagcagggaagctcattgatgtgaggagcagagcaggctggagaagggtggacagc

SEQ ID NO: 938500 - DNA, 120 bp, Artificial Sequence
  ENSG00000237950_11 (sequence is synthesized)
agatctgaaggaggaaacggaagacatccagtatggatatgttaagcttgatgtctcccaggatatacagatagaggtattggaattacagacttggggctcaggtgaatgttctaggct

SEQ ID NO: 938501 - DNA, 120 bp, Artificial Sequence
  ENSG00000237950_12 (sequence is synthesized)
ggagataaaatgtgagcatggttagcatggaggtggtaactgaaaccacgggagtagacagtgctgctcagggagagagtagaatgggaagaggagagagagtcggtatcagagctctga

SEQ ID NO: 938502 - DNA, 120 bp, Artificial Sequence
  ENSG00000237950_13 (sequence is synthesized)
agtggaaggagaacccggagagtattggaccaagagagtcacgggaagacaggttttcaaggaggactgacactatcgaatgcttctgagacttcaaaggactaaatggcctttggcttt

SEQ ID NO: 938503 - DNA, 120 bp, Artificial Sequence
  ENSG00000237950_14 (sequence is synthesized)
agtattgaccagagtcacctgtggccccaggagctacaatgtgccacctggtgacaggttatagctactatgtggtaaacagaggagggaaggtggaactaaggatcccgaatccgtttg

SEQ ID NO: 938504 - DNA, 120 bp, Artificial Sequence
  ENSG00000237950_15 (sequence is synthesized)
gaggcagagaggggccaacagggtgtttgaagggagcaaaggcatcgaaatttttggagcatctagaactggggcagtgaatgcagaagagtgggagcacacacacgtttctcctccttg

SEQ ID NO: 938505 - DNA, 120 bp, Artificial Sequence
  ENSG00000237950_16 (sequence is synthesized)
acccagaatgggcacagccttcagagagctcttgccagctcctcactctagcctgggtgaagggggcatctgtgccaaagcaggaaggcacacaggcggattggaaggaatttctctcag

SEQ ID NO: 938506 - DNA, 120 bp, Artificial Sequence
  ENSG00000237950_17 (sequence is synthesized)
cagcgtcaaatgcctgagggatctcgccctcgaccctctccatctctcatggtactctcattcacccccggctgcagctcctgcctctgtgctgacagctgtcacatcaatccagcccag

SEQ ID NO: 938507 - DNA, 120 bp, Artificial Sequence
  ENSG00000237950_18 (sequence is synthesized)
acctccctcggcagctctagaccagcagatcccactgcctcctgacaacccctctggatgtcccacagttcctcagacttagcatcctttccaaatccatgcccccatctcatttccaaa

SEQ ID NO: 938508 - DNA, 120 bp, Artificial Sequence
  ENSG00000237950_19 (sequence is synthesized)
aaagaaaaatcatagaggcctccccaatacaaatgcataggacatgggaaacaaggtttgaaaggatatccagaaaagcttagggatagccctggccttttggaggtgacttgggggtgg

SEQ ID NO: 938509 - DNA, 120 bp, Artificial Sequence
  ENSG00000237950_20 (sequence is synthesized)
tatgagaggccagagtcagcagtaacttctcctttcttccccacgaaggtgtggacttcttagcttcctgtccttttcgtaccatttgccaaattgaatttaaataattattactgtaat

SEQ ID NO: 938510 - DNA, 120 bp, Artificial Sequence
  ENSG00000237950_21 (sequence is synthesized)
tgcttacttattgtctgtctctcctggttgaagcttctcaagggcagggatcatgtctgtttcacttctgtatccttggcatctgtcatataatcagtatctgacatataataggtgctt

SEQ ID NO: 938511 - DNA, 85 bp, Artificial Sequence
  ENSG00000237954_0 (sequence is synthesized)
atcagctaccagcaaggctagaataaaaacttctggccttcatctttctcctgtgctaggtgcttcctgccctcgaacatcagac

SEQ ID NO: 938512 - DNA, 76 bp, Artificial Sequence
  ENSG00000237954_1 (sequence is synthesized)
cctgtgctagcaaaatcttggacttatattggtaatttgccagagacccttgggcctttggccacagactgaaggc

SEQ ID NO: 938513 - DNA, 120 bp, Artificial Sequence
  ENSG00000237954_2 (sequence is synthesized)
ttccctattcttgaggttttgggactcgcactgatccaccactggcttccttggctcctcaacttgcagccggcctatcatgggacttacctagtgatcatatactcaatctctaggaaa

SEQ ID NO: 938514 - DNA, 120 bp, Artificial Sequence
  ENSG00000237954_3 (sequence is synthesized)
ttgacaagtttctggcaattcaacaccatgtagtatcgcacgtcagaaatcggaatgctgtgacctctgagataattcacccaccggagtcagactgctgaagaacactggatgggtgga

SEQ ID NO: 938515 - DNA, 120 bp, Artificial Sequence
  ENSG00000237954_4 (sequence is synthesized)
aaaggaacatctcaaccaggagagaaggaactgagtcaagaaagggctgcatctggtgaatatgtccctcccagtgatggaacccagggctgctgcagccaagagtctataacagtggag

SEQ ID NO: 938516 - DNA, 120 bp, Artificial Sequence
  ENSG00000237954_5 (sequence is synthesized)
acgccttgagcaaagccccagagcccttgagctgcctgttcccctcctctgacatgatgggtaatctgatggaagcgctgagaggcactgcctagaattaagccctatgtgtaaacgaag

SEQ ID NO: 938517 - DNA, 120 bp, Artificial Sequence
  ENSG00000237954_6 (sequence is synthesized)
caaggaagaaagaacatgtgctatcaaatatgattcatgattcaaatatattttaatatcttattcttttcacactctgagaaactattctgataatgtgattgttttgtaaaggagtgt

SEQ ID NO: 938518 - DNA, 120 bp, Artificial Sequence
  ENSG00000228107_0 (sequence is synthesized)
tgctgtaaggaagctcatagggagagtagttctgtctggtgggcaggagagcagaaatagatcaggaaacttcatgaaggaggtcatttttgtaataggccttgaaggatgggtacgatg

SEQ ID NO: 938519 - DNA, 120 bp, Artificial Sequence
  ENSG00000228107_1 (sequence is synthesized)
cttgaaggatgggtacgatgagaatgtacagggaataaacatttactcagtgtagctagagtatgtgaatgggaataatggaaaatggatgtggcactttgggaggttgaggcgggtgga

SEQ ID NO: 938520 - DNA, 120 bp, Artificial Sequence
  ENSG00000228107_2 (sequence is synthesized)
gtgagccgagattacatcactgcactccatcctgggcaagactccctctcaaaagaaaaaacctatgtgatgttctagttcaaaagcctgtgattctggactgagttatctggtcttagt

SEQ ID NO: 938521 - DNA, 120 bp, Artificial Sequence
  ENSG00000228107_3 (sequence is synthesized)
attctggactgagttatctggtcttagtggagaaaaaaacaccaaagatctgcagtttataccggtgaggatggaaaaattcaggctaaaattagggtgctactgagataaaaggtagaa

SEQ ID NO: 938522 - DNA, 120 bp, Artificial Sequence
  ENSG00000237377_0 (sequence is synthesized)
agttggcttgggtccattggattaattttggtcaacaggctctgaagaaaaatgacatttcagggaattaagagcacgtgttcctccctctaccttctctttcttcccccagtgaccttg

SEQ ID NO: 938523 - DNA, 120 bp, Artificial Sequence
  ENSG00000237377_1 (sequence is synthesized)
gcttagggcttagcacattttgccatctatggagcatgtggtatgagtcagaaatggtgtttttgcccaattcagagactagtgcagaagacagacaaagaaaaagacaactcaggtcta

SEQ ID NO: 938524 - DNA, 120 bp, Artificial Sequence
  ENSG00000237370_0 (sequence is synthesized)
ggaggcaaggggtgtagccctcctggtgcctggaagggctgtctgggcccccatggcgggtgctcctcactcactcaagcaccaatcatgagcctccactgagaagcttccacagcagcc

SEQ ID NO: 938525 - DNA, 120 bp, Artificial Sequence
  ENSG00000237370_1 (sequence is synthesized)
ccagggtcagcaccaggcaccaagtgcatgccagccctggtcagtgagccttgattgaaggcctacggctcgcccaccccaaggagttcgatctgatctctgggacaaacgattcctaca

SEQ ID NO: 938526 - DNA, 120 bp, Artificial Sequence
  ENSG00000237370_2 (sequence is synthesized)
taaaggaaacagccaaggcgcctgaggagccccaagcttagcggctccattcacagacaaggaatccacgcccccacatctccttaggtggcaggagacaggcacctggccttcctcggg

SEQ ID NO: 938527 - DNA, 72 bp, Artificial Sequence
  ENSG00000237370_3 (sequence is synthesized)
agtcgggagttcgagaccagtctggacaacatggtgaaaccgcatgtcttctaaaaatacaaaaattagctg

SEQ ID NO: 938528 - DNA, 75 bp, Artificial Sequence
  ENSG00000237370_4 (sequence is synthesized)
tcacctaaagtcgggagttcgagaccagtctggacaacatggtgaaaccgcatgctaatcccagctacttgggag

SEQ ID NO: 938529 - DNA, 120 bp, Artificial Sequence
  ENSG00000237371_0 (sequence is synthesized)
ctccaagacgtcgagtgtggaggacaccctggaggaggagatggaaccctcctgtttgctggggctcggcccccggtgaggctggctgcaggtgaccacagagacctagcctggtgtcgt

SEQ ID NO: 938530 - DNA, 120 bp, Artificial Sequence
  ENSG00000237372_0 (sequence is synthesized)
ctgcatggaggctgccggagttgcttcctgctccgtgctcccacaccgttcttcagctgaccaagtagtgacagcaggactccagggttctgtccctgtgcggcaaagcacacactttca

SEQ ID NO: 938531 - DNA, 120 bp, Artificial Sequence
  ENSG00000237372_1 (sequence is synthesized)
gtgctgcggttgatgcttgagacgctcagtgggagccccgtttaaccggacagaggatgactttcttctctggagtgctctgggtcacgcttggggacacatgaaggatacgccctccct

SEQ ID NO: 938532 - DNA, 120 bp, Artificial Sequence
  ENSG00000237372_2 (sequence is synthesized)
ttcaggctcccatcgcacgttgaacctggcttgtgaacacagccctctgggacactactaggaacaaagtgttccggatgctgcagaagctcagctgccacctggaaaacctgtttggcc

SEQ ID NO: 938533 - DNA, 120 bp, Artificial Sequence
  ENSG00000237372_3 (sequence is synthesized)
ctggagtggccctgcggcagcatctgggctgctgtacccatggtgcctcccagcccgaggggctcccggcagctctggagactcctgctgtcacgtcacctggcccctcaccatcaccat

SEQ ID NO: 938534 - DNA, 120 bp, Artificial Sequence
  ENSG00000237372_4 (sequence is synthesized)
cctcatctctcttgggaattaagacattgaaggaactgctgctgccagcaagagaggctgttgcaagaaagaaaggctgctgcaagaaacgcaagaaaggctgctgccagcattgcattt

SEQ ID NO: 938535 - DNA, 120 bp, Artificial Sequence
  ENSG00000237372_5 (sequence is synthesized)
ctgtcaagaagctgccccgcaaaatttatggatgtatcgctgtatgcacctaatagcaagctctactggatgaatggcttataaagatctcccctgaataaaattgtggtttttaacttt

SEQ ID NO: 938536 - DNA, 120 bp, Artificial Sequence
  ENSG00000237372_6 (sequence is synthesized)
ggcagtctgagtccccagtgcctggcgtgggtgagctcagggctgctccgtatgggggcatccaggcctggctgctgatgccctgtggctgaggacacctccatctgcatgagccagttt

SEQ ID NO: 938537 - DNA, 120 bp, Artificial Sequence
  ENSG00000237372_7 (sequence is synthesized)
ggaagtccagcttgccccccaggcagtggaggccagtaagggcttctccccagattgaccactcagatcaaattgatccaggtgttgagacagaattggccccattttctgctaatttcc

SEQ ID NO: 938538 - DNA, 120 bp, Artificial Sequence
  ENSG00000237372_8 (sequence is synthesized)
attctctgattgtgctgcctgctacaggagtcattttggatttgggctgacctggtagacttctgaaagacagtgctctgggttcaagttgtcctcagggctggatgatccatagcaaat

SEQ ID NO: 938539 - DNA, 120 bp, Artificial Sequence
  ENSG00000237372_9 (sequence is synthesized)
ctcgtagtcagtgacaagtaacttgccaagagctgtggtttaaaagcatgtctgcaaattcttggacactcttgtcatccagaaatagagtctaaccctcctcccttgaatacgggctgg

SEQ ID NO: 938540 - DNA, 120 bp, Artificial Sequence
  ENSG00000237372_10 (sequence is synthesized)
cttcagtggtggaaatgacaatgtgtgagtttgaggtttgattagaaaagatgacacagcctctgcctgactctcaaggcccttgttcttggacattagctgccatgctgggaggaagcc

SEQ ID NO: 938541 - DNA, 120 bp, Artificial Sequence
  ENSG00000237372_11 (sequence is synthesized)
cagcagccacacagagaggccacgacagccgaggtcccagccaagccagcatcaactgcccaacacgtcaatgagtgatcctgcagagcctcccatctcctagccaccgcagctgatgct

SEQ ID NO: 938542 - DNA, 120 bp, Artificial Sequence
  ENSG00000237372_12 (sequence is synthesized)
gttcctgtccctggctttcctggctttttggatccccatcctggctctggggggaaggaggatgggtctggagcacctgtgagacccgagcctgggcccaccacagcagaggatgcagcc

SEQ ID NO: 938543 - DNA, 120 bp, Artificial Sequence
  ENSG00000237372_13 (sequence is synthesized)
aagctcaccgaggagttttcttgaaatactgcttttctagcaaggagaacatagaagatggtgaggcagccgcagctggagtgctgactgcccagaagcagaggggcaaaatgcactcca

SEQ ID NO: 938544 - DNA, 120 bp, Artificial Sequence
  ENSG00000237372_14 (sequence is synthesized)
tggattttggtcattgaggccttgctgagagcatgccccaggctgggttcacttttgcctgaaggggctgcagcagaatgaaaactcaactgtgcaaaacaaaacactcaaattttaaaa

SEQ ID NO: 938545 - DNA, 120 bp, Artificial Sequence
  ENSG00000237372_15 (sequence is synthesized)
agcacaagattctgctgggatcatctggcagcaggggcagcaggaaagacgtaatagagatttcaaagcaggctgaggaggaggacagggcattccagcctctgtggttcagcaatctca

SEQ ID NO: 938546 - DNA, 120 bp, Artificial Sequence
  ENSG00000237372_16 (sequence is synthesized)
ccactccacaaccgacggtggctttccagcacagatcttcacggattgcagcattcaggacctgagtccatgcccatgcagaggcccattgcagtgtttgcttagcatagctgcatttcc

SEQ ID NO: 938547 - DNA, 120 bp, Artificial Sequence
  ENSG00000237372_17 (sequence is synthesized)
tgggattacgggcatgagccactgcactcggccgtctctgtcacttttaaaaatgacacctgggaccttgacaggctgtagccctgaggcaagtgccatacctttagatggtctccagtt

SEQ ID NO: 938548 - DNA, 120 bp, Artificial Sequence
  ENSG00000237372_18 (sequence is synthesized)
ctccagttctaggttctactaaaagaagacctgataaagtggctatattttaaattctggaaagcctggccaccccacgaagtccctggtgaaatctgcatgtcacttaggttggcaatg

SEQ ID NO: 938549 - DNA, 120 bp, Artificial Sequence
  ENSG00000237372_19 (sequence is synthesized)
cctgcgccctccctagtggtgccagcaaggcagtcatttctctaacctaccagctgctcctgtgaaaagggagcattcagtgcagaaaactaggagggaaaggaactcacctccacttcc

SEQ ID NO: 938550 - DNA, 120 bp, Artificial Sequence
  ENSG00000237372_20 (sequence is synthesized)
tgggtgctgatgaaagatgctgacatctccccttcctctaggtgcagagggtgcaggcccatttcacaatggggaagactgatgctcagagaatagccagtatgcttgatcataccggtg

SEQ ID NO: 938551 - DNA, 120 bp, Artificial Sequence
  ENSG00000237372_21 (sequence is synthesized)
gcatgtggcagagaaggctgaagtccaggttctactgttggcaaagcttgggccctttccactctgctgtgccttcctcacctccacagtgacctggacatgaaaggccctcttggatga

SEQ ID NO: 938552 - DNA, 120 bp, Artificial Sequence
  ENSG00000237373_0 (sequence is synthesized)
tcatttatcatccatgtttaaaaaattcccatctctcagctaaaagactacatcatatgacttaattctaataggtcaactctactgaagttaagagcattcccaaagaatgctctatat

SEQ ID NO: 938553 - DNA, 120 bp, Artificial Sequence
  ENSG00000237373_1 (sequence is synthesized)
aaaacttgtgtgtatgtttgcaggaatcttaatggatatgtttctagaggaaatgctcccatgagcattctctccatcatttagcagctgttaaaatgatgctcttcccaatgcccttgt

SEQ ID NO: 938554 - DNA, 120 bp, Artificial Sequence
  ENSG00000237373_2 (sequence is synthesized)
gtaaacgtgctctgagttaacctggtagccagtacacagtacacagtaaatgacatttcttatctgtatgttagaactactattcaataagctaaaatattttgagcttcctcagatttt

SEQ ID NO: 938555 - DNA, 120 bp, Artificial Sequence
  ENSG00000272505_0 (sequence is synthesized)
cttcttacaaactgattaaaacgcgacagattaaaatgcaacagacctgaagcaatgcactcggtgcccatgggattcacggatcttcccataggtcctaccagccagaagcagcatgcc

SEQ ID NO: 938556 - DNA, 120 bp, Artificial Sequence
  ENSG00000272505_1 (sequence is synthesized)
tgattgatagaacagtggaatggcccaatgaaggttatgcaactgagcctgttgagatctcatgacatgtgaggatggagtgctcttttacaaagtactgtgtctattatgaagcacatt

SEQ ID NO: 938557 - DNA, 120 bp, Artificial Sequence
  ENSG00000272505_2 (sequence is synthesized)
caataggagctgattcttgtatggccagaatacttgggtttgggaaccaagggataagagtgggactggcttcatttactattgcacgtagtgatccacacccaataaagttctgcttct

SEQ ID NO: 938558 - DNA, 120 bp, Artificial Sequence
  ENSG00000272505_3 (sequence is synthesized)
taccactgcaactttgagctctggaagtttagagaccttagttcccaagggaagaatgtctctaccagggaatacgatggtttattgcatggagagttgagactgccacctggacatttg

SEQ ID NO: 938559 - DNA, 120 bp, Artificial Sequence
  ENSG00000272505_4 (sequence is synthesized)
gagttcattacaccactaagccaataggcaaaggggaaggttagtgtcctggctgagaagactgacccctaatatcaaagaacagagatttgctccacacatggggacaaggaggaatat

SEQ ID NO: 938560 - DNA, 120 bp, Artificial Sequence
  ENSG00000272505_5 (sequence is synthesized)
gtctgaaatccattacatcctttgaagatgctctttctatttcattgtccaaagggagaaatcagtggaaaactacagcaacgccatacaggaaaaaccatcaagtgctcagaaatgaat

SEQ ID NO: 938561 - DNA, 120 bp, Artificial Sequence
  ENSG00000272505_6 (sequence is synthesized)
ggtcaccccaacaaataaagaacaacgatcagctgaggttcaaattggaagaaggccaactgtggcctcaggatcagttgcagacttgagaacaatcgcagcggcctggattttcatgat

SEQ ID NO: 938562 - DNA, 120 bp, Artificial Sequence
  ENSG00000272505_7 (sequence is synthesized)
gttttatgtatttgtatataccaatttctgttttttccttcttttccccaagtgttcacattggttacatttattactgatctttaggatataagattgtggtggccatggaggtgtacc

SEQ ID NO: 938563 - DNA, 120 bp, Artificial Sequence
  ENSG00000272505_8 (sequence is synthesized)
acccagatctacttcaaaagaacctgctgtgggaagcatagttgatgacggccttcagctactgctcctccagatccatcatagctgtcacactaacactgcatttctacggagtatacc

SEQ ID NO: 938564 - DNA, 120 bp, Artificial Sequence
  ENSG00000272505_9 (sequence is synthesized)
cagccaatggctgagagtggcagggttcaacttttcttgaaccattactgctcaacctggcaccctttgctcaggaattctcatcaacctggtccagacttactcagacttgcaatgggg

SEQ ID NO: 938565 - DNA, 120 bp, Artificial Sequence
  ENSG00000272505_10 (sequence is synthesized)
tctgaagatgctctgcctcctcctgttcccaagatcctttatccttgccaggcatttccaccaataaatctctttcatgtataagtcagtcttggcatcggctcttggaggacccaaact

SEQ ID NO: 938566 - DNA, 120 bp, Artificial Sequence
  ENSG00000272505_11 (sequence is synthesized)
gcatagagaatagtcacattgtgttaggagcatgctgttactattcttgttttctagaaattttaataaggttgtgtgcatacagtgagcagccaaagtggtaggcttcctagatcgtgt

SEQ ID NO: 938567 - DNA, 120 bp, Artificial Sequence
  ENSG00000272505_12 (sequence is synthesized)
ctcaataggcactgaaatccaattcccctaaatcctaattccatttttctgtgtcatgttgcagctgcctcactctagtattctggatgtgatttggggtccagtgagatgcactgacta

SEQ ID NO: 938568 - DNA, 120 bp, Artificial Sequence
  ENSG00000272505_13 (sequence is synthesized)
atatctgcagtgtacaatgcaggcagcagcagcgccagctaaagctgagctctggtagagttggattggatgtttacagtgacctacctcttcagtgtgatatttcctcacggtcatcag

SEQ ID NO: 938569 - DNA, 120 bp, Artificial Sequence
  ENSG00000272505_14 (sequence is synthesized)
ctacaggctgtgagacagcctgggggagacaggatagccatgtttcccactacctcccaaccactggctggtgcaccagcctcctggccttaggtcgcagccacagtgacgtgacctcct

SEQ ID NO: 938570 - DNA, 120 bp, Artificial Sequence
  ENSG00000272505_15 (sequence is synthesized)
acaatccctggcaagctggaggagcagccctgcaaccaagcctgctctaagaaaaggctttctgtttactaacctggagctgctctattctttcacccttgttcccctttcagctgtctc

SEQ ID NO: 938571 - DNA, 120 bp, Artificial Sequence
  ENSG00000272505_16 (sequence is synthesized)
gcgcaagtactaattttgccattaaatacgcattttgttttgcaaaatgagaagagcttataaatacttcaaattttctccgtctgtttcactcctttccatttctttctaaaattacag

SEQ ID NO: 938572 - DNA, 120 bp, Artificial Sequence
  ENSG00000272505_17 (sequence is synthesized)
taaaatattaactatacaaaatattgttgtatttatacaaaacaacaataccataaaataaaacactacatagttgaagccctctgaggatctctccatttcttccagccataacgaata

SEQ ID NO: 938573 - DNA, 120 bp, Artificial Sequence
  ENSG00000272505_18 (sequence is synthesized)
ccctgaactttacgtttcttttccctttgcggttgcttaatttttctacatctgaatatatccttacacgttttcaaaatttatagaaatatcccactgaatacatttttctgtaacttg

SEQ ID NO: 938574 - DNA, 120 bp, Artificial Sequence
  ENSG00000272505_19 (sequence is synthesized)
cctttgcactgcattgtgagattcagctatgttgatctgtttaactccagctgatgtatgtaatgatccctgatgattattctgccgtttgactataccaaaatttattcaggtctctga

SEQ ID NO: 938575 - DNA, 120 bp, Artificial Sequence
  ENSG00000272505_20 (sequence is synthesized)
taatgagcatttagattggtttgttttccatttatgaatttagcaattatgtgtttctaattttttgttattataaactatggtgctacgaatattcctgtatatgccaccttcaaaatt

SEQ ID NO: 938576 - DNA, 120 bp, Artificial Sequence
  ENSG00000272505_21 (sequence is synthesized)
gtaaaatttcaactgttttaaaatacagtcatgtcaggatacattctgagaaatgtatcattgggcaatttcattgctaggcacacatcaatgtatgcaaatctagatggcatagcctac

SEQ ID NO: 938577 - DNA, 120 bp, Artificial Sequence
  ENSG00000272505_22 (sequence is synthesized)
tacacacctagaccacatggcgtggtgtgttgctctgaccaccatcatatatgtagttcgtcattgaccaaaatggcattctccggcacgtctgtattaaaattttttagtggaaaacca

SEQ ID NO: 938578 - DNA, 69 bp, Artificial Sequence
  ENSG00000272506_0 (sequence is synthesized)
tactcgggaggctgaggcaggagagtcagttgatcccaggaggcagaggttgccacgtctcaaaaaaca

SEQ ID NO: 938579 - DNA, 120 bp, Artificial Sequence
  ENSG00000272506_1 (sequence is synthesized)
tacgtctcaaaaaacaaaacaaaacaaaaaagtgttatttataggaataagaactaaaatgccttgttaatatattgttttggcattgccaaatttagcctatttgagtgcatggattgc

SEQ ID NO: 938580 - DNA, 120 bp, Artificial Sequence
  ENSG00000272506_2 (sequence is synthesized)
tcttttttgttttgtatgtttgctttagatgcgtagacagagggagtggagtaaggctttacagagattactacagaaggcatttttttttttcataaagaggggaaaacgcacccatct

SEQ ID NO: 938581 - DNA, 120 bp, Artificial Sequence
  ENSG00000272506_3 (sequence is synthesized)
cataacaagaatttggagtcaaaacgagacagattccattcctgccttccacattaattagctaggtgactttgggcaaatcacttaacctctaggttttctcatcagcagaatgaaagc

SEQ ID NO: 938582 - DNA, 120 bp, Artificial Sequence
  ENSG00000272506_4 (sequence is synthesized)
gttggcctatagacacccatttaaatccctcctccaaatactcattcgttcgatattttctcagtgtctactaagcacaatcattgttaataaacactatgattcttggagagctccaaa

SEQ ID NO: 938583 - DNA, 120 bp, Artificial Sequence
  ENSG00000272501_0 (sequence is synthesized)
agagttcactgcgaggactgggatcacccgtcaccccgccctggtctacggaaaatgacaagtgtttactgatatagaaacggaataacggcgctgtgggctggggtgggcggagctgcc

SEQ ID NO: 938584 - DNA, 120 bp, Artificial Sequence
  ENSG00000272501_1 (sequence is synthesized)
ttcaggcttctggtctccagcggcggggaactcacacctgccgctgtgaaaatgcagacccgcggggcagtaattccgagtccagcctggggcgcgatctggaatcttgactcgcttgaa

SEQ ID NO: 938585 - DNA, 120 bp, Artificial Sequence
  ENSG00000272501_2 (sequence is synthesized)
acaccacgacggattcggagacaggtgagtagagaaatgagcctcagcccctcccacgggccgcccacggattccaggatccggaaactcttcctgctgctgcgtcaccccaggaaggca

SEQ ID NO: 938586 - DNA, 120 bp, Artificial Sequence
  ENSG00000272501_3 (sequence is synthesized)
gcgcccgcctctgggcagttctgatggaaactggcttcgccgcccagaggaaaacccacaactaaggggccaagaaaaagcctccatggtcccgccctttcagtgaggatcctaatttat

SEQ ID NO: 938587 - DNA, 120 bp, Artificial Sequence
  ENSG00000272501_4 (sequence is synthesized)
taatttataccccgagtgtggcccccatcaaagtctgcagtgacagccgagcgcggtggctcacgtctgtaatcccggcactttgggagaccatggcgggcggatcacttgaggtcagga

SEQ ID NO: 938588 - DNA, 86 bp, Artificial Sequence
  ENSG00000272501_5 (sequence is synthesized)
cacacacacaaaaaatgtagagtgacgttcactgaaatgatactagaccagcgggagggacccagagcgctgcggttcacagaatg

SEQ ID NO: 938589 - DNA, 120 bp, Artificial Sequence
  ENSG00000272501_6 (sequence is synthesized)
accagcgggagggacccagagcgctgcggttcacagaatgcggtgacagcgccgcctcgcgtcctttacttcaactgccccaggcagacgtggtcacgtgtgttggcctggaggctggaa

SEQ ID NO: 938590 - DNA, 120 bp, Artificial Sequence
  ENSG00000272501_7 (sequence is synthesized)
tacaccggggtcaaatgcagagtggagaaaggagggaaggatgggaggacgtgttgaagaaagacagtaagagctagcgctatggttcatatctgtaaaactagagttttcggaggcgag

SEQ ID NO: 938591 - DNA, 77 bp, Artificial Sequence
  ENSG00000272501_8 (sequence is synthesized)
tatggttcatatctgtaaaactagagttttcggaggcgaggcaggaggatcgtgtgagaccaggagtttgaggtcgc

SEQ ID NO: 938592 - DNA, 70 bp, Artificial Sequence
  ENSG00000272501_9 (sequence is synthesized)
agtgagaccctgcttttatatacttttcatattttctgtaattaagcaagttctgtggaccctcgcggtg

SEQ ID NO: 938593 - DNA, 90 bp, Artificial Sequence
  ENSG00000272501_10 (sequence is synthesized)
cggtcagtgttattgtttctcccggtgggcttttggtcttgctggcttcaggagtgaagctgtagaccttcacagtgagtgttacagctc

SEQ ID NO: 938594 - DNA, 82 bp, Artificial Sequence
  ENSG00000272501_11 (sequence is synthesized)
ataaaagcactgagcaaaagaacaaagctttagcagtgtggaagagaacccgactgggttgccactgctggctcgggcagcc

SEQ ID NO: 938595 - DNA, 63 bp, Artificial Sequence
  ENSG00000272501_12 (sequence is synthesized)
agacacaaaggttctccaagtccccatcagattagttagatacagattggtgcattcacaaac

SEQ ID NO: 938596 - DNA, 73 bp, Artificial Sequence
  ENSG00000272501_13 (sequence is synthesized)
aggaggctcgggccgcacaggagcccttggagtgggtgggaggcttaggcatggcgggctgcaggtccccagc

SEQ ID NO: 938597 - DNA, 66 bp, Artificial Sequence
  ENSG00000272501_14 (sequence is synthesized)
cacgcccacccggaactccagctggccggcaagcgcggcaggagagggctccggccttggccagcc

SEQ ID NO: 938598 - DNA, 72 bp, Artificial Sequence
  ENSG00000272501_15 (sequence is synthesized)
aggcagaggaggcggggttttactttattttaggataaaatatctattgtgaattttaaaaacatgtaaaat

SEQ ID NO: 938599 - DNA, 120 bp, Artificial Sequence
  ENSG00000272502_0 (sequence is synthesized)
caacccagcggccgctcacctgttccagccgccgcagcctcggcggtcacacgccacccgcccgcccagacctcccctcctctgtccccagagcgcacgacgccgcggggacagcttccc

SEQ ID NO: 938600 - DNA, 120 bp, Artificial Sequence
  ENSG00000272502_1 (sequence is synthesized)
gagcgccttccccgtcccgcttctctccagcccaccgcagccccctttcttcccagctcccccactccgtgggcgcccacactgcaccttcgccgggtgcgtgcgtcccgcctcggtgcc

SEQ ID NO: 938601 - DNA, 120 bp, Artificial Sequence
  ENSG00000272502_2 (sequence is synthesized)
ctcactcggtcctcctgagccgacttccctttcatacccagcccgtagaattgtccctgggtcttaacaactcatttgtaactgatccaggtctcctccctctgcttcctcaaacccagg

SEQ ID NO: 938602 - DNA, 120 bp, Artificial Sequence
  ENSG00000272502_3 (sequence is synthesized)
cttcgctgcctctgcggagttcttacctgtctctcctttccacccgggttccctggaggaagctaaactcagaccaaggccctgggctccccaggagttaaaagggaatacgctgtccca

SEQ ID NO: 938603 - DNA, 120 bp, Artificial Sequence
  ENSG00000272502_4 (sequence is synthesized)
agaaatgttttctatcgagccctggacaggtgtctctgctggcctggggttttcaacaggtcatgcctgcctcagaccccagggacaaatgttcttccagctctaactcattctatgctt

SEQ ID NO: 938604 - DNA, 120 bp, Artificial Sequence
  ENSG00000272502_5 (sequence is synthesized)
taagcttttgacctatctttgttttcccagtgccacaccaaatgctgcctggggatctctctttcttcctgagttcccatataagaagccccccatttaagaattcagttggaatgggtt

SEQ ID NO: 938605 - DNA, 120 bp, Artificial Sequence
  ENSG00000272502_6 (sequence is synthesized)
gtatttcaaaagttgctttgcaagttagttatttggatttcaagttgcattttaccagggtaacaatattataatgattgtttaccttcccagagcaatccagaaatgcccacataaccc

SEQ ID NO: 938606 - DNA, 120 bp, Artificial Sequence
  ENSG00000272502_7 (sequence is synthesized)
atgtcacacctgaaccaccctgagttcttctatccttgaacctctcaagctttcccctaactctaagcaggtctcatggtccactcaaggtgtttcatgcttctcagttacgtccccttc

SEQ ID NO: 938607 - DNA, 120 bp, Artificial Sequence
  ENSG00000272502_8 (sequence is synthesized)
ccactgctgtctaccctctctccaaacacaacacaaaacaaacccacaacagttctgttaattcctgaagtaaacccaacccagcaaggtgttgagaggaaataaatcttattgaacaca

SEQ ID NO: 938608 - DNA, 120 bp, Artificial Sequence
  ENSG00000272509_0 (sequence is synthesized)
cttacttactttgttaaatatgctagcctggaaaagtttactttgaatttatgttctaaaaaatttttttaacaaagtaattttaattctgatatttaacttgataggcactctgtgtat

SEQ ID NO: 938609 - DNA, 120 bp, Artificial Sequence
  ENSG00000272509_1 (sequence is synthesized)
ctttagtttggactcctaaagaatgaaagtactcagaaaagtgtaaggactttgtttttctagaaatattaagcaacataaacactggggacagaactttatgcgtcaaaagttttgttc

SEQ ID NO: 938610 - DNA, 120 bp, Artificial Sequence
  ENSG00000272509_2 (sequence is synthesized)
tagaattaaggagtgaagtcaatatgtcattttgtggtatagcctatttaagactatatatacactaaaacctgtaattaataacattaccattgaatcaataaaaatgtcagtacctga

SEQ ID NO: 938611 - DNA, 120 bp, Artificial Sequence
  ENSG00000285618_0 (sequence is synthesized)
ttctcgaaatcagtgtggattcctgagacaatgtggtatgagggactcagaggaatgaaatctccattcaaattatgctctcttcatctcaaaaattacaaatttggaattaaaaaagga

SEQ ID NO: 938612 - DNA, 120 bp, Artificial Sequence
  ENSG00000285618_1 (sequence is synthesized)
agaccttcctttaagctgtaacctcctagaaagtttgccccgtggacttgtggttccctctgctgctcttccctgactacctgctaatcctacttatcagtgctgccctctcccccttac

SEQ ID NO: 938613 - DNA, 120 bp, Artificial Sequence
  ENSG00000285618_2 (sequence is synthesized)
tcctcaggaattcccccaattagacggcattcttctgattacgcattcacaacaccccatactgttctcttgtagaacttatcacagtttataacaatatttgtgtgattattttattca

SEQ ID NO: 938614 - DNA, 120 bp, Artificial Sequence
  ENSG00000285618_3 (sequence is synthesized)
aatcttcctcccacagtaaaatgcaacctctgtgattttatgcattctgtttgggaccattcctgtttggttctccattgtaccctcagaacttaatgcagtcatctatgtaatgaatac

SEQ ID NO: 938615 - DNA, 120 bp, Artificial Sequence
  ENSG00000285618_4 (sequence is synthesized)
cttcgaatgaataaatgatgagagaagatacttgttgaaatcttttcagaaatacctaaaatgtgatttgtaaatgtattagtgatgaggataacaataaaaatcaaatttataaaaaaa

SEQ ID NO: 938616 - DNA, 120 bp, Artificial Sequence
  ENSG00000274215_0 (sequence is synthesized)
aagataacgcaggccttgctcaagacaaacgttcaggaaatcaaaatcggtttggagatgaaatgggaaagacaagagcagctccaaggagagaagaacgtccagaaaaccaagaaatag

SEQ ID NO: 938617 - DNA, 120 bp, Artificial Sequence
  ENSG00000274215_1 (sequence is synthesized)
gactggtaaagggtgctgaccaggtccctggagctgcaccccgccccgtgcgcctccccagccccccggccgcaccgtgcccaccccgcgctcgtcgtccccctcgcccccagcgccacc

SEQ ID NO: 938618 - DNA, 120 bp, Artificial Sequence
  ENSG00000274215_2 (sequence is synthesized)
gcggacccgggaccgcctgggaaacgccctggtctgacatggcttggggctctgggcagaagccaggtctgaaaaccaaggttggggcctcatgtgttagtctggaagcaccaagcaccg

SEQ ID NO: 938619 - DNA, 120 bp, Artificial Sequence
  ENSG00000274215_3 (sequence is synthesized)
cataccaaaatacctcgaggcaaccgtatggcttttttttttttaattaagttgttcccgggcggtggctcacgcccgtaatcccagcatgttgggaggctgaggcgggcgcgtcccttg

SEQ ID NO: 938620 - DNA, 120 bp, Artificial Sequence
  ENSG00000274215_4 (sequence is synthesized)
agcacggaagctgaggctgcagaaggctgtggtcgcgccactgcactccggcctgggggacagagtgagcccctgtctcaaaaatataaaacaaaataaaaaattaataattaaattaaa

SEQ ID NO: 938621 - DNA, 120 bp, Artificial Sequence
  ENSG00000274213_0 (sequence is synthesized)
gagctggcgaaggtcggccgcgctccgatccccaagagctcccgcgggctgggcgcgggacgccgggctcggccttagcccccgggatttagagcatcctcgcgaccacccggaggcttc

SEQ ID NO: 938622 - DNA, 120 bp, Artificial Sequence
  ENSG00000274213_1 (sequence is synthesized)
caagtcccctccttcccagcactcatctgagaccagaggtgtccccaccgtccccgctagcagcgctggttatattgtgggccaacctttaaaaaaataaaaaggaactgttaaaccaca

SEQ ID NO: 938623 - DNA, 120 bp, Artificial Sequence
  ENSG00000279623_0 (sequence is synthesized)
caaagtgttggaattacaggtgtgagccagcatgcctggcccaggactaatttttaatattccatttgtacttcatgttctaagttttttttctcacttaagtcttttgtattgattaat

SEQ ID NO: 938624 - DNA, 120 bp, Artificial Sequence
  ENSG00000279623_1 (sequence is synthesized)
ctcacttaagtcttttgtattgattaatttactgtactccatgtcccctttttaacagctttattattgatataccaatgatataaaaataaactagacatatttaaagtgtaccatttc

SEQ ID NO: 938625 - DNA, 120 bp, Artificial Sequence
  ENSG00000279623_2 (sequence is synthesized)
actcatccttcacctatcttcaggcaaccagtgatctgctttctattatcatggattagttttcttgctctgcatattatgtataatcatacagtgtaaattctattttgtctgacttct

SEQ ID NO: 938626 - DNA, 120 bp, Artificial Sequence
  ENSG00000279623_3 (sequence is synthesized)
ttcactaagcataagtctgaaatttattcatgtttgttcatgtatcagtggcttgcctttttttgtgctaagtaatattctattgtatgagtatattaaagttttttaattcattcacta

SEQ ID NO: 938627 - DNA, 120 bp, Artificial Sequence
  ENSG00000184856_0 (sequence is synthesized)
acagataagactctgtctaccctgggcagctttcctgatccatggcagtctggcttacaagcaatactaggcttctattgtctctttctgtatatttataagaaacatggccaggcaaga

SEQ ID NO: 938628 - DNA, 83 bp, Artificial Sequence
  ENSG00000184856_1 (sequence is synthesized)
tctctttctgtatatttataagaaacatggccaggcaagatggcttatgtctttaatctcagctgtttgggaagccaagtgga

SEQ ID NO: 938629 - DNA, 120 bp, Artificial Sequence
  ENSG00000184856_2 (sequence is synthesized)
acgccactgcagaagcgagtagaggaagaatacaaggaaaaaagtgtctcccagcctgtggaaagaggatggctatttcatccactaaaggtgtacactttaagtgaattggtatgtcta

SEQ ID NO: 938630 - DNA, 120 bp, Artificial Sequence
  ENSG00000184856_3 (sequence is synthesized)
catcatcccaggaggagtgaatgtctgtgtgtgtgtacctgagataagatgatgtcttgtccaatgctggtttccaccttgtgccctgagctgttgggagaggctcctgcgacctgtgac

SEQ ID NO: 938631 - DNA, 120 bp, Artificial Sequence
  ENSG00000184856_4 (sequence is synthesized)
cctgaagcagaataagtggactgaataaaggaatgatgcgtataaatgattgtaaaataaaaatttgtaaagtagattataattacacaagtgcactttaataaacaaggtggaatcaaa

SEQ ID NO: 938632 - DNA, 120 bp, Artificial Sequence
  ENSG00000184856_5 (sequence is synthesized)
tagttttcattcttcttatgagagaaattgggcctgatgctgaaggagaactcttctgtccactgcaagtccacttacatgagcagctaaataaatgaatgggattctgaaggactgtat

SEQ ID NO: 938633 - DNA, 120 bp, Artificial Sequence
  ENSG00000198491_0 (sequence is synthesized)
gaaaatttatcagcctggccatgtaaaaagtgaaaaagcaaggatgtagcccagaggccatttgctaaagagattagcatggctagaagggatccaggtgctattcctcaagacaatgga

SEQ ID NO: 938634 - DNA, 120 bp, Artificial Sequence
  ENSG00000198491_1 (sequence is synthesized)
agaaagacctcaaaggcatttcagagattttcaaggctgcccctcttatcacagacccagaggcctaggagggcagaatggtttcagggagcaagcccaggcactttctgtgggcttact

SEQ ID NO: 938635 - DNA, 120 bp, Artificial Sequence
  ENSG00000198491_2 (sequence is synthesized)
gcccaagaccacctccagactctgtgccccagcacagtactctgaggacaccccagcaagaactcaagcaggccaaggtgtggctcatgctgcagatctggaagtgtaccacaacccaga

SEQ ID NO: 938636 - DNA, 120 bp, Artificial Sequence
  ENSG00000198491_3 (sequence is synthesized)
gtggagggaagttaacatcctatggggcaaccttcagctattggaagacaggagccaggggatagatagccctttactcccaagtgatctggagatgcatttcatccggcttctcagatg

SEQ ID NO: 938637 - DNA, 120 bp, Artificial Sequence
  ENSG00000198491_4 (sequence is synthesized)
gttttctgggactgaacaacccttcaccagcggagatggccaacttgacaagacctccttccattggatttccctcctgctttgctgtgctccctctgccttactccagctttctgaggt

SEQ ID NO: 938638 - DNA, 120 bp, Artificial Sequence
  ENSG00000198491_5 (sequence is synthesized)
catgctccccagtcaaatactatcacataaacctctgccttgacttctgctttctgaaaacacaggctaagctaactggcaccctcgacaggctctgggcccaaccacggaatcttatac

SEQ ID NO: 938639 - DNA, 120 bp, Artificial Sequence
  ENSG00000198491_6 (sequence is synthesized)
ggagctacggaaagagaactgcaggtagatgatcagcagcaggaccgtggcccaaaacaagcaccaggggatagagcagaagttccagcctgagcccgtctggtcctgcgacttggtggg

SEQ ID NO: 938640 - DNA, 120 bp, Artificial Sequence
  ENSG00000198491_7 (sequence is synthesized)
gctgggcgcccgggagaaggtgtaggtggtcgcctcctcctccagcagcttctcgctgggcttccagtgcacgatgccctcctggcaggcctcgcagaactctccgcggtgccgccggtt

SEQ ID NO: 938641 - DNA, 120 bp, Artificial Sequence
  ENSG00000198491_8 (sequence is synthesized)
gtcctggcggctggccacgtggatgcggtactggccgccacgctcgccgtagcactgctcgcgcaggctggtgatgaggttgtccaccaggccctcgatgttctcctccagcatgctgga

SEQ ID NO: 938642 - DNA, 120 bp, Artificial Sequence
  ENSG00000198491_9 (sequence is synthesized)
ctcgtccagccgcgccgtgccgcactcatagcacagctgcttgaagacgcgcatgcgcaccgagcccgcccgctgggcgcggtccaggaacatgtggaagaggatgaccacgtagggcga

SEQ ID NO: 938643 - DNA, 120 bp, Artificial Sequence
  ENSG00000198491_10 (sequence is synthesized)
ctgccaggtgtgccagcaccaggagcagtggaacctgcggagacgggaggagagggaggaatagaagacgggcggaggtggtggaaacagccctaggaatggcgtgaggggacgtggagg

SEQ ID NO: 938644 - DNA, 120 bp, Artificial Sequence
  ENSG00000198491_11 (sequence is synthesized)
ccggcgccctgggttcattagctttccccaggaagccactcagccttgcaagtgcccctaggactacagcaggttcctcaggatgtcaccgggcatccagcagtgctctacctcctcagt

SEQ ID NO: 938645 - DNA, 120 bp, Artificial Sequence
  ENSG00000198491_12 (sequence is synthesized)
gctttccagaggcctaactcccaccaccccagcattgggcgtcattcttattcctcatgggcaaaatgcgcttggtgcactagagtgagagaggcatccatgtacacacagctagaggca

SEQ ID NO: 938646 - DNA, 120 bp, Artificial Sequence
  ENSG00000198491_13 (sequence is synthesized)
gaaccggcgcccagcacgtaacaggtgcccagtaatgtttcctgaattgaagtgaattggctgaaccagggcaagcaggaaggccttgcttctgacttccaggctgcaccactcagcctc

SEQ ID NO: 938647 - DNA, 120 bp, Artificial Sequence
  ENSG00000198491_14 (sequence is synthesized)
cccatcttatgtctcaaagacggaaaaattgtgactcagagaggaagagtaacacaggtgatcagtagaagagctgaaatccaactcaagtgtcgtagttcccagttagggactctttct

SEQ ID NO: 938648 - DNA, 120 bp, Artificial Sequence
  ENSG00000198491_15 (sequence is synthesized)
ctgacttccagtctacgccagcctaatagtgagattgaagctaaacacttgggttctacgtaatcttcctctccttggaaggtgccccagagctagggacctagaggcggcctgcaggga

SEQ ID NO: 938649 - DNA, 120 bp, Artificial Sequence
  ENSG00000198491_16 (sequence is synthesized)
tccaccttcctgggctactcacctgcctgaagcatgcaattccaggtactgcttccaaccagggctcagcacattgtgcttgaggttggggtctatgatgaggtcccagctgtcagccgg

SEQ ID NO: 938650 - DNA, 120 bp, Artificial Sequence
  ENSG00000198491_17 (sequence is synthesized)
ctttgcctcctccatcttctcatagaagactttcttccactcatctgtggtcacgcttttacacatggtctcgtcagtagtgagggaaggcaatttccaccttagtgagaacacggagag

SEQ ID NO: 938651 - DNA, 120 bp, Artificial Sequence
  ENSG00000198491_18 (sequence is synthesized)
tgagggtaggtgcagggcagggcagcgcagtctccacggtctaaaaatcctcatcgacaagaccaggaggaagcaggacccagctccctcctttgtccgcagtggaacctgtttccacgg

SEQ ID NO: 938652 - DNA, 120 bp, Artificial Sequence
  ENSG00000198491_19 (sequence is synthesized)
caaccaggcaggttgccagaagacagagcttggggaggagggagtctctgaagaggtgtttcaaggccctgaactgagattgcagaggcagagtttgtgggtctaaatgatccaagacag

SEQ ID NO: 938653 - DNA, 120 bp, Artificial Sequence
  ENSG00000198491_20 (sequence is synthesized)
agtgggggacctgaccagagattgagcttcagaccatctcaccctggcctggaaagagtatggggaggtgaggactgggaactggctcagtttcaccttgccgtcccctggaggcatcat

SEQ ID NO: 938654 - DNA, 120 bp, Artificial Sequence
  ENSG00000198491_21 (sequence is synthesized)
cagcatctggctgctacggtaaccatgatgccttaggcagccaaggagaaatgagggatggggagatgtaaatttgttagtagatggagcaataataataaactctctctcggcttcccc

SEQ ID NO: 938655 - DNA, 120 bp, Artificial Sequence
  ENSG00000285613_0 (sequence is synthesized)
gacagccatgggtgttggtgttgaggcagtaccaccgcatcagctctttaatggtcggcgcctgagggcccgtcacgggcagattcttcttgattttggctttgatcttctctccgggtg

SEQ ID NO: 938656 - DNA, 120 bp, Artificial Sequence
  ENSG00000285613_1 (sequence is synthesized)
ccatggcgaggatgggactttgaggacgggactctgaggacgggcgtgctggaggggcaaagaagagaagcagggtctgcctctgtcaccttggctggagtgcagtgctgcaatcatagc

SEQ ID NO: 938657 - DNA, 120 bp, Artificial Sequence
  ENSG00000285613_2 (sequence is synthesized)
tcactgtagctgccaactactgggctcaagcgagcctcccacttcagcgtctcaaatagctggaattacagagaatgcaggcttctccagagcaggcatttctgccttttgttcactgct

SEQ ID NO: 938658 - DNA, 120 bp, Artificial Sequence
  ENSG00000285613_3 (sequence is synthesized)
ctatcctcaatctgaagaacagtgcctggcacacaatgggagctcaacacatattttgtgagtgaacaaagggaagttttctccatgttgcccaggctgctctggaactcctgggatcaa

SEQ ID NO: 938659 - DNA, 120 bp, Artificial Sequence
  ENSG00000285613_4 (sequence is synthesized)
aagtgctgggattacagacatgagccagcacacccagccagctttttcatatgcttaaaaaacttcacaataaaaagtttagaaagtaagaagtagaataacatatgtggtaatacgtgt

SEQ ID NO: 938660 - DNA, 120 bp, Artificial Sequence
  ENSG00000285613_5 (sequence is synthesized)
atgtggtaatacgtgtaatataaatatgtataatgtataaaatatactttgtggtagtatcaatgacataatatgtacatttgtaggttttttattcatttacagatgaagataatctgt

SEQ ID NO: 938661 - DNA, 120 bp, Artificial Sequence
  ENSG00000285613_6 (sequence is synthesized)
taatctgttgctccatggtcaaatcaatagctaacccgatgattgattgatcttttacaatgtttttaagcatcttttggtaaataatcaatttaaattagcaggagggaattttgctat

SEQ ID NO: 938662 - DNA, 120 bp, Artificial Sequence
  ENSG00000285613_7 (sequence is synthesized)
aggactgtctgtttttaaatactttgaaatgtgcttaaattttgtttaataatatgttaagcaatatttaaatattaaaattttgctcaataatcactaaccccagacaaaaaaatttca

SEQ ID NO: 938663 - DNA, 120 bp, Artificial Sequence
  ENSG00000285613_8 (sequence is synthesized)
cctcattgttaacaattttgtgtattcttttaggcttaaaaattattatgtaaatatagaaaactacatatatgacctaagtgggcttatatttttctgtaattttttttcacttaacta

SEQ ID NO: 938664 - DNA, 120 bp, Artificial Sequence
  ENSG00000285613_9 (sequence is synthesized)
taaattatggtaatctttccctgtaaatccataaagaggtatcttattctttttaaccagcctcacagtgtttccagtacttcttggtctatagatatttttccttatcccatttagatg

SEQ ID NO: 938665 - DNA, 120 bp, Artificial Sequence
  ENSG00000285613_10 (sequence is synthesized)
gcaagttttcatgaaaatgtgatataattatgcaaaaaacgtttaaagtttaaagtgaaaagagaatctttgaagagattccaggttttctccagaccatgctaatcaggtttcccccct

SEQ ID NO: 938666 - DNA, 120 bp, Artificial Sequence
  ENSG00000285613_11 (sequence is synthesized)
caatttaattcaagatatttcatagaagccttcaaattttattttctaaaacactagatcatgatgttattggtgaccctctggggttggacagggtgcaatcaattaagattacagtca

SEQ ID NO: 938667 - DNA, 120 bp, Artificial Sequence
  ENSG00000285613_12 (sequence is synthesized)
gctctgagtattaggagcccagattaatcgtgacttaaacaactaagtcggctcaggtggaaatttataactctaatgcatattttttttgtttatttgtttatttatttatttattttt

SEQ ID NO: 938668 - DNA, 81 bp, Artificial Sequence
  ENSG00000285613_13 (sequence is synthesized)
tattttttttgtttatttgtttatttatttatttattttttagagacgatctcagttctctggaacctctgtctcccgggt

SEQ ID NO: 938669 - DNA, 120 bp, Artificial Sequence
  ENSG00000249207_0 (sequence is synthesized)
gactaagatgtcagtgctggccaaagggggcgccgagaagctgaaggaaagaagacgcagaatgttagattaaaggaggcaggatgggctaaatactcctatacagtccacgcaaagagg

SEQ ID NO: 938670 - DNA, 120 bp, Artificial Sequence
  ENSG00000249207_1 (sequence is synthesized)
ggttggacgagctcggagagaaagaaaatgatatatgtcagaaactcagatatccgtaaagaaagaaagcattgggaaaagaataaatgaagggaagggtatcaatttacttctaagaat

SEQ ID NO: 938671 - DNA, 120 bp, Artificial Sequence
  ENSG00000249207_2 (sequence is synthesized)
tccccaaaaggaacaaatggaaaatagaattttatctgcttcatttgcaatgtcacaagtatggatcattttcataaaattcatctcatacccctgggatgaaagagttgatgagttttt

SEQ ID NO: 938672 - DNA, 120 bp, Artificial Sequence
  ENSG00000249207_3 (sequence is synthesized)
cttcccaggaaattacctttccacacagtctgagagtctggaagtcaagttggatgcgggagcatcgtgcccccctatagcatacagcagtccattccaggtcgtcactcctacgccacc

SEQ ID NO: 938673 - DNA, 120 bp, Artificial Sequence
  ENSG00000249207_4 (sequence is synthesized)
tctcctttttgacatctgtgcacacagtgtccacttattagtatgaggatcaaaacattctactgatttgagacaagaacttccatcacgaccaccaactgcataaagtctgcaaaaaga

SEQ ID NO: 938674 - DNA, 120 bp, Artificial Sequence
  ENSG00000249207_5 (sequence is synthesized)
atatatgaaatgataaataagacatgtgccattatgcttagaacaaagaggctcttcttatgttgttatctcattgaatttaaggtgccatcagttataaaacacactgtcaatgtgtgt

SEQ ID NO: 938675 - DNA, 120 bp, Artificial Sequence
  ENSG00000249207_6 (sequence is synthesized)
gtcattaaaaaagtatgctatgtttgaaatgacacatgtaagtatcatatatcactctgtatatacatgaaaaggaaaacaaactgcacatgaaggcagtgacaactgtttcatcactgc

SEQ ID NO: 938676 - DNA, 120 bp, Artificial Sequence
  ENSG00000249207_7 (sequence is synthesized)
gttgtaatatgcatggaaattcagaggtgttaaaatatgtcttagaatagacaaaatatggtgtataaatataccatggctttttttttaatagttaagactttattatcaaggaaagaa

SEQ ID NO: 938677 - DNA, 120 bp, Artificial Sequence
  ENSG00000249207_8 (sequence is synthesized)
gctaaccttctctgagcacctaccataggttaggcacttcacatgtaccgatttaatcatcacagtgatatgagaaactgtttgaatccctgtttcacagtgtaaagaaacaagggttca

SEQ ID NO: 938678 - DNA, 120 bp, Artificial Sequence
  ENSG00000249207_9 (sequence is synthesized)
cagagagtaagagacttgcacagggtcacccagtaagcagcagaattgggacacatagtttcattaatgaacagttggacagtcaacacagtcatgtagaatgtacttgtaatagtgaaa

SEQ ID NO: 938679 - DNA, 120 bp, Artificial Sequence
  ENSG00000249207_10 (sequence is synthesized)
taggagaataaaaatatagcttgaaacaatggcataaaaagtaacatttgttatgtatgaacaatgatccttcattaatttaaattactgcagaaaaggatataggttatcatgtgagca

SEQ ID NO: 938680 - DNA, 120 bp, Artificial Sequence
  ENSG00000249207_11 (sequence is synthesized)
acctaaatgttacctagtagatcaatttaaattcattatcaatcaatacactgcactaatttgaaagtcttttactctgaacctaaaagtttgtaaaatattttaaatatttgaacacaa

SEQ ID NO: 938681 - DNA, 120 bp, Artificial Sequence
  ENSG00000249207_12 (sequence is synthesized)
tatttcttgttaagcaaaaatcttcttgtacttactattcatttgggaagctttccataaatattttttctactagttttttaaaagagtaaatttacgttgttgctcatagaaaagatt

SEQ ID NO: 938682 - DNA, 120 bp, Artificial Sequence
  ENSG00000249207_13 (sequence is synthesized)
atacattttgaatttacaaatgttagttaatacttaactgtttttatcatttctcaagaaataatattttaagtatcccaaatttctgccaattaaaactctagttatttatatttgggt

SEQ ID NO: 938683 - DNA, 120 bp, Artificial Sequence
  ENSG00000249207_14 (sequence is synthesized)
aaatctacatacttaaccacagatttcctaattaaggtatgccactatgtcactgaaactgtttcttaaataataagatgaccatatcttaaacagcaacatatggttatagcaatatct

SEQ ID NO: 938684 - DNA, 120 bp, Artificial Sequence
  ENSG00000249207_15 (sequence is synthesized)
gtctctgaatgaacttgtgaagcagagctacctatccgccctgggccacttgcccacctatgaggtgatagaaaaacaaacttccatctaatttaagccactgtgtttctgaatctcttt

SEQ ID NO: 938685 - DNA, 120 bp, Artificial Sequence
  ENSG00000249207_16 (sequence is synthesized)
gttatatcattttagcctatgccttactaatatacttcctaaagttaaatgagcaagttatgtagttacgtagttaactatgaggtgtgtgtatgtacataccattgttttcatgcctaa

SEQ ID NO: 938686 - DNA, 120 bp, Artificial Sequence
  ENSG00000249207_17 (sequence is synthesized)
tatatctgattctaaacacttaaaacttcactctctagttccaagtgaaacacaggtaaaataaaatgtgagcaataaatggcataaagacaggttttctgcttaaacaatttggagttt

SEQ ID NO: 938687 - DNA, 120 bp, Artificial Sequence
  ENSG00000249207_18 (sequence is synthesized)
aaaaggtcaactgtgtaactgtaggacctatccttttcgtatgccaattcttcagccttcccagcagttctgggaactattatgattcaataacttcctatttctgtttaaatcatccag

SEQ ID NO: 938688 - DNA, 120 bp, Artificial Sequence
  ENSG00000249207_19 (sequence is synthesized)
tcaacttcagttgcttaaaactaagaactttgatggatgcagcatacagatagccttcagagggttcatgaactccttgaaccctatatgaaatatttcacacacacacacacacacaca

SEQ ID NO: 938689 - DNA, 120 bp, Artificial Sequence
  ENSG00000249207_20 (sequence is synthesized)
cacacagtgttttctggggagaggttacatagcttatgtcacattctcaatggagtccatgataagatgtgggcatatatgtgagaggggagacaatgcaatattatcctttccagatac

SEQ ID NO: 938690 - DNA, 120 bp, Artificial Sequence
  ENSG00000249207_21 (sequence is synthesized)
aagttcattataaacttcttctgctatccctggaaacacattttttttttcattagaggaatttaatttaaaactgaaccagaattaatagactagatcaaataataagatgcagagaca

SEQ ID NO: 938691 - DNA, 120 bp, Artificial Sequence
  ENSG00000249207_22 (sequence is synthesized)
cccatgaggagtggtgatattatgcagataacctcttgttgggaggggaggaggacctatgccttcaggatgagttgaagagtagcaaatcaactgaccaaaaaataagagtttgggcta

SEQ ID NO: 938692 - DNA, 120 bp, Artificial Sequence
  ENSG00000249207_23 (sequence is synthesized)
aaaaataagagtttgggctatctgcagtggaaagacagagaggcaagcaaccagtaagatggggtagaagactgtggataaggagttatggggccaggtgtggtggctcatgcttgtaat

SEQ ID NO: 938693 - DNA, 86 bp, Artificial Sequence
  ENSG00000249207_24 (sequence is synthesized)
agaatcgcttgaacccaggaggcaaagactgcagtgacccaagatcccgccactgcattccagctaaaaaaaaaaaaaaaagagtt

SEQ ID NO: 938694 - DNA, 120 bp, Artificial Sequence
  ENSG00000249207_25 (sequence is synthesized)
actaaaaaaaaaaaaaaaagagttatgggtgagtcaagagattatacttgtaatgtagccaagcttggcattctcaagaactaagagaagagaattaactgaagaaagaaggtgaaacta

SEQ ID NO: 938695 - DNA, 120 bp, Artificial Sequence
  ENSG00000249207_26 (sequence is synthesized)
gttagaatgaataattagctatatgctacagctgaactctgtgattagtcacaagtatataggcaatatattaatagtacagtgtttgttaagagcatgaaatctacaacttaatttgag

SEQ ID NO: 938696 - DNA, 120 bp, Artificial Sequence
  ENSG00000249207_27 (sequence is synthesized)
ttcaaaaatgcaaccatttccaagtgatcaaggtcactaccaacagtggtaagacagattaatggtgtgtatctttgatatgatgtgaaaaaaatggcactttatctctgtgatattcct

SEQ ID NO: 938697 - DNA, 120 bp, Artificial Sequence
  ENSG00000249207_28 (sequence is synthesized)
ccccaaagcccataacctcagtctaattatgggaaaacaaatctcaactgagtaaggcattctacaaaacacctgattagtactcccaaaactgccaaggtcatcaaaagcaagtaaaat

SEQ ID NO: 938698 - DNA, 120 bp, Artificial Sequence
  ENSG00000249207_29 (sequence is synthesized)
ctaggaaactgtcacagccaagaggaggctaaggagacataatgatttaatgtaatgcgatatcttggataggatcctcgaacagaaaaagggcattaggtaagaaactaaagaaatgtg

SEQ ID NO: 938699 - DNA, 120 bp, Artificial Sequence
  ENSG00000249207_30 (sequence is synthesized)
aataaagtatggactttagttaataataatgtatcaccactggttcattactataacccatgcaccatattaatgtgagatataaataacaggggaacctgggtatggggtatataggaa

SEQ ID NO: 938700 - DNA, 120 bp, Artificial Sequence
  ENSG00000249207_31 (sequence is synthesized)
ccggctttagataatagggcagtctaatgacttctgaattcctcagataaggagttttgcctccagatggtctgcttgatggccaccaggtgatctttgctgtcctcaaaagaactctag

SEQ ID NO: 938701 - DNA, 120 bp, Artificial Sequence
  ENSG00000249207_32 (sequence is synthesized)
acactgggtaattcatagtggaaataaaagtgtggacaaaaatagttctgaagaattactctgaacacagtaagaatctatgcatttgacccaggagagttaaaatgttaacatggattc

SEQ ID NO: 938702 - DNA, 120 bp, Artificial Sequence
  ENSG00000249207_33 (sequence is synthesized)
agcggtctcccctcccattgttgcagccctccagtagtcctatcagctttaatcaggctagaacacttcatcatgcaagtggtagcagataattaataatttctctgagtattaacttac

SEQ ID NO: 938703 - DNA, 120 bp, Artificial Sequence
  ENSG00000249201_0 (sequence is synthesized)
acaaacacacacaggcctgagctccggatatttctcctgttctggagacagtgagaagtgaaagagaaatggctgcccctgcaccacttaccgcgaaggaggctcaaggctggggggccc

SEQ ID NO: 938704 - DNA, 120 bp, Artificial Sequence
  ENSG00000249201_1 (sequence is synthesized)
ctctgccttccagtgaccgcccgtgtcacatcctgacccgctcagcaggagaacacagcaggtccctccgaccgcagtcggcctctccagcctgccatgcctctggccatgaggcgaccc

SEQ ID NO: 938705 - DNA, 120 bp, Artificial Sequence
  ENSG00000249201_2 (sequence is synthesized)
gctggagtgatggattcccgtcactaccacccacagggcgagggggtgcattggtctgcttgggccgctgtaacaaaatgccacagcctggatgagtgactgacattgcttccccaccgt

SEQ ID NO: 938706 - DNA, 120 bp, Artificial Sequence
  ENSG00000249201_3 (sequence is synthesized)
tctggaggctggaggcccgagatcgaggtccctgacactatttcagtgatgccagagcccaggaggagtcgaccaagccccagcgtggccataagcaccttcgcaggaccacggagtcgc

SEQ ID NO: 938707 - DNA, 120 bp, Artificial Sequence
  ENSG00000249201_4 (sequence is synthesized)
tgcaggtgttcagccctgttgagagtgggagtcggtgtcgatggtcacagctcagtaactcatcgtcaccagcgagtaccacagagcagacacaactgcacttctctgtagagcctccag

SEQ ID NO: 938708 - DNA, 120 bp, Artificial Sequence
  ENSG00000249201_5 (sequence is synthesized)
tcgatactgagagccactggggcgtctgacacccaagggtgcagacattcactccaagtccagagaccgcgccctttctaaggccctgtctcacagtcgccccgtgctcattgtgccgga

SEQ ID NO: 938709 - DNA, 120 bp, Artificial Sequence
  ENSG00000249201_6 (sequence is synthesized)
tgtttccacagccacagagacggtgcgtgaaggtgaggtgcagcctagtgcatatgactgacagaaacgtgaagccacagtggacgcctggatgagacacagatcaccttccaaatctga

SEQ ID NO: 938710 - DNA, 120 bp, Artificial Sequence
  ENSG00000249201_7 (sequence is synthesized)
tcctctatcccagcctcccaatcccagcctccccaatcccagcctcctaatcccagcctcctccatcccaggacccccactcccagcctcccgatcccagcttctctgatcccagcctcc

SEQ ID NO: 938711 - DNA, 120 bp, Artificial Sequence
  ENSG00000249201_8 (sequence is synthesized)
cctaaaacccagactctatgaatcccagcctctgaggtgggaactgttagtaaccccactccatggacaagaaagctggggcctggcgaggctaacagactatcctgatggtgtgaggga

SEQ ID NO: 938712 - DNA, 120 bp, Artificial Sequence
  ENSG00000249201_9 (sequence is synthesized)
gggatcggcctctgagggctgcttccacccatctcaccagtggctgcaggctccaggcgccactttccttgagtctatgttctttccaagcatcctgcagctccagaagctctggagccg

SEQ ID NO: 938713 - DNA, 120 bp, Artificial Sequence
  ENSG00000249201_10 (sequence is synthesized)
ccagcactgagagaagcgatggagctgcatgcagggaaactttgttgacagcggtgtctggatggaccagcagagggcactctcacccacggggaaaatcgtgcgcccggcctcgtccac

SEQ ID NO: 938714 - DNA, 80 bp, Artificial Sequence
  ENSG00000249201_11 (sequence is synthesized)
tctcacccacggggaaaatcgtgcgcccggcctcgtccaccgccagaagacgccgctacacaatggagtctcgctctgtc

SEQ ID NO: 938715 - DNA, 120 bp, Artificial Sequence
  ENSG00000249201_12 (sequence is synthesized)
acttggagaacttttctgtctagctaaagatttgtaaatgcaccaatcagtgctgtgtctagctaaagtttgtaaacgtaccaatcagcactctgtaaaaatgggccaatcagcactctg

SEQ ID NO: 938716 - DNA, 67 bp, Artificial Sequence
  ENSG00000249201_13 (sequence is synthesized)
tcagcaggatgtgggcggggtcaaataaaggaataaaaagctggtagccgagccggcagtggcaaac

SEQ ID NO: 938717 - DNA, 120 bp, Artificial Sequence
  ENSG00000223692_0 (sequence is synthesized)
gtttattgtcaagattcagtcacatagtgtgtgtgaaaatgcttcgaaactggttggaagaagaagcttaacagtgacaaagatgctgtcttcaacagaaactggagtctgcttcagatt

SEQ ID NO: 938718 - DNA, 120 bp, Artificial Sequence
  ENSG00000223692_1 (sequence is synthesized)
aacacatacagaagaattcatatgtgtggttcctgaaaacctatcaggatgttcattgatggaagtgagatcattagagggagcatttcaagaggaaggtttgatctgctcatctttctg

SEQ ID NO: 938719 - DNA, 120 bp, Artificial Sequence
  ENSG00000223692_2 (sequence is synthesized)
tctccagcaccttgcacattttaggcattttaatggatgcttattgagttaataaaagtgaaaacttcacatggtgtttattcagtttcaaataaagaatcctctgtaaatggattcaaa

SEQ ID NO: 938720 - DNA, 120 bp, Artificial Sequence
  ENSG00000236778_0 (sequence is synthesized)
ccgcgggccgccgggccggggtcgccgcccgggctcggtcagtcggtaccttcatgaaggtctctaccgcgcctttggccgtgtccagaaaaagaaatggaaactaagtaacatgaatta

SEQ ID NO: 938721 - DNA, 120 bp, Artificial Sequence
  ENSG00000236778_1 (sequence is synthesized)
acatagtccagggtcacaaagcaacatggaacaagaacctggatctgaattcagaggcagaatgctgggaaaggccttgtgaggacataaccaggaagagagtcctcaccagaacctgac

SEQ ID NO: 938722 - DNA, 120 bp, Artificial Sequence
  ENSG00000236778_2 (sequence is synthesized)
catacctgcaccctgatctcaagcttccagcttccagaaccatgagaaatcaatgtttgttgttttagccacccagtctacagaaatttgttatagccaccctagctgactaccacattg

SEQ ID NO: 938723 - DNA, 120 bp, Artificial Sequence
  ENSG00000236778_3 (sequence is synthesized)
gacatcacagcaaacactacaaccaataaaagaaatggctgaaatcctttggaaccaatatgaccaactggagtcggtgcagaaggagcttgctgacaacgcagcctgaatttccaccct

SEQ ID NO: 938724 - DNA, 120 bp, Artificial Sequence
  ENSG00000236778_4 (sequence is synthesized)
aatttgcacatgtgatacatgagatagcatgaagagataactgagcatgcccaaggactttccagacttctgctttccttccaccaatcacctgctaatctcagaatccaccccctgaaa

SEQ ID NO: 938725 - DNA, 120 bp, Artificial Sequence
  ENSG00000236778_5 (sequence is synthesized)
cttttctaataaaaatactgttttgaaggcagcacagggagacagatttgagcttgacttctgtctccttgggattgactttcagtacaaagcttttcttttctcaagaacatggtgtca

SEQ ID NO: 938726 - DNA, 120 bp, Artificial Sequence
  ENSG00000236778_6 (sequence is synthesized)
tagtatgggcttctagtgcattggacagtgagccccttttactcgataacaatatcagctatatttttctccctctttcactgtggactaagcattcagcttcctcttattaatcccata

SEQ ID NO: 938727 - DNA, 120 bp, Artificial Sequence
  ENSG00000236778_7 (sequence is synthesized)
aaatcctataccatttgcgagatttgctttatgcatattagcaatacagtacaaatatagtgtgtttgatttgcactgtagttgtattgtattgccactctgtataaaaatccaatcatc

SEQ ID NO: 938728 - DNA, 120 bp, Artificial Sequence
  ENSG00000236778_8 (sequence is synthesized)
agctagatacctacctaacaaaaaagttgctcctagaaggaaggaagcaaagctaatgtttagtggatatgactgagtggcttttataagcagtcatttgataaataaacgtttctaggt

SEQ ID NO: 938729 - DNA, 120 bp, Artificial Sequence
  ENSG00000236778_9 (sequence is synthesized)
ggcaaagaagaagacagctcatcacaggcctgagaatcaggagagtcaatggtattagtgcttgtccggaagccatcatgcttcaaaaccaagaagagctgattttccagttggagtcta

SEQ ID NO: 938730 - DNA, 120 bp, Artificial Sequence
  ENSG00000236778_10 (sequence is synthesized)
aaggccaaacgccccatggaggcttgtcagttttgttcaccactgttttcctagcatccagaacagtaggcatttacaaaacatttgggtagtggaataatatgtacttctccaggactc

SEQ ID NO: 938731 - DNA, 120 bp, Artificial Sequence
  ENSG00000236778_11 (sequence is synthesized)
ttaagagaagaaaatgagcggatttcttctgtgaccagaaatgagtggcagatgtgttcacagtactacaatccaaggcatgattttgtgctgtccttggaaagcaccaaactaaagaag

SEQ ID NO: 938732 - DNA, 120 bp, Artificial Sequence
  ENSG00000236778_12 (sequence is synthesized)
ccggctcctgtgtccacgtggccttgccaaaaggcagctagacgttctcagggatttcccagaaggttgggtttcccaagaagtagattctgagacagagagttgtgtgcaggcgtctat

SEQ ID NO: 938733 - DNA, 120 bp, Artificial Sequence
  ENSG00000236778_13 (sequence is synthesized)
ccgtgggagggaaggcactctctgtcaagctgctgtcaccttacctgaagtaaggagtccacgcctgcatgtccgaggaaaacagttttctcaaacacattagttgaaaaactgaagacg

SEQ ID NO: 938734 - DNA, 120 bp, Artificial Sequence
  ENSG00000236778_14 (sequence is synthesized)
ctgcctaaaatacaagctgagttagagacagcccttgtaagactagaaaaagaaatggaaactaagtaacatgaattaacatagtccagggtcacaaagcaacatggaacaagaacctgg

SEQ ID NO: 938735 - DNA, 120 bp, Artificial Sequence
  ENSG00000236778_15 (sequence is synthesized)
tagacagactgaagcaacctcttaaggtggtagctaagagaactcacacccagaccctactctctcaaggcagagggaggacgaaactcaaccaggaagccagagaacacaggagccact

SEQ ID NO: 938736 - DNA, 120 bp, Artificial Sequence
  ENSG00000236778_16 (sequence is synthesized)
ctacatgctctacacaaaccatcccctggaaaagatagcagggtacagactagaaccgcatagtaaggctacctatcatgaatgcactcctgcctgggtgacagaatggctctccagtgt

SEQ ID NO: 938737 - DNA, 120 bp, Artificial Sequence
  ENSG00000236778_17 (sequence is synthesized)
cttcttcaagcaagtgtgtcgacagtgattcaagtaactgaaagagaaaccaacaaagtatcatttgtcgcaatatctcaattattctcttttaaccatccttatcactcttgattttcc

SEQ ID NO: 938738 - DNA, 120 bp, Artificial Sequence
  ENSG00000236778_18 (sequence is synthesized)
ctgcctaaaatacaagctgagttagagacagcccttgtaagactaggctcaaactgtaatactggctcttctcaggtcttgagcctacttgccttcagattggaactttaccatctgctc

SEQ ID NO: 938739 - DNA, 120 bp, Artificial Sequence
  ENSG00000236778_19 (sequence is synthesized)
agaatgaggttactgcctaggcaaagaagaagacagctcatcacaggctcagccaattcattgaggctcttcatgttactctggaatcacaaaatgtaagaataaaaggggtagaaagtc

SEQ ID NO: 938740 - DNA, 120 bp, Artificial Sequence
  ENSG00000236778_20 (sequence is synthesized)
acaggtttcccaaccttgtgatgactataggaaccgggattcaagggagacacaggcataaaggaagatgtcagggagaccatcaacaaagtatcatgtaaggcaggaatttgctcacag

SEQ ID NO: 938741 - DNA, 120 bp, Artificial Sequence
  ENSG00000236778_21 (sequence is synthesized)
gaaaatgggaaggataaaaggggacgttagtgagaatgtcattttaatattcagttcactaatctccaaagaccgatgttctaaaagaaagtgtgaataaaatagtttaacatcttatta

SEQ ID NO: 938742 - DNA, 120 bp, Artificial Sequence
  ENSG00000236778_22 (sequence is synthesized)
tgcaatatctatcactgatgataggcacataaggagttctcgttacatctacttaatttgccagattaactgatgctccttgttccttctttctttactttttctttttagagatagggt

SEQ ID NO: 938743 - DNA, 120 bp, Artificial Sequence
  ENSG00000236778_23 (sequence is synthesized)
tccagggtcacaaagcaacatggaacaagaacctggatctgaattcagaggcagaatgctggagatagggtcttgttctgtcgcccaggcttgggtgcaatggcatgatcacagctcact

SEQ ID NO: 938744 - DNA, 120 bp, Artificial Sequence
  ENSG00000236778_24 (sequence is synthesized)
caaaactagtagaattccctctgatacatttgtgaacctctgctcctactacaagttttatgctactgaagtcagttgcctttttctcaaacctgcttataccaattaaacttgttattg

SEQ ID NO: 938745 - DNA, 120 bp, Artificial Sequence
  ENSG00000236778_25 (sequence is synthesized)
aaattaattaattaaataggtaaaccagtgaaatatgaaacaaaagtcagtcactaaagaaattactggcaaattaagtataagcaaaacaactgcaaaagtctcgaaaaagtgagtaga

SEQ ID NO: 938746 - DNA, 120 bp, Artificial Sequence
  ENSG00000236778_26 (sequence is synthesized)
aatttacagatattttgttggcaaatgaaatacatttgtagtttaagttaaaatttaaaattaaagatatgtatgtatcatttttaaatttctctgtttaaattgactttttcccttcac

SEQ ID NO: 938747 - DNA, 120 bp, Artificial Sequence
  ENSG00000236778_27 (sequence is synthesized)
caatcacaatatcagtgttggataagggaactttcactatatcctgtgttgtatttgtatggtacttttgatcattcttttaataaaagcacaatctatctagaaaagcaaaaataaaga

SEQ ID NO: 938748 - DNA, 120 bp, Artificial Sequence
  ENSG00000236778_28 (sequence is synthesized)
ggctccttcaggaggtatccaaaggcattgttatggtgggagatgacagctccatgcctgttattgcctctgaagaccatgcaggacaccatgtggagatagaagacggtgacattgaga

SEQ ID NO: 938749 - DNA, 74 bp, Artificial Sequence
  ENSG00000236778_29 (sequence is synthesized)
gcaggacaccatgtggagatagaagacggtgacattgagaatcctgaccttatgcagtttataaagtaaataaa

SEQ ID NO: 938750 - DNA, 120 bp, Artificial Sequence
  ENSG00000236778_30 (sequence is synthesized)
ttttttttttttttaacttactctacctttaaacaaatttatttattttcttattctccatgtatttagggtgcaatatattcacatttggaagcaatacaattgcatttctttaaaaca

SEQ ID NO: 938751 - DNA, 120 bp, Artificial Sequence
  ENSG00000236778_31 (sequence is synthesized)
cggaataagtttcagacttttcaccatcaggtcaaactggtctctcatttgacatttcattttcttttccctaatttgggcaaaaggttaaaaatagtttattcttcctgagcagagaca

SEQ ID NO: 938752 - DNA, 120 bp, Artificial Sequence
  ENSG00000236778_32 (sequence is synthesized)
actgcaaatcaacagaagtacatagcagtagccataacactaatggccaataacttttgagtgttctacatacactaggcacagttctaggtgttcagcaatgacttagctcctttaatc

SEQ ID NO: 938753 - DNA, 120 bp, Artificial Sequence
  ENSG00000236778_33 (sequence is synthesized)
agattggaacaaagcctgcggagctcagaacctgtgcagttgactgtcacattatatcactcttacctcccagcgatctacagtaaagcccccaccaagggactgaggagagagggaagg

SEQ ID NO: 938754 - DNA, 120 bp, Artificial Sequence
  ENSG00000236778_34 (sequence is synthesized)
caggcctgagaatcaggagagtcaatggtattagtgcttgtccggaagccatcatgcttcaaaaccaagaagagctgattttccagttggagtctaaagtgacttgctgaggttggtact

SEQ ID NO: 938755 - DNA, 120 bp, Artificial Sequence
  ENSG00000236778_35 (sequence is synthesized)
caacagggaaggtgagaagaggattatcaaagacattgtgatgatagaatggacaggacttggtgaactgagttgatgcaggcagaatcatgatattgtgtgattaaagccatcttgtgt

SEQ ID NO: 938756 - DNA, 120 bp, Artificial Sequence
  ENSG00000236778_36 (sequence is synthesized)
catataaggtcttgagcctacttgccttcagattggaactttaccatctgctctcctggttctcaggccttcaggggagtctagaactatgccactgactctcctggtctccagtttttc

SEQ ID NO: 938757 - DNA, 120 bp, Artificial Sequence
  ENSG00000236778_37 (sequence is synthesized)
gcccgcgggccgccgggccggggtcgccgcccgggctcggtcagtcggtaccttcatgaaggtctctaccgcgcctttggccgtgtccaggaaaggccttgtgaggacataaccaggaag

SEQ ID NO: 938758 - DNA, 120 bp, Artificial Sequence
  ENSG00000236778_38 (sequence is synthesized)
ttagtctcctatactgcttcagacttcagggactcagataatgaatgctgagataatgtggatgttttatcattctgtagcatggtgatcagggattccagaaacataaaggtaaagttc

SEQ ID NO: 938759 - DNA, 120 bp, Artificial Sequence
  ENSG00000236778_39 (sequence is synthesized)
taaccttataaagaaacgacatggtcagtgaaagagcactgggctggaaattacaagtcccaggtcccaatgcagaatctgccactaagtaagctgtgagggcttaggcaagccatttca

SEQ ID NO: 938760 - DNA, 120 bp, Artificial Sequence
  ENSG00000236778_40 (sequence is synthesized)
cttttctctggctcattttatttgcatgaaaagaaagaaaaaggaattcattgtgattctgaaccttttcactccccaaggatcccctttattcctccccccattttcatatgttgagaa

SEQ ID NO: 938761 - DNA, 120 bp, Artificial Sequence
  ENSG00000236778_41 (sequence is synthesized)
tatagtcatgttcattgttaatttatcaaaaatatatatatataatttccaattcagcttagcattacaaaattgattgacattgattgagttgatgtaataccctccaaagcaaagaaa

SEQ ID NO: 938762 - DNA, 120 bp, Artificial Sequence
  ENSG00000236778_42 (sequence is synthesized)
ccagattaatttgtctgggtggttaatcttaattcctaagagttaagaggctgcaggttgggactgtctgcatccagttgactataagttttttgttttgttttgtttttacaagtctga

SEQ ID NO: 938763 - DNA, 120 bp, Artificial Sequence
  ENSG00000236778_43 (sequence is synthesized)
gagtcaatgctatttatatttgtatttctattcagtccagtgcttggacaaatggtacctcagagggtcctgtgggttcagcaaagcagctcaggagcagaaatgggggtgggaaaagag

SEQ ID NO: 938764 - DNA, 120 bp, Artificial Sequence
  ENSG00000236778_44 (sequence is synthesized)
gagtcttagggccccaaaacctatttcatctacagcagcctcacttttttctgctttaaatgctagattctgcttaagattttctttttcttttcctttttttttgagacagagtcttgc

SEQ ID NO: 938765 - DNA, 120 bp, Artificial Sequence
  ENSG00000236778_45 (sequence is synthesized)
tttttcttttcctttttttttgagacagagtcttgctcaattgcctaggctggagtgcagtgatgctatcttggctcactacaacttccccttcttgggttcaagtgattctcctgcctc

SEQ ID NO: 938766 - DNA, 88 bp, Artificial Sequence
  ENSG00000236778_46 (sequence is synthesized)
cctcagtctcccgattagctgggattacagatgtgtgccaccacccccagctgaaatgttagccaggctgatctcgaactcctggcct

SEQ ID NO: 938767 - DNA, 120 bp, Artificial Sequence
  ENSG00000236778_47 (sequence is synthesized)
ggcgtgagccaccacacctggccttaagatttgctttgaagaaagcgtttaaaccataaaaataatttgaaaaatatgacttaatcaaactcaattatatagatgagaataatgaggcat

SEQ ID NO: 938768 - DNA, 120 bp, Artificial Sequence
  ENSG00000236778_48 (sequence is synthesized)
gcatagaaaaattaaatgaaactggcccaaggttatagagctaattaatggcaaaatactcattcagtcaatcaacaaatatttattgaacactgtagaaataaaaattgtaaagctaaa

SEQ ID NO: 938769 - DNA, 120 bp, Artificial Sequence
  ENSG00000236778_49 (sequence is synthesized)
gctttgatttgttcttagtttaaaaacaatctgtgagtcactgtattggattagaagcattaggatgaaagaatcttgttttcataaattggtggagaactgacattatcgtgtatgtta

SEQ ID NO: 938770 - DNA, 120 bp, Artificial Sequence
  ENSG00000236778_50 (sequence is synthesized)
ctattgttcaataagacaaggaagagagggcaggggcatattagcattcaggtgaccacaggaggttggggacaggtcaggtttggtaaagggcttgtttcaatttaaatctatggtggc

SEQ ID NO: 938771 - DNA, 120 bp, Artificial Sequence
  ENSG00000236778_51 (sequence is synthesized)
tcaggctctgattgtcatactagtgctctcattaatgtgcacagggaaggagccaagaaccccacttgacccaagattaacattaaggttttgtttcatttcccagattaaatatgtgat

SEQ ID NO: 938772 - DNA, 120 bp, Artificial Sequence
  ENSG00000236778_52 (sequence is synthesized)
tagcaccaaacctggaaaaacccgtggctataggatatgtgtaatttaatctataaaatgtatttgtaaaagccaattcattgtacatgttcaacttaataagttcactggcattatgat

SEQ ID NO: 938773 - DNA, 120 bp, Artificial Sequence
  ENSG00000236778_53 (sequence is synthesized)
agaactatgccactgactctcctggtctccagtttttcaacttcaaatcttgggatttagtctcgatgatcataggaaatcagaagtggagaggatgtatgcagagggagctgtgagaag

SEQ ID NO: 938774 - DNA, 120 bp, Artificial Sequence
  ENSG00000236778_54 (sequence is synthesized)
ggactcttgatgggctgagatgccacgctggcaagcaggtggtcaacctctaggagattcaacaagcatgcctgtgagggttcagagcgctgtgtcaggaatgtgatgggaagtaacagg

SEQ ID NO: 938775 - DNA, 120 bp, Artificial Sequence
  ENSG00000236778_55 (sequence is synthesized)
caaaggcaaaatattactggtattaaggaaatggcgttaaagaaaacggacacttcactgtctacttgtgtcagagcttccccatggtcatttaatctaacacgcctgtaagctaagtgt

SEQ ID NO: 938776 - DNA, 120 bp, Artificial Sequence
  ENSG00000236778_56 (sequence is synthesized)
gcgtcagggccgccggcctctccttggctgttggagagccatagaatacctgtttcagagctgaaggggacctgagcccatgataatccattacctcgtgagaaagcggaaaaactgact

SEQ ID NO: 938777 - DNA, 68 bp, Artificial Sequence
  ENSG00000236778_57 (sequence is synthesized)
tacgtctttttagtggaatatagatacagaagaaataaggtaaattagatcactaggagttgtagtga

SEQ ID NO: 938778 - DNA, 120 bp, Artificial Sequence
  ENSG00000236778_58 (sequence is synthesized)
gaagaaataaggtaaattagatcactaggagttgtagtgaatgaagtcagagaatatataacttctctttttgcacaaaaaaagataaaggaaaaactctaatatgtttttaggtagaaa

SEQ ID NO: 938779 - DNA, 120 bp, Artificial Sequence
  ENSG00000236778_59 (sequence is synthesized)
aagagcaaggaaaaactgaggctgtgagaaaggtataattggtatggcaggtctctggagcaggagaggacagggtcagcttcatagatggggtcattaggatgtgaaagatggagcaat

SEQ ID NO: 938780 - DNA, 120 bp, Artificial Sequence
  ENSG00000236778_60 (sequence is synthesized)
gacttctctgagaccagaaataataacaagaatacaagcaaagtaactagcacaattcccagtgtgatggttaattttatgtgtcaacttgactggatcacaggatacccaggtatttgc

SEQ ID NO: 938781 - DNA, 120 bp, Artificial Sequence
  ENSG00000236778_61 (sequence is synthesized)
tcaaacattattcttggtctgtctatgagggtgtttctggatgaaattaacatttgaatctatagactgagtaaagcaaactgccatccctaatgtgggtggacctcacgcaatcagttg

SEQ ID NO: 938782 - DNA, 120 bp, Artificial Sequence
  ENSG00000236778_62 (sequence is synthesized)
agggctaaatagaacaaaaaggctaagtaagagagagttccttctgcctgactgcctttgagctggaacattggtgtttttcaggctcaaactgtaatactggctcttctcaggtcttga

SEQ ID NO: 938783 - DNA, 85 bp, Artificial Sequence
  ENSG00000236778_63 (sequence is synthesized)
tgactctcctggtctccagtttttcaacttcaaatcttgggatttagtctcgatgatcatgtgagtcaattccgtataataaatc

SEQ ID NO: 938784 - DNA, 120 bp, Artificial Sequence
  ENSG00000236778_64 (sequence is synthesized)
cttttgtttctctggagaaccctaatataaccagtatttagtaaatgtttaatgtgtgttgaatgacaattatagaggaaatcagaagtggagaggatgtatgcagagggagctgtgaga

SEQ ID NO: 938785 - DNA, 120 bp, Artificial Sequence
  ENSG00000236778_65 (sequence is synthesized)
tacatatcttcgtaaactgttcctctaactcttagggagaatatgattcttacatactaaagtttgtatcatgaacatttatggctcacttgtattcacaagattatgaggaattatgca

SEQ ID NO: 938786 - DNA, 120 bp, Artificial Sequence
  ENSG00000236778_66 (sequence is synthesized)
ttcaggagcaggttaggttgtcatcatcattgttttttcatgataagccaatgtgtacagcatgttaatagttttctctgtaaggaatcttagaaatagttgagtgcacttctctagtat

SEQ ID NO: 938787 - DNA, 120 bp, Artificial Sequence
  ENSG00000236778_67 (sequence is synthesized)
taaaaacgagtaaatggacaggcatagtggtgtgcacttttagtctcaggtactcagaaggctgagacaggagaactgattgagcacaagagttctgggctatagtgtgctatgccaagt

SEQ ID NO: 938788 - DNA, 120 bp, Artificial Sequence
  ENSG00000236778_68 (sequence is synthesized)
gggtgtctgcactaagtttggcattaatatggtaacctctcgggacagggaactaccaggttgcctaaggagggctgaactggtccaggctggaaatggagcaggtcaaaattcccatgc

SEQ ID NO: 938789 - DNA, 89 bp, Artificial Sequence
  ENSG00000236778_69 (sequence is synthesized)
tgtctctaatttttaaaaaatgagtaaactgagaactagggttaaataaacttgcccaaggtagaaatttattgaaataaaattaaggg

SEQ ID NO: 938790 - DNA, 120 bp, Artificial Sequence
  ENSG00000236778_70 (sequence is synthesized)
acttgcccaaggtagaaatttattgaaataaaattaagggaaatgtttatatagcccttaacattatgtcttctccatgatatataacactttaaatccaaggatctcaaaacactttta

SEQ ID NO: 938791 - DNA, 120 bp, Artificial Sequence
  ENSG00000236778_71 (sequence is synthesized)
aatcagatcattaattcttctgatatctatgtatcaaattattctgttttctaccagctggttgtcccttgtcagactaaaagtcaacattttctttgtggatgaatcaattgagagttg

SEQ ID NO: 938792 - DNA, 120 bp, Artificial Sequence
  ENSG00000236778_72 (sequence is synthesized)
cattcatctgggaataacaagggttcacctgaaaaacgagggttatttttatcacatatgtctgaggtagtcagtccaggcctcatctgtccactgtgtacttcataatgtcatcaggaa

SEQ ID NO: 938793 - DNA, 120 bp, Artificial Sequence
  ENSG00000236778_73 (sequence is synthesized)
cattaagctttctctgttttcttgttcagccattctcaatatgtgtttgtcaactcataattacctaattcacctcaagtattgtaggtttggtttggtagaagtaataggaaggagaaa

SEQ ID NO: 938794 - DNA, 89 bp, Artificial Sequence
  ENSG00000236778_74 (sequence is synthesized)
attgtaggtttggtttggtagaagtaataggaaggagaaaagaaagcatgccagctgagctggccttcctttaaaaaagagatttttcg

SEQ ID NO: 938795 - DNA, 120 bp, Artificial Sequence
  ENSG00000236778_75 (sequence is synthesized)
aggtcaggagttcgagactagcctgacctacatggtgaaacatcatctctactaaacatacaaaaattagtcaggtgtggtggtgggtgcctgtaagctacttgggaggctgaggcagga

SEQ ID NO: 938796 - DNA, 75 bp, Artificial Sequence
  ENSG00000236778_76 (sequence is synthesized)
cttcgagattttctagaactgtgcctaagtgtccaactattgatctgatttgccaactatatcacgtggccattt

SEQ ID NO: 938797 - DNA, 120 bp, Artificial Sequence
  ENSG00000236778_77 (sequence is synthesized)
actattgatctgatttgccaactatatcacgtggccatttccatttgcacaggaggctgggaaatgtagtttttggctgcacatatggccacctccaaccaaactgaggcaattagtaag

SEQ ID NO: 938798 - DNA, 120 bp, Artificial Sequence
  ENSG00000236778_78 (sequence is synthesized)
gaaggcgaggataggtgtcgggcgactggtgatctttgtcactgcagggctgttgccaagattagaaagaatgcatgtgtggttcctggcttatacctgtcatctagtagatgctgaaga

SEQ ID NO: 938799 - DNA, 120 bp, Artificial Sequence
  ENSG00000236778_79 (sequence is synthesized)
acagggagctcttattttgttagaaaagataaaacaagtggtaatgtttccaaatttctttcatagtaattgtgcagtgttttcatacatgcaatgaattcaatgtggtaataagataac

SEQ ID NO: 938800 - DNA, 120 bp, Artificial Sequence
  ENSG00000236778_80 (sequence is synthesized)
ttttactagaagaacaaatttttactaaactgccattttgcactaaaatactggtaccacaacttttaaaaactaatttgattaaccagattatcatttgaacaatggacaatgaatgtg

SEQ ID NO: 938801 - DNA, 120 bp, Artificial Sequence
  ENSG00000236778_81 (sequence is synthesized)
cactacagtctcaaaaattttaaaatataagtaactttttcctctacttgtgttttatgaattggaaaatatttgtttattgtacagtcacataatgatgtttccatcatggatgcacca

SEQ ID NO: 938802 - DNA, 120 bp, Artificial Sequence
  ENSG00000236778_82 (sequence is synthesized)
cgtcatctgacataccactctctttccccttccaccatcattggaagcttccaaaagcagaggctcgctctttccttgcctaacgcagccatggcttgtggtcccaagaagcatctgaag

SEQ ID NO: 938803 - DNA, 120 bp, Artificial Sequence
  ENSG00000236778_83 (sequence is synthesized)
ttaactggaacatttccaaagcctgtcctactcaggataaatgcacaaaagaaaaattagtagttgacggcagaattcttaagagagcagttttgcattttttaccaagtaatacttatt

SEQ ID NO: 938804 - DNA, 120 bp, Artificial Sequence
  ENSG00000236778_84 (sequence is synthesized)
taacttctagggcagtaaagtaagagaaattgttactctccacctcctgccatcatgaatttaggaaatgtagaaagttattctgttaataaagatgtgaacttgctgttgaagagaaaa

SEQ ID NO: 938805 - DNA, 120 bp, Artificial Sequence
  ENSG00000236778_85 (sequence is synthesized)
cccactagctttgtttttccagagtttgttctttatccggaaattcttaatttgcctactgatcatttaaagaaagggttctattaacattgacacagaagagacactttgtggcacttt

SEQ ID NO: 938806 - DNA, 120 bp, Artificial Sequence
  ENSG00000236778_86 (sequence is synthesized)
ttaaaaatctgagtctcgtgacttggtataacttctgaaacttactgttaatttatagcagagctatttgagtaatatgctcttctatgagtatgaacaatagaagaagtgtgattttta

SEQ ID NO: 938807 - DNA, 120 bp, Artificial Sequence
  ENSG00000236778_87 (sequence is synthesized)
aagtgatttggactacaaaataagagcatggaatataggctttacagccagtacttgctgaggatgtactgtgtattaggtgtggtgcatataaaaaataaataaaatgtggtccctgtc

SEQ ID NO: 938808 - DNA, 120 bp, Artificial Sequence
  ENSG00000236778_88 (sequence is synthesized)
ttcaaagagcttatgttttctaggaaaatgctacatattactagctactccaaggcagaaagttgttagacaccaaatcagaaaaaataaaaatgtattaccttggggtgatgcaggaac

SEQ ID NO: 938809 - DNA, 120 bp, Artificial Sequence
  ENSG00000236778_89 (sequence is synthesized)
cccgtggagaccagcagtacagatatccttcattgcccttctccccctaggctaccacccccaggacctgtgctcatattttggcacgttaatactaagcccggagatactgaaagcatt

SEQ ID NO: 938810 - DNA, 120 bp, Artificial Sequence
  ENSG00000236778_90 (sequence is synthesized)
ctaaaatacaagctgagttagagacagcccttgtaagactagatggaatctcattctgtagcctaggctggagtgcagtggcacaatctggtcactacaacctctgcctcccaggttcaa

SEQ ID NO: 938811 - DNA, 120 bp, Artificial Sequence
  ENSG00000236778_91 (sequence is synthesized)
aactccttgactcaagtgacccaccctcagcctcccaaagtgctgggagccaccgcgtgagccacagtgcccagttgacaatttctgcattaatccacagaacacataaaagcactgtgg

SEQ ID NO: 938812 - DNA, 120 bp, Artificial Sequence
  ENSG00000236778_92 (sequence is synthesized)
tgaatgtctactgtgtgtaggagctgggaatgtaggaatgaataaaacgggaaataatgcctgtccttatgaagtttacattctagtgggagaggtagacaagtataatatgtggtatat

SEQ ID NO: 938813 - DNA, 120 bp, Artificial Sequence
  ENSG00000236778_93 (sequence is synthesized)
tcacgttaagtgttaaagaggaagaataaagcagggaaaggaaatgaagtgctgcagagggaggtttggagtttaagacatggagaacggaaaggcgtcactgagggtgtcaatgatgtt

SEQ ID NO: 938814 - DNA, 120 bp, Artificial Sequence
  ENSG00000236778_94 (sequence is synthesized)
tcagtagagagtggacagagctgtgcagatacctcaggaaaacccaattttatctatttattttactggagtgctgtagtctgaatgtttgtgtcctatcaaaattcatatgttcaaatc

SEQ ID NO: 938815 - DNA, 120 bp, Artificial Sequence
  ENSG00000236778_95 (sequence is synthesized)
ctgacccccaaggtgatgatattaagaggcaggacctttgggaggtgattaggcagagacctcatgaatgagattagtgcctttataaaagaggcctgggggagctcagtcacatcatgt

SEQ ID NO: 938816 - DNA, 120 bp, Artificial Sequence
  ENSG00000236778_96 (sequence is synthesized)
gatgacagagcaagaaggcaccatctacaaaccaggtcctcaccagacagcaaatctgccggcaccttgatcttcgacttcctagtctccagaagtatgagaaatttctgttttttataa

SEQ ID NO: 938817 - DNA, 120 bp, Artificial Sequence
  ENSG00000236778_97 (sequence is synthesized)
gaaatttctgttttttataaacaatctggtttatggttttttgttttgttttgttttgtttttgacagagtgtcgctctgtcatctgggccagaatgcagtggcgcgatctcggctcact

SEQ ID NO: 938818 - DNA, 120 bp, Artificial Sequence
  ENSG00000236778_98 (sequence is synthesized)
tattctgtaattgcagcccaaactgactaagacgtgaagtttaggtaaacatttgcagtttgctatgctgatattgaagtattatctgttggtaaatattctttgctgatacttaataag

SEQ ID NO: 938819 - DNA, 120 bp, Artificial Sequence
  ENSG00000236778_99 (sequence is synthesized)
cttattaataacaagtattaataatatgtattcctcactaatgcttaatacaaatccttactaatagcagtattagtattaattagtattaatcagtattctttgccaataagggttctg

SEQ ID NO: 938820 - DNA, 120 bp, Artificial Sequence
  ENSG00000236778_100 (sequence is synthesized)
tctgacagaaaatcagttgttcattaaatattattgagatacttcttgatcttatagtagacaggtactgttttagattctggggattcagtcgtaactgagatagatgtaatccctacc

SEQ ID NO: 938821 - DNA, 120 bp, Artificial Sequence
  ENSG00000236778_101 (sequence is synthesized)
ctcaaagggttgccagagaaaacacaggactcaattgaattggaatttcagataaaaaacacataatttttagtataaatatgtttatgtgatacttatactgaatataccatgtgatat

SEQ ID NO: 938822 - DNA, 120 bp, Artificial Sequence
  ENSG00000236778_102 (sequence is synthesized)
ttggaatatacttatactaaaatgtacactaaatgtgttgataacctgaaatccaaatttaactgggcttcctatgtttttatttgctgagtctggcaattctatgccctcactacgctt

SEQ ID NO: 938823 - DNA, 120 bp, Artificial Sequence
  ENSG00000236778_103 (sequence is synthesized)
ataagctaacatgctggaagcagagatttgtaaatacaaatagcatacagtgaacaatgctgtataacctggggagccataaattagaaggcactgggaccctaaatgtatggagaaaaa

SEQ ID NO: 938824 - DNA, 120 bp, Artificial Sequence
  ENSG00000236778_104 (sequence is synthesized)
ctgtcagccaaccaggaacatccacccttaaagcaagaaataaacttctgtcgtatttgagccattatgttttggaaccatttgtgccatggtctatttgttatgccagcttaacctaac

SEQ ID NO: 938825 - DNA, 120 bp, Artificial Sequence
  ENSG00000236778_105 (sequence is synthesized)
taacaatatgtcctgaaatctactatcatttccaaatttactacagaatcaaaagttttaatataatataccaacaactaataaaatatatgtaaataaaggcaacaggaagatggggca

SEQ ID NO: 938826 - DNA, 120 bp, Artificial Sequence
  ENSG00000236778_106 (sequence is synthesized)
aaccctaaaaatgcttatgctgtagtcatcattctattaacaatatagctttaaacctaagtattttcaaaatggtcatgagggacatcagatcattttaggaaaattacataactcgat

SEQ ID NO: 938827 - DNA, 120 bp, Artificial Sequence
  ENSG00000236778_107 (sequence is synthesized)
ggcttccctaagcaactaatactacacatttatacattattcctggcgattaaaacattttctttcagctaattatcgaatgtaaagacaggttttgtaggctctaaaattttaattaag

SEQ ID NO: 938828 - DNA, 120 bp, Artificial Sequence
  ENSG00000236778_108 (sequence is synthesized)
acatggtttttgccttcagaaagtatatggcctaatagaggaaataaggatacaaaatactagcagaatatgatcagtgccaaaagatatgtgcaaattatatctctaattggagtgaga

SEQ ID NO: 938829 - DNA, 120 bp, Artificial Sequence
  ENSG00000236778_109 (sequence is synthesized)
aattcattcagattagaggggattaaaaagaagctgaatgaggaagcattttttccctcaaagctttacaattttctgtcttttgaatttaaaagtagagcttattgtcaagaatttgca

SEQ ID NO: 938830 - DNA, 120 bp, Artificial Sequence
  ENSG00000236778_110 (sequence is synthesized)
aaatacaaatagagaaaaacaaatatcacttctaatctcactacccagagatagccactaataacatttttgtatgtattccctcctttatgttttaaataaaattggggtcttattatc

SEQ ID NO: 938831 - DNA, 86 bp, Artificial Sequence
  ENSG00000236778_111 (sequence is synthesized)
acggtccgacaatccccagtgaaattttgtcttctgtgtgcctcacgctgggagctgaagactggagctgttcctattcggccatc

SEQ ID NO: 938832 - DNA, 120 bp, Artificial Sequence
  ENSG00000236778_112 (sequence is synthesized)
gatccacaaccaaaaagttagttcaagacaaagactgctgactagactcagtactcaagatccagcatacccacccattctgggagaatgcaagcaatcaccagtactttacatggatgg

SEQ ID NO: 938833 - DNA, 120 bp, Artificial Sequence
  ENSG00000236778_113 (sequence is synthesized)
aatgctcaggtcaagaaattccaacagtaagaatccagaacctggaagtgaaagtacaaagcagaaagaattgactatgtccgtatactttctcaaccatatctcatgtgtaatccactt

SEQ ID NO: 938834 - DNA, 120 bp, Artificial Sequence
  ENSG00000236778_114 (sequence is synthesized)
ggcaggaaggggtaaggttttctttttagtgttggtctcttgtttactaaaatgacgatatttaggagagcatgtcccattcctctgattccataccatcttccttatccagttggtagg

SEQ ID NO: 938835 - DNA, 120 bp, Artificial Sequence
  ENSG00000223697_0 (sequence is synthesized)
gaattactacaattctgaattaggagataatcaaatgttcaaatggccagtgttttcctgtagagaaaacaaaaaaatctccttactttaacaaggtactggggaacttggaaatacaac

SEQ ID NO: 938836 - DNA, 120 bp, Artificial Sequence
  ENSG00000223697_1 (sequence is synthesized)
taaaatctgggaattcagtatgccttattttataaaattttcctttgttcttctctcatagtttccaagcaaagaaaaatgaactagttttaccttttcaggcattccatgttcttttgc

SEQ ID NO: 938837 - DNA, 120 bp, Artificial Sequence
  ENSG00000223697_2 (sequence is synthesized)
tgagtactgtaaactgtttttacttctcatgtggaattcttgttcttcttccaaactactaacatcatcatcatctgagctcccagggtctgcgagagatttacagtcctgaccaaaact

SEQ ID NO: 938838 - DNA, 120 bp, Artificial Sequence
  ENSG00000223697_3 (sequence is synthesized)
tatataagttccttccatttttaggggcaaacgaggtggttctttatggttctgtacatatttcttttcttctcgattaactgtgtcttgagctatttttttctccaccccagctattat

SEQ ID NO: 938839 - DNA, 120 bp, Artificial Sequence
  ENSG00000223697_4 (sequence is synthesized)
ttgatcttggtcttttcgcttcccggaacaagcccagagatgaaggtcaggatgatgtttattccttaaaacaaagttggaaaaacagcagttcagaaaaaaaaaaaaatctattaacaa

SEQ ID NO: 938840 - DNA, 120 bp, Artificial Sequence
  ENSG00000223697_5 (sequence is synthesized)
gctgaatacaatgatctatttcagaattaggttaggaggacatctaggactcaagacaaaagcaaagatgaagttgatattaaatcacagaggactgcacttactcggatttttcatcaa

SEQ ID NO: 938841 - DNA, 120 bp, Artificial Sequence
  ENSG00000223697_6 (sequence is synthesized)
ctgctaacctactaacgttgctcattaagcaaggcaagctctagcactaggagcagattcaaaaagagtaagacagcgttctgaggaactggtgcaggaagagctcctccacaccttcag

SEQ ID NO: 938842 - DNA, 120 bp, Artificial Sequence
  ENSG00000223697_7 (sequence is synthesized)
aggtccatcctgctggtaacttcgttctgcacattttctatgtgtgtaaggagattgagctgccactgaagatatgaagttgatattaaatcacagaggactgcacttactcggattttt

SEQ ID NO: 938843 - DNA, 120 bp, Artificial Sequence
  ENSG00000223697_8 (sequence is synthesized)
atggtggattgagagtcaaaaggcatagatttcatctcagtctgcctcatcagtaaaataaaggcatcacaggtagtgttctaagaccccacctgctctacaatgagtcgaatatgcaga

SEQ ID NO: 938844 - DNA, 120 bp, Artificial Sequence
  ENSG00000223697_9 (sequence is synthesized)
actgccaggtcagtagcatgcaagttcataatgcagatctactccgattgccacaaataagcctagctagaaatggatacagaggaacagaggctaattaattcttctccaggaaaaagt

SEQ ID NO: 938845 - DNA, 120 bp, Artificial Sequence
  ENSG00000223697_10 (sequence is synthesized)
cacacctcttcccttccagtaggatagtaattttgttgataaatatatgctaatgtatttgtctaagtaatcaatgtggaaaataaaaatgtaacagtgaaaaaatattttaaaatttta

SEQ ID NO: 938846 - DNA, 120 bp, Artificial Sequence
  ENSG00000223695_0 (sequence is synthesized)
gttgctgcctttcagcctccaaaccttcgctctggccgttctctccacctggaatacccttccgagcctctcttcacctccatgtcattaactcgcatacatcctttcagatatttcctg

SEQ ID NO: 938847 - DNA, 120 bp, Artificial Sequence
  ENSG00000223695_1 (sequence is synthesized)
agggcttgtgatttgccagatcctgtaccaggtgctggaacttggtgatagacaatccacagtctctgctctgaagacatccatgcaggtactaacaggtcagcctggtaaatcctgcga

SEQ ID NO: 938848 - DNA, 120 bp, Artificial Sequence
  ENSG00000223695_2 (sequence is synthesized)
gaggagatggggtgtgtagggtaagggggaatagcagctcattccagacaggaaaaactgggtgcgtagcccagaggggagaagacagtctgtgcacaagctcagtgaaaggggagggaa

SEQ ID NO: 938849 - DNA, 120 bp, Artificial Sequence
  ENSG00000223695_3 (sequence is synthesized)
tgtcaagaaggcagcaggagttggaaggggcaaggccctgcagcagatatgcagtcctgggaccctcagcatcacagcagcaacctcacctggagcctttagaaatgcagtctcagctgg

SEQ ID NO: 938850 - DNA, 120 bp, Artificial Sequence
  ENSG00000236772_0 (sequence is synthesized)
ggatattgcaggggatggacccagagggatgcgggggaagagggtctggttctctctagggtggttctggtcccctctgcgtcatgcttgggagtggccagagcctcctggcatagtcaa

SEQ ID NO: 938851 - DNA, 120 bp, Artificial Sequence
  ENSG00000236772_1 (sequence is synthesized)
catgagcagtggtcccggttcctttcttttctcctctccccaagtgctatcctgttcatgcctgtgctcagagcttcctcccttctctcctgggctgtagctgaggcttggaaaggagaa

SEQ ID NO: 938852 - DNA, 120 bp, Artificial Sequence
  ENSG00000236772_2 (sequence is synthesized)
ggtccctgtttcctgcagctgatctgatctggagacacccccgtgtagactctggttacagccagatgctcaggttgccgagggactgccgtatgatgacaacataatgagcaaagtgag

SEQ ID NO: 938853 - DNA, 120 bp, Artificial Sequence
  ENSG00000236772_3 (sequence is synthesized)
gagctctgagccattaatacggctgcccggctgaggtaccaaactgattgaacaatacttgaaaggctgaggctggggaggccagtggggctgggtggccctgcaaccacgtggctgcct

SEQ ID NO: 938854 - DNA, 120 bp, Artificial Sequence
  ENSG00000236772_4 (sequence is synthesized)
tttaaacaatgttcttcaaatgaggtactagtgctcaaggacaggggctgccccaggcaaggagagtagcctggggagttaccggaaaagcacctactgaatcacccagctacaggagcg

SEQ ID NO: 938855 - DNA, 120 bp, Artificial Sequence
  ENSG00000236772_5 (sequence is synthesized)
gagcgagggagcaggtgtgcaccatcaccccaggtgtctcagatgtaggctccatgaatgcaggggcaagaacggaggcccagcacccaggacttgaggtacgtgcggatgcgcttgcgg

SEQ ID NO: 938856 - DNA, 120 bp, Artificial Sequence
  ENSG00000236772_6 (sequence is synthesized)
gcccgctcctggaactcagggaactgccggctgcaggactcgatgatggcctggatcttctccttgggctgcttggagatgggcaccatgcggtccaggttctcgtccacaaagagacgc

SEQ ID NO: 938857 - DNA, 120 bp, Artificial Sequence
  ENSG00000236772_7 (sequence is synthesized)
acaaacatctgtggagacacgggccatgggaagggctggccctggccttgcccccatcccaccccacctgtttccggccggtgctcacgttgaaggccttaagacgctcagggtccatgc

SEQ ID NO: 938858 - DNA, 120 bp, Artificial Sequence
  ENSG00000232470_0 (sequence is synthesized)
tttgtaaactcaaatcaaggtgtatttattgcacaggcacaataaatgaacaaggcatcttaagtactacaatgacaggtgagtgggtcaggcacagtggcttggctagtcatgattagc

SEQ ID NO: 938859 - DNA, 120 bp, Artificial Sequence
  ENSG00000232470_1 (sequence is synthesized)
gaaatgggaattatttccatctcaaaggtttgaggggattcgctgagagaaacttcttagcatgggatctccagaaactggaagccacagagaaagcagcggccagagggaggaggaatc

SEQ ID NO: 938860 - DNA, 120 bp, Artificial Sequence
  ENSG00000232470_2 (sequence is synthesized)
ggacaggctgatcacttggagtgttcgcctaagcagtttctagaaatggaggcagggaccatcaggaagctcaaaacctttgcttcagccgagtttgcagaacgccctgtgaggagaatg

SEQ ID NO: 938861 - DNA, 120 bp, Artificial Sequence
  ENSG00000232474_0 (sequence is synthesized)
aacttaaagaagttagatagatctgtagtcccaaagtacttacagagcaatttattaagacttgggttcctgagaaagttttattctattactcagttattgtcttcaatctgccattca

SEQ ID NO: 938862 - DNA, 120 bp, Artificial Sequence
  ENSG00000232474_1 (sequence is synthesized)
ctgaaaggtttctttggccttaattcaattctctatctcctacgctatcagtgtttttgttgagcacttttctatccagacagataacaggatttggtgacagctttcaatttcattact

SEQ ID NO: 938863 - DNA, 120 bp, Artificial Sequence
  ENSG00000232474_2 (sequence is synthesized)
attggcctgtaaaactggcccaactctgcaaaataactcactaattcttcccatgtgaaaacctctgaagatatttatcaacacacattgataaaagaagttgtgtttttccttacttct

SEQ ID NO: 938864 - DNA, 120 bp, Artificial Sequence
  ENSG00000232474_3 (sequence is synthesized)
ttatcagcatcattgctttgcccatctttgatgatggtattatgaagaaggatttgcttctgaagtataggtatgattgctacaaataaaatatgcctcctacaaataaacaaaaacctt

SEQ ID NO: 938865 - DNA, 120 bp, Artificial Sequence
  ENSG00000287068_0 (sequence is synthesized)
ggtttaaatccaatgtttgcaaagggagggagagagcagaagagagagagagcgcgcgagagatgggagcaggcaggcagcgtctctgatttcttttcttgcacacaactggtaagaatc

SEQ ID NO: 938866 - DNA, 120 bp, Artificial Sequence
  ENSG00000287068_1 (sequence is synthesized)
atcagcaccaatctgcacagggctcagagcagtcctccaaggcacgcattggctccactctcctgagcgacggaaggagactttcctgcttggaaggcttgactccaaggggagtcgaag

SEQ ID NO: 938867 - DNA, 120 bp, Artificial Sequence
  ENSG00000287068_2 (sequence is synthesized)
ccggcccctcactcaccccctcaccggagcacagccctgcgtgttgctatctgtatgcacggacatagtgtcaatgaatgagaaaggacacagtgaactcagacctggctgaagagtgca

SEQ ID NO: 938868 - DNA, 120 bp, Artificial Sequence
  ENSG00000287068_3 (sequence is synthesized)
acaacagctcattgctctagagtcagactgcctggcctccaatcctgtatccattcccgacagtcggtgtgacctgaaactctccaagcttaatttccttaacaattcccaccccccaac

SEQ ID NO: 938869 - DNA, 120 bp, Artificial Sequence
  ENSG00000287068_4 (sequence is synthesized)
ctcagagttgacatgaagatctgagaccatggacacgaagccatgagcatagtgcctggcacacagtaataactcaacacaggccaagactttgtaagctgcgtggcataagcagcaatt

SEQ ID NO: 938870 - DNA, 120 bp, Artificial Sequence
  ENSG00000287068_5 (sequence is synthesized)
gaaggagtcgtcactccctctctccaagtttcttcaggttcaggtaatagagacttttgccttctcaggaaaaatattaagaagctgctgtctgtcctttgcttcccactgctcttcccc

SEQ ID NO: 938871 - DNA, 120 bp, Artificial Sequence
  ENSG00000287068_6 (sequence is synthesized)
cacaggaataagattgatttctctaattagagagatgacaaaggtctgacatgtctgagtccttgtttctccactaggcagggttaatgtattaccaggctctgctcacacacatttatt

SEQ ID NO: 938872 - DNA, 120 bp, Artificial Sequence
  ENSG00000224477_0 (sequence is synthesized)
cttcaggtgagatggaaggttgaactctacctcacctcctggctacagagtgcggtggcgccagcacagagctctgctcaacgtccctctgtgctttcacgatgctgatggattatgaag

SEQ ID NO: 938873 - DNA, 120 bp, Artificial Sequence
  ENSG00000224477_1 (sequence is synthesized)
tgtcctcttggggctatgcagagaagttcatgttgatgaaatgagctgtcctagaatggcagttcccgggcagcagagcctgggctcaaggaaggttgaaagaaggggtggcgtggagct

SEQ ID NO: 938874 - DNA, 120 bp, Artificial Sequence
  ENSG00000224477_2 (sequence is synthesized)
tcgcctaggaagttgtgacttggctgcattttccacttcaggctacagagtgcggtggcgccagcacagagctctgctcaacgtccctctgtgctttcacgatgctgatggattatgaag

SEQ ID NO: 938875 - DNA, 120 bp, Artificial Sequence
  ENSG00000278576_0 (sequence is synthesized)
ggccttgcagttgtagaggaatttcttgggggagcaggttggtatgcttacactcctactggttgtctattaaaaatattaaaattttgtcttttaaatgtctgtctctggcagtaccat

SEQ ID NO: 938876 - DNA, 120 bp, Artificial Sequence
  ENSG00000278576_1 (sequence is synthesized)
tcacaagccttcttctctgccttacatccttcttggtttttactcattgctgcaatctctcacagttggatggccctttgtttcatccaaattcaaggcttgatatatcatctctgcact

SEQ ID NO: 938877 - DNA, 120 bp, Artificial Sequence
  ENSG00000278576_2 (sequence is synthesized)
gtgactctcacatttttatatctccagcctggaccttgccctgaattcctcatttctgtccaaccactttatatttcttcttggaggtgtaataaatcatttcaaacttgtccaaagctc

SEQ ID NO: 938878 - DNA, 120 bp, Artificial Sequence
  ENSG00000278576_3 (sequence is synthesized)
aactatgaattttcctctcctgtctgttcttcctgtagtcttcctcattttagtttattggtgacttcacctttccagtttctgagacagaatcctgttgccattctttttttctctcct

SEQ ID NO: 938879 - DNA, 120 bp, Artificial Sequence
  ENSG00000278576_4 (sequence is synthesized)
tctcctttccttcctcttccctctctacctctgtctccctccttcccttgttccacctgtcagcctctacctccagatttatagaattcactaccgtttatcacttctgcctctaccacc

SEQ ID NO: 938880 - DNA, 120 bp, Artificial Sequence
  ENSG00000278576_5 (sequence is synthesized)
gagatcatgccactgcactctagccttggtgacacagtgacactctgtctccaaaaaaaaaaaggcaaaaaaaagtcaccgtctgtgatttgccttggttacttgattattggaatagtg

SEQ ID NO: 938881 - DNA, 120 bp, Artificial Sequence
  ENSG00000278576_6 (sequence is synthesized)
gaatagtgtgttcttacaaggtgtgcctgctttcaaacttgccttccttcagtccatcccacacagcagcagcagtgatcctttacactgtaaattagatcatgctactttgcagcttag

SEQ ID NO: 938882 - DNA, 120 bp, Artificial Sequence
  ENSG00000278576_7 (sequence is synthesized)
aaccccccaggggctccctgtcacactgtaagtcacagtgttctgccttctcatcacccacctgcctccctctgctctggctccccgtgcttgctgctgctcctgcacactggcctgctt

SEQ ID NO: 938883 - DNA, 120 bp, Artificial Sequence
  ENSG00000278576_8 (sequence is synthesized)
gtccttcaggacgttggaagagctgcgcgtctcagatgcttttgccctctcctgagaatgtttactttggatgttctcatatctcatccatgtgtcatctttgaggccttctctggcccc

SEQ ID NO: 938884 - DNA, 120 bp, Artificial Sequence
  ENSG00000278576_9 (sequence is synthesized)
atccccacactccctcttttctgaagctttatttttccccataacgtttgtcaccatcaaatacatattttatgtttttgtagtttaggtatttttatccgaacgtaggtctttatgttt

SEQ ID NO: 938885 - DNA, 120 bp, Artificial Sequence
  ENSG00000278576_10 (sequence is synthesized)
taacgtgaattgttttcttttagcatgtatttttttgggggtcttgagagctacctccttccccgtctcaacagagtctgtcctttttgagcagggatttatgtgtttgttctgtatggc

SEQ ID NO: 938886 - DNA, 120 bp, Artificial Sequence
  ENSG00000278576_11 (sequence is synthesized)
tgttgtctgagtaaatgtcactcctgccttgcatctaacctgcagttttcacaggggctcatttgtggttttgcctgctgtgccttacagccagtatttgtccatatattttctattacc

SEQ ID NO: 938887 - DNA, 120 bp, Artificial Sequence
  ENSG00000278576_12 (sequence is synthesized)
cagagattgttgacatctcatctgctgcaccttgtaacccccatctctaaaccagtgatctccatcatatttttgacctgaaaatttttgtacagtagccatttttaagtatgtatacca

SEQ ID NO: 938888 - DNA, 120 bp, Artificial Sequence
  ENSG00000278576_13 (sequence is synthesized)
agccatttttaagtatgtataccaatatatgtattttacttacgtacacatgctgtattgatatgaatattagaaaacataagaatagaaatctgccgggcttggtggctcacgcctgta

SEQ ID NO: 938889 - DNA, 88 bp, Artificial Sequence
  ENSG00000278576_14 (sequence is synthesized)
ccactgtagcctgagcgacagggtgagactccatctcggaaaataaaataaaaaaagaacagaaacccaaagatcatagggtagagat

SEQ ID NO: 938890 - DNA, 120 bp, Artificial Sequence
  ENSG00000278576_15 (sequence is synthesized)
taaaaaaagaacagaaacccaaagatcatagggtagagatgtagatattaagttctttaattcacttttatggactcttcagaaggagagattataattgtatatgcttgatacattgtg

SEQ ID NO: 938891 - DNA, 120 bp, Artificial Sequence
  ENSG00000278576_16 (sequence is synthesized)
ttggactggaagcactgtgaaagattcttagtcaaggggagattttacattcaaagaaaatggaaaatccccctgctttgctcggagggaagaactgcacttaaaagtttgatgtgtatt

SEQ ID NO: 938892 - DNA, 120 bp, Artificial Sequence
  ENSG00000278576_17 (sequence is synthesized)
ggtgtcgtcttctaggcatttcttatatctgtgaacatgtgcaccctttgtatataaagtggaattacatgtttacttacgcacacacacacatgtacatataaagcaggaattatacta

SEQ ID NO: 938893 - DNA, 120 bp, Artificial Sequence
  ENSG00000278576_18 (sequence is synthesized)
cccagagttctctgtgacatttttgttccacttaatgtatcatgggagagtccttgagtgtggacctaggagccagactaccgaaggtgcagaccctgcagtttactagttgatttaacc

SEQ ID NO: 938894 - DNA, 120 bp, Artificial Sequence
  ENSG00000278576_19 (sequence is synthesized)
tttctgtaccctagtttcctaatctataaatgaagaataacggtagcatttacttcagagttcttggtaggagtaaatgttaaaatacataagctttctctgctgatgaatatttacact

SEQ ID NO: 938895 - DNA, 120 bp, Artificial Sequence
  ENSG00000278576_20 (sequence is synthesized)
ggagtcttaggaagggtccttgcttattttctattctaaagttgggctggacatagtgggccatatgggtgccatcagatgggctcttgtttctctgtgacccgttctgttagacctctt

SEQ ID NO: 938896 - DNA, 120 bp, Artificial Sequence
  ENSG00000278576_21 (sequence is synthesized)
tcctgcttttttccttgaggttgtttatctgtcctctagtgaaccagctggtttgcaggtggtgcttttctgagagtgtcttgctgttaacagttactatggatgtcatatgccagctgg

SEQ ID NO: 938897 - DNA, 120 bp, Artificial Sequence
  ENSG00000278576_22 (sequence is synthesized)
ttctgttaaaaaaaagtctgtgaatccaaagccttgaattttgaacattattttctgtctggaattttgaagaactgattcataaagtggagaaatgaataaagatttttattttacaaa

SEQ ID NO: 938898 - DNA, 120 bp, Artificial Sequence
  ENSG00000234730_0 (sequence is synthesized)
ctcagtgttttggggaaccagaaacaaaccaataaaataaaggcgtggaaaggctactgtgagaacagaaaggagcaactggggcactgaaacaaaaacaacctgcacagaaattaaatt

SEQ ID NO: 938899 - DNA, 120 bp, Artificial Sequence
  ENSG00000234730_1 (sequence is synthesized)
gagccagaacgtaaagaactgaaggaagtgtctgatacagagaagagagaaagtacatttaggccaaaagaatcatcacaggatgaactaaccttctggttccaggagaaagacgaggga

SEQ ID NO: 938900 - DNA, 120 bp, Artificial Sequence
  ENSG00000234730_2 (sequence is synthesized)
tgaattgtcccatccactgcagctgaaatctgccaccttaacttcctgcagagcttcaatgagaagcagagatcagccaagggcctctgagcacctattcaactcacagatgtgtgaatg

SEQ ID NO: 938901 - DNA, 120 bp, Artificial Sequence
  ENSG00000234730_3 (sequence is synthesized)
atgataccgaattgctgctttaaacccctcagctttgtggtagttacatgggaatagctaatacaaataagtggtgcagaccccggacacagagctgatacacaggatgtcactgggaga

SEQ ID NO: 938902 - DNA, 120 bp, Artificial Sequence
  ENSG00000234730_4 (sequence is synthesized)
aacagagaaagagtgtggttgtctccccatatctacagtttcacattctgggatttcagttacctgcatttaacggaggttgtctgaaaatattaaataaaaaattcccaaagtaaacaa

SEQ ID NO: 938903 - DNA, 120 bp, Artificial Sequence
  ENSG00000268047_0 (sequence is synthesized)
gggggcgacaggacagacagctggggacaagacaagaccctggaggccagccgcagccccacagagactcacctcctgccactcgaggacgccgctccaagccagcagcttgttgctgag

SEQ ID NO: 938904 - DNA, 120 bp, Artificial Sequence
  ENSG00000268047_1 (sequence is synthesized)
ccggtgctcgctcacggccagacccccgagggtgagcccaggtattttccaaattttctatgaagcacaaggagatctttccttccagaatactagcaaacacaaaaaattttattttgt

SEQ ID NO: 938905 - DNA, 120 bp, Artificial Sequence
  ENSG00000268047_2 (sequence is synthesized)
gcttaaaaagagaaaaacctgaacaaacttgctctccacccacgcaggtgattctccacccacgcaggtgattcttcacccacgcaggtgattctgacttttgggcagtcgtcagaagat

SEQ ID NO: 938906 - DNA, 120 bp, Artificial Sequence
  ENSG00000268047_3 (sequence is synthesized)
cagatagaaaacctgagtatcttggcgttagaatgagttggacagagagtggatgttgccccgggggcttcaggcaccataccggacatccagcatctgagatgagttaaaacgcacagc

SEQ ID NO: 938907 - DNA, 120 bp, Artificial Sequence
  ENSG00000228624_0 (sequence is synthesized)
agagagtagctgtggtctcctgcgtgctcaccctctgctcccttggtcctgctccatgctttggtcctgcacttaaattttacaagcatactctctttctcttaaggtagccactcccag

SEQ ID NO: 938908 - DNA, 120 bp, Artificial Sequence
  ENSG00000228624_1 (sequence is synthesized)
tcaaggactgtatgagttgcccagagcaagaccttttaggatatggtacatagctgggagcctgccaactcctgattttgtcattaccctcagaactccagaatgtaagctccatgaagg

SEQ ID NO: 938909 - DNA, 120 bp, Artificial Sequence
  ENSG00000228624_2 (sequence is synthesized)
tggagaataatgggacaggagatgacggtaatgaattaaaacagaatggaatggaatggaaagcctagcgcagggcttggtttggaaggagacggtccagtattatagcaggaaaaagga

SEQ ID NO: 938910 - DNA, 120 bp, Artificial Sequence
  ENSG00000228624_3 (sequence is synthesized)
agactctcatctttgcctcggtgacaaagctataggatgcacctccaacaaaacaattcttacatggaatcctagagtctttggaacgtggtttgaacaccaccagctttgagaaggaag

SEQ ID NO: 938911 - DNA, 120 bp, Artificial Sequence
  ENSG00000228624_4 (sequence is synthesized)
gtgaagcccttccatttgaatcctgagaaagacgcgctcaaagaacccagcgaacaaaggagagggttggagcccacgcaaaacatgggtgtgataaagccacacgcgacctgagccccc

SEQ ID NO: 938912 - DNA, 120 bp, Artificial Sequence
  ENSG00000228624_5 (sequence is synthesized)
accctcagtaactactctccagcgcccaccgggaggaggggtccggggaaaggattggcatcctctgcttctgcagaaaacatggctaccaacagcttctgtatccacctgcggaggaga

SEQ ID NO: 938913 - DNA, 120 bp, Artificial Sequence
  ENSG00000228624_6 (sequence is synthesized)
gttatgaacctggctgtgcggagctacctgaggaagcttgtaggagaagggaaggagtctgtagctttaggggaagacagagccacaagatggaaggagcttggatgtctgaactattcc

SEQ ID NO: 938914 - DNA, 120 bp, Artificial Sequence
  ENSG00000228624_7 (sequence is synthesized)
atggagaaaagctgcagccaacgaagaacacctgcaatggactcttaacctgggggtgacgacaaccactgaaatatgctgcatcttagtccagggatttttaaagtgtggttcctggaa

SEQ ID NO: 938915 - DNA, 120 bp, Artificial Sequence
  ENSG00000228624_8 (sequence is synthesized)
agaacaatgaattccttcaaggctctgtgcagacatttcaaacagtggataccagacaggcttggcatagcttagactcaattatagctagaattattttatttctggatgctgcatctt

SEQ ID NO: 938916 - DNA, 120 bp, Artificial Sequence
  ENSG00000228624_9 (sequence is synthesized)
taagcagctcacctgacttgtctgtcctctaatgtctgaagacatctgacctctgctctttcagtaaaagcaacaatggttttatgagcattgtcgtcacatctctccactcaagggatc

SEQ ID NO: 938917 - DNA, 120 bp, Artificial Sequence
  ENSG00000228624_10 (sequence is synthesized)
gctgtggtctcctgcgtgctcaccctctgctcccttggtcctgctccatgctttggtcctgcacttaaattttacaagcatactctctttctcttaagtaactgcctgaaaagccaagaa

SEQ ID NO: 938918 - DNA, 120 bp, Artificial Sequence
  ENSG00000228624_11 (sequence is synthesized)
gtagagtgacggggtggtgttgaaggtggcagactgatgaagataaggagaaatgaatttggaaaaggagggaggagcaaaccaatgaagagttgtaaaaaccagaaaagcaattctgga

SEQ ID NO: 938919 - DNA, 120 bp, Artificial Sequence
  ENSG00000228624_12 (sequence is synthesized)
ttagatttagaagtggcagaatgacaaggtgaagttttctatagggagaaagttgctaggttgcctcatttgagacagcctggaatttttgaaaagcggaaattaaaaaaaaaaactaga

SEQ ID NO: 938920 - DNA, 120 bp, Artificial Sequence
  ENSG00000228624_13 (sequence is synthesized)
tgcgtgctcaccctctgctcccttggtcctgctccatgctttggtcctgcacttaaattttacaagcatactctctttctcttaagctcggcagcactcagatggctcttgaaaatcttt

SEQ ID NO: 938921 - DNA, 120 bp, Artificial Sequence
  ENSG00000228624_14 (sequence is synthesized)
gagatataatctgaaaggaggtcccagtttctgccccgggctgtttgcatcatcaacctgcaaaattccaatcttggaacttgctgagattttcattctgagactctctgccctgggcct

SEQ ID NO: 938922 - DNA, 120 bp, Artificial Sequence
  ENSG00000228624_15 (sequence is synthesized)
tgaggatagccagaagaatactatatttcttctgcctctctttctctttctatctaaagaggtcaggattatatatccactttgctgaatatagaatcaaacccaattgccatcagcaag

SEQ ID NO: 938923 - DNA, 120 bp, Artificial Sequence
  ENSG00000228624_16 (sequence is synthesized)
tgctgtatatcacctaccacacctgggaccaggcatcaacaagaccttgacagggccagaagcctcaagccctcattgccaagcccattaaaatcaggaactcaatctcattaaggaagg

SEQ ID NO: 938924 - DNA, 120 bp, Artificial Sequence
  ENSG00000228624_17 (sequence is synthesized)
agtgcaatggatatagccagacaggaggatttccacttcagtattatcctgaatagtgaacaaccatctctgcttttctcagggagaaagatgtggtaacagtcacaatgatagtagacg

SEQ ID NO: 938925 - DNA, 120 bp, Artificial Sequence
  ENSG00000228624_18 (sequence is synthesized)
aattgagtttccttttaggtatagtctgaattgaactgaagttcattataattcccctaagttgatctgtgagggcattttagccttcttggtaaaattaaataatatcagtcaaaaagg

SEQ ID NO: 938926 - DNA, 120 bp, Artificial Sequence
  ENSG00000228624_19 (sequence is synthesized)
ctgttaaaccaattcttacacttgaaagcttccagttattctaataatttggaatctgtgtctccccctctgtggcaatgaggctgttgcttgcttttcccaagagactgtattgcatct

SEQ ID NO: 938927 - DNA, 120 bp, Artificial Sequence
  ENSG00000228624_20 (sequence is synthesized)
ttcttgttttctgagatgagaaacaacctcaaggtcatgcccagtgatatggtttggctctgtgcccccacccaaatctcatcccgaattgtaatccccacatgtcggaggaggggcttg

SEQ ID NO: 938928 - DNA, 120 bp, Artificial Sequence
  ENSG00000228624_21 (sequence is synthesized)
gtgggaggtgactggattatgggggtgtatttaccccttgttttcatgatagtgagttctcatgagatttgatggtttaaaactgtgtggcaccgccccctgcaagctccctctctctcc

SEQ ID NO: 938929 - DNA, 89 bp, Artificial Sequence
  ENSG00000228624_22 (sequence is synthesized)
aactgtgtggcaccgccccctgcaagctccctctctctcctgccaccaagtaagacgtgccttgcttcttctttgttccccagccatgc

SEQ ID NO: 938930 - DNA, 120 bp, Artificial Sequence
  ENSG00000228624_23 (sequence is synthesized)
cttctgccatgactgtaagcttcctgaggcctccctagaagcccagcagatgccagcaccatgcttatggaaaagcctgaagaactatgaaccaaggatgcacctccaacaaaacaattc

SEQ ID NO: 938931 - DNA, 120 bp, Artificial Sequence
  ENSG00000228624_24 (sequence is synthesized)
ttacatggaatcctagagtctttggaacgtggtttgaacaccaccagctttgagaaggaagagaaaatccagaagtcagaagtggaccatgttgatcaggatcctacaccttccagtatt

SEQ ID NO: 938932 - DNA, 120 bp, Artificial Sequence
  ENSG00000228624_25 (sequence is synthesized)
cgttcttgtctttggtagtgggccctgattggcttaagccagtaggcatatctaatctccaggccacaccaattggttcagggttgaacacacaacccaatttgggcaaattagagctgc

SEQ ID NO: 938933 - DNA, 120 bp, Artificial Sequence
  ENSG00000228624_26 (sequence is synthesized)
aagaataaatttcaaattgttttgtgcttgactggtatctgaaaacacataaccccaggagctgctgatggttatattgtgacaataatggaggagacccacagaaatggagccagcact

SEQ ID NO: 938934 - DNA, 120 bp, Artificial Sequence
  ENSG00000228624_27 (sequence is synthesized)
gaagaagtggcaatgagaaccgaaggcagtcatcccatcatttgagccactgtatcaagagtagtctgatgctagcctaacttctcagttacatgacaataaattgtctttactcttcaa

SEQ ID NO: 938935 - DNA, 120 bp, Artificial Sequence
  ENSG00000228624_28 (sequence is synthesized)
gagaagatctgggaaggagtcagagagcgttcccggggctctgggagtggctgccagttcatgggactggatagtgattgacttttgagtggccttcctcaaagcatggtctgaagacca

SEQ ID NO: 938936 - DNA, 120 bp, Artificial Sequence
  ENSG00000228624_29 (sequence is synthesized)
accactgcatcaggatcaccagagcctcttgttgaaaataaaaaaaaaacacctctgtttgcatctgtagacaaagatctgttcagaatggttggctttgtgaggtgctgtgagacagag

SEQ ID NO: 938937 - DNA, 120 bp, Artificial Sequence
  ENSG00000228624_30 (sequence is synthesized)
atgaaaaagacaatcttccaagccttaggaaaaaaatattaaccaaccatctctaggaaattgcaaaatagtttctactttatcaggatttccaattccaggtgaataggataaagatga

SEQ ID NO: 938938 - DNA, 120 bp, Artificial Sequence
  ENSG00000228624_31 (sequence is synthesized)
tgcaccatctctgttctgatagagaagccaaaagcacagggccaatcctttgcttaagttatgagcatgacatctccactgagctccagacttgtatatccaactgcctactctcacctc

SEQ ID NO: 938939 - DNA, 120 bp, Artificial Sequence
  ENSG00000228624_32 (sequence is synthesized)
tacttagatgtctaataaacatcttgatttcaatacattcctgatggttaacattaggtatcaacttgactggattgaggaatgcctaaaaggctggtgaatcattgttcctgggtatgt

SEQ ID NO: 938940 - DNA, 120 bp, Artificial Sequence
  ENSG00000228624_33 (sequence is synthesized)
ctgtgaggatgtttcgagaggaaattgacatttgagtcagcggactgagagaaggaagatccaccctcaatgtgtgtgggcaccatccaatcagctgccagcacagctagaacaaaagag

SEQ ID NO: 938941 - DNA, 120 bp, Artificial Sequence
  ENSG00000228624_34 (sequence is synthesized)
aatccccagaaaacacgcatgacaattaacatccttgcagaagacattgggagacggcaggaaatttcaagtaggaagtgcactcgaggggaaaaataagcaccttttacaaaaaaagca

SEQ ID NO: 938942 - DNA, 120 bp, Artificial Sequence
  ENSG00000228624_35 (sequence is synthesized)
aggtgctgatgagtcttggcatttggatgaatcaaaaacaactgggatttttgaacactttaaagcagcgagttgagttcactggtgaataacttcatattcctgaagttaagaagcctg

SEQ ID NO: 938943 - DNA, 120 bp, Artificial Sequence
  ENSG00000228624_36 (sequence is synthesized)
aaatcaccataaaaagtcagacacgagagcttagaagtcaattaagacagggcttggaaggggcattaggtttttggggaaccggtgttacatgaaaaaaaaaaacacctctgtttgcat

SEQ ID NO: 938944 - DNA, 120 bp, Artificial Sequence
  ENSG00000228624_37 (sequence is synthesized)
gaagctcccgcccaagccgaccacgtgccgcgagcccggcggggagagcccactcccgcgccccttccgggcccactaccccgccgggctgtggcccatcgccccagtgcctggtagcct

SEQ ID NO: 938945 - DNA, 120 bp, Artificial Sequence
  ENSG00000228624_38 (sequence is synthesized)
ggtagcctagttttctcgtttgtcgtttgttcacttatttattattattattattattttgactcgtaatgggtatgaggtgtaagggggcctattacggatgttaaggggagagggcac

SEQ ID NO: 938946 - DNA, 120 bp, Artificial Sequence
  ENSG00000228624_39 (sequence is synthesized)
ggctgtgcggagctacctgaggaagcttgtaggagaagggtcagtttgcagagaaaggggggcctgggcagatgacgcaagaggtgcccattacatccctctagaggaaggagtctgtag

SEQ ID NO: 938947 - DNA, 120 bp, Artificial Sequence
  ENSG00000228624_40 (sequence is synthesized)
ttttcagaaaaaaaaaacacctctgtttgcatctgtagacaaagatctgttcagaatggttggctttgtgagtttacagctggccgatgagaggtgctgcatgatattggaagatgggac

SEQ ID NO: 938948 - DNA, 120 bp, Artificial Sequence
  ENSG00000228624_41 (sequence is synthesized)
agaaggaaccagtattctgcagaggcagttgcatgagcagatatgaaatgtcctggaggctcccccagtaagctgagaagcacctgctttcccactatagactgagaccactgatggaag

SEQ ID NO: 938949 - DNA, 120 bp, Artificial Sequence
  ENSG00000228624_42 (sequence is synthesized)
cttcccagagatttgagaattgcagaagcttctgtgagctatgaagaacaacgtgactttgaccttcagactgagatatagctggaggctgctttgaccttctttcccacagctcttttg

SEQ ID NO: 938950 - DNA, 120 bp, Artificial Sequence
  ENSG00000228624_43 (sequence is synthesized)
agccccaaaccctatcttaaaaatgacaaatatggaatgcaaagagcagcttttctttttctgatcatggccttaatgtaatacaatagtgaaaccgtctagcatagtgattaagaacat

SEQ ID NO: 938951 - DNA, 120 bp, Artificial Sequence
  ENSG00000228624_44 (sequence is synthesized)
tggctgtagaattagacatatttagtttagcattttgattctaccccaaactggcaaagttactgaatgtatctaaattttaatttgctcatttgtaaaatatggctaataatagtacta

SEQ ID NO: 938952 - DNA, 120 bp, Artificial Sequence
  ENSG00000228624_45 (sequence is synthesized)
ttttttagctcatttataaagtatggataataatagtgcctattttagggagttctgaatattaaaagaagtaaaccatgtaaagcacttagcacagtgctggatactaacaatcgttat

SEQ ID NO: 938953 - DNA, 120 bp, Artificial Sequence
  ENSG00000228624_46 (sequence is synthesized)
tgtgatctaactataattttgcttaaaaacatttgttcaagttttcttatatcatctcctctatagatatgagaatttaacatgaaattttaactctacaagttaaatgggagctaaaat

SEQ ID NO: 938954 - DNA, 120 bp, Artificial Sequence
  ENSG00000228624_47 (sequence is synthesized)
acgggatggcaaagtccacatagtgcagaggagaattgttacagagcaatgctagatgaaggagctgaggctggagaagttaagagacccctgctagataggaaggcacgtgagaagtat

SEQ ID NO: 938955 - DNA, 120 bp, Artificial Sequence
  ENSG00000228624_48 (sequence is synthesized)
actgctctgtctcctgtggagtaaaaagactttggcgttctcagaagaaaaccaaatgagatcacacgaatgagactgctggagcaatctaatgcaaatatctactacagattatcaaaa

SEQ ID NO: 938956 - DNA, 120 bp, Artificial Sequence
  ENSG00000228624_49 (sequence is synthesized)
ggaaaaaaaaaggaggggatagggaagcttaagggaggagtgctgtgaagaatgttgtcatttcttctggactgctactaagtaaaagttatcttctcacctcactcaccaattcctgcc

SEQ ID NO: 938957 - DNA, 120 bp, Artificial Sequence
  ENSG00000228624_50 (sequence is synthesized)
ctacaagtggtggacggtggccacagtgaagagtggggtaacttagactaaacactataggagccatcagaagaaatttttccaaactgcagcttattacatgggtcacacaaggacagt

SEQ ID NO: 938958 - DNA, 120 bp, Artificial Sequence
  ENSG00000228624_51 (sequence is synthesized)
ttgcagcataaggacagctagctgcttatacaagaacatgtgcctgacacagtctcacaagcccagtccaaaactacaagggcctaactgtaactccaggattacaagtcctacctaata

SEQ ID NO: 938959 - DNA, 120 bp, Artificial Sequence
  ENSG00000228624_52 (sequence is synthesized)
actattgacactcgccagtcagaactcaccagctcttttgttgctgccagcaccaataagctttcttccaaaaccaacgcatagcctccgcctttcccaataaactctaaccttttcctt

SEQ ID NO: 938960 - DNA, 120 bp, Artificial Sequence
  ENSG00000228624_53 (sequence is synthesized)
aactactctccagcgcccaccgggaggaggggtccggggaaagggtaagccgaggaaggagaagacgctccggccagaccgaacgcaggattggcatcctctgcttctgcagaaaacatg

SEQ ID NO: 938961 - DNA, 120 bp, Artificial Sequence
  ENSG00000228624_54 (sequence is synthesized)
tttaatgttactgctcatactccaaattatagaatgcttaagataattaaattatctgacttttataattcactacacggtgacctcaaatttacctcattagaatatttagtacttctg

SEQ ID NO: 938962 - DNA, 120 bp, Artificial Sequence
  ENSG00000228624_55 (sequence is synthesized)
cacttctcccacttctcaaagttttcccataccaggattccccaccacctaggaacagcctttgcaagataccaatgctctctaaatccccaaagcagggtctatttcctgatcgaacaa

SEQ ID NO: 938963 - DNA, 120 bp, Artificial Sequence
  ENSG00000228624_56 (sequence is synthesized)
agagcaacaaagaagtgggtggtaaccacctctctgaggcaagccaggacccatggagtctgatctacaacacaagcagtagcagttccacatctccctaccacctcttatttcctacga

SEQ ID NO: 938964 - DNA, 120 bp, Artificial Sequence
  ENSG00000228624_57 (sequence is synthesized)
agtagtattgttttcatttctttaaaaacttcactaggaggaaaccccaaggtaacaatgacaacaacaaaaatctattgcaacataattgatagcaataaaaccttttttaaaaaataa

SEQ ID NO: 938965 - DNA, 120 bp, Artificial Sequence
  ENSG00000228624_58 (sequence is synthesized)
aagattatttttaaaactcacaggcaagctttcaactataaacttcaaatttgtgagcttttacactttcttgagtgacttcaatttgcaaagttgtttaatctcattatacacataaaa

SEQ ID NO: 938966 - DNA, 120 bp, Artificial Sequence
  ENSG00000228624_59 (sequence is synthesized)
caaagaaatggattcttccttagtgcctccagaaggaatgcagccctgctgacttcttgaatttagcccagtaatatccagtttggacttctgacctgtagcaaggagtaaaaagacttt

SEQ ID NO: 938967 - DNA, 120 bp, Artificial Sequence
  ENSG00000228624_60 (sequence is synthesized)
aggaaaaaaaaaggagcttatatcatagttgagaggttctcaaacacaaactggtgccaaaagtgacaaaatgagaaagataagtattgtgcaatgatcatatctgtgcatggtatggta

SEQ ID NO: 938968 - DNA, 120 bp, Artificial Sequence
  ENSG00000228624_61 (sequence is synthesized)
tagacagctgatttgtaatcagtacacttgcatgattttatgaatttccagtaaaactttgccaaaggaaaccttcattttattgcttgttcccacaataaattagagcttatcagcaaa

SEQ ID NO: 938969 - DNA, 120 bp, Artificial Sequence
  ENSG00000228624_62 (sequence is synthesized)
atttctgggtaggtaactgagagaagcaggaattgtgcatgtatctccatatggttttatttttaaagaatgaaatagcaacaaatataaacaactgctgtaacagcaaagagcataatt

SEQ ID NO: 938970 - DNA, 120 bp, Artificial Sequence
  ENSG00000228624_63 (sequence is synthesized)
tcttctaaaatgaggattatatttagaacactccaaatggggacacactgtctgacaagaagtcagaatatcggaaaatggaagtgtcttacttaattaaataaccctgaagtaatttaa

SEQ ID NO: 938971 - DNA, 120 bp, Artificial Sequence
  ENSG00000271367_0 (sequence is synthesized)
cctggccggcaaatttattcttttacatatttacaatgtaatgcttatcacgtgccagctgtgttccaggcagtgggccattgcaataggaatgcaagtatacaaaccatgtacaaatta

SEQ ID NO: 938972 - DNA, 120 bp, Artificial Sequence
  ENSG00000271367_1 (sequence is synthesized)
agtaaattaaacatatacaaagaatcgagattgtcagttgccattgagctccacaaacactgaatgacttcaatttgctagatactatgttaggtattcaaaatttgaaaccttcaagga

SEQ ID NO: 938973 - DNA, 120 bp, Artificial Sequence
  ENSG00000271367_2 (sequence is synthesized)
acatcaagggacatgagaaaagcatatgctggtggcatagactatttttttgagatatctccttcattcttcacgcttctgccagtagtccaaggccagggttcatctctgtcatcccat

SEQ ID NO: 938974 - DNA, 120 bp, Artificial Sequence
  ENSG00000271367_3 (sequence is synthesized)
ctaagttttgcctttccaggttttaaaagtttctaatttaacttgagattccaaaagtcttaagttttacgccgcacttgtttgaattgtgcttacctatcaataaaatgttttaagccc

SEQ ID NO: 938975 - DNA, 120 bp, Artificial Sequence
  ENSG00000271366_0 (sequence is synthesized)
taggctcagcccctggaaccctgcttcccatcgatcctctagcagaatgtgctccagttcctggcttcttggggtctgcaaagggatgctcccttccccgctctgccccatgcccaactt

SEQ ID NO: 938976 - DNA, 120 bp, Artificial Sequence
  ENSG00000271366_1 (sequence is synthesized)
taaattcttgtttaagacagtgaacacacactaagacatgaggtacgtgagccttcatccctggcaccctgcccctccccttcctctctgccttctaggttctgtaaggcccaggcccag

SEQ ID NO: 938977 - DNA, 120 bp, Artificial Sequence
  ENSG00000271366_2 (sequence is synthesized)
tcacagcccaagtcattccatgtagcacatcacccagtgctattttcttttttcttttttttttaagacggagtctcactgtttcccaggctagagtgcattcctggcatgtcacaggct

SEQ ID NO: 938978 - DNA, 120 bp, Artificial Sequence
  ENSG00000271366_3 (sequence is synthesized)
ttctccattaagctctcttgcccctgcagttcactcctgccatctcctctgtgagtcctctgcggaccaccctaggcaagcaaagggattaggagcttggccactagacccaaagtggct

SEQ ID NO: 938979 - DNA, 120 bp, Artificial Sequence
  ENSG00000271366_4 (sequence is synthesized)
gagttagaatcccagccccgttaccagctatgacactaggcaagtcactttctctctctgggcctctgtaagatgacaatgatagaatctattcaattactgtgtggtctgagttaatcc

SEQ ID NO: 938980 - DNA, 120 bp, Artificial Sequence
  ENSG00000271360_0 (sequence is synthesized)
ggaatggcggcgtccggctccccggggccaactccgagtcccggcccggggaggacgcccgcggagcccgccgccgccggcccctcacggcgggagctgaggaatggaagttacctcagt

SEQ ID NO: 938981 - DNA, 120 bp, Artificial Sequence
  ENSG00000271360_1 (sequence is synthesized)
ctgaggaatggaagttacctcagtacggtcccgactgctaggctgtgggcagcggacagagctggcggtcccgggcggccgagcagatccggcgcggcgcggcgcggcggcggcggcggc

SEQ ID NO: 938982 - DNA, 120 bp, Artificial Sequence
  ENSG00000271360_2 (sequence is synthesized)
taccgcagtgccctccgccccattgtttcccttccaagaggatcccggcgaagccgagcccgggaaccaggaagttccccggcgcgacacctcctgccgccgctatggaaacggcccccg

SEQ ID NO: 938983 - DNA, 80 bp, Artificial Sequence
  ENSG00000271360_3 (sequence is synthesized)
gcggccgcagccgccgccatattggcgcggccccttcccggcggcacgtgcgctccgctcccgcactcccgccgtgcgcg

SEQ ID NO: 938984 - DNA, 120 bp, Artificial Sequence
  ENSG00000271360_4 (sequence is synthesized)
gcccggagcccctcggcgggaagcgggcgctggaagcccaggacccaaagcggggcttcggggcacgcaaacgagcgacattggcgtgtccagccggcaggtcagaggatagcagagacg

SEQ ID NO: 938985 - DNA, 120 bp, Artificial Sequence
  ENSG00000271360_5 (sequence is synthesized)
tagggaggtcagctgagtagggggcgagaggatggtctccggagccagcctggcttttttttttttttcatttctgcctcaactacttaccaggtgtcagcccttggacacttttccctg

SEQ ID NO: 938986 - DNA, 120 bp, Artificial Sequence
  ENSG00000271360_6 (sequence is synthesized)
tgcctcagtttcttcatctgtaaagtggaatgataataggacctgcctcatggggctgtcctggaacaagcgagtgcttggtagtaagtgcaaagctcaataaaatgccattgctactga

SEQ ID NO: 938987 - DNA, 120 bp, Artificial Sequence
  ENSG00000270019_0 (sequence is synthesized)
tggaaggggcttttcggttgtaacccttgggttagtttcagttacttctttgctaggttgaggaaagggtggaagcgcctcctgcagccacgaatatcctccagtgcctgagagaaaacg

SEQ ID NO: 938988 - DNA, 120 bp, Artificial Sequence
  ENSG00000270019_1 (sequence is synthesized)
gcctaatcgaaaacgtccgcggcatacatccattcttaaaacttgagtggctgcttttctgggtggaaaagagcggtatcagacagggtgagcagtcggggaacggatgaacaaagactt

SEQ ID NO: 938989 - DNA, 120 bp, Artificial Sequence
  ENSG00000270019_2 (sequence is synthesized)
gcaccgtggccctgatgcctttgttccgagttctattcagttgtacttgtgcgttgttacaggactttagaatgcagccctgccccccaacccccacctcccagggccgacctgtgctcc

SEQ ID NO: 938990 - DNA, 120 bp, Artificial Sequence
  ENSG00000270019_3 (sequence is synthesized)
taggaaggcaaacctcccaggaatatattctgcataactatacaaataggcctttattcaaggcttttggattatgacaaagattaccctcaggagtagtaagattctactagcaggata

SEQ ID NO: 938991 - DNA, 120 bp, Artificial Sequence
  ENSG00000270019_4 (sequence is synthesized)
atagaaaggattaaggctcccctccaaagaaaatttttttaagttagaaacggaggcgagccgcagtgggtcatgcctgtaatttcaatgctttggaaggccgaggtgggaggataggat

SEQ ID NO: 938992 - DNA, 120 bp, Artificial Sequence
  ENSG00000270019_5 (sequence is synthesized)
ggagttcgagaccagcctgggcaacatggggagacccccccccatccctccaaaaaagaaaagaaaactggaaagccttaaagaaacctttcaaactttagtgtgtatcagaattacctg

SEQ ID NO: 938993 - DNA, 120 bp, Artificial Sequence
  ENSG00000270019_6 (sequence is synthesized)
cctagttccactttaggaccctagaaggttagtatctttcctctctaccaggcttatcttaggatgaaccgttcggggtttgctgatgtgaagctaaaacaaaaatattctttaaaagga

SEQ ID NO: 938994 - DNA, 120 bp, Artificial Sequence
  ENSG00000270019_7 (sequence is synthesized)
gggatgtcttattcagtccataagatcatctaatgtattaagctggcttgggggatgaatcgggtgtttcattcattcatttgacaggtaagcattgcttacctactctattatgacggg

SEQ ID NO: 938995 - DNA, 120 bp, Artificial Sequence
  ENSG00000270019_8 (sequence is synthesized)
gtctgtgctgactccgaatattcggtgggatgcaaaatagttaagtgctcttgtagagtttacagattagcggaaaacagacaaattgtgttaagagcaatagaaagaagagagcggagg

SEQ ID NO: 938996 - DNA, 120 bp, Artificial Sequence
  ENSG00000270019_9 (sequence is synthesized)
actctgagaaatgaaggcgaggagtgggagaatgagaggaaggtggaaggcaggtaaggagtctgaccagctggtatttaaaagctaagatggggggaagagtctcccaggagagtgaac

SEQ ID NO: 938997 - DNA, 120 bp, Artificial Sequence
  ENSG00000270019_10 (sequence is synthesized)
agcaagtgtcaaggacctgaggcaggaacaagcttggcttcttccacaaattgaaagaagatccatatgaaagagtcagagaagatgcaatgggagatgaagactgagagataaggaaga

SEQ ID NO: 938998 - DNA, 120 bp, Artificial Sequence
  ENSG00000270019_11 (sequence is synthesized)
gtgaaacagtgcaagaatttgtagactgctctaagcattttaaagtttatcttaaaagcagcttgataaattagatttatggtaattagtttaaaaataaaaataaagcaacttgaaagg

SEQ ID NO: 938999 - DNA, 120 bp, Artificial Sequence
  ENSG00000270016_0 (sequence is synthesized)
gggtggaatctgaagggtgagccttcatccccaggctgggagtgggtgagacgagactggggcctgtatgtctgagtgccccccaaacccagcagtcatgttgcgaggaaacgaaatcac

SEQ ID NO: 939000 - DNA, 81 bp, Artificial Sequence
  ENSG00000270016_1 (sequence is synthesized)
ggcttttgcccacagccacagaactcaaagtctgaatctggaatctcttgagaggacagcaatataaaccacttgtgattt

SEQ ID NO: 939001 - DNA, 120 bp, Artificial Sequence
  ENSG00000270017_0 (sequence is synthesized)
tcctcctctttttttttttttttttttttagctagaagggactttttattgaaaggcgaggctccggcctctgatgggagctacaactggatctcgcggaacgcccgcttctcccccagc

SEQ ID NO: 939002 - DNA, 120 bp, Artificial Sequence
  ENSG00000270017_1 (sequence is synthesized)
ggcttcagggtcctgagcgagtctgccagctccgagctcagctgcacgtcgatgtcagccctttttccttggagccggtgtccacgaagaagagtttttcatttggggcctctctcaaca

SEQ ID NO: 939003 - DNA, 120 bp, Artificial Sequence
  ENSG00000270017_2 (sequence is synthesized)
agccaccgctcatgcgcccctgtagccgcacgtcttccaggaactggtcaacctccagccccagcggctcctgcgcaagcctccgccagtcccacttcttatttcttgggcctcgccgcc

SEQ ID NO: 939004 - DNA, 120 bp, Artificial Sequence
  ENSG00000270012_0 (sequence is synthesized)
atcgaggtatacctacataaagtgtactgatattctgtgtatagcccagtggatttgtacatatgtatgcacttgtgtagccaccacccagatgaagatactgagcaggtccagtacccc

SEQ ID NO: 939005 - DNA, 120 bp, Artificial Sequence
  ENSG00000270012_1 (sequence is synthesized)
agagctaccttcatttctatcactttcccaagctgtcatccccgccggctgtcatgggaaccctgtctgtaagatgcgacagtttgggtaaaggagtttggtcattttaaagagtgtgaa

SEQ ID NO: 939006 - DNA, 120 bp, Artificial Sequence
  ENSG00000270012_2 (sequence is synthesized)
aggcagagaacagagaaatcaaaaccttgcagggccaaggtgggtggagagggtgtttttcttttaacatacatgggcggttttaaggagaaattgaagcagcctgttcagacaattgtt

SEQ ID NO: 939007 - DNA, 120 bp, Artificial Sequence
  ENSG00000270012_3 (sequence is synthesized)
ttggtatctggccccaggtctgtggttcctaacatgacttgtgatattattttaagtgggcagatggctttttgatagcttctttatctttcgatctcagctcttgcaaaggggaggttg

SEQ ID NO: 939008 - DNA, 120 bp, Artificial Sequence
  ENSG00000270012_4 (sequence is synthesized)
gtgctcattgcaagatcagcgataagggtttctttgtaggtcggtggctttcttggtgagtacatttcaacatattattgttttagaacctgtgtgctgccagtgacttgcagcactgtt

SEQ ID NO: 939009 - DNA, 120 bp, Artificial Sequence
  ENSG00000270012_5 (sequence is synthesized)
gaagactagccaccctttgtgacctagccctcttgggaaatggcggaggatctcagggtatatcccttacctgtgggagccctatcagagggcttcctgttgaggaaatgttggctgtag

SEQ ID NO: 939010 - DNA, 120 bp, Artificial Sequence
  ENSG00000270012_6 (sequence is synthesized)
gccctctgtgcactgagcacagccacatcaggtgagggcatgggagaagtccgtggtagccatcaggatagagttcagaaacccaaatggctgctttccctgggttgctggaccaggcat

SEQ ID NO: 939011 - DNA, 120 bp, Artificial Sequence
  ENSG00000270012_7 (sequence is synthesized)
ttggtaactctaaagcttagagatgattcatcgacaagcatttattgactgcctactgtgtgctgggcacagtgctaggttccagcagggaaagagatgcagagtggtcctaagatgtca

SEQ ID NO: 939012 - DNA, 120 bp, Artificial Sequence
  ENSG00000270012_8 (sequence is synthesized)
cagggcttgtgggatggagtacagaggatttgttgtatgagacctggctgagcccctgctcttcgccaggcacttcactgagtactatattttcatgcaaggtctggtttaattccgaca

SEQ ID NO: 939013 - DNA, 120 bp, Artificial Sequence
  ENSG00000270012_9 (sequence is synthesized)
acattccctgtgaagtagagggttttaaatttctctttcctggatgagcaaactgaggctcccagagtccaaagtcctagggctggtgtggggaaaagccctcctgatcttccttggcac

SEQ ID NO: 939014 - DNA, 120 bp, Artificial Sequence
  ENSG00000270012_10 (sequence is synthesized)
ttgacactaccctttggaagtgtcctattcttcttaaaagtaaagaccaagagagcctcaccatggtcttcaagcaccctcccatcccattccccaatctggcctccactggctcatagt

SEQ ID NO: 939015 - DNA, 120 bp, Artificial Sequence
  ENSG00000270012_11 (sequence is synthesized)
ctgcagggcctttgcccctgctgtttccttcaccaggaacatttatcccgtaccccttgcagtctcctccagtgttgatccctcagttctaagaggacttccccaggggagcctgtccac

SEQ ID NO: 939016 - DNA, 120 bp, Artificial Sequence
  ENSG00000270012_12 (sequence is synthesized)
cccagtgtcctcgggcccctggctttttcatagcactcatcagcccagcacgtgctaagctttgttagagaatgtcccatggcagagcagatgaacatcgccaccagtcgaggggtcatc

SEQ ID NO: 939017 - DNA, 120 bp, Artificial Sequence
  ENSG00000270012_13 (sequence is synthesized)
ggccaccctgcctagcagttctactatatttttttgatccactcgtttctcctctgaagtgactctttcaaatgttctttaccttcagactttctctcctgcttcaaaaaacaaaacaga

SEQ ID NO: 939018 - DNA, 120 bp, Artificial Sequence
  ENSG00000270012_14 (sequence is synthesized)
agccataagaatggaactccctataacttgtggcccccaagtctgcacgctgatttccctcccctgtgttacagatgacgaggagtcccttcttgctcaggccacttctccctcctgtgc

SEQ ID NO: 939019 - DNA, 120 bp, Artificial Sequence
  ENSG00000270012_15 (sequence is synthesized)
tctgggtcccagtttctgctacttgctctagaatctgacatcatcagtcaccttttctctcctggcaggttttctgctgccctccttgcttgatcctctattcacctttgcctgtgccag

SEQ ID NO: 939020 - DNA, 120 bp, Artificial Sequence
  ENSG00000270012_16 (sequence is synthesized)
catcccttctgtctccgctgaccccacgttctctccctcctgcttctggccagcacctcatcaccctccccttcactgctgacccctgcagagttgcctgtacttgccttctgcacttgc

SEQ ID NO: 939021 - DNA, 120 bp, Artificial Sequence
  ENSG00000270012_17 (sequence is synthesized)
tcacccccgtaagtgttagcccccggcatctgccagattctgcaggtggttttttagttttcctcttgaagtggttgaccactcctacttaaaacactttgtcttcccttgccttgagac

SEQ ID NO: 939022 - DNA, 120 bp, Artificial Sequence
  ENSG00000270012_18 (sequence is synthesized)
cacactctgctggttttcctcttaactctctggcccttctctttctcctggctcttcccttagcttcatgtatccaaactcggcatctccacttgactgatggcccaaataattcctcaa

SEQ ID NO: 939023 - DNA, 120 bp, Artificial Sequence
  ENSG00000270012_19 (sequence is synthesized)
actcaccttgtcggggactgcattcatcacctctcccacagtgttcccaagcagcctctcactcccctacctccccacttgctcgttttgcttttcagcatccttaagtaagccctgcct

SEQ ID NO: 939024 - DNA, 120 bp, Artificial Sequence
  ENSG00000270012_20 (sequence is synthesized)
gaccctgtagattgggccagggacccttattctagggcattctttccttttctaaaggcactgatcgcagtttgtagttatatctttattagggggttgctggatgactctctgccccgc

SEQ ID NO: 939025 - DNA, 120 bp, Artificial Sequence
  ENSG00000270012_21 (sequence is synthesized)
tagactgtaagctccgtgaggggtagggacatggtctgctttcattcaccactgtattcctgcaggcctgccacagtgcctggcacttagcaggtgctcaataaatgtttgttgaaataa

SEQ ID NO: 939026 - DNA, 120 bp, Artificial Sequence
  ENSG00000273297_0 (sequence is synthesized)
atgatcaactgcatggggtcctacaggagaagaccaagagacagagacagagaccagggaaaatgaccgataccattccttctcagggatgctacacacccatggggcagaggataagag

SEQ ID NO: 939027 - DNA, 120 bp, Artificial Sequence
  ENSG00000273297_1 (sequence is synthesized)
gttcctgaaggcatcacccctctggccatggctggtgtgcagacaaagctggagatttggagtagcctgttgtcccactgactcttagactgccccagctaagaagaaccaactcctcct

SEQ ID NO: 939028 - DNA, 120 bp, Artificial Sequence
  ENSG00000273297_2 (sequence is synthesized)
attacagatgaaataaacaaagctactcaagctctctggcatcgccctgacggtcatcatgtgcttcacatttccctcctgccccccctgattttctggaaaagggagaaagtgtgtgaa

SEQ ID NO: 939029 - DNA, 120 bp, Artificial Sequence
  ENSG00000273297_3 (sequence is synthesized)
aaaaaatggacaataacttctgttaactttgtagatgtctggttcctccatatgaggctgtgcttgaatcaattttggagagagggtttctaaagtctctctagattctattaattttga

SEQ ID NO: 939030 - DNA, 120 bp, Artificial Sequence
  ENSG00000273297_4 (sequence is synthesized)
tagagacaataaaaggcagcaggaccaactctgtgtggtgggagatctagcaaccattatagtcacaatagccaccacttactgaacacccaccatgtgacaaagaacaaatgtgcatga

SEQ ID NO: 939031 - DNA, 120 bp, Artificial Sequence
  ENSG00000273297_5 (sequence is synthesized)
attatgtcacatttttcacaagcaccccttgagttgggagttcactcatgaggcaactgaggttcagggagatgaagtaactcaccctgtaggtaggagggctgagatctggacgtagat

SEQ ID NO: 939032 - DNA, 120 bp, Artificial Sequence
  ENSG00000273297_6 (sequence is synthesized)
gctcaagaaactgaagctctgaggccacattgttccagccttttgcagctcctgcatgtggataccagcaccagcagctccccgaccaggggccccagctaagccctcccagaggatgat

SEQ ID NO: 939033 - DNA, 120 bp, Artificial Sequence
  ENSG00000273297_7 (sequence is synthesized)
cttggctttgtacatggggtgtcaatatcctgtgagtccaacagagggaagacataagaatatggtcacccaggttttgtacagaggaaatccaggctcctaacgatggcgaaagatggg

SEQ ID NO: 939034 - DNA, 120 bp, Artificial Sequence
  ENSG00000273297_8 (sequence is synthesized)
aataaaaggatcagaacactgagctggatcttcagttcatttcagaaccaccttaaaagtagacctttcagagctacccgagaatcctggtccctgcagctgatcttcccacctccaccc

SEQ ID NO: 939035 - DNA, 120 bp, Artificial Sequence
  ENSG00000273297_9 (sequence is synthesized)
agctctcgtcctcctcttcctccccatccaccatcctgaccaggtgagctggcttcccctgctcaacagctctacgagtttgcacttctggatttggtcaggtcaagaccagctccccca

SEQ ID NO: 939036 - DNA, 120 bp, Artificial Sequence
  ENSG00000273297_10 (sequence is synthesized)
aatatacctctgtcctagacagccttgttctaaacagaaactgatgataacatggaggaagaggcttgaacggaaaggtggaggagggaaggaaggaacagggagaagtcatctctaggt

SEQ ID NO: 939037 - DNA, 120 bp, Artificial Sequence
  ENSG00000273297_11 (sequence is synthesized)
tggcagtccctgtcagcctcttaggacttctcacctctgcagcagtgatggtagagtcgtgtcttactccctggggggaggtgggtggttcctgacaccatcccctgcttccccaagttc

SEQ ID NO: 939038 - DNA, 120 bp, Artificial Sequence
  ENSG00000273297_12 (sequence is synthesized)
tcctctttagaaaaggatggaggtctatgatgcaggcaaggtcatcacagattctattccctccttctagtgatctcaaacgtgacattaaataaatgtagcaaagaggttctttatgaa

SEQ ID NO: 939039 - DNA, 86 bp, Artificial Sequence
  ENSG00000273297_13 (sequence is synthesized)
actgtgaactgcgcatgcgagggatctaggctgcgcgctccttatgagaatctaacgcctgatgacctatcactgtctcccatcac

SEQ ID NO: 939040 - DNA, 120 bp, Artificial Sequence
  ENSG00000273297_14 (sequence is synthesized)
gtccaacagagggaagacataagaatatggtcacccagggctctgctcaagtccctgcaccaatgcaacctgccaagggaaagcgctcaccatggttctgtcttgacctgccagtttaga

SEQ ID NO: 939041 - DNA, 120 bp, Artificial Sequence
  ENSG00000273297_15 (sequence is synthesized)
tacccatctaaagtcactgtcgcttacagttgtggcaattctgaatgtcgacaggagaatgtctcccggatttcagccttttagaagataaaatggtcctatgtgttcatgaacaaaacc

SEQ ID NO: 939042 - DNA, 120 bp, Artificial Sequence
  ENSG00000273297_16 (sequence is synthesized)
caccagtttccccagggcagtgagttacctgacatctggcagattcctggaaggtttcctctggccccatactgggatccattcctgggacaactagaagtgccagggagttaaagcccc

SEQ ID NO: 939043 - DNA, 120 bp, Artificial Sequence
  ENSG00000273297_17 (sequence is synthesized)
gacctgatgggactgagtcctggttgctcatgagagaaaccagcaggactggatgtcagtgattgcaccatgcaggattacagattgtgctgagtttagattttctgccttcctcctcag

SEQ ID NO: 939044 - DNA, 120 bp, Artificial Sequence
  ENSG00000273297_18 (sequence is synthesized)
ttgtcaggctgctagccagctcttctgctcccatgacacctgcatcgaatgcctgccctttccttactacaagaccctttccagttcccagattagaatctgccacaggctaggaatccc

SEQ ID NO: 939045 - DNA, 120 bp, Artificial Sequence
  ENSG00000273297_19 (sequence is synthesized)
acatcccagtagtgatttggctccaagtgcaaaggcacctagtgtctgccttttgttcagcagcttggtgatggacatatccaggactcagagacccctttccctcagctctctgagttg

SEQ ID NO: 939046 - DNA, 120 bp, Artificial Sequence
  ENSG00000273297_20 (sequence is synthesized)
gaagctgtcaggtgcagaagggcaacatcttacatacacagggtttgggcaggtctgggcagtgcctggttaatgttaaataatgcagataaaggaattgttgacatctgaaagtcaata

SEQ ID NO: 939047 - DNA, 120 bp, Artificial Sequence
  ENSG00000273297_21 (sequence is synthesized)
tgaaaattgtatgcactgctgtgactcatgcaacttcactcccagccctggttctcatgattccagaagtggaaaaaataaggcaactcttttcctcacaattcaaaaaaatacctattg

SEQ ID NO: 939048 - DNA, 120 bp, Artificial Sequence
  ENSG00000273297_22 (sequence is synthesized)
agcaacatcagcttggcccacacaagacaatttttatcccttccgttagttaactttgctttggccaaaggccagaaaaacctcattctttacaggcaacctcagaccaccatcctggat

SEQ ID NO: 939049 - DNA, 120 bp, Artificial Sequence
  ENSG00000273297_23 (sequence is synthesized)
ccacttcaaaaactaactgcagacctgtgtcttactagaggtgatttggtagcattgaagatcaaatcccgatttaaaaaattaaaaaaaaaatgaacataaaatgcatttttaacaatg

SEQ ID NO: 939050 - DNA, 120 bp, Artificial Sequence
  ENSG00000273297_24 (sequence is synthesized)
aatacttgatgaatgaggagtcaatgattaaatgaaggaaagaaaagagactgaaaaggaggtatgagaatgggaaagacgagtggaaagacgagatagatattgccctaaagacacagt

SEQ ID NO: 939051 - DNA, 120 bp, Artificial Sequence
  ENSG00000273297_25 (sequence is synthesized)
aagccatcaaatatctgttttctagtccccttctgggccctcttggattttgaaaaagggaggaagaaattggaaaaattaccaataacttctattgactttgtagattcctagtttccc

SEQ ID NO: 939052 - DNA, 120 bp, Artificial Sequence
  ENSG00000273297_26 (sequence is synthesized)
cacatgtggctatgcttgaatcaacttgtaaaagtctctttatagtctgttgatgttcatgcaggcactaaaaggccacggtcggcctacttagatgatccactccaccctgggctccgg

SEQ ID NO: 939053 - DNA, 120 bp, Artificial Sequence
  ENSG00000273297_27 (sequence is synthesized)
aagatgttccagggcatttgcctttacttgaccctatgctgagaagctaccaatatttttctttccccaaattggttttatttgtaccctttatatattaaatattagagtattggccaa

SEQ ID NO: 939054 - DNA, 120 bp, Artificial Sequence
  ENSG00000273297_28 (sequence is synthesized)
agaactggagagtgggagaaggcaatgttgagaaattggactggagagagaagcagggtgcatatctctattatagtatttatcagactacttatcattattcattttaaaagttcttac

SEQ ID NO: 939055 - DNA, 120 bp, Artificial Sequence
  ENSG00000273297_29 (sequence is synthesized)
ttgatatctagggttgacttatacccaataatttacatatctgaatattttgtggagataattaataaccttcgtacaattctctaaagttctatgtcttagtaaacattattaatctaa

SEQ ID NO: 939056 - DNA, 120 bp, Artificial Sequence
  ENSG00000273297_30 (sequence is synthesized)
cgacctcaatgaaggtgtcttccaaggccttgtccactcaaggacatgttgcatgcctgaaactgagtatacaggaaaaggatagaaatggaataaaatggaaacccataaatcacacta

SEQ ID NO: 939057 - DNA, 120 bp, Artificial Sequence
  ENSG00000273297_31 (sequence is synthesized)
ccctgctatgcagtttcaaaccactgacttaatgaaatgttgatccactttgccatggatgccccactttttaactccttcttcagagtcccaggaggtgaggctcttctgtttaactga

SEQ ID NO: 939058 - DNA, 120 bp, Artificial Sequence
  ENSG00000273297_32 (sequence is synthesized)
tttgcagaatttttgcttctgctattacaatggcttccatagttgagtaccaaagacactttactatggtgccacagagatcattttgcagatgaggaaacagactgttctactacccag

SEQ ID NO: 939059 - DNA, 120 bp, Artificial Sequence
  ENSG00000273297_33 (sequence is synthesized)
gctttggttttttctactcagtcttgcacaatctctcactctcagcccagaacattgctgcatttttgtgagccatcagcatccaaagtgaacacagggtctaaataactgaagatggca

SEQ ID NO: 939060 - DNA, 120 bp, Artificial Sequence
  ENSG00000273297_34 (sequence is synthesized)
tgagggaacacacaatcaggtctttaaaaaaagaagaaagtgaataggcaaactgaacaggacatctaggactgaaaagcctctgtgaacaactggactcaatatgaaattggcgtgagc

SEQ ID NO: 939061 - DNA, 120 bp, Artificial Sequence
  ENSG00000273297_35 (sequence is synthesized)
tcacagaagaccagctgagttccagatgtggttgggtagcttgggttatgggcccgtataaaaaaaatggtctcttcttgtaaaaggaattcaaaaaaagactaaaagtcaccccaaaga

SEQ ID NO: 939062 - DNA, 120 bp, Artificial Sequence
  ENSG00000273297_36 (sequence is synthesized)
gagtccaacagagggaagacataagaatatggtcacccaggtaagtggtggatagctgagtgactgtattcttgctcaccaccacccccatcagagggggtgtctttgtttctagttggg

SEQ ID NO: 939063 - DNA, 120 bp, Artificial Sequence
  ENSG00000273297_37 (sequence is synthesized)
ggaagctttggtagactgtcagtaattcctccctgtgtcccccatcctgtgtcaggtaacagacatttgtcttaatgtattcactgtgtcatcagaagccacttcttatccatccttgtg

SEQ ID NO: 939064 - DNA, 120 bp, Artificial Sequence
  ENSG00000273297_38 (sequence is synthesized)
atacagcacctcaggggtgcctggtgtaataagaaacaactttaaaaaaaaaggaggggatgtggccctaaaagttatcaactgtcaatcagacttgaccatgaaaaattggccaaagaa

SEQ ID NO: 939065 - DNA, 120 bp, Artificial Sequence
  ENSG00000273297_39 (sequence is synthesized)
gggctcccactgattctacattatggaaatttcatgatccgactggaatccaggaaaatcacagctgaaatacaaaacatcagcccttatctccagcactgtacatggcagaaactgctt

SEQ ID NO: 939066 - DNA, 120 bp, Artificial Sequence
  ENSG00000273295_0 (sequence is synthesized)
tgctggggtagcccagcctacgcctccgggggccttcagggaagagaaccagctaaggctggggggaccaggagaagggtcccccaaggttggaaagtgcatgcaggaggatgctcagca

SEQ ID NO: 939067 - DNA, 120 bp, Artificial Sequence
  ENSG00000273295_1 (sequence is synthesized)
ggggctgcaacaggggggccttgggagcccaccaggcagggatcagcaaggggtctcactcagcgagggactgcaaagcctcacttcagtctctaggtccagggatcaggctcaccaact

SEQ ID NO: 939068 - DNA, 120 bp, Artificial Sequence
  ENSG00000273295_2 (sequence is synthesized)
ccctgcagaggccccagcagcaggggaccgcaggctcacagcatggacagtgggtgatatctgttgtaagctctcctcttccctctcccgctccccatggcctccgctatcagaacatat

SEQ ID NO: 939069 - DNA, 120 bp, Artificial Sequence
  ENSG00000273295_3 (sequence is synthesized)
tctgcctcttgcaatatggacagagtgggtccttaaaaaaaattacctaaaatgttagctcagggttcacttccagaagagaaaacaggtgtaaggggttctgggacaggcctgtggaaa

SEQ ID NO: 939070 - DNA, 120 bp, Artificial Sequence
  ENSG00000273295_4 (sequence is synthesized)
tcgggagtgataccaaggctgactgtagcattggggataaaaaggagggaggagtcccagagtagggtggggaccacataggacaccacttccttagggcccagacagaggcaggaggtc

SEQ ID NO: 939071 - DNA, 120 bp, Artificial Sequence
  ENSG00000273295_5 (sequence is synthesized)
tgatatcagcagtcagttgggagttcctaggggtctggggtggtggagagagaccttcacaagttgggcaggctgctctgcttcaccccagattagagggcactgctggacacccacatg

SEQ ID NO: 939072 - DNA, 120 bp, Artificial Sequence
  ENSG00000273295_6 (sequence is synthesized)
gcaaagtggccaaatcccaagggaagacccaaggagccgagttgaaactgccccctgctcctgaactcaggggtcagcgatattgctgctacttgctaagcccagttgcccctgtgttat

SEQ ID NO: 939073 - DNA, 120 bp, Artificial Sequence
  ENSG00000273295_7 (sequence is synthesized)
ccactcccccttggagacctcggggcagcatagattccccccacccaggacttggaatgggtcatcattcaatgctatttaattccaagggtagcctggactccagacgacacattcttt

SEQ ID NO: 939074 - DNA, 120 bp, Artificial Sequence
  ENSG00000273295_8 (sequence is synthesized)
tactactcttcctactttcccatcctaaattaggtccaacctcaaagttcaaatttgagtcagaggttctgcagatatataagatgccagatacccagataaaaagtcaacctagaaatg

SEQ ID NO: 939075 - DNA, 120 bp, Artificial Sequence
  ENSG00000273295_9 (sequence is synthesized)
tctttcataaatttcctagggtcaaattcaagtcaaaaaattaagttcccttgtccttttaggttaaagtccaaagggaaaaaaaagtcttaaggtcaaaggattcaagcccaaagcaat

SEQ ID NO: 939076 - DNA, 120 bp, Artificial Sequence
  ENSG00000273295_10 (sequence is synthesized)
caaagagagcccagggatccgtcagagcccagtggtgttaacctcctccccgaggctctgtgctcacccagtgagcaaagtggcccagtaggcacgggagggctgggtgtcctggaaagt

SEQ ID NO: 939077 - DNA, 120 bp, Artificial Sequence
  ENSG00000273295_11 (sequence is synthesized)
gagatccttctctccacatctcagcattttcactagcctgccatgtgctccagttttaaaagacccagagttactaggaatgagcagatggtgatagcctcagcctcctgctcgccaacc

SEQ ID NO: 939078 - DNA, 120 bp, Artificial Sequence
  ENSG00000273295_12 (sequence is synthesized)
acagggaagtccttagagcagcatgcaggccatgagatgtctccaggatcccggacccagccccatgtagccctctcttcctgctacctcagtactccagcaggaatgccctggcagctg

SEQ ID NO: 939079 - DNA, 120 bp, Artificial Sequence
  ENSG00000273295_13 (sequence is synthesized)
atggaaagagagtagacagggaagacaaaccctagaccccacagcatatctaaccaggtggagggttagcattagccctggcgaccccgctggggtggagcaggaagcaatttctgctgt

SEQ ID NO: 939080 - DNA, 120 bp, Artificial Sequence
  ENSG00000273295_14 (sequence is synthesized)
cctcctccctgagcgtatctgtacaagcagtcatcacctgcctgggtcttatttataataccttctccttttcatatgtgtgaaatctcatcatttccatttccctctgtatgcccattg

SEQ ID NO: 939081 - DNA, 120 bp, Artificial Sequence
  ENSG00000273295_15 (sequence is synthesized)
catggatgtcttcagtcctaagagatcctgccccagtcagtgcagcacagcccagcaggttgctgagctgagcaccagggagcagtggctgtgtcccactggctctcaggacactagctg

SEQ ID NO: 939082 - DNA, 120 bp, Artificial Sequence
  ENSG00000273295_16 (sequence is synthesized)
tcctccactggggatgttcccagtcttgagcagcactgtttctgcagcacagttgtcagcagttggggacagatgtccacagctgtgcttcctcatgcgactgctggcttgcatccccag

SEQ ID NO: 939083 - DNA, 120 bp, Artificial Sequence
  ENSG00000273295_17 (sequence is synthesized)
catggctcagctggggccctggcagttgtgctggctgctggcagtcttcacacacagggctggtcatttgtgttcaaccccagtgccttccctccttttactttctctttgctttccggc

SEQ ID NO: 939084 - DNA, 120 bp, Artificial Sequence
  ENSG00000273295_18 (sequence is synthesized)
ccatatatttactttttctgatctgttcctctagattttgtcacttgggggtctcccctggcaacagaaaacaaaaccaggcaatcccaggtttgccacaagaattgctgttgaaacagt

SEQ ID NO: 939085 - DNA, 120 bp, Artificial Sequence
  ENSG00000273295_19 (sequence is synthesized)
cccacagctgcgcccaagagatggcggccatggccatcagcctccctgccgtcagcccctctctcctgactggctgtgctctcctcagggaggactccactgagccctccttgacaccta

SEQ ID NO: 939086 - DNA, 120 bp, Artificial Sequence
  ENSG00000273295_20 (sequence is synthesized)
atccctacatttaaaaaatgcattcccttaggtcctgagcaaccccagacacccacccacagtaactatgctgtccccaggtatacctaaaatattttcaatgtttgatgctgatcttct

SEQ ID NO: 939087 - DNA, 120 bp, Artificial Sequence
  ENSG00000273295_21 (sequence is synthesized)
gtcctttaatttgcccaaattccctacagcctctgagggctgccctggctcatggaatggcttctgattcttacggagttgctgtctgcagcattgaatggccccccctcaagagtgttc

SEQ ID NO: 939088 - DNA, 120 bp, Artificial Sequence
  ENSG00000273295_22 (sequence is synthesized)
tgggtcacctggttccctggtggtgaccttgtctgttcccaacgtctgccctcccctcacatcagggagctttcctgtcccctaagttggtctggcccactccagggtcccatgatccct

SEQ ID NO: 939089 - DNA, 120 bp, Artificial Sequence
  ENSG00000273295_23 (sequence is synthesized)
ggacagacggttctcagcacaagccatttgtatggcccttgctagctttggatgcgtattgatttcattgtttctctatctcaacccaagaaaatagcatattctctgaagggccctgat

SEQ ID NO: 939090 - DNA, 120 bp, Artificial Sequence
  ENSG00000273295_24 (sequence is synthesized)
tccttttaatgctgttgtccattaacaaactcttacctttctgtgggcaaagccacgactttagtctcccaattcctgggtcaaaatgtacgtaatagccaggcacggtggctcatacct

SEQ ID NO: 939091 - DNA, 120 bp, Artificial Sequence
  ENSG00000273295_25 (sequence is synthesized)
gtgatccctgtaatattctgggatgccaaggcgggaagatcacttagggccagcctggggaacctagtgaaatcctgtctctacaaaaataaaaatataattagctgggcatggtggcac

SEQ ID NO: 939092 - DNA, 120 bp, Artificial Sequence
  ENSG00000273295_26 (sequence is synthesized)
aaaactgtagtctcagccactcaagaagctgtggcgggaagatggcttaatcccaggagttcaaggttactgtgagcttgattgcaccactgcattgcagcatgggcaacagggagagac

SEQ ID NO: 939093 - DNA, 120 bp, Artificial Sequence
  ENSG00000273295_27 (sequence is synthesized)
cctgtctctaaaaagaaacaacaaattaaaacaaaatgtatgtaaggcacaaatcgagagccaagctgagccgcacaaggggactaactcagcagacctagggatgtgtttcgtgggctc

SEQ ID NO: 939094 - DNA, 120 bp, Artificial Sequence
  ENSG00000273295_28 (sequence is synthesized)
aggagggaccctccccagtccctgttctggcaggaggctttgaggacagctcatctggcacaactccactgtgggtggtacaagactcataccaggttgcaccggccccttgctgccttc

SEQ ID NO: 939095 - DNA, 120 bp, Artificial Sequence
  ENSG00000273295_29 (sequence is synthesized)
gcagttggaagtggtgatctcagacctggctgagaacacagtaaaggcagcaagcctgggcctgccctcctccattcatgcctcagaggttgggacccttctgtagcctcctctgcactg

SEQ ID NO: 939096 - DNA, 120 bp, Artificial Sequence
  ENSG00000273295_30 (sequence is synthesized)
tctctctttggattaataggaggcccgtgcaggagtcagagaacacggctctgagctgtgaccatccccaaagcactgccctgagttgccaaaggtcatatccccacatggaccttactt

SEQ ID NO: 939097 - DNA, 120 bp, Artificial Sequence
  ENSG00000273295_31 (sequence is synthesized)
tataccagcaagatggaacctccggcctgggccactagttaaaagccaaccctaagactgtaaggatcagctcgtggctccaaagctctgtggggaactgccaaggccagaagccagtgt

SEQ ID NO: 939098 - DNA, 120 bp, Artificial Sequence
  ENSG00000273295_32 (sequence is synthesized)
ggtccctgtgaagcccccgcgcacacaccaggcatccccaaagcctcagactttatgtggttacttgaggactcaaagctcaaagcctctgctggatttaagggggcttaaatagaacac

SEQ ID NO: 939099 - DNA, 120 bp, Artificial Sequence
  ENSG00000273295_33 (sequence is synthesized)
gcctttcttcccattccaatcctggggcctccaccacagttgtgagggtcatagcacatgccagaaggcagggagcacacagcaaagcagggcccagaaagactgagctagacggggggc

SEQ ID NO: 939100 - DNA, 120 bp, Artificial Sequence
  ENSG00000273295_34 (sequence is synthesized)
gctaaggaggtgcttgtttagggacataagcacctcatggggaaacaaggaggtgaggaagaacggcccccactcccagcagaaacactgtggtgggaagctcagggaggctgggggtgg

SEQ ID NO: 939101 - DNA, 120 bp, Artificial Sequence
  ENSG00000273295_35 (sequence is synthesized)
gctggggaagaggccaacaaagtgggaacagccctccgtatgggccagtgtctggcaaggtcttagtgggatggggcagttgggcagtgcttctgcatggcacggtacccaacggtcggc

SEQ ID NO: 939102 - DNA, 120 bp, Artificial Sequence
  ENSG00000273295_36 (sequence is synthesized)
ctggtggtggtgctcttcacttcctcttcactcccttctactgtgcatgttaacttttgtatcagggagtatgagatatggaaaaatgcataaatgcataaggtttaataaatatatata

SEQ ID NO: 939103 - DNA, 120 bp, Artificial Sequence
  ENSG00000273295_37 (sequence is synthesized)
ggcacttgtaagaacagagagaaaaatactgcagcaccctgccacctcccaaatgcccctggccagtgggaccgctgtcctgacagtgatagaaatcatttcttggctttcatcacaatt

SEQ ID NO: 939104 - DNA, 120 bp, Artificial Sequence
  ENSG00000273295_38 (sequence is synthesized)
ttcccacctacacgtggtcctctgaacagtacagtttgggggtccttgttttcaaactttatataaatggaactgcattatatatatatatcttgtggcttttgctcaatatgtttatga

SEQ ID NO: 939105 - DNA, 120 bp, Artificial Sequence
  ENSG00000273295_39 (sequence is synthesized)
gatttgaccgtggtgatatttgtacctatagcttgttcatttcactgctgttgaatattccatgaatgaacaagcataatttatccaattattgatggacattgggttgcttcgagatac

SEQ ID NO: 939106 - DNA, 120 bp, Artificial Sequence
  ENSG00000273295_40 (sequence is synthesized)
aagtttctccgggataaatatatcgaggagtgggattgtgggcacgttacagctgaggaggttagtagtggtgtgtcatggtggttcttatttccctgatttctactgacgatgaacaac

SEQ ID NO: 939107 - DNA, 120 bp, Artificial Sequence
  ENSG00000273295_41 (sequence is synthesized)
ttttccattggatattctgttttgtgaagtggcttctaaagtcctttgctcatttttttaaatagggtttcctaataatgtaatgttgagataggagatcagcagaacttgttttccaag

SEQ ID NO: 939108 - DNA, 120 bp, Artificial Sequence
  ENSG00000273295_42 (sequence is synthesized)
cactggtcaagaccttggtcatgatcccgctgatcaaaacagaatctggtcggaacaggatgcagtgaagaaatcagctgaaaccagctggaaccaagatggcaacaaaagtgacctcac

SEQ ID NO: 939109 - DNA, 120 bp, Artificial Sequence
  ENSG00000273295_43 (sequence is synthesized)
ttttgtccctcactgctcattatatgctagtgataatgcatgctaaaagacattcccaccagcaccatgacagtttacacatgccacggcaatacccaaaagttatcttatgtgatttaa

SEQ ID NO: 939110 - DNA, 120 bp, Artificial Sequence
  ENSG00000273295_44 (sequence is synthesized)
aagggggaggaaccctcagttccaggaactccggatccctttgctagaaaattcatgaataacctgccccttatttagcatataataagaagtagctatacatatagatagctggtagtc

SEQ ID NO: 939111 - DNA, 120 bp, Artificial Sequence
  ENSG00000273295_45 (sequence is synthesized)
caggagtgctgctctgcctatggggtagccctgtaaaccccatccacctgtatggatgctctatgaaacccacttttctgtactctgttgctctaataaacttgctttgctttcactctt

SEQ ID NO: 939112 - DNA, 120 bp, Artificial Sequence
  ENSG00000232298_0 (sequence is synthesized)
cccggggctgcccagggctgcgggctccaggcacccagagcgctgcgaccacatgaaaggcccggcgctcagcacccgccagccacctccagctggtttctaactacaccgccggggcct

SEQ ID NO: 939113 - DNA, 120 bp, Artificial Sequence
  ENSG00000232298_1 (sequence is synthesized)
ccatgcttctcagagaccagccttcgaagtgccgccttacacccggggcctggccaccgggcgggcgcggatggagctctggtccacatttgggagctcacagttgttcctgccaggaac

SEQ ID NO: 939114 - DNA, 120 bp, Artificial Sequence
  ENSG00000232298_2 (sequence is synthesized)
cagccagaacaggaggcagccagggagaggggagccagggagaacacagcctcagtcctggaaggagagggcctgctgggaagaacagaacccagctgtcttggccccagatgtggaagc

SEQ ID NO: 939115 - DNA, 120 bp, Artificial Sequence
  ENSG00000232298_3 (sequence is synthesized)
tatgaaacttgatcaggtcatgcagcgccagaggacccaaggtgggatctcaacccagactgtttggctccaaagctgaactgctacattacgttgcttcagcaaacagtcattcagaga

SEQ ID NO: 939116 - DNA, 120 bp, Artificial Sequence
  ENSG00000232298_4 (sequence is synthesized)
caatgggctttagaggagtttagtgatgttactaacaaacataagtaccttgtactaacctcctggtgcccaagtgtttgaggtgagaaaaactgaaacatgaaaagcccagagaggtaa

SEQ ID NO: 939117 - DNA, 120 bp, Artificial Sequence
  ENSG00000232298_5 (sequence is synthesized)
agtgactggctcaagcaaatacaggctccagctgcagccactttgaagataaagtttcctccatagaaattctgcaatacagatgtccttccgcggtcccagttcagtcctgcaccagtt

SEQ ID NO: 939118 - DNA, 120 bp, Artificial Sequence
  ENSG00000232298_6 (sequence is synthesized)
ccttttcccactgggaaatttctttcctcttcctacttccatgcaactgcgaggcaaggctcaagcccacttccttctccttttcctgtgcctccctgtggagggagctccctcttcttc

SEQ ID NO: 939119 - DNA, 120 bp, Artificial Sequence
  ENSG00000232299_0 (sequence is synthesized)
ataaaggccattcagtgacgacaaagaagaaaggttaagaatgccatgttggaagtcctttgaatcctgcaaaaaaagaactatgcaaatccactgttgattgccaaagggttccagcac

SEQ ID NO: 939120 - DNA, 120 bp, Artificial Sequence
  ENSG00000232299_1 (sequence is synthesized)
aataactttagggaagaagagaagatgatttaacgactgaggtttttccttttttttattggttggttggtttttttacatcagatgggtaatgtgcaaatgtggtaacaaggttggagg

SEQ ID NO: 939121 - DNA, 120 bp, Artificial Sequence
  ENSG00000232299_2 (sequence is synthesized)
tctcgcacatgagtataaatacccaatcatcacacataagttgcaaaaggatcaacaactgcattttgtaaagctgtgaggttttctgttattttaaatccccataataggtcagaaccc

SEQ ID NO: 939122 - DNA, 120 bp, Artificial Sequence
  ENSG00000232299_3 (sequence is synthesized)
tttgctaggcataatggaagagatgggtgtacattatgtacaatttctgtgttctgtggtagcctaaggaaagatgcccagatctggaaataaagcacagcaccataatgacagtgatca

SEQ ID NO: 939123 - DNA, 120 bp, Artificial Sequence
  ENSG00000232294_0 (sequence is synthesized)
gctaattattgtcagatggatcggcagccgaccaacgcttctgaaactattgtttttggcaaatgttcctcaacattttcctgggagctatggtgcattactcacgagtgacagaaccaa

SEQ ID NO: 939124 - DNA, 120 bp, Artificial Sequence
  ENSG00000232294_1 (sequence is synthesized)
cgagcttcatctcccaagaggctggtgcatctgtttaaaggagcaggcactaggcagagcagcccccaccccaccctccatggcagagtgcagtgggggaagaagttttcatagaaatgc

SEQ ID NO: 939125 - DNA, 120 bp, Artificial Sequence
  ENSG00000232294_2 (sequence is synthesized)
tttctataaagcattttcatagagaaagcaggttcatatagaaagcactggctgctggttggagtggagagattgaagaccctcatctaggatcaagcaacccccagaaaacaattttaa

SEQ ID NO: 939126 - DNA, 120 bp, Artificial Sequence
  ENSG00000232294_3 (sequence is synthesized)
tctcggctgaaaggaaatgtggatatgaaattaccagtgcagtgagtgtcatgaagaagcacaaaggtctaaacaacacttactgggagtctctaagctactcaagagatcaggaaggga

SEQ ID NO: 939127 - DNA, 120 bp, Artificial Sequence
  ENSG00000232294_4 (sequence is synthesized)
ctttcctgagaagctgagatctgcattacgatgtcaagaggcagtatgagacagtggctattaaggttctggggttacatcatctggagactgagaacttgggatgctccttgttcatcc

SEQ ID NO: 939128 - DNA, 120 bp, Artificial Sequence
  ENSG00000232294_5 (sequence is synthesized)
aagcatttgaacaaatccagtgtcctttttgagcaaaatatgagccccacctttagaatctgtgaatctccccttcagatgggaaagctgtttttgtggctaaaattagaaataacccaa

SEQ ID NO: 939129 - DNA, 120 bp, Artificial Sequence
  ENSG00000232294_6 (sequence is synthesized)
atgtctatgaaatgatgcatggatagataaaatgtgatatacccacacaatggaaaagtatttatcaataaaaaggactgaagtcctgatacatactccaacatgaataaatatccaaaa

SEQ ID NO: 939130 - DNA, 120 bp, Artificial Sequence
  ENSG00000232294_7 (sequence is synthesized)
atgatcttaagtaagcccattttgcttcaattttcttatctagaaaatggggataataacacccatgttatagagttattctgatgatttctaagagtctcagagacctaggatccacaa

SEQ ID NO: 939131 - DNA, 120 bp, Artificial Sequence
  ENSG00000232294_8 (sequence is synthesized)
aatcaaaacaacaaaaccaagcctttgtgcacatctgtggttgtgaccagttggagagacattaggagatgagatactatgttcactcctcacagctgtaccagggacctgagatattcc

SEQ ID NO: 939132 - DNA, 120 bp, Artificial Sequence
  ENSG00000232294_9 (sequence is synthesized)
gtcactattctatgagcctgggctggtgaatggttcctgctttcactattccagatgtccagctctgtaccttgctgctctccttaaagcctgcctccctctagggagctatggtgcatt

SEQ ID NO: 939133 - DNA, 120 bp, Artificial Sequence
  ENSG00000232294_10 (sequence is synthesized)
actcctggggtcaagaaatccacctgcttcggcctcccacagtgctgggattacagattgtgcttttggtgttacatctaagaaatctttgcttttgattattttaaaaattgattttct

SEQ ID NO: 939134 - DNA, 120 bp, Artificial Sequence
  ENSG00000232294_11 (sequence is synthesized)
catcaagtaaaagaaaatgtactttcaagttcctttaagtatatccacgttgcctaggcaaccaagttatttatcaataggtgatcatttgtaatgatttgttaataaaggaattagaaa

SEQ ID NO: 939135 - DNA, 120 bp, Artificial Sequence
  ENSG00000232294_12 (sequence is synthesized)
tcaagaaatccacctgcttcggcctcccacagtgctgggattacagatggggaaactgaggcacagagaggttagagatatgcctgaagccacacagcttgcaagtggtggatctgggat

SEQ ID NO: 939136 - DNA, 120 bp, Artificial Sequence
  ENSG00000232294_13 (sequence is synthesized)
ttgaacttgtcgatctggctgcagagctgagctcttggagactaggttttactgcctagtagcatgtaagcctggaactgccggcagtcattttgtaagtttgccgagtgaacctcaatg

SEQ ID NO: 939137 - DNA, 120 bp, Artificial Sequence
  ENSG00000232294_14 (sequence is synthesized)
agcatgaagcagagaggaaagcagtactaagagatgcaaaagagtctgtgttccagcaatgggatctgaagtcctggatcaaaccttacctggagacaagatttacccatcagacatgcc

SEQ ID NO: 939138 - DNA, 120 bp, Artificial Sequence
  ENSG00000232294_15 (sequence is synthesized)
agttataagacccaaatttaccctttttgggggattgagtttgaatgagtatttttgtttgtttgttttggcatcagaaagactcctgattaatacacagtgtgacgctgaccaagatgc

SEQ ID NO: 939139 - DNA, 120 bp, Artificial Sequence
  ENSG00000232294_16 (sequence is synthesized)
tcaccaatctcatctaagcctttgtttccatagaacaaagccctttaagaaaggaggggaaagtgtcatggagtcttactgtcctgagtgcaaatatggtctctgtattgtccttatctg

SEQ ID NO: 939140 - DNA, 120 bp, Artificial Sequence
  ENSG00000232294_17 (sequence is synthesized)
ttcattttctgcctctcagtactagaatgaaaactctggaagaagaaggaattttgtctgattttcttactgctgtatcctcagtattttgaactgtttctaactcagagtacaatctca

SEQ ID NO: 939141 - DNA, 120 bp, Artificial Sequence
  ENSG00000232294_18 (sequence is synthesized)
aaattttttttgattttcatatatctgtatatatatttgttaaatgagtgaagaaatccttatatgtctttatggataacaagctggcttgggcatggttttcagttatgggtccttcct

SEQ ID NO: 939142 - DNA, 120 bp, Artificial Sequence
  ENSG00000232294_19 (sequence is synthesized)
tttgtgcgggagtggttatggatggtatttgttcctctctgcttcataattctctcatccatttttgacttaatggacagaaacaatagatgaataaaatggaatcatctctgaacaaaa

SEQ ID NO: 939143 - DNA, 120 bp, Artificial Sequence
  ENSG00000232294_20 (sequence is synthesized)
cactattctatgagattttggagatcccaccagtggttttccggtgccagggtatgagaagatagtctccatgtccaaactcacaatttcagaacaaatttcatcaagataaaggcctgg

SEQ ID NO: 939144 - DNA, 120 bp, Artificial Sequence
  ENSG00000232294_21 (sequence is synthesized)
tttgaacaaatccagtgtccttcttgagcaaaatatgagccccacctttagaatttgtgaatctccctttcagatggaaaagcttttttgtgcattaaataaacttgatccttagatcca

SEQ ID NO: 939145 - DNA, 120 bp, Artificial Sequence
  ENSG00000232294_22 (sequence is synthesized)
ttctgtataattccatttatataaaatggcaaaaaaccaaattcataaaaacagaaaatagattagtgcctagatttgagggtgaaaaaattaactgcatgatctttttggagtgatgaa

SEQ ID NO: 939146 - DNA, 120 bp, Artificial Sequence
  ENSG00000232294_23 (sequence is synthesized)
tggagtgatgaaatattctataatggattattgtgatagttgcacaacttcttaaatttactaaatatcattgaaatgaataaatttttatgttgcgtacattatatcctaataaattta

SEQ ID NO: 939147 - DNA, 120 bp, Artificial Sequence
  ENSG00000232294_24 (sequence is synthesized)
tcagacaaaaggagtccaaaaccataagatcctctcagcatcctgaactaatgtccagctgttatctcggttacatgatctggagactgagaacttgggacactccttgttcatccaagc

SEQ ID NO: 939148 - DNA, 120 bp, Artificial Sequence
  ENSG00000232295_0 (sequence is synthesized)
gaggtgggcaagttagttgctccaaaaacaagataaaatgattgagttcttttctcaagcgggagtcggagtttatctgctctgagagccccagcagctactattaatgagtgtctggaa

SEQ ID NO: 939149 - DNA, 120 bp, Artificial Sequence
  ENSG00000232295_1 (sequence is synthesized)
tatgttcctggcatttcacctaccctctctccaatccttccaagaaactcacaaagcagggctttttcttgaacttctcttcctcacaacagttaaatcatccatttaaagatgtcaaac

SEQ ID NO: 939150 - DNA, 120 bp, Artificial Sequence
  ENSG00000232295_2 (sequence is synthesized)
tacaacctcacatagagttcctgaccagacaagacttgctggaaatttcccaggatcttccttccttaagcatccatcatgggaagccaccttgccctagggagagctcctgacctaggg

SEQ ID NO: 939151 - DNA, 120 bp, Artificial Sequence
  ENSG00000232295_3 (sequence is synthesized)
tcaggaatatattaaggaagacagcaattaatacattcaaaaataataataattacaaattatgtctctgtgttaggaaaacttggataagcaggtccatagaaattcctctgctagccc

SEQ ID NO: 939152 - DNA, 120 bp, Artificial Sequence
  ENSG00000232295_4 (sequence is synthesized)
tgtctcctggaatttctacataatggcatatcctcagtttgaatagctctctggttccagtttgaagctgaaaaggttaaattctacctgaaggatgaaaacaaccaacattctgtgcca

SEQ ID NO: 939153 - DNA, 120 bp, Artificial Sequence
  ENSG00000232295_5 (sequence is synthesized)
gaggtgggcaagttagttgctccaaaaacaagataaaatgattgagttcttttctcaagcgggagtcggagtttatctgctctgagatgcctcccacattgcctgtgactttacagaagc

SEQ ID NO: 939154 - DNA, 120 bp, Artificial Sequence
  ENSG00000232295_6 (sequence is synthesized)
ttggagtctaaattatgtggctgctattagtaacaactttgagaccgaaggctattgggctattggctccaccatgggcaccactagctttaaactcaaacagacagatgagaccacttg

SEQ ID NO: 939155 - DNA, 120 bp, Artificial Sequence
  ENSG00000232295_7 (sequence is synthesized)
aaccttggcagttaccagttcagaggagcagcctaacccagccactccacagctgcaatttgagagcatctagaggacaccacataaatcttttcacctggtccctgctaccacagatga

SEQ ID NO: 939156 - DNA, 120 bp, Artificial Sequence
  ENSG00000232295_8 (sequence is synthesized)
tgggcaggaaaaagagatgctccagatggttttcttacagagaaacttcatttcatgcttgcagttgtttattcccatgcatctaactctcggccaggcactgaaacagagccccagcag

SEQ ID NO: 939157 - DNA, 120 bp, Artificial Sequence
  ENSG00000232295_9 (sequence is synthesized)
ctggtgactatggaaaatgaaagcaagttcacgctgacaatgcccgtaaagagctttgtgaagccatgacagtgctcttcaattttaacatgaagaagagggcatgtgagttagcaagac

SEQ ID NO: 939158 - DNA, 120 bp, Artificial Sequence
  ENSG00000232295_10 (sequence is synthesized)
gcatttcacctaccctctctccaatccttccaagaaactcacaaagcaggtattattaccaacaagagaccagacaccctgagaatttacactccttccccaataccacacagtcaatta

SEQ ID NO: 939159 - DNA, 120 bp, Artificial Sequence
  ENSG00000232295_11 (sequence is synthesized)
tctggcttcaaagcctgctctctccccattcaacaaaatgtctctctgcccttacttttttttcccttcagggctttttcttgaacttctcttcctcacaacagttaaatcatccattta

SEQ ID NO: 939160 - DNA, 120 bp, Artificial Sequence
  ENSG00000232295_12 (sequence is synthesized)
atcagtctactggagggcttcaacgcagagtaggtggaattcatggttcaaatcagagtattaatgggatctgtttgcacaccaatacctgatctccttggcacaaatacagagctgatt

SEQ ID NO: 939161 - DNA, 120 bp, Artificial Sequence
  ENSG00000232295_13 (sequence is synthesized)
gaggtgggcaagttagttgctccaaaaacaagataaaatgattgagttcttttctcaagcgggagtcggagtttatctgctctgagaaatattgatgttaaagaggaaactaactttctg

SEQ ID NO: 939162 - DNA, 120 bp, Artificial Sequence
  ENSG00000232295_14 (sequence is synthesized)
agacagcaattaatacattcaaaaataataataattacaaattgggaagccagttgccatgtcatgaggacactcaagcaggcctgtggagaggctcacaaggagagggacagagctccc

SEQ ID NO: 939163 - DNA, 120 bp, Artificial Sequence
  ENSG00000232295_15 (sequence is synthesized)
ctgccaacagacagcactaacttgctgacagtgagagtaagccactttggaagaggatcctccctgcagccccagtcaagccttcagattcctgcagttctaactgacatctgcctgcaa

SEQ ID NO: 939164 - DNA, 120 bp, Artificial Sequence
  ENSG00000232295_16 (sequence is synthesized)
ccacatcagtggcccctcccttccatcacttaagcagtgtgagctatccagcctagctcttcctagattcctgaccaacagaaaaagtgagagaaaataaatgattattgttttaaccca

SEQ ID NO: 939165 - DNA, 120 bp, Artificial Sequence
  ENSG00000232295_17 (sequence is synthesized)
agctacaagcaccacatgctggacccctgaatatggagggccaactacactagaaacacacacgctagctgagaaagatggtggcttaaggggaaaaagaaagaaaggggagtagaaata

SEQ ID NO: 939166 - DNA, 120 bp, Artificial Sequence
  ENSG00000232295_18 (sequence is synthesized)
gaagaaaagaaatgagaaggagaaaacaaaggagaaggaaaacgagaaaagaaaaatgtaggaaaaagttgtaagtgcttactacatgctgtgcccatattacacagagcgcacattttc

SEQ ID NO: 939167 - DNA, 120 bp, Artificial Sequence
  ENSG00000232295_19 (sequence is synthesized)
cagcttagtcttcacagaatgctgccagtgttatgatcctcattttaacaatgaagaaactgggagatttgttcaaagttacacactagtaaaaaagtaaatcttgagtgcaacataggt

SEQ ID NO: 939168 - DNA, 120 bp, Artificial Sequence
  ENSG00000232295_20 (sequence is synthesized)
cgtgttctaagaactatttactgagctctacggagacacagctacaagcaccacgtaagagtgtccatgtttttcttgcatgtaaaacagaaattgaaatgcaaaagcagattgccaaat

SEQ ID NO: 939169 - DNA, 120 bp, Artificial Sequence
  ENSG00000232295_21 (sequence is synthesized)
agcaaaaactggcatattatgggaactaaaaatgagaaagtgttccatactatacttattggaacacaatgtacaacaaaagtgctactgagattcatataaaaaattagagttaagcaa

SEQ ID NO: 939170 - DNA, 120 bp, Artificial Sequence
  ENSG00000232295_22 (sequence is synthesized)
ctggcatgtttcatgtaaacttcaaagcagtaaaatcatatttctagaggcatactataagtgtgattcttttcaagaaatccactgcagaaaatgtggatcaatagaggcaacagaaga

SEQ ID NO: 939171 - DNA, 120 bp, Artificial Sequence
  ENSG00000232295_23 (sequence is synthesized)
tgatatgaagtaggacatattacaaattccctaggggattaaaatgaatagaacttttcttaaaagcctaacaaaaaagttaattcctttctaaatgaaataaagtagacatgtttcatc

SEQ ID NO: 939172 - DNA, 120 bp, Artificial Sequence
  ENSG00000232295_24 (sequence is synthesized)
tgggcaagttagttgctccaaaaacaagataaaatgattgagttcttttctcaagcgggagtcggagtttatctgctctgagggtcatccaactaaaaaatatatatatcttgaggattt

SEQ ID NO: 939173 - DNA, 120 bp, Artificial Sequence
  ENSG00000232295_25 (sequence is synthesized)
gcattgatattcaatatcgacatatccaaggcctccctccagaccactagattctagtaatttgaaccggcttctcctctccctcaaagcagctctgcttagtacagtgcttggcacaaa

SEQ ID NO: 939174 - DNA, 120 bp, Artificial Sequence
  ENSG00000232295_26 (sequence is synthesized)
ttgaatcataatgttggctttattggcatgttgaaaccatttacctctgtaattttccatttgttttcctttccaactaccactcctcctgcctgataaataaataccattgcaagatta

SEQ ID NO: 939175 - DNA, 120 bp, Artificial Sequence
  ENSG00000232295_27 (sequence is synthesized)
ggaaagaggcaaggaggtgaggacagcaggactgatagataagctggggaggccagagctccacaaggacatccatttcacttatcagaatctaaaaataaacacgttgagatactagaa

SEQ ID NO: 939176 - DNA, 120 bp, Artificial Sequence
  ENSG00000232295_28 (sequence is synthesized)
aacctccgtgttctaagatgctggacccctgaatatggagggccaactacactagaaacacacacgctagctgagaaagatggtggcttaaggccaagggcctctgctagcacccatgag

SEQ ID NO: 939177 - DNA, 120 bp, Artificial Sequence
  ENSG00000232295_29 (sequence is synthesized)
cagcctaccaaagtgctgggattacagctcttttcttggaagagaagaaaccgtttcaaaaaattattaagggagcaacaaagggctgttttgtacattcattacattcacgagccccag

SEQ ID NO: 939178 - DNA, 120 bp, Artificial Sequence
  ENSG00000232295_30 (sequence is synthesized)
aatccttccaagaaactcacaaagcagggctttttcttgaacttctcttcctcacaacagttaaatcatccatttaaagatgtcaaacaacctccgtgttctaagatgtctctgtgttag

SEQ ID NO: 939179 - DNA, 120 bp, Artificial Sequence
  ENSG00000232295_31 (sequence is synthesized)
tacctgaaggatgaaaacaaccaacattctgtgccaagacagtcaggagggcaaccatgtttcctggtggagcctctggaaccactcaagccaagatgaccgggggtttggctgggagga

SEQ ID NO: 939180 - DNA, 120 bp, Artificial Sequence
  ENSG00000232295_32 (sequence is synthesized)
gatggggaaactacagaccctacagatggtttcctgtaccatgaggttaagcctgggggcaggagaggctgtaccttagttccttcatctgtaaaataaagtaacatagtacctacctca

SEQ ID NO: 939181 - DNA, 120 bp, Artificial Sequence
  ENSG00000232295_33 (sequence is synthesized)
gcaattaatacattcaaaaataataataattacaaattgaggcagcctgcctagtgattaagaggatggactctaaagccagacagcctggatttgattctcagctctgctgtggattta

SEQ ID NO: 939182 - DNA, 120 bp, Artificial Sequence
  ENSG00000232295_34 (sequence is synthesized)
aatgattaagaaaatggcaggagcggcagaaaggtctctctgacctggaaggaattttctgaccttctgaagcaggtcctaaaactctgatgtgagaggtaccctccctatacctgggag

SEQ ID NO: 939183 - DNA, 120 bp, Artificial Sequence
  ENSG00000232295_35 (sequence is synthesized)
gaaggaacatcctgtcttcaaagatgaacacagtggcatctgaacaaacaggccttgccaagtttccaccagtttactacacttacctcatactccaccttatagtatttctgcacaact

SEQ ID NO: 939184 - DNA, 120 bp, Artificial Sequence
  ENSG00000232295_36 (sequence is synthesized)
gtccacacttcttcaaacctgctataaaaaccactcccatttcacatttgaacgctttcttcaggtcttcatttcctaatgaaggctcctgtgttacataaaacttatatgaaataaata

SEQ ID NO: 939185 - DNA, 120 bp, Artificial Sequence
  ENSG00000232295_37 (sequence is synthesized)
atgtacaacctcacatagagttcctgaccagacaagacttgctggaaatttcccaggatcttccttccttaagaggaatcaaaagaaggaggaagaatagaatgatttggaggaaaagaa

SEQ ID NO: 939186 - DNA, 120 bp, Artificial Sequence
  ENSG00000232295_38 (sequence is synthesized)
ggagaaagtagaggagttgaaaaaaaggaagaaaaagaaaaatgcagaatcctttgtcaatccaacagaacacagcaaaaaagcaaagaaagtgaaagcatagatttgcttgtaagtaga

SEQ ID NO: 939187 - DNA, 120 bp, Artificial Sequence
  ENSG00000232295_39 (sequence is synthesized)
catgagcatcttctctattgatgaaaatctttcggtgttgggatctgtttataactgcatcatcacaaacatgatctaatcaagagtcactccttgcagtaatgttcacgtttccttcgt

SEQ ID NO: 939188 - DNA, 120 bp, Artificial Sequence
  ENSG00000232295_40 (sequence is synthesized)
cagtaatgttcacgtttccttcgtctctgaaaagatatccctctagaaaccctgtttctactacaaaaattagctggacgtggtggcgggcgtctgtaatcccagctactctggaggccg

SEQ ID NO: 939189 - DNA, 120 bp, Artificial Sequence
  ENSG00000232295_41 (sequence is synthesized)
gaaccttctcttcagtctccacaatccaggactgcacaaggagggtgactcgtgcattctttactccatatatgtcagctccacagtgtgcaggatgttcatgtacaacctcacactact

SEQ ID NO: 939190 - DNA, 120 bp, Artificial Sequence
  ENSG00000232290_0 (sequence is synthesized)
atagacatgttcccctttgagcaacacaattttctaacagccaataggaaataacagttcgaaaatttatcctaaaatttactaaacttttaaaggctatgtggaattaatgcattatca

SEQ ID NO: 939191 - DNA, 120 bp, Artificial Sequence
  ENSG00000232290_1 (sequence is synthesized)
agctaccctttcctattatacagttcttggaatcaagagttacttacagtaactgataggatgtgaaaataagactatagaatcagcacaaaggccaggtgcggtggctctcgcctgtaa

SEQ ID NO: 939192 - DNA, 120 bp, Artificial Sequence
  ENSG00000232290_2 (sequence is synthesized)
ggccgaggcaggcatgacccaccaggctcggctgaattacggttttaatttttatctttgtaatttatttaaacattcctttattcctgcttgcttttctatgtatttttacactgttga

SEQ ID NO: 939193 - DNA, 120 bp, Artificial Sequence
  ENSG00000275620_0 (sequence is synthesized)
ccggggccggctgcgggaaacgctcgcacagacagagacaggcgcgcacccgggggcgcacccggggccacacacgcctccccaggcgatggggtccaggcggccccgcccgaaggcttc

SEQ ID NO: 939194 - DNA, 80 bp, Artificial Sequence
  ENSG00000275620_1 (sequence is synthesized)
cccgaaggcttccgtccggccagcccatccagccgctgccccgcacctgtccccgccgctccggacccgcggccgccccc

SEQ ID NO: 939195 - DNA, 120 bp, Artificial Sequence
  ENSG00000275620_2 (sequence is synthesized)
ccgcaggcgacgccaccttcggccgtagcagcccggggtccgaggcatcccccctcggagctggcgcgggacccagcgaacgggccccggggcggagggacgcttcgggaccccacagcc

SEQ ID NO: 939196 - DNA, 120 bp, Artificial Sequence
  ENSG00000275620_3 (sequence is synthesized)
agccgccgtgggtcgggcaccgggggctccaggaggctcgcggaggggtcgccactcaccagctgaaaagcgcagaggacgacgagcgcgcagcggccggagcaggagcccatggtgccc

SEQ ID NO: 939197 - DNA, 80 bp, Artificial Sequence
  ENSG00000275620_4 (sequence is synthesized)
cccgctccgcccgctccccacgcgccgcagcctggaccccgccccctccgcatcccgttcccccctcctccccgcaaccc

SEQ ID NO: 939198 - DNA, 120 bp, Artificial Sequence
  ENSG00000275620_5 (sequence is synthesized)
acccccggcccagccccagccccgggtaacagctgcgctgcgtctcccctcccacccccgcctgcggcccctgggggcttcgcgccggccggagagggggaccgttcttaaaggggcgat

SEQ ID NO: 939199 - DNA, 120 bp, Artificial Sequence
  ENSG00000275620_6 (sequence is synthesized)
ggcgcggcctctcgggtagcgaggggcggcgccgcggccccaggacagacctgcagctgaggggagcccgccctggacgcggcagggatgaccggcgtccgccccctcctgcaggatgac

SEQ ID NO: 939200 - DNA, 120 bp, Artificial Sequence
  ENSG00000275620_7 (sequence is synthesized)
ctgcccagcacctgctcccgccgtgcgccctccggcgtgagatccccatcaaccttccccgtgtggggtctgagcgacccgcatccgcgaggcgttttctctgagagtctcagagattcc

SEQ ID NO: 939201 - DNA, 120 bp, Artificial Sequence
  ENSG00000275620_8 (sequence is synthesized)
ttggcttggagaagtcctggacccgggtccagagctcagaggtcccctccacgggcgggcgggccgaggactcaggaggagggagtgagccgggctcgcccacctcccacagggagctcc

SEQ ID NO: 939202 - DNA, 120 bp, Artificial Sequence
  ENSG00000275620_9 (sequence is synthesized)
tctgctggaaggctgagacctgaaggccaggtctgctccaactgcctggaccggcctcctgcctgcgcgggaggggcctagggagcctcgggttgggacagcctgaggccttgtgcacgg

SEQ ID NO: 939203 - DNA, 120 bp, Artificial Sequence
  ENSG00000275620_10 (sequence is synthesized)
tggaggcaggacccagctgcccagggcaggtcctggggtctggatggggctgaaccccgtaaagcctgcgcttccggaagaagcttgcgctggaggcagggaagggtcccagccaggccc

SEQ ID NO: 939204 - DNA, 120 bp, Artificial Sequence
  ENSG00000275620_11 (sequence is synthesized)
gagaggagcaggacgtggatacagtgagccagagtgtcagccggtcggaaagcccatgggggcagaacagcgggagatcagggcaggtggccgggccagggctgccacttggtctttact

SEQ ID NO: 939205 - DNA, 120 bp, Artificial Sequence
  ENSG00000275620_12 (sequence is synthesized)
cagtggcagggcaggctccctgactgccacccaccgcctgaggagcctgagatgggtttcccatggcaacctgaattcctgccccactcgagattttatgaattactgaggattcttgcc

SEQ ID NO: 939206 - DNA, 120 bp, Artificial Sequence
  ENSG00000275620_13 (sequence is synthesized)
ttcctaattttggttgtgtgtcccacagtcccggggatcaggaggggttaacagaagaccaagggtcaggttttctgcactgcggggagccaccccagatctgtagtccaggctcatggg

SEQ ID NO: 939207 - DNA, 120 bp, Artificial Sequence
  ENSG00000275620_14 (sequence is synthesized)
cgggtgagggggtagcttccaagccccaaaggttagagagcaaaggtgtggccagttgtggagggagggggagcgtcaggttgtttgcagtgctggggagataagaatattcaggaatca

SEQ ID NO: 939208 - DNA, 120 bp, Artificial Sequence
  ENSG00000275620_15 (sequence is synthesized)
gatggtggtgatggttgcacagctctgtgaatatactgcagcccactgagcactacactgtaaaggggtgactattatggtgtgaggattatatcccgatttttaaaagatgtgaaaaaa

SEQ ID NO: 939209 - DNA, 120 bp, Artificial Sequence
  ENSG00000275620_16 (sequence is synthesized)
ttaatgtttatttatacgatatataagacattgatttttaaatacagcggtaccatccccgtcccccataaccctggttcctccaggcacttggagccattggtggaaggacgtggactc

SEQ ID NO: 939210 - DNA, 120 bp, Artificial Sequence
  ENSG00000275620_17 (sequence is synthesized)
ctagaaggtgattcgcaaaggtgccacgtaagcagaggagccgggtaagcagaggcccagtgccacgtaagcagaggaaggcccggagccggctgctgaggtcctgagggagagggaggg

SEQ ID NO: 939211 - DNA, 120 bp, Artificial Sequence
  ENSG00000275620_18 (sequence is synthesized)
gcacctgctcagccttgcctgtgtgtgtggatccttctctctcaggggaagctgcctggacatgcgtgcgccttgcagttctgtcctgccaggctgcctgctcttcctcttgaaagcaaa

SEQ ID NO: 939212 - DNA, 120 bp, Artificial Sequence
  ENSG00000275620_19 (sequence is synthesized)
agacttcacttgctgaggatgcaacgatgctctagtgtcccttgcaggagccagtgtcagagccaggagccgtcgtgggcatcccctgctccaaagttacgagttctggtgaaggggtca

SEQ ID NO: 939213 - DNA, 120 bp, Artificial Sequence
  ENSG00000275620_20 (sequence is synthesized)
ggacagcccctttgagagttcagcagagcaggtctgcacaggtcccacgccgtgcacagcccacactccacctgccctggtgcacactgacggcagcagccagccgcggggaccccaggc

SEQ ID NO: 939214 - DNA, 120 bp, Artificial Sequence
  ENSG00000275620_21 (sequence is synthesized)
gcagtgttgcctcgtgaacgttagagcagcctccagaggcgggttcggtctgcacacctggttcgcgggtgacacagttgtgacttggcccaggtcagttgttggggcctggccagctgt

SEQ ID NO: 939215 - DNA, 120 bp, Artificial Sequence
  ENSG00000275620_22 (sequence is synthesized)
gggtggtgaggttttctcggacgcttcatctgctctcgttcttgttcgaattccttctgcctaagaatgacagctttaaaagtgaaatggcagcacgtctccatcattacacagaatccc

SEQ ID NO: 939216 - DNA, 120 bp, Artificial Sequence
  ENSG00000275620_23 (sequence is synthesized)
atgtgggaagaccctagtcggaggcccccacccttgcccggaactggactttggggcagcagcaaactgcagtgagtgtgagtcacacctgaggacaggtgggctgtcttcaggctccca

SEQ ID NO: 939217 - DNA, 120 bp, Artificial Sequence
  ENSG00000275620_24 (sequence is synthesized)
acaggtctgtcgcttaaggggctggggaatgggggctggaatgccacggcctgcccacctgggggactctgggcagagctggagcagccaggcaggaaaatatcccccagtttccagaga

SEQ ID NO: 939218 - DNA, 120 bp, Artificial Sequence
  ENSG00000275620_25 (sequence is synthesized)
gtaaaagctgatggtcctgctgaggtgtgaaggacagtgacggacagtgatggaaggtgatggacagaggaggacagtgatggacagaggagggcagtgatggacagtgacgggcagtga

SEQ ID NO: 939219 - DNA, 120 bp, Artificial Sequence
  ENSG00000275620_26 (sequence is synthesized)
tagacagcaacagagagtggaggacagtgatgaacagcaacagacagtggagggcagtgatggacagtggaggacagtggaggatagcagagggcagtgatggacagtaatggacagcaa

SEQ ID NO: 939220 - DNA, 120 bp, Artificial Sequence
  ENSG00000275620_27 (sequence is synthesized)
aggacagtgagggacagcagaggacagtgatggacagcggaggacagtgatgggcagcggaggacagtgatggacagtggaggacagtgatggagagcagaggacagtgatggacaatgg

SEQ ID NO: 939221 - DNA, 120 bp, Artificial Sequence
  ENSG00000275620_28 (sequence is synthesized)
aggacagtggaggacagtgatggacagtggaggacagtgatggacagcggaggacagtgatggcgagcggaggacagtgatggagagcggaggacagtgatggacagcggaggacagtga

SEQ ID NO: 939222 - DNA, 120 bp, Artificial Sequence
  ENSG00000275620_29 (sequence is synthesized)
tggcgagcggaggacagtgatggacagcggaggacagtgatggacagcggaggacagtgatggacagcggaggacagtgatggagaacggaggacagtgatggacagcggaggacagtga

SEQ ID NO: 939223 - DNA, 120 bp, Artificial Sequence
  ENSG00000275620_30 (sequence is synthesized)
tggacagaggaggacagtgatggagagtggaggacagtgatggacagcggaggacagtgatggacagtggaggacagtgatggagaacggaggacagcgatggacagcggaggacagcga

SEQ ID NO: 939224 - DNA, 120 bp, Artificial Sequence
  ENSG00000275620_31 (sequence is synthesized)
gatggacagcggaggacagtgatggacagtaatggacagtgatggacagcggaggacagtgatggacagcggaggacagcgatggacagtggaggacagtgatggacagtggaggacagt

SEQ ID NO: 939225 - DNA, 120 bp, Artificial Sequence
  ENSG00000275620_32 (sequence is synthesized)
gatggacagaggaggacagtgaaagacagagaaggacagcaatggaaggacagccaccccagtcagcacaaacgcaggccgagtggggcccatgcattcctgggaggactggcaagctgg

SEQ ID NO: 939226 - DNA, 120 bp, Artificial Sequence
  ENSG00000275620_33 (sequence is synthesized)
gaaaggcctccagggcagggaaactcaggagagtgacagcttgttcaggccaggaccttgtgcatcttctccttttttctttcttagtaaacccagtgtattcatttttagcggctgcca

SEQ ID NO: 939227 - DNA, 120 bp, Artificial Sequence
  ENSG00000275620_34 (sequence is synthesized)
taacaaattcccataaactagcggcttgaagccacggaagtttattacgtcacagttgtggaggctagacatctaacatccaggtatgggcagggttgcactgccttcgaagctctgggg

SEQ ID NO: 939228 - DNA, 120 bp, Artificial Sequence
  ENSG00000275620_35 (sequence is synthesized)
agggtccttcctgcccctcccagctcctgtggctcccagcgtccttagcctgtgggcgttatcgctctggtctttgcctccacctttgcgtgacctcctcctctcctgtgtgtcacttgc

SEQ ID NO: 939229 - DNA, 120 bp, Artificial Sequence
  ENSG00000275620_36 (sequence is synthesized)
tatgatgcttgtgatgccatttagggcccacctatgtaatccagcatgctctcatgtcaagatccctaatcacatctgcaaagaaccttgccccaaactcctggcttcaagcaattctcc

SEQ ID NO: 939230 - DNA, 120 bp, Artificial Sequence
  ENSG00000275620_37 (sequence is synthesized)
tgccttggcctcccaacatgctgggtttgcaggtgtgagccactgtgccaggcctagatttgggggccaccattcagtcgctgctctcccacacctgcagcagccccagcccgcccgcag

SEQ ID NO: 939231 - DNA, 120 bp, Artificial Sequence
  ENSG00000275620_38 (sequence is synthesized)
ggcagaccttccttgtggcagagacaacaggaaaaggaaaggaagaggaacccaggcctgggttcccggcagagctgtccgcagagcctgtgcggggctgcaaaggcccctctgttgtca

SEQ ID NO: 939232 - DNA, 120 bp, Artificial Sequence
  ENSG00000275620_39 (sequence is synthesized)
caacacccctgtccccgtttcagatgaaaccgggagaactttcaactgcaacaaacactcctggaaaaggagaggccaatccccatggctccacagagagcacagccagaccccttcatc

SEQ ID NO: 939233 - DNA, 120 bp, Artificial Sequence
  ENSG00000275620_40 (sequence is synthesized)
caggcccacaggcaatgttgtcgactctgttcttcctttgaaaaaaaagggtgctggttggtttccagtttactgcagacacacagagaggcccctctctggctcagagcctggcccggg

SEQ ID NO: 939234 - DNA, 120 bp, Artificial Sequence
  ENSG00000275620_41 (sequence is synthesized)
tctctccagtcccagcttctccctcccgaaaggaacgtcctgcccaacaatgcaacacgtgtgtgcactcccagtgtgggaatcaggctgagctggacttcaggggcagcccaggatgct

SEQ ID NO: 939235 - DNA, 120 bp, Artificial Sequence
  ENSG00000275620_42 (sequence is synthesized)
tgcctcgggtggggcgttttcccagaggtttcttgggagctgcctgggagttgccgcagcttcttcccagctggcttcagcccaggcttcctgggtgagattcttgttccctggcccctc

SEQ ID NO: 939236 - DNA, 120 bp, Artificial Sequence
  ENSG00000275620_43 (sequence is synthesized)
acggtacgcgtggtcctgttccccgcaatcccccacccccttgaactccgttcccacactcaggacccacccagatgccagctccccgcagagcagtgcagccccccacttccagccctg

SEQ ID NO: 939237 - DNA, 120 bp, Artificial Sequence
  ENSG00000275620_44 (sequence is synthesized)
acggcacacaccctgccccccaccaccattttggaattgttcttcgccagaaataccgtttcccaccctgtcttcttattctcggaggcagaggcacttcagcttcctgggccgtctgtc

SEQ ID NO: 939238 - DNA, 120 bp, Artificial Sequence
  ENSG00000275620_45 (sequence is synthesized)
actgagtcaccctggtttccattggcagtgccgcctctccctcactcggatgcttctgtgcagccacacgggctgtgtgtgcaacctcaggggacgcatcaaccacgtcctcgggctggc

SEQ ID NO: 939239 - DNA, 120 bp, Artificial Sequence
  ENSG00000275620_46 (sequence is synthesized)
cgtagagacatggcctccgcctgagtgtggccgtcagactctccctggtactataagccctcggctgagggggcagaggggcagctaggatcatggccgcagctcccagaggggagcccc

SEQ ID NO: 939240 - DNA, 120 bp, Artificial Sequence
  ENSG00000275620_47 (sequence is synthesized)
catcctccaggccgtcttaccgagcctgctccccagcctgcgcctttcctgacttccctccaggctcctgttgctggcgaccacagaaccagcctcagggctttcctgtccttcctgtca

SEQ ID NO: 939241 - DNA, 120 bp, Artificial Sequence
  ENSG00000275620_48 (sequence is synthesized)
ggggtcctttcccagtgggagctctgggcgggtgggcctgtcccaggagagtcacgtagcttgtttaaggagaagatccccatggctcttgtgtgcacatgtggggcctctctccccagg

SEQ ID NO: 939242 - DNA, 120 bp, Artificial Sequence
  ENSG00000275620_49 (sequence is synthesized)
ggctgctgtgagcctgggaagtcccaggtggtgtctcatgccccagagagtagccccctgtgcacctcgcacacgccctcctgcgggtctgctgactttctcctctgcctcagccaagtc

SEQ ID NO: 939243 - DNA, 120 bp, Artificial Sequence
  ENSG00000275620_50 (sequence is synthesized)
tcccacgcggagcaggtgggaactgaatgaaggcctcacaggattctgagtccccggtctgacacccacctggctcagcacctgcctcctcagcttccagttgcacgggtggccgcaggc

SEQ ID NO: 939244 - DNA, 120 bp, Artificial Sequence
  ENSG00000275620_51 (sequence is synthesized)
gtcagggtgtgacggcgagcgtggccagtccggtcagaggtctctgcatcctccacacctctggccaggtgagacccagcctgtgtctctcccagctctactgacggacggcaggaagct

SEQ ID NO: 939245 - DNA, 120 bp, Artificial Sequence
  ENSG00000275620_52 (sequence is synthesized)
gagaccccgagcccgtgtgtcctcggttcttggtgctttgcaatgcccctggccctggctgcagccgccccctggctgggccccgagcctgtctgccctgcaacactcacccttcatgaa

SEQ ID NO: 939246 - DNA, 120 bp, Artificial Sequence
  ENSG00000275620_53 (sequence is synthesized)
gagggagcctcagccgagaggagagcaaataagtgtaaggggagagggtgcttcctgagacacgcggtgggcccagggctcctgccttggccattccgtccatctgtgggagggccttgg

SEQ ID NO: 939247 - DNA, 120 bp, Artificial Sequence
  ENSG00000275620_54 (sequence is synthesized)
cctctctgcttttggagcagggcgctggggctaggggattgcagccacagccactctactgcactggttgggagctcggatcacctgggtgcagaggaagctttgacggcaagggttggt

SEQ ID NO: 939248 - DNA, 120 bp, Artificial Sequence
  ENSG00000275620_55 (sequence is synthesized)
gtggctcatctcgcccaccccacagccatcgccgccccgcagacacctctggatcccggcctgccgtccctcctcccgagcctacattaggctccatccttccccaggccccatgccacc

SEQ ID NO: 939249 - DNA, 120 bp, Artificial Sequence
  ENSG00000275620_56 (sequence is synthesized)
agcaagaacagcccagccaatgcagactgcacccctcggcctcggccgggaccgagcacactgccctgtgtgctctccctggcccctgaggcaggtggcctgacccctgtcttcagaggg

SEQ ID NO: 939250 - DNA, 120 bp, Artificial Sequence
  ENSG00000275620_57 (sequence is synthesized)
gaaagctgagtctcgggaaggccacacagccgaggagtgggggcagaaagaacccagctctgcgtcaggctgtgtcaagccgacatttagtgcctagcagcagccacggcctctgcaggg

SEQ ID NO: 939251 - DNA, 120 bp, Artificial Sequence
  ENSG00000275620_58 (sequence is synthesized)
cttcctggagcaggtgtgggctcttccagcacagagcatgggctgcaccagcttcggggtgcaccgcgtacaggttagggctgtggctgtggctgctggctgacaccaggagtaaacgtg

SEQ ID NO: 939252 - DNA, 120 bp, Artificial Sequence
  ENSG00000275620_59 (sequence is synthesized)
gacaccagaccagcgcagcctagacccagctgggtggcaggtgctgccagtgcgtctcgagggggcagcagggtcagctgcagatgaggctgccccaggactggctgccagccctcaaag

SEQ ID NO: 939253 - DNA, 120 bp, Artificial Sequence
  ENSG00000275620_60 (sequence is synthesized)
agccccctgggtccccccggcacaactctctgcatgaagcccccagcaggagaagggctcactgccctgagcccgacacagtacgagacggaggcctcactgagtccaggccccgcactg

SEQ ID NO: 939254 - DNA, 120 bp, Artificial Sequence
  ENSG00000275620_61 (sequence is synthesized)
gccctcccctggatcctgagtccaggccccaagccagcccctcccctggatctccccagaccctctctgtgggaacccaggggctggagccgctcgactacatcttggtagctctcattt

SEQ ID NO: 939255 - DNA, 120 bp, Artificial Sequence
  ENSG00000275620_62 (sequence is synthesized)
gggacctcatctttaatctcagcaactcagggatcaaagagaaaaggccgaggcaggcgaggccagggtttcttgctcaagcattcggatcattaaacaaacgaaaaaaatcaaagagaa

SEQ ID NO: 939256 - DNA, 120 bp, Artificial Sequence
  ENSG00000231927_0 (sequence is synthesized)
gagacggagatgtagaccctgcaggacccggcagtcctcggcgtggggctgggacggggcgaacagtggccccatagcccacgtccaccggagccacaggatgggagcttatttgcaaac

SEQ ID NO: 939257 - DNA, 120 bp, Artificial Sequence
  ENSG00000231927_1 (sequence is synthesized)
gatgtcctcacgaggcacagagacacagagagaagacggccacatggagtcagaggcagaggctggagggatgtggccacgagccgaggacccctggagtccccaggagctggtcgaggt

SEQ ID NO: 939258 - DNA, 120 bp, Artificial Sequence
  ENSG00000287368_0 (sequence is synthesized)
gccgccgccgcccacgcctcaactcggcagctcagccagcgctgcatgctgtccgccctcagcccagcaagccggccctcgagctccgctgggcagcgcagggccggcagtatagagtcc

SEQ ID NO: 939259 - DNA, 120 bp, Artificial Sequence
  ENSG00000287368_1 (sequence is synthesized)
gccggccccggacggccccgggttaatccagtgcagaaacagcttcatcttgttatccaagccaacttctggagcttctggaaggatgatgctcttccaagctgagaaatgatcacagac

SEQ ID NO: 939260 - DNA, 120 bp, Artificial Sequence
  ENSG00000287368_2 (sequence is synthesized)
cagactagcagctgggagactgcaaagaagaagagattaccttttcatgagaaacagcagcttccacaacttctcggcttcttcctgtgaagttctcctagctgaagaaacagaagatag

SEQ ID NO: 939261 - DNA, 120 bp, Artificial Sequence
  ENSG00000287368_3 (sequence is synthesized)
tgagtgttatgtggaactggagaggattcagggacatcctataagaagctgaaggccttttaatgagaagatactgaaaaccccagagtcagaacactaagtcacatctgtgtataactt

SEQ ID NO: 939262 - DNA, 120 bp, Artificial Sequence
  ENSG00000287368_4 (sequence is synthesized)
ctgggagtgaggaaggatcatcacatgcccattttatggagaacaagactgagagttgaagagacttccacaggtttgtaaaactagtaaatgacagagttgaggacttctgccctaatt

SEQ ID NO: 939263 - DNA, 120 bp, Artificial Sequence
  ENSG00000287368_5 (sequence is synthesized)
cctcattctttattctcaggaggataagatagagaattttttaatgtgcctaggctctgattttccacccaaggaagtcttccatgagaaattgtccctggggggtactagagtctgcag

SEQ ID NO: 939264 - DNA, 120 bp, Artificial Sequence
  ENSG00000287368_6 (sequence is synthesized)
tggttagagcacctgctgttagcagcaggggtcatagagggtcaggatccgtgggaacctcactcacagcagaagtgaattagaggagagactgggactttacctcttgatgttctatct

SEQ ID NO: 939265 - DNA, 120 bp, Artificial Sequence
  ENSG00000287368_7 (sequence is synthesized)
ccagacttttgttggactcttcggtgacacttaaagacaaaaacattagaatgcaaagctgctacaccattttttcccatatctaaaatgaaacaaaactcataaacatttcctggtctt

SEQ ID NO: 939266 - DNA, 120 bp, Artificial Sequence
  ENSG00000287369_0 (sequence is synthesized)
gggcacccggcgtgaccggcccatgggcgctcggtctcacgcccgcttcgcagagctcaccccgccagctcctgctcggtccccagtcccctgccccgagccctcagggatcgcaccgca

SEQ ID NO: 939267 - DNA, 120 bp, Artificial Sequence
  ENSG00000287369_1 (sequence is synthesized)
gtgcgagcggctcttccaccctctggtttctccccgtttccggtcaatatatttaaacttcttaacaaccacggcttcgagacgatccagggtttcatctattaaatcctccgtgggcct

SEQ ID NO: 939268 - DNA, 120 bp, Artificial Sequence
  ENSG00000287369_2 (sequence is synthesized)
gagacacctgagtgctcattactctgtggtttgggaagctctcttaagaacaagctgttaaaaacccccacttgtggactgtgtccccgctggccacaggcctgctgtggtcttgggtgt

SEQ ID NO: 939269 - DNA, 120 bp, Artificial Sequence
  ENSG00000287369_3 (sequence is synthesized)
acaaaccgttgccaaccacttccctttctggaacctcttaactgcctgcacctccctccccgctttgtctcccagtggcattcaacaagactctgtgctttttttgtgctgagccgtttt

SEQ ID NO: 939270 - DNA, 120 bp, Artificial Sequence
  ENSG00000287369_4 (sequence is synthesized)
cagtgagtactggaatccgtgtgagagctgtgcccttgttttgagttcttgctgaactgctcgccctccagcaagcctctcgggagaacagagcgcagctgagaggagcaggggtcccag

SEQ ID NO: 939271 - DNA, 120 bp, Artificial Sequence
  ENSG00000287369_5 (sequence is synthesized)
ctccttcctcgttggagctgccacggaggcacctaaagcgcccccagtcttcaccagcattccaggaggtttttgatataaacggtggactcttcctcagtctttctgcgaagtgctctg

SEQ ID NO: 939272 - DNA, 120 bp, Artificial Sequence
  ENSG00000287369_6 (sequence is synthesized)
caaactcaacttgaaagcctctcttcccaggaacactggcctctccaatgcagacatggaagttgctttcactttttaactgaatgtgtaacattgcagcgtgcattattctgcatgtca

SEQ ID NO: 939273 - DNA, 120 bp, Artificial Sequence
  ENSG00000231920_0 (sequence is synthesized)
ctgcaggccggggagcccagccgggggcaccctcatcccaggctgactgacgtccctggcacccaaatgtcgcggggagtgcggggccagggtgcgccctccctcctcctccagccagtg

SEQ ID NO: 939274 - DNA, 120 bp, Artificial Sequence
  ENSG00000231920_1 (sequence is synthesized)
gacctgcgtcccagaggggccgagggttgcaccgcgcccgctcccacgggcctcttccgagaggacgcttctccctcgtgtccgcgggaagtcctcggatcctggatgagaaagagcctt

SEQ ID NO: 939275 - DNA, 120 bp, Artificial Sequence
  ENSG00000231920_2 (sequence is synthesized)
ctctcaccggctcccagaccccgcgctttttaatacctgtccttgcagagcgactggtcattttaggcccgagtcgagcctctcttgattaataaatgaatatggctcgttttgttttaa

SEQ ID NO: 939276 - DNA, 120 bp, Artificial Sequence
  ENSG00000231920_3 (sequence is synthesized)
cgtggatgtatacgttgtattgttttgcaattcaacaccgcaaagatctgggaaaagttcttcacctgcattaaggaaagcaattacaaactcgtagtccaaaccagaagagccagaaaa

SEQ ID NO: 939277 - DNA, 120 bp, Artificial Sequence
  ENSG00000287364_0 (sequence is synthesized)
aggtacagagtggcaaggggtttgtgagcaagtgatcgtggggtctggccactgcacacagccaggcacgccagctgctgcggcagggcatgcagctccaggaaccggcaccggcaccag

SEQ ID NO: 939278 - DNA, 120 bp, Artificial Sequence
  ENSG00000287364_1 (sequence is synthesized)
ctccttgcgaggctgcagctggaccaggtgtaccacaggcggcttccgctgcaagtaccagggtctggatgaggggaacacagtggcacccaaaaacctgagtgagacgccagcaaccac

SEQ ID NO: 939279 - DNA, 120 bp, Artificial Sequence
  ENSG00000287364_2 (sequence is synthesized)
agaggccaaagagacttcttaaagctaatttccaactcttcctgcctgcaatgaagagcaagaagtgattaaactgttcaattgcacaatcaactgacaaacaacaatctacatgacacc

SEQ ID NO: 939280 - DNA, 120 bp, Artificial Sequence
  ENSG00000287364_3 (sequence is synthesized)
ttcaagaaagggattaatctccacatggcacaaagataccatcaaggatacaacatacatgaagttgtcacatctctttaagctcatcttagcagccactattcctcagaactttctttg

SEQ ID NO: 939281 - DNA, 120 bp, Artificial Sequence
  ENSG00000287364_4 (sequence is synthesized)
gctttgatgaccttttcagtttttgagaagtattggtcagcatggatcaatatagctcctcctgttgctgatctgtaaatttccactccagcagtcagaaatcagtgaaattttgagata

SEQ ID NO: 939282 - DNA, 120 bp, Artificial Sequence
  ENSG00000287364_5 (sequence is synthesized)
ccggggcatgatattcatctcaggtaatctatgccttttgaaccactctttacaaaatcttcatcctgcctttgctactaacaacttcaccaaaccactggaagaggaactatatgagtg

SEQ ID NO: 939283 - DNA, 86 bp, Artificial Sequence
  ENSG00000287364_6 (sequence is synthesized)
acaacttcaccaaaccactggaagaggaactatatgagtgaaaaaatcacatcattcttcctcagcatttgtattagtttgttctt

SEQ ID NO: 939284 - DNA, 87 bp, Artificial Sequence
  ENSG00000287364_7 (sequence is synthesized)
aaatattgaaattgttggcaaaatctgttggaacatatttcctggcaaaagagaaagcatgaacataagatgaagtgaatgtgatct

SEQ ID NO: 939285 - DNA, 120 bp, Artificial Sequence
  ENSG00000287364_8 (sequence is synthesized)
aaagagaaagcatgaacataagatgaagtgaatgtgatcttggggacaaaaaagcaagttcaatctccaactctaagaatttattgagttagcggcagctacttattgcgttttctgttt

SEQ ID NO: 939286 - DNA, 120 bp, Artificial Sequence
  ENSG00000287364_9 (sequence is synthesized)
actactttgcttctaaattttacatatatgtttacgtctgtattcaaaccaacttataggaataatacacattttacaactggattattcatcatatttaagaattattttttgtctact

SEQ ID NO: 939287 - DNA, 120 bp, Artificial Sequence
  ENSG00000287364_10 (sequence is synthesized)
gaaaccaattattatttatatttacaggcagttacattcttttttaaaatctattttcctttatattgtcaaaatcatgaatttttctcatgtgtttcacatataactcataagtgaaca

SEQ ID NO: 939288 - DNA, 120 bp, Artificial Sequence
  ENSG00000287364_11 (sequence is synthesized)
aacaaaagagaggagtgtttaacttattttatgaccaacttttcttttcttttcttataccagatagtcatctgctatgatagaggactgcagaaatttaagaatggattttgtaaaaca

SEQ ID NO: 939289 - DNA, 120 bp, Artificial Sequence
  ENSG00000287364_12 (sequence is synthesized)
ttgtcaaacttaggtgctaagccaaatgttataataaaccacaccaatatcaagagtgaaaaatgtcaacaaataactggcaagggtgttaatatcttcagttttaatatttatctgcaa

SEQ ID NO: 939290 - DNA, 120 bp, Artificial Sequence
  ENSG00000287364_13 (sequence is synthesized)
tattgttcatatcttcattttctactcaggatgtgatgtagttcaatttgaaattgtgagaatgtgaactaggtagagcacgttaataaaagtttagctagttctactttgggaggccga

SEQ ID NO: 939291 - DNA, 65 bp, Artificial Sequence
  ENSG00000287364_14 (sequence is synthesized)
gaggagagactgctatttttcccatagcagtaagggtcaatttacagtcactatattggccaaac

SEQ ID NO: 939292 - DNA, 120 bp, Artificial Sequence
  ENSG00000287364_15 (sequence is synthesized)
agcagtaagggtcaatttacagtcactatattggccaaactaagtctcgtaataaatactgacaaatcattatctatagaatagttaagcactttgtcactccattaatatttcctgaga

SEQ ID NO: 939293 - DNA, 120 bp, Artificial Sequence
  ENSG00000287364_16 (sequence is synthesized)
cataccaaaattatttccttcattagtgttttctttgttgaacttaaaagaatattttgaactttatcttcattttctatcagttcacttgaaccttggcttagttctcaaatatgtagg

SEQ ID NO: 939294 - DNA, 120 bp, Artificial Sequence
  ENSG00000287364_17 (sequence is synthesized)
taggaacagggttaaatcctcaaaatttggctaataagaattatttttactatttattcaattttattcagttaatatttcaatataaacagtgaaaacaaccaacttaattttttataa

SEQ ID NO: 939295 - DNA, 120 bp, Artificial Sequence
  ENSG00000287364_18 (sequence is synthesized)
ggtctcagagatatcgcctgtgattcatttagtttaagccttcccatttgaaactgctgcagaactcatattttctgtttcttaaagttgagattgatataaatcatagaaaatttaaaa

SEQ ID NO: 939296 - DNA, 120 bp, Artificial Sequence
  ENSG00000287364_19 (sequence is synthesized)
acatgtctcttaatattaacagttaactggtatagtgaccataactaatcacattcatctttggtgaatcacattgaaattaatgagaaaataactttaggaaccaaaattagtgactga

SEQ ID NO: 939297 - DNA, 120 bp, Artificial Sequence
  ENSG00000287364_20 (sequence is synthesized)
aaagcattttattagccaattgtttgaaggcatgtagagataataaagaaaatctgagaagatgaagattgcagcatagttttctaaatcctaacattaaaaaaacaggagagcaattat

SEQ ID NO: 939298 - DNA, 120 bp, Artificial Sequence
  ENSG00000287364_21 (sequence is synthesized)
atatgtaaaactcaaaacccatgaacactgtttacaataaagtctagagacaaggtatccctatgaacctcaaaaagtgcaaaaggcaaatgaccacaagacgttcatgtaaatattata

SEQ ID NO: 939299 - DNA, 120 bp, Artificial Sequence
  ENSG00000287364_22 (sequence is synthesized)
tgtgcaaagaaaaagtagtgagactcaatacagtatttgatagtcatgataataggagaatccttaaatagccaacagctatttaatggaaaacatggggtccagtttgaaaataacagt

SEQ ID NO: 939300 - DNA, 120 bp, Artificial Sequence
  ENSG00000287364_23 (sequence is synthesized)
actgatcagctaaactgttttctaggacaggacagcaaactgaagagaaatcgtttgaaatggaatcaaagtaagccaattagaggcaacaacagaacaaaagaaagagaagctacagat

SEQ ID NO: 939301 - DNA, 120 bp, Artificial Sequence
  ENSG00000287364_24 (sequence is synthesized)
aaaagtggaaaaaaaaagatagattatagatacaagtggagaaaggaaactgtatcagaaaatttcagagtgcaaaaccaccatattttctagcagtataccaaaagtgaccacacacag

SEQ ID NO: 939302 - DNA, 120 bp, Artificial Sequence
  ENSG00000287364_25 (sequence is synthesized)
agctctgtgtcattagaaaatttatcctgtagcatgcctacttcagtttcgaaaaattaaatttacataacaaattgagttttaatttaacaaaaaaagctattgtaaggaataaacaag

SEQ ID NO: 939303 - DNA, 120 bp, Artificial Sequence
  ENSG00000287364_26 (sequence is synthesized)
gataacaagaagaaaaacatacttttagaaaataaaagcatgctaaaatgtcaggctttcaggacatcttaaaaccgtagattatttctatttgaaaatggtctattaataaataacatt

SEQ ID NO: 939304 - DNA, 120 bp, Artificial Sequence
  ENSG00000287364_27 (sequence is synthesized)
aagaaataataatgagactagtattttcctgatattaaaagaagatcaaagacatcaggtaaaaagaaagctacagacagatgtcttttatgaatgaatatacgcacaaaaatgcccttg

SEQ ID NO: 939305 - DNA, 120 bp, Artificial Sequence
  ENSG00000287364_28 (sequence is synthesized)
tcaaatactagtagcactgaatcaagcaacatatacagatgtgtggacaccatatacaaatggatctatttcagaaatgtaatattggtttaatatgtaaaaaattaatatagtacacca

SEQ ID NO: 939306 - DNA, 120 bp, Artificial Sequence
  ENSG00000287364_29 (sequence is synthesized)
tatcagtagaacaaaggtcaaaaaccacttgatcatctcaatagatgcaaagagtaaaagtatttgacaaactctgattcattttcatgattagaaccacacgcacacacacacataaat

SEQ ID NO: 939307 - DNA, 120 bp, Artificial Sequence
  ENSG00000287364_30 (sequence is synthesized)
actaggagggaacttcctcaatctgaaaaagaggatttacaaaaaatcaacagctcaccttgtacttagtgattaatgaatgactcaatgatcttccaaaaagaagaaggcatgaatatc

SEQ ID NO: 939308 - DNA, 120 bp, Artificial Sequence
  ENSG00000287364_31 (sequence is synthesized)
tattcttgcagacttctattcaacattgtactggaggtgccagccaggacatttatgtaaaaatatgagaaaaaaagtaatctagattgaaaaagaataaagaaaatcatctcaattcat

SEQ ID NO: 939309 - DNA, 120 bp, Artificial Sequence
  ENSG00000287364_32 (sequence is synthesized)
aaatgtcatgatgttgcatatggaataacttaagaaatcaactaaaaatcaaagagaactaataaattagttcagcagaatttcaggatacaggataaaataatcaactatatttttaca

SEQ ID NO: 939310 - DNA, 120 bp, Artificial Sequence
  ENSG00000287364_33 (sequence is synthesized)
caccaggaatgaacaattcaaaatgatattaagaaaataattcccagccaggcaggtaatccccacactttaggagccaaaggcaggaaaacggtatgaaaccaggagtttgggaccagc

SEQ ID NO: 939311 - DNA, 120 bp, Artificial Sequence
  ENSG00000287364_34 (sequence is synthesized)
ctgggcaatagcaggagtgtctctataacaaacagagaaataaacagacaaacaaactaaaaacttagttggtcgtgttagtcctagctgctcaggaggctaaagtggagaaccacttga

SEQ ID NO: 939312 - DNA, 120 bp, Artificial Sequence
  ENSG00000287364_35 (sequence is synthesized)
gcccaggagttcaagtttacagtgagttatgatcatgccactgtacttcagtctgggccacagagcaagactgcaggaaaaaatccaatttaatagcatctgaaagaataaaatacttag

SEQ ID NO: 939313 - DNA, 120 bp, Artificial Sequence
  ENSG00000287364_36 (sequence is synthesized)
caataaatttaacaaaagtgcaaaagtggaatcttatacacttagaactgccaaacattgttaaaataagttaaagaaaatgtaaataaatggaaagacactctatgtacatggcaaaga

SEQ ID NO: 939314 - DNA, 120 bp, Artificial Sequence
  ENSG00000287364_37 (sequence is synthesized)
gactaaatattgttaaaatgacaatatttcctattattgtcattttaacaattaatgcattagtgcaatctctaacaaaatcccagctggcttctggaaattgacaagctggtactaaaa

SEQ ID NO: 939315 - DNA, 120 bp, Artificial Sequence
  ENSG00000287364_38 (sequence is synthesized)
tttatatggaagttctggggaaccagaatagccaaaacaatcttgggaatgaaaaggaacaaaactgggtaacttctacttattgatgtcaaagtttactacaaaacttaacacaatgtg

SEQ ID NO: 939316 - DNA, 120 bp, Artificial Sequence
  ENSG00000287364_39 (sequence is synthesized)
gtacgcgcataaagagacacatacaactcagtggagtagaactgagcatgaaaataaaagcacaaaacagaaagaaagatcatctttgcaaatcatatctttgatgaggaatttgtatcc

SEQ ID NO: 939317 - DNA, 120 bp, Artificial Sequence
  ENSG00000287364_40 (sequence is synthesized)
taaagagcttttacaactcattattaaaaataactcaatttttaaaaaattaacaaagaatctgaatagattttttttccatagaagatatagaaatgattaacaagcacagaataagac

SEQ ID NO: 939318 - DNA, 120 bp, Artificial Sequence
  ENSG00000287364_41 (sequence is synthesized)
aataagaccttcaatatcattagagattataacattgcaaatcaaaaccacaatatgctactttacacctactagaatgactataatgaaaaagacagataatagcatattttgccaaag

SEQ ID NO: 939319 - DNA, 120 bp, Artificial Sequence
  ENSG00000287364_42 (sequence is synthesized)
atgtggaaaaattagaactcacatattgccagtgagaatgtaaaatgttacagccactttgggaaacagcctggcagttccttaaaatgttaaacataaatttaacatgtgatccaccaa

SEQ ID NO: 939320 - DNA, 120 bp, Artificial Sequence
  ENSG00000287364_43 (sequence is synthesized)
acatatgtccacacaaaaacttgtacatgaatgtttttagaaacgtttaataaccaaaaagtgtaaaccaccttattgctcatcaactgatcaataaataatatgtggtataaacagaaa

SEQ ID NO: 939321 - DNA, 120 bp, Artificial Sequence
  ENSG00000287364_44 (sequence is synthesized)
gtgaaatattattcagcagaaaaagaaggaattactgactagtacattccacaaaatttgaatggttcttgaaaatattaaatgaatgaaaaaagccagtaacaaaagatcacatattat

SEQ ID NO: 939322 - DNA, 120 bp, Artificial Sequence
  ENSG00000287364_45 (sequence is synthesized)
ataattccattttcagaaagtgtatagaatagataaatttatagagaaagaaagtggatcagtaggtatttttttttaatgtaacctggtgtgtaatatgggaaattagagactcaatgc

SEQ ID NO: 939323 - DNA, 120 bp, Artificial Sequence
  ENSG00000287364_46 (sequence is synthesized)
tagaagacataaggtttcttttggggtgataaaactgttctccagtggattgtggtgacggttacactactctgagactatactaaaaaccattgaattgtacaattcaaatgggcaaat

SEQ ID NO: 939324 - DNA, 120 bp, Artificial Sequence
  ENSG00000287364_47 (sequence is synthesized)
tcagaatttgtcttgttttcctcatgactagactgaggtgatggatttggcaggtggagatgaaattgctgaaattattccagttttggtctttgggagctcgtgcagatggttcctatg

SEQ ID NO: 939325 - DNA, 120 bp, Artificial Sequence
  ENSG00000287364_48 (sequence is synthesized)
ccactttgacatagttccatcaatgtatttttttctttcctttagcacttctttactttcgggtactgtaagacaccctaaactcatcttgtatattttctgcctcagtcctagaatctg

SEQ ID NO: 939326 - DNA, 120 bp, Artificial Sequence
  ENSG00000287364_49 (sequence is synthesized)
agaaatcaagatttgggtactaaacgtgcttttgctactgggatgttgcttcttttagtttctcttagccaatgaagcaaaggaatatacaatataagtgtttgctaacctgagtgtgta

SEQ ID NO: 939327 - DNA, 120 bp, Artificial Sequence
  ENSG00000287364_50 (sequence is synthesized)
tacacacctataaatacttctgtatttaaccatctgcctctattttagttaaacatgaattcttaataatatctccaactctaacccattatagcatggatcaatatagctcctcctgtt

SEQ ID NO: 939328 - DNA, 120 bp, Artificial Sequence
  ENSG00000287364_51 (sequence is synthesized)
gctgatctgtaaatttccactccagcagtcagaaatcaggttcgcatttgccattcatttcttaattgttcaatgccagtacacatgtacagtatcatcaaaattgttaaactgtcctcg

SEQ ID NO: 939329 - DNA, 120 bp, Artificial Sequence
  ENSG00000287364_52 (sequence is synthesized)
taaaagaaactttattagagtgcttatgtgcagcgtctttttctttagttatgtagactctattttcagttacttccgtcagcccctttccctcaccacctttgttagaatatttcattt

SEQ ID NO: 939330 - DNA, 120 bp, Artificial Sequence
  ENSG00000287364_53 (sequence is synthesized)
gtaatacagtgaaatcctcatgtttgtcataatctgcattctttcctaggataccctgacttcctgcataactttttaaaattggcaaatattatggtttattctttttgtagtaaagtt

SEQ ID NO: 939331 - DNA, 120 bp, Artificial Sequence
  ENSG00000287364_54 (sequence is synthesized)
ctacaggatttgataaatgcataacgtcatgcatccaccattaaagaatcataaagaatagtttcactatcctagaattcccttgtatttcatttatttggtcctcctctcttctccaac

SEQ ID NO: 939332 - DNA, 120 bp, Artificial Sequence
  ENSG00000287364_55 (sequence is synthesized)
caccaaactttttactatctctatatagttttgcctttttcagaatttcatataattgtaattatacaatatgtagtcctttgactggcttttttcacttagtaatatgcatttaaagct

SEQ ID NO: 939333 - DNA, 120 bp, Artificial Sequence
  ENSG00000287364_56 (sequence is synthesized)
aataaatctattaccaaataaattatgcaatgtttcagactaaatgtattaaatcatgtgcacaagttttctttacattgcaaaatataaaatactgctaaaagaaacaaaacataaact

SEQ ID NO: 939334 - DNA, 120 bp, Artificial Sequence
  ENSG00000287365_0 (sequence is synthesized)
ggactgagcagagggtgcaggatccttccaggacccgtgtggcagtgctggaagaagaggcgcggggagaaggcggcgtctccagacgaatccgctcctcccgttgagaaacttcgatgt

SEQ ID NO: 939335 - DNA, 120 bp, Artificial Sequence
  ENSG00000287365_1 (sequence is synthesized)
ggccacccgctttcttggcgctgggcggcgggccctgcagccctgtggaattccggccagattcccagggagcagagacccagtcggccccttcaccctcccgaggccctgcggggcggg

SEQ ID NO: 939336 - DNA, 120 bp, Artificial Sequence
  ENSG00000287365_2 (sequence is synthesized)
gggggggcagcactctccaacccccagcctatgtgggacacaccctgctctggtcttgattgctgggaacacctgaggaatgctgttcttatcatcttccctttagttcagatgtgaccg

SEQ ID NO: 939337 - DNA, 120 bp, Artificial Sequence
  ENSG00000287365_3 (sequence is synthesized)
tcacagtgaggtctcccctgaccatcctacgcaatgaagggcaaggacattatcttgcttactgttacatccccagaatctggcacgttcatggcacatatcagacacataataaatact

SEQ ID NO: 939338 - DNA, 120 bp, Artificial Sequence
  ENSG00000287365_4 (sequence is synthesized)
attgaaatgatgaaaaaaagattatttttgaaagtaatttttcattcaaagcttcagtgatgggaaggttttaatggtggaaacgaggaagataagaaaatggtgatgcttagcaaattt

SEQ ID NO: 939339 - DNA, 120 bp, Artificial Sequence
  ENSG00000287365_5 (sequence is synthesized)
atggaaaatggaaaaaaaaacctgagagatcacagaagtaaaaattgttgcacccagtccaacaatgaaccatcaggcaaagaaataatcagatttcccaaatatcaaaacctttgccat

SEQ ID NO: 939340 - DNA, 120 bp, Artificial Sequence
  ENSG00000287365_6 (sequence is synthesized)
tggtctgcaagcatacagaagagataacactcagctttctaaagtctagtgctgttgagctcattagaaattgaattttgaatttatgataagaattaatgcaattcaaatgcatgtcat

SEQ ID NO: 939341 - DNA, 120 bp, Artificial Sequence
  ENSG00000287365_7 (sequence is synthesized)
attattctgccttttagatgtctctcctggaggaacagacaggcatttaagacatggcattatttatgaatatttaactacatggctagttacagaagaaggaaagacaccgatgatttt

SEQ ID NO: 939342 - DNA, 120 bp, Artificial Sequence
  ENSG00000287365_8 (sequence is synthesized)
tgcatgttgtattagacataataaagaaccccaaagatgtccacattctaatcactagaaccagggaacatgttaaccagcatggcaaaggggactttgccattgtgattaagtaaagaa

SEQ ID NO: 939343 - DNA, 120 bp, Artificial Sequence
  ENSG00000287365_9 (sequence is synthesized)
tcttgagctgtggagatgattctgaattatctgagtggatcaaatgtaatcacaaatgtcattataagaaggaggcagaaggatcaaagccagtgaagatgccaacacagaagcagaggt

SEQ ID NO: 939344 - DNA, 120 bp, Artificial Sequence
  ENSG00000287365_10 (sequence is synthesized)
aagagagatgcaagtgatggctttaaagatggaagggggacatgagtcaagaagtaggggcggcctccagaagctggaagaagtaagaatggaacgtcccctatggcctccagaagggca

SEQ ID NO: 939345 - DNA, 120 bp, Artificial Sequence
  ENSG00000287365_11 (sequence is synthesized)
cagttcttctgatactttgattttagtctggtgagctgcattttgcacttctgacactcagaactgtacaatcatgaatctgcattgttttaagccacaaagtttataattatttgttac

SEQ ID NO: 939346 - DNA, 120 bp, Artificial Sequence
  ENSG00000287365_12 (sequence is synthesized)
agcagcaagaggaaactaacacacttgtgagtagtcatttcccctgatatcatttggctctctgttcccctacccccagatctcatgttgaattataatccccaacgttggaggaaggaa

SEQ ID NO: 939347 - DNA, 73 bp, Artificial Sequence
  ENSG00000287365_13 (sequence is synthesized)
tctcatgttgaattataatccccaacgttggaggaaggaactggtgggaggtaattggatcatggaggtagac

SEQ ID NO: 939348 - DNA, 120 bp, Artificial Sequence
  ENSG00000287365_14 (sequence is synthesized)
cttcctcctgctcccgacatgcaggacgtgcctggttccccttcacctttggctatgattataagttgcctgaggcctccccagtcatgcttcctttacagcctacagaaccatgagcca

SEQ ID NO: 939349 - DNA, 120 bp, Artificial Sequence
  ENSG00000287366_0 (sequence is synthesized)
aactacaactgtctagtttcttctctgtgtctttcactgggctgtgagttccttgagagtagcgacggtgtcttattcatcttgggatctccagctctcacatcagggctcaagacaaaa

SEQ ID NO: 939350 - DNA, 120 bp, Artificial Sequence
  ENSG00000287366_1 (sequence is synthesized)
atagagagaattcagaagaatgtgaaccacacgtgtccagttccattttcctcagctcacatctttcaataagcccactccaccctggggtagaggaagagggctggaacaagacacaaa

SEQ ID NO: 939351 - DNA, 120 bp, Artificial Sequence
  ENSG00000287366_2 (sequence is synthesized)
atgattcatcttgccaacctagaggagagacatgctgtggaggggagcagggccaggggccataacacagaagagagatggggcagcataggctgcatctcacaccaccttgttctctac

SEQ ID NO: 939352 - DNA, 120 bp, Artificial Sequence
  ENSG00000287366_3 (sequence is synthesized)
ctgcatttggcacagagcttggggtagccacatgatccagttctctccaatgagacctaaggtgaaatctgttgatgaaatttctggtgattttttttaaataaaaaggaacagatgctg

SEQ ID NO: 939353 - DNA, 120 bp, Artificial Sequence
  ENSG00000287367_0 (sequence is synthesized)
ttttcaaaactatgtttcgtgtgctattaataaaaatcttaatttaatcccttatttaaggcactggtaccactttgaagagggaattgccaaatacactaggaggaattcataccgttt

SEQ ID NO: 939354 - DNA, 120 bp, Artificial Sequence
  ENSG00000287367_1 (sequence is synthesized)
ttatgtccttctaaatgcaaagtggatcataacattataagatttatgaagaaatattcattctgttttttaaagtttcttctaagttcacaagcacgatgacctcttgtttcataattt

SEQ ID NO: 939355 - DNA, 120 bp, Artificial Sequence
  ENSG00000287367_2 (sequence is synthesized)
atggtaatgaattcacgttgtagctcattttgtaatacattctcttagaaaaattacttgacctggggtgttaaaatggatatgtactgagatgacaagtttgaaagcctttcaagagct

SEQ ID NO: 939356 - DNA, 120 bp, Artificial Sequence
  ENSG00000287367_3 (sequence is synthesized)
ctgttcacaagttatcagaggaatgaaggcgacatttcagagtcctttaattatgtcagatgatgtgataaggaaaataatatcctaactgacaaatcaaaatcatacgttgggatgaag

SEQ ID NO: 939357 - DNA, 120 bp, Artificial Sequence
  ENSG00000287367_4 (sequence is synthesized)
tcagttacatacacaatagattcctttctcttgaaagcgatggtctggacacatttcagtaactttcttctttagccacaaacagtgaaccacagagaaagcatgaagtctgcatttctg

SEQ ID NO: 939358 - DNA, 120 bp, Artificial Sequence
  ENSG00000287367_5 (sequence is synthesized)
catggggcattttcaaaatgctgacttgctgccatggaaggtcgcccagcgtactgagcaaagtgaaaaaaatgcaagttgcacaacaatgcgtgcagtgtgacaccattcacaggggaa

SEQ ID NO: 939359 - DNA, 120 bp, Artificial Sequence
  ENSG00000287367_6 (sequence is synthesized)
aacagatatgataagatgtattatgacctgatacaatactatactatattatgttatgtagaaggacaattctgaaaagacccaaaggaaacagttaataattgttgcttttgggaagaa

SEQ ID NO: 939360 - DNA, 120 bp, Artificial Sequence
  ENSG00000287367_7 (sequence is synthesized)
taaattggggatgatggtgtcttttgcatattatatttcaaaaggttttatgttagcaatattaaaaatattaaaatgaacgagtaaagaaaatagaaaagaaaagagagttgccacatc

SEQ ID NO: 939361 - DNA, 120 bp, Artificial Sequence
  ENSG00000287367_8 (sequence is synthesized)
gtaaagaatagcaggtaaggaggctcggtttgtccagcgggaatggaccccagcatccctcacttggtcattcatcagcgattagttgactcctttgtatgtgaacatcctgatgtactg

SEQ ID NO: 939362 - DNA, 120 bp, Artificial Sequence
  ENSG00000287367_9 (sequence is synthesized)
tctcatctcctttgataccatacaccctgacagggtgtccaattgatttcatgcagggcagcaactcatacacaggttggacaagcttgattagctcagttggtgtgagagaaccaacag

SEQ ID NO: 939363 - DNA, 120 bp, Artificial Sequence
  ENSG00000287367_10 (sequence is synthesized)
caaaaaataaaccctggagaagttcagttttgaccttcttgctccattgtcctgctaatgcggaatattgaaaacatctattctgtgagatttgtagaatacagtttgatttattttact

SEQ ID NO: 939364 - DNA, 120 bp, Artificial Sequence
  ENSG00000287367_11 (sequence is synthesized)
ttacgattcaaactgtatgctttcactttttaaaaggaccacatatccatgtggaaagagaaacatctattttctagacattttaaaccttctctgagctgtcattttattcttcagagt

SEQ ID NO: 939365 - DNA, 120 bp, Artificial Sequence
  ENSG00000287367_12 (sequence is synthesized)
ctaccttccttcagctggagatctgatgtgctggtagagaatcaatggtggtatatttgaaaaatcaatgctaatgggttccaacatcaaatcaaaagttggaggaagaggaccacagga

SEQ ID NO: 939366 - DNA, 120 bp, Artificial Sequence
  ENSG00000287367_13 (sequence is synthesized)
aggactgctgacatcctctcaatgcaggaaaagttttcctagacttagtcctgatcagttactccagaaaacctacaggaatctggctgagggagacagtgcggactaatatttcatttc

SEQ ID NO: 939367 - DNA, 120 bp, Artificial Sequence
  ENSG00000287367_14 (sequence is synthesized)
tccccactcctccctctgaggaatccaggacttcattgtggacccctgtattagtccattttcacactgctacagagagctacctgagactgggaatacagaatataaatatagagtgcc

SEQ ID NO: 939368 - DNA, 120 bp, Artificial Sequence
  ENSG00000287367_15 (sequence is synthesized)
ctcctatctccccagtgtcattgccttgctctgtgaacaaacccagaggtccaacgtttgtggaaggccgtcttctactcacttcagaagacgaatatgacaatgtgacccattccctga

SEQ ID NO: 939369 - DNA, 120 bp, Artificial Sequence
  ENSG00000287367_16 (sequence is synthesized)
gatgttttacaacttgagggaaaaaagtgtgactctgagatgtaccagctgttaggccagagacaaccctcagatcacctgggacttgctccttgttgcctcctctttgatctttgcatc

SEQ ID NO: 939370 - DNA, 120 bp, Artificial Sequence
  ENSG00000287367_17 (sequence is synthesized)
agagggccctgccagtctctgtcctcacagtacccagtctcttggagcccaaatggactacgacagtgcccaagaaagacataaggggaagagtaccagctgagaatacataccaaagat

SEQ ID NO: 939371 - DNA, 120 bp, Artificial Sequence
  ENSG00000287367_18 (sequence is synthesized)
gctgtctccagcactgcatgggacaaggatgaagcctcatcagccagctgaactggaacaagtatattctaaaactccatcctattttaatttttctatttttaatgcagagttaatcca

SEQ ID NO: 939372 - DNA, 120 bp, Artificial Sequence
  ENSG00000287367_19 (sequence is synthesized)
agctttcttaaccataaagccattccaagcgctaacttttgtttaattagcactttgcaaattaaaacttcagtgtgaaaagtattttaagcatattggatggaacaaagtatagtttga

SEQ ID NO: 939373 - DNA, 120 bp, Artificial Sequence
  ENSG00000287367_20 (sequence is synthesized)
gaatgttatccatcatataggaatggatcagacagaacactgtgaaatcaacaatgtgcttttattaatattcctcaatcccagtcattatccaataaacctcatttcttccttctttta

SEQ ID NO: 939374 - DNA, 120 bp, Artificial Sequence
  ENSG00000287367_21 (sequence is synthesized)
tatgctttgacacttgggatcatcactaaagcccctttcaagcttcaacattccattttttcccagacgtttgctagtctagtcaatttattaagaactgaaatataaagaggtaaaatg

SEQ ID NO: 939375 - DNA, 120 bp, Artificial Sequence
  ENSG00000287367_22 (sequence is synthesized)
taaaataatctgagtagtagaaagaacactgaatttaagaatcagaaaatctctttcagtcaagaatgtgtacatctgactttgtaaacttggggcataaatcattttaacctctctagg

SEQ ID NO: 939376 - DNA, 120 bp, Artificial Sequence
  ENSG00000287367_23 (sequence is synthesized)
ttctattactatcactattttggggtgtgaataaattataagtctagactcacctatgatgtcagaatgaattaagcagatatggaagcacttttgaaacataaattgcgattgcaactg

SEQ ID NO: 939377 - DNA, 120 bp, Artificial Sequence
  ENSG00000287367_24 (sequence is synthesized)
tccaaggccacaaaagaaattactaaaataactcaaaggaagtgttatatatcaaggattcaaaacacaagaaacatccctaaaatataacattctaactgattttcttaaagattgatc

SEQ ID NO: 939378 - DNA, 120 bp, Artificial Sequence
  ENSG00000287367_25 (sequence is synthesized)
ttttttaaaagtcacataagggtaatgattgaggaatgatctgccacatcttgcagcctgtgatgtattgttcagtgatatcattgtggccaacgaggcaccaaagagcaggcgatcaca

SEQ ID NO: 939379 - DNA, 120 bp, Artificial Sequence
  ENSG00000287367_26 (sequence is synthesized)
gtgacatcatggcaggatcactgacaatgctcgtgatgtgacgattctttatcatttatatgttgggctggttataaagtatttaattggtattgttcacatttatatcatgtgatgaga

SEQ ID NO: 939380 - DNA, 120 bp, Artificial Sequence
  ENSG00000287367_27 (sequence is synthesized)
cattcttgtcaccattattcagtttctgaatattcttggtgaatgatcttcagggagccctggcttctgaccgagggtttctatcctttgtcaagccaccctattccctcacttttcaat

SEQ ID NO: 939381 - DNA, 120 bp, Artificial Sequence
  ENSG00000287367_28 (sequence is synthesized)
cactttacctatgactaatagaaagttcaaagcaaaaacctattgattaattttcaactagcaacagataatgaaacacattttgcatgtacatttttggattcccattctcctgaccaa

SEQ ID NO: 939382 - DNA, 120 bp, Artificial Sequence
  ENSG00000287367_29 (sequence is synthesized)
agtaaattggctggaaataaaagacatgtaaaaaatctcatgcagttgtactaattgatctgagaggaaaaatgtaaaatatgtagataccttgattgtctcctcttcatcccattgact

SEQ ID NO: 939383 - DNA, 120 bp, Artificial Sequence
  ENSG00000287367_30 (sequence is synthesized)
agggagggattccacactacggttatggggatggcccaagatatgacatctaatactggacagatgagattgacagtagtgtacagtccaggggaggagaggaagatactgcaccatgca

SEQ ID NO: 939384 - DNA, 120 bp, Artificial Sequence
  ENSG00000287367_31 (sequence is synthesized)
gggctgaatggggatgtgctcaggaacagagtgaataagcagaccctgtggaaagcaggctttatagtagcaagagcatggagtgactccttgtttctcagatggatgtgatcggcttgt

SEQ ID NO: 939385 - DNA, 120 bp, Artificial Sequence
  ENSG00000287367_32 (sequence is synthesized)
ttgaataattcagtgggctggcagggaactgaagtctactactcagggataagcaggcactgtgccttgtccttgtaataaggagggttgtttggctaggacaccttatcagtaggagcg

SEQ ID NO: 939386 - DNA, 120 bp, Artificial Sequence
  ENSG00000287367_33 (sequence is synthesized)
aagtgtgtaggatgatgcagttaggacatcagaggccctcccagtttagatgtcaaagtagcacatcattgttattttaagccttacactacaacagacatcatataaagacacttacca

SEQ ID NO: 939387 - DNA, 120 bp, Artificial Sequence
  ENSG00000287367_34 (sequence is synthesized)
atttggaccaggaggcacagctcccataacttctatcgtccatcactttttacccctgctcgtaagtcaaacaataaaggaaagtcctctcaaagtcttagacagaattaggagtgctaa

SEQ ID NO: 939388 - DNA, 120 bp, Artificial Sequence
  ENSG00000287367_35 (sequence is synthesized)
gagcattgttgaggccattcctagccttccttcttgttcagaaactacagatcgaaagtcaaggggccctccttggcagcctgcagctggtggctgccctgtctccagcaaaggtttttc

SEQ ID NO: 939389 - DNA, 120 bp, Artificial Sequence
  ENSG00000287367_36 (sequence is synthesized)
tgactgttcaggcacacaactgtgactccccacgagcagacccacttacgtttaccaagacaagataacagagtcaattagccttgtcagtcactgtgactataacttagaagaatagaa

SEQ ID NO: 939390 - DNA, 120 bp, Artificial Sequence
  ENSG00000287367_37 (sequence is synthesized)
gcccactgatcacacttaatgaaaatacaaggtgacaagaaagtcatctgcagctgtttatggacaagaatttggggaaaatgtattaagaacagttataattagagatacacacaaaaa

SEQ ID NO: 939391 - DNA, 120 bp, Artificial Sequence
  ENSG00000287367_38 (sequence is synthesized)
ttataataaaattgacattataatatttactatatttacatactgaatacatttaaaacaataaaattaagtgaaaacatttttgttgtgcttttctgttcagtgatactgtctggtttt

SEQ ID NO: 939392 - DNA, 120 bp, Artificial Sequence
  ENSG00000287367_39 (sequence is synthesized)
cagtgatactgtctggtttttttattaaagttttaaatgttaaatgatgacatttcaaatacacagccaagtaccaaaattattaatagacactcatgtaccaacctaccatattaacag

SEQ ID NO: 939393 - DNA, 120 bp, Artificial Sequence
  ENSG00000287360_0 (sequence is synthesized)
ctcaccacgaaggtctgcagcttcactcatgaagccagcgagaccatgaacccactgggaggaacgaagaactccagacgcaccgccttaagagctgtaacactcactacgaaggtctgc

SEQ ID NO: 939394 - DNA, 76 bp, Artificial Sequence
  ENSG00000287360_1 (sequence is synthesized)
caccgccttaagagctgtaacactcactacgaaggtctgcagcttcactcctgatatctggacgtcagacggaaca

SEQ ID NO: 939395 - DNA, 120 bp, Artificial Sequence
  ENSG00000287360_2 (sequence is synthesized)
tcagtgagaccaagaacccaccaattacgaacacaggacgactctattggatctggaaataaatcacttcatgtggtattgtttcatctttattggttcttctttttcacaaatttatag

SEQ ID NO: 939396 - DNA, 120 bp, Artificial Sequence
  ENSG00000287360_3 (sequence is synthesized)
ttggttcttctttttcacaaatttatagaagtaccaacacttaagggtgaagaaaaatataaagtcacatatgactcctggcataatgatttgccttttggatcaggactcgaacatcaa

SEQ ID NO: 939397 - DNA, 120 bp, Artificial Sequence
  ENSG00000287360_4 (sequence is synthesized)
ctcttcattgaccttgtcttccttttgtgcctgaaatgctttcatgatggactggatcttctctcacccctgagcactctgccttttatcctgaaatccatgccgttagccattttttcc

SEQ ID NO: 939398 - DNA, 120 bp, Artificial Sequence
  ENSG00000287360_5 (sequence is synthesized)
actcccttagctcaagacctgtctttttgtatcctgtttggctttctcgctattccttgatttcttttcactcctctgtattcatgctgacctttttttttttttcttgcttatttattg

SEQ ID NO: 939399 - DNA, 120 bp, Artificial Sequence
  ENSG00000287360_6 (sequence is synthesized)
cttgatggcattcatcacctctgggtatagaatcatttatccactatgtctcctttcttcccgcttgaacttcactcaatgttacctttatttccccctgattctactctgctgtaatct

SEQ ID NO: 939400 - DNA, 120 bp, Artificial Sequence
  ENSG00000287360_7 (sequence is synthesized)
gactttccattattattcttatcagcagtctgttatttatagagcggagaaataagataagctccttctaatatagatggggcacaggcaatgtagctgggaataagaaatgtaaaaagg

SEQ ID NO: 939401 - DNA, 120 bp, Artificial Sequence
  ENSG00000287360_8 (sequence is synthesized)
aaggcagagctgcaaaaagcagagctccaggggcattgctgatggctggatgaaaagggaactgcagaaaggatttagggtagaaaagtgagatagcattgggagatatgcctaatgcta

SEQ ID NO: 939402 - DNA, 120 bp, Artificial Sequence
  ENSG00000287361_0 (sequence is synthesized)
tatttgttgaggtccatccaggagtctgtcacaaatatctacttttgcataagtgattttactttcctttatcttcacagacaagacttgtgtccatgaagatccatccagggatgctta

SEQ ID NO: 939403 - DNA, 120 bp, Artificial Sequence
  ENSG00000287361_1 (sequence is synthesized)
tccctaacatgagacttctgccttcccccagcttatagatctgttcctgactgcttcagtctccaaggccagctgcctcaagaaataatatccatttccctgtggacctcataagtcata

SEQ ID NO: 939404 - DNA, 120 bp, Artificial Sequence
  ENSG00000287361_2 (sequence is synthesized)
ctcagggaagagaacctcccagagaaccacccaaggggaacaggcagcatgggaatttctataagatgcagtcagcggtggctttggagtgccttcagaatgacactgctaaaactgact

SEQ ID NO: 939405 - DNA, 120 bp, Artificial Sequence
  ENSG00000287361_3 (sequence is synthesized)
gatgctctgaagatgttggaacttacaaggaaacagcaaggcaggtcttggtttatttctgcccacaatgatcttggccctgtgtctgatggggcttagccatgtgacccaagaacccag

SEQ ID NO: 939406 - DNA, 120 bp, Artificial Sequence
  ENSG00000287361_4 (sequence is synthesized)
ctttgtgttttggagcaggcattcaataagaacttgctggtgcaaggtttttcttgggatgaccttccaaagggccaggcgcctgtgtggattatggctcaaaggagtctgtgggcagcg

SEQ ID NO: 939407 - DNA, 120 bp, Artificial Sequence
  ENSG00000287361_5 (sequence is synthesized)
gaagagatgctgcctcctggcttgggcactccagggcatggtgggcctgtgtgagtcccattcacggccctggtctcctgagcctcttttaacagctgtcccacccaccaaccaccagca

SEQ ID NO: 939408 - DNA, 120 bp, Artificial Sequence
  ENSG00000287361_6 (sequence is synthesized)
gccccctcaggagtacacaccttggctgaagaatgctaacacagctggctggaggccacggggcaccactggaaacgtttcctccaagtgcatttgggggctcactcagtgcctgggcaa

SEQ ID NO: 939409 - DNA, 120 bp, Artificial Sequence
  ENSG00000287361_7 (sequence is synthesized)
ggaagggaaggcaagaggcagcctcttctggggccaggaaggaaaattaggacaatttattatttccctgttgcactgagtaaatagacttcaagataaattattggtgcctgcagcctc

SEQ ID NO: 939410 - DNA, 120 bp, Artificial Sequence
  ENSG00000287361_8 (sequence is synthesized)
cttgatgcaaaacccttaagtgaaagcagactttaatgaacatatgctagcttgccctccccttctcacttcaagtctgctattaacttcctacgcacttgggaacctttggctcttggc

SEQ ID NO: 939411 - DNA, 120 bp, Artificial Sequence
  ENSG00000287361_9 (sequence is synthesized)
ctatataatagaagaataattagaataattactggagaaggctgggtcaaatttccaaggatcttctcttaactacttggttatccttattttatttgcttttaagaaattcataaaact

SEQ ID NO: 939412 - DNA, 120 bp, Artificial Sequence
  ENSG00000287361_10 (sequence is synthesized)
gaccaaacattgttactttgcacctagaggatttatttatataaaataaaatcattgctttgtatcatgactctatcattgaaaataatcacagtaattagtgactgctgtgctaatcaa

SEQ ID NO: 939413 - DNA, 120 bp, Artificial Sequence
  ENSG00000287361_11 (sequence is synthesized)
gtgtagatgaagttttcatgccaatttttatattttgtgtttctaagtcaggcttccatgggattacctggaagatggaactcagattaatccaactcatctgagtagctcgtgaggacg

SEQ ID NO: 939414 - DNA, 120 bp, Artificial Sequence
  ENSG00000287361_12 (sequence is synthesized)
taggaattttggccactttctctgttcttcacttagttgtttttaaaggagagaagcaagaaaaaactcaaatccagatggaggctccctcactgagcccatgttccatggcaagggcca

SEQ ID NO: 939415 - DNA, 68 bp, Artificial Sequence
  ENSG00000287361_13 (sequence is synthesized)
gaggctccctcactgagcccatgttccatggcaagggccacaggtggggatacaggtatgaggtatgg

SEQ ID NO: 939416 - DNA, 120 bp, Artificial Sequence
  ENSG00000287362_0 (sequence is synthesized)
gaactgggttgggcactggagtttcacgagagtgctgaggcgccggtcccgccaggagaaaatgtggtcatggcctcctcgtttcccctcagagctgcatgtgagccctcctttccatcc

SEQ ID NO: 939417 - DNA, 120 bp, Artificial Sequence
  ENSG00000287362_1 (sequence is synthesized)
cttcatggatccatttcttcattgttatgggctgtattttgttccctcgaattcacatgttgaagtcccaatccccagagctgcagaatgttactgtattaggagacaaagccgttaaag

SEQ ID NO: 939418 - DNA, 120 bp, Artificial Sequence
  ENSG00000287362_2 (sequence is synthesized)
aagaaattaagtcaaaatgaggccgttagggtgggccctagtccaatatgactggtgaccttataagaagaaatctggacatgcaaagcaccgagagctacaagtggacagagggccaat

SEQ ID NO: 939419 - DNA, 120 bp, Artificial Sequence
  ENSG00000287362_3 (sequence is synthesized)
catgtgacaaggcagcaaggggacagccatctgcaagccaaggagagcagcttcagctcaaaaccaatccttggaagactgaaatgttttctttaagattgggaacaaagcagccaggtg

SEQ ID NO: 939420 - DNA, 81 bp, Artificial Sequence
  ENSG00000287362_4 (sequence is synthesized)
gggagcaaagcaaggatgcctgctttggccacttctatttacatagtactgagtcttagccagagcaactaggcaagaaaa

SEQ ID NO: 939421 - DNA, 120 bp, Artificial Sequence
  ENSG00000287362_5 (sequence is synthesized)
catagtactgagtcttagccagagcaactaggcaagaaaaagaaataaaaggcatccaaattgaaaaggaagaagtaaattatctctgttcgaagaagatatgatctcatatgcagaaaa

SEQ ID NO: 939422 - DNA, 120 bp, Artificial Sequence
  ENSG00000287362_6 (sequence is synthesized)
cctgaagattccacacatgcacaaacctgttaaaataaatgaattcagcgaagtagcagggtaccaagtaaataaacccagatccattgcatgtctgtatactaataatctaataatgaa

SEQ ID NO: 939423 - DNA, 120 bp, Artificial Sequence
  ENSG00000287362_7 (sequence is synthesized)
caatctgaaaaagaaattatgaaaaaataatactatttacaacagtattacaaagaagtttaggaattaacttgactaaggagaagaaagatttgcacaaggaaaactaccaaacgttgc

SEQ ID NO: 939424 - DNA, 69 bp, Artificial Sequence
  ENSG00000287362_8 (sequence is synthesized)
gagaagaaagatttgcacaaggaaaactaccaaacgttgctgaaagaattttttttttttgagacaccc

SEQ ID NO: 939425 - DNA, 120 bp, Artificial Sequence
  ENSG00000287362_9 (sequence is synthesized)
gcaacctccatctaccaggttcaagtgattctcttgcctcggcctccctagtagctggaattacaggtgtgcaccactacagccagctagtttcttgtattttagtagagactgggtttc

SEQ ID NO: 939426 - DNA, 120 bp, Artificial Sequence
  ENSG00000275995_0 (sequence is synthesized)
tcatatatttaattagaaaagtcaatgccattgactttttaaagccaagggcctcctagaattatgttttgcaaaatgtgctatacacattgcttatggtatatcaagtagtccacatat

SEQ ID NO: 939427 - DNA, 120 bp, Artificial Sequence
  ENSG00000275995_1 (sequence is synthesized)
ggttaggcagttttggagataaaaatgatgaaacaatcctatttacacatgttttataaatttgaaatgtaatattaattatactttttaaattccactgcattttaatgattatatcat

SEQ ID NO: 939428 - DNA, 120 bp, Artificial Sequence
  ENSG00000275995_2 (sequence is synthesized)
gagtcttgtgaaaattttccaatgtcacttgtattctattagttgtgattcttgttcttaaattgctgcgtggaaactaatctatggtgacaataatcagggcttgggaaggcttgattg

SEQ ID NO: 939429 - DNA, 120 bp, Artificial Sequence
  ENSG00000275995_3 (sequence is synthesized)
taaacaggctcatgaccctgggaacttttggggatgcagcaattattttcttatattgattatgttggtagttccatggatgtagcttgccaaaactcattaaacgatacacttcgaatg

SEQ ID NO: 939430 - DNA, 120 bp, Artificial Sequence
  ENSG00000270460_0 (sequence is synthesized)
aggccaagtctcgccacatggcatcatttcctcctcacctgcagaatcgctgtgacttatggctcctctgattgcacctgctttcaccagcagccctggaagagagctcttctgtgtgga

SEQ ID NO: 939431 - DNA, 120 bp, Artificial Sequence
  ENSG00000270460_1 (sequence is synthesized)
actacactatgagattaaaaggaatccagctgttaccagaaatgggtgcctgccaggtttatccaccaaattctttccacttcatgtcattaaaataaaatttgagttttaaaatgaaaa

SEQ ID NO: 939432 - DNA, 120 bp, Artificial Sequence
  ENSG00000254073_0 (sequence is synthesized)
ctcatctatgacagcagtcattggtctgcacaggtcccagcgaagttctcaggtcccaggttggggatcatggcatccctgagcatctctgggctccaggcagagaatgaggctgattct

SEQ ID NO: 939433 - DNA, 120 bp, Artificial Sequence
  ENSG00000254077_0 (sequence is synthesized)
cctctgagcggactcagttgcctgcagcgtctgtggctttgggacagagggccaggatcacctaccagggagacagcatagaatacttttatgcaaacttttgtaccagcagaagctagg

SEQ ID NO: 939434 - DNA, 120 bp, Artificial Sequence
  ENSG00000254077_1 (sequence is synthesized)
agcaactggcactcagtgattcctgaacaactctctgactccatatcagagaacatggccaccctgataatcaatgggccccaggctggaaacaaggctattactgtcaatcatgagaca

SEQ ID NO: 939435 - DNA, 120 bp, Artificial Sequence
  ENSG00000269929_0 (sequence is synthesized)
aacagctgctcctgtgaggcctcaagaagcttacaatcgtggcagaagctgaagggggagccagcgtgtggcatggcaagggaaggagcaagagagagagggaggagctgccaggctctt

SEQ ID NO: 939436 - DNA, 120 bp, Artificial Sequence
  ENSG00000269929_1 (sequence is synthesized)
gcccgcccgcgcctccatccgggtcctggcgcggtgctctcccggcagcgacgggcgcgagggccggggcattcccacggccgcgacggccctctccgcgagcgcgaggaaaccaggatt

SEQ ID NO: 939437 - DNA, 120 bp, Artificial Sequence
  ENSG00000269929_2 (sequence is synthesized)
ccaggattaccgaggaggaaaaaaagccttcctgtggtgctcaactgtgattccttttcaccattcaccctggatgttctcttcactgtgggatgagatggtctcattccgtcacccatg

SEQ ID NO: 939438 - DNA, 88 bp, Artificial Sequence
  ENSG00000269929_3 (sequence is synthesized)
ccgtcacccatgctggagtgtagtgaaggactcaagcttcctagtaactgggactacagacggagtcttgctatgttgcccaggctgg

SEQ ID NO: 939439 - DNA, 120 bp, Artificial Sequence
  ENSG00000269929_4 (sequence is synthesized)
tcacgtgaactcacagattgaaattcactcattactgtgaggacacaccaagccatttatgagggatgcacccctatgacccaaacacctcctactaggcccacctccaacatcagaggt

SEQ ID NO: 939440 - DNA, 120 bp, Artificial Sequence
  ENSG00000269929_5 (sequence is synthesized)
cacatgaaacgagatgtataggggacaaaacagtcaaaccatatcagtcccaccagcaagaaggctctcactggatgtggtcccttgatcttggacttctcagcctctgtaactgtaaaa

SEQ ID NO: 939441 - DNA, 120 bp, Artificial Sequence
  ENSG00000269929_6 (sequence is synthesized)
ctgaggagtagacttgctgcattattttctttttatttagatgatattaaaactcagaagaattaattttgacattttgtatttacagtttatcagttaattttctctgttcaagtagta

SEQ ID NO: 939442 - DNA, 120 bp, Artificial Sequence
  ENSG00000269929_7 (sequence is synthesized)
cagtaggcacagattaacatttaaatttttcacatatggtatatttcagaaatttgaagttaagcaaaaattttaatgagtagagaaagtaagtagccttcaggaaatcttcatagagga

SEQ ID NO: 939443 - DNA, 120 bp, Artificial Sequence
  ENSG00000269929_8 (sequence is synthesized)
ccaggcccttttggaattgtgaataggtttattgccttacatcctggtacacatgtccaaggtcaggtcctgggtggtaaaggtaaatacaaattggaagggcactgtgtgagccaaaat

SEQ ID NO: 939444 - DNA, 120 bp, Artificial Sequence
  ENSG00000269929_9 (sequence is synthesized)
tcagcagcctggaaaaggagagatgggctctgggttctacctttgctcactggtttctctttctgtgatgcagagactctcagctgttcctcctctatgtctacattatgtctgaaggaa

SEQ ID NO: 939445 - DNA, 120 bp, Artificial Sequence
  ENSG00000269929_10 (sequence is synthesized)
agaatttaacaaaacttgaaatactgctgtttttctacaatgtttgtaaatatttatcttgctgcttttctaggtttgtcttctggatttaaaatttggggcggctggggtggaattgca

SEQ ID NO: 939446 - DNA, 120 bp, Artificial Sequence
  ENSG00000269929_11 (sequence is synthesized)
tggtttgggaatgggtaattgagctgctgctcattatggtatgtaacagtgatttgtctgtttaatatgtacaagaactggaaggtcaataaaatgaaagtggttgtcttgactgggtaa

SEQ ID NO: 939447 - DNA, 120 bp, Artificial Sequence
  ENSG00000269929_12 (sequence is synthesized)
gttttagggtcacacccaccactgggagataactatacaatctactgtctttcctaacgtgatagaaaagtctgcatccaggcggtctgatagaaagtcagttaactaattgtacaatat

SEQ ID NO: 939448 - DNA, 120 bp, Artificial Sequence
  ENSG00000269929_13 (sequence is synthesized)
ttaagattaacttgtcttaaagagatgtagtgcagcatttgtttatggcctggaaataaattaatttagagataaagtctgtagcaagtacactggatgggggtggggaaaccttttgct

SEQ ID NO: 939449 - DNA, 120 bp, Artificial Sequence
  ENSG00000269929_14 (sequence is synthesized)
tcttgtcttatttctctgtgtcagaataaatgtatttttttattttgatttatgctgataattttatgttgaaattttctttcgaaagagattgtactttccattccagaagaaaacatt

SEQ ID NO: 939450 - DNA, 120 bp, Artificial Sequence
  ENSG00000269929_15 (sequence is synthesized)
ctggtaagttgctaagatttcagctttgccctcaaaccctgaagtagtccttcattcacacagtgggatcactcgaaaatgtcagatggggaagtccataggttgttactttaaagaaaa

SEQ ID NO: 939451 - DNA, 120 bp, Artificial Sequence
  ENSG00000269929_16 (sequence is synthesized)
tagaaaaaatgctggaaaaggtttcttcaattttaatacccatgaaggcccatgttttagctttcctccgatgggcaaaccatacactaacttgggccttgtaatcaacaagcaaggcta

SEQ ID NO: 939452 - DNA, 120 bp, Artificial Sequence
  ENSG00000269929_17 (sequence is synthesized)
aaagctctctaagtgcttgctgtttaaactattttgtgttggaagaagagttggaaaagaggcagtgtggaggtgagggagaagttccctccctccaatcatttccaataaatggaaatt

SEQ ID NO: 939453 - DNA, 120 bp, Artificial Sequence
  ENSG00000269929_18 (sequence is synthesized)
taaggagaaatttgtgtttatccttaatatctaagataatcactgtgcagtgccattggtacttttcatgagagtagaaacatcaaacttccttggatgggcccaacccaggtgacttaa

SEQ ID NO: 939454 - DNA, 120 bp, Artificial Sequence
  ENSG00000269929_19 (sequence is synthesized)
ctctggaccaaatgtatgctttttgttttatccactgtggacagctgcatagataattggtctttgttctaaactgcacataaaaacatgggagaaaatgacatttgttgccttttgatg

SEQ ID NO: 939455 - DNA, 120 bp, Artificial Sequence
  ENSG00000269929_20 (sequence is synthesized)
atgaaattttgtggtcttcctgacatgttcttccagcataacgttgccaccttcagttggaaacgtatccttatctaataattaagccctggagaaaaattaatttatatattttattaa

SEQ ID NO: 939456 - DNA, 120 bp, Artificial Sequence
  ENSG00000269929_21 (sequence is synthesized)
ttacataaggacattgttattagctaagcagagtaagtaaatcgaaataaaactttaaaaatgcctttatggagagaatgactatctctgaaagcttgtttttaatgatgataaaattca

SEQ ID NO: 939457 - DNA, 120 bp, Artificial Sequence
  ENSG00000269929_22 (sequence is synthesized)
tgatcagaatttgtttctgtttgctttaattcaggggtcaaaaactgaaataccatcagaggcccaggaggggctagttgtaactggcaaatatagtaaattaatttgctctggttgata

SEQ ID NO: 939458 - DNA, 120 bp, Artificial Sequence
  ENSG00000269929_23 (sequence is synthesized)
ggtagcaagcagggtttatatacattgtcacctacttttccagttaacaggagagactggagattttatgaaatttgatatttaaatgttggtaactgggttgggcaccatggctcacac

SEQ ID NO: 939459 - DNA, 120 bp, Artificial Sequence
  ENSG00000269929_24 (sequence is synthesized)
cacttcgggaggctgaggcgggtggagcacctgaggtcaggagttaaagaccatcctgaccagcctggtgaaacacagtctctaataaagatacaaaaattaggccgggtgtggtggctc

SEQ ID NO: 939460 - DNA, 80 bp, Artificial Sequence
  ENSG00000269929_25 (sequence is synthesized)
ggaggccaaggtgggcggatcacctgagtcaggagtttgagaccagcctgcctaaatggtgaaaacctgttgcgcctgta

SEQ ID NO: 939461 - DNA, 120 bp, Artificial Sequence
  ENSG00000269929_26 (sequence is synthesized)
ccagcctgggtgacagagcgagactgtccaaaaaaaaaattgataattaaatgttaaaagtcagcgactccagtaatacgtggtgggctgagtattagactactggcttacatcctctga

SEQ ID NO: 939462 - DNA, 120 bp, Artificial Sequence
  ENSG00000269929_27 (sequence is synthesized)
ctgatgtcattactttcttgttcgtttgtgacttgaggttggattttaagcaaatgtatttgtggctttttaccaaggtcatatggccagataacttttcaaaagcattagttaaagaat

SEQ ID NO: 939463 - DNA, 120 bp, Artificial Sequence
  ENSG00000269929_28 (sequence is synthesized)
tctgattagtttgaattagaaacaaaactcaaagaacatgacctaatttaacaggttaatttgaagtgcatctgccaagtagaagaccagcaagaaaaaaaaaatgggttcctaggaaga

SEQ ID NO: 939464 - DNA, 120 bp, Artificial Sequence
  ENSG00000269929_29 (sequence is synthesized)
ggtagtaggttgcatagttttagggcagggattttgcccacaaggaggtaactatacgacctgctgcctttcttagggccttattattcaccgataacctgtttccttgctactttgctt

SEQ ID NO: 939465 - DNA, 120 bp, Artificial Sequence
  ENSG00000269929_30 (sequence is synthesized)
tggtgtaagcagagttctttctgtaggttttttcaaatgaaaacattgcaagaatatcaaagagagcagtgtttgcgttagtgattataaactgcagcatggtgctgacattgataactg

SEQ ID NO: 939466 - DNA, 120 bp, Artificial Sequence
  ENSG00000269929_31 (sequence is synthesized)
aaagtcaactaatgagaatttgagacttctgaagtacacttagttgctagtgtctcccttttggtgtcactggaaagtttagaaagcatggttttgtttttgctcaggtttctctttctg

SEQ ID NO: 939467 - DNA, 120 bp, Artificial Sequence
  ENSG00000269921_0 (sequence is synthesized)
ctgctcaggcgctccttggggtcgcgcatggtctcggacagggtttgcaaggacttcggagctaaccagtttggagccataaccctttcgtacttgccaaaaaactctgggcaagactct

SEQ ID NO: 939468 - DNA, 120 bp, Artificial Sequence
  ENSG00000269921_1 (sequence is synthesized)
tgaattttgagccgcagtattctcgttcataaggtgagaataaaaacatcacctagggttgatgtgaagagagatgaaatcattgtgaaataggagagttattgctttcaaccaatgaca

SEQ ID NO: 939469 - DNA, 120 bp, Artificial Sequence
  ENSG00000269921_2 (sequence is synthesized)
cgacgttcctgtcatcatgatgctgacattttaattgggaagcagattgaaacgataactaaggaatttgacaggagcatttagtaggacctgtaaagaaattaaagcaggtccgaggtg

SEQ ID NO: 939470 - DNA, 120 bp, Artificial Sequence
  ENSG00000269921_3 (sequence is synthesized)
gagttttgtaaactatatgcctgaatagaactttctgtttccaagggaattgttacagttggagacatgtcaattattacaataagcgtcaagggcaataacagaggtgttttaaagcta

SEQ ID NO: 939471 - DNA, 120 bp, Artificial Sequence
  ENSG00000269927_0 (sequence is synthesized)
atttctgtcctgtaaggaacagtgattgcccctgctccggaagatgtaatgtgtaaggtaccatcctgggggtggccctctccagacaccaagcctgctggcaccttgatcttggacttc

SEQ ID NO: 939472 - DNA, 120 bp, Artificial Sequence
  ENSG00000269927_1 (sequence is synthesized)
actgtgagaaataaatttctgttctttattaattacccagcaatttttatagctgcacaaaatggtttaagacagaggtcatagcaagcttcagtttttactttttccccttgcatctga

SEQ ID NO: 939473 - DNA, 120 bp, Artificial Sequence
  ENSG00000269927_2 (sequence is synthesized)
ccttgcatctgaacaattgcaagcagaaagaacaactgagtgctttatttctgcaaccaccatgctgctactgagtgaaggggaaggaggggtaagagcttgccttctttccttgtgtta

SEQ ID NO: 939474 - DNA, 120 bp, Artificial Sequence
  ENSG00000269927_3 (sequence is synthesized)
attgcaacatcttccaaaacccagcaaggaaggcatgaagtgagcctaccaaggccagtctccagatgaggggactatagctacagattgctatgtttcctgttggtggtggtagcaaga

SEQ ID NO: 939475 - DNA, 120 bp, Artificial Sequence
  ENSG00000269927_4 (sequence is synthesized)
tttcataggggcctttcttgccattgctcaaaatgaaatgcattgacaccaaaggaagtggtgaaactgtgggcattgtatgctttagaaatttgatatttggaaacctgcagacctgaa

SEQ ID NO: 939476 - DNA, 120 bp, Artificial Sequence
  ENSG00000269927_5 (sequence is synthesized)
gaggcagtagcttctcctgaagatctgatatccaagggctacccagacaaggagctgacttgtcaggaagtgtggtggaccttgacgcaaaaactcaaaccacaaatgtttcacttctaa

SEQ ID NO: 939477 - DNA, 120 bp, Artificial Sequence
  ENSG00000269927_6 (sequence is synthesized)
atttttgcaggctttgttatatagacatttttgttaagccctgtctaaaacaataggatgactgggttctttcccctcctcatggtgactacgtgcatcttctacgaacattcccatgtc

SEQ ID NO: 939478 - DNA, 120 bp, Artificial Sequence
  ENSG00000269927_7 (sequence is synthesized)
atgtggtcagcttccaagaaagactttaccaatgagtctgtttacagattctcaaccagaggacttacaggaatgcacagtagctatttgtttgggatgcagaggtacatgagccccaga

SEQ ID NO: 939479 - DNA, 120 bp, Artificial Sequence
  ENSG00000269927_8 (sequence is synthesized)
caccactgaagaaatctctctacctcctggtttgatccaggctttccagggataaaataagagggggaaacaaagaagtaatcattccccagcccccagtatgccccatctctgactcag

SEQ ID NO: 939480 - DNA, 120 bp, Artificial Sequence
  ENSG00000269927_9 (sequence is synthesized)
ctcccagcagagcagtaataggtccctgcttatcagatggcatcggaagggggtgggtgcctgggtgggtgcctggctgtgtgcagtgaggaggtctcagcagcagcctctgaagccaac

SEQ ID NO: 939481 - DNA, 120 bp, Artificial Sequence
  ENSG00000269927_10 (sequence is synthesized)
tgcttggctggaatctaggtgcgctactcactagctggggaacttacagcaagttacttcacctcttacgcctcagttttctcatctgccaaaagggagtactaatagcagcatcattga

SEQ ID NO: 939482 - DNA, 120 bp, Artificial Sequence
  ENSG00000269927_11 (sequence is synthesized)
caaaagctgaaaggtggaagcaagccaagtgttcatccactgagaaatgcataaataaaatgtggcctagacatacatggaatactattcaacctcaaaggaagagaatctggacgtgta

SEQ ID NO: 939483 - DNA, 120 bp, Artificial Sequence
  ENSG00000269927_12 (sequence is synthesized)
ctgcaacatggatgaactctgaagacatcatgctgagtccaaggacaaacactgtatgattccacttagatgaggtacttagagctgtcaaatttgtagagatagaaagtagaatggtgc

SEQ ID NO: 939484 - DNA, 90 bp, Artificial Sequence
  ENSG00000269927_13 (sequence is synthesized)
agagctgtcaaatttgtagagatagaaagtagaatggtgcaggtcaggcgttcaacaccagcctggccaacatggaattagccaggcgtg

SEQ ID NO: 939485 - DNA, 120 bp, Artificial Sequence
  ENSG00000269927_14 (sequence is synthesized)
aagtaggacggtggctgccaggggctggaggaagaggggaatgggaagttcttgcttaatgagcatagtttcagtttcgcaagatgaagagttccagagatggatgggaagatggatgca

SEQ ID NO: 939486 - DNA, 120 bp, Artificial Sequence
  ENSG00000269927_15 (sequence is synthesized)
caacagtatgaatgtacttaatgccactgaactacacacttaaaaatggttacgatggtaaatgttgtgtatgtatattttaccacaatttttaaaaataaataaggagaaatattaccc

SEQ ID NO: 939487 - DNA, 120 bp, Artificial Sequence
  ENSG00000269924_0 (sequence is synthesized)
ctcatcataggactatagaacacctcccataccctgacaccataccaccacatcagcaaggctcctgtgtagtaacagaggaataaaatggaaagaactgagcatctcagaccttattta

SEQ ID NO: 939488 - DNA, 120 bp, Artificial Sequence
  ENSG00000269924_1 (sequence is synthesized)
agaaggctgtagagaaactcaaagataacaggggagacaaaaacatggacaccagagaaaattttagcttcggaaaacactctagcaaacaataaagacggcccatcattaaagtcgcca

SEQ ID NO: 939489 - DNA, 120 bp, Artificial Sequence
  ENSG00000269924_2 (sequence is synthesized)
ggtcaaccagatgtagcctctgtaggtgttggccttggcgaccagcttgggatcagtatggttcgccagatggcccccactggcaccagtcttggttgggttcaccagatgttgcctgtg

SEQ ID NO: 939490 - DNA, 120 bp, Artificial Sequence
  ENSG00000269924_3 (sequence is synthesized)
tctttggacagagagctactattcttttaatggacgtgaaatggtgaaggcacacaagcatattgctgtcattgttttcttgctttcctaaattacttttaccagtggtatatctttttt

SEQ ID NO: 939491 - DNA, 120 bp, Artificial Sequence
  ENSG00000269924_4 (sequence is synthesized)
taaaagctatctacttggagatggtgtgtcttgattgacatctcatggagaagtggatggggaaaatactggttctgtggaaagactctctccgttagtggcttgctcatccagctctga

SEQ ID NO: 939492 - DNA, 120 bp, Artificial Sequence
  ENSG00000269924_5 (sequence is synthesized)
tctttctgttccaggactctccctgtttcaacaacagcaacaacatgataataacaaacctcacatatgttgttccactggataattgtaattttttaaaataaatcgttgtaaaaccaa

SEQ ID NO: 939493 - DNA, 120 bp, Artificial Sequence
  ENSG00000269925_0 (sequence is synthesized)
ttgctgaatttgttagctctagcagtttgttgtggattctttggtattttttatatagagagaatcatctgcaaatacagataggtttattcttcttttccaatttggatgccttttctt

SEQ ID NO: 939494 - DNA, 120 bp, Artificial Sequence
  ENSG00000269925_1 (sequence is synthesized)
gtacagtattgagtggcagtgtgaaagtgagcatccttgcctcgttcctgatcttaggggggaagtctttcaccatggagcatgatattagttgtggattttcccataaatgccctttat

SEQ ID NO: 939495 - DNA, 120 bp, Artificial Sequence
  ENSG00000269925_2 (sequence is synthesized)
catattaaggaaattcccttctatccttaatatgctgattgttttgatcatgaaagagtgagcccattttttctaaagtgaaagtttggctcaaagtaataaagtgctgacctgaaagaa

SEQ ID NO: 939496 - DNA, 120 bp, Artificial Sequence
  ENSG00000234199_0 (sequence is synthesized)
gaagccgggaggtgaaggccgcagtaacgctgttccctgcattggatgaagtgctccccaccaaactctctcaccggagagggtgggatctgcgggctccctgggtggcttgatttcgac

SEQ ID NO: 939497 - DNA, 120 bp, Artificial Sequence
  ENSG00000234199_1 (sequence is synthesized)
accctgtgggctgccttccactctggtactttcctctgcctgctgatgcttgaaattccttgaaccggccacacacacctgctttctggaatcagaacactggaaaggcttcctgggacg

SEQ ID NO: 939498 - DNA, 120 bp, Artificial Sequence
  ENSG00000234199_2 (sequence is synthesized)
ggagaagagtgatttacattcctgccgaggtgtaaagctgcggatggcaggttctctcctgagaaccggcttcaactaggaggaggaggttggaagcaggaccccgagctgacctgttga

SEQ ID NO: 939499 - DNA, 120 bp, Artificial Sequence
  ENSG00000234199_3 (sequence is synthesized)
ccaggagaggagtgagagttccttgaagcttcactgcaattccccagccacagagtgtctgaagactgctgcaggtccagtttgagttgcttttactctccaggaacacacagatgtgac

SEQ ID NO: 939500 - DNA, 120 bp, Artificial Sequence
  ENSG00000234199_4 (sequence is synthesized)
ctaaagtaacaacattcatgctactccagagacccagacaaaggggaattaagcttgcttgaacttgagcctggggaccaggatgctgatggaggctttgcagattcttgggtctccatg

SEQ ID NO: 939501 - DNA, 120 bp, Artificial Sequence
  ENSG00000234199_5 (sequence is synthesized)
gagacgaacagactctggcaaaatttccttcttgggagaaaggcagtgttggctgctttctttcctctggccaccctgagaatgcaagactcataaaagtgctgtgtatagattctctgc

SEQ ID NO: 939502 - DNA, 120 bp, Artificial Sequence
  ENSG00000234199_6 (sequence is synthesized)
agacacggggccattttgtaccatttctggcctcttcagagcccttctgaagtgctctctggcatccagcatccagggtgtccagctgcctccacaaacagcaagagctcatcagtaatg

SEQ ID NO: 939503 - DNA, 120 bp, Artificial Sequence
  ENSG00000234199_7 (sequence is synthesized)
ggtgacacaagtcacacaaccaagagccatgtgtctggttcatagcaccttatgcaaagtgaatgctcactatggtttttagcaaaaaatgtgtggagaataaagaggaataatagccaa

SEQ ID NO: 939504 - DNA, 120 bp, Artificial Sequence
  ENSG00000234199_8 (sequence is synthesized)
atgttcctacaagtcttccagaggagttcttaatgattttgtacctagtcttggatgcactgagctgggtctactctgaggcagcaagctgcaaccctgccctgtccagtcacctcactg

SEQ ID NO: 939505 - DNA, 120 bp, Artificial Sequence
  ENSG00000234199_9 (sequence is synthesized)
tcacctggaagaatcctgttctttagtggaaataagtcacagacgtcctcaaaggcgaacgctccaggtgcaccccagagagctgccccactagctctgactggctgatgctgtgtttgg

SEQ ID NO: 939506 - DNA, 120 bp, Artificial Sequence
  ENSG00000234199_10 (sequence is synthesized)
ctccaagcacttcttgctataaatccaccacaggtgtccttactctccatcacccagtcctttgttccgtcattgcctcatattcatttagcaagacttcactgagaacttagagactcg

SEQ ID NO: 939507 - DNA, 120 bp, Artificial Sequence
  ENSG00000234199_11 (sequence is synthesized)
aacacttcgaaaagtgctctgatgggagaaacacagagtgccgagggaacatgtgggagagatgttggggaaacttctggaaggaagtggccaggtgagaacttcagtcattttggatga

SEQ ID NO: 939508 - DNA, 120 bp, Artificial Sequence
  ENSG00000234199_12 (sequence is synthesized)
gttcctcttcctatgctccagccccacatactatcttccatgcattctgttgattctccgctgtgacatctaccaggcagcagtgaggatgccagagttcatgggtttctagaagacaag

SEQ ID NO: 939509 - DNA, 120 bp, Artificial Sequence
  ENSG00000234199_13 (sequence is synthesized)
ttttcaactgcagatacaaacatcaggacgtcaatgtatctgctaggagacacccggacagtgttgagaacacagaacctggaggctaaacccccagctttctatgccagctgagagtct

SEQ ID NO: 939510 - DNA, 120 bp, Artificial Sequence
  ENSG00000234199_14 (sequence is synthesized)
gtgggcacattactcagcgtctctgaacctcatgctcctcccctgtgacatgtagattgctaaacccatctcacagggctatcttctgcatttaaagaataaaataacacatgaggggtc

SEQ ID NO: 939511 - DNA, 120 bp, Artificial Sequence
  ENSG00000234199_15 (sequence is synthesized)
ccggattccgaagcccggagccgtttacagtttgaggcgccgtgtgccgccccctggtggccggaggccgttactgtcgcggctgagggggcgtcccggtgtatccgcagcgcgccctgg

SEQ ID NO: 939512 - DNA, 120 bp, Artificial Sequence
  ENSG00000234199_16 (sequence is synthesized)
ccgccctctggtggccggaggccgttactgtcgcggctgagggggcgtcccggtgtatccgcagcgcgccctggccgccccctggtggccggaggccgttactgtcgcggctgagggggc

SEQ ID NO: 939513 - DNA, 120 bp, Artificial Sequence
  ENSG00000234199_17 (sequence is synthesized)
gtcccggtgtatccgcagcgcgccctggccgacccctggtggccggaggccgttactgtcgcggctgaaggggcgtgtcccggtgtatccgcagcgcgccctggctgccccctggtggcc

SEQ ID NO: 939514 - DNA, 120 bp, Artificial Sequence
  ENSG00000234199_18 (sequence is synthesized)
gccgttactgtcgcggctgagggggcgtcccggtgtatccgcagcgcgccctgtcccgccatatacattccgtgcttttcaaacacccgccgtgggctaagcatgggacccacgtggggc

SEQ ID NO: 939515 - DNA, 120 bp, Artificial Sequence
  ENSG00000234199_19 (sequence is synthesized)
ggggacacacggcgataaagagccaggccctcgctgccaaggagctttcccgtaacaccgatgcatcaaacaaaaggcagcagtgaggatgccagagttcatgggtttctagaagacaag

SEQ ID NO: 939516 - DNA, 120 bp, Artificial Sequence
  ENSG00000234199_20 (sequence is synthesized)
cagggctctttgagccttccccagatgtggaacagagaaagtttgaagtagatgccattttaagagccaggacatggattctccctctctgcaaaacgtccttgcaaactctcgagggaa

SEQ ID NO: 939517 - DNA, 120 bp, Artificial Sequence
  ENSG00000234199_21 (sequence is synthesized)
accagtgcttcatgttgttaaagttttacaagttatggcataaattgttcttcaagtgccgaatgtagtgaccaataaatcaccgagaggattctctgagatttgcaattgtggaattac

SEQ ID NO: 939518 - DNA, 120 bp, Artificial Sequence
  ENSG00000234199_22 (sequence is synthesized)
ccaccgcctgccagaggcagtaaacttgggtccagcgggcccctgtcaagctgcataaccacacagtgagaggctgtctagagaaaggcgtttgttcaggagcagagcgttgcaacggta

SEQ ID NO: 939519 - DNA, 120 bp, Artificial Sequence
  ENSG00000234199_23 (sequence is synthesized)
acacgcatgtcatagtaaactgtgcatattcgaggaggcagaggaagaaaggaagaggaaggttttcaaagagaaagcagcagtgaggatgccagagttcatgggtttctagaagacaag

SEQ ID NO: 939520 - DNA, 120 bp, Artificial Sequence
  ENSG00000262049_0 (sequence is synthesized)
agacgcaaaagcgtcgtctgtggcggcagctagacatcgggcgaccctcgtcccgccaggttttggggtcgcgcaaacgagcgacgggggctggggctccggattcaggtgttctttctt

SEQ ID NO: 939521 - DNA, 120 bp, Artificial Sequence
  ENSG00000262049_1 (sequence is synthesized)
cagcgctcacgggtttctgtccgtacgcgatgcgagcgaacgtcgcggtcgaggctagggccccgaagcccgcagtaatccacgtctcccgcccgctccgggcccccagtgccgccgtcg

SEQ ID NO: 939522 - DNA, 120 bp, Artificial Sequence
  ENSG00000262049_2 (sequence is synthesized)
cgggcggaggcgcgaggtctgggctttggcgccttcgcagccgcaggcgacatcctctttcctagctaaagccccaaacgcccaggtggcttcctgggagagcacggctgagcctccgcc

SEQ ID NO: 939523 - DNA, 120 bp, Artificial Sequence
  ENSG00000262049_3 (sequence is synthesized)
ttcagatcagaacaggcagagcctccaagggcggcttgggcccagtgcctgcttatcctgcccgtctctccacacttcttctttccctgtccgttggagtccattccttcctggaaaagc

SEQ ID NO: 939524 - DNA, 120 bp, Artificial Sequence
  ENSG00000262049_4 (sequence is synthesized)
caaagccgcgctcccctaagaggcctggatgtgaaggtgagtgagacgccctggcctctgggtgcaaaggccggcgcctgccgctttcaacactcaggaggcgcgtttcagccccgctgg

SEQ ID NO: 939525 - DNA, 120 bp, Artificial Sequence
  ENSG00000262049_5 (sequence is synthesized)
cccccggccgcagactcggagcgctgagctcccaccgttcccatcacccgactcccttcccaggaatgaggagcacccgggaagcttcagccactacacgaaggaggcgccaagcccaaa

SEQ ID NO: 939526 - DNA, 120 bp, Artificial Sequence
  ENSG00000262049_6 (sequence is synthesized)
ctcctccccagctaccggcggggtcagtgcagagccgcggagggcacacatgaaccctggcacgcagcctcagggaggggcaggctggaaatgaccctgcctgcagctgggccatcagcc

SEQ ID NO: 939527 - DNA, 74 bp, Artificial Sequence
  ENSG00000262049_7 (sequence is synthesized)
caggctggaaatgaccctgcctgcagctgggccatcagcctgaccacctgccccctgagcaaacgttgatgccc

SEQ ID NO: 939528 - DNA, 120 bp, Artificial Sequence
  ENSG00000262049_8 (sequence is synthesized)
gagactccatctcaaaaaaattaattaaagaaaaaacgctgatgctttctgaaatacattttattatcgctgtaccattctggggcactggagatggcagctgagaagcagagaagctgg

SEQ ID NO: 939529 - DNA, 120 bp, Artificial Sequence
  ENSG00000262049_9 (sequence is synthesized)
agacctgaagcctccacccttggctgtggctgccgagagaggcccctgcagagggagccccaggccacacccagacaccacagccagctcacagtgcggccagagggcacaggctgcttg

SEQ ID NO: 939530 - DNA, 120 bp, Artificial Sequence
  ENSG00000262049_10 (sequence is synthesized)
gggggtgagggtccccattcctgccacctctcacagaccatgacccacagggctgggggcttcccctgggagaaagtccttccctccccatggcccagccctggggaaagaaagcagaga

SEQ ID NO: 939531 - DNA, 120 bp, Artificial Sequence
  ENSG00000262049_11 (sequence is synthesized)
ctaactcagggactgcagtaggctgaggacaagggaggtgggcttggggtgaaggccccccctcactcgcagagaagggacactaccggcagtagaggacagggaggcaggacgacggca

SEQ ID NO: 939532 - DNA, 120 bp, Artificial Sequence
  ENSG00000262049_12 (sequence is synthesized)
gttagagacgaggcgtttcaggtgaactgtatgtagtgttactccggacgtgagcatggcctgggtcagtcgaatgaaatgagctgggcctcgctgccctgtgccggcggcccctgtgcc

SEQ ID NO: 939533 - DNA, 120 bp, Artificial Sequence
  ENSG00000262049_13 (sequence is synthesized)
tgcggttgctgggccacggggggctgctgctgggggggaccgccagagggtgccatctgtgcaggaggaaagcaggcatggccctggtcctcccttccccagcccagggaggaaggcttt

SEQ ID NO: 939534 - DNA, 120 bp, Artificial Sequence
  ENSG00000262049_14 (sequence is synthesized)
tgtcccagcagagccacagacccacaagtgcttgtaatccatgtccacggactgcagctcatgcagccagctcatgcggcctttgcctttcaagtaaattcacggtttttcctgtctaca

SEQ ID NO: 939535 - DNA, 120 bp, Artificial Sequence
  ENSG00000234191_0 (sequence is synthesized)
gctgccatcatgtaagaagagcctttcacctcccgccgtgattctgaggcttccccagccacgtggaactgttccacttcccacaacacctctgccaccaaccaattgagggtcttcagg

SEQ ID NO: 939536 - DNA, 120 bp, Artificial Sequence
  ENSG00000234191_1 (sequence is synthesized)
agaagtgttcttatctgtgcaatagagcctgccagaaggggcacctggcaaccctcttcagaggcttgatcctgtgctgcagaaacctatggacctgctcaacctgtgcactggaattcc

SEQ ID NO: 939537 - DNA, 120 bp, Artificial Sequence
  ENSG00000234191_2 (sequence is synthesized)
agggatagactgagctgtccctaggaggctgggagcattctccagcagagaccagcaactgcctcctgcctggagaatctggaaggaggaagggcggctggaatcacctgtgatgactcc

SEQ ID NO: 939538 - DNA, 120 bp, Artificial Sequence
  ENSG00000234191_3 (sequence is synthesized)
aggagacaacagattgtccttcccattgccaaaccttaggccgggcctgaggggatcagactgggcaattgaatcctcaaaggttcctggaaggactacttaggaattgaatgtgctgag

SEQ ID NO: 939539 - DNA, 120 bp, Artificial Sequence
  ENSG00000234191_4 (sequence is synthesized)
acttcctctcaaaggagcccctccttcttaaatgaatccaggagagaagttctgaagactgtggtctatgctaaaggaatgcagatatttataaatggtcatctgcattgaatgaaccaa

SEQ ID NO: 939540 - DNA, 120 bp, Artificial Sequence
  ENSG00000234191_5 (sequence is synthesized)
gtccaaatgacaatcaaggagaactgtaaacataggaaaagagggctgaacccatgcttccagggaaggaagaagagagagagaaagagaagagaagagagagagagagagactgacttc

SEQ ID NO: 939541 - DNA, 120 bp, Artificial Sequence
  ENSG00000234190_0 (sequence is synthesized)
caatgtcttctctaccaagtgaatctctgactctacaagtttccttcccaagacactgtggtccagggctacctcccttacagcctacatgacaacatgtgcaaattatttgtcagcatc

SEQ ID NO: 939542 - DNA, 120 bp, Artificial Sequence
  ENSG00000234190_1 (sequence is synthesized)
taattgcaagaacgatgaggaaaccaaggcacagaggttaaacaacgtgtccaagccacgtagcaagtaaacaattgagccaggctccaaatccaaacgttctggcgtcagagtcctata

SEQ ID NO: 939543 - DNA, 120 bp, Artificial Sequence
  ENSG00000234190_2 (sequence is synthesized)
aagatttttttggcctaatgtgaggaagtactttctaagaataagagtttaccaattaaaagggggttgctgttttatgaagatatttaaaccaaggctgaggggccattttcaagggat

SEQ ID NO: 939544 - DNA, 120 bp, Artificial Sequence
  ENSG00000234190_3 (sequence is synthesized)
gctgactcggtaaaagttctttggcagcaagcatcagaaaccaaatgtaacaactttaagctaaaaaataaaaagaaggaagaggaagaagagaagatggggttgagggaggaggacagg

SEQ ID NO: 939545 - DNA, 120 bp, Artificial Sequence
  ENSG00000265010_0 (sequence is synthesized)
tttttttttacagctttacagtatctggcatgccctggtgaatgagctattgcctggggtttctgggttttatttttttgagatacagttttgctcttgttgcccaggcagaggttgcag

SEQ ID NO: 939546 - DNA, 120 bp, Artificial Sequence
  ENSG00000265010_1 (sequence is synthesized)
ccagtatttttgtacaattaaaacaaaaagcccactttcagatgaaaacttcaggtgtaaaagtacaagataacgatgaattctgaaggccagcataattcacacactggacttcttaag

SEQ ID NO: 939547 - DNA, 120 bp, Artificial Sequence
  ENSG00000234197_0 (sequence is synthesized)
agataaagaggtcaggtttggagtgtgcagagaaggttcccttcacacacttttttgacaaatgaatgactctggacaagttactcctgatgcctcaatgcctgtagaaatgtaaaaacc

SEQ ID NO: 939548 - DNA, 120 bp, Artificial Sequence
  ENSG00000234197_1 (sequence is synthesized)
acctgcagtgtaaccaggagatttctatttcaaaagcagatgtacaaataaggcaaatctatgtttatcttctagagcaaagaatgatttaaaattaaagcttcattcctggggcctgga

SEQ ID NO: 939549 - DNA, 120 bp, Artificial Sequence
  ENSG00000234197_2 (sequence is synthesized)
cacattaacatatgatagacatgaagaagtatatattacctgcctcaaagccacagatcaagtatcccaggattgagactctttccctagaaggactgggtaccctatgaacttagtgct

SEQ ID NO: 939550 - DNA, 120 bp, Artificial Sequence
  ENSG00000234197_3 (sequence is synthesized)
ctgtagagccacaaggtttttaatggttttcttttgtgtgcagtacaatgatcccaaggggactggactacacccggaggatgacactgccatgaaagaaggatatgttttaccacaggg

SEQ ID NO: 939551 - DNA, 120 bp, Artificial Sequence
  ENSG00000260750_0 (sequence is synthesized)
caggaggatcgcttgaggccaagagtttaagaccaacctgggcaacatgatgaagaaactgaggtttagagcagccgcttgcccagcgtagacagcgagaaggacaggtccagttctgct

SEQ ID NO: 939552 - DNA, 120 bp, Artificial Sequence
  ENSG00000260750_1 (sequence is synthesized)
tgatgatgaagcctgtgtcttctctgctgtgtgatcctaatcacgttgggaggttcctgaggaagcagaggattttgcccttgcatttgagccacagcagctctactgcaaaggagatga

SEQ ID NO: 939553 - DNA, 120 bp, Artificial Sequence
  ENSG00000260750_2 (sequence is synthesized)
cccacagagaaacatgccaagttagccgtctggtcccacgagaaacatgggaaacggggatcagagccatcctagccgaactcagcccagatcagcaggccttagtggaccccaagatag

SEQ ID NO: 939554 - DNA, 120 bp, Artificial Sequence
  ENSG00000260750_3 (sequence is synthesized)
cagagggtctgtaactttcaccagattcttaaggagtctgtgacctgggagagttttaagagtgggaaagctgtaaggccacgctcaggctggattccagccgtgggacccctcgcttca

SEQ ID NO: 939555 - DNA, 120 bp, Artificial Sequence
  ENSG00000260750_4 (sequence is synthesized)
attgtttttcggcgaaaacggggcgttcggccttcctgctttatttttgagcggtgtaagagggaggtagtgggtatcttcgagaaacggccgccgcggggtccggagccccgggttcca

SEQ ID NO: 939556 - DNA, 120 bp, Artificial Sequence
  ENSG00000260750_5 (sequence is synthesized)
atcccgggtcggccactgcaaagctgtgtgaccttgggcgagtcacttggcctctctgagccccaggcgcctccccgggaaaaagagggatatggtccaaggtgctgaaaacttcctaac

SEQ ID NO: 939557 - DNA, 120 bp, Artificial Sequence
  ENSG00000260750_6 (sequence is synthesized)
cgctcaggctggattccagccgtgggacccctcgcttcacttctctgagcctcaacttcctcatctgtgcaatggggcagcctcgtggacatgcaggattgcagttctggacatgcagag

SEQ ID NO: 939558 - DNA, 120 bp, Artificial Sequence
  ENSG00000260750_7 (sequence is synthesized)
cctggcatccagaggagcccagcgcccgccaactgcagcacccagcaccagcaaccccagggttgggggctgactccattcttctccccagggctacaccagctctagcttcctggccgc

SEQ ID NO: 939559 - DNA, 120 bp, Artificial Sequence
  ENSG00000260750_8 (sequence is synthesized)
cagtttccccagcaacttcattttgtttatttgcaatggcttattggggtctcctggagaaaagattctcagctgagttccagaaaatgaacacgctctccccgtgctcggagagctccc

SEQ ID NO: 939560 - DNA, 120 bp, Artificial Sequence
  ENSG00000260750_9 (sequence is synthesized)
cagaagaaatgatgttaggaatgtttatctcggaggaagcggaagagctcctttcagcaaaataagaatgaaccacaaaacagggtgcagggggccttgtcaaggcatcatagcgtggtg

SEQ ID NO: 939561 - DNA, 120 bp, Artificial Sequence
  ENSG00000260750_10 (sequence is synthesized)
ccatgggaacatccccttcctttgtcctgcctcagctgacagtgcctcggagatgccctgagctacgtcagcccggctggcatccaaggggttccttattggctcacaagacacgttgct

SEQ ID NO: 939562 - DNA, 120 bp, Artificial Sequence
  ENSG00000260750_11 (sequence is synthesized)
ttttcaggaccagagagacttggaggtcctcacctgcagccctgggcctttgtttaggctgtgctgtgaggctggctctctgtggtcagcatctcagcgtccctgcctggccagcaaagg

SEQ ID NO: 939563 - DNA, 120 bp, Artificial Sequence
  ENSG00000260750_12 (sequence is synthesized)
ggtgacattttccttgggtgccctcttgcaacatggcgttaaattctcaaaaaggtgcaaacccttagggtgaagtttgtgtctagaatataatggttaagggcctcggttctggagtca

SEQ ID NO: 939564 - DNA, 120 bp, Artificial Sequence
  ENSG00000260750_13 (sequence is synthesized)
gaatgaccagggtttgggttccggctccattgctttatagctgcctgagcctccgtttcccagtgtgtggaacagctggtaaccagcattcctactcccatgggtgttggagacatgaat

SEQ ID NO: 939565 - DNA, 120 bp, Artificial Sequence
  ENSG00000260750_14 (sequence is synthesized)
gagatcgtcattacaaagcgttcagcacaggttaagtgctgataggtggaaaggagataatcagtggtagcgattattattttagttgtctacttataaaatcagaaaatcggaaataga

SEQ ID NO: 939566 - DNA, 120 bp, Artificial Sequence
  ENSG00000260750_15 (sequence is synthesized)
aaaatacaaagaagaaaactaaaagtgcatgtagccccatggcccggcaatccgcgccgctggccttttgttagctgtccttcctggttttttcctgtgggtgtgtatgcatgtatattt

SEQ ID NO: 939567 - DNA, 120 bp, Artificial Sequence
  ENSG00000260750_16 (sequence is synthesized)
cataggatctggtcattgttgaatgaggatagtttatgtatgtatagacatgttagttttttcttaataccaggcataatgtatcttaacccacttttttaaaacttaaaaatacatgga

SEQ ID NO: 939568 - DNA, 120 bp, Artificial Sequence
  ENSG00000260750_17 (sequence is synthesized)
tgggtagaccgaggcaggaggatcgcttgaggccaagagtttaagaccaacctgggcaacatgacctaggaccccacgagaggagggatctggaggccaagccaggagcaggacaacacc

SEQ ID NO: 939569 - DNA, 120 bp, Artificial Sequence
  ENSG00000260750_18 (sequence is synthesized)
aacagaggcctcagaagaagactcagagtgggacaggggctccttaagtgattggggctggaagtgcgcagagaagcccggcgcggcagggaattgtctctccctggggtgctgccaagg

SEQ ID NO: 939570 - DNA, 120 bp, Artificial Sequence
  ENSG00000260750_19 (sequence is synthesized)
cggcggccggtgcgcggcggcggcggcggctgctcctcgtcgtcgtcgtcgtcgtcgcccgggaggcggccgcccccatctccccccgcgccgcagggatatggtccaaggtgctgaaaa

SEQ ID NO: 939571 - DNA, 120 bp, Artificial Sequence
  ENSG00000260750_20 (sequence is synthesized)
tgaggccaagagtttaagaccaacctgggcaacatgatacagaaaagaacacatagagacttcgggggaaaggagactatgtgcaagaatggcagagattggagccaaggagtgcctggg

SEQ ID NO: 939572 - DNA, 120 bp, Artificial Sequence
  ENSG00000260750_21 (sequence is synthesized)
cctaccagaggctgcaagagacagggaggaccctcccctagagcctccagagggaacagagccatgcccacaccttgactttggactcctggcctccagaactgtgagaggacctaggac

SEQ ID NO: 939573 - DNA, 88 bp, Artificial Sequence
  ENSG00000260750_22 (sequence is synthesized)
ttttaattgtggagatggagtctcactctgtcgtctaggctggagtgcagaggtgccatctcagctcactataacctctgcctcctga

SEQ ID NO: 939574 - DNA, 120 bp, Artificial Sequence
  ENSG00000260750_23 (sequence is synthesized)
gtggagatggagtctcactctgtcgtctaggctggagtgcagaggtgccatctcagctcactataacctctgcctcctgagttcaagcgactctcatgcctcagcctcctgagtagctgg

SEQ ID NO: 939575 - DNA, 120 bp, Artificial Sequence
  ENSG00000260750_24 (sequence is synthesized)
cggtctggatgtctttatgtgtttggcatcatctgctgagcaggaaggggtgagtgggacctctgtaactctctctacagccgtccccaagtgccatgttggcaatatcagctcatgtca

SEQ ID NO: 939576 - DNA, 120 bp, Artificial Sequence
  ENSG00000260750_25 (sequence is synthesized)
aacaaggtcaaaacatagatcagagaaatagccacagctgagtgtcttaaaagcactttcagacggcacccttcactttatgtgacaagcattgattcaacaaatgttcagaggaggctg

SEQ ID NO: 939577 - DNA, 120 bp, Artificial Sequence
  ENSG00000260750_26 (sequence is synthesized)
acttcccagtcatgtatttgtttgttcatttatcattcactcaaaaatgtaacgattgcatccctactgtgtgacggacattgtgccaggtgctgaggaggagaagagagaaggagagag

SEQ ID NO: 939578 - DNA, 120 bp, Artificial Sequence
  ENSG00000260750_27 (sequence is synthesized)
aagaagagaaatctggcagcacccccctctccccacttgagtggacgagaccatgagttagaagatagttacatggcagagcagtatatgctataatgggggtgcacagggtgcggacag

SEQ ID NO: 939579 - DNA, 120 bp, Artificial Sequence
  ENSG00000260750_28 (sequence is synthesized)
agctcagagacacctaaagtgtctccaggggatccctggagagggtgtttatggtgaaggctgagagccaatgagtgttctgcggtaaagagatgtgtgcacacattccagaatacacag

SEQ ID NO: 939580 - DNA, 72 bp, Artificial Sequence
  ENSG00000260750_29 (sequence is synthesized)
tgcggtaaagagatgtgtgcacacattccagaatacacagacaagaaagtgaaagttttttgttttgttttg

SEQ ID NO: 939581 - DNA, 70 bp, Artificial Sequence
  ENSG00000260750_30 (sequence is synthesized)
aagcagttgtttttaataaaaacagccacaaaccataaggaactcttatgtctacctacactagaagggc

SEQ ID NO: 939582 - DNA, 120 bp, Artificial Sequence
  ENSG00000260750_31 (sequence is synthesized)
aaccataaggaactcttatgtctacctacactagaagggctcagtcatattggagatattcataggatggaatattatacagcaaagagaacaaatgaacctaaggaacccagccacatg

SEQ ID NO: 939583 - DNA, 120 bp, Artificial Sequence
  ENSG00000260750_32 (sequence is synthesized)
ggtgaatctcaagcatgatgttgggcagaaaagaatgcatttggtatgattccagtcccacgaagctcaaaaacaggaaaaactaggccacagtgcttaagatgcacatagacaggtggt

SEQ ID NO: 939584 - DNA, 120 bp, Artificial Sequence
  ENSG00000260750_33 (sequence is synthesized)
aacattataaagaaaagcaaagttgatgaaaaattcaggtgaatggctctgtctggagggaggagaaggttatgattggagagggacacacagtgggttttgggggttccaataatgtct

SEQ ID NO: 939585 - DNA, 120 bp, Artificial Sequence
  ENSG00000260750_34 (sequence is synthesized)
aattccttgacctgggtggtcattatctgggcatttactatttaagtattcattaaattatacaaatatgtggattggccacagataactcattttttcccagcgaggggacatttacac

SEQ ID NO: 939586 - DNA, 120 bp, Artificial Sequence
  ENSG00000260750_35 (sequence is synthesized)
acttgagacagaagagtgtggtggctgcaagcctgtgctgtgctgtcaactgcttcttcacttccaccttagataagtgagttggcctttatgagcttcagatttcctcatctgtaaaat

SEQ ID NO: 939587 - DNA, 120 bp, Artificial Sequence
  ENSG00000260750_36 (sequence is synthesized)
gaggataataatactaccagcctcataaagttgctttaggattaaatatgatatgataatgtaggttcagcacagagccaggcacatacatgtaacaattatcactatcattatcactac

SEQ ID NO: 939588 - DNA, 120 bp, Artificial Sequence
  ENSG00000260750_37 (sequence is synthesized)
catcatcaccattctcataatcctcatcatcatcactgtcatcaccatcatcactaccatcatcatcactatcaccatcatcatcaccaccatcaccatcattataatcattataatcat

SEQ ID NO: 939589 - DNA, 120 bp, Artificial Sequence
  ENSG00000260750_38 (sequence is synthesized)
accatcactatcatcaccaccatcaccattaccaccatcacatcaccatcatcaccatcatcaccaccaccatcaccatcattataatcatcaccaccatcgccaccatcattaccatca

SEQ ID NO: 939590 - DNA, 120 bp, Artificial Sequence
  ENSG00000260750_39 (sequence is synthesized)
tcaccatcaccaccattacatcaccatcactgtcatcattaccatcatcaccatcatcatcatcaccataaccatcatcatcatcaccataaccatcatcaccaccgtcatcatcactat

SEQ ID NO: 939591 - DNA, 120 bp, Artificial Sequence
  ENSG00000260750_40 (sequence is synthesized)
catcacaatcaccatcaccaccatcgccaccgccatcgccatcaccatcatcactaacattatcaccatcctcatcaccatcgccatcatcaccatcaccatcatcaccatcatcaccac

SEQ ID NO: 939592 - DNA, 120 bp, Artificial Sequence
  ENSG00000260750_41 (sequence is synthesized)
catcaccatcactatcatcatcattaccattattaccatcatcaccatcaccaccatcatcaaatcatcactaacaccatcatcaccatcaccaacaccatcatcaccaccatcatcacc

SEQ ID NO: 939593 - DNA, 120 bp, Artificial Sequence
  ENSG00000260750_42 (sequence is synthesized)
atcaccgccatcatccccatcatcatcactaacacatcatcatcttcactatcctttatatcatcatcaccatcacaaagtttatttttccttcttgctaatccatccaaattacttctg

SEQ ID NO: 939594 - DNA, 120 bp, Artificial Sequence
  ENSG00000260750_43 (sequence is synthesized)
ctttatccccctcttcttccttcctcccacctctcttttcataattatcttcatctggaaattgaatgaccagtaacagtgctatctggagtcatggatagttctagatcttagtaagta

SEQ ID NO: 939595 - DNA, 120 bp, Artificial Sequence
  ENSG00000260750_44 (sequence is synthesized)
aggaagtaaaatcatgctcaacattttttcaaagctcttccattctcaatgttaaatcatgtcttatcgacagaccccatatcccaatttttggctcagtttgcttcctctacttgtact

SEQ ID NO: 939596 - DNA, 120 bp, Artificial Sequence
  ENSG00000260750_45 (sequence is synthesized)
agaaatgctgatcatatctttctgccatcacaagggaggaccctggaccccactacttgaccacagctaatcgagtcagaaagagacacctgacccaggctgaatgtctctcctaagact

SEQ ID NO: 939597 - DNA, 120 bp, Artificial Sequence
  ENSG00000260750_46 (sequence is synthesized)
caggaatcaggatctccagagtccagaaaattgaaattctgacaagatgtgatggggaacgcttgtctcagctgcatgtggctttagctggggtgacctgcctggggtctggagggtcta

SEQ ID NO: 939598 - DNA, 120 bp, Artificial Sequence
  ENSG00000260750_47 (sequence is synthesized)
ctttcaagatggtacacttttatggctgtcaaatgctgctggctgctggctgggagtctggctggagctgtgggttggaggaccctgtatctctccttgttggcacgtccaggggctgct

SEQ ID NO: 939599 - DNA, 120 bp, Artificial Sequence
  ENSG00000260750_48 (sequence is synthesized)
tgagcttccttacatcatggcaacttggttccaagcttgagcaccccaagagcatgaggcagaagctgtgttgctgtttatgaactgacctttgaagtcacatcctgtcacttctgtgat

SEQ ID NO: 939600 - DNA, 120 bp, Artificial Sequence
  ENSG00000260750_49 (sequence is synthesized)
aatcacacactggcccagattcaggggaagggaatgcagagcccacctctcaacagagacctagaaacgcccaaatggcagtcccactttgctcccccaaagcactccctcaacaggagg

SEQ ID NO: 939601 - DNA, 120 bp, Artificial Sequence
  ENSG00000260750_50 (sequence is synthesized)
ggtgtcaacaccacactggaagaagatcacgtggaatgggggatcttgtggacatttcacagtgttatggtaaacacaggcaaagacaagaaggcaagcacagataagttgatcgtggct

SEQ ID NO: 939602 - DNA, 120 bp, Artificial Sequence
  ENSG00000260750_51 (sequence is synthesized)
cagttctttgaaggagattaataggcttttgtggggatgcagggggagctttctttctgcactagtcaggaagcctctctggagctgagaccagaaagctctactgtcatgggaagaggc

SEQ ID NO: 939603 - DNA, 120 bp, Artificial Sequence
  ENSG00000260750_52 (sequence is synthesized)
accaggcaaaagagacagcaaggacccatgcctggaggccagaaagggtgcaggctggaaggccaggcagacttgggctcgaatcctgcccagtcattattttccctctggcaaggcact

SEQ ID NO: 939604 - DNA, 120 bp, Artificial Sequence
  ENSG00000260750_53 (sequence is synthesized)
ttacgttggtggggaaaagtgattcttttaaaaaggagagtgtaattccaaatcacctgagtccatgagatgactaatgtgctgtcttcatcctagtgcctggctcacatgtgggttaca

SEQ ID NO: 939605 - DNA, 120 bp, Artificial Sequence
  ENSG00000260750_54 (sequence is synthesized)
gcttttttacccttctccctggtttttgtttttaaacggctgggtggtactacgtttataggcttggagagtttcctccaaagtgaaatcaatactgccagccctactttatcgggaggg

SEQ ID NO: 939606 - DNA, 120 bp, Artificial Sequence
  ENSG00000260750_55 (sequence is synthesized)
cggtgatttccaaattgcacagaacaaatgcctgtaatatctgcatttcagagactagagcctgtcaccgctggagtaactgactgcaggagatgagagagggtcagttggaggtggggg

SEQ ID NO: 939607 - DNA, 90 bp, Artificial Sequence
  ENSG00000260751_0 (sequence is synthesized)
ggaggctgaggcaggagaactgctttagtgagcagagatcgtgccactacactccagcctaggtgacagagactctgtctcaaaaaacaa

SEQ ID NO: 939608 - DNA, 120 bp, Artificial Sequence
  ENSG00000260751_1 (sequence is synthesized)
acaaaaaaacaaaacaaaaaaaaacagttggacttgaatgtttttaactgggccccatcactcctttttgaatagtttgtgttgccagtcacaccctgtagggtttgtagcctgactttt

SEQ ID NO: 939609 - DNA, 120 bp, Artificial Sequence
  ENSG00000260751_2 (sequence is synthesized)
gttgccagtcacaccctgtagggtttgtagcctgacttttcaagcagtgtggtggtagggagtccaaggaagttgagtggactgttttggacgtctttggaggaattggtgtggatgggt

SEQ ID NO: 939610 - DNA, 120 bp, Artificial Sequence
  ENSG00000260751_3 (sequence is synthesized)
aatgacttagtatttcattgaaatgttcatttctctcgagttatttctggcagaggatagctctagtagtccccttctcttttccaaacacctttacctttgtcctaatgaaagtactta

SEQ ID NO: 939611 - DNA, 89 bp, Artificial Sequence
  ENSG00000260751_4 (sequence is synthesized)
ttctctagctaaattaacatgtcatcattcacagttggaaaactgtggctgtgctttttcatttttagagaaatgtttttaaaatacag

SEQ ID NO: 939612 - DNA, 65 bp, Artificial Sequence
  ENSG00000260751_5 (sequence is synthesized)
aaccctgtctctactgaaaatacaaatagaggagaatcgcttgaaagtgggaggcggaggttgca

SEQ ID NO: 939613 - DNA, 120 bp, Artificial Sequence
  ENSG00000260751_6 (sequence is synthesized)
agaaaagaaagagaataactgtcacaaacccatatatccatcactgagaagtggcaattgtaaatattttgtaatttgctttaatttttttaaataaaagaaataaagtttattcacagc

SEQ ID NO: 939614 - DNA, 73 bp, Artificial Sequence
  ENSG00000260756_0 (sequence is synthesized)
gaagcaggagaatcgcttgaacccgggaaagggagattgcagtaaaccaagatcgtaccaccacactccagct

SEQ ID NO: 939615 - DNA, 120 bp, Artificial Sequence
  ENSG00000260756_1 (sequence is synthesized)
tcatgtgacaattgtatgattccacttatatgaggtacttagaatagttaaattcacagagacagaaagtagaacagtggttatcagaggccaaggggatggaggagctgctcacggcga

SEQ ID NO: 939616 - DNA, 120 bp, Artificial Sequence
  ENSG00000260756_2 (sequence is synthesized)
tgctcacggcgagttattgcttcaagggtacagagtttcagtttgggatgataaaaaattctggagctggttgggagtgatgattgcacaacagtgtgaatgtacttaatgccactgaac

SEQ ID NO: 939617 - DNA, 120 bp, Artificial Sequence
  ENSG00000260756_3 (sequence is synthesized)
atggttaaacagtaaattttatgtcaaatatattttaccataataacatttttaaaaattgatgggaaatattattttgcaatggaatagttgcaagttgtttgttaattgttcaaacca

SEQ ID NO: 939618 - DNA, 120 bp, Artificial Sequence
  ENSG00000260756_4 (sequence is synthesized)
ccttggtacttgctcatttggttgagggagattagagggaagaaattgcaaaagatgttttgctagtgtgtactacaagatttcagatgacttgttgcctggtatagtagctgcacttct

SEQ ID NO: 939619 - DNA, 120 bp, Artificial Sequence
  ENSG00000260756_5 (sequence is synthesized)
tgggagggtaggagtctaacttcagtgggtatcttgctccaagctgcaaaactgcctcctgtcttagagatatgaaacatctgtttcttctttggataaagccaactagcaaacaaagac

SEQ ID NO: 939620 - DNA, 120 bp, Artificial Sequence
  ENSG00000260756_6 (sequence is synthesized)
cacccccaattaacagatacatttaagatggactatatgtgatgaatgatgctgtcaactcctcttacttggggacaagttatcatttatcataagaatatgtatgtcatagattgcatc

SEQ ID NO: 939621 - DNA, 120 bp, Artificial Sequence
  ENSG00000260756_7 (sequence is synthesized)
tatcatttatcataagaatatgtatgtcatagattgcatctgcttgacatcacaaaatataccaggaaaaaagggtgaaatgtatccctttcttggttgggtgcggtggctcatgcctgt

SEQ ID NO: 939622 - DNA, 76 bp, Artificial Sequence
  ENSG00000260756_8 (sequence is synthesized)
acccccctgtcccctgcactcccagctccttgggaggctgaggtaggaggatggattgagcctgagaggtcaagac

SEQ ID NO: 939623 - DNA, 120 bp, Artificial Sequence
  ENSG00000260756_9 (sequence is synthesized)
gtgtgatggcatgtcccctgcactcccagctccttgggaggctgaggtaggaggatggattgagcctgagaggtcaagactgcggtgagctatgtgattgtaccactgcattccagcctg

SEQ ID NO: 939624 - DNA, 120 bp, Artificial Sequence
  ENSG00000260757_0 (sequence is synthesized)
attttcccataactagtgcctatgtatgtgcaaaaaaaccccactgttttgttttttaaacagggtcttgttctgtcatccaggctgcagtgtgggggtgcaatcatagctcactgcaga

SEQ ID NO: 939625 - DNA, 77 bp, Artificial Sequence
  ENSG00000260757_1 (sequence is synthesized)
cctgagtagaaatttttattgtagagatggggtcttgttatattgcccaacctggtctccaactcctggctcaaaca

SEQ ID NO: 939626 - DNA, 120 bp, Artificial Sequence
  ENSG00000260757_2 (sequence is synthesized)
gatggggtcttgttatattgcccaacctggtctccaactcctggctcaaacaaccctcccaccttggcctctcaaagctgaggtgggagtattgcttgaggccaagagttcgagaccagc

SEQ ID NO: 939627 - DNA, 90 bp, Artificial Sequence
  ENSG00000260757_3 (sequence is synthesized)
gcaacatagtgagaccttgtctctaccaaaaacaaaacaaaacaaaaaacaaagccaggcatgtgacgtgtgcctgtagttccagctact

SEQ ID NO: 939628 - DNA, 120 bp, Artificial Sequence
  ENSG00000260757_4 (sequence is synthesized)
ttgagagaccctgtctctacaaaaaattaaaataaaaacaatagtaacaggcactgagccctgggccctccccactggcctttgcagtttgcactgatgcagtactcaaacctcctgaag

SEQ ID NO: 939629 - DNA, 120 bp, Artificial Sequence
  ENSG00000260757_5 (sequence is synthesized)
atccacttcaccttcacccaattccggaccagcccgagccagcagagcctggtggatcccatcgtccaactgaaaggcctgacgttcacggccacgggcatcctgacagtggtgtaagca

SEQ ID NO: 939630 - DNA, 120 bp, Artificial Sequence
  ENSG00000260757_6 (sequence is synthesized)
accccgaccccagcctggcgatgtgactgccacccccacttcctaaccctgggtcagcacagctcttctcagaggctgagggaggctccagggaaaggggctaccaaggggcatgtcggg

SEQ ID NO: 939631 - DNA, 120 bp, Artificial Sequence
  ENSG00000260757_7 (sequence is synthesized)
cctcccctttgcctggttctgcagagcctggaccccaggacccctccccaccccacagcagccagaggcccgggctttggctcagacacatcaggctcccatcctggctccccgtgagct

SEQ ID NO: 939632 - DNA, 120 bp, Artificial Sequence
  ENSG00000260757_8 (sequence is synthesized)
actctgggtgtaaccctggggtgatgggctctaagtctcagtaactctcagatgaagataagctcacagcttaggattgagatcatgtgtgtggggtgctcagcccggggcacgtaggag

SEQ ID NO: 939633 - DNA, 120 bp, Artificial Sequence
  ENSG00000260757_9 (sequence is synthesized)
gtgtcggataaatgcctgaggttttatcagagaatggagtagtcagggactcaggaattgtcacccaaggtcgtcctggtgcctttctccccactcacctcctctcccgcatccctcacc

SEQ ID NO: 939634 - DNA, 120 bp, Artificial Sequence
  ENSG00000260757_10 (sequence is synthesized)
cctgcgcaccccctgtgctacccaggcactcaccgtgggcctgccccgtgcacatgcagtctattcctaaaacgatgtaggaggtgggacccccgagaaaggcatgtggttcttgtagga

SEQ ID NO: 939635 - DNA, 120 bp, Artificial Sequence
  ENSG00000260757_11 (sequence is synthesized)
aggagctgggctgacggtcggggatccttggcttcctgcacacacccctgggagcagccctggggtggtgctagaatttggcttaaacaagagatgctcccaccaaacgcaccctcttta

SEQ ID NO: 939636 - DNA, 120 bp, Artificial Sequence
  ENSG00000260757_12 (sequence is synthesized)
cttctgggaggctcttctgccttgaacggtggccccttgtgactcagcaacccagaggaaggcctccgtctgtcctgtaagtttaaagtcacacgggagtgtcccattctggagtctcca

SEQ ID NO: 939637 - DNA, 120 bp, Artificial Sequence
  ENSG00000260757_13 (sequence is synthesized)
cctcacccctcaaagttcttccagtggtggggcctggggaaaaaaatgaatgaggcaggggtgaccgagtggttctcaccaactccagtcctgctctcatgcccagactgcaggaaattt

SEQ ID NO: 939638 - DNA, 120 bp, Artificial Sequence
  ENSG00000260755_0 (sequence is synthesized)
taaggtatttttaaatggttataatcatatattttacatgtactgtcaaaaagcttaaataaaagctgaaataaatgctaattgaaagaaaatgtatatgtgcaacaaaaaagtcagcga

SEQ ID NO: 939639 - DNA, 120 bp, Artificial Sequence
  ENSG00000260755_1 (sequence is synthesized)
gaggtagagcagctgagcagctctgcggtgtactgacttcatgtccccatggaactccagtctcacagcaaggatgaggtgagcccaacatatctggaatgtcactgccctgggtggccc

SEQ ID NO: 939640 - DNA, 120 bp, Artificial Sequence
  ENSG00000260755_2 (sequence is synthesized)
atgcccctcccagccatgaccccccagtgctctaaggacaaggccctgttcagcccttgtgcaagctggcttcagccgtttcaggtgtggtctctaggctgggagattttgcgacctgcc

SEQ ID NO: 939641 - DNA, 120 bp, Artificial Sequence
  ENSG00000260755_3 (sequence is synthesized)
ctggccactgctgatgcgtccagcctcctctccaaggtggaaggcagggaggacagcaggctctcttagacccatacactccacgttaggaaacacggagtttgaaaaataaaaacacgt

SEQ ID NO: 939642 - DNA, 120 bp, Artificial Sequence
  ENSG00000260759_0 (sequence is synthesized)
agttggaggggaggacagtaaccagggaaggttagcgccagcagggctgcacgccacaggctggggctgggggagagggaaggtacagagagcggcaaactgtcgaactccttcctcttc

SEQ ID NO: 939643 - DNA, 120 bp, Artificial Sequence
  ENSG00000260759_1 (sequence is synthesized)
atgcttcacggttccccagccacgtgtttggtgtaaatgaggagggccggaggggccagcctgcagggtgggttccagttgccctgaaaggcagggagcaggcagagatagagtgcaggg

SEQ ID NO: 939644 - DNA, 120 bp, Artificial Sequence
  ENSG00000260759_2 (sequence is synthesized)
catggcattggaggcccagtccaccctgttcaccctcctctcccacatcaggctggcactctgcacatttagggtgtggccaagcctcagccagcagaagcaagtctggtcttgctgacc

SEQ ID NO: 939645 - DNA, 120 bp, Artificial Sequence
  ENSG00000260759_3 (sequence is synthesized)
agcctggccggctggcggagaaaaggagaagacggtgtctctagggagatcccgggcctgagcggcagcgtctgtcaaatgtgtttggcttctgtctcttgagtagcccatctgaaatga

SEQ ID NO: 939646 - DNA, 120 bp, Artificial Sequence
  ENSG00000260759_4 (sequence is synthesized)
ggaaagggccaaggggccccggggctcaggtccaccacccacactcccattctcacagccctgctggaccaaggcatctctcaagtgggccgcactggccgtttttcttggttgcttgcc

SEQ ID NO: 939647 - DNA, 120 bp, Artificial Sequence
  ENSG00000260759_5 (sequence is synthesized)
tgactccaatctactctccacaaagcagttagaattagaaaacagacgaaagccatgtctgccgccagccctgctgtgctgcctgtggccagccacccgccccagaccccacagccatgg

SEQ ID NO: 939648 - DNA, 120 bp, Artificial Sequence
  ENSG00000260759_6 (sequence is synthesized)
ctggtcacctgccttaggctccacagccctgctggctggtcacctgcctcagaacccacagtcagttcctgcctcctgcagatgtcgtctagggctcagcaaaaagacctctcattttcc

SEQ ID NO: 939649 - DNA, 120 bp, Artificial Sequence
  ENSG00000260759_7 (sequence is synthesized)
tatctcacagtgcctccctgccacgctctggctctgtatcctcttaatttatttctagtccttatcataaagtatgagcctttgtctgttcacaatctgttagaggctctgtgtttttca

SEQ ID NO: 939650 - DNA, 120 bp, Artificial Sequence
  ENSG00000260759_8 (sequence is synthesized)
tccacacttagcgtacatgtgttgcagaaggtgcaaattagtcttgtagaagaaaataaaatcttgggaccccgaaactcagtatgccaaagggaaagttaagcttgtgaagtgagtcac

SEQ ID NO: 939651 - DNA, 120 bp, Artificial Sequence
  ENSG00000260759_9 (sequence is synthesized)
acaataccacctttcttttgttcccagacagacagctacaacttcacgaccctgtgtcatagcctcatccatcagccaggttctcacatggcctctgtcacgaattgctcacaaggaagt

SEQ ID NO: 939652 - DNA, 120 bp, Artificial Sequence
  ENSG00000260759_10 (sequence is synthesized)
gtagccatttgtcttagtgcctccactccctccctcccttccttcctgctgtttttttttcccctttaaatactgagtctccacaaccttctttggaaagctcggattacagatactcct

SEQ ID NO: 939653 - DNA, 120 bp, Artificial Sequence
  ENSG00000260759_11 (sequence is synthesized)
ctaactcatgtttttcctgggcatatccccaaactctggttaaataaacctctatcgattgagactcctgcctcagtcacatttggttagcagactctggcttaaaagttttggcgactt

SEQ ID NO: 939654 - DNA, 120 bp, Artificial Sequence
  ENSG00000260759_12 (sequence is synthesized)
tgacttttatatgctgaaactacagtggccagtcagattttgggggctcctggcatttctggctctttagcctaatcttttccatactgacagctctctctctctctctctctctctcag

SEQ ID NO: 939655 - DNA, 120 bp, Artificial Sequence
  ENSG00000260759_13 (sequence is synthesized)
accccgctgacaaacttgttgctaccaaacacagcactctagtttctctttctctaaattattttcaggattcatttcgccactgaactttatttttactgaatcacatgtcttttgtcg

SEQ ID NO: 939656 - DNA, 120 bp, Artificial Sequence
  ENSG00000260759_14 (sequence is synthesized)
acaactgatgtctaccgaaggcacaggtgctccctggttcaggcatggatgtctaatatctcatggaccctgatgttgtgctccacattggtttctgattttgttctgtcactccccaaa

SEQ ID NO: 939657 - DNA, 120 bp, Artificial Sequence
  ENSG00000260759_15 (sequence is synthesized)
ccatcaagggaaggtgaaagagccacggttcctgagccacaggccctgagctggtatttagctctctgtttgcacagctttgatgacagtggcttagacaggccacctcactatcttgac

SEQ ID NO: 939658 - DNA, 120 bp, Artificial Sequence
  ENSG00000260759_16 (sequence is synthesized)
tggcaaaacaggagcagggggagcccagcactgtcttctctcttggagggttttgcagggatcaaatgagataatgtctgggacagtacttttgtaaaaggcaaatagttaacactaaga

SEQ ID NO: 939659 - DNA, 120 bp, Artificial Sequence
  ENSG00000260759_17 (sequence is synthesized)
caggtccagtcttttataatttaaagtagtgtgtaaatggtatgtcctcagacgtttgcctgagtgaacaaatctaagtgttttcttttgcgcacttaataaagctcacctttatgtcag

SEQ ID NO: 939660 - DNA, 120 bp, Artificial Sequence
  ENSG00000260759_18 (sequence is synthesized)
tcgtgatataactgcctattttttttctgccagggtatgttacaacatcacacttccaagcaaggcccaggctggcccagatgggacacgaagcccccagtaaagatcaggagcacttct

SEQ ID NO: 939661 - DNA, 120 bp, Artificial Sequence
  ENSG00000260759_19 (sequence is synthesized)
gggggtcccacctgagggatctggtgcataaagtcaggcttggttgtaggcccccaacaagacataaaacctgtacaggtcaagaagtgacgcatctctggcctgtgagcccctcacgtg

SEQ ID NO: 939662 - DNA, 120 bp, Artificial Sequence
  ENSG00000260759_20 (sequence is synthesized)
ctgggtggcactgaggtgatgatgacactatttctaaaagacagacataatgccagtgacttcagtcattttcctcattttatgtggctatttttaaaagctgtcctccagaaacaaaag

SEQ ID NO: 939663 - DNA, 120 bp, Artificial Sequence
  ENSG00000260759_21 (sequence is synthesized)
aatccctgagataaaatttcccaaagcaaaatgctccacctgactggggtccgacctaggggtgggagagctggatagtcctgggacacagagttaggtctgtgctgttaaaggcagaat

SEQ ID NO: 939664 - DNA, 120 bp, Artificial Sequence
  ENSG00000260759_22 (sequence is synthesized)
taatattccttgtactgaactgaaaaggacagatttaaaaatcgtatcttttgtacttccatctaagctactttagggagttttctggctatgaagcacctgaatcttgagctgtaattc

SEQ ID NO: 939665 - DNA, 120 bp, Artificial Sequence
  ENSG00000260759_23 (sequence is synthesized)
agaaataaagcgtatctgcccttctgtccacctttctttccatccttctggaaaaaagcaaaaggaaaattcttaacttactaaagagagcattaatgcaaacgtgagtctgaatgacaa

SEQ ID NO: 939666 - DNA, 120 bp, Artificial Sequence
  ENSG00000260759_24 (sequence is synthesized)
tcagatcaatagccaatttcagaaaaagccttcagcatttctcaaaagagaggcagaggcaaggcacggtggtgctgtgactgctttggtggataggtgctggcactattttcactccag

SEQ ID NO: 939667 - DNA, 120 bp, Artificial Sequence
  ENSG00000260759_25 (sequence is synthesized)
gaaagctgtgcctcccctttgggtggggacgcatgaggggcccttgtgctaagccacaaaatatgccagcccctcgcaggcagaccccaggcagcacagatgtgggatttgtttcccaca

SEQ ID NO: 939668 - DNA, 120 bp, Artificial Sequence
  ENSG00000260759_26 (sequence is synthesized)
gcattttaagacagtttgaattggttagaggcattttaaaatgggaaactttcatacaaaaaaattgtttctggcttctctggaaaagactagaaggccttgggcgtgtgtgtccctgtg

SEQ ID NO: 939669 - DNA, 120 bp, Artificial Sequence
  ENSG00000260759_27 (sequence is synthesized)
gtgagaagaggctggttctgaggaacgggccccagagtgccctgaggccgtgtcctcttttccttagagaggctgacggtgacagcttgggccattttatgtctcctgcctggtccctgt

SEQ ID NO: 939670 - DNA, 120 bp, Artificial Sequence
  ENSG00000260759_28 (sequence is synthesized)
cgttatttgaatttgtgacccttgctgctgagatcctccccaagagaagggtggatgcaacgaggttattgcagattttaaaagttgaactttctcggtggagagcccagacaacaccct

SEQ ID NO: 939671 - DNA, 120 bp, Artificial Sequence
  ENSG00000260759_29 (sequence is synthesized)
tggtagctgggaagccacatgctggatgagctacaaggggctcaaaacctagactttataaaactgacttttctttgtcacttttcggtgtttaatcagatgattaaagtccttgaaaca

SEQ ID NO: 939672 - DNA, 120 bp, Artificial Sequence
  ENSG00000272913_0 (sequence is synthesized)
ggcacatagtctggcacgcgagggccccggcggggctgttagaggctcgtggtcatcctgaccatgtggtccagggcgccccggtcctctgggccccgcatggagcgcggcgtcagcgcg

SEQ ID NO: 939673 - DNA, 120 bp, Artificial Sequence
  ENSG00000272913_1 (sequence is synthesized)
gacagctcgcagtccctgagcctctgcaggcagttcttggagccctcgggcttttgcggcctctcggggagcggcggcagctcaagctggtactttttccccaacagctcccggcagggg

SEQ ID NO: 939674 - DNA, 120 bp, Artificial Sequence
  ENSG00000272913_2 (sequence is synthesized)
cgctccaggagcctctgcatgaggcggacgtataagtggccactcctctggcgacatcccacggcgggggccctcgcgtggacacccgcccctgctagctcagggctccgatgcgatccg

SEQ ID NO: 939675 - DNA, 120 bp, Artificial Sequence
  ENSG00000272913_3 (sequence is synthesized)
ttcgaccctgcatggcggctttcaacccgaacgcgtccctccttcaagatcaagaccctgaacgtagttcaacaagtagttggtgatgatagcgtgccctgactgggccaggatagcctc

SEQ ID NO: 939676 - DNA, 120 bp, Artificial Sequence
  ENSG00000272913_4 (sequence is synthesized)
tttagtaaaacagccacgaaagtcatgaaacagatgctcagctcctttcttcattttcactttaattcggtgatgcctctgtgtctgtctgacgacatctctcctggggtctgtgattct

SEQ ID NO: 939677 - DNA, 120 bp, Artificial Sequence
  ENSG00000272913_5 (sequence is synthesized)
gctgatggtcttcagtgcctactgagaagggttcctggacatcatcaggtatgaaaacctcaaagctctcggtcctcaacgtgagaaccctgggccagcggcatcagcctcaccaggaaa

SEQ ID NO: 939678 - DNA, 120 bp, Artificial Sequence
  ENSG00000272913_6 (sequence is synthesized)
ggcctattcaaagaaagactccaggggcagggcctggcagcctgtgtttccaccagatctgtgttaaagctcaaatgaaccagcccacgtgatgctgaccaggaagcacaaggctgagag

SEQ ID NO: 939679 - DNA, 120 bp, Artificial Sequence
  ENSG00000272913_7 (sequence is synthesized)
ccagtgtccaaggcaacggtgcccatggggccagaggcagctcctgcctgtgcagctgtatttagggctgcgttcccctccctgtcctgccagttgacgtcagtgtggggttactcagct

SEQ ID NO: 939680 - DNA, 120 bp, Artificial Sequence
  ENSG00000272913_8 (sequence is synthesized)
aaggccaccacggtatatccacaaagccgtggtagcaggcgacattaaggctggtccagccattgtggtcagtctcctgcgccttctcaacgctcacccctcgccgcaccagcgtccgca

SEQ ID NO: 939681 - DNA, 120 bp, Artificial Sequence
  ENSG00000272913_9 (sequence is synthesized)
gcagccccatgcctcctggacgccctcctccgggacgctctccaagccctcgacgccgtgctcctcctcgtcctggaaagggtacagagtcgtcccaggctatgctgcaggtgtggggcc

SEQ ID NO: 939682 - DNA, 120 bp, Artificial Sequence
  ENSG00000272913_10 (sequence is synthesized)
ctggaactctttgtagtcagcgcggtcctcctcgacctgtgcgcctaggagtggggacggcggtggcggggtcatgcagcgctcccagccaccctgcggccgggtcccagccagcagcac

SEQ ID NO: 939683 - DNA, 120 bp, Artificial Sequence
  ENSG00000272913_11 (sequence is synthesized)
catgccagcggccggaggcgtgggctgggggccggggcaccgtcccggaaaaccgggcgcgccccaaggtccctgcttctcgcttccgcgtccccagagaagccgtagctcccgccccca

SEQ ID NO: 939684 - DNA, 120 bp, Artificial Sequence
  ENSG00000272913_12 (sequence is synthesized)
gcccggcagaaacctcctttctttacattattaagtttgttttcattttaattttcttaggacattgataaaatcactttcggatttttgagattaaaaattaaataattttcatcttta

SEQ ID NO: 939685 - DNA, 120 bp, Artificial Sequence
  ENSG00000220575_0 (sequence is synthesized)
ggcctggggatatagcctgtacagatgcaagtcgagtatttttaaggattgctgagatacccacctccacagcttcggatatgggtgagacgctattggtcttcctggagcccacgcgga

SEQ ID NO: 939686 - DNA, 120 bp, Artificial Sequence
  ENSG00000220575_1 (sequence is synthesized)
acttggcagccttgtagatcttccagtacacgaagagcaccacacagagcggcaggtagaaggcgcctacggtggagaacacggcgtaggaaggctcgcggcttacctggcactcctcgc

SEQ ID NO: 939687 - DNA, 120 bp, Artificial Sequence
  ENSG00000220575_2 (sequence is synthesized)
tgccctcagagtacgtctctccccagccaaaaagcagcggggccagagagatgacagcggagagtgcccaggtgagcgcgatcatgacgttggagacgcacttgcgggtgcggagcgtgt

SEQ ID NO: 939688 - DNA, 120 bp, Artificial Sequence
  ENSG00000220575_3 (sequence is synthesized)
attccatgtggcgcgtgatggaccagtagcggtccagggctatggccgtcacgttccagatgctggccgtgcagcaaagcacgtcgcacgcgatccaaagctggcacagcctccgaccta

SEQ ID NO: 939689 - DNA, 120 bp, Artificial Sequence
  ENSG00000220575_4 (sequence is synthesized)
gctgccagcggcgcccggacagctcgtgcaccaggctcagcggcatgaccagcgcggccaccaggacatccgagacggccatggatgccaccaggttgtggggcacgcggtggaaggtgc

SEQ ID NO: 939690 - DNA, 120 bp, Artificial Sequence
  ENSG00000220575_5 (sequence is synthesized)
gtacacggaggatggtcgccagcaccagcaggttccaggcgaacgtcgccgccaccagaaagcccagcaaggcagccggctgcagccttaactccgtgctagggaagccagttttggggg

SEQ ID NO: 939691 - DNA, 120 bp, Artificial Sequence
  ENSG00000220575_6 (sequence is synthesized)
aacctgctttctgggacctgccttctgtccctgttgcccccgccaccccttcggaggctgcagctccggagagcgaatgctggcgcgcccaccgagacctgccttatccaagtggagatc

SEQ ID NO: 939692 - DNA, 120 bp, Artificial Sequence
  ENSG00000220575_7 (sequence is synthesized)
tagccctacagtaaaacaagtatcaggagaatgcactgagaaaagagaaagtcctccactggaacctagaggacgggacaacatcattaaataccggattattcacagggctgtttcaaa

SEQ ID NO: 939693 - DNA, 120 bp, Artificial Sequence
  ENSG00000220575_8 (sequence is synthesized)
caccacttaaaaacagctgatggtgactgcctgcatgcagagcaactgtgcatggccccaatctggaagcaagcttgtgcttctttaaggcaaatcaccttcttgaggtcatggaactaa

SEQ ID NO: 939694 - DNA, 120 bp, Artificial Sequence
  ENSG00000220575_9 (sequence is synthesized)
tgggaatgagatgtaaactatgaatcctcttctttggaaaaagttctgcatctagtctcagggcctgttatctggaggaatggatgaactgtgttgcccacaggcgggcctcaatggatc

SEQ ID NO: 939695 - DNA, 120 bp, Artificial Sequence
  ENSG00000220575_10 (sequence is synthesized)
tctatgaatcttgaaaggcattatgggcttgtgattatattccctactgattccccaggccacagctgtctgtattgatagctaagtgagcagcagaatagttaataaggacaaagccaa

SEQ ID NO: 939696 - DNA, 120 bp, Artificial Sequence
  ENSG00000220575_11 (sequence is synthesized)
ggatgactgaggataatttgtgaaaaatagagtgtcataaatttagggactgaatagaatattcccacaaaggagagatccaatggagcatttccagaagggacaaaccctgttcagaaa

SEQ ID NO: 939697 - DNA, 120 bp, Artificial Sequence
  ENSG00000220575_12 (sequence is synthesized)
atctcttaaaaatacacaaataaaaaatcataatatttcagcttcatcttaaagcatagccccaattttatcttgaaaaacactgaaaaggaaaagaatctgaaaaggtataaaactccc

SEQ ID NO: 939698 - DNA, 120 bp, Artificial Sequence
  ENSG00000220575_13 (sequence is synthesized)
gtctgccatatggtacctctgaaatggcagtattgggaaatataccttcctgggttgtcacctcttatgggttaaactgtgtctctccttcccccctcccttaccccctgccagatttat

SEQ ID NO: 939699 - DNA, 120 bp, Artificial Sequence
  ENSG00000220575_14 (sequence is synthesized)
atatggaagtcctaacccctagaacctcatagtgtgactatatttagaaataagatctttaaagggatgattaagttaaaatgaggccataggatagggcctcattcaatctgactgaca

SEQ ID NO: 939700 - DNA, 120 bp, Artificial Sequence
  ENSG00000220575_15 (sequence is synthesized)
tccttatgaaaagaggaaatttagacatgcaaagagacaccaaggatgtgtgtgtgcataggatagaccacgtgagaataaagcaagaaggtggccatctacaagccaaggagagagaca

SEQ ID NO: 939701 - DNA, 120 bp, Artificial Sequence
  ENSG00000220575_16 (sequence is synthesized)
ttagaagataccagtattggaagattagaagatatcaagattggatttccagctgccagaactaggaaaaaataaatttctagtatgagccactcagtctgtggtattttgttatggcag

SEQ ID NO: 939702 - DNA, 120 bp, Artificial Sequence
  ENSG00000220575_17 (sequence is synthesized)
ccctagcaagctaatataccatccgacaaaagatactagcaaaagatacaaccacataactgaacgaggtgctatactggagaagagggaattatagacatataaacaaatcatgggaca

SEQ ID NO: 939703 - DNA, 120 bp, Artificial Sequence
  ENSG00000220575_18 (sequence is synthesized)
tctactaaaacctttccaaaaggtagtttgcagccatctagcaatcattcgagtgcagactcagttgtctattgaggttacttacggtttgtaatcaagtcatgtcactggcttatagaa

SEQ ID NO: 939704 - DNA, 120 bp, Artificial Sequence
  ENSG00000220575_19 (sequence is synthesized)
agaaaaatacttattttagatttttctataatgggaaggtatgaatctatttcattcaagtaggagctgattttttggtttgtttttgcttctgttttttgagacagagtctcactctgt

SEQ ID NO: 939705 - DNA, 86 bp, Artificial Sequence
  ENSG00000220575_20 (sequence is synthesized)
ggcacaatcttggctcactgcaacttccatcttccgggttcaagcgattcccagctaagttttttgtatttgtagtagagatgggg

SEQ ID NO: 939706 - DNA, 120 bp, Artificial Sequence
  ENSG00000220575_21 (sequence is synthesized)
ggctggtctcgaactcctgacctcaattgatccatccccatcagcctcccaaattgttggaattacaggcctaagccaccacacccggccaagaccaacgaattttaatgtaacagcata

SEQ ID NO: 939707 - DNA, 120 bp, Artificial Sequence
  ENSG00000220575_22 (sequence is synthesized)
ataaacatgcatgatacaatttcagattccacatcacaacaaatctttaaggtgctaccactcattgagttttaatatagcatcacagaaaaaatatccataattatctgaaaatagtat

SEQ ID NO: 939708 - DNA, 120 bp, Artificial Sequence
  ENSG00000220575_23 (sequence is synthesized)
taaagtactctattgtctgctgtatatctgtatgaaagtggatgttcttcacaatcttaaactaaaataacatatcccaacagatggaatgtagaaacatatgatgttctagctgtcttg

SEQ ID NO: 939709 - DNA, 120 bp, Artificial Sequence
  ENSG00000220575_24 (sequence is synthesized)
ctgtcttgaagagatttgcaaaaatgttaatgctattcagaaatattttatgaaaaataattatttttcataatgaggtatcacttatatagacatgtaatgggtttattttatttttaa

SEQ ID NO: 939710 - DNA, 120 bp, Artificial Sequence
  ENSG00000220575_25 (sequence is synthesized)
agtaaatacctctcatagagagctagggaattctctttcctggatttttaatttccttccgcagctttactcatgttcaggaaggcagacaagtggtcctcagtcacacctacaacctaa

SEQ ID NO: 939711 - DNA, 120 bp, Artificial Sequence
  ENSG00000220575_26 (sequence is synthesized)
tagggctgtgggggatagacccataaagtaacaccctaaggcagtggaagcagataacaaatgcaggctccgggactagtgcagtcaacatcttcagtcttacgtcaggacgggaggatg

SEQ ID NO: 939712 - DNA, 120 bp, Artificial Sequence
  ENSG00000220575_27 (sequence is synthesized)
ccacagaatgacagtaacctaggtgataccatatttttaataaaccggctgctgtaatttgcaaagaaaaagaatagactaggatgaaatgctaacctgcatcacctgactcatggcagt

SEQ ID NO: 939713 - DNA, 120 bp, Artificial Sequence
  ENSG00000220575_28 (sequence is synthesized)
cttcttatcaaatcatgctcccatccctgcctcccctcctcctggaacacccccattctaagtgctggaagctgctagttttttccagtgtactgaatcagcgtaccccagataccagct

SEQ ID NO: 939714 - DNA, 120 bp, Artificial Sequence
  ENSG00000220575_29 (sequence is synthesized)
tattcagatgttctaaagggtgttatagatccatagaatttgggggccaaaggggaccctgcagaatgacgcagtctgaactcctcgtgttctgtatatttaacaaacaacccattagag

SEQ ID NO: 939715 - DNA, 120 bp, Artificial Sequence
  ENSG00000220575_30 (sequence is synthesized)
aaggaacatgatatgattagccctgtgagagggaacatgtcagagcaaagtacatctctgatgctttcttccactctcccagtttactccccccactcccaaacacaaaaagttccattt

SEQ ID NO: 939716 - DNA, 120 bp, Artificial Sequence
  ENSG00000272911_0 (sequence is synthesized)
gcttcacaggaggccctgttttgagaggtgcatgaacatgtggctcacgttcaacaacaaacactcaggagaggggacagaatgttcaggacacaccgaatttccaagacgtacagatct

SEQ ID NO: 939717 - DNA, 120 bp, Artificial Sequence
  ENSG00000272911_1 (sequence is synthesized)
ggcgagcagcggtcagcagctactgagagctcaacttcccctctagagacaggctctgccgctcaagtccacctgggtcttggctctctgaatcctgtccgagggtggcgaacttgaggc

SEQ ID NO: 939718 - DNA, 120 bp, Artificial Sequence
  ENSG00000180139_0 (sequence is synthesized)
cccttcccaggaaaagggcgtttgttgcctaccgatgaaggatggctggaacagggtctctgggcagcggaaacgttcatttccgatggtgatcacttgcccatcaggcaactcgtaact

SEQ ID NO: 939719 - DNA, 120 bp, Artificial Sequence
  ENSG00000180139_1 (sequence is synthesized)
cttctcaagggaggatgaggatgcggcagtggccatctcattttcaaagtccagagctacataacacagtttctccttgatgtcccggacaatctcacgctcagctgtcaaccagataca

SEQ ID NO: 939720 - DNA, 120 bp, Artificial Sequence
  ENSG00000180139_2 (sequence is synthesized)
aacattgtggcaaacattagggtctgcacaggtggcaaagattcacctgccctactgcagtctctccctcaagacatgtgccatcaaaaaatgtttaaccaggatatcttatgctgaatc

SEQ ID NO: 939721 - DNA, 120 bp, Artificial Sequence
  ENSG00000180139_3 (sequence is synthesized)
aattttcaaaaagtctgagatcctgttgcctgggccagtggatagcaggttaaacctttggcacatttctcaccctccaggaaagaggtggtgctgtctcaggaccaggcctagtccaga

SEQ ID NO: 939722 - DNA, 120 bp, Artificial Sequence
  ENSG00000180139_4 (sequence is synthesized)
aggtttcagcggtgcatactgaacgagatacggaagaagtgggcagggagagacctttcagacttctgctctctgaagttctaggctattaattatatctgaggctctaggaacctttta

SEQ ID NO: 939723 - DNA, 120 bp, Artificial Sequence
  ENSG00000180139_5 (sequence is synthesized)
gaggcatcttgggattctttgtagggagcagaggaggaatgcaattattcaacttcatattgcaagtggagactttaacattggcagggttcaagtctcaagcctcaaatttggagcata

SEQ ID NO: 939724 - DNA, 120 bp, Artificial Sequence
  ENSG00000180139_6 (sequence is synthesized)
aaataagcctcaggcatgttcagaaacctaaatgtttggacaataccaaattgctaaggggaggacaggtagctggagccaccagcactgaggacatacaatgtttctggcaatgctgac

SEQ ID NO: 939725 - DNA, 120 bp, Artificial Sequence
  ENSG00000180139_7 (sequence is synthesized)
ggagtcaggggatgaattactgatagatgactgggaggagggtgcttaggcactgcagttgagtggctcacaaggagctaaaatttcactaatgcgtattcagtgggtggttctggtttg

SEQ ID NO: 939726 - DNA, 120 bp, Artificial Sequence
  ENSG00000180139_8 (sequence is synthesized)
cctgatttttgcctctgggcatggctgtttcagcctgagaggctgttccaagaatgttgctttactaggagctcatgccgcctggtggtaaatatgaagtacagcagtgcaacagaccag

SEQ ID NO: 939727 - DNA, 120 bp, Artificial Sequence
  ENSG00000180139_9 (sequence is synthesized)
ttttactccaaggaaaccctgtagagatgacagcaatggttggtgatttctgcctcaattatgaaagtgatctggtgttacagggccagagaagactaggggagttcgggttttctagac

SEQ ID NO: 939728 - DNA, 120 bp, Artificial Sequence
  ENSG00000180139_10 (sequence is synthesized)
caaacagacactcagtcctgggcctggaggtctctgcagtgaggtgctgccacagacagagccaccttaactcctcaggacaaccagtggcttccgacacacactatgcactggagggca

SEQ ID NO: 939729 - DNA, 120 bp, Artificial Sequence
  ENSG00000180139_11 (sequence is synthesized)
agcagctctcagcttgggagcaactgaggatggtgaacagcctgggcaaggagtgctctgaggctaagaccctgaacagcaggaaccgaagtgcagctccccacttcaggtaatgtgatt

SEQ ID NO: 939730 - DNA, 120 bp, Artificial Sequence
  ENSG00000180139_12 (sequence is synthesized)
ctaccctttgcctgagaaacatatccatcctaattgccatgtgctcagctggaccactagagggagccatcctgtaacgggtgaggtcaacctaacaaatggtatcagtcgagtattgat

SEQ ID NO: 939731 - DNA, 120 bp, Artificial Sequence
  ENSG00000180139_13 (sequence is synthesized)
cggaggccaacgcaagaagttaccagtagcctatttcagatttattaaaaaacacataggtaacgagtcagagctttggctaggaatgatttggaaaagaactgaaggcataattccaca

SEQ ID NO: 939732 - DNA, 120 bp, Artificial Sequence
  ENSG00000180139_14 (sequence is synthesized)
ggacattcacagttgtgtgctagagacagagaggagcaggaaagtgttttagaagcatttgcggtggacaatggaaggcccggcttcatcgtattcctgtttgctgatccacatctgctg

SEQ ID NO: 939733 - DNA, 120 bp, Artificial Sequence
  ENSG00000180139_15 (sequence is synthesized)
gaaggtggacagagaggccaggatggagccaccgatccagacagagtatttgcgctccggaggggcaatgatctgtcagtcaagatgaaaaagaatggtcattaatgtcatcattagtgc

SEQ ID NO: 939734 - DNA, 120 bp, Artificial Sequence
  ENSG00000180139_16 (sequence is synthesized)
agtcgttagtgcggtaggacagagcctggatgttctaccatggcctagtttcttgttcagcagggacacaggcttgtctgttagatgccaattgtgtcctaattgtgtcatgttcttggc

SEQ ID NO: 939735 - DNA, 120 bp, Artificial Sequence
  ENSG00000180139_17 (sequence is synthesized)
gatgccagcagactccatccctggaaaagagacacaggccatggtccttaagtggagagtaaaacccaggctagacatggaagaccagacttgaacatctggatgatcttgcagtggact

SEQ ID NO: 939736 - DNA, 120 bp, Artificial Sequence
  ENSG00000180139_18 (sequence is synthesized)
gaggctgggaagacataataatctaggaaccacctgtctgagagacaaaagggtcttgttatgctctatgtcttcctgcctgccttctaatgaggaaggcctgctgcagcatcctgaggt

SEQ ID NO: 939737 - DNA, 120 bp, Artificial Sequence
  ENSG00000180139_19 (sequence is synthesized)
gccaccagggaaccacctctgttcctaggacagtgtctcatgcatagtaggccctcagcatgcattgtctgggaaatgcataacaagaataaaatgagctagctagagaaaggcacacag

SEQ ID NO: 939738 - DNA, 120 bp, Artificial Sequence
  ENSG00000180139_20 (sequence is synthesized)
tagcggatccttttgtaccataacattttttggggtgggtgggcaggataactactctgtgttataattattttatgacagaaagtttgttatattgtattttcagttaaccaggatatc

SEQ ID NO: 939739 - DNA, 120 bp, Artificial Sequence
  ENSG00000180139_21 (sequence is synthesized)
gttaatagctaacaattattgaatgcttactctatgtcaagtattccacatgcgttcttccatttaatactgataacaatcatgtgatatagggtctattattatccccattttacaaat

SEQ ID NO: 939740 - DNA, 120 bp, Artificial Sequence
  ENSG00000180139_22 (sequence is synthesized)
atgtcattagaaacccatgctgtcctccagagttgcaaaagcctgtcataggaaaattttatagtcatagaaggatgttcccctcctttgagagtctggtttgctattgttagaggagag

SEQ ID NO: 939741 - DNA, 120 bp, Artificial Sequence
  ENSG00000180139_23 (sequence is synthesized)
aagaggattcagaaggctgccaaacctgtatgttgctggttttgtctcctctggagattggtgtgacgctcatgaaggggactcagccacctgtgcaaagcccagccctttattaagtca

SEQ ID NO: 939742 - DNA, 120 bp, Artificial Sequence
  ENSG00000263317_0 (sequence is synthesized)
ctttcagttcccacatatatggattgtgggcaatcagaagctcaaagtggaagctctgaagatgggatcctttctgcaagctgctgtgatacgagctgctgtaaaaacggaggcctccag

SEQ ID NO: 939743 - DNA, 120 bp, Artificial Sequence
  ENSG00000263317_1 (sequence is synthesized)
tgggaagagacttctttggctcatctcatgttacatcttggagtgacctcaaaggccccatcccagaaggcacagccacaaaaaacgtggcctccaccagcatggatccctgaatgtaat

SEQ ID NO: 939744 - DNA, 120 bp, Artificial Sequence
  ENSG00000263316_0 (sequence is synthesized)
accacgcctcagggcatgctcttgcttcctcctgagggagaagtcttctatgtattcctgcaggattttagacatggattcatcaatgcgcagttgcagtactgtacatgggagaagtca

SEQ ID NO: 939745 - DNA, 120 bp, Artificial Sequence
  ENSG00000263316_1 (sequence is synthesized)
ggagtgatagttgagctaagagatagagacatccgtagagggattctttctgttgcaagtaatgaaaactcaactaaaaatggcttaagagaaagaaaaggaagatattgattcataata

SEQ ID NO: 939746 - DNA, 120 bp, Artificial Sequence
  ENSG00000263316_2 (sequence is synthesized)
agaggacaagccaagaaagaacatatgggacacaacaggtgcagaaggaaacaagtccagcctgaagaagtgggacaccaggactccagggagagacacactgagggcttccatcaccac

SEQ ID NO: 939747 - DNA, 120 bp, Artificial Sequence
  ENSG00000263316_3 (sequence is synthesized)
catccccactgccatcatgctaacttttaaatcaaggactcaatacccagagtctggcccagatttttcctttgtactttctttattttgaccacatgctgataaagttcctgctcattc

SEQ ID NO: 939748 - DNA, 120 bp, Artificial Sequence
  ENSG00000259437_0 (sequence is synthesized)
tgaattatgaatggatgttgcccagaaataattgcaaacattattgccccccatacatgtgtgtcctccgcggggctacagcaatagattttgttgctttaacactccagcctgggcaaa

SEQ ID NO: 939749 - DNA, 120 bp, Artificial Sequence
  ENSG00000259437_1 (sequence is synthesized)
cccacaccctctaagtcagaatgtgaaatggtgaggccaataagatttatttttcaaatcttcccaaggcttctagtgcccagcagactggtttgcaaaccagtcttctaaagcaatctt

SEQ ID NO: 939750 - DNA, 120 bp, Artificial Sequence
  ENSG00000259437_2 (sequence is synthesized)
ctttctatcattaaggagcccatgacacagaggtgttaagttcaaggtctcttgggtcagcttttggatccactgttccaaagggacaggttcttagggggctggcattttcttggagtg

SEQ ID NO: 939751 - DNA, 120 bp, Artificial Sequence
  ENSG00000259434_0 (sequence is synthesized)
ggcgagtgctgtttccgccccagacccggttcaaacgctgctgccgacgcgcactgtatagctgcataagctgctcgtagggcacgtccagcatctggtccaggcccacaccgcgaaaaa

SEQ ID NO: 939752 - DNA, 120 bp, Artificial Sequence
  ENSG00000259434_1 (sequence is synthesized)
aaggtttaccacagtggctcaaggaaaacggaaccagagtaagacagtttctacttggacttggggaaccagcaaactcattcacttacaatcaagaacaaaccgattaaattgaataaa

SEQ ID NO: 939753 - DNA, 120 bp, Artificial Sequence
  ENSG00000259434_2 (sequence is synthesized)
ggtcactcaaaggagccaagcccctttgtcaaatcaggagctccatcagccaatcaggaacccagatgccagcgtgggagtttgtcagtggaaataacattgcatgacttccaagtctgg

SEQ ID NO: 939754 - DNA, 120 bp, Artificial Sequence
  ENSG00000259434_3 (sequence is synthesized)
tttcttcatttgcaagatatcaacccaataggattgtgactgaaatcaaatgaggcacccaagtctaatatgagaaaaacatgagaaaaattccaggagggggacattctacaaaatacc

SEQ ID NO: 939755 - DNA, 120 bp, Artificial Sequence
  ENSG00000259434_4 (sequence is synthesized)
tgaccagtacatctcaaaattgtcacgatcatcaacaaggaaagattgagatactgtcatagccaagagacgccaaaggaaaaatgacaactaaatgtaatgtggtatcctggataagat

SEQ ID NO: 939756 - DNA, 120 bp, Artificial Sequence
  ENSG00000259434_5 (sequence is synthesized)
cctggaatggaatagaaaatgggcattgggtagaaactgaataaagtagagactttagttaataacagtatgttgatgttggtttaataattgtaacaaaggtaccatattaatgtaaga

SEQ ID NO: 939757 - DNA, 120 bp, Artificial Sequence
  ENSG00000259434_6 (sequence is synthesized)
taaaaccaaaaactaaagtctacttaaaaaaaaaatcacaggaggcaacatacataaaagcatatagttggtgctccataatgtaacctcttcttttctgggcagtgtggaaaaacaaac

SEQ ID NO: 939758 - DNA, 120 bp, Artificial Sequence
  ENSG00000259434_7 (sequence is synthesized)
tgttgttcatgtcttctgggatcttttgcccctttctaatccaaccagaaaggttctggggagaatgtaagtcatctctatattctcatctgcaggtagccaggggtgagaatagctaca

SEQ ID NO: 939759 - DNA, 120 bp, Artificial Sequence
  ENSG00000259434_8 (sequence is synthesized)
tttacttaagtttagtctgtggagtagtttctgctacagaatgattcttgttagaccctgtaagagttcttttggctcaggtccccagaaaataaatttacaaacccttaaatcagttca

SEQ ID NO: 939760 - DNA, 120 bp, Artificial Sequence
  ENSG00000259434_9 (sequence is synthesized)
acgtatcaggaacggccatataaatccattctcgttgtttgcaagaaactattgtacgttaaaatatttaagattaggaacgagacctatataaaaatgtttctaagaaaactttttcct

SEQ ID NO: 939761 - DNA, 120 bp, Artificial Sequence
  ENSG00000259434_10 (sequence is synthesized)
aaacataatatataagctatttagactgcttcacgtgcccaggatagagttaccctttttttttttttttttttttctgggttggtggtactttacctctcttttattgtaccaacaacc

SEQ ID NO: 939762 - DNA, 120 bp, Artificial Sequence
  ENSG00000259434_11 (sequence is synthesized)
caacaacccaaagattaaataattaaagactataatcagttctttttagaatggaggtaaaaatatgaaaaatttaaatcctgttatttttccaaattacacaaaaaaattaacttataa

SEQ ID NO: 939763 - DNA, 120 bp, Artificial Sequence
  ENSG00000259434_12 (sequence is synthesized)
ggttcaaacgctgctgccgacgcgcactgtatagctgcataagctgctcgtagggcacgtccagcatctggtccaggcccacaccgcgattcaaggggtacatgtacagttttgttacac

SEQ ID NO: 939764 - DNA, 120 bp, Artificial Sequence
  ENSG00000259434_13 (sequence is synthesized)
gaagtcctaggctgctctatcctcccacctgttttagtacctacatcaacatgaatgaatagacttgagatagtctcagcttccagtccccagttcctagccggtaatgagtagagcgga

SEQ ID NO: 939765 - DNA, 120 bp, Artificial Sequence
  ENSG00000259434_14 (sequence is synthesized)
gacaaactgttataccaatccttgtccaaattgcagattcgtgagcaaaatgttgttttaattcacagcaatagttattgggaaaaatgaccaatttgtttgtttctgtatgtatgaatg

SEQ ID NO: 939766 - DNA, 120 bp, Artificial Sequence
  ENSG00000259434_15 (sequence is synthesized)
ttttgcttatctggaatgttcgtcagttaactacatgggtaccaaactttgctcaacttgaaaactaactatgtgtctgatagtactccaaaagtcattgttaaacagttagcacccagt

SEQ ID NO: 939767 - DNA, 120 bp, Artificial Sequence
  ENSG00000259434_16 (sequence is synthesized)
agctcagaggagtcatgtaactttcctcacattttacagaaaaatgataccattggttcaactagctatatttgcttccctgatgttttacagaatacttactaaagaatattcccttag

SEQ ID NO: 939768 - DNA, 120 bp, Artificial Sequence
  ENSG00000259434_17 (sequence is synthesized)
catattgtagctgccttcattattccaccattagactgtggtttgattactgctctattacccactcctactagactattctcttctggacagcaggcatatttgtattattcattcccg

SEQ ID NO: 939769 - DNA, 120 bp, Artificial Sequence
  ENSG00000259434_18 (sequence is synthesized)
tatacctagaaactggcatgtcctcaattagttaaatgcctcttgataaaagattatttggaatctttttggatggatataggtcagtggttctcagtacagaaatacttaggttaaggc

SEQ ID NO: 939770 - DNA, 120 bp, Artificial Sequence
  ENSG00000259434_19 (sequence is synthesized)
cacagtcctgcagactgattgaattggcttagagtggaacctaggtctctgtgaattttaaaagctcctaagctaagtcccttcaagtagctctgttgtcatgtgtagctaccaattgtg

SEQ ID NO: 939771 - DNA, 120 bp, Artificial Sequence
  ENSG00000259434_20 (sequence is synthesized)
tttccacaggtagatcatgtccccaacactgtttctacacaaaagcaatgacctacaaaaggtctcttggaggatgagttttgtttttttttttttaatctccattcataactcattgtc

SEQ ID NO: 939772 - DNA, 120 bp, Artificial Sequence
  ENSG00000259434_21 (sequence is synthesized)
tgatcaatagttatggtaactggacattggaaggcaggaacaggagaggtggcaaaagtagtatccaatatgaagcaaattttcccaccaccacacatctaggttggtttgttttaacct

SEQ ID NO: 939773 - DNA, 120 bp, Artificial Sequence
  ENSG00000259434_22 (sequence is synthesized)
cccagaagctgaccttttggccatctaagtactctaagtaaaccatgatgcctaagggagcagcttggcttctgaaataccacttgatctataaagtttggccctggggttttgtctacc

SEQ ID NO: 939774 - DNA, 120 bp, Artificial Sequence
  ENSG00000259434_23 (sequence is synthesized)
ctggaatcagatgcagaagaaagggaaatagatagttacactattttaatttgatcctgaaaaaacactgcaatggagtctgccgaaggctgtgaactatgttaacttccaagaaaaaaa

SEQ ID NO: 939775 - DNA, 120 bp, Artificial Sequence
  ENSG00000259432_0 (sequence is synthesized)
acagttgcccaaacttcatggtcccggggcacccgttctgaccacatgagacaatctgatgtgattctgccagaggagcaccactcaaggggccttcacagggcaaacctggatgatgac

SEQ ID NO: 939776 - DNA, 120 bp, Artificial Sequence
  ENSG00000259432_1 (sequence is synthesized)
actgaagcacaaagaaggtaatttacccataaccacatagctgacacatcatatttaaactgctataaaccaaagaaagaaaatcttgaaggaaggtagagaaaagaaaagacacattat

SEQ ID NO: 939777 - DNA, 120 bp, Artificial Sequence
  ENSG00000259432_2 (sequence is synthesized)
tgggtgaagaaaccctctcaactcagagtattatcctcagcaaaaatactctttcaaaaatgaagaaaaaagaaagacatttttcagacaaccaaaaagagggaattcattactagcaga

SEQ ID NO: 939778 - DNA, 120 bp, Artificial Sequence
  ENSG00000259432_3 (sequence is synthesized)
cctgtactgcaagaaatgctcagggacattccttaggtggaaagaatgtgataccagacagaaacttgtgtctacacaaagaaataaagatctccagaaatgattgaaatggaggtaact

SEQ ID NO: 939779 - DNA, 120 bp, Artificial Sequence
  ENSG00000259439_0 (sequence is synthesized)
ggtgctgcgggctctgccgaaagcgctgaaataaaaaaccatcgccactcagggagaactgaggcaagtggggctgagactctggcgacacccccgccccccagcctctgccccagcgcc

SEQ ID NO: 939780 - DNA, 120 bp, Artificial Sequence
  ENSG00000259439_1 (sequence is synthesized)
tgccgccctgccgccctgccgcaccccgcctgcttgggtggcgaccgcggttccggaacgcgaagcagggcagagggctgcagagaggcgtgtagctttgtgcgccaggacccggtgggg

SEQ ID NO: 939781 - DNA, 120 bp, Artificial Sequence
  ENSG00000259439_2 (sequence is synthesized)
caggtggcagccccgggctgtccgcgcctcccagcagagccgagctcggcgccgcccaccgagcccacctcgcggtccagccgccgccagcgcctttcggctctggcctgaagcagtact

SEQ ID NO: 939782 - DNA, 120 bp, Artificial Sequence
  ENSG00000259439_3 (sequence is synthesized)
cccgcctcctggagcgggaaagtctggagactcaccaagctgaggaggaagaagggaacatctcaacccaagctgaattctgaagaacacttggccccatcttccagaaatcctaaatca

SEQ ID NO: 939783 - DNA, 120 bp, Artificial Sequence
  ENSG00000259439_4 (sequence is synthesized)
catagagggaaagttttggccagggcaccaagaatgaaccagaagctgagtccattactccaattttcacattaaccaggagacacattgaaaattcttttcttgagtgagagactgaaa

SEQ ID NO: 939784 - DNA, 120 bp, Artificial Sequence
  ENSG00000259439_5 (sequence is synthesized)
ttttggctcaagggtgtttctgttgggtcttctctttatatggcatgtgaggactgcatcccacgtcacatctgcagccactcccagattacactgcaagggagggtagattaggagtgg

SEQ ID NO: 939785 - DNA, 120 bp, Artificial Sequence
  ENSG00000259439_6 (sequence is synthesized)
gtagggagtagaggggtctgtagacacagcaaaagcagcaagctggtgtgggaaaacccagaaaatatgtctcagagacagccagtggctgcacatacaaaaggaaggcacctacctgga

SEQ ID NO: 939786 - DNA, 120 bp, Artificial Sequence
  ENSG00000259439_7 (sequence is synthesized)
agagaaggggttgtgaagttctgcccagagtcacagcgctgacgtcctcagaaggtctccagccctctgcagcaatctatagtatgcatcagtatggttggaaaagcttcttctatcaag

SEQ ID NO: 939787 - DNA, 120 bp, Artificial Sequence
  ENSG00000259439_8 (sequence is synthesized)
tttaacaactttctggtgtaacttctgagagggctgattgcttattcatgcggaagcaagacgcccagttcattttgcccgtttttgctactctttgttgggtttgggaggctgttatgg

SEQ ID NO: 939788 - DNA, 120 bp, Artificial Sequence
  ENSG00000259439_9 (sequence is synthesized)
tagctgcaaatggcttctcaagtgacatttgctgacattcagtgaagtacatttatcagtattcgccagctcacctctacacatgcaatccattttgttttgttcttcatagcaaactcc

SEQ ID NO: 939789 - DNA, 120 bp, Artificial Sequence
  ENSG00000259439_10 (sequence is synthesized)
tttccgacacccgtgccctgaaaatgataaatggcaaggtggcatatttctgaagctgcactcaagtgtcactgtgaaaaatctttaatggactaagtgtagcttttcatgttacagctt

SEQ ID NO: 939790 - DNA, 120 bp, Artificial Sequence
  ENSG00000259439_11 (sequence is synthesized)
gtcaggtactgagaaattctagagtttgtctttaatcctcaagtctttggaaccacacttctgcaagcagagactaattataagctgcaccactcagacctgggcaagcagaaaccaagg

SEQ ID NO: 939791 - DNA, 120 bp, Artificial Sequence
  ENSG00000259439_12 (sequence is synthesized)
tattattattattattattattattattctcattccatttttgctccttcctttcctactcaagatatttgaggcatgagcaatctgtgactctaattaagggggtgacagccccaacca

SEQ ID NO: 939792 - DNA, 120 bp, Artificial Sequence
  ENSG00000259439_13 (sequence is synthesized)
ctaattaagggggtgacagccccaaccaggccaccatgcaggcttataatccactcatacacccagctttctccataatggctttattcttttcctccaaggttcaaaatcaccatgact

SEQ ID NO: 939793 - DNA, 120 bp, Artificial Sequence
  ENSG00000259439_14 (sequence is synthesized)
aaaaaaaaaaagaaaaagaaaactgactctgaatcataaatcctggctcccaaatattggccataattgggtaggtgagatgtatcttgtatgtctgggtggaagaggctcctttctccc

SEQ ID NO: 939794 - DNA, 120 bp, Artificial Sequence
  ENSG00000259439_15 (sequence is synthesized)
gaggctcctttctccctggtgattcattttcagaacacacggccatccttccaatggctttgagtttcacgtcaccaccggaaagacctgccagtttcttcctgtttgtgtgcctgtcca

SEQ ID NO: 939795 - DNA, 120 bp, Artificial Sequence
  ENSG00000259439_16 (sequence is synthesized)
ctgccatcatgctactcccaggactatggcttctgggcactcactcacccttcaacatggcttgttcactccagttctccctttccaaatgttctcaatcccctgggctgtgcgccaagg

SEQ ID NO: 939796 - DNA, 120 bp, Artificial Sequence
  ENSG00000259439_17 (sequence is synthesized)
gggattcagcccttgcccaccggctatggtctgaatgtttgtgtcttccccagattaatatgttgaaatttaatcacaaatgtgatggtgtaataaggtggggactttgggactttatta

SEQ ID NO: 939797 - DNA, 120 bp, Artificial Sequence
  ENSG00000259439_18 (sequence is synthesized)
ggtcatggagggggagcctcataaaaaaggctgccttgccccctccatcgtgtaaatcaccatctgtgaaccaggaaatgggccctcaccagacaccgaatctgccggttccttgatctc

SEQ ID NO: 939798 - DNA, 120 bp, Artificial Sequence
  ENSG00000259439_19 (sequence is synthesized)
ggacttcccagtctccagaactgtgggaaacacatttctgttgtttatgagccacccagtttaaggtattttgttatagcagcccagatggactaggccaccaccatagtcagggaagag

SEQ ID NO: 939799 - DNA, 120 bp, Artificial Sequence
  ENSG00000259439_20 (sequence is synthesized)
ctggctgatttgtgcgtgtctgcgctgtgtcccaatgaaagcacaataatcaatgaacattgattctgcaatcgatgtttgaaggtcaaaggagttgggaaagggggtctcctgaagcca

SEQ ID NO: 939800 - DNA, 120 bp, Artificial Sequence
  ENSG00000259439_21 (sequence is synthesized)
aggaaaagcattgtactccccaaaactgtgccagccaggttaactttttgcgagatgctacagattgagatgctttagttttacttctggctctttaagccctactcaagctctaatttt

SEQ ID NO: 939801 - DNA, 120 bp, Artificial Sequence
  ENSG00000259439_22 (sequence is synthesized)
gatatctcgttctagacgccttagtttgggcccctcccaggctcccttctgtttttgttctttttttctaacatcatccttggcttttcttctcctttaggtttgatctcctgtctcttg

SEQ ID NO: 939802 - DNA, 120 bp, Artificial Sequence
  ENSG00000259439_23 (sequence is synthesized)
ggttgagaaaccatcccctctgactcctggccccctgtgacccctccaaagccccctgtacaggtctttggccacacagagattcaacagtctaataatctaaaattgtaaatgccacaa

SEQ ID NO: 939803 - DNA, 120 bp, Artificial Sequence
  ENSG00000259439_24 (sequence is synthesized)
gcggtccagccgccgccagcgcctttcggctctggcctgaagcagtactcccgcctcctggagcggccgcccgatcctagcgcggagctgcgagcctgaccggccgcgtctggcatggtc

SEQ ID NO: 939804 - DNA, 120 bp, Artificial Sequence
  ENSG00000259439_25 (sequence is synthesized)
agagaaagaattttcttttcccaactccggcttttggttttgtgtgtccaccttgcgcaactccggagccagccgaccccacatggattctcaacaggtggccggcacatcttctgagcc

SEQ ID NO: 939805 - DNA, 120 bp, Artificial Sequence
  ENSG00000259439_26 (sequence is synthesized)
cctccaaggggcagaggagggcccattttgtgaagaagaaatcaactacccggaaaacgccacaggaggacatgtttctgcagatgtagttgccctagaaacagaagagtatgggggtgt

SEQ ID NO: 939806 - DNA, 120 bp, Artificial Sequence
  ENSG00000259439_27 (sequence is synthesized)
gaatgtcttctcttttgggggcaaacactatgtccttttctttttctagatacagttaattcctggaaattttagcgagtttgttcttgtggatattttgaacaataaagagtgaaaatc

SEQ ID NO: 939807 - DNA, 120 bp, Artificial Sequence
  ENSG00000259439_28 (sequence is synthesized)
cggcatgaaaggcggcgaggagaggcagcactgctgctcttgacttctgagcagggcttagagagcctgccccggcttaagccgagctgctggtgctgaccctgagcgccgagtccgcga

SEQ ID NO: 939808 - DNA, 120 bp, Artificial Sequence
  ENSG00000259439_29 (sequence is synthesized)
gctctgagtccggagcctcccagccgtggagccgtgggatgaggggggcgttgggggacagggcaaagtcgatcttggttgtacagccgcccgatcctagcgcggagctgcgagcctgac

SEQ ID NO: 939809 - DNA, 120 bp, Artificial Sequence
  ENSG00000259439_30 (sequence is synthesized)
tccggcttttggttttgtgtgtccaccttgcgcaactccggagccagccgaccccacatggattctcaacaggtggccggtgtcaacgcgctagagaggccgtctcacctccaaaggtat

SEQ ID NO: 939810 - DNA, 120 bp, Artificial Sequence
  ENSG00000259439_31 (sequence is synthesized)
actaaattaatagcaggcactaagacagatgtcaaaacgtcttgaaaatgtttatctgtgaataattgagaaggtggtgggacgcattatctgattgtgtaatgaaatatgtatgaggaa

SEQ ID NO: 939811 - DNA, 120 bp, Artificial Sequence
  ENSG00000259438_0 (sequence is synthesized)
gcgcgcgccgcggaggcggtgggaaaggcacgcggctcgtccggcgtctcctgggggctttgcctgcgggcgggcagggaggaagacagctggggccgtttgctctactacctgccctgg

SEQ ID NO: 939812 - DNA, 120 bp, Artificial Sequence
  ENSG00000259438_1 (sequence is synthesized)
cattaagggaacaaagtgaccaaacccagtgccagcgtttactaagcacctactacgtgcaaggcactgggcaatccgagaggaagaggcctcagtctccaggaagggtggaccttaaga

SEQ ID NO: 939813 - DNA, 120 bp, Artificial Sequence
  ENSG00000259438_2 (sequence is synthesized)
tggattggctggaaggcgacagcccgagcacaagacagacgcgttagaggccaatactaaggtcattcattctgccagagtatggaggaaggctttcaggagtggtcgccaaggtggcct

SEQ ID NO: 939814 - DNA, 120 bp, Artificial Sequence
  ENSG00000259438_3 (sequence is synthesized)
tataaccaggagggcacttcacagccttctgtgcttaggaactctatacagcacttcagcaatagatttgggggccactttaaacagcaaaatcaccaacggaaagcaaaacatgtgatg

SEQ ID NO: 939815 - DNA, 79 bp, Artificial Sequence
  ENSG00000259438_4 (sequence is synthesized)
ggaggctgagatcaacatagagagatcctgtttctaaaaacaaaaaaatcatggcaccaaatagaccatggaaaggaca

SEQ ID NO: 939816 - DNA, 120 bp, Artificial Sequence
  ENSG00000259438_5 (sequence is synthesized)
acaaaaaaatcatggcaccaaatagaccatggaaaggacactcgtttacagtacgagagttgaaacaagaaggcagaatcttgtcttgtttggcctcagctggcaacgttcccgtagggt

SEQ ID NO: 939817 - DNA, 120 bp, Artificial Sequence
  ENSG00000259438_6 (sequence is synthesized)
gactcaagtatctcgttactgtgcatgttcaaaagtgactacaaaggtgctatgactacttcgaggttacaaataagtttcagcaataggcaaatttgcaaacagaatctgtgaataatg

SEQ ID NO: 939818 - DNA, 120 bp, Artificial Sequence
  ENSG00000250714_0 (sequence is synthesized)
ttccactctctgaaatgaaaaatttatttggactttcttaagagagattgaacattacagaagaaagaatgagtgaacttgaaaagagatcaatagatatcattccatctgaagtgcaag

SEQ ID NO: 939819 - DNA, 120 bp, Artificial Sequence
  ENSG00000250714_1 (sequence is synthesized)
ggaaaatgaaactgaaagaaaacaaggaagcgagtctccgtgacacgtggtacaatatcatgcagtacacacggaaccagaaccaagaagaaatggctggaaaagatgaaagaaaaaaaa

SEQ ID NO: 939820 - DNA, 120 bp, Artificial Sequence
  ENSG00000250714_2 (sequence is synthesized)
agttgatatagtctcaaatgtagtgaaaaaacatcaacttatagattcaaaaagttcataaacccctcataaaaataaatgtaaagaaaaccctacctggacacatcatagtcatcatac

SEQ ID NO: 939821 - DNA, 120 bp, Artificial Sequence
  ENSG00000250714_3 (sequence is synthesized)
agagcaaattttgtgcattcacaggtaacaaagatatgaacgacagctgactcaaaacaatggaggctcaggatgtgtgaaatggtgaaagaaagctgttgactcactattcacactcat

SEQ ID NO: 939822 - DNA, 120 bp, Artificial Sequence
  ENSG00000250714_4 (sequence is synthesized)
tgaactttccaaatttcaccacaacaacaaatgtaaccagaataaacaatccaattaaaaagcagagtttccccaactaggaaaaaaaaaagcaagctgaaattattaactgtctaaaat

SEQ ID NO: 939823 - DNA, 86 bp, Artificial Sequence
  ENSG00000250714_5 (sequence is synthesized)
gaaaaaaaaaagcaagctgaaattattaactgtctaaaatatatgcaccttaaatataaagcttcagatagattgaaagtaaaaga

SEQ ID NO: 939824 - DNA, 120 bp, Artificial Sequence
  ENSG00000250714_6 (sequence is synthesized)
gagaatcatttgaacccggtaggcggaggaggccgtaaaagcctcttagaggccagaccccgcagtggcctctgtgtccttcattccgccacccatccgtccaccgagcgcctgctgggt

SEQ ID NO: 939825 - DNA, 120 bp, Artificial Sequence
  ENSG00000250714_7 (sequence is synthesized)
gccaggaactgggtcacagaaaggctgaggtcaactcccgaccgagaagcctggcgctgggaccaagtggcaaaacgactccgaatgcagcggcatccacgcggcggccgtggttgagga

SEQ ID NO: 939826 - DNA, 120 bp, Artificial Sequence
  ENSG00000261804_0 (sequence is synthesized)
gtggattaaaatgttcactttattcctgaaacccaggctggctgctctaagttgatctggtgccttggtcactcgtggcttctttcttctatgccagctctgtcttctctacacttcctc

SEQ ID NO: 939827 - DNA, 120 bp, Artificial Sequence
  ENSG00000261804_1 (sequence is synthesized)
gccagctctgtcttctctacacttcctctggaggagtaggccttgacacaattacaagaagtcagggaccctgaacagagggaccagctgaagtcacagcagaagaacataaattgtgaa

SEQ ID NO: 939828 - DNA, 76 bp, Artificial Sequence
  ENSG00000261804_2 (sequence is synthesized)
tcttaatcccatcatcttcctaatctgcacaagttgtttgtaaagcgtgtgtgtttgaacaatatgaaatctgggc

SEQ ID NO: 939829 - DNA, 120 bp, Artificial Sequence
  ENSG00000261804_3 (sequence is synthesized)
atctgggcaccttgaaaggaacaggataacagtgattttcagagaacaagggagataaccataaggtctgactgcctgcaggaccgggcagaacagagtcgtatttctcttcttacagaa

SEQ ID NO: 939830 - DNA, 120 bp, Artificial Sequence
  ENSG00000261804_4 (sequence is synthesized)
agaaagcgaataggagaaatattgcgaattcttttctcagcaaggaatagccctgggaaaggaaagcattcccagggggaggtctctaaaatggctgctctgggagtgtctgtcttatgt

SEQ ID NO: 939831 - DNA, 120 bp, Artificial Sequence
  ENSG00000261804_5 (sequence is synthesized)
ggctagtgcggagagacacagcggagatagcgcgcctgctaaaggctgccgccgccaacaccttaggtgaataccgagctccaggaaggtcgctgtgggtagggcatgtgggaaacgagg

SEQ ID NO: 939832 - DNA, 120 bp, Artificial Sequence
  ENSG00000261804_6 (sequence is synthesized)
ccagggggagaaggaggcctcaacgtggccaaagcaccttgatgatgcgctctgtccccggaggcgcgttccacggccgctgccggcacctaggcagagggatacgttccagaaacacct

SEQ ID NO: 939833 - DNA, 120 bp, Artificial Sequence
  ENSG00000261804_7 (sequence is synthesized)
cagcttagcgcggggatggccttcttgtgcgtgagtccctctgcacacgggaactgtgcgccctgggcactgcaccttccagtatgtgggccggagaggcgggggatcttgcccagcggg

SEQ ID NO: 939834 - DNA, 89 bp, Artificial Sequence
  ENSG00000261804_8 (sequence is synthesized)
atcagaccagttgtctgctctcgaaccctatttcctgctaagatgtttatcaagacaatgcgtgcccagtgggacatggaacctcatca

SEQ ID NO: 939835 - DNA, 86 bp, Artificial Sequence
  ENSG00000261804_9 (sequence is synthesized)
accctggccctgtgatctcgctctgcccttctgcgcttgtaatcttttattgcctcttgaagcatgtgatctgtgtgatttactcc

SEQ ID NO: 939836 - DNA, 120 bp, Artificial Sequence
  ENSG00000261807_0 (sequence is synthesized)
agaagagtgcagtatgtttgatggtcctgcttgagccatttgctccaattggatctggtaaaagtagcgtgcttggagacatataaacattttaaagagacgggagacgtttgattggac

SEQ ID NO: 939837 - DNA, 120 bp, Artificial Sequence
  ENSG00000261807_1 (sequence is synthesized)
ctgaatagaactgccatctgtaagagattctgcacaagtcctgtgggcaaaaggttacagtgaactgaaatgtggaatgctgtgaccctctggcagcagcgtgaatcatgcattgaagag

SEQ ID NO: 939838 - DNA, 120 bp, Artificial Sequence
  ENSG00000261807_2 (sequence is synthesized)
gaatcagagataggaacactagctaaacacaaggcatttcttagaaaagaagacaaggcaatgaaatagattcagtccccgagcaacctgactggttgatattgagagctaaggaggtga

SEQ ID NO: 939839 - DNA, 120 bp, Artificial Sequence
  ENSG00000261807_3 (sequence is synthesized)
tggggaagaaggggagcacaggatgcattaaacacaaacttctgtttcatagccctgcaagaagctatttcaacttaagacacactcaaattggatcccatccagtgggatagaagagga

SEQ ID NO: 939840 - DNA, 120 bp, Artificial Sequence
  ENSG00000261807_4 (sequence is synthesized)
ccatggatgcagctggcaagaaagatgaaggagccaaacagtaatcaggagaatactatcctgggtgctaaagatgctattaaatggcttcagagatcaagaaaagaagttggtgtggag

SEQ ID NO: 939841 - DNA, 69 bp, Artificial Sequence
  ENSG00000261807_5 (sequence is synthesized)
taaatggcttcagagatcaagaaaagaagttggtgtggagataaagaaaacgagcatttgaggccgggc

SEQ ID NO: 939842 - DNA, 120 bp, Artificial Sequence
  ENSG00000261807_6 (sequence is synthesized)
gggtgacagagcaagactccatcttgcaaaacaaacaaacaaacaacaacaacaacaaaaaaacaagcaattggtatgttgattctgagatgccacaagtgcacctagaaggcaatatga

SEQ ID NO: 939843 - DNA, 120 bp, Artificial Sequence
  ENSG00000261807_7 (sequence is synthesized)
ctgagatgccacaagtgcacctagaaggcaatatgacagctggttatactcttcttgagatcctcaatatgggtggtctgagaagattagccagtagaagagaggagacaagaatcaagg

SEQ ID NO: 939844 - DNA, 120 bp, Artificial Sequence
  ENSG00000261807_8 (sequence is synthesized)
ctaatgcactctttcagaggccgaggaaggagaggacttcagaaggatgggggcggtggtcaggaaggcccaattattttttgcaattactaaaatagtaacataattttggcaattctt

SEQ ID NO: 939845 - DNA, 120 bp, Artificial Sequence
  ENSG00000261807_9 (sequence is synthesized)
ctatgtgactatgtggggtgaaccccaatgtgctaggaaaacatcaaatttgttggaaattctggtctctcttgaagttaacaatctttcttgaccattctttgagaacagtccgtaaaa

SEQ ID NO: 939846 - DNA, 120 bp, Artificial Sequence
  ENSG00000261807_10 (sequence is synthesized)
actaatttgctttgcatctgtattccccagtatttaacctagatgtttatcattcattctttctgcactttttcatcctttgtaattgcaactagggttctctgtctaaatttccacttt

SEQ ID NO: 939847 - DNA, 120 bp, Artificial Sequence
  ENSG00000261807_11 (sequence is synthesized)
gacttctctccacagtatttctgttttactcctcacattgactgggctgtgtcaccagcctcatataagaacctcacagttaaaaatgtcctctctgcctatctactcctgtaccatcct

SEQ ID NO: 939848 - DNA, 120 bp, Artificial Sequence
  ENSG00000261807_12 (sequence is synthesized)
catggacaggtttctacagggcacaggtatagactgtgtatcaaagaagccggctataccaggaatacatacaagcaactgttaaaatccaaataattattttgttactgaagtgtttaa

SEQ ID NO: 939849 - DNA, 120 bp, Artificial Sequence
  ENSG00000261807_13 (sequence is synthesized)
gcatcagagcttaaaatgaagcatcttttgtagttttaagtttttatatataaattaagttattcttccatttcacagttggtaacacctagaaaacctgattgaaaaaaacacattggg

SEQ ID NO: 939850 - DNA, 120 bp, Artificial Sequence
  ENSG00000261807_14 (sequence is synthesized)
agaaagaggacacagatatcatctggaaaggaaaagatttgtgttaacaaatatataacgtgctcacaatggaaagctcccacttctcactttccctcctccttccagctaacatgggtt

SEQ ID NO: 939851 - DNA, 120 bp, Artificial Sequence
  ENSG00000261807_15 (sequence is synthesized)
tgggtttgttttgttgttgttttataagctgtcacagtggtagatgcagattgaagctccaggcaattgcaattaaatcaggaaaaagatatgcattcaccaaggttaacacaagctgca

SEQ ID NO: 939852 - DNA, 120 bp, Artificial Sequence
  ENSG00000261807_16 (sequence is synthesized)
gcttaatcaggatgaaacaaacaaacacatccaaggacctcaaaataaatacagccatttcaatcaccttcttttaatatccacctccccccgcccccgcaacccctgcaataacttaaa

SEQ ID NO: 939853 - DNA, 120 bp, Artificial Sequence
  ENSG00000261807_17 (sequence is synthesized)
aaaacacgcgcaatgaaaagctaaataaataagttcccaagtcaatatatatgtcatgaaaattttcaagctaccaatgtaacacattatttcagtttattggctattgatctcaaaaca

SEQ ID NO: 939854 - DNA, 120 bp, Artificial Sequence
  ENSG00000261807_18 (sequence is synthesized)
agtcattataggattaaagacaaattttgatacaatagagactcctcatatataagccatagacacatgtataaacttaatattgattgactttacagataaatattcataatgagctca

SEQ ID NO: 939855 - DNA, 120 bp, Artificial Sequence
  ENSG00000261807_19 (sequence is synthesized)
ttgttttaatttgtgtttgaatacgtgtttccttttaaatttggtttgaggatataaattttggtaaatggcttatcagcattacatctaaatagatgtgcatacaaatacactgaggat

SEQ ID NO: 939856 - DNA, 120 bp, Artificial Sequence
  ENSG00000261807_20 (sequence is synthesized)
ggtggttcgagtgtagtaggccatatgaacttcatatgattggttttttgtgatggcattacatttatcatcatctcttgtcattattattttttaaatgatctatttaatttggatact

SEQ ID NO: 939857 - DNA, 120 bp, Artificial Sequence
  ENSG00000261807_21 (sequence is synthesized)
ttcagtctctataggtaactctccatgttgctgccagacctattacgttaaaaaaaaacttctatttttctcaaaatgttgtatggctctctgtttcctacagatacaaattctaaactc

SEQ ID NO: 939858 - DNA, 120 bp, Artificial Sequence
  ENSG00000261807_22 (sequence is synthesized)
tttagcttaatttctaaagttacctatttttccctatgcccttgtttttttctgattaaattactttataggaatgtatttatacaaagcttagacctaacagtcctgattaactcatct

SEQ ID NO: 939859 - DNA, 120 bp, Artificial Sequence
  ENSG00000261807_23 (sequence is synthesized)
ttaaccaagcttctgagcctttgttggtgctgctcctacagcttgggacagtattttcactgcccccaaaattatcagtctcctagtatttcttaaagactgaagcccgggtgtgtgatg

SEQ ID NO: 939860 - DNA, 120 bp, Artificial Sequence
  ENSG00000261807_24 (sequence is synthesized)
gcaaaggacatgaactcatcctttttttagactgaaggcatccttctgtgatgccttgtctaacgctcccagttagactcactcgttcctttgcactgccagcagtactttgcttatact

SEQ ID NO: 939861 - DNA, 120 bp, Artificial Sequence
  ENSG00000261807_25 (sequence is synthesized)
catccaatttaattctatatgtcactcccatattatctagattactattggtacctggtaggtttagacttattaatttatattttaatccacaaatctagccatctatttattcaataa

SEQ ID NO: 939862 - DNA, 120 bp, Artificial Sequence
  ENSG00000261807_26 (sequence is synthesized)
tttatcacctcttgcataaatattgagctctttatatgatactcaatggtaacaaagatacagtgaatgaaccataacaaagacacagtgaatgaacagacagtagtacctatcctggct

SEQ ID NO: 939863 - DNA, 120 bp, Artificial Sequence
  ENSG00000261807_27 (sequence is synthesized)
tcactgacattcttgtctgaaagacaagctttaacaagtagttgcaaggaagtgtgcaatgagtgtttggtctagtttgaacactaggaaaagaagaatgccacagtctaggtaccatta

SEQ ID NO: 939864 - DNA, 120 bp, Artificial Sequence
  ENSG00000261807_28 (sequence is synthesized)
aagtccaccttgagaaagtgctctttaatttgaagtttgagtgattagaaaatgttcaccaatttaagaaggggaagaaggcagaacagagtgtttcactctaaagaagaaaaagaatgt

SEQ ID NO: 939865 - DNA, 120 bp, Artificial Sequence
  ENSG00000261807_29 (sequence is synthesized)
gaaaatctgtaaagataaaagagatttctttagttattttctaaaagagaaagtgagagaagagaatgaaggagagtgacagaaagatactaaaataagagttttatggaacaagacctc

SEQ ID NO: 939866 - DNA, 120 bp, Artificial Sequence
  ENSG00000261807_30 (sequence is synthesized)
aaaaggatgtagaaaagccatataaatttataatcttgagtaatagcaaaataagtaagacaattttgaaaatattatattatattctgacttctccagaagagaacttaaggatgctgt

SEQ ID NO: 939867 - DNA, 120 bp, Artificial Sequence
  ENSG00000261807_31 (sequence is synthesized)
taaacaatggtcaaattataagtgaatagggaaggtaggaattgattctagcatctacagataagaccaaatatatttgttatcaccaaacaatggtatgactatgtacttaattggcta

SEQ ID NO: 939868 - DNA, 120 bp, Artificial Sequence
  ENSG00000261807_32 (sequence is synthesized)
tctgtagtcaactctgaaaatctatcccatatctaattcctcatttcaactataagaccccaaacctagttggtatacaataaatcattgttgagtgatagaaaatatataaaacattgc

SEQ ID NO: 939869 - DNA, 120 bp, Artificial Sequence
  ENSG00000261807_33 (sequence is synthesized)
atatcttcccagatgtgtacaaattgttacattgcccacgttatagaaatatatgacagctttcacttacatttctcacatctctcagatgcatattttttgctttattggctttaaact

SEQ ID NO: 939870 - DNA, 120 bp, Artificial Sequence
  ENSG00000261807_34 (sequence is synthesized)
catattaataccataaaatcagccctgggggcactgttaggctataagcatttctctgattcaaatgttatatatccatactcctacatcattacttcccagtgtctgttattttcagaa

SEQ ID NO: 939871 - DNA, 120 bp, Artificial Sequence
  ENSG00000261807_35 (sequence is synthesized)
ttttctgaaggcaagattcttgccctccttctctgtcatttagacttaatttattctcttaaaaattgcattcaagtcagaaccagttattactaaatggtacggtttgttccttttcta

SEQ ID NO: 939872 - DNA, 120 bp, Artificial Sequence
  ENSG00000261807_36 (sequence is synthesized)
atgtttttcctttgttttgtttcttttctacacttctttttagaaggagctccaaagatctgccacttcattttcctctctcactcttaaatcctttctgcagtaatggcaactagtggt

SEQ ID NO: 939873 - DNA, 120 bp, Artificial Sequence
  ENSG00000261807_37 (sequence is synthesized)
ccttttgttctgtttaagcaatttatggaacagcttgtccccaacatcccaataattttgtacatgattaactgtcaaaatagtctttattttaatgaactaaacttagcctctttgtca

SEQ ID NO: 939874 - DNA, 120 bp, Artificial Sequence
  ENSG00000261807_38 (sequence is synthesized)
cctttgtaaaaaaaattctacattatgctttctagagacattaagaaaaaattaaataacatgactctctttcttgcatggtagaattccactattttaagacaatgtttacagcatact

SEQ ID NO: 939875 - DNA, 120 bp, Artificial Sequence
  ENSG00000261807_39 (sequence is synthesized)
tttttctttctaaacacaatatggtccagatgacaggtatgtgttcctgatctcttgagagttacatatccctatttcaacccctgtcctctgttccatggaagtttaaatcaaccacca

SEQ ID NO: 939876 - DNA, 120 bp, Artificial Sequence
  ENSG00000261807_40 (sequence is synthesized)
atatttctggaatttaatgggttaactgcattctcaaggctatctatgtttacggtttgtatttctatatacagtcattcttatcccaacctaattagtcaggatagggaatttctcaat

SEQ ID NO: 939877 - DNA, 120 bp, Artificial Sequence
  ENSG00000261807_41 (sequence is synthesized)
ttcttgattccatttaacacaaatgatttgcagaatattgaagattctgggaatacagtagtgtagaggaatggtttatttctattttccaataatgtatacccttgaaacagaacactt

SEQ ID NO: 939878 - DNA, 120 bp, Artificial Sequence
  ENSG00000261807_42 (sequence is synthesized)
aacattcccgttcttatactgccttttactgtcttatactctctttttcactgattaactttattctatgccattcccagtctctttgtcttctcattggcttaccttctcactacacta

SEQ ID NO: 939879 - DNA, 120 bp, Artificial Sequence
  ENSG00000261807_43 (sequence is synthesized)
ccttctctgtcttttcccttctcattgaaattgtggatagattctctctccccgctctctctgtaactctctccctctgctttaccctttcctttcttcctctctttcttctcctatctc

SEQ ID NO: 939880 - DNA, 120 bp, Artificial Sequence
  ENSG00000261807_44 (sequence is synthesized)
ttcaacctcttcaccatctctctcttacctcactgttagttctagtttataaattcagaaaatgagtctcagagaagttaagtgactcgtgcaagttcacctggttagcaagattaagat

SEQ ID NO: 939881 - DNA, 120 bp, Artificial Sequence
  ENSG00000261807_45 (sequence is synthesized)
tcatactctgctctgtcagccatctatttttgtttagtttgaccttcttaaaattaatgttgttaaatctgacctatgatgacgccttgttagacagtaaaagcttattgaattacatat

SEQ ID NO: 939882 - DNA, 120 bp, Artificial Sequence
  ENSG00000261807_46 (sequence is synthesized)
tttatgctttttggaaatgtgaccaatgtgtaatggatactgttaacaacaaattgaataaaaggtacacccttaataccagagtgaattagggcaagctacaaacgatgtgatatatta

SEQ ID NO: 939883 - DNA, 120 bp, Artificial Sequence
  ENSG00000261807_47 (sequence is synthesized)
ctggagtcattgttattgaattaaagcttcctagtatttgatatatggattaataatcaaacatatatgtattttaatatggtccatctctgaatgatgaaacatgaaaagaaaacattg

SEQ ID NO: 939884 - DNA, 120 bp, Artificial Sequence
  ENSG00000261807_48 (sequence is synthesized)
catccatcattgttgcattatttttaattttgaaagtagctaatgtatttatctagaaataaaatcatattaacccatacaagcttatacatagcataaagcattatataatacacatta

SEQ ID NO: 939885 - DNA, 120 bp, Artificial Sequence
  ENSG00000261807_49 (sequence is synthesized)
aatgcatagatatttttacatgtgtcaagattgaaagtggagtgtggggtgtagtaatcccagaaataaggaagctatgagtgggggaatcataaaaatatgaaaagaaactccttccaa

SEQ ID NO: 939886 - DNA, 120 bp, Artificial Sequence
  ENSG00000261807_50 (sequence is synthesized)
atgattgaatgattcctaaagtgtgcatatgcagagtaaaatttcaaacaaaagcaatagctataattgaacagtttcagcaattgccttttaaatttatgcttttaaattttatacttt

SEQ ID NO: 939887 - DNA, 120 bp, Artificial Sequence
  ENSG00000261807_51 (sequence is synthesized)
taaattttgatgtaactggaagcttacaggaaaactgtaaatgctgtatccagattcaccaagtgcttttattgctctgtgtatgaatatatatgtaaaataaatgttacacatataaaa

SEQ ID NO: 939888 - DNA, 120 bp, Artificial Sequence
  ENSG00000258520_0 (sequence is synthesized)
gccccgcgccctcggccgccgcgcagggtctggacgcgcgccgcggctccctagccggccggccgacgctcggggcgtactcacaatgagcgggatggtgcggtcctcgcggagctgctc

SEQ ID NO: 939889 - DNA, 120 bp, Artificial Sequence
  ENSG00000258520_1 (sequence is synthesized)
cctcgcggagctgctccgacctcctgcctgccctctgcgcgccccggccgccggaggatgctgcgtgggctcggttgtcctgccataagtagtagaaagtgcccaggatccaggctacgg

SEQ ID NO: 939890 - DNA, 120 bp, Artificial Sequence
  ENSG00000258520_2 (sequence is synthesized)
acatactttgaactgtgaaaacaagagtcatcataatagctgcagtttactcagtacctaccaggtactgtcacctatactgtctctaaagcccctacaaccctgagctaaggatgatca

SEQ ID NO: 939891 - DNA, 120 bp, Artificial Sequence
  ENSG00000258520_3 (sequence is synthesized)
tatccccaactgcagatgatgacactgaagctcaacggctactcaacttgcctggaatcctacagcaaaatactgcattgtgtcacaagaattcaactatgtactcatggagaaggaggg

SEQ ID NO: 939892 - DNA, 120 bp, Artificial Sequence
  ENSG00000258521_0 (sequence is synthesized)
atattgaaaggccagttcccagaactttatctgagaggagaacaaggaaactggtgtctgctgcatgtttttcaagatgtgctggcgtcaccaccacctgcacactccccctccccaggc

SEQ ID NO: 939893 - DNA, 120 bp, Artificial Sequence
  ENSG00000258521_1 (sequence is synthesized)
ttttcccacggtaggcacacagcagatgtgccatccgtggaggctgttagggttatgacatgcattttatccccaacaacccaatgacctctgtagtgatgtctctatcttacaggtgaa

SEQ ID NO: 939894 - DNA, 120 bp, Artificial Sequence
  ENSG00000258521_2 (sequence is synthesized)
tggaagtgggtgaccagtgtgactctgtgtgacaggaaatgatgccgaatggacacagccagctagggtggtagttggaataaagttagataacacaggcttactgtgtgcaggtggcag

SEQ ID NO: 939895 - DNA, 120 bp, Artificial Sequence
  ENSG00000258521_3 (sequence is synthesized)
gtactcactcagcaaagccacctgagtcgtcagcactgtgctactattttgatttttttaatttgagagatggggcctcactgtgccaccccagctggggtgcagtggctattcacaggc

SEQ ID NO: 939896 - DNA, 120 bp, Artificial Sequence
  ENSG00000258526_0 (sequence is synthesized)
gggactggaaccggcacttggcaccccttacgccttacggtggccgctgcgcccagtcacatctattgcatttctctggaatgaccacagcaatatttccagcccttgatgatcttctag

SEQ ID NO: 939897 - DNA, 120 bp, Artificial Sequence
  ENSG00000258526_1 (sequence is synthesized)
atatttccagcccttgatgatcttctagaactttgccacttccctgcatcaagagagtctcgcgctgtcgccaggctggagtacagtgtcacaatctcggctgactgcaacctctgcctc

SEQ ID NO: 939898 - DNA, 120 bp, Artificial Sequence
  ENSG00000258526_2 (sequence is synthesized)
gctgggattactggcatgagccactgcacccagcctcatttatcattttaagttgaatggaatatctttttccatctgctcattttcagtctatttgcatctttctagagttatgaatgg

SEQ ID NO: 939899 - DNA, 120 bp, Artificial Sequence
  ENSG00000258526_3 (sequence is synthesized)
gcatctttctagagttatgaatggattgtccaccagcattacagtaacagagtattctggttttgtttctttacttaatttcaccgagtgactgtggacaaattctggcattcagaatca

SEQ ID NO: 939900 - DNA, 120 bp, Artificial Sequence
  ENSG00000258526_4 (sequence is synthesized)
agtgtacaaaatggaattgtgaaaatcttccctgagacaggaggcttctgagtggttcttctgctgcatgttgtgttggctggggttccttagattcaggggtacatgtgcaggtttgtt

SEQ ID NO: 939901 - DNA, 120 bp, Artificial Sequence
  ENSG00000258526_5 (sequence is synthesized)
acaagagtataatgtgtgatgctgaagtttggagtacagttgaacccatcacccagctagtgagcatgatactgaaaaatcttggaagaagaacacttctttgatgacgttgtcagagag

SEQ ID NO: 939902 - DNA, 120 bp, Artificial Sequence
  ENSG00000258526_6 (sequence is synthesized)
aaatggatgttctcctaaatgggaagccttaattctgtgtgtaatttataaagccatggagaagaggagacagagtgtgcaagggaatgaagaaaaggaacaagactattttcaaatcac

SEQ ID NO: 939903 - DNA, 120 bp, Artificial Sequence
  ENSG00000258526_7 (sequence is synthesized)
ccatggcactactagaaatgtatttcagcaaaaggactggctgattttatgattcctgtgtccaccacagccctctaatttttacataggtaccccacatctctctagatttcaggaaga

SEQ ID NO: 939904 - DNA, 120 bp, Artificial Sequence
  ENSG00000258526_8 (sequence is synthesized)
ctattatccttcgactttagctttctgatgggttcacaaaaagccattagtgtgctgttggtccagcttttttctgttgcaaatatgagagctacagttctgagatgaaaccacaggatg

SEQ ID NO: 939905 - DNA, 120 bp, Artificial Sequence
  ENSG00000258526_9 (sequence is synthesized)
ttctttctctatgtaaggagaacagtaccttttctgactactctgaaatgaatcaagaacaaatctgtgtggaattttggaccataatcaggaacaagaatctcgggaatccttggaaat

SEQ ID NO: 939906 - DNA, 120 bp, Artificial Sequence
  ENSG00000258526_10 (sequence is synthesized)
aaaaaacccatatattttccagcactccatcctcactgtcaaaactgtcaagaacataaagggtctgagattgtgccctacttgcaaggcaacaagttaacctggcatagtttcatgtat

SEQ ID NO: 939907 - DNA, 120 bp, Artificial Sequence
  ENSG00000258526_11 (sequence is synthesized)
gctggtagaagctatgaggctcctgattcagagaaggaagcactgcattagcgagtcctgaagatcctttccagctctttgattatatgacattctgactagcacaaagaggcacacctg

SEQ ID NO: 939908 - DNA, 120 bp, Artificial Sequence
  ENSG00000258526_12 (sequence is synthesized)
aaaatagacgaagaaaccaagactattagtagcaaacgatgtaataaaaattagagagacaagaaaatgagccacaaaaggatttttttaccaggctaccctgtggtacactctgattgc

SEQ ID NO: 939909 - DNA, 120 bp, Artificial Sequence
  ENSG00000258526_13 (sequence is synthesized)
cggcagacacaaatcgagactcaacactgcattcaagatttaccaactgttaaattggcaactttatgatggaaagaggagagacttaaatattcttgctgctctggatagaagtcattc

SEQ ID NO: 939910 - DNA, 120 bp, Artificial Sequence
  ENSG00000258526_14 (sequence is synthesized)
tatagactgatatttgtagcattttaacttcactagataattgaaaagatttttaattcatgtactttgaattgtgataattggcaggagtatgaagactgacagataatttgtaaatag

SEQ ID NO: 939911 - DNA, 120 bp, Artificial Sequence
  ENSG00000258526_15 (sequence is synthesized)
tgcaattattcaaatgttataaattggttatttgtaatatttttgaactatttagtatttaattactcataggttagagttaacacttagtccatgtcatatttttaagctgcatatata

SEQ ID NO: 939912 - DNA, 120 bp, Artificial Sequence
  ENSG00000258526_16 (sequence is synthesized)
aattgataaatagacaagcaaatggaattctagtatacacatagactagtgtctactcacccgaaagatgctagtctttcatttttttgaagaaagtctattcatgataatcacccaaag

SEQ ID NO: 939913 - DNA, 120 bp, Artificial Sequence
  ENSG00000258526_17 (sequence is synthesized)
tatttagtgctctgaatgactgcacttggaggaactcactgagcataaacacaactagtaggctatccctgaataggtcctatgaggtattaaagatggcagatcacagggaaacttctg

SEQ ID NO: 939914 - DNA, 120 bp, Artificial Sequence
  ENSG00000258526_18 (sequence is synthesized)
ccttccaaagtgtgatgttattcaatggaattatgataaaaaggcatgttagtggaaatgaaaaactaaatacacaatggaatgagatcacaaatctaaaattatttgcaagatattttt

SEQ ID NO: 939915 - DNA, 120 bp, Artificial Sequence
  ENSG00000258526_19 (sequence is synthesized)
caaatgtgtaaagcaaaagcatctagatactcactgggtttttcagcagtggggcctgttcatcctgtcaaaaaatataagtaactaatgaaagacaatttaaattattaaagtaagaaa

SEQ ID NO: 939916 - DNA, 120 bp, Artificial Sequence
  ENSG00000258526_20 (sequence is synthesized)
aacatgttatgcatttaataagcaatgtgtataagtaaaaactgttttcattttacctgtcatatataagatctaagttatctcttattcgatagtatcaatttacattgattaaaataa

SEQ ID NO: 939917 - DNA, 120 bp, Artificial Sequence
  ENSG00000258526_21 (sequence is synthesized)
aaatgttccatttctcatgccattcctattaatctccatataataattaacattctttgtaagctttggtgagttttaaaaattcttctatatcctatttcttttgggcagaagagattt

SEQ ID NO: 939918 - DNA, 120 bp, Artificial Sequence
  ENSG00000258526_22 (sequence is synthesized)
cactctgatatgaaatgttaggtggttcacttttatgcaggcaaatgaagttttaccttcagtttccaaaacagatgattgttttcctgttaaaatccctgtgatgaaactgtatgatct

SEQ ID NO: 939919 - DNA, 120 bp, Artificial Sequence
  ENSG00000258526_23 (sequence is synthesized)
aatcacacttatacaaagcatattatatgtatttatttctttatctaatataaaatatctatcttctaggatagatagatatctatctattttcctttaactctgagctttgtggatgca

SEQ ID NO: 939920 - DNA, 120 bp, Artificial Sequence
  ENSG00000258526_24 (sequence is synthesized)
ctctgagctttgtggatgcagaaaacagagactccttgaaattaattctcaagcacttgcagacagtctgcttcgcctctggtgtactgcttctgtcatcttggccattttttatggtgt

SEQ ID NO: 939921 - DNA, 120 bp, Artificial Sequence
  ENSG00000258526_25 (sequence is synthesized)
aactttgccacttccctgcatcaagaggtataacctcatcctggagcagggcaccctatcgtcagatggtatcatctttaaggggttgtctcagccatgcctttagaattacctttcatt

SEQ ID NO: 939922 - DNA, 120 bp, Artificial Sequence
  ENSG00000258526_26 (sequence is synthesized)
gcttgtcatgctggaagcttctgaatgttgcattttgtgatagaaacagtgggtaccatggtcatgtgctcacatctcctttgcggtaaagaaaaggatcactcattaacatccaccaga

SEQ ID NO: 939923 - DNA, 120 bp, Artificial Sequence
  ENSG00000258526_27 (sequence is synthesized)
taacattctccatgaaagcaccaaataaggtttgtcttggtccattttatgctgctataacagaacaccacagactgagaaatttataaggaatagaagtttatttgcctcatgtttctg

SEQ ID NO: 939924 - DNA, 120 bp, Artificial Sequence
  ENSG00000258526_28 (sequence is synthesized)
gaggctgggaattccaagatcaaggggctgcatagattgaggtcctttttgctgactcataacgtggaaagagagtgcactgcatagaagaaaggaggccaaactcattcttttatcatg

SEQ ID NO: 939925 - DNA, 120 bp, Artificial Sequence
  ENSG00000258526_29 (sequence is synthesized)
agcctactcctgaaataactcactctcaagataatggcattaatccattcatgaaggcagaatactcatgatgtaatcacctcttaaaaggtcctatttcctaacactgttgcattaggg

SEQ ID NO: 939926 - DNA, 120 bp, Artificial Sequence
  ENSG00000258526_30 (sequence is synthesized)
gattggtctgctatagcggactttcccctcacctcccaaatgtttattatgaaaaatttcattttaaagaaaggtggaaggaattgttgaaagaatatgtcatctagtttctactgttgt

SEQ ID NO: 939927 - DNA, 120 bp, Artificial Sequence
  ENSG00000258526_31 (sequence is synthesized)
taacattgtgtcatatttgccttttcatccatccaaccacccatccatctagctaccttataattactattattacttattattactattatttttaaagacacctctattaaagcaacc

SEQ ID NO: 939928 - DNA, 120 bp, Artificial Sequence
  ENSG00000258526_32 (sequence is synthesized)
atcttattttttgattttatttattttcaaagttagttgcagacattagtatactttactcctagacattttagcgtgaacataattaactggagtataatacttgttttcaatttcttt

SEQ ID NO: 939929 - DNA, 120 bp, Artificial Sequence
  ENSG00000258526_33 (sequence is synthesized)
ttatttttgaggtaaaatttacatacagtgaaatccaaatcttaagtgtaccactagataaattttgataaatgcattatgcctggtcttcacacacccttttcaatatatagaaaattt

SEQ ID NO: 939930 - DNA, 120 bp, Artificial Sequence
  ENSG00000258526_34 (sequence is synthesized)
ccagataatttattttgttgtttttttcacacactaagttctagacttttccaggtccgagggaactattaggggggaaagtacttgttatagtaaaaaagattttaggtgtgtttgttt

SEQ ID NO: 939931 - DNA, 120 bp, Artificial Sequence
  ENSG00000258526_35 (sequence is synthesized)
ttaaggtgcagaaacacatcgcagattaaggtctgcatctctgctttttgttattgttccagtttgatctcagtgacattacaagcaagcagaaacactcagacatgaaatggccagtgc

SEQ ID NO: 939932 - DNA, 120 bp, Artificial Sequence
  ENSG00000258526_36 (sequence is synthesized)
ctgtgagttaagagcaggatctaggtctatttttttgatatgtatctcaactacctggaatactttatacttttggcactcaataaatatttgttgctgccagacgatctgccacaaaaa

SEQ ID NO: 939933 - DNA, 120 bp, Artificial Sequence
  ENSG00000258526_37 (sequence is synthesized)
actcaagaacccagcccccatagtgtgaggaggcctaggacagttacagaagccatgtgtaggtgttctggctccagcaaaagtcttatctgacaacatcaactacatgttagtgggtat

SEQ ID NO: 939934 - DNA, 120 bp, Artificial Sequence
  ENSG00000258526_38 (sequence is synthesized)
taaattaaaaaattcatgtaactgaagagttaaagtttgatgaaataggagcgtgagtgaagcaagatgactaccaatcatcccctgtaaaggaacaccaaatttaacaactatctacac

SEQ ID NO: 939935 - DNA, 120 bp, Artificial Sequence
  ENSG00000258526_39 (sequence is synthesized)
aaaaaacacctacataagagccaaaaaccagttcttaagaataactgtacaatgtgctaggagtgcaacatccctgagataaggagagactgactggaacagcatgggctcagtgccagt

SEQ ID NO: 939936 - DNA, 120 bp, Artificial Sequence
  ENSG00000258526_40 (sequence is synthesized)
tccaccctaaaaggaggatgttcttcaatgctttaaatcagcaactcacatgacctcaagatatcaaacatgggaatggcgggctgctttccatgctcccctctctgtggttctggtggg

SEQ ID NO: 939937 - DNA, 120 bp, Artificial Sequence
  ENSG00000258526_41 (sequence is synthesized)
aaatacccagaggagacttcacctgccctgggcagctttcctgagccttgggccagctcacagtgagtcctaggcttctgttgttccttgctgcctaactgtaagtattaataataaaac

SEQ ID NO: 939938 - DNA, 120 bp, Artificial Sequence
  ENSG00000258526_42 (sequence is synthesized)
tgctgtttaagaagatagttgctagtaaaaggattataaacttgtattaatcttagaaattttataaattacattctgcatgaaagagaataaaagcaattataatttatcaaatattct

SEQ ID NO: 939939 - DNA, 120 bp, Artificial Sequence
  ENSG00000258526_43 (sequence is synthesized)
ttctgtttcttcaatatacctgtagatgaaatatgtcagtttagtaaattataattgtcataataattttctaaatctgcaattcctacaaagttgtctgttttaattttattaaaaaat

SEQ ID NO: 939940 - DNA, 120 bp, Artificial Sequence
  ENSG00000258526_44 (sequence is synthesized)
ctagtaagctctgtccaactttgtttgtcaaaattgctcagggcaaaaatttccagtggaaagcaagaaataagatggaaaacattaatgagttaaaacaaaacttttttttttttaaag

SEQ ID NO: 939941 - DNA, 120 bp, Artificial Sequence
  ENSG00000258526_45 (sequence is synthesized)
agaacctatggaatttctttcatttctattttaacatgtaaatatattccatcagatgaactatagcagaattgtaaggcagaaaaatgagatgttaactggagacttgggtgggaggca

SEQ ID NO: 939942 - DNA, 120 bp, Artificial Sequence
  ENSG00000258526_46 (sequence is synthesized)
ttaatttgggttttaactggagtaaaatttaaattttactgtactggagtagaatttagattatcatattgcacgcattacccctgtctttcagtttgagggcattgcattctctcagaa

SEQ ID NO: 939943 - DNA, 120 bp, Artificial Sequence
  ENSG00000258526_47 (sequence is synthesized)
gaggagtacaacttgatttcatgtgctctcccaagaagtgaaattgattagtttcttacagctttatatttttgtctgtattttttaaggtttcctacaaaccattttaaatgtgtctaa

SEQ ID NO: 939944 - DNA, 120 bp, Artificial Sequence
  ENSG00000258526_48 (sequence is synthesized)
taaatgatggacattctttcttggagatcatctgtaaatgcatgcatgctggtggtggtggtatgggtagtacagaggagtagaacaaacaaaaatctttcagaaagaaggggattatct

SEQ ID NO: 939945 - DNA, 120 bp, Artificial Sequence
  ENSG00000258526_49 (sequence is synthesized)
tatgttttatgtagttatcattgtataatctcttatactttttatttatttatttgaaatagggtcttgctttgtcacccaggctggggtataggagcacagtcatggctcactgcagcc

SEQ ID NO: 939946 - DNA, 75 bp, Artificial Sequence
  ENSG00000258526_50 (sequence is synthesized)
atgctagcattacaggcatgggccactgtgctcagcccctttatgttttttaattgtgatgatatttccctgcgt

SEQ ID NO: 939947 - DNA, 120 bp, Artificial Sequence
  ENSG00000258526_51 (sequence is synthesized)
tgggcgggactggaaccggcacttggcaccccttacgccttacggtggccgctgcgcccagtcacatctgagcggagaatttaataggcaagaaagaaggaagaaggctgaaggaagaag

SEQ ID NO: 939948 - DNA, 120 bp, Artificial Sequence
  ENSG00000258526_52 (sequence is synthesized)
ctccccactacagagacagacggagggggctcccaagacgaaagaggagacccccattctagatgttcttaaccctttgagggcaaagctctccgtttaatgccttgcacatatcaggtt

SEQ ID NO: 939949 - DNA, 120 bp, Artificial Sequence
  ENSG00000258526_53 (sequence is synthesized)
gccaacaacatggtgtggtttatcaattgtgataggttacttattcgagcccctgtttacaagagttttagttttgcaggctgagaagtactatgttaagaaagattttgaggttgtcct

SEQ ID NO: 939950 - DNA, 120 bp, Artificial Sequence
  ENSG00000258526_54 (sequence is synthesized)
cattctactggaaggagtatcatttgatttgtgatgtctgccatagttggaaagaattggtgacctgtttagattgcatttctctggaatgaccacagcaatatttccagcccttgatga

SEQ ID NO: 939951 - DNA, 120 bp, Artificial Sequence
  ENSG00000258526_55 (sequence is synthesized)
cgcccagtcacatctgtaagtcggttaattttggcgctcggtcgatggaggtggcggtactctggtttagtgcgaaaggcagaggatcctaaccctgtggacaccaccatcactggccta

SEQ ID NO: 939952 - DNA, 120 bp, Artificial Sequence
  ENSG00000258526_56 (sequence is synthesized)
tgaggagtgctgccaggcttccactgatgttcacttaaggcccaagggctcttcaattagcttgagattgcatttctctggaatgaccacagcaatatttccagcccttgatgatcttct

SEQ ID NO: 939953 - DNA, 120 bp, Artificial Sequence
  ENSG00000258526_57 (sequence is synthesized)
tactaaagtgatgtaggcgaactaaattaagtactaaagaaaactagacagaagtctaaaagatatacgattagaaatgatacagctcccagtatgagcaacgcagaagacgggtgattt

SEQ ID NO: 939954 - DNA, 64 bp, Artificial Sequence
  ENSG00000258526_58 (sequence is synthesized)
cgtgtgcgagccaaagcagggcgaggcatagcctccctctgacacctgggaaatcgagtcactc

SEQ ID NO: 939955 - DNA, 77 bp, Artificial Sequence
  ENSG00000258526_59 (sequence is synthesized)
ttcctagtcaaagaaaggagtgacagacgacacctgggaaatcgagtcactcccaccctaatactgcgattttccga

SEQ ID NO: 939956 - DNA, 120 bp, Artificial Sequence
  ENSG00000258526_60 (sequence is synthesized)
ttctgctttagagcatgtaaaaaattagagataacaaaatgacacttaatagacgctggacatgtagagggaaatgtagcttttaaagacatttttcttctattcctggcaaaagtaagc

SEQ ID NO: 939957 - DNA, 120 bp, Artificial Sequence
  ENSG00000258526_61 (sequence is synthesized)
gagggaaaggtgaatgtagcaggtacaaatcacacaggcagaaaatacagaggaaagacctaaagcctaactcaattctatggattttaattatggaaatctggccaagtcactcccctc

SEQ ID NO: 939958 - DNA, 120 bp, Artificial Sequence
  ENSG00000258526_62 (sequence is synthesized)
tgtggcaaaaacaaaatggcattgtgaatgtaaaagttcattaaaaactctaaaatgtgatagcataatgtaaaccactttttttttttttttttttccaaaacggagtctcgctctgtc

SEQ ID NO: 939959 - DNA, 71 bp, Artificial Sequence
  ENSG00000258526_63 (sequence is synthesized)
gttcttccaggtgagttcgtggtctccagggcttcaggagcgaagctgcagaccttcacgactgcagcctc

SEQ ID NO: 939960 - DNA, 89 bp, Artificial Sequence
  ENSG00000258526_64 (sequence is synthesized)
cgcctgggatattccactataaaggtaaaacttataaaaacagaaaacctaaaaaggagaaatcagaaagaaggtgcatcatgctaatg

SEQ ID NO: 939961 - DNA, 120 bp, Artificial Sequence
  ENSG00000258526_65 (sequence is synthesized)
taaaaaggagaaatcagaaagaaggtgcatcatgctaatgcctatatgtttattcctgctacctccaatagttcactgataattcagattcagaccaatggagaaaccatgggaggaaaa

SEQ ID NO: 939962 - DNA, 120 bp, Artificial Sequence
  ENSG00000258526_66 (sequence is synthesized)
aaacaaacttttactctgatttcccttggaatccagtcaccatgctgtgaggaaatcaaagccaaagggaagtttcacatgaagagcaatcaagtcgtttagccctcagcctgatgacca

SEQ ID NO: 939963 - DNA, 120 bp, Artificial Sequence
  ENSG00000258526_67 (sequence is synthesized)
ccctactgactgctgcccgtagattatattgccaccatggaagaggaggagctggaaggagattctgaagccttgggacaaagctggtgctgcggcagtcagagcagagagacagaatga

SEQ ID NO: 939964 - DNA, 120 bp, Artificial Sequence
  ENSG00000258526_68 (sequence is synthesized)
aatgcctgtcctcatttattagccttttagagctctgctgctgtcctgtccataaggttatttgttggtaaaatattaaactacaggaaacataacagcctcagaaaagcatgactcaac

SEQ ID NO: 939965 - DNA, 120 bp, Artificial Sequence
  ENSG00000258526_69 (sequence is synthesized)
atgagcctgggacaactcagggtctctctactgtgcacagcatttgttctgctttcaaggctccccacagcatctgaagctttacatccctggaggcaactgcccatatgtttaccttta

SEQ ID NO: 939966 - DNA, 120 bp, Artificial Sequence
  ENSG00000258526_70 (sequence is synthesized)
ttaccaactgcagtttccaggcatctgctaaattacaattttgagtgcttaatggtgatttcatttgtgtaaaaaaaaagcggggagactctttgcccctcattaacttagaatggcatt

SEQ ID NO: 939967 - DNA, 120 bp, Artificial Sequence
  ENSG00000258526_71 (sequence is synthesized)
gcaccacaccgtagagctggcatataggtatattgaaagaagtgggtagagctaagaggattagaagcttatgtgtgccgtgaggagaagctgagactcaggttagcatctcactgtatt

SEQ ID NO: 939968 - DNA, 120 bp, Artificial Sequence
  ENSG00000258526_72 (sequence is synthesized)
tctgtgaggaggagatattggtgcaagatctcaagcagacaagcaaaatccatccctatccaacaactcctacctattgagcaaatgatttaaaaagtggttactgtgccatcagaaaaa

SEQ ID NO: 939969 - DNA, 120 bp, Artificial Sequence
  ENSG00000258526_73 (sequence is synthesized)
atcaagaggtaaaatccatttctattctcttgaattgaacagcttcaatgaattgagtgctgaagaattaacactctgtgacttcatgacttgttggaaattgtgaggaatctcaggcca

SEQ ID NO: 939970 - DNA, 120 bp, Artificial Sequence
  ENSG00000258526_74 (sequence is synthesized)
catggaggggccagtgaagatgttccagcttatagccccagctaaggtttcaactaatagccagactcaaccaccaggtatatgaatgaaccttcagatgattctagtctccagccttca

SEQ ID NO: 939971 - DNA, 120 bp, Artificial Sequence
  ENSG00000258526_75 (sequence is synthesized)
ccactaaattttggaggaacttgttatgcaatcataaaaacagattttgttatctggaagtgagtgccatgtaacagaaatctaaaatgtggtagtggctgaagctagactagacaggat

SEQ ID NO: 939972 - DNA, 120 bp, Artificial Sequence
  ENSG00000258526_76 (sequence is synthesized)
taggcaggactagacagagggcagaaggtgagagggccttcaggtgactgtggaaggctgatggacctcaaggaggctatcagagagggtttagaggagagtgaaaaaatatcattggag

SEQ ID NO: 939973 - DNA, 120 bp, Artificial Sequence
  ENSG00000258526_77 (sequence is synthesized)
ctggaggaaagaggatcattgttaggtaatgacatgaagtttggccaccttatcacctgtggtaatgtgaaaagcagaaaatggtgattgtctggcttcttcttgctgcttatagtaaaa

SEQ ID NO: 939974 - DNA, 120 bp, Artificial Sequence
  ENSG00000258526_78 (sequence is synthesized)
actcaagaacccagcccccatagtgtgaggaggcctaggacagttacagaagccatgtgtaggtgttctggctccagcaaaagtcttatctgacaacatcaactacatgttagtggggtt

SEQ ID NO: 939975 - DNA, 120 bp, Artificial Sequence
  ENSG00000258526_79 (sequence is synthesized)
ggaagaaaaaaaggtggagggagaaactgaatgaagaaaggatgatttgaaattaccagaaagtggaacgtggaaaaaacagagtaaaactagtttgagaataaaatcttaggttgtaac

SEQ ID NO: 939976 - DNA, 120 bp, Artificial Sequence
  ENSG00000258526_80 (sequence is synthesized)
gcccccatagtgtgaggaggcctaggacagttacagaagccatgtgtaggtgttctggctccagcaaaagtcttatctgacaacatcaactacatgttagtggcctttccttgaaattgc

SEQ ID NO: 939977 - DNA, 120 bp, Artificial Sequence
  ENSG00000258526_81 (sequence is synthesized)
tggagcttgtgcatcatcaaaataatggcataaaccaaggaagaagaaaacaaaattgaggaaatgggatccaacacaaaagagagacaacaggattaattgagtgttggtgaaaagcca

SEQ ID NO: 939978 - DNA, 120 bp, Artificial Sequence
  ENSG00000258526_82 (sequence is synthesized)
gagtgcattgagaatagattcatatcagttctggagaactgggtggatacattaatgttaagtacatagaaaagttaaaaatgaaaaaaattctcaattctagggaaaataatcatagta

SEQ ID NO: 939979 - DNA, 120 bp, Artificial Sequence
  ENSG00000258526_83 (sequence is synthesized)
aactacatgttttagttaccaatagtgtttacgtagtcaatataaacaatgggcattgatataaataatgtatgttgatctgctataacaaggtaaaatgctattggggaaacaagataa

SEQ ID NO: 939980 - DNA, 120 bp, Artificial Sequence
  ENSG00000258526_84 (sequence is synthesized)
agctgggactacaagcgtgtgccaccacgcctgggatattccactataaaggtaaaacttataaaaacagaaaacctaaaaaggagaaatcagaaagaaggtttggaagtgctatggttt

SEQ ID NO: 939981 - DNA, 120 bp, Artificial Sequence
  ENSG00000258526_85 (sequence is synthesized)
gttttagaagccttatgatcagctattcctatccagactgtggcaaaagagtccttgaattcctgtctattgataattgatgggcaattaggcttgttccaaattcactcttgcaacttc

SEQ ID NO: 939982 - DNA, 120 bp, Artificial Sequence
  ENSG00000258526_86 (sequence is synthesized)
gaatttccaattcagtgaaataatgcctgtcctcatttattagccttttagagttgggttttctggtttgctttgtttaaagtattcaaaatggcacatacttctacttagctttaatgt

SEQ ID NO: 939983 - DNA, 120 bp, Artificial Sequence
  ENSG00000258526_87 (sequence is synthesized)
ggaacaataaagtaaacagattttctcctctgagagaaagaaagtttcaataatatagaaatagctttgcccctatctagggcccttatgtctttttaaccccaaggggcatatcacaga

SEQ ID NO: 939984 - DNA, 120 bp, Artificial Sequence
  ENSG00000258526_88 (sequence is synthesized)
gtgtataggagaatatggcaatatatcaaaggcgataaaggccacagagctacagatgttcccccatcctatgcaagctgcttctctatagagccttccattctgcaaagcttccagctt

SEQ ID NO: 939985 - DNA, 120 bp, Artificial Sequence
  ENSG00000258526_89 (sequence is synthesized)
gttctgtcatagcacctgattagacagccgtgcctccaacactcttggctgtcctttctttccttggttaacttctcttgtcagtgcagttgagttatcaacatggtataagtgttacat

SEQ ID NO: 939986 - DNA, 120 bp, Artificial Sequence
  ENSG00000258526_90 (sequence is synthesized)
caataccatttcagaaataaaacactagccatgcaaaggctgaagcaaattgttttccaactaaatgctggcagcctgctcttatagattaagaccaggtttctccacaaagcactgaag

SEQ ID NO: 939987 - DNA, 120 bp, Artificial Sequence
  ENSG00000258526_91 (sequence is synthesized)
agctgggtcaacaaagtaagacctcgtctcaacaaaaaaattaaaaagttagccagatgtagtggtgtgtgcctgtggtcccatctactagggaggtgaggtaggaggatcgctcaggcc

SEQ ID NO: 939988 - DNA, 120 bp, Artificial Sequence
  ENSG00000258526_92 (sequence is synthesized)
tgcagtgagccgtgattgcactactgcactccagcttaggtgacagagacagcccctgtctcaaaaaaaaaaaagaatagaacattggctagtaatctaatcggtgctaaaggcatttgg

SEQ ID NO: 939989 - DNA, 120 bp, Artificial Sequence
  ENSG00000258526_93 (sequence is synthesized)
cattaccaggcaccaggcacaggctggagtaagacaaaattgtcatgttttgacatgtcatgagacaaaatttatccttgccattttctaggctcttgcctttctcctgattttccctgc

SEQ ID NO: 939990 - DNA, 120 bp, Artificial Sequence
  ENSG00000258526_94 (sequence is synthesized)
ataggtcagactcctcaccttcccactgcattttcttcactcttcttagaaaaggggattctcttgttcttcattaggtgcttcaactgatttaatgagcatcaactaatttcacttgtt

SEQ ID NO: 939991 - DNA, 120 bp, Artificial Sequence
  ENSG00000258526_95 (sequence is synthesized)
tgtgtttgggtcattcacttttcaaagtgttcattcagttacttcatccataaaatggtgacaatgacatcacagctttgtttaataattaaataagacaatctgtgtaaagcatttatc

SEQ ID NO: 939992 - DNA, 120 bp, Artificial Sequence
  ENSG00000258526_96 (sequence is synthesized)
atattgtcccacacatagtaaagttcaatgatttcatagatataattacaatatcataattaagataaagttttacattatactttcaaaagttagatttccaaatagaaatagcttgag

SEQ ID NO: 939993 - DNA, 120 bp, Artificial Sequence
  ENSG00000258526_97 (sequence is synthesized)
agctggaatgactgtatttgaaactcagatttatcagttactagttgtgtggcattaggcactgtttcaaccttgattttcagtttttatatgatgggaaatatagttaatcatttaact

SEQ ID NO: 939994 - DNA, 120 bp, Artificial Sequence
  ENSG00000258526_98 (sequence is synthesized)
actgctattgtgaggattaggtgggaaagccctggtcaaagacttggcactgaaaacattcatagtaaataaatattagctatttgttattattgtagtagtttaggaacaatttcatat

SEQ ID NO: 939995 - DNA, 120 bp, Artificial Sequence
  ENSG00000258526_99 (sequence is synthesized)
tatgctttttaaaaaatgcatacaatggggaatgttggttttctattttgcctgttactaaaagttcatgcaaataataatgtccagaagtttaggggaaagaatatttccacaagaacg

SEQ ID NO: 939996 - DNA, 120 bp, Artificial Sequence
  ENSG00000258526_100 (sequence is synthesized)
tttttgttgaactggctgagtagataagtacacagaataacttataccatcactttatatttacgcttacctaatatgatattgttatagctgtcttgtgaaatcaagttgttttcagct

SEQ ID NO: 939997 - DNA, 120 bp, Artificial Sequence
  ENSG00000258525_0 (sequence is synthesized)
atatctttcaggtcatccagaggtgcccaagccacaccaacagagaagatagtgattcctacaatgaaaacattttaaagtgaattgaaaatcaggtctagctaatatatggaattatgt

SEQ ID NO: 939998 - DNA, 120 bp, Artificial Sequence
  ENSG00000258525_1 (sequence is synthesized)
ctatatgttttccatacactgttacatagttgcagcgaaaactgcttactaatttctggacaattaaatcccctgaacaaattaagttttcacagtcattgtgacgagagtggcaaaaga

SEQ ID NO: 939999 - DNA, 120 bp, Artificial Sequence
  ENSG00000258525_2 (sequence is synthesized)
aattttccgtatgaggttggcctgcatcaaacagtatactggagtcagagtcacaatccattaaagcaaggaagaatggcacaagagatgggataaaacaaggaccttacctgcatcatg

SEQ ID NO: 940000 - DNA, 120 bp, Artificial Sequence
  ENSG00000258525_3 (sequence is synthesized)
tgcagcagctgcagggccttggacatcatcataggactgcccatctgtgacaattactaggaagttcttgttggggctctcccttatagggccaaacacatttctaacagtgaaggaaat

SEQ ID NO: 940001 - DNA, 120 bp, Artificial Sequence
  ENSG00000258525_4 (sequence is synthesized)
taccagaggctttacgtattttgtggtgccaaaccagttgggcatgtggtaagagaagaagccattattccgacagacagcctaatgggggagacacataaaagatatccaaaaggatca

SEQ ID NO: 940002 - DNA, 120 bp, Artificial Sequence
  ENSG00000258525_5 (sequence is synthesized)
aaagttgtttcttcttaaaaactggaaaatcctgaatgtttcaagttaatctagataagaggcagtcagcactgcacttagaggtccaaaatggaatacccatcactgtaacagaagata

SEQ ID NO: 940003 - DNA, 120 bp, Artificial Sequence
  ENSG00000258525_6 (sequence is synthesized)
accctcaccactttaccttgtcaacaaatgtgacatcctgaaccatccccagttcttcagggataggcttggccacagaaactataaatacattgacaccaaactctctggccacaatgc

SEQ ID NO: 940004 - DNA, 120 bp, Artificial Sequence
  ENSG00000258525_7 (sequence is synthesized)
ctgcttcctcgatgtcatcagaaggccaaccatcaataaataccaccaccactttggggatcccttttcttactccagcatctaccgtgaagaatttctgagcagtatgcttcaaggctt

SEQ ID NO: 940005 - DNA, 120 bp, Artificial Sequence
  ENSG00000258525_8 (sequence is synthesized)
ttcctaaatttgaaaaagaagcaaacaaatagcctttaccactgctcaaaccacatttctgtttccctgtagcatttgatgctgcaaagtttaagaattatatatagaactggcagtggg

SEQ ID NO: 940006 - DNA, 120 bp, Artificial Sequence
  ENSG00000258525_9 (sequence is synthesized)
gcggggcacacaaaaaagaattatatagaacccagttctgtaacagatgcatcagctgggaaagtttaattatctaccaggcctatttatcttcacaagccatattagttccccctccac

SEQ ID NO: 940007 - DNA, 120 bp, Artificial Sequence
  ENSG00000258525_10 (sequence is synthesized)
ctcctagaagcctcacatttgtttaccccacatcaatcgccagttagaaacacaaaactgattcccacttccatgcatgtgctctctatgtagccctttggtgactgattagtacctcta

SEQ ID NO: 940008 - DNA, 120 bp, Artificial Sequence
  ENSG00000258525_11 (sequence is synthesized)
gcattcattagataagtctgttgattttcacttctttttagcattacaaagagatacttctccaatgttatatctagtcaatccaatgtatgagaattctaaatcaccatgctttatatt

SEQ ID NO: 940009 - DNA, 120 bp, Artificial Sequence
  ENSG00000258525_12 (sequence is synthesized)
ttttaaaataagaaatatcaacactttggtatacttccattataaattgaaaatttatctcagatgatcaaatgcagacctagccaagatttcagttccaggaggatttcacatctgctc

SEQ ID NO: 940010 - DNA, 120 bp, Artificial Sequence
  ENSG00000258525_13 (sequence is synthesized)
atataaaatagcataatactgttttacatgtctgatcactgataaccctctcctatgttacatcccaggtatcaaagtctacttacctgtattggaattaccccctctgaaacctacttc

SEQ ID NO: 940011 - DNA, 120 bp, Artificial Sequence
  ENSG00000258525_14 (sequence is synthesized)
ctttatggcaaacaaaacatctttggctgatgtaaagtttttcaagtaaaattctattttgggatgttcactgagtggaagaaagaaaatgttattcagggagaattaaaaagatgagaa

SEQ ID NO: 940012 - DNA, 120 bp, Artificial Sequence
  ENSG00000258525_15 (sequence is synthesized)
aattaaagccgtggggttaatttgcccaaacaacattctacaactcccgaaggacagaaaacagaaaagtgaatcccttcagaatacagcatttttatcttaattgaacctgattatttc

SEQ ID NO: 940013 - DNA, 120 bp, Artificial Sequence
  ENSG00000258525_16 (sequence is synthesized)
tgctccagatctgtccagtgagatttatcaagcagcggatgcatttttagaaagcactgttaatattctcaagttttacactgtcaacctaacaaagaatcagtttttactataaatgat

SEQ ID NO: 940014 - DNA, 120 bp, Artificial Sequence
  ENSG00000258525_17 (sequence is synthesized)
gctaggaagagacaagctcttggcaacaagtaacaagataacataatacaacatgttaatttgtgaatttactgtcgatactaaattgagattaatgttattaaatgctatttttcaaac

SEQ ID NO: 940015 - DNA, 120 bp, Artificial Sequence
  ENSG00000258525_18 (sequence is synthesized)
ttgtcaaaatgttaccattattgctgggattctaagaaatctctacaaatgcctctgatgacatcagaaacaattggttctaatcctgtgaactctcttgtgaagaaagcatgagactcc

SEQ ID NO: 940016 - DNA, 120 bp, Artificial Sequence
  ENSG00000258525_19 (sequence is synthesized)
tgtttctgatgacagctaggacattctctttggtgctatagtcagtgaaactgaactccgtgcgctgatcataagtaaactgtacagcagctatcttggcaccaatgtccgagatttcaa

SEQ ID NO: 940017 - DNA, 120 bp, Artificial Sequence
  ENSG00000258525_20 (sequence is synthesized)
aagtcttggctatgttggaaacaaattcaagcatgaggcggaaattgctatctccaacactgctggagccatcaattagaaaggcaatgttcactgagttataacaggtcttgctgcaca

SEQ ID NO: 940018 - DNA, 120 bp, Artificial Sequence
  ENSG00000227107_0 (sequence is synthesized)
actccttgcagctgaagctgcagctgggcagaagggggctgagctgacactgcaaacctgcatgggtgggctttgggctccaagcaggggcctttgcctggggatcactccccaaccacc

SEQ ID NO: 940019 - DNA, 120 bp, Artificial Sequence
  ENSG00000227107_1 (sequence is synthesized)
acctggtctcccagccctgcgggcagaatgggctccagggtagctctcagaacaacagagccctctcctctcccctctgcagatggaacccccggcatctgctcctagtagaggccagtc

SEQ ID NO: 940020 - DNA, 120 bp, Artificial Sequence
  ENSG00000227107_2 (sequence is synthesized)
tgggcctgacctggcattccaccctgcagatagcgaggaggcaccccaagcacggagaagacccaccaagctgcctgatacctctgtctagctcccctctgcccagacaggaactgctgt

SEQ ID NO: 940021 - DNA, 120 bp, Artificial Sequence
  ENSG00000227107_3 (sequence is synthesized)
tcaccattcattccagacctgggcctttgaggacaggagctgtaaggatgattgatcgattgcctgtgtgtgaagccctggaagggctcttgcctagaatactgtccctaccctgacaag

SEQ ID NO: 940022 - DNA, 120 bp, Artificial Sequence
  ENSG00000227107_4 (sequence is synthesized)
gtagaggccatggtctggatggcggtggcccccccattcatatgtcaaaacctaaccctcaatgcaaggtggggcctgcaggtgaccaggtcctgaagcagagacctcatgaacgcgatg

SEQ ID NO: 940023 - DNA, 120 bp, Artificial Sequence
  ENSG00000227107_5 (sequence is synthesized)
agtgcccttacacaaaagcctggagggagcccgtcttccaccatgagatgacacacagaaggcaccatctgtgaggaatgggcctcaaccagacactgattctgctggaggcttgatgct

SEQ ID NO: 940024 - DNA, 120 bp, Artificial Sequence
  ENSG00000227107_6 (sequence is synthesized)
ggacttcccagcctccacagctgtgaacaatacatttccgtggttttataaatgaccctgtctaaggcgttctgttacagcagcacaaaggaactaagacagtgggcacccgtatttcca

SEQ ID NO: 940025 - DNA, 120 bp, Artificial Sequence
  ENSG00000227107_7 (sequence is synthesized)
tttagaggcggaaactgactctgaagtgagaaccggtccactctgagagcacatcgccaggggaagaggactgtagccaggaagttgttatgtcatggggtcatgggaggacccagcaat

SEQ ID NO: 940026 - DNA, 120 bp, Artificial Sequence
  ENSG00000227107_8 (sequence is synthesized)
ctgaaaggcggctcttttctggaagtggacagatgatgggggaggggcaggaagctgaattcaccacagtgtccgagaacactgtctaccagcgggagctgttcagacacacctctggcc

SEQ ID NO: 940027 - DNA, 120 bp, Artificial Sequence
  ENSG00000227107_9 (sequence is synthesized)
agtccccacggcagtgaatctcctgtctctggacaacaatccaacagggaaagtggggaggagggttgggaactgaactctgttccacaagttcaaccactgcactccactaagcaactg

SEQ ID NO: 940028 - DNA, 120 bp, Artificial Sequence
  ENSG00000227107_10 (sequence is synthesized)
gcacagccagtccctggtgaaggcttaaagatgaggaagatggggtcagcgcctgccctcctggcctcaacacatcaggatggaggatttaggtgttagcaaaaagtggctcaaagttcc

SEQ ID NO: 940029 - DNA, 120 bp, Artificial Sequence
  ENSG00000227107_11 (sequence is synthesized)
aatgaaggacagggagcaaagggagacttcttttagaaaggagacgttggaacttggatatggctttagttaaggagctccaggcatctcaagtcagccctgagaggcagcagccgtgtc

SEQ ID NO: 940030 - DNA, 120 bp, Artificial Sequence
  ENSG00000227107_12 (sequence is synthesized)
tgcctctcggacagctatgccccagcctccagctcagcagctggcaggcagcaggtgtgggtgcaggaatgagtgaactcatggggaccagcctcggcaaagacgcacagtccccacagt

SEQ ID NO: 940031 - DNA, 120 bp, Artificial Sequence
  ENSG00000227107_13 (sequence is synthesized)
gccccaggggctgggaaacagtgagcagccaccagcaagaccaaggcagtgcaagtggccacggctcaaggtttcccccaaggaggactatgtcacttaaggagtatggcctctgaagta

SEQ ID NO: 940032 - DNA, 120 bp, Artificial Sequence
  ENSG00000227107_14 (sequence is synthesized)
atgtaaatatggcctggaagattcagtcaacacctatttccttagtgcctacaatgtgcaggtgcagtttctgctcccggagttcagtcatgaacaatgccacagtcagccctgccaacc

SEQ ID NO: 940033 - DNA, 120 bp, Artificial Sequence
  ENSG00000227107_15 (sequence is synthesized)
cacctgcgtcagctcaggcacccagagcaatgtcacctggatctgccctccctcccatgtcactggactcgctgtcttttccctgcaatgaaacctccaacagctttccctgccactgtg

SEQ ID NO: 940034 - DNA, 120 bp, Artificial Sequence
  ENSG00000227107_16 (sequence is synthesized)
ggtggaagggccctcttcctcttcccaccttcatacagcttccaggccacctccttaagaatccaaagcaatctggtcacaccacttggtgggaaatacaccgaaatgttaactgtcctt

SEQ ID NO: 940035 - DNA, 73 bp, Artificial Sequence
  ENSG00000274461_0 (sequence is synthesized)
gccaggctggtcttgaactactgaccacaagtgatctgcctgtctccacttctttctttccttccttccttcc

SEQ ID NO: 940036 - DNA, 88 bp, Artificial Sequence
  ENSG00000274461_1 (sequence is synthesized)
ctcttctctctctctctttcattctttcttttttctttctttctccctccctccctctctcccttcctttcttcctctcaatgaacat

SEQ ID NO: 940037 - DNA, 120 bp, Artificial Sequence
  ENSG00000274461_2 (sequence is synthesized)
ccctccctctctcccttcctttcttcctctcaatgaacatagtattttgaatactatagtagactaaatagtgccccccccaccaaaggtccatgttgtaatacctggaacctgtgaata

SEQ ID NO: 940038 - DNA, 120 bp, Artificial Sequence
  ENSG00000274461_3 (sequence is synthesized)
tgttaccttacatggcaaagggcacttactttgcagatatgataaagagggactcagaaggtgtcagagtcaaggaagacaatatgacaacaagccaagaggggtttgaagatgctactt

SEQ ID NO: 940039 - DNA, 120 bp, Artificial Sequence
  ENSG00000274461_4 (sequence is synthesized)
tgctggctttgaaaggggccagagccagagaatccaaggaatgcagctctagcagctggaaaggccacagttctcccctagagcctctggagggagcgcagccctgccagcaccgtaggt

SEQ ID NO: 940040 - DNA, 120 bp, Artificial Sequence
  ENSG00000274461_5 (sequence is synthesized)
tcagcccggatgcaccatttcagacttcggacctccagaactataagagaatatattgtgctattttaaaccttaaagtttgtggtcatttgttccagcagcaacaggaaactaatttga

SEQ ID NO: 940041 - DNA, 120 bp, Artificial Sequence
  ENSG00000274461_6 (sequence is synthesized)
gcaccaagcactgtatctgatataaccaaagcttcaaaggagggtgcaggcccaggagtcgtgtggccactgccaggagagctaaagccataagactcttggccacctcgcttcctgcct

SEQ ID NO: 940042 - DNA, 120 bp, Artificial Sequence
  ENSG00000274461_7 (sequence is synthesized)
catggaggagagacaagtgaaaatgaaagacagatgaatgtgtcaagttgagagctctttacatgatgaaggtgtttctgcttcattgcatgaaacagaacatagagcggtgataaaacc

SEQ ID NO: 940043 - DNA, 120 bp, Artificial Sequence
  ENSG00000274461_8 (sequence is synthesized)
cagccagatcctttgggttgacttccaaccgcaggtggtggttactcattaggaaagagcgaacactgtaatgacttcaaaactaaggagtgcaaagccaaatattcactaataatcact

SEQ ID NO: 940044 - DNA, 120 bp, Artificial Sequence
  ENSG00000274461_9 (sequence is synthesized)
catcaaggagaacagatggcacacgttgaacactcctgaaaatgaaagcccttggctgcaggggtgaatgtccaggacccacagaaaatatcaagtcagatacctcttgaagcactgatg

SEQ ID NO: 940045 - DNA, 120 bp, Artificial Sequence
  ENSG00000274461_10 (sequence is synthesized)
ggaaggtgcagctggactccctggaactctgaagctgagagacagagcactacggaagggagccccattcccaagcatggtgtccaatacactgaaagaataactgggctcagtaatgca

SEQ ID NO: 940046 - DNA, 120 bp, Artificial Sequence
  ENSG00000274461_11 (sequence is synthesized)
cctagagactcagattccagacctgcccacttgctttactatccaaaacaaccatgacacatgacttctctggcggggtgttggccaagacaaactgaactatagaagatccttgacttg

SEQ ID NO: 940047 - DNA, 120 bp, Artificial Sequence
  ENSG00000274461_12 (sequence is synthesized)
ccaacgttcaaatgatgaactttcaaaaatagcgaaactggctgcagagcaaaagcttttcagctctgcacaacaccaacagatggcgctaagtgtcacccttgtggagagcagagggac

SEQ ID NO: 940048 - DNA, 120 bp, Artificial Sequence
  ENSG00000274461_13 (sequence is synthesized)
ctcggaagggcctttggaaatctaatctggttttgagttcttggtgggaaaatgcacctttaagttgggggagtttgaagacgttgccaagacacgtgctgcagcatttgatcttttctg

SEQ ID NO: 940049 - DNA, 120 bp, Artificial Sequence
  ENSG00000274461_14 (sequence is synthesized)
ccgcactggcttctgcaattaacatgctttcaccagtgaaactcaggttgcggggagagcattcttccaggttcatgcctgttgtcatggagtaattataattcatgtctccgttcacag

SEQ ID NO: 940050 - DNA, 120 bp, Artificial Sequence
  ENSG00000274461_15 (sequence is synthesized)
aggacattaaagacagatggtgatggatcagagcactcatcagccactgggtgtagactgtataaaaagctgagcccagaggccaccatgatcaacctgcaacctggcaagaaatggact

SEQ ID NO: 940051 - DNA, 120 bp, Artificial Sequence
  ENSG00000274461_16 (sequence is synthesized)
caactccacagacagcagttgtcagggagcccagacatgtaaggatgcggcaaaggccctcgccagatgctgaatgcggatgccgtcatcttggacttcctagcttccagaacgcttgca

SEQ ID NO: 940052 - DNA, 120 bp, Artificial Sequence
  ENSG00000274461_17 (sequence is synthesized)
tctatatgtggctcagtgtccaggctgcctgacatcccaggacaatgctgcactgatttactctctacagctccatgaagcagtgatgaaagcaaggaaaattttattcctaacttcaga

SEQ ID NO: 940053 - DNA, 120 bp, Artificial Sequence
  ENSG00000274461_18 (sequence is synthesized)
gctgtgaggatggaatggggaacctggacagctccagcaatcttactgcagaaggtgcttctgggtggatcccaggcagaggaatcagaggcaaaacatggagggagtgaactcctgaaa

SEQ ID NO: 940054 - DNA, 120 bp, Artificial Sequence
  ENSG00000274461_19 (sequence is synthesized)
cttcaccccgttgtggcctctttatccttcacgtgtgtgtcctgtccactagtccgtctttccatgattggtttgcacacggccacttcagacctccctactgcccaatgtatctactgt

SEQ ID NO: 940055 - DNA, 120 bp, Artificial Sequence
  ENSG00000274461_20 (sequence is synthesized)
tatcttcctaaaactcatgagctttaaccaggaaattggactttgaattcaaaataagtaaaacaattagaagaccagaagtacagggagtgctctattttacttcttgctgtttgtgtt

SEQ ID NO: 940056 - DNA, 89 bp, Artificial Sequence
  ENSG00000274461_21 (sequence is synthesized)
tctgccatattttctaggcttgcatacaactcagaagcagagaaggaaaacccctagcttatgaccaagacgaagtttccagtgagtct

SEQ ID NO: 940057 - DNA, 120 bp, Artificial Sequence
  ENSG00000274461_22 (sequence is synthesized)
acccctagcttatgaccaagacgaagtttccagtgagtctggttggtgggagctcagaacagattaaagttgatttagaaaaataaaaacactctgacatttttcatgtgcacagatgta

SEQ ID NO: 940058 - DNA, 120 bp, Artificial Sequence
  ENSG00000274461_23 (sequence is synthesized)
gggtaagactcatacccactacccattcattgattcagacaagatatgcttttaactctgcaagctgaggtccaacaggctgatgtctctaggctcatttcttgtccaagcttccctgcc

SEQ ID NO: 940059 - DNA, 120 bp, Artificial Sequence
  ENSG00000274461_24 (sequence is synthesized)
ttagctgagcagcagttgctacagagagagacacgtcttccccaaccccaatcagaaagtcaattgaggagattcctgaagtgctatagccgtgctgtgaagggtggcgggagattaggc

SEQ ID NO: 940060 - DNA, 120 bp, Artificial Sequence
  ENSG00000274461_25 (sequence is synthesized)
agagatgggagtgggataaaaaggaaacagagaaaccttctgtgctgtgaatggttggggagaggtgaagcagggatgggaatgggatgaaaagaaaacagagaagcccaaatggatggg

SEQ ID NO: 940061 - DNA, 120 bp, Artificial Sequence
  ENSG00000274461_26 (sequence is synthesized)
agacaagaggaagacagacaatgtacagtccagccctgcagaggcctctgggcccctctagaactccaggaggccccctcagctccatggtttgcattcctgccccagcgattcctggct

SEQ ID NO: 940062 - DNA, 120 bp, Artificial Sequence
  ENSG00000274461_27 (sequence is synthesized)
ttcatttagaaccctgggtgtgtattagtttgaatcatagcccacagcttgctgcactgtcaaatttgtgtctgccaacagaaaggaatgtatttcagccagcaagagagggaactcagg

SEQ ID NO: 940063 - DNA, 120 bp, Artificial Sequence
  ENSG00000274461_28 (sequence is synthesized)
atttgtggcaaggaaaaatggaatgcagtagaggagaaaactccattagaaattctctgaggagccaggatcattcgtcttcctcttctggttgtcagtgggccactctctgcctacagc

SEQ ID NO: 940064 - DNA, 120 bp, Artificial Sequence
  ENSG00000274461_29 (sequence is synthesized)
tgccaccatctctctaaaggaaagaaacacagcatgcttatttgcctctgctagttgtagaatcagacagatcgttgataaagccctgcgtcaacctctcaacctaaccttttactttat

SEQ ID NO: 940065 - DNA, 85 bp, Artificial Sequence
  ENSG00000274461_30 (sequence is synthesized)
atcagtatcctgtcctctagatgggagatgggagtgggagcccaatccttttcttttcttttttcttttcgacagagtttcggtc

SEQ ID NO: 940066 - DNA, 78 bp, Artificial Sequence
  ENSG00000274461_31 (sequence is synthesized)
tacgtgagccaccgcacctggcccaacccgctccttatcaaaaaacttcaccccgttgtggcctctttatccttcacg

SEQ ID NO: 940067 - DNA, 73 bp, Artificial Sequence
  ENSG00000274461_32 (sequence is synthesized)
ggagtgcagtggcacgatcttggctattgcaatagctggaattacgagtgtgcaccaccatgcccagctaatt

SEQ ID NO: 940068 - DNA, 120 bp, Artificial Sequence
  ENSG00000274461_33 (sequence is synthesized)
aaggggaagagttccaggagccatgaacggattactcaagcagggatgcacattgtatataaaagaaagacatgaagtacagttacagaagagagattggggcattgtcacttcacagaa

SEQ ID NO: 940069 - DNA, 120 bp, Artificial Sequence
  ENSG00000274461_34 (sequence is synthesized)
ggcaatggggagtgtcaagagattgattttccctccttttccctgggctgtaatttctccctctttcttggctattcataaacagatggcaatggaccccatgagtggagctttaagcca

SEQ ID NO: 940070 - DNA, 120 bp, Artificial Sequence
  ENSG00000274461_35 (sequence is synthesized)
ggaagggagccgggggaaaatgaggagtgactgctaagaggtagagggtttcttttgggggctgtgaacatgttccagaattaaacagtgatggttgcacaactctgtgaaaatactaaa

SEQ ID NO: 940071 - DNA, 120 bp, Artificial Sequence
  ENSG00000274461_36 (sequence is synthesized)
aacccactaaattgtacattttgaaggggtgacttttaaggtatgtgaattatatttcaatacaaataaaataagtagatagatagataaaagcccactccttgagtggctttcattcaa

SEQ ID NO: 940072 - DNA, 120 bp, Artificial Sequence
  ENSG00000274461_37 (sequence is synthesized)
tgcagcagaaccaaagagcagccagcgccctccaagcctaatgtgctccttctcaccacgcagctcttggccacctcgcttcctgcctctctcagttgattccctgtgactctatccctg

SEQ ID NO: 940073 - DNA, 120 bp, Artificial Sequence
  ENSG00000274461_38 (sequence is synthesized)
tgtagaataggtatcttggttgccatacaccaacttttctgatgttttaattaaaactaggaaaactgtcttttaggattgggctgctagcaatacggaaaggagcacaaatttctgggt

SEQ ID NO: 940074 - DNA, 120 bp, Artificial Sequence
  ENSG00000274461_39 (sequence is synthesized)
aatggagagaaaatctattctagttcaagtatttggagttcctataaatcttactctatatacaattgttgcttgagaaatagtattaccaatagaccgcaaacaatatgctttttaatc

SEQ ID NO: 940075 - DNA, 120 bp, Artificial Sequence
  ENSG00000274461_40 (sequence is synthesized)
aactgtgtctcatctgagctgtgatacatctttggccttatgaaaagagaatgtttatttaataagagcagctgctgtaatttttcaaaatcatacctttttctgaaattattcccctgc

SEQ ID NO: 940076 - DNA, 120 bp, Artificial Sequence
  ENSG00000274461_41 (sequence is synthesized)
tcacaaatggtagtgacttttgtgaaagagtttattttgattattctattagctggatcagtaatcagaaaacttgctttgagggaattgtttccagatcatgtcatatcacacagggac

SEQ ID NO: 940077 - DNA, 120 bp, Artificial Sequence
  ENSG00000274461_42 (sequence is synthesized)
cccttgggagtcatctacataagctttctaaaacctaacttttaaacagcagcaacagtcaaacacagtggatgtggcgggaccattctcttatgataaggttttgtacttctaaaatag

SEQ ID NO: 940078 - DNA, 120 bp, Artificial Sequence
  ENSG00000274461_43 (sequence is synthesized)
gtttcctactcaaagttcggaccataattaatcagtcctggttggagacttataccaaaactgcaatatatgtgtgttttaagcatgatttaaacataacttttcttttctttttttaga

SEQ ID NO: 940079 - DNA, 86 bp, Artificial Sequence
  ENSG00000274461_44 (sequence is synthesized)
atgatttaaacataacttttcttttctttttttacgcagtggcatgatcacagctcacggcagccttgacctcctgggctcaagca

SEQ ID NO: 940080 - DNA, 65 bp, Artificial Sequence
  ENSG00000274461_45 (sequence is synthesized)
agcaatcttcccaccttttatttttttgtagatgaagggtcttgctatgttgaccaggctggtct

SEQ ID NO: 940081 - DNA, 120 bp, Artificial Sequence
  ENSG00000274461_46 (sequence is synthesized)
caaagtgctgggactacagacgtgagccactgcacccggcctaaacatagttttccaagcacactatggtcattatctttaatttatgggagaattaaagagttgaaatgactcttcact

SEQ ID NO: 940082 - DNA, 120 bp, Artificial Sequence
  ENSG00000274461_47 (sequence is synthesized)
cttttgaagtggtagcaactaaaaaacatagtagttttttagttttggcagtagttatggcagagagattggaaccactggatgctggacttccagggcatgatggctcactcgatagag

SEQ ID NO: 940083 - DNA, 120 bp, Artificial Sequence
  ENSG00000227101_0 (sequence is synthesized)
atcagctctgggtcccagtctacattccgtggcagcctggctccaacatcccagggaattgtgtcactcccattgagcagctgtggggccctctcccacatggcccaggtccaccactct

SEQ ID NO: 940084 - DNA, 120 bp, Artificial Sequence
  ENSG00000227101_1 (sequence is synthesized)
gtcaaaggtcgcacagcccagacaaaaacaggacacagcagtgtgtgaatgagccgggctttctccttccctccacgtaatagaaggtgcctgaggttgttgaaacacagtccatttctc

SEQ ID NO: 940085 - DNA, 120 bp, Artificial Sequence
  ENSG00000227101_2 (sequence is synthesized)
ctgggaatgacaagaatttgagggatgctgactttcaaggaatactgcatgacaggcatcaagataaacctgatgaagaaaacataggccagaatctgggaatcgggagcaaagtaatac

SEQ ID NO: 940086 - DNA, 120 bp, Artificial Sequence
  ENSG00000227101_3 (sequence is synthesized)
aacaggactgagcaggtgcctgtgtgcacagaagaccttgtgtgagtcctttggtaccacgtttgctgcacgaatgtctgagacacctcacagtcgcttggttcagcctctccctcctct

SEQ ID NO: 940087 - DNA, 120 bp, Artificial Sequence
  ENSG00000227101_4 (sequence is synthesized)
ctccgctggggaacatcatccctcatcactggaagaaattacaaggattgtgtaaacaattacaagtattctacaaacagtgagcatgctggtttggcccatctatttgtaagaaaaaac

SEQ ID NO: 940088 - DNA, 120 bp, Artificial Sequence
  ENSG00000227101_5 (sequence is synthesized)
atggggttttatggcaatgagttacagctctgaactcctggcacaatcacaaatatcctcagcacaaaacaccaagtgtatgtctcccttctgtcctaaaagggtagtgtgtgcaactca

SEQ ID NO: 940089 - DNA, 120 bp, Artificial Sequence
  ENSG00000227101_6 (sequence is synthesized)
ttgatggggctcccatttcatttttgaaagatctgctcactgataataccagtgagattgttttcaccaagatctatgacatacaaataaactgttgcttcaaaagcatctagcggccaa

SEQ ID NO: 940090 - DNA, 120 bp, Artificial Sequence
  ENSG00000227101_7 (sequence is synthesized)
ccctgggttgttctggctctttcagtgcagggacgcaaacacaggaagagcccccatggccctcgctgggaaagacgggctcactcgttgcacgtgagcactgcagaccaacagcatcac

SEQ ID NO: 940091 - DNA, 120 bp, Artificial Sequence
  ENSG00000227101_8 (sequence is synthesized)
agaaaggaggctctcctgccgtacttgtgactcatgtcttaaagataccccaagagaattgaacaaagctctatcgtgagatccttctgaggagagaataaaaaggaaatatgtatttta

SEQ ID NO: 940092 - DNA, 120 bp, Artificial Sequence
  ENSG00000227101_9 (sequence is synthesized)
accctctgttcctggggtgtgtggcatcttccagcgttgggtctgaggttctagatttatatgttaacaagctgaattcctgcttcatctggaggactgcacagtgtatctgagagagga

SEQ ID NO: 940093 - DNA, 120 bp, Artificial Sequence
  ENSG00000227101_10 (sequence is synthesized)
ttttcaggaggccagaaaatcaagctggagggattttcagcgtgttgggagattgctacctgttttaagtcaggccattgccacgtctttttccccaccttggagacttcaggccttcag

SEQ ID NO: 940094 - DNA, 120 bp, Artificial Sequence
  ENSG00000227101_11 (sequence is synthesized)
acaacactcccgcactgggtttatgagagtaacccccaccttcccaggaagttggaagcattgccccagcctttccagaagctctgcctgccgttagcttggatcatgaaaattggctcg

SEQ ID NO: 940095 - DNA, 120 bp, Artificial Sequence
  ENSG00000227101_12 (sequence is synthesized)
gccaggagaatacattataaggccccaaaccgcgccaaatcttaagccctcagagcataaagataaactgatttacaattattttcattaaaatgtcattttaggtatatgaatgaacaa

SEQ ID NO: 940096 - DNA, 120 bp, Artificial Sequence
  ENSG00000227101_13 (sequence is synthesized)
gactggcggcccctgttccctgggttgttctggctctttcagtacacattggaggagacattgctgctaattccgtattgaagtgggtaataccaccaatgaccaagtaacctcggcaaa

SEQ ID NO: 940097 - DNA, 120 bp, Artificial Sequence
  ENSG00000227101_14 (sequence is synthesized)
gcagagacagctagagcgggaagagtcttctcttcttggaaggaatttgcaaggaagacaggtccaaaatgaagatgaggaaacggcctgcatttctgaggggtttatttgctttttttt

SEQ ID NO: 940098 - DNA, 120 bp, Artificial Sequence
  ENSG00000227101_15 (sequence is synthesized)
tttttgttttaaatcattgctggttctacaggtttccctgttggaattgccctttgggactctcaggtctggatagttctctgaggctgatgagcctgctgggtggtggcagcctggtgc

SEQ ID NO: 940099 - DNA, 120 bp, Artificial Sequence
  ENSG00000227101_16 (sequence is synthesized)
gaagcttttcttcatctcatcatggggacctcaacaaggaaggtgcccaaggcaaggatggtggtgggggacctgagtgccatccccacttctggatccagtgttcaaacacccacagtg

SEQ ID NO: 940100 - DNA, 120 bp, Artificial Sequence
  ENSG00000227101_17 (sequence is synthesized)
gtgacatcatctctgcatctgtacagtgcacagggtgtgtggttagagcaggagttggaaggaacggggagggaacagtcatagcttccagtcccatctgcttcttgtctctatgcccag

SEQ ID NO: 940101 - DNA, 120 bp, Artificial Sequence
  ENSG00000227101_18 (sequence is synthesized)
tgcaggactggcggcccctgttccctgggttgttctggctctttcagggtaaaataattatttagttccaatcatctttgtacacaaagatttatatgttaacaagctgaattcctgctt

SEQ ID NO: 940102 - DNA, 120 bp, Artificial Sequence
  ENSG00000227101_19 (sequence is synthesized)
cagggaggaaaaatggatacaggatataaatagaaaatcctcaaaacaggaatttcaaaatgtcaacaaacaggcaaaactttctttcaacagcgctattatgactgggtctcgctatgt

SEQ ID NO: 940103 - DNA, 120 bp, Artificial Sequence
  ENSG00000227101_20 (sequence is synthesized)
cctgcctcagcctcccaagtaactggaattataaatgtgagccactgtgcccagcaattacaaaatttttggaatgcaattgggaagtacagctgaaaaacttcagcaacgtgggctgtt

SEQ ID NO: 940104 - DNA, 120 bp, Artificial Sequence
  ENSG00000227101_21 (sequence is synthesized)
tgggaagtacagctgaaaaacttcagcaacgtgggctgtttgattgtacaatcgcacttcttggaatttatcctacagaaatcagtagtcaagttcacaaaaactgacaatagccattac

SEQ ID NO: 940105 - DNA, 120 bp, Artificial Sequence
  ENSG00000227101_22 (sequence is synthesized)
agagaagcagaagaaagggaaataaaaacattcaaacctaccaacaggagattggacaaataaatcatgttataactatacaatgggctattatgtaaccattaaaatgatcatctattc

SEQ ID NO: 940106 - DNA, 120 bp, Artificial Sequence
  ENSG00000227101_23 (sequence is synthesized)
tgcaggactggcggcccctgttccctgggttgttctggctctttcagcatatcagaatgtcactcatctcccaccacgcttacccaggattcaccatgctgctttcttgcctggccttgc

SEQ ID NO: 940107 - DNA, 120 bp, Artificial Sequence
  ENSG00000227101_24 (sequence is synthesized)
ttgagcgctctctggcctcagtatgctcagtgcacagcattaactcccatcttccaagtcttgaccatgcaatcagaagagacatggagaacctaccatgagccagacactttttctacc

SEQ ID NO: 940108 - DNA, 120 bp, Artificial Sequence
  ENSG00000227101_25 (sequence is synthesized)
cgtttccgtgcaatacttcattttggttttacaacattccttctgggtaggatgcacagtttatttacattttatagataaaattattgaggtgtcaaaaggctgagtggttttcccaaa

SEQ ID NO: 940109 - DNA, 120 bp, Artificial Sequence
  ENSG00000227101_26 (sequence is synthesized)
gctacaaccttgtacattttggagacaggcctgaaactgttggaggggttcagagcccacctccttctcttcagcatcactatgcaccacggctgggccagccctggtcttgagtctcgt

SEQ ID NO: 940110 - DNA, 120 bp, Artificial Sequence
  ENSG00000227101_27 (sequence is synthesized)
caagaagccgtcatagaagatcctccttctgttggtttcttttctgcttggactctggcatagtaaaaaaattcacacacaactcattttgaaaaaccaaatgaaacaaaacaaaggtcc

SEQ ID NO: 940111 - DNA, 120 bp, Artificial Sequence
  ENSG00000227101_28 (sequence is synthesized)
tcttagtcatagcatcaaaactgaaagttagtgaagggcttagaaattcaccctgactttacacaggaggtaatagccactgggaataccgagtaactccccttccacccacaccagatg

SEQ ID NO: 940112 - DNA, 120 bp, Artificial Sequence
  ENSG00000227101_29 (sequence is synthesized)
gtttctggtggagccaggacagcgctcctgccccaggacctcaggacgaggacgaagtcctgggctctgttggaacacagcataggataattctcacagctgggtgggcctgggaggcag

SEQ ID NO: 940113 - DNA, 120 bp, Artificial Sequence
  ENSG00000227101_30 (sequence is synthesized)
gaggcagatgtgtgctgagggccacctgccagatttagagatggagcacggatggattgagaagaggttctgagacagaagtattgctctaaggatctggcgtagacaaatagaccctcc

SEQ ID NO: 940114 - DNA, 120 bp, Artificial Sequence
  ENSG00000227101_31 (sequence is synthesized)
ttggaaagatgagtggccctggggttgtccccaaatctctggaccagcccaagcctatgactccctgcacaagggcacctgctctcactgcgcaaggatctctggactttctcctccaaa

SEQ ID NO: 940115 - DNA, 120 bp, Artificial Sequence
  ENSG00000227101_32 (sequence is synthesized)
gacctgctcctggaacacagagcccctcttctccttcgtattgggacccgcctggcctcacactaggaatgtcccctggacagcagtttgaaggccctatgctcgctcactgcactaagg

SEQ ID NO: 940116 - DNA, 120 bp, Artificial Sequence
  ENSG00000227101_33 (sequence is synthesized)
attcttgagcgatgggcgacttggtcgacacacaacccgggcccactgtgcggaattgcgtcgaataagcttctccctggggcagagtccctgcctgtccttgccgcccccgtcctgttc

SEQ ID NO: 940117 - DNA, 120 bp, Artificial Sequence
  ENSG00000227101_34 (sequence is synthesized)
tcgtccctctatcctccaaccctccccaaggccctttctccccctacttcaaggatggggcccttttccgagcactttgctcattgcaaaacataaccaaattaaacaaaacaaagccca

SEQ ID NO: 940118 - DNA, 120 bp, Artificial Sequence
  ENSG00000267568_0 (sequence is synthesized)
ggctacaaactgtagggctccaactacctgatgatctggaaaagggacttcctttgggcggcttggagcagacagcacccagctctgcagacctgagcaccccatgtgccccaagtgaca

SEQ ID NO: 940119 - DNA, 120 bp, Artificial Sequence
  ENSG00000267568_1 (sequence is synthesized)
gcgagctccggatgccgcaggaaaagacgagaatccagcacagttcctcttctgcacctcacatcccaataaaatatttattatttcaagaaataaatctttaaaaaaaagagagaaaaa

SEQ ID NO: 940120 - DNA, 120 bp, Artificial Sequence
  ENSG00000267568_2 (sequence is synthesized)
gtaaacagccgaggccggctgcgggcacctgcaatccccgacccccgacgccctccccgagaccctggagacgcggctccgcccccaccggtaattaggagattttcaaggcctatgtcc

SEQ ID NO: 940121 - DNA, 120 bp, Artificial Sequence
  ENSG00000267568_3 (sequence is synthesized)
ccaaagcccagcccagctggagagatcagccctgcggtcctgccgcgcactccaccgccagcctctcgggagtcaagggatccgccttcagggtgaattggggttccaccatgtcaccct

SEQ ID NO: 940122 - DNA, 120 bp, Artificial Sequence
  ENSG00000267568_4 (sequence is synthesized)
ttgggatacaaaggggtaagtgtcccctcattttagagaaagatcaagagccagtgaacaggatttcccagccagggacatggagcagggcacctgcagatggtccacgtgctcttggct

SEQ ID NO: 940123 - DNA, 120 bp, Artificial Sequence
  ENSG00000267568_5 (sequence is synthesized)
gatggcagcccacctccgggaggggcctgtgcacctttctcccaggaggagggaaggacccaatcattatccagagtcaacgggcctttgcacaggctgttcctgctgcctggaagctca

SEQ ID NO: 940124 - DNA, 120 bp, Artificial Sequence
  ENSG00000267568_6 (sequence is synthesized)
tccttttggctcactccctcacttcctgcccaaatgtcatctccatgagatcgccctggaaacccaggactaccttcccaccttccacactcccttgccctcttgctataattttctcta

SEQ ID NO: 940125 - DNA, 120 bp, Artificial Sequence
  ENSG00000267568_7 (sequence is synthesized)
gagggaaggacccaatcattatccagagtcaacgcagggacttcctttgggcggcttggagcagacagcacccagctctgcagacctgagcaccccatgtgccccaagtgacatggagca

SEQ ID NO: 940126 - DNA, 120 bp, Artificial Sequence
  ENSG00000267560_0 (sequence is synthesized)
agctgtgaataccccgagggaagagactatgacttgctcaagctcatctttgtgaacagcccatggctctttgaaggtgaaatccatatatgcaacatctttgtattccccacaacaaaa

SEQ ID NO: 940127 - DNA, 120 bp, Artificial Sequence
  ENSG00000267560_1 (sequence is synthesized)
ggcagagctcttcacagatacagatatctttatctgcacccactcttgcttttccttccatcttagaagcagttcctttcactgcttcaagtaaaatactttcctcttgtgcttttgatc

SEQ ID NO: 940128 - DNA, 120 bp, Artificial Sequence
  ENSG00000267560_2 (sequence is synthesized)
gcttccctgaagaggcaacatctaagctctgtcctgaaggatgagtaggaactagccaggcagagtaagaatactcctggcagacggaatcatatgtgtaaaaacctgaggagaacagaa

SEQ ID NO: 940129 - DNA, 120 bp, Artificial Sequence
  ENSG00000267560_3 (sequence is synthesized)
gcttgccgtgaatctgattaagtctctagatctagacccagctaccaaatatacaagaaatagagaagaacatgttaaaagacagaagagaaatgcaatcaccaaaattcagactgtggg

SEQ ID NO: 940130 - DNA, 120 bp, Artificial Sequence
  ENSG00000267560_4 (sequence is synthesized)
aaactctataggacaaatgactcagtttcttcaataagtaaattgtatggagaaaaaaggaataaaagggtgacattctatctatggattgaaggagacaacatagcaaccaactacaat

SEQ ID NO: 940131 - DNA, 120 bp, Artificial Sequence
  ENSG00000267563_0 (sequence is synthesized)
accagcgcctccccaaacccaccccgtcaccaacctctgtttactccttattccacttacctgacctcccaccgaggagtaagccatggctaaccaccaaacgcgagccctggctacacc

SEQ ID NO: 940132 - DNA, 120 bp, Artificial Sequence
  ENSG00000267563_1 (sequence is synthesized)
aggtcatgcctgtctcaggtatttggacaactggtgtgtgtttacaaagagctggttccaatcctagctctgccaacttctgaggcttgaccaagtgactcgggatccaggatctcctcc

SEQ ID NO: 940133 - DNA, 120 bp, Artificial Sequence
  ENSG00000267563_2 (sequence is synthesized)
tgcatccctggaccttgccgtggggccactggtactcccggtgtaggaccctctacaaccaccccaggaagagagggttcccaggcaatcgggcacatggtacactgaagcggctggcct

SEQ ID NO: 940134 - DNA, 120 bp, Artificial Sequence
  ENSG00000267563_3 (sequence is synthesized)
ctgtcctgagagagagggagcgctgcgattctcagcacaggctcatggcagaactccgggcccagctacgcggcttctgcaggaattattcagacaaataaacaccaagaaacatgactt

SEQ ID NO: 940135 - DNA, 120 bp, Artificial Sequence
  ENSG00000267564_0 (sequence is synthesized)
gaagactttttagagccactgttcttggagcctgttacctctgggagaaactgcaactgtagcagcattccttccccccaggaatgtgacaaagatgagcaccattccaacacctgttgc

SEQ ID NO: 940136 - DNA, 120 bp, Artificial Sequence
  ENSG00000267564_1 (sequence is synthesized)
tcttctctagagcaggcacttcaatcttcaggccaaaactaaaatgtctgcatgaccacactgccaggttgcccaagattggctgactttgtatgcatcctgattaaaaatggcatcttg

SEQ ID NO: 940137 - DNA, 85 bp, Artificial Sequence
  ENSG00000267565_0 (sequence is synthesized)
tttttttttaatccaagtggcctaaatgacacaagaccagtgttcacatttatttccacacagtgctaatttatgacagttgtat

SEQ ID NO: 940138 - DNA, 120 bp, Artificial Sequence
  ENSG00000267565_1 (sequence is synthesized)
tgtttgggcacccctttttcttctgttttagctaacactttactcatatcatttatgagccccaaccagtcctcagtccttaatcttatttaaaaaactgtccctccagggttcaagcaa

SEQ ID NO: 940139 - DNA, 80 bp, Artificial Sequence
  ENSG00000267565_2 (sequence is synthesized)
gagccccaaccagtcctcagtccttaatcttatttaaaaaactgtgcatgcacgaccacgtccagctaatttttgtattt

SEQ ID NO: 940140 - DNA, 120 bp, Artificial Sequence
  ENSG00000267567_0 (sequence is synthesized)
ctcgcctgtcccccggagggacagaggggccgcgtgcggctgagtccgttggaaaccacctttgcaaaattgtaactgaggaaattgtgatggtgaaagaaatcagacctaatcaactcc

SEQ ID NO: 940141 - DNA, 120 bp, Artificial Sequence
  ENSG00000267567_1 (sequence is synthesized)
atcttgcctctaacctttaagctgtccttgtttattcctgggcggaagcccaactaaccttgggaaggaattcagtccatggtttgactctgaaacaaaattgataagagcctgtgaatc

SEQ ID NO: 940142 - DNA, 120 bp, Artificial Sequence
  ENSG00000267567_2 (sequence is synthesized)
agctcagtggatcagctgacaccacccacaccgataatctgcctcaaccagttctgccaaaccaaccaggaagagtaaatagcaagaaaaactccaacaacctctgattccatcttcaac

SEQ ID NO: 940143 - DNA, 120 bp, Artificial Sequence
  ENSG00000267567_3 (sequence is synthesized)
tccatcttcaacctggccaatcagcactccccacttcccaagctcctacccgcccaattgtctttaaaaactctgttcctcaaatgctcggagagactgatttgagtaataataaaactc

SEQ ID NO: 940144 - DNA, 120 bp, Artificial Sequence
  ENSG00000242258_0 (sequence is synthesized)
attgcaggctgaagaggactggcctttcagtggccctcgtggaacggtaggaagctgagctggactctctgccacatcgttcggttcccacaacagcctgaaatggggtcttgccttgtt

SEQ ID NO: 940145 - DNA, 120 bp, Artificial Sequence
  ENSG00000242258_1 (sequence is synthesized)
gcccaggctggagtgcagcaacgtgatcatagtttactgtagcctgggctcaactcctgggctccagtgatcctcccgcctcagcctcacaagtagctgggaccatagatgaagcagcag

SEQ ID NO: 940146 - DNA, 120 bp, Artificial Sequence
  ENSG00000242258_2 (sequence is synthesized)
tgaggagaagctgagagcacggagggcttcaggggagagcctgtcctttggaaaagcgggcaatttgcactcgtggtagatgagtggggaggccgctcagtctctctgcccctttgcaca

SEQ ID NO: 940147 - DNA, 120 bp, Artificial Sequence
  ENSG00000242258_3 (sequence is synthesized)
tgctgcacccgtttagtttgacgtcgtggagagctcctccaggcacgggctgtgtgaaagggtttaaaagtttgggggcatggctgggggtccccgcatgaggggtgctgtgtaggctcc

SEQ ID NO: 940148 - DNA, 120 bp, Artificial Sequence
  ENSG00000242258_4 (sequence is synthesized)
ggaagaagtgtattcagcattctaccttcttcctgattctgtgagcttagacctgcttccactttcaatctctctcattgcaggctgaagaggactggcctttcagtggccctcgtggaa

SEQ ID NO: 940149 - DNA, 120 bp, Artificial Sequence
  ENSG00000242258_5 (sequence is synthesized)
cggtaggaagctgagctggactctctgccacatcgttcggttcccacaacagcctgatgaagcagcagcagaaaaaatggaagccattttggttaacgggtcacatcttagcagttggca

SEQ ID NO: 940150 - DNA, 120 bp, Artificial Sequence
  ENSG00000242258_6 (sequence is synthesized)
ctcgccctgtgccctgcgccccggttcctgctggttctgtgccttctggactcatttcctttccagggtccgcaaccgcttccgacacaatcactattttggctgcggccacggcttcat

SEQ ID NO: 940151 - DNA, 120 bp, Artificial Sequence
  ENSG00000242258_7 (sequence is synthesized)
tcgcttcagctgcgagcttttctcagcgcagagagcacagggaagctgggaggagtccgcctagatggaatcttccagaagcaacatgactcttttaggcctttgctgccagctaagaag

SEQ ID NO: 940152 - DNA, 120 bp, Artificial Sequence
  ENSG00000242258_8 (sequence is synthesized)
gtgaagaaaagtcaccactgcaataaaaagagggcactttgtcttacttggcaataaaccaccaccagcagcagcagcaatagcagcacccccacccccaccaaacccaaaacaaacaag

SEQ ID NO: 940153 - DNA, 120 bp, Artificial Sequence
  ENSG00000242258_9 (sequence is synthesized)
agcaaaaggaaaccttcgttttcagtgagaggattggcatgaagaatccttgggacacaggaatcaatcaagacctttggatgcccctgcctgctctgtctctagaagcctcaagcccag

SEQ ID NO: 940154 - DNA, 120 bp, Artificial Sequence
  ENSG00000242258_10 (sequence is synthesized)
catccccatgccgacgtgctcatctctagcaaaacaccagcctctcagccctctctccataaaggccactagaaagtactgtgatgccaggctgctccacatccaggcagcctgggtgac

SEQ ID NO: 940155 - DNA, 84 bp, Artificial Sequence
  ENSG00000242258_11 (sequence is synthesized)
gtgatgccaggctgctccacatccaggcagcctgggtgaccactgccctttatgagaatcagaaaaagctgtctcccgagtagt

SEQ ID NO: 940156 - DNA, 120 bp, Artificial Sequence
  ENSG00000242258_12 (sequence is synthesized)
gaactcctgacctcaaatgatccacccgactcggcctcccaaagagctggaattacaggagaagctaaacgttttaaaataagtatattatttctgaattactataacagacatggactc

SEQ ID NO: 940157 - DNA, 120 bp, Artificial Sequence
  ENSG00000242258_13 (sequence is synthesized)
agacatggactccatttgaacaagatacttaattccatcaaaaacttgtcaaaatatacaaatttagtcacaagacactttactaccatctaccaaagctgtagtaaacacacacatttt

SEQ ID NO: 940158 - DNA, 120 bp, Artificial Sequence
  ENSG00000242258_14 (sequence is synthesized)
ccatctttgaaatgaaataacgtataataatgttttccaaaataacaaagatgtctgcagtgaatagcactccctttgatgtggcaactgggtcaatcgtgttaacaactgtgaattcat

SEQ ID NO: 940159 - DNA, 120 bp, Artificial Sequence
  ENSG00000242258_15 (sequence is synthesized)
tcaatcgtgttaacaactgtgaattcatctttttaagaaattcttttattgtttcttttcttttccgcgacagtctcactcgtgttgccccggctggagtgcagtggcgctatcttggct

SEQ ID NO: 940160 - DNA, 83 bp, Artificial Sequence
  ENSG00000242258_16 (sequence is synthesized)
tagtagagacggggtttgaccatgttggtcagggtggtctcgaattcctgacctcagttgagccgccggcctcggcctcccag

SEQ ID NO: 940161 - DNA, 120 bp, Artificial Sequence
  ENSG00000258386_0 (sequence is synthesized)
gcttaatggaaaattttgagaaagttgtcgttatgaaccaattcaatggctggagcatttcctgcaaaggctcttatctggagaaagaggatttcaggattgtctgcatgtcaggacaaa

SEQ ID NO: 940162 - DNA, 120 bp, Artificial Sequence
  ENSG00000258386_1 (sequence is synthesized)
attcactactttagaaatcgagacaaagtgaaagacatggatggaatgaattcagcccctcctcctattgtttctctagcaagaaggtgaccaaagctataaatgtttgtttcctgaaaa

SEQ ID NO: 940163 - DNA, 120 bp, Artificial Sequence
  ENSG00000258384_0 (sequence is synthesized)
aactccccttgagggcctctccggtcccgaggcctacgccggggccctgcggcccggtctgtgaaatgggctgaaacctccgaggggcgttggaccaaggccctggaggaaaccgggggc

SEQ ID NO: 940164 - DNA, 120 bp, Artificial Sequence
  ENSG00000258384_1 (sequence is synthesized)
gttggaccaaggcagaggttgggccaggtggtcccgcccctgcaggaacccgtggggctggagctcggattagaaccacagagaggacattcattaagacttgagctaaaggtttggcga

SEQ ID NO: 940165 - DNA, 120 bp, Artificial Sequence
  ENSG00000258384_2 (sequence is synthesized)
ggagtgacgcccaagacgggcggaccccgccacccacctcagtcccgggaccgcggcagctcaaaacccgacacgcgccggactcatgccccaacaggaagcagcttttaccttccacgg

SEQ ID NO: 940166 - DNA, 120 bp, Artificial Sequence
  ENSG00000258384_3 (sequence is synthesized)
attggctcaggacccgtcacgtgcctctgtcgagccaacgagcctcacgctgggcttagccctcctcgaacgtgctggggtggtgggcggggcccaagccgcccttcaaccaggctcagc

SEQ ID NO: 940167 - DNA, 120 bp, Artificial Sequence
  ENSG00000258384_4 (sequence is synthesized)
tggccaccaaccccaacccccgccccagcgccctcagcggaggccacagaggactcccaatataaagacaaacgtactgaaggcccagcatatgggagtctctaccctaaacgacttatt

SEQ ID NO: 940168 - DNA, 120 bp, Artificial Sequence
  ENSG00000258384_5 (sequence is synthesized)
tcttgggatagtttaatattttttgagatagggtctcgctgtgtcgcccaggcgacactttgggaggctgcgctctgggctcactgcaaccttcgcctaccgagtagctgggattacagg

SEQ ID NO: 940169 - DNA, 75 bp, Artificial Sequence
  ENSG00000258384_6 (sequence is synthesized)
tgccgccacagagaaagagttttgcttgttgcccaggctggtctcgaacccctgacttcaagtgatccacctgcc

SEQ ID NO: 940170 - DNA, 120 bp, Artificial Sequence
  ENSG00000258384_7 (sequence is synthesized)
agcttcagtcggtcattgccctgggcttcgaagaggtcctgcacctgtggccagatgtgaggagtggaccaagtcagttgggtgtaaagcccagccagggcacaggtacctctgcatccc

SEQ ID NO: 940171 - DNA, 120 bp, Artificial Sequence
  ENSG00000258384_8 (sequence is synthesized)
cgcctgtcatgagcacccagaccaaccctcacctccttgctcatggccaagttacacatgcactccgtggctgcccggcggatcatctcatgctcctcaaacatgtagccttctatcatg

SEQ ID NO: 940172 - DNA, 120 bp, Artificial Sequence
  ENSG00000258384_9 (sequence is synthesized)
ggcacagccttctccttcaggatcttctgcctgcagggccacaggaggaagcagcagggatacggtttggatgttttcccttctaaccctcatgttgaactataatccccaatgttggag

SEQ ID NO: 940173 - DNA, 120 bp, Artificial Sequence
  ENSG00000258384_10 (sequence is synthesized)
gtagggcctggtgggaggtgactgggtcatgggatgggtccctcatggcttggtgctatcctcgtgatagtaagttctcgtgagatctggttatttaaaagtgcgtggcatctcggccgg

SEQ ID NO: 940174 - DNA, 71 bp, Artificial Sequence
  ENSG00000258384_11 (sequence is synthesized)
atggtgaaaccttgtctctactaaaaagacaaaaaaaaattagctgggtatgcgcgattgaacccaggagg

SEQ ID NO: 940175 - DNA, 120 bp, Artificial Sequence
  ENSG00000258384_12 (sequence is synthesized)
gggcaacagagggagactccatttcaaaaaaaaaaaaagtgtgtggcacctcccccgactgtctcttgctcctactttcaccatgtgatgtgcctgctcctgctttgccttctactatga

SEQ ID NO: 940176 - DNA, 120 bp, Artificial Sequence
  ENSG00000258384_13 (sequence is synthesized)
ttgccttctactatgagtaaaagctctctgaggcctccccagaagctgagcaaatgccaatgccatgcttacacagcctgtagagccaggaagcaattaaatctcttttctttataaatt

SEQ ID NO: 940177 - DNA, 120 bp, Artificial Sequence
  ENSG00000258383_0 (sequence is synthesized)
gaggacctcaggaacccaggatctgatcactccagctcctggtttatgccgctcgctcacaactggtccagtgtgttaattttatgtgcgtgtgtgtataataaatcatgtgagcccgcc

SEQ ID NO: 940178 - DNA, 120 bp, Artificial Sequence
  ENSG00000258380_0 (sequence is synthesized)
gctttgctaagtaagatgtttactggagtacatttctctcctgatatcagagatgcggctgccccaagcacatttagaagttgcactcttggtacaaaagtaaaggtttgttctcttctg

SEQ ID NO: 940179 - DNA, 120 bp, Artificial Sequence
  ENSG00000258380_1 (sequence is synthesized)
gacgggggggtcgcatggcgggagaacagctcctcccagtgtgcctcaacacagggcatccaacacccacttgtcactcccaaggctgactgatgaataatgttcccaagtctcgctgca

SEQ ID NO: 940180 - DNA, 120 bp, Artificial Sequence
  ENSG00000277579_0 (sequence is synthesized)
attgaaaaagacatcaaaaacaaagttaataggtaaatgatgaacttgaacaaaaaaattccagcagatgacatatttttctactatgtaaagagtttttacaaatgtctaagaatatcc

SEQ ID NO: 940181 - DNA, 120 bp, Artificial Sequence
  ENSG00000277579_1 (sequence is synthesized)
aagaaggtgtgagccaccgcgcctggcaaatttttttttttttaattcccacatcgactattacactaacggcatattaaccaatagtctgtattctcatcagttctgtttcattgccag

SEQ ID NO: 940182 - DNA, 120 bp, Artificial Sequence
  ENSG00000277579_2 (sequence is synthesized)
attcaccttcctccaatatcacatgctactctttgcctctagcataaaacccagactctcaagcctgccagtcaaggccatcgatgacttgttgccttgctacttttctctccttatcgc

SEQ ID NO: 940183 - DNA, 75 bp, Artificial Sequence
  ENSG00000260037_0 (sequence is synthesized)
agtgcaatggcgcaatcttggctcacgacaacctccgcctcccgggtatcttaaaccgattaaatgaagtcttga

SEQ ID NO: 940184 - DNA, 120 bp, Artificial Sequence
  ENSG00000260037_1 (sequence is synthesized)
gctgagattacagccttaaaccgattaaatgaagtcttgacagccagcagcctgcatccactacagaaaaaacgacaccttgaatcacaccttcacttgaattcagttgagttccagtga

SEQ ID NO: 940185 - DNA, 120 bp, Artificial Sequence
  ENSG00000260037_2 (sequence is synthesized)
atgccccgcatccagcttcccaccaagaagaaaaaagagaggaggatgaggaaagccatggagtgatttaccaaagtgcttgttacagtgaaaaacacagcccacaggcactgaggtggg

SEQ ID NO: 940186 - DNA, 120 bp, Artificial Sequence
  ENSG00000260037_3 (sequence is synthesized)
actacagaaccttgctggaccacatcttttcagcacatttctgtgaccctctgtttttgatggagaaaacaacgctactgttatgaaacacagaatggagtcttcattaatcttccagca

SEQ ID NO: 940187 - DNA, 120 bp, Artificial Sequence
  ENSG00000260037_4 (sequence is synthesized)
tgctgtttcttggagttgggttggaatagttggagtgggagccaggatggttggaaaacaaaccacacatattgctgcttctggaagctttgttctttaatgagccatggggtgatttgt

SEQ ID NO: 940188 - DNA, 120 bp, Artificial Sequence
  ENSG00000260037_5 (sequence is synthesized)
tcatcaagctgcttttgtgtagccatacagtgcatattttgagtgacacaaactgcactttatacagatggtatcttgttacccctcaaccccccagcaaagaaaaaaaaacaaaaagga

SEQ ID NO: 940189 - DNA, 120 bp, Artificial Sequence
  ENSG00000260035_0 (sequence is synthesized)
attaatgctcttgcgtgccctcagatggctgcgagggtggagataggctagaacaaacaatgacaaatcaatgacattgcaagggggcggggctttcaacagagaagagttcaggcgaca

SEQ ID NO: 940190 - DNA, 120 bp, Artificial Sequence
  ENSG00000260035_1 (sequence is synthesized)
cagcaacctcggttcgaatccgagtcacggcattgtgaggacaatggcacggcaaggggagtttgttttattgtaccaatccgtttttaatcctgagttcacaacattgtggaaaatgga

SEQ ID NO: 940191 - DNA, 120 bp, Artificial Sequence
  ENSG00000260034_0 (sequence is synthesized)
acatgctttgcccagctcagcctacatgccctctcccgatgtcagttaccaggctttgctaataaaacgtctctcccggctcttccagagagccagccgcagagtctctgccgtctcccc

SEQ ID NO: 940192 - DNA, 120 bp, Artificial Sequence
  ENSG00000260034_1 (sequence is synthesized)
gtgcgctcaagcacaagcccccaactaaaagccttgtctggaaaatctgcttggtgccataacagattatctggtgagccaggtaggagcacaaggagtaatttccctccctgcagggga

SEQ ID NO: 940193 - DNA, 120 bp, Artificial Sequence
  ENSG00000260034_2 (sequence is synthesized)
ggcttgtgagcctgcgagccggagggaggccccactgattcagcgctgccaccgcgactggcgagttttcctctagtctcgcgactggacactggtcagtagaacctggacctgctgtaa

SEQ ID NO: 940194 - DNA, 120 bp, Artificial Sequence
  ENSG00000260034_3 (sequence is synthesized)
ggctgaagaagaaaaagaaaccatccaagctggcactcggttttggggagttctcttcactgctcacgccggccctcttgtgtgacctgtactgttgtgctgtgtggggctgggagccaa

SEQ ID NO: 940195 - DNA, 120 bp, Artificial Sequence
  ENSG00000260034_4 (sequence is synthesized)
ctctcttttcgtcgcctgacacctgtgcttgcaccctgcccctggtcctttaataagacaagcagacacaggggctacagtcatgggcaatgccccaggcatcttccaagactcacacct

SEQ ID NO: 940196 - DNA, 120 bp, Artificial Sequence
  ENSG00000260034_5 (sequence is synthesized)
gggatgtatcatttctaaatggaaggaatccaaatcagatggtttaaagaaaaagaaactccagcctgggaaacataggaagactccacctctacaaaaaacaggaaaaatgagccgggt

SEQ ID NO: 940197 - DNA, 120 bp, Artificial Sequence
  ENSG00000260034_6 (sequence is synthesized)
gtgggggtgccttcctggggtctcagctactcagaaggctaaagtgaggatcgcttaagtccaggaggttgaggctgcagtgagttgtggtaataccatagcactccaacctgggcaatg

SEQ ID NO: 940198 - DNA, 120 bp, Artificial Sequence
  ENSG00000260034_7 (sequence is synthesized)
gagtgagaccctgcctcaaaatcaaattttttttttaattaaaaaaaaagaaactgattttcctctgtaatacaacctgccctagtacacattagatcaagaaaaatggccatgggcaga

SEQ ID NO: 940199 - DNA, 120 bp, Artificial Sequence
  ENSG00000260034_8 (sequence is synthesized)
agtggatctcctagttttaacactatcttaccgcccgacctattctgtgaatggacagagaaatggggagagatacctagctacaagcttttatgaagttatgctaggacccagagctac

SEQ ID NO: 940200 - DNA, 120 bp, Artificial Sequence
  ENSG00000260034_9 (sequence is synthesized)
tggattcttgtcaggtgtgtgtggcccctatttccaggttcctcctgaaggaacctgaagaagcggacctccacagcctcaggccccgagcactccctccctaccctaagcaggcctcct

SEQ ID NO: 940201 - DNA, 120 bp, Artificial Sequence
  ENSG00000260034_10 (sequence is synthesized)
ccagggctgttttcccctcagagaaatggatggaaacgggggagtgacaaggatccaagttcctttttttggtggtggatctaggactatgtaaaaaacactttggtagattttcagagg

SEQ ID NO: 940202 - DNA, 120 bp, Artificial Sequence
  ENSG00000260034_11 (sequence is synthesized)
atcctggtaagtttagagatgaatttgttaaactaaatcttgccttttcattgacgtggcaggatgttatggtcactttgcagtactgatgaaaagcaacacatatttggaaaggctaag

SEQ ID NO: 940203 - DNA, 120 bp, Artificial Sequence
  ENSG00000260034_12 (sequence is synthesized)
gaatatgccaatagccaggtggtcactaaagaccaatatgcagtcatctgtttagggggagatgcggtcccaggcatagtctccacgtgagtgagactatggagaaaacctagaaaaagc

SEQ ID NO: 940204 - DNA, 120 bp, Artificial Sequence
  ENSG00000260034_13 (sequence is synthesized)
tagaatgagccactttgtcacctgcctgactgaaggaagaaggaaatgtatagtaaaacctgtacactatgacagggtcaagaaaattacccagagaaagaaggagatcccagtagtctt

SEQ ID NO: 940205 - DNA, 120 bp, Artificial Sequence
  ENSG00000260034_14 (sequence is synthesized)
cctcaatcgagtccctgaggcccttgggaaatgcacccatgcagacccagaggcagcagaggggaagcatcgcgtgccatgcattttatccttcagtcagctccggacattagaaggaaa

SEQ ID NO: 940206 - DNA, 120 bp, Artificial Sequence
  ENSG00000260034_15 (sequence is synthesized)
ttacagaaaatttggaggccagaccccagaccctgctgttgactttggcagaggcggcttttaaggttttcaataacggacaggacacagatggcaggtaagaagaggagactgaccaag

SEQ ID NO: 940207 - DNA, 120 bp, Artificial Sequence
  ENSG00000260034_16 (sequence is synthesized)
acagcacagcttctggctgccctaattcatccaccatctcagggtgaccctaggattctcaggagaccaactaatcgaagacagccaaccttggatggagccaatgtgcctactgcagga

SEQ ID NO: 940208 - DNA, 120 bp, Artificial Sequence
  ENSG00000260034_17 (sequence is synthesized)
tggagggggtcactggaagagaggctgccctgacctccttaaaacaggacagccggcaggcaaccctggccagccgccactcctcaccaagctttcagatgagattgatacacaccgcct

SEQ ID NO: 940209 - DNA, 120 bp, Artificial Sequence
  ENSG00000260034_18 (sequence is synthesized)
gacagcaccctggctctgactgcagcacactccatcgtcatcacaccacggagcctcaggtcacccttgatgtggcagttctaggaactggccttaggaaatctaactatgaaaccaagg

SEQ ID NO: 940210 - DNA, 120 bp, Artificial Sequence
  ENSG00000260034_19 (sequence is synthesized)
ttatggagtatcccacctcaggaaggaacactgaacaactgattgacagtcttcttgccgccagccagaccaccaagtggcccattaaccaagagaaccagcgcaaccagatacgctgac

SEQ ID NO: 940211 - DNA, 120 bp, Artificial Sequence
  ENSG00000260034_20 (sequence is synthesized)
ccgcatctcctacctctcatgtgctttgcccagcccagcctgcataccttactcatgatgtcaattcccaagtttcgctaataaaaacatctctgcaagcctcttcagggagccaacaag

SEQ ID NO: 940212 - DNA, 120 bp, Artificial Sequence
  ENSG00000260034_21 (sequence is synthesized)
ggtaggaaaacagttcctcgtggacagcagagctgcctgctcggtcctgacccagcctatttgcctcctctccaattgcaattgcagggtaatgggaatagacaggtgtcctaaggtaag

SEQ ID NO: 940213 - DNA, 120 bp, Artificial Sequence
  ENSG00000260034_22 (sequence is synthesized)
aaaatttactttccctcttgcttgtgaggccatgtctaggcttttttctcctcatttctgtatgccccccggaatgtcctactccattgctgggtagagacttattaagcaaaatgggag

SEQ ID NO: 940214 - DNA, 120 bp, Artificial Sequence
  ENSG00000260034_23 (sequence is synthesized)
ccaccatctccctggaagaggacagactgcaggtagaggcagagccagaacagggaatccacctgctagcactcttaaatggacaggaacttgagacccaaaacatacccaaagaaagca

SEQ ID NO: 940215 - DNA, 120 bp, Artificial Sequence
  ENSG00000260034_24 (sequence is synthesized)
aggatcacatcaccccttccctatcggacacttcagtcctaggacaggctaataaagttccgccagtaaagacagacctgaagcctgggatgggctatccatggaggaaatcatacctcc

SEQ ID NO: 940216 - DNA, 120 bp, Artificial Sequence
  ENSG00000260034_25 (sequence is synthesized)
taaaacctgtggcactgaatggggttcagccattactccacaaattcctatagcaagggctaaaccctgccagtccccaggcaacacctcggtcctccctgttaaaaagcctaatggaga

SEQ ID NO: 940217 - DNA, 120 bp, Artificial Sequence
  ENSG00000260034_26 (sequence is synthesized)
atatcagtttgtgtaggacttgaagggggttaatgaggcagtcattcccatccacccaacactggtcccaagcttgtctgtgctcagatacctggagatgctcagtttttcactctacta

SEQ ID NO: 940218 - DNA, 120 bp, Artificial Sequence
  ENSG00000260034_27 (sequence is synthesized)
cacttcaaggatgctttcttttgtgtagccctctccacccagaatccctgtatctttttgctttgaatggagaaatctctgatacccagaaagccacatagtacacatggactgtgcttc

SEQ ID NO: 940219 - DNA, 120 bp, Artificial Sequence
  ENSG00000260034_28 (sequence is synthesized)
cccagggcttctgggaaggcccccacctttttgggaatgcagggagctaagcctacagaatgggacttttattacaatatgtggatgacttgttcattgtcagccaaacatggcaggatt

SEQ ID NO: 940220 - DNA, 120 bp, Artificial Sequence
  ENSG00000260034_29 (sequence is synthesized)
cagattttaatatcattaaaaccttgaatttcctggctgagcggtgatacaaggtcagccccatccaaggcccagatttctttacagaagttccgatatctggggttcattctgacccca

SEQ ID NO: 940221 - DNA, 120 bp, Artificial Sequence
  ENSG00000260034_30 (sequence is synthesized)
ggagcccgaacactagttgtggactggaaaaagcaatcacttcattgctggtcccacaaacaaaaaggcagccccagggtttcttgggaatggtgggcttctgtagtatttggattccaa

SEQ ID NO: 940222 - DNA, 120 bp, Artificial Sequence
  ENSG00000260034_31 (sequence is synthesized)
attatggcctgacggctaaacccctatgtgagacccaaaagggggaagaaagagagcccttgtactgggagaagaaatgtcaacaatcttttgaacctctaaaaactgagctgggtcaag

SEQ ID NO: 940223 - DNA, 120 bp, Artificial Sequence
  ENSG00000260034_32 (sequence is synthesized)
cccttgtccttggactccctgagaaaaaccacttaccttgtatgtttgtgagagactaggaatagctttgggagtcttaactcaaaggttaggacctgttcagaagccagtggctcattt

SEQ ID NO: 940224 - DNA, 120 bp, Artificial Sequence
  ENSG00000260034_33 (sequence is synthesized)
ttcgaaacagacaaatccagttgcacagaagcggcctggctgctggagggcagtggcagccactgccctgctgtttagtgaagcatctaagctgacacagggacaatatacagaagctat

SEQ ID NO: 940225 - DNA, 120 bp, Artificial Sequence
  ENSG00000260034_34 (sequence is synthesized)
gactccccaccaggttcagactgggttagaagtcaagggacaccattggctcactgcagggaggctgaccaactaccaagctctcttattagacaccctggatattactttaagggtatg

SEQ ID NO: 940226 - DNA, 120 bp, Artificial Sequence
  ENSG00000260034_35 (sequence is synthesized)
tcagactttgaacacagcaacctcactcccaaccacagatgatgaggactcacagcatcaatgcacagggcccacaaaacagactccagcaggcctagcttgtgagataagcctcttgag

SEQ ID NO: 940227 - DNA, 120 bp, Artificial Sequence
  ENSG00000260034_36 (sequence is synthesized)
aatgcaaagacggaatgatatcctgatggcagtagctttgtggagggagacccaaaaggcaggacatgcagtagtaagcctgaaggagactacagaaactaaagcccttcctccccaaaa

SEQ ID NO: 940228 - DNA, 120 bp, Artificial Sequence
  ENSG00000260034_37 (sequence is synthesized)
tggcacaaaaagcagcactagaggccttaacagagcctcacaactgggagaaagggagggagtaaatttatacaccaactcaaagtataggtttctcctgctgtgtgcccatgcagccat

SEQ ID NO: 940229 - DNA, 120 bp, Artificial Sequence
  ENSG00000260034_38 (sequence is synthesized)
atggaaggaaaagggaatgttaacagttaaaaattccccaggcaaacgtaaggatccaatccaacttctcctggaagcggcacaacttccctgccaggtggcagtcattcactgcaaagg

SEQ ID NO: 940230 - DNA, 120 bp, Artificial Sequence
  ENSG00000260034_39 (sequence is synthesized)
ccaccagagggactggtccctcatcagccaaggaaatagggccacaaaacaggcaacctggttataggaatccagcaatgtgttggccttaatgacagaccctaccaaccttcctaatca

SEQ ID NO: 940231 - DNA, 120 bp, Artificial Sequence
  ENSG00000260034_40 (sequence is synthesized)
cctacaatactcacaacaagagcaagaggaagctaaggggcaggggtaccaggaaaacagtgctggatggttcacagatggtgacaagttttattccaggaactgaccagttgaaagtta

SEQ ID NO: 940232 - DNA, 120 bp, Artificial Sequence
  ENSG00000260034_41 (sequence is synthesized)
ctaagcatctccatgatgccactcattaatggagacatgttttatggaattctgtccataaaatattcaccagaaagaaactaagaaaaagtgtaaaacaagtaacctttgtcagtgaat

SEQ ID NO: 940233 - DNA, 120 bp, Artificial Sequence
  ENSG00000260034_42 (sequence is synthesized)
tgtgttcccgaaataatccccacacccatccaattcccccttcttgacttaaactggttcaacacaggggaacttatctgggagaagactggcaggttgttttaacccaaatgactccaa

SEQ ID NO: 940234 - DNA, 120 bp, Artificial Sequence
  ENSG00000260034_43 (sequence is synthesized)
atctagggtacaaatatctcctggtgtttgtggatacttttactggacgggtcaagggtttccctacctgtacagaaaaagcagtagaagtctgtaaaccttcactaaaggaagtaattt

SEQ ID NO: 940235 - DNA, 120 bp, Artificial Sequence
  ENSG00000260034_44 (sequence is synthesized)
cagagtggtaacaggctctccttcatgggtaagattactcagagcctctccacaaccttaggaatagattatgaactggcaccccaatcatcagggaaagttaagatgaaccatacactt

SEQ ID NO: 940236 - DNA, 120 bp, Artificial Sequence
  ENSG00000260034_45 (sequence is synthesized)
gagacgactctagccaaactctttcaggagacgcacgagtcctgggttaagatgctcccagtcttctcagggtccgcagggccccttcgtgcagcctaagacttagttcttctcagatga

SEQ ID NO: 940237 - DNA, 120 bp, Artificial Sequence
  ENSG00000260034_46 (sequence is synthesized)
tctaccagaggcctttcctcaccactgacctcctgttaggtgaagaattacataaaaaattacagtatcgatttaggacagattcaaaaggtgacttcagaatatggaaacaaaatcctg

SEQ ID NO: 940238 - DNA, 120 bp, Artificial Sequence
  ENSG00000260034_47 (sequence is synthesized)
ccagtccccactaaggatgggaaaacccctttacaagttaatccaggggaccaagtcctcctaaaggcttgaagggcaggctccccggaggaccaccccttgcttaaatgggagggccct

SEQ ID NO: 940239 - DNA, 120 bp, Artificial Sequence
  ENSG00000260034_48 (sequence is synthesized)
tactgggtgatcctgaccactccaactgcagccaactcacaaggaatcactagctgggtacacctctcccgatcagaaatgctttctcctaaatgtttccagactcgcccagatggccca

SEQ ID NO: 940240 - DNA, 120 bp, Artificial Sequence
  ENSG00000260034_49 (sequence is synthesized)
ttttactcctgaaaacctgtggaagacctcaaattcaggagagccaattcatcatcggagaagtaatgtggttagagatcttgagtccaatacttttccttgtattactaattggtttac

SEQ ID NO: 940241 - DNA, 120 bp, Artificial Sequence
  ENSG00000260034_50 (sequence is synthesized)
tattattctgttgctttgctcagcctcctccctcaggtaaagacttcgtttgtccctgctgggtataaagatgctactctttactttgttcctactcctccccatcagggcacagggtag

SEQ ID NO: 940242 - DNA, 120 bp, Artificial Sequence
  ENSG00000260034_51 (sequence is synthesized)
gctaggcctactaaaatgagaaacaaactctcttgacaacctttccggcattatagcttcaggtaataatttgtccaactgctgggtgtgctaccatcatccccaggctcagaggggctg

SEQ ID NO: 940243 - DNA, 120 bp, Artificial Sequence
  ENSG00000260034_52 (sequence is synthesized)
cctcttgcactccctaaaagctcaactaccaacttcacaaaagaggtatggaaacctaaaataacctctgcacctcttatggtggacctaagtgtctccctttcctttgaatgtataaac

SEQ ID NO: 940244 - DNA, 120 bp, Artificial Sequence
  ENSG00000260034_53 (sequence is synthesized)
ctcattgggctgctaaatgctttggtcaccaaaaagggtggaaaaaagagaagttggactgcctactttgaaatcccaccgggttttctcttagcagtaaagaaaaaccctaatcaaact

SEQ ID NO: 940245 - DNA, 120 bp, Artificial Sequence
  ENSG00000260034_54 (sequence is synthesized)
tgggctcaggaaggctatcttttcccccatgccaaaacagtcatacctctctccacagcttagctgctcacctgaactcctctcgccttgtgtaagtttgtgcacccatggggtattctg

SEQ ID NO: 940246 - DNA, 120 bp, Artificial Sequence
  ENSG00000260034_55 (sequence is synthesized)
ttcctttgtggacacccagactgccatctgatcaacagctacccttcagccaatttcacctctctgttacttgcactagcgtgcccttgtgtggataatgtacaacgcaataaggaatgc

SEQ ID NO: 940247 - DNA, 120 bp, Artificial Sequence
  ENSG00000260034_56 (sequence is synthesized)
atgttaggtactttaagtcccagtagaataacagttcataatatcacacatgtggtgaaatctaaaaaggcaatagggctaattttggcaggagttggaatagccccttgggatggcttt

SEQ ID NO: 940248 - DNA, 120 bp, Artificial Sequence
  ENSG00000260034_57 (sequence is synthesized)
gcatactgtcagacagctttgagaaactttcaaacccttgaaacactggcaactagtacaggcagagccataaaaggacatcaagcctccctgcactccctagccaatgctgtcttggat

SEQ ID NO: 940249 - DNA, 120 bp, Artificial Sequence
  ENSG00000260034_58 (sequence is synthesized)
aacagatttgccctggaatatcttctggctgaacaagggcgggtatgcacagtaataaaccacatctgttgttcttacattaacagttcaggattggctaaactgcaagttcaaaagatt

SEQ ID NO: 940250 - DNA, 61 bp, Artificial Sequence
  ENSG00000260034_59 (sequence is synthesized)
taacagttcaggattggctaaactgcaagttcaaaagatttaccaagaccagtgagcctaa

SEQ ID NO: 940251 - DNA, 120 bp, Artificial Sequence
  ENSG00000260034_60 (sequence is synthesized)
gaccagcctgggcaacatggctaaaccccatctctacaaaattacaaaaaaagaaaaaaaaattaggtggccttggtggcatgtgcctttattcccagctactcaggaggctgaggtggg

SEQ ID NO: 940252 - DNA, 120 bp, Artificial Sequence
  ENSG00000260034_61 (sequence is synthesized)
agtaagccatgatggcaccactgcactcctacctggatgacagagtgagaccctgtctccaaaagaaaataaaagtaaagattcaccaagaggctacctggctacataatcgtaatgact

SEQ ID NO: 940253 - DNA, 120 bp, Artificial Sequence
  ENSG00000260034_62 (sequence is synthesized)
ctactgctcaaaccatctggggctccatcagtggatacctacaaagtatgacatggtttttacctttcttcggaccctaagtggtcatttaattgctattacttttggcgtattgtgttt

SEQ ID NO: 940254 - DNA, 120 bp, Artificial Sequence
  ENSG00000260034_63 (sequence is synthesized)
ttaaccttttggtaaagtttgtgtctttcaggtttcaatagctccaagtcaagctaatgatggcccaagaattccaacccataacatcccaggagcaccccagtccctacaggtctttag

SEQ ID NO: 940255 - DNA, 120 bp, Artificial Sequence
  ENSG00000260034_64 (sequence is synthesized)
gacagccagtgagagatttccccaccccctaaagttaggcagggacgacatccctgttcagcaggaagtcgcttcagaagatgagatcttcagccctttctccttaagaatagagggtga

SEQ ID NO: 940256 - DNA, 120 bp, Artificial Sequence
  ENSG00000260034_65 (sequence is synthesized)
aatctctcagggggaaatagagatagaacagaaatggaatggggttgcttcttcataatacttaaccatgccttctacttaaagttctaggaactggccttaggaaatctaactatgaaa

SEQ ID NO: 940257 - DNA, 120 bp, Artificial Sequence
  ENSG00000260032_0 (sequence is synthesized)
agcgcaagggcacttccggtaccgctcctctcttgccagcgcagagaactgccaagtcagttccggtccggcagagatcgcggagagacgcagaacgcagcccgctcctccagggccctc

SEQ ID NO: 940258 - DNA, 120 bp, Artificial Sequence
  ENSG00000260032_1 (sequence is synthesized)
caggccctccggccccgggccggcgggtgaactggggggccccgggacaggccgagccctctgccctgcagataacggaggcctctgctgtggctgcccactggctgtgcccgcccactg

SEQ ID NO: 940259 - DNA, 120 bp, Artificial Sequence
  ENSG00000260032_2 (sequence is synthesized)
gctgtgcccagaccttgaagccgcagcgaacctctctttcccaccccacctcggtgactaatggcggccgtggcgtctcccagcccggaccccgccggcacccgggtctcccgacccaag

SEQ ID NO: 940260 - DNA, 120 bp, Artificial Sequence
  ENSG00000260032_3 (sequence is synthesized)
cctcgacgaaacccccgcagagccgccgggacgcagcgcctttgggcggcgctgggcgtggtgggccgggaagtatggcggcagctcgaacgccgcgcggcggaggccattaaggcgtgg

SEQ ID NO: 940261 - DNA, 120 bp, Artificial Sequence
  ENSG00000260032_4 (sequence is synthesized)
acggcccgggaaggcggcctagggacgcaagcaggctcggccgcctctttaggccacggagccgcgcagatccggttcccgggtgaccactctgtcgccattgggcgagacctacctagt

SEQ ID NO: 940262 - DNA, 120 bp, Artificial Sequence
  ENSG00000260032_5 (sequence is synthesized)
cctgacgacaacggacaaaggccttaaggggcctggaaggtgagcgaagtcccgaacgacgacgggtggaacggttagcggccatcgggcggttggtcttcattctaccagactttgctg

SEQ ID NO: 940263 - DNA, 120 bp, Artificial Sequence
  ENSG00000260032_6 (sequence is synthesized)
tcggaagagagaaatggtagaatgacaggccacgtttggcccgttggaaatgcccaccaccctctgggaagatttactggccgtttatggaaggcctgtgtatataatatgaaaaagctg

SEQ ID NO: 940264 - DNA, 120 bp, Artificial Sequence
  ENSG00000260032_7 (sequence is synthesized)
ctctcaactccaccccaaccttttaatagaaaacatttgtcacatctagcccttctagatggaaagaggttgccgacgtatgataaaatagagttagaaagttacacatcttgtaaattc

SEQ ID NO: 940265 - DNA, 120 bp, Artificial Sequence
  ENSG00000260032_8 (sequence is synthesized)
tcatttgtttaaaagaaatcatagaaaatacatgtcttctggagatgacttttggaaatggagttgttaagacggcctctggaagcgatacgtccacgtttgttaagtgggttagatgac

SEQ ID NO: 940266 - DNA, 120 bp, Artificial Sequence
  ENSG00000260032_9 (sequence is synthesized)
atggagctggaagacctgagaaggaagagaagaaggttctatgctagactggtcatatttagaagacattttcatattctatccattgttttgtgtgcattttattcctcactactgtgt

SEQ ID NO: 940267 - DNA, 120 bp, Artificial Sequence
  ENSG00000260032_10 (sequence is synthesized)
atatagttgacaatgctaagcttttttgaaatgtctcttctttttagatgttctgaagtgcctgatatgttaaaattagaggtagcaaaatcacattttgtaaatacctttttgttacaa

SEQ ID NO: 940268 - DNA, 120 bp, Artificial Sequence
  ENSG00000260032_11 (sequence is synthesized)
ttcataggaaatatttttgggggggaatggccaaatcacctgttgagtaatactcattgtgtttgtgcagtggttcaggggaggagagaggagggggaggtgcagagagctctatgccat

SEQ ID NO: 940269 - DNA, 120 bp, Artificial Sequence
  ENSG00000260032_12 (sequence is synthesized)
cctgtttacagcgaggcaagatgaatcattatgtctgtgcattttgttttacttatctgtgtatatagtgtacataaaggacagacgagtcctaattgacaacatctagtctttctggat

SEQ ID NO: 940270 - DNA, 120 bp, Artificial Sequence
  ENSG00000260032_13 (sequence is synthesized)
gttaaagaggttgccagtgtatgacaaaagtagagttagtaaactaatatattttgtacattttgttttacaagtcctaggaaagattgtcttctgaaaatttgatgtcttctgggttga

SEQ ID NO: 940271 - DNA, 120 bp, Artificial Sequence
  ENSG00000260032_14 (sequence is synthesized)
tggagatgggaagggttctaggccagaatgttcacatttggaagactctttcaaattataactgttgttacatgtttgcagtttattcaagactgctgtatacatagtagacaaattaac

SEQ ID NO: 940272 - DNA, 120 bp, Artificial Sequence
  ENSG00000260032_15 (sequence is synthesized)
tccttacttgaaacatctagtctatctagatgtttagaagtgcccgatgtatgttaaatgtataggtagtaaaataccactttgtaaatatctttttgctaaaattcataggaaatgctt

SEQ ID NO: 940273 - DNA, 120 bp, Artificial Sequence
  ENSG00000260032_16 (sequence is synthesized)
ttggaaattgaattgtgaagccacctttgtgaacagtatagtaatgtctatacttgttcaatagtttagaggaggtaggagggaagaaattgcaaaaggtaatattactagtgtgttcat

SEQ ID NO: 940274 - DNA, 120 bp, Artificial Sequence
  ENSG00000260032_17 (sequence is synthesized)
acttggacattttcagacaccatttttctatatgttttgtgcattttgttttgctctgtatatagtatatataatggacaaatagtcctaatttttcaacatctagtctctagatgttaa

SEQ ID NO: 940275 - DNA, 120 bp, Artificial Sequence
  ENSG00000260032_18 (sequence is synthesized)
agaggttgccagtgtatgacaaaggagtaaaattagcatattttgtacactttgtgttgaaattcgtaggaaaacttgtcttctgtaaagacttttgcataggaatttgtttgaccatct

SEQ ID NO: 940276 - DNA, 120 bp, Artificial Sequence
  ENSG00000260032_19 (sequence is synthesized)
ctaagcattacacgtgcctgtacttgtccactggattgaaggcagagaaggaagggaggagggaatgattcaaggccaaaatggccacatttagaagatacctcagatgataaccattgt

SEQ ID NO: 940277 - DNA, 120 bp, Artificial Sequence
  ENSG00000260032_20 (sequence is synthesized)
tatgtgtgtgcaattttatttaacagtgctgtgtatgtggtggacaagttatatgaaatatctagtctttctagatatttggaagtgcttgatgtatttaaaagtggtagtagaataaca

SEQ ID NO: 940278 - DNA, 120 bp, Artificial Sequence
  ENSG00000260032_21 (sequence is synthesized)
ctttgtaaatagcttttaaaaactgatgggaaatgctgtttggaagtggaattgttgaaccacctgggaggtgggagggaagaaattgcaaatggtgttttgccattgtttattagaaaa

SEQ ID NO: 940279 - DNA, 120 bp, Artificial Sequence
  ENSG00000260032_22 (sequence is synthesized)
ttcagcttaatccattgtgtatatgttacatgcatttcatttaactttgctatactgtatatattgtatatataacggacaaattagtcccgattttataatatctagtctctagatatt

SEQ ID NO: 940280 - DNA, 120 bp, Artificial Sequence
  ENSG00000260032_23 (sequence is synthesized)
aaagaggttgccaatgtatgacagaagtagagttagtaaactaacacattttgtacactttgttaaaatttgtagaaaggctgtcttctgaaaaggacttttggaagtgagataacatca

SEQ ID NO: 940281 - DNA, 120 bp, Artificial Sequence
  ENSG00000260032_24 (sequence is synthesized)
gctctaagtgacacgtgcctatatccatcaggttggtggtggagaggagttggaaggaatgaagggttctagaccagaatgttcgtatttagaagacactatcagatataaccattgtta

SEQ ID NO: 940282 - DNA, 120 bp, Artificial Sequence
  ENSG00000260032_25 (sequence is synthesized)
catgtgtgtagtttattcaaccctactgtgtatatagcggacaaacttaagtccttatttgaaacatctagtctttctagatgtttagaagtgcacaaagtatgttaaaagtagaggtag

SEQ ID NO: 940283 - DNA, 120 bp, Artificial Sequence
  ENSG00000260032_26 (sequence is synthesized)
taaataacacattttgtagctatccttttgatatgaaatattgtcttggaaattgatcaattctctgagcagtacccattttgatatttgtgctggttcagggggaaggaggagcacaaa

SEQ ID NO: 940284 - DNA, 120 bp, Artificial Sequence
  ENSG00000260032_27 (sequence is synthesized)
gtgcaaagggctttctaccagtgtccagtgtgtttatgaggaggcacattgaccattgtcccttatgtctgcattttcatttactgtgctgtgtatatagtgtatataagcggacatagg

SEQ ID NO: 940285 - DNA, 120 bp, Artificial Sequence
  ENSG00000260032_28 (sequence is synthesized)
agtcctaatttacgtctagtcgatgttaaaaaggttgccagtatatgacaaaagtagaattagtaaactactacattgagtacactttgtgttaaaattcatagggaagacttcttaaaa

SEQ ID NO: 940286 - DNA, 120 bp, Artificial Sequence
  ENSG00000260032_29 (sequence is synthesized)
acaagtgaaattgttaaaaccccccctaagcattacagatggcttatagctgtccacggggttggtagaggtgggaaagggaagggttctaggccagaatgttcctatttagaagacact

SEQ ID NO: 940287 - DNA, 120 bp, Artificial Sequence
  ENSG00000260032_30 (sequence is synthesized)
caaattacagtctgtgttatgtatgtataccatttattcaatgctactgtgtatataatggaaaacttaagtccagtttgaaacatctagtctttctaggtgtttaaaagtgtacaacgg

SEQ ID NO: 940288 - DNA, 120 bp, Artificial Sequence
  ENSG00000260032_31 (sequence is synthesized)
tgcactccagcctggcgacagagcgaggctccgtttcaaaaaaaaaagtgcacaatgtaggttaacagtagagggcttaagtaacacccctctaagcatttgttttcagtacttcctagg

SEQ ID NO: 940289 - DNA, 120 bp, Artificial Sequence
  ENSG00000260032_32 (sequence is synthesized)
agtggttgcatttgggaatggaattgttaaaacttgatgcttaggagcgaatgcagactattcattgggtgtttggggtgggggaagggggggtgggcagaggaggtatgcagggagagg

SEQ ID NO: 940290 - DNA, 120 bp, Artificial Sequence
  ENSG00000260032_33 (sequence is synthesized)
ggttctgtgctcctgagattagttcagatggtctaaccattgttctatatgtgcattttagttaatattgtgtattaaaggataagtcttaatgctcaaagtatgttaaaaatagatgta

SEQ ID NO: 940291 - DNA, 120 bp, Artificial Sequence
  ENSG00000260032_34 (sequence is synthesized)
gtaaatcagtccctttgtgaatgtccttttgttagtttttaggaaggcctgtcctctgggagtgacctttattagtccaccccttggagctagacatcctgtacttagtcacggggatgg

SEQ ID NO: 940292 - DNA, 120 bp, Artificial Sequence
  ENSG00000260032_35 (sequence is synthesized)
tggaagagggagaagaggaagggtgaagggaagggctctttgctagtatctccatatctagacgatggttttagatgataaccacaggtctacaagagcgtttttagtaaagtgcctgtg

SEQ ID NO: 940293 - DNA, 120 bp, Artificial Sequence
  ENSG00000260032_36 (sequence is synthesized)
ttcattgtggacaaagttattattttgcaacatctaagctttacgaatggggtgacaacttatgataaaaactagagctagtgaattagcctatttgtaaatacctttgttataattgat

SEQ ID NO: 940294 - DNA, 120 bp, Artificial Sequence
  ENSG00000260032_37 (sequence is synthesized)
aggatacatcttggacatggaattgttaagccacctctgagcagtgtatgtcaggacttgttcattaggttggcagcagaggggcagaaggaattatacaggtagagatgtatgcagatg

SEQ ID NO: 940295 - DNA, 120 bp, Artificial Sequence
  ENSG00000260032_38 (sequence is synthesized)
tgtccatatatgtccatatttacattttgatagccattgatgtatgcatctcttggctgtactataagaacacattaattcaatggaaatacactttgctaatattttaatggtatagat

SEQ ID NO: 940296 - DNA, 120 bp, Artificial Sequence
  ENSG00000260032_39 (sequence is synthesized)
ctgctaatgaattctcttaaaaacatactgtattctgttgctgtgtgtttcattttaaattgagcattaagggaatgcagcatttaaatcagaactctgccaatgcttttatctagaggc

SEQ ID NO: 940297 - DNA, 120 bp, Artificial Sequence
  ENSG00000260032_40 (sequence is synthesized)
gtgttgccatttttgtcttatatgaaatttctgtcccaagaaaggcaggattacatctttttttttttttttagcagtttgagttggtgtagtgtattcttggttatcagaatactcata

SEQ ID NO: 940298 - DNA, 120 bp, Artificial Sequence
  ENSG00000260032_41 (sequence is synthesized)
tagctttgggattttgaattggtaaatattcatgatgtgtgaaaaatcatgatacatactgtacagtctcagtcccataaaattggatgttgtgcctacacacaggatctagaagaatat

SEQ ID NO: 940299 - DNA, 120 bp, Artificial Sequence
  ENSG00000260032_42 (sequence is synthesized)
gtcaaactataaactgcttgtgattgtgaatgactttgttctttgcttgtgtttttcaatttcctataatgcacatactaacttttaaaaaataaaggttattttaaaagcctgtattaa

SEQ ID NO: 940300 - DNA, 120 bp, Artificial Sequence
  ENSG00000260030_0 (sequence is synthesized)
ggtctttcgccctgggtaggggagatgggggttaatctctctctatgcaatcaggctctaaaattggctgcttcccggaacagaaacggcaggagttggcatcagaatgcagcaacttga

SEQ ID NO: 940301 - DNA, 120 bp, Artificial Sequence
  ENSG00000260030_1 (sequence is synthesized)
aatgaatgaagattttcccacctgggtctgctgcctccttcatgttttaccacctggtgtcacttcagattctgaaactatctgtggctcatctacttagggaggacactgatgtggaca

SEQ ID NO: 940302 - DNA, 120 bp, Artificial Sequence
  ENSG00000260030_2 (sequence is synthesized)
ttgcagaatatcagctccagtttgataaggtggtgcacaatgatgagagagaggactttgagggttttcttcctaggtgctcaagtagctaaaaaataaataaataaaaaaatagaatac

SEQ ID NO: 940303 - DNA, 120 bp, Artificial Sequence
  ENSG00000260038_0 (sequence is synthesized)
tttccttttatttttagaaataatctattcagttgttaaaattccttattccgggatgggtacggtggctcacacctataaccccaacactttgggaggccagcgcaggtggaggttgca

SEQ ID NO: 940304 - DNA, 120 bp, Artificial Sequence
  ENSG00000260038_1 (sequence is synthesized)
ttccacatcagggtcccatttaatacccccttaaaacatcagctttccttccagagactgatcattgagaaagcagtactgctgacatagatcctgcctacttataaatcataatggttg

SEQ ID NO: 940305 - DNA, 120 bp, Artificial Sequence
  ENSG00000196758_0 (sequence is synthesized)
gtcactgtcttgggctgtgtgctgacgggagccagggccttgtaaggcccagaccctcctccttctctcccgtattagtcaaggttctccagagaaatggagttagagatgcattgctat

SEQ ID NO: 940306 - DNA, 120 bp, Artificial Sequence
  ENSG00000196758_1 (sequence is synthesized)
aagaaatggaatgggctcgcatgattacagaggctgaggggtcctacaccctgtcgtctgcaagctggaaaggcaggagagtctgtgctgcagccctagccagagcctggaggcccgaga

SEQ ID NO: 940307 - DNA, 120 bp, Artificial Sequence
  ENSG00000196758_2 (sequence is synthesized)
accaggcacgccgacgacagcacacttccagcctgagagcaagagaaggtcagtgttccagctccagcaggcaggcagagggagggttctctctccacctttgtgttctactcaggtctt

SEQ ID NO: 940308 - DNA, 120 bp, Artificial Sequence
  ENSG00000196758_3 (sequence is synthesized)
caatgggttggatgaggcccatccacattgcgagggcgtctgcttcactgaatccaccatcgtacctgcttctcttggatgccgtccgattgcagagacgctgttcccttgagggttcct

SEQ ID NO: 940309 - DNA, 120 bp, Artificial Sequence
  ENSG00000196758_4 (sequence is synthesized)
gccccaccgtgtgtgctggtgctaggatgtctgccctggtccagccctgcacccctgagtcagaggctcttactctgggttcaattaagaaggttatttggcccccacacaaagctaaga

SEQ ID NO: 940310 - DNA, 120 bp, Artificial Sequence
  ENSG00000196758_5 (sequence is synthesized)
ctttcaccttggcatttgttaggaattctttcctgaagttggacagtttggccatgttcaagcctctgaattcttccatagaattgtcttctggaaatcatgccacagtaatttaagtct

SEQ ID NO: 940311 - DNA, 120 bp, Artificial Sequence
  ENSG00000196758_6 (sequence is synthesized)
ccccggctgtatgtgtgaggacttcttaccctcttgggcatggaggggttagcatgtttggtagccattctagtcatagtaggttgacagttgagtgtttcctagatctttccaagtaga

SEQ ID NO: 940312 - DNA, 120 bp, Artificial Sequence
  ENSG00000196758_7 (sequence is synthesized)
ccagcatgactatggaagaggccctgaaggtcccaccccgacacgccagtccgaagggcccttgcctgggcaccctgcaccttcccctggacctgctgatgcgcctggctgggggaatgc

SEQ ID NO: 940313 - DNA, 120 bp, Artificial Sequence
  ENSG00000196758_8 (sequence is synthesized)
gggccttcgcgttggttccacctccagcttccatgactgtggagttctgcagtgggttcattgagaaagtggtggtgagaccagggtatctgagaggagtggtcggcagggagatgagac

SEQ ID NO: 940314 - DNA, 120 bp, Artificial Sequence
  ENSG00000196758_9 (sequence is synthesized)
aagtgtggagaccaggcagatggaaggcgcatgtctggagggtgtgagagctgccaggtgggtgtctgcagggtcttgcagagtcgctcagccgcaggtggggcggctctggagacccta

SEQ ID NO: 940315 - DNA, 120 bp, Artificial Sequence
  ENSG00000196758_10 (sequence is synthesized)
tcagcacattccagagagtggcagaccccacggccaggcatggactgatgagcaggactgtcctccactgtccagacaacagcacagatgaaacccaggagcgcctgggacggtgctgtg

SEQ ID NO: 940316 - DNA, 120 bp, Artificial Sequence
  ENSG00000196758_11 (sequence is synthesized)
agccctgcacatccacggagtctctcagatgaaaccacacgggtgtcacagtgacgctctctcccctcagaggctgccgacccctcgctgggctgctggactgctcagggccggcccttg

SEQ ID NO: 940317 - DNA, 120 bp, Artificial Sequence
  ENSG00000196758_12 (sequence is synthesized)
aagcctggagggagccatgggtctgtgtgtacacatgtgtgtgcccgtgagtgagtctatgtgtgatctctgaaaatgaagcttccacattaccaatgcctggagaatccagaactggga

SEQ ID NO: 940318 - DNA, 120 bp, Artificial Sequence
  ENSG00000196758_13 (sequence is synthesized)
ctcccaggtaactgagggcctgggtcccaaagctggtggctgaagctggctgctccgaggcatgcgtggcaggaaggggtcatcaggagggccacccaaggccccgggcacctctgatgg

SEQ ID NO: 940319 - DNA, 120 bp, Artificial Sequence
  ENSG00000196758_14 (sequence is synthesized)
gtttccagagtccctgccctcacgagagggaagtcagttggagaatggggtgctgaagtctcgagagaaaggtgtccttgactcggggtccagagtaagcagcttctgccccccatatca

SEQ ID NO: 940320 - DNA, 120 bp, Artificial Sequence
  ENSG00000196758_15 (sequence is synthesized)
tcttccacacgctggaagctgctgcacagcgggctcagagcctgggctcaggaggcatcccggttactgttgctgtatcctggagggtggcatctcctgggagctgtggtccgagcccct

SEQ ID NO: 940321 - DNA, 120 bp, Artificial Sequence
  ENSG00000196758_16 (sequence is synthesized)
tgcaacagcggggccaggagaaggctggttgctgggtgcatcctgttcttggggttccacctgctgtatccatctcccgggggattttccgtcgccgtccttggttccagcacatgccct

SEQ ID NO: 940322 - DNA, 120 bp, Artificial Sequence
  ENSG00000196758_17 (sequence is synthesized)
gagtggtaatgccgattcctgcctgtgctgccgacttggtgcggggagcctgtggctgctctgtcaggtggttggccccgatggctccatgggtggcccccgcccaggcatctcatggag

SEQ ID NO: 940323 - DNA, 120 bp, Artificial Sequence
  ENSG00000196758_18 (sequence is synthesized)
ggactctgcctacgtcactggccgccagtcctgggggacaccgtgtgcatttgcacatgaaccatgatgggaacctgggggacgggtctcaggctgagaaaggttcccctgggcttcaag

SEQ ID NO: 940324 - DNA, 120 bp, Artificial Sequence
  ENSG00000196758_19 (sequence is synthesized)
gtaaatcataaagcgaggtaatttcctataagtgtcagaggacactgtaactgtcccttctgagcaggacattgttgtggttgtctgtcttcccttttgtcttctgcctgtgggattatc

SEQ ID NO: 940325 - DNA, 120 bp, Artificial Sequence
  ENSG00000196758_20 (sequence is synthesized)
tagattctgagcaggtaaattgtttcaggctctggccttctcagagcctttctgtggctgtaggttgtggggagggcaccatggtagttgcccctgcttcattcactcagagccactgac

SEQ ID NO: 940326 - DNA, 120 bp, Artificial Sequence
  ENSG00000196758_21 (sequence is synthesized)
aggggccccccaacctgctcggagccctccaggggcaggcactgtccctgctgcccccctgctgccctgaacatctccccagccccacagctgacccaccctttcagggtaacagtgcag

SEQ ID NO: 940327 - DNA, 120 bp, Artificial Sequence
  ENSG00000196758_22 (sequence is synthesized)
ctgcgggggcagccccctccagcccttccttggtcagcctccctgctgctggcccttcctggagacgtgatttgccctagaagtggcaggtgtgtgtggctcatgccctcactgtaaggc

SEQ ID NO: 940328 - DNA, 120 bp, Artificial Sequence
  ENSG00000196758_23 (sequence is synthesized)
tgtgccaaggcagtgccaccttgggaaaaatcaaaaccccataccagctcctcccagtccatgccagcacacaccctggctcctcagaaccccccacagaagcaggcaaggaatcaaaaa

SEQ ID NO: 940329 - DNA, 120 bp, Artificial Sequence
  ENSG00000196758_24 (sequence is synthesized)
ctcaagtctgcaggaagccaggcagggatggaggaggggtatactgtcacaggtgagagggtcccagaagcctttctggaggaggtgacttcaggctggatttggaggggcaacttaaca

SEQ ID NO: 940330 - DNA, 120 bp, Artificial Sequence
  ENSG00000196758_25 (sequence is synthesized)
agcagacaggtgggtggagacgctccagcagaggaaatggcatggagtgtccaggagcccacgaatcagctggcattgttgaatcatggagaacgcagagacggtctcagaagtcggccg

SEQ ID NO: 940331 - DNA, 120 bp, Artificial Sequence
  ENSG00000196758_26 (sequence is synthesized)
gagcctgagtcattgggccacgcggcttcagtccttccttgcagcctgtggggagtctcaggggaattctgaggaggaaagggggatgctcatgataggtatttattgtttttgtttgtt

SEQ ID NO: 940332 - DNA, 120 bp, Artificial Sequence
  ENSG00000196758_27 (sequence is synthesized)
tgtttttaatcacttattttcacaagtgtaatcgaagcacctggttgtgagtccaggagagtaaaacatttagccctcgcccctcccatccatcacggattttctgacgcctgcagcagg

SEQ ID NO: 940333 - DNA, 120 bp, Artificial Sequence
  ENSG00000196758_28 (sequence is synthesized)
gttcctgccaaaggaaaacccatttatagtcatatacttccgtgaacctttgatataacccagttatgtatctagaaacctgccttttcaaaaatattaacctgtctataaatgtagtaa

SEQ ID NO: 940334 - DNA, 120 bp, Artificial Sequence
  ENSG00000196758_29 (sequence is synthesized)
cctgtctataaatgtagtaaatgttatataaaatgcaatcatgtttaagaagttaactattgttatattaattcgagttgaacaattcaaattctcaacttcatttataaacatagttaa

SEQ ID NO: 940335 - DNA, 120 bp, Artificial Sequence
  ENSG00000237159_0 (sequence is synthesized)
gagggtggcagagcccagccaccagggtctgctccatgcctggtccctggagaggccctcaccctctctgctttcacccaacccgactgacacggagtaggaggtgggaatcatgcaggc

SEQ ID NO: 940336 - DNA, 120 bp, Artificial Sequence
  ENSG00000237159_1 (sequence is synthesized)
agggagcttaggaagcctggttcaagattgctttgaatggcaggccccctgctgtgctcctggggagagagcctgaaacctggatgctcgggagcccctcagatccgtcatctgtccccg

SEQ ID NO: 940337 - DNA, 120 bp, Artificial Sequence
  ENSG00000237159_2 (sequence is synthesized)
acacccctgtggtgagccttgccactgggccctgagaagctcagagcagtcgagtcagggcagtgggacatgacccaggtcagatgtggcttttccgtaattgtacaccaatgatcaaga

SEQ ID NO: 940338 - DNA, 120 bp, Artificial Sequence
  ENSG00000237159_3 (sequence is synthesized)
gaaaatgaaggattttaatataatgggctgcaaatgtaacaaaccccctgaccttcagtctgaagagagagaactatcaaccacacagaagcaaagatccagagaaatactgagggatgc

SEQ ID NO: 940339 - DNA, 120 bp, Artificial Sequence
  ENSG00000237159_4 (sequence is synthesized)
taccagacactcaaccagggccactctccgagattccagccagccacacagcaaagatgctggccggggacactgccccaaaccaccagacagaaccccaaagaaacagctccacacaca

SEQ ID NO: 940340 - DNA, 120 bp, Artificial Sequence
  ENSG00000237159_5 (sequence is synthesized)
agccagagaggtggtcagagaacagcgacacaatcaaaggacccaccagaaacactgtaaaggactcagctagacccaggcagatacactgccgaaggacgagcaaggagcacaggcagt

SEQ ID NO: 940341 - DNA, 120 bp, Artificial Sequence
  ENSG00000237159_6 (sequence is synthesized)
gaagccgtcggcgacaaagccagagagctaagacactgtcagaaacagtgccagagaaaccgtctgacacacaagcagagaaataccagagaaactgatagacgcaaacaggcgtacacc

SEQ ID NO: 940342 - DNA, 120 bp, Artificial Sequence
  ENSG00000237159_7 (sequence is synthesized)
cagaaaaacagcttgagagaagagccagagccacagccagatgctcagtcaggaagtatccacaccactccaaacactgccagagacactgtcagacacacagtcagacacactgccaga

SEQ ID NO: 940343 - DNA, 120 bp, Artificial Sequence
  ENSG00000237159_8 (sequence is synthesized)
gacaccgttataaagactgccagagaaacagccagacacacagccagaaaaactgacagagacgcagtgccagatataccccgagaaagtgccagagactcagctccagacagtgcagac

SEQ ID NO: 940344 - DNA, 120 bp, Artificial Sequence
  ENSG00000237159_9 (sequence is synthesized)
atagcataacagagacaaatgtgggtatcagcctgaagcagctgcggagaggctggagagcaatgaacttcctggggcttcctgtgggagagggctcctgcctgccttttgctacccttg

SEQ ID NO: 940345 - DNA, 120 bp, Artificial Sequence
  ENSG00000237159_10 (sequence is synthesized)
accctctccaggaaagtcccctcctctgagcctgcttttcctttcctccctgtcacagccacaggtgccctgactgcccctccctggcacagtaaatctctctgtgtcctaagtggcccc

SEQ ID NO: 940346 - DNA, 120 bp, Artificial Sequence
  ENSG00000237159_11 (sequence is synthesized)
gcccaccacatgggagcaggaaccagggcatgggcaggcagaagagcaggcggagtggctgagctcctgtcccggctccctaaggtgttcccagtttgcggaggattacgtgccctctca

SEQ ID NO: 940347 - DNA, 120 bp, Artificial Sequence
  ENSG00000237159_12 (sequence is synthesized)
gcccagtagcacactttccaaataagccatcagactcctcccaagatcctgaaactgaggctcagagagcagaagcagcttggccaaagtcatacaactggtagttggtaaaggagctgg

SEQ ID NO: 940348 - DNA, 120 bp, Artificial Sequence
  ENSG00000237159_13 (sequence is synthesized)
ccttgaactcagggatatcttgaaagccactgttgcttctatggactctagccattcaaaagacccctcaccttctataagaccccaggagatcctcagggtccaactgctcccttgaaa

SEQ ID NO: 940349 - DNA, 120 bp, Artificial Sequence
  ENSG00000237159_14 (sequence is synthesized)
acaggtcccagatatatctgccaaaggtatgattaggtgcctaaacacataccatgagaaagggattccatgtcttccaatcctgcccagagatgcagagacaccaccacccagggagag

SEQ ID NO: 940350 - DNA, 120 bp, Artificial Sequence
  ENSG00000237159_15 (sequence is synthesized)
accaagacaggctcaaagggaggaagactgaggggaagccagagacagagagggacacattaggccaaagaatgagagagatagctggaaaaggagacaataggagtagaggagggtaca

SEQ ID NO: 940351 - DNA, 120 bp, Artificial Sequence
  ENSG00000237159_16 (sequence is synthesized)
ggctgacatgaaaaaacaccgacagatacactccagtatgcagacagacacatatagacccatctgaccttcacaagaaacagactgtgaaagcaagcaaggctcaggctgtgtgtggtg

SEQ ID NO: 940352 - DNA, 120 bp, Artificial Sequence
  ENSG00000237159_17 (sequence is synthesized)
tgcgtatgtgtgtgtgcgtattgtggggggagcatgcagagtctgtatagctacgcacattacaccagctgcttccagcaatttcatctgattaataataaatgccccataattacagcc

SEQ ID NO: 940353 - DNA, 120 bp, Artificial Sequence
  ENSG00000237159_18 (sequence is synthesized)
gaaaatgaaggattttaatatgtaagtccttgtcaggaaccccggcccacccttgaccccagccatgtgcccctaggagcctgggacccccagcccagtaggcgtgcatcagtgtccaca

SEQ ID NO: 940354 - DNA, 120 bp, Artificial Sequence
  ENSG00000237159_19 (sequence is synthesized)
tgcacccatgcaagtacacaggatgcactcaggacatggccccagaagccaggatggatccagtgccccccaacctggtgtcctgcttcctgagatgagtccaactattctctccccctc

SEQ ID NO: 940355 - DNA, 120 bp, Artificial Sequence
  ENSG00000196756_0 (sequence is synthesized)
gcacctgtattcgaaagtgatcgtgggctgcctgtgccctggtcattgatagtgcagggagagaaatcgcggaaagtgcttccccgtgtttggagggtccgctcctgtccctttcaaact

SEQ ID NO: 940356 - DNA, 120 bp, Artificial Sequence
  ENSG00000196756_1 (sequence is synthesized)
ctggagctttctcacacctccttctcaccatctttcaaatgcctcctggcacttggtgtcttattagtgagtgctccctgtgcaaggctcagtgcagggttccatgaggcgttcaccagg

SEQ ID NO: 940357 - DNA, 120 bp, Artificial Sequence
  ENSG00000196756_2 (sequence is synthesized)
gtctatgaggggagtgtcacatgactgccgccccatgtgtgtgagaggcgtcctctgggagagcatggatcctgaggtcccaggattgtcagctgacctctgtcctgtgtgcccagtggc

SEQ ID NO: 940358 - DNA, 120 bp, Artificial Sequence
  ENSG00000196756_3 (sequence is synthesized)
cccaggtgacgtgtcttcaagaagaggctgagctgcggtgcttgtaagagtcatgtgctgttcctggggcttggatgatgtaggggaagcaaggtgaaagtggtatcccgtggttccacg

SEQ ID NO: 940359 - DNA, 120 bp, Artificial Sequence
  ENSG00000196756_4 (sequence is synthesized)
gctgtggggctgtccctcacatgctttcagtggctgttgcagaggaagagcctccggaaatctgcgtgggtaaagtctcagccttagatccaaggacagtccaaggaagtcctaagacca

SEQ ID NO: 940360 - DNA, 120 bp, Artificial Sequence
  ENSG00000196756_5 (sequence is synthesized)
tggagttggtgatctgggatctgggtttgctgatatttctcaccgtgaatctcttggtggtgtttgtgggcacgagaggggcagagaatggagagtgaggctaccacatgaagcgtcacc

SEQ ID NO: 940361 - DNA, 120 bp, Artificial Sequence
  ENSG00000196756_6 (sequence is synthesized)
agagctgctccctgctgcctgctcagagcaccccggatccactgttcaatctgcacaagattcggggtccagacatgggagacttcagctgcctcagaggaccgtggacagggaaggcca

SEQ ID NO: 940362 - DNA, 120 bp, Artificial Sequence
  ENSG00000196756_7 (sequence is synthesized)
gcctcgcatccctctgtccatgcctggaatgactttaataaccaagagttttatttttgaatttgtagctgtcgttcactttttacccacccattcaataaaccttacagaattgctcca

SEQ ID NO: 940363 - DNA, 120 bp, Artificial Sequence
  ENSG00000196756_8 (sequence is synthesized)
gtagcttccttgtcgtgtggcctcagtccttcgccgtccctcgccgtccttcgccatcgcacgccaccgcaccccatctctcgaaatctgcagacatcttgatttttcccacgctgtctg

SEQ ID NO: 940364 - DNA, 120 bp, Artificial Sequence
  ENSG00000196756_9 (sequence is synthesized)
tcaggtctccgccgccactcgacgccagggcgccgggtgagtccacagcagggcgcatggtcggctccactctcaccatcgggggaaactgaggccccggggaaggcggccagagaggtc

SEQ ID NO: 940365 - DNA, 120 bp, Artificial Sequence
  ENSG00000196756_10 (sequence is synthesized)
aggccctgtccttggtgcagtgtctcgtcctctttgccggagtgagccccccaggattcgcgtgtcctcgggaaagacactggcaggccttgtgggctgtgctgcacctcggacggcttc

SEQ ID NO: 940366 - DNA, 120 bp, Artificial Sequence
  ENSG00000196756_11 (sequence is synthesized)
gagaggcgtcctctgggagagcatggatcctgaggtcccaggaacatcccgagagccaagttcccagatgccagccaagggccatctgacctgttttgaatctcaatttcctgatacaga

SEQ ID NO: 940367 - DNA, 120 bp, Artificial Sequence
  ENSG00000196756_12 (sequence is synthesized)
ctggggcgagcgctgggggcttttcctgcagtgcattagcagcatgtcataatggaaagtggctggatttctttccagttgtaatcaatggttaagatttaacctagcaacattgtaggg

SEQ ID NO: 940368 - DNA, 120 bp, Artificial Sequence
  ENSG00000196756_13 (sequence is synthesized)
gtacacagccaaatgattcaggaaaaaagatgcaggttgagtctggaggaatccctgtgccagcttcctcatgctccctccctctctcagaaatcacatggaacccattctcccctcagc

SEQ ID NO: 940369 - DNA, 120 bp, Artificial Sequence
  ENSG00000196756_14 (sequence is synthesized)
agtgaaaatgcattcagcctgtgtgcagtgtttctgcccagggaagcccagtagggcctccatgcccggggtgtttactgggatctggttatgtagacaccacctgcctagcacgcacca

SEQ ID NO: 940370 - DNA, 120 bp, Artificial Sequence
  ENSG00000196756_15 (sequence is synthesized)
aaattccagactttcaggaaaacaggtgcctgtgccacattatttgcacggagagactgtgtccagtgaacggttctgatcagtaaactgttgactaggaacatcccgagagccaagttc

SEQ ID NO: 940371 - DNA, 120 bp, Artificial Sequence
  ENSG00000196756_16 (sequence is synthesized)
caggcgtgagccactgcacccggccagcccagtctttgagaagagccccaggattctcaatatttctgcccatgtttgccttcctttctgcttctggcagggagtggattgtcagctgac

SEQ ID NO: 940372 - DNA, 120 bp, Artificial Sequence
  ENSG00000196756_17 (sequence is synthesized)
tggattgtcagctgacctctgtcctgtgtgcccagtggccccaggtgacgtgtcttcaagaagaggctgagctgcggtgcttgtaagatgggtctgctgtgtgcagaggctccatgggat

SEQ ID NO: 940373 - DNA, 120 bp, Artificial Sequence
  ENSG00000196756_18 (sequence is synthesized)
gtgttgtcttcatagtagcagggcgctggaccatgggtccgcaaggtgggatttttggactgttgtctggaatatgtttctttgcatcctgcagagtcatgtgctgttcctggggcttgg

SEQ ID NO: 940374 - DNA, 120 bp, Artificial Sequence
  ENSG00000196756_19 (sequence is synthesized)
gtgggtaaagtgagctccccgggggaaccgtcctcctcccttgagcgctggtgtgtccatagtgtgctgtgatctggattagcagtgagtttttctttcagggtgtgtgtgtatgatgtt

SEQ ID NO: 940375 - DNA, 120 bp, Artificial Sequence
  ENSG00000196756_20 (sequence is synthesized)
aggaccatatgctcctgaccttttccaacccaaaagcgtttccatttttttaatgctggaagtgtcttaactccttttggggtcttagaaggacacacggtggccgtggctgggcctctg

SEQ ID NO: 940376 - DNA, 120 bp, Artificial Sequence
  ENSG00000196756_21 (sequence is synthesized)
ctcagctgggctgctctccctgcctcaggcccttgacaccagcctccctcccttgctggctctctttctgtccttccctgctcttgtatccaaaagtgatcatgggttgcctgtgtcccg

SEQ ID NO: 940377 - DNA, 120 bp, Artificial Sequence
  ENSG00000196756_22 (sequence is synthesized)
tcccacgctgcagcctttttccaactaggctttcagagcttgggcctttgtgggcccatgtgatgtggtgactagacccaccccctgacttctgagggttcattttgtcttttcatgtta

SEQ ID NO: 940378 - DNA, 120 bp, Artificial Sequence
  ENSG00000196756_23 (sequence is synthesized)
gggatcctcctgccagaaaccagtctgcatttctctctgggccccacgctggaatgaattcagatagcagtgaagggcacacgtgagaactgcgaatcacgggctttgcttcatgaaatg

SEQ ID NO: 940379 - DNA, 120 bp, Artificial Sequence
  ENSG00000196756_24 (sequence is synthesized)
tgaaatccacattgtttccacaggcaccatcagtaatgtcgaacaaatggagaaagttgcaggtggggctaggaaagctgtattcctgtggattactctagctggtcatttgccccgatt

SEQ ID NO: 940380 - DNA, 120 bp, Artificial Sequence
  ENSG00000196756_25 (sequence is synthesized)
gtgaactgcttgaaagaaaaacgaaacttctaagatgtttgtcctttcatgtcctttctgttgggattttttatttggtgtgcgtgaatgaggagcttcgccctgcttgaatgggacccc

SEQ ID NO: 940381 - DNA, 120 bp, Artificial Sequence
  ENSG00000196756_26 (sequence is synthesized)
tctcagtggtgtcagcttggggaggaggagatggccctggagactaaatacttgtatgctttcttaccctcttaggtctcagccttagatccaaggacagtccaaggaagtcctaagacc

SEQ ID NO: 940382 - DNA, 69 bp, Artificial Sequence
  ENSG00000196756_27 (sequence is synthesized)
tcactgcagcctctgcctcctgggttcagtgattctcatgcctcagcctccgagtagctgggattaaag

SEQ ID NO: 940383 - DNA, 85 bp, Artificial Sequence
  ENSG00000196756_28 (sequence is synthesized)
acctgtttttaaaatgtttattgtctatatttgagtttacaacatgatgttatagaataatgggacagatatagatagcacagtg

SEQ ID NO: 940384 - DNA, 120 bp, Artificial Sequence
  ENSG00000196756_29 (sequence is synthesized)
gatgttatagaataatgggacagatatagatagcacagtggttactatggtgaagccgatgagcatgtctgttatctcacatagtcaccgtttttagtgtgtgtgaggagcagctgaaac

SEQ ID NO: 940385 - DNA, 87 bp, Artificial Sequence
  ENSG00000196756_30 (sequence is synthesized)
cccaggctggagtgcagtggtgcaatgatggctcactgcagcctcgacctgggctcaagtgatcctagtcatgtgctgttcctgggg

SEQ ID NO: 940386 - DNA, 120 bp, Artificial Sequence
  ENSG00000196756_31 (sequence is synthesized)
tgattttcactcttccttggctcagaggatattgtttgaggtatacatttggaactaggaggtgaacaagtgctggtagttggttcacatttaggcatttaggacccatgataattcagg

SEQ ID NO: 940387 - DNA, 120 bp, Artificial Sequence
  ENSG00000196756_32 (sequence is synthesized)
gcattgcagaatagtcagggtagattatggagtgagacaggtctgatgtcattcaggaaggctggagtgtcctggatgacgtggctcataagtaaatgcctacttgtgagatcaactgtc

SEQ ID NO: 940388 - DNA, 120 bp, Artificial Sequence
  ENSG00000196756_33 (sequence is synthesized)
ccagtttgcctgagattgagggacttcccagaaagtgggtttttcattgctaaacccagggagatcttgagcaaactgggacaagttggtcagcatgtgtgggatgtaaaaatccatggt

SEQ ID NO: 940389 - DNA, 120 bp, Artificial Sequence
  ENSG00000196756_34 (sequence is synthesized)
gtcagcttgagaggacaggttatggggtaacagtgggagtagggtgaacatggagcagctgccattgatggaactgaggggtactcttaagttcaggctttggagattagggtaaagtca

SEQ ID NO: 940390 - DNA, 120 bp, Artificial Sequence
  ENSG00000196756_35 (sequence is synthesized)
cttattgcaaggcctaggcatggtgccttgtgcctgtattactagcactttgggaggccaaggtgggatgatttcttgaggccaggagatcaaaaccagcctaggcagcagaccccgtct

SEQ ID NO: 940391 - DNA, 72 bp, Artificial Sequence
  ENSG00000196756_36 (sequence is synthesized)
attcgaggattcaatgagttaatgatggcaccactgcagcccagcctgggtgccagagtgagacctgttttt

SEQ ID NO: 940392 - DNA, 120 bp, Artificial Sequence
  ENSG00000196756_37 (sequence is synthesized)
actgcagcccagcctgggtgccagagtgagacctgtttttaagagaaagaaaaattgcagcaatgacatgatctaaggatgtgcacgcatgaactgtcatctctgattcacagagggagg

SEQ ID NO: 940393 - DNA, 120 bp, Artificial Sequence
  ENSG00000196756_38 (sequence is synthesized)
cctctagagctcaagttctctgcaggttgtgaggccagaggtggttgggtgctgaggagtggggagtgaggacaccggtgaaggctgcttccctttgctcctgtctttgctccttcagca

SEQ ID NO: 940394 - DNA, 120 bp, Artificial Sequence
  ENSG00000196756_39 (sequence is synthesized)
ggcagggacaggcctgggccctcttctgccttcgtggggctgctgccaagaaggtgctccctgagcttgattggggctctgagagtccctgacaaagaccctgtcatgttgagaggaaaa

SEQ ID NO: 940395 - DNA, 120 bp, Artificial Sequence
  ENSG00000196756_40 (sequence is synthesized)
ccggccagcccagtctttgagaagagccccaggattctcaatatttctgcccatgtttgccttcctttctgcttctggcagggagtggtaagtgatctctgggagtcagaagcagcatct

SEQ ID NO: 940396 - DNA, 120 bp, Artificial Sequence
  ENSG00000196756_41 (sequence is synthesized)
gtaatcttaggctgtaagtctgctcattgccctgtcagctgttctgttccaggtgagaccattgcccggaatgccagcattggcctcctttctgggcttgccctctgccctttctgcccc

SEQ ID NO: 940397 - DNA, 120 bp, Artificial Sequence
  ENSG00000196756_42 (sequence is synthesized)
tgcattcgaaagtgatcatgagctgcccgtgccctggtcattggtagtgcagggagaggaactgccgagagcacttccccgtgtttggagggtccactcctgtctcttccaaaccctgga

SEQ ID NO: 940398 - DNA, 120 bp, Artificial Sequence
  ENSG00000196756_43 (sequence is synthesized)
gctttcccacacctcctccctcccaccacgtcttagatggctcctggtgcctggcatcatctagtgggttgtgttgctcttctccctggcccagggcagttattgtgagacatgagggaa

SEQ ID NO: 940399 - DNA, 120 bp, Artificial Sequence
  ENSG00000196756_44 (sequence is synthesized)
gggtgtggggtgatgggtttggcctcatggagcagaagggctgggtgtggagctgagatagggctgccctgctccttcctcccggaagctttctctgcctccacacctctccttccacgt

SEQ ID NO: 940400 - DNA, 120 bp, Artificial Sequence
  ENSG00000196756_45 (sequence is synthesized)
ccttatccagcccctgcaccaagctgaacctgtggaaattgttgcctgacttgtttcctggctctctttgctgtggtctcaagggcagtgtctgaattttgttccctactttgttatgtc

SEQ ID NO: 940401 - DNA, 120 bp, Artificial Sequence
  ENSG00000196756_46 (sequence is synthesized)
tgccagatggtcagtattctgacagtgtgggacaaaggaaaaacggcagcctgggcaaccccgcctctataagaactaaaaaattagccaggcatggcggtgcatgcccctgtagtccta

SEQ ID NO: 940402 - DNA, 88 bp, Artificial Sequence
  ENSG00000196756_47 (sequence is synthesized)
aaattagccaggcatggcggtgcatgcccctgtagtcctagcttctcaggaggctgaggcaggaggctctcttgagcccgggaggaca

SEQ ID NO: 940403 - DNA, 120 bp, Artificial Sequence
  ENSG00000196756_48 (sequence is synthesized)
agaaagggagagtccctccactgtaaggagatcgggttcattacattttggggtgttggagaaaaatactgagtcagcacctgtgtgggattggtgggagcagatttggtgttttccacc

SEQ ID NO: 940404 - DNA, 120 bp, Artificial Sequence
  ENSG00000196756_49 (sequence is synthesized)
ccttcacaggattctgaggtaactcatttctgttggccttggccttgtatggggaggatttccctccagccttgtatggggaggatttcccttgtatggggaggattttccctccagctt

SEQ ID NO: 940405 - DNA, 120 bp, Artificial Sequence
  ENSG00000196756_50 (sequence is synthesized)
gtgggaaaggaatcaaggaccagagacaggcaggggagaagatcactgagggatttacggcagcagcctctgcacggcttccccacgacctccccagctgcttgctggacgctgctggag

SEQ ID NO: 940406 - DNA, 120 bp, Artificial Sequence
  ENSG00000196756_51 (sequence is synthesized)
aaacagcacatcccaagatcatcatggccccagcatcctcttgaacttagtaacagttggcctgacagatgaagcggatatcatccctgccttagaagttctctagcccctttcttagag

SEQ ID NO: 940407 - DNA, 120 bp, Artificial Sequence
  ENSG00000196756_52 (sequence is synthesized)
aggtgtgagccaccgcgcctggccaagggtcttctttttaagggtgaataatgttttgttgtgtgtgcgtgtgtgtgtgtgcgtatgccacattttctttttccattcatctgttgatgg

SEQ ID NO: 940408 - DNA, 120 bp, Artificial Sequence
  ENSG00000196756_53 (sequence is synthesized)
atgccacattttctttttccattcatctgttgatggagacttagattgtttccgtatcttggcgattgggagtaatgccgcagtgaatattggagtgcagatgtctttatgaggtgtgat

SEQ ID NO: 940409 - DNA, 120 bp, Artificial Sequence
  ENSG00000196756_54 (sequence is synthesized)
ttgatctccattgagtatgtgtccagaagagggatagctgggtctatgtaatgtatactgataagcagcacagagtgggcacataggatagcatagatgccatttttctcacagatagtt

SEQ ID NO: 940410 - DNA, 120 bp, Artificial Sequence
  ENSG00000196756_55 (sequence is synthesized)
tgccgacctcttcctagagttacgtttttcttgttcctgagacaataatgtggctgtaagtactaatagagacagtggcatttgtgggttgcttatgatctgccagcccctgcgttaagt

SEQ ID NO: 940411 - DNA, 88 bp, Artificial Sequence
  ENSG00000196756_56 (sequence is synthesized)
catgcccatgtccctaacaaaaaacaaaaaacaggagctggaaaaagacaactgtggctggtcgtggtggctcacacctgtaatccta

SEQ ID NO: 940412 - DNA, 120 bp, Artificial Sequence
  ENSG00000196756_57 (sequence is synthesized)
cgcttgagcccaggagtttaagaccaacctgggcaatatggcaaaaacctgtctacaacacacacacactagccaggtgtggtggcatgcgccaggaggtggaggttgcagtgagccgag

SEQ ID NO: 940413 - DNA, 120 bp, Artificial Sequence
  ENSG00000196756_58 (sequence is synthesized)
cagtgagccgagattgtgctactgcattccagcctgggctgcagagccagaccttgtctttaaacaacaacaacaaaaaagacttcagttgtaaggtgacagggcttagcacattgatgc

SEQ ID NO: 940414 - DNA, 120 bp, Artificial Sequence
  ENSG00000196756_59 (sequence is synthesized)
agggcttagcacattgatgcatgtcagggaagtagttttgagcaaggcagcctgtgtgggggtggtcagagctatttcccactggcccagtggtcatcccatggtgttctctttgacggt

SEQ ID NO: 940415 - DNA, 120 bp, Artificial Sequence
  ENSG00000196756_60 (sequence is synthesized)
cttgtccgtgggccaccaggattaatttccccacaggattgtcattgtgatgtcagcgaccaaagccagaggtatagctaggcatggctgatagaagagtgagatgtgtaatcagccctg

SEQ ID NO: 940416 - DNA, 120 bp, Artificial Sequence
  ENSG00000196756_61 (sequence is synthesized)
acccgcagatgacagatgggccatcctgcccatcatagcccttactgtgtatgctagactgcgccacgctggtgtgccacaccagaacctgtcctaggttcagagtccccttcagtgtac

SEQ ID NO: 940417 - DNA, 120 bp, Artificial Sequence
  ENSG00000196756_62 (sequence is synthesized)
tgcttcaggatcacaaattcaacaatatgtgcataagatgagacttaagctgtccctgatgactggttcttctctagatgaactcttcgtgttgctgagaccgtagaccactgttaacac

SEQ ID NO: 940418 - DNA, 120 bp, Artificial Sequence
  ENSG00000196756_63 (sequence is synthesized)
tagccaacttttaggaaatgtttaccacctggtggcttctgtgccagtactctccttgtcctttccagaacgggtttgaccaggtgatgtctagatagctcatccagggcttcttgattc

SEQ ID NO: 940419 - DNA, 120 bp, Artificial Sequence
  ENSG00000196756_64 (sequence is synthesized)
tggcagaggaggctgattggtgcagagaggcccatgagaggtatctccaccctgccaggaagcaggtggaccatggtgttctatgaggtctgtcctctggagatctggggctttgtgtcc

SEQ ID NO: 940420 - DNA, 120 bp, Artificial Sequence
  ENSG00000196756_65 (sequence is synthesized)
cacaagggtgggtgcatgcaggttccctgggcgtgatgtctgggaagtagagagaggtgaggtaagagtgtctttgtgctggccccagttttaccctctttggggccatcatgaatacat

SEQ ID NO: 940421 - DNA, 120 bp, Artificial Sequence
  ENSG00000196756_66 (sequence is synthesized)
tgggttcctcttgtgcctgcttgggtttagcatctttagggatcccttatcattgttgtgtcttggaatatctgactcaaaagctggagggctttggcatcaaacctacctgtaccttgg

SEQ ID NO: 940422 - DNA, 120 bp, Artificial Sequence
  ENSG00000196756_67 (sequence is synthesized)
caaacgctttaccactactccctagctttggttctttttgtgatcttcagttttctcgtctggaaaacaggagtacgctgaggtgatttttcttaggatcacaccgtccctatcttccac

SEQ ID NO: 940423 - DNA, 120 bp, Artificial Sequence
  ENSG00000196756_68 (sequence is synthesized)
gtccgaagaagtctgccagctttctcatctggagggtctttcctttacttctcctggttggggcaggttccgtttatgtgggacaagatggaagctgcttcatcctgtgctctgctgtgc

SEQ ID NO: 940424 - DNA, 120 bp, Artificial Sequence
  ENSG00000196756_69 (sequence is synthesized)
cactgtcctggctcaggccatttttcaggcttctgacgttggtctccaatttcaacaagccctggatctctttctgcccctgtgtgcaaagtgattacaggctgcttgtgtcttggttat

SEQ ID NO: 940425 - DNA, 120 bp, Artificial Sequence
  ENSG00000196756_70 (sequence is synthesized)
tggtaataaaggaaaagttacaaggttttcctcttgtgtagaggcaccattgtccatttcagacgggatgacctcaggggactgtgtcagtgaccaggatgggctagacaagctgtcagt

SEQ ID NO: 940426 - DNA, 120 bp, Artificial Sequence
  ENSG00000196756_71 (sequence is synthesized)
acattcacctcctgagacactgattcccctggtgtgttttctgtgggtgaatatcgtggtttcctggacttgccataagcagtgccaagtgcatcagtcacatcttggcttcttgtgccc

SEQ ID NO: 940427 - DNA, 120 bp, Artificial Sequence
  ENSG00000196756_72 (sequence is synthesized)
gctcctgcatccgaaagtgatcataggctgcctgtgcctaggtcattgatagtgcagggagaggaacgctgaaagaggttgtccccgtgtttggagggtccaccctatcccatccgaacc

SEQ ID NO: 940428 - DNA, 120 bp, Artificial Sequence
  ENSG00000196756_73 (sequence is synthesized)
cagcccttgaggagtccggcgcttgcttggctgccacatgaaagtcagtgcgggggggcatcatgcttaagtctttctcagcttgacctctctttgcagaaaccaggctctgtgttctga

SEQ ID NO: 940429 - DNA, 120 bp, Artificial Sequence
  ENSG00000196756_74 (sequence is synthesized)
ggggtagatcaggaagggaatgtgatatgtaatgagtcatggtgtgtcgcagtggatagcacagtttcgaataagtgcaatattggcatataaacatgagggagactttgaggttggggt

SEQ ID NO: 940430 - DNA, 120 bp, Artificial Sequence
  ENSG00000196756_75 (sequence is synthesized)
gtgtgtgtgtgtgtgtgtatgtgtaacttggggacaggatagggtagcatctttacatctttacatgtcattggcctggaatagggggtcctgaagggtttgtcgtaagaaagagaaagt

SEQ ID NO: 940431 - DNA, 120 bp, Artificial Sequence
  ENSG00000196756_76 (sequence is synthesized)
ggggtcctgaagggtttgtcgtaagaaagagaaagtgctcattgctgcaaggggagcacagccgggttctgagaggcaaaacacttccctcacttcccacccaagagtttcgcctgttct

SEQ ID NO: 940432 - DNA, 120 bp, Artificial Sequence
  ENSG00000196756_77 (sequence is synthesized)
ctcgaccctctgaggtgtgcattggtgtcactcactggccaccattccagctcttaattcctctgccttttgtgctggcctttggggctcccctgaggatgactggttctcaggttgccc

SEQ ID NO: 940433 - DNA, 120 bp, Artificial Sequence
  ENSG00000196756_78 (sequence is synthesized)
agtcactgatgcagccgccgtctagcccatcccaccccgattgagaggtcgctttttcctgttgaacatgttggatagtggaatgtgttataagaagtgatatgtgtggcttcttgtcat

SEQ ID NO: 940434 - DNA, 120 bp, Artificial Sequence
  ENSG00000196756_79 (sequence is synthesized)
tcaggtctccgccgccactcgacgccagggcgccgggccttgtgggctgtgctgcacctcggacggcttcgcaccagccagcgccctctctctcctgcagcactctgatctgcaccccct

SEQ ID NO: 940435 - DNA, 120 bp, Artificial Sequence
  ENSG00000196756_80 (sequence is synthesized)
agggagaggtgaggatgagaagaggagccatgtcctatggattcccagatccagactcctcttccctgggaaagctggattggagctggcccctccttctgtgccttcaggggctgtgga

SEQ ID NO: 940436 - DNA, 120 bp, Artificial Sequence
  ENSG00000196756_81 (sequence is synthesized)
cctgatacagaaaacaaaggtagggcataattgatttttacagacgtgaccccatgatcctgctctctagtccccagatttttccagggcttttgtcagaggtgtttcccctttgattcc

SEQ ID NO: 940437 - DNA, 120 bp, Artificial Sequence
  ENSG00000196756_82 (sequence is synthesized)
ccttggtggttaggttttatgggattttacaggacagatggcagctgcaggagtcttgtactgtccctgacttgggtcatcccacaggccctggcaccatcctcctgcccttcctggctc

SEQ ID NO: 940438 - DNA, 120 bp, Artificial Sequence
  ENSG00000196756_83 (sequence is synthesized)
gaggtcactagaggggaggcagaggctgcttcccattgcttgctcttccactgaggcccacagggacatgtgacaccctcttttcctcgaactctgcgactccactgtgtgaatcacggt

SEQ ID NO: 940439 - DNA, 120 bp, Artificial Sequence
  ENSG00000196756_84 (sequence is synthesized)
ggggcttacagagctccccttgggctctgagtcatcctagtgtggattggcatagtttgttgaagtgggaggagtactgcattttggaggcaggcaattagctagtggttttctctggac

SEQ ID NO: 940440 - DNA, 120 bp, Artificial Sequence
  ENSG00000196756_85 (sequence is synthesized)
ttgcaggagagtggcagaccgcagggcccgaggtaaggtttcttgtccatctctggaattttggctttttgcaccctgtaaagtcacgtcccctttttttctggtgctttggtggtgacg

SEQ ID NO: 940441 - DNA, 120 bp, Artificial Sequence
  ENSG00000196756_86 (sequence is synthesized)
ggagagcatggatcctgaggtcccagggagtggtaagtgatctctgggagtcagaagcagcatctgtaatcttaggctgtaagtctgctcattgccctgtcagctgttctgttccaggaa

SEQ ID NO: 940442 - DNA, 120 bp, Artificial Sequence
  ENSG00000196756_87 (sequence is synthesized)
ctagacttactcatcctgtatatctgctacttggtgtcctttggcctacatctccctatttccttcagctcctgcccatggtctcagccttagatccaaggacagtccaaggaagtccta

SEQ ID NO: 940443 - DNA, 120 bp, Artificial Sequence
  ENSG00000196756_88 (sequence is synthesized)
ttttttttttttttttaacattgcacacataagtgagatatgcactgtttgtctgtgtctagcttatttcatttaacataatatcctccaggtccatccatgttgtggcaaatgacagga

SEQ ID NO: 940444 - DNA, 120 bp, Artificial Sequence
  ENSG00000196756_89 (sequence is synthesized)
gacagggtctccctctgtcacccaggctgaagttaagcccaggagacagaggttgcagtgaactgtgtttgctcactgcaacctctgtctcctgggcttaagtgaccctcccacctcatt

SEQ ID NO: 940445 - DNA, 88 bp, Artificial Sequence
  ENSG00000196756_90 (sequence is synthesized)
tcccacctcatttctatgcctggttaatttttgtatgttttgtatagatggggtttcgcgatgttgcccaggctggtctccaactcct

SEQ ID NO: 940446 - DNA, 120 bp, Artificial Sequence
  ENSG00000196756_91 (sequence is synthesized)
caggctggtctccaactcctgggcttaaaccatccttctgctttcgcttccaaaagtgctgggattacaggcatggactgccatgcctagcccagggtcttcttttttttttttgagatg

SEQ ID NO: 940447 - DNA, 120 bp, Artificial Sequence
  ENSG00000197085_0 (sequence is synthesized)
acacagagaagaccactcccacctccccgagtgcaaggtgtgaagggacagatcttttaaccatgcctgcccccttatacttgctgttcatagaattgcaactgaaagtgaccatgagga

SEQ ID NO: 940448 - DNA, 120 bp, Artificial Sequence
  ENSG00000197085_1 (sequence is synthesized)
tccactggatggagttacttctttcttaagtgaggaggctaagacctgagttcttcacatctctctgtagataaaatttccggtctggtttcacattcctctgtcagaagaactttcttt

SEQ ID NO: 940449 - DNA, 120 bp, Artificial Sequence
  ENSG00000197085_2 (sequence is synthesized)
aatgtttcttaaagtacaggtctgctgcttatgtgagaagaaacgcagggagacagttcagtcactgcaatcttcatgcccatcagtttcttgtgagaagaaaacaagagctccaatctg

SEQ ID NO: 940450 - DNA, 120 bp, Artificial Sequence
  ENSG00000197085_3 (sequence is synthesized)
ttagatggtattttgaagcaggtctttgggtaaaggacacctagacccagtgaaggtcatggtgattattattggacaatgggacatcactctgctattaagtgagaaaatgagacaggt

SEQ ID NO: 940451 - DNA, 120 bp, Artificial Sequence
  ENSG00000197085_4 (sequence is synthesized)
tgcactgagggctgttagccagacagagtctcgaactggaagtccatctagatgttttgcataagagaatggaaacaatctgtctgtgatttagggacatactctggcagcaatatggga

SEQ ID NO: 940452 - DNA, 120 bp, Artificial Sequence
  ENSG00000197085_5 (sequence is synthesized)
atttcccataatgtttctgaaatgtcttagcagtgcatagagacagcatgtcatcattttctagggactgtgtgttattgcatttttcctagggaagatcttttctaggtcacctgctcc

SEQ ID NO: 940453 - DNA, 120 bp, Artificial Sequence
  ENSG00000197085_6 (sequence is synthesized)
ttcactaaagctctgaccaatctagcttgctaacctgtgactccattttcctaagtcctgagagagaaaaacgctttgcagcaaattatgccaggcatccttgtgtctaaatgaaaaaag

SEQ ID NO: 940454 - DNA, 120 bp, Artificial Sequence
  ENSG00000197085_7 (sequence is synthesized)
gaaaaagcctccttccttccctctgttgagaagtgcacggtccacatatgcatgcacagcatatactgtgagggtatttgcagtcccttgggttgctttgataactggccaggttgctgt

SEQ ID NO: 940455 - DNA, 120 bp, Artificial Sequence
  ENSG00000197085_8 (sequence is synthesized)
tctatttttccacattctattaatcctcctacaggcagttattaggtattgagtgctcacacacccctggcatagtcaccacatgccattagctccagataaacttccagaaaaaagtcc

SEQ ID NO: 940456 - DNA, 120 bp, Artificial Sequence
  ENSG00000197085_9 (sequence is synthesized)
atcccccacttctctcagctgcctgccaacgctggacaccttctcaccaagccagcaggacagagaaaagcctgggctttaagatcaaacaaacacagcttcaaattaggactctgtcac

SEQ ID NO: 940457 - DNA, 120 bp, Artificial Sequence
  ENSG00000197085_10 (sequence is synthesized)
ttcctgtgtactgggcactttgctgagtatgtggtttctcatctgtaaaacagagaaagatgattatctcccaatctttctatgttatatgtttgaattaaataaggtactctccatgaa

SEQ ID NO: 940458 - DNA, 120 bp, Artificial Sequence
  ENSG00000197085_11 (sequence is synthesized)
tctaggactcagaaatatagatgttagtaagagcaaacagacataacagataacacatacaaagtgcctaccacatgctaaccactgctgcaggcactttctatagaagaactaatttaa

SEQ ID NO: 940459 - DNA, 120 bp, Artificial Sequence
  ENSG00000197085_12 (sequence is synthesized)
tcatcaccataaccctatggggtagatgatatttttacaacctccattttacagatgaagaaactgaagcatagacctgcttatgtgagaagaaacgcagggagacagttcagtcactgc

SEQ ID NO: 940460 - DNA, 120 bp, Artificial Sequence
  ENSG00000197085_13 (sequence is synthesized)
gtcaagtaggaagtccgggctgctctgctagaaagagaagtcatgtgcaggagcactgaggcatcccaggtgtgacactcttccacctagagcattccgtctctcatcctctgccatgtg

SEQ ID NO: 940461 - DNA, 120 bp, Artificial Sequence
  ENSG00000197085_14 (sequence is synthesized)
ccatgttttgaaccactagattagagggtcaagcaatttcttggaattttactctgaattctacgtagaccattttcatgtgtatacctcctctgagtcaccctcaggtagggacatttt

SEQ ID NO: 940462 - DNA, 120 bp, Artificial Sequence
  ENSG00000197085_15 (sequence is synthesized)
gagtgacttctccccagatttttgtatacctgactctgtttcagcatccgcttcccaaagaatgcagtgtgaagcaggagcttatgtgagaagaaacgcagggagacagttcagtcactg

SEQ ID NO: 940463 - DNA, 120 bp, Artificial Sequence
  ENSG00000197085_16 (sequence is synthesized)
tcataaagtcctcacctactggcaaaaacaagatgttctactcccaggttgactttttcaagccccaagatgttgagtcagccattctccaaggatctcgatttccttttaatggaaaat

SEQ ID NO: 940464 - DNA, 120 bp, Artificial Sequence
  ENSG00000197085_17 (sequence is synthesized)
aacattaaacaccaaatataagcctcgctgtcccacatgcgtattggggacaagatgaaacctgcttccaggctactttggcagcagaactgaaaaaggctttttttccagatatatgat

SEQ ID NO: 940465 - DNA, 120 bp, Artificial Sequence
  ENSG00000197085_18 (sequence is synthesized)
ttctcatcgacagggttgcacagccctctttattgttcgtgtaaatgacacccttggatctgaacaatacacaccaggacaattgtgtgcaacagttctacaaactgatatttctaatta

SEQ ID NO: 940466 - DNA, 120 bp, Artificial Sequence
  ENSG00000197085_19 (sequence is synthesized)
atttatttcttctgtacctaatgacctgagcaatccttctctgctgaacctggtagtgtcatctttagaagtgaagacacaattaacacatggtcatttcttcattatatcgttgttact

SEQ ID NO: 940467 - DNA, 120 bp, Artificial Sequence
  ENSG00000197085_20 (sequence is synthesized)
ggaaaacttcctacaccttctttgttgggatgttctctggactaatgactccaggcgagaccaccgttgatcatgaactcactttgaaacagaagctgggttggtaagactggagctact

SEQ ID NO: 940468 - DNA, 120 bp, Artificial Sequence
  ENSG00000197085_21 (sequence is synthesized)
ctgcgttcaggtaatgtataggagggttatgagggcagagaattcctaagctcattagtaaattgctcttcagaaagtgctttgaagcaaagctaatttcctttcccaatatgagaagat

SEQ ID NO: 940469 - DNA, 120 bp, Artificial Sequence
  ENSG00000197085_22 (sequence is synthesized)
ttggccctaccagaaaaaggaaatgatttgaatgtgcgccaaaaaatatgttttctttcttttctttgttgaacactcatcgggagttactcttattagttccgcatttttattgcattt

SEQ ID NO: 940470 - DNA, 120 bp, Artificial Sequence
  ENSG00000197085_23 (sequence is synthesized)
acgtacattttaaactctcattcagacagatattgcaatgtgtttgcttattatttgcttttgtgggtcacgcaaagccttccaatttgctgttagttggcatttgatgtacctatttcc

SEQ ID NO: 940471 - DNA, 120 bp, Artificial Sequence
  ENSG00000197085_24 (sequence is synthesized)
agacttcttatatacatatacaaatttggacacatgcagatagtattgtggttttgatacttgtttttttaaaaatagaattctactctataaattgttctgcaaattattatatctgac

SEQ ID NO: 940472 - DNA, 120 bp, Artificial Sequence
  ENSG00000197085_25 (sequence is synthesized)
cagtataattttctgcaatgatgaaaatgttctatacctgtgactatggagcccttaaaaacatggctaatatgaacaaggaactaaacttttcattttattttatttcaatttacctaa

SEQ ID NO: 940473 - DNA, 120 bp, Artificial Sequence
  ENSG00000197085_26 (sequence is synthesized)
cttcgagtcgttagtagaagttacatgcagctagttgttaatgtattagacagctcagttctaaaggatcatatagattaccttcatgacctgagacaggaaaagatttcttaagtaaga

SEQ ID NO: 940474 - DNA, 120 bp, Artificial Sequence
  ENSG00000197085_27 (sequence is synthesized)
tacaaaaaccatggagtaaatgagaaaatatttgtattatattaaagctaagatgacacaagatggctcacatctgtatttccagcacttttggagactaaggcaggaggattgtttgag

SEQ ID NO: 940475 - DNA, 120 bp, Artificial Sequence
  ENSG00000197085_28 (sequence is synthesized)
cccaggagttcaagtccaacctggcaacatagaaagacactatctcttcaaaaaattaaaaaaaaaaatagccaggcatggtggcacatgcccatagtcccagctactggggaaactgag

SEQ ID NO: 940476 - DNA, 120 bp, Artificial Sequence
  ENSG00000197085_29 (sequence is synthesized)
gcaggaggatcatttaagcctaggaggttgaggctgaaatgagccaagatcacaccactgcactagagccagagtgacagagtgagagcctcaaagaaaaaaaaaaaacctaagaaattt

SEQ ID NO: 940477 - DNA, 120 bp, Artificial Sequence
  ENSG00000197085_30 (sequence is synthesized)
tatgtagagataccattaaaagcattaaaagagtagaaaaagaaccacagaatgggagaagatatttgcaacactgttaagacaaagggcttgtatacataatatatgatgagctccgat

SEQ ID NO: 940478 - DNA, 120 bp, Artificial Sequence
  ENSG00000197085_31 (sequence is synthesized)
aactcagtaagaaaaacacagacaatccaaaatgaacaaggtataataagccctcacttaatgtctttgataggatcatggaagctgtgactttaagcaaaaaataaaatataacaaaac

SEQ ID NO: 940479 - DNA, 120 bp, Artificial Sequence
  ENSG00000197085_32 (sequence is synthesized)
caattttaccataggtgaattgatataagtaagagttcagttcctggcatattactggtgacaaaaaatcaccaaacttctaaaaaaaagaccaaaatacatttaatattaaacattgaa

SEQ ID NO: 940480 - DNA, 120 bp, Artificial Sequence
  ENSG00000197085_33 (sequence is synthesized)
ataaatgtgagctacacatacatttaggaaagattaataaaaacaatataagttcattcacttattccaattcagagtctcgggtgctggagcctctgcaggggctaagggtgaaaggtg

SEQ ID NO: 940481 - DNA, 120 bp, Artificial Sequence
  ENSG00000197085_34 (sequence is synthesized)
gaaatacaccctggacaggacaccatcccgtcgtagggcacactcacacccacacccacattcatttggactgggacactttagactgtcaattcatctaatgtgcacatctttgagatg

SEQ ID NO: 940482 - DNA, 120 bp, Artificial Sequence
  ENSG00000197085_35 (sequence is synthesized)
ggagaaaatgcatgcagacatggggagaacatgtcaaccccacatagacagtgaccccagctgggaattgactttttttctcttaaggttattataaaacaatgttatttgaggacttgc

SEQ ID NO: 940483 - DNA, 120 bp, Artificial Sequence
  ENSG00000197085_36 (sequence is synthesized)
tgtatttgtacaagcccttgtctataaaactaactcagatggctaatacacatttgaaaaggtgcggaatttcattatttcattagtcataaggaaaatgaaaactaaagctctacacat

SEQ ID NO: 940484 - DNA, 120 bp, Artificial Sequence
  ENSG00000197085_37 (sequence is synthesized)
tccaaaatggctaaagttaagaagagcaatattatcgagtgttgataatattgtggagcaccttgaatgcttatgcattgctggtaggaatgtaaattagtacaacaactttgggaaaca

SEQ ID NO: 940485 - DNA, 120 bp, Artificial Sequence
  ENSG00000197085_38 (sequence is synthesized)
gtctggcattatctaataaagttgaacatagtcattccctatgagtaagcacttccagtcctaggtataaactggatagaattgctttgtatagagacacaaagacatatgcaagaatgt

SEQ ID NO: 940486 - DNA, 120 bp, Artificial Sequence
  ENSG00000197085_39 (sequence is synthesized)
ccacagcatccttacacataatggccgaaaaactaaaaacacctcaaatgttaggactacaatggtaaattgtgtatattcatagagtgatattttaatcaacaataagtacattagaat

SEQ ID NO: 940487 - DNA, 120 bp, Artificial Sequence
  ENSG00000197085_40 (sequence is synthesized)
tgcaattacatgtgatggcaaaagtaagtctcacaaacataatattgagcaaaacaaggcacatatgaaagaataagcctgcttatataaaactcaaagatgggtagaactgaactatgg

SEQ ID NO: 940488 - DNA, 120 bp, Artificial Sequence
  ENSG00000197085_41 (sequence is synthesized)
tattagagattagaatactagttaactcaaaaagtgccagaaagtgggcttttatgacgctggctatttatttcctggctttatggtagttacacaaatgcttgcttgatgatactttat

SEQ ID NO: 940489 - DNA, 120 bp, Artificial Sequence
  ENSG00000197085_42 (sequence is synthesized)
gaagaaggacatttcagttttaaatactattcattatgtgcgttattcttcaataaaaagtatttttagaaagagatattaaaatttgaaccccagagaacaatttgagagtgaccattt

SEQ ID NO: 940490 - DNA, 120 bp, Artificial Sequence
  ENSG00000197085_43 (sequence is synthesized)
aagcaactgttattacttttcaaaacatttaatattggtataaacaaataaacaaatacagtctcattatagtttgcattttatgttattaataattttactagatatttgtattctgca

SEQ ID NO: 940491 - DNA, 120 bp, Artificial Sequence
  ENSG00000197085_44 (sequence is synthesized)
tgcatctgtgaaatgcttattcgtagccttttctcatatttctatggaatattcgtcatttgcacaatgatttataagaataaaattgtatattttgttctattgtaaaactgttgtata

SEQ ID NO: 940492 - DNA, 120 bp, Artificial Sequence
  ENSG00000197085_45 (sequence is synthesized)
gtaaggattgtgcccatttatctgtcaaacaggttgcaaatatttcccccagtctggcattgaattttgtttgtagtgtgattttcccatgccaaagtgtttgtttttattttttctgca

SEQ ID NO: 940493 - DNA, 120 bp, Artificial Sequence
  ENSG00000197085_46 (sequence is synthesized)
gtcactttcattatatcatttagtttatggtttctgaggttttaattgcttataatagcatccccactcctagattatagaaaatatttccctgttttcctctagtatttaaatagttaa

SEQ ID NO: 940494 - DNA, 120 bp, Artificial Sequence
  ENSG00000197085_47 (sequence is synthesized)
attttaaaaaatagaaatattttatgcatcagaagtttatttttgtttatgatgggatactaagtctacatttttccttatgtccgtctgcatgtcaattgtccaaacaacatttatcgc

SEQ ID NO: 940495 - DNA, 120 bp, Artificial Sequence
  ENSG00000197085_48 (sequence is synthesized)
atgcatgactcatgttgtctccaccaatttgattctcatttaaatatgtgtatatttacatatgtaaatatatacatatatatgtatagatatatattagattcccttacgtacttgagt

SEQ ID NO: 940496 - DNA, 120 bp, Artificial Sequence
  ENSG00000197085_49 (sequence is synthesized)
ttgtgtcaggattctctgttatgttacttaatttatttacctaatcttgtacctatgccatgatgatttaattactctggctaatcaggctacagcccaggcactgaaatataaaatagc

SEQ ID NO: 940497 - DNA, 120 bp, Artificial Sequence
  ENSG00000197085_50 (sequence is synthesized)
aggttttgcttaatgttttggcttcatcactcatatgtctggcttataggtgctattccgtgtgcttctgtctccccatggcatctcatcctgcagagtctctgcccgtggactctcttt

SEQ ID NO: 940498 - DNA, 120 bp, Artificial Sequence
  ENSG00000197085_51 (sequence is synthesized)
tcagaagagtagtcagaagtcttaatatcttatgtggcataaggcttctaagcacagaaaagtgtgtggtgttaggtctttttaaggtataaccttgggattgccaccacagtactttgc

SEQ ID NO: 940499 - DNA, 120 bp, Artificial Sequence
  ENSG00000197085_52 (sequence is synthesized)
taacaaatcttctgctttgttaggaagtcacaggttagtcacattcaatatggaaatgactacacatgggcattataccaggaggagtgtccattgagtgctacctttgcagactagcta

SEQ ID NO: 940500 - DNA, 120 bp, Artificial Sequence
  ENSG00000197085_53 (sequence is synthesized)
ccacagtgggtatccttgtcttagtcttatctataatagaaatgtcttaagtccttcattactatttgttactgatttctagattttatcaagattaaaaagggatctacaatccacaga

SEQ ID NO: 940501 - DNA, 120 bp, Artificial Sequence
  ENSG00000197085_54 (sequence is synthesized)
ggtttgttttcttttatcggaatggttgctaaatagtatcaaatacaatttgaaatttataaagataatcatttggttttctcctttaaaatacttatgcaataaactctattaacagaa

SEQ ID NO: 940502 - DNA, 120 bp, Artificial Sequence
  ENSG00000197332_0 (sequence is synthesized)
gaaaaagcccgcggcgtcttctctgtcacccgcgctcggctccctgctcggtcgggctggaacctgtactggcagccggaggtgtaggtaggaaccggaatacctcggaagccgggaaat

SEQ ID NO: 940503 - DNA, 120 bp, Artificial Sequence
  ENSG00000197332_1 (sequence is synthesized)
acagtgtggtgtgttgaatattatagtttcaaaatccttcatgtgtgttaggactcaatgatctttgaggatgtggctgtgaactttacccaggaggagtgggctttgctggatccgtcc

SEQ ID NO: 940504 - DNA, 120 bp, Artificial Sequence
  ENSG00000197332_2 (sequence is synthesized)
cagaagaaactctacagagatgtgatgtgggaaatcatcaggaacctgatgtctgtaggaataaaatgggaagaccggaacattgaagatcagtacaaaaattccaggagaaatccaaga

SEQ ID NO: 940505 - DNA, 120 bp, Artificial Sequence
  ENSG00000197332_3 (sequence is synthesized)
aatcatatggcagagagactctgtgaatgtaaagatggtcaatgtggagaaactttcagcctgattccagatggtataatgaacaagaacactcttcctggggtaaaaccatgtgaaagc

SEQ ID NO: 940506 - DNA, 120 bp, Artificial Sequence
  ENSG00000197332_4 (sequence is synthesized)
agtgtgtgtggagaaggcaacgtggatcattcatctctgaattgctacatcagagctgacactggacacaaaccgtatgagtgtcaggaacatggagagaagccacataaatgtaagcag

SEQ ID NO: 940507 - DNA, 120 bp, Artificial Sequence
  ENSG00000197332_5 (sequence is synthesized)
tgtgtaaaaaccttcagctgcctccactccttccaaacacatgaaaagcctcacacaggagagaaaccctatgattgtaaggaatgggaaaaaaccttcgattctccccaaaccgttcga

SEQ ID NO: 940508 - DNA, 120 bp, Artificial Sequence
  ENSG00000197332_6 (sequence is synthesized)
agatacagggtagtgcacagtggagatggaccttataaatgttgaagaatttgtgaccgtggataagttcgtttcctgttatgtgaacttggcagattaatgctaaatcctgtgggacag

SEQ ID NO: 940509 - DNA, 82 bp, Artificial Sequence
  ENSG00000197332_7 (sequence is synthesized)
ccatgattctgcagactgcacaggaagcatggtactggaaggatggcatctgctcagcttctagggaggcctcaggaaactg

SEQ ID NO: 940510 - DNA, 120 bp, Artificial Sequence
  ENSG00000197332_8 (sequence is synthesized)
atggcatctgctcagcttctagggaggcctcaggaaactgacaatcatggtggaaggcaaagggggagcagcagttcacacggccagagaaggagcaagagagagcagggcaaggtgcca

SEQ ID NO: 940511 - DNA, 120 bp, Artificial Sequence
  ENSG00000197332_9 (sequence is synthesized)
cagacttttaaatgaccggttctcacaagaacttaccatctcaagaacagcaccacagggatagtgctaaaccattcatgaaggaccaccatccagtcacctcccacaaggccccacctt

SEQ ID NO: 940512 - DNA, 120 bp, Artificial Sequence
  ENSG00000197332_10 (sequence is synthesized)
caatattgggaattacaattcgacatgagatttgggtggagattcaaatccaaaccatgtccttttgcttttttctgttttgtttgtggagtagatttttctccatccctttactttgag

SEQ ID NO: 940513 - DNA, 120 bp, Artificial Sequence
  ENSG00000197332_11 (sequence is synthesized)
atgggtctcttgaagacagcataccattggatcttgcttttttatccaagtcaccactgtgccttttaattggggcatttagcctgcttacattcaaggactcagtgacctttgaggatg

SEQ ID NO: 940514 - DNA, 120 bp, Artificial Sequence
  ENSG00000197332_12 (sequence is synthesized)
aggactcagtgacctttgaggatgtggctgtgaacttcacccaggaggagtgggctttgctgggtccttcccagaagaatctctacagagatgtgatgtgggaaaccttcaggaacctga

SEQ ID NO: 940515 - DNA, 120 bp, Artificial Sequence
  ENSG00000197332_13 (sequence is synthesized)
agagagtctgaaggtaaggaagatggtcaatgtgaagagatcttcagccttgttccaaatggtatagtgaagacgacttttactggagtcaaatcatgtgaaagcagtgtgtgtgaagaa

SEQ ID NO: 940516 - DNA, 120 bp, Artificial Sequence
  ENSG00000197332_14 (sequence is synthesized)
ggcaatatggatcattcatctcttaattgctgcatcagagctgacactggacacaaatcagatgagtgtcagcaacatagaagccacataagcagtgtgtgaaaaccttcagctattgcc

SEQ ID NO: 940517 - DNA, 120 bp, Artificial Sequence
  ENSG00000197332_15 (sequence is synthesized)
actcctttcaaacacatgaaaggcctcacactggaaagaaactccatgtaagaaatgtggaaaaaccttcatttctgttcaaaccttttgaagatacatggtaatgcacagtgaagatga

SEQ ID NO: 940518 - DNA, 120 bp, Artificial Sequence
  ENSG00000197332_16 (sequence is synthesized)
catggtaatgcacagtgaagatgaaccttataaatgtaagttttgtgggaaggcctttgataatctacatttatatcttacacatgaaagaactcacactggagagaaaccctatgaatg

SEQ ID NO: 940519 - DNA, 120 bp, Artificial Sequence
  ENSG00000197332_17 (sequence is synthesized)
ttgttccagttccattcgaaaacatgcaagaattcacactggagagaaaccctatatatgtaaacaatgtggcaaagcctttagatattccagttctattcgaaatcatgaaaacactca

SEQ ID NO: 940520 - DNA, 120 bp, Artificial Sequence
  ENSG00000197332_18 (sequence is synthesized)
cactggtgaaaaaccctgtgaatgtaagcaatgtgggaaagcctttagttattccagttactttcgaatacatgaaagaattcacactggagagcaggtgtataaatgtaaggaatgtgg

SEQ ID NO: 940521 - DNA, 120 bp, Artificial Sequence
  ENSG00000197332_19 (sequence is synthesized)
gaaaacattcacttatcccagtgcctttcataaacataaaagtacccacacttcacagaaactttatgaatgtaaggaatgtgggaaagcatttgattgttttagttcctttcatagtca

SEQ ID NO: 940522 - DNA, 120 bp, Artificial Sequence
  ENSG00000197332_20 (sequence is synthesized)
tgaaggggttcacactggagagaaaccctatgaatgcagaacgtggaaaagccttcagtagttctaagtacttaaaaatacatggaagaactcacactggagagaagtcctatgcagtaa

SEQ ID NO: 940523 - DNA, 120 bp, Artificial Sequence
  ENSG00000197332_21 (sequence is synthesized)
agaatgagggaaagtattttattgtctcagtccccttcaaagacatgaaaggactcacatcagagaaaagttgtatgaatgtaaaaaatgtgataaagccttccattcgtccagtactgt

SEQ ID NO: 940524 - DNA, 120 bp, Artificial Sequence
  ENSG00000197332_22 (sequence is synthesized)
tagaaaccatgaaagaagtcacatttaagaaaaacacagtgatgttaggaatatggggaacctttcctttctcttccagtctttggaaggcacagggtatgacacactggtgaccttata

SEQ ID NO: 940525 - DNA, 120 bp, Artificial Sequence
  ENSG00000197332_23 (sequence is synthesized)
actgtaaggagtgtggataagtatttattagtccttgtgtgttttagatacatgaaagaatttactcaaaaggaaactctatgaatgtaaagaatgtggtaaaacctgtgtagtttcagt

SEQ ID NO: 940526 - DNA, 120 bp, Artificial Sequence
  ENSG00000197332_24 (sequence is synthesized)
ttctcttgaataaagtcatttcctggtattctcaggggattggttccagcaccccttgagaatatataattttgctcaagtgctttacagaaaagtgtatttgcctataactaggcaatc

SEQ ID NO: 940527 - DNA, 120 bp, Artificial Sequence
  ENSG00000197332_25 (sequence is synthesized)
atctctagattacttataatacctaatgcattgtaaatgctatgaagacaactgttttattgtatttagggaagtatgacaagaaaaaacatctgtacatattcagtacagacacaacca

SEQ ID NO: 940528 - DNA, 120 bp, Artificial Sequence
  ENSG00000197332_26 (sequence is synthesized)
agtacagacacaaccaccatacggctacctacctagtacacatcatctacaatataacattttctttttaaaaaacagttatggattggtttcattaaatgacctgcaagcgtgtgttaa

SEQ ID NO: 940529 - DNA, 120 bp, Artificial Sequence
  ENSG00000197332_27 (sequence is synthesized)
attaatgctaaatcctgtgggacagcatttagcaacacctaaaaaagtactcaattatgattttttgtgtactaaatgattatggaaatactaattctgtgtggaaagaacacactcaaa

SEQ ID NO: 940530 - DNA, 120 bp, Artificial Sequence
  ENSG00000239225_0 (sequence is synthesized)
gcagcaagatgaagatttccttttgtcacagcctttatttccacaatgaagtgatcaggtacagggtatctcattccactgcagtccagttgttctgggatcatgaaggtcaagcctcca

SEQ ID NO: 940531 - DNA, 120 bp, Artificial Sequence
  ENSG00000239225_1 (sequence is synthesized)
caggcagtacacctcctacctgagctttttcacctgtttggctgaacatgactgcccgggttttggtaggattgctgagatatccacctgaggcccatctaagtctacattccttcagaa

SEQ ID NO: 940532 - DNA, 120 bp, Artificial Sequence
  ENSG00000239225_2 (sequence is synthesized)
tttgatgaccccgggctgccctgatatgttatcctctctgctatcctcactccaactgccctgccttcccatataagacagtccacttcacagggaatctggaggaatgcactgggttcc

SEQ ID NO: 940533 - DNA, 120 bp, Artificial Sequence
  ENSG00000239225_3 (sequence is synthesized)
agtgtgatgaaatgttctattatctccatgtacatgtattttagagcttcctccaggactggaaatgtgaagagattgcaaaatggctggggaccttcagtatgtgtccagggagggaac

SEQ ID NO: 940534 - DNA, 120 bp, Artificial Sequence
  ENSG00000234233_0 (sequence is synthesized)
tccatccctgcaactgaaaagtccgaggtgtcgggacgtgctctcggcggcctgattccaccccttcacccacccaccactttctaggtgaagttaaggctcaccttcgaagtgaggggc

SEQ ID NO: 940535 - DNA, 120 bp, Artificial Sequence
  ENSG00000234233_1 (sequence is synthesized)
agatggttttcctggcgtcaggtgggaagtggagggcacaggtgcagagcgaactaaatggtcacagatcgacggtagcatgaagccttgagaggcgagagtcctaggagcggggatgga

SEQ ID NO: 940536 - DNA, 120 bp, Artificial Sequence
  ENSG00000234233_2 (sequence is synthesized)
acttaacagaggagagaccccaactaagcacttgcagagcgactaggagtcctggcagttggaaggcgcagcgcacgagttcatcaaatggctatattgaaagatagccaagcataagat

SEQ ID NO: 940537 - DNA, 120 bp, Artificial Sequence
  ENSG00000234233_3 (sequence is synthesized)
gctctttgcagactcctagagcccccaccccaccccttccagaaacagatgacattcttctaccagggagacatgaggagctaacttaggaaatgggttttaataatgtgtaaatatcac

SEQ ID NO: 940538 - DNA, 120 bp, Artificial Sequence
  ENSG00000234233_4 (sequence is synthesized)
gatttcagagtctaaggagcttctgtgtaaaatgatgagcttctgtttggatttagttagggattcaggggaagggcatgaaaagtgacttatgctactaataaacactctttaattaaa

SEQ ID NO: 940539 - DNA, 120 bp, Artificial Sequence
  ENSG00000234235_0 (sequence is synthesized)
cgcgggcgccggggtggagttctggcttcaggatctgctcgccgccgacgacgacctcgacccttccattcagacccgcgaggacgcgcgccccgccccggcgcccgccccgtccacgcc

SEQ ID NO: 940540 - DNA, 120 bp, Artificial Sequence
  ENSG00000234235_1 (sequence is synthesized)
cgagccgggagcgccaggtccacggggcttcccgcgctcttggggggctcctgccgcggcgtcgggggcctgggcagcgagggcctccagaggaaccagcgctgccgactccttgattct

SEQ ID NO: 940541 - DNA, 120 bp, Artificial Sequence
  ENSG00000234235_2 (sequence is synthesized)
gggagagtaaattgtgctgttgaagccaccacatttgtggtgatctgttccagctgcagtaggaagctcgtatgcttggcagttctgattgtgaactcacctttatgttggagattcctt

SEQ ID NO: 940542 - DNA, 120 bp, Artificial Sequence
  ENSG00000234235_3 (sequence is synthesized)
tacacataagtccccttatccacagcggacaaattccatgacccccagtggatgcctgaaatcgcggagagtactgaatcctacatataatgtgttctttcctatatgtatatgtatata

SEQ ID NO: 940543 - DNA, 120 bp, Artificial Sequence
  ENSG00000234235_4 (sequence is synthesized)
tctatatctatgatacagtctaatttataaattaggcacagtgagagattaacaacaataactaatagtaaaataggacaatgatgacaatataatgtaataaaagttttgtgaatatgg

SEQ ID NO: 940544 - DNA, 120 bp, Artificial Sequence
  ENSG00000225316_0 (sequence is synthesized)
gagatcagacagaagcggaagtggtttcgtgcccttcaagtccagcacagccttgccttggggccttcagcttaggcacggaatcttctttggcctggaatagccgtcccaaagactgtc

SEQ ID NO: 940545 - DNA, 120 bp, Artificial Sequence
  ENSG00000225316_1 (sequence is synthesized)
catctagccaagccgaccttcccgctctgtcatgtcgggccgtttccttgccttcttgcacacagcactatctgaaataatctccttccagtcattcagcacattcattgagtgcctgct

SEQ ID NO: 940546 - DNA, 120 bp, Artificial Sequence
  ENSG00000225316_2 (sequence is synthesized)
cgtatgccctgtcttatgcacttgggatagatcaaggtacaaatgcaacaccttctctaccctggtggaatttacaggccttgtgaattacattgtttcctttttcatcatccgcctctg

SEQ ID NO: 940547 - DNA, 120 bp, Artificial Sequence
  ENSG00000225316_3 (sequence is synthesized)
ggcccgcagcagcggaacttacaggagatcagacagaagcggaagtggtttcgtgcccttcaagttagattatctagatactcatctttcccctccatgaaaaatgactcattcttagta

SEQ ID NO: 940548 - DNA, 120 bp, Artificial Sequence
  ENSG00000225316_4 (sequence is synthesized)
catttatgtgtaaaattgctttggattttaagtgcatggaagaccaggatcatgtcacactaatgtgtattgcacagcatgtgacatagaactgagttgaaacagtgcttagcacataat

SEQ ID NO: 940549 - DNA, 120 bp, Artificial Sequence
  ENSG00000225316_5 (sequence is synthesized)
ctctaggggagcagggacctctgtcagccttgttctctactttttcccaagagcctagaactgtgtctggtacatccttcatggtcaatcaatatttgtggaatgaataaacaaatgttt

SEQ ID NO: 940550 - DNA, 120 bp, Artificial Sequence
  ENSG00000225316_6 (sequence is synthesized)
atattaaccaggcacaatggctgaggggagaggatagcttgataccaggagttcgataccagcctgagcaacatagcaagacccccgtctctaaaaaataaaaatgttttatattttcta

SEQ ID NO: 940551 - DNA, 120 bp, Artificial Sequence
  ENSG00000225316_7 (sequence is synthesized)
gctccacctcctcgcgaccggcctgcaggtccactctaatattcccgctgtcgcagacgccgccacctcccggggcgccgcgccccgccccccaacctaagcacacctttgggaagttgc

SEQ ID NO: 940552 - DNA, 120 bp, Artificial Sequence
  ENSG00000225316_8 (sequence is synthesized)
ctaaagttgctacgcctccccgcaagccccgacgcccgcgggagaccgctaccaggttatcaggaagttatctcaacttccatcaggcctcagctgaaagctcatctgccaaaacgcatc

SEQ ID NO: 940553 - DNA, 120 bp, Artificial Sequence
  ENSG00000225316_9 (sequence is synthesized)
agcactcatgtaaaataaaaggagtagggaggtgactttgtacacatactgtccagtgtttggctgccagtttccctcttgtgtgtaactattctaggccctgtctgacctgcagccggc

SEQ ID NO: 940554 - DNA, 120 bp, Artificial Sequence
  ENSG00000225316_10 (sequence is synthesized)
tgttgaggcggccctagtcggcctccttctggtgatctgtttcttgtgcgtgtccaccaacagcaagaggtccgaattgcccttttccagccgctcgcgggccacttcggtgcgccggac

SEQ ID NO: 940555 - DNA, 120 bp, Artificial Sequence
  ENSG00000225316_11 (sequence is synthesized)
tggccctgcagctcggccacctcctcctgaagcaggacgtggcaagaagagatgctccagcagttgaagcaggttcccaagttatttataaacaaaggcttttatgctccagaactctct

SEQ ID NO: 940556 - DNA, 120 bp, Artificial Sequence
  ENSG00000225316_12 (sequence is synthesized)
tcactgccttgccttcttctccctcaactgcacgtctggcaaataggatggtggattaaagcaagtcacagcagagggcaaatgtcttggtccagcacagccttgccttggggccttcag

SEQ ID NO: 940557 - DNA, 120 bp, Artificial Sequence
  ENSG00000203588_0 (sequence is synthesized)
catctcttttgcattttttttcctttgtgaggtaaagcagcattttcctggctactctgactttgctcatgagaaatagtctcattactatgaatgaaatgtgtggggatctgatctctt

SEQ ID NO: 940558 - DNA, 120 bp, Artificial Sequence
  ENSG00000203588_1 (sequence is synthesized)
ctaacagctcaggagtctttttttctgagatagggtttctctctgttgcctaggctggagtacagtggtgtgatcatggctaactgtagcctcgaactcctgggctcaagtcatcctcct

SEQ ID NO: 940559 - DNA, 120 bp, Artificial Sequence
  ENSG00000203588_2 (sequence is synthesized)
tggcctagcatcgtatttttgaggttagccttgcctatttaaaaatgttttgatatctttttaaatctatgggttccccctccacccctttctttcaagttatctgttgaagaagttggg

SEQ ID NO: 940560 - DNA, 120 bp, Artificial Sequence
  ENSG00000249318_0 (sequence is synthesized)
tgaagaaggacatgacacaggaagcccttgtagaactggaggaggaaatgaaacgctgccatatctggtcctggtgattgcaggagtagaggagagacacaggcaagatcaaaaggctgt

SEQ ID NO: 940561 - DNA, 120 bp, Artificial Sequence
  ENSG00000249318_1 (sequence is synthesized)
tctaaatttctctctctgaagaaatgctgtgctaatgttggtcgcagtaaaactccaatggctcccaccacctaccaaggaaatttcaaagccctccatgacatagatcctttccaaaac

SEQ ID NO: 940562 - DNA, 120 bp, Artificial Sequence
  ENSG00000249318_2 (sequence is synthesized)
tttatgctgatgctgcagctcaactggaaaactcatttccttccctttccctttcttctgtatctccacatgtcaaggtcttggtgattattaaagcccaagaaaaagtaaatcttttaa

SEQ ID NO: 940563 - DNA, 120 bp, Artificial Sequence
  ENSG00000203585_0 (sequence is synthesized)
agcaggaaaggcaggggaggcagcggcgggaagccttccttagctgtgtgatcctagatggctgttaacttagcatttgaggactgtctcagatagacacaattggaccagattttgtac

SEQ ID NO: 940564 - DNA, 120 bp, Artificial Sequence
  ENSG00000203585_1 (sequence is synthesized)
catagaaaaaaaggctttacccactcaaacatccactgttttcagcagacagagtcctaagtggatgcctgattggctgatcctgggacacgtgcctgctcactggatgtactgaggcta

SEQ ID NO: 940565 - DNA, 120 bp, Artificial Sequence
  ENSG00000203585_2 (sequence is synthesized)
tgagaagaaggatctggcaaaacaaacctcagggacctcatcaagaaggcagaggacctggactaaccatgacatccaaactgaacacaattttagagataattcccacagaagagacag

SEQ ID NO: 940566 - DNA, 120 bp, Artificial Sequence
  ENSG00000203585_3 (sequence is synthesized)
gatttctagaaaatggaaatagcccgctcttggaaaagaatgggcatttactgagatgcaactataagctggtgaaatataattttgtttaaaatcatttaattttattccacatcattt

SEQ ID NO: 940567 - DNA, 120 bp, Artificial Sequence
  ENSG00000203585_4 (sequence is synthesized)
tcctttgaagatatttgaattgccagggacattaatattgtcaaggagatttgctgtttcacccaaatatgagatgtccactttgggattagatccctgcctcattcaaatttccttttc

SEQ ID NO: 940568 - DNA, 120 bp, Artificial Sequence
  ENSG00000203585_5 (sequence is synthesized)
ccttagtcttttcttgagttacggacatttgttcatttttttcaacttattcaacaagtatttattgaacaactactatgtgccatatactgtttttggtttggtatggaaagcctgtag

SEQ ID NO: 940569 - DNA, 120 bp, Artificial Sequence
  ENSG00000203585_6 (sequence is synthesized)
gaatctctgttgtaattttgggaatttgcccaacctgctctttaggtggtgctatgaactgacttgtgtgctcccaaaatttatctgttgaagctctaagctccaatgtgatgatatttg

SEQ ID NO: 940570 - DNA, 120 bp, Artificial Sequence
  ENSG00000203585_7 (sequence is synthesized)
acacaccagagtgcctgcttgctctctctctctgccatgtgaagacacagtatgaaggcagcttattgcaagcctaagagagaacccttgccagaattggacttccggtctccagaacca

SEQ ID NO: 940571 - DNA, 120 bp, Artificial Sequence
  ENSG00000203585_8 (sequence is synthesized)
tgaaaacataaacttctgttgtttaagccacccagtctacggaattttgttctagaagcccaagctgactaatatggttggagtccagtgctttgcgtgaagaaggtacatctctaaaac

SEQ ID NO: 940572 - DNA, 120 bp, Artificial Sequence
  ENSG00000203585_9 (sequence is synthesized)
taaacattttgctcattgaagcttgatctgaaataattaagactttggtcgtgaaaatcttagacagaatccattcagtgactacctttattctgaattggcaggcaggcagttctgata

SEQ ID NO: 940573 - DNA, 120 bp, Artificial Sequence
  ENSG00000203585_10 (sequence is synthesized)
gatctgagaagattcttttgacaacaatttctccaacttcagatatgttgaaaaacaaaataaatatgttaataattaacatgatgtaatgaacttcagtagtaaattaagactagaaga

SEQ ID NO: 940574 - DNA, 120 bp, Artificial Sequence
  ENSG00000203585_11 (sequence is synthesized)
cagtagtaaattaagactagaagagattaggggtaccaggaatcttggttgtaaagtggcatatataaacatagttgcatcaaaacttgctaaagtggccaggtgcagtggctcatgcct

SEQ ID NO: 940575 - DNA, 120 bp, Artificial Sequence
  ENSG00000203585_12 (sequence is synthesized)
tgagcagattgatgtatctgtttagactggttgcctttagggctctctgggaacctggtctgactttctagtgcccaggcaggcactgccccagatcactgcatatatagcctcaacact

SEQ ID NO: 940576 - DNA, 120 bp, Artificial Sequence
  ENSG00000203585_13 (sequence is synthesized)
gtgtctggcatccatggacaattcattttgctcaattgaactgaatgctcaagatcctcaagaaaggaagaagagaaattacatttacaaagcacctattgtgtgccaatcactatagta

SEQ ID NO: 940577 - DNA, 120 bp, Artificial Sequence
  ENSG00000203585_14 (sequence is synthesized)
atgaagaaactagactccctccctcagaggttgaggagtgtgctagaagtcacacaaccaccaaatggcaatattaaattcaaacctggtgactccaaaggctatactctccacatcata

SEQ ID NO: 940578 - DNA, 120 bp, Artificial Sequence
  ENSG00000203585_15 (sequence is synthesized)
acagagcctccaagtctggttgtaagaaagcatcagatagcaggcatccatttcttcatgcgttcttcagttcatgtagattttgtaccatagaaaaaaaggctttacccactcaaacat

SEQ ID NO: 940579 - DNA, 120 bp, Artificial Sequence
  ENSG00000203585_16 (sequence is synthesized)
ggtttacaagcggcagtttcccctgcggctctttttcctgctgccatgcaagaggtaccttgcttctcctttgcattctgccacaattattttggccattacaaacagtgctgttgtgaa

SEQ ID NO: 940580 - DNA, 120 bp, Artificial Sequence
  ENSG00000203585_17 (sequence is synthesized)
tgttgtgcctgcctgtcttccagctggacataggcaaccacatgaagcacagacccaggaggcctaagctggcctcggtgtaggagaagccgggcacagggatgtttttgaagaagaaag

SEQ ID NO: 940581 - DNA, 120 bp, Artificial Sequence
  ENSG00000203585_18 (sequence is synthesized)
tttttgttttttaagggaaagtttatagaaagtgagagaaggtagatacgagattcaaaagacaaagtagaaagaaatgtgtgttctttaagattttgtaccatagaaaaaaaggcttta

SEQ ID NO: 940582 - DNA, 120 bp, Artificial Sequence
  ENSG00000203585_19 (sequence is synthesized)
cccactcaaacatcgcttaaaagtaagcatgatggagaacaagagagaaggcgtgccctggcaaccattgccaggaaacagatttcactgaagtcataaattagaaagataacccactta

SEQ ID NO: 940583 - DNA, 120 bp, Artificial Sequence
  ENSG00000203585_20 (sequence is synthesized)
ccggaggtgggttcatatgcaatgctgaaaaatctgccagtatagagaatattgctacctttagcttcagtttttttaatcactcatgtttgataattataaagatgtttaaagaggaaa

SEQ ID NO: 940584 - DNA, 120 bp, Artificial Sequence
  ENSG00000205865_0 (sequence is synthesized)
agggctgcaggcactcctgggagcaggaggagggtggcctgtcctgggcagaccagcctctctgggctgtgtggccccagctccctgagcccagagggaggtgagggtgagaaggcctgg

SEQ ID NO: 940585 - DNA, 120 bp, Artificial Sequence
  ENSG00000205865_1 (sequence is synthesized)
accaggcaggacgcagcccccagggcccctgctgggaagaggtcagaacctcccaaggacccagaaggccagaacacactagagggtcccggcatcctgatgagtccactgtccccgcga

SEQ ID NO: 940586 - DNA, 120 bp, Artificial Sequence
  ENSG00000205865_2 (sequence is synthesized)
tggttttcagggatggagaaggctccctgtcctccgctggaaccctgcagccgggctgacgagaccccagcgagacctgcagaacattacagcagaatgaaggagagccagaggaagagg

SEQ ID NO: 940587 - DNA, 120 bp, Artificial Sequence
  ENSG00000205865_3 (sequence is synthesized)
cagatgtgctggcctgtaaacagtctgatttccaatgtaaaccagattcaggcccacgacatcaggtaaacatctgcatcagagcccccggccccccaccgcccgggaggccccggggtc

SEQ ID NO: 940588 - DNA, 120 bp, Artificial Sequence
  ENSG00000205865_4 (sequence is synthesized)
cttcttctcaaaaatgaaaacatttggcaattagctgatccaagtgaaaaaggtagagaatgtgctctcaactggaaaatgccaattaaggaagcagctctgacttcccacccgccctgg

SEQ ID NO: 940589 - DNA, 120 bp, Artificial Sequence
  ENSG00000205865_5 (sequence is synthesized)
ctaagctgggagcttatcttccccgagaagaatctgctgggataagggggcttgggaaacaccgagggcagggctgcctcctcacctcctcagcttcctctgagagcagattagccgtgg

SEQ ID NO: 940590 - DNA, 120 bp, Artificial Sequence
  ENSG00000205865_6 (sequence is synthesized)
ccttgtgccagcagggcctgggtgccacaccgggtggcagcgggtggcagagccgggccccgctccggcactgggatttggggtggcgggacccagtggggcacccgcttgtgggcagca

SEQ ID NO: 940591 - DNA, 120 bp, Artificial Sequence
  ENSG00000205865_7 (sequence is synthesized)
ctgagggcggtgacgtaggcagcgggtgccggtgtctgcccctccatctggccgggctccccaccctgctcctgcagccctggacctcagggcccatttgcggtgcaaggcggctcttgg

SEQ ID NO: 940592 - DNA, 120 bp, Artificial Sequence
  ENSG00000205861_0 (sequence is synthesized)
ccacatctcatccccgagcttcagctgcaggacaatgctgccagaggcctggtcctcagagctcacgtaagcatctctggtgtgcagtatttttactccgtttttgaccaaagacacctg

SEQ ID NO: 940593 - DNA, 120 bp, Artificial Sequence
  ENSG00000205861_1 (sequence is synthesized)
aacattcctggagaaaacagtgatgtggatcttatcaaatttaatgggcacatctgaagaaggaaacttgctcagcaccgtgagccccacagtgaaagcactttttggcaagactagagt

SEQ ID NO: 940594 - DNA, 120 bp, Artificial Sequence
  ENSG00000205861_2 (sequence is synthesized)
gctcaccctggggccccgtgggtccagcttctcccttgggaccaggctttccaatagggcccatggggcccggtaaaccagttgggcccaaaggcccaatgttgccccttggcccctcag

SEQ ID NO: 940595 - DNA, 120 bp, Artificial Sequence
  ENSG00000205861_3 (sequence is synthesized)
gaccagtgggacccacgtcacccttattccccttctgcccctgaggcccagtctctcctcggaggcctttctctcccatgggccctgcaagccccttggggccatgttttcctggggatc

SEQ ID NO: 940596 - DNA, 120 bp, Artificial Sequence
  ENSG00000205861_4 (sequence is synthesized)
ctctggtgtgcagtatttttactccgtttttgaccaaagacacctgaacattcctggagaaaacagtgatgtggcagaccattgtgaccggggttcccagggattccagggtgcccttgc

SEQ ID NO: 940597 - DNA, 120 bp, Artificial Sequence
  ENSG00000205861_5 (sequence is synthesized)
aaacccagaggagaaacctttgttgctggggccctggacacagcctccgttctgtgcagtgggaaatggatgagctgtcccctgccccagacccacacctggacagacttggcagaagac

SEQ ID NO: 940598 - DNA, 120 bp, Artificial Sequence
  ENSG00000205861_6 (sequence is synthesized)
tcagggcaggggagcaagctggttattaccaggatgacattgtccttggaaggtaacacttgtgattggaaccactcttcaagctgaacgggcaataaaaaaaagccaagtttaaggtca

SEQ ID NO: 940599 - DNA, 120 bp, Artificial Sequence
  ENSG00000205861_7 (sequence is synthesized)
ggccccgcttccgggtctgggcgcggcctcaggacgtgggcacgttgtcgtccagagagcaagagcgtcgctccccctcgccttctcggccgccctcccggtttaccgccccctgtgtcc

SEQ ID NO: 940600 - DNA, 120 bp, Artificial Sequence
  ENSG00000205861_8 (sequence is synthesized)
attcaccgccactgccagaacgaactattcagattcacgtggagcaaggggctcatgcagaagcagttcccggacccgacactctgggtaggagaccactaaacccggcccctcaaagca

SEQ ID NO: 940601 - DNA, 120 bp, Artificial Sequence
  ENSG00000236404_0 (sequence is synthesized)
atgaggaggagcagaaatcttaccagcaaggcaagaaagaagccgtacgtgaacagcctctgctttaggcccagaaggaaaagaagcttacaggagacaatcagtcttacactcttccat

SEQ ID NO: 940602 - DNA, 120 bp, Artificial Sequence
  ENSG00000236404_1 (sequence is synthesized)
ggtcacaaacaagaggtccctggatctacagtatctaggcccacatgcaatatgactttgcaactcatcccatcagaggatggaaactatttcttcacccccttgaacctgggctggctt

SEQ ID NO: 940603 - DNA, 120 bp, Artificial Sequence
  ENSG00000236404_2 (sequence is synthesized)
tgtaatttgttttggccaatagaatgtggtggaagtgatggtgttaccagaaagagttcccaatccagactcgtgcgagaaagaatttgagaaatgaaagaaccagagcattatagcaga

SEQ ID NO: 940604 - DNA, 120 bp, Artificial Sequence
  ENSG00000236404_3 (sequence is synthesized)
acgaatcctggaatgggaatggaatgcctggatttgtggcacagttgggaagcgtcctggccatgccatgttaaagctgtctccaaggcagtgattcttacccttggctacacattggag

SEQ ID NO: 940605 - DNA, 120 bp, Artificial Sequence
  ENSG00000236404_4 (sequence is synthesized)
tcatttgggaagctagaaaaaaaaaatgcccaggacctgggcaagacggctgaataagaacagctctggtctgcagttcctagcaagatcaacgcagaagggaagctggcagcctgggct

SEQ ID NO: 940606 - DNA, 120 bp, Artificial Sequence
  ENSG00000236404_5 (sequence is synthesized)
cttggagattgtatctggtgccggagaggactggctcccacactcagtgagggaggaattttactgacccagcatccagatgaactttggtgaggagaggagacggagtttcactgttgt

SEQ ID NO: 940607 - DNA, 64 bp, Artificial Sequence
  ENSG00000236404_6 (sequence is synthesized)
catgaactggcagccatgtggaaagaagactagactgcgaatcacttaggatcccaccctcggt

SEQ ID NO: 940608 - DNA, 120 bp, Artificial Sequence
  ENSG00000236404_7 (sequence is synthesized)
gaagactagactgcgaatcacttaggatcccaccctcggtttagtctagaatactctgcgaatcagctttttggccctaggttataggatccagttttttaggtggtagcaacatgctca

SEQ ID NO: 940609 - DNA, 120 bp, Artificial Sequence
  ENSG00000236404_8 (sequence is synthesized)
aggaagatgcagccccttcctccagcctgagagaataaagcatcattggcttatgccaaccatggcaatcccattccccttttctcatgattgatttgggaatgggcaagtgacccagtt

SEQ ID NO: 940610 - DNA, 120 bp, Artificial Sequence
  ENSG00000236404_9 (sequence is synthesized)
ctaaccaatgagacgaaagaaaaagtctattggtcagcttatctcagaagatttttgtttcctgctataaagagaaacagtaagttccttcctgcctgacttaaatgcaattgtgtgcaa

SEQ ID NO: 940611 - DNA, 120 bp, Artificial Sequence
  ENSG00000236404_10 (sequence is synthesized)
acatgttacttggagctacagcaacgattctgtgaccatgaggcaataagccaaggacaaaggatagaatagtgaaaagacagagtattggattttttttatgatatcattgaactgctg

SEQ ID NO: 940612 - DNA, 120 bp, Artificial Sequence
  ENSG00000236404_11 (sequence is synthesized)
gaccaatgtggaaccatctacttttagtctttcatgatttgtgagatgattaaacatttcttttttttagccattatttcttttctgttacttgcaactgaagacatcctacataataca

SEQ ID NO: 940613 - DNA, 120 bp, Artificial Sequence
  ENSG00000236404_12 (sequence is synthesized)
aacactatccaacttggattgtaatttatctattttcagatctgtgtgttctgtcttactgatttttgtattcttagcactgagtataaggctgctacttagtaagacttcaataaatga

SEQ ID NO: 940614 - DNA, 120 bp, Artificial Sequence
  ENSG00000236404_13 (sequence is synthesized)
attactgtaccctcccggcagcctccggcagaacacgcagcagcagcagcagttagcgctgatgcaactatcgttgctgttgccaccgcctccccactgacggggcgtgcacctgggggg

SEQ ID NO: 940615 - DNA, 120 bp, Artificial Sequence
  ENSG00000236404_14 (sequence is synthesized)
gccctaggtaggaaagagacaaatggaagcaaaatagcaaaatggtgaagaggagggttctagaggcagagagccctgcagtcctgagtcctgagtccaccgtttaacagagtgactttg

SEQ ID NO: 940616 - DNA, 120 bp, Artificial Sequence
  ENSG00000236404_15 (sequence is synthesized)
aatatgaagaccaggaaccaatttcaggttctataaatttctcgcttccttcacttctggagtagtcttcatttctgtctgattctacctttactaaaatgaatgaatgattgagaaata

SEQ ID NO: 940617 - DNA, 120 bp, Artificial Sequence
  ENSG00000236404_16 (sequence is synthesized)
cgaaaaatggctggtatagtggctactgctgagaagtatctcttggaaattcccggaaattccatcagtcacattcagacctaactctctgatgatcaatgtttctgaactcaaaccagt

SEQ ID NO: 940618 - DNA, 120 bp, Artificial Sequence
  ENSG00000236404_17 (sequence is synthesized)
gtacataagcagtggactatttaaagtggtattagcctagaatatctaggacccatgttttatgcattcagtaagcgtttgtttaatgtctgttatctaccaggcacattattatgcatt

SEQ ID NO: 940619 - DNA, 120 bp, Artificial Sequence
  ENSG00000236404_18 (sequence is synthesized)
gggcatatagagatgaccaaccacacggcctcaatccttgaaaagcttacagtaaccaaatagggttaacggcctaaagagaggtaattacaagtcttacactcagtcttcttagcatag

SEQ ID NO: 940620 - DNA, 120 bp, Artificial Sequence
  ENSG00000236404_19 (sequence is synthesized)
tatggtgctacctctgagttaattaagataacaaaattcctagatatatatctttgatgaaacggtttccatgaaaactttccaagtttggtccctccccggctgagttcattttggaag

SEQ ID NO: 940621 - DNA, 120 bp, Artificial Sequence
  ENSG00000236404_20 (sequence is synthesized)
gtgactttctgctctcatcacctaaggtccttaacacgtatcctgtgttctccggaggcaccccttgcccagagtgtgccctctgcatggttcccccagaacacctatttcaaaggaaaa

SEQ ID NO: 940622 - DNA, 120 bp, Artificial Sequence
  ENSG00000236404_21 (sequence is synthesized)
gaagttggatcattcagtgaagatttggggggccacttttctacgtgggaggattatgagtattaccttcctcccctatgtattagtaaatataaagaaaacataaattaaccccctttc

SEQ ID NO: 940623 - DNA, 90 bp, Artificial Sequence
  ENSG00000236404_22 (sequence is synthesized)
tattagtaaatataaagaaaacataaattaaccccctcatcccgcactatgggaatccgaagtgggcggatcacttgaggtcagcagttt

SEQ ID NO: 940624 - DNA, 74 bp, Artificial Sequence
  ENSG00000236404_23 (sequence is synthesized)
ggcaaaaccccgtctctactaaaatataaaaattagccagatgtggttgcacacatgcctgggagcaagggttg

SEQ ID NO: 940625 - DNA, 120 bp, Artificial Sequence
  ENSG00000236404_24 (sequence is synthesized)
aaaaaaataaaataaaataaaaataatttagaccccattcttcttagataaccatgacttctgaaggaggtcagagctcttgtgctctgcatctctgctccatcagcctcaaggccacct

SEQ ID NO: 940626 - DNA, 120 bp, Artificial Sequence
  ENSG00000236404_25 (sequence is synthesized)
tgtgctctgcatctctgctccatcagcctcaaggccacctttcaggtccacatgaaatataagtgcacaaaggcaccagacttagcattattagtttcccccactggtctgatttttgta

SEQ ID NO: 940627 - DNA, 120 bp, Artificial Sequence
  ENSG00000236404_26 (sequence is synthesized)
gaaattgccaggaactgattttctgcccttccttcctaacagacaagccttccagccctccctgacacagctcttccctatctcctactctctggtcatcaagcttttagagatgccctg

SEQ ID NO: 940628 - DNA, 120 bp, Artificial Sequence
  ENSG00000236404_27 (sequence is synthesized)
gccttctctagttgccccagctgtattttttcttcttgggaatgcgttgattccagagcctgactgggaataaatctcagctcctccatttagcagttatgggattcaagttactcttac

SEQ ID NO: 940629 - DNA, 120 bp, Artificial Sequence
  ENSG00000236404_28 (sequence is synthesized)
tcccagggactcagtttctgcacctgtaaaatggagatttaccacctttcgttccagcattactgatattgtttggctctgtgtccctacccaaatcccatctcgaaaattaatccctat

SEQ ID NO: 940630 - DNA, 120 bp, Artificial Sequence
  ENSG00000236404_29 (sequence is synthesized)
agtccccacctgttgagggtcctggtgggaggtaattggatcctgggggcggcttttcccatgctgttctcgtgatagtgagtaagttctcacgagagctgacggttttataagtgtttg

SEQ ID NO: 940631 - DNA, 120 bp, Artificial Sequence
  ENSG00000236404_30 (sequence is synthesized)
acagtttctccttcacacgctctctcttctgtctcctgccatcatgtaagatgtgcctgcttctcctcctctcatgattgcaagtctcctgaggcctcctcagccatgaagaactgtgag

SEQ ID NO: 940632 - DNA, 70 bp, Artificial Sequence
  ENSG00000236404_31 (sequence is synthesized)
gtagcagtgtgaaaacagactaatgcaattaccataatgggctttcaattgatgaacttgcatcactgac

SEQ ID NO: 940633 - DNA, 120 bp, Artificial Sequence
  ENSG00000236404_32 (sequence is synthesized)
gcctcctaggaggcgggtgggcaaacggagacctacgcctcggggtctcccggtgccccggctgggtcccgcccgccggcggaggggcgcgtcctcactcaccggttccggtggcgccgc

SEQ ID NO: 940634 - DNA, 120 bp, Artificial Sequence
  ENSG00000236404_33 (sequence is synthesized)
ggcgcccagcacagcgcgagcagcagccagagcgcccagagcgcggacgtgcccatggtgcccgcctggatggtgccgccgccgccgccgccgccgccgttcgctccgcacgacaagtta

SEQ ID NO: 940635 - DNA, 120 bp, Artificial Sequence
  ENSG00000236404_34 (sequence is synthesized)
acaagttaccagtccttccgaaaggaggaagaaggctccaagcttgatatagaagactatcatatgaaccagaaagggtaactgaaaccaaagaaatgactccagtatcaagctaaagac

SEQ ID NO: 940636 - DNA, 120 bp, Artificial Sequence
  ENSG00000236404_35 (sequence is synthesized)
tcttgcccctgaaatggccctggaaagctatggctgaagaatggaggaaaagatgactttctctgtttcttcagaccaggcatcaactgggatgttgggatgttgataaaaggacatctc

SEQ ID NO: 940637 - DNA, 120 bp, Artificial Sequence
  ENSG00000236404_36 (sequence is synthesized)
atcctttgttttctgcctatgctttcaccatacccattcccatgtctggtcatcacagcatccttcacagcccttagctgaatcatgttgagtacaggatggtgtgaatatcatggtttg

SEQ ID NO: 940638 - DNA, 120 bp, Artificial Sequence
  ENSG00000236404_37 (sequence is synthesized)
aatgcaaccatggtctgtcagtgtggcttgttttttgcagcccacttagacttaagccctcttaatttcaaaattacgttcatatgtgccaataaagttgtccctacatgaactgaaaaa

SEQ ID NO: 940639 - DNA, 120 bp, Artificial Sequence
  ENSG00000236404_38 (sequence is synthesized)
ctggtggttgatgatggaagagatgaaactgtgaagagaccgaagaagctaatctatcaatagttaagattccatttctaaaagatcttactttgagtctacctatgcctgggatgtcaa

SEQ ID NO: 940640 - DNA, 120 bp, Artificial Sequence
  ENSG00000236404_39 (sequence is synthesized)
gagccaagtgacaagctgtgaagtaacagctcagccttcacaaagcaaatgtgctttgtgcacttccttgccagagcagatgtggccttggtggactgtggggagcatcatctctcaggt

SEQ ID NO: 940641 - DNA, 120 bp, Artificial Sequence
  ENSG00000236404_40 (sequence is synthesized)
cataaccatcatggtatttaagattcgttctgtatctggatttatgcagtttatgaaaaatcatcaaactgtccttattattggtgtcttttttctgtatatatgttatgcttcaataaa

SEQ ID NO: 940642 - DNA, 120 bp, Artificial Sequence
  ENSG00000236404_41 (sequence is synthesized)
tgcatcatcgtcgcatacccagctgatggggatgcaggaggaggtgctgcactggaactcatgggcgccacaggttggcggggcacagtccagctcatcactgccatcgctgcagtcatc

SEQ ID NO: 940643 - DNA, 120 bp, Artificial Sequence
  ENSG00000236404_42 (sequence is synthesized)
ctggccattgcatacaaagttcctggagatgcagcggccactggagcaggtgaactcgtcgggactacatgttatattgccacagttttcttcatcttctccactgtcacaatcattttc

SEQ ID NO: 940644 - DNA, 120 bp, Artificial Sequence
  ENSG00000236404_43 (sequence is synthesized)
accatcacatctccaggacactgggatacactgagtagaatgggcgccacagctgatttcatgtatgcggcatgttctcatatggcactgttctgggctttcatctgaaccatcttcgca

SEQ ID NO: 940645 - DNA, 120 bp, Artificial Sequence
  ENSG00000236404_44 (sequence is synthesized)
gtcaggatctccatcacacttccatcggctgggaacacactggccattgttgcacacgaagtcagattcagcacacgtcttctttacacagttcttttcatcactgccgtcaacacagtc

SEQ ID NO: 940646 - DNA, 120 bp, Artificial Sequence
  ENSG00000236404_45 (sequence is synthesized)
aggtaaatgaatgaatgaaagaataaagtgagtgtttgagttagttagaaaaagagtgaactatataggctagagaatgactgccaaaaaaaccacaagggcattgcaaaatctccataa

SEQ ID NO: 940647 - DNA, 120 bp, Artificial Sequence
  ENSG00000236404_46 (sequence is synthesized)
tacacacataaatgttcatgcattctatgatggagaaagaagttcatctgtttatataattcctatcaaaactgtatttcctcttatgttttttactttcttgaactctttaaaacaaga

SEQ ID NO: 940648 - DNA, 120 bp, Artificial Sequence
  ENSG00000236404_47 (sequence is synthesized)
aacttttaactcttttgttctctgaacatttaaaataactttttggtgttatttctttcgttttttctagccagtgaaatatttatcccaatgagctgtttttcacttaaccttgcttag

SEQ ID NO: 940649 - DNA, 120 bp, Artificial Sequence
  ENSG00000236404_48 (sequence is synthesized)
ctacaggggacttggtgctatcagaggaggtcatcatgttggaaaacaagtttttttaaaagtagaagtcataaagttgaagaattcagtgacttttgcagggaaagaagtacctgattt

SEQ ID NO: 940650 - DNA, 120 bp, Artificial Sequence
  ENSG00000236404_49 (sequence is synthesized)
atgaacagtcattatcctgaactattttgtagaaatgatgtaactgattgatttttaataagcattcaaagtgttacacagcaagttttgatgcttccaactggacgatgagtatctagg

SEQ ID NO: 940651 - DNA, 120 bp, Artificial Sequence
  ENSG00000236404_50 (sequence is synthesized)
ggaatatgagaaatgtcacctcctggctaccacaataatgcaactaggagttctggttctccgctgactacccacaggagtccttagaggaaccacacaggaaacctgggaaacctaaca

SEQ ID NO: 940652 - DNA, 120 bp, Artificial Sequence
  ENSG00000229414_0 (sequence is synthesized)
ggcaatgaggggcacagaggacagtgtgtggctatctctgggtctctgttctcccaggtggaccagtgggggttgtggcgatgctgtccagggtgaggtccagctacggttgccgtcctg

SEQ ID NO: 940653 - DNA, 120 bp, Artificial Sequence
  ENSG00000229414_1 (sequence is synthesized)
tctgtcagcaccagcacccagcacatctgtagggcctgggccccggacccagcctgagggttatgaggaggtttcctgaaggagaaaagccagagtggagtctggaatggagcagggggg

SEQ ID NO: 940654 - DNA, 120 bp, Artificial Sequence
  ENSG00000229414_2 (sequence is synthesized)
accatggcctgccctcagtctgctaggtggggctggaacctggggttttgcttgggtgtgaagaaggaagaggctggggatgcagctaggtgctggttcctcatagaccgagtcatgatt

SEQ ID NO: 940655 - DNA, 120 bp, Artificial Sequence
  ENSG00000229414_3 (sequence is synthesized)
tatggggaccctcaattatatccccttagcaggggccacaaagtctcaaatctgcccagaaatccacacctcggagctcaggtgaggtcttcttcaggttctccctctgcagtgcagata

SEQ ID NO: 940656 - DNA, 120 bp, Artificial Sequence
  ENSG00000229414_4 (sequence is synthesized)
cagaaagagcaagctacaaatggagaagtcaacaacactctagtgagaattaccctgccaattaattttctcagaaatcggggactcagggaccgcttgctgccgaggctgccacctcag

SEQ ID NO: 940657 - DNA, 120 bp, Artificial Sequence
  ENSG00000229414_5 (sequence is synthesized)
ctgcctgtctgtgaaatgggtccatgtgtccccatgccttggcccgtctcctcttccctacaacaggctgctgtgcagcctggggccctttccaggccaccttctccatctgctcactga

SEQ ID NO: 940658 - DNA, 120 bp, Artificial Sequence
  ENSG00000229414_6 (sequence is synthesized)
ggagggacccctgagtcagcgaggctccagcttggctgcacccagctgaaaggttatcctgctgataccccaccacttatggaatgatggaccttttccccactggattagaatgtcctt

SEQ ID NO: 940659 - DNA, 120 bp, Artificial Sequence
  ENSG00000229414_7 (sequence is synthesized)
tttgtgtatcatcgaccctgaacaacccaagtttgagccgtgtgggtgcacttctacgtggattttcttcctcctctgtcacccgagacagtaagagccacccctcctcctccccagctg

SEQ ID NO: 940660 - DNA, 120 bp, Artificial Sequence
  ENSG00000229414_8 (sequence is synthesized)
actcaacgtgaagatgacgaggatgaagacctttacaatgatctgcttatgctgaatgaatatcttttctcttccttactttactttattgtaatacatgaagcatacaaaatgtgttaa

SEQ ID NO: 940661 - DNA, 120 bp, Artificial Sequence
  ENSG00000279082_0 (sequence is synthesized)
atcatcttgtgagcatctgggccaagttcagggctggtgctctcgttcagatagatttagctggtggtgcagagatccgtgagcttgcttttacaggactttaatgatatataaaagcag

SEQ ID NO: 940662 - DNA, 120 bp, Artificial Sequence
  ENSG00000279082_1 (sequence is synthesized)
cacgaggtgctcctgactgtggattaatttggagatgactttctctgttgaagagtagcaagactctcgcgagttcttaaaaatgcacttgtttggtatgagaatgaaaagcagtggctg

SEQ ID NO: 940663 - DNA, 120 bp, Artificial Sequence
  ENSG00000279082_2 (sequence is synthesized)
aagaaccaatcttcaatgggcaagccttctctgtgtctgttctaacacgtgccatttgggatcccttggaatcttcatgtacagaactggttgctgcctcgttgagtcggtggggacaga

SEQ ID NO: 940664 - DNA, 120 bp, Artificial Sequence
  ENSG00000279082_3 (sequence is synthesized)
atagctcctggttgacagcatgggttgtgcagaaggacggatcctgcagacatcaatatctggctttgagtggcacaaagaaataaaggaatgtggattcagacctcactgggatgcttg

SEQ ID NO: 940665 - DNA, 120 bp, Artificial Sequence
  ENSG00000279082_4 (sequence is synthesized)
gcaattctaattctaccccagactgcaaatggacacacaactgttgtgacttttgttgaagaggagaaggatggcacagaagctggattcagaagcacacaggtctggggatgcaggctt

SEQ ID NO: 940666 - DNA, 120 bp, Artificial Sequence
  ENSG00000279082_5 (sequence is synthesized)
gaaagactgccatctcgtggtcagctcaatcctggcaccttggtgagggaccaggctgcagaaaaccaggcttggggaggaaacggtgctgcaaactggatttctgccggacagtgtgga

SEQ ID NO: 940667 - DNA, 120 bp, Artificial Sequence
  ENSG00000279082_6 (sequence is synthesized)
tgcccttagaaaacacccagaaaagagctgagtgccccccaaggtaggcttcagtgaatcctctgcaggtgtgttgtcatcccttgagccaaacacatgcttcacacacacgctgcaggc

SEQ ID NO: 940668 - DNA, 120 bp, Artificial Sequence
  ENSG00000279082_7 (sequence is synthesized)
tgcgtgaaaatgaggtagaaatgtggggaaaacataatcccatggagagaacaaagagctgaacacgtaaatgcctccggcgtgcctggcagagagaacactcaggctgagagaagggac

SEQ ID NO: 940669 - DNA, 120 bp, Artificial Sequence
  ENSG00000279082_8 (sequence is synthesized)
agtgacttgtaccaaaggtaggcaagtagcctctggggtctcaatcagcagggcatctggtcaacccttcagacaaagtcaggtctgagcaggcaagatccatggatctgatttattaat

SEQ ID NO: 940670 - DNA, 120 bp, Artificial Sequence
  ENSG00000279082_9 (sequence is synthesized)
atttttacaattaaatagaatctgattgtaaaactgttacatgtgttgtaagaaaaaaagaaaaaaaggaaggatatagaaatgtacaaagaaggaaataaaagactggaagcgtcctca

SEQ ID NO: 940671 - DNA, 120 bp, Artificial Sequence
  ENSG00000279082_10 (sequence is synthesized)
tggacacacaactgttgtgacttttgttgaagaggagaaggatgggtgagcatgtgacgttgggaaattgtattttcttcttcgagttcttctgtttccgaatatttaatcctactgttt

SEQ ID NO: 940672 - DNA, 120 bp, Artificial Sequence
  ENSG00000279082_11 (sequence is synthesized)
tcttctttagtgaaggtctctttagtcaataatctctttgctgaaattgcttcgggcagcacagaagctggattcagaagcacacaggtctggggatgcaggcttcggccagcctgatgc

SEQ ID NO: 940673 - DNA, 120 bp, Artificial Sequence
  ENSG00000279082_12 (sequence is synthesized)
ctctatcccataacctactttttcattcaacactatgacagaagcgtctttccaggtccataaataaaggtaggcctcatcgttttttatcaattacataaagctaatggtatataatac

SEQ ID NO: 940674 - DNA, 120 bp, Artificial Sequence
  ENSG00000279082_13 (sequence is synthesized)
tgatttcatacctgctatatgccaggcacatacatggtcttgcataatctcataatgactctacagaacgggagtttgtattatgcccattaagcagatgaacaggctgtggcacaagaa

SEQ ID NO: 940675 - DNA, 120 bp, Artificial Sequence
  ENSG00000279082_14 (sequence is synthesized)
aattgatcagcactgccagggtatctgacctcagagcccaggatcttgactagtaggctagaaatgaacataatttacttaccagttttccagtgatggacattaagccatttcctactt

SEQ ID NO: 940676 - DNA, 120 bp, Artificial Sequence
  ENSG00000279082_15 (sequence is synthesized)
ttctggtataaaaaataagattgcagtgaaactttagggcatatacatctttgcacgttagtgagttctctctaagttaacctgaaagcggtgggctgtggagtttgtgggtcaaagtgt

SEQ ID NO: 940677 - DNA, 120 bp, Artificial Sequence
  ENSG00000279082_16 (sequence is synthesized)
atgctcgatttatgctttactatgtgcccgacttccctccaggcagcatgtgccagctcacactcccaacagctgcgcaggagaatttccagtgccccacgaccttgtcaatactaggct

SEQ ID NO: 940678 - DNA, 120 bp, Artificial Sequence
  ENSG00000279082_17 (sequence is synthesized)
tcctcatcagttttttctctcctttatttttctttaggaaaaaaaaaacagcctttgaaaaaaattgtacgaacaagtgcaatgtgtgcttgtaagtgcttcaccaaatgtagatccacc

SEQ ID NO: 940679 - DNA, 120 bp, Artificial Sequence
  ENSG00000279082_18 (sequence is synthesized)
gtgtctcttaagaacaaagacacacccttacctaagcataatataattggtacacttgggaattgctaaaatacattgctaaaatacagttttctaatacagaatctatatcaagtcatt

SEQ ID NO: 940680 - DNA, 120 bp, Artificial Sequence
  ENSG00000279082_19 (sequence is synthesized)
gaataaacacacttcttgacttaaaatgagattacatcccataaacccataataagttgaaaaaatgtaagtaaaaatgcatttaatacactaaatctgctgaatattataacaattttg

SEQ ID NO: 940681 - DNA, 89 bp, Artificial Sequence
  ENSG00000279082_20 (sequence is synthesized)
gttggaaaaaattatccgatatcacatgtaatgtatggaatactgtactgaaagtgaaaaacagaatggttttatgggttctcacaata

SEQ ID NO: 940682 - DNA, 120 bp, Artificial Sequence
  ENSG00000279082_21 (sequence is synthesized)
gaaagtgaaaaacagaatggttttatgggttctcacaatacggtttccactgaatgcctatcacttttgcaccattgtaaaactgaagaattgtaagttgaacaattgtaagttggggac

SEQ ID NO: 940683 - DNA, 120 bp, Artificial Sequence
  ENSG00000279082_22 (sequence is synthesized)
tgtctgtacttaacagatttttgtcttgatccagaatggaatcaagggtcacatattgagtttcgcagtcatgtctcttgaatccagaacagatctccagtctttttgtggtctctcatg

SEQ ID NO: 940684 - DNA, 120 bp, Artificial Sequence
  ENSG00000279082_23 (sequence is synthesized)
acattggcattttgaagagttttatagagtgtacttagacctggatttacctgattgagcctcaggattagatttagcataaatattgttggcaggcatattatatagatgctgttgctt

SEQ ID NO: 940685 - DNA, 120 bp, Artificial Sequence
  ENSG00000279082_24 (sequence is synthesized)
ccttctcagggcgtcatatcaggaggaacaacaagatgtcaatttgtccacaatttgtgacattaactttgatcactcagttaagtgagtgtctgctatatttctccattggaaatgtac

SEQ ID NO: 940686 - DNA, 120 bp, Artificial Sequence
  ENSG00000279082_25 (sequence is synthesized)
cctgatcttttgtgattattaagtgacctactgggtgatactttgagacagaatatcgtgcttcccagcaatctcttacccagtgattttagtatctattgatcattcttgcctggatca

SEQ ID NO: 940687 - DNA, 120 bp, Artificial Sequence
  ENSG00000279082_26 (sequence is synthesized)
gttgctgttttgccggctataaagtgctctttcatttcccattctttctacttttaaaaaaagttatcactcttctataaagaaaaacttcttatcctatccctcaacttttttagtatc

SEQ ID NO: 940688 - DNA, 120 bp, Artificial Sequence
  ENSG00000279082_27 (sequence is synthesized)
agattgtactcaaggcttctttctctatccagtgtatttctgtaactatccattttgacagccagatcatcccaaatttggcaagtggcagccccttcaagctggacctgtgtcctctga

SEQ ID NO: 940689 - DNA, 120 bp, Artificial Sequence
  ENSG00000279082_28 (sequence is synthesized)
gcccctctctgctctctggcacgagatgctccaggctcatcttgcattttccttgcctcaggcctggcatcagccatttctccaggagccctcccatctttgtttatatatttattaata

SEQ ID NO: 940690 - DNA, 120 bp, Artificial Sequence
  ENSG00000279082_29 (sequence is synthesized)
tttaatctctcttattattattagttttaaaatttatataaaataaagttggcgttttttgtgtagttgtaggaatcttaatataggtataggtttgtgaagccaccactgtaattgaga

SEQ ID NO: 940691 - DNA, 120 bp, Artificial Sequence
  ENSG00000279082_30 (sequence is synthesized)
tacagaacaactccaaatcatcaagttacacaccttaaatatatacaatttttaattgtcagctatacctcagtaaaactggggagaaaatatacagtttcatgcccagaagctactttg

SEQ ID NO: 940692 - DNA, 120 bp, Artificial Sequence
  ENSG00000279082_31 (sequence is synthesized)
tgcttcctgtttgtggtcaaacacatccttcatccctgacagctgctgaccttatctctgtcttcatagttttacctcttctagaatgttacaagaatgagatcgcacaatatgcagcct

SEQ ID NO: 940693 - DNA, 120 bp, Artificial Sequence
  ENSG00000279082_32 (sequence is synthesized)
tttgagtctggcttctactttcacttagcataatgcctttgagattcagctgttgcatgcatcaataattcgttcctttttattgctgagtggtagatattccatcatgtggatgaacca

SEQ ID NO: 940694 - DNA, 120 bp, Artificial Sequence
  ENSG00000279082_33 (sequence is synthesized)
cggtttgcttatccatttacccattaagacaaatgggttgtgtccagtttttgttgattaagaatagagctgcataaacatttatgtatagggttttcttgcatgaacgtaagttttcat

SEQ ID NO: 940695 - DNA, 120 bp, Artificial Sequence
  ENSG00000279082_34 (sequence is synthesized)
ttctcttgggtaggtgcctcggagtgggattgctgagtcacacagtaagtgtatgtttcactttttaaaagctgtcaagcctcttccagagcagccaagccagtctgcgtttccaccagc

SEQ ID NO: 940696 - DNA, 120 bp, Artificial Sequence
  ENSG00000279082_35 (sequence is synthesized)
aatttctgagagttccagttgctctgcgtccttgccagtgcttggtattgccaggttttttattttttaacccattctaaaatatgtttagtgccccccattttttttatctttgtaaat

SEQ ID NO: 940697 - DNA, 120 bp, Artificial Sequence
  ENSG00000279082_36 (sequence is synthesized)
gccccccattttttttatctttgtaaatgttataggtgaattttaaaagtcaatctcaatatatattggctgttaataatactattaatacctattactgttaataatgctaataagtaa

SEQ ID NO: 940698 - DNA, 120 bp, Artificial Sequence
  ENSG00000279082_37 (sequence is synthesized)
ctgagtgccccccaagacttgccctgaattctttcatgtgcaatatccgaaaaccctctcttggggcctggatcaggacccctttcctataacatctttctggcgacaacaaagggacaa

SEQ ID NO: 940699 - DNA, 120 bp, Artificial Sequence
  ENSG00000279082_38 (sequence is synthesized)
tggtgtggaatcccccttcccaaatgctacttttaggtaagtattggggtcctgtaacatatttctggcaaaccatggaatggacaatactgaagaaactcgccaacccaaaggatatag

SEQ ID NO: 940700 - DNA, 120 bp, Artificial Sequence
  ENSG00000279082_39 (sequence is synthesized)
actgcctgcaaggtttgtcttctctcctgttcactggttactcagccaggctgattcatgggcttctcaaaggagcttgtttatcagaagcttgtctaagacaccacgtcttccagaaaa

SEQ ID NO: 940701 - DNA, 120 bp, Artificial Sequence
  ENSG00000279082_40 (sequence is synthesized)
tctcacctgagtcaccaacagattcctctaagagtctgtaagccactcctgaccagcaggaaaccccaacagaggcaaagaataggaaattaaatatttcgtcaagaaaaaatgagaggc

SEQ ID NO: 940702 - DNA, 86 bp, Artificial Sequence
  ENSG00000279082_41 (sequence is synthesized)
aataggaaattaaatatttcgtcaagaaaaaatgagaggctgggtgcggtggctcatgcctatatcccagcactttaggaggccta

SEQ ID NO: 940703 - DNA, 120 bp, Artificial Sequence
  ENSG00000279082_42 (sequence is synthesized)
cagaagggctcaattttaaacagagagagaagcggatagagaagtgtgttcttgcctgaaggtgtctttcatcttgggctgcctctatctatttctgggatcactggcggcccttgtact

SEQ ID NO: 940704 - DNA, 120 bp, Artificial Sequence
  ENSG00000279082_43 (sequence is synthesized)
cctatcctcagctctttctgtaggctttttcatttcattgaggacatggatgggaaagaatgtccagcccattctctctccctcttttgattaaaaggaggggaggcagaagtggaaagg

SEQ ID NO: 940705 - DNA, 120 bp, Artificial Sequence
  ENSG00000279082_44 (sequence is synthesized)
gcaaaaccaattacaggttgtagcgtacactatccaaagcaatgtatacattcagtgaaatccctatcaaaacaccaatgacattctttagagaagcagaaaaaaataatcctaaaataa

SEQ ID NO: 940706 - DNA, 120 bp, Artificial Sequence
  ENSG00000279082_45 (sequence is synthesized)
ataatatgtggaaccacaaaagaccaaaatagccaaagttgtcctgagcgaaaaaacaatcctggaggaatcacattacctgacttgaaattgtactacagggctatagtaaccaaaaca

SEQ ID NO: 940707 - DNA, 82 bp, Artificial Sequence
  ENSG00000279082_46 (sequence is synthesized)
ccagacatggtcagtgaactcattttcgacaaaggtgccaagaacatacactgggtaaagaacagtctcttcaataaatggt

SEQ ID NO: 940708 - DNA, 81 bp, Artificial Sequence
  ENSG00000279082_47 (sequence is synthesized)
tatccatgtgcagaagaatgagactagacccctgtcactttctacccacaaaaatcaaaccaaaatggattaaagacaaat

SEQ ID NO: 940709 - DNA, 120 bp, Artificial Sequence
  ENSG00000279082_48 (sequence is synthesized)
ggtacctgggtaaagaatcggatgggattagaggcccaactgggggagttagagtctctcccaagccagagtgggttagaggcccctcttagtgaaaggcaaggacgcttgacccacctt

SEQ ID NO: 940710 - DNA, 120 bp, Artificial Sequence
  ENSG00000279082_49 (sequence is synthesized)
gggttataggcccgccttaggagggttaaagtcccttccaagatttagggggctggaggcccctctcagtaaagtccctctcagctaagaatgagtttggcactgcaggctatgctcttt

SEQ ID NO: 940711 - DNA, 120 bp, Artificial Sequence
  ENSG00000279082_50 (sequence is synthesized)
ccccttcccaaatgctacttttagatatcaccttttgtcggaacttggagttggtaatgaccttcaccataccaccactctgggactgagcttctctctaccctgatgcaagagacccta

SEQ ID NO: 940712 - DNA, 120 bp, Artificial Sequence
  ENSG00000279082_51 (sequence is synthesized)
ataggcaggaatatgaccacccctattcagcctgaagaagttacagaagttctgaaacccttagaaatgagggtcttcttgtaaagggagtggggagatatatcagaggcatttgaacca

SEQ ID NO: 940713 - DNA, 120 bp, Artificial Sequence
  ENSG00000279082_52 (sequence is synthesized)
gagcaactccatcttgagtgagggctaggaaaatgaggctaggacttgctgggctgcattctcagaaagtcagtcattcctagcctctagatgtttacggttaagggaacaaatttataa

SEQ ID NO: 940714 - DNA, 83 bp, Artificial Sequence
  ENSG00000279082_53 (sequence is synthesized)
tagcctctagatgtttacggttaagggaacaaatttataacatttactaaacacacccagacttgggagtgtccagatatccc

SEQ ID NO: 940715 - DNA, 87 bp, Artificial Sequence
  ENSG00000279082_54 (sequence is synthesized)
aaaacacatctccccatatatacaagcattgtacctaaggtggatgcgttccatctcttactttcaggaatgtcctacactatctaa

SEQ ID NO: 940716 - DNA, 120 bp, Artificial Sequence
  ENSG00000279082_55 (sequence is synthesized)
ctctgttgaagagtagcaagactctcgcgagttcttaaaaatgcacttgtttggtatgagaatgaaaagcagtggctgaagaaccaatcttcaatgggcaagccttctctgatgccttgt

SEQ ID NO: 940717 - DNA, 120 bp, Artificial Sequence
  ENSG00000279082_56 (sequence is synthesized)
tggtggtatagtgtgaatccattagcactgaactcaggaccagcaatggtgtgactcaggcctgaaggaagcttttctagcacatggatttcctctgtaaggcacctcacagcctctcgt

SEQ ID NO: 940718 - DNA, 120 bp, Artificial Sequence
  ENSG00000279082_57 (sequence is synthesized)
agaaaccccacaaaaatgtgaaaatcacggcactaaatagaccacaaaaaggatgcttgtttgactgcaaacaagtatgagaactggaaccagaaagtaggatgtcatcttgttcttcct

SEQ ID NO: 940719 - DNA, 120 bp, Artificial Sequence
  ENSG00000279082_58 (sequence is synthesized)
tagcactggatgactcaaatttctctccactctgccagtgtctttgaatgaccaggaaattgctgggaatattgattttgggataacaaataaattttatcgactagctgaatttgcaaa

SEQ ID NO: 940720 - DNA, 90 bp, Artificial Sequence
  ENSG00000279082_59 (sequence is synthesized)
aattagctgggcagggggaggctgaggcgggagaatcgctgaaacccaggagacagaagttgctgtgagccgagaccacaccactgcact

SEQ ID NO: 940721 - DNA, 120 bp, Artificial Sequence
  ENSG00000238178_0 (sequence is synthesized)
catagaagtcctctccagtgtactcagtgtcctctccgggactccaatgagtgtccagttctcctccctcagctgaactgtgcttttgcctttagacagagtcactaccctcgttagagc

SEQ ID NO: 940722 - DNA, 120 bp, Artificial Sequence
  ENSG00000238178_1 (sequence is synthesized)
atctaagcagaaaaaaaggggtcctcagctgaggtctttgctatggctgacaagattaagcatttttttatttttgtttttattttttgctgataaccattcccttatgtcactctcggt

SEQ ID NO: 940723 - DNA, 120 bp, Artificial Sequence
  ENSG00000238178_2 (sequence is synthesized)
cctcaccttgattcgagtcagtttctggggctccactatgcacagctggggcttcccccaccagaccaagattctcccttccctgagaccctccaggccgaaatgacagtcacctcaacc

SEQ ID NO: 940724 - DNA, 120 bp, Artificial Sequence
  ENSG00000238178_3 (sequence is synthesized)
atgagaatggcttacatattcaaaaggttggatttgggaagcaatgctaagcagtggaatggacatcgacatagagagatcagctccacacttatactctgccactcaacttccccatgt

SEQ ID NO: 940725 - DNA, 120 bp, Artificial Sequence
  ENSG00000238178_4 (sequence is synthesized)
gacttgaggatcactctaactccaaaacatagcaagctcgcggaacatcagggttcatgcaaagtattccaaggagccccttgaagcaacagaatggattgctcttctatggtggaatgg

SEQ ID NO: 940726 - DNA, 120 bp, Artificial Sequence
  ENSG00000238178_5 (sequence is synthesized)
caccctggatgattaaaaccgtagcagcaaacaaaacctccatcaagtaagaattcagagtgtgagatatcacgcacagccacgcgtggatctttatatacgtgtcaatgtgtttgattg

SEQ ID NO: 940727 - DNA, 120 bp, Artificial Sequence
  ENSG00000238178_6 (sequence is synthesized)
tatttttgctttcaaagtatgtattgagcatttcttctaggtcctcagtaacatctttttaaaaaaaaaataaatgcttagggaattgttttatattaaactcgcttccattgttatcaa

SEQ ID NO: 940728 - DNA, 120 bp, Artificial Sequence
  ENSG00000238178_7 (sequence is synthesized)
caaagaccacctctacgttctcagtgcttctccggaggatctcagggaagtgctgcttgtactttctgttgataaccttcagcatggcttccctcgtaatgggctctttccttatatact

SEQ ID NO: 940729 - DNA, 120 bp, Artificial Sequence
  ENSG00000238178_8 (sequence is synthesized)
tgttgaggaggaactgcaccaattcgcccgtcttcgtgttcagaagatctcttcctgtgctctcagaggaggacgggccatggaaggagttgggactttcccccttttggcccttggcac

SEQ ID NO: 940730 - DNA, 120 bp, Artificial Sequence
  ENSG00000238178_9 (sequence is synthesized)
cttcatcagaacttagcctgggactcctttctccgctgacctggggcagccagtcttgcaaccaaagccctctgctgaaacgctccgtgcagccctgtctactgagggctcaggatcttc

SEQ ID NO: 940731 - DNA, 120 bp, Artificial Sequence
  ENSG00000238178_10 (sequence is synthesized)
accttgctacttgaccagtcctgggactccatcctcagctcactacaggcaacacccttcaaagcaagatccttgcttcaatgggacctcagatttggacattcaggtttctggggctcc

SEQ ID NO: 940732 - DNA, 120 bp, Artificial Sequence
  ENSG00000238178_11 (sequence is synthesized)
gcgtctgcttaaagaaatgacaaggtgaagtctttcacaaagtaagcattcaatgtatgatttctctgctatgtaaatctggttgttcatacagtttctatgacataattggccacgacc

SEQ ID NO: 940733 - DNA, 120 bp, Artificial Sequence
  ENSG00000238176_0 (sequence is synthesized)
gaaaaataatagtactattgatgagacagagtaccatccattcttacattgcagtcacattggatctacactgaattaacaagctgcagccccagccaccgctagagcggtgagggcaca

SEQ ID NO: 940734 - DNA, 120 bp, Artificial Sequence
  ENSG00000238176_1 (sequence is synthesized)
tcctgctgcaggcaattatgcaaaatgacaagtgattgctttccttttcaaagacaacccctttggaaaaagctttttcctcgaggaccctagggaaatggggggttggtgggaacttca

SEQ ID NO: 940735 - DNA, 120 bp, Artificial Sequence
  ENSG00000229418_0 (sequence is synthesized)
ggtccctggcagcaggcatctggggcatgtagctgcctcttcagctgtcctgccaacagaagaaacttacctcccatcatctccctgagtgcctgcctcagccgccttgtatgtattcat

SEQ ID NO: 940736 - DNA, 120 bp, Artificial Sequence
  ENSG00000229418_1 (sequence is synthesized)
tgctgtgtctataataaatcagcgggtccttgctggaagcttggacgtttcaatggagagctttccaaacacctacagcacccttttgaatgcaactggaagtattggtgcctcaggagc

SEQ ID NO: 940737 - DNA, 120 bp, Artificial Sequence
  ENSG00000229418_2 (sequence is synthesized)
tacacaagcctgaaccacctgctacttaccagattctgggaaatccaacatcaaggtgccagctgaaaagtttcctggtgagggcactagctctggtttgcagatggccaccttcttgct

SEQ ID NO: 940738 - DNA, 120 bp, Artificial Sequence
  ENSG00000229418_3 (sequence is synthesized)
tctggacaactcaaacttgcaccaccaagcccttgccagatggcagaaagcagggcattggaaggtatttcctccctgttgagtaccagctccacttcaccagccaacccatgagacagt

SEQ ID NO: 940739 - DNA, 120 bp, Artificial Sequence
  ENSG00000229418_4 (sequence is synthesized)
gttctacaatgccacaaagacaaatagccacatgcgtctcccatgtacccggataccaccttgaagggaagggacagaactttgaaagatattacatttcctgaagttatcaaagcagag

SEQ ID NO: 940740 - DNA, 120 bp, Artificial Sequence
  ENSG00000229418_5 (sequence is synthesized)
aaaactgaattatctgatgggacagttaaaactattggattggactgaaatggcaagatggaactaagctttagttcttttcccacatcccagcaagaagaaagtaaatcagctcttcta

SEQ ID NO: 940741 - DNA, 120 bp, Artificial Sequence
  ENSG00000229418_6 (sequence is synthesized)
tagacaaaataacaaagctcacattttctctgtatacataaggaaaggtgagggattttggaccctgaaacatgagtttatgaatatacacatgcatacatccatttgcatgtgcatatg

SEQ ID NO: 940742 - DNA, 120 bp, Artificial Sequence
  ENSG00000229418_7 (sequence is synthesized)
tggatatgcacattcacgcactgtagaccaaggcagagaaaactaggacttaagagtgcagccaacagtgggctgcacctggcgtgttctgggattctggtggcagagaaggaataccgg

SEQ ID NO: 940743 - DNA, 120 bp, Artificial Sequence
  ENSG00000229418_8 (sequence is synthesized)
ttgggagcaaatcctgacatacaagtgtgggaaatgcggcaaaatgaaacttgttgagcgctgttgacaagacaatttttctgggaactagtgcagtcattcagtgagccggccagacag

SEQ ID NO: 940744 - DNA, 120 bp, Artificial Sequence
  ENSG00000229418_9 (sequence is synthesized)
agcagagttcatttcagatgtttctattgtcccagacatgggagttctacttgtcaccatttggtgtcagtattttctatcctaaaagtcctctgggttataaagcaaaggccctgttgg

SEQ ID NO: 940745 - DNA, 120 bp, Artificial Sequence
  ENSG00000229418_10 (sequence is synthesized)
agaaagtctggagtattttactgtgaataactaactttatttcagaaaattttaatattccttttagccttcactgctttgttttctgctttgtaattgtttttctttgtgcagaaaaaa

SEQ ID NO: 940746 - DNA, 120 bp, Artificial Sequence
  ENSG00000229418_11 (sequence is synthesized)
ggcagcattctctttatctgcaaaggcaaacatcagaattacaccattcattcatttgaccaacaaatcttgaggaccagcatcttgtaacacaagtccctccacctacagagcttttcg

SEQ ID NO: 940747 - DNA, 120 bp, Artificial Sequence
  ENSG00000229418_12 (sequence is synthesized)
gattctagagggcaacatgctcagggcagaggcaggtgttggaggcagcagttctgtagaaagaaaagctagccctggctttgagcctggttttgccacttagcagctatgtggctgtgg

SEQ ID NO: 940748 - DNA, 120 bp, Artificial Sequence
  ENSG00000229418_13 (sequence is synthesized)
gcaataaacttaacctctctgagctgcagtctcttcatacataaaacatacataataaacacttttcttccaattttatcatgaaaattaaagaagttgagggatgcctaggcagagcac

SEQ ID NO: 940749 - DNA, 120 bp, Artificial Sequence
  ENSG00000229418_14 (sequence is synthesized)
aggggatgtttagggcagtgaagctactctgtatgacacttataatggtcattatacgtttacccaaacccaaaagcgaaccctcctgtgtaaactacagaatttgggtggcaatgatgt

SEQ ID NO: 940750 - DNA, 120 bp, Artificial Sequence
  ENSG00000229418_15 (sequence is synthesized)
atcagcgtaggctcaccgattctaacaaatgtaccactctggtgggggacgctgggaatgggggaggctatgcatttgtaagggcacaaggtgtgtgagatatctctttaccttctgctc

SEQ ID NO: 940751 - DNA, 120 bp, Artificial Sequence
  ENSG00000261070_0 (sequence is synthesized)
atggcatcggttctcctcactctccagcctgttggctcatcctgtggattttggacttgccagttccaacatggttcaagccaattccttatcacaaatctctgtctgtatatcagcaca

SEQ ID NO: 940752 - DNA, 120 bp, Artificial Sequence
  ENSG00000261070_1 (sequence is synthesized)
tcctgtgggttcagcttctcttgagaacactgaccaatccaatcaccgttactcccgatgacttgtaggtgaagccccttaaggaaaatttctttcacaaatgagagctagggaaagatt

SEQ ID NO: 940753 - DNA, 120 bp, Artificial Sequence
  ENSG00000261070_2 (sequence is synthesized)
tactcttcctgagcagctaaagtattttctccaatggccacgagaaccttaaacctttccttctttccacgctcccattggccgccaggaacttgcagcttggctacagcaatcatgaag

SEQ ID NO: 940754 - DNA, 120 bp, Artificial Sequence
  ENSG00000261070_3 (sequence is synthesized)
gacctgactgggctcagcacatgtgcccaggccacccaggtagaggtggagggcatgggattcaagcccaggccatcgttggctctgaacatatacctgaaacaacctccctaccaggaa

SEQ ID NO: 940755 - DNA, 120 bp, Artificial Sequence
  ENSG00000261070_4 (sequence is synthesized)
atggagcagtctcagccgacccaggtgggatgcgtaacatggccgagaaatccacccatgctgctgagagctactgcgccatggggtcatgtgtcacctaactgacttagcccagcctga

SEQ ID NO: 940756 - DNA, 120 bp, Artificial Sequence
  ENSG00000261070_5 (sequence is synthesized)
ctgatcccccgtgtgtgaccagacatcagcacattcagaggacctcatactgagaattggtggacctttcagaatggacatgaccactcaaagtagggacattactcgctatttgatggc

SEQ ID NO: 940757 - DNA, 120 bp, Artificial Sequence
  ENSG00000261070_6 (sequence is synthesized)
ccatgtgggatcaaaggccactggggttccctcaaggcacagcacacttagaatcccataagtcctcagttctaaggcatgtatttttcatactttgataattctgaaatcaagtatagc

SEQ ID NO: 940758 - DNA, 120 bp, Artificial Sequence
  ENSG00000261070_7 (sequence is synthesized)
ttctagtagatattaaaactcattttcagatcctgcagaaaggaggagacagaaataaagttgccattccctgcttttgtatgaacccagctgagcataaaccgtaatctattcaacctc

SEQ ID NO: 940759 - DNA, 120 bp, Artificial Sequence
  ENSG00000261071_0 (sequence is synthesized)
accccacggaaaatgctctgccggcgaaagcggctggcaatggggttgatttcaaggcagggaagagccatcgcgctgccctcctcggctgggatggcgagacagggctggcacggctca

SEQ ID NO: 940760 - DNA, 120 bp, Artificial Sequence
  ENSG00000261071_1 (sequence is synthesized)
cgctgtccggtgctcagaaaaccggtaatcgcgggcccgaggcgctgctcgccgccgttttttggccctgggttccgtcgagtggatccagcttgtcagtctttgtgtagatttggctgc

SEQ ID NO: 940761 - DNA, 120 bp, Artificial Sequence
  ENSG00000261071_2 (sequence is synthesized)
gttcgctccgcacttcggaggaggtggcgtttcatgggaagaaatgcgctctagcagatggccgccgtggccagtcagccctgctgccaccgacgaagacgcgggcgacagacctggact

SEQ ID NO: 940762 - DNA, 120 bp, Artificial Sequence
  ENSG00000261071_3 (sequence is synthesized)
ctaaagaaatctgcacagacgtgcccggcgccctcggccttcccagctccgcggccgcagcgacgccggttaggatgtcggccctgtgggaggggcgcccttcctggtgccgggccctaa

SEQ ID NO: 940763 - DNA, 120 bp, Artificial Sequence
  ENSG00000261071_4 (sequence is synthesized)
acccgagttttgtggtatatacacatacgtactttttttccaagtatattttatttcttggcaaacatggccctttgtgatcgctgtgtttctctcctcccatccattatacaacactaa

SEQ ID NO: 940764 - DNA, 120 bp, Artificial Sequence
  ENSG00000261071_5 (sequence is synthesized)
gtgattcatcattctttgaacaaatcaaactgtttcacacctgccatgcatttgtaccgaccgtgctcttccctctactgccgcagccccccaggtagaagtcctttttatacttcaaaa

SEQ ID NO: 940765 - DNA, 120 bp, Artificial Sequence
  ENSG00000261071_6 (sequence is synthesized)
attcccacccaggcaaatttcaagcaccttacccctaccccatcccactctgcccatctctaattgcgctggtctgaacccgcacaaatgtctgtgtagtttctgcacttcataacagct

SEQ ID NO: 940766 - DNA, 120 bp, Artificial Sequence
  ENSG00000261071_7 (sequence is synthesized)
tatatgacagttgctccagccattctgtgaacccctgaggggaagggccaggtcttgctagtcattttatttctaatgtctatcatctggtagatgtttaataaatgctaagttgaataa

SEQ ID NO: 940767 - DNA, 120 bp, Artificial Sequence
  ENSG00000261075_0 (sequence is synthesized)
acatcagttgcaagaggaaagacattcggaaattttgccttttctttttgttcctggtttggcagagagagaatacacgaaaatcgattcagagtgggaacaatgcaacttacactttct

SEQ ID NO: 940768 - DNA, 120 bp, Artificial Sequence
  ENSG00000261075_1 (sequence is synthesized)
ttttgccttgtaattacctgtatgagtgaaatcatgttcaaagactgtctctcctgatagaacgtgaaggtcaggacacgcttgtaatcccagtgccaagaacggagcctggcacaaagc

SEQ ID NO: 940769 - DNA, 120 bp, Artificial Sequence
  ENSG00000261075_2 (sequence is synthesized)
aggttccggaaccagttaccaatcaaaggaagataccaaatatctccagcctttgtcttggaagcagacaatggcccttcaccagtaagaccaagagaataagaaaaaataatacaagtt

SEQ ID NO: 940770 - DNA, 120 bp, Artificial Sequence
  ENSG00000261076_0 (sequence is synthesized)
agggatcttgcagccgtcagaagctcagatttaagaagtctctgcaggatacggagcaggcagcaggagttgtcagcgcacggaatacagagtggttcccgggtcacgatggggtgtgga

SEQ ID NO: 940771 - DNA, 120 bp, Artificial Sequence
  ENSG00000261076_1 (sequence is synthesized)
ggcgggggtggggggagatggtccagagaaagatggtccagagaaagaggggcagatttggagaagtctttggagaggatcactggccaagtggaagaggcggatgaagagctccctggg

SEQ ID NO: 940772 - DNA, 120 bp, Artificial Sequence
  ENSG00000261076_2 (sequence is synthesized)
tgtgctgctgaccaaggcagatctggaggcagagtcaaagcaacagtcggcaatcgggcaatttatgaagacgttgaaggaaggagttgacacacggattcagtcagaaatttcaaagag

SEQ ID NO: 940773 - DNA, 120 bp, Artificial Sequence
  ENSG00000261076_3 (sequence is synthesized)
agtagagtgaaaagaagggtttggtgaaaagattcaggcattcctggtggaggtgacatagtggagcaggacatctaccagaagtcccggggctatggtccatgagcttggccctggcgg

SEQ ID NO: 940774 - DNA, 120 bp, Artificial Sequence
  ENSG00000261076_4 (sequence is synthesized)
agtgaggccagtgcagcctggctccgctgcaggagatgccaagacaaggctgccctctctggaacaaaagtgacctcatttctcaggtactgctggggactgccggccaattgccaattt

SEQ ID NO: 940775 - DNA, 120 bp, Artificial Sequence
  ENSG00000261076_5 (sequence is synthesized)
ggagtggtttctggggagggccaccccatccaatgtccccaccttttttgacctttgggtgctttatttgggctggtgagaactctcttttgtcctgggggcagttctgagcttataggc

SEQ ID NO: 940776 - DNA, 120 bp, Artificial Sequence
  ENSG00000261076_6 (sequence is synthesized)
cactgaggtcttcatatacaacagggcctattccttttgtgattgggtagtcccaccaactgtaacaccagaatcatcaggaggtagagcccaatcaggagagctgggaatgaatggctc

SEQ ID NO: 940777 - DNA, 120 bp, Artificial Sequence
  ENSG00000261076_7 (sequence is synthesized)
agaaccggtgtttggcacacatgtaggacaagcattcttcatgtgtcttattttgaacagctgtctggattgttgtctcacaggttttggcattatgtgacccccacatccccaattctg

SEQ ID NO: 940778 - DNA, 120 bp, Artificial Sequence
  ENSG00000261076_8 (sequence is synthesized)
tcctgctacaggccgtaagatttcagggggaccattcccagggtggtacctgtggttgatatatgaacttccttgtcccccacaaatctccacagggttcaaacccagtgttgaatgagt

SEQ ID NO: 940779 - DNA, 120 bp, Artificial Sequence
  ENSG00000261076_9 (sequence is synthesized)
ctctgtttgaaattagattagaaccaccacttgggaagggcaaagagcagacagcctcaacagtggtggagccaaccatgaacttctcaggagtgacctgtgcttccttcaaggcagttt

SEQ ID NO: 940780 - DNA, 120 bp, Artificial Sequence
  ENSG00000261076_10 (sequence is synthesized)
ctgttatgtgtatccttctaagacctgcatttctttcaagactgatcctgtccattttgtagcccatttttcttcattaacaataaaaccaattgtgagcaccaaagagcaagcagaaga

SEQ ID NO: 940781 - DNA, 120 bp, Artificial Sequence
  ENSG00000261078_0 (sequence is synthesized)
aaaggcaaattatctgtggccagagggcagaccatggcagttttaaaaacaggccggatatggtggctcatgcctaataatcctagcactttgtgaggcagaggtgggaggatcgcttga

SEQ ID NO: 940782 - DNA, 120 bp, Artificial Sequence
  ENSG00000261078_1 (sequence is synthesized)
caacatggtgagatcctgtctctacaaaacatccaaaaattagccaggtctcagacatgagtgtacagaagccatcttggagcctccagaccagtccaaatgacaagtagataccaccaa

SEQ ID NO: 940783 - DNA, 120 bp, Artificial Sequence
  ENSG00000261078_2 (sequence is synthesized)
agataccaccaagtgaccctgtcaatgtcatgtgaaaaagaagaattgcttaactgggctctgcctgaattcacgatcgacaaaattgtaaaatataataaaataatcgttttaggccaa

SEQ ID NO: 940784 - DNA, 120 bp, Artificial Sequence
  ENSG00000261079_0 (sequence is synthesized)
ccggtacatcacgtttacatgcatgcggaaaatgggcttggagattcttgattcaaatccgaggtatcacacatcggcccccaaaggtcaaacattaagaaggaagcttactgccctgtc

SEQ ID NO: 940785 - DNA, 120 bp, Artificial Sequence
  ENSG00000261079_1 (sequence is synthesized)
ccagacttttctaggtgacttcttcctccggactctgcagcagtcttactagttctgaaagcacaagcggaccgcacgtctcaacgcgggaaaacagttccatctgcagggatggaggac

SEQ ID NO: 940786 - DNA, 120 bp, Artificial Sequence
  ENSG00000261079_2 (sequence is synthesized)
cgggctagacaagctggagttggctctgcgccgcaggggtgtgcaagcccaagactggggagcccgaggtcaccccggccgccctggcatcggggctgaggtgcaggctcctggaggagc

SEQ ID NO: 940787 - DNA, 120 bp, Artificial Sequence
  ENSG00000261079_3 (sequence is synthesized)
ggtgcgcaggcccaggggtagccgaggacacaagccaaggcacgagcggacaaccttacggggacgagtactaccgcccggacgcgacttcgcgagaggccaggcggaacccactggaag

SEQ ID NO: 940788 - DNA, 120 bp, Artificial Sequence
  ENSG00000261079_4 (sequence is synthesized)
cgtgagctagcggggaccacccccgggcgaaaccaaaggagaaagaggggaacccaggggtcccggggcgcttaggcccgcgcggacggggaggccagagttgccccgaagctatctcct

SEQ ID NO: 940789 - DNA, 120 bp, Artificial Sequence
  ENSG00000261079_5 (sequence is synthesized)
tacctcaccggcccccacgggctccgcgctcagctacagcccggcgggagcaatgcggcagccacaacagttgccggcggtcgccgcgggccggaaagcggggttcggggatgggaaggg

SEQ ID NO: 940790 - DNA, 120 bp, Artificial Sequence
  ENSG00000261079_6 (sequence is synthesized)
ggcggggcgaagcgagcaaaaagttccggggaagccgagaccgcgaccttccgcgctttacggcccccgggcacgggtaccgccggcgcgtgacctcagccgcgcccgagcgcgccgtga

SEQ ID NO: 940791 - DNA, 120 bp, Artificial Sequence
  ENSG00000261079_7 (sequence is synthesized)
cgccctcgcggagccccgcccctgccacgtgggcttgtttgggtctcgcgaggcaccgcccccgcggcctctttgccaccctcagaggcgagctgtggaagccttgactcttagggccgt

SEQ ID NO: 940792 - DNA, 120 bp, Artificial Sequence
  ENSG00000261079_8 (sequence is synthesized)
tttagaacccgggcctcggaccggcggggtttctgcacgtggaaccggaacatctgagatgatcgcaggccctgtggagtgtggggagcgcgggggttctttcttccctcgaggcccgtg

SEQ ID NO: 940793 - DNA, 120 bp, Artificial Sequence
  ENSG00000261079_9 (sequence is synthesized)
ggatcttggaagtggctctgggctttcttgggcgaggctctcacagagtagatcggaaatccattctgctggcccgccccacctcggaggacggactaacggacctgagttcccggccct

SEQ ID NO: 940794 - DNA, 120 bp, Artificial Sequence
  ENSG00000261079_10 (sequence is synthesized)
atcttactcttctcagcttctcagcttggctcagctcagaggaagaggaatcactgaagtctcagagaagtctccactcatcccttcctcaccgtcacatcagccttttctttccttcta

SEQ ID NO: 940795 - DNA, 120 bp, Artificial Sequence
  ENSG00000261079_11 (sequence is synthesized)
gaagtcatcactgactcaaggatataagtttgatgactgtcttttccactggtgtgacacgatctctgtcgacagaaccttagtcttatgcatagctttattctcagcacccagaacagt

SEQ ID NO: 940796 - DNA, 120 bp, Artificial Sequence
  ENSG00000261079_12 (sequence is synthesized)
gcctggcacctcttccactgaatattatatgcataagggtctcatgctgcagccaccattgcatcttgggccacactatccagttcccgtttgttggattcaatactgtctcaccacaca

SEQ ID NO: 940797 - DNA, 120 bp, Artificial Sequence
  ENSG00000261079_13 (sequence is synthesized)
aaccaatcttgtgttttattaattaaaaaaaattttttttttttttgtagagataggctcactgtgttgcccaggctgggcctgaactcctggcttcaagtgatccttccatctcagcct

SEQ ID NO: 940798 - DNA, 120 bp, Artificial Sequence
  ENSG00000261079_14 (sequence is synthesized)
ggattacaggcgtgagccactgtgcctgccccaatcttgtgttttattgctggccacctgtagccaggcactgtgcaggatgatgggatccagcagtgtacaagaaagaggcggtttctg

SEQ ID NO: 940799 - DNA, 120 bp, Artificial Sequence
  ENSG00000261079_15 (sequence is synthesized)
aggcggtttctgctcttagggagtggcagtcaagttccagggacccctctgtcacaaggccaggccacagcctacatagtttataccccatttactggccagtcaaatcacacaaagaca

SEQ ID NO: 940800 - DNA, 120 bp, Artificial Sequence
  ENSG00000261079_16 (sequence is synthesized)
gcccagatgaggtctgccagacagtggactgaaactatgccataggctcctgtgctagataaatacttccatattttagctaggattgaatgcttggggacacctacctgtctaaaaaaa

SEQ ID NO: 940801 - DNA, 120 bp, Artificial Sequence
  ENSG00000261079_17 (sequence is synthesized)
gagaaaacggctgaccaatttgagacattctcggggaaggctttcctgatgcccagatgtggcaatttcatgaaaaatatcacaggttttcctcatgaaccatttggttcaagccatttc

SEQ ID NO: 940802 - DNA, 120 bp, Artificial Sequence
  ENSG00000261079_18 (sequence is synthesized)
caggcacatgaatttgggagaaacctggttgtctgcaggagatggtggatgaaatcaagtgaaatacttaatgtgttgatttcattctgtttacgtgcagtaaatagcaaacaaatggta

SEQ ID NO: 940803 - DNA, 120 bp, Artificial Sequence
  ENSG00000235389_0 (sequence is synthesized)
ggcctcccaaagtgctgggattacaggaaaaattttactttcatgaaaaaattcccaaactttatgcttcctctttttaatttaaattgttggtgagcaatggtatttaaaggacaagac

SEQ ID NO: 940804 - DNA, 120 bp, Artificial Sequence
  ENSG00000235389_1 (sequence is synthesized)
gagcaatggtatttaaaggacaagacaccttgaatgaatattactagtgttttagcaactcaaacattggctaaagggtatttgaaagttgtatgtctgcattaatgcaacttcagattt

SEQ ID NO: 940805 - DNA, 120 bp, Artificial Sequence
  ENSG00000235389_2 (sequence is synthesized)
gtgtgtgtgtggatttgttcactgcttagtgatggtaaagtcaagagttttctttaattactctccatgaaaagatttttttctcttttgtgtgcttctggattcaattgcctgttttta

SEQ ID NO: 940806 - DNA, 120 bp, Artificial Sequence
  ENSG00000276473_0 (sequence is synthesized)
aatgtacattttattttgctttttgtttatttttgtattttctatatgtaaatacattgagaaagatttccttttttgggtgacttctggcactcaaaattctataaatacatggaagtt

SEQ ID NO: 940807 - DNA, 120 bp, Artificial Sequence
  ENSG00000276473_1 (sequence is synthesized)
tttatttttgccatacattttggaaagcgatgcatggagctgattacaactggcaccgtcatcgtttataagccatgtttcttcccataggagattttgccacttaagggtctctgtata

SEQ ID NO: 940808 - DNA, 120 bp, Artificial Sequence
  ENSG00000276473_2 (sequence is synthesized)
tttttagtcttaaaatgtttcatgttatttattccatcactaattttatttcacagttttcagcttgggatatttttaaacttgtttatgacactgtaaaaataaaaatattgcattata

SEQ ID NO: 940809 - DNA, 120 bp, Artificial Sequence
  ENSG00000251249_0 (sequence is synthesized)
ggaaccagctgccatgttgtgagatgctcaagcagctgtatggaggagcccatgtggaaaaaaactgagcacccctcacaaccgatattcccttaccaggagtgtggcaagcctccctgg

SEQ ID NO: 940810 - DNA, 120 bp, Artificial Sequence
  ENSG00000251249_1 (sequence is synthesized)
aagcagactcttcagcaccagtcaagctttcagatgctgcagccgtgggcaatgactttgctgcaatcttatgagagactaagccagaaccacccagctaagtggctcccacattcatga

SEQ ID NO: 940811 - DNA, 120 bp, Artificial Sequence
  ENSG00000251249_2 (sequence is synthesized)
ctcacgaaaactgtgaggacacatggtgaatagagggcttgctggcaattggttcacaagctgaggagggcacaaaggccagatatttcatctgaagagttcacaggctattaaaaacat

SEQ ID NO: 940812 - DNA, 120 bp, Artificial Sequence
  ENSG00000251249_3 (sequence is synthesized)
attttactgcctcacctaggatggaaataattgctttaaagtgaactggcattaaagtgaacacgtcaagactacctacttggaagctacaggagacagaaacagaaaacacgactcctg

SEQ ID NO: 940813 - DNA, 120 bp, Artificial Sequence
  ENSG00000251249_4 (sequence is synthesized)
aatcatgttccattactttaatcgctaaacactgctccgtttaagctaaagagatataatggtacatttgacagatgccttcacatcaagatgagatagggccctgaaagtcgcatgttg

SEQ ID NO: 940814 - DNA, 120 bp, Artificial Sequence
  ENSG00000251249_5 (sequence is synthesized)
aacctttcttaccttctacgaggatgtcactcaaaatcttttctcaattcctcttcattggctgattacacaatacagagtcattcctagtgcagcccaaccctctccccaggtgaacct

SEQ ID NO: 940815 - DNA, 120 bp, Artificial Sequence
  ENSG00000251249_6 (sequence is synthesized)
tgctttacacaaaacacctgtgtataaataacctggtaatcattcaagttgtattctaaatgcaccacagagatctcactttttaaggaacactgaaataaatgctttagtgaagcagaa

SEQ ID NO: 940816 - DNA, 120 bp, Artificial Sequence
  ENSG00000251249_7 (sequence is synthesized)
ctgtaaaagaaaatattgtaagcctcagccctttgtcaatcataatggtttttaaaaatcccattagtttgaataattaaataccaaaaaatactttccgcctgtattaaaatttctgat

SEQ ID NO: 940817 - DNA, 120 bp, Artificial Sequence
  ENSG00000251249_8 (sequence is synthesized)
tttaatagaaaaaccaacagaatgactgtttttaagcttctagttcaatcttattttaaaatgacaaacagtataatgactaacatcatgcagaaagtacactgcagagtggggtagtaa

SEQ ID NO: 940818 - DNA, 120 bp, Artificial Sequence
  ENSG00000251249_9 (sequence is synthesized)
gaaagtacactgcagagtggggtagtaactaacaaaatatggccatgatctacctttaggactatagaggacaaataaaacggaatagaaccagctgggcccagtggctcacgcctgtaa

SEQ ID NO: 940819 - DNA, 120 bp, Artificial Sequence
  ENSG00000251249_10 (sequence is synthesized)
aagaaaagaaaaaagaaaaaaaaggaatagaaccaggtctgagtgctaaaaccttggagaaggtatagtagcagctaaacaggcaatgtgttattgttacaacttgacaactacgcaggt

SEQ ID NO: 940820 - DNA, 120 bp, Artificial Sequence
  ENSG00000251249_11 (sequence is synthesized)
ccacaaaggaatggaagctgagaaatgtggagtaacatgttcaatgtcacatgggttctaagcagagaggtcagaattcaaactcagatttctgcatctgaaataagtgtttttaacccc

SEQ ID NO: 940821 - DNA, 120 bp, Artificial Sequence
  ENSG00000251249_12 (sequence is synthesized)
tctgcctaccatttgattgaaacttaaattgtagatgtttgaacattttgattgacaaggatggattttcaaatggtttgaccgaaaacctctctctaccacacagaaatcaaagtggga

SEQ ID NO: 940822 - DNA, 120 bp, Artificial Sequence
  ENSG00000251249_13 (sequence is synthesized)
aaaggtagccatgacccacggtgacctgagtctgttttataggaccagaaagagccccaggctgttttttctcttctgccccacacgtttccatgctacacccacccacttttggatgta

SEQ ID NO: 940823 - DNA, 120 bp, Artificial Sequence
  ENSG00000251249_14 (sequence is synthesized)
ctctgcacagttgcctttttattcaggaatctttagagggcaccatctgttcaccaggccctgtgtgacgcgctggagttaccaacctgagtacaacttagtccctgaccttgagaagtc

SEQ ID NO: 940824 - DNA, 120 bp, Artificial Sequence
  ENSG00000251249_15 (sequence is synthesized)
cgcattattacccttcagggaacaaagcaagagtatagaaattgcatgagcggaaaatcatttcagggatggatccagctgcttttgcacatgtgagaatggccatgccaacttagggta

SEQ ID NO: 940825 - DNA, 120 bp, Artificial Sequence
  ENSG00000251249_16 (sequence is synthesized)
ccccctcaaagagggggtgaaggaagggcacctgagccccactgcctgtccctccccatcctgtgtcctctccaggacatgctgattgccactgtctcttcaccccggcagctaaagaaa

SEQ ID NO: 940826 - DNA, 120 bp, Artificial Sequence
  ENSG00000251249_17 (sequence is synthesized)
gttgcatgggacgtggtggggaaggaaatcaaaagtctagaacccacacggaatgctggtcattcttcatctctcatttgtcgctctaacaacatgtcatttcacggctcaagtgaagcc

SEQ ID NO: 940827 - DNA, 120 bp, Artificial Sequence
  ENSG00000251249_18 (sequence is synthesized)
acgtttcactgtagtttattctctcagaagctgaagccccacgctctggtttctatcccacgtactgtatttaattttagcaaaatcctagtaaataaaataatttggaaaaatatggaa

SEQ ID NO: 940828 - DNA, 120 bp, Artificial Sequence
  ENSG00000251249_19 (sequence is synthesized)
cttatgagagactaagccagaaccacccagctaagtggctcccacattcatgactcacgaaaactgtgtcttggttttgagctataaattcttgctgctatcttggacttttcctgagaa

SEQ ID NO: 940829 - DNA, 120 bp, Artificial Sequence
  ENSG00000251249_20 (sequence is synthesized)
tatcctcaccagccccccgggctttgttcaaagtcctgcagggaggctgcagagacaatggaatgcacaggctgtggtagctcagctgcggggactgtccaggcgcctaactggttgtgt

SEQ ID NO: 940830 - DNA, 120 bp, Artificial Sequence
  ENSG00000251249_21 (sequence is synthesized)
gaggctttcagagaacgctgctcctgtgctgggcttcagagagagggcttgctgcagcacagtggggtggcctcctgctggtggcccaggccacagggatatggaaacatgtgtctagtc

SEQ ID NO: 940831 - DNA, 120 bp, Artificial Sequence
  ENSG00000251244_0 (sequence is synthesized)
ggagtctcattttgtcatccaagctggagtgcagaggcgtgatctaggctcactgcaacctctcggattcaagggattttcctgtctcagcctctcagaagagaacatcttcataggaga

SEQ ID NO: 940832 - DNA, 120 bp, Artificial Sequence
  ENSG00000251244_1 (sequence is synthesized)
ggagctctaggaactgagaatgcaggaaattggaagaaatatacattaatagccaagaatttagacaggactggggagccaggaacaaacatttgagatgttgggcttttaatggagttg

SEQ ID NO: 940833 - DNA, 120 bp, Artificial Sequence
  ENSG00000251244_2 (sequence is synthesized)
ccacggatgacagcatcatgagaaatgaggtttaaaaatggaggattgttcgaggagggaggagggctgatctgaaagccacaaggaggacaaatggaacacctacccccactacaggct

SEQ ID NO: 940834 - DNA, 120 bp, Artificial Sequence
  ENSG00000251244_3 (sequence is synthesized)
ggaagctatctcctctgcagaactctgtgctaatgatagaatttgcatactaatgataattgcaaccaagaaagctgtattctctttctactcgagatagagagtctcactatgctggcc

SEQ ID NO: 940835 - DNA, 120 bp, Artificial Sequence
  ENSG00000251244_4 (sequence is synthesized)
tctgggctcaagcaatcctcccacctgcctcaatctcccaaaatgctggaattacaggcataagccatcacacccagccagtaattgactctgaaagtaacacacaaagattggaaagtg

SEQ ID NO: 940836 - DNA, 120 bp, Artificial Sequence
  ENSG00000251244_5 (sequence is synthesized)
caaagattggaaagtgatctaagttctgaattcaaatatcaacacatgcattttgctatttctttgttctttaattgcagcaagaacaaataacatgagatctatcttcttatcaaattt

SEQ ID NO: 940837 - DNA, 120 bp, Artificial Sequence
  ENSG00000251244_6 (sequence is synthesized)
cctacaggcacaatgttgtacagcatttgttctacataatgttctacaggtatctgtagaacttattcttcttacctaactgaaactatgcctgttaaatggcaaatcccaattttcctc

SEQ ID NO: 940838 - DNA, 120 bp, Artificial Sequence
  ENSG00000251244_7 (sequence is synthesized)
tcacccagcctccagcaaccactatcctactttctgtttctgctagttttactatattgaactccatatataagtggaatcacatagtatttgtccttctgcaactagcttattttactt

SEQ ID NO: 940839 - DNA, 120 bp, Artificial Sequence
  ENSG00000251244_8 (sequence is synthesized)
agcataatgtcctcaaggttcattcacgctttcttatatagcaggatttgtttattatggttggataatattccattatatgtttataagacattgtctttacacattcatctctcaatg

SEQ ID NO: 940840 - DNA, 120 bp, Artificial Sequence
  ENSG00000251244_9 (sequence is synthesized)
aatattttggtcatttccacattatagctattgtgaataatcatacaaaggaattgaacagggagcccagaaggaaactcatgcttatatggtcaactggtgtttggcaagggtccaaga

SEQ ID NO: 940841 - DNA, 120 bp, Artificial Sequence
  ENSG00000251244_10 (sequence is synthesized)
atactcactgggaaaaagagagtctctttaattaatgatgttgggaaaactgaatatccatagcaaaaaaataaaattgaacactcctctcacacaatatataaaaatcaactccaagta

SEQ ID NO: 940842 - DNA, 120 bp, Artificial Sequence
  ENSG00000251244_11 (sequence is synthesized)
aaaaaaacttcatgacattgtctcagcaattatttcatgggtatgacaccaaaagcacaaacaacaaaaggaaaaatagacaagtgtgattacataaaactaaaaagttttgcaaagcaa

SEQ ID NO: 940843 - DNA, 120 bp, Artificial Sequence
  ENSG00000251244_12 (sequence is synthesized)
atcatgagaaatgaggtttaaaaatggaggattgttcgaggagggaggagggctgatctgaaagccacaaggaggacaaatggaacacctacccccactacaggctggaaggaaacatgg

SEQ ID NO: 940844 - DNA, 120 bp, Artificial Sequence
  ENSG00000251244_13 (sequence is synthesized)
aataacagagtgaaaagtcaagctatgaaatgggagaaaacaattataaactatatatctgataaaagattaatttccaaaatatataaggaacaacttaatagtaaaaaggcaagtaag

SEQ ID NO: 940845 - DNA, 120 bp, Artificial Sequence
  ENSG00000251244_14 (sequence is synthesized)
tcagttagaaagtggacaaaggacttgaatagacatttcccccaaaatgatgtaaaaatgactaacaggtatgtgaaaaagatattcccactaacagttaaaagatatcatcactcggct

SEQ ID NO: 940846 - DNA, 120 bp, Artificial Sequence
  ENSG00000251244_15 (sequence is synthesized)
ctgtctcaaaaaaaaaaaaaaaagatatcatcactcaacatcattagtcatcaggaaaacacaaatcaaaaccacaatgagatattgtttcatacctgttagaatggctattatataatt

SEQ ID NO: 940847 - DNA, 120 bp, Artificial Sequence
  ENSG00000251244_16 (sequence is synthesized)
tgttagaatggctattatataatttttgaaaaactggtgttgacaaggatgtggagaaattggaagacttgtacactgttggtgggaaaatcaaaatggtgcagccactatgaaaaataa

SEQ ID NO: 940848 - DNA, 120 bp, Artificial Sequence
  ENSG00000251244_17 (sequence is synthesized)
tttggaagttcctcaaaaaattaaacatagaactatcatataatccagcaaatcccacttctgtatgtttgtacaattgaattaaaatcaagatcttgaagagatatatgcactcccatg

SEQ ID NO: 940849 - DNA, 120 bp, Artificial Sequence
  ENSG00000251244_18 (sequence is synthesized)
tttattgcagcattaatcacaatagccaagacatggatttgaaagatattaatacgtcagagaaattgtccaaaaggagctttgctcggtaaagaaacaaagggaggaggggggtgggat

SEQ ID NO: 940850 - DNA, 120 bp, Artificial Sequence
  ENSG00000251244_19 (sequence is synthesized)
ttgtgtttctcaagttacttcaattttaactattacagtgttttgaaatttctccagtggaaatatatattaaacacaagtataacagccaacaagtttgacggagagttaaccaacttt

SEQ ID NO: 940851 - DNA, 120 bp, Artificial Sequence
  ENSG00000251244_20 (sequence is synthesized)
aactcaaagcatcattttcaaatgcctcctctacagtgttccttctagtgaagtagatgtttggttatatgaagaggacctttagtgataaacttttacaataaacatgagtaatctatg

SEQ ID NO: 940852 - DNA, 120 bp, Artificial Sequence
  ENSG00000251244_21 (sequence is synthesized)
taatcaaataactgttgaagagtcagtcttcaaatttcatagtattacaaaagtaaatgttgatgtcctaaattgtactcaggttttgttcaatatgagagaagttataatgtaatggag

SEQ ID NO: 940853 - DNA, 120 bp, Artificial Sequence
  ENSG00000251244_22 (sequence is synthesized)
agaattattggtcctgtctagatgatctgaggaaacaagatggagactgccacacgagtaggattctaaggaaattaactcaatcttggcagagagttctagttgtctcttcagcattca

SEQ ID NO: 940854 - DNA, 120 bp, Artificial Sequence
  ENSG00000251244_23 (sequence is synthesized)
tgacccctcactgtcctccttaagaagagaaatcaatttttaactgagctccttatcagcttgtggtcatatgactatgttctggccaacaagatacaaatggacatgtatgagacttct

SEQ ID NO: 940855 - DNA, 120 bp, Artificial Sequence
  ENSG00000251244_24 (sequence is synthesized)
ggaaaactgtttatagagaatctacttctagaaggaacacatttttaattctcttagctttcttcttctacttgatctgcaactcagatatgagagctaaagtttcagcagccatccttg

SEQ ID NO: 940856 - DNA, 120 bp, Artificial Sequence
  ENSG00000251244_25 (sequence is synthesized)
tctatgaggaaattctgagggtaagaactacgtggtaggatggaggggaagaataattggcactaacctactagctctgaacaacctatttccagacttactgtgtaatgtgacattttt

SEQ ID NO: 940857 - DNA, 120 bp, Artificial Sequence
  ENSG00000251244_26 (sequence is synthesized)
acctagatggcactgtttgtgcaattatttaaatattttattactttccactctctttacttagaaagttctaaaacatggacaaatgaaaatgtgatgcaaatgataaaacaatacaac

SEQ ID NO: 940858 - DNA, 120 bp, Artificial Sequence
  ENSG00000251244_27 (sequence is synthesized)
tggcacagaagaaattcttagctttaattgtctaccctttagatttatgtcatccaactgtctgcttaattatgaaagaaaataaataagtataaatggtaaacacaaatatatatgcag

SEQ ID NO: 940859 - DNA, 120 bp, Artificial Sequence
  ENSG00000251244_28 (sequence is synthesized)
tgcttaaacatatttttgaatatgtttaaaatagtttataaggaatagtttatcatttgactttttatgtggagtttttcgtagaaagttttaagaattaattataaatgaaagcagaaa

SEQ ID NO: 940860 - DNA, 120 bp, Artificial Sequence
  ENSG00000251244_29 (sequence is synthesized)
aatgctatgaaaaagctgatagataataggaagctttaatatctctactcatttaatccagagttttactccccgtcaccatggagaaactatgcagtgctatgaaagaatgctcatcag

SEQ ID NO: 940861 - DNA, 120 bp, Artificial Sequence
  ENSG00000227954_0 (sequence is synthesized)
aggcatgcgggtttattgttagaattaattaatggactattaataagaaatgtagataatgtatgctgcagagctttgaaaatcctgaaacacaccctaagggttatggaatttacatct

SEQ ID NO: 940862 - DNA, 120 bp, Artificial Sequence
  ENSG00000227954_1 (sequence is synthesized)
ttcatagcttctattatttcttcactagtttgcagctatgctcacacctggaaggtgacaaaaggtggagtttactttctcgcccgtgtcagcagtcatacggtggaatccatgaaaatt

SEQ ID NO: 940863 - DNA, 120 bp, Artificial Sequence
  ENSG00000227954_2 (sequence is synthesized)
ggatttcctttttctggtgcgttttactcttgaactgtataactgtggataactttaatactgcccattctttgttttcagttatataatttctattagccttaaaagtaaccgatatat

SEQ ID NO: 940864 - DNA, 120 bp, Artificial Sequence
  ENSG00000227954_3 (sequence is synthesized)
ttcttttttaaggtttcagtataaaacataatctgcatcttcattatgaaactcatatgcaattttcttctatctctagaagtttagattgaggtttaaaagaaccattttcattatcaa

SEQ ID NO: 940865 - DNA, 120 bp, Artificial Sequence
  ENSG00000227954_4 (sequence is synthesized)
gcttccccatagtttcccactttcttattccaaatatttttaaaaatcactccaaatatcagagcttttagcaatataaagaaagatttattttcaaaagtagcaaaacttgtttgaaaa

SEQ ID NO: 940866 - DNA, 120 bp, Artificial Sequence
  ENSG00000227954_5 (sequence is synthesized)
aaatatatatctttaagtgaattactttataaatgtgactgtcaaagtcagctatcctatgatctacattttacaacatattgtacaaaagatacattgataggctcttatctatttata

SEQ ID NO: 940867 - DNA, 120 bp, Artificial Sequence
  ENSG00000227954_6 (sequence is synthesized)
tatttataattacatattgcacttggaccagcaaggcttgcagagtcattcacggtagaagttaataaagttaaatagatgggaatctttgtaagtacaattgatctcctctggtttgga

SEQ ID NO: 940868 - DNA, 120 bp, Artificial Sequence
  ENSG00000227954_7 (sequence is synthesized)
aacgaatctcctcgtcgttgtaaagtgttctcgcggggtgggacagagagaggagcattgcgagggggaagcagagacagagagcactgagggcaggggtcgccttcccggggcccgctc

SEQ ID NO: 940869 - DNA, 120 bp, Artificial Sequence
  ENSG00000227954_8 (sequence is synthesized)
cccccgggagcgcgcctttcccagactcgcacctccaaggtcaggacgcggtggttccacataagcggctcgcggtcaccacttctttcaggtcactctcgggtttcccggccaccataa

SEQ ID NO: 940870 - DNA, 120 bp, Artificial Sequence
  ENSG00000227954_9 (sequence is synthesized)
ataaagggccacgtctgcgggaaagaagagggtggaggaggtcctccacatcgctgagggagccggtggacatgtttgggggagtggacgagggagagagagagagagagacagagagac

SEQ ID NO: 940871 - DNA, 120 bp, Artificial Sequence
  ENSG00000227954_10 (sequence is synthesized)
aaagcgaggaagagggtgagagagagacagagagaccctgaaaccaagaggcctcccgagtgtggcgcagccacctcctgctgggagctggagttggggtctggttgggtctcacaaccc

SEQ ID NO: 940872 - DNA, 120 bp, Artificial Sequence
  ENSG00000227954_11 (sequence is synthesized)
tttccccttcgcagagttgtgagaaggaaccccgaggacttctgcagcagaggaaccggctctctgtttccccactcccagagtcgtggccgtagaggagggtgagcgagcgctgaggaa

SEQ ID NO: 940873 - DNA, 120 bp, Artificial Sequence
  ENSG00000227954_12 (sequence is synthesized)
tttggtggacactaggaatttatctggggaatagaggggcggatccttgcagcccagggaggggcctgccaggccccagcaaagcgcttagacccctttcacaaccggagggaaactcaa

SEQ ID NO: 940874 - DNA, 120 bp, Artificial Sequence
  ENSG00000227954_13 (sequence is synthesized)
tgcacagaccctgatttgcaacttgtaatgtaaatcaactcaactgcatcatgtacttaccagccaccttctcccaactgtggccggggccgagaagcagcatgttctgtccatctgtaa

SEQ ID NO: 940875 - DNA, 120 bp, Artificial Sequence
  ENSG00000227954_14 (sequence is synthesized)
aaggccttctttctctcttaagacgtcacaactggttgttactgagaactttagaaaaacgactagatcgtttggctctttctgggccttccacctacactccatgccctctctcctccc

SEQ ID NO: 940876 - DNA, 120 bp, Artificial Sequence
  ENSG00000227954_15 (sequence is synthesized)
aagaaaacacgaattaaaatacagggagtatcaaccgcatcctgccaacacctcataagactccaaggctttaccgagatcttccaccttccccgggataaatgaagacaagtgcttcct

SEQ ID NO: 940877 - DNA, 120 bp, Artificial Sequence
  ENSG00000227954_16 (sequence is synthesized)
agaatctttatggtgatggaaaagtggagatttaaatgaccacatccaccctaagatttattgtgagaatgattgatgttataaaccaggaaaaggactcttcccacagcagggatgaca

SEQ ID NO: 940878 - DNA, 120 bp, Artificial Sequence
  ENSG00000227954_17 (sequence is synthesized)
gaaatatcaagttgaagttgcctttgtcttcacatacgaatgacccagtactacaacacagaaagtataataatttaatctgaggttcaagacagcagtgagagaacacccagcaggcct

SEQ ID NO: 940879 - DNA, 120 bp, Artificial Sequence
  ENSG00000227954_18 (sequence is synthesized)
gttaaaaatttcttcactaattcctcaactagtttcctttgatttgctctcccttttctcagtcttggtaaaacatgaaagttaaagttatttttagactaaagagctatgtgaaaatgg

SEQ ID NO: 940880 - DNA, 120 bp, Artificial Sequence
  ENSG00000227954_19 (sequence is synthesized)
gtgtgtgtgtgtgtgtgtgtgtgtagctactaagatatctgcaaaataactacaaataattaatttgggctctggaatgtgataattattataaatccaaactatggccttactgcatac

SEQ ID NO: 940881 - DNA, 120 bp, Artificial Sequence
  ENSG00000227954_20 (sequence is synthesized)
cttagttaatggactgctcaggctgtctggggagatagtaaaaatcatagtaatatgtaccactgaaaagatttctgttgtctgtatatttttcaatgttggaaacttaaaagtaccaat

SEQ ID NO: 940882 - DNA, 120 bp, Artificial Sequence
  ENSG00000227954_21 (sequence is synthesized)
ttctggaagcatgtaaaactagcctcatgtcataggctggtttttatgcttagcaattatttttcttcatagccatataagaaataattaagtcccatgtccatttatcttgcagtaaga

SEQ ID NO: 940883 - DNA, 120 bp, Artificial Sequence
  ENSG00000227954_22 (sequence is synthesized)
catttgggctgagaaaggctagtgggctgataataaattttggagtgtttctaaaattctgtaaaagatggcttccagtttgggagtaagagtcgaagaatactgttgcttatgtatctt

SEQ ID NO: 940884 - DNA, 120 bp, Artificial Sequence
  ENSG00000227954_23 (sequence is synthesized)
gatatgaagtcttggagagagaatattcatatgaaaaatactttttttcttttaaaattttgtgtctatccctgctaataaacacttagggacaaatgggtgggagaaatgacttcttgt

SEQ ID NO: 940885 - DNA, 120 bp, Artificial Sequence
  ENSG00000227954_24 (sequence is synthesized)
tggattctactgagcaagtcatttaagctgtaacttaagctgtgccaaattctcccaaaatataaactatattctgtgagaagacaagcacttttgagaagctgtattaacccttttggt

SEQ ID NO: 940886 - DNA, 120 bp, Artificial Sequence
  ENSG00000227954_25 (sequence is synthesized)
aagttgaccatttctgttccaaagcacgaaatagaaaactcgtgatttgaaagtatgagatcatttctaaaagttcttacctgacttttaagaaacatttatgccccagaggcatctggc

SEQ ID NO: 940887 - DNA, 120 bp, Artificial Sequence
  ENSG00000227954_26 (sequence is synthesized)
caatttgctgctcacttctaacaatttgttttgcaagagagactatctttgaaagattttagtgctaaggaaattttatctctgaaagctgtaaaatgaagattaggcatggaatgtacc

SEQ ID NO: 940888 - DNA, 120 bp, Artificial Sequence
  ENSG00000227954_27 (sequence is synthesized)
cttgaacttaaatcctggtttatcagctgatacatttacaggaagttcaaatttgattcagttgcacttggatggaataatttgcttccttttttatgagaaggaaaacatcataggctt

SEQ ID NO: 940889 - DNA, 120 bp, Artificial Sequence
  ENSG00000227954_28 (sequence is synthesized)
cctttgaactgacttcatatgccattacataatctttctcaggggaaaaatatgcctttaaatttaaatgttaatccttttctcttactcctcatcatttggtcaggagacacaggctgg

SEQ ID NO: 940890 - DNA, 120 bp, Artificial Sequence
  ENSG00000227954_29 (sequence is synthesized)
caaattggcaaaactgcccattctcttttttcttcatttctaattagcacctccagatgttttattcattttatttgatggtaactaccaccacttcaaatatttgccaactttctatgc

SEQ ID NO: 940891 - DNA, 84 bp, Artificial Sequence
  ENSG00000227954_30 (sequence is synthesized)
gtaactaccaccacttcaaatatttgccaactttctatgcaaaaaaaagttgacgccttttttttttcttttttttcagcacga

SEQ ID NO: 940892 - DNA, 64 bp, Artificial Sequence
  ENSG00000227954_31 (sequence is synthesized)
ttctcatgcctcagcctcccgagtagctagaattacaggtgcctgccaccatgcctatcaaact

SEQ ID NO: 940893 - DNA, 120 bp, Artificial Sequence
  ENSG00000227954_32 (sequence is synthesized)
caggcatgagccaccgtgcccagccaggtgcctcttttttgattttacataattatctccatatactttgtttgctgctgattgactgttgtctatctcccgcttatatgcctatcaaac

SEQ ID NO: 940894 - DNA, 120 bp, Artificial Sequence
  ENSG00000227954_33 (sequence is synthesized)
attgactgttgtctatctcccgcttatatgcctatcaaactctgactttgtttcattaaattttaactttatttaataaagtgagcattacctctctttgctcattctaaattatagtgg

SEQ ID NO: 940895 - DNA, 120 bp, Artificial Sequence
  ENSG00000227954_34 (sequence is synthesized)
tgctgtcctgttatattttggcagccaaagtgaatatggcactagtgagcttggtggctagctaagaaggtcaataacagtgatgctgggtattgctgctacctttacctggcaccagct

SEQ ID NO: 940896 - DNA, 120 bp, Artificial Sequence
  ENSG00000227954_35 (sequence is synthesized)
gggagatggtataaatcctggatggtataaatccattcagtaattagaagtcttctgcgtgttcactataccttaaccccctcttttcacatttaattcagtgaattgtagataagatgc

SEQ ID NO: 940897 - DNA, 120 bp, Artificial Sequence
  ENSG00000227954_36 (sequence is synthesized)
cacattgctaagatttaaaggtggcaaataacaacaataaagtctagggaaagattctgcatggttctttgaatccaggagttaatcttgcatttcacatgttccacaatacagctttga

SEQ ID NO: 940898 - DNA, 120 bp, Artificial Sequence
  ENSG00000227954_37 (sequence is synthesized)
aagcagccaagcctatgcacttgaaagtcagaatttaccctaaggtgtaagtgggccagagaaaactcgggcagacaaagagagttaaaaattttgcaaagccagtttaatgtcctccta

SEQ ID NO: 940899 - DNA, 120 bp, Artificial Sequence
  ENSG00000227954_38 (sequence is synthesized)
agttttctaatactagaataattttattagaccctgtcagtgttaggaaagagagagaaaaggactgagcgactcctgagtcaggtaccatgcagggacttttgcctccattctctcatt

SEQ ID NO: 940900 - DNA, 120 bp, Artificial Sequence
  ENSG00000227954_39 (sequence is synthesized)
tcatgtattttctctcctttctgttggcactactaaagaaagagctgccacatgaaatgaacagtgtattagaaatgtatgccagaggctttcccctgtaataaagttttagaaaaactg

SEQ ID NO: 940901 - DNA, 120 bp, Artificial Sequence
  ENSG00000227954_40 (sequence is synthesized)
aagcaggcaattacacatctctaagtgctgggaaagagaaagaacactgtgttatgtagtcaccaagggaggatgcataatcctgccctgaacatcagggaaggcttcctggaaaagatg

SEQ ID NO: 940902 - DNA, 120 bp, Artificial Sequence
  ENSG00000227954_41 (sequence is synthesized)
gcatgtaaattgaggtccacaggatgagttggagttagccaagtgacacttggagaaaagagtgcttcagatgcagaagaaagtgcttcgggacaacacgaacctgcaagtaatcatccg

SEQ ID NO: 940903 - DNA, 120 bp, Artificial Sequence
  ENSG00000227954_42 (sequence is synthesized)
ctcaaaaaaaaaaaaaaaaaaaaaatcatctccactatagaatttcagaaaagaggttgtataatcttgggaggtcacttcaactatacaattggactaagaacactgactctcgtgggt

SEQ ID NO: 940904 - DNA, 120 bp, Artificial Sequence
  ENSG00000227954_43 (sequence is synthesized)
gttataattaaatcaggtaatatatggtaaggtaagcattgattagtctcttcattagttgattagcctcttcaaatgttagtttgattagtctcttcaaacgttagtttccttcctctt

SEQ ID NO: 940905 - DNA, 120 bp, Artificial Sequence
  ENSG00000227954_44 (sequence is synthesized)
ggtgtgagccaccacgcccggccacagttgacctgattcaaaggatgggtcagaagtatgtgctctggagccacgcaaatctgcttcaaattccagttctgccatttagatagcaggtta

SEQ ID NO: 940906 - DNA, 120 bp, Artificial Sequence
  ENSG00000227954_45 (sequence is synthesized)
tttagatagcaggttatctacagatacagaaaccatctaggaggtctggtgttggatacaactatttgtaccttgtaaaattcttacctctaaatcattaaaaaacaaatgagtatcagc

SEQ ID NO: 940907 - DNA, 120 bp, Artificial Sequence
  ENSG00000227954_46 (sequence is synthesized)
aagattaaaaatcatttcttccatgcggagtccaagggttacagccatggggggatcctgtaaagaaaatgtacacataatgagcttactaagtcactgggacagctaattctaagtgag

SEQ ID NO: 940908 - DNA, 120 bp, Artificial Sequence
  ENSG00000227954_47 (sequence is synthesized)
actcacagatccaagaatcccagaaagatgactggacatttggtgggtgtagccttagcaatgctgggcaccctccatcttgccaaactgctgtgagggagctgccagcacctgcaattc

SEQ ID NO: 940909 - DNA, 120 bp, Artificial Sequence
  ENSG00000227954_48 (sequence is synthesized)
cactgttttatcaggcatgtgagaatgaaacatacttctggattgaacccaagttttatacagagatgtttgctcattttcattagatgtttgtagaattatgggcaccttatgaatcaa

SEQ ID NO: 940910 - DNA, 120 bp, Artificial Sequence
  ENSG00000227954_49 (sequence is synthesized)
gagttgcttttttttaatttgcatttaagtgtagtgaatgttgagtttagggtctaaaatgaggtgatagcaaaatcttggatagaggaaaaaagtgggataataaaggcactaacaggg

SEQ ID NO: 940911 - DNA, 120 bp, Artificial Sequence
  ENSG00000227954_50 (sequence is synthesized)
tctttatggtgatggaaaagatatactaaaagaagacagatcagtctctctcctgataagaagagtcaccaagaggaacatctgcaacaactagatgctgctacaaagagaccaatcaac

SEQ ID NO: 940912 - DNA, 120 bp, Artificial Sequence
  ENSG00000227954_51 (sequence is synthesized)
aactgctcagcagagatacagatctgaagcacagaagtgcaatagaccttcctgatgccttcgccaggagcatggaattcttcccagagtcacagaagatggcacagcctggggacaatt

SEQ ID NO: 940913 - DNA, 120 bp, Artificial Sequence
  ENSG00000227954_52 (sequence is synthesized)
gggaatcacctggaggatggcagacaacacgaacctgcaagtaatcatccgaccaacttcctctactgcttgggaattgcaggttgtataatcttgggaggtcacttcaactatacaatt

SEQ ID NO: 940914 - DNA, 120 bp, Artificial Sequence
  ENSG00000227954_53 (sequence is synthesized)
gtaccagcttctgtgcccagaagatggtgctgtggttggatgaataaaacaattacagggccttcaaggataagaagaaggaacatggataaatatccccattctgcctagacagaaata

SEQ ID NO: 940915 - DNA, 120 bp, Artificial Sequence
  ENSG00000227954_54 (sequence is synthesized)
agaaaaacattcccttttctcttctttaaaacgaattcttgagtcatgcatggcaacaatatgtgttgccaaaagtggccagtttgtggtagtaggttttattcagaaaatcagtgggtg

SEQ ID NO: 940916 - DNA, 120 bp, Artificial Sequence
  ENSG00000227954_55 (sequence is synthesized)
atgaaaatttagaagatgcactcatcatttgtaaaactgtagatgaaagtttaaaagatgatgttataccactttttcttcactgccctcatcagtggctccatcccaccctcctgctgt

SEQ ID NO: 940917 - DNA, 120 bp, Artificial Sequence
  ENSG00000227954_56 (sequence is synthesized)
tctcataactgatgtagaaataatttcatgagccaaacaggatggttttatacgtgtgtgtttggcattaactttatttcctattcacgtaccagatattactgcccgctcttatgaaat

SEQ ID NO: 940918 - DNA, 120 bp, Artificial Sequence
  ENSG00000227954_57 (sequence is synthesized)
taaatcatctgtcattctgctgtgaagctctttaatgttttctttgggaaataaattagaatgccatattggtttccaagcagacataagctggcgatgacttttttgtacaaaagttac

SEQ ID NO: 940919 - DNA, 120 bp, Artificial Sequence
  ENSG00000227954_58 (sequence is synthesized)
tgatgaaaagctcatagaggcatttggatttcttcagggttgtaaatccaggtatgttactactttatctactggaaattggggtaatgcaggagatgggaaagcatgatgttaaatcaa

SEQ ID NO: 940920 - DNA, 120 bp, Artificial Sequence
  ENSG00000227954_59 (sequence is synthesized)
ctggtgaccccaaataattttccatggtgttcatcagccatgcacacactgtattactgtcatcattcctagcttttccactatgctgtctcaagtttgcacaaattgtaagtgatttta

SEQ ID NO: 940921 - DNA, 120 bp, Artificial Sequence
  ENSG00000227954_60 (sequence is synthesized)
aatcattaactgatgtgacataatcaaattacttagggttttatttactgtgctccgagtaattcagttatgacttggcaaggtatttaacagacaatagtgaagttactacaaattcaa

SEQ ID NO: 940922 - DNA, 120 bp, Artificial Sequence
  ENSG00000227954_61 (sequence is synthesized)
ctttgcattggacaactccatttgaggataccaccaccttcaaattaacaattccagaaactggtctcagtatctcgttccaacaacaagcatcacccactacaataaaaacagcaagta

SEQ ID NO: 940923 - DNA, 120 bp, Artificial Sequence
  ENSG00000227954_62 (sequence is synthesized)
gaatctttttacttcttttgtgtttctcatctcggcaaactgcactacaatctaccaaactgcccgagccagaaacctagaggtcaggctggattttcctgaggacatgaggtgaagaag

SEQ ID NO: 940924 - DNA, 76 bp, Artificial Sequence
  ENSG00000227954_63 (sequence is synthesized)
gacagggtttcaccatgttggccagactaatctcgaactcctggcctcatgtgatccgcatgcctctgtgtagatt

SEQ ID NO: 940925 - DNA, 120 bp, Artificial Sequence
  ENSG00000227954_64 (sequence is synthesized)
ttgttgttatggttcgtgttactgttgtttttcctcagccttgagccagttattttctgctcaaaacgttcgaccctatatcttttggcctcagagagcaacaacacgaacctgcaagta

SEQ ID NO: 940926 - DNA, 120 bp, Artificial Sequence
  ENSG00000203321_0 (sequence is synthesized)
gccctcgcgaccggaagtgcgcgctcgggggtaggcgggaaggccgcggcgggattaattaaagacccgatcaagcggcccgcagaggggcgtgaccttgtttcctcaggagtgtggcgg

SEQ ID NO: 940927 - DNA, 120 bp, Artificial Sequence
  ENSG00000203321_1 (sequence is synthesized)
tggtcttactactatgttcgttatagcgcggcagaaagaagaaatgttatgacaacagagcagcaagtcccatggtcctagctaaaaggcggtacggctgtgactgctgagatggagagt

SEQ ID NO: 940928 - DNA, 120 bp, Artificial Sequence
  ENSG00000203321_2 (sequence is synthesized)
gtgactacagagaattaaacttatggtctctcacctgagcatggagtggaaatgggcatataaggtaatcacagaagttatcacacctacacccttcccagtatatggatgtactaggga

SEQ ID NO: 940929 - DNA, 120 bp, Artificial Sequence
  ENSG00000203321_3 (sequence is synthesized)
ggaagattccatggaagaggtaaaatctccccgcatgcttcattatagaaagaaaaagagaacactctcttcctaacagaacggaccactgtctcagcatgtgggatggtgataatgagg

SEQ ID NO: 940930 - DNA, 120 bp, Artificial Sequence
  ENSG00000203321_4 (sequence is synthesized)
gaatgattacctaccatcagatcaacaattagtatacactgaaattacaatgactgtgagactgacctaagtgtgaatatacaacttctgagcttccactgcctttggagggatcaccac

SEQ ID NO: 940931 - DNA, 120 bp, Artificial Sequence
  ENSG00000227953_0 (sequence is synthesized)
aaattggatggaaagaaattctgtgtgctcccaggattccagttccttaccggaggttggtgccgtctgagtctgaaaagctgccctcttgccgtgttcatgctttggtagaacaccttc

SEQ ID NO: 940932 - DNA, 120 bp, Artificial Sequence
  ENSG00000227953_1 (sequence is synthesized)
agagccttggcaagctctcggtcagagccggcttgctgtgtgcacatttggctcatctccccggcggatggcagttgcgcagtcatcccgctgatcttcagagtgttggaaggcttcggg

SEQ ID NO: 940933 - DNA, 120 bp, Artificial Sequence
  ENSG00000227953_2 (sequence is synthesized)
gctgaggtggaaaaaggtaacattgatttatgtatctctttctctgggcatctctatatttattttggtggcattctactgcatcagcatttatcaggcaccagtttggatccatccaag

SEQ ID NO: 940934 - DNA, 120 bp, Artificial Sequence
  ENSG00000227953_3 (sequence is synthesized)
ggaaaggggaaatctcacagggcagaagaaatgtccggcattttttgtttatgaaagaagatacgaattaactcatttaaaagtttgtttcttaaaagacaaatacacatcccaaatgta

SEQ ID NO: 940935 - DNA, 120 bp, Artificial Sequence
  ENSG00000227953_4 (sequence is synthesized)
ggagtctagggataagctaaacagccaagactggagcagtctctcaccttgaccagaagcagttttcgcaagtgatgctttgagaagcacgttctcctctctcagggctctgttaatgtt

SEQ ID NO: 940936 - DNA, 120 bp, Artificial Sequence
  ENSG00000227953_5 (sequence is synthesized)
cctgagcggttccgtctcctgctctagcttgagcagcttcagataaagttctggtatctggtttgatgctgcctaccagaaaacatgtcagtttcgtcttttgttgtatcatctgcatat

SEQ ID NO: 940937 - DNA, 120 bp, Artificial Sequence
  ENSG00000227953_6 (sequence is synthesized)
cctttgagactggcaatgtttgctaccatgggaaaatcaaatgggatgggagtgtgtgtatggtgagcagagtttaagcccctcagggtacacaggagtaaataaagaaaacgtttgtta

SEQ ID NO: 940938 - DNA, 120 bp, Artificial Sequence
  ENSG00000227953_7 (sequence is synthesized)
agggggaaggaacgtcaagcagccgtcctcagagattttctagccacctgggatgcccactttagtgtcctatgtacacacctggcttatatccttcacagtggaaattttcttggtgtc

SEQ ID NO: 940939 - DNA, 120 bp, Artificial Sequence
  ENSG00000227953_8 (sequence is synthesized)
taccaggatgtggccttcacctgtgaccatgaggcccagctgagagcagctcagctcggtgcagccttctgtaatggggagagacacagtcaaagaaagaaacatcccagtcgcccagct

SEQ ID NO: 940940 - DNA, 120 bp, Artificial Sequence
  ENSG00000227953_9 (sequence is synthesized)
ccagtgtcagcttcatgcagtaggccagcgactggagccagatgtgagctgagcccaagcggacgacctcgacaggatcccagaaagggtcgtcatctcgagccacagggccgtgatctc

SEQ ID NO: 940941 - DNA, 120 bp, Artificial Sequence
  ENSG00000227953_10 (sequence is synthesized)
aaacacagaggggtccacacccagtgcacagcagatccaggacaacagcctgccgctgtcttcctcctcactgggtgaggacagggcctctgtcagcactggctctggagaggaaacaaa

SEQ ID NO: 940942 - DNA, 120 bp, Artificial Sequence
  ENSG00000227953_11 (sequence is synthesized)
cctgaagccacaggaggagggattccagagggattccagccgccctctccagctggaagaagtcgtaatcgaacctgctcaggtcctcactgccccactccgaaggaaaccccacgtaca

SEQ ID NO: 940943 - DNA, 120 bp, Artificial Sequence
  ENSG00000227953_12 (sequence is synthesized)
ggtgaggtcagaggagtgaagtgacttgcccaagaccacacagtgagtcaggagcaggcctgtccctccagcagtggtgccatgttgtccccaagccatggtggcagaggagctggtgtg

SEQ ID NO: 940944 - DNA, 120 bp, Artificial Sequence
  ENSG00000227953_13 (sequence is synthesized)
aacgccccatcctgccacgtctgtgatgtgggcacctcacatgactgtcccctcccagctcttgggggggacctaggacattctgtgagcctgcaggaaagtttaccaaatgctgcagct

SEQ ID NO: 940945 - DNA, 120 bp, Artificial Sequence
  ENSG00000227953_14 (sequence is synthesized)
ttgtcctggtggtgatgggcaccccgttaacggcaaccttgcatttgctatgtggagtgaccgtcactttaccgtcggcatttgtgaaggaagcgtgtttatctgaaattctaagaagat

SEQ ID NO: 940946 - DNA, 120 bp, Artificial Sequence
  ENSG00000227953_15 (sequence is synthesized)
gagagtcaaagacacccagcaaacggcggtttccgtgagcaggtaggctgacctttctcatgtgcacaggagggaaggtctacagctgcggaggatggcaggtggcatctcggggcctcc

SEQ ID NO: 940947 - DNA, 120 bp, Artificial Sequence
  ENSG00000227953_16 (sequence is synthesized)
tgtgtgctgtggcccatgatgcatggggacagcagcgggcgcagaaggaccctgcccttggggagcacggggagctgggagacagcaggcaagggcttcattaacagaacgaacaccagc

SEQ ID NO: 940948 - DNA, 120 bp, Artificial Sequence
  ENSG00000227953_17 (sequence is synthesized)
tgagggcctagcactgcggggagccggccaaggccacactggagtcctcccgctcccaggccagcgggatggggtggtgggaagatggcagcaagcaagcttcagaagagacgctcagga

SEQ ID NO: 940949 - DNA, 120 bp, Artificial Sequence
  ENSG00000227953_18 (sequence is synthesized)
ggcgactcttaacgagcctcacctactccggggttggagcccaggaagcaaaccagcactgcaccctagatttcagccagaggacgaaagccctgccctcagctttctcagaccagccct

SEQ ID NO: 940950 - DNA, 120 bp, Artificial Sequence
  ENSG00000227953_19 (sequence is synthesized)
ggagtaggtggcccggggagacctgggcagtgtccctgcttgtcctgcagactgtgtggctctgcagacctctagatggaggaggcacaattctctaatgctggacgaggacactgatca

SEQ ID NO: 940951 - DNA, 120 bp, Artificial Sequence
  ENSG00000227953_20 (sequence is synthesized)
tggaaactcaccccaaaccttgaatcgtgatagcatttgaggcagcctgaccggtgccacatgaacctgaaaggaatcaagatataatttattttgaaaataaatcagacactttcagaa

SEQ ID NO: 940952 - DNA, 120 bp, Artificial Sequence
  ENSG00000227953_21 (sequence is synthesized)
ataccatgtcacaggagaccctcagaccgcagccttccagaagcctccatctacacaccatgtcacaagagaccctcagactacagccttccagaagcctccatctacataccatgtcac

SEQ ID NO: 940953 - DNA, 120 bp, Artificial Sequence
  ENSG00000227953_22 (sequence is synthesized)
agaagcctccatctacataccatgtcacaggagactctcaggctgcagcctcccagaagcctcctgaggaaagcagggcttcatctgaagacagagacggggtttcaccatgttgcccaa

SEQ ID NO: 940954 - DNA, 120 bp, Artificial Sequence
  ENSG00000227953_23 (sequence is synthesized)
atccacccacctcggcctccccaaatcctgggattacagatgcgaactaccgtgctgggcctaatcttactgttttaatgtaaaaatggacagtcttgaggaagacagattgcagagaga

SEQ ID NO: 940955 - DNA, 120 bp, Artificial Sequence
  ENSG00000227953_24 (sequence is synthesized)
cacagtgtgaaatcgctgctctcagatcagcacacgggagaggccagcagtcaggagggggctcaccgagtttgtctgcactcgctccctccgcagccgccctctccagctggaagaagt

SEQ ID NO: 940956 - DNA, 120 bp, Artificial Sequence
  ENSG00000227953_25 (sequence is synthesized)
cggcagcggcgggcggcccgcgtgggctactgctgggggctgcgttcgggcgaggaggggagattctgtctcagaggcctcgggctgcacgttcttccgggccgcgcatttgcagcccac

SEQ ID NO: 940957 - DNA, 120 bp, Artificial Sequence
  ENSG00000227953_26 (sequence is synthesized)
agcaggccccagccggcccctctggagttgggccactgcttctgcaggcccagcaggcccctgggggcggccggaggccactaactggcttctccagctcagcattcttctctcatttgc

SEQ ID NO: 940958 - DNA, 120 bp, Artificial Sequence
  ENSG00000227953_27 (sequence is synthesized)
tgggtaccccactctcttctctacccctttgaaccatctttaccctcattcctcagggaacgtttaacgagttgaatgtttaccatgtagtcactctatatggaaatcataattcaattt

SEQ ID NO: 940959 - DNA, 120 bp, Artificial Sequence
  ENSG00000227953_28 (sequence is synthesized)
cctactccgggtacgttttgatctgtttctgcgccctcgccgtataaattcagaccttataggatttggggctggacgtcggggtgtcaggttggcatcccctctccccgccctgctccc

SEQ ID NO: 940960 - DNA, 120 bp, Artificial Sequence
  ENSG00000227953_29 (sequence is synthesized)
ctgcaccgatgtcatctgtgtgtcctgaatgactggctccctgccttagcatgttccatgttcctgcactccttggccatcatggaatgttctggatgtggagacccgtgtgcatccaaa

SEQ ID NO: 940961 - DNA, 120 bp, Artificial Sequence
  ENSG00000227953_30 (sequence is synthesized)
cccttttttgcatggggcccagggatcctgtgggaaaggttgcggcctcatcactggagttcagacatttacgcacctgtgcgttggactaaggacgtgttctggaaagggacttgaggg

SEQ ID NO: 940962 - DNA, 120 bp, Artificial Sequence
  ENSG00000227953_31 (sequence is synthesized)
ggatccccaggaagatgtcccaagaaggaggctggcagtgcaggacgaggcggggccagccggcccctgggtcagcacccctccagccacgacggcccgtgggctttcgtacgggggcag

SEQ ID NO: 940963 - DNA, 120 bp, Artificial Sequence
  ENSG00000227953_32 (sequence is synthesized)
ggggtgatctgtctgaaggatgtaggtgatggtgcttcccagctggagagctggaagcaggaggaggacactccagcagcagcctcccaggcagggcagccacagagctggggacagctc

SEQ ID NO: 940964 - DNA, 120 bp, Artificial Sequence
  ENSG00000227953_33 (sequence is synthesized)
ttgactgggtgaggcccggcatggggtttcccagggctcctgcggggcctcctgagggagcccttggggtcactccacagtctgggctttctgtagtccggtgggtcagggctccaagca

SEQ ID NO: 940965 - DNA, 120 bp, Artificial Sequence
  ENSG00000227953_34 (sequence is synthesized)
ccaggagagatccagggatgcgcttatgtttgggccacccccggtgggcttgttcgttcagcccccttcgtttcctggcctgctctacttatatctgtttgtgaagaattattacacaga

SEQ ID NO: 940966 - DNA, 120 bp, Artificial Sequence
  ENSG00000227953_35 (sequence is synthesized)
agagacggacggcggcctgagagggcagcagattcgcgctaacagagcaggtcaagcagggcctcctcgccttgctcttccgcttcagcatatacgtctccaagctcaggaaatgcagtt

SEQ ID NO: 940967 - DNA, 120 bp, Artificial Sequence
  ENSG00000227953_36 (sequence is synthesized)
gcagcctcccagaagcctcctgaggaaagcagggcttcatctgaagacaggtcactggcactaagcttacttgtttttttgagacagggtctctgtctgtcgcccaggctggagaatagt

SEQ ID NO: 940968 - DNA, 120 bp, Artificial Sequence
  ENSG00000227953_37 (sequence is synthesized)
ggtgtgatcacggctcactgtagcctcgacctcctcaggctcaggtgattctcctacctcagcctccccagtagcagggactacaggtgctcaccaccatactcagctaattttgtattt

SEQ ID NO: 940969 - DNA, 120 bp, Artificial Sequence
  ENSG00000226576_0 (sequence is synthesized)
ttggtttcttttgaggcctttctcttgctttgcagatgaccaccttctccctgcatcctcacctcatctgtcttctgtgcacatctgtgtcctcatctccacttataaggacgccagtca

SEQ ID NO: 940970 - DNA, 120 bp, Artificial Sequence
  ENSG00000226576_1 (sequence is synthesized)
agccacctatggcactggctgaaggaggtggccctggagccaggcctggaacctgctgagacagagggacggggttgcaggaagactgggctgcatcggccaaggtacagggtgagtccg

SEQ ID NO: 940971 - DNA, 120 bp, Artificial Sequence
  ENSG00000226576_2 (sequence is synthesized)
gctgggtgtgggaagaagaatggagggcacacgggatgaggctgagaggtgactgagcttggcacacagtgaagaggcccatgcgctccagtgtgtcttctgatggccaacacctgtgct

SEQ ID NO: 940972 - DNA, 120 bp, Artificial Sequence
  ENSG00000247373_0 (sequence is synthesized)
cacaaagctcagcgagaggttccaacaggaacccgtcgttcaaggagaaaacccaaagcaaccaagcatgccgaaggagcccccaagggatcccggaacccaggcaagtcgcgggaaaag

SEQ ID NO: 940973 - DNA, 120 bp, Artificial Sequence
  ENSG00000247373_1 (sequence is synthesized)
gggccgttaggaggtcgccgtggccggggcggggcggggggtggcggcctgggcttctccaggactcggacagcgacttccaagcccactccccacacaggccccgcgccggtcccaggt

SEQ ID NO: 940974 - DNA, 120 bp, Artificial Sequence
  ENSG00000247373_2 (sequence is synthesized)
gccaccaatccccgagtggccacgcgaccaagcctcagctgcgggcagctagcccgcacctccacgtcgatgtccaggaagccgccctccgccacctcgaagatgaggcccatcttggtg

SEQ ID NO: 940975 - DNA, 120 bp, Artificial Sequence
  ENSG00000247373_3 (sequence is synthesized)
cccgaggtgacccgctcaaagaagcactcttcagcatgggcgtcgatgctaacgaaatagcccgagaccgtggccaggagagcggccagaagcaccagcagttcagcaagcgtcaccatg

SEQ ID NO: 940976 - DNA, 120 bp, Artificial Sequence
  ENSG00000247373_4 (sequence is synthesized)
agcaagcgtcaccatggtggggctgaggccgaagccaggacccggactgcggcctccacagccgccgccgccgccgccgccgccgccccgctgccttctcagccaccgccgcctaagctc

SEQ ID NO: 940977 - DNA, 120 bp, Artificial Sequence
  ENSG00000247373_5 (sequence is synthesized)
gccaccagtgggggctgatgcgggcgcagtggattggcgggctcccgcagctgccacgtaaagggaggcacggcagccgccgagggacaagcgactctgcgcggcccgagcctggacggc

SEQ ID NO: 940978 - DNA, 120 bp, Artificial Sequence
  ENSG00000247373_6 (sequence is synthesized)
ggctccgaaggaccaaaaatttttccctagtcctttctcgtccaagctaaagttcctgtggacttcccaggaaaacgacagtgtccggaagcctctgcaatgccctcttaggattgtcca

SEQ ID NO: 940979 - DNA, 120 bp, Artificial Sequence
  ENSG00000247373_7 (sequence is synthesized)
aagcctctgcaatgccctcttaggattgtccaagaagatggcgaaacatttgcaggcagcgataggagttgagggaatgtgcgggctgaaactaagtagagacggggtttcgccatgttg

SEQ ID NO: 940980 - DNA, 82 bp, Artificial Sequence
  ENSG00000247373_8 (sequence is synthesized)
cctcccaaagtgctgagattacagaagctggagcgcaatttcaagctattcttctcccttagcctcccaagtagctgggatt

SEQ ID NO: 940981 - DNA, 120 bp, Artificial Sequence
  ENSG00000247373_9 (sequence is synthesized)
cacccgcctctgccttccaaagtactgggattaacaggcgtgagcctccacacccagcaactattgcattttattttactgtatgtatgtaataccttaaccacacacaaaaaattacct

SEQ ID NO: 940982 - DNA, 120 bp, Artificial Sequence
  ENSG00000247373_10 (sequence is synthesized)
tgttcaaattttccagaattagaattctaccagttccccaaagtcttgctgtttctccatgccccttagcccttaccagctgctagagctgtcttttcatcctttgcaccctggcacact

SEQ ID NO: 940983 - DNA, 120 bp, Artificial Sequence
  ENSG00000247373_11 (sequence is synthesized)
cctactcatccctcagaacccaaatgtcacctcttatctctaaaatgttccttgacatccttctgccaaatactagccccttcctctctgtttacaatgcagattcggtcctagtgaatt

SEQ ID NO: 940984 - DNA, 120 bp, Artificial Sequence
  ENSG00000247373_12 (sequence is synthesized)
actgttattttctactctgcctcactcatgaaggcacaagacttgatttacatacgctgtcctcttcaggccctgccacagggccacagaaggacctcacacatttcatgtcaattgagg

SEQ ID NO: 940985 - DNA, 120 bp, Artificial Sequence
  ENSG00000247373_13 (sequence is synthesized)
tcactggactgacctgggaatgaggagcctgggttgttactccacttttgcacatagatgtgtgaccttgattattttccaccacgtcctggcctcggtttccttatctgttaaaaggga

SEQ ID NO: 940986 - DNA, 120 bp, Artificial Sequence
  ENSG00000247373_14 (sequence is synthesized)
atgacaccacaggccttgcaaaattgaagggattatttctttgaagaccaacaggcgatagggggcagtagtgtcccaggatccagtttcccgcttcaggtttcaagaaacaggagcagc

SEQ ID NO: 940987 - DNA, 120 bp, Artificial Sequence
  ENSG00000247373_15 (sequence is synthesized)
tgcagtgatgaagttttcccgactatgacagtgtacagttgaccttgaacaacgtgggggtttggggcaccgacccctgcacagtccaaaatcctggggtcttttttttaatttgacatg

SEQ ID NO: 940988 - DNA, 120 bp, Artificial Sequence
  ENSG00000247373_16 (sequence is synthesized)
agcccaaaaacttaactattgacagcatactgttgaccagaagccttaccaatgacagttgattagcattttgtttgtttgtttttcgtttttgttttgagatggaatctcgctctgttg

SEQ ID NO: 940989 - DNA, 69 bp, Artificial Sequence
  ENSG00000247373_17 (sequence is synthesized)
cacccgccaccatgccaggctaatttttgtagttttagtacagatggggtttcatctggccttccaaag

SEQ ID NO: 940990 - DNA, 120 bp, Artificial Sequence
  ENSG00000247373_18 (sequence is synthesized)
gccactgtgcctggccaatgacagttgattagcatattttgtatgttatatatattacatgctgtatccttacaataaaccagagaaaagaaattgttattaagaaaataataaggatga

SEQ ID NO: 940991 - DNA, 120 bp, Artificial Sequence
  ENSG00000247373_19 (sequence is synthesized)
gaaaatatatttactcttcatgtagtggaagtgactcatggtaaagctcttcatccttgtcatctttatgttgagtaggctgaagaggaggggaggaggaagggttggtcttgctgtctt

SEQ ID NO: 940992 - DNA, 120 bp, Artificial Sequence
  ENSG00000247373_20 (sequence is synthesized)
ggggggtggcagaagtggaagaagtggtggaggtggaaagagagaggcatgagaggcggcatacttggtgtaacttttatttatttatttatttttattgagatggagtctcgctctttc

SEQ ID NO: 940993 - DNA, 84 bp, Artificial Sequence
  ENSG00000247373_21 (sequence is synthesized)
ttatttatttatttttattgagatggagtctcgctctttcgccctggctggagtacagtggctcaacagactctcctgcctcag

SEQ ID NO: 940994 - DNA, 120 bp, Artificial Sequence
  ENSG00000247373_22 (sequence is synthesized)
tgtgagccacggtgcccagccaggtgaaaaaaatccatatataagcggacccatgcatttcaaacctgcgttgttcaagggttaactgtattattgaactgaagagttctactggtgatc

SEQ ID NO: 940995 - DNA, 120 bp, Artificial Sequence
  ENSG00000247373_23 (sequence is synthesized)
ccctacttccccatcttccagactggcagacatcctgctttccctggcaggtcagttctgtaatgtgactccagtgccgtcactggagggagacagcctagagcctcttcctctatcctt

SEQ ID NO: 940996 - DNA, 90 bp, Artificial Sequence
  ENSG00000247373_24 (sequence is synthesized)
cactggagggagacagcctagagcctcttcctctatccttaacaacacattgatacgcctgtttcccggatgtctctttcaactgataat

SEQ ID NO: 940997 - DNA, 84 bp, Artificial Sequence
  ENSG00000247373_25 (sequence is synthesized)
cttccaaagtgctgggattataggtaagagccactgcgcccaggctttttttttttttttaacttgagatggagtctcgctctg

SEQ ID NO: 940998 - DNA, 86 bp, Artificial Sequence
  ENSG00000247373_26 (sequence is synthesized)
tctgctgataatatctacagaggtttcctcttaaaccaatggatgcagccccttttgttttctatttttgtttgtttcctttgaga

SEQ ID NO: 940999 - DNA, 89 bp, Artificial Sequence
  ENSG00000247373_27 (sequence is synthesized)
gataatatctacagaggtttcctcttaaaccaatggatgcagccccttttgttttctatttttgtttgtttcctttgagacagggtctg

SEQ ID NO: 941000 - DNA, 120 bp, Artificial Sequence
  ENSG00000247373_28 (sequence is synthesized)
actgcagcctcacattcctgagctcaagcaatcctcccatctcaggctctgcagtagctgagaccacaggcacatgcacccacacccagctagtttttttgtttttgtttttgtttttgt

SEQ ID NO: 941001 - DNA, 120 bp, Artificial Sequence
  ENSG00000247373_29 (sequence is synthesized)
ccctatgttacccaggctggtctccaattcctgggctcaagcagtcccaaagcactgggattacagccgtcaaccaccactcctggcttttttttttttttttttttttgatacaaccct

SEQ ID NO: 941002 - DNA, 120 bp, Artificial Sequence
  ENSG00000247373_30 (sequence is synthesized)
ttttgacttcccaagcaacccaactgcagaagaaggccaagaacaattttgattttatctagaaattcaatgttaattttcggctttgaactgattaaataatagttctaagtccactta

SEQ ID NO: 941003 - DNA, 120 bp, Artificial Sequence
  ENSG00000247373_31 (sequence is synthesized)
gttctaagtccacttatcaaggaattaaaatgcggggctgggcgcagtgcctcatgcttgtaatctcagcactgtgggaggccaaaggggatggattgcttgagtccaagagttcaagac

SEQ ID NO: 941004 - DNA, 86 bp, Artificial Sequence
  ENSG00000247373_32 (sequence is synthesized)
taaataaataaataaataaatagtggacatttttaggatctcggcggaacacagtgaattgtatattgtagggttttattatataa

SEQ ID NO: 941005 - DNA, 120 bp, Artificial Sequence
  ENSG00000247373_33 (sequence is synthesized)
gaacacagtgaattgtatattgtagggttttattatataaatcgggactcaaattcaaatgccttcagggatcaggcagtttatatgaatcagagatggcactagcataggcagtaggag

SEQ ID NO: 941006 - DNA, 120 bp, Artificial Sequence
  ENSG00000247373_34 (sequence is synthesized)
cggggaggattgtggcaaactggatcataggatgtcatacctaaatacattcaattccaatgtctgaaaacacactggtagccaaaccaaagatgcagccagaagtcactaagtttatgg

SEQ ID NO: 941007 - DNA, 120 bp, Artificial Sequence
  ENSG00000247373_35 (sequence is synthesized)
tttacgttataaatgtaattgactatgttatctgaaatcagaaaagagataaaggtaactcaatcacagtactgtaaaatgattgctatcaactgcttgacgtatttcttttgacggctc

SEQ ID NO: 941008 - DNA, 120 bp, Artificial Sequence
  ENSG00000247373_36 (sequence is synthesized)
tagttttttgttcattggttttttggttagcattgttgtagctatatttactcatcaggtgtttttcaacattactgtttcaggatctgcagtcaaatttacccagaggatcccaggctc

SEQ ID NO: 941009 - DNA, 120 bp, Artificial Sequence
  ENSG00000247373_37 (sequence is synthesized)
agaggatcccaggctcttaggacttgacaggtcacccacagtaaaggtgcctttttttttttttttttttaagacagtcttactctgacactcaggctggagtgcagtggcgtgaccttg

SEQ ID NO: 941010 - DNA, 120 bp, Artificial Sequence
  ENSG00000247373_38 (sequence is synthesized)
caggcatgagccactgcacctggccaaatgtgcatttttaaggttatcaccacagattgattggcatgagctcatgtgccatcaggtgcatgaatcatccaacaggacaaacagctggca

SEQ ID NO: 941011 - DNA, 120 bp, Artificial Sequence
  ENSG00000247373_39 (sequence is synthesized)
aacaggacaaacagctggcacatggtgggtactccatacatatctgatggataatgaatgaacctcttaactgccgtctggcccagaactgaccaggtggtaatcagtggtcagtgaggt

SEQ ID NO: 941012 - DNA, 120 bp, Artificial Sequence
  ENSG00000247373_40 (sequence is synthesized)
gcaacatgaactgggccctctctgcttccctcccttttcatcctgccttattgagatacaattcatataccataaaatccatccttttaaagtgttatatggcagatgcggtggctcatg

SEQ ID NO: 941013 - DNA, 120 bp, Artificial Sequence
  ENSG00000247373_41 (sequence is synthesized)
gcaacagagcgagacttcgtctcaaaataaataaataaagtgttatacttcagtggtttctggtatattctcagagttgttcaaacatcaccactatctaatttcaaaacatcttattgc

SEQ ID NO: 941014 - DNA, 120 bp, Artificial Sequence
  ENSG00000247373_42 (sequence is synthesized)
cttattgccccaaaaaagaaaccctgtacccattagcagtcattccccaatccctcctctgcccagccctggcaaccactgtctactttctgttctgtggatttggagtagaatcatata

SEQ ID NO: 941015 - DNA, 120 bp, Artificial Sequence
  ENSG00000247373_43 (sequence is synthesized)
gtatgtggcctcttgtgactggcttccttctcttggcatgatgtttaaaggttcatctacattgtagtgtgtgtcaggatttcatttctttttgtggctgaatcatattccatggtatgc

SEQ ID NO: 941016 - DNA, 120 bp, Artificial Sequence
  ENSG00000247373_44 (sequence is synthesized)
atgcatgcaccacattttgtctacggatatttgagttgtttccacattttggctattattaatgctgctatacacatttggcagagtgcagtagctcacacctataatcctagcactttg

SEQ ID NO: 941017 - DNA, 61 bp, Artificial Sequence
  ENSG00000247373_45 (sequence is synthesized)
cctagcactttgggaggctgaggcaaacggatcaattgagtagccaggcatggtggtgcat

SEQ ID NO: 941018 - DNA, 81 bp, Artificial Sequence
  ENSG00000247373_46 (sequence is synthesized)
gacagtgtttcatcatgttggccaagctggtttcaaactcctgatctcaagtgagctgcccaccttgttctctcaaagtgc

SEQ ID NO: 941019 - DNA, 120 bp, Artificial Sequence
  ENSG00000247373_47 (sequence is synthesized)
caaagtgctgagattacaggcatgagcccctgcacccagcctgcataactttttttaaaaggcattgttgccttgttcccttgaatcactttctctgggaaactagctatcatgtcatga

SEQ ID NO: 941020 - DNA, 120 bp, Artificial Sequence
  ENSG00000247373_48 (sequence is synthesized)
ctttctctgggaaactagctatcatgtcatgaggacactcaagcagctctgggagagaccccctgtggctagaagctgtggattctcaccaacagccatgcaagattccccagccccagt

SEQ ID NO: 941021 - DNA, 120 bp, Artificial Sequence
  ENSG00000247373_49 (sequence is synthesized)
cgagccttcagatgaccacagccccagctgatatcttgactgcaatatcatgaaaaaccatgtgtcagaactgctcagacatgttgctcccaaattctggacctgcagaaaccatgaaag

SEQ ID NO: 941022 - DNA, 120 bp, Artificial Sequence
  ENSG00000247373_50 (sequence is synthesized)
acaataaatgattattgctgttttaggtcactatgttttgagctaacttcttacacagcaatagatactaatgcatattttaaccagtttcctacattaaaacctttctgttggaaagac

SEQ ID NO: 941023 - DNA, 120 bp, Artificial Sequence
  ENSG00000247372_0 (sequence is synthesized)
ggagtgtcccacagcctcagtgcctgacccgtgctcgtcctggctgtgatagtacagtaggaggcagtgataggaagcagaatcggagcgtgagggaaaacgcaggagacagagcccagg

SEQ ID NO: 941024 - DNA, 89 bp, Artificial Sequence
  ENSG00000247372_1 (sequence is synthesized)
tctcgcgagccttctggggacatgagcgcttagaagaaaaagtgctgatgcgtttcctgctcttcacctctcctccctaggcccgcacc

SEQ ID NO: 941025 - DNA, 120 bp, Artificial Sequence
  ENSG00000247372_2 (sequence is synthesized)
gtgtttccacctgcattaggccagcgcgatgttcgctcatgaaccaaagctatggaataaaaccagtgagccaaaggcagatacagatgaacacttgtggagttgtccctcttctggctg

SEQ ID NO: 941026 - DNA, 120 bp, Artificial Sequence
  ENSG00000247372_3 (sequence is synthesized)
tgaaaaatagatatttatttttggctgctagctctatttactcagtctagcaaactgcagagaagctccaaatgcagaacttatagggagtggagtgtttttttggcttcttcttgccaa

SEQ ID NO: 941027 - DNA, 88 bp, Artificial Sequence
  ENSG00000281501_0 (sequence is synthesized)
agttaaaccctggtgttcctgacacaaacttcaggaaaggattttgcacttgtgcagaccgggcgagcagagtaagaagagtggcatg

SEQ ID NO: 941028 - DNA, 86 bp, Artificial Sequence
  ENSG00000281501_1 (sequence is synthesized)
tcactgtgtcgcccaggctggagtgcaagtggcatgatcttggctcacaactgcaacctccgtctcccatatctgggattacaggt

SEQ ID NO: 941029 - DNA, 120 bp, Artificial Sequence
  ENSG00000281501_2 (sequence is synthesized)
accaactttagcttttcaaaatctgtcttcgtagacgataatggaaatatctaccaaagctaaatattcacctaccccatgacccagcaattttactcctaggtatatataccaaaaaaa

SEQ ID NO: 941030 - DNA, 120 bp, Artificial Sequence
  ENSG00000281501_3 (sequence is synthesized)
atgagtgttctgtgtccactagagatatgtgccaaagtgttcataatagatccaaactggaaacagctcaaatgtccatcaatagcagaaagataaacaaatgttgggatgttcagagct

SEQ ID NO: 941031 - DNA, 120 bp, Artificial Sequence
  ENSG00000281501_4 (sequence is synthesized)
tgaaatatgacacaatataaaaggacaaactattaaaactcacaacagcatggataaatcttacagacataattattgagcaaaagataccagaaacacaaaagtatatactgtctgatt

SEQ ID NO: 941032 - DNA, 120 bp, Artificial Sequence
  ENSG00000281501_5 (sequence is synthesized)
agataccagaaacacaaaagtatatactgtctgattcctttaaataaaggttaagatgattctccctcctgcagccttgtgaagaaggtgcctttcttccccttcgccttctgccatgat

SEQ ID NO: 941033 - DNA, 120 bp, Artificial Sequence
  ENSG00000281501_6 (sequence is synthesized)
tctcattgtccctgataaaatagcaccctctcttcctctgctcttccacccttttcctcttccgctgtgcaactgaagactgggaaagaatgacatgcaaaataagaggttttggattca

SEQ ID NO: 941034 - DNA, 120 bp, Artificial Sequence
  ENSG00000281501_7 (sequence is synthesized)
gcgtaggactaactactggatgctacttacagaaaactttatatttgtgctgaaaaatcttgttatctaggtgaaagccaatgctatcctaatgacaaaattgttggggaaataaattta

SEQ ID NO: 941035 - DNA, 120 bp, Artificial Sequence
  ENSG00000281501_8 (sequence is synthesized)
taagagactttatttaaagaaataaaagaaaaaataataaagcttaagacaaaaaactaatccattttggtagacatcagcacttacctctgagaaggaaaatggttactgatggggaag

SEQ ID NO: 941036 - DNA, 120 bp, Artificial Sequence
  ENSG00000281501_9 (sequence is synthesized)
tgggaggcataagggaatcttctgggtgatgaaaatgttctatttcttgatctgaattgtagttacttgggtttagacatatgcttaaaaatcgtcaagttatgtgtttaaaacatgtgc

SEQ ID NO: 941037 - DNA, 120 bp, Artificial Sequence
  ENSG00000281501_10 (sequence is synthesized)
accttacagtatataagccacacttcaatttttttaaaggtccccacaacattgttgttttcaaggaagtacaggaaatatcttttactctgtgttaattcagggaagttatctccataa

SEQ ID NO: 941038 - DNA, 120 bp, Artificial Sequence
  ENSG00000281501_11 (sequence is synthesized)
gtgctttacaaaataatcttcataatatagtagcaccattaagtaggcattattatctctgtatcacaaatgcacaatatgagagtcagagaggttaagttattttccaaagtcacacag

SEQ ID NO: 941039 - DNA, 61 bp, Artificial Sequence
  ENSG00000281501_12 (sequence is synthesized)
gagagtcagagaggttaagttattttccaaagtcacacagctaatcaatggcaaagttagg

SEQ ID NO: 941040 - DNA, 77 bp, Artificial Sequence
  ENSG00000281501_13 (sequence is synthesized)
gtgtgatttcagctcactgcaaccttcgcctcccagctcaggtgtgcaaccaccacacccagttaatttttgtattt

SEQ ID NO: 941041 - DNA, 85 bp, Artificial Sequence
  ENSG00000281501_14 (sequence is synthesized)
tcggccaaagctaggatttgaatataagtttgtctgaccctcaaaacccatgctccttcctctgtgttagccaacttcctgcata

SEQ ID NO: 941042 - DNA, 84 bp, Artificial Sequence
  ENSG00000281501_15 (sequence is synthesized)
tcatggaaagaatcattaacgcaacccaggaatgctctcccggagtgtggctatatctagagaaattgtggaaagaggccaggc

SEQ ID NO: 941043 - DNA, 120 bp, Artificial Sequence
  ENSG00000281501_16 (sequence is synthesized)
ccaacttggacaacatagtgagaaccctttctctattcaaaaaaaagaaagaaagaaagaatttgcctaaatagaacagaaaaggctgtatgtgcaagacagttactgcaggttttataa

SEQ ID NO: 941044 - DNA, 120 bp, Artificial Sequence
  ENSG00000281501_17 (sequence is synthesized)
tagtaaaaagctagaaaaaaactaattattcaacagtacataattaagcaaattaaaatacatatattcaataggatattaagcagccattaaaagtcatacttaagaaagcttatgata

SEQ ID NO: 941045 - DNA, 120 bp, Artificial Sequence
  ENSG00000281501_18 (sequence is synthesized)
taattttcactgaggtaaaactgaataaaagttgcatgtactttaagaatacaaccacgaaaaacaaagctttttaaacttatgcacagagaaaggaaaggccagaaagtgtttgtatgt

SEQ ID NO: 941046 - DNA, 120 bp, Artificial Sequence
  ENSG00000281501_19 (sequence is synthesized)
tatgcacagagaaaggaaaggccagaaagtgtttgtatgtaaagaccattagtatgtgttgtctgtgatttttttcagctgtgttttgtagcttttccttgtagaggtctttcacctcct

SEQ ID NO: 941047 - DNA, 76 bp, Artificial Sequence
  ENSG00000281501_20 (sequence is synthesized)
tggttaggtatattcctaagtatctttttttttgcagctatcgtaaaaggggttgcattattgatttgattctcag

SEQ ID NO: 941048 - DNA, 120 bp, Artificial Sequence
  ENSG00000281501_21 (sequence is synthesized)
ggtaaacaatcatatcatcagcaaacagcgacagtttgacttcttctttaccaatttggatgccctgtatttcattctcttgtctgattgctcaggccaggacttccaatactatgttga

SEQ ID NO: 941049 - DNA, 85 bp, Artificial Sequence
  ENSG00000281501_22 (sequence is synthesized)
ttcttctttaccaatttggatgccctgtatttcattctcttgtctgattgctcaggccaggacttccaatactatgttgaggagg

SEQ ID NO: 941050 - DNA, 60 bp, Artificial Sequence
  ENSG00000281501_23 (sequence is synthesized)
aagagaactcagaaataaacccaaatacttacagccaattgatctttgacaaagcaaaca

SEQ ID NO: 941051 - DNA, 62 bp, Artificial Sequence
  ENSG00000281501_24 (sequence is synthesized)
catagaccaatggaacagaaaagagaactcagaaataaacccaaatacttacagccaaaatg

SEQ ID NO: 941052 - DNA, 87 bp, Artificial Sequence
  ENSG00000281501_25 (sequence is synthesized)
caactcaagatggattaaggacttaatctaagacctgaaactacaaaaattctagaagatatcattggcaaaacaaccaagaaccta

SEQ ID NO: 941053 - DNA, 120 bp, Artificial Sequence
  ENSG00000281501_26 (sequence is synthesized)
gcttaggcaaggatttcataaccaagaacctaaaagcaaatgcaataaaaccaaagataattgctgggacttaattaaactaaggagctttctcatggcaaaaagaacagtcagcagagt

SEQ ID NO: 941054 - DNA, 120 bp, Artificial Sequence
  ENSG00000281501_27 (sequence is synthesized)
aaagagacaacccacagagtgggaaaaaaccttcacaatctatatgtctgacaaaggactaatatccagaatctataaggagctcaaacaaattagcaagaaaaaaaaaatgatcccatc

SEQ ID NO: 941055 - DNA, 63 bp, Artificial Sequence
  ENSG00000281501_28 (sequence is synthesized)
aagatatacaaatggccaacaaacataaaaaaatgccctcctgcaagaatggccataatctaa

SEQ ID NO: 941056 - DNA, 75 bp, Artificial Sequence
  ENSG00000281501_29 (sequence is synthesized)
caaaaccacaatgtgataccactttactcctgcaagaatggccataatctaaaaatcgaaaaatggctggtggga

SEQ ID NO: 941057 - DNA, 120 bp, Artificial Sequence
  ENSG00000281501_30 (sequence is synthesized)
ttagccccgccccgctgcggctgattcgtctagttaaaccctggtgttcctgacacaaacttcaggaaaggattttgcacttgtgcagaccgggcgagcagagtaagaagcaggtcccgc

SEQ ID NO: 941058 - DNA, 120 bp, Artificial Sequence
  ENSG00000281501_31 (sequence is synthesized)
aacttgtctggaaggcccaataaaaagctgattcatggaggaatgcaattgtcacatcctaatgatttcatctcccttaccccaacgaatcgataaccccaaattttccagcccctcacc

SEQ ID NO: 941059 - DNA, 120 bp, Artificial Sequence
  ENSG00000281501_32 (sequence is synthesized)
ctccacaaatccccttaaaaaactttgcctagaaccccttgatgaaatggattgaagcttgagaactcttcctgtttcctggcttgtaacttgtgattattaaaactttctctgctgcaa

SEQ ID NO: 941060 - DNA, 120 bp, Artificial Sequence
  ENSG00000262529_0 (sequence is synthesized)
gctctttcttaaaggctgtatctaacatatggatgtattattcatatacttaagctaccaggttttttgctattacaaataatgctataatgaatatcctcattcattttgggggcatcc

SEQ ID NO: 941061 - DNA, 120 bp, Artificial Sequence
  ENSG00000262529_1 (sequence is synthesized)
ttgataaggtcactttgccttccaaatggttgtgccaatctgtagtccagcttacaaggtgatggaatcaggataaccacagcagccccacgaacactttcctggttattctatcccagg

SEQ ID NO: 941062 - DNA, 120 bp, Artificial Sequence
  ENSG00000262529_2 (sequence is synthesized)
aaataaacatcctcctgtgaaatagtatttaccaattagaagcagcaatcagaaaaggaagagcagcctgaagtggcagatgataaaaatcaaacaataaataacaatttgagtaatcta

SEQ ID NO: 941063 - DNA, 120 bp, Artificial Sequence
  ENSG00000262521_0 (sequence is synthesized)
cgcagacggacgggcctgaatcgttcgccttgcggtcggtcctatcaccctgaaatgggatccagcatcccatcaccctgaaatgggatccagcactaccaactgcggtagccgtggtta

SEQ ID NO: 941064 - DNA, 120 bp, Artificial Sequence
  ENSG00000262521_1 (sequence is synthesized)
tcgacggtatggcggctccagtctcagatctcacagaatttcctacacaaagaaatttgcaaggaaaatggacattgcaccctaaaaattaacaaggaaagaaggtaccaggagcaacaa

SEQ ID NO: 941065 - DNA, 120 bp, Artificial Sequence
  ENSG00000262521_2 (sequence is synthesized)
ctcattaacaggaacagaaacaatattgcaaatatttcagatgcaaagtgtatccgacttataatacaactgtccctactgtgtctaaagaaatgaaaggcaataaagaaaatatctttg

SEQ ID NO: 941066 - DNA, 120 bp, Artificial Sequence
  ENSG00000268520_0 (sequence is synthesized)
actggactgaagatggtgactgtctgtccatgtctgtccttcccatcagcctggggacttacctccgtgtccccagcattacctagcgcagggcctggcaccctggaggcctcagggtgg

SEQ ID NO: 941067 - DNA, 120 bp, Artificial Sequence
  ENSG00000268520_1 (sequence is synthesized)
cagccagcatttagcgggtacttacgtggcaggcatcgttccaagtcctttgcagagattaacccattcagtcctttcagtaccctttgtattatttattatttatttttattttttgag

SEQ ID NO: 941068 - DNA, 120 bp, Artificial Sequence
  ENSG00000204055_0 (sequence is synthesized)
gaagccctgattccttggagaaaggcttgcagcccctctccttcctggattgcacacctccagccctggcagcctgtcccctggttggcacccagcagcaggccacagatggcttctggc

SEQ ID NO: 941069 - DNA, 120 bp, Artificial Sequence
  ENSG00000204055_1 (sequence is synthesized)
tgtcccatggcgtcgcatcagggcatgcagcggatagtgactcacactggcacctcttctgcttggaaaatgccctacacatccatcatctttggtttttctgctagaacgatggcatga

SEQ ID NO: 941070 - DNA, 120 bp, Artificial Sequence
  ENSG00000204055_2 (sequence is synthesized)
cccatcgtggcacttcccttgttgcagttttatggagtgtgcgtctggctctccaactagacttgaaccgcttgagtgcataactcgggacttgaccatttgcgtctccctacggccagc

SEQ ID NO: 941071 - DNA, 120 bp, Artificial Sequence
  ENSG00000204055_3 (sequence is synthesized)
tcagcctccgcacacagggacctgcagagagtggatgtagccactgccccagcgtccctgggctctgaagagaagccattgcccttcaagagccaccctcatttcctgggcactggttgg

SEQ ID NO: 941072 - DNA, 120 bp, Artificial Sequence
  ENSG00000204055_4 (sequence is synthesized)
ccctttgccgagtctttgtctggccccagccccgcggggccccgggtccctgtgccctcgggggtccctagaaggcgacaatggctcgagtccaggcgccgaggctggcgagcgcctgct

SEQ ID NO: 941073 - DNA, 120 bp, Artificial Sequence
  ENSG00000204055_5 (sequence is synthesized)
tggcgcacagctgcccgttgagcggcggcggctgctccgaggagtccggctgtcggctcaccagccccgagaagccggagccaaagatggagatcaagtttgagatgttggacgcgtccg

SEQ ID NO: 941074 - DNA, 120 bp, Artificial Sequence
  ENSG00000204055_6 (sequence is synthesized)
gggacgagtccgggcagaagtcctcgaagcgggcgcgcttgcagggggcgaacggggcgcccccggggggctcggcccccagcccgcccgcatcctcctcgtcgtcttcctcctcctcct

SEQ ID NO: 941075 - DNA, 120 bp, Artificial Sequence
  ENSG00000204055_7 (sequence is synthesized)
caagtttgcctgcaggtgaatatcttgttgaaagagaggggactccctgagtcttgctgggttgaggaagctgattggatttccggactcagaggagggctgcagagagggaggaatggg

SEQ ID NO: 941076 - DNA, 120 bp, Artificial Sequence
  ENSG00000204055_8 (sequence is synthesized)
ggggatgggcagctggctttctggatgggtgcaggacaatgacattgatggggaagcttggggtggctctgccgttgcccactgcttggctggtgaacttgctacatcttggccagcact

SEQ ID NO: 941077 - DNA, 120 bp, Artificial Sequence
  ENSG00000204055_9 (sequence is synthesized)
tctggcctgcaccctgccagacacaggcagtaccccaaataccctgtccctgtgccccgaagtctccatgaccttcagatcccaagggacaagtggctccacgaggcagggcctgtccct

SEQ ID NO: 941078 - DNA, 120 bp, Artificial Sequence
  ENSG00000204055_10 (sequence is synthesized)
ctggctcacactatggagtccacagaacctagcccggagcctagtgcacagtaggtgctcaatgtattctatttgaatgttgcatgagtgaataaatgcaggaatgtcaggctggaaaac

SEQ ID NO: 941079 - DNA, 120 bp, Artificial Sequence
  ENSG00000204055_11 (sequence is synthesized)
aggtatttgtacacctgttttcatagcagtgttattcacagtagtcaaagggtggaagcatcccacgtgtctgctgatgggtgaacgagtaaacagaatgtgccccagccatacaatgga

SEQ ID NO: 941080 - DNA, 120 bp, Artificial Sequence
  ENSG00000204055_12 (sequence is synthesized)
tacaggcgtgagccacggcgcccggccacgattcacccttaaaaaaggaaggacattctgacacatgctacgacttgggtgaaccttgagtacctgagtgaaataagcccatcaaaaaag

SEQ ID NO: 941081 - DNA, 120 bp, Artificial Sequence
  ENSG00000204055_13 (sequence is synthesized)
aaggacattctgacacatgctacgacttgggtgaaccttgagtacctgagtgaaataagcccatcaaaaaaggacaaatattagccaggtgctgtggctaatgcctgtaatctcagcact

SEQ ID NO: 941082 - DNA, 120 bp, Artificial Sequence
  ENSG00000204055_14 (sequence is synthesized)
attgctcaataccagcctgggccacaaagcaagaccacccatgtgaggtgtttagagtagtcaaattcatagagacagtaggatggggagtgccaggagctggggagaagggggaatggg

SEQ ID NO: 941083 - DNA, 120 bp, Artificial Sequence
  ENSG00000204055_15 (sequence is synthesized)
gagttagagtttaatggggacagattttcagttttacaagatgaaaaatgttctggagatgatggtggtgatagaggcacaatgtggatatgcttcatgccactgaactggacctaacca

SEQ ID NO: 941084 - DNA, 120 bp, Artificial Sequence
  ENSG00000204054_0 (sequence is synthesized)
aggagagaaaattgcgggtcacgttgcctggtgcacagtgaccgttccgcacacggtgggtcttcttgttcctttgaatagtgctttcttagtattatgctactactaacaatttttaaa

SEQ ID NO: 941085 - DNA, 120 bp, Artificial Sequence
  ENSG00000204054_1 (sequence is synthesized)
aaaaaattggaggaatgagatgtgggaacgcagaagaagtccacgtggaggactcaggagagcagcagctgctggacttggcgttgaccttgaggcgcagtaacaatataattaccgtat

SEQ ID NO: 941086 - DNA, 120 bp, Artificial Sequence
  ENSG00000204054_2 (sequence is synthesized)
gcagtcccccaggatacagggtcaaaggagagcacaaccatcgcagttggaagcccatggggcagaagcaaggtctcgctgtgttaccctggctggagtgcagtggctacttacaggcat

SEQ ID NO: 941087 - DNA, 86 bp, Artificial Sequence
  ENSG00000204054_3 (sequence is synthesized)
aggcagacacgcaccacagagcccagcctgagtcattttgattctgtaactggcttcctctcggcgggcaggctcacaccctccac

SEQ ID NO: 941088 - DNA, 120 bp, Artificial Sequence
  ENSG00000204054_4 (sequence is synthesized)
taactggcttcctctcggcgggcaggctcacaccctccacccccagctggagatggaaggaggatgctcaccgcccattcctcatgcaggccatcgatggaaatgtcagacagtgcgagt

SEQ ID NO: 941089 - DNA, 120 bp, Artificial Sequence
  ENSG00000204054_5 (sequence is synthesized)
gagctcccgcctgccacctctgggcctgcattgcggtgatagggccaagggcctgggccttcaattctccagacttgccaaaatgctcagcgcaggcctcgtcggcaactgcagacaagc

SEQ ID NO: 941090 - DNA, 120 bp, Artificial Sequence
  ENSG00000204054_6 (sequence is synthesized)
agaggcagcacctgggctctgcctgtgcctggcacagtgaagcgagggtgggggcaggaatgagggtcctctccatgcaaggggggaagatagaagaacaaaatttcaccctaatgtagt

SEQ ID NO: 941091 - DNA, 120 bp, Artificial Sequence
  ENSG00000204054_7 (sequence is synthesized)
gtctttagaccgtgcaatgttgtgctcctgttagtctgatatcaggggcttgcagcctggcaaaggaaaaaaaacaggctgaggcacatgatagaagacaggcagggatgccacaatcat

SEQ ID NO: 941092 - DNA, 120 bp, Artificial Sequence
  ENSG00000204054_8 (sequence is synthesized)
aaccatggcaaagaccaggatcagaaaggcccaccatctctgaccccaaatccctgggcagatggttccagaactcagaattttcccagttgtagaaagatggggccaggtgcagtggct

SEQ ID NO: 941093 - DNA, 120 bp, Artificial Sequence
  ENSG00000204054_9 (sequence is synthesized)
cagggtcaaaggagagcacaaccatcgcagttggaagcccatggggcagcagggcccaggacacagtgagcatacaatagacattagctgctgtggtgtcttgatttcaagcccagtgca

SEQ ID NO: 941094 - DNA, 120 bp, Artificial Sequence
  ENSG00000204054_10 (sequence is synthesized)
gatgcatctgacttacgaaacttcagtgacacctgctctgtgccagacactgaagatggagcagtgaacagcactgacccagcctgtcctcctgttgcctgcaggccagaagcaaggtct

SEQ ID NO: 941095 - DNA, 120 bp, Artificial Sequence
  ENSG00000204054_11 (sequence is synthesized)
tttcattgattctatgagaagtctgcagtcttttgcagcgttgttttcctatgtataattgtctcctcccaccccactcaccccagctgctttccacattctctctctttgattttcagc

SEQ ID NO: 941096 - DNA, 120 bp, Artificial Sequence
  ENSG00000204054_12 (sequence is synthesized)
agtctgcccatgatgtgcctaaataggactttctttgcattcatcttggctggggctcactgaactttctgaatctgtagattaattttcttttttcaataaaccttggaatattttcag

SEQ ID NO: 941097 - DNA, 61 bp, Artificial Sequence
  ENSG00000204054_13 (sequence is synthesized)
ccatgttggccaggctggtgtcgaactcccgacctcaggtgattggggcagccagttgtgt

SEQ ID NO: 941098 - DNA, 120 bp, Artificial Sequence
  ENSG00000204054_14 (sequence is synthesized)
cagccggtgggcagccagttgtgttccgggaggaggaggacaccctggaaagacagtggggccagacactgaactgcctttggaagcaagtaggagcaacagcgaaggtttgctggctca

SEQ ID NO: 941099 - DNA, 120 bp, Artificial Sequence
  ENSG00000204054_15 (sequence is synthesized)
gctggcctgcggcgtctgtttgtgcagagcgaggccccgccggccgggcttgacgtcaggctggcagggcctggaacggccccgcatcgcggccccctgggggcaggacgacaccgctgg

SEQ ID NO: 941100 - DNA, 120 bp, Artificial Sequence
  ENSG00000204054_16 (sequence is synthesized)
gggccgagggcagggcacgccttcggaatccggcttcgaagccggccgcctgacctggggcaagtgctttcaactctctgaacttcggttcctcatctgccagttggcagacgctcagca

SEQ ID NO: 941101 - DNA, 120 bp, Artificial Sequence
  ENSG00000204054_17 (sequence is synthesized)
aatcttcctagactcacggggcgaattgtacagttgggtaaatcgaggcccagagatggcaaaaggaccgtccaaggtcgtacagccacccggaattacaattcttttctgccgggtcac

SEQ ID NO: 941102 - DNA, 120 bp, Artificial Sequence
  ENSG00000204054_18 (sequence is synthesized)
acgctgtcatccacgtgttacctaagagagctttccagcctgtgctaagaaaactgccccacatcatctgcagtaggacgggggagttggagccctggtcaggccactctgctactgacc

SEQ ID NO: 941103 - DNA, 120 bp, Artificial Sequence
  ENSG00000204054_19 (sequence is synthesized)
ggaagaagaaaggaaggaggcgagggagaaggactcagagaaaagaggagaggaaaagagaggagaggagaggaaagaaaagcaaggtctcgctgtgttaccctggctggagtgcagtgg

SEQ ID NO: 941104 - DNA, 120 bp, Artificial Sequence
  ENSG00000204054_20 (sequence is synthesized)
agccctgcgtgggcagagaggagggaacagtccatctattctaggctggacgtgagagggaggacggccttggctcaacccggggcgcagtaacaatataattaccgtatgcagtccccc

SEQ ID NO: 941105 - DNA, 120 bp, Artificial Sequence
  ENSG00000204054_21 (sequence is synthesized)
caaggtctcaaacacccctcccctgtttctggcaggagccgtcctcactccctctattgcctctccagacccagacttcaccctcaggtcaccctcacctggactttggggtgccccaca

SEQ ID NO: 941106 - DNA, 120 bp, Artificial Sequence
  ENSG00000204054_22 (sequence is synthesized)
ccccgccccaggccctggcctctggaatatttggaaacttgaactgggccagaggcttaagctcacatctgtctggagcctcaactttctcctctgtaaaatgggctaacactgaaagaa

SEQ ID NO: 941107 - DNA, 120 bp, Artificial Sequence
  ENSG00000204054_23 (sequence is synthesized)
ccttgcagaatctcagcaacgtcacagaggacattgttagcacagccagcgggctcctgctgggctgagtttgtgggtaatccaagcctcggcaggtacagttcctccctcagcagggcc

SEQ ID NO: 941108 - DNA, 61 bp, Artificial Sequence
  ENSG00000204054_24 (sequence is synthesized)
tccgggcgacagagcaagagtccattcccccaccaccaaaaaaaaaaaaaaaagaaagaaa

SEQ ID NO: 941109 - DNA, 120 bp, Artificial Sequence
  ENSG00000204054_25 (sequence is synthesized)
gatcaccttcaccgtatgactctagacaatccctgtccactcttcagttttagatgccccattcaaagaatgaaagaattgtcctagatgatcctttagggtcttccaggctgatgacaa

SEQ ID NO: 941110 - DNA, 120 bp, Artificial Sequence
  ENSG00000204054_26 (sequence is synthesized)
gggggacctggcccctctgctgctggccaaagaggactttacttcccattccgtgtggttgaacaagaattgctgggctccagtcctgcctttggcccttccctacatgtgaccttgggc

SEQ ID NO: 941111 - DNA, 120 bp, Artificial Sequence
  ENSG00000204054_27 (sequence is synthesized)
ttttctcatctctacaatggggcagtgatggcatgcacctcccagggctgttctgagaatctgatgcctcccattgcactggtgagcctggcacaggcacaggtcccaccccaggccctt

SEQ ID NO: 941112 - DNA, 120 bp, Artificial Sequence
  ENSG00000204054_28 (sequence is synthesized)
tgaactggctgttcctttggcctggaacattcctccccagatacctcctgagagggctccctcacttccttcaaggcactgctcaaatgctacctcttcacagaggctttccctgaccac

SEQ ID NO: 941113 - DNA, 120 bp, Artificial Sequence
  ENSG00000204054_29 (sequence is synthesized)
cccgtctctttcctcttcctgcatagcctctgtcacctgacattttatgtcataaattactcatttattaatttcctgctctcccacagtggcacccgagctctgtgagggcaagacttt

SEQ ID NO: 941114 - DNA, 120 bp, Artificial Sequence
  ENSG00000204054_30 (sequence is synthesized)
gttcggttgtgggctatgcccccaacccctcggacagtgcctgcacaggtggacatttttgttggatgaaggattttctgttaaatgtgtctggcacacacagaaaaacaaagcccagca

SEQ ID NO: 941115 - DNA, 120 bp, Artificial Sequence
  ENSG00000204054_31 (sequence is synthesized)
ggtacgatggtgattattattgttactggtggcgctctattattgttattagtgtctgttgaaaaagaccctgagctataccagcccttggttctccagcctgtgaaatgggcatcctgg

SEQ ID NO: 941116 - DNA, 120 bp, Artificial Sequence
  ENSG00000204054_32 (sequence is synthesized)
gcactgaggcactagccttgggaagctgatagggggtccctgcaggagagacaaagaacactgcccacccccccgggggagcctgcgcccctcaccggaaagagaagcaggggggagcag

SEQ ID NO: 941117 - DNA, 120 bp, Artificial Sequence
  ENSG00000204054_33 (sequence is synthesized)
agggagcttgcagccccacacgcagggctgccagaaggccatacataattcattgccaaatggggctgcgggcggctctccgcggcgtgcgctgggggctcactctgcgcctggcacttc

SEQ ID NO: 941118 - DNA, 120 bp, Artificial Sequence
  ENSG00000204054_34 (sequence is synthesized)
gctgactgcgcctcacacgttgcctcattgcatcttcatggatttgcagggtgtgacccttccccctgttttacccagggggatcctgaggctcagaggatggggccaccgtgctagtca

SEQ ID NO: 941119 - DNA, 120 bp, Artificial Sequence
  ENSG00000204054_35 (sequence is synthesized)
cacagcctctctgtggccaagctgggcctcgggccagcagattcggcccccagcggcccccattcactgcctctctgctgagggaaaagacgggcctggggagcgggtgggaggcacaaa

SEQ ID NO: 941120 - DNA, 120 bp, Artificial Sequence
  ENSG00000204054_36 (sequence is synthesized)
ggagaccccgctctgagacaggctgcagaagagggagctgggtctcagcagggctggggaaggctctggccccagccctccgcccaaccccctgccctcctctcctggaggagatgctcc

SEQ ID NO: 941121 - DNA, 120 bp, Artificial Sequence
  ENSG00000204054_37 (sequence is synthesized)
ccaaattagccatcatgagcgctggctctgggggttgggcgttggggagcagtttgctcagctgtaaaatgggaataacagaagccgtccctgggactatgagatcaaggtgctcaagaa

SEQ ID NO: 941122 - DNA, 120 bp, Artificial Sequence
  ENSG00000204054_38 (sequence is synthesized)
gagatcaaggtgctcaagaaaagtggtgtctgctgaggggaaaagccagtcccaaaaggttgcatactctcattctgtttatttgtttttgtttttgagacagggtctcgccctgtcacc

SEQ ID NO: 941123 - DNA, 68 bp, Artificial Sequence
  ENSG00000204054_39 (sequence is synthesized)
cctgggctcaagtgatcctcccatctcagaccctcaaggagctggggctacaggcacgtgccaccgtg

SEQ ID NO: 941124 - DNA, 120 bp, Artificial Sequence
  ENSG00000204054_40 (sequence is synthesized)
actcctgagctcaggtgatccgcctgccttggcctgcgataaaattgcacagaagtaaatacacacacgtgaggatacggaaaaccggggaaacctgagcaagagcagtcagaccccggc

SEQ ID NO: 941125 - DNA, 120 bp, Artificial Sequence
  ENSG00000204054_41 (sequence is synthesized)
aaaaccggggaaacctgagcaagagcagtcagaccccggctgtgatggcgcccagtagttctgcgagatgttaccattggggaaactgagtgaaggcgggtacctgggatccctctgttt

SEQ ID NO: 941126 - DNA, 120 bp, Artificial Sequence
  ENSG00000204054_42 (sequence is synthesized)
actgagtgaaggcgggtacctgggatccctctgttttcttttttgttgttgttgttattttgagatgaagtttccctcttgttgcccaggctgggtgatccacctgcctcggcctcccaa

SEQ ID NO: 941127 - DNA, 86 bp, Artificial Sequence
  ENSG00000204054_43 (sequence is synthesized)
ttttatttcttataactgtacaggaatctacaatgattgtaacaaaaatttcaattaaggccactctaggcacatggcctgtgggg

SEQ ID NO: 941128 - DNA, 120 bp, Artificial Sequence
  ENSG00000204054_44 (sequence is synthesized)
aatttcaattaaggccactctaggcacatggcctgtggggtagccctgctcaacaagaagccgtcaaaaaaatgttttttaattaaaaaatttcttcaattaaaaagcgttatcttcctc

SEQ ID NO: 941129 - DNA, 120 bp, Artificial Sequence
  ENSG00000204054_45 (sequence is synthesized)
tgcccggaaagggttaagtgagtcactgcagttagctccccttcccccacaaccacctagaccaggccagggaccagcgggcaattgcctggcagctggagttttcctccactgtggact

SEQ ID NO: 941130 - DNA, 120 bp, Artificial Sequence
  ENSG00000204054_46 (sequence is synthesized)
gtacttcttgcgtcactctgaatgtctccagtctttattccagaatgttctggtcctctcccacttttccaaggacaggaattccctagtggggctccagaagaggctctggaggagaac

SEQ ID NO: 941131 - DNA, 120 bp, Artificial Sequence
  ENSG00000204054_47 (sequence is synthesized)
aagaaaggcccttgtcatccattggcctcaggctgggaaatctcggttccactcccagcccagcctcaatattaggttgtcagtctggagtctgagagccatgcccccacccccttagtc

SEQ ID NO: 941132 - DNA, 120 bp, Artificial Sequence
  ENSG00000204054_48 (sequence is synthesized)
ccccacccccttagtccttcacctccaggagagttggggatactggaaagaatgttgagtgtcagagcccctctcagtggctcacgcctgaaatcccagccctttgggaggctgaggcag

SEQ ID NO: 941133 - DNA, 120 bp, Artificial Sequence
  ENSG00000204054_49 (sequence is synthesized)
agtgagctgagatcacaacactgcactcaaaaagtagttaattaatttagtttaattaaaaaagaatattgagtgtcaggcaatctgggtagaacccattgtgtttctacaggatagaat

SEQ ID NO: 941134 - DNA, 120 bp, Artificial Sequence
  ENSG00000204054_50 (sequence is synthesized)
tcaatacagtgagagagttaacacaagctcaggttagtaagtcattcaacaaacatttactgagcgcttatcaaatactgcatgctggagtggacactggagaaaaaggtgaggagaagg

SEQ ID NO: 941135 - DNA, 85 bp, Artificial Sequence
  ENSG00000204054_51 (sequence is synthesized)
catgctggagtggacactggagaaaaaggtgaggagaaggccgggcgcagtggctcgtgactgtaattccagcactttgaggggc

SEQ ID NO: 941136 - DNA, 120 bp, Artificial Sequence
  ENSG00000204054_52 (sequence is synthesized)
gactctgtctcaaataaataaataaagtgaggagaaaaaaataccatctctgtcttcacagaacttatagtttgagaggggagaatcccacaagtaaattataaatctcagctgagatta

SEQ ID NO: 941137 - DNA, 80 bp, Artificial Sequence
  ENSG00000204054_53 (sequence is synthesized)
tcttcacagaacttatagtttgagaggggagaatcccacaagtaaattataaatctcagctgagattatgcaaagaagca

SEQ ID NO: 941138 - DNA, 120 bp, Artificial Sequence
  ENSG00000204054_54 (sequence is synthesized)
gggatggtggtttcagaggccacagtgggagcttcccagagaagggatgattgagctaagtctaagcaaaaggggtggtcagggcagcagctgctccaaaacaggggctgggggcttatg

SEQ ID NO: 941139 - DNA, 120 bp, Artificial Sequence
  ENSG00000204054_55 (sequence is synthesized)
tggagagagaagacatggagagaccatgcccagaaggaggcggcggcttcagtgaacagtgcaggggagcaggtccgaggaggccgcctaccaggggaaggagtctcatctccatcctag

SEQ ID NO: 941140 - DNA, 120 bp, Artificial Sequence
  ENSG00000204054_56 (sequence is synthesized)
acaaaaaaaggatcttttgagatgcattaagcaggggagtcacagattggatttgtgttttgagaatctcctgcttacctagagaagaagggcatctcctgggccctcactgttgcctta

SEQ ID NO: 941141 - DNA, 120 bp, Artificial Sequence
  ENSG00000204054_57 (sequence is synthesized)
aatgatttttattgtgtattacttaaacatgtgcaagcataaaatgagatataaactccttgtagctcttatacaagcatcagaccaagacaaattgacccatcacgtacaaaatcgatt

SEQ ID NO: 941142 - DNA, 120 bp, Artificial Sequence
  ENSG00000204054_58 (sequence is synthesized)
caaatcagattaattttatgtgacatgttattatgccttttgtctgaaaccctgccaccacccacagtgcaattatggcccaaccactgtggtgttctgaatttgtgggacagagaatat

SEQ ID NO: 941143 - DNA, 120 bp, Artificial Sequence
  ENSG00000204054_59 (sequence is synthesized)
tggccttttaaacacgtgcatgcatgcatttgcgtgtgcgcacacacacacatcccaaatgattttttcccactatatatgaagaactcctacaaaccaaaaagaaaaaggcagacaatt

SEQ ID NO: 941144 - DNA, 120 bp, Artificial Sequence
  ENSG00000204054_60 (sequence is synthesized)
caagagaaaaatgggggagggcttgcattaaagtacttcataacaagagtacttaggaggccaacaaatacacgaaaagctgctagcttcatgactcatgggggtggcttggtcagttca

SEQ ID NO: 941145 - DNA, 87 bp, Artificial Sequence
  ENSG00000204054_61 (sequence is synthesized)
tgctagcttcatgactcatgggggtggcttggtcagttcaggatactgtaacaaaataccttagactgggaaatttataaacaacgg

SEQ ID NO: 941146 - DNA, 120 bp, Artificial Sequence
  ENSG00000204054_62 (sequence is synthesized)
ttccctgcttcaaacatggcaccttcttgctgtatcctcacatggtggaagggggaagacagttctctggggcctcttttataagggcagttatccaattcacaaggatagagccctcat

SEQ ID NO: 941147 - DNA, 120 bp, Artificial Sequence
  ENSG00000204054_63 (sequence is synthesized)
gacctaatcacctttcaaagatccccatcttctaacaccttctaacaccatcaccttggtgattaggtctttttgttgttgttgttgttgagatggactctcactctgttgcctaggctg

SEQ ID NO: 941148 - DNA, 120 bp, Artificial Sequence
  ENSG00000204054_64 (sequence is synthesized)
cacccagccgattaagtcttaacgtatgagtttttgggagaaactcaaacattcggacaatagcaaggagaatacaaaaccacagtgagctaccgcttcagacaccagagaagtttaagt

SEQ ID NO: 941149 - DNA, 120 bp, Artificial Sequence
  ENSG00000204054_65 (sequence is synthesized)
gaaaaagactggcaataccaagtgctgatgaggatatggagcaaccagaactctcagacattgctgatgggaatctaaattagtataaccaccacgaaagcatccgtaaggtttaattgt

SEQ ID NO: 941150 - DNA, 120 bp, Artificial Sequence
  ENSG00000204054_66 (sequence is synthesized)
gttgaacacaccctgccctctgaccaagcatttccactcctgggcatacaggcaaaagaaatgcatccacgtgttcatcaaaagatgtaacctgtgccaggtgaggtggttcatgcctgt

SEQ ID NO: 941151 - DNA, 120 bp, Artificial Sequence
  ENSG00000204054_67 (sequence is synthesized)
gaggccaaggagggaggattgcttgagcccagaagttcgagagcagcctaggcaacaaggcaaaacctcgtctctactaaaaagtagccaggcatgatggtatatgcctgtagtcccagc

SEQ ID NO: 941152 - DNA, 82 bp, Artificial Sequence
  ENSG00000204054_68 (sequence is synthesized)
caggcatgatggttgcagattgattgaacccggaaggtggaggctacagtgaattgtgatctcgccactgcactccagcctg

SEQ ID NO: 941153 - DNA, 120 bp, Artificial Sequence
  ENSG00000204054_69 (sequence is synthesized)
cttgtctcaattaaaaaaaaaggaagaaagaaagacataacctggaatattcacaccaacactattcaggatagccctaaactggaaagaatctgaatatcctccggctttagaacagag

SEQ ID NO: 941154 - DNA, 120 bp, Artificial Sequence
  ENSG00000204054_70 (sequence is synthesized)
agaaattatagactattcattcatacaggggatgattgatcagctttaagaataaacaaaccgtacacaacaatatagatgaatctacaaccttaatgtgcaaaatagttcacatatata

SEQ ID NO: 941155 - DNA, 120 bp, Artificial Sequence
  ENSG00000204054_71 (sequence is synthesized)
aaggacaaaaacaggcaaaactactccatggtgttagaaataggggtagaggttaccctcatgcggcaggagggttagtgataggggatttggaagaggaggagcccaatggactgaaca

SEQ ID NO: 941156 - DNA, 120 bp, Artificial Sequence
  ENSG00000204054_72 (sequence is synthesized)
gctgagctggaaacagcaatttgttccttaaagttctgaacccaactgttatccagcatggagtctgtctggagaggccagatgtggggcctctcacaggggaatgagaagtgcctctca

SEQ ID NO: 941157 - DNA, 120 bp, Artificial Sequence
  ENSG00000204054_73 (sequence is synthesized)
gggtcccacccatgatccccctttccttgcccacacaaccaccaactggcaagtagtaacccaggacctgtagcccccactggcttgacacagagcataatgcaagcttttcctgctcca

SEQ ID NO: 941158 - DNA, 120 bp, Artificial Sequence
  ENSG00000204054_74 (sequence is synthesized)
ggtcctggacaccactttgccctttgccccacacgtacagccccctgaccaaaagctgggtactctggcttgactagagggagctagactccaggaataagtaaggagctgggcttccac

SEQ ID NO: 941159 - DNA, 120 bp, Artificial Sequence
  ENSG00000204054_75 (sequence is synthesized)
gctagagaacaagagcttctctggggaaaggggcttcccatgaagccctggggcactgggagattaatgggcagacctctggcctcagcttccagggaaggggagggtgtgggccaacat

SEQ ID NO: 941160 - DNA, 120 bp, Artificial Sequence
  ENSG00000204054_76 (sequence is synthesized)
gcggtggctacactgaccacaagccgatgaccccagccagcctcaggatgtctcagctctaggcatggtttttcgttttgttttgtcgtgttttgtttttgagatggaacctcgctctgt

SEQ ID NO: 941161 - DNA, 72 bp, Artificial Sequence
  ENSG00000204054_77 (sequence is synthesized)
ttttgtcgtgttttgtttttgagatggaacctcgctctgtcgcctaggctggagtgaagtggcaccatctcg

SEQ ID NO: 941162 - DNA, 120 bp, Artificial Sequence
  ENSG00000204054_78 (sequence is synthesized)
gcatgagccaccatgcccggcataggcatggttttgacaatctgtctctttgtgccctggctccttctccaactcctctttggaggaggcacaggaggaggggtcatttcactgttcctg

SEQ ID NO: 941163 - DNA, 120 bp, Artificial Sequence
  ENSG00000204054_79 (sequence is synthesized)
aaaagtagacatataacctacatgcaactgccaggtgataagggccccatctgtctggcatgacgttggaggtccacaaaggctgattagatgaatgctcagctctggggcctccccaca

SEQ ID NO: 941164 - DNA, 120 bp, Artificial Sequence
  ENSG00000204054_80 (sequence is synthesized)
gagctcacagacaggcgtgaaggaaagcaggactcttattagaatatgttcagagttttcactgaagaagcctcctgtgtgggccaggcactgtgctcagtgctttgattcacagtctca

SEQ ID NO: 941165 - DNA, 120 bp, Artificial Sequence
  ENSG00000204054_81 (sequence is synthesized)
tttaattctcaccatttacagacaagaattcagctaagatccttttcaatcaagtctggcaatatctgcctttcaatggcagtgcctagtcctttcatatgtaatatacttatcattatg

SEQ ID NO: 941166 - DNA, 120 bp, Artificial Sequence
  ENSG00000204054_82 (sequence is synthesized)
ggtgggtttaagttttatcatcttgctatttgttatctatttgtcccccctcttttgttcctcctttactgccttctatttggttgagacttaataaaatattttattccatcttctcta

SEQ ID NO: 941167 - DNA, 60 bp, Artificial Sequence
  ENSG00000204054_83 (sequence is synthesized)
cgatctcggctcaccgcaagctccgcctcgcgggttcatgccattctccggcctcagcct

SEQ ID NO: 941168 - DNA, 120 bp, Artificial Sequence
  ENSG00000204054_84 (sequence is synthesized)
ccgcctctccacgccctgccccgggccgcccgccaggccgccgtttcccggagccggccccctcccgccctcgcggccggctgatgtcatctgcacacaactttccgcttcccggcccgt

SEQ ID NO: 941169 - DNA, 120 bp, Artificial Sequence
  ENSG00000204054_85 (sequence is synthesized)
gacatggtgggggcagccaggaacggtgtgccagggggaggaacagcttgagcaaaggtgcagagaggagacaggcaaagagaaccacatgtgacatggtgggacatgccggaatcttcc

SEQ ID NO: 941170 - DNA, 120 bp, Artificial Sequence
  ENSG00000204054_86 (sequence is synthesized)
cggtgagccgagatcacactattgcactccagccttggcaaaaagagcgaaactccatcccaaaaaaaaaaaaaaaacaaagctgcagctcagagaagtggagacactggcccagggacc

SEQ ID NO: 941171 - DNA, 120 bp, Artificial Sequence
  ENSG00000204054_87 (sequence is synthesized)
cacagcaaggccttggcccagctggggctagatggcaagaggtggttcagcattggagctccattgcctgggttcaaatcggggtctgtcactggccagctgtgagcctaagtctctgaa

SEQ ID NO: 941172 - DNA, 120 bp, Artificial Sequence
  ENSG00000204054_88 (sequence is synthesized)
cttctctgtgccttagtgtcctcattctgtagagtggagatagtaatcattcctatttcaaagattgttgtgagaaataagtgaactaatacatgtcatatgcttaaaagcagggcccag

SEQ ID NO: 941173 - DNA, 120 bp, Artificial Sequence
  ENSG00000204054_89 (sequence is synthesized)
gcagctgtgtcaggtcaaacagtgggtgggaatcacgaggctggagcccagctgatcaggaaggccgtcgagtgccaggttgagagctgggacttatccccaggcagggaggcctattgg

SEQ ID NO: 941174 - DNA, 120 bp, Artificial Sequence
  ENSG00000204054_90 (sequence is synthesized)
gagactgctctgagagtccaggcaagtggggctgtgttgactgtgaggatgtggaatggagtggggctggaggactggagaggccctcaagagttgtagaaagagggtctcctctgatgt

SEQ ID NO: 941175 - DNA, 120 bp, Artificial Sequence
  ENSG00000204054_91 (sequence is synthesized)
ccggtgcctggggtctctggagggggtactcagagtatccgaggaggagactcctggatgctaacagagcccccagttaggagcagtccgcgagacagttggtaacagtgctggccttgc

SEQ ID NO: 941176 - DNA, 120 bp, Artificial Sequence
  ENSG00000204054_92 (sequence is synthesized)
ccgggcgccggaaggttccgtgaggcccagcaagtcctgacttggcacagggcccagcacacggcgcagtaacaatataattaccgtatgcagtcccccaggatacagggtcaaaggaga

SEQ ID NO: 941177 - DNA, 71 bp, Artificial Sequence
  ENSG00000204054_93 (sequence is synthesized)
aaaggaaggaggcgagggagaaggactcagagaaaagaggagaggaaaagagaggagaggagaggaaagaa

SEQ ID NO: 941178 - DNA, 120 bp, Artificial Sequence
  ENSG00000204054_94 (sequence is synthesized)
ggccacagtggcatctgtcacgagctgaccagctgggtatgagtcctgtccctccttccggagagacggagagctcctagaagcagcgcctcccagcagaagcagaatcttgccctgggg

SEQ ID NO: 941179 - DNA, 120 bp, Artificial Sequence
  ENSG00000204054_95 (sequence is synthesized)
aggagtacagctcagaacccgcagactcggggtcaaatcccagctctgtgactttcttgatgcgtgaccttgggaggcagctttgctgccctgagccctgtttcctccccggaaaaccca

SEQ ID NO: 941180 - DNA, 120 bp, Artificial Sequence
  ENSG00000204054_96 (sequence is synthesized)
taataataactgtacctcttccagtgaggagacaaggtggaatagaacgcagagcccacgtgtgcctggcacttggcaagtacaccgggaagaaggaattgggaagggcaggagttacat

SEQ ID NO: 941181 - DNA, 120 bp, Artificial Sequence
  ENSG00000204054_97 (sequence is synthesized)
cattcacctgtttacagctgagcaaactagcggaggctcggcgaggtgaagccagtcccccaaggtcacacagccggccggccggccgcaggacaggggccgaagacgtagttgtctgac

SEQ ID NO: 941182 - DNA, 120 bp, Artificial Sequence
  ENSG00000204054_98 (sequence is synthesized)
ctgtgctctaaccactgtgctctctggcctcaagccggctcccacactacccttccctgttctccgtggccctccagcgcctgaaagccgcttgggggccgcggaggcaggtggcatggc

SEQ ID NO: 941183 - DNA, 120 bp, Artificial Sequence
  ENSG00000204054_99 (sequence is synthesized)
cagggcagagtccgcggggcggaaagggttaacgggctccgccgcattgggctgtccttcaaggggggagccagccaatgagcgcgcgccgcgatgagaagcaaggtctcgctgtgttac

SEQ ID NO: 941184 - DNA, 120 bp, Artificial Sequence
  ENSG00000204054_100 (sequence is synthesized)
agaggggcaaacttggaggcaggaaggctgggaggagaccactgctgagtgatttttcttcccccacaggttcccagtccctgatttctggccactccgcctttctgtgagtcattttgt

SEQ ID NO: 941185 - DNA, 120 bp, Artificial Sequence
  ENSG00000247993_0 (sequence is synthesized)
aatactccttgtaaagaatacgcagtaagtacaaaaaaatccacacgtctgttatgatacaaaacacaggttgaaataaatgataattttgactttttttcttgtgtaaacatgttaacc

SEQ ID NO: 941186 - DNA, 120 bp, Artificial Sequence
  ENSG00000247993_1 (sequence is synthesized)
tggcattcttcaagacctttactatttttgtattattcttttgaccattattttttaacgcctggacctgagaatctctacacctcaaaaaggcttagttgtttttcatctgccaaacgt

SEQ ID NO: 941187 - DNA, 120 bp, Artificial Sequence
  ENSG00000247993_2 (sequence is synthesized)
caagggagcctctagtgcctggacagggcggactcccttccccggcaccctcttcctccctaccccaggtcgggggttggggggctgtagcatagcgttattaacaattggaaatcctag

SEQ ID NO: 941188 - DNA, 120 bp, Artificial Sequence
  ENSG00000257522_0 (sequence is synthesized)
actgtgaaaaaatccttctctcaccctacagatacctgtacggagaacttgggaggcatttttataagctcattgtcaagtgaatgttaaagtccccattcactgagaagcaaagggtga

SEQ ID NO: 941189 - DNA, 120 bp, Artificial Sequence
  ENSG00000257522_1 (sequence is synthesized)
agaagtgagaccctacatggctttttagtgcattgatggagcagagacacgtctatgaacaactgcctatgcaaactgattactcggcagtataatttatcagtttgtatgagtaagtga

SEQ ID NO: 941190 - DNA, 120 bp, Artificial Sequence
  ENSG00000257522_2 (sequence is synthesized)
agaaggaataagtggaaatcaggagaaatattaaagacattccagtgtcactgagcatgccgaaacctgaaaacatgttccattatcttgctttggatttatggaaattctgaacagtga

SEQ ID NO: 941191 - DNA, 120 bp, Artificial Sequence
  ENSG00000257522_3 (sequence is synthesized)
tgtgagagtgactacagtttgaagtatctgttaaatacagcaacatgacatcacaaggattgttttggagtcttctggatatgagaacattataaaaggtgaaaaagtagaactgaaata

SEQ ID NO: 941192 - DNA, 120 bp, Artificial Sequence
  ENSG00000257522_4 (sequence is synthesized)
tgaagggagaaaaagagacaaacatggtttcaagtctcacttagagaagaaggattgtttatttatttgatggaaattgggtcaattgaagactctgacacagagaataacggtaccaga

SEQ ID NO: 941193 - DNA, 120 bp, Artificial Sequence
  ENSG00000257522_5 (sequence is synthesized)
atgcgctctctcccaggcccccaaagccagagcggagcgaagatgggacgccaaataaatctgccagtgattacgctaaaggaaattatgatcttgttatagaaaccattaaaggaaaac

SEQ ID NO: 941194 - DNA, 87 bp, Artificial Sequence
  ENSG00000257522_6 (sequence is synthesized)
gtctgacaccctgcccagttgtccccttggaacctgtaaacactttggcataaagatctgacagattcagcttctccataaatgaat

SEQ ID NO: 941195 - DNA, 120 bp, Artificial Sequence
  ENSG00000257522_7 (sequence is synthesized)
ataaaggaataggcagtgttgttaagttcccttcttcagtcttctcttaagctgaaagtccaacgatttcaagattcaattaattagagacatggagagccaaagtacaagatacctgta

SEQ ID NO: 941196 - DNA, 120 bp, Artificial Sequence
  ENSG00000257522_8 (sequence is synthesized)
gatcttcgggatttttcatatggtaaatttctgatgctccacctcaaagatttgaagcctgatctcttcgttctatatccaagaaaaggaagtcattgtacaatagactgagtattctgg

SEQ ID NO: 941197 - DNA, 120 bp, Artificial Sequence
  ENSG00000257522_9 (sequence is synthesized)
agcaaaaggtcatccaacgttataaaagcttgcctgagaccaaagcatggaaaggaaatcctcctcccaggcagtgttaagttgtctgttcccttcttggcatgtatgcacaacttcttt

SEQ ID NO: 941198 - DNA, 120 bp, Artificial Sequence
  ENSG00000257522_10 (sequence is synthesized)
aacactaaggagatttattcatgggtactgagggaggaaggggctttataaagtgaaatggggccttgaaatttctcaaggataccctaaaacagacaaggaacaagtctgttccaaatg

SEQ ID NO: 941199 - DNA, 120 bp, Artificial Sequence
  ENSG00000257522_11 (sequence is synthesized)
gtaagatggagcaggatagtaatgatgggacagtgtaattttttatttacagatataaaacatcagatgaaatacatcataattttcatagttatttaagtgtgaaaggcacataattgg

SEQ ID NO: 941200 - DNA, 120 bp, Artificial Sequence
  ENSG00000257522_12 (sequence is synthesized)
taagttaagttatttcacgatcttttaagtggcagtgttgggcaatgggaaaataaataggttatttctgtttttttcaataacatgcaatacaaatttgagcaattcatttaattaggg

SEQ ID NO: 941201 - DNA, 120 bp, Artificial Sequence
  ENSG00000257522_13 (sequence is synthesized)
ctttgtattgcctcattagcagaaattcatagcatccatttgattatatttcaggtcttttgggatactggtattggatgattctgtgtcacagctatagttgtcaaaagtgcctacatg

SEQ ID NO: 941202 - DNA, 120 bp, Artificial Sequence
  ENSG00000257522_14 (sequence is synthesized)
ggtacaaggcaaacgatattctaacactgttgacataacaagtgatgcaagattattgctgatacctgatttttttttcattgttatttgagctcttattccccaagaggatatattata

SEQ ID NO: 941203 - DNA, 120 bp, Artificial Sequence
  ENSG00000257522_15 (sequence is synthesized)
tttactatgatggtttcattcatttgctcatttgttcactcaaaaataataccgagtattgactaaagggcatgtctatcttgtctgtcagtaattcagaaaccactaagatatagtttc

SEQ ID NO: 941204 - DNA, 120 bp, Artificial Sequence
  ENSG00000257522_16 (sequence is synthesized)
aaaacttcaaaatactgatcatctggtgaatgaggatataaaacaaaggcaacaacacaacacagccagcgctatgataaaaatgtgccaacatttttatgggaagttggaggagttgct

SEQ ID NO: 941205 - DNA, 120 bp, Artificial Sequence
  ENSG00000257522_17 (sequence is synthesized)
cctaacttgcctcagagaggctagaagattcatacaggaggtgattgctgaactagattgacgataaagatgggaccacttcaaactcttgtcagtagactgaagattgccacaggaagg

SEQ ID NO: 941206 - DNA, 120 bp, Artificial Sequence
  ENSG00000257522_18 (sequence is synthesized)
ctcaaagttaattaatgttttttagaaggtctttggctttaacactttccatggcttcaaaaacatacattatcgtaaagctctgcttctatcattttgttttggtattggcttgctttc

SEQ ID NO: 941207 - DNA, 120 bp, Artificial Sequence
  ENSG00000257522_19 (sequence is synthesized)
tacataggaagggaggggaaaaacaataagtactaaatgtaggtgtatggttaatatcatgactactttccactcgttcaatacctccatttaaaaaataatatatctccatgtgtatgt

SEQ ID NO: 941208 - DNA, 120 bp, Artificial Sequence
  ENSG00000257522_20 (sequence is synthesized)
atgtgcatgaaaagtaaatatatgtaaattattatgatatttttctgagataacaggaaagataatggaatattaataagcccaagaagagaaatctatactcaaattattttaaatagt

SEQ ID NO: 941209 - DNA, 120 bp, Artificial Sequence
  ENSG00000257522_21 (sequence is synthesized)
taattctagggctatccaagaacagttaaatactcaaaaatttttttcccattatacaatgtgttagaaggattctttttctagtaggtgtgaaaaagaagcaggtagcaggagagcttg

SEQ ID NO: 941210 - DNA, 120 bp, Artificial Sequence
  ENSG00000257522_22 (sequence is synthesized)
gtacacagaacatatttgaaacaaaatcagaatttaatgatctaggtcagtgattatcaaactataatgtgtttaagaactacctgaagaacttgttaaagcagtaggcctggggtagga

SEQ ID NO: 941211 - DNA, 120 bp, Artificial Sequence
  ENSG00000257522_23 (sequence is synthesized)
ccgattaattttcattttttacagacccatagatgatgctgatgctgttggtttagaatcacacttggggaatcacttatctagacaagggcttctgatatttaatctgtacaaatcccc

SEQ ID NO: 941212 - DNA, 120 bp, Artificial Sequence
  ENSG00000257522_24 (sequence is synthesized)
ctaatcttgttatattgaagatactgattccataggcctcaggtgggtgggagtatttgcatttcaaacaagctcaaaggtgatgcttatgctactctccgcagacccattgtgggaagc

SEQ ID NO: 941213 - DNA, 120 bp, Artificial Sequence
  ENSG00000257522_25 (sequence is synthesized)
aaggatttagatgatccactattataagcccaagtcatattgcatggtttggtgatttcagaaaataataggttcaaataaggcttcgagtttatttcctgaccaaataagattgtatcc

SEQ ID NO: 941214 - DNA, 120 bp, Artificial Sequence
  ENSG00000257522_26 (sequence is synthesized)
ttaccaacaagatcgctgtttcttgtgtacagtatgaatatatattatcacccccttgagagaagcatttactgagctcctgtttcctgtatgaaatgactgccctagttactaattaag

SEQ ID NO: 941215 - DNA, 120 bp, Artificial Sequence
  ENSG00000257522_27 (sequence is synthesized)
taaaaagtggatttcttcttttacttagcttccataagtattctgaagctttagaaatgaaacactacccagaccggtcatttattaagtttattatgttttcttgattctaataaattg

SEQ ID NO: 941216 - DNA, 120 bp, Artificial Sequence
  ENSG00000257522_28 (sequence is synthesized)
tatataagtacagatggcaaaaaaggattgttctaatacctcaactcaaacaaagaagcattttagaaataccatattaggcaaggatcattatctaacccccttatttaaaatttttat

SEQ ID NO: 941217 - DNA, 120 bp, Artificial Sequence
  ENSG00000257522_29 (sequence is synthesized)
ttagacaaagtctattcatataaagcaaaaagttgaactaaatctcgtcaaatgagctggaaaatatacttaattttgatgagataacagtacctggtggattatatgggtgtgggcgtg

SEQ ID NO: 941218 - DNA, 120 bp, Artificial Sequence
  ENSG00000257522_30 (sequence is synthesized)
aaggagccttactaataagtgttggctgtcttcaacccacattttctcagtaattgataattctccatttcttctctgctatgtaaaccttttaaaaaatagaacagtgaaataatgata

SEQ ID NO: 941219 - DNA, 120 bp, Artificial Sequence
  ENSG00000257522_31 (sequence is synthesized)
atgataatacattaagaaatttgaagtatcactttctaacagagcattcaaataaaaaaatacaagtaatagaatctgtagtatacattttggccaactttgaattgtttgaagaaccgt

SEQ ID NO: 941220 - DNA, 120 bp, Artificial Sequence
  ENSG00000257522_32 (sequence is synthesized)
ggggatgcatactttcttttttctcttatgatgctcccattcacaaattttcaagtgatatgatactgttaaattctgtaattcagttacttgaaatgatgtttgcatagttagcagtaa

SEQ ID NO: 941221 - DNA, 120 bp, Artificial Sequence
  ENSG00000257522_33 (sequence is synthesized)
acattcaagtttgacagcagtacaatcagttttccattcatcactggccctgttttaaccctgctgaaaaagggcctaatgtacgtggcagtgatggcaattaggcagaaaagtaatatt

SEQ ID NO: 941222 - DNA, 120 bp, Artificial Sequence
  ENSG00000257522_34 (sequence is synthesized)
cactgagcatgccgaaacctgaaaacatgtattaaaataaaccggtccttctcattaacgatgaagtgcacctgctgaagagtctcagaactatcaggaacacaaacaggtgtgcacaaa

SEQ ID NO: 941223 - DNA, 120 bp, Artificial Sequence
  ENSG00000257522_35 (sequence is synthesized)
atgtatggcctttaaaagatacattttatgtaaatgtgcatctcttgctccatgtgtctttaacacagataaaacccacaggtcctatatttaactcagctacagagttgttgggtgttc

SEQ ID NO: 941224 - DNA, 120 bp, Artificial Sequence
  ENSG00000257522_36 (sequence is synthesized)
tcacatatatcagctcctcaaagctgaggattattatgcaatcattaaaaatatagtatataaaacgaggtggaattgcttcttttggcaagcagaatcattggtatacatttaataatg

SEQ ID NO: 941225 - DNA, 120 bp, Artificial Sequence
  ENSG00000257522_37 (sequence is synthesized)
catctattttaacaatctgttattaaaactttgatactagtcctttaactaattttgtcttacatcaaatttaccatacaagataaactatacctgtaatatgtttttcaaaatcacatt

SEQ ID NO: 941226 - DNA, 120 bp, Artificial Sequence
  ENSG00000257522_38 (sequence is synthesized)
taattgtaagatcccaatcaacaagttgtttatcattactatggacatacgcacattcaggatttttctgtgctcttgttctgcttgtctatgaattactggaaagtaactatttttaaa

SEQ ID NO: 941227 - DNA, 120 bp, Artificial Sequence
  ENSG00000257522_39 (sequence is synthesized)
aatgacagaaggaaggaaagaaagagaaaagaaatctcacaattttccaaaaaatgaagttgaaagaactctctggagacttcattataaatggttttagcacaattatgctaaatggaa

SEQ ID NO: 941228 - DNA, 120 bp, Artificial Sequence
  ENSG00000257522_40 (sequence is synthesized)
tcgatatgtttacattgttttattcaaggtttatcacgttctattatgaaacaatgaaatgcaattaataaatcatcagttcatttttcttgttttatttgaaaatgctttggcatattt

SEQ ID NO: 941229 - DNA, 120 bp, Artificial Sequence
  ENSG00000257522_41 (sequence is synthesized)
tagcatatcatttttagagtagcaaataactctaatgtataacattaataaacggtgatagactttactataaatattgcatctgttgccaagaaaagttacatacaaaaacagagcatt

SEQ ID NO: 941230 - DNA, 120 bp, Artificial Sequence
  ENSG00000257522_42 (sequence is synthesized)
gcaaacagcagttcagtaatttttcttttggtagtagagacatgggccttctgtatcattttaagtatctttgcactacttgaccctctgcacttggagaatattgttttttttatgcat

SEQ ID NO: 941231 - DNA, 120 bp, Artificial Sequence
  ENSG00000257522_43 (sequence is synthesized)
gtggtgttgtgagagcccagataaccaaattgagcagttttttctctccttgtgttttatttgagggagaagagttgaggattgaggaaaagctgtgacaaacttttcgtgtgtgcagtc

SEQ ID NO: 941232 - DNA, 120 bp, Artificial Sequence
  ENSG00000257522_44 (sequence is synthesized)
atagccagatattttcacaaacaacaacttcaaaaaatcaaggcaatagaataaaatattaagatagaacatgaaatataaaccaccagtccaatggtttccatggactaagttattttg

SEQ ID NO: 941233 - DNA, 120 bp, Artificial Sequence
  ENSG00000257522_45 (sequence is synthesized)
tttggattaaaaatgctcattgttctttatttgaaaataaatatttaagtaataaaatatgtaagaactcaaaatatattgttttctggtattgcttgatataccaaagcagatactaat

SEQ ID NO: 941234 - DNA, 120 bp, Artificial Sequence
  ENSG00000257522_46 (sequence is synthesized)
tttaattgggatttttatgcaactgtgtgactgtactctgaatttcacatagttttaaattctgatttgcatattctatattaattcaaaggaagcttgagacatcgtaaagcacacaaa

SEQ ID NO: 941235 - DNA, 120 bp, Artificial Sequence
  ENSG00000257522_47 (sequence is synthesized)
atgctgtaaaatcagaaaacagatcaactaccattatttttaaacttcttccttcttttatatcaagcttcatgagaaatgtagcaaaagattggaatttctttttctacgtaaggggat

SEQ ID NO: 941236 - DNA, 120 bp, Artificial Sequence
  ENSG00000257522_48 (sequence is synthesized)
aaaatattttatatgtagtttaacttaaatacaaaaacaggacttttatctctaaatgctatttctattgacttgagatatttaggttgacttctaatactacatattctttcatttgtg

SEQ ID NO: 941237 - DNA, 120 bp, Artificial Sequence
  ENSG00000257522_49 (sequence is synthesized)
cctacccaattcctgatacaaccagacaataggacacagaaaatagatgacatggaattggtaactgtaaaggggtgaaatagatgaggtctctgaaccttgtagaataagaagttgccc

SEQ ID NO: 941238 - DNA, 120 bp, Artificial Sequence
  ENSG00000257522_50 (sequence is synthesized)
atctcatatgttatgaaatttttggaagtcctcctgcactctctaccttctagtaaaacatgttcccttcatactggcctgctttcccgaaggccttaaattcccattagagaatcattt

SEQ ID NO: 941239 - DNA, 120 bp, Artificial Sequence
  ENSG00000257522_51 (sequence is synthesized)
ttttcagagcaggacttttctacctctcttcaaaatacaaatactattttttaaaagaacgtattagctgaatagtaattaaaactcaatttatatcttcaaatatgaacaagtcagtaa

SEQ ID NO: 941240 - DNA, 120 bp, Artificial Sequence
  ENSG00000257522_52 (sequence is synthesized)
gcttcagctcagccatagatatgactggtaagtcaacgggaggggaattctgtgcaagggttcctgcccaaagaggagtagcctcagtggagtgctggggcagagacatcttaatatgga

SEQ ID NO: 941241 - DNA, 120 bp, Artificial Sequence
  ENSG00000257522_53 (sequence is synthesized)
acatggacaaagtaagaataagttccaagaaattttcattcacacttaccaattccaaccacatccagttttttattctcctttggttgtatgttttttgccctccaatctacttcaaaa

SEQ ID NO: 941242 - DNA, 120 bp, Artificial Sequence
  ENSG00000257522_54 (sequence is synthesized)
aaagtagaaaataagatttaaagcaaatattttcctttgaaatatttttgatcaaccatcttaaaattgttccatcttttcactggcaaactttgatactgaatgatcagtgttcattat

SEQ ID NO: 941243 - DNA, 120 bp, Artificial Sequence
  ENSG00000257522_55 (sequence is synthesized)
ctccattttactgatgttcattatcttttaacacttttgatcatttttcagactccatcacattcactgaaacttctatgttgaagagtttttgtcacaaaaaatgttctttttctgact

SEQ ID NO: 941244 - DNA, 120 bp, Artificial Sequence
  ENSG00000257522_56 (sequence is synthesized)
ttacttattcatttctgtttataatttaaaactttaaaatttattcttggggttcattttcagtaggttgagtaagtaataccccttaactcgtggcatattgtcatcattaccgataca

SEQ ID NO: 941245 - DNA, 120 bp, Artificial Sequence
  ENSG00000257522_57 (sequence is synthesized)
ttccagtgtcactgagcatgccgaaacctgaaaacatggtcgaggaacaccatgagcaactagccaatgccataggtctgcatgaagtctagttctgtcacccaggttggagtgcagtgg

SEQ ID NO: 941246 - DNA, 120 bp, Artificial Sequence
  ENSG00000257522_58 (sequence is synthesized)
tagacataattactgaaagaataaattacatgagatattcactgtacttagccacatgacatgaaaacctatgccctttagagcaagcacagttccatgcaaaactgtagagaagttttc

SEQ ID NO: 941247 - DNA, 120 bp, Artificial Sequence
  ENSG00000257522_59 (sequence is synthesized)
tcacccctttttcacatgcttctcacattgtagcacccctccttgaaaccatcctacttctactatcctccagtttcctctggatttgaatgtccatatcatgctatggtccttcagtca

SEQ ID NO: 941248 - DNA, 120 bp, Artificial Sequence
  ENSG00000257522_60 (sequence is synthesized)
gctcctgtgtcagaaatcagggccctgctctgggctcttccttcatcctgtaactatagtcaaataagtcctgttaagtctacttccttaaaaactcttaataatctcttccccttcttc

SEQ ID NO: 941249 - DNA, 120 bp, Artificial Sequence
  ENSG00000257522_61 (sequence is synthesized)
attgccattgcctattgcaccatcttattcagaacaccatttttcttacctataatgttgaaagtaactcttcaacagtcctgttgcgtgctttatcccattgcttcttatataacagat

SEQ ID NO: 941250 - DNA, 120 bp, Artificial Sequence
  ENSG00000257522_62 (sequence is synthesized)
gtggtgatatttagcctatttgtagttccttgaaaccatcctttgtactgccatctaagtaatctttaaaataacaagataaatatttctatgacctccattgtctaaagcaaatttcca

SEQ ID NO: 941251 - DNA, 120 bp, Artificial Sequence
  ENSG00000257522_63 (sequence is synthesized)
atgtatattgtgaaaaaaatgccaaagagtttcatgacaaatgctatatactatagtcttgggagagccacagggtaaattagttctaaagagctctctttggtagaggaaactgttaaa

SEQ ID NO: 941252 - DNA, 120 bp, Artificial Sequence
  ENSG00000257522_64 (sequence is synthesized)
atgtgatcagcctaataagatcataatcatatgactatgaactattttaaatgtacctatcaattttttcaacctactgttttgaagtatattcaatctattgtctcaagtatatttttc

SEQ ID NO: 941253 - DNA, 120 bp, Artificial Sequence
  ENSG00000257522_65 (sequence is synthesized)
gctccctcttattcctggtgttctatcacatgataatgaaatttgacagaacagtatttatgttactgggggtgtggggcattgaggaagcatggcaaatgagagggaagtggtagaaaa

SEQ ID NO: 941254 - DNA, 120 bp, Artificial Sequence
  ENSG00000257522_66 (sequence is synthesized)
atgacttttatcatgtgcctctaagaagagacatatatggattgagatccacttaaaagggaaaagttaaaaaaaatcaaaacccaaaaatcaccaccattctgtggatgtggtatattt

SEQ ID NO: 941255 - DNA, 120 bp, Artificial Sequence
  ENSG00000257522_67 (sequence is synthesized)
aattgtctaataataataaatttcccacaatgtcagatgttaagagtacaagaaagagttacaaaaggaagaggttagggcaataaattgaaaagtgagtagagttgaggaaaatgcttt

SEQ ID NO: 941256 - DNA, 120 bp, Artificial Sequence
  ENSG00000257522_68 (sequence is synthesized)
gctagattgctagattgaagttttcttcaatctagcaaaaaaggagacaggagaaaaggagcaaattgcaaaggcaatggaggggagataacatagctgattactaaagaggatatttgt

SEQ ID NO: 941257 - DNA, 120 bp, Artificial Sequence
  ENSG00000257522_69 (sequence is synthesized)
gtacttatttgtatggtgtgtgtgtgtacgtgtgtgtgtgtgtgtctgtgtatgtgtggtggtacttgaaagacaaattggattagggtagtattttgattctgtgttcaattctctgaa

SEQ ID NO: 941258 - DNA, 120 bp, Artificial Sequence
  ENSG00000257522_70 (sequence is synthesized)
caatgactcagcttgataggctattaatgtttaatagtcccatatatttctcctatgctgtctacaagaatatcattctcattataaaattttgtgtatctcatttgtcttacattttca

SEQ ID NO: 941259 - DNA, 120 bp, Artificial Sequence
  ENSG00000257522_71 (sequence is synthesized)
caaatataaaaaaatacttctttactcactctacagctctgtgaacgttcagagtaaaccttcttaggattacttatggaaaagaaaagaatattcactctatcttgtatatacaaacca

SEQ ID NO: 941260 - DNA, 120 bp, Artificial Sequence
  ENSG00000257522_72 (sequence is synthesized)
tgttaacattatttctagatatagaactggctgcatacgatttcaactgttattctgaacaaatttaagtaattctttattctcagcatattggcaacatagaaatgcattttagaggtg

SEQ ID NO: 941261 - DNA, 120 bp, Artificial Sequence
  ENSG00000257522_73 (sequence is synthesized)
cagaggcacagagggaaatttgagccaaatgaatctgctagatatttctgcacagttttcataattcattgttaggtctggcttcaaggagggcaaagttcacatatttcttttttatat

SEQ ID NO: 941262 - DNA, 120 bp, Artificial Sequence
  ENSG00000257522_74 (sequence is synthesized)
tgaaataatcacaatattattttttagtaaaaatgtttgattttattccaaaaaatctttaagtaaggagtaagatttctgcatgatctgcgaaatgaaggtggaacagaatagaagccc

SEQ ID NO: 941263 - DNA, 120 bp, Artificial Sequence
  ENSG00000257522_75 (sequence is synthesized)
tcttctgtacaatgtcaccaaaacatcccgaagttttatcctgcctggaaaatttcttacacatgattcttactgcttagcttgaaattgcacctaggaagaagcttttgttctcagtgc

SEQ ID NO: 941264 - DNA, 120 bp, Artificial Sequence
  ENSG00000257522_76 (sequence is synthesized)
tgccaaaacttccatttttcagcagtgacctcagtttagcacctgcttataagatgtgtttgcacatcgttggtacgttatagtgacatacatgttctcatctaggagattgtcatagaa

SEQ ID NO: 941265 - DNA, 120 bp, Artificial Sequence
  ENSG00000257522_77 (sequence is synthesized)
ttcaagagatgttaacatttttccatctgtgtgtgtgaaagtgacgtttcctgttaattttgttctcttgctgaattctctaagcaaaagccttctgtgggagggagaatgatgtcatta

SEQ ID NO: 941266 - DNA, 120 bp, Artificial Sequence
  ENSG00000257522_78 (sequence is synthesized)
tagtcatagcataaaaattttcaacctttagaatgagacatattgtggcatatatattactacttttaaaagcagtgacacaaaaacttggaggacgatgatatcaattttatattttca

SEQ ID NO: 941267 - DNA, 120 bp, Artificial Sequence
  ENSG00000257522_79 (sequence is synthesized)
aacactggctttcagcctttattttcattatgtctctatatttctttactctcacatgagaagtctttatttcagtgctcttccattttactgatataattctaatttcactgttataaa

SEQ ID NO: 941268 - DNA, 120 bp, Artificial Sequence
  ENSG00000257522_80 (sequence is synthesized)
tcctggaacatggttttccactgtagccttagaagaggaaagcccatctatggatacttatgtttatgagaatagagacttgactgtttaatgtcagaggaatagagagtttggcaagca

SEQ ID NO: 941269 - DNA, 120 bp, Artificial Sequence
  ENSG00000257522_81 (sequence is synthesized)
gaacaatctatcagtgacggcctttggaaaaaatgggctatttttagtaaaagttttcataatgacatgatttaaagtaaaataaattagacttttgatttcaactctgtgttagagttc

SEQ ID NO: 941270 - DNA, 120 bp, Artificial Sequence
  ENSG00000257522_82 (sequence is synthesized)
tccagataaatggaaccaataaaaaatatttacaggaaatggctcacatattatggtggctaagaagtcctacgatctgctgtcttcaaactggagaaccataaatgtcaatggtgtaat

SEQ ID NO: 941271 - DNA, 120 bp, Artificial Sequence
  ENSG00000257522_83 (sequence is synthesized)
tcagtctgaatctgaaggcctaagaaccaagagaaatgatggtataattcctggtctgaatccaaaagcaggagaagatgtcccagttcaagcagaaggaataaattcattctttatctt

SEQ ID NO: 941272 - DNA, 120 bp, Artificial Sequence
  ENSG00000257522_84 (sequence is synthesized)
attggtgagggcacatcttttttgttcagtgtacttatagaaatgctaatctcttccagaaacaccctcacagacatatccagaagtaatattttaatagctatctggatatcccttaac

SEQ ID NO: 941273 - DNA, 120 bp, Artificial Sequence
  ENSG00000257522_85 (sequence is synthesized)
ccaatcaagttgacacataaaattaaccatcaaaagctctgacatgtaaaaagcttttttttttttttaatacttttactggacccattagagaactgaggttccagagtatattgctac

SEQ ID NO: 941274 - DNA, 120 bp, Artificial Sequence
  ENSG00000257522_86 (sequence is synthesized)
cttgaaatatagagaaacaggcaaatatggagatgctttcaatttccttttctggaaaagaagccactggagtcataagctgataagaacactcaaatgatagttttaatttattgttgg

SEQ ID NO: 941275 - DNA, 120 bp, Artificial Sequence
  ENSG00000257522_87 (sequence is synthesized)
aggctcagtgtggactaccatgagaatgagaaattcctgtgagcagcaatcttggtgctcagcactccaaacccctaaataatttcttgggtttttcctgcaggaaccacactaaattca

SEQ ID NO: 941276 - DNA, 120 bp, Artificial Sequence
  ENSG00000257522_88 (sequence is synthesized)
catgttgaaaagtcaaaaaatatcttctcctggttctgggaggagaaggggaaaattagccagtgttaaatactcatagagtattctccacacacacacacacatacacaaagaaaagtt

SEQ ID NO: 941277 - DNA, 120 bp, Artificial Sequence
  ENSG00000257522_89 (sequence is synthesized)
tactctgtaagggtaagactttactggagccttatccacctgatgataaggatggcataaggaagtcatttcttcgactctagcatcgtctggtctttctgtgacatttaaggggggaaa

SEQ ID NO: 941278 - DNA, 120 bp, Artificial Sequence
  ENSG00000257522_90 (sequence is synthesized)
aaaatctaagaactgtaacttgtgaaagttacagtctatgtctaaagacccactaaaagacagatttaatcataatgctgtagaatgctcttcctccctgactccttaccatcacatcaa

SEQ ID NO: 941279 - DNA, 120 bp, Artificial Sequence
  ENSG00000257522_91 (sequence is synthesized)
taaggatccagtataatagtgttatttcccaaagagctgtaaggtagactttatctaaagagttctgagggacactaaacacaacaggggagacaaaaacaagggcactctaggcatttg

SEQ ID NO: 941280 - DNA, 120 bp, Artificial Sequence
  ENSG00000257522_92 (sequence is synthesized)
aattctctggcacctacaactacaacaaacagtaaacatggccctactcctagccacattatcataaaaccccacactaaaggtctacttacctaatttcctaacacctacctcatgcat

SEQ ID NO: 941281 - DNA, 120 bp, Artificial Sequence
  ENSG00000257522_93 (sequence is synthesized)
agttagcatggcattttgaatggagttttaagcctaaaggacagtatcctacttgcagaagaagatgggaaatgtaacattccattatcttgctttggatttatggaaattctgaacagt

SEQ ID NO: 941282 - DNA, 120 bp, Artificial Sequence
  ENSG00000257522_94 (sequence is synthesized)
aaagaagttcttcagagagagggagtatgatatacgtcagaaacttcggactacataaagaaagagcattagaaaaaaaataagtaaaggaaggaggaagctgaagccatgcacttggaa

SEQ ID NO: 941283 - DNA, 120 bp, Artificial Sequence
  ENSG00000257522_95 (sequence is synthesized)
gtggtgggatgattacttgagtctggagctgtttgacattacagtctctacttttaactacaataccagatggcctctcaattgatacccattttttaaaaatctgagttattgcctgta

SEQ ID NO: 941284 - DNA, 120 bp, Artificial Sequence
  ENSG00000257522_96 (sequence is synthesized)
gcaatacataacaacaatagctgcaagatttctgagttattcagaaagatttttcattctgtttatatcagagatgagactagagtttatcatttttggtcttctaatttgtgaacagct

SEQ ID NO: 941285 - DNA, 120 bp, Artificial Sequence
  ENSG00000257522_97 (sequence is synthesized)
ctacaggtattaggtggacaacacctaaataaattgaattgcaactcataactgacatactctgattgaaatatatgttcagtaaaaacgaacatgattaaaacttacatgaaaatatta

SEQ ID NO: 941286 - DNA, 120 bp, Artificial Sequence
  ENSG00000228426_0 (sequence is synthesized)
tagtgtttatgcaaaaataatttagaaaaccataaaaatccctgaagaaagtctgagaaagaggtgcaaggagagagggagaatttccagcttcatcaaaactgtgtgcagatggagcct

SEQ ID NO: 941287 - DNA, 120 bp, Artificial Sequence
  ENSG00000228426_1 (sequence is synthesized)
aggcaggcaccacacaggcaacctcacgcctccttcggaagcagatggagttttttttttttttttgcacaaggttactctaacctgtttgtcttcttggggtaacttgttcattcatat

SEQ ID NO: 941288 - DNA, 120 bp, Artificial Sequence
  ENSG00000228426_2 (sequence is synthesized)
atgaattgtcacccattctatcaaacaaataaaatcaccatgacaattgctatttttaggcacattttaaagctataaatgagatcatgttagttaataaaaattatctcctcagttaaa

SEQ ID NO: 941289 - DNA, 120 bp, Artificial Sequence
  ENSG00000228427_0 (sequence is synthesized)
gccttgaacaagctacttccattttctggctctttagtctcctcatttgtaaaatgagggggctggagtaagtaagctctataaggctctcagctgtgacatctatgcataatcacagaa

SEQ ID NO: 941290 - DNA, 120 bp, Artificial Sequence
  ENSG00000228427_1 (sequence is synthesized)
gatcgaagtgtacagaacaccatggaaactgaagagagattctgaaaggaggctttaagaggtcacttgcatccaatgctgcagaagtgtcagagactgaggacttaaatgaagccactg

SEQ ID NO: 941291 - DNA, 80 bp, Artificial Sequence
  ENSG00000228427_2 (sequence is synthesized)
gcagaagtgtcagagactgaggacttaaatgaagccactgattagcaatttaaagatcctctccaagacagggtctcact

SEQ ID NO: 941292 - DNA, 120 bp, Artificial Sequence
  ENSG00000228427_3 (sequence is synthesized)
caggcatgagccaccgtgcctggccgctttctgcatttttagtgtcactcaacccttgttgtctctgattgtcaaggcaacgactacgtgtaaagtaatgtggacagagtcttggacaga

SEQ ID NO: 941293 - DNA, 120 bp, Artificial Sequence
  ENSG00000228427_4 (sequence is synthesized)
tggacagagtcttggacagagaaatgcctcagaaatgttttgtgatgaagatgaaggagaggcgctggaagcagaaactggggagggggtaggattcgtgtctccacttactctccaccc

SEQ ID NO: 941294 - DNA, 120 bp, Artificial Sequence
  ENSG00000228427_5 (sequence is synthesized)
tctgaggccagaggggcaagctggacaatgcaaatgaactttggatgagacttagccaaggggcctccaaagggagagcagcggggctgcttaggagggaataaaaaaataaggtggtca

SEQ ID NO: 941295 - DNA, 120 bp, Artificial Sequence
  ENSG00000228420_0 (sequence is synthesized)
ttgccgcttctctcttctactgtcccagctgtctctgttttttaggcaactttctgtggctttttcaagagtggagatttggctggagcaggattaggaagcctcctgctacacgctttc

SEQ ID NO: 941296 - DNA, 120 bp, Artificial Sequence
  ENSG00000228420_1 (sequence is synthesized)
ctaactaaatgggagaagattacttgagaaaaagcctagaacagtgcccagcatgggtgattttctcttgtaaaatggcttgaaccccaaagctatagcacaagcaagcagggtcatcag

SEQ ID NO: 941297 - DNA, 120 bp, Artificial Sequence
  ENSG00000228420_2 (sequence is synthesized)
aagccactccattcttctggaagctgcagggaaatggaacccagaaaccagatgtctatgtcctaatctccagaacctatgaatggattgtctttcatggaaaaggggtatttagattgc

SEQ ID NO: 941298 - DNA, 120 bp, Artificial Sequence
  ENSG00000228421_0 (sequence is synthesized)
agcgtgcccggggcgagcgcctgcaagaggttgttccccaggtacagctcttccagccgcgagagcttctcgaaggtcttggggtgcagagagcggatctggttgtactgcaggtccagc

SEQ ID NO: 941299 - DNA, 120 bp, Artificial Sequence
  ENSG00000228421_1 (sequence is synthesized)
cgtctgagctgccccagacggtggaagtcgaaggccgtgatgttggttatgaagttgccgccgaggctgtaggtgccaccctgcgggaagtttgggcagcacggagtccgccagcattct

SEQ ID NO: 941300 - DNA, 120 bp, Artificial Sequence
  ENSG00000228421_2 (sequence is synthesized)
gctgaggagaggcaccacccccttttaggtgtctgaagggagtatttactccatcctgctgtgggctagaacatgaagaaatcacagaactggttctgccaacatgaaagtgtctctgcc

SEQ ID NO: 941301 - DNA, 120 bp, Artificial Sequence
  ENSG00000228421_3 (sequence is synthesized)
acattttggtgattcagtcgcattaactctcctacagtaatagagcccctggggtaggctctgctcgtgtgcacatacataataaccttcacagatcctaaggtaaacgttccttgcagg

SEQ ID NO: 941302 - DNA, 120 bp, Artificial Sequence
  ENSG00000228422_0 (sequence is synthesized)
tgtgctgaggactacatcagtctcctgcaattatcatctacactgaaaaacaaagaggacagaggcgaagctagtggccctcaccatcccctgcaagctgattgcttcttactgcaagca

SEQ ID NO: 941303 - DNA, 120 bp, Artificial Sequence
  ENSG00000228422_1 (sequence is synthesized)
cttgagcatcttcctgagagctttcttgggcaatgggaaccaggcttggcccaatcacaggcaggtgaagtatgaggaaatggagaaggcattgtccaaggagcagtcttcaaccttcac

SEQ ID NO: 941304 - DNA, 120 bp, Artificial Sequence
  ENSG00000228422_2 (sequence is synthesized)
caaaatgctgggattacaggcgtaagccatcacacccagccggcacagtgcttttaagcatatggttgatccatatggtggcagtgtcattacttaatttttttaatagttgaataatat

SEQ ID NO: 941305 - DNA, 120 bp, Artificial Sequence
  ENSG00000228422_3 (sequence is synthesized)
cttaatttttttaatagttgaataatattccattgtgtggatatataacatttaaaaaatcaatttataaattgatggacatttggattatttccactttttggctattgtaaataatgg

SEQ ID NO: 941306 - DNA, 120 bp, Artificial Sequence
  ENSG00000228422_4 (sequence is synthesized)
tcatgtgataagctgcctattaatacacaaaagattgcctttcctccttgctctgtcttcctgctgctctcctactaatgtttcctgggattgcctccaaataaaccacttgaactcaca

SEQ ID NO: 941307 - DNA, 76 bp, Artificial Sequence
  ENSG00000228422_5 (sequence is synthesized)
agcgaaacatcagtggaagaggaagaaactgcagggattccaatgttggaagcatttttagcgtacaacaacatcc

SEQ ID NO: 941308 - DNA, 120 bp, Artificial Sequence
  ENSG00000228422_6 (sequence is synthesized)
aggtttcaacctatgaatttggaggggacacaaacattctgaccatcgcccatggcaagtggtgtctatattttgtccccttaaactgggcaggcttctgactgtgttagaagaaactct

SEQ ID NO: 941309 - DNA, 120 bp, Artificial Sequence
  ENSG00000228422_7 (sequence is synthesized)
gtggatttctgaagctgttttataaaaggccatgtagacgtgattctcaggacagcttctgagattcctaagccaccatttgaacaattcagctgccttgaggccaccatgttgtgagga

SEQ ID NO: 941310 - DNA, 120 bp, Artificial Sequence
  ENSG00000228422_8 (sequence is synthesized)
agcccagtttagtccatgtggaaagagaacatggaaaggtcctgacactacttagagagggggagagagagagagagacagagacagagacagagaaagcgagataagacttatctgtta

SEQ ID NO: 941311 - DNA, 120 bp, Artificial Sequence
  ENSG00000228422_9 (sequence is synthesized)
acaggtcagtaaaaagaacaattcatggaatctaaaacttgtattctgtttctggtagcccctattttctagtctgtaaaggctgagataacatcagattctataaaagctgtctttgaa

SEQ ID NO: 941312 - DNA, 120 bp, Artificial Sequence
  ENSG00000228422_10 (sequence is synthesized)
tccatcttaaaaaaaaaaaaaaaaagaaacatcagtggaagaggaagaaactgcaggtacaggaataaacttacgtgatcctcatttcaaggagaagaaggagaagttgaagaaggagga

SEQ ID NO: 941313 - DNA, 120 bp, Artificial Sequence
  ENSG00000228422_11 (sequence is synthesized)
gaaggagaaggatgagaagaaaaacaagaagaggaaggagaaggaggaggaaaatgagaaggagaagaagagaaggaacagcagcagttgcaggaggaggagaaagaggaggaggaggag

SEQ ID NO: 941314 - DNA, 76 bp, Artificial Sequence
  ENSG00000228422_12 (sequence is synthesized)
agcgaaacatcagtggaagaggaagaaactgagagaccagcaaaggagtgaaggaagcagagcaaggaaggagaat

SEQ ID NO: 941315 - DNA, 120 bp, Artificial Sequence
  ENSG00000228422_13 (sequence is synthesized)
cgtgacaagaatgacccgatttcatctgatcaactttcatagaaggaaggaaagaagaaagggaggaagaaaggaaaacagggagcctagagaaaggagggagaaaataagaaaaaaaaa

SEQ ID NO: 941316 - DNA, 120 bp, Artificial Sequence
  ENSG00000228423_0 (sequence is synthesized)
ggataagagaaccccataaggtacagttagggaaagatatcttgtgataaataagatttgccatgtggaaaactgacccaccatcagtgataactgctatggcattttggtaagatgctg

SEQ ID NO: 941317 - DNA, 82 bp, Artificial Sequence
  ENSG00000228423_1 (sequence is synthesized)
tgaagtctagtcacattgtactctcatattgtagcctgaagcaagaatatgatgacagcaggggagtgatgaacttggaggc

SEQ ID NO: 941318 - DNA, 120 bp, Artificial Sequence
  ENSG00000226777_0 (sequence is synthesized)
atggggacacttcagggagcggctctcaggtcccgagaaagaccttcctggccacaggagacacacggacatcgggaacggacggaggaaggatgtgcagttgcagccttttcagcagac

SEQ ID NO: 941319 - DNA, 120 bp, Artificial Sequence
  ENSG00000226777_1 (sequence is synthesized)
gcctcagacctaaggcaggagcaccccctatgccagacctcctgggtcacaggatatgcacggacattgggaagggatggaggatggacggaggaaggacgtgcagttgcagctctttct

SEQ ID NO: 941320 - DNA, 120 bp, Artificial Sequence
  ENSG00000226777_2 (sequence is synthesized)
gcagatgccctgagagaggagcaagaaggtcctcgccagatgctcctggacttgctttggactttcccttgctcttggacttgctctggcacctgtgctcttggacttcacagcctctag

SEQ ID NO: 941321 - DNA, 120 bp, Artificial Sequence
  ENSG00000226777_3 (sequence is synthesized)
agggttgtctggatgggcaggaagagcagcgggggagaaagggctggaggcagggttgggcctccccagggtgtggggtgcagggaggggctgcacaggctgttcccctgaaggagggag

SEQ ID NO: 941322 - DNA, 120 bp, Artificial Sequence
  ENSG00000226777_4 (sequence is synthesized)
gagggagggagcacagaggtgctgggagcaaatggagagggaagtggcagcggcccgagtgccaggcggtcccggtttggggttgatctttgtggaacagctccctggcccgtgtgtaag

SEQ ID NO: 941323 - DNA, 120 bp, Artificial Sequence
  ENSG00000226777_5 (sequence is synthesized)
tggtcgggggaggcacggaggtctggagctacaagcggtggcaggaaggcaggtcccagtcttgggggtctggagcttatcttcttcctgtgaactgagtgtgggcagcacctatgggcg

SEQ ID NO: 941324 - DNA, 120 bp, Artificial Sequence
  ENSG00000226777_6 (sequence is synthesized)
gtgccctggacctgtggtctggtggagtccaggcctcccagggacagcagggcagccagggctagaggagcctgagggtccaggtcagggtggccctggggccactgcctccacctttga

SEQ ID NO: 941325 - DNA, 120 bp, Artificial Sequence
  ENSG00000226777_7 (sequence is synthesized)
ccagctctgctgtggggatctgggcatgagaccccttcacccaggaggggagccgcgtgagtgagaccctaagtccataccccatggggggctctgaccctcctgcatagggcctggaca

SEQ ID NO: 941326 - DNA, 120 bp, Artificial Sequence
  ENSG00000226777_8 (sequence is synthesized)
ggggtgggtggggtgtgcggggggcggtggggagcccagactctcccagacacagcctgctctgctccagaatgtgggcttgggcactgcaggctggctgggtctgggctgcctggtgtg

SEQ ID NO: 941327 - DNA, 120 bp, Artificial Sequence
  ENSG00000226777_9 (sequence is synthesized)
cctgtggtggctgcattcccacagccgggactgaggcctagtgaggaccagggaggagcctgaagggagctccatggaggacctgcctcggatgacacccctatcttaagaaggtcatgg

SEQ ID NO: 941328 - DNA, 120 bp, Artificial Sequence
  ENSG00000226777_10 (sequence is synthesized)
ggtctttgtatttacaccagtcatctcacaatgcgtgttgagctttgcacccttttaccaaatgaggtcaccccatgaatgctgtcatgttatcacagatatgcgcacagaagctgtaat

SEQ ID NO: 941329 - DNA, 120 bp, Artificial Sequence
  ENSG00000226777_11 (sequence is synthesized)
gttattaaacaaagcaatgtatccagatcactcagaatctatgcctgtcacggggagcaggagaagagggtgaatgaagagccacagcatggcaggggagccactgcaaggatgctgaaa

SEQ ID NO: 941330 - DNA, 120 bp, Artificial Sequence
  ENSG00000226777_12 (sequence is synthesized)
ctcgtgtgaacagagttgctgtaggcaggctgctatggaaccttttggggaagcactgcctcttagggatggcagtgaaaatgggagaagagggtggcattgcctccagatggaagatgt

SEQ ID NO: 941331 - DNA, 120 bp, Artificial Sequence
  ENSG00000226777_13 (sequence is synthesized)
agtgctttgccttgctccttggtgcttggagagggaaagggatgctgctgtaaagttcctggctggactttggcttgataaagcacgggcacctttgggagtatgagggtgggtgggtgt

SEQ ID NO: 941332 - DNA, 120 bp, Artificial Sequence
  ENSG00000226777_14 (sequence is synthesized)
gcacatcttccatgaggagctgttagtattggggcagacgtttcaagtatggcagacaaaggatgttctgcgtggggaaatgtggtgacacccatttcacaaggacagctcacatagatt

SEQ ID NO: 941333 - DNA, 120 bp, Artificial Sequence
  ENSG00000226777_15 (sequence is synthesized)
gagtgctcaggaaggaccagcaccatacccagtgcctgatgtgtatcatctcaattagtccttgcctcagatgcaaaaggaaaccatcgccatcatcatcaccaccatcatcatcttcct

SEQ ID NO: 941334 - DNA, 120 bp, Artificial Sequence
  ENSG00000226777_16 (sequence is synthesized)
cctgtgcagatggaaaggctgaggcatagagaggtgacggagtctgcccaggactgcaagcctgctggtggcagagccaggttccaatggaatgaaggctgtcatcctcagatggcaggg

SEQ ID NO: 941335 - DNA, 120 bp, Artificial Sequence
  ENSG00000226777_17 (sequence is synthesized)
taggcaggtggctagagctcacttgggagaaggggaaaggacactgactttggctagggatggagcagagcttgggctggctttccatgcacgggcagggggcgtggctcatggctacgc

SEQ ID NO: 941336 - DNA, 120 bp, Artificial Sequence
  ENSG00000226777_18 (sequence is synthesized)
tccagccccgggtgtggacattgaatcttccaggtctaccctaggctatgggtctggacagcactgtgatggaaagaagacactctatgtcctgcattctgtgaccaatgatgtgactgt

SEQ ID NO: 941337 - DNA, 120 bp, Artificial Sequence
  ENSG00000226777_19 (sequence is synthesized)
gggaatggcgctggcatctggctgccactctgggacgggtggccagctgccatcaggccccacccaggatgggaccaccatgcgacttcttccctcgctcctcctggtcatgtccagagc

SEQ ID NO: 941338 - DNA, 120 bp, Artificial Sequence
  ENSG00000226777_20 (sequence is synthesized)
cccaggaggaccagcaaagcctctcgagccgatggcagctcacgttctaccttgtcagctactcctctcctgggcaacattggctgcttgctgtggctctccccggggtatgtgactgcc

SEQ ID NO: 941339 - DNA, 120 bp, Artificial Sequence
  ENSG00000226777_21 (sequence is synthesized)
tctgtgctgggcacctggcctgggctttccttctgggcctgggcagctgggctcagcttggacccaggcagcagccacagaggggcccatggaggtgacagagttgcttctatgatggtg

SEQ ID NO: 941340 - DNA, 120 bp, Artificial Sequence
  ENSG00000226777_22 (sequence is synthesized)
aacgggcagctgtgacacggaggaggcgaccactcctcagtttccaagtgctgcggtcagggccggggccagcaaagtccctcccatattcaaagagtgggtttgggtttgtcccaggag

SEQ ID NO: 941341 - DNA, 120 bp, Artificial Sequence
  ENSG00000226777_23 (sequence is synthesized)
gacatagtcaggagcccatgctggcacatgcctcctccaaagttcagcctggatccccagcctctgccaacggccccgctccttagctaacccagcttgctcctgggttccacggcggag

SEQ ID NO: 941342 - DNA, 120 bp, Artificial Sequence
  ENSG00000226777_24 (sequence is synthesized)
tcagatgtttctgggcagtttcacctttgtgccttaaatgcatgttgaggactttaaggaattgtggagaaatagggctgtggcaaaggcaagtgacaactgggaacaatgatcctgcag

SEQ ID NO: 941343 - DNA, 120 bp, Artificial Sequence
  ENSG00000226777_25 (sequence is synthesized)
aggctgctgaggcctgggccccaggggcgtgggttcatccttctgcctgggctttggtgggaggggcagactctgtggtctgagacacaaaaaaacccaaaacatacgtgtgtacagaca

SEQ ID NO: 941344 - DNA, 120 bp, Artificial Sequence
  ENSG00000226777_26 (sequence is synthesized)
cacagcagagccacacacacacttgtgcccatgcacacactcacaggaggcccgtggactccgcacagggaagaaactcctccggtcgacagtggacggcgctgcagcagggactcaccc

SEQ ID NO: 941345 - DNA, 120 bp, Artificial Sequence
  ENSG00000226777_27 (sequence is synthesized)
ccaagccctgcctgcctcccattgcccacctggccctggcttgatgggcttatctcatgctgtggccggggacctcttgcttcctgcaaccccttgctggactggggcctgggcctctcc

SEQ ID NO: 941346 - DNA, 120 bp, Artificial Sequence
  ENSG00000226777_28 (sequence is synthesized)
tgggctgtgcctagggtttgtaacccagggcctgtgccggcgtgcacagagcatctctccctgggaggctcagggctgcctcctcgagctctgtgggcctgcactggccggtgagcttgt

SEQ ID NO: 941347 - DNA, 120 bp, Artificial Sequence
  ENSG00000226777_29 (sequence is synthesized)
ggtgtgggttttcaggctgtatccttctacctcctgagcccaggggtcccaggcgccctgcagctgtctcctcggccatcctgtggggccccgaggccttgccctcacttcagtgcctgg

SEQ ID NO: 941348 - DNA, 120 bp, Artificial Sequence
  ENSG00000226777_30 (sequence is synthesized)
gtgctcaggctttgcccaggtgccaggagaaggtgtgagcatgagcctattggacacacctggcgacgtataccaggtgtcccacccctgccaccatggggcctcccgatacggcaacca

SEQ ID NO: 941349 - DNA, 120 bp, Artificial Sequence
  ENSG00000226777_31 (sequence is synthesized)
ccacggacctgtggggaccaatgaggaaagagagaggcaggtctgggccaggctcacagggactccggcatagcagaccctgccccagcaggcccccttgtccttcctgggtcctggtcc

SEQ ID NO: 941350 - DNA, 120 bp, Artificial Sequence
  ENSG00000226777_32 (sequence is synthesized)
ttcatgaggaactagcccatccctggtggggctcccaccccgcttctcagtgggctctatgcttgcctcgtcggagtcacccctcaggcagtcctgggatcctctcctttagacccactg

SEQ ID NO: 941351 - DNA, 120 bp, Artificial Sequence
  ENSG00000226777_33 (sequence is synthesized)
tgccttcccggcctcccgggcttctgctgggggcagaagaaatgcctccccaggtctgtctctggaggctctgagggagatgggcttgggggctgtaggaggaggcagggattccagggt

SEQ ID NO: 941352 - DNA, 120 bp, Artificial Sequence
  ENSG00000226777_34 (sequence is synthesized)
gtcaggaaggcaggggtgccaggtcccacctagtgaagtaataaaccgtgggtggtgatagtgacccagtgccctcactgcccagccccgcctgtcctcagccagcactgcagggatccc

SEQ ID NO: 941353 - DNA, 120 bp, Artificial Sequence
  ENSG00000226777_35 (sequence is synthesized)
aggcccagactctggaggccttcactgatcccagccaccccagaaaagctgcagcctgcaggcaccagccgggccatatgcccagtgccagctagggcccaccgcccatcctgcacacgg

SEQ ID NO: 941354 - DNA, 120 bp, Artificial Sequence
  ENSG00000226777_36 (sequence is synthesized)
ggccgctgggcaggtgcccctcacacccccaggatgtcagtgctcacctcgagcaaagcgccccagctcggccttgggaggtggtcgtgtccagggggatgatggagagctgtccaacca

SEQ ID NO: 941355 - DNA, 120 bp, Artificial Sequence
  ENSG00000226777_37 (sequence is synthesized)
agagagagagagagagagagagagaggaagtgtgggccctaaggctgccttagtggaggtgcgcgtggcctgcacctcaccaagcctagccactctcgcggctctgagtggctcacaggc

SEQ ID NO: 941356 - DNA, 120 bp, Artificial Sequence
  ENSG00000226777_38 (sequence is synthesized)
caagcctagccactctcgcggctctgagtggctcacaggcttgtgagggccccgtcgctgcctgctgggtccccaccagggctccctctaggaatgcgccatggctgctatgacaatttg

SEQ ID NO: 941357 - DNA, 120 bp, Artificial Sequence
  ENSG00000226777_39 (sequence is synthesized)
cacagcccagtggcttaaacaccatttataccacaggtccagatgaatcctgcagggccaaggtctgggggtgctggaggccatgctccctccaggcttgcggggagaacttccctgcct

SEQ ID NO: 941358 - DNA, 120 bp, Artificial Sequence
  ENSG00000226777_40 (sequence is synthesized)
ccatccctgagctctcggctcctcctccgtcttcagggccagggcgtagcgtctgctctctcggcctctgcctccgcttcccacctcacctggcttctgtctatgtcagtctccctctgc

SEQ ID NO: 941359 - DNA, 120 bp, Artificial Sequence
  ENSG00000226777_41 (sequence is synthesized)
caacctcctagaaggacacttgtgattacattagggctcacccctttaatccaggggagcctctccacttcatgattttcagctaacttgcttctgcaaagaccccctttccctataagg

SEQ ID NO: 941360 - DNA, 120 bp, Artificial Sequence
  ENSG00000226777_42 (sequence is synthesized)
gcacacattcactggtcccggggctaaggaccttgctccaagtccctccacccatgatgctgtgccttccagaaacctgtcctctgcagctcggtcttgaccccaagcctgctggtgacc

SEQ ID NO: 941361 - DNA, 120 bp, Artificial Sequence
  ENSG00000226777_43 (sequence is synthesized)
tgaacttcacagggttatccccttggactgtgtgcagcacgatgcaatttctgggcctgaatgtcatgctccctggggcaggaccttgagcctgcagcacacactaggccacctgcagtc

SEQ ID NO: 941362 - DNA, 120 bp, Artificial Sequence
  ENSG00000226777_44 (sequence is synthesized)
tcacaggccatgccctgggtagacagggaggtgctcaaccccagctcgggtcctctagtctgcctggctaccatgcttctcactctcctgcatctgcagaccctgcgttgccatgtgagg

SEQ ID NO: 941363 - DNA, 120 bp, Artificial Sequence
  ENSG00000226777_45 (sequence is synthesized)
caggggtggggtggggctgagggcgtggctttggtccctggctgtccggatgaagtaccagagtgacgccacagcccatcccggtgacatgctcacccccaacccccgtgtccgggaccc

SEQ ID NO: 941364 - DNA, 120 bp, Artificial Sequence
  ENSG00000226777_46 (sequence is synthesized)
cggtcttgtgtggtccctgatgtggagtcctcagtccttaagatacatccagaaagtcctggccatgaattggaggtgcagagtcctgcagagcctctgggctgggctggtgcccccagg

SEQ ID NO: 941365 - DNA, 120 bp, Artificial Sequence
  ENSG00000226777_47 (sequence is synthesized)
agatggagggcctggtggatgccctcctccctcagagctggggcagctgcctcccaggggtgggactctgggctcagagagaggcccttgagctgcagctcagggggatgcgaggcttcg

SEQ ID NO: 941366 - DNA, 120 bp, Artificial Sequence
  ENSG00000226777_48 (sequence is synthesized)
tggactgtgtcctggtccatgtggtgcacgtgtctccacctccaaggagaggctcctcagtgtgcacctcccccacatccgtcctctctgccggccccgggcgtctgagcagtcattcca

SEQ ID NO: 941367 - DNA, 120 bp, Artificial Sequence
  ENSG00000226777_49 (sequence is synthesized)
tgccagcacctctgcagcctgctgggcctcaggttctctgtgagggacctccccggccttcggcggaggtggagtaagctccgtcaaggcaggtggcttcgtcccttcctgtgagtgaca

SEQ ID NO: 941368 - DNA, 120 bp, Artificial Sequence
  ENSG00000226777_50 (sequence is synthesized)
ccagtgatgaaatggacccctccacacaggcatcctcagggcacagggccctgggggcaccttcctcctttcgtatttgttgagaaaaaaagtggcattgcgctcacaccaggatgctgg

SEQ ID NO: 941369 - DNA, 120 bp, Artificial Sequence
  ENSG00000226777_51 (sequence is synthesized)
agcagagctgacatgctcgggaaagggcagaggtcactgggggtgggaaggtcatccagtccagactcagcacctcgtgggctggtaaactgaggctcaaagtgctggtgccaggcctga

SEQ ID NO: 941370 - DNA, 120 bp, Artificial Sequence
  ENSG00000226777_52 (sequence is synthesized)
ggcctcgcggtgacccctctctctggttcccagcacctgcctgagacctgccccaggcacccataacctggaattccctgtttccttgtccagggcctgaggaaatggctccccaggtct

SEQ ID NO: 941371 - DNA, 120 bp, Artificial Sequence
  ENSG00000226777_53 (sequence is synthesized)
gtctctggatgctctgaggcagatgggcttgggggctctaggaagaggcagggactccagggtgtcaggaaggcaggggtgccgggtcccacccagtggagtaacaaactgtgggtggcg

SEQ ID NO: 941372 - DNA, 120 bp, Artificial Sequence
  ENSG00000226777_54 (sequence is synthesized)
tttgggcctccccgccttccccactgggtgtgctggtgctggcgctgctgggtcagggctgcccgtgaccccagacaccactgtccatcctgtgaggctcccgtctgggcatgtcctggg

SEQ ID NO: 941373 - DNA, 120 bp, Artificial Sequence
  ENSG00000226777_55 (sequence is synthesized)
tggattcctcctttctgttaagtagctacatgaggcaggggctcctggatccaaagcaaatgacaggaattccagagccaggtgcatccactcagggcagccagtgttggtggagctgcc

SEQ ID NO: 941374 - DNA, 120 bp, Artificial Sequence
  ENSG00000226777_56 (sequence is synthesized)
tctagcacatggaggagagtgaaagtcagcctgcccctctcacgagaaaagaacctggggatacctctcagcctccagcgttgcaagtgcaaggccagtggagttaatctgcaacgtgca

SEQ ID NO: 941375 - DNA, 120 bp, Artificial Sequence
  ENSG00000226777_57 (sequence is synthesized)
cgagggcgtgtgtcagtggctgtgtgcaggagtgtgagtgagcaagagcaagagcgcatggctcctgctgtacctcaaggtgtgggctcctggtggctgctcagtgttcccaggggtgag

SEQ ID NO: 941376 - DNA, 120 bp, Artificial Sequence
  ENSG00000226777_58 (sequence is synthesized)
aggcctcatgtatcctaggctgcctgagatttctgtgtgctgatcgcatcctcagtttcttgtccaccgcttcactggcaagagtcccaggctccaaggacaccctccctgcacatgatt

SEQ ID NO: 941377 - DNA, 120 bp, Artificial Sequence
  ENSG00000226777_59 (sequence is synthesized)
gggtgttaatggtggcctgggttgtgtcttcccctggggatgagggttgggtgtccatggtgccctgggctgtgtcctcccctagggatgagggtcgggcctccacgatgccctgggctg

SEQ ID NO: 941378 - DNA, 120 bp, Artificial Sequence
  ENSG00000226777_60 (sequence is synthesized)
tgtgctcttatgggaatgagggttgggtgtccaagatgccctgggctgtgtccttccctggggatgagggttggatgtccaagatgccctgggctgtgtactcccctaggaatgagggct

SEQ ID NO: 941379 - DNA, 120 bp, Artificial Sequence
  ENSG00000226777_61 (sequence is synthesized)
gggtgtccaagataccctgggctgtgtcctcccctggggatgagggttgggtgtccatggtgccctgggctgtgtcctcccctggggatgacggttgggtgtccatggtgccctgggctg

SEQ ID NO: 941380 - DNA, 120 bp, Artificial Sequence
  ENSG00000226777_62 (sequence is synthesized)
tgtttccttggggatgagggttgggtgctatggcatcctgggcaggtgcttcctttctgcacaagggttgggtgaccatgatgtcctggcaatggcttccctgggttgcctcttttctgc

SEQ ID NO: 941381 - DNA, 120 bp, Artificial Sequence
  ENSG00000226777_63 (sequence is synthesized)
catgtgggaagagcaggggaggtttagttggtctcagcacatcattctctcaggataagtagaagagtgtctgagctgtgaggccagtgctccagctttggaattgtcttccccaccctc

SEQ ID NO: 941382 - DNA, 120 bp, Artificial Sequence
  ENSG00000226777_64 (sequence is synthesized)
acctccatcccatcaaagcccgacatgtcgtgtggcagcagcgaggtgggtgttggctgttctcttgggctgggggttagtcgtggacggggaaaggagagatgctggtcaaagggcatg

SEQ ID NO: 941383 - DNA, 120 bp, Artificial Sequence
  ENSG00000226777_65 (sequence is synthesized)
aagtttctgctgatgggaggagtcagttcttttgatctgttgcacagcatggtgactatagttaacaataatgactatttcaaaattgctaaaagatgagattttaaatgttctcaccac

SEQ ID NO: 941384 - DNA, 120 bp, Artificial Sequence
  ENSG00000226777_66 (sequence is synthesized)
aaaatgataagtgtgtgaggtgatggatatgccacttaccttgttttaatcatcccacaatatagacaggcattgtcactttgcattgtaccccaggaatcttcacatttgcttttttgt

SEQ ID NO: 941385 - DNA, 120 bp, Artificial Sequence
  ENSG00000226777_67 (sequence is synthesized)
caattaaaaatagagacacaaaaggagagaggggagagcaatagactcttcacggaaccgtgggcttctgcctccgggtaaaataaactgcaaaaaggattcccaggaaaccgttccctc

SEQ ID NO: 941386 - DNA, 120 bp, Artificial Sequence
  ENSG00000226777_68 (sequence is synthesized)
tttcagcccttggttacaggaagccggatttgggaaatctgcctggatgacattcacatgaacgggcacatacaggaaaacacggtaatgtaattagaatagtcagagaaaagtagccag

SEQ ID NO: 941387 - DNA, 120 bp, Artificial Sequence
  ENSG00000226777_69 (sequence is synthesized)
aaatgacattcacatgaacgggcacatacaggagaaaacacggtaacgtaattagaatagtcagagaaaagtagccagaaatgacattcacatgaacgggcacatataggagaaaccatg

SEQ ID NO: 941388 - DNA, 120 bp, Artificial Sequence
  ENSG00000226777_70 (sequence is synthesized)
gtaacgtaattagaatagtcagagaaaagtagccagaaatgacattcacatgaacgggcacatacaggaaaacacggtaatgtaattagaatagtcagagaaaagtagccagaaatgaca

SEQ ID NO: 941389 - DNA, 120 bp, Artificial Sequence
  ENSG00000226777_71 (sequence is synthesized)
ttcacatgaacgggcacatacaggagaaaacacggtaacgtaattagaatagtcagagaaaagtagccagaaatgacattcacatgaacgggcacatacaggagaaaacacggtaacgta

SEQ ID NO: 941390 - DNA, 120 bp, Artificial Sequence
  ENSG00000226777_72 (sequence is synthesized)
attagaatagtcagagaaaagtagccagaagaatttgcaacgtgcccttgtaacaccaaatttgatcagttttttaaaaaatgatcgttatgtaggtgattgagaagtaaatgtattctt

SEQ ID NO: 941391 - DNA, 120 bp, Artificial Sequence
  ENSG00000226777_73 (sequence is synthesized)
ttttaaggtaaaaatttggacccttatcatgcatacccccctctgtgctcttcaaatcaacatcattattaatatctgtacatttttgctcatctgagccagcacaggctgaggctgtca

SEQ ID NO: 941392 - DNA, 120 bp, Artificial Sequence
  ENSG00000226777_74 (sequence is synthesized)
gaatggacaccttttggttgttgggtttctgtcagtttctggggtgaagctgcgtgattgagaacgtagctcttggctgccatctcggggattattaaggactgtgaactctatccacaa

SEQ ID NO: 941393 - DNA, 120 bp, Artificial Sequence
  ENSG00000226777_75 (sequence is synthesized)
gccatggcaatatctgtcccaccgaatgctccctctaacacactcttactcccgtgatgtgtgttaagggctccgacgatgctgaaaacagcacaggatgtgaaaaggcaggaacagttc

SEQ ID NO: 941394 - DNA, 120 bp, Artificial Sequence
  ENSG00000226777_76 (sequence is synthesized)
tgaagtcaaaggctgatgtcctgtttctctttccctctgtgaccgactcccttcccagtggtaacaagtacccacagcttggtttgaatttctgcacgctgttgtctgtgcactcgctca

SEQ ID NO: 941395 - DNA, 120 bp, Artificial Sequence
  ENSG00000226777_77 (sequence is synthesized)
cacttacgcacacagcaggcatgtgggcgatgctgggtattttgtgtatgagtgggatgcacatacacacatctacatccatatcatgcccatgcatctgtaacttgcttttcccgtgta

SEQ ID NO: 941396 - DNA, 120 bp, Artificial Sequence
  ENSG00000226777_78 (sequence is synthesized)
agaacacttcttagagtttgttcaatgcatgtgtctgtgtgaatgattgaaggcatttctaacccattttaaagatggctacttaggaccatatggatgttgtactgatgtcatttgacc

SEQ ID NO: 941397 - DNA, 120 bp, Artificial Sequence
  ENSG00000226777_79 (sequence is synthesized)
acgtccattgtttccatcttttgggctgttcttgtgtattttactttccatgtaacactgtgacattgagaattggtacctacaacagtctatttgctttacattaaatttgtaggctaa

SEQ ID NO: 941398 - DNA, 120 bp, Artificial Sequence
  ENSG00000226772_0 (sequence is synthesized)
attattataaacagtagaacatgttaggctaatgtgggtaaaagaactaccacatgagctttgtatggtatttagcaaggcatttatcaaatattacttctggggacccattcaaatcca

SEQ ID NO: 941399 - DNA, 120 bp, Artificial Sequence
  ENSG00000226772_1 (sequence is synthesized)
tacaagatatttttctcccctaggctgcttctgagcggttgccctctctatacctgaaagaatcagaaattaaccaaaagtaggaattctcatggggcttacccatcaagggaatacctt

SEQ ID NO: 941400 - DNA, 120 bp, Artificial Sequence
  ENSG00000226772_2 (sequence is synthesized)
tagaatgaggtgctaaggaaatcagcattcctattcctgaaaagcctcaacaagagaagtgaaaatcctcgcccaggatggcttctcctttcacatgctccatgaaatccaccagcctaa

SEQ ID NO: 941401 - DNA, 120 bp, Artificial Sequence
  ENSG00000226770_0 (sequence is synthesized)
cgccttgttactttctttctgcaaaaactaaagccaggaatcattttcagtgaatcaattgaatacagctagtagaaacataaaaaggtggcaattaaacagtaagaaagcatctggcat

SEQ ID NO: 941402 - DNA, 120 bp, Artificial Sequence
  ENSG00000226770_1 (sequence is synthesized)
aaattaagtgaacagatcaccaaatcatttggaaaacaacacatatatttggcactggttttggcatttggagggaacacgcttaggagtaagagtctgcaaccaagaagcttacattct

SEQ ID NO: 941403 - DNA, 120 bp, Artificial Sequence
  ENSG00000226770_2 (sequence is synthesized)
aagagagaaaataagaaaataaagccgagcacgccaagaaccaaggagcccagggcaggctgcacggcatgccctgtgccccacccacactgcttcctcttctgaatctctgcaccccta

SEQ ID NO: 941404 - DNA, 120 bp, Artificial Sequence
  ENSG00000226770_3 (sequence is synthesized)
agtctgtttgatggtaatctataaatttgccacataaagcataaaccataccacaaaaagcttaaaggaatacccactgaattccagctgctgaaggttgtcctgccctttccttgtggt

SEQ ID NO: 941405 - DNA, 120 bp, Artificial Sequence
  ENSG00000226770_4 (sequence is synthesized)
ctccaaacacaagcttgttttatgtcacattattttctcccctctttatgggccagattcaatttgtcactacttggatattgaacactttttgcaaattaaagagaaagtcacctcagg

SEQ ID NO: 941406 - DNA, 120 bp, Artificial Sequence
  ENSG00000226770_5 (sequence is synthesized)
caactttcaaatagaggcttattggggacttgatgatactgcaaatcattaaagaacttaggttctgtacctctgccctcactgatcaaatagaggccactcctttgaagccagcaagga

SEQ ID NO: 941407 - DNA, 120 bp, Artificial Sequence
  ENSG00000226770_6 (sequence is synthesized)
cccatgggactgacctaatgctttttgccttcagcttctgaagcttatcacattactaatgtttgagtctctaatccagctggctagtttaatcatcttgaagtaaaacaatactattaa

SEQ ID NO: 941408 - DNA, 120 bp, Artificial Sequence
  ENSG00000226771_0 (sequence is synthesized)
gtgaagatggacagtgtgtgaattataagagctctgtttctaaagtgattcaactatacttgcacagaattccaaaagctctactgtttattactcttcattactaatacagcctttgat

SEQ ID NO: 941409 - DNA, 120 bp, Artificial Sequence
  ENSG00000226771_1 (sequence is synthesized)
tgtaagcaggctgtcctttgtgaataacaatcacagatacagacatcttcagacagttcaagtcgtgtgcttcaatcaaactctagtcggaaaagaactttcagagcaaggctgcttcca

SEQ ID NO: 941410 - DNA, 120 bp, Artificial Sequence
  ENSG00000226771_2 (sequence is synthesized)
ttgcatggtgcactcactcaaactttatgtttccctgttttataaattcttaagagcactgcatggctcacaaaaatctaatactggcactctctatgttggcgattactgaatggaaat

SEQ ID NO: 941411 - DNA, 120 bp, Artificial Sequence
  ENSG00000226771_3 (sequence is synthesized)
atgcatatttagcttgaaagaaagaagggtaatattttccttgcaatttattcaccatttcctttatataacctgaaatcatgagctttgtgacacattggaaaagaaatactttattat

SEQ ID NO: 941412 - DNA, 120 bp, Artificial Sequence
  ENSG00000226771_4 (sequence is synthesized)
agaaaatataactagatagtaatgagttttaaagcagagtattgaccatgtataatggttctcacagatatgaaatgaaaaaatccgaaaaataaaagtaaatctcttaaaaatactaaa

SEQ ID NO: 941413 - DNA, 120 bp, Artificial Sequence
  ENSG00000226779_0 (sequence is synthesized)
acttggtgaaattcctcagggattttgagacatcaaagcaatctctctagttctggaaagactgaatttgcagcatctgctgaaatgaggaataatcaatgttcaccagcggaaattgaa

SEQ ID NO: 941414 - DNA, 120 bp, Artificial Sequence
  ENSG00000226779_1 (sequence is synthesized)
aagcaaagagatggggaagattccaaggatccactcaagttcctggtgtttttgtgaatgttctgtgtttaagacatgcttttgtttaggagaagacatgagctgagccaactgggataa

SEQ ID NO: 941415 - DNA, 120 bp, Artificial Sequence
  ENSG00000226779_2 (sequence is synthesized)
agaagaggttgaaaatgcgtatggcttagacagagtaaagagttttagataaaatatcggggtaacttttagagtcttggcttaaggccaaagcttctgaatcaaggaaagagtgacagt

SEQ ID NO: 941416 - DNA, 120 bp, Artificial Sequence
  ENSG00000226779_3 (sequence is synthesized)
tgccttcctctatttttattaatatacaggtgtgttaccattattacctgccagaaagagcataatattaatccaatcaaattatatgagtcctacagtagaaatattgcagacatttaa

SEQ ID NO: 941417 - DNA, 120 bp, Artificial Sequence
  ENSG00000226779_4 (sequence is synthesized)
agtgtgatatatacagaatagaaacgatgctggactgccagaaaatctgcctctccctcccactcccccaagatctattaggaacgagcatttactgttattatttcaaatatttatgca

SEQ ID NO: 941418 - DNA, 120 bp, Artificial Sequence
  ENSG00000226779_5 (sequence is synthesized)
aagtaattttaaatgatttaaacattccatatatcaatcaaagttaataataagttagattctgaaacatttgtgccattaacaacagtcagaaagataacattatttcattggtattaa

SEQ ID NO: 941419 - DNA, 120 bp, Artificial Sequence
  ENSG00000226779_6 (sequence is synthesized)
atgaggcaatcaacagtttgatggaaaaaaaaaaaaaactaagtgtattttttaaaattacacttttacatagagttagaaaactagtccatagaaaggaaactgttgaccaattacacg

SEQ ID NO: 941420 - DNA, 120 bp, Artificial Sequence
  ENSG00000226779_7 (sequence is synthesized)
ttgttatatctaacttgtatattgttcttactataggctatgctctgtcctcctagatttacatatatttgtaattttttctcacaacaaccttatgagttggaactattattgactcca

SEQ ID NO: 941421 - DNA, 89 bp, Artificial Sequence
  ENSG00000254599_0 (sequence is synthesized)
agtggtgagagtgggcatccttatcgtgttccagttctcaaggagaacagttccagcttttgtttcttcaggatgatgttgtctctgtg

SEQ ID NO: 941422 - DNA, 120 bp, Artificial Sequence
  ENSG00000254599_1 (sequence is synthesized)
aaagccctgtagaagatctttatttcccggtcaatccttgctcctggtttcccaggcattgtggagacaaagttgaataaacatggaaattttacaatacgtttaaaattcagtagatca

SEQ ID NO: 941423 - DNA, 120 bp, Artificial Sequence
  ENSG00000254599_2 (sequence is synthesized)
aaaataagatttaaacatctgttggagatgattattcaacaaacttcaaggtagatttcatcaaaattacgtaaatacaacaaaagaaagtgacatatataaatgatattaacacatcat

SEQ ID NO: 941424 - DNA, 120 bp, Artificial Sequence
  ENSG00000254592_0 (sequence is synthesized)
gggagaggaggcagcaccgggcacggagcacaaaacacgttggatactcttccaagatatcacggctcaggagagtcttccaacggtcctgtaaggttcctcaacagcagcatcagtgcc

SEQ ID NO: 941425 - DNA, 120 bp, Artificial Sequence
  ENSG00000254592_1 (sequence is synthesized)
ataaagtctcccttccactgagtcctgctaacagcagaggagtgaaaaaaactcatgggacaaactgctgtccccacacgtcactgtgtctgtctgcaaatgtaggaaggatggggacct

SEQ ID NO: 941426 - DNA, 120 bp, Artificial Sequence
  ENSG00000254592_2 (sequence is synthesized)
gtcccagggaagacagagtcattccgcagtgataaagcagcatgtttctgacacaggggtgtctgtgcctatcctcattcctccctcatcaccatcaccggagcatgctccttgcatcag

SEQ ID NO: 941427 - DNA, 81 bp, Artificial Sequence
  ENSG00000254592_3 (sequence is synthesized)
ctaagaaaatggaggctcccaaaggaaggagaaaattcacccagcgtcacacagcttgcaagaggcagagaggaagccgat

SEQ ID NO: 941428 - DNA, 120 bp, Artificial Sequence
  ENSG00000254592_4 (sequence is synthesized)
cagcgtcacacagcttgcaagaggcagagaggaagccgattccagctctgcctgcaggaccctctcatcccccctccgcttcccttcttgacaaagggtcttctccactctggaggtgcc

SEQ ID NO: 941429 - DNA, 120 bp, Artificial Sequence
  ENSG00000254592_5 (sequence is synthesized)
acctgtgggcacaaaggtctctggggagatgtggattcctgaagacctgcaggggaattgggagagggttttctcacaggatgatcctatgtagagaggtgagtttggcacagctatcat

SEQ ID NO: 941430 - DNA, 120 bp, Artificial Sequence
  ENSG00000245261_0 (sequence is synthesized)
tcttttctgcccatgtgacttaccagtcagtaagcaacctgaggacaggactcacagtttagactcagcatcagtgcattagagctggagagagcctgggagagcccttgctccagtgac

SEQ ID NO: 941431 - DNA, 120 bp, Artificial Sequence
  ENSG00000245261_1 (sequence is synthesized)
cccaatcccctgatgcccactcttaggatttcaaatccctatctgggaagtacagtctggaaaagttccccaagtgattctgataggcacctgaccaaatacccttgatgtgggctagcc

SEQ ID NO: 941432 - DNA, 120 bp, Artificial Sequence
  ENSG00000245261_2 (sequence is synthesized)
aacccctttattttgtaggaatccccaggaggtgaagtgatagggtccagcagcatcaggcaggttggcccaaaagccgggatgtgcgcccaggtctaacatccattcacccgctttgct

SEQ ID NO: 941433 - DNA, 120 bp, Artificial Sequence
  ENSG00000245261_3 (sequence is synthesized)
gcctttccttctggactcgccccagggcaggggctgtgctgggacaggaggacctcaactcccgcagaatgcaggagcagaaggggtctgggccgggcagtacctgggcagaatgctgca

SEQ ID NO: 941434 - DNA, 120 bp, Artificial Sequence
  ENSG00000245261_4 (sequence is synthesized)
tggatccgccggagcagctccatgcccgtgctgaggcagtcggcccgcaggaggcgcagggaggaggccaggtctctgcaccgcagcagggtttcctctgcagagggggcaggcacagag

SEQ ID NO: 941435 - DNA, 120 bp, Artificial Sequence
  ENSG00000245261_5 (sequence is synthesized)
gctccctcccttctcattctcatccattccttcctccaacaaacacctatggaacgtctaccaagcaccaggtgcagctctagacattctcatgaagctccctaggggagcagggtaaag

SEQ ID NO: 941436 - DNA, 120 bp, Artificial Sequence
  ENSG00000245261_6 (sequence is synthesized)
accagaaaccaagaaacatccacgaacatctgcgcccttgggcaccttacaatgtaggctttcgacctgagctttaacagccaggcagtgagaaggccatgaagaatgaagaggaagagg

SEQ ID NO: 941437 - DNA, 120 bp, Artificial Sequence
  ENSG00000245261_7 (sequence is synthesized)
agagagggaagacaaaccagctgatcaatgtggaggcccttttccccatgggctttgagaatacgaacaagaagacagctcaagagattcctcttctgttccagggttcggccttcatcc

SEQ ID NO: 941438 - DNA, 120 bp, Artificial Sequence
  ENSG00000255970_0 (sequence is synthesized)
agttatgacacaacacaatgccctcaccagaagcaaccagaggcagaccctcgaccttggacttcccagcatccagaactcataagatttacctttattttttaatattggagaacttgc

SEQ ID NO: 941439 - DNA, 120 bp, Artificial Sequence
  ENSG00000255970_1 (sequence is synthesized)
catgtaaatcctaacatgtggatgaactaaatacctggggagttcatcatctctcacaaactaaatccagagaaaaaacttcctgacacaagaaaaaactgcagttaaatggaaaacaaa

SEQ ID NO: 941440 - DNA, 120 bp, Artificial Sequence
  ENSG00000255970_2 (sequence is synthesized)
taaagcaaatgaaaattggaatgtggagcattttgcatgccagataagaaagggcatgtgacaaaggagagccatttcttccatttgagattggagggggaagagtccaaggctagaatc

SEQ ID NO: 941441 - DNA, 120 bp, Artificial Sequence
  ENSG00000255970_3 (sequence is synthesized)
ttgagattggagggggaagagtccaaggctagaatcatgtggctgaccaggctcctgggacttccacatctgcacaatggatcatgcaaaggtccgcagcttcactcctgagccagcaag

SEQ ID NO: 941442 - DNA, 67 bp, Artificial Sequence
  ENSG00000255970_4 (sequence is synthesized)
caagaccacgaacctaccagaaggaagaaactccgaacacatcccaacatcagaaggaacaaactcc

SEQ ID NO: 941443 - DNA, 120 bp, Artificial Sequence
  ENSG00000255970_5 (sequence is synthesized)
acactatcctgggggagcagcctggccctaaaagagacttgtgcgtgaccccaggagacccactgacatggatcaggaaactgctttagaatcccaggaacagggctacgaccaaactcc

SEQ ID NO: 941444 - DNA, 120 bp, Artificial Sequence
  ENSG00000255970_6 (sequence is synthesized)
gtactctcccatttgcctatcgtgtcagtatctctgtattgtcactggtgtattaaaaatcttggcctaaacaaaacaaacaaacaaaaatgaaatcctgctgtttacctagtttagctg

SEQ ID NO: 941445 - DNA, 120 bp, Artificial Sequence
  ENSG00000255970_7 (sequence is synthesized)
caaggaccagaaaactcaaaataacagtggcctaaacaagatagacatgcatttctatcttacctaaatgaaatcagtaggtgtaaaaagtccacaactgctgttacggcagtctcaaaa

SEQ ID NO: 941446 - DNA, 120 bp, Artificial Sequence
  ENSG00000255970_8 (sequence is synthesized)
agtcctcgagggtctagactcagcctccctcttccctctttgccatcactggagtggtccatgttccagtccacaaagtggggaaagaaaaaggacacggttttctcttagaaaaggtgt

SEQ ID NO: 941447 - DNA, 120 bp, Artificial Sequence
  ENSG00000255970_9 (sequence is synthesized)
gagaagctgagaaacatttctgtttacatctcattggccagaatgtagtcacaagatcaaaatcatacctagccacagggaagctggaaaaacctagtctctcagacgaaggagtgtctt

SEQ ID NO: 941448 - DNA, 120 bp, Artificial Sequence
  ENSG00000255970_10 (sequence is synthesized)
tgagggaatgacaaactgtatctgtctaccatgcttgaaatgcaagagtcccatcagctagggttcattcttgggaaccacttcaacttgtcttcttcagagaagcacttcagtgggacc

SEQ ID NO: 941449 - DNA, 120 bp, Artificial Sequence
  ENSG00000255970_11 (sequence is synthesized)
agagagaacactgtgcatcccaggattgcagccactggactccagcaactcgaggaagaggcagccattgataccagacctagaattcactaaaggtcaatgccttcaggaattttcatc

SEQ ID NO: 941450 - DNA, 120 bp, Artificial Sequence
  ENSG00000255970_12 (sequence is synthesized)
tgatttgatgattgatgccctccccatcatgagccccaggaagtctcccatgccacgttccagctgaggcacccaacagcaatgatgttttgtgaaaatagtgtgtgatttggatgcaaa

SEQ ID NO: 941451 - DNA, 120 bp, Artificial Sequence
  ENSG00000255970_13 (sequence is synthesized)
gacttgcttctgtaaagaagagaataccacactctcctctcccagtcatgtggggagttaatcgaaacccacggaaagtgcattgcataaggtgggtgtctgataaatgcccacaccttt

SEQ ID NO: 941452 - DNA, 120 bp, Artificial Sequence
  ENSG00000255970_14 (sequence is synthesized)
ggcttctcctctactgataactctttttccctcatcttcctgatgtaaaaggtgagtgggagcctttatgcctttccctgaaagtagaagccagcctcaccccagcctgtgaggctgctg

SEQ ID NO: 941453 - DNA, 120 bp, Artificial Sequence
  ENSG00000255970_15 (sequence is synthesized)
aaccagcctcttgccctttcctgcgtttctcagggcttccaccctcccctcaggccctttcacctctccatgtcatctctttattcagttctccaccaagccttccccgctaccttcagg

SEQ ID NO: 941454 - DNA, 120 bp, Artificial Sequence
  ENSG00000255970_16 (sequence is synthesized)
aagctttgcaaactggcacgaaaccctaaattcacagtatagagtctggaatgcactccccactgcttggtgatccgtcataccatactgttttctgcttatctttctctaagacaacct

SEQ ID NO: 941455 - DNA, 120 bp, Artificial Sequence
  ENSG00000255970_17 (sequence is synthesized)
gtaccctcaatctggtgccacttaacatggcaataagagtgtagtaagtagggccacttcacatggtctcatttatgtagatgcttgttctttcaagcttgtcacccccaattcagtatc

SEQ ID NO: 941456 - DNA, 120 bp, Artificial Sequence
  ENSG00000255970_18 (sequence is synthesized)
tactatagatacattgacagggcttggaaattgaccagagtatggtcttccgtgccttcaaattgctgtgtggggcttctgagaagacaaactttggaaattgcccctcttttgcagagg

SEQ ID NO: 941457 - DNA, 120 bp, Artificial Sequence
  ENSG00000255970_19 (sequence is synthesized)
attcagcggaactcaggaatatgccagtacccacctaccctgtgatagccagcctctaaaatagtctccagcgatttctggcttccaatactcacactctaatatggtcccctcccacac

SEQ ID NO: 941458 - DNA, 120 bp, Artificial Sequence
  ENSG00000255970_20 (sequence is synthesized)
tgtatcagggttggtgtgtaaccagtagagtgcaggaggagtggtagataccactctggaagagagattatggatgtcatttggtcctgtcttgctttcccttggatcacttgctctggt

SEQ ID NO: 941459 - DNA, 120 bp, Artificial Sequence
  ENSG00000255970_21 (sequence is synthesized)
ggaagccagtggccagtctcatggacagttgggcagcccagtggacgacctaacagttcgactgccacttcatggaagaccctgagccagaacaagttagttaagctgctcccagattcc

SEQ ID NO: 941460 - DNA, 120 bp, Artificial Sequence
  ENSG00000255970_22 (sequence is synthesized)
tgaccctcagaaacagtgtgaaagacaaataccagactgacacatttttggcaagtttttgtgcagctatagataactaacacaaactttctattccaaattgccactatttacctcccc

SEQ ID NO: 941461 - DNA, 120 bp, Artificial Sequence
  ENSG00000255970_23 (sequence is synthesized)
ctgcagaaatgtccaccacttacaaaggtatagctgaagcccatctaaggtgagccaactttacttataattgaaaacaaattatatgtactttaaaagtatttgagcaccattttattg

SEQ ID NO: 941462 - DNA, 120 bp, Artificial Sequence
  ENSG00000255970_24 (sequence is synthesized)
ccaaacaatacacccaacaaagtcaaacaacctaacttcccttaacaagaatatcaggtttgtctatattatgattggaaacaaacataaattatatttgttttcctagacagtctaagg

SEQ ID NO: 941463 - DNA, 120 bp, Artificial Sequence
  ENSG00000255970_25 (sequence is synthesized)
tttcaatgggttgctgtaaaagaatttgaagaaagctgcaccaactggtgttttgaaattcaaatacccttagtttaagccacaataaatgaaataaaaccagtacatgaaataaaacca

SEQ ID NO: 941464 - DNA, 120 bp, Artificial Sequence
  ENSG00000254620_0 (sequence is synthesized)
attcttcatttagctgggtaaagtcctgagctcttctggaaaaatgagcccatggaaagcaagactgggagcctccagcaggagaaagcagggcagtgggggtggctgtgcccccctgcc

SEQ ID NO: 941465 - DNA, 120 bp, Artificial Sequence
  ENSG00000254620_1 (sequence is synthesized)
tcccagccagtgtttttcgaagagcatcctgagtgaatttgattctcccttctcagcctcagtttctttaccttgaaatggggctgatgatcccatcttcaggcaggaatatttttcaaa

SEQ ID NO: 941466 - DNA, 120 bp, Artificial Sequence
  ENSG00000254620_2 (sequence is synthesized)
tctcccttctccttccaggctgtcatcagctccttgaaactatactctagcttctcccagactctaagacatccattttctcatgaattcatttgctgaaaacattcctggagcctgagc

SEQ ID NO: 941467 - DNA, 120 bp, Artificial Sequence
  ENSG00000254620_3 (sequence is synthesized)
tgttccagatgctaaatgctggtgattccacagcagacaaaagaaaattcctgctttcatggggcttcttgtgaggacaatgacactgggccaacacaaaaatgaaagttgatcagagca

SEQ ID NO: 941468 - DNA, 120 bp, Artificial Sequence
  ENSG00000254622_0 (sequence is synthesized)
agattccagcctcagcattcccagagaaggcccaggatctccctgagaggcccagttggtgtttgtggaatcatcactcctctggtgatcacgcagtttgcctcactttctccatggagc

SEQ ID NO: 941469 - DNA, 120 bp, Artificial Sequence
  ENSG00000254622_1 (sequence is synthesized)
tctttgctaaaggacattctcctccagctgtgaaggaaaagcccaacaaaaggcagggtactttgttctaactgaggatgtctactgacacagccaagctgtaaagcagaccacggacgg

SEQ ID NO: 941470 - DNA, 120 bp, Artificial Sequence
  ENSG00000254622_2 (sequence is synthesized)
cagtgcagcggggagaacaactctacatctggttggaggtggagtaatgtccagtctgggcacagagagatggcaggtgtgcagctgcactcagcatgggatagagcaccacctgccagg

SEQ ID NO: 941471 - DNA, 120 bp, Artificial Sequence
  ENSG00000254622_3 (sequence is synthesized)
ccagaacagaaagaagggcgacggagactggcagagaaacagcaattactgctcagtgagaagtaaacagcgtctgcttccagaggctttacggaccagaaagcccacaggaaatagctc

SEQ ID NO: 941472 - DNA, 120 bp, Artificial Sequence
  ENSG00000254622_4 (sequence is synthesized)
tcttagaagagttaatcacccctgaccccagaaaactctgtattcattagcagtcactccctttcccctttccacccctctccaacattaggcaaccactaatctactctctgtctccat

SEQ ID NO: 941473 - DNA, 120 bp, Artificial Sequence
  ENSG00000254622_5 (sequence is synthesized)
aaactggtctattttggacatttcacataagcctccctggatcccagtttaagcatcctggggtttgtctgcctgccagagccatggtgccactggggctacctgtcctgtgggatgaca

SEQ ID NO: 941474 - DNA, 120 bp, Artificial Sequence
  ENSG00000254622_6 (sequence is synthesized)
aggcaggtccaaacctttgcctgctctcccatccattccttttgtgttagtccatgtgtctcccgactgttctctccaacaacaacacagactgacaaaacctactgacttggagtcagg

SEQ ID NO: 941475 - DNA, 120 bp, Artificial Sequence
  ENSG00000254622_7 (sequence is synthesized)
aacagactttgctattttctggctgtgtgatcctgatgagtcccttgaacctcctggacttgttcctcagcctaaaaaccaagactaataaatcaagtctatctcacagccttacgtggg

SEQ ID NO: 941476 - DNA, 120 bp, Artificial Sequence
  ENSG00000254622_8 (sequence is synthesized)
gatcaaaaaacatggagcatgtgaacacacattgtacatcacgaagctgtatgcaaataaatatcgtgtaactccagccctttttgagtttataaataaaagtgaaaacctcataaccct

SEQ ID NO: 941477 - DNA, 120 bp, Artificial Sequence
  ENSG00000254625_0 (sequence is synthesized)
ggctccagcatacctccaccctgagatgtcctcacacatcagacgctgacctagcagagcccacactatcttccagtaaagaagaacctgcccttacagagaactgggcgcgcagcactg

SEQ ID NO: 941478 - DNA, 120 bp, Artificial Sequence
  ENSG00000254625_1 (sequence is synthesized)
ccaccagtgtcaactctgagtgtagacacaactgaaactgttccttcatacacatgcagttcagctttcagacactcaacaagagccttgacaccctcaagctggggtgaggacacagtg

SEQ ID NO: 941479 - DNA, 120 bp, Artificial Sequence
  ENSG00000254625_2 (sequence is synthesized)
aggaggtgccatctatgaacgaaaaagctggttctcagcagacaccaaatctgctgccaccttgatttggacttctcaacctctagaacactgaaaaatatatctgttgttcataagcaa

SEQ ID NO: 941480 - DNA, 120 bp, Artificial Sequence
  ENSG00000254627_0 (sequence is synthesized)
tttcaattatcatggaggagagggaaacgtctcaagtccaatgactgagctacaaacagcagaacaaacctgtgtttcttcacaagcccattaaaaaaacgtgacagagacctggcctag

SEQ ID NO: 941481 - DNA, 120 bp, Artificial Sequence
  ENSG00000254627_1 (sequence is synthesized)
ctccattcctgtggctgcaaagaggaggaaaaagccctggtcgggaaatcagcaccctgaagtggattctgagctttgaagctgagaggccttgaacaaatgattaaatcactctctgaa

SEQ ID NO: 941482 - DNA, 120 bp, Artificial Sequence
  ENSG00000254626_0 (sequence is synthesized)
tgacactgacatggactcagacctccttaaactaagcttccccgctcctaagaagcaccccccaggccaggaggcccttccaagagagctgctgccaagaatttccctccatcagcgtcc

SEQ ID NO: 941483 - DNA, 120 bp, Artificial Sequence
  ENSG00000254626_1 (sequence is synthesized)
accctcagggagcctctgaatcaataaggcctttctatgcactccttggctcaaggaggctctaattagcttaaggaagaaggaaagttattggcttgtttaattcaaaagtctgaggtt

SEQ ID NO: 941484 - DNA, 120 bp, Artificial Sequence
  ENSG00000254626_2 (sequence is synthesized)
agtgctggcttcaggcacagtttgatacaggggctcaaatgacgtcaaagaacccaggctcctcatcagcttggatttataccctcaaatgtcaggttcattctcagcagattttcttct

SEQ ID NO: 941485 - DNA, 120 bp, Artificial Sequence
  ENSG00000254626_3 (sequence is synthesized)
gaagatgtctctgaaattgctttgtaaactgtgaagttgcatccacatgtaaagcattggtattaaggagctgaataaagcctccatggcaaggaaaactgtcagtgagaagtagaaata

SEQ ID NO: 941486 - DNA, 120 bp, Artificial Sequence
  ENSG00000254626_4 (sequence is synthesized)
ctccccctcacagcgacgccacaggggtgacagcgaaagaacagctgctcagcacccgagcttgtcgggagaaaacacagtgtcatcagaataaaccgcataaatagaaccctcttggag

SEQ ID NO: 941487 - DNA, 120 bp, Artificial Sequence
  ENSG00000254626_5 (sequence is synthesized)
tcgtgcaccacctgttcccacagttaccatcagccaggcttcaccacaacccacctactcacggagggctgagaggacagaagagaggaccctgttttacagagaggtaaactgaggccc

SEQ ID NO: 941488 - DNA, 84 bp, Artificial Sequence
  ENSG00000253484_0 (sequence is synthesized)
cctggagactgcaagggtggtgtctcactatgttgcccagactgttttctaaccctggcctcaagcaaatttcccacctccttt

SEQ ID NO: 941489 - DNA, 120 bp, Artificial Sequence
  ENSG00000253484_1 (sequence is synthesized)
ttattgattggtggtgtttcagaaggtggaagctctgccagccccacatacagcctgagtgagacatgccattcatttgttaagcagctgagggtttgtaactgcttgtgactgcggcat

SEQ ID NO: 941490 - DNA, 120 bp, Artificial Sequence
  ENSG00000253484_2 (sequence is synthesized)
gtccaagaatgttttgtctgatgcacgacaatgagtgaatatataatgattcaacaagagccatagagttttaaaatgtgttacattttataggaaatacagttacttagacttataaaa

SEQ ID NO: 941491 - DNA, 120 bp, Artificial Sequence
  ENSG00000253487_0 (sequence is synthesized)
cagctcctgatttatgaggtttccaaccaagcctccgaattctcagacaggttcaggggtaatgggtcaggtactgagtttacactgaaagtcagtaggacggagactaaggatgttgga

SEQ ID NO: 941492 - DNA, 120 bp, Artificial Sequence
  ENSG00000278002_0 (sequence is synthesized)
atcagaacaccacgttcctgcttaacagaaattggtcagtatgcgcttaatgctcatagtgtggcgtccggacacgcagcgagagaaaaacgcaataacctggtccgtcagcgttgcttg

SEQ ID NO: 941493 - DNA, 120 bp, Artificial Sequence
  ENSG00000278002_1 (sequence is synthesized)
cttcagcaggccttaaatatgtgctgcatcttttgggggacgttacttaagaggcaaacatctggctcgaagtcttccattattttcagcaagcatttaggaggtgactgcactataagg

SEQ ID NO: 941494 - DNA, 120 bp, Artificial Sequence
  ENSG00000278002_2 (sequence is synthesized)
agaataacccacagtagcacaggttgggagtctgcacagtgccgaggccagctcagtcttcactattcgaacgaaggaagcctggggcaactgtttgttttctctgccctgcgtgttagt

SEQ ID NO: 941495 - DNA, 120 bp, Artificial Sequence
  ENSG00000278002_3 (sequence is synthesized)
tgcccgttgtttttggagaaaaaactagtatcggggtatattggtggaaaaatttggatttggcagcttgaagccttttttgcgacaagcttaggttaggaagggatagaggggaggaaa

SEQ ID NO: 941496 - DNA, 120 bp, Artificial Sequence
  ENSG00000278002_4 (sequence is synthesized)
gaaaaaataattttcgaccatagtagatctgcgaaagcagaccttctgtttgtcctcttatctatagtctttccctcaccccccaccccttgtctcctaaaaaccagtccagactttccc

SEQ ID NO: 941497 - DNA, 120 bp, Artificial Sequence
  ENSG00000278002_5 (sequence is synthesized)
ttatctttacaccttcagagaagagcacccttctgttttcccctcctacctcaaacccagtaggtcaaaattcttccatcaatcatttttacccattctatctctctctttcatttatac

SEQ ID NO: 941498 - DNA, 120 bp, Artificial Sequence
  ENSG00000278002_6 (sequence is synthesized)
aaaaaaaaaaaaaaaagtaaaaaaactcctttgaccttgcctttctaaatgaaatctgtctgttgttttcatggctgcacttcttgaaaccatgttctacaattgctacatttgcttctt

SEQ ID NO: 941499 - DNA, 120 bp, Artificial Sequence
  ENSG00000278002_7 (sequence is synthesized)
tgttctacaattgctacatttgcttcttaaccttctgtcttcagtccatagcccaccaatccactgaaactattctagctaaggctacgatacccaagcctcctaattggcaggtctaag

SEQ ID NO: 941500 - DNA, 120 bp, Artificial Sequence
  ENSG00000278002_8 (sequence is synthesized)
ggaccctttctgacataggtgatgtaatttaccaccaatctctgtcacttgtgactgctgtttcctccctgaacgtttcttctccctggttcttgttcacagcccctgatatttcctccc

SEQ ID NO: 941501 - DNA, 120 bp, Artificial Sequence
  ENSG00000278002_9 (sequence is synthesized)
aggctctctcttctgcccacccagcaaatgtttttgttccttacagttccctcctaaatgttctctgttctctcaccgtgttcttcatgagtgatgtaataaattctcaaggctctcaaa

SEQ ID NO: 941502 - DNA, 120 bp, Artificial Sequence
  ENSG00000253482_0 (sequence is synthesized)
ccactgttattccaggtgtcctgtcccaggtgcagctgcaggagtcaggtccaggacccatgaggccctcagacactgccctctgcctgtgctgtgtctggattcttttttttaccatgg

SEQ ID NO: 941503 - DNA, 120 bp, Artificial Sequence
  ENSG00000253482_1 (sequence is synthesized)
acacatcatgcaccctccacccaggtccatgtccccatcaacagtgactcaaccaagagccagttctctgtgaagctcagctccatgaccacctaggacacggctgagtattactgtgaa

SEQ ID NO: 941504 - DNA, 120 bp, Artificial Sequence
  ENSG00000278000_0 (sequence is synthesized)
cagtgaaagccagtaggaccgggagcccaggcagaagcaatgccataaacaggcgctcctcagagcagagacctccaggctccaggggtcagtctggcttctgcatttcagtgagcaggc

SEQ ID NO: 941505 - DNA, 120 bp, Artificial Sequence
  ENSG00000278000_1 (sequence is synthesized)
agggcccattatgacttgctttggagatggggaatgctggttgacagttctggaaaggactcgaagacaaattacttccaccatggaggcaacattcaggcagcttggagaggaggccaa

SEQ ID NO: 941506 - DNA, 120 bp, Artificial Sequence
  ENSG00000278000_2 (sequence is synthesized)
ctagcacaggctctggcacatgctccaggcagcagggttaatgcaccctggagccgggatgccccagcatgaggactgtcttcctgggagctggcatcctggccagcactcaacacatgc

SEQ ID NO: 941507 - DNA, 120 bp, Artificial Sequence
  ENSG00000278000_3 (sequence is synthesized)
tgctcagtgacggaacccatccgtcatcagttatcagcataatttattacccactgacacagtaaggtctggaaggacttttgaaataagatgacttttaaaaactatacctgtaaaccc

SEQ ID NO: 941508 - DNA, 120 bp, Artificial Sequence
  ENSG00000278000_4 (sequence is synthesized)
tgtttaccctgacgtgattattatgcattgtatgcctgtatcaaaatctcatgtaacccataaatatatatacctaatatgtacccacaaaaataaaaaaataaaatgacacttgtaata

SEQ ID NO: 941509 - DNA, 120 bp, Artificial Sequence
  ENSG00000253489_0 (sequence is synthesized)
cctaccaactttatattgctctcttcgaggtctgtgccaccacgtaagaagtataactatgctgcttctagtgaagttgagcctcacccagatgtctcagctaccataactaaggcacta

SEQ ID NO: 941510 - DNA, 120 bp, Artificial Sequence
  ENSG00000122548_0 (sequence is synthesized)
ctcagctccttttcagtaatttcagttctattttcttactctatcattctggtgttttcattgcattttcttataaaagagatccagatttattttggaaatagatttgaatgacgaaaa

SEQ ID NO: 941511 - DNA, 120 bp, Artificial Sequence
  ENSG00000122548_1 (sequence is synthesized)
catcctatagaagcaaatcctaaacaaatataaatatttgaccatgattatgcaaagaaagctcctgcttcctcctctgtgtcacagagaccctcgggaggaactccagggagaatggaa

SEQ ID NO: 941512 - DNA, 120 bp, Artificial Sequence
  ENSG00000122548_2 (sequence is synthesized)
gcttgggagtcatcccaacccttgctcaggtgcgaaatcccctgccctctgcctggcactgatagggacggatcagtttctctgcctggagaggcagcctcctgtgacctggatacattg

SEQ ID NO: 941513 - DNA, 120 bp, Artificial Sequence
  ENSG00000122548_3 (sequence is synthesized)
gagcctgaacacgggaacagaagggtctctgggaatccaatctcagtctgttgggcttacaaagtgaccaaagtcaaatgctggtctgtgagagaaagaggaggcagacacatcggggga

SEQ ID NO: 941514 - DNA, 120 bp, Artificial Sequence
  ENSG00000122548_4 (sequence is synthesized)
ccgagaaatactttgaagcaccccgctcaccatggtatggggaagaatttggccacatccctgccaactgctgcttctcttggactgggaaagggtcagttgcttgtttctatcagattc

SEQ ID NO: 941515 - DNA, 120 bp, Artificial Sequence
  ENSG00000122548_5 (sequence is synthesized)
atggacaccaccaagaaaagaggccagtctgagacattcaatatttgttgaaacacagaggtttaactgatcattgaggtacacagggtgataggaagagtatgaacttgagaatctgat

SEQ ID NO: 941516 - DNA, 120 bp, Artificial Sequence
  ENSG00000122548_6 (sequence is synthesized)
ggattttgtttaaagttaggactaggctactgactacccaccctgctaattgtcttggggaagttatttaacctctctgaacctcagcttctcatccacaaaataggacactagcacaca

SEQ ID NO: 941517 - DNA, 120 bp, Artificial Sequence
  ENSG00000122548_7 (sequence is synthesized)
gtgggctatctatatatatttattgaattgaaatgggagtattcaaaattatttgggttgttggcttaaaataagcagaataattcaattcctgttcatctggaatctaattgtccaatt

SEQ ID NO: 941518 - DNA, 120 bp, Artificial Sequence
  ENSG00000122548_8 (sequence is synthesized)
tggagtttcagatgtaacaaagatcctaatgacctaatattattggggtaatcctaaaatttattaggtgatctgcaagttccatgatgattgtatactggaggaaatgcacaatgcaca

SEQ ID NO: 941519 - DNA, 120 bp, Artificial Sequence
  ENSG00000122548_9 (sequence is synthesized)
cagaccttcctaggagtaaaagactgatgtgaatttgcagcactacttaattataagtaattgttgcatgaacacacacacaaacacacacccacagaactcacactataagataggagg

SEQ ID NO: 941520 - DNA, 120 bp, Artificial Sequence
  ENSG00000122548_10 (sequence is synthesized)
ggcaaataatgacatttgacaaaaatgagctcttgcagagctcaacgagtctaagtttcctccctaatatcttaacaggctacagtatacacaggcttttaagtaatgtacttgttatcc

SEQ ID NO: 941521 - DNA, 120 bp, Artificial Sequence
  ENSG00000122548_11 (sequence is synthesized)
aaacactagcagacatttaactggaatccaggagcattttgtcaagaaggaaaagaactaaccaaagaaaaagaaaagtagagagtttcccagctgttttaccacatcacaacttcaaaa

SEQ ID NO: 941522 - DNA, 120 bp, Artificial Sequence
  ENSG00000122548_12 (sequence is synthesized)
aaaccaagcctgtccttgccttgtccctgatggctctgccagcagagtgaatgaattggagcagatttaggttttaaaatgcctcctaatatcatttgggcagattagcttacatggctg

SEQ ID NO: 941523 - DNA, 120 bp, Artificial Sequence
  ENSG00000122548_13 (sequence is synthesized)
gacattgtgctcccagccacagggaatgttcttttcctgttggaagctctgacagccactgccacggtgaaatatcaggagcctcctaacatttttcttgatttctttaagagtgaacat

SEQ ID NO: 941524 - DNA, 120 bp, Artificial Sequence
  ENSG00000122548_14 (sequence is synthesized)
tagacatattaaaaacaacaacccaatcattaagccctgtgaggttttcctaggagccagctctatcgctttaatcagattacggacaactcattctcatcccagccatttatcttcttt

SEQ ID NO: 941525 - DNA, 120 bp, Artificial Sequence
  ENSG00000122548_15 (sequence is synthesized)
gtttacacacacaccaagtggcattcttcttagcatcaaaaaatagtaatcaaaattgagaacaacaaaagacctttcattatttacagtgttaagtaacatctatttgccttcattagt

SEQ ID NO: 941526 - DNA, 120 bp, Artificial Sequence
  ENSG00000122548_16 (sequence is synthesized)
ttctaaacaacgaagtacactggttctgattaaagctggcatgtgttaattatatccgaggtctgggattgttttgtctacaataaaggattgctgaaagctgaaatttgaggcgcccag

SEQ ID NO: 941527 - DNA, 120 bp, Artificial Sequence
  ENSG00000122548_17 (sequence is synthesized)
cagaaagttttttttgctttgttttgttttgtttggtttttaagccctcggttttattgcccattttatgggctggagttaaatggaagtacaatgcagtttgctgtcttactgctcagc

SEQ ID NO: 941528 - DNA, 120 bp, Artificial Sequence
  ENSG00000122548_18 (sequence is synthesized)
actaacagccatgatgagccataattagaagtaaaaccaccacataaataacatggtagaaaaattgccacagtgagaagccagactttggcgacgggaaacttcagcgggtcttgagta

SEQ ID NO: 941529 - DNA, 120 bp, Artificial Sequence
  ENSG00000122548_19 (sequence is synthesized)
tccatcatacttaaggggcaccgcgtattttagcccatatttgtcttactaaagccaaaatgggagccatttagactttcgaacaagcttttaaaaatagagaatgtaggcttaaacaga

SEQ ID NO: 941530 - DNA, 120 bp, Artificial Sequence
  ENSG00000122548_20 (sequence is synthesized)
ctgcctgctgctaagtgtgatgaagaaacctgtcacctggaggctacgacagctggaagggctgggagggagagccctgggagcccaggggtgaggaagggaagataaacaggagaggaa

SEQ ID NO: 941531 - DNA, 120 bp, Artificial Sequence
  ENSG00000122548_21 (sequence is synthesized)
gaggaggcctggactctccacaacagcaaggtctagacatttcactgcaaagcctaagagtctgcacaccgttgagcacagcagcttagacttccgccggggaacgtgtgaggctgggac

SEQ ID NO: 941532 - DNA, 120 bp, Artificial Sequence
  ENSG00000122548_22 (sequence is synthesized)
cgtgtgaggctgggacgccttgcagattttgctttcatgacctgtactcagcgatgaagtgggagcaggtagactagttttttttttttttttaatggagtctcattctgtcacccaggc

SEQ ID NO: 941533 - DNA, 120 bp, Artificial Sequence
  ENSG00000122548_23 (sequence is synthesized)
gtcttgaactcctgaccttgtggtccacccgcctcggcctcccaaaatcctgggattacatgcatgagccacgcgcccagcctagactagcatttttgagtacccactatctccttggca

SEQ ID NO: 941534 - DNA, 120 bp, Artificial Sequence
  ENSG00000122548_24 (sequence is synthesized)
agcatttttgagtacccactatctccttggcattttacttccattttaattctcataacagccttaggacgccaatgaaaaggaagagaaaataaagtgtgttctgtgcctgaaaatggc

SEQ ID NO: 941535 - DNA, 120 bp, Artificial Sequence
  ENSG00000122548_25 (sequence is synthesized)
cttaaagaaacaaggaccaacagctggagcagagtggggctgcccatacgcaaagagacaacaagtaggaattaacataaggcatatcacgtggatgccatagaactatcacagcaattt

SEQ ID NO: 941536 - DNA, 120 bp, Artificial Sequence
  ENSG00000122548_26 (sequence is synthesized)
cttttttccccaagtcagcctctcttgtacaggggattagaaaacaaacccaagagaataaacttgaaatggaaggaacgtgctttgtagtcgagtgtttttcaaagcctgcatcatttt

SEQ ID NO: 941537 - DNA, 120 bp, Artificial Sequence
  ENSG00000122548_27 (sequence is synthesized)
aaaaactgatttaagtatattcatttgctttctaaaataagtcatatgtatgtttctactgatcggccagaatagttaaggtctgtctgatcttcatatggaatgaaaggggacattctt

SEQ ID NO: 941538 - DNA, 120 bp, Artificial Sequence
  ENSG00000122548_28 (sequence is synthesized)
tggatattctggaagtccacacgtgttctttacagagtttggtttgctttctccgtttcttccttcctttgcaaaatcaaacaaacaggaataaaaaccaaaccaaaacaaaattaatga

SEQ ID NO: 941539 - DNA, 120 bp, Artificial Sequence
  ENSG00000122548_29 (sequence is synthesized)
aaacccttgtgttgaggactttgttttgttttaaatgtgtctggtattaagcagtatgtttagtgaaatgactttaaacttaagtaggaaatacagctccatttcacacgtggattttgt

SEQ ID NO: 941540 - DNA, 120 bp, Artificial Sequence
  ENSG00000122548_30 (sequence is synthesized)
ctgcatttacatctctgcaggcctcacatgccgtgacaccagacatttttttaattaagatatgaagtgctcattttttttttgtggaactgctgtattctaacaaatttactacacgtc

SEQ ID NO: 941541 - DNA, 120 bp, Artificial Sequence
  ENSG00000122548_31 (sequence is synthesized)
tcagaaaacacatagctttgccaaagttggtgagtagcccagcatggtttatctccagcccacagctctttccctgaattcaatactgcaggcacaatttaatgcaaacccaatttatga

SEQ ID NO: 941542 - DNA, 120 bp, Artificial Sequence
  ENSG00000122548_32 (sequence is synthesized)
cttaatgctctagggaccgtagtgggagattgttacattattcttttctaatcctatttgtgttttaatttgctaagtctgtaatgaggtgcatgccttgaatattcaagatctttgaca

SEQ ID NO: 941543 - DNA, 120 bp, Artificial Sequence
  ENSG00000122548_33 (sequence is synthesized)
ttgcttttgactttgtttaatataatagattttacagtttgcattaaatacccaggtgcttcggtcagtattatctctttattttctcaactagagtgaataaaattacacgatgaaagt

SEQ ID NO: 941544 - DNA, 120 bp, Artificial Sequence
  ENSG00000232907_0 (sequence is synthesized)
gtgctccttgccggggtgggggtcgttaccgagtgggaacttctgcaaatcctgacttttgtcacttcgcgccccgcacaagatgtcctgccggcggtgcgattggtcccgttgcttcga

SEQ ID NO: 941545 - DNA, 120 bp, Artificial Sequence
  ENSG00000232907_1 (sequence is synthesized)
ggggaaactgaggccacttagtccgggcacttacccgcagctagttaaggactaggctctgatggagacgcttgttacgacctcaatggcctgtagaatctgggaggccgcctccgacct

SEQ ID NO: 941546 - DNA, 120 bp, Artificial Sequence
  ENSG00000232907_2 (sequence is synthesized)
aagcccaaaaagcacatgatcgggctcacagggggcggccagaggtgaaaacagccaacgctttacaacgacgctgtgcggggcacttcgtgtgtgtcatcccgtctcatcctcgggtga

SEQ ID NO: 941547 - DNA, 120 bp, Artificial Sequence
  ENSG00000232907_3 (sequence is synthesized)
taggaactgttcattcgggaaaattgcaaacaactaaatacccctcaccaggagctggcccattatagcaactctgagacctctctaccgcaggctcttaaaatgggttttcatcccaac

SEQ ID NO: 941548 - DNA, 120 bp, Artificial Sequence
  ENSG00000232907_4 (sequence is synthesized)
agaatttttctgaggaacttgatatacaaattctataatttatattggaagaatgaagatacaagaatagtttttctttctgcacaaaaaggataaagaaggagcactcaccagatacca

SEQ ID NO: 941549 - DNA, 120 bp, Artificial Sequence
  ENSG00000232907_5 (sequence is synthesized)
ctacaaagccatgtgattctgtccaagcttaacagtggatgtaactgcttctttgctgtggcagattgtattttctgaaggccccaacagtctctcctgtccctcctcctcttctgaaac

SEQ ID NO: 941550 - DNA, 120 bp, Artificial Sequence
  ENSG00000232907_6 (sequence is synthesized)
cttgatacttccctatgaagaggtagggtctaatacttccctccttcaacctgaagccccgccttgggcttgtgacttgcttgtaaccagtcaaatacagtggaagagttactacgtgac

SEQ ID NO: 941551 - DNA, 120 bp, Artificial Sequence
  ENSG00000232907_7 (sequence is synthesized)
ttccagggctaggtcagaaaaggatgcagcctcagggttcaacacacacttgggcctggagccaccatgcaagaaggctgccatgctgcgagggagcaaaggcacgtggagggacataca

SEQ ID NO: 941552 - DNA, 120 bp, Artificial Sequence
  ENSG00000232907_8 (sequence is synthesized)
caggggctgtggctggcagtcctggcctttgagtcatccttgtttaagtgccaggcacacacgttaactacctttaggtaattccatacctcaggtgtcatgtcaccccaagcccttgag

SEQ ID NO: 941553 - DNA, 120 bp, Artificial Sequence
  ENSG00000232907_9 (sequence is synthesized)
ccttcccatctgaagccccaggctgtatggagaagaaacaagatgttcctgccacgctctttctgaactgctgacatacagaatctgtgaccataataaaatggttgttttgtgccatta

SEQ ID NO: 941554 - DNA, 120 bp, Artificial Sequence
  ENSG00000232907_10 (sequence is synthesized)
catgtgaggccttccaccatgtgatgaggcagcaagaaggccctcaccagatgcagttccttgatcttggacttcccaccctccaaaactgtgagccaaataaacttctgttcattataa

SEQ ID NO: 941555 - DNA, 120 bp, Artificial Sequence
  ENSG00000232907_11 (sequence is synthesized)
tgagaccccagctcaaagacgacacacggagaagggagccaagcagcactgaccgatgtgggcagcgttattgccgaccaggaatttgtccctggacttcccctccgcactgctccatgc

SEQ ID NO: 941556 - DNA, 120 bp, Artificial Sequence
  ENSG00000232907_12 (sequence is synthesized)
tcaccttcctcttctcgggggtctccaccagctgccagctgttggccttgaggtggtagagttcatcgaacttcatgctgatatcctcgatggacagctgtagcaggtcccagaaccctg

SEQ ID NO: 941557 - DNA, 120 bp, Artificial Sequence
  ENSG00000232907_13 (sequence is synthesized)
cagggttcctctgggccctgccagcacccgcgggggctcttgaggcctagtgtctggggaagaaacagaagttcttggccatggtgtgacagtgacaccgagagaagcccgattcactcc

SEQ ID NO: 941558 - DNA, 120 bp, Artificial Sequence
  ENSG00000232907_14 (sequence is synthesized)
caggtttctgctcacaggtcacctggccagggatgccctccctgaccaccctgaatgcaacagcaacaccgaccctgcctgtgcagtggacactatactgctcttacccttcctggttat

SEQ ID NO: 941559 - DNA, 66 bp, Artificial Sequence
  ENSG00000232907_15 (sequence is synthesized)
agctaggattacaggcaggagccatcacacctgtcaggagcagcatatttgaagtcaggacttttc

SEQ ID NO: 941560 - DNA, 120 bp, Artificial Sequence
  ENSG00000232907_16 (sequence is synthesized)
gacacaggcgcggctgaggactgacggccccctggaagccactcgggagtcctagattttgctgaaggaagaaggggctggagaaaataaaagggcaggagtctggagtgtgataactgt

SEQ ID NO: 941561 - DNA, 120 bp, Artificial Sequence
  ENSG00000232907_17 (sequence is synthesized)
ggcttcgtctcatttccacccgccaagactaaaacttccctcatctgctcagcgggaagaaacagaagttcttggccatggtgtgacagtgacaccgagagaagcccgattcactcccag

SEQ ID NO: 941562 - DNA, 120 bp, Artificial Sequence
  ENSG00000232900_0 (sequence is synthesized)
agtgcaggtctgcaggaagggcctgcctccactcatgcaggtacctgggatcacctgtccattggctacactgccctttagggcctccaaatccccagctgaattattcccatccatcta

SEQ ID NO: 941563 - DNA, 120 bp, Artificial Sequence
  ENSG00000232900_1 (sequence is synthesized)
gtaggaaaggaaaaaagaatgttgaaggatcatgcaaaatgttttaggggccagtcctggacgtaaaatatgttacattggctagaatgctgttacacattgccacctatttcaagagat

SEQ ID NO: 941564 - DNA, 120 bp, Artificial Sequence
  ENSG00000232900_2 (sequence is synthesized)
gctgagatttggagtcttcttgggtgcccagagatttgagtatcacctagcactgtttctgcttcagtatatgcaatgcaactttattctgttaaaaacaggaggtctatcaatagtttc

SEQ ID NO: 941565 - DNA, 120 bp, Artificial Sequence
  ENSG00000232900_3 (sequence is synthesized)
ttaccacaagggaaatggaagtagaactctgaagctaaatcagaggactccaagcaaatgaagtgactgaaagcaagaatggctcattgcccttgagctacacagaaatgtataggtggg

SEQ ID NO: 941566 - DNA, 120 bp, Artificial Sequence
  ENSG00000232900_4 (sequence is synthesized)
caatgaagcaaggggagcaagctggagcaggagaaaagatcaggcaaaggcatgctttcagaagtctagcctcggcctcatccacagggagctccagagagtgaatggtaccatgcagct

SEQ ID NO: 941567 - DNA, 120 bp, Artificial Sequence
  ENSG00000232900_5 (sequence is synthesized)
ggtcaaccttcttggaggagggagctgctgatagccttcagtagacagcacttgcactagccaagggatgagtgcaccagcccagtggaggggatctgggtagagcacctatgccatctg

SEQ ID NO: 941568 - DNA, 120 bp, Artificial Sequence
  ENSG00000232900_6 (sequence is synthesized)
ctataatagactctacgtgtcttctaggaaggacatgcttttccttttcgtatcctctacctgaagcaatatatcacgtactcagcagacgctcaataagtgtttgagaaatgaagaaac

SEQ ID NO: 941569 - DNA, 120 bp, Artificial Sequence
  ENSG00000232900_7 (sequence is synthesized)
aaaaagacagagggaaggagagaagaaaagaaacaagattacagaaaattctaaaatactcttgggctccaagaaatgcatcttcaaataaggaacttcacatacttatgctgagcaatg

SEQ ID NO: 941570 - DNA, 120 bp, Artificial Sequence
  ENSG00000232900_8 (sequence is synthesized)
agagagatattttgagaaacctgaaaaaataagagaactttgagttttcagtgctctggaaatggcaaaaaggtaggatattttagtcatgcattggaaattaaaagattgcctcccatc

SEQ ID NO: 941571 - DNA, 120 bp, Artificial Sequence
  ENSG00000232900_9 (sequence is synthesized)
ctttgagttttcagtgctctggaaatggcaaaaagtgccctttccagatctgttcaccagttccgtgcatcctcagctgctatgtggtccatgtgctctgaactcatgcctgcgacattc

SEQ ID NO: 941572 - DNA, 120 bp, Artificial Sequence
  ENSG00000232900_10 (sequence is synthesized)
tctggaggattactattgagcaactggagccacctcacctgcaaggagtttacaatccccctgagccatcccatagtcaacgaatgacttgtgaaggaaggacagactctcaattctcag

SEQ ID NO: 941573 - DNA, 120 bp, Artificial Sequence
  ENSG00000232900_11 (sequence is synthesized)
gaatcccgccatggacgacctgctccttgctccagcctggccagtgctttgaagtgataacaccaagagttgctgtttaggaaggcaaggaagaaacatcagtgtctcgtctagcctcag

SEQ ID NO: 941574 - DNA, 120 bp, Artificial Sequence
  ENSG00000232900_12 (sequence is synthesized)
aaaaaaacgacttcctatttttactactgttatgaatccctcactcatggacacctttgtgacgtgacttccaagttgctattctattttctggctggaacctgcaaactccaatctgga

SEQ ID NO: 941575 - DNA, 120 bp, Artificial Sequence
  ENSG00000232900_13 (sequence is synthesized)
agtatatctctttagggaaagggaaggaagaccagaaccagtgtttattaaatacctactaaatgtcaaatttactatgcatagctctacatatgctatataaattacccatgaaaaaaa

SEQ ID NO: 941576 - DNA, 120 bp, Artificial Sequence
  ENSG00000232900_14 (sequence is synthesized)
ttttcagtgctctggaaatggcaaaaagaccactctggtaactgaattgaaaataggctaaaggaggacaagagcagaagggaggaaagaattgcaataaaccaggcaagagatggcagt

SEQ ID NO: 941577 - DNA, 120 bp, Artificial Sequence
  ENSG00000232900_15 (sequence is synthesized)
gaataaagaggtatttcatggaggggcttctccaagtttaatgtgcacaagaatcactgggaagcttgctgaagagcagattgtaattctgcaagtcagggacggggcctgagattctga

SEQ ID NO: 941578 - DNA, 120 bp, Artificial Sequence
  ENSG00000232900_16 (sequence is synthesized)
atttctaacaaattttcaggtgatgctaatattgctgatttgatgaccacagttgagaaggaagacttcttgaacttgctgataggttgcatttggaaagcataaaaagaaaagaatcaa

SEQ ID NO: 941579 - DNA, 120 bp, Artificial Sequence
  ENSG00000232900_17 (sequence is synthesized)
gctaagtggttctgctgagccatgccaggcttaactgattccagctggattcactcatgttcctgcaggtaactactggattagctaggggctggctggtataggatgccctcagctaag

SEQ ID NO: 941580 - DNA, 120 bp, Artificial Sequence
  ENSG00000232900_18 (sequence is synthesized)
gtggttcatttctgttccatattctacaaaatgatattccatgcacgttcacatggcagtggcagaagagagtaagcagaagccatgaggcctctgaggcctaggctcagattgaatcat

SEQ ID NO: 941581 - DNA, 120 bp, Artificial Sequence
  ENSG00000232900_19 (sequence is synthesized)
ggcctttgaggcctaggctcagattgaacgcaccatcccttccactccattctattggccaaatcgagtcacagggatggcctagattcaaggggcagtgggaggggaaaacagattcca

SEQ ID NO: 941582 - DNA, 120 bp, Artificial Sequence
  ENSG00000232900_20 (sequence is synthesized)
cctcttgatggaataagctgcaaagtcacatggtcaatggcatgaacacagagagtaatagaaaatttgagacttttctgcaataaaccaaccacaaatatcttggaatattctagatca

SEQ ID NO: 941583 - DNA, 120 bp, Artificial Sequence
  ENSG00000232900_21 (sequence is synthesized)
gaagctacactttacccaaaatctcatcttttttatgcttcttctcatttcctgccctgttcctctccttccctccctttcttctgagagcactccctcaataaataacttttccccaaa

SEQ ID NO: 941584 - DNA, 120 bp, Artificial Sequence
  ENSG00000232903_0 (sequence is synthesized)
aggtaacgccagtgaggagtgggaacggtgggaaggtgacaccggtgagaagtgggaaccgcaggaatgtaacgccgttgaggagaagtgggaacggagggaagggcatgtgcacaccac

SEQ ID NO: 941585 - DNA, 120 bp, Artificial Sequence
  ENSG00000232903_1 (sequence is synthesized)
cctcggccgtcatcctggagacgcgggagctcggctgccaggttgctgatacgctccatgttcaggagctgtcccaccgggaaaggtgtccgtgggggtgaggagccctcttctgatcct

SEQ ID NO: 941586 - DNA, 120 bp, Artificial Sequence
  ENSG00000232903_2 (sequence is synthesized)
cctgctttcctggggggtgaagctgctttcccagaaaacaccaggcccccctcccagctgccggaccccacagtgtggtctttgtccccaggggcagtgctttctgccccttttgttctc

SEQ ID NO: 941587 - DNA, 120 bp, Artificial Sequence
  ENSG00000232903_3 (sequence is synthesized)
tgctgatccccagagcctggccctgcacaggtcgtcggtgatgtctgtggattagagacctgctcccctgtgcctccacaggggagggccacacatgcatacacatgcacactcagacac

SEQ ID NO: 941588 - DNA, 120 bp, Artificial Sequence
  ENSG00000232903_4 (sequence is synthesized)
atggtcacacacatgatcatgcttacatgtcacacactatacacacgcactcttgtgtacacatggcacacacttaccctaacgcagccacacagttcacacacacccaccccctcctgc

SEQ ID NO: 941589 - DNA, 120 bp, Artificial Sequence
  ENSG00000232903_5 (sequence is synthesized)
tgacactctcacagtcacacacatgcactcaccacaccctcccctagtgggctctggggttccaccaaccgtagctgggtggccaccccatggtcttcaccactgcgtggcccaacacac

SEQ ID NO: 941590 - DNA, 120 bp, Artificial Sequence
  ENSG00000232903_6 (sequence is synthesized)
aaaggtggcctggggtctctcccgactctaggtcagttcttcctggttccctgggccaacattctcctgcgggcccagtctcagtcagccctcacacgtggggattccagcccagccccc

SEQ ID NO: 941591 - DNA, 120 bp, Artificial Sequence
  ENSG00000232903_7 (sequence is synthesized)
tttcccagactccacacttggattctcaagccataggtaaagtagccgtgccggcaccgactggccccaaagtggagccgatgccacaaagcactgccgggccagacaccagccaggcag

SEQ ID NO: 941592 - DNA, 120 bp, Artificial Sequence
  ENSG00000232903_8 (sequence is synthesized)
agtgaggagagcacaggcccctgggacagcggtgcaggtcggcttccagccaactttggggtccccaggaccccgcctttctggaggggtcaccaagccagagctgggctccacctggcc

SEQ ID NO: 941593 - DNA, 120 bp, Artificial Sequence
  ENSG00000232903_9 (sequence is synthesized)
atttgtgagatgtgcagctttgtgagctggtgctgcccctggggcagtttaaacagcggtggtgggaggatgtgcaaatgcttccaaccaggggcttcattttcgcttttccctggagag

SEQ ID NO: 941594 - DNA, 120 bp, Artificial Sequence
  ENSG00000232903_10 (sequence is synthesized)
tctgagcggagccggggagagcgaggaccccgcacatcaccacgtccctcctgcccccggcttctgcttgcctgtccccaggagctgggatgccaggtcgatttcaactaagttctcttt

SEQ ID NO: 941595 - DNA, 120 bp, Artificial Sequence
  ENSG00000232903_11 (sequence is synthesized)
tacggacatacacaccagtgggatttgattactggcctcacctgcgctggaagaagctctatctttaacttctgttctgctcattctgctcatgtatatattctgagatgttttaaacaa

SEQ ID NO: 941596 - DNA, 120 bp, Artificial Sequence
  ENSG00000232903_12 (sequence is synthesized)
caattcacccatcttcctggctttcacctgatgaaattacaaatgttcagaattctcaccaccttctggttaagcaagtgtcatggattgaactgtgtccccctgaaactcttatgctgg

SEQ ID NO: 941597 - DNA, 120 bp, Artificial Sequence
  ENSG00000232903_13 (sequence is synthesized)
agtcctagtcccacggcctcagaatgtggccttatttggagacagggtcttcacagaggtgatctatttaacaggaggtcccagggtgggccctaaaccccatggctggtgtccatataa

SEQ ID NO: 941598 - DNA, 120 bp, Artificial Sequence
  ENSG00000232903_14 (sequence is synthesized)
gatgggcacatttggacaccgagacacagacaagaagacgaccacatacggccacgcggggtgccctccaaggaaccaactccggccgcaccttgttctcggccttcccgcctcctttcc

SEQ ID NO: 941599 - DNA, 120 bp, Artificial Sequence
  ENSG00000232903_15 (sequence is synthesized)
cgctgtttaagccgcccatgagagtgccccgtgatggcaacgccagcgggcgcatatacagcaggcctctggggtccagcctgggagcccagacacagacaccgtctctacctggcaaga

SEQ ID NO: 941600 - DNA, 120 bp, Artificial Sequence
  ENSG00000232903_16 (sequence is synthesized)
tggggtgatgaaatgagaaatgaatagatctggtctctgctcccgagaccccgcacagggctccaaaagccctcgaatttcctgggtgatggcagcagattcttccattcaaatgaggtg

SEQ ID NO: 941601 - DNA, 120 bp, Artificial Sequence
  ENSG00000232903_17 (sequence is synthesized)
aggcttggtggctcctggagggggtccagtcaccagagagaccagccaggattagcacctgcagctctcaaccctgcacccaccctcctccagggatcatccaccatcatccttcatgtc

SEQ ID NO: 941602 - DNA, 120 bp, Artificial Sequence
  ENSG00000232903_18 (sequence is synthesized)
tgcgatggagcctccataagaatgcctggactatgggtcccgagcagttccaggttgctgaacacatccacgggccaggagggtggtgccccccactccacggacacagaagctcctggg

SEQ ID NO: 941603 - DNA, 120 bp, Artificial Sequence
  ENSG00000232903_19 (sequence is synthesized)
ctggggaccctttccgaccctgccctgtgccccggcccacctggctgcccatctgcggcctttctcatctccttttcctgcgttctgtgataattttgtgttgcactcttgatatttaag

SEQ ID NO: 941604 - DNA, 120 bp, Artificial Sequence
  ENSG00000232903_20 (sequence is synthesized)
gctaatgtgtaactagaaaactgagttttaatatttaatgcccttggatttgggaaatctcttactacattatgtttggatatactttctctgaggggataaatattttatcgaggctgt

SEQ ID NO: 941605 - DNA, 65 bp, Artificial Sequence
  ENSG00000232909_0 (sequence is synthesized)
aggaaatggggcagccaggagtgctcgagaacagatggggccaggcaccatggctccccagggat

SEQ ID NO: 941606 - DNA, 120 bp, Artificial Sequence
  ENSG00000232909_1 (sequence is synthesized)
atgaggcggcttgtgaggtcctctggagtcagaagatgccaccaccccagaggatgtgagcccacctgtggaggtcttgatccccaccactaggatggggcagccccaaggtgggtgact

SEQ ID NO: 941607 - DNA, 120 bp, Artificial Sequence
  ENSG00000232909_2 (sequence is synthesized)
cgcatctccactgaactccgagcagaaaacggctgcctgatgggaactgtcatttaggttcccaggctactttggtggatctgagaataaatccctcaagacaaggtccttgctctgccc

SEQ ID NO: 941608 - DNA, 120 bp, Artificial Sequence
  ENSG00000232909_3 (sequence is synthesized)
ttctccagggtgggacccagagttactggcccctccatcccatggagccgattctgcaaccctcacttcctaagcacagaaatctggaaccactggttaaaaagaagtctgagagccaaa

SEQ ID NO: 941609 - DNA, 120 bp, Artificial Sequence
  ENSG00000232909_4 (sequence is synthesized)
atacacacagccagctgtgagttactacctgccttacccaggaaaaggacatgagctgcccaagcacacacctctttgccatctatgccagcatttttaccttcaaggccgatgttctca

SEQ ID NO: 941610 - DNA, 120 bp, Artificial Sequence
  ENSG00000164621_0 (sequence is synthesized)
tgatctgaaaggaatggaagcacaaaatgatgaataaggtatttttaacaaagatacatgggtaaattaacagcagtaatgtaaaaaagactgagggagcaacaatgtggaaagggaagg

SEQ ID NO: 941611 - DNA, 120 bp, Artificial Sequence
  ENSG00000164621_1 (sequence is synthesized)
aaaggaagctgtataggaacaatcacacaaataatcatcaaaattaaactttataaatctaaacatagtatctacaacctttatgaaggttaagttttgttaaattgtctaagttttgca

SEQ ID NO: 941612 - DNA, 120 bp, Artificial Sequence
  ENSG00000164621_2 (sequence is synthesized)
tttttacaattttcactgtagagaaaaaaatattaatagttaccaaaggaataaaagactaaaataatttgttatacatctgcaaatagctccttaaatttggaacactaatttcataat

SEQ ID NO: 941613 - DNA, 120 bp, Artificial Sequence
  ENSG00000164621_3 (sequence is synthesized)
gatatttggatccataaatgtgaaactgtcacactgaatgtaggtactgttttccccacaatggatactactgcattggcatctagcagaaattgtaagctatttggaatgttactaaac

SEQ ID NO: 941614 - DNA, 120 bp, Artificial Sequence
  ENSG00000164621_4 (sequence is synthesized)
ctactgggactaaggttttcaatcttttgtctttcaaattaaaattaaaaactaattcactctgggcaattcaggtactctaaggaaattcaagtactctagttttaaatacgaattttc

SEQ ID NO: 941615 - DNA, 120 bp, Artificial Sequence
  ENSG00000164621_5 (sequence is synthesized)
aaaaacgcaacccaagtaccctttcctctcaacttctgtgaggccaagccacgacctccacctattcaatctttgctgctagataacaacccttttggtagtgctaggcaacaggcatga

SEQ ID NO: 941616 - DNA, 120 bp, Artificial Sequence
  ENSG00000164621_6 (sequence is synthesized)
tgtgacaaacctagacatcaaaacttttccacagaaagataaggtaaacaagatatacttagcgccacacccatttaaatgcacaagcaaccaaaattgctccctccccccgcaacaccc

SEQ ID NO: 941617 - DNA, 120 bp, Artificial Sequence
  ENSG00000164621_7 (sequence is synthesized)
gctccagctggtcaggaaacattgtctttacaatcaagataaacatctggctcagggtgttcagccattcctcacctacaggcttgcctaagccccattctccaatgccatcaccaccag

SEQ ID NO: 941618 - DNA, 120 bp, Artificial Sequence
  ENSG00000164621_8 (sequence is synthesized)
aaccggaacattctgttgggaagccggcaaacgtccaaataccccaagtatcctcgcccgagttctgcaaccaaaaatctgttttggctactgagcatgctcagacttaagacgggcgcg

SEQ ID NO: 941619 - DNA, 120 bp, Artificial Sequence
  ENSG00000164621_9 (sequence is synthesized)
ccacatgggagttttcaaagcttaggctccaaactccacgtagtaacagcagctgaaaggaggagaggggaaaaggggaggggaagagactggaatattaatttgagccctgatattgaa

SEQ ID NO: 941620 - DNA, 120 bp, Artificial Sequence
  ENSG00000164621_10 (sequence is synthesized)
gtataggacccggccagcggctgaatatggtgaaggcaaaaagacgctgctttggcattctctttgcagcacagagaagtttacatgaagtagaagaaatccttgcagtggtgaaaactg

SEQ ID NO: 941621 - DNA, 120 bp, Artificial Sequence
  ENSG00000164621_11 (sequence is synthesized)
acatggcaagtggcagaaaccaggtctaactaccagctgattgcagtagccggtcacaactgcccagagtgtaattcccaccgataagcgcggatccttatctttgaaacacaaagcgac

SEQ ID NO: 941622 - DNA, 120 bp, Artificial Sequence
  ENSG00000164621_12 (sequence is synthesized)
ggcggcacggattcatcaagccattggacagcttcgcagtgcagcagcccaggctgcccggccgagcaccgcagtcctatcaaggtttgctgtagctcagaaggctctgcctacatgact

SEQ ID NO: 941623 - DNA, 120 bp, Artificial Sequence
  ENSG00000164621_13 (sequence is synthesized)
actgcataccctactgggagaattggaagaatgtgatgatggtaggagtcacccagcatagaagcatgagtgaatgacatcccagagatctgcaaaggatcctggtagccacttcaaaga

SEQ ID NO: 941624 - DNA, 120 bp, Artificial Sequence
  ENSG00000164621_14 (sequence is synthesized)
ctttttctcccttcctcagacaatcatggcacatggacatcagaggaagaaatggcgaagtttgtatgactcctccagcagagtccttggaaacaataaagcttcctttccaaattctga

SEQ ID NO: 941625 - DNA, 120 bp, Artificial Sequence
  ENSG00000287615_0 (sequence is synthesized)
acactttccactcatctcctttcccataccgtatctcttgcaagtcgttttctctttttgatctggcttgttctctttaaggacatcttcaatgtgtatattaacaatcattttccaatg

SEQ ID NO: 941626 - DNA, 120 bp, Artificial Sequence
  ENSG00000287615_1 (sequence is synthesized)
ttttggcttcacctcttatgctgaggtaatatcaggatgctctgacactggtggctgtggctgccacctaagaagcctccttgccagctcgtaatttgtttcttccctctacctcttcaa

SEQ ID NO: 941627 - DNA, 120 bp, Artificial Sequence
  ENSG00000287615_2 (sequence is synthesized)
gcctcccggcagacttcctttttttgttttaatgtgactctgcttcgggacacttgcttctagccataactgagtggctatattggtctaatcttcccactgaaaataattataaaggcc

SEQ ID NO: 941628 - DNA, 120 bp, Artificial Sequence
  ENSG00000287615_3 (sequence is synthesized)
ggagggaagcaactgagattgccattgtatggtggtgggaaccaacagccctggagaatgccccagatggtggggcatctatttggtgcatgtttaggtttgcctgtctacatgctagca

SEQ ID NO: 941629 - DNA, 120 bp, Artificial Sequence
  ENSG00000287615_4 (sequence is synthesized)
aatctctgaagacagccaaagccttcggaaggtcttgtgaggctctgaggactgatatatgtgagaagagcctagactaaatgcagttccaggatcatgtcacatgcatgatccagtgtc

SEQ ID NO: 941630 - DNA, 120 bp, Artificial Sequence
  ENSG00000287615_5 (sequence is synthesized)
tccagtggagacttggacttagaagatgccccctaaatacctgttgaatacaatttaaaaagatgttaattataaaatatttcatggaggtagaacatttttattaatttattcactaaa

SEQ ID NO: 941631 - DNA, 120 bp, Artificial Sequence
  ENSG00000287616_0 (sequence is synthesized)
ggaaggaaggagggctccaaaactggggataggttatccgtgctctgagtctgagaaggggatttgggggaggcttaaggtagaaacaaaagatctcagttttgccatccaaatcaaccc

SEQ ID NO: 941632 - DNA, 120 bp, Artificial Sequence
  ENSG00000287616_1 (sequence is synthesized)
atggccagatcagatttaggatttcttctgaattttgtccttggaggtgtgggaagaatgaatattgaatattcatactcaacatgaatattttggaagctgggcctgaaagttaaggag

SEQ ID NO: 941633 - DNA, 120 bp, Artificial Sequence
  ENSG00000287616_2 (sequence is synthesized)
ctttcagaactgtgaactgttgtctccacatctgatgctgaagctcgaagcctaaggcacaagcagttaggaagggaaggtcataagcaggctggaacccacaagcatgagctggaaccc

SEQ ID NO: 941634 - DNA, 120 bp, Artificial Sequence
  ENSG00000287616_3 (sequence is synthesized)
actgaaaccctgtttgttcttgttgcctctgaccctagtgatgagtgtgtcctgcagaagccaggcccttcatcgtggagttaacctgacacctggcccaggagtcagaggcgctgaagg

SEQ ID NO: 941635 - DNA, 120 bp, Artificial Sequence
  ENSG00000287616_4 (sequence is synthesized)
aggattcagggcaggtggatcgagtttgggcccagatgctgctcaataccatgacagtgagccatgagctcagcaacagtttgtgtgagctacagaatggctgcatcacttctgctgctc

SEQ ID NO: 941636 - DNA, 120 bp, Artificial Sequence
  ENSG00000287616_5 (sequence is synthesized)
caagaagctcacacagagaaaaagtaaatcccttcgtaagaagctgagataacagaatgaggaaactggtcctaggccagaaaagaggaatgtaaggttattaatataaaggaatgtaag

SEQ ID NO: 941637 - DNA, 120 bp, Artificial Sequence
  ENSG00000287616_6 (sequence is synthesized)
gatcctgacaaccatccctgctccaggtaaattgatttaatggtcaggaatgcatttggtggccagtcttccagggggcccatgaaagttcagggtgagttgtatgatgattgttttata

SEQ ID NO: 941638 - DNA, 120 bp, Artificial Sequence
  ENSG00000287616_7 (sequence is synthesized)
gtagaaataaatgattgataatacctgctttcaacttctccaggaaaaggtaatatttttcatgctttgtattgtccggctctagggctttaatgacaaatttgttcgagtgcccaaaca

SEQ ID NO: 941639 - DNA, 120 bp, Artificial Sequence
  ENSG00000287616_8 (sequence is synthesized)
ggtctaatgccctttctgaaggcagtttggtgctgctggaaggtacattgataggactccattaggacaagggtgtatctgacaaaataatgttcatattgtccctggcactctgtgggt

SEQ ID NO: 941640 - DNA, 120 bp, Artificial Sequence
  ENSG00000287616_9 (sequence is synthesized)
ggttatggtataggaagcaaaacatgcttttgtctattaaagaaaggcaaacagactatgtataagaagtaccataattgaaattccagaaagaatgcttgaaaaacatgatttctattc

SEQ ID NO: 941641 - DNA, 120 bp, Artificial Sequence
  ENSG00000287616_10 (sequence is synthesized)
cactctaataaatctcctatagtagagtttcatgtttcaggtggctcataactagaaagatatttctggtaaggaggcttttaaatcacacctccatgtctgttgctggtatctaaagca

SEQ ID NO: 941642 - DNA, 120 bp, Artificial Sequence
  ENSG00000287616_11 (sequence is synthesized)
aactgatatttcagtcagcaatccaaagcaactgaacttcaagaaaagggccagaagatcaatgctgggagctctcttcagtggcttcatgcctagcatctatttctgcagaatagactc

SEQ ID NO: 941643 - DNA, 120 bp, Artificial Sequence
  ENSG00000287616_12 (sequence is synthesized)
tctcagctgtcacactgggtctagtaggagatctagaaaccttcatgtctggactgcaatacttcagctgtaggtagaaatgccttcacagaatcaggatttcacacgatgtctctgact

SEQ ID NO: 941644 - DNA, 120 bp, Artificial Sequence
  ENSG00000287616_13 (sequence is synthesized)
agaggcacctggctggatatttgaatcttcttaaccctgagctctgcttcagtctcatctgttgtgttcatgacatgactctctaatcactatgggcaattgggaaaatggttattttca

SEQ ID NO: 941645 - DNA, 120 bp, Artificial Sequence
  ENSG00000287616_14 (sequence is synthesized)
aaaagaaattgacttgtctcttcgtagtttaatgtagaagcaggtatagtttggttatggtgaaatctggtaagttggtctttgtgataatacataccttttggtttcagaaaacattgt

SEQ ID NO: 941646 - DNA, 120 bp, Artificial Sequence
  ENSG00000287616_15 (sequence is synthesized)
atacttattttctatatgactaattttccgagcacttttcattctagataatttatcttcatcccctaaaattccagcagaaacaattcttcctatttaagatatcttagcaactggtac

SEQ ID NO: 941647 - DNA, 120 bp, Artificial Sequence
  ENSG00000287616_16 (sequence is synthesized)
ccaatttatctaatgtattcccttagcctctaggagaaattaaaaataatctgtggagtactgagtatagtctaatagcagaagggtaccatagcccattgtttctaactatttgcatca

SEQ ID NO: 941648 - DNA, 120 bp, Artificial Sequence
  ENSG00000287616_17 (sequence is synthesized)
tttttggcaggtccaatgacggcatccacagatgaggccaaagcttgaatgcccttggagcctatactgcttttaggccctggcagaaacatggtttttaaatcacattccaaagtgcaa

SEQ ID NO: 941649 - DNA, 120 bp, Artificial Sequence
  ENSG00000287616_18 (sequence is synthesized)
ttaccaacaatgaataaatacatcataacaatgggggaagcagaaaatgactttagaaagacagagtgatcttttgagacacagtctatataattcctaggaagccctgatagtatcttc

SEQ ID NO: 941650 - DNA, 120 bp, Artificial Sequence
  ENSG00000287616_19 (sequence is synthesized)
ttgggaaatctccctgctgcaggaaactgccttcctagattttacctcactgcctctagttgcagttacttcaggtaaacagacctccttttaactgtgactcttcctcagagaaccaaa

SEQ ID NO: 941651 - DNA, 120 bp, Artificial Sequence
  ENSG00000287616_20 (sequence is synthesized)
atatgctttgttttttcttgggccctataggatcctggtttgggataaatctcatatgtctattttccaaagatcattttggtttctctgtatttgtaaatgcacttgattgtaatcaca

SEQ ID NO: 941652 - DNA, 120 bp, Artificial Sequence
  ENSG00000287616_21 (sequence is synthesized)
aaagaaaagacagtgatgcactgtgttggctctgaagaaaaacattgaccagacagaaagtcttccccatagccaaactgagctgtaatgaccgtgcttttcatttctcccaggaaatag

SEQ ID NO: 941653 - DNA, 120 bp, Artificial Sequence
  ENSG00000287616_22 (sequence is synthesized)
taatataattggtcactgtattacagtaaacagtttgttcattctttgttcagtagaaaatgtttgggagatatgtctcacataatatgctggcttcacgataataaagactgggaatag

SEQ ID NO: 941654 - DNA, 120 bp, Artificial Sequence
  ENSG00000287616_23 (sequence is synthesized)
atttgtttctaaataaatctcaataaatacattggtaaaatgaacacagtaggaagaataaacaatgcaattaggaatatcttaagtacatttacatgtgataatttgcaagtgatcatt

SEQ ID NO: 941655 - DNA, 120 bp, Artificial Sequence
  ENSG00000287616_24 (sequence is synthesized)
ttctgaattagaatttttgtcatggaatagaaacaagaggtaagaacatgttttcgaatatgcagtaaaaagatcacctgctcctctgaagacctaacactgacattcatcttagtacat

SEQ ID NO: 941656 - DNA, 120 bp, Artificial Sequence
  ENSG00000287616_25 (sequence is synthesized)
aaaagagaaaatatgctgaggatgggcaatgtaggagtaggaactataacagcaacagctgcagaggtgactgtaattctaatggattgcttgtagtgacatcggcatgcttctgaattt

SEQ ID NO: 941657 - DNA, 120 bp, Artificial Sequence
  ENSG00000287616_26 (sequence is synthesized)
ggcgggaaagtaatgcacagaattaagacagcagcattagtgttgtgttttcttattagaaaacctcaacagctcattgaatgcaggaaaattttagagattctattttgcaagaagcca

SEQ ID NO: 941658 - DNA, 120 bp, Artificial Sequence
  ENSG00000287616_27 (sequence is synthesized)
atgtagtggctgcaaaagtaataacaccaaaatggaatgcactagggaatgtaagcagcacaggttggtacattagtttgagttattcagccagtcccgaaaagggtaatatcccatttg

SEQ ID NO: 941659 - DNA, 120 bp, Artificial Sequence
  ENSG00000287616_28 (sequence is synthesized)
aatgacaggcaaaggaattcagaaggataacagtcattttctttattgttgttattgttctagttgcttgtttgtcatttttttattagctatattaagctaaggcagcttttaaaaact

SEQ ID NO: 941660 - DNA, 120 bp, Artificial Sequence
  ENSG00000287616_29 (sequence is synthesized)
tattttgaatatccttttatacaattgtaaatctgcaccctttcattcatgcattttaaaagttatattctgcatgttgaacaacctgctcaaagcagagaaaagtaacttgtcctttaa

SEQ ID NO: 941661 - DNA, 120 bp, Artificial Sequence
  ENSG00000287616_30 (sequence is synthesized)
ctggtaagcccattgtaaggcatccttgcacatttaactggaaaatatatctaaacagcacttgataaaattacaagaagttgtatttaaatttaattttctctgcaagtacagttagca

SEQ ID NO: 941662 - DNA, 120 bp, Artificial Sequence
  ENSG00000287616_31 (sequence is synthesized)
tcattttttacccccactggtctctaacatactatttttgaggaagaaaaaaatgtttttgctaccatggcaacagtatccttctcttgctttccatcacaaactatagtttctgagcat

SEQ ID NO: 941663 - DNA, 120 bp, Artificial Sequence
  ENSG00000287616_32 (sequence is synthesized)
aactagggaaattgaaatgtgggtagctcaaaatgataaggccaagcatggtaagcattcatctaaatgaatatttgtgtcattgttcttgcactcgtggtaagactagaactttcaagg

SEQ ID NO: 941664 - DNA, 120 bp, Artificial Sequence
  ENSG00000287616_33 (sequence is synthesized)
tcaacatatttgttcatcgtgttcacagtggcactcataaaagattattgccacttattgggcaactactctcttcactaaatatcttattagcatgattttccaaagatgataggaaat

SEQ ID NO: 941665 - DNA, 120 bp, Artificial Sequence
  ENSG00000287616_34 (sequence is synthesized)
taaaacactccatagtacagtttattttgtggttttgaggaaatgtaatacaaagaaagggcacatattctagtgaattttataaaagaaatgatctgctacttgacctggagtgtgtgc

SEQ ID NO: 941666 - DNA, 120 bp, Artificial Sequence
  ENSG00000287616_35 (sequence is synthesized)
tgggggtgtggggggaggaaatagcaaaggcttatagagaaactgattgagctcattctgttatttgtttcaggggtgactccaggatggtgcctctctttgtgatgttctcgcaataac

SEQ ID NO: 941667 - DNA, 120 bp, Artificial Sequence
  ENSG00000287616_36 (sequence is synthesized)
aatattctttttattttccttgatctttcacagcctgtggatatttcagcttgcaaggttaaataatgtttttgctccatggccagtttttaaaatcctccctggctctgctatgacact

SEQ ID NO: 941668 - DNA, 120 bp, Artificial Sequence
  ENSG00000287617_0 (sequence is synthesized)
tagtataaaagagagagactgtaagagaaaggagacaaagagataaaaggtgcgagtgaacagtttacaggtgtatccagcagctccagagagacagcgaccagcgagaaggggccataa

SEQ ID NO: 941669 - DNA, 82 bp, Artificial Sequence
  ENSG00000287617_1 (sequence is synthesized)
cagctccagagagacagcgaccagcgagaaggggccataatgatggtggcggttttgtcaaaaagaaaagggggatatgcca

SEQ ID NO: 941670 - DNA, 80 bp, Artificial Sequence
  ENSG00000287617_2 (sequence is synthesized)
agatgttcttaatctgcggctttgccccagccagtttgaccaaaccactttgacccaacctggagctgtagggctgtgca

SEQ ID NO: 941671 - DNA, 80 bp, Artificial Sequence
  ENSG00000287617_3 (sequence is synthesized)
tggtaatactcatcgccaacagttgcaaggacttctgcccttgaatgctgggtattgtccagggtttctccccatgtgat

SEQ ID NO: 941672 - DNA, 120 bp, Artificial Sequence
  ENSG00000287610_0 (sequence is synthesized)
tggtgggcacaggaccccagcttggggaaagggaggttgagacagcccagcggtgacctggctgatgtgagagcagggctgtgttcagcagaaaaggcagctggatgcacagcacattgc

SEQ ID NO: 941673 - DNA, 120 bp, Artificial Sequence
  ENSG00000287610_1 (sequence is synthesized)
aaagggcacggagaaggctccgctcaaaaacaaacaagtggcaaaacactcctgcatccccaattccctaatgccaaatccaacatttgtggggctcctgcctttgcctggtcagtatgc

SEQ ID NO: 941674 - DNA, 120 bp, Artificial Sequence
  ENSG00000287610_2 (sequence is synthesized)
aagcacttgtgggatggacccagcattggtgccagggcttcaatcatcatggagtattaatgccagctgttcctatgtgccctgcctccaggaaggtgagctgtgccggaccaacagcag

SEQ ID NO: 941675 - DNA, 120 bp, Artificial Sequence
  ENSG00000287610_3 (sequence is synthesized)
aagcttcaggggagagccttctcagtttgaacacttgggagaggaggaagggagcatttcaactgcagatgaatcatgatccagagatgggagaagccaagagcttacaggtgcacacac

SEQ ID NO: 941676 - DNA, 120 bp, Artificial Sequence
  ENSG00000287610_4 (sequence is synthesized)
tcaggcacaatggcagccgaacacacacaaggcataaggatacactcaagaaatgtacagaatccacaggagtaagacagaaaagctttaccaaaggacatgaaggaagccgggaatgaa

SEQ ID NO: 941677 - DNA, 120 bp, Artificial Sequence
  ENSG00000287610_5 (sequence is synthesized)
gaaggcttcaaatagggaggtgacactcagggcccatcctaccttccacggggctgcagaggctggaaagcaaagccctacacttccaagactcatttgcagctggagggttctatggga

SEQ ID NO: 941678 - DNA, 120 bp, Artificial Sequence
  ENSG00000287610_6 (sequence is synthesized)
tcagggtcgtgtcattggatgcattcatctgtgatttggaaggcggtggacggagagccagacttctcaccgattctgctgttctctggcttctctccagtgaccagtgacctgctatat

SEQ ID NO: 941679 - DNA, 120 bp, Artificial Sequence
  ENSG00000287610_7 (sequence is synthesized)
ggtcaccacactccacttcttcctcctcctggacacacagctcgactgtttccagcccttcttccaactaggtgaggacatgtgctggagtcccagccgtggaacgtaggcagaagcaag

SEQ ID NO: 941680 - DNA, 120 bp, Artificial Sequence
  ENSG00000287610_8 (sequence is synthesized)
gcccctccctgttagccctgcctgtaaacatttcccacagaatcctccatgctctctctccccatccacctgctggatgaacaggactcgggcttggaggaggaggagccacaagacaga

SEQ ID NO: 941681 - DNA, 120 bp, Artificial Sequence
  ENSG00000287610_9 (sequence is synthesized)
agggcctgggtccctgaatgaccaagtggagcagagccccgtgccaacccacactagactacgacatgagcaagaagtcaactctcaacgctcgtggtgatccacactgacaccaggcag

SEQ ID NO: 941682 - DNA, 120 bp, Artificial Sequence
  ENSG00000287611_0 (sequence is synthesized)
cagacagactggggagaagacacagagccaagcaggacctggcctgcagcccaaaccctgtggaatccctacattcaaggaccaggttgaagtgaagccattgacaggaactgagatgca

SEQ ID NO: 941683 - DNA, 120 bp, Artificial Sequence
  ENSG00000287611_1 (sequence is synthesized)
gtagtgttctggaagtcaagtgaggaggaggattgaagaagaggttggtcaaaattctgggggttgcccagtggaaacaccagactgcaaagctttgagaagtctgtatgagatgaacaa

SEQ ID NO: 941684 - DNA, 120 bp, Artificial Sequence
  ENSG00000287611_2 (sequence is synthesized)
gagaagtctgtatgagatgaacaactggaaaaggttcttcgtgaagaatttgtgtggtgaagagctggaatagcggcttgagggagagaagccagcactattcacaatagccaagatttg

SEQ ID NO: 941685 - DNA, 120 bp, Artificial Sequence
  ENSG00000287611_3 (sequence is synthesized)
aaaagaatgagatcttgtcatctgcaacaacatggatggaactggaggtccttaaggttaagcaaaataatccaggcacagaaagaaaacattgcatgttctcatctatttgtgagaact

SEQ ID NO: 941686 - DNA, 88 bp, Artificial Sequence
  ENSG00000287611_4 (sequence is synthesized)
agggcgagtgagggggaagtggggtgtttaatgtgtccaaaaaatggtcagaaacaatgaataaagtctaatatatgacagcaaaaga

SEQ ID NO: 941687 - DNA, 120 bp, Artificial Sequence
  ENSG00000287611_5 (sequence is synthesized)
cagaaacaatgaataaagtctaatatatgacagcaaaagagtgtgactatagtcaataataatcgaatggtacatttaaaaataactaaaagtgtatatttggattgtttgtaacataaa

SEQ ID NO: 941688 - DNA, 120 bp, Artificial Sequence
  ENSG00000287611_6 (sequence is synthesized)
gcaaccgtatgctgattctgccatctccagcctgattccttgggagaggttaaccttccacagtggtggcaaaagtcagcaggcaatgaaggctatttccacctgagtcaccagaaagaa

SEQ ID NO: 941689 - DNA, 120 bp, Artificial Sequence
  ENSG00000287611_7 (sequence is synthesized)
tggctaggtcataagccacatggctggactctatctacctccctgtaatctccactctttcacctgtgccagcaatggtttagagatgaacagaccataaagactatggaaatccaataa

SEQ ID NO: 941690 - DNA, 120 bp, Artificial Sequence
  ENSG00000287611_8 (sequence is synthesized)
tctttaatgcatttgctctgtcagtgacatttgccataggagagagagagatttggaatttataatttgtacaccctgattctgcacagccttagtctctgacaatgtgtgaatgcatat

SEQ ID NO: 941691 - DNA, 120 bp, Artificial Sequence
  ENSG00000287611_9 (sequence is synthesized)
ttggaagggacacattctcccagtttactgcaatatcctcgctccctattaattacacccagtgattaagcccacaatgccttttaaattttcccagcaagccttgtacaacaatccaaa

SEQ ID NO: 941692 - DNA, 120 bp, Artificial Sequence
  ENSG00000287611_10 (sequence is synthesized)
tcaggccaaaagtaggaggagagctattttcttcctgcctgctttccctctgagcatacaaatttggaggccccataacaactgctcccctcttcatgctggcagagcctaattatttct

SEQ ID NO: 941693 - DNA, 120 bp, Artificial Sequence
  ENSG00000287611_11 (sequence is synthesized)
caacttatccctaaacaaagaatagatcaccaaaatacttcagatgaaacgtagagcagacaggtcctgggctgggaatccaggagactgatgcaacaaatgcaacaaagagcattaaga

SEQ ID NO: 941694 - DNA, 120 bp, Artificial Sequence
  ENSG00000287611_12 (sequence is synthesized)
gactagcaatgtccatgaagaagggaacctaataagtaagctgccacagctcaagtcctcctggccaaagccaggtcatgtccctctataaccagccagtgagaagggaatgaggtccct

SEQ ID NO: 941695 - DNA, 120 bp, Artificial Sequence
  ENSG00000287611_13 (sequence is synthesized)
aaacgggttcgggggattcatgattctctctggggactggagagagagcctggaggtctcactttcttgagcacatcggggtgactgatggaccctgccgggtggtcaaggtgagatggc

SEQ ID NO: 941696 - DNA, 120 bp, Artificial Sequence
  ENSG00000287611_14 (sequence is synthesized)
ttctggcacaggtattggatgtgacataatccttgcgaagggcctagacagttaaggaagtgcaccctacctcctgaaagctccctccatacctggcactaaaaggtattatcaccagtt

SEQ ID NO: 941697 - DNA, 120 bp, Artificial Sequence
  ENSG00000287611_15 (sequence is synthesized)
cctgcaaaaaggctaccctccaagctaccctctagggtgagtcattagacagaacaaggatataacacatcccctgctctcctaaggaaattctctcagtgtgaattttcttgtgctgaa

SEQ ID NO: 941698 - DNA, 65 bp, Artificial Sequence
  ENSG00000287611_16 (sequence is synthesized)
caatgagtaaatgttttgctaaaaaatttcccacactgcctcagcataaagccttacttcagtgt

SEQ ID NO: 941699 - DNA, 120 bp, Artificial Sequence
  ENSG00000287611_17 (sequence is synthesized)
atttcccacactgcctcagcataaagccttacttcagtgtcaacttttggtgctgaacaaggcactccttggctgaaaccttcccacattctatgcattcataaggcttttgcagggtga

SEQ ID NO: 941700 - DNA, 120 bp, Artificial Sequence
  ENSG00000287611_18 (sequence is synthesized)
actttctggtgctgagcaaggttagagggacagccaaaggctctctcacattgtccccactcataaaacctttctgtgttgtgaactttctggtgccctgcaaggtggacatttctgctg

SEQ ID NO: 941701 - DNA, 120 bp, Artificial Sequence
  ENSG00000287611_19 (sequence is synthesized)
taggatttcccacacctgctgtacacataagggcttgctccagagtgaagtctctggtggtgaacaaggctggagctctggctaaaggatttcccacattctttgcactcataaggactt

SEQ ID NO: 941702 - DNA, 120 bp, Artificial Sequence
  ENSG00000287611_20 (sequence is synthesized)
cccacattctttgcactcataaggactttctccaatatgggttctttgatgttgaccaagtccatatttggagctcaaagatttcttacgcaatgtaaattagtataaccactatggaga

SEQ ID NO: 941703 - DNA, 120 bp, Artificial Sequence
  ENSG00000287611_21 (sequence is synthesized)
aaatagagctaccatatgacccatcaatctgacttctagttatataccccaaagaaaagaaatcagtacattgaagagatatctgccctcccatctttgttgcagcactattcacaatag

SEQ ID NO: 941704 - DNA, 120 bp, Artificial Sequence
  ENSG00000287612_0 (sequence is synthesized)
aagggaataaacgctggccacccgagcccacggaggcaacccacttgggtgctactccacgctgtggaagttttgttctttccctcttcgcaataagtcttgctgctgctcagtatttgg

SEQ ID NO: 941705 - DNA, 120 bp, Artificial Sequence
  ENSG00000287612_1 (sequence is synthesized)
gtctgcagcttcactcctgaagccagcaacaccacgaacctaccgggaggaacaaacaactccagaggcaccaccattaagagctgttaacactcactgcgaaggtctccggcttcactc

SEQ ID NO: 941706 - DNA, 120 bp, Artificial Sequence
  ENSG00000287612_2 (sequence is synthesized)
gagctgttaacactcactgcgaaggtctccggcttcactcctgaagtcagtgagacctcgaacccacccgaaggaagaaactccagacagatctgaacatctgaaggaataaactccgga

SEQ ID NO: 941707 - DNA, 120 bp, Artificial Sequence
  ENSG00000287612_3 (sequence is synthesized)
agagcccactggaaggaaccaattccggacacagccctggagtgatagggcagcagaatatctactctgaactaagagcataacaaaggaggtggaagaggcgccaggatagctcccata

SEQ ID NO: 941708 - DNA, 120 bp, Artificial Sequence
  ENSG00000287612_4 (sequence is synthesized)
tttggagtgttatcattcaagtacacactggcaccagggtccctgaggcttgctcattgaggttgtcaacactgcaagaaggagtttttgtggcagaacagacattgattggagatgctg

SEQ ID NO: 941709 - DNA, 120 bp, Artificial Sequence
  ENSG00000287612_5 (sequence is synthesized)
gcaaggcagggtgaagccaagagaccagaagatgatggtcattgaaaagagattttgttacagttcaagagaagcaagcacaacatgccatgccttcatcttctgctatgatttttgtga

SEQ ID NO: 941710 - DNA, 120 bp, Artificial Sequence
  ENSG00000287612_6 (sequence is synthesized)
agatacagagagaaaacgtctgtctatgtggaaggaggtcctctccagcgcatcatctgccagctccttgacttaggaccctccagcctctagaactgagaaataaatatctgttgtgta

SEQ ID NO: 941711 - DNA, 120 bp, Artificial Sequence
  ENSG00000287613_0 (sequence is synthesized)
attcttttgaggatctgtgagaagtggatgggaaatgaaagtacgtgaaatattcaaattttcatttctaaataaatgaacgcaacacgacatgggctattttcagactatgaggtctct

SEQ ID NO: 941712 - DNA, 120 bp, Artificial Sequence
  ENSG00000287613_1 (sequence is synthesized)
ttcatcaaagtcagcactagctgtgaagaccacctgcttccagtaattaccgtaagcacactcagtgtctccggattcaaatgacctatttcttggtgaaataagacatctcttaacttc

SEQ ID NO: 941713 - DNA, 120 bp, Artificial Sequence
  ENSG00000287613_2 (sequence is synthesized)
aactgcgttacatatactctcaactctaaattacttattcacaggagacaaatgcctctagatcaattcaaagcactgatctcgctcagtgggcccatcagaactcgaatcccaaggcac

SEQ ID NO: 941714 - DNA, 120 bp, Artificial Sequence
  ENSG00000287613_3 (sequence is synthesized)
aataagaaaacaatctgccgagtatccgacagaaatgaatagatagatctgaaaaccagccacatggaaaactgcaaaactgttgttctgaaatttttattcagagtaacttaagaaggg

SEQ ID NO: 941715 - DNA, 120 bp, Artificial Sequence
  ENSG00000287613_4 (sequence is synthesized)
aattaatttcgctttttttaatgtaggaaagaaacagaccctacatttagaagagtaggttgtttgctcaatacttataataatttcatagcaccaattaacactttcttgcctagcttc

SEQ ID NO: 941716 - DNA, 120 bp, Artificial Sequence
  ENSG00000287613_5 (sequence is synthesized)
tgtcctaaacacatgcatctataaatctgcttggattttcaagtttcaagattaaaacaaaatatatctcagtaatcagacataaaaaacaattacttagctttacaaattaataattca

SEQ ID NO: 941717 - DNA, 120 bp, Artificial Sequence
  ENSG00000287613_6 (sequence is synthesized)
tatagaatataagcttgaggtccttaggcctaaattatttctcctacttgattcgtttctgcatgtggcatggttggtgtctctctttgttttgagactatttcctgccttaaaatctga

SEQ ID NO: 941718 - DNA, 120 bp, Artificial Sequence
  ENSG00000287613_7 (sequence is synthesized)
gtacttgtcctctttcttctcttccacctgccccttgcctcttcatttgcttcattttctcttctgctgctgctggctgtttaaatactcataattttcttcccttactttttatcacca

SEQ ID NO: 941719 - DNA, 120 bp, Artificial Sequence
  ENSG00000287613_8 (sequence is synthesized)
tcctacactcctctcccttccctcatctttccttcccttctcttttctgttcatcccatttttaggcttctatttttatcccaattttctcctacaatcttattttctttcagcgtgatt

SEQ ID NO: 941720 - DNA, 120 bp, Artificial Sequence
  ENSG00000287613_9 (sequence is synthesized)
aaggtaataattccacaattagtttctctagccctgatttaaaaagtgggtgacgaggagtcatgcccaaatcatttaatcaaaactgaaacgtgcacagagagattcgttatgcacaag

SEQ ID NO: 941721 - DNA, 120 bp, Artificial Sequence
  ENSG00000287613_10 (sequence is synthesized)
atactaattaggacaagaaacagagtggaaagacctttgaaaggtcacaccgtgccctccttttattccagctaaggcttttcctaaatcagcattccggaagtattccagggaacactc

SEQ ID NO: 941722 - DNA, 120 bp, Artificial Sequence
  ENSG00000287613_11 (sequence is synthesized)
gttctgcaaaatggctcttgaaaagaagaagaagaagaaagaaggagttctatggccaaattaatttgggaaaaactgcatactatgtctccctcatgaatttcaatgaacattaacatt

SEQ ID NO: 941723 - DNA, 120 bp, Artificial Sequence
  ENSG00000287613_12 (sequence is synthesized)
gtaaaaactgaaacatcttagaagagaaatatttatttgcatttaacccaacattacacaaactcatttgactctgcaagatttttaataagtcatctcatcttcagaaacattcctttg

SEQ ID NO: 941724 - DNA, 120 bp, Artificial Sequence
  ENSG00000287613_13 (sequence is synthesized)
gccattgcagcaaccttttaactattttcttctttaagcatcatccttctccaatccactccaaactaccaccaggatcatccatctaaaacattaatcacacctcacaactcgtctgcc

SEQ ID NO: 941725 - DNA, 120 bp, Artificial Sequence
  ENSG00000287613_14 (sequence is synthesized)
taaaataatccagtggcaccaggctatatacaagataacatctgtactcctcagtagagcacagaatttttagtaattctatcttcagcttccttgccttcactttttttgccacgaact

SEQ ID NO: 941726 - DNA, 120 bp, Artificial Sequence
  ENSG00000287613_15 (sequence is synthesized)
agtccttaatccactctccctcagggtacctaacactgtagtatcaccaaattacctaaaatcttaaaaatgtccacttacacctgatcctttcccttctctcccctgtcaggctattcc

SEQ ID NO: 941727 - DNA, 120 bp, Artificial Sequence
  ENSG00000287613_16 (sequence is synthesized)
atattttttccatagttcttatgtatgctccttttaaacacattttctcgatcactttcttttatgtccaagtaagttagttgttctttgccttgtgtttcctcaccactttgtaaatat

SEQ ID NO: 941728 - DNA, 120 bp, Artificial Sequence
  ENSG00000287613_17 (sequence is synthesized)
ctctagaaacatgaatccctctgaatttattgcacctaggaaattgcaagcctgtagacctgtactgtctaatactgtaggattagctaccatgtgacttttgagcacatgaaatgtaac

SEQ ID NO: 941729 - DNA, 120 bp, Artificial Sequence
  ENSG00000287613_18 (sequence is synthesized)
tagtttaaactgacatgcttttagcataaaatacgcactgatttcacaagaaaagaaacaaaaaacttataccattaataatttaaaatattgattttatgtcaaaattatattttggaa

SEQ ID NO: 941730 - DNA, 120 bp, Artificial Sequence
  ENSG00000287613_19 (sequence is synthesized)
gactcagaagccctcactcacacaatttagcacttgtttttcttattttgctcttcatggactattattttctattttcttgctgagcaaagaaaccccacacaatcaatataaagaaaa

SEQ ID NO: 941731 - DNA, 120 bp, Artificial Sequence
  ENSG00000256995_0 (sequence is synthesized)
gttgccgtagtgcaggtgggattgccaggtgccaggtgcccctactgcagcctgcacggaggggaccgtcattttcagactgtccttttagcaggacttcaatgtcaggcctccaaagaa

SEQ ID NO: 941732 - DNA, 120 bp, Artificial Sequence
  ENSG00000256995_1 (sequence is synthesized)
gtctacaaattccatcagtcagtaacggcttggagttccaaagcttatgactcaaaggtgatcagagcatggacctggggctagtctggattggtaactgctaaacttggatacatggct

SEQ ID NO: 941733 - DNA, 120 bp, Artificial Sequence
  ENSG00000256995_2 (sequence is synthesized)
agagccagagattcacgttccaggagccctgactgtctcatctcagggaattgaatctccttgtgctccagaccctatgagaggatgccatcccctgctaccatctgactgcaacctcag

SEQ ID NO: 941734 - DNA, 120 bp, Artificial Sequence
  ENSG00000256995_3 (sequence is synthesized)
gagacaccccaagccagaactgagcagccaagccactctcatattcttgacccatagacattgggagataaaaactgattgttgtcaattttagtcagtacattttagggcaatttgatg

SEQ ID NO: 941735 - DNA, 120 bp, Artificial Sequence
  ENSG00000256995_4 (sequence is synthesized)
tcctagcaatagactagtatatttatccattgctgcatcttcttctgcttagattatgatgcatgttttttagctccaactagtatctaaacttgtcatggtctttgcttgaaagtttga

SEQ ID NO: 941736 - DNA, 120 bp, Artificial Sequence
  ENSG00000256995_5 (sequence is synthesized)
ggcatgagtttttaatcctgggccacaagaggccctgacacttcctctgttgctctcttgaaaccttcacgaaaggaagccaacctaggcagcatccaacactgactgccagacatgtaa

SEQ ID NO: 941737 - DNA, 120 bp, Artificial Sequence
  ENSG00000256995_6 (sequence is synthesized)
gtgagaccatcttggatttccccgcccagacgaccatctggctgaataagtgaaatcaagtgaaggcagaagaggagctgcccagcaacccacagaatggcctccaaagaagtctacaaa

SEQ ID NO: 941738 - DNA, 120 bp, Artificial Sequence
  ENSG00000256995_7 (sequence is synthesized)
gcactctggactcctacggaccaagatgatcaactctgaggaagaaaggcaatgaggacgttgcacaagacagtccctgatacccagagtttactgcctaagagaggatacatccttcaa

SEQ ID NO: 941739 - DNA, 120 bp, Artificial Sequence
  ENSG00000256995_8 (sequence is synthesized)
accaataatctgctaatagcaagatccaatagcttcatggatattgaaagaaactgagaatcaaatttgcatacttctgagtcacttggaaacaaaaaacaagtacagtcttagattctg

SEQ ID NO: 941740 - DNA, 120 bp, Artificial Sequence
  ENSG00000256995_9 (sequence is synthesized)
agggaacaaaaattaaaaatcacattaggaagagaattcctaatgtaggaactcatcctggaagattcttcagcaaaagtacagacaataataataatactccatgaagttaccatcgat

SEQ ID NO: 941741 - DNA, 120 bp, Artificial Sequence
  ENSG00000256995_10 (sequence is synthesized)
attgaatgaattaatgaatgtaaaaacctcaaaaccctgcctggcccagagctttggaatgggtttggatctaccactcaactgctttatgacttcagaccagttatttaaattccctga

SEQ ID NO: 941742 - DNA, 120 bp, Artificial Sequence
  ENSG00000256995_11 (sequence is synthesized)
agctcagtttccacatctttgagtttttattaatgacctgccgacatcatacagttcatgaaatgctctggatgtgtacatgctgatgatacgacctcagacccagcaagagctcagtgc

SEQ ID NO: 941743 - DNA, 120 bp, Artificial Sequence
  ENSG00000256995_12 (sequence is synthesized)
agcccggagagctgtgagcagtgccacaggaggagatgactggtgagtgaaataagcaagataggagttgaagtgtacatgaagcagagtccaagccttctccttctggatgttcagctg

SEQ ID NO: 941744 - DNA, 120 bp, Artificial Sequence
  ENSG00000256995_13 (sequence is synthesized)
gatcatcctgactgctcccactttcatcttggctttcaaagggctatatggatgtgctctacttgttggaggattgtccatccactcttcttcctgtacttaccaggacagaacagccgc

SEQ ID NO: 941745 - DNA, 120 bp, Artificial Sequence
  ENSG00000256995_14 (sequence is synthesized)
attccaatttacccatttgttttggtttagtttaaggagattgtaaacaagtatgcctacaagggccatgcaacaaatgctaaaaagagaagtagacctgggcagggaggcaagggagcg

SEQ ID NO: 941746 - DNA, 120 bp, Artificial Sequence
  ENSG00000256995_15 (sequence is synthesized)
gaaagatgtgtagtacgttcagctcaggtcacgttcatcatccagctctggaagatggatccagtgggcatgtgtgcctaatgatgccacattatctgatttttttctccaaaagaaaaa

SEQ ID NO: 941747 - DNA, 120 bp, Artificial Sequence
  ENSG00000256995_16 (sequence is synthesized)
tttgctgagttggggaacactggagaggatcagttttgggagtttaaggaagaatcaggagatattgagaggttgcccttcatcactcagcagtgaagaatgaaaatcaacagagctttc

SEQ ID NO: 941748 - DNA, 120 bp, Artificial Sequence
  ENSG00000256995_17 (sequence is synthesized)
cccagcctgctgcttaagcagctgctagcaggctgaggctgcccagcctcattaacccattagatgctgcgttcgcccgggagtcattcttaatgaggctgctgcagatgagaaaacaga

SEQ ID NO: 941749 - DNA, 120 bp, Artificial Sequence
  ENSG00000256995_18 (sequence is synthesized)
tctcagacagttcattcttcttttcctcacctactaccatctaagaaaggtacttgatgactgtggctttagacaagagtccttttcttaccacagggtgggcagcaccagctcattaga

SEQ ID NO: 941750 - DNA, 120 bp, Artificial Sequence
  ENSG00000256995_19 (sequence is synthesized)
accatttgtgtgactgactgaagacagctcaccttggaacactgcaggttgaagatcatctcttctttttttcatggtgttaagcataatatggcgtaagtgacattttacaagttccag

SEQ ID NO: 941751 - DNA, 120 bp, Artificial Sequence
  ENSG00000256995_20 (sequence is synthesized)
agcctgggactcaagatgtcttggagattctgtctttgcagtcttataatgatgccctgagatcatcattaaagaaagccagtctggcctactgaggatgagaagctacataaaggagaa

SEQ ID NO: 941752 - DNA, 120 bp, Artificial Sequence
  ENSG00000256995_21 (sequence is synthesized)
tgaagattccccagccaacaggcaatatcagtggtcagatatgtgaataaagccatgttgaacctctcggctagacgaccctccagcatatgaaaccagcagatgaatatcccagcctgc

SEQ ID NO: 941753 - DNA, 120 bp, Artificial Sequence
  ENSG00000256995_22 (sequence is synthesized)
ctgaagaactgtacaggaaataagaaatcattgttttttaagccactgggttggtgggtggtttgttacattgaaattgttaactaaaacagaaattggtgcatagaggtcaggtgctgt

SEQ ID NO: 941754 - DNA, 120 bp, Artificial Sequence
  ENSG00000256995_23 (sequence is synthesized)
cataataaaaatctaaaacatatactgttggctttggtgatgggagtgattggtagctaaagaggcagtgaaacaatgattagtagatactgggaagttaataaggaaatttctattgga

SEQ ID NO: 941755 - DNA, 120 bp, Artificial Sequence
  ENSG00000256995_24 (sequence is synthesized)
gggtggagaaagggccacccttgttatatagtggccaaagaatcagcaaaatgttgcctgctgcaacctggaaagtagaaacttttcttaaactcacggatctggctgggagatttccag

SEQ ID NO: 941756 - DNA, 120 bp, Artificial Sequence
  ENSG00000256995_25 (sequence is synthesized)
tctggctgggagatttccaggatgcatgcaacaaatgtgaatcaactttgtatagctgtgtataataaagtgtgctgtatttgtccattctgatgctgctaataaagacatacctgagac

SEQ ID NO: 941757 - DNA, 120 bp, Artificial Sequence
  ENSG00000256995_26 (sequence is synthesized)
gtattacagtttttcagagaaaaccatgtacattttgtgagaatactcaagcagccccatggacctgtccaaatagcaaggaactgaagccctctgacaagaaccatgtgaatgaaccat

SEQ ID NO: 941758 - DNA, 120 bp, Artificial Sequence
  ENSG00000256995_27 (sequence is synthesized)
acaactgcatcctcatgggagaccctgagctagaaccaccagtaagccccttccaaattctgaaaccttaggaattgtgtgagataataaatatttactactatttaagctttctaaaag

SEQ ID NO: 941759 - DNA, 120 bp, Artificial Sequence
  ENSG00000256995_28 (sequence is synthesized)
acataaaaaagaataaaatcatgtcctttgcagtaatatgaatgtagctggaggccatcatcctaagtgaagatggaagagaaaaccaaatacagcatgttctcacttatcagtgggagc

SEQ ID NO: 941760 - DNA, 120 bp, Artificial Sequence
  ENSG00000256995_29 (sequence is synthesized)
taaacattagggacatatggacataaagatggcaacagtggacactgggggccactggagtggggagagggggaggggaacaaaggctgaaaaacaaccaattgggtactatgcccacta

SEQ ID NO: 941761 - DNA, 120 bp, Artificial Sequence
  ENSG00000256995_30 (sequence is synthesized)
cctgggtgatgagatcattcacacccaaagcctcagcattgtgaaatatacccatgtaataaacctgcacatgtacccctgaatctaaagttgacattatattaaaaaaagaaagctgct

SEQ ID NO: 941762 - DNA, 120 bp, Artificial Sequence
  ENSG00000256995_31 (sequence is synthesized)
agaaaccaaattggctggcgccttgatcatggactcctgggctccggaactgtaagaaaatttgtgttgtggaagccacccagcccatggtatttcgttatggcagcctgagcagaggtg

SEQ ID NO: 941763 - DNA, 120 bp, Artificial Sequence
  ENSG00000256995_32 (sequence is synthesized)
gtagctatgtggacagtttttggacttctctattgtaacacaggaggcaacacagattcttcaagtctcacagctactccctagggatcactggggaacttggaaaaaatctattggctc

SEQ ID NO: 941764 - DNA, 120 bp, Artificial Sequence
  ENSG00000256995_33 (sequence is synthesized)
gggaagaggtcacaaaccaaggaagcaagacggccctcaccagatgccagcacctcctgtgatattggactttccagcctccagattcatgagaaataaatttctattgtttataaatta

SEQ ID NO: 941765 - DNA, 120 bp, Artificial Sequence
  ENSG00000256995_34 (sequence is synthesized)
gggttttacaatctagcaaaaaatgtacataatctgttatgctgtcagggtttatgagcggtcgagaagttaacatttcttaacttcaacctcaaaggtctttcccacagtctgtgaagc

SEQ ID NO: 941766 - DNA, 120 bp, Artificial Sequence
  ENSG00000256995_35 (sequence is synthesized)
ctgtttagttgctactacgttaaacgcacattctatttcctttgaattaggttatatcagcctattaaaaaaaagaaatagctcttaaactacacactgatgaaaatatgattgtactct

SEQ ID NO: 941767 - DNA, 120 bp, Artificial Sequence
  ENSG00000256995_36 (sequence is synthesized)
ctattatatccaaataagcaatctgtgtccccaaactcttagtactgctttttaaaccacaaaagctttggtaggatgtcaaatatttttccagtgtttaataaaatagtaaagaaacat

SEQ ID NO: 941768 - DNA, 120 bp, Artificial Sequence
  ENSG00000256995_37 (sequence is synthesized)
acatctgttttgcctgtaaattttgtcacctctggatccctttgtcccttggttttctcatctattaaaaaaaattacaacagaaatctcttattttcaggtaacacaggaggcaacaca

SEQ ID NO: 941769 - DNA, 120 bp, Artificial Sequence
  ENSG00000256995_38 (sequence is synthesized)
ggagagggcttaacggagacaagtgaagagaactgacttacaccttaaagaactgctgtttgctctgtaaaggttgcccttcatcactcagcagtgaagaatgaaaatcaacagagcttt

SEQ ID NO: 941770 - DNA, 88 bp, Artificial Sequence
  ENSG00000256995_39 (sequence is synthesized)
tattacagatgagaaaacagaagcaaaggcagaaagatgctacattgccagctttgaagatggagggaagaggtcacaaaccaaggaa

SEQ ID NO: 941771 - DNA, 120 bp, Artificial Sequence
  ENSG00000256995_40 (sequence is synthesized)
aggagatattgagaggcaagtacagtagtcctccattatccacggttttactttttgtggttccagttatccacagcacagtacaataagatattttgagagatagagagaccatattca

SEQ ID NO: 941772 - DNA, 120 bp, Artificial Sequence
  ENSG00000256995_41 (sequence is synthesized)
gtatattgttgtaattgttctattttattaattattgtcattaatctcttattgtgcctaatttataaattaaactttattgtacatataggaaaaaatgtagtatatgcagggtttggc

SEQ ID NO: 941773 - DNA, 120 bp, Artificial Sequence
  ENSG00000256995_42 (sequence is synthesized)
atatgcagggtttggcactggtttcaggtatccactgggggtcttggaaggtattgtctgcagacgagggatgactgtaaatatacaatcatgaatttagggacaaaatcaggttttatc

SEQ ID NO: 941774 - DNA, 120 bp, Artificial Sequence
  ENSG00000256995_43 (sequence is synthesized)
gaacaggtgtggagccttagtgcatgccaagtcagatgtcatgaggaaaaggaaaacccagcaaaggacacattgcaagaagaacattaagaaagtgggagcctagaacagtgcttctca

SEQ ID NO: 941775 - DNA, 120 bp, Artificial Sequence
  ENSG00000256995_44 (sequence is synthesized)
gacccgcaacacctggatggtagatgcaaacagataaagaatattggtcaccaaaaggagttcttttcatcatagatctctgaaggtagacacctatttgcagacttctcaaagggctat

SEQ ID NO: 941776 - DNA, 120 bp, Artificial Sequence
  ENSG00000256995_45 (sequence is synthesized)
tggtatttcgttatggcagcctgagcagaggtggtagctatgtggacagtttttggacttctctattgaggagggaacagagagagggcaggaggaagagtggggaagaaactcatacac

SEQ ID NO: 941777 - DNA, 120 bp, Artificial Sequence
  ENSG00000256995_46 (sequence is synthesized)
tgtttacagcatgtcaaagacaaatgaggagggatccaagaggacttcttggaagaagaggaccacctgcatcttgacctctgcctggatgcttgctgcacgacagaatccataaggtct

SEQ ID NO: 941778 - DNA, 120 bp, Artificial Sequence
  ENSG00000256995_47 (sequence is synthesized)
agatttcttgccagaacagcagtaataaataccattcatcaagaggttgttgtgtacgagcatattgctggtacacaatttatgacccacaaaaaaaccttctgtggtagacatgatgtt

SEQ ID NO: 941779 - DNA, 120 bp, Artificial Sequence
  ENSG00000256995_48 (sequence is synthesized)
ctgttttgtagagatgagaaacctgatgctttgtgaagctaagttactcttggtgaccaacctgtaaatggcgaaggagatcactctgttctagggctgctgaagtaaacttcatccact

SEQ ID NO: 941780 - DNA, 120 bp, Artificial Sequence
  ENSG00000256995_49 (sequence is synthesized)
ttctactatgccaggccacagagtttacagggtaggaggaaaaagacctggtcatttttaaagatatgccaattatatcaaagtaatgaaactaaaactgagacaaaataggcaatccag

SEQ ID NO: 941781 - DNA, 120 bp, Artificial Sequence
  ENSG00000256995_50 (sequence is synthesized)
ccctcttcctgcccaactggagtctcatcaccaccatcagtcttgggaccataggactgatctaattttattctttaatcctatttatttcattacctcaaaaagcccaacatggaatag

SEQ ID NO: 941782 - DNA, 120 bp, Artificial Sequence
  ENSG00000256995_51 (sequence is synthesized)
gccacattatatgaatatattatgctgctttgtcacatgctgtaagaaaagtaactgctatggagttgagaaggtacaagaaagatgagaaaacagaagcaaaggcagaaagatgctaca

SEQ ID NO: 941783 - DNA, 120 bp, Artificial Sequence
  ENSG00000256994_0 (sequence is synthesized)
tttgtctctttacttatggaatttgttatttctccttcattttctaaaggttttttcaaggctttaacagaagtttgggtataattattaagaatcactatagtataagcacagtctaga

SEQ ID NO: 941784 - DNA, 120 bp, Artificial Sequence
  ENSG00000256994_1 (sequence is synthesized)
aaccaattaaattttctctgtgttacatatcaatttggtaaggactatgtaattcctgccatgaggtggaaatactggattcttctcttggccctaagtttcgtttattgacctgttgtt

SEQ ID NO: 941785 - DNA, 120 bp, Artificial Sequence
  ENSG00000256994_2 (sequence is synthesized)
ggtccatctctctagaactctcggctgagcttcaggccttacattcatatctgacttcagcgatttgtcttcttgtctcaataagtgtaagaagtgggtagaggatggaaagggagaaga

SEQ ID NO: 941786 - DNA, 120 bp, Artificial Sequence
  ENSG00000256994_3 (sequence is synthesized)
aaggattaaagttaagcctgaatgtttcattctccaccttaacatgaccgcatctactaatagccaataaaatgaattggcctctctactgggctgcttgaccttcctcatgacatggca

SEQ ID NO: 941787 - DNA, 120 bp, Artificial Sequence
  ENSG00000256994_4 (sequence is synthesized)
tgtgagtaggctatacaggagacaggaaccattgggagccattttgaacactctctactacaggatcaaaagcaaataattacaaaacagtacatcaatgcaacaatggcattatatgta

SEQ ID NO: 941788 - DNA, 120 bp, Artificial Sequence
  ENSG00000256994_5 (sequence is synthesized)
agcattaatatagaattttggagggaaatcacgagaaaactgaagacatctgtccaccaagaaaagcacaaaagctataaactgaagatagatatattttcaactaactgcagtcttcaa

SEQ ID NO: 941789 - DNA, 120 bp, Artificial Sequence
  ENSG00000256994_6 (sequence is synthesized)
acatcctcatggaatgatctgcttgaaaaccacacccacagagtcttataaatattttatctgcttttgacctcttcaatcagtctctgcaagattttgttaagattgtgatcttctttg

SEQ ID NO: 941790 - DNA, 120 bp, Artificial Sequence
  ENSG00000256994_7 (sequence is synthesized)
ttatgctccatccacctcttcttccacctgtcactgagttatttcacatagacactatttctccctgcgatttttgcagaagcttctgaactggaatatttgtttcttagtgtcttctat

SEQ ID NO: 941791 - DNA, 120 bp, Artificial Sequence
  ENSG00000256994_8 (sequence is synthesized)
gagatacagagcactacgatctcaaatagaattgagatttaaaattatgcataaggaattaacatactttaatcctaaagaaagagaaaaaatatattaaaggtcatcgtgactagaacc

SEQ ID NO: 941792 - DNA, 120 bp, Artificial Sequence
  ENSG00000256994_9 (sequence is synthesized)
ttatgggtgataccggcctcaggaaataagtatggaaatgttctctctttttatctatttggaacactttcaaaaataataaaatattgaggaataaatacaaccaaagaagagaaagac

SEQ ID NO: 941793 - DNA, 120 bp, Artificial Sequence
  ENSG00000256994_10 (sequence is synthesized)
ttctgtatttcacactacatattgacaaaagaaatgttaaaagacaaagataactgaaagggcatctcatgttcatggatttgaagaataccattaaaatgcccattactttcaaagcaa

SEQ ID NO: 941794 - DNA, 120 bp, Artificial Sequence
  ENSG00000256994_11 (sequence is synthesized)
attttatcacacaggaacaaccatgattcaatatgtgagtaggctatacaggagacaggaaccattgggagccattttgaacactctctactacaggatcaaaagcaaataattacaaaa

SEQ ID NO: 941795 - DNA, 120 bp, Artificial Sequence
  ENSG00000285616_0 (sequence is synthesized)
gattagaacactgaagactgaaatgcagcaacttgccaaagtttaggcataaagttaaaaggaattgggtcaagaactcagaatttcttattccttgtacagaaaatgctcatctatgtc

SEQ ID NO: 941796 - DNA, 120 bp, Artificial Sequence
  ENSG00000285616_1 (sequence is synthesized)
ctacgccatagatgcatgtgtgaataaacattttctttaaaggaatattcttcataaatgaattttattttaaaatttatcacagaaagtgacttttttccttttggtataaaatcctat

SEQ ID NO: 941797 - DNA, 120 bp, Artificial Sequence
  ENSG00000285616_2 (sequence is synthesized)
ggattttatttcatgtacagatttgtgtaatccctaccaggattgagcacagttctatcactttgaaaaaatttctcatgtcattctttatgaatgtaaattcataaaaatacatatttg

SEQ ID NO: 941798 - DNA, 120 bp, Artificial Sequence
  ENSG00000285616_3 (sequence is synthesized)
taaaacataatctaaaacataatgtaaattcatacaaatatatatttgtaatttatttaggaatataaattcaaacccttttcccaacccctggcaaccattgacctatgtcactatagt

SEQ ID NO: 941799 - DNA, 120 bp, Artificial Sequence
  ENSG00000285616_4 (sequence is synthesized)
tttttttttctttttttaggatgtcttttaaatgtattcttatatagcatgcaattttttgagactgacttatttcataagcataatgcctttaagattcatctgagttgttgcatgtat

SEQ ID NO: 941800 - DNA, 120 bp, Artificial Sequence
  ENSG00000285616_5 (sequence is synthesized)
caacaatttgttcctttttattgctaccagtattccattgtttggatctaccacggtttgtttatctactaacctagtaagggactgttgaattggcttcagagaacggataattgaaaa

SEQ ID NO: 941801 - DNA, 120 bp, Artificial Sequence
  ENSG00000285616_6 (sequence is synthesized)
gttttcctgagaactaggcagatggaaaagtgtgaatctgtgacaggatgaccaaccatcccagtttgactgggactatactggttttagtactgagaattctgtgttctaggtaacttc

SEQ ID NO: 941802 - DNA, 120 bp, Artificial Sequence
  ENSG00000285616_7 (sequence is synthesized)
tcagtcctgttgttcacatgtgactcgggctgatcttagatggaattgtaaccaagtcaaaatttgtctgctttcctgtttctacctaaaggtacatcttttttcttttctttttctccc

SEQ ID NO: 941803 - DNA, 120 bp, Artificial Sequence
  ENSG00000285616_8 (sequence is synthesized)
taaccaaatccagcttttatcaaaggacctgataaacccattcacattaagctgcacatttcagatgtaaatttccaagttatcttataagggacagttacattttaagctgaggaatga

SEQ ID NO: 941804 - DNA, 120 bp, Artificial Sequence
  ENSG00000285616_9 (sequence is synthesized)
gaacctgtaacatagagacatgtagcattttgcaacatataaatacagatggggaggtttttttttgagcttctcatcacccataaagtaattattcccttcagaaggaaaagatgctga

SEQ ID NO: 941805 - DNA, 120 bp, Artificial Sequence
  ENSG00000285616_10 (sequence is synthesized)
acaatccagtatcttgttggtgtctctttgcaaagaagcaactaggggcagctcatcttctacctgtgagttcccatgagttcagcctgtcctaatctaggttcaagtgcttaatgtgta

SEQ ID NO: 941806 - DNA, 120 bp, Artificial Sequence
  ENSG00000285616_11 (sequence is synthesized)
caaatgtctgggcatgtgaagcactcagagtgaaggcaaagcctttagtagcccttgcaagagccccacttcagctcctgctttcatctgcacaaatgggcaagctgaagaacaatcaac

SEQ ID NO: 941807 - DNA, 120 bp, Artificial Sequence
  ENSG00000285616_12 (sequence is synthesized)
tctgcatctgaagactgggccaggaggttaggaatagaagatcatctcccaggacaacactcagaagtagtctgcttagggatagtaactgaaatgtttaatatatatgcaggtggcttc

SEQ ID NO: 941808 - DNA, 120 bp, Artificial Sequence
  ENSG00000285616_13 (sequence is synthesized)
atgttatagtggtttagattcccgactctggaaccaaatgctttgggtttcaatctaagtctaggctttctacctgtttccttgacacagtttcttcactggtaaaatgggaatatcaat

SEQ ID NO: 941809 - DNA, 120 bp, Artificial Sequence
  ENSG00000285616_14 (sequence is synthesized)
tcaaatgcattgaagttagtaatgaatgttagctatttttatgatgaaattaaggtgaaggttatggaggaccttgtaatagtataagaacagatatctcctatgccatttgaaagcttt

SEQ ID NO: 941810 - DNA, 120 bp, Artificial Sequence
  ENSG00000285616_15 (sequence is synthesized)
ctcagcttaagtgggaccataaacactcattatgtcctatgtctgatttctttatgaataaatgagaaattagttacagaaaataaatgcggtgtttatatataaggcagatctagatag

SEQ ID NO: 941811 - DNA, 120 bp, Artificial Sequence
  ENSG00000285616_16 (sequence is synthesized)
tcacaatagtcagagttcaagaggaaactgatggaaccagcctcttttgttccttttaccaagaaagaaaaactttctcagaagcttccccagttgaacactggattgcatggccacctc

SEQ ID NO: 941812 - DNA, 120 bp, Artificial Sequence
  ENSG00000285616_17 (sequence is synthesized)
tagcagaaagagaggttgggagggtaaagcattccctggctaaggccaattattgtccattgcataatgctagaagaaaatgaataactgggtaggcaagtgacagagttcactcacaca

SEQ ID NO: 941813 - DNA, 120 bp, Artificial Sequence
  ENSG00000285616_18 (sequence is synthesized)
ttagagtcctttttatttttattttgttacattagctagccccaatgaatttctccttcttgtaatcataaaaacacatgatgcttttcagatgctctgatactgtcagttgcttggact

SEQ ID NO: 941814 - DNA, 120 bp, Artificial Sequence
  ENSG00000285616_19 (sequence is synthesized)
ctggaactctttcgtggtccatgaattgggctaggaaaaaggctcttctgctcctgcctttcagaagaagatggaaccaagggggctgcaggaacagaaattcatttcaaagtgcagcca

SEQ ID NO: 941815 - DNA, 120 bp, Artificial Sequence
  ENSG00000285616_20 (sequence is synthesized)
gtgccaacaggggagagtgggcagagaaatcaaatgaaaatgccaaaacgctgactacacggccagtttgcatcatgtgaaccactttggagcctgaggacagaaaccaaaaatatgctt

SEQ ID NO: 941816 - DNA, 120 bp, Artificial Sequence
  ENSG00000285616_21 (sequence is synthesized)
ctgttcagaggcggctaacagcactagtgttattattgttatcatcatcatcaccaccatcattcgtccataaatttaaaactgatgtgtgatgagctgccgtgtatcaaggaactgatg

SEQ ID NO: 941817 - DNA, 120 bp, Artificial Sequence
  ENSG00000285616_22 (sequence is synthesized)
tcttcagccaacaagcagctagaatctgaggggttgaaacagccacatgagtgagcttggaagttggaacttattgcctgagtcaagccttgagatgactacagccttggcagacatcaa

SEQ ID NO: 941818 - DNA, 120 bp, Artificial Sequence
  ENSG00000285616_23 (sequence is synthesized)
gtgcctgagccagaggacccagctaagccactctcagatttctgacctacagaattcgtgtgataatattaatacatgtttattgttttaagttgctgaatttgggggtgggttgtcaca

SEQ ID NO: 941819 - DNA, 120 bp, Artificial Sequence
  ENSG00000285616_24 (sequence is synthesized)
cagtcatagaaaactgatacagttggaaataattttgaaaggtgaaaggcatagtatgaaatctgattctgtggtatggaggggtttcaaagactggcagaacaatttggacatggtaca

SEQ ID NO: 941820 - DNA, 120 bp, Artificial Sequence
  ENSG00000285616_25 (sequence is synthesized)
gaagccattgaaagctctttctctcatagctttatggagatataattcacatacaatataattgtcatttaaaatgtacaactcactagtttttagtaagttagcagagttgtgaaatca

SEQ ID NO: 941821 - DNA, 120 bp, Artificial Sequence
  ENSG00000285616_26 (sequence is synthesized)
tcaccacaagctattttcatacactttgatctgcccccaaacaaagcccataccaattagcagtcataccccattttgtcccaagccctagacaacttctctactttttgtgtccaacaa

SEQ ID NO: 941822 - DNA, 120 bp, Artificial Sequence
  ENSG00000285616_27 (sequence is synthesized)
attttcctattctggacatttcaggcagagtaataaaatacatggctttttgtgtctgcttcttttacttagcataatactttaaggtttattggtgttgtagcatgtgtcagtatattt

SEQ ID NO: 941823 - DNA, 120 bp, Artificial Sequence
  ENSG00000285616_28 (sequence is synthesized)
gttgctttttatcgccaaataatatcccattttactaagagaccacactttgtttattcgttggtcacttcatggatgtttgtgttgtttccaaattttggctattagaaattatgctgc

SEQ ID NO: 941824 - DNA, 120 bp, Artificial Sequence
  ENSG00000285614_0 (sequence is synthesized)
tcatctcgctccgggagagagagtcaatcctagttttaaaagatactggaaattcgttgcgactatggctatagaaacagaagaaatgcagttatctgagtcctttcagcctaacactcc

SEQ ID NO: 941825 - DNA, 120 bp, Artificial Sequence
  ENSG00000285614_1 (sequence is synthesized)
ctgctttggaacatttggttccagtcaggaggcacaaatgagggagcagggaaatcagtggcgggcctgtgcctttctttgctctgtagacagccagaggacccagaggaagtcgacatt

SEQ ID NO: 941826 - DNA, 120 bp, Artificial Sequence
  ENSG00000285614_2 (sequence is synthesized)
tcgttccgtcaaggtgactgagaccagtggctgcttctaaggatcaagtggcacatgaacaaatgggaacaaagtacacccttgtctagtatttgtctaaaactaacaataatagcaagt

SEQ ID NO: 941827 - DNA, 120 bp, Artificial Sequence
  ENSG00000285614_3 (sequence is synthesized)
ttcatcctcactacaaccttgcaattacctccattttacagttgaggaaactgagtcaggagaggttaactaacttgcacaagatcacacagctaggaagatgcagaaacaagattagag

SEQ ID NO: 941828 - DNA, 120 bp, Artificial Sequence
  ENSG00000285614_4 (sequence is synthesized)
ccaaaccagtcagtcaactgttggtctttttcacgttttactaatactcgtataactaacctaaacagtgcccatcattcctgtgaagaaaaggagaaggggccaggtgcggtagctcac

SEQ ID NO: 941829 - DNA, 120 bp, Artificial Sequence
  ENSG00000285614_5 (sequence is synthesized)
gcctataatcccaggactttgggaggctgacgccggtggatcacccgagatggcagctctcaagatctgtccggaaaagtctagaagcctccagatttctaatcaacagactagcgctcc

SEQ ID NO: 941830 - DNA, 120 bp, Artificial Sequence
  ENSG00000285614_6 (sequence is synthesized)
tcctctgtaactgaggaacaagatgccaaggagacaggagaaagaagagaattcccttcatgtctcggccataaaccctgaaacagacttgtccatgagccttgtaaaataagttacatt

SEQ ID NO: 941831 - DNA, 120 bp, Artificial Sequence
  ENSG00000285615_0 (sequence is synthesized)
ctgaggcggctgtgtctcctactctgcgaaccatctggttgtgctgtctaaggaggcccctgagaaggcccaccttcaccgcttgtgttttcattttctcctctacaccaggagaagtct

SEQ ID NO: 941832 - DNA, 120 bp, Artificial Sequence
  ENSG00000285615_1 (sequence is synthesized)
gctgagccatggtctggaagatgtcaaccacagaggactcctgggctgttctagggagttgggctgttgtcctgagggcaatggagagccactgacccatttgacggaagagaatgacca

SEQ ID NO: 941833 - DNA, 120 bp, Artificial Sequence
  ENSG00000285615_2 (sequence is synthesized)
gagcagatttgcacctgtggaagatctccctggcacagtggggagcacgggctagaggggacaaggccaggggataaaccaggagttggcatgaagatgaagagacagactgagcttggc

SEQ ID NO: 941834 - DNA, 120 bp, Artificial Sequence
  ENSG00000285615_3 (sequence is synthesized)
taagtgttttgctgtaagtcacacagtttggaagatttggaattctggacaactggacttgaaaccaccatgatgcctcactgcatccccgacttgggaaatccgagtcatcatttgtaa

SEQ ID NO: 941835 - DNA, 120 bp, Artificial Sequence
  ENSG00000285615_4 (sequence is synthesized)
tgatcttctgcatcattcagatgtcattcagtactcactaatgtgctttctacacggcttttccgaaatagctggcatctgcagcactctgggccggagacttcccgggggtgaagatgg

SEQ ID NO: 941836 - DNA, 120 bp, Artificial Sequence
  ENSG00000285615_5 (sequence is synthesized)
tctgtgcacccccctggtgcccaagtagcagggacagggctgtgaacttcctgcagggaccaaaccccactattggcagctgctggtctttgtgattgctcctatgtcaggcttggggga

SEQ ID NO: 941837 - DNA, 120 bp, Artificial Sequence
  ENSG00000285615_6 (sequence is synthesized)
cagaagacatttttcttttgctgaaacctgaaggggaacaaatcgtgtaaaacttggcatctaaatcttccctttccctctaaggaaaacctctgcaatcattctgcaaagtattctctc

SEQ ID NO: 941838 - DNA, 120 bp, Artificial Sequence
  ENSG00000285615_7 (sequence is synthesized)
tccttttgtcctgtttaagattcgggtgttgacaacttccctttgggagaccatattagggtctcagatttcaccatcaaggaaacctctaagtatttttgcagaaagctcctgattaga

SEQ ID NO: 941839 - DNA, 120 bp, Artificial Sequence
  ENSG00000285615_8 (sequence is synthesized)
ttgatctcggcaccgcagccttcccccaatcctgggctaagccacagagagactctgcttgctgggcagctgtttgtgggtatcttgcggcggtgtttctgctttcttgctcaaccaccc

SEQ ID NO: 941840 - DNA, 120 bp, Artificial Sequence
  ENSG00000285615_9 (sequence is synthesized)
agatttagctattaaagttcccctcataaatcagccacgccgcgtatcttcatcatctccttccagtttgtctataagctctctgccctccaagaaataaattacccgcaattactcaaa

SEQ ID NO: 941841 - DNA, 120 bp, Artificial Sequence
  ENSG00000285612_0 (sequence is synthesized)
acaggcctcttcacttggctacagagatgaccaatctagctaatggaacacagaggtatgtccttcgtgggtgcaacaccaagttctccttgggcacttcaagtactgccactcctgcat

SEQ ID NO: 941842 - DNA, 120 bp, Artificial Sequence
  ENSG00000285612_1 (sequence is synthesized)
ttgtgcaatgggaactaagggtagactcaaaggaggcactttcacatccactaaaggagccagaatttgattttgaaaggctgattttcctctccccttctccacctatctcattccgaa

SEQ ID NO: 941843 - DNA, 120 bp, Artificial Sequence
  ENSG00000285612_2 (sequence is synthesized)
aatatggacagctcattacaagctcattgcttttatcatctccctggtccatgctgaggcttcctttggaattcaggtcctctgtgctgcccattggggagctaaaactggctgaatgag

SEQ ID NO: 941844 - DNA, 120 bp, Artificial Sequence
  ENSG00000285612_3 (sequence is synthesized)
acagaggtccagagaccaaggatgccacggcagctgcggaagctccagtggtggtgtttctcctcttaataacattgtgcctgttcataattgcctcattcaaatcaaataatatactct

SEQ ID NO: 941845 - DNA, 120 bp, Artificial Sequence
  ENSG00000285612_4 (sequence is synthesized)
ggacatcatagtgggcaaagcactttggacatgtccagggcctgacagagtcttctgatcggttatcttcaagatctgatgacttcccaagttcttcacctttggcattgcgcaatttac

SEQ ID NO: 941846 - DNA, 120 bp, Artificial Sequence
  ENSG00000285612_5 (sequence is synthesized)
gaaaaatagatgagtctccagtttcagattttgaacgtcgcttgagtggtttttccctttccttaaaaagcctgaggttctctctctgtgagataggcccgtctattacatccaaagaga

SEQ ID NO: 941847 - DNA, 120 bp, Artificial Sequence
  ENSG00000285612_6 (sequence is synthesized)
aaccagaacccttgccaccaccagtaatgagaaagtcactgagcttggttggagttggacctcgatcagatttgtcatctttgtagccctttaacaaatcaaaaaagctttctccagatg

SEQ ID NO: 941848 - DNA, 120 bp, Artificial Sequence
  ENSG00000285612_7 (sequence is synthesized)
ttccctgtttatcaattgaagatgtgctaccatattccctgtgcagtgatggtccagtcttgtatgtaggtgagatacattcatcaaagctatccacatcaagttcacttatggtgatat

SEQ ID NO: 941849 - DNA, 120 bp, Artificial Sequence
  ENSG00000285612_8 (sequence is synthesized)
cactgttgcttcgctggcgtattctgcgaagagcttttctgggggagctggggtaggcttcaggcatgagaaatctggagtccatgttctccgacggtcttgtcttgtttttcagcgtgt

SEQ ID NO: 941850 - DNA, 120 bp, Artificial Sequence
  ENSG00000285612_9 (sequence is synthesized)
tctgtatgcttttcagcatggctgagtcattggaattgaggctaacagaacttccctgactcacaggactgcttttggaggacaggctatcaaggcaacttgaggtttctatttcctggc

SEQ ID NO: 941851 - DNA, 120 bp, Artificial Sequence
  ENSG00000285612_10 (sequence is synthesized)
ttgaacggctagattcttttatgttttcctttcttgggggccaatctgcaatccttgcccttacccccatttttgggactccgggggttgaggttatatggtgagaaccttcacttcggg

SEQ ID NO: 941852 - DNA, 120 bp, Artificial Sequence
  ENSG00000285612_11 (sequence is synthesized)
ggggtcctacaggagccataactgatgatcctaagctgccattttgggaccggaagcgccgcatgtagaaatcatcagtgtggactttgggggtgccgtctgtgccaacaacagaggccc

SEQ ID NO: 941853 - DNA, 120 bp, Artificial Sequence
  ENSG00000285612_12 (sequence is synthesized)
atatctgtgttttaaatgtgcacttcccttttggagaatggcttccagaaaatacaacagttgcatgagatcttaatctttttcatttaaaaggttaaatgatgctttatttgtaaagca

SEQ ID NO: 941854 - DNA, 120 bp, Artificial Sequence
  ENSG00000285612_13 (sequence is synthesized)
ctgaaaaattggaacttctaaacgttataatccacaacagtttctttgcttcactttaacagagggctttctttcagaaaaaactgaatggaacttgtactactgagattctgtggttgc

SEQ ID NO: 941855 - DNA, 120 bp, Artificial Sequence
  ENSG00000285612_14 (sequence is synthesized)
cataatcccatgctttctctaaaagagaaaaggataatttgaattagcagataaatacatctaaaaacaaacatgcaattgtcaaaaccagacacatgaagataaaagactcaataatgg

SEQ ID NO: 941856 - DNA, 120 bp, Artificial Sequence
  ENSG00000285612_15 (sequence is synthesized)
attaggattcacagttccacaatccgtatttttagtaaagcaggtttgaaagaaaggaagaaagtaaaaaccatttgataaaatccataatttatattctaaaaaaaaaaactattaaga

SEQ ID NO: 941857 - DNA, 120 bp, Artificial Sequence
  ENSG00000285612_16 (sequence is synthesized)
cttcatcttaattgaactgtttcataaaatggggggcagggggaggggtacatcttgttctggatatcatggctcctacccaaagtacagacttttgctccaatgacctctaaaaatgta

SEQ ID NO: 941858 - DNA, 120 bp, Artificial Sequence
  ENSG00000285612_17 (sequence is synthesized)
gaacatcatgagctactgtgatgaccagaagtttgagatgtaaccaagtgaataagataattagagcaacagagttttttgacaaaagtaaaaactgaaaaatgactttactgaatatgc

SEQ ID NO: 941859 - DNA, 120 bp, Artificial Sequence
  ENSG00000285612_18 (sequence is synthesized)
tgcaacaatcactttttaactcctctattccaaaatcaatacatgttttttgtttccttacaaaggcttaacatagttggcaaaaacaaatacagcaggaaaaaataaataaaaagagtt

SEQ ID NO: 941860 - DNA, 120 bp, Artificial Sequence
  ENSG00000285612_19 (sequence is synthesized)
ttcccagagccattatatccattagcactcttttgtattttcctctactttattacttaccgagacgaggatattgcagaatgaatccagcattcaccaccacctcttcccaagctctcc

SEQ ID NO: 941861 - DNA, 120 bp, Artificial Sequence
  ENSG00000285612_20 (sequence is synthesized)
ttagtttcttgtactcttaaaagctagaagtatctcactaatgaacaaaatgcctgcatttcctcatgcagtacaacctactccaccccatcagtgctaatttatgaagacggcagaaac

SEQ ID NO: 941862 - DNA, 120 bp, Artificial Sequence
  ENSG00000285612_21 (sequence is synthesized)
aaaacacagctctgggtggccctctccatatccccaacagattacagagaactgttagcatccttccaggtgacgggcatggaaacaaacttcctcatgagcacgtcaggcagaaggcag

SEQ ID NO: 941863 - DNA, 120 bp, Artificial Sequence
  ENSG00000285612_22 (sequence is synthesized)
gagacacagattctgagtacaaaattctgcatggttgcgtacattctgaaaagaaaggcagaggctccttttccaagactccacaaattacacaagaggtggcctttaaattcttgccaa

SEQ ID NO: 941864 - DNA, 120 bp, Artificial Sequence
  ENSG00000285612_23 (sequence is synthesized)
atacatgtttggaaagatgctgctgaaccagcactgagctgacagggcggcattgtctacaaatcacggctctgacaccggaggacgacctgcacttgctgcactctccactcaatggta

SEQ ID NO: 941865 - DNA, 120 bp, Artificial Sequence
  ENSG00000285612_24 (sequence is synthesized)
acaagcacctacttccacgataattaagcatctccctagtcggcttcctgcctccaaggcaggcgctttcatttctcttgcagcacacagcatcactttagaagactcgctgctatttaa

SEQ ID NO: 941866 - DNA, 120 bp, Artificial Sequence
  ENSG00000198496_0 (sequence is synthesized)
gcccccggatgacgtaaaaggaaagagacggaagaggaagaattctacctgagtttgccataaagtgcctgccctctagcctctactcttccagttgcggcttattgcatcacagtaatt

SEQ ID NO: 941867 - DNA, 120 bp, Artificial Sequence
  ENSG00000198496_1 (sequence is synthesized)
gctgtacgaaggtcagaatcgctacctattgtccaaagcagtcgtaagaagaggtcccaatcccccactctttccgccctaatggaggtctccagtttcggtgctggaagcccaggaagc

SEQ ID NO: 941868 - DNA, 120 bp, Artificial Sequence
  ENSG00000198496_2 (sequence is synthesized)
acacatcaaggctcccttgccagcagggtgctgccaataaaaggtagtcacgtggaatttggaatgtggaaaggaggtagaagtcatcctttcctcccctgtagcagcaggcgtgcaggc

SEQ ID NO: 941869 - DNA, 120 bp, Artificial Sequence
  ENSG00000198496_3 (sequence is synthesized)
tctggtggtcagctggactccatactcccccaccagtcaccagcctggggaccgtggggctgcaaggacctcagcagcggtgtcccaagtttcctgacttcttccatcctctggaaatca

SEQ ID NO: 941870 - DNA, 120 bp, Artificial Sequence
  ENSG00000198496_4 (sequence is synthesized)
gctgtggtaaagtagcctgaaagccagtggtacaaccccctccccacaaccttcaccacctctagcccctccaatgaaaagcactaattgcctatatacaacccctttttgtttgaaata

SEQ ID NO: 941871 - DNA, 120 bp, Artificial Sequence
  ENSG00000198496_5 (sequence is synthesized)
tctagagtaatttctgttttcctatctggggtagtgtaacgtaagaagaaatatacatttggtctctgcccccggttcctaacacaaagctcctaaaacccttggaaattcctgaaagat

SEQ ID NO: 941872 - DNA, 120 bp, Artificial Sequence
  ENSG00000198496_6 (sequence is synthesized)
gggggtgctaggagcattgtctttttttttttttaaatttatcatttttcttttctcccaggtgttttttccttttttttttttttaacttttattttagattaggggatacatgtgaac

SEQ ID NO: 941873 - DNA, 61 bp, Artificial Sequence
  ENSG00000198496_7 (sequence is synthesized)
ctgggactgcaggtgcctgccaccacgtccagctaattttttatcgatccacccacctcgg

SEQ ID NO: 941874 - DNA, 120 bp, Artificial Sequence
  ENSG00000198496_8 (sequence is synthesized)
gcgtgagccaccgtgcctggccagtacccagtagtttttttggctcctctccctcctcccacccttcaccctcaggtagggcccagtgtctgttgttcccttctttgtgtttatgagttc

SEQ ID NO: 941875 - DNA, 120 bp, Artificial Sequence
  ENSG00000198496_9 (sequence is synthesized)
tagctcccacttataagtgagaacgtgtggtgtttggttttctgttcctttcttagtttgctgaggataatggcctcaagatccatctgtgttcctacaaaagagatgatcttgttcttt

SEQ ID NO: 941876 - DNA, 120 bp, Artificial Sequence
  ENSG00000198496_10 (sequence is synthesized)
tcctacaaaagagatgatcttgttcttttttatgattgcacatcttttgttctaacgtttggtccttcaccttggttcctgacacaaggattcctaaatcccttggaattttctgcatga

SEQ ID NO: 941877 - DNA, 120 bp, Artificial Sequence
  ENSG00000198496_11 (sequence is synthesized)
taggagcgtcctttgttctcatgaggtgactcttggtgggctccttatttggggactggtcaccaaaaatacctaactatggttggaagcttagtgctttcagccccattccccatcctc

SEQ ID NO: 941878 - DNA, 120 bp, Artificial Sequence
  ENSG00000198496_12 (sequence is synthesized)
tggggtggggagcagagctggagctcgatcatgcctgcgtgacaaagcctccagaaaaatccttgaaagacaggacatggagagctgctgggttggcgaacacatccatgtgccgggagg

SEQ ID NO: 941879 - DNA, 120 bp, Artificial Sequence
  ENSG00000198496_13 (sequence is synthesized)
atggtgcaccccaactccacaaggacccttccagacctcaccctgtgtatctcttcatctggctgttcatttggctcagtcctttggatgttaatccacctgggctggtgcacctaaata

SEQ ID NO: 941880 - DNA, 120 bp, Artificial Sequence
  ENSG00000198496_14 (sequence is synthesized)
ctttccgccctaatggaggtctccagtttcggtaaaagtttcatttgatctgaatagtattaaaataaaatacctggatgaggaagatgaagagagacgaagtctcgctctgtcaccagg

SEQ ID NO: 941881 - DNA, 69 bp, Artificial Sequence
  ENSG00000198496_15 (sequence is synthesized)
ctcctgcttcagcctcccgagtagcttgggactacagatcgtgatccgctgtcctcggtctcccaaagt

SEQ ID NO: 941882 - DNA, 89 bp, Artificial Sequence
  ENSG00000198496_16 (sequence is synthesized)
gattaacctcttttaagcctgttttctcatccatacaatggagataatggcagcacccactgcttgactgggcaacaagagcgaaactc

SEQ ID NO: 941883 - DNA, 120 bp, Artificial Sequence
  ENSG00000198496_17 (sequence is synthesized)
aaacaaacaaaacccctgaacttccctgcgggcacattttctctggcagcctttttcaatgagagctatgttttctccgatactatatggcctgcggaccgctcagctttcattccagtg

SEQ ID NO: 941884 - DNA, 120 bp, Artificial Sequence
  ENSG00000198496_18 (sequence is synthesized)
gatgtgtggccttggacacttgggcaggtcacctacgtccttctagccctggctcagtcctttggatgttaatccacctgggctggtgcacctaaataataaagatcctcctcaatccca

SEQ ID NO: 941885 - DNA, 82 bp, Artificial Sequence
  ENSG00000198496_19 (sequence is synthesized)
gtggttcatctagagcagctccggtggcgggaggagtggcagcggccaggcagcccagcttcgcgaaggctgtaggcacacc

SEQ ID NO: 941886 - DNA, 120 bp, Artificial Sequence
  ENSG00000198496_20 (sequence is synthesized)
cggccaggcagcccagcttcgcgaaggctgtaggcacaccgcggccagcaggcacctggcacccaccttccctgctgccaggatgcccaagaaaaaggtcagctccaccgaaggggctgc

SEQ ID NO: 941887 - DNA, 120 bp, Artificial Sequence
  ENSG00000198496_21 (sequence is synthesized)
catggaagagcccaagaggagatcagcgcaattgtcagctaaacctcctgcaaaagtggaagcgaagccgaaaaaggcagcagcgaaggataaattttcagacacaaaagtgcaaaaaaa

SEQ ID NO: 941888 - DNA, 120 bp, Artificial Sequence
  ENSG00000285610_0 (sequence is synthesized)
agatggagtaccacagtcagatcttgagtactgtagagagagctcactgctgtaagagtcaatcatagcaagccgtggcaaaagagccattgctactgagccctaattcacaggacagtg

SEQ ID NO: 941889 - DNA, 120 bp, Artificial Sequence
  ENSG00000285610_1 (sequence is synthesized)
actcagaccacggatttggagaaggattgccaggttcaagccccactcatcactaacgagttataagaaagaggtggcatatggtggcagccgccctccatctgcaatgagaaaggacag

SEQ ID NO: 941890 - DNA, 120 bp, Artificial Sequence
  ENSG00000285610_2 (sequence is synthesized)
ctgtgttgaaactgaaatacttgagcgagccccgtcaatgcaggcaactttctcttttgcttcaagctctggtgaagaaaccgaggcccatttcaccaacaatgcaactcacatgagaag

SEQ ID NO: 941891 - DNA, 120 bp, Artificial Sequence
  ENSG00000285610_3 (sequence is synthesized)
gcactatttgcatgtcatggcagcagacagagtgaaaaagccactgtcaaacttcacgtccaactgattttatagaaatgtgctaggcatgaacctctactgcacccggcctatcagcac

SEQ ID NO: 941892 - DNA, 120 bp, Artificial Sequence
  ENSG00000285610_4 (sequence is synthesized)
ttttcattcgaccattcattcatttactccaaggtgctgtgtgtaagccagcttcctgtgctcagagagctcacatgcaacaaacatgcagataaacagtggcaattggcggcaaatgca

SEQ ID NO: 941893 - DNA, 120 bp, Artificial Sequence
  ENSG00000285610_5 (sequence is synthesized)
agtcaagtagaacgtcttgaagatagtgacatttaagctgagacctaagtcacgggaaagagcaaaccacaccatgccgaggccctccaggaggaaacagtcagggttttaaggaaagga

SEQ ID NO: 941894 - DNA, 120 bp, Artificial Sequence
  ENSG00000285610_6 (sequence is synthesized)
aagaatatcaaaatggacagaacttgggagcaaggggcagacaggggccaggaagagagattagggttttaaaataagtgcaatggtaagtccttgcagtggagtgatacaatctgagtg

SEQ ID NO: 941895 - DNA, 120 bp, Artificial Sequence
  ENSG00000285610_7 (sequence is synthesized)
acatttgaaggtcacttttgcttcttgtggctatggaatagtggggggagatgggtggcaagagagacagtggagcgacaagggggttggttgtagtatttcaggcaagagatgatgggg

SEQ ID NO: 941896 - DNA, 120 bp, Artificial Sequence
  ENSG00000285610_8 (sequence is synthesized)
tagcaatggacagaagagatgatggggtagcagtggacaggagagagagagggcaggaatttgatgtatgtttggagatgataacatcaaaggttctcaccaatcccttgaaacgggagg

SEQ ID NO: 941897 - DNA, 120 bp, Artificial Sequence
  ENSG00000285610_9 (sequence is synthesized)
atgaggtgaaatggaggaaatagaagtaactctcggttttctgtcttgaacctgagcagtaatatacagcagtcagcagtaagtaccattattctgacattcctaagatgaaaatctata

SEQ ID NO: 941898 - DNA, 120 bp, Artificial Sequence
  ENSG00000285610_10 (sequence is synthesized)
ccaagtactacataagtgaatacaattagttaccggacctctattagtgtctaacttaaaattagggaaaaagtaagacataggtaagactccagtctgttacttttttttttttttttt

SEQ ID NO: 941899 - DNA, 120 bp, Artificial Sequence
  ENSG00000285611_0 (sequence is synthesized)
gtcatatgaaataatagcatgagcaaggacctgaaagggggccttggtgggggaatgttcatgatgcagtgaggaaatcaggcatcccagaaaaggcaggtccttcagaagacaacttgc

SEQ ID NO: 941900 - DNA, 120 bp, Artificial Sequence
  ENSG00000285611_1 (sequence is synthesized)
tgagcagctaagtgaagaagaggaagtaccaggatggaatcctcgtttcagatctgccagtgacttgctatgcaaatatgcttggagtgcttgctgaaaaccaagaagcatattttgtca

SEQ ID NO: 941901 - DNA, 120 bp, Artificial Sequence
  ENSG00000285611_2 (sequence is synthesized)
agaagttggtttggttgcacaggagctgaagatgttcaggcccctggaagccccaccactccccggaaaaacagtagaggcagcgattgaagaaagtaacagatgcttccaatcaatgaa

SEQ ID NO: 941902 - DNA, 120 bp, Artificial Sequence
  ENSG00000285611_3 (sequence is synthesized)
acgtgagaagctggtggaattggaaaagtttccaggacagaagagatgacggggacttgctgaatacagaggcacttcttcaccaacgtttgcattaagcaaacatagccaggctggcag

SEQ ID NO: 941903 - DNA, 120 bp, Artificial Sequence
  ENSG00000285611_4 (sequence is synthesized)
gctcagcctctccacccccgtgccacataccagcacaaccagaaatggctgaggatgaaagatcaagacttaaatcggagctatgctatgggatatggaaaataaagtgatagaaccatc

SEQ ID NO: 941904 - DNA, 120 bp, Artificial Sequence
  ENSG00000285611_5 (sequence is synthesized)
ttaaggtaaagccagcatttccagagctgattgaggcaagaattagacagtgtttaggggattatgaaaaacagcttctactacaggtcaacagctaatcagaattctcaggagattttc

SEQ ID NO: 941905 - DNA, 120 bp, Artificial Sequence
  ENSG00000285611_6 (sequence is synthesized)
caaagatttttttttttttcctccttatgaataatttcaccaaaggcacaaaaatgggcacattatttagagagagccttttgatgtattttctctgaataagcatgggtattcgaggat

SEQ ID NO: 941906 - DNA, 120 bp, Artificial Sequence
  ENSG00000285611_7 (sequence is synthesized)
ttctgctagttcagagcaacagggaccaacttattaaatgttcctgctgcaatgcctgcaagctagctgagattaatatcagcataacctgttacttaattcattatggggatacaggct

SEQ ID NO: 941907 - DNA, 120 bp, Artificial Sequence
  ENSG00000285611_8 (sequence is synthesized)
aatttgatttgatattattttaataaagttctgtgatatataagattgtttcaggctatcaaaataattttccagttattacagttattcaagcaagtcctttgatagcagcagttggtc

SEQ ID NO: 941908 - DNA, 120 bp, Artificial Sequence
  ENSG00000285611_9 (sequence is synthesized)
ctcgtctgttgtgaatacattagcgctgatgattcatagcagctgagaaatgttaagcctgtgaagcattgtgttgatgctcaaatttattctgcaggccattaaaaaaaaaagaaaaaa

SEQ ID NO: 941909 - DNA, 120 bp, Artificial Sequence
  ENSG00000256661_0 (sequence is synthesized)
aaaaaagtaagaagtactcaacgttatacctaccaaagaaaagccataggtgatgggaaggaggaagtaaaaggaaatctatattgggaaagagagtagcgggtagggcattaccaatca

SEQ ID NO: 941910 - DNA, 120 bp, Artificial Sequence
  ENSG00000256661_1 (sequence is synthesized)
ttatctctaaaagtttcatttgaatacacaggctgggacagacggaagaggaagaaagcaggggtgtccgggaggtacttccagaatgatttgctcttattctctacctcaatcttgaag

SEQ ID NO: 941911 - DNA, 120 bp, Artificial Sequence
  ENSG00000256661_2 (sequence is synthesized)
gaattcaagaagatatccatgtttttaaaatctaagataactactgctcttttcattctaacatgtgagtgtacgttttaatatcatgtgaatgcataatagtgaataaagctaatgaac

SEQ ID NO: 941912 - DNA, 120 bp, Artificial Sequence
  ENSG00000246100_0 (sequence is synthesized)
gctaatggatggacttgcaggggacactgccccatcaggagagaaaggtagccttactctcatctgccccaccaagaggaacctaaggtcctatttcctgggggtgtctcaaaaatcggc

SEQ ID NO: 941913 - DNA, 120 bp, Artificial Sequence
  ENSG00000246100_1 (sequence is synthesized)
agagtcgttctccccccaccatccctccttgcctccactcccctcggccttctggatccccgtgggtttggagaggccgatgcttgtggctcttaccaacatcaatttgcagtctccagg

SEQ ID NO: 941914 - DNA, 120 bp, Artificial Sequence
  ENSG00000246100_2 (sequence is synthesized)
ataaaagaaaaaaagtgagacaagttctgacaactttcaataacattcagaaataaagtgcgaggcacggaagtgtccaaagttaattaaaagcatttggtgctgacgggggctgggggt

SEQ ID NO: 941915 - DNA, 120 bp, Artificial Sequence
  ENSG00000246100_3 (sequence is synthesized)
gttgcctgcctagctctgacaggtgctgtttctgaaatgcaattttcctgtctataatgtacctgatgcctgcagaaaaggagaaaccgaaataaactgaactggcagcatgagcttgaa

SEQ ID NO: 941916 - DNA, 120 bp, Artificial Sequence
  ENSG00000246100_4 (sequence is synthesized)
tccactgtgcttctgatgacccggccgccgccgccgccctgcaaccgctccccgggacccctcaacgctgacactgatgacccgcggcgggggcgctgggcgcggggtgcgcaggccact

SEQ ID NO: 941917 - DNA, 120 bp, Artificial Sequence
  ENSG00000246100_5 (sequence is synthesized)
ggccgcgggctctcgggcccgctcctgccgccggcttctgctgcttccgcgtgccgtggacactgccagaatttgtcaaaggtcctaggaagaaaaggctctttcacccctcccctcaat

SEQ ID NO: 941918 - DNA, 120 bp, Artificial Sequence
  ENSG00000246100_6 (sequence is synthesized)
tcgcattcgctcctcataggtgggatcctggaggaagttaaggggtgctccgttccctggggatgggacagcagctcgcctttttactaatagctataagggactgtcagacatttacct

SEQ ID NO: 941919 - DNA, 120 bp, Artificial Sequence
  ENSG00000246100_7 (sequence is synthesized)
gactagaccttcacctcagagctcagaaggggaacagctccagaactaaaagagagagcctctggcagaccccaaaagacagcatgtggagtgaagctgggcttccctgcccaatcacta

SEQ ID NO: 941920 - DNA, 120 bp, Artificial Sequence
  ENSG00000246100_8 (sequence is synthesized)
acagccaaacccccggaaggaaactcgggctgaaatacaccgtttgctgaagagcagggctgggcactggtttctctgcgttctgaatttctagaaaggtgccgtggacactgccagaat

SEQ ID NO: 941921 - DNA, 120 bp, Artificial Sequence
  ENSG00000246100_9 (sequence is synthesized)
gaatttttgtattttcttcatttccatttagctttttttcaattttagaatagcctttctctagataactcgaggaagtgggagacggaatttcctttgtttctgtcttgagcccaaagg

SEQ ID NO: 941922 - DNA, 120 bp, Artificial Sequence
  ENSG00000246100_10 (sequence is synthesized)
ggagacggaatttcctttgtttctgtcttgagcccaaagggacaattgagtgtcaggtatgacagggataaagggagaaactcagaaataatgcttttgttttgttttgttttgttttga

SEQ ID NO: 941923 - DNA, 63 bp, Artificial Sequence
  ENSG00000246100_11 (sequence is synthesized)
cctcagcctcccaagtagatgggcttacaggcaagcgccatcacgcccggctaattttgtatt

SEQ ID NO: 941924 - DNA, 120 bp, Artificial Sequence
  ENSG00000246100_12 (sequence is synthesized)
ggaatgttttgggtgctacacgtgcagcccctcatgactgtatctcctcagagctcttttcttcacattcctgagtgctttgtgttttgtttatttaagggacaaatgaatctcttccca

SEQ ID NO: 941925 - DNA, 120 bp, Artificial Sequence
  ENSG00000246100_13 (sequence is synthesized)
cgccatgggatttcccttgatttttatattgggagtgaaaagatgaagcatgagactcttcagctgcatctcgaactgcatctaatcccagcacatctctctcaatctttgattaagtct

SEQ ID NO: 941926 - DNA, 120 bp, Artificial Sequence
  ENSG00000246100_14 (sequence is synthesized)
gttcatctaaaagagagacacaggggaaaaatggaaatgggactttggaagaatgaccatccacattcccatcacagcctgagatttcctacctgattgagattttcagtagatggccct

SEQ ID NO: 941927 - DNA, 120 bp, Artificial Sequence
  ENSG00000246100_15 (sequence is synthesized)
aggtctagtttcccactttggacctgctgcccttggctccaatagaggacttccaagtaactaggaagatttcacctctcttttgaaacataatggacaaatgtgtttctttaggatgag

SEQ ID NO: 941928 - DNA, 120 bp, Artificial Sequence
  ENSG00000246100_16 (sequence is synthesized)
ctagtcaatctttattttcctaaaataaacaggatgaaaactcaaaacaaaaagaaatacctcatgggcaaaagctctcccaatacaactaatacagacactcaacatggctttgtagaa

SEQ ID NO: 941929 - DNA, 120 bp, Artificial Sequence
  ENSG00000246100_17 (sequence is synthesized)
actgacccctctcccaagtcttatgtttgtcagaattgcatgcctatttcaatcgaagaaaagtgatctgatctcttcagatgaaggtgggacttggagatgctgctgcctagagttaac

SEQ ID NO: 941930 - DNA, 120 bp, Artificial Sequence
  ENSG00000246100_18 (sequence is synthesized)
ttgccagagaaaggataagcattcgggaagtgccaggatggggtatcagctgaacaatggcaggatcccttctgccagtgggctggctcagggagtaaacctccccggaaggaattttgt

SEQ ID NO: 941931 - DNA, 120 bp, Artificial Sequence
  ENSG00000246100_19 (sequence is synthesized)
ttctctctagaatcaaagtgggcaaaatgatcaccttattcgcctggagtgaaccaggttgaaactgagaaggcagacatgggtgataagccagatgaagtcatatgttataactaagct

SEQ ID NO: 941932 - DNA, 120 bp, Artificial Sequence
  ENSG00000246100_20 (sequence is synthesized)
atgtacctgtaacttgcctggtagttttttcattctctctaaacaggtcataataagtgttagtctgtgatccactatggagagagatttctggaaagaatagaggcagtggtagagggt

SEQ ID NO: 941933 - DNA, 74 bp, Artificial Sequence
  ENSG00000246100_21 (sequence is synthesized)
aggattgcttaaggccagagttcaagaccaaactggccaatatagtgagatcccccccccatctctacaaaaga

SEQ ID NO: 941934 - DNA, 120 bp, Artificial Sequence
  ENSG00000246100_22 (sequence is synthesized)
ggccaatatagtgagatcccccccccatctctacaaaagatagaaaaacttagccaggcatggtggcaggtgctatagtccctgccaccatgggactacagctcctgcagtcccagctac

SEQ ID NO: 941935 - DNA, 82 bp, Artificial Sequence
  ENSG00000246100_23 (sequence is synthesized)
cctgccaccatgggactacagctcctgcagtcccagctactcaggagttgaggcggaaggattgcttgagcccagaagttcc

SEQ ID NO: 941936 - DNA, 120 bp, Artificial Sequence
  ENSG00000246100_24 (sequence is synthesized)
ttaataataatgataatgcaacacaaactatcttttacctcttgaacaatgaatgcagatgccatgactacatctgtttgttggggaccagggaggctgccagtgaggattcagggtgga

SEQ ID NO: 941937 - DNA, 120 bp, Artificial Sequence
  ENSG00000246100_25 (sequence is synthesized)
agtagtgtgtacccaatacctattgtgagatgtggcctggggagccctgagattgcctggccaggctcactcactacccagacaccctcttcctgcatggcgagtccctcagcccctcca

SEQ ID NO: 941938 - DNA, 120 bp, Artificial Sequence
  ENSG00000246100_26 (sequence is synthesized)
aggctcaattctcagacatcggagtaatccacatcctccatcttgagttactcctcacaaggcctgcaagttttcctaggaggaagggaagacagggttgaacccacacaattctagaat

SEQ ID NO: 941939 - DNA, 120 bp, Artificial Sequence
  ENSG00000246100_27 (sequence is synthesized)
ctagaatttggaggatttctaaaccatttctgtaagtcagcccttgagaacttgtagattttctcatcatttgcagcatgagagtctggagtagactgtttggatttgactcttggttcc

SEQ ID NO: 941940 - DNA, 120 bp, Artificial Sequence
  ENSG00000246100_28 (sequence is synthesized)
ttgggcaagttacttaacctctcagctgtgtgtcagtttccttatctaaaaagtgtggttaataataactgacctctcagaggtattgtgaggttactgtgatgattaaattagttgatt

SEQ ID NO: 941941 - DNA, 120 bp, Artificial Sequence
  ENSG00000246100_29 (sequence is synthesized)
gaaactcgggctgaaatacaccgtttgctgaagagcagggctgggcactggtttctctgcgttctgaatttctagaaaggagccgagcatagattgatgtggcataagtgctcaataaat

SEQ ID NO: 941942 - DNA, 120 bp, Artificial Sequence
  ENSG00000246100_30 (sequence is synthesized)
tttaaaagagtgcctggcattattattaatagtaataagtttagcataagtcttgcctgccaataaggagctggattgaatgactactttgattctatttcttggccttctcttctctgg

SEQ ID NO: 941943 - DNA, 120 bp, Artificial Sequence
  ENSG00000246100_31 (sequence is synthesized)
actaggtgaccccaactttctccttactcctgaaaaatttatcccagtctgctaaggaagagaaagcccatgtgtgcacatacacacatgcacctacacaaacatttacatacagttttg

SEQ ID NO: 941944 - DNA, 120 bp, Artificial Sequence
  ENSG00000246100_32 (sequence is synthesized)
tttacatacagttttgctcttctatacagagttaatagagctactagagtgtctaggaaccaatctgaaagagaaaggaaacactgctttttttttgtttgttttttgagatggagtctc

SEQ ID NO: 941945 - DNA, 120 bp, Artificial Sequence
  ENSG00000246100_33 (sequence is synthesized)
acgcccggccgaaacactgcttattacaatttataggtttatgttcaaaaagttgctaatcttattgctgtgaacccctgccatctctagtcctgcccacctataggtactgcagaccaa

SEQ ID NO: 941946 - DNA, 120 bp, Artificial Sequence
  ENSG00000246100_34 (sequence is synthesized)
attacagattcagatttgcccagttcctgttcctgtcttgaccaatcctagtaacttatttggggcccagccccatcttcagtggaaggtctaaaattggccttgcttccttaagctggg

SEQ ID NO: 941947 - DNA, 120 bp, Artificial Sequence
  ENSG00000246100_35 (sequence is synthesized)
tacacagtgggcccaggactaagcctcatgaagcttttagaggcccactgagattaacctttctcaccagtgctcaccttgtcttcctagtgaccatggctgccttctgtctagttctag

SEQ ID NO: 941948 - DNA, 120 bp, Artificial Sequence
  ENSG00000246100_36 (sequence is synthesized)
agttgcactctaattctcttccagcgctgttgccctgatctacatatctatctcttttagaactttccagcttatgtgtccaatgtcagtctttcttccaaataaatagaactttatctt

SEQ ID NO: 941949 - DNA, 120 bp, Artificial Sequence
  ENSG00000246100_37 (sequence is synthesized)
gatgaatatttaatgttcaacccacccctggtccctggctagaatcatctctgaaatgtctaaagctctgccactacctgcaccaggagaagcaatgtgtcaccaccaacctaatagcaa

SEQ ID NO: 941950 - DNA, 120 bp, Artificial Sequence
  ENSG00000246100_38 (sequence is synthesized)
ccatcagctttgctggagttatccattcaccgaactgaatctatcagctttcctgagttcactgggacactgatttggaccggacaccatcacttgagaaacagcgttagcaccagggtg

SEQ ID NO: 941951 - DNA, 120 bp, Artificial Sequence
  ENSG00000246100_39 (sequence is synthesized)
aacaccaccagtacccgacctgcctgtagttagcttcctcctctttccctattgacccacagattaagttgctgcatgccctggggcaacacctgggggtatgacaactgaaaactaaga

SEQ ID NO: 941952 - DNA, 120 bp, Artificial Sequence
  ENSG00000246100_40 (sequence is synthesized)
cgcgggctctcgggcccgctcctgccgccggcttctgctgcttccgcggtaatgacactcggcggagcggccgccatctcttctgtgccgtggacactgccagaatttgtcaaaggtcct

SEQ ID NO: 941953 - DNA, 120 bp, Artificial Sequence
  ENSG00000204876_0 (sequence is synthesized)
tttaggagcacgggtactacttactgtggacgacggttggtcaaggaaggctttctggaggaggtgacagctaggctgggtcttaaggatgaatgggaagagagaggagaacatgtggat

SEQ ID NO: 941954 - DNA, 120 bp, Artificial Sequence
  ENSG00000204876_1 (sequence is synthesized)
aaggccaggcaaaagggctgcacagccaagtcacagccaagacgaaatgcagggagagttctggaagctgcgtgtttcatgctgctgggtagtgtggaaggacaggctggagctaggcag

SEQ ID NO: 941955 - DNA, 120 bp, Artificial Sequence
  ENSG00000204876_2 (sequence is synthesized)
ctaagcagcttggcaaatggagctactgaggattccaaacaggacctctgcagtcgtctccactgcttatgggttgaaccacgtgaaatagacaatattcggccatttagggccaagaca

SEQ ID NO: 941956 - DNA, 120 bp, Artificial Sequence
  ENSG00000204876_3 (sequence is synthesized)
aatgccagctttgcggggtgcagcctcacagagaggctgcttgggggcctttgcagagggtggatgagcagagggcatcctccggaacctgcttggggacccggctctgaggccatcggg

SEQ ID NO: 941957 - DNA, 120 bp, Artificial Sequence
  ENSG00000204876_4 (sequence is synthesized)
ccggtggtgtccagattctcatgtaggctgggagaaaggggaggttcaagaaacacggaggaagtgaagcgtcagagccggggggacggggtgccgcagaggagaaggagcactgaggct

SEQ ID NO: 941958 - DNA, 120 bp, Artificial Sequence
  ENSG00000204876_5 (sequence is synthesized)
gaggtccaggcttgcagacacgtggaccatgagtattctgccaggtctgtgggtgtctcttctgagctacaccagtttccaggttacctgggaccatggataactctcagatcagcaact

SEQ ID NO: 941959 - DNA, 120 bp, Artificial Sequence
  ENSG00000204876_6 (sequence is synthesized)
tgtcagttgatttccaagctgctgttggctggactcagactcagcagggagcacctgggcgagccctgtgctgcgggctggactccggcccatctcgctgattactcttgcttttgctcc

SEQ ID NO: 941960 - DNA, 120 bp, Artificial Sequence
  ENSG00000204876_7 (sequence is synthesized)
ccagtgtgtcctcaagaggtcagagcctgcttgttgtttcttcatgaccacgggaggaggggcaccaacatgagggtgctagcatctccccagtggtggcttcccagggctggggaaacc

SEQ ID NO: 941961 - DNA, 120 bp, Artificial Sequence
  ENSG00000204876_8 (sequence is synthesized)
ctgggggaggggttgggacagggacctctgtcgcttgctgtcactgcctgggtcaactgcctggcagggctggccgctcgtgctcagaaggctgaggccttacctgccttctcctctcac

SEQ ID NO: 941962 - DNA, 120 bp, Artificial Sequence
  ENSG00000204876_9 (sequence is synthesized)
ccagcgcccatgtaaggacacatctgagttggcattctgtgtctgctcttgagctactcgcatgataagtctttgttgtcctgtgggatgtcaccggttcatgctgaagagaaattgtaa

SEQ ID NO: 941963 - DNA, 120 bp, Artificial Sequence
  ENSG00000204876_10 (sequence is synthesized)
ctcaggccccatggcctctgtcatgttttgtccccgtccctttgggagcacagcagcagtgggctggctggactgtgcaggcgaggttcaaggatgaggtacagttgtgtgaaaggtgag

SEQ ID NO: 941964 - DNA, 120 bp, Artificial Sequence
  ENSG00000204876_11 (sequence is synthesized)
cctgctggaccggggagctttcctcaaggcctccgcctggctatgatggcgttagggttgaggggaagcttcatccaaaatgcacagtacttggatgtcaagatgatgttgctgctctca

SEQ ID NO: 941965 - DNA, 120 bp, Artificial Sequence
  ENSG00000204876_12 (sequence is synthesized)
ggatgagtcactctccaccactgacttcctttgatgttctgagctcagcctggagtctgacctgggactatagcacttgttctcccaaggtaaggctggcggccaaacccagctgcgcac

SEQ ID NO: 941966 - DNA, 120 bp, Artificial Sequence
  ENSG00000204876_13 (sequence is synthesized)
acctgaacctgctccttggcagagatgaagggcgtcatgtttcgtagccactcaacacccatggacaatttggctccttgtaaagacttagtcatgcctttgaactgacttacttgaaat

SEQ ID NO: 941967 - DNA, 120 bp, Artificial Sequence
  ENSG00000204876_14 (sequence is synthesized)
ataattgctcctattttgctccaaagaccagtggcatgatgggttagagttatttgtatttattgagattgttgtaattagcaatctcagggctcagtctaactgcattatccatgctgg

SEQ ID NO: 941968 - DNA, 120 bp, Artificial Sequence
  ENSG00000204876_15 (sequence is synthesized)
aaaacttaaaaaaaaaatacagtccttcatcttcagttttccaatggtcgccagttatacacagctaatctttgcagtgaaagttgtctttggagaatgtgctttcttggtcccgggtgg

SEQ ID NO: 941969 - DNA, 120 bp, Artificial Sequence
  ENSG00000204876_16 (sequence is synthesized)
tcctggtcttgggctggaatctacgtgagctgctttgaagtaagctgacaatacacaattattaaggctattttgacctgcaagtatggtttcttaaaaaggaacaattaaataccatgt

SEQ ID NO: 941970 - DNA, 120 bp, Artificial Sequence
  ENSG00000204876_17 (sequence is synthesized)
agcagttatttagactttagcattgactaaggaaaggagaaaatggaagaagaaccccctcctgcttagatgcagtcattttttaaaaaaataatcttttggggaataaacttaaccaag

SEQ ID NO: 941971 - DNA, 120 bp, Artificial Sequence
  ENSG00000204876_18 (sequence is synthesized)
gaggtgagggacttgtaaacaaaatgttaaaactgcactgaagactagaaaatgttgatgaaagctgttaaagaagacacaattagatgatgaaaacacatcccatgttcatggattgaa

SEQ ID NO: 941972 - DNA, 120 bp, Artificial Sequence
  ENSG00000204876_19 (sequence is synthesized)
agacaatattgttaagatgtcaatactatagattctatgcaatccctgtcaaaacccaattttttttcaaacataggaaaatccattctaaaatttacatggactctcaaggaaccctga

SEQ ID NO: 941973 - DNA, 120 bp, Artificial Sequence
  ENSG00000204876_20 (sequence is synthesized)
gtagacaaaacaatcttgtaaaagaacaatgttggagggctcacactttctggtttcaaaactacagtaattaaaaagctacagtaattaaaacagcatgatattgtcacaaagatatag

SEQ ID NO: 941974 - DNA, 120 bp, Artificial Sequence
  ENSG00000231769_0 (sequence is synthesized)
ccgatggccttctgccacttagttaatgtgcacctggcagcttaggtggccgcggagaaagcaactttggctgcaccaaggtccggcacaagtctggagaagcttcagccagttccagct

SEQ ID NO: 941975 - DNA, 120 bp, Artificial Sequence
  ENSG00000231769_1 (sequence is synthesized)
ctgtctggtcctggactttttttggttgatggctggagtcagctggcaaatacagaagcaggaaacattacactgaagctcagaaaataatatccccaaatgaaggcatcagaaataaaa

SEQ ID NO: 941976 - DNA, 120 bp, Artificial Sequence
  ENSG00000231769_2 (sequence is synthesized)
agacaggtgcttggaggggttgtatcggacctaagagtagaggttgattccactctcccaccacgcacttttcgtatcatcctagatctggatgcccttcatggaacctaaaaaccagcg

SEQ ID NO: 941977 - DNA, 120 bp, Artificial Sequence
  ENSG00000231769_3 (sequence is synthesized)
agtcccggaaaggcctcaggcaattgccaagccgatggccttctgccacttagttaatgtgcacctggcagcttaggtggccgcggagaaagcaactttggctgcaccaaggtccggcac

SEQ ID NO: 941978 - DNA, 120 bp, Artificial Sequence
  ENSG00000231769_4 (sequence is synthesized)
aagtctggagaagcttcagccagttccagtgagttgggataaatgaaacgtggatctaccatagacgtctgtccgtcttactggataagcgagcacctttaccggggaagttagatggct

SEQ ID NO: 941979 - DNA, 120 bp, Artificial Sequence
  ENSG00000231769_5 (sequence is synthesized)
tattatgaaaaatttccagcatacagaaaagttgaagaacacccacatgcctgctactcagattctacaataaacatttgctatatttgttttacctacatatctagtcatccatccatc

SEQ ID NO: 941980 - DNA, 120 bp, Artificial Sequence
  ENSG00000231769_6 (sequence is synthesized)
cattcatattatttttaatgcacgtcttattttttaatgcactgtcaactacagacatcagtactcttcacctccaaacatttcagcaacatatcattaacgatagtcaaaaatttgttt

SEQ ID NO: 941981 - DNA, 120 bp, Artificial Sequence
  ENSG00000231769_7 (sequence is synthesized)
agagttccttttgttttaaataaaatttataaagaatgaaatgtgtaattcttaagtgtactattctttgagttttcacaaatgcatagacctatgtaacctaaagtcctatgaagatgt

SEQ ID NO: 941982 - DNA, 120 bp, Artificial Sequence
  ENSG00000231769_8 (sequence is synthesized)
taggaagttccctcatggcccttccaaataatctctgcttactctggttttcaagtaaccactgttttgccttttaacaaactatagatttgttttgccttctatagcttcatataaaag

SEQ ID NO: 941983 - DNA, 120 bp, Artificial Sequence
  ENSG00000231769_9 (sequence is synthesized)
aaattaaatcgtatagtaagtactctcttgagtctggttgtttcattcaacatcatgcttttgagattcacccatgttgttgttgttgttgtgtatcagtaattcacacattttcattag

SEQ ID NO: 941984 - DNA, 120 bp, Artificial Sequence
  ENSG00000231769_10 (sequence is synthesized)
aagtctttggtccaacattaatcaagaaagactcaaggcaggaccagaagcagcttgcagccagctaggccacaggagtatgctctcttgcatctctcatatgttggaggccagcagcca

SEQ ID NO: 941985 - DNA, 120 bp, Artificial Sequence
  ENSG00000231769_11 (sequence is synthesized)
tgtcataaggacaccaagcagctacatggagaggactaggtggcaaaagtctgaggccttctgcaaacagccatatgagcaagccctttggaagaagagtctgtaatcccagtcaaacct

SEQ ID NO: 941986 - DNA, 120 bp, Artificial Sequence
  ENSG00000231769_12 (sequence is synthesized)
tcggatgactgaagtcctatcctacatgactgcaacagcaagagaacctgagccagtgttccatggtatagaagtagtagccagcattgcacggtgtggatataccacaacttatttatc

SEQ ID NO: 941987 - DNA, 120 bp, Artificial Sequence
  ENSG00000231769_13 (sequence is synthesized)
ccacaacttatttatccatttgctagtcaatagactcctgggatattctcagtttgtggcatgatatggtttggatctgttccctggcctggatctcatgtcaaattgtaatccccagtg

SEQ ID NO: 941988 - DNA, 120 bp, Artificial Sequence
  ENSG00000231769_14 (sequence is synthesized)
gtgggaggtgattgaatcataggggcagatttcccacttggtgctgttccattgcgagtgagtgagttctcatgagatctggtcacttaaaagtgtgtggcacctccccctactctctct

SEQ ID NO: 941989 - DNA, 75 bp, Artificial Sequence
  ENSG00000231769_15 (sequence is synthesized)
ggtcacttaaaagtgtgtggcacctccccctactctctcttggtcttgttcctgccatgtaagatgactgttcag

SEQ ID NO: 941990 - DNA, 120 bp, Artificial Sequence
  ENSG00000231768_0 (sequence is synthesized)
agacaccacatgcgcagggccgactgcattcccacggcgacggcctcctggcccgcatcatgactgttgttttcctcgcggtggccatagcttttggattttacattcagattggttcaa

SEQ ID NO: 941991 - DNA, 120 bp, Artificial Sequence
  ENSG00000231768_1 (sequence is synthesized)
ggggctttttcctttctctgtttgaaggaagccaccctctcgatccccagtcagcgtggcgtcctctcagcaacccgctcctggtcttgctttgactcctgtgctcccgggctgccgaga

SEQ ID NO: 941992 - DNA, 120 bp, Artificial Sequence
  ENSG00000231768_2 (sequence is synthesized)
acacgtctggagcttttaaatcagggtgagtcccagccgccgaggaagcactgaacaaaaaggccaccgctggggagctgcaggggcacagacggagcctgggagcggggctgaccatgg

SEQ ID NO: 941993 - DNA, 120 bp, Artificial Sequence
  ENSG00000231768_3 (sequence is synthesized)
ggaagaaggggaggtgggaaagaaggcccggccacctccactgctacagccacagcgacaacagtagacagtgacaggccctgcctgccacgcactgcagagtctgtggctctcccctgt

SEQ ID NO: 941994 - DNA, 120 bp, Artificial Sequence
  ENSG00000231768_4 (sequence is synthesized)
taagtaagagcagtcggcgctgacgttcagtgaggtcatgaggatactcacagaactttctggaataagggtcaggctgcgaagcattccccagacattgtaacatccagccagtcactc

SEQ ID NO: 941995 - DNA, 120 bp, Artificial Sequence
  ENSG00000231768_5 (sequence is synthesized)
tgaatcctcaccacagcagcccgctgagggaggtgctatcatcgtccctgtttttcaagggagagaatcaaggtttgggcagggacaaggtcttgctatgttgcccaagctgatcttgaa

SEQ ID NO: 941996 - DNA, 120 bp, Artificial Sequence
  ENSG00000231768_6 (sequence is synthesized)
ctcctggcctcaagcaatcccaatagttcggtctcccaaattgctgagattgtgggtacaagccactgcacctggacttcttctgacattataaagcaaagagcattttcaaaagctgat

SEQ ID NO: 941997 - DNA, 120 bp, Artificial Sequence
  ENSG00000231768_7 (sequence is synthesized)
gctacttgtgcatattccatatttgctgagcgcttactgtgtccccattaagtgccaggcacagttttcagcactgctttaaagtgtctacaagcttagaaagggcataggcatctcttg

SEQ ID NO: 941998 - DNA, 120 bp, Artificial Sequence
  ENSG00000231768_8 (sequence is synthesized)
aaatccagtgttctagggaaagtttttcctgtggttttgcacagaacccaccgcttcctgtccaaggtgacagctttagctgggagagaaattaaaaatgcctccttggaatagctatct

SEQ ID NO: 941999 - DNA, 120 bp, Artificial Sequence
  ENSG00000231768_9 (sequence is synthesized)
gatgtgtctaaatatgattgctgatgttagcaataggacctgcctattagcaatggtttgggcaactgtatgtgtgaggcagggagagaaagaggaagaaaatacagctctcactattgt

SEQ ID NO: 942000 - DNA, 120 bp, Artificial Sequence
  ENSG00000231768_10 (sequence is synthesized)
atcacctctgcatcttatttatgtaatattccaagaagctaaaaaaaaaaacctctttttttttttttttttacaaatcttagattttatgaacacttgctaatagcccccccctcctag

SEQ ID NO: 942001 - DNA, 120 bp, Artificial Sequence
  ENSG00000231768_11 (sequence is synthesized)
atcgtcattgctgtgtaacaaattgtcatacatttagcagtttaaaataccacacatttactcacagcttccatgggccacgagtgtggggacgagtgactgggtcgtctgctcagggtc

SEQ ID NO: 942002 - DNA, 120 bp, Artificial Sequence
  ENSG00000231768_12 (sequence is synthesized)
gtcacagggcagaattcatttctttcaagctacggatctcatggcagcttgctttttcaaggccagcaagggagagagtgaatctgctgcttttagtgtctgacctctcgatcttctttt

SEQ ID NO: 942003 - DNA, 120 bp, Artificial Sequence
  ENSG00000231768_13 (sequence is synthesized)
aaatggctcatctgattagggcagacccacccaggataatctctcttttgactaacttacagtcaactcattagagatcctaattacatctgcaaaaatcccctcacctttgcctgataa

SEQ ID NO: 942004 - DNA, 120 bp, Artificial Sequence
  ENSG00000231768_14 (sequence is synthesized)
tgtgacatcatcacgggggcaatatcccatcacttttgccatatactattggctagaagcaaattaaggtcctgctaccactcaaggggaggggattacacaagggcatgggacatcagg

SEQ ID NO: 942005 - DNA, 120 bp, Artificial Sequence
  ENSG00000231768_15 (sequence is synthesized)
ggtcatcttagaattctggcaaccagaataagctacttgtggatagacatgttgtcatacatattttttgttcagtcattatgcttagcagagaaataggcacacagcagaaaaataact

SEQ ID NO: 942006 - DNA, 120 bp, Artificial Sequence
  ENSG00000231768_16 (sequence is synthesized)
gattggtacggagaatttagtgattggaaacgaattaatattgttaagacacaaagtttcttgcagagcacactctgaaaaaggtcactttttacccctcaatatgtcttaatgggttga

SEQ ID NO: 942007 - DNA, 120 bp, Artificial Sequence
  ENSG00000231768_17 (sequence is synthesized)
ggtagagagaagcgtgggtaggtatcaatcacgagagcacacaggctaaaagaaagaaaaaatgagctgggacatctaagttcaacttccacttcctcctatacaagctgggtgaccttt

SEQ ID NO: 942008 - DNA, 120 bp, Artificial Sequence
  ENSG00000231768_18 (sequence is synthesized)
tcctatctagaaagtgggagaagtagttcctgtcctcccttacagggctgctgagcaggcagaatgagatgatgggctgagagggcttggagaggacaaactgtgggtacaaaagtctta

SEQ ID NO: 942009 - DNA, 120 bp, Artificial Sequence
  ENSG00000231768_19 (sequence is synthesized)
ttgtcctggcccggattgctaaggagatggtggttaataatatgctgctatctcatgaggtaaatgcgtgatcacatagccaagagatgcctttttgttctaatgatcactgtaagacct

SEQ ID NO: 942010 - DNA, 120 bp, Artificial Sequence
  ENSG00000231768_20 (sequence is synthesized)
tcttgagagacagtccaagtctctccagcacaatggaaaattgcattttctatgcacacattcgaggggaaagagacccctccaacgttcttctcagttttaccccaaagttgagttctg

SEQ ID NO: 942011 - DNA, 120 bp, Artificial Sequence
  ENSG00000231768_21 (sequence is synthesized)
ggtcaaaaatctctcaagcgtcctccacagctgacttccacagtcccctgtgtgtctctgcaaggaacacaaaggaagtgagatagtgggaagtctggggccatcttcggtcacgtgaga

SEQ ID NO: 942012 - DNA, 120 bp, Artificial Sequence
  ENSG00000231768_22 (sequence is synthesized)
attccctctcagttagccggggcgtgcagccgcacagaaggaaggcagccacgcagctccagtccaggctgggagagagctttgtagatccatctcccactgagcaggcttccctcctgc

SEQ ID NO: 942013 - DNA, 120 bp, Artificial Sequence
  ENSG00000231768_23 (sequence is synthesized)
aaggagagactctaccgataatgtgttaagatcagattaatgcaggaaatacacatgaaataaataataacagtgtaataacagtggctgtcattgcaatggttatttctgttaaaaatg

SEQ ID NO: 942014 - DNA, 120 bp, Artificial Sequence
  ENSG00000231768_24 (sequence is synthesized)
tgagatctacactacggatttcttaggataattttgcccttacttaaaagaaactgacagatgtactttataaaaatgaaaataatttaacaaataaagaattggagaatattgactcac

SEQ ID NO: 942015 - DNA, 120 bp, Artificial Sequence
  ENSG00000231764_0 (sequence is synthesized)
acatccaggtggtagaaccacttctctttcaaagatggactggggaaagacattaagttcggagcagcccaaggctgcggatctagcctttctccctccggtctccagacccacgcaggt

SEQ ID NO: 942016 - DNA, 120 bp, Artificial Sequence
  ENSG00000231764_1 (sequence is synthesized)
taaggcagccaagcagagacagcggagccccggtgcgtggttcaggcctggtcaacaggtaggagggccagactgggggccaggcacagaggagggcaggcccgcccgcaccggcgtcca

SEQ ID NO: 942017 - DNA, 120 bp, Artificial Sequence
  ENSG00000231764_2 (sequence is synthesized)
gggtcccgggttccgggtcccgggactggaggaggtcgccggcagcccgcccttccagaggcttgagattgggtggacgagacctgaagatcctctcggtctggaccccgactttcgatc

SEQ ID NO: 942018 - DNA, 120 bp, Artificial Sequence
  ENSG00000231764_3 (sequence is synthesized)
tgcttagagacctaagccgcgagcctttgcccacacggagaaacgtactatctaatatctaacaaccctgtactgcagtgtctggaggttgcgggaaggagacagtgtctccctttggga

SEQ ID NO: 942019 - DNA, 120 bp, Artificial Sequence
  ENSG00000231764_4 (sequence is synthesized)
aaactactgaggacttctgtatatcctacttcttctggactccataagttacaggaccgaaggaaactgagaaatagagaaaaggtgccgcttgcccctttaactccagaaaagggtggc

SEQ ID NO: 942020 - DNA, 120 bp, Artificial Sequence
  ENSG00000231764_5 (sequence is synthesized)
tgcagatggagcagcttggactttattttttacgttgcgcgaagcccgccggcagcggcttatgccaattgattttcccagctcccagccctggatgtctagctatctccaggacagttt

SEQ ID NO: 942021 - DNA, 120 bp, Artificial Sequence
  ENSG00000231764_6 (sequence is synthesized)
gtttttttctttttctgtctttctttctttccttcaatgtatcagaagacctgaagctcgctgcccgcgagtttcctccgagttcccagttgctgagacaaaggaaaacccactcccttg

SEQ ID NO: 942022 - DNA, 120 bp, Artificial Sequence
  ENSG00000231764_7 (sequence is synthesized)
gaggagcatgaccttttcctgtaattcttcccactgctgttgttgagctccttggatcctggctcctggacaccatcatcaagaagactttatggatgggctgtccacccactgagagaa

SEQ ID NO: 942023 - DNA, 120 bp, Artificial Sequence
  ENSG00000231764_8 (sequence is synthesized)
gaggagcatcagctacagtttctctctagattgccttcttcattttgagtaatgactgtcagcagggtcagattaaacacaaaacaactggacaattgcttggaggactaaactataagg

SEQ ID NO: 942024 - DNA, 120 bp, Artificial Sequence
  ENSG00000231764_9 (sequence is synthesized)
gcactaacatgtcaatagtaggctaacacatccatggaaaatatatttaccagctcttctctcagggaggattctgtgtggggttggaagtaatgatttgttaaattccttaggggtaga

SEQ ID NO: 942025 - DNA, 120 bp, Artificial Sequence
  ENSG00000231764_10 (sequence is synthesized)
aagtagggcataatcagaatatagaggaatatgctgtttgacttcagggtttctgtttttcttactaggatatataaaacagggactctagctagattgtttatgaccacagagggtagg

SEQ ID NO: 942026 - DNA, 120 bp, Artificial Sequence
  ENSG00000231764_11 (sequence is synthesized)
ctgagtgctcccatgatcttcctgcttggttcttgcccatacagaggtcagcctttcctctaataaagattgaacaagtagtggtctgagggagacaccaattcattaccctacatgtct

SEQ ID NO: 942027 - DNA, 120 bp, Artificial Sequence
  ENSG00000231764_12 (sequence is synthesized)
cttctctgcactccagggctttgataataaagacactggcagactatctatcttccatttctataatgtgagcccttagggagtcttcgttcacttgggggtgagggtcattgctcacag

SEQ ID NO: 942028 - DNA, 120 bp, Artificial Sequence
  ENSG00000231764_13 (sequence is synthesized)
agtagttcaagtcaaatggaacttgaactctttgcctatgggcctggtggtcagactctgtgttgagttcattagattattggagacacaaggtagagctggatgcttcaaaaatatttg

SEQ ID NO: 942029 - DNA, 120 bp, Artificial Sequence
  ENSG00000231764_14 (sequence is synthesized)
gctaaaggatgacattgctggttatttgtagataaagccatgatggaacctgcttggaatcatgaaatatggaactggtggtcatgtttaaaaatacaactaatagttaagtacctactg

SEQ ID NO: 942030 - DNA, 120 bp, Artificial Sequence
  ENSG00000231764_15 (sequence is synthesized)
gacactgtagagacttaggggctagacagacatggttcctgcccccttggagcttacactgtagcttccccttaggtatgaagaacagtggctacaactaacaaatggccacaaagatat

SEQ ID NO: 942031 - DNA, 120 bp, Artificial Sequence
  ENSG00000231764_16 (sequence is synthesized)
aattgagccagtgttccaattattagggtaattcctatttccttaatcattcctattgaccatgttctataagcctgcattctataaatggcgtatgaccatgggctgtttccccccagc

SEQ ID NO: 942032 - DNA, 120 bp, Artificial Sequence
  ENSG00000231764_17 (sequence is synthesized)
aagttgtacaaagttctgtggtaccagggaaagggcttaaggttagcagggcctctgcggaaggacatatgaagtgacttgggttaggaaacaggaagggataggattcaagaacagcta

SEQ ID NO: 942033 - DNA, 120 bp, Artificial Sequence
  ENSG00000231764_18 (sequence is synthesized)
agacctgggttttagtttgtgttctaatactaacaagctatgtgactgtgggtaagtcatttcacattccatttggatgcctcttgagtgactccaggcctctccagctctaaaacatta

SEQ ID NO: 942034 - DNA, 120 bp, Artificial Sequence
  ENSG00000231764_19 (sequence is synthesized)
agatcaggccctacgctacagctggccagtgtgtaattcttctgtttctatgctgttaggtcaaatagatcttcaatagttacttgattgttattacttttttctgaagtgggtgtttta

SEQ ID NO: 942035 - DNA, 120 bp, Artificial Sequence
  ENSG00000231764_20 (sequence is synthesized)
tcaatgttttaggatacagtgagtctgcttctcccctttggagttaggaaggttgtaggaatatacactgtagagcatatgggagctttatcccctccttttttccccgctacctttctc

SEQ ID NO: 942036 - DNA, 120 bp, Artificial Sequence
  ENSG00000231764_21 (sequence is synthesized)
cctctccttcccttcatcacatttctattgagcatatgccattgccgtgtaccaggtgtgtgctaggtttggagatacaaggtaaacctgagactttcccagtctccaggagacaaaacc

SEQ ID NO: 942037 - DNA, 120 bp, Artificial Sequence
  ENSG00000231764_22 (sequence is synthesized)
ctaatttctttcatctgctgtctttctctttggaaagaatcaacgatatcccaggggaatgtgcccatgtcccagggtaaccaactacagacagatgccccattctactcaagcaacttt

SEQ ID NO: 942038 - DNA, 120 bp, Artificial Sequence
  ENSG00000231764_23 (sequence is synthesized)
agacagatgccccattctactcaagcaacttttagagtgccttgagatacacatcagataattatgcagggccaggcatggtgctgcacacttgtaatcacagcactttgggaggccgag

SEQ ID NO: 942039 - DNA, 120 bp, Artificial Sequence
  ENSG00000231764_24 (sequence is synthesized)
ttgagcccaggaattcaagtgtagcctagggaacatggcaaaaccccagctctacaaaaaaatacacaaattagctgcgtgtggtggcctatgacaggaggctgagatgggaggattgct

SEQ ID NO: 942040 - DNA, 120 bp, Artificial Sequence
  ENSG00000231764_25 (sequence is synthesized)
tgcagtgagccgagatcatgccattactccagcctgggtgacatagggagaccctgtcttgaaaaaaaaaaaaaaaagataattattcagccctagagtcattgtgaaaagatctatctt

SEQ ID NO: 942041 - DNA, 120 bp, Artificial Sequence
  ENSG00000231764_26 (sequence is synthesized)
cagatataaggaagaaacaatcttttatttcttaggataaatctgtagaaggacctccagacagtgaaggccactgactactttatactctgtaagccatccctccctggtaggaaggac

SEQ ID NO: 942042 - DNA, 120 bp, Artificial Sequence
  ENSG00000231764_27 (sequence is synthesized)
tatttccaatcttacagagtacctctcagcaaatagacgttttcacatatactgtgattcatacatccctatggctggtgacctctttaaaaaggaaaggaaaaagcctaatcaaacaaa

SEQ ID NO: 942043 - DNA, 120 bp, Artificial Sequence
  ENSG00000231764_28 (sequence is synthesized)
aagatgctgctagtaattcttaccctattgtgaatcctatataagcaaatttgtatctttgttttttcctacattagcagatctatttgatgtatatctctgagtgcagaaaatatttta

SEQ ID NO: 942044 - DNA, 120 bp, Artificial Sequence
  ENSG00000231764_29 (sequence is synthesized)
tggaaaaatcaatatatggaatttcaaattcagaattgctgatacacactatttggtttcacaattttatcctaggaaatagtattagagatttcaatttctggcttaaatggtagaatt

SEQ ID NO: 942045 - DNA, 120 bp, Artificial Sequence
  ENSG00000231764_30 (sequence is synthesized)
aattactcttaactcttaattttacttctgagttgaggtcaaggaacaggcagacacctgcagttaacgtctatacctctccatggccaagagttttaattttctcgtcttcaattttgt

SEQ ID NO: 942046 - DNA, 120 bp, Artificial Sequence
  ENSG00000231764_31 (sequence is synthesized)
agatgttcatcattactaaatggattgattagtattttatctcctctccttgtccttactttccctctggtaaatatgttataaacagtgtaaggctcctaagatagagtagctggtagg

SEQ ID NO: 942047 - DNA, 120 bp, Artificial Sequence
  ENSG00000231764_32 (sequence is synthesized)
acttagaagagaaacaaagggcactgataactcacataaatggaaaattggctctggaataactgacaacatattcaagtattttagtgcagtgtcactctcattaagaagaagagaatc

SEQ ID NO: 942048 - DNA, 120 bp, Artificial Sequence
  ENSG00000231764_33 (sequence is synthesized)
agtaaatctatgtgactctaaacattctaatgaaaaaaggaatattctgccaattatctcacatttctaaatatctggatattggccattgtaaagacaaaacatacagatgatggactt

SEQ ID NO: 942049 - DNA, 120 bp, Artificial Sequence
  ENSG00000231764_34 (sequence is synthesized)
gtctttccacctctcatttgcatggtttggagcattgtacctccagccatagactctaaggcaatttatatttgcttcctcttccctcttgagagaaaacgaaaatcttatttttccaag

SEQ ID NO: 942050 - DNA, 120 bp, Artificial Sequence
  ENSG00000231764_35 (sequence is synthesized)
caattaaaactcttctgcttcagctaggatgaaagaattaggagttctgtctccttgtatctaattgcatgtttcatctttcttgttttaatgattgacagaaaactaataaactgagac

SEQ ID NO: 942051 - DNA, 120 bp, Artificial Sequence
  ENSG00000231764_36 (sequence is synthesized)
atttcacacctggatgtgctcactcaaccaagaatatagagaaagagcttctgccctgagactcagaaaaatattctcctgtgctttggttcagtatagatttctaaaccctgatcattg

SEQ ID NO: 942052 - DNA, 120 bp, Artificial Sequence
  ENSG00000231764_37 (sequence is synthesized)
gtgctttggttcagtatagatttctaaaccctgatcattgcttaagagatattcactgaggacagagtcttgctctattgcccaggctgcaactggtgtgatctcggctcactacaacct

SEQ ID NO: 942053 - DNA, 120 bp, Artificial Sequence
  ENSG00000231764_38 (sequence is synthesized)
gggattataagcatgagccactgcacccagccttatactgaactttcaatgggttcaattccactaggagcataaaggccactgcatatgagttgtggaaagaagagattagaagaagga

SEQ ID NO: 942054 - DNA, 120 bp, Artificial Sequence
  ENSG00000231764_39 (sequence is synthesized)
ggaaagaagagattagaagaaggaagaacttgagatgagttcctcccttcaacattctgtctcctcctacctagcatcttctttcttttagtctttctagaatgtccatctgtttttggc

SEQ ID NO: 942055 - DNA, 120 bp, Artificial Sequence
  ENSG00000231764_40 (sequence is synthesized)
cattgcggagagagaagctgagctttaaaggagtaggagcttcaaaggcgtaggagcttcaaaattcttgtttcttcatgtttgatcacccttctaaacctgtcttctgttccttctgct

SEQ ID NO: 942056 - DNA, 120 bp, Artificial Sequence
  ENSG00000231764_41 (sequence is synthesized)
attcttttttcttagagcataggaaaggggagcttttaaattaatacttaaagcatggaaaaaaagaacttgagaagaaagtaaaacaagggagatgaggctagtaaagtaaggaaaatg

SEQ ID NO: 942057 - DNA, 120 bp, Artificial Sequence
  ENSG00000231764_42 (sequence is synthesized)
aagaggaagaggaggaagggttagcttctaaattccaagtcaaattgatatggaacaggcaagccgcttgtcttacttaaacttcagaaaaggatctgctgaaacttgatagaaatggaa

SEQ ID NO: 942058 - DNA, 120 bp, Artificial Sequence
  ENSG00000231764_43 (sequence is synthesized)
agggaaatccttggggtggggaacctccaaacattagtaatgatattgaacaactcaaagtattgaggaaatctgcaggctacatgcctgaagattacccatgcagatagaccaaaagga

SEQ ID NO: 942059 - DNA, 120 bp, Artificial Sequence
  ENSG00000231764_44 (sequence is synthesized)
atgcagatagaccaaaaggattagaattatctgttgatattagtaatatttattgacatctagctagtattggtaattttaagttttagattaatttctttggtaatagctatgatatat

SEQ ID NO: 942060 - DNA, 120 bp, Artificial Sequence
  ENSG00000231764_45 (sequence is synthesized)
ctataggcttgctatcataggctcttttaatcagcattaatttagtctactgatttttagcacatttgaatcattcacttatgctaggtaactcattgcaaaataaaaagatgattcctg

SEQ ID NO: 942061 - DNA, 120 bp, Artificial Sequence
  ENSG00000231764_46 (sequence is synthesized)
ggaaaggtttattaaatatgaggggtgcaaagctttctgaatactaatgaacttatttgccaaaatttaaatgttcttcttgtcagtgaatgtctgtctctcttaacaggatccaaattg

SEQ ID NO: 942062 - DNA, 120 bp, Artificial Sequence
  ENSG00000231764_47 (sequence is synthesized)
aataatgaagaaaattagactctattgtaccctcaggagaaatcgtggtgaatcgtaatagaatacagagggggaaaggggtcacattttagaaaaaaagagtagataatttggattatt

SEQ ID NO: 942063 - DNA, 120 bp, Artificial Sequence
  ENSG00000231764_48 (sequence is synthesized)
aaaaaagggattaactcaggaaaactctgttcttttcaaagaaacgtactcatagtcattcaatgagcaggatttcccactgcacaagcatctatacctttggccagtgtagaaagagag

SEQ ID NO: 942064 - DNA, 120 bp, Artificial Sequence
  ENSG00000231764_49 (sequence is synthesized)
taaggtcataatcatatggagatgcatgctaggtttcagtagttacaatttactaatctcattcccatataaggcctttatatgcctgtaatggaatgggaaaatcaataagctttgaaa

SEQ ID NO: 942065 - DNA, 120 bp, Artificial Sequence
  ENSG00000231764_50 (sequence is synthesized)
aggaacactattcttcagagaagttcaatgggagatagttgagttggggaaattgccccagttcttcctttaagcatgaaatgaggctgtccctatgtatgtttacttccattgccttgg

SEQ ID NO: 942066 - DNA, 120 bp, Artificial Sequence
  ENSG00000231764_51 (sequence is synthesized)
tgttatcactgataaagtcaatgatcatgatgcctttgccttggcagcacctggggggcactgaaggaaccaagtagctgtactcatggccaggaaggcaggctgccagaacttcagcag

SEQ ID NO: 942067 - DNA, 120 bp, Artificial Sequence
  ENSG00000231764_52 (sequence is synthesized)
ccacacaagtggccaaacatggtcaggaacgaaagtagtgtgtgtatggagtgaaatgaaatgatgagaggaaagtgaaggatgatataaagatggggctgtccaaagatgggagttcat

SEQ ID NO: 942068 - DNA, 120 bp, Artificial Sequence
  ENSG00000231764_53 (sequence is synthesized)
ccctgtcctgcacttgaaataggaaggaaagaactggagaaggattaggtgaggaaggatcctgaaatagagaaaataaagggaagactgcatgcctgcagtgtttgctaaaattaattc

SEQ ID NO: 942069 - DNA, 120 bp, Artificial Sequence
  ENSG00000231764_54 (sequence is synthesized)
gcctgagatttcaggaggagcaaagaaagatcaagagaaagggaaaacagcctcaaagcctgtgaaggttgaaaaacaaaatataaacaaaaaatttttaaagctaagattatgctcttc

SEQ ID NO: 942070 - DNA, 120 bp, Artificial Sequence
  ENSG00000231764_55 (sequence is synthesized)
taagaaaagaggctggacactaacagaaagcttgatgacagcaggatttgtatttagcggtttatttagatccctaagaaaaaaggcttatgtgacatagattcataagacacaaatgtg

SEQ ID NO: 942071 - DNA, 120 bp, Artificial Sequence
  ENSG00000231764_56 (sequence is synthesized)
tccttggctgaccatactaggcttcactcccaaaggagaaaaagaatggtcggcgcatctcagattaacaccaaccaactgtgcaatatttcattttagaaagcgtttccttgtattatc

SEQ ID NO: 942072 - DNA, 120 bp, Artificial Sequence
  ENSG00000231764_57 (sequence is synthesized)
catgattaaataaaaagagacctagtgtatttgattgcttctgtggcaaggcttgagaattacaaacctaggtttccctctgggaatgatcattggatttttaaaattaagtaagtggaa

SEQ ID NO: 942073 - DNA, 120 bp, Artificial Sequence
  ENSG00000231764_58 (sequence is synthesized)
ggagattaagatttatttccatcatttcaaatcatgatctgcacctttggaaacaaaaaggaagttggaaagtgggaaggtgaggtaggtgtgcaagaatggggagaaagatgctgcaag

SEQ ID NO: 942074 - DNA, 120 bp, Artificial Sequence
  ENSG00000231764_59 (sequence is synthesized)
ccaaataagactgtataatttctgagaaaattaaatgaacaatagagtttgaaggataagtgggtaatgaggaatatgagataataagatattaaaaaatagcaaattacttgggaaagt

SEQ ID NO: 942075 - DNA, 120 bp, Artificial Sequence
  ENSG00000231764_60 (sequence is synthesized)
gaggatgaatgatggtagatagttaagggatttgggatggcaaggaagggaagagatgactagggtgggaaacaaaacatgattaatggctgtaaaagggcaagtttggactctcgatgg

SEQ ID NO: 942076 - DNA, 120 bp, Artificial Sequence
  ENSG00000231764_61 (sequence is synthesized)
catatcttcccaaactttggagaatgtgcagaacttagtaataaagaaggaaaagattaaaagagttcatggttaacatgaaattgtgaggacaacagaggaagcaataaatgtcattag

SEQ ID NO: 942077 - DNA, 120 bp, Artificial Sequence
  ENSG00000231764_62 (sequence is synthesized)
tcctcaggaatgaaagcatttctagagaaacgtactagtctatgttcttcatttatgagcagaatagttttcatctactttttaataaaaggttaatgtataaaatgaatgctattaaag

SEQ ID NO: 942078 - DNA, 120 bp, Artificial Sequence
  ENSG00000231764_63 (sequence is synthesized)
gaaagaaaagctaagcattatcaggaaagttgaagaaaagattgcacctagaacaactgaagtaaaccagcaaacctattttacagccttttctataaaattttgaaattcatcatctta

SEQ ID NO: 942079 - DNA, 120 bp, Artificial Sequence
  ENSG00000231764_64 (sequence is synthesized)
atgaaagaactggaaatagtttttccaaatagaaatgggtaatgataagggaggaagttttaacagttagaaatattatagaatgcattcttttacattttttccccataaaaatgagag

SEQ ID NO: 942080 - DNA, 120 bp, Artificial Sequence
  ENSG00000231764_65 (sequence is synthesized)
gaagctaaaaaacttatgggtatagctttaaatactttggataagaagatttatagcaatgtaaggttattgttagtagtagaaataacattaattttttaaaaatattagtatttggag

SEQ ID NO: 942081 - DNA, 120 bp, Artificial Sequence
  ENSG00000231764_66 (sequence is synthesized)
caggactaaataccagtgatcatcctttttggtttcttgtgtttgtgtaggagattcctttcagacagacagtaccagacctccttaggagggaagctgataaagtaatttaggtggaaa

SEQ ID NO: 942082 - DNA, 120 bp, Artificial Sequence
  ENSG00000231764_67 (sequence is synthesized)
ggtttaatgagataatgatgctaaggccagttaacatctaataagaacataatcatgagggatgatattgttgcttattaattataatgatgcagaggaaagagacaaggtggcactcat

SEQ ID NO: 942083 - DNA, 120 bp, Artificial Sequence
  ENSG00000231764_68 (sequence is synthesized)
cagagagtactcaggagtaagaccgttatcccaaaggggaagtgttgcagtcagagttagaagtaggtcaacatttagcagagtttgaaatttatggccgttgggttatactagcaacca

SEQ ID NO: 942084 - DNA, 120 bp, Artificial Sequence
  ENSG00000231764_69 (sequence is synthesized)
cagaactgaaggccaggcaggaggtaacagatgcctttctgatggtggccagggatggagtggagactgctgtggttgctgggccatgcacggaggcagactccagggtgagttttggga

SEQ ID NO: 942085 - DNA, 120 bp, Artificial Sequence
  ENSG00000231764_70 (sequence is synthesized)
gctgtctgcttgccttagattccacagtggtcattcgtgggcagacaggcaggtgtccagaactggactggatgtgcttccagttctgtgaccttcccctccactccactgggtcgggtg

SEQ ID NO: 942086 - DNA, 120 bp, Artificial Sequence
  ENSG00000231764_71 (sequence is synthesized)
agtcagacccaaggatagctattcagtcagtgttggcgcccagctttgttgagggagcccagaagatcctttggtcctgtttttagaggcgcagacctaactgttatcagttgaattgca

SEQ ID NO: 942087 - DNA, 120 bp, Artificial Sequence
  ENSG00000231764_72 (sequence is synthesized)
tttatgattccttggtattagtcactaaccacattccgcttcctgaattcattgcgggtctggtcacctccatgtttgcctaggatggcagaattgtagtataaatttattgcagataca

SEQ ID NO: 942088 - DNA, 120 bp, Artificial Sequence
  ENSG00000231764_73 (sequence is synthesized)
ctaatgtccatattagtcaggtgggcaggaataaagaattcgaggaagaaacagccatgtgaaaaaaacatggagcttttggaaatcttgtgactcctcaagggaggcatagaagcttga

SEQ ID NO: 942089 - DNA, 120 bp, Artificial Sequence
  ENSG00000231764_74 (sequence is synthesized)
aacagaggactagcctggggaagttaatttggggctgggtaaggaatataaaaactctaccccttattcagcaccttttcccaatatgggtctctctctgagtcctggatcctaggctat

SEQ ID NO: 942090 - DNA, 120 bp, Artificial Sequence
  ENSG00000231764_75 (sequence is synthesized)
tgctgactcctttcttgggtctttggatgccacctctgcaatgatagggaggggttttctataccttcttgtatagttaattttattagctggatgaggatcacttcacaggatttttct

SEQ ID NO: 942091 - DNA, 120 bp, Artificial Sequence
  ENSG00000231764_76 (sequence is synthesized)
tgtcctatataatgacccctgaaatagaaaggaaataatattcacatcattagctttttaaagcaagtatattttatcttattaaatgtgtggttttagagaggcaagaagtgacaagaa

SEQ ID NO: 942092 - DNA, 120 bp, Artificial Sequence
  ENSG00000231764_77 (sequence is synthesized)
gatgctagactagaagatggaagattcagctctagtcctgactcatgcctatcagctctatcaccttggacaagtctcatgcctttcagagcctcagtttctacattcataaaatgaggc

SEQ ID NO: 942093 - DNA, 120 bp, Artificial Sequence
  ENSG00000231764_78 (sequence is synthesized)
attattgagggtaaactttatgattaaagagccatgtccagctttaaaattatgtatttatgcatatatgtttttacagatcctacatctattaaactgttatgggagaattaattgata

SEQ ID NO: 942094 - DNA, 120 bp, Artificial Sequence
  ENSG00000231764_79 (sequence is synthesized)
aacccatatgagagcagatatttccttaaatctgtagttcaaagtggacagttaaggtcagagttaccaaggaaccaatgccgtaactattgagtactaactatgtggcaggtgcttcac

SEQ ID NO: 942095 - DNA, 120 bp, Artificial Sequence
  ENSG00000231764_80 (sequence is synthesized)
agatgaggaaatgaagattttccaaagtttaaataaatagttcaagatcatatagtcaataaggagtaaagccaatgctcaaacccaggcatccctgaaactgaaactcatgaccttcat

SEQ ID NO: 942096 - DNA, 120 bp, Artificial Sequence
  ENSG00000231764_81 (sequence is synthesized)
caccactgtgtgcatctcccccttttttagaacccaaatgcttatgtcctatcacttatggcaccagccaccggaagttttcttcagtcattatggttctcaactgggatgcggggaggg

SEQ ID NO: 942097 - DNA, 120 bp, Artificial Sequence
  ENSG00000231764_82 (sequence is synthesized)
agcaagacaaggagtagtttgaaaactcttcccagttgattctgatacacacatgtctctgcctctaaattcagctgctctctttaagacataacttggccagagtcattctaacattat

SEQ ID NO: 942098 - DNA, 120 bp, Artificial Sequence
  ENSG00000231764_83 (sequence is synthesized)
tacccgagaggatcttacttgagaattttctgctatgtgcaggttcatgtttctgttttttcctgcatgtcttcagagcaggtagagacattgaacacaattattcctcttccaaatggg

SEQ ID NO: 942099 - DNA, 120 bp, Artificial Sequence
  ENSG00000231764_84 (sequence is synthesized)
gaagtgaagcaaagagaattgaatgattcaattttactcacctacccagtggtcacagaactgacatcttccatgcctaagactagccgccacaagacattgtctttctagccaattcag

SEQ ID NO: 942100 - DNA, 120 bp, Artificial Sequence
  ENSG00000231764_85 (sequence is synthesized)
ttaataatgtattttatatagaaggaaaatttcactattgttttttgttttggagttttcccagtaaatggatcattttagtgacattagtttttttttttttttttcctttgagatagt

SEQ ID NO: 942101 - DNA, 120 bp, Artificial Sequence
  ENSG00000231764_86 (sequence is synthesized)
ggctggagtgcagtggtgtgatctccattcactgcaaacttcgcctccctggttcaagtgattctgttgcctcagcttcccaaatagctgggattacagcttcctgccaccactcctggc

SEQ ID NO: 942102 - DNA, 60 bp, Artificial Sequence
  ENSG00000231764_87 (sequence is synthesized)
tggagtttcaccatgttggccagactcaaactcctgacctcaagtgatcatttggtctta

SEQ ID NO: 942103 - DNA, 87 bp, Artificial Sequence
  ENSG00000231764_88 (sequence is synthesized)
tacaggtgtgagccatcgtgcctggcctcatttggtcttaattcacaattctttacagtctcaaatgatttcttttggcttgttgaa

SEQ ID NO: 942104 - DNA, 120 bp, Artificial Sequence
  ENSG00000231764_89 (sequence is synthesized)
taagttcttcattattgctcagtatggttgcattgagctcattgtgaaaaattagaaacattcagatacaggatttaattaaataaagacaatagagtgcagtattatattgccatttaa

SEQ ID NO: 942105 - DNA, 120 bp, Artificial Sequence
  ENSG00000231764_90 (sequence is synthesized)
aagaatgaggcagcttcatctatggagtggtatccacgatacacagttaaaatttaaaaagcaaagcacagaacaatgtgtatggtgtgctaccatttgtataaatacatacatatatgt

SEQ ID NO: 942106 - DNA, 120 bp, Artificial Sequence
  ENSG00000231764_91 (sequence is synthesized)
ttctatgcattgcctaactgaggaaggacatttaaggaactggtaatagtggttgtctctggggagaaactgactgactcagaaattggaagactatctctgttgtcccttttatatagt

SEQ ID NO: 942107 - DNA, 120 bp, Artificial Sequence
  ENSG00000231764_92 (sequence is synthesized)
gtatcatgttcatgtattgcctattcatttttttaataaagaagaaagtagagctatctttactgagatggaaaaatacaaaagacatattttaggtataaaaagcaaggtgcggaatag

SEQ ID NO: 942108 - DNA, 120 bp, Artificial Sequence
  ENSG00000231764_93 (sequence is synthesized)
tgtaaatagtatatgatatttttgtaatgtaattatacatacatacatatatgcatggatatacacacacatatacacatctataaggagatgcaccaaattgttaacagtggttccccc

SEQ ID NO: 942109 - DNA, 120 bp, Artificial Sequence
  ENSG00000231764_94 (sequence is synthesized)
tagggaaaaagaaagtgtgtgtgtgtgcacgtgtgtgtgtgtgcacgtgcgtgtgcgcacacatactttccgttttttatcctatgtagttctatattgtctgattttgttttacacaag

SEQ ID NO: 942110 - DNA, 120 bp, Artificial Sequence
  ENSG00000231764_95 (sequence is synthesized)
gcacatagcaatttataataaataactcatacatctcaaacccaaataattgcacttgatttctgtacacctatcaagaaaattctccagcatttctgtctagctttattttgctgtttg

SEQ ID NO: 942111 - DNA, 120 bp, Artificial Sequence
  ENSG00000231764_96 (sequence is synthesized)
ctatatctcatggattcatttcagatctcttctttgaccttttctctgaagctttgtgaagtttctattcctttatctttactctcatgcattcacctttatcaatagggcccagctaag

SEQ ID NO: 942112 - DNA, 120 bp, Artificial Sequence
  ENSG00000231764_97 (sequence is synthesized)
gtcatgaccatggaaatcatggtaatactactggtagttcctctctcagccacttccctttttaattaatcaagaataatgcaactaaaatcttcctgattcctactttacacacttcaa

SEQ ID NO: 942113 - DNA, 120 bp, Artificial Sequence
  ENSG00000231764_98 (sequence is synthesized)
cttggttaaataaaactcctgacctatttcaggaagatttatttgctttctggatgattcctatctacaaataagttgtatttccagtctcaaagaacaaaatccaagagaacttcctca

SEQ ID NO: 942114 - DNA, 120 bp, Artificial Sequence
  ENSG00000231764_99 (sequence is synthesized)
actccacatccccttcacataccacaccatttctctgttttcctttacagcaattccccttgacaacgttgactttacttttgtaaagatactttctcccctcccattcatccttaaacc

SEQ ID NO: 942115 - DNA, 120 bp, Artificial Sequence
  ENSG00000231764_100 (sequence is synthesized)
tattcctctcaggctttcagccctaaccgctgtctctgaactcttgtgttgaggtcatttatggtacttacttgctaaatccagtggccagttttcagtctccatctttacctcccaact

SEQ ID NO: 942116 - DNA, 120 bp, Artificial Sequence
  ENSG00000231764_101 (sequence is synthesized)
tgttggtcacagccaatcactttctccttgcaatacttttttttggtcttctggacacttctctttcttggatcttcttctgcctcacagactactcctgagtttcttctttatcctctt

SEQ ID NO: 942117 - DNA, 120 bp, Artificial Sequence
  ENSG00000231764_102 (sequence is synthesized)
tcaccttgaaaagtggggactgctcagttctcgagccacctgccttctttattcaaacccattctctcagtgagctcatctagcctttggctttgaataccatctccatgctgatgtctt

SEQ ID NO: 942118 - DNA, 120 bp, Artificial Sequence
  ENSG00000231764_103 (sequence is synthesized)
ctttggctttgaataccatctccatgctgatgtcttccaagtttttttatgtgcaaactccagcttgtacctaaactatggacttggtgtctccttcttctgttcttttttttttttttt

SEQ ID NO: 942119 - DNA, 120 bp, Artificial Sequence
  ENSG00000231764_104 (sequence is synthesized)
ccatgttagccaggctggtcttgaacctcaggtgatctacccccctcggcctccaaaagtggacttggtgtcttcttgacaccactatttagctttctaacaggcatctaaacttaacat

SEQ ID NO: 942120 - DNA, 120 bp, Artificial Sequence
  ENSG00000231764_105 (sequence is synthesized)
ttagctttctaacaggcatctaaacttaacatgtccaaaacaagtggacccacctgcctgcactaacctttcatatttgctaaatgacaacttaattgaagctctactttgttctaactg

SEQ ID NO: 942121 - DNA, 120 bp, Artificial Sequence
  ENSG00000231764_106 (sequence is synthesized)
ctttcactacctccaccactaaagccctggtctaagcctgattatcactcacctagattagtgcaatagcctcttatcagctcccttgcttccatcttttccccctaaaatctgttcact

SEQ ID NO: 942122 - DNA, 120 bp, Artificial Sequence
  ENSG00000231764_107 (sequence is synthesized)
gatggcagccaaagtggttctttaaaaaatacaaatcagtttatgccattgttttactcaaaaccctccaatggctcccatcttactcagagtgacatccaaagtcttcaccatagcctt

SEQ ID NO: 942123 - DNA, 120 bp, Artificial Sequence
  ENSG00000231764_108 (sequence is synthesized)
caaggcctacatgcttcctgtattcactctacgtctctctggtcagcccccattctctcctccttgctgttttcatgccaccttgatttccttgctgttttttgaacataccaggcatgc

SEQ ID NO: 942124 - DNA, 120 bp, Artificial Sequence
  ENSG00000231764_109 (sequence is synthesized)
tcctacctcagggcctttatacttgccataggtgtggaatactcttttctcaagtattcatgtggctcagttctctcccttcattcagcccaaatgttaccttatcagaaaccttccatg

SEQ ID NO: 942125 - DNA, 120 bp, Artificial Sequence
  ENSG00000231764_110 (sequence is synthesized)
aatatcctatctagaacagcactcacccatttcacggtacccctttaccctgctttatttttaccatcatctgacacattatatatctacctattagttgtctattataaatatgaactg

SEQ ID NO: 942126 - DNA, 120 bp, Artificial Sequence
  ENSG00000231764_111 (sequence is synthesized)
gaatataagacctataagaacagaaattttttgtttactacatctttaacatttagaagaatgacggttacaaagaaagtgctcaaaaaaatgttccctgaatattgaataaagaatggt

SEQ ID NO: 942127 - DNA, 120 bp, Artificial Sequence
  ENSG00000231764_112 (sequence is synthesized)
gagaagttcactaaagcttcctttagcctattcaaattatatggaattgctcttaagacagtttatttctccatctcaattttctcatgtcttttaaaaaaatttgttctaactttttat

SEQ ID NO: 942128 - DNA, 120 bp, Artificial Sequence
  ENSG00000231764_113 (sequence is synthesized)
tttgaaataatagtagacttacaagtatttgcaaaaagagtatatagaagtttcttctactcttcacccagcttcccctaaatgtaacatcttccctatcctttctttttattatttcct

SEQ ID NO: 942129 - DNA, 120 bp, Artificial Sequence
  ENSG00000231764_114 (sequence is synthesized)
gtttcctttacttcagtttcttatttcttctgtaagtctttctacacaggctttcaggaactcctccatctcttatttcatggccaaatcattggtgaactttattcaacaccaacatca

SEQ ID NO: 942130 - DNA, 120 bp, Artificial Sequence
  ENSG00000231764_115 (sequence is synthesized)
aatttcttctccaagatgatggtcctatcaaggaagggatagatacttcaattaaatatgcttaatcctatttttcataataacaaataaatcaaaagaaaagaaaggctgtttcatctt

SEQ ID NO: 942131 - DNA, 120 bp, Artificial Sequence
  ENSG00000231764_116 (sequence is synthesized)
ttaagcttgttctaccgagagatactatctcttctgtaagttctgtatagcagtttgtttgctgtgatttctacagacaggcaatttgttgactctaatgtgtattttctctcttatatt

SEQ ID NO: 942132 - DNA, 120 bp, Artificial Sequence
  ENSG00000231764_117 (sequence is synthesized)
caactgtttaggaaaagttgaataaaaacaaatatatgatttcttttaaaaaaattatttattctgctgagtctctgtcaacacacatttattgtgtacctactgtgtgccaagctccat

SEQ ID NO: 942133 - DNA, 120 bp, Artificial Sequence
  ENSG00000231764_118 (sequence is synthesized)
cctaacgatggtctcttattcccccaagataatctgtgatgaacatcacctttaatacattgtaagttctgaaagattgattgaaaactcctttcttccaggtaagtaggttattctcta

SEQ ID NO: 942134 - DNA, 120 bp, Artificial Sequence
  ENSG00000231764_119 (sequence is synthesized)
aggaaagggcattcatgttcaggtcataagggcatgattatgctaataactgatctccagggttaaaaaaagaacccatgtcccttccaatatgcctgagatataagataatctaccatt

SEQ ID NO: 942135 - DNA, 120 bp, Artificial Sequence
  ENSG00000231764_120 (sequence is synthesized)
tgacaagataaagctcatcaatttcatcatcagtaaaaagagggcataactgggatgtcactaactgctactgttaaaatgagcatgtattaaaatccttatggatgtccccttcatatt

SEQ ID NO: 942136 - DNA, 120 bp, Artificial Sequence
  ENSG00000231764_121 (sequence is synthesized)
caacattaattagaaacctgccctatctcagtgttcttctataatcaatccccctttccagtattactaaggtaactgtaagccctgcatgcctgaactgtcctggtttacacctgtttt

SEQ ID NO: 942137 - DNA, 120 bp, Artificial Sequence
  ENSG00000231764_122 (sequence is synthesized)
tccagcataattgttaattgcaaccctgttcactgtctgatgaatcttggtttggacgataaattatatggtcaacctaagtattagagtccctgggataaacaatcaaggtgtcattct

SEQ ID NO: 942138 - DNA, 120 bp, Artificial Sequence
  ENSG00000231764_123 (sequence is synthesized)
tatttattggtattggtttgtcacaagctgtgaaaacagtttttcttttgcttgtttcttcctgagttgtcacgaagaccttcacataaaatcactctctcccattaaagtaattattga

SEQ ID NO: 942139 - DNA, 120 bp, Artificial Sequence
  ENSG00000231764_124 (sequence is synthesized)
agcccccttcagtaatgaccagttgttttagttttcctcctcagattccaaagaccaaatgtagagattatttttactgggtcaggatcaaaattgttcagaggcactagccttgtatag

SEQ ID NO: 942140 - DNA, 120 bp, Artificial Sequence
  ENSG00000231764_125 (sequence is synthesized)
ggagaatttcatctatctaatccacaagaatcttgaagagacattttttccttggtaacattatctcgaagaaagagtctgtgattgactactaattttagcccagaggatagaaaactc

SEQ ID NO: 942141 - DNA, 120 bp, Artificial Sequence
  ENSG00000231764_126 (sequence is synthesized)
aaatgtactcaatttcaatgtaacatatgtatttgtggcctaagatacttaatgtctctaaagttgctacaagggaatgagtaattgaaaggtgagtttgggtggccttcttagacataa

SEQ ID NO: 942142 - DNA, 120 bp, Artificial Sequence
  ENSG00000231764_127 (sequence is synthesized)
tctctgttaaaactatttaatctgtatggttcacaagaaaggttttcttgagttgatgagtagaatgatatttctgataagatatttctacaactatattcttggctgatggtagtagca

SEQ ID NO: 942143 - DNA, 120 bp, Artificial Sequence
  ENSG00000231764_128 (sequence is synthesized)
gcaccaccattttttcattatttaattttggaaaattgaccactatttttttcatctaaggctgtgtccttattgtactgaagcacccaatcaactcgatgtaaaaaaagaaagtctttt

SEQ ID NO: 942144 - DNA, 120 bp, Artificial Sequence
  ENSG00000231764_129 (sequence is synthesized)
aaataatgtggaattatgaagacaaaacaactagtgaggaaactaaattgtttttatctaattattttgtaactcatctgtgaactatagataattctgctggtttttgcattcctgaaa

SEQ ID NO: 942145 - DNA, 120 bp, Artificial Sequence
  ENSG00000231764_130 (sequence is synthesized)
cagttgctgtgagaataaataatatacttagtaaaacattatgaatgtttgagataatagatgcataatgacttcatccttgtttgtagcttgcttgaaaaattaaattgaatgaaacag

SEQ ID NO: 942146 - DNA, 120 bp, Artificial Sequence
  ENSG00000231764_131 (sequence is synthesized)
agaagacctgaagctcgctgcccgcgagtttcctccgagttcccaggtcagcggcgtttgcgctcctctccccctccttttcccagcccgttgcgcttaagttcttgagtctggggagcc

SEQ ID NO: 942147 - DNA, 120 bp, Artificial Sequence
  ENSG00000231764_132 (sequence is synthesized)
ggttcagtaactctgaattcatttttaagtggcgtgccctgttccccaccttttaacaagaggtgcactttaacacgcgaaccagtaacacgatctacacgtttacaaatcggcaatgaa

SEQ ID NO: 942148 - DNA, 120 bp, Artificial Sequence
  ENSG00000231764_133 (sequence is synthesized)
ataaaaaccttaaattgtccccaatgtctgcttcaaattggatggcactgcagctggaggctttgttcagaattgatcctggggagctacgaacccaaagtttcacagtaggaaggggga

SEQ ID NO: 942149 - DNA, 120 bp, Artificial Sequence
  ENSG00000231764_134 (sequence is synthesized)
aaaaagaaaagaaaacatttttcctaatgtaacaatgcgaatgctagaaaatgacaagactgatcggttttaaaccattctgaagactgactgagcgtggaagttgctcaacaaaaaaag

SEQ ID NO: 942150 - DNA, 120 bp, Artificial Sequence
  ENSG00000231764_135 (sequence is synthesized)
gagatattcactgagggtcctacgtctctgcaatttgtgtatgaataacagaataatttccctcttttgtttcgcctttcctgttcctgaatctaaataaagatggctttttagtattaa

SEQ ID NO: 942151 - DNA, 120 bp, Artificial Sequence
  ENSG00000231764_136 (sequence is synthesized)
ttctttccttcaatgtatcagaagacctgaagctcgctgcccgcgagtttcctccgagttcccagagtcttgctctattgcccaggctgcaactggtgtgatctcggctcactacaacct

SEQ ID NO: 942152 - DNA, 84 bp, Artificial Sequence
  ENSG00000231760_0 (sequence is synthesized)
agtacaagcatggctcactgcagcctcaacctgtcaggctcacgcaatccaagctatcctcccacctcagcctcttgagtagct

SEQ ID NO: 942153 - DNA, 120 bp, Artificial Sequence
  ENSG00000231760_1 (sequence is synthesized)
tagcctcccaaagtgctggggttacatgcatgagccaccatgcccggccatatatcctactattctttaagattcagttcaagttccatccgtgtgtgatgtctccttgaccactcactg

SEQ ID NO: 942154 - DNA, 120 bp, Artificial Sequence
  ENSG00000231760_2 (sequence is synthesized)
cacaattctctccctcatatgcatattttattttccttccaatagatatcctgtgttaattatatgttatcatatcgctaatttcccagttacatatatgacatatctcttctagaatac

SEQ ID NO: 942155 - DNA, 120 bp, Artificial Sequence
  ENSG00000231760_3 (sequence is synthesized)
aagctttgtgagaatataatgtatggcaaatactttctcatatctcccatacaccaaatacagccttacatattctgctatttaaaaaacatcaaactggccgggtgcagtggctcacac

SEQ ID NO: 942156 - DNA, 76 bp, Artificial Sequence
  ENSG00000231760_4 (sequence is synthesized)
ctgattatcaggtcataaactccagagggattttcccaattctactgttgtcctagttcttacctggatcaaatat

SEQ ID NO: 942157 - DNA, 120 bp, Artificial Sequence
  ENSG00000231760_5 (sequence is synthesized)
caattctactgttgtcctagttcttacctggatcaaatatgagcgccacaaactggggtttagtaattttcatgtcatttatacaattgtttgcatatgaaaaaagaaaagagtaacagc

SEQ ID NO: 942158 - DNA, 120 bp, Artificial Sequence
  ENSG00000231760_6 (sequence is synthesized)
taaatgtaaccaaaatgtatgatataaaagtctaattatattttgaacatcatctagaagtcttttctatttaagtcttgtagagttttagttgaataaaaacacacaaacagaaaaaat

SEQ ID NO: 942159 - DNA, 120 bp, Artificial Sequence
  ENSG00000231760_7 (sequence is synthesized)
cccgactcaccgcctggggtacaacaggggctgcagctcccacatgaatggcatcataaggggcttcttcagcatatcccattcttccatcccccactgaaagaaaaacagctatgcttt

SEQ ID NO: 942160 - DNA, 120 bp, Artificial Sequence
  ENSG00000231760_8 (sequence is synthesized)
aaaaacctgtttagatcaaacttaatgtgaagaattctagtacaggaggtttacaatggagaaaggatagatttttcaataaatgatcctgggacaactggatattcacttttttgctgt

SEQ ID NO: 942161 - DNA, 120 bp, Artificial Sequence
  ENSG00000231760_9 (sequence is synthesized)
ttttaactcattttattttattttttgtttggtcagaaacattaaaacaatggaattttattttgatgaaaaactggagttaacaatcatttagtaaatgaaaagcgcttcattttccta

SEQ ID NO: 942162 - DNA, 120 bp, Artificial Sequence
  ENSG00000231760_10 (sequence is synthesized)
taagtcattttcccagtcacttggccaataagcagcaagtcaatgaccagaacaaattatacaactttcatcttcccataactgatctaagcctaccaaaaaaacggatgagactagaca

SEQ ID NO: 942163 - DNA, 120 bp, Artificial Sequence
  ENSG00000231760_11 (sequence is synthesized)
gaagaaacagtgtcaccttcatccccggtcatctagtcaagaactacgcaaaagccatatgtaacagaaatctaggaccacaggctacagtgccatggcacaaacatggctcaatgcagc

SEQ ID NO: 942164 - DNA, 120 bp, Artificial Sequence
  ENSG00000231760_12 (sequence is synthesized)
ccacctcagcctccagagtagctggggctacaggcatatgcgccactgtgcctggctaattttttttttaaacagggtcttgccatgttactcagactggtctcaaactcctaggctcaa

SEQ ID NO: 942165 - DNA, 69 bp, Artificial Sequence
  ENSG00000231760_13 (sequence is synthesized)
cagggtgctggggttacatgcatgagccaccatgcccggccatatatcctactattctttaagattcag

SEQ ID NO: 942166 - DNA, 120 bp, Artificial Sequence
  ENSG00000249906_0 (sequence is synthesized)
acatttgctccggctgctcctcctgccaggcttgcccttactcccctcttggtcatttctggctctcactttgttcaagtttcccctccgcatttatccatcacccactggccgagcctg

SEQ ID NO: 942167 - DNA, 120 bp, Artificial Sequence
  ENSG00000249906_1 (sequence is synthesized)
tccgccgtgccaggcgccaggccaggggttgagatagagatgaatgggacaccctccctgccctcaaggatctcatcggcaagtgtggaacagagacatgaaaatcgataattgtaactc

SEQ ID NO: 942168 - DNA, 120 bp, Artificial Sequence
  ENSG00000249906_2 (sequence is synthesized)
agtatgaaagaatggaaaatgcatttaaagctttaaaatgccttctgggagttcgtgcacatcctggattcctggatgtgggtgccacagcattcccagtgtgacaagcgaaggggaaga

SEQ ID NO: 942169 - DNA, 120 bp, Artificial Sequence
  ENSG00000249906_3 (sequence is synthesized)
gacatatgcacacgcaggagaacacgaggcccgagcccgcctcgcacacgcggcacgcctcgcagcgcccagtcgtctcatcctggtagtagccgtaggcgcagcggcacacggcgtcgt

SEQ ID NO: 942170 - DNA, 120 bp, Artificial Sequence
  ENSG00000249906_4 (sequence is synthesized)
cggcctccacgcacggcgccgacatgctctggagccccacgcactcggtgcacggcttgcacggctcggtcgcgctcaccacgtcggagaacgtcacgcctgagcgcagcggacaccaga

SEQ ID NO: 942171 - DNA, 120 bp, Artificial Sequence
  ENSG00000249906_5 (sequence is synthesized)
gcacccgggacgcaggagctggagtctctccctcccctattgcctgccaggacgctgacttcctccttcagccttctcatcggctcccaccctcttccaagggaccctgacccctagcct

SEQ ID NO: 942172 - DNA, 120 bp, Artificial Sequence
  ENSG00000249906_6 (sequence is synthesized)
gtgaaagttggtggcagccaactgggaaagggggaggaggcccggagccgcatcctccaggctccagaagcactggccggccgggaggctttccggcataacccagctggtgccgctaag

SEQ ID NO: 942173 - DNA, 120 bp, Artificial Sequence
  ENSG00000249906_7 (sequence is synthesized)
tttcttggcaaattctctttgagagttcccaggcctgtactatgttcccagcatgattaaggaataatctgaacgtggttcccacccagccctccccgcgggccagagctgggctgctaa

SEQ ID NO: 942174 - DNA, 120 bp, Artificial Sequence
  ENSG00000249906_8 (sequence is synthesized)
cccggtccaggcaaggtaggccttcccctagggagcctcctgcctcatctgccttcagttcctctccacacaggtgtgggctcagatgcagcctaaatgggagtgaccggggttagacag

SEQ ID NO: 942175 - DNA, 120 bp, Artificial Sequence
  ENSG00000249906_9 (sequence is synthesized)
cagaatttcccacccatggcactacccccatgctgctgaagggcttggatcctgagggtggggacggacctgcaggcaagagggctcaggtaaggcaggagccactgaagctagagagct

SEQ ID NO: 942176 - DNA, 120 bp, Artificial Sequence
  ENSG00000249901_0 (sequence is synthesized)
aatcaagttgaggtggagaacagaaaggcttagttactctttaggacaaggtggaggtggggagaagccgaggagagcatttcactctgccttttttttaatgtgcagacattaaactgg

SEQ ID NO: 942177 - DNA, 120 bp, Artificial Sequence
  ENSG00000249901_1 (sequence is synthesized)
tttcggtgctgactggctggaaggagaaatctaagcagtaatgaggcagtgttctgaatatccttcctcacttatcctagtggttctcaggggcagtgatgggtgtgctcgttagcaggc

SEQ ID NO: 942178 - DNA, 120 bp, Artificial Sequence
  ENSG00000249901_2 (sequence is synthesized)
cccacctgcaagtgtgggcttgaatggtgttgctatgggactctgcggcactacgcttggctatgctctgactctctctgcctaatacttcatgccaagattttttgagacaggatcgca

SEQ ID NO: 942179 - DNA, 120 bp, Artificial Sequence
  ENSG00000249901_3 (sequence is synthesized)
taccgtcacccaagctgaagtgcaatggtgcgaacatggctcactgcagcctagaccgactgagctatgcagtcttcccacctcagccacccgaataggtgggactatagttagcttctt

SEQ ID NO: 942180 - DNA, 120 bp, Artificial Sequence
  ENSG00000249901_4 (sequence is synthesized)
cctggaatcctgaatcttcctgctacaggatttagagtgagtttatacctattatattacttcatataattttaagagatcatgataaagaatgaagataaatacttgtggctactcttc

SEQ ID NO: 942181 - DNA, 120 bp, Artificial Sequence
  ENSG00000253901_0 (sequence is synthesized)
ataataccagcttcaacccaagaggagtatggaaagacctctgatattccctccaggacacttgctggctttgtgatcttgggtagatcacaatctctgattcttgttcttcccagctgc

SEQ ID NO: 942182 - DNA, 120 bp, Artificial Sequence
  ENSG00000253901_1 (sequence is synthesized)
aaaatggggataatattgtctccctatccatatcacagatggttatgaagattcaaaaagatgcagcctgataacaccttccctcaggcctgcagggttgtaccacttgcttcttgacct

SEQ ID NO: 942183 - DNA, 120 bp, Artificial Sequence
  ENSG00000253901_2 (sequence is synthesized)
tcccaaagtgctgggattacaagcgtgacccaccgcgccccgcctggaaaactttcagtgatcacccaaggtgggaggagagcaagatggcagaagtgaccgggctctctctccattgat

SEQ ID NO: 942184 - DNA, 120 bp, Artificial Sequence
  ENSG00000253901_3 (sequence is synthesized)
ccattgattacactctccagcagcatggctgttttccccaggatggcaggtggcacaagcgttttgctactcagcaggaggtgttggcttgatgctcaggacctctgtgacaccagcggg

SEQ ID NO: 942185 - DNA, 120 bp, Artificial Sequence
  ENSG00000253901_4 (sequence is synthesized)
aggcccagtgcaaagcatatggattgaaagttgggaagagttacagttacttgaataaagagaagttggatgcttagaactgaaaatatccacaatgctaagatcatttttatatttatt

SEQ ID NO: 942186 - DNA, 120 bp, Artificial Sequence
  ENSG00000253901_5 (sequence is synthesized)
gcctggaaaactttcagtgatcacccaagaccatactatctgaatacagtgcattaaaggaggtgcagagactgaagatctgcattaagcagcaagtacttcagcccaggtccatgttct

SEQ ID NO: 942187 - DNA, 120 bp, Artificial Sequence
  ENSG00000253903_0 (sequence is synthesized)
cagaaatatctggggagaggctttggaatcataaagagtcggaattaaaatactgttgtgccacttaccaactttgggacaagccgatctgtctgcacctcaatctcccagtctgtgaat

SEQ ID NO: 942188 - DNA, 120 bp, Artificial Sequence
  ENSG00000253903_1 (sequence is synthesized)
tgggaccagtgattcctaccacctgggggtactgtggacattcaccaacacgatggatgtgaaagcatcccacttatctcagtggttaagttgcaagaatatttccaaagcagatgccaa

SEQ ID NO: 942189 - DNA, 120 bp, Artificial Sequence
  ENSG00000253903_2 (sequence is synthesized)
actgtacgctgatgccaaaagcaagtatttgcaaaactgtaaaggaaggagaagaaaacatcagcctcttgggaagctaccaaaggagagagaacctggactcagtttgttctgctctct

SEQ ID NO: 942190 - DNA, 120 bp, Artificial Sequence
  ENSG00000253903_3 (sequence is synthesized)
atttgaaaaagatgacctgtgtgtacgaggacctgggtttgaatcttgacttgttatatatgggttgtgagaccctggataaaccactgaactttttcgggcttcagattcctcatctgt

SEQ ID NO: 942191 - DNA, 120 bp, Artificial Sequence
  ENSG00000253903_4 (sequence is synthesized)
gaaacagagaccataatgccaaccttattctaattttgtggaaaaagaaaagcataataacaaatgcaaaatcctagcagagttaataggacagaaaaggtactcaattggctattgttt

SEQ ID NO: 942192 - DNA, 120 bp, Artificial Sequence
  ENSG00000253903_5 (sequence is synthesized)
aaggtactcaattggctattgtttttaattaatggaaaaatgatattaaacaatagctttctagaaaatgtatatgtttgtggtatattaacataaaaacatgttaaaaaacaagtaata

SEQ ID NO: 942193 - DNA, 120 bp, Artificial Sequence
  ENSG00000253906_0 (sequence is synthesized)
cagctcctggggctgctaatgctctgggtccctatgctgcgaagacccaacctccactctccctgcccatcacccctggagagccagcctccatctcctgcaggtctagtcacagccccc

SEQ ID NO: 942194 - DNA, 120 bp, Artificial Sequence
  ENSG00000253906_1 (sequence is synthesized)
caattggtacctacagaagccaggccagcctccttggctcccaatctatttagtttccaatcacgaccctggagtcccagacaagttcagtggcagtgggtcggggacagatttcatgct

SEQ ID NO: 942195 - DNA, 120 bp, Artificial Sequence
  ENSG00000224259_0 (sequence is synthesized)
ctggcaccgactgcccgttagagaaggcctgtggtgggcaggcatgtccaggcactgggactctagctgtgcaagactgtcctggtgccaggactcttgctgtgcacagccatgggctgg

SEQ ID NO: 942196 - DNA, 120 bp, Artificial Sequence
  ENSG00000224259_1 (sequence is synthesized)
ggctgccgggaacagcgtagatcccgaaggtgctgcagctagagcctgtcggttaactgcacttcttgcagccaaaaatgtgtttactcttgaagggggagccgaggctgctacagagca

SEQ ID NO: 942197 - DNA, 120 bp, Artificial Sequence
  ENSG00000224259_2 (sequence is synthesized)
attaagccaatgagaaatcagacccacaccccaattctgatgtaacagccttgggaaagaggttgcagtgaaaagctggtcctgctgtggtggagagaatggaggaaagataataaaagg

SEQ ID NO: 942198 - DNA, 120 bp, Artificial Sequence
  ENSG00000224259_3 (sequence is synthesized)
ccaaacctttgctccaactttctccttagcttccctttggatctggaaagctggggacccacacggcagagccatggtactggaggagccattaacaaagctttcaataaacctctcttt

SEQ ID NO: 942199 - DNA, 120 bp, Artificial Sequence
  ENSG00000224259_4 (sequence is synthesized)
cttgaagttacctgagaatggatccattccctgcaactgaagattctaaggaactgggtttctcagtatacaatgggaatggttgggaggaggtaaagagtagaagacagtatcaagaat

SEQ ID NO: 942200 - DNA, 120 bp, Artificial Sequence
  ENSG00000224259_5 (sequence is synthesized)
aagagaaagaaagaaaagaagattgtagctagggggagagtaggtgaaaagatgaacaacatgaccgggaagatttcctaatctcaccacagcctggctctaccttaagtctttaataaa

SEQ ID NO: 942201 - DNA, 120 bp, Artificial Sequence
  ENSG00000224259_6 (sequence is synthesized)
agcttgactgaaggtaccaaggtgtgctgaagtggaagcaaagttctccaaagtccagcatggtagacatcagtggtggtaaccaaggacagaccccaaggcaaggtgaacctcaaaaat

SEQ ID NO: 942202 - DNA, 120 bp, Artificial Sequence
  ENSG00000224259_7 (sequence is synthesized)
ggaacctcaagtctatgcagtccagctgccctccccaccagaaagtccttgttccagcccaacatcagtgcctctgagtttgtttactagaaacaaaggaagaatttccttgtaaaaata

SEQ ID NO: 942203 - DNA, 120 bp, Artificial Sequence
  ENSG00000224259_8 (sequence is synthesized)
tagacagagtagtccctggctttctcctcttgcaggaaggatggattctcccattccataccatctttcccccacactggccccagaaatacttaattcaactatgtgaaaataaagatt

SEQ ID NO: 942204 - DNA, 120 bp, Artificial Sequence
  ENSG00000224259_9 (sequence is synthesized)
gtttttggtttgagggcatagggatccatttatccttattctttatgaggcactaaattagctttgtatgttattaaatgtgtctcgtcaatgctgttggcattgtttcattttaacttc

SEQ ID NO: 942205 - DNA, 120 bp, Artificial Sequence
  ENSG00000224259_10 (sequence is synthesized)
aataaaaggccaaacctttgctccaactttctccttagcttccctttggatctggaaagctggggacccacacggcagagccatggtactggaggagccattaacaaatggagtttcaat

SEQ ID NO: 942206 - DNA, 64 bp, Artificial Sequence
  ENSG00000224259_11 (sequence is synthesized)
ctggaggagccattaacaacgcaacctccgcctcccaggagaatcgcttgaacccgggaggcag

SEQ ID NO: 942207 - DNA, 120 bp, Artificial Sequence
  ENSG00000224259_12 (sequence is synthesized)
aaaataaaaaaagaaaaaaagaaacatatcaacattagagtttctagcttatatcccaatatcttggccattcattagaaccctggttaggctcctctcttatcaacttaccctcatgac

SEQ ID NO: 942208 - DNA, 120 bp, Artificial Sequence
  ENSG00000224259_13 (sequence is synthesized)
ggttaggctcctctcttatcaacttaccctcatgaccagcttctgcctcctgttcccatcagaggaggtttaaggccaattagcaacatgtgtctttcatccttttcttttcttctactg

SEQ ID NO: 942209 - DNA, 120 bp, Artificial Sequence
  ENSG00000224259_14 (sequence is synthesized)
tggaggttcatcacagcacttctatcagttcaccagatgaaagaggcatccatctgtgcctcttcatctgttggttgtaatgcagcacatatgataagtgggtattgagtggacctggac

SEQ ID NO: 942210 - DNA, 120 bp, Artificial Sequence
  ENSG00000224259_15 (sequence is synthesized)
tggagtcacaatcactgattatgtgctggaagtcagagggggacagggaaagtccccctttcctaggaaaagggtcctcaagttgccaagaaaagcaagagatcaaattcccccgaggag

SEQ ID NO: 942211 - DNA, 120 bp, Artificial Sequence
  ENSG00000224259_16 (sequence is synthesized)
gtttttgttttgttttgtttgttttttgcttgagttaatttaagttagtttctattacttgcaactaagaagttttaatgaattcacttgaaatactattgttaggaaggaaacaacttg

SEQ ID NO: 942212 - DNA, 120 bp, Artificial Sequence
  ENSG00000224259_17 (sequence is synthesized)
tgaaatactattgttaggaaggaaacaacttgcttgagaggtcaagcttaggctgaaagtcaacattggccaaggcacttagagagcaattaatcctcgtggcaaggcagggatggggtg

SEQ ID NO: 942213 - DNA, 120 bp, Artificial Sequence
  ENSG00000224259_18 (sequence is synthesized)
cctccctcccttcaaaatgcgaagcaaaaggcagggagaaggtctccttgcagatcttcagctctctcagggaaagagacccacgtcactcccagcagagtcctgcatggcagcaagggg

SEQ ID NO: 942214 - DNA, 120 bp, Artificial Sequence
  ENSG00000224259_19 (sequence is synthesized)
ccagggcggaagaagaacaaaagacacctggagaagaaaggcagtgcctttccctgcagcagccagggctgcagatatgatggagcaggggagatggtctcttctagagcagcatgagcc

SEQ ID NO: 942215 - DNA, 120 bp, Artificial Sequence
  ENSG00000224259_20 (sequence is synthesized)
gagttacacagatgatgtaaggaagaagtagagaaactgcagtctcagctcagagttttccttacatgcttgtgaaaataaagtcaccctctgttgcaggctgaataatggccccccagg

SEQ ID NO: 942216 - DNA, 120 bp, Artificial Sequence
  ENSG00000224259_21 (sequence is synthesized)
atgtccacattctaatccctggaacctgtccatgttttattatatggcaaaagagactttgtagatgtgattaaattaaggctcttgagattgggagattatcctggattatcagagtag

SEQ ID NO: 942217 - DNA, 120 bp, Artificial Sequence
  ENSG00000224259_22 (sequence is synthesized)
gcttgatgtaatcacaagagtccttctaagagaaaagcaggatgcagccccctgatgacagaagcagagaggaaagcagagttggagacagaagacgctatgctattggcttcctaaaga

SEQ ID NO: 942218 - DNA, 120 bp, Artificial Sequence
  ENSG00000224259_23 (sequence is synthesized)
cagaggaaagggccacaaaccaaagaatacacttgtattcttcagtaaatagcagctgccttggagtgttgcttgattcaatacatgtaatagtaatcgttcaataaatgcttgctatta

SEQ ID NO: 942219 - DNA, 120 bp, Artificial Sequence
  ENSG00000224259_24 (sequence is synthesized)
tacccttggatgtcttagagctgcactgtccaatatggtagccacaagccacatgtgaccattcgacacaggtgtggattttccgaattgaggtatgctgtatgtgtaaaataacacacc

SEQ ID NO: 942220 - DNA, 120 bp, Artificial Sequence
  ENSG00000224259_25 (sequence is synthesized)
aacacaccaaaattcagatactgagtacaaaacaaagaatgtaaaatagctcagtaatcttaatattaattatttgttgaaataacatttttaacacatccaattaaataaaatatatta

SEQ ID NO: 942221 - DNA, 74 bp, Artificial Sequence
  ENSG00000224259_26 (sequence is synthesized)
gcccaggagtttgagtccagcctggacaacatattgagacccccatctctctaaaaaaaaagagaaagaaagaa

SEQ ID NO: 942222 - DNA, 120 bp, Artificial Sequence
  ENSG00000224259_27 (sequence is synthesized)
ggaggtaaggaaaggttgtaataatggttacaaagcaggagcagcataaggctacctaggtggtacggtttgagttgttttgggaaagcccttcttaatcacctctctctaggacaccac

SEQ ID NO: 942223 - DNA, 120 bp, Artificial Sequence
  ENSG00000275040_0 (sequence is synthesized)
acttgcagctaagagcattctaactcacataatttcttcagagacacttctgtaatatgcctacttctgaatgaactcatgcttcccacactaccccttgaatacttcttttacggagtt

SEQ ID NO: 942224 - DNA, 120 bp, Artificial Sequence
  ENSG00000275040_1 (sequence is synthesized)
taccattgcctatttgtcttacatctgtcatacatctatgagctctttgaagacagggatagtgtcttatattccatctattcaaatccccaattaagtatataaatggataaatacgtg

SEQ ID NO: 942225 - DNA, 120 bp, Artificial Sequence
  ENSG00000275040_2 (sequence is synthesized)
agggtgtgtttcttgggtggcccgtaaggtcaacagggagatttccttgtcccagaattaaatgaggaaggtcgacttctgctccagccttgaaaactctcgtgaggatggaagcatgtt

SEQ ID NO: 942226 - DNA, 120 bp, Artificial Sequence
  ENSG00000275040_3 (sequence is synthesized)
cattatttgtcagtataatttaaactcgattaaagttccacctccccaaaaaaatgacacaaggaaaacttgatatctagtgctgatgaattatgtgttcctgggtcttttctcccccca

SEQ ID NO: 942227 - DNA, 120 bp, Artificial Sequence
  ENSG00000275040_4 (sequence is synthesized)
tcttcacttcttatctgcacaaaagaatgttctttttgtttttgactgactttaccagaagtcacacttgtatgggtataaaaaactaataaaagtgtctaagtcaaggaaacaccatga

SEQ ID NO: 942228 - DNA, 120 bp, Artificial Sequence
  ENSG00000271976_0 (sequence is synthesized)
catattagagtctacagatatgcctttcttacagcaatcctgcacccacataaaagctacattttcaatacaagattaaaaggtattctgcaaaatgtgcaaggttttcatgtctgctgg

SEQ ID NO: 942229 - DNA, 120 bp, Artificial Sequence
  ENSG00000271976_1 (sequence is synthesized)
tgtagctgtagtgatggcttcatgaatttttttcttttttgactatggtccttacgctggattcatttatcttgaaatggtgaacaatcacagctgcagaccctcaatttatggtacata

SEQ ID NO: 942230 - DNA, 120 bp, Artificial Sequence
  ENSG00000271976_2 (sequence is synthesized)
tcaagcaatttggctttttttcttgtaatgaaaaaaaaaagttttttttgctttttttcatgacactgcttcttgggagcactgccagcattactagtggcacttcgtatgggtcctaag

SEQ ID NO: 942231 - DNA, 120 bp, Artificial Sequence
  ENSG00000271976_3 (sequence is synthesized)
gtgttattgaaggtttacgatattgcactaaacacgaaaaataccagagaaccactggagatactttttactgtgatatgtaatttactggagacaggaactgctcgtttggagatggtt

SEQ ID NO: 942232 - DNA, 120 bp, Artificial Sequence
  ENSG00000271976_4 (sequence is synthesized)
agcatcacagggtgttttaagtcgatacttgcaacccttgagctcaccacagtagcaacaggaggtggctaggaaattattcacagcaggacagtacgcactgcaattaattgtatgcag

SEQ ID NO: 942233 - DNA, 120 bp, Artificial Sequence
  ENSG00000271976_5 (sequence is synthesized)
ttatgatttaataccacatctttatgctcacgtttctctcaactgtgaatggtgccatgtacagttggtatgtgtgtgtttaagttttgataaatttttaacttttaatagttaaaatag

SEQ ID NO: 942234 - DNA, 120 bp, Artificial Sequence
  ENSG00000271976_6 (sequence is synthesized)
ttaactattggtatggtaggaaatgataaagtagactagtatctgtatacattttctgcatttatgacatacctttttcttcatttttttcaatattttaattgaaaagttcatccgagt

SEQ ID NO: 942235 - DNA, 120 bp, Artificial Sequence
  ENSG00000271976_7 (sequence is synthesized)
ttcatctaagttttttcaaagtgatacaaatctccaaaaaattttccaatatatgtattgaaaaaatccaggtgtaagtggctctgcgcagtccaaacctgtgttgttcaagggtcaact

SEQ ID NO: 942236 - DNA, 120 bp, Artificial Sequence
  ENSG00000271976_8 (sequence is synthesized)
gtgtatgaatccaagcgaaagcttttcttaacacctcataagaactattttttaaaaaacaggaactagcatagagtaaccatcacaggtaaagtgtaatttgttatcagccatcttttg

SEQ ID NO: 942237 - DNA, 120 bp, Artificial Sequence
  ENSG00000271976_9 (sequence is synthesized)
cccatttcagtactggtagaaggctcaatggtaaaaataaaaacgggacagtcagaagatctggaagtcctgaccctgctttcacctggcatgtgtaatccagtcatgctcgtatcagtc

SEQ ID NO: 942238 - DNA, 120 bp, Artificial Sequence
  ENSG00000271976_10 (sequence is synthesized)
attgcctccagaggaatcttctttaaaaaaaaattcaaaatgttatttccttactaggatgtctttaaagaattataacccttaccgtgcctccacattagatagatccctgccaccagc

SEQ ID NO: 942239 - DNA, 120 bp, Artificial Sequence
  ENSG00000271976_11 (sequence is synthesized)
acccatgtggccaccagcagagacagcaggaggagaggcagccagcctcccggcttgcttttgtctggaaaaaacaaagcttattcacctttggaaaacaaatccacacttatctcttaa

SEQ ID NO: 942240 - DNA, 120 bp, Artificial Sequence
  ENSG00000271976_12 (sequence is synthesized)
cttatctcttaatttaaaaactaagacttggtatactttatagaggtttatttattttttattattttttagttttgagacagagtctcgctttgttgcctaggctggagtgcagtggcg

SEQ ID NO: 942241 - DNA, 82 bp, Artificial Sequence
  ENSG00000271976_13 (sequence is synthesized)
gcgcccagccactttgtagagatttagatccctttaaaaccatcagtcagaagctctttagagagtctgccaatcatatctt

SEQ ID NO: 942242 - DNA, 120 bp, Artificial Sequence
  ENSG00000271976_14 (sequence is synthesized)
tcagtcagaagctctttagagagtctgccaatcatatctttttccctagagtgtgcaggtcttgcattagattctcaaaagggatatgggacccaggaagttaagaacagtcctaaaatc

SEQ ID NO: 942243 - DNA, 120 bp, Artificial Sequence
  ENSG00000271976_15 (sequence is synthesized)
tctttggcttctttgtcctgatatgcaccggcattttcacagtaggaactagggtttctgtccagtttttttggttctttaaggaattaatgttattctgggtacaactgcttacataca

SEQ ID NO: 942244 - DNA, 120 bp, Artificial Sequence
  ENSG00000271976_16 (sequence is synthesized)
tagcacatatagatgacatttttacaggccgtcttgttagactgacatacatggaggatagtgccacccgcctcacaagaacatcaggtaagctcaggcacagagtgcccaggaatctgt

SEQ ID NO: 942245 - DNA, 120 bp, Artificial Sequence
  ENSG00000271976_17 (sequence is synthesized)
aaggcttcgcccacgcacaagtcagggctgccagtcacctgggttgtcttcactttatttggctgcgtctaatgacaccttccaacttttgaccccacccctggactgttgtgtaaacat

SEQ ID NO: 942246 - DNA, 120 bp, Artificial Sequence
  ENSG00000271976_18 (sequence is synthesized)
tgtatttctccatctgtaatgaaaaagctaacacatctctaactccagagacattttccagaacatgctgttctcaggcactagtgaggcggtaccattattcctcatttgttatccaaa

SEQ ID NO: 942247 - DNA, 120 bp, Artificial Sequence
  ENSG00000271976_19 (sequence is synthesized)
tgttggccatgtgaccacaccaaaagctcatcctgggccactgagactggtaattgaatcagaatatagtgaaatattcattctcatatatacccagccatcttacatctttggcttttt

SEQ ID NO: 942248 - DNA, 120 bp, Artificial Sequence
  ENSG00000271976_20 (sequence is synthesized)
tcagcagatccttgtggcactcagaacatccattttgcactgtgtatttttttcccttctgtgtatcctgctttgtaaagagtcacgagtggttttacaaataaagcctgttcttactca

SEQ ID NO: 942249 - DNA, 120 bp, Artificial Sequence
  ENSG00000271971_0 (sequence is synthesized)
acagagcgagactctgtctcaaaacaacaacaaaaaaacaaactcaccattgtacctgtgcttatgcaaggtttagtaggaacgtaaattggtttaacctttgtggacagaagttttaaa

SEQ ID NO: 942250 - DNA, 120 bp, Artificial Sequence
  ENSG00000271971_1 (sequence is synthesized)
ttggtttaacctttgtggacagaagttttaaaaatatatattaaaattaaaagtatgctctgaaggaggaactccacttctggtaatttatctcaagagaataactgggccagcacaaag

SEQ ID NO: 942251 - DNA, 120 bp, Artificial Sequence
  ENSG00000271971_2 (sequence is synthesized)
gctgctgtttaacaatgtgtaatgatgcagtgacagctacaattgcaaaaataacctagacattcaccaatgaggactggttaaatgaactagtataaccatactgcagaatatcataaa

SEQ ID NO: 942252 - DNA, 120 bp, Artificial Sequence
  ENSG00000271971_3 (sequence is synthesized)
tatggatctgtttcttggcataaatatatccataagttttaagaagagatgctatatatacggtggtcccattgatgtataactgttaggactaaaaatagtaccttcctcataatgatg

SEQ ID NO: 942253 - DNA, 120 bp, Artificial Sequence
  ENSG00000271971_4 (sequence is synthesized)
ttttgaggaattaatgagtttattcatgcaaaatgcttagaatggtacctggcacacagacaatgtttaagaaatgtttgttattgttattactatgtctctgtatatatgcataggaaa

SEQ ID NO: 942254 - DNA, 120 bp, Artificial Sequence
  ENSG00000271971_5 (sequence is synthesized)
atgcataggaaaaatctggaaggataaaataaaaaatgaatatttttgggtggtgagactaaatttttgtctaattttatggataagttttatgatttatatttataataaaaataaagc

SEQ ID NO: 942255 - DNA, 120 bp, Artificial Sequence
  ENSG00000271973_0 (sequence is synthesized)
catcccccaccaggaccccatactttcctcccatgggtttcctatggaatgttgctgcttcaacttctgagagcctcttgctggggggccccatccctagcccttgcctccctgtgctgc

SEQ ID NO: 942256 - DNA, 120 bp, Artificial Sequence
  ENSG00000271973_1 (sequence is synthesized)
agcaccccaataagaaagaaaaagtcatgaccagaagtcagtgtcagtgattgctgatgtgtggaaacatctgatgaatgaagagtttgggtaaaaaataaagggaactgatgaaaacca

SEQ ID NO: 942257 - DNA, 120 bp, Artificial Sequence
  ENSG00000230415_0 (sequence is synthesized)
ggtgtggccagcacgtcttgccaagaccccaccaccccacccacccgcatctgtggccttctggaaccgagctgtggcctggggttccatggagcaggtggggcgcggaggaactgagct

SEQ ID NO: 942258 - DNA, 120 bp, Artificial Sequence
  ENSG00000230415_1 (sequence is synthesized)
gtatggaggaactggggttccgtggagcaggtggggcgcagaggaaccgagctgtggaatggggttccgtggagcaggttgagtgtgccggtcgtggacgggtcgtgggcgggactcccc

SEQ ID NO: 942259 - DNA, 120 bp, Artificial Sequence
  ENSG00000230415_2 (sequence is synthesized)
agtgtgtcaccactgaggcatcttcgccctcttacgtgtctctgtttctctctctagaagtccaacacctccgagaggactcaaaacacagagtgaccagctcctatgtgcatttcctgg

SEQ ID NO: 942260 - DNA, 120 bp, Artificial Sequence
  ENSG00000230417_0 (sequence is synthesized)
agatgcatcgaactcacagaacatcgctccccagctgctggctcgcggttctgagagtgcctgaatagaaaaccactcatttcccttcgcaaaagaggcgcccaaagcagatatttcaat

SEQ ID NO: 942261 - DNA, 120 bp, Artificial Sequence
  ENSG00000230417_1 (sequence is synthesized)
atattccaatttagccgagggaagccagaacatggatgttgttgccaaggaaaccacctccttcctcctgtgtgctgtgcatacgtgtatcacttcatctctctgctctccaagcttgaa

SEQ ID NO: 942262 - DNA, 120 bp, Artificial Sequence
  ENSG00000230417_2 (sequence is synthesized)
tctagatctgacgtggatatcctgccacagttccgaagtctacctagtgccccagccgaacctgccctggctcctaggtggggtatggacatctgtgacatccctccccaacaccccacc

SEQ ID NO: 942263 - DNA, 120 bp, Artificial Sequence
  ENSG00000230417_3 (sequence is synthesized)
aagctgggctgcaagacgggttatggtggccccatgacttccttccttggttcctgaatgcctccgtctcaacttgcatgaaatgtcccgtgaaattcctggagaggcttccaggccata

SEQ ID NO: 942264 - DNA, 120 bp, Artificial Sequence
  ENSG00000230417_4 (sequence is synthesized)
tgctcgcagatctggtgctcacatgtcagaaatgatgtggctcattcttccctgcctctgccaccatatgcatgtgcccctaatctgaccagcagatcagcagcttgggggaggacatgc

SEQ ID NO: 942265 - DNA, 120 bp, Artificial Sequence
  ENSG00000230417_5 (sequence is synthesized)
cggctggcagaaagctgcctggcaaatcttgacaccctggaagagagaagatggcgatggagattcactttctaagaatgcattcctttgttctcaaagaaaataatggatttggtgttt

SEQ ID NO: 942266 - DNA, 120 bp, Artificial Sequence
  ENSG00000230417_6 (sequence is synthesized)
tcttgaacttggggcatttaaatgcatctctaaatcaaactgcagcagagagctcaggttcaggtgatggtctgtcacttacctctcctgtcgccgtggacaggccatctcacctgcctg

SEQ ID NO: 942267 - DNA, 120 bp, Artificial Sequence
  ENSG00000230417_7 (sequence is synthesized)
tcttccatttctttagctggccacttggataccaatagagttgtgcttactgtgcttaaatattgcttttccaggggaggtttgatgactttgtctactcccatactcctcagatgccgg

SEQ ID NO: 942268 - DNA, 120 bp, Artificial Sequence
  ENSG00000230417_8 (sequence is synthesized)
aaacgacaggctctgtgtacccctgtggaccagccagattcttgagcagattttcctgatctgtttaccaggaaaatggtatacccagcagtttcggcaattccagagtccttggtggcc

SEQ ID NO: 942269 - DNA, 120 bp, Artificial Sequence
  ENSG00000230417_9 (sequence is synthesized)
tggcagtaatggtgtctctccagtcacccagatgtccctatacagctctctacatcagggtttggccatgggccaaatccagccaccacctgtttttgtaaataaaagtgtattggcaca

SEQ ID NO: 942270 - DNA, 120 bp, Artificial Sequence
  ENSG00000230417_10 (sequence is synthesized)
gggaaggatttggagagcggaggaatgaaggagagcagagaggagaggcttggagatcaaaacctaaaaaggtgggaatgaaagaagctcctaaccctcctggcttttttcccaaagcca

SEQ ID NO: 942271 - DNA, 120 bp, Artificial Sequence
  ENSG00000230417_11 (sequence is synthesized)
ggaggcagctcctgaatggtggattttggactactggtgaggctgtcagcaaagggcctggcccagagagatgctcaagagtaggatgaaaagaccgtgggcttcttcctctgcaaaagg

SEQ ID NO: 942272 - DNA, 120 bp, Artificial Sequence
  ENSG00000230417_12 (sequence is synthesized)
aaaggtttgggactgatggatgctgaaaagtctagatcttcataatcctcaacagcttcactgccactgcacacacaaaatgagtgtgccctatatttccagccctctgatgaatacgaa

SEQ ID NO: 942273 - DNA, 120 bp, Artificial Sequence
  ENSG00000230417_13 (sequence is synthesized)
atccctcaatcttaaacatacacattttattgctttttattatacaataatacatatttactattgaaaatacagataagaaaaaagaaaatggttcataataatactacccaggtttaa

SEQ ID NO: 942274 - DNA, 120 bp, Artificial Sequence
  ENSG00000230417_14 (sequence is synthesized)
aaaatactattcagccttatgttgaagaatctgactcttttcctatgcaagcatgtatttcaagcaaaactggacacttcatgtgtaccttgttttgtgatctttttttcccaaattaat

SEQ ID NO: 942275 - DNA, 120 bp, Artificial Sequence
  ENSG00000230417_15 (sequence is synthesized)
atataatcaatatctttttgtatcaatcttcaatcctttcttctgtcacttatttttaatggttaacagtcatctactatatagatattctgtaatttattaaagtgatccctcattctt

SEQ ID NO: 942276 - DNA, 120 bp, Artificial Sequence
  ENSG00000230417_16 (sequence is synthesized)
aagcgcatcgtgagtaggcttttggagtctgatctatcgagctgggtatgtttggaaagctacagagcagtagccatagaaagactgcgtgagacagagtcctagcctatctgtccggcc

SEQ ID NO: 942277 - DNA, 120 bp, Artificial Sequence
  ENSG00000230417_17 (sequence is synthesized)
gctctgcgcagaccagcactgtctcctccttcatccacagagaggatgaaagaacatggcaagaggaagactcacagaaccccacagagaagctttgagaattgggctgtctggctctcc

SEQ ID NO: 942278 - DNA, 120 bp, Artificial Sequence
  ENSG00000230417_18 (sequence is synthesized)
ttctgctgtaaacatggcccatctgggagaagcccaggtgccacgttttgaacagctctgaaacttaaagctcagaaggctttgaaatgcaaatattttgaaggaaacataaggaggaac

SEQ ID NO: 942279 - DNA, 120 bp, Artificial Sequence
  ENSG00000230417_19 (sequence is synthesized)
atgaatatctccagatctcagagaggatgtctgacccttgagccagaagaaggcccatttactctgtgttcactgattaatcctgaatgccaaatgtggtgcctgatacacaggaggttc

SEQ ID NO: 942280 - DNA, 120 bp, Artificial Sequence
  ENSG00000230417_20 (sequence is synthesized)
cttgaatttctacgtgaattttaggatcagcttgtccatttctgcaaagaagccagctgagcttttgattggaattgcattgaatctgtagatcaatttggagagcatttgcatcttaac

SEQ ID NO: 942281 - DNA, 120 bp, Artificial Sequence
  ENSG00000230417_21 (sequence is synthesized)
agtattaagtcttctcatccatgaacatattatatttttccatgtatttagatctttaattgccttcaacaatgttttgtagtttttagaatataaatcttgcacttcttttgttaaatg

SEQ ID NO: 942282 - DNA, 120 bp, Artificial Sequence
  ENSG00000230417_22 (sequence is synthesized)
tattccaaagtatttcttttgacactattgtaagtgaaattgttttcttagtttcattttcagattgttcactatatgatatcacttttgtggcatagcatgtgattgctcatgaatggt

SEQ ID NO: 942283 - DNA, 120 bp, Artificial Sequence
  ENSG00000230417_23 (sequence is synthesized)
gctgatacactgatttttaatgacttgtttagatagacaaaaacttcaaaataagatctgccttatgcacactaggagcatcctagcatctttgaattctgagacgtcattttattacaa

SEQ ID NO: 942284 - DNA, 120 bp, Artificial Sequence
  ENSG00000230417_24 (sequence is synthesized)
gaaaccaaggcccagggacttcaagcaaccataagcaacagccaataagcagaagagcctcttctgcactgacttgtatggacttccagccttgctcattttccttttgcagcctcaacc

SEQ ID NO: 942285 - DNA, 120 bp, Artificial Sequence
  ENSG00000230417_25 (sequence is synthesized)
ttatctagattttaagagacagccctttttgtacttcctcccaccccgcaccctcacctcttactcttattaagtttaaagtgcaaaaatgatgcaattaaaacctatattgcctctcga

SEQ ID NO: 942286 - DNA, 120 bp, Artificial Sequence
  ENSG00000230417_26 (sequence is synthesized)
ttttttttttttttttttttttacaaaaatgtggacctaggtacataatgtgtgctatgcataggaaaaagcctggagaacttgcacgaaatggtcacactgtttttcagtgatggtaag

SEQ ID NO: 942287 - DNA, 120 bp, Artificial Sequence
  ENSG00000230417_27 (sequence is synthesized)
ataaagggtaattttaaaaattcctattcttttccagattgtttctaacactgcgcatgcctttcggagacaaattttaaaaataaacattatttttaaaaggaaacaaacaaacaaaac

SEQ ID NO: 942288 - DNA, 120 bp, Artificial Sequence
  ENSG00000230417_28 (sequence is synthesized)
caaacagaagggaggctgggtttcttggggatttcgggagtgcctgtgtctccacgacctgggcagtgctcttctgagaggactgagggctggggaggcagagagagcaacgacaggcta

SEQ ID NO: 942289 - DNA, 120 bp, Artificial Sequence
  ENSG00000230417_29 (sequence is synthesized)
ccagcattgagaaagaaggcctcaaggccacattgagaaggacactacgctctggatcacaggctgagccctgcattcttgacattggagcccttcgggagtgccagaacgagcagtccc

SEQ ID NO: 942290 - DNA, 120 bp, Artificial Sequence
  ENSG00000230417_30 (sequence is synthesized)
tctcctggaggagcctgccttcccaccacggaggctaacaccacaacagccacagtgagccaccccttctgcccatcttcttacgtgtcaagcactgtgttcagtgccttcacaggtaac

SEQ ID NO: 942291 - DNA, 120 bp, Artificial Sequence
  ENSG00000230417_31 (sequence is synthesized)
ttcgataagtcacgatgggcatgctgcgactaagttggtactgatattctattggttttaaatggggaaactgaggctcaggaaggttcagtattttgctggaggtcacacagccaggca

SEQ ID NO: 942292 - DNA, 120 bp, Artificial Sequence
  ENSG00000230417_32 (sequence is synthesized)
cctcttcttgccagaggcgtgtgtgtgtgcacagacacatacacgctgagtgacagagggacaaaaacagtgagcacccacccaggcactgtgctcgaaattcttcctgcaaacctgcaa

SEQ ID NO: 942293 - DNA, 120 bp, Artificial Sequence
  ENSG00000230417_33 (sequence is synthesized)
aagagcaagctcagtgtttccttcaagcagcatcgtggacagattcctgccagacccttcagagcaagcaccccacacccctagcccagggtctcttcatcgatagggggtgatctgtct

SEQ ID NO: 942294 - DNA, 120 bp, Artificial Sequence
  ENSG00000230417_34 (sequence is synthesized)
agagcggaggaatgaaggagagcagagaggagaggcttggagaaaaatgagaagtctctccagccccaatgacggcaagcaccctggagctgagggggctgagtggcggctgtgcccttt

SEQ ID NO: 942295 - DNA, 120 bp, Artificial Sequence
  ENSG00000230417_35 (sequence is synthesized)
ggacaggcagcagctcccagttttctcacctaggggtagctggtggccaagaggaaagaggagttgtcggacagggctttgctctgtctcccaggctggagtgcaggggtgccatcatag

SEQ ID NO: 942296 - DNA, 120 bp, Artificial Sequence
  ENSG00000230417_36 (sequence is synthesized)
gatttggagagcggaggaatgaaggagagcagagaggagaggcttggagatgaggaaactgagtctcagagaagtcgagggactggctcagagatgtacagcatggcattgctggagccg

SEQ ID NO: 942297 - DNA, 120 bp, Artificial Sequence
  ENSG00000230417_37 (sequence is synthesized)
gcctggaagacaagcagtctccctccaattgcacactgttttctctgaggctctgcattgttggaggaagggtcagaggggctggagaggaagaaacaatgcaaatatgaggcagcagaa

SEQ ID NO: 942298 - DNA, 120 bp, Artificial Sequence
  ENSG00000230417_38 (sequence is synthesized)
gggaaatagaggtactgggggcttccagcctcatgctgcttgctctctcctgaatccatcgttggtctttctgtcctaatccgaccactccatcgccagcctccattcctctgaatgttg

SEQ ID NO: 942299 - DNA, 120 bp, Artificial Sequence
  ENSG00000230417_39 (sequence is synthesized)
atagaagagctccggactctttccagctttccagacttttccactcacacagactcaagggtcctcccaactgtcttgtgaaaagaggccatcccattccacaggaggggaaactgaggc

SEQ ID NO: 942300 - DNA, 120 bp, Artificial Sequence
  ENSG00000230417_40 (sequence is synthesized)
ttggaaaaggcacatggtcccatgtagcgtcactgtggctcttcggactcttccaggtccctctgcctgtcctgggcctgccattgttccacctccaggtctgcccactgcctgcacctc

SEQ ID NO: 942301 - DNA, 120 bp, Artificial Sequence
  ENSG00000230417_41 (sequence is synthesized)
ctgccacgacctccagcagccctttagaccaacgtcctaaagcgataatgccatgatgttcctggctttttcaaaacccttttcctagagtgtgttaaccagaatggcagtcccacgagg

SEQ ID NO: 942302 - DNA, 120 bp, Artificial Sequence
  ENSG00000230417_42 (sequence is synthesized)
atctctgtgatgaaagggcttcatggtcaaatagtttgggaaacgtggcttcctttgtcccttccttctcagtttgccaaatttaattatgccacacccccatgcaccttcttttgtttc

SEQ ID NO: 942303 - DNA, 120 bp, Artificial Sequence
  ENSG00000230417_43 (sequence is synthesized)
atgatatcattatttaataccccattttggaatattatctaagaaatgtggcctgaggaatgaagttcaaatctctcctcttggcgtccaaagggcttcaccatcagatctcaaccttgt

SEQ ID NO: 942304 - DNA, 120 bp, Artificial Sequence
  ENSG00000230417_44 (sequence is synthesized)
tttccaccgtgcctctcttggacatccagagcccttgccctcccctcagtagtccctggtgtccacaaaatccatggtctcaccctccctgtttttgctcagacctctcaactcccgtca

SEQ ID NO: 942305 - DNA, 120 bp, Artificial Sequence
  ENSG00000230417_45 (sequence is synthesized)
tgtatctcagagctctgtttctccagggacacccccaacctctcaccccttggcggtgcactgactgctgcatctcactcagccattggttgggtgcaaagtaaattttctttccaggca

SEQ ID NO: 942306 - DNA, 120 bp, Artificial Sequence
  ENSG00000230417_46 (sequence is synthesized)
caccccacacccctagcccagggtctcttcatcgatagggggtgatctgtctgcccctcactgttttctccaaatagagataagatctcactatattgccctggctggtctcaaactccc

SEQ ID NO: 942307 - DNA, 120 bp, Artificial Sequence
  ENSG00000230417_47 (sequence is synthesized)
gtgttcaagtcatctgcctgcctcgacctcctaaagggcaagcgggattacagccttctccacagcccagccacagtgagggagtcatcagcactggaacccggggtccacggccttgga

SEQ ID NO: 942308 - DNA, 120 bp, Artificial Sequence
  ENSG00000230417_48 (sequence is synthesized)
ggatccggaccctccgcatttgaggaacttggccttcagtcagggagccaagaagtccctgccaatcaaggagggggtgtgggctggtggggggggggcagccttggggcacgggagctg

SEQ ID NO: 942309 - DNA, 120 bp, Artificial Sequence
  ENSG00000230417_49 (sequence is synthesized)
tctaacactgtgtgatttggggaccatccaactcaaatgaaagaagccaagccatgcagcgagccaccccctccccaatgtggggtaccccctgcccccgcccagctcccctgccctccc

SEQ ID NO: 942310 - DNA, 120 bp, Artificial Sequence
  ENSG00000230417_50 (sequence is synthesized)
agctgaggggggatcgccgcctggtgatctcagcctcccctccaagtgggctgtgaagtgtctaatccaggctttcatctggcatccacaattataatgtcaagattgaataatctgcct

SEQ ID NO: 942311 - DNA, 120 bp, Artificial Sequence
  ENSG00000230417_51 (sequence is synthesized)
ttatctcccgggtgacagccatgtagaaacttcaaaagaaacagttttgctggcatctaacggcttttgttaattactatatcccaaagaaaatgaaataaaggagggagaaaaatgata

SEQ ID NO: 942312 - DNA, 120 bp, Artificial Sequence
  ENSG00000230417_52 (sequence is synthesized)
gatggttacaaagtctgacagaggatacagttacagggacatggcaaagccagaaaaacgaggaccgggagtccagctttcaacaaagccaatctattcaatctccagactaccctttgt

SEQ ID NO: 942313 - DNA, 120 bp, Artificial Sequence
  ENSG00000230417_53 (sequence is synthesized)
accaaggaagtcacggggtgactccaagcagggccccctttgcattcagcctgcccttctctcagcccagataagagactggagacacagagaggctccagaacttacccaaggtcacac

SEQ ID NO: 942314 - DNA, 120 bp, Artificial Sequence
  ENSG00000230417_54 (sequence is synthesized)
ccgtgagtccagatgaagagagggcttcaaggaaaatccattcagtgccaggatgctaccagctccctggggcatgggactgccatcctctcctaggcgtctgtcctgatacttccaatg

SEQ ID NO: 942315 - DNA, 120 bp, Artificial Sequence
  ENSG00000230417_55 (sequence is synthesized)
taagtgtggaaaaactcaagtttcataagttttgctcatgtgctctgccttggagagggtgggaagtagaacagacactggcctcatgttttgctgttggttacctctcaggcatgtgat

SEQ ID NO: 942316 - DNA, 120 bp, Artificial Sequence
  ENSG00000230417_56 (sequence is synthesized)
ccttgtaccggaggtttcacatcacgtagcccctgcacagctgatctgtgaatgggaaattgggttgggccatcaccaggtccccttccagttaaatatttgtcccaagtcccagatgat

SEQ ID NO: 942317 - DNA, 120 bp, Artificial Sequence
  ENSG00000230417_57 (sequence is synthesized)
ttgatatgagagccccatgcctaatgctgtttgtggattcattgaatcaattattgtttcgttcattcaattcattcaacaaatagcttctctgtgtctactactatttgcactcaattc

SEQ ID NO: 942318 - DNA, 120 bp, Artificial Sequence
  ENSG00000230417_58 (sequence is synthesized)
tcagagaagtaaatgtctaaagtacccacttaataacttaaaagctgattttaccaatttcatttcactgtaaggcctcccaaaggattaacatgttagtgtgcaccccctctcgcacca

SEQ ID NO: 942319 - DNA, 120 bp, Artificial Sequence
  ENSG00000230417_59 (sequence is synthesized)
ctttgattcttgctgaggcaccagcaatttactgcggccactgtccttgcatcgtcaatgcattgcagcaccaccaccagagccagcagcaaatcgcatctcagtaacactgtggagagt

SEQ ID NO: 942320 - DNA, 120 bp, Artificial Sequence
  ENSG00000230417_60 (sequence is synthesized)
ctttcacctcgtggacttcttgaaagggtctggggggaccctcggaagtgcacggaccatgctttgagaagcactgtgttggacacagtcggggatgctaggaagtcacggggtgactcc

SEQ ID NO: 942321 - DNA, 120 bp, Artificial Sequence
  ENSG00000230417_61 (sequence is synthesized)
aagcagggccccctttgcattcagcctgcccttctctcagcccagcagtgagatggtggtgctgagccctgaacgctgtctgcttcctagaagtccctggcagcgtccccacccccacgg

SEQ ID NO: 942322 - DNA, 120 bp, Artificial Sequence
  ENSG00000230417_62 (sequence is synthesized)
aggatttggagagcggaggaatgaaggagagcagagaggagaggcttggagaaagaagagggttgtcatctcagttgacacaggggtggaggcccgtgcgtgggcccctgaagtttctag

SEQ ID NO: 942323 - DNA, 120 bp, Artificial Sequence
  ENSG00000230417_63 (sequence is synthesized)
ggctgactcttcctaattttctgtgtggccttgaacaaatcctctctctggatgtcactcgcacctaagaagccagatacttcagatgaggaaactgagtctcagagaagtcgagggact

SEQ ID NO: 942324 - DNA, 120 bp, Artificial Sequence
  ENSG00000230417_64 (sequence is synthesized)
gacagattcctgccagacccttcagagcaagcaccccacacccctagcccagggtctcttcatcgatagggggtgatctgtctgcccctcactgttttctccaaatagattgtttctaac

SEQ ID NO: 942325 - DNA, 120 bp, Artificial Sequence
  ENSG00000230417_65 (sequence is synthesized)
gttttctccaaatagcatctccaaatggactagactcgacaagcaaacagtctgcagtggaccccttgggtcatccattctgatggaaacagaaatagaattccagcccggtggagtgga

SEQ ID NO: 942326 - DNA, 120 bp, Artificial Sequence
  ENSG00000230417_66 (sequence is synthesized)
gaaggctccaggagggcgtcgggcccaaccaccttgcgttatggagcacagagagggattctgctgtggtcacatagcacctaagtggttgcagcagcctcagaacaggctgtcctgcct

SEQ ID NO: 942327 - DNA, 120 bp, Artificial Sequence
  ENSG00000230417_67 (sequence is synthesized)
actacatgtcaggaagtgctattctaaaagggcttcacatgtattcattcatttcatcctcctgacaatcctgtgatacaggtgtttttgttatgagtcctatttcaacaaagcacaagt

SEQ ID NO: 942328 - DNA, 120 bp, Artificial Sequence
  ENSG00000230417_68 (sequence is synthesized)
gaatacaccttctccacagcccagccacagtgagggagtcatcagcactggaacccggggtccacggccttggaggatccggaccctccgcatttgaggaacttggccttcagtcaggga

SEQ ID NO: 942329 - DNA, 120 bp, Artificial Sequence
  ENSG00000230417_69 (sequence is synthesized)
ccatgacttccttccttggtaagccacaggacttccttgttaactgctttgctgttggtcattgcagagaaatagggaacaataaaaacaacctgaggtgtggcaaaggctctaggactg

SEQ ID NO: 942330 - DNA, 120 bp, Artificial Sequence
  ENSG00000230417_70 (sequence is synthesized)
catcatctgctgaagctccagtccctgcgctgcatctcctgagtggcatctgtgatggcaaacaaaggctccttgggcttcacgctctgctttctttctaagtggtacttaccacccgct

SEQ ID NO: 942331 - DNA, 120 bp, Artificial Sequence
  ENSG00000230417_71 (sequence is synthesized)
gcatcccagccttcttctgaccagcttcctcttctgataggcttatttccatgaagtttttcagagttagaagcatgaactttagaaccagatgatcccggttggaatccatctctggca

SEQ ID NO: 942332 - DNA, 120 bp, Artificial Sequence
  ENSG00000230417_72 (sequence is synthesized)
cttgctatatgaccttggataagttacttaacctttctgtgtctcagtttctttttctataaaatgggcataataaaatctatctagcatagttattgtaaggattaagtaagttattat

SEQ ID NO: 942333 - DNA, 120 bp, Artificial Sequence
  ENSG00000230417_73 (sequence is synthesized)
atgcagagctcttggttcacagttagtgccatttaagcctttctgtcattcttactgttaccattttcctggcatgtcagtctgatgatgcagacgaggcaggaactttcgtctctgcct

SEQ ID NO: 942334 - DNA, 120 bp, Artificial Sequence
  ENSG00000230417_74 (sequence is synthesized)
ctcgtggactgcccaatcagctccacggaactcagccatgcctgcagtgctgcaggcctcgctttggactgctggaggctgagaagtcaatggatgttgcttgggcattttggggggttt

SEQ ID NO: 942335 - DNA, 120 bp, Artificial Sequence
  ENSG00000230417_75 (sequence is synthesized)
ccttatgcaggaggaagatgacaatcattgtggaagcagaaggttgtcatggaaatgcacctgttccaagtcattgcaccctgggctctgggctggctctgcacgggcctgccatgcact

SEQ ID NO: 942336 - DNA, 120 bp, Artificial Sequence
  ENSG00000230417_76 (sequence is synthesized)
cctcactgccagcctgccattgcggctttctgtctctggtgtgaacaggcaatcgagctttcctggtctcctgagctactgtgaacgtggcagaagatagtggactctgaataacattgg

SEQ ID NO: 942337 - DNA, 120 bp, Artificial Sequence
  ENSG00000230417_77 (sequence is synthesized)
aaacaactacttcctggacggccactgtgtgcatggcctgcgggagggtgagggcaagaggactgatggttactgggaatcttcttcatggccaggcttctgtgtgtcctctcacttaat

SEQ ID NO: 942338 - DNA, 120 bp, Artificial Sequence
  ENSG00000230417_78 (sequence is synthesized)
cctccaacagcactgtgaggaaaatacagcatcccacctcacaggcgaggaagcttaagttgaaggaatgttaaattgcctgctctgagcctcacagccgggaggtgacagccccaggat

SEQ ID NO: 942339 - DNA, 120 bp, Artificial Sequence
  ENSG00000230417_79 (sequence is synthesized)
tggcggccagggtttgtctgcctttaaaacttatgtcatgtccttctgtgttatctcggtctgtacaggctgctacagcaaaataccatagcctgggtagtttatgaacaacagaaattt

SEQ ID NO: 942340 - DNA, 120 bp, Artificial Sequence
  ENSG00000230417_80 (sequence is synthesized)
atttctcatagttctggagcctggaagtccaagatcaaggctctcgcaggttcagtgttcggtgaggacccacttccttattcatagacgtccccttctcactgtggcctcacagcaagg

SEQ ID NO: 942341 - DNA, 120 bp, Artificial Sequence
  ENSG00000230417_81 (sequence is synthesized)
ggtcagggttctctctggggcctctttaaatagggtcaccaatcccattcatgagggctgtacccccatgacctaatcccctcccaaaggccccacttccccataccatcaccttggggg

SEQ ID NO: 942342 - DNA, 120 bp, Artificial Sequence
  ENSG00000230417_82 (sequence is synthesized)
ttaggattctaacatgaattttggggggacacaggcattctgatcatagcatatgtgtagttgctcctggcccgctggggaaatcaccgtctccaagcatggctcccatctggttaccct

SEQ ID NO: 942343 - DNA, 120 bp, Artificial Sequence
  ENSG00000230417_83 (sequence is synthesized)
gggtggccaaggtcagcagaggtgctttgccaactgattggcacccacactacttctgtccaggtgggctggggcgagggttgggtcacagtgggactctgtggggctccggggactgtc

SEQ ID NO: 942344 - DNA, 120 bp, Artificial Sequence
  ENSG00000230417_84 (sequence is synthesized)
agctgccccggggctggaggtcctgctgctctgtgcccataggcacctcctgggaatctggcgacttgcatcagggcccggaactcaccctgacagttctttcagctcttgtcttttcct

SEQ ID NO: 942345 - DNA, 120 bp, Artificial Sequence
  ENSG00000230417_85 (sequence is synthesized)
cccctacctacctgctcatctcgctttcacacacaaagcctcccctgcactccccgctcccctcctcaatccctttcccggcttttgtactttatgatgccgtgacttgggtgaggaaac

SEQ ID NO: 942346 - DNA, 120 bp, Artificial Sequence
  ENSG00000230417_86 (sequence is synthesized)
tcattaaagtcattattccgtgcacagaaatgtgtctttcatcccattcatatttaatgttcctcccacttgatcttttgatgctttttaattcttgatattacatgacatacacacaca

SEQ ID NO: 942347 - DNA, 120 bp, Artificial Sequence
  ENSG00000271978_0 (sequence is synthesized)
atgaaaagaccatgcacactggagcaggacagttgcaattttggcttccctctctcctgactctgggatcttgagtaaattactccaagtccttaagcctctgtttccacatctggaaac

SEQ ID NO: 942348 - DNA, 120 bp, Artificial Sequence
  ENSG00000271978_1 (sequence is synthesized)
tgaacatactaacaccgacctctcagagttgttgggacaattaatcaggaacatatgtggaagcacagtgccagggacaaggcattcatttgataaatagtgatgtctttccttcctttc

SEQ ID NO: 942349 - DNA, 120 bp, Artificial Sequence
  ENSG00000271978_2 (sequence is synthesized)
ccaccccttttcttcctccctgcagagacactcaaactgggattctggtcatggccaggtgactgccatgaggacagaggcatctggcgttagttcctggatgaaggctgtacaggaagc

SEQ ID NO: 942350 - DNA, 120 bp, Artificial Sequence
  ENSG00000271978_3 (sequence is synthesized)
atggtgccagcatctgcttctgctaaggggttcaggctgcttccgctcatggcagaaggcgcaggggagccggcgagtcacatggtgagagaggaagcaagagagagaggaggagatgcc

SEQ ID NO: 942351 - DNA, 120 bp, Artificial Sequence
  ENSG00000271978_4 (sequence is synthesized)
aggctctttttaacaatcagttctcatgggaactcagaagagcaagaactcattcattactgcaaggatgactccaagccattcatgagggaccagattccataacccaaacaccgccca

SEQ ID NO: 942352 - DNA, 120 bp, Artificial Sequence
  ENSG00000271978_5 (sequence is synthesized)
ccaggccccatctcccacactggggatcacatttcaacatgagacttggatgggacaaacatccaaactgtatcagacatcatctcacgaatccacaaatttagctgctttcccttcttt

SEQ ID NO: 942353 - DNA, 120 bp, Artificial Sequence
  ENSG00000271978_6 (sequence is synthesized)
tctgtagtttcacaacctactatagaagcactttctagaggggcctgcagaagtgaatttcctcttccatggcctcgatgtatttggctgttgattcagtatcactgaacttactgccaa

SEQ ID NO: 942354 - DNA, 120 bp, Artificial Sequence
  ENSG00000271978_7 (sequence is synthesized)
cagcactacaactcacgctgaaggcacctcatccagcacaggtattgtctccacaggcacatcgcagcctcctgcactcagagacagtagacagcacttcagcaccgtgcctggggacat

SEQ ID NO: 942355 - DNA, 120 bp, Artificial Sequence
  ENSG00000271978_8 (sequence is synthesized)
tttaaacagcaaaatcaccaacaaaagtacaaaaatgcaaaagcatggctctggatagacagcaggaaggaccacttgtttctagtgtgagagctgggacaagaaagcagaggggtcacc

SEQ ID NO: 942356 - DNA, 120 bp, Artificial Sequence
  ENSG00000271978_9 (sequence is synthesized)
ttgcttcacctcagccgggaacagatgccttggactactcagattttttccctgctctgtacaagtctgtgaatcactgtgaagccacaagtattgatttggtttacaaacacattttag

SEQ ID NO: 942357 - DNA, 120 bp, Artificial Sequence
  ENSG00000271978_10 (sequence is synthesized)
tgaagaggtgaatttgcaggtatggaatctagaaataatgagatcggactgtaaggctggagacgaagatggagaggctgctgccaagtgacaggctggctcttgtcccagaagctgtgg

SEQ ID NO: 942358 - DNA, 120 bp, Artificial Sequence
  ENSG00000271978_11 (sequence is synthesized)
actgccactggagtgtttcaagcaagggagtggcttgatctgtgttgtaggaacagcaccttttctcaacttaaaagtgtggcttgaagagaggaagacgggagactggttaggagatgg

SEQ ID NO: 942359 - DNA, 120 bp, Artificial Sequence
  ENSG00000271978_12 (sequence is synthesized)
atgtatccaggtgaggatgagggtgggtgaacggagccagggatagaggtcctcaggggagctgacctgagacccctgtgagtctcgggtcctggcaatggggcggcggtgagtggtgag

SEQ ID NO: 942360 - DNA, 120 bp, Artificial Sequence
  ENSG00000271978_13 (sequence is synthesized)
ggctggggcacatgctggggtgtagggcagtggtcaagggccctagccttgcagtcagacacccctggcgggctgtgtggcttagacatgctcctccacttccctaagcctagttgtttc

SEQ ID NO: 942361 - DNA, 120 bp, Artificial Sequence
  ENSG00000271978_14 (sequence is synthesized)
atgtctagcataaagattccgtgtggcaggaagaacacacccccgggagtgattctgagattgaaatgagtgctggtgcttttcacctaaacaaggaaaacggggagagaagcagtatgt

SEQ ID NO: 942362 - DNA, 120 bp, Artificial Sequence
  ENSG00000271978_15 (sequence is synthesized)
ggggtgggagggagaagagtctgtctgggcgtggggatttggacgtgcctctggacacccatggacaaatatcctgaggccatctgatgttttccgggggccacgggagtgggggagggg

SEQ ID NO: 942363 - DNA, 120 bp, Artificial Sequence
  ENSG00000271978_16 (sequence is synthesized)
aaggtggggcggagacacagacttgggcattaccagcaggcagggggctgctaccgccatgaagagtgggcagtgccaggatcagagggccggggtaaagcctgcggaattcccacattt

SEQ ID NO: 942364 - DNA, 120 bp, Artificial Sequence
  ENSG00000271978_17 (sequence is synthesized)
cagaagaggctgggaaggaggtcaaggaagagcagcaggaggaggagaaagcaggagggtgtggagggacgggaggcggggaggaggaattccaggagggagtggccggggtgactgttc

SEQ ID NO: 942365 - DNA, 120 bp, Artificial Sequence
  ENSG00000271978_18 (sequence is synthesized)
tgaaagcatggactggaagccacagcacatttgggctgcaaggaacccgagagatcttctagtctaatcctctttcagtctccatccccgtccggatgaagacagcgagatccaaaagta

SEQ ID NO: 942366 - DNA, 120 bp, Artificial Sequence
  ENSG00000271978_19 (sequence is synthesized)
aagtcagttgtactgtgacttcctagcaggataccctaactcctaattcataataaaactacagacattctcaattcaaaattcttcctattcagtcacactggactttctcccaatgtg

SEQ ID NO: 942367 - DNA, 120 bp, Artificial Sequence
  ENSG00000271978_20 (sequence is synthesized)
acaaaattattgagattttattgacttactgaacaactgtggtctttgccatgtactaagatactgtgtagtcaaactgcgcctctgaaatctatttttattgtacatttaacaaatttt

SEQ ID NO: 942368 - DNA, 120 bp, Artificial Sequence
  ENSG00000271978_21 (sequence is synthesized)
gctgtaaacaataagtttaaaaacaatagtcataactcattaaactgtatcttttaattttaatatgttattatacctcaatgaaactcagttttaaaaaacagtgaataaaaagttgag

SEQ ID NO: 942369 - DNA, 120 bp, Artificial Sequence
  ENSG00000271978_22 (sequence is synthesized)
ctattaaaactaaaaagtaattatttgctagtttgtatacacagacccaagaaatagaaatataggaatatttggaacttgctccttcttacagccttgagggaaccgcttatcccttat

SEQ ID NO: 942370 - DNA, 120 bp, Artificial Sequence
  ENSG00000271978_23 (sequence is synthesized)
tacgccttggtttccctcaatgaaactagaaaatattaccttgcaagacgctcatagttaattaatacgtatgaagctcttgaatctaaatattaaatacttgatgatattgtctggtaa

SEQ ID NO: 942371 - DNA, 120 bp, Artificial Sequence
  ENSG00000271978_24 (sequence is synthesized)
atattatctaactgcatttataaatactagcatttttacagcctagtggtaattacaaagtatagcccatttaaaatgaatacaaatatgtgcatatatatttttcctgtgaaagtagga

SEQ ID NO: 942372 - DNA, 120 bp, Artificial Sequence
  ENSG00000271978_25 (sequence is synthesized)
aaagaaagttgaaattatgcaagaacaaagtagaaaaatatgcctctcatataagattgagtgtttccattgatcaatataatttttaaaatgttgtgatgattctttttttcacttaat

SEQ ID NO: 942373 - DNA, 120 bp, Artificial Sequence
  ENSG00000271978_26 (sequence is synthesized)
tggctatgtcatttgcactctacctaagtgagatattaataaattgtatatgatgtaaataacaggaaacaagaagaactgctggccttattcatagttaataaagagaaccagatgatg

SEQ ID NO: 942374 - DNA, 120 bp, Artificial Sequence
  ENSG00000278834_0 (sequence is synthesized)
ctttcctttaggctgtgggtcagagtctacacttcactaaacctgggatggaggcgtggaggacttgcttcgcggcgtttgcgtcctcgcaggcgcctcgcagggcttcctgccctcacg

SEQ ID NO: 942375 - DNA, 120 bp, Artificial Sequence
  ENSG00000278834_1 (sequence is synthesized)
gcgggggagtagctttggcgaaaatcagcacgagttctgcagtttttccaagcgcttttagggtgtaatcgtcccaggtttctaagccaaggcccggagagttgaccccctcgcaacagc

SEQ ID NO: 942376 - DNA, 120 bp, Artificial Sequence
  ENSG00000278834_2 (sequence is synthesized)
ttgtgtgtccttgcagcgccgcgggtgccacctggtctccgcctcagcgctgcctcggctccttcggttcccaccagcgggaacgaccgtccccactttcagcttaaactcatctgtcct

SEQ ID NO: 942377 - DNA, 120 bp, Artificial Sequence
  ENSG00000278834_3 (sequence is synthesized)
tctggatccagctcagaggtctctttgtgatgccctcctggaacttcccccctagtaatccttcctttgtattcccgtggctctttgataataatggttggagtcctgaacccgaccctt

SEQ ID NO: 942378 - DNA, 120 bp, Artificial Sequence
  ENSG00000278834_4 (sequence is synthesized)
tgtatcggaccgtgtttgtcatctccagtgctttatgaaggccttgaaagcaaggttcagccgtctgtattggtcatcttcccattgccagtgcctacgaagggcttgacccattcattg

SEQ ID NO: 942379 - DNA, 120 bp, Artificial Sequence
  ENSG00000278834_5 (sequence is synthesized)
agcctcttctttggatacataaacacccgatggatattgtgggtcactgtggagggagaatgaacgtatgggatccctgacctgtggttactggaaaacagttgacatttagagagaggc

SEQ ID NO: 942380 - DNA, 120 bp, Artificial Sequence
  ENSG00000278834_6 (sequence is synthesized)
tgaattcttgggcttcccgtagcccccatcctgagtgtgccaacagggactagaagcatctctagtctgcaaagcgaggaacaagtgatactctgtccaatttttccaatattgttatac

SEQ ID NO: 942381 - DNA, 120 bp, Artificial Sequence
  ENSG00000278834_7 (sequence is synthesized)
tcatgaatagagattaatgaaattgaagagcatattcaagagaaagactaaaggagaagtcgtctgccccgtggacaggcagcttgagtggtgcttgagaaaatgtacatgaaattgctt

SEQ ID NO: 942382 - DNA, 120 bp, Artificial Sequence
  ENSG00000278834_8 (sequence is synthesized)
tgagtggtgcttgagaaaatgtacatgaaattgcttgttaaaaaatattcacgcctgtaatcccagctcttttgggaggccgaggcgggcagattactaggtcaggagatcgagaccatc

SEQ ID NO: 942383 - DNA, 120 bp, Artificial Sequence
  ENSG00000278831_0 (sequence is synthesized)
atcctcgtccagggcgcagctgtctgactcctcacaggacaggtcctcctggcaggcgaggtggtcgtcgaaggaagggggaagaggctcagggaccggggtcccagcgggggtcctgcc

SEQ ID NO: 942384 - DNA, 120 bp, Artificial Sequence
  ENSG00000278831_1 (sequence is synthesized)
ccctgggccggaggctgagagcagggcggtccaggccctggtgttgctgacgtggcgggcgaaggggctctggggaccgcagtcctctgtccctgcgctcaggcagctgaggctgctgaa

SEQ ID NO: 942385 - DNA, 120 bp, Artificial Sequence
  ENSG00000278831_2 (sequence is synthesized)
ggtctgacagttctgtggaggggcagacacacaggttactaagggttactcccctcccgcagccccaggactgcacaccccacaaagcaactagaccaccaggctgtggcaagaccaatc

SEQ ID NO: 942386 - DNA, 120 bp, Artificial Sequence
  ENSG00000278831_3 (sequence is synthesized)
gggttcctcctatccaggcaaggacgggcccatgagcaacgtactcatgaagatgcacctccggccaatgagcgctctgtgctcataaagacacgcgcaattccactattcacctactaa

SEQ ID NO: 942387 - DNA, 120 bp, Artificial Sequence
  ENSG00000278831_4 (sequence is synthesized)
ctcggcaaagcacacaaatttgatgcagacccagttctggggggctgcggtgaaacaggaatgctcctaacacttcgtccacagcctttctgaagcgcaacctggggaaaatatatccaa

SEQ ID NO: 942388 - DNA, 120 bp, Artificial Sequence
  ENSG00000278831_5 (sequence is synthesized)
ttccttgatcaggtaatttcactacttggatttttatcttaagaaaacattctaagatgtgtgtaaaaatttggcaacataccgttaaatggaaaagaagagagtaacccaaacacccta

SEQ ID NO: 942389 - DNA, 120 bp, Artificial Sequence
  ENSG00000229246_0 (sequence is synthesized)
tcaattttctccctaaattgaatatatttctctacagttttctcaagagggatttgcagagacaggatgctatgaaattacctctcccatgccctccacagtactaagactgaggtacct

SEQ ID NO: 942390 - DNA, 120 bp, Artificial Sequence
  ENSG00000229246_1 (sequence is synthesized)
gtctacatcaaaagatgagtactacaatgcagatgacttagccagttggctgactagggatgttggatgccaggtctcctcagaaagatcaaagttacaggtgaatgcccatgatttaaa

SEQ ID NO: 942391 - DNA, 120 bp, Artificial Sequence
  ENSG00000229246_2 (sequence is synthesized)
tggaaatctgagggaatgaagcaaggacctgttggagcacccatgggaagaacctggggcacaaaagaggaaagcagcaagagactgacagagattgtctccctagaaacctggaccacg

SEQ ID NO: 942392 - DNA, 120 bp, Artificial Sequence
  ENSG00000229246_3 (sequence is synthesized)
aaaagggtggagaggagaaaactctgtgctaaatattactcctggaaaagtgcatttgcttcggagaaatctttatcatgggtctctaagaggaaggaacaatagcatcttctatgtgcc

SEQ ID NO: 942393 - DNA, 120 bp, Artificial Sequence
  ENSG00000229246_4 (sequence is synthesized)
acaggaagcgtgattctggcatctgtttggtttctgggaaggcctcaggaaacttaaagtcatggaagaaggggaagggagagcaggcacgtcttacatgaccaaagcaggaagaagaga

SEQ ID NO: 942394 - DNA, 120 bp, Artificial Sequence
  ENSG00000229246_5 (sequence is synthesized)
gagaagtgtggaggtgctatacacttttaaacagccagatcttgtgagaactctgtcagaagaacagcactagggaaatggtgctaaaccattcttggggactccatccctgtgatacaa

SEQ ID NO: 942395 - DNA, 120 bp, Artificial Sequence
  ENSG00000229246_6 (sequence is synthesized)
ctcccaccaggccccacctccaacactgagaattacaactcaacatgagatttggatggggacacagatccaaaccatatcaaattttcacacctttcagtaaagctttatattttttaa

SEQ ID NO: 942396 - DNA, 120 bp, Artificial Sequence
  ENSG00000229246_7 (sequence is synthesized)
ttaaggatatttaagtacttggaagtagaagtagagagtaaggggaatattgtacagccatcacagcctttgtctactaaagaagtcagtttcatgtgacaaatgttcattttaatattc

SEQ ID NO: 942397 - DNA, 120 bp, Artificial Sequence
  ENSG00000229246_8 (sequence is synthesized)
gcttcttcagtccatctgggggtgtttccttatttctataagatgctgcttttcaaaaaaattaccgaaagcattctggaaatccaagagtaattgtgtgaactataagcattagaaaac

SEQ ID NO: 942398 - DNA, 120 bp, Artificial Sequence
  ENSG00000229246_9 (sequence is synthesized)
acagacataagttgaaaatatttatgaacctaaatagatgtaaagctagtgactcatattttataatgtattcacagatgatatttcttaaataaagtaggcatttctttaaaataaaaa

SEQ ID NO: 942399 - DNA, 120 bp, Artificial Sequence
  ENSG00000272770_0 (sequence is synthesized)
agatgaacacactggacttatatacagctggacatgaaagtaaccaatttaagtgccttttccttcaacaattttaacttcagttgcttaaggatgatcgagccaccgatgtcaacaaaa

SEQ ID NO: 942400 - DNA, 120 bp, Artificial Sequence
  ENSG00000272770_1 (sequence is synthesized)
tatcctttacctttaaatagtttttctttaattaagtttaaagaaaacctatttaacgagtgatattaccgggaaagttcacacagaaacagaaagaggcaatattgtcctgaaaattca

SEQ ID NO: 942401 - DNA, 120 bp, Artificial Sequence
  ENSG00000272770_2 (sequence is synthesized)
cttaagatgtaatttttgtcctcaaaaatagccattagttctcaaaactttcccttccagagacatctctcaggaatctaaaaacaaacaagcaaacaaacaaaaagacacaagctagac

SEQ ID NO: 942402 - DNA, 120 bp, Artificial Sequence
  ENSG00000272770_3 (sequence is synthesized)
ataaagctgcttctagttaatatacggcctagtctctgtgtgtatctacaggacgctaactctcaccctttgtcttttgcaggaaccaattttccattaaatactaaaggggacatttaa

SEQ ID NO: 942403 - DNA, 120 bp, Artificial Sequence
  ENSG00000272770_4 (sequence is synthesized)
aaaatcacatagtacacaaatgaataaaacgcagttcagaattttatctttgttaaactgtcactgttatctcattgttctgttaacttttcaaataactctcttggaaacaaaaaaaac

SEQ ID NO: 942404 - DNA, 120 bp, Artificial Sequence
  ENSG00000272777_0 (sequence is synthesized)
aatttatgggatgatgacgtcgtttgggatagaggtatggaaaaaactgcattatgtccaaaactttactacagtggagccagtcaacatgtgtacaacttaacacctaacaaaaatggc

SEQ ID NO: 942405 - DNA, 120 bp, Artificial Sequence
  ENSG00000272777_1 (sequence is synthesized)
tccaaaaagtatacatagcactatttctgttcatcccatctgaatggaaaattttacttagctggtaattctcaaaatgttttgttgactcagggaaggggaaacatattttacatgcac

SEQ ID NO: 942406 - DNA, 120 bp, Artificial Sequence
  ENSG00000272777_2 (sequence is synthesized)
agaatgcttcagaacttttctgctcggctaccaatctgccatgtaggttgataatcaaagtcctaaagtacagtttagttctttgggcctacagggacaccttgttgactaactggcttc

SEQ ID NO: 942407 - DNA, 120 bp, Artificial Sequence
  ENSG00000272777_3 (sequence is synthesized)
caatttctttgtcagcaaataccttttagaaaaagtacactacaaacacacttggaaaacattttattaagtactgtataaacagctatttagataataattgcatagaactataccaag

SEQ ID NO: 942408 - DNA, 120 bp, Artificial Sequence
  ENSG00000272777_4 (sequence is synthesized)
gtaattgtgtctttaaggaacaactaccaagtgaacaagatgagcaaagtcctctattatacaagatttccttcggtggaacattatggtgacaaagcagcgtaatgggctcttaagcag

SEQ ID NO: 942409 - DNA, 120 bp, Artificial Sequence
  ENSG00000272777_5 (sequence is synthesized)
attgatttttatcaaactggacatatcagaattccttatgtataagagaaatatgcacatgctcctttcaagaaaagagtgataacccaccatggaattacctccagtttaaacatgtac

SEQ ID NO: 942410 - DNA, 120 bp, Artificial Sequence
  ENSG00000272777_6 (sequence is synthesized)
tcttgactgccaaaaatatcgagatatgttaagcaagataaagcagcagaacacgctttaaaatatgttgatctctttctgtaatctacatgttaatattaaatgttcttatccttggca

SEQ ID NO: 942411 - DNA, 120 bp, Artificial Sequence
  ENSG00000272774_0 (sequence is synthesized)
aactttagaatcttttctcctgtgtttcaagtgacttccatcggtgtggtttctccaggggtgatcccagggacaccagcttgagaatcacctggggaaggggtagggtggggggaggag

SEQ ID NO: 942412 - DNA, 120 bp, Artificial Sequence
  ENSG00000272774_1 (sequence is synthesized)
ggggcttatcaaatgcagttccttgggaccagcccgttctttgcttctctcagaacccctgtgagtagatggataatcaacctccttttaccatagatgaaactgaggctcggagaagtt

SEQ ID NO: 942413 - DNA, 120 bp, Artificial Sequence
  ENSG00000272774_2 (sequence is synthesized)
tgctgcagcccctgccctggtcacaggctccctgtggaccccacctgctaaacataaacaaacccatagtgcagcagccacaactcaagctgggaggcctttgtggaggttgatttttat

SEQ ID NO: 942414 - DNA, 120 bp, Artificial Sequence
  ENSG00000272774_3 (sequence is synthesized)
ctccccgcagtcaggcacaagtgagaatttcataaatagttctaacaaagctgcctttcacagccagctctttgcactgtaaaaaataataataataaaataaaaacctgatttcagaaa

SEQ ID NO: 942415 - DNA, 120 bp, Artificial Sequence
  ENSG00000241577_0 (sequence is synthesized)
gtttcacagttgaggaggagaagctgggactagcaggcttcacgagaaacacaaaggtatagccttgctcactgcatatccactgacctgacccatagtacaactccagtaggaactgtt

SEQ ID NO: 942416 - DNA, 120 bp, Artificial Sequence
  ENSG00000241577_1 (sequence is synthesized)
ggacagatgactgaatgaggagactgaactgtagccagctctagagattaaaaaaagtcatggagattcagaaagacaggaagttactgcatataaaggttaacacccaccctcaccttc

SEQ ID NO: 942417 - DNA, 120 bp, Artificial Sequence
  ENSG00000241577_2 (sequence is synthesized)
tccctttgagcggatcatttctaccaaggtcaaactcatattttacattgagtttgtatgaaaaaaaaatcagatgtttaatttttcatgtaatcaaagaacaataacaaaagcaaacct

SEQ ID NO: 942418 - DNA, 120 bp, Artificial Sequence
  ENSG00000241577_3 (sequence is synthesized)
tcacttgaggactgactctggactggttctggaagctgtacaagggacatccccagccacgtggtaactggcatgagcccacaattaatatgcattaaatcagtcactcctcaagtcaaa

SEQ ID NO: 942419 - DNA, 120 bp, Artificial Sequence; identical to SEQ ID NO: 501317
  ENSG00000241570_0 (sequence is synthesized)

SEQ ID NO: 942420 - DNA, 120 bp, Artificial Sequence; identical to SEQ ID NO: 501318
  ENSG00000241570_1 (sequence is synthesized)

SEQ ID NO: 942421 - DNA, 120 bp, Artificial Sequence; identical to SEQ ID NO: 501319
  ENSG00000241570_2 (sequence is synthesized)

SEQ ID NO: 942422 - DNA, 120 bp, Artificial Sequence
  ENSG00000241570_3 (sequence is synthesized)
cttctcggcttttcgggagcaaccctatctcaacattcaccatcttaagatgagcagactgcaagtttgcctctcccaccagtatgggagctgccgaagcggcaagaacagcgtttccgt

SEQ ID NO: 942423 - DNA, 120 bp, Artificial Sequence
  ENSG00000241570_4 (sequence is synthesized)
ccatcgagcgccaggtcaccagtcagctccagtcctattttgagttgaagtaaaagctcctccctagatggccagtgcacgtctttaaaaagcgactcctttcccacaaaggaaatacga

SEQ ID NO: 942424 - DNA, 120 bp, Artificial Sequence
  ENSG00000241570_5 (sequence is synthesized)
ctggttcgcatctatcaagggttggcgttgggataagagggtgaagtatcagctggccctgattctctgaattcccggacccaataacgcgaccaagcaccgtgactcccaggaaaacta

SEQ ID NO: 942425 - DNA, 120 bp, Artificial Sequence
  ENSG00000241570_6 (sequence is synthesized)
gcggagtgagcgcggctgaggaaattactgacaccggaagtcacgtgagcggctgcccctaaggtcgctatctcgacagtcgactattcagccttgcaggcgcctctggcgggcttcact

SEQ ID NO: 942426 - DNA, 83 bp, Artificial Sequence
  ENSG00000241570_7 (sequence is synthesized)
gtccggatcggggccgtgtcattgtcagctacctggggatgcgcctctcgctccctcactgtctttgcgtgtgtcctgtctac

SEQ ID NO: 942427 - DNA, 120 bp, Artificial Sequence
  ENSG00000241570_8 (sequence is synthesized)
aagagaatgaagtccagttggtagaaacggagggggtggcttggataaatcttatatgtaattaatcagaagtacctggcaggtggctggagaccagaagaaaggaacactggaagaatg

SEQ ID NO: 942428 - DNA, 120 bp, Artificial Sequence
  ENSG00000241570_9 (sequence is synthesized)
ggagaccagaagaaaggaacactggaagaatgaaaacggttgtgatgcactgcagtgtgaaaatatgcccttgagccttaaagaaaggggcttaaggccgggcgcggtggctcacgcctg

SEQ ID NO: 942429 - DNA, 120 bp, Artificial Sequence
  ENSG00000241570_10 (sequence is synthesized)
caagtcatctcagtggtttgtgttaatctagagtggccatctcaattacaggttagcatttgtaagaaatgtctaaataacattggctaatctgtttgttagaaaggatctcagggacat

SEQ ID NO: 942430 - DNA, 120 bp, Artificial Sequence
  ENSG00000241570_11 (sequence is synthesized)
gctcatgaatgtttcaaggatttagggtgactgcccatcatttccatagtctggaaccaaatcaaacttcagcgtttaactaggcaagtgtaatcttatttaactcaaaattttcagtga

SEQ ID NO: 942431 - DNA, 120 bp, Artificial Sequence
  ENSG00000241570_12 (sequence is synthesized)
caactcaataatgtgctcctgcctttcataataaaactgccttgtttattcttggatattatgtttttaattttaagcaaggatggatggcatcagtctagaacttctcccatggctgca

SEQ ID NO: 942432 - DNA, 120 bp, Artificial Sequence
  ENSG00000241570_13 (sequence is synthesized)
ttgttgggaacccaaatgctctgcacgctcctgtaagctatctccaatcccaccaaaaacttgaaaccaacaccatcttctgccctcctggatggaccatgaaaccttgattttcagtca

SEQ ID NO: 942433 - DNA, 120 bp, Artificial Sequence
  ENSG00000241570_14 (sequence is synthesized)
ggtgaagatgtggaagagctggtggctgtggccgataatgtcgaaaagacccggctggatgcgctcggggatcttgctcacgttgaagaaggcggccaccaccagccagaagtagcggcg

SEQ ID NO: 942434 - DNA, 120 bp, Artificial Sequence
  ENSG00000241570_15 (sequence is synthesized)
attccagagtcaaaggctgatcatggagggcattgatgagggaagacttcagaccgagttgcgctcttgtcgccgaaaatgcagtgcaatggcatgatctcggctgactgcaacctctgc

SEQ ID NO: 942435 - DNA, 120 bp, Artificial Sequence
  ENSG00000241570_16 (sequence is synthesized)
caggagtgagccactgcgcccggcccacccacagcttcttgaagcatttttccacaagttttaatgaaaaaggaaatgagaaatcacaggagaaaaactaaaattcaaagtccagtaaac

SEQ ID NO: 942436 - DNA, 120 bp, Artificial Sequence
  ENSG00000241570_17 (sequence is synthesized)
aaatcacaggagaaaaactaaaattcaaagtccagtaaactggccaaattggagtaattaattcttattaaccagaaatggaacaaggctctgatatctgcataattttgagctggattt

SEQ ID NO: 942437 - DNA, 120 bp, Artificial Sequence
  ENSG00000241570_18 (sequence is synthesized)
atcagggtattttcctagtttaatatacaaatgagatgagggaccctttagtttaggcccaagtttgcctggtgatcttttgtggctcctgtccctacaatgttagataatgtttccccc

SEQ ID NO: 942438 - DNA, 120 bp, Artificial Sequence
  ENSG00000241570_19 (sequence is synthesized)
ccgacgcgtagcaccacaacggtagcagccacgggtggtggaagggcacgtcgccgccgctcaggaagaacagacggcagaacttgctcaggaacagcagcagcgggatgaagtgcgtcc

SEQ ID NO: 942439 - DNA, 120 bp, Artificial Sequence
  ENSG00000241570_20 (sequence is synthesized)
tgttcacagaaaatgtaccaaaggtattgcagatgcagcagtgaacaaatcaaactaaaatttcagcctgtacttcttagcatcttattgtgatacatctgggagtgttttatgccctgc

SEQ ID NO: 942440 - DNA, 120 bp, Artificial Sequence
  ENSG00000241570_21 (sequence is synthesized)
aagccctttgacaacagggacctgtcttatcccatcctcactggaaccacaccttctacccattgaattcccaagtaatgatttcagaactcaactgattaaagatgactatatttatta

SEQ ID NO: 942441 - DNA, 120 bp, Artificial Sequence
  ENSG00000241570_22 (sequence is synthesized)
gggattccagagtcaaaggctgatcatggagggcattgatgagggaagacttcaggatgctgcctcctgagaagctgttgtgtagcgagccttgaccatctcaaggaaagagacttactg

SEQ ID NO: 942442 - DNA, 120 bp, Artificial Sequence
  ENSG00000241570_23 (sequence is synthesized)
tcttacacagcttccccttctatcttaagatgttgtcattgttgttagaaaactttgtaaataattaaatgaacataactgataagaaaaacaccctgttgcatcttggcccaaagcaca

SEQ ID NO: 942443 - DNA, 120 bp, Artificial Sequence
  ENSG00000241570_24 (sequence is synthesized)
cccagaaataatgatgccaaattaggcatgtgtacagtatatgtggaatgtgatggctggacattgattaggcacatttattaaaagaacatcttcctccaaacaaataacagctgtgaa

SEQ ID NO: 942444 - DNA, 120 bp, Artificial Sequence
  ENSG00000241570_25 (sequence is synthesized)
tccccagggggttgccataccctagatcactgcaaagaggcaaatagaagattctgtgatttcctagatgatctttgcacttagcacaatgatattgattatagtaattgattaatacac

SEQ ID NO: 942445 - DNA, 120 bp, Artificial Sequence
  ENSG00000241570_26 (sequence is synthesized)
ttgatgagggaagacttcagccagaaaacaaccaactaaagaaagaaataaaaagaaaagaagaaaggaaagaaaggagagaaagaaaaggaaagaaggagagagagaaggaaggaagga

SEQ ID NO: 942446 - DNA, 120 bp, Artificial Sequence
  ENSG00000241570_27 (sequence is synthesized)
gcactatggacctagtgcttaattgtacccaagactctgtattaagagagaactctgtagggttcagtccctcttctcagaatatatagtttaggctgggcacgatggctcacgcctgta

SEQ ID NO: 942447 - DNA, 70 bp, Artificial Sequence
  ENSG00000241570_28 (sequence is synthesized)
gcatgttggaggcaggggctgcagtgagctgtgattgtgccagtgcacttcagcctgggcaacagagcaa

SEQ ID NO: 942448 - DNA, 120 bp, Artificial Sequence
  ENSG00000233262_0 (sequence is synthesized)
caaaatgtattagagatcccattgcagttaaaggtcgatggattcaacaatgtgcagcagcccttcaaagaatacagactgtggtttcctcctgggatgacttcaccaggacccttggca

SEQ ID NO: 942449 - DNA, 120 bp, Artificial Sequence
  ENSG00000233262_1 (sequence is synthesized)
aaagtggaaagaaacagttacatgagccatagatggcagaaacagtagatagaactcacatttaggcagcaggtatatgaagccctgaaactccttgggatccctatgttcaaatgccaa

SEQ ID NO: 942450 - DNA, 120 bp, Artificial Sequence
  ENSG00000233262_2 (sequence is synthesized)
agcaactgtgaccaacttttgccatatggcaaaaaaagacactctcttggcctcctttttccaccagcaatggaaaagaaaagaaataacaataataaagaaagaagaggttggtgtttt

SEQ ID NO: 942451 - DNA, 120 bp, Artificial Sequence
  ENSG00000248369_0 (sequence is synthesized)
tgagtctcacctgaaaccagcaagtctcaagccttacccaaggccttcaatgtagtacctgggtatcacttctggttttccaggacccaaagtctcttcaggtagcctgtaatgaatgcc

SEQ ID NO: 942452 - DNA, 120 bp, Artificial Sequence
  ENSG00000248369_1 (sequence is synthesized)
ccatgctccctctacagggattgggggaggagtggcacctgcaattcaggactgttttttaaatcactccagtgcctctttcagcaatatgaaggtaaaaccagaatggacaaatggcca

SEQ ID NO: 942453 - DNA, 120 bp, Artificial Sequence
  ENSG00000248369_2 (sequence is synthesized)
aatagctggaaaagaagaagaagaaagaaagaaggaagaggtggaggaagaggagaaggagaaggaggagcagggaagaagaaagatgaagaataaaaaaagaaaagggtttaatgtaaa

SEQ ID NO: 942454 - DNA, 120 bp, Artificial Sequence
  ENSG00000248367_0 (sequence is synthesized)
aggtaccagcggcctgggggtcgtacaggatgggagaggccggggcttgggatgttgccagatctacgttgaaaagtgaagcaggaagagaggcactgaggctgggcacatggggaaaac

SEQ ID NO: 942455 - DNA, 120 bp, Artificial Sequence
  ENSG00000248367_1 (sequence is synthesized)
gggaacaatggttgacaaatgggttatcaccggagtgggactggtgacttcattagaagaggaaggaagacctgagctggcctgtgaatatgctccgccccctggccatgtgacacctgc

SEQ ID NO: 942456 - DNA, 120 bp, Artificial Sequence
  ENSG00000248367_2 (sequence is synthesized)
gccaccctcaggactctgcagagtccccagcagcaagaaggccctcaccaggtgcagcccctcaaccttggacttctcagcccccagggctgtaacaaataaattcttttttaaagtaaa

SEQ ID NO: 942457 - DNA, 120 bp, Artificial Sequence
  ENSG00000248360_0 (sequence is synthesized)
ggtctactgccctttgtgctgatgagaacacgaagccccagaggaggggagtcagttcataaagccctctcagctactgtggaaaatcgaagcccagctcactaatttcctacctagaga

SEQ ID NO: 942458 - DNA, 120 bp, Artificial Sequence
  ENSG00000248360_1 (sequence is synthesized)
gatcacacacagctgtgcaataccaagtgacatgggacttatacaaaggcagcaccactagtcatgctggaagtttccccaagaagcagggaaaattcatgacgtgatatataagaaaaa

SEQ ID NO: 942459 - DNA, 120 bp, Artificial Sequence
  ENSG00000248360_2 (sequence is synthesized)
gttgaattgcttgatatggaccattgattgaggtctgcagctgcagttgctgccatcttagaccgactgttcatcttgtaaacttacagaatcaataaatacggtacagtactcgaaaca

SEQ ID NO: 942460 - DNA, 120 bp, Artificial Sequence
  ENSG00000248360_3 (sequence is synthesized)
cttgcctctgccatgttagaagtgcctttcgcctcccaccatgactctgaggcctacacagccacgtcgaactgcaagtccacttaaacctcttttcgttcccagtttcagtgtggtgga

SEQ ID NO: 942461 - DNA, 120 bp, Artificial Sequence
  ENSG00000248360_4 (sequence is synthesized)
aaaggaagagagagctgaggcagacgatgtaagatctgctgttacttcttgctgtgtgaccttgggtgaagtgaagtgggtgtgcctgggatcacacacagctgagacggggtttcactg

SEQ ID NO: 942462 - DNA, 120 bp, Artificial Sequence
  ENSG00000248360_5 (sequence is synthesized)
ggaaaatcaggccatgtttgtgtccacaaacaagagtgaagataatctctcctatctgagaaatccaggagtggaggaatccaatgggaactctggccaagctaaaagaaggtctcaaga

SEQ ID NO: 942463 - DNA, 120 bp, Artificial Sequence
  ENSG00000248360_6 (sequence is synthesized)
gccacagatgtcttggatatttctgtatttcagactctactacccagacaccaaaagaagaaatgattaaccctggaggctgccttggtctaggtgaaaaaatatatgtacgatgacagt

SEQ ID NO: 942464 - DNA, 72 bp, Artificial Sequence
  ENSG00000248360_7 (sequence is synthesized)
atggataaattcctcgacacatacactgtcccaagactaaaccatgaagaagttgaatctctgaatatgaaa

SEQ ID NO: 942465 - DNA, 66 bp, Artificial Sequence
  ENSG00000248360_8 (sequence is synthesized)
caatatcacactgaatggacaaaaactgaaagcattccctttgaaaactggcacaacacaagcaat

SEQ ID NO: 942466 - DNA, 120 bp, Artificial Sequence
  ENSG00000248360_9 (sequence is synthesized)
aataggaatctaaaaaaaaaaacaatttaaataatgtcacctaagattttttacaattagcaagtgctggggattcaatccagggagtctgacatccagagccaatactttactacatga

SEQ ID NO: 942467 - DNA, 120 bp, Artificial Sequence
  ENSG00000248360_10 (sequence is synthesized)
aacagccctaaaaagagcagagaatctgtcttcacagattttcaaagagtaaggaaacatggttaggcctagtggtcagggaatgctttgtagatgcagtggggtgtggaaagaggccat

SEQ ID NO: 942468 - DNA, 120 bp, Artificial Sequence
  ENSG00000248360_11 (sequence is synthesized)
gaagaagaaagaggatttgaaagaagagagaggaatgaagaaagacttctaataaatatgcttgctacgatcaattctgtgtcctcccttttctataaaatatgatccttggcccctata

SEQ ID NO: 942469 - DNA, 120 bp, Artificial Sequence
  ENSG00000248360_12 (sequence is synthesized)
atttcttgactctaaatgtttgaaagagtgaatcagcattatcatggaacaatatgtgctgatgggtatagtctccccctttgattggtactttgcaagtttcacaaataactaaccacc

SEQ ID NO: 942470 - DNA, 120 bp, Artificial Sequence
  ENSG00000248360_13 (sequence is synthesized)
tgagaacttgtctcccttgaactgaattccattttaattttgttcaccttcttgattctcttctttttgtgtcaaaattgtacttttgcaaagatgatttcaaaagtgttttctttctga

SEQ ID NO: 942471 - DNA, 120 bp, Artificial Sequence
  ENSG00000248360_14 (sequence is synthesized)
tttagtgcggccagttttcaacattcggtctgaaattgaggagttgctgtatgaaaagtgaatttatttgaatggtaaagtttcctgtgaacagaaataaagtattgtttcactctgaaa

SEQ ID NO: 942472 - DNA, 120 bp, Artificial Sequence
  ENSG00000248363_0 (sequence is synthesized)
cagataccagaaccaagacttcctagctggactaagcaattgattaaactcgctacctgccgccttctgctcttgccaccctccatacccaaagaagaaagaaaggaaacaaaccttgtg

SEQ ID NO: 942473 - DNA, 120 bp, Artificial Sequence
  ENSG00000248363_1 (sequence is synthesized)
gactatccacaggataacacaagaagagagtaccacatctcaagaccacaagatggcttccagaggcaatggggaatcaagcttcattaccatattttacaggaaagatgttccataatg

SEQ ID NO: 942474 - DNA, 120 bp, Artificial Sequence
  ENSG00000248363_2 (sequence is synthesized)
agacttcagtctgtcaatcaaatcttaggaaaacttgtccttaagaaagaggagaacttaaaaaggaaataaaagaaaacttgaaaagaaaaaagaagaaaggggaaaagtggagcttga

SEQ ID NO: 942475 - DNA, 120 bp, Artificial Sequence
  ENSG00000248363_3 (sequence is synthesized)
aggacattattgactcagtatacagatcagtaaaaagaaatgaaatagaaaaatataaaataaataaaataatttgaagagccaaaaatgaaataaagttcttgggctgattttaaccca

SEQ ID NO: 942476 - DNA, 120 bp, Artificial Sequence
  ENSG00000248362_0 (sequence is synthesized)
gtaattctggaccttgcatttccactttcaaggtttttctgaagacataaagacaaaaatgtatgcaaaatatgcatgctcactatagcactttttataataacaaaaaatataattaga

SEQ ID NO: 942477 - DNA, 120 bp, Artificial Sequence
  ENSG00000248362_1 (sequence is synthesized)
taaattaaattaatattcacatagataacaatttaaataaggcatatgtcattcatatgtgcaatgtatcattcatgtatgtttgtaaatatttagaaaatgtcttgaaaaaagcacatc

SEQ ID NO: 942478 - DNA, 120 bp, Artificial Sequence
  ENSG00000248362_2 (sequence is synthesized)
ttagaaaatgtcttgaaaaaagcacatcaatgtgaacagtggtttcctctaatttgtggaatttatggatgaagagaatgaaagttacatatatgcatatatgtaactacagttatacat

SEQ ID NO: 942479 - DNA, 120 bp, Artificial Sequence
  ENSG00000248362_3 (sequence is synthesized)
tatttctatattctgatgatctttaaaataatttttaaactttttaagataactatagattcacatgaagttttaagaaatcatacagagcaatccagcatattttctaccaagtttcct

SEQ ID NO: 942480 - DNA, 120 bp, Artificial Sequence
  ENSG00000248362_4 (sequence is synthesized)
ccaatggtagtatcttgcaaaactatgctgctacatcaaaaccagtatgctgacattgatacaggtaaaacacagaatatttctgtcctcataaggatctctcatacagctcttatataa

SEQ ID NO: 942481 - DNA, 120 bp, Artificial Sequence
  ENSG00000248362_5 (sequence is synthesized)
cacactcacttccttcctgcccccatcgtctccttaacccctggaaattacaaatttgttctttatttctataattttgtcattttgagaatgttacataaataaaagtatacaaaattt

SEQ ID NO: 942482 - DNA, 120 bp, Artificial Sequence
  ENSG00000249016_0 (sequence is synthesized)
tctaccaaatgagacctactagaagtgtggtggtgtggaatcctgcaaatgatcacaaagaaagaaaagcccttcttctccattggatatagttgtgcttgggtggcttggcagccatct

SEQ ID NO: 942483 - DNA, 120 bp, Artificial Sequence
  ENSG00000249016_1 (sequence is synthesized)
ttagcaagatttcagattaggaaggagagtgtgtgtagccagccacagcaaagaaagcagttatcttggttaagaatcaaattcttcatcagagaggaaatcagtgcattgactcctaat

SEQ ID NO: 942484 - DNA, 120 bp, Artificial Sequence
  ENSG00000249016_2 (sequence is synthesized)
tctaatattagattcagagactttattattttttagcagtttgcaaaaaatggaagtaaagtaaatatttttcatgtgtttgggatcaaatgttagggtaaattaaaactttgcacatta

SEQ ID NO: 942485 - DNA, 120 bp, Artificial Sequence
  ENSG00000249017_0 (sequence is synthesized)
cagaagaaaaaacccactgaaggaggagcagcaaaccatcctgtctatggcctaccttaagattgactgccaccagagagagggatagaaataaaacagtttgccaaaaagagaggagca

SEQ ID NO: 942486 - DNA, 120 bp, Artificial Sequence
  ENSG00000249017_1 (sequence is synthesized)
ggaacttcatttcttcccaagaaccccactgaaacaaggcaaagcccgaacttgaggttcaggcattcagggcatgtccaaaattgaggctggaccagggacaacctagcttctgcctcg

SEQ ID NO: 942487 - DNA, 120 bp, Artificial Sequence
  ENSG00000249017_2 (sequence is synthesized)
tagaaattcagaaattcagtgtgtaaaatggtaaagtggattgaagttgaagatattagatcatttaagaagtcaataaatgaagtaataaacatgcgaatgagaagactgatgatgaag

SEQ ID NO: 942488 - DNA, 120 bp, Artificial Sequence
  ENSG00000249017_3 (sequence is synthesized)
aggacctttaaaagtgtatttctgttacggttattttttttttaaagtgatttgaagccatttataatgattgctaagtggcatgctaaagttttaaaaacaaataaagcattaaaaaat

SEQ ID NO: 942489 - DNA, 120 bp, Artificial Sequence
  ENSG00000268649_0 (sequence is synthesized)
aggcccagcctcatgtgggaggtgaggagaaaggacccttccagagggccccccctcaatcctgttgtgcctaattcagagggttgggtggaggctctcctgaagggctctgaagagcgc

SEQ ID NO: 942490 - DNA, 120 bp, Artificial Sequence
  ENSG00000268649_1 (sequence is synthesized)
tgcacccgcagctgtgtgccaggagtggagacaggacagtcgatacaagaggggcccctgtcatgtcagctgctgagtcccctggggcggccgggcactggggaatggtgaactcgccgt

SEQ ID NO: 942491 - DNA, 120 bp, Artificial Sequence
  ENSG00000268649_2 (sequence is synthesized)
ccccttccggaggctctctccaccctcactgacgcctcctcgggaaagcccccgctccttccccgacctcacagcatgccaggtctggggcttccgctggggggcttacctgttttccac

SEQ ID NO: 942492 - DNA, 120 bp, Artificial Sequence
  ENSG00000268649_3 (sequence is synthesized)
ccctgctagactgggagctccagggcaaggccgtagctgccttgcggattgttacgttgtccagcttgtctccacacgtgatacccagcaggtgcctaataaacttgtgtagaaagagtg

SEQ ID NO: 942493 - DNA, 120 bp, Artificial Sequence
  ENSG00000233191_0 (sequence is synthesized)
acacctggtacaaatatctgccttgctctgctgtacccaacagctctgagatttttaggaagcgaaggggcagaagaagcgactcacaagctcctggagccgtgttgggaggggccctcg

SEQ ID NO: 942494 - DNA, 120 bp, Artificial Sequence
  ENSG00000233191_1 (sequence is synthesized)
gggcccctggagtggagagacacacccagaggctttccagccacccagggaggaggcgcggtggctgggatttggagacagctgtggagagagcagctggaatggccccacaggctacag

SEQ ID NO: 942495 - DNA, 120 bp, Artificial Sequence
  ENSG00000233191_2 (sequence is synthesized)
cccgtgtcggtgtgggatgcgagggagaggagccaggatggccccacatgctttccttggctgcctgggcgggtgcagcagccacctgagagggccgtctgaggacacgaggcggcatca

SEQ ID NO: 942496 - DNA, 120 bp, Artificial Sequence
  ENSG00000233191_3 (sequence is synthesized)
gcctcatgagatctgggatgtgcacgggacgtccatgaagccgtcggagatgtgtgtctgggcagggtgctgacagggagggtgggtttctgtggcatttgggtttgggggatgaagccg

SEQ ID NO: 942497 - DNA, 120 bp, Artificial Sequence
  ENSG00000233191_4 (sequence is synthesized)
tgcaggggtgtgaggcctgagggttgcagcagatgcctgtgtccacatctggacagcattgctggctaacgccaaccccacctggcttgggaacaggcttgaatgtgtggtctgtcctgg

SEQ ID NO: 942498 - DNA, 120 bp, Artificial Sequence
  ENSG00000233191_5 (sequence is synthesized)
gcaaagagtaagttcctagaaaatcccagcagtcactgggaagtctgatgacttcctgagccgagctcttggtgtgatgtgatcccatcggtggtgttacttctggtttttgtcttgttc

SEQ ID NO: 942499 - DNA, 120 bp, Artificial Sequence
  ENSG00000233191_6 (sequence is synthesized)
gcaaggtcagcggccgcgtggacgtctccgattgtgctggctgtgctgctgtggccgcggtggggcagaaggccagacgtcctcacttcccccaaccccagtccagttgtacatgttgtg

SEQ ID NO: 942500 - DNA, 120 bp, Artificial Sequence
  ENSG00000233191_7 (sequence is synthesized)
cactgcacaagggccctggcagaggaccaagttggagttgaaatccagccatggcatggccctgtgggctgcacacagcatatggaggctgcactggtcagcagctgctcagcctgagag

SEQ ID NO: 942501 - DNA, 120 bp, Artificial Sequence
  ENSG00000233191_8 (sequence is synthesized)
agatcctggagccccatgtggcatctctgggtctgaattctctcttgacacaaagaggacacctccttggtcgttgctaaggaatttgaacagaggagggccctgcaagttcccagcgcc

SEQ ID NO: 942502 - DNA, 120 bp, Artificial Sequence
  ENSG00000233191_9 (sequence is synthesized)
atgcactgtgcagccgagcccaacacccggaagctgctgtcagctggtccctcggacactactgtgggctggtttgacctcttgggccctcactgctcagagctgcaaggtggcttcatc

SEQ ID NO: 942503 - DNA, 120 bp, Artificial Sequence
  ENSG00000233191_10 (sequence is synthesized)
actttcttctgtgcagtcccagccttccagatggtcagagactgctggtgcctccctccaccatcccgttgctgtcccccagggcctcatctctgggacttctctaccctaccatccctc

SEQ ID NO: 942504 - DNA, 120 bp, Artificial Sequence
  ENSG00000233191_11 (sequence is synthesized)
acattgacacaaatgtgtacacagaagcacacatgcacacacacatacatgcatgtgcacagatgaacacacagacacacacgcacacacatgcacatgcatgcaaagacatgcacacat

SEQ ID NO: 942505 - DNA, 120 bp, Artificial Sequence
  ENSG00000233193_0 (sequence is synthesized)
gaggtgggaggatcgcttgaactcaggagttgaaggctgcagtgggtgaggatcacaacactgaattccagctgaggtgacagaatgagaccctgtctctctaaaaaacaagcaagcaaa

SEQ ID NO: 942506 - DNA, 120 bp, Artificial Sequence
  ENSG00000233193_1 (sequence is synthesized)
taataaaaggtttaatttatttcagaagtttctagattttattgtctctatttagccaaagccacaagaaaagtcaaattcatatctttaaatgctttcattatcaatcaagaaagaaga

SEQ ID NO: 942507 - DNA, 120 bp, Artificial Sequence
  ENSG00000233193_2 (sequence is synthesized)
aagtgaaacgaacaaacaattttactcaagaaactagtgagaaatcaaagaaatgtccaagaagtaggagacaagaattaatcaaaacagattaacagtggaataaataaatgaatccaa

SEQ ID NO: 942508 - DNA, 120 bp, Artificial Sequence
  ENSG00000223716_0 (sequence is synthesized)
tcccaggccacagccaaatggaaccatctgcaccatgaagctgaagataaagccgcagaaagattgctgtattgtgagtggagaagagccctgcttctcttcactggctgatgtgcagac

SEQ ID NO: 942509 - DNA, 120 bp, Artificial Sequence
  ENSG00000223716_1 (sequence is synthesized)
tgactgagcgctgttcatcgagtccagccccggctttgcaaataaacagctgacaccaagagaggagaagcaacacggctgaggccacagggtgacaaagccttaacagcaagaagggga

SEQ ID NO: 942510 - DNA, 120 bp, Artificial Sequence
  ENSG00000223716_2 (sequence is synthesized)
gaaggcagtcatctggaaacgaggaagacagccctcaccagaaactgacactgttggacctcgatcttggacttgcagcctctagaattgcaagaaaataaatttaagctgtggactctg

SEQ ID NO: 942511 - DNA, 88 bp, Artificial Sequence
  ENSG00000223715_0 (sequence is synthesized)
gctcttcttattttgagatatgtcccaccaatacctagttcatggagagtttttaacatgagtgcctattgagataatcatgtggttt

SEQ ID NO: 942512 - DNA, 120 bp, Artificial Sequence
  ENSG00000223715_1 (sequence is synthesized)
ttacatttattgatttgtgtatgttggaccagccctgcatctcacagatgaagctgacttgatcatgatgactgccttttcacttaactgtgtcctcatatggaagagaggagaaaagag

SEQ ID NO: 942513 - DNA, 120 bp, Artificial Sequence
  ENSG00000223715_2 (sequence is synthesized)
tcctcatatggaagagaggagaaaagaggagaggaggggagagcaatactaaactgatacacaaaggatccccgtacttcatcaaaatatcaatgttgtccatgacacacaaagaaccca

SEQ ID NO: 942514 - DNA, 120 bp, Artificial Sequence
  ENSG00000223715_3 (sequence is synthesized)
gctgtagtttaattcagcatcacagtcccaacatgttttaaaacatgttccagcttttggtcccaggattattcaacctagctcataaaagaaaacaatattgcatttctaagtattggc

SEQ ID NO: 942515 - DNA, 120 bp, Artificial Sequence
  ENSG00000223715_4 (sequence is synthesized)
tcctagaattggcaagtttagtcaagaaaagctggaatgccgttaaaacaacaccctgtcatctttcaatcagtccttagctgaagttaaaatcccactcattctgcatgatccagcctc

SEQ ID NO: 942516 - DNA, 120 bp, Artificial Sequence
  ENSG00000223715_5 (sequence is synthesized)
gtgagtagccccttaacaagaaccaaaatggagggtacggatgaggctcagatcgtcaccacctggagaatagagacagtgactgagtcaccaggaaatctgtcccctgctcatcccaga

SEQ ID NO: 942517 - DNA, 120 bp, Artificial Sequence
  ENSG00000223715_6 (sequence is synthesized)
atccccgagctttgactttttaagagaacatgtgacagataatgccatctgagaaggattgcctcctttactgtatgttttccactgagatgaagattttggtcatttcctcattcatgt

SEQ ID NO: 942518 - DNA, 120 bp, Artificial Sequence
  ENSG00000223715_7 (sequence is synthesized)
tcctgcttttcaaaacccaagcaagaaaggaaacttctacagtgactttctcattatgaaatcttagcattcactagtcggccataatggaaaaccagccaaatggacacatatacactg

SEQ ID NO: 942519 - DNA, 120 bp, Artificial Sequence
  ENSG00000223715_8 (sequence is synthesized)
gtctgtacccgcagagaaagaaatgcaaatctctgtgatcagaaaactatcctatcttgtacattgttaaaagtctgcctccaaaaagtttacttctggaatactgtaattgaatagaat

SEQ ID NO: 942520 - DNA, 120 bp, Artificial Sequence
  ENSG00000223715_9 (sequence is synthesized)
cagggatcctacctgtgtccttcaactttcacatcttgtctactcaagtaagggttgaatttgcatgactatatctaaggttcgagggcttacctgttggcagtagacccagtagtctat

SEQ ID NO: 942521 - DNA, 120 bp, Artificial Sequence
  ENSG00000223715_10 (sequence is synthesized)
gaatggaaatgggcaaacctgtgacctcccaaaactttaatatgaaagttttgtttgtgtatactcatggcattattcttttaataaagagataatctatatagttttcttttttaaaag

SEQ ID NO: 942522 - DNA, 120 bp, Artificial Sequence
  ENSG00000223715_11 (sequence is synthesized)
aaacatgttccagcattcaattcactcgtacatccaacactatttgattgtctgctgggtgccagtcatggggctaagctctgcaggtacaaggctgagtaggactctgaccacattctc

SEQ ID NO: 942523 - DNA, 120 bp, Artificial Sequence
  ENSG00000223715_12 (sequence is synthesized)
agtataagagggaaataaacgtgatggaaataaatgttatggaatgaaataatggatgatcattaagacaccccaaattttggcactgaaaatgatgattccatctatgttaataaagct

SEQ ID NO: 942524 - DNA, 120 bp, Artificial Sequence
  ENSG00000223715_13 (sequence is synthesized)
gacagataatgccatctgagaagcttaggcaactcagtcatcaatgtgtcctcgagaagagcatatccccaaattggaaaataatccttcagggcatctgaacataaccacatttggctt

SEQ ID NO: 942525 - DNA, 120 bp, Artificial Sequence
  ENSG00000223715_14 (sequence is synthesized)
actttgtgaagcagttgtctgaatagaataagactggcttggaacgagattcacagagcaaccaaataaagatgattgagtgaatggctaaagaaataaatatgttcgaatctgtaccca

SEQ ID NO: 942526 - DNA, 120 bp, Artificial Sequence
  ENSG00000223715_15 (sequence is synthesized)
cctcccgcaagcacacagatcctctcttctctccatgtagtcactacttggggaaggggaatgggtggtatcagcaattcaagactgatttcttttccatcttcagcgcccctttccttg

SEQ ID NO: 942527 - DNA, 120 bp, Artificial Sequence
  ENSG00000223715_16 (sequence is synthesized)
atatgatgttaaaaccagaacaagaaacagatcgaggaagaggcagagtaacaacagccgggaagaagatacagttttgggccaagggaaaagagcttcattagcatatttgtcaagcag

SEQ ID NO: 942528 - DNA, 120 bp, Artificial Sequence
  ENSG00000223715_17 (sequence is synthesized)
tctaactatgtgaaggtttgaacagcagcttctgacatagaaaataaccacagcaaaaagaagcactaacaagtgacagatgtggttgactcatctccttctcccttcgactctctaatg

SEQ ID NO: 942529 - DNA, 120 bp, Artificial Sequence
  ENSG00000223715_18 (sequence is synthesized)
agcaattaaatagcctgaaacagaacaatcaagaggtctggcaaatccacacactagatgactgccttttcacttaactgtgtcctcatatggaagagaggagaaaagaggagaggaggg

SEQ ID NO: 942530 - DNA, 120 bp, Artificial Sequence
  ENSG00000223715_19 (sequence is synthesized)
gagaggcaagttctcttgtgtttcttcttacaaagcacaaatgccattatgagggccccaccctcaggacctcatctaatcctaatttcctcccaaaattaaatctcaaatgtcatcaca

SEQ ID NO: 942531 - DNA, 120 bp, Artificial Sequence
  ENSG00000223715_20 (sequence is synthesized)
cattagacctgtgagaggggctgtgacagtggaacccgaatgaagacaggaaaagtctgtagaggactgatggttatgttcaccattcaaattgcaagaaaaccaataagaagtcagtaa

SEQ ID NO: 942532 - DNA, 120 bp, Artificial Sequence
  ENSG00000223715_21 (sequence is synthesized)
tcatatggaagagaggagaaaagaggagaggaggggagagttttcttcttcatgcacagacaggcaccaatttgaagcttaatgacagcagaaacagagaacaactactaactaagagta

SEQ ID NO: 942533 - DNA, 120 bp, Artificial Sequence
  ENSG00000223715_22 (sequence is synthesized)
tttttaatacagtgctgaagagccagctgaactggctttgtagatcatcctcaggaaactgacggtcaggcctcctgtatgacaccagggagctgaggctttatggattggatcactgca

SEQ ID NO: 942534 - DNA, 120 bp, Artificial Sequence
  ENSG00000223715_23 (sequence is synthesized)
cccaatgagacacacctgctgcctgtcgaaccaaccctcttcctagctcctccataattcctttttttcctgcacgtgattacagtgagatgctagatccctcattcagctacctgctgc

SEQ ID NO: 942535 - DNA, 120 bp, Artificial Sequence
  ENSG00000223715_24 (sequence is synthesized)
tacagtgagatgctagatccctcattcagctacctgctgcctgttgaccagctcctcttcctctcccccggccctggttcttcttccaagctattagactatggaaatgatgttagacaa

SEQ ID NO: 942536 - DNA, 120 bp, Artificial Sequence
  ENSG00000223715_25 (sequence is synthesized)
aagcagcagagacaactcgcaacatcaacaatgcatttggcccaggaactgctaacgaatgcaccgagcagtgttggttcaaaaagttttacgaaggagacaagagccttgaagatgagg

SEQ ID NO: 942537 - DNA, 120 bp, Artificial Sequence
  ENSG00000223715_26 (sequence is synthesized)
tagtggccggcaattggaagttgacaatgagcaattgagagcaatcattgaagctgatcatcttacaactaaacaagaagttggggaagaactcaatgtcgactgttctatgatcatttg

SEQ ID NO: 942538 - DNA, 120 bp, Artificial Sequence
  ENSG00000223715_27 (sequence is synthesized)
gcatttgaagcaaattggaaaggtgaaaaagctcagtaagtgggtgcctcatgagctgagtgaaaattttaaaaaaattgtcactttgaagtgttgtcttctcttactctatacaacaac

SEQ ID NO: 942539 - DNA, 120 bp, Artificial Sequence
  ENSG00000223715_28 (sequence is synthesized)
aaaccatttgttgactgcatcgtgatgtgcgatgaaacgtggattttatacaacaactggcaatggtcagctcagtagctgaatcaagaagaggctccaaagcatttcccaaagccaaat

SEQ ID NO: 942540 - DNA, 89 bp, Artificial Sequence
  ENSG00000223715_29 (sequence is synthesized)
tttggtggtctgctgccagtctgatccattaaagctttcagagtcccagcatattgatgaaatgcaccaaaaactgcaatgcctgcagc

SEQ ID NO: 942541 - DNA, 120 bp, Artificial Sequence
  ENSG00000223715_30 (sequence is synthesized)
atgcaccaaaaactgcaatgcctgcagctggcattggtcaacagaagggtccagtttttctttatgacaaggtctgactgcacatcacataaccaatgcttcaaaaattgaacaaattgg

SEQ ID NO: 942542 - DNA, 120 bp, Artificial Sequence
  ENSG00000223715_31 (sequence is synthesized)
gctaccaagttttgcttaatccactatattcacctgacctcttgacaaccgactaccacttcttcaagcattttcacaacgttttgcagggaaaatgtttccacaaccagtaggatgcag

SEQ ID NO: 942543 - DNA, 120 bp, Artificial Sequence
  ENSG00000223715_32 (sequence is synthesized)
cacactggggtggagctcaggaagtttgcgttatttgcagaggggaggagcctggccgctcctgttccaggtggtacctgggattcagtctgtgaggtgggaaaccatctagcagggctc

SEQ ID NO: 942544 - DNA, 120 bp, Artificial Sequence
  ENSG00000223715_33 (sequence is synthesized)
tcactttgctgagagttcctgttttccttttttctcctttttgcccaatatattctatttttctcacccttcaaagtgtctgtgagcctagtatttcatggccatgtgacaagaacatga

SEQ ID NO: 942545 - DNA, 120 bp, Artificial Sequence
  ENSG00000223715_34 (sequence is synthesized)
cttttagctgaactaaggagaaagtcctataacaacatcctgaagcacagatttttatgctacagaaataaacaaacttatctctcattggcaaaaaggtgctgattataatggttccta

SEQ ID NO: 942546 - DNA, 120 bp, Artificial Sequence
  ENSG00000223715_35 (sequence is synthesized)
tagttataatgatttaaaattcacaatctgaaactgcaatcactgtgcaccaacctaatacataaacccctgactttagtcaggagtagggggaggacttgaggtttggctaatgtctct

SEQ ID NO: 942547 - DNA, 120 bp, Artificial Sequence
  ENSG00000223715_36 (sequence is synthesized)
gaggacttgaggtttggctaatgtctctctggctcacattgcccataatataataaagccttcttcaccagcaatattcagtgtctcagtgattggctttctgtgagagggggaacaatg

SEQ ID NO: 942548 - DNA, 120 bp, Artificial Sequence
  ENSG00000223715_37 (sequence is synthesized)
ggatctagactgaactcctggtgtttggtagcacttggtttggttaaattatttttttaaaacccccagtctgattttttcttcaaggattgacttaaataccacctactccaagaagct

SEQ ID NO: 942549 - DNA, 120 bp, Artificial Sequence
  ENSG00000223715_38 (sequence is synthesized)
ttccctgacctctccaactaaaattgaattttctttcttcctaacttcagcagaagttaaacttcacatgtgacactgaaaaggttcaaccttgtattaaaattatctatatatgtgtct

SEQ ID NO: 942550 - DNA, 120 bp, Artificial Sequence
  ENSG00000223715_39 (sequence is synthesized)
catctaccctattaagtagaaattatttgagggcagaaggtttttatgattgttttctatcctacttagcatctagcttagctccttggaacagtagtaggcattcagaaaaacttgttc

SEQ ID NO: 942551 - DNA, 120 bp, Artificial Sequence
  ENSG00000223715_40 (sequence is synthesized)
ttatttgatttggcttgctgaagaaaaacaatagcaccacttaataatcagaagagatagaaatgcatgcaaaaaattcctaccctacagtggaatgcagcgtctttaacaaaacgcttc

SEQ ID NO: 942552 - DNA, 120 bp, Artificial Sequence
  ENSG00000223715_41 (sequence is synthesized)
ctgattcttaaagtgctccctcctcagcaaactgctggtttgacctacactaaaacttcatcatcaggcataggctccccatttccctgatttattataaaggattaaagtgctcactgg

SEQ ID NO: 942553 - DNA, 120 bp, Artificial Sequence
  ENSG00000223715_42 (sequence is synthesized)
tatttacttttgatgatttatgcctagattgtatgtatagtcagcgtggaagaaatattgaagggtgtattcacaccagcatttttcagaaacagcctggctgagtgtggattggcagtg

SEQ ID NO: 942554 - DNA, 120 bp, Artificial Sequence
  ENSG00000223715_43 (sequence is synthesized)
cataataaaaagaagcaggagagccagtctcattttcaattgcaataatcccactctgtactggttgcaggatagagacgctctttatccatttttttatttatttagccaatcaataag

SEQ ID NO: 942555 - DNA, 120 bp, Artificial Sequence
  ENSG00000223715_44 (sequence is synthesized)
tcattattctctgagttagtcaaaaaacatctttatgtgggcacgaactgggtagtgccttcaaggcctttctgataattggtatcattacaactaaaatccagtggaattcctttataa

SEQ ID NO: 942556 - DNA, 120 bp, Artificial Sequence
  ENSG00000223715_45 (sequence is synthesized)
tattcatgccaatggacagacctagtatccttcttaaatagtagtcaaaaatctcaatattaacatgctatcttttctaattattaactgtgggtatgtccaatattaataggcatacgc

SEQ ID NO: 942557 - DNA, 120 bp, Artificial Sequence
  ENSG00000223714_0 (sequence is synthesized)
gctcgtgcccccaggcaggattccaacagtgcagaagcccccagtccccaagtccggggtggcaaggacttccagcctccccggggagccaccttggccctccctccctcctgctggctg

SEQ ID NO: 942558 - DNA, 120 bp, Artificial Sequence
  ENSG00000223714_1 (sequence is synthesized)
ggtgccgcgctgcggggctgctcaggttccctgctgagtcccccgctgggctgtgatcgttgcggatttaaacaccacactgtggaagcggagatggccccgcgtgcaccgctgaagtga

SEQ ID NO: 942559 - DNA, 120 bp, Artificial Sequence
  ENSG00000223714_2 (sequence is synthesized)
gtgaaggggctcgtggcaaatgatgcggggggacagcggccagagcagaccccggcggggtggcccgcccgggaggtggctgagggtccccggctgcggggtgaggggcgggaccgggag

SEQ ID NO: 942560 - DNA, 120 bp, Artificial Sequence
  ENSG00000223714_3 (sequence is synthesized)
gccactctcctttccttccaaggacgcccagaacccgcggagggaggagggggtgagggaggagggagagaggaggcaggagggagggaggaaggtggcggggagaagaagagagggagg

SEQ ID NO: 942561 - DNA, 120 bp, Artificial Sequence
  ENSG00000223714_4 (sequence is synthesized)
gaggaaaaggaaggaactgcgttggcctgtcgcctccgcactgtaagattctggcacccagggtcccggccccctctcctggggccaaacgttccggttcccgatgccaggctgcagaaa

SEQ ID NO: 942562 - DNA, 120 bp, Artificial Sequence
  ENSG00000223714_5 (sequence is synthesized)
aaatgagcacactgaacacgtggactagcacataaataaggttattacctcctttttattttttgcacactaattaataaactactgcaacggaaaaagagaaagcaggcagaatgcaaa

SEQ ID NO: 942563 - DNA, 120 bp, Artificial Sequence
  ENSG00000274029_0 (sequence is synthesized)
gtcacatgatcctaaggcttcaggaatcggaggaagtggctgacactgacttaccattttaaccaaacaatcactgcacttaagcttggataagggtcaaataaaactaacagggctctt

SEQ ID NO: 942564 - DNA, 120 bp, Artificial Sequence
  ENSG00000274029_1 (sequence is synthesized)
atgcaagcccttccagtctggtaagttatgagtatttatgttttatttccccccaaaaacaataagaccctcagaggcaaggaactcatcttggtttttgtcccttacacacctatctca

SEQ ID NO: 942565 - DNA, 69 bp, Artificial Sequence
  ENSG00000274029_2 (sequence is synthesized)
tgatgggcactggaaacaaaccacctggttcaaatcctggcttggtcacttattggccaagtagctccc

SEQ ID NO: 942566 - DNA, 120 bp, Artificial Sequence
  ENSG00000274029_3 (sequence is synthesized)
attgaatcatgggggcggtttcccccatattgttctcgtggtagtgaatatgtctcacgagatctgagggttttataaggggtttctcctcttgcttggctctcattcttgttttgcctg

SEQ ID NO: 942567 - DNA, 120 bp, Artificial Sequence
  ENSG00000274029_4 (sequence is synthesized)
ccaccatgtaagatgtggctttgctcctccttgcctttgtcatgattgtgaggcctccccagccctccccaggtgacacattggaactgtgagtcaattaaacctttcctatataaatta

SEQ ID NO: 942568 - DNA, 120 bp, Artificial Sequence
  ENSG00000223711_0 (sequence is synthesized)
cttcatgaccactgagtcagcagcaactcttttcttgccaagaatagcacattgttcttttccttttcaggtaatccctccccggaaagagaagatcacagattttgtcatattaaatac

SEQ ID NO: 942569 - DNA, 120 bp, Artificial Sequence
  ENSG00000223711_1 (sequence is synthesized)
attgtagaaattcatggtagcaggggcaagatcatttaaacaaaacagaaagtttcagagagagaaaaagccaaggacaaagattaatcatttttctgcttaaaaaaaatggctttgatt

SEQ ID NO: 942570 - DNA, 120 bp, Artificial Sequence
  ENSG00000223711_2 (sequence is synthesized)
tgcaaccatggaatgctccactgtttctcttctcttcaaagacatctactgaaaggattccttaaccttaccaagtggccaaaatacttttctgagaagagtcacagagcataggccccc

SEQ ID NO: 942571 - DNA, 120 bp, Artificial Sequence
  ENSG00000223711_3 (sequence is synthesized)
ttcagaacctgtgaggcaaaaacgaaagaagaaggcaggacacgcagtgtaacaaaccttggaatggacttcgccagacttcatcagaagaaagcagtgcaagaggggactgcagaggaa

SEQ ID NO: 942572 - DNA, 120 bp, Artificial Sequence
  ENSG00000223711_4 (sequence is synthesized)
agctggggcttgggaaaccagcagcaggggccacgtgggcaggtggtttctgtgtgaacctctgatctgtgcaacataaacaggaaatgttgaaggcttccagtgctcttttttgatgtc

SEQ ID NO: 942573 - DNA, 120 bp, Artificial Sequence
  ENSG00000223711_5 (sequence is synthesized)
gagaacattctacggcacaaaagagtttgcctctcactgtttctcatatatggaggttttctaatcagcatcctgaacagaattgaattaaaaataaaaaccaaagtaaaactagcttta

SEQ ID NO: 942574 - DNA, 120 bp, Artificial Sequence
  ENSG00000223711_6 (sequence is synthesized)
attggtctgaggactccgctttcttcactgcccattcatcttcatactgttctcatatttttttttaaattgggatatgcaatgatccttagtttataaattcaactccactttgccaca

SEQ ID NO: 942575 - DNA, 120 bp, Artificial Sequence
  ENSG00000223711_7 (sequence is synthesized)
cctgtacactcccttccctccctctcccaagtccagtccgcagctcgctcatcaccaggctcttttccatgactctttcttgatcaggcctttttatcgtcctcaccacaggtaatccct

SEQ ID NO: 942576 - DNA, 73 bp, Artificial Sequence; identical to SEQ ID NO: 744738
  ENSG00000274026_0 (sequence is synthesized)

SEQ ID NO: 942577 - DNA, 120 bp, Artificial Sequence; identical to SEQ ID NO: 744739
  ENSG00000274026_1 (sequence is synthesized)

SEQ ID NO: 942578 - DNA, 120 bp, Artificial Sequence
  ENSG00000274026_2 (sequence is synthesized)
gggccaggccttcacacacccaaagcggaaccgcgtcggcgaaaaggattgacaaccggtctcatgacccaggcagagaggcagaaacaggctcaccaaagacaggccgccatgcgagaa

SEQ ID NO: 942579 - DNA, 120 bp, Artificial Sequence
  ENSG00000274026_3 (sequence is synthesized)
caaagacaggccgccatgcgagaaacagctttgtggtgcacagggcacattcggccaaggacacacacgcacacgggcacacacacacaaaccgacagagagagggaaagaaacacacag

SEQ ID NO: 942580 - DNA, 120 bp, Artificial Sequence; identical to SEQ ID NO: 744742
  ENSG00000274026_4 (sequence is synthesized)

SEQ ID NO: 942581 - DNA, 120 bp, Artificial Sequence
  ENSG00000274026_5 (sequence is synthesized)
gaacgacccttcggtgagagagcaccccaggggcacgcaggccgtcctgtcctcgagatcaccgcgtcacgacttttggggagactcacccccaccaacaccgtccagagaggcctgagg

SEQ ID NO: 942582 - DNA, 120 bp, Artificial Sequence
  ENSG00000274026_6 (sequence is synthesized)
gtcgggtttcctcaccctgttcggccctttgtgactcttggcatccggagactttcccctcgacccagtggagccgtcaggccggagcctcagagccttgacacccaagcactgccacgg

SEQ ID NO: 942583 - DNA, 82 bp, Artificial Sequence
  ENSG00000274026_7 (sequence is synthesized)
gtgcttcgcgcatgcgcattggctgggccgactctttctcccctcctggcagtcaggctgcgtcccctttaaagaacgccac

SEQ ID NO: 942584 - DNA, 120 bp, Artificial Sequence
  ENSG00000274026_8 (sequence is synthesized)
ctcctggcagtcaggctgcgtcccctttaaagaacgccaccgctgagaactgaccctcacatctcccttcctgaatttctttagggaaagcaacaaccatccctgtaagccatgggtttt

SEQ ID NO: 942585 - DNA, 120 bp, Artificial Sequence
  ENSG00000274026_9 (sequence is synthesized)
catgcggaggaaggagagggctagttgtctgagagggtaactgcttaaggctgcagactaggaaatgggattccaggtttaagatagctcctttctggacctcagtccttcacctagtca

SEQ ID NO: 942586 - DNA, 120 bp, Artificial Sequence
  ENSG00000274026_10 (sequence is synthesized)
cctagtcacagggtggattgcctctaaggatacttaggggaaaaggaaccaaatttgggatggttctccttgctttaagccttgataggagacggggaggccaacccttctctgcagacc

SEQ ID NO: 942587 - DNA, 120 bp, Artificial Sequence
  ENSG00000274026_11 (sequence is synthesized)
gtgatcctcactagacagaggagctccaaacctgcccatctcatcccatgcaccgacggtgcctggcctggctccaaactcccgaaaggaactattttacaggtgccaaaaaggggacag

SEQ ID NO: 942588 - DNA, 120 bp, Artificial Sequence
  ENSG00000274026_12 (sequence is synthesized)
tgttgataataataataaaatgaaacaatctgattggggcattgctggatcagaaaatgtgtgacctttttaaagttaaattgttaaaaaattttaactattaaacattttaaatattaa

SEQ ID NO: 942589 - DNA, 120 bp, Artificial Sequence
  ENSG00000274021_0 (sequence is synthesized)
actgaagccacctgccagaacgagaaaagcaatcatctaacctgagaagccgtagtagttttcacagcttgtaagaaccgcagcccggcgcaagaaacaccacaagcatcctacgaaccc

SEQ ID NO: 942590 - DNA, 120 bp, Artificial Sequence
  ENSG00000274021_1 (sequence is synthesized)
cctacatacagaaccatctataagagaaacacactttaaatgtgcaccatcgggaatggaacgaacgggcccgcctcgccagggaacccttattcgcttgaatccggaaatagacaaaat

SEQ ID NO: 942591 - DNA, 120 bp, Artificial Sequence
  ENSG00000274021_2 (sequence is synthesized)
ggcaactttttggaatattttgagagctaagatgtgccaatttgcatccccaacaatctctcccgtcctgcaaatcttaattcaaaatcgaacgatagaaaacagggtgatggtggagga

SEQ ID NO: 942592 - DNA, 120 bp, Artificial Sequence
  ENSG00000274021_3 (sequence is synthesized)
tgttctggctaagaaggcgcagaacccgttagaaagaaaccgccggtacccgcagccggaagcgagtggattctgagccggcccggttctctggtgcggaacgcgcggttcgcggcccct

SEQ ID NO: 942593 - DNA, 120 bp, Artificial Sequence
  ENSG00000274021_4 (sequence is synthesized)
acctcgccggctgccggtccctaggcgggcagcgcggctccgaagctccagctgagcggagcagaggtattttcaatccacgcgccccgcccgcagccctgcgcccctagccctgccccg

SEQ ID NO: 942594 - DNA, 120 bp, Artificial Sequence
  ENSG00000274021_5 (sequence is synthesized)
cgcgcggagttccctgggcgcgtaccttccaggtagaacgcccggcagccctcgtccttgagcttcttgagcagcagcccgagcaccgactcgccgcccgtattctcgttccagtcgctg

SEQ ID NO: 942595 - DNA, 120 bp, Artificial Sequence
  ENSG00000274021_6 (sequence is synthesized)
ctgctctcgtcgtagagcaccactgtgtcggtgccacagcgccgggtgaagcggtcccggtcctcgccgcgcgtgaagagcgcgcgcaccggcaggttacccttctgcaggcgccgcagc

SEQ ID NO: 942596 - DNA, 120 bp, Artificial Sequence
  ENSG00000274021_7 (sequence is synthesized)
atgatgcccgggatggccacgttgatggccgactcgatgtgcgacgactcgtatagctcctgcggccggcagtccatcagcagcagccgctcgttgcccagctccagctgctcgttgagc

SEQ ID NO: 942597 - DNA, 120 bp, Artificial Sequence
  ENSG00000274021_8 (sequence is synthesized)
cacgccaccgtcttgctgatcgccatttccgacgcgaagggcacgggtctgagcgtatctatcatgggggtcgagctgcgggagagggcggggtgcctaccagacgcccctcggggcagg

SEQ ID NO: 942598 - DNA, 120 bp, Artificial Sequence
  ENSG00000274021_9 (sequence is synthesized)
gagacagaagtaaagccggaggttctctctgcacccagctgcagccgctggctcttagtgtcaatgaatctctctcaatgaagctgcccagatagtttttgttcctccccagtgaatgaa

SEQ ID NO: 942599 - DNA, 120 bp, Artificial Sequence
  ENSG00000274021_10 (sequence is synthesized)
atccaattaattcggactccgtgctactgagaggggaggaaaaaaagtctagcggcttctaatccctccctccaaggctgcacctcaaatctacccgggcgtctttctccccggattatt

SEQ ID NO: 942600 - DNA, 120 bp, Artificial Sequence
  ENSG00000274021_11 (sequence is synthesized)
taagactcgatttgctatctcttggactcagcctcgcacaccccctgcgcgaggcagctcctcaatggatacaaacagcgagcgtctcaatggatacattctccgggccagccaatgagc

SEQ ID NO: 942601 - DNA, 120 bp, Artificial Sequence
  ENSG00000274021_12 (sequence is synthesized)
gtgctgcggaaggggctgttgccgtggggacgggccggctggaacaggttgtgttgatgaattgttaatgagtttgtcattcacaaaaacggaaaggaatttccgctccggataagcccc

SEQ ID NO: 942602 - DNA, 120 bp, Artificial Sequence
  ENSG00000274021_13 (sequence is synthesized)
agtgcaaacaagctgcaacagcgggctcggcgggaggaaggagaaagaaggggaggcggcagcggaggaggagcagggcacataaaccagggcacttcagttgtctcatgtttccttctg

SEQ ID NO: 942603 - DNA, 120 bp, Artificial Sequence
  ENSG00000274021_14 (sequence is synthesized)
ttgagagttcacacttcgcgtcggaacttttgcgcaccaatggcgcaattagcatgcacaaaagcccttgttcgcgacgcttgcgttcgcgagctagctttaggaaaacttgtgctgact

SEQ ID NO: 942604 - DNA, 120 bp, Artificial Sequence
  ENSG00000274021_15 (sequence is synthesized)
tttcgttctttgtattcccttcaaactcatttggacccaagttcgccttaaccctcccctcccccaaccccccttctttaggcggtgtgtggcatttgtttgccacttttaaaggcccag

SEQ ID NO: 942605 - DNA, 120 bp, Artificial Sequence
  ENSG00000274021_16 (sequence is synthesized)
ctctgtttgctctgatgttcttttagccgaggctgtgttggggctggtgaactgactgggctttagtgaccgatgaggtgttaaatgctaatccaacatatttcgaaacaaaccaggatt

SEQ ID NO: 942606 - DNA, 120 bp, Artificial Sequence
  ENSG00000274021_17 (sequence is synthesized)
ttgttgaaacattttaaagcaaacaaacaaacgtctggttgtgcagaaaatcagaagaaaaccttttttcttaaaataacattttattttcattaaaacaatgtagagtgcagaaacaaa

SEQ ID NO: 942607 - DNA, 120 bp, Artificial Sequence
  ENSG00000274020_0 (sequence is synthesized)
ggggatacagcaggaagttgccatctatgagccagaagggtgaacctcaccccagatgctgaatctgccttgatattggacttcccagcctgcacaactgacaaactggaaacacaggtt

SEQ ID NO: 942608 - DNA, 120 bp, Artificial Sequence
  ENSG00000274020_1 (sequence is synthesized)
atatcaccaaggctttgactgaaacatcatgttttcagatatgaccagaaggctttaggggactaaagttggctttatggaaccaataaagtaccatcttggaaaaactggctctagggt

SEQ ID NO: 942609 - DNA, 120 bp, Artificial Sequence
  ENSG00000274020_2 (sequence is synthesized)
tcccagacttacaggcactgtacgtggcactgagaatgcaaagcaaaacgagtcatggtctactggcgggagccttctcagcggagaaaagatcaacaagaaaagtgcctgctggagacc

SEQ ID NO: 942610 - DNA, 120 bp, Artificial Sequence
  ENSG00000274020_3 (sequence is synthesized)
tctcctagggcataaaccaatatagaggtggggcagctacgtcagcctgaggtgtccttaggcagaacagaaagtgagaatcagagcagtatctcatttctgaacacctggattgtagct

SEQ ID NO: 942611 - DNA, 120 bp, Artificial Sequence
  ENSG00000274020_4 (sequence is synthesized)
ttccctggactgactgtcaaaggaggtggttttaaaaagcaagccaaacaggtttccatcctttaggaagaccctggaacgtgccagttgattctgacaatttctcatgaacagaaacac

SEQ ID NO: 942612 - DNA, 120 bp, Artificial Sequence
  ENSG00000274020_5 (sequence is synthesized)
ctaggaagggagaactgttctgtttcatcaaatggaaatgggacatggacagtttctcctatcccatgcagaccatgctcctgaattaaaactgcagaatgtgttaaagcatcattcaac

SEQ ID NO: 942613 - DNA, 120 bp, Artificial Sequence
  ENSG00000274020_6 (sequence is synthesized)
tgggattttcttcctcctctaccaccctgaacagcaagaccaatacatcctgtatttcctcctcttcagcctacttgtgaagacaaggatgaagacctccatgatgagccatctccactt

SEQ ID NO: 942614 - DNA, 120 bp, Artificial Sequence
  ENSG00000274020_7 (sequence is synthesized)
aatgactgtctcacattggccggcaacttgttccagtttgtgtcttccagattacaataattccatgtaaagatgatgctggcacaaggctttcaacccatcccctcttctgacccagaa

SEQ ID NO: 942615 - DNA, 120 bp, Artificial Sequence
  ENSG00000274020_8 (sequence is synthesized)
gataaagacatcctacctttgagccttttagaacaggtatccagggattttacctctccagtgctaggcagggtctatgcccataacatcagcaggaagcagttacagaagatgaacctc

SEQ ID NO: 942616 - DNA, 120 bp, Artificial Sequence
  ENSG00000274020_9 (sequence is synthesized)
cgcccttctgcaagccccttaagattaaggaggagtatataatctctgatggggaaatgaggtaggagaccagaaggacttattttccattcccaaccccattgaacagagcaggatctg

SEQ ID NO: 942617 - DNA, 120 bp, Artificial Sequence
  ENSG00000274020_10 (sequence is synthesized)
gtcaaaacagggtgcagtggagaagcctgctgaaaccagcagatgatgatgaaagtgacctctagttgccctcactgcttatgagcataaagacactaccactgggaccatggccagttt

SEQ ID NO: 942618 - DNA, 120 bp, Artificial Sequence
  ENSG00000274020_11 (sequence is synthesized)
acaaatgtcatggcaacacaccttggcaatggcctggaagttactttatatggttctggaaactccctgcccctttcccagaaagttctgaataacctacctcttaattggcatgcaatt

SEQ ID NO: 942619 - DNA, 120 bp, Artificial Sequence
  ENSG00000274020_12 (sequence is synthesized)
aaaagtggctctaaatacaactagctagtagcccacaggcacaaactctgggcacactgcctataggttagccctgctctgcaagaagtagcaccagttcaataaaagttgctttctctc

SEQ ID NO: 942620 - DNA, 120 bp, Artificial Sequence
  ENSG00000274020_13 (sequence is synthesized)
gtggaaggccggagtgcgggccgtgaggggtgtgcgcgcttgagccggagcggggctcgcccctcgtcggctcccgccgcccagccggtgatcgctctccggccgtccccggcaccctcg

SEQ ID NO: 942621 - DNA, 120 bp, Artificial Sequence
  ENSG00000274020_14 (sequence is synthesized)
gccccccacggcggttggtccgggcgggggaaggagaaagtgagactcggtgtcatcaccaatccgtcgccagaaggggaggaaactggaatccagcagcggcgagcagcagctgggcgg

SEQ ID NO: 942622 - DNA, 120 bp, Artificial Sequence
  ENSG00000274020_15 (sequence is synthesized)
gacgtcgtgatccagaagtccagagctgaggactgcctgtttgcagattcagatactcagactccacctttacttttacctatgttggcggccccagaaggtatttatgggtgtagagtt

SEQ ID NO: 942623 - DNA, 120 bp, Artificial Sequence
  ENSG00000274020_16 (sequence is synthesized)
gcttcatttcctgttcacactcttgtgtttcctttgttcttagcgtgttccgtgttcgggtattttggttgcttgtttgattactgtggcttttctttacctacaacccaagcctgacgt

SEQ ID NO: 942624 - DNA, 120 bp, Artificial Sequence
  ENSG00000274020_17 (sequence is synthesized)
ggcagacgtcacttcctcttgctggttcaggcagcgggttggtcggctgactggcagaaaggcagatggggcctgggaaaggcactgtcggtgacatcacggatagggcgacttctatgt

SEQ ID NO: 942625 - DNA, 120 bp, Artificial Sequence
  ENSG00000274020_18 (sequence is synthesized)
agatgaggcagcgcaggagctgctgcttccccacctgctgcttcgcctcgaaggagttcccgagccttgggagcgggctcaggaccgctggtccggccggagagtcccagctgggaacgg

SEQ ID NO: 942626 - DNA, 120 bp, Artificial Sequence
  ENSG00000274020_19 (sequence is synthesized)
ctctccccgcgcccaggtgcccttgcttatgttcaccgaggccttcaggtcagaaccgcagtctgacttgtcggcagaatgtgtcggcgatctaccccaactacccagcaataaaatggg

SEQ ID NO: 942627 - DNA, 120 bp, Artificial Sequence
  ENSG00000274020_20 (sequence is synthesized)
acacattacagaaacatgagatagcatggattacctcaaaaacatcatgccgagtgatgaaaagagggcatcctgtgtggcgccatcaaggtgaatttctagaacagatataacacaata

SEQ ID NO: 942628 - DNA, 120 bp, Artificial Sequence
  ENSG00000274020_21 (sequence is synthesized)
ccatgactccagtgttgcccgaatgttatgagaagttatttttgaacttaagatcggccctttcttcaaataagagcagttggaacaacaaaagctgttcagttgtacccttggaatcca

SEQ ID NO: 942629 - DNA, 120 bp, Artificial Sequence
  ENSG00000274020_22 (sequence is synthesized)
ttgtcgtaggctttgtccactttgacaaactgaagacggggactcgactcaccttcgccagccacaggaggacctccagacgaggaccggactcgccgcctttctttcccgtcagaaagg

SEQ ID NO: 942630 - DNA, 120 bp, Artificial Sequence
  ENSG00000274020_23 (sequence is synthesized)
gatcccttgcggacaagaccgaatggcccctaaggcttctctgcaggtccaaccgaaacaggcctgaagttccaggatgggcgagaggatcctctttgagcgaaaccagccttctgcctg

SEQ ID NO: 942631 - DNA, 120 bp, Artificial Sequence
  ENSG00000274020_24 (sequence is synthesized)
gctggccctggtcaacacactcggaagaggccgatttggaggacagaacggaagaaaagacctaaagatgatcctcatccaatcacttaaaggcctgaatagaaccaaaagtctgacctg

SEQ ID NO: 942632 - DNA, 120 bp, Artificial Sequence
  ENSG00000274020_25 (sequence is synthesized)
cccatgagtaagagagagctccttctgcctgattgcttcagctgagatatcagccttttcctgcctttggaattgaactgcaacactggctcttcctgggcctcaagcctgccagctttt

SEQ ID NO: 942633 - DNA, 120 bp, Artificial Sequence
  ENSG00000274020_26 (sequence is synthesized)
gaactgtaatcacaccatcatctctcctggttctcaggcctttggactcaaatcagaaacacaccatgggctctcctgtgtctcaagcttgccaactgtgatcttgagacttctcagcct

SEQ ID NO: 942634 - DNA, 120 bp, Artificial Sequence
  ENSG00000274020_27 (sequence is synthesized)
ccataatcacatgagtcaattgttggttctgtttctctggagaaccctaatccatcactttacatatttcttccattacacatattgtttcccagcatattaaataatttactgattata

SEQ ID NO: 942635 - DNA, 120 bp, Artificial Sequence
  ENSG00000274020_28 (sequence is synthesized)
agtaactatggttttcctttctcatttcaattgccacctcaattgactgaaatgtgaacaccaactcccgcacttaaacgttgaagccctaacacctactgtgatgatttatgcagctgg

SEQ ID NO: 942636 - DNA, 120 bp, Artificial Sequence
  ENSG00000274020_29 (sequence is synthesized)
ggcctttgagagatttgtactacagtcagaacaaacaaatcactggatccagcagaagccttagatatatgacataacagagatttgcacaaagatttgccccattgccttctcgaattt

SEQ ID NO: 942637 - DNA, 120 bp, Artificial Sequence
  ENSG00000274020_30 (sequence is synthesized)
ctcttatcatcaatccatctagctggagctctctgaaggtcatcagagggtctagggctttgggaggacaaggctgcaggcagccgagattgtgccgctgcactccatcctgggcgacag

SEQ ID NO: 942638 - DNA, 120 bp, Artificial Sequence
  ENSG00000274020_31 (sequence is synthesized)
ggcagcacaggggctgctgcttcgccaccggctgcttcgctacgaaggagttcccgtgctgtgggagcaagtccaggaccgctgttcagacctgaaagtcccagctgtgtgtcaaggctg

SEQ ID NO: 942639 - DNA, 120 bp, Artificial Sequence
  ENSG00000274020_32 (sequence is synthesized)
gaagggctccggggtgcgcggggcaagtgaccgtgtgtaaaaagggtgaggcgtgtggagcagtagcaagacggaaacgtgtgaactcctaattacctggcatcggagaggacgttatga

SEQ ID NO: 942640 - DNA, 120 bp, Artificial Sequence
  ENSG00000274020_33 (sequence is synthesized)
ctctcacccaggatcacttccgaaaccagttggccttcagcccctgcctcggccagaggtttcatttttaactgaatatttacgaaagctgaaagcgtgcgaggggggtggggtggaaat

SEQ ID NO: 942641 - DNA, 120 bp, Artificial Sequence
  ENSG00000274020_34 (sequence is synthesized)
agcggctgcttcttttccaaggatttatttaatggggatgtgttcaaggcaagaccgaattcagaaggatatcgacgtcgtgatccagaagtccagagctgaggactgcctgtttgcaga

SEQ ID NO: 942642 - DNA, 120 bp, Artificial Sequence
  ENSG00000274020_35 (sequence is synthesized)
cggatgtggaactccacatctatgttcatgatgcggcggccagggccggcggcgggggccacgaccgcgacccacactaggcctcccgcctgcccgcccgcagcccgtcagcggagcgct

SEQ ID NO: 942643 - DNA, 120 bp, Artificial Sequence
  ENSG00000274020_36 (sequence is synthesized)
gcgggaggcccggcgcctcgcaatgcgggaggcccggcgcctcgcaatgcagaaggcccaggctgcctcttggcctgggctccctacagttgagtgtggcccaggccaaccgaacactag

SEQ ID NO: 942644 - DNA, 120 bp, Artificial Sequence
  ENSG00000274020_37 (sequence is synthesized)
agcagcagcgatggaaggctgggtcgcctgagcagctcggaaggccctttttaactttagacgttctgtttgatgaagagatacataggttatcaacttaggccaggttcaaaaggccct

SEQ ID NO: 942645 - DNA, 120 bp, Artificial Sequence
  ENSG00000274020_38 (sequence is synthesized)
gaatgacctgtcctgggccagtgaacctggacttcaaccagatgtcagaatctcaaggtacaaccaacattttcgctccatgttgggtcaaaacagttaacacagccaagatattcaagg

SEQ ID NO: 942646 - DNA, 85 bp, Artificial Sequence
  ENSG00000274020_39 (sequence is synthesized)
tgttgggtcaaaacagttaacacagccaagatattcaaggtttcagtagatactgactaagtcctggccagctgtgaaaagaaag

SEQ ID NO: 942647 - DNA, 120 bp, Artificial Sequence
  ENSG00000274020_40 (sequence is synthesized)
gaatcttctgcctcaacctcctgagtggctgggattacaagtgtaggccaccatgcccggctaattttctatattttcagtagagatggactttcaccatgttagccaggctggtttcaa

SEQ ID NO: 942648 - DNA, 120 bp, Artificial Sequence
  ENSG00000274020_41 (sequence is synthesized)
ctgcagatacagtaggaagatggcagtctatgaccaggaagaggttcctcaccataaccctaccatgctggcaccttgaccttagacttccaaactccagaactgtgagaaatgtctgtt

SEQ ID NO: 942649 - DNA, 120 bp, Artificial Sequence
  ENSG00000274020_42 (sequence is synthesized)
ctcctgccagtgctgtattttgcctgcacccctctggcttggcttctgcactgagaccctcctaacaaatgatcctcatccaatcacttaaaggcctgaatagaaccaaaagtctgacct

SEQ ID NO: 942650 - DNA, 120 bp, Artificial Sequence
  ENSG00000274020_43 (sequence is synthesized)
cgaggatggattaattcaacaagtcctagtcgtgcgcgctggtgagtgccagaccctgctccccgcgaggggacccaggagccaccctcaccacgatccctgccctggtggagcccccgt

SEQ ID NO: 942651 - DNA, 120 bp, Artificial Sequence
  ENSG00000274020_44 (sequence is synthesized)
gcgggacacaggatccgaagatggcagcggaagttcctcagcggcctcaaaagtgactgggcagagtgggcacaggctccctcactgggtgaaggaggcgcaaagaacgggaagagccat

SEQ ID NO: 942652 - DNA, 120 bp, Artificial Sequence
  ENSG00000274020_45 (sequence is synthesized)
cccgggagcccaccggcctttcagtttcccttgggcccccaggcggttcaggtctgtgtcggggccggggcgtttccggcagcttttgatgaaggcgaggggcaaggtcgtcctggttcc

SEQ ID NO: 942653 - DNA, 120 bp, Artificial Sequence
  ENSG00000274020_46 (sequence is synthesized)
agaatctcccaacctgcgggtctccaatgagactaacacgattcaccactctaatctcttcagttttccaaagccttgcacagttgtactgtctggtgggctctgaggttgggacggttg

SEQ ID NO: 942654 - DNA, 120 bp, Artificial Sequence
  ENSG00000274020_47 (sequence is synthesized)
ggggagtgtttggtgagtgcacccttcctatagtgcccagaagaaggtacaatacctgtctctgtggcacaatcggttagcgcgttcggctgttaatctagaggttggtggttagagccc

SEQ ID NO: 942655 - DNA, 61 bp, Artificial Sequence
  ENSG00000274020_48 (sequence is synthesized)
cgcgttcggctgttaatctagaggttggtggttagagcccactgagggatgcctcctccag

SEQ ID NO: 942656 - DNA, 120 bp, Artificial Sequence
  ENSG00000274020_49 (sequence is synthesized)
tcccctgcctcagcctcccgagtagctgagaatacaggcgagcgccaccccgcccggctaatgttttgtattttagtagagacagaggtttcaccttattggccaggatggtctcgatca

SEQ ID NO: 942657 - DNA, 120 bp, Artificial Sequence
  ENSG00000274020_50 (sequence is synthesized)
attacaggtgtaagcaaccgcgccctgcccggctgcctgcttcagcttttaaagcgttcatgcattatcaatcactagataaacggcggagattatatcttcccagagtcctaagccact

SEQ ID NO: 942658 - DNA, 120 bp, Artificial Sequence
  ENSG00000274020_51 (sequence is synthesized)
agggttgtgtctctgtggcacaatcagttgtcgcatccaaaaggcctagctaacttttgtattttttgtagagaaagggtttcattatgttgcccatgctggtccccaaactcctgagct

SEQ ID NO: 942659 - DNA, 120 bp, Artificial Sequence
  ENSG00000274020_52 (sequence is synthesized)
taggattacaggcatgagccactgcacagggccttatacaatgcttctaatttcagcacatttagcaaacttatcttctgcgggagaggtaccaaatcacattccagtttatttctcaac

SEQ ID NO: 942660 - DNA, 120 bp, Artificial Sequence
  ENSG00000274020_53 (sequence is synthesized)
caaatcacattccagtttatttctcaactctaataatgtccctttcttcatttacttgctgacacaacaaattttctcccctcccgtactttttgttttgagactaggtgtcactctatc

SEQ ID NO: 942661 - DNA, 120 bp, Artificial Sequence
  ENSG00000274020_54 (sequence is synthesized)
acccaagatggagtgcagtggcatgatctcatgtcactgcaaactcaccgcccctgcaaccatggcactagtgatcctccagaagagctggaactacagagaggacatcttgctgtgttt

SEQ ID NO: 942662 - DNA, 120 bp, Artificial Sequence
  ENSG00000274020_55 (sequence is synthesized)
tccaggctggacctgaatgaactcctgggctcaatcaatccttccacctcagcctaacatttacactgggagcagagatgcatttggacatataaactgttaacatgaggtaagcgccaa

SEQ ID NO: 942663 - DNA, 120 bp, Artificial Sequence
  ENSG00000274020_56 (sequence is synthesized)
ggtctagagaaggcagtggaagagatggcaaactccggcaccatgtctgcgtgtccagtgtgctctgctggagcagcacatttttgtacattgctgtatttgaaaaaaccctgcaagaat

SEQ ID NO: 942664 - DNA, 120 bp, Artificial Sequence
  ENSG00000274020_57 (sequence is synthesized)
catgaaactggacgaccatctttataacactcccagtgataaaacaagtaagaatggctggtttgtagtcatctgagcagcctctctagtttcgtagatatggtttctctctgatatcga

SEQ ID NO: 942665 - DNA, 120 bp, Artificial Sequence
  ENSG00000274020_58 (sequence is synthesized)
acgacttccaatgtcaagcggaatgctacatcacaaggataaccgtatgtgaaaagaaccagttttctttgtaatcctgaactttctagtttgcgcattaaaagacattatttgaagaag

SEQ ID NO: 942666 - DNA, 120 bp, Artificial Sequence
  ENSG00000274020_59 (sequence is synthesized)
cacaggtgaactggatgtgtttattcaatgtgtttttggaatgcatgtgtaaataaaaatgactgtgtcatacttcccatattcatcccggaacctcctagagttcccttaggttctgcc

SEQ ID NO: 942667 - DNA, 120 bp, Artificial Sequence
  ENSG00000274020_60 (sequence is synthesized)
aattgtacattgaaagtacaacaggcccgtcgtggggattaattttcattgaacatttctaggaggagggaggaggaggtggggggaatgtgacagtctcaacaacagttgctatactac

SEQ ID NO: 942668 - DNA, 61 bp, Artificial Sequence
  ENSG00000274023_0 (sequence is synthesized)
ttagctgggtgtggacccgggaggtggaggttgcactgagccaagatcatgccactgcatt

SEQ ID NO: 942669 - DNA, 120 bp, Artificial Sequence
  ENSG00000274023_1 (sequence is synthesized)
tttagtactaggactattaaattgaataagtggttaataatcttcccattacaaaaatacatagtcagatgatttggcaggcttgtctaccaaactttcaagcaacaaatcatctgttta

SEQ ID NO: 942670 - DNA, 120 bp, Artificial Sequence
  ENSG00000274023_2 (sequence is synthesized)
tacaaattcttctgggcattgaagaaagagggactacttcagctcatcttgagagggtaacgtaaccctgctaaatccagagacgcacattaccaaaacaaaatcacgggtctactacat

SEQ ID NO: 942671 - DNA, 120 bp, Artificial Sequence
  ENSG00000224842_0 (sequence is synthesized)
aagttttgatcgtcttcgaaacaaatccctctgctccacccccttgaaaaattgatttgggagttggggagcgaaggctttcttttttctcctctgccttctttattattaatattttgt

SEQ ID NO: 942672 - DNA, 120 bp, Artificial Sequence
  ENSG00000224842_1 (sequence is synthesized)
aaagctccagcgctacgaggagtggccccgagcgaggccagactgcgcggacggcagggagcgcggcggctccgccaggggacggcgccggccgggagtggccgcttgggaacccccgac

SEQ ID NO: 942673 - DNA, 120 bp, Artificial Sequence
  ENSG00000224842_2 (sequence is synthesized)
gaaacataagtgctcaccacaacacccagcacctaccaggcctctatacatatttgcctgtctggaaccgggagcttccccagctgaggaccacagtgagagcagagaagacccaggatc

SEQ ID NO: 942674 - DNA, 120 bp, Artificial Sequence
  ENSG00000224842_3 (sequence is synthesized)
gtatttgaaaccataaaagccacatgaagacactaagaataacttgcagaaagacattttctatgaattgaacacagagtcccaaaacccagaaagttccctggtctctatctcatgggc

SEQ ID NO: 942675 - DNA, 120 bp, Artificial Sequence
  ENSG00000224842_4 (sequence is synthesized)
aggcatgagccaccatgcctggcccaggttattcttaatctcaccttttagaggtagaaagtggagagccccgccctgtgggctttaaatcttgttccacttcagacactttcacagctc

SEQ ID NO: 942676 - DNA, 120 bp, Artificial Sequence
  ENSG00000224842_5 (sequence is synthesized)
gcggggccccgcggaggggcccggctttgtggaggattagaggctcccgccctaccctacctgcgtgtgtgtcgcctgtctggaaccgggagcttccccagctgaggaccacagtgagag

SEQ ID NO: 942677 - DNA, 120 bp, Artificial Sequence
  ENSG00000224842_6 (sequence is synthesized)
catcctatttgatctttatcttaaatccacttcaaaatgctgtggcttggtggattgaaggttcgccccttcctgtaattatttggtgtctggtaaagtttttatgagtgtttgtgcaaa

SEQ ID NO: 942678 - DNA, 120 bp, Artificial Sequence
  ENSG00000224843_0 (sequence is synthesized)
agtggcgcaatcggttagcgcgcggtacttatatggcagtatgtgtgcgagtgatgccgaggttgtgagttcgagcctcacctggagcattgttttccaacccaaaatagcattacttga

SEQ ID NO: 942679 - DNA, 120 bp, Artificial Sequence
  ENSG00000224843_1 (sequence is synthesized)
agtgcctttccccctgtaatccgactccatcgtctttaacgtgtttggaattgtgtacacagtttattgttattggtttccttagcctttttagaaccaagcaacgccaattaccaacaa

SEQ ID NO: 942680 - DNA, 120 bp, Artificial Sequence
  ENSG00000224843_2 (sequence is synthesized)
aggcagtaagaaaacatatcagcttccacttttacctttaaggagaagccagctcccatgttaagaagttcaaatacctagagactgcgatggtttgcagaggctcaagctaaccacatg

SEQ ID NO: 942681 - DNA, 120 bp, Artificial Sequence
  ENSG00000224843_3 (sequence is synthesized)
gaaagacatggagagatattccttgccaaccctcaactactccaactattctaagacatcaaacctaaaaacaaaccgcaggtcacccaccggtctgaagaggaggatgagagacaaaga

SEQ ID NO: 942682 - DNA, 120 bp, Artificial Sequence
  ENSG00000224843_4 (sequence is synthesized)
aaaaagttgtctggctgcctctgctgtctacagattgaagaagatccatccagctgagcccagcctagaccagctgacttctccaataagcctgtatgaaataaatgcttattgttatgt

SEQ ID NO: 942683 - DNA, 120 bp, Artificial Sequence
  ENSG00000224843_5 (sequence is synthesized)
ggaggcgccgagagccagcgaggggatgccagcaagctgtcacctctcagaaatacaggaagaacatcaataatgttcgaagttataaattgcggaggccagaagtcagaaaacaaggtg

SEQ ID NO: 942684 - DNA, 120 bp, Artificial Sequence
  ENSG00000224843_6 (sequence is synthesized)
tccacaccctttttgtgggtggagagtttgtcttcacttgtggtagactggattcctgaaaatgactgaaacagtatccctcgttcccttctgcaatgtgagcttggcacctcctcagct

SEQ ID NO: 942685 - DNA, 120 bp, Artificial Sequence
  ENSG00000224843_7 (sequence is synthesized)
catagtgtagagataagctctctctgtcattctctgtcaaaattgtaaaatcataagcaaataaataatcacagttgcttcaagttactacatttgagcatagtattttaagccactgca

SEQ ID NO: 942686 - DNA, 120 bp, Artificial Sequence
  ENSG00000224843_8 (sequence is synthesized)
tttgagatggtttgttatacagcaatagataactaaaaaacaaagtcccttgatttagacttgtccactcaacttgcttggccaatggaatggggtagaagtgatggtgtgcttattccc

SEQ ID NO: 942687 - DNA, 120 bp, Artificial Sequence
  ENSG00000224843_9 (sequence is synthesized)
agcctgggccttaaaaggctttgcctatttccacttgccttcttgtacttctgctattgtcataagaaaaacaaaccgcaggtcacccaccggtctgaagaggaggatgagagacaaaga

SEQ ID NO: 942688 - DNA, 120 bp, Artificial Sequence
  ENSG00000224843_10 (sequence is synthesized)
cctggtgctcaccagctgaagaaatcctttaacgacctttattcagtcaagtaaattgttttcttttggcaacttgcatgttattttttaggttttcatttatttatttttttatattta

SEQ ID NO: 942689 - DNA, 120 bp, Artificial Sequence
  ENSG00000224843_11 (sequence is synthesized)
agtcatattttcttccttttattcactttgctggtctttctcactttgatttttttttgccttgttttgcatttgtttactttaacattttttgtaacttatctcttttattttggaaat

SEQ ID NO: 942690 - DNA, 120 bp, Artificial Sequence
  ENSG00000224843_12 (sequence is synthesized)
tattcacattatcagttttcttttgctaggcaattttgatattctaataaacattattaacataaaatataaagtttactaacaccaagcccaaacaatacaaagtcttagggctcttta

SEQ ID NO: 942691 - DNA, 120 bp, Artificial Sequence
  ENSG00000224843_13 (sequence is synthesized)
attgcaattatttaaaaatatttgctacaaattgttcattattttatatttacgttgtttttcttattcccacaaatcacatattgttggtgtgtttgttaaataaaaatctttaattgc

SEQ ID NO: 942692 - DNA, 120 bp, Artificial Sequence
  ENSG00000224843_14 (sequence is synthesized)
ccgcgcctctccctccacacctccccgccggcagagggagcccgctcaggcctcagccagcacagagaggggctcccacggtgcagctgcgggctgaagggctcctgaagcgcggccaga

SEQ ID NO: 942693 - DNA, 120 bp, Artificial Sequence
  ENSG00000224843_15 (sequence is synthesized)
gtaatcctcccagggattcccaccacccgcactccactcgcagactgcgggccttcctccgacgctgggagaaggaccctgggagaggcaagggaagggctccggaaccagcgcagcagc

SEQ ID NO: 942694 - DNA, 120 bp, Artificial Sequence
  ENSG00000224843_16 (sequence is synthesized)
gggacgctagcccgcccacacggcggccacttgaaggaccggtggctcccgtggagaccgcagcggaacccagtccgccttcgcacgcgtccgggggagaagcggccccaggactaaggg

SEQ ID NO: 942695 - DNA, 120 bp, Artificial Sequence
  ENSG00000224843_17 (sequence is synthesized)
gaggcagtgggagcgtctgccctttcctaagtctccttggaaagaagtattcgctttcgtttccgcaaacaaagcatgctccgcgctttcaggaccggtggctcccgtggagaccgcagc

SEQ ID NO: 942696 - DNA, 120 bp, Artificial Sequence
  ENSG00000224843_18 (sequence is synthesized)
gaagaaatttgtcttcccaacttttttggaacccctgaatcagattgactgcctcgaaatagacttctttttaaacacacaaaaaaagtaatctcatttttaacagccataagaatatac

SEQ ID NO: 942697 - DNA, 120 bp, Artificial Sequence
  ENSG00000224843_19 (sequence is synthesized)
cttgtggaccataaatactgtaaaattatttgaccagggcccctagctgttctattcccaagtgctttgttgtgtttttgctgtggctcagtatcccatgaactgtttccagctaataac

SEQ ID NO: 942698 - DNA, 120 bp, Artificial Sequence
  ENSG00000224843_20 (sequence is synthesized)
tgagtgcataagggatactaagacagacaaagtttctgggagactaaggactcctccgacagctgaatttagtgtcaggccttccttgcttaactcaacttacactgcaaggtggcctag

SEQ ID NO: 942699 - DNA, 120 bp, Artificial Sequence
  ENSG00000224843_21 (sequence is synthesized)
gttgcttccatccaaacttcttccctctatccttgcactgtggtctgatgattctctcagctgacattttctctgacaggtatttcccctaataacacttaattttgtcttgatgtctgg

SEQ ID NO: 942700 - DNA, 120 bp, Artificial Sequence
  ENSG00000224843_22 (sequence is synthesized)
ttctgggaggacccagcttagcacactatttttataagacactgctaatttatgcaggacaaactttttgctgggcaaagacaaaaaaatcaccaaataatatactgtcatgttcacgac

SEQ ID NO: 942701 - DNA, 120 bp, Artificial Sequence
  ENSG00000224843_23 (sequence is synthesized)
cttctcaaagttaaacagtatatgagtgacctggaaatgaagatgcagatttaatagggctggagagaagtctgagattctcaatttctaatgaattaaattacaaagaggagaaaataa

SEQ ID NO: 942702 - DNA, 120 bp, Artificial Sequence
  ENSG00000224843_24 (sequence is synthesized)
gtggaacataaacagataaaacaaaaacaaacagaaaagaacccaaaaacctaaactcaacttcagttaaagcagaaaatatctgtccagcctaaaccaggcatactcaacttcctcttc

SEQ ID NO: 942703 - DNA, 120 bp, Artificial Sequence
  ENSG00000224843_25 (sequence is synthesized)
gaccggaagtagaaactgggtgctccagtggcgcaatcggttagcgcgcggtacttatatggcagtatgtgtgcgagtgatgccgaggttcctttttagaaccaagcaacgccaattacc

SEQ ID NO: 942704 - DNA, 120 bp, Artificial Sequence
  ENSG00000224843_26 (sequence is synthesized)
ggatgtcctttacaagagcagatcccccaaaatgtaagagttcactgaaaaggtaggagctcaaaccaagagaggacttatctcgcagcataaagacaacttgtacaagtgaagatcaca

SEQ ID NO: 942705 - DNA, 120 bp, Artificial Sequence
  ENSG00000224843_27 (sequence is synthesized)
atgggctcagaaatgcttgagtgtctccattgtcaaaacgatcagaaggcagtaattgtatttccaatgtgaggacaaacaatactagatatcctgcaatcctacattgtaaaaaatatt

SEQ ID NO: 942706 - DNA, 120 bp, Artificial Sequence
  ENSG00000224843_28 (sequence is synthesized)
tcctctggatgctctagtgcgttttatcacaagaacatgacctttaagcacaagaacaccttgtattccaccactaaaaacagaaatgacatctaccttcactgcttccctatttctctc

SEQ ID NO: 942707 - DNA, 120 bp, Artificial Sequence
  ENSG00000224843_29 (sequence is synthesized)
catctttactgacttggtgttttgttgttgctgtcacttctggttgttggtcaattttcatttctattcttattttgctgataattcttataaatcagtgctgaattttgtcaaattatt

SEQ ID NO: 942708 - DNA, 120 bp, Artificial Sequence
  ENSG00000224843_30 (sequence is synthesized)
tttctgcatctctacagatgatcattttatgtttttgtccctgtgataatttggtgaatgtcattgatcagtttttaaataatgaatatctttgcatttaagataatattttttcactat

SEQ ID NO: 942709 - DNA, 120 bp, Artificial Sequence
  ENSG00000224843_31 (sequence is synthesized)
tgcatttaagataatattttttcactattaatgttatctctgaaatgaaagctaaacctagtcaatagatattagaggtgcatgatttttaaagttgtataaaattagataaaaaataca

SEQ ID NO: 942710 - DNA, 120 bp, Artificial Sequence
  ENSG00000224843_32 (sequence is synthesized)
taaaaatgtaaatgccaaatgatagagcactaaatgaagcttgtaatattcaatacaatctttagaaactcttttgcagtgcagcaaaaaaatagaactgaaaacaaagcagaagaaatc

SEQ ID NO: 942711 - DNA, 120 bp, Artificial Sequence
  ENSG00000224843_33 (sequence is synthesized)
acagatataaaattaaagaggatagaattaagcacctgagttcccatatctaaagtgaaaatctaagaatttaaatatcattcaaatacagactaaaatacaatataaaataaaatttcc

SEQ ID NO: 942712 - DNA, 120 bp, Artificial Sequence
  ENSG00000224843_34 (sequence is synthesized)
atactgtttaatttgtagataaaaatgcagactaattttctgactatattactacaaaaatcttctacaaatattttttaactaaaattataagaaaaacatccgtcataaacacgtaag

SEQ ID NO: 942713 - DNA, 120 bp, Artificial Sequence
  ENSG00000224843_35 (sequence is synthesized)
gtcataaacacgtaagattaatattttcgtttctgaagtataaaatgtctggatagacttgagcttgttgctttagttttatatgtgaagactggaaaaattctgttttgttttgaaaaa

SEQ ID NO: 942714 - DNA, 120 bp, Artificial Sequence
  ENSG00000224843_36 (sequence is synthesized)
tattttgagctaaaaatgttgtattccacatttgttaggaatggaagtctttaaaatatgaaatatttccaattgaagaaaaatagtgaacatgaactttatctgaataagattaatgaa

SEQ ID NO: 942715 - DNA, 80 bp, Artificial Sequence
  ENSG00000224843_37 (sequence is synthesized)
aaatgagactgtattcacaaatttaaaagcaaattggtgaatgacatattttttgaaataataaattctttggcatattt

SEQ ID NO: 942716 - DNA, 120 bp, Artificial Sequence
  ENSG00000224843_38 (sequence is synthesized)
ttgaaatatttaaaggaacaaaatatttgcagctctattttattgagaaagtaattacaaaacaaaaacaaggagtttttgtaattacaaaagaatatattaatattatttagaagcaca

SEQ ID NO: 942717 - DNA, 120 bp, Artificial Sequence
  ENSG00000224843_39 (sequence is synthesized)
atattaatattatttagaagcacaaaaccagaaaagctttatattatttctaacaataagtgtaaaccatctaattttctgaaaagggggggaaataaatatttaacaaagaagatgtta

SEQ ID NO: 942718 - DNA, 120 bp, Artificial Sequence
  ENSG00000224843_40 (sequence is synthesized)
ttcttaaattgtaatacgtacgttgcctaaaaataaaaaggtagttgaagatacattgtgaacaacaaaaaatgaagagctgataatattaatgtgcgaaggaaactcataacatattgt

SEQ ID NO: 942719 - DNA, 120 bp, Artificial Sequence
  ENSG00000224843_41 (sequence is synthesized)
taaatcagtgtattgacaaaacctgagtcctcaattattattgactgttattgacatattaatgatagaatattaaatatagaatataataaagcaatttagaataaaaaagagaaagcg

SEQ ID NO: 942720 - DNA, 120 bp, Artificial Sequence
  ENSG00000224843_42 (sequence is synthesized)
agaaagcgatagacatgaatagaaacaaaatgcaactgttctatattaaaagcctttctaaattgcctgcgtttttctagtgacctgtgtcgctatgcagtgtaggctcaggtgtctaga

SEQ ID NO: 942721 - DNA, 120 bp, Artificial Sequence
  ENSG00000224843_43 (sequence is synthesized)
ttttagttgcagataaacacaggtagtattttccagatctcagaatgaccagttacataaaaataggccataaaccatatatttcattcttacggttgacaaacctctaattcacctgaa

SEQ ID NO: 942722 - DNA, 120 bp, Artificial Sequence
  ENSG00000224843_44 (sequence is synthesized)
aatattaaaaagaaagaagacagacgtgacagtggttggaagttgaggataagaagaagttggcagaaataagctttcttcttttggacagcaatgcatgataaaaaaaattaaactaaa

SEQ ID NO: 942723 - DNA, 120 bp, Artificial Sequence
  ENSG00000224843_45 (sequence is synthesized)
ttcagttcatttccactaactgggacttatttagaaactttaagaaagtctttgaagaatttcaattgagtagtaaataagggccaatttatttcatagtgtggactctcaagacaatat

SEQ ID NO: 942724 - DNA, 120 bp, Artificial Sequence
  ENSG00000224843_46 (sequence is synthesized)
gcaattgttcaccatttaataacatttttccaagatatctaatgcactcaaggacaaaatagctgccttccagtgatttccaatttattcaattttcaggcaatttgtctgcccacacaa

SEQ ID NO: 942725 - DNA, 120 bp, Artificial Sequence
  ENSG00000224843_47 (sequence is synthesized)
tgacagattacagttacattcttgccacgctccgaacagctaagccaattgttttcaatcttttttcttcagcaactccatctcttaaagtacttcagagtagttcctgaaaggattcct

SEQ ID NO: 942726 - DNA, 120 bp, Artificial Sequence
  ENSG00000224843_48 (sequence is synthesized)
ctttagttaaatggctatacagctctcccatcatccaaaataatcagtggagagatagcaatatttttcattacattaggccaagttgcattgcttccttcatcttgtaatctgatcaga

SEQ ID NO: 942727 - DNA, 120 bp, Artificial Sequence
  ENSG00000224843_49 (sequence is synthesized)
aacaccactatagatccaataattgagtttagagtttcagagaatttggggtcacagaacacctatgtctattttgtaaagattattgcatattactgaaatagctagtcaaacactgca

SEQ ID NO: 942728 - DNA, 120 bp, Artificial Sequence
  ENSG00000224843_50 (sequence is synthesized)
gtctgcttaaagtatcaaaatagaaatgttgaatgctgtgtctgcacagagttcatttaagcaaagaatctactaggctcttaagtctgttaatgcaaattcctgaatacagttgaccct

SEQ ID NO: 942729 - DNA, 120 bp, Artificial Sequence
  ENSG00000224843_51 (sequence is synthesized)
ccatacccccattgtgggtggatttaactaaccatgaatcaaacatatttgttaaaagaaataccaaaaataatttttaaaaagaaatacaacaataaatgcaaataaaaaacaatcctt

SEQ ID NO: 942730 - DNA, 120 bp, Artificial Sequence
  ENSG00000224843_52 (sequence is synthesized)
gtaacaattatgtgcatagcatttatattgtattcagtattattaatgtaagtaatctggaaatgatataaagtatacaagagggtgtgtgtaagttatatgcaaatactagcccatttt

SEQ ID NO: 942731 - DNA, 120 bp, Artificial Sequence
  ENSG00000224843_53 (sequence is synthesized)
atataagaaacttgagcatctctggcttttgctatgaagggatgatggtggtaggattggtagtggtcctggaacaaatccccagcaggtaccaagggggactgtagaccccaaagctgt

SEQ ID NO: 942732 - DNA, 120 bp, Artificial Sequence
  ENSG00000224843_54 (sequence is synthesized)
ttaggaatgagtcacagcagcaggattgaggtaggaatgctccccacagaaaacatcaaccacctgttgatttttgaatctgctcctctcaggcatgccttcaaatgctataacctggag

SEQ ID NO: 942733 - DNA, 120 bp, Artificial Sequence
  ENSG00000224843_55 (sequence is synthesized)
attcaactcattttcatgctgtaggtaggaataggtgattcaattccccaagaaagtgacagagatccctgaaatatagatttaaagttacatagtgtcaaatgctagtcattttctttt

SEQ ID NO: 942734 - DNA, 120 bp, Artificial Sequence
  ENSG00000224843_56 (sequence is synthesized)
tgctcgatggtatcctctcagaaaaaccttttataatatttctaattcatttaccagatttatagaatcatcaaattatctatctatctatctgtttatctatagataaacacatctatc

SEQ ID NO: 942735 - DNA, 120 bp, Artificial Sequence
  ENSG00000224843_57 (sequence is synthesized)
aatgtgtttttcaaatattttgtgaagtggctagggtaacaacctatggttcgaacgtattttgtgaagtggctagggtaacaacataatgttcgaacgtatgttcgtatttaaatacaa

SEQ ID NO: 942736 - DNA, 120 bp, Artificial Sequence
  ENSG00000224843_58 (sequence is synthesized)
atgtattttggttgagtgattactcaaggtcactgaggaatccacaaggttaacctcctgactctagaaccattgttatatagagatatataaatagctggtttaatattataggcttag

SEQ ID NO: 942737 - DNA, 120 bp, Artificial Sequence
  ENSG00000224843_59 (sequence is synthesized)
caaaatatttaataaataaggtcttagtaaaacaacacacatgtatttatccacttatttaattttgtttttccatttcttctgaacataagttcctgaggacacgggccttttttcaca

SEQ ID NO: 942738 - DNA, 120 bp, Artificial Sequence
  ENSG00000224843_60 (sequence is synthesized)
gttcatttttggattccaacatctagccagtactttgcaaagagcactgaatttgaaataaatttctcagttaatgatttgaatcatataaaatatttagtaaatttgaaaactagtaac

SEQ ID NO: 942739 - DNA, 120 bp, Artificial Sequence
  ENSG00000224843_61 (sequence is synthesized)
cgtgtcaagtgattaaaacaaacatactagagggtaagaatcccctgccccttgccttcttcctttacatccacttcattcttattcttgtctacttcccctgccccacccagggaacgt

SEQ ID NO: 942740 - DNA, 120 bp, Artificial Sequence
  ENSG00000224846_0 (sequence is synthesized)
ctgcgtcccgcggaacgcaacacgctgttgggatactggattgtcctttgtgagatgccactatcgggggaaaccggatggcttcacagaaaaagttcgtttaaaggaaaatggtttaag

SEQ ID NO: 942741 - DNA, 120 bp, Artificial Sequence
  ENSG00000224846_1 (sequence is synthesized)
gccaaggaaatacctagaaaacggaaagtcttgaaaccagagccggtgcactgctgggattggtctatgtgctgatgatgttctccttgtcttcagaggaaaaagaatgcctgtgtttcg

SEQ ID NO: 942742 - DNA, 120 bp, Artificial Sequence
  ENSG00000224846_2 (sequence is synthesized)
gctgaagctggcgaaatccaagatggcgcctctgaagagcctctggctttatcatcatcctgttctcatgctaaacaacatgtcgccatgacaacgactggaagagaccaagaagggaca

SEQ ID NO: 942743 - DNA, 120 bp, Artificial Sequence
  ENSG00000224846_3 (sequence is synthesized)
gaaaaaaaggggtttcttgattccgggaaaaatctccgttctttcccaaggaaagcacgaatattcccccccgtgctcttaatgcccagccccttcattaaagacaccctacctctgaaa

SEQ ID NO: 942744 - DNA, 120 bp, Artificial Sequence
  ENSG00000224846_4 (sequence is synthesized)
agaacgttcctaacgaaaataactgcaactcttgattgtacctcctgagggtcgttgggactttccctctcagacatttattggttcattcattcgttcattttgctgtaactcacagtg

SEQ ID NO: 942745 - DNA, 120 bp, Artificial Sequence
  ENSG00000224846_5 (sequence is synthesized)
agatcttccaattccatagccattgaatacagcctgcactgcttgacacactccctttcggtttcgtgcattggcctcaccacgcaacaggaaacaaccctttttgggataaccgggact

SEQ ID NO: 942746 - DNA, 120 bp, Artificial Sequence
  ENSG00000224846_6 (sequence is synthesized)
cccggtaacatttccatatatacatatcttaatgtatgcaagggcgtctgggggagaaagaagcagcacatttcattctttgctttctataatactggattgcttgagtttgtgacacat

SEQ ID NO: 942747 - DNA, 120 bp, Artificial Sequence
  ENSG00000224846_7 (sequence is synthesized)
gttaacatttgcaacatttttaaactaaattgtatgtattatagaacagtcctctgcgctgagcttggacttaaagtggaaaggcttacatttgcagaattaaaaaaagcatcgaaacat

SEQ ID NO: 942748 - DNA, 120 bp, Artificial Sequence
  ENSG00000224846_8 (sequence is synthesized)
ggaccctgctgacttccaggcaggtggaaactggattgatagaaatccagcgcggggaggctgtgctgagaggagggacgcccctgccctgcgcctcccgctccccatctctggctggta

SEQ ID NO: 942749 - DNA, 120 bp, Artificial Sequence
  ENSG00000224846_9 (sequence is synthesized)
tcccggttacagaatgagggtccgtggtgcaacagaaagaatgagccactgatacactcatcagcttgctcggatctcccggggagttacgctggtgagagaaaccagtcccaaaggtca

SEQ ID NO: 942750 - DNA, 120 bp, Artificial Sequence
  ENSG00000224846_10 (sequence is synthesized)
ctcaccgacggcgccgctggtgtactggtattatgcaagatgccctcgcaaaggtcacgcacggatggttcatttatccaaagaccaaaggagagaaatgcaggactcattagcagtgcc

SEQ ID NO: 942751 - DNA, 120 bp, Artificial Sequence
  ENSG00000198468_0 (sequence is synthesized)
ccgttagagagtgcaagtcctcagactgcaggaggaggaactcccgtccttcggtagtgtcactacttagaggcagctgtgaggagctgtgattaatcgtggaatgtgctgatgtgccca

SEQ ID NO: 942752 - DNA, 120 bp, Artificial Sequence
  ENSG00000198468_1 (sequence is synthesized)
ctaaagatgcctggtaagcagtggctcctctaacaagtgggcagcttggaactgggaacgagagagccaccgaaacagaatgagggagacaaagaagtgggcatcacccttaactccaca

SEQ ID NO: 942753 - DNA, 120 bp, Artificial Sequence
  ENSG00000198468_2 (sequence is synthesized)
cgtttcataagttcatgctgtcccagcagaggaataacgccagaaagtgttccagtacaaccagagaaagagagtccatgagaaatctgcccttgtgaagttggaatcccctcaacctca

SEQ ID NO: 942754 - DNA, 120 bp, Artificial Sequence
  ENSG00000198468_3 (sequence is synthesized)
ccccgctgacttgaatgaagcgactgagacgggctatgatggagcagatccggttgctcgaccttctcccttgcaccaacacatgtagttaatagttactggacatgcatattcagtggg

SEQ ID NO: 942755 - DNA, 120 bp, Artificial Sequence
  ENSG00000198468_4 (sequence is synthesized)
ttccaggtaccaaacttgtattgaatggtatgtgccagacaccgtcttgagatctggagaataaaaaaataaaaaaataaaaacgagacatccagagcacagtagccttgcggtcttcct

SEQ ID NO: 942756 - DNA, 120 bp, Artificial Sequence
  ENSG00000198468_5 (sequence is synthesized)
ggcgggggaggaaagcggccggcgagcgctggctgacattttcctgcccggaaggatgcatggcccggggtctcctgcacctgagggtgggcgggaggcggccccgcgggttgtgttgct

SEQ ID NO: 942757 - DNA, 89 bp, Artificial Sequence
  ENSG00000198468_6 (sequence is synthesized)
ctgtgattaatcgtggaatgtgctgatgtgcccactaaagagctttgcccttggagtccaggctggagtgcaatgatgaaatctcagct

SEQ ID NO: 942758 - DNA, 120 bp, Artificial Sequence
  ENSG00000198468_7 (sequence is synthesized)
acaggcatgagccaccgtgcccggccaccattctaatttcttaatcttgtcttctttctctggcttcagtggtagatatttattaaccagtttaaacatgagtcattatttatatcaaat

SEQ ID NO: 942759 - DNA, 120 bp, Artificial Sequence
  ENSG00000198468_8 (sequence is synthesized)
aaatgtttggatgtataacgtaaaatgaaccttaatctctgtcaaaaaagatactactgggagcatcgtttggctgggagtcaagatgagattgagctactttatgggtgtggaatgcca

SEQ ID NO: 942760 - DNA, 120 bp, Artificial Sequence
  ENSG00000198468_9 (sequence is synthesized)
agtcagagagatttgaataagtaacacttcagcaatatgagatctggacagcatccaggagccaaggtccaagatgctaataggagtgatgtagctgtccctgaacaaaggtttgccaca

SEQ ID NO: 942761 - DNA, 120 bp, Artificial Sequence
  ENSG00000198468_10 (sequence is synthesized)
gtttacgagcctcagaggttaagatgcaaaccagaacaatgctattggatgtgcaatccatgatgtttcatggggaggtgggtagatttgggcaaccttgccttcagtttactcctacta

SEQ ID NO: 942762 - DNA, 120 bp, Artificial Sequence
  ENSG00000198468_11 (sequence is synthesized)
gcatcaggctctgtccacctgatcagcagaggctatatggttctattttgtgaaaagatcaagttggaaatggaggagtagaggagaaggttggaaatcagaatcctcccacatgtattc

SEQ ID NO: 942763 - DNA, 120 bp, Artificial Sequence
  ENSG00000198468_12 (sequence is synthesized)
aaaaaaaaaaaaaaagagtcccaggattttttctcctgtgtttttgtcttgtttcttctcggtccatgatgccagttgaggtcatcagtacagcgaaaccaaactggtgagatgggaaca

SEQ ID NO: 942764 - DNA, 63 bp, Artificial Sequence
  ENSG00000198468_13 (sequence is synthesized)
gtcatcagtacagcgaaaccaaactggtgagatgggaacaaattattctgtcacttttctaga

SEQ ID NO: 942765 - DNA, 120 bp, Artificial Sequence
  ENSG00000198468_14 (sequence is synthesized)
accagcctgggtaacatggcgaaaccccttctctaccaaaaaaatacagtatttagctgggcctggtgcatgcctgtagtcccagctacctgagaggctgaggtgggaagatcgcttgag

SEQ ID NO: 942766 - DNA, 120 bp, Artificial Sequence
  ENSG00000198468_15 (sequence is synthesized)
gtcaaggctgcaatgggctgagatcacgccactccagcctaggcaacagagtgaggccttgtcaaaaaaaaaaaagagagagagagagatacaagccttcagagaccctcatattaactt

SEQ ID NO: 942767 - DNA, 120 bp, Artificial Sequence
  ENSG00000198468_16 (sequence is synthesized)
catggtaaatctgcctctgctcacccctcccacctgtagcaactaatatcttcatttccagatttactctgaaaaaactgtgcaactgcttcacatgtttcctcttgattcactaatttg

SEQ ID NO: 942768 - DNA, 120 bp, Artificial Sequence
  ENSG00000198468_17 (sequence is synthesized)
taactcacttactgaaactctgatgaaagaattgagtcaaaaaataaatagacctccttcccagccctggcttgttcagagcatctactacagaggagtcttaagggttttgtatgctta

SEQ ID NO: 942769 - DNA, 120 bp, Artificial Sequence
  ENSG00000198468_18 (sequence is synthesized)
gagttgagagaccaaatagctcctgaaaactgtagctagaggaaatgccatatggagacaggccacaaggagaactcaagcccctgtaaaccaaaaatgaaatattctaagcccccaatt

SEQ ID NO: 942770 - DNA, 86 bp, Artificial Sequence
  ENSG00000198468_19 (sequence is synthesized)
cccctgtaaaccaaaaatgaaatattctaagcccccaatttactaaacagattcaacctcccaatgcaaccatgcccggcaaattt

SEQ ID NO: 942771 - DNA, 120 bp, Artificial Sequence
  ENSG00000198468_20 (sequence is synthesized)
cacctcaccctcccaaagtgctgggattagtgagccactgcaacagccctctaacacttatttctgaagttttttttcttccctccttctcggaagccccttcctccctctcttgttgcc

SEQ ID NO: 942772 - DNA, 120 bp, Artificial Sequence
  ENSG00000198468_21 (sequence is synthesized)
ccttctcggaagccccttcctccctctcttgttgccttaaggtaccttcaccctggctaggccctattgttcttttatcggttttttgtttgtttctttagcctacatatgctcttccac

SEQ ID NO: 942773 - DNA, 120 bp, Artificial Sequence
  ENSG00000198468_22 (sequence is synthesized)
ctgggttatacaaatgcaaagtacaccctagttccatgctgggccttattattaacaagaactttctgaatctcttaagatgtagtgaaagcagatatacataaactatgttgaactaaa

SEQ ID NO: 942774 - DNA, 120 bp, Artificial Sequence
  ENSG00000198468_23 (sequence is synthesized)
tgctccttgggaagctatgtttgggaaaaaaaaaaaaagagagagagagagactccaaagagtttgttattaaatttaagttcaaactaggtgtatatagtacaaaagttcttaccatgc

SEQ ID NO: 942775 - DNA, 120 bp, Artificial Sequence
  ENSG00000198468_24 (sequence is synthesized)
tgtgctgatatctagaaccctaaaaccctgcacttttttattgcctcttacattattattttggtcatgtatgaaatatatcaggcatctctcggtacaggtgaaatgctacatgttcta

SEQ ID NO: 942776 - DNA, 120 bp, Artificial Sequence
  ENSG00000198468_25 (sequence is synthesized)
aactaaggaataagtgcattattataatgtcttccttggccaaactgtataaatccccccctccgcccgccccggccaacatcccttccctgcttttttttttctttctttcctagtgct

SEQ ID NO: 942777 - DNA, 120 bp, Artificial Sequence
  ENSG00000198468_26 (sequence is synthesized)
cctgcttttttttttctttctttcctagtgcttaccttcacctaaaatgtcctatatttttactttttttttctggttattttctttctttctttttttttttgacagtcttgctctgtc

SEQ ID NO: 942778 - DNA, 90 bp, Artificial Sequence
  ENSG00000198468_27 (sequence is synthesized)
cgagcctggccctttctttccttctctctctctctctcggctgaccaccaagcctgagtactttttgtattttttgtagagatggggttt

SEQ ID NO: 942779 - DNA, 120 bp, Artificial Sequence
  ENSG00000198468_28 (sequence is synthesized)
ctaggattacaggcatgagccattgtgctgggcctttttctggttattttctccctgcccactagaatgtgagttccataagggcagggctgaaagttttgttgctttttgctaccgcta

SEQ ID NO: 942780 - DNA, 120 bp, Artificial Sequence
  ENSG00000198468_29 (sequence is synthesized)
cagggctgaaagttttgttgctttttgctaccgctactatttttcaagaatttgtaaccagtgtactttgtgcgagtacctagcacatagtagctgttcaataaatatttactgagtaca

SEQ ID NO: 942781 - DNA, 120 bp, Artificial Sequence
  ENSG00000224844_0 (sequence is synthesized)
agactgggaagtccaagatcaaggtgctggcagattcagtgtctgattctcctggtctcatctgtccttgccgccaagatggattatctgcaggaacttggaccaacttcacggaacctt

SEQ ID NO: 942782 - DNA, 120 bp, Artificial Sequence
  ENSG00000224844_1 (sequence is synthesized)
ccttatgttctgttcatactgcccagacctgccctggcttccctgttgctcctgaggcagaagaggcctttggacttactcggccccacatctgtacagtccagagatgctgggggaatt

SEQ ID NO: 942783 - DNA, 120 bp, Artificial Sequence
  ENSG00000224844_2 (sequence is synthesized)
tgcctctttgtaattctgtgagttttttccttcatttatttgataacatactgtataataatgcacattttaaattctcatgtcttcctggttaacatttttatttagtcctaatgtcgt

SEQ ID NO: 942784 - DNA, 120 bp, Artificial Sequence
  ENSG00000224844_3 (sequence is synthesized)
gggcttctttgctggggattatggtgtcagcatccttttagggatcatttttctgcctaccacaactatgattaactttttgccaacaattttgagaatataggtgaagtgtgtattttc

SEQ ID NO: 942785 - DNA, 120 bp, Artificial Sequence
  ENSG00000224844_4 (sequence is synthesized)
ttgggaaaaatctggttgcttattttaattggtaatacagtaacacttcctttttgttgattcttgatctgggatgtaaacatttcttctttcagtgttcaaattttcttgtcatttcat

SEQ ID NO: 942786 - DNA, 120 bp, Artificial Sequence
  ENSG00000224848_0 (sequence is synthesized)
tgggcatccggatggcgactgcgggaaatcgagttctcatgctggggcgaaaggtgtgtctgcaggagccaaatccaaatgagcagtccagagcttcagagaagaggcagaagtgtgcaa

SEQ ID NO: 942787 - DNA, 120 bp, Artificial Sequence
  ENSG00000224848_1 (sequence is synthesized)
acaggagcaggtccaagatttgcatggccagaagcaattcttgatcctcttggctagattcgaagatttggccacctccagacgctaccacactctgggacagtgggagatttggaacag

SEQ ID NO: 942788 - DNA, 120 bp, Artificial Sequence
  ENSG00000224848_2 (sequence is synthesized)
ctttgagaagagcaaggaaaagaaaatttggacatagactcatacagaggaaagatgatgtgaggacagacatctaagccacggagcaaggcccttccctcacagctctcagaaggaacc

SEQ ID NO: 942789 - DNA, 120 bp, Artificial Sequence
  ENSG00000224848_3 (sequence is synthesized)
gagccactgcacccggcccctgttgacatcttgatctcagacttcacccggcccccgatgacatcttgatctcagacttctggtctccagaatggtgggaaaataaattgctgtttaatc

SEQ ID NO: 942790 - DNA, 120 bp, Artificial Sequence
  ENSG00000224848_4 (sequence is synthesized)
tgggcatccggatggcgactgcgggaaatcgagttctcatgctggggcgaaaggtgtgtctgcaggagccaaatccaaatgagcagtccaggtacttcagagttttaacctgagcgaaac

SEQ ID NO: 942791 - DNA, 120 bp, Artificial Sequence
  ENSG00000224848_5 (sequence is synthesized)
aggaatgtctcgggtcttaacaggaccgtccgcccgctcggaagaggcgaatctcccacggcagacgtctgggtgtgcgaatgccagttgagcggggcctcgaggacgcgtcacacacag

SEQ ID NO: 942792 - DNA, 120 bp, Artificial Sequence
  ENSG00000224848_6 (sequence is synthesized)
cttgcgagggtgaggtcgagggttaagggataagcgggcagagggtagaaatccaattgggctattcctaaagcatccccagtcgcttggttttccactcttcaccgatgctgcactaat

SEQ ID NO: 942793 - DNA, 120 bp, Artificial Sequence
  ENSG00000224848_7 (sequence is synthesized)
gccacgtaggtccatccccgcatatgacaccagggattttattctgacctcacaagatcccaggatgatggctcacaaagggcttccctggttatttacttctgactcttgaaagcttaa

SEQ ID NO: 942794 - DNA, 120 bp, Artificial Sequence
  ENSG00000224848_8 (sequence is synthesized)
agaaattgtgcctgagaggttcagtaccttgtccagggacacccagtttgtgcagagccgggaggaaaacacagttcagttcactgtcacaggtgagtcaccaaaaacatcctataaaaa

SEQ ID NO: 942795 - DNA, 120 bp, Artificial Sequence
  ENSG00000224848_9 (sequence is synthesized)
attaatcggaaaacggttaagtggtgcagcctgagtgttttgctgtgttaattttaataaaagaacagtgccttatccttcaagtactttaattaatcctctgttgtgttgtttctgtta

SEQ ID NO: 942796 - DNA, 120 bp, Artificial Sequence
  ENSG00000224848_10 (sequence is synthesized)
gtcattcagaaaaactgaagtatcatttaaccatggaaaagtgcatattccgttgatgaaaagcgtaggttttagtccacttgagcatttctgagtcttaggtggtaggtggtgctgcct

SEQ ID NO: 942797 - DNA, 120 bp, Artificial Sequence
  ENSG00000224848_11 (sequence is synthesized)
agctctttattcatttcccaggcagctctttattcattctccacttggcattgtaatggatttatgaggcttataagggtctgtatgtaaatgaaataaaaatagaaatagatgaaccca

SEQ ID NO: 942798 - DNA, 120 bp, Artificial Sequence
  ENSG00000224848_12 (sequence is synthesized)
gtcttgagggaaaatatatgtggtttcaacataaactctgatatttgctcttggtgtaacccaggttccctggattttcctgtacactctttgaacccactttgaacccacttgtaactg

SEQ ID NO: 942799 - DNA, 120 bp, Artificial Sequence
  ENSG00000224848_13 (sequence is synthesized)
ttgcactttgagttcttgttgtttcaaaaagttccaggaagaagctcagcccttgcaaaacaaaaaaactggttggatctttggcgaactctcctcattaccattctaaaaaccctgccc

SEQ ID NO: 942800 - DNA, 120 bp, Artificial Sequence
  ENSG00000224848_14 (sequence is synthesized)
agggaggagctttttggccattttctacacatgccacaaaggtagaagcatgatcagctactgcacctgcactgcctttactctacctctacatataatgacttagctaaccagcccaat

SEQ ID NO: 942801 - DNA, 120 bp, Artificial Sequence
  ENSG00000224848_15 (sequence is synthesized)
aaaaggcctgttttcactctgtttggggagacactgctttggggaaccattcccatgtcctctttacttgttccaagtaataaaatccccttattatgtcccccttgattgtgttcattg

SEQ ID NO: 942802 - DNA, 120 bp, Artificial Sequence
  ENSG00000224848_16 (sequence is synthesized)
atctgtcacctgccaagtgatcaaacccacccattgtgtgtggaacattgtgtattggtctattctcccattgctataaagaaacacctaagattgggtaaagaaaagaggtttaattgg

SEQ ID NO: 942803 - DNA, 68 bp, Artificial Sequence
  ENSG00000224848_17 (sequence is synthesized)
aagaaaagaggtttaattggctcatggttttgcaggctgttcaggaagcatgatgctgacatctgctt

SEQ ID NO: 942804 - DNA, 120 bp, Artificial Sequence
  ENSG00000224848_18 (sequence is synthesized)
cagagcaggagcaagagagtgaggggcgaggtgccacatacttttaaaccaccagatcttgggagaactcactatcacaaggttagtaccaggaggatgctactaaactattcatgagaa

SEQ ID NO: 942805 - DNA, 120 bp, Artificial Sequence
  ENSG00000224848_19 (sequence is synthesized)
atcggcctccatgatccagtcacctcctcccgccaggcccctccttcaacattgaggattacaattgaatgggagatttaggtggggacacatatccaaaccacacatccaaacactggc

SEQ ID NO: 942806 - DNA, 120 bp, Artificial Sequence
  ENSG00000224848_20 (sequence is synthesized)
tcttgctaggtaacctttgttgataagtaggttccctctacttactagtttgcttagactttcatttagtcatgcatgaatgtactttgttatgttgagtatcttttctatctctattga

SEQ ID NO: 942807 - DNA, 120 bp, Artificial Sequence
  ENSG00000224848_21 (sequence is synthesized)
ccaaactgcaataggcaaagattcttaatggaccttgcatgccttgtttagcctgctctcaaaatgcagtaatctcctgtactgcaacaatgaaaaccttacccatttttcaggacaaaa

SEQ ID NO: 942808 - DNA, 120 bp, Artificial Sequence
  ENSG00000224848_22 (sequence is synthesized)
tccttttaaactctccacctctgatcaacagagcctacaccatcgatctctcctttctttgacagtctgtctacctgaacgtctgtttccattacctgaaaaactgtattaataataaaa

SEQ ID NO: 942809 - DNA, 120 bp, Artificial Sequence
  ENSG00000236922_0 (sequence is synthesized)
ttgattcacacaacaatgatgccacaagctccatacccaaacatcagtgatgaaagtgactggacctgagaaagactttgcctaaggaaacaatgactgagtgctgctatggtttgaacg

SEQ ID NO: 942810 - DNA, 120 bp, Artificial Sequence
  ENSG00000236922_1 (sequence is synthesized)
tcgccttcaaaactcttgttgaaacttaatccccattgtgaaaatattcagacattgggccttaagaagtcattgaaatcgattaatccattcttgaattaatggattaatgcttaaata

SEQ ID NO: 942811 - DNA, 120 bp, Artificial Sequence
  ENSG00000236922_2 (sequence is synthesized)
ttttataagaagagaaaaacagacataagctggcatgttagcatgctcagcactttccaccacgtgatgccctggtgccacctcaggactcttcaagaatacccaccagcaataagtctc

SEQ ID NO: 942812 - DNA, 120 bp, Artificial Sequence
  ENSG00000236922_3 (sequence is synthesized)
tcaccagatcagcccctagaccttagacttatcagcttccacaactgtaataaattttttttatttatagatattcagtttcaggtattctgttataaaaataaagcagactaagacagc

SEQ ID NO: 942813 - DNA, 120 bp, Artificial Sequence
  ENSG00000236922_4 (sequence is synthesized)
ttcataatggactcatgcaatttagaagatataatgatttaccttggcttatcaattaaaagtatatgtctagtcttatagtcaaataagtcattcatttctattatgccttagagacag

SEQ ID NO: 942814 - DNA, 120 bp, Artificial Sequence
  ENSG00000236922_5 (sequence is synthesized)
ggacggaggagagcctgaaagaggagaaaatcagtgtcaacgtggtgctgagaagctaagcaacatgttaagaacaaaagcttgatcacctggatcaaggcagtagataggtgagataaa

SEQ ID NO: 942815 - DNA, 120 bp, Artificial Sequence
  ENSG00000236922_6 (sequence is synthesized)
aggtgagataaatgagataaaccttaataaaagcaattaaatgaaaggctattttcaagcaataatgagagaggagaaattcaagacagaccgcttctgaggcgatcgggcagtgtcagt

SEQ ID NO: 942816 - DNA, 120 bp, Artificial Sequence
  ENSG00000236922_7 (sequence is synthesized)
ggccagagttccaggggctctggaagtagctgccagtctcgagtataaagaagaggatgaaggcttaagcaggaaactttgacagctccaaagaccttaatccttataaagaagtaatga

SEQ ID NO: 942817 - DNA, 120 bp, Artificial Sequence
  ENSG00000236922_8 (sequence is synthesized)
agtaatgaagtttcaactttgcactcaggttttcaagaaacctttgcaactttaacatagcattttgaggagtaaaagtgacacctggaaaaagccatccttgagaactaactccccaca

SEQ ID NO: 942818 - DNA, 120 bp, Artificial Sequence
  ENSG00000236922_9 (sequence is synthesized)
cgagtataaagaagaggatgaaggcttaagcaggaaactttgacagctccaaagaccttaatccttataaagaagtaatgaagtttcaactttgcactcagccccagagaggatctgaat

SEQ ID NO: 942819 - DNA, 120 bp, Artificial Sequence
  ENSG00000236922_10 (sequence is synthesized)
tggtctattctgctactaatacttcagctcagcccagttcagaactcctgttggagagatgattcagctgtttgcaggaaaaaaggccctctgactttgtcactccatctagtaccctga

SEQ ID NO: 942820 - DNA, 120 bp, Artificial Sequence
  ENSG00000236922_11 (sequence is synthesized)
ctgaaaattatcaaaactgaacgggacttaaatccattagttctactatcttttcaatgcatatttagtgcctccagctttttatccagtgcataccctgaaaaatacctcccagtctcg

SEQ ID NO: 942821 - DNA, 120 bp, Artificial Sequence
  ENSG00000236922_12 (sequence is synthesized)
atgggttaagatgtgtttggaaggcagaaatctgaccaagagtctgtcatgaggagcagacatacagaagaatgattcacaagaagacctcctttctgtgcattgaacatctatccacag

SEQ ID NO: 942822 - DNA, 120 bp, Artificial Sequence
  ENSG00000236922_13 (sequence is synthesized)
agagcttttcaatagttagattattacagggcccaactaaatgcctcaaattcccaggaatgtagataataacaattatgcctctttctctcttttcctcacagacaaaaaggtaactta

SEQ ID NO: 942823 - DNA, 120 bp, Artificial Sequence
  ENSG00000236922_14 (sequence is synthesized)
tgttgcataattataaaaaattccaaaataaaaatttgaaatatacaggacacttcaaataatacatctacatgttttgaatcatcttcctaaagcccaaatattgttgttgtgtaccca

SEQ ID NO: 942824 - DNA, 120 bp, Artificial Sequence
  ENSG00000236922_15 (sequence is synthesized)
ggcacagtagggagctgatcattacaaatgacagcaacaacattttaaaattataaatcttaagaatatttaaataaatgtatagcaactaataaaattgaaagcaaaatgtatactaac

SEQ ID NO: 942825 - DNA, 120 bp, Artificial Sequence
  ENSG00000236922_16 (sequence is synthesized)
tttatattttattagcagatatttgtcttttaaaactgtttattagtaaatttaaattatgtaaaattttgcatgtatatcttaggatggcagatatatcttgaggtcatattattcccc

SEQ ID NO: 942826 - DNA, 120 bp, Artificial Sequence
  ENSG00000236922_17 (sequence is synthesized)
ccccttatttgcaggtagagtcaaatatccatttttttgttggcttctcatcctactgactttgtattaacttgacttgtattcattatttaaattaaaaatgaaatggaaattccataa

SEQ ID NO: 942827 - DNA, 120 bp, Artificial Sequence
  ENSG00000236922_18 (sequence is synthesized)
tgagctcccagaataggcaagctgtgctgacaagatcagaaggttactatcagaaccgtcagctccagtttgctgcaagatctgaactggcaaaatggatctcatgaactactgtgtgtt

SEQ ID NO: 942828 - DNA, 120 bp, Artificial Sequence
  ENSG00000236922_19 (sequence is synthesized)
ccccacttaactcatcttcaaaaccaagtatgtgggtgaatcagaattttagaactaaaattataaccagaatctctgctataagccaggaacatgaaacgtttagtttcccagtgtcta

SEQ ID NO: 942829 - DNA, 120 bp, Artificial Sequence
  ENSG00000236922_20 (sequence is synthesized)
tattaaaggaagatacaccagcaggatcttgtaccatattttgaataggccagtctactgaatctaccacaatcatcagcattctaagattcagctgaggacaagaccctggcacttaat

SEQ ID NO: 942830 - DNA, 120 bp, Artificial Sequence
  ENSG00000236922_21 (sequence is synthesized)
ttttttaaacgcgtgggcacaatattcctattctttcttttaaaaactcaactcctgcacttcagcttaagcaacagagttaagaccctgtcttaaaaaacaaaacaaaacaaaataaaa

SEQ ID NO: 942831 - DNA, 120 bp, Artificial Sequence
  ENSG00000236922_22 (sequence is synthesized)
gagcaatgagtcatacatttggtctctttacataatcccctatttctctgaggttttgttcatttattttccttcttttttctctgttcttgtctgactgtcttatttcagaaaggcagc

SEQ ID NO: 942832 - DNA, 120 bp, Artificial Sequence
  ENSG00000236922_23 (sequence is synthesized)
catcaagctctgagattctttcctccacttggtctattctgctactaatacttcagctcagcccagttcagaactcctgttggagagatgattcagctgtttgcaggaaaaaaggccctc

SEQ ID NO: 942833 - DNA, 120 bp, Artificial Sequence
  ENSG00000236922_24 (sequence is synthesized)
tgactttgattgtgaaggaagagagaaatgtggaagagaagaggaagcagaagaaaagaaaaggaatcaagatcttacactacctgaaaagcctaaaatatttacctttatacaaatctt

SEQ ID NO: 942834 - DNA, 120 bp, Artificial Sequence
  ENSG00000236922_25 (sequence is synthesized)
tccctttgtagaaaaattttgacaatccctgctctagagagaggaagaaaactccaaggatttaccaggtttctgaaggtaaactactgaggaacaaaaccactaataaaattcctgcaa

SEQ ID NO: 942835 - DNA, 120 bp, Artificial Sequence
  ENSG00000236922_26 (sequence is synthesized)
gaataatgtattttttgagtttatcacatggagtttttttcttaaccaaaggataattgagcccacaaataaagacaaaatatccactaaaaatatatcacgtagaaaccattttgaaaa

SEQ ID NO: 942836 - DNA, 120 bp, Artificial Sequence
  ENSG00000236922_27 (sequence is synthesized)
ttatgaaaagagtatttaactagcctaaatgtaggtagaactatatgtctgataaaaaataaaaagcacacacttaaagcacacaacttgctaagttgttgaaattctcaacacaatcaa

SEQ ID NO: 942837 - DNA, 120 bp, Artificial Sequence
  ENSG00000236922_28 (sequence is synthesized)
atgtaactacctaatataaaatagaccaatgatatgtatagacacttcatcaaagttaagatgcatatatatgtatatttatatatatatatccattactagtctcaaaatgtcctcacg

SEQ ID NO: 942838 - DNA, 120 bp, Artificial Sequence
  ENSG00000236922_29 (sequence is synthesized)
cacgtcctcttgtaatcttcgtttctccttttcttgtcctcctctccaatctcaccccatttccaggcaaccagtgattatctttgtgttactatattttttttctcaaattgtatataa

SEQ ID NO: 942839 - DNA, 120 bp, Artificial Sequence
  ENSG00000236922_30 (sequence is synthesized)
taaaataagtttgttattttgatatccattcatttttcatgcatgaatagtttatgcctttatattgcattgtacagatgtactaaaattttttatgcattcacttgtttttgactgtta

SEQ ID NO: 942840 - DNA, 120 bp, Artificial Sequence
  ENSG00000236922_31 (sequence is synthesized)
taaataaagctgctatgaacatttatgtagaaatctttatatgtacatatgtattcatttcttttaggtaaatacctaagagtggaatgacaggtcacatagtatatatccacttaattt

SEQ ID NO: 942841 - DNA, 120 bp, Artificial Sequence
  ENSG00000236922_32 (sequence is synthesized)
tttacacaaacgcccaactattttcctgagagtttttggcattttgtattttcaccagtagtgtatgagagttaacacatttttacatgtttacccacgcttggcatactttgtcttttt

SEQ ID NO: 942842 - DNA, 120 bp, Artificial Sequence
  ENSG00000236922_33 (sequence is synthesized)
aaaattttagacattctaagaggagtagtatctcattattcaaaattttcatttatttaatgactgagcatctttttacgtgcttaattgatgtctgtttatcttctgttatgaaatgta

SEQ ID NO: 942843 - DNA, 120 bp, Artificial Sequence
  ENSG00000236922_34 (sequence is synthesized)
tatgcacataattcattgattttatattaggtggctttttattattgaactttggaagttatttatatattcttgatacaagtcatttattggataggtgattgtgagtattttctcccc

SEQ ID NO: 942844 - DNA, 120 bp, Artificial Sequence
  ENSG00000236922_35 (sequence is synthesized)
catcttcaaaaccaagccagtctactgaatctaccacaatcatcagcattctaagattcagctgaggacaagaccctggcacttaatagaatagaagtgactgaaaattgaatgatgata

SEQ ID NO: 942845 - DNA, 120 bp, Artificial Sequence
  ENSG00000236922_36 (sequence is synthesized)
cttcttttttctctgttcttgtctgactgtcttatttcagaaaggcagccatcaagctctgagattctttcctccacttggtctattctgctactaatactttctcgagtataaagaaga

SEQ ID NO: 942846 - DNA, 120 bp, Artificial Sequence
  ENSG00000236922_37 (sequence is synthesized)
ttcagaacatataatgtttctaccatcaagattagctagactgaatttggccaattcagtgcagcattctctgctgagtttaattcaattatggataagaattcagtcatagtcttggaa

SEQ ID NO: 942847 - DNA, 120 bp, Artificial Sequence
  ENSG00000236922_38 (sequence is synthesized)
aaaatgacaagaaaatcttctgattttgtaggataaaaacatgcttttgaaaaatacaaactatattttctacctccttcctttatagttaactcaggctctacttaagtccattatgtt

SEQ ID NO: 942848 - DNA, 120 bp, Artificial Sequence
  ENSG00000236922_39 (sequence is synthesized)
ttattttttgcctgattattatactaacaattttttctttcaaatattgcccacagaattatttctgaatttatttcgatgctgatatgccacaaagaaggaatcacactgattgtgctg

SEQ ID NO: 942849 - DNA, 120 bp, Artificial Sequence
  ENSG00000236922_40 (sequence is synthesized)
caaagtaaaataaaaaagtgagcataaatgaccctttattgagcttttaatatagcctagtgcccttgctctgctacacgtttctctccaagccatgtgaggagtccactctatgtaaga

SEQ ID NO: 942850 - DNA, 120 bp, Artificial Sequence
  ENSG00000236922_41 (sequence is synthesized)
acacatggaggtgaattatatgaaatcaggagtttagactaagcaagagacaaaatcatgagaaatggttaattgctcttctttctaagtaaacaaaaaacaataaatgtcatcaaggct

SEQ ID NO: 942851 - DNA, 120 bp, Artificial Sequence
  ENSG00000236922_42 (sequence is synthesized)
atctctctttccttaaagttatatttgttattagcatacttctgatataaactggttttcctttcagagaagcgtaatcattggaggaaatgtttgtctttgggaaaaaaaagaaaaaaa

SEQ ID NO: 942852 - DNA, 120 bp, Artificial Sequence
  ENSG00000236922_43 (sequence is synthesized)
gttcttgtctgactgtcttatttcagaaaggcagccatcaagctctgagattctttcctccacttggtctattctgctactaatacttctcagcccagttcagaactcctgttggagaga

SEQ ID NO: 942853 - DNA, 120 bp, Artificial Sequence
  ENSG00000236922_44 (sequence is synthesized)
agaaacaagttattcaatgttacgtatgaatcaaagatcagattactcagaatcctgaaaaataaattgtgactgtacatattctttatccatttttagtaaatgcatgtatttttatac

SEQ ID NO: 942854 - DNA, 120 bp, Artificial Sequence
  ENSG00000236922_45 (sequence is synthesized)
agttatgcatcctgatctgttgccattcaatgttgttttgtacaatttatagatatcaccacaggttttgtgagattgacaagcaatctaaaaataaatgattcacggatgagtgttcaa

SEQ ID NO: 942855 - DNA, 120 bp, Artificial Sequence
  ENSG00000236922_46 (sequence is synthesized)
aatcatcagcattctaagattcagctgaggacaagaccctggcacttaatagaatagaagtgactgaaaattgaatgatgattcctgtggagagtataaaataggtcactccatctagta

SEQ ID NO: 942856 - DNA, 120 bp, Artificial Sequence
  ENSG00000236922_47 (sequence is synthesized)
tgtctgactgtcttatttcagaaaggcagccatcaagctctgagattctttcctccacttggtctattctgctactaatacttcaccccaagatgagaccatctagttgcaggaaagcaa

SEQ ID NO: 942857 - DNA, 120 bp, Artificial Sequence
  ENSG00000236922_48 (sequence is synthesized)
gctcagggatcccacagattctgcactatggagtggaccagcctttcaacccccaccatcatcagtcattgcctcagagcagtccacaggaaacataaccttgacccaaataaggattgt

SEQ ID NO: 942858 - DNA, 120 bp, Artificial Sequence
  ENSG00000236922_49 (sequence is synthesized)
tgaaaattgaatgatgattcctgtggagagtataaaatagtggcagaactgaacctcaaatctataaaatctccctcaacaggatcaaactctgctgcttcttcaccaagtctcgagtat

SEQ ID NO: 942859 - DNA, 120 bp, Artificial Sequence
  ENSG00000236922_50 (sequence is synthesized)
cttcttttttctctgttcttgtctgactgtcttatttcagaaaggcagccatcaagctctgagattctttcctccacttggtctattctgctactaatacttgtcactccatctagtacc

SEQ ID NO: 942860 - DNA, 120 bp, Artificial Sequence
  ENSG00000236920_0 (sequence is synthesized)
tagttacaattttgcaagtataatgaaatgctgtacacataatggactagaccctgctgtgtccaagatggtttgctattaccagcaatgccacttctgggtatctgttcaaaagaattg

SEQ ID NO: 942861 - DNA, 120 bp, Artificial Sequence
  ENSG00000236920_1 (sequence is synthesized)
aaagcaggatctcaaggagctacttgtgtatccatgttcctggcagcactattcacaatatctaagaggtagaaacaaccaaaatatccattggcagatgagtggataaacaatatatag

SEQ ID NO: 942862 - DNA, 120 bp, Artificial Sequence
  ENSG00000236920_2 (sequence is synthesized)
tatatatgttcaatgaaatgttattcaaccttaaaaaaagtaaatcctgcaatgtgtgacaacatagatgaaccttgaggacattaaaataagtgaaataaatcaatcacagaatgacaa

SEQ ID NO: 942863 - DNA, 120 bp, Artificial Sequence
  ENSG00000236920_3 (sequence is synthesized)
aataatagaatggtggttgccaggagctggaaagagagagaaatggggagccctaatcaagcgatataaaatttcagttaaaaaagatgaataggttctagaggtctgctatacaatatt

SEQ ID NO: 942864 - DNA, 120 bp, Artificial Sequence
  ENSG00000236920_4 (sequence is synthesized)
gtgcctacaaatgataatactgcattgtatactttttaagctgttaagagggtaggttgcatattaggtgttcttacaattttttcaaaaaaattaactcaatacaaaaaataatgtaaa

SEQ ID NO: 942865 - DNA, 120 bp, Artificial Sequence
  ENSG00000236920_5 (sequence is synthesized)
agaagcataaaatatatctaagaaaattaggaaacatgagtaatataaggtaaaaccaagacatcataaaaacaaaaaaaaaatttaatgaacagggtaatagggattaaaaaataaaga

SEQ ID NO: 942866 - DNA, 120 bp, Artificial Sequence
  ENSG00000236921_0 (sequence is synthesized)
agaagttggtattctgtagcagatgtcactattgatattagaaagaatggaaaacagagctgctgctaaagtaagcaagctgacagctgaggcagaagtgtatcaacagcagtatgttca

SEQ ID NO: 942867 - DNA, 120 bp, Artificial Sequence
  ENSG00000236921_1 (sequence is synthesized)
cagagatatttatcaaatgctgattatatgacaagacctacactggatccttgggatacaaccataagataattgtgacagtcccaatccttacaaagacaggcaaaaagttcatagacc

SEQ ID NO: 942868 - DNA, 120 bp, Artificial Sequence
  ENSG00000236921_2 (sequence is synthesized)
atcatttgtctatggaccacactttgaacacaactgctctggacaagcaggccttggatttctacgtgtttgtgtcttagatctgttaaactcagctgacccaccacacccaagcagaac

SEQ ID NO: 942869 - DNA, 120 bp, Artificial Sequence
  ENSG00000236924_0 (sequence is synthesized)
cccgccagggtgtggagccgcactggggcaagatcaggtgggacagcccaaagactccgggccaagttcctgggggactcggcggagatggaagatgattctcgaagctctccatttcct

SEQ ID NO: 942870 - DNA, 120 bp, Artificial Sequence
  ENSG00000236924_1 (sequence is synthesized)
taattttgagttatcttcagtccttcttcaatgctgtgactgagtgcttgctgattattgtgcttgctgatcctgactaatactctctcttgatgagcttcatattcatcacgacttgga

SEQ ID NO: 942871 - DNA, 120 bp, Artificial Sequence
  ENSG00000236924_2 (sequence is synthesized)
atcttttggaaactagttttttccaacagttggttggatctaggatgtaaactgcaagtgtggcaggccgactgcactgttttgttactagagggagtgagaacacacctgtggacttga

SEQ ID NO: 942872 - DNA, 120 bp, Artificial Sequence
  ENSG00000236924_3 (sequence is synthesized)
gcaccttccattcaccagttgctccatgggcatactctaattcaggtctccccacaaccctctgagttaatatttctctccccattttaaagatgagaaaataaagcctagacagtttaa

SEQ ID NO: 942873 - DNA, 120 bp, Artificial Sequence
  ENSG00000287096_0 (sequence is synthesized)
acaccagccatgacaggatcaatgccgtgtggctggattgtgacttcgcagcagcctctctctacgtctctccaaccacagccataggaaaggacacagggaaattgaaaagctgtttgc

SEQ ID NO: 942874 - DNA, 120 bp, Artificial Sequence
  ENSG00000287096_1 (sequence is synthesized)
tcctaaccgtgcttttatggactgaatttgggagctgccagagcaacacgtctttggttattgcagcacattttcattactgaagcagagaagaaaccaacctaaggaattgggcaggcc

SEQ ID NO: 942875 - DNA, 120 bp, Artificial Sequence
  ENSG00000287096_2 (sequence is synthesized)
accagggatatacacaaagtgctctcacctcctggggcatcaccaaaaagagactttagtcgctggatcaaaggctattgggaacatttcactcaggatgaattatcttgaaaacaccac

SEQ ID NO: 942876 - DNA, 120 bp, Artificial Sequence
  ENSG00000287096_3 (sequence is synthesized)
ctggagtagccccaaataagcagatgctttggagctcctggatgctgagtggtggcacagattcccatcctggggctccgtgtcaccatccaatgtctggtaaccccatccattcccttt

SEQ ID NO: 942877 - DNA, 120 bp, Artificial Sequence
  ENSG00000287096_4 (sequence is synthesized)
gtatcttccacaaagacttcagatcctcacacttcaggccttccaaaagcttctcaattgaaggcccaatagtctaagatctgaatattgaattgcctttgctggaaagacaactgtctt

SEQ ID NO: 942878 - DNA, 120 bp, Artificial Sequence
  ENSG00000287096_5 (sequence is synthesized)
acctgagattctacatagttctctctggccttgtgttccaacatctattatattaggtactgtgcctctcctgtttttctttccattgtgctagggaagaattaaagggtcctttgagcc

SEQ ID NO: 942879 - DNA, 120 bp, Artificial Sequence
  ENSG00000287096_6 (sequence is synthesized)
tgctagggaagaattaaagggtcctttgagccctcaagacagtgatgtgtatagtattcattgtgtaacatcttatttgatttttttttttctttgaggtggagtcttgctctgttgccc

SEQ ID NO: 942880 - DNA, 61 bp, Artificial Sequence
  ENSG00000287096_7 (sequence is synthesized)
tggcccttggttgaatttttatccttacagtatttccccttgactggttacgttgtgggta

SEQ ID NO: 942881 - DNA, 120 bp, Artificial Sequence
  ENSG00000287096_8 (sequence is synthesized)
tccttacagtatttccccttgactggttacgttgtgggtaatcttcaaccaaacctgttacagtttaattttagctaaataaatagttcctactatttagtaaatatatgtaagtttaga

SEQ ID NO: 942882 - DNA, 120 bp, Artificial Sequence
  ENSG00000287096_9 (sequence is synthesized)
caatttgttcttatttctgtgagtagattcccccccactgtaaattagcttaatcctaattaatcttaattaacattactcaggttcgtattatagcaataaaatacatcataagcacca

SEQ ID NO: 942883 - DNA, 120 bp, Artificial Sequence
  ENSG00000287094_0 (sequence is synthesized)
ttgcagaagagcagctgaaaccaaagcagtactttggtcctcagcaacttacagaaccgttttccacactattaagctgtcatctccggatgtagaaatgtctttgtcataaaactctac

SEQ ID NO: 942884 - DNA, 120 bp, Artificial Sequence
  ENSG00000287094_1 (sequence is synthesized)
aaccagcatccttgggagggtgatgactggtgaggctacgttctctaaagcaaagaaattggagcatgtcatcgtaataccattgttgacattcaagtacacgcagacctcattttattg

SEQ ID NO: 942885 - DNA, 120 bp, Artificial Sequence
  ENSG00000287094_2 (sequence is synthesized)
ggggcaggcctcagaaaacagaatgtctctgatctccttctgctctccttttacctgccccaaggtagggctctaatcaccaccccctacctttctgactgtaggtcttatgagcaatca

SEQ ID NO: 942886 - DNA, 120 bp, Artificial Sequence
  ENSG00000287094_3 (sequence is synthesized)
gagggtccttcccccctctaccctggaggaaggaatgctgatgtcgcggagcttccacaaaaacctaagaggactgggttagcagagcttccaaatagctgaacaaatggaggttccagg

SEQ ID NO: 942887 - DNA, 120 bp, Artificial Sequence
  ENSG00000287094_4 (sequence is synthesized)
agagtcatgccccagggaggtcaaagaagcttcccctccttccttcatagatcgctctacgtatctcttcatctgtttcctttgcaacatgccttgtaataaatcagtaaatataagtaa

SEQ ID NO: 942888 - DNA, 120 bp, Artificial Sequence
  ENSG00000241572_0 (sequence is synthesized)
tctgcgctccggaactgcatggacgagttaagagtgcccatgttgctcagcttctcagacacattcattccagagtctttgctgaggcagagctctctaaggagatgtttaagaatgggc

SEQ ID NO: 942889 - DNA, 120 bp, Artificial Sequence
  ENSG00000241572_1 (sequence is synthesized)
catattgcaaggatcagcaatttgccattcctggtcatagacaacatgcctttggattgcaatggcccattatcacccctgctactgattattcctgtctcctactggggcctccaactt

SEQ ID NO: 942890 - DNA, 120 bp, Artificial Sequence
  ENSG00000241572_2 (sequence is synthesized)
cctcttccgtgacaaaacctaaagcagtgttacgagcactttgcaaaattacttggcaatatttactaaagctaaatacacatatacgtatatgaattataaataaagccgctctgaata

SEQ ID NO: 942891 - DNA, 120 bp, Artificial Sequence
  ENSG00000241572_3 (sequence is synthesized)
ctcggcgaagtagggtccccagcggtccccaaaggcattctgcaaagccaggtccgacacagtcctagggcactggccgtacaggtccctccgggacccatgccccatgctctcctggaa

SEQ ID NO: 942892 - DNA, 120 bp, Artificial Sequence
  ENSG00000241572_4 (sequence is synthesized)
gctccgctggcgcataaattggtcatagtcctccctggctctcagagggggcctatcttttaaccgggagatggcctcgcgttcgctggccaggtggagggcgttgtcggagcgagagcg

SEQ ID NO: 942893 - DNA, 120 bp, Artificial Sequence
  ENSG00000244502_0 (sequence is synthesized)
cccggcctcgcggaaggggcgcgaccaccgtatgtcctgttcctgcgcttcccaagctgggtagaaacggcgagaggctgggggttagaaacgacaggttcccggcgggctgtgccgggg

SEQ ID NO: 942894 - DNA, 120 bp, Artificial Sequence
  ENSG00000244502_1 (sequence is synthesized)
cttcgctgtgtgaccttgggctggcgtctgggctctctgggcccttgtttccgcgagttaaacgtaggggcgggggagtttctctggccctgccgcctgtgacctaaggagccccgtgac

SEQ ID NO: 942895 - DNA, 120 bp, Artificial Sequence
  ENSG00000244502_2 (sequence is synthesized)
gagcagctccgggacaagcactcccggcgaagacatgtaggctctcagagcctgcgtttccctctgtagagcaggcctagttactgtcttcagggtgcacgcgtctccgtccccgacccg

SEQ ID NO: 942896 - DNA, 120 bp, Artificial Sequence
  ENSG00000244502_3 (sequence is synthesized)
caccctcaccgccgggagatgagttcttaaacaaccagaagatactgcaggttcaaagtcccggaggccagaaggagcttgcattcaaataagaaaatatattttctcaaggaaatataa

SEQ ID NO: 942897 - DNA, 120 bp, Artificial Sequence
  ENSG00000287090_0 (sequence is synthesized)
aagggcgaacttctgcagacgaggactatccagccctaggggtacgggagagggaaagacgaggccgagagggaccctgactttgcagcagggtgtctgggcattggtggctccacctgc

SEQ ID NO: 942898 - DNA, 120 bp, Artificial Sequence
  ENSG00000287090_1 (sequence is synthesized)
agaaccaaaagaatccaccaggtctgatgggcaaaggttcctcctcccctgctgcagctaacatggaggacttgcatggagatggtggagtcacaggatgaacacaggctaagtcactac

SEQ ID NO: 942899 - DNA, 120 bp, Artificial Sequence
  ENSG00000287090_2 (sequence is synthesized)
ctggaggacagctgcctggacagtcacctggatcgcagtggactgcatgaatgaaaacaaatttgttcccaggttcttggggcttgaaaagatccctttatggagtgaagccactttttc

SEQ ID NO: 942900 - DNA, 120 bp, Artificial Sequence
  ENSG00000287090_3 (sequence is synthesized)
tcaacgttctgaaactcacgctgctccagcctgaggcttccagaagtgccctacaggtgcctgagtgtgtgggcctgctgcctgcaagtgcacccggggagtgcggggtttggcgtttac

SEQ ID NO: 942901 - DNA, 120 bp, Artificial Sequence
  ENSG00000287090_4 (sequence is synthesized)
agatgtgaccaggggctaagagactggggcgcagcctctccccaacacggactctatttccccacacgctcacttcccctccctcaactgcagtcttctttctctataactaacacaggg

SEQ ID NO: 942902 - DNA, 120 bp, Artificial Sequence
  ENSG00000287090_5 (sequence is synthesized)
atcactgcctctattttcttagaggtattgttcatcgctcacccctcacgcagtaagtatgtgttcaggcacagagcaaagggctgagagaagggagctgctgtgggtgccttcaaggaa

SEQ ID NO: 942903 - DNA, 120 bp, Artificial Sequence
  ENSG00000287090_6 (sequence is synthesized)
cttaccacagcaacagttaacagcagcaggaagatattgttaagtgttttctgtgtaccagtcactgttctaagcatctctcatggatgattctgtttaatcctcaaaatgacccttgga

SEQ ID NO: 942904 - DNA, 120 bp, Artificial Sequence
  ENSG00000287090_7 (sequence is synthesized)
agtgggcattcctattatccccttttaacagatgagaaaaatacaacactgaaaagccaaagaaattcactctggctagcaagcgttggaggcagaattcaaaaccaggctgagtccagc

SEQ ID NO: 942905 - DNA, 120 bp, Artificial Sequence
  ENSG00000287090_8 (sequence is synthesized)
agtataatcccactcgtgctacctagaaagctcattacagcaagggccccaagcaagggtacatcctgacactcactgagaaatgtgggatgtttagacatgaagggagcttgggggtag

SEQ ID NO: 942906 - DNA, 120 bp, Artificial Sequence
  ENSG00000287090_9 (sequence is synthesized)
taaaggcagggaagcatgggcactcctaacctcccaaggagtggccagataaggttggggccctttggtaaccaatccagtccagggacacaggtgagcagtcaatgaagaggcaccatt

SEQ ID NO: 942907 - DNA, 120 bp, Artificial Sequence
  ENSG00000287090_10 (sequence is synthesized)
ctgagtctgcccagaacaggtgactcagattgtccagcccatccagggccactagctgtgcttctaaaggagaaggtgctaacaatggaaagaaagtccacgaaagacctactctttcag

SEQ ID NO: 942908 - DNA, 120 bp, Artificial Sequence
  ENSG00000287090_11 (sequence is synthesized)
aagcttgaaggaaaccaagaggagagcttgctctgctttgtgccctaatggtggagttttaaggcagatgaggacagagtctttcctccaattgactggaacaactgtcagagctaaacc

SEQ ID NO: 942909 - DNA, 120 bp, Artificial Sequence
  ENSG00000287090_12 (sequence is synthesized)
gaggagtggtcacatcccagtgcatgagaggaggtagagtgtgaacatcatgaaattgccaatgcgataggtcacaaacagtagaatattgccagtttcatttgttcattctagttcacc

SEQ ID NO: 942910 - DNA, 120 bp, Artificial Sequence
  ENSG00000287090_13 (sequence is synthesized)
ctggttggcagcagagcatttggctgtagccggtacaaggtgggttgacacagtggtcttaggtaagtgcagggagcagcccacatggggagggcagagacattggatcagagcagagga

SEQ ID NO: 942911 - DNA, 120 bp, Artificial Sequence
  ENSG00000287090_14 (sequence is synthesized)
cagatagggcacacatgcatgagccaccccaaagagcccttgaacctaaaggaaggaactgtctgtggctgctgcatttccttgagcaggagctggaggctgagaccaatgtcctgtgaa

SEQ ID NO: 942912 - DNA, 120 bp, Artificial Sequence
  ENSG00000287090_15 (sequence is synthesized)
cattgttcagaccctgttctgagtgttgcggctggggaatgtgggttataccaacactcaggcagaggtggccaccaacaccaggcacccgtgggctgggtgatcaggagaggctcctgg

SEQ ID NO: 942913 - DNA, 120 bp, Artificial Sequence
  ENSG00000287090_16 (sequence is synthesized)
gaggaggtgtacctggggctaagccttcaaggataggtgggaattaaaacaggttcagagaagaggagaagttttagaccagagaaacctaaaattctaaaggcagtttgaaatagagga

SEQ ID NO: 942914 - DNA, 120 bp, Artificial Sequence
  ENSG00000287090_17 (sequence is synthesized)
gtcacaaaatagtatggctactatgattccttttttgttaaaagtataagtgaatatatacacacacatacagacactcatattatatatatagaatgatggaaggaggaacatataaca

SEQ ID NO: 942915 - DNA, 120 bp, Artificial Sequence
  ENSG00000287090_18 (sequence is synthesized)
aaattttagctattttgtcattatagggtggtttttttttccttctttgtgctcatttgcgttttctaattgttctacagtaagcatatattactcctatgactttttttagaggataag

SEQ ID NO: 942916 - DNA, 120 bp, Artificial Sequence
  ENSG00000287091_0 (sequence is synthesized)
ggcccgcagacgcaacacccggccggccatcccgcccttccctgcacgcccgtcccccgtgggtcctggctccgggtcacctctcacccgcctgccctcggggaggggaggtggccgaga

SEQ ID NO: 942917 - DNA, 120 bp, Artificial Sequence
  ENSG00000287091_1 (sequence is synthesized)
gagaataagggagggctctgtcttcctcggagtccacatcctcaccgcagaccccactccgcggggagggaacccccaaattaggccagttggccggagaactgagggacttggagtcgc

SEQ ID NO: 942918 - DNA, 120 bp, Artificial Sequence
  ENSG00000287091_2 (sequence is synthesized)
acgacgggcgccgtttcagggcaatttcgggctgaaatgagaagcggggacgttggtggcgatttcccctgctggtgcgcggccggagtggggttgctgggatgggggtgggggccggag

SEQ ID NO: 942919 - DNA, 120 bp, Artificial Sequence
  ENSG00000287091_3 (sequence is synthesized)
tagttggttggtgttcaagttgtttaaacaggaaaacagttcagccaaataacccctggatggaagaggaacgggaataggcaaagcttggatttcactgaaatcaaggagttttaaagt

SEQ ID NO: 942920 - DNA, 120 bp, Artificial Sequence
  ENSG00000287091_4 (sequence is synthesized)
tctagtctgctgttgtgcaagtgacatctgaaaaatcacacacgtgatcattcatttacaaaacgactcgtgaggaaaatgcacaattctattgaccgtggtctttatttttaaaaaatt

SEQ ID NO: 942921 - DNA, 120 bp, Artificial Sequence
  ENSG00000287091_5 (sequence is synthesized)
tccatacaagcatgtcaaaaatatgtggatggggagactctggagaacacagacttccaaaaacaccactgactgaataattccaggaattaaagagcaaaataaacaagaactaaatga

SEQ ID NO: 942922 - DNA, 120 bp, Artificial Sequence
  ENSG00000273558_0 (sequence is synthesized)
atgcagcttgtgaggaagcctttggtggtcatcttttaacagctcagttccccagagaagctccctggaaaccaggaggctgacttcttcaccaactgcagaaccacctgaggccacgtg

SEQ ID NO: 942923 - DNA, 120 bp, Artificial Sequence
  ENSG00000273558_1 (sequence is synthesized)
gcagagccctgagtgccttgcctggctgtaagaggaatactttcatcaccaagcctaggagagtgcctttgtccatcgagggtccccattggggttaactggagcccttgcagatcaagg

SEQ ID NO: 942924 - DNA, 120 bp, Artificial Sequence
  ENSG00000273558_2 (sequence is synthesized)
ctgcctctgccttctgtgttcctgtctgtggctgtgctgttgtcccagtcatcaccgtaaccagtgatccagttctcactccctcctccagagcaagataatagcctcagatgaagaaat

SEQ ID NO: 942925 - DNA, 120 bp, Artificial Sequence
  ENSG00000273558_3 (sequence is synthesized)
tctggttctgagcccgagaatctgagacagactcagatctaaatctttttaaagccttcaaggagattatgatgcccacgtgagctggctcagaagaagaatttatttcaggaatgccaa

SEQ ID NO: 942926 - DNA, 120 bp, Artificial Sequence
  ENSG00000273558_4 (sequence is synthesized)
gaatttctcatgcttggtggtaggacattccttgataatttagccaggtgagaagttgtcaaagaactgccaaacccataaggattcttgtagctcacagccaggaggctaccttatatt

SEQ ID NO: 942927 - DNA, 120 bp, Artificial Sequence
  ENSG00000273558_5 (sequence is synthesized)
ttgaatttaagattaagggaaaaaaaaacacaaaaaacatatacaatacattcttgttgtggtcgagcataaagtaattaactatacagagaaaaacatgaaagtcttttctgttacgaa

SEQ ID NO: 942928 - DNA, 120 bp, Artificial Sequence
  ENSG00000273558_6 (sequence is synthesized)
ttccctctgtccaagattcaggtccagtcccctcggcttgctaggctctgcctgttccacatctatgcattccccatctatctaatgtatattcagacacaaatgtatatacatgagatc

SEQ ID NO: 942929 - DNA, 82 bp, Artificial Sequence
  ENSG00000273558_7 (sequence is synthesized)
gtgggaggatagcttcagcccaggagttcaagacctgcctgggcagtatagcaagaccctgatctccacaaaaaggaaaaaa

SEQ ID NO: 942930 - DNA, 120 bp, Artificial Sequence
  ENSG00000273558_8 (sequence is synthesized)
gcagtatagcaagaccctgatctccacaaaaaggaaaaaaaaagtataaaaaataaaataaaataaaaataataaataaataaaaataaagaagcaaaagtttatacacttaaattgtgc

SEQ ID NO: 942931 - DNA, 120 bp, Artificial Sequence
  ENSG00000273558_9 (sequence is synthesized)
ttcataatgcatgttttagtctttcatttttcctagaaattatttatgtacccagcaaatatccatcaattaaatgagtacaaggttttgagttacctaaagatctttgaaattattcta

SEQ ID NO: 942932 - DNA, 120 bp, Artificial Sequence
  ENSG00000273558_10 (sequence is synthesized)
ctaaagatctttgaaattattctaaagtgggcataccatgaaagataacttttttttaattttgagatggagtttcactccgttgcccaggcttggagtgcagtggcacaatctcggatc

SEQ ID NO: 942933 - DNA, 120 bp, Artificial Sequence
  ENSG00000273558_11 (sequence is synthesized)
gcctcctgagtagctgggactacaggcccacacgatcacatctggcaaatttgtaaatttgtaaatttttagtaaagacggaatttcattatattggtcacagtgatctcaaactcttga

SEQ ID NO: 942934 - DNA, 88 bp, Artificial Sequence
  ENSG00000273558_12 (sequence is synthesized)
gtaaatttttagtaaagacggaatttcattatattggtcacagtgatctcaaactcttgacctcaggtgacccacctacctcgcgacc

SEQ ID NO: 942935 - DNA, 120 bp, Artificial Sequence
  ENSG00000273558_13 (sequence is synthesized)
gtgcaataaatcaattttgttaaacacagattgacgtttacatatttaaacatgatgtaaaagcaatgctagcttattttatcagtaaatatgtataagtttaagaaaaaaatatacaag

SEQ ID NO: 942936 - DNA, 120 bp, Artificial Sequence
  ENSG00000273558_14 (sequence is synthesized)
cagaataaaaatgtatgcttgcattatacaataatatgggtgtacatttccagagttcttgtattcatacactgtataagaagatgacaaacaattttgcaatgaaaaatcttgttcata

SEQ ID NO: 942937 - DNA, 120 bp, Artificial Sequence
  ENSG00000273554_0 (sequence is synthesized)
gccgggccccgccgacgcccgcgcgcccccgggcccctgacacacaggagattcttcaggctcactttcaagtgcttcgtggactgcttctgactgcgccgcctgtgacccgcaccccgc

SEQ ID NO: 942938 - DNA, 120 bp, Artificial Sequence
  ENSG00000273554_1 (sequence is synthesized)
gccgcgaccccagcccggccgtgaggcccgcaggggccatggcgaagaagagcgccgagaacggcatctgtagcgtgtccggcgaccagaagaagggccccctcatcgcgcccgggcctg

SEQ ID NO: 942939 - DNA, 120 bp, Artificial Sequence
  ENSG00000273554_2 (sequence is synthesized)
cctgacggggcccgggccaagggcgacggccccgcgggcctggggacacccggcggtggcctggccgtgccggcgcgcgcgacctggacgcgccagatggacttcatcatgtcgtgtgtg

SEQ ID NO: 942940 - DNA, 120 bp, Artificial Sequence
  ENSG00000273554_3 (sequence is synthesized)
tcgccgtggatctgggcaacgtgtggcgcttcccctacctgtgctacaagaatggcggaggtgtgttccttattccctgcatcctgatagccctggtcggaggaatccccattttcttct

SEQ ID NO: 942941 - DNA, 120 bp, Artificial Sequence
  ENSG00000273554_4 (sequence is synthesized)
tggagatctcgctgggccagttcatgaaggccggcagcatcaatgtctggaacatctgtcccttgttcaaaggcctgggctatgcctccatggtgatcgtcttctactgcaacacctact

SEQ ID NO: 942942 - DNA, 120 bp, Artificial Sequence
  ENSG00000273554_5 (sequence is synthesized)
acatcatggtgctggcctggggcttctattacctggtcaagtcctttaccaccacgctgccctgggccacatgtggccacacctggaacactcccgactgtgtggagatcttccgccatg

SEQ ID NO: 942943 - DNA, 120 bp, Artificial Sequence
  ENSG00000273554_6 (sequence is synthesized)
aagactgtgccagtgccagcctggccaacctcacttgtgaccagcttgctgaccgccggtcccctgtcatcgagttctgggagaacaaagtcttgaggctgtctgggggactggaggtgc

SEQ ID NO: 942944 - DNA, 120 bp, Artificial Sequence
  ENSG00000273554_7 (sequence is synthesized)
caggggccctcaactgggaggtgaccctttgtctgctggcctgctgggtgctggtctacttctgtgtcaagggggtcaaatccatgggaaagatcgtgtacttcactgctacattcccct

SEQ ID NO: 942945 - DNA, 120 bp, Artificial Sequence
  ENSG00000273554_8 (sequence is synthesized)
acgtggtcctggtcgtgctgcttgtgcttggagtgctgctgcctggcaccctggacagcatcatttactatctcaagcctgactggtcaaagctggggtcccctcaggtatggatagatg

SEQ ID NO: 942946 - DNA, 120 bp, Artificial Sequence
  ENSG00000273554_9 (sequence is synthesized)
tggggacccagattttcttttcttatgccattggcctgggggccctcacagccctgggcagctacaaccgcttcaacaacaactgctacaaggacgccatcatcctggctgtcatcaaca

SEQ ID NO: 942947 - DNA, 120 bp, Artificial Sequence
  ENSG00000273554_10 (sequence is synthesized)
gtgggaccagcttctttgctggcttcgtggtcttctccatcctgggcttcatggctgcagagcagggcatgcacatctccaaggtggcagagtcagggccgggcctggccttcatcgcct

SEQ ID NO: 942948 - DNA, 120 bp, Artificial Sequence
  ENSG00000273554_11 (sequence is synthesized)
acccacaggctgtcacactgatgccagtggccccactctgggctgccctgttcttcttcatgctgttgctgcttggtctcgacagccagtttgtaggtgtggagggcttcatcaccggcc

SEQ ID NO: 942949 - DNA, 120 bp, Artificial Sequence
  ENSG00000273554_12 (sequence is synthesized)
tcctcaacctcctcccagcctcctactacttctgtttccaaagggagatctctgtggccctctgttgtgccctccgctttgtcattgatctctccatggtgactgatggtgggatgtatg

SEQ ID NO: 942950 - DNA, 120 bp, Artificial Sequence
  ENSG00000273554_13 (sequence is synthesized)
agctgaccgcttcacggacgacattgcctgtatgatcgggtaccgaccttgcccctggatgaaatggtgctggtccttcttcaccccgctggtttgcatgggcatcttcatcttcaacgt

SEQ ID NO: 942951 - DNA, 120 bp, Artificial Sequence
  ENSG00000273554_14 (sequence is synthesized)
tgtgtactacgagccgctggtctacaacaacaccaacgtgtacccgtggtggggtgaggccatgggctgggccttcgtgctgtcctccatgctgtgcatgccactgcacctcctgggctg

SEQ ID NO: 942952 - DNA, 120 bp, Artificial Sequence
  ENSG00000273554_15 (sequence is synthesized)
cctcctcagggccaagggcaccatggctgagtgctggaagcacctgacccagaccatctggggcctccaccacttggagtaccgagctcaggatgcagatgtcaggggcctgaccaccct

SEQ ID NO: 942953 - DNA, 120 bp, Artificial Sequence
  ENSG00000273554_16 (sequence is synthesized)
gaccccagtgtccgagagcagcaaggtcgtcgtggtggagagtgtcatgggacagctcagctcacatcaccagctcacctctggtagccatagcagcccctgcttcatccccaccccacc

SEQ ID NO: 942954 - DNA, 120 bp, Artificial Sequence
  ENSG00000273554_17 (sequence is synthesized)
cctccagggggcctgcctttccctgacgcttttggggtctgcctgggagaggaggggagaaagcaccatgagtgctcactaaaacaactttttccatttttaataaaacgccaaaaatat

SEQ ID NO: 942955 - DNA, 120 bp, Artificial Sequence
  ENSG00000273554_18 (sequence is synthesized)
cacaacccaccaaaaatagatgcctctccccctccagtcctagcccagctggtcctaggccccgcctagtgccccacccccacccacagtgctgcactcctcctgcccctgccacgccca

SEQ ID NO: 942956 - DNA, 120 bp, Artificial Sequence
  ENSG00000273554_19 (sequence is synthesized)
ccccctgcccacctctccaggctctgctctgtagcacacccttgggtgacccctcaccccagaagcagcagtggcagcttgggaaatgtgaggaagggaaggagggagagacgggaggga

SEQ ID NO: 942957 - DNA, 120 bp, Artificial Sequence
  ENSG00000273554_20 (sequence is synthesized)
ggagagagaggagaagggaggcaagggaggggcagcagaaccaagacaaatatttcagctgggctatacccctctccccatccctgttatagaagcttagagagccagccagcagtggaa

SEQ ID NO: 942958 - DNA, 120 bp, Artificial Sequence
  ENSG00000273554_21 (sequence is synthesized)
ccttctggttcctgcgccaatcaccaccaatatcaattgtgtgagcttgggtgcgagtgcacgcgtgcgtgagcacgtagagtatatatagatctctatctcttagcaaaggtgaatacc

SEQ ID NO: 942959 - DNA, 120 bp, Artificial Sequence
  ENSG00000273554_22 (sequence is synthesized)
agatgtaaatggtgcctctaggcaaaggaggcttgtattttgcacattttataaaaacttgagagaatgagatttctgcttgtatatttctaaaaagaggaaggagcccaaaccatcctc

SEQ ID NO: 942960 - DNA, 120 bp, Artificial Sequence
  ENSG00000273554_23 (sequence is synthesized)
tccttaccactcccattcctgtgagccctaccttacccctctgcccctagcctaggagtgtgaatttatagatctaactttcagaggcaaaacaaaagcttcgagctgttgcatgtgcga

SEQ ID NO: 942961 - DNA, 120 bp, Artificial Sequence
  ENSG00000273554_24 (sequence is synthesized)
gtctgttgtgtggatgtgtgtgtgtggtccccagacccagaatggattggaaaagtgcatggtgggggcctcggggctgtccccacactgtccctttgcccacaggtctgtggggcaaga

SEQ ID NO: 942962 - DNA, 120 bp, Artificial Sequence
  ENSG00000273554_25 (sequence is synthesized)
ggctgcaatattccatcctgggtgtctgggctgctaacctggcctgctcaggcttcccaccctgtgccctgggctgggcacacccccgggaagggaccccggacacggctcccacatcca

SEQ ID NO: 942963 - DNA, 120 bp, Artificial Sequence
  ENSG00000273554_26 (sequence is synthesized)
ggctcaaggcggatgcacttcctgcacctccagtcttctgtgtagcggctttaacccacgtatgtctgtcacgtccagtcccgagacggctgagtgaccccaagaaaggcttccctgaca

SEQ ID NO: 942964 - DNA, 120 bp, Artificial Sequence
  ENSG00000273554_27 (sequence is synthesized)
cccggacagaggctggagggctggggctgcgtgagggtggtgggcctgcggggacattcttactgtgctaaaaagccactgcaaacatagcaataaaaacctgtcattttccaaagcagg

SEQ ID NO: 942965 - DNA, 120 bp, Artificial Sequence
  ENSG00000273554_28 (sequence is synthesized)
gaagtgacccagtgatgggtgggaaacagaggtccagagcaaaggcctttgcccaaagttaggagaaggatgctgggacctggagtcaggtgtgttccttattccctgcatcctgatagc

SEQ ID NO: 942966 - DNA, 120 bp, Artificial Sequence
  ENSG00000273557_0 (sequence is synthesized)
ctgaggagaatgtaggtctcatggaagattttcatgtggacaaatttagtaaattttttgcaggtagtttcctgacatatttaacatttgtgatatagtaaacaataagaaggtactaaa

SEQ ID NO: 942967 - DNA, 120 bp, Artificial Sequence
  ENSG00000273557_1 (sequence is synthesized)
tatgtttttagcaaggaaagtgtataatctcatgtaccttttgaaagattactcaggtctctgcatgtgaaatggaatttagggaatgcaagagagggagtaaaaataacagcgaggaag

SEQ ID NO: 942968 - DNA, 120 bp, Artificial Sequence
  ENSG00000261273_0 (sequence is synthesized)
tctcaggccctaggccaggcctcgttcccatcagataaagcctggggcggccggacgcagtgcaagcaatcgtgcctgactcacaggaagggaggaaaacaggaattcacgcagaagcta

SEQ ID NO: 942969 - DNA, 120 bp, Artificial Sequence
  ENSG00000261273_1 (sequence is synthesized)
acatcgccactgccaggcatcacagggatcgtggctgagcaaatgcagccgatgaaatggaagagcaaggggtgaagaaatgagtgaggtgcccacgcagccctcataatgccggggcca

SEQ ID NO: 942970 - DNA, 120 bp, Artificial Sequence
  ENSG00000261273_2 (sequence is synthesized)
tcggagagaagaccgggatgagtttttaggtggctgcttcctttggcccggaagcgcggcccaccctgcctgacttccagcactccgttcctcggcttctccatgaaaaggagaacgtgt

SEQ ID NO: 942971 - DNA, 120 bp, Artificial Sequence
  ENSG00000273552_0 (sequence is synthesized)
gttcatatgggatcaggcaaaagcaggtcctgaaggcaggatcctgaagatcaggcaccacctgacagaattctcaagcacctgactcatcacctctgcagtgcatccctttccagaagt

SEQ ID NO: 942972 - DNA, 120 bp, Artificial Sequence
  ENSG00000273552_1 (sequence is synthesized)
ccactctcctgattcaccaccagtggaagttttaacaatggaaacaccatctgtgcaaggtgtccacattgctagctgggcggtgaatgattcagctccaaaatcccatttgattgcctg

SEQ ID NO: 942973 - DNA, 120 bp, Artificial Sequence
  ENSG00000273552_2 (sequence is synthesized)
ctctttccagacacaactgcagcaaactggattgtctagacacagatgatgagacagagtttagggtgcaagaagctaactagggatcaacacctgtgtaaggaagcaggtggaagcaca

SEQ ID NO: 942974 - DNA, 120 bp, Artificial Sequence
  ENSG00000273552_3 (sequence is synthesized)
attgaagttgagaaagatgaagaggttgaactgccctgcaggccagatagagccttgccaaaccagtggggaactcggaggaagtcctgcctgccagtttcccatgtggagccgaaacag

SEQ ID NO: 942975 - DNA, 120 bp, Artificial Sequence
  ENSG00000273552_4 (sequence is synthesized)
tttttctctgcagctcagactgatgttgaggagctgggagctggaagccacctgctgactgcactccctgcagctggtcagcccatccttctcgaggggcatctgaatggcatcttcatc

SEQ ID NO: 942976 - DNA, 60 bp, Artificial Sequence
  ENSG00000273552_5 (sequence is synthesized)
gcccatccttctcgaggggcatctgaatggcatcttcatcagaatgcaaggctcggagct

SEQ ID NO: 942977 - DNA, 120 bp, Artificial Sequence
  ENSG00000273552_6 (sequence is synthesized)
gagatacgtgccatcacactacagcctgggggaaaagagcgagactccttctcaaacaaaataaatgaataaataatgaataaatacagaatgcatacacaaatgacacaattcagcttt

SEQ ID NO: 942978 - DNA, 120 bp, Artificial Sequence
  ENSG00000273553_0 (sequence is synthesized)
ttaagaggaaaggcctccaagacgttgggtctacatctctgagtttctttctccagtctactatatccctgtaattcttcacagccctgttcattctccatgccttcaaacgatctcttt

SEQ ID NO: 942979 - DNA, 120 bp, Artificial Sequence
  ENSG00000273553_1 (sequence is synthesized)
gaagtgtaaccttttgcttgtaccccataaagagttatttctccccttgcccctttttcttagactaagcccataaaattgaatttgtgtcaattaaatgtgtgtgtgatgcaactccaa

SEQ ID NO: 942980 - DNA, 120 bp, Artificial Sequence
  ENSG00000269068_0 (sequence is synthesized)
aagcaggattctgatggccaaacatgaggaagctggataaggggaaggctggggatggggtgggggaggtggggctaggtgggtgtctgtcccttagccccctacctctctacctcctct

SEQ ID NO: 942981 - DNA, 120 bp, Artificial Sequence
  ENSG00000269068_1 (sequence is synthesized)
ctgtgctgcagagactgcccacctgtgacagtgacagtgaagaaggccgagtcatctccagcatcacatacaaactcgcccccgtcctcgggctgagcagcaggtagcaccaggcggcag

SEQ ID NO: 942982 - DNA, 120 bp, Artificial Sequence
  ENSG00000269068_2 (sequence is synthesized)
agcgcacaggggcatcctcccgagacagttcacacatcagcaccacacactccaaggtcacggcgatcaaggtcacctcatcgcgagggtatatgatccgcactgggggttctgcagggt

SEQ ID NO: 942983 - DNA, 120 bp, Artificial Sequence
  ENSG00000269068_3 (sequence is synthesized)
ggggacaaccacagcctgtcacaagctcaccgtcagcctctctggagccattcggcagcatgaagtccctatcacccacataataatgagaataataagtaaaataataataagcaataa

SEQ ID NO: 942984 - DNA, 120 bp, Artificial Sequence
  ENSG00000287099_0 (sequence is synthesized)
tcattaagtaggaagagcaaaggaaagctcccagagaaggggacagctaaggaaggactcacagacaaacaggtggtgagagcactaggccaggtggccatatatccagaaaggcactcc

SEQ ID NO: 942985 - DNA, 120 bp, Artificial Sequence
  ENSG00000287099_1 (sequence is synthesized)
aggcagagagaaagctagagccaaaactccagaggcatatgactaagaaaaacctttgctttgcttcattcaatcacaactgacgtccgactgaagagacccttggagtacagcaacaaa

SEQ ID NO: 942986 - DNA, 120 bp, Artificial Sequence
  ENSG00000287099_2 (sequence is synthesized)
ggttttgtatctctgaattaagaaggtcttatgtttccaaaatcacgtcaattcccaaagttgataaagcaaacgtagctagtatgtctgcctctagatgactcgatttggagactaaag

SEQ ID NO: 942987 - DNA, 120 bp, Artificial Sequence
  ENSG00000287099_3 (sequence is synthesized)
ctcacacaaacaactcccagaggtaggacaataagaaaagaagaaaaggagatttctagacctcagggaagttataactaagtgagcatggtacctgctcactttatgaaaccccataaa

SEQ ID NO: 942988 - DNA, 120 bp, Artificial Sequence
  ENSG00000287099_4 (sequence is synthesized)
gactgcaggaagactcagctaagtcaggaagcacaggttgaccagacacatcagtatagaaaactctacgtaagattttataaggaaggaaaaaaccaacactctataatctaattaaac

SEQ ID NO: 942989 - DNA, 76 bp, Artificial Sequence
  ENSG00000269066_0 (sequence is synthesized)
ccaaaattcaccctcttcatttttttttttttcttgagatggagtctcactctatcaccatgctggagtccagtgg

SEQ ID NO: 942990 - DNA, 120 bp, Artificial Sequence
  ENSG00000269066_1 (sequence is synthesized)
aaaaagaagaagcctgacaaaagagattacataactacatacagacgtagcaattctgctcccaggtatagacccaaaagaatagaaagcagcgactcaattccttgtacaccaatgtcc

SEQ ID NO: 942991 - DNA, 120 bp, Artificial Sequence
  ENSG00000269066_2 (sequence is synthesized)
actgcagctctattcacaatagccgaaaggtggaaacaaccccatgtccatcggcagatgaatgcatacacaaaacgtggtccatccacacaacggagtatgattcagccataaaaagga

SEQ ID NO: 942992 - DNA, 120 bp, Artificial Sequence
  ENSG00000269066_3 (sequence is synthesized)
aggaaccactgctccgtgctacaacatggatgaaccccaaaaacatgaagctgagagaagccagacgcaaaaaagccacatggtgtatgattccattgatatgaaatgtccagaacaggc

SEQ ID NO: 942993 - DNA, 120 bp, Artificial Sequence
  ENSG00000267308_0 (sequence is synthesized)
ttcacttctttgtggtttttcggctgctccagacttcttggctcctgcaggccacctggacggatatgtgcaggtcacaggggttacaatggctaagcttcagctcacaggcctgacatt

SEQ ID NO: 942994 - DNA, 120 bp, Artificial Sequence
  ENSG00000267308_1 (sequence is synthesized)
caagtgtgaccagggactgcgtggacaccttaaagaaaattttataatgagtctaagtgagaacttgtgacggtgaataactcttctctttcctggtacctggacttcagagattaatac

SEQ ID NO: 942995 - DNA, 120 bp, Artificial Sequence
  ENSG00000267308_2 (sequence is synthesized)
aaaaccctgtgggtcaggacttggcaacaccaagaagcattcaaatataatgatttattcaactgtgtattgtcatggaaataataattaaatggcacatctttgttgtctgaaagggat

SEQ ID NO: 942996 - DNA, 120 bp, Artificial Sequence
  ENSG00000267308_3 (sequence is synthesized)
tgcagatcctatgcagaagagataataaggaaaataatctttgtctcctggattaagctgaggctggcaaagagtgaaatgtcccaagccctctaacaacaaacaacatactttgtgttg

SEQ ID NO: 942997 - DNA, 120 bp, Artificial Sequence
  ENSG00000267309_0 (sequence is synthesized)
agatggttcccgatcgtcagaattcctgtccgcgccttgcgtcagccccgccgaaaggatcgccccccctagtcaaaccgctcgcgccccagaggcctcatggagtcccgcctcaggctc

SEQ ID NO: 942998 - DNA, 120 bp, Artificial Sequence
  ENSG00000267309_1 (sequence is synthesized)
gggccttggcccccaaagaaagccactccgacgtgtttgagatgggcttagttcccggacccgtcctactgcccccaggcgctggacagcctcagaaagaggacaagtctgcatggaaag

SEQ ID NO: 942999 - DNA, 120 bp, Artificial Sequence
  ENSG00000267309_2 (sequence is synthesized)
ataatcgcacaactgagccttctgggagatgtagttcggagctgggaaggcggttggaccctccgaaagtcatcttaattgctctcacagataagccggtgctgggctgccggcctgagt

SEQ ID NO: 943000 - DNA, 120 bp, Artificial Sequence
  ENSG00000267309_3 (sequence is synthesized)
actgtgcgcccagagtgcgcaggcgcaaacatcctgggttgctgttttggcctctttgttcgggcgtgaattttgtttattgctccttagtgcagaggggttatgggaccagaggttgtg

SEQ ID NO: 943001 - DNA, 120 bp, Artificial Sequence
  ENSG00000267309_4 (sequence is synthesized)
agactcagaagtggttggggacgcagaaggggtgtagaccaggaacctgcgacctgatggggggaggtcgaagggaaaggaatcgccaaacgtgggacaggtttggagaggcagaaagag

SEQ ID NO: 943002 - DNA, 120 bp, Artificial Sequence
  ENSG00000267309_5 (sequence is synthesized)
aagtaagaggagtttcactttctccttctgcaattatttgtgtacttggactaagtgtatctcatggccagtatttgactgcttttgacctataaaggtattgtatacacagtcatgcat

SEQ ID NO: 943003 - DNA, 90 bp, Artificial Sequence
  ENSG00000267309_6 (sequence is synthesized)
ctacaacctcctcccagccgcctgctttggccccgccgccaccccatctgggaagtgaggagcttctctgcctggccgcccatcgtctgg

SEQ ID NO: 943004 - DNA, 120 bp, Artificial Sequence
  ENSG00000267302_0 (sequence is synthesized)
ggtgacgtttggtctgagctgacctttcctcacaatcgtgaatttgggctgtgaggatcaggccttgtcagaacccgagatgagaggagagagatttctggttcagtaagggtgagagcc

SEQ ID NO: 943005 - DNA, 120 bp, Artificial Sequence
  ENSG00000267302_1 (sequence is synthesized)
aggctccagactatagtgaattttccgaggagatatgtatgacctacagtgactctgacgctaaatctgcaagttcttttaacaccacggaaataatgtctaaatgctcaagacaaaatc

SEQ ID NO: 943006 - DNA, 120 bp, Artificial Sequence
  ENSG00000267302_2 (sequence is synthesized)
acttatggtgttgtctacataccttatgacatcgtgtatggcaaggcactttaaggtcagaactacagatgtcaaactagttctcttaatttcagggatcacatggtcaggcatacactg

SEQ ID NO: 943007 - DNA, 120 bp, Artificial Sequence
  ENSG00000267302_3 (sequence is synthesized)
gttccaaaaatctttactatagatccgaaagcattttcctgaagaagtcctgccagctcggccacttcgctgtaatgcctcgctcctacaaaaggaaaaaaacccaaaaattccccaaaa

SEQ ID NO: 943008 - DNA, 120 bp, Artificial Sequence
  ENSG00000267302_4 (sequence is synthesized)
tgttctgtgggtttctcaggtaatttactttgtctccccaaaacagctagaaattacctaatcagttgttctttgaataaaaagatttgacatagagacttactttgaaattggaaccac

SEQ ID NO: 943009 - DNA, 120 bp, Artificial Sequence
  ENSG00000267302_5 (sequence is synthesized)
ctccaggatgtccaaccctaatctggggttgtgatttaactgcttcacaaagccaccatctaccacatatctaagaagaatcaaagcaagttaagtttctggaaaataaaagaagacttg

SEQ ID NO: 943010 - DNA, 120 bp, Artificial Sequence
  ENSG00000267302_6 (sequence is synthesized)
caggtacacaatgccttttatgttaagtgtaaaacttgaaagtcaagaaattggaaccctcgtatgttgttggtgggaatgtaaaatggttcagccgaggtggaaaattgttcggaggtc

SEQ ID NO: 943011 - DNA, 120 bp, Artificial Sequence
  ENSG00000267302_7 (sequence is synthesized)
ctcaagaagttaaacacaaaattaccatatgatccagcaattccatttctaagtgtacaccaaaaagaactgagaacaagtactcaaacaaatacttatagaccaatgttcatatcagca

SEQ ID NO: 943012 - DNA, 120 bp, Artificial Sequence
  ENSG00000267302_8 (sequence is synthesized)
ctatgaatcacagccataaggtaaaaacaacctaaatgtccattaaccattaatggaagaagggatgaacaaattgctttgcatatatgtatgtagtatatatacacacgcatatataca

SEQ ID NO: 943013 - DNA, 120 bp, Artificial Sequence
  ENSG00000267302_9 (sequence is synthesized)
cacacaatggaatatatatatatatacacacacacactatgcaatattattcagccacaaaaaagaatgaagtactgatacatgctacaatgtggacgaacctcaaaaatattatgctaa

SEQ ID NO: 943014 - DNA, 120 bp, Artificial Sequence
  ENSG00000267302_10 (sequence is synthesized)
gtgaaagaaagcaaacacagaaggccacatattatatgattctatttgtatgaaatatccagaatagaaaatacctactgcttcctgctgacacatctaaagaattttttaaaaaagaaa

SEQ ID NO: 943015 - DNA, 120 bp, Artificial Sequence
  ENSG00000267302_11 (sequence is synthesized)
atacgtacaaacaaaaagtaagactggtagttgccaagggctggggtcgagaggggaatgtggagtacctgcttaatgggtatggggttttattttgaggtgttgaaatattttagaact

SEQ ID NO: 943016 - DNA, 120 bp, Artificial Sequence
  ENSG00000267302_12 (sequence is synthesized)
aagcagaagcagtggttgcgcaatactgtaaatgtactaagtactacttaatttttcattttaaatgattaattttatgtgaattttgcctcaatacaaaaatacacaaacttgaaagtc

SEQ ID NO: 943017 - DNA, 120 bp, Artificial Sequence
  ENSG00000267302_13 (sequence is synthesized)
tggagagctcacggctgccggggtgttttggcagcgagaacaagcgagctgcgcctgagaacggccttcaggcctggcgctaaataataagtcgttgttatgtgttatgtatttatgtgg

SEQ ID NO: 943018 - DNA, 120 bp, Artificial Sequence
  ENSG00000267302_14 (sequence is synthesized)
catccaccacacgcctccgagatcctgggcgttttgaggttaaaaatgttcaggcttggagaacctacccctggaggagtgttagggtttccgggctcggatgtccgcgagcttgacgcc

SEQ ID NO: 943019 - DNA, 120 bp, Artificial Sequence
  ENSG00000267302_15 (sequence is synthesized)
tataagagagaggcaaaagaggcaatagagacacagaaaagaaagccatgtgaagatggagcagagagatatatggccacaagccaaggaatgctgacagctgccagaagctggaagaag

SEQ ID NO: 943020 - DNA, 120 bp, Artificial Sequence
  ENSG00000267302_16 (sequence is synthesized)
gcaaggaatggactctcccctacagcctccagaggcaatgcagccctgccaacactttgattttagacttctggcctatagaactgagaaagaataaatttctgttcttttcagctacta

SEQ ID NO: 943021 - DNA, 120 bp, Artificial Sequence
  ENSG00000267304_0 (sequence is synthesized)
gattgtcaggctggctctgcagtgagacccaaagcctccgaccatggggaccacaggcccctctgaggacctgccaggacggccaggctgggcagcggcactccacgacacaggctgggg

SEQ ID NO: 943022 - DNA, 120 bp, Artificial Sequence
  ENSG00000267304_1 (sequence is synthesized)
tggggacccggaggcggcagggccgaccctcagctctggtgaggctcagaccaggacccggcggacaaggaatgtgatgcaagggatggtgtgggcgtgaggaaggctggcacttctcac

SEQ ID NO: 943023 - DNA, 120 bp, Artificial Sequence
  ENSG00000267304_2 (sequence is synthesized)
tgcctctgggaacctgggccacgacactcagaggccagctccctgcaaaaagaccgggcggccccagctgttcctgccatcctggctgagggttggacaggcaagtgtaggacgagcttg

SEQ ID NO: 943024 - DNA, 120 bp, Artificial Sequence
  ENSG00000267304_3 (sequence is synthesized)
aatttcctgccactgccgaccacagccatggaactaaccccaggtatgacctacagaagaaccacccaactgaacccaacccaaataacagaatcgcaagcaaatacacagttgtttgaa

SEQ ID NO: 943025 - DNA, 120 bp, Artificial Sequence
  ENSG00000229275_0 (sequence is synthesized)
gcagcagctgtgtgtggtcacagagcttccaaatgagggagatggatggcctcgcttcacagtgtgcccagagcatgtccacggtgcctgggaagaccagggactcaccatgcccggctc

SEQ ID NO: 943026 - DNA, 120 bp, Artificial Sequence
  ENSG00000229275_1 (sequence is synthesized)
tggtttccctcacagtgaagcctccttgctggtaggatccatggccaagcatgggggcaggggctgggggagctctgtcagtgacttctcgcaggcagcaaggcctctgggagctggcca

SEQ ID NO: 943027 - DNA, 120 bp, Artificial Sequence
  ENSG00000229275_2 (sequence is synthesized)
ggtggacactgagggaccgctggctcacacgcatgttgaaatatgtgctcagctgatgtcttcccaagtgagccctcctgcaggacaggaccacacagtgtcctcaaaaagcgccccagg

SEQ ID NO: 943028 - DNA, 120 bp, Artificial Sequence
  ENSG00000229275_3 (sequence is synthesized)
aaggaatggcaaacaacataattctatctaatgagatgttcaaagacatcttctggtgcttcttgaaagacttgatttcttcacatagatgcaatgtcttccctgtggtttcttcttcta

SEQ ID NO: 943029 - DNA, 120 bp, Artificial Sequence
  ENSG00000229275_4 (sequence is synthesized)
tctgctggggacatgggtgtgatccctggagctgcagcagccatttgttaaccctgaggaaaagactcagaaaaatccaagaccttggctctactatctttgggccattgaaccagaggt

SEQ ID NO: 943030 - DNA, 120 bp, Artificial Sequence
  ENSG00000254364_0 (sequence is synthesized)
ccagtgaaacaaacatgccctggagaaatgcctggatggggaaatgaagacttaagaaacttaggtaatctgcccaaaggcttatagccaatacatggtaaagctgagatgtgaactcaa

SEQ ID NO: 943031 - DNA, 120 bp, Artificial Sequence
  ENSG00000264578_0 (sequence is synthesized)
tcctatcatgtctgcagagctccaaggctgggggcgatgttgaggccgaagccagccacagtgcctcagctgtgcctttcctggagagcgggtggccgcccccagcacatccctggcaca

SEQ ID NO: 943032 - DNA, 120 bp, Artificial Sequence
  ENSG00000264578_1 (sequence is synthesized)
cgggcttgcataacagactcttgtaccgccatctctagcacaagaccatggccacatctccccaaccactcagcccgcacagcgtgcaaaggtggggagttcactttaatggcattcctc

SEQ ID NO: 943033 - DNA, 120 bp, Artificial Sequence
  ENSG00000264578_2 (sequence is synthesized)
caacgacttattgtaaaagaaacaaggcatctcgtcctgggtcgcaacacccagcagcatccgtttagaccaccaagggtaggctgcgccgggtgcacagggatcccgctgcggctcggc

SEQ ID NO: 943034 - DNA, 120 bp, Artificial Sequence
  ENSG00000264578_3 (sequence is synthesized)
agtcctgggatccagagcagcccggggagccctggagtctggaaaggacacagcagtgggggcggcggcggcaactccagctctgagcccgttggcaccccgcacggtggccccagccag

SEQ ID NO: 943035 - DNA, 120 bp, Artificial Sequence
  ENSG00000264578_4 (sequence is synthesized)
ctggaggcaggctcaggagcggctcctgtccttgtggttccccacgatcatcttgctttataattggttctgctcagcaggttccaggactccagttcttctgctgagaatctctttgtc

SEQ ID NO: 943036 - DNA, 120 bp, Artificial Sequence
  ENSG00000264578_5 (sequence is synthesized)
acctcatcatccataatggtctccattcctttccggcaaaagtagaaaatgtcagagagctcgaactctggagtgttgtccagagccttactactaccacttcgacgaatctctttgatc

SEQ ID NO: 943037 - DNA, 120 bp, Artificial Sequence
  ENSG00000224153_0 (sequence is synthesized)
cagtcaacagaatcaccatgtggaatatgagttcactgcagattaaattaattttgtgaaagtcttacaaagaattaaaaatgtttaggatgccaaaaatggcaaatgaaggcttaatat

SEQ ID NO: 943038 - DNA, 120 bp, Artificial Sequence
  ENSG00000224153_1 (sequence is synthesized)
ccattggaaattaacaagacataaatgaaggcagatcaaaatgaaactagaacaagtagatgtgaaaagaatcaattagaaatcttagaaatagaaagtttgttcattaaaagaaagctc

SEQ ID NO: 943039 - DNA, 120 bp, Artificial Sequence
  ENSG00000224153_2 (sequence is synthesized)
agtagacagaataaatgatgcaaaaagagaattattgagttagaagacattacttaggaattaacatgaatacaatacacaaagattaaaaaatataaaagcagttatgagatatgaagg

SEQ ID NO: 943040 - DNA, 120 bp, Artificial Sequence
  ENSG00000224153_3 (sequence is synthesized)
acagcttgcatgaagggctatgtatgtctaataggagtttcagaggaagagaataaagggaatggcagtgaaaaatacatgaggaaatagtagctgagaaatttccttggggaaattgca

SEQ ID NO: 943041 - DNA, 120 bp, Artificial Sequence
  ENSG00000224153_4 (sequence is synthesized)
gaacatcaagggcaaagagaataaaaccttaccatggacctgagaaaaagacagattacttaaaaagtaatttctggacctcagcaaagactgaggctggggatgagggggtagtatctt

SEQ ID NO: 943042 - DNA, 120 bp, Artificial Sequence
  ENSG00000224153_5 (sequence is synthesized)
caaagtgccaattggatttttatgcccagctaacttacagtggaaatttaagacaaaaggggcgtttcgatacatgtaaagtgcagcccctcatttaaagaattattataggttatacac

SEQ ID NO: 943043 - DNA, 120 bp, Artificial Sequence
  ENSG00000224153_6 (sequence is synthesized)
ttcaggaagaaaaatgaaccagaaaaaaaggggagagcacatgaaacactgttaagcatagaaatagataaaacatgttgataaatttaaatgagtgttgactacaacagaaactccttt

SEQ ID NO: 943044 - DNA, 120 bp, Artificial Sequence
  ENSG00000224153_7 (sequence is synthesized)
aaatgagtgttgactacaacagaaactcctttattttttatttatttatttttgagaccgagtctctgtcacccaggctggtgtgcagttttgtgatctcggctcactgcaacctctgcc

SEQ ID NO: 943045 - DNA, 87 bp, Artificial Sequence
  ENSG00000224153_8 (sequence is synthesized)
tgcctcccgagttcaagcaattctcatgccttggcctcctgagtggctgggacaggcctggcgacgatgtcttgctctgtctccagg

SEQ ID NO: 943046 - DNA, 120 bp, Artificial Sequence
  ENSG00000224153_9 (sequence is synthesized)
catttaaacttctcatttttattaaagatatacatattcatgtttttttagaactcaaataactctgcagggcttatgtgggagccagcttctggtctggccccagtgatcctcacctcc

SEQ ID NO: 943047 - DNA, 120 bp, Artificial Sequence
  ENSG00000224153_10 (sequence is synthesized)
tggtgctcatgcccttgtgtcacacctttccacaatgaatagggctgatctgtgtaaccggtagggtggtgcagaaaataatggtgtgtgacatctcagcttaagtgatgacagacattg

SEQ ID NO: 943048 - DNA, 87 bp, Artificial Sequence
  ENSG00000224153_11 (sequence is synthesized)
tgggtgcaagcgatcgagggcctagcatggtatagatgttcaacctgtgtttgttgactgactgagtgaatggagaaagagggaaat

SEQ ID NO: 943049 - DNA, 120 bp, Artificial Sequence
  ENSG00000224153_12 (sequence is synthesized)
tgtttgttgactgactgagtgaatggagaaagagggaaatgcaaaagaaagaaggaaaggaggaggatggatatgaactctgagacaattctttgactgcctgcatctgacatggacttg

SEQ ID NO: 943050 - DNA, 120 bp, Artificial Sequence
  ENSG00000224153_13 (sequence is synthesized)
tatggaaagaagcagatgggtttaagcaaagaacttttttttttccgagatagagtcttgctctgtcttacccacgctggagtgcagtggcaagatcctggctcactgaagcctccacct

SEQ ID NO: 943051 - DNA, 120 bp, Artificial Sequence
  ENSG00000224153_14 (sequence is synthesized)
gactcccgagtagctgggattacagtgtttgctgcgcatcaggatgtttggtggacattccattgtggatggaccctggcttcttgcccaaccgcttatgttggaaatgcccaccagact

SEQ ID NO: 943052 - DNA, 120 bp, Artificial Sequence
  ENSG00000224153_15 (sequence is synthesized)
cgcttatgttggaaatgcccaccagactggacctccctggagaccaaacgcagcccatcttgggagctggccagtgccacatcctccccctcttgcagggaccagctgagtcagttgctc

SEQ ID NO: 943053 - DNA, 120 bp, Artificial Sequence
  ENSG00000224153_16 (sequence is synthesized)
catctcgcacctctcaacaccttcctgtgtggcactggaccacctgtggaagccctggcatgccttgctaccatagctcgcagaagttatggagaaaaggaggcccacacagactgagaa

SEQ ID NO: 943054 - DNA, 120 bp, Artificial Sequence
  ENSG00000224153_17 (sequence is synthesized)
aacaccaaggcgagggcatggctgggatcccagcgcaggatccccgttcttctgcagtcacagtcttggctgaactgagccctttcctcccagtgtttggcttggatgctagaccaggaa

SEQ ID NO: 943055 - DNA, 120 bp, Artificial Sequence
  ENSG00000224153_18 (sequence is synthesized)
cgccatgcttaacagcctgtgccattggtctgcaggagttggcaattcagctgctgtgactctgctgtccatcaccgtaaccatgttcacctcgcctgtggcagtggagtgctgccactt

SEQ ID NO: 943056 - DNA, 120 bp, Artificial Sequence
  ENSG00000224153_19 (sequence is synthesized)
ggtccctgcgccctgagatccatgactcccattacatttaagtttccaaattcagtgactgctttatgaagactgagaagtccaagatcaaggagccggatctggcgagagccttcttgt

SEQ ID NO: 943057 - DNA, 120 bp, Artificial Sequence
  ENSG00000224153_20 (sequence is synthesized)
tggtggggactctttgcagagtcctgaggtggcacagggcatcacatggtgaggggctgagtgtgctagctcaggtgtctcttcctcttcttataaggccaccagccccactcccatgat

SEQ ID NO: 943058 - DNA, 120 bp, Artificial Sequence
  ENSG00000224153_21 (sequence is synthesized)
aacccatgaatccattcatccacaaatggattaatccagtcataagggcagagcctcatgacccagtcacttcttaaaggccccacctctcaacactgtcatttggagattaagtttcaa

SEQ ID NO: 943059 - DNA, 120 bp, Artificial Sequence
  ENSG00000224153_22 (sequence is synthesized)
catgagtttaggaggggattaacattcaaaccatagcagcagggactgtaacaagtgagctgtctccagggccatgcctggcagcctctattgggagcctatttctgtgccctcccttgc

SEQ ID NO: 943060 - DNA, 120 bp, Artificial Sequence
  ENSG00000224153_23 (sequence is synthesized)
cgtgtgcatcaggtgaataggggtgagggatgtctaatgttgaaagggacctggggtggaggaatagatcacaggtcaaggggaaggggaaattggaggggagaaagcatgtgtgtaggt

SEQ ID NO: 943061 - DNA, 120 bp, Artificial Sequence
  ENSG00000224153_24 (sequence is synthesized)
ctcttctgggaccaggtgaacagccagccagatgctcaagtcagaaactagggcatcatcctgggctcctcccttccttcactcctgtattagtttgttttcatgctgctaataaagaca

SEQ ID NO: 943062 - DNA, 120 bp, Artificial Sequence
  ENSG00000224153_25 (sequence is synthesized)
ctgtcagctgggagacagctctgccgcatttttttcagctcctccattgctctgctgattcacagcctccagcttccagaacctttcccctgtcgggacagtagtccaactccgttttca

SEQ ID NO: 943063 - DNA, 120 bp, Artificial Sequence
  ENSG00000224153_26 (sequence is synthesized)
catgcttgtcctatttgctcgttgggttccaggaggctctctccgtcccctggctctgtgtatggcccatcgtccttaccacactgtcctgcaagtgctcgttaactcacctggcttctc

SEQ ID NO: 943064 - DNA, 120 bp, Artificial Sequence
  ENSG00000224153_27 (sequence is synthesized)
cactgccctctctgttccctcaatgaaggaaccctgggatcttgctcgcccctagtatctggcacatagtatacccccaggaagtatttattgtgaaaatcaataaattacttgaattga

SEQ ID NO: 943065 - DNA, 120 bp, Artificial Sequence
  ENSG00000224153_28 (sequence is synthesized)
gggcatgaccacagcctttctacctttggcagcctgtcaaagggaatcttctggagccagcctcttccctcctttcccacccgagagaggaaacattcttgctgggaatgaggctgtcaa

SEQ ID NO: 943066 - DNA, 120 bp, Artificial Sequence
  ENSG00000224157_0 (sequence is synthesized)
ggccttataactgttatcgccatctcgaaaaacgtgtgcgggttttttttttttttttttttgctcccagcctgcccagatttcaggaaggaaagaagatcttttgcttcttcggtcgct

SEQ ID NO: 943067 - DNA, 120 bp, Artificial Sequence
  ENSG00000224157_1 (sequence is synthesized)
cccccaggacttcattgtttggaagatgccttcgccaagcaatctgagctccaggccgggaagccccaaggtcacaaattttaatggagccctgaaactaaacagaaatcatccctccca

SEQ ID NO: 943068 - DNA, 120 bp, Artificial Sequence
  ENSG00000224157_2 (sequence is synthesized)
ctagaacaagagcccctagaggccagcgacaccgctaaaataacatgtgtagaccaatgccgtccaggtaacagtgcctggcaaacacggtagaggttcaataaatacattttaactcaa

SEQ ID NO: 943069 - DNA, 73 bp, Artificial Sequence
  ENSG00000264577_0 (sequence is synthesized)
cagcttcttcacagcctgttttgttgtcttctatcttcttcatggcagactcagtggtcagcggaaacttgat

SEQ ID NO: 943070 - DNA, 120 bp, Artificial Sequence
  ENSG00000264577_1 (sequence is synthesized)
cggaaacttgatgatagcatagtggtcaagcctgggagaggcaaaatggggtcacctggcctgggcccattcttttggagcccagagccaggagagcctaggtgcatcagacaacgaggt

SEQ ID NO: 943071 - DNA, 120 bp, Artificial Sequence
  ENSG00000264577_2 (sequence is synthesized)
aggtaccaatcactttgttcagactttggtcgctttacagtgtcatcatctgcaccctgaaatctaagggcctgaagccccaatcccaggggcagaacgttgtgcattttctttctcttg

SEQ ID NO: 943072 - DNA, 120 bp, Artificial Sequence
  ENSG00000264577_3 (sequence is synthesized)
ttgggaggctgaggcaggctgatcacgagtggcttaagcacaactgtaacacagctttccccatttaaagtcacacttgattctaggtccagcttggtggcgggaggggcaggaagacag

SEQ ID NO: 943073 - DNA, 120 bp, Artificial Sequence
  ENSG00000264577_4 (sequence is synthesized)
cgggaggggcaggaagacagtctgtgaactgctttcctatatgaacacaatccactttttctgttaagaaagagtagaagcagcaaaaacccattggtactaactactaccatggctcta

SEQ ID NO: 943074 - DNA, 120 bp, Artificial Sequence
  ENSG00000264577_5 (sequence is synthesized)
ctcaaatctgtgctccctaaaaagtcagttattaccgatagctcaaatactcaagtgcccaaccttctgcccattcccccccaactgttccttgagcagtatgaaaattcgggaaaatga

SEQ ID NO: 943075 - DNA, 120 bp, Artificial Sequence
  ENSG00000264577_6 (sequence is synthesized)
atggaaagaagcttctatacaccgcagcaggccataactgccaaatacagataatggaatccccactatcaatcaagaatcaatccacgttctcaccctcaaggattgttcccgatagca

SEQ ID NO: 943076 - DNA, 120 bp, Artificial Sequence
  ENSG00000264575_0 (sequence is synthesized)
agtgaagcggctcgcgcgggcccggccggcagccgctccccagacaccggggatccggcccgactgtttcctacccacgacggcgaagacccgctacagcgcgtccacgaagccccagta

SEQ ID NO: 943077 - DNA, 120 bp, Artificial Sequence
  ENSG00000264575_1 (sequence is synthesized)
ctgagccaggacggggctctccctctcgatgtaggcgactacgaactgctccgccagccggtgaggcagctaattaagaaagccaccttcaggatgtctttcgagaatctagcctcgaag

SEQ ID NO: 943078 - DNA, 120 bp, Artificial Sequence
  ENSG00000264575_2 (sequence is synthesized)
aaagtcatgtaagagaacgcctgcatcaaaaagtcgggaggccgggcggagtcgccgttaaacgtccagggaaagccaccaggtgggccggcgaacgctcccgggccagcaggtaggctt

SEQ ID NO: 943079 - DNA, 120 bp, Artificial Sequence
  ENSG00000264575_3 (sequence is synthesized)
tctcgcacagcagcccccgcacccggtccgtaagctcgttgttctccctgcgccgggcatggttctaggtcaggaggtcctacatcatgacagccaacgcgtccatcctgcgcctccccg

SEQ ID NO: 943080 - DNA, 120 bp, Artificial Sequence
  ENSG00000264575_4 (sequence is synthesized)
ccttgctccccgctcggtccctcccggccgcggcgctgccggaagtgcgtgtcggcgcgggggcggatcccggtggcggcgaggggcggactccgcggacaaggccaggcctagccttga

SEQ ID NO: 943081 - DNA, 120 bp, Artificial Sequence
  ENSG00000264575_5 (sequence is synthesized)
ttgagctccgtcgggcagggccgccgggattggtgtccggcagagcgtgagcccagcgggctggagtcggcgagcgggagtgaaagaagaaaagctagagagcgaaggcaaagcccgagg

SEQ ID NO: 943082 - DNA, 120 bp, Artificial Sequence
  ENSG00000264575_6 (sequence is synthesized)
agagagggccgcggtcggcggaggaatctgactgcacggttgcgtgcgctcactcccggagggctccctcaggcgggcggctccgctagtggctaaaggcaaagcattccggggcgcggc

SEQ ID NO: 943083 - DNA, 120 bp, Artificial Sequence
  ENSG00000264575_7 (sequence is synthesized)
tccattgccccagttcttatctgttttgctcaatgtctcatagctacaagaaggcaatttctgacgaagccctccgtcccttccaaatggattattttggcgggcttccacccggacagt

SEQ ID NO: 943084 - DNA, 120 bp, Artificial Sequence
  ENSG00000264575_8 (sequence is synthesized)
atgccacccgaatgactggacaagtgcacgggagcggctgtcatttgcggagtgcgccttgcgatctaggcgcctcacagcgcaaattatccagtaatttctctgaaatcgatgctggtt

SEQ ID NO: 943085 - DNA, 120 bp, Artificial Sequence
  ENSG00000264575_9 (sequence is synthesized)
tgttttcccaaggcaaatcagcagcttatacagacattggggccacaaagccggtggaacaacgggagacggcttcctgagtgtcaggtcctccaagatgagcttaaacttcgggtggtg

SEQ ID NO: 943086 - DNA, 120 bp, Artificial Sequence
  ENSG00000264575_10 (sequence is synthesized)
ggcaggctcggtaggcgggaaaggcccgtgtccagatgaatgcagtccatgtttatattgatgaaagacacgtataccatttggtccagctcaaccattcttaacaagtgctggctgtga

SEQ ID NO: 943087 - DNA, 120 bp, Artificial Sequence
  ENSG00000264575_11 (sequence is synthesized)
gcactggtgtgtgtgtgcctgcgtgcaaccagcaatgtaagtgatgaccagctgcatgatgccttaatttgagtggacaaagtcggtcaagaaccactttcaggcttctgggtctccaag

SEQ ID NO: 943088 - DNA, 120 bp, Artificial Sequence
  ENSG00000264575_12 (sequence is synthesized)
tctttgtctccctgtatccaaacgaggcattccaagtttgacagcatggaacattgcatgtccgaaataccaaccgtgaaactgggtaaaaagcttcaggaggtgatattgatgtgtata

SEQ ID NO: 943089 - DNA, 120 bp, Artificial Sequence
  ENSG00000264575_13 (sequence is synthesized)
gtttaggaaataaaacccaatacttacttcaaagaacgtaatttgtggctttttagagagaaggatactttgacagttttcatttgtcgtctacatgtatatggtacgtttcattctgcc

SEQ ID NO: 943090 - DNA, 120 bp, Artificial Sequence
  ENSG00000264575_14 (sequence is synthesized)
ttttaattaatttggtattttactatgaaaactactttgtattaataaaataatgtatttccaatgttataagttgtgttataacagtttcaaaagccaaataaacaagatgcattttga

SEQ ID NO: 943091 - DNA, 120 bp, Artificial Sequence
  ENSG00000275812_0 (sequence is synthesized)
ttctgcaggtagaggctgccatcagctgccatggagacccggtagtggcagaccttggcctgggcccggactaggaagggttcagagatggagacccctgccttggctgccagctgcccc

SEQ ID NO: 943092 - DNA, 120 bp, Artificial Sequence
  ENSG00000275812_1 (sequence is synthesized)
gtggaggagggagtgtgggcagccacaggctggggcggggcagcgagagcggcccaggttggagcttttctgctgacggtgtgcacagagtaggcacttaataaatacttgtagaatgaa

SEQ ID NO: 943093 - DNA, 120 bp, Artificial Sequence
  ENSG00000254367_0 (sequence is synthesized)
ctgatgaatggtttatccagggactggcaaaaggagaaaaacaagatgcagaggaatgagactgagagtaccacagtgtgaacagtttccccaaagtgcttcattttggctccagatgaa

SEQ ID NO: 943094 - DNA, 120 bp, Artificial Sequence
  ENSG00000254367_1 (sequence is synthesized)
gagatgggcaccaagagttgattgcccaactctacacagctaataaatggcagagcttaatcttaaacaacagatttaagtcctaaatcctgaatacagagtccaagtttttagctgcta

SEQ ID NO: 943095 - DNA, 120 bp, Artificial Sequence
  ENSG00000254367_2 (sequence is synthesized)
actagttgaatgttcctagaaggtcctataccagtcaagcgccgtccttttgcctcttaatgcgcatgcttcagcccacgcacccaaatcctgagctcttatccgaaagctgctgatcac

SEQ ID NO: 943096 - DNA, 120 bp, Artificial Sequence
  ENSG00000254367_3 (sequence is synthesized)
cagcttcaggtgttttctgtctgttgggagcctgcctttccctggcaccggctgtcaccaattattttagagagacagtgtaacaaccacctgaccatctcacctgatggttgctggggg

SEQ ID NO: 943097 - DNA, 120 bp, Artificial Sequence
  ENSG00000286191_0 (sequence is synthesized)
aagctccttttaaaccaccactggagattggaaaaatcaaaacttcacagcagtgataagagcactgaaaagaagcagatttcctgagtcttgaaaggaaggggaattggaagataatat

SEQ ID NO: 943098 - DNA, 120 bp, Artificial Sequence
  ENSG00000286191_1 (sequence is synthesized)
ttttctcactgctgtgcctgtgttttcttaggcccagctaaatccaaggcggtctctcccaggcctaggctctccggaggactgcgcgcaggcagctgccgagggaacaagggaacttgc

SEQ ID NO: 943099 - DNA, 120 bp, Artificial Sequence
  ENSG00000286191_2 (sequence is synthesized)
tgcccaaaatgtgtagctgcgagtccaagaaaaggacacaaaatcctcaggaagaagattactcagtgtatttaatgctgcccttcctcaattccacccaaagctcacatggcgacacga

SEQ ID NO: 943100 - DNA, 120 bp, Artificial Sequence
  ENSG00000286191_3 (sequence is synthesized)
agggcattggtgaggaaaccagcgaggagtctgcatgagcctgagatgttgctaagctctctgatatctgcggtgagagtgtctacgcgaagattacccatgctgggctccagcgtttca

SEQ ID NO: 943101 - DNA, 120 bp, Artificial Sequence
  ENSG00000286191_4 (sequence is synthesized)
accctaaccccacaatgagcgcctggtcactctgtggtctaaactctgagagaagagagcattccatactatactacatttcgtacacaattatttgatacatggaagaaaccataaata

SEQ ID NO: 943102 - DNA, 120 bp, Artificial Sequence
  ENSG00000286191_5 (sequence is synthesized)
ttatttatcttaccatgggcctcagaatgtccaaacaccacagctaattagggttcaataatagattcaataagctgaagcctgtttttctggtttatcaaaacaagtaaagcaatggcc

SEQ ID NO: 943103 - DNA, 120 bp, Artificial Sequence
  ENSG00000286191_6 (sequence is synthesized)
attacattctaatttgtaagcattttgtttgatggctttgagtagaaagtacttagctttgcctgtcctataggaggtccagccaccatctaaagtcagcactaaactatatctgttgcc

SEQ ID NO: 943104 - DNA, 120 bp, Artificial Sequence
  ENSG00000286191_7 (sequence is synthesized)
atttacgatacttttttccatttgtggaaacaagttatttgttataaccaaacatatattcaaatacagacggagcttttgctaaaagattagaaagtcaatatttcctaattggcaagg

SEQ ID NO: 943105 - DNA, 120 bp, Artificial Sequence
  ENSG00000286191_8 (sequence is synthesized)
agaaggatttggtcaaagccaatgagaatttcttctatgatcagtctttccccaggagctggctcctgtgaagattataactcacctgctgcagatgcgagtaaagttgacactgtgaag

SEQ ID NO: 943106 - DNA, 120 bp, Artificial Sequence
  ENSG00000286191_9 (sequence is synthesized)
catactagtatatttcaccatctcagggtaccccagttgaaaagttttaatcaagactccctaaaccatgatttctcaacttcagcactattgactttgagggtagataattctttgttg

SEQ ID NO: 943107 - DNA, 120 bp, Artificial Sequence
  ENSG00000286191_10 (sequence is synthesized)
taggggctgtcctatgcattgtcaatgtttagcagcattcctggctgacacccactagatgctggtaacatcctcctcaccagtcatgacaacaaaaaatgcatccagacattgccaatg

SEQ ID NO: 943108 - DNA, 120 bp, Artificial Sequence
  ENSG00000286191_11 (sequence is synthesized)
tcccctggggaagaaaaatcacccccagtgatgctcctccactccttgtgcatgatatacattaatatttccatggaggtgacttgccaaggttcataaccttgtccttaagcaagaatt

SEQ ID NO: 943109 - DNA, 120 bp, Artificial Sequence
  ENSG00000286191_12 (sequence is synthesized)
tgcatgtgtgtgtacctttatttttttaatgaattgaacatttatttaaaatcatattgtgctatttatagtattcttgtcttgcatgttttacttaatcacatatcctccagaactgtg

SEQ ID NO: 943110 - DNA, 120 bp, Artificial Sequence
  ENSG00000286191_13 (sequence is synthesized)
agaattttgtttctgctattaagctacctagtctatggtattttgttatagaagttcatattaactaaatactaactaaatcaatctctctctttcttcataaatttatttttaaactat

SEQ ID NO: 943111 - DNA, 120 bp, Artificial Sequence
  ENSG00000286191_14 (sequence is synthesized)
ctttaaaagaatatactgtgagcatgatttccattcttaacatattaaacattcatttttcactttataatgatagcaaaacaaaattatctgatgtcatgttttttaaaactatataat

SEQ ID NO: 943112 - DNA, 120 bp, Artificial Sequence
  ENSG00000286191_15 (sequence is synthesized)
tttttattatttaaaaaatttatatatacatatataagtaatatgtaaaatgatatagccactctgaaaaacagtttggcaatttattacaaaactaagcacgcaattaccatttgaccc

SEQ ID NO: 943113 - DNA, 120 bp, Artificial Sequence
  ENSG00000286191_16 (sequence is synthesized)
acccagaagtgattgtactatacctggtcacttatcccagagagataaacgtatgctcccacaaaaatctgtacatgaaagttcacagcagcttcactggtgatagccaaaaaatgaaaa

SEQ ID NO: 943114 - DNA, 120 bp, Artificial Sequence
  ENSG00000286191_17 (sequence is synthesized)
agccaaaaaatgaaaacaacctagatatccttcagtgagtgaatgtttagaaagaaaagaaagtggtatatttacttattttcatagtataaaagattgtattatgaaagttaatattaa

SEQ ID NO: 943115 - DNA, 120 bp, Artificial Sequence
  ENSG00000225407_0 (sequence is synthesized)
gccggtcttcgcggcaggcagagcgcagggtgcccacggcaatccaacttctgggtgtttactccaagatgtgaaatcagtttgtcaaagagatgtctgcactcccatcttcattgcagc

SEQ ID NO: 943116 - DNA, 120 bp, Artificial Sequence
  ENSG00000225407_1 (sequence is synthesized)
actactcacacgttagctaagttatgaaatcaacctaagaatctactaacagatgaacagaacgaacaatgacgtattttcaaagatgttaataaaaagctaaatgcaagattgttgtga

SEQ ID NO: 943117 - DNA, 120 bp, Artificial Sequence
  ENSG00000225407_2 (sequence is synthesized)
aacctcacttacgctaacataatgatgctttgactcagtggactcaacatttgcttctgaagcatttggaaaacatctttaacatcctttggagaaccatttcctctggccccatgaccc

SEQ ID NO: 943118 - DNA, 120 bp, Artificial Sequence
  ENSG00000225407_3 (sequence is synthesized)
tttgctgctggggatttacaggctgtctgggaatgcacagctaaatactccacagagactcaaaggtgggcccacagctaattacagccacgtgggggatggcatgtttcctaaagcggc

SEQ ID NO: 943119 - DNA, 120 bp, Artificial Sequence
  ENSG00000225407_4 (sequence is synthesized)
tgtggctgagaaagcaatgtatcctttccttcctacacaccaccttcctccagccatcatcatcaatgtattaaacaggaacactgagttaaaaataaaagctttggatgatttaaaaaa

SEQ ID NO: 943120 - DNA, 120 bp, Artificial Sequence
  ENSG00000286810_0 (sequence is synthesized)
agttgtatgtacggtttccaagagactatttggtttggttgactcttctgtcaactctccaaacattcctgaaagagggctgcagggtgacctccagcagactggatgagggaggctggc

SEQ ID NO: 943121 - DNA, 120 bp, Artificial Sequence
  ENSG00000286810_1 (sequence is synthesized)
ttttgtgtcaacaacttatgcaagcatcagatccagtgttctggcatttgaattacagcatgttctagagaaaaatagagtgtgggagccaagaaccctcattttatacctaatgagctg

SEQ ID NO: 943122 - DNA, 120 bp, Artificial Sequence
  ENSG00000286810_2 (sequence is synthesized)
taaggttctgggcaagtttgaaagcttcctacacctgactttcttcatgtaatctcatgagctggtggagagagcataaactgcaaaaacagatgagaaagtcagtcaaaagcaaagtac

SEQ ID NO: 943123 - DNA, 120 bp, Artificial Sequence
  ENSG00000286810_3 (sequence is synthesized)
tctttatttccacaactcggacaagttttctgcaatgatatttgcgtgccctccgtgtgtcaagttctctgtcacaggcttgaacatgcaagagaatctcaaaaaatgatccctgaacca

SEQ ID NO: 943124 - DNA, 120 bp, Artificial Sequence
  ENSG00000286810_4 (sequence is synthesized)
gttttaacaagcctttcaggtgattctgaaacacttaagtttgacaattactgccgaggacagatacttgggctgcctgttgcagtttatcaaactggctgttcattagaatctcctggg

SEQ ID NO: 943125 - DNA, 120 bp, Artificial Sequence
  ENSG00000286810_5 (sequence is synthesized)
aagccttataaaattatcagtgctgggactccaatgccgtagattctaatttatttggtcaggggtaggccaggaaaccagtatttttaaagtctcctaagtgattctagtatgtctacc

SEQ ID NO: 943126 - DNA, 120 bp, Artificial Sequence
  ENSG00000286810_6 (sequence is synthesized)
agcattgagtatcactagcattttaggtaatctggctttgactcctaggcttgagcaacttgggggacagaagggaggagctcagcatgcttcctcggtttaggatgaagaggataggca

SEQ ID NO: 943127 - DNA, 120 bp, Artificial Sequence
  ENSG00000286810_7 (sequence is synthesized)
gggaagtaaggatagttcagaagaatgtttaaacaagtctgaaataagatacatttaaatgtgaaatgtggaaggggaagaattataattaagccatagtcttcagggaacatttgaggc

SEQ ID NO: 943128 - DNA, 120 bp, Artificial Sequence
  ENSG00000286810_8 (sequence is synthesized)
agtgagcattttaggctgagtaacaggaaataagtttagagaaaaccggtgaaagagagtcagagataatacaactgagataaattaggcttgaatattccttatggggctgtgctgtgc

SEQ ID NO: 943129 - DNA, 120 bp, Artificial Sequence
  ENSG00000286810_9 (sequence is synthesized)
ggtaaggtttgcctatcaccaagaaaacaagataaacactatttctgccttatgggcttttgctggaagtgagatctctctcttccactctctctcttgctctctctatgtgtgtgtgtg

SEQ ID NO: 943130 - DNA, 120 bp, Artificial Sequence
  ENSG00000286810_10 (sequence is synthesized)
tgtgtgtgtgttttatgttgctgttctccacaaacgttttgttgtgggctactgtaagactcgttatggtcaggcaaaatctggatgaaacattctcatggaagggtgaaaggtgaggtt

SEQ ID NO: 943131 - DNA, 120 bp, Artificial Sequence
  ENSG00000286810_11 (sequence is synthesized)
tatatgaaaaaaaaatgcacagggcctaagacttctagaaactacccctaacaataaaggaattatggtagtcctcttttcccaaatacaattttaaacgtaaaaatcacactaaaccat

SEQ ID NO: 943132 - DNA, 120 bp, Artificial Sequence
  ENSG00000286810_12 (sequence is synthesized)
tacttcaaagctttgtttgaaatatcaaaatctttctaatttttttctctcatttttttcttgcatgtctttgtttctgttggtgtcttggaacagagaatctcaaaaaatgatccctga

SEQ ID NO: 943133 - DNA, 120 bp, Artificial Sequence
  ENSG00000254363_0 (sequence is synthesized)
aatagacgatgccgcagcagcccagcctccagcgtctggggacaaaagccctcaccagaagccgagtggatgccactgccacttgaacttcccagtctgcagaactgtgagctacacctt

SEQ ID NO: 943134 - DNA, 120 bp, Artificial Sequence
  ENSG00000254363_1 (sequence is synthesized)
tttataaatgacccatctcaagtattctgttacaacaccaccaaatggactaagacaagtatttatccaaaggaaataaaaatgctacgacacaaagaggagctgctaacaccagatgac

SEQ ID NO: 943135 - DNA, 120 bp, Artificial Sequence
  ENSG00000254363_2 (sequence is synthesized)
ggttccatgccaacctcctccatggctaggtgttggagcgccccagctgctgcctccctggtagctttcattaaaggactttgcttttttggtgtctacatctcttaggaagaagagaat

SEQ ID NO: 943136 - DNA, 120 bp, Artificial Sequence
  ENSG00000254363_3 (sequence is synthesized)
aatgagatgatgtatgcagagcactggcagaaagcctagcatagaggaatctgaggattcgccatgcatgcttcctggtatatagtactagttcttgtcaatggcacagagacttgaaga

SEQ ID NO: 943137 - DNA, 90 bp, Artificial Sequence
  ENSG00000254363_4 (sequence is synthesized)
tcacaagtagctgggactacaggtgcacactgccacacccagctaattttggggttttggggttgtatttttttgtgtctcaatctcctg

SEQ ID NO: 943138 - DNA, 120 bp, Artificial Sequence
  ENSG00000254363_5 (sequence is synthesized)
ggcatgagccactgtgcccggcctataacctttcttaaatacttcgagtggcttcccatcacactcagaataaaattcaaactcaaagggcctgccaggctgcctctcctgatctcttat

SEQ ID NO: 943139 - DNA, 120 bp, Artificial Sequence
  ENSG00000254363_6 (sequence is synthesized)
actcaaagggcctgccaggctgcctctcctgatctcttatgcctcttcccctcactctgctccagccacagtgacttccttgtttctctaatgccctaagcttgttcctccctcaagtct

SEQ ID NO: 943140 - DNA, 120 bp, Artificial Sequence
  ENSG00000254363_7 (sequence is synthesized)
ttcacctgcggttccctccacctggaatgttcttgccctgggtatacacatggctcagttcctcatttggttctgtctaatgtcagctcctcagaggccttccctggtggtcaaaatgag

SEQ ID NO: 943141 - DNA, 120 bp, Artificial Sequence
  ENSG00000254363_8 (sequence is synthesized)
ccccatccctgcgctcaccctcggttcccttatcctgttttattttcttcatagcacttatttctccttgatataatattatatcaattgttgacttgcgtcctgtctgtctccctataa

SEQ ID NO: 943142 - DNA, 120 bp, Artificial Sequence
  ENSG00000254363_9 (sequence is synthesized)
ggacagggcttggctttttgatggctatctccagtgcttaacacagtgcttggcatatagaaggaaataatatttgtggaatgaatgtgtatgggaaacctcttgtaaccctcctgtcat

SEQ ID NO: 943143 - DNA, 120 bp, Artificial Sequence
  ENSG00000254363_10 (sequence is synthesized)
ccttttggcccacgttttactcagccatcactgtggcaaccagcttggagcaggtaaacgcaccgaggctcagctgctccacacggctctgctcttgccttctgctggggcttctccctg

SEQ ID NO: 943144 - DNA, 120 bp, Artificial Sequence
  ENSG00000254363_11 (sequence is synthesized)
gactccagtactgcaaactggatgtctgaggatgttaaccccttgggagtaaccctgggcccttggcggctggggttggtggctatgtgctttcttctctgacactcagtggacaactag

SEQ ID NO: 943145 - DNA, 120 bp, Artificial Sequence
  ENSG00000254363_12 (sequence is synthesized)
gaggtgcactctacactgctcctcatcacatcccagctgggtcaagccccagctgcccacagtggtgaccagctctataacacaccatggcactggctttcccttgttcctacttcatga

SEQ ID NO: 943146 - DNA, 120 bp, Artificial Sequence
  ENSG00000254363_13 (sequence is synthesized)
gtctccccagtcccctattcctgctccctgggatcatgtcctgaattaacttgcaagcatgctctttctctgctttctctacctgtaagaaggtagcagggatagagaagagcccaggtt

SEQ ID NO: 943147 - DNA, 120 bp, Artificial Sequence
  ENSG00000254363_14 (sequence is synthesized)
acattagaacaatatatgaaacttatagactagtaggagagaccaatacaacaaaatttaaataactacaggtaaagagatggacttttcaacagatggtgttggaataactgaatatcc

SEQ ID NO: 943148 - DNA, 120 bp, Artificial Sequence
  ENSG00000254363_15 (sequence is synthesized)
atatggaatgcaatgcatttcaatccttacttcataccatactcaaaataaatcaaagaactattaaaaaaaaaactataaaacttctggaagaaagaaattctgccaggcacggtggct

SEQ ID NO: 943149 - DNA, 120 bp, Artificial Sequence
  ENSG00000254363_16 (sequence is synthesized)
aaaaaaaaagaaagaaagaaagaagaaattcttcatgatggtggggtaggcagagatcatagaaagaacttactataaaaggaggaaaaagacagcattaaaaagataaataggtaagtc

SEQ ID NO: 943150 - DNA, 120 bp, Artificial Sequence
  ENSG00000254363_17 (sequence is synthesized)
aagacagcattaaaaagataaataggtaagtcatacactaggagaaggttttgtaatacatacttttgacaaaagatttctatctggaacatataaagaaatctaataactcaatagtaa

SEQ ID NO: 943151 - DNA, 120 bp, Artificial Sequence
  ENSG00000254363_18 (sequence is synthesized)
gaccccaaccaaaataaaatatgggcaaaaaaaatttaacaaatacctcaaaaagaagatatacaaacatccaataaacacacatgaaaagttgttcaacattattagccattagggaaa

SEQ ID NO: 943152 - DNA, 120 bp, Artificial Sequence
  ENSG00000254363_19 (sequence is synthesized)
tgtaaattaaaatcacaatgagataacatcacacactcactagaatggctaaactttaggagaatcggtaataacgtgttggtgacgatgtggaacaactggaactcttatatattgctg

SEQ ID NO: 943153 - DNA, 120 bp, Artificial Sequence
  ENSG00000254363_20 (sequence is synthesized)
gcaggagtgtgaactggaacagtcacttggaaaaaagtttggtggtgtcttataaagttaaacatatacttaccaatgcccagcaatctccattataggtatggttgggatgtgatttgt

SEQ ID NO: 943154 - DNA, 120 bp, Artificial Sequence
  ENSG00000254363_21 (sequence is synthesized)
ctgtgtcaaaactcatgttgaagtttgcttgccagttctgtccactggggaggtaaggcctagtgggaggtgcttggatcataggggtgaatcccttatgaaaataggttggtgctgttg

SEQ ID NO: 943155 - DNA, 120 bp, Artificial Sequence
  ENSG00000254363_22 (sequence is synthesized)
tcctagtagagtgttttcttgttgttgttgttgttctcaagagactggatcaattctcaaggaatgtattagttcctgagcaaggggttgtaataaagtgaagtttctcctcctgtttga

SEQ ID NO: 943156 - DNA, 120 bp, Artificial Sequence
  ENSG00000254363_23 (sequence is synthesized)
caggtgaacagataaattgtggtatattcatacaatggcttactactcagtaataaaaaggaacaaagtagtggtaagtgctacaacatgaatacaactcgaaaactttatactgaaaga

SEQ ID NO: 943157 - DNA, 120 bp, Artificial Sequence
  ENSG00000254363_24 (sequence is synthesized)
tgccagatagaagcatacatagcatattattacatttaaatgaagttctagaacaaacaaaactattttgattggctggccttgaaaaggtgacatttgagcaagatctggatgtcaaga

SEQ ID NO: 943158 - DNA, 120 bp, Artificial Sequence
  ENSG00000254363_25 (sequence is synthesized)
gggagccagctatggcaagatcgatggggagcattccaggcaaacagcactacaggaacaggatcaggaaagagcttgttgagcttggaaacagtcagcaggccacagtgactgcgtgaa

SEQ ID NO: 943159 - DNA, 120 bp, Artificial Sequence
  ENSG00000254363_26 (sequence is synthesized)
gtaggtggggcagagaatggtgggggacagggtggagaggtggatgggagccagatcatgccaagccttatcagccctgataaagttgtggaatttgatatgaataaaatgcaaatccct

SEQ ID NO: 943160 - DNA, 120 bp, Artificial Sequence
  ENSG00000254363_27 (sequence is synthesized)
catagttttgtggggcggaaacacataagcaaataaaggcaattcagggtcatgggtgatatatttggggagtgtacagggaaagaggagtagtaggcattagggacatctgagaaggct

SEQ ID NO: 943161 - DNA, 120 bp, Artificial Sequence
  ENSG00000254363_28 (sequence is synthesized)
tcccagaggaggtgacatttcggctgagactggaagagtagtagaagaggggaaaggtcattctggtggagggtactgtgcctacagaagctcagagacatgtagcctcagggaacattc

SEQ ID NO: 943162 - DNA, 120 bp, Artificial Sequence
  ENSG00000254363_29 (sequence is synthesized)
agagacctcagcataatataagcctagttggagtgttcccaactaggagagggagtggcaggagatctgaggctgaagagagtggctttgaatgctttgtcagacttgatcctgcaggga

SEQ ID NO: 943163 - DNA, 120 bp, Artificial Sequence
  ENSG00000254363_30 (sequence is synthesized)
atgggaaacccctgcagaatttatagtcaggaagtatcagggccaggttgacacttcagatcaagatctccagattggcaggcagagagcaaggccactggttctagtgtgagataatgg

SEQ ID NO: 943164 - DNA, 120 bp, Artificial Sequence
  ENSG00000254363_31 (sequence is synthesized)
gggactgggcctgggactgagcaggggtgggcggggcagggagtagagccaaactctgctaagcagtgactaggactctcccgattgaggcaaagctctccagatcttgaggccccagag

SEQ ID NO: 943165 - DNA, 120 bp, Artificial Sequence
  ENSG00000254363_32 (sequence is synthesized)
ggccataaatactttcatgcgcatctgttctcttggagggcttgtcacacctgaaggctcctaggccctggctcccagggattcagaagtgataggtctaggatgaagcccaggaatctg

SEQ ID NO: 943166 - DNA, 120 bp, Artificial Sequence
  ENSG00000254363_33 (sequence is synthesized)
catacataaaaagtgacactctccactctgatgcgggtggactccataccttccaggctggggaggggagggggcaggacaagcacactctcatctggactgtggctgaagcagctcaga

SEQ ID NO: 943167 - DNA, 120 bp, Artificial Sequence
  ENSG00000254363_34 (sequence is synthesized)
gaatcgaaggtagcatctaaaataaggacctggatgcactgggaacaaaggtagtgtgtgtctccactgctgcagctaaagaattgcagtggagtggccctggtcatcatgcagaaaaat

SEQ ID NO: 943168 - DNA, 120 bp, Artificial Sequence
  ENSG00000254363_35 (sequence is synthesized)
gactcctgatcaccagtccaaggagccacagaaataagagatggggccatgatcggaccatagatctgtcttttaacctgtaccttctcctagggtgcagacagggaggcaggaagggga

SEQ ID NO: 943169 - DNA, 120 bp, Artificial Sequence
  ENSG00000254363_36 (sequence is synthesized)
ttactggaggctgcagtaaactagagaacaagctctgtgcaaaggaagcctctcttaccattcagcatctcaatgaattaaccctcacaacagctctatgtggttggtcctattattatt

SEQ ID NO: 943170 - DNA, 120 bp, Artificial Sequence
  ENSG00000254363_37 (sequence is synthesized)
cccatttcttagatggggaaactgagactcaaaaaggtggagtaagtagtgctgggtcccaaggtgaggacataggggaaccatggctggaacacaggcctctggacactccgaatcata

SEQ ID NO: 943171 - DNA, 120 bp, Artificial Sequence
  ENSG00000254363_38 (sequence is synthesized)
gcattgccctgtgtccccttcagtgggaaaagtcacttcatctcttaatcttaaatgatcttccaagcaagaggaggggagaggaggagtataagctttctttgtcccatctttttcaga

SEQ ID NO: 943172 - DNA, 120 bp, Artificial Sequence
  ENSG00000254363_39 (sequence is synthesized)
aggtatctaagtccttcctgtgtgtgtcttccaaagatacagtaccaggacctagagaggctgagatttagagcctcatggtgcaaactcaattgtagggtcctagccaggactacttgc

SEQ ID NO: 943173 - DNA, 120 bp, Artificial Sequence
  ENSG00000254363_40 (sequence is synthesized)
ctgtatcttctaagaatctcacaacagtgccacatgcctcagctttatccaagcaacagaaggaggtggtggaggtggtgatggcagcagcagcagcagcagcagcagtggcagcaaatc

SEQ ID NO: 943174 - DNA, 120 bp, Artificial Sequence
  ENSG00000254363_41 (sequence is synthesized)
tgtccccagtgcactacagtactgttttgctatgatgaaatacacatggcatatggctacaaagttactatcttgagagtggatagaaatgggatttttcatgtgccagatttcacttcc

SEQ ID NO: 943175 - DNA, 120 bp, Artificial Sequence
  ENSG00000254363_42 (sequence is synthesized)
ctttctgaaacaattcttgtagtaaacagaggttttctgatcttgctaagatcaagaggatgggaattcctttacacttttaaagtaagaccactgtcttgtagagtttcagtctgttga

SEQ ID NO: 943176 - DNA, 120 bp, Artificial Sequence
  ENSG00000254363_43 (sequence is synthesized)
tggtgcaaatgttttttaaacatggacgctattctgtgttcctccctctttccttccaaaggctacgacacaaagaggagctgctaacaccagatgaccaactcctttccagttacggac

SEQ ID NO: 943177 - DNA, 120 bp, Artificial Sequence
  ENSG00000254363_44 (sequence is synthesized)
cctgctgcttagtcctgggacctgaggtcaaaatcttagaaaagagccatgtgagatgcattccctggcctcatctctgttcttggatgctgtcagcaacactccttgagtttttaccca

SEQ ID NO: 943178 - DNA, 120 bp, Artificial Sequence
  ENSG00000254363_45 (sequence is synthesized)
cataataacactttcctcagcatggatgtggaggtgggggtgaggaatgttctatttttccttcgatggttacgccctcaccctaccaactcagtaaaaggggagtggtcagggagcgta

SEQ ID NO: 943179 - DNA, 120 bp, Artificial Sequence
  ENSG00000251314_0 (sequence is synthesized)
ctagagttttgctcctgggacgggacgtccgagagcttttggttccagagggccatagtcttcatatacttcagcactccatgaaggctttcttggtactgttcaaagtaagatataaca

SEQ ID NO: 943180 - DNA, 120 bp, Artificial Sequence
  ENSG00000251314_1 (sequence is synthesized)
agttgctgtgttgcatacatctttacaccttcattgcttgttctcccaggcatgctatcatacccaaggccacatggtgagatggaaagacactgcatctgaagtcaagggaccaaggtt

SEQ ID NO: 943181 - DNA, 120 bp, Artificial Sequence
  ENSG00000251314_2 (sequence is synthesized)
gttcccagctgtcagactgccaggaatatctagtagtttggtttcctcttctggaaaatgacattagtagttaatgctacagtgtttactttgtgccaggccatttcctaagtactttac

SEQ ID NO: 943182 - DNA, 120 bp, Artificial Sequence
  ENSG00000251314_3 (sequence is synthesized)
ttcctaagtactttacatatatatttactcttttaagtctcatgacaaccctatgaggtagtgtgttagtacattttgcattgctataaaggaatacctaagactgggtaatttataaag

SEQ ID NO: 943183 - DNA, 120 bp, Artificial Sequence
  ENSG00000251314_4 (sequence is synthesized)
aaagtaggaaagaatttagcaaagatattgtatcaggaaaataaaacaaaatcactccagttattttaacagacaaaacgtcatataggaagttggtgttagaggtctgaaaaggcaagt

SEQ ID NO: 943184 - DNA, 120 bp, Artificial Sequence
  ENSG00000251314_5 (sequence is synthesized)
aggaacatggacataatatggagaaagtgagtgcagccttcacctctagggatgggagaaacacagggaagaagctggggtcattagaatccagaagtttagaggaggagtcttttcaag

SEQ ID NO: 943185 - DNA, 120 bp, Artificial Sequence
  ENSG00000251314_6 (sequence is synthesized)
actggaaactggaacaacgcaggctgccagggcgaaaatgcactgctgggtgatgctgcaggaacaggaaacaaacaggaaggactcggtcacttcccttttctcgagtttcccgtctcc

SEQ ID NO: 943186 - DNA, 120 bp, Artificial Sequence
  ENSG00000251314_7 (sequence is synthesized)
ctctagcaccctttggcagagtctagcatggcaccatcaggccaagctgaaacgtggtttgcagagagccagccccagcatcacagagtctccacctgactgcattgcttcatggcactg

SEQ ID NO: 943187 - DNA, 67 bp, Artificial Sequence
  ENSG00000251314_8 (sequence is synthesized)
actagagttttgctcctgggacgggacgtccgagaggtctgggacgctgcaaaacaacaaagattgc

SEQ ID NO: 943188 - DNA, 120 bp, Artificial Sequence
  ENSG00000251314_9 (sequence is synthesized)
gcactccatgaaggctttcttggtactgttcaaaggccagaggatctactaccacagaaccattctagatgtgagttcctagtgtgaaaggactgggagttaacagaagagccacagtga

SEQ ID NO: 943189 - DNA, 120 bp, Artificial Sequence
  ENSG00000251314_10 (sequence is synthesized)
gagtctccacctgactgcattgcttcatggcactgtgcttttggacatttgatatccttcagctagaatatatttcttcattgtccattcacaggagccttcctttcttaaagactcaat

SEQ ID NO: 943190 - DNA, 120 bp, Artificial Sequence
  ENSG00000229717_0 (sequence is synthesized)
gcaagaattggttcttttcggggttctctcctatatcccatacaatcaaacaataaatatgtgttgaataaatcacttgtgcaaattctaaaattcacatatgaccctgtattttatcat

SEQ ID NO: 943191 - DNA, 120 bp, Artificial Sequence
  ENSG00000229717_1 (sequence is synthesized)
atctcccatagaataggtgagaaccagagaaaaatattgttaagcccaggagcccaagctatatgatcaactggaaagactcagtaggtaatttgttcctagaaagcagcctatggcaac

SEQ ID NO: 943192 - DNA, 120 bp, Artificial Sequence
  ENSG00000229717_2 (sequence is synthesized)
aaatgattgaaatttccaccttgataaaatgacgaattactacatgtcagagatttctagtttgcttgtaaataatgaaagctgtgatgataaatcccagattttcaccctgaggtaccc

SEQ ID NO: 943193 - DNA, 120 bp, Artificial Sequence
  ENSG00000229717_3 (sequence is synthesized)
tatcagcaaaacagtaaatgccattcattcttctggaggccttgccaaaaaaagtcattgcctaactaaaaaatatgctggagtctcacattttgtcttaaaatttcatgtgaattttgg

SEQ ID NO: 943194 - DNA, 120 bp, Artificial Sequence
  ENSG00000229717_4 (sequence is synthesized)
attttatgccacaatacatatttattataatattaacattaaattaccagttaaatttcttaaatttttctaaaaaattttgaaaaagctgatagtcccagaagatgtatcatgtttagc

SEQ ID NO: 943195 - DNA, 120 bp, Artificial Sequence
  ENSG00000229717_5 (sequence is synthesized)
ttgtgtcttggcatatcatcaagtccaaggagcacatgacagatgagaaaggtgagtgtaatccatggaacttggtcaatgcagtaggttgaattgtgtccccccaaaagatatgcacaa

SEQ ID NO: 943196 - DNA, 120 bp, Artificial Sequence
  ENSG00000229717_6 (sequence is synthesized)
gactctgcctcaaaaaaaaaaaaaaagatatgcataagctctagctaccccactcctttttctgtgaatgtgaccttatttggatatacgggtctttgcagatataattaagttgaggat

SEQ ID NO: 943197 - DNA, 120 bp, Artificial Sequence
  ENSG00000229717_7 (sequence is synthesized)
ctcaaaatgagataatgctggatttaatccaatgagagagatctgagacccaaagaaacaggggagacagtcatatgaagaaggaggctgctatggtttggatgtggtttgtccccacta

SEQ ID NO: 943198 - DNA, 120 bp, Artificial Sequence
  ENSG00000229717_8 (sequence is synthesized)
aaactcctgttgaaatttgatccccagtgtggcagtattgggagatgggaagtgtttgggtcatgggagcaggtgtctcatgaataggttaatgccctcccagtggagagcattctcatt

SEQ ID NO: 943199 - DNA, 120 bp, Artificial Sequence
  ENSG00000229717_9 (sequence is synthesized)
cttgtgggactggattaattactgaagagcaggttgttataacagtgagttcagcctcctagactctctctcttgcttcctctctcaccatgtgatcttttggcacacacccgcttcccc

SEQ ID NO: 943200 - DNA, 120 bp, Artificial Sequence
  ENSG00000229717_10 (sequence is synthesized)
ttcctctttcttccatgagttgaagtggtgtgggaccctgaccagttgcagctacccaatcttgaatttccagcctacagaactgtgagctaaataagcctcttttctttataaattacc

SEQ ID NO: 943201 - DNA, 88 bp, Artificial Sequence
  ENSG00000229717_11 (sequence is synthesized)
gctaaaaaagtgttctgttatagcaacaaaaataatggactaagaaaatggtaggagacgccctggcttggtggctcatgcctgtaat

SEQ ID NO: 943202 - DNA, 120 bp, Artificial Sequence
  ENSG00000229717_12 (sequence is synthesized)
tccagctgtgtggctttgggcaagttatttaacctctctgtgcctcaacttcttcatgtaaactggcagtaataataatacgaatgccacagagctgtggatgaaatgagcccattccgg

SEQ ID NO: 943203 - DNA, 120 bp, Artificial Sequence
  ENSG00000229717_13 (sequence is synthesized)
tctggcttctttaaccaggaagatgtgggctgagagctgtggagtagatgtcttcaccagatgagtacacagagaagtagagaatgtgtatctgcagagtaggatgaagcagagacaagt

SEQ ID NO: 943204 - DNA, 120 bp, Artificial Sequence
  ENSG00000229717_14 (sequence is synthesized)
cgggcactgatggcagaataggtgagaaccagagaaaaatattgttaagcccaggagcccaagctatatgatcaactggaaagactcaatgcaggacaaaggacagaactctaagtcatc

SEQ ID NO: 943205 - DNA, 120 bp, Artificial Sequence
  ENSG00000229717_15 (sequence is synthesized)
cctgtgctcacctgagacaaatgcatgtctgattgcttccactgatgtaaaaatgcagatttgctgagttagacgaagacgatggcagagagcagtcttcatcctgagccccattcctag

SEQ ID NO: 943206 - DNA, 120 bp, Artificial Sequence
  ENSG00000229711_0 (sequence is synthesized)
cgacatctaagctgagatctgaatgttgatgcagttgtaggcataggaacattattgtgtccagcgatttcagggcacagtctgcagctggtggcacaactctcagggctatataatgat

SEQ ID NO: 943207 - DNA, 120 bp, Artificial Sequence
  ENSG00000229711_1 (sequence is synthesized)
gtatggcttgttcttcgtggccctctgcaaaaaaaaatatgaatttcagaacgtgaacaactagcagacatctgctgcattaagagggaaaagtcagagctaactagtttatcttggaaa

SEQ ID NO: 943208 - DNA, 120 bp, Artificial Sequence
  ENSG00000229711_2 (sequence is synthesized)
ttctgctggtcagggcaccacacttcgggaaccatgaccctctgataaccttccctttggcatgcagagtagctcctgtgtccaaggcagtaggcaggaaccaggtgaagatgataccaa

SEQ ID NO: 943209 - DNA, 120 bp, Artificial Sequence
  ENSG00000229711_3 (sequence is synthesized)
gaagtctctgaagagggtcctgttctcagggagataacagaccagtgagcctaggtggagaatgacattgaaatatgaaccaagcaaagactggaaaggtgaaggtcatcattggccaac

SEQ ID NO: 943210 - DNA, 120 bp, Artificial Sequence
  ENSG00000229711_4 (sequence is synthesized)
gtcttccttctcagttactaaaacaagtcatgggattaagtcatgatcatcaccccatgtgacactgaaaggaatgaagagactatattggatattcagttaattatatgtctcatgctt

SEQ ID NO: 943211 - DNA, 120 bp, Artificial Sequence
  ENSG00000229999_0 (sequence is synthesized)
gaggtgaacatccatagtatcatacaaatttctcagctgcctcctccaaaactggcatcagcagaagagcaaaggactctggtccttatgaagaggtgatctcagacttctagtcttgaa

SEQ ID NO: 943212 - DNA, 120 bp, Artificial Sequence
  ENSG00000229999_1 (sequence is synthesized)
atgctgtgatccaaagagaagaggaaaagagaaaggcaccagcgagtaagggaagcaacagagaaaaggtgagagaaatgaggcatgacagataacttgtaagttctcgaagtttacaat

SEQ ID NO: 943213 - DNA, 79 bp, Artificial Sequence
  ENSG00000229999_2 (sequence is synthesized)
gcagtggcatgcacctgtaatcacagcaactcatgagattaaagcaggaggacctcttgagcccaggagtttgaggttt

SEQ ID NO: 943214 - DNA, 120 bp, Artificial Sequence
  ENSG00000229999_3 (sequence is synthesized)
caaggaagcaagcagcagagcctctgcatgagctcatgaatggctgctgtggaaaattactgacgtcaccagctgaataacaggctatctggagagtaagcagatgaaactgatgttaaa

SEQ ID NO: 943215 - DNA, 120 bp, Artificial Sequence
  ENSG00000229999_4 (sequence is synthesized)
ttatcaaatgtacaagattttgggctcctgccaaaaccttcattgagaactaagaagagaaaaactgaaaacacacagagctttttttaagcttctgagccagcaggctgttcctacatc

SEQ ID NO: 943216 - DNA, 120 bp, Artificial Sequence
  ENSG00000229999_5 (sequence is synthesized)
aactgactccccctccggttaccctagtaatttttgttgatcatttatatcaccctttatgacaaggacatctgaggtgaacatccatagtatcatacaaatttctcagctgcctcctcc

SEQ ID NO: 943217 - DNA, 120 bp, Artificial Sequence
  ENSG00000229999_6 (sequence is synthesized)
gaggtgaacatccatagtatcatacaaatttctcagctgcctcctccaaaactggcatcagcagaagagcaaaagatgctggtcttgctatgttgcccagggtagtctcaaactcttggc

SEQ ID NO: 943218 - DNA, 120 bp, Artificial Sequence
  ENSG00000229719_0 (sequence is synthesized)
acttcctccttgtgccccgaaggccagcccggcactcaggccagggcacttggacaccacgctgcaggaggctggtctcgcccaggcctctgtgggaagggccgccaggctgagtggagg

SEQ ID NO: 943219 - DNA, 120 bp, Artificial Sequence
  ENSG00000229719_1 (sequence is synthesized)
gccagccaccagctacggtgtcttccttcgcaggtctgtccccccaggcagaaggattccagcccagggatcccccatcccaccctgactgcatcctgagaaggggggacgccacttcgg

SEQ ID NO: 943220 - DNA, 120 bp, Artificial Sequence
  ENSG00000229719_2 (sequence is synthesized)
gaaggttgttggggcagcacaggccctggggccctgctctgtgaccttgggcggccccctctgtctctctaggcctgtatgcaccactggcaaagggggcagggcccaagtctactctaa

SEQ ID NO: 943221 - DNA, 120 bp, Artificial Sequence
  ENSG00000229719_3 (sequence is synthesized)
aagctcccctttctctccagaagctttggagtctcccaaaatgcctgctgggtctctgcaggactggcacctgtcaccggaacctgtctgggagggacgagaacacgctttgcaagagga

SEQ ID NO: 943222 - DNA, 120 bp, Artificial Sequence
  ENSG00000229719_4 (sequence is synthesized)
agctctgcctcacagagccctgggctcactcagggaccctggccagcagctgcttcctctccccacagcggagagagacccaagggtcccagggcggatgcttcccaccaggccagccca

SEQ ID NO: 943223 - DNA, 120 bp, Artificial Sequence
  ENSG00000229719_5 (sequence is synthesized)
gcgtgcagggtggcctcgtaagtcctgattgacatatggacagtggttcagagaggttacgctacttgctcaaggtcacccagctcccaggcccctgctgtcttccaggccactgaggtc

SEQ ID NO: 943224 - DNA, 120 bp, Artificial Sequence
  ENSG00000229719_6 (sequence is synthesized)
ctaagcgtccttccaggcgagccactgctcacagcctgttcctcatgttctgcggcaggtttgtgtatctacatcttttccagttccctgtcgtcccccttcctacacctcgtcatccac

SEQ ID NO: 943225 - DNA, 120 bp, Artificial Sequence
  ENSG00000229719_7 (sequence is synthesized)
tatccctgtttgttttctctgttcctttctagttctctacctgctcctcttatttttatttgagacagggtctttctttgtcactgaggctggagtgcagtggcacaatcccagctcact

SEQ ID NO: 943226 - DNA, 76 bp, Artificial Sequence
  ENSG00000229719_8 (sequence is synthesized)
tcactgaggctggagtgcagtggcacaatcccagctcactggagcctcgacctcccaggctcaagtgatcccccca

SEQ ID NO: 943227 - DNA, 86 bp, Artificial Sequence
  ENSG00000229719_9 (sequence is synthesized)
gccaggtgtgcaccgccatcctcggccttactcttctcttcctctctcagcccctctgcctcactatccctctttctgtgccctcc

SEQ ID NO: 943228 - DNA, 120 bp, Artificial Sequence
  ENSG00000229719_10 (sequence is synthesized)
tcagcccctctgcctcactatccctctttctgtgccctcccccacacagccccccacacttcttcttagtctcatcttcagcttcccatacgaggccatcctcatgaaatcaggcactgg

SEQ ID NO: 943229 - DNA, 120 bp, Artificial Sequence
  ENSG00000229719_11 (sequence is synthesized)
gaggtccctggggactgacaagtgccagctgtcccttgctgtctctctgccccatggctgcagcagggagggtgggcaaagggcagaggtgacagtggccaaacctgaaactgaggccca

SEQ ID NO: 943230 - DNA, 120 bp, Artificial Sequence
  ENSG00000229719_12 (sequence is synthesized)
gctctggttgggaaagaaacaaggaaacaaaataacttggggacagagggcgtggggtcatcagagcgggcaaaggctgcccaggagttgtaaatccgagccgctcccggctttatgagg

SEQ ID NO: 943231 - DNA, 120 bp, Artificial Sequence
  ENSG00000229719_13 (sequence is synthesized)
ccgatttggggttgagcctggactttgcccaggaaggagtgctggcagcacacggggcgccaggtgtgggccccggatgataagaagcctcggtgaaaagaccatggacctggggccacg

SEQ ID NO: 943232 - DNA, 120 bp, Artificial Sequence
  ENSG00000229719_14 (sequence is synthesized)
aagactggggagcccaggtgagtgggcatgggacactctccagagccctgccgaaggcggacgccaggcagggccccggtctccaattggttcccgccccctgtaacagcaactccatgt

SEQ ID NO: 943233 - DNA, 120 bp, Artificial Sequence
  ENSG00000229719_15 (sequence is synthesized)
gccagtacccacgaagaaggagaggcaggtgctggccagcagaccagccaggactaccgtggcgacgctcccaggccagatggtggcgggtagtggagggctgtcggtgggctgccgaga

SEQ ID NO: 943234 - DNA, 120 bp, Artificial Sequence
  ENSG00000229719_16 (sequence is synthesized)
ccgagtgcacagggctctgacctatgaattgacagccagtgctctcgtctcccctctggctgccaattccataggtcacaggtatgttcgcctcaatgccagccaccaggacctgcaggg

SEQ ID NO: 943235 - DNA, 120 bp, Artificial Sequence
  ENSG00000229719_17 (sequence is synthesized)
ataggggagggccgggggtgtccagcagtcagcagagatcctgcgaccccagtgcagcactcatggtcccacctccctctgtctcattccccgtgaatgagcctgaacagcttcagtcct

SEQ ID NO: 943236 - DNA, 120 bp, Artificial Sequence
  ENSG00000229719_18 (sequence is synthesized)
gcccctgccctgcctgccctgtggcacctctatgctttgcccatgctgttcccttgggctgcaatactcttcctagcttatttgccaggctcactcttactaaccctttcaagctctgtc

SEQ ID NO: 943237 - DNA, 120 bp, Artificial Sequence
  ENSG00000229719_19 (sequence is synthesized)
caagcatttgctgcctccagaaggccttattgaagcttctaagtccccacctgggcacccccacacagtgctgccgcagagcactgccctctcggagccccggtgctggtttctgcttat

SEQ ID NO: 943238 - DNA, 120 bp, Artificial Sequence
  ENSG00000229719_20 (sequence is synthesized)
gtctcgctcctctccccatctgtgagctcagttcccagcccaggcgcgtgcccaataaatgtttgctgaaccaatcctgagcctctgtcttgcaccctgaggaagcacccaccgacatgc

SEQ ID NO: 943239 - DNA, 120 bp, Artificial Sequence
  ENSG00000229719_21 (sequence is synthesized)
agtgtggccaaggggggctgagtgctctaggcccagtgtttgtgctggagcccccccacccaggatggggccctgagccagcctccccatctgcttcctactctcccctcctttgccagt

SEQ ID NO: 943240 - DNA, 120 bp, Artificial Sequence
  ENSG00000229719_22 (sequence is synthesized)
ctcatctccctggagcacagccctgtggttggtggagcagcttctccagcccctaggattcctaagagggcccaggaccccagctgctggtagaggaagagcagccaacccaggacagga

SEQ ID NO: 943241 - DNA, 120 bp, Artificial Sequence
  ENSG00000229719_23 (sequence is synthesized)
ggtagaggaagagcagccaacccaggacaggacagctgaccccacccctgtcccgcctcccacaacagcctcatttccacctatttctttgtggtgtttgtttgtttgttttgagacaga

SEQ ID NO: 943242 - DNA, 88 bp, Artificial Sequence
  ENSG00000229719_24 (sequence is synthesized)
aatctgcccacctcggcctcccagagtgccccacctgtttcttatacaacggggttctgaggaaattttccttttttttttttttttt

SEQ ID NO: 943243 - DNA, 120 bp, Artificial Sequence
  ENSG00000229719_25 (sequence is synthesized)
cacccaggctggagcgcagtggtacaatcacagcttgctgcagcctccacctgccagggctcacacagtcctcccatctcagcctcccaaatagctgtgactacaggcacgtgccaccat

SEQ ID NO: 943244 - DNA, 120 bp, Artificial Sequence
  ENSG00000229719_26 (sequence is synthesized)
atgagccactgtgccctgtcagaatttttcatttgaataaaaaggtttctggtactacaaaataaaatttgtaaaatgggaaatagagacctaggaataaatgtcaaattgcttaataac

SEQ ID NO: 943245 - DNA, 120 bp, Artificial Sequence
  ENSG00000233330_0 (sequence is synthesized)
tgctctgtcgcccaggctggagtgcaactccatctcaaaaaagtatcacatagagatgagttatatgtactcgttcacattgtaaaatattaatatgtcaatatgagtgatggttaaaaa

SEQ ID NO: 943246 - DNA, 120 bp, Artificial Sequence
  ENSG00000233330_1 (sequence is synthesized)
atcaatggactcattcaatttgagccatggtttcagccagtgtaaatgaaagtatacctactcctgcatctcagccattcttacctgggcaaaggttttatatcagtgtaaccaaaacag

SEQ ID NO: 943247 - DNA, 120 bp, Artificial Sequence
  ENSG00000286817_0 (sequence is synthesized)
agaatcgctcagctggttgacgttatccaggagaatcgcgttggactcagggaagacctgcacaggatccggttgttgctgggtccgagggctgtagggagtggagaaagggccgggaat

SEQ ID NO: 943248 - DNA, 120 bp, Artificial Sequence
  ENSG00000286817_1 (sequence is synthesized)
cgttaagcggggtctgggagaacgacttgcagattcacatttcctccgcccgcggatgtcctccggggaattgaggcttccttcctcagctgcccttgtttctctctttgctcccgctgc

SEQ ID NO: 943249 - DNA, 120 bp, Artificial Sequence
  ENSG00000286817_2 (sequence is synthesized)
cccttgttctatttcgtttcttactatttatgtagtctcattgcttgcggttataatggccaccactttattgagcattcactgtacaagcatctcgcagcaggcgctcataagcgtctg

SEQ ID NO: 943250 - DNA, 120 bp, Artificial Sequence
  ENSG00000286817_3 (sequence is synthesized)
gcaattcttggccactgctggaagcccaatcattcttttaccatggaagggatttgagagcctacataatcctgtactctaatagccacatggtactcttggggctaggaagataaagta

SEQ ID NO: 943251 - DNA, 120 bp, Artificial Sequence
  ENSG00000286817_4 (sequence is synthesized)
gaaattgaaattgctgttgtattagttttctgaagctgccataaccaagtacctcacactggatagcttaaaacaacagatatattttctcgctttctggagtctggaagtcagaaatca

SEQ ID NO: 943252 - DNA, 120 bp, Artificial Sequence
  ENSG00000286817_5 (sequence is synthesized)
gtcagtggggtcttgcttcttctgagactctggatagaatccttcctgcctcttcctagcttctagtgggagccagcaatcattggtgtactttcgcttgtagctgcattactccattct

SEQ ID NO: 943253 - DNA, 120 bp, Artificial Sequence
  ENSG00000286817_6 (sequence is synthesized)
cttcctctgttatcaaatggtatactccctgtgtgtctctgtctctgtgtgttttataaggacaccagtcctgttaggtaaaaggctcaccttactccagtatgacctgatcatgactaa

SEQ ID NO: 943254 - DNA, 120 bp, Artificial Sequence
  ENSG00000286817_7 (sequence is synthesized)
tcacatctgcaatgacactctttccaaataaggtcacattttgaggttccaggaaggacatgaattttgggggcgacactaaccaacccagtacagctgttaaagttctcaagaagtaga

SEQ ID NO: 943255 - DNA, 120 bp, Artificial Sequence
  ENSG00000286817_8 (sequence is synthesized)
caaacgaagagttgacaaataaatgtagtacaagtggattcaaatttagttcagttttatctgagtgttcatagacattcggagtatccctttaaaggatgggtaggggccgggcgtggt

SEQ ID NO: 943256 - DNA, 84 bp, Artificial Sequence
  ENSG00000286817_9 (sequence is synthesized)
ggagtatccctttaaaggatgggtagcccttgggaggccgaggtgggcggatcagctgaggtcaggagtttgagcccagcctgg

SEQ ID NO: 943257 - DNA, 120 bp, Artificial Sequence
  ENSG00000269688_0 (sequence is synthesized)
aggcagttaaaggaccaggcatatcgtgtggacgtgcagatcttaggggagagagcagtgtgttgggagatacaaaggaatttatttttctttttgttttctttctgttatttacttatt

SEQ ID NO: 943258 - DNA, 68 bp, Artificial Sequence
  ENSG00000269688_1 (sequence is synthesized)
tttttctttttgttttctttctgttatttacttatttatttattgagatggagtttagcccttgttgc

SEQ ID NO: 943259 - DNA, 90 bp, Artificial Sequence
  ENSG00000269688_2 (sequence is synthesized)
caattctcctgcctcagccttcctagtaggattataggcgcctgctaattttttttatttttagtagagatctggagttctgtcgctaat

SEQ ID NO: 943260 - DNA, 120 bp, Artificial Sequence
  ENSG00000251311_0 (sequence is synthesized)
cctgaactctacaggctcctaaataaagaacctaaaattctgaataaaagaagtagagttggagcccagagacagagtgagctcagaacgcaagcttgacagcaagacaaacaaattcct

SEQ ID NO: 943261 - DNA, 120 bp, Artificial Sequence
  ENSG00000251311_1 (sequence is synthesized)
caaatgagactgccagccagtatttgggctataaagcatggccaatttgctttctcaggatggagaatataatccccagaagcattatcgagggcacttttgagtgcctgattccatgtc

SEQ ID NO: 943262 - DNA, 120 bp, Artificial Sequence
  ENSG00000251311_2 (sequence is synthesized)
gcccttatagttcataattctatagtttggcaattagagctgcccatagctgggtggtccctctggtctggggcaggcttggttgatcttgactgaagcttattcatctgaatttatcaa

SEQ ID NO: 943263 - DNA, 120 bp, Artificial Sequence
  ENSG00000286199_0 (sequence is synthesized)
ggcggctggaatgtgagcttgatttctggctgggaaaacggagcccaacttctaacaacaacccaggcctcggcaactcctttccctttgttcacctggcaaggatactggacacagagc

SEQ ID NO: 943264 - DNA, 120 bp, Artificial Sequence
  ENSG00000286199_1 (sequence is synthesized)
ccttgggtcttgctgcaagtctcatctactgcagtttgcaggatgaacataaagtgagagctgccccaaagggctgaatgtcacggtacaggagacgagatttatagagtgttttccaac

SEQ ID NO: 943265 - DNA, 120 bp, Artificial Sequence
  ENSG00000286199_2 (sequence is synthesized)
atgtatgagatggcgagcaaacactgaacacagagccagcactggattatggatgttgtggaaagccacctaaagcacaggggtgagagaaacaccctgaagatggtgaagcaacaagat

SEQ ID NO: 943266 - DNA, 120 bp, Artificial Sequence
  ENSG00000286199_3 (sequence is synthesized)
aagagcctgcatccctcaaattttaggattgccatatcagtcctgaactgcttacacccacactgttaagtgatcatgaaataaacacccatcttgcttggtgaaggcattcttacctgg

SEQ ID NO: 943267 - DNA, 120 bp, Artificial Sequence
  ENSG00000286199_4 (sequence is synthesized)
tgtttgtgctacaggggttgaacctaccccgacctaacaggcagagctcaaaatggacccaggtggtgtgatcccagagcccatttacttagctccttcaccaccctgcctcccaggcac

SEQ ID NO: 943268 - DNA, 120 bp, Artificial Sequence
  ENSG00000236403_0 (sequence is synthesized)
atcttgtggtttaaaccaaagctgccttttggaaactcccgctgattctccagcctcatggagggtggcaggttcctcttttaagtgttccaggctaggagttgcgtggttaacgctggg

SEQ ID NO: 943269 - DNA, 120 bp, Artificial Sequence
  ENSG00000236403_1 (sequence is synthesized)
gtaatacacactctgtatttgctaccacagccccccacccctagaagtctcccaagaggaaatcggtggtgtggtcatgcacagctcctgtgctcctgatggagactgttgtggatccag

SEQ ID NO: 943270 - DNA, 120 bp, Artificial Sequence
  ENSG00000236403_2 (sequence is synthesized)
gaacgtcagacaagcagaatgaggatggccccaggcaaggtggaccccaccccagctgcagggaacagcaaggctgcaggtacctgctcatttccagctcccagcctccctcagaacaca

SEQ ID NO: 943271 - DNA, 120 bp, Artificial Sequence
  ENSG00000236403_3 (sequence is synthesized)
gactgccttgccattttcttagcgagcggtttgcagcaaagtgctattttgctctcgaacgccttcctttccaattgggacaaacggctatgaatacggcacaccctgttttgcattcaa

SEQ ID NO: 943272 - DNA, 120 bp, Artificial Sequence
  ENSG00000236403_4 (sequence is synthesized)
actgttgggaaagttttgcggctgtaaatatcatgctcttggtgctcaagacagaattattattactttttccttagttcttggaaccagtgataaattaaacatttcttttgccccccc

SEQ ID NO: 943273 - DNA, 120 bp, Artificial Sequence
  ENSG00000236403_5 (sequence is synthesized)
gggaacaatgggtgaagacaatgaccagggtgcaggcaggctgaccatcccatcggtttgcctggaactgtcctagtattagcaatgacagtcccatgtccccagggcaaaccagggtgg

SEQ ID NO: 943274 - DNA, 120 bp, Artificial Sequence
  ENSG00000236403_6 (sequence is synthesized)
ttggtcactgaagttcaagtccctctagacatttccaaacctaattaacaagttggggaagcgagctgtaacccgtttctctagctctttatttgtgtgatttggccagaaattgcttca

SEQ ID NO: 943275 - DNA, 120 bp, Artificial Sequence
  ENSG00000236403_7 (sequence is synthesized)
atgatggcccaaacaggcacggaggagggtgattggtccctgagaatgtggatgcctggagcagttcacggtactgtctctgcctcgttctgagcctgcactggggccttgggtccctgc

SEQ ID NO: 943276 - DNA, 120 bp, Artificial Sequence
  ENSG00000236403_8 (sequence is synthesized)
agagctggtggcccacagctggtagcactgtccaggtgcaggtttcaatcatcttccagaactgggatgaccaggacatttgggcgtgaaaggggccctacaagccttaacagatactaa

SEQ ID NO: 943277 - DNA, 120 bp, Artificial Sequence
  ENSG00000265194_0 (sequence is synthesized)
gagatgtttgttaaaaaaaaaaacagattttgattttctagatcaaagtgaggacgcaggaaacatacactttaaataaattctacagaaaattttcaagttcactaaccagatgtggaa

SEQ ID NO: 943278 - DNA, 120 bp, Artificial Sequence
  ENSG00000265194_1 (sequence is synthesized)
cttcgggtactctaaactcttggttcctcacctccctttcctgtaaagtgaggttaataatgcttatctcagagcattgttctgataatcacttattgccataccagcccccagcctgga

SEQ ID NO: 943279 - DNA, 120 bp, Artificial Sequence
  ENSG00000265194_2 (sequence is synthesized)
ttattgtttatgcaacctctatcccttatccttaccccactgtaagaaatcattgaaatttttatgtgtctatatctccaaacaccataggatcatcatcacaactctttatctttgcaa

SEQ ID NO: 943280 - DNA, 120 bp, Artificial Sequence
  ENSG00000265194_3 (sequence is synthesized)
accagaccttgacgtatagcaggtgctaagtgtttctgaaatgacttagtgagggaatgaatgatacacatttcagtgctaacaatactaccccagaaaaagggattattagtatggtgt

SEQ ID NO: 943281 - DNA, 120 bp, Artificial Sequence
  ENSG00000265194_4 (sequence is synthesized)
tccttaatgctgtagcatgaagaccaagattctcagttttgtctagagcaggaattcctcattttctctctttaggttttatatgtgtgtgtgtgtatatgtatgtatgtgtgtatatat

SEQ ID NO: 943282 - DNA, 120 bp, Artificial Sequence
  ENSG00000265194_5 (sequence is synthesized)
atacacatatatataaaatcctcctttgaaaatccgatgaaagctacgtaaactaagcctctttaaaaatgcatacaaataaaatcacacaattttacaatttcagaagctccaggaaag

SEQ ID NO: 943283 - DNA, 120 bp, Artificial Sequence
  ENSG00000265194_6 (sequence is synthesized)
gagaacactgatttctactcttcaagcatttttacttaaaaataaagctaaaacagtaaatatattatttgagaaattaacttcaagcttttgaaagactatggtcaaagtggggttagt

SEQ ID NO: 943284 - DNA, 60 bp, Artificial Sequence
  ENSG00000265194_7 (sequence is synthesized)
cttcaagcttttgaaagactatggtcaaagtggggttagttgggagacttaaaaaaaata

SEQ ID NO: 943285 - DNA, 80 bp, Artificial Sequence
  ENSG00000265194_8 (sequence is synthesized)
ggagttcaagaccagcctgaccgacatgatgaaaccatgttggtcatctactaggtttaccatgcctgtaatcccagcta

SEQ ID NO: 943286 - DNA, 71 bp, Artificial Sequence
  ENSG00000265194_9 (sequence is synthesized)
caaacaaacaaataaacaaacaaacttctatgacattttgctaacaatagtacaagtaggagtcacatttc

SEQ ID NO: 943287 - DNA, 120 bp, Artificial Sequence
  ENSG00000265194_10 (sequence is synthesized)
gacattttgctaacaatagtacaagtaggagtcacatttctggcaaaccaacatgcgtttttttatgcaagctccagttgtgccatttgactgcactcaaatgtattttttcccttttaa

SEQ ID NO: 943288 - DNA, 120 bp, Artificial Sequence
  ENSG00000265194_11 (sequence is synthesized)
ttctaataataagggtttcctgcatctctatatattatgataaaacacttcatgggggaaaggagtatcatttattcattaaataacatttaggtcctaggtatacagtgttgaaaccaa

SEQ ID NO: 943289 - DNA, 120 bp, Artificial Sequence
  ENSG00000265194_12 (sequence is synthesized)
agggaagataagctacaaattccaacattcttgaccgtcagtcctaactgctgagagacaccttagttacagtggtgtgctggattctgttcgtaccagcttgcaagagctgtgtgtatc

SEQ ID NO: 943290 - DNA, 120 bp, Artificial Sequence
  ENSG00000265194_13 (sequence is synthesized)
acttctcaactcatcagtggcttcacattagtagtgtgaaactggccgtactggagcacttgtaccacgtaaattagcaaacattacaaatcaaggctctgccatgcccagtgattggca

SEQ ID NO: 943291 - DNA, 120 bp, Artificial Sequence
  ENSG00000265194_14 (sequence is synthesized)
gtcacttaccaccatacaatgtcctcattatactaaaactgtggctctctcattacagagctcctaggtggtaattcaggtaaggagggcttagatcaacctttcaaatcctctctccac

SEQ ID NO: 943292 - DNA, 120 bp, Artificial Sequence
  ENSG00000265194_15 (sequence is synthesized)
caccaccagaagacccaaaagtacaggtgtattctaggagactttggggtatggtcctctttggatagtaggagaatgcaatatctgatcagtttgagacaagtctttccctatgtggtt

SEQ ID NO: 943293 - DNA, 120 bp, Artificial Sequence
  ENSG00000265194_16 (sequence is synthesized)
aagaagagtcacaaagtgcccaaagaaaaatcatgcaactccgagtttatcagttagtttaaattatattctgagaatactagagttggtttatcattaattactgtttagtttgatgca

SEQ ID NO: 943294 - DNA, 120 bp, Artificial Sequence
  ENSG00000265194_17 (sequence is synthesized)
tgattaaccttaagcagatattttctggcaccattttggtactattgtcagagttttggctttaaaggattgccacaaatttgaatggatctgccaaagagaaaatagctttgtcaacaa

SEQ ID NO: 943295 - DNA, 120 bp, Artificial Sequence
  ENSG00000265194_18 (sequence is synthesized)
tgtaagcgatatgcagagaaagcactatcaatcttctgaagtaagacttagggatactacagagcagggcaatgtgaagaatctggtacacgagataataaaactctctcaaccctagcc

SEQ ID NO: 943296 - DNA, 120 bp, Artificial Sequence
  ENSG00000265194_19 (sequence is synthesized)
ttcagtggtcttgcactaccagccagaaaataagactactcagtttcacaagtggttggtatggtagtagtagatgtcacaaaaacttgttgaaaacatctaggctggcataaaatacat

SEQ ID NO: 943297 - DNA, 120 bp, Artificial Sequence
  ENSG00000265194_20 (sequence is synthesized)
gaggaccaaaggtgaaatgcaagtaagaaaagaagacaatagagagtctacagacatgcctgattgtccatggctgacacttaccttcaggttatggagggtttctgaccattctgtgga

SEQ ID NO: 943298 - DNA, 120 bp, Artificial Sequence
  ENSG00000265194_21 (sequence is synthesized)
ccctatctgaggtatggtagtgagcagtaagcttttggctttattagcgttttctttcagggtctttaagacccggtccaccgaaacctagagaaacaatagcactggaggttactagaa

SEQ ID NO: 943299 - DNA, 120 bp, Artificial Sequence
  ENSG00000265194_22 (sequence is synthesized)
cttaaaattccactgcttgtcataaaacatttttctgagctccagccttgctacagcctaaatgtttgtgtcccctcaaatttatctgctgaaaccgaatcctcaatgtagggtatttgg

SEQ ID NO: 943300 - DNA, 120 bp, Artificial Sequence
  ENSG00000265194_23 (sequence is synthesized)
aggttgggcatttgggaggcaattaggtcatgaaggcagagtcctcgtggataggattagtgatcttacaaaagaggccccagtgctattcttcgagggccccttccaccgtgtgaggtt

SEQ ID NO: 943301 - DNA, 120 bp, Artificial Sequence
  ENSG00000265194_24 (sequence is synthesized)
ccagtgagaagatggctgtctaccagaaagtgggctctcactagacaccaaatgtgccagtcccttgatcttggacttctcaacttacagaaatgtgaaaaataaacttgttattcagaa

SEQ ID NO: 943302 - DNA, 120 bp, Artificial Sequence
  ENSG00000244332_0 (sequence is synthesized)
gaaataggaaagtatttaatggtttcaacataaaatcaaaacacataagtcataaatagaataattatgacttgcataattatgaccagtattgtcaggttttatgtgtctgctggtaaa

SEQ ID NO: 943303 - DNA, 120 bp, Artificial Sequence
  ENSG00000244332_1 (sequence is synthesized)
actttggaatatgatttgcagaaatctcagttcaggagtttagcaaagtttatgaatgtgtacagcattaaaaagtatttaaaccaggctagcctcgaactcctgaactcaggtgatctg

SEQ ID NO: 943304 - DNA, 120 bp, Artificial Sequence
  ENSG00000244332_2 (sequence is synthesized)
ctgcacctggccgataacagatgttttaatagtaagataaaaagtaaaatttccagtgtgtcgaaggaagaaaattacagcctagaattttatcttcatgtacattatttaagtgtgagg

SEQ ID NO: 943305 - DNA, 120 bp, Artificial Sequence
  ENSG00000244332_3 (sequence is synthesized)
gaatagtttcagtgacattatgtcattgaagaccttagaagatttccctcgctaaaggagataaagcgactggcacaacatgtatttctctgagtaattagaagtgttcttttctggctg

SEQ ID NO: 943306 - DNA, 120 bp, Artificial Sequence
  ENSG00000244332_4 (sequence is synthesized)
tactgaagggactttcatgatttcttcgtttttgtactcttagttttataatattgcatagtagctaaggcctggctgtagcagttataaactgttctgcaagtgcgggaagtaatagtt

SEQ ID NO: 943307 - DNA, 120 bp, Artificial Sequence
  ENSG00000244337_0 (sequence is synthesized)
gaggcaacacacttaataggaaagcatgactttattttggcatgattcatcttcaaatcaggtattcacctggtatctaagctagtgagtgtaataagaataaatacaagcttgaggcaa

SEQ ID NO: 943308 - DNA, 120 bp, Artificial Sequence
  ENSG00000244337_1 (sequence is synthesized)
taaacgaactctgggaaactataaatgctggcacgcctttacttcttatgaaagccaaccacctgaatgattaactaaaccacctcaaagcaagaagagaaatatttattggaatttcag

SEQ ID NO: 943309 - DNA, 120 bp, Artificial Sequence
  ENSG00000244337_2 (sequence is synthesized)
aaataaccacttcagatatgttacagaaattaaatctccagtaaccagtgacttcataatgccaaagtttgtgaagagtgaaattattttcttctgttagtgtatgttttaataaataaa

SEQ ID NO: 943310 - DNA, 120 bp, Artificial Sequence
  ENSG00000244337_3 (sequence is synthesized)
tgatttttcttttcatttggcaaggcaggtgaaagaagcataaaatgcaacttaggaaaatagagccaaatgaaatttacataaatgaacaaaaaagcctccactgttgaccaatatttg

SEQ ID NO: 943311 - DNA, 120 bp, Artificial Sequence
  ENSG00000131548_0 (sequence is synthesized)
gatcatgagactatcctgtgtatcccacaaagaagacaggcaagattccttggctgatgcacctccacagaggtctccttctcagccaagcctcagggaattgtggcattcatgctgtac

SEQ ID NO: 943312 - DNA, 120 bp, Artificial Sequence
  ENSG00000131548_1 (sequence is synthesized)
ccgtgatctgttcccactggaggaggagatgtctagactgtgatggggtctctgagaactgctcttctgactttattcctgaaagaggctgtgtgcaagaattgagtcccagggggactg

SEQ ID NO: 943313 - DNA, 120 bp, Artificial Sequence
  ENSG00000131548_2 (sequence is synthesized)
ggtgaatgtgtgggaccgcatccacccctcaccagcttgtatcctcacctttatctgatgttatggctgctcaaagtatctgtcccaaaatgaaattccaagacaatgaaggagtgacgt

SEQ ID NO: 943314 - DNA, 120 bp, Artificial Sequence
  ENSG00000131548_3 (sequence is synthesized)
gaaggtcctgctcagctaggaactgaatatgaagtaaattcaaggggccctgaggactggactgctagtgtttctccatgggatgtacactggagaataaagcagtgaaatatttctgtt

SEQ ID NO: 943315 - DNA, 120 bp, Artificial Sequence
  ENSG00000227386_0 (sequence is synthesized)
ggaatctcccaggctgagaagtctacacaatattcaggctctgccctgccctgcgcagagcaggaagagtgcagggaggattcgtgagatgccagttctgataactttcagatgtggagg

SEQ ID NO: 943316 - DNA, 120 bp, Artificial Sequence
  ENSG00000260657_0 (sequence is synthesized)
agaactcacaaaggtttttaggtacaaagaccttcctcatggctttatctgagtggtggggaagtgagggcaacttaggtattcattatcacagatggagaagaaccatacgatggatgc

SEQ ID NO: 943317 - DNA, 120 bp, Artificial Sequence
  ENSG00000260657_1 (sequence is synthesized)
tcactctgggaagattggttagtggctcaccaagtctatctccttttcttccaagacacacaaatagactacattttccagtcttcattgcagttaggcacaaccatttgactgaggtct

SEQ ID NO: 943318 - DNA, 120 bp, Artificial Sequence
  ENSG00000260657_2 (sequence is synthesized)
tgatgttgctattccaggcccatgaaaacctctcacacaagatatttatgcctttcaccttctgccaatgcaatgcaggtggatgcgaccatcttggaagccatgttaaagaaggcagag

SEQ ID NO: 943319 - DNA, 120 bp, Artificial Sequence
  ENSG00000260657_3 (sequence is synthesized)
ccacaagatagatgcagccgggttctctaaatcaccactggggagaaacccacacaccaatgaggaatacccattttttggattttaagagcaagaaataaacttcaattgtgttcagca

SEQ ID NO: 943320 - DNA, 120 bp, Artificial Sequence
  ENSG00000260657_4 (sequence is synthesized)
ctcctgacccggcccacccggcctaaggcctaacactgcctcctcctgcgctttccgcccttcgccgtccctgactggaggaaacctgcaggctctcgtccgccgagctcagaagtgcca

SEQ ID NO: 943321 - DNA, 120 bp, Artificial Sequence
  ENSG00000260657_5 (sequence is synthesized)
tagtggcctatgagcagaatttgccatgccttccatggagcattctttttccaagtcaggtcaatccagcctgcagctgtggatgcgaccatcttggaagccatgttaaagaaggcagag

SEQ ID NO: 943322 - DNA, 120 bp, Artificial Sequence
  ENSG00000260653_0 (sequence is synthesized)
gggcgagacggaggggcggtgccgaggggagaggcagcgcagagggaaggagcggggcgaggagaaggggcggggcgagtactgctccaagatatggcaaccgtgacagctttgcgagta

SEQ ID NO: 943323 - DNA, 120 bp, Artificial Sequence
  ENSG00000260653_1 (sequence is synthesized)
gctccaggtcccctgctgctccgtgagaaatcaaacttctggcaatgacgaagcatgaagccagcatctcagggagagggaaattaatgttatgactggataagacaattgtgaagaaac

SEQ ID NO: 943324 - DNA, 120 bp, Artificial Sequence
  ENSG00000260653_2 (sequence is synthesized)
tgcacttcgaggttgtctgtctccgtattccgatggaaaaggctggactttagaagcattgctcgctccttcagtttctaacaagagttttacagtttctgattaaataccaatgggata

SEQ ID NO: 943325 - DNA, 120 bp, Artificial Sequence
  ENSG00000260653_3 (sequence is synthesized)
tcacctcccatctcttaggatggctgttataaaaaggacaagagataacaagtgttggtgatggtgtggagagaagggaacctttgtacactgctggttaaaatgtaagttagtacagcc

SEQ ID NO: 943326 - DNA, 120 bp, Artificial Sequence
  ENSG00000260653_4 (sequence is synthesized)
attatggaaaacagtatgaaagttcctgagaatctaaaaatagaactaccatatggctcagcaatccctcctatgaattatatatcaacaggaaatgaaatcagcatctgatagagatat

SEQ ID NO: 943327 - DNA, 120 bp, Artificial Sequence
  ENSG00000260653_5 (sequence is synthesized)
acagcattgctcccaacagccaagccatgggatgaagttactgtgcattgatggatgagtggagaaaagaaaatgtgggggaggtgtttgtgcatgtatgtgtgtgtgtgtataatatat

SEQ ID NO: 943328 - DNA, 120 bp, Artificial Sequence
  ENSG00000260653_6 (sequence is synthesized)
aataatataatatttttcagcttttaagaagttgaagatactgccatttgtgataacataaatgaatctggaggatattaagctaagtaaaataacttagggagagagaaaaatactgca

SEQ ID NO: 943329 - DNA, 120 bp, Artificial Sequence
  ENSG00000260653_7 (sequence is synthesized)
taatttctgttacatatgaaatctttaaaaaggtttaatacatagagacatgatagagtgatgatttgggggataagagacacaagtcaacgtttcagttatataaaataaatgaatcta

SEQ ID NO: 943330 - DNA, 120 bp, Artificial Sequence
  ENSG00000260653_8 (sequence is synthesized)
gaggactaaagtacaatttaaaggttatagttactatttttatattatatactagtgatttttgaacagggtaaactttaggtgctttgacaccaaaaggaaactacatgagttcatgta

SEQ ID NO: 943331 - DNA, 120 bp, Artificial Sequence
  ENSG00000260653_9 (sequence is synthesized)
tatgttaaattgtttgaccgcagtcatcattgatatgtatatgtatatatatataattatgggctcattaaatttaaatgctataaataggtaacaaagaataaagttaattgaaaaact

SEQ ID NO: 943332 - DNA, 120 bp, Artificial Sequence
  ENSG00000260653_10 (sequence is synthesized)
ggcggggcgcagttcttgcgggaggagcggggcggtgcgctcctggccacgcaggctggaaactgtagctcttaacggttccccgcccgttggtggcaaggcggctggactagaatccta

SEQ ID NO: 943333 - DNA, 120 bp, Artificial Sequence
  ENSG00000260653_11 (sequence is synthesized)
gcaggcgatatgcgagaaggcgggcagcccaagagggttgggcagggcagtgtggatctcgccgcttccacagcgatgctggctactgatttcggacacctccttgccatgggatggaaa

SEQ ID NO: 943334 - DNA, 120 bp, Artificial Sequence
  ENSG00000260653_12 (sequence is synthesized)
agccagttcttggagatactaggaagccaagagtttcctccaggaatggagattccttggaagtgaggttcaccttgagtcaagaaagacgaatcacacacggtcaaaggcaattgccca

SEQ ID NO: 943335 - DNA, 120 bp, Artificial Sequence
  ENSG00000260653_13 (sequence is synthesized)
gggtctcaagaacagagccagaaagaagagctggggccggcgggattgtgggggtcctctctcccacctgaaaagctacagctgcctgccgatcctctcaagaggagacctctctgggct

SEQ ID NO: 943336 - DNA, 120 bp, Artificial Sequence
  ENSG00000260653_14 (sequence is synthesized)
ccagcacctaaaacagacaaacctgggaggatgcttctctcttctgtgtcacacgtgtcctggagaaaacccatgtatctgaatgaccaaagaaaagtatgagaaaaagtgcaaaatctg

SEQ ID NO: 943337 - DNA, 120 bp, Artificial Sequence
  ENSG00000260653_15 (sequence is synthesized)
tgccaggccattcagtgtctggctggggctctggggtgcacatgcattccaagaagactgaagggtgccaagcctgcaggaaatgtccatcagacctgcctctcacacctggagtaggac

SEQ ID NO: 943338 - DNA, 120 bp, Artificial Sequence
  ENSG00000260653_16 (sequence is synthesized)
tgcccgtccagcttcatgatgcagaactgtctttaaaaggtgactgcagatatggagagagggaattctaaccctgatagaacatgaccagctgtcctgctggggaaagctgcatctacc

SEQ ID NO: 943339 - DNA, 120 bp, Artificial Sequence
  ENSG00000260653_17 (sequence is synthesized)
agtgacacgctgctcaaactggcccaggacacactcttactacttaaggaataagccccacatttgctctttgtgggtaaaaggagagggtgagagaggaggggagtgtccgcacagaca

SEQ ID NO: 943340 - DNA, 120 bp, Artificial Sequence
  ENSG00000260653_18 (sequence is synthesized)
tgagaagcctgcagatccagatgaccccttgctgatcagaatatgaaagatcgatatgcggaaacaatgaccccatagcagatgagcttctagagcaggcttcaaccatgggtcatctgg

SEQ ID NO: 943341 - DNA, 120 bp, Artificial Sequence
  ENSG00000260653_19 (sequence is synthesized)
acccactggtggagaagtctgcccccactctatgttgatggtctgggggataccattactgagacagatttaagaaataatctctacctgttggcgaaatctggatggtcacttgtgcga

SEQ ID NO: 943342 - DNA, 120 bp, Artificial Sequence
  ENSG00000260653_20 (sequence is synthesized)
gacagcagtgtgctctcatcagctttccacagggcaggctgcggaaatggtgctgagaagtccttttgtaaattgattgtccatggctgcagacttaccatcaaatggaagaagattcca

SEQ ID NO: 943343 - DNA, 120 bp, Artificial Sequence
  ENSG00000260653_21 (sequence is synthesized)
ctccccctgcagctctggtccccaccttggagcctccttccaaggagtgagactacctttctgactttttctgaccatagacaccttttctgactttttctgtccttggcacctgctgag

SEQ ID NO: 943344 - DNA, 120 bp, Artificial Sequence
  ENSG00000260653_22 (sequence is synthesized)
gacagcagacccagggacccgggctcctgggcccattcttgcccagcttcttcttgatcatgtgacttgaaggcattcttgtgcagtggaagcagggccccaggaccatctgatagattg

SEQ ID NO: 943345 - DNA, 120 bp, Artificial Sequence
  ENSG00000260653_23 (sequence is synthesized)
atggtctctggcctctgctccactgatggtcggatggtggccactcagggtgtgagagcctagccatcgctgcttccttgagttgaagaggttggaggctggtccacctgctcctatccc

SEQ ID NO: 943346 - DNA, 120 bp, Artificial Sequence
  ENSG00000260653_24 (sequence is synthesized)
acccttggcgatgtggatggttgctctttgagcctggtaacgtcactgccttggccctgccaggcatgcctgccttgtgggggccctgcgtacccacacactactttaaggggcttgctc

SEQ ID NO: 943347 - DNA, 120 bp, Artificial Sequence
  ENSG00000260653_25 (sequence is synthesized)
ttccttgggccaaattctagttttggccagtgccccaggaagttcagtcccctgttttgttatcttggctatttctggggcacccgtggttctcctgggtcccttttctcccagggcttg

SEQ ID NO: 943348 - DNA, 120 bp, Artificial Sequence
  ENSG00000260653_26 (sequence is synthesized)
ggctgggcttggcatctgtaggtctgggatgtttgccctgtgagggaggctctgtcacacaagtgggcaggcatggggacatgtgacaggctgctggctggctagggctctgaagatgcc

SEQ ID NO: 943349 - DNA, 120 bp, Artificial Sequence
  ENSG00000260653_27 (sequence is synthesized)
acaatccttctcctctacagcagcctctgagtccagcttccacattgacactgatttcaccgggcgcaggagctgcctggggttgtctgggtgctgtcttggctcctttaaggctgtgct

SEQ ID NO: 943350 - DNA, 120 bp, Artificial Sequence
  ENSG00000260653_28 (sequence is synthesized)
gctcagtggcccctgagaaaggtcaggtccaggtgccaccatgcaaggggagtgtctatggccctactgctgggatttcagtgggctgggcaaggcctggttgtgggggccctgatggtc

SEQ ID NO: 943351 - DNA, 120 bp, Artificial Sequence
  ENSG00000260653_29 (sequence is synthesized)
ttcagggccagggcctgtcctatggtcctgggggtgtccagggaagatgaaagaacaggggttcggcatccctgctcaaagctgcactgtggacaccatgagccccggatgtccaggtcc

SEQ ID NO: 943352 - DNA, 120 bp, Artificial Sequence
  ENSG00000260653_30 (sequence is synthesized)
atggggagtttgggagagaatttcaacacagaactcaccaaaaatcccatggtctatcctgagataggaacagactttccacatcttgagccgctgggcccccagagagtgacctgctgt

SEQ ID NO: 943353 - DNA, 120 bp, Artificial Sequence
  ENSG00000260653_31 (sequence is synthesized)
cgtgggctctatggaattctcatgctgctgggccttggcctcaggtcagcttctgggcttctggagctgggctggtgggccagggagggccagcccaccccccttgggaagggtctccat

SEQ ID NO: 943354 - DNA, 120 bp, Artificial Sequence
  ENSG00000260653_32 (sequence is synthesized)
gctgagggatgcccacagaggcctgggtgccagagacactcaccccaggaccagggccttcgtagagatctttgtatgtttagctgaatggaaagtgaacttggtccacttctcccccaa

SEQ ID NO: 943355 - DNA, 120 bp, Artificial Sequence
  ENSG00000260653_33 (sequence is synthesized)
tgattcctgaatgcggattactattttaaaaaagcctaaaaactctggtcatggatattagacactgttattgtactttgtgaagaatttactccttcaggatcaattacacacgggctc

SEQ ID NO: 943356 - DNA, 120 bp, Artificial Sequence
  ENSG00000260653_34 (sequence is synthesized)
atcagcacctttgtcaataaaggaacaagaaccatgtggcatctatggatgtggtgagaaaactgacacttggagaggtagagtagctttatttacttcacacaagcttttgatgaattt

SEQ ID NO: 943357 - DNA, 120 bp, Artificial Sequence
  ENSG00000260653_35 (sequence is synthesized)
caagtctcaacctagaagtcttcctctaaggttcgtgctttcacgcacctgtaattcaaatactgatgaaaacaaaactattgccctcctaccaaatgggaaattaatgttatgactgga

SEQ ID NO: 943358 - DNA, 120 bp, Artificial Sequence
  ENSG00000260653_36 (sequence is synthesized)
cctaaggattctggaagcttccagcctttggctccacgtttcctcaggagaggttcagtctgcctaggactgggcctcccttcccctgaataaagagtgagcaagagctcaggttgtgaa

SEQ ID NO: 943359 - DNA, 120 bp, Artificial Sequence
  ENSG00000260653_37 (sequence is synthesized)
acaagccgcctggtctcgctgtcacttggcaggcaagagaggtgagaaaactgacacttggagaggtagagtagctttatttacttcacacaagcttttgatgaatttcaagtctcaacc

SEQ ID NO: 943360 - DNA, 120 bp, Artificial Sequence
  ENSG00000260650_0 (sequence is synthesized)
actagatgactgctttgggctgaacatccttctgatccaaacatcctttatagggatattcactggagacctaacgctgctttagaagtgatttttaaaaaaaattcccattttgtttta

SEQ ID NO: 943361 - DNA, 120 bp, Artificial Sequence
  ENSG00000260650_1 (sequence is synthesized)
ttttattgacttatgggagagtaattttcttctttgaattttgggaatggggtccttctggggtgatctcctgtcaagtgtgagctggcacaggagttcggaggaacagctggttgctac

SEQ ID NO: 943362 - DNA, 120 bp, Artificial Sequence
  ENSG00000260650_2 (sequence is synthesized)
attctggatgcaggcactccccatcaccccttacttacagaaatgggccacaggatgaagggtatgtatctatgaatggcaaagctgtacagtaagatgaagaagctgaagaaggatatc

SEQ ID NO: 943363 - DNA, 120 bp, Artificial Sequence
  ENSG00000260650_3 (sequence is synthesized)
tccatggtgatgataagcctcaagatggggtgcacggtgagtgaggacaacagtatcattgcagctattaggcagccctgcagtgagacatagacacctgagccagcagcaagggccttt

SEQ ID NO: 943364 - DNA, 120 bp, Artificial Sequence
  ENSG00000260659_0 (sequence is synthesized)
cctgccgggttgtgatgagatgctgattgcctagccacattcctcaagtcatggacatctggagaacgagaggtctttcatgtcttcaacgtgaatgagtgtagctgacagcttccccac

SEQ ID NO: 943365 - DNA, 120 bp, Artificial Sequence
  ENSG00000260659_1 (sequence is synthesized)
gtgatggttaaggcatgaggaattcttaaaagattttccacagtccttacatacaaaaacctgctcttcagtctgctgtagtcaagagatctgtcccgagtgcatgcttgctgggaaaca

SEQ ID NO: 943366 - DNA, 120 bp, Artificial Sequence
  ENSG00000260659_2 (sequence is synthesized)
acatttggagtagagctgaaggcttttccacactgacccaacacggaaaactgctctccaattttgaacaaggttttctggcatggaataaaaaagtccctttcataatgattagacaca

SEQ ID NO: 943367 - DNA, 120 bp, Artificial Sequence
  ENSG00000260658_0 (sequence is synthesized)
agacatctgggctgctagctgcatgaaggagctacccgctgtgggtctcctctttgctgacagctggacacttgacagaatgacctgcctgaactcgggacctgcagaatgatgggactg

SEQ ID NO: 943368 - DNA, 120 bp, Artificial Sequence
  ENSG00000260658_1 (sequence is synthesized)
aagaagctgtaacacaaacagggctaaaacacgcactctcctccccctgctccccaccgccccacccacttgccacattggaggtgatgagaaggagagaagagctgtggcctttcaggg

SEQ ID NO: 943369 - DNA, 120 bp, Artificial Sequence
  ENSG00000260658_2 (sequence is synthesized)
gagtgccaccgcattccccgcgtccggatgcaggtcaatgcacagaaagaaatctctctcctgactttagtacaatggcacgattggtggccacagtccaaggatggttgctggggcacc

SEQ ID NO: 943370 - DNA, 120 bp, Artificial Sequence
  ENSG00000260658_3 (sequence is synthesized)
aagagatttctgacaaagggcattaaaactgagaaagtttgggaacctctgaatgctgtagaataatggcctccagctccacccaagttgctgcaagagactttatttcattttttttaa

SEQ ID NO: 943371 - DNA, 120 bp, Artificial Sequence
  ENSG00000260658_4 (sequence is synthesized)
cctggcatctccaaacttctgagtgccaccgcattccccgcgtccggatgcagaaattgccacaaccatctccagctttagcaatgaccatcctgatcagacagtggccatccacagtga

SEQ ID NO: 943372 - DNA, 120 bp, Artificial Sequence
  ENSG00000260658_5 (sequence is synthesized)
ggcaagaccctctaccagcaaaatgaatgcaacatgctaaaggctcaggtcaatgcacagaaagaaatctctctcctgactttagtacaatggcacgattggtggccacagtccaaggat

SEQ ID NO: 943373 - DNA, 120 bp, Artificial Sequence
  ENSG00000260658_6 (sequence is synthesized)
tcttctcacatcctgatatccttccttcggacatgctctgtttgcactaagataattgagtaacacggaatatatatgtgatttacaaagtataaacaacagaaattatgactgtgactt

SEQ ID NO: 943374 - DNA, 120 bp, Artificial Sequence
  ENSG00000260658_7 (sequence is synthesized)
ttgttatttatagagtgtataggtctgattttgtgacttcagaaatacaaattgtgatgactgtcagggtataatcttggcattctattaaatgactattacttgaatttagaaatgaat

SEQ ID NO: 943375 - DNA, 120 bp, Artificial Sequence
  ENSG00000260658_8 (sequence is synthesized)
ttcagtgtactaaagaaaagttgggggaagggttttatattataacatgtcttgaaaaaacacttctccctcatttgctaattgataaaaacatttttaaaaacagtgatcacaagttca

SEQ ID NO: 943376 - DNA, 120 bp, Artificial Sequence
  ENSG00000260658_9 (sequence is synthesized)
catgttggagatattgctttgattatggtttctttaaaactctcgtgattattttgtattaacagtgagtaagaaactcaattggtcacggacaatcgattattatttgagagatgatta

SEQ ID NO: 943377 - DNA, 120 bp, Artificial Sequence
  ENSG00000260658_10 (sequence is synthesized)
tttgataagcattactgctacattctagaatttcacagtccctgagaaactgattgatgtaaatgatgactgcagttgtggctaagaaagaattctaatataaaaagatatttcatgtga

SEQ ID NO: 943378 - DNA, 120 bp, Artificial Sequence
  ENSG00000260658_11 (sequence is synthesized)
tattgacccatttccccctttcaatgtagagttttttcaggaatagaggtttccctatataacatgtcagaaaagacaaacatcccaagctaaattattgtaaaatataataaagatatt

SEQ ID NO: 943379 - DNA, 120 bp, Artificial Sequence
  ENSG00000260658_12 (sequence is synthesized)
attatgatgttgcaaaaaagtaattatctaaggcctttgactaaagaatgggaaagctgaaatttgtgagacacatctggtataaagcccatttcctgctatactattttatttttaaaa

SEQ ID NO: 943380 - DNA, 120 bp, Artificial Sequence
  ENSG00000260658_13 (sequence is synthesized)
catagcacctcacaggtagtttgttaagtgaatgaatgaaggaccagtacttgcagctgttctactcatactaccacctaattcctcctatcagaacaccataggaatggagttatatat

SEQ ID NO: 943381 - DNA, 120 bp, Artificial Sequence
  ENSG00000260658_14 (sequence is synthesized)
tcattgcttagcctcatgcactctcataatataaagtaaggatgaactaagcagatacagccaaatcttgcttgtctgaataaaatcaatttcaaaaggatattatacctcaaggcatat

SEQ ID NO: 943382 - DNA, 120 bp, Artificial Sequence
  ENSG00000260658_15 (sequence is synthesized)
tcatgaattagcaagtaattcaacttaataggaatatggttcatatgaaagaaaatagatacacattaggaaaggcagaacatgaagttctttggctgagaagaacaatgtttatttggc

SEQ ID NO: 943383 - DNA, 120 bp, Artificial Sequence
  ENSG00000260658_16 (sequence is synthesized)
tagcaatagggaaatactgataattttaacccttagaaatatcccaaattttaggatgtttcaaacttcttagccaatggaaattttgtacttttgattaaaaattatgcaattggtcaa

SEQ ID NO: 943384 - DNA, 120 bp, Artificial Sequence
  ENSG00000260658_17 (sequence is synthesized)
ccccgagacacagcaggagtgagtaattgggtttatgatgggcagcgactctggtgttcactgcaagctagcactggtgttttctggatgacctttgttagctgtgcgaagaggtttcct

SEQ ID NO: 943385 - DNA, 120 bp, Artificial Sequence
  ENSG00000265222_0 (sequence is synthesized)
acactgaatcggaaatgtgaagcccaagggtcagaggaatgcagcctttaaagagtacagattccaaatagacaaagcaaaatggagcttcctcaacacctccaagtctgatgttggtgg

SEQ ID NO: 943386 - DNA, 120 bp, Artificial Sequence
  ENSG00000265222_1 (sequence is synthesized)
aggggaagcaaaagagagaaccgacgcaggggtcgccaggcctctcccgggagccatcaggccacctccagtgcaccgagtccctgcctggcccaccttgccaggggaagcctgctgagg

SEQ ID NO: 943387 - DNA, 120 bp, Artificial Sequence
  ENSG00000265222_2 (sequence is synthesized)
cacaaagcatacgaagcttttggttgacaaaaacggaaaccaggagtctccatggagtactcctcagggactgcagctggaaagtcaagacaaagatgtgtgctggagaatagtaaaaaa

SEQ ID NO: 943388 - DNA, 120 bp, Artificial Sequence
  ENSG00000265222_3 (sequence is synthesized)
gccagacaaaggccaaggagtgaaaggcgctatgcccagcaagaaaaacttacaagtggtgaaagtgcctgtgcagggagggggtcaggggctgggtcagaatgtccaaacctcagcatc

SEQ ID NO: 943389 - DNA, 120 bp, Artificial Sequence
  ENSG00000265222_4 (sequence is synthesized)
gttacaggaggttcaaagtgccttttcctctgactcagaagcacctggtattaaagaattccatgctgcagaggctatgctccacgcaagagctagaacagcattttagggtggaaacta

SEQ ID NO: 943390 - DNA, 120 bp, Artificial Sequence
  ENSG00000265222_5 (sequence is synthesized)
aatggaatggaggcgcaaatgctgttgaggagacagttgccctgggccaggtcctagcctcaccttccagctgcaagaagttgcttgagctttctacgcttctgcaccctcatctataaa

SEQ ID NO: 943391 - DNA, 120 bp, Artificial Sequence
  ENSG00000265222_6 (sequence is synthesized)
gtgaacagaatgacagtgccccataatgacagctttgataaggattaaatgaaattaagtatgtaaaatgtttaatacagtgcctagtaaattcttaataaataaatggatgacagtgaa

SEQ ID NO: 943392 - DNA, 120 bp, Artificial Sequence
  ENSG00000263105_0 (sequence is synthesized)
atcctcgatcgggaccgaaaaggccctgaacttgtgcagtgacttgccattgagtccgggaggttctggagacctgggtgacggaagaacgcccaaggccgactgctgccctcagttatc

SEQ ID NO: 943393 - DNA, 120 bp, Artificial Sequence
  ENSG00000263105_1 (sequence is synthesized)
gggtgcagtgcagcatggaaaaggagaaatgtacctgaagaggcaaatgaaagatatacagcgtcacaggcaatcttgcttctactaccataaaaatagtttacgtttcttagacactta

SEQ ID NO: 943394 - DNA, 120 bp, Artificial Sequence
  ENSG00000251676_0 (sequence is synthesized)
ggaggccgggattcgcggagggtcaaccaggaggaagaaacgccagaaggaagaaacctgagacagatcgccggggacgcagcacgggatcccagcctgaggcgtgcggggacggtgtgc

SEQ ID NO: 943395 - DNA, 120 bp, Artificial Sequence
  ENSG00000251676_1 (sequence is synthesized)
gggaagggagtgtatcctggtgtatgacagcatatagtagagaccagtgtcaattagggcctgtgaactgagacagggtgactggctaagtccacaacccattagaaacccagaaataat

SEQ ID NO: 943396 - DNA, 120 bp, Artificial Sequence
  ENSG00000251676_2 (sequence is synthesized)
caaatcatggtgagtagtaataatacttatttatagtactgtacggtataaagacaagaaccaattatgttgagtagctgtaacaaatagctctatcgttcttaataactttttctgtaa

SEQ ID NO: 943397 - DNA, 120 bp, Artificial Sequence
  ENSG00000251676_3 (sequence is synthesized)
taaaactgaattgtaacatgaccatactgcaatatgacattacactggtattgttggtaagattcaactatcttatgtagagaagttatataatgcttatattgataatcaaatgtatta

SEQ ID NO: 943398 - DNA, 120 bp, Artificial Sequence
  ENSG00000251676_4 (sequence is synthesized)
atgctaaatagttctgcacagatttatcaaaaggtaaaaataaaagcaaattgagaggaggaatgagtaatttggtttgtacaaaatattaaagtgtatgtaatggccttgtaggatgca

SEQ ID NO: 943399 - DNA, 120 bp, Artificial Sequence
  ENSG00000251676_5 (sequence is synthesized)
ttagtaatttttaaaaatcaatctttaccctacactgtgtccataaaatgctaggcatattcatgttaatattactgttgttactgtcatataaatgctgtactcaatgtagatgctcag

SEQ ID NO: 943400 - DNA, 120 bp, Artificial Sequence
  ENSG00000251676_6 (sequence is synthesized)
aaaaatatgcttgttttgctacaggagagattagtccagggacaataaatatggattagggaagaatgtgttaactcagcaggccagggtttcttcaaccctgcacattcaaagagggat

SEQ ID NO: 943401 - DNA, 120 bp, Artificial Sequence
  ENSG00000251676_7 (sequence is synthesized)
catggaaaggaagctgaatttgctgagttttgccacgtgggcattgcatgcctatgtgattaaccaccaataaaaacctgggacatcaaaaaataaataagctgctttaattgccaagaa

SEQ ID NO: 943402 - DNA, 120 bp, Artificial Sequence
  ENSG00000251676_8 (sequence is synthesized)
cggtaatgagcttgtattatgactcaatagcatcactttatcactttaacgcagatggaggcctaaataaccatagggcaatggttcttcttagatgcagaaggacacatttatataatc

SEQ ID NO: 943403 - DNA, 120 bp, Artificial Sequence
  ENSG00000251676_9 (sequence is synthesized)
ttagggaccccatctctgaggtcactcataatttatattaattcattattattgccattgccccaagaatagataaggataagacatcctgtagcacaggtagcagagatataaactatt

SEQ ID NO: 943404 - DNA, 88 bp, Artificial Sequence
  ENSG00000251676_10 (sequence is synthesized)
caggacggtctccggaggctgggattcgcggagggtccgggacgcagcgcgggatcccagcctcaggcgtgcacggacggtgtgcggg

SEQ ID NO: 943405 - DNA, 120 bp, Artificial Sequence
  ENSG00000251676_11 (sequence is synthesized)
tgtgatggacacttgtaaatttgtgcctggagtctcctggaatttgccctgagaatctttttcctttgttgataagaatctgcatccttttgttttaataaacgataaacatgagtataa

SEQ ID NO: 943406 - DNA, 88 bp, Artificial Sequence
  ENSG00000251676_12 (sequence is synthesized)
gccaccgttgcccggggatgggtccttgagacttggctaagcaggcaccctgtgtgagcttggtcagagtcacaggaaggtctccgga

SEQ ID NO: 943407 - DNA, 120 bp, Artificial Sequence
  ENSG00000251676_13 (sequence is synthesized)
agcttcgtgtcaacaaatctgaacatataacatctcagctagagcaagttactaaaaataggctcaatttgtaccttgcagtcatgccttcataaccacttttcaattaatcctgcttaa

SEQ ID NO: 943408 - DNA, 120 bp, Artificial Sequence
  ENSG00000251676_14 (sequence is synthesized)
ttcagagaatgtataaatatgtaattttgcatcacttttaaggcagccattttattttgaaatgcaactaacattatatgcataaattcaataaatataaagctgttttcaaaaattgaa

SEQ ID NO: 943409 - DNA, 69 bp, Artificial Sequence
  ENSG00000251676_15 (sequence is synthesized)
cggagggtccaccagcaggaagaaacgccagaaggaagaaacctcagacagatcgccgggggagtgtat

SEQ ID NO: 943410 - DNA, 79 bp, Artificial Sequence
  ENSG00000251676_16 (sequence is synthesized)
gagtgttctcttactacacttccaatttggctggactttgagctttgtctgtggtcccccgctttttacaatcccaaga

SEQ ID NO: 943411 - DNA, 120 bp, Artificial Sequence
  ENSG00000251676_17 (sequence is synthesized)
gagctttgtctgtggtcccccgctttttacaatcccaagaaacatggcctcatccttatcaggaccagagaatgctctcaaggctcctccttgagttattgggaataagtaatgcttctc

SEQ ID NO: 943412 - DNA, 120 bp, Artificial Sequence
  ENSG00000251676_18 (sequence is synthesized)
tcatgtgttttcctattttagaatattaatatggtgaactatattattagatttttttaaatattgaaactgtcttgcatttctggaataaacacggcttggtcatgtgtgtcacttttt

SEQ ID NO: 943413 - DNA, 120 bp, Artificial Sequence
  ENSG00000251676_19 (sequence is synthesized)
tacatagtgtcgtattcaagttattgaggattttgcatctagggtatacttgtagatttgcagatttgcatctaggttatgttggtctaaagttttgtttgttttttttccttttctttt

SEQ ID NO: 943414 - DNA, 120 bp, Artificial Sequence
  ENSG00000251676_20 (sequence is synthesized)
tttatcatctttgtcttattctgtttaagtgtcatgcttgcttcataaaatgaattgagaaacatttcttcctcttctgtttctcgaaaattgtagagaactcttgttttttgttgttgt

SEQ ID NO: 943415 - DNA, 120 bp, Artificial Sequence
  ENSG00000251676_21 (sequence is synthesized)
ttgtttgttgttttgtttttttcttatttttatcctcatactgagaaccaaatagtctggagtgtaaaatatggttcctcattccagttaagtctagtacacaatgacaacaaccatctt

SEQ ID NO: 943416 - DNA, 120 bp, Artificial Sequence
  ENSG00000251676_22 (sequence is synthesized)
gggttaagcattggcctacaaacagaaaaaaaccttcagggagatagatgctgatctaggcattgtgagaaaagctgaattcatttttaatcatgaatggcttttaaggaaagaagattt

SEQ ID NO: 943417 - DNA, 120 bp, Artificial Sequence
  ENSG00000251676_23 (sequence is synthesized)
attaactaaaataaatagattagagggaattctcatctatgagagaggaagggatgggattcaacctggaaaaaatgatgaagttttagtgaactgggtaaggtagactcaacaattaat

SEQ ID NO: 943418 - DNA, 120 bp, Artificial Sequence
  ENSG00000251676_24 (sequence is synthesized)
gagagttttttaaataaataatcaaagctgaaaagcaatggagacccccaccaaaacatctttacacatttcaattttgtattgaagtaaattttattttcttttttatacctcccgtat

SEQ ID NO: 943419 - DNA, 88 bp, Artificial Sequence
  ENSG00000251676_25 (sequence is synthesized)
acggtctccggaggctgggattcgcggagggtccgggacgcagcacgggatcccagcctcaggcgtgcacggacggtgtgcgggaagg

SEQ ID NO: 943420 - DNA, 88 bp, Artificial Sequence
  ENSG00000251676_26 (sequence is synthesized)
gtgtgatcgtgcgtcagagtcggggctgagaccagtcctagccagggcagttaccaggacggtgccaggaagaaacgccagaaggaag

SEQ ID NO: 943421 - DNA, 120 bp, Artificial Sequence
  ENSG00000251670_0 (sequence is synthesized)
gggtctcgggcggcgagggcacggatacaaatgcgccgccgcgttctcaggggttttcaagccagatttttataaaaggagggaacttctttcttgaagaaatggtcgagaccagatgag

SEQ ID NO: 943422 - DNA, 120 bp, Artificial Sequence
  ENSG00000251670_1 (sequence is synthesized)
tgtctgccatctccccagagaggacaaacagttgcttggtttgctgtcagaatgcaacgcaaagggtgaagccacgcacctcctcattcaacagcatgcaaggtgatggagaaaacctgc

SEQ ID NO: 943423 - DNA, 120 bp, Artificial Sequence
  ENSG00000251670_2 (sequence is synthesized)
aactgggaccccccagtcttctcttccttgaacagcctacatctccttgggtgttactgctcatcctgtcaaaaccaaaactttgctctcctctgacggagctgagtttccatacagaca

SEQ ID NO: 943424 - DNA, 120 bp, Artificial Sequence
  ENSG00000226172_0 (sequence is synthesized)
ctcagcctgcgggcagcagaaggcggcggccagcctcctcctgcccctcggccggacgaaccgcggctgccgcgcctgtcacctctgcacctgcccggctgagtagaaaaatctgaaatt

SEQ ID NO: 943425 - DNA, 120 bp, Artificial Sequence
  ENSG00000226172_1 (sequence is synthesized)
tgaaacagaaatggccacataaggacaactcagatgaagtgcaggcgggctgacatcgcgcacttgggtctttccgggaaagacagccgcgctctgggagaagcctagtcctccggcttg

SEQ ID NO: 943426 - DNA, 120 bp, Artificial Sequence
  ENSG00000226172_2 (sequence is synthesized)
ccttgctcatctgactccggaggcaggttccgcagaaagagctctcaatctcggccgctgggctccaagataatctcctggcgaaagctaagaggcggccatcccttcccggggactcag

SEQ ID NO: 943427 - DNA, 120 bp, Artificial Sequence
  ENSG00000226172_3 (sequence is synthesized)
cccctagattcagcttcttccgccgcaaaaaactcccaagccctgcgaactcgcaacttgcctctccaggcttccggcgtgggcgtcccagctacactttcgagcactttgcttggccgg

SEQ ID NO: 943428 - DNA, 120 bp, Artificial Sequence
  ENSG00000226172_4 (sequence is synthesized)
catctacccgctcttcgattaaggaaagcgcagtggggacagaggcaactcctgcctcctgtaccaggcctacgtagtcgcccaggtggccgggtcacaaataaacaattccaccatcaa

SEQ ID NO: 943429 - DNA, 120 bp, Artificial Sequence
  ENSG00000251679_0 (sequence is synthesized)
ctgcagctatcattttaaactttctaaggaattatttcctgacttcattatgcggcagtagagacgcagcttcaccatgttgaccaggccagccttggactcctgacctcacgtgatctg

SEQ ID NO: 943430 - DNA, 120 bp, Artificial Sequence
  ENSG00000251679_1 (sequence is synthesized)
tcactgactttttaccatgtataaatcctgatcaacctcaaaaagagtaatattaagtttgattcttacactttttaaaaaaaatatatccaagatacaactatcaaaagatggcccaga

SEQ ID NO: 943431 - DNA, 120 bp, Artificial Sequence
  ENSG00000251679_2 (sequence is synthesized)
atcaactgccagattaactatatggcccatagataatgatagaggagggaacttaaaaaactactttcttgtgcaaaaattatacctgtcacaaaataaagataaagtggagcactagaa

SEQ ID NO: 943432 - DNA, 120 bp, Artificial Sequence
  ENSG00000251678_0 (sequence is synthesized)
atccacaagccaaggaatgcccaggtcagccaacggcattggaggctgagagaaaggcctggagcagactctcccctagagcctcggtggagagcatgccttgctgatgccttgatttct

SEQ ID NO: 943433 - DNA, 120 bp, Artificial Sequence
  ENSG00000251678_1 (sequence is synthesized)
gacttttcacctccagactgggagggaatgaatttctgttgtgatgagccacccagactgtgacccgttgtcacagcagtcccaggggattaacaccaagagccccttcctggcaccatt

SEQ ID NO: 943434 - DNA, 120 bp, Artificial Sequence
  ENSG00000251678_2 (sequence is synthesized)
atccaaaggctcttctcaatcccaaagcccacccctccgcttctgcccttcaagtggtatcagtggagcactgcgtggttaggactttcggcgtaagagacaattaatcaaagttaatgg

SEQ ID NO: 943435 - DNA, 120 bp, Artificial Sequence
  ENSG00000251678_3 (sequence is synthesized)
acacttctttgttacacaacacgactaatgtcaatggcaaacaaatcactgaaaaacaatgaccaataaacccaactgaaaggtttttccattgaaaataaaatcaaccatgcctaatct

SEQ ID NO: 943436 - DNA, 120 bp, Artificial Sequence
  ENSG00000259082_0 (sequence is synthesized)
gcccaccggacggccctgctaggtgggaagctccttgcaggcaggaaccccatctccttgactttactttggaatccccgcagcctcatacggggctgaggcaggtccttccgtaaaatg

SEQ ID NO: 943437 - DNA, 120 bp, Artificial Sequence
  ENSG00000259082_1 (sequence is synthesized)
gaactgaatgagcggcgcttaatccatccgccaaaggccagtctcccttgggttttcaacagctggagaaatatcaaaagaatctgaatatcaccatctggaagttgtgccatggactcc

SEQ ID NO: 943438 - DNA, 120 bp, Artificial Sequence
  ENSG00000259082_2 (sequence is synthesized)
ctagcagtgtatttcttctgcttaaaatgagcacaaacacatctaattccctaatggaccaactcagacctaaaagtctcttattctttgcccgccttcctctacccacatggattcctg

SEQ ID NO: 943439 - DNA, 120 bp, Artificial Sequence
  ENSG00000259082_3 (sequence is synthesized)
ggattctctaaatgcagatggcaatggggagggctggggattcccatcaaggatatttgatcatcggtgacttcacttaaccaataaatcaaacgtgttgaaatacacacatgtcagaaa

SEQ ID NO: 943440 - DNA, 120 bp, Artificial Sequence
  ENSG00000259083_0 (sequence is synthesized)
acagaaattatattcacctcgatgcccccacacattaacaagcctggatcaggtccccatcccgccatccccgaggaggctgcacgtggacaggaagctgggctgttcctgcaaagttct

SEQ ID NO: 943441 - DNA, 120 bp, Artificial Sequence
  ENSG00000259083_1 (sequence is synthesized)
cacggcgaccgccatcttctccctgcggcaggcttgagactgctttacaggccgagccgggctatgccgcgccgccgaggcgcgaaaggactgacagccgggctcagccaatgacgatga

SEQ ID NO: 943442 - DNA, 120 bp, Artificial Sequence
  ENSG00000259083_2 (sequence is synthesized)
gcagcctttgtgactctgagccaatgaaaagtcagccaggcagtcatctccctccccagttagctgcgggtgcctggatcccgctgctagcgcagagtcggggcgggtttcacaatccct

SEQ ID NO: 943443 - DNA, 120 bp, Artificial Sequence
  ENSG00000259083_3 (sequence is synthesized)
gagttctcggagacttaggctcgcgagtctgcagttctggcaaggggagcgcggagttttctaggccttttaacctatgatgtaatgtgccttacaccgttttaacgtgatcacatcaga

SEQ ID NO: 943444 - DNA, 120 bp, Artificial Sequence
  ENSG00000259081_0 (sequence is synthesized)
tcccctcaaaccctgtcattcccgggaagctcccagaggcagctgaggccacgcccctgctcctgagcggcagcatccagacccggaaaggacctagtttcagcctggcacctcccaaga

SEQ ID NO: 943445 - DNA, 120 bp, Artificial Sequence
  ENSG00000259081_1 (sequence is synthesized)
ggaggactcccaggctcagagatgttaaggaacttccttgggggtcacacagtgagtcagcagcccagccacgattcaagtccaggtcaacctgaccccaaagtctgtgttgagacatta

SEQ ID NO: 943446 - DNA, 120 bp, Artificial Sequence
  ENSG00000259081_2 (sequence is synthesized)
tgccacggtccctccagcactactctcattccaccaatgcttactgagcctgactccttgtaagtgaccaaggatacagcgatgagaaatgcacagcccggccctgcagaggctcagagt

SEQ ID NO: 943447 - DNA, 120 bp, Artificial Sequence
  ENSG00000259081_3 (sequence is synthesized)
cgtgtgctgtgcctgagggagctgtggggacactgagaaggagcccctcacccagatgggggctgttcctattttattcctgcccacaagccaccaggtgacccctgaaaagctttgaga

SEQ ID NO: 943448 - DNA, 120 bp, Artificial Sequence
  ENSG00000259081_4 (sequence is synthesized)
ccataggaccctgcctggagtgacttctgtgtgtcctcctggggaaaaggaccagtctctctcctatgagggtgggagcctccactttggtgtgtgacccctgagggagaagtgaacgtg

SEQ ID NO: 943449 - DNA, 120 bp, Artificial Sequence
  ENSG00000259081_5 (sequence is synthesized)
aagacatgaaggaggcactgcctgcagcctgaatttctcgggtggcctcaggcttatcccagcaaagaaccccataaacagggcagggatgtcgggctccagaaatgggcctgccctgtt

SEQ ID NO: 943450 - DNA, 120 bp, Artificial Sequence
  ENSG00000259081_6 (sequence is synthesized)
ctgagcggcagcatccagacccggaaaggacctagtttcagcctggcacctcccaagctgcaaggatcctaccccagcccagcccagctctgagaaacaggactttgctacagcccgcct

SEQ ID NO: 943451 - DNA, 120 bp, Artificial Sequence
  ENSG00000259081_7 (sequence is synthesized)
ccccagcacgagctctctctacttcagggattgcaaactggcatcctcttttgccagtattgggtttttaagttttttttaagtgatcaccagcatttaaaaatcctatttcacataaaa

SEQ ID NO: 943452 - DNA, 120 bp, Artificial Sequence
  ENSG00000259087_0 (sequence is synthesized)
acactgacaaaactttatttcttcggagaagatggcagtaacttggtagggagcagaaagggtcttggttttaaaagtcttgttagaatgactctcattctcactgtgaacccagtttag

SEQ ID NO: 943453 - DNA, 89 bp, Artificial Sequence
  ENSG00000259087_1 (sequence is synthesized)
tagaatgactctcattctcactgtgaacccagtttagcatttatgtactttggaaggacaaagaggtgactctccagctcctaaccgcg

SEQ ID NO: 943454 - DNA, 120 bp, Artificial Sequence
  ENSG00000259087_2 (sequence is synthesized)
agataaaccaaagtggtacatggctcataactcaaacatttcattttcggcagctgttaattttcttgcccaggctaatttggattattcaatcattttcttttctttaatgaaaaactg

SEQ ID NO: 943455 - DNA, 120 bp, Artificial Sequence
  ENSG00000259088_0 (sequence is synthesized)
ctttgacatcagcacagctttgaaagggggatgggagagcgagcagaaagcagaaaaaccagctttgaactatgcatgcaaggcctctttcaagcctcaaattctataaggacggcttga

SEQ ID NO: 943456 - DNA, 120 bp, Artificial Sequence
  ENSG00000259088_1 (sequence is synthesized)
gtgtgcggtaatgagccgagattacagctggcagctggaaactaaaccccatgggtgccacccagagagagctgagactgaccatggagtaacggccaaggtcatgtgtgtagccccggg

SEQ ID NO: 943457 - DNA, 120 bp, Artificial Sequence
  ENSG00000259088_2 (sequence is synthesized)
ccatggagagggggtaccctggaggggctgggctggctggctgggctcaggctgtctgacaggcaacgggctccccagtgttctgaagagggagtggccctggtggtaactctctgtggc

SEQ ID NO: 943458 - DNA, 120 bp, Artificial Sequence
  ENSG00000258117_0 (sequence is synthesized)
ggagagggagaaggagatggagagggagaggagaatcattctttacagaggaaaagtacacagcaatggcattctggtgttttacttttgtgttaaatatgtctctacttgaaggggaaa

SEQ ID NO: 943459 - DNA, 120 bp, Artificial Sequence
  ENSG00000258117_1 (sequence is synthesized)
cccagtgtgggctccctacactcaaagcattggctacactgcagacagaaactgtacagaagtggatggcatgctaacagagatgagaaatgacaactgacatctaacaacaacgtatgg

SEQ ID NO: 943460 - DNA, 120 bp, Artificial Sequence
  ENSG00000258117_2 (sequence is synthesized)
aaactagttttatggaaactatttcccataaataagaattgtaaggtgcacatgtttccatagcaacctcttctgttgtgttcaatcctgtgaaacagaaatataaaaacaaacacaacc

SEQ ID NO: 943461 - DNA, 120 bp, Artificial Sequence
  ENSG00000245060_0 (sequence is synthesized)
agtttcgctctttttgcccaggctggagggcaatggcgccgtctcggctccctgcagccgccgcctcccgggttgaagggactctccggcctcaggccgcggtgttcttgtaaattagaa

SEQ ID NO: 943462 - DNA, 120 bp, Artificial Sequence
  ENSG00000245060_1 (sequence is synthesized)
ggtgttcttgtaaattagaaccggcctatgcgccaagcgcgggtctcgcggctgcggagagaggcccagcagggggcggggacgccgggaggcggggcctggccgagctgcgcacacccg

SEQ ID NO: 943463 - DNA, 120 bp, Artificial Sequence
  ENSG00000245060_2 (sequence is synthesized)
ggtggttctggctacgggtacccggacctgcccaacgaccgttctccattcccgacctccgcaccctacccggtccgcagggcaccttcctcctctctctcaggcacgtcctcgacctca

SEQ ID NO: 943464 - DNA, 120 bp, Artificial Sequence
  ENSG00000245060_3 (sequence is synthesized)
ccttcctcctctctctcaggcacgtcctcgacctcagttgccacgtgcacatgctggtgccttccaggctggagtatagtggcatgatcatagatcactgcagcctcaaactcctgggct

SEQ ID NO: 943465 - DNA, 120 bp, Artificial Sequence
  ENSG00000245060_4 (sequence is synthesized)
tggggaccaagtttctaacacatgaatgttgggagacacattcagaccatcgcagtggccttataaaaagagacacaagagcttgctctctgccatgtgagaataccacaagaagactgt

SEQ ID NO: 943466 - DNA, 120 bp, Artificial Sequence
  ENSG00000245060_5 (sequence is synthesized)
cctcagcaaatcagaaagcgggtggaccctcatcagacaccagatgtgcctgcaccttgatcttggacttgccagccttcagaacagtaagaaagaaatgtgtgttgtttaagccaccca

SEQ ID NO: 943467 - DNA, 120 bp, Artificial Sequence
  ENSG00000245060_6 (sequence is synthesized)
gtctatggtaacttgctatagcagcccactaggagaccccaagatatttaaaaactcatcagcacctgctttctgcatctggaccctgatcttctggtgggtttaccagttacttgtaga

SEQ ID NO: 943468 - DNA, 120 bp, Artificial Sequence
  ENSG00000245060_7 (sequence is synthesized)
ttaggtgtcaacttgacaggattgagggatgcctagatggctggggaagcactgtttctgagaaggaccatgtttttggaggagactgttttatgagtgaatttcaggggacacattcag

SEQ ID NO: 943469 - DNA, 120 bp, Artificial Sequence
  ENSG00000245060_8 (sequence is synthesized)
atcatggcagtggcattataaagagagacacaaaagcttgctctctctctctgccatgtaagactaccacacaaagactgccatctgcaaaccagaagcaggtgggctttcctcagacac

SEQ ID NO: 943470 - DNA, 120 bp, Artificial Sequence
  ENSG00000245060_9 (sequence is synthesized)
cagatctgcctgcaccttgatcttggacttgccagccttcagaactctaagaaagaaatggtagcatggcttggtctaagttggaaggcctgagaaacaagcacatggtggaactgagtt

SEQ ID NO: 943471 - DNA, 120 bp, Artificial Sequence
  ENSG00000245060_10 (sequence is synthesized)
caaggataaagacttgagaatacctgctcagtggactgagtagggaagatcaaccctcaatgtaggcaggcactatccaatcacctgagggcccagatggaacaaaaaggtggaagaagg

SEQ ID NO: 943472 - DNA, 120 bp, Artificial Sequence
  ENSG00000245060_11 (sequence is synthesized)
gtgaattctctcttccagagctgtgacacccttctcatgcccttgtaccacacaactctaggtcctttggcctttggactctgacacttgcaccagtggccctctggggctctcaagcct

SEQ ID NO: 943473 - DNA, 120 bp, Artificial Sequence
  ENSG00000245060_12 (sequence is synthesized)
ttagccttgaacttagttacaccatgtgcctccttgtttctcaggccttccaacttggatcaggccatgccaccggcttctctgattctccagcttgcagatggtatattgtgaccctgg

SEQ ID NO: 943474 - DNA, 120 bp, Artificial Sequence
  ENSG00000245060_13 (sequence is synthesized)
catttaataactatgactttggtcttaagcaattttcttcctctgtggattgatatttacatatcaatgtggataataatttcttaccacggtaactgttgtgaggtaaaaatgagttaa

SEQ ID NO: 943475 - DNA, 120 bp, Artificial Sequence
  ENSG00000245060_14 (sequence is synthesized)
cataagtaaaaccgagcacatgcaaaccatccgaaatggttaatacttactatttgtacttgaagaaataaatgtttttgacaataaacttcttgtgcagttttcctcagccagtgtcaa

SEQ ID NO: 943476 - DNA, 120 bp, Artificial Sequence
  ENSG00000245060_15 (sequence is synthesized)
tttactcgggtggctgggtgagggcggaatactaccttccagctgtctgagattaagcctaagccaccaccatcagggtctcagtcagtcatcattctcatttactcgggtggctgggcg

SEQ ID NO: 943477 - DNA, 120 bp, Artificial Sequence
  ENSG00000245060_16 (sequence is synthesized)
agggcggaatactaccttccagctgtctgagattaagcagaacagcagctaaagcagtaacagcaggtctccttcagcagcttgccacagggaagagggtcccgcgtgaaccgaactcaa

SEQ ID NO: 943478 - DNA, 120 bp, Artificial Sequence
  ENSG00000245060_17 (sequence is synthesized)
cgagaccaccgtgtggcccatctctgaagatgaatccaacagcagtgactctacctgcgtcctccccatcttttctgctttttcatacaatggcttattcactgcgtgtgacatcatcac

SEQ ID NO: 943479 - DNA, 120 bp, Artificial Sequence
  ENSG00000245060_18 (sequence is synthesized)
tagcactgtgtttatctatcacatttcttctgttttgtgggtttgttttgcattaaaggtctacttctctgagctttgagctgtaaggcttgactgtgagcagcaactgaagagtgtggc

SEQ ID NO: 943480 - DNA, 120 bp, Artificial Sequence
  ENSG00000245060_19 (sequence is synthesized)
acctcacactcggtaggaagaagctgaatgacagatgtcggcagtgagggtggggaaagcagccaggtaccaagcagctgttttttaggctaaccattgaagggaagctcctaatccctg

SEQ ID NO: 943481 - DNA, 120 bp, Artificial Sequence
  ENSG00000245060_20 (sequence is synthesized)
agttaacttttagcagagattaactcagtctatctattgggatgtaaaggatttgggcataaaggtatgttaattcggaggctctggaatgtataacaatttctcccattgaaatttatg

SEQ ID NO: 943482 - DNA, 120 bp, Artificial Sequence
  ENSG00000245060_21 (sequence is synthesized)
ataattaagtgttcaacttactggaattttccccacaagactcttctgggatgaatttgccttggggagaagactacgtaactgaaaaccagcatccaggccctcaagaagaaatataat

SEQ ID NO: 943483 - DNA, 120 bp, Artificial Sequence
  ENSG00000245060_22 (sequence is synthesized)
ctccaacagtctccttttcaatttctgtcaaatgtctggcttctcttgaagggatgttcacgagaagggacagccgccctcctccgagcctcctgtttcagctgatgcaccttcaagtac

SEQ ID NO: 943484 - DNA, 120 bp, Artificial Sequence
  ENSG00000245060_23 (sequence is synthesized)
aaggtcctgttcttgggctctgttaaagtttccctcaagaaaaaaaccttacatttgccaatgcacttgatgtaaagttgttgaggatgttgactctcctttaaacatttattgaagcta

SEQ ID NO: 943485 - DNA, 120 bp, Artificial Sequence
  ENSG00000245060_24 (sequence is synthesized)
gccttccaggtcggtctttctccaccagactccacctggaactttcttccttttcgtcctgtgctggcctaacccctgctcggcctcggccctcagctgccggctctaacaaagcctctg

SEQ ID NO: 943486 - DNA, 120 bp, Artificial Sequence
  ENSG00000245060_25 (sequence is synthesized)
tgttatggactgaatgctcgtctgcccccaaagtttctatgctgagatcctaacccctttgtgatggtaacaggaagtgggaactttgggaagtaactaattaggccatgatggtagggc

SEQ ID NO: 943487 - DNA, 120 bp, Artificial Sequence
  ENSG00000245060_26 (sequence is synthesized)
cctcatgagtgggattagtggctgtcttagtccattttgtgctgctataatagaatacccgagactgggtaatttatatagaacagatgtttgttctctcacagctgttgcattagggat

SEQ ID NO: 943488 - DNA, 120 bp, Artificial Sequence
  ENSG00000245060_27 (sequence is synthesized)
agactagggcgggcgacgtgatcagatgacctgtgcgggcggcagcctcctgccctcctccccttcgtgcgccggctggagcgaagagttcttttgacagccgtgagcttccccgccagg

SEQ ID NO: 943489 - DNA, 120 bp, Artificial Sequence
  ENSG00000245060_28 (sequence is synthesized)
aacttactggggctgcatcaccctagaaacgtggctttgggctgtggaaacgctgcctctgtggaagtctctcctcgcgggggtggacgggtcgctgcgcgcccagcgttcttctgcggt

SEQ ID NO: 943490 - DNA, 120 bp, Artificial Sequence
  ENSG00000245060_29 (sequence is synthesized)
ccgccgccgcctcggggacctttgcggggaggcctcaggtcagcgccgcccttgcgatggcgggagagcagagcggccccagggcctctgagctccggccccggcacgtcccgccctctc

SEQ ID NO: 943491 - DNA, 120 bp, Artificial Sequence
  ENSG00000245060_30 (sequence is synthesized)
ataggaaatcttaaatttctactaagagatgaaaaaaagaattcccttcccttccttaacaattcagctcccgttacacaaaaccaaacaagatgggattctgttgtggggggacagaac

SEQ ID NO: 943492 - DNA, 120 bp, Artificial Sequence
  ENSG00000245060_31 (sequence is synthesized)
ttcattgtcctgaagctaggtgttggagcccaagcagggtgaggagggagtcaaggaggcccatgtggtggtggagcatggcctggcatgggtctcagtgcccaagcaaggtgaagaggg

SEQ ID NO: 943493 - DNA, 120 bp, Artificial Sequence
  ENSG00000245060_32 (sequence is synthesized)
gaccatgcagggagtgagggtgtcactgcccaagtgaggtgagtagggcaattttgaaaagtcatgaaagttgaggaagggctgaggcaccattctagattgaaggagactaaaaagatg

SEQ ID NO: 943494 - DNA, 120 bp, Artificial Sequence
  ENSG00000245060_33 (sequence is synthesized)
caacactcacaatgcacaattctaaactgaaatctttgctctaaaggacattaggacaatgaaagaaacttgcacggggtctgagcattaggtagtagtaatgaattgatgttgagtccc

SEQ ID NO: 943495 - DNA, 120 bp, Artificial Sequence
  ENSG00000245060_34 (sequence is synthesized)
taattttcatggttgtatgctgatgatgtaggaggttcttgtaggaaatacacactcaaaagtattctgaggtgatggggcatcatatcagaagcttattctcaaatggttcaggaagga

SEQ ID NO: 943496 - DNA, 120 bp, Artificial Sequence
  ENSG00000245060_35 (sequence is synthesized)
aaaagttttatactatacttctttggcaagtttagattgtttcaaaataaaatttttttaaaaagagcatttgttaaccatcagtttggtaaaaggtgaaaaatgttgataatacctagt

SEQ ID NO: 943497 - DNA, 120 bp, Artificial Sequence
  ENSG00000245060_36 (sequence is synthesized)
gtttgtgaaggtgtggagaaacaaagtttcatacactattgtcaaaagtataaattgttacaatatttttggagagcaattttccagtatgtagcaaaaatttaaaagcaaatcttaact

SEQ ID NO: 943498 - DNA, 120 bp, Artificial Sequence
  ENSG00000245060_37 (sequence is synthesized)
cagcaattctgcctttagaaatgtatttgtaggataacatacaggagagaaaaatgtattttactgcaacactgttgatactaacaaaaactggaaaccaccaaaacatttatcatgagg

SEQ ID NO: 943499 - DNA, 120 bp, Artificial Sequence
  ENSG00000245060_38 (sequence is synthesized)
gggttaagtaaagtatggtataactatacaatgagtgtactaggaaacccttagaaagaatgcagaaagatgtatgtggacttttacagaaaggtgagctactgtctaaatgcaaatgtg

SEQ ID NO: 943500 - DNA, 120 bp, Artificial Sequence
  ENSG00000245060_39 (sequence is synthesized)
ccaatatcatgtatatacagtcaggttccttttgttaaaaaccaaaagcgtatgtttagaagcaaaagcactcatataaaggcctggtatagagcagtggctaaaaacagtgccaagata

SEQ ID NO: 943501 - DNA, 120 bp, Artificial Sequence
  ENSG00000245060_40 (sequence is synthesized)
ctgcctcaacttcctctcacatgctgccctggtgatactgaggctggttcaggaaccatgacagcctgtttgtatgaattccttaaagcacaaattacttagtttctttcataacagtca

SEQ ID NO: 943502 - DNA, 120 bp, Artificial Sequence
  ENSG00000245060_41 (sequence is synthesized)
tggaatactatgcagccataaaaaaggagatcacatcctttgcagcaacatgagtggagctggaggccattatcctaagagaactaatgctgcaacggaaaaaccaaataccgcatgttt

SEQ ID NO: 943503 - DNA, 89 bp, Artificial Sequence
  ENSG00000245060_42 (sequence is synthesized)
tacaaagaggggaaaaacagacactgaggcctacttgagggtgaagggcaggaggaggaagagtatcagaaaaaattcctattgggtac

SEQ ID NO: 943504 - DNA, 90 bp, Artificial Sequence
  ENSG00000245060_43 (sequence is synthesized)
gggaaaaacagacactgaggcctacttgagggtgaagggcaggaggaggaagagtatcagaaaaaattcctattgcaatttgaacaccaa

SEQ ID NO: 943505 - DNA, 120 bp, Artificial Sequence
  ENSG00000245060_44 (sequence is synthesized)
aacttctgaaacagcagttctcaaaatgttacctccagacacacagaatctgcatcacccaggaacttgtaaccatgcaaattctcagccacccagacttcctgcatcagaaactctggg

SEQ ID NO: 943506 - DNA, 120 bp, Artificial Sequence
  ENSG00000245060_45 (sequence is synthesized)
gagcacagtgcctcctcctgctcctccaggaagcttctgctgattgaacgcaggccagatggcgagatccggagcaaccttcttagatcaagggaagaaaggggcacaagaggggagtag

SEQ ID NO: 943507 - DNA, 120 bp, Artificial Sequence
  ENSG00000245060_46 (sequence is synthesized)
gtaacaagataaaaggagctccctccctgatgactacagagccatcgtggcagccctgggcctccatttcagacgttcatcttgcctaagccaccaccatcagggtctcagtcagtcatc

SEQ ID NO: 943508 - DNA, 120 bp, Artificial Sequence
  ENSG00000245067_0 (sequence is synthesized)
gagcagcgcggggcgaggccgccgcggacgccccgtcggatgtgcccttcgctgggccgagcggcgcagggttggagagggaagcgctcgtgcccaccttgctcgcaggtgcccttgctg

SEQ ID NO: 943509 - DNA, 120 bp, Artificial Sequence
  ENSG00000245067_1 (sequence is synthesized)
acctgggtgatggccttctccccgcggctctcggccctctggctggcggcgcgcagctggcagccgctcggatcagtgtggaaatggatgtggacgcggtgctgctgcctgagattagca

SEQ ID NO: 943510 - DNA, 120 bp, Artificial Sequence
  ENSG00000245067_2 (sequence is synthesized)
ggaagcaattcttttcccatttggagagaccccggctttgttgggccaggagatggttttgcagcagcagaagactatgaactgggctttgggagataggatctctggttgtattctggc

SEQ ID NO: 943511 - DNA, 120 bp, Artificial Sequence
  ENSG00000245067_3 (sequence is synthesized)
tatccacactctgaaagaggaccgtgacagagaatttgagtatcctaccaatatacctacaaaaggatgaaagaagatttggagtcaagggaaaacaagggcaataaaatagaagcttac

SEQ ID NO: 943512 - DNA, 120 bp, Artificial Sequence
  ENSG00000245067_4 (sequence is synthesized)
cacctgctctcatacagttgctagaagaggactgcatatttggttctaagtttctggaagataaagccaaaatagaaacacaactcattataaaattttggtgtatccataaaataaaaa

SEQ ID NO: 943513 - DNA, 120 bp, Artificial Sequence
  ENSG00000245067_5 (sequence is synthesized)
caaatgacctgtttgagaaaactctttctgagtttgagctctaaaaggaacttctctatggaatccttagaatatgagaaggctgtgatataggggagaaaccccttgacattcctatat

SEQ ID NO: 943514 - DNA, 120 bp, Artificial Sequence
  ENSG00000245067_6 (sequence is synthesized)
tgggtttaggtctaatttcactcagtagtttttaaatgttactccttgtagacagatgatgagacgccaaagtacagctgagtgaaagcggttcctttgaaaactaaaggctgtaaaaac

SEQ ID NO: 943515 - DNA, 120 bp, Artificial Sequence
  ENSG00000245067_7 (sequence is synthesized)
aaggctgtggatcatgttgtttcagttctttatagattttttaaactgaattttgcatctgtgtacatgaagaataaattgtagaatatctaaggaaatggatgggctgcttatctttta

SEQ ID NO: 943516 - DNA, 120 bp, Artificial Sequence
  ENSG00000245067_8 (sequence is synthesized)
gaacctccataaattatttattgtaagtatgtttgataaggattgtacagctgagagttcaaggttgcatttttttccccagcaagaaccaaaagtgcagataacatgcagccaattaag

SEQ ID NO: 943517 - DNA, 120 bp, Artificial Sequence
  ENSG00000245067_9 (sequence is synthesized)
gacaaatctgtatggtttgtcaatcaatctgtcaggatgtccctgaattgtagcacttatcacttggtattatagacatctgtgtccctggcataactgcatcctcttcaagggcaggaa

SEQ ID NO: 943518 - DNA, 120 bp, Artificial Sequence
  ENSG00000245067_10 (sequence is synthesized)
ttgcttcttttccatttttgcactctagcatccagcattatgtttgagacctagcatctatatgagagactttgttgaacggaatcaattgaaaggcttcccattatcatgcagtactac

SEQ ID NO: 943519 - DNA, 120 bp, Artificial Sequence
  ENSG00000245067_11 (sequence is synthesized)
ccctgagcaatcaagggcaggaaacataggctagctgagctttgaaggaagtgaaaagaaaaagaggcagcaaagatgggaacatggaggacagtctgagaaaacaagctcagggttgaa

SEQ ID NO: 943520 - DNA, 120 bp, Artificial Sequence
  ENSG00000245067_12 (sequence is synthesized)
gggggtgttccagtgaaggggtgatgagtgggacctcacacatggagcagataacattggtgcatcagttgatttaaatgagcagaatggaaagtgtctaaaagagagatgtggaaatga

SEQ ID NO: 943521 - DNA, 120 bp, Artificial Sequence
  ENSG00000245067_13 (sequence is synthesized)
gtagaaacatccctttcctgttgggccagctattgtctatggttagtccttttcccatccttatttcctctcctctgaattgcaagttgctggaaacatgagaagtgcattccttgctcc

SEQ ID NO: 943522 - DNA, 120 bp, Artificial Sequence
  ENSG00000245067_14 (sequence is synthesized)
cttggttactgggcttcagttagcatttgccaatgagggtgagcactcatgggagactggaaagtggtagaaagggaaagccattcagctggctgtgacagtggcagcagcgggcagtac

SEQ ID NO: 943523 - DNA, 120 bp, Artificial Sequence
  ENSG00000245067_15 (sequence is synthesized)
cgtgggctccaacagcattggtggtggctccagcatcatcactgggagcttgggctcctgggttcctgctcagcagctatggtcagtaccttctgagatggcctcctctgatcctcacct

SEQ ID NO: 943524 - DNA, 120 bp, Artificial Sequence
  ENSG00000245067_16 (sequence is synthesized)
cttggtattcatggccttgtgaaatcccctttgcttgagtaacttgctgccaaccaatagaatatggcaatgttgagggttgctacctttctgactaggttgcaaatgattgtgacttct

SEQ ID NO: 943525 - DNA, 120 bp, Artificial Sequence
  ENSG00000245067_17 (sequence is synthesized)
gtcttgctggcaggctctctctatttgccttttggtttgtgtgctctgaggatgcaaactgccatgttcgtgagacctgcatggcgaggaattgagggcagactctgtccaacagccagt

SEQ ID NO: 943526 - DNA, 120 bp, Artificial Sequence
  ENSG00000245067_18 (sequence is synthesized)
gagaaactgaggtccaacagcctacacggagctgaatcttaccaataactacatgaacttgaaagtgtatccttcccttcagatgagtgtagcctgagtgacaccttaactgaagcctat

SEQ ID NO: 943527 - DNA, 120 bp, Artificial Sequence
  ENSG00000245067_19 (sequence is synthesized)
gagaggccctgaagcagaggaaggacccagctagctcacacctagatttctgatgcatagaaactgtgagatagcatgtgttattttaagccagttttgagatgatttgttatacaatag

SEQ ID NO: 943528 - DNA, 120 bp, Artificial Sequence
  ENSG00000245067_20 (sequence is synthesized)
caatagataacaaatatgatggcagagctctgttccaacagcagtagcaagcgtgtgcttgccgactctggatcactccacattcacctctttgcttctacagctatgggacaatagcag

SEQ ID NO: 943529 - DNA, 120 bp, Artificial Sequence
  ENSG00000245067_21 (sequence is synthesized)
cagcgtcctacagttgccaatttctaggtaatgccattttccacttgacctgtgttttcaaaacctttgtcaccattttcctatattaaattccttcataataacagaagagtggctaac

SEQ ID NO: 943530 - DNA, 120 bp, Artificial Sequence
  ENSG00000245067_22 (sequence is synthesized)
atatgcacacaactatttttcttgatagggagataaagagagcattgctgtatattaaatgtagttatgtctttttagatgtttaagaaaatgaaatgcaccttttttcaagtgaataaa

SEQ ID NO: 943531 - DNA, 120 bp, Artificial Sequence
  ENSG00000245067_23 (sequence is synthesized)
aaaaaaaattatcttcaaacatcattacctctggaaagctcttcctgacccacaaactaggttgggttcatgtgctacaagctctcacaggaccatgtttccttcattagggcatttata

SEQ ID NO: 943532 - DNA, 120 bp, Artificial Sequence
  ENSG00000245067_24 (sequence is synthesized)
tcagtgtggaaatggatgtggacgcggtgctgctgcctgagattagcaggaagcaattcttttcccatttggagagaccccggtgagacctgatcaactagcaacatgcggaagtcacac

SEQ ID NO: 943533 - DNA, 120 bp, Artificial Sequence
  ENSG00000245067_25 (sequence is synthesized)
cattaagtcttccaatttgctagcagcaaatcaatgaactctgatagctgctgccctaagctagcatccagggaactgtggacaagctatttgatacctgaattttagtgaaggaaagtt

SEQ ID NO: 943534 - DNA, 120 bp, Artificial Sequence
  ENSG00000245067_26 (sequence is synthesized)
cagatggagttttgtagaaagagagctggttgttttaaattgtatcttaaatttattgtagagctattggtaattagtgttttgttgttgtgtgtttataccaaccaattaataagaaag

SEQ ID NO: 943535 - DNA, 120 bp, Artificial Sequence
  ENSG00000245067_27 (sequence is synthesized)
gcttttatttttatttcatcagttggagctgaactttattttttattataaatataaggcattattctagggcctggcaaacataggcagccactttttttttctggggaagattatacc

SEQ ID NO: 943536 - DNA, 120 bp, Artificial Sequence
  ENSG00000245067_28 (sequence is synthesized)
ttggtatgttttcaccactgtgagatgaaaatttgagaacagtgagagacagatgcttgcctgaggagttttattttccctttaatccttatcaaatatccagatattacctatattgcc

SEQ ID NO: 943537 - DNA, 120 bp, Artificial Sequence
  ENSG00000245067_29 (sequence is synthesized)
gttgaagatgactcactaccaccatgtccaacctccaatttgaaggaaaatggaaaggggaaagttgaaccaacagtacctttatgaaggcatggcctgaaaatggaagattatcacttc

SEQ ID NO: 943538 - DNA, 120 bp, Artificial Sequence
  ENSG00000245067_30 (sequence is synthesized)
tctttgcatcacactggcagatcagtgtggaaatggatgtggacgcggtgctgctgcctgagattagcaggaagcaattcttttcccatttggagagaccccgatattacctatattgcc

SEQ ID NO: 943539 - DNA, 120 bp, Artificial Sequence
  ENSG00000257732_0 (sequence is synthesized)
ccatcttttctctaaggtcttcaactaattggatgaagcccatccacattatggagggtcactagctttactcaaagcctactgatttcattgtaagtcacatctaaaaaataccttcac

SEQ ID NO: 943540 - DNA, 120 bp, Artificial Sequence
  ENSG00000257732_1 (sequence is synthesized)
agcaacatctatgcttttatctgccaaacaactgggcaccgtatgctagccaagttgacacataaaattaactgtcactccatgggactagatgaaattacccaggagttaatgtattta

SEQ ID NO: 943541 - DNA, 120 bp, Artificial Sequence
  ENSG00000257732_2 (sequence is synthesized)
gaggaaaaccaagactgtgtggtgtctcagaagccaatgaagaagtgctccaaaaaggaagatcaactatttcaagcactgccaagaaatcctataaggccctgggaagattacgtagcc

SEQ ID NO: 943542 - DNA, 120 bp, Artificial Sequence
  ENSG00000257732_3 (sequence is synthesized)
aacactggtgtgaaaatcatgcctatggagggttcttttggaacccagaagaaacagataaaggaggtgtttattcatgaaaccagcacttagaagactgcatcagcagttccagctcca

SEQ ID NO: 943543 - DNA, 120 bp, Artificial Sequence
  ENSG00000257732_4 (sequence is synthesized)
tgattacaagctcctcgaagacatgaaccagatcacacctctcctgtgtggctaaggccaactgcacatgtagaacggtgttcctcctatgcttgggacaaataaatctcacaaaatcaa

SEQ ID NO: 943544 - DNA, 120 bp, Artificial Sequence
  ENSG00000250105_0 (sequence is synthesized)
aaagttgtgggtggcagaatttggggccagctttcctgtcatcctatccatcccctgcaaccctggcacccacctgggtctcctccacagagtgtaccagccacacgtcctgcaggtcct

SEQ ID NO: 943545 - DNA, 120 bp, Artificial Sequence
  ENSG00000250105_1 (sequence is synthesized)
ccacggcaccatccagccagttgttgaagggcgcggcccgccgggcaaactccagttgcagccggtcaatggtctccaggagcttctccatccgctagagagatgccggctccggtcacc

SEQ ID NO: 943546 - DNA, 120 bp, Artificial Sequence
  ENSG00000250105_2 (sequence is synthesized)
ctctgcggcgtcggtgtaataacgtaggtgaaagtcctcttccgtggcgtgatccgcaaatgacatcagcgtcccctgagcgagctacgtccagggggcccttggtacagttttagcata

SEQ ID NO: 943547 - DNA, 120 bp, Artificial Sequence
  ENSG00000250105_3 (sequence is synthesized)
atttgaccttaaaatagctctcaacgattctgtaacccccatgagcccctgacccggcctcctttgttcactacagaaatcctcgacagaacaatgaatggatgtttctatccagagtaa

SEQ ID NO: 943548 - DNA, 120 bp, Artificial Sequence
  ENSG00000250106_0 (sequence is synthesized)
caagagcaaaactccatctaaaaaaaacaggcaataaacacaaactgctctaaaaattggaaaatgttacagaattgggttgtctaagattgactgactcaaggcactcaaactgcagtt

SEQ ID NO: 943549 - DNA, 120 bp, Artificial Sequence
  ENSG00000250106_1 (sequence is synthesized)
ctgcagttctccagaccaggccagtagagggagctgtcggctttggaaatatgacatcataccagccacgcggcatgaacagactccaggaattcttagcataaggcatttaccatgcag

SEQ ID NO: 943550 - DNA, 120 bp, Artificial Sequence
  ENSG00000250106_2 (sequence is synthesized)
tttgcagggcagcatcctgccaggctggctctcagcacgtagcctcagaattttacaattaaatgcaagaaataacaagttgcaagcacacatcagaggttccttatacccaaaacaagc

SEQ ID NO: 943551 - DNA, 120 bp, Artificial Sequence
  ENSG00000250106_3 (sequence is synthesized)
ttcacgtgctgtatcccatcaccagctcaaagagacccctggcgtttcctcactttaccacgtccatgctattctgttaaagcacaacaaggaaacagaaataaacacacaactctatcc

SEQ ID NO: 943552 - DNA, 120 bp, Artificial Sequence
  ENSG00000250107_0 (sequence is synthesized)
cggcgccactccagaaagctgtgggtacccgggagcggagcgccgcgggtgtgctgggcgccggtggaggggggaacagcgaggattagacgccgggaagcacttccccaacatctgcga

SEQ ID NO: 943553 - DNA, 120 bp, Artificial Sequence
  ENSG00000250107_1 (sequence is synthesized)
gaggtagacacggcggaacctagtggaatcccatcatcgcgtgcacatctcatcccaggagggagagaggagctgccgagtagaaagcagactggctgcagggacagaagacaccaaggg

SEQ ID NO: 943554 - DNA, 120 bp, Artificial Sequence
  ENSG00000250107_2 (sequence is synthesized)
caccctcccccacagctgcgcctggacctcctgcgagaagaggaagccttaggggtctttattgtaccctcaagaccccagagagaaacagaagtgctgaggggtcgcaggcaggtctct

SEQ ID NO: 943555 - DNA, 120 bp, Artificial Sequence
  ENSG00000250107_3 (sequence is synthesized)
taccctctctgggcctcgaatatttatccataggaggctgaaggtaactgccttcgcaactcattcatgagggtcaatgggacgacagtggcaagaggggttggcacactgcccagactg

SEQ ID NO: 943556 - DNA, 120 bp, Artificial Sequence
  ENSG00000250107_4 (sequence is synthesized)
cttcaccatgctccatcctccctctcttccacctccccaggctgggctccacttgtccagctctctgacttcctggcaaggttgagtaggctccagctaggaaggggccagctgaccttg

SEQ ID NO: 943557 - DNA, 120 bp, Artificial Sequence
  ENSG00000250107_5 (sequence is synthesized)
ttggccggagcactaatcccctccagatgggctggtggcttgcactgagggcctggctgcccagacagagctgactctggtcccagtgaccatgtgtggctatgtgtgaccgtgtgaagg

SEQ ID NO: 943558 - DNA, 120 bp, Artificial Sequence
  ENSG00000250107_6 (sequence is synthesized)
gagcaattccatccagtctcccggttccttcctgcttcactcctccccactgctgacatcccccacaagcagtggccccatgaaggccttcttgtctctagtagcctcttttggctctct

SEQ ID NO: 943559 - DNA, 120 bp, Artificial Sequence
  ENSG00000250107_7 (sequence is synthesized)
gtgttgcttagctggagggctgaggatgcctggcacagccgattcccaaaggcctcagagggacagctcctccccctgcttcccccaccccgtcagccccatcactctgcacctgccctt

SEQ ID NO: 943560 - DNA, 120 bp, Artificial Sequence
  ENSG00000250107_8 (sequence is synthesized)
caaacccagctcgctaaccggcgcgggcagagtacagctcccaggctcccgaagcttcccacatctggaggatgacgaccctcccctgaccacatctggagggcgtccagctgcgagcca

SEQ ID NO: 943561 - DNA, 120 bp, Artificial Sequence
  ENSG00000250107_9 (sequence is synthesized)
aggaagatgtatgtgtcaaggacaggactcaggagcatttcccaacatttaggggaaaggatgaggtcacaggaaggctttctctgcagcaagaaggactcagatagatttggggaagga

SEQ ID NO: 943562 - DNA, 120 bp, Artificial Sequence
  ENSG00000250107_10 (sequence is synthesized)
cttccaacccaacagatgttccaaacgaaagagaactctttctttggaccagcttgtatgaaagcagacaaatggacaacatgacctcctgcaaggaggccctgcttccatcctttcgag

SEQ ID NO: 943563 - DNA, 120 bp, Artificial Sequence
  ENSG00000250107_11 (sequence is synthesized)
gctggggctagatggataccccaaaagaaatgtcttagtcgtgacaatagcagctcccacaatgcaccagggcatatgcaaagtcaccattctgtgaaatataaaagctcatataaagca

SEQ ID NO: 943564 - DNA, 120 bp, Artificial Sequence
  ENSG00000257737_0 (sequence is synthesized)
cagagagaagtagaaagatacactgggaagaagacatggcattccaaagtcagaattagaagcccttcttctaaagaggactgtttattttccatttcattggcatagccgatggggaat

SEQ ID NO: 943565 - DNA, 120 bp, Artificial Sequence
  ENSG00000257737_1 (sequence is synthesized)
ttctcacctagaaattgaaatggaaaagcagtttttaactcagaacaaagagacctgaagtttcatgttctttgcaggcagaaagatacgtcttggagagaaacaagattgagagccagg

SEQ ID NO: 943566 - DNA, 120 bp, Artificial Sequence
  ENSG00000257737_2 (sequence is synthesized)
agcagtggcgtgcattaaccatttttgtggtagattcccaggtttctattggaaacagacaaaccacctcttcttctctctgctcgggatcctagcacaaacgaagcacaagcacagagt

SEQ ID NO: 943567 - DNA, 84 bp, Artificial Sequence
  ENSG00000250102_0 (sequence is synthesized)
gggaagcaggcctccgaagccagcagtggcaacccacttgggtccctttcaatgctgtggaagcgttgttctttcactcttctc

SEQ ID NO: 943568 - DNA, 120 bp, Artificial Sequence
  ENSG00000250102_1 (sequence is synthesized)
ccgctgttatgagctgtaacactcacagccagtgtctgcagtttcactcctgaagccagcaagaccacaaacccacagggcgggacaaacaactccggacaggaggaatgaacaactctg

SEQ ID NO: 943569 - DNA, 120 bp, Artificial Sequence
  ENSG00000250102_2 (sequence is synthesized)
actcaccgcaaaggtctgcagcttcacccctgaggccagggagaccacgaacccaccggaaggaatgaacaactccagacgcactgcctttaagagctgtaacacttaccacggatgtct

SEQ ID NO: 943570 - DNA, 77 bp, Artificial Sequence
  ENSG00000250102_3 (sequence is synthesized)
ccacgaacccaccggaaggaatgaacaactccagacgcactgcctttaagagctgtaacacttaccacggaacagaa

SEQ ID NO: 943571 - DNA, 120 bp, Artificial Sequence
  ENSG00000250102_4 (sequence is synthesized)
aagaactgtaacactcaccgtgagggtcaaccgcttcattcttgaagtcagccagaccaagaacccaccaattccgtctatctgaatcatgttattggaccatgagagcaagcagctgga

SEQ ID NO: 943572 - DNA, 120 bp, Artificial Sequence
  ENSG00000250102_5 (sequence is synthesized)
caagcagctggatctcattctgtccagctgctcacatggatactaccagcttcattgtgaatcactgaaaaagaggacacaatgccaaggaatccaaagagaaggcaataatgataaatg

SEQ ID NO: 943573 - DNA, 120 bp, Artificial Sequence
  ENSG00000250102_6 (sequence is synthesized)
caagttatcacaaatctctatgtagctgaatatcatatattgacattttctttttaggtagcactggtggatcaagcttaaatattccctttacttctataaaggtccttgtctatcata

SEQ ID NO: 943574 - DNA, 120 bp, Artificial Sequence
  ENSG00000250102_7 (sequence is synthesized)
tgttgtgtatattgtgaaatccactgatagttttctgtgtcctgcaaagttgtatcttcattagtcctgcatcagatataagctcctgataattttattctgtcaacatagtactctatg

SEQ ID NO: 943575 - DNA, 120 bp, Artificial Sequence
  ENSG00000250102_8 (sequence is synthesized)
tgtaatgatacataacaaataatgttaaaattaattttaatgatggtgatgatgaaatagaagaagaccacaactaagggcacaattcttatttaaaattatgtaggccgtgaaaatctg

SEQ ID NO: 943576 - DNA, 120 bp, Artificial Sequence
  ENSG00000250102_9 (sequence is synthesized)
ccaatattttaagcataaaccaaaatatcaaaaagtgttcttgatttatggctatatataatttgctacaattaatataagagaagaaggctttactatatcagtctaaataaataaatg

SEQ ID NO: 943577 - DNA, 120 bp, Artificial Sequence
  ENSG00000250102_10 (sequence is synthesized)
gagtttgaccttaaaaagtcatatgtttgggccaaaattgactaaaaataatgtagttcaaagaaagcaatatgcataattgctttcatatatctttctatattaaacaataaatactaa

SEQ ID NO: 943578 - DNA, 120 bp, Artificial Sequence
  ENSG00000250102_11 (sequence is synthesized)
aataactaaaaaaccttaaaaccttacttttttggtacttttaaataccaagaattaattaattaattaattaatttagcttgtgtccatttcctcttacaagtatataggaaacttttt

SEQ ID NO: 943579 - DNA, 120 bp, Artificial Sequence
  ENSG00000250102_12 (sequence is synthesized)
actctctgaatctttataaaattgcaagtcttggtgaacagtaattgtcttcttggataatatttatgcaaagagtgtttggagacatctatattctggataaaactaattatttaatac

SEQ ID NO: 943580 - DNA, 120 bp, Artificial Sequence
  ENSG00000250102_13 (sequence is synthesized)
agtactttttttaaaggacatgctattttaacttcacttcagcaaagtttatctgtaggcacttatatatgcacttaaaacaaaatttaaataaatgagcatgatttttttccttacttt

SEQ ID NO: 943581 - DNA, 120 bp, Artificial Sequence
  ENSG00000250102_14 (sequence is synthesized)
aagtggactggcatctttcccatatgttttgcatgtaacaacattcccaaaaagttaagtgcatctaggatacaccttatttaataaccttagcaccagctgctcatattcactgccaga

SEQ ID NO: 943582 - DNA, 120 bp, Artificial Sequence
  ENSG00000250102_15 (sequence is synthesized)
aatcatgcttttttgtacacagcctaaaggcaaaaaaaaataaaaagtgatttagaagctgctactaggctgaaaggtaaatcagtgttccacataattcaaaacttactttttataaaa

SEQ ID NO: 943583 - DNA, 120 bp, Artificial Sequence
  ENSG00000250102_16 (sequence is synthesized)
aagcaaataaaagcacaaaagtaattttagctgaatatttaaaaagtaattctatatggtatgacacttactacaacagaaacttttgcttactttcataggactcctggaaacagcagc

SEQ ID NO: 943584 - DNA, 120 bp, Artificial Sequence
  ENSG00000250102_17 (sequence is synthesized)
tctaacaaaattgtcttcaataaataagtttttttgcatcacatttgtgtatgtcctgaatgttctgagcccttcagatttgactcatattcatgctaaaagaaaaaatgcaaatgaaaa

SEQ ID NO: 943585 - DNA, 120 bp, Artificial Sequence
  ENSG00000250102_18 (sequence is synthesized)
atttcactgactagaattaccagtactatgtcaaataagagtgactagtttggacatattttttcacaatcctggtagaataaaagcattcattttttcatggttaagtatatgactgat

SEQ ID NO: 943586 - DNA, 120 bp, Artificial Sequence
  ENSG00000250102_19 (sequence is synthesized)
gaatgccagatgcctctagtgagccaccttgaatcactattctgaatacatcttgagtaaaaagagaaaattgctcatgtttccatgtctatctgaatcatgttattggaccatgagagc

SEQ ID NO: 943587 - DNA, 120 bp, Artificial Sequence
  ENSG00000250102_20 (sequence is synthesized)
ctggctgccttcatcttccccagtattctaggataacctcaaagaaatcacaacagcttgttttctacaattaaaacatttgggttttgatagtgtgcatggtctacaaagaagtgagaa

SEQ ID NO: 943588 - DNA, 120 bp, Artificial Sequence
  ENSG00000250102_21 (sequence is synthesized)
gtgtagctgtttgtatggaatcttatggtgaacattgctggctccaacatataacttgattggtgcgacatcaaggtaaatgaatcctcaaagagctagcaaatggatcaaataaaagta

SEQ ID NO: 943589 - DNA, 120 bp, Artificial Sequence
  ENSG00000250102_22 (sequence is synthesized)
ctgggagttataggcatgagtcaccatgcctggcaccacataaaattattttgtcattaacattacattttaaaatacaaacgctgttttccatattactcaggtcagatcttttacccc

SEQ ID NO: 943590 - DNA, 120 bp, Artificial Sequence
  ENSG00000250102_23 (sequence is synthesized)
acttctctcagtgagattgcattatttatttccatctctataatctactgttcatccatctatctatccatccctcaatttagttttttcactacattctgcatttgattcttttgaggg

SEQ ID NO: 943591 - DNA, 120 bp, Artificial Sequence
  ENSG00000250102_24 (sequence is synthesized)
tgtatgcttgtgtttgtgcgtggaagtgggggtgtgtgtgtgtgtgtgtgttcaaaaaggtctacagtttcctttttctgtaatatctgtgtctgctgttggtattagggtaatgctgaa

SEQ ID NO: 943592 - DNA, 120 bp, Artificial Sequence
  ENSG00000250102_25 (sequence is synthesized)
ctcatagagtatgtgaaaagttttctacattctttgatttttctgaaagaaattgtgcagaattcatattatttctttcttaaatgctcaagtgtttattaaaatttaccagtaaaatat

SEQ ID NO: 943593 - DNA, 120 bp, Artificial Sequence
  ENSG00000257735_0 (sequence is synthesized)
aaatccccgcccgcttccggggctctgcggcggcggagtgctaccttgcagcattaagatggatttgactagaaaagatgagaagggcctacaaacaacagggtctcaccatgttgccca

SEQ ID NO: 943594 - DNA, 88 bp, Artificial Sequence
  ENSG00000257735_1 (sequence is synthesized)
cgacctcctgggcttgagcgatcttgtgagtagctgggactacaggctgtaaatgaggagattcagcatgggagtgatcacgctgtac

SEQ ID NO: 943595 - DNA, 120 bp, Artificial Sequence
  ENSG00000257735_2 (sequence is synthesized)
atgagatagcggagtaatccggagccataaaagaaaatcactgcagtgaggtgggaggagcaggtggagaaggctttgcttctgcctgtagtggagctgatcctcaggatggtggacaaa

SEQ ID NO: 943596 - DNA, 120 bp, Artificial Sequence
  ENSG00000257735_3 (sequence is synthesized)
atgcaaatataagacaagaatatcatgagaaaatttccaaagaaatgcaggaagctggagcagagcagggtggtaaaacttgctgacacatcagagcaagacaaaggatagagagagggc

SEQ ID NO: 943597 - DNA, 120 bp, Artificial Sequence
  ENSG00000267686_0 (sequence is synthesized)
aggagagagagaaaacacaaggagttaaccaccatcgccggtgctctctcaaaggaagaggggttaacagatgaattcgcaaagacagctcttctggccaagaatatggatcatttgcag

SEQ ID NO: 943598 - DNA, 120 bp, Artificial Sequence
  ENSG00000267686_1 (sequence is synthesized)
cacagaggcaagttgatatatgtagcatcatgacagtgaagcaaattccacaaaaactgctaatggacggagaaatttcatggagaaaagctagcagacagagctggaataaaacaatgg

SEQ ID NO: 943599 - DNA, 66 bp, Artificial Sequence
  ENSG00000267686_2 (sequence is synthesized)
tagcagacagagctggaataaaacaatggatggagtctcgctctgtcacccaagctggggtgcaaa

SEQ ID NO: 943600 - DNA, 120 bp, Artificial Sequence
  ENSG00000267686_3 (sequence is synthesized)
ccacacctggctaattttttgtattttaatagagatggggttttaccgtattgcccaggctggtcttttactccatttatttttttaaaacaaccttaagcaaatgcatcataagtataa

SEQ ID NO: 943601 - DNA, 120 bp, Artificial Sequence
  ENSG00000267686_4 (sequence is synthesized)
agatgaagcagaacccgaggattcatatccaggaaaaggcctaggtttttctaagttaaaagatcagcaaataaatgtacatttaaatgttctaagctgaaataaaatgttgaaggtaaa

SEQ ID NO: 943602 - DNA, 120 bp, Artificial Sequence
  ENSG00000267686_5 (sequence is synthesized)
tctattgtacccacatcatcatcgtctcacacggaagagatgaggcctgtcatcaatccatcagattactcttttgatagtgcaaattggaattacagaaaggtttctttttggagaagg

SEQ ID NO: 943603 - DNA, 120 bp, Artificial Sequence
  ENSG00000267683_0 (sequence is synthesized)
gtgatttcagccacagaaatttgggagagatgagtctttggctcagcagaatgggcctaggtggagcttgaaattaatgaagagatgctgcttccagctttttgagcaagaagaagtttg

SEQ ID NO: 943604 - DNA, 120 bp, Artificial Sequence
  ENSG00000267683_1 (sequence is synthesized)
gcctccagttattacaccttgaggtcagcgggtatctcaagtctgagtagttataaaagtgagctgatgtagaaacaccaccaaagcaacgttttatctaaatatttcagatcccccatt

SEQ ID NO: 943605 - DNA, 120 bp, Artificial Sequence
  ENSG00000267683_2 (sequence is synthesized)
atttattatgattacccttttggtgtcatggaatgagatgatgagcttttcttaatgaagtatttcatagacatattttttccatttatcttggtgttggatgctatgtgacctgaatgg

SEQ ID NO: 943606 - DNA, 120 bp, Artificial Sequence
  ENSG00000267683_3 (sequence is synthesized)
caaatgaggaaatatttgtgcaactcctgaaatgcacacatctccccatgccagagtgcaggagcggacagggctttccctggcagcaataggagcccggtcctgagtagggcctctcca

SEQ ID NO: 943607 - DNA, 120 bp, Artificial Sequence
  ENSG00000267682_0 (sequence is synthesized)
ctctcatttttattacctacctgacccctgaagggtttgccttttccacctctcggtcagggtggggacaaatcagaaaatgctgagtgccaggctgagcagggtagactttgtctttga

SEQ ID NO: 943608 - DNA, 120 bp, Artificial Sequence
  ENSG00000267682_1 (sequence is synthesized)
aaggatgttaagaagggacttgacataaggaagtcaatggtatgtgggaaatagtgattgactgtgtataaggacttaaggggaagcgttcttcttttttttgaaacggattctcggtct

SEQ ID NO: 943609 - DNA, 77 bp, Artificial Sequence
  ENSG00000267682_2 (sequence is synthesized)
gggaagcgttcttcttttttttgaaacggattctcggtctgtcttccgggctggtgcgatctcatcccagcctcccg

SEQ ID NO: 943610 - DNA, 120 bp, Artificial Sequence
  ENSG00000249007_0 (sequence is synthesized)
gggggaataggcagggaggagggtctctaggcaaattccagggctagaggctgagacttagtgactgaggtgctgggggttgtggggctgtgacaggcagagggaggtgtcagataccag

SEQ ID NO: 943611 - DNA, 120 bp, Artificial Sequence
  ENSG00000249007_1 (sequence is synthesized)
gacaagggtgttgtgaatgctacctcctgcccctactcttgggatggctccaagggctgaggtgtgaatccccagtgtgctccaggaatggggctgtgtgagccaccgtgcccagctccc

SEQ ID NO: 943612 - DNA, 120 bp, Artificial Sequence
  ENSG00000249007_2 (sequence is synthesized)
tggccttaaaagtcatgtaatttaatgatcagaccccagtcacagccataggatacaaagaagcaaaggcaaagagccctgtgtcctgggcacggttacaggccagtgtagggaaagagc

SEQ ID NO: 943613 - DNA, 120 bp, Artificial Sequence
  ENSG00000249007_3 (sequence is synthesized)
ttctgcttgccagtgtgaagaacagaggagtttaggaagtgtgagtcaggctcagcttagtcaggcagagaccagtgggcatgggttacctgggggtaacgcgggccaggtgggcgggct

SEQ ID NO: 943614 - DNA, 120 bp, Artificial Sequence
  ENSG00000249007_4 (sequence is synthesized)
agcacctctgaccatccttctcttcacccaggtactactacaaacgggagatcctggaacgggtggatggccggcgactcgtctacaagtttggcaaaaactcaagcggctggaaggagg

SEQ ID NO: 943615 - DNA, 120 bp, Artificial Sequence
  ENSG00000249007_5 (sequence is synthesized)
aagaggttctccagagtcggaactgagggttggaactatacccgggaccaaactcacggaccactcgaggcctgcaaaccttcctgggaggacaggcaggccagatggcccctccactgg

SEQ ID NO: 943616 - DNA, 120 bp, Artificial Sequence
  ENSG00000249007_6 (sequence is synthesized)
ggaatgctcccagctgtgctgtggagagaagctgatgttttggtgtattgtcagccatcgtcctgggactcggagactatggcctcgcctccccaccctcctcttggaattacaagccct

SEQ ID NO: 943617 - DNA, 120 bp, Artificial Sequence
  ENSG00000249007_7 (sequence is synthesized)
ggggtttgaagctgactttatagctgcaagtgtatctccttttatctggtgcctcctcaaacccagtctcagacactaaatgcagacaacaccttcctcctgcagacacctggactgagc

SEQ ID NO: 943618 - DNA, 120 bp, Artificial Sequence
  ENSG00000242590_0 (sequence is synthesized)
ttgttgctttttgatatgattttcttgcctgagtgttggccggagggactgctggcccggcctcccttccgtccaggcagccgtgctgcagacagacctagtgccgagggatggacaggc

SEQ ID NO: 943619 - DNA, 120 bp, Artificial Sequence
  ENSG00000242590_1 (sequence is synthesized)
gacacacacccctgcctcaaggtgcagaggtggcagggatggctccgaagccagaaatgccttaaactgcaacgtcccgtcccttccccacccccatcccatccccacccccagccccag

SEQ ID NO: 943620 - DNA, 120 bp, Artificial Sequence; identical to SEQ ID NO: 690114
  ENSG00000242590_2 (sequence is synthesized)

SEQ ID NO: 943621 - DNA, 120 bp, Artificial Sequence
  ENSG00000242593_0 (sequence is synthesized)
gggtcttgatcatactaactagaccttttgagtgatttaactgcttaactgtgggcattgcttccattcttgactttttcactctagtttcctattttatagaaatatttgaacatagga

SEQ ID NO: 943622 - DNA, 120 bp, Artificial Sequence
  ENSG00000242593_1 (sequence is synthesized)
tttttagcaagtattatctgattattaaatgacaaattcagaacattattctataccacagcaaaaagctatgtttcctcccagaaacaccaatgattcaatttgtcgtcttggacaact

SEQ ID NO: 943623 - DNA, 120 bp, Artificial Sequence
  ENSG00000242593_2 (sequence is synthesized)
tacaaacacctaaacagctcacctgctgaaattcttaccttggactttgtgtagtcaacatttgtgtttccattaatttacattttttatgtccaattattcactctccatacttattca

SEQ ID NO: 943624 - DNA, 120 bp, Artificial Sequence
  ENSG00000242593_3 (sequence is synthesized)
aattcccaagcaacatagatgtttggttacactcaatacatatatatgtatttatgttatgtatatgtgtatacatgtatatgtatttacgtacatgcatgagtgtatacatgtgtaaga

SEQ ID NO: 943625 - DNA, 120 bp, Artificial Sequence
  ENSG00000242593_4 (sequence is synthesized)
tacatgtcatgcgcacatatacacatactatatacacatgtatgagtgtatacatgtgtatgatacatgccatgcacacatatacacatactatatacatgtgtacacatgtatatatat

SEQ ID NO: 943626 - DNA, 120 bp, Artificial Sequence
  ENSG00000242593_5 (sequence is synthesized)
agtaagaaaaataactacatctatacattagtttaatagagcatctactactggaattgtaaaatttcttttaaaatatttcagttgattgctagtttttaataatataaactgaaggaa

SEQ ID NO: 943627 - DNA, 120 bp, Artificial Sequence
  ENSG00000242593_6 (sequence is synthesized)
aataatataaactgaaggaatataaaggaaggggccacatcaaaacaccacttatgcgtcatttcaaatcagttatatcactcaagttttctaaaattataagtaaaattaaaaagagtg

SEQ ID NO: 943628 - DNA, 120 bp, Artificial Sequence
  ENSG00000242593_7 (sequence is synthesized)
gaaaatacatcagatgtaaaagaatgttttcagttcaaggacaaaattaattatctaaattatcccagcaggtttggtggtcttctttgtatgagccacctgcttttccctttcttgtcg

SEQ ID NO: 943629 - DNA, 120 bp, Artificial Sequence
  ENSG00000242593_8 (sequence is synthesized)
ccctggctttttacaatcgtgcccgtaaccctgtcattgaccatgttatcgtttaagagctttgtgattttagaaggatgtgtgtgggtcatgtttaagccattgtcagttgctattata

SEQ ID NO: 943630 - DNA, 120 bp, Artificial Sequence
  ENSG00000242593_9 (sequence is synthesized)
attacagtgattgttatctagtgaaagctttgctggcagaattccaccagaaggctaaaacttgcatccaagttttcattaagctattggggtttgtcattctatttaaaatgagattta

SEQ ID NO: 943631 - DNA, 120 bp, Artificial Sequence
  ENSG00000242593_10 (sequence is synthesized)
attctgtttttattaaagtgtaagcattattgaattccataactatcaaaaagggctttcaaatttatttaaaaatcagttaactaattaaagaccgtcacaaaccaggacattaaatca

SEQ ID NO: 943632 - DNA, 120 bp, Artificial Sequence
  ENSG00000242593_11 (sequence is synthesized)
catatgatgcatatttgtgatatcagttcttaaaacaggtatatacataaaatacagtattatttttctgaaccaaatttttttatgaaacagaaaatttctgaaaccatagactatttg

SEQ ID NO: 943633 - DNA, 120 bp, Artificial Sequence
  ENSG00000242593_12 (sequence is synthesized)
gtttaaaaaaaatcatgttatataacccagcaattgaactcctttgtatttacccaaaggagttgaaaacttacatccacacagagggatccactgcacagggaggtttatagccttggg

SEQ ID NO: 943634 - DNA, 120 bp, Artificial Sequence
  ENSG00000242593_13 (sequence is synthesized)
aagcagtggttgccagggtatgggaggaggaagcgataaatagatgaaacacagtggagttccagggcaaggaaactgttttataagatactgtattgctggatacatgtcattatacat

SEQ ID NO: 943635 - DNA, 120 bp, Artificial Sequence
  ENSG00000242593_14 (sequence is synthesized)
ttttttttttttgagatggagtctcctacataccactcttaatgggggttgttgttaagaggggaggctgcgcatatgtggggtaggcaatatgtgggaaatctctatgtcttcctctta

SEQ ID NO: 943636 - DNA, 120 bp, Artificial Sequence
  ENSG00000242593_15 (sequence is synthesized)
aggcaatatgtgggaaatctctatgtcttcctcttaattttgctgtgaacctaaaacttctcttaaaactaatgtcttttaataaaaaaacatgttttactttgtgatcagtaaaaatta

SEQ ID NO: 943637 - DNA, 120 bp, Artificial Sequence
  ENSG00000242593_16 (sequence is synthesized)
tgcccaagattatacttagatacataactagttacaaatcattacaataattcccctgagaaagtttacttttgttcactattgtttacatacaagaaaaagttaatggttttataagga

SEQ ID NO: 943638 - DNA, 120 bp, Artificial Sequence
  ENSG00000242593_17 (sequence is synthesized)
agatatttagtaatcagaattgaatatgtgtatactacatttgatcagaaaatacctaaaattattacctgggaatattggttaattcattctattgtgtatgcacccatgtgtgatgaa

SEQ ID NO: 943639 - DNA, 120 bp, Artificial Sequence
  ENSG00000242593_18 (sequence is synthesized)
gggagaagggagatgaaataataccagcatcctgaacctgaatgtccagcttcgccttgttctttgtggattataagaccattgattaaataaatcctttcatcaaaattatcttgtaag

SEQ ID NO: 943640 - DNA, 120 bp, Artificial Sequence
  ENSG00000242593_19 (sequence is synthesized)
tagaagttcaacaaataacttgcttcacatgtgaagacacaaaagtacacaaatcaaaaccaaaaaacctaaggctacctgatggcaagataacacttggagagctagaaacgcgaggtt

SEQ ID NO: 943641 - DNA, 120 bp, Artificial Sequence
  ENSG00000242593_20 (sequence is synthesized)
tttatttttctgtatctagcgtttatatcgacttccaaaattggttgtttgtatcctagtctgtaaaatggtgcggatataaattaaacttaggagagtgttgtgatgttttcaccagta

SEQ ID NO: 943642 - DNA, 120 bp, Artificial Sequence
  ENSG00000242593_21 (sequence is synthesized)
aacacttaggtccaagaatgaaggagaactaatacatattcactgtctaatatataccaacactaagcatatatgtgatgatatttaatgtccttggccactcctcagacttcctggatg

SEQ ID NO: 943643 - DNA, 120 bp, Artificial Sequence
  ENSG00000242593_22 (sequence is synthesized)
tgtctcctctcacaagtggaatttataaatagcaagggatggttgatttttaaccccagttcaagaaagctaagttaaatgctctgtaaggactctaaacgtgagtcattaataaaacaa

SEQ ID NO: 943644 - DNA, 120 bp, Artificial Sequence
  ENSG00000242593_23 (sequence is synthesized)
ttgctgatatattagaagagtacaaactaggatcacctagtcaagagtgaattatttttataagcaatgatgtttaggttttacaaaattacaaacaatttatttcatagtctatccttg

SEQ ID NO: 943645 - DNA, 120 bp, Artificial Sequence
  ENSG00000242593_24 (sequence is synthesized)
ttataaaatgaacaaaacataatctttaattattaaacaaatttagagatcaaatagataagctttacatttagcaactgcaccaactggcagacatttgggctacactgacaatatgtg

SEQ ID NO: 943646 - DNA, 120 bp, Artificial Sequence
  ENSG00000242593_25 (sequence is synthesized)
aaatatgtgctcaagtgtatatttaataaaacacaaggattttatggtataatgcattgtgttaatgcatttggttggttccagtgtgaactacatatactgtattcatttcaacagtaa

SEQ ID NO: 943647 - DNA, 120 bp, Artificial Sequence
  ENSG00000242593_26 (sequence is synthesized)
acttcctaaataaaacacacaaacatttaagcaacatatagcattatgacgttacccttaaaataatctctaatacagtattttaaatccatattccagaaaaaagaaactaccatctaa

SEQ ID NO: 943648 - DNA, 120 bp, Artificial Sequence
  ENSG00000242593_27 (sequence is synthesized)
atccagttattccatctgacttggtagcagtgatgtttggagtttaggacctaaaggtgaaatggggaaaatctgggtgctcggaaagacaccagaagcacacagaagaagatcatatga

SEQ ID NO: 943649 - DNA, 120 bp, Artificial Sequence
  ENSG00000242593_28 (sequence is synthesized)
agacacaacaagaaggtgactagctgcaagccaagaagagaagcctcagaagaaatcaaacgtactagcaccttgatcttggaattccagtctccaaagctgcgagaaaataaaattctg

SEQ ID NO: 943650 - DNA, 120 bp, Artificial Sequence
  ENSG00000242593_29 (sequence is synthesized)
gccccagtacgttgaagaagaaggtgaagaagatctcatccagaaagccgtgcattccgaagaaaagaaagcggggatggtgtttcccttcctgtttgctgatccactggggctgtccca

SEQ ID NO: 943651 - DNA, 120 bp, Artificial Sequence
  ENSG00000242593_30 (sequence is synthesized)
gaaagagaactacaacgctactctttcccatgccttgcttgtccacaggtcataggaaatgaaacagactgctgttttcatgagtgacctgttctcgagcctaagaatctcttgggccac

SEQ ID NO: 943652 - DNA, 120 bp, Artificial Sequence
  ENSG00000242593_31 (sequence is synthesized)
ccagccccacagaggccagtaggaggtcaactctccacctccctaaaaaaaaaaaaaacgagtgtgcgagaagtatgttgtaattgaagtagcatactgcctgacacccaagaggttgct

SEQ ID NO: 943653 - DNA, 120 bp, Artificial Sequence
  ENSG00000242593_32 (sequence is synthesized)
tttcacctcctgccatgattctgaggcccccagccatgtggaactggagaagggagatgaaataataccagcatcctgaacctgaatgtccagcttcgccttgttctttgtggattataa

SEQ ID NO: 943654 - DNA, 120 bp, Artificial Sequence
  ENSG00000242593_33 (sequence is synthesized)
taggacctaaaggtgaaatgatatatgtacatatatacatatgtactcacacagacacatacacacacacacatatgtatgtgtgttgcctggaaagcaagtgtgtagaaatcgtgggat

SEQ ID NO: 943655 - DNA, 120 bp, Artificial Sequence
  ENSG00000242593_34 (sequence is synthesized)
taggattaggattatggggatctaactgcgtccatgtcattcttggagaaacagttctaagaacaaatgctgaaggcaaacaaatgatgcattctcaaatgaaagaggtctgaactgaga

SEQ ID NO: 943656 - DNA, 120 bp, Artificial Sequence
  ENSG00000242593_35 (sequence is synthesized)
ttgtgcccatcaattcctgagaagagaattttaacaaaacgcagctgaaagagatgcaagctaaagccaggccacaaattttatttacttaaaaatatcagggagcatccatttttcctc

SEQ ID NO: 943657 - DNA, 120 bp, Artificial Sequence
  ENSG00000242593_36 (sequence is synthesized)
tttcaacatgacatgtaagacaaagcatactgttgaaaagaaaaataaaatgatgttttaataactcaaagaaggaacacgtacatgaaagtggtttctcactggaatctgcaatagtaa

SEQ ID NO: 943658 - DNA, 120 bp, Artificial Sequence
  ENSG00000242593_37 (sequence is synthesized)
caaaggagacagtgagcatcaaacatctgggttgtgggctcccatacacttccatgagattatccagaaaaccatgaattcttgggtgagtgggcaattttcctgataagagtggatggc

SEQ ID NO: 943659 - DNA, 120 bp, Artificial Sequence
  ENSG00000242593_38 (sequence is synthesized)
tacaagaaaggcatcaccccaacactggccagactttcacctataatcttgggttagttgtctcattgagtagaacagaaaaatagcatcaatatgaattattttttaaggaggtaactt

SEQ ID NO: 943660 - DNA, 120 bp, Artificial Sequence
  ENSG00000242593_39 (sequence is synthesized)
gaaaaaaaaaagaaaaaagagaaaaaccactgaccataaatggcttaatctccaggcccagcctccagtgttgctccagattcaaactgacatttgatgacaatataagacattcatctt

SEQ ID NO: 943661 - DNA, 120 bp, Artificial Sequence
  ENSG00000242593_40 (sequence is synthesized)
aactgacatttgatgacaatataagacattcatcttttgtgaatctattgtgagaaatagggaatctatttctctatggttttttagtagtgtgggccaaactgtgtctcttctccccaa

SEQ ID NO: 943662 - DNA, 120 bp, Artificial Sequence
  ENSG00000242593_41 (sequence is synthesized)
agttaacgtgctgaaacactaaccttcagtacttcagaatgtgatattactgggaacagggcctttaaagaggcaattaagtgaaaatgaggcaatgaaggtgggccctaatttaatttt

SEQ ID NO: 943663 - DNA, 120 bp, Artificial Sequence
  ENSG00000242593_42 (sequence is synthesized)
agcaaaataaccctattagcaaacaaatgcatacaaaatctctgtaaatacagcaggtttcctttttaaaaaaactctttattttgaaaaattatagttctacaacaaataataaaaaag

SEQ ID NO: 943664 - DNA, 120 bp, Artificial Sequence
  ENSG00000242593_43 (sequence is synthesized)
accagttttacatgtattagtttgttctatgcaattttcttgcatgtgtagacccatgttaccactaccatagagaaaatccagaatcattccatcaccagaggctccttcatgctgtct

SEQ ID NO: 943665 - DNA, 120 bp, Artificial Sequence
  ENSG00000242593_44 (sequence is synthesized)
ctttatactcattcttacctctttctctagctcatccctaacccctcacaaccattaatctgttctccatctctacaaccctgttatttcaagaatgccatataatgagaatcaaaatta

SEQ ID NO: 943666 - DNA, 120 bp, Artificial Sequence
  ENSG00000242593_45 (sequence is synthesized)
agtgaacttttgggactattttcactcagaataattctcttgaaattcagccaagttattgtgtgcaacaataactcattccttcttattgcggagtagtagtccatgatatggatgcac

SEQ ID NO: 943667 - DNA, 120 bp, Artificial Sequence
  ENSG00000242593_46 (sequence is synthesized)
tacaggttccttaaccacttactaggatattacagttgtttacagtttgaagctattatgactaaagctgacgctcacatttatatataagtttttatacagaaatatgtctccatttct

SEQ ID NO: 943668 - DNA, 120 bp, Artificial Sequence
  ENSG00000242593_47 (sequence is synthesized)
ctggaaaaaaaatcccaagggtacaattgccgagtcaaatgttaagtgaatgtttactttaaaagtgttatattgttttttagagtgggtgtaccattttacattaccatcagcaatgta

SEQ ID NO: 943669 - DNA, 120 bp, Artificial Sequence
  ENSG00000242593_48 (sequence is synthesized)
taagaggtcctgtttctcagtatcaggcaatagataatgtatgtgccatgtatacgtttccagaacatgaaagtataggaatcttcttttattttattatgttagcatacccttcacact

SEQ ID NO: 943670 - DNA, 120 bp, Artificial Sequence
  ENSG00000242593_49 (sequence is synthesized)
caaacctagctgtgtgctgaaaaggtgattctctggaatttaaggaacttaaaacccctgatttatagcaactgcatattttccagttgtggctatttcccaccgtggttttcaaactac

SEQ ID NO: 943671 - DNA, 120 bp, Artificial Sequence
  ENSG00000242593_50 (sequence is synthesized)
ccacatgacttaattgaaagtgaattaaggaaaaaaatactcacaagtagttctcacacagttctcactggcacaagccagttccagcacactgctgcacatacacaaacatatgcacac

SEQ ID NO: 943672 - DNA, 120 bp, Artificial Sequence
  ENSG00000242593_51 (sequence is synthesized)
atgcatacacacatatatacacacatgcatattcacagacacataaaaacacagatgcatagagacaccagatttatctccttcattcgtacagatggaccattaaataagatgacaaga

SEQ ID NO: 943673 - DNA, 120 bp, Artificial Sequence
  ENSG00000242593_52 (sequence is synthesized)
tgacaagatgaatttaatagcatgacataatcaaatatagagacagatataaaatacatagagtatgaaactatgaaacaattttggaaataaaagtgtatattaatgtgcaaatatatg

SEQ ID NO: 943674 - DNA, 120 bp, Artificial Sequence
  ENSG00000242593_53 (sequence is synthesized)
atgagactgaaaacaccaaaatgttgatactgtttatttctgggtagttggatgacaagtgaatttagtttttctgattgtgcttttctttatctttaaggaacatgttttcttttaatc

SEQ ID NO: 943675 - DNA, 120 bp, Artificial Sequence
  ENSG00000242593_54 (sequence is synthesized)
ttacatatatatgtaattaacatatattgtataatatatatcacatatattccacatatatggaatatatattgtgttttaaagtttaaaatgtgaggagaccacgtcaatgaggaactt

SEQ ID NO: 943676 - DNA, 120 bp, Artificial Sequence
  ENSG00000242593_55 (sequence is synthesized)
aatgaggaacttggaaccaagtaaaacatggatggatatgtgacaatattgtggaatagagtgaaaattcagctcagaaatagtgaagcttattttaaatggaaactaaaataagatcat

SEQ ID NO: 943677 - DNA, 120 bp, Artificial Sequence
  ENSG00000242593_56 (sequence is synthesized)
gtggattaaattagagatatttccaggagaagatatgtttgagcataactttcctctcctccctatctgaggaaaattctggaagagacttcatacgtatctatatttgtatctatgtca

SEQ ID NO: 943678 - DNA, 120 bp, Artificial Sequence
  ENSG00000242593_57 (sequence is synthesized)
gaaaaggagagaagtaaggcctgggaggcagcttgctgttgtgaaaggaaaatgaagtcagatgatccttaatttggatactctttcttaccatttggggcaagttacttcctcaaagcc

SEQ ID NO: 943679 - DNA, 120 bp, Artificial Sequence
  ENSG00000242593_58 (sequence is synthesized)
tcaatttcttcttctctagcatgagattaatatttgtgattcatcagaaggttaaacaaagcaatttttacaaagtaaaaagcaaattttacaaagaaggctttcattttgttctgtcct

SEQ ID NO: 943680 - DNA, 120 bp, Artificial Sequence
  ENSG00000242593_59 (sequence is synthesized)
attttattctaaattatggtatgttacccaaatcccagtgggagcttttgtgagtgaatgacattaaaaaattactggaacaggaaatatttccctttaatgaactagatgagatttttt

SEQ ID NO: 943681 - DNA, 120 bp, Artificial Sequence
  ENSG00000242593_60 (sequence is synthesized)
gatggtgtttcccttcctgtttgctgatccactggggctgtcccagaaagagaactacaacgctactctttcccatgccttgcttgtccacagctttttctttggtcttttggaacactt

SEQ ID NO: 943682 - DNA, 120 bp, Artificial Sequence
  ENSG00000242593_61 (sequence is synthesized)
attttgggggaagcaaactccatgtaagtagtgcaagcccaagacttcatgctgtgaggaagcccaaggtagctacaggaagagaagcagatgcctgaagcttctggctgttcatctatt

SEQ ID NO: 943683 - DNA, 120 bp, Artificial Sequence
  ENSG00000242593_62 (sequence is synthesized)
caagcccaggtaccagatttgaatgaagaagctgtcagaggactttatcctcagctgctctgtggctgaaactctatgaaggactccaagctgaacataccatctgcagaaccatgggtg

SEQ ID NO: 943684 - DNA, 120 bp, Artificial Sequence
  ENSG00000242593_63 (sequence is synthesized)
atgaaaaagtctgacattggaataatgcagaacacttgattcaggtcatagaagaagcaacactttgggcacagcacaacacaaccaagtgagcactggaaacctggtcataggaaatga

SEQ ID NO: 943685 - DNA, 120 bp, Artificial Sequence
  ENSG00000242593_64 (sequence is synthesized)
aacagactgctgttttcatgaggtaatattgttcctcatctcattagctttctttgtttggatggcatgaattttgaccaaaacacgtttttttttcccaagtagttgtaagctgctaac

SEQ ID NO: 943686 - DNA, 120 bp, Artificial Sequence
  ENSG00000242593_65 (sequence is synthesized)
tcaaaaaggaaatttaataataaatatattggtatttttatttatcacattgaagttttcatttttctttgagattttagctaaacgtcagtgataaatatgatgaaaaaacaaatgatg

SEQ ID NO: 943687 - DNA, 120 bp, Artificial Sequence
  ENSG00000242593_66 (sequence is synthesized)
gatggttcagaaaaatcatgtcattttattttcctgtgtatgtcttagtttcttttttgactgtgtgattgtttttcttagaagcatttacagagggaaataaggacactcaccaaatag

SEQ ID NO: 943688 - DNA, 120 bp, Artificial Sequence
  ENSG00000242593_67 (sequence is synthesized)
ggctaatttgaagaaggacacagctgacttagtaggaagaaggcagaagaattatctcctggtaatcaagactctgaaaataagacttaagataaaagactggatacatgcaagaacaga

SEQ ID NO: 943689 - DNA, 120 bp, Artificial Sequence
  ENSG00000242593_68 (sequence is synthesized)
atattttaccatttgaaacataaataaaaatgacttccaggcttatttgattacagactgaattgctctatcataggatgacaagcaatgacagataggttccccataaagaaaagtctg

SEQ ID NO: 943690 - DNA, 120 bp, Artificial Sequence
  ENSG00000242593_69 (sequence is synthesized)
tgagactccatatttcctgtaaaagatgatatgaggaaaccgggcagatttttctttcattcatactcttttatatgggggcaatagtactgtcaatctctattatatcattaggttacc

SEQ ID NO: 943691 - DNA, 120 bp, Artificial Sequence
  ENSG00000242593_70 (sequence is synthesized)
tggaaggtcttatgtttggcagtggaatgtaagttttagggtaatttttctgagtggcaacccaaggccaatgtagtaaattttgaaagatcaattaaattacagaaaaggcttgcataa

SEQ ID NO: 943692 - DNA, 120 bp, Artificial Sequence
  ENSG00000242593_71 (sequence is synthesized)
cataaatgtgttctgcccacttgtcaacatgggtaaagatattaatattgtaacaagtgcaatgacagaatttcattttcagactccagacttcttaacagtagcagtggcaaggcatca

SEQ ID NO: 943693 - DNA, 120 bp, Artificial Sequence
  ENSG00000242593_72 (sequence is synthesized)
aaccagtgagttttgcttctttaatagtttctataaaacttgacagcctttctgtacattgcaaatactctaaaaccacattgactttatacattagctaaactgcctaggaactttttc

SEQ ID NO: 943694 - DNA, 120 bp, Artificial Sequence
  ENSG00000242593_73 (sequence is synthesized)
tagatacaactaattcctgaaggtgaagaagacagtgtgagtattgcaagatcatggatgcagttcttcgaggtaaaggctgttttactcacatttgtgatgtcctgtttgtcacataaa

SEQ ID NO: 943695 - DNA, 120 bp, Artificial Sequence
  ENSG00000242593_74 (sequence is synthesized)
agaaagtcaatagatgcttcactgattgaatgtataaagctgtgagctatgaaatttctctgaagaaaaaggtgaaaagtctgaattcttcttgtgcacctcaagtgatagtcattgtta

SEQ ID NO: 943696 - DNA, 120 bp, Artificial Sequence
  ENSG00000242593_75 (sequence is synthesized)
agtaaacctaagtggcatgaaagtgtagggtcaaggatgataaaagggacattttaaaattatatttaaacaggaggtgccatggcataatattttcagtttagaatcaaaaaagaaaat

SEQ ID NO: 943697 - DNA, 120 bp, Artificial Sequence
  ENSG00000242593_76 (sequence is synthesized)
gactttttctgccaaagacaaaagtgtaaatctgtttccttctccaccatatgccacaaataaaaaaaaaaaaaaatcacagatgtcaaagagaacacaggctggaggaagccatccagc

SEQ ID NO: 943698 - DNA, 120 bp, Artificial Sequence
  ENSG00000242593_77 (sequence is synthesized)
ttttccaccacgaaactgcagctgccgtacataaagaaggaccagagcgacgtgtggccgctggttgtcccgtccccctgccccagtacgttgaagaagaaggtgaagaagatctcatcc

SEQ ID NO: 943699 - DNA, 120 bp, Artificial Sequence
  ENSG00000242593_78 (sequence is synthesized)
actggaaacctgttctggatgttgggaagcagaagaacaaggtgccagcagatccagtgtctgtgagagctgctgtcagcttccagatggtgccttattgctacatcctttaaggtgttg

SEQ ID NO: 943700 - DNA, 120 bp, Artificial Sequence
  ENSG00000242593_79 (sequence is synthesized)
ggaacacttggcagtggtagagcgccagcacgtactgcagcgccaggtccagcgcccctggcgccaccgcgacccccgccccgccgcccaggctgagtagtagcgcctggcccgctaggg

SEQ ID NO: 943701 - DNA, 120 bp, Artificial Sequence
  ENSG00000242593_80 (sequence is synthesized)
ctcctgggctcaagggatagtctcatcttagtttcctgagtagctgggactacaggtcataggaaatgaaacagactgctgttttcatgagaagcatttacagagggaaataaggacact

SEQ ID NO: 943702 - DNA, 120 bp, Artificial Sequence
  ENSG00000242593_81 (sequence is synthesized)
gatattgaaagttatcaggatattcttcccactccaagatccaggaaagtaacacatcaatacaggacaaggagatgcttcaacatcagaaatgcatgggagagtacttccggaagacct

SEQ ID NO: 943703 - DNA, 120 bp, Artificial Sequence
  ENSG00000242593_82 (sequence is synthesized)
gaaatgctgccttaaaatagaaaggattgttgagctgaagactagaagcagcagatgcaagaaagttctctgctttacctctatttgcctaaaaacaggatatcgatttataaagacaaa

SEQ ID NO: 943704 - DNA, 120 bp, Artificial Sequence
  ENSG00000242593_83 (sequence is synthesized)
atgtgccccagccccacttctatcagggagaaaaacagttaaccagtgaggacgacttaggacctttactggcctggagatggtaccagaggagtttatattaacaaacttgactaacta

SEQ ID NO: 943705 - DNA, 120 bp, Artificial Sequence
  ENSG00000242593_84 (sequence is synthesized)
gcctttatctgtcattatttgtctttccccaagatgctatcctatagaagctcaaagttattttcctttgtattgtcacttctctaaaaatttactgttctttgttgaagatgctgtata

SEQ ID NO: 943706 - DNA, 120 bp, Artificial Sequence
  ENSG00000242593_85 (sequence is synthesized)
agctggatttccaagctgcctctttcagaattattcattccctggtgcctcacatgtatatatgtaatatatgtattaataaatcttgtttgtttttctcttattattctgttttttgtt

SEQ ID NO: 943707 - DNA, 120 bp, Artificial Sequence
  ENSG00000242593_86 (sequence is synthesized)
agggggctgttccatctaagaacatatgggggttattcttcccctacactcttattcttccatatttgcatatatcaaaatctttgttcattgttgtggaattgatttttttctttcatg

SEQ ID NO: 943708 - DNA, 120 bp, Artificial Sequence
  ENSG00000242593_87 (sequence is synthesized)
tatatcttccaagtttattaacaaacaataacaaagcttttctttcagctgatacttctgtccttaagaaatctaagacaaaagttaaagttagataaaggaagatttgctgtcatagta

SEQ ID NO: 943709 - DNA, 120 bp, Artificial Sequence
  ENSG00000242593_88 (sequence is synthesized)
agtgtggcagcatgatggggaaatcagagtttcttcctaagtaaaagtatggatgagcccctaaaatcccaaagaaaaagctgcagggcagctgggaggaacactgggagggcagggtaa

SEQ ID NO: 943710 - DNA, 120 bp, Artificial Sequence
  ENSG00000242593_89 (sequence is synthesized)
ttgccaacaataaagcaggtgaatgtttttatgctaaccaaaaatagtgcttcccaaacttttccacaccttagaaacatctcgggagctttttaaatatcccaatgcccggtctcattc

SEQ ID NO: 943711 - DNA, 120 bp, Artificial Sequence
  ENSG00000242593_90 (sequence is synthesized)
aataccaattatatgagaacatctggggtagaaggctggtattagtatctttttaaagtatactaggtgactccaaagtgcagcataatttgggaactgctattctgtaataagattctt

SEQ ID NO: 943712 - DNA, 120 bp, Artificial Sequence
  ENSG00000242593_91 (sequence is synthesized)
taaaaatactgactgtattattttgactacactccatatattaatagtttatatttacactggctctttaattttccttatccaggctaaggaaaacttttgaggctgaagattatgatc

SEQ ID NO: 943713 - DNA, 120 bp, Artificial Sequence
  ENSG00000242593_92 (sequence is synthesized)
aggcacattgcagtgaggtggcttcaatgaaccctgactgttgcttttgtttttccttccttatttgaatagccttaagctacttatttgaactgattgtcctaaacgcgaatgtttttg

SEQ ID NO: 943714 - DNA, 120 bp, Artificial Sequence
  ENSG00000242593_93 (sequence is synthesized)
catgatttcctccctgctcaaattgtctgatttggttctacctcttgtaatccttgcaaaagtgactaaagtccagggacatgcttgtggagtgacttcctccacttggtgtcattcaat

SEQ ID NO: 943715 - DNA, 120 bp, Artificial Sequence
  ENSG00000242593_94 (sequence is synthesized)
taggtaaagattaccaacagcaactgcttctatcctttgcaatttactcacagtagctacctcatatgcttcatttacatgaagttattttgtttaccaacctctggcgtaggtccccaa

SEQ ID NO: 943716 - DNA, 120 bp, Artificial Sequence
  ENSG00000242593_95 (sequence is synthesized)
gtcttaatgcacactttaagtgtcctaaatagacaaaacaactgtttccttgaggtggcattagataacgtaatggtaaagctcttcaagagtgtttcttaaagttcctgctcatttgca

SEQ ID NO: 943717 - DNA, 120 bp, Artificial Sequence
  ENSG00000242593_96 (sequence is synthesized)
cttccaagtttttattagatttcaaagcatcatgcatttacatatatcaatttctaagtactatgaagtagtttattaaattgaatttctctgatgtttcctgtctcagttatatgccaa

SEQ ID NO: 943718 - DNA, 120 bp, Artificial Sequence
  ENSG00000242593_97 (sequence is synthesized)
tttcctgtctcagttatatgccaatttcaaaacaaaatattaactcaaaatttgataatttgatattatccaaatattcatccttacctgtatattaataatgtccattaaatttatata

SEQ ID NO: 943719 - DNA, 120 bp, Artificial Sequence
  ENSG00000242593_98 (sequence is synthesized)
ttctaaagatattcccatcttagttataattagttcatcaaaaaggttgtattagaattattttttggctatcattcacatacctgattatttacaggaaggatttgaatgacaaataca

SEQ ID NO: 943720 - DNA, 120 bp, Artificial Sequence
  ENSG00000242593_99 (sequence is synthesized)
gcaatatccagagacatacagtgaggaaggtgtgatgtagatagaagaaagaagagagccatactaaaaaacactggccttgaaaagcaaagagcaattaacaggggaagagaattattc

SEQ ID NO: 943721 - DNA, 120 bp, Artificial Sequence
  ENSG00000242593_100 (sequence is synthesized)
aattttcagaacttaaaaaaaaatacacaaaatcctctgaattttgtggtagtcaaattaaaagagaagtgacataaaatcataataatctcattagatattaaaaggaagcatgccaac

SEQ ID NO: 943722 - DNA, 120 bp, Artificial Sequence
  ENSG00000242593_101 (sequence is synthesized)
tcactacaaaggccaacatttttgctgattctgatgtctacatgatgtgctgagtctgatgtctaagagagatgtcatcatataaagtatgtttaatcgtattattacatatgtagaaaa

SEQ ID NO: 943723 - DNA, 120 bp, Artificial Sequence
  ENSG00000242593_102 (sequence is synthesized)
ttaatgtaaatcagtaataaaagattaaatcacaattgttccatggcagttagaatgcactgtaaagcaactcgtatagctgtctagtatttttacattatgtccagataaaactcagag

SEQ ID NO: 943724 - DNA, 120 bp, Artificial Sequence
  ENSG00000242593_103 (sequence is synthesized)
aactccgttctaaagagaaacattttaccatgtctcataggctattttttatagtaaatgatttcagactaattctctcatcttttttacaacgtagagtttgtgtgtttgtttgttttc

SEQ ID NO: 943725 - DNA, 120 bp, Artificial Sequence
  ENSG00000242593_104 (sequence is synthesized)
ttttgctacaaaataaccatgaccatatttgtagttagtagagaagtcacacacataaatgaatcttgtatatagtacagtggccatatttattcaccaagataagattgatataatatg

SEQ ID NO: 943726 - DNA, 120 bp, Artificial Sequence
  ENSG00000242593_105 (sequence is synthesized)
taacaataaaaataacagttgggttaatgcacacttctttattgttgcagttagcaaataatgcaatgagcagctaaaggaggaagagaattattcaattttcagaatctgaaaaagaaa

SEQ ID NO: 943727 - DNA, 120 bp, Artificial Sequence
  ENSG00000242593_106 (sequence is synthesized)
tacatttagtcaaatgcggttttgtatggactcatgtcttaaaggtacaaccaagtcttctcttccctgggctgacttataatttgtttatttattagagtttataattgagggtaatca

SEQ ID NO: 943728 - DNA, 120 bp, Artificial Sequence
  ENSG00000242593_107 (sequence is synthesized)
tggtatttatcactcaaactgacactttgtggactgaaaagggtcttctattaattatgaggccaggaaaatagatataacttgggactgtcctggaaaaaaggaatgcagattgtgaac

SEQ ID NO: 943729 - DNA, 120 bp, Artificial Sequence
  ENSG00000242593_108 (sequence is synthesized)
acagaaaaattaatttgctttcaattgatcagctatttaaagaaagctttttggtgtctacggcttctttctgaagtgtttaatttacagatggttcaattagagctctgttgcaaaatt

SEQ ID NO: 943730 - DNA, 120 bp, Artificial Sequence
  ENSG00000242593_109 (sequence is synthesized)
ttggacctaagagaatgttcacactctcagctttatatgccaggatgccctttcctggattattttcatccttcagttcacagcggaattatcatcttcttacataagcttcttctgctc

SEQ ID NO: 943731 - DNA, 120 bp, Artificial Sequence
  ENSG00000242593_110 (sequence is synthesized)
tatttaaagtaatcctacaatttgagctccaaaataaataaggagagcactcctctttccaagaatgtaaacaaataaatgtagaaggggtggtatagttagaaaagtaccattctaaaa

SEQ ID NO: 943732 - DNA, 120 bp, Artificial Sequence
  ENSG00000242593_111 (sequence is synthesized)
tcattgtactaataattaatttaggtaataatcatcagtggaagccaaaaccatttgatgagagttggttagcagtaaaatatttacatagtctcacagattgtctgcacagaacagtta

SEQ ID NO: 943733 - DNA, 120 bp, Artificial Sequence
  ENSG00000242593_112 (sequence is synthesized)
ataattacacaggaaaaaaattactgcagttaaacaaaatctgggcagtatccatttaaccaagtgatcaaagttaatatcatcgaaaaatgagaaaaactattatatgattcatgattt

SEQ ID NO: 943734 - DNA, 120 bp, Artificial Sequence
  ENSG00000242593_113 (sequence is synthesized)
gacacactgaggacacagtattacttatgtaatatttattttaaaatacctaattcaaatctaaccattacaaaacaaacccaggttgaagacaatctcttcaaaaatgtcaatggcaca

SEQ ID NO: 943735 - DNA, 120 bp, Artificial Sequence
  ENSG00000242593_114 (sequence is synthesized)
aaagacaacgaaagtctaaggaatagttcaagattaaaggatactaaagacactgtacaactaaattcaatgcatgatcctaaagaaaaaaaattctataaaggacattattgaaacagt

SEQ ID NO: 943736 - DNA, 120 bp, Artificial Sequence
  ENSG00000242593_115 (sequence is synthesized)
tatcatatgaactctttgctagatcataatattatatcaaaggtaaaattcctgaaatttgaaattatagtgtgattaagagaacgcctttttttcttaggggatacatgctgaagtatg

SEQ ID NO: 943737 - DNA, 120 bp, Artificial Sequence
  ENSG00000242593_116 (sequence is synthesized)
taatgatgaaggattatgatctcttactttcaatggtttaaaaacctactctcagtgtttcataaacacgaataaaaataatacattagtctgctcaggcggccataacaaataccatag

SEQ ID NO: 943738 - DNA, 120 bp, Artificial Sequence
  ENSG00000242593_117 (sequence is synthesized)
gctaggtggctgaagaaatagaaatttagatctggaggctagaaatctgagggcaggatgctagcatagtcaggctctggtgaaggctttcttcttggagtgcagagagccacatgctca

SEQ ID NO: 943739 - DNA, 120 bp, Artificial Sequence
  ENSG00000242593_118 (sequence is synthesized)
ctatgtcctcatatggtagaggcagagctttggtgtttctctttttaataaagatactaatatcaccatgaaagccccacctgcatgactttatcaaaatctaattaccttctagaggcc

SEQ ID NO: 943740 - DNA, 120 bp, Artificial Sequence
  ENSG00000242593_119 (sequence is synthesized)
ccatgtctaaataccatcacattgggggttatgaggaggggcacaattaaattagtatcaaataactatcatagtatttaagtttaatatatgtttaaagatatttaaacatatatgtgt

SEQ ID NO: 943741 - DNA, 120 bp, Artificial Sequence
  ENSG00000242593_120 (sequence is synthesized)
atattttatatatatatacacacacagagagagaacaggagaggagaagagtggggagaacaggaaaagagagggaagagaaggagagaggagaggagaggagaggactcagtaggagtc

SEQ ID NO: 943742 - DNA, 120 bp, Artificial Sequence
  ENSG00000242593_121 (sequence is synthesized)
agagaggagaggagaggagaggactcagtaggagtcctcttgctactgagaagaggagtagaagcgacaacaatgtgactgatatggtttggctatgtcctcacccaaatctcatcttga

SEQ ID NO: 943743 - DNA, 120 bp, Artificial Sequence
  ENSG00000242593_122 (sequence is synthesized)
gactcggtgggaggaaattgaattatgagggcatgattttcccattttgttcttgtgagagtgagtaagtctcacaggatatgatggttttataaagggtggttcccctgcatatgctct

SEQ ID NO: 943744 - DNA, 120 bp, Artificial Sequence
  ENSG00000242593_123 (sequence is synthesized)
ccagtctcaagtatttcttcacagagtatgaaaatgaatgaatacagtaaattgatacgcagagagtggggtgctgctgtaaagacatgcaaaaatgtggaagtgactttgtaactgggt

SEQ ID NO: 943745 - DNA, 85 bp, Artificial Sequence
  ENSG00000242593_124 (sequence is synthesized)
aaagacatgcaaaaatgtggaagtgactttgtaactgggtaacaattagagactgaaacagtttgggtgggtgctcagaagaaga

SEQ ID NO: 943746 - DNA, 120 bp, Artificial Sequence
  ENSG00000242593_125 (sequence is synthesized)
gttgaatggctttgacccacatgctgatagtgatatgaacaacaaagtccaggctgaagtggtctccatgtaagaccttgccaccatgtaagacgtgcctttgctcctccttcaccttct

SEQ ID NO: 943747 - DNA, 77 bp, Artificial Sequence
  ENSG00000242593_126 (sequence is synthesized)
gtaaacccactaagccttggtatgaaaatggactaatacagtgacaaaatattaacaatgtggaaatataggtgaat

SEQ ID NO: 943748 - DNA, 120 bp, Artificial Sequence
  ENSG00000242593_127 (sequence is synthesized)
atattgaaagttatcaggatattcttcccactccaagatccaggaaagtaacacatcaatacaggacaaggagatgcttcaacatcagaaatgcatgggagagaagaaccctgtgacttg

SEQ ID NO: 943749 - DNA, 120 bp, Artificial Sequence
  ENSG00000242593_128 (sequence is synthesized)
gagaagctgttactctgtcctacattgttcctgtgagaaacaatacattacaaaagaatagggctgtgtctcaataaagctttacttaggggtattgaattttgaatatcatataatttt

SEQ ID NO: 943750 - DNA, 120 bp, Artificial Sequence
  ENSG00000242593_129 (sequence is synthesized)
catgtgtcataaatattatttttaaagtgttttttcaactctttggaaaaaaagttcttagctcatctaccatacaaacacaggtagtaggctggatttggcccatgggctggcccctgc

SEQ ID NO: 943751 - DNA, 120 bp, Artificial Sequence
  ENSG00000242593_130 (sequence is synthesized)
accaggtgactgaattgaaaaaaattgacatactgtgatgttgttgtatctcactcatacaaaggtattctggtccttccctaaaaagaatattcccaaactctcacactaaaactaaca

SEQ ID NO: 943752 - DNA, 120 bp, Artificial Sequence
  ENSG00000242593_131 (sequence is synthesized)
ctctcacactaaaactaacagctcagtatattaatgactatttgaaaaagtaattctttggcaaaatataattaagtcaatttttttatatgttttatactcataatctgatagaaagtt

SEQ ID NO: 943753 - DNA, 120 bp, Artificial Sequence
  ENSG00000242593_132 (sequence is synthesized)
ttttctaaggatacttaatgtataattttttgatttacaaaggcttaagtcccaattcgtttgtcattaaacatgttgaataatttacatctatgtattaaataactataataataagtt

SEQ ID NO: 943754 - DNA, 120 bp, Artificial Sequence
  ENSG00000242593_133 (sequence is synthesized)
tgtctgacagcataaaaccaatatgttgccagatgtttgactgttcatggttgcttttacatgctcactctaatttttaaggagtctaggaagctcatttttgaaaattatcaggtgagg

SEQ ID NO: 943755 - DNA, 120 bp, Artificial Sequence
  ENSG00000242593_134 (sequence is synthesized)
atgttttaaaaagtcaataatgatggcgataaattaagatgaagacccaaacctcattctttaatccctttgggccttagtgtcttcaacgactgaaaaacaaaaatgtctgtctcatga

SEQ ID NO: 943756 - DNA, 120 bp, Artificial Sequence
  ENSG00000242593_135 (sequence is synthesized)
tttcatggagattctttctaaatgatgacatgctagaaccatataaaggattataaaggctaggatcattatttaaataaaatatcgactttaaagatcaaaaattgtgggtatatatgt

SEQ ID NO: 943757 - DNA, 120 bp, Artificial Sequence
  ENSG00000242593_136 (sequence is synthesized)
acgctttttaagtggttattacatgaattcgaaatttggaattaagtatggaagtagaaatttctttgaatgcatgtgtgttcgcgggtatatggcataagacagatgtgtatatattta

SEQ ID NO: 943758 - DNA, 120 bp, Artificial Sequence
  ENSG00000242593_137 (sequence is synthesized)
caaggagctttaatttatatatttttaatagacagttttaacaaattggactaaatgtctcttaaatctgtactttcattacagaaaaagataaaattatgtgaaagaatatgacccagt

SEQ ID NO: 943759 - DNA, 120 bp, Artificial Sequence
  ENSG00000242593_138 (sequence is synthesized)
ttttcaaattaacattcatgaggtttggtgactaagtcttagcagaacatattgaaaatgtagctctgattgtttacaaccttttctactactatgttttttaatatcagcatttagaaa

SEQ ID NO: 943760 - DNA, 120 bp, Artificial Sequence
  ENSG00000242593_139 (sequence is synthesized)
agatttattgtcacaaaagcaaggctatgttttctgctgatctaaatgataaaattaatgcatgctcattttttaaaagttgaaaacactgaaggataaaaggaagacaaaaattcacac

SEQ ID NO: 943761 - DNA, 120 bp, Artificial Sequence
  ENSG00000242593_140 (sequence is synthesized)
attgtcccactgatccaaacaatatcacaattaatattttggtgaattttaaatccatttatgtttaacctattgaaattaaaatttacatcagttttgcatacaggcttttaaaatgta

SEQ ID NO: 943762 - DNA, 120 bp, Artificial Sequence
  ENSG00000242593_141 (sequence is synthesized)
atattatgccataatcctttttcaatataatcatacaggatgtataaacatcattgcagcattcagagctgaatcaaggaagaagaaccatatatacatatgcacacacatatatctggt

SEQ ID NO: 943763 - DNA, 120 bp, Artificial Sequence
  ENSG00000242593_142 (sequence is synthesized)
tatatattgagaagccagttacaacgatgtgatcttatgcaattgagaaagcaggataaacagtctatatgaagctactgctctgtgtctgatgcaagaggctgaagtcatctgggtgag

SEQ ID NO: 943764 - DNA, 120 bp, Artificial Sequence
  ENSG00000242593_143 (sequence is synthesized)
tagttgagaaggaaggatagtagtaaagtacagatggggtaagggtaagctggaatctaatctacaaggataagctgggacctatgaggcaggactggatcacacactggtttctgatgg

SEQ ID NO: 943765 - DNA, 120 bp, Artificial Sequence
  ENSG00000242593_144 (sequence is synthesized)
cctccaagcctccaactttgataacagggatgaccaggacagagaagttgacagccacctcaagcaaaacacattccaggcccaggaggtgaagcagctgatgaaagggaactaccaggc

SEQ ID NO: 943766 - DNA, 120 bp, Artificial Sequence
  ENSG00000242593_145 (sequence is synthesized)
actgtaggagctatggcctggctgctgatccaggccaacacaggaagccagcagatcaaggaggagaatcaggagctatgacacttgcagaactctgctctgtccttcctcttgaagaaa

SEQ ID NO: 943767 - DNA, 120 bp, Artificial Sequence
  ENSG00000242593_146 (sequence is synthesized)
gaatatgccttctgtgacttcactttaccttccaaatctcaatctcatacaaaatgtctttttctggcactctaacttaaaactgtgcggggtagggaattctgggaaatacaaatcctg

SEQ ID NO: 943768 - DNA, 120 bp, Artificial Sequence
  ENSG00000242593_147 (sequence is synthesized)
cctaagtggacacaattcacaaagttcatctttattttaaggcctatgaactatttcatgaagtacacataccatactcagcatcactgtacccagctattgaatatatggaaacactaa

SEQ ID NO: 943769 - DNA, 120 bp, Artificial Sequence
  ENSG00000242593_148 (sequence is synthesized)
gatgtctaatagtgtttatatatactctattattttgcacgttgtctctgaggatcgtggtgcttggcatttgttaattgagaaaattgactgattcttctgcttttaaaccttcttaac

SEQ ID NO: 943770 - DNA, 120 bp, Artificial Sequence
  ENSG00000242593_149 (sequence is synthesized)
tctccctttcttcaggtctcagcttaagtgtgaaagttgaggagaagtctctcctgattctgtaaagttggtttgtgatcctccatggtgttcccaaagcattatgtatgcagcatcctt

SEQ ID NO: 943771 - DNA, 120 bp, Artificial Sequence
  ENSG00000242593_150 (sequence is synthesized)
atttttcagtgtagtttcctaagtacccgtctgtgccttttactaccctctaaatcacttgatggcaaagtatcttgcttattgttaaatctccagttcttaggaatgttcttggcacat

SEQ ID NO: 943772 - DNA, 120 bp, Artificial Sequence
  ENSG00000242593_151 (sequence is synthesized)
agtaatttagcaattaatgcttacaaattaatgaaattataccattagtcaaccaagaaggtgcactattttcatttttattactttccctatttgaaaaatatgctctgattttagtta

SEQ ID NO: 943773 - DNA, 120 bp, Artificial Sequence
  ENSG00000242593_152 (sequence is synthesized)
cctgaattttcctcagaaaaattgaatgaaaactgctttcccttggactcatagggtattttttcattaccagtgcataaaaattacttgaaatgttttccactagagtcgctcgagggg

SEQ ID NO: 943774 - DNA, 120 bp, Artificial Sequence
  ENSG00000242593_153 (sequence is synthesized)
ttaatatcctctgaaatcaaagacatttcattatgatataacaatgttttgaaattttctgttttggattgactattaaagttaacaagcaattgttgtatactatgcttctgctaagac

SEQ ID NO: 943775 - DNA, 120 bp, Artificial Sequence
  ENSG00000242593_154 (sequence is synthesized)
tctgtgagagctgctgtcagcttccagatggtgccttattgctacatcctttaaggtgttgaaccctgtgtcttcacatggccaaaagaagagaagggtaaaaagagccttgctagttcc

SEQ ID NO: 943776 - DNA, 120 bp, Artificial Sequence
  ENSG00000242593_155 (sequence is synthesized)
tagctcaacagtaaagcaaaatccaatatttaataagcatagcagagaggaggagagttgtaagatatgtacttaaattttacctgcatgcacatatgtcttcagaccttcagatttgct

SEQ ID NO: 943777 - DNA, 120 bp, Artificial Sequence
  ENSG00000242593_156 (sequence is synthesized)
ctcactcctggatccaaagttctgttctctacataatttttgtattgttctaatttttcctttagaacttatgtcaagcatcatgcattcttccctgattttttttttttttggagcaat

SEQ ID NO: 943778 - DNA, 120 bp, Artificial Sequence
  ENSG00000242593_157 (sequence is synthesized)
cttctcaactcctcccaacagcatattacatatgcctctctttctccatttgcttttactccagttagaatttgggagcccaacaggattatatcttgtttgtaatagctgctctagctc

SEQ ID NO: 943779 - DNA, 120 bp, Artificial Sequence
  ENSG00000242593_158 (sequence is synthesized)
ctagcacaccatttgacacataaaggtaataaacaaatatttattaagtagttgttaattaaatccaaaacttggtaacaaaaacacattatcaaataaatgaacatctcccagcaggca

SEQ ID NO: 943780 - DNA, 120 bp, Artificial Sequence
  ENSG00000242593_159 (sequence is synthesized)
aagaggacctaacaatcattgaaaacatgacaagtctaggaaaagaaaccagaagagaagaaaaatgaaaatcttctgtattcccatatttgatttttccaattcgtacagctgataaac

SEQ ID NO: 943781 - DNA, 82 bp, Artificial Sequence
  ENSG00000242593_160 (sequence is synthesized)
ttcccatatttgatttttccaattcgtacagctgataaactatccagtctaaaggcagtgtcattgttagtgcattaaaata

SEQ ID NO: 943782 - DNA, 86 bp, Artificial Sequence
  ENSG00000242593_161 (sequence is synthesized)
tgggagactgaggcaggagaaacatttgaacccaggaggcagagcttccagtgagatgaggtagtgccattgcactccagcctggg

SEQ ID NO: 943783 - DNA, 120 bp, Artificial Sequence
  ENSG00000242593_162 (sequence is synthesized)
tgggcgacaagagcaaaactccacctcaaacaaacaaaaacataaaataaggctaactgaggactttatctatcttatttaacatataaaatatattaatgtgaagttgtacataataac

SEQ ID NO: 943784 - DNA, 120 bp, Artificial Sequence
  ENSG00000242593_163 (sequence is synthesized)
tataaaatatattaatgtgaagttgtacataataacttgtgattttttaataccgaagcatctgtatcagtttactttgttctacttcttttttctttattagtttcaccagtagtgtat

SEQ ID NO: 943785 - DNA, 120 bp, Artificial Sequence
  ENSG00000242593_164 (sequence is synthesized)
atgtttggaaagctgctattctgacaaggcactgaaattcccagctccaaccaagattctggacttcagactcggccacgtgatgaggggatagaagagcggcaaccttctggcatctct

SEQ ID NO: 943786 - DNA, 120 bp, Artificial Sequence
  ENSG00000242593_165 (sequence is synthesized)
gtggatttgggcaattatcaaacctgtaactatcataataaattcacgtgaaaggcctttgcttattcctctggcaccaggcaattctggatcccatgttacaatgagggtgtggcaaga

SEQ ID NO: 943787 - DNA, 120 bp, Artificial Sequence
  ENSG00000242593_166 (sequence is synthesized)
ggaatatccccaaaatgtatttaaatgctcatcaaatgtctggatagaggttttaaaagatttaatttgacttaaagaaaataatatttctcttatagtcaagattgtggattaagattt

SEQ ID NO: 943788 - DNA, 120 bp, Artificial Sequence
  ENSG00000223838_0 (sequence is synthesized)
atatgctaaagagaagccataaaatgcttcctttaagtcaaaatgtgaaagttttgcactgattaagaagagaaaaaacatcatatgctgaggatgctaagttctaaggctgtatgggaa

SEQ ID NO: 943789 - DNA, 120 bp, Artificial Sequence
  ENSG00000223838_1 (sequence is synthesized)
gcatggctggggaggcctcatgaaacttataaacatggtgcaaggtgaagaggaaggagacatgctttacaaggccacagcaggaggaagacagtgaaaggggcggtgctacacactaca

SEQ ID NO: 943790 - DNA, 120 bp, Artificial Sequence
  ENSG00000223838_2 (sequence is synthesized)
ccagcaaccttcctgccaacttggcccaagactggaagacgatttaaacttcaagcagtattgacttacctatgaatcacttagtatatatgagcttctcagagaagaaatcataaacat

SEQ ID NO: 943791 - DNA, 120 bp, Artificial Sequence
  ENSG00000223838_3 (sequence is synthesized)
tgagagttgccatgcataatgatgaccttcaacacatatgaaagaaatcaccgaggactggaagttggctgatagaactgacatcagaaagaccattcaaaacgaagagccagtgtcaag

SEQ ID NO: 943792 - DNA, 120 bp, Artificial Sequence
  ENSG00000223838_4 (sequence is synthesized)
ctcataatcagtctttttctgtgtatgtatatatatatcccattgtcctggtttctctggagaattccaatctatacaagtgtcacagtcatatagaaacatagcttactttctaaatat

SEQ ID NO: 943793 - DNA, 120 bp, Artificial Sequence
  ENSG00000223838_5 (sequence is synthesized)
atagcttactttctaaatatatgtaccttaatatttaaagataaaatgtcatgataaatgtaattaaaacatgtaagcaaaaaatatcaattagattgatgaagcaaatatggcatagta

SEQ ID NO: 943794 - DNA, 120 bp, Artificial Sequence
  ENSG00000223838_6 (sequence is synthesized)
tatggtttcattatactatttcatatctaattttttgaaaatgatagtaaaattaaaaaaggcatacataacctttcatagtgcattaattatttagaattttttgaatgagaataggct

SEQ ID NO: 943795 - DNA, 120 bp, Artificial Sequence
  ENSG00000223838_7 (sequence is synthesized)
aagtatgagttttagtagcaaaggatgtttaccttaatatttagagatctgcattcaggtaaaatcatggataagagtctagtccaattgcttttcactctcaaaccaggatttagtcaa

SEQ ID NO: 943796 - DNA, 120 bp, Artificial Sequence
  ENSG00000223838_8 (sequence is synthesized)
ggacttttcaatcctatttaaaataagaacaataatccttgtcaccctcccatgtcaaaggggtgttataatgatgaatgagctccaggaatagatttagcctgctgatatatttgtaac

SEQ ID NO: 943797 - DNA, 120 bp, Artificial Sequence
  ENSG00000223838_9 (sequence is synthesized)
ccatatggctacatcaccctttgacttttctaagaggaatggaaaatcgctacatttggtatgccacaaattaaatttctgtcaagtttggctttaaaaaccactcttctagcacctcag

SEQ ID NO: 943798 - DNA, 120 bp, Artificial Sequence
  ENSG00000223838_10 (sequence is synthesized)
gttttcataagctggcaaagaatcttcataggatcccaaggaggtaactaatgttgtaacactagtagtgaatgattttgtgtaaactgaaataaaacattgttggcatttgaaaaagaa

SEQ ID NO: 943799 - DNA, 120 bp, Artificial Sequence
  ENSG00000282860_0 (sequence is synthesized)
ttaagtttgttttttaaaaataggtcatatatgtacatggcaagaaaaaaaaaggttcatgcagtacaggagggtatttggtgaacgataaatctccctgtgtggcactgaattcctctg

SEQ ID NO: 943800 - DNA, 120 bp, Artificial Sequence
  ENSG00000282860_1 (sequence is synthesized)
tccccctcctgaagcacccagggtctccataaccttccagagccatcctgtgttcacaccaacggatgtgtatatcatccctctttctgtaatgctaatgtcctgtagctcactccaatg

SEQ ID NO: 943801 - DNA, 120 bp, Artificial Sequence; identical to SEQ ID NO: 503213
  ENSG00000282860_2 (sequence is synthesized)

SEQ ID NO: 943802 - DNA, 120 bp, Artificial Sequence; identical to SEQ ID NO: 503214
  ENSG00000282860_3 (sequence is synthesized)

SEQ ID NO: 943803 - DNA, 120 bp, Artificial Sequence; identical to SEQ ID NO: 503215
  ENSG00000282860_4 (sequence is synthesized)

SEQ ID NO: 943804 - DNA, 120 bp, Artificial Sequence
  ENSG00000282863_0 (sequence is synthesized)
tgaggcctccccagccacgtggaactgaagtcacggggtgactccaagcagggccccctttgcattcagcctgcccttctctcagcccagtcatgctggcaccagatgagctgctgcaga

SEQ ID NO: 943805 - DNA, 120 bp, Artificial Sequence
  ENSG00000282863_1 (sequence is synthesized)
tggcaccagatgagctgctgcagactcatgaggaaagagtcaagacaggctctttgaaacctccctctccaggcatgccacgtgaacagaagttccaggagacagaagagaggggtgaca

SEQ ID NO: 943806 - DNA, 120 bp, Artificial Sequence
  ENSG00000282863_2 (sequence is synthesized)
ttggctctgtggcaatggcatcatacccaggtcacaggtgcaaatttggtgcagcaaagcagcattaaatattttgcattaaattgatgttaatttgcttttgctggttttatggcttat

SEQ ID NO: 943807 - DNA, 120 bp, Artificial Sequence
  ENSG00000282863_3 (sequence is synthesized)
ttttatatctggaatgatgtttttgtttcccattatatataaactataagcaaaggaagtttattcctacctttggtttgtaaaaatttaagtagtgttcaaatacaatctttaagtcaa

SEQ ID NO: 943808 - DNA, 120 bp, Artificial Sequence
  ENSG00000282863_4 (sequence is synthesized)
gaactgggcttgagcagtgggaaggatttggagagcggaggaatgaaggagagcagagaggagaggcttggaggtgatgagatgagaggacagctgttctcccctcactcaaggtagcac

SEQ ID NO: 943809 - DNA, 120 bp, Artificial Sequence
  ENSG00000282863_5 (sequence is synthesized)
acagcctgcatgggccgggcttggatttcaagttctcagaaaaagtttgccaactcctgctctagattgatggttacaaagtctgacagaggatacagttacagggacatggcaaagcca

SEQ ID NO: 943810 - DNA, 120 bp, Artificial Sequence
  ENSG00000282863_6 (sequence is synthesized)
gaaaaacgaggaccgggagtccagctttcaacaaagccaatctattcaatctccagactaccctttgtaccaaggacattgttaagtaccttcttaaagactgagtgcaaaagagtatga

SEQ ID NO: 943811 - DNA, 120 bp, Artificial Sequence
  ENSG00000282863_7 (sequence is synthesized)
gcgcttagtcttgggggaccctggagtgaggagaatgaataccgcccctgcccttatggaacagcagtggggagcgcctgtggaataggggagtgagatggattatagaagtcttggggg

SEQ ID NO: 943812 - DNA, 120 bp, Artificial Sequence
  ENSG00000282863_8 (sequence is synthesized)
ctgcccttctctcagcccagataagagactggagacacagagaggctccagaacttacccaaggtcacacagcttctaaatgggtgttgttggaacctactttcagagacctgattccaa

SEQ ID NO: 943813 - DNA, 120 bp, Artificial Sequence
  ENSG00000282863_9 (sequence is synthesized)
aaccctcactgatactttccgtgagtccagatgaagagagggcttcaaggaaaatccattcagtgccaggatgctaccagctccctggggcatgggactgccatcctctcctaggcgtct

SEQ ID NO: 943814 - DNA, 88 bp, Artificial Sequence
  ENSG00000223831_0 (sequence is synthesized)
gccgtctttaagaactgtaacactcaccttgaaggttggcagcttcattcttgaaacaatctctgcttcccaggttcaagtgattctc

SEQ ID NO: 943815 - DNA, 120 bp, Artificial Sequence
  ENSG00000223831_1 (sequence is synthesized)
cctcccgaatagctgggattacaggaggctcccagccctttcggattggttgagaaaagtggcctggctggtctggggccagcggcacccaccctcccctcaattgcccaactccccccc

SEQ ID NO: 943816 - DNA, 120 bp, Artificial Sequence
  ENSG00000223837_0 (sequence is synthesized)
aaagttgctgtgtcattgccctccatgctgcagccacccaaacggggccgcttgtacttttgggggccagggcctgatccctggctgggggaaggggactctgctctcctgacgctcatt

SEQ ID NO: 943817 - DNA, 120 bp, Artificial Sequence
  ENSG00000223837_1 (sequence is synthesized)
tagataaccaagttaggaggaagacttaagagtaagttggggggagggggcgaaactgagctcccaaaatggctcctgcccctcctcggaggcggacggccggggggaggggaggagggg

SEQ ID NO: 943818 - DNA, 120 bp, Artificial Sequence
  ENSG00000223834_0 (sequence is synthesized)
ggatgaggatgccaggcactctgcttttcctaaacaacttccaagaaccccggaacatttcttaaagtgtctggaacgaagctttaacctcgcctgctccatcagcctgggacggaaaag

SEQ ID NO: 943819 - DNA, 120 bp, Artificial Sequence
  ENSG00000223834_1 (sequence is synthesized)
acgcgaggggcgaagaagaggtggggcacggggagcccgggccgttcggcgtaagtgatccaggcttccagcgccccgggcgcaccccgcggaaaggcgtctgggagtcggggacgtgcg

SEQ ID NO: 943820 - DNA, 120 bp, Artificial Sequence
  ENSG00000223834_2 (sequence is synthesized)
gggggagaccacccggccaaccccgggggatgagctgcaaggctggccacgcccggcaggagactgcgcgcagagacccgcccggggaagcacgggaggagggagggcggccatgtacaa

SEQ ID NO: 943821 - DNA, 120 bp, Artificial Sequence
  ENSG00000223834_3 (sequence is synthesized)
cccctggcaggtgggagcctccctggcgccagctcgggcagggccacgccccttcccaactccccgcgctcggcctccggactgctcagggggccacgccccttccggattccccgcgct

SEQ ID NO: 943822 - DNA, 120 bp, Artificial Sequence
  ENSG00000223834_4 (sequence is synthesized)
ctccggaccgctcagcggccccgccccttctcgagttctccgcgctcggcctccggacggctcagggggccacgccccgtcgcccggggccccgcccactcctcaagccccacgggactc

SEQ ID NO: 943823 - DNA, 120 bp, Artificial Sequence
  ENSG00000223834_5 (sequence is synthesized)
actcccagcctacctccctcccgctgccgcactggactcccagacctcggcaccaaccgtatctcctgttactcgccccagggtggttgcccggggaaaaactccaagggtttcactggc

SEQ ID NO: 943824 - DNA, 120 bp, Artificial Sequence
  ENSG00000223834_6 (sequence is synthesized)
tggcctggaaaccctttcatctttgctccatcagcagcagctctttgattgagttctcctggctttagagcctcccactatggtcatgctgcaaattcccgtggccagcacccgaggcct

SEQ ID NO: 943825 - DNA, 120 bp, Artificial Sequence
  ENSG00000223834_7 (sequence is synthesized)
gctggctccgatctgggccacgtgtacaaccaggtgtgcccccttagcctcacgccctcctcctgttgcctccccatccctctagccttcgggacttggggttgcaatgaatcttaggtt

SEQ ID NO: 943826 - DNA, 120 bp, Artificial Sequence
  ENSG00000223834_8 (sequence is synthesized)
ttttccaggagtcttttattcctccagcgtctccgtgcgcctgtccgctccaacacctgacattttccttcaactccaccctcccctccccgagtccacagacacacacccacccacacg

SEQ ID NO: 943827 - DNA, 120 bp, Artificial Sequence
  ENSG00000223834_9 (sequence is synthesized)
cctcttcccttcccctccaccctcagtcagcggcagagtcagtccatccaataggcaggagcccaaaagactgtccacggacagctgtcctctcgcccaggagagtggggctgcacacag

SEQ ID NO: 943828 - DNA, 120 bp, Artificial Sequence
  ENSG00000223834_10 (sequence is synthesized)
cagcaggcccaggaggaaatcgtgctttgatagccccaggcatcgtatttcatcgtatttcacaagtgagccaaatggagaagggattagctgtttcacccaataagcccacatctgtag

SEQ ID NO: 943829 - DNA, 120 bp, Artificial Sequence
  ENSG00000223834_11 (sequence is synthesized)
caggaaaaaactccaccccagctccttccaacttgctcccccatcctcagctgctccatttcctgtggtctattcttgcacagttaggtctacaagccaggttcaaggccaccaactgag

SEQ ID NO: 943830 - DNA, 120 bp, Artificial Sequence
  ENSG00000223834_12 (sequence is synthesized)
gcacctgtcccgagacaggaccattctaatctgccctgaaaaggacatcccattgatcatgtaagtatgtactgagaatctactgtgggcaagacattggtcttcgctgtgggagataca

SEQ ID NO: 943831 - DNA, 120 bp, Artificial Sequence
  ENSG00000223834_13 (sequence is synthesized)
aaaaccattcaggcatggcccttgcctttttcatgccaagaaaagctgaagtgtgtggtcagaaattgcatgtggtttctgggacttactgccctgaagcaccctgggtgtatcggatgg

SEQ ID NO: 943832 - DNA, 120 bp, Artificial Sequence
  ENSG00000223834_14 (sequence is synthesized)
cctcagggaacacagtttgggtatgggcagtattttcatgcccattgccattcccttctgcctcaagtgtatgtgggctttccctgcagtcagccagcaggccaggccagggtggctttg

SEQ ID NO: 943833 - DNA, 120 bp, Artificial Sequence
  ENSG00000223834_15 (sequence is synthesized)
tttctgtctctgaccctttctcttcagactccaaatctgcaggtgctggagactttgaaggagtctccgtttcccttggtagaaacaagaggtaggaacaagcaggtggaaagccagggt

SEQ ID NO: 943834 - DNA, 120 bp, Artificial Sequence
  ENSG00000223834_16 (sequence is synthesized)
tactccttccagccaatgggtctggggctgcagcacacaaagttgacatcccgaaaggccattttcctcgatcgcttcagacctggcattgggtggacagaccacatgattcagcatcca

SEQ ID NO: 943835 - DNA, 120 bp, Artificial Sequence
  ENSG00000223834_17 (sequence is synthesized)
aattggagatctctcaataacagaaagaggtgccattgataatttcgtggaactttcctgagcacaccagggtgtgctcattcttcctgaggggtcatctcccttgggcatcgtaagagg

SEQ ID NO: 943836 - DNA, 120 bp, Artificial Sequence
  ENSG00000223834_18 (sequence is synthesized)
caccactgagacacaacagcttttgtcaccatttcccaattgtgtcccaagctctctgtcctcttccctgtgctggtcatctcacagtcttcttctgcaggtagatcccccctacttcag

SEQ ID NO: 943837 - DNA, 120 bp, Artificial Sequence
  ENSG00000223834_19 (sequence is synthesized)
cccttcctcccacctcagctcctttgttcccgctgccatgcccagaacaacctatatttccactctccaaccttggatcaacccaactgtgttttcacgctactatgtccaggatactgg

SEQ ID NO: 943838 - DNA, 120 bp, Artificial Sequence
  ENSG00000223834_20 (sequence is synthesized)
atgatactagagatagccatcagtaacattcattacatgaataagtctgggttgatcctgtgacacagttatgccttctaccctctgctgcttctcaacattgctcagtccttatgttgg

SEQ ID NO: 943839 - DNA, 120 bp, Artificial Sequence
  ENSG00000223834_21 (sequence is synthesized)
tgttctcatttcacatgatagagttccaaaccttttgtagcccgaatcgtcatctatcccctaattcttggaaaagaccctaacttcaccaatagcaacaacaatcaaaaccaactgaac

SEQ ID NO: 943840 - DNA, 120 bp, Artificial Sequence
  ENSG00000223834_22 (sequence is synthesized)
aggctgagccggaggaccccgggggttcacctagccctctgggataaggggctttagtctctatattctttgggcttgggggttggggacagtgggaggattaattatggaggcaaggtc

SEQ ID NO: 943841 - DNA, 120 bp, Artificial Sequence
  ENSG00000223834_23 (sequence is synthesized)
aaaactgcctctccttccactccatctgtgaggcacccttggatgctgacatgtgcttacataggacttcctgtccacagccagaattagccagaattcactgacccatggttggactcc

SEQ ID NO: 943842 - DNA, 120 bp, Artificial Sequence
  ENSG00000223834_24 (sequence is synthesized)
taaaatactcaagatgagagacatgttacttttctttactatagtaactatcaaatgcatcccataaccttatgttgtaaatgtcaaatatgcacaataaaatttatttgaaaaaataaa

SEQ ID NO: 943843 - DNA, 120 bp, Artificial Sequence
  ENSG00000259675_0 (sequence is synthesized)
gagaggtgagactagcagtgtgtggcctgggacaggagtagataaaaggcagccatggtgagccagcgccatgaggagtggctgcctcttgaatcctgtcagtctccggcagatccgatt

SEQ ID NO: 943844 - DNA, 120 bp, Artificial Sequence
  ENSG00000259675_1 (sequence is synthesized)
gcgctggtctattttaatcctgctccttctagaaactagaaactgtaaggagagtcttcctgctgacaggtggctccataaaagtcgtccatctgctgctaattatggcagaaagaaaat

SEQ ID NO: 943845 - DNA, 120 bp, Artificial Sequence
  ENSG00000259675_2 (sequence is synthesized)
tcacagagccgagttttcagtttatttgctaaagatctccaaaggtgtaactgtcttcccagatcacaaggccattcacagcgttacatctatagcgcttgttaattatttaaataattt

SEQ ID NO: 943846 - DNA, 120 bp, Artificial Sequence
  ENSG00000259675_3 (sequence is synthesized)
aaccctgccattccggctccctttaaagggtggcttgtcaacactgaatgttgggtgagccttgaaaagcctctctagcttttctttggaaggagcaagaaaaaaatgaagtacaagaaa

SEQ ID NO: 943847 - DNA, 120 bp, Artificial Sequence
  ENSG00000259675_4 (sequence is synthesized)
tgttttcacagctcacagaatctagacttgtggggttttgttgttctccttaccattctttccaagggaaactcaaaaaagggtcagaatttggaatattttggacttgattgctttgat

SEQ ID NO: 943848 - DNA, 120 bp, Artificial Sequence
  ENSG00000259675_5 (sequence is synthesized)
tcccaaacttcagttcatctccctctcctcttcatggtttcatctataaaatgggtacaatctctcaactgtttaactcagaaggcttttgtgatcttggaataggataatttattaaaa

SEQ ID NO: 943849 - DNA, 120 bp, Artificial Sequence
  ENSG00000259675_6 (sequence is synthesized)
agtgtcatgtatagcataatatataaagaattttagacccatgaaatagatagaaatgagtaaatctgataggtcagatgataaaataatttaataataaaagacagatatttttccctt

SEQ ID NO: 943850 - DNA, 120 bp, Artificial Sequence
  ENSG00000259675_7 (sequence is synthesized)
ggatctcctcacagcttgtgcttcctgacagctgtggacacttgggctgactgcagacctcccgctaccctgatttccagcaagtgagccagcgccatgaggagtggctgcctcttgaat

SEQ ID NO: 943851 - DNA, 120 bp, Artificial Sequence
  ENSG00000242048_0 (sequence is synthesized)
gctttcagctggaatgttatcaacttcggtcacgctgattatctcaggctgatcaggaaggctggtaccaggagtgagtgactaaatgaagaaattactaattaacaaatgcttgggtgg

SEQ ID NO: 943852 - DNA, 120 bp, Artificial Sequence
  ENSG00000242048_1 (sequence is synthesized)
acaatccttcaaaatttaggatcaatgggaggagacagaaggagtcttgggaggatttttaaaatatgccagagctggctgggtacagtggctcacacctgtaacctgaggactttgagg

SEQ ID NO: 943853 - DNA, 63 bp, Artificial Sequence
  ENSG00000242048_2 (sequence is synthesized)
acccactataaaaagttagctgggcgtgttggtgcatgctgtagtcccagctactcaggaggc

SEQ ID NO: 943854 - DNA, 83 bp, Artificial Sequence
  ENSG00000242048_3 (sequence is synthesized)
tgggagatggaggttgagaaaaaaaaaagccaggcctcctaatgtactcatttaaacatcacttgtgtccacctgggttcaga

SEQ ID NO: 943855 - DNA, 120 bp, Artificial Sequence
  ENSG00000242048_4 (sequence is synthesized)
gtactcatttaaacatcacttgtgtccacctgggttcagaattgcgctggacatgggatacacaaagcgggagtggaattttcaggaagcagctgtgctgtgggtgacggtcatacttta

SEQ ID NO: 943856 - DNA, 120 bp, Artificial Sequence
  ENSG00000242048_5 (sequence is synthesized)
ttctctaaaactctccagtttcaattggcctcttggtgccaaagcaccatggcgtgttacacctatcagatcgggcacactgccccttcttcccaacctacgagctgaaatggccagcac

SEQ ID NO: 943857 - DNA, 120 bp, Artificial Sequence
  ENSG00000242048_6 (sequence is synthesized)
tgcgccttccagaacccagcgtagatgcacagctgccacggaggtaggaagaatgattcgtttgccaccaaaagcccagtttctccaacaggtgaatccctaggccagcccggccccttc

SEQ ID NO: 943858 - DNA, 120 bp, Artificial Sequence
  ENSG00000242048_7 (sequence is synthesized)
ccacacacccctaccccgagacgggtgcagaatcagcagcggggatcatccagagactctcgcagtccacggcaggtgtcggagtgggcctcattccagagttgtggtggccgctccacc

SEQ ID NO: 943859 - DNA, 120 bp, Artificial Sequence
  ENSG00000242048_8 (sequence is synthesized)
tggcgagcttcgaggggactccggcaggcgctcgctgtggggtcctcccaccagtcttctcagcacaggaacggtgccttcacattggtcttccggggcttaaaagcatatcattcctgc

SEQ ID NO: 943860 - DNA, 120 bp, Artificial Sequence
  ENSG00000242048_9 (sequence is synthesized)
aagcaccgtttattagggggaagctccgttatccagaaagctcatctttgaagagctacccatttcctgccaaagttgtggcgggaaggccttaggtactagaaaaccttggggaatggc

SEQ ID NO: 943861 - DNA, 120 bp, Artificial Sequence
  ENSG00000242048_10 (sequence is synthesized)
aattaaaggattatcattcttacttatttgtttggataagcagcaatcacccttcggatgcttattggtgagaatatttctaaaagtgtcctgcacatttccctgctttgatgaatggaa

SEQ ID NO: 943862 - DNA, 120 bp, Artificial Sequence
  ENSG00000242048_11 (sequence is synthesized)
cggcagggcaggatttaactgtctgatggctacggttttgggaaagtgccagaacctccacgtcagccaccccagagccacaggcagggtatgagccacagcaatgggccccaagaaaga

SEQ ID NO: 943863 - DNA, 120 bp, Artificial Sequence
  ENSG00000242048_12 (sequence is synthesized)
gccccacacccaccatggtccacggaagacgctgcttactggccccgggttacctggagtcatgtgcattctccttacatcaagtgaagataatattttgtttccttcccactttttctc

SEQ ID NO: 943864 - DNA, 120 bp, Artificial Sequence
  ENSG00000242048_13 (sequence is synthesized)
taacacaagccaccccagttctcccttctgacaacaggcaagtggaccctagtagaccttccagaaaagccttagagagcacccccaaatgctcacatttgtcagctgtaattccaccct

SEQ ID NO: 943865 - DNA, 120 bp, Artificial Sequence
  ENSG00000242048_14 (sequence is synthesized)
cagttaaaacctgattctcaatgtgacttggccaacgcagcttgcaaagcaagaacgtcttcatctaaggttgaaaacatcagttgtttgggttgtgagaaaagaaaagcccacaaggtt

SEQ ID NO: 943866 - DNA, 120 bp, Artificial Sequence
  ENSG00000242048_15 (sequence is synthesized)
tccgaggcttggtgctgtttctcactgtcctcagctcctgattctgcagctggttctctctccaagcactagcaaaaccctgccctaggagcccccagactctgagagcccatgaccaaa

SEQ ID NO: 943867 - DNA, 120 bp, Artificial Sequence
  ENSG00000242048_16 (sequence is synthesized)
aagaaaaggaaagccaagttggggaagaacaggggcccccaactccacagccctccactctgcccagagggcccaccctgggctgcctggaaccccctaaagttgccacccccgcaacac

SEQ ID NO: 943868 - DNA, 120 bp, Artificial Sequence
  ENSG00000242048_17 (sequence is synthesized)
agtagtggggcagttcctggcagcgcctgcagcccatgggctggctctgtacccgcagccccgccaagcgtctgttatcttatttactggaatctgcacagccaggctctagctcaccgg

SEQ ID NO: 943869 - DNA, 120 bp, Artificial Sequence
  ENSG00000242048_18 (sequence is synthesized)
tgactaaggagctgcagccattattaccaggcagatggcagactccctaaaagcagacattaaacaataaaatgccaccacataccttgcccacaaaataaaatcaaaacaaacacctaa

SEQ ID NO: 943870 - DNA, 120 bp, Artificial Sequence
  ENSG00000242049_0 (sequence is synthesized)
atatgggcctgcccctgctggtgaggtggccacaacggtgtgtgggaatgggatgctctgtgacccaggtggtgtgggctgagtcccgggagccaaagggcagaggcaggatcagccacg

SEQ ID NO: 943871 - DNA, 120 bp, Artificial Sequence
  ENSG00000242049_1 (sequence is synthesized)
ggattccagccttggtcttccggggtaagctccacaaaggcgggaaagtctgtccctgtctaggacagtggctggcacacgagggccgtcggtaaactcttggatgaaccaggctcagag

SEQ ID NO: 943872 - DNA, 120 bp, Artificial Sequence
  ENSG00000242049_2 (sequence is synthesized)
acacacagtgctcaaggtcacacagcgagtcagtgagggaggggatgtgaaaccagggccaaggctgcagcggacagcaaatccaaagaagtgttccactcaattctgggaactcccaac

SEQ ID NO: 943873 - DNA, 120 bp, Artificial Sequence
  ENSG00000242049_3 (sequence is synthesized)
cccaggctctggggaaggagcagacacacaccaatgtgcgaatgcagctgcaacactcgctggaaggagaggtgacactgtctggggcgtctgggaaggctggtcagaagaggtgacgcc

SEQ ID NO: 943874 - DNA, 120 bp, Artificial Sequence
  ENSG00000242049_4 (sequence is synthesized)
ttggcagggcttggagagggaggttccagcagggtcggcctcacacacatgaagggtcttggatgtcgacactggacatccttccccagggaggtagttcattcagtcatggaacatttc

SEQ ID NO: 943875 - DNA, 120 bp, Artificial Sequence
  ENSG00000242049_5 (sequence is synthesized)
aaggtgggaagaaggtgttcatcacatggctatgatcatgtacccattgcagaccaccctgtcctgggggcatgaggagttcatctcctaaatcagtggttctcaacagggacagtcctc

SEQ ID NO: 943876 - DNA, 120 bp, Artificial Sequence
  ENSG00000242049_6 (sequence is synthesized)
cctccccaggggacatttggcaatgactggaggagttgctactggcatctcctgggtggaggccaggcagggctgctgctgaacatccctgtctagtgcacaggacagcctccaccacaa

SEQ ID NO: 943877 - DNA, 120 bp, Artificial Sequence
  ENSG00000242049_7 (sequence is synthesized)
ttaatgtcttcaatgtgaatatttaaaacacacaggtgacctgtttggtgatttatttcttaataaagcaggagccttgtaacatgggagtggttccatgcaaagggaacagcatgcacc

SEQ ID NO: 943878 - DNA, 120 bp, Artificial Sequence
  ENSG00000242049_8 (sequence is synthesized)
aggctcagtggctcagtggaaagagagcaggcatctgtagttgactacacctgggaccgaagggatggtgggaatagagcccagagaggggcaggggctgcacaaggcagggctcagacc

SEQ ID NO: 943879 - DNA, 120 bp, Artificial Sequence
  ENSG00000242049_9 (sequence is synthesized)
ccagaccacagagcatggattgtgtcctgggagggggagaccttgagaagatttaaacaaggggagaatgggatctatagcatactctagaaagatccctcagcagcaatgagattcagt

SEQ ID NO: 943880 - DNA, 120 bp, Artificial Sequence
  ENSG00000242049_10 (sequence is synthesized)
tttatacccacaaaattggtaaaaatgtcagtttgacactgccaagtgttggcaaggaaatggagcaactgaaattcccacaccctgctggtgggaacatacattggaacagccaatttg

SEQ ID NO: 943881 - DNA, 120 bp, Artificial Sequence
  ENSG00000242049_11 (sequence is synthesized)
gaaaatccttctaaggcttatgccccgagggaaaccctcacacgtgggaatagggacaagaacactcattgctgcactgtttatggtagcaacagacaggagtgaccgaaatgtccatct

SEQ ID NO: 943882 - DNA, 120 bp, Artificial Sequence
  ENSG00000242049_12 (sequence is synthesized)
taaggagaatgagcaaataccttgtgttacagctgcacaggggactatgacactgcagtgagaacgaagaaaccgactccatacgtgagcatggaggagcagccccagcatggcagtgag

SEQ ID NO: 943883 - DNA, 120 bp, Artificial Sequence
  ENSG00000242049_13 (sequence is synthesized)
cagcacaaaccagtcattgaaagcatcattgtgacaccatttattgaaaacgtacacacatgcagaataatgcgttaaggatttatacatatagagtaaaagtataacaacatgcatggg

SEQ ID NO: 943884 - DNA, 120 bp, Artificial Sequence
  ENSG00000242042_0 (sequence is synthesized)
cacgcacagtgctatctgtgagcagttctgtgttcatgagagtttgctacatgagaggcataactcagcccagccaattcatcagaatcagcaaatgtgacaggacatgagacacatgga

SEQ ID NO: 943885 - DNA, 120 bp, Artificial Sequence
  ENSG00000242042_1 (sequence is synthesized)
aaagtggctgaagatgctgggagaatggcagaaatataggatgagcaagaaggtcatgaaagaaaagggcaagaggtcctctgaacctatccaccagattgacctggaggtgagccggac

SEQ ID NO: 943886 - DNA, 120 bp, Artificial Sequence
  ENSG00000242042_2 (sequence is synthesized)
actgaggaatcacataatatttaggaaatgatatggcatcaggtaagcctatgggggccacagggtcccagcagagatgaagtgaaccagagggatggagacttccccagagcaaaaacc

SEQ ID NO: 943887 - DNA, 120 bp, Artificial Sequence
  ENSG00000242042_3 (sequence is synthesized)
agcttcacccaggagggatgacggagctgccaagggctctcctggcccagggaggagcccgtaccatgcactgaggacctcccaggttccaagctctgggccaggctagaacatgtgggg

SEQ ID NO: 943888 - DNA, 120 bp, Artificial Sequence
  ENSG00000242042_4 (sequence is synthesized)
aacccagaaggatcctgaggagacagaaggcagcaaacaaaatcatgcacaatggtgaaaagtgctctccctgacccatgggacccatggtatggacccatgggtggggggcagcaggat

SEQ ID NO: 943889 - DNA, 120 bp, Artificial Sequence
  ENSG00000242042_5 (sequence is synthesized)
ggagggctggtgaacctcctctggcaacaccgacagcacccaatgctgggggggggggggacctggggccccggagactcctctggcgacaccgacagcacccaatgctgggggcggggg

SEQ ID NO: 943890 - DNA, 120 bp, Artificial Sequence
  ENSG00000242042_6 (sequence is synthesized)
cattcggggccccggagactctcatccacagctggtggaaatgtgacatgacacagccactttggaagccagttgggcagtcgctcgcaaagctcagtggactcaaaccacacatccccg

SEQ ID NO: 943891 - DNA, 120 bp, Artificial Sequence
  ENSG00000242042_7 (sequence is synthesized)
gtggactcaaaccacacatccccgaagtgtcacagacattgaaccaactgatttgaaaactgacatccacactgtagaaagtaaaaagttccttttcaaagtttcccttcttgttaaaga

SEQ ID NO: 943892 - DNA, 120 bp, Artificial Sequence
  ENSG00000259676_0 (sequence is synthesized)
gagagctgtggagcaaggagattccctgtgtaatcgggagcactggatgtgaatcccaggtctggcatgggaaccttggtgagtgatgctgagtggaatgttacgtatcaccatcatcat

SEQ ID NO: 943893 - DNA, 120 bp, Artificial Sequence
  ENSG00000259676_1 (sequence is synthesized)
cagcatccatcccaccaccatcatcacaaccaccaccaccaccatcatcatcatcatcatcatcaacagctttttccaagcaagtctggaataagaagagaagtcggaggatttaggctt

SEQ ID NO: 943894 - DNA, 120 bp, Artificial Sequence
  ENSG00000259676_2 (sequence is synthesized)
agatcgtagctggctcttctctattcttttccttattccagccattagagtcttttgggactggcttctcaacctttgtcacattgggcttgatatttttagtttctttcagtggtaaat

SEQ ID NO: 943895 - DNA, 120 bp, Artificial Sequence
  ENSG00000259676_3 (sequence is synthesized)
attagattattcagaaaaattgttgtcccagatttccacacatgatggtatagatacagaatatacacttataaaataagcagaaatgatatctcatgaacatttgctagaattgaaata

SEQ ID NO: 943896 - DNA, 120 bp, Artificial Sequence
  ENSG00000256462_0 (sequence is synthesized)
gtcattcagacgagcaggtgggaaggtcggcaggagtgcagagaagagacgcgggaagcgggatgcagagagttcacctgtccgtctccgtccgtgtccgcggcccggatcatctcgtcc

SEQ ID NO: 943897 - DNA, 120 bp, Artificial Sequence
  ENSG00000256462_1 (sequence is synthesized)
acctcctcgtcactcagcttctcccccagccgggtcatgacgtgtcgcagctcggcggcgctgacgaagccgttgccgtccttgtcgaacacgcggaaggcctcgcggatctcctcctcg

SEQ ID NO: 943898 - DNA, 120 bp, Artificial Sequence
  ENSG00000256462_2 (sequence is synthesized)
ggttctggcccagggaccgcatgaccgtgcccagctcgcgggtggtgatgcagccgtccccatccttgtcaaacagggagaaggcctccttgaattctgtgacctgctcctcagtcagct

SEQ ID NO: 943899 - DNA, 120 bp, Artificial Sequence
  ENSG00000256462_3 (sequence is synthesized)
ggtcggccatgccaggggtgggggcgtgggtggcagaagaggccactgtggggtctccctcccagtgccgcagcccggctgctgtcccagctctggggtggcaggtggagatccgggcgg

SEQ ID NO: 943900 - DNA, 120 bp, Artificial Sequence
  ENSG00000256469_0 (sequence is synthesized)
tctctcctgctgccttgtgaagaaggtgcctgcctcctctcaccttcctccataatcataagtttcctgaggccaccccagccatatggaactgttcagaactaatttgttgcaactgtt

SEQ ID NO: 943901 - DNA, 120 bp, Artificial Sequence
  ENSG00000256469_1 (sequence is synthesized)
tgttttggtatccatgccaagccttgtggagtcaaactcatacatgagttccaaagagcaaccccagaggactgcacccagaagggctccaccactgcctgctctcccaacgaaagcctg

SEQ ID NO: 943902 - DNA, 120 bp, Artificial Sequence
  ENSG00000256469_2 (sequence is synthesized)
aagaaagggttctgcacatgctctgaaagttttggaagataatgtgtttttcctggcagcttagctatatggacctgcagacagtaatagttctcatgtacagaggcatctaattagtga

SEQ ID NO: 943903 - DNA, 120 bp, Artificial Sequence
  ENSG00000256469_3 (sequence is synthesized)
aactctagcttcagagacctgactccaacttctccagttccatataatatcctggcagcacacagaaactgccagacaacgcagtcaagggtgaagcagaacaatgctggaataccttcc

SEQ ID NO: 943904 - DNA, 120 bp, Artificial Sequence
  ENSG00000246740_0 (sequence is synthesized)
attctagaggactgggcggggagatggtgtcttcccggccgggtggcactgaccggtcatgctcagggcccccttctggttgccggtgcctcacctctggccaggtggcatcggcttccg

SEQ ID NO: 943905 - DNA, 120 bp, Artificial Sequence
  ENSG00000246740_1 (sequence is synthesized)
ggtaaatctgagctgcccaaagcgagcctccggaggctgctccatctcctggaacgtttactcattcaggcctctggacgtcgatactggggatgaaaagttcagaaagtggacagattc

SEQ ID NO: 943906 - DNA, 120 bp, Artificial Sequence
  ENSG00000246740_2 (sequence is synthesized)
ctggtcttcagtccagacctactgagttaaaatattgaggagagatggagctcaacagatgccctaggtgactctgatgtggcctaagtctggggaaacagtacaccctgcagtacttct

SEQ ID NO: 943907 - DNA, 120 bp, Artificial Sequence
  ENSG00000246740_3 (sequence is synthesized)
ccaacctaacagaaatgcggattctgattcgcaatgtttcctgaaatatacctgagcttggaacagcatggatctgtacgagctggtgccccactagttgatgacatggcttcatgaaaa

SEQ ID NO: 943908 - DNA, 120 bp, Artificial Sequence
  ENSG00000246740_4 (sequence is synthesized)
cagaggagcacctcaccactagaagagacccttgcagtaggaaacaaagctgcatgagaaaaggtcttcctccagctgcagcacctgcttcagggccttggccaccacgaccttccgctt

SEQ ID NO: 943909 - DNA, 120 bp, Artificial Sequence
  ENSG00000246740_5 (sequence is synthesized)
ctgcagaaactccagctctgctgggcacaggctgaagcccagccgcacgtccagtgtctcagggctggagggagagaggaccctgtattgggcctgcagcctctacctccctggagtaga

SEQ ID NO: 943910 - DNA, 120 bp, Artificial Sequence
  ENSG00000246740_6 (sequence is synthesized)
cacagcttcagggtccattggacctaggctcaaagcctacttctgccagcgaccacttctgtgaccttgggtctccactttcccatctgtaaagtggggcgaatcgtgctgaactctcag

SEQ ID NO: 943911 - DNA, 120 bp, Artificial Sequence
  ENSG00000246740_7 (sequence is synthesized)
cactgtcttcagcacttaaagagataacaaatgcaaagcccccaaagccttagctggcacaatgcgagctggtactcaacaaaagataactgttggcactgtgttagggacgctttgagt

SEQ ID NO: 943912 - DNA, 120 bp, Artificial Sequence
  ENSG00000246740_8 (sequence is synthesized)
cctctgtctcctcggccagatctggaaagtccagaaagtcttcccccaggtggcttctctagcccagggccaggcatgggtgacaaaaggcgctgagatcattttgccaaatccctctga

SEQ ID NO: 943913 - DNA, 120 bp, Artificial Sequence
  ENSG00000246740_9 (sequence is synthesized)
acaaggccccacggtatggactcttctgtgctaggtaaacaaactccctgttcctatggagctcacgttcttcaatgagctcttcctgctcctagaataacaattattctgtgtgtgtgt

SEQ ID NO: 943914 - DNA, 120 bp, Artificial Sequence
  ENSG00000246740_10 (sequence is synthesized)
ctcttttttttttttaatcacatccctgccccaaacaagtccaggctcctggcctggcatccaagaccctgcctgatctttccaagctcacctcaaactacccgcgaaacttctgggtca

SEQ ID NO: 943915 - DNA, 120 bp, Artificial Sequence
  ENSG00000246740_11 (sequence is synthesized)
ggtcccagagctcccagaagcagtcctgtttccgggtcttggcacaggcccctgccttcaccagaagtgtcttccctttgcccacctccagcctgtgcatcctctgaggcccagctcccc

SEQ ID NO: 943916 - DNA, 120 bp, Artificial Sequence
  ENSG00000246740_12 (sequence is synthesized)
agtgactccagatgaatgtaccttgaccatttccaactgagccttggctcactgacaaagccacatctccttgaaggctgggcctaggagatttccatcatgtctcctctttgtccagca

SEQ ID NO: 943917 - DNA, 120 bp, Artificial Sequence
  ENSG00000246740_13 (sequence is synthesized)
cagggctgcagacatggctgttagaaaataattctttctttggcctcaacagggaatgaataataataatacaacaacaataataacaataacattagctgacgtttgctgagcatccca

SEQ ID NO: 943918 - DNA, 120 bp, Artificial Sequence
  ENSG00000246740_14 (sequence is synthesized)
cttgccagatggattactgagtacttcgcacgtgctgtctagctggatcctcagagcaacccagtgatgcacaggatccttgttattctcccaatgtacagatgaggaaaacagagactc

SEQ ID NO: 943919 - DNA, 120 bp, Artificial Sequence
  ENSG00000246740_15 (sequence is synthesized)
agtaagggcaaagagcttttccaagggcaaatagctaatcaaactgtcaatagaaatcatggccacttgatttctgacaatcaagatttctgaaaacgatgttgttttcagcagatggtg

SEQ ID NO: 943920 - DNA, 120 bp, Artificial Sequence
  ENSG00000246740_16 (sequence is synthesized)
ctgagacatctggatatccacatgccaaagaacgaggttgagcccctcttttacaccatgtagattgattacctaaaaattgatcatagacctaaatgtgagagctaaaactaaacaagt

SEQ ID NO: 943921 - DNA, 120 bp, Artificial Sequence
  ENSG00000246740_17 (sequence is synthesized)
tgatcatagacctaaatgtgagagctaaaactaaacaagtcttagaaaaaaacatgggaatatattttcaggactttggtcgggcgcggtggcgcacgcttgtaatcccagcactttggg

SEQ ID NO: 943922 - DNA, 120 bp, Artificial Sequence
  ENSG00000254919_0 (sequence is synthesized)
tatgaggttggaacggctgtagccatctccatctattgagggaacacgggtttgagaacacagtcaagtcaggacgagaacaagagacgctggatcttgaggacagtgcttgagccctcg

SEQ ID NO: 943923 - DNA, 120 bp, Artificial Sequence
  ENSG00000254919_1 (sequence is synthesized)
aatcaatcaatgtctaaactaatggagggtcgatgaagacatttggccagaggaccctgaaacacctgaatcccacctttggctggctagccccatttctcagcagtgccttcacaggag

SEQ ID NO: 943924 - DNA, 120 bp, Artificial Sequence
  ENSG00000254919_2 (sequence is synthesized)
caggagaatgccatttggttgaattttggctacagtgtacggacataaagaatttgggtcattcttatacccaacagaccacatccaggaaatgtattcaagatgctttgatctcatctg

SEQ ID NO: 943925 - DNA, 120 bp, Artificial Sequence
  ENSG00000254919_3 (sequence is synthesized)
aggggtggctaagtacaacccattcttaataaagctatttatagtgagaagcaatttgggtcaggcctgcctttccagtctgcctcattggcaaagtggtaggcccctgacttctgtctc

SEQ ID NO: 943926 - DNA, 120 bp, Artificial Sequence
  ENSG00000254919_4 (sequence is synthesized)
ttctcaggtattacctgttcgactttctagtttcatgttctctgcctctggctgatgtgtattggctcaggttttttgtggtttggttttgattcttggttttcaactatatcagagaaa

SEQ ID NO: 943927 - DNA, 120 bp, Artificial Sequence
  ENSG00000254919_5 (sequence is synthesized)
aaagcgaaagtattttgtcacctttgcctagaatatttgccgaatggtggctgcccaagtcctttcaaattgagtgaagaaatctgagcctgcttccaggtgggaggaggactgtgtttc

SEQ ID NO: 943928 - DNA, 120 bp, Artificial Sequence
  ENSG00000254913_0 (sequence is synthesized)
ccgaagccaacctgtcctgactatggctcataggaaaagccaagtaagacagttcccgggcctgatcctgaatcagggaatcatatttcctaatgcaggacagaagaggaaagtcaccag

SEQ ID NO: 943929 - DNA, 120 bp, Artificial Sequence
  ENSG00000254913_1 (sequence is synthesized)
ttcatcctaagtctagatagaacctttcatgccttctgttttaaccaccacctgatgcctgaatttcttctatgttacgatactgtggctgactacattttgcaatgatggccatcattt

SEQ ID NO: 943930 - DNA, 120 bp, Artificial Sequence
  ENSG00000254913_2 (sequence is synthesized)
aaacgctcataccatcaactgatgggacccaaaacaagagaccctaagtgagaaccacccagctgagcccagtcaaaccatagaaccatgaagcataataaagtgttgtttgaagtcact

SEQ ID NO: 943931 - DNA, 120 bp, Artificial Sequence
  ENSG00000254911_0 (sequence is synthesized)
gctttctgagatctgcttttagtgaagtggatcaatgatgaaactagccaaatctgagcatcagaagtctttccagtctacctgatgcatgatctctacagttctgagaagcaaaactat

SEQ ID NO: 943932 - DNA, 120 bp, Artificial Sequence
  ENSG00000254911_1 (sequence is synthesized)
attgagggtgggggggtgcgtatgtatgtctatgaaagcctaatcatttctgggcaatgatgaaaaggttttactactgatctttgtaactatgatggtttctacacttgacctgagctc

SEQ ID NO: 943933 - DNA, 120 bp, Artificial Sequence; identical to SEQ ID NO: 854769
  ENSG00000254910_0 (sequence is synthesized)

SEQ ID NO: 943934 - DNA, 120 bp, Artificial Sequence
  ENSG00000254910_1 (sequence is synthesized)
cagggtgtcccggactcagcactgacgttcccggaaagagcccacgttgagtaggagctgagacctgcaggacacaggaactcctcccagggtcctggatccagctgctgctcacggcag

SEQ ID NO: 943935 - DNA, 120 bp, Artificial Sequence
  ENSG00000254910_2 (sequence is synthesized)
gaggcccgaaaccagaaggcctgagcacttgccccgtccccaagagatgcacagaggctggaaggggcagtgcaggggctgaccaacctgctcatgaaaggagggtccagctgggcttcc

SEQ ID NO: 943936 - DNA, 120 bp, Artificial Sequence; identical to SEQ ID NO: 861525
  ENSG00000228240_0 (sequence is synthesized)

SEQ ID NO: 943937 - DNA, 120 bp, Artificial Sequence
  ENSG00000228242_0 (sequence is synthesized)
atgacctgtacttctctgctctctcccctactgcaaagaggcagtgagggcagcattagtaagcctgactcaggggaagatgaacaccacagacggggtaaatgatttgcctaaagtcac

SEQ ID NO: 943938 - DNA, 120 bp, Artificial Sequence
  ENSG00000228242_1 (sequence is synthesized)
acagctcgtaagggccagagcccacactttcatccactagcctatattctgtgctgtcatcactgatagcagtgactgagactgagagacaaagtcacttaagagctgatggctgctact

SEQ ID NO: 943939 - DNA, 120 bp, Artificial Sequence
  ENSG00000228242_2 (sequence is synthesized)
acagccacgtgtccctggaatgcagagtgtgcacacaatccctgtggaaccaacacaggacacaaaggttttcttctcctctgctgtccagagcctgtgagagctccagctgcagactat

SEQ ID NO: 943940 - DNA, 120 bp, Artificial Sequence
  ENSG00000228242_3 (sequence is synthesized)
caggatggggtaaaggccgctgtgcgcaggcacactcacgtttactaccaccaccaagcgaacacctgctgaggctctgatctgctgttaacaccatgtgggggagggaagtgtccagga

SEQ ID NO: 943941 - DNA, 120 bp, Artificial Sequence
  ENSG00000228242_4 (sequence is synthesized)
gggggcagtgaacccaaaggaaggctgcagagaagccaactataataagctaataagctatcacagaatcaagacacctgcacatggaacagtcaaatgattcctgcaggcaaagttcct

SEQ ID NO: 943942 - DNA, 120 bp, Artificial Sequence
  ENSG00000228242_5 (sequence is synthesized)
cccagcagatgacctgtacttctctgctctctcccctactgcaaagaggcagtgagggcagcattagtaagcctgactcaggggaaggtaagtggcctgcagagaaatggtcctaggtcc

SEQ ID NO: 943943 - DNA, 120 bp, Artificial Sequence
  ENSG00000228242_6 (sequence is synthesized)
gcaaccgaggcgagtgaacttgtcggacagatgaagactctaactggaagaaacgatcagcgcattcacggatgcaccaccatccagaaatctcccggtggcttccatacaaaaactgat

SEQ ID NO: 943944 - DNA, 120 bp, Artificial Sequence
  ENSG00000228242_7 (sequence is synthesized)
gtttctaaagatggaaagaacaggtctaggaggcagaagagtatctcctagcaaagtgttctgtagctcaaaggtcaggagcacgtctttgaattcctcgcagacgatgtatccatcagt

SEQ ID NO: 943945 - DNA, 120 bp, Artificial Sequence
  ENSG00000228242_8 (sequence is synthesized)
cctgtggggacacaacgcgatgtcaaccctcgaacctgctgcctgctctgcctctcctccctccccagtttgtggaagacagtgggccacatctgagcactaggggtcctgaaggatgtc

SEQ ID NO: 943946 - DNA, 120 bp, Artificial Sequence
  ENSG00000228242_9 (sequence is synthesized)
gcgggtcagccagtgtcccacatcctccgtgcagaaggcaggcctgtggaagctggcactgcctcttcctccccagattctgccgaagaaagctggggtgaaagcccctatccagcctca

SEQ ID NO: 943947 - DNA, 120 bp, Artificial Sequence
  ENSG00000228242_10 (sequence is synthesized)
cccatcatggaacagagctcactaaccaggcagctgccggggaaagatgctgactgttttttgctcactagcctgtgagtccctaaacctgggaagaacgttttaatccagcattacgat

SEQ ID NO: 943948 - DNA, 120 bp, Artificial Sequence
  ENSG00000228242_11 (sequence is synthesized)
aacatcctgaaaattggagccaccaggcctcaactcccagcagccccatgccagctttccatccccatctctggagccacccctccccatccctgtgtttagcctccatcgaaggcccct

SEQ ID NO: 943949 - DNA, 120 bp, Artificial Sequence
  ENSG00000228242_12 (sequence is synthesized)
cacgcacacgggatgggagtagccgccatggaaatcaaagccagtgatggcctggacacagtcgatgtccagcttgcgggccacgcggtgtagattgggcaggttcagctggacacagcc

SEQ ID NO: 943950 - DNA, 120 bp, Artificial Sequence
  ENSG00000228242_13 (sequence is synthesized)
tggttccagcacaaaagacaggtgagatggtgcagagaaaatcctcagcaaccctgcaggcccaggcagggggcatcgcccactccagcctgctgctggcagtgactgtgaccagcgcct

SEQ ID NO: 943951 - DNA, 120 bp, Artificial Sequence
  ENSG00000228242_14 (sequence is synthesized)
gcagcctttcccactaagcggaggcccctccactccccactcagcttcccggagtcttgcaacccccaaggactcctggggtctgatgagaagtaaatggtctctgtgatcagccactgt

SEQ ID NO: 943952 - DNA, 120 bp, Artificial Sequence
  ENSG00000228242_15 (sequence is synthesized)
aagtgtgagaccagtttccatagcaaccccagtctgtttctcaacaagaggttccagccagcctcttgccacatatgagtcataactcaagtgttttgtttgtttcccttggataaaagt

SEQ ID NO: 943953 - DNA, 120 bp, Artificial Sequence
  ENSG00000228242_16 (sequence is synthesized)
gactccgatttttaatggctcctctcaaagattaacatctcttcactaaatacagaagaattccatatgtaatgaatttccagcctccatgaaaacaaaatggactctttcatgctgtct

SEQ ID NO: 943954 - DNA, 120 bp, Artificial Sequence
  ENSG00000228242_17 (sequence is synthesized)
caacatatgaatacattgctctgtcacctgggtgttattaccgacttaaatctgaaagaagctgggcacggcagtggtgtgtgggtgcctgcagtcctgaggagctgggactgtttcccg

SEQ ID NO: 943955 - DNA, 120 bp, Artificial Sequence
  ENSG00000228242_18 (sequence is synthesized)
aacaatgcctttccaccacacacggtggttgtgagggccagctgaggcaaagccctcaggaagaccactcaagcccaggagtccagcctgcgcaagacactttttttaggcttctgtcac

SEQ ID NO: 943956 - DNA, 120 bp, Artificial Sequence
  ENSG00000228242_19 (sequence is synthesized)
gtttgcacccccttcactctgtccagggagcggctccaatgagcaagggcaccccatttcctcctagtgcaggttcagacccttacccacagaggaatctgaggctgaatttcagcacag

SEQ ID NO: 943957 - DNA, 120 bp, Artificial Sequence
  ENSG00000228242_20 (sequence is synthesized)
cacaatggatggaggttgaaccttgcctgtgccacttcctggctgggccacctggacaagtcactttaccttcctgagcctcagtacagacagtccccaaagtccagtggtttgattcaa

SEQ ID NO: 943958 - DNA, 120 bp, Artificial Sequence
  ENSG00000228242_21 (sequence is synthesized)
gatttttcaactttatgatgatgcaaaagcaatatgcacttgggagaaactgtgcctcaagtacccatacaaccattctctttttcattttcggtattcaataaactacatgagatattc

SEQ ID NO: 943959 - DNA, 120 bp, Artificial Sequence
  ENSG00000228242_22 (sequence is synthesized)
tgtagagacaataccagccgggtcaagagctgcagagcccggagaatcagtaagaatatctatgatgaaaaggaagaacatagttatcctaagaaagtaattaaagatgtaatgagttca

SEQ ID NO: 943960 - DNA, 120 bp, Artificial Sequence
  ENSG00000228242_23 (sequence is synthesized)
caaaggaacctgcactgaccttgggcccgtagcgacgcttcagcctctccctgatgagcagacctttggccagcaacttccagttccctagagcccgcttctcctttttctgcaggcaaa

SEQ ID NO: 943961 - DNA, 120 bp, Artificial Sequence
  ENSG00000228242_24 (sequence is synthesized)
aatgaagtgggagaaaagtgttaagcactgacattttcaggaaaaatattaagatggaaactgtgaatgtaaagacagatatatacaccactttagaatatagcctctccttcacaccaa

SEQ ID NO: 943962 - DNA, 120 bp, Artificial Sequence
  ENSG00000228242_25 (sequence is synthesized)
agtgatggcctggacacagtcgatgtccagcttgcgggccacgcggtgtagattgggcaggttcagctggacacagccaataggcatcatgctgggcaggaagaggctggagtgccctgg

SEQ ID NO: 943963 - DNA, 120 bp, Artificial Sequence
  ENSG00000228242_26 (sequence is synthesized)
ccacctcccggattcaagtgattctcgtgcctgtctcctgagtagctgggactacagatgaacaccacagacggggtaaatgatttgcctaaagtcacacagctcgtaagggccagagcc

SEQ ID NO: 943964 - DNA, 120 bp, Artificial Sequence
  ENSG00000228242_27 (sequence is synthesized)
ggacctcgctcggttcgtgttcctcaagagcaaccagcctaacagtgccgcagcacagtgtgaaaggagcactggctttaaggcagagcctgggattctcacctgggctctgctctgcca

SEQ ID NO: 943965 - DNA, 120 bp, Artificial Sequence
  ENSG00000228242_28 (sequence is synthesized)
gcctcgtctcccctgaccccgcctccgtgcatgctgcctcagtttgccttctcagcagagaagcccccaccaccaggggctgggcatgcccagggcaggtgtggggcctgtagtggggca

SEQ ID NO: 943966 - DNA, 120 bp, Artificial Sequence
  ENSG00000228242_29 (sequence is synthesized)
cccagcagatgacctgtacttctctgctctctcccctactgcaaagaggcagtgagggcagcattagtaagcctgactcaggggaagccctgcgcacctcacctttgctgttgctgactt

SEQ ID NO: 943967 - DNA, 120 bp, Artificial Sequence
  ENSG00000228242_30 (sequence is synthesized)
agcagatgacctgtacttctctgctctctcccctactgcaaagaggcagtgagggcagcattagtaagcctgactcaggggaagtcaggagcacgtctttgaattcctcgcagacgatgt

SEQ ID NO: 943968 - DNA, 120 bp, Artificial Sequence
  ENSG00000228686_0 (sequence is synthesized)
atacggccaatcagacatcaaactcaatttcaaaaatcctgaatttctttaggcttctcagatgcttgagagtttataaaagtcctcaatgccctagcttttggatactgcgacaggact

SEQ ID NO: 943969 - DNA, 120 bp, Artificial Sequence
  ENSG00000228686_1 (sequence is synthesized)
ggggtgggaagaaaagtcgggaaaatccctgctaggtttttcttaggcgggaaataaattttgaccatttaaacatacacaggtccactggttactaatatttatctcatacagatatca

SEQ ID NO: 943970 - DNA, 120 bp, Artificial Sequence
  ENSG00000228686_2 (sequence is synthesized)
acaaagtcttgctctgtcacccagtcctccctcacctaatttatttgaaaccctatgatataaaacagattaaagaagagctgctcagcttaaagcacaagtaggaatcagaaccctttt

SEQ ID NO: 943971 - DNA, 120 bp, Artificial Sequence
  ENSG00000228686_3 (sequence is synthesized)
tactctttttttctccctgtctgcttgagccatcttttcctactctcaatccttgaggaacataaaaaatacataatttgaaaagaactgattctgtttatcaatagggaaaaaataatt

SEQ ID NO: 943972 - DNA, 120 bp, Artificial Sequence
  ENSG00000228686_4 (sequence is synthesized)
tcatttattttatccatactaagtttatctctttttgctgaaaaaggtatattaatattaatgtccatattaaatatgaacattagccaggcatcgtggcacgctcctgtagtcccagct

SEQ ID NO: 943973 - DNA, 120 bp, Artificial Sequence
  ENSG00000239415_0 (sequence is synthesized)
ttgaaatgttattcacataccataaacttcacccatttaaagtgtacatttcagtgatttttagatatattcacagggttttgcaaccatcactgttaataattccagaacaccttttca

SEQ ID NO: 943974 - DNA, 74 bp, Artificial Sequence
  ENSG00000239415_1 (sequence is synthesized)
ttgcaaccatcactgttaataattccagaacaccttttcacttagaaagcctgtattcgtgtggtacactttgt

SEQ ID NO: 943975 - DNA, 81 bp, Artificial Sequence
  ENSG00000239415_2 (sequence is synthesized)
atcagcttcatagtaagatgtggtatttgtggacctaggtctgtgtgatatttttctttcttcttttcctgaaagtcttta

SEQ ID NO: 943976 - DNA, 120 bp, Artificial Sequence
  ENSG00000239415_3 (sequence is synthesized)
tgtgtgatatttttctttcttcttttcctgaaagtctttataattcaaatatagaattagattcttcaagtgttttttttgttttttgttttttttaaatctgtagaattctagcaaatt

SEQ ID NO: 943977 - DNA, 120 bp, Artificial Sequence
  ENSG00000239415_4 (sequence is synthesized)
ggttaaaagtcaagttcatgggagatgaaggctcagtggatgacacatccagcgatgctggtgggattcagacgctttcgcttttcaactcacttagcagcaaaggggatcagatgattt

SEQ ID NO: 943978 - DNA, 120 bp, Artificial Sequence
  ENSG00000239415_5 (sequence is synthesized)
gaagcatggctggggaggcctcaggaaacccacaatcatggtggaaggctaaggggagggaggcatgtcttacatggccaaagcaggaggaagagagagagaagggggagatgccacatg

SEQ ID NO: 943979 - DNA, 120 bp, Artificial Sequence
  ENSG00000239415_6 (sequence is synthesized)
aggaggaagagagagagaagggggagatgccacatgcttaaccagatctcgtgagagctcactatcatgagaacagcaaagtgggaggtgccacacacttctaaacaaccagatctcgtg

SEQ ID NO: 943980 - DNA, 120 bp, Artificial Sequence
  ENSG00000239415_7 (sequence is synthesized)
acagctcactgtaatgagaacagcaagggggaggtgctgcacacttaaccaggtctcgcgaggctcactttcatgagaacagcaagggggagtttccacacacttaaccagatctcctga

SEQ ID NO: 943981 - DNA, 120 bp, Artificial Sequence
  ENSG00000239415_8 (sequence is synthesized)
gagctcactatcatgagaacagcgagggtgagttgccacacacttaaccagatcttgttgagagctcactatcatgagaacagtgagggggagttgtcacacaaccacatctcgtgagag

SEQ ID NO: 943982 - DNA, 120 bp, Artificial Sequence
  ENSG00000239415_9 (sequence is synthesized)
ctcactatcatgacaacagcgaaggggagttgtcacacacttaaccagatctcgtgagagctcactatcatgagaacagtgagggggagttgtcacacacttaaccagatctcgtgagag

SEQ ID NO: 943983 - DNA, 120 bp, Artificial Sequence
  ENSG00000239415_10 (sequence is synthesized)
ctcactatcatgagaacagccagggggattccacccccatgatacaatcacttcccaccaggcccctcctccaacattggggattacagttcaacatgagatttgggtagggacacaaat

SEQ ID NO: 943984 - DNA, 120 bp, Artificial Sequence
  ENSG00000239415_11 (sequence is synthesized)
ccaaaccatattacttggcaacagtcttagaccaaaagcatttaagagttgattgttatttcaagctgtgttaaggtacattgatagacctgcttcattttagactcttcagtaagatag

SEQ ID NO: 943985 - DNA, 120 bp, Artificial Sequence
  ENSG00000239415_12 (sequence is synthesized)
tttatagtctgtttactatagttccatttttttccccttaaagaaacttttggcattttaaaaaagaaaaaattgacatgatcttattttctgtaaccacatagcatacagaagtcatat

SEQ ID NO: 943986 - DNA, 75 bp, Artificial Sequence
  ENSG00000239415_13 (sequence is synthesized)
tcacccaggctagagggcagtggtgtgataacagctcaccgcagccttgacctcctgggctcaactgatcttctt

SEQ ID NO: 943987 - DNA, 78 bp, Artificial Sequence
  ENSG00000239415_14 (sequence is synthesized)
ctgcatgcttcagtctatacagtttatttttaaaatagctttattgaaatgttattcacataccataaacttcaccca

SEQ ID NO: 943988 - DNA, 120 bp, Artificial Sequence
  ENSG00000239415_15 (sequence is synthesized)
gtgacactctacaaaaaaaatggaaagattagctgggcatggtggcccgtgcctgtagtctcagctactgaggcaggtttgcttgctgcggtgagccaagtttgtgccattgcactctag

SEQ ID NO: 943989 - DNA, 87 bp, Artificial Sequence
  ENSG00000239415_16 (sequence is synthesized)
gcttgctgcggtgagccaagtttgtgccattgcactctagcttgggcgacagagcgagaccctggccagatcgttgctccattttaa

SEQ ID NO: 943990 - DNA, 120 bp, Artificial Sequence
  ENSG00000226921_0 (sequence is synthesized)
attctcctctcctattaaatggaggccatcagcacacttagacacgcctgccagctttaagagtttagagctaaacaaatgaagcacacagtgcacttcaaagacttcgagaggaaggct

SEQ ID NO: 943991 - DNA, 120 bp, Artificial Sequence
  ENSG00000226921_1 (sequence is synthesized)
cagtgtgcacagaggccccaggaaccctgagcttccccaggatgcccatcctgagccctcgggggccatctaacccactcaaactccaaacactagtctctcccccatcacaaggaaaga

SEQ ID NO: 943992 - DNA, 120 bp, Artificial Sequence
  ENSG00000226921_2 (sequence is synthesized)
tcctggagacacccacatggctgagctggcaccataggcactcataatccaggttcagtttctgccagcactaatttggtttattccacatggctggagccactgcgggactccatttgt

SEQ ID NO: 943993 - DNA, 120 bp, Artificial Sequence
  ENSG00000226921_3 (sequence is synthesized)
tccggggccaccttcctgtcaccttttactgtttcttgagtcagcaagaaaggcagatccgactgaagactccagcactctcctcagctgcagcccccacagagctccgcgaagtccttt

SEQ ID NO: 943994 - DNA, 120 bp, Artificial Sequence
  ENSG00000226921_4 (sequence is synthesized)
ctcccacaggacagatctgaggcacccaccattagaagaaaggagtggagaaatgatatgcaggaagaaggcccattctgattcaccaatcgcatggacgcactttcctaccaggctagg

SEQ ID NO: 943995 - DNA, 120 bp, Artificial Sequence
  ENSG00000226921_5 (sequence is synthesized)
cgcggggacgctgggggacgtgggggcgccgagggacttggagggcgccgagggacgtgggggcgctgagggacgttgggggtgctgaggggacgcccgcaggggccgctgagggacgtg

SEQ ID NO: 943996 - DNA, 120 bp, Artificial Sequence
  ENSG00000226921_6 (sequence is synthesized)
ctgagggacgtgggagtgttgagacacagacacaggaagcatcaactctgaggctttggccaggatgtgagcccgactttcgcagccccaactggcaggctgacctcatgtgaactccct

SEQ ID NO: 943997 - DNA, 120 bp, Artificial Sequence
  ENSG00000226921_7 (sequence is synthesized)
ggcgatggcatcctggagacacccacatggctgagctggcaccataggtgaggccacttcctgcgaaggtagctggatgctcctgcctggagctgcccccggaccacagagcatccagga

SEQ ID NO: 943998 - DNA, 120 bp, Artificial Sequence
  ENSG00000226921_8 (sequence is synthesized)
gatgaatgcacttccagccccgccaccctggggagatatacagctgaggtggcagctttggagcaagcagggcagagatgcttccccctgaggtccctcccagctctgctaccttgtcac

SEQ ID NO: 943999 - DNA, 120 bp, Artificial Sequence
  ENSG00000226921_9 (sequence is synthesized)
ctttggtgtcatgaaaaaagagttcagcttcccaaatcagagaggaaaaggttttcaaggggtcccctatttctattatgtaagctttaaatgacaaagtggacctctggggccaacgtg

SEQ ID NO: 944000 - DNA, 120 bp, Artificial Sequence
  ENSG00000226921_10 (sequence is synthesized)
ggtgtgtgatggtggttttgtgggattctccccatagccccatcagacggcctcaccttctgggtctcagtggccccaggtgcaacacggctcctccagaaatgatgacagccctggcga

SEQ ID NO: 944001 - DNA, 120 bp, Artificial Sequence
  ENSG00000226921_11 (sequence is synthesized)
ccaaggactccctgtgccactgggtttgcgctcagaagtatattcaatgatttccccagaaaattccaagtcatctcctaatactgtttgtgaaaactaaatgaactgtcgtggtcttct

SEQ ID NO: 944002 - DNA, 120 bp, Artificial Sequence
  ENSG00000226921_12 (sequence is synthesized)
tcagggacagtttgctaggaagggtggttattggcataattttccaaatcaatgaactaagttacaaaactttctcaaagaccctgatggctgttacaaagacagaaaagtgaatggtca

SEQ ID NO: 944003 - DNA, 120 bp, Artificial Sequence
  ENSG00000226921_13 (sequence is synthesized)
aaataaggtcattgcagatctaattaccatagtgaccccttatcctggggaaaatgttccaaggccctggtggatgtctgaaacctcagatagtacctaaccctatatacactgtgtttt

SEQ ID NO: 944004 - DNA, 120 bp, Artificial Sequence
  ENSG00000226921_14 (sequence is synthesized)
tgtgttttttcccatgtgtacagaaatacgataaagtttaatttataaatgaggcacaataatagattaataacaatgataaaatagaacagttataacaatatactgtaataaaagtta

SEQ ID NO: 944005 - DNA, 120 bp, Artificial Sequence
  ENSG00000226921_15 (sequence is synthesized)
ctgaatctggcagccactgtgtttgtcagacctgcctgccttgttcagcagggaaaccacttgctatgatgaatggagctgcatgtgaaacttagataagcaggcaggtcgaaaacacct

SEQ ID NO: 944006 - DNA, 120 bp, Artificial Sequence
  ENSG00000226921_16 (sequence is synthesized)
cctgtgccagcattccagttttcttgcttggcccaagaacctggtttcattttggaaggtggagggagtgtgtggcgaccttgttgccattttcaggcatggctgggctctcacacagtc

SEQ ID NO: 944007 - DNA, 120 bp, Artificial Sequence
  ENSG00000226921_17 (sequence is synthesized)
cacccacatggctgagctggcaccatagggtgagggcaccagggccatggggaccgtggttgcttgcctcagacatggccagcaagggaggcacaacatggggctgttgagtgaatgtgt

SEQ ID NO: 944008 - DNA, 120 bp, Artificial Sequence
  ENSG00000226921_18 (sequence is synthesized)
gagaggctgtgggtccccacagtccagccaccagcggcctcgcagcatcataggagtctgaggtccaagacaccggactcacatctcaaccctgccctgtgctgctcagggccaagtcta

SEQ ID NO: 944009 - DNA, 120 bp, Artificial Sequence
  ENSG00000226921_19 (sequence is synthesized)
agctgctgtgacaaagaggcccccacatgcagcagctgccacagaacacggtcatctgtttttcatgcacgctgtagccctggtcattccagccagagcctccaggttttgttgctcttc

SEQ ID NO: 944010 - DNA, 120 bp, Artificial Sequence
  ENSG00000226921_20 (sequence is synthesized)
cagggcacgttctgggctgtgtgatggaggctggactgtgggctcctctgaggaggtagagggatgcgcaccagggcccccgtgttgaggctcggctcccaccccatcacctctactcta

SEQ ID NO: 944011 - DNA, 120 bp, Artificial Sequence
  ENSG00000226921_21 (sequence is synthesized)
gagggacatggggacgctgaggcagcgcacgcgggccaccatcggccaaggatgagaccattagaacatctgcaatgggttgaaacgcctcgaatgcaacacagacacaggaagcatcaa

SEQ ID NO: 944012 - DNA, 120 bp, Artificial Sequence
  ENSG00000226920_0 (sequence is synthesized)
gttttaaataaaggccagaggttggacagggagttgctggcatgtccgcggcttggcccagtagaatgcccactaaccatcttgctccagcagctgaaaaggtcagaagttaaacatggt

SEQ ID NO: 944013 - DNA, 120 bp, Artificial Sequence
  ENSG00000226920_1 (sequence is synthesized)
atctccctcccgtgctgctgcaaacctggtgatccctggtgtatgggacagtaccgcaggaaagcccatctgatcatgccccagaacccactgatcgcgtggacgtagaacgactgctct

SEQ ID NO: 944014 - DNA, 120 bp, Artificial Sequence
  ENSG00000226920_2 (sequence is synthesized)
taccgtgtgaagtagagtcatcctgttcaagggaagaaaaagctccctcttttaatcctgtttctctctaagttagtagctattacacccaaatggttgagtttttaaaaattattttaa

SEQ ID NO: 944015 - DNA, 120 bp, Artificial Sequence
  ENSG00000226927_0 (sequence is synthesized)
gcatggtttgacttacactgtttttaaagattgctctggctgcaatgtgggtcctggcttcccacaccagggcatgctggtgccattcacggagataagaaatactggaagaccagtgaa

SEQ ID NO: 944016 - DNA, 120 bp, Artificial Sequence
  ENSG00000226927_1 (sequence is synthesized)
gctgatctggacctgagtcacagctccatcaaatgctggattattcaggagaacttgtatgatctcttcaaccttctagatgagctccatttgttaaaattacattaaataatatataaa

SEQ ID NO: 944017 - DNA, 120 bp, Artificial Sequence
  ENSG00000226925_0 (sequence is synthesized)
ggtaaattaatctctcaactggttgaacacagctttagagatgtcaacagcctcctatgagtctagagtcaggtggtacaggctcaactggtctaacagctgcaaattttgagagactgc

SEQ ID NO: 944018 - DNA, 120 bp, Artificial Sequence
  ENSG00000226925_1 (sequence is synthesized)
atttaaggtataggtatgatttacgtactttgagcagccaagccttcttcagaagaaacctgagcggcatgtgctcctccccacctgcttccccacaacaggaagaactctctgcagaag

SEQ ID NO: 944019 - DNA, 120 bp, Artificial Sequence
  ENSG00000226925_2 (sequence is synthesized)
gtctcctcaccttgttgaggcctgggaatgtgcaaatgtgcaggattttccacactattcgagagagagagtaaataaacttgtgtaagttaattgcatcaactacaaataagacctgta

SEQ ID NO: 944020 - DNA, 120 bp, Artificial Sequence
  ENSG00000237525_0 (sequence is synthesized)
agcaaatatcagaatcacctggcggtcttgatgaaacacaagctgctgagctttactccagaatttctggttcagtaggtctgcagtaggacctgaaattttatatttctaacaagtttt

SEQ ID NO: 944021 - DNA, 120 bp, Artificial Sequence
  ENSG00000237525_1 (sequence is synthesized)
caggagctgctgatgccgctagtacagggctcacattttgagaacctctggtctagcaagttgccaccaagaatgaagattgggccagagaacaggaggaaatttgttttgcaacagaaa

SEQ ID NO: 944022 - DNA, 120 bp, Artificial Sequence
  ENSG00000237525_2 (sequence is synthesized)
acataagaaattttccctgcttggaagatactcatacataccagttaagccagacatctaaaaccaagatgacgatgaaacttttcaagttgacacatcttacgagttttaaattcttat

SEQ ID NO: 944023 - DNA, 120 bp, Artificial Sequence
  ENSG00000237525_3 (sequence is synthesized)
taccttaaacccatattttccacactgtatctttgaagaaaaagaaggacatcctgaaggctattctgaaacaagtcaacattttgatttcaaacatcaaaaaaggtgtccagaaatctc

SEQ ID NO: 944024 - DNA, 120 bp, Artificial Sequence
  ENSG00000237525_4 (sequence is synthesized)
aagaatttgagacatcctaaggaactttaagtgctgtgagccacaagtaacatcaagaaaagacagggatgaagaaccgcacttacaagctaagtaagattaaacccagcatggagatat

SEQ ID NO: 944025 - DNA, 120 bp, Artificial Sequence
  ENSG00000237525_5 (sequence is synthesized)
atgaattaatatgaactctgagaaagaaattggtcagctaaaaaatatatggctttcctgaatagacaaaagaacaaagattttccctttgagattcggcaggaagcttgcaccgagtga

SEQ ID NO: 944026 - DNA, 120 bp, Artificial Sequence
  ENSG00000237525_6 (sequence is synthesized)
atgtcatttggaccagaccaaggctgctgtcatggaggacccacaccacagcttgggaaccattcatctaccagagggtcacatgacttcaaatgactcttctaggggccacctgccatg

SEQ ID NO: 944027 - DNA, 120 bp, Artificial Sequence
  ENSG00000237525_7 (sequence is synthesized)
atagggtaccagctcttcctctgaattcccaatccatttcttgagaactactgtttctaataaggatttgctcaaaatggatttgcaaagagaaaaaaaatttaatgtcacactgccatg

SEQ ID NO: 944028 - DNA, 120 bp, Artificial Sequence
  ENSG00000237525_8 (sequence is synthesized)
ataagtcaaccaaccatctcatatatcaaaggagagaggcagagaaagaaaaggaggaggataaagaagaggaggaagaggacgaaaggaaaaccaagaggaggagaagccacttcttac

SEQ ID NO: 944029 - DNA, 120 bp, Artificial Sequence
  ENSG00000237525_9 (sequence is synthesized)
tttggattaatgtgaaactaaatagtttactacattttaagtgggaaaatgttagttgaaaagatatttgtcaaccacaaacatttgaaagggaagcattccaaagattttcactgttta

SEQ ID NO: 944030 - DNA, 120 bp, Artificial Sequence
  ENSG00000237525_10 (sequence is synthesized)
tgttcaaattacaacatgtgcagaaagttgtgcaactgaaaatcctttcaaacaacagctacaaaagagattggtcagttaggacaggaatagaaagtggaaacttagaagactggctac

SEQ ID NO: 944031 - DNA, 120 bp, Artificial Sequence
  ENSG00000237525_11 (sequence is synthesized)
tccttgtgtatgattgctggggtgagtctgtgctgagaactttttacaaagggtgtcctttgctgatatgagaggggggtgtcaaacttttgagtgatcactgtgggtcctcagcttaga

SEQ ID NO: 944032 - DNA, 120 bp, Artificial Sequence
  ENSG00000237525_12 (sequence is synthesized)
catcttctctggcccaagatggcaccccttgctctctttccatgggacacagggaccttgccatccttccatcttataagccttctgtcatgatttttacttcatcctagatagccttaa

SEQ ID NO: 944033 - DNA, 120 bp, Artificial Sequence
  ENSG00000237525_13 (sequence is synthesized)
aagtctacaagcggaaaagtgatctgcaaagcccttcaggatctgaccccagaggaaatttgttttgcaacagaaaacataagaaattttccctgcttggaagatactcatacataccag

SEQ ID NO: 944034 - DNA, 120 bp, Artificial Sequence
  ENSG00000237525_14 (sequence is synthesized)
aaggtcatgtgggaatcagttaaatcacgtgtggatagaagacaagttccagctttgtgggaaatcctgtagccttcgccaggtacaccctgacaatctcagaactgatcagagtcttgc

SEQ ID NO: 944035 - DNA, 88 bp, Artificial Sequence
  ENSG00000237525_15 (sequence is synthesized)
aggtacaccctgacaatctcagaactgatcagagtcttgctctgtcatccatgctggcgtgcagtggcgtgatcttctaattctcctg

SEQ ID NO: 944036 - DNA, 120 bp, Artificial Sequence
  ENSG00000237525_16 (sequence is synthesized)
ccaatggtagttgtctgttctttcgatgtctatccagctatgattcccaaactcataagacagtctcatgggcccaacaaagtttttgttccatgtgagatacccacgccactttaaaaa

SEQ ID NO: 944037 - DNA, 120 bp, Artificial Sequence
  ENSG00000237525_17 (sequence is synthesized)
tgtgagatgccaaggttttagcatcgtcagattggcaatgagattggataacttctggggtctttttgaaattatatctttcttttctctaggatcctacttctggaaaataagattaat

SEQ ID NO: 944038 - DNA, 120 bp, Artificial Sequence
  ENSG00000237525_18 (sequence is synthesized)
actaatactaataagacacaaagatttttaatggaaataggaatatcttcaaaggctggatggacattgcatgcactgtatgacaacattcgtgtataataagatcctttccttagagaa

SEQ ID NO: 944039 - DNA, 120 bp, Artificial Sequence
  ENSG00000237525_19 (sequence is synthesized)
tggggcaaatccagatggaatgtgagaaagacttcaaggtttcagtggaatatgcttatattgggaattgtattagttaagactaggtttggctgcacatgacagaaaacccaacatagt

SEQ ID NO: 944040 - DNA, 120 bp, Artificial Sequence
  ENSG00000237525_20 (sequence is synthesized)
cacttacacaggattaaaacatttccttgtcatatgaaagtctagaagtggtatgtagctctgggtgtcagggatgaagattccttctaactgggaacccagcttcccatttcaaagatt

SEQ ID NO: 944041 - DNA, 120 bp, Artificial Sequence
  ENSG00000237525_21 (sequence is synthesized)
gcttcatattcaaaatggctgctgggtctccaggtatagagtccaccttccagctagaagaacaaagaaccaaaatgaggcgtgttctcccctgtaaggatactttcgtaagttgaatag

SEQ ID NO: 944042 - DNA, 120 bp, Artificial Sequence
  ENSG00000237525_22 (sequence is synthesized)
gatgctttcataagcatctcattggccagactggttagaacttagtaactggccacaatcagctggaaagaaggctggcaaatagaatatttaaggtggtcactgtaatcagcaaaaaaa

SEQ ID NO: 944043 - DNA, 86 bp, Artificial Sequence
  ENSG00000237527_0 (sequence is synthesized)
cttcgatactccaggttcttcaacttcgtgactcggactggcttctttgctctgaagattgcagacagcctattgtgggagctcac

SEQ ID NO: 944044 - DNA, 120 bp, Artificial Sequence
  ENSG00000237527_1 (sequence is synthesized)
ttgctctgaagattgcagacagcctattgtgggagctcaccttgtgattgtgttatgtttaatttcttcacaccactcaaaactcagcttctgatttcaagagttcaacaacagccctga

SEQ ID NO: 944045 - DNA, 120 bp, Artificial Sequence
  ENSG00000237527_2 (sequence is synthesized)
aggattctgtctgctttacagctatgtaaaatatgtttaatcttcagattcctacaagttccagatgacaatggaatataaaagacacaaggcagcttctgaaaagccactctgccctaa

SEQ ID NO: 944046 - DNA, 120 bp, Artificial Sequence
  ENSG00000237527_3 (sequence is synthesized)
gaagtcagcctacataattgaagacaagtgatgtaaataatttgccctgtatgctggtcccatgttcctggacttctcagtctcccccagaactgtaaaaaataaatttcctttctttat

SEQ ID NO: 944047 - DNA, 120 bp, Artificial Sequence
  ENSG00000237520_0 (sequence is synthesized)
ctgctcagcaaattccttgatttgaaattacgatcacaggttggagtgctacttaaaataattttgccaaatgttccatctctctgtgttgatgaatataatggatgacaatttaaagag

SEQ ID NO: 944048 - DNA, 120 bp, Artificial Sequence
  ENSG00000237520_1 (sequence is synthesized)
cccgaccatccgcaggacccacatccctctcagcgggaaggcagaatcattcatctattgctctccttgaagggcagctccagacactcacgtggacacaagtaggaaaagcacagagtg

SEQ ID NO: 944049 - DNA, 120 bp, Artificial Sequence
  ENSG00000237520_2 (sequence is synthesized)
tgtcatcacactgtgtacctcatacaggtgacgtcctggagaaacctctggaaaaacagaaattttatgacccacaattaaaatgatttaagtaataaataaccctgatagcttgcccca

SEQ ID NO: 944050 - DNA, 120 bp, Artificial Sequence
  ENSG00000237523_0 (sequence is synthesized)
ggggattggtccgggaaggtctcctggcgcctacccagcccccactgcctggacgcctgcgcctgctctgccgccccacagcgaccgcgaaggccagcttcttcgaaaggcccatttttc

SEQ ID NO: 944051 - DNA, 120 bp, Artificial Sequence
  ENSG00000237523_1 (sequence is synthesized)
tccgtggctgagcgaatgctcctagaataccacgtttataataaatcatgtagggtggaattcctgctggatgtatacacctttctgcatcagagctcttcaaacccagaatggtgaata

SEQ ID NO: 944052 - DNA, 120 bp, Artificial Sequence
  ENSG00000237523_2 (sequence is synthesized)
gctacccctgggcttacccttttataattttcaacaaacctgcgtttagccccggctaggtgccagcaagttgctagggactgaggaggctctgcagaggacccgagctgaggccctaat

SEQ ID NO: 944053 - DNA, 120 bp, Artificial Sequence
  ENSG00000237523_3 (sequence is synthesized)
cctcaaggccaatggcaggggtcaccgcccaggcacccccagagaacgcggtgtgaaggaaaagacaccaaactcggtgttcaaatgtgtgggatctattctagttctgattctgacact

SEQ ID NO: 944054 - DNA, 120 bp, Artificial Sequence
  ENSG00000237523_4 (sequence is synthesized)
tgcaagtcatgcatcctccgagcctcggctttctcacctataaaatcttcaacgtgacctataaaaatccataaaatcacccctgcttcattgtttcccagggctcatagaaacatcata

SEQ ID NO: 944055 - DNA, 120 bp, Artificial Sequence
  ENSG00000237523_5 (sequence is synthesized)
caaggtaagggaaggtggagaagagtacccaagaaggacaagcttggaatggggccccctccccaggctggagatcagacattgttggagaaggtatcattgcagccccctacatagcag

SEQ ID NO: 944056 - DNA, 120 bp, Artificial Sequence
  ENSG00000237523_6 (sequence is synthesized)
agagatttgctgagttgcatagtctagagctggttgcaattattggacaagcaggaaacaaacctccacagcccatgcgagccacactgctgggttgagtgtatgagcatgtagaatgat

SEQ ID NO: 944057 - DNA, 120 bp, Artificial Sequence
  ENSG00000237523_7 (sequence is synthesized)
tgggtctccagtgcggacagaaggcatggatcgcgtggtgcctgtgttgggaggatactaagagggcgatcaccatgccaggacaagactagttgcctgggatcttctgggcacgtgact

SEQ ID NO: 944058 - DNA, 120 bp, Artificial Sequence
  ENSG00000237523_8 (sequence is synthesized)
ggagcagagtaccactggatctcctcacaccagccagacccaggaagagaagctcctttcacctgcactgttctctcagcaccctccacggagaaagcttcatgttatgcttagtgtaca

SEQ ID NO: 944059 - DNA, 120 bp, Artificial Sequence
  ENSG00000237523_9 (sequence is synthesized)
agttgtaactggcatagatatcatggggatatttgaagaacgctgtgaacacatatgcatgggtccatgtattcatgagtgtgcacatatgtgtaattattcatacaattcatggtggat

SEQ ID NO: 944060 - DNA, 120 bp, Artificial Sequence
  ENSG00000237523_10 (sequence is synthesized)
actacttcgagggtgttcacagaccccaggcagagagcgcctggagggaaaattatccaaggcaggcccattcatagttccaggacagccagaagaaagcctccgttaagcaccagaagt

SEQ ID NO: 944061 - DNA, 120 bp, Artificial Sequence
  ENSG00000237523_11 (sequence is synthesized)
ctccggggcaggtggggccaggcagcatgaaagaattggccgcaagagttccaaaccctgtcccaattatggagggtgacttttctttgtcctccttctccattcccttccatattgctc

SEQ ID NO: 944062 - DNA, 120 bp, Artificial Sequence
  ENSG00000237523_12 (sequence is synthesized)
atgcatccaaagggagacctgaagactctctagcagggcaaggccattttcttttggcatttttctctccccagagtctagctgattatcagcttagacacacagcaggctatgtgctgt

SEQ ID NO: 944063 - DNA, 120 bp, Artificial Sequence
  ENSG00000237523_13 (sequence is synthesized)
gaacaacaggcatcctgggttattttacaaactcatggatagtcattttgaaaccacctttgcaaaattgtgactgaaacagtgaaagagagctaacttaaccagctccatcttgtttct

SEQ ID NO: 944064 - DNA, 120 bp, Artificial Sequence
  ENSG00000237523_14 (sequence is synthesized)
aactaactttgggagaaacttagtttgtagttatagtttaaacaaagactgtgacagccctttcccaatgcagacctccttcttgtctggggactagactaacattagccacaggattag

SEQ ID NO: 944065 - DNA, 120 bp, Artificial Sequence
  ENSG00000237523_15 (sequence is synthesized)
ctgtgacagccctttcccaatgcagacctccttcttgtctggggactagactaacattagccacaggattagaaattacggtttaggagtcacgcagctggaggctacaagattctgacc

SEQ ID NO: 944066 - DNA, 120 bp, Artificial Sequence
  ENSG00000237523_16 (sequence is synthesized)
gacatgttgcagaccccgcacttgctggatcagctgacgccacacagatggataaactgcctcgtctgatcttgtggcccccacccgggaactgacgaagcgcaagaagacagcttcgac

SEQ ID NO: 944067 - DNA, 120 bp, Artificial Sequence
  ENSG00000237523_17 (sequence is synthesized)
tccctgtgagttcatccctgaccaaccagcactcctggctcactggcttccccctaccaagttatgcttaaaaattctgctccccgaattctcgaggagactgatttgagtgataataaa

SEQ ID NO: 944068 - DNA, 120 bp, Artificial Sequence
  ENSG00000237523_18 (sequence is synthesized)
ttttggacatgagtcggcgagtgagggtgaaactcaggccaaagtctccagagccgctcggagaaaacgctgcctggaacagaagagcagaggatcagaggcaccaccagagactctcag

SEQ ID NO: 944069 - DNA, 120 bp, Artificial Sequence
  ENSG00000237523_19 (sequence is synthesized)
agtgggttattaccctggtgggggcgcctgctgcggcgtaggagatggcgggactgggggcgcgggtgtgaagcccccaagaaatctgtgtgaatttcctggggaggtaaggtctccagg

SEQ ID NO: 944070 - DNA, 70 bp, Artificial Sequence
  ENSG00000237529_0 (sequence is synthesized)
ggcctcccaaagtgccgagattgcagcttctgcccggccgccacccccaggagcccctctgcccggccgc

SEQ ID NO: 944071 - DNA, 120 bp, Artificial Sequence
  ENSG00000237529_1 (sequence is synthesized)
cagcctcgacctcctgggcttcaaagtgatcctcctgcctcagcctgccaagcagctaggactctttgcagatggtattaagaaacagggcatctgtgtctccctgtggaaaaacccagg

SEQ ID NO: 944072 - DNA, 120 bp, Artificial Sequence
  ENSG00000237529_2 (sequence is synthesized)
ctcttctggaactgtgggctccttgtgttgctgtcatgtaatcaagaagctagaggtagcagaacccaatccttacacccaaaacactagccaagggcatctttctctcttgcatctagc

SEQ ID NO: 944073 - DNA, 120 bp, Artificial Sequence
  ENSG00000237529_3 (sequence is synthesized)
tatgactccaaaagagaagagcaaatggtcgctacatgcaaaacaagttgccaaccaccataggttttgtctttcaaattatcaaatatatgtatacatactgagacagagtttcactct

SEQ ID NO: 944074 - DNA, 120 bp, Artificial Sequence
  ENSG00000237529_4 (sequence is synthesized)
tgagtaaaggaaattacattatattacataaataaatgaagctttaattttgttctccatatttctcaacagctttgcagatggtattaagaaacagggcatctgtgtctccctgtggaa

SEQ ID NO: 944075 - DNA, 120 bp, Artificial Sequence
  ENSG00000237529_5 (sequence is synthesized)
aaacccaggctcttctggaactgtgggctccttgtgttgctgtcatgtaatcaagaagctagagcatctgcccattatcacatttctaatgttgaagtggagatatgaggattttgaaag

SEQ ID NO: 944076 - DNA, 120 bp, Artificial Sequence
  ENSG00000237529_6 (sequence is synthesized)
aaaaactcattttatattaccttttaagctagctgttattaattttcaattttatgctagaaatttgcaactcacaaaaagaaaggaaaaaagttaaaccctgattttaaatatcattgt

SEQ ID NO: 944077 - DNA, 120 bp, Artificial Sequence
  ENSG00000237529_7 (sequence is synthesized)
gttaaaccctgattttaaatatcattgttccccatttttcatgtctcagttaccacatttaaaaagaagatggcaccatttgtccaaggaatctcattactgggtatatgcccaaaggaa

SEQ ID NO: 944078 - DNA, 120 bp, Artificial Sequence
  ENSG00000229109_0 (sequence is synthesized)
gcggcggatgggcggatcctgggcaggttggctgggtcgggctgcccgggcgacgccggagttgcagttggaggctgcgggaatacaaagtgacactgactgccgggtaactgtctctca

SEQ ID NO: 944079 - DNA, 120 bp, Artificial Sequence
  ENSG00000229109_1 (sequence is synthesized)
ggacatttgtgctttgagtctctgcaactctggaccatctctgcaggctaaaagatgtgcctgttgctaagaggaggagccctgcagcaggaatccggtgccagctgacctggaacaacc

SEQ ID NO: 944080 - DNA, 120 bp, Artificial Sequence
  ENSG00000229109_2 (sequence is synthesized)
tgatctccagaaagcatccctgttatactcaaatgggccttccagatgagccctgtaaggatatgcatgatagcaaaagctcaggacagcctttttatgttactgttgttcttaactttt

SEQ ID NO: 944081 - DNA, 120 bp, Artificial Sequence
  ENSG00000229109_3 (sequence is synthesized)
gacttactccctttagggatccagcctttactgttgttcttaacttttgacttattctctttagggatccagcctttctttgactatgaacctaaacgtaagaaagagaagtttcttgac

SEQ ID NO: 944082 - DNA, 120 bp, Artificial Sequence
  ENSG00000229109_4 (sequence is synthesized)
tccctaaaaacgagtcataatgctttctgaaactgagtctcttctgcttctggaaactgagtcttagtgcaaagaaatccctctgtattttcttgatttccatcttgattctctatttta

SEQ ID NO: 944083 - DNA, 120 bp, Artificial Sequence
  ENSG00000229109_5 (sequence is synthesized)
aagataaaatagctgttgctttgtgtctgtgtagagtgtggcaaaaagagaggaaacagaaaaagataaaaggaccatctctctcacttttaaaatctcttttccttaaggtatccttga

SEQ ID NO: 944084 - DNA, 120 bp, Artificial Sequence
  ENSG00000229109_6 (sequence is synthesized)
atatctctcttcattatgccctaaaacattttccctgcaattgatgctatccagccagtgtttttttagtagcacctataattcaaatgcatataatccagaatccagccctaacttcac

SEQ ID NO: 944085 - DNA, 120 bp, Artificial Sequence
  ENSG00000229109_7 (sequence is synthesized)
acctgagtttctagaccaactaaacatcccacaggtacttcaggctcactagatccaagtctaactcattatctttgtaccaaaacagtattttttaattaaaattttaaaaaaaataat

SEQ ID NO: 944086 - DNA, 120 bp, Artificial Sequence
  ENSG00000229109_8 (sequence is synthesized)
tataaataaaaaacactggctctattggaactgagcctggctaatgacattgtcttttcccactcacccaaactaggcatttaaaaatcaaacttgactcccccactctgactctatgcc

SEQ ID NO: 944087 - DNA, 120 bp, Artificial Sequence
  ENSG00000229109_9 (sequence is synthesized)
aattctatcagtcgctgagtcactgtttgaccctactccaagctttccaatcttctcaggaaccatgctgatatcaagactgtgtcctgtggaatatctaatatatgtgacacccggagg

SEQ ID NO: 944088 - DNA, 120 bp, Artificial Sequence
  ENSG00000229109_10 (sequence is synthesized)
agtcattttttaacacctcccttctctatacaacaaaattattttcaataatggccatgagtatgatgataattatgtctttataatacgtgtaattgacaatatcatacataattatgg

SEQ ID NO: 944089 - DNA, 120 bp, Artificial Sequence
  ENSG00000229109_11 (sequence is synthesized)
attttttattaatttttatatccacctaaatggctgaactttgatcctttggttacagtctgatatattaatatttacgtaaatgacagtccaataactaggtttaaataaaactaaaat

SEQ ID NO: 944090 - DNA, 120 bp, Artificial Sequence
  ENSG00000229109_12 (sequence is synthesized)
ggtttaaataaaactaaaatgtctgcagaagtatagtttaggcaattacattttaaatttttttaaatgagatggactcttgctatgatgcgcaggctgatctcaaactcctgagctcaa

SEQ ID NO: 944091 - DNA, 120 bp, Artificial Sequence
  ENSG00000229109_13 (sequence is synthesized)
aggcatgagccactgcgcccgacctaatttaggcaattactaatgtgagattttgttttcttatttgttcttttgtttgaagacaaataattaacaattaaaaagaatacattgcaattt

SEQ ID NO: 944092 - DNA, 120 bp, Artificial Sequence
  ENSG00000229109_14 (sequence is synthesized)
aacaattaaaaagaatacattgcaattttaaaatgttatcatattcagaaaatatgtatgaaataaaatttgcacttataaaacaaaaatattacacttcatagttggcaaacattttaa

SEQ ID NO: 944093 - DNA, 120 bp, Artificial Sequence
  ENSG00000229109_15 (sequence is synthesized)
ttaaaaaatttttaaattgtgattgagtcacactgaatggtgaaattaaatgaattcaaatcctgtttcttcatctttgcaatcactgtgctatcattgtttctttctaatctacataga

SEQ ID NO: 944094 - DNA, 120 bp, Artificial Sequence
  ENSG00000229109_16 (sequence is synthesized)
aataggtctcaccacaggggttgaagattcaactgcacccaaagcaagatccagtgtttccaaactgttaggagctcttgaaatggatgtgggtaaccaaggctattgtgccaagggttc

SEQ ID NO: 944095 - DNA, 120 bp, Artificial Sequence
  ENSG00000229109_17 (sequence is synthesized)
tgagaatcaacttccacatcgaacatttatcaaaaggtaaatagcacaggacagaggaccagaaaaaagaaagtcacgcagagaaagaaatcaggagaccttgcatttgtaacttgacta

SEQ ID NO: 944096 - DNA, 120 bp, Artificial Sequence
  ENSG00000229109_18 (sequence is synthesized)
ttcttacaaacacagtttcctcctgaaaggaattttgatgtattctattttctgatgtcttactattttggatgtgtatccacgttataggcaacgagatgttttgtttataaataaatg

SEQ ID NO: 944097 - DNA, 120 bp, Artificial Sequence
  ENSG00000229109_19 (sequence is synthesized)
tagaagaaaaatagatgttttttagaagcaaattctggttcttgttatatcttctgaaacttccaaatccaattttgttatgcattgccaccatgatgctattacttcagtagaacagga

SEQ ID NO: 944098 - DNA, 120 bp, Artificial Sequence
  ENSG00000229109_20 (sequence is synthesized)
tgtcctcaaagagtgaaatggttacgatgagtctagaatgacctggaggtgccagattatgggccttaactcctagcatttctcaagtagttactacatgtccaagactttgctaaggga

SEQ ID NO: 944099 - DNA, 120 bp, Artificial Sequence
  ENSG00000229109_21 (sequence is synthesized)
tttgcaaattctaacttatttttaaattccataacagctctgagataagtgctgtagttaaacataattttaaagatgaggatgccaagaattcaagagatcaaatgagttacctaaagt

SEQ ID NO: 944100 - DNA, 120 bp, Artificial Sequence
  ENSG00000229109_22 (sequence is synthesized)
tacacctaagaagagcaggaaagctgagaccagagctgaggccatctggctggagagcctgagctcttagccatcatattacaccgactttctgttccagatatgccagctacttctatc

SEQ ID NO: 944101 - DNA, 120 bp, Artificial Sequence
  ENSG00000229109_23 (sequence is synthesized)
tttatatcagtatctcctaggcagcaattttatactctggccttttgtcatttttacagaagcactaataatgatgcacaaaattattttgtgtaaaaaaattaaaatttttgtttttaa

SEQ ID NO: 944102 - DNA, 120 bp, Artificial Sequence
  ENSG00000229109_24 (sequence is synthesized)
atcaatggtataaatcaaattatttaatctttatgcacaaatattacttatcgctaaaatgaaactgggttcagcattatctatttttcattttgatagaattaagtactgacaaaactt

SEQ ID NO: 944103 - DNA, 120 bp, Artificial Sequence
  ENSG00000229109_25 (sequence is synthesized)
gctgacaaatagaaatggaaaggttcttggttataataaagctactcaactcgtactcctcacaaaatatgttaaaaaataacatagtgaaccacaacaaatataatttttgctaacagc

SEQ ID NO: 944104 - DNA, 120 bp, Artificial Sequence
  ENSG00000229109_26 (sequence is synthesized)
tttgttgagctataattaacataccataaataatgcataaaattcattggtctttgttcacagagtcatgcgaccatcgcaactacataattcaaagaaaaattttatcacccaaaaaag

SEQ ID NO: 944105 - DNA, 120 bp, Artificial Sequence
  ENSG00000229109_27 (sequence is synthesized)
aaactctgtacctattagcagtcattcttcattctccctacccgtggaaatcactaatctactttctgtctctatagatttgcctattctggacattttatataaatcaaatcatgcaat

SEQ ID NO: 944106 - DNA, 120 bp, Artificial Sequence
  ENSG00000229109_28 (sequence is synthesized)
agatggccttttgcttttggcttcttttacttagcataatgttttcaaagttcatccatggtgtagcgtgtaccaatacttcattcatttttatggaatggatacactacatttgtttat

SEQ ID NO: 944107 - DNA, 120 bp, Artificial Sequence
  ENSG00000229109_29 (sequence is synthesized)
gcaatttacgaaccgatggacatacgggttgtttccacttctgtgctattatgcaaagtgctgctatgaaaattacccatttttttgtgtaaatatatgttttctgttctcttgagtata

SEQ ID NO: 944108 - DNA, 120 bp, Artificial Sequence
  ENSG00000229109_30 (sequence is synthesized)
tacctaagagtggaattgctggcttgtatggtaaccttatgcttaactttttgaagaactacgaaactgttttccaaagtagctgcacaattttttttttttttagacggagtcccgctc

SEQ ID NO: 944109 - DNA, 120 bp, Artificial Sequence
  ENSG00000229109_31 (sequence is synthesized)
aggtgtgagccaccgcgcccagcctagtagctgcacaattttacatttttaccaggaatatatgagggtttcaatttatccacatcctcagcaacacttcgtggcctgtctttttattat

SEQ ID NO: 944110 - DNA, 120 bp, Artificial Sequence
  ENSG00000229109_32 (sequence is synthesized)
agccattcttgtgggtgtaaagtagaatctcaatgtggcactgatttgcatttctttaatgactaatgatattggacatcttttcgtgtgcttactatccatttgcatatttcctttacc

SEQ ID NO: 944111 - DNA, 120 bp, Artificial Sequence
  ENSG00000229109_33 (sequence is synthesized)
aaaatgtctattgtgataacatttcctactttaaaaattggttatgttttttattactgagttgtaagtattctttatgtattatgggtacaaattcattatcggatgtatgatttaaaa

SEQ ID NO: 944112 - DNA, 120 bp, Artificial Sequence
  ENSG00000229109_34 (sequence is synthesized)
attttgtctctagtgcttttgctgtccttagaaaccatcctctctaatcaaaggttacaaagatctgatcttatgtttcttctaaaagttttgtaaattttattaaacacaaggtctctg

SEQ ID NO: 944113 - DNA, 75 bp, Artificial Sequence
  ENSG00000285894_0 (sequence is synthesized)
gcaagcgccgcgcgcagcccgggttcccgctcgcgcctctccttccacacctgcctgcaagctgagggagccggt

SEQ ID NO: 944114 - DNA, 120 bp, Artificial Sequence
  ENSG00000285894_1 (sequence is synthesized)
gggctgaaggttcctcaagtgcctctaaagtgggagcccaggcagaggagagcgagcgagggctgtgaggcctgccagcacgctgtgacctctcagaagtacacacttggctggaaagag

SEQ ID NO: 944115 - DNA, 120 bp, Artificial Sequence
  ENSG00000285894_2 (sequence is synthesized)
aagactctatagaggaggaacttacagccaggaccctggttgaatcagtacttaaaaatgctcttatgagaaagggcagagctgcattttacttaacctaaactcatttttcacaaagcc

SEQ ID NO: 944116 - DNA, 120 bp, Artificial Sequence
  ENSG00000285894_3 (sequence is synthesized)
ccaagacctggatgaccaggaagccagcaactcgaccagaatggcaggctgtggaaagaagtcatttggtgagcttcagactgaagtaaaagagccagaagattataggactccccttcc

SEQ ID NO: 944117 - DNA, 120 bp, Artificial Sequence
  ENSG00000285894_4 (sequence is synthesized)
tccaggacctgaagatggaatccccagagtcttaagaggagccaccagaaaaagatcaaaagacatctactagaagctttcttcgataccacctgagttcactgtagaaggcaactttgg

SEQ ID NO: 944118 - DNA, 120 bp, Artificial Sequence
  ENSG00000285894_5 (sequence is synthesized)
actaaagataaaatggaatttttaacctatgtagtcattaacaatgttttaaatgagtttgtgtaaaacagaaagaaattggcaaggaaaataaaaagttttctaaatttgggtagggaa

SEQ ID NO: 944119 - DNA, 120 bp, Artificial Sequence
  ENSG00000285894_6 (sequence is synthesized)
gtgggatattgtgatttttctttctcttttaataaactacttagaaaaaaaaacatttagaaaaaactaagaaagtcaaagaatgaggtaacatttgacagattatcaatcttgttattt

SEQ ID NO: 944120 - DNA, 120 bp, Artificial Sequence
  ENSG00000285894_7 (sequence is synthesized)
ctgctttttatttctctacttgtctttctgttattgaatgtttctcttaaacctagtagatcattggataaaagttactttgcttttattttaattttctagcatgttggtatttatttc

SEQ ID NO: 944121 - DNA, 120 bp, Artificial Sequence
  ENSG00000285894_8 (sequence is synthesized)
tcagtgcagtacacctattgtgatttagttttgttgaaaatttatggcattgcagtttgaaagatggaagaattgttgactataacttaatgtattttctctagaaacccttctagaaat

SEQ ID NO: 944122 - DNA, 120 bp, Artificial Sequence
  ENSG00000285894_9 (sequence is synthesized)
ccttctagggaaaataaatacagcttaagttttggttttgctgagatacatggaattcttttcagctctttagtattaatggattattttattataatatcacataaatatgtctgtgga

SEQ ID NO: 944123 - DNA, 120 bp, Artificial Sequence
  ENSG00000285894_10 (sequence is synthesized)
tctgtggacctcaaaatataaaactcttataatcttagtttttaatatgtagttataaacaaaagtaaatttgtaaattaatataaggagaagctaaaaacaataaaagtagcatgaaat

SEQ ID NO: 944124 - DNA, 86 bp, Artificial Sequence
  ENSG00000285895_0 (sequence is synthesized)
cggcctcccaaagtgctcggattacaggatctcactctgtcccccaggctgaagtgcagtggtactaaagcaatccttccacctca

SEQ ID NO: 944125 - DNA, 120 bp, Artificial Sequence
  ENSG00000285895_1 (sequence is synthesized)
aactcctgggctaaagcaatccttccacctcagcttcccaaagagctaggatttcaagtgtgagccactgcaactggcctcataatggaaactttatacccttcgagcaactcagcattg

SEQ ID NO: 944126 - DNA, 120 bp, Artificial Sequence
  ENSG00000285895_2 (sequence is synthesized)
ccccctccccctgcccctaacaaccaccattcactgtctgtttctatgagtttggctattttaaatactttataaaagtggaatcaagtagtatttgtccttctgtgattggcttgtttc

SEQ ID NO: 944127 - DNA, 120 bp, Artificial Sequence
  ENSG00000285895_3 (sequence is synthesized)
actgagcgtaatgtcctccaggttcatccatgttgttgcatatggcagagttttcttcttcttaaaggcagacagtattctacacaggtttgagcttcttctgatttcttctctgtccag

SEQ ID NO: 944128 - DNA, 120 bp, Artificial Sequence
  ENSG00000285895_4 (sequence is synthesized)
cctatgtgacacagcaagagaaagagaaagagagagaaagggagagggagaggaaaacagagaggagccaaagaaacataaatgttctgtgattatttttaagtcaggaatgaatgtttt

SEQ ID NO: 944129 - DNA, 120 bp, Artificial Sequence
  ENSG00000285895_5 (sequence is synthesized)
tgaagtatttaactcagtccacatccaacaaaaatatttaaagggcactccagaatgtgtataactctgccacgagagggctagtttgacttggccagatggtcacttgaattccatcat

SEQ ID NO: 944130 - DNA, 120 bp, Artificial Sequence
  ENSG00000285895_6 (sequence is synthesized)
tcattgattgataggcttattatttcaatatacatttgtgaggcacctgctataagctagaccctagcaagcatattgactgcctcatagtatacatactggtggttggatatggaagtt

SEQ ID NO: 944131 - DNA, 120 bp, Artificial Sequence
  ENSG00000285895_7 (sequence is synthesized)
gaattttattctctaggcagtcacagatgtcattttgtcatttctgtctttccctctacatcctgctctgccatttctctggtgcaccatgccacaggaggctcactttataaactagat

SEQ ID NO: 944132 - DNA, 120 bp, Artificial Sequence
  ENSG00000285895_8 (sequence is synthesized)
gatctggactccctttccttgtggcttcatggatttggccagttggtgatcaaaaggcaggaggaaagagatgctgaggtctttattccctcaactccctgcttgctgagctggagattg

SEQ ID NO: 944133 - DNA, 120 bp, Artificial Sequence
  ENSG00000285895_9 (sequence is synthesized)
gtagtagctgcatttttctattgaaattcacacccctgccaggcttcccctttcttatggctaccttttgctgcatgagaaataatgttatttctatatagacagttataattatttgaa

SEQ ID NO: 944134 - DNA, 120 bp, Artificial Sequence
  ENSG00000285895_10 (sequence is synthesized)
cttctttatatcacatataagtctacccagattggaaataagagtttctatcagcatgtgatttaaattataggataagtattattcaactgttgcttttttgttacaagaaatattaac

SEQ ID NO: 944135 - DNA, 120 bp, Artificial Sequence
  ENSG00000285896_0 (sequence is synthesized)
ggcaccttctgagaggctgatagtgctttgacatggctgtagccttgcttagaatcaattttccatctaaaatctctctgttctcactcttacaacaatgaaaagccattgagcagtatc

SEQ ID NO: 944136 - DNA, 120 bp, Artificial Sequence
  ENSG00000285896_1 (sequence is synthesized)
agctgggcatagataacatcgagtttgcattttcaaagatcctcctggtcaaaatgtggagttaggagtgtggatgatgtccaagacatttgcagttttccaagtgtaacaagatgcaag

SEQ ID NO: 944137 - DNA, 120 bp, Artificial Sequence
  ENSG00000285896_2 (sequence is synthesized)
cttgccagagaaaagccaaaattcctgaaaattttggaatgtttttgagcacacgggacttcaccttatacatggagatgatggaaagtgaaaaattgaagatgacacctggaatagggt

SEQ ID NO: 944138 - DNA, 120 bp, Artificial Sequence
  ENSG00000285896_3 (sequence is synthesized)
catatcatcatactacacagttgacccttgaacaataagaattggaactgtgtgagtccacttatacgtggattttcttctgcctctgcgactcctgagacagcaaaaccaacccttcct

SEQ ID NO: 944139 - DNA, 120 bp, Artificial Sequence
  ENSG00000285896_4 (sequence is synthesized)
cttcctcttcagcctactcaacatgaagacaaggaggatgaagagttttgtgataatccacttccacttaatgaatagaattttacactttccaaggagaatgctccaggccccgaagct

SEQ ID NO: 944140 - DNA, 120 bp, Artificial Sequence
  ENSG00000285896_5 (sequence is synthesized)
cacattgtaagaaagtgcttggaaatgatctctcgagtacccagactccaaaacttcttcagaaatataatggagacactttcagttggctttcttcatcatttgtttccctttgtcact

SEQ ID NO: 944141 - DNA, 120 bp, Artificial Sequence
  ENSG00000285896_6 (sequence is synthesized)
gtgatgctaataaccaacaaaaaggtgttgtacatagatggagtggcaagtgcataattcagacgggataatcagatggtgaattatcaaaagtaataatacatgtattaaaagcaataa

SEQ ID NO: 944142 - DNA, 120 bp, Artificial Sequence
  ENSG00000285890_0 (sequence is synthesized)
atagctgaaattggagttgtcctagaaaatccaggacatacagatttctatggcataaggcacaaaaaccgcctatgaagcgatgctgtggtgtcttcattttcttatttttaagaactt

SEQ ID NO: 944143 - DNA, 120 bp, Artificial Sequence
  ENSG00000285890_1 (sequence is synthesized)
aaagcaactggttcttctatccattgtccttatacctgtatgtgtgggcggaggcccaagaatctatcacttcatggaattcactgagtgtgcaggagtaggaatgtcagagagtggaag

SEQ ID NO: 944144 - DNA, 120 bp, Artificial Sequence
  ENSG00000285890_2 (sequence is synthesized)
aagagatcaaatgaagagagggcatggcatagatttgatcttccaacagagaacagaagaaaggtttcctagtatggcagtccattctggcatggaactgagtaccatggaaagattcaa

SEQ ID NO: 944145 - DNA, 120 bp, Artificial Sequence
  ENSG00000285890_3 (sequence is synthesized)
actgagctttggaaatgaagaattgagagaacttggaaaggtttgggaaggacatggccaaaatgagcaacagcttgggggagaaaaaagacaccttttcctgctggaggaaaaatggaa

SEQ ID NO: 944146 - DNA, 120 bp, Artificial Sequence
  ENSG00000285890_4 (sequence is synthesized)
gaaattattcactggatggcacgttccaacgaggccaggggctgcatcttccatcctccctcagtggcctcctcctctttctttctgctccccagctgggaacacagtgtattcttctca

SEQ ID NO: 944147 - DNA, 120 bp, Artificial Sequence
  ENSG00000285890_5 (sequence is synthesized)
caagaatcctgcatgaggaatcagaggaaagtggagatgaaaagaggtttcacgctccacaatatcagaacaagaagaaaaattctagaatgcacttgaaaaataactgtctttgtctga

SEQ ID NO: 944148 - DNA, 120 bp, Artificial Sequence
  ENSG00000285890_6 (sequence is synthesized)
aacaggtgtgagacacttgaacatgctaccaaaaatgcgaagcctctttctttggagacctcaaaaagaaggctcaggctccaacattttgaaagggtagattgcacccctatagtcccg

SEQ ID NO: 944149 - DNA, 120 bp, Artificial Sequence
  ENSG00000285890_7 (sequence is synthesized)
gggcgacatctcaatgtaactgaaaagccagtgacgcctgtgactttgctgatgtcaaaaggctaattccaacatgacttcacgagctaaaacggcttctccatccatggcaagttttgc

SEQ ID NO: 944150 - DNA, 120 bp, Artificial Sequence
  ENSG00000285890_8 (sequence is synthesized)
gagcaccccgaggattccagcgacgtggttaagccgccgggaagaccacgaagagcttttccaatatcatccgaggctttgtgggagagcgaatgtcgagcccgtaatagatgctttctg

SEQ ID NO: 944151 - DNA, 120 bp, Artificial Sequence
  ENSG00000285890_9 (sequence is synthesized)
atcctcctcacactgcatctggctctcctaagtattggtcctattacgtttttaaaaatagctcagaagtaatttgagtgctgaactggctacaggataaaaaaaccccacctgaataca

SEQ ID NO: 944152 - DNA, 120 bp, Artificial Sequence
  ENSG00000285890_10 (sequence is synthesized)
ttctaacttcttcctatcagccagagaccaagaaccacagtcgcagtttcctcggagctaattttcagcattagggtttatcagaacctaaattctgttctaataaacgatggaacagca

SEQ ID NO: 944153 - DNA, 120 bp, Artificial Sequence
  ENSG00000285892_0 (sequence is synthesized)
agatgccctttgacccatatcttcacctgctgaatcgcccacactgttaaatggcaagatggtatgcctgccttggatgctttatcagagttcttgagtgcaaacaacaaaaatggattc

SEQ ID NO: 944154 - DNA, 120 bp, Artificial Sequence
  ENSG00000285892_1 (sequence is synthesized)
tgcttgatttatgaagaaaacaaattcattgaaaggccactgagtagcttacagaatcacaagaaaggtggcaaaaccagttgtggacaataagaaaaaacaaagagaggttccatagcc

SEQ ID NO: 944155 - DNA, 120 bp, Artificial Sequence
  ENSG00000285892_2 (sequence is synthesized)
agactccagccagggtcatctcacaaggacagctgagtaaagacactgctgtctctggccaaactgccacagctgcccacagaaactaactgtggcagtctctgctgccactagaaaaca

SEQ ID NO: 944156 - DNA, 120 bp, Artificial Sequence
  ENSG00000285892_3 (sequence is synthesized)
ttctccactgttgccgctgctttgcatcactagctccagattcaaaatcccatctggttgtgtctgattgcccaaacctaggccacaggtccatgcctttgttcctatgtttccagagaa

SEQ ID NO: 944157 - DNA, 120 bp, Artificial Sequence
  ENSG00000285892_4 (sequence is synthesized)
gagtttcagccacagaaagaaagctgtccccttgaataacccattcacctcctggttctaatcgttttttttactattatattccatgcactgtcctggacatggatatgtgctatgtac

SEQ ID NO: 944158 - DNA, 61 bp, Artificial Sequence
  ENSG00000285892_5 (sequence is synthesized)
attccatgcactgtcctggacatggatatgtgctatgtactaatgatgtaaatattaagaa

SEQ ID NO: 944159 - DNA, 120 bp, Artificial Sequence
  ENSG00000240350_0 (sequence is synthesized)
ttgacaaggaaaggccatgttatgttcaccctgggttaagttttaagtgtatcttatttaatttttttcaatatgagtcatctccagatactgtgatgatttccaaataaccagaatcta

SEQ ID NO: 944160 - DNA, 120 bp, Artificial Sequence
  ENSG00000240350_1 (sequence is synthesized)
gatgactagaaatttactctagctggctttagacaggaagcgtgaggacagaatccagctgcttccactccagggtaggtctgaagccaaccgtcctcggtttcctggcctgtggcatca

SEQ ID NO: 944161 - DNA, 120 bp, Artificial Sequence
  ENSG00000240350_2 (sequence is synthesized)
gtctggttggattacacacaaagccctgcagatctgctgcttttcctgattctcctgtcctgagtgagtgcaaggggctcccctgtcgtcgatgtgttctttgaagcagatgctgtgcct

SEQ ID NO: 944162 - DNA, 120 bp, Artificial Sequence
  ENSG00000240350_3 (sequence is synthesized)
ggtcgagaaaggccaagttgcacactactgagagactgccatgcaccccctggaggcctcagaacattcgacatgcttcagtcatggccacggcagtgactgctgattgcctaaccccac

SEQ ID NO: 944163 - DNA, 120 bp, Artificial Sequence
  ENSG00000240350_4 (sequence is synthesized)
atgtgttctcccccttccctgataatcaagcccctgattttcagctgggcacaaaataattcttcctagaacaactccatgtgtgttatcgcccttgcagctgggggtggccaccactgg

SEQ ID NO: 944164 - DNA, 120 bp, Artificial Sequence
  ENSG00000240350_5 (sequence is synthesized)
ggagaggcagggtgaagaggtggaaggagcctgagttagcagggatgagcagtggccaggtaaccccagacccactatcctctggatttcttttatgtgaaacaataaaatgtcttgtat

SEQ ID NO: 944165 - DNA, 120 bp, Artificial Sequence
  ENSG00000240350_6 (sequence is synthesized)
ccccttcgccttccaccataattgtgtttcctgaggccttcccagccatgtttcctgtacagcctgcagaactatttgcctgttctggatgtttcagataaacggagtcatacaatatgt

SEQ ID NO: 944166 - DNA, 120 bp, Artificial Sequence
  ENSG00000285898_0 (sequence is synthesized)
gggtcgagtatggttagcgttttcactcagaagatcctcttaaatctgtcccttcttttctaccttaattaagaattctacactgatgacagaagatgaagaatattctccccttctggg

SEQ ID NO: 944167 - DNA, 120 bp, Artificial Sequence
  ENSG00000285898_1 (sequence is synthesized)
gagggacaaagataaactagataatttgtggtcggaataaggtaaagggtatggtctcaaattaagaaatgtgatggttgaagccggtagaaggagaagattagctgagcaacttggcaa

SEQ ID NO: 944168 - DNA, 120 bp, Artificial Sequence
  ENSG00000285898_2 (sequence is synthesized)
gtccttctcagggtttccagaaactggctggagatgtagcagggacgcatccaagccatgacaactatatgcctagcatacttgttgaagtctctagatcctgtgactttctggtggaaa

SEQ ID NO: 944169 - DNA, 120 bp, Artificial Sequence
  ENSG00000285898_3 (sequence is synthesized)
ggtggaaaagtccagaaactctcaagaaggtacctctatgatgtgggggcagcagctaaaaggtgaaaaagaaaaagtcagacagaagaattgctggatcgaggccatcaagctacagat

SEQ ID NO: 944170 - DNA, 120 bp, Artificial Sequence
  ENSG00000285898_4 (sequence is synthesized)
ggtcttacaaatggaaccccaaatgaactcaactaacaacttctaccaagtacccctggaccaatgggctggccctttcactggcctaaagaattcccctctggaggacactacaactgc

SEQ ID NO: 944171 - DNA, 120 bp, Artificial Sequence
  ENSG00000285898_5 (sequence is synthesized)
ttattcaccactatccagcaggaagtagctaaagcggtcatcgcccaattcccgacaacagttggggtgtcctgtttagatgggagattgagaggtgaagccagttggacttcctgggtt

SEQ ID NO: 944172 - DNA, 65 bp, Artificial Sequence
  ENSG00000285898_6 (sequence is synthesized)
atggaccaatcagcaggatgtacttgggtccccttccacactgtggaaacttcgttccttcactc

SEQ ID NO: 944173 - DNA, 64 bp, Artificial Sequence
  ENSG00000285898_7 (sequence is synthesized)
tggccacctgagccagcagcagcaacccacttgggtccccttccacactgtggaaacttcgttc

SEQ ID NO: 944174 - DNA, 88 bp, Artificial Sequence
  ENSG00000285898_8 (sequence is synthesized)
tcctgaagtcagcgagaccacaaacccactgggaggaacaaacaactctggatgcgccacctttaagaactgtaacattcactgcgag

SEQ ID NO: 944175 - DNA, 120 bp, Artificial Sequence
  ENSG00000285898_9 (sequence is synthesized)
ttattttctacttatggtagtgggaactgacataatatatttacatattcagaatcacagttgctcttgcagtatgaacacaagatatttacattgcattaaaatatatattatcacatt

SEQ ID NO: 944176 - DNA, 120 bp, Artificial Sequence
  ENSG00000285898_10 (sequence is synthesized)
ttgtttgctaacattttattgactctgtttttgcacccatactcataggtgaaatgtcatgtatatagaatttattttccatgctaatcttgtctaaatcaaacatatattagctttata

SEQ ID NO: 944177 - DNA, 120 bp, Artificial Sequence
  ENSG00000285898_11 (sequence is synthesized)
aaacaagggaatatttggcattctattctctgcaaacgttcaaatttttagaatggaacaatagggacaataaagagtaatagatttagaaatgcatacttgaaataaaaggaatttatt

SEQ ID NO: 944178 - DNA, 120 bp, Artificial Sequence
  ENSG00000285898_12 (sequence is synthesized)
gagttaatgacttaagcccccaacacaagaatactttgtaaagactaatattttaattccaaagaaaacccaagaaagaaattaccaagaaataagaatataaacagatttcaataaact

SEQ ID NO: 944179 - DNA, 120 bp, Artificial Sequence
  ENSG00000285898_13 (sequence is synthesized)
agaactctaagaaacaatatttaagtgtaataaaatgaaacacatgttctttgaaaagtctcagtaaatagatacatcctaagagcattgaaaatatgataaaaaaaggagtgagacata

SEQ ID NO: 944180 - DNA, 120 bp, Artificial Sequence
  ENSG00000285898_14 (sequence is synthesized)
agtagtcacagaaatgaacagtaaaacataattatacctacaataaaactgaagtaataagaaagttttcaggaagttctgtgaaaataaatttgaaaactgggtgaaatccagaacttc

SEQ ID NO: 944181 - DNA, 120 bp, Artificial Sequence
  ENSG00000285898_15 (sequence is synthesized)
tttgacaaaaatatagccttaaactcattcagaagattttgaaagcacaaatggttctaccattattaaagacatggaatcacacagatatgcctccacacacaaacatagagacaaaca

SEQ ID NO: 944182 - DNA, 120 bp, Artificial Sequence
  ENSG00000285898_16 (sequence is synthesized)
cacacacaaaatttatacagttgtttaaggtttatactgcttatttttgtttctgctaatgttgacatatattttgtttcattgcatgttttaatttttgtattatgaacttattatttt

SEQ ID NO: 944183 - DNA, 120 bp, Artificial Sequence
  ENSG00000285898_17 (sequence is synthesized)
tcactggatgttttctgtgcaaactagctggagagtttcttcttcagaccaatattgtatttgctttgtcagatgcatcagagataagtcctaaagcaattcttgttagggtttcctgaa

SEQ ID NO: 944184 - DNA, 120 bp, Artificial Sequence
  ENSG00000285898_18 (sequence is synthesized)
ctttgagaatggcatacagctgacctggaaaactaggtgaggccaggtgcctgtgtaaacatttttagaaaggacctctgtattttaagttgcagaatcaaattataaataggcaataaa

SEQ ID NO: 944185 - DNA, 120 bp, Artificial Sequence
  ENSG00000240355_0 (sequence is synthesized)
gtaacattctccctacttcctggtctactagttcaagaaaaacgtttgttttgagtgccacacggcgaacccattttagaagtgtttctattactaataaaacatttgcatatttggata

SEQ ID NO: 944186 - DNA, 89 bp, Artificial Sequence
  ENSG00000250920_0 (sequence is synthesized)
ctgcacccaggtgaaatagctggtctcttcacactgactcgagtgaaatttggtgccgtgactaggatcgggggacctcccttgggaga

SEQ ID NO: 944187 - DNA, 76 bp, Artificial Sequence
  ENSG00000250920_1 (sequence is synthesized)
tgctggtctcttcacactgactcgagtgaaatttggtgccgtgactacactttgctctgtgagaaagatccaccta

SEQ ID NO: 944188 - DNA, 120 bp, Artificial Sequence
  ENSG00000250920_2 (sequence is synthesized)
caccaatttcaaatccgtgatagatcacaacaagagatcatgaagagggcatggccgccatgtcattctggagagagacagagtaaaacaaagaagcctctctacaagtctcctaactta

SEQ ID NO: 944189 - DNA, 120 bp, Artificial Sequence
  ENSG00000250920_3 (sequence is synthesized)
attatatttttcaaaaagagttttgaataatgttaagatagattgcaacatgactatcaattcttcccttcccatcaaaggagagagtccgtttatccagcctttgaatcttgattattc

SEQ ID NO: 944190 - DNA, 120 bp, Artificial Sequence
  ENSG00000250920_4 (sequence is synthesized)
atgtgacttgcttcacccaatgtaacattaataagcacaatacaagcagaggcttgccaagaacttggtttgtttctaatgcttagaagaagaatggtgtatgccatatttctgcattta

SEQ ID NO: 944191 - DNA, 120 bp, Artificial Sequence
  ENSG00000250920_5 (sequence is synthesized)
gaactcacgtggagacatgtgtggcccaattgcttctctttcatctcaggcaataaccagacacgggactgaggccatccatgaccagccagccctagccaacacacaacacacaagctg

SEQ ID NO: 944192 - DNA, 120 bp, Artificial Sequence
  ENSG00000250920_6 (sequence is synthesized)
atcacagatgcatgagtaagcctgagaccagccaagaccagcctagaatagaactgctcagcagcaataaaaactaaataaattgttaccttaagctacttttagagctatttggaagtg

SEQ ID NO: 944193 - DNA, 120 bp, Artificial Sequence
  ENSG00000250920_7 (sequence is synthesized)
tatttttgtgcagctaacatttactagcagataaaatggtgattgtttatctctgttttattgatgttttaaggaaattgtttctattaaaaggaaatatctggtctttgtcacgttaaa

SEQ ID NO: 944194 - DNA, 120 bp, Artificial Sequence
  ENSG00000250920_8 (sequence is synthesized)
agcggctgaagactgacactgcccgattgcctcggaagccccctagaccatcatggacgccgagcttcagtgatagatcacaacaagagatcatgaagagggcatggccgccatgtcatt

SEQ ID NO: 944195 - DNA, 120 bp, Artificial Sequence
  ENSG00000250920_9 (sequence is synthesized)
atcgtaaagtggaaaaatataggtcaagccatcgtaagtcaaggaatgttggtatatcgtaatggtgtacatgatattttgaaatatgtatactttaatagctatagtgagctaattaac

SEQ ID NO: 944196 - DNA, 120 bp, Artificial Sequence
  ENSG00000250920_10 (sequence is synthesized)
atatgaattgcctcacattcttatcatttatttgtggtgagtagatataaaatctactcttttagcaatttttaagtatgcaatacactattggaagggtctctggctaagttagttttc

SEQ ID NO: 944197 - DNA, 120 bp, Artificial Sequence
  ENSG00000250920_11 (sequence is synthesized)
tttctgaacggacatttctcactaacaagtgcagaaattccctgtgaacaggggaagcggtaatgctgacaacaaaactcagatgtaaatttagaataaaaaagggctcatggttgactg

SEQ ID NO: 944198 - DNA, 120 bp, Artificial Sequence
  ENSG00000250920_12 (sequence is synthesized)
ctttgggctatacttccataatctctcaaaaaaaaagtaaggtattgtcctctggagtattttgatggaaaattttaggaagacttgataatctgtaaaagttgtaggcttgagatccta

SEQ ID NO: 944199 - DNA, 120 bp, Artificial Sequence
  ENSG00000250920_13 (sequence is synthesized)
aaagatctgtatctaaattcatgtattctacagaagtttacttaattactccaggtttatttttccttacttgtgaggtaaatgttgtaatacacatctacctcacaaaggtgttgtgag

SEQ ID NO: 944200 - DNA, 120 bp, Artificial Sequence
  ENSG00000250921_0 (sequence is synthesized)
gctgccccataaaccagctcatctctccagatgacccctgcaggagattgcaacacaataccacagtgaggaaagccagatgttgcccacatccccctcggagaaacccgccaggggcat

SEQ ID NO: 944201 - DNA, 120 bp, Artificial Sequence
  ENSG00000250921_1 (sequence is synthesized)
gttgggacgttgggagtgtgagccctggagacagtgttgtggcagggatccaggttctcccagctgccggccacagggctctgcccaggggtcctgagtttcctcaatggcattctaatc

SEQ ID NO: 944202 - DNA, 120 bp, Artificial Sequence
  ENSG00000250921_2 (sequence is synthesized)
catgagtgttcagagagagcaggtgggctcccctacccggcgccttccgaccggcatctggaaaaggatagtcagaaacgcagtgaaaattacgcctgcaaccctggcaggcagggaagc

SEQ ID NO: 944203 - DNA, 120 bp, Artificial Sequence
  ENSG00000250921_3 (sequence is synthesized)
acttaataacttacgtgggtgtcagggcaagggaggcgtccgcagaccagagttgtgatggaccgttctccaccatgtgatgttcattttctccactgagattaaaaaagaagaggaaag

SEQ ID NO: 944204 - DNA, 120 bp, Artificial Sequence
  ENSG00000250921_4 (sequence is synthesized)
gaaagaaggaaagtgcacaacctccttgaaaagacagctcctcctgccgaaaatgtgttgcagactcggtcagtcaggtggacttaattggaaggcactttctttttgatggaaaaagaa

SEQ ID NO: 944205 - DNA, 120 bp, Artificial Sequence
  ENSG00000250921_5 (sequence is synthesized)
ggagaaagatttgtaaaattgaaccaatgttaacacactcgcatcccacaaggagctgagttttgatctgcttcatgctgagagagcgggaaggagaccagagtgtgtctcagactttct

SEQ ID NO: 944206 - DNA, 120 bp, Artificial Sequence
  ENSG00000250921_6 (sequence is synthesized)
tgctgaaattctgtttatatgtagtgcctgcttggctcaagcagtgcaaaccatgaactcaaacagtcccagtgacaactgtccatgtggctccagacctgcagaaagaacgtggaagct

SEQ ID NO: 944207 - DNA, 120 bp, Artificial Sequence
  ENSG00000250921_7 (sequence is synthesized)
ctgaaaaagtcacaaccagagtttacgtccagcctcactcttcatgacctggcatttacttgtaacggtggactttacacaccacccacagaccctgtgaagctgggagaagccactgac

SEQ ID NO: 944208 - DNA, 120 bp, Artificial Sequence
  ENSG00000250921_8 (sequence is synthesized)
attttgtccttcctcacatttcagtgtgatgagcacacacagaatacctgcccactgcgaggtacgacaggaaatgccggtgactcaaagaccaggggcttggtctcttctgggcacctc

SEQ ID NO: 944209 - DNA, 120 bp, Artificial Sequence
  ENSG00000250921_9 (sequence is synthesized)
ttcccattcatgtttctcctcttcactcctgattcctttgcattctcccttgcaattgctttccagttatttcttgatgcaactttttttctcaagctaattttcatgggacactatgga

SEQ ID NO: 944210 - DNA, 120 bp, Artificial Sequence
  ENSG00000250921_10 (sequence is synthesized)
catctttcggcctcactggaattactcaaggtaaagagcatttcatagaccagcggctttgctggacaggaagggctaaacgtagaatcaacgacagtcaacgattaaaaccaactttca

SEQ ID NO: 944211 - DNA, 120 bp, Artificial Sequence
  ENSG00000250921_11 (sequence is synthesized)
gctgagttgcaaacattccttattagttttcttcagcatgagtattccacacatgaaatcctccacttggttctgcatatgggggcaattgttacaatcaaaatagttcagaaaagttga

SEQ ID NO: 944212 - DNA, 120 bp, Artificial Sequence
  ENSG00000250921_12 (sequence is synthesized)
ggaattacttcatgaggaccgtgtcatctcgatgcatagacgcaattacttctgcatccgagccattattactcactttcccattggttagaaattaatatcatcctttcactaaaccaa

SEQ ID NO: 944213 - DNA, 120 bp, Artificial Sequence
  ENSG00000250929_0 (sequence is synthesized)
acagatggcctggatcagtgcaatgtgcaacaagaggactatatcgtctcagtaaaaaccttgaagagatgaacccatttcagagacccagcaagggatcacctgcatatacaggcatca

SEQ ID NO: 944214 - DNA, 120 bp, Artificial Sequence
  ENSG00000250929_1 (sequence is synthesized)
gcagaaacaggaatttgggatttatcctggaggtagtggaagcttttggaggtcttaaccaggacagcacatgtggctttcctgcaatgggatcgtccttcaagaggacctcacaggctc

SEQ ID NO: 944215 - DNA, 120 bp, Artificial Sequence
  ENSG00000250929_2 (sequence is synthesized)
aaaataggagactggcattgtgatgaagtgtggacttcgctgtcatatagacctggatttaaatcctggcttcagtgtttatggatgacgttggacaagtcatttaacctccttaagtct

SEQ ID NO: 944216 - DNA, 120 bp, Artificial Sequence
  ENSG00000250929_3 (sequence is synthesized)
cagagttctcattacggaaatggagctcttaatagtacctaccccctagtgtggttgtgagggttgagatcatctatgttcaaagtgcttattatacagagacggggacatgtaagtgct

SEQ ID NO: 944217 - DNA, 120 bp, Artificial Sequence
  ENSG00000255340_0 (sequence is synthesized)
ctcctaggctcgagcaatcttcccgcttcagcctcccaagtatctgggattacaaatgtcatgaggatgcttcaagttcattggtgaatccacctgcaagcaagcaataaataaataaag

SEQ ID NO: 944218 - DNA, 120 bp, Artificial Sequence
  ENSG00000255340_1 (sequence is synthesized)
tattcctcagcaaaactcaaggagtatttcaaagtgatcacatgtaaatgttagcaaagggaatgacaagtgcaacagttgtcctgtgaactccaacttggaagaacaagcattcaaagt

SEQ ID NO: 944219 - DNA, 120 bp, Artificial Sequence
  ENSG00000255340_2 (sequence is synthesized)
acatattctgactttacaggtgatataatagtaaagaagtatttggcaatgattgataaagtaacttccttaaatgatgtttcatgcctgtaataataaaaaatgaattgtcttgttttg

SEQ ID NO: 944220 - DNA, 120 bp, Artificial Sequence
  ENSG00000255343_0 (sequence is synthesized)
tcttttgttggggaagggtggcattctgctgaccacagcactccaaccaaaagccaaaaaccaaagcaagacttactaacgcatatcaaataaattaaagatgtccctggctggcatcct

SEQ ID NO: 944221 - DNA, 120 bp, Artificial Sequence
  ENSG00000255343_1 (sequence is synthesized)
tgttattacagcttcattaccacacgtctcaggagagaacacggtgttctaggatggcatttcttgcacaactttttgttttccctggagttaataattgccttttttttggtttgccta

SEQ ID NO: 944222 - DNA, 120 bp, Artificial Sequence
  ENSG00000255345_0 (sequence is synthesized)
agctggctgctagccctggatcccttgtttcctgagatactcaacttcccagcctcccttgcagctagtggtaatcatgtgacccacttctggccagtaagatgaaaaaaggaagttcac

SEQ ID NO: 944223 - DNA, 120 bp, Artificial Sequence
  ENSG00000255345_1 (sequence is synthesized)
ttcttcttgccataaagggccccactcaaggcaccatcctctcctgggtggaggctacagcctctgatcatctgctgtatgatgattcactgtgatggcaaagtgggaggagatgctgat

SEQ ID NO: 944224 - DNA, 120 bp, Artificial Sequence
  ENSG00000255345_2 (sequence is synthesized)
cctgaaaacagtatttatggtgcaaatctcatccatgcaacaggacaattccagggcttacgtcttctcctcctggagcctccattgctctcaactcaataaacactaaataagacttgc

SEQ ID NO: 944225 - DNA, 120 bp, Artificial Sequence
  ENSG00000255345_3 (sequence is synthesized)
gagggagcttgggagggcttttgctgatgccacttgttcttcttgccataaagacggtgtctgacttccaggcaacaatgcacacagaagttacaagtgtggatactagagtcagagcct

SEQ ID NO: 944226 - DNA, 120 bp, Artificial Sequence
  ENSG00000255345_4 (sequence is synthesized)
ggattccaatgctgcttcttaacagctgtgtgactttccacaagtaatgcaacatctctgggtctctgtttcctgttctgcaaaatgggggtactgtctacttgccccagggacctgctg

SEQ ID NO: 944227 - DNA, 120 bp, Artificial Sequence
  ENSG00000255345_5 (sequence is synthesized)
tgctgaggatcattcccaggaagcacctagcaccatgctgggtcctggcaagccactgacaaatgttcactgtcacaatggccctgcttcctctggtgctcggcaccaggctgacatcga

SEQ ID NO: 944228 - DNA, 120 bp, Artificial Sequence
  ENSG00000255345_6 (sequence is synthesized)
gtacacagtcaatgaagaaacaaggagactctgcaaggagatacattaggatgatgtactgacaaagccttgggaaaactgctggtgcctttgctggggggaagatttccagatggagct

SEQ ID NO: 944229 - DNA, 120 bp, Artificial Sequence
  ENSG00000255345_7 (sequence is synthesized)
cctcaggatggcctgccaatccaataaactcaggttcctagaaagcctcccccaccccaccccacccccactctgtaagccccacccaaaccaggacagcagcaattctccccttcccct

SEQ ID NO: 944230 - DNA, 120 bp, Artificial Sequence
  ENSG00000255345_8 (sequence is synthesized)
ggtgtgccttccccggtggtctgtttctttaggacaggaacgcagctgtctggaaggcacccagggaagccattccttgggacatgtcccctgacccacccccggcaaggctgggatgac

SEQ ID NO: 944231 - DNA, 120 bp, Artificial Sequence
  ENSG00000255345_9 (sequence is synthesized)
agaaggacaaacccagccaaacatatggacccgtggcccaggataggcaacagctgggccactgcctgacttttcttctgctccttggaatattctggcaatgagaagacatagtctcag

SEQ ID NO: 944232 - DNA, 85 bp, Artificial Sequence
  ENSG00000255345_10 (sequence is synthesized)
tgtggtcttgtgtagaagtacacaaacctgataatagcaaccactaatatttagtatatgctaagtaataaaagtagctactata

SEQ ID NO: 944233 - DNA, 120 bp, Artificial Sequence
  ENSG00000255345_11 (sequence is synthesized)
aatatttagtatatgctaagtaataaaagtagctactatagtcatcatctcatatagtcctcacaacaagcattgagacaggggctctatccacatttcacagatgaggacacagaggtg

SEQ ID NO: 944234 - DNA, 120 bp, Artificial Sequence
  ENSG00000255345_12 (sequence is synthesized)
ggctgcctttcacagaacaagctgctagccatgctggggctggcgtcggagcccaggtctaagaactctggtacaaggaatccactccctttcccggatttgcctcctccacctgtgctt

SEQ ID NO: 944235 - DNA, 120 bp, Artificial Sequence
  ENSG00000255345_13 (sequence is synthesized)
aaggagttaaccttgtcggagaggttttctttccttggttatgttttctattctttgggtaagtttgacaaagtggggttctttttcatcgccagagtctgtgtccctggaggctgagga

SEQ ID NO: 944236 - DNA, 120 bp, Artificial Sequence
  ENSG00000255345_14 (sequence is synthesized)
aggaaccagaagttgcactttccaacatggatcgcctgctaattttccaaggcagctcagcccctgccagcgtcccctccctcctttgggctgagggcccaggaacccagcctcaaagtt

SEQ ID NO: 944237 - DNA, 120 bp, Artificial Sequence
  ENSG00000255345_15 (sequence is synthesized)
cagcttgcttcctccagcacgcacatttggaaattgaaatttcccacattttcaccacacaaaagccaggttgtatttttgttctcttcaaaatatgccaaaggaatttttcctacccct

SEQ ID NO: 944238 - DNA, 120 bp, Artificial Sequence
  ENSG00000255345_16 (sequence is synthesized)
tgaactttctccaaaaataagtagaaaaagtcaagaccattttgccctgtaagctgagaatagaaaaatcaacatgcagggtgccatttccaggatgttacgaaacagcgaacatgtgaa

SEQ ID NO: 944239 - DNA, 120 bp, Artificial Sequence
  ENSG00000255345_17 (sequence is synthesized)
tccgtctcaacaccatttggcaactttggggatacagtagatgatatttctcacccacaaactcctcactgagtttatattaacattttgctttttttttttaaaaaaaaagaaaaaaga

SEQ ID NO: 944240 - DNA, 120 bp, Artificial Sequence
  ENSG00000255345_18 (sequence is synthesized)
ttaccaccacctggattaaaattcagagtcagcacactgaccaccagcaaataaaacatgaaactatacagataacttagtaaaacaaaaaacgatagtggcccaagataaattaaactt

SEQ ID NO: 944241 - DNA, 120 bp, Artificial Sequence
  ENSG00000255344_0 (sequence is synthesized)
acgtcaggaccccgccaccccactctgcccctccacccgaggctgccttatccttttgctttctctcttaaatctgctgcccgttactgctattctaccctttggtaggtgtcaacagat

SEQ ID NO: 944242 - DNA, 120 bp, Artificial Sequence
  ENSG00000255344_1 (sequence is synthesized)
gttcacactttcctttctttctgatggtggtcaggaaacctagcactccacctaaggcgaagaagccgggcgtttgtctgttgtgagtgagtgacaagggcggaggaggcgtgccaggct

SEQ ID NO: 944243 - DNA, 120 bp, Artificial Sequence
  ENSG00000255344_2 (sequence is synthesized)
ggctgcagtaccattccctgagtctggcactgcctgaagggagccctgccggtcacatcagacgttcctaaggggcctggagtgaaaggtgcttgcagggagcaagtgaaagtggcgccc

SEQ ID NO: 944244 - DNA, 120 bp, Artificial Sequence
  ENSG00000255344_3 (sequence is synthesized)
ccacccagtctgcccattccacctctctttatactgatgagagaagccaaagggaggcaacaaggaaaagaagagaaactggaagctgggatgattgacagactagaatgacaggctgct

SEQ ID NO: 944245 - DNA, 120 bp, Artificial Sequence
  ENSG00000255344_4 (sequence is synthesized)
gaaactgaatgaaaccccagaagttatcaattcatccttcactttttgagtttttattgaagtatgttataattatagaaaagtgcacacattagacacacagtttggtaaactttcata

SEQ ID NO: 944246 - DNA, 120 bp, Artificial Sequence
  ENSG00000255344_5 (sequence is synthesized)
aaccaaccacagccatagcatcagcactcaaatggagaaaccaaaagcggcagcaccctgggagctcccggagcgcttctgctgtcggactcctccccggtaacacatacagtgtgtcta

SEQ ID NO: 944247 - DNA, 120 bp, Artificial Sequence
  ENSG00000255344_6 (sequence is synthesized)
acatatattggttttgccagctttgtacattagctaaattgagtgtcacagtatgtgtttatatctggtttctttccttcaacgtcatgtttgtgaaatttattcacacggttgtgtgca

SEQ ID NO: 944248 - DNA, 120 bp, Artificial Sequence
  ENSG00000255344_7 (sequence is synthesized)
gctatgttgttcctgctcacagcagttttgtgcccttgggtgaaaacaccacattttctattggaggctgcatagctgtctgaagttgcacgtgagtgtgggacccagcacaggaggccc

SEQ ID NO: 944249 - DNA, 120 bp, Artificial Sequence
  ENSG00000255344_8 (sequence is synthesized)
aactggactcctgcccagtgctcatgtcactacctcacactacccaccttcaacattaagttctacatgctatgctgtgcatacctgtcacattcccttgaattaggacggaagctggat

SEQ ID NO: 944250 - DNA, 120 bp, Artificial Sequence
  ENSG00000255344_9 (sequence is synthesized)
tcaccccatgtgcagagtggggttaataaaagcaagttttggcaatatactccttccatggcacataaacttcaagtcacaaatctggatgtgcataaaggtgttaacaccaagagttgg

SEQ ID NO: 944251 - DNA, 120 bp, Artificial Sequence
  ENSG00000255344_10 (sequence is synthesized)
ggtaatatttcatctgctctgaatgcaatctctatttctggatgtattcatttggcagggagttctgccacttaagagctagagtcgattctccagggaggcaaggggatttttttcctg

SEQ ID NO: 944252 - DNA, 120 bp, Artificial Sequence
  ENSG00000255344_11 (sequence is synthesized)
tgagactgagaatacatcaacgaactctgctcttagcagtacaggtcaagtgttggaggcagtggaggtcaatgtcttgctgagccaatgtgagccttctgtggggcctggcaaagctag

SEQ ID NO: 944253 - DNA, 120 bp, Artificial Sequence
  ENSG00000255344_12 (sequence is synthesized)
acattccctctctgcagctctgcaacctttcttcccccataacgtgcctctcacatcccgtccccaaggagccacttattcccatgacaggtttatggtctagttgaaccagctgcccct

SEQ ID NO: 944254 - DNA, 120 bp, Artificial Sequence
  ENSG00000255344_13 (sequence is synthesized)
ctggccatgtgcacagttagagaggcaggggcctctagtcattctctctccctctgccctggcgtcagccacaaattccagcaggctcattaaagtgtccacctgtctgagcacctcatc

SEQ ID NO: 944255 - DNA, 120 bp, Artificial Sequence
  ENSG00000255344_14 (sequence is synthesized)
agaaggattcaatggctgcagaacctcgctgctccctccacctggagcggggctgaccctgcagtggcgcgtttggcctgagcccctttcgtttttaccctcaggaagcttgggggctgc

SEQ ID NO: 944256 - DNA, 120 bp, Artificial Sequence
  ENSG00000255344_15 (sequence is synthesized)
gcaggccagggctctgcctgggctctgaatgctggagagaaggaggagagaggaagtgggagaggatgtagtagtttcccctgtctactttctctaccttcttttctcctctaccctccc

SEQ ID NO: 944257 - DNA, 120 bp, Artificial Sequence
  ENSG00000255344_16 (sequence is synthesized)
tttccaagctcaacttccttgacagtattaaggaaataccttttttagttaccaaaataagttgctctgtggagaatttctgatgatctcatggtgattttcctgcacccggaagacact

SEQ ID NO: 944258 - DNA, 120 bp, Artificial Sequence
  ENSG00000255344_17 (sequence is synthesized)
ttgctttgctttgggaccatggatattccttggggcagccaccaaggatgaataaggtttgaatggggaggcactggcctcggagctccttgctgctgacatcagttgtgcccttgtagg

SEQ ID NO: 944259 - DNA, 120 bp, Artificial Sequence
  ENSG00000255344_18 (sequence is synthesized)
agacgtcctggtcctgtctgcctcagaggcttccatctgcggatttcctgaggtcgtccccttactcctctgctgcagtctctctcaacatttcaactgtctgctccagaaagttactct

SEQ ID NO: 944260 - DNA, 120 bp, Artificial Sequence
  ENSG00000255344_19 (sequence is synthesized)
gtcactaagtaaaataaatacaaacaaaataagcaataatctacccccttcctttctcctctggtcccctctctgtctgcctgtcaccccctcctcaatgagaacgtggatccctcgtgg

SEQ ID NO: 944261 - DNA, 120 bp, Artificial Sequence
  ENSG00000255344_20 (sequence is synthesized)
catttctctggagggatggcccaggctttcccagcccatgcactctcagccagatcatttgcctgcggtcccatggccgtctccaaaatgtgctctcctccaaagactagttttgctgat

SEQ ID NO: 944262 - DNA, 120 bp, Artificial Sequence
  ENSG00000255344_21 (sequence is synthesized)
tgtctttgttgcaaactgtttttctccacactacgcaattggcattgcctttttcaaagtatatatttgtttttatttgccaaatccacttgaatatactcagctttactatggagtttg

SEQ ID NO: 944263 - DNA, 120 bp, Artificial Sequence
  ENSG00000255344_22 (sequence is synthesized)
cgagtggcctcttctcctcctccacagacacctcggggaggggtcatccttcagacacgctgagcctaggctgcccgcccttccgcagccccgccctggccggctcctcgcggcccacta

SEQ ID NO: 944264 - DNA, 120 bp, Artificial Sequence
  ENSG00000255348_0 (sequence is synthesized)
tggtcagcatcagcagacgaagccaggacggactgaatcagaaggaagatgcgcttctccaccctggctggacacagctgggctatatcccctaagatggagtctcgctctgtcgcccag

SEQ ID NO: 944265 - DNA, 120 bp, Artificial Sequence
  ENSG00000255348_1 (sequence is synthesized)
acatggcaggattgtaaatgacaacctaacaattaaatatgatgatattaaatgagctaaaatatgcaataacttaataccactcagaaatagatatttcaaaccttttcaaaataaaaa

SEQ ID NO: 944266 - DNA, 120 bp, Artificial Sequence
  ENSG00000225365_0 (sequence is synthesized)
tctatccaagctccagctccctctgccattctcctgcctcagaacagggaaaaggtgctctgaagctgcgctcccttccactcagccagagaagaccagcagaccaggggccagaggcag

SEQ ID NO: 944267 - DNA, 120 bp, Artificial Sequence
  ENSG00000225365_1 (sequence is synthesized)
agaaatgcatgcaagtggctcctccctgcaaatcagaacatctgaccctggcccagcaccggactcctgtcctggatgtggtctcaacagcacagccttggagcaaacccagggagctcg

SEQ ID NO: 944268 - DNA, 120 bp, Artificial Sequence
  ENSG00000225365_2 (sequence is synthesized)
ggagcatgctcactctgggggtctagcgccgagtcccgggtcctgagggacacactgtgagcctggagttggtgacggctggggacatactgtgagcctggagctgatgacagctggaac

SEQ ID NO: 944269 - DNA, 120 bp, Artificial Sequence
  ENSG00000225365_3 (sequence is synthesized)
cggacggtgcactgtgagcctggagctggtgacggctggggacatactgtgagcctggagctggtggctgctggagacatactgtgagcctggagctggtgacggctggaaccagacatt

SEQ ID NO: 944270 - DNA, 120 bp, Artificial Sequence
  ENSG00000276672_0 (sequence is synthesized)
ctaccactgggactgtgctatgtcaggactgaagccagaacatctctgagtctcacccaagacatacagcaaatactgcctgggtacaactgatgtttttcaaggcccaagggctcttta

SEQ ID NO: 944271 - DNA, 120 bp, Artificial Sequence
  ENSG00000276672_1 (sequence is synthesized)
gtcagcatattatgaattctgccagagctgggttcttcccttcaaggcagcgggttcccttctggcccagggtgtgtctacaaaggtcatccgggagctaggtcctggaatgaggccctc

SEQ ID NO: 944272 - DNA, 120 bp, Artificial Sequence
  ENSG00000276672_2 (sequence is synthesized)
aggactctaccaagtgtgctgtcctactgtggctgagcaggtctccaagttgcaagacaaagtcctctttactcttccctcccctctcctcaagtggagggaaggaatctcttctgcagc

SEQ ID NO: 944273 - DNA, 120 bp, Artificial Sequence
  ENSG00000276672_3 (sequence is synthesized)
tgcaatttgtactgcctgggattggaggaggggtgatgcaggcactcccttggctgccctggctggtgtctcactgggtcttgtgtatcccaagttggctgactcaagcacggtacagca

SEQ ID NO: 944274 - DNA, 120 bp, Artificial Sequence
  ENSG00000276672_4 (sequence is synthesized)
ccagagcttgcccaggaattgcagtcttgtggcgtagactgctattcaagtttatttaggaccccagagtgctttagcccatgatgatggtgctagctggaactcagtttctgcccactg

SEQ ID NO: 944275 - DNA, 120 bp, Artificial Sequence
  ENSG00000276672_5 (sequence is synthesized)
ggatagacaattcccctgtggttagggctggtctaaatactctctctgtgggttctgtcatgtgttgctctccactgtgacggggaagcactgtccagtgcacacagattctctcttttt

SEQ ID NO: 944276 - DNA, 120 bp, Artificial Sequence
  ENSG00000276672_6 (sequence is synthesized)
cacacagattctctctttttctttttttttggtggagtctcaccctgttgaccaggcactgaagtgcagtggtgcgatcttcgctcactgcagcctccgcctcctaggttcaagcgattc

SEQ ID NO: 944277 - DNA, 120 bp, Artificial Sequence
  ENSG00000276672_7 (sequence is synthesized)
aggcgtgagccaccatgcctggcctacacagattctctctgcaccatgctgcagctgatgggggatgagagaggggtgtgtaggcaattcaatactgtctttcctaccttctacagtgcc

SEQ ID NO: 944278 - DNA, 120 bp, Artificial Sequence
  ENSG00000276672_8 (sequence is synthesized)
tactgtctttcctaccttctacagtgcctttttctttaatacagtgttaaaatcaggtactgtgatcactcatctgatttcttgttcttacaaaggtgctttcttgtgtgggtactaatt

SEQ ID NO: 944279 - DNA, 120 bp, Artificial Sequence
  ENSG00000276672_9 (sequence is synthesized)
tggtgttcctgcggtgggggagggggataatctctaggaggtgctatctggccatcttgcttcacctcctcctccagcagttgctttttataagtttgttcaaagcttatagttgttatc

SEQ ID NO: 944280 - DNA, 120 bp, Artificial Sequence
  ENSG00000276672_10 (sequence is synthesized)
tactgtaagattgtcagccataccagaagcagaaattccatctcattgttttataaatatggtcaagtatctcttaaaaaaaaaaaatcattcatatacctcacatcctcatcttgcacc

SEQ ID NO: 944281 - DNA, 120 bp, Artificial Sequence
  ENSG00000276672_11 (sequence is synthesized)
ctctctttctactctttacacattttttaagtgttttctgttcatattgcctacattttcttagtttgcaatccattttaatctggttttccttcttataacttcaaaaatacagtttag

SEQ ID NO: 944282 - DNA, 120 bp, Artificial Sequence
  ENSG00000276672_12 (sequence is synthesized)
tctaaaagggatgtatgtatgtgtgcatctccatccagtgaattcttgctctgtatccagtgaacttttaattgacctcagcaatatgtgttgccctttcttgaatctcctttttccatg

SEQ ID NO: 944283 - DNA, 120 bp, Artificial Sequence
  ENSG00000276672_13 (sequence is synthesized)
gtttccctgagacaaatattctcttgtattttttcgcctacatctttggctgctcactttacaggctttttcttaccaagccatcaaatgtggaatatagctttattctcgactctctgc

SEQ ID NO: 944284 - DNA, 120 bp, Artificial Sequence
  ENSG00000276672_14 (sequence is synthesized)
tgctcataagattctctccctgggtgaccttatacatgcccaaggctttatataccatctattagctgttaactccatttatatgagctcaaactttagctgaatttcacacttatgcat

SEQ ID NO: 944285 - DNA, 120 bp, Artificial Sequence
  ENSG00000276672_15 (sequence is synthesized)
ctaaacacctatctgacgttcgttcacagatacttcagagacatctcaaactgaacatgttccacactgagcttttgatctcttccagcccaaagtagacctttcccattgttcctttct

SEQ ID NO: 944286 - DNA, 120 bp, Artificial Sequence
  ENSG00000276672_16 (sequence is synthesized)
cgatgtcatcttttctgattcttttccatgttctacagcagtggggattatctggggttctacctaattttctttattcaatgatcagcttaatatctgtcttttccatgctccttcccc

SEQ ID NO: 944287 - DNA, 120 bp, Artificial Sequence
  ENSG00000276672_17 (sequence is synthesized)
ctttctacttctgttcatgagacaactcagttttgagttcaaaaagagtacatgtgttgatgattcccacatccagacatgaggtgcttttcctaatacaaccatcagccatttcaattt

SEQ ID NO: 944288 - DNA, 120 bp, Artificial Sequence
  ENSG00000276672_18 (sequence is synthesized)
tacttttcttctagataccgggtgtaaacctttagcatgtaagttgacccctctctccattttgacagtcatttgtcaagctctggcctttatcccttgtagatggatgttgctttcatc

SEQ ID NO: 944289 - DNA, 120 bp, Artificial Sequence
  ENSG00000276672_19 (sequence is synthesized)
tctccctgtatttgtcatcaaatgaaccataacaggcagactagatggactcatggctaggtatactcagatgagcataagagatttaaaccaaaagcatgggtgtcattcaaaacagct

SEQ ID NO: 944290 - DNA, 120 bp, Artificial Sequence
  ENSG00000276672_20 (sequence is synthesized)
atttgtgcatttaaaaatcaataattcttcatactcaacatggcaagtaatttctattaaaaagagatagaaatgtaaatatttagatttagaccactaagggcaacttctatccattca

SEQ ID NO: 944291 - DNA, 120 bp, Artificial Sequence
  ENSG00000276672_21 (sequence is synthesized)
tttgttcagaaaaatatttattgagcacctgctgtttgccatggcttttttaaggtactggggatacagcaggacaaaattgacatcagtttcctttgtggagtttacagcctatcacga

SEQ ID NO: 944292 - DNA, 120 bp, Artificial Sequence
  ENSG00000276672_22 (sequence is synthesized)
agagatgaatgcaggatgatagatagatagatagacaggcagacagacaggcagacagacagatagataaactgataaaatattctatgtcatgtgtgctgtggaggtggagaattttgg

SEQ ID NO: 944293 - DNA, 120 bp, Artificial Sequence
  ENSG00000276672_23 (sequence is synthesized)
tttgttgttttaggtagactgtgttacacagtaatttacatagtccaggcaaactaaacagtatatgcaagacctgaagcaggaaggaatatgccagtggagtaggttgggcaaatggga

SEQ ID NO: 944294 - DNA, 120 bp, Artificial Sequence
  ENSG00000276672_24 (sequence is synthesized)
aagtggcaaaagatgaggtgagaacattgagctaacatggaggtgaggtgggatagatcatatagggtactggtattctggtaaatgtttagcagctggctctctagggaaaaaaatcaa

SEQ ID NO: 944295 - DNA, 120 bp, Artificial Sequence
  ENSG00000276672_25 (sequence is synthesized)
taataaaaggtcctgatctgtagtgtttgcagtttttctggtgtaaacactctcaccatggccaatttcaagctagcaatggaaaatataacagtcagctcttgtgagctagtataaccc

SEQ ID NO: 944296 - DNA, 120 bp, Artificial Sequence
  ENSG00000276672_26 (sequence is synthesized)
ttctccaggccatcactgatatagagccttgtaggacaattgcagtgatttttttttttaagtgagaaaggatgccactaaagaatattagagtaggccaggctcagtggctcatgcctg

SEQ ID NO: 944297 - DNA, 77 bp, Artificial Sequence
  ENSG00000276672_27 (sequence is synthesized)
tgtttctaataaaaatacaaaaaattagctgggagtagtggtgcgtgtctgtcatcccagctactcaggaggctgag

SEQ ID NO: 944298 - DNA, 120 bp, Artificial Sequence
  ENSG00000276672_28 (sequence is synthesized)
aggctgaggcaagagaatcacttgaaccgagaggcagaggttttagtgagccgagattgcaccaccacactccagcctggactacagagtaagactctgtctcaaaaaaaaacaaaccaa

SEQ ID NO: 944299 - DNA, 120 bp, Artificial Sequence
  ENSG00000276672_29 (sequence is synthesized)
gactctgtctcaaaaaaaaacaaaccaacaaacaaaaaagtattagagttatgatgtgttcaggtttctgtttcaacaatcaactgtctcctgggttgagaatattaattacatgttaac

SEQ ID NO: 944300 - DNA, 120 bp, Artificial Sequence
  ENSG00000276672_30 (sequence is synthesized)
atttgtctgttttctttgatttacatagtgctagcttacacattgttttcaattattaattgtcaatatttaaaaatatagaaatacttcaaaaacattaacttcttgattttcttaaaa

SEQ ID NO: 944301 - DNA, 120 bp, Artificial Sequence
  ENSG00000276672_31 (sequence is synthesized)
aatcaaatttgatctttatgttactaatttgaattgtggagtggctatcttttttacataggtatgcattttccatttctcaccagttttagctattattttacacagttttttctttgt

SEQ ID NO: 944302 - DNA, 120 bp, Artificial Sequence
  ENSG00000276672_32 (sequence is synthesized)
ttttaaattgtggagatgagaaaaataaactttctaataaccaaaccttttatcaaaattggtgtaaaatgagaggtaagagagggttatatggttcaagaaaaattgagcatgcgtatt

SEQ ID NO: 944303 - DNA, 120 bp, Artificial Sequence
  ENSG00000276672_33 (sequence is synthesized)
tgcgtatttctttatagatgtaaaggatatttttaatttataataaaatgtatctattttgaaggaatacagcttaatatatcattatgaaacatcatacaacaggttatgattaggtat

SEQ ID NO: 944304 - DNA, 120 bp, Artificial Sequence
  ENSG00000276672_34 (sequence is synthesized)
taaattgatacactgagaaaacatcaaaatttaatcaggctttgattttaaattaattgaaataaattatgttcttgtaaaattaatatttactgtatgaaaaattgtcagaatagcaaa

SEQ ID NO: 944305 - DNA, 120 bp, Artificial Sequence
  ENSG00000276672_35 (sequence is synthesized)
caaaacaatttgcaaatgtcagtttcataaatgagtgagtacaatatatattgacttagaaaaacaaacattagcaaaagtatatctaaacataagtattgttttgaaaatacagttaac

SEQ ID NO: 944306 - DNA, 120 bp, Artificial Sequence
  ENSG00000276672_36 (sequence is synthesized)
ttacaggacaaactcattttatgctgtttttaatagtgatcaaagtgcagatatttaaaatacatcactgaattaagttagttttgtacatgataattttaataaaggatttgaaaactt

SEQ ID NO: 944307 - DNA, 120 bp, Artificial Sequence
  ENSG00000225361_0 (sequence is synthesized)
agcaaagctgcaccgccatttcctgtgcttgggaactgaaggcaagctaccgcatagcaacatggtagagactgtgacgttttgctcggcatcaggtgaaggcattcgggagtaagtttc

SEQ ID NO: 944308 - DNA, 120 bp, Artificial Sequence
  ENSG00000225361_1 (sequence is synthesized)
gactagtcaggctccctcgaatcccaggctgtgattattatctgcagcctgtgtcacccaggatgaaaggggatggaaaagccgtgcatacccttggtgacaaagccactcctgctctta

SEQ ID NO: 944309 - DNA, 120 bp, Artificial Sequence
  ENSG00000225361_2 (sequence is synthesized)
aaggctggagcaggacatctgacacaatcccaggtctccatggaggcaggggcatggccggcagctgtagaccacagcctccgggctctggcgtggaggaagaaaaggaaaccagcacag

SEQ ID NO: 944310 - DNA, 120 bp, Artificial Sequence
  ENSG00000225361_3 (sequence is synthesized)
actacaagcgtcccccagcaaagctgcaccgccatttcctgtgcttgggaactgaaggcaagttttttatcagcagtgttttgtttcactgccccaagtggaaccgatgagcggggtgct

SEQ ID NO: 944311 - DNA, 120 bp, Artificial Sequence
  ENSG00000225361_4 (sequence is synthesized)
actgtgtggttgcccccacatctgactcacctcagtgcccaggatgggagcaaagcacagacagaggctcactagtggcacgatcttggctgattgcatcttccacctcctgggttcaag

SEQ ID NO: 944312 - DNA, 72 bp, Artificial Sequence
  ENSG00000225361_5 (sequence is synthesized)
cgatcttggctgattgcatcttccacctcctgggttcaagagattcttgtgccttagcttcctgagtagcta

SEQ ID NO: 944313 - DNA, 89 bp, Artificial Sequence
  ENSG00000225361_6 (sequence is synthesized)
gccggccacatttcccttctggtgcgcgtcctcctgtagctgtgggatcaggggaggtagagatgtcttgtaactgactcaagtttggc

SEQ ID NO: 944314 - DNA, 120 bp, Artificial Sequence
  ENSG00000225361_7 (sequence is synthesized)
aggggaggtagagatgtcttgtaactgactcaagtttggctgcttgccgcaggagaagcgaggtgtggtgaaaggaaagcaacttttattcagatgctagcaggtgggagagtggccagg

SEQ ID NO: 944315 - DNA, 120 bp, Artificial Sequence
  ENSG00000225361_8 (sequence is synthesized)
ctcaaggctctaaggaaccatctcagctttttggactgcgtgaagggctttaggaaggagaactcggtgtgggagacatgtgggagtagggcagtggtgcaggtgtcttgagtaattgcc

SEQ ID NO: 944316 - DNA, 120 bp, Artificial Sequence
  ENSG00000225361_9 (sequence is synthesized)
catccggaggtctagttggcatcatcttgaccttggtctggtggtggtggactcattgttcataactcccctagacaggaggattccacagctgggttctatgcctggtttatttaaaaa

SEQ ID NO: 944317 - DNA, 120 bp, Artificial Sequence
  ENSG00000225361_10 (sequence is synthesized)
tgagcccctggcatttctaagcaggcacagaatgagataagtgagcactgtggctggtgggaaagggagggaaacaggtttaaagtatgtttcaaggctgcattctgagactaggaggga

SEQ ID NO: 944318 - DNA, 120 bp, Artificial Sequence
  ENSG00000225361_11 (sequence is synthesized)
aaggaagaaaaactttaaaattcttctcaaggctgagatatttgactacagtctcatgcccaaaatgtttctattctacactgagacctgatagataatttggctgcatacctggagtcc

SEQ ID NO: 944319 - DNA, 120 bp, Artificial Sequence
  ENSG00000225361_12 (sequence is synthesized)
gtgcacctgcccctcccatcccatactcgcagccagtggaaaagtctgcaaaaggaagccagctgggagtgcccaccagagtcaaagtctggggcaggctggtggactcaagaggagtct

SEQ ID NO: 944320 - DNA, 120 bp, Artificial Sequence
  ENSG00000225361_13 (sequence is synthesized)
taaatattggaaatgtcatcacaaaccatctgggaagccccctcctcttaaaaaggacataaagtcaaagtgaacaggtgtgctcactccaagcccgtgcccacaaccacagtgcccttc

SEQ ID NO: 944321 - DNA, 120 bp, Artificial Sequence
  ENSG00000225361_14 (sequence is synthesized)
acattcagagtcatggccactagccacaaaattgtgacttacagttcacaaaattgggacatatttacatgttgactaagttgggaaataatttggattttctttaaaagtagtaaaagt

SEQ ID NO: 944322 - DNA, 120 bp, Artificial Sequence
  ENSG00000225361_15 (sequence is synthesized)
aaagaagaaaaagtcaaaaaggtctgacatctaagagggtgaaatttccttactttagatcacaagcaatcaggctgatcccgcctgagccctgagctccctgggacccagcagcagctg

SEQ ID NO: 944323 - DNA, 120 bp, Artificial Sequence
  ENSG00000225361_16 (sequence is synthesized)
tgcattggcacgtggtgccctgtgtctgatcagctgactcctcaggcaaaacctgcaccattttcaccagaattgcagatgtcctcagtgtcattacaaagttcctaagtcatgaccatt

SEQ ID NO: 944324 - DNA, 120 bp, Artificial Sequence
  ENSG00000225361_17 (sequence is synthesized)
ctgtcctgtggaaccaggctggactaagctcccatttctttaagccatcctgtcccctgcagggacttccaaggtggagctgatgagcaatagttatgagtcattggaggagacatccca

SEQ ID NO: 944325 - DNA, 120 bp, Artificial Sequence
  ENSG00000225361_18 (sequence is synthesized)
gaggcgccagctcccctctgccctaaactgaaattaagacctggtgctctgggtggggcccctggaaggggatgtgcaactcagaggggaccttctccacctccacccaggagaccccag

SEQ ID NO: 944326 - DNA, 84 bp, Artificial Sequence
  ENSG00000225361_19 (sequence is synthesized)
gccctcttttaaaaaccaaatgaaaataagcaaaagaagccaatcgtctctgtgaaatgtccagaagagggaactctgtagaga

SEQ ID NO: 944327 - DNA, 120 bp, Artificial Sequence
  ENSG00000225361_20 (sequence is synthesized)
cgtctctgtgaaatgtccagaagagggaactctgtagagacagagaggatattattggctgccggaggctgggaatgggaaggtgaggggcctggggaggtgatggttaaaagattcttc

SEQ ID NO: 944328 - DNA, 120 bp, Artificial Sequence
  ENSG00000225361_21 (sequence is synthesized)
tttgtggtgatgaaattgtcttaaaatggactgtggtgatagttgtgcaacttggtgaatatataagttattgaattgtacactttaaatgggtgaattgtatggtgtgtgaaacatatc

SEQ ID NO: 944329 - DNA, 120 bp, Artificial Sequence
  ENSG00000225361_22 (sequence is synthesized)
gttctgaaaccagcgtctctggttacaaccaaagaggttgctcagtcacactcctgaaaggcaaaaggaggttggccagtaaaaaagatgtaaaccctagatgtagttcttagtgtggaa

SEQ ID NO: 944330 - DNA, 120 bp, Artificial Sequence
  ENSG00000225361_23 (sequence is synthesized)
gccacaggagaacttccaatgtggccacggggatcgccgaggcttttatgcaggggagttcagcctacacccaggaatgcacaaggacagcttggagcttagaagcaagtggagttggtt

SEQ ID NO: 944331 - DNA, 120 bp, Artificial Sequence
  ENSG00000225361_24 (sequence is synthesized)
catctctttcactggctcataattttgcaacggcggtttcatctctaccctgacaataccttttagttttcttacccactggggtcgagacttaattgaagacctcagacggacagcata

SEQ ID NO: 944332 - DNA, 120 bp, Artificial Sequence
  ENSG00000225361_25 (sequence is synthesized)
acacggaacctgagaccttgatttgcggggacaggcttaaagtgtattctggagttggtgcccccaccccaggggccggctcagagggttcactttccagcctaacggcaggggaaccag

SEQ ID NO: 944333 - DNA, 120 bp, Artificial Sequence
  ENSG00000225361_26 (sequence is synthesized)
aggctgccgacctggatctcaccttgatggaggtcttgtcaccttcctccttggctggagagacagactgtggatgctctcctgctggccacccaaaaacaacaaacagacaaacaaata

SEQ ID NO: 944334 - DNA, 120 bp, Artificial Sequence
  ENSG00000225361_27 (sequence is synthesized)
tgaatgaggaaaacttgaagaggccccacgtgccagaggtgggacagcttgagatttggtgaggataattgcagtggctcaaaacccataaagaagtttaagtccatgagttcaccgtaa

SEQ ID NO: 944335 - DNA, 120 bp, Artificial Sequence
  ENSG00000225361_28 (sequence is synthesized)
tctgaaacaaaaacaaaaacaaaaacaaattgatcatctttggaggctaacaatcaattcattatctagagacagacagaggctcactagtggcacgatcttggctgattgcatcttcca

SEQ ID NO: 944336 - DNA, 89 bp, Artificial Sequence
  ENSG00000225361_29 (sequence is synthesized)
gttcaagcactggtcttaggttttacaatcgtgattttatctccgggagcagtttggggagagtcagaatcttgcagcctccagcgaca

SEQ ID NO: 944337 - DNA, 120 bp, Artificial Sequence
  ENSG00000225361_30 (sequence is synthesized)
ctggtcttaggttttacaatcgtgattttatctccgggagcagtttggggagagtcagaatcttgcagcctccagcgacatgacacctaaccgtaatttctaatcttgtggctaatttgt

SEQ ID NO: 944338 - DNA, 120 bp, Artificial Sequence
  ENSG00000225361_31 (sequence is synthesized)
ttttgttttgggaaagggctgttattctctttgtatcaaactataaactattaatataaactaaattcctcccaaggggagttcagcctacacccaggaatgcacaaggacagcttggag

SEQ ID NO: 944339 - DNA, 120 bp, Artificial Sequence
  ENSG00000225361_32 (sequence is synthesized)
cctcactacaagcgtcccccagcaaagctgcaccgccatttcctgtgcttgggaactgaaggcaaggtgagcccctcccggctgccccggcccgacctcccctgactcccaagcttgggc

SEQ ID NO: 944340 - DNA, 120 bp, Artificial Sequence
  ENSG00000225361_33 (sequence is synthesized)
ccctagccgctgggatcggcgacctggtcctcggcccggcgggagtgaacgcctcccagggaagaggccgggcctccaagcaggtctgcacccccggagttatgtttctgggatccgagg

SEQ ID NO: 944341 - DNA, 120 bp, Artificial Sequence
  ENSG00000225361_34 (sequence is synthesized)
actagcgagcttggggcccgggagagcggccaccctcccggaagctccgcctggcgcagggcgtgaaccgcagtctccaggccggccgggccgcggccattctcggagggcagcggccgc

SEQ ID NO: 944342 - DNA, 120 bp, Artificial Sequence
  ENSG00000225361_35 (sequence is synthesized)
aattcagctcccagccttccagaagctgcaattttacaacctcactacaagcgtcccccagcaaagctgcaccgccatttcctgtgcttgggaactgaaggcaaggggagttcagcctac

SEQ ID NO: 944343 - DNA, 82 bp, Artificial Sequence
  ENSG00000282041_0 (sequence is synthesized)
caggtgatccacccacctcagattggcccagtctatggatttttaaaaaataacttgggcttgtcttccttgctgaagaagg

SEQ ID NO: 944344 - DNA, 120 bp, Artificial Sequence
  ENSG00000282041_1 (sequence is synthesized)
ttaaaaaataacttgggcttgtcttccttgctgaagaaggctgttttccagcctgtcacacagcagttaggctgtagaccctcactggagcccctgccctgcagaatcgagcacatgttc

SEQ ID NO: 944345 - DNA, 120 bp, Artificial Sequence
  ENSG00000282041_2 (sequence is synthesized)
tttctgggtctgtgtggggtgtgggtgtggtcaggacaccgtctgtgaccttatttactggggacgtcccctgcttgaggagaatatccaggcaaggtctcctcactctccttagccacc

SEQ ID NO: 944346 - DNA, 120 bp, Artificial Sequence
  ENSG00000282041_3 (sequence is synthesized)
atccagcttggccaagaggcctccccatgattcctcccacgccagggcctcgcctttgtttttcactgttaggggctggcgagtcactgacccgcccccctccctgctgcccaaaccact

SEQ ID NO: 944347 - DNA, 120 bp, Artificial Sequence
  ENSG00000282041_4 (sequence is synthesized)
tctgtttcctgaaggcgccttgggaatgctgagtcgcgatttcctcatcccctcgtgcagctgcatttctgctgcgtcatgtttgggaggggggactcgcggaaacaaagggaaggcgga

SEQ ID NO: 944348 - DNA, 120 bp, Artificial Sequence
  ENSG00000282041_5 (sequence is synthesized)
ttttgctagattttgctgagtcaccagtgcctcctcagcttctctttaggtgggaggtgaaagggcagctttaatggtaggcaggaggaagtgaaacttctagaaaacggcagaagcctc

SEQ ID NO: 944349 - DNA, 75 bp, Artificial Sequence
  ENSG00000282048_0 (sequence is synthesized)
tgtgacaaggaacaccctccttgagcacagggggagggtgaatatcagaactgaatctgacttctgacaacatag

SEQ ID NO: 944350 - DNA, 120 bp, Artificial Sequence
  ENSG00000282048_1 (sequence is synthesized)
gggtgaatatcagaactgaatctgacttctgacaacataggagctgaagggaccttggatgttgggtaagcagttcccactgtctgtcacaagccctaataaaatacaagtaagagaaaa

SEQ ID NO: 944351 - DNA, 120 bp, Artificial Sequence
  ENSG00000282048_2 (sequence is synthesized)
gaacaaaactggggcaatctaatcaagaaaggctttctggaatgcatgaggccccagcgagatctaaaattcctagatggacttggtgttgtggaagcaagacagcagtcgggcaaagga

SEQ ID NO: 944352 - DNA, 120 bp, Artificial Sequence
  ENSG00000282048_3 (sequence is synthesized)
gagacaggaagcaaatgaattctaccttgccaacaatgggaaacagacatacttaatgtgagtagagaggtagccttggccaggaaagtttgtttgaagatcctggtctgtcttgacttt

SEQ ID NO: 944353 - DNA, 120 bp, Artificial Sequence
  ENSG00000282048_4 (sequence is synthesized)
aaatcacttgcctttggaatggaagagaacagacatctcatcaaatgaaccaatctgaatgcaaggagcacccgaatccatccccactcaggaatcctggttacagatgctaaaagatgt

SEQ ID NO: 944354 - DNA, 120 bp, Artificial Sequence
  ENSG00000282048_5 (sequence is synthesized)
ctttgacagtgaacagtgggtcataagatctatttctgcctcctgtctgtgactcactggatgactcaaggtgaatctctccccatttctgagtatctggcccccatccatgaagaacag

SEQ ID NO: 944355 - DNA, 120 bp, Artificial Sequence
  ENSG00000282048_6 (sequence is synthesized)
aagatcacatcagtatttcccttcggcaaggttggcccccgctgcagcaactgtgcaaagaccaccagactgccctctctgccagcttactcttcagcctttctggctctttctcccact

SEQ ID NO: 944356 - DNA, 120 bp, Artificial Sequence
  ENSG00000282048_7 (sequence is synthesized)
tccacatccctgcttcatttttctttttctccttttgcaaatagcattgctccaaagcaacccaggcacgtgtcttggggacagcgctgcgagctacccctgagctgtggggagcaggcc

SEQ ID NO: 944357 - DNA, 120 bp, Artificial Sequence
  ENSG00000282048_8 (sequence is synthesized)
attttcattctgcagcaggtcagcttccattccactagggggctttgaatgttaataggcatttctttccaggtacccttctcctttctctacagtgcaccagtccctgtgggaccttcc

SEQ ID NO: 944358 - DNA, 120 bp, Artificial Sequence
  ENSG00000282048_9 (sequence is synthesized)
attggcatcctacggagagattattactcttttcattgttttccttacaaattagtttctggatttaatggctttggttgctgagcagattttggaaattggggcagatggtggggtggg

SEQ ID NO: 944359 - DNA, 120 bp, Artificial Sequence
  ENSG00000282048_10 (sequence is synthesized)
gtgatctgcagagcccattatgggcactgggttattgactgcttgggatttaaggtggaattaacgctttcctgtttcttggggaattttgcgatggggttggaccttcttttcccttag

SEQ ID NO: 944360 - DNA, 120 bp, Artificial Sequence
  ENSG00000282048_11 (sequence is synthesized)
aaggaattgtgtttgttgttattgcatgtttaagaagcttctagaaattgtagctctggaatacaataggtagagaatgcaggtttttaatgggatgtgggggagtgttgctcagttgtg

SEQ ID NO: 944361 - DNA, 120 bp, Artificial Sequence
  ENSG00000282048_12 (sequence is synthesized)
ggaagatttgtaataatggttgggactggggatagagcgttacctgaggacggttttattaatgccacaaagcataaagtttaaaaaaaaagaaaaaagaaaatccaggggtgtcttact

SEQ ID NO: 944362 - DNA, 87 bp, Artificial Sequence
  ENSG00000282048_13 (sequence is synthesized)
ttaaaaaaaaagaaaaaagaaaatccaggggtgtcttactgtcagaagctttggaaccatgttgaataggtgctgggtaaaatgaga

SEQ ID NO: 944363 - DNA, 120 bp, Artificial Sequence
  ENSG00000282048_14 (sequence is synthesized)
ggttaataatgtttaccaaacagacccaggacttaacagacccaagaaatgtcttgatgtcctgctatcttaagcacaaaagcattctttgtttagtaataaattttgctttaaagatag

SEQ ID NO: 944364 - DNA, 120 bp, Artificial Sequence
  ENSG00000282048_15 (sequence is synthesized)
taatatagattcttgcaaaagtcagtagttacacaaggattaacaatcctttgtcatgagcccttgtaatagaccacatccttttcatgattttttgccttgttatctcatatataaaca

SEQ ID NO: 944365 - DNA, 120 bp, Artificial Sequence
  ENSG00000282048_16 (sequence is synthesized)
tgttatctcatatataaacatgcattgcacctaataaggtgggcgccttactcctcttgctttcagaaatgccctgctcagtccatggagcaaccattctttcattcctttactttctta

SEQ ID NO: 944366 - DNA, 120 bp, Artificial Sequence
  ENSG00000268480_0 (sequence is synthesized)
gttctctgccatggctggggactaggaagtgggaaagagctctaggggaacctgagggcttgggtggaagactggagagccaggaggagcaaggagcaggaagcaaggtgtaaagaagcc

SEQ ID NO: 944367 - DNA, 120 bp, Artificial Sequence
  ENSG00000268480_1 (sequence is synthesized)
aagaagccggcccaaacccatcaagaccaagatgatgacatgagtgacctctgattgtcctcactgctacactcccaccagccccctgacggtttacagatgccatggcaacatcaggaa

SEQ ID NO: 944368 - DNA, 120 bp, Artificial Sequence
  ENSG00000268480_2 (sequence is synthesized)
tccagttttggtgacgaatgcccaaattcataggcgatgataaataatgtgccagacgttgatgtgcaagttttggtgtgaggtgtggattcattcattcaacaaatatttacggaacga

SEQ ID NO: 944369 - DNA, 120 bp, Artificial Sequence
  ENSG00000268480_3 (sequence is synthesized)
acacctcctgcgtgccaggctccattccaagcactgggggttgcagcggcgaacaaaacagacccaaatgcctgccctggtgggccaggaaggcagaaataaagatgaagagttggtcaa

SEQ ID NO: 944370 - DNA, 120 bp, Artificial Sequence
  ENSG00000268480_4 (sequence is synthesized)
gaactccaattgaactgagccctgggcttgtctgctgaccttctcaacagttctccaagcagctatggatgtgggtttctcgggcctgccagatgtgtctcagagtcatagcaagacctt

SEQ ID NO: 944371 - DNA, 120 bp, Artificial Sequence
  ENSG00000268480_5 (sequence is synthesized)
tcatgccagaagaaaagaaggacacagtttactgggagaagcggaggaagaacaatgaagcagccaagagatccagggaaaagcgacgtctcaatgatgcagccattgagggcaggctgg

SEQ ID NO: 944372 - DNA, 120 bp, Artificial Sequence
  ENSG00000268480_6 (sequence is synthesized)
ctgcactgatggaggagaatgccctgctcaagggtgagctgaaggcgctcaagcttcgctttggcctcctgcccctgactggtgggccccgggccttgcccctgcaggctctgctattgg

SEQ ID NO: 944373 - DNA, 120 bp, Artificial Sequence
  ENSG00000268480_7 (sequence is synthesized)
aagccccctggactggggacccccggcctggggctgaagcactctcatccttgtctggctctcacagctgcctcttaaggccacgttccctggatgctgggattccaggatgtcggggct

SEQ ID NO: 944374 - DNA, 120 bp, Artificial Sequence
  ENSG00000268480_8 (sequence is synthesized)
gcctgctggctcccagatggactggcttggccacttctcctaggtccccccaagagtctgcatctcctaccctcaacagaattgacatggccttgcagactgccctcccacctgccctct

SEQ ID NO: 944375 - DNA, 120 bp, Artificial Sequence
  ENSG00000268480_9 (sequence is synthesized)
tcagctgtcacctcttggaggggcatgtagggtccagaccagagctcagaccctgctgggggctgtggtcaccagtgccctctggatgccgggcttcagggccatcagatgtgttgctga

SEQ ID NO: 944376 - DNA, 120 bp, Artificial Sequence
  ENSG00000268480_10 (sequence is synthesized)
cacccactgctgatcccatgggtctgtctcctggggtgacctgccctgccccagggaacagtcctgagggtctgggtcagccctctctgccccacaaactgcgcatcaagtcccgagcct

SEQ ID NO: 944377 - DNA, 120 bp, Artificial Sequence
  ENSG00000268480_11 (sequence is synthesized)
caggcagggtacctcgtggctgggagggtggtcaggcgcccctctgagggcttcctctgggaagggctaggcttgcaagggggtgtttgggggcggaatataggtttgtctgagggatga

SEQ ID NO: 944378 - DNA, 120 bp, Artificial Sequence
  ENSG00000268480_12 (sequence is synthesized)
ccacaaggctgatgaggctcacgtgggactcaccggggagacagcgtccagagcaggatttctcagagccttcaatgtactttgtgattctcctataaggaataagtcatccttctgtct

SEQ ID NO: 944379 - DNA, 120 bp, Artificial Sequence
  ENSG00000268480_13 (sequence is synthesized)
agagttctctgccatggctggggactaggaagtgggaaagagctctaggggaacctgagggcttgggtggaagactggagagccaggaggagcaaggagcaggaagcaagtaaagaagcc

SEQ ID NO: 944380 - DNA, 120 bp, Artificial Sequence
  ENSG00000204792_0 (sequence is synthesized)
tttaaccaaaagagcatgggcagatatttcccggatctgaacaggaatagctggtgtctggactctatgaagaatcttcatgtgcagtgatagaagaataaacacatttgaaccaagttc

SEQ ID NO: 944381 - DNA, 120 bp, Artificial Sequence
  ENSG00000204792_1 (sequence is synthesized)
cagacttttgtagtgcacagtgaccggtgaccagcagcatgtgtttccataggcatcttctctcagtaccccagaaggtgaattgccagtgagtcctgccaggatgcccctcggtgactg

SEQ ID NO: 944382 - DNA, 120 bp, Artificial Sequence
  ENSG00000204792_2 (sequence is synthesized)
caccacccagtaaaaagacatcccttaactatggcaaaacaacaacaacaacgacgacaaaaaacaaaacaaaacaaaacaaaaccctgcatcaatttgataaataatcctccccgttga

SEQ ID NO: 944383 - DNA, 120 bp, Artificial Sequence
  ENSG00000204792_3 (sequence is synthesized)
agaggagagaaagtggagtttgagtataaataactcttttggagaggattggtgtaattgaatggcaggggtatgagatttgaggtcaaggaaatatttttattattttttacgatgaga

SEQ ID NO: 944384 - DNA, 120 bp, Artificial Sequence
  ENSG00000204792_4 (sequence is synthesized)
gaaattgtagtacacatgtatatttatgggaatgactcagtagaaagaccaaaaatttcatatgtgagagaaggaccaattgatgaagcgatgttcttgcgtgggcgcgaggatgggatc

SEQ ID NO: 944385 - DNA, 120 bp, Artificial Sequence
  ENSG00000204792_5 (sequence is synthesized)
gagtttgatgtcatcaccctgcaaacgatgaaacaaatccccattttattgatgactgataacttcaaatgtgacaagaggattcatttccttattcaatcattccacaaatattcactg

SEQ ID NO: 944386 - DNA, 120 bp, Artificial Sequence
  ENSG00000204792_6 (sequence is synthesized)
agcatctcctacgtgccaggcaccaggctggactttaggatcaatcataataattttcaggttatggataatgccaatgggcacttaggatgatcagggagggcagttctgagaaggggc

SEQ ID NO: 944387 - DNA, 120 bp, Artificial Sequence
  ENSG00000204792_7 (sequence is synthesized)
atatgagctgtgttccagttgtctattgctgtgtgacaaactgccccaaaacttaatggcttaaaacaatgacagaaattacattactcatgaatctgcagtttaggcaggtggggacag

SEQ ID NO: 944388 - DNA, 120 bp, Artificial Sequence
  ENSG00000204792_8 (sequence is synthesized)
catgtctctgctccacctaacatcagctgaaggtgggaactggaatcatctggaggcttcctcacttacatgtctagtggttgatgctgactgatgttggctgttggcaaggacctctga

SEQ ID NO: 944389 - DNA, 120 bp, Artificial Sequence
  ENSG00000204792_9 (sequence is synthesized)
caggtctgttccccgaaacacctgcatgtggtacatggctttgtcacagcatgatggctgggttccaagggtgagcctcacaagacagagaaccaggtggaggctgtgccatctttggtc

SEQ ID NO: 944390 - DNA, 120 bp, Artificial Sequence
  ENSG00000204792_10 (sequence is synthesized)
acctagtctaagaagttacagtcacttctataccatttaattcattagtagcaagccactgaggctagtccatgttcaagaggaggggaattggattccccctttttttaggatagaaaa

SEQ ID NO: 944391 - DNA, 120 bp, Artificial Sequence
  ENSG00000204792_11 (sequence is synthesized)
gaatttgtggacatgttttcaaatgaccacaaactatgacctaaagaaattagtggaagagcattccaggaagaattgtaaagtctctgatgctggaaaggcttggtgtgtttaaggaaa

SEQ ID NO: 944392 - DNA, 120 bp, Artificial Sequence
  ENSG00000204792_12 (sequence is synthesized)
tgaaaggccagaaaggcttgagcacagcaagggcagaaggtaagatttgaggttagatgtggacagaagccatattaggcagttataggtgcttggattttattctggatgcagtgaggg

SEQ ID NO: 944393 - DNA, 120 bp, Artificial Sequence
  ENSG00000204792_13 (sequence is synthesized)
ctgttgaaagatttaaggtttgtattcacttcttgaaaggatcactccagctaatatgcagagaatggattgaggtgagataagggtagggaaaaccagttaggatgctattggagtggt

SEQ ID NO: 944394 - DNA, 120 bp, Artificial Sequence
  ENSG00000204792_14 (sequence is synthesized)
ttggggagagagagtgatggcttggacaagaatgttggcactggagatgaaaagaagtagatagaaatggtggaagtaaatgaacaagtctaccaggagactgaatgtgagagaaggaaa

SEQ ID NO: 944395 - DNA, 120 bp, Artificial Sequence
  ENSG00000204792_15 (sequence is synthesized)
ggaaggcaggaaacaagaattcttgggttttaggctcatgtccatcttgatggtggagccctttctgtgattggaagactaagagaggaacttgttgatacgggcaaaaggtaaaatcca

SEQ ID NO: 944396 - DNA, 120 bp, Artificial Sequence
  ENSG00000204792_16 (sequence is synthesized)
gagtccagttctaggcacgtcaaacttgagaggtttgtaaggtatactgaaggcaagaagtagacatttggatatatgagcctgaaactcagtggagagcttgggactggaaatataaat

SEQ ID NO: 944397 - DNA, 120 bp, Artificial Sequence
  ENSG00000204792_17 (sequence is synthesized)
ttgggaattatcagcatatggatggtatttaaagctgtaggcctcggtgaggtcaccaggggaaaatctagaacaaaagagtgtggagactgagccctgtaaagggtagcctgcaaagga

SEQ ID NO: 944398 - DNA, 120 bp, Artificial Sequence
  ENSG00000204792_18 (sequence is synthesized)
gattgaaaaggagtggccaaaaaagacagcagggaaactagggcattggatgttatagatacccgagaaagcgttggtctgaatgaccgttaagactcctccagatatgaatttctgtaa

SEQ ID NO: 944399 - DNA, 120 bp, Artificial Sequence
  ENSG00000204792_19 (sequence is synthesized)
ctttatggatgtttcaaatcccttcaagctgggaaattctgtctctgttgcatctttgggataacaaacttcctgaagaatcactgtgtcttttcaaagactgaaaatggattcccagca

SEQ ID NO: 944400 - DNA, 120 bp, Artificial Sequence
  ENSG00000204792_20 (sequence is synthesized)
gaggatcccctggagggaagctagggcaacacagtaagtggcaaaagaatacgagtgaggttatttgactatcctcttccagtagggctggctcagctatggcagaccccagggtggtta

SEQ ID NO: 944401 - DNA, 120 bp, Artificial Sequence
  ENSG00000204792_21 (sequence is synthesized)
ggacaaatggcagccccatacagggacatacatggacactgatccttgtttttttcctttttggggcctttctgaatctccactccatgtgcagggttgacctgtttccttgaggaactc

SEQ ID NO: 944402 - DNA, 120 bp, Artificial Sequence
  ENSG00000204792_22 (sequence is synthesized)
tgagatttgcatcaatggagttatctgagggctctgtggcttgggctctgtgcaggagggcagcctggcaattggattgttcctgctggctggtgccattgtgtgatattgagtcaccag

SEQ ID NO: 944403 - DNA, 120 bp, Artificial Sequence
  ENSG00000204792_23 (sequence is synthesized)
aatggtgccgatgcactgcttttgggtgataatcaggcgcaggatgaattcggggcactgggctactgatggtcaactgttagcacctgggcttgggctgtgtgtgggcacccatgcctc

SEQ ID NO: 944404 - DNA, 120 bp, Artificial Sequence
  ENSG00000204792_24 (sequence is synthesized)
agctctcacctgttcatgttcctccatggtaccatctctgatttgtggcgttcaaaggcgtaggatggcagcaagcctcctttaccctgtatatccatccccttgctgttggcacctaag

SEQ ID NO: 944405 - DNA, 120 bp, Artificial Sequence
  ENSG00000204792_25 (sequence is synthesized)
gttgtcaccccatgccctcatcagtctctgtaccacatatcaggaagtcctccagtggtggctatgcctgccttctctgaggactttaaagaccttggctttgccacgccaacaggctct

SEQ ID NO: 944406 - DNA, 120 bp, Artificial Sequence
  ENSG00000204792_26 (sequence is synthesized)
tccaaccagtgcctttcctccaaatgatatggcgatgttttgctttcccaggtcgatcttaagccattcccaacaaggagtggacatccttgtgtgaaaaacactgtttttcttgctcca

SEQ ID NO: 944407 - DNA, 120 bp, Artificial Sequence
  ENSG00000204792_27 (sequence is synthesized)
gtcacgtctccttgcctttcttgtcttttggtggtagtgtgcagaagcagaggtgcaggaaatgttgaaagggatcacattctaagaatgtagttataatggcctgaagaattcaagaga

SEQ ID NO: 944408 - DNA, 120 bp, Artificial Sequence
  ENSG00000204792_28 (sequence is synthesized)
atacatggttggaagatgtgtcactttatggttacactataaaactccaaatgaaaaataaattatcattcatactttcctgaatattctgggtaaggcttgcattttggtcattattaa

SEQ ID NO: 944409 - DNA, 120 bp, Artificial Sequence
  ENSG00000204792_29 (sequence is synthesized)
tgaagtacagaaacaacctctgagagagtggttggatgccagtatttgcaggtgccacgatgaatgatgcagcactatcagtcaagatgcaaccaacattagacaaatggtatcagagaa

SEQ ID NO: 944410 - DNA, 120 bp, Artificial Sequence
  ENSG00000204792_30 (sequence is synthesized)
ccacagaggcgaaaaaacaaaaccaaaacccaaaactatattgtttcaatacaaacaggttccaaaagctatgacatcgtgagtgacaacaatgttgccgcctctttctcacaataggaa

SEQ ID NO: 944411 - DNA, 120 bp, Artificial Sequence
  ENSG00000204792_31 (sequence is synthesized)
cacccagtaagtcatggctgtgtacttcccatcaaggtctggatctcagctcaggtagtgggggctgctcttccatagtcattccatccttgtgtgctctgcctcagccctggggatagt

SEQ ID NO: 944412 - DNA, 120 bp, Artificial Sequence
  ENSG00000204792_32 (sequence is synthesized)
ggccgctttctgtacatgtcagtcctctattctttagacttcttgttaccccattagcagccaattctcttttgttactgcttagcagccaactttttttatattaaactttccccaacc

SEQ ID NO: 944413 - DNA, 120 bp, Artificial Sequence
  ENSG00000277010_0 (sequence is synthesized)
cccactgcacttcctccatgaagccttccctgaccacacctccctgccttcttggggactttgctcttcagctctctcgtctgccagactctccccagaagcatcgtgggtgcagcagaa

SEQ ID NO: 944414 - DNA, 120 bp, Artificial Sequence
  ENSG00000277010_1 (sequence is synthesized)
atgacgtctcaggagcagtgagcgcgcctggggctcaggtcgtcctttctaagcaccatgctccacaaactaaccagggctcccggaggcggtggaaaggctgcagagggcccctaggcg

SEQ ID NO: 944415 - DNA, 120 bp, Artificial Sequence
  ENSG00000277010_2 (sequence is synthesized)
agcccccgagaaggcccggggtgctgggggtggctgcctagtgggccccggttttccttcaggggtggtggagatattcgaagctggataaaattcggggggcggggggcagacagcact

SEQ ID NO: 944416 - DNA, 120 bp, Artificial Sequence
  ENSG00000277010_3 (sequence is synthesized)
gtccaaggtgctcggggcctctgaattggacgcttgataatgtaactttatcttctgtaaacttcacctcagtaagttaagaagaaattaagaggaagtcagctggagacccactggcca

SEQ ID NO: 944417 - DNA, 120 bp, Artificial Sequence
  ENSG00000255839_0 (sequence is synthesized)
taagacatttcatttattaaaattttatagagaagcatacaagactacaacaaatcactgaagtcaaggtctaaagtctttgagaagtcagatggaccggacgcagtggctcacgtctgt

SEQ ID NO: 944418 - DNA, 120 bp, Artificial Sequence
  ENSG00000255839_1 (sequence is synthesized)
gtggttgtctaactataggctttgcatattctggtccaggggttgctgaggaacaaggccaatgtgaggaacaacagcaacagtaagcccttagcaacacactgagaatgcagctcccct

SEQ ID NO: 944419 - DNA, 70 bp, Artificial Sequence
  ENSG00000287135_0 (sequence is synthesized)
agtagagacggggtttcaccatgttagaatctcagctcactgcttcctccgcctcccaggttcaagcgat

SEQ ID NO: 944420 - DNA, 63 bp, Artificial Sequence
  ENSG00000287135_1 (sequence is synthesized)
ctcagcatctcagctcactgctctagaggcgggcaccaccatgcctggctaattttcatattt

SEQ ID NO: 944421 - DNA, 120 bp, Artificial Sequence
  ENSG00000287135_2 (sequence is synthesized)
ggctggtcttgaactcctgatctccagtgagccacccaccttggcctccaatgtgctgggatcaccagtgtgagccaccatgcccagctgaagataagtctcttaaagtcttacagcaat

SEQ ID NO: 944422 - DNA, 120 bp, Artificial Sequence
  ENSG00000287135_3 (sequence is synthesized)
acaggattaaaccaagaattgaacccgggcagcaggatctctgatcctgcgtttctaaccgcaacacagatcaccattcattgcagagatgttacattcaccttggaaaaaaggagaaag

SEQ ID NO: 944423 - DNA, 120 bp, Artificial Sequence
  ENSG00000287135_4 (sequence is synthesized)
gaagaaaaatgacactcagattattcacccaaataaaaatcatattcacgtttactctgatctgtttcctacagtgattttctttccagaactccagatctagacatagacccctgtaac

SEQ ID NO: 944424 - DNA, 120 bp, Artificial Sequence
  ENSG00000287135_5 (sequence is synthesized)
tgatgtagttgcctggtttatgaacggattcacaataggtggccaagcatttccacataagcaatggagagtgctcacttttcagagagcctccagaaaagggagaaagctttcttcaga

SEQ ID NO: 944425 - DNA, 120 bp, Artificial Sequence
  ENSG00000287135_6 (sequence is synthesized)
cccagtggccagggcgctttgcaatagtgcagaattcgacacacaaagatcgctattatggatggacaaggagcagccaagagaagaaaaggggcagatctgtgactcaagcggcagccc

SEQ ID NO: 944426 - DNA, 120 bp, Artificial Sequence
  ENSG00000287135_7 (sequence is synthesized)
ttgcaatgggaataatcctcatcctccacgtgtgctgtgtgtgatacaggcttcccaggaagggcactggccaagcccctgctccaccgaaggggactgtagctttgcttcactctccct

SEQ ID NO: 944427 - DNA, 120 bp, Artificial Sequence
  ENSG00000287135_8 (sequence is synthesized)
ccctgcttaatcactggctcaaatgacaatccaccccaggcaaacgatgctcacacagagaaaaggacagccaggccaagaacaaatttttctaaaagttttctttttttttttctacat

SEQ ID NO: 944428 - DNA, 120 bp, Artificial Sequence
  ENSG00000287135_9 (sequence is synthesized)
catctcaaccttcctttttaaataaatggacttgcaaatagacctaacttcaaagatctcattggtcggccttcactgtttaggtatccgggcagggaaccattcaagatattattctta

SEQ ID NO: 944429 - DNA, 120 bp, Artificial Sequence
  ENSG00000287135_10 (sequence is synthesized)
ttttttttaaatcttctttttctatcttttcaatagcatctggatgatctttccattcttgtctagtgataatgaaatcattaaaaaatgtaccagaaccctttttgcttatctctgtgc

SEQ ID NO: 944430 - DNA, 120 bp, Artificial Sequence
  ENSG00000287135_11 (sequence is synthesized)
ctgtttgaaatcagtcactgaaagagccggcatctgagttaacgtctgacgatgggaggtacgcctcaacgtcgtccacatggccttgatctagacagcgagccacaacctacccagcac

SEQ ID NO: 944431 - DNA, 120 bp, Artificial Sequence
  ENSG00000287135_12 (sequence is synthesized)
atttttgtggcttaagtgacctggagtgtggggcttttctttgttgaagattttctttaggtttcaagttgattttacaccattaatggtaattccagcttgggcattgcacaaatagtt

SEQ ID NO: 944432 - DNA, 120 bp, Artificial Sequence
  ENSG00000287135_13 (sequence is synthesized)
catagatgaccatggggaatccagctatgctgttgggactagtagctaaactctcttagagggcttgagttagatcaaagagcatctttccttttcttggaaaccacattgccagccttt

SEQ ID NO: 944433 - DNA, 120 bp, Artificial Sequence
  ENSG00000287135_14 (sequence is synthesized)
tccagccaaaggcctgcttgtgttaagtgagaagagagagactcatcccaaaagaggccgccctggaagagatgggaaagacttttccaggaggagtttgctgaaaagcataaaagggtc

SEQ ID NO: 944434 - DNA, 120 bp, Artificial Sequence
  ENSG00000287135_15 (sequence is synthesized)
agcctccagcttatcactcaaaaaagtttttaaagcctttttaaggaaacaattttaacccagctgcacttattgatcagtgatttgattttgctttgttaggagagactcgtaatctgc

SEQ ID NO: 944435 - DNA, 120 bp, Artificial Sequence
  ENSG00000287135_16 (sequence is synthesized)
ttttaaatgtcttttgttcctggccttctttgatagcaagttctgcctaaggctacttctcaaaactcatcactggagttttcaagtctatgtgaataactagaataattttaatctgga

SEQ ID NO: 944436 - DNA, 120 bp, Artificial Sequence
  ENSG00000287135_17 (sequence is synthesized)
cctttctttatcccctactacctacccactcctgtttgcagcagaaaatgttaggtggttgtaagaatttttttttaatcaaattctgccaaacctaaaacctataaaaaggaatcattt

SEQ ID NO: 944437 - DNA, 120 bp, Artificial Sequence
  ENSG00000287135_18 (sequence is synthesized)
gtcctttcaaagagagagagaaagcaagggagcaaactctatttacaaagtcagagggagtcaatctgattttattttctcaagtacattcagtgagtctcaaaaagaatgcaagttctc

SEQ ID NO: 944438 - DNA, 120 bp, Artificial Sequence
  ENSG00000287135_19 (sequence is synthesized)
aagtcttgcctctgcttggtatcagccacaattaaaaaataaatttcagaaatatatctgaatcactgtagaacataattttttggcaacagataggttttatagaagcttttttacttg

SEQ ID NO: 944439 - DNA, 120 bp, Artificial Sequence
  ENSG00000287135_20 (sequence is synthesized)
taactttcaaaggttgtaatcatgcctttcatgacattgtgaactataattttgtcttgctaagctaccataaaagagtggttgttttattattatagtatgcactaaaaaacagaacct

SEQ ID NO: 944440 - DNA, 120 bp, Artificial Sequence
  ENSG00000287135_21 (sequence is synthesized)
atgctcctcatttaactaatcacttctgatatttctcaagctaatgggaaccaaaaacacttatatctgttcgtagatgttcttaatgaaatgcacactttttttataatgtaagcatat

SEQ ID NO: 944441 - DNA, 120 bp, Artificial Sequence
  ENSG00000287135_22 (sequence is synthesized)
gcgtacacatgtatgaactttacaagtttatttagcaagaaaacaaatatgtgaggaaaacagacttttcaagtggtgctttaattgtcgttcatgcatgttctacagatcattactgaa

SEQ ID NO: 944442 - DNA, 120 bp, Artificial Sequence
  ENSG00000287135_23 (sequence is synthesized)
tgtttacaggtcctgcacggaatgactttacaccaaagaagagggtaacgtatcctcactgtttataaaaatgacagcccctaatggaccatattagctttaacacaaactattaaatct

SEQ ID NO: 944443 - DNA, 120 bp, Artificial Sequence
  ENSG00000287134_0 (sequence is synthesized)
atttcgaatctgaaaactggaaaagaaagttctttcatactgattttcagatctgtggctgatactgaccatgtgaatctgcatatttcacagttctggagcgggcaggcactcttatct

SEQ ID NO: 944444 - DNA, 120 bp, Artificial Sequence
  ENSG00000287134_1 (sequence is synthesized)
ggaatttaagtgtataatgaagcagttctactccaaccaggaccaaggttcgaacagtactgtccagcatgctctgagcttgagagtgtgggatctcaaggtagcaacagccgcatcgac

SEQ ID NO: 944445 - DNA, 120 bp, Artificial Sequence
  ENSG00000287134_2 (sequence is synthesized)
attttgagccttcctatataaataaatagctcctgccaatggtgaatgatcaagtggaagcgagttttctttcaggtcttacagttcctctgaaactggaaacaagttctccagggaaac

SEQ ID NO: 944446 - DNA, 120 bp, Artificial Sequence
  ENSG00000287134_3 (sequence is synthesized)
cttgatcatctgtgatcatctgtgcttattatccttcggggctaagagaacatctcatttatgtcacgagagtcatgacatacaaatgttgcacacctcataaccaaatatctttcagtc

SEQ ID NO: 944447 - DNA, 120 bp, Artificial Sequence
  ENSG00000287134_4 (sequence is synthesized)
ctcctgtgaagtcaattataatcatggcttcaaatgagatgaaaagatttctagtggtagggatgtttgaaatggagctacagtggggtgtgaatttgattctactacttcagagggatt

SEQ ID NO: 944448 - DNA, 120 bp, Artificial Sequence
  ENSG00000287134_5 (sequence is synthesized)
aaaatctatcttagaactttctacagtttattttttcttgacttgggtctttcttgatgtcttcttgaaagtatgtttatgcaagacaaagtacctgatcaatgatatgtatccagtagt

SEQ ID NO: 944449 - DNA, 120 bp, Artificial Sequence
  ENSG00000287134_6 (sequence is synthesized)
tgtctatttcatacgttttgtttaatcctgcatatagtttcctacctgggggtctgaggatgtctagtgggtaaaggtagtattaataacatgtcattgaatgatcttcaaaatttcgga

SEQ ID NO: 944450 - DNA, 120 bp, Artificial Sequence
  ENSG00000287134_7 (sequence is synthesized)
aatgttcaagaaatcttaaaatgttcaacttatttgctcttggctagaattatatcaacataatttgttaatagtagctctcctatgctgatcagattccctaattagtaactatttaag

SEQ ID NO: 944451 - DNA, 74 bp, Artificial Sequence
  ENSG00000287134_8 (sequence is synthesized)
aggccgatttatttttttttaaaagagtaaaaattattgcttaacaaatacatttttgtgactaacatttccag

SEQ ID NO: 944452 - DNA, 120 bp, Artificial Sequence
  ENSG00000287134_9 (sequence is synthesized)
tattgcttaacaaatacatttttgtgactaacatttccagaatatggactttatgggggtaaacaaaaaaagaaggatttggcataaaaaatgtgttgggaactataaaaatttgaatat

SEQ ID NO: 944453 - DNA, 120 bp, Artificial Sequence
  ENSG00000287134_10 (sequence is synthesized)
aataagtgctaaaactagtctgatgagacttcaggaacagccaaaatacaccctattggagaggtaatgacaaggacatattagtttaaacttctttttgcctgatcttggctttagact

SEQ ID NO: 944454 - DNA, 120 bp, Artificial Sequence
  ENSG00000287134_11 (sequence is synthesized)
tgggctactcagccaaaataatgaatagggaatttcagtgggaaattagtaacagaaaagggaaataagacgtaacaggaagtgtctagatttcttctatgggttttagaattctgttgg

SEQ ID NO: 944455 - DNA, 120 bp, Artificial Sequence
  ENSG00000287134_12 (sequence is synthesized)
agatgagtatttctaaccctggaaagttaccaaaaatgaaatgaagattgaatttcctatgaataggaagaagttgaagaaaacctggagattgtgcgcaatcctgtctgaactatgcat

SEQ ID NO: 944456 - DNA, 120 bp, Artificial Sequence
  ENSG00000287134_13 (sequence is synthesized)
ctggtgacacgtctggacagaagtgttttgatagactagttttccatcctctcttcttgtcagttttcttctacgaatgtcctccccctccctctgtggtgtactcggttgtaaacatag

SEQ ID NO: 944457 - DNA, 120 bp, Artificial Sequence
  ENSG00000287134_14 (sequence is synthesized)
gcttttactttttaaggcaaatattcctcaggattattgacagaagaggaaattctctttaaaatagctttgtgatatgattcttgtcttttacttgcaaaaaaaccttttgggaaacag

SEQ ID NO: 944458 - DNA, 120 bp, Artificial Sequence
  ENSG00000287134_15 (sequence is synthesized)
aacagaatggatggaaaataccatgataggaaaagagctctctagtttaaccttaattttagatctattctcttccttggaagtgtcatttatggtttttgctgactcatttccctgcca

SEQ ID NO: 944459 - DNA, 120 bp, Artificial Sequence
  ENSG00000287134_16 (sequence is synthesized)
ttgctattaccctggaggaggcaccatgacaagccatgcacagacttcatagcattagtaacttcttgggtctttgatgtgttttgtgtcaacagaatcattgtagtactcacggtgtgt

SEQ ID NO: 944460 - DNA, 120 bp, Artificial Sequence
  ENSG00000287134_17 (sequence is synthesized)
gttgttggggtcggaggtgactttgaagaaagtcttgaagtttggaaggacaaaaatgctcagggggaaaaaagactgttctgttaaggaaaatattactgtcaagccagaaatatttct

SEQ ID NO: 944461 - DNA, 120 bp, Artificial Sequence
  ENSG00000287134_18 (sequence is synthesized)
gaagtcttcattaggtctagtaatctccaaggattaggatgacgggacccgcggttggatgacctctgttggatgtgctaatacatagaggctgagtgggctggatgggtggaaaacaga

SEQ ID NO: 944462 - DNA, 120 bp, Artificial Sequence
  ENSG00000287134_19 (sequence is synthesized)
gagacggagtgcaaaaccaaactctgaaaagagcagctgtctttacaatgctcattcactttctgttacttgccggccaatgtaatgagaaccgctatcataggtgaaggttaagtacac

SEQ ID NO: 944463 - DNA, 120 bp, Artificial Sequence
  ENSG00000287134_20 (sequence is synthesized)
tatttcccttagactttaaagtccgctttagtattttgctgatgagtattaatgagcaaggattaaatttcagattttaaaaaatctttttatctaaaaataataataattacagatgga

SEQ ID NO: 944464 - DNA, 120 bp, Artificial Sequence
  ENSG00000287134_21 (sequence is synthesized)
gacagtttcagggtaatttcaactcttttacttcatacacacacacagtcataggttttagaagcagtaaaatattttattgagctaaagtcatggctatttcatttcattatgagtaag

SEQ ID NO: 944465 - DNA, 120 bp, Artificial Sequence
  ENSG00000287134_22 (sequence is synthesized)
atactttacaaataaaataaatcattggcaaataaaatgctgtattttaatgatctgaaaacataacatctttttaaataggcactaggtattttgcagatttcaccaattacttgtcac

SEQ ID NO: 944466 - DNA, 120 bp, Artificial Sequence
  ENSG00000287134_23 (sequence is synthesized)
actgtggctggaaattctgaaccattccattcatttattaactcagccagaaaactgtttttaaatatttatgggaatgcttgtggtcagattcctgcattgcctttacatataactaag

SEQ ID NO: 944467 - DNA, 120 bp, Artificial Sequence
  ENSG00000287134_24 (sequence is synthesized)
tggaaagaaagcttttcaatcagtttctggtacaagcacctgtcttacattttgcatcataactgtaactatgacactaattggcttgcttcttaacaccttcttgatcatactgcctga

SEQ ID NO: 944468 - DNA, 120 bp, Artificial Sequence
  ENSG00000287134_25 (sequence is synthesized)
gtcacactaggaaaaaaaaaatgccaaaaaactacattgcaagttttcattttagataggaaaacagagttcatttcagtctgcagaacagactaataaatatcatttgcacctgtaaga

SEQ ID NO: 944469 - DNA, 120 bp, Artificial Sequence
  ENSG00000287134_26 (sequence is synthesized)
atagctggacttactctaaggcagggcttctgaaaatggggtctggtacccccggcaattgtgcaagatgatccattggagaaaatatgactaacttctatttatatcattttttaattg

SEQ ID NO: 944470 - DNA, 120 bp, Artificial Sequence
  ENSG00000287134_27 (sequence is synthesized)
aagaataaatttaagctttgcaaatatttaacttaagtggattaatgctgattcctacttcattccacatggcatgtgtcacttatactcaaagtctgttaaggggagattgtggttccg

SEQ ID NO: 944471 - DNA, 120 bp, Artificial Sequence
  ENSG00000287134_28 (sequence is synthesized)
tggttccgcggcataaatgagttggccaagtctctctcaatcattcttttgctttcatcatttacataagggcggggggcccaaacttttggtttccctgggccacattggaagaagaag

SEQ ID NO: 944472 - DNA, 120 bp, Artificial Sequence
  ENSG00000287134_29 (sequence is synthesized)
tgggccagacataaaatagactaacactaatgatagctgatgagctaaaaaaaaaatagcaaaaaattcttctaatattttaagaaagcttgacaaatttatgttgggctgcattcaaag

SEQ ID NO: 944473 - DNA, 120 bp, Artificial Sequence
  ENSG00000287134_30 (sequence is synthesized)
ctgtcttgggatgcatgtagtccacaggccgtgggttggacaagcttgatttaaatgtttcaagtcatttatggatgaacataagtagacataagagagtttaaagacatattatctcat

SEQ ID NO: 944474 - DNA, 120 bp, Artificial Sequence
  ENSG00000287134_31 (sequence is synthesized)
ctgaaagaaatttgactaaaataatactaataagtcaagacaaagtgaagagcaagagaccattgacatttctctgagtcctattaggaactattgatgttttgacaatctaatcagatt

SEQ ID NO: 944475 - DNA, 120 bp, Artificial Sequence
  ENSG00000287134_32 (sequence is synthesized)
tgacaaaatttctgcctccaccttctcccccatggaaggatcaagaagactattaaaatatagatagccccttactctttttcaaagtgaaccttgacctagaggaaaaatgtgccttga

SEQ ID NO: 944476 - DNA, 120 bp, Artificial Sequence
  ENSG00000287134_33 (sequence is synthesized)
gatgttagctaaggatagagcaaagtcatcactgttagcaagacattttaaatatattctgtgatttctcctgtgatgtttagttatgtaacacccaattaatgtttaatgaaaaacttc

SEQ ID NO: 944477 - DNA, 120 bp, Artificial Sequence
  ENSG00000287134_34 (sequence is synthesized)
actgaatagccaatgatctaaagactcattgaggaaacatgttcatcttgccttagtaaaaatggctgaaagaatccttggaaaacaacgtggttagcaggctaaaatacattcctttga

SEQ ID NO: 944478 - DNA, 120 bp, Artificial Sequence
  ENSG00000287134_35 (sequence is synthesized)
atgtatttcccagtaaaaacacagtcgacattgcaaaagatctgaataaacaagttttataacaaattatgtcatgtaaaaggtttggaatatacagtaaatgtaagcacagatgtttct

SEQ ID NO: 944479 - DNA, 120 bp, Artificial Sequence
  ENSG00000287134_36 (sequence is synthesized)
aatacgtctcggcttatagtatttgctaaattttgtttcagtgatggaatatgaacgattaccttccccctttcattatgagccactaaagggaagaaagaccaatgaggtgatagtctc

SEQ ID NO: 944480 - DNA, 120 bp, Artificial Sequence
  ENSG00000287134_37 (sequence is synthesized)
aacagtaaatggctcgtttaacaaatataatatttcatctaaaaactataaatgtaaccacagaaagaattctaggctaagtttatggagataacattgcaaaattaataaacgagctat

SEQ ID NO: 944481 - DNA, 120 bp, Artificial Sequence
  ENSG00000287134_38 (sequence is synthesized)
tttagcaaaaagttaaagctaaaagtgcacaaaatgctatagactgacattgatattctaatgttttcattaaaaaaacccaaattagtaaaaagtgagttctttacaatatttgaaatg

SEQ ID NO: 944482 - DNA, 120 bp, Artificial Sequence
  ENSG00000287134_39 (sequence is synthesized)
aggtagggagtggccacaaacaccatttgttaccatacagaggtttgctggttatctcagagcaaagaactcgaacagcacatgacttactaattttttttttacaaaaatcaaataact

SEQ ID NO: 944483 - DNA, 120 bp, Artificial Sequence
  ENSG00000287134_40 (sequence is synthesized)
caaatttactgacatttcagtgatgataagcagctgtcactattatgctactgagaatacatttttttaaacattacataatttgtttctccaagataaagatgtcacttaaacaatgag

SEQ ID NO: 944484 - DNA, 120 bp, Artificial Sequence
  ENSG00000287134_41 (sequence is synthesized)
tgagcaagtaagtgctttataaaagaagttgtgttatgtataaatcattctaaaaatattttggaaatgtgtatattgttatatgaatttattactgaaaatgatgtgtatttactacct

SEQ ID NO: 944485 - DNA, 120 bp, Artificial Sequence
  ENSG00000287137_0 (sequence is synthesized)
ctcaacagattgaatcatgcccacctatattgattcttgatgtgcctagaatgatggaaccacctcaaggcacgcaatggttgaagcaacaaactgatcttgggcctgaattcggagaca

SEQ ID NO: 944486 - DNA, 120 bp, Artificial Sequence
  ENSG00000287137_1 (sequence is synthesized)
cacctcttgttattattgcatctatgtcaccatcaagtaattacatattcccaccacaagctctgaaaacatgcaaaaccacctgacaaaaaggagaaacaaaagaaaaagggggtctga

SEQ ID NO: 944487 - DNA, 120 bp, Artificial Sequence
  ENSG00000287137_2 (sequence is synthesized)
gagatcacatgtaattctgctcttacttatcaggatgaagaaagctgtgcaacaagtttggctgagttattttagaagagatacatattttctaaatgagatttggataacagcctacgt

SEQ ID NO: 944488 - DNA, 120 bp, Artificial Sequence
  ENSG00000287137_3 (sequence is synthesized)
ctaatcctctggtgactgaagatgcaaagaattgtcagagcagtttggctcatcaagctataaagtacaaaattattatgacactcagttggcacatgtgaaaccaaccgaactaaaccc

SEQ ID NO: 944489 - DNA, 120 bp, Artificial Sequence
  ENSG00000287137_4 (sequence is synthesized)
ttaatcctgtgtagtccctcaaacaggatctgtttctaagaggcaagcagcagttttgtggattatatatatgttacatgattggagtgagttaaaagtaaaataatatgaaggccagta

SEQ ID NO: 944490 - DNA, 120 bp, Artificial Sequence
  ENSG00000287136_0 (sequence is synthesized)
ggatgctggctggggctcatcgctgcacacgggcctccatgaacacgcgtcagaatcaggcagcctccggcctgctgcgcacgtcgttcctgcacaccgaggctgctgtgggtccagctt

SEQ ID NO: 944491 - DNA, 120 bp, Artificial Sequence
  ENSG00000287136_1 (sequence is synthesized)
ccccagagaccccagccctgggctccgccagcaccacccaccccgctccagcccagggatggagccgccgccttctctcctggcctctgagttgcctcccagcccccatctgacttctca

SEQ ID NO: 944492 - DNA, 120 bp, Artificial Sequence
  ENSG00000287136_2 (sequence is synthesized)
gctctcccgtcccctccgtaacccactccctgcctcagtctcctgtgtggtaaatacacgagttctccagtgaggccccaactgctgcatccttggattaatttaaggatccaaggacag

SEQ ID NO: 944493 - DNA, 120 bp, Artificial Sequence
  ENSG00000287136_3 (sequence is synthesized)
ctccttcacagggacctccggtgcgcaaacaggactccatggagagcagctcgggggcaaggacaggcttctctaaagcatggtgaggcaccactgtcactgaggatgcacggtcctctc

SEQ ID NO: 944494 - DNA, 120 bp, Artificial Sequence
  ENSG00000287136_4 (sequence is synthesized)
cttgccctggaagcagagaacgggaatgtgcagccacagctcctcctttctccagacgcccctcagcaaggaagagcggacccagaccggtgggtgctatttgctccagactccccagcg

SEQ ID NO: 944495 - DNA, 120 bp, Artificial Sequence
  ENSG00000287136_5 (sequence is synthesized)
cctatgcggctgaaccctaaggattcccacgcggctccagagggacgtttccaaacacacgcccaagtcctccagaaggtgacttgaagataaaagtcctaaatgaatgcagagcagttt

SEQ ID NO: 944496 - DNA, 120 bp, Artificial Sequence
  ENSG00000287136_6 (sequence is synthesized)
caacacatgagttcacatacatgctcccaactgtttctaaatgttaggggaaatcccaacctttgtctttgaaaaacaccagagtgtcttgtttgtgattttaaaacactcaaagacaaa

SEQ ID NO: 944497 - DNA, 120 bp, Artificial Sequence
  ENSG00000287130_0 (sequence is synthesized)
gccctcaaagcttttccttattatgccatgtcttgctactcttttcccacaacctcgctgcacgtgctgcatatcaggcagatgtgctcattctgccgcctgcttattttccttgaagtg

SEQ ID NO: 944498 - DNA, 120 bp, Artificial Sequence
  ENSG00000287130_1 (sequence is synthesized)
atttgcacagcagatgttccagtaagtgttctttccttcgtccctttacaattctgctaaaaaaaaaatgcactatacatgtgctattgaccttcggattttcaaagagaaaactcttca

SEQ ID NO: 944499 - DNA, 120 bp, Artificial Sequence
  ENSG00000287130_2 (sequence is synthesized)
cagcctcctctccacctcagtggaaattgcctgattttctccccttggcacagataaatcttataaacctgggatcaacaaaaagacaagaaagcaagaatttcacaaagcaagcatttt

SEQ ID NO: 944500 - DNA, 120 bp, Artificial Sequence
  ENSG00000287130_3 (sequence is synthesized)
ctccagagagaagcatgataaggcctggacattctgtgggatatgcattatgagtttgcaatccagggtagatctccacatcaatgtttctcttcctttttaaggatcatcatgaaaaca

SEQ ID NO: 944501 - DNA, 120 bp, Artificial Sequence
  ENSG00000287130_4 (sequence is synthesized)
gctgagtcaatgggggcaacacaggttactggaatgtcaggcagacatgcctagaaactgttctataaagattgtctgagaaagggagctttgcagcacccagagactctggaactcttg

SEQ ID NO: 944502 - DNA, 120 bp, Artificial Sequence
  ENSG00000287130_5 (sequence is synthesized)
gactctggaactcttgggaatttgtccaccctcctactgtgtccagaattggtgggttattggtctcacttcaagaatgaagccgcggagccccgcagtgagtgttacagttcttaaagg

SEQ ID NO: 944503 - DNA, 84 bp, Artificial Sequence
  ENSG00000287130_6 (sequence is synthesized)
tcccggtgggtttgtggtctcgctggcttcacttcataaaggcagtgtggacacaaacagtgagcagcagcaagatttattgca

SEQ ID NO: 944504 - DNA, 77 bp, Artificial Sequence
  ENSG00000287130_7 (sequence is synthesized)
ataaaccttccacattgtggaagggaaacccagcggcttgccagtgctggctcagcagcctgctttttccccttatc

SEQ ID NO: 944505 - DNA, 69 bp, Artificial Sequence
  ENSG00000287130_8 (sequence is synthesized)
tccagtgcttcttgcatgggggccgcgggtggagctgcctgcgagtcctccgctgtgtgcctgtactcc

SEQ ID NO: 944506 - DNA, 120 bp, Artificial Sequence
  ENSG00000287130_9 (sequence is synthesized)
tcagcccttgggtggtcaatgggactgggctcatcggggaggctttgggtgcacaggagcccacaggtaggggggcggctcaggcatggcgggctgccggtcctgagctctgcccgcagg

SEQ ID NO: 944507 - DNA, 80 bp, Artificial Sequence
  ENSG00000287130_10 (sequence is synthesized)
ggctttgggtgcacaggagcccacaggtaggggggcggctcaggcatggcgggctgccggtcctgagctctgcccgcagg

SEQ ID NO: 944508 - DNA, 120 bp, Artificial Sequence
  ENSG00000287130_11 (sequence is synthesized)
tccgctggctgctccgagtgcggggcccgccgagcccacgcccatccagaattcgcactggcccacaagccgcatgggcagccctggttcccacccgcgcctctcccttcgcacctcctg

SEQ ID NO: 944509 - DNA, 86 bp, Artificial Sequence
  ENSG00000287130_12 (sequence is synthesized)
agcccagaaaggggctcctacagtgctgcggtgggctgaagttcaggaggcgcccagagctagcgagggctgtgagggctgccagc

SEQ ID NO: 944510 - DNA, 120 bp, Artificial Sequence
  ENSG00000287130_13 (sequence is synthesized)
ctgccagcacgctgtcacctctcactaccaggggaaagaacaccattgaggagttggattcagatacagtgcccaaactgcccttttgcccaggcaacccagatgaatttatctgttgct

SEQ ID NO: 944511 - DNA, 120 bp, Artificial Sequence
  ENSG00000287130_14 (sequence is synthesized)
acccagatgaatttatctgttgctccatagccctttactctgctctacatttgttttcttcttttttaaaaaaataaatagaattatttaaccttttaacacactgtataatttgcatgc

SEQ ID NO: 944512 - DNA, 120 bp, Artificial Sequence
  ENSG00000287130_15 (sequence is synthesized)
ttattatgtctactgttttctgactgtctgcaccagaatgtaaagtacaagagggcagagcttttggttggtccactgttaatatccaagtgtctagattttgtctgcatcctagtagat

SEQ ID NO: 944513 - DNA, 80 bp, Artificial Sequence
  ENSG00000287133_0 (sequence is synthesized)
ggcggcccgagcccagctccccgcgacgcagcggcctccgggacctgtgggacgccggggcttcgtggcgcctggcgagg

SEQ ID NO: 944514 - DNA, 120 bp, Artificial Sequence
  ENSG00000287133_1 (sequence is synthesized)
cagccgccccctgagccaggtccccgcccgcctctgtcctgccaggcgctgctgggtttgggaggaatgcgtttactctccaggaccaacgagtctgtgcaggcctggttaagaaagaaa

SEQ ID NO: 944515 - DNA, 120 bp, Artificial Sequence
  ENSG00000287133_2 (sequence is synthesized)
tgggaaagatggaagaatggtgtggatatggagaagagaatgatgcagaagatgaacagatacagggacagggaaagcgcctggaaatctcaaatctggggaaagaaagagaaacagcac

SEQ ID NO: 944516 - DNA, 120 bp, Artificial Sequence
  ENSG00000287133_3 (sequence is synthesized)
tttgtaatggcatcctaatcttgttaccaaacaaacggggcttgttgccctatacgcacagaagccaatattatggcgctgattttttgagaaaagttttcattgtgagtcagctaacaa

SEQ ID NO: 944517 - DNA, 120 bp, Artificial Sequence
  ENSG00000287133_4 (sequence is synthesized)
ggagacaggagtatagctctaatctgtctccctgtgttggctttaagacagtatttttattagaaaacgtttagggggtggattctgggattagtaggtgattggtggaaggaaagaagc

SEQ ID NO: 944518 - DNA, 120 bp, Artificial Sequence
  ENSG00000287133_5 (sequence is synthesized)
catctggaaaatcctctggcgttcgcagttacctcttcatgtcccttcatgggtcgcatgtgcaaattttggagggagtcagtgtgaaacatggggaaagattcaagctgtgacgccagc

SEQ ID NO: 944519 - DNA, 120 bp, Artificial Sequence
  ENSG00000287133_6 (sequence is synthesized)
aagctcattttgtacagactccaggtagccatccgtgttagtactaaccactttcagccagtttgctttgttttgttttgttttgttttttaatctcacaatggaagaagtttaggcgtt

SEQ ID NO: 944520 - DNA, 120 bp, Artificial Sequence
  ENSG00000287133_7 (sequence is synthesized)
ttatttagcaagttgttttttatctgccgtcctgcatgctcaagaatttctgttagtccctggtttctttaactctgagacacggtttcactcttgtgattttctatatataggtctctg

SEQ ID NO: 944521 - DNA, 120 bp, Artificial Sequence
  ENSG00000287133_8 (sequence is synthesized)
ggattaatccattgcctttttctaatttaggcctgcatgtagatattggctgttaaggaaaattagtgtttgtcacacctctcatgagaataattttttccttgtaggccgatttgtaaa

SEQ ID NO: 944522 - DNA, 120 bp, Artificial Sequence
  ENSG00000287133_9 (sequence is synthesized)
taaacctttcttgctgagttagtcaagtaagcactttttgtaaaagatgttttcataaaacacgtttcatagagtacagtttctaaagttaactattgcttattttatttaggaaagctc

SEQ ID NO: 944523 - DNA, 120 bp, Artificial Sequence
  ENSG00000287133_10 (sequence is synthesized)
tttatttaaatcttaaaaagatcatgtgaaatctgcgaaaggttctcatactcagtgacttaacattattcatatttctaccacagctgcatatgaggtaaaggaaaaaaaattaagtta

SEQ ID NO: 944524 - DNA, 120 bp, Artificial Sequence
  ENSG00000287133_11 (sequence is synthesized)
aaataggtaaccacataaccatacaataaaaatttttttcaaataagattaattaataaattgctgcacttttaaagttgtacacattaaaatgggtcaaatactgttgttttagattgc

SEQ ID NO: 944525 - DNA, 120 bp, Artificial Sequence
  ENSG00000287133_12 (sequence is synthesized)
aactatggatcgctgtatcaagggtacagtgttaaaactccagcattaaacaagaagtctcattgagactcagtatctgaggaaatccatgttgctggtacccactgaggctcctcctga

SEQ ID NO: 944526 - DNA, 120 bp, Artificial Sequence
  ENSG00000287133_13 (sequence is synthesized)
gccttctgtatggcagacaacaactgggcacatgcatcgtgcaagctgtcattcacaatcacatgatcaaaaaattggccaaactgagtttccattctttgggctaaattttccatctct

SEQ ID NO: 944527 - DNA, 120 bp, Artificial Sequence
  ENSG00000287133_14 (sequence is synthesized)
tgtaggtcttcatcctttaggagaaatagaaaaatatggatagtacagacttaattggacaaatggaaaaaatacagtttgttatgctgtcacattcagttgtgaaactatgtataaaaa

SEQ ID NO: 944528 - DNA, 120 bp, Artificial Sequence
  ENSG00000287133_15 (sequence is synthesized)
cagtaaggtccgaaaattttgcacagatgattttcaataaagtttcaaaaatattttttcaaaattctacaaaaccagcaaactagaaaatagtaatttttttgccctctgttattgaaa

SEQ ID NO: 944529 - DNA, 120 bp, Artificial Sequence
  ENSG00000287133_16 (sequence is synthesized)
tattgaaataatgtggctaagtatagataaaataattttttttttttttagacagggtcccactctgtcccaggctggcatgcagtaggatcatctcagctcactgcagcctctgcctcc

SEQ ID NO: 944530 - DNA, 120 bp, Artificial Sequence
  ENSG00000287133_17 (sequence is synthesized)
caagtagctgggactataggcacatgccatcatgcccagctaatttttgtagagaaaatataattattataacaggtataaacatatccttctaaattaatgtgaagcataagcaaagct

SEQ ID NO: 944531 - DNA, 120 bp, Artificial Sequence
  ENSG00000287133_18 (sequence is synthesized)
ttaatgtgaagcataagcaaagctgggaaaagtatatcactatccacagtatgtcatcctttatttcttagaaatgtattactgagataaagaaattttaatttggaagtttttttaaat

SEQ ID NO: 944532 - DNA, 120 bp, Artificial Sequence
  ENSG00000287132_0 (sequence is synthesized)
catgagccactgcacccagcctgcttatgacacatttctaaaagaatcgctgggtcaaatgcacatggctcaaggcttttgatacatattgccaaactgcactctagaaaagtgctgcca

SEQ ID NO: 944533 - DNA, 120 bp, Artificial Sequence
  ENSG00000287132_1 (sequence is synthesized)
acatacactctcagcaatataagcagccctgtttctctgaatccttgccagtattatcaagaaataaccacttgttaaaatagtgcctgaagactaaattaatgtttaacatgttttgtc

SEQ ID NO: 944534 - DNA, 120 bp, Artificial Sequence
  ENSG00000287132_2 (sequence is synthesized)
actcataagttgggcttactattaaacttttaactgttatagtattaccattcaaagcttacacatatttaagatgaagaaactgaggtctagtaaattataattcagaccccttttagt

SEQ ID NO: 944535 - DNA, 120 bp, Artificial Sequence
  ENSG00000287132_3 (sequence is synthesized)
gtgaattttagccctggatatactgcagtgcagtctttttttttttaacttgtactagccttacagatttcccagaaaaaggtagacatcttctttattaagttggaggtcaggaatatc

SEQ ID NO: 944536 - DNA, 120 bp, Artificial Sequence
  ENSG00000287132_4 (sequence is synthesized)
ctattagtttagtactgtttttcctgtttcctagattggattttacaaattttgtgttaaggatatctgttgacatttactcatttattatttaaaaagtctagctaatcttggataaga

SEQ ID NO: 944537 - DNA, 120 bp, Artificial Sequence
  ENSG00000287132_5 (sequence is synthesized)
attttgttgattcattcactcactaatttaacagcatttatctaatgcctaccatgtgtgaaggataaagtagtggaaaaaaacaggtgtagtttatatttttgtagggtgaagggaggt

SEQ ID NO: 944538 - DNA, 120 bp, Artificial Sequence
  ENSG00000287132_6 (sequence is synthesized)
agaaaataaacagtgaataaacaagataatgataaattataaatgctattaagaaaatagaggggcacgtgattgacagagaataaatgggaacgtgagctattttagatacggtggcca

SEQ ID NO: 944539 - DNA, 120 bp, Artificial Sequence
  ENSG00000287132_7 (sequence is synthesized)
ggtggccagggaaggcctgtcagagatatttgggttaacctgaaggaagagaatgagtcagccatatccaagacagaagaccacatcccaggcagaaaaaaaataaataaataaaaaata

SEQ ID NO: 944540 - DNA, 120 bp, Artificial Sequence
  ENSG00000287132_8 (sequence is synthesized)
gtgcaaaggccctgagacagagtatcaggtaagattaaattcagttgagaacaagagactccaaaatagtggctttaataatatagacatttacgactgcagggctagcatggtgctctg

SEQ ID NO: 944541 - DNA, 120 bp, Artificial Sequence
  ENSG00000287132_9 (sequence is synthesized)
cctggtttccaccagtttagttttgccatccctagaatgagagaacttgcatgaggcacaaattggcagctacagttctaagccatcacatctatattccacggtacaggataaaggaaa

SEQ ID NO: 944542 - DNA, 120 bp, Artificial Sequence
  ENSG00000287132_10 (sequence is synthesized)
agccgcattgaaggtgtgcaccaactatcttttaaggatggttttacaagtgtgccacatgatatactgcttacatcccatcagccagcactattacatggctacaaggaaggctgcaaa

SEQ ID NO: 944543 - DNA, 120 bp, Artificial Sequence
  ENSG00000287132_11 (sequence is synthesized)
atatagtctttgttctgggtagccatgtatccatgtctattactatgaaaaaaatggaggaatttttggggacaactaacagactctgctacagactagaaaaagcacagcccacgacag

SEQ ID NO: 944544 - DNA, 120 bp, Artificial Sequence
  ENSG00000287132_12 (sequence is synthesized)
aaaggaggcagtaagaagggtgagaacaacttcctgtgctgcttcctgggaagatggagaagtgggcaggagccagattatgcagtcttgaaggctatgtaaaatactcaaggtaataaa

SEQ ID NO: 944545 - DNA, 120 bp, Artificial Sequence
  ENSG00000287132_13 (sequence is synthesized)
actctcatatcagacttacaccctctggaagtcattccatagaggtatattcaatcttttaacacaccatcttatggttgaagatgttaacatgagaaggaggagaaagcaggaagagga

SEQ ID NO: 944546 - DNA, 120 bp, Artificial Sequence
  ENSG00000287132_14 (sequence is synthesized)
agggactatttgcagaagacggggagaaagaaaggaaagacactagtatgtgttgttcctcctcgaattttcctgaagtgaaaaaaaaacagtgaagtagagtgtttgatgaaatgaata

SEQ ID NO: 944547 - DNA, 120 bp, Artificial Sequence
  ENSG00000287132_15 (sequence is synthesized)
accaagcaaaacattttctacctacaccagtaccactaggagttgaaataaattcacacaatgtctgctgatatgtcaaaacaccttaccttcaaaaacatgacagttaccttttatttt

SEQ ID NO: 944548 - DNA, 120 bp, Artificial Sequence
  ENSG00000287132_16 (sequence is synthesized)
atagtatgcttgtgtttcttcctatttcttgcttttgaccttcaatgataaatgtaaactggattacagtgattcttttgtaagtaaaaggtgactttttaaaagaaacaaccaatggaa

SEQ ID NO: 944549 - DNA, 120 bp, Artificial Sequence
  ENSG00000287132_17 (sequence is synthesized)
atagaaattttatttacttcaaattaactgtactttactcaaatagaaaagaataattttcacattatgaagctacacaattccaaaatacacatgctgaggctctttttaagtccgaat

SEQ ID NO: 944550 - DNA, 120 bp, Artificial Sequence
  ENSG00000287139_0 (sequence is synthesized)
actctgcctatttgctgtcacatcttggctggcagcaggagagtcaaacctgacagggaccgtgaaaagcctggagttttcagcctgctaggcaagcggcggtgccatagagattctgat

SEQ ID NO: 944551 - DNA, 120 bp, Artificial Sequence
  ENSG00000287139_1 (sequence is synthesized)
cgggtcccagctcttctattctcgaagcacccctgtcccctatacctctcatcctgcagagaaatactgctgtacgctgtgcctctttccagcaagaaaggtttcttcatctactctagg

SEQ ID NO: 944552 - DNA, 120 bp, Artificial Sequence
  ENSG00000287139_2 (sequence is synthesized)
ctgcattttagcatttaccccaaggcctgttacaaatggacagaaaattaaatttttctttttcctcttaggaagagaaaacctaactatatttccaacttataacagtgtattttccac

SEQ ID NO: 944553 - DNA, 120 bp, Artificial Sequence
  ENSG00000287139_3 (sequence is synthesized)
gttttcattgtatcatggtcatgtgtagccctttgctgatagacagggaacatggatggagctggagcatggataataactgaggaaaggaaaaccaaagaccacatgttctcacttgca

SEQ ID NO: 944554 - DNA, 80 bp, Artificial Sequence
  ENSG00000287139_4 (sequence is synthesized)
tgaggaaaggaaaaccaaagaccacatgttctcacttgcaagtgggagctaaatgataagaacgtacgaacacaaagaaa

SEQ ID NO: 944555 - DNA, 120 bp, Artificial Sequence
  ENSG00000287139_5 (sequence is synthesized)
gggtgataaaataatctgtacaacaaatccccgtgacatgagtttactgatgtaacaaaccttcacatgtacttctgaacctaaaataaaagttacaaaagaattattttctattattaa

SEQ ID NO: 944556 - DNA, 120 bp, Artificial Sequence
  ENSG00000287139_6 (sequence is synthesized)
ttctattattaaacatgtcctttggaaacattttcatatataactttgaatactttgttgtgccctgaggaaagtatgcagtagctgatttttgacttttattgaaaatgttttttgttc

SEQ ID NO: 944557 - DNA, 120 bp, Artificial Sequence
  ENSG00000287139_7 (sequence is synthesized)
caatttttccattgaaatgtaatgataatacctgcatcgtctaccaatccaaacaatatatagtcaaaagcgaaattgatagtctctcactttctctttctaatcccattttctaatgta

SEQ ID NO: 944558 - DNA, 120 bp, Artificial Sequence
  ENSG00000287139_8 (sequence is synthesized)
actactgtaaactatgatttcctttgctgatagaaacaaatgccacacacacatgcgcacatatatacatatatacccattgaagattaaaaaacaaacaaacatgaggacctaacatgg

SEQ ID NO: 944559 - DNA, 120 bp, Artificial Sequence
  ENSG00000287139_9 (sequence is synthesized)
agctgctattcttccctaatggtctgttgcggacctattttgaagtcgatgcataatgatccacatttttaaatagctgcttattgtttcatagaattaatatatcatggtttaggaaac

SEQ ID NO: 944560 - DNA, 120 bp, Artificial Sequence
  ENSG00000287139_10 (sequence is synthesized)
catttccctatatatggatatctaagtctattccagctgcagtaacaaaatgtcataaactgggtatcttataaataacagaaatttatttctcacagttatgggtctgggagttccaag

SEQ ID NO: 944561 - DNA, 120 bp, Artificial Sequence
  ENSG00000287139_11 (sequence is synthesized)
attaaggtatcaccagatttgatgtctggtgagggcttgttcctcatagacagtgtcttcttgctgtatcctcacatggcagaaagggcagacaaactcctttgggcctcttttgtaagg

SEQ ID NO: 944562 - DNA, 120 bp, Artificial Sequence
  ENSG00000287139_12 (sequence is synthesized)
gcacaaatccctttcattctctaaaggcctcatctcttgctactattgcactgaggattaggattcaacatataaattttgagggaacacaaatatgcagactatagcagtggatagtcc

SEQ ID NO: 944563 - DNA, 120 bp, Artificial Sequence
  ENSG00000287139_13 (sequence is synthesized)
agttatttacagatatttttattataaatcttttagatatctttttgggtaagactgttgacagtatcagacattgctgatttttcttttttctttccccctgatggaatcctaaaaatg

SEQ ID NO: 944564 - DNA, 120 bp, Artificial Sequence
  ENSG00000287139_14 (sequence is synthesized)
aagatactcagtgagggagtgtgcgtactataaattttatattgctagctttattttccaaaatattataaaaatgtacattcatcaataataaatgagactgcctttttctgtaggttt

SEQ ID NO: 944565 - DNA, 120 bp, Artificial Sequence
  ENSG00000287138_0 (sequence is synthesized)
ctgagtcaccacagcagccgccttgtgatggatgtagcccgcaggcggatccagccgcctcgaaacagggcctcaagggattggataaggcctacccacattgctgagggtggatcttgt

SEQ ID NO: 944566 - DNA, 120 bp, Artificial Sequence
  ENSG00000287138_1 (sequence is synthesized)
aattatgtttaaccagctatctgggcatcccttggtccagccaagttgacacatgaaattaccgatcacaaacactttgttgcttcattgcttatcaaataaagcaactcttctattgtc

SEQ ID NO: 944567 - DNA, 120 bp, Artificial Sequence
  ENSG00000254129_0 (sequence is synthesized)
ggatgaagctgggacttaccatgcacaccagtttgttctcctgggtctccttctcaaaggagacctctgccacctcatcgcctcctgcgatcctctccccaacatcaccactgagtcgca

SEQ ID NO: 944568 - DNA, 120 bp, Artificial Sequence
  ENSG00000254129_1 (sequence is synthesized)
ggaacagcgtattgtaacttcacatcatagaaaagtgactcgaggaagacattggccaccccaatgagactgtgattttcctgctcatcatagaatggatcagcacgtttgaagtatgat

SEQ ID NO: 944569 - DNA, 120 bp, Artificial Sequence
  ENSG00000254129_2 (sequence is synthesized)
cgtattacctgtaaagagattgagaacacacaacttcagaaaaaccatttacaataaatgcattcaacctactgctttttgatgcactctaggttattaaacttaactttcatcatccta

SEQ ID NO: 944570 - DNA, 120 bp, Artificial Sequence
  ENSG00000254129_3 (sequence is synthesized)
gacatattcagaacatggcagcttctagaattggttcaatcttctgctcgagtggcagtggccaaaggcctggagccgaccaaggagaggttatctaggtaagaatcatcagtggctgat

SEQ ID NO: 944571 - DNA, 120 bp, Artificial Sequence
  ENSG00000254123_0 (sequence is synthesized)
attcagaaggaaccaataaagagagagggggtaagaaggggatacaagttcttactctggtcatgaattttattcggaactgtcagctcgggtttggttggttgaaaagcatcattcaga

SEQ ID NO: 944572 - DNA, 120 bp, Artificial Sequence
  ENSG00000254123_1 (sequence is synthesized)
gagaaaaccattttaaatcacaatttcagaagattttaaaaattcaactctacctaaagacatcataaaatggctcattattccatcatccaggctcccctgtttctcaggcctccagac

SEQ ID NO: 944573 - DNA, 120 bp, Artificial Sequence
  ENSG00000254123_2 (sequence is synthesized)
tgaagctgaattataccaccagctctcctcagtctccagtttgcagacaacagatcatgggacttctcagcctccataatcacaggagtcaattcctcataataaatctgtctgccccct

SEQ ID NO: 944574 - DNA, 120 bp, Artificial Sequence
  ENSG00000254123_3 (sequence is synthesized)
tgttaaatataaatatatgtcttctatgtttttgtcctaaccctaaatactaaatatttactgggaagtctcttaatctgtgaaagactgcattcatttacattaaataaaatatgggaa

SEQ ID NO: 944575 - DNA, 120 bp, Artificial Sequence
  ENSG00000254123_4 (sequence is synthesized)
gaactctgaaattttagctttaaaaaccaatattgtctttgaaagctaatgatcaagtgatgattttgttttctagccatttaataataaccttggcgttctttttcgggttcatatgcc

SEQ ID NO: 944576 - DNA, 120 bp, Artificial Sequence
  ENSG00000254123_5 (sequence is synthesized)
ttgcacaatctttgaccaaaaccaaaattctcacctactttctatgtaataaatcattaggaattatgaaaaagagagaaaagaattaacgttatccaagtttataactattggatgggc

SEQ ID NO: 944577 - DNA, 120 bp, Artificial Sequence
  ENSG00000254123_6 (sequence is synthesized)
attctgctagaatgcttcttatgctttatgcttcttatcatattaatgctccagtattatatacgatagaaaataaaagttaatctagtaatatataatgttaaattcaactaaatttgg

SEQ ID NO: 944578 - DNA, 120 bp, Artificial Sequence
  ENSG00000254120_0 (sequence is synthesized)
atggaggtagaggaagattcaacatttgatggcagagtgtctttgacaaagttacaggatcaaaattgaaaggagagcttttggattacatgctagccaagctaatgctgacttctgttc

SEQ ID NO: 944579 - DNA, 120 bp, Artificial Sequence
  ENSG00000254120_1 (sequence is synthesized)
attacacaggtgcagatgggaaatcagaaaatatattcaaaagcattttaattttaaacatatgcacttgattgtttactatagatattctctgagtttgaaaaagcataaaggctcaac

SEQ ID NO: 944580 - DNA, 120 bp, Artificial Sequence
  ENSG00000254120_2 (sequence is synthesized)
caagataccgcaaaaataccaagcaaaaagcaagaaagcccttgccagatactggcctctcaatcttggactcctcagccccccataactgtgagccaataaatttatgttcattatcaa

SEQ ID NO: 944581 - DNA, 120 bp, Artificial Sequence
  ENSG00000204241_0 (sequence is synthesized)
cgactcttctccactctcccaaccagagggcccgggaggggagcgggaggaggggcggtgcaggggcgggtctcctccgagcagggcggccctcagcaccccttcccggacgtgcgcccg

SEQ ID NO: 944582 - DNA, 120 bp, Artificial Sequence
  ENSG00000204241_1 (sequence is synthesized)
gcacgcccacactctcgcacggaaaagccccacttctcctcagcgtctgggtgctgggccgtgctgggccctcccccgtggaactgggatttatgaagccgtaaccggccagcgccgcgg

SEQ ID NO: 944583 - DNA, 120 bp, Artificial Sequence
  ENSG00000204241_2 (sequence is synthesized)
tcccgggaaaggccagcacctgaggctgcactttctccccgtttcccctcaggaaaagacgcaccagcagcctagaattcgaggcactgcagagccggaaggggcctcggcgctgctccc

SEQ ID NO: 944584 - DNA, 120 bp, Artificial Sequence
  ENSG00000204241_3 (sequence is synthesized)
tccgccccctcatttcacaaaccggaaactgagacccaaagcaaggaagggacttggccaagttgaagagatgaaggcgcagaggcatgaactcccgtagccagagagtgtgagctggac

SEQ ID NO: 944585 - DNA, 120 bp, Artificial Sequence
  ENSG00000204241_4 (sequence is synthesized)
tctacctggagcagcctcggtgcagagcccatgcccccaaccatgtccgtggtcgaggcccagcccagacagggcacaaaggggctgaggaagaggaagtaagatgccagggttgccatg

SEQ ID NO: 944586 - DNA, 120 bp, Artificial Sequence
  ENSG00000204241_5 (sequence is synthesized)
ctcggcagccggccttagcctggaggagcaaccctggtccagagaggcagacgaatggcagccctgccccgtgggggctccggttcttctcctccatcctcctccaggctccgcccacct

SEQ ID NO: 944587 - DNA, 120 bp, Artificial Sequence
  ENSG00000204241_6 (sequence is synthesized)
gctccgtctgcctcccagggcctcgtgaatcccagggaagccatgagctgccacatcacgcccggaaggaagcgggctgcgttggaggggaaaagacgcaccagcagcctagaattcgag

SEQ ID NO: 944588 - DNA, 120 bp, Artificial Sequence
  ENSG00000204241_7 (sequence is synthesized)
cacgaagatgataacttgctaggagttttgcaaatgggtttgtctacagtttggtagaattaaaacattgtttttagttcagatttgcaacagtggccggctccctctaatccacagtgg

SEQ ID NO: 944589 - DNA, 120 bp, Artificial Sequence
  ENSG00000204241_8 (sequence is synthesized)
tggagcactgtgattgacattcagctgcaaagctcttgctgggaaacgcggtggccgagccgtcagcacaggcggcagctgcctcccacacttaagacaggacttctaaagccacagtcc

SEQ ID NO: 944590 - DNA, 120 bp, Artificial Sequence
  ENSG00000204241_9 (sequence is synthesized)
ctcaaacggcaggcaggtttgtgaatgtttccgtgttctgaacatttttctgcaaaagggttcacagctttaattgatttacaaagagacgtacaccatggaagagattgagaatcattt

SEQ ID NO: 944591 - DNA, 120 bp, Artificial Sequence
  ENSG00000204241_10 (sequence is synthesized)
gagcatatattttgcaacatgaaagggcttctatgctctagaatgtaagttcctcaaggataggggtctagtctatctcttcacctaaggtatccttagatcctggatcagtgcctgcgc

SEQ ID NO: 944592 - DNA, 120 bp, Artificial Sequence
  ENSG00000204241_11 (sequence is synthesized)
gtaatcacaggtgcgaacacacatgtgattaatttgttagtctgcacagcacttccctttccatgcccactcctgcctggtctccagcagtcgtcagaattgccatcgttaaggaaaccc

SEQ ID NO: 944593 - DNA, 90 bp, Artificial Sequence
  ENSG00000204241_12 (sequence is synthesized)
tctccagcagtcgtcagaattgccatcgttaaggaaaccctgatgcaagaattgcaagaatgactattaagacggagtctcgctctgtcg

SEQ ID NO: 944594 - DNA, 120 bp, Artificial Sequence
  ENSG00000204241_13 (sequence is synthesized)
tgttgacattcaggacctttttcatttcgtgttaaagactgatcaccctgggaaaatcaaggcagtccagccaaaccccaactcccaatcaaatgcagtttgtatcgaaccccacgactg

SEQ ID NO: 944595 - DNA, 120 bp, Artificial Sequence
  ENSG00000204241_14 (sequence is synthesized)
cccagcacctttgggaagcccattgctttctatgcagacgcagagctcccagaaagcacaggtggatgtgctcagcttgccttgtgacgtgaatgcctgaaaacagaacaggactaaaaa

SEQ ID NO: 944596 - DNA, 120 bp, Artificial Sequence
  ENSG00000204241_15 (sequence is synthesized)
gctcctccctcggattggcttcgaattttagcttccggccccagcagttctcggacctggggtagtttcctccccgcaagtaacaaaggaggacaagccccagcttctctaagatgcctt

SEQ ID NO: 944597 - DNA, 120 bp, Artificial Sequence
  ENSG00000204241_16 (sequence is synthesized)
agaataagctaggtgggttttcaaggagctgctgaatatgcatgagaggcagcaagagagagagcaggagaatgaacatgggggagacgcagagaagcacacagaggcatgactgataag

SEQ ID NO: 944598 - DNA, 120 bp, Artificial Sequence
  ENSG00000204241_17 (sequence is synthesized)
ggcagaggaggaaagaaggtctcggagaccagggcatgaatgtggttgcacagagacggggagaaggatggggagaaatgaggaacaggaagaagattccgagagaaataaagaggccga

SEQ ID NO: 944599 - DNA, 120 bp, Artificial Sequence
  ENSG00000204241_18 (sequence is synthesized)
gaggagctgagccaggcagccggtggagcaggcagatggaacaacagagacaaagaacagagccacagagtgggcacacagcaaggcctggcagccaagccctgtgggtttggtgggagc

SEQ ID NO: 944600 - DNA, 120 bp, Artificial Sequence
  ENSG00000204241_19 (sequence is synthesized)
ttaggtgaatcctctctagcagccacattcacccttgcaagcctgcactttgtcatcttctgaaaaggtgcaggaacatgatgcccagctgactcccagggagcgggagccccagaggcc

SEQ ID NO: 944601 - DNA, 120 bp, Artificial Sequence
  ENSG00000204241_20 (sequence is synthesized)
taggagcagggctgggggcacctgagggactgtggagcctgaattattgaaacgcttagagtaaagcagatttagatttcacaaagacagaggtgaaggtgggtgaagacggagggaagg

SEQ ID NO: 944602 - DNA, 120 bp, Artificial Sequence
  ENSG00000204241_21 (sequence is synthesized)
atttaaagggaaagagaaagaggaaagataagaatgagggagaaagaggaagagagaaagaaaaagagaaatagagttatcgaagatgactgcaagtctggcctctctcaacccaaggag

SEQ ID NO: 944603 - DNA, 120 bp, Artificial Sequence
  ENSG00000204241_22 (sequence is synthesized)
ccaaggaggggaaggccggcctgagcagcaacgtagacaagagctcaggagggcagggacagagccctggcttcagcaagagcgtggggaacagagggcaagggggtccatgcagcccag

SEQ ID NO: 944604 - DNA, 120 bp, Artificial Sequence
  ENSG00000204241_23 (sequence is synthesized)
gatggcagggtgctcatacacacagccttggtcctgtcccctctcccattgccgcttttgagctcaccttgtttaaggccaaagcacacaccatcctcccacagagccactaatgcaatt

SEQ ID NO: 944605 - DNA, 120 bp, Artificial Sequence
  ENSG00000204241_24 (sequence is synthesized)
aacaaaacacattcataaatcttgcatggcgtccggagctgtctcctctccctaagcacaaaggccagctccagagatgctgtgcagagagctgtctgacctctccagcgtcagggcccc

SEQ ID NO: 944606 - DNA, 120 bp, Artificial Sequence
  ENSG00000204241_25 (sequence is synthesized)
ctgaaaagtgcagcataacccttagtaggacagaaagaccattgtcttctgccaaccattacaaagtggagtggggctggggttaggaaacacagacaaatcagaagaggctgagaaggc

SEQ ID NO: 944607 - DNA, 120 bp, Artificial Sequence
  ENSG00000204241_26 (sequence is synthesized)
ggagatgaaagtgcataggtgtttgcagggagctggggaatagttcgtgccttccaagctcaacaagagagcattcagcagagaccagagaatcaccacttttggagggtgattttacct

SEQ ID NO: 944608 - DNA, 120 bp, Artificial Sequence
  ENSG00000204241_27 (sequence is synthesized)
tgtgagaacagagcacagggtgtgtgggacccagggcatcttcggcaatgcgggcgtgacttggcgggatgtcggtgtttgtgtttgcatgtgtgtgtgcgtgcgtgcatgctcagtctg

SEQ ID NO: 944609 - DNA, 120 bp, Artificial Sequence
  ENSG00000204241_28 (sequence is synthesized)
gaaaactggtgactcactaaaacaccgagctttctgatctgaagagcttatattcggctatttttagctcgtcttgtctcttggccctttttttccccttgtctgttttcaaatgtagag

SEQ ID NO: 944610 - DNA, 120 bp, Artificial Sequence
  ENSG00000204241_29 (sequence is synthesized)
agggacaagaagagaagagttcccagtgtggcaaggaccaggcggaccagccttaggccgggctctggttcctcccctctctgtggattccctttgatcctcccctcctgccccactttg

SEQ ID NO: 944611 - DNA, 120 bp, Artificial Sequence
  ENSG00000204241_30 (sequence is synthesized)
cagcctccacagcttagctgctaaatcactggggattaagacgctaggggccggaggggagggcaactcgtcctgggacagaaagggctcctttcctgggaggggtgagaggaagctggg

SEQ ID NO: 944612 - DNA, 120 bp, Artificial Sequence
  ENSG00000204241_31 (sequence is synthesized)
gttctcagggcccctggctgggccagccttcctgccctcccccaccagcctcacccccgttagctgaacctcccgtggacaggcaagctcagagaggcagttgtgcagctgctgcttctg

SEQ ID NO: 944613 - DNA, 120 bp, Artificial Sequence
  ENSG00000204241_32 (sequence is synthesized)
tctggggctaaaaatagtctcctctccgcccatgtccagctcaggctgggccagagctccgaagaggactcacaggcagttggggggacagaaggtggggccagagacaagtgcccccat

SEQ ID NO: 944614 - DNA, 120 bp, Artificial Sequence
  ENSG00000204241_33 (sequence is synthesized)
gggcaaagagtaggtgagacggggcagggaaggtagggctggggcctgcctctcagctctgatcccccagaaactcccttaggaaggaaatagagtttctcatccctgtgtttctgaggg

SEQ ID NO: 944615 - DNA, 120 bp, Artificial Sequence
  ENSG00000204241_34 (sequence is synthesized)
gaaaaggagacagagaaaggttgggcaggctgacttgggtcacgtaccaatacctaacgtttatgaagtgcttgtcagacactgttttaagctctgtagatgtcaaaggaccccatgacg

SEQ ID NO: 944616 - DNA, 120 bp, Artificial Sequence
  ENSG00000204241_35 (sequence is synthesized)
acttcggacacactgcatgggcctagacccagggctcgttgagctcctccctcggattggcttcgaattttagctccctctgaatgatgatcagtgaggccctgcaagacagcctcccga

SEQ ID NO: 944617 - DNA, 120 bp, Artificial Sequence
  ENSG00000204241_36 (sequence is synthesized)
agaggaggtaccggggaagtcctggcagacttatctatcggcagagagactgagtctccatgccaccccaattccccctgcccttttgactgagctctgaacacaagttagaggagctgg

SEQ ID NO: 944618 - DNA, 120 bp, Artificial Sequence
  ENSG00000204241_37 (sequence is synthesized)
gggaaagctccaagcagtcaatacatcaaccagtgagcacgtgacatgtcctgtctcgtgctcagcgctggggaggacatccccacaaatatcacagctcaaattcactggttgggaagg

SEQ ID NO: 944619 - DNA, 120 bp, Artificial Sequence
  ENSG00000204241_38 (sequence is synthesized)
caagactcacaggcagagaagagtcaaaaaactattaaagaggcccctggcatagtctgaggagccctggatagaggtaagaccagagttctatccccaggcctcaggcctgaagcaggt

SEQ ID NO: 944620 - DNA, 120 bp, Artificial Sequence
  ENSG00000204241_39 (sequence is synthesized)
ccctgtacttccaaaagctccagctacaccaagttatagacaacttctcatggcctggattgtggatggcagtggcgcatctgattgatgggtactgatgcctggagcactgtgctgagg

SEQ ID NO: 944621 - DNA, 120 bp, Artificial Sequence
  ENSG00000204241_40 (sequence is synthesized)
aggaatccgaggcagcagcaagtttagtaggactgtgatggccaaccggcgaggcgagcgaagctgaccagtaaggaaacccagcaatgcagttgagacaccatggccggatctgtggat

SEQ ID NO: 944622 - DNA, 120 bp, Artificial Sequence
  ENSG00000204241_41 (sequence is synthesized)
tctagggaccaggaagaggcaggaacagctgtagactgaggaaggagggccttgcttgagccatcagtcacacaaacagatccaagcaaagaacagggcaaggtggacacagatcaaaga

SEQ ID NO: 944623 - DNA, 120 bp, Artificial Sequence
  ENSG00000204241_42 (sequence is synthesized)
tgggcactaaatgccactgggttagggcttgctttagacccccccaagtcctacataatctactggaaacaacaaaaagtgtcccaaccctctgggaataggcaagaaggtgtgggaggt

SEQ ID NO: 944624 - DNA, 120 bp, Artificial Sequence
  ENSG00000204241_43 (sequence is synthesized)
catgaaattccagggacgtggggctcagcctgtgaggatgggaatagagcctgccatggtcttaacaccagcccagaggcagaaggcaactgtctaaataaagatctcatttcagacaaa

SEQ ID NO: 944625 - DNA, 120 bp, Artificial Sequence
  ENSG00000204241_44 (sequence is synthesized)
aaggaagcgggctgcgttggagggcttccggccccagcagttctcggacctggggtagtttcctccccgcaagtaacaaaggaggacaagccccagcttctctaagatgccttcagctgc

SEQ ID NO: 944626 - DNA, 120 bp, Artificial Sequence
  ENSG00000204241_45 (sequence is synthesized)
ctggaagaggcctgtggaaggccctgcaactctccgcagacctctgggcattgctgctgcttctcagtgcccctcgtcccctcagccagggtcagagctctccagggaacaatgaaaccc

SEQ ID NO: 944627 - DNA, 120 bp, Artificial Sequence
  ENSG00000204241_46 (sequence is synthesized)
taaggaagagcagaccacttcacagccacgtgtgtcctaccccactctgctgcatccctagttagacttccattccaggaactgtctcagctgttggtaatgacatgccgactccatctg

SEQ ID NO: 944628 - DNA, 120 bp, Artificial Sequence
  ENSG00000204241_47 (sequence is synthesized)
tccactctcctaggaacctctgccccttatagaatattcatgcagcccttttttgtaatctcggtctgagtttcaaaagattccctagcaggaagaccatttaacagatagaccatttta

SEQ ID NO: 944629 - DNA, 120 bp, Artificial Sequence
  ENSG00000204241_48 (sequence is synthesized)
caacgcaaacactgaaaattccgcaggagaaaagaggcactggtttttgaaaaccgtgctctgtccacagtcagacaccatctcacatttccaagtaacccaaacagttccttcagttag

SEQ ID NO: 944630 - DNA, 120 bp, Artificial Sequence
  ENSG00000204241_49 (sequence is synthesized)
gtaaatatgcctggccatgtgaccaggagctaaagggaataatagggaaaacagagggcagaaaaaaatgtcagtgggcataagacgaattttcttctttttaatttctcgattttgtgc

SEQ ID NO: 944631 - DNA, 120 bp, Artificial Sequence
  ENSG00000204241_50 (sequence is synthesized)
ttgataaagggaaagaggccaccattataaaacaacttttacacacttttacttgtgatttagtgcatggtgacctggaacataaagaagatttatgaaaggaaagacagaatcatagta

SEQ ID NO: 944632 - DNA, 120 bp, Artificial Sequence
  ENSG00000254127_0 (sequence is synthesized)
gccagcccaaggccaccccctcggtcactctgttcccgtcctcctctgaggagctccaagccaaaaggccacactgctgtgtctcatgagtggcttctacccgggagctgtgacggtggc

SEQ ID NO: 944633 - DNA, 120 bp, Artificial Sequence
  ENSG00000254127_1 (sequence is synthesized)
gccagaagcgacctgagcctgacaccccatcaatggaggtcccgcagcagctacagctgccgggtcacacacaaagagagcgctgtggagaagacagtggcccctgaagaatgttcttag

SEQ ID NO: 944634 - DNA, 120 bp, Artificial Sequence
  ENSG00000278709_0 (sequence is synthesized)
agacccggcacccgcgcaacggaggaggggcgctgtgccctctccccaacggcggtcagcttggaacgcctgcccggcgcacgcccggggccggggagccgaactcggtgccagccgcac

SEQ ID NO: 944635 - DNA, 120 bp, Artificial Sequence
  ENSG00000278709_1 (sequence is synthesized)
ccgggcgggttgctggtgcgccctcccctcgcccccgtccctggggtccttgacccaggctcttggggctagcctatcttctgaggagcacaaggtccctgggggctcagggaagagaaa

SEQ ID NO: 944636 - DNA, 120 bp, Artificial Sequence
  ENSG00000278709_2 (sequence is synthesized)
agactgtccgccttcagttctccagcagctcggggatcatggcccactgaacccccaagcgctttcacccgaacccaaggaggacgaccaggaaagacgggaactcgcgtagacacgccc

SEQ ID NO: 944637 - DNA, 120 bp, Artificial Sequence
  ENSG00000278709_3 (sequence is synthesized)
ggaagcccttgtcattttggatagagaaggaaaagctggaatttgggaagtgaaggtggcctcggggtagaacttacctagaccagagcgaattcatcctgaagaactcagagaaagccg

SEQ ID NO: 944638 - DNA, 120 bp, Artificial Sequence
  ENSG00000278709_4 (sequence is synthesized)
gtgtattgtcgccgccccagccggcgggacctggggcgaatccacacccattgtctgctgcccaaggggcctccggctggggggcgcggctgcggagttcaaaaggggtatgagcaggag

SEQ ID NO: 944639 - DNA, 120 bp, Artificial Sequence
  ENSG00000278709_5 (sequence is synthesized)
gggtgtacttttagttcattaagttttaattacaggagtgctacaagaacacattcttcaggtttaaaaagatattaaaatattacataagagacctcccctccctggcccacctccagc

SEQ ID NO: 944640 - DNA, 120 bp, Artificial Sequence
  ENSG00000278709_6 (sequence is synthesized)
ctcttaaaaatttagtgtgtcgccttttagacactttctcaaagcttcacttatttaacaggcacttaaggagcacctacctgtgccagaaactctccaaatattaactcaacctgacac

SEQ ID NO: 944641 - DNA, 120 bp, Artificial Sequence
  ENSG00000278709_7 (sequence is synthesized)
cgactcagtgtggccgaatattactctccccattttacagagcgggcagctggtcaaggaagtcgcttgttgaaagtcacacagtggtggagcctgtgtgccaacccaggaccctgggga

SEQ ID NO: 944642 - DNA, 120 bp, Artificial Sequence
  ENSG00000278709_8 (sequence is synthesized)
gctgcctccccctctcccacgtagtcctgattctttaagtgtccacatattcctgtaatgcctggagtttcagtaattagcagggacttagtgtgttcagagaaaaaaaaagcttttaaa

SEQ ID NO: 944643 - DNA, 120 bp, Artificial Sequence
  ENSG00000278709_9 (sequence is synthesized)
aattattgttactgtgtttgtaacagtttggatagagaaggaaaagctggaatttgggaagtgaaggtggcctcggggtagaacttacctagaccagagcgaattcatcctgaagaactc

SEQ ID NO: 944644 - DNA, 120 bp, Artificial Sequence
  ENSG00000278709_10 (sequence is synthesized)
agcccagggatgtggctcaggctggtccaagctctttggaggagtccaagcgtgcccagcccagagggaggttcagaggcactgaccgtcttctgtttgggaggagaagctcactcttgg

SEQ ID NO: 944645 - DNA, 120 bp, Artificial Sequence
  ENSG00000278709_11 (sequence is synthesized)
agccacagccagcactaggtcaggacccaggccccggcccaggagtggggcaatacccagcgtctaccccagatggcaccctgctgtgaactgggcgccctcagcccctgccttgaggaa

SEQ ID NO: 944646 - DNA, 120 bp, Artificial Sequence
  ENSG00000278709_12 (sequence is synthesized)
ggggcaataccaccagcgtgtcttttatcagggaagatattgctgcagtttggccgctgcaacttaagagaaaagctaaggggtcccccagcatcccttggggtgccactgcaaatactg

SEQ ID NO: 944647 - DNA, 120 bp, Artificial Sequence
  ENSG00000278709_13 (sequence is synthesized)
gctgggcctggagatgacctgggtcccattcacttcctagggtgaaggaggtcatcattaccacccctgctttcagccatttcttcattcattcaatcaacaaactggctgagctgcaac

SEQ ID NO: 944648 - DNA, 120 bp, Artificial Sequence
  ENSG00000278709_14 (sequence is synthesized)
cctgagccggggaattcagccactccagacacagcccctgccctccgggaagtctcgggagacctggctagtctggctgggagaagtcacacgttgattgtcttggaagtgagatggcat

SEQ ID NO: 944649 - DNA, 120 bp, Artificial Sequence
  ENSG00000278709_15 (sequence is synthesized)
ttacacaatggaggctgcactgccagcaggcaaaaataaccagttaattcagtggcttaaagaaaccaaacctacccacaacgcttgacctcccattgatccatctgcgacaccggcagt

SEQ ID NO: 944650 - DNA, 120 bp, Artificial Sequence
  ENSG00000278709_16 (sequence is synthesized)
ggctaccatttattgagtgctgatggtgtcacctgggattgacttagtggtctctggcgctagttccgaagttgattctgtctggagagcttaatgcagtgttcagacctcagggtccga

SEQ ID NO: 944651 - DNA, 120 bp, Artificial Sequence
  ENSG00000278709_17 (sequence is synthesized)
acctgagggtcacccaaagatgagtgggacatagctgtgtgacctcggctgagtgctttcacctctccaacctcagtttcctcttctgcaaaatggggtggcttcatggcaccttcacgt

SEQ ID NO: 944652 - DNA, 120 bp, Artificial Sequence
  ENSG00000278709_18 (sequence is synthesized)
ggtgtgattgcgaggaatgaagggatcgatgccttgcaagtagaggagaaggggccggatacatcttagttgttatgttatttaatcatcttggcaaccccgggagggaggaaccactat

SEQ ID NO: 944653 - DNA, 120 bp, Artificial Sequence
  ENSG00000278709_19 (sequence is synthesized)
cattttattttccattttgcagttgaggacaatgatgattccagcacagacagggcccctgacggggcagtaggaaaggagaattgctttggaaggagcataggctggactgccagcact

SEQ ID NO: 944654 - DNA, 120 bp, Artificial Sequence
  ENSG00000278709_20 (sequence is synthesized)
cataggaggcttcgtgtgtgcccaggactgcgagaattaaatacaggacacccagttcagtttgaatttcagataaactatgaataatgattagtgtaagtatatctcaatttaactgga

SEQ ID NO: 944655 - DNA, 120 bp, Artificial Sequence
  ENSG00000278704_0 (sequence is synthesized)
agcctctataggtgctccccaatctctgccctccccacccatggtggtactggggatgcagacagaggaggggcactgcataatgctgagagggctggcacactctctaggtggaacaca

SEQ ID NO: 944656 - DNA, 72 bp, Artificial Sequence
  ENSG00000278704_1 (sequence is synthesized)
agttgtaggtctgaccctccagggtgccccgactcactttccctgcagatggaggcaaggaggctccacaga

SEQ ID NO: 944657 - DNA, 120 bp, Artificial Sequence
  ENSG00000278704_2 (sequence is synthesized)
ctcactttccctgcagatggaggcaaggaggctccacagacaacctccctgcctgaggtcagatagtggccagcaggccaggtactgacaaactgcccctgaccaggttcccagtgatga

SEQ ID NO: 944658 - DNA, 77 bp, Artificial Sequence
  ENSG00000278704_3 (sequence is synthesized)
ggtactgacaaactgcccctgaccaggttcccagtgatgagtgatgagacccctaatgaccactcctccattgacca

SEQ ID NO: 944659 - DNA, 81 bp, Artificial Sequence
  ENSG00000278704_4 (sequence is synthesized)
aaccgaccccccactgaacaattctccatgaacgagtacccagctgactgagccccctctgaccaggccctcactgaccag

SEQ ID NO: 944660 - DNA, 120 bp, Artificial Sequence
  ENSG00000278704_5 (sequence is synthesized)
acccagctgactgagccccctctgaccaggccctcactgaccaggccccaagccactaaggccccacactgaccaggcccgtgatatattgtgtatgccccaccaaccagtttttcattg

SEQ ID NO: 944661 - DNA, 120 bp, Artificial Sequence
  ENSG00000278704_6 (sequence is synthesized)
tgttccaacagatcaggccccagtaataaagccaccactgactaggtccccccactgaccaggcttccaatgactaggtcaccaggtccccactgaggaggctgccactaaccaggcccc

SEQ ID NO: 944662 - DNA, 120 bp, Artificial Sequence
  ENSG00000278704_7 (sequence is synthesized)
caggcccctgctgatcaggtcccaaatgaccaggtcctgatgaccaggtcatctctgaccatggtccactgaccaggccccagagcaacggggttcaaagtctcattacaatgtccccct

SEQ ID NO: 944663 - DNA, 120 bp, Artificial Sequence
  ENSG00000278704_8 (sequence is synthesized)
agaccctccctccctgcatgtgtgcccggaggtcaggccctgggttttttttttgggacgtggcctttcctccaagacacagggagagacagttggcctcaggctccaagttcccagctc

SEQ ID NO: 944664 - DNA, 120 bp, Artificial Sequence
  ENSG00000278704_9 (sequence is synthesized)
ctaccctattcctgagtgtcagagtgtgaggaagggagggacatttggcagataaggcacgctgtgctgttgggtctctcagggcccttcccacagagccccgatctaaagacacaacac

SEQ ID NO: 944665 - DNA, 120 bp, Artificial Sequence
  ENSG00000278704_10 (sequence is synthesized)
agaggctacaggaagactaatccagaacctctgagacagccagggaccacatgagtactctccccagacagccagaagtccctttgctagtttcttggtacttcagtggatgtggcagtg

SEQ ID NO: 944666 - DNA, 120 bp, Artificial Sequence
  ENSG00000278704_11 (sequence is synthesized)
gttcttctgttggggaccagtgagtacacactggggagggctcacctgtgtttcctcagtggctccacctctgcttctaaaaaaaatgactcattccagagctggtgcagagaaaataca

SEQ ID NO: 944667 - DNA, 84 bp, Artificial Sequence
  ENSG00000278704_12 (sequence is synthesized)
aaaaaatgactcattccagagctggtgcagagaaaatacaagctgagcttagaacatcttctgaaagaaagtaaaaaagtgccg

SEQ ID NO: 944668 - DNA, 70 bp, Artificial Sequence
  ENSG00000278704_13 (sequence is synthesized)
ggttgaactacaaaaagaaaattgtaacattagcatggacaaacctggcaggtactccttaactctccta

SEQ ID NO: 944669 - DNA, 120 bp, Artificial Sequence
  ENSG00000278704_14 (sequence is synthesized)
tagcatggacaaacctggcaggtactccttaactctcctaagtaataaaaactgtaaaatgcaaataagccttcgatgacatttactaacctttactaaagtatcaatgatgacttggtt

SEQ ID NO: 944670 - DNA, 120 bp, Artificial Sequence
  ENSG00000278704_15 (sequence is synthesized)
actaacctttactaaagtatcaatgatgacttggttgtttaaacagctgaaatttgggcaatttgagtatgtcaaactcaataatactggttttcatttgcaagatccacttaaaactta

SEQ ID NO: 944671 - DNA, 120 bp, Artificial Sequence
  ENSG00000232006_0 (sequence is synthesized)
acccgattttccagaatgtctctctggcttcctctccctctcagagacccaatttggaactgaaaccctgagtacagcaaaactgcatttcccaagctcctcttctctcaatgggtcaca

SEQ ID NO: 944672 - DNA, 120 bp, Artificial Sequence
  ENSG00000232006_1 (sequence is synthesized)
tgacttgttctagccaatagaacgagggtggaagtaatgtgaccactttcaggtgtcccctaaagtctcctgtgagatcttccaatcttgctctcctcactctgcatggctggaaatgaa

SEQ ID NO: 944673 - DNA, 120 bp, Artificial Sequence
  ENSG00000232006_2 (sequence is synthesized)
cacagatttcagagaaataggatcagtgctctgaagttaaaagttaagtttttgcttatataggaagaagacaaagaaatttaacaggattatatttcctatatactggtttaagagtta

SEQ ID NO: 944674 - DNA, 120 bp, Artificial Sequence
  ENSG00000232006_3 (sequence is synthesized)
taacaaattaattagttagagtttgttttcttttctgtatggcttgttttattcatagctgattttcatttcctttccaatttaaaagagtatgtttaacattccatcttaagacaatgt

SEQ ID NO: 944675 - DNA, 120 bp, Artificial Sequence
  ENSG00000232006_4 (sequence is synthesized)
ggtagtcatgaagtctttgtgtgagaaaggtgagagggaggttaatctacaatgaagatcaacagaggagaaggaaggggtcttccttggtgcccttctgtcattcatgtcattttatta

SEQ ID NO: 944676 - DNA, 120 bp, Artificial Sequence
  ENSG00000232006_5 (sequence is synthesized)
acacaaaacaatacaggcactcccttgcattgctagcttatctaattatgcttgcttagaagttccagagattgaatcttgagacaatccaggtgcctatggaattatcccccaccagga

SEQ ID NO: 944677 - DNA, 120 bp, Artificial Sequence
  ENSG00000232006_6 (sequence is synthesized)
gattacttcaagcctgcagctaatttacaacccagtcaagcccgagatggcaccagctcattcacaagttggagcaataactcaagagggccatacaactttcattgggcatttaaataa

SEQ ID NO: 944678 - DNA, 120 bp, Artificial Sequence
  ENSG00000232006_7 (sequence is synthesized)
taccaaggctttgactggaatggcatggtttcagttataaacagactgctttaaggaatcaaagttgacttacagagctgataaaaggcccctaagaaaaactggcctcacctcttgtct

SEQ ID NO: 944679 - DNA, 120 bp, Artificial Sequence
  ENSG00000232006_8 (sequence is synthesized)
gcctcacctcttgtctatatagtccctatataggtttcctgacctgtgttttttgacttggactcaataaaattgctgctacctttttactgaggccttacaagctaaagcttattcctt

SEQ ID NO: 944680 - DNA, 120 bp, Artificial Sequence
  ENSG00000232006_9 (sequence is synthesized)
gagacacagaagttccagggattgaatcttgagacaatctgggtgcctatggaattatctcccaccagaagattacttcaaggcagcagctaatttacaacctggtcaagcctgagatgg

SEQ ID NO: 944681 - DNA, 120 bp, Artificial Sequence
  ENSG00000232006_10 (sequence is synthesized)
tgtcaacccattctcaagatgggacaataactcaagataagtcatcaaaacaagccacgtagaccagcaccacctctcacgcccccacccaccaccccccacccaccacatatcctccat

SEQ ID NO: 944682 - DNA, 120 bp, Artificial Sequence
  ENSG00000232006_11 (sequence is synthesized)
accaaacttccccttcttaaaccctagcattttgcccaagaattttgaagcagtttcattaaggcaggagcctgaaccacttccccactgttagctttggaaaatgaagtcaatttcctt

SEQ ID NO: 944683 - DNA, 60 bp, Artificial Sequence
  ENSG00000232006_12 (sequence is synthesized)
gtaggaccctccgagccaggtgcaggatttaatctcgtggtgcgccgtttttttaagccg

SEQ ID NO: 944684 - DNA, 120 bp, Artificial Sequence
  ENSG00000232006_13 (sequence is synthesized)
ctgaagagttaggtattgtagtcttcacagtctgagtttgtttgtacctgtccttcttggaaaggctctccaggtatttgaaggtacttgggtgttgtgatctacgtttttggtcactgc

SEQ ID NO: 944685 - DNA, 120 bp, Artificial Sequence
  ENSG00000232006_14 (sequence is synthesized)
agtcatatctgcattaaggggcaccccaagcccagtaatgctgtgggtcttttagactcataggagtactgccttagtggtcttggataagatccagaggaattctctggatgcccaggc

SEQ ID NO: 944686 - DNA, 120 bp, Artificial Sequence
  ENSG00000232006_15 (sequence is synthesized)
gcctggagctaggggaatggtgacacaagcacccctgtggccaccactgctggaactgcattggtttggacctgaaaccagcatagcactgggtctcacacaaggcccactgtaaccact

SEQ ID NO: 944687 - DNA, 120 bp, Artificial Sequence
  ENSG00000232006_16 (sequence is synthesized)
acctcactcctgcctatgtttgctcaaggccctagggctctacagtcagcttcagatcagatttatttggagaagacaaaaaacccacaacccaaaggatgggattttacatctcaagac

SEQ ID NO: 944688 - DNA, 86 bp, Artificial Sequence
  ENSG00000232006_17 (sequence is synthesized)
aaacccacaacccaaaggatgggattttacatctcaagacatctcctaggacaccattgaaggcactggtttcagttataaacaga

SEQ ID NO: 944689 - DNA, 75 bp, Artificial Sequence
  ENSG00000232006_18 (sequence is synthesized)
cgggtacaataacagaaattaaaaggcacaacacagataatggagctatttttttctttcgttgtccaagtggaa

SEQ ID NO: 944690 - DNA, 120 bp, Artificial Sequence
  ENSG00000232006_19 (sequence is synthesized)
cagatttatttggagaagacaaaaaacccacaacccaaaggatgggattttacatctcaagacatctcctagtacagcaaaactgcatttcccaagctcctcttctctcaatgggtcaca

SEQ ID NO: 944691 - DNA, 120 bp, Artificial Sequence
  ENSG00000232006_20 (sequence is synthesized)
ggctcctccggatcagatttatttggagaagacaaaaaacccacaacccaaaggatgggattttacatctcaagacatctcctaggccccacctcccaatactgccacattggagctaag

SEQ ID NO: 944692 - DNA, 84 bp, Artificial Sequence
  ENSG00000232006_21 (sequence is synthesized)
catcaaactacagtcagtcatgcaacaggagcctctgatgacgaccctttctgctgggaacccttaaataggcctctgagggag

SEQ ID NO: 944693 - DNA, 120 bp, Artificial Sequence
  ENSG00000232006_22 (sequence is synthesized)
gcgctgaaattcggcagggaagaagttatggtgcccagcctctgtgtgcaagacagagacaccgcgcatcatggctctgaaaatcagccaagtggccgggacgtcaaagcggcagagcaa

SEQ ID NO: 944694 - DNA, 120 bp, Artificial Sequence
  ENSG00000232006_23 (sequence is synthesized)
tcagaatgccctggagccggggatggaggggccacattgtttgagccctcggattttgctgcattgtcaccgcccgggaacgtgggggtagcaggaagcgcacctccagccaaaaatgga

SEQ ID NO: 944695 - DNA, 120 bp, Artificial Sequence
  ENSG00000232006_24 (sequence is synthesized)
ccggacgcattccccccccctccccgccccggcagctccctccctgcctgtctgcaagtcgcaatacgatcagatttatttggagaagacaaaaaacccacaacccaaaggatgggattt

SEQ ID NO: 944696 - DNA, 120 bp, Artificial Sequence
  ENSG00000232006_25 (sequence is synthesized)
gattgtaacagaatataaaccttttattctgatatgccagaggcacattatggattgtattacaatgactagcattagctgtcctgattaatagacactgtgacaagattctttattgct

SEQ ID NO: 944697 - DNA, 120 bp, Artificial Sequence
  ENSG00000232006_26 (sequence is synthesized)
agaaaaaaaaaaagcaatggctgataccatttaaaataaaacttacaattaaggcaattcagtttgaaatgtgtttatgaagttatttcatagcactaattacagttctaacaatatgta

SEQ ID NO: 944698 - DNA, 120 bp, Artificial Sequence
  ENSG00000232006_27 (sequence is synthesized)
tttctgtaggtgtattttcaattctctactaagtagtaagctctgtgagactggaagttgtacatgttttgttcttcactgcagaggtcatactcctcagagtacaggacccatggtggg

SEQ ID NO: 944699 - DNA, 120 bp, Artificial Sequence
  ENSG00000232006_28 (sequence is synthesized)
aaatattagcttcatgaatgagtgaatgaatgactacacacaaggtttgataattagcatccagaataacaaagatatatacaatgaattaatgattcatagtgaggcttagtcaagtat

SEQ ID NO: 944700 - DNA, 120 bp, Artificial Sequence
  ENSG00000232006_29 (sequence is synthesized)
acaaaaagaacaagatgaaatgcaacataattgtgatattgtgaagtgtatacttggtcttcacccctgtttactgtcatacacacaattcctaagatgcttggaatctccaaagtgttg

SEQ ID NO: 944701 - DNA, 120 bp, Artificial Sequence
  ENSG00000232006_30 (sequence is synthesized)
tctttttgtatgctaatgttcactgatagcttcaggatggaggtggtcaccagaaggacaaaggcatgattatagggttggaacttctgggcccacctccccaacttccagggagaagag

SEQ ID NO: 944702 - DNA, 120 bp, Artificial Sequence
  ENSG00000232006_31 (sequence is synthesized)
cggggctgaaagacagactgatcagcaatggcctgtggtttgatcataatgaagcctccataaaaacccaagttgacagagtttggcaagcttttagatagctgaacacatggaggctcc

SEQ ID NO: 944703 - DNA, 120 bp, Artificial Sequence
  ENSG00000232006_32 (sequence is synthesized)
cagaggatggcatgcccagtgagggcatggaagcttcacacccctttcttcataccttaccatacacatctcttcatctatattctttgtaatatcttttataataaaccagtaaatgta

SEQ ID NO: 944704 - DNA, 120 bp, Artificial Sequence
  ENSG00000232006_33 (sequence is synthesized)
ctaagtgttttgaggttgcaaactgacttctgggttttgagaactatttgactttctggcttcacaactggccatcaaactacagtcagtcatgcaacaggagcctctgatgacgaccct

SEQ ID NO: 944705 - DNA, 120 bp, Artificial Sequence
  ENSG00000232006_34 (sequence is synthesized)
aggaggcaataatggagctatttttttctttcgttgtccaagtggaagatgttaaaaaagaaaccctcaatgtacagcaaaactgcatttcccaagctcctcttctctcaatgggtcaca

SEQ ID NO: 944706 - DNA, 120 bp, Artificial Sequence
  ENSG00000232006_35 (sequence is synthesized)
ctctcatcacagggagaccaccactgtgtgtgggagagagaaaggttgctcttcttggaaaagtgttgtgcactgaggatcataagtcaaatcaccttcaatttctcgtcttcttcctgc

SEQ ID NO: 944707 - DNA, 120 bp, Artificial Sequence
  ENSG00000232006_36 (sequence is synthesized)
tccccaagcctctatgattcaaggatctcagttccaagtgaaagaactgaatagcagatctaatcagaaagggaatttgtaaactggaacctggggggcccagatcattcccatggaaga

SEQ ID NO: 944708 - DNA, 120 bp, Artificial Sequence
  ENSG00000232006_37 (sequence is synthesized)
tggggaatcaggctggcaaagtcctcagaaaggggagacatcaatcaggatgacagccacatcatccatgaaaccagtgagatcacttccgcataccagatgaccctggattcttctggg

SEQ ID NO: 944709 - DNA, 120 bp, Artificial Sequence
  ENSG00000232006_38 (sequence is synthesized)
atttaatttttattcaaatttggtgtcagtatgattggccaaacctaggagatgtacccatgccctggatgcagaagaagctgaaagaacagataatttctacttccatcttctctctca

SEQ ID NO: 944710 - DNA, 120 bp, Artificial Sequence
  ENSG00000232001_0 (sequence is synthesized)
cagataaatcccacaagagaagtgactgagaacgtggagggaggcctggtgctttacccatgtggctagagtgagcagcaccctggtttgtctaggaaagaggtggtttccaggaggcag

SEQ ID NO: 944711 - DNA, 120 bp, Artificial Sequence
  ENSG00000232001_1 (sequence is synthesized)
cactttcagttctgaaacttgggcagtcccaggcgaatccggagaatttggtcacccaggttatggaaaaccctccccatgatgggaatgatcagaaatggggaaagataactctagtcc

SEQ ID NO: 944712 - DNA, 120 bp, Artificial Sequence
  ENSG00000232001_2 (sequence is synthesized)
tagttttccctatattttaattctctgacactgtagttctcaaacttcagctgcatcggcgtcccctggggctcctgtgaaaacactggtgtctgggccaaccatggagtgtctgggtgg

SEQ ID NO: 944713 - DNA, 120 bp, Artificial Sequence
  ENSG00000232001_3 (sequence is synthesized)
gtggagaagaaacatgaagtccgcagctgcccacattcagggaagatctttgaaagctcttcagacagtgccacccatcttcatgaagctgatccccggatctcactcgcttgtttctcc

SEQ ID NO: 944714 - DNA, 120 bp, Artificial Sequence
  ENSG00000232001_4 (sequence is synthesized)
tccttcacctgctgatgatcaatgtagactttagccctcagaagctctcaaaagacccagatcttgtgaactgttttcacatttccccatggatgcctagcaagggactgggactgcctg

SEQ ID NO: 944715 - DNA, 120 bp, Artificial Sequence; identical to SEQ ID NO: 782059
  ENSG00000232001_5 (sequence is synthesized)

SEQ ID NO: 944716 - DNA, 120 bp, Artificial Sequence; identical to SEQ ID NO: 782060
  ENSG00000232001_6 (sequence is synthesized)

SEQ ID NO: 944717 - DNA, 120 bp, Artificial Sequence
  ENSG00000232001_7 (sequence is synthesized)
tgtttttgagcccaaggaacaagtatttagtcatgattgccactcgttataggctctgttaacagtgtaaagaaagttggaagttctctcctgagaagaagtaacttcaatgcggaagga

SEQ ID NO: 944718 - DNA, 120 bp, Artificial Sequence
  ENSG00000232001_8 (sequence is synthesized)
cccgggcttctcatgtttctctttgtatcccgaccgccgggaactgccttacctgcagctacaaagtcctgcaagtgaggcttagacccagatcttgtgaactgttttcacatttcccca

SEQ ID NO: 944719 - DNA, 120 bp, Artificial Sequence
  ENSG00000232002_0 (sequence is synthesized)
ccctctcagctgagcctggtagatgccagctgaccggctgcagcccctgagtagaggttggctgtcctagcaatagagtagggcgggggcacagcagacatgggaccatcatctggattc

SEQ ID NO: 944720 - DNA, 120 bp, Artificial Sequence
  ENSG00000232002_1 (sequence is synthesized)
ctagacgtgcaactgcaagcttagaagaaataaaggaaatatcccaggagcaaaaacaaaacacacacatgctcctctcaagagtcactggcatcccagctgaaaagtcagctctacacc

SEQ ID NO: 944721 - DNA, 120 bp, Artificial Sequence
  ENSG00000232002_2 (sequence is synthesized)
tatgggacctatgggcctgtttctgagctctgttttgtctctttggtctgagtgtctatctgaggccaataccacagtaccaaatgcgattgctttagaggaagtcttgaaatcagatga

SEQ ID NO: 944722 - DNA, 120 bp, Artificial Sequence
  ENSG00000232002_3 (sequence is synthesized)
gccgactaggattcctggcaccatcgtgaacggctctggtgggcacaggcagccctctgctgcttctgatcttagagaaatgaaaataaagtcagcctccataaaattatgaagaagaaa

SEQ ID NO: 944723 - DNA, 120 bp, Artificial Sequence
  ENSG00000232002_4 (sequence is synthesized)
ggcagtatcataatgattatgcaggaaccaaggactggcctggaagatgggcccccaagctcacagggacaccagcaggcactgcttctagacatggagcctcagttccagaatgtcccg

SEQ ID NO: 944724 - DNA, 120 bp, Artificial Sequence
  ENSG00000232002_5 (sequence is synthesized)
gtaactgcaggctggccctgaccaggatgaccactggctcccactgtggatgcatttcgtgcgtggcctgcattggacatcggctcacccatgtgctggggtgtccagggtccaggggaa

SEQ ID NO: 944725 - DNA, 120 bp, Artificial Sequence
  ENSG00000232002_6 (sequence is synthesized)
gctccaggacacatttgaggatcaggagagcaacctgcatagtgcaggactcttgtcagggagaccacgacccgggagcctttcctagaagacacagagtccccaaaaatacctgtgaca

SEQ ID NO: 944726 - DNA, 120 bp, Artificial Sequence
  ENSG00000232002_7 (sequence is synthesized)
agggtctcatcacagcactgtctgagagtgcttggagagagggaacctgcctgcagctgttcccagagcagtggggcgggggacactcccctactgaagaaggcatttccttttggcgcc

SEQ ID NO: 944727 - DNA, 120 bp, Artificial Sequence
  ENSG00000232002_8 (sequence is synthesized)
tccagttccccctgccaggacgtcagcacccaggctctgatgtgggctgctgggggccacggcactgcaatgctgccctggattgaatggggcgggggctatagatgtataatacaagtt

SEQ ID NO: 944728 - DNA, 120 bp, Artificial Sequence
  ENSG00000232002_9 (sequence is synthesized)
ggattttagagacttggtatgtggcatagagtctcaaatgtccaaagatgtgtcgcattgatttcagggtgagtggatagttgttctgatatactgagttcagtaaaatacatcggcagc

SEQ ID NO: 944729 - DNA, 120 bp, Artificial Sequence
  ENSG00000232002_10 (sequence is synthesized)
ctggtgtgtggtccaccctggagaatgtctcgctctcctctcgagaggaacgtggctgcggctctgcgtggaccgtttggcagaggctcatatgctggatccactggttggttcacgggg

SEQ ID NO: 944730 - DNA, 120 bp, Artificial Sequence
  ENSG00000232002_11 (sequence is synthesized)
ttcattcctgtctgttgatcttctacctagtggctccatcactcattcaagccacccgatgtcccttttgattattgtttacacggttcgtctttttccacctttccccgttggactctg

SEQ ID NO: 944731 - DNA, 120 bp, Artificial Sequence
  ENSG00000287799_0 (sequence is synthesized)
agcctagcctgctagtacaagaaggatgagagtcacatggagcacaactgccccagctgagaacagccaaccacaactgtagtgcaaaattccacatccacaaaacccacctggccagtg

SEQ ID NO: 944732 - DNA, 120 bp, Artificial Sequence
  ENSG00000287799_1 (sequence is synthesized)
atggcttgggtaaggacggagaatgcagtgggatcagaaccctagagtgggcatgaagaggagaaaaaacaaattctgaaatcaccatggaaacactacagagataaccttcatattctg

SEQ ID NO: 944733 - DNA, 120 bp, Artificial Sequence
  ENSG00000287799_2 (sequence is synthesized)
tttgaaaacaaatgcatccttattgctacggcagccacttaatctagacacaaatacagctatattaggtgcactgtaatgaaaagtgaggaaaggagagtagaggaggaggaggagaga

SEQ ID NO: 944734 - DNA, 120 bp, Artificial Sequence
  ENSG00000287799_3 (sequence is synthesized)
taaaatattttagagaacatttataaacattccttgtaaagttgataaacaatctttgaaagacacagaatccaaaatacatacgaagattatgtggattacaaaagaaagcactgctca

SEQ ID NO: 944735 - DNA, 120 bp, Artificial Sequence
  ENSG00000287799_4 (sequence is synthesized)
acttgtaagagaccttaagtattttctaacagttgcttgtaagttaaatgtctcttcttcccagcctacgcaaatgatgctcatgtttccctaatcacatccagttgtatttacacaaaa

SEQ ID NO: 944736 - DNA, 120 bp, Artificial Sequence
  ENSG00000287798_0 (sequence is synthesized)
tcccgccatcctgaggaagtgagagccccactcaccactccagacgcccttccccatgacttcacttgacatgcagaggaaatgacggctgggcacactggctcacgcctgtaataccag

SEQ ID NO: 944737 - DNA, 76 bp, Artificial Sequence
  ENSG00000287798_1 (sequence is synthesized)
aatgacggctgggcacactggctcacgcctgtaataccagcacttttggaggccagagcaggaggatcacttgagg

SEQ ID NO: 944738 - DNA, 120 bp, Artificial Sequence
  ENSG00000287798_2 (sequence is synthesized)
aagaagacaaaatgacttaaaatggataacaaaagcgacctgaatccgtgggaccaagaccataaatatcagggagagctgcaaggggctgtgtgcaactgcttgcaccacaagaagcgg

SEQ ID NO: 944739 - DNA, 120 bp, Artificial Sequence
  ENSG00000287798_3 (sequence is synthesized)
gagagaccgtctagacttgcagtggcaggagaaattctggcaaagttcttgaatgtgagccgacccacagatactgacggccagcacgatccaaaatctaactctatgaggagagagggg

SEQ ID NO: 944740 - DNA, 120 bp, Artificial Sequence
  ENSG00000287798_4 (sequence is synthesized)
aaccaggaagcctagaaccagaagctgaagactaaagctcccagcgcctactgaaccaccccatcccaaatctccttgtcaagatggcaactttattcagaagggggcttccaaggttaa

SEQ ID NO: 944741 - DNA, 120 bp, Artificial Sequence
  ENSG00000287798_5 (sequence is synthesized)
acagagctattgaagaagaaatcatccctcacgcctccaccacaggcccaaagaagaactataagaggatcctttggaaaatgagattgaattttgctcttgtggctacaaggaatagaa

SEQ ID NO: 944742 - DNA, 120 bp, Artificial Sequence
  ENSG00000287798_6 (sequence is synthesized)
ccagcatcaaggtttaagttcctatgaaagcagaacctgaaaggaagacttgagttaatttaagaggtgatcacggtgaacagaagtgatggaatcagaagaataaaacagaaaatccaa

SEQ ID NO: 944743 - DNA, 120 bp, Artificial Sequence
  ENSG00000287798_7 (sequence is synthesized)
attatgagctggctaccactgagattcactggggttcagtcctgctgaggattctttgagtaaattaatagagaatgccttatattgtctcaccaaaggacaattgagttgatacactta

SEQ ID NO: 944744 - DNA, 120 bp, Artificial Sequence
  ENSG00000287798_8 (sequence is synthesized)
tctacttcttctcatccctcattagttgagggctgctgccagctgtgtcaacaccttcaaaagtctgaactgtttgtgcataagctaaatgggcttttgcagtgttgggaaaagcccaga

SEQ ID NO: 944745 - DNA, 120 bp, Artificial Sequence
  ENSG00000287798_9 (sequence is synthesized)
gtcagaagaacagaaagacactgtggtctgcagttgagaagggatgccggcattgcccatgaaatgtacatgaaatgttggcattgaactgtggctgcacaaaatcaggtgggtcaagcg

SEQ ID NO: 944746 - DNA, 120 bp, Artificial Sequence
  ENSG00000287798_10 (sequence is synthesized)
aattaacacaatgcattaccagcatcatcttcaaatttatagtgaaacttctcatttgatctttcatatctcttggcttcatttctatatttttcattgctttttagctctgagcctcat

SEQ ID NO: 944747 - DNA, 120 bp, Artificial Sequence
  ENSG00000287798_11 (sequence is synthesized)
atgtggcagtttcctcagatctctattctcatttgttgattttctatttagccgtgtgtaaatagctcatctttctcataatagcattttcttatagtttcagctctcacatgtttattt

SEQ ID NO: 944748 - DNA, 120 bp, Artificial Sequence
  ENSG00000287798_12 (sequence is synthesized)
gcttgctttcacattgtaccattatctcagtatctttggcagtaatcctgctattcattgtgcctactggctatcatggcaggatatttttctatgtgttttgtgatgtattttcagtgt

SEQ ID NO: 944749 - DNA, 120 bp, Artificial Sequence
  ENSG00000287798_13 (sequence is synthesized)
ggatttattgaactttaatttactgaactttaatttattgaactttaatttattaatttattgaactctaatttactgaacttattttcagtgaggatttaccaccgcactccttgccat

SEQ ID NO: 944750 - DNA, 120 bp, Artificial Sequence
  ENSG00000287791_0 (sequence is synthesized)
aagcaaaacaggatgactcatccaggactctctggctcccatggcctctgaaagcaaagtcggaactctctggaacaatgcgagggagattcccagcgtgggtgtgtgtggatgaggaaa

SEQ ID NO: 944751 - DNA, 120 bp, Artificial Sequence
  ENSG00000287791_1 (sequence is synthesized)
ctgaggaaagagtcgaagatcacaagcctggtaagaaaggagctgggatttgaagctgcccgtaatcccatcccagagtctgtgtttgctaagtaggctgttgagagtgaccctgaattg

SEQ ID NO: 944752 - DNA, 120 bp, Artificial Sequence
  ENSG00000287791_2 (sequence is synthesized)
acaaagaagaggcattttttaaaaaatctgtaaagtaaaacagacagcttctcatttactttttttaaaaaaaaaagactgtgtgtgcatgtatgtacgcaaatgcctgaagtgggactg

SEQ ID NO: 944753 - DNA, 120 bp, Artificial Sequence
  ENSG00000287791_3 (sequence is synthesized)
gattacttccaggagacttgattactttgattttcacatctgtgtatttctacattactggcaccttttttacaagtatctatttttttataattttattaaaaactttaaaaatctaat

SEQ ID NO: 944754 - DNA, 120 bp, Artificial Sequence
  ENSG00000287790_0 (sequence is synthesized)
taaatctcagaagagcagcttttcaaaactctgtcaggcctgggagacaaaggaaatatatcttgacctcacagagagcattcaggtggaaaaaagtaatttttttaacttgaaatttac

SEQ ID NO: 944755 - DNA, 120 bp, Artificial Sequence
  ENSG00000287790_1 (sequence is synthesized)
atttaactaaaatgaatttgtctcacaatgaagaaagactaaataaatcatggtatagcctaagtggaaaatggttccactgttagaaatccgcattgataaaagccattcactaacgtc

SEQ ID NO: 944756 - DNA, 120 bp, Artificial Sequence
  ENSG00000287790_2 (sequence is synthesized)
agaaatccgcattgataaaagccattcactaacgtcggtgaggcaggagaacagtggctggagggagagaacataaggccgattcacgctgatttcctagaactaaatcaaatggaaaca

SEQ ID NO: 944757 - DNA, 120 bp, Artificial Sequence
  ENSG00000287790_3 (sequence is synthesized)
agtgaatggcagccatttttctagctacagaagagcaaagcgcagtaccacgtgctcctccaggctggagctgtccttgctggcgctgtctctccatttctctcttattctcctgtgacg

SEQ ID NO: 944758 - DNA, 120 bp, Artificial Sequence
  ENSG00000287790_4 (sequence is synthesized)
atggtgggtgcacatgttcacatggagatgtccaggatccaagcaagtggtctgaaagcctgagccacagcccgtaaggcaggcacccggacaggaacccagacccacagcagactttgt

SEQ ID NO: 944759 - DNA, 120 bp, Artificial Sequence
  ENSG00000287790_5 (sequence is synthesized)
ccaagcaatagcgctcctatgtcacgccactgagaatgtggtgtcatgtgtcaccgtagcataatccagtctaacctgactgatacctctgttttgaaaacaaactgctacaagaattgc

SEQ ID NO: 944760 - DNA, 120 bp, Artificial Sequence
  ENSG00000287790_6 (sequence is synthesized)
cttgggggttcagtgcatgatccagaaattcactggtgaccctctgaggcatctagattggcatgaactgtgtctcaagggaagagaagccactggcgttgaaatggttaatacatgtga

SEQ ID NO: 944761 - DNA, 120 bp, Artificial Sequence
  ENSG00000287790_7 (sequence is synthesized)
tagaaattaaggcagcagccttgaaagactgccatggatattgagagaacataagagtttctagaacacaccaacatgaagtttgagatattcaaagatcactgaagacttcacaaaccc

SEQ ID NO: 944762 - DNA, 120 bp, Artificial Sequence
  ENSG00000287790_8 (sequence is synthesized)
ggtctattgggatgtatacctacccttccagaatgcagaatattttcaggaagaaagaatactcttagaaaataattcgtatttgattcaccaaggtgacgtctaggattgtgatcttag

SEQ ID NO: 944763 - DNA, 120 bp, Artificial Sequence
  ENSG00000287790_9 (sequence is synthesized)
tcatgtacccttcctgtgatactgaaatgttgaatttgtgttcaataaaacttgaacataatttgaacaaaaacaaggatcctacattaaaaatcctcactataatgagaaatggacgta

SEQ ID NO: 944764 - DNA, 120 bp, Artificial Sequence
  ENSG00000287790_10 (sequence is synthesized)
cttacacatctccaggaggaaaaacaggaagttgaccataatcataggagtgatttatcaagaattcctatcaatactttcaatagtatgttttcacaagggcttcttccaaactctatt

SEQ ID NO: 944765 - DNA, 120 bp, Artificial Sequence
  ENSG00000287790_11 (sequence is synthesized)
gatgttgaaatgcattttaaaagattataattgtcctgtggctgatgctaggagaagctgagctatgaaaagcagctgaaaacgtgcttcttggtgaatagtatgatgctgaatctcctg

SEQ ID NO: 944766 - DNA, 120 bp, Artificial Sequence
  ENSG00000287790_12 (sequence is synthesized)
gtcaaggagctggctcaccccgtggtgacctctgccatcccagccaggtgcccgttcatgaagaccagccccacagcagtggagtttcttgagattttcccaggaatgctaaaaacagtg

SEQ ID NO: 944767 - DNA, 120 bp, Artificial Sequence
  ENSG00000287790_13 (sequence is synthesized)
gagctactttaaggaatcaacccataatcattagcctatccaaatctaagccccaccaagttacttggaagctataaatgtgtctttgagtatatacaaataaagatgctgtttatccgg

SEQ ID NO: 944768 - DNA, 120 bp, Artificial Sequence
  ENSG00000287790_14 (sequence is synthesized)
tcatctctacgtgcattgtgagcctcacaatgccagggcctcccaaacacttgatacggtcagggtactatcactggcgcagaaatgtaagagtgacaccacgtgcatgggtctctcctg

SEQ ID NO: 944769 - DNA, 120 bp, Artificial Sequence
  ENSG00000287790_15 (sequence is synthesized)
ggtgcttttgctgagggaagaatttttctaaacttgaccttgactgaaattacagttgattgtggatgatgcttctggagacgctcaaaatcaggactcagtctttccatgggacttttc

SEQ ID NO: 944770 - DNA, 120 bp, Artificial Sequence
  ENSG00000287790_16 (sequence is synthesized)
tgggtcttgtggagaaggggatagagaggttttactctagggctctgttatggcacggtaattctatttattctgtcatggaatcactagaaaataaaattctggaagtctgctagtatt

SEQ ID NO: 944771 - DNA, 120 bp, Artificial Sequence
  ENSG00000287790_17 (sequence is synthesized)
ttgctacatcagctgtccaaaggaaaaagagacatgagatatataatctgcttacttggccatatcaacacttctgatgttacttccacccaagatgagttccacctgcatgtgagtctc

SEQ ID NO: 944772 - DNA, 120 bp, Artificial Sequence
  ENSG00000287790_18 (sequence is synthesized)
accacctcctccaaaggacttccaccgtgttcctcccacaaagtggagtgttgtaccagtccattactggttagaaaattcatctcataggactaaactctccagctttggatgttatta

SEQ ID NO: 944773 - DNA, 120 bp, Artificial Sequence
  ENSG00000287793_0 (sequence is synthesized)
gaatagcatcttagggaccagaggttttccacattgccactggataggagttttcagttgccaagccaaaatatgggcaacattcgaacaggacagaacacctggatgggactccaagaa

SEQ ID NO: 944774 - DNA, 120 bp, Artificial Sequence
  ENSG00000287793_1 (sequence is synthesized)
gtggccccagagagttaaatcccagtgactgctagtaggtgaaagcagacaaacaccaagaagccggtggctgggttcatcttagcaaattccaaacgaagaaataaatgtccttgatat

SEQ ID NO: 944775 - DNA, 120 bp, Artificial Sequence
  ENSG00000287793_2 (sequence is synthesized)
cttgcatttcattcaagtctggcatcttctggggatcaccatggtttgaaatggttgttatttttcacacagtagaaagcttactcttcatctttattattatttttcaaaatgcaacca

SEQ ID NO: 944776 - DNA, 120 bp, Artificial Sequence
  ENSG00000287793_3 (sequence is synthesized)
tttttaaggctacagcgtcatctgatttgtactatttggatcctagatcacagccagtatttggaagaaactgtgtttttaacgctcggagaaaaagtaaataagaatgtgaaagtagga

SEQ ID NO: 944777 - DNA, 120 bp, Artificial Sequence
  ENSG00000287795_0 (sequence is synthesized)
attctgtagaaggaaacaaatgaggagaaattaggcagcactatcagcatctccaaggaggatgcagcaacaaggcaccatcttaggagcagagaccagaccctcaccagacaccgaacc

SEQ ID NO: 944778 - DNA, 120 bp, Artificial Sequence
  ENSG00000287795_1 (sequence is synthesized)
tgccaacaccttgatcttggacttcacagactccagaactgaggaggcattttgttctggggcacttcatctgaaaagatgttaaaactagagatagccaggtatttacacaggaaaaac

SEQ ID NO: 944779 - DNA, 120 bp, Artificial Sequence
  ENSG00000287795_2 (sequence is synthesized)
aaatccttaatatatactatatataataaaatactcacggaacattacttccctgcaagagctactattgcagcctggattcctgtgaatgtgcttcaccagttctctttacactcagca

SEQ ID NO: 944780 - DNA, 120 bp, Artificial Sequence
  ENSG00000287795_3 (sequence is synthesized)
agaccctgatcacatgctgatcacacagacagagccagattcagacaattaaagctgtgatttgcttttgctagcatcagaacttgataagccaatggtagcattcattaatgtagtata

SEQ ID NO: 944781 - DNA, 120 bp, Artificial Sequence
  ENSG00000287795_4 (sequence is synthesized)
ttataagcaacagtgaattacccacagttagtgactaataataaattagcatggttatactaatcacaaaaagaaggtctacaaatagtagatcattttatagcatgaaaaacagaaagt

SEQ ID NO: 944782 - DNA, 120 bp, Artificial Sequence
  ENSG00000287795_5 (sequence is synthesized)
ttgaatcaggttacacaaaatcactaaatggacaactcaagaagacacgtttgcctccctttgacttatgcccagttctgaaccttgtttccagagtctctttcactactgcaggatgtg

SEQ ID NO: 944783 - DNA, 120 bp, Artificial Sequence
  ENSG00000287795_6 (sequence is synthesized)
gcctccaccacagcaatactgctcttctctgtacatttccacctcaattaaggaaccaacttgtctctgttttacccagaactttgctagttttagtacaagaagtcccacatggtaact

SEQ ID NO: 944784 - DNA, 78 bp, Artificial Sequence
  ENSG00000287795_7 (sequence is synthesized)
gctcccaccttaaatagcaaaagagattttgcaaacgccattatattaagaatgttgagatggaaagattatcctgga

SEQ ID NO: 944785 - DNA, 120 bp, Artificial Sequence
  ENSG00000287795_8 (sequence is synthesized)
cattatattaagaatgttgagatggaaagattatcctggattatcctgggtcctatataatcacacaggtccttaaaattggagaacctttggccgggtgcgttggctcatgcctgtgat

SEQ ID NO: 944786 - DNA, 75 bp, Artificial Sequence
  ENSG00000287795_9 (sequence is synthesized)
ggctcatgcctgtgaaagttcgaggccagcctgactaacagggagagacctcgtctctactaaaaacacaaaaat

SEQ ID NO: 944787 - DNA, 120 bp, Artificial Sequence
  ENSG00000287795_10 (sequence is synthesized)
ataaataaaaattggagaaccttttccaagtatggtcagaggtaaatgtgactccaaaagaatgttcacagaaatggaggaaggtggcctttggaagtcaaagaaatggattcttctcta

SEQ ID NO: 944788 - DNA, 120 bp, Artificial Sequence
  ENSG00000287795_11 (sequence is synthesized)
gagtttcctagaagcaatgcagccctactgacagcagccccatgagatctacattggattttttacccacagaactgtactatcataaatgtgtttagttaggcaactgagtttgaggta

SEQ ID NO: 944789 - DNA, 120 bp, Artificial Sequence
  ENSG00000287795_12 (sequence is synthesized)
attttttatgacagcaaatgaatgcaataatcaactcatcctgattagctcaggactgtcccacttttgaaactgaaaatcccacaccctgggaacgcttccagtactggacaaaaccaa

SEQ ID NO: 944790 - DNA, 120 bp, Artificial Sequence
  ENSG00000287795_13 (sequence is synthesized)
tacaattgatcacccaacctccaatttttatcccacaacttccaaattttatcccctagcattgagctctagaattccccactggcatctaggtactcttcaactgaaactactgggcta

SEQ ID NO: 944791 - DNA, 120 bp, Artificial Sequence
  ENSG00000287795_14 (sequence is synthesized)
actactgggctactccgaagataatccaagcagtggctctcaaacattagggtccatcgcaggctcctggaggacttgttaaaacagactgttggggctgggcgtggtggctcatgtctg

SEQ ID NO: 944792 - DNA, 120 bp, Artificial Sequence
  ENSG00000287795_15 (sequence is synthesized)
gtctcaaaaaaatataataataaaaataaaaacagattgttgggtctatccccagagtttctcatgaaggaggttaggaatgaagcataagaatgtgcatttctaacatgtcctcaggag

SEQ ID NO: 944793 - DNA, 120 bp, Artificial Sequence
  ENSG00000287795_16 (sequence is synthesized)
acgctgatgtgctggtctagggaccatacttttaaaccactgtcctagagacaaaaacctctgggacagcattgaatagaatttcacctgttcatctatatcccagacataggtaaaaat

SEQ ID NO: 944794 - DNA, 120 bp, Artificial Sequence
  ENSG00000287795_17 (sequence is synthesized)
tagatgggtttgtggccaagtaccaattatcacacctcaacaaaatggtggtaaagaacatactctgaaatctcccccaaaatctgctagaacatttggtaagggttctgatcccattcc

SEQ ID NO: 944795 - DNA, 120 bp, Artificial Sequence
  ENSG00000287795_18 (sequence is synthesized)
tgccttctacaagctttgggcccctgggcaagttctattgtgtcaagtctcagaactggaactaatccatgtaaactaccttgcatggtatctggcataggacttatgctcaataaatga

SEQ ID NO: 944796 - DNA, 120 bp, Artificial Sequence
  ENSG00000287797_0 (sequence is synthesized)
agccaccgtgcccggccaataagggagaatttctggagcatctgtaaattctctactttaagctgcttcaaatagaaagcagccctgctttttgtgtttctacaaaagactgggcagaaa

SEQ ID NO: 944797 - DNA, 120 bp, Artificial Sequence
  ENSG00000287797_1 (sequence is synthesized)
cctgcctgtccttcagggtcccaaatgagtgtatgaagttccagtttcttcacatctttgacaacaatttcctattatatggctggacagtggtaacttattgtggttttaatttgcatt

SEQ ID NO: 944798 - DNA, 120 bp, Artificial Sequence
  ENSG00000287797_2 (sequence is synthesized)
tccctaatgtctaatgatgttgagcatcttttcatatgcttatttgtcatctgtatagcttctttggtgaagcaacagctcaaatagtttgcccattttttattggaggtttgttttctt

SEQ ID NO: 944799 - DNA, 120 bp, Artificial Sequence
  ENSG00000287797_3 (sequence is synthesized)
atgtagttgtaagagttctttatatattctgagtacaagttctttatgagatgtatcctttgaaatgttctttcctggttgatgacttgtcttttcattatcttaacagtatattttgaa

SEQ ID NO: 944800 - DNA, 78 bp, Artificial Sequence
  ENSG00000287797_4 (sequence is synthesized)
gatgacttgtcttttcattatcttaacagtatattttgaagagcagaagtttttaatttttctgaagttgtgcaatgt

SEQ ID NO: 944801 - DNA, 120 bp, Artificial Sequence
  ENSG00000287797_5 (sequence is synthesized)
tctgtcatccaggctggagtgcagtgggaccatcacagatcactgcagcctcaagctccccggctcaagcgagccttccacctcagtctccagagtagctgagactataggcatgtgcca

SEQ ID NO: 944802 - DNA, 76 bp, Artificial Sequence
  ENSG00000287797_6 (sequence is synthesized)
tggggaggcatgagtcactgtgcccagttttaattttcttttatggattttggtgctatacctaggaaatctttac

SEQ ID NO: 944803 - DNA, 120 bp, Artificial Sequence
  ENSG00000287797_7 (sequence is synthesized)
tcttttatggattttggtgctatacctaggaaatctttacctgacctagtatcacagactttattctatttataagaaatgttatagctttaggttttatgtttcggctatgatccattt

SEQ ID NO: 944804 - DNA, 120 bp, Artificial Sequence
  ENSG00000287797_8 (sequence is synthesized)
tgagttaatttctgcatatgatatgaggtatggatgggagttcattgttttccatctggatatgcaattgttccagcaccatttattgaaaagactatccttgacccactgaattttctt

SEQ ID NO: 944805 - DNA, 120 bp, Artificial Sequence
  ENSG00000287797_9 (sequence is synthesized)
catacatttgttaaaaatcagtgtccataatatgtgggtgtttttctcagactctcttgtcatagtcagtttgggctgctatgacagagcaccataaactgggtggttcataaaccacaa

SEQ ID NO: 944806 - DNA, 120 bp, Artificial Sequence
  ENSG00000287797_10 (sequence is synthesized)
aaatatttttctcatagttctggaagctggaagtccaagagaaggtgccagcatggtagggttctcctgagggccctctccaagttgtagatggcttacttcttgctgtatcttcacata

SEQ ID NO: 944807 - DNA, 120 bp, Artificial Sequence
  ENSG00000287797_11 (sequence is synthesized)
gcagagaacagagagggaaagcaagctctctcatgactttataagtacactaattccattaatgaggtctccatccatacgacctcatctaaacctaatcacctctcaaaggtcccacct

SEQ ID NO: 944808 - DNA, 120 bp, Artificial Sequence
  ENSG00000287797_12 (sequence is synthesized)
cctgataccatcatattgggcagtagggtttcaacatatacattttgaataggacacaaacattcagtccataccactcaattctattgttttgttctatttttctatcttcacaccaat

SEQ ID NO: 944809 - DNA, 120 bp, Artificial Sequence
  ENSG00000287797_13 (sequence is synthesized)
aatacacagtcttgaatactgtataagtctttataagtctttaaatcaggtagtatttgccttccaaatttgttctttttttttccaaaattgttttggttattgcagtactttacattt

SEQ ID NO: 944810 - DNA, 120 bp, Artificial Sequence
  ENSG00000287797_14 (sequence is synthesized)
ccacataaattttataatcaatttgcaaattccaaaaaaagtctgctgggattttgatttgaattgctttgaatatgtagaacaaattggaaataattgacatcataacaatatttagtt

SEQ ID NO: 944811 - DNA, 120 bp, Artificial Sequence
  ENSG00000287797_15 (sequence is synthesized)
ttctggatcagaacaaagtatgactctccatttattaagttattctttcacttctttcaacaatgttttatagtgttcagtgtgtaggcttttcacatcttatgtcagatttatctctat

SEQ ID NO: 944812 - DNA, 120 bp, Artificial Sequence
  ENSG00000287796_0 (sequence is synthesized)
tgtaaaaaatgaggttcttgatttctgaggatctagacgatttgccttcctactgcttctgcttttcactatataagtgaaaagacctcaaaagctgcaaatgttttgtttgcgctattc

SEQ ID NO: 944813 - DNA, 120 bp, Artificial Sequence
  ENSG00000287796_1 (sequence is synthesized)
attaatgggctctaccctgaggtcagtggtccagttttaaaatggagactaaattaaaagccacctatctaactaaaattggtctccttataaaatcctctggtgattctcaatgatttt

SEQ ID NO: 944814 - DNA, 120 bp, Artificial Sequence
  ENSG00000287796_2 (sequence is synthesized)
gtgttaccttagtattcattttaattttcctctaacatacccaaattctttcttcaaaaagcttaaattctctctttgtgcattgagatgtaaatttgcaaccctggtttctctaaaact

SEQ ID NO: 944815 - DNA, 120 bp, Artificial Sequence
  ENSG00000287796_3 (sequence is synthesized)
aatttgcaaccctggtttctctaaaactcaataagcacttcaaccatgcgggacaaataaactttatttaaaaatattttttattttttattcttttagagacagggtctcactctgtca

SEQ ID NO: 944816 - DNA, 89 bp, Artificial Sequence
  ENSG00000287796_4 (sequence is synthesized)
ccaggcacacaccgccatgcctaactaatttctttattttttatgttttagtatagacggggtcttgccttgttgcccaggctagtatt

SEQ ID NO: 944817 - DNA, 120 bp, Artificial Sequence
  ENSG00000287796_5 (sequence is synthesized)
agtatagacggggtcttgccttgttgcccaggctagtattgaactcctggcttcaagtgaaccccctcctgcgtgaggcattgcacccagcccagacaatctttaacttgtttcatttac

SEQ ID NO: 944818 - DNA, 120 bp, Artificial Sequence
  ENSG00000287796_6 (sequence is synthesized)
agaggcacaaattaatctaactgtccttttaaactagtgagttttatctgtctcatgactaaaattttaaaataaaagcaaatatagtttacatattttccctacccaaatcttatgttg

SEQ ID NO: 944819 - DNA, 120 bp, Artificial Sequence
  ENSG00000287796_7 (sequence is synthesized)
aattgtaatcccgaatgttggaattggggcctgctgggtggtgttcgggtcatgggggtagatctctcatggcttgatgctgtcctcaggatagtgactgagttttcctgtaatctagtt

SEQ ID NO: 944820 - DNA, 120 bp, Artificial Sequence
  ENSG00000287796_8 (sequence is synthesized)
ggttaaagtgtgtggcacctcccccactctctctcttgctcctgctttgccatgtgaaatgcctgctcccattttgctctctgccatgagtaaaagcttcctgaggcctcacgagaggct

SEQ ID NO: 944821 - DNA, 87 bp, Artificial Sequence
  ENSG00000287796_9 (sequence is synthesized)
atcatgagccaatgagtatttcgttataaaacagcctagcaaaaaagctataaaatctttatttgtgtttgtatattatgtataaat

SEQ ID NO: 944822 - DNA, 120 bp, Artificial Sequence
  ENSG00000287796_10 (sequence is synthesized)
aaagctataaaatctttatttgtgtttgtatattatgtataaatgtgtatatgtctgtgtttgtatattgtctacatggtactgagttgacttataaataaatgagtactcataaattaa

SEQ ID NO: 944823 - DNA, 120 bp, Artificial Sequence
  ENSG00000287796_11 (sequence is synthesized)
tctcaaaatttttaaattcatatgactttagtaacctttgatataaaaagcagatttttaaattgttggtaaaataaaatagaaatgtcttcagagttttagacttctttatcttaatct

SEQ ID NO: 944824 - DNA, 120 bp, Artificial Sequence
  ENSG00000287796_12 (sequence is synthesized)
actggtcaaacaaatgtatgttgtttctgctaaatgttttaaggtcaaaaaacttgtttctgtgatatttttgataattgcttgatttgtctttaagcatatgtctttggttttgagcct

SEQ ID NO: 944825 - DNA, 120 bp, Artificial Sequence
  ENSG00000287796_13 (sequence is synthesized)
ttagattccagagtctagacaggtggtcatggtgaggcttccacagcacctagaccaccagctgcagggtagagtcaagcccgatacatcctccctggcccagctctgcctcctggccat

SEQ ID NO: 944826 - DNA, 120 bp, Artificial Sequence
  ENSG00000287796_14 (sequence is synthesized)
gctggaaggggatagatcctccattaactgtcttcgcagctctgtcatttgtcctgggctttgcatttgatacataacaattaaaattgctttacttcctagctttctcactcgaaattg

SEQ ID NO: 944827 - DNA, 89 bp, Artificial Sequence
  ENSG00000287796_15 (sequence is synthesized)
tataagagaaataattctatataaagagtgtacaaagaatgtaggatgtgttttgggtgaggaaggttataagaaaaacatgaagccat

SEQ ID NO: 944828 - DNA, 120 bp, Artificial Sequence
  ENSG00000287796_16 (sequence is synthesized)
ttcacgactagcctgggcaacatagggagaccccatttctacacacacacaacttgagaatgtggtttttgttaaaggaaaagtattttttttctagtttagaggttatttgaaggctcc

SEQ ID NO: 944829 - DNA, 120 bp, Artificial Sequence
  ENSG00000287796_17 (sequence is synthesized)
tttaagttgaaaggataaaaaagaatgacaggaaaaactgaatggatataaaaaattggggaaagaaagagaattgaaaaaattgtgagagattataaaatgttcatgcaaatcttttct

SEQ ID NO: 944830 - DNA, 120 bp, Artificial Sequence
  ENSG00000287796_18 (sequence is synthesized)
gtagtcaaagctgattgagattagatggatttgtttatattttattaaattaactttagtgttaataatacactgatgaaaagtacaatttggttttctcttttgaacaagattttcatg

SEQ ID NO: 944831 - DNA, 120 bp, Artificial Sequence
  ENSG00000287796_19 (sequence is synthesized)
tagtactaataagaaatggtaaaatatttgttcaccttttcagtaaaaaaggaagaagactttgcctcatgctgtctttattaggtcttttgattgtttggaaaacttgatctcctctct

SEQ ID NO: 944832 - DNA, 120 bp, Artificial Sequence
  ENSG00000287796_20 (sequence is synthesized)
atcaaatagtaaagggttttttttcactttttgaaatcttttaattatcattttgactaaatgaatgactaatattttatagtgacttgtgatcttattttgatatcaagtgttttaaac

SEQ ID NO: 944833 - DNA, 120 bp, Artificial Sequence
  ENSG00000287796_21 (sequence is synthesized)
ctttaatatttgacaaacatcccaaaatcaaatttcaaattctaaattaagtgttttttaagcttgaactaaatatttggacattccaaaaagagcccctggaagtccaagagagacata

SEQ ID NO: 944834 - DNA, 120 bp, Artificial Sequence
  ENSG00000287796_22 (sequence is synthesized)
ttaggcttatttggtatgttaaaattatatgggaagcattgtcaaataaaaagtgatgtctaactttctttgagttatattcatatggatatgttattaatgtattccaaaattgtatga

SEQ ID NO: 944835 - DNA, 120 bp, Artificial Sequence
  ENSG00000287796_23 (sequence is synthesized)
gattcctaaaatattatatatcttggtatattcagtaaattgcttaattctgatgctctttttctaaaagctctctgttcattctaaagtgatgtgtcttcaaggaagttcatgggaaag

SEQ ID NO: 944836 - DNA, 120 bp, Artificial Sequence
  ENSG00000287796_24 (sequence is synthesized)
actgataggacacaattgaaaacactggttatattacaaaagctttgactggtaattttgtgtcatattttcaaatgtgaccaggctgctttgaggaattgcagtttactttaaagccaa

SEQ ID NO: 944837 - DNA, 120 bp, Artificial Sequence
  ENSG00000287796_25 (sequence is synthesized)
cagacttggaaaaagactggccgggtaccatatctacactgttcccttacagggttcctgaccttgtgaaaagaaaactgagtaatgacctacagacatggttaatcagttatacccttc

SEQ ID NO: 944838 - DNA, 120 bp, Artificial Sequence
  ENSG00000287796_26 (sequence is synthesized)
tcctgacatacagctaatcaccatagactaatgcagacctccttatgaaacaggcgtttctacctccaagggaaaaagataacaaatctttggctgaccaactgatgtttatcagcaatg

SEQ ID NO: 944839 - DNA, 120 bp, Artificial Sequence
  ENSG00000287796_27 (sequence is synthesized)
cttcctcacatcaaatctttatcaaaatgaagaaatgtgaaatgtgatatacaaaacagtatcacttggttcagagctctaaaatggagtcaagaagccactctattactacctacacaa

SEQ ID NO: 944840 - DNA, 120 bp, Artificial Sequence
  ENSG00000287796_28 (sequence is synthesized)
catgaaaccctgcaggaaaaaaaaaaaggaacaggaacttgccttgaacctttgaactgggctaaactacaatgaccacatcttagaaagcagctgaatttcaccagcactgcaactcct

SEQ ID NO: 944841 - DNA, 120 bp, Artificial Sequence
  ENSG00000287796_29 (sequence is synthesized)
gcatagcaacaaccaatgtaccatggacttatgtactaagccagccacctccaccaatgataattctttcaaaacaacttgtgcaatcactctcggcatcctttgaaaaattcctactct

SEQ ID NO: 944842 - DNA, 120 bp, Artificial Sequence
  ENSG00000253369_0 (sequence is synthesized)
ggaccggctcaaggtcgcactaacagctcttgctaactcctgttccaggctgtttatctgggcctccaagtaccctgcttgcgcctggaggtctctcacccccaggtcctgctcaaagct

SEQ ID NO: 944843 - DNA, 120 bp, Artificial Sequence
  ENSG00000253369_1 (sequence is synthesized)
gtgcacttgggcccccaggcatgcggcttgctccggaaggtcccttacctgtggcactgagcatgtacttcctgcagtgcagttagaaatgcccatccgactctgcttgcaaagacatct

SEQ ID NO: 944844 - DNA, 120 bp, Artificial Sequence
  ENSG00000253369_2 (sequence is synthesized)
gcaatggcagttcacatggctcagatagctcacttctgcagagagctgaatttaagtgggacagggtagcaagaataattactttgacaatcattttgccacctgatgactgtgctgcct

SEQ ID NO: 944845 - DNA, 120 bp, Artificial Sequence
  ENSG00000253369_3 (sequence is synthesized)
gtcctgagctgagtgcagagagggagacacccttacaaatggagatttgctggatagaaatgtggccaaagagttcaataaaagggcacagctgcttaaagactgttaccggaaaggaat

SEQ ID NO: 944846 - DNA, 120 bp, Artificial Sequence
  ENSG00000253369_4 (sequence is synthesized)
cctgatccagacgccaagagagggttcttggactcatgcaagaaagacttcagaatacgagttttgaatttttgaattgctgttaaaactttcatcatgaacactgaagtgagtgaaaag

SEQ ID NO: 944847 - DNA, 120 bp, Artificial Sequence
  ENSG00000253369_5 (sequence is synthesized)
tttttttgttctcaggtccctggaccatgaagggccacatccaaggagctaccccaggaggcctctcatttgcatttgtccccgctaatgcaggacagagatcatggaagttgggcccga

SEQ ID NO: 944848 - DNA, 120 bp, Artificial Sequence
  ENSG00000253369_6 (sequence is synthesized)
ctggatgagatttgggggtctttggaagtggagaatgtgtttgccctggggaagagaggtgatgtctaggagacctcttcactcagggcaagctctatgacctgctttgactccagaatg

SEQ ID NO: 944849 - DNA, 120 bp, Artificial Sequence
  ENSG00000253369_7 (sequence is synthesized)
tggtagaagtggcatcacataaattgcagagcctaggcttcaagagaccttgcaacttgcctctcactgacttgaagtgctcccatcagagcatcttgtaaggagcaggtggagcatgtg

SEQ ID NO: 944850 - DNA, 120 bp, Artificial Sequence
  ENSG00000253369_8 (sequence is synthesized)
gacaagccatccccaccagcccctgagacatgtgagagaggccagaacaggccatccggaccccactgtgctggtggatgagacagcagaaggaatatcaacctaccaacagaatcctga

SEQ ID NO: 944851 - DNA, 120 bp, Artificial Sequence
  ENSG00000253369_9 (sequence is synthesized)
gaaatgctcactcttacttcaagctgctgcattttgatgttatgaaaccataaataacttatgaagtcatctttgctgacttaaagttttccataactttattataacatatcaaaatta

SEQ ID NO: 944852 - DNA, 120 bp, Artificial Sequence
  ENSG00000253369_10 (sequence is synthesized)
tgaaaaatgtgaaaagtagaaaactgatgaattttgcttcttcatatggtctttaagaatctcaaaggcactgaagttttttatcttttctgtcttagaataaaaaaccttgaatgaaaa

SEQ ID NO: 944853 - DNA, 120 bp, Artificial Sequence
  ENSG00000253369_11 (sequence is synthesized)
actgtggacggggtccctgggctttcccctagggtcccatcagctgcttatgttctaccttctgacggatcacaggaggagcctgcagcggaggagcctcctcctcctcagcatcagacc

SEQ ID NO: 944854 - DNA, 120 bp, Artificial Sequence
  ENSG00000253369_12 (sequence is synthesized)
acataatggggcatggtaaggactcccatgtccttgagataaaatgataaggaaaatacacactgctattagaataacaggcccagcttctgcacattttaattcccaaagttttcatga

SEQ ID NO: 944855 - DNA, 120 bp, Artificial Sequence
  ENSG00000253369_13 (sequence is synthesized)
aagacaatgattttttggtaccatgtttaactctacaagaatcagtagtgaaaactaaaaatgatactttgtgaaagttcattaattttgttttcagccagtggtggccttggtcagata

SEQ ID NO: 944856 - DNA, 120 bp, Artificial Sequence
  ENSG00000253369_14 (sequence is synthesized)
gaatcaaatctatgatactttttatcagaaatgcttatactgtgtacaaacccaaagtgatggctttcaaagattgaatttgattattttctgtatggtgcagatgaaaaattactacac

SEQ ID NO: 944857 - DNA, 120 bp, Artificial Sequence
  ENSG00000253369_15 (sequence is synthesized)
aggagaaggtgggttggaggtgctcacgagtaaccaggaaacagtctgaagtttttctgatacttctccttggtccaaccaaatgtgagatataaacacaaacttgggattccgttctta

SEQ ID NO: 944858 - DNA, 120 bp, Artificial Sequence
  ENSG00000253369_16 (sequence is synthesized)
tccagacgccaagagagggttcttggactcatgcaagaaagacttcagctggctgcagatgacagtgacaccctgggagttgagaaatgcttgtaagatggaaggaggctgtgtccctga

SEQ ID NO: 944859 - DNA, 120 bp, Artificial Sequence
  ENSG00000253369_17 (sequence is synthesized)
atgatcacctggaagagagccaccttagccaatgaaactcctgctatgaatgtttgctgagcaagaaatatacttactgctttatatgcctttgaagctataggttcatattgttaccac

SEQ ID NO: 944860 - DNA, 120 bp, Artificial Sequence
  ENSG00000253369_18 (sequence is synthesized)
atttataggcacagctgcttaaagactgttaccggaaaggaatcctgatccagacgccaagagagggttcttggactcatgcaagaaagacttcagttctcaggtccctggaccatgaag

SEQ ID NO: 944861 - DNA, 120 bp, Artificial Sequence
  ENSG00000253369_19 (sequence is synthesized)
gaatgtgtttgccctggggaagaggtgagtatgttcacaggacagttgtgagttattgtggtcagagggaaacctgggtcagatgggttacaaagatgggtgcaaaacctctctgttctt

SEQ ID NO: 944862 - DNA, 120 bp, Artificial Sequence
  ENSG00000253369_20 (sequence is synthesized)
ctcatgcaagaaagacttcagacaagtacagacaatcaccaggaactaaggaacaagaagcatccaaccctgcatctgtgggtttcctgaggtgactctcaattgtcatagaatacgagt

SEQ ID NO: 944863 - DNA, 120 bp, Artificial Sequence
  ENSG00000253369_21 (sequence is synthesized)
atcgaaaggctgtccaaaaatgtctgacttctgtagtgtgccttcgtagcactagagggttctgcagctgtgaaactgaaggcattggcaagaagccctccatcttcaaaccactttctg

SEQ ID NO: 944864 - DNA, 120 bp, Artificial Sequence
  ENSG00000253369_22 (sequence is synthesized)
ctaaggtgtggctctataaaaccactatgagctgggcttcactgagactgagttgtttcagtaggatcttccggaaaaacatgttccctcctttacctgggttgtcattctgagaacaat

SEQ ID NO: 944865 - DNA, 120 bp, Artificial Sequence
  ENSG00000253369_23 (sequence is synthesized)
cacacctccaattttggcttactaagcaatagcgttttaatgattttaagccaggatttgctcctcctttcctcagtatgagagcttaaccactggaggaaccaagaattcatgctggtt

SEQ ID NO: 944866 - DNA, 120 bp, Artificial Sequence
  ENSG00000253369_24 (sequence is synthesized)
gggttctgattccactttaacttactgtatagcctcatcccttgtttttctggagattctctttttctgcttcactgatttatatttacattaaaatcaaatgaggccatgtttctgaaa

SEQ ID NO: 944867 - DNA, 120 bp, Artificial Sequence
  ENSG00000253361_0 (sequence is synthesized)
atagcatcctactattgtttctgcctaaaataagcagcaataagaatgagtgtgaggaagaccacagcagcaggacccacctgtttctgaggcctagggagatgcagtgatagatttcag

SEQ ID NO: 944868 - DNA, 120 bp, Artificial Sequence
  ENSG00000253361_1 (sequence is synthesized)
cttattcctcattctcaggtttctgtaccttgaccctccatagagtgaacttctaggttctgagctgactccttggaaaccctagactccagggacgcgcttctagaacctgctcagatt

SEQ ID NO: 944869 - DNA, 120 bp, Artificial Sequence
  ENSG00000253361_2 (sequence is synthesized)
gctactcagttaacagcctggcccaggaggattgcaacacccagcctggctcccaggcaagctaaagagggcttgatgatgggaagaggttaaggggtacgtggagagaaagaaggatca

SEQ ID NO: 944870 - DNA, 120 bp, Artificial Sequence
  ENSG00000253361_3 (sequence is synthesized)
atcacagagaaggcaaaatttgtcctcctgactacaagatgccaagatacatttgtatcgagccactgaattctctaccccttctgtagaggtggttggggaagagctgcagtaggaagc

SEQ ID NO: 944871 - DNA, 120 bp, Artificial Sequence
  ENSG00000253361_4 (sequence is synthesized)
tgggtcccaagtaatgaaggacctttagaagcagaaggtgttagggtgggggcaaaggactgaactctgaccaaccagaagaaaggaaaaactggagttcctttcccctaggctccagcc

SEQ ID NO: 944872 - DNA, 120 bp, Artificial Sequence
  ENSG00000253361_5 (sequence is synthesized)
ctcaccagcagggactcaacaaacgccatctgtcagatgagtcatgggaccagaagcttgggagaagacatgcagagccaaccactaacaaaactggcaaatgaaataaatgcccagaaa

SEQ ID NO: 944873 - DNA, 120 bp, Artificial Sequence
  ENSG00000253361_6 (sequence is synthesized)
aagagccacccacaagatgcgcctgagccacaagccacaccgtgaacccagggcagctacgacagtgcctggtgcttggggagtgcttgacagattcaggttgaagaaacaaaggcagga

SEQ ID NO: 944874 - DNA, 120 bp, Artificial Sequence
  ENSG00000253361_7 (sequence is synthesized)
tgtctgagatgcccagcgtgggtgagtgcaccctccctccctggctctgctcctccccctccccggaaccaccaccccctcagccctgagctgccgatgccctcggggttctgttttcat

SEQ ID NO: 944875 - DNA, 120 bp, Artificial Sequence
  ENSG00000253361_8 (sequence is synthesized)
agtatccagctggctccacaggtggtagggagtgggagcttaaaaacgaagaaactgaaggggacagatgatcctgatgaaatggagactggatttttattttttaaaaaatacaagtga

SEQ ID NO: 944876 - DNA, 120 bp, Artificial Sequence
  ENSG00000253361_9 (sequence is synthesized)
cccctcagccctgagctgccgatgccctcggggttctgttttcattccaggctgtggatccggtcgtgggaagcaggtaggaaaccatgattctcggggttaaatgaagaaatatattta

SEQ ID NO: 944877 - DNA, 120 bp, Artificial Sequence
  ENSG00000253361_10 (sequence is synthesized)
gtgctcacagaaatttagaaatttagaaagccaaatattgggttagccgccaggaatggagagggaaaaaacccaaagcaaacagcagaggaaagaaattcctaccagacaaggtcctta

SEQ ID NO: 944878 - DNA, 120 bp, Artificial Sequence
  ENSG00000253361_11 (sequence is synthesized)
ttcattctcccaaccccaggtgcaggggcctgcaggggagagacccgctgaacttaagactctgatcaaaccccagactcggaccctgcgctgcccatggggccgaccgtcaatatctgg

SEQ ID NO: 944879 - DNA, 120 bp, Artificial Sequence
  ENSG00000253361_12 (sequence is synthesized)
attggcaatggcaccctagagctcactaagttgaccctaaagccctttgggagccaagggtgggggtggggaaggaataacaaagtagaaagttcctggattgaggtggaaaaatcagtt

SEQ ID NO: 944880 - DNA, 120 bp, Artificial Sequence
  ENSG00000253361_13 (sequence is synthesized)
tggtctccggtcagaactagtgactgtcccataaacaggttctgctggacttccagtcaagatggagcgtaaagatgggatcttgttctgttgcccaggctggtctccaacttctggctg

SEQ ID NO: 944881 - DNA, 120 bp, Artificial Sequence
  ENSG00000253361_14 (sequence is synthesized)
caagtgatcctccctccttggcctggcaaagtgctgggattacagggccgcacacatacagagctgaacttgtatcgccgtgtagatgaagacaaacacctttaggagatggcagagaaa

SEQ ID NO: 944882 - DNA, 120 bp, Artificial Sequence
  ENSG00000253361_15 (sequence is synthesized)
caaaatgggaaaccctcaggtctccaaatgactacaccaagcagaattgccccaccagcctgcaccattcatttctagactatgagcaagaagtacacttccatcttatttaaacaacca

SEQ ID NO: 944883 - DNA, 120 bp, Artificial Sequence
  ENSG00000253361_16 (sequence is synthesized)
cccctaggtctgcctttctttctcagggtctctatttacttctcatgcacttgactctctgcttccctctccctcatttccacaaaggggcccaagcttcacatgcatctcgcacccccg

SEQ ID NO: 944884 - DNA, 120 bp, Artificial Sequence
  ENSG00000253361_17 (sequence is synthesized)
caccttgtgggcaggaaatctgagcacaggcatttcctgtacgctgataaatgcccactgcaaagagccccagcctgaaggtggccctgtctcctagttatgtccctccacatccttatc

SEQ ID NO: 944885 - DNA, 88 bp, Artificial Sequence
  ENSG00000253361_18 (sequence is synthesized)
actaaaagtcatccttgacatccgtccaatcaatcacctcctatttatctcccaaattcattcttttttctttttgaaacagagtttt

SEQ ID NO: 944886 - DNA, 120 bp, Artificial Sequence
  ENSG00000253361_19 (sequence is synthesized)
aagtgctgggactacaggtgtgagccattacacccggcaaattcatttttataatcttgccacccccacaaccactgccctcatggaccctgggcacgcctcacccgaattacagaaatt

SEQ ID NO: 944887 - DNA, 120 bp, Artificial Sequence
  ENSG00000253361_20 (sequence is synthesized)
ttacagaaattccctcccagctggtaaaactgtttgtgtgtggctctccttcattccatcctccctggtttagccagagaaataattctaaaatgtacacatcccaaagcatctcatttt

SEQ ID NO: 944888 - DNA, 120 bp, Artificial Sequence
  ENSG00000253361_21 (sequence is synthesized)
cccaacacacacagttgggctgaaaaacaaggcaagctttctgtgaaccagaagcaagaacagagcccaaaatcactaaatggggctgtgactgacatgctgctgggctctgagtcccaa

SEQ ID NO: 944889 - DNA, 120 bp, Artificial Sequence
  ENSG00000253361_22 (sequence is synthesized)
agggttttagagaagccaggagcccagttaccttagaaagggcagtgactaagatgaacaccaggggtcttctggaggccaagaatgttctttttgtgctctgggggtttattacacagg

SEQ ID NO: 944890 - DNA, 120 bp, Artificial Sequence
  ENSG00000253361_23 (sequence is synthesized)
agcattcactttgtgaaaactcattgaggtgcccctttacgattcatgtgcgtttctgtatatctgttatatttcaatagaaatgtttacttgaaaaactttgtcctgggagaaagccca

SEQ ID NO: 944891 - DNA, 120 bp, Artificial Sequence
  ENSG00000253361_24 (sequence is synthesized)
gaggaagaccctacttttagatgctggagaccagggtagggtgaggtaaagtggggtggaaatagagcacagcctcaaagtgaggacccatgccaagccacccacagctcctcatctgga

SEQ ID NO: 944892 - DNA, 120 bp, Artificial Sequence
  ENSG00000253361_25 (sequence is synthesized)
ttggcatcattctggcacagaataaggaaccatgaaataacacgtaagagctggcgctggaacagcggcttaggaaaatgggtggaggcaaccacaaaactataaactgtgcattcagga

SEQ ID NO: 944893 - DNA, 120 bp, Artificial Sequence
  ENSG00000253361_26 (sequence is synthesized)
agagaagaaaaaaagacaaaaacaaaacaaatcaaagggggaaaactgccactagaaatggatctgcaaatcaaaattccaaaacacattttaacaatgaaaaagtctaatgctaagaaa

SEQ ID NO: 944894 - DNA, 120 bp, Artificial Sequence
  ENSG00000253361_27 (sequence is synthesized)
gacagtaaaatcaataaacaacattaattcattccagttgacatcagttttatagagcagaagtcataaaaatctaccaattttatagactagtactaaaatctatcagtttcatagagg

SEQ ID NO: 944895 - DNA, 120 bp, Artificial Sequence
  ENSG00000253361_28 (sequence is synthesized)
ataggttttgaagtatatatacatttacatttctcaaagaaatcataaaaacatattaaaaataagcaataaatattagatgaaaataggaatggaacaagaagaagtgggaataaaaaa

SEQ ID NO: 944896 - DNA, 120 bp, Artificial Sequence
  ENSG00000253361_29 (sequence is synthesized)
tgttgttattgttgttgttataggagcttagcttttactctaagaaatacagctactcaactcacttcattaggatcttaactataatatcaaaacctcctaagcacagaataaaaaata

SEQ ID NO: 944897 - DNA, 120 bp, Artificial Sequence
  ENSG00000253361_30 (sequence is synthesized)
cagtagagcaatatcatttatgatcatagatgcagagcttccaaatgaaatactagcatattcaaggaaagatatatataccatgacctagttgtgtttaatttctggaattcaaaaatg

SEQ ID NO: 944898 - DNA, 62 bp, Artificial Sequence
  ENSG00000253361_31 (sequence is synthesized)
ccatgacctagttgtgtttaatttctggaattcaaaaatggaatgtttgacataagaaaatc

SEQ ID NO: 944899 - DNA, 120 bp, Artificial Sequence
  ENSG00000253363_0 (sequence is synthesized)
gcatttctcctagtgcgcaggctcgttggaggttttccggggaccctttccaacctggctgtctcaaagggaaccagattatgcaaggctttgtgttccagcttaggctaaaccaagaac

SEQ ID NO: 944900 - DNA, 120 bp, Artificial Sequence
  ENSG00000253363_1 (sequence is synthesized)
aactttatcctaaggtcaagaggaaatatttgataggttctaaagaagggaggaggaaactgagacccaggcagaagaatttgttcttcaaactgcgaaagcagagctaccccaattcat

SEQ ID NO: 944901 - DNA, 120 bp, Artificial Sequence
  ENSG00000253363_2 (sequence is synthesized)
tcatccacacacatagtatttcagagaaaaaaagaaaaccctatgatggcaagcagtcataaggatgaatgagtggcttgatctcggctcattgcaaccttcgcctcctgggttcaagca

SEQ ID NO: 944902 - DNA, 120 bp, Artificial Sequence
  ENSG00000253363_3 (sequence is synthesized)
cgagtagctgggattacaggcaccctgcatcacaacggcatcacgcattcgaatttagtattttagagtgatcttaataggttttctaccaggtgaactacgtggtcatggaagcactgt

SEQ ID NO: 944903 - DNA, 120 bp, Artificial Sequence
  ENSG00000253363_4 (sequence is synthesized)
gtgaactacgtggtcatggaagcactgttgatggtgtggcactactgcctgttcttcaaaggaagtcagggacccccaaatggagagaccagctggagccgaggcagaagaacataaatt

SEQ ID NO: 944904 - DNA, 86 bp, Artificial Sequence
  ENSG00000253363_5 (sequence is synthesized)
agggatatgtgagtaggagaaatatcactgaattctttttccagcaaggaatattaataattgataactgtggggaaggaatgcat

SEQ ID NO: 944905 - DNA, 88 bp, Artificial Sequence
  ENSG00000253363_6 (sequence is synthesized)
atgtgagtaggagaaatatcactgaattctttttccagcaaggaatattaataattgataactggtagacagccgctctggaagtgtc

SEQ ID NO: 944906 - DNA, 120 bp, Artificial Sequence
  ENSG00000253363_7 (sequence is synthesized)
tctcctgcagtaccctcaggcttactatcatcctagtaagcctgataaattccagcctggtaaattctaatcagaccagttgtctgctcttgaaccctgcttcctgttaacatgtttatc

SEQ ID NO: 944907 - DNA, 120 bp, Artificial Sequence
  ENSG00000253363_8 (sequence is synthesized)
aagacaatgtgtgcacagcgggacatagaccttcatcagtaattctaattttgccttgccttgcgatctttattgccctttgaagcataagcatatgatccttgtgacctactccctgtt

SEQ ID NO: 944908 - DNA, 89 bp, Artificial Sequence
  ENSG00000253363_9 (sequence is synthesized)
cgtacctcccctccccttccagctcggggtcgccatcacggtcctaccaatatgtgatggcacccccggaggcccagctgtaaaatttc

SEQ ID NO: 944909 - DNA, 120 bp, Artificial Sequence
  ENSG00000253363_10 (sequence is synthesized)
ttcttcaaaggtgagctattatgcaatttacaaaagcaggaagatggttgtcttagaaattaggacaccttagagttggttctggttcaaccgttcactagcaaaatggccttgcatgag

SEQ ID NO: 944910 - DNA, 120 bp, Artificial Sequence
  ENSG00000253363_11 (sequence is synthesized)
ttacccgcaagacataagggtctgaggtgccttactcgctctagctctaattcttagatgacatgacttgagtgcacggggtatgtgtagaggtagcatagagtaggggagcatggaaga

SEQ ID NO: 944911 - DNA, 120 bp, Artificial Sequence
  ENSG00000253363_12 (sequence is synthesized)
taaaaacagattttggagctgggaagttcatcttcaaatcttggctcagctacatatttattagttgaatggacacaatcatgtaatctctttatgcatgtgtttcttcatttttaaaga

SEQ ID NO: 944912 - DNA, 120 bp, Artificial Sequence
  ENSG00000253363_13 (sequence is synthesized)
gagggtaaaagggcacatccccctaagattgctgtaagtaagtattaaacataaaaacataaggaaagatagaacaagcatgacacacttactagcagattttgcaaactaaaaatggca

SEQ ID NO: 944913 - DNA, 120 bp, Artificial Sequence
  ENSG00000253363_14 (sequence is synthesized)
atttaatttcctttgatatttaattattttcaagtaaatgtttgaaaaccatttatttgtggatgacaaagaaataaaacagtgttacaccttcagttgaaagaattctagaatgtaatt

SEQ ID NO: 944914 - DNA, 120 bp, Artificial Sequence
  ENSG00000253363_15 (sequence is synthesized)
agaaattctggattttaatcctgctgtgtggatgacaataaaaatagaatttatcaaaatttatgcagtgaaactaaagttgtttcagagtgcagtttatggtatatatatatatacaca

SEQ ID NO: 944915 - DNA, 120 bp, Artificial Sequence
  ENSG00000253363_16 (sequence is synthesized)
cacacacacatacacatatgtatacattttttaaaaaagaaagactagaaattaattacttaaaaatcaaaatcaagatattaggaaaatgacagtgtagtaaagccaaagaaaattaaa

SEQ ID NO: 944916 - DNA, 120 bp, Artificial Sequence
  ENSG00000253363_17 (sequence is synthesized)
ttggcttccctgtatctaaatctagacgcaactctgttctctgctcagcactgcctcttggctatgggtagtgattgaattaaacaaaacaacaacaacaacaaaaaccaaacatgaaaa

SEQ ID NO: 944917 - DNA, 120 bp, Artificial Sequence
  ENSG00000253363_18 (sequence is synthesized)
tgttgatggtgtggcactactgcctgttcttcaaaggttttcataaggaggtcaaacctagcactaagactaaaagagagaagcaacacaatgttgccaaaaaggggagtcatgctggtt

SEQ ID NO: 944918 - DNA, 120 bp, Artificial Sequence
  ENSG00000253363_19 (sequence is synthesized)
aaaggggagtcatgctggttattatggtatcctgctctagaagtttgatcagacgaactaagctgactggcccaggtgctggctcagagtctgtctctgtcacccaggctggagtgcaat

SEQ ID NO: 944919 - DNA, 120 bp, Artificial Sequence
  ENSG00000253363_20 (sequence is synthesized)
ttggccaggctggtcttgaactcctgggttcgaataagtgctgggattacaggcatgggccatggcgcccagccttctatgttaattttgtatcctttttttctggattttttcatttgt

SEQ ID NO: 944920 - DNA, 120 bp, Artificial Sequence
  ENSG00000253363_21 (sequence is synthesized)
tgtatcctttttttctggattttttcatttgtttgtattacatttattattgattatcttgggttttccaggcatataattacaggcacatctgcaattagaaataactttacccttttc

SEQ ID NO: 944921 - DNA, 120 bp, Artificial Sequence
  ENSG00000253363_22 (sequence is synthesized)
tccttttaagacttatgcttctaatactattttaaaagactgaatctacttcataatatctttaatacatagttaaatagtagtaaaaattgtgagcaacatttccttagaaaagcctac

SEQ ID NO: 944922 - DNA, 120 bp, Artificial Sequence
  ENSG00000253363_23 (sequence is synthesized)
agtttttttccattaggtaaaattctggattttaatctgagttatgtacatttttatcatgttaaggaagagccattgatttatattttatttgttttaatcagaaataagtgttggttt

SEQ ID NO: 944923 - DNA, 120 bp, Artificial Sequence
  ENSG00000253363_24 (sequence is synthesized)
tttcaaagactttttcaatagcttaatagacaattatataatttttctcagagatattacattactgtggtcatggaagtttttaaaaatatgtattctgtattttatttccaaattttg

SEQ ID NO: 944924 - DNA, 120 bp, Artificial Sequence
  ENSG00000253363_25 (sequence is synthesized)
tgcatgtaactatgacagaaaattaccctttagtttttttttaattgtgcaagctttattgaatttaaatagaagtgttttactggcttcctaataaaaatttgaatatattctttctaa

SEQ ID NO: 944925 - DNA, 120 bp, Artificial Sequence
  ENSG00000253363_26 (sequence is synthesized)
cctgattcaaggaatgtagtggcctctagcatttggcaaggaagaagggaaggaacacaccctcacaggctcttccctggctgcattcatgcactgtgtcccgcttctcagtggaaccag

SEQ ID NO: 944926 - DNA, 120 bp, Artificial Sequence
  ENSG00000253363_27 (sequence is synthesized)
ctatcagcaccatggacagaacccgggagattgggtcctcagagcaagtaaaatgattcaggagtgtctggccaaggcactaactacagagatttttatttcatgtgaataaacagtttt

SEQ ID NO: 944927 - DNA, 120 bp, Artificial Sequence
  ENSG00000253365_0 (sequence is synthesized)
atggacatgagggtccccactcagctccaggggctcctgctgctccggctcccagatgtgatttccagatgactcagtctccatcctccctgactgcatctgtaggagagagagtcacca

SEQ ID NO: 944928 - DNA, 120 bp, Artificial Sequence
  ENSG00000253365_1 (sequence is synthesized)
atgctgcatccagtttgcaatctggggtcccgtcacggttcagtggcagtaggtctgggacacatttcacacattctcaccatcaggagcctgcaacctgaagatgttataacttattac

SEQ ID NO: 944929 - DNA, 120 bp, Artificial Sequence
  ENSG00000253364_0 (sequence is synthesized)
ccatcttgttccttctggagcaccagcctcagaagccttcctgtgcagggtccactcggccagccctgggaccctcctggtctcaagcacacacattctccctgcagccagacctgcccc

SEQ ID NO: 944930 - DNA, 120 bp, Artificial Sequence
  ENSG00000253364_1 (sequence is synthesized)
tgcctgtgagctcagacctgagccttggaacgccttcccttctccatcccagctcgcctttgccagctgctcagcgggatgaactcacactcccctccctgcaccatgagtgagagccag

SEQ ID NO: 944931 - DNA, 120 bp, Artificial Sequence
  ENSG00000253364_2 (sequence is synthesized)
cgtggagttcacacccctggggacctgagggccgagctgtgatttcctaggaagacaaatagcagctgacggcgtgggcaagtctgcccacatgtaccgcgccaaaacaggaagggctga

SEQ ID NO: 944932 - DNA, 120 bp, Artificial Sequence
  ENSG00000253364_3 (sequence is synthesized)
gacccccacctcggctgggagcacgaggaacctgacgggatgcggcagagccggccgtggggtgatgccagcatgggcaggacccacctgagctgaggaggcagtagaacgagggaggag

SEQ ID NO: 944933 - DNA, 120 bp, Artificial Sequence
  ENSG00000253367_0 (sequence is synthesized)
gaagtcctgtgtgaagttcaccgggggagacagaggaaataacggtgcagccgggggctatctgagtctctcctgcaaagactctggattcaccttcactgattgcagcataagcttggt

SEQ ID NO: 944934 - DNA, 120 bp, Artificial Sequence
  ENSG00000253367_1 (sequence is synthesized)
cagcaagctccaggaccagggttgatgtgggcagcaacagggagaaattgaagaggaagctctcagtggtgccctccatgaatacaaagaatcttcacagtccccaggacacccttacgt

SEQ ID NO: 944935 - DNA, 120 bp, Artificial Sequence
  ENSG00000257470_0 (sequence is synthesized)
gccacatggaacatctaagcttctctactcaccagacggcctcaaatcatggggagcaccaaaggcttgggacttatgtcgttgtatctttcatccacactagtctttctgttggaatgc

SEQ ID NO: 944936 - DNA, 120 bp, Artificial Sequence
  ENSG00000257470_1 (sequence is synthesized)
ctttgccaattttgactgcctggcaaactcttattcatccttcaattctcaggtgaaaacaccatttctgatgtttcctccatgtagagggatatctatcagacattctacctggcgtct

SEQ ID NO: 944937 - DNA, 120 bp, Artificial Sequence
  ENSG00000257470_2 (sequence is synthesized)
tcaattgtccttgcactgtcagatgcctttctttctgaaggatttccttaatccgctgtggtactttaagtggctgtcttgataacaccaaatgtcatctggcaagtgaatgaccttacc

SEQ ID NO: 944938 - DNA, 120 bp, Artificial Sequence
  ENSG00000257470_3 (sequence is synthesized)
tgctatccacatatattgtcagagggaactgtgaactttgttttggctttaattttaagagcctgaatcccaaggcagatatcacaaacatgaagacctatcctattcctgcttctgtac

SEQ ID NO: 944939 - DNA, 120 bp, Artificial Sequence
  ENSG00000257470_4 (sequence is synthesized)
attgctggagaataatagaattattgctctttttatttgtgtttatttttctatttttggaagagctactcattgttaagtgatagagaaagaatgccaataaaccaatacctgggtgaa

SEQ ID NO: 944940 - DNA, 120 bp, Artificial Sequence
  ENSG00000257470_5 (sequence is synthesized)
aattttgactgcctggcaaactcttattcatccttcaattctcagagggatatctatcagacattctacctggcgtctgctgctccatcatcactgcatccatcatcaccagaggagtct

SEQ ID NO: 944941 - DNA, 120 bp, Artificial Sequence
  ENSG00000257470_6 (sequence is synthesized)
tgtggagaatagagaggcccaaagagagatagatggaggaacagctggttggtggagcagtcagaaggcatgcaatatttatcaagtccactatctaatgtgggcacagtttgtggtacc

SEQ ID NO: 944942 - DNA, 120 bp, Artificial Sequence
  ENSG00000257470_7 (sequence is synthesized)
tcaaaacagttgcaatagtaacatcaaagataactgatggcagatcaccatagcagataaaataataatggcaaagttcgaaatatagtgagaactaccaaaatgtggcagagatgtaaa

SEQ ID NO: 944943 - DNA, 120 bp, Artificial Sequence
  ENSG00000257470_8 (sequence is synthesized)
gcgagcacatactgttgggaaaatggcactaatagacttgttaaacacagggttgccacaaactttcaatttgtaaaaaatgccatatatgtaaagtgcaataaagtgaggtatgcttgt

SEQ ID NO: 944944 - DNA, 120 bp, Artificial Sequence
  ENSG00000257470_9 (sequence is synthesized)
cagatgatgatggcacatagcccatgtcctgctgtgggattaaaggacagcattaccatacttcaaaaccaaaataccaaattataaagatgcatccaaaagggatatctatcagacatt

SEQ ID NO: 944945 - DNA, 120 bp, Artificial Sequence
  ENSG00000257470_10 (sequence is synthesized)
catccatcatcaccagaggagtctcctctccttctgtggtctcatgaccagaaaatggaagaagttaaaagcttattggattgacaaaaaaaaaaataaataataataataacaaaaaaa

SEQ ID NO: 944946 - DNA, 120 bp, Artificial Sequence
  ENSG00000257472_0 (sequence is synthesized)
gctgggtaatgacagttacttttctgtctaagtggacaccgatcttccccatttggcaaagagtcattaaggggccactcttactcatgatgctgtgagatatttaacactctgttgccc

SEQ ID NO: 944947 - DNA, 120 bp, Artificial Sequence
  ENSG00000257472_1 (sequence is synthesized)
tggagaggacagtctagtagaagttatatgtggcctgacaaagcctgcccctccaatacccctgttatgcagagctggtctctgatgaaaggctgaacaattgcagggaggtcaaggagc

SEQ ID NO: 944948 - DNA, 120 bp, Artificial Sequence
  ENSG00000257472_2 (sequence is synthesized)
ctcctagcaggagacattattagaaccttcctgatgggttaggatagaccccacaagaagcctggaggagaaaaggacatcaaaaattccaaaggggaaactcaccatgagaaaagggac

SEQ ID NO: 944949 - DNA, 120 bp, Artificial Sequence
  ENSG00000257472_3 (sequence is synthesized)
agtctagactgatgatccagtgttaccagcaggattaagggtacagaggtgtgagaaggctggtcccatgtatcccatggctgagactagaaactcttctggttgtgggtgtgatttgag

SEQ ID NO: 944950 - DNA, 120 bp, Artificial Sequence
  ENSG00000257472_4 (sequence is synthesized)
aacaatgactgagcactatgaactaaaagagctgtaatcttgaagtccaagtcctaggtccatgaagaagacctaagtcagtgagagaatccctgcagcagtggggaagtggctgctggc

SEQ ID NO: 944951 - DNA, 120 bp, Artificial Sequence
  ENSG00000257472_5 (sequence is synthesized)
agaagcagcaatattggcagaccacttggactgctcagttttttctccgcttgcttttagaactgggacttagcccttttggaatgaatgaagaccagagtgttcttggcaatcttggat

SEQ ID NO: 944952 - DNA, 120 bp, Artificial Sequence
  ENSG00000257472_6 (sequence is synthesized)
gtttagaagagacctgcggtcaagaagactgccacctagtgggtatgacaagacttaggtatagaaatcatctggagaaaaacacaagcagcacataaccaaatgtttaatccacatgac

SEQ ID NO: 944953 - DNA, 120 bp, Artificial Sequence
  ENSG00000257472_7 (sequence is synthesized)
tccaagacacctgggtttaattctacaaacaagtacaaaggcctacaaaaagctaggctttaagcagagtacttgcagggacattaatggagtagaagaactaaaggaggtaaagatttt

SEQ ID NO: 944954 - DNA, 120 bp, Artificial Sequence
  ENSG00000257472_8 (sequence is synthesized)
tctatcaatgacatatatgcctcagataatccaagatgactgagaagagaggtgcaatgttgtaggcccaagatgacactgctcactttttgacgtgctaggcccattcatttcttacac

SEQ ID NO: 944955 - DNA, 120 bp, Artificial Sequence
  ENSG00000257472_9 (sequence is synthesized)
ctaaaattccatcgtctacaagccaacagtcttgcgtggtgagatgtgaataagtcctatgcagtaagtcttcacgcattaaagaaaatgagaatcagaggtcacaaagacagttgtagc

SEQ ID NO: 944956 - DNA, 120 bp, Artificial Sequence
  ENSG00000257475_0 (sequence is synthesized)
gtggaacaaacacgggcacctactttaggtttattgattttgctttccaagggctaattcctttaaacctgctgcttatattttgactgagtcagtgctgctgctacagttaaataagtt

SEQ ID NO: 944957 - DNA, 120 bp, Artificial Sequence
  ENSG00000257475_1 (sequence is synthesized)
gactgagtcagtgctgctgctacagttaaataagttgaagatcttgtaaggaattttagcctgtttttttaagactcatctaacaggtgggtggatcatttggggtcaggagtttgagac

SEQ ID NO: 944958 - DNA, 83 bp, Artificial Sequence
  ENSG00000257475_2 (sequence is synthesized)
ggttaacaagagtgagactccctctaaaaaaaaaaaaaaacctttgcatatgagctgcagcaataaaagtgctatgagaccca

SEQ ID NO: 944959 - DNA, 120 bp, Artificial Sequence
  ENSG00000257475_3 (sequence is synthesized)
ttgcatatgagctgcagcaataaaagtgctatgagacccaacctctctgtaaccgtattctttgaaagctgtggaataaggccaagtgcagtggctcacatctaatcccagcactttgga

SEQ ID NO: 944960 - DNA, 84 bp, Artificial Sequence
  ENSG00000257474_0 (sequence is synthesized)
agaccatcattggttttcatggagacaaaaggtggagaaggacagtcccgtgaagtggatgcaacagttgaaggtaacagtaag

SEQ ID NO: 944961 - DNA, 120 bp, Artificial Sequence
  ENSG00000257474_1 (sequence is synthesized)
agcaggtgaagagagaaaaagtacaggaaaacaaacaaggatggaagtatggtacaggagggtgcacagtgaatagaagaaaatgctatggaagactactcctcaccgagcaaaacccga

SEQ ID NO: 944962 - DNA, 120 bp, Artificial Sequence
  ENSG00000257474_2 (sequence is synthesized)
ctaggtggaacgtggactgaaggtggagatgaattcaagagttttacggagggcacctgtcacctaatcacagcgccaacgacgctaccaagaaagcatcatggccttttcttttacagg

SEQ ID NO: 944963 - DNA, 120 bp, Artificial Sequence
  ENSG00000257474_3 (sequence is synthesized)
ggcttagcggctgaagactgacactgccggatcacctcggaagccccctagaccatcatggacgccgagcttcaggtggttttcatggagacaaaaggtggagaaggacagtcccgtgaa

SEQ ID NO: 944964 - DNA, 120 bp, Artificial Sequence
  ENSG00000257474_4 (sequence is synthesized)
gcagaggcctctcattaccagactaagtcccaaccaaccaaatcatcttcctcatttgaaattcctctaagtgtcacaaaggttgttgtgtttgtgatgtgggttttgactgtcctcatg

SEQ ID NO: 944965 - DNA, 120 bp, Artificial Sequence
  ENSG00000257474_5 (sequence is synthesized)
ttaccagaaagaggtcctgatccagaccccaaaagagggttattggatcttgcacaaaaaagaatttgaggcgaatccataaagtgaaagcaagtttactaggaaagtaatggcttttta

SEQ ID NO: 944966 - DNA, 120 bp, Artificial Sequence
  ENSG00000257474_6 (sequence is synthesized)
ctaggaaagtaatacaggaatggctactccatagtcagagctgccccacaggttgctggttgcccacttttccggttatttcttgatgatatgctaaacaagaagtggattattcatgcc

SEQ ID NO: 944967 - DNA, 120 bp, Artificial Sequence
  ENSG00000257474_7 (sequence is synthesized)
aatccaagatttggtacactgggacaaataaaaacacatagctatgaaagggtcgatgagatcccatttgtaacttggctaaatagagttgtttcagtacctgacaacttgagttcaatc

SEQ ID NO: 944968 - DNA, 120 bp, Artificial Sequence
  ENSG00000257477_0 (sequence is synthesized)
gccgggtcttctgggcatagggactcctagatgagtggggcaggggctgaggaatgcaaatgagatgtcagtgtgcccttccctcagcccattcaaagtctgtagccctggattgaatga

SEQ ID NO: 944969 - DNA, 120 bp, Artificial Sequence
  ENSG00000257477_1 (sequence is synthesized)
gagagcagggctggaaggactccctacccccacctcagcctcgcttcccgctctgcgtccctacttggctgtccttgcttcagtctgcccctgccccacctcccacctccagctactgcc

SEQ ID NO: 944970 - DNA, 120 bp, Artificial Sequence
  ENSG00000257477_2 (sequence is synthesized)
ctacaagtcaaggaatgtttgggccccaggggtagagctgggggttggataagggtaagactgcacaggggccagatgggctggtttggagaagggtaatgagatcccaggaagagagag

SEQ ID NO: 944971 - DNA, 120 bp, Artificial Sequence
  ENSG00000257476_0 (sequence is synthesized)
taccaggcactttacctgtgctgtgatcatgtaatcctgtcaagcaaaacccagcaggaagatagaagacaatagagccgtgattttgacccagcctcccaggacacagatggggtgaag

SEQ ID NO: 944972 - DNA, 120 bp, Artificial Sequence
  ENSG00000257476_1 (sequence is synthesized)
cagtggaggaataagccttcagttgcataccgctctgtgcattggatgggaggattttgaaacttttggaagctccatactgtggctttattccatgaatccaccagcgctgtgcaccaa

SEQ ID NO: 944973 - DNA, 120 bp, Artificial Sequence
  ENSG00000257476_2 (sequence is synthesized)
agtttctctgtggagggagaacatatttttgcagagcaagtacagataagaggttgggtgcctgaagcctggataataatagaatgacagctgatgattcatcagtgctcttcagagcca

SEQ ID NO: 944974 - DNA, 120 bp, Artificial Sequence
  ENSG00000287863_0 (sequence is synthesized)
agacccagatcagcttaggcataagcaacaagaccccaaacagaggcaaggatgtgtcagctttcccttgagtcaggtggaccagagggaggatcaggcctgggatcatgttgagagggt

SEQ ID NO: 944975 - DNA, 120 bp, Artificial Sequence
  ENSG00000287863_1 (sequence is synthesized)
tctctttaggaggtctgcttggagattgagccaaatgctacaagggaatctactactggaggtgcagggcttaagggaggggacagaaagtggcaattgaaggaagcaccaccaggatgg

SEQ ID NO: 944976 - DNA, 120 bp, Artificial Sequence
  ENSG00000287863_2 (sequence is synthesized)
tgggagctgcagtgggagattcctggtggggtgagtttgggacactcttcaagaaacccacaaaatttccagagacaatcggtcttgagcatccaccaaatccaaatgacacaatgccag

SEQ ID NO: 944977 - DNA, 120 bp, Artificial Sequence
  ENSG00000287863_3 (sequence is synthesized)
atcatgacgcaagactgtgccagtttctcctaatctcctttgcccctggagcaccactctgaaagggtcagaaactacagccagccaatggccagagcttcagcgctagcacctgtgtta

SEQ ID NO: 944978 - DNA, 120 bp, Artificial Sequence
  ENSG00000287863_4 (sequence is synthesized)
tcaagagaagctgagtccagaacacgtgatgggaagcatgtgggaacattgtgatgacattggacccacccagatgatcccagatagtctcaccatctcaaggtcagctgattatcaacc

SEQ ID NO: 944979 - DNA, 120 bp, Artificial Sequence
  ENSG00000287863_5 (sequence is synthesized)
ttaattcagtctggaacctcaagtctcccattgccatgtgacataacatagtcacaggttccaaggattaggatgtagatatctttggggggctattattctccctatcacaaaagggaa

SEQ ID NO: 944980 - DNA, 120 bp, Artificial Sequence
  ENSG00000287863_6 (sequence is synthesized)
caccagagtcttcagtttagcaatcttcaaggaatgttgacaaagcaagaatctgaggctttgagaatgtaggtaattttcccgaagacattctgcaagtaggagatagagctggaacat

SEQ ID NO: 944981 - DNA, 120 bp, Artificial Sequence
  ENSG00000287863_7 (sequence is synthesized)
gaccagatctgtctgccaagtaagcccaggctcatcctccacacgctgcccccatcaggaggcaacctggccccttctactgaatctctacatcagatggagcctgcatatgactcagca

SEQ ID NO: 944982 - DNA, 120 bp, Artificial Sequence
  ENSG00000287863_8 (sequence is synthesized)
atttcagggcatggtggtgattggaaagagtcaggacagttggcctttacttcatattgcatcacaaccactaagtggctttgggaagtttgctaaaactttcaggttctaaggatcctc

SEQ ID NO: 944983 - DNA, 120 bp, Artificial Sequence
  ENSG00000287863_9 (sequence is synthesized)
ggctgtgaaaccaggaacttggactagatggtgtctaagacatctttcagttctaaaattctataattgaatggtcttatgggtaaaaccactttgctgcagaacagtgccactcagagc

SEQ ID NO: 944984 - DNA, 120 bp, Artificial Sequence
  ENSG00000287863_10 (sequence is synthesized)
atagtttgtcgacctctgtcagtccagagtattcggtacctgtccatgacaagataaggagcttaagccaaaatgttaaccaactacatcagtaagtgcactgttcagtactgctgccat

SEQ ID NO: 944985 - DNA, 120 bp, Artificial Sequence
  ENSG00000287863_11 (sequence is synthesized)
ttgattttttgtagcaaggctttcgtggtgaaggaagcagtgtgttgatttacttcctggcataatcttcttatctcattgcagattgttagcaaatagttcctggatgagattctgaat

SEQ ID NO: 944986 - DNA, 120 bp, Artificial Sequence
  ENSG00000287863_12 (sequence is synthesized)
aatgctgatgtagaaaaaacattaaagttcagaggtgaatatgtgcttaatatctgaaaatttttagagaatgacagctggttgttcttgcctcacagaaaggaatagtatccagtaagt

SEQ ID NO: 944987 - DNA, 120 bp, Artificial Sequence
  ENSG00000287863_13 (sequence is synthesized)
atttgtaaaaatacaaatgatgaaactatctttgggatctgtgatagactgcagtatttcttccagattatttacactctccctgcaagaaaattatacatccaggtctactgccatggg

SEQ ID NO: 944988 - DNA, 120 bp, Artificial Sequence
  ENSG00000287863_14 (sequence is synthesized)
ccttcctgtggaatacatttcttcccactattgacatcagacttgggtccagggacttgccttggttaatggaatgtgagcagatggcttataccatgtctcagcagaagttttggaagt

SEQ ID NO: 944989 - DNA, 120 bp, Artificial Sequence
  ENSG00000287862_0 (sequence is synthesized)
gcagaccggcgcatttcagagtcagcgactagcggatacccatgggctccgggctattgtaccaccgagaggtgtaaacccaactggagtttgctgaaggcaagcttccaagttcctact

SEQ ID NO: 944990 - DNA, 76 bp, Artificial Sequence
  ENSG00000287862_1 (sequence is synthesized)
caactggagtttgctgaaggcaagcttccaagttcctacttcagaagctttctttcctgccaacttgtgaagaagg

SEQ ID NO: 944991 - DNA, 120 bp, Artificial Sequence
  ENSG00000287862_2 (sequence is synthesized)
tgacatacacctaagatattcaaactccagcttgaaggtcaattggatctgccgacatatgttgctgattttgtaacatgaaagccagctaagaaaaacagatcagtgaaatgcatattc

SEQ ID NO: 944992 - DNA, 120 bp, Artificial Sequence
  ENSG00000287862_3 (sequence is synthesized)
ttcgtattcttaatttcagccctatccaaatgtttacagaatagtttgaagagatttgcagtttcttgttatcagtcttattaagccttggcaaacctttaataacaagtctatcaacaa

SEQ ID NO: 944993 - DNA, 120 bp, Artificial Sequence
  ENSG00000287862_4 (sequence is synthesized)
cccaccagggatttgattttagtcttggagtgcctgaatttttacgctattgaacaatttttaattggaagcaccgggaccttttctgatcagttgtccacgttgcctcatgaatgggtg

SEQ ID NO: 944994 - DNA, 120 bp, Artificial Sequence
  ENSG00000287862_5 (sequence is synthesized)
gcattcatgctcagcttgaaaaggcaatggcagctggggaaaaaaataaggctttgtgtaagccgagaagagggcaggcaggcaggcaaacagcaagattcccctagaagtagctttagt

SEQ ID NO: 944995 - DNA, 120 bp, Artificial Sequence
  ENSG00000287862_6 (sequence is synthesized)
gtgggtgttttaagccacacagaaaaaagtaaactagaataatcaccaccttgcacttgttttatgtttccatggtttaacttaaaacactggcacaaggagacaactaccattctaaag

SEQ ID NO: 944996 - DNA, 120 bp, Artificial Sequence
  ENSG00000287862_7 (sequence is synthesized)
tcagaacctcagttaaactagaattgtgggtcagatccatgtctgccaactacataggacacttggaagtgcaatttagaaagagagaatatagtagcagtttccccgctagtaaatcct

SEQ ID NO: 944997 - DNA, 120 bp, Artificial Sequence
  ENSG00000287862_8 (sequence is synthesized)
atttccatctgctcttagagtaaaataccaacttctacatttgtgtttcaaagctctctctaaaataaccaatcctacacatccagttctgcatgagagtcagggctctgaagccagatt

SEQ ID NO: 944998 - DNA, 120 bp, Artificial Sequence
  ENSG00000287862_9 (sequence is synthesized)
atctgggctcaaattccacctccatcatttaccaagttgtatcaccttgcacaagtcacttaacctctgtgtgcctttgtcttctccttgtaaaatgcagattaaaatattgcctctatt

SEQ ID NO: 944999 - DNA, 120 bp, Artificial Sequence
  ENSG00000287862_10 (sequence is synthesized)
acatgattgttatgaagattaactaagttaatatgtgaatgttcttaaactggcctaaaacttagtgagaataagcacatataaatgcttgagtaagggatgtcccactgtactacagtg

SEQ ID NO: 945000 - DNA, 120 bp, Artificial Sequence
  ENSG00000287862_11 (sequence is synthesized)
cattatgttccttcctttctctctctactcatggttttctgtctacttaaaattctttgcaaggttagaaatggaagtagtcagaaaccagaaagctagccagaatgaaaatcactgaag

SEQ ID NO: 945001 - DNA, 120 bp, Artificial Sequence
  ENSG00000287862_12 (sequence is synthesized)
cagaaagactagattgtccttccagaagaaggatctgttcagaattctcccagaactttccagcctctatacatttgcttatttagttctccttttctggtatgcctttccttcttctat

SEQ ID NO: 945002 - DNA, 120 bp, Artificial Sequence
  ENSG00000287862_13 (sequence is synthesized)
ctattcaaaacctactcagtctttcaaaatcaagatggaattctctgtgatgcctttctcaaatgctttggacttactcatgttttcatgaactgtatctcctattgatctgccattttt

SEQ ID NO: 945003 - DNA, 120 bp, Artificial Sequence
  ENSG00000287862_14 (sequence is synthesized)
tggtccttaattatataccaatttgtgttgcaaattaatatttgctttcatattagtcttatttcccccaaatagatggttagcttatcaagcacaagagcagagatttatcttatatct

SEQ ID NO: 945004 - DNA, 120 bp, Artificial Sequence
  ENSG00000287862_15 (sequence is synthesized)
cgtgtggagctgagcttaaagatgtgtatgtttgcttaccaagaatggcactgaattacaacgaatgatgaaaagttataatcatggaatagacgggagcagagacgaaatgttcaagcc

SEQ ID NO: 945005 - DNA, 120 bp, Artificial Sequence
  ENSG00000287862_16 (sequence is synthesized)
ccccatgttccagttcttcagtgtcttgaaagttactgcgtagtagcagttcctacttcagaagctttctttcctgccaacttgtgaagaaggtgcttgcttccccttctgccatgattg

SEQ ID NO: 945006 - DNA, 120 bp, Artificial Sequence
  ENSG00000287862_17 (sequence is synthesized)
gactttaataaattcaattaatgtcctctccttcaatcctgtctgcagtagtcacagtaactaaaaataagaggtttaagaaaagatcaataaaaggctgaaaatatcatgaataagaaa

SEQ ID NO: 945007 - DNA, 120 bp, Artificial Sequence
  ENSG00000287862_18 (sequence is synthesized)
ctaaaactaactaccaaagccaaggtagattctgatgggctgaagctgaagaaaaaaatggttcttcctctgaaatattttacaatttgtttcacatatttaaaatatatttgaaagtga

SEQ ID NO: 945008 - DNA, 120 bp, Artificial Sequence
  ENSG00000287862_19 (sequence is synthesized)
ggaaactggacacaaataatatcacaatgaattaagtcagaactagtgctcaaatctctatcttctggaactaatctgtcttaactcattgtgggattctgtgtgtccagtgcacctata

SEQ ID NO: 945009 - DNA, 120 bp, Artificial Sequence
  ENSG00000287862_20 (sequence is synthesized)
tctaccacactgtggattacggtgaaaaaaaaaaaaggattatctagagtagttaagtctctagatttgttcatctaggtggagttaaaaatttcattggcaagtagattgttcaccaat

SEQ ID NO: 945010 - DNA, 120 bp, Artificial Sequence
  ENSG00000287862_21 (sequence is synthesized)
ttctgtaagtaatggctattaaaaaactcttttcccattggaaactcagcattttagacatgtggtaggctcttagtctttgttaaacaacagtgatgttatttcttcaattttgatact

SEQ ID NO: 945011 - DNA, 120 bp, Artificial Sequence
  ENSG00000287862_22 (sequence is synthesized)
tggtgtgtactcttatttcctggctgttcatagtttatgccaattatgccaaatttttatcaactttatccaaattttatttgttgtccaatatttgtttgactaacttgccaatttctc

SEQ ID NO: 945012 - DNA, 120 bp, Artificial Sequence
  ENSG00000287862_23 (sequence is synthesized)
agtgcatatttatccaagaggaactgaagtattgtcagtatagttttgataccagcaaggttatataataaaaaactaacctttagtgactatatttgtatatttaatattaagtataga

SEQ ID NO: 945013 - DNA, 120 bp, Artificial Sequence
  ENSG00000287862_24 (sequence is synthesized)
tcacatgtggctgcttgacttctgatgcaactctatgtgttttgaaatagatctgaggctccttataggaatagacaatggtctcttcagttgaatttttgctgacttttctcaatatgt

SEQ ID NO: 945014 - DNA, 120 bp, Artificial Sequence
  ENSG00000287862_25 (sequence is synthesized)
gacaatctcttaattttcctgactctaccctatctaggttctcctcttgtgtcttccttcactcctttaataaatcttagttctcagtcctccactgtattttctatataatgccttaga

SEQ ID NO: 945015 - DNA, 120 bp, Artificial Sequence
  ENSG00000287862_26 (sequence is synthesized)
tttcatctcagtcactgtagtgctttcactatttctgcacagatgatgctataatatttacttcagccttcaaaattctaaccagctcttctctaaaaccctactagacatttcttcttg

SEQ ID NO: 945016 - DNA, 120 bp, Artificial Sequence
  ENSG00000287862_27 (sequence is synthesized)
ggcaacctacctatacctcaagttggatgtatttttaactgaattcatcatgtctctgaaattgtctctgtctcttaattttcttaacactattcctcccgttcattaggaagttcagtc

SEQ ID NO: 945017 - DNA, 120 bp, Artificial Sequence
  ENSG00000287862_28 (sequence is synthesized)
tcctttgactcctctcctttcctgactgcatattcatttggtcctatagtattgtctgtttgatcatcttgatatctgcaaagtccatttttccttctggcacttccttttccatctctt

SEQ ID NO: 945018 - DNA, 120 bp, Artificial Sequence
  ENSG00000287862_29 (sequence is synthesized)
caactggactggcactgcagttcaatacccagaaatgcacatagtaattacttgttgaatcaataaatgaataactttcctatctcaatttcttcgtgccttcaatatattccagattaa

SEQ ID NO: 945019 - DNA, 120 bp, Artificial Sequence
  ENSG00000287862_30 (sequence is synthesized)
gcagaccggcgcatttcagagtcagcgactagcggatacccatgggctccgggctattgtaccaccgagaggtgtaaacccaactggagtttgctgaaggcaagcttccaaggttcatag

SEQ ID NO: 945020 - DNA, 120 bp, Artificial Sequence
  ENSG00000287862_31 (sequence is synthesized)
gacttggacttttgagttaatgctgggatgagttaagactttgcgggactgttgggaaggcacggttgtgttttaaaatgtaagaaggacatgagacctgggagggaccatgggtggaat

SEQ ID NO: 945021 - DNA, 120 bp, Artificial Sequence
  ENSG00000287862_32 (sequence is synthesized)
aaggacatgagacctgggagggaccatgggtggaatgatatggtttggatctctgtccccagccaagtctcatggctaattgtaatccccagtgttggaggaggtgcctggtgggaggtg

SEQ ID NO: 945022 - DNA, 120 bp, Artificial Sequence
  ENSG00000287862_33 (sequence is synthesized)
attgcatcatggaggtgaacttctcccttgctgttctcatgataaagttctcacaagatctggttgttgtaaagtgtgtggcaacttccgcttcactctctttcccctgttacaatgtta

SEQ ID NO: 945023 - DNA, 120 bp, Artificial Sequence
  ENSG00000287862_34 (sequence is synthesized)
ttccccttcaccttccgccatgattgtacgtttcctgaggcctcctcagtaatgtctcctgtaacagtctatagaactgtgtgtcaattaaaccccttttctttataaactacccagtct

SEQ ID NO: 945024 - DNA, 120 bp, Artificial Sequence
  ENSG00000287862_35 (sequence is synthesized)
actacccagtctcaagtacttccatatagcaatgtgagaatgaactgatatagccagtcttttcctagaagaaccctggtgcctggtatcttctagggccttgtggcattgcttcctttt

SEQ ID NO: 945025 - DNA, 120 bp, Artificial Sequence
  ENSG00000287862_36 (sequence is synthesized)
accatattgcactgcacagagctctaggccaggatgatcccttaaataagggtgatttcctcatgattcagatgttggtgcccatccttttatttcatatatcatccaaagacccaccaa

SEQ ID NO: 945026 - DNA, 120 bp, Artificial Sequence
  ENSG00000287862_37 (sequence is synthesized)
agatacgccatgctagggggtattctccatctcagaagattccatctctgaagaacagaatagaaaacttcatggcatcctcttgctgcagaggcagtaacaaagcaccacttaagtctt

SEQ ID NO: 945027 - DNA, 120 bp, Artificial Sequence
  ENSG00000287862_38 (sequence is synthesized)
cagcaggtcattctgttaatcagttaagtcttcagtggtacaccccatttaaaaaacaaaaatgcaaaaacttagttatacacataaatgaaagtttctctttttataggagtcacttgt

SEQ ID NO: 945028 - DNA, 120 bp, Artificial Sequence
  ENSG00000287862_39 (sequence is synthesized)
ttttgttacttttaaagagagcaaatatttatacttgaaaatggattttattttggaaagagcccaatattatttggctttgttttttgaataaaatcagcatgaaaagctgtttttggt

SEQ ID NO: 945029 - DNA, 120 bp, Artificial Sequence
  ENSG00000287862_40 (sequence is synthesized)
agaaaaggaggtgaaactgtaaagtaatgacacattttttgagtcttactgaggccaaaaggggatattcaaatatagtgccagcaatggagtgtgagggtaataagtatagagctccct

SEQ ID NO: 945030 - DNA, 120 bp, Artificial Sequence
  ENSG00000287862_41 (sequence is synthesized)
aatgtgactacactaagaatgggaaatctgaatacaaatattctggtgtatttgtgaccaacctagtctgattacatctgtgaaggcacagcttgcatattttgtccaaaattcttgttg

SEQ ID NO: 945031 - DNA, 120 bp, Artificial Sequence
  ENSG00000287862_42 (sequence is synthesized)
agactctctagttgtagaccaatgcatctcaaatttattgtgaacctgaatcccctgagttgtcattaaaatcagatttgcttcaagatttgaatggcctgggtcctgagaatctgcatt

SEQ ID NO: 945032 - DNA, 120 bp, Artificial Sequence
  ENSG00000287862_43 (sequence is synthesized)
tcttaccactcccaggtgagtttgcacatggatattgctacccatgctaagttacacttgggttggtttgttccttagtaaaatatttgtttgtgctcatgtacatatgaactttgcctt

SEQ ID NO: 945033 - DNA, 120 bp, Artificial Sequence
  ENSG00000287862_44 (sequence is synthesized)
ggaacagagaattttttgtgtactttatcgatgaagaagcggcaatgacctgtgccattttccttacattggatgttttctttgttcagaatgtaacagaaatttccatagaagtatgaa

SEQ ID NO: 945034 - DNA, 120 bp, Artificial Sequence
  ENSG00000287862_45 (sequence is synthesized)
aaagtagtttaaatgttcaacttaattaatattgtatagcagatattatcacatgagaaaaagcaaagtacactttgatatatttaaagctgctatttctgatttgacagtttttgaaac

SEQ ID NO: 945035 - DNA, 120 bp, Artificial Sequence
  ENSG00000287862_46 (sequence is synthesized)
tgatgtaacaaaagtgctcttgctagctggctaaaaacaaaatctttatttcacagctaaaatgtaaatagctaagatatactcggaggactaaatttcacagctacaaaaacacagctg

SEQ ID NO: 945036 - DNA, 120 bp, Artificial Sequence
  ENSG00000287862_47 (sequence is synthesized)
tgaaatataactttagagtttaataaaggcaaatagttttgcatgctaacaatggatattagaaataaagatgagaatgattttgttagaattttttagtgtttaaataccttcactaat

SEQ ID NO: 945037 - DNA, 120 bp, Artificial Sequence
  ENSG00000287862_48 (sequence is synthesized)
gtagcctgtttaattgagaacattctcaagttacctgccataaatgtgtttatttattgaatgcttactatgtgtatcttgctaggaattagtgatacagaaatgaatgtgatattattt

SEQ ID NO: 945038 - DNA, 120 bp, Artificial Sequence
  ENSG00000287861_0 (sequence is synthesized)
gccttaacctcggctataaagcatgctgaggcggagtcccctcgtttcaggctcttcagtgtcagtgctcagtatctgccttagagaactacgagaaggggctgctagcagccgccatcc

SEQ ID NO: 945039 - DNA, 120 bp, Artificial Sequence
  ENSG00000287861_1 (sequence is synthesized)
ggggcactgggtggctgcaggtggtggtggcgatggaacggtaggagggcggccagcagcgggagcttctcctgccgggcaggaggacgagtagaagggagaggcaccaccacatgctgg

SEQ ID NO: 945040 - DNA, 120 bp, Artificial Sequence
  ENSG00000287861_2 (sequence is synthesized)
aggctggagcttgcaccgccgcagctcgcctcactgcagttggaggtgacgttggacactacagcttggccagagtggtagaaatgttgttgcataggattaccaggagacaccaggtgc

SEQ ID NO: 945041 - DNA, 120 bp, Artificial Sequence
  ENSG00000287861_3 (sequence is synthesized)
gggaagagacacctcttgtccatggcgctgactactgaggacagcttcggtgtggcttttctgcggccagcttctttgaggcctttttctttcatggatggtagagagcagtctacagcc

SEQ ID NO: 945042 - DNA, 120 bp, Artificial Sequence
  ENSG00000287861_4 (sequence is synthesized)
tgagacccatcacaaggttccttgtgagacacctgggggactccaaacagccggaatccatctgcccactggtccggagacagggatcctccgcctccttccagggttgatggctcagga

SEQ ID NO: 945043 - DNA, 120 bp, Artificial Sequence
  ENSG00000287861_5 (sequence is synthesized)
ggccttctctgcaggggaccaggacacaggaaagccaggaagagatgagctgggaagggagctgttgggggccattctggttttaaaaataaagcaggactttcgttgcttgttataaaa

SEQ ID NO: 945044 - DNA, 120 bp, Artificial Sequence
  ENSG00000287860_0 (sequence is synthesized)
tacttgataggaaagaggccttcctgggggaagataaatgagtgtgtgtttcttccaaaggcaaggctctgaatgaacgggcgatattgatcctagagtgagaaagcaagtagcattgtg

SEQ ID NO: 945045 - DNA, 120 bp, Artificial Sequence
  ENSG00000287860_1 (sequence is synthesized)
atagagtagctggatagggagcagttcctggaatctgaagaaaaggaggtgtggaaagggtcagttgacagaagctgtggccttcaggagacaagctttgagatccttcttagaaattcc

SEQ ID NO: 945046 - DNA, 120 bp, Artificial Sequence
  ENSG00000287860_2 (sequence is synthesized)
cttagaaattcctaaggctcaatgttgtgtggaagattctgagaaagaaaatagtttccgatctttgggattcccctgagatggtccaatctgcaaaaagttcattgccatttccatcaa

SEQ ID NO: 945047 - DNA, 120 bp, Artificial Sequence
  ENSG00000287860_3 (sequence is synthesized)
catttccatcaaggacactgagaacaagagtcttatccgcattgaatcctgggaattgagaagcttcagcagatgcatgtgaaattaggtgctgtgactcagatcgggggacctcccttg

SEQ ID NO: 945048 - DNA, 65 bp, Artificial Sequence
  ENSG00000287860_4 (sequence is synthesized)
cctcaggtcctcagactgaccagcccaagcaacatctcaccaatttcaaatctggaccccactag

SEQ ID NO: 945049 - DNA, 89 bp, Artificial Sequence
  ENSG00000287860_5 (sequence is synthesized)
cctccgtaactctcacagtggaggatgatcgagtgtggatcaaggactggaaagtagcctctttgtgcccacggtggaaaggaccccag

SEQ ID NO: 945050 - DNA, 120 bp, Artificial Sequence
  ENSG00000287860_6 (sequence is synthesized)
gaaagtagcctctttgtgcccacggtggaaaggaccccagactatcgtcctgagcactcccaccgctgtgaaggtagaaggaatcccagcctggatccaacacagccatataaaacctgc

SEQ ID NO: 945051 - DNA, 120 bp, Artificial Sequence
  ENSG00000287860_7 (sequence is synthesized)
gaatcccagcctggatccaacacagccatataaaacctgcagggcctgaaacctgggaggcaagaccaagcccagacaacccttgcagagtgaccctgaagaagacgacaagccctgctc

SEQ ID NO: 945052 - DNA, 80 bp, Artificial Sequence
  ENSG00000287860_8 (sequence is synthesized)
ttggacttatacagtaagggcttcaactgaccttactcaaactggggactgttcccagtgtattcatcaggtcaccgaag

SEQ ID NO: 945053 - DNA, 78 bp, Artificial Sequence
  ENSG00000287860_9 (sequence is synthesized)
tgaatgtatgggaacattaaaagaaagaaatgaccgacctgatgtgtgttataacccatctgagccccctgcaaccgc

SEQ ID NO: 945054 - DNA, 120 bp, Artificial Sequence
  ENSG00000287860_10 (sequence is synthesized)
ctgatgtgtgttataacccatctgagccccctgcaaccgccgtttttgaaaaaagaataagaactggccttttcctaggtgatacaagtaaaataataactagaacagaagaaaaagaaa

SEQ ID NO: 945055 - DNA, 120 bp, Artificial Sequence
  ENSG00000287867_0 (sequence is synthesized)
gctttttctcgctcttgctgttctctgaagttccttctgccgtgattgtaagtttccggaggacttccccagccatgatgaactttttctaaagacacttgaagtttaaactctctactg

SEQ ID NO: 945056 - DNA, 120 bp, Artificial Sequence
  ENSG00000287867_1 (sequence is synthesized)
cataaggagcccctcaaggatctgccaaaagcagcaacctgagactgaaaaggggaaatgctaagtggaaacagtctgaacattgtatcaactcagaattcctcttcattaatgcctgac

SEQ ID NO: 945057 - DNA, 120 bp, Artificial Sequence
  ENSG00000287867_2 (sequence is synthesized)
gtttggctatgtccccacccaaatctcatgttgaattcccacgtgttatgggagggacctggtggggagggagttgaatcatgggggcagatctttcccatgctgttcttgtgatattga

SEQ ID NO: 945058 - DNA, 120 bp, Artificial Sequence
  ENSG00000287867_3 (sequence is synthesized)
atgggggcagatctttcccatgctgttcttgtgatattgaataagtcccatgagatttgatggttttaaaaatgggagttttcctgcacaagctctgtttcttgcctgccaccatccatg

SEQ ID NO: 945059 - DNA, 83 bp, Artificial Sequence
  ENSG00000287867_4 (sequence is synthesized)
acctttcttatgtaaattgcccagtatgtctttatcagcagtgtgaaaaagccctaatacaataaattggtaccactagagtg

SEQ ID NO: 945060 - DNA, 120 bp, Artificial Sequence
  ENSG00000287867_5 (sequence is synthesized)
tgaaaaagccctaatacaataaattggtaccactagagtggggcattgctgaaaagatacttgaaaatgtggaaatgactttggaactgggtaacaaacggagcttgaaacagtttggag

SEQ ID NO: 945061 - DNA, 120 bp, Artificial Sequence
  ENSG00000287867_6 (sequence is synthesized)
agctcagaagaggagaagaaaatttgggaacctttggagcttcctagaggtgaatggctttgccccaaatgctgatagccataaggacaataaagtccaggttgagatgctctaagatgg

SEQ ID NO: 945062 - DNA, 89 bp, Artificial Sequence
  ENSG00000287867_7 (sequence is synthesized)
ataaggacaataaagtccaggttgagatgctctaagatggaaatgagaaactttttgggggctggagcaaagatgactctttttatgtc

SEQ ID NO: 945063 - DNA, 88 bp, Artificial Sequence
  ENSG00000287867_8 (sequence is synthesized)
tttcagttttataagggaagctgagcataaacatttggaaactttgcagcctgacagtgtgttagaaaagaaaatcccattttctgag

SEQ ID NO: 945064 - DNA, 64 bp, Artificial Sequence
  ENSG00000287867_9 (sequence is synthesized)
ttataagggaagctgagcataaacatttggaaactttgcagcctgacagtgtgtttaagtaatg

SEQ ID NO: 945065 - DNA, 120 bp, Artificial Sequence
  ENSG00000287867_10 (sequence is synthesized)
ctccaaggcatgtcagaggtgttcacttcaggccttctcatcacaggcctggaggcctaggaggaaatagtggttttgtgggccaggtccagggtcaccatgctgtgtgcagcctagtga

SEQ ID NO: 945066 - DNA, 120 bp, Artificial Sequence
  ENSG00000287867_11 (sequence is synthesized)
cttggtgccctgcatcccagctgctcaagctgtagatgaaaggggccaatgtagaatttcggccatggctccagagggtgcaagcctcaagccttgacagcttccacatggtgtggagcc

SEQ ID NO: 945067 - DNA, 120 bp, Artificial Sequence
  ENSG00000287867_12 (sequence is synthesized)
tgccagtgcacagaagtcaaaaattggggtttgggaacctccaactagatttcagaagatgtttggaaatgtctggaagtccaagcagaagtttgctactggggtggggatctcatggag

SEQ ID NO: 945068 - DNA, 120 bp, Artificial Sequence
  ENSG00000287867_13 (sequence is synthesized)
atcctctgctgtggcagtgtggaaaggaaataatgtggttggagcccccacacagagtccttactggaacacttcttagtggagctgtgagaagagggctaacatcctccagacaccaga

SEQ ID NO: 945069 - DNA, 120 bp, Artificial Sequence
  ENSG00000287867_14 (sequence is synthesized)
atggtagatctagtgactgcttgcaccgtgcacctggaaaagccgtagacactcaactccagtttgtgaaggcagcagggaaggaggttgtgaagccacaggggtggagccacccaagac

SEQ ID NO: 945070 - DNA, 120 bp, Artificial Sequence
  ENSG00000287867_15 (sequence is synthesized)
catgggaacccacctcttgcatcaccgtgacctggatgtaagacatggagtctaaggagatcattttggagctttaggatttgactgccctgccagatttcagacttgcatttcacttgt

SEQ ID NO: 945071 - DNA, 78 bp, Artificial Sequence
  ENSG00000287867_16 (sequence is synthesized)
ttgactgccctgccagatttcagacttgcatttcacttgttgaaaatattttcagtagcccctttgttttggccaact

SEQ ID NO: 945072 - DNA, 64 bp, Artificial Sequence
  ENSG00000287867_17 (sequence is synthesized)
tcattgtatctaggaagtaaataaatttctggaccgtagacttttgagttaatgctgaaatgag

SEQ ID NO: 945073 - DNA, 120 bp, Artificial Sequence
  ENSG00000287867_18 (sequence is synthesized)
ttgaaatgtgaggatatgagatttggcaggggtagatgatgagatttggcaggggtagatgatatgatttgcctgtgaccccacacaaatctcatcttgaatttgcatatgttgttgggg

SEQ ID NO: 945074 - DNA, 120 bp, Artificial Sequence
  ENSG00000287867_19 (sequence is synthesized)
ggagctggcggaaggtagttaaatcatggggacaggtctttcccttgctgtttttgtgatagtgaataagtctcatgacatctgataaaaatgggagttttcctgcacaagccttctctt

SEQ ID NO: 945075 - DNA, 120 bp, Artificial Sequence
  ENSG00000287867_20 (sequence is synthesized)
acctgctgccatccacgtaagtagtgaattgcttcttcctagccttccgccatgattctgaggcctccccagccacgtggagctgtaagttcaagaaacctctttcttttgtaaattgcc

SEQ ID NO: 945076 - DNA, 120 bp, Artificial Sequence
  ENSG00000287867_21 (sequence is synthesized)
agtcttgggtatgtcttcatcagcagtgtgaaaatggactaatacaactaccaaatcccaacaaatgatttagctgcttcttaatgaacagaagaaatgaatttatattgttcaaaggac

SEQ ID NO: 945077 - DNA, 120 bp, Artificial Sequence
  ENSG00000287867_22 (sequence is synthesized)
ttcacatttgttcaaatgaaaggactaacaacagcctttctccttcattaaactagtcaggctcttctgaatcctcttcccaactaagctttaacttttatacttctgttcttctttgca

SEQ ID NO: 945078 - DNA, 120 bp, Artificial Sequence
  ENSG00000287867_23 (sequence is synthesized)
ttgcctaattttggaaagagtcctgttaagtcagttaggccagaagaacaacccttgatacataattaccctcaatttcccactaaatttctcatcttccaccatcacccaggtgatatc

SEQ ID NO: 945079 - DNA, 120 bp, Artificial Sequence
  ENSG00000287867_24 (sequence is synthesized)
tgatcactctggtctgccttcaccaagaatcctgttaggtcattttagccagaatcttcccttacccctggtgtttcctcttagtaatgttctttgcactgacatccccaccctactcct

SEQ ID NO: 945080 - DNA, 120 bp, Artificial Sequence
  ENSG00000287867_25 (sequence is synthesized)
tggctataaattcccacttttccttgttgcatttttgtagtggaggccaacctctctcccccgctgcagaacttcattgcagtagtccctatacctattgtgatagtccgtctgaataaa

SEQ ID NO: 945081 - DNA, 120 bp, Artificial Sequence
  ENSG00000287867_26 (sequence is synthesized)
tgtaactgtgtttttaacaccttagaaatatttttcacaggtgatggtaggtatggaaaaaaataagtttaatgtgtgaaaaccataaagtgcttggttactaaacataaggactagaga

SEQ ID NO: 945082 - DNA, 120 bp, Artificial Sequence
  ENSG00000287867_27 (sequence is synthesized)
agggaaggaaataaggaaatcttctgtttcaactctaagtcaaaagaacagtggtagagcagacagagttaagaaacttccaacaggacttagaaagacatgtaaatatttaagtcataa

SEQ ID NO: 945083 - DNA, 89 bp, Artificial Sequence
  ENSG00000287867_28 (sequence is synthesized)
tcgatttcctaacacagaaggcattcaaaagttttcccttgatgttcagtcttttcccactcttctttgtaatcacgaaattcaatatt

SEQ ID NO: 945084 - DNA, 120 bp, Artificial Sequence
  ENSG00000287867_29 (sequence is synthesized)
tcttttcccactcttctttgtaatcacgaaattcaatattgtgattcgttgtttatcatatctgccttttctaccagcctgtaatcttctagagatcttcttaataactctagtatctag

SEQ ID NO: 945085 - DNA, 120 bp, Artificial Sequence
  ENSG00000287867_30 (sequence is synthesized)
cacaatataaattctcaatgaattaaaacagtatctaagaccagggtgattctctaattcttttaccaaatgagggagggtaagatattttggacccatattttgagtcctaccaactac

SEQ ID NO: 945086 - DNA, 120 bp, Artificial Sequence
  ENSG00000287867_31 (sequence is synthesized)
ccagaatgctataatagcctgggaagaagaaatctttatattccttgaactcttaatgtagtcctctaaaaaacccctgaggtggttctgatacttgcctattgccttctgcctgccttc

SEQ ID NO: 945087 - DNA, 120 bp, Artificial Sequence
  ENSG00000287867_32 (sequence is synthesized)
ctcattgagtctccactgggtcacttcagtttaaattgaatataaaacttctaaacagtgtcttcacagcaactatcaattttaaatattttttggcatgcaaactctccattagtaaaa

SEQ ID NO: 945088 - DNA, 120 bp, Artificial Sequence
  ENSG00000287867_33 (sequence is synthesized)
attcatcctgaataatctattcaaaatacttcttatatttgatgcctcgctgtcatgaatcaaaatcactaattattctgactcctttaaatttattcatagctcatgaattggtccttc

SEQ ID NO: 945089 - DNA, 120 bp, Artificial Sequence
  ENSG00000287867_34 (sequence is synthesized)
actatactgacctcatagtagttcttgaaatggacaatggattatcttgtccttgtgttagaaaagtaacttctaggacttctacttcaagtcagcttagtagaaatcccatgtgttttc

SEQ ID NO: 945090 - DNA, 120 bp, Artificial Sequence
  ENSG00000287867_35 (sequence is synthesized)
ccatgcaagaaaagaaagtgatgtaactatctgtttctggtgaattaaattgcgtagtcttcatattgtgcaaggtaataggacatatttaaggtgtataatatttatttttttaaacat

SEQ ID NO: 945091 - DNA, 120 bp, Artificial Sequence
  ENSG00000287867_36 (sequence is synthesized)
cttcctcagtgaaatgagaattcattccataatttaaagcctcttttttgttccggcttaaaaaatttcctgttaagactctaattttcataaataaactgcctccatttcttttatatg

SEQ ID NO: 945092 - DNA, 120 bp, Artificial Sequence
  ENSG00000287867_37 (sequence is synthesized)
taatcttgcaataaaagaaggataatcttctagccaagaaatttctcagagacaaatttaaatactggttattcagttgggttttagcaaaaggtaaatttctaaactataggacaatgc

SEQ ID NO: 945093 - DNA, 120 bp, Artificial Sequence
  ENSG00000287867_38 (sequence is synthesized)
atttataacttacttggttttgacagtgatctgatcctcctggcaaatttaaaaggtgtcaggtataaagtaacaggcatattttctggaaatgtgtgtatcatctccctgttattgagg

SEQ ID NO: 945094 - DNA, 120 bp, Artificial Sequence
  ENSG00000287867_39 (sequence is synthesized)
atcagcttgacatcattgcgaaatttatatttgaaacgtattctttggttgtcacagtaatgtttggaaattcgaaagccagaagaactggcagtacttttccaaagcttcattttgagg

SEQ ID NO: 945095 - DNA, 120 bp, Artificial Sequence
  ENSG00000287867_40 (sequence is synthesized)
aagtataaatagagaatattactgccatgtaggccatttctggagggataactgtttaaataagaagaaaacacctgggcagagtccttgatcgttacaattagagactttaaatgacaa

SEQ ID NO: 945096 - DNA, 120 bp, Artificial Sequence
  ENSG00000287867_41 (sequence is synthesized)
ccttagggacaggtctagcaagaattttacttgcatttccaatcacttaatagtcagacatttattacctatgtatattttttactcatcaaacatatattgcactcttacagtttttaa

SEQ ID NO: 945097 - DNA, 120 bp, Artificial Sequence
  ENSG00000287867_42 (sequence is synthesized)
agccttgtctaataactaaatacacagatagttcagatgtggtccctgtctctgcctctttgttcttttcaaaacattttaacagagctaatttttttcttacattaaaaggaaactgaa

SEQ ID NO: 945098 - DNA, 120 bp, Artificial Sequence
  ENSG00000287867_43 (sequence is synthesized)
ctgattttatgtttaaaaatgaatgaagtagtaattccatcatccaaatgcaatttattttttaaactgtaaagaagtacacatgacaaagaatttaccatcttgaccatttttaagtgg

SEQ ID NO: 945099 - DNA, 120 bp, Artificial Sequence
  ENSG00000287867_44 (sequence is synthesized)
tctatgattcagttaagtgtgtgttgcacagctacccccagatgtcttttcttcctgtaaaactgaagctctctacacattaaacaaaaactcacctctcccccagcccctggcaacgcc

SEQ ID NO: 945100 - DNA, 120 bp, Artificial Sequence
  ENSG00000287867_45 (sequence is synthesized)
attctactttctttctctgagtttgactaatttaggtaccttatataagtggaataatactgtacttgtctttttgtgaccacttgttaaaatataacatcctcaagtttcatccatgtg

SEQ ID NO: 945101 - DNA, 120 bp, Artificial Sequence
  ENSG00000287867_46 (sequence is synthesized)
taccatgtatcagaccaaatgcagtttcttctaatattttacttcctttcagtcatatttattttaattttacaaatattttgctgtctgcagtgttcacttaacctgacaagtattttc

SEQ ID NO: 945102 - DNA, 120 bp, Artificial Sequence
  ENSG00000287867_47 (sequence is synthesized)
ttatgtgttagaaaatcttgggagtgtaatttttcatgactgcatttacacatttacagcacgtgtatttgctattttgaattcagcttgactctgtgacttttaattggggagatcaat

SEQ ID NO: 945103 - DNA, 120 bp, Artificial Sequence
  ENSG00000287867_48 (sequence is synthesized)
ttttatatattttggcataattttttttggcatttaaaaaaaatttttcgagccatggaaagccactgctgggttttacacaaaggattcacattttgaatttgtgttgtaagaagctca

SEQ ID NO: 945104 - DNA, 120 bp, Artificial Sequence
  ENSG00000287867_49 (sequence is synthesized)
cactgattgaaggacagagaaaggattggagagcagccagagggaatgcagaaagtttaggtagatagctatttttgtgatccagaattgaggtaatggacacttctactgatgatatgg

SEQ ID NO: 945105 - DNA, 120 bp, Artificial Sequence
  ENSG00000287867_50 (sequence is synthesized)
attatacagatgaagaaagtagatgggagctaaaaactcactgcatttattagattggaactagatggtgggagataagaggtgacaaggatgattcttggaattctgcattgcataact

SEQ ID NO: 945106 - DNA, 120 bp, Artificial Sequence
  ENSG00000287867_51 (sequence is synthesized)
aactggatgctggtgccatttgtagaaatattgggactaagtttgttgggaggaagactacaggtttgttatgggacatagtaagtctcagctgtctttgagacatctattgaaagatgg

SEQ ID NO: 945107 - DNA, 120 bp, Artificial Sequence
  ENSG00000287865_0 (sequence is synthesized)
gtgggcctcgtgtgtccctgtcgtggctgagagtgactgccccagcacctatgaagaaagcccagagactctggaggctcagctgggataacgcctggcgtgctcgggggtcatggccac

SEQ ID NO: 945108 - DNA, 120 bp, Artificial Sequence
  ENSG00000287865_1 (sequence is synthesized)
cgcctggactctggaaaaatgggaaaaatgctcttggcagacagcggggcagtcaggagggagctggccccaccagcccaggcaacgcccaagagctgtcctcccactcggctccaggag

SEQ ID NO: 945109 - DNA, 120 bp, Artificial Sequence
  ENSG00000287865_2 (sequence is synthesized)
acgtttaaatggggcctgactcccccatctctgatttaaaagataaccagaagcagcagagaaaacatctgaagtgcttcctggacacacctgttaggaagtttctgcaagaacccaggt

SEQ ID NO: 945110 - DNA, 120 bp, Artificial Sequence
  ENSG00000287865_3 (sequence is synthesized)
cctccttcccaccagacatgaggattttaacttgatcatctctgcaaagaccttatcttcaaatacagttacattctgaagtcctgggggttagggctgcaacacccgaattggtggaga

SEQ ID NO: 945111 - DNA, 120 bp, Artificial Sequence
  ENSG00000287865_4 (sequence is synthesized)
caaaatccagctcctgacaataccgcgtatgatagctgcgtctctgcctgcagtactgttttccagggaaagcatctttgagtgtattcagaaagcctctctctggggccaggccttgca

SEQ ID NO: 945112 - DNA, 120 bp, Artificial Sequence
  ENSG00000287865_5 (sequence is synthesized)
gagaatccttcagaaactggacaaccccacccaaggcagtcagtggggaggacacatttggtgcctcattggtccctggatctgcctcacagtcctcaatgttcctcctcgttccctcta

SEQ ID NO: 945113 - DNA, 120 bp, Artificial Sequence
  ENSG00000287865_6 (sequence is synthesized)
tctcctctttggttgaccttgaagctcattcctggtgaaggccccgtgggagcagtgcaatgacaagaggagcctgttttcaatagcaccctcacgctctccaggggtccattggaggcg

SEQ ID NO: 945114 - DNA, 120 bp, Artificial Sequence
  ENSG00000287865_7 (sequence is synthesized)
cctatgacctcctgatgctgaggagcctagagtgggcagccctcgggcccaggctccacctgggtgaggcctgttttattatcaatactcaccacagtcatttgtgggagtgtaatgctc

SEQ ID NO: 945115 - DNA, 120 bp, Artificial Sequence
  ENSG00000287865_8 (sequence is synthesized)
atattcccatttaagagatgaataaactgaggcaaggtgaagtgactcagctgaggccacaccacagtttaatggggaagccaggataagagctggcggcttctatgtctgatctacact

SEQ ID NO: 945116 - DNA, 120 bp, Artificial Sequence
  ENSG00000287865_9 (sequence is synthesized)
ctgatgggaggtcgtcagagagccatgtaaacggtgaggaggtgacatgctggtcccttccataaaagctgttttgcaaaattaaaacacacacacagtaaagatccagatttatgcaag

SEQ ID NO: 945117 - DNA, 120 bp, Artificial Sequence
  ENSG00000287865_10 (sequence is synthesized)
tgagagtgaggggctgactatttaccagtcaacagatctccccaaatggttctctgcttggggttgagatgctcctgaccagcagggcttggggagagacattcttgctccccctagagc

SEQ ID NO: 945118 - DNA, 120 bp, Artificial Sequence
  ENSG00000287865_11 (sequence is synthesized)
tggctgacccatacccaggggattctgagcaccaggggctgggagcagcatgtaccacgtgtttcccaagagttagtcatgtttgctcctaaaacttattgtaatcgaggaatctaatta

SEQ ID NO: 945119 - DNA, 120 bp, Artificial Sequence
  ENSG00000287864_0 (sequence is synthesized)
gcctttgtggaccttccagcccagccaccagcaaacacaacccaagctgccagggaaacatcgcctggaaaatgtacacccctctgccccacccgctcctcggcaaacggcagccacgtg

SEQ ID NO: 945120 - DNA, 120 bp, Artificial Sequence
  ENSG00000287864_1 (sequence is synthesized)
gcacccagcagcagcggggagggcccggtgggtcccaagcttccagcagcatggggaggaagggatgaccagctgtggacagggctgcagatgggcagagcttcctgttcctggggggac

SEQ ID NO: 945121 - DNA, 120 bp, Artificial Sequence
  ENSG00000287864_2 (sequence is synthesized)
tcgactcactcagcccaggagctctgagaccccatccctccccaggaaacccaggccctgaggccaggtctacctggcttaccttgcaaccaaaggcgagatctttctccggaaccgggt

SEQ ID NO: 945122 - DNA, 120 bp, Artificial Sequence
  ENSG00000287864_3 (sequence is synthesized)
catttgttggtgaggaagatggacttctgggaggcctgcgctcacaaggctctacatcccgaagtgatctcaccaaggggcacaacagcctggagagggaagtgccattgctcccatttt

SEQ ID NO: 945123 - DNA, 120 bp, Artificial Sequence
  ENSG00000287864_4 (sequence is synthesized)
ggcaagatgaggcccagagccaccaagcccctctcgagttgcagcttctgggggcagagcaggatgtacatctggtcccgcctaactatacccagagaaacctgccgtgggcccttctcc

SEQ ID NO: 945124 - DNA, 120 bp, Artificial Sequence
  ENSG00000287864_5 (sequence is synthesized)
atcacacatggtcatcccacactatcacaaaggtcaggggaaccgctatgtctgcataaaaacaagtgtcatcagttggatttgttcaaggtgaggcttacctgctccctaatatatcga

SEQ ID NO: 945125 - DNA, 120 bp, Artificial Sequence
  ENSG00000287864_6 (sequence is synthesized)
aagctcctgttgaaggagagtcagggacatgccaggaggcctgccatgctgtgaccagttgtcatctcaccgaatcctcaccagtaccacgtggctcagcaaggttaggtaacatactca

SEQ ID NO: 945126 - DNA, 120 bp, Artificial Sequence
  ENSG00000287864_7 (sequence is synthesized)
aagtcacaccgcctgcccccaaattagtcatggcaatctcctgtcttcaaggtccaagttttgctgtttcctcagggtcaaaaccaaggtcttctcctgtcctggaagaacatcaagcca

SEQ ID NO: 945127 - DNA, 120 bp, Artificial Sequence
  ENSG00000287869_0 (sequence is synthesized)
atgtgcattcgcgaggccggctcgggcgcccagctgtcagggatgtcagcctgcctaagcaggggaaaatagtacgggcatagccggtctgatctaaagaaaaaggctgcctgcgacaac

SEQ ID NO: 945128 - DNA, 120 bp, Artificial Sequence
  ENSG00000287869_1 (sequence is synthesized)
ccactgtgggaccctagaagtctcgacagtacagcctctttggggcgtctccgtggttcatcccgctggaggaggaggcgtttcgagactgtgaagatgcgggacccaaaccacatttca

SEQ ID NO: 945129 - DNA, 120 bp, Artificial Sequence
  ENSG00000287869_2 (sequence is synthesized)
ccagactgtatcctcacccccatctgaccttactgctgctcacactctccgtcccagaatgaaatccccagaagatggaagagtgcccgcctcacgacgtgaagcacctactcggctggg

SEQ ID NO: 945130 - DNA, 120 bp, Artificial Sequence
  ENSG00000287869_3 (sequence is synthesized)
aactgaattggaggtggattcaaggggctctgggaatgaaaccccaaatcaggagctggccggaaaggctgcagtttgcactccgactgtttccaactgttccccgcactttggagtcct

SEQ ID NO: 945131 - DNA, 120 bp, Artificial Sequence
  ENSG00000287869_4 (sequence is synthesized)
cccacctgggcaccgggccatggtgtggacagattgtgtaatgaagcgaatgtaaggatggagttggaagcaccttctgtgtcatcagtctgcacctttttttgcaggtgaaggtgcggg

SEQ ID NO: 945132 - DNA, 120 bp, Artificial Sequence
  ENSG00000287869_5 (sequence is synthesized)
aggctggttcgccgctgccctctcctagggtcatgggactatcccgtggatcccacagagaagacagactagagtccatcgctgacgcacctccacagaggactccttttctgccaagcc

SEQ ID NO: 945133 - DNA, 120 bp, Artificial Sequence
  ENSG00000287869_6 (sequence is synthesized)
acagggactagtcgccaggcaaaggtggtgttcactgtgatgcgagccgtggctcactggtgccctgagactggcgcatgcccattcgggaggcaggctcaggcatctgatgatggcatc

SEQ ID NO: 945134 - DNA, 120 bp, Artificial Sequence
  ENSG00000287869_7 (sequence is synthesized)
ttcctggattaggcccccacagaaattgaggaagttgttatcagtcatttataccctgaaaatattagttcaccagagccctggagggggatgggtagaagctcattaaagtaggtctgg

SEQ ID NO: 945135 - DNA, 120 bp, Artificial Sequence
  ENSG00000287869_8 (sequence is synthesized)
atggtgcacagagtgtgaagaaaacagagaaacccagaaagtctaagcctgaagacagctccaatcctaggagatactattattatgtccatcttacagaggaggaaactgaaacaaagg

SEQ ID NO: 945136 - DNA, 120 bp, Artificial Sequence
  ENSG00000287869_9 (sequence is synthesized)
aagagaacttgatcaagaccatgttgccccacagtggaagagccaagatccaaacccaggtaacctgcctcatcatcagagcctggactcataacctcatgctgcagttaagcaggtttg

SEQ ID NO: 945137 - DNA, 120 bp, Artificial Sequence
  ENSG00000287869_10 (sequence is synthesized)
cactgtggctagatacacagactctgtgttcacatctcagcttctctgctatttccatttctgtgactgtaggcaagttacttctctgtgctcagtttcctctataaagtaaggacagta

SEQ ID NO: 945138 - DNA, 120 bp, Artificial Sequence
  ENSG00000287868_0 (sequence is synthesized)
gaaggtgccagactccctttcgggaagaaatctctgtttttccttatggaaccccaagagtgtaaacaggcgagttcatctcagatcttaaactgcttgcttttgtattgtgttacctga

SEQ ID NO: 945139 - DNA, 120 bp, Artificial Sequence
  ENSG00000287868_1 (sequence is synthesized)
ttttttttgactaaaacagttattacaacagaggttactcttgggtgtttaaatcaaggaagagtttggtttagacacttagagaaatgtctttgttaaaaaaaaaagtgcactgtaaaa

SEQ ID NO: 945140 - DNA, 63 bp, Artificial Sequence
  ENSG00000287868_2 (sequence is synthesized)
agagaaatgtctttgttaaaaaaaaaagtgcactgtaaaaacatcacatggtctagcctcata

SEQ ID NO: 945141 - DNA, 79 bp, Artificial Sequence
  ENSG00000287868_3 (sequence is synthesized)
tatacatccagatagcctgaagcacgcactccaccattgtgatttgtttctgtcccaccctaactgatcaatgtacttt

SEQ ID NO: 945142 - DNA, 73 bp, Artificial Sequence
  ENSG00000287868_4 (sequence is synthesized)
ttaagaaggttctttgtaatctcccccgcccttaagaaggttctttgtaattctccctacccttgagaatgta

SEQ ID NO: 945143 - DNA, 120 bp, Artificial Sequence
  ENSG00000287868_5 (sequence is synthesized)
tggtgccgaagacccgggtcagagggactccttcaggagaccagtcccctgtcctcaccctcactccatgaagagatccacctatgtatgaccctgggtcctcagaccaaccagcccaag

SEQ ID NO: 945144 - DNA, 120 bp, Artificial Sequence
  ENSG00000287868_6 (sequence is synthesized)
tagacacattttatccatggacccaaaactctggcgccagtcatggactcaggaagacagccttcccttggtgtttaatcattgtggggacgcctgcctgattattcacccacactccat

SEQ ID NO: 945145 - DNA, 120 bp, Artificial Sequence
  ENSG00000287868_7 (sequence is synthesized)
ttcacccacactccattggcgtctgatcaccgcggggatgcctgccttggtcattcactgacattcccttggtggcaagttagttgcggggatgcctgctttggctgctcacccacattg

SEQ ID NO: 945146 - DNA, 73 bp, Artificial Sequence
  ENSG00000287868_8 (sequence is synthesized)
tgctttggctgctcacccacattgcagcctagggctgctccccaccctccttctcccttccgccctccattcc

SEQ ID NO: 945147 - DNA, 120 bp, Artificial Sequence
  ENSG00000287868_9 (sequence is synthesized)
cctcttcaactcacacctgacctaaaacttaatgccttattttcttctgcaataccacttggccacaatacaaactcaacagtagttccaagtggccagagaatggcacttttgatatgt

SEQ ID NO: 945148 - DNA, 120 bp, Artificial Sequence
  ENSG00000287868_10 (sequence is synthesized)
ggcacttttgatatgtctatcctacaagatctagataatttttgttgaaaaatgggcaaatggtctgtggtgcctgacgtccaggcaatcttttatacattggtccctccctagtctctg

SEQ ID NO: 945149 - DNA, 79 bp, Artificial Sequence
  ENSG00000226043_0 (sequence is synthesized)
ttggtttctttttttgacacggagtctcactctgccacccagggtggagtgcagtgatgcaacgtctccctcttgggtt

SEQ ID NO: 945150 - DNA, 73 bp, Artificial Sequence
  ENSG00000226043_1 (sequence is synthesized)
aactcttgagttctccctgaaaggagactaaagaacaatcctctgcagatgtgtctgaatcctaaaatgaact

SEQ ID NO: 945151 - DNA, 120 bp, Artificial Sequence
  ENSG00000226043_2 (sequence is synthesized)
aacaatcctctgcagatgtgtctgaatcctaaaatgaacttaagtcaagcatgatccctaaggctgctcagggagagagaacctagaaacctggcatgctggcaaaaggagaccatcaag

SEQ ID NO: 945152 - DNA, 90 bp, Artificial Sequence
  ENSG00000226043_3 (sequence is synthesized)
acacacctggccttcaaaaagctactctgcctccactagagagaacagggcgagagttccatgatccccagtagagtctcactctgtgtc

SEQ ID NO: 945153 - DNA, 120 bp, Artificial Sequence
  ENSG00000226043_4 (sequence is synthesized)
tcagcctccggagtagctgggactacagagtgaagtttgacttattcctgtggccaacatggcttatggacaccaaggacaaataagtcagaataacttgatggaaaagaccttcagcga

SEQ ID NO: 945154 - DNA, 120 bp, Artificial Sequence
  ENSG00000226043_5 (sequence is synthesized)
gcgataactacatagttttcatctcttgtatgaacaaagtgttaaattttctctactatcaattctttagtgatatattggctatgatttttttctgttccatgatatatattattttat

SEQ ID NO: 945155 - DNA, 120 bp, Artificial Sequence
  ENSG00000226043_6 (sequence is synthesized)
gggatttataccaagataataatttgttctaaaaactatatgttcagtttttatcattaaaaacattttaaataataactaattctcatttgtagtcaataagtggcacatgcataatca

SEQ ID NO: 945156 - DNA, 120 bp, Artificial Sequence
  ENSG00000226043_7 (sequence is synthesized)
gcaaagatatatttttgtttggtgctgtaggtacaaattacagtttgatctttcatactttatgaaaacaatggtataaatagatatatggttcatattgcagttgaatataatatttat

SEQ ID NO: 945157 - DNA, 120 bp, Artificial Sequence
  ENSG00000226043_8 (sequence is synthesized)
tcaataacatttattaatgatatttcaggaagtatttctcatattttaatgtatacatgaaccacatggtatcctcttaaaaaagcaaattttggttcagtttttagaagatggagctaa

SEQ ID NO: 945158 - DNA, 120 bp, Artificial Sequence
  ENSG00000226043_9 (sequence is synthesized)
gattttttcatttcaaactgctttgtgatccgctgatctcagtttcagtagcaaatttaaaaatatgtatgcttctggattttaatagataactgaaataaaacaaaatatttttcagta

SEQ ID NO: 945159 - DNA, 120 bp, Artificial Sequence
  ENSG00000226047_0 (sequence is synthesized)
tgggacatgtcacttctgttcacagtccattggccagaactaaatgcacttgtccaagcagtcacaaaaaaggctgagagaccaaggggagcccacggacaatcagtgccaaggcgtgtt

SEQ ID NO: 945160 - DNA, 120 bp, Artificial Sequence
  ENSG00000226047_1 (sequence is synthesized)
ggcctctgctgacaaccagcaccagacaattccattttctccaactgggagctgtgaaggatcaagtcctactttcttcattgatacggcaatatcaaataaatagtcataacactcaca

SEQ ID NO: 945161 - DNA, 120 bp, Artificial Sequence
  ENSG00000237387_0 (sequence is synthesized)
cttaagtcaccagtgctattacacatgacattgggaaaactgaggcttccattagccctgcagggacacagttgtgatattcacacctagccatcttctctactgttttgaaaaattatt

SEQ ID NO: 945162 - DNA, 120 bp, Artificial Sequence
  ENSG00000237387_1 (sequence is synthesized)
gcaaaagttttcaaacatgcaaaaggatataatatagtgaacacctagacccatcactcagcacctcattggaagttaccaagattgtaatctgctacttttccctaccccaccctccat

SEQ ID NO: 945163 - DNA, 120 bp, Artificial Sequence
  ENSG00000237387_2 (sequence is synthesized)
gcctgggcaacaagagcaaaactccatcccaatcaatcaatcaatcaataacaaatctcagaccacatgtcgttttagcctatttcagtttgcatttctaaaaattatggataattttct

SEQ ID NO: 945164 - DNA, 120 bp, Artificial Sequence
  ENSG00000237387_3 (sequence is synthesized)
aaaattatggataattttctcatataaacacagtctattatcacttcccaactcccccttcaaattgataattcctgaagatccaatgcccagtctctaaccacatttccatgactcaag

SEQ ID NO: 945165 - DNA, 120 bp, Artificial Sequence
  ENSG00000237387_4 (sequence is synthesized)
tgtcttttgtatagctggtgggtttcaatctggatctaaccaagatccacacattcatctgatagcgccatctcttaaatctcttctgggatttaaggcagacagggagagtacctgact

SEQ ID NO: 945166 - DNA, 120 bp, Artificial Sequence
  ENSG00000280719_0 (sequence is synthesized)
ctcctgaggctgcagcaagatcagggaagcaaacctttgcaaatgagacatgtaccgtgtaaaatggaaatgctttccttggcagtgagttaagcattttcacgataacaatttggaatc

SEQ ID NO: 945167 - DNA, 120 bp, Artificial Sequence
  ENSG00000280719_1 (sequence is synthesized)
ctagaaaaataactggattttgaaatggaaaatgagctctgcactttgctacttttgtgaccccacatcctcatctccaaatgcggatgttacaacagagcttgctgcggaagtaaaatt

SEQ ID NO: 945168 - DNA, 120 bp, Artificial Sequence
  ENSG00000280719_2 (sequence is synthesized)
tcaaaataatcctccaacgtgtttgtggcctgaaggagcagagcagcggtgggaacaatttaattcctaataaagtccatacctctaagtcgctgcgtgtgtgccattgaaacgcagaga

SEQ ID NO: 945169 - DNA, 120 bp, Artificial Sequence
  ENSG00000280719_3 (sequence is synthesized)
agttgctagaactcctccactcctgcagagctgttgcctctctgggcctgtgtgacaatgtttgctctccctgctgtcactttgcacttccccgagtctctctggatggcacttcatgat

SEQ ID NO: 945170 - DNA, 120 bp, Artificial Sequence
  ENSG00000280719_4 (sequence is synthesized)
ttctccctgaagcaatgatggaagtatgtcagctgtcaaaggttctggcagcagaaggcagctgagaataaagcggcttcacggtaatgtcggtgaccccctaaccataccccgctttcc

SEQ ID NO: 945171 - DNA, 120 bp, Artificial Sequence
  ENSG00000280719_5 (sequence is synthesized)
accgatgatttgtctggacagtgtttaaagcagatgaaatatacattttttgaatcaggcaacaggagatgaccagtgctgggtttcatgggaaccagaggatttacaactttgcttggg

SEQ ID NO: 945172 - DNA, 120 bp, Artificial Sequence
  ENSG00000280719_6 (sequence is synthesized)
ctccacgtaccagcaggagcctgatgaggagggcggctgtgttctgaattgttttaggaagtctccttcagcccaagaccgtctggacaaaattgccatgggatcctgttgctgcagcag

SEQ ID NO: 945173 - DNA, 120 bp, Artificial Sequence
  ENSG00000280719_7 (sequence is synthesized)
gcaggatgttaccaagtgagacgttgactcaaagaaggggagctgagatcaggaaggccaagatggcatccaaaaattcaaacacaccaaggaggccaggtgcgatggctcacgcctgta

SEQ ID NO: 945174 - DNA, 61 bp, Artificial Sequence
  ENSG00000280719_8 (sequence is synthesized)
gcgtgctagaaggctgaggttgcagtgagccacgccactgcactctagcctgggcaacaag

SEQ ID NO: 945175 - DNA, 120 bp, Artificial Sequence
  ENSG00000280719_9 (sequence is synthesized)
aaaaaaaaaaaaaccaaaaaacaaaacctccaaaggacatatgtgtgctcttgctctcaggaagcttgtgattcctggggagaaactgatcacacacacaccgagtattgtaaagtgatt

SEQ ID NO: 945176 - DNA, 120 bp, Artificial Sequence
  ENSG00000280719_10 (sequence is synthesized)
ccgagtattgtaaagtgattcaaagttgcacaagggagaggcaagttctgagtctcctcctgcctcccagttcccttccttgaatgcagggtcactgactgattggtcacatcccaagac

SEQ ID NO: 945177 - DNA, 120 bp, Artificial Sequence
  ENSG00000280719_11 (sequence is synthesized)
catgattggctattttacaagtagacaaggtcaccatgctttaacaggcaaggccccatgagccacctctctttgttggaagttgcctgcgtctggccctcctctcacttcttgagtgta

SEQ ID NO: 945178 - DNA, 120 bp, Artificial Sequence
  ENSG00000280719_12 (sequence is synthesized)
ggtttgaggtctgggaatgctgctggtagctgtggtccatccctttcaagattgggatttggaagataaaggaaagatcctgtttggagcctgagcctaagcatagagttccagcctgag

SEQ ID NO: 945179 - DNA, 120 bp, Artificial Sequence
  ENSG00000280719_13 (sequence is synthesized)
tacgggctggagttccttttgagagtgcttcctgggaaatgttgtcataacattgacagggcagaatttcagcatttctcacccttggccctaatatccatctcccaaatcacccccagt

SEQ ID NO: 945180 - DNA, 120 bp, Artificial Sequence
  ENSG00000280719_14 (sequence is synthesized)
gccaggaatcattaagaaagcagtggtagtgttgagacaaccaaaaggctgttagtttgagaaccgtcacatatagcagatggaattcttgaaaaagtgtcttcagcattaggtagaggc

SEQ ID NO: 945181 - DNA, 120 bp, Artificial Sequence
  ENSG00000280719_15 (sequence is synthesized)
atattgttatacataaagaaaggccggagaaaaacaccaagaactttctggggtaacttctctacaggaggttgctgtgtccccctagacagctctatcaacaggtgaggactgggaatc

SEQ ID NO: 945182 - DNA, 120 bp, Artificial Sequence
  ENSG00000280719_16 (sequence is synthesized)
tagtggtgaattgatgtgactgggttggggcagaaatgccatggggcctgatgcagcacagctgtacgtcatggaaaatgatccctgagacagtcagcaactggatgtagaatgaatctg

SEQ ID NO: 945183 - DNA, 120 bp, Artificial Sequence
  ENSG00000280719_17 (sequence is synthesized)
tttaagtaatgagtgttcgctttaggagagcaggatgcaggacaatagccaggagagagcaaaacctgtttgaaagagttgagggatttgtgatgtcctgcctgacacaccagcacccct

SEQ ID NO: 945184 - DNA, 120 bp, Artificial Sequence
  ENSG00000280719_18 (sequence is synthesized)
gatgatgctgtcaatggctttctctcaattagtccccctggacaggtggaagccgaggtaagttgggtaattgatgtcttcatgcttccacaaagggcctactttgggaagatggaatat

SEQ ID NO: 945185 - DNA, 120 bp, Artificial Sequence
  ENSG00000280719_19 (sequence is synthesized)
gttaatgcaggtccctgcatgaagcagggaattctgaacacatttgcaggccggtgaaggaaaggtccttccccatgtcatggttccacatgctctccaccataaacttggaagaattca

SEQ ID NO: 945186 - DNA, 120 bp, Artificial Sequence
  ENSG00000280719_20 (sequence is synthesized)
agctgacacatcatgtgaaattcagggtgaaaaaagtctgttgaaatggataatggaatgtggaagacctgtggaacatgtagttggacctttaactctgtctgtatccacacaaaagcc

SEQ ID NO: 945187 - DNA, 120 bp, Artificial Sequence
  ENSG00000280719_21 (sequence is synthesized)
tgtaatagaatgttcaagcataacatccttgaatttttcaaaaataactttacagctgatccatttattttgtcggtggggtgaggggacagagagaagaatgggaaagagagtgagagc

SEQ ID NO: 945188 - DNA, 120 bp, Artificial Sequence
  ENSG00000280719_22 (sequence is synthesized)
agggaaagagaagagtgatgattgaaggggaagagaaggaattttctaacaactccttgccacaaaatgatgagtgatggtgagtgatttaattaggtcattaagtggatgaaataacat

SEQ ID NO: 945189 - DNA, 120 bp, Artificial Sequence
  ENSG00000280719_23 (sequence is synthesized)
ggccaaggtaaacttacgtaaactgtttcttatttaaattatattggatacttggatcatctgtttaataaaaaatctcatccactcttcaatattggcttaaatcctctcccctgaaca

SEQ ID NO: 945190 - DNA, 120 bp, Artificial Sequence
  ENSG00000280719_24 (sequence is synthesized)
aaaccttttctaagcactgcaactgggacattttttagttctttttacattttttttccatattatttagttgaaactaattgcatggagctctattccacgtagttacttccatgggtc

SEQ ID NO: 945191 - DNA, 120 bp, Artificial Sequence
  ENSG00000280719_25 (sequence is synthesized)
catgagtcttatttctccccaaagacatttttcttagggaggaagaaaccaagctacaaacgtttttctcatgtgcttcctacactgtgttctgtgcagtagatgctgctgaacatttgc

SEQ ID NO: 945192 - DNA, 120 bp, Artificial Sequence
  ENSG00000280719_26 (sequence is synthesized)
caggagcctgatatttggaaagtttggctcattttcaaggctatgcaatttaatgatactgacaaaccccaaaatttctagatcccaattaagtacttcattgtcctgacttcattcatc

SEQ ID NO: 945193 - DNA, 120 bp, Artificial Sequence
  ENSG00000280719_27 (sequence is synthesized)
cctgacttcattcatcataatggaaaattaacttactgtctaatatctcattttcttctctttaatatagataataataaactaacccatgcaaatgtattgaagaataatgaataaata

SEQ ID NO: 945194 - DNA, 120 bp, Artificial Sequence
  ENSG00000285792_0 (sequence is synthesized)
cctcccggcatgatccaccatctgaagctgatgacatgcatcttgtctgacttcccattaaaacaaagctccatgaggacagggaccacactgcgtcatccatcctaggccaggcacggg

SEQ ID NO: 945195 - DNA, 120 bp, Artificial Sequence
  ENSG00000285792_1 (sequence is synthesized)
gcaggagctcggccaacgccaggggtgtcatgggttacacccgacactagtttccaaacagacccgaagagcctcagggcacacaaacggttggaactcagccattatccaccagctgcc

SEQ ID NO: 945196 - DNA, 120 bp, Artificial Sequence
  ENSG00000285792_2 (sequence is synthesized)
gtaagacgtgtgagaaaaagccggccaaagagcttaccacaaaatgcagcaattcattccatcagccagcggcaaaggatcttagaaaataaagctgtgctcatcagtggctctcccgca

SEQ ID NO: 945197 - DNA, 120 bp, Artificial Sequence
  ENSG00000285792_3 (sequence is synthesized)
gcaaagagaagagcgcggcgtccgcgcttccccaaaagggaattctggctttgcacccggcaggcaggagagcggaacatccgacaccaggcaaggccggcccggctctgtgtggggagt

SEQ ID NO: 945198 - DNA, 120 bp, Artificial Sequence
  ENSG00000285792_4 (sequence is synthesized)
gtgggagtgtcacaccagttttaggctcaatctgcacacaggagtcgagctttgtttttgtgtgtttaagacagagtctcactccgtcgcccaggctggagcgcacagtctcagctcact

SEQ ID NO: 945199 - DNA, 80 bp, Artificial Sequence
  ENSG00000285792_5 (sequence is synthesized)
tcccaggttcaagcgattctcctgactccacctcctgagtaacttggatccagtagagacagggtttcaccatatgggcc

SEQ ID NO: 945200 - DNA, 120 bp, Artificial Sequence
  ENSG00000285792_6 (sequence is synthesized)
tgatccgtccaccttggcctcccaaagggctgcgattataggcacgagccaccgtgcccggcccagctttagtttttgagctaagaccagcaggcaagaaagagcagctggccaggcagg

SEQ ID NO: 945201 - DNA, 120 bp, Artificial Sequence
  ENSG00000285792_7 (sequence is synthesized)
ctaagaccagcaggcaagaaagagcagctggccaggcagggcgcccagagaggttccttcccaggtgaaatgcccacttcacagacagagctgcgatgcctgtagctccatcccggaagc

SEQ ID NO: 945202 - DNA, 120 bp, Artificial Sequence
  ENSG00000285792_8 (sequence is synthesized)
tgtgtatcagatgccaccagcgcccacgggggatattctcatcccagggctacagtgggattatcttctcccctcattagctgagcgggatagaaaataaaaccccgaagctatagctta

SEQ ID NO: 945203 - DNA, 120 bp, Artificial Sequence
  ENSG00000285792_9 (sequence is synthesized)
aatgcgaggaaccccacccagaaaagccaaagccacctcgtacccgtccccaggactcacttcccggggacttaccagctccaccaggaaggcagggaccactccgcccgctttggagaa

SEQ ID NO: 945204 - DNA, 120 bp, Artificial Sequence
  ENSG00000285792_10 (sequence is synthesized)
ggcccaggggaagttgagcaggccagctcccagcgcggacttcatgaggatgaagacagcgcccatcgaggacagagtggcagcagccgtggcaggaaaggcccacccagataatccaag

SEQ ID NO: 945205 - DNA, 120 bp, Artificial Sequence
  ENSG00000285792_11 (sequence is synthesized)
atgatcccatctcaagatcgttacttatatctgcaaagaccctttttccaaataacgttaacagtcacaggttccagggcgtggcataaatctctctactgggggccaccattcagccca

SEQ ID NO: 945206 - DNA, 120 bp, Artificial Sequence
  ENSG00000285792_12 (sequence is synthesized)
ctacacccctcacatctgagatctgtttgagttctcatcagtcattcaacaaacactgagtgcctactgtatgcaggcactggagctcaaaggtgaaagagaaggctcctccagagaagg

SEQ ID NO: 945207 - DNA, 120 bp, Artificial Sequence
  ENSG00000285792_13 (sequence is synthesized)
ggacggtcccgtggggagctcaagaagagacaagccacccaagcccaatgggaggaccggactacgagacccaagaatggaggtgaatctggaggggcttcctggagaaagtgtgggggc

SEQ ID NO: 945208 - DNA, 120 bp, Artificial Sequence
  ENSG00000285792_14 (sequence is synthesized)
tgaggggatatctgtgcaccattggtgaagggctgggaggatgttctgggaagtggagactcccagtggcaggtgcatgagccagtgctcccgggaagggccccggggactggggttccc

SEQ ID NO: 945209 - DNA, 120 bp, Artificial Sequence
  ENSG00000285792_15 (sequence is synthesized)
taggatagagacctaggtcagcgctgagctgggaaaaggcttaaactcttgtgtcccactcgctggagggtcactaaaccatgtggagatggcactggacacagcagggaaggagggggc

SEQ ID NO: 945210 - DNA, 120 bp, Artificial Sequence
  ENSG00000285792_16 (sequence is synthesized)
tgcgggtgacaccgcaggcagggcccgtgcagtacccaggctgggagagggcggggaccacacgcagtattcacacagctctccgaggcctgccaaagaggccaagtcattcccgcttcc

SEQ ID NO: 945211 - DNA, 120 bp, Artificial Sequence
  ENSG00000285792_17 (sequence is synthesized)
ccccaaatccagcctcctgagaaaggagataaagggcccttcagcagcggctgggggctttgcagtccttaatctccgctcgggggctggggggacacttccctgtccctgccggtgggt

SEQ ID NO: 945212 - DNA, 120 bp, Artificial Sequence
  ENSG00000285797_0 (sequence is synthesized)
gtcacgccagctgcacagtcttcactgagggagcttccaagtgccattttattaatgtggagagaagaataacagatcataaatgtttgaggtctatccagccggagtacaggggattat

SEQ ID NO: 945213 - DNA, 120 bp, Artificial Sequence
  ENSG00000285797_1 (sequence is synthesized)
ctattatcctgtgagctcgtgttttattcatcttcgtgttcccgtgaattatacagtgcaaaaactgcttagaaggcttcccctcctagacagcccaacagcacctcaacctcagccgga

SEQ ID NO: 945214 - DNA, 120 bp, Artificial Sequence
  ENSG00000285797_2 (sequence is synthesized)
aacagcacctcaacctcagccggaatgaaactgaatgtgttactgcgcacccaaacagagcttctcttcctgctttctctctcctgaattcttgaccaggcgcagtggctcacacctgta

SEQ ID NO: 945215 - DNA, 88 bp, Artificial Sequence
  ENSG00000285797_3 (sequence is synthesized)
gcaagaagatgcaagcctagagaaaccaagcaagtgcctcccagtgtcttggctaactaataccagagccaggattgtgaccgggctg

SEQ ID NO: 945216 - DNA, 120 bp, Artificial Sequence
  ENSG00000285797_4 (sequence is synthesized)
ttggctaactaataccagagccaggattgtgaccgggctgcctatccccgaccccaggctcttagaaccacctccaccccaggaaggcatctgactgtgctcacctgcacagtgaagaaa

SEQ ID NO: 945217 - DNA, 120 bp, Artificial Sequence
  ENSG00000285797_5 (sequence is synthesized)
aacacaacttggacactcactcattggacactcactcatccttctgagcattcagccacctaccttcactcgctataactagcatcctgagtgacaccctgctgccctacaaaacaacga

SEQ ID NO: 945218 - DNA, 120 bp, Artificial Sequence
  ENSG00000285797_6 (sequence is synthesized)
tgccctgggagatgaaatgcctgaagagcatgacactgcagcctccaaccagctccggatcattcttcctagaccaatgactctgaacagagaaatctatcagcatcccccggcaacatc

SEQ ID NO: 945219 - DNA, 120 bp, Artificial Sequence
  ENSG00000285797_7 (sequence is synthesized)
ttctgaagatgaggcctgcatggagattctgactcagtgggcatagagaggggcctacgtcagaacatactgaaaaatgtttccgtgcgaaactaatgtacatccccaattaaggaaccc

SEQ ID NO: 945220 - DNA, 120 bp, Artificial Sequence
  ENSG00000285797_8 (sequence is synthesized)
tgttaggaagaacagacgcatccctctctgccagaagccttgacgtggatgaggctttctttttagttgtttctcatcctcaggagaacattgagaagggcgaagggggtgttggctcac

SEQ ID NO: 945221 - DNA, 120 bp, Artificial Sequence
  ENSG00000285797_9 (sequence is synthesized)
tcccccacgttgctccaatacatctggccgaacccccagtcaggccattgagaacccaaagctggtcagcagtgtgtaggaacagggcagacctgacagcagctcgagagccagcactgg

SEQ ID NO: 945222 - DNA, 120 bp, Artificial Sequence
  ENSG00000285797_10 (sequence is synthesized)
ggaccaaggcgtggtccacaagggaggcctcaccggccgtgagcgttccaagcatccacaaggttacagcagacatcagagctccagaaggagcttagaacatcaactcactcttagcat

SEQ ID NO: 945223 - DNA, 120 bp, Artificial Sequence
  ENSG00000285797_11 (sequence is synthesized)
ccatcaccagcagcagtggaagcaattcagaagcaaaccttctccagaaacaagatgaggctggtcttctctgcttcctctttaaaaaatgaaacttgaagggggcaagagctatgatgt

SEQ ID NO: 945224 - DNA, 120 bp, Artificial Sequence
  ENSG00000285797_12 (sequence is synthesized)
cctccaggcttttgctttctacctccctcttcctgtcatgaaggattggtggtacgggaatatttccacattctgttaacacggaggagagagaagggactctgattccgccagccatca

SEQ ID NO: 945225 - DNA, 120 bp, Artificial Sequence
  ENSG00000285797_13 (sequence is synthesized)
ctgctaaaacagggcttgagggttggggacaccagcgtccttctcactgaagtagcaatgttgaaagaaaacagaaagatggccccattggaaaaagaacagaaaacgtttacaatgaag

SEQ ID NO: 945226 - DNA, 120 bp, Artificial Sequence
  ENSG00000285797_14 (sequence is synthesized)
tgggatgtaaaggtagaaagtagaaggaaagaaacacaagaaaattaaaatgcgcttgtaaaactgtgaactacattatgctatattaccagtaatttcagtgactgctcacttaggaac

SEQ ID NO: 945227 - DNA, 120 bp, Artificial Sequence
  ENSG00000285797_15 (sequence is synthesized)
gcttttcttttaaaagaaaaacagagccagctctttcttagttgaataacaacagagagaatcttaaagtctggattgcgtttcttggtttttaacattgtttacatttgttatttgtat

SEQ ID NO: 945228 - DNA, 120 bp, Artificial Sequence
  ENSG00000234471_0 (sequence is synthesized)
tcgcggctctgccctgcgttcccgggatttctgctcctgcctgggccccctcccggcccctagccctgggctgcacctggatctgggctcaggaaggtgactttctgcccagggtcagct

SEQ ID NO: 945229 - DNA, 120 bp, Artificial Sequence
  ENSG00000234471_1 (sequence is synthesized)
cacatctgtgaaacggagctgcagctcaggcaggggccaagattcacagagatttgcctctgcatgctccctggaaatggggtcagcaaggaccaagatacagaccccagggaagatggc

SEQ ID NO: 945230 - DNA, 120 bp, Artificial Sequence
  ENSG00000234471_2 (sequence is synthesized)
gacctccaggtccaaaaggaagagcagaaaattcatctccatggcaacgccttaggaagctgcagcctcaagattataacttcccaagcaatgaagacaataaatggatttttcacaaaa

SEQ ID NO: 945231 - DNA, 120 bp, Artificial Sequence
  ENSG00000285798_0 (sequence is synthesized)
gtctctttggataacaatcacaggacccagatgctaaggatgatgatgtcctcttaagaaaagaagacagaaacacacagagagaatgtcatgtgacagaaattgaagagatgcagcttg

SEQ ID NO: 945232 - DNA, 120 bp, Artificial Sequence
  ENSG00000285798_1 (sequence is synthesized)
aagccaaggaatgcccaggattgatgaccaccactagaaataggaatagttgattgaatccatgggtttggaacccacatgctcagaaggaaaagcagttgtactttgccatgacagtcc

SEQ ID NO: 945233 - DNA, 120 bp, Artificial Sequence
  ENSG00000285798_2 (sequence is synthesized)
taggaaactaacacagcgcccaataaatagttgttttgcgaagtatgagaatacagagactttatgaaataaagtatttgcaaacttattcaagaggataaaaaggatattttacaaaga

SEQ ID NO: 945234 - DNA, 120 bp, Artificial Sequence
  ENSG00000285798_3 (sequence is synthesized)
attgtacagcgagtatcaagaagaaaggcgatgcatgtgaagacgagatgcaaagtcacctgtttataaatccaaattagaggttttcccagaaaccgacactgaaagcatcctggattt

SEQ ID NO: 945235 - DNA, 120 bp, Artificial Sequence
  ENSG00000285798_4 (sequence is synthesized)
tgagcttccagaactgggaaaataagtatctgttgcttaagccactcagcgagtggtattttgctctggtagtccaagcagactaatgcaacaactcacaattggtagtattgcatgagt

SEQ ID NO: 945236 - DNA, 120 bp, Artificial Sequence
  ENSG00000285798_5 (sequence is synthesized)
gagaaaaataaacgttttttgttagtttattttaagcccctgagatttagggacttttttgttgccatggcacaatctagcctagtctgattaaaacatagccattttgcttatctgttt

SEQ ID NO: 945237 - DNA, 120 bp, Artificial Sequence
  ENSG00000285798_6 (sequence is synthesized)
cctagtctgattaaaacatagccattttgcttatctgttttacacaatatttgccataaaataaacaaaaatcaattttataatataaaaaagaaaacaattttactatcagtaaagaaa

SEQ ID NO: 945238 - DNA, 120 bp, Artificial Sequence
  ENSG00000285798_7 (sequence is synthesized)
tgtgtatgtgtgtgtgtatgtgtaatataaatactatgttccatgtaaaccttgctgtgactacatgtttctgcttccactattattgatataattgcctctaaacatttgctgcattaa

SEQ ID NO: 945239 - DNA, 120 bp, Artificial Sequence
  ENSG00000285798_8 (sequence is synthesized)
tattgtttaaagatttttgaagcagttcctcaagtttctgatttcttttttaattttgtgacactgcatctggtttatttgcttccatgttggcactgattttcccttaattatccagag

SEQ ID NO: 945240 - DNA, 120 bp, Artificial Sequence
  ENSG00000285798_9 (sequence is synthesized)
aacaaaagattatctttaataaagaaagagaaaataataaaagagaatataaaacattagaggaaattaatccccctctttccactgaatgatatttgtatgatctttttccagatattt

SEQ ID NO: 945241 - DNA, 120 bp, Artificial Sequence
  ENSG00000285798_10 (sequence is synthesized)
tattatattctctctttaataatagcttagtgctgtttcaaaaaatcttttttaacattgtcctcctttgcttgcttttagttgtctataatacttctgaatattatgggagaaaaaata

SEQ ID NO: 945242 - DNA, 120 bp, Artificial Sequence
  ENSG00000285798_11 (sequence is synthesized)
tcttacctaagattttaattttttttcaacaatttatatgcaatttgctcttaacctatgtccgcatgtatctgtgtctctccctgttcctaaggtgtggttctctggaatttttatccc

SEQ ID NO: 945243 - DNA, 120 bp, Artificial Sequence
  ENSG00000285798_12 (sequence is synthesized)
atgtaattttctactgtgtttcattttaaatgcaaatataatactgatggcattaggtaattgtgagggttaaataaacagagccaagtccttagtggatttcattaaatactagtactc

SEQ ID NO: 945244 - DNA, 120 bp, Artificial Sequence
  ENSG00000285798_13 (sequence is synthesized)
ttttgcttccttttttcctttaccttaaagtgataggaaatcactttaaaattattttcttcagttaataaatgctatcacttatttaagctgttcttacattgtctcttttataccacc

SEQ ID NO: 945245 - DNA, 120 bp, Artificial Sequence
  ENSG00000280710_0 (sequence is synthesized)
cctgcgcatgcgtgatacttgcaccggtcgagatggtagcatgagtctggaggtcattttctttgagaaaggctccgcttctccgggtttttgctgatgccgatcccgggggattgagga

SEQ ID NO: 945246 - DNA, 120 bp, Artificial Sequence
  ENSG00000280710_1 (sequence is synthesized)
aacattgagctctggagtggaaaagatcactaaaaagcttctccttgaaaaatactcagaagatgcaacacacacacacacacacgtgtgtgcacttacacacgcggacaccgtctcaca

SEQ ID NO: 945247 - DNA, 120 bp, Artificial Sequence
  ENSG00000280710_2 (sequence is synthesized)
gctctcagcctgctcccaaccaggtgtctccagaactttttctctccgccaccaactccgcctccagacagaccgcaggtgctttctgtcatagggactggcgtgccgcggacagtgtga

SEQ ID NO: 945248 - DNA, 120 bp, Artificial Sequence
  ENSG00000280710_3 (sequence is synthesized)
caaagaaactgtatgatggatatgagaacttcgtaagacccagcagcaaacggggagcggctggcgagcgctccacagcccccaagcgtgggagctctagatcggaatttgtaatttgga

SEQ ID NO: 945249 - DNA, 120 bp, Artificial Sequence
  ENSG00000230337_0 (sequence is synthesized)
gcggccgcgggcgactcctggtacccccgaggccccgcgaactcaccttcacaaagctgtcggcgtccgggaagcctggcagcaccatctctccgtcggatttggttgcgctggtcgccg

SEQ ID NO: 945250 - DNA, 120 bp, Artificial Sequence
  ENSG00000230337_1 (sequence is synthesized)
actcctccaagcagacgttgtttcctgcagacatcgctggaaccattctggttaacacagagtgggaactcagtacacatttgtgaagtgaactcctggaagagctcttgtgagggaggc

SEQ ID NO: 945251 - DNA, 120 bp, Artificial Sequence
  ENSG00000230337_2 (sequence is synthesized)
accgaattatcaggcagctcaagagatagattcactctcctgaaattagagatgggatgcccttaatacaattcattccacccattaagtcttcaataaatgttcagcatatccagttaa

SEQ ID NO: 945252 - DNA, 120 bp, Artificial Sequence
  ENSG00000230337_3 (sequence is synthesized)
acaggaccctgggctcccgggtactgggtggcgccattttttcagcctgcacggctcgtctcgcgagagcttgtcggccgaggagacgggacgcgtgcgcaccacgcatgcgccaggtaa

SEQ ID NO: 945253 - DNA, 120 bp, Artificial Sequence
  ENSG00000230333_0 (sequence is synthesized)
tggtggaggaaccacttgcatgagaataagaggttgttccccaggccatcagactccaaacagttatgcaactggagcctcctgaggatgaccccttctgcctgggacccttagatcagc

SEQ ID NO: 945254 - DNA, 120 bp, Artificial Sequence
  ENSG00000230333_1 (sequence is synthesized)
ctctagagaagctttgactgctgtttccccaaaacagcaccccctgccatcaggaagcagtgagaatgctaaatgatagctgtatggattaggttcagcttttcacattgggaaaaatga

SEQ ID NO: 945255 - DNA, 120 bp, Artificial Sequence
  ENSG00000230333_2 (sequence is synthesized)
tgttattttattcaacagaaagccatgttggttcaccacatgtatcgcatcctgataatgtgaagtgaaaaagtagagcctggaagcctttgtaagatgactgtgccagaggaggaagat

SEQ ID NO: 945256 - DNA, 120 bp, Artificial Sequence
  ENSG00000230333_3 (sequence is synthesized)
aaatatctcgatgctatggaggcctgtcagctctttgaagtatctgggcaatatcaagatttctacttcagatgaaaaaacaaatagttattcattgaccctgttgccgccaagaaagag

SEQ ID NO: 945257 - DNA, 120 bp, Artificial Sequence
  ENSG00000230333_4 (sequence is synthesized)
atccttgaaaagacagccttgaacaaagggcagtcaatagttctactcaaaagacatggagaaatgcaaaagacccatggagatttgtcttctaatcggcagcatcttgcaaggagaaca

SEQ ID NO: 945258 - DNA, 120 bp, Artificial Sequence
  ENSG00000230333_5 (sequence is synthesized)
agaagatttatactagccatgcaaggaatctttggaagtctaacagacctgacttgaagagaaggctttaaacaagaaattcttcattctggaacagtgattcttaaagtgcggttcaga

SEQ ID NO: 945259 - DNA, 120 bp, Artificial Sequence
  ENSG00000230333_6 (sequence is synthesized)
gaccctgggagacactgacattctttcagagtgtgagtgaggatttcctctttgcaactacaatctgtgtaaggttggattttctttacatacataaactaaaataagattgcaataaga

SEQ ID NO: 945260 - DNA, 120 bp, Artificial Sequence
  ENSG00000230333_7 (sequence is synthesized)
tgaatgcagaagcagataagagaatccagctgtcttaagttagacttcacagagatttgcaaaaatccaaacaagaccactctcgtcattaaagttattttccatttgttatggtgaact

SEQ ID NO: 945261 - DNA, 80 bp, Artificial Sequence
  ENSG00000230333_8 (sequence is synthesized)
attttccatttgttatggtgaacttattttgcaggaaatttgttatttatagtaacatacaattttgttttttgatcatt

SEQ ID NO: 945262 - DNA, 120 bp, Artificial Sequence
  ENSG00000230333_9 (sequence is synthesized)
gttctttcaggtcctcaacaattttaagactattaacttgttttggatcaaaaagttctagatttgctattctagacatgaatcctttgaaattaattggcttcataagtatatttttca

SEQ ID NO: 945263 - DNA, 120 bp, Artificial Sequence
  ENSG00000230333_10 (sequence is synthesized)
agtttgtggcttgtcctgtaaccttctactgtgtagaagttttaaattttaatttaaagaaatttaaaattttttcatttttgtttgtgcttttggtgtcatatttaggaaatccttctc

SEQ ID NO: 945264 - DNA, 120 bp, Artificial Sequence
  ENSG00000230333_11 (sequence is synthesized)
taccttgagttcatgaaaatatcctcttatatttagtatttacagtttgttcttcatctttaggtctataatttattgaaaatatagttttgtatgtgatgtaagctaaagatatttttt

SEQ ID NO: 945265 - DNA, 120 bp, Artificial Sequence
  ENSG00000230333_12 (sequence is synthesized)
catccactcattctcccactgactttccctctgccacttacttacctacataagaatttgtcgtggagattctcttttctattcttttagtctaatggcttaattgttgatcaattaccc

SEQ ID NO: 945266 - DNA, 120 bp, Artificial Sequence
  ENSG00000230333_13 (sequence is synthesized)
tttttaactattgatgctttagagtaagtcttgatataaagccatgtaagtcccttgaattagtctcccacttttccttcttaaaaacattctgggatcttcttggcctttaactcctct

SEQ ID NO: 945267 - DNA, 120 bp, Artificial Sequence
  ENSG00000230333_14 (sequence is synthesized)
gacttaattttaggatcaatttctcagattacattaacaacctgttcaaattgcatagattttataggtaaatctgtataaaatttacatgttataatattggggctttttattcataaa

SEQ ID NO: 945268 - DNA, 120 bp, Artificial Sequence
  ENSG00000230333_15 (sequence is synthesized)
cattttcaccaacgttttagtttcatatcttccaataagattttataatttttcatacctatcttagatgattttggttgcatttattttttatagttttagttttattgtcaatgcagc

SEQ ID NO: 945269 - DNA, 120 bp, Artificial Sequence
  ENSG00000230333_16 (sequence is synthesized)
tttttccaattcaattttataacagttttgctggttaaaaaaaaaaaaaagactatttattttgtgtattggtttttaaattgtacaatgtttctgaattttcttacttccaaacagtcg

SEQ ID NO: 945270 - DNA, 120 bp, Artificial Sequence
  ENSG00000230333_17 (sequence is synthesized)
tctataaattatcttgattgtctaaaatgtgaaattcatatactatgagaatgataattttattttttcattttcaattcttaaacttctgatgacacttggctggaacctccttcacta

SEQ ID NO: 945271 - DNA, 120 bp, Artificial Sequence
  ENSG00000230333_18 (sequence is synthesized)
ggttgaaaataagtggcaacagtggtatccttgttctgttattgattccaagagcctgcctctaatgtttccccatgtattatgatgtttgtgtaaattttgatagaccttatttattaa

SEQ ID NO: 945272 - DNA, 120 bp, Artificial Sequence
  ENSG00000230333_19 (sequence is synthesized)
gtaaaaagattctcttctagttcaagtttggtctacaagtttttattgtgaaagtgaactgaattttagaaataccttttaatgtgtataaaaaattatatctttatttctgttaatgtg

SEQ ID NO: 945273 - DNA, 120 bp, Artificial Sequence
  ENSG00000230333_20 (sequence is synthesized)
atagtttcaggttttgtgtttgaatctttggttcatttttacttgattttatatatgttgtaaggtaacatttttgcatgtagatattcagattcatagcaccatttgtttaaagcatgc

SEQ ID NO: 945274 - DNA, 120 bp, Artificial Sequence
  ENSG00000230333_21 (sequence is synthesized)
ttttcttctttaccctgtttttctgtcttggttcatgaaacaggaacttctttaaattcttttaaactctcaccctctcgggcagtaattgaggaaaggacttccacctttctctttgcc

SEQ ID NO: 945275 - DNA, 120 bp, Artificial Sequence
  ENSG00000230333_22 (sequence is synthesized)
tattcctagcttcattccattgtaggagagactttttggattactgtttatgtttcacatcccttgcttcactcctcggccatgtgatagcctcatatcagaaaccagcttgaacaaact

SEQ ID NO: 945276 - DNA, 120 bp, Artificial Sequence
  ENSG00000230333_23 (sequence is synthesized)
cctccagccagcaacctgcaagatcatgaggctgtcagtcctacaactataaggaagtaaatcctgctgacaacctgaaagagcttatagcatgggaggagttgatgtggatcattggaa

SEQ ID NO: 945277 - DNA, 120 bp, Artificial Sequence
  ENSG00000230333_24 (sequence is synthesized)
ccctgccatcaggaagcaagctgatcaaggagagaagataaggcatggatattcagtttaaaatggtagagaaccataataatacctaccttgaagtgatgatataaactacatgacaca

SEQ ID NO: 945278 - DNA, 120 bp, Artificial Sequence
  ENSG00000230333_25 (sequence is synthesized)
gtgttggaacacacagagctgccacctggaaatccctgctcatctaagggttgcatctagactctggtagatttggggagggtggcatttgagttatgtcctttcctgagctgtcccatg

SEQ ID NO: 945279 - DNA, 120 bp, Artificial Sequence
  ENSG00000230333_26 (sequence is synthesized)
ccacagcttgctgctctgttgtctcctgacaattggtctccttgctgctatttccagaaagcttcacacagaaagcttcacacactcctctcactcctcagaccatctttcacataatac

SEQ ID NO: 945280 - DNA, 120 bp, Artificial Sequence
  ENSG00000230333_27 (sequence is synthesized)
tccaaaccaggctttctcaatttcaccatcctcacctccccacagcacatctgaggcccatctggagaatggttaccagaggctgggaagggtagtgggagattgaggggaggtggggat

SEQ ID NO: 945281 - DNA, 120 bp, Artificial Sequence
  ENSG00000230333_28 (sequence is synthesized)
gcccacaaataactaagaacatgcaatgtttgtctttctgttcctggcttatttcgcttaacataatgatcttcagcttcatccatgaagtcctgcaacattttcggtgcccaatgtggg

SEQ ID NO: 945282 - DNA, 120 bp, Artificial Sequence
  ENSG00000230333_29 (sequence is synthesized)
aattctggaatgtctttatagtctcctttatcctagttctgaatgacaacacattttttaaaattcatgtttctaactttgttcaatttgaaattaattatacttgtaatttttggactg

SEQ ID NO: 945283 - DNA, 120 bp, Artificial Sequence
  ENSG00000230333_30 (sequence is synthesized)
gaattgaattgaattatattgatccaaaattttttctcagaagaatgtaatttcatttctctgaacttcaaacatgagttattttccataatgatagtaaaaaattgaagaatagatggc

SEQ ID NO: 945284 - DNA, 120 bp, Artificial Sequence
  ENSG00000230333_31 (sequence is synthesized)
actatcagaataaatgcatgtagataaaataatcaatagctcatataaaaatgctttgctcacttttttaatcctttggcattgcctaaaagaactaaaggtttctctttcaacactagt

SEQ ID NO: 945285 - DNA, 120 bp, Artificial Sequence
  ENSG00000230333_32 (sequence is synthesized)
ctgtagaaaccaggtccttccccgtcctgctgggttactggagggttgggttggatgtacagcccgactggttttcacatctcctcttttgtcctccatggtgggtaataccaccacggg

SEQ ID NO: 945286 - DNA, 120 bp, Artificial Sequence
  ENSG00000230333_33 (sequence is synthesized)
aggaactgcaaaatattgaatgactaattctccaaacaaggagaacaagaagatttatactagccatgcaaggaatctttggaagtctaacagacctgacttgaagagaaggctttaaac

SEQ ID NO: 945287 - DNA, 120 bp, Artificial Sequence
  ENSG00000230333_34 (sequence is synthesized)
gcccacaaacagctcacggtctggtaggagcgacatacagacacagaaagttgtcatgagtaagcgctggacagagcttgataaagggtgccctagaacgcagagaagagcttatagcat

SEQ ID NO: 945288 - DNA, 120 bp, Artificial Sequence
  ENSG00000230333_35 (sequence is synthesized)
gggaggagttgatgtggatcattggaaaatacagcctgccacaaatggacataaacgaaagtctcctcatcgatagttaagcttcatccatgaagtcctgcaacattttcggtgcccaat

SEQ ID NO: 945289 - DNA, 120 bp, Artificial Sequence
  ENSG00000230333_36 (sequence is synthesized)
actttctggattttgctacagaagagaacaccatgtgtagggaacctgaattttttgtaataggccgtaagcatgcctgccctttggcctggaaagagacactatatcttccagggctgt

SEQ ID NO: 945290 - DNA, 120 bp, Artificial Sequence
  ENSG00000230333_37 (sequence is synthesized)
ctttgtatcctgagaaaccgaattaatctgcaccctctctgtcaaagcttcctgatcatcacagctggaaacaatctctaacttttgaaaatctgtaacaactactgagatgtaatatgg

SEQ ID NO: 945291 - DNA, 120 bp, Artificial Sequence
  ENSG00000230333_38 (sequence is synthesized)
agaaaagatgaaaaatgcaattttaagaaagtttctacaaactcgagttaatgcatataggactggttttgatctgaggagatctgcttcaattcttagtgaaggtcaaaattgctactg

SEQ ID NO: 945292 - DNA, 120 bp, Artificial Sequence
  ENSG00000230333_39 (sequence is synthesized)
gttgtctgctagtccattgtcttaaacactgagggaagagtttcccatgcttacacagataagtcagctttgcaaaataaatcatactatcagctaaataagccaattaaagcaggaata

SEQ ID NO: 945293 - DNA, 120 bp, Artificial Sequence
  ENSG00000230333_40 (sequence is synthesized)
atgtgattaaaagcaaatcacccaaacacttaaaatatcttaaaaatccaatatttattctccaataagggaaagtattcagacttaatgcatagaaatggagatgtgctagctatgcag

SEQ ID NO: 945294 - DNA, 120 bp, Artificial Sequence
  ENSG00000273165_0 (sequence is synthesized)
tctttttaagtgaagttcattttcttcatggaataagatagtgtagttcagcaaatattgagtacctgccacatgacaaactgtatgttctttaagaaccgtatgaaattgctgatattt

SEQ ID NO: 945295 - DNA, 120 bp, Artificial Sequence
  ENSG00000273165_1 (sequence is synthesized)
gatagatgttttcatggcttagaaaacatttctgaccaagaatagtttctatacttgtggagacactcatagccaaaaacttggatggtctaggttccctcagccccccgaaataaacct

SEQ ID NO: 945296 - DNA, 120 bp, Artificial Sequence
  ENSG00000273165_2 (sequence is synthesized)
tagtctgtttaagatgtgtaaagaatatgctctaagatgacccctgatgactcctgtgcctcttgatgtttatgacgttttgtaatgccttccccttgagtaaatttcttctaatcatca

SEQ ID NO: 945297 - DNA, 120 bp, Artificial Sequence
  ENSG00000250337_0 (sequence is synthesized)
cacagtccacatacagggttcttaacctgcgtttttacctacattttagactgaccctgcttgtgcctgtgaaccaaccaacaatctctggctgcagctcagaaaggacaaaagagaatg

SEQ ID NO: 945298 - DNA, 120 bp, Artificial Sequence
  ENSG00000250337_1 (sequence is synthesized)
gatgagggaaacttcccagggcttgtctgggtatgcccacagtggactggagcccaaaatgcacactggaggaagtggatggagccacgtggatgtcatgccttatgcaggggaggagcc

SEQ ID NO: 945299 - DNA, 120 bp, Artificial Sequence
  ENSG00000250337_2 (sequence is synthesized)
agaactcttgaaaacatggatgaggaaaagcataagtactgctttatgcttttcttatgaattttaaaagatgtaatttaaaggtactttaaagtgatatttgtgcccttgtaactgatt

SEQ ID NO: 945300 - DNA, 120 bp, Artificial Sequence
  ENSG00000250337_3 (sequence is synthesized)
caaagtagactgctaaggacaataagtaataagagtctacaaatatcagtaaattatgagaaaaaacggtctaatggtacttaaaattgcattgtgatttattaaataacattgaacagc

SEQ ID NO: 945301 - DNA, 70 bp, Artificial Sequence
  ENSG00000250337_4 (sequence is synthesized)
tactgcaaacatttaaacattttaaacgttcctcgaagacaatttttccttccaggacaatgactgatac

SEQ ID NO: 945302 - DNA, 120 bp, Artificial Sequence
  ENSG00000250337_5 (sequence is synthesized)
cctcgaagacaatttttccttccaggacaatgactgatacaccttcttaagcttacaactgcaaataagtctctgcctaacatagcatctctgctatacagccgggaatgtactcctact

SEQ ID NO: 945303 - DNA, 120 bp, Artificial Sequence
  ENSG00000250337_6 (sequence is synthesized)
caatgggatggctacacaatgaaatcaatgagtgactgcacttaaaaaatgcccattacaatatgagctatgtcttcctgaaggtggccttttaatgtcaaatgagataaagtatgtaaa

SEQ ID NO: 945304 - DNA, 120 bp, Artificial Sequence
  ENSG00000250337_7 (sequence is synthesized)
aattcctgatggtgtttaattattatcgaacatatttttcttcacaggagctgtcatttaaatgtgcttgccaactagcttgtttatcaaaacattccagaccctttcaaattctcattt

SEQ ID NO: 945305 - DNA, 120 bp, Artificial Sequence
  ENSG00000250337_8 (sequence is synthesized)
acattgtttcttgtttaccacacccataaatttgtattaccagcatatttaactatccggctattttggagattgaaaaaagaagacctgatttatcatgtgcaatatctcacacatctg

SEQ ID NO: 945306 - DNA, 120 bp, Artificial Sequence
  ENSG00000250337_9 (sequence is synthesized)
ttatcatgtgcaatatctcacacatctgtcatttctattctaccgcaattcgatggagtcttgttctgtggtccaggctagagggcagtggcatgatctcggctcactacaagctctgcc

SEQ ID NO: 945307 - DNA, 120 bp, Artificial Sequence
  ENSG00000250337_10 (sequence is synthesized)
ttactggcgtgagccaccgtgcctggccagcatcctctaattattattcatagtttgtgaatttaggcctacgtgaataataatataatatttactatgatgttactatctaccaacctt

SEQ ID NO: 945308 - DNA, 120 bp, Artificial Sequence
  ENSG00000250337_11 (sequence is synthesized)
tactatgatgttactatctaccaaccttatttttcttttctataaaataggagccaaaataatatttatgtcataccttatgaagttaaaataaaatataacgaatgaggggcttaacaa

SEQ ID NO: 945309 - DNA, 120 bp, Artificial Sequence
  ENSG00000250337_12 (sequence is synthesized)
ctcttgagctcttgtggtgacctgggaatcaatgtgtgaggtggtgctatgtagcaggaacccctcttgctttgcaaatagttttttgtttgttttcctttttgcccaatagagccctgc

SEQ ID NO: 945310 - DNA, 120 bp, Artificial Sequence
  ENSG00000250337_13 (sequence is synthesized)
tctactgacccttcaatgtgcccgtgtgcctaaatattcctggtcgtgtgaaaagaacccaggtattagctgaactaaggagcacaattctgcaacattttggcacccaaacacggggct

SEQ ID NO: 945311 - DNA, 120 bp, Artificial Sequence
  ENSG00000250337_14 (sequence is synthesized)
tgagaaatgaatgcaattggagaaactggttgttttaccaggcgttgattggaaatgtgtgcttccctttaagcagtcaagctcaacttgcagaactgatgggaaccccttgggaaaact

SEQ ID NO: 945312 - DNA, 120 bp, Artificial Sequence
  ENSG00000250337_15 (sequence is synthesized)
ggcctcaaatgtttgtctacacagtccacatacagggttcttaacctgcgattgaaactcccacaactttggcagaccaactcctcagaaaacattattctttgacatcaatatgttttg

SEQ ID NO: 945313 - DNA, 120 bp, Artificial Sequence
  ENSG00000250337_16 (sequence is synthesized)
attttgcatagataggcctaaatttttgatccactgctcaactcctgtctttaaaccattggttctcaaatagagttgattttgacacctagggaacatttgacaacatatggagatatt

SEQ ID NO: 945314 - DNA, 120 bp, Artificial Sequence
  ENSG00000250337_17 (sequence is synthesized)
gttgattttacagggcaacccttcataagcacagaattatctggccccaaatgtcgacagtgtcaagttcgagaaactctgcactaggcttttctgtctggttactcacccctcttcttt

SEQ ID NO: 945315 - DNA, 120 bp, Artificial Sequence
  ENSG00000250337_18 (sequence is synthesized)
gcactgcccccagttttatggatattgaattcctgatttctcactatattaattgcacttatagatattctaaattgatttgtatatatcttcctagtttgacccattgcttttaactga

SEQ ID NO: 945316 - DNA, 120 bp, Artificial Sequence
  ENSG00000250337_19 (sequence is synthesized)
attttactgggcttttataaaggccatttccatggagtttagtcattatcttcaccaaatttttatttgcttcagtctggggaggaactctatattaaaaaataaaaacaaacccaaaaa

SEQ ID NO: 945317 - DNA, 120 bp, Artificial Sequence
  ENSG00000250337_20 (sequence is synthesized)
ggcagacacacaggcggctggatgtcaagaggagcacaacagaggaggaacacagaggtggctagacacagagagtaacacactgacggctggacatacggagtaaaacaccgacaggca

SEQ ID NO: 945318 - DNA, 120 bp, Artificial Sequence
  ENSG00000250337_21 (sequence is synthesized)
cgggcaccctggcaggccaccgaccattagaaatagaatgacatggagtttagctggggcagtcagaggagagcccaggctgctgaacggctcgactctaggggaaacccttcccactcc

SEQ ID NO: 945319 - DNA, 120 bp, Artificial Sequence
  ENSG00000250337_22 (sequence is synthesized)
accccttctgactttccgagagctgcttccacccaataaaaccttgcaatcattctccaagcccaggtgtgatcagattctttcggtacatcaaggtaagaacctgggatacagaaagcc

SEQ ID NO: 945320 - DNA, 120 bp, Artificial Sequence
  ENSG00000250337_23 (sequence is synthesized)
tctgtccctgagacaaagtagaaggtctaagggagctgcttaacacaagccacctatagacggcaaaactaaaagagcaaaactagaagagcaccctgtgacacactcccactggggctt

SEQ ID NO: 945321 - DNA, 120 bp, Artificial Sequence
  ENSG00000250337_24 (sequence is synthesized)
accctgtgacacactcccactggggcttcaggagctgcaaacattcacccctacacactgctgtgcagtcggagccccatagcctgcccgtctgtatgctcccctagaggtttgagcagc

SEQ ID NO: 945322 - DNA, 120 bp, Artificial Sequence
  ENSG00000250337_25 (sequence is synthesized)
cggcctgcgagggggacaaggatctctccctgtggtgcctaggttggtttaaaactcttggcctcaagcgatcctcccaccttgaattcccaaagcaaggtgctattagtaattggctca

SEQ ID NO: 945323 - DNA, 120 bp, Artificial Sequence
  ENSG00000250337_26 (sequence is synthesized)
tatcctgtagccagatggaataagaagagagggaagggagattttgttcaaagggggagcataagctaaggaataaagccacaaacaatgattaaattaggtaaagtgcaattagctgaa

SEQ ID NO: 945324 - DNA, 120 bp, Artificial Sequence
  ENSG00000250337_27 (sequence is synthesized)
tattgcataagcatacatatgggaagaagtggaaaaaggagtgacaatatgaagctaaagggtttgaagtgttcaagataatactaggcttcctagcctattccgagacatcttgtttta

SEQ ID NO: 945325 - DNA, 120 bp, Artificial Sequence
  ENSG00000250337_28 (sequence is synthesized)
gagtgcaatagataagaactctaaggatgaaagtaggagacatgcattctagtctacgttttggttaatggactgaaagtgaaagatggactgaaattgggggatggaataaaaatgtga

SEQ ID NO: 945326 - DNA, 120 bp, Artificial Sequence
  ENSG00000250337_29 (sequence is synthesized)
tagaatagaaaatagaaaaagcaattagcctaatgtcattgatacttagagaaaatatggaaaatagtaaattagtgatatatatcttttctaattcaccagggtgagtgaacaaaggaa

SEQ ID NO: 945327 - DNA, 120 bp, Artificial Sequence
  ENSG00000250337_30 (sequence is synthesized)
atcggatttaaaagtattcatgacatagatgcaataaggtttctcagtcagacatagcaaattgagggaagggaagatttagaggattggaaaatgtcttgcttgtagactaataggata

SEQ ID NO: 945328 - DNA, 120 bp, Artificial Sequence
  ENSG00000250337_31 (sequence is synthesized)
tcaataagccatatgagcaataatttgaaatagtttttgtaaagtatcatgaaggtaaaccctgtttagaacaaattagatttgaagtacttgtgacaaatgcaattgacaatgccttta

SEQ ID NO: 945329 - DNA, 120 bp, Artificial Sequence
  ENSG00000250337_32 (sequence is synthesized)
tgcagctggaaaattgttgcttagcagaaaagcttgtgctggacaaatagatgtccaaattgaatagatgttttcttaagctgaactaattgagacaaatatccttattaaatcaaaaaa

SEQ ID NO: 945330 - DNA, 120 bp, Artificial Sequence
  ENSG00000250337_33 (sequence is synthesized)
acacatgatctggatgtttgacaaaataccttcagcaggaataatgaaagccctgacatttctgtgtgcataaaaactggaaaactttaaaagtaataaatcaccaagtctttataaaaa

SEQ ID NO: 945331 - DNA, 120 bp, Artificial Sequence
  ENSG00000250337_34 (sequence is synthesized)
tgcttcagtctccgaagtagctgggattacaatagactggattttatcaaggaatgtatttcttctagaaaatagatacactttcaaagatacgttaatttacatgagagcttgcctgtg

SEQ ID NO: 945332 - DNA, 120 bp, Artificial Sequence
  ENSG00000250337_35 (sequence is synthesized)
tgcacaatagaaagccaaaaataaagaggttatcatctaatggcacaaagttttcttatttcataagcttgcattttcttttcttattaaacaccgtctcacctttctttttcaggaaac

SEQ ID NO: 945333 - DNA, 120 bp, Artificial Sequence
  ENSG00000250337_36 (sequence is synthesized)
tgtctacacagtccacatacagggttcttaacctgcggtgagtaaagaatgtcactttccaacaggcccagatatcatatgctcttgggacctcaagaagagaggagtttacccaattca

SEQ ID NO: 945334 - DNA, 120 bp, Artificial Sequence
  ENSG00000250337_37 (sequence is synthesized)
cgtgaaagagatttacagaaaagttgtgaagatggtgcagaaatgtcccatatacctttcacccagcttctcctgttgttagtgccttacatgatgatggtgtgtccggaatgggtgggt

SEQ ID NO: 945335 - DNA, 120 bp, Artificial Sequence
  ENSG00000273160_0 (sequence is synthesized)
gtggaattctcaatttttaacggggacagacctgtcaccaaatattagtgaaaaatgtgccaagaactacagagcatctgaaaagttagaaatattaccataaacttactttaaaacaga

SEQ ID NO: 945336 - DNA, 120 bp, Artificial Sequence
  ENSG00000273160_1 (sequence is synthesized)
ttcaaccttcacacaccatttcaggaagtatctctacatttaaagcgagtccagttgttaatgtaaaaaaggtacaagaggccagggcacagtggctcaagcctataatcccagcacttt

SEQ ID NO: 945337 - DNA, 120 bp, Artificial Sequence
  ENSG00000273162_0 (sequence is synthesized)
gactccgcatgcgcactggagcctcggaatacagccaggactctcccgtcggaatgcgcccctaagttgggccaagcccattcattcaggggctcccgagccacgtaggcgccatccctg

SEQ ID NO: 945338 - DNA, 120 bp, Artificial Sequence
  ENSG00000273162_1 (sequence is synthesized)
gccagaggggttctgaggaggtgggcaagggcagacactctctcccggtctcaaattcgaaatagggactagaagggaacttcacgcgaggcctcgcaactgtcgcgagaatcagaacag

SEQ ID NO: 945339 - DNA, 120 bp, Artificial Sequence
  ENSG00000273162_2 (sequence is synthesized)
gaaatctaggaaccgagaacactaagagcccgcggattttaaacaggaaaaagaaagggcggagcaaactctggcggatagttgtgagtaatccctggtccttggaataagtgtcgacct

SEQ ID NO: 945340 - DNA, 120 bp, Artificial Sequence
  ENSG00000273162_3 (sequence is synthesized)
gagacagaaggggaactgtcagagagctgccggagaccctgaaaaaggccagagacggggacttgtggggctgacgaatggaatcacccaaggagaggtctctgactctaacaaaacacc

SEQ ID NO: 945341 - DNA, 120 bp, Artificial Sequence
  ENSG00000273162_4 (sequence is synthesized)
tggctgggatacagagcagacaagtccgggatcttttagtgaattgctgccggcttctaaggcctggagcagatattcaacaacaaactccacggacctagaaactctccacttatccta

SEQ ID NO: 945342 - DNA, 120 bp, Artificial Sequence
  ENSG00000273162_5 (sequence is synthesized)
ctattgtagacggtggcttacttttagtcttccctatgctctaagcttctggtagtaggaatcgtgcctaactcactactgtatcttgtgaacctagccccgcgcctggtggcacgtcaa

SEQ ID NO: 945343 - DNA, 120 bp, Artificial Sequence
  ENSG00000273162_6 (sequence is synthesized)
attctcggtaaatatttgtggattaaatgtgaaagactgcctgagtgtttaacctggattttctgagtcgctgatggagaacagtaggtagacggggaaccagcgccctctggtgggctt

SEQ ID NO: 945344 - DNA, 120 bp, Artificial Sequence
  ENSG00000273162_7 (sequence is synthesized)
gtggttcgtgacgagaacatgctggaaccgtgcatccaggtaggcacaaagataataaaaggggatccgctgttattaagtagagattttgttacattaaaaccctacataccgtaaaaa

SEQ ID NO: 945345 - DNA, 120 bp, Artificial Sequence
  ENSG00000248975_0 (sequence is synthesized)
atttgaaggaaacttctaggtggcaactgaatcaacaaattcatcattattattttcaatctgtttgtatgagttatcaatttaagatgtacagttcttcattaaaatataaatagagga

SEQ ID NO: 945346 - DNA, 120 bp, Artificial Sequence
  ENSG00000248975_1 (sequence is synthesized)
atgataagatgtgcttgcttccccttcactttccgacttgatcgtaagtttcccagccaggcttcctgtacagcttgtggaactactaaccaatataattagccaattaacaaaaagaaa

SEQ ID NO: 945347 - DNA, 120 bp, Artificial Sequence
  ENSG00000248975_2 (sequence is synthesized)
agaaaagaaaagaaaagaaaaagaagccacgtgtttttatttggagatgagagcatccagtttcacatcactactgaacacatgtttgctgcagtttactagaggtccacttcagaccct

SEQ ID NO: 945348 - DNA, 83 bp, Artificial Sequence
  ENSG00000248975_3 (sequence is synthesized)
ccaagattgctgcctgcttcttcctctggaagcttcgtcccagagggacaccaggctgatgccagctggagctctcctgtatg

SEQ ID NO: 945349 - DNA, 90 bp, Artificial Sequence
  ENSG00000248975_4 (sequence is synthesized)
agtctgtcccttagcagagcttgagcactatgctgggagaatactccttgtcaggatcaagtttaagtctgctgaagctgtccccacagc

SEQ ID NO: 945350 - DNA, 68 bp, Artificial Sequence
  ENSG00000248975_5 (sequence is synthesized)
catttctttcagagatgccctgctgagtgacgaggaatccagagaggcagtccggccacagccacttt

SEQ ID NO: 945351 - DNA, 120 bp, Artificial Sequence
  ENSG00000248975_6 (sequence is synthesized)
gacgaggaatccagagaggcagtccggccacagccactttgccacgctgtgttgagttctgcccagtccaaacttccaggcccccttagcactatcaggggaaaaccacctactcaagcc

SEQ ID NO: 945352 - DNA, 120 bp, Artificial Sequence
  ENSG00000248975_7 (sequence is synthesized)
gctcgctcgctctctcctgctccaccatgataagatgtgcttgcttccccttcactttccgacttgatcgaccttcaagtacatgctccattgaactctctgaattcagctggctaaaaa

SEQ ID NO: 945353 - DNA, 120 bp, Artificial Sequence
  ENSG00000248975_8 (sequence is synthesized)
agaagaaagagaagatggagaaggcacaaccattctaaactgccttgacatggaggtgacaccagttttattgtaggaataagtgacatgattgtatctaattgcaagggcctgggaagc

SEQ ID NO: 945354 - DNA, 120 bp, Artificial Sequence
  ENSG00000248975_9 (sequence is synthesized)
acaactaaccatgcaccaaagaagacaagaacacaggcagcttgggtcatgtgctacagctttcctgtgatcaccttgcctctgaaatatctgaaaatggctttctcttcattcatttct

SEQ ID NO: 945355 - DNA, 120 bp, Artificial Sequence
  ENSG00000248975_10 (sequence is synthesized)
gacgtttgaattaacactggaatgagttaagactttcggggactgtcaggaaggcatgattgtattttgcaatgtgagaagaatatgtaatttgagagggactagggacagaatgatata

SEQ ID NO: 945356 - DNA, 120 bp, Artificial Sequence
  ENSG00000248975_11 (sequence is synthesized)
gtttggatctgtatccccacccaaatcatatgttgaattgtaatccccaatattggaggtagggcctggtggaaggtgttttgatcatgggagtggatgcctcatggcttggtgttgtct

SEQ ID NO: 945357 - DNA, 120 bp, Artificial Sequence
  ENSG00000248975_12 (sequence is synthesized)
ttacaatagggagttagttctcatgcgatctggttgtttaaaagtgtgtggcatctgcccctccacctctctccttcttcctcctgctttcaccatgtgatgtgccttctccctcttcac

SEQ ID NO: 945358 - DNA, 120 bp, Artificial Sequence
  ENSG00000248975_13 (sequence is synthesized)
cttctgcagtgattgtaagctttatgagacatccccagaagttgagcagatgccagcaccatactgcctgtaaagcctacagaactgtgacccaattaaacctcttttctttataaatta

SEQ ID NO: 945359 - DNA, 120 bp, Artificial Sequence
  ENSG00000224322_0 (sequence is synthesized)
atatgagaacagtgagctccaaggagcggcctgcccttggcttctgttcccagggcgagtgtgaaggctgagcttttccgttccctcttccatggagcttggctggttcctatgaactgc

SEQ ID NO: 945360 - DNA, 120 bp, Artificial Sequence
  ENSG00000224322_1 (sequence is synthesized)
aagttaaggcaacactgatttgcaacttcactagataggttggaggaggggggcttacagcctcaaaacaaccctgctttccctatcacggggccagagggagtggagctgcttctgaat

SEQ ID NO: 945361 - DNA, 120 bp, Artificial Sequence
  ENSG00000224322_2 (sequence is synthesized)
aatttctgagaataagaagaattggttgaaaaaacttctaacatctccatcggtttgtaatcagcgaatacaattatgaagcaatttcctacctgtttttttatttgatccatgaacttt

SEQ ID NO: 945362 - DNA, 120 bp, Artificial Sequence
  ENSG00000224322_3 (sequence is synthesized)
tcaagagatgtgtgctattgctgttgtgaccattagctcccatttctcagatgaggaaactgaggctcagtgagccttaaatgacttgcccaaaactataagatggaaatctctgcccat

SEQ ID NO: 945363 - DNA, 120 bp, Artificial Sequence
  ENSG00000224322_4 (sequence is synthesized)
aattttaaaaagaagagttcccctgcgcaagttttgtttctttgcctcctgcagtctgtgccttccaccatgatcatgaggcttccccagccacacagaactgtagttgcagtctggcat

SEQ ID NO: 945364 - DNA, 120 bp, Artificial Sequence
  ENSG00000224322_5 (sequence is synthesized)
catcatgcatgtgctccttaaaattgatcaccagtgacttcctctcttctccctttccctgtgcttacgtaattcctttcctgaatgacttatcttagtaccaagctttgtcctccttcc

SEQ ID NO: 945365 - DNA, 120 bp, Artificial Sequence
  ENSG00000224322_6 (sequence is synthesized)
cgagtagcccagtatgaagagaacataagggagacccatttagtagtgggaaaagtaactaccgggtgaaaatgacgttgatgttttcccaacgtcagcaacactgcttagactactact

SEQ ID NO: 945366 - DNA, 120 bp, Artificial Sequence
  ENSG00000224322_7 (sequence is synthesized)
ccaatagttaatcaagctggacttctaatgttagggactgagttttatgtcccctagtatgtactttctcttctataataacaatgaaaatacagaccacccaatttgaaagtgggcaaa

SEQ ID NO: 945367 - DNA, 120 bp, Artificial Sequence
  ENSG00000224322_8 (sequence is synthesized)
ttctttgcctcctgcagtctgtgccttccaccatgatcatgaggcttccccagccacacagaactgccctattctaagcactttacatgtgttaattcatggaatcctctcaatatacta

SEQ ID NO: 945368 - DNA, 120 bp, Artificial Sequence
  ENSG00000224322_9 (sequence is synthesized)
taattaaccccacctgaaaaatgagaaaactaaagcacagagaagttaaataattatgtgtccgaggtcctatacctggtgagtaccagatccggaatctgaacacaggcagtttggctc

SEQ ID NO: 945369 - DNA, 120 bp, Artificial Sequence
  ENSG00000248973_0 (sequence is synthesized)
acaatgtctcttctccattaagaaaacctacttcaacatctccattggttctcaacatagaggaggaaaataatcatatttcatcacagtatttaagtaaggatcaaagactctaagata

SEQ ID NO: 945370 - DNA, 120 bp, Artificial Sequence
  ENSG00000248973_1 (sequence is synthesized)
caaggagaaatggaaaaagctggaccttccctatggacatggggaaaagtggctatctggaagtcaagggaaaagagagatttttctttataaaataaaagaaatgcctgaaccaccaaa

SEQ ID NO: 945371 - DNA, 120 bp, Artificial Sequence
  ENSG00000248973_2 (sequence is synthesized)
atgagggcgggaccctcgtacgtggaaggtcatgagggcggaaccctggtacatgaaattcgttctcttatttaagagacaaagaacgcccttgttttttccaccacgtgatggcgcaga

SEQ ID NO: 945372 - DNA, 120 bp, Artificial Sequence
  ENSG00000248973_3 (sequence is synthesized)
cagaagacaaccagcatctatgaaccaggaagcccccaccaggcactgaatctgcccctgcgtggatcttagacttgcagactccagaacttatatgaaattctatgctgaaggaagatg

SEQ ID NO: 945373 - DNA, 120 bp, Artificial Sequence
  ENSG00000248973_4 (sequence is synthesized)
cactacatacagcactacagtagacaatgaaagaagagagtgaaataaaaagcatctcttatggagatcagcaaggttctggaagagcttgacctgagcacaacatagaatcaaatcaac

SEQ ID NO: 945374 - DNA, 89 bp, Artificial Sequence
  ENSG00000248973_5 (sequence is synthesized)
tggctcactgcaacctccacctcctgggagtagctggagctacagtcacacagcaccacacctggataatttttgccagagacaggatt

SEQ ID NO: 945375 - DNA, 90 bp, Artificial Sequence
  ENSG00000248973_6 (sequence is synthesized)
atttatttatttatttatttattttagcagagacaggatttcaggctggtcccgaactctgaaaaagtgttaggattacaggtgtgagcc

SEQ ID NO: 945376 - DNA, 120 bp, Artificial Sequence
  ENSG00000248973_7 (sequence is synthesized)
actgcacctggacatagcttactttttagatgtaaacaaattggaaacaaatgagtccaaattaactgattatacaaatatacatatgaatcaaataaacttgaaagtattttaaaccta

SEQ ID NO: 945377 - DNA, 120 bp, Artificial Sequence
  ENSG00000248973_8 (sequence is synthesized)
ggatgaagtttgatttgttccaaaacccacagaaatctctaaaatggaagaattttcttagaaccaaaaggcatggaattgatgacatgaaactgttctctctcctgccaccatttgaag

SEQ ID NO: 945378 - DNA, 78 bp, Artificial Sequence
  ENSG00000248973_9 (sequence is synthesized)
atgacatgaaactgttctctctcctgccaccatttgaagaagggtgtgtttgcttcatgcagaactagttttgctcgg

SEQ ID NO: 945379 - DNA, 120 bp, Artificial Sequence
  ENSG00000248973_10 (sequence is synthesized)
gcctcagtctcccgagtagctgggactctacaggcatcccccatcagggcttgaaaacagaaatcctgccaagtcccacgttttcttcggttccaagcacagagagacattcttcaagaa

SEQ ID NO: 945380 - DNA, 120 bp, Artificial Sequence
  ENSG00000248973_11 (sequence is synthesized)
agaagaatttggaaagcagagaggttagtattgacaatttattcttcctttaacaaaattattttagttctttatcatcatttgcatttccacataaattttaaaattatattgtcgatt

SEQ ID NO: 945381 - DNA, 120 bp, Artificial Sequence
  ENSG00000248973_12 (sequence is synthesized)
ctaaccttacaatgtctcttctccattaagaaaacctacttcaacatctccattggttctcaacatagagattctcttaatttaaaggatccaacgcaatgaccaatctccaattgtcaa

SEQ ID NO: 945382 - DNA, 120 bp, Artificial Sequence
  ENSG00000248973_13 (sequence is synthesized)
ccgtcctgtgggacatgtggcaaacaaatgacatgagctaatgggacaagaaggcaacttcagctagagagatggaaaaaggtcagttgtcctccaaatgacctctgttcatgaccacct

SEQ ID NO: 945383 - DNA, 120 bp, Artificial Sequence
  ENSG00000248973_14 (sequence is synthesized)
cactcaacatccagacaccaaatctttaggagagtgactgagcacactacgtgccgaagagcaggaggctggaggaggctggacatcactgtcttttattatcacagacagaacagtaac

SEQ ID NO: 945384 - DNA, 120 bp, Artificial Sequence
  ENSG00000248973_15 (sequence is synthesized)
actctgcagagctacggaaacttggtagaaaaaataatggatgagtcacatggtgggaatgttcagaaatgtggagaaggctttggctgcccctgcaaggaattaaagctgtacttaaga

SEQ ID NO: 945385 - DNA, 120 bp, Artificial Sequence
  ENSG00000248973_16 (sequence is synthesized)
tggatgatcccatggggtgcagagatttgcgtctccctcactcatgacacactggtccctgcaacatgtcgcacctcaacttctggacaccctgaagcccttcacgacgtgtgttctgca

SEQ ID NO: 945386 - DNA, 120 bp, Artificial Sequence
  ENSG00000248973_17 (sequence is synthesized)
caaggaaactgctgatgaaagtaaaaattccacatccaaacggccactcaaaccaagcgtaggcacgcggtaccttacaagagctgtgagatatccttctctctgctttaagtgtctctg

SEQ ID NO: 945387 - DNA, 120 bp, Artificial Sequence
  ENSG00000248973_18 (sequence is synthesized)
aatccaaagagaacatttaaggagactacagactgattccctgtgtccttcaagttaccttcattctgttgtaaaacctatggcctctttatccactgacagaaaccctaaggacaaccc

SEQ ID NO: 945388 - DNA, 120 bp, Artificial Sequence
  ENSG00000248973_19 (sequence is synthesized)
aggtatttctagaaagtctgtggttcctaagtgaggatgaaaggaagaggttgtgaaaggtgagggccagcctgcggctgttgttcagagaccctactcaaggccaccacgttctggagc

SEQ ID NO: 945389 - DNA, 120 bp, Artificial Sequence
  ENSG00000248973_20 (sequence is synthesized)
tgcaattgcaaatgctttcctgagggagtggcagccaggcagagggggaacggcagcctttgtgtctgaaaagcaaagttttaactggaacttcacttccaattacctgatgatgaaaaa

SEQ ID NO: 945390 - DNA, 120 bp, Artificial Sequence
  ENSG00000248973_21 (sequence is synthesized)
taaacacaatgaaatacttaagtataaatcaaaccaaacatgtaaaaggtctgagtgctgaaaattataaaacactgatgaagtctaagatctaaataaatacgaaacatgcagggtcca

SEQ ID NO: 945391 - DNA, 120 bp, Artificial Sequence
  ENSG00000248973_22 (sequence is synthesized)
taaactggaagactcaacatattaaagacgtgaattttccctaaatttatctacaggtttaatgcaatgcctatcgaaactccagcaagaacttttttgtagagatagataagcttattc

SEQ ID NO: 945392 - DNA, 120 bp, Artificial Sequence
  ENSG00000248973_23 (sequence is synthesized)
tggactttgcatagaaaggcaaaaggcctagaacaattaaaactaaagcaattttgaaaattttcacctgcactaggtgaagaattcttagatgtgacagtaacagcatgatccatacat

SEQ ID NO: 945393 - DNA, 120 bp, Artificial Sequence
  ENSG00000248973_24 (sequence is synthesized)
taaaaatttgctaaattgaacttcttcaaaattaaaatatgtttgttctccaaacaaccataaaaaggatgaaaaaacaagtaacagcttggagaaaatacttgtgaacaacaaatttgt

SEQ ID NO: 945394 - DNA, 120 bp, Artificial Sequence
  ENSG00000248973_25 (sequence is synthesized)
caacgaatttgtaagtagaatatataaagaacttaaagaactctcaaaactctgaagtataaaacaacaacagtaacagcacaccacccaattagaaacttggcaataggtacaaacaac

SEQ ID NO: 945395 - DNA, 120 bp, Artificial Sequence
  ENSG00000248973_26 (sequence is synthesized)
catttcgctacagagggtgtgaaaagatgcccaatatctttagccatgaaggaaatataaattagaatcactctgaaatactaggacacatctgccagcaaggtgaaaatacccactgct

SEQ ID NO: 945396 - DNA, 120 bp, Artificial Sequence
  ENSG00000248973_27 (sequence is synthesized)
ggtgaagctgcagggccactagctcactcctacactgcttttggaaatggaaagtgacaaagccattccggaaaacagtttgtcagatttttaaataaaaaatgcttgttatacaaccca

SEQ ID NO: 945397 - DNA, 120 bp, Artificial Sequence
  ENSG00000248973_28 (sequence is synthesized)
agaggtatcatttacccttccaaatttctttctgaaaatatttcctcaggaatataggaaaagaaatatgaaaaaagcaacataaaatcaactgaggcatggatgaaagtgcatatagat

SEQ ID NO: 945398 - DNA, 120 bp, Artificial Sequence
  ENSG00000248973_29 (sequence is synthesized)
ttgtgtgttatattgggacacagttagaggtaaaagcaatgctgatacttaagatttaaatactatcttattaaatgttgttgcttaaaaaggtgactcatatttaaaaaaatgtttttt

SEQ ID NO: 945399 - DNA, 120 bp, Artificial Sequence
  ENSG00000248973_30 (sequence is synthesized)
cactattttctgcatttgtgcacatagatattctcccttactcttctacaaaagtcacccatattctctttgtattatcttaccttgctttgtctttagagaaattcagattgtagtata

SEQ ID NO: 945400 - DNA, 120 bp, Artificial Sequence
  ENSG00000248973_31 (sequence is synthesized)
tatttaattttttattgtttgtttttccagtaaagggaagcaccatgatgacaagaaatttgctttattcatattgtttgcacaataatataaatactagactcaatttacaattcaatt

SEQ ID NO: 945401 - DNA, 120 bp, Artificial Sequence
  ENSG00000248973_32 (sequence is synthesized)
cttttttggtgttggtttctgttcctcacaatttatcattaaaaagcaaatatatacataaagacatatacataagcaaaaacaagcaacaaacatatacataagtgaaaaacaacaaaa

SEQ ID NO: 945402 - DNA, 120 bp, Artificial Sequence
  ENSG00000285424_0 (sequence is synthesized)
caatgtgcagttctgagaagggattcagtgtgccgttgctggctctgagaagtaggagccttgtgcaaggattcaggagaggcctctagaaactgaggatggccctcaactggcaagcac

SEQ ID NO: 945403 - DNA, 120 bp, Artificial Sequence
  ENSG00000285424_1 (sequence is synthesized)
aggcaactgaattcggccaggcatctgggtcctgtgctaggggctaggaagacaaagagaaacagagtcacatcctcccacaaaaatccatgagatgtcggagagccgaacttgtaaaca

SEQ ID NO: 945404 - DNA, 120 bp, Artificial Sequence
  ENSG00000285424_2 (sequence is synthesized)
gccatcatcaacacaaagaaggatgcactgatgctctctagaggctcacaggaaatgattcatgggcatagaggtgctgtgacagcatcaatcaggccttggcaggcgagggagccctct

SEQ ID NO: 945405 - DNA, 120 bp, Artificial Sequence
  ENSG00000285424_3 (sequence is synthesized)
gaagaagcggccagtggacaagctgaagacatgtttacccatgtgtcagaagcacctggggagctctttgaaattgctggggctgacccctggccactgctctgcatcagaatcccctgg

SEQ ID NO: 945406 - DNA, 120 bp, Artificial Sequence
  ENSG00000285424_4 (sequence is synthesized)
aggctggtgaagcacgtttccaggtgccatacccagaatttctgattcaaaaggtctggggtggggcctgagaattagagcctgttcctaacacgttcccaggtgatgctcatgctgctg

SEQ ID NO: 945407 - DNA, 120 bp, Artificial Sequence
  ENSG00000285424_5 (sequence is synthesized)
gtctgcagcccctggtctgcgagccactgactagggattctaactcagtaggtctggagacggtcccaggtggttctgacctggtggtattctgaagtccacacctggagaaacaccgcc

SEQ ID NO: 945408 - DNA, 120 bp, Artificial Sequence
  ENSG00000285424_6 (sequence is synthesized)
ctgagactgaataaattctgtgatgaacattctcactgtgctgctgccgtgcaagggagaactggccgaagagttatttggccagcttgagtgacgcggatcctgagagcgctccggggt

SEQ ID NO: 945409 - DNA, 120 bp, Artificial Sequence
  ENSG00000285424_7 (sequence is synthesized)
gacgcggatcctgagagcgctccggggtaggcagttgccccggttggacacctcgtcagagcagcgcgtggcaggccccggtggaggatcaatgcagtggctgaacaccgggaaggaact

SEQ ID NO: 945410 - DNA, 120 bp, Artificial Sequence
  ENSG00000285424_8 (sequence is synthesized)
tggggaagcactgattttcagattgatttggggctatatgtgcacatctggccctgagtggtgagcttcctccacactttccctactcacatctctaccaacggtggccggctcatttca

SEQ ID NO: 945411 - DNA, 120 bp, Artificial Sequence
  ENSG00000285424_9 (sequence is synthesized)
tctcctctccaccaggatgaattctcctttctttgcccctgctgggatgtgatatacacctaaacccatggctgcatctgtctatcttgccaccagcaccagacaaaggtccctttgcct

SEQ ID NO: 945412 - DNA, 120 bp, Artificial Sequence
  ENSG00000285424_10 (sequence is synthesized)
tcacagccccatcatcctacctcttacttttttcaagtctactcttatcgactgacaactcattgtagattgatttgcatttctctgattagtaacagttttaaacatgttttacacttg

SEQ ID NO: 945413 - DNA, 120 bp, Artificial Sequence
  ENSG00000285424_11 (sequence is synthesized)
ctagcctcttgggattcctgttgtgtaaattgcctgttcatgtcctttgtctgtttttcctttttgcgattgtcattttctacttgttgactcaaaggcactagtgattccagacactgg

SEQ ID NO: 945414 - DNA, 120 bp, Artificial Sequence
  ENSG00000285424_12 (sequence is synthesized)
ttcctcattttagaaattgcaaatatcttctctcctgctgtcatcttctttgatcatgatgtccttctttaaacagaaattctgtccgcacacttagtcaccaatgaagcaatgtcttta

SEQ ID NO: 945415 - DNA, 120 bp, Artificial Sequence
  ENSG00000285424_13 (sequence is synthesized)
ggccctgtccttgctactgagactggacagattgagttatttgacccaggcatacctcttcctatacagtatattacagttacttctagcgctcattcatttgatctcttttctgtattt

SEQ ID NO: 945416 - DNA, 120 bp, Artificial Sequence
  ENSG00000285424_14 (sequence is synthesized)
tttactttccttcctcaattctttattcaataaaatatttttgagcacatattatgtacaatcagtatactagtcattgggatataagagtatacaaataggcatagtcactatgttgga

SEQ ID NO: 945417 - DNA, 120 bp, Artificial Sequence
  ENSG00000285424_15 (sequence is synthesized)
tacaaataggcatagtcactatgttggagggatggaaaaagagagatcaaataataaataaagagaaaaatacctttatgctccaaaacttgtgaagcaaccaagatgtccttcagtagg

SEQ ID NO: 945418 - DNA, 120 bp, Artificial Sequence
  ENSG00000285424_16 (sequence is synthesized)
aagtaatggctcatcaagctgtgaagacattgaggaaacttaaatgtatactgctaagtgaatgaagccaatctgaaaaggctgcataactgatgaattcaacttcatgacactcaaaaa

SEQ ID NO: 945419 - DNA, 120 bp, Artificial Sequence
  ENSG00000285424_17 (sequence is synthesized)
ggcaaaactatagagacagtaaaaagataagtggttgccaagggttggaggaagaagggatgcacaggtagagcacagagggcttttagggcagtgaaaacactctgtatgatactaaaa

SEQ ID NO: 945420 - DNA, 120 bp, Artificial Sequence
  ENSG00000285424_18 (sequence is synthesized)
tggtggatacttgtcatcatatatttatccaaacccacagaatgaacaccaagaatgaaccctaagataagctataaactttgtgtgatgagggtatgccaatgtagggtcatcaatggt

SEQ ID NO: 945421 - DNA, 120 bp, Artificial Sequence
  ENSG00000285424_19 (sequence is synthesized)
aacaaatgtgccactctggtggaggatgttgatatggaggaggctgtgcatgtgtcagggaaggggcatatgggaaatctctgtgtcttcctcttaattttgctgtgaacccaaaactga

SEQ ID NO: 945422 - DNA, 120 bp, Artificial Sequence
  ENSG00000285424_20 (sequence is synthesized)
tctaaaacatacagtaaattatatgtaacatatatataattgtatatgtatacaattcatcagttgatgataagtgttatgaaaacaaatgatacatggaaggcaataacgagtgatggg

SEQ ID NO: 945423 - DNA, 120 bp, Artificial Sequence
  ENSG00000285424_21 (sequence is synthesized)
aatgctttttgagctggtccagaaggtctctctaaagaagtgcatttgagcagagctaaaggaagccagtgagtgagctatgatgagaatatcaagggaagagccttcaggcagaaggaa

SEQ ID NO: 945424 - DNA, 120 bp, Artificial Sequence
  ENSG00000285424_22 (sequence is synthesized)
cagcacgtgcaaagacacagaggcaagagcaagccttgtgcgtgttgcaggaacagcaagtaggtctgtgcagctgggggcaagcacatgagaaaaagagtagcagaaaataaactggag

SEQ ID NO: 945425 - DNA, 120 bp, Artificial Sequence
  ENSG00000285424_23 (sequence is synthesized)
gagtaggtgggagccaggtcacgcaggagtgaaaatgcaggcattagtgaggactctagatttcattcttctcctgattggcacagacattctttcttaagttaacaccttaagctcaat

SEQ ID NO: 945426 - DNA, 120 bp, Artificial Sequence
  ENSG00000285424_24 (sequence is synthesized)
ttaagttaacaccttaagctcaatctttactttcttttttaaaaaacttttattttaggtttagggctacatgtgcaggtttgctgcataggaaacttgtgtcatgggggtttgttgtac

SEQ ID NO: 945427 - DNA, 78 bp, Artificial Sequence
  ENSG00000285424_25 (sequence is synthesized)
cacccaggtattaagcctagtacccaatagttatcgtttctgttcctctccctcctcctaaaatagaccccatgtcta

SEQ ID NO: 945428 - DNA, 120 bp, Artificial Sequence
  ENSG00000285424_26 (sequence is synthesized)
gagaacatgtggtatttgattttctgctcctgaattagtttgctaaggatgatggcctccagatccatccatgttcctgaaaaatacatgatcttgttctttttatggctgcatagttgt

SEQ ID NO: 945429 - DNA, 120 bp, Artificial Sequence
  ENSG00000285424_27 (sequence is synthesized)
ccatggtttatattaccacattttctttatccattccatcactgataggcatttaggttgataccctgtctttgttattgtaaatggtgttgcaatgaacattcatgtgcatgtatctta

SEQ ID NO: 945430 - DNA, 88 bp, Artificial Sequence
  ENSG00000285424_28 (sequence is synthesized)
taaatggtgttgcaatgaacattcatgtgcatgtatcttatagtagagtgatttatattcctctggaaaaaaaagctcaatatcgcgt

SEQ ID NO: 945431 - DNA, 120 bp, Artificial Sequence
  ENSG00000285424_29 (sequence is synthesized)
aaggttgcagagaaaagggaacacttacacactgttggcagaagtgtaaattagtgcaaccattatggaaagcagtgttacaattcctcaaagagctaaaagcagaactaacattcaacc

SEQ ID NO: 945432 - DNA, 120 bp, Artificial Sequence
  ENSG00000285424_30 (sequence is synthesized)
caaagagctaaaagcagaactaacattcaacccagcaatcttttctttcaggatgattgtgtttcagctctgattcattacatacctattttatggtttaaaatgagagacagtcttaat

SEQ ID NO: 945433 - DNA, 120 bp, Artificial Sequence
  ENSG00000285424_31 (sequence is synthesized)
ttatcatccttccagatcatcccctccccatcaaccatcagttaagtgatgctgggaagcttaaaaagataaaaatatgtgcaagtgatatattagcccctgtataaatatagagcatga

SEQ ID NO: 945434 - DNA, 120 bp, Artificial Sequence
  ENSG00000285424_32 (sequence is synthesized)
tcatcattggaattgcacacattgacaccaagaagtcaggaagatttttatttttaattagcagagataaatcacttgtagtcaactgagagttcaatagctcttttcagtaagagtgga

SEQ ID NO: 945435 - DNA, 120 bp, Artificial Sequence
  ENSG00000285427_0 (sequence is synthesized)
gagggtggggctgtagcaccaggtcagggaacgcgggagccgcagggttccagggatcccgcggctcctcgcggcttggcctgaccggcttcctccacatacgcccctctcctacacaag

SEQ ID NO: 945436 - DNA, 120 bp, Artificial Sequence
  ENSG00000285427_1 (sequence is synthesized)
tccggccctcggcgctcctgccgaagcagcaggcgcctcggactctgcgcggctcccgccggccactcacctatgatggtccgcgccgccgagacgatgaccacaggatctgagcctgca

SEQ ID NO: 945437 - DNA, 120 bp, Artificial Sequence
  ENSG00000285427_2 (sequence is synthesized)
ttcatcttgcttctcctgccgccgtctgccctgcgctgcctgcaagctaggcaaagctcctcctcgcagcccacaggcctgccgcgggcgggacctgagctcaggactggaatcccacgg

SEQ ID NO: 945438 - DNA, 120 bp, Artificial Sequence
  ENSG00000285427_3 (sequence is synthesized)
gcgagaatctcgagtgcgagcccggcccgcggcgggtctcagcacagctctgatgggtccttttgctctcggcggcttcgggaggtcctatgcgtttctcctggcgccagtcattcgctc

SEQ ID NO: 945439 - DNA, 120 bp, Artificial Sequence
  ENSG00000285427_4 (sequence is synthesized)
gcgtgaggggcttgctaggagcgtctcggtgcgagccccctgccttctaagatcaactctggctgtgaacgggtgaggacgccgggagcgtcttagcgtcacaaaagttcctttggttga

SEQ ID NO: 945440 - DNA, 120 bp, Artificial Sequence
  ENSG00000285427_5 (sequence is synthesized)
cgtttggacagtgaaaggagcatgtaacaagtggggtcagttttgtttaaaaccctttctgacttcccagcctcttactgggcaaagttcataatttttctgagctttctagggtttcca

SEQ ID NO: 945441 - DNA, 120 bp, Artificial Sequence
  ENSG00000285427_6 (sequence is synthesized)
ggcaagcttatgaggggccaccgttacagcaacttgttgggaacacctggatagtggaacaagaaagctttgtcacaaagtcatgaaggggaaaactgttgacggacctggagaatcttc

SEQ ID NO: 945442 - DNA, 120 bp, Artificial Sequence
  ENSG00000285427_7 (sequence is synthesized)
cctggaaacctacattaagactttgcagagatatgcggatgggtcagataaatcagagaaggtaaagagtgtaggccccagaggtggggcaatagagaaggaaaaaaattgcataacagt

SEQ ID NO: 945443 - DNA, 120 bp, Artificial Sequence
  ENSG00000285427_8 (sequence is synthesized)
gcaatttcaggagaaatctttagggtctggaatagtggtgaaatcagctgtctactctgctaagaactcagcagcacactgaagtctcttcagttgtcttcaatgtgtttcctgtcccct

SEQ ID NO: 945444 - DNA, 120 bp, Artificial Sequence
  ENSG00000285427_9 (sequence is synthesized)
aacatatctgagtccaaggaattcaaggaatgcctcccgtggcttttgctctattctatcccattttccccttactccctggccacttctgagtctttgtgggcttactctcacatcccc

SEQ ID NO: 945445 - DNA, 120 bp, Artificial Sequence
  ENSG00000285427_10 (sequence is synthesized)
ttaacatgttccccaaggctcctactttgcaccagctccctgggtaataccagtcattcctacggcatcaatcaccacctgtatactgacaagtctgaaatccttacatctaacctcgtc

SEQ ID NO: 945446 - DNA, 120 bp, Artificial Sequence
  ENSG00000285427_11 (sequence is synthesized)
actgacaagtctgaaatccttacatctaacctcgtctcctaagctgactgaccctcttcatttaaattcttacaagcacatcaggtcgggcaccttggctcacacctgtaatcccagcac

SEQ ID NO: 945447 - DNA, 90 bp, Artificial Sequence
  ENSG00000285427_12 (sequence is synthesized)
catttgaggtcagctatcccgtttctaccataaaatagaaaaattagccgggcgtggtgccgtgcgcctgtaatcccagctactggggag

SEQ ID NO: 945448 - DNA, 120 bp, Artificial Sequence
  ENSG00000241832_0 (sequence is synthesized)
ctgccgagagtgtcttcagcgccagcatttcctggcctaattaagctgggtaatgagtagctaagaggaggggataaaagccctaggcggcttagagctgggacagtttatgacaggggc

SEQ ID NO: 945449 - DNA, 120 bp, Artificial Sequence
  ENSG00000241832_1 (sequence is synthesized)
gtctgcagctggtgacattcctaggaaaattatttctcataaccctgggaagttgcatgctgtttccttagcagcagagtaagcctcaaaggacattctgattgtcataactgcgggagg

SEQ ID NO: 945450 - DNA, 120 bp, Artificial Sequence
  ENSG00000241832_2 (sequence is synthesized)
cagacaacttgctacttcacctggagagtagaggctgacgatgctgctaaacatccgacagtgcacaggacagcctccaaaacaaagaaatatctggcgcaaatgtcagcagtgctgagg

SEQ ID NO: 945451 - DNA, 120 bp, Artificial Sequence
  ENSG00000241832_3 (sequence is synthesized)
atgagaagccctgctggacaaatgggaagaagagctctgcccgctgattcctcctggcagaaaagttcccactgggctcctctctaccctgcccagtgggtctgcagctgttttgtttcc

SEQ ID NO: 945452 - DNA, 120 bp, Artificial Sequence
  ENSG00000241832_4 (sequence is synthesized)
aggagcctgagagagagacagaagcagctgggaggagaaaaatcaacgcggccaggggccctactggtccttctgccttagccacaggttctgaaaccaaagcaaaaccaccagagagtg

SEQ ID NO: 945453 - DNA, 120 bp, Artificial Sequence
  ENSG00000241832_5 (sequence is synthesized)
attcatgtgggtatggccctccctccccctgcccagaaaggtttctcttgagcccatatgctagtttctgtcatgcaaacgccctggcaatgccttccttgccttggcgcaatggctctg

SEQ ID NO: 945454 - DNA, 120 bp, Artificial Sequence
  ENSG00000241832_6 (sequence is synthesized)
attgggtaggcatctccgggggttaatactggcacaaactcatgtaaatcttcctgggcctaagtctggtgtactctcatatgtgaattggcatggtcctggagggctagtcagctagct

SEQ ID NO: 945455 - DNA, 120 bp, Artificial Sequence
  ENSG00000241832_7 (sequence is synthesized)
tttggattcttctcaccaaacgctcaagacctgtacaggttacttattggtccccttcatgccccagatgcaaatttggcatgtctcatttgcattctaaagtgtttggaggcaaggctg

SEQ ID NO: 945456 - DNA, 120 bp, Artificial Sequence
  ENSG00000241832_8 (sequence is synthesized)
ggatgagcttaatttgccctgatgtcttttgaccaggttagtaaacatccctccagcccatctcagcacttgagaatctggaaggcagctatgctttaattacagtgcaatttcaggagt

SEQ ID NO: 945457 - DNA, 120 bp, Artificial Sequence
  ENSG00000241832_9 (sequence is synthesized)
ttgcttgctgttcccccttggctctttgcctagcttattattttcatcttgttgtttgtttgtttaaatgagaactttcgtagacaattccctctcccgcctcccccagaggccagtctg

SEQ ID NO: 945458 - DNA, 120 bp, Artificial Sequence
  ENSG00000241832_10 (sequence is synthesized)
tgttgctagaggactttttctgcctccctcttggtttacaaagccagggcatctctgttgacaaagggtctgcgatctggcactgggcctggcagttagggagtgtgtaagaaatgcaga

SEQ ID NO: 945459 - DNA, 120 bp, Artificial Sequence
  ENSG00000241832_11 (sequence is synthesized)
tgccttttgcagatgcctgccctgctcctcctctaagcagccaaaacatcctgcaccacctcgggaagaccccacatcccagcttgctggtctctgagcactctgccccgccaaccctat

SEQ ID NO: 945460 - DNA, 120 bp, Artificial Sequence
  ENSG00000241832_12 (sequence is synthesized)
agcgctaggaaggcaggaaggatggaaaaggctgtgggggattgagtaagggatttgggaatgagggacagtgacactgtaggtgggttggcttagcagggggattgggagtggccagct

SEQ ID NO: 945461 - DNA, 120 bp, Artificial Sequence
  ENSG00000241832_13 (sequence is synthesized)
ggagtggtggaaagaactggggacagggagtcaggaagctgagcttttattcatcccagctttgctactgacaagttaggtggtcttggggcagactgggccaaatctgggccttcctgt

SEQ ID NO: 945462 - DNA, 120 bp, Artificial Sequence
  ENSG00000241832_14 (sequence is synthesized)
gtaaaacgcatgctcccatctcaaggtccttttctactttacagattctcttgcttttagaatgctaatttcattgactgtggcctgtttccttctccagagacaggataacccaataaa

SEQ ID NO: 945463 - DNA, 120 bp, Artificial Sequence
  ENSG00000250331_0 (sequence is synthesized)
attctcaagctgctgcagaactcgactgccattgaaatgtgcaaaagaaaaatttcctggcatcttaaaaaaaatgtcgaagtcagttactccacaagccctgtttgtaagagtccttga

SEQ ID NO: 945464 - DNA, 120 bp, Artificial Sequence
  ENSG00000250331_1 (sequence is synthesized)
aaagagaagcatcagttttccaatatgaagtaaatggagagtctggagttgcttctgttggccatcaatttcctgtggtgcagaggggctacaaatataatacagattaaactccctgca

SEQ ID NO: 945465 - DNA, 120 bp, Artificial Sequence
  ENSG00000250331_2 (sequence is synthesized)
ggaagtctcttatggataagaacaagttcagcttcccattggggatgacagagctggtgctcaggtcatcaacatcctgctgaacctatgagaaagcatttgggacaacttgacaatgca

SEQ ID NO: 945466 - DNA, 120 bp, Artificial Sequence
  ENSG00000250331_3 (sequence is synthesized)
gagtcagaaagtttgctttttgattcaactatttaaaattccctattattttctttgtttttggctgccttttgcttaattgtcttgtcagctgtcctaagcctgacagccatatgaggt

SEQ ID NO: 945467 - DNA, 120 bp, Artificial Sequence
  ENSG00000250331_4 (sequence is synthesized)
caagcagaaaaactgaactggggaaataatcatagttcttcaatggattgtttctgaaaactgaatatgaggagagaatattcataggtatggcataacttccattttgtagctggaaga

SEQ ID NO: 945468 - DNA, 120 bp, Artificial Sequence
  ENSG00000250331_5 (sequence is synthesized)
aatcatacccccaaattatgacaatttatagaattatgagttgaatgtttgtgtaagtatatgccttcatatttttaaacatgtataggctgcattattttctgccaataaattttatgg

SEQ ID NO: 945469 - DNA, 120 bp, Artificial Sequence
  ENSG00000250331_6 (sequence is synthesized)
tgaacctatgagaaagcatttgggacaacttgacaatgcatggctttggtatcaggaggatgatgccctcataaaatgagttcgggaggattcgctctttttctattgattggaatagtt

SEQ ID NO: 945470 - DNA, 120 bp, Artificial Sequence
  ENSG00000250331_7 (sequence is synthesized)
gaattcagctgttaatccatctggtcctggactttttttgtccatgaggaggttatgctgtacattcttcagacagagaagcgaagggcttctgaagaaaacctgaacagagagagaagg

SEQ ID NO: 945471 - DNA, 120 bp, Artificial Sequence
  ENSG00000250331_8 (sequence is synthesized)
atttgctccacctaaaaataattttccaaagacagaaagaaaagataggtgtccatggcattgtggagtagtgggggcttgtgtcttgctcctcagaagaaacctggtgagatgggactt

SEQ ID NO: 945472 - DNA, 120 bp, Artificial Sequence
  ENSG00000250331_9 (sequence is synthesized)
agtagcctgcttcttcaaaatagatggtccactcaaaaaagggggtggaagaaagatttatgaaggaatcatttacatggttgaaggcaagactaaaacaaaacaaaaaaaacaaaacaa

SEQ ID NO: 945473 - DNA, 120 bp, Artificial Sequence
  ENSG00000250331_10 (sequence is synthesized)
tgaagtgctcctgggagtaaatggggaagcaagcctcaagctgaaagtggaagaaatgggtaccagggcctgtcactgtagttgcaagtctatgagaggatcacccaacaggagctttgc

SEQ ID NO: 945474 - DNA, 120 bp, Artificial Sequence
  ENSG00000250331_11 (sequence is synthesized)
cattgttagagtaatgcattctctctcaacacaaaacctcacaggagtttgccaggggaataaatacttcaatgtctatatttcccactatgcttatatcttctattaatacttcccatt

SEQ ID NO: 945475 - DNA, 120 bp, Artificial Sequence
  ENSG00000250331_12 (sequence is synthesized)
gactgaacccaactggaaaccagaggcaacagaagtagaatgatgtaatatgtagaggctgatgtagcatgtgtttccttaaatttccctatggctaatgatattgagcatgttttcacg

SEQ ID NO: 945476 - DNA, 120 bp, Artificial Sequence
  ENSG00000250331_13 (sequence is synthesized)
tgcctattagccattcatataacttctttggataaatgtctatacaaatgctttgctccttcaaaagttggtttatttgtttttttattgttgagttgtaaaaattttttacatattctg

SEQ ID NO: 945477 - DNA, 120 bp, Artificial Sequence
  ENSG00000250331_14 (sequence is synthesized)
gatataagacatatggtttgcaagtattttttccatctgtagtttgttgcttcactttcttggtggtgttctatgatgcacataaattgtaaattttgataaatttcaacttttcaatct

SEQ ID NO: 945478 - DNA, 120 bp, Artificial Sequence
  ENSG00000250331_15 (sequence is synthesized)
acatgttcctgataagtgtgtgatcttggtcttattctcaagctgctgcagaactcgactgccattgaaatgtgcaaaagaaaaatttcctggcatcttaaaaaaaatgtcgaagtcagt

SEQ ID NO: 945479 - DNA, 120 bp, Artificial Sequence
  ENSG00000250331_16 (sequence is synthesized)
tactccacaaaatacagctcatggaaggtcagaatgtataagaatgtgtttattggataccttcaaagtcactaagcattatgtcataaacattttctgaagtcaacattccgaaaacat

SEQ ID NO: 945480 - DNA, 120 bp, Artificial Sequence
  ENSG00000250331_17 (sequence is synthesized)
agcttcaaagctgagaatgatatggatacgtatcctcacgattttaatggaggaactagacacagcctatacacccttcaggatctgagtgtttcagagacccattcatcaccattaaca

SEQ ID NO: 945481 - DNA, 120 bp, Artificial Sequence
  ENSG00000250331_18 (sequence is synthesized)
acacccagagattcatttttgatttactaagatggaatacttagagaggaatttgcaaagagaaaactgttatttctccttctcttccaatcctcaagcaaaatgaaggcaattccaaga

SEQ ID NO: 945482 - DNA, 120 bp, Artificial Sequence
  ENSG00000250331_19 (sequence is synthesized)
gttcttgactgcacctttgaagttgtggagcacagctaatggaaaaggctggaggcaggagcaggctggagcaaccacagaggcagagccaagagatggggcagtaggagaatgtggtta

SEQ ID NO: 945483 - DNA, 120 bp, Artificial Sequence
  ENSG00000250331_20 (sequence is synthesized)
atgtgtctggagtggggcgaggtgatttggaaggtttctctagaggcaaatggtagacagccatgtcatcttgtgtgatctccccatggtggcaagtcaattttccagttgttcacgccc

SEQ ID NO: 945484 - DNA, 120 bp, Artificial Sequence
  ENSG00000250331_21 (sequence is synthesized)
caaactgaaattgttgtatgtttgccacttcctcccctgattagtttcaacatagcactcagagtagttcttgtaatgtttaacttgaattatatcacagctctgttcagaactctattt

SEQ ID NO: 945485 - DNA, 120 bp, Artificial Sequence
  ENSG00000250331_22 (sequence is synthesized)
cctgtggcttcatgtcttaaagtaaaagcaaaagtcttaaaattggcatataaggttctatgttatctgtctccccatacatatatttgttcctttctgagctaatttcctagcactttt

SEQ ID NO: 945486 - DNA, 120 bp, Artificial Sequence
  ENSG00000250331_23 (sequence is synthesized)
cctcttctcatttggctacacacagggcactgctcattcagccttcagcttgccaaatgtgcacacaccccagggccttttcacttactatctcctctgcctggaacatgtgtccccaga

SEQ ID NO: 945487 - DNA, 120 bp, Artificial Sequence
  ENSG00000250331_24 (sequence is synthesized)
tatgcatatacttactcctctactatattcaggtagcatctcttaggccagctttttagaaagtctttcccttgccatccttgatattagcatttccttcagtcacctgatatccccaaa

SEQ ID NO: 945488 - DNA, 120 bp, Artificial Sequence
  ENSG00000250331_25 (sequence is synthesized)
ttccattgtatttttctatcaggcacttgtcatgtgacatatttttatatgcttattgctttattgttttagtctaacgttagaatgtgagctcttggagaaaaaggagtttgtccatct

SEQ ID NO: 945489 - DNA, 120 bp, Artificial Sequence
  ENSG00000250331_26 (sequence is synthesized)
tgttttctttgtcctatcaccacagcctactatagagcagatcacagaggaagtattcaatagatatgtgttgaataaatgatagatgcttctgatttagaagcaataatttttcctcaa

SEQ ID NO: 945490 - DNA, 120 bp, Artificial Sequence
  ENSG00000250331_27 (sequence is synthesized)
tttccaatatgaagtaaatggagaatacagctcatggaaggtcagaatgtataagaatgtgtttattggataccttcaaagtcactaagcattatgtcataaacattttctgaagtcaac

SEQ ID NO: 945491 - DNA, 120 bp, Artificial Sequence
  ENSG00000250331_28 (sequence is synthesized)
attctcaagctgctgcagaactcgactgccattgaaatgtgcaaaagaaaaatttcctggcatcttaaaaaaaatgtcgaagtcagttactccacaaagtctggagttgcttctgttggc

SEQ ID NO: 945492 - DNA, 120 bp, Artificial Sequence
  ENSG00000250331_29 (sequence is synthesized)
aggaatcaacagctagtttagagttactgggggcagcatttggaagatttaacttgtccagtttgggccacttattaatattacatattgcttatctatcttttgcaattctttggggtc

SEQ ID NO: 945493 - DNA, 120 bp, Artificial Sequence
  ENSG00000250331_30 (sequence is synthesized)
ccttccgtagacgtggtgctcaaggaagctttgatggaaggctttctgtagacaattcacttggttctgacaggccaagaaagcctgtctggagccaagataaacccaaggctcatttct

SEQ ID NO: 945494 - DNA, 120 bp, Artificial Sequence
  ENSG00000250331_31 (sequence is synthesized)
gcatttatttattaatacagcaaatatggttattttttggagattgtcagaaaatcagttctacatactagatgtgaacttgcactctgatactagttctgtgttcatttgtattttctt

SEQ ID NO: 945495 - DNA, 120 bp, Artificial Sequence
  ENSG00000250331_32 (sequence is synthesized)
ttatttcttggtaaaagctcagaaaacaactggatagaaatgtgatcttttggcatctttgaattcactcttactgagatatcagttttcccgtcaaaggaaaaattaagaaaatgaaaa

SEQ ID NO: 945496 - DNA, 120 bp, Artificial Sequence
  ENSG00000235862_0 (sequence is synthesized)
agatgtatgattctttatttaaacggcagtaaagaacgctggaataggctttccagggacactcccatgagctctgggctcctttgcagcttccagctctgggtcttatttaatgggctt

SEQ ID NO: 945497 - DNA, 120 bp, Artificial Sequence
  ENSG00000235862_1 (sequence is synthesized)
caaaggtcactgtctccatgatgtccggtgtcatagaaccaaccgtctccagcccctggccaccctctgctgtctcggcgatggccacgttggtgctcctctccgccatcttagccatga

SEQ ID NO: 945498 - DNA, 120 bp, Artificial Sequence
  ENSG00000235862_2 (sequence is synthesized)
cgttcacatctctgccatgtggtgtgcccactacttttgtagtaaggttggctctgacgttcctcaggaaagagctgaccctgccaagtcccttgctggaaccggaactggtggtccata

SEQ ID NO: 945499 - DNA, 120 bp, Artificial Sequence
  ENSG00000235862_3 (sequence is synthesized)
agctcctcccagatttgtgagaggtcctggactcctttgagatgggcgtgtggctgacacctttatgcgagtccctgtgcctgctgctccccgggttgccacagcctttctcctttttgt

SEQ ID NO: 945500 - DNA, 120 bp, Artificial Sequence
  ENSG00000235862_4 (sequence is synthesized)
catctctattggctctgtggctgaatgaggacctgctggaggacttttgggcaatcttgtctccccttgttttgtggcggctttcacctgtcctgcggcgatgggaactccttccgagag

SEQ ID NO: 945501 - DNA, 120 bp, Artificial Sequence
  ENSG00000235862_5 (sequence is synthesized)
ccctgtccttttcccttctttccctcccctccttgcagccttcagcgctggcctgggttcgctcccttccatgctgtccactcaggctgctcttgctctgccgggtggagacgggaggtc

SEQ ID NO: 945502 - DNA, 120 bp, Artificial Sequence
  ENSG00000235862_6 (sequence is synthesized)
ccgctgctgcatccatgtctgcttctgcagctgtcctgctggtcagtactactcctgcaatggccaggctcacactgccctctcgggaaaggctcatggatgcgctggaaacatgctctg

SEQ ID NO: 945503 - DNA, 120 bp, Artificial Sequence
  ENSG00000235862_7 (sequence is synthesized)
aggacttgcctgcagcccctgccacagccaccttcgtgctgtttggagccatgctggcagtgcctgcaagggccatgttgcctttgtttcctcctgcaccgatggtggccgccccagcta

SEQ ID NO: 945504 - DNA, 120 bp, Artificial Sequence
  ENSG00000235862_8 (sequence is synthesized)
tggctgcgctcacctgtccaggggcagaattggctgctgccacactcaaggcacctgctacggtgcctgttgctgcccctgcagctgcccctgctgctgctgcctctttaatcccccctg

SEQ ID NO: 945505 - DNA, 120 bp, Artificial Sequence
  ENSG00000235862_9 (sequence is synthesized)
ttgttaaagtcattttggagtccctcccctccagcataagcagcagaggtggccccacacacctcagagaccatgtggaggctttggatgctgacctggtcctgatccccctttccttga

SEQ ID NO: 945506 - DNA, 120 bp, Artificial Sequence
  ENSG00000235862_10 (sequence is synthesized)
aggttcacggctcccaggctcctcctgtcttcctgaaacacaggcatccacatcatgtcttcagctggaatgccacaggtactgctgttactctccatgggtggccgcaagaggtaaatt

SEQ ID NO: 945507 - DNA, 120 bp, Artificial Sequence
  ENSG00000235862_11 (sequence is synthesized)
agtttttcccaataggcaaagaggtcatcccgtgtgtcaagagcgggacacaattgcagatagcaagatctgccagtggcgaacttcaggcgcagctgttgtttctcatggtcttgaaca

SEQ ID NO: 945508 - DNA, 120 bp, Artificial Sequence
  ENSG00000235862_12 (sequence is synthesized)
gagatccgtacaaacctcaggggcagaagcctgttgtcgctgcagtttccccatggtggtgttgaacatgctcatgctggagccactctgggccgtataatacggcagcagaaaatcagc

SEQ ID NO: 945509 - DNA, 120 bp, Artificial Sequence
  ENSG00000235862_13 (sequence is synthesized)
attcatggttgtctttcagcacaacggcagcactggtgaggcaggtctctgggtcttccttggcctcggtggcagatgagggaccagtggtgctcctgggtcacaaagatgtctctgcag

SEQ ID NO: 945510 - DNA, 120 bp, Artificial Sequence
  ENSG00000235862_14 (sequence is synthesized)
ctggtctctcaatcccaccccaccccacaggcccccactgttgcctcagagcctcccagaggccggggtgggggtgggagcacggatgattgctgtggggggtgctgtagggtgcctgga

SEQ ID NO: 945511 - DNA, 120 bp, Artificial Sequence
  ENSG00000235862_15 (sequence is synthesized)
ctccagactcttccaagacgtagagatgcagggtgggctccagagaggttttcttctggacctaaccccctgacctccacctctgatttttttaattacagtttgtagtctctctccctg

SEQ ID NO: 945512 - DNA, 120 bp, Artificial Sequence
  ENSG00000235862_16 (sequence is synthesized)
agagagactacaaactgtagtcctagtgacaggaagtgacgaccctctctgcctaaaccccctgtgcagccatatttatcttctgcttccctttgtgacctgttgctgtcacatacccct

SEQ ID NO: 945513 - DNA, 120 bp, Artificial Sequence
  ENSG00000235862_17 (sequence is synthesized)
ttgttctcatcccccaggccagggccacaatgccctcactaatactccattgcccccatagaggacagccccaccgtgccaggtactcaagtgggtgccaaaataaaaatttttcaaatg

SEQ ID NO: 945514 - DNA, 120 bp, Artificial Sequence
  ENSG00000235865_0 (sequence is synthesized)
gtttagtatttttgagaacccagccacctggccatgctgtaccagccttgtgctgagtgctggggataaaggaacaaataaaacccagtccaggcttctgtgtgcccagccctgtgccgg

SEQ ID NO: 945515 - DNA, 120 bp, Artificial Sequence
  ENSG00000235865_1 (sequence is synthesized)
gtcccagtgggtaacagcatgtccaatcccctcagtgtcccactagaggcttcctttggggctgctggggacatcttgtttctagttgagaattcagatttatgtccaaagacaagaact

SEQ ID NO: 945516 - DNA, 120 bp, Artificial Sequence
  ENSG00000235865_2 (sequence is synthesized)
ccctgaggggcagattacaacatggactgggccattacaatcaacaaggacacaaagctaacacagccatcgttatacaccagacatgtgctaaggacttgatttccccattgtttaatc

SEQ ID NO: 945517 - DNA, 120 bp, Artificial Sequence
  ENSG00000235865_3 (sequence is synthesized)
atcaccaactccattatcacccccatttcacagatgtggaaactgaggctgagaagagtaagggacttgtccaagggcacagagcaagtcagggctacggtgatgtttcaggcccagacc

SEQ ID NO: 945518 - DNA, 120 bp, Artificial Sequence
  ENSG00000235865_4 (sequence is synthesized)
tgtttgcctctggagcccagggtttaacacaccccagtgctgctgtgaaagggctctggacagctcaggctggccggccaattcggggataaccgaacagaggtatggaacagaaagggg

SEQ ID NO: 945519 - DNA, 120 bp, Artificial Sequence
  ENSG00000235865_5 (sequence is synthesized)
cgttgaggatgttgctgtgtgtgtgcggtggggggagtgacaaggcttcagcaatggtactcattctctccaaccagctcccagtgctgctgtcctctgatccaccctccgctctgcctg

SEQ ID NO: 945520 - DNA, 120 bp, Artificial Sequence
  ENSG00000235865_6 (sequence is synthesized)
ccatggactaattgttctgaaatcccatggatcaagtcactcctcagctgaggacctgtccatggctccctggtacccagaggatagaaacccagcattcaaaacctctctaaccagctc

SEQ ID NO: 945521 - DNA, 120 bp, Artificial Sequence
  ENSG00000235865_7 (sequence is synthesized)
cccacctcaaccctcacactcctgctcactagcccccaggcgcagtgggctcttccagcggccaagcctgtgcctacggtgccttcttgcctggaatgcccaactcccccttctcagcct

SEQ ID NO: 945522 - DNA, 120 bp, Artificial Sequence
  ENSG00000235865_8 (sequence is synthesized)
tctttgactctcaagtaaggaaaagcactctttgtctccctgagccccttggcacttatcacagagcactctgggcgttaacttccactgtctccgtcttggattagagtggatctcaga

SEQ ID NO: 945523 - DNA, 120 bp, Artificial Sequence
  ENSG00000235865_9 (sequence is synthesized)
gggcccggtggtgtctgcttcacctccctctccactgcagcagcttagcaaggactggccgggtaaactaaaaaatgcaaagagctgagagaatcctgggaaagtgcacatttcccagga

SEQ ID NO: 945524 - DNA, 120 bp, Artificial Sequence
  ENSG00000235865_10 (sequence is synthesized)
ctgcccaatgacaagccccgtaccaaggcacagcatcaggataccctgatgtggaagaaccaaaaattgcaccctcatggcttatcaggatggtccttgtgtctgtccctttcaagggtt

SEQ ID NO: 945525 - DNA, 120 bp, Artificial Sequence
  ENSG00000235865_11 (sequence is synthesized)
ctgataatgaaatctgggcaagtcaccctcctgctttaaaacttccaatggttcccagaggtctagcataaaatccaaactcaagggcccacataacctaggtgctgcctggcccccagg

SEQ ID NO: 945526 - DNA, 120 bp, Artificial Sequence
  ENSG00000235865_12 (sequence is synthesized)
ccctcctcttgccacgcccccctccctggccagcctccctcacttctttcagttcctcaaggactccccctcactaaagccttacccaggtcgcctctctgcctagggggctcctccatt

SEQ ID NO: 945527 - DNA, 120 bp, Artificial Sequence
  ENSG00000235865_13 (sequence is synthesized)
ccctgctcactcagccacctccctctccctcttcaggtctcactttttaggggaggcttccctgatctgtccagataagacctcaccactcccacccaatcccaaacgctcccataacct

SEQ ID NO: 945528 - DNA, 120 bp, Artificial Sequence
  ENSG00000235865_14 (sequence is synthesized)
gatcgtttccttcacagcaagaattaatcttcagtgtaaataatgatctactgaagacctatgaggaatgggaaagtcttgttttttgctgattcttcaacacccagctcagagcctaaa

SEQ ID NO: 945529 - DNA, 120 bp, Artificial Sequence
  ENSG00000235865_15 (sequence is synthesized)
gaatgaatgaatgaatgaatgaatgaacctatatacataaatcaagacaagaaggtgggcagaatcctagggaacactgaggcaggaaaagcagggccctgggccaggcgtcatggctca

SEQ ID NO: 945530 - DNA, 61 bp, Artificial Sequence
  ENSG00000235865_16 (sequence is synthesized)
aagaaggtgggcagaatcctagggaacactgaggcaggaaaagcagggccctgggccaggc

SEQ ID NO: 945531 - DNA, 75 bp, Artificial Sequence
  ENSG00000235865_17 (sequence is synthesized)
gcaagactccgtaccagggccctaactaaaaaagacaggaggaaaaacagggccctaactaaaaagagaggaggg

SEQ ID NO: 945532 - DNA, 120 bp, Artificial Sequence
  ENSG00000235865_18 (sequence is synthesized)
ggaaaaacagggccctaactaaaaagagaagaggaaataaaccagacagtgcagcctcccagaagcaaaaggagggagtttctggaactgcactagagactggcacatggagtcctgagg

SEQ ID NO: 945533 - DNA, 120 bp, Artificial Sequence
  ENSG00000235865_19 (sequence is synthesized)
aaagagcactggattggacatcgaggaggtcactggggcctccctgattgaaccaaggttccgtggaggtgggcacagggctggtacattgcagggggcagaggagtaaagagggatgaa

SEQ ID NO: 945534 - DNA, 120 bp, Artificial Sequence
  ENSG00000235865_20 (sequence is synthesized)
taagcaaagctctcaggcgacggttgctcagctgggtctatgccagcctggccctgcagggtctgcggaagacagggcccctgtgtcatagtcaccaaaagcatcaacagagcataacat

SEQ ID NO: 945535 - DNA, 120 bp, Artificial Sequence
  ENSG00000235865_21 (sequence is synthesized)
tctttttgttgacagattacattgaggcaacttggcttttggagttatcagggctcagtctcaaaggcagatgcatcagagccaagacccggccctcaagtcctcctattagggcagcac

SEQ ID NO: 945536 - DNA, 120 bp, Artificial Sequence
  ENSG00000235865_22 (sequence is synthesized)
tagggctacctctttgtcagcagaacctttggatagccgctgatggggtgagtcagctttctgggcccggcagaccttttgggaatccctggcttttggggcacaacatcctggggacca

SEQ ID NO: 945537 - DNA, 120 bp, Artificial Sequence
  ENSG00000235865_23 (sequence is synthesized)
ccaaaaagccctttcacctgagctttgggaaagaggaacagctccggctgtgggtggctcatgtcaccatctggaagccagctgggccacagcagacgcgtaagtcctgtattcattcat

SEQ ID NO: 945538 - DNA, 120 bp, Artificial Sequence
  ENSG00000235865_24 (sequence is synthesized)
ccccttctccttttggcagaaaagggatggcgtgggttggaggggtgttttcctgggttcttgcacaattgctcattagaaattcacttctgtttgggtgttggaagctgggcgattccc

SEQ ID NO: 945539 - DNA, 120 bp, Artificial Sequence
  ENSG00000235865_25 (sequence is synthesized)
cctagtagtgatccttcctgtctcactggtcacaaagccctttggcatctacaagctcgttgggtccacacagcagctttgttaggtgggtagggggagaccaaggcacccatcctacag

SEQ ID NO: 945540 - DNA, 120 bp, Artificial Sequence
  ENSG00000235865_26 (sequence is synthesized)
gtggagaaaccgaggctgaagctgggaggtgagccagtctcctggcttccagcccaggactctgcactcctccccccacctccccacctacttcagcaggtcacctgtgaatctgatagt

SEQ ID NO: 945541 - DNA, 120 bp, Artificial Sequence
  ENSG00000235865_27 (sequence is synthesized)
caggtgggccccaccctgccagctggccccagcgggcatgactcatccgcttccccatgactcacacacctcaggtgctcctcctctggtcaacaagtccagagacttggcaaatggacc

SEQ ID NO: 945542 - DNA, 120 bp, Artificial Sequence
  ENSG00000235865_28 (sequence is synthesized)
cccatttttctcacctctccaaagcctctgggaagaattcctgcacctcctctttatggggactctgctcttctacagaatagcaaccaaggccttgagagggaaagcaactctcctaaa

SEQ ID NO: 945543 - DNA, 120 bp, Artificial Sequence
  ENSG00000235865_29 (sequence is synthesized)
gtcacatagcaagcaaccagcacagccagggtgggagccaggcatccgggcaccgagcccagtcccggcctcctccctacaagatcactctcgcctgacctccctctcaaggacaggaaa

SEQ ID NO: 945544 - DNA, 120 bp, Artificial Sequence
  ENSG00000235865_30 (sequence is synthesized)
ggagcagagacgcactctgagccttattaggaagacctcagggactcccactgaatccactgtggctacagcggctgcttccaccactgaagtcccctccaggcttccctgggcagccag

SEQ ID NO: 945545 - DNA, 120 bp, Artificial Sequence
  ENSG00000235865_31 (sequence is synthesized)
ggcggggtttaagaggacgacaggtgtctgtattgctctacctacctaacaaggctgtgcagggtgaagagtgctgctccgtgggaaggcgctgggaccaaggccgaagcactggacaaa

SEQ ID NO: 945546 - DNA, 120 bp, Artificial Sequence
  ENSG00000235865_32 (sequence is synthesized)
gagagctatgagcactacctgtaaacaaagggcacagaatgtcagcctcagggggagttcaaggtcatctggtcaaatccccatttgatgtttcaacccctttcctcccctccaccaggg

SEQ ID NO: 945547 - DNA, 120 bp, Artificial Sequence
  ENSG00000235865_33 (sequence is synthesized)
gtcacacaatcagtacttgcacacatccagcaacaccgcactcactacctgccaaggctgcaagacctgctgctggagggtttggctgcgtaaaagaattgtcctaaggatgcactaaaa

SEQ ID NO: 945548 - DNA, 120 bp, Artificial Sequence
  ENSG00000235865_34 (sequence is synthesized)
tctctctcttcttatgccttgtacctgctggtattagctctgcctccttttgggtcagccagaacaggtctgtccccctctttcctgatggctctttggagatttgaagacagtgatcct

SEQ ID NO: 945549 - DNA, 120 bp, Artificial Sequence
  ENSG00000235865_35 (sequence is synthesized)
gggcccctcaagtcttctacaaattgtgcaccccctttcctccagctcttcctgagaccagggtttccggttcgctcaccctgttccctgatctgctccagatgaaacctgtccctactg

SEQ ID NO: 945550 - DNA, 120 bp, Artificial Sequence
  ENSG00000235865_36 (sequence is synthesized)
acagcacaagacccagaattagacaatcagtcaagctctatccaggacagggcaagcaggactctcacctccttcattagagatatcatgcttctattaattgagcctaaaatcccattt

SEQ ID NO: 945551 - DNA, 120 bp, Artificial Sequence
  ENSG00000235865_37 (sequence is synthesized)
gcatttaaggcagccctattgcatggctgaattcagtttacagtcaacttcagagctgtacgttagtactctgaagttatataaactgggccctcacttaactgtgtaacttgagcaagc

SEQ ID NO: 945552 - DNA, 120 bp, Artificial Sequence
  ENSG00000249667_0 (sequence is synthesized)
acaagacaggtgaatgccttcatcatgactgccagagagggaggaggccaacctggcaccaccatggaggtcctcaaatctaccaccctggcagaggcgagctgtgagatggccctggct

SEQ ID NO: 945553 - DNA, 120 bp, Artificial Sequence
  ENSG00000249667_1 (sequence is synthesized)
tttgtgggaccaccttctgaaggtcatctggaactggatgagaagtgctcaaggatataagatgagaaacagccttaaaaaggtgaagtaatttgaccaaggtataggcaaaacagtgga

SEQ ID NO: 945554 - DNA, 120 bp, Artificial Sequence
  ENSG00000249667_2 (sequence is synthesized)
gccaatatttgaacacgagtctgtctaaagtggccgtatatgaaaagcaggttcccctgatctgcctgggcagtttcatccctgcagagctgggatgaatgacaaattcaaaacctctct

SEQ ID NO: 945555 - DNA, 120 bp, Artificial Sequence
  ENSG00000249667_3 (sequence is synthesized)
ggtttgaagagatgggatccagacacctcctaagcctcttgttttcaaatttgtctgcatgttggaatcacctggccatctttttaaaactgctgatgcctgtatgtgccccctcctccc

SEQ ID NO: 945556 - DNA, 120 bp, Artificial Sequence
  ENSG00000249667_4 (sequence is synthesized)
actgctgatgcctgtatgtgccccctcctcccaagattctgatttcattggctcagggtgaagcctcagcatcataattttttttttttaatagagtcttgccctgttgcccaggctgga

SEQ ID NO: 945557 - DNA, 120 bp, Artificial Sequence
  ENSG00000229345_0 (sequence is synthesized)
ctaggtctgggttagaaagggagcaaaagagctgcttttcaggttaaaagagatcatatgaaacggagtggcaaattcaaattctcctgaggcaaaggcagttaacaccagtatataagg

SEQ ID NO: 945558 - DNA, 120 bp, Artificial Sequence
  ENSG00000229345_1 (sequence is synthesized)
tggcctcatctgaaaggggcgtcattggctgctgccacacaggagtgtggactgcaatcaccaggtctcctggacatctaggacattccaaagtttcagcatttgaggttctgcaagaag

SEQ ID NO: 945559 - DNA, 120 bp, Artificial Sequence
  ENSG00000229345_2 (sequence is synthesized)
agttctgttgttgacaccattgggtcaactggagactccacagagttgccacagagctgcagtatggagcattggtttctttcttgagttgtgctaacaaaattaaagatacgaatttaa

SEQ ID NO: 945560 - DNA, 120 bp, Artificial Sequence
  ENSG00000229345_3 (sequence is synthesized)
actaaaggtccaagaacagaggccaagcccactgtcactgtcacagggtggcttcaggcgatcattcaaatacaggtttacaaaagaagtgatccttcctaaaaaacccacagccaaaga

SEQ ID NO: 945561 - DNA, 120 bp, Artificial Sequence
  ENSG00000229345_4 (sequence is synthesized)
acttacctcccagaaagcagaatcttgagaaatttcatcctgaagaacacacgtacaatgttccttttttctgtcaccatttatttcatgattttacctcagccgtgaacttcacagtcc

SEQ ID NO: 945562 - DNA, 120 bp, Artificial Sequence
  ENSG00000229345_5 (sequence is synthesized)
tgttcgtgactgttacatttcacttcctcccctctgggccaagcagacattcctgggtggccactgttcagccttagaaggtattcatcaattttatatgatcacatttcagcatttgag

SEQ ID NO: 945563 - DNA, 120 bp, Artificial Sequence
  ENSG00000237646_0 (sequence is synthesized)
cctagctccaagccctcccccttaccagctgtgtgtgttggcttcctgagatgaatggtggaaaaggctctggtcctgactgtgctgaactcaatggcgatacctctggactcgagcagc

SEQ ID NO: 945564 - DNA, 120 bp, Artificial Sequence
  ENSG00000237646_1 (sequence is synthesized)
atgtcagtacagcttagccatgtgacccagaacatgtctgtctaccaagtttctgtatgtgggaggcctggacaatgacggccgcaatttccctctccttaaatagagcttcagggaaag

SEQ ID NO: 945565 - DNA, 120 bp, Artificial Sequence
  ENSG00000237646_2 (sequence is synthesized)
attgaacccagggaccagccaagaggaactaatggaccccgtggaagatcatttgagcctcagctacgggaagagctggatgcaggccggggaagcggattggtggactgcacattcatt

SEQ ID NO: 945566 - DNA, 120 bp, Artificial Sequence
  ENSG00000237646_3 (sequence is synthesized)
taaggttgaaatgcttagcattgtaaaggtgactgtgaattttaagcttcattctttattgacctggcagatgggagagtgctgtgtcttggtgtaatgaagcattatgttggtacagtg

SEQ ID NO: 945567 - DNA, 120 bp, Artificial Sequence
  ENSG00000237640_0 (sequence is synthesized)
agaaacgcagcggggagagggggtggaaggcatcgaagcaggcagccttgcagcccggctgctgggtgtgacacacgaattcactctgctcatcaccatagactccaggcccactggcag

SEQ ID NO: 945568 - DNA, 120 bp, Artificial Sequence
  ENSG00000237640_1 (sequence is synthesized)
ccagcagcacaaggcggaatcccaggagcacgggaagcaagaggcgccccacgggggtggagcgccggctctcctccgccagcagccgccgcaggaacctgccacacatcctgttttgga

SEQ ID NO: 945569 - DNA, 120 bp, Artificial Sequence
  ENSG00000237640_2 (sequence is synthesized)
actgaagacaagaccagcctcctcccacagccatacgttgacaacacgtgccaaggcctggggcaacagggtacccagggtgaagggctcacccaagagtagggagcgaagagaaatgtg

SEQ ID NO: 945570 - DNA, 120 bp, Artificial Sequence
  ENSG00000237640_3 (sequence is synthesized)
gaagctcagcacctctgtgccccaagaacgatgatgaagtggcgtcatttgtctggagtaatacccaagattcattgcctcacgccaaggaaatcaagaagactgtgagaactacacgga

SEQ ID NO: 945571 - DNA, 120 bp, Artificial Sequence
  ENSG00000237640_4 (sequence is synthesized)
accctaaggagctactaatccagctgacacacgtggaaactgactcagactaagtgatacatacaggccatatggactaccagacacagggcaagactagatgctggttcctcagaccag

SEQ ID NO: 945572 - DNA, 120 bp, Artificial Sequence
  ENSG00000249669_0 (sequence is synthesized)
accagaggctgggtctaattagttgagaagcagtgacacccccaaccactccccaaacaggctggctcccgtctccaggccccaaggagccacacctggaccagaccccaggaaaggtaa

SEQ ID NO: 945573 - DNA, 120 bp, Artificial Sequence
  ENSG00000249669_1 (sequence is synthesized)
gcaccaacggcagacctgggatccgtgggtgggggcctctgggaatttccctagggggatgctgcatctgggggtcttgctgtcttgctaactggctctgtccctttctggacacagatt

SEQ ID NO: 945574 - DNA, 120 bp, Artificial Sequence
  ENSG00000249669_2 (sequence is synthesized)
ctctgggtctcagtttccccatctgtacaggggctggagtcaatgatctctaagcatccatccagctgatcggctctagttctatggtcctgttggcttctaggattccttgttgttgta

SEQ ID NO: 945575 - DNA, 120 bp, Artificial Sequence
  ENSG00000249669_3 (sequence is synthesized)
gtcaattgggggaagaaggtgcagagggagtgcacagagttaacatcctatcagcccaagcttcacctcggcacccgagtctcaggcagtctccctggcttctacataggcagtgcttct

SEQ ID NO: 945576 - DNA, 120 bp, Artificial Sequence
  ENSG00000249669_4 (sequence is synthesized)
tcctcattgtgtggggctttgattttgtaattccaagagcctggggctcctggcaaggaaaatggttttcaaataatggtttcgagaaacaaagctggggaagaggcaatgtaagctcag

SEQ ID NO: 945577 - DNA, 120 bp, Artificial Sequence
  ENSG00000249669_5 (sequence is synthesized)
gctctggcaggcaggcagagatcctgggaaggctgggtgctgactgcacatggagcaatgggaagggatgctggtgagaggagacgggggcacttaagctccggccccagctctgctctc

SEQ ID NO: 945578 - DNA, 120 bp, Artificial Sequence
  ENSG00000249669_6 (sequence is synthesized)
agtgcccggctctgtggtcttgggctggccccctcccttctctgggccatagttttcccatctgtatagcaaggccattggacaaaatggtccctctgcagatgtggcttctgagttgtt

SEQ ID NO: 945579 - DNA, 120 bp, Artificial Sequence
  ENSG00000249669_7 (sequence is synthesized)
tgtgcctgagggacagccagtgttgggaagttcccccaggaggtccctgagccgagtctgaactttgaccacaagcttggagtccaagcagatgaagtcctgtgggagcttttggaggtt

SEQ ID NO: 945580 - DNA, 120 bp, Artificial Sequence
  ENSG00000249669_8 (sequence is synthesized)
gagcctgagtgagggagagtagctgaaggttctgtgactgaaggcttggccagaggggtgccccgagccctccagatgaacttggctgcaaccagcctctggtggggaaaggactgatct

SEQ ID NO: 945581 - DNA, 120 bp, Artificial Sequence
  ENSG00000249669_9 (sequence is synthesized)
ctggattcaaccacacaggaatgtgggacatggaagtaggtaagggatggaaaagatggcagagggcttcgcgggatgaagcagtggggccaggggacttagaggaatgcaggaggcatg

SEQ ID NO: 945582 - DNA, 120 bp, Artificial Sequence
  ENSG00000249669_10 (sequence is synthesized)
ggccactgcactcagccaacacctatccttgaggaatagaaagatccaggctccacaccacacaccatcactgactcaagtggctgttctgattcccagctgagcctgaggggttcgggg

SEQ ID NO: 945583 - DNA, 120 bp, Artificial Sequence
  ENSG00000249669_11 (sequence is synthesized)
aggtaatctctgaggtcctcactgctgggccgtgcctgggcatggcctcttcctgcaattttccaactaaactctccgggggggctcagcgccatggggtggttcgaagaaccatgatga

SEQ ID NO: 945584 - DNA, 120 bp, Artificial Sequence
  ENSG00000249669_12 (sequence is synthesized)
aggctggttcgaattgtgatgaccatttttgtccacatctcctaggacccataagccagagtttctctggagcttatagctagaaggggttctgggtcctggagtgcaggcctgtcaact

SEQ ID NO: 945585 - DNA, 120 bp, Artificial Sequence
  ENSG00000249669_13 (sequence is synthesized)
ttacaggagagcactagattgctttctgaagtggctgaaccaggttatgcttccatcagctgtgtatgagcatccccatcttcttgaccacacttgaagccatcagtttccttgaagcat

SEQ ID NO: 945586 - DNA, 120 bp, Artificial Sequence
  ENSG00000249669_14 (sequence is synthesized)
atgggttgcacacttcattttgcatgtatcaagtttatataataaaaaatgtaaggaagccatggaaataaaaacgtaggtgtgccttctgtaggctgctacgctcctgtgcacgagggc

SEQ ID NO: 945587 - DNA, 120 bp, Artificial Sequence
  ENSG00000249669_15 (sequence is synthesized)
gtctagaactttgccctccatgcacaagttgcagagcaccctcatcaggacatttacgaaggccctggggtgggatgggcactgcctatgtggccctcccccagcccagcagtatgcagt

SEQ ID NO: 945588 - DNA, 120 bp, Artificial Sequence
  ENSG00000249669_16 (sequence is synthesized)
ggcccgggtccaatcaaaggtcgcctgggagggtgagttgcaagaatctggggaaaagagcccaaggtggctgccgcctgctaacagcttgtctagacaggccccatggggcttcaccgc

SEQ ID NO: 945589 - DNA, 120 bp, Artificial Sequence
  ENSG00000249669_17 (sequence is synthesized)
acattgcgagagctctggccagccccctgcccacttgcaaaagaggctgttggcagcaacacttcaccactagaaacctttactccaattcgaaacatgccttaacgcacagtgtgaatt

SEQ ID NO: 945590 - DNA, 120 bp, Artificial Sequence
  ENSG00000249669_18 (sequence is synthesized)
acccactctcgtggcccacagaggttgactcattcaggcccccttttgttcagatgaggaaactgaggctgactccgaagcctgggggctttcagatgtggagtgggtccctgtgcccag

SEQ ID NO: 945591 - DNA, 120 bp, Artificial Sequence
  ENSG00000249669_19 (sequence is synthesized)
gtgatgaggggaccaggcgggtctggagcagggctggagtggggctcagatgtagtaggctggcagttaaaggtgccagatgtgagccaggctgctgggtttgaatcctggagctgcctc

SEQ ID NO: 945592 - DNA, 120 bp, Artificial Sequence
  ENSG00000249669_20 (sequence is synthesized)
atagcagcagtaggactttgggtaacttacataggtgctgtatgcctcagtgacctcatctgtaatatagagatgataagagtacctgtctcattggtctactgagttgtccggattaac

SEQ ID NO: 945593 - DNA, 120 bp, Artificial Sequence
  ENSG00000249669_21 (sequence is synthesized)
agtggctcacacctgtaatctgagcattctgggaggccaaggcggaagaatcccttgagcccagtatttcaagaccagcctaaaggtcaacataggcagactctgtctctactatacatt

SEQ ID NO: 945594 - DNA, 120 bp, Artificial Sequence
  ENSG00000249669_22 (sequence is synthesized)
tttagattaaatttttataataataataaccactaaaatgtgattactaaagacagcttcttcacagtacaaagagatgctcttctgagtaccaactctttggaggataaactgccctta

SEQ ID NO: 945595 - DNA, 120 bp, Artificial Sequence
  ENSG00000249669_23 (sequence is synthesized)
taccttcaaaaataacacttgccatatatcaagtcctttcaagtacctggagatttacccagcactctgagataaataccattatccctctgggcacacagaggctcagagaggtttagt

SEQ ID NO: 945596 - DNA, 120 bp, Artificial Sequence
  ENSG00000249669_24 (sequence is synthesized)
catttgcccaaagtcacacagcctgtacgaggccaggctgggactcaaactcagttctgactgattctaaaatcatgtgtttaactgctgcactctaggaccacccgcaatggatctgtg

SEQ ID NO: 945597 - DNA, 120 bp, Artificial Sequence
  ENSG00000249669_25 (sequence is synthesized)
aaccagaaccagctctggttctgacctgcctagtagggcctttggcatttgggggaggaggccattggaagtccgaagcccccttccagattaggcatgattgcagtaagagaagagaca

SEQ ID NO: 945598 - DNA, 120 bp, Artificial Sequence
  ENSG00000249669_26 (sequence is synthesized)
gaccctttggccccccacccctgctcaggctcaaaaatgcagaccctgccgaaacagtccttctcacccagaagcaccccatagggtgggctgagtaaccttgggggcctcgtcagtctt

SEQ ID NO: 945599 - DNA, 120 bp, Artificial Sequence
  ENSG00000249669_27 (sequence is synthesized)
gggctgccccatgccctgcacagcccgcctgaggtttgaggaaggggcagttggctaggcccagactggagaaagccaccccaccatggctcttctgcaagaacccccggccagccacaa

SEQ ID NO: 945600 - DNA, 120 bp, Artificial Sequence
  ENSG00000249669_28 (sequence is synthesized)
gcaagaacccccggccagccacaagcctaagccccctccttaaaagctcctcctctgaccttagctgtgcatcaagggagaaaagaaagctccaggccgggtgcggtggctcacacctgc

SEQ ID NO: 945601 - DNA, 120 bp, Artificial Sequence
  ENSG00000249669_29 (sequence is synthesized)
aaaaaaaagaaagctccaaactgctctgctgccacatactctactcctcctgtccctccaaggaggcagggatgggggtggagtgtctagagggaggctgcctgctggcctggggaggga

SEQ ID NO: 945602 - DNA, 120 bp, Artificial Sequence
  ENSG00000249669_30 (sequence is synthesized)
tccacagaggctatgacaccacccctggctgggctactgggctcagaggcccccggtcagcctgcccagagcctgccagccaccaggcatgtgacccaacaaccccgatgagctgagcaa

SEQ ID NO: 945603 - DNA, 120 bp, Artificial Sequence
  ENSG00000249669_31 (sequence is synthesized)
ggcagggtgaaggagaaagaggctggctaggaccaggccctggctctgcagccagcacaactgggtaactgtcccactcctctggggcctcaggccataatgttccctggtttgggacag

SEQ ID NO: 945604 - DNA, 120 bp, Artificial Sequence
  ENSG00000249669_32 (sequence is synthesized)
aggggacagttgaggtcattccatgtgtgatagtagacacctggattctcagagagggaaaatctaaggagctgggggcgcgccctggatagacagagaagaagacggcattccaggtgg

SEQ ID NO: 945605 - DNA, 120 bp, Artificial Sequence
  ENSG00000249669_33 (sequence is synthesized)
agagctctgtgtacaaaggtatggaggcaggattgcagaggcattttcagacaacagcagagaagcccagttggctggaaccgagagttggtctgaagctcagtgaggctggaggttggc

SEQ ID NO: 945606 - DNA, 120 bp, Artificial Sequence
  ENSG00000249669_34 (sequence is synthesized)
gaagcagagaaggcctagagtgtgcggtggctttggcaacagaaaccaaagcctcagagcttgggaaaagttctccttggtatctgtctgtccctgggagggggtgcctttctttagcct

SEQ ID NO: 945607 - DNA, 120 bp, Artificial Sequence
  ENSG00000249669_35 (sequence is synthesized)
atttgtccccctccccaaaataccatcagccaagaaccccagtgcagggcagagacctaggaatttggataatgggcaactctgagatgtcaggcaatggggaaaggagagctcaggtgg

SEQ ID NO: 945608 - DNA, 120 bp, Artificial Sequence
  ENSG00000249669_36 (sequence is synthesized)
gactaggaggggtaggaagcccgagggctgcagtcaccatcttcagaccactccagagcttcctggggagcaggaacagaggacaggccatgaagcccagaaaggcagatggcagcagaa

SEQ ID NO: 945609 - DNA, 120 bp, Artificial Sequence
  ENSG00000249669_37 (sequence is synthesized)
tactaggaagacacctccaatagtctgtccaaagagggtgaggggattaggaagtacagacatatcctgagttacaattttctattttaaaatgctatgaaagctatatgcatttggtac

SEQ ID NO: 945610 - DNA, 120 bp, Artificial Sequence
  ENSG00000249669_38 (sequence is synthesized)
cctcctcaacttatgacgcagttgtgatggggttataaggttacttcggataaaccaactctatattgaaaatatcgcaagtcaaaaatacacgttcgggccaggcgcggtggctcacac

SEQ ID NO: 945611 - DNA, 80 bp, Artificial Sequence
  ENSG00000249669_39 (sequence is synthesized)
ggtggctcacacctgtcatcccagcagtttgggaggccgaggcgagcagatcaggagttgagtacccatctctactaaaa

SEQ ID NO: 945612 - DNA, 120 bp, Artificial Sequence
  ENSG00000249669_40 (sequence is synthesized)
gtggccagggagccgcaggcaagggactaaggggaggggggctcagtgccagctgcttaaaaatgcccctgtggcagcgaggggcaccagaggctgggtctaattagttgagaagcagtg

SEQ ID NO: 945613 - DNA, 120 bp, Artificial Sequence
  ENSG00000249669_41 (sequence is synthesized)
acacccccaaccactccccaaacaggctggctcccgtctccaggccccaaggagccacacctggaccagaccccaggaaagacatgtggtggaaaccctacggccctggagcccaaggag

SEQ ID NO: 945614 - DNA, 120 bp, Artificial Sequence
  ENSG00000249669_42 (sequence is synthesized)
agcaacggctgtaacaagtgcacaggcaagggcgctagctggtgggagccaccccgccatgctgatgtcagagaagcaagaactctggagaagcagcctcctgggaccagaggagggcca

SEQ ID NO: 945615 - DNA, 120 bp, Artificial Sequence
  ENSG00000249669_43 (sequence is synthesized)
gcagcaggcagcccggagacagaactaatgtgtctgggggtgagaggacgggtgtgactgctgaaacttcctttcttggtgattccacatcactcctttctgatccctgagcctgtgcca

SEQ ID NO: 945616 - DNA, 120 bp, Artificial Sequence
  ENSG00000249669_44 (sequence is synthesized)
gacatggggaacacagaggcagaaacagcccatccacccaggagctgtcccccacactgccgggagccggcacccagagccgccagacacaaaggaacagaacgaggcaccaacagcaag

SEQ ID NO: 945617 - DNA, 120 bp, Artificial Sequence
  ENSG00000249669_45 (sequence is synthesized)
gggcaagcagattcaagggccacagaggagatggaggcaaacaccttcccctggtcagaggctgtgcctcagcccttctccctgcatcagtttctccttcagaagcatgggactacctcc

SEQ ID NO: 945618 - DNA, 120 bp, Artificial Sequence
  ENSG00000249669_46 (sequence is synthesized)
catctagttctcgtttctaaacctaggggagatgctatctttgctgcaataatcttagcctacatcttggaatggaaatggccttggtggaaatggtcttcaactcctctggtccaagct

SEQ ID NO: 945619 - DNA, 120 bp, Artificial Sequence
  ENSG00000249669_47 (sequence is synthesized)
caggccctgtgaccctggaacaatccccttcctggtcctccatgtaggagcaataacattcccttgccagcagcaccagccattctgatgattaaatggtatcggactctgttttccaaa

SEQ ID NO: 945620 - DNA, 120 bp, Artificial Sequence
  ENSG00000249669_48 (sequence is synthesized)
tgaggccacctggttcaacatcacctttcacagaaggggaagcagccacagaaagaagggcctcgttaagaagtggaacctgggacccccaagcggtgtctctcatcctgactggggatc

SEQ ID NO: 945621 - DNA, 120 bp, Artificial Sequence
  ENSG00000249669_49 (sequence is synthesized)
tttaaatgtaggatgagtcctttttattacacatagaaatagctactgtaaatagcaaactctaacactgtgcctaattaggaaataaaggtaaccataaatacagtaaaaatgaaacaa

SEQ ID NO: 945622 - DNA, 120 bp, Artificial Sequence
  ENSG00000249669_50 (sequence is synthesized)
gaacttgaagatgtacagacagcatggagtcgggctcctctgaaaacactctggccacatccggagcccagaacagaacagtcctctagcaccggcctctgtcttgtaccctccaccttc

SEQ ID NO: 945623 - DNA, 120 bp, Artificial Sequence
  ENSG00000249669_51 (sequence is synthesized)
ccgcttcttgtcacacaagacccaaggccatcatggttcagaaggaggctctgaattcaactgcctgggtccaattctggcttgtttacttactggacaagtgaccctgggcaagttgct

SEQ ID NO: 945624 - DNA, 120 bp, Artificial Sequence
  ENSG00000249669_52 (sequence is synthesized)
tgctgtttgagcctcagcttcctcctctgtaaaatgggtacaattctgagcttgcatggttgtcatgaggagtgagggatgtaggcacatagagcaggatgaatggggctgatgttacat

SEQ ID NO: 945625 - DNA, 120 bp, Artificial Sequence
  ENSG00000249669_53 (sequence is synthesized)
cgcagtcagagcccacacctcctgcgggcaagataccctgagctatgttgagggagaagtgggaatgaaacccggccagggaatgcccagagttgctgaagagctctggaacaggctctg

SEQ ID NO: 945626 - DNA, 120 bp, Artificial Sequence
  ENSG00000249669_54 (sequence is synthesized)
gaaagaggcaggaggaatcaaaagtcagaggctgtgggacacaggaaagtgatcagcttgagatgcctgaaggactgggggggatctcctttcctgcctttctagggcattgtgtgggca

SEQ ID NO: 945627 - DNA, 120 bp, Artificial Sequence
  ENSG00000249669_55 (sequence is synthesized)
atgtatctgaaccactgtgcactcacccactgacgggggaccccaagtgaggcctaggaatctgcattacaagcaccccatgaattcccatgcatgtggaagtttgcgaaatgccaggct

SEQ ID NO: 945628 - DNA, 120 bp, Artificial Sequence
  ENSG00000249669_56 (sequence is synthesized)
gtagggcggcctaggactctcacaaactgccgaggcaacggaatccacagagagaaagcactgctttaggttatttagcgagctgatggcagaggtggaacagaacctgcctctctgccc

SEQ ID NO: 945629 - DNA, 120 bp, Artificial Sequence
  ENSG00000249669_57 (sequence is synthesized)
agccagggattccataaggtggtgcaaatcaggagaaatagatgacactatttgtggagttcttatgaggtccaggcactacctcagatcttcacatgaactaattcatttaatcctcac

SEQ ID NO: 945630 - DNA, 120 bp, Artificial Sequence
  ENSG00000249669_58 (sequence is synthesized)
aagagccagtgaggaaggggcaattattatccccactccacagatgaggtacctgaggcaaagagagtttaggtggcttgcctgaggtcacacagctcatgagttgttaagttgtgtgtg

SEQ ID NO: 945631 - DNA, 120 bp, Artificial Sequence
  ENSG00000249669_59 (sequence is synthesized)
ccagctgcccctggggctgctaactcccccaggagtctcccacctcctgccctgcctcttagctacctcaaaacttcctggagaccctccaacagacctcatggaagggggcagaatatg

SEQ ID NO: 945632 - DNA, 120 bp, Artificial Sequence
  ENSG00000249669_60 (sequence is synthesized)
tatgggagacttctgggagtcagacactgtgctgaacagcttgcattatcatttaatcctcccaggattcctgtgaggcaggaatcagcatcattccatcaccctcactttctagagaag

SEQ ID NO: 945633 - DNA, 120 bp, Artificial Sequence
  ENSG00000249669_61 (sequence is synthesized)
gaaaccactgcagattacccaatgtcacgcaattaaaaagtggtgaaggggatttgaacctagtctatgcatctgcagaacgcacactcttgggctgcccaccccgacacctctgagggc

SEQ ID NO: 945634 - DNA, 120 bp, Artificial Sequence
  ENSG00000249669_62 (sequence is synthesized)
agtgatgaagaatcccacctcacagaggagacggaggccaggagtgaggccctgccggagcctgagcccaagccttctagctctgaggccactgctctcccttcaaccctgttgctgccc

SEQ ID NO: 945635 - DNA, 120 bp, Artificial Sequence
  ENSG00000249669_63 (sequence is synthesized)
cgcaacagaaagtttgtcattggtccctcacagccacaccacagccctttgggcaaaatcagccccttcccagcctggccagttctgggggaaaatgacacctgacacctgacacctatc

SEQ ID NO: 945636 - DNA, 120 bp, Artificial Sequence
  ENSG00000249669_64 (sequence is synthesized)
tatccatttttttttttttttttgaaatgaggtctccctctgtcaaccaggctggagtgcagtgactcttctcaattgactgcaacctctgcttcccaggctcaagtgatccttccacct

SEQ ID NO: 945637 - DNA, 120 bp, Artificial Sequence
  ENSG00000249669_65 (sequence is synthesized)
cgccacaggccaccagagcggagcagcgcagcgccctgtctcccagcctgaggtgcagtgctgcatctctggtcagttgggagtctgagatgaagcactgtagctcaggaagagagaagt

SEQ ID NO: 945638 - DNA, 120 bp, Artificial Sequence
  ENSG00000249669_66 (sequence is synthesized)
tgttctgcagccatcagcctggaagtggctggatgtgggaacttcagcactgccgtactcttgggaaatttgtccaaggccacccggctgagcagcggttgaaccaggacaccatcaggc

SEQ ID NO: 945639 - DNA, 120 bp, Artificial Sequence
  ENSG00000249669_67 (sequence is synthesized)
atgcgtttcttgtctccaccacaccctcaacccacttcccaacgcgccttgcgacaggggctgcggtattgcatccacatgactgataaactagtaaacacacatgaattcattttaaaa

SEQ ID NO: 945640 - DNA, 120 bp, Artificial Sequence
  ENSG00000249669_68 (sequence is synthesized)
gggtggccatagacccctcttctcagtaaggccctcatgtgaaggaggcaggggttgggacaagtgctaagtatgcaagactcaagggaagagctgctggagccaggagaagcacctccc

SEQ ID NO: 945641 - DNA, 120 bp, Artificial Sequence
  ENSG00000249669_69 (sequence is synthesized)
tcccggcccctctgcccctcctcatagcccagctgcactgactcctcctccaggaagccttctcagcttccccaggggtgggaacctttttgtcctccaggtgtgcttggctgtcctttc

SEQ ID NO: 945642 - DNA, 120 bp, Artificial Sequence
  ENSG00000249669_70 (sequence is synthesized)
ttgggctctctctctctctctctcctcatcccacttgagtctgccccctattcaccttgtgaggggaattttccttctactcaatctgaccgaggtcctccaggtcaaggacagcgaggc

SEQ ID NO: 945643 - DNA, 120 bp, Artificial Sequence
  ENSG00000249669_71 (sequence is synthesized)
tctcagtcccacttccccttggcacatagaagaggcagtgcgctgaagggacaggtgaaatgattagaccctgcccccaaaccaaggcctggccaattggacagggcatgagacattcag

SEQ ID NO: 945644 - DNA, 120 bp, Artificial Sequence
  ENSG00000249669_72 (sequence is synthesized)
cgtagaggttaaaacgagggccctgggttaggaaccccagctcagttctcagctctgtacccttggaaaattcccttcccatggagctttgtggatgcacaaggacttgcacaaagaaaa

SEQ ID NO: 945645 - DNA, 120 bp, Artificial Sequence
  ENSG00000249669_73 (sequence is synthesized)
agcttgcctggagccctggcctcagccctctctcactgaggtgccatctggctcgcagatgtggcccattcccagcccctcgtgtttcttggaaatgagaaagtccaggaaagggcacag

SEQ ID NO: 945646 - DNA, 120 bp, Artificial Sequence
  ENSG00000249669_74 (sequence is synthesized)
gggctttcgcaacgaccgtggcgatgatagctttgacgtgtggtcatccagccggccactgcccacacccaagagaaagctggattgagcatcaggagcctgggttcaagtctgcctctc

SEQ ID NO: 945647 - DNA, 120 bp, Artificial Sequence
  ENSG00000249669_75 (sequence is synthesized)
aagctgttccacaggtgaccctgggcaaatcgcacaggctcctggaacttcagaaaggggaagaattattcctgcctctggcgacatcagcgaatgtgccttgagttacgggagtgtttt

SEQ ID NO: 945648 - DNA, 120 bp, Artificial Sequence
  ENSG00000249669_76 (sequence is synthesized)
cctccctggtcttccaggattgcaacttcacagaatcccttttccataaggcacatgaaagtgactgtgacccgcaacgggagccttgacaaccagccaattcagaacacagaccttgac

SEQ ID NO: 945649 - DNA, 120 bp, Artificial Sequence
  ENSG00000249669_77 (sequence is synthesized)
atcggaaggccccgagttcaaatcctgccttgctccctttcagctggaaagctgtggtcaaattacttagcctctccaagccagttttcccttctgcaaaatgaggttacacaagctgcc

SEQ ID NO: 945650 - DNA, 120 bp, Artificial Sequence
  ENSG00000249669_78 (sequence is synthesized)
ttcaaggtagagaagatgaaaactcagaacgccctcttgtggcatctctacccaccctaggaacactatggctcttcccctacacatggtgattgctaaccttgctacaagacgttggac

SEQ ID NO: 945651 - DNA, 120 bp, Artificial Sequence
  ENSG00000249669_79 (sequence is synthesized)
acacacacacacacacacacactgaggttccttttgccccctcacttttgagccagtgactactgaaaccctctccattgttgcaccaccagcaatgcccccatcacttcctctcattta

SEQ ID NO: 945652 - DNA, 120 bp, Artificial Sequence
  ENSG00000249669_80 (sequence is synthesized)
gtgaggctcagagaggtaaagtggccagcccaaggtcgcccagacagcaaaaggcagggccagcgctgatttcaagtccaatggcctatggcaatttcttagccaaaagcaaaatctaca

SEQ ID NO: 945653 - DNA, 120 bp, Artificial Sequence
  ENSG00000249669_81 (sequence is synthesized)
aaaataaaaagtcaggcacagtggtgagtgcctacagtcccagctactgaggaggccgacgggggaggaccacttgagcttgggagttcctggctgcagagagctatgattgtgcctgtg

SEQ ID NO: 945654 - DNA, 120 bp, Artificial Sequence
  ENSG00000249669_82 (sequence is synthesized)
aatagccaatgcactccagcctgagcaagatagggagaccctgtctctaaaaaatacctaaataattttaaaagtcagcctctctgactgcctatagagaatgctaactaactgaatgac

SEQ ID NO: 945655 - DNA, 80 bp, Artificial Sequence
  ENSG00000249669_83 (sequence is synthesized)
tctctgactgcctatagagaatgctaactaactgaatgacagaagacctaatgtaatccaggtgcaaaatcagaactttc

SEQ ID NO: 945656 - DNA, 86 bp, Artificial Sequence
  ENSG00000249669_84 (sequence is synthesized)
ccactgcactccagcgtgggggttagaactttccccgtactcttgctagggcttttcatggagatgtagaaatggtagtaagtgcc

SEQ ID NO: 945657 - DNA, 120 bp, Artificial Sequence
  ENSG00000249669_85 (sequence is synthesized)
tagggcttttcatggagatgtagaaatggtagtaagtgccaaggccccagaaccctcatgtttgggtccgactcccacattgccagagactaggcagctcacacaggtgtcccaagctgt

SEQ ID NO: 945658 - DNA, 120 bp, Artificial Sequence
  ENSG00000249669_86 (sequence is synthesized)
ctttctcacaggccgcattgaaggcatttatgaaatgagaccccctcttcctcatccgtagtgacagggctggcctgaccgtggagaaatcagatttgatcatgatagcttccactccgt

SEQ ID NO: 945659 - DNA, 120 bp, Artificial Sequence
  ENSG00000249669_87 (sequence is synthesized)
gactggtcacgatctgccaggcgctgtgctaaacactttcataggccttgtccccctccatcctgataacaccccagtgaagcaggccctgctcttcactccactccacaaagccaaggc

SEQ ID NO: 945660 - DNA, 120 bp, Artificial Sequence
  ENSG00000249669_88 (sequence is synthesized)
tgagagaggttaacagacttacctaaggtcacacagctaagaagtcgtgaagctgggatcgaatcaagtctgtgtttatgggtttaactatcatgttgtggccccaaccccatttgacct

SEQ ID NO: 945661 - DNA, 120 bp, Artificial Sequence
  ENSG00000249669_89 (sequence is synthesized)
agcctggctggtgggccttcttgcagtagcttcccctggagaagaggaaaagcaaaccttcattgagacccaagcggtctctcctgtgctctgtgacaataataaagttccagcccttgg

SEQ ID NO: 945662 - DNA, 120 bp, Artificial Sequence
  ENSG00000249669_90 (sequence is synthesized)
actccccaccctaacctcagaatgaccaagaaactgggcctgaggatgacaagaagcagaatgggccttggtaaaggaagaccccccactgattggtggcagtgcgggcagttcagggct

SEQ ID NO: 945663 - DNA, 120 bp, Artificial Sequence
  ENSG00000249669_91 (sequence is synthesized)
gtcagcgtctgggttgtaggtaaaaagaaatggaacccaagaagggaaatccaactaggagccaagaatccggtctaccccatcctccttacgaaatagcaatgcaaagcccgtgtgatt

SEQ ID NO: 945664 - DNA, 120 bp, Artificial Sequence
  ENSG00000249669_92 (sequence is synthesized)
gaaaattgtcaaccactccttccttagggggtaaaagcaacattcagcaccgggggcaggtcaaggcaaggctggctcccgtctccaggccccaaggagccacacctggaccagacccca

SEQ ID NO: 945665 - DNA, 120 bp, Artificial Sequence
  ENSG00000249669_93 (sequence is synthesized)
gtacacggaaggggtcaaagacagccacaagcctgtccctttggtcttggtcatcatgttaaccccaggtttcgatttaatcctacatgctcctttcttatgtgtgaggctgaggtgggg

SEQ ID NO: 945666 - DNA, 120 bp, Artificial Sequence
  ENSG00000249669_94 (sequence is synthesized)
gcattggtcagaggagcctctgggaaatttcctttcaggacagttcttttgttaaggggcctgggtgtgctgagaagggaaggtggctcctcctgctcttggagcttggagtttctcaca

SEQ ID NO: 945667 - DNA, 120 bp, Artificial Sequence
  ENSG00000249669_95 (sequence is synthesized)
agctctcccttaaaagccaggcaggccaagaagggataatggctgctcagggcccaaggggcaggatctctgaggcccggaagatctcagtaggtttagcccaagagtatccagaagtgg

SEQ ID NO: 945668 - DNA, 120 bp, Artificial Sequence
  ENSG00000249669_96 (sequence is synthesized)
cccaggcccattctccatccctcagagcctggcagcctggtcaggaccctcaaaggccatgaccgtacccgtagggcaccctggtgtccttctgacaggtgggatctttgtttcttacag

SEQ ID NO: 945669 - DNA, 120 bp, Artificial Sequence
  ENSG00000249669_97 (sequence is synthesized)
actcaacttgattcggtgaataacagacttgaaagaaatgtggaaaataatagtaatcttccctagaaaggagtaaacagggttgagctcccaaagcaggaagacctggggctgtgtgat

SEQ ID NO: 945670 - DNA, 120 bp, Artificial Sequence
  ENSG00000249669_98 (sequence is synthesized)
cttggacgagtcactcaacctctctgagcctagtgataaagagccagctcatagggctttgagaggatttgtgaggttgggctggtgtccccaggcacagcccttggcacatagtgaaac

SEQ ID NO: 945671 - DNA, 120 bp, Artificial Sequence
  ENSG00000249669_99 (sequence is synthesized)
tcaagaaaacagagcagtttttaccattcatcacattattcccacacttgccaattttttaagttcatgcacatggtggaacaggtagggtgaggtgccagctccataagatgagtggag

SEQ ID NO: 945672 - DNA, 120 bp, Artificial Sequence
  ENSG00000249669_100 (sequence is synthesized)
aaactgaggcctggagaggtgaaagcattcactcagagttgcatgtagagtcagttgcaaaggagaattctggcaccagttctcatgtggatggaaaaagtgcaggaagatttggaggtg

SEQ ID NO: 945673 - DNA, 120 bp, Artificial Sequence
  ENSG00000249669_101 (sequence is synthesized)
agcagaggagaagggaggaggaggccgggttccaggaaaggagctgacatccagggatgtgggacaaggcccaggcctgtcttacataacatggtccacctgttcacccctgcaggcccc

SEQ ID NO: 945674 - DNA, 120 bp, Artificial Sequence
  ENSG00000249669_102 (sequence is synthesized)
acaaatgtgtgcaaacgtgcaccccggcacagcgcacacccagtcctccctcactggcaaataagccacagagactgggtttaaacaaattggattaggagggctacaggcgcctcctcc

SEQ ID NO: 945675 - DNA, 120 bp, Artificial Sequence
  ENSG00000249669_103 (sequence is synthesized)
ccccgactgtccggctccgacactaaacagacctgcagaactgccagctgtggtctctcggacacactgacagtcggtccttggctccctcaccccacccgtgggcctcaggaagggggt

SEQ ID NO: 945676 - DNA, 120 bp, Artificial Sequence
  ENSG00000249669_104 (sequence is synthesized)
tggggtctgagaggatgccacagtgatggatggggtgagggaggttccagggctagctcaacagcgcacaggatgttagtgcttttgcgaggcacatttccgagctgttcccagacccgc

SEQ ID NO: 945677 - DNA, 120 bp, Artificial Sequence
  ENSG00000249669_105 (sequence is synthesized)
ccccacttcccccctcaccctcccctccggcagcctctcccatggccactgctgcgggctgtgagcagagccccgtccttgagcagattgacctcatctttcagtcctgcagctgggctg

SEQ ID NO: 945678 - DNA, 120 bp, Artificial Sequence
  ENSG00000249669_106 (sequence is synthesized)
agcggggagtcagctcagaagacactggcctggggatgagactcggggcatgcttcagagggaagaaagagcttctgaacagacaatgctgtcttaaaggtggcatcttggtgctttctc

SEQ ID NO: 945679 - DNA, 120 bp, Artificial Sequence
  ENSG00000249669_107 (sequence is synthesized)
tgagaattaattcttattttccacaccctcatttgacagggggagaaacagaagcccagagagggaaagggcttggttaggatcacaccatgagttgggggttaagtcaggatggggtag

SEQ ID NO: 945680 - DNA, 120 bp, Artificial Sequence
  ENSG00000249669_108 (sequence is synthesized)
gtcccctctttctctgggtgttcctctcccccatcccttatctcaacataaatcctccccagttgcccaggttgtccaggcgattcctggcacacgtcctggggcctgccctccaccttt

SEQ ID NO: 945681 - DNA, 120 bp, Artificial Sequence
  ENSG00000249669_109 (sequence is synthesized)
agccctgctctggcttctgcagcagcagagtcctgggtgaccagcagtggcccctggccctctgagtggtggtggagggtgggggtgcactgcagcaagctcccagcccagagcagcctg

SEQ ID NO: 945682 - DNA, 120 bp, Artificial Sequence
  ENSG00000249669_110 (sequence is synthesized)
gccatataagggaaggagctcagggaggcctcctggctcaggcctggcgagaaaacccagacagccactgtttattttctcctccccagctcacccacgcctctccaagcctcccaacag

SEQ ID NO: 945683 - DNA, 120 bp, Artificial Sequence
  ENSG00000249669_111 (sequence is synthesized)
tggtttaacctgatagtgtggcttgcaaggccctgggcctgaagcctgggcaataagtgagagttagaaaggtgtcaaagacatgatagcagcaaactgaggctttgtaccccacggtaa

SEQ ID NO: 945684 - DNA, 120 bp, Artificial Sequence
  ENSG00000249669_112 (sequence is synthesized)
ataggactgaaagcaaattcacagggagcaactgatccattccacaacagaatgctccctgtcaattcgctttccattctgttgtgtcctgtctcccagcagagactacaaactccccaa

SEQ ID NO: 945685 - DNA, 120 bp, Artificial Sequence
  ENSG00000249669_113 (sequence is synthesized)
aaccacttacccaccagctgcacgtgagaagccaaaggtagtttatgtgaaagggctttggaaataatcacgcaccaagtgaaggcagaggacacaccttgtcagcttagttctcagcag

SEQ ID NO: 945686 - DNA, 120 bp, Artificial Sequence
  ENSG00000249669_114 (sequence is synthesized)
caaatcatctcttttccaggataaccctccctgattcttattgaaatctctttgctgaccacactaagctcttctctctcaggggcagtgggagccgtggagagtggaatagaccagctg

SEQ ID NO: 945687 - DNA, 120 bp, Artificial Sequence
  ENSG00000249669_115 (sequence is synthesized)
tctgtgacctgcgagggagtccaatgtcggaatcactccccagccaaatgcacggttttaaaaaatctatttatttatttatgtagagaccaggctatgagactggctaatttttcgtat

SEQ ID NO: 945688 - DNA, 63 bp, Artificial Sequence
  ENSG00000249669_116 (sequence is synthesized)
atgtagagaccaggctatgagactggctaatttttcgtatttttggatagagacaggatttca

SEQ ID NO: 945689 - DNA, 120 bp, Artificial Sequence
  ENSG00000249669_117 (sequence is synthesized)
ccagccaccaaatgcagttgaaaagagtttctgcaagataattccacagaagaggaaagcagttatctggctgggaataccttagacagaggctgtcctctacacaggctgtcagaactg

SEQ ID NO: 945690 - DNA, 120 bp, Artificial Sequence
  ENSG00000249669_118 (sequence is synthesized)
ctgtcagaactgacctactgacctgcctgctggcatgatagaccagagggaaacactctttccactcttcccagactgagtgtaagagacagacttttttttttttttttgagacggagt

SEQ ID NO: 945691 - DNA, 66 bp, Artificial Sequence
  ENSG00000249669_119 (sequence is synthesized)
catgttggccgggttgggattacaggtgtaagccactgctcccagcctttttttttttttttatta

SEQ ID NO: 945692 - DNA, 120 bp, Artificial Sequence
  ENSG00000249669_120 (sequence is synthesized)
tgtaagccactgctcccagcctttttttttttttttattagagacaagggctccccatgttgcccaggctgatcttgaactctaggctcaagcgatcctcctgcctgagcctcccaaagt

SEQ ID NO: 945693 - DNA, 120 bp, Artificial Sequence
  ENSG00000249669_121 (sequence is synthesized)
gctaggattacaggcatgagcactgctcccagctctgtttttgtttttttaaggaggtatattttttctgttctctctcagccctgaagaaaggctacccatccccttcagacattcctg

SEQ ID NO: 945694 - DNA, 120 bp, Artificial Sequence
  ENSG00000249669_122 (sequence is synthesized)
aaaatatatgtcatccaacatcaaggccaccacagtgaccactaagcaatgcaagaaggtcctctggggtgccctgagatcttggcagggcaggaagagtgagaaggggctttgcctgct

SEQ ID NO: 945695 - DNA, 120 bp, Artificial Sequence
  ENSG00000249669_123 (sequence is synthesized)
cacctgaaagttcccacccaagccgggcccagaaaacaaaatgaattatctacatggtcatccaatcagccaccaaatggcattacctaggtccatcatcatgtaccaagccacaggtca

SEQ ID NO: 945696 - DNA, 120 bp, Artificial Sequence
  ENSG00000249669_124 (sequence is synthesized)
gacccagggccccccaaattaacaagacacaggcactgtcctcaggaagtggagatctagccaggtcagacccacacacaaataacactgatactagagataatgagattgggaattatg

SEQ ID NO: 945697 - DNA, 120 bp, Artificial Sequence
  ENSG00000249669_125 (sequence is synthesized)
attcagccattcaacctgggcttatgtggcatctacaccacctggccctgatttcagtagtgagcacagttgacagggtcccttcccttcacaggtgagccatgtagtccacaagtggag

SEQ ID NO: 945698 - DNA, 120 bp, Artificial Sequence
  ENSG00000249669_126 (sequence is synthesized)
gtggtcgtaagtgaaaaccacattaccagcatggtaaagggttagaaagagggcaccgggtgggcgagaacatgaagcagggggtgctgatggctaaagaagtaaaggaggggctgggca

SEQ ID NO: 945699 - DNA, 120 bp, Artificial Sequence
  ENSG00000249669_127 (sequence is synthesized)
gagactctgtctcaaaaaaaaaaaaaagtcaaggagggtttcccagagtggccacttgattagagacctagcacaggaggaagagatgggcagggagagtgacggggagcagcacagtcc

SEQ ID NO: 945700 - DNA, 120 bp, Artificial Sequence
  ENSG00000249669_128 (sequence is synthesized)
gacggggagcagcacagtccctgggagcccgaagtgggtgggcacagggctccctaggagaatggaaggacatctatgagctgtagcccaagaggaagaggtcactggggctagatgcgg

SEQ ID NO: 945701 - DNA, 120 bp, Artificial Sequence
  ENSG00000249669_129 (sequence is synthesized)
cagaccctcgcaggctttgggaagggcttcagaattcagcctgagggcaatggggagcccttttgggatattaaacttgagtaagatatgagcatatttgcatcttgaaaaatcattatg

SEQ ID NO: 945702 - DNA, 120 bp, Artificial Sequence
  ENSG00000249669_130 (sequence is synthesized)
ggaagatggctgggaagagaggaggagtggcagaagaaagataggttggagacaattgattgctcgatgatataaaatgttaagtaccatgaatgatgctgttaggctggaatgcgccaa

SEQ ID NO: 945703 - DNA, 120 bp, Artificial Sequence
  ENSG00000249669_131 (sequence is synthesized)
gcataaaggtggggcatggcatcaaaaggtaggtcaacatattaaataattccatgtattgaaatatccagaaaatatatagacagatctatagagatagaaactggtctgcccaggact

SEQ ID NO: 945704 - DNA, 120 bp, Artificial Sequence
  ENSG00000249669_132 (sequence is synthesized)
aggggttgtctaaggataaggagcttcttttttggatggtgaaataacctaaaatatattgtgccattgtttgcacaactttgtgaatatattaaaaacctgttaattgtactcactaaa

SEQ ID NO: 945705 - DNA, 120 bp, Artificial Sequence
  ENSG00000249669_133 (sequence is synthesized)
gcaggggacagaggagaggcggtgcccaggcaggatgcaactatctccaagagatagttagaggatggcagcctatcttgagttctggctgctctgcccaggaggtccctttgaatggcc

SEQ ID NO: 945706 - DNA, 120 bp, Artificial Sequence
  ENSG00000249669_134 (sequence is synthesized)
agagatggtctccaatgctgttggcctcctgcagaagaaagagcccaaggctgggaatggaaacccttggttctattcctggctgtgccctaactcttcatatgaccttcaacgcgacct

SEQ ID NO: 945707 - DNA, 120 bp, Artificial Sequence
  ENSG00000249669_135 (sequence is synthesized)
cctaactcttcatatgaccttcaacgcgaccttgaacatgcagcttcctctggcctcagtgtgtccagcgagaggctagacccggccaggcctggtggctcactcctataatcccagcac

SEQ ID NO: 945708 - DNA, 90 bp, Artificial Sequence
  ENSG00000237643_0 (sequence is synthesized)
cactgcctcgtgttgtctgttggcgcgctgtcggggttcgaaccgatacaagaaccttccacctacctggtgctttggcctcatctataa

SEQ ID NO: 945709 - DNA, 120 bp, Artificial Sequence
  ENSG00000237643_1 (sequence is synthesized)
cttttccactgtcctgaaacaagatagagaatctgagcggccagtcatctgccctaagtgctgccgccgaagactgaatgtcctggaaagtttgctgtcacatctccattatgacaaaag

SEQ ID NO: 945710 - DNA, 120 bp, Artificial Sequence
  ENSG00000237643_2 (sequence is synthesized)
cattgtgccgaacagatgaaaaaatgcattgtcaacggaatcttttatgtttgtttgtcttcctttaagcaacattgccttacttgttataaaagataaataaatatttgttcatttcaa

SEQ ID NO: 945711 - DNA, 120 bp, Artificial Sequence
  ENSG00000237643_3 (sequence is synthesized)
ctacctggtgctttggcctcatctataagcttttccactgtcctgaaacaagatagagaatctgagtggcagtgtcaaggaggtgaggagagcataatttcagagtgcgacgtgtgaggt

SEQ ID NO: 945712 - DNA, 120 bp, Artificial Sequence
  ENSG00000237643_4 (sequence is synthesized)
actgtcttcaagatcaagatactcaggctgatggagcctctaccatcttcaatacatagtttctcaggctgccctgagaattagcatctaaccagcaaacagggaacaaaaggagaatat

SEQ ID NO: 945713 - DNA, 120 bp, Artificial Sequence
  ENSG00000237643_5 (sequence is synthesized)
ctgggaaatgtaatctctctgtgtaccagaagaaaaactgggtttggtcaacagttagccagtttctgctgaacctattctactggttatcacatagtcttttattcttcttcctacaca

SEQ ID NO: 945714 - DNA, 120 bp, Artificial Sequence
  ENSG00000237643_6 (sequence is synthesized)
agctaacctctttctcaaaagagacaattcaaaatcccagccagtcactatgtccagctcaaaatacaggatctccaagtgataatgatgtacagttctttctctatctgataaaaatgt

SEQ ID NO: 945715 - DNA, 120 bp, Artificial Sequence
  ENSG00000237643_7 (sequence is synthesized)
ggccttatagttcagcaacatatcaattaaaatgataaattatctgcccatttccttcccccccaccccccccacacacaggaatatagcacttattaccttttaatttactatatacct

SEQ ID NO: 945716 - DNA, 120 bp, Artificial Sequence
  ENSG00000237643_8 (sequence is synthesized)
atctcctttgtttggtgtcaccttccactagaacttaaactccatgatagcagatttttgcctccccacccttccattgctgtattctcagtgtctacaagtaaataattgttaaatatt

SEQ ID NO: 945717 - DNA, 120 bp, Artificial Sequence
  ENSG00000259865_0 (sequence is synthesized)
ggctttatgcagtctttccacctcagcctcccaaagttctgggttacaggtgtgagccactgcgccgggccaattttggtttttcatggaggacttttagcaggtctcaaaagttttctt

SEQ ID NO: 945718 - DNA, 120 bp, Artificial Sequence
  ENSG00000259865_1 (sequence is synthesized)
ctaatagttttcttggtgttctatcattcataggtgttgaatttaccaaactttttctatttcaagtattacatttttactttgttcaagtaatattgtatcatattaaatgaacattgc

SEQ ID NO: 945719 - DNA, 120 bp, Artificial Sequence
  ENSG00000259865_2 (sequence is synthesized)
attgtgaaaataccctgcttagtcatggtatgtaatcatccttatacctttttgtattctttttttaaatatttctgagaatttctgtgtctaaatttaaataggatgttgtttcgtaat

SEQ ID NO: 945720 - DNA, 120 bp, Artificial Sequence
  ENSG00000259865_3 (sequence is synthesized)
catcttgtgattcttttgtctcctttgggtattattggctaatagatgaattaagaaatgttacctcttctactgcttgaagtttttgtgagaaattgatgtttttcattaagtgttgat

SEQ ID NO: 945721 - DNA, 120 bp, Artificial Sequence
  ENSG00000259865_4 (sequence is synthesized)
tgagaaattgatgtttttcattaagtgttgatgaaatgtacaacttaagcagtttataacagctattctatctaaaaagatataatttttttgttctatggatataagtatattctatta

SEQ ID NO: 945722 - DNA, 120 bp, Artificial Sequence
  ENSG00000259865_5 (sequence is synthesized)
tagtatgtcatgaacaattattctaggcacttgacatggaataatttgaaaaaatagagaatgagtcccgtactacaatcaataaataactcaaaattttttccatttttaggatgaaga

SEQ ID NO: 945723 - DNA, 120 bp, Artificial Sequence
  ENSG00000259865_6 (sequence is synthesized)
atatgaatatagttctgttacgtaatatttgtgtttactgtgtgagacaaatgagttactgaatgtaaaaataattagtaaaactgccctttgattttggaatgtatgaagcaggcaaat

SEQ ID NO: 945724 - DNA, 120 bp, Artificial Sequence
  ENSG00000259865_7 (sequence is synthesized)
gcccctaccttctatttttatcaatatttagataaggcagacaaataaattttaataagatatacagaataatcttgtatttgaagaatgctatgaaaaaagatagtttggaggagtagt

SEQ ID NO: 945725 - DNA, 120 bp, Artificial Sequence
  ENSG00000259865_8 (sequence is synthesized)
tagtatttggctcatataatgtgttaggtaactattctaagccattaaacatttgtatgcttaatacctaagagtttaaagtgaagaaatcaaagattcattgaaaaagaaaaattaaat

SEQ ID NO: 945726 - DNA, 120 bp, Artificial Sequence
  ENSG00000259867_0 (sequence is synthesized)
cgacagtcactggctctgggccttgaggctcagcataaataaactcccaggcacctgtggttcccatctgtgcctgtaaaaggctttagcaacccaagggcagttggatgcaaaaatacc

SEQ ID NO: 945727 - DNA, 120 bp, Artificial Sequence
  ENSG00000259867_1 (sequence is synthesized)
caaggccagcagatgaacattgagcaggaataaacagaatacaaggacatctgggtggaagtcaccagtgcctgcacatggaactatgaagatcaccatttttcagattaagaaactgag

SEQ ID NO: 945728 - DNA, 120 bp, Artificial Sequence
  ENSG00000259867_2 (sequence is synthesized)
gctcacattgtgaaataacactctctggaaagctgactcagaaattggaatgagttgtctgtggatcctgtaaggagcctggacatggtgaagagaatgccttgaccatcaggagacagc

SEQ ID NO: 945729 - DNA, 120 bp, Artificial Sequence
  ENSG00000259867_3 (sequence is synthesized)
ttagcttgttgaatcttgatcacttcttctgaccgctttggatcttaaaagaacaaggacataattctacaggtcgaggagtttcgcagacataactccttgggagcagtgcccaggtca

SEQ ID NO: 945730 - DNA, 120 bp, Artificial Sequence
  ENSG00000259867_4 (sequence is synthesized)
gtttcgcagacataactccttgggagcagtgcccaggtcaagaaagaaaatgtggccaatgccccaggatcttatttggtcatccaggctggactgcagtggtgtgatcatagctcactg

SEQ ID NO: 945731 - DNA, 120 bp, Artificial Sequence
  ENSG00000259867_5 (sequence is synthesized)
gcctcccccggtagcaaggactacagggtcccagaaggaaccaacgctgcccacaccttaatttgagacttctggcctctgagaaatgagaaagagtctcactctctgtcgcccagcctg

SEQ ID NO: 945732 - DNA, 120 bp, Artificial Sequence
  ENSG00000259867_6 (sequence is synthesized)
tgctcttgaactgctaacctcaagtgatccaccagcgttggcctctcaaagtactaggattacagtgctaggagccaccatgcccggccgcctctcttttcttttacacatgaagaaaaa

SEQ ID NO: 945733 - DNA, 120 bp, Artificial Sequence
  ENSG00000259867_7 (sequence is synthesized)
gtggtcagagaagttaacttggtcagtgccaaaagcactggaagtgagtaggaccaagcttttcatctagatttgtttgttagactctaaatccaaattcacaacaagatcagaatatga

SEQ ID NO: 945734 - DNA, 120 bp, Artificial Sequence
  ENSG00000259867_8 (sequence is synthesized)
gaaacctaaggaacaaaattctaggaatcatttctagaaactgtggctattgaaaaagcacagacctagggaatcaaattattttccctgccaccagcacatgggtaggcctgtgacaaa

SEQ ID NO: 945735 - DNA, 120 bp, Artificial Sequence
  ENSG00000259867_9 (sequence is synthesized)
ttccatgctctggaccccagattcctcagtgagaatagaaggggctagagacatcagggaattggatttggtgactttaatacccactcagctccaaagcattcttgaatgatgcacgat

SEQ ID NO: 945736 - DNA, 120 bp, Artificial Sequence
  ENSG00000259867_10 (sequence is synthesized)
ttatgaatatatatattgaaatttactgatgggtgaacagctctcaacatgagatttttgttgtatgccttaaaaaagattatacataaatatgcgtgtgtgtgtgtatgtatgtttcga

SEQ ID NO: 945737 - DNA, 120 bp, Artificial Sequence
  ENSG00000259867_11 (sequence is synthesized)
tgtatatgaacccatgatctgaaaaatggccactgtggcttgtggaaacctattaatctctgctgttccacccaacatcctcagagaaaaaaataaacaactttttgaaagtgctgccat

SEQ ID NO: 945738 - DNA, 120 bp, Artificial Sequence
  ENSG00000259867_12 (sequence is synthesized)
ggggtcagaccaaatactgtggccacttccaaggggtttgccttgatttgcctggattcctgttcatgtgacatctgccttctaattcaaggatatgatcaattcaatgtgtgagttatc

SEQ ID NO: 945739 - DNA, 120 bp, Artificial Sequence
  ENSG00000259867_13 (sequence is synthesized)
gctcgcgagtcggctttttcgccctgaccgcgctcctgatgcctcccggccgccgtaggcgaaggttcgcggaagaggggagcaggcgctcacctgagctgactcagaaattggaatgag

SEQ ID NO: 945740 - DNA, 120 bp, Artificial Sequence
  ENSG00000259867_14 (sequence is synthesized)
aagtgagaacactgtcttgaactgctggggcatctgcctaagaatgaaagcaaagaacagaggaaagcagacctaggagaaggagggaaagacaacgtcccagtaataacattcaagctt

SEQ ID NO: 945741 - DNA, 120 bp, Artificial Sequence
  ENSG00000259867_15 (sequence is synthesized)
ctggatccaaccatgtttgctgccggacattagtcctggtacttcttgttacatgatccagtgaatggctcctcgtgccctcctctccccatatgtttcctcctttttttgcttaaggta

SEQ ID NO: 945742 - DNA, 120 bp, Artificial Sequence
  ENSG00000259867_16 (sequence is synthesized)
gtttgaggtagatttccattgtctgcaagtacagaaagatttgtggagtagatagcacctcagctgcatcttgaaggatgaataggaaattctcaggagaaatagggatggaactgagga

SEQ ID NO: 945743 - DNA, 120 bp, Artificial Sequence
  ENSG00000259867_17 (sequence is synthesized)
gtttgggatcaagacagaataaggaggtgtgtgttagagagaggatgcctgtgtctcacgttgtaatgtcccaagacctgggctgctcccgtagttgcccagtttcatctcctatgccag

SEQ ID NO: 945744 - DNA, 120 bp, Artificial Sequence
  ENSG00000259867_18 (sequence is synthesized)
atcacttcttctgaccgctttggatcttaaaagaacaaggctcacagactaccatttaaggacatggtctccaaggatgtcgtggtgatgcaggatcaagtccctcatgggaggatgaca

SEQ ID NO: 945745 - DNA, 120 bp, Artificial Sequence
  ENSG00000259867_19 (sequence is synthesized)
atcctggctctaaagctgaccccgggggagctcttggcagcatgttctttggaactgtttgtgcctcctccgaagatactagacaactatgagtcaaattaaaatgcttcctttgcaaca

SEQ ID NO: 945746 - DNA, 120 bp, Artificial Sequence
  ENSG00000259867_20 (sequence is synthesized)
ggaagaggggagcaggcgctcacctgaggttcgcccaatcctggagcagtgggtcccgggagggaagagggaagtgggtcaggctcccggcctgtgtttgtccattcattcattcattga

SEQ ID NO: 945747 - DNA, 120 bp, Artificial Sequence
  ENSG00000259867_21 (sequence is synthesized)
caggtgccagggagacggacaaaatgcaccaaacaaaatgcacgaaacagtaccggaagcagtaatgtccacgtgtgatacttgccctggagcaactgactcagaaattggaatgagttg

SEQ ID NO: 945748 - DNA, 120 bp, Artificial Sequence
  ENSG00000259867_22 (sequence is synthesized)
tttcaacatagtgtttctgaagtttatagacagattaaccaaagccaaaactctgcatgtgattttacttcacaatcactttgtcctgtagatgtctcatatcgagcattaggaagaggc

SEQ ID NO: 945749 - DNA, 120 bp, Artificial Sequence
  ENSG00000259867_23 (sequence is synthesized)
ttgagcatgagttatccaaggaagagataacttaaaagggaaccatctacagtgtggaatttcccagctcctctcccacctggaaataaaagaagattcctggttctggatattctgaac

SEQ ID NO: 945750 - DNA, 120 bp, Artificial Sequence
  ENSG00000259867_24 (sequence is synthesized)
agagggtcttcaggattgaggggcctcttcctctattttgatctgcaaaactcagcctgagctactatggctctcggggagcagttattcaaacccatcctttgtgaatttcacaagtgt

SEQ ID NO: 945751 - DNA, 120 bp, Artificial Sequence
  ENSG00000259867_25 (sequence is synthesized)
aaagaaatgacaatgcactgaaacaaactagatatcaggcatctgttctatttcattccccccttttccattttcttctcctccatcccattctatgtcattctgggcaattgtatttta

SEQ ID NO: 945752 - DNA, 120 bp, Artificial Sequence
  ENSG00000259867_26 (sequence is synthesized)
ttgctagccattctattctatgccatcccattacatttgaacttctgacctttttattctgtattgttctggcctattctattccattttgcagccaagaaaatttatgtatttttggta

SEQ ID NO: 945753 - DNA, 120 bp, Artificial Sequence
  ENSG00000259867_27 (sequence is synthesized)
aatgttttagcataaatatgccaaaattttgcatgggatatacccataccaaaaattgttgttcatctgaaattcaaatttaactgggcatcctatattatttctggcagaattaaggca

SEQ ID NO: 945754 - DNA, 120 bp, Artificial Sequence
  ENSG00000259867_28 (sequence is synthesized)
gaagagccttaattctggacctgcagtatgtgtcgtatttccaggactaggaagctgaacttagccttatgcagactctcagtaaacactacattgtgcctgaattgtttttcacctgtt

SEQ ID NO: 945755 - DNA, 120 bp, Artificial Sequence
  ENSG00000259867_29 (sequence is synthesized)
acttgcacctgacaggcagccaagcctaaaactagagtactatgaagaggcaaacaggagatggggagatagagagaggaggtacaaggaggtcttaaaactgatttgactgaatggtaa

SEQ ID NO: 945756 - DNA, 120 bp, Artificial Sequence
  ENSG00000259867_30 (sequence is synthesized)
agggaaaattattgagaaaaaaaatcaaacccactaatcaacagtgttgaaattagctgtgctgtgtagggtcagaacctgtctttatttaagtttttcatgttttgttcatcatggatg

SEQ ID NO: 945757 - DNA, 120 bp, Artificial Sequence
  ENSG00000259867_31 (sequence is synthesized)
ttttgcagtaatttttactttaaaaatattgcattaacaacctgggaaacacgtgaaaccctgtctctaaaaaacaaatacaaaaaatagctgggtgcagtggtgcacgcctatagtccc

SEQ ID NO: 945758 - DNA, 120 bp, Artificial Sequence
  ENSG00000259867_32 (sequence is synthesized)
tcccagctacttagcaggctgagctgggaggattgcttaagcccaggaggcagaggtaggttgcattgtgagtggtgattgccactgcactccggcctgggtgacagaatgagaccctgt

SEQ ID NO: 945759 - DNA, 120 bp, Artificial Sequence
  ENSG00000259867_33 (sequence is synthesized)
acaaaacaaaacaaaacaaaacaaaatagcattaaatgttgttcgtcttgattattaagctttttggtgtctccttaaattttgcatccttgtcctaattatgcttgttgcacttaacag

SEQ ID NO: 945760 - DNA, 120 bp, Artificial Sequence
  ENSG00000259867_34 (sequence is synthesized)
cattattatctgggtgacgtacctcttgttggagcattctgtgttagatgtttccttgttgaagtctctgaaaatttctttaatcttagtcatcaccttttctaattgtgtctgttggcg

SEQ ID NO: 945761 - DNA, 120 bp, Artificial Sequence
  ENSG00000259867_35 (sequence is synthesized)
tctttctaacaatcccatctctgtcccattgtgactactgtgtacttcctgacttcactttcccttatgggtaccataaggagaaaaatagttcctacttcatggagttattttgttttt

SEQ ID NO: 945762 - DNA, 69 bp, Artificial Sequence
  ENSG00000259867_36 (sequence is synthesized)
accctccaaaatgctgggattacaggtggaggcaccgcatctggcctcatgaagttattttaatgattt

SEQ ID NO: 945763 - DNA, 120 bp, Artificial Sequence
  ENSG00000259867_37 (sequence is synthesized)
aggcaccgcatctggcctcatgaagttattttaatgatttaatgggattactacctaaagcacataatcctcatatgtggtaaatgggaaacaacccataaatgttataatagtaataat

SEQ ID NO: 945764 - DNA, 120 bp, Artificial Sequence
  ENSG00000259867_38 (sequence is synthesized)
taacatttgtctaatttgatgctccaggcaactgtgtgatatggacacaatgtttaccctcatttcacagatgagaaagtagggtacagagtgggagggtggttcgtgcaatgtaactca

SEQ ID NO: 945765 - DNA, 120 bp, Artificial Sequence
  ENSG00000259867_39 (sequence is synthesized)
actagtgcatgggggtagaagccagactttctgagtctaagtccatttcccattccaacataccacaccaagatcattagcagcctaaaagaccaaatgtggagacgtggaagcttctag

SEQ ID NO: 945766 - DNA, 120 bp, Artificial Sequence
  ENSG00000259867_40 (sequence is synthesized)
aaggttctggaatttaaggtaacattcttcttcctggccccacactggaatattatttgtagaatagttctaattgtcttggatttatagcacatcactatgccaatagcttttgattga

SEQ ID NO: 945767 - DNA, 120 bp, Artificial Sequence
  ENSG00000259867_41 (sequence is synthesized)
gctttcagacttgatgtgtgtgtttaaagatctaatgtcaacctcaactaagcattaacttaatgcatttattaaacattgcgtatagaatataatcatggtgaaaaaattctcatattg

SEQ ID NO: 945768 - DNA, 120 bp, Artificial Sequence
  ENSG00000259867_42 (sequence is synthesized)
ctgcattttagaagcaatacattttcctgtagggaaaaagtgattgaaatttatagagaccccacctttaaataaaatttggggagaggatcagtgagactcatcagaatcttctagttg

SEQ ID NO: 945769 - DNA, 120 bp, Artificial Sequence
  ENSG00000259867_43 (sequence is synthesized)
gcaagagatcacttcctggaaggtgtatggttatacgtaaagtgcttggcagtttacttagaaaacactggtatcagcaatgagctaaggaagattcaagggttaaagccttgtttttct

SEQ ID NO: 945770 - DNA, 120 bp, Artificial Sequence
  ENSG00000259867_44 (sequence is synthesized)
ttgtagttatttattagactatatttattaatggtacaaatcccatagtaaattaagataaattgcagtctatatttgaaaactcaaagccaccaacgatccaaaaaaactgaaaagtga

SEQ ID NO: 945771 - DNA, 120 bp, Artificial Sequence
  ENSG00000259867_45 (sequence is synthesized)
ataaaggcagttatctgctttcagatttatttcccaacagtccctctttaatgttggctgtgatgtgtgccttgacatctttttgtttgtttttcctctgagagtcagttatcctgggaa

SEQ ID NO: 945772 - DNA, 120 bp, Artificial Sequence
  ENSG00000259867_46 (sequence is synthesized)
taaaatatgtttgtgagaggcagtctagtggcatgctttaggctgtgggctttatactgaactcagtttgagtgtcaactctactaattccagctgtatgagcctgggcatgttccttaa

SEQ ID NO: 945773 - DNA, 120 bp, Artificial Sequence
  ENSG00000259867_47 (sequence is synthesized)
gtacttggagtctaagcacttggctaatagtggtatctccttcatgatgttcttaaaaaattaaatgagataatgcatgtaaagtgcttagggccgtgccttaccaacattaagtggtca

SEQ ID NO: 945774 - DNA, 120 bp, Artificial Sequence
  ENSG00000259867_48 (sequence is synthesized)
ataaatgttagttattagttgggaaataggaataatgtaatcctcttaaggatattttgaggattcattgagatgcttataaagcatttaggtcactacctgacccacagtgagcactac

SEQ ID NO: 945775 - DNA, 120 bp, Artificial Sequence
  ENSG00000259867_49 (sequence is synthesized)
tcaataagtgttcatcattgacatggttgtttttgtttttacatgttatttgtaaaatgtggataatgtaattaacttagtatcgttctgaagactaatagagataatgtgtgtgaagta

SEQ ID NO: 945776 - DNA, 120 bp, Artificial Sequence
  ENSG00000259867_50 (sequence is synthesized)
ttcagctctgtgcctgtcacagagtaagaaccaaattatgttaatctccttaaggacaagaactgtgcttttatgtcatttttttccccagcaccctggttcaatgcttgacacatagaa

SEQ ID NO: 945777 - DNA, 120 bp, Artificial Sequence
  ENSG00000259867_51 (sequence is synthesized)
cccttcacaaaggcgggatggaagccagtggaaaagtacccagcttttcctcctttacctactgttcagagatcccagaagaatcaaaccctggtgtctgcagcagtgagcctgtgtgtt

SEQ ID NO: 945778 - DNA, 120 bp, Artificial Sequence
  ENSG00000259867_52 (sequence is synthesized)
tccttatctcggcttttcctccttctctggatcatctcccaaacaagcaaatcatgcatctaagtccttgtacttaggctctgcttctggggagacgcaaaataaaacagttaaaaaaaa

SEQ ID NO: 945779 - DNA, 120 bp, Artificial Sequence
  ENSG00000259867_53 (sequence is synthesized)
aatcttgatcacttcttctgaccgctttggatcttaaaagaacaagggatgatggtgacttatggtgacaaccaagaacaggcttcagaaagaaagcagctgtgtagctatggccaaatt

SEQ ID NO: 945780 - DNA, 120 bp, Artificial Sequence
  ENSG00000259867_54 (sequence is synthesized)
aacttcttgagtcggtgtcctcgcttgtaaaatggacaattctactgaaggaaattgaaggtcttaccgactccatccaaggaattgacaagagatccccaagaaggttgcatagagcga

SEQ ID NO: 945781 - DNA, 120 bp, Artificial Sequence
  ENSG00000259867_55 (sequence is synthesized)
gttctgggggctggaaattcaacatcaaggcacaagcagatcagcagattcagtgtctgttttctcccccagaataacatcaatagaactcccagtgaaagaacgtcttcctaaggcaat

SEQ ID NO: 945782 - DNA, 120 bp, Artificial Sequence
  ENSG00000259867_56 (sequence is synthesized)
tctgaagacaaaaaagcaacataagaacacacttcccaataatgtgaagatctatgactgtactaaataaaaatgttcccttaatgtactgtaaaaaataaagatgtttggctagattta

SEQ ID NO: 945783 - DNA, 120 bp, Artificial Sequence
  ENSG00000259867_57 (sequence is synthesized)
attggtcaccataaagaagaacatcagctcctacaaactcctgcccccgcagagctgcaggcattatcaggcttcatctagcctcttcatggggtgatggtttgctggaaagacagactt

SEQ ID NO: 945784 - DNA, 120 bp, Artificial Sequence
  ENSG00000259861_0 (sequence is synthesized)
ataacccataactaaccacaacaatatgggtaaatctcgtaaacatgatgctgagcaaaagaacccacatgtaagaaagtgtgtaggataggatttcattcatatcaggtacgaacgcag

SEQ ID NO: 945785 - DNA, 120 bp, Artificial Sequence
  ENSG00000259861_1 (sequence is synthesized)
atccctgacctggctgctggctacagggttgtgcagttatcaagaaactaagcatatggtcaaaacattcaagaaacacagcgggaaattctatgactcacacacacgtgttaagaatga

SEQ ID NO: 945786 - DNA, 120 bp, Artificial Sequence
  ENSG00000259861_2 (sequence is synthesized)
tgtgaaatggagcacaaggttttcagtgttacatttctaccttaaaatggtccaccgtatgtgttacctttctaccttgactgtaccttacatatgacttaataaatcataataaataaa

SEQ ID NO: 945787 - DNA, 120 bp, Artificial Sequence
  ENSG00000259862_0 (sequence is synthesized)
aagacaacgacccagaagttcccaccctttttctagaaatttctgaataagctcacccttgtctgggatggaattaaaagtagatataaatatggctgcagaactgccctgggctgctgc

SEQ ID NO: 945788 - DNA, 120 bp, Artificial Sequence
  ENSG00000259862_1 (sequence is synthesized)
tctcaggcactgcctgtgggccctgctctgctgtggtgtggtggtcacggggctgctaccctgcacctccataaagctgcttcctcctaccaccagctcgctcctaagcacagccaaaat

SEQ ID NO: 945789 - DNA, 120 bp, Artificial Sequence
  ENSG00000259862_2 (sequence is synthesized)
ccttcccgggctaagcccagtgtggggttcgcctgccctgcttcagacggattgaagatcagatcagatacagcggaagaaagaactactggactggaagctttaggaagaagacacttt

SEQ ID NO: 945790 - DNA, 120 bp, Artificial Sequence
  ENSG00000259862_3 (sequence is synthesized)
gaatactacactgtcctataaaagagcaagatcatgtcttttgcggcaacatggatgcagctggcggccattatcctaagataattaatgcaggagcagaaaactaaatgccatatgttc

SEQ ID NO: 945791 - DNA, 120 bp, Artificial Sequence
  ENSG00000259862_4 (sequence is synthesized)
tcacctatcagtgggagctaaacattgggcactcggggacataaagatggaatcagtaggtgctggagactaccggggaggggagggggcgagggttgaaaaaactacctgttgggagct

SEQ ID NO: 945792 - DNA, 120 bp, Artificial Sequence
  ENSG00000259862_5 (sequence is synthesized)
gtgctcactgcctcggtgaagggatcaactgtaccccaaacctcaggatcacgcaatagacccatgtaacaaacatgcacatggacccctgaattttaagtaaaagttgcaattattttt

SEQ ID NO: 945793 - DNA, 120 bp, Artificial Sequence
  ENSG00000259863_0 (sequence is synthesized)
gccgtgcctgcaggacttcccttcgcttgggcgcaagccggcgattagcctggtcccctaggacatctccagggctccggggaacctctcctgcgcaggcttggccctgcctcctccaag

SEQ ID NO: 945794 - DNA, 120 bp, Artificial Sequence
  ENSG00000259863_1 (sequence is synthesized)
cgtccgagtctttttcggcttttcgtgagcctcagagagggacgtttcctgccaacgctgctgcgaaggaaagtttgggcggcgttatcccgactgccttcctcgccagcgccggcgagc

SEQ ID NO: 945795 - DNA, 120 bp, Artificial Sequence
  ENSG00000259863_2 (sequence is synthesized)
agcttggggacacagccgacgcccgggcatcctccccgacgaccccccggagcgctcccagttcagactcctttccgagaagcgcgcagaagtgacagccccggagcttcgttccggtgt

SEQ ID NO: 945796 - DNA, 120 bp, Artificial Sequence
  ENSG00000259863_3 (sequence is synthesized)
aggtgtggggatgcgccgcaaggcaggaggggaaggcgctccagttgaagggggcaccccggggcccgcgccgactcctcccggcgcagccttggctcgccggagtcgcgggtcggaggc

SEQ ID NO: 945797 - DNA, 120 bp, Artificial Sequence
  ENSG00000259863_4 (sequence is synthesized)
ctgcccgccgaccagcaccctggcgccaggcgcccggctccacgccgcacccttggcgacgctgtgcgaggggctctagcgcccgccgcggcgcagtctcgtgaacccccgctccaattt

SEQ ID NO: 945798 - DNA, 120 bp, Artificial Sequence
  ENSG00000259863_5 (sequence is synthesized)
tccaattttttcctacggaggcgcagaggagggtgaattcgcgctctccttcccgacgccccggcttctgggagcgtcagagcaacggaagtacgtacaggaggaccgagagcagcaggg

SEQ ID NO: 945799 - DNA, 120 bp, Artificial Sequence
  ENSG00000259863_6 (sequence is synthesized)
tgcgctgccccctcgtggccgctttgcgttcccgtcgggaagggctgggttccagtccagggcccagcacaaaccaggattggttggacgctgcacagcgagttcagtcagggctaacat

SEQ ID NO: 945800 - DNA, 120 bp, Artificial Sequence
  ENSG00000259863_7 (sequence is synthesized)
cagaagagtcgtggggggcctgcctatcggccagcctgtccttgtggtttgtgaagttgtatgatctttctgttattattaaggaaaaaagtagtatttgttgaggctaaaaggccaaga

SEQ ID NO: 945801 - DNA, 120 bp, Artificial Sequence
  ENSG00000259863_8 (sequence is synthesized)
gcgtgctatatattatttaatcctctaaacagctctgccagataattattttatttatttatatttacttccatagctttagacaggatctcgttctgtcaggcaggctagagcgcgggg

SEQ ID NO: 945802 - DNA, 120 bp, Artificial Sequence
  ENSG00000259863_9 (sequence is synthesized)
tgcagcctcaaactcttgggctcaagccatcctttcacctcagcctcctgaatagttgaaactacaggtgcgccaccacgcctggctaaatttttaatttaaattttttgtagcgacagg

SEQ ID NO: 945803 - DNA, 90 bp, Artificial Sequence
  ENSG00000259863_10 (sequence is synthesized)
aacctcatcttcacaaagtgctgggagtacaggcgccagccacggtgcccaacctgtgataattattttaaactcattttacaaatgagg

SEQ ID NO: 945804 - DNA, 120 bp, Artificial Sequence
  ENSG00000259863_11 (sequence is synthesized)
aacctgtgataattattttaaactcattttacaaatgaggaaagtgatattcatacttgtaaagccattggggctgaattttcatttttgtatccacagaactaacacataaagtttaca

SEQ ID NO: 945805 - DNA, 120 bp, Artificial Sequence
  ENSG00000259863_12 (sequence is synthesized)
tgccattagaatgtaagctctctgtaagctacagatcttttctactgtaatatccttagtgcctagggcagtgactagcatatagtaggtgttcaataaatatttgtagaattaatgaaa

SEQ ID NO: 945806 - DNA, 75 bp, Artificial Sequence
  ENSG00000240015_0 (sequence is synthesized)
cacgtgtgagccactgcgcccagccttatctccttttttatacatgaatagcagcgtgctatatatatagtcttt

SEQ ID NO: 945807 - DNA, 120 bp, Artificial Sequence
  ENSG00000240015_1 (sequence is synthesized)
atctccttttttatacatgaatagcagcgtgctatatatatagtctttgctccatgcaattattttattttatttttttttttagaaaggttcttgttctgtcacccaggctggagtgca

SEQ ID NO: 945808 - DNA, 90 bp, Artificial Sequence
  ENSG00000240015_2 (sequence is synthesized)
cccaggtagctgggactacaggcacacatcactgcacccagctaaattttaattatttttttagggacaaagtctccttcactgtgttgc

SEQ ID NO: 945809 - DNA, 77 bp, Artificial Sequence
  ENSG00000240015_3 (sequence is synthesized)
tgatcctattgcatctggcctcattgtttatttgtttgttttcaagatggggtctcactctgccacccaggctggag

SEQ ID NO: 945810 - DNA, 120 bp, Artificial Sequence
  ENSG00000259868_0 (sequence is synthesized)
gagaacatgttgttttccttgaagtacttgtttcttccgtaatttcatatctaatctcccagcttcacacataacagatttgcttgacaatgtcctaaaggatggggacagtcttggctt

SEQ ID NO: 945811 - DNA, 120 bp, Artificial Sequence
  ENSG00000259868_1 (sequence is synthesized)
tcacatgagaagagctaattagaacaactgattttactttgggagaaaccaagtttccagcatgcatctagtgataaattatgaaagctttcctcagtactcctgccctatgatccttcc

SEQ ID NO: 945812 - DNA, 120 bp, Artificial Sequence
  ENSG00000259868_2 (sequence is synthesized)
ctcacttcattaagcctgctgcatcttgcatggatggaggtcaccgatggcagagcagcttcttggatgaattgcagggtctcccaactcttcaagcagcatcctctgtgctcccactcc

SEQ ID NO: 945813 - DNA, 120 bp, Artificial Sequence
  ENSG00000259868_3 (sequence is synthesized)
tgtgctcatctctactcctgaactacagtgccatcttgtcatttgtctgtttcaatgtctgtttctccaactggacagtaaacccttggaaaagaagaaccaatcttatttaaatttggt

SEQ ID NO: 945814 - DNA, 120 bp, Artificial Sequence
  ENSG00000259868_4 (sequence is synthesized)
atcctcagcaaccaggacagtgcctggtactttccaggtcctcattaaatgttttttggatggatggatgaatcaataaaagaaaaactccaaatgaaacagttgtggaaactaaacaga

SEQ ID NO: 945815 - DNA, 120 bp, Artificial Sequence
  ENSG00000259868_5 (sequence is synthesized)
gaagtgatgggatcaataaaacttggaattgtctaacaagaaagggccagtttcttgcttattatatttgtaataacagagtccattgggtagcactccggtctgtgaaagtcagtgaat

SEQ ID NO: 945816 - DNA, 120 bp, Artificial Sequence
  ENSG00000259868_6 (sequence is synthesized)
caataatgctcttgtggtctggataataatataccttggcatggtgtgagtgatgccagcaggtgggcggagaggcagggaaggaaaggtctcatgcctttcaggttgacactaagaaag

SEQ ID NO: 945817 - DNA, 120 bp, Artificial Sequence
  ENSG00000259868_7 (sequence is synthesized)
aggcttccattcctttccctgttctaccacattctcctaatgtgtataagaaattattcaaagacagcaacagatttccctcctgacctttatagttgctggtttggaatgatttttggc

SEQ ID NO: 945818 - DNA, 120 bp, Artificial Sequence
  ENSG00000259868_8 (sequence is synthesized)
tgcttgctggaaaaaaaaattattgcagagatgaattgtcaggacatccgctccccttcccatcagctttataaacattttgtactggaggcagtgtgtgtgtgcagaagaaacgctatg

SEQ ID NO: 945819 - DNA, 120 bp, Artificial Sequence
  ENSG00000259868_9 (sequence is synthesized)
gaaagtgctgtagaaacaagtgtggtttgttggctaccaaatctcaaggctatgctcactggtcagaatggttggtgtccagacccccagcccctcagattctgagatgtctgtgtacca

SEQ ID NO: 945820 - DNA, 120 bp, Artificial Sequence
  ENSG00000259868_10 (sequence is synthesized)
gggttttctctgagactgtcttttcatgatacagtgtaaaatgtttcccatgaaagggcagagctgaagaagcagtgcaagtccatttgaagacctctggaaggaaacccccagcggctc

SEQ ID NO: 945821 - DNA, 120 bp, Artificial Sequence
  ENSG00000259868_11 (sequence is synthesized)
ttttttcactgaacaagcattgtgggaatttggggctcggctgtgtaatttgtcctcttctcattcattcaggacatgttcagcaccaggaggaatttgcatccaagtccgtctccctgc

SEQ ID NO: 945822 - DNA, 120 bp, Artificial Sequence
  ENSG00000259868_12 (sequence is synthesized)
taagtggtattttgagaattccgaagcttagtctcagagaagagctgacctgaacttgccgaggctcccactgcattgtagcttttctctggagaacaaaaactgccattgtccagcagc

SEQ ID NO: 945823 - DNA, 120 bp, Artificial Sequence
  ENSG00000259868_13 (sequence is synthesized)
tcattagcatgactgtacagcctccggagttagcaaggtgatgcaaaaataatatgacaagatccatgtcttcaatgagctacaatcctactgggacatgagactgtgcttataatatga

SEQ ID NO: 945824 - DNA, 120 bp, Artificial Sequence
  ENSG00000259868_14 (sequence is synthesized)
tgaaagaataagaaaattttaaagatgaaaacacagcagcaacaggtgccattttggaagcaagaagcagagaacaagctctcactgggcattaaatctgccggcatcttgatcttgaac

SEQ ID NO: 945825 - DNA, 120 bp, Artificial Sequence
  ENSG00000259868_15 (sequence is synthesized)
ggcttctgccatgattgtgaggcctccccacctacgtggaactgccgttgagttcagcttatggtgatggaaagagagatgtcaataattccacattttctggcttgcattgtttgatga

SEQ ID NO: 945826 - DNA, 120 bp, Artificial Sequence
  ENSG00000259868_16 (sequence is synthesized)
aaggtgaccccattccctgagttaaagaatgctgaaagaagaccaggcttgaggaggaaggatcatgcatttgcttttggacctgtagagtttgagggcagagctgaagaagcagtgcaa

SEQ ID NO: 945827 - DNA, 120 bp, Artificial Sequence
  ENSG00000259868_17 (sequence is synthesized)
gtctcaaaaaaacaaaaacaaacaaacagagaaggagctggatatgttgaactggctgagtcacagctttaatcatcagaggagtgcagtgacactaaggacagtgtatggtccattgct

SEQ ID NO: 945828 - DNA, 120 bp, Artificial Sequence
  ENSG00000259868_18 (sequence is synthesized)
ggatttggatattctgtggaacctaagcagagagagaattagtggtaggacctgcaagagctgtcctgctgaaaactataaatatcagaaagtatggctttagcaagaattactgaaatg

SEQ ID NO: 945829 - DNA, 120 bp, Artificial Sequence
  ENSG00000259868_19 (sequence is synthesized)
ggaggggagaattcaacttccatttgccataaaccaagcagctatagcatcgtggaaagccagggtgctggtggtgatacggcagggtcccagctctgggcgaagcatgtactgtgcccc

SEQ ID NO: 945830 - DNA, 120 bp, Artificial Sequence
  ENSG00000259868_20 (sequence is synthesized)
gcaggagggagcttgttcatcagcatacagtagacatgccctgggactccgagaagtgctgaggacctcacacatgagacactgctgttactgtgaccccagctctacccataggtggat

SEQ ID NO: 945831 - DNA, 120 bp, Artificial Sequence
  ENSG00000259868_21 (sequence is synthesized)
ctaaagaaggtagggtcacaggaggactcagaggacttgctgcttccatctggtgatgaattcttctgccaaataaagcctagagtaccatgaagggtcagaagtattacattgttcatt

SEQ ID NO: 945832 - DNA, 120 bp, Artificial Sequence
  ENSG00000259868_22 (sequence is synthesized)
acaattattttgctcaaacaatttgttaattctgttatcctatttgtttgtaggtgtagttcaattaagtgccagcctgccttgtatataattcttggtgtacgcttgtgtttttgatca

SEQ ID NO: 945833 - DNA, 120 bp, Artificial Sequence
  ENSG00000259868_23 (sequence is synthesized)
agaaaattgagctatagtcactttcactttcttctgttgctgggctgactatattctggagacctgaaatgtccctccaagggacatttaatgaaggtctcattgcctactgacctatgg

SEQ ID NO: 945834 - DNA, 120 bp, Artificial Sequence
  ENSG00000259868_24 (sequence is synthesized)
gcatcagggaactgggctgagttacagttaaggatggtgtatggctctgtctgctcttaacagccattgaccaaattgtacagcccctttattagaagttcttgaaaccctatgtgcaca

SEQ ID NO: 945835 - DNA, 120 bp, Artificial Sequence
  ENSG00000259868_25 (sequence is synthesized)
gcaagtttttccctctctctggtggaccctaaacttctttatttttaacagtgaatgcgactgtgtgcctcttgggggacttctcctgatgcacagccaaaatgtaatgttttgttcact

SEQ ID NO: 945836 - DNA, 120 bp, Artificial Sequence
  ENSG00000259868_26 (sequence is synthesized)
ctacttcaagggaaaggctttgaggttattgcaaatggtgggggactggggtggagtgggctacaggtacagtgaccagaagatgctgaattccaaactgtttcctaaagcctttcttct

SEQ ID NO: 945837 - DNA, 120 bp, Artificial Sequence
  ENSG00000259868_27 (sequence is synthesized)
ggactcgacagttttcaaatctaaagaacatattgtgttgtttgcaaaggaaatattgtaatggcttcttagttcatccaggaaaagagtctgtcactaatgggcattttgtaaaatgaa

SEQ ID NO: 945838 - DNA, 120 bp, Artificial Sequence
  ENSG00000259868_28 (sequence is synthesized)
atccttctagggagaaggataactggtcagatttgaaggttaaaaaaaaaggtcttgacactgatctcggtttgcagagaaacaagaaattctgtctgacttcttttcagtgggagctaa

SEQ ID NO: 945839 - DNA, 120 bp, Artificial Sequence
  ENSG00000259868_29 (sequence is synthesized)
aattttaaccaccccgattgcactcacttatatgaaaacgttaatgttaaacaaataggcagggatttcttttattattatttatagaggagaattttgccatcaggaaacatgttggct

SEQ ID NO: 945840 - DNA, 120 bp, Artificial Sequence
  ENSG00000259868_30 (sequence is synthesized)
aatctgctttggccaaattctccttagagacagtgattaatagaaggaatgagtggaagattagtatacgcacaaggctattcaggagtgggggtaaaatgttaatgcggtgacctttaa

SEQ ID NO: 945841 - DNA, 120 bp, Artificial Sequence
  ENSG00000259868_31 (sequence is synthesized)
gcagagcacaagaacaagcagagctataacaagcagagcacaagaaggaagagtgcagatccaggactgggacacttaaccaataataatacaaataatgaaaacacagcagcaacaggt

SEQ ID NO: 945842 - DNA, 120 bp, Artificial Sequence
  ENSG00000259868_32 (sequence is synthesized)
ttcatatgacaacatgagaataaagaaataaaatataggataaaagaaaagggattggagcctattttatgtaaaatggtacaataataactttaagtagtccacaaagttaaggatata

SEQ ID NO: 945843 - DNA, 120 bp, Artificial Sequence
  ENSG00000259868_33 (sequence is synthesized)
tcttgtaatcactgcagcaaatattaacagtaattaatactgtaatgcaaagagtataaaagtaatgcaaggaggtatagctaaagtgccaataaagtaattaaaagaaaaaatctaaaa

SEQ ID NO: 945844 - DNA, 120 bp, Artificial Sequence
  ENSG00000259868_34 (sequence is synthesized)
catgttaaaatccaaagaagtcaggaaagagagaacagaagaacaaaaaacaatcaggcaaacaggaaatagataataaaatcgtaaatctaaatctaaacatatgaataaatgtgttca

SEQ ID NO: 945845 - DNA, 120 bp, Artificial Sequence
  ENSG00000259868_35 (sequence is synthesized)
gtaggttgaaggtaaatggctagaaagtggatataccacacaaattgaaaatataagagactggagtagctatattaatatcagaaaaaatagatataaaagaacatttctaaatgataa

SEQ ID NO: 945846 - DNA, 120 bp, Artificial Sequence
  ENSG00000259868_36 (sequence is synthesized)
aagtttgttcatcaggaatacataataaacataaatgtgtacatgctgaataacagagcttccagatacatgaggtaaaaatggacagaatcaactggatacatgtcactattatggcac

SEQ ID NO: 945847 - DNA, 120 bp, Artificial Sequence
  ENSG00000259869_0 (sequence is synthesized)
ccaaagggatagcgccccgggttgtaatcaccatctggcccgccgctcctgccgccgcgagtctacagcggagctattgggtggaccaagcgggtgaggcgcgggcaggcagcggctccg

SEQ ID NO: 945848 - DNA, 120 bp, Artificial Sequence
  ENSG00000259869_1 (sequence is synthesized)
cctcgtaatcctcctccgaccggtgcccaggggctggccccacctttccctcggtcacccaccaacgccgctccctcgatccccagcacccctccaggcccagttcgcttcagaggcgcg

SEQ ID NO: 945849 - DNA, 120 bp, Artificial Sequence
  ENSG00000259869_2 (sequence is synthesized)
agacccggaaaacaaggaagaagcgagctcagcctcaatccccgtccccaccccactttcggggccgctgcgctggagaattgaagggggcggaccccggattaaagccgctcccttccc

SEQ ID NO: 945850 - DNA, 120 bp, Artificial Sequence
  ENSG00000259869_3 (sequence is synthesized)
agcctcgctcctctttccttctgtccgtgatgatttctttattgtcaggcgagagccaggctccccgcgctcacgggaccgggcggttgggagcgggttctggagctcacgcctggcgtc

SEQ ID NO: 945851 - DNA, 120 bp, Artificial Sequence
  ENSG00000259869_4 (sequence is synthesized)
ggcggaggtgaccccagcgccctcgcccgtgcaggggaaacagctggttcccgcccggatggggaaacctggactgcgtgggctcgggcgcctggcaggcatgcggggcctctaaggctt

SEQ ID NO: 945852 - DNA, 120 bp, Artificial Sequence
  ENSG00000259869_5 (sequence is synthesized)
ggccactgtcacgggtcctgtggttgttgcttctcccctcgccacgcccttctcctgggacggagattcattccctggcgggtgtcggggacctgggcgcagattcattccctggtgggt

SEQ ID NO: 945853 - DNA, 120 bp, Artificial Sequence
  ENSG00000259869_6 (sequence is synthesized)
gtcggggacctggcgctcttgcagggacgccccccggagtctgatacgtggactttaagatcagacgcttcggggccgggctgggaaaaactggcggaaaatattacaactctactctca

SEQ ID NO: 945854 - DNA, 120 bp, Artificial Sequence
  ENSG00000259869_7 (sequence is synthesized)
atgccaggctgttgtagaagctcctgggacaagccgtgaagtctccgcaggaggcttcagagatatactaggcggctgctcagttcgccaaggacttttccattgactcacaagcgccgc

SEQ ID NO: 945855 - DNA, 120 bp, Artificial Sequence
  ENSG00000259869_8 (sequence is synthesized)
gactcacaagcgccgcctggaggaggaggccgcgctggacgcgccggcggcgcctttgcctgggggagcgcagcccggagctgtggcgtggccgcgctgggagcggcgtgtcagaggctg

SEQ ID NO: 945856 - DNA, 120 bp, Artificial Sequence
  ENSG00000259869_9 (sequence is synthesized)
gttgggcggggcgcaggaggtgggctcagggctctccagagcactcccctgagctgacccgcaggactgccgggccagtaggcacggggcccgcgcggtgacctgcggcctcgaggctgg

SEQ ID NO: 945857 - DNA, 120 bp, Artificial Sequence
  ENSG00000259869_10 (sequence is synthesized)
agcagccactgcaaacgccgcgctggccccaaacactgcgtccttgaaatgttttaattaagaataattaatagggccgggagtggaggctcaagcctgaatccccagcacctggcgagg

SEQ ID NO: 945858 - DNA, 120 bp, Artificial Sequence
  ENSG00000259869_11 (sequence is synthesized)
ccgaggagggaggatcccttgagcccagaggttcaagactagcctgggcaacacagtcagactccatccctacaaaacaaacaaacgaaaataaaacaaacgaaacgaaatgaaattagc

SEQ ID NO: 945859 - DNA, 120 bp, Artificial Sequence
  ENSG00000259869_12 (sequence is synthesized)
aatgaaattagcccggcgtggtggcgcgggcctgtggtcccagctcctcgggaggctgaagcaggaagatggcttgcgaccgcaccactgcgctccagcctgggagacagagcaagaccc

SEQ ID NO: 945860 - DNA, 120 bp, Artificial Sequence
  ENSG00000259869_13 (sequence is synthesized)
tgtgtatgtctgggtaaatgtatagattttaaaactattttgaaggcggcctttttaactctaaactgaccactctggaggagacgcctgacccagagcgctttccctaaagttcggtgc

SEQ ID NO: 945861 - DNA, 120 bp, Artificial Sequence
  ENSG00000259869_14 (sequence is synthesized)
ccaaagtgcaccttcccatggttggggtctctgcctttcgccaagccttgcctcttgcagaggtgggctccatagtgtctcccgctccgccccaactggagaacagtgtaaattgtcggc

SEQ ID NO: 945862 - DNA, 87 bp, Artificial Sequence
  ENSG00000259869_15 (sequence is synthesized)
cccgctccgccccaactggagaacagtgtaaattgtcggccgggcgcgggacctcatgcctgtaataccagcactttgggtgtcgac

SEQ ID NO: 945863 - DNA, 120 bp, Artificial Sequence
  ENSG00000259869_16 (sequence is synthesized)
cactccagcctgggcaacaagagtgagaccgcgtcttaaaaaaaaaaaaaaaaaaaaaagaattgtcaaccagagggagcggcaattcagaagcacgctgaagccaagtcctcaagacta

SEQ ID NO: 945864 - DNA, 120 bp, Artificial Sequence
  ENSG00000259869_17 (sequence is synthesized)
actagaaagcatgaagcaggggaggcgttttgaaagcttaaggacaaaagaccatgggcctggatggctgattccgggatcggcatcgtaatttgttgagaaggaggccgtgctgtgctg

SEQ ID NO: 945865 - DNA, 120 bp, Artificial Sequence
  ENSG00000259869_18 (sequence is synthesized)
ccagttattaatgggtttaatcggttgatacacagccctactggcctaaccagtagcccagggcccgagaggatttgcaggtcgtgtcagaatttgattgaagttccttccacttggcat

SEQ ID NO: 945866 - DNA, 120 bp, Artificial Sequence
  ENSG00000259869_19 (sequence is synthesized)
aaggagacaccatcagcctgattgagagggtcatggtgagatggagcccgccaaggtggcagcgctgagctgaccacgccacggaccatagagtgggagcctttcctgcccccttaaccg

SEQ ID NO: 945867 - DNA, 120 bp, Artificial Sequence
  ENSG00000259869_20 (sequence is synthesized)
cagctaacatcaaaagcactggtatgggctgtctaactggaacctgagttggtctttgtaattacgattcttttgggtttattttgccagttcattatccacccccctgaaatcaggcct

SEQ ID NO: 945868 - DNA, 120 bp, Artificial Sequence
  ENSG00000259869_21 (sequence is synthesized)
cccaaatttagcaggtgctggggaggaccccagggagtggcttgtgggggctagctggtgaaactaccctttcctttctgttctatgagtgtgatggtgtttgagaaatatggggctatg

SEQ ID NO: 945869 - DNA, 120 bp, Artificial Sequence
  ENSG00000259869_22 (sequence is synthesized)
gttcaggcgcacttcacatgtgcaaagatggagaaagcactcacctgcacatttaggctcagaatattgattgaaacattttgaaatatcaaaaataaaatgttatttttaaagtttctc

SEQ ID NO: 945870 - DNA, 120 bp, Artificial Sequence
  ENSG00000259869_23 (sequence is synthesized)
tgagatttcgcttaagttttggtagatattcttaaattttagtgacctcagtttgggaattcagtaagccaaatattgtatccttattattagttatatagaactatgccttagactttg

SEQ ID NO: 945871 - DNA, 120 bp, Artificial Sequence
  ENSG00000259869_24 (sequence is synthesized)
ttagaaacttctgcttcagcttgactgactcattttccatttctggttgtacaaaatgaactgacactttaatgctgtggccacctttaaataaagtacaatgtgacaaaaaaatacaaa

SEQ ID NO: 945872 - DNA, 120 bp, Artificial Sequence
  ENSG00000249738_0 (sequence is synthesized)
gaaatagaaggatgtgtctgacagtgtgatgtaaatgcaggcattttggagtccctgctggagaacacacagaggcccagtttcctcaacaatgaaatgggactaattatcccaggtcac

SEQ ID NO: 945873 - DNA, 88 bp, Artificial Sequence
  ENSG00000249738_1 (sequence is synthesized)
tttcctcaacaatgaaatgggactaattatcccaggtcacacttctctctgggcttaccctgggaatcagatgattgagctttggaat

SEQ ID NO: 945874 - DNA, 120 bp, Artificial Sequence
  ENSG00000249738_2 (sequence is synthesized)
gtaaccctcccacctcagctttctgagtaactgggactacaggactggaaaccacgaagtcaattgaattgaatgcaccacaacccatcttctagtaaaattgatgctccaagaagatac

SEQ ID NO: 945875 - DNA, 120 bp, Artificial Sequence
  ENSG00000249738_3 (sequence is synthesized)
acaacgttgaccatgtggattcagatatctcccgcttggatctcagcctggatcttgttgtttgagaagcatagattagctacagaatgccatgtcatacatccaataaaattcaactct

SEQ ID NO: 945876 - DNA, 120 bp, Artificial Sequence
  ENSG00000249738_4 (sequence is synthesized)
gcaagcatgagagagaagaggaaggaaaagagagaatctgaagtagttggatcactagagggcaatatcggccaagagaaagaagaattcttcaccaccgtttctaggactggtgaaggt

SEQ ID NO: 945877 - DNA, 120 bp, Artificial Sequence
  ENSG00000249738_5 (sequence is synthesized)
gctgtgctggagagagcatgtggagagacaccacagagagtgatgtccaaggatcctctgctgttctagcctccagatgtttggtaccaaatggagagtgagtgaggcttccaaccccac

SEQ ID NO: 945878 - DNA, 120 bp, Artificial Sequence
  ENSG00000249738_6 (sequence is synthesized)
ctttgagccaccccagctgatcccagtagagcagagatgagctgtccccaccaagtcttgcccagattgcagatctgtgaacaaataagaatttttgcttgaagcctctatgttttgggg

SEQ ID NO: 945879 - DNA, 120 bp, Artificial Sequence
  ENSG00000249738_7 (sequence is synthesized)
tacttggtcacgtagccctagggctaactgaagtatagtgagaagtgacaagattcaaggttgtatagctgcttaggggaagaacaaagaaagtacactctccttgcattcaaaggatat

SEQ ID NO: 945880 - DNA, 120 bp, Artificial Sequence
  ENSG00000249738_8 (sequence is synthesized)
cctctctgtgcctcagttttctcatctgtatgatagggatgaagatggtatttcttcagaaggtagtgatgaggaataaatatctcattcttggcatgtaggaaaaagctagtaagtagc

SEQ ID NO: 945881 - DNA, 120 bp, Artificial Sequence
  ENSG00000249738_9 (sequence is synthesized)
tgggttggggtttcaattcaggcagtctaaccctagactctttactggtaagctcaggtccagaacattcccaccaatccctgaaaaggaggccagacggcaatatcccaggtactccca

SEQ ID NO: 945882 - DNA, 120 bp, Artificial Sequence
  ENSG00000249738_10 (sequence is synthesized)
ttattttcccccatacggcatgattctgagtcctccttggccgcccttctctgttcactgggccttgatacatgattctctgaactgaaggccgcaccatcactcctctctgtttagtgc

SEQ ID NO: 945883 - DNA, 120 bp, Artificial Sequence
  ENSG00000249738_11 (sequence is synthesized)
agcccgagattacactggcttttttggcagtcacatcacattgttgactcattctgagctggcagtcaaaatcctaagtgtttttatcacatgtgctagcatcaagctgcattccttccc

SEQ ID NO: 945884 - DNA, 120 bp, Artificial Sequence
  ENSG00000249738_12 (sequence is synthesized)
atctaggattggtgcaattggagttttaaaaaatccaactgcagaattgtttagtttattagattttgctcattgtggtagtgtgcctaggaaagaatccagatgagctcctctccaggg

SEQ ID NO: 945885 - DNA, 120 bp, Artificial Sequence
  ENSG00000249738_13 (sequence is synthesized)
ttctcggagacaccctgtatccttttaatatacctttcctttatttctgtagtccatttgagtggcttactggtactcacaacacaaaaagtaagccatagagtgacttctgggtggtcc

SEQ ID NO: 945886 - DNA, 120 bp, Artificial Sequence
  ENSG00000249738_14 (sequence is synthesized)
ttgctcaggaggaaaagaggtgtggcagggatgctgtggtagagggcagagaaagcaaatggcaggagcgtgtgccgggtgccacgtctgagccgtggcagaccttgcagctgatcatga

SEQ ID NO: 945887 - DNA, 120 bp, Artificial Sequence
  ENSG00000249738_15 (sequence is synthesized)
ctctcttttctgctgagtcaggaaatggcctctactttgattagctgccacctgaataggacagagttgaggactgaggacagagactgctttcgaagtggaccctggcataattaatca

SEQ ID NO: 945888 - DNA, 120 bp, Artificial Sequence
  ENSG00000249738_16 (sequence is synthesized)
aggcctgcgtgaaggtaaatgcaaatcagctccgcccagcgcttcccgcagaaggagggttttctgtgtgcgcgtctggtttcctccgccttcagccagaatgctggctttatttttgcg

SEQ ID NO: 945889 - DNA, 120 bp, Artificial Sequence
  ENSG00000249738_17 (sequence is synthesized)
gtttatgagcttgagacagggaattcatttccttggtataatatgaccctctggagaaagtcttgtccagatatattttgctcccaaacgccgccctagaagaaggactacactgaaatg

SEQ ID NO: 945890 - DNA, 120 bp, Artificial Sequence
  ENSG00000249738_18 (sequence is synthesized)
aaacggagatgattaaagtctgatttataggctgtacaagccctgaaagcaagaacggggttcacggcatcttgatacccccatgtggggacgttttggcgattttatttacaagaaagg

SEQ ID NO: 945891 - DNA, 120 bp, Artificial Sequence
  ENSG00000249738_19 (sequence is synthesized)
gattttacaccggagaggcttttaaatatgctaacagactggaccagctttctcatccccactggctgattaatgattcctccatgccaacccggttctcagagacaccaaggccaggta

SEQ ID NO: 945892 - DNA, 120 bp, Artificial Sequence
  ENSG00000249738_20 (sequence is synthesized)
aaaaccaccccttcatcccctaaaccttgcaagaagcacagggtccagaattatgcttctttcaggttctaaatagcacaataaaactaataacaataagcttttagttattagatcagg

SEQ ID NO: 945893 - DNA, 120 bp, Artificial Sequence
  ENSG00000249738_21 (sequence is synthesized)
tacattttactttacagtaagcttttacttattggatcaggtacattttaaagcaatttttgaacattatttcatttgatcctcacaaccacactatgaggtaggtactatcattccatt

SEQ ID NO: 945894 - DNA, 120 bp, Artificial Sequence
  ENSG00000249738_22 (sequence is synthesized)
tgaaggatgagaaaactgaggctcgaagatgttaaataacttgttcaagatcacagctagtcagtggacatagctgccattcactgagtgcttcctgtgagccaggcacggtgaccatca

SEQ ID NO: 945895 - DNA, 120 bp, Artificial Sequence
  ENSG00000249738_23 (sequence is synthesized)
atttcatgcaatagtgcccttgatccttaggaagtggcctccagtgcttagaattccaagcatttggtcctctggagatgagaaaccatgggaaggcaggggctcactcacccctgtatc

SEQ ID NO: 945896 - DNA, 120 bp, Artificial Sequence
  ENSG00000249738_24 (sequence is synthesized)
caaaaagttgaggatggtgccaaggacagagacggtaccagggactccaaaaatactgaatgaaaggacagtagaggtgctttcctgtgggatccccaatctctccccgccttcaggtga

SEQ ID NO: 945897 - DNA, 120 bp, Artificial Sequence
  ENSG00000249738_25 (sequence is synthesized)
gtcctgctgatgctcaggctgcccttggaacagggaccttggccatagtttccttatctgtaataatgggatgagaattcctcctgcacagggttgttagggacctcgtgaggcagcttc

SEQ ID NO: 945898 - DNA, 120 bp, Artificial Sequence
  ENSG00000249738_26 (sequence is synthesized)
tatggctgcctttggtgcttagttttctcactttcttcttgaacatgggagtggggagacggactcctaagggtatgacacttgaagatttcaggagggggcctgcaggtttatgtcctc

SEQ ID NO: 945899 - DNA, 120 bp, Artificial Sequence
  ENSG00000249738_27 (sequence is synthesized)
acttgttttacacctcacagaggtcagcgaagcagggtatcaccaaagccccacctgatgtctctggaaatcgagtactccgtgtcttcaccaggcccatgccagctgtgaggggcagaa

SEQ ID NO: 945900 - DNA, 120 bp, Artificial Sequence
  ENSG00000249738_28 (sequence is synthesized)
ccaggttttctgacaccaaaccccaggtttcttcctgtgctggcatgggtcctttttctgacttggccagcagcctctcatagatgggggtctgattaaatagttctggtgatgggtgga

SEQ ID NO: 945901 - DNA, 120 bp, Artificial Sequence
  ENSG00000249738_29 (sequence is synthesized)
gtgatggttgcacaacaatatgaatgtatttaatgccactgaactgtacacctgaaaatggttaaaatgttacattttatgttatgaatatttcaccacaataaaaaaaagaaacaaata

SEQ ID NO: 945902 - DNA, 120 bp, Artificial Sequence
  ENSG00000249738_30 (sequence is synthesized)
gagaactctattttagaagagaggaaagcacttctcagttctcagtacacctccctttccttttcatagatgagtactccatcatgtaactacctatgaccacaagcaaagtctggaaaa

SEQ ID NO: 945903 - DNA, 120 bp, Artificial Sequence
  ENSG00000249738_31 (sequence is synthesized)
gctggtgtacctcaaagctttcgaggccaacaattctacaaattttcaggcgggcagcattttcttcattctatactccaaggaagaggagggtcagagaggataaataacctgcctcgg

SEQ ID NO: 945904 - DNA, 120 bp, Artificial Sequence
  ENSG00000249738_32 (sequence is synthesized)
aggcaagagtctgcgaacccctggaggtctggaagcaggattcatggagttctttccccagagaggagcagtcagctctgagtcaattagcagagcaatcatcggaaatcaagtccctga

SEQ ID NO: 945905 - DNA, 120 bp, Artificial Sequence
  ENSG00000249738_33 (sequence is synthesized)
agaggtcgctgcgagacggtacccgcgccccacagtccacccgctcctcggagtccccccgcgccccggagtccacccgcgccccggagtccacccgcgcaggtccacttctccatccct

SEQ ID NO: 945906 - DNA, 120 bp, Artificial Sequence
  ENSG00000249738_34 (sequence is synthesized)
gctctcgacctccgcccctgcggtgggggaagttcctggggcggtggctgggaccaggccgggttttaggcgggcgcagatttccgggctaactttcctcgccgtctcagcgcgggaagg

SEQ ID NO: 945907 - DNA, 120 bp, Artificial Sequence
  ENSG00000249738_35 (sequence is synthesized)
gggaaatgggaaacccgggccagagcagcggagcttcccagccgcacacttcctccctccagccgtttgtctcggcaggggagggcccaggcagccaagccggcaggcccactggttatc

SEQ ID NO: 945908 - DNA, 120 bp, Artificial Sequence
  ENSG00000249738_36 (sequence is synthesized)
cgaccttgtgctctggccgtgggtggagaccttacatccagctcagagcgcctcctcccatcccctgtgtcctctaggcctccccagactttgccttttagccttccagtgaaacaagtt

SEQ ID NO: 945909 - DNA, 120 bp, Artificial Sequence
  ENSG00000249738_37 (sequence is synthesized)
ctgtatccaagatatacaattaagtggacaaagcagattgcagaaagtcttttcgtagctcacaaggggacatcaaagatgacaaagaggagtggaagaagacagagagaatcaatgtga

SEQ ID NO: 945910 - DNA, 120 bp, Artificial Sequence
  ENSG00000249738_38 (sequence is synthesized)
ggagcctggaacagggctctgaattgtcttcccacagtgaaatcacttgtctattgctgagccaagaatttgactctgagcatctaggatgagaaagaagaactggcacctacgccatct

SEQ ID NO: 945911 - DNA, 120 bp, Artificial Sequence
  ENSG00000249738_39 (sequence is synthesized)
gatgcccacctgtggttaatggagctgaggctgctggaccaaagggaggaagtctgttaggcatatgtggaacccaaaagaggaacttcatcaactgtcatggacagctctgccactttg

SEQ ID NO: 945912 - DNA, 120 bp, Artificial Sequence
  ENSG00000249738_40 (sequence is synthesized)
tgaccctgtggactttttgggaagtgtttttgtggttcaccagtctctcattaggcaaggccatttgtcctgggttggtcttcttcattggtggaaagtacagctgggagatttggaatg

SEQ ID NO: 945913 - DNA, 120 bp, Artificial Sequence
  ENSG00000249738_41 (sequence is synthesized)
gttgcagattgacttgactctcataaggaactgccaccatgagcttttggggaaagacctcaagctgtggtgtgttgctgaggattgtgggattcctccaaatcttggggaacattttga

SEQ ID NO: 945914 - DNA, 120 bp, Artificial Sequence
  ENSG00000249738_42 (sequence is synthesized)
gtcatcactggcagcagatttctgttgacaacttgagcaacttcagaatgaagaagccatcttcatctctcacatgaatatgactttgggtaaatcatctcgaaatctgaacccatggtt

SEQ ID NO: 945915 - DNA, 120 bp, Artificial Sequence
  ENSG00000249738_43 (sequence is synthesized)
gtgatccacactcctcctgagttctgatttttagtgtaacctttttcttctcattttttcttctttgtgcatctcttaaggaggtttttaaaatctcataattaaaaaatttatttcttc

SEQ ID NO: 945916 - DNA, 120 bp, Artificial Sequence
  ENSG00000249738_44 (sequence is synthesized)
gacctcgctggtgtacctcaaagctttcgaggccaacaattctaagaggaaagcacttctcagttctcagtacacctccctttccttttcatagatgagtactccatcatgtaactacct

SEQ ID NO: 945917 - DNA, 120 bp, Artificial Sequence
  ENSG00000249738_45 (sequence is synthesized)
atgaccacaagcaaagtctggaaaatggctggtgtggctttacctcactttggagaggatacatggtgatgctgacctccagggccagctgcttggcttgccaagacagtgtcctcagag

SEQ ID NO: 945918 - DNA, 120 bp, Artificial Sequence
  ENSG00000249738_46 (sequence is synthesized)
actgtgcatgcagacccacagcctacctgccctgcccccgggtccttgctctgtctttagccagcctttgtgggcgttcacttcccagcactacgagggaggctgactggcctatttcct

SEQ ID NO: 945919 - DNA, 120 bp, Artificial Sequence
  ENSG00000249738_47 (sequence is synthesized)
cctgactcaaggaaggtttgcttgctgaaagattatccactcagtgccaacgatgaagacaagcctttagggaggagtggaaccacaagatagaaagagccgtgggtcatcatatcaatg

SEQ ID NO: 945920 - DNA, 120 bp, Artificial Sequence
  ENSG00000249738_48 (sequence is synthesized)
gatggaagagagtctcatatcaagcaggaacacctgccttgggtttataggtgaatttggaaccatcttcagaatcaggctgccgtgctgtctgtcaatgtattgtaattgagacctgca

SEQ ID NO: 945921 - DNA, 120 bp, Artificial Sequence
  ENSG00000249738_49 (sequence is synthesized)
agggctcttctcacacctgggaacatcatggtgacattgcatctgccaccagctccagccccaggaaggtagcatgtgaggacaggcagggtctccaccttgggatggcaagatggcttc

SEQ ID NO: 945922 - DNA, 120 bp, Artificial Sequence
  ENSG00000249738_50 (sequence is synthesized)
aggaagctccacgtagcattttgtcatcttaacagccccagctggaagcagattctctctttcccagcagttccacagaattcccacataggaagagtctcattggctcagactggctca

SEQ ID NO: 945923 - DNA, 120 bp, Artificial Sequence
  ENSG00000249738_51 (sequence is synthesized)
tgtgtctgttagcccactgtgttcacctcctcctggacccgggagataactgtcatcatccaatggttaaagtgccagtataaggacacttggtttttattgtatgatttgtggataatg

SEQ ID NO: 945924 - DNA, 120 bp, Artificial Sequence
  ENSG00000249738_52 (sequence is synthesized)
tagcatgatggtgttaatggcaaactaagacactgagaagacttgctaaagtcagtttttgcaaccataatgctgaagttttatagtatgatgtctcacagggagcttcctgaaagctga

SEQ ID NO: 945925 - DNA, 120 bp, Artificial Sequence
  ENSG00000249738_53 (sequence is synthesized)
tagcagcttttgcctgacagggacgatgtcattaccgccaacccaagagcatcttccaagaggaattggagcccctcaaaaaattaaagtctctgaacatcccatagccacttgtctcct

SEQ ID NO: 945926 - DNA, 120 bp, Artificial Sequence
  ENSG00000249738_54 (sequence is synthesized)
gctatagtctgccgataatatatcctttgagcttatcagagtaatttgtaactttcataagagcgaagttcagaaaacgcatttttgacacgtttctgatgacaccgtcctcatctgtga

SEQ ID NO: 945927 - DNA, 120 bp, Artificial Sequence
  ENSG00000249738_55 (sequence is synthesized)
accaatcactactgtagccacagatatgggatgttccggttgctcagggctgggtcacatgactacctgggctattgcacatggccacaaggcagagacgattatagtgttgggttcttt

SEQ ID NO: 945928 - DNA, 120 bp, Artificial Sequence
  ENSG00000249738_56 (sequence is synthesized)
taatactacatatcttctggaaaacactgaagagcacttaacagcatggagtgtgggagtggtgattccaccaaggaaatccacggtctgttgccagaagaagaggaaatggatgttgag

SEQ ID NO: 945929 - DNA, 120 bp, Artificial Sequence
  ENSG00000249738_57 (sequence is synthesized)
gccagaagaagaggaaatggatgttgagcagggggaaaaaaatgaaaatctataacagagtcttgctctattgtcctggctggagtgcaatgatgtgatctctgctcactgcaacctctg

SEQ ID NO: 945930 - DNA, 73 bp, Artificial Sequence
  ENSG00000249738_58 (sequence is synthesized)
ctcctgcctcagcatcccgagtagctaggattacagacacccagcaccgcgcatggctaaatctcaaactcct

SEQ ID NO: 945931 - DNA, 120 bp, Artificial Sequence
  ENSG00000249738_59 (sequence is synthesized)
ccaaagtgctgggattccaggcatgagcccccgctcccagccaaaaacatatttcttatagaggatctcactttgtctcttttgttccttgcttgatagtagttattaacccattttaca

SEQ ID NO: 945932 - DNA, 120 bp, Artificial Sequence
  ENSG00000249738_60 (sequence is synthesized)
agttattaacccattttacagatagacaaagtggaaaagcttgttctgcttttttttctgtaaaatagaaggatcatttctatctgggtctgacttttttagtggaagagattatataaa

SEQ ID NO: 945933 - DNA, 120 bp, Artificial Sequence
  ENSG00000249738_61 (sequence is synthesized)
taaatgagataattcatggaaaacaccactagatctttctcttctgtgttccttaggacaagttaattaatatcttcttaagatattactcctttgggaaaattttgcatttcagtagcc

SEQ ID NO: 945934 - DNA, 120 bp, Artificial Sequence
  ENSG00000249738_62 (sequence is synthesized)
tttatactctaattgcattatgagctccctaaggtcattgtgagctccctaactgtactttagacatttttctttttattccttgcatttagcacaatactgggctcagagccggtgatc

SEQ ID NO: 945935 - DNA, 120 bp, Artificial Sequence
  ENSG00000249738_63 (sequence is synthesized)
gataaacacctgtcaaaagattgcctccaaggtgtcttccaggacttacgtgctgtaattacttccaacagacttctcctcaaggagatatagaatgtaaatttgtacctagagtcgtct

SEQ ID NO: 945936 - DNA, 120 bp, Artificial Sequence
  ENSG00000249738_64 (sequence is synthesized)
gttccttttgtagaatcatggcccaagaatcccaggtttcaagttaagaagcacgaaattggttcattcagtgatcattcactatgacatcaaaaccctgcaattccaggatagtaatta

SEQ ID NO: 945937 - DNA, 120 bp, Artificial Sequence
  ENSG00000249738_65 (sequence is synthesized)
atttaattgaaatgaatctatggctagacactgtctctccagcaaaaatgtagctgcaaatgcttcctgggggcaaatttgaagagtaacatgaagtagagttgacctaagaagaaaata

SEQ ID NO: 945938 - DNA, 120 bp, Artificial Sequence
  ENSG00000249738_66 (sequence is synthesized)
aagaaaaaagctaaatatccaggatagttccatgattttagatggtgatttttggtatttaagtggattaggatataaggtagggaggagtaaagaaatgagggaatatttgccactaat

SEQ ID NO: 945939 - DNA, 120 bp, Artificial Sequence
  ENSG00000249738_67 (sequence is synthesized)
ataccattgatgatgataatgatgatagttaccattttatgagcagttactacatgaaagtgccatgtcacgcaacttatatccattgtttcatttcctcttcatagctacactaagagg

SEQ ID NO: 945940 - DNA, 120 bp, Artificial Sequence
  ENSG00000249738_68 (sequence is synthesized)
taaatgctactactgtttccattttataaatgaaaaaaaaatgaggctcagagaagttaattcctttcacaatgtcatatagtcaatatgtagtagaggcagaatttgaacccagttttg

SEQ ID NO: 945941 - DNA, 120 bp, Artificial Sequence
  ENSG00000249738_69 (sequence is synthesized)
attattttaaaatagcatatttagccaattctgtagctgaatcctaaacttctctcttcttctaatgcaaacaataaattaaatagtaatttaagttttataactactactacatgttaa

SEQ ID NO: 945942 - DNA, 120 bp, Artificial Sequence
  ENSG00000249738_70 (sequence is synthesized)
aaagaaaaaccccatgttggataagcagatttatttaacaatgtaataataatttccagggccttatcaagggttagctatgaattggaaattttaaacagtgatattgtgggttttatc

SEQ ID NO: 945943 - DNA, 120 bp, Artificial Sequence
  ENSG00000249738_71 (sequence is synthesized)
tcttatctacaactctgcaaagaagatataatagaccattttacacatgagaaaactaagctcatgcaactaaaacaacttcccttattcccagaggtgacaaatggcagaggacagatc

SEQ ID NO: 945944 - DNA, 120 bp, Artificial Sequence
  ENSG00000249738_72 (sequence is synthesized)
ttgaatacaggccctgatttttcctttgatctctgctgaggtagtattataccaggaacatattctgctatatggaaaatgtggttggagataagctatggaaaagacattataattcag

SEQ ID NO: 945945 - DNA, 120 bp, Artificial Sequence
  ENSG00000249738_73 (sequence is synthesized)
cctactttttaagttctgagtctcaagagggttgttttgtttgttttgctttttctcttaatgaaattattcaaaggcatctctcaaatgtttgggatttgagtaagaaatgccaaaaca

SEQ ID NO: 945946 - DNA, 120 bp, Artificial Sequence
  ENSG00000249738_74 (sequence is synthesized)
tgcttcttctcttaagaatgttcttctctgtctgttaaaatctctatgtaatttcaggcaaaatttaattcatctgtttctgattcacttcccaaacttaccaccatgtttcgtagaggc

SEQ ID NO: 945947 - DNA, 120 bp, Artificial Sequence
  ENSG00000249738_75 (sequence is synthesized)
catttaaagtctatgactttcggagttgctctgagctacttgtctttaaaataggaagttagattttttcataagggcagaggacttggcctcagaggaaaggggatgtgttccaagtcc

SEQ ID NO: 945948 - DNA, 120 bp, Artificial Sequence
  ENSG00000249738_76 (sequence is synthesized)
caagccacaaagtgcatgtggtttccaaacctggctggtgtctgcttctccacccctctactgcaagcctcagcacagtgacttcactcaacagccagaatcagaatttatctccctttt

SEQ ID NO: 945949 - DNA, 120 bp, Artificial Sequence
  ENSG00000249738_77 (sequence is synthesized)
ctgttcaaaattcattataatatttgaatctaattttaagagcaatcagagacgaaaaagaaatgaaggacatccaaatcagaaaggaagaaataaaatccttgtttaaagatgacatga

SEQ ID NO: 945950 - DNA, 120 bp, Artificial Sequence
  ENSG00000249738_78 (sequence is synthesized)
agttacctagacaagcaccaagtattagaagccttagtgtttcaatttgccatcaacttgctctgcaagcccagaccaaaccctgagcttccctctggctttctctttggttaaacaaga

SEQ ID NO: 945951 - DNA, 120 bp, Artificial Sequence
  ENSG00000249738_79 (sequence is synthesized)
agcctttatcttcatctctccatcagaaccagtggcctgctcctctctcccttctctgctttcattgtccaccaacactgaagtcataaatgactagagggagctggagtgtgagggtcc

SEQ ID NO: 945952 - DNA, 120 bp, Artificial Sequence
  ENSG00000249738_80 (sequence is synthesized)
aatctgaagtgtgagtgattctgtttaccattccacagagtaagtggctgcctgggagtgtgtgtgagatgggagtgggagagaatcttctgttcttcccttggacctcagttccacgga

SEQ ID NO: 945953 - DNA, 120 bp, Artificial Sequence
  ENSG00000249738_81 (sequence is synthesized)
gcttttcagcgtgtaaaacatcttaccatggacattctgggtttcggtttaaaaagatgtatttttggtttgacacagtctctcactgaaaccagctgcttcagctgacagtcaaactaa

SEQ ID NO: 945954 - DNA, 120 bp, Artificial Sequence
  ENSG00000249738_82 (sequence is synthesized)
gagtcaaggattaactgtacagttagggacacagcagccatggcaaaacttactgagaaatggccatctcccatgtagcattctgctaagggatttcaagggcattttgacttttgactt

SEQ ID NO: 945955 - DNA, 120 bp, Artificial Sequence
  ENSG00000249738_83 (sequence is synthesized)
ttttacctggcacgctgacttggcgagctaacccctgtgcaagatgccactcaagaagccactccgttgtttataattaagacagcaggtgaggtggccctgtactttgagatttaaaca

SEQ ID NO: 945956 - DNA, 120 bp, Artificial Sequence
  ENSG00000249738_84 (sequence is synthesized)
atagtgacttaagctctttctcctgttttctgtaggaagtccagcatgcttactgagactccctccatccctggggctgacagtcccgtgggtttgttctggctctaggtgtccaccccc

SEQ ID NO: 945957 - DNA, 120 bp, Artificial Sequence
  ENSG00000249738_85 (sequence is synthesized)
gaggagctctgaattcacagtgtcgcatgaagggacagcaccctgctctccctgtgcaaggcactgagcttcatgtcaaacttggcctctgtgttttgttcccaccaggcccttctccca

SEQ ID NO: 945958 - DNA, 120 bp, Artificial Sequence
  ENSG00000249738_86 (sequence is synthesized)
agaaatgtacacgtagcaaactttactcaaagtgtgaggactcaggagggattttaaaaaatcataaaaatgccgagtttaaaattagatcgtattagtgttgttttccttagaaggaag

SEQ ID NO: 945959 - DNA, 120 bp, Artificial Sequence
  ENSG00000249738_87 (sequence is synthesized)
aaaaaaagtttaaaaattaaaaaaagagataaaattagatcttatatatctctctcctggaaagttccttaacagccttgctgtaggggaaatgtctttctcaccgaacacttttcttgg

SEQ ID NO: 945960 - DNA, 120 bp, Artificial Sequence
  ENSG00000249738_88 (sequence is synthesized)
aagattccggccttccaccttgttgtttgccttctctgtctgtaaaacattcaaattctctcatttatcctagaaggcagtttagctctacagcccctacacagtcctagacctcctttc

SEQ ID NO: 945961 - DNA, 120 bp, Artificial Sequence
  ENSG00000249738_89 (sequence is synthesized)
tgaaattcccatattttcttcatgtctctccaccagtctttgtaagtgaaatagaggctgatagagatttactttctcattgatattaactatgcttctcctcttagaagacagaggcat

SEQ ID NO: 945962 - DNA, 120 bp, Artificial Sequence
  ENSG00000249738_90 (sequence is synthesized)
ctgtagtcagtgtcaaatatttcccaccctaccatatatatatatgaaatacatggattatgttctatggacaattgggtatcttgtttgttttagttactattgctgtataacaaatca

SEQ ID NO: 945963 - DNA, 120 bp, Artificial Sequence
  ENSG00000249738_91 (sequence is synthesized)
ttccaaacttacaggttaatcaacaacaatttattatgcccacagattctgcagatcagggatttgagaggatcatggtggaatcacttgtttctgttccatgatgtctggggcctcaaa

SEQ ID NO: 945964 - DNA, 120 bp, Artificial Sequence
  ENSG00000249738_92 (sequence is synthesized)
tggggagatacagaggttggggatggcttcgtgggtgagggctagaattattaagagggttatcacttacatgcctggcagttgatgtaagtcatcagctgagatgtcagctggggacat

SEQ ID NO: 945965 - DNA, 120 bp, Artificial Sequence
  ENSG00000249738_93 (sequence is synthesized)
ccactgaaatacctactcatggcctgtccatgtggtgccttaggcctcgtcacagcatggtggctgggtcccaagagtgagcatctcaagagagcaaggtgaaagtgcatgacattttaa

SEQ ID NO: 945966 - DNA, 120 bp, Artificial Sequence
  ENSG00000249738_94 (sequence is synthesized)
tgagtcagccttgaaagtcacataatgttagttctgcactattcttggtcaaggcagacactgagatctgcccagcttcaaggggacgtggcaaagaccccatcatttgataggaggatc

SEQ ID NO: 945967 - DNA, 120 bp, Artificial Sequence
  ENSG00000249738_95 (sequence is synthesized)
gtcgaggtcacattgtagtgaaagcctgtgagacgagtggtgatgtttctgccatgttggaaaatgcaatctgctacactgctcttttcatttaacatatcataccattaaaataatcca

SEQ ID NO: 945968 - DNA, 120 bp, Artificial Sequence
  ENSG00000249738_96 (sequence is synthesized)
tcaactctgtgaatacatccatagaacttattcatttactagttccttagtataggacttttctcatcacttccccataagagagaagaaggaggtatggttattttccttccctaaaac

SEQ ID NO: 945969 - DNA, 120 bp, Artificial Sequence
  ENSG00000249738_97 (sequence is synthesized)
caagagagagaggcccaaagagaattatttgacaagtgggattcctattcctgcagtgtcgactccattaatttggggtctgttatctttcctttgatggtttttgagtcttggaccagc

SEQ ID NO: 945970 - DNA, 120 bp, Artificial Sequence
  ENSG00000249738_98 (sequence is synthesized)
aggagcacctgaggctgcttaggacatggatataggggtctgtggcttctcaggtgtgtcaaggacacatacatttctcctgggtcgagggaacaccttaggaagtgggacttgagctgt

SEQ ID NO: 945971 - DNA, 120 bp, Artificial Sequence
  ENSG00000249738_99 (sequence is synthesized)
tctgccattattccccaagtgggtttcccactggatgagatacccctggtagaaggaaagtgtggggaagactgtggttggggaggaaaaggaaaggaagcagctggagccctagccagg

SEQ ID NO: 945972 - DNA, 120 bp, Artificial Sequence
  ENSG00000249738_100 (sequence is synthesized)
ccacccatgtaggtgaatatgcaggggatggccctacgacattctccaaagaacccaatggatgagccccatgaaggagccacacagcaggagtcaaagctcagtctgcattatccagga

SEQ ID NO: 945973 - DNA, 120 bp, Artificial Sequence
  ENSG00000249738_101 (sequence is synthesized)
atttttttggaagatgaccaaaatgctatctctatttggagataataattagtctcatcttcattggcttcttctcgaatgcggagggaattatcggatgagtacattggaacatggtcg

SEQ ID NO: 945974 - DNA, 120 bp, Artificial Sequence
  ENSG00000249738_102 (sequence is synthesized)
ccatgtggcctgctgcccccgtgtaccacttggagaccagcctagcatggaaatgaccagatgttggaagctgagctactgctcaaggtattaatgcttgaaagatattccatgtttgaa

SEQ ID NO: 945975 - DNA, 120 bp, Artificial Sequence
  ENSG00000249738_103 (sequence is synthesized)
gggatttttgtggtgctggcctacaagttgacctttttgacgtgaataagaaacattcttcaaaactgtggttgacatccaagcttgctgtcatgttttgaactgccctatggagaaagc

SEQ ID NO: 945976 - DNA, 120 bp, Artificial Sequence
  ENSG00000249738_104 (sequence is synthesized)
taccccaccagcagcgtcttagaggcagtgagaactctattttagaaggaaaacagaaaacagcccgggaaaagaaagaaaacagaagtcaagacgtcccatctgtgatacagaataacc

SEQ ID NO: 945977 - DNA, 120 bp, Artificial Sequence
  ENSG00000249738_105 (sequence is synthesized)
catgacttaagaatatttcatgtaatgacttcaaactacagtaagacttcagtacttaagagcatagatgttggagtgagatggttgggtctaaatcttggctccaccattcattggctc

SEQ ID NO: 945978 - DNA, 120 bp, Artificial Sequence
  ENSG00000249738_106 (sequence is synthesized)
tgtgtctttgggaaccttccataacctctgtaagtctcagcctccttgtctgtaaactgaaagtaataatagtccttccatcattaggctgttgcaaagataaaatgaaatagtgtatgt

SEQ ID NO: 945979 - DNA, 120 bp, Artificial Sequence
  ENSG00000249738_107 (sequence is synthesized)
aaattcaggttcttggggctgatgcttggagattgtgattcagatctgggatggggctcaggaacctgcattttaacaatggaggttctaatgtggtcattggcaggttgttctaatgtg

SEQ ID NO: 945980 - DNA, 120 bp, Artificial Sequence
  ENSG00000249737_0 (sequence is synthesized)
agactattcccaggcagctgacttccacatccttgtgattggcctccaggggcatgagggaaaaggagagaatgaatcagccaaaatcccatcactatccttggaaaaaatgccatgtga

SEQ ID NO: 945981 - DNA, 120 bp, Artificial Sequence
  ENSG00000249737_1 (sequence is synthesized)
tacaaaaggagttcctattatcatcattttgggaggttaagccttttctaaaccccagagctcataagcaatggagctgagactgtaaccctgacctacctaccttcaaagaccatactg

SEQ ID NO: 945982 - DNA, 120 bp, Artificial Sequence
  ENSG00000249737_2 (sequence is synthesized)
tttccactaagtcaaactaccttaaaaatacttattccttttggctcagtaagtcaccttttgggaatctacatggaatctgaaatgtacgagataagcctgggacattttgagatgcaa

SEQ ID NO: 945983 - DNA, 120 bp, Artificial Sequence
  ENSG00000249736_0 (sequence is synthesized)
cactagttgtaccaataactaaccccaaggaattggactcagaagagcaatacaaattgcagccttgccacttacgagctgagagatcttagccaaaataactcaatctgtctgagttgt

SEQ ID NO: 945984 - DNA, 120 bp, Artificial Sequence
  ENSG00000249736_1 (sequence is synthesized)
attttttatcagtcgactgaagatgaataatattcaggctacaagtttatcaaagagttaatagagatggagtccatgttgcctcgcctggtcttggactattggcctcaagcgatcatc

SEQ ID NO: 945985 - DNA, 120 bp, Artificial Sequence
  ENSG00000249736_2 (sequence is synthesized)
cacacagtgtggtccagagacctggtgacagtgtgtgaattgttaccagttcacagagcagtaagtattacaaaacttgggagtaggtcattagaaattttatagggatttcagcaatgt

SEQ ID NO: 945986 - DNA, 120 bp, Artificial Sequence
  ENSG00000249731_0 (sequence is synthesized)
atgatgctgttgtggctgttggcaggaagcttcctcacattttcagtttaaatgcattcctcctgatctttccaaaagacggaggcagaacagctggttgccatactccgcataaagtcc

SEQ ID NO: 945987 - DNA, 120 bp, Artificial Sequence
  ENSG00000275232_0 (sequence is synthesized)
gtctgcatcacgcgtttcctcagagtctcctcaggctgggattctgcttaaaagtcacgtcctctaaggctcctcgctggccttccccaccacattgatgtccagatgaagaaacaaaag

SEQ ID NO: 945988 - DNA, 120 bp, Artificial Sequence
  ENSG00000275232_1 (sequence is synthesized)
actcacctgagctgagctccagggcatctccgcggggaagcggggagcccacccctgttggacgcagatgaagatgccaaggggagcctggctgaccatggagccatcatggagggaggc

SEQ ID NO: 945989 - DNA, 120 bp, Artificial Sequence
  ENSG00000275232_2 (sequence is synthesized)
agagctgagggcgtggggaggtcccagctgcatcacaggagcccctggatccagccgcacctgaaggtagctacccttgcacctctgagttacatgaaccaataaatccctttcattctt

SEQ ID NO: 945990 - DNA, 120 bp, Artificial Sequence
  ENSG00000275236_0 (sequence is synthesized)
gggtaggaccagtttataaagggcacaggatttttattgtaagtcagaaagtgatatgaaagaagtgacatttttagaagattaatctagtagtagtatgcaaagtagattcacagaaag

SEQ ID NO: 945991 - DNA, 81 bp, Artificial Sequence
  ENSG00000275236_1 (sequence is synthesized)
attaatctagtagtagtatgcaaagtagattcacagaaagagagctagtgctggatgtggtggagttcaagaccagcctga

SEQ ID NO: 945992 - DNA, 120 bp, Artificial Sequence
  ENSG00000275236_2 (sequence is synthesized)
tttttttttaagagaacaaggaatcaggaaagctctgttaggaggaattttaaataatttagtatgaggtgacaaatacctggggtggcagagggaacagaaaaagaaacagggagatgc

SEQ ID NO: 945993 - DNA, 120 bp, Artificial Sequence
  ENSG00000275236_3 (sequence is synthesized)
atttcagagaaaaatggacagaaaatggtgattgattgcctgtgaaagatgaaggaatggataataaaaaattacttcaaagttccctggctgggtggcatggctcaaggccaaggtaag

SEQ ID NO: 945994 - DNA, 88 bp, Artificial Sequence
  ENSG00000275236_4 (sequence is synthesized)
acatttcaagaccttgtctctgcatggtggcatgcacctatagacctatagtcccagctactacttgggaggctgaggtgagaggatt

SEQ ID NO: 945995 - DNA, 83 bp, Artificial Sequence
  ENSG00000275236_5 (sequence is synthesized)
aaaaattagccaagcatggtggcatgcacctatagacctatagtcccagctataggagtatgaggttacagtgagctatgatt

SEQ ID NO: 945996 - DNA, 120 bp, Artificial Sequence
  ENSG00000275236_6 (sequence is synthesized)
aaaactcctgctgtttcataattttcttttttaatttttgaaaatatacttaccaaaaagatctaaaagcatgctttctgttcctaagagtaatgtccactcattgttagaacttcacgt

SEQ ID NO: 945997 - DNA, 120 bp, Artificial Sequence
  ENSG00000275236_7 (sequence is synthesized)
agtacagaaatataaaacttataaagtaaaaatctcccataatcccaccacccacatataatcacccctaacagttcggcatgtgttcttctagatgaaatgtttgtttgaaagttctga

SEQ ID NO: 945998 - DNA, 120 bp, Artificial Sequence
  ENSG00000275236_8 (sequence is synthesized)
agaacctgatttcagagtgtagtagcggccattgtgcctctttgttttggggttactcgacttgataacacttctcatttttaattttaatcacctaatctcataactaattgtaggcat

SEQ ID NO: 945999 - DNA, 120 bp, Artificial Sequence
  ENSG00000275236_9 (sequence is synthesized)
aattagttacacattttgtggttgagtcccacaattgctcaggagccttcagctgtgcatctttgaagactgaccaggagacttttgctctgagtcttggccttcttccagtgtaatcag

SEQ ID NO: 946000 - DNA, 120 bp, Artificial Sequence
  ENSG00000275236_10 (sequence is synthesized)
ggagcttttgatattctttctgtgtcttgtcaatccctttcattacatgtacttttcttacttttgggaacattgctttgggttttcttcatttcttttaatatttttgatttgactatc

SEQ ID NO: 946001 - DNA, 120 bp, Artificial Sequence
  ENSG00000275236_11 (sequence is synthesized)
agatgactgctcttgcattctaagatagcagaacttttaggttaagaagatttaagtcagctctcattgtgtgatgtgttaaataaagcatgcttgctggtgtttagtgtctgattcaaa

SEQ ID NO: 946002 - DNA, 120 bp, Artificial Sequence
  ENSG00000275234_0 (sequence is synthesized)
gttgatcttaccttatacattagaaggctctgcacccccttcaagccactcttggcctataaaggagtggacagagaattacccaagggtggtgggatcctgggcatttgagagctcagc

SEQ ID NO: 946003 - DNA, 120 bp, Artificial Sequence
  ENSG00000275234_1 (sequence is synthesized)
gcaaactttcacccctttgactaatataaaatgagtattcctggaggcagtcatccccaaagaaaatggggagtggcaaagcaacagggcaaggtgttcctgtttcaaagcggtgaagaa

SEQ ID NO: 946004 - DNA, 120 bp, Artificial Sequence
  ENSG00000275234_2 (sequence is synthesized)
caaaatcgcacggacaattttgagctgcaaaaattggccccaggaaacttctgagcttgggagataaaaggcagaacctggaattgtagcatccaaggacaaaaagaatgtttgccagca

SEQ ID NO: 946005 - DNA, 120 bp, Artificial Sequence
  ENSG00000275234_3 (sequence is synthesized)
aatcttggctgtcaattttaaaggggccgtgggcggggcggaggggggcgggtaggattccaacaaaaaatgagtataataaataaaaaataaaagggggaagagttgttaatggtttaa

SEQ ID NO: 946006 - DNA, 120 bp, Artificial Sequence
  ENSG00000275239_0 (sequence is synthesized)
gccgcccgggatgagctaataatggaagcaatttgtaactttcagtagctctctaggcctgggtaccggagggagggaggcgggcagaggaggggagatgggcacccccagtctttccat

SEQ ID NO: 946007 - DNA, 120 bp, Artificial Sequence
  ENSG00000275239_1 (sequence is synthesized)
cactcaggcactggcagggtcctttgcccactcctgttggccgctgcggctccaaagcgagctgggcagatgtgcctgacacaggtttgaccaggcaactgaaaagacatctctaagaga

SEQ ID NO: 946008 - DNA, 120 bp, Artificial Sequence
  ENSG00000275239_2 (sequence is synthesized)
agacaaagcaaaggtatgaaaggaacacacgtccctgactgactaggaggaacagagctgcctgctatctggaacaacttcctcccagactaagtgagaaataaacttctgttttctata

SEQ ID NO: 946009 - DNA, 120 bp, Artificial Sequence; identical to SEQ ID NO: 923550
  ENSG00000275239_3 (sequence is synthesized)

SEQ ID NO: 946010 - DNA, 120 bp, Artificial Sequence
  ENSG00000275239_4 (sequence is synthesized)
ctgtgctggtcactgacaagctgtctcatgaaaccttcccagaccctcaacccctcctagtatcttatcctcattttacagatgagaagactgtggcccagagaggtccaatgccagtgg

SEQ ID NO: 946011 - DNA, 120 bp, Artificial Sequence
  ENSG00000275239_5 (sequence is synthesized)
gatcagctttgatgggatgcacacagactgacctcttctccccagcctcttcaacttcccagagctgcagggggcctgggagttcttggtaacagcacattaaacctctgtttgtgggaa

SEQ ID NO: 946012 - DNA, 120 bp, Artificial Sequence
  ENSG00000275239_6 (sequence is synthesized)
tccctgtctgtggttccagagggaagaagagtggggaaaaaaggatgaagagaattgtttcagtgctgggggaggtgagcttatagcagggatttagatgggaattacctcatgggatag

SEQ ID NO: 946013 - DNA, 120 bp, Artificial Sequence
  ENSG00000275239_7 (sequence is synthesized)
gagcagttttctccctctccaggcctctcacagatgtgaaacaactggcagatctgactttcccacccctaaccatcggaggggatgatgtgtcttgaaacctgtgcttctctattgaga

SEQ ID NO: 946014 - DNA, 120 bp, Artificial Sequence
  ENSG00000261276_0 (sequence is synthesized)
tggctgcaagttataaaatgtttattgatatacattttgtcttttataaaacttccgttggccacattgggccactgtgcaccacagtgccagtccccaggtggccagggcggagccagt

SEQ ID NO: 946015 - DNA, 120 bp, Artificial Sequence
  ENSG00000261276_1 (sequence is synthesized)
tttcgggtgggggctggagccaagaggctgtccaggagctgcccagtgggtcctcatggcctgcgggatacctcaagtgctcccggaggcagcctaggactggctcgtcccggagtcaga

SEQ ID NO: 946016 - DNA, 120 bp, Artificial Sequence
  ENSG00000261276_2 (sequence is synthesized)
aaaggcagcctagggcaaggaggggccccaccacctgggggcaacttctgtacaagaggtctctaggggagcagaatgggtgggggagccgggcaggggccacagggtctgtttgctggt

SEQ ID NO: 946017 - DNA, 120 bp, Artificial Sequence
  ENSG00000273550_0 (sequence is synthesized)
cgagtggaaacacttacattaattgtaatacaacatcagtttctcactctgttgcccaggctagagtaccatggtacaatttcagctcactatagccaccacctcccgcgttccagtaat

SEQ ID NO: 946018 - DNA, 120 bp, Artificial Sequence
  ENSG00000273550_1 (sequence is synthesized)
tctcctgcctcagcctctagagcagctgagattacagtcgtgcaccaccatgcccaggaaattgggacacagacacaaagagaaaacaatgtcatgtgaagacagaggcaaagagtggag

SEQ ID NO: 946019 - DNA, 120 bp, Artificial Sequence
  ENSG00000273550_2 (sequence is synthesized)
ggcagttaccagaagcttagagttagggaaggatcatcatctgaagcaagtcctggcctgtcaacatgttgatttcagactactagactccagaaaagtaagataaaaaatctttaatat

SEQ ID NO: 946020 - DNA, 120 bp, Artificial Sequence
  ENSG00000273550_3 (sequence is synthesized)
ttgaaggtgcccaatttgtggtaatttgttcctgcagcctgagcaaactaacaagctcactttcagttcaatttcatggaagaatagaacaatcttttggtcccataacacaactcctca

SEQ ID NO: 946021 - DNA, 120 bp, Artificial Sequence
  ENSG00000273550_4 (sequence is synthesized)
gtggagaactctgagtgattttaaaaagacataccaaatattgtcccttttatgctcaaaatgatccagtatttctatgtcattcttaaaataaaaactaatataatgtctacaggctta

SEQ ID NO: 946022 - DNA, 120 bp, Artificial Sequence
  ENSG00000273550_5 (sequence is synthesized)
agaatgttgaatagcaatgatgaaagaggatctcatgtatccgagtggaaacacttacattaattgtaatacaacatcagttgaaattgggacacagacacaaagagaaaacaatgtcat

SEQ ID NO: 946023 - DNA, 120 bp, Artificial Sequence
  ENSG00000273551_0 (sequence is synthesized)
gacggtttagacgcagcagcaatgattttaagagttgccgtgttaaacggtgatagcctgtgacggtgctgtgtgcggaaacatccgattttattgccgctgggtggacagcgccgtcta

SEQ ID NO: 946024 - DNA, 120 bp, Artificial Sequence
  ENSG00000273551_1 (sequence is synthesized)
gacgccgctcacccttctcaccttcgcagttgtctgtgtggaagacgggagaggcaggggcaccacgccactgtccccaagaccggcccccaggcactgcgcggaagaggccgtggcctg

SEQ ID NO: 946025 - DNA, 120 bp, Artificial Sequence
  ENSG00000273551_2 (sequence is synthesized)
ggctgggcttgggagtgcttgaaggatcactgggctgtggaggggcccgcaggccgcctggggacctggggagggaagctccgggcctttctctggctctgcagacgcacggcctgggtt

SEQ ID NO: 946026 - DNA, 120 bp, Artificial Sequence
  ENSG00000273551_3 (sequence is synthesized)
caaatgccagctccaccacttcctggctgtgtggccttggacatgtgtcttaccctctctgagccttaaatttccttctctggaaaatcaatgcttcatcaaataaaaagtgatcatgaa

SEQ ID NO: 946027 - DNA, 86 bp, Artificial Sequence
  ENSG00000261270_0 (sequence is synthesized)
tgctctttttgtttctcaggctggagtacaatggcacaatcactgcaatctccgcttcccaggagaattgcttgaactggggaggc

SEQ ID NO: 946028 - DNA, 63 bp, Artificial Sequence
  ENSG00000261270_1 (sequence is synthesized)
gaataaatacataataaatagtatgtattctggcactttcgatacaaggaattcatggcttgg

SEQ ID NO: 946029 - DNA, 120 bp, Artificial Sequence
  ENSG00000261270_2 (sequence is synthesized)
gtattctggcactttcgatacaaggaattcatggcttggttgtatggtcccaagaacatatcaatcctgtgttaatataagaatattatcttgtcctctagataagctaccttaccttcc

SEQ ID NO: 946030 - DNA, 120 bp, Artificial Sequence
  ENSG00000261270_3 (sequence is synthesized)
aggctcacaaaccacaagtatgtagccatactgaggcatggaacagaaaactgtatttgttttgaatgagaacacatttgcctttatcagaccacagctgccttccagggtaaagtcagg

SEQ ID NO: 946031 - DNA, 120 bp, Artificial Sequence
  ENSG00000261270_4 (sequence is synthesized)
cactgactgttagcatggccctgaaaggcaagggaaccttcacatacctgacatttggttttagctgtggcccgaagcagtagttctcaactgggggtggttttgtaccctctctcccca

SEQ ID NO: 946032 - DNA, 120 bp, Artificial Sequence
  ENSG00000236069_0 (sequence is synthesized)
aacttaggtcacccacgttaacttaggacgtttctgttgactaactttgggcgttctatttattaaaatttgaaagtcataaatgctgggcttaaaagaaaagaatctctcagaacctga

SEQ ID NO: 946033 - DNA, 120 bp, Artificial Sequence
  ENSG00000236069_1 (sequence is synthesized)
aatgaaaatttagcattatatgacagttttgagaaaaatgattcagagttctttaaaaattaaacttcccaaatgattctagattgaattatattctgaatacctaatatctgcagatta

SEQ ID NO: 946034 - DNA, 120 bp, Artificial Sequence
  ENSG00000236069_2 (sequence is synthesized)
ctgttttagatgctatagagacaaaaagtaggtatattagccttctaatccttaaagaatctgtagtccaattggggaagtaagcacaaggcaggtgaaaaagagaaataataaaacaaa

SEQ ID NO: 946035 - DNA, 120 bp, Artificial Sequence
  ENSG00000236069_3 (sequence is synthesized)
gcagcatacaataaatttccaaatgactaatgccaataatcagagatatgtgtgcaattagataacaataactgagttagagccatctagaaagaaatcgtacttgatgtgagtcttgca

SEQ ID NO: 946036 - DNA, 120 bp, Artificial Sequence
  ENSG00000236069_4 (sequence is synthesized)
gaagggaataatttggataaaacaggagaataattggtgtataaaggagaaagaagagtggagcaaaaacataggtgtagataagcttcagagaaatttaggaagcagggatcagactcc

SEQ ID NO: 946037 - DNA, 120 bp, Artificial Sequence
  ENSG00000236069_5 (sequence is synthesized)
agacaaacaagaacatgaatgcaaagccatggagttcagacctcctcccacagacaaacttctgtacaagggctgaagacaggacaagatgtgctgatgtataaaaagtctaaatctgca

SEQ ID NO: 946038 - DNA, 120 bp, Artificial Sequence
  ENSG00000236069_6 (sequence is synthesized)
gcataatcgtgaagagatgaggaaagccacgtactcagagcctcacttaaaggaaatgaaacagtaaaactgaatcagatttggctcttcacttctgccttcagtgctgtccagactcag

SEQ ID NO: 946039 - DNA, 87 bp, Artificial Sequence
  ENSG00000236069_7 (sequence is synthesized)
ttggctcttcacttctgccttcagtgctgtccagactcagacattatatcattctagatccttcggcaagaagaacaaagctggagg

SEQ ID NO: 946040 - DNA, 62 bp, Artificial Sequence
  ENSG00000236069_8 (sequence is synthesized)
tgtaccaaaacagatgtatagaccaatggaacaaaacaaaggcctcagaaataacaccacac

SEQ ID NO: 946041 - DNA, 120 bp, Artificial Sequence
  ENSG00000236069_9 (sequence is synthesized)
gaagaaccaggaatggaaaatgaaaaggaaaagccagtgaagtcaaaggtaaaccaggtttgtcctggaagacacgtgaaagaacttgccaaggaggaagtaatagtcaattttgtctga

SEQ ID NO: 946042 - DNA, 120 bp, Artificial Sequence
  ENSG00000233017_0 (sequence is synthesized)
tggggggaaggatcaagccccccgtctttcctccacatggtctcactgctagtcaccctattttatgttctcatgatttttatttgtatagcttcatggggtttaagtacgatgatgctg

SEQ ID NO: 946043 - DNA, 120 bp, Artificial Sequence
  ENSG00000233017_1 (sequence is synthesized)
cattgagacgttgtactgtgtgaagtcagggccttctgtgcatcggtcgagggtgcaatgcacacggcacccccgagcagccacccatcctcccttccctccaccctgcgaggccccgtt

SEQ ID NO: 946044 - DNA, 120 bp, Artificial Sequence
  ENSG00000233017_2 (sequence is synthesized)
ggtgagcatgcttcctgctggatgcttctctatgtaagcacctgcctgagtgtcagccctcttaaggtgaaccgctccgtgtcattcgtacattcacaagtttgtgccgccatcatcgtg

SEQ ID NO: 946045 - DNA, 120 bp, Artificial Sequence
  ENSG00000233017_3 (sequence is synthesized)
atcggattccaaaacattttcatcacctccaagaaagccttgtacctggcagcagtcactgtctctatggatttgcttattctggacatttcataaaaatagaatcaaacagcatttggc

SEQ ID NO: 946046 - DNA, 120 bp, Artificial Sequence
  ENSG00000233017_4 (sequence is synthesized)
ggccttggtgatacaggacagaggtgcccgtgcaggttgtgcctgtggctgggtccccagggagaaggtggcaaccccaggccagcagcctcctaccctgaactccaggcaacatcgtcg

SEQ ID NO: 946047 - DNA, 120 bp, Artificial Sequence
  ENSG00000233017_5 (sequence is synthesized)
ggggcttgcaggggtgcctgggtcgggggctgcaggtgggagtgagcaaatgtgctgtctcgccacctcgggacaggtggtagggcctctgacacagagtggtccttcctgctgttcaca

SEQ ID NO: 946048 - DNA, 120 bp, Artificial Sequence
  ENSG00000233017_6 (sequence is synthesized)
gctcagctcaccgtgggctgaccatagattctcgttgaaatcctaacgccccaggcaatgatgttaggaggcggggcttctgggagatggcaagttcgtgaggctgcagctctgctgggg

SEQ ID NO: 946049 - DNA, 120 bp, Artificial Sequence
  ENSG00000233017_7 (sequence is synthesized)
ggtgccgtctatgaaccgggaagtgagtcctctccggacgtggaacaagttggtgccttgattttgaacttgcagcctccagcacggccactagcacgtttgaagtcacacacagggtag

SEQ ID NO: 946050 - DNA, 120 bp, Artificial Sequence
  ENSG00000233017_8 (sequence is synthesized)
cgccggcctggacagaggcggacatctgacaagcgggccaatgaggatgacatctcggacggtagtcactgctacaacgaaagtcagtgccccaccttgcccagccgcagggtggaccct

SEQ ID NO: 946051 - DNA, 120 bp, Artificial Sequence
  ENSG00000233017_9 (sequence is synthesized)
aagcagctcgccccacccagccggtcctgcctgctctgtccctcccaaccctgcaatgggcagatttctggggggcagtctctgacccactgtggcccaggtacagaaccccgccttcaa

SEQ ID NO: 946052 - DNA, 120 bp, Artificial Sequence
  ENSG00000233016_0 (sequence is synthesized)
gtgcgccggaggctgccgtggcgggtgggccgcctgacttctcctcccggccagttctcgagcgcctcaccgggcctcgccctgcagcctcgctctcgctggcgctgcgcggcctagggg

SEQ ID NO: 946053 - DNA, 80 bp, Artificial Sequence
  ENSG00000233016_1 (sequence is synthesized)
actgggctgctggcctccgggtgcggggtgggggcaggctccgacctggggcgtcctggccgcgcgagccgcgggatggg

SEQ ID NO: 946054 - DNA, 120 bp, Artificial Sequence
  ENSG00000233016_2 (sequence is synthesized)
gtggagagggcgctgccggccctgcgcggtttccagccaggaagcttcgggaagcctggacgtctgctcactggagatgacacgtgcgtggggtgttggcattcttgttatttaacacgg

SEQ ID NO: 946055 - DNA, 120 bp, Artificial Sequence
  ENSG00000233016_3 (sequence is synthesized)
gaaggaggtgacttcgcctgtgatggacttccagtgtgagcactggccagagtgaccaggctgaccagcaccagccctgatccagatgcagaggccaggatgtgggcccagccctgtgcc

SEQ ID NO: 946056 - DNA, 120 bp, Artificial Sequence
  ENSG00000233016_4 (sequence is synthesized)
ctctgggaccactggcactcagggtgtttgcagcctcagagcccacctgcccccagggccacagctgcatctcctgccctgctgtcattacagggatgggcaggctggcatgggggcagc

SEQ ID NO: 946057 - DNA, 120 bp, Artificial Sequence
  ENSG00000233016_5 (sequence is synthesized)
cgctgcccctgcctgggtgttgctgtgtattcctgccggccaggggccactgccaggaccacgcctcccttttcatatcccgattcttaagttctgctattgtggtattctggtggagaa

SEQ ID NO: 946058 - DNA, 120 bp, Artificial Sequence
  ENSG00000233016_6 (sequence is synthesized)
aaaagaaccgcgtggctgtttttgaactgcctggaacctaagaccctgaattcttttcccccccaaggggaaaatctatatggaaaacatttattttaaaatacaggatgaagtgaatta

SEQ ID NO: 946059 - DNA, 120 bp, Artificial Sequence
  ENSG00000233016_7 (sequence is synthesized)
aaagatttaaatgcacatttctttaaggataatatttctgtgttggcaaaatttgagagtaaattggtcttgaatggaatggattgtcttgactcacacattgcggagcagagcccgccc

SEQ ID NO: 946060 - DNA, 120 bp, Artificial Sequence
  ENSG00000233016_8 (sequence is synthesized)
tgaagaaaggtgttgctgtggtgggatcttcccacgagggtccttgcctgttctcctaggggatggttgctgggtgccctgggctactggggagagcgtacggggctggagaagatggcc

SEQ ID NO: 946061 - DNA, 120 bp, Artificial Sequence
  ENSG00000233016_9 (sequence is synthesized)
ctcctgtgcaacatcttaagtgactggagggaccagtcggtcttgtgttcacattgaggctagaagctgtctccaggggagtaaaaacggattatttagtcttcaacaggacactgcccc

SEQ ID NO: 946062 - DNA, 120 bp, Artificial Sequence
  ENSG00000233016_10 (sequence is synthesized)
tagaggcgttgcagctgtggctgccgtgtcacatctgtgtcattaggtggcagagattagagaggctatgtctacgctcagcgttctgccccgtgaacgtttgaatgtttgatagtctca

SEQ ID NO: 946063 - DNA, 120 bp, Artificial Sequence
  ENSG00000233016_11 (sequence is synthesized)
cactcctgttttgtggacaggcatctgttttccttcgctggtatctgggagagagggtgggccctgtgagtgggctttctaactctcgcgctgggctaggctggcctctaggggtctgaa

SEQ ID NO: 946064 - DNA, 120 bp, Artificial Sequence
  ENSG00000233016_12 (sequence is synthesized)
gggatagtgggaaggtggagggtgccttcaccaggagcagccttcatgagtgagttttaagaacctgtgaggatcggtcaggtcaggtgaggtacgcgctggatcatgccgtacaccgtg

SEQ ID NO: 946065 - DNA, 120 bp, Artificial Sequence
  ENSG00000233016_13 (sequence is synthesized)
gatctgcccgcctcggcctcccaaaaaacgcagtgtttatgtgatgctcctctgtggtgtttgcaagatttatacaaaattgcggtttctttttttctctaggacgtctgctcactggag

SEQ ID NO: 946066 - DNA, 120 bp, Artificial Sequence
  ENSG00000233016_14 (sequence is synthesized)
gagccctgacgggacagcagcagcaggaactcgttacgctgcagcagggcccacacggacttggcttccgccagggacacccggttgtccttgttgaagtcagccatgagcaggacctgg

SEQ ID NO: 946067 - DNA, 120 bp, Artificial Sequence
  ENSG00000233016_15 (sequence is synthesized)
ccaaccagcgccggcagggaaggcaggtctcccaggttcgcctggcgtttgggaccaaaagaaaggaaaagccagctgatttgatgtctgggagcacgacctggcctttacctggtcctc

SEQ ID NO: 946068 - DNA, 120 bp, Artificial Sequence
  ENSG00000233016_16 (sequence is synthesized)
ctggcggggtggtctgccggccagaccagcacatctgccaggttaggggtcccagcccacagctacacgggtggaggacgcagccagcaatgtgtcagctcactctgctggcctgtgtgg

SEQ ID NO: 946069 - DNA, 120 bp, Artificial Sequence
  ENSG00000233016_17 (sequence is synthesized)
ctgctgccagacagacctcccgcctcctggcagccttgggtgcacctggggagctcgggggtgggcacctgggcagagaagcctcagagcttccctgaggatgagaatcggcacagggca

SEQ ID NO: 946070 - DNA, 120 bp, Artificial Sequence
  ENSG00000233016_18 (sequence is synthesized)
gctggacacacggcccttgactgcaggagcctcccctcgacctcagctgccagcccaccggcgcccccaacccttgcccccagccctggagaggctccttccctggcagggctcatgccc

SEQ ID NO: 946071 - DNA, 120 bp, Artificial Sequence
  ENSG00000233016_19 (sequence is synthesized)
aggggctgggggatgggaggtctgcccagggtccacttgggcccatctgtgcctttgcgctgggcatgttggtgccagggccgcctgctgggcatatgaccgtggtgtggactcctgccc

SEQ ID NO: 946072 - DNA, 120 bp, Artificial Sequence
  ENSG00000233016_20 (sequence is synthesized)
tgccccctaggagagctgcctgaccttgaggaagctgagggtcatctcccggaattccttgatggaggtgccccgggtgggcttgtcaaacagtaccagctcccgccggggggccgcatc

SEQ ID NO: 946073 - DNA, 120 bp, Artificial Sequence
  ENSG00000233016_21 (sequence is synthesized)
cgaccgggccttggagtcgagggtctcctcaatgccacacttgatggttacatccttgtcccgccagagcccgctgtacacctggacagggccacagaggtcctccgtgcagacatcccc

SEQ ID NO: 946074 - DNA, 120 bp, Artificial Sequence
  ENSG00000233016_22 (sequence is synthesized)
ctcccactgcacgggcagtatcagccccaggcccacccgccctgccagtggctatacctgctggcccggggccaccgagaggcaggtcctccactccaccatatgcagctcacacaggtc

SEQ ID NO: 946075 - DNA, 120 bp, Artificial Sequence
  ENSG00000233016_23 (sequence is synthesized)
ctggcagacggagcccgagatgatccccttgcggtactggtcacactgaggagacaggtgcaggcgtgccgggcggggcagccacacccctgccccactgagcccctgcccacaggcccg

SEQ ID NO: 946076 - DNA, 120 bp, Artificial Sequence
  ENSG00000233016_24 (sequence is synthesized)
aagctggcaggggcctccacttgctgcagttggaaagctgccagcccctcacacaggcagtgccggggccctgggtcatgccattggtggctgcaggatggggctgtcggctgcaggggc

SEQ ID NO: 946077 - DNA, 120 bp, Artificial Sequence
  ENSG00000233016_25 (sequence is synthesized)
agccccgccaaccctccggtccggtcccgtccccaccatcctggctcctgtaacaggacggcacagcaaaggccactgcctggacatgagacacacaccacacccagtgtcgaccccacg

SEQ ID NO: 946078 - DNA, 120 bp, Artificial Sequence
  ENSG00000233016_26 (sequence is synthesized)
ccagggccagaggcaggaacctggaggcagctctccgcccagccgacccagctctggaccatccaggcattggccggtgaactagaattcacactagtccctaatatctacaccaccagc

SEQ ID NO: 946079 - DNA, 120 bp, Artificial Sequence
  ENSG00000233016_27 (sequence is synthesized)
tgccacacgcgcgctctctgcctgactcttcattcctgcctcgggtgacgccaggagggaggatgcaccccctgactcatggcgccctccctgcccggaatagtaagtgagacatttctg

SEQ ID NO: 946080 - DNA, 120 bp, Artificial Sequence
  ENSG00000233016_28 (sequence is synthesized)
caggtaagaggtgaggcggaggcttgccctccttccctgcctgccgggtgcgtgtgagcggctgccctgcggatgctgtcctggacctgttggcaccacagacagttgctctgctgtgcc

SEQ ID NO: 946081 - DNA, 120 bp, Artificial Sequence
  ENSG00000233016_29 (sequence is synthesized)
tgtggcctcggggcaaagagaaagtggcgatttctacactcagtgctcgggaaccagtgggcactgagaatggtttatggcctgacattacttgcaaccaaagccaggcagcatttggat

SEQ ID NO: 946082 - DNA, 120 bp, Artificial Sequence
  ENSG00000233016_30 (sequence is synthesized)
tttcgcttttggaaaccaccttacctggtttgctccatgagggaggggcagcaacatcgctgggaaccctgaggtgtagatatgtataaatgagctgtgtgtgtatctgaagctcgggca

SEQ ID NO: 946083 - DNA, 120 bp, Artificial Sequence
  ENSG00000233016_31 (sequence is synthesized)
cttgtggggttaccaggagtgtgcgtctcactcccaggcctcgttctggaaacgattctgtaggtctgtctgggaggccttaggcaagtttgattaagaacagtcgagctggataaacag

SEQ ID NO: 946084 - DNA, 120 bp, Artificial Sequence
  ENSG00000233016_32 (sequence is synthesized)
gctgttccttgtccagcactagtcatcccaggggggcgggggcggggctgcaactcctgtgcacaaaggaagggccctgggtaggggtcaggagctgccttgcccagagatgtgtctggg

SEQ ID NO: 946085 - DNA, 120 bp, Artificial Sequence
  ENSG00000233016_33 (sequence is synthesized)
tcactttggaaacaggaatcctctccccaaaatgggtagcaatgggggtacagaggccaaagacgcagctgcatgtcctgcagtgcctgggacgccccgtagtgaagagtgatgtggccc

SEQ ID NO: 946086 - DNA, 120 bp, Artificial Sequence
  ENSG00000233016_34 (sequence is synthesized)
tgtggcccaaatgtcagcagtgccagtgtcagactcctgctaagagacagtatcaagaaagataacttcaaaatacactttctggaggcctggcgcggtggctcaggcctgtaatcccag

SEQ ID NO: 946087 - DNA, 86 bp, Artificial Sequence
  ENSG00000236065_0 (sequence is synthesized)
agggcctgggccatggagcttgcagaggcaaggatgaagatgaggaatggatgcctgtcaccaagttgggctaccaatctagccct

SEQ ID NO: 946088 - DNA, 120 bp, Artificial Sequence
  ENSG00000236065_1 (sequence is synthesized)
tctccttgaccatcgaggagtctgagatcattgactttttcctgggggcatctctcaaggatgaggttttgaagaccacgcccgtgcaaaagcagacctgcgctgaccagcataccaggt

SEQ ID NO: 946089 - DNA, 120 bp, Artificial Sequence
  ENSG00000236065_2 (sequence is synthesized)
tcaagaaacctgtgtttgcatttcagatgtctcttaacttactgaggaaatcattaccaacctcactgggtggacaggaggatgaacaggagaacttcagcaaattgtagttcttgttct

SEQ ID NO: 946090 - DNA, 120 bp, Artificial Sequence
  ENSG00000236065_3 (sequence is synthesized)
atccctgaactaacccaacattcaaagtcactcatctgatgcttcccacctggcaccctgcacttgtatgtatttttccattcatattcatttctgcctcttcatctagattacacagca

SEQ ID NO: 946091 - DNA, 120 bp, Artificial Sequence
  ENSG00000236065_4 (sequence is synthesized)
acaatgtaaattaatgactactcaagagtcagacagacatgagttcaaatcctacctttgctacttactacatgtgtgtcctgaggcaagataaagcctctgagctcagtttctctgtca

SEQ ID NO: 946092 - DNA, 120 bp, Artificial Sequence
  ENSG00000236065_5 (sequence is synthesized)
gtaaaaaggacctatctcctagtgttataggattaaatcagatgatacatgtaaaatctttagcttgggggtctgtcacgtaactgagcaatgggtgactatgttgtaattattacaccc

SEQ ID NO: 946093 - DNA, 120 bp, Artificial Sequence
  ENSG00000236065_6 (sequence is synthesized)
tcctgacatgcacacggtaggagaaaaatctaacctggggcagtagatagcagcagaaagagcaggagctttggagtcattcagatgcaagctctgtaaattacttgctatgtagcctag

SEQ ID NO: 946094 - DNA, 120 bp, Artificial Sequence
  ENSG00000236065_7 (sequence is synthesized)
agaacaagccattcaaacttcagtttctccaactgtaaaaggggaaataagagtgtgggtctcagagatgttgcaagtatcactgcaatgacataactgatgcatctgacccataagact

SEQ ID NO: 946095 - DNA, 120 bp, Artificial Sequence
  ENSG00000236065_8 (sequence is synthesized)
gcctaagcgtgcctggcctcgaagaattgggcataagtttgacacatggaagaaatgaggaggggttggcaaaaaaaccaagaaacatacctttggttttgaccacaccgaaggagcatc

SEQ ID NO: 946096 - DNA, 120 bp, Artificial Sequence
  ENSG00000236065_9 (sequence is synthesized)
caaccccaaaagggaggcaaggaaataaagttatttaaataaaataacaaacccaggtattatagatgttttaaaacattacattgatgcaaaagcgagtagttttgaaatatttaacta

SEQ ID NO: 946097 - DNA, 120 bp, Artificial Sequence
  ENSG00000236065_10 (sequence is synthesized)
ctttagttaaaagtgaggagttttaaaaggaaacattatttcagtcatgcaacataaagcacataaaatactgagttacgcaggtataacaaagtatagcaggaagaaaacaaacattac

SEQ ID NO: 946098 - DNA, 120 bp, Artificial Sequence
  ENSG00000236065_11 (sequence is synthesized)
tgagcaggcactaggcactaaccccaggttagggattttacatgtaagattgcaaacatctgccagtgggagccaagcaggcaatgcaactgtatgaaatgagtcaaatgtaagcaatgg

SEQ ID NO: 946099 - DNA, 120 bp, Artificial Sequence
  ENSG00000236065_12 (sequence is synthesized)
gcagtgaagaggaccgtgcaggggacaggaagacacacagaccatccaaagcagcaatgccacacaactgcaagtgactgctgccacactggaatggaggcatcactgccaggtcttctg

SEQ ID NO: 946100 - DNA, 120 bp, Artificial Sequence
  ENSG00000236065_13 (sequence is synthesized)
gtttctcaagagaaactggagctctggatttttaagagaaattgcataaccgaaaacgctctgtggtcaacctactattttgaaagctgacaaagagaataaatcaagcatttatcctga

SEQ ID NO: 946101 - DNA, 120 bp, Artificial Sequence
  ENSG00000236064_0 (sequence is synthesized)
aatggctggcttctggagccgacccttccacgcgcccccagcttcgcggcagctaggtccctccccagcgcgctgagctcacagcgcaggagccggtcgcagccacacaggccggtccga

SEQ ID NO: 946102 - DNA, 120 bp, Artificial Sequence
  ENSG00000236064_1 (sequence is synthesized)
cgggaccactgcttccctcctcacatcccaggagacaccaggtggggcgtggcacctcccacacacggctggagggactcccaggatttcccgtccttccgaattcgtggggggtcagag

SEQ ID NO: 946103 - DNA, 120 bp, Artificial Sequence
  ENSG00000236064_2 (sequence is synthesized)
gactgcggggaggcgtttctcatcctcgctggggaaaggactcacctggttcccaaagccagtttgctcttcctctacttcctgccagaggtcgtaggatttctgatgatctgccctgat

SEQ ID NO: 946104 - DNA, 120 bp, Artificial Sequence
  ENSG00000236064_3 (sequence is synthesized)
gtcccaacattcttggggagcctggccttaaagaacaatggaaagaagcagtcataggaatcctggaccaggaatatgtgcctgagagggattatacacctggtgctgacggagtcttgc

SEQ ID NO: 946105 - DNA, 87 bp, Artificial Sequence
  ENSG00000236064_4 (sequence is synthesized)
gagtgcagtggcatgatctcggctcaattagcctcagcccccaaacccccccaaccccgccgagtagctgggactataggcatgcgc

SEQ ID NO: 946106 - DNA, 120 bp, Artificial Sequence
  ENSG00000236064_5 (sequence is synthesized)
ctcctaaagtgctaggattacaggtgtaagccaccaagtaactgtttggaacatggaagaaaaaggtgggagatataacctatgtttttcatctggtattttatgtacatagctataaaa

SEQ ID NO: 946107 - DNA, 120 bp, Artificial Sequence
  ENSG00000236064_6 (sequence is synthesized)
ttttttgtgaaatgaggcagaaacctcctttctatctcgtcagaaccatgtaattagatcttaaaaagactgaagaaataatcgattcctactccatcacttaagagacagaaatatggg

SEQ ID NO: 946108 - DNA, 120 bp, Artificial Sequence
  ENSG00000236064_7 (sequence is synthesized)
gcctagagaggggagaggcttatccagcatcacattgctactaaatgacagggcaaggcttgagccagatcttctgagtcctatccagtgttctttccaatctactgcttgttttgtaaa

SEQ ID NO: 946109 - DNA, 120 bp, Artificial Sequence
  ENSG00000236064_8 (sequence is synthesized)
gaaatatgaacatttatgtccacacaaaaaccttacacgaatggtcataacagctttgtttctattagcaaaaaactggaaacaactgaaatgctcttcaccgtgggcacatataaacaa

SEQ ID NO: 946110 - DNA, 120 bp, Artificial Sequence
  ENSG00000236064_9 (sequence is synthesized)
attgtagaatattcacatagtagaatactacttagtaataaaaaataaaaaactattgatgtacacaacaaattcagtggctctcagggccattatgatgagtgacatagcaaatcacag

SEQ ID NO: 946111 - DNA, 120 bp, Artificial Sequence
  ENSG00000236064_10 (sequence is synthesized)
tattttacatactatatgattccatttacataacattctagaaatgagaaaattatagtaatgatgaacatatcagtggttgctgggggacagatgtgcctataaagaagtagcacaaat

SEQ ID NO: 946112 - DNA, 120 bp, Artificial Sequence
  ENSG00000236064_11 (sequence is synthesized)
gagttttggggggatgataaaacaataatgtcctaattacagtggtgattacaagaatctataaatgtgataagattaatagaactatccaccccccccccaaaaaaagttgagtgcatg

SEQ ID NO: 946113 - DNA, 120 bp, Artificial Sequence
  ENSG00000236064_12 (sequence is synthesized)
caaaagctggtaaaaatcaaatgaggtctatagtttgctcaatagaattattgtaccaatgacagtttcctagttctgatagttgtgtggttatgtaagatgttaacattagagaaggtt

SEQ ID NO: 946114 - DNA, 120 bp, Artificial Sequence
  ENSG00000236064_13 (sequence is synthesized)
agttaaatgtatgtgggaactctctgtattattttagcaacttttatgtaagattaaacttatttttaaaaagaaaaaagaaagaaaactctctagaagtcccataatgttttaggcagg

SEQ ID NO: 946115 - DNA, 120 bp, Artificial Sequence
  ENSG00000236064_14 (sequence is synthesized)
aagtcccataatgttttaggcaggcctggtcaaccaacatttctgtagttttctgaagttctaatatatcttcaggcctttgctcaactggcgttctctctctctctctctctttcacac

SEQ ID NO: 946116 - DNA, 120 bp, Artificial Sequence
  ENSG00000236064_15 (sequence is synthesized)
acacacactcaccccactctgtaacctagtttatttttatccgtaatacttataatccctaataaaaatatgtttgtttattgtgtgtctcctcccattagaatgtaagctccttaagtt

SEQ ID NO: 946117 - DNA, 120 bp, Artificial Sequence
  ENSG00000236064_16 (sequence is synthesized)
taagcactttttgttcactgtatccctaacacctagaatagtgcttgtcacacagtaaatgctcagtaaatatttgttgaatgaatgaatgtgtgtaggcattgaaataaaggtattatg

SEQ ID NO: 946118 - DNA, 120 bp, Artificial Sequence
  ENSG00000236064_17 (sequence is synthesized)
taaaaggattgagaagagccagaaggaaatcaacctgcccatggagcttctgggatggattaagccattgtatcacagcagttctggaaagaagaaaaaggtggcacacaaaatatacag

SEQ ID NO: 946119 - DNA, 120 bp, Artificial Sequence
  ENSG00000236064_18 (sequence is synthesized)
gaaagtgttttaatttactcagtgccctaaaagctaagaacaagactaaataagtaaaattgaaagggctatactacattcatttgtattttctgcactgcatgctgctctataaatact

SEQ ID NO: 946120 - DNA, 120 bp, Artificial Sequence
  ENSG00000236064_19 (sequence is synthesized)
ctttctcactatatactgttttccctaactagactgaaagttcctggaggtcatcaaccacatatatttcttttgtagcccccaaatcgcccaccacagagtacacagcgtatgctcaat

SEQ ID NO: 946121 - DNA, 120 bp, Artificial Sequence
  ENSG00000236064_20 (sequence is synthesized)
aaatgctgttgaccaactgattactaagtatttaactatatttgcccctcgctatgttttagaatgcctattattcacagaaccatggagtattggaagcgaagaggaagtattcatctg

SEQ ID NO: 946122 - DNA, 120 bp, Artificial Sequence
  ENSG00000236064_21 (sequence is synthesized)
agatcaagtggttatcatagcaaggtcaaagcatgcccttccttaattagattaaagggagtcttggagctgcctctacctccttcccatgctctccagccgcagcagaaaacattttcc

SEQ ID NO: 946123 - DNA, 120 bp, Artificial Sequence
  ENSG00000236064_22 (sequence is synthesized)
aaccacccatctactgaattctgaaaccttcagcagcaattataacaagctacattaccatagaagtcagctaacaaatctgtagtgatcttaatctctgtttctgttataataggaaga

SEQ ID NO: 946124 - DNA, 120 bp, Artificial Sequence
  ENSG00000236064_23 (sequence is synthesized)
ctgcagctttgtttactttctgaggagaatagagaacagggagaaagaaccatgatagggaggcagtatttatggcccttttatgaaaaggcaatttgtgacaaaaacatttacagacaa

SEQ ID NO: 946125 - DNA, 120 bp, Artificial Sequence
  ENSG00000236064_24 (sequence is synthesized)
taaagaaggggaacaggtttgacaggaaaataccctattccagttttctcagaagcgccttagctggtatcctccgcccccgccgaatgtgaaatgcctggtatacactgtgaatatagt

SEQ ID NO: 946126 - DNA, 120 bp, Artificial Sequence
  ENSG00000236064_25 (sequence is synthesized)
cattccctatagatgaatctggattacatataatgaaaaaattccaaatcacccatcagtgtcttactttcatgactgacagtattctactatacatttcattttctactgtatttttaa

SEQ ID NO: 946127 - DNA, 120 bp, Artificial Sequence
  ENSG00000236064_26 (sequence is synthesized)
gcatttatgaagtctcaagtccctccattaactagatttctaatcctgaggtttgtcctgaaggcttttggagagacaggctctgtgttgaatgaggataataagtaacctggattcacc

SEQ ID NO: 946128 - DNA, 66 bp, Artificial Sequence
  ENSG00000236064_27 (sequence is synthesized)
ctctgtgttgaatgaggataataagtaacctggattcaccgttgttattattaagaggaagttggc

SEQ ID NO: 946129 - DNA, 72 bp, Artificial Sequence
  ENSG00000236064_28 (sequence is synthesized)
cacggtgaaaccgcgtctctactaaaatacaagaaattaggacgggagaatcacttgaacctaggaggcaga

SEQ ID NO: 946130 - DNA, 120 bp, Artificial Sequence
  ENSG00000232767_0 (sequence is synthesized)
cccaccaccgccagcctgcccctcccccacccttcccgcggtcccacctggaaggtgggcgcttcccccagcgcccggcacagcccggaccccggtgtaaagtcgggcatctgcgcagta

SEQ ID NO: 946131 - DNA, 120 bp, Artificial Sequence
  ENSG00000232767_1 (sequence is synthesized)
aacatctggcctcggagctgtcctccgcgccttggctgccccagccaggggaaggatatgcggagggctctaagtcaaagcgggcgtttttgcgggtgtagacactgcggcgcctgggtc

SEQ ID NO: 946132 - DNA, 120 bp, Artificial Sequence
  ENSG00000232767_2 (sequence is synthesized)
tgcagcccctccctccctgtctcctgttaggaggggcagattttcaggtggccgggacaggtgaaggcagagaggagtggctgtccacctggggaagcatcctgaaaacatcacacacag

SEQ ID NO: 946133 - DNA, 120 bp, Artificial Sequence
  ENSG00000232767_3 (sequence is synthesized)
gtcaacgacccctcaggacacaaagggtttcttaggttgttctgcgcagtcacatggcttccagaaccagaacgttcagctcttaaagtctgcacagaagaactgatagaatctgctcct

SEQ ID NO: 946134 - DNA, 120 bp, Artificial Sequence
  ENSG00000232767_4 (sequence is synthesized)
ttcaatggaatctgtgactgtttgggaaggatgtgcatggagaagggtctgatgaggctcctgatccaggcggtccacgtgcgttcagtgtgtttggaccctaggcacctctgtctattg

SEQ ID NO: 946135 - DNA, 120 bp, Artificial Sequence
  ENSG00000232767_5 (sequence is synthesized)
ctcggtcttgcgtacatagtccatagcttggcatcagcacagatcgatgcttagtgagcacaattaagaaaccaaactatggaaaattaaggacagtaacaaaagtatcatcaacaaaaa

SEQ ID NO: 946136 - DNA, 120 bp, Artificial Sequence
  ENSG00000232762_0 (sequence is synthesized)
aggtctctgctgctggaagccaaaataatcaagcagcaggccaactgtgcgtgagggaccctgctagatgctggcacgccctgcagttagcttgaagaggaagccacttttaaacagcct

SEQ ID NO: 946137 - DNA, 120 bp, Artificial Sequence
  ENSG00000232762_1 (sequence is synthesized)
gcccagtgagcactgctggctgcctgaagatgattccactcaccttggtttttcctgcaagtgaaccttcctcccagaactaaggtttggaagatcccagtctgctgcctgacatggcca

SEQ ID NO: 946138 - DNA, 120 bp, Artificial Sequence
  ENSG00000232762_2 (sequence is synthesized)
ttctcccacaaaaacagatcctgactcggagggcagttggttgctagatcacgtctatcagtgcccgacataagggatggcacacagaaaatattcagtgaccgaagttcctcctccctt

SEQ ID NO: 946139 - DNA, 120 bp, Artificial Sequence
  ENSG00000232762_3 (sequence is synthesized)
gctttgtacacaccccacagggagccaggggcctctagaatggcctctcctccacccacgtgcatgggccctggcacaggagaggcgctgaggaggaagctggaaggcacccagccaccc

SEQ ID NO: 946140 - DNA, 120 bp, Artificial Sequence
  ENSG00000232762_4 (sequence is synthesized)
actccagggtgaacgcctcatcatcctgtgttggtggcactcaaccatctttctctaccagactagcagctcggtggaggcaggcactgaggaagcgtgtgctgaaggcatcgcatgcag

SEQ ID NO: 946141 - DNA, 120 bp, Artificial Sequence
  ENSG00000232762_5 (sequence is synthesized)
ctgtctgtgcccaccacctcagccaggaggagtcacgagccccttccctatctgcacacagctcagcctggctcactgcaccaaaaaggcaggcctgagcatggaccacacacagaggta

SEQ ID NO: 946142 - DNA, 120 bp, Artificial Sequence
  ENSG00000258808_0 (sequence is synthesized)
agtctcctcttgcagatcagataccacctctgagatccttctctgctcctcactgaccaaactcaaggaacagatcttccctgcccaggtctccaggaccccaacctacccacttctagg

SEQ ID NO: 946143 - DNA, 120 bp, Artificial Sequence
  ENSG00000258808_1 (sequence is synthesized)
agagaattcacacaggtcttgaggaatagagactacaaacaaatcaagtcttctgtgggaatgctgggccatgggctttggaatcaccaccagtgatggaacccgaagtaagctactaaa

SEQ ID NO: 946144 - DNA, 120 bp, Artificial Sequence
  ENSG00000258808_2 (sequence is synthesized)
tcaattatggatcaacttctgagtcacatagaagagcaccatcaattggccatttctcacctgatcactgaggatataaagtgcttttccagactccaggactcggttcattgctagtat

SEQ ID NO: 946145 - DNA, 120 bp, Artificial Sequence
  ENSG00000258808_3 (sequence is synthesized)
caggacgcctctcatgtatgggaagccagaaacatcccaggagcctcactgactgcttgggcacagccctctgagcagacctatgaagaaacagaaggatttgtgccttttaggtatctc

SEQ ID NO: 946146 - DNA, 120 bp, Artificial Sequence
  ENSG00000258804_0 (sequence is synthesized)
gtgggcgccaaggccgaggaggcgccaagagggagcgagggctgtgaggactgacagcacgctgtcacctcgtctctacttaggtgaatgatgcctttggcctgcttatgtcttccatag

SEQ ID NO: 946147 - DNA, 120 bp, Artificial Sequence
  ENSG00000258804_1 (sequence is synthesized)
ttggcctgcttatgtcttccatagccacaatgaatacagttgcagaaactctcactctttatggaaaatagaagggaatatgtacaagaaacaattactgtatgcagataaggcagatgg

SEQ ID NO: 946148 - DNA, 120 bp, Artificial Sequence
  ENSG00000258804_2 (sequence is synthesized)
tgtctttgacatttcatcaaggcagcagcatctgaaagtttttcaagaaactgccaaactgttctccagagtatttgtaccattttacgtttccaccagcaatatacaagtggatctcac

SEQ ID NO: 946149 - DNA, 76 bp, Artificial Sequence
  ENSG00000258804_3 (sequence is synthesized)
cattttacgtttccaccagcaatatacaagtggatctcactctgtcacccaagctggagtgcacgtgattctccta

SEQ ID NO: 946150 - DNA, 120 bp, Artificial Sequence
  ENSG00000258804_4 (sequence is synthesized)
atttttagtagagacggggtttttccatgatgcccaggctgttggcttttactttgcctttccataatcatcttgtatgtgtgagatacatacatatatatgtgtatatatgtatacata

SEQ ID NO: 946151 - DNA, 120 bp, Artificial Sequence
  ENSG00000258804_5 (sequence is synthesized)
taaccttattatatataattttataatataatcttcatctaattttgatggaaattacattaaacttgtgtaacaattcaggaagaactgatatatttacacctcttgagaccaaatctg

SEQ ID NO: 946152 - DNA, 120 bp, Artificial Sequence
  ENSG00000258804_6 (sequence is synthesized)
ttcttcaataaaaacattgtagtttttgttatataaattctgtatctgttttgttacatttgaacctaaacatttaattttttgagtaattctgaaatgatattgcatttctaattgttt

SEQ ID NO: 946153 - DNA, 120 bp, Artificial Sequence
  ENSG00000258804_7 (sequence is synthesized)
ctcatatattctttgctaatatgtaaaaaaacaatttttttatgtttatcttgtatcctgtgaccttattgaagtcactttttagttctgagagtccctttgtagatttcttgagatttt

SEQ ID NO: 946154 - DNA, 120 bp, Artificial Sequence
  ENSG00000258804_8 (sequence is synthesized)
ctacagagacaatcataccatttgcaaatagaaacagttctattcctacctttctaatacataagcattcatctccttcatctatcatacttgccaaaacttccagcagatgtctttact

SEQ ID NO: 946155 - DNA, 120 bp, Artificial Sequence
  ENSG00000258804_9 (sequence is synthesized)
tttttctttctttctttctttcttttttagcttttcttgttattgtttctatatgctctttatcaagttaagaaagtcctcctctgtctctatgtttcttggaatatatataatgaatgg

SEQ ID NO: 946156 - DNA, 120 bp, Artificial Sequence
  ENSG00000258804_10 (sequence is synthesized)
tgtctctatgtttcttggaatatatataatgaatggatgttaaattttgtcaaatactttttcttgactgatattatcatgtgatttttctttaacttgttaatatgttagattacattg

SEQ ID NO: 946157 - DNA, 120 bp, Artificial Sequence
  ENSG00000258804_11 (sequence is synthesized)
atctttgaatattgtaccagccttgcattcttgtaataaactttatttggttacagtgtataatcaaatatagtgagttatttgaattgaatttgaattgttatagttgaattgtttttg

SEQ ID NO: 946158 - DNA, 120 bp, Artificial Sequence
  ENSG00000258804_12 (sequence is synthesized)
ttaatatttcattaaggattttgtttctatgtataatagggatatttttctgtagattttgtttcgttttggtttttaagtatcagagtaatgccagcttcttaaataaattgtgaagtg

SEQ ID NO: 946159 - DNA, 120 bp, Artificial Sequence
  ENSG00000258807_0 (sequence is synthesized)
gtgtttttacaagaggcacacaaaagagagacacagagagaagatgagaagactgaggcagacattggaatgacgcaaccaggagccaaggaatgcctggatccatgggaagcagaagag

SEQ ID NO: 946160 - DNA, 120 bp, Artificial Sequence
  ENSG00000258807_1 (sequence is synthesized)
gctttctcaccatgtgatgcattctgctatgttatgatacagcaagaagggcctcacaagatgtgacctcttgttcttggacttctcagcctccagaatcatgagaaaaaaaggctcagc

SEQ ID NO: 946161 - DNA, 120 bp, Artificial Sequence
  ENSG00000258807_2 (sequence is synthesized)
actgtgaagactgattgccacctcccccttccccagcaatctcgtggagatctggtcagagaagctgttccatctcccacaaacctcgtggctcagaagcagaggtggaggctgcagacc

SEQ ID NO: 946162 - DNA, 120 bp, Artificial Sequence
  ENSG00000258807_3 (sequence is synthesized)
gcaactgagaaaatgtgaatgaaaccatgaaatactatgcagccataaaaaggaatgaaattatgtcttttgtaggaacatgaatggagctagaagccattattctcagcaaactaacac

SEQ ID NO: 946163 - DNA, 120 bp, Artificial Sequence
  ENSG00000258807_4 (sequence is synthesized)
ctcacttataagtgggagctgaagaatgagaacccatggacacagggaggggaaaaacacacaggggcctatcagggggtgtggtggggggaaggagagcattggaaaaatagctaatgc

SEQ ID NO: 946164 - DNA, 61 bp, Artificial Sequence
  ENSG00000258807_5 (sequence is synthesized)
gtggtggggggaaggagagcattggaaaaatagctaatgcatgcttggcttaagttctact

SEQ ID NO: 946165 - DNA, 120 bp, Artificial Sequence
  ENSG00000258807_6 (sequence is synthesized)
gtctgggagccaaaaggaatatgtgatagtgacttttatcactgttcccccgccaaccaggatccaataacaaagctttgccttcattcgtgcaacttggggtctgctactttggaggtc

SEQ ID NO: 946166 - DNA, 120 bp, Artificial Sequence
  ENSG00000258807_7 (sequence is synthesized)
ttagttcccaaaagaagatccccttctccagagatagaataataatttcattaagttggaaccggagactgcctcttggccctttgggctactcataccagtgaacaagaggcaaagagg

SEQ ID NO: 946167 - DNA, 120 bp, Artificial Sequence
  ENSG00000258807_8 (sequence is synthesized)
agattactaccctgcacttgctgaaatgacgatcctgattatgaggtggaatcaggattgccacaatatgattactcaggaattaggattgccactgtatgatagaaacaggaaggagtg

SEQ ID NO: 946168 - DNA, 84 bp, Artificial Sequence
  ENSG00000258807_9 (sequence is synthesized)
gtgcaacctgctcgggttcccttccacgctgtggaaggtttgttctttttgttctttgccttaaatgctgctgctgctgctcag

SEQ ID NO: 946169 - DNA, 120 bp, Artificial Sequence
  ENSG00000258807_10 (sequence is synthesized)
tgaagccagtgagaccacaaacccactgggaggaacaaacaactccagacgcgcccgcttaagagctgtaacattcaccaggaaggtctgcagcttagagcgagaccacaaaccccccag

SEQ ID NO: 946170 - DNA, 74 bp, Artificial Sequence
  ENSG00000258807_11 (sequence is synthesized)
agctgtaacattcaccaggaaggtctgcagcttagagcgagaccacaaaccccccagaaggaagaaactccgaa

SEQ ID NO: 946171 - DNA, 120 bp, Artificial Sequence
  ENSG00000258807_12 (sequence is synthesized)
gaagtcagtgagaccgagaaccaaccaattccggacacagaacgaatcaaccaaggatggaaagcccctctttgagccgaaggactagaggaacaaaagactcagccccaaggttatccg

SEQ ID NO: 946172 - DNA, 120 bp, Artificial Sequence
  ENSG00000258800_0 (sequence is synthesized)
aggtcttctctatagctccaggtttccaaagtaacaactgtgcatcttctcctccagtcaacaaagaatcatcttgcacattccaacagaaagaacggactgtagcagcatgccctccct

SEQ ID NO: 946173 - DNA, 120 bp, Artificial Sequence
  ENSG00000258800_1 (sequence is synthesized)
cttctttcatgttaactacttctctgacatcctggatgttcaaacgtgtaactggttcatcagtgtccagatgattaagatcccaccaataaaatccttcatcatgtgtcatgcagtaaa

SEQ ID NO: 946174 - DNA, 120 bp, Artificial Sequence
  ENSG00000259423_0 (sequence is synthesized)
aactaagcaaggagtgagagctctgttgttctgctgatggggctcagtctgttcttcctcttttccaacaatcacacttatttccaggaaagagaaacctctacatggatcccttgcatg

SEQ ID NO: 946175 - DNA, 120 bp, Artificial Sequence
  ENSG00000259423_1 (sequence is synthesized)
ggtgttgtacaatgggagctttcattcctgctttggcacctgcaaccctgggttaacagtaccatggagcggagaaagcgtttaccagagtgcggtgccgcgatcccaccccgtgcagca

SEQ ID NO: 946176 - DNA, 120 bp, Artificial Sequence
  ENSG00000259423_2 (sequence is synthesized)
actgccttgatttccgctcaggcaccagcagtcttacccaccattgctttggtgcagttggtggagatatcaatggatcaaaagcgcaagtaatatgagaggccaggaatcaaccaaaag

SEQ ID NO: 946177 - DNA, 120 bp, Artificial Sequence
  ENSG00000259423_3 (sequence is synthesized)
agcaagaaaagaagccactacagtaatgagcttcggctgcctgcacctcttccagccacaaaggaaaaaaaaatgagaaagctgcctctattctacttcttttcaaagctgcccaactgt

SEQ ID NO: 946178 - DNA, 120 bp, Artificial Sequence
  ENSG00000259423_4 (sequence is synthesized)
taatattttagactcggctccctatgcccagtaaatataaattttcagaactgtgatcacagccctggctaaatagtgcccctggtcaaaccttcgtaggcaaaatgttttctccagctt

SEQ ID NO: 946179 - DNA, 120 bp, Artificial Sequence
  ENSG00000259423_5 (sequence is synthesized)
agtaatatgactcggctccctatgcccagtaaatataaattttcagaactgtgatcacagccctggctaaatagtgcccctggtcaaaccttcgtaggcaaaatgttttctccagctttc

SEQ ID NO: 946180 - DNA, 120 bp, Artificial Sequence
  ENSG00000259423_6 (sequence is synthesized)
tgctagttcttagaagccagtgtgaaggaaaagggatgtcatgaagcatcactctccaagctgatcatctattccattgccttgagaattatgtagaataaaatcactgtctccctaaat

SEQ ID NO: 946181 - DNA, 120 bp, Artificial Sequence
  ENSG00000259423_7 (sequence is synthesized)
ggtcttgatccttgaagaaactaagcaaggagtgagagctctgttgttctgctgatggggctcagtctgttcttcctcttttccaacaatcacacttatttccaggaaagagttagcagt

SEQ ID NO: 946182 - DNA, 120 bp, Artificial Sequence
  ENSG00000259423_8 (sequence is synthesized)
attgatatagtccagggactcctagaaacacctgttgtgttgctttggtgagcagatgctgttcatcttccatggcacctgtattttatctgcatggagatgagctcagccagagtactt

SEQ ID NO: 946183 - DNA, 120 bp, Artificial Sequence
  ENSG00000259423_9 (sequence is synthesized)
ctcagagaggataccacgtggatgcaaataagagcagagaaagcaccgagtagttacaatggtccttgctgggtgtttggagaagctaattatttgagagagaaacaagcctaggaaaga

SEQ ID NO: 946184 - DNA, 120 bp, Artificial Sequence
  ENSG00000259423_10 (sequence is synthesized)
caagaagccatgccatgcccaggctttcgatcgctccaccacaggatatcattgtccacaggccctaactttagttcttgatttttccaacctctctttaaagtttattcttattttcca

SEQ ID NO: 946185 - DNA, 120 bp, Artificial Sequence
  ENSG00000259423_11 (sequence is synthesized)
aaacttagaaaccatgcccaatggaatattggctgtgaaatgaatgaatgtgtgtctctgttagatcagccaggctgtttctcttaacacattcccccgacatgattctgagatacatta

SEQ ID NO: 946186 - DNA, 120 bp, Artificial Sequence
  ENSG00000259423_12 (sequence is synthesized)
acatcacaatgctttcttgaccatcgagtcacacagaaatgaaaccagtctgaaaagatttactttccacaaggctatttaagttacgactacaatttttctagagtctcttctagttcc

SEQ ID NO: 946187 - DNA, 120 bp, Artificial Sequence
  ENSG00000259423_13 (sequence is synthesized)
aaagtacacatatatgagttatctttttcttttcaagacgaattttctggttatgctccattgtaaatcccctttcgaagtagaaaggacttgtaaataaataatatgagaaattattgt

SEQ ID NO: 946188 - DNA, 120 bp, Artificial Sequence
  ENSG00000259423_14 (sequence is synthesized)
tacctcagtaggaaggtctgcattcatttatcacatggtaaaactggtcttgatccttgaagaaactaagcaaggagtgagagctctgttgttctgctgatggggctcagtctgttcttc

SEQ ID NO: 946189 - DNA, 120 bp, Artificial Sequence
  ENSG00000265401_0 (sequence is synthesized)
ttaagttggggcaaatggctatagtgcagagtaatgccatcactgggcactgcgaatgccatgactgaagaattaacagccacccctcaggcgcaggaccagctgcttgcctgcaaagat

SEQ ID NO: 946190 - DNA, 120 bp, Artificial Sequence
  ENSG00000265401_1 (sequence is synthesized)
cggtcagggtcttcacgaagatctgcataccacctctcagacgcaggaccaggtgcagggtcgactccttctggatgttgtagtcagaaagagtgcggccatcttccagctgcttgcctg

SEQ ID NO: 946191 - DNA, 120 bp, Artificial Sequence
  ENSG00000265401_2 (sequence is synthesized)
caaagatgagcctctgctggtcgggagggatgccttctttatcctggatcttggccttcacattttcgatggtgtcactgggctccacttccagggtgatggtcttgccggtcagggtct

SEQ ID NO: 946192 - DNA, 120 bp, Artificial Sequence
  ENSG00000265400_0 (sequence is synthesized)
cctctttctcagggcagcagagcgggtgcagattgcaaatccaccaatggtgcacaagaaaccagaagggtgacagaagatggcatctccacgatgatcaacaagaacaacaattcatgt

SEQ ID NO: 946193 - DNA, 120 bp, Artificial Sequence
  ENSG00000265400_1 (sequence is synthesized)
gtgaatcacttctttggcttttggctgagatcaagtgcaatgcacgtgtgacctctcgtcctctggtgtctctgatgattagatgaagacagttgttaaaacaaagtcttgtttcagcac

SEQ ID NO: 946194 - DNA, 120 bp, Artificial Sequence
  ENSG00000265400_2 (sequence is synthesized)
taaaaatacaaaaattagccaggcatgagccaccgtgcctggcccaaatgtcactcttcttataaggacaccagttgtattagattaagggcccaccctactccggtatgaccacatctt

SEQ ID NO: 946195 - DNA, 120 bp, Artificial Sequence
  ENSG00000265400_3 (sequence is synthesized)
ctccggtatgaccacatcttaactaattattgcatctgcaacaacctcatttccaaataaggtcacttttttgaggtgctgggggttaagacttcaacatatgcttttttggggaacaca

SEQ ID NO: 946196 - DNA, 120 bp, Artificial Sequence
  ENSG00000265400_4 (sequence is synthesized)
attcaactcatagcatagggagagaaagtaaaggggtggggggtaacgaaaaggtgagaagtccatcttctgaggtccatcttcccaaaacccctgtttctattctactcagttggtctg

SEQ ID NO: 946197 - DNA, 120 bp, Artificial Sequence
  ENSG00000235085_0 (sequence is synthesized)
gtagaaggttactgtaatattccagacaaatgatgatgcagcttgaagaatgtggtaactgtggcgatacaaagcagtcaaaatcaggaagtactgtgaaggtagagccaacgggatgtg

SEQ ID NO: 946198 - DNA, 120 bp, Artificial Sequence
  ENSG00000235085_1 (sequence is synthesized)
cagagataaagagtggaggaagaaagtgagagccagagagagacagaaacagggaatgaccatttacatatgtacacataggctacagcaagacttcatccccagatccactgtggtttc

SEQ ID NO: 946199 - DNA, 120 bp, Artificial Sequence
  ENSG00000235086_0 (sequence is synthesized)
aagaagtcattctagatttgcatcaggcatggaggagagagattcatcttctttccctcagtttgaaatgaattgcaatgtcaattataaagcttaagtctttttaaaccaaggcagagt

SEQ ID NO: 946200 - DNA, 120 bp, Artificial Sequence
  ENSG00000235086_1 (sequence is synthesized)
gaagatgtttcctttcaggaatcaagctggaattcttatgcaacgttattgactatgataagcccaatcagtttgaacatgaatactgtatccaaaatgggaattctgttggaagttagt

SEQ ID NO: 946201 - DNA, 120 bp, Artificial Sequence
  ENSG00000235086_2 (sequence is synthesized)
tgacacatctaaaaaattcacaccaaaaaaacatggaaacacgtacagagggagaggaacaatgggaagaaaatttctactctgtccattgacccagttctgtatctacagcaaatctga

SEQ ID NO: 946202 - DNA, 120 bp, Artificial Sequence
  ENSG00000235086_3 (sequence is synthesized)
taatagatgatatatatggaatgtgatgagccaaatgaacatcttcaagaatttgtagcatgaccttgttaaaagttgcagaaaaacatcagtcattatggaaaacagatcttccccacc

SEQ ID NO: 946203 - DNA, 120 bp, Artificial Sequence
  ENSG00000269186_0 (sequence is synthesized)
ggcttcatggtggctattttctgaaggtggcaggagaagataaaaccaaaattcagggtttgctttttaaataccatgctagtaaaatcagaacagtaatgacgggaaccaaaagatcta

SEQ ID NO: 946204 - DNA, 120 bp, Artificial Sequence
  ENSG00000269186_1 (sequence is synthesized)
tttttatggctctgtttctttccactcacagcacagactcgagaaatgtagggaactcgagagcagccactcggccccaggatcaacccagcaccgaagaaaaacaaccagaagaaatta

SEQ ID NO: 946205 - DNA, 120 bp, Artificial Sequence
  ENSG00000269186_2 (sequence is synthesized)
ttcttcagcctgaaatgaagccgggatcaaatggttgctgatcagagcccatatttaaattggaaaagtcaaattgagcattattaaataaagcttgtttaatatgtctcaaacagaaaa

SEQ ID NO: 946206 - DNA, 120 bp, Artificial Sequence
  ENSG00000269186_3 (sequence is synthesized)
ggtttagattagccgtggcctaggccgtttgacggggtgacacgagcctgcagggccgagtccaaggcccggagataggaccaaccgtcaggaatgcgaggaatgtttttcttcggactc

SEQ ID NO: 946207 - DNA, 120 bp, Artificial Sequence
  ENSG00000269186_4 (sequence is synthesized)
actggaggcataaaattggaatcctaacttccaatatcaaatttgagcacaaaccctataaaatgtatcttgtcagaatgtgccagaaccgctaagctcttttcggcggaacaaattgca

SEQ ID NO: 946208 - DNA, 120 bp, Artificial Sequence
  ENSG00000269186_5 (sequence is synthesized)
agagtggttatctcgagaaagcggctcctgaaaaatgtctcccttaacatggaagcacccggcagaggctgatctgtggggctggggagaaatggagcaatcgccaacactccaggctcg

SEQ ID NO: 946209 - DNA, 120 bp, Artificial Sequence
  ENSG00000269186_6 (sequence is synthesized)
tctgtgaaccccaaattccattaagaaaagaaactgcttagcaagacccttttgaaagccccggggtgctaaaggagcagaaggaaagcccggcttagcatccacacggccaccaaagct

SEQ ID NO: 946210 - DNA, 120 bp, Artificial Sequence
  ENSG00000269186_7 (sequence is synthesized)
cggagggcagagactgccgggaggaactgatctgatgagaggatccatgagagagcagggcaactgcactaagtgcccatttctccaacacggacagggcaccggggagcttggctaaca

SEQ ID NO: 946211 - DNA, 120 bp, Artificial Sequence
  ENSG00000269186_8 (sequence is synthesized)
tggtcactcagccttcctttgtggaatcacaggacaggagcctgctttgggccagcatttacaaaaactgtcttttttggcccctggaccctgatgaatagaaaaacgctgcagtctgca

SEQ ID NO: 946212 - DNA, 120 bp, Artificial Sequence
  ENSG00000269186_9 (sequence is synthesized)
aacccactgcaatcgccgcgtcagctcagagccgagatgcttcccaaatgaacacctggatggtgtaaatcaccctgacagtaaacacttcaggccaggacgcaggctgcaggcggggtg

SEQ ID NO: 946213 - DNA, 120 bp, Artificial Sequence
  ENSG00000269186_10 (sequence is synthesized)
catcctcccacccagctggggtccataaaccaggcactggccctgcgctaataaatgctcctttcacagcaaaagacccctcctcccgggctgggatcacggtcccggtagagagggtgc

SEQ ID NO: 946214 - DNA, 120 bp, Artificial Sequence
  ENSG00000269186_11 (sequence is synthesized)
tcagataaccgacagcgtttctcccaccctcatcactgtccgacttaccccgggctggcatcagggagtgttgtcaggcgtttatgccgttatgaatggctttatgatacctcgagaggg

SEQ ID NO: 946215 - DNA, 120 bp, Artificial Sequence
  ENSG00000269189_0 (sequence is synthesized)
aaaagctctggaaatcacgtactgctcaattcaattcagaaggtgtgagttcctaaggagcattttcacttcctttcaaacttaaaaaattgtggtccaaggaatgacatgggattctga

SEQ ID NO: 946216 - DNA, 120 bp, Artificial Sequence
  ENSG00000269189_1 (sequence is synthesized)
ctttttatgacccatgctaactgatttggtgacttctgccagtgcaggaggctcggattttcccctgaaagagcgccctgctcatctcagaaaggttcaggctgtcgggtccattccgca

SEQ ID NO: 946217 - DNA, 120 bp, Artificial Sequence
  ENSG00000269189_2 (sequence is synthesized)
aggactcgcttcatgtatttcctttacaagtcagaaatggaaaaagaggaaattaccatcccacatcttttcttgatgtgtatgaatgcgtctgcctccaactctgagggtttcttctcc

SEQ ID NO: 946218 - DNA, 120 bp, Artificial Sequence
  ENSG00000269189_3 (sequence is synthesized)
aatcaggaaaaagttgacatttgccaccaagtcagtacgcttctaagctttcattttatttcatcaggactgactgagcgtcagcattctggccgagtcctgcagttttacccactgtgc

SEQ ID NO: 946219 - DNA, 120 bp, Artificial Sequence
  ENSG00000269189_4 (sequence is synthesized)
ttcattcttgttccttgttcttagatggatgggaggttcagttgttggaaactaccagttagactaagaaagctggacttctttcatactccttaaggcaagtagggtataagtaagtgg

SEQ ID NO: 946220 - DNA, 120 bp, Artificial Sequence
  ENSG00000269189_5 (sequence is synthesized)
cctgttggctgatctcaaacatgagagagcattaggttcattaataatattctgactttttcttatctaagccagtttactgattaagaaatcatctggtgaaattaatctcaaatattt

SEQ ID NO: 946221 - DNA, 120 bp, Artificial Sequence
  ENSG00000269189_6 (sequence is synthesized)
ttaaatgctcaaagaacatattgcttcagcttcattaaatacttgtctaaacacctggaaaaaatttccacctccgtttcacaatactttgtgtagtgaaacctgatggagtgatagtgt

SEQ ID NO: 946222 - DNA, 120 bp, Artificial Sequence
  ENSG00000269189_7 (sequence is synthesized)
gttagttattatggaaatattgtggacaattcacaagcagagtgtttgttccataaaattaaacctgaaatatgtttgcttgctcttaagttagaagtattgacaagcaggaaacaaaaa

SEQ ID NO: 946223 - DNA, 120 bp, Artificial Sequence
  ENSG00000223504_0 (sequence is synthesized)
gatatttcaaataatctttcttttgccgtaaattacaagattttccagtttgaccactggcgcttaacctaactacatactgaaggcacttcaagctggtgtgggtggacgttctttcct

SEQ ID NO: 946224 - DNA, 120 bp, Artificial Sequence
  ENSG00000223504_1 (sequence is synthesized)
gttgaaaagagaacaaaaccctcaacaaggagcagctggagacaaacttggagcgaggaaaagcagaaagtgttgcgaagcataatcatttaaatcacagattaagtcaacataatagca

SEQ ID NO: 946225 - DNA, 120 bp, Artificial Sequence
  ENSG00000223504_2 (sequence is synthesized)
gaaattcaaaatgtttgactatagtggcaacctcacagagtcttttctttgggatcaacagagaaaatgagctaaatgaatacaattttatatctcctgacatagaagtaaaggattcat

SEQ ID NO: 946226 - DNA, 120 bp, Artificial Sequence
  ENSG00000223504_3 (sequence is synthesized)
tcatgagcaaatgttttattttatactataatttttaaaatatttcctttaaatacaaagccttaaccaacaaaatgtaaccattagcttcatgaaaaacaataaaaataagagttatta

SEQ ID NO: 946227 - DNA, 120 bp, Artificial Sequence
  ENSG00000236687_0 (sequence is synthesized)
cctgctggcctggagctgattgacgctttcctgccccagcagttgagaagtccatttatttccctccaggggcctcacagacccatttaccccagagctgtgggtctgggggattcaaag

SEQ ID NO: 946228 - DNA, 120 bp, Artificial Sequence
  ENSG00000236687_1 (sequence is synthesized)
tgggtctgggggattcaaagagagacctggtgactgtgacagcctctggaaacctgagtcgacattgtctgctgggcattagtggtgatgccccagagacaggatcttgctctgttgccc

SEQ ID NO: 946229 - DNA, 81 bp, Artificial Sequence
  ENSG00000236687_2 (sequence is synthesized)
agcacccaccaccgcgcctggataatttttaaactttttagagatggtatctcactgtgttacccaggctggcctcaaacc

SEQ ID NO: 946230 - DNA, 120 bp, Artificial Sequence
  ENSG00000236687_3 (sequence is synthesized)
ttcgccttgtgagctaatttgcaagaatggaacaatgaagactcctagacctactcacctgccttaaagatatgctattgtcccccagagaggtggcaaaatggtttgtatttttgtctt

SEQ ID NO: 946231 - DNA, 120 bp, Artificial Sequence
  ENSG00000236687_4 (sequence is synthesized)
aagccttggacttttaaaatcctggattttgatgtgtgtgcagaagagaactaagatagcgtgcttgagaccgctctcctttaaaaggcctgcttgcaagagtagcctctgactggcatc

SEQ ID NO: 946232 - DNA, 120 bp, Artificial Sequence
  ENSG00000236687_5 (sequence is synthesized)
tgggaacttggatcttgagagagttgccaccattctctaactttgctgtgctgctttgctgtgcctgaactgtttgcacacaaaatggggtttatgcagaacacctgcttgccctctgga

SEQ ID NO: 946233 - DNA, 120 bp, Artificial Sequence
  ENSG00000236682_0 (sequence is synthesized)
acgcacctgggttgtctcgagcctgcggtagtggccagatcccagacatccgagtagatcccgtgaaaagcttcttcttggtttcttcgtacattctggatccacccctttcatgcatat

SEQ ID NO: 946234 - DNA, 120 bp, Artificial Sequence
  ENSG00000236682_1 (sequence is synthesized)
tccagaccacatttccactggagcagttgaaatgagagagatgggaatgggactcacccgaaccagaggaatttttattacagacccattaacagaggtgtcaaagtcacaggaacaagg

SEQ ID NO: 946235 - DNA, 120 bp, Artificial Sequence
  ENSG00000236682_2 (sequence is synthesized)
tcagaaacacagaggtcagtggaaaatcagtttgcttctatttgtttaaaaaatgggggacttatgcataaatctaagaccttcttgaatctaacattctaagacctgtatgccacagaa

SEQ ID NO: 946236 - DNA, 120 bp, Artificial Sequence
  ENSG00000236682_3 (sequence is synthesized)
aggagggtctcagaacgccggaggatagtatttaaatcttaaatatctatattgttctccacagttactgggtcaccacatagcaggcattcaataaaaacgtgtttgtttactaagtaa

SEQ ID NO: 946237 - DNA, 120 bp, Artificial Sequence
  ENSG00000236682_4 (sequence is synthesized)
attaacagaggtgtcaaagtcacaggaacaaggatgtgcacctcagaaacacagaggctagcctggctgaagctcagctgcacagagtctgtcctgagaagcagaatgccactgtcccct

SEQ ID NO: 946238 - DNA, 120 bp, Artificial Sequence
  ENSG00000236682_5 (sequence is synthesized)
gggccctccagactgccaaggctgctcagtttcagagagcaggctccctgtggcctcacacgccggctgccagctgggccaggtaactctggccaggctgcactgtgaagaacacgagag

SEQ ID NO: 946239 - DNA, 120 bp, Artificial Sequence
  ENSG00000236682_6 (sequence is synthesized)
tcggcggagacctgtgcctgctcttctcagcctcaatgtctggaagacaaaaaaaggcatcctgctcccaagattgtggtggaggccagcagggtgacgcacatgaaagccactggagat

SEQ ID NO: 946240 - DNA, 120 bp, Artificial Sequence
  ENSG00000236682_7 (sequence is synthesized)
agatggcacttgttcccacccactgcccacaacaggcccaggactgcctcagccccggtggaccccagagccagcaggcccttcagaatggaaggtgccaaacaccatcggaaggcgtgg

SEQ ID NO: 946241 - DNA, 120 bp, Artificial Sequence
  ENSG00000236682_8 (sequence is synthesized)
ttcttttcagagaaccagactctgagactgtggcctcccactatgagtcaccacctctgattcctgaggtcccctccagtcattggctctctcccaagccagccagctgatcagccttga

SEQ ID NO: 946242 - DNA, 120 bp, Artificial Sequence
  ENSG00000236682_9 (sequence is synthesized)
ggacagcagagtgtctgccaagagagatctgtgaagtttcccatcaccgtggcagtccacaatgtgaagcccctgaggccacccttctccatgtgtcccccacactgtccctgaccctcc

SEQ ID NO: 946243 - DNA, 120 bp, Artificial Sequence
  ENSG00000236682_10 (sequence is synthesized)
caccatcctagaaaaccagcctcccaggtcctctgtcatggaagtaatttacagcaaggcagaaagagctgaaagatttataaatgtgtaaaatttacaaaggtgtttctttctttcttt

SEQ ID NO: 946244 - DNA, 89 bp, Artificial Sequence
  ENSG00000236682_11 (sequence is synthesized)
acagaggtgtttctgagtggagaaaccactgcctggttggactgactgcccagttccaccaccctgtgagcccatgagtgagctcactg

SEQ ID NO: 946245 - DNA, 120 bp, Artificial Sequence
  ENSG00000236682_12 (sequence is synthesized)
ccagttccaccaccctgtgagcccatgagtgagctcactgcacttgttatagacatcctaccaccagcagcctgattttgctgagtccgtagcttacaactccaatctcatggccctgcc

SEQ ID NO: 946246 - DNA, 120 bp, Artificial Sequence
  ENSG00000236682_13 (sequence is synthesized)
gctgtgacatcccagtacccagaagttcatctcacacccagatcttggtttctaaatgtcattctctactaaaagggaccagggctggtacaggagaagagcaagagcttggaatatctt

SEQ ID NO: 946247 - DNA, 120 bp, Artificial Sequence
  ENSG00000236682_14 (sequence is synthesized)
atacctgagagtaaggaagtgctcagagaatcacaggagcacgttaaaaggacatagaagtcagtttaatgagactgcttctggccaaagttggaacacatcaaacattaaaacaatgat

SEQ ID NO: 946248 - DNA, 120 bp, Artificial Sequence
  ENSG00000236682_15 (sequence is synthesized)
ggtaatggattagattccatagaataaaatccttgaggacatagttatataaacataactgaggaagaaggaaaagctctccctaacagaataatacaactagtaaatgggaaaggaaag

SEQ ID NO: 946249 - DNA, 120 bp, Artificial Sequence
  ENSG00000236682_16 (sequence is synthesized)
gagttaggaattcacgctgggtattgaaactagtgggtgaaagctcaatgaatcggattcttagtctcaatgtctctcctctcaatttagtaattatagtggagtaatcatgactttaca

SEQ ID NO: 946250 - DNA, 120 bp, Artificial Sequence
  ENSG00000236682_17 (sequence is synthesized)
gtggagaaacctggccaacactaccttcacaacactaacaaaaaccttgcagacctgcagcctaagctcccagaagtcacctgctgaaatgccttcaaagagtgacctctctgcgtgtag

SEQ ID NO: 946251 - DNA, 120 bp, Artificial Sequence
  ENSG00000236682_18 (sequence is synthesized)
tgctcagcaacttgggctcagtgtctatttccacaagctacaaaccagaatacagtggaattcagcccatatgtggtaatttatctaccaatcaaggacctttgactccaaaaattacct

SEQ ID NO: 946252 - DNA, 120 bp, Artificial Sequence
  ENSG00000236682_19 (sequence is synthesized)
tttttgtacaagtgactacctggtgtagagctcagacatggctttgaatttttgccatgctgtgtgagctcaggcaagctgcttcacctctttgagcttcaatcttttatctataaaatg

SEQ ID NO: 946253 - DNA, 120 bp, Artificial Sequence
  ENSG00000236682_20 (sequence is synthesized)
ggaataacaataacttaatgaaacagcaattccagtgttaggtatttcctcaggagaaatgaaaacacgttcacacaaataattgtacatgtatgtttctacacgctttattcataatag

SEQ ID NO: 946254 - DNA, 120 bp, Artificial Sequence
  ENSG00000236682_21 (sequence is synthesized)
tcataaacaacctaaatattcatcaactggttagcagagaaaagagcaaaccactgatgacatgaacgaatttcagaagcactgtgctcagtgaaagaagccagacaaaaattacatctt

SEQ ID NO: 946255 - DNA, 120 bp, Artificial Sequence
  ENSG00000236682_22 (sequence is synthesized)
acataaatttcatttatatgaaattctagtgaaggcaaaacatatagccaggggccaagaggggaggatggtctgcaaagaggcaggaacttcttcctggggtgatgggaatattctgtg

SEQ ID NO: 946256 - DNA, 120 bp, Artificial Sequence
  ENSG00000236682_23 (sequence is synthesized)
tcatgaacatcgtgattgtggttacaagactatacttttgtcaaaactcatcaaattgtacacctaaaatggatgcattaagcctcaatacagccaataaaagatacctacgttacagta

SEQ ID NO: 946257 - DNA, 120 bp, Artificial Sequence
  ENSG00000236682_24 (sequence is synthesized)
ggccccgcccccgcccctgccccggggcagcctgtgctgttccgtgtgcgcggcgcatacgcacctgggttgtctcgagcctgcggtagtggccagatcccagacatccgagtagatccc

SEQ ID NO: 946258 - DNA, 120 bp, Artificial Sequence
  ENSG00000236682_25 (sequence is synthesized)
gtgaaaaggtctcccacgtgggctgtggacagggcccaagggtagcagagctagcagaggcagtgacggactgtgtggcagcttcttcttggtttcttcgtacattctggatccacccct

SEQ ID NO: 946259 - DNA, 120 bp, Artificial Sequence
  ENSG00000269235_0 (sequence is synthesized)
gggaggaattctgtcgtctgggaacggctggtttcgcggtcagacgccgagggccctcgaagtccctagcaacggctgcggagggagattccacctaggtccgtgcaggttacaaatggc

SEQ ID NO: 946260 - DNA, 120 bp, Artificial Sequence
  ENSG00000269235_1 (sequence is synthesized)
aaccagaacagggactccaagcacgcccaactagcagcatccaaacatgggacttcaaggacgtgaatgaagaaggtctgctggagcagaggaactgaaattgacaaggcgaaaggggac

SEQ ID NO: 946261 - DNA, 120 bp, Artificial Sequence
  ENSG00000269235_2 (sequence is synthesized)
cctgggaagagtctgccggcagcagatataaggagatgggacaagccatgtgggtgccctcaaggtgcatgcgaccatggaatgggagactggaggaacccagggtggccaaccatgggc

SEQ ID NO: 946262 - DNA, 120 bp, Artificial Sequence
  ENSG00000269235_3 (sequence is synthesized)
ccagtccctcctgtacgagctatgagtcagctgagcctgagtgcaaagatggagagaaggccaaccagagtcatgatgacatcaacccccataacctggggacaactcaagaaaaccaca

SEQ ID NO: 946263 - DNA, 120 bp, Artificial Sequence
  ENSG00000269235_4 (sequence is synthesized)
caggaagctgagaaactactggagtgtcagggacaggcaaaacccctgattccatgctcttggccatgttagccataatgtcctgtgcactacgttttccctgtgcacaggcaaaaacat

SEQ ID NO: 946264 - DNA, 120 bp, Artificial Sequence
  ENSG00000269235_5 (sequence is synthesized)
attgggcatatgttcccaatcccccagcagtatggcctatactttggagctcactcctcctgagatttatcacgatcagggagagtgggctccaggacccctaactccccgtgacataga

SEQ ID NO: 946265 - DNA, 120 bp, Artificial Sequence
  ENSG00000269235_6 (sequence is synthesized)
aaagttagactctcagaacaatgtcattaattataccactccactggaaggactccctttgtttatcaccacaaagacgtcgctcagccatagctgtcttgcaattcaagctcaaacatg

SEQ ID NO: 946266 - DNA, 120 bp, Artificial Sequence
  ENSG00000269235_7 (sequence is synthesized)
gttgagtcactatggaaaaattatgtacttattaggtcttggttctattaatgtaactggtgtgctaaccaatcattcccagtccagtcaccctaattgtgctgattatacagaatggat

SEQ ID NO: 946267 - DNA, 120 bp, Artificial Sequence
  ENSG00000269235_8 (sequence is synthesized)
tccattcaatagttcctaccccactctgtggacccagtgtcttgatccactggctagtaaacaatatatgtcaactgaagacactgtggattgggaacctaaaggtcaattagatggaaa

SEQ ID NO: 946268 - DNA, 120 bp, Artificial Sequence
  ENSG00000269235_9 (sequence is synthesized)
aggtgaaagtcagaaatcatggcacaaacttcactggcattggcggcaagcttttaatgcttcttctttatacaacagcagaatccaatcccagtctgctgctcagattgcttggcatgg

SEQ ID NO: 946269 - DNA, 120 bp, Artificial Sequence
  ENSG00000269235_10 (sequence is synthesized)
agcaggctttagcccacctcttcctcagttgcattatctggggaggaaaggaccaattcaagaaactatatggaaggcagcactcccatttatgaatggcaacatctggattggaacact

SEQ ID NO: 946270 - DNA, 120 bp, Artificial Sequence
  ENSG00000269235_11 (sequence is synthesized)
ataatagcaatagtaagcaacacagtcttaatgttgcatttgtaaagaatatcaccactcagtttacagtttgtgtttttaatccttatgcctttttggcagctaagaagaaccagcttc

SEQ ID NO: 946271 - DNA, 120 bp, Artificial Sequence
  ENSG00000269235_12 (sequence is synthesized)
aggtaaacaatacccaattgacctgtaaatcttgccagttatatcacactgcattaatcatagcacattacgaacacataatatctctactttgataatgttgggttgcatccctgggct

SEQ ID NO: 946272 - DNA, 120 bp, Artificial Sequence
  ENSG00000269235_13 (sequence is synthesized)
atggattcttgttaatctgtctgagccttgggctgccacacctgctttgcatttttgtaacacttcttctaactcagcttactcactgtgtccatagagccttaggcataatttttgcta

SEQ ID NO: 946273 - DNA, 120 bp, Artificial Sequence
  ENSG00000269235_14 (sequence is synthesized)
ttgtttccttggtcaaactaataacttctgttgtgatatcttctgtaactctgcataattctattcaaacatctcagtaggtggagaactggacacgcacagctgaccaagcgaggctac

SEQ ID NO: 946274 - DNA, 120 bp, Artificial Sequence
  ENSG00000269235_15 (sequence is synthesized)
ttaacactgagttacaaactgaagtggcaatgttgaaatccatggttctgtggttaggagaacaggtacaaagcttgcagttgcagcagcaattgcgtcatcattttaatcacattcata

SEQ ID NO: 946275 - DNA, 120 bp, Artificial Sequence
  ENSG00000269235_16 (sequence is synthesized)
atcacattcatatttgcgtaactaactcagaatataaccaaagtgagtatccgtgggaccttgtgaaagcccatttgcaaggagctttcacatccaacatcacctttgatattggtgaat

SEQ ID NO: 946276 - DNA, 120 bp, Artificial Sequence
  ENSG00000269235_17 (sequence is synthesized)
tacaaaacaaaattattgatttaaataggcaaactcaagaatttcagccttctttagaagactggaccgaattccaggaaggcctggagagcctcaacccttggacctatctaaggcacc

SEQ ID NO: 946277 - DNA, 120 bp, Artificial Sequence
  ENSG00000269235_18 (sequence is synthesized)
acattaacatcttatatgtagttcttggaataatgttgttttgtctctgtcttcggtttatagtctgtaaaatcggatggaccaccaattggagaatgagagcctcccagcccagcctta

SEQ ID NO: 946278 - DNA, 120 bp, Artificial Sequence
  ENSG00000269235_19 (sequence is synthesized)
agcccagccttacattctttcaattaatacataaacagaaagggggatatgcagggagccaaaggcctgtgggacgtgaccaactcagcattctgctggaggctatatgatcaaacagca

SEQ ID NO: 946279 - DNA, 120 bp, Artificial Sequence
  ENSG00000269235_20 (sequence is synthesized)
tgaatacaggatgtgagcaaactcaggactgctcctgccaacataaggtttgctggaggcaatcactccctggcaccgaggttatctactgcgacatctagagaatgcagtcttgcaagc

SEQ ID NO: 946280 - DNA, 120 bp, Artificial Sequence
  ENSG00000269235_21 (sequence is synthesized)
tctagagaatgcagtcttgcaagcctactctgaactgagcagccgaccccttcttccacccccccaccctcctatctcttttgcctaataaatacggagggctgtgtaaagctcagggcc

SEQ ID NO: 946281 - DNA, 120 bp, Artificial Sequence
  ENSG00000269235_22 (sequence is synthesized)
gtctattgaagaaaaacattatgtgcagttgcttaaagttctgttgagacagtctgcagctcaggttaattcgcagacactaacctcctgcagaagccacaaaaggttattacacataac

SEQ ID NO: 946282 - DNA, 120 bp, Artificial Sequence
  ENSG00000269235_23 (sequence is synthesized)
ccatcgtttccacaggcaggcactcttgatgtggaaaattgggatacagcaggagaaggattaaaacaggctcatcaaaaaggtcttaaagtcgattcttctgttttctccacttggagt

SEQ ID NO: 946283 - DNA, 120 bp, Artificial Sequence
  ENSG00000269235_24 (sequence is synthesized)
ttagttcgtactgtacttctgccattatctcattattattctgcaggacagcaagctgaatctaaaaatctgaaagaatttgttgacccacccacagctccaattaaaaataaaaaacag

SEQ ID NO: 946284 - DNA, 120 bp, Artificial Sequence
  ENSG00000269235_25 (sequence is synthesized)
gagagggaggataaaaattggcctatactgcctccttcagttgcagaaacatctgtactgcctccttcggtggcagaaatagaaaccctaatacaaagaatttaatgctctgctgccata

SEQ ID NO: 946285 - DNA, 120 bp, Artificial Sequence
  ENSG00000269235_26 (sequence is synthesized)
gctggagagcccttaggacattgtgcttttcctatttccatcaggcctgatccaaaaaatccacagcaggttattcatgaacacaccccactagagtttaagttgttgaaggaattaaaa

SEQ ID NO: 946286 - DNA, 120 bp, Artificial Sequence
  ENSG00000269235_27 (sequence is synthesized)
gcaagagtggtaaatgatggcatacagagcccattcaccttaggattgctagaatctgtgtttggtgctatgcgttttttaccctttgatgtgagacacttggcgcgaacttgcttgtct

SEQ ID NO: 946287 - DNA, 120 bp, Artificial Sequence
  ENSG00000269235_28 (sequence is synthesized)
gctagtgcatatctgacatggaatttaaattggcaagaaatgtgtgcagaccaggctaaacagaaccatgctgctggacacggagacattacagaggatatgctgttaggtcatggccct

SEQ ID NO: 946288 - DNA, 120 bp, Artificial Sequence
  ENSG00000269235_29 (sequence is synthesized)
tattcagatgtagaacgtcaaatggcactcccagatgctgcttatcagcagtgtacacaggccgctaaatgcgcctgggccacaatcctgaagagggagtccctgtacaatcctttttac

SEQ ID NO: 946289 - DNA, 120 bp, Artificial Sequence
  ENSG00000269235_30 (sequence is synthesized)
atatcatgcaagggttgcaggaaccctatgcacaatttcttgcaagattacatgaggcactgaagcgtcagattcctcatactgtggctgcagaaatgctaaccttaactttagcttttg

SEQ ID NO: 946290 - DNA, 120 bp, Artificial Sequence
  ENSG00000269235_31 (sequence is synthesized)
agaatgcaaacgtgtactgtaaacgtgcactggcaccagtgaggtgtacaaaaaacttgggaaattttctcagagcttgtcaggatgtaggaactgagattcatcgatctgcaaagttag

SEQ ID NO: 946291 - DNA, 120 bp, Artificial Sequence
  ENSG00000269235_32 (sequence is synthesized)
cataagcaatggctaatttagcagttgacaaatctaaaaggagccaagggtcaaaccctaaagtgggaaaatgttgtaattgtggaaaaactggacatctaaaaaaggaatgccgccaga

SEQ ID NO: 946292 - DNA, 120 bp, Artificial Sequence
  ENSG00000269235_33 (sequence is synthesized)
tctcaggacagaaaggatattacaatgcagttcactccctagcagaaaaaacagcaggactctgtactcgccataacaaaggaaatcactgggctacccagtgctgctcaaaatttcatc

SEQ ID NO: 946293 - DNA, 120 bp, Artificial Sequence
  ENSG00000269235_34 (sequence is synthesized)
agaatggcaccccattggtaaatgagatgggggcctgcacccgggcccctcaaacaatgagggcattcccaatgcagaccacaaccccacttcagggatgggttcctggaggcacattga

SEQ ID NO: 946294 - DNA, 120 bp, Artificial Sequence
  ENSG00000269235_35 (sequence is synthesized)
ttccctcaacccaggaacaccaggaagtgcaggattagatctacccaccagagaaagaatcacattagttaggggagacaaacctatttgggtatttggggacctttaccgacaggatac

SEQ ID NO: 946295 - DNA, 120 bp, Artificial Sequence
  ENSG00000269235_36 (sequence is synthesized)
gacctttaccgacaggatacacaggactaattttaggtaaaagctgccttaacttgcaaggcatcactgtagtcctaggaatgactgactccgattatgaaggagaaattcaagtagttt

SEQ ID NO: 946296 - DNA, 120 bp, Artificial Sequence
  ENSG00000269235_37 (sequence is synthesized)
gtttttgaactgggagaatatattgctcaattattgcttattccctgtgaattacacccttccccatgaaaagagaaatgaggaaataaagggtttgggagcacaactacatgggaaatc

SEQ ID NO: 946297 - DNA, 120 bp, Artificial Sequence
  ENSG00000269235_38 (sequence is synthesized)
tctttcccaacccatagcctctaatagacctacctgtgtagtacacattaaaggaaagaaattttatgggcttatggacatgggagctgatgtgtcagtcatatctataggatgggcaca

SEQ ID NO: 946298 - DNA, 120 bp, Artificial Sequence
  ENSG00000269235_39 (sequence is synthesized)
tcaaacattacaacgcatgttgaaaaaacaaaaagggggtataggaggccaactaccacctcaatcaaaactacatttagccttatttactttaaattttctgactcccggtatggatgg

SEQ ID NO: 946299 - DNA, 120 bp, Artificial Sequence
  ENSG00000269235_40 (sequence is synthesized)
agacattggcaagtgttagaggaaaaaagcaaagtttatctgaaagtgttatggaaatccccagaaggacaacaatggaaaggcccggtagatttactgacctggggaagagggtatgct

SEQ ID NO: 946300 - DNA, 120 bp, Artificial Sequence
  ENSG00000234684_0 (sequence is synthesized)
agagtggaacatggcggcctccttgccgcttgcgttaccagagtccacccggcctcgtgctttctccgggcgcccgtagctggcgccggcatccacaaaaatagatcagactttcgctct

SEQ ID NO: 946301 - DNA, 120 bp, Artificial Sequence
  ENSG00000234684_1 (sequence is synthesized)
gcctcagcctcccaagtaggtgggattgcaggcccccaccaccatgcccagaccctgagagcctactgaccacagcagctcctgttaccacggctgccgtttctgctctcaatgctactg

SEQ ID NO: 946302 - DNA, 120 bp, Artificial Sequence
  ENSG00000234684_2 (sequence is synthesized)
gctgccgtttctgctctcaatgctactgctcattgatcccagggaggaaaattctggtgcatcacttagtatttatttcaggtatggttaggacatttcagaataaaggatggcttcttc

SEQ ID NO: 946303 - DNA, 120 bp, Artificial Sequence
  ENSG00000234684_3 (sequence is synthesized)
gatccctagcggctgcagagtggaacatggcggcctccttgccgcttgcgttaccagagtccacccggcctcgtgctttctccgggcgcccgtagctggcgccggcatccacaaaaatag

SEQ ID NO: 946304 - DNA, 120 bp, Artificial Sequence
  ENSG00000234684_4 (sequence is synthesized)
atcaggtcataaaaggcactgcagcttccatgttggtcttttggatcactggatctgggggaaaccaaccactgtgttgtgaggacacgcaagcagttctgtggaggctcacgtggagag

SEQ ID NO: 946305 - DNA, 120 bp, Artificial Sequence
  ENSG00000234684_5 (sequence is synthesized)
gaaagaaccaggggaccagctaccttgcaaatcaaccctaacaacttggttgatgacacaaagaccacaaaggaaagagtacatgaagcagggccctttgaacctatggagcacagtttg

SEQ ID NO: 946306 - DNA, 120 bp, Artificial Sequence
  ENSG00000234684_6 (sequence is synthesized)
gacacttgttttaattaacaaaccaatattgatacattattattaactatagtctatattaaggttctctttttttgtattgtacagatctgtggggttttgacaaatgcataatattgt

SEQ ID NO: 946307 - DNA, 120 bp, Artificial Sequence
  ENSG00000234684_7 (sequence is synthesized)
gtatccaccattacactgtcatacagaatagtttttactgccctgaaaagcctctgtgctctacctatttaaccctctgcgctcacaccaaacccctggcaaccactgactgaccttttt

SEQ ID NO: 946308 - DNA, 120 bp, Artificial Sequence
  ENSG00000234684_8 (sequence is synthesized)
acattccctatagttctgctttttgcagaatgtcatagtagaaatcatacactatgtagacttttcagactggcttctttcatgtaacaatatgcatttgtttcttccatgtcttttctt

SEQ ID NO: 946309 - DNA, 120 bp, Artificial Sequence
  ENSG00000234684_9 (sequence is synthesized)
agcttggtagctcatttctttctgttgctgaataatattccattgaatggatgtgccagactttgtttattcattcacctattaaaggacatcttggtggcttccagtttctggcaattg

SEQ ID NO: 946310 - DNA, 120 bp, Artificial Sequence
  ENSG00000234684_10 (sequence is synthesized)
agagtggaacatggcggcctccttgccgcttgcgttaccagagtccacccggcctcgtgctttctccgggcgcccgtagctggcgccggcatccacaaaaatagatcaggtaaagcagca

SEQ ID NO: 946311 - DNA, 120 bp, Artificial Sequence
  ENSG00000234684_11 (sequence is synthesized)
gagtaaggcataggaagacttggtcgggctccgcggcccctctttaccggattggaggctgcgcgggtgaaatcgagctttaaactcccctggcctcggaacaccatttgtagcctctga

SEQ ID NO: 946312 - DNA, 120 bp, Artificial Sequence
  ENSG00000234684_12 (sequence is synthesized)
aggaggaggacttataagattctgtactaaggcagccgtgggaagggaggagaaccaggtcggcccgcgcgctcccggctgcttttgctctccctttggtttcgaaagcgtcaagtccca

SEQ ID NO: 946313 - DNA, 120 bp, Artificial Sequence
  ENSG00000234684_13 (sequence is synthesized)
agacagaggatgaataaagaggaagctccaggctgtgaagcgtctagtccttgctcccctcagaagctgggacatgttggaccaaggtggtaaggatagtgagtttcccagaagctggac

SEQ ID NO: 946314 - DNA, 120 bp, Artificial Sequence
  ENSG00000234684_14 (sequence is synthesized)
aagccacgacggcgccttccaataaaaggggaactccagagacgctatgagaaaagaggaacagacatctgcaatagatatctgcaacttccttttcaaaaacaccatcggcattgcttt

SEQ ID NO: 946315 - DNA, 120 bp, Artificial Sequence
  ENSG00000234684_15 (sequence is synthesized)
ctcaggaagccactgccagcctattgtgatagctgacactgagttcctgagaattctctaattaggatcccagattggagggtcagccagtggttaacatataatggacacaaaactgat

SEQ ID NO: 946316 - DNA, 120 bp, Artificial Sequence
  ENSG00000234684_16 (sequence is synthesized)
tttactggaagactgagggtgggcactcaccatggttctaagcattcattactcagaagatccataaaaacattacagttctgttgtgtaagagtttaggaaaaaaagaaaatcctgaca

SEQ ID NO: 946317 - DNA, 120 bp, Artificial Sequence
  ENSG00000234684_17 (sequence is synthesized)
aaaatcccaacctaaaaaacagtgtcaacatttgtaagtaggatggggaggcagagatgaattggcagtgttatcacagctactggactatgtggactttaacaaagtaagaaacgggtg

SEQ ID NO: 946318 - DNA, 120 bp, Artificial Sequence
  ENSG00000234684_18 (sequence is synthesized)
ggggttgggtggtggtatcttaatagagcaggagtagagacggatgtcctggggcagaatgggtaccaatgctgcctgaagcctggagctgggagctgaggactaagaggtagacaggag

SEQ ID NO: 946319 - DNA, 120 bp, Artificial Sequence
  ENSG00000234684_19 (sequence is synthesized)
aatggcaggacttgaacagttctctataaatgagtacctgggagaaaaacaggtctccaggctccacaatacccaataaacacactgcctttagcccacttcaagctgcacttcttacat

SEQ ID NO: 946320 - DNA, 120 bp, Artificial Sequence
  ENSG00000234684_20 (sequence is synthesized)
ggaacccaacccaaccaacctcagaggtaagggtgagagcaggcaatgaacagctatgattctccattccctggccaggcagggagcctttccatccaccctcgtgagactgcttgtaac

SEQ ID NO: 946321 - DNA, 120 bp, Artificial Sequence
  ENSG00000234684_21 (sequence is synthesized)
agaaataaggaaaccgactccaaggctcagtaacccacccaaggtcagaaccacggagtggcagggcctgtgagccacaaaggagactgaaaaccagaaagagcttctctctggtctgtt

SEQ ID NO: 946322 - DNA, 120 bp, Artificial Sequence
  ENSG00000234684_22 (sequence is synthesized)
attttaagaaaaacatgcccagaggggccacctggaagcaaggctgtgtggcaccctcaccttcctaattaaacaacaacttcccaggagcaacgacagcaacaacagcctggcccagca

SEQ ID NO: 946323 - DNA, 120 bp, Artificial Sequence
  ENSG00000234684_23 (sequence is synthesized)
gatgaactcgaatcaatccaagcccttcccctatacgggtcagtttgggcactactttacctgctgtgaagtctactgggatcttccaggaaagtcccacctcattagtaaaaagaaaaa

SEQ ID NO: 946324 - DNA, 120 bp, Artificial Sequence
  ENSG00000234684_24 (sequence is synthesized)
caaagactcgggaagaaagttcctgccctccctgttgaatgctgtgtgaggataagatgtctggagcatggcagtcaccctgtgactatcagaaggccaggcgtaccacaaggtggtcat

SEQ ID NO: 946325 - DNA, 120 bp, Artificial Sequence
  ENSG00000234684_25 (sequence is synthesized)
tccagtgctctgaatcagccccaaaccacttccctcaagactcatgttctgaggtgattaaaagtgtgctttgaaggtaaatctaggatgacagtcaacagatcagtgattgccaggagt

SEQ ID NO: 946326 - DNA, 120 bp, Artificial Sequence
  ENSG00000234684_26 (sequence is synthesized)
caggggtagagggagggaagaacagatggagcacagagaatttttagggcagtgaaaatgttctgtatgatactatatataatggatacatgccattatacacttgtccaaatgcacaga

SEQ ID NO: 946327 - DNA, 120 bp, Artificial Sequence
  ENSG00000234684_27 (sequence is synthesized)
taatgtaaactatggactttgggtgatcatgatgtgtcaatgcaggttcgtcaattgcaacacacgtaccattctagtggggggtgttgataacaggaggctatgcatgtgtgggaccag

SEQ ID NO: 946328 - DNA, 120 bp, Artificial Sequence
  ENSG00000234684_28 (sequence is synthesized)
gaggctatgcatgtgtgggaccaggggatatatgggaaatctctgtacatgcctctcaattttgctgagaatctgaaactgctcttaatgaagtcttacaaaaataaagaagtctgcttt

SEQ ID NO: 946329 - DNA, 120 bp, Artificial Sequence
  ENSG00000234684_29 (sequence is synthesized)
aatatgtttagttttataaggaactgctgaactcttccaaagtagctgtagcgttttgcattctcaccagcaatgaaagagcattctgttgccagcatttggtgttgtcagttttgtgga

SEQ ID NO: 946330 - DNA, 120 bp, Artificial Sequence
  ENSG00000234684_30 (sequence is synthesized)
ttttagtcactctaaaagatatgtagtgaaatctcattttaatttgcaatctcctaatgacatatgatgtggatcttcatctctatgcttatttgtcacctgcatattttctttagtgag

SEQ ID NO: 946331 - DNA, 120 bp, Artificial Sequence
  ENSG00000234684_31 (sequence is synthesized)
gtgtaattttcagaccttttgcccatgtaaaaaattaggttcttttcttattgttgagttttaagtgtttataattttgaataccagtcctttatcagttaatgtgttttgcaaataact

SEQ ID NO: 946332 - DNA, 120 bp, Artificial Sequence
  ENSG00000234684_32 (sequence is synthesized)
tctaatctttggcttaccttttcattctcttaacattctttcacagagcagaagtttttaattttaataaagttcagtttaagaattttttgttccatgggttgtgcttttggtgttgaa

SEQ ID NO: 946333 - DNA, 120 bp, Artificial Sequence
  ENSG00000234684_33 (sequence is synthesized)
tttaaaaactcatcgccaaaccacaaaccacatagattggttcctatattagcttctgtaagttttgtagttttatgtttcacatttaagtctaagatccattttgatctaacttttata

SEQ ID NO: 946334 - DNA, 120 bp, Artificial Sequence
  ENSG00000234684_34 (sequence is synthesized)
aaaggtggaaggactgtctggattttcccatttgttaaaaagattctcctcttccctcttcctgcactgaattgcctttgcttctttgacaaatataatttgactatatttatgtgggtg

SEQ ID NO: 946335 - DNA, 120 bp, Artificial Sequence
  ENSG00000234684_35 (sequence is synthesized)
tatttctgggctctctattctgtgctgttgatcagtttgtctgttttttcaccaataccacacagtcttgcctaatgtagatttatagtaagtcataaagtcaggtagtgttaatcctct

SEQ ID NO: 946336 - DNA, 120 bp, Artificial Sequence
  ENSG00000234684_36 (sequence is synthesized)
gactttgttccttttcaggattgtgttggtcattctaggtcatttgacttcccatattaactttagaatctgtcaatattcacaaaataacttattcgaattttattggaattgtgttga

SEQ ID NO: 946337 - DNA, 120 bp, Artificial Sequence
  ENSG00000234684_37 (sequence is synthesized)
agagtggaacatggcggcctccttgccgcttgcgttaccagagtccacccggcctcgtgctttctccgggcgcccgtagctggcgccggcatccacaaaaatagatcagaccctgagagc

SEQ ID NO: 946338 - DNA, 120 bp, Artificial Sequence
  ENSG00000234684_38 (sequence is synthesized)
ctggggctgggaggagattgcacctttatagcctggtggtggcagtccagagtgcaacccctagagatggtaacttgacaagacctctcaaaaacactacacacagcttttgagcccctc

SEQ ID NO: 946339 - DNA, 120 bp, Artificial Sequence
  ENSG00000234684_39 (sequence is synthesized)
ccaaaacaacatattgcaagattgaatgcagaagtagatgtgagaactcattctattaagccaagcgtaaatgtttaaaaatgtaaaataataccactcttctgatatgttttgggagaa

SEQ ID NO: 946340 - DNA, 120 bp, Artificial Sequence
  ENSG00000234684_40 (sequence is synthesized)
caaatgcttaacatagtaaacaaaaaacaggaggaaaaggaggggagaaaagaaaaaaagaagactcacacaaggccgtgttacgacatttcatcataccatagataaatcagatcctga

SEQ ID NO: 946341 - DNA, 120 bp, Artificial Sequence
  ENSG00000234684_41 (sequence is synthesized)
aagatttcagaaaggaatatgagatcacacataaaggaacaggaatcaaaatgacattacccttctcaacaacactggaagctccaagagagtgcagcaatgctttcatcctcagagaaa

SEQ ID NO: 946342 - DNA, 120 bp, Artificial Sequence
  ENSG00000234684_42 (sequence is synthesized)
ataattatcaatacaaaataatattcccagctaagctatcaatcatgagggtagaagaaaggcatttttagccattgcgtgggagtgctataataatggtcccagtgaaccacacctccc

SEQ ID NO: 946343 - DNA, 120 bp, Artificial Sequence
  ENSG00000234686_0 (sequence is synthesized)
agtctgagcggggcctcacaacagtggggcacgaagcaggagcttccgtgagcatagccttagcaatgatcttaacctgcccacatgtttctttttttttgtatttattattaattatta

SEQ ID NO: 946344 - DNA, 120 bp, Artificial Sequence
  ENSG00000234686_1 (sequence is synthesized)
gggactacagaaaaagtgaagggagaaggttctgaacagacccacccactaatctggctcacagtttctggctgaaactgactgttaacggcaaacgttacggcctaatatcgaagcaca

SEQ ID NO: 946345 - DNA, 120 bp, Artificial Sequence
  ENSG00000234686_2 (sequence is synthesized)
agttctacctcaggccgggttcctcaacattcatcactgagagattcaggcaagagggagataagttcaagaggacagccattctcccaggagttgcatcttcatctagtatttgaaatg

SEQ ID NO: 946346 - DNA, 120 bp, Artificial Sequence
  ENSG00000234686_3 (sequence is synthesized)
ataatttataggggaaatcattcaagataacatgttccagaaggaaaatacgccctgctgttgttccagctccttaaatcatgttttacctagtctaataagaaggctaatttgccttgg

SEQ ID NO: 946347 - DNA, 120 bp, Artificial Sequence
  ENSG00000228675_0 (sequence is synthesized)
cttgtaaaagccgaaaccctttccttgggatgcagcagccttatcacatgacctcggctggcctagcagagcagacctgcccaaaactgtgtaaatactgctggactggatggaacacag

SEQ ID NO: 946348 - DNA, 120 bp, Artificial Sequence
  ENSG00000228675_1 (sequence is synthesized)
tacacaagaaaggaagacatgctcatggattgacacatcttgagaaagacttgggagaaaaagacaaaacaaatgtgtcaaaaagagagaatgtaatacacaaccttgcttcatttgaaa

SEQ ID NO: 946349 - DNA, 120 bp, Artificial Sequence
  ENSG00000234352_0 (sequence is synthesized)
ccggtcaggaagctttatgttctggatcatccaggagagggacagaggtggtcggttggtgcgactcataaacaacctcttcagcacaacctggttgaatgtggagttgttccgtctgac

SEQ ID NO: 946350 - DNA, 84 bp, Artificial Sequence
  ENSG00000234352_1 (sequence is synthesized)
tcagcacaacctggttgaatgtggagttgttccgtctgaccagaaacctgtacagtttgaccaacagcctcagggtgttggtgc

SEQ ID NO: 946351 - DNA, 120 bp, Artificial Sequence
  ENSG00000234352_2 (sequence is synthesized)
tcccatctcatcctccaggagctgggactaaagacagttgaccattaaacaacacaggtttgaactgagtggatccacttatatgcatacgtgcattttctcctgactcggccacccctg

SEQ ID NO: 946352 - DNA, 120 bp, Artificial Sequence
  ENSG00000234352_3 (sequence is synthesized)
gacaatataggaaggaagagatgcagttctggattttacaggcttatggagtagaccaatgtttggaacgccatatggatttatggatcttctttccacgtaggaagatgacttctttga

SEQ ID NO: 946353 - DNA, 120 bp, Artificial Sequence
  ENSG00000234352_4 (sequence is synthesized)
aagacaggtaatgtgagacacatgccctgaactccggagtgaatagcagctgaaacagctgctggagcccctatcctgccagcaagtatccccttcatcttcaggctgacagagagctgc

SEQ ID NO: 946354 - DNA, 120 bp, Artificial Sequence
  ENSG00000234352_5 (sequence is synthesized)
tggctgcatctgatctgtcagctgcttcactcctccggaatgagcaaatagtctgtgccctgatctaagatgagaaaaaacaacagcctaatcactaaaaactctgccactgacgcacat

SEQ ID NO: 946355 - DNA, 120 bp, Artificial Sequence
  ENSG00000234352_6 (sequence is synthesized)
tctactgacagttcttcctgtctggctgtgtaatggattagcatagagacgagcagcacacctctgtcagaaaacctaaatttaagtcacatctcggggctctaacaatttaccaccaac

SEQ ID NO: 946356 - DNA, 120 bp, Artificial Sequence
  ENSG00000234352_7 (sequence is synthesized)
agcgtctttggagctctgaagaagatcctgattttctcaaaaacaagtcattgagttctacactgtaaagcaagacatggattactacatcctatattttataatacacatgaacacatt

SEQ ID NO: 946357 - DNA, 120 bp, Artificial Sequence
  ENSG00000234352_8 (sequence is synthesized)
aggaaggagtatgcaggatttaatattctctgtatatttctgctacattgtttctaaagagagtagtggaatagtcctcctgtatcttctattaatgcctccttacttccttaattttga

SEQ ID NO: 946358 - DNA, 120 bp, Artificial Sequence
  ENSG00000234352_9 (sequence is synthesized)
atttttcatattgtttatctcatttggctaatagatggaaatcatgcaaactagtaagaattatctgatagctcctgtatgaaaactcaaatttttcttaggagaaaaaccaattattca

SEQ ID NO: 946359 - DNA, 120 bp, Artificial Sequence
  ENSG00000234352_10 (sequence is synthesized)
catttttacttggatgagcattcacttgtggtcagtgctataacaggaagatctctcagggtacccaatgtgggatcatttttagtttgccaaatgatgaaatttccagacagaaagagc

SEQ ID NO: 946360 - DNA, 120 bp, Artificial Sequence
  ENSG00000234352_11 (sequence is synthesized)
cctttttgaataataaattactgcaacatatctacaagaacacttccaaaataaaagtgttcattttattttagagcaagggactttcccactagcttagtattaaaattacatgattgt

SEQ ID NO: 946361 - DNA, 120 bp, Artificial Sequence
  ENSG00000234352_12 (sequence is synthesized)
aatgtatgggagattactgggaacataatcaatattttgaaatttaaaagtatgtaatattcctttggggtaagtttccgaagaataactgtaacactttgaatttgtctaccactacaa

SEQ ID NO: 946362 - DNA, 120 bp, Artificial Sequence
  ENSG00000234352_13 (sequence is synthesized)
agtcatcataaaccatacatcaaccaactcaatttacagcacctaaaatttgcttcctatataaattaacagattaagtctttagtatagtctattctttggtcagtgttgtaagtatga

SEQ ID NO: 946363 - DNA, 120 bp, Artificial Sequence
  ENSG00000234352_14 (sequence is synthesized)
tcttatgttagaaaccagatttaaaactccttgaaatctctcactatttcatccatcttgatagtgcttgttttcttcaacaaataaaaaatagtgtttattttactcttttgatatact

SEQ ID NO: 946364 - DNA, 71 bp, Artificial Sequence
  ENSG00000234352_15 (sequence is synthesized)
accaatcactcctctttgacttcctcctcattttactcaatgtgaagaccacgatatatttcttattattt

SEQ ID NO: 946365 - DNA, 120 bp, Artificial Sequence
  ENSG00000234352_16 (sequence is synthesized)
acagtatataatacatattcaaaatacatgttaatcaactgtttatgttatcagtacggcttctggtcaacagtagcctattagtagttacattttgggggagtcaaaagttacacacag

SEQ ID NO: 946366 - DNA, 120 bp, Artificial Sequence
  ENSG00000234352_17 (sequence is synthesized)
atttttgagtgtgcatggggttagagtccctaaccttcatgttgtccaagggtcaagtgtataatgtttatttaagcagagacttattttagtgtatttaaatttttggtcacagatttt

SEQ ID NO: 946367 - DNA, 120 bp, Artificial Sequence
  ENSG00000234352_18 (sequence is synthesized)
tttttttttttttttttttttgtggggagccttaagcctggatttgggtcacattatataaggatgctattaatttaagtagtagagcggcaggctataattgactttgttgagttccag

SEQ ID NO: 946368 - DNA, 120 bp, Artificial Sequence
  ENSG00000234352_19 (sequence is synthesized)
agtagagcggcaggctataattgactttgttgagttccaggtcctgtaagtacatggcttccaacagagtttccattctctttatggtcgatggagatgctcaccttgagcatggccata

SEQ ID NO: 946369 - DNA, 120 bp, Artificial Sequence
  ENSG00000234352_20 (sequence is synthesized)
tcaccttgagcatggccatatattttataatagttttttttttaaaaacatatcattatcattgcaataaattacaaatatagaataaagcaatttccttaacttattctactattttga

SEQ ID NO: 946370 - DNA, 120 bp, Artificial Sequence
  ENSG00000234352_21 (sequence is synthesized)
atacacatttaaagaaacacatacacatgcacacacacacatcatagtactgagcttttcaatgttgtatcttttcaagcagacccttaccattgggcatgcaagtgtgtatgtaggcaa

SEQ ID NO: 946371 - DNA, 120 bp, Artificial Sequence
  ENSG00000234352_22 (sequence is synthesized)
agtggtgctaagtggcactactggtcttaaaaagtcttattgaatttttaatacttaaaaaatacctttcatttttgtacaatatatattgaccttcattttactaaatatcacatttca

SEQ ID NO: 946372 - DNA, 120 bp, Artificial Sequence
  ENSG00000234352_23 (sequence is synthesized)
caaaagatcttagctaattgcaataattgagtaaacaagaatataaagtataatatgcttttaaaggatgacaaggtaatttcaagctcttttagaaacattttacagcagatgtttgca

SEQ ID NO: 946373 - DNA, 120 bp, Artificial Sequence
  ENSG00000234352_24 (sequence is synthesized)
tataatgtgctaatttcaaatggtgcttatttaattcttggaggaagctatgtcaattattctccatttggagaaactatacgtcctttagaatgaccccaagtatctcagagcctttta

SEQ ID NO: 946374 - DNA, 120 bp, Artificial Sequence
  ENSG00000234352_25 (sequence is synthesized)
aaaaataatgtcttctattttaaagatatttcaaccatttttagcagactcagtagctaaactcaaaaagtagcaatgtagtggaaagagaacacattttaatgctaagcaaatctgtga

SEQ ID NO: 946375 - DNA, 120 bp, Artificial Sequence
  ENSG00000234352_26 (sequence is synthesized)
tctgaaacctaccttctattattttctaattgtttgaacttaggcaaaattaacttctctgggtctaatttttaacatattttttaagggaagataacaatggctatctaatttgtagaa

SEQ ID NO: 946376 - DNA, 120 bp, Artificial Sequence
  ENSG00000234352_27 (sequence is synthesized)
ctctgagtggtttaattgagataatgagtataaatttcattatatgggactggcacagaattgatgttcaatatgtgttagtttcagttctatttatccaacatctgtgagattttatcc

SEQ ID NO: 946377 - DNA, 120 bp, Artificial Sequence
  ENSG00000234352_28 (sequence is synthesized)
taaaatgtaaatgtgacgattatgtgcatctccatccagtcagccttaatgagtaagattatgcttaccagctcttgtatcccttcatgtcagaacaataaaagctggatcaaaaataga

SEQ ID NO: 946378 - DNA, 120 bp, Artificial Sequence
  ENSG00000234352_29 (sequence is synthesized)
aagataacctttctttagatgctgttttatgaaccatttgcaatcacctggagactagatgagtttgaggttgccacttcagtgattgcgtaatcaattgagaaaaattgcacagactgg

SEQ ID NO: 946379 - DNA, 120 bp, Artificial Sequence
  ENSG00000234352_30 (sequence is synthesized)
gaaaggagactaacaattgaaacaataataaaatgaaataaaaggaagcggagaagtcaagccattattccttagggaggaatggagaagcatcactttggaaaggcagaatgatactgg

SEQ ID NO: 946380 - DNA, 120 bp, Artificial Sequence
  ENSG00000234352_31 (sequence is synthesized)
tcatagaaacaaaacgaggtaggagacggaatatcccctgctctggatcagagagcgtgatggggccatctagttgcgggaaaagaagctcagggctcccactgattctgcattatgcag

SEQ ID NO: 946381 - DNA, 120 bp, Artificial Sequence
  ENSG00000234352_32 (sequence is synthesized)
gaagagtaagacttccttttgaaggagatttgcacatacactatagaagacacccatttagttcttgggaagatggagttggaagtgtccgctgcttgtgaacagctcaacagcatggag

SEQ ID NO: 946382 - DNA, 120 bp, Artificial Sequence
  ENSG00000234352_33 (sequence is synthesized)
tcctccaggttggtgcatctctaaacttgacccacctggagatccatggtgtcgaacaatgaactttccaaaccagcaaggcctccataaagtgaagggagatcctcttcaccaccgttg

SEQ ID NO: 946383 - DNA, 120 bp, Artificial Sequence
  ENSG00000234352_34 (sequence is synthesized)
gttgaagaataaaaaacctacacctacactagcccaaatgagtttctgttgtttgtcttctgtgtcagaatttcattcattcatttcccatctctggcctattgtttaaagttgctggcc

SEQ ID NO: 946384 - DNA, 120 bp, Artificial Sequence
  ENSG00000234352_35 (sequence is synthesized)
ataatgtatactttccagactccaggttaatcccaggctgagaagctttgtttgtttgataatgaaaaactgaacaaggaaacaagcaaaaacttgcaaataatgtgtaccttatcataa

SEQ ID NO: 946385 - DNA, 120 bp, Artificial Sequence
  ENSG00000234352_36 (sequence is synthesized)
ctgcagttgctgtataacaaacatattaaattgtacttgattgagcaaatatttacatcttactgtggaatttcaaagtttaatgtctacacgtcttattaaggttgttatctattattg

SEQ ID NO: 946386 - DNA, 120 bp, Artificial Sequence
  ENSG00000234352_37 (sequence is synthesized)
tatggtggagaaaggatatctagctgatagtcatgtttaaaaactgacctgggtttgggactgcaaccaaattctaagggcctagctgtttatgatttgcccattccattcagggtcgtc

SEQ ID NO: 946387 - DNA, 120 bp, Artificial Sequence
  ENSG00000234352_38 (sequence is synthesized)
ctaatcccttctcaatctaagatgcttcattctcactatagtttgctcgagaaagaaagtggctgcttatggtatgagttcataagagtcatctaggattgtgtttaataccctatccca

SEQ ID NO: 946388 - DNA, 120 bp, Artificial Sequence
  ENSG00000234352_39 (sequence is synthesized)
ccagcttctaatttttacgtgcatttaattggggctatatttgttagttttcaattagaaagagacagataaaaagtaaactgcacacattatcagaggatgctatagcttaccttctca

SEQ ID NO: 946389 - DNA, 120 bp, Artificial Sequence
  ENSG00000234352_40 (sequence is synthesized)
cttattatgaatttgccacctaaattcaaactcttctgaaatttataccaattattaattctgaaagcaattctgattatcttaataactagcaactgactgcaaacatagaaggatagc

SEQ ID NO: 946390 - DNA, 120 bp, Artificial Sequence
  ENSG00000234352_41 (sequence is synthesized)
tggatggatggatggatggatagatagatcgatagatagatagatgagtttaaaaggaagatcacagaatcaatgttagtagttaacaattatttttatattttgttttgagagtaggct

SEQ ID NO: 946391 - DNA, 120 bp, Artificial Sequence
  ENSG00000234352_42 (sequence is synthesized)
attatttttatattttgttttgagagtaggctttgatggagcctaatgaaagccatagaagaagctaaggggaggctggactgttataaacaacccttcacttatctaatacaatttaac

SEQ ID NO: 946392 - DNA, 120 bp, Artificial Sequence
  ENSG00000234352_43 (sequence is synthesized)
taagcttatcatttttttttatagaaagagaaattgatcagaatctactgacagttcttcctgtctggctgtgtaatggattagcatagagacgagcagcacacctctgtcagaaaacct

SEQ ID NO: 946393 - DNA, 64 bp, Artificial Sequence
  ENSG00000234352_44 (sequence is synthesized)
ctcacattctgtatttgtcctgattgactagcaacttagaacttttcaaggacacttggtcagc

SEQ ID NO: 946394 - DNA, 120 bp, Artificial Sequence
  ENSG00000234352_45 (sequence is synthesized)
tgtggaatgccaaggacacttggtcagccagaaagcttgtgctgctgagtgaagaaggcagatttggtgcattggaagacagcaactgcagatgcagaggaactggaagggaatcacagc

SEQ ID NO: 946395 - DNA, 120 bp, Artificial Sequence
  ENSG00000234352_46 (sequence is synthesized)
tggtcatgccaaaggggcagcccaacctatgttcattcagcaaccatggcagtttctctacatctgttttcaattcgagctccaggtcatgtttttcagttagaataaaatgtgaaaact

SEQ ID NO: 946396 - DNA, 120 bp, Artificial Sequence
  ENSG00000234352_47 (sequence is synthesized)
aaacctgtacagtttgaccaacagcctcaggttgtaaaattgatgccatgactggaaagacttttggattgcttcccttggtggaggtggaggacatattttgtatatgggaaaaataga

SEQ ID NO: 946397 - DNA, 120 bp, Artificial Sequence
  ENSG00000234352_48 (sequence is synthesized)
ggattggaatccttctatctttgatgatagccatggccattaggcttggctttggttaatgaattatgagtagacataatttgtgtgacttccagaaaaaaaagtatttaatagcaatta

SEQ ID NO: 946398 - DNA, 120 bp, Artificial Sequence
  ENSG00000234352_49 (sequence is synthesized)
cgtgttttgttatgttcctctctccctggtgactggcaaagtcccagatggtggaagctccgccatcttgagttcctgtgtgactgaggtgagatgagcatgttgcatgagcaataagta

SEQ ID NO: 946399 - DNA, 120 bp, Artificial Sequence
  ENSG00000234352_50 (sequence is synthesized)
aaacaagcaatgttttagccacttgaattttggaagtgtttttactgtggcacaacataatacagcctgaatgttctaacttcaaactagatagcaacaaataaaagaaatatgtcgagg

SEQ ID NO: 946400 - DNA, 120 bp, Artificial Sequence
  ENSG00000228677_0 (sequence is synthesized)
gtctctgggagacttccaactgggaatctcccgctgaggccacacctctagattaggttagtggcccctgatccacgccgctccagcattctgccatgagaaacctcactctgctgcagc

SEQ ID NO: 946401 - DNA, 120 bp, Artificial Sequence
  ENSG00000228677_1 (sequence is synthesized)
tttatcttctaaatgacgtgctgagaacacccacgaaactgcaataccggctaatcagccccagcttcttcagaaaggcttctgcttgtgactccatgatctgtagcttatacacttcac

SEQ ID NO: 946402 - DNA, 120 bp, Artificial Sequence
  ENSG00000228677_2 (sequence is synthesized)
tctccttccagttttcaagtacggatacctgccagtagatcagaagacatatgagtattttacaaatgacagcctgaaactattttaaaggttaaaacttaaacattcaaaccactttcc

SEQ ID NO: 946403 - DNA, 120 bp, Artificial Sequence
  ENSG00000228677_3 (sequence is synthesized)
catttctccttaaatgaagcatgacagaatcatcagaacttgattgtatcataggtgaacatgaattagactttgagatttgaaaacagaacaaaatgacatcacaaatgcataccttcc

SEQ ID NO: 946404 - DNA, 120 bp, Artificial Sequence
  ENSG00000228677_4 (sequence is synthesized)
tatgaataactgtacatggctttctgcttaagctatatataagcacagagccaggttaactgcatgtgtacacgagtgtgcattacctatggtcctgcagcagaataacccttaataaag

SEQ ID NO: 946405 - DNA, 120 bp, Artificial Sequence
  ENSG00000228677_5 (sequence is synthesized)
gctgcatcctctgcaagtttagaaaagcctcagagaagctgttctcggcaagggcatcaaaagcttcggggtatgcttttaagattttagactctctgtggcttccccacaaaccaactg

SEQ ID NO: 946406 - DNA, 120 bp, Artificial Sequence
  ENSG00000228677_6 (sequence is synthesized)
gccatttttgtgagaatcactgcaggaaatgtaaaatggcctcatggtccaaatgatccattaaatagccttttaatccaggtgtcagtaaacttgacagggcccaccaggcaaacctgc

SEQ ID NO: 946407 - DNA, 120 bp, Artificial Sequence
  ENSG00000228677_7 (sequence is synthesized)
ttaccaaacggtggtgtgaattaaacaagctcaggaatacggatgctggtgtaggacccaaaaagtattcatactttggctctttttcctttcctgtccttagaagcaggtgcatagtca

SEQ ID NO: 946408 - DNA, 120 bp, Artificial Sequence
  ENSG00000228677_8 (sequence is synthesized)
attcttaattgaaaagcctaatgtttgcagactgtataaactaagtcttttcttactttaccagaataatcacagacacatatgccaataaatatcatttgtttctcagctacagaaaca

SEQ ID NO: 946409 - DNA, 120 bp, Artificial Sequence
  ENSG00000234350_0 (sequence is synthesized)
ggcgcacacaccctcggattgacgtgcgcacgcgcaccggttaccttcaggagcgccgaagaaggaaagaagactgccagctccgtgacagcaagaaccttgtatgactttttcatgatg

SEQ ID NO: 946410 - DNA, 120 bp, Artificial Sequence
  ENSG00000234350_1 (sequence is synthesized)
gatgttcatctgtgccatctgtaaatattgaataaatatttgtggaatacatgaatctaaaagtgaatggaatgataaagagggaaagggtcatgacatctactacagcatttggcacag

SEQ ID NO: 946411 - DNA, 120 bp, Artificial Sequence
  ENSG00000234350_2 (sequence is synthesized)
caaacaggggagaaaaaggcttaaaagaaaaacaagtctccatcaaaggtaataaccacaatgagaactatacatagctatgtgcttataggtcttagttcacattcccctcattaaaat

SEQ ID NO: 946412 - DNA, 120 bp, Artificial Sequence
  ENSG00000234350_3 (sequence is synthesized)
tatagctcaagaaataaagggctgtttaatgacttgggtatataaatatacttcatttgtatattttttacttgctaaaatctatccaaattggtattacctcaaaccataatcttctac

SEQ ID NO: 946413 - DNA, 120 bp, Artificial Sequence
  ENSG00000234350_4 (sequence is synthesized)
tgtattttataattttactttattgccatgtatttttcccactgatgttcacaaattcacaggaaacatcagccatgtactaaataaaatatgaattgaatcgacaaatagaactataaa

SEQ ID NO: 946414 - DNA, 120 bp, Artificial Sequence
  ENSG00000234350_5 (sequence is synthesized)
tgggattacaggcatgacccactgtgcccggacctgcttgaatttttatgatgagcatgttggcagatcacgactgccagctccgtgacagcaagaaccttgtatgactttttcatgatg

SEQ ID NO: 946415 - DNA, 77 bp, Artificial Sequence
  ENSG00000234350_6 (sequence is synthesized)
acacaccctcggattgacgtgcgcacgcgcaccggttaccttcaggagcgccgaagaaggaaagaagatggagttgg

SEQ ID NO: 946416 - DNA, 120 bp, Artificial Sequence
  ENSG00000234350_7 (sequence is synthesized)
gagtaggaggagcgtgaggcgttgaaggagcgcccaaacgggctgcggggagatcttcacgcctaaaacgtggtcagtcaagactgccagctccgtgacagcaagaaccttgtatgactt

SEQ ID NO: 946417 - DNA, 120 bp, Artificial Sequence
  ENSG00000234350_8 (sequence is synthesized)
ccctgaaatgcactttgagcaagaaagactttgtagaggagaaaaaaggtggaccaatgaggattgggctagaaccagaggaaagtgaacattcttggtttagataaatatccacaacct

SEQ ID NO: 946418 - DNA, 120 bp, Artificial Sequence
  ENSG00000234350_9 (sequence is synthesized)
tctaaggttttcatgtgtactacagagaagctccaggctcctacatttccctgtgggtagttttaaaaagctactgtagcaaaacagaggctggtggtgactacgcttatcttttagaag

SEQ ID NO: 946419 - DNA, 120 bp, Artificial Sequence
  ENSG00000234350_10 (sequence is synthesized)
agccatcattgcatttctgcagcacagaatatatacgtgttttttactcttagtggtggagtttatatgtgactcatgatgtttagttgttaatcatccaatgatactaaatactgctta

SEQ ID NO: 946420 - DNA, 120 bp, Artificial Sequence
  ENSG00000234350_11 (sequence is synthesized)
gttagctcagtattccctttaggaaaccagatattgctaaagtcactgttcgacttaatggggaaaattccactaacatctaaaatatgtgatttataattcaaaaatgtaaatactgta

SEQ ID NO: 946421 - DNA, 120 bp, Artificial Sequence
  ENSG00000234350_12 (sequence is synthesized)
ttggtattacatactataaaaggacaattgtctacacaattacataacatgcatgtaaggatcaatatttaattaagactatttttgtattctcattgggagttagagcccaatattctc

SEQ ID NO: 946422 - DNA, 88 bp, Artificial Sequence
  ENSG00000234350_13 (sequence is synthesized)
atttttgtattctcattgggagttagagcccaatattctcaattgggtgagaatttcagccaaatggtctatccagacagatcttgct

SEQ ID NO: 946423 - DNA, 120 bp, Artificial Sequence
  ENSG00000234350_14 (sequence is synthesized)
ctatttccccaaagtaacttgtgagaaatgtcttaggctagaatttgcttatatattttccatcttgcacatggttaaaacgtgcagtttcctaaaccagtggttctcgaacatcagtgt

SEQ ID NO: 946424 - DNA, 120 bp, Artificial Sequence
  ENSG00000234350_15 (sequence is synthesized)
gcattagaatcacctggagggctggttaaaacacagattgccaggccgttctcagggtttctgatttagtaagtctggcggttggacccgagaatctgcatttctaaccagtgattccca

SEQ ID NO: 946425 - DNA, 120 bp, Artificial Sequence
  ENSG00000234350_16 (sequence is synthesized)
agtgatgctgatgctgcaggtctggggaccaatgtcttgaactaacagctctgaataaaaatctaattggattctgaatgccacagatgcagtttggagattgtttttcaaagcagaata

SEQ ID NO: 946426 - DNA, 120 bp, Artificial Sequence
  ENSG00000234350_17 (sequence is synthesized)
catttgtggaataaaaaagtttatcattgttattacctgaagtaatttctctttcctttgtgtttttagaggagttttgttggtcgcttttatcaggcattaggccttgtattacattca

SEQ ID NO: 946427 - DNA, 120 bp, Artificial Sequence
  ENSG00000234350_18 (sequence is synthesized)
tttgtgcctatgctttatctcctttgtgactgtgagctctttgaaggactgtgttcatctttaaatcctcattgtaccttacatcttgtagacttcaaatcattgtttggtaaattgaat

SEQ ID NO: 946428 - DNA, 120 bp, Artificial Sequence
  ENSG00000234350_19 (sequence is synthesized)
gaatttagtgatgtgtacatgttttgtgcctgctttcctacatgtaataattataaacaacaaatatcaagttaagtatgcagctcacatattctttttttttttttttttgagacagaa

SEQ ID NO: 946429 - DNA, 120 bp, Artificial Sequence
  ENSG00000234350_20 (sequence is synthesized)
tgcaccactgtgcccagctataataagatttattcagactttttggcttacagatgttagatttgaggcatttcagctttggaagagaccataaggataattcaagtccaaaggtcgtta

SEQ ID NO: 946430 - DNA, 90 bp, Artificial Sequence
  ENSG00000234350_21 (sequence is synthesized)
ggaagagaccataaggataattcaagtccaaaggtcgttaaagtccaccacatctcctctacagcctactcatactcacctttagttttc

SEQ ID NO: 946431 - DNA, 120 bp, Artificial Sequence
  ENSG00000234350_22 (sequence is synthesized)
ccatttcaaatttgagaaggtgctcaaaccttgcctttctacttctacctaaatgaccctatttcaaccccttttgatatcctgtttagataggatattctccacgtctgttattcccca

SEQ ID NO: 946432 - DNA, 120 bp, Artificial Sequence
  ENSG00000234350_23 (sequence is synthesized)
tttgtttcccctttctttactcctagacctccctgctccagaagcaagggggcagccacagccccacagcctctagctgctggctgctcagggcacgcaggcttgctattgacaagtctg

SEQ ID NO: 946433 - DNA, 120 bp, Artificial Sequence
  ENSG00000234350_24 (sequence is synthesized)
aatcatgactgatgaagggagtgctctctccctagaaaacaacttggcaactttctacttcaaacccaggctcactacagaatttcttaccacaatgactttcttggcagctgtctgcag

SEQ ID NO: 946434 - DNA, 62 bp, Artificial Sequence
  ENSG00000234350_25 (sequence is synthesized)
ctgaggtcaagagtttgagaccagctggccattgtggtgaaaccccatctctactaaaatac

SEQ ID NO: 946435 - DNA, 120 bp, Artificial Sequence
  ENSG00000234350_26 (sequence is synthesized)
acacaccctcggattgacgtgcgcacgcgcaccggttaccttcaggagcgccgaagaaggaaagaagacatgctcatcatgccctgcaaactcctatgaactggaactacagcagctgtt

SEQ ID NO: 946436 - DNA, 120 bp, Artificial Sequence
  ENSG00000234350_27 (sequence is synthesized)
gggcgcacacaccctcggattgacgtgcgcacgcgcaccggttaccttcaggagcgccgaagaaggaaagaagaacacagagcccgaggcaaagcttaagtgcttacgcttttgtcggga

SEQ ID NO: 946437 - DNA, 120 bp, Artificial Sequence
  ENSG00000234350_28 (sequence is synthesized)
ggtacagacccagctctgcgagagccaggggaaaaggaagagaggcagggaaggaatggcagcaagtacaaggtgatgaatgactgcactggccattgcttcatgaagagccacgaaaaa

SEQ ID NO: 946438 - DNA, 120 bp, Artificial Sequence
  ENSG00000234350_29 (sequence is synthesized)
acagagccggtttctcagcaggtggctggctgctcagtcacaaaggacctctttggacaggctttatggaaatactgtgcctaggacagtcgctcaaaggcaggagggagagaaaatgca

SEQ ID NO: 946439 - DNA, 120 bp, Artificial Sequence
  ENSG00000234350_30 (sequence is synthesized)
tctgcaagctcactttgtcttctttcttctgctggtcaaaatttgctggctggggcagttaacgccctcacacatccgagttgtgtcacctggcccctttggtagccactggggaagcca

SEQ ID NO: 946440 - DNA, 120 bp, Artificial Sequence
  ENSG00000234350_31 (sequence is synthesized)
gatctaggcatgtggcctgatggctcctgcggtggaaccacatgctcacactcagtcagtcaccactgggatgccctgggcagggcaggctgagtggctgggagatagctgagcctaaga

SEQ ID NO: 946441 - DNA, 120 bp, Artificial Sequence
  ENSG00000234350_32 (sequence is synthesized)
tatctaagcaagcacctgtgatgtatgcactgcagtgtccaaatgtgaaaaagcaagaaagggagatagaagcatatttttttctggagagaaggaggaaaccaccaggagaatacaaac

SEQ ID NO: 946442 - DNA, 120 bp, Artificial Sequence
  ENSG00000234350_33 (sequence is synthesized)
agaaaaaagcttcctgagagtgtaaagctcgtgtctgttctgctgtctgctgtttccctggcgcctgacacagtgactgccacatgagaagagcccctaaaatagtgaaataaatgaaga

SEQ ID NO: 946443 - DNA, 120 bp, Artificial Sequence
  ENSG00000234350_34 (sequence is synthesized)
atcacatgagtgaaatcctcttggtacctgagtatgggcaaagctggaaaacagtgatggagttttccatagcagcatcctaagaagacacccttaagctagtgagaacgcattttgagg

SEQ ID NO: 946444 - DNA, 120 bp, Artificial Sequence
  ENSG00000234350_35 (sequence is synthesized)
acatcagcaaacacagcctaagaggggcttaaatggtgatatcacctgggcttgctttctcaggtactcttttaaaaggatgtaattcacagctgtcccaagaagactcaccaggaacac

SEQ ID NO: 946445 - DNA, 120 bp, Artificial Sequence
  ENSG00000234350_36 (sequence is synthesized)
gtctgtctttcaaataaaagtccagctggtaggcagcccaggaaaggtgggctgctctgcttcttgtgatggtctgaggacccttatgccttctgttttgttgctttgccatcctctcgg

SEQ ID NO: 946446 - DNA, 120 bp, Artificial Sequence
  ENSG00000234350_37 (sequence is synthesized)
gtgttgtcctatccacatgattgagttaaatgcccaacattatgtccgcattccagcctcaagaaagaggaaagaagaaagggagagcatgcaactttcttttaaggatgtgacctagaa

SEQ ID NO: 946447 - DNA, 120 bp, Artificial Sequence
  ENSG00000234350_38 (sequence is synthesized)
gtgacatacatcacttaggctcacatgccattggtgggaacttagtcatatggccacaactagttgcaagtgaggctgggatatgtcatctctagatggacaatcatgtacctcccaaaa

SEQ ID NO: 946448 - DNA, 120 bp, Artificial Sequence
  ENSG00000234350_39 (sequence is synthesized)
acttggggattactattaccaaaaggaagaaagaaaatatgaatgggtgggattggcagtctctcatcagtaggaaagcatcatgactgatgctgagaaactctttgcccaagtctttat

SEQ ID NO: 946449 - DNA, 120 bp, Artificial Sequence
  ENSG00000234350_40 (sequence is synthesized)
ggcctatatatgtaactccatattactgacagtgtgcatcacagggtgtggtaggtggcttctaaaatggcctcaaatgattcctgtctcctggtactcatgcccttgtgtaatcccttt

SEQ ID NO: 946450 - DNA, 120 bp, Artificial Sequence
  ENSG00000234350_41 (sequence is synthesized)
ttcttgaatgacttccttcaagttaatagactgttgataggctgccacttctatgattagattattaaagatgtacctccattttcctagctgactttattgcctttgcagcttgcaagc

SEQ ID NO: 946451 - DNA, 120 bp, Artificial Sequence
  ENSG00000234350_42 (sequence is synthesized)
tttgatgaagcagccatgttggggaggcccatatagcaagaaaccaaagtcagtctccaggcaatagccaacaaagaactgaggtcctcagtccaatagcccacaaagaactgaatccta

SEQ ID NO: 946452 - DNA, 120 bp, Artificial Sequence
  ENSG00000234350_43 (sequence is synthesized)
ccaataaccacttgagtttggaaatggatcccttaccaatcgagccttcagattagaccccagccttggctgacaccttcactgtagccttttatgtaagatcctgaagcagatgacgca

SEQ ID NO: 946453 - DNA, 120 bp, Artificial Sequence
  ENSG00000234350_44 (sequence is synthesized)
actaaactgtgcctggacttctgatgcacagaacccgtgagataataaatactgccagctccgtgacagcaagaaccttgtatgactttttcatgatggatgttcatctgtgccatctgt

SEQ ID NO: 946454 - DNA, 120 bp, Artificial Sequence
  ENSG00000234350_45 (sequence is synthesized)
ttaaaagaaaaacaagtctccatcaaagtcctcctgacatcttaatctatctgccaacgctacatgccgtcaagccaaggaagaatttccttctcactgttgcttctctgaccaaggaag

SEQ ID NO: 946455 - DNA, 120 bp, Artificial Sequence
  ENSG00000234350_46 (sequence is synthesized)
acataagcacaaccaatcaccagactgatgaaattccttccagtttcagaaaagattatcaccaatccctacattataaaattcatactaataaagcacaaacattgaattctaacatta

SEQ ID NO: 946456 - DNA, 77 bp, Artificial Sequence
  ENSG00000234350_47 (sequence is synthesized)
gttccagctctctggagggagaaagccctgactttggatggagttggactgtgacctccgcctcctgggttcaagtg

SEQ ID NO: 946457 - DNA, 120 bp, Artificial Sequence
  ENSG00000234350_48 (sequence is synthesized)
acacaccctcggattgacgtgcgcacgcgcaccggttaccttcaggagcgccgaagaaggaaagaaggttggaataacacagagcccgaggcaaagcttaagtgcttacgcttttgtcgg

SEQ ID NO: 946458 - DNA, 120 bp, Artificial Sequence
  ENSG00000228679_0 (sequence is synthesized)
tgatagatggaagatgaggcgcaatgaagctctgcaatgaattgaatatgtgagtgcctatgctgtgaagatgtagggatgctccctgtcctcaagatgctcacatccagaagaatgcat

SEQ ID NO: 946459 - DNA, 120 bp, Artificial Sequence
  ENSG00000228679_1 (sequence is synthesized)
tttaaaaggtctagatatggtgctagaaataaagctacaaaaataacacagatcaagacccaagctctctttacaagaaacttacaccaaagtaggggagacagatacgtaaataaccat

SEQ ID NO: 946460 - DNA, 120 bp, Artificial Sequence
  ENSG00000228679_2 (sequence is synthesized)
cttgatgcagtgtaagaggggcaatgacagcagtaaccccagaatgttaagggaaacatgcaagggtgactacctggcctggaaaggtgagaaaacaaaggtttggcaaggatgagtact

SEQ ID NO: 946461 - DNA, 120 bp, Artificial Sequence
  ENSG00000228679_3 (sequence is synthesized)
atagatatttctggttgattcaatttcctgataattcccaattacaataaaagaaatggtttcataaggactcacatgtttgaaaaagtctttggatataaaatataaacctgagattaa

SEQ ID NO: 946462 - DNA, 120 bp, Artificial Sequence
  ENSG00000228679_4 (sequence is synthesized)
atttgataatagaaaatttttgatgaagcataaattaaaaaatatttttctggcatttttttcctaaaaaaaagaagatcctgttccaaaaccaagccttcgtaaagaggtcctattcct

SEQ ID NO: 946463 - DNA, 120 bp, Artificial Sequence
  ENSG00000228679_5 (sequence is synthesized)
atgtattttatgattggagatgtggaagtcactgtgatgtggtcaaagtagaaacatttgtgggttttttcttcttgaggaaataaaccaaaatgctaaaataaatgagtagcaaattaa

SEQ ID NO: 946464 - DNA, 120 bp, Artificial Sequence
  ENSG00000253733_0 (sequence is synthesized)
caaggacagcagtaggagcttactgcagtgactgtatcataactgctggttatgaggattggatttcttttttgcagatgtcacgtgccggggtgaactgttattaactaaaaggagtca

SEQ ID NO: 946465 - DNA, 120 bp, Artificial Sequence
  ENSG00000253733_1 (sequence is synthesized)
gggcttagctgcaagaaaggaggaattgctcttaaagtgcttggaagtcaccgatctaaccaacggacaaaaaatttcctgaggacagaccctcccctctggaggcatccttctatcatt

SEQ ID NO: 946466 - DNA, 120 bp, Artificial Sequence
  ENSG00000253733_2 (sequence is synthesized)
ggctcctgactccccgaagcaaggtcaagtgggagtttaatagctgttcctgggactgtgcagagggcagccctttgaactcagtgtctcaatcccacaggtgggaggttcccaccactg

SEQ ID NO: 946467 - DNA, 120 bp, Artificial Sequence
  ENSG00000253733_3 (sequence is synthesized)
cctggttcgaggcagctctttgatatctcctggagcactcctggtcctagaaccagacagctctcaactgaactgacacaagtaacaaactcagcatcccctctcctgggcattcctaca

SEQ ID NO: 946468 - DNA, 120 bp, Artificial Sequence
  ENSG00000253733_4 (sequence is synthesized)
agccatgcgagccccgtgttggtggagacactgccttctccaccgcagacaccaacaagttagaatggagaaactgtctatggccctaccactctgaacacgccggatgtcatctcatct

SEQ ID NO: 946469 - DNA, 120 bp, Artificial Sequence
  ENSG00000253733_5 (sequence is synthesized)
cggaagctaagcagggtcgggcctgcttaggacttgggtgggagaatggagaaattgatggacttttgacgatgcaggttttaacatcagatctgagccctaatagctgtgtgtctcagc

SEQ ID NO: 946470 - DNA, 120 bp, Artificial Sequence
  ENSG00000253733_6 (sequence is synthesized)
tgtctgggccacaccattaacagggaaaagtttcctccacttaaagaaagaaaaagacaaagaggagaaggaaggcaatacggagctctcctggaaggtacattaaatcattaaatgcca

SEQ ID NO: 946471 - DNA, 120 bp, Artificial Sequence
  ENSG00000261409_0 (sequence is synthesized)
gtccactgaggttttctatattacagagaaaaattacctgaagagtataccacccattaaaaagggtgaaattaacttgttgtttaaaagacctttgattaattgggaaaataagaatat

SEQ ID NO: 946472 - DNA, 120 bp, Artificial Sequence
  ENSG00000261409_1 (sequence is synthesized)
acaataaggtaagtatttataacctgtcagtatcaaatgggaataatacatccaaaacagaccacattattacaagcatcaccatttaccttgctgatggtgaaatcacataaaaatgaa

SEQ ID NO: 946473 - DNA, 120 bp, Artificial Sequence
  ENSG00000261409_2 (sequence is synthesized)
cgggagacaaatctaaggtatgacttttagccctttaatattcattttgcagactgttcacaaccaagttttaatctcgaattgctttcctttgccacccagcaagcttctgagttgctt

SEQ ID NO: 946474 - DNA, 120 bp, Artificial Sequence
  ENSG00000261409_3 (sequence is synthesized)
ccttacgctgttctttggaatgtgccccgggaatgtaaactcattttaatattggcctaagtaaaataggattataaaggcaaatctgtggctcaagttcccataatgcatttcaaaagc

SEQ ID NO: 946475 - DNA, 120 bp, Artificial Sequence
  ENSG00000261409_4 (sequence is synthesized)
aagttaaattattttgggattatcctgtttgggataacattattcctttctactagcatagttaatcaagaattgacaaatgtattttgtgaagtaaacatgaaattacacaattatttg

SEQ ID NO: 946476 - DNA, 120 bp, Artificial Sequence
  ENSG00000261409_5 (sequence is synthesized)
tcactttttattaagttaccaaacattcacttaatgctggtgtaggtgttataggaaagcaatggcaatatgaatcaaattttagtagaggctctgtcatttaaaaaaaggaaagagaaa

SEQ ID NO: 946477 - DNA, 120 bp, Artificial Sequence
  ENSG00000261409_6 (sequence is synthesized)
gaaaaacaactccaataaaagcaaatgttcctaatcttagtataatgccaatagggtagttatatggagcttaatttgcaggtttctgggaaaatatatatgaaatccagtgtatcatat

SEQ ID NO: 946478 - DNA, 120 bp, Artificial Sequence
  ENSG00000261409_7 (sequence is synthesized)
aagacagcaagaagtcccttttaaagcacatgcaatgtgctatatatggacatatgaaaatatttttggtattaaaacaaaatagtaaactaaactaggtgaaataccttcctaacctta

SEQ ID NO: 946479 - DNA, 120 bp, Artificial Sequence
  ENSG00000261409_8 (sequence is synthesized)
aatatctattttaaaatgtagctgatatctgataacactgtaatactggtactggtctagcctaattttgcagcgaattaacagttactaatatgcagtctcacagttaactgtggttat

SEQ ID NO: 946480 - DNA, 120 bp, Artificial Sequence
  ENSG00000261409_9 (sequence is synthesized)
cacagactcctttcttcctgtgtagaactagatacataaaatgtaaaatttcctaaacccactgctgacaggaaagcttaatacctttactaatctatggcatttttttgagacagggtc

SEQ ID NO: 946481 - DNA, 81 bp, Artificial Sequence
  ENSG00000261409_10 (sequence is synthesized)
ggtctcactctgtcacccaggctagagtgtagttgcgcgacagggtttcaccatgttgcccaggctgttcttgaaatcctg

SEQ ID NO: 946482 - DNA, 120 bp, Artificial Sequence
  ENSG00000261409_11 (sequence is synthesized)
ttataggcatgagccaccatggctagcatttttttaaacttctaatctacaagaacaaacctatacattgaatcttaatgaagagacacaactagtaagagggaaatgtactgttcccac

SEQ ID NO: 946483 - DNA, 120 bp, Artificial Sequence
  ENSG00000261409_12 (sequence is synthesized)
tcagtgcttcatccagctgcaaatttgttacattttaaaaatccttgagcccaggagtctgggtggggctgcagtgagccataatgatgccactgctcttcaccctgggcagcatagtga

SEQ ID NO: 946484 - DNA, 120 bp, Artificial Sequence
  ENSG00000261409_13 (sequence is synthesized)
gacctcatctctttaaaaaaattgtaaaacctttgatgagaaaatgaatacttaaaatgtatatttccagtttaatagacaatcttgtacttgaagcccactctgggggatgttttccat

SEQ ID NO: 946485 - DNA, 120 bp, Artificial Sequence
  ENSG00000261409_14 (sequence is synthesized)
ggattcttttaagatgtctcaaataaaatagaatacttggtactttgtggtgacctgatcttaaggtaacactggcatcccataatcaatttgctgatcatttattcctatcccttctct

SEQ ID NO: 946486 - DNA, 120 bp, Artificial Sequence
  ENSG00000261409_15 (sequence is synthesized)
ggtccagcaccttcttctatgtatctgatcaccccctgccacactccccattatgcacccactcaaaagcagaaagccaagagaataatgctggaacttttttcttttattaaacagatg

SEQ ID NO: 946487 - DNA, 120 bp, Artificial Sequence
  ENSG00000261409_16 (sequence is synthesized)
ggaatttcaagtctcctttgcaggtatgactttgttctattagaagaaattcaatgattgagtctagagaccatcaccaatgctgtacttaaatcctatgacttgtgccacataacctgg

SEQ ID NO: 946488 - DNA, 120 bp, Artificial Sequence
  ENSG00000261409_17 (sequence is synthesized)
tgaaggcagagtcaaacatgtagaagaagaagaaaaaaatctgtttctctgcacaatgcctggctcactcttgggctccactggaagaaagtagaacagtgcacgcacgtgcaaagatgc

SEQ ID NO: 946489 - DNA, 120 bp, Artificial Sequence
  ENSG00000261409_18 (sequence is synthesized)
tgtccaccagaaatgtcagtgacagcctgggggcaagaagaataactgcccttgtgtctttgcccagctgatattcctcacaggcagccagcagagttgattaaccatgtccatgcccag

SEQ ID NO: 946490 - DNA, 120 bp, Artificial Sequence
  ENSG00000261409_19 (sequence is synthesized)
gcagtctcctctgtatatctctcaaaaacttctagttagattttgttttgttttgtgttgttttgttttaaaacagggtgggggtgacagctctccacattaattctgcaagtaactttt

SEQ ID NO: 946491 - DNA, 120 bp, Artificial Sequence
  ENSG00000261409_20 (sequence is synthesized)
tttatcttcgtctactccagatctgcctaaaggaaagaaaactcagaggcttctgagtagaaagcaacccaaatttctacaagcctacaagtggactctggcaattgaatgatcctattc

SEQ ID NO: 946492 - DNA, 120 bp, Artificial Sequence
  ENSG00000261409_21 (sequence is synthesized)
atgcagatcattcatactgctgcttatggatccagtgatttctaattaacaatatttacactgtgctttgttttttgttttctggttttcctccccagtctgtccctttgaaaggaaaca

SEQ ID NO: 946493 - DNA, 120 bp, Artificial Sequence
  ENSG00000261409_22 (sequence is synthesized)
gatactatacaagtgagcatctcataactctttccctctttaaaaaaaagtaacttagaatacatataaatttggtcaatgccaattttaataatgtaaaatatttagattcaattttga

SEQ ID NO: 946494 - DNA, 120 bp, Artificial Sequence
  ENSG00000261409_23 (sequence is synthesized)
agttgaaaaactttaaaccagggcacataaagaaaaaacagctgtcataattggaaggaaggtatgatctggaatcttttttccgagtattacacacacaaaacatttcttgatcaatga

SEQ ID NO: 946495 - DNA, 120 bp, Artificial Sequence
  ENSG00000261409_24 (sequence is synthesized)
attaaatgtcaactgaactgatatcttgatggggcattaccagtattttaaaggcaggactaaagggcagattatttcaagttttgctcattagcaaaactgcaacattctgctcatgtt

SEQ ID NO: 946496 - DNA, 120 bp, Artificial Sequence
  ENSG00000261409_25 (sequence is synthesized)
atatgtcaatgaaactaatatcttgattgagcatttccaacattttaaaggcagaactgagaaacagctatttgttcacatacaacactgtgatgttctgcctgaaaatcgattgagtat

SEQ ID NO: 946497 - DNA, 120 bp, Artificial Sequence
  ENSG00000261409_26 (sequence is synthesized)
ttccaaacctattatttttcatttattgtgaaacctacatttacctcctaaaagaaacaaagctcttcaaaagtctcttcccaaggcccctccctgcttctctgggcctctccccacttt

SEQ ID NO: 946498 - DNA, 120 bp, Artificial Sequence
  ENSG00000261409_27 (sequence is synthesized)
caacctctattctactttttcttattctttctccattttccccaatgcacactcttcctcttatgcccatggctactataaagagatcaatttcccatattcaagaaattagtgtttact

SEQ ID NO: 946499 - DNA, 120 bp, Artificial Sequence
  ENSG00000261409_28 (sequence is synthesized)
tatcaatcaatattctgacaaaaacttaagccaaaaagaacctcttataaggccttgtttccttctggatattgagccaatataagatgtaccaaattaaaaaaaaaaatcagagcaagc

SEQ ID NO: 946500 - DNA, 120 bp, Artificial Sequence
  ENSG00000261409_29 (sequence is synthesized)
tcccccccgttctatttttgcttgcctctgatgtaaactgaattaagattttaggtacctggacctttgagaacgtgacactagcaaggtggtgaccacagagaataggtacaaaggtct

SEQ ID NO: 946501 - DNA, 120 bp, Artificial Sequence
  ENSG00000261409_30 (sequence is synthesized)
tgaagcttgcttagagctttgttccgtggtggcacacaaatcttggcttgctgtaccatcattggcaaacctcatcatatcacagttgggtgtgtttgtatgtgtgtgagcactagtgtg

SEQ ID NO: 946502 - DNA, 120 bp, Artificial Sequence
  ENSG00000261409_31 (sequence is synthesized)
tgtgtgtacatattcgtgtgtatgcacactttgtgtacctgtgtacatgtgattgtagatgtacctgttgtgtgtaaactctgttaaaatgaaatttgcttcgcatttaatgtgcaactt

SEQ ID NO: 946503 - DNA, 120 bp, Artificial Sequence
  ENSG00000261409_32 (sequence is synthesized)
tgaagtagtgtaatatttatctaaaggttttcactacttggttttaatgtctttgaacgtgtacttctatcttcaagcaagcttatagtacgtgttgctaaactaacttttccaaagaac

SEQ ID NO: 946504 - DNA, 120 bp, Artificial Sequence
  ENSG00000261409_33 (sequence is synthesized)
cgagttgacttctatttttccttgcctaccaaccaaagggatggtgggctcttttttccctcttgtaaattgtgctgaggagaggacgtggctatgagatcagtcattgttccagttact

SEQ ID NO: 946505 - DNA, 120 bp, Artificial Sequence
  ENSG00000261409_34 (sequence is synthesized)
ggtcactgctagggcatcaactttatcagttccttcagactcttctctttttccaacctaatcaaataacgcagtgtggcttttgttcattataacaacgcgctctttaggcaacttttt

SEQ ID NO: 946506 - DNA, 120 bp, Artificial Sequence
  ENSG00000261409_35 (sequence is synthesized)
ttcaagccttctgtcaccattttattttttcaagtaagttaagtaataattgttcagaattgtgggaaaaaagattacttgggggaaaatactgtatcactttatttgcatattaggttc

SEQ ID NO: 946507 - DNA, 120 bp, Artificial Sequence
  ENSG00000261409_36 (sequence is synthesized)
agaagctgccagcagacagggtacagagggtacagcacagatgtaacagttgctgaataaatgaatgagaaacctcatacacagtagtacgtattatacaaatagtaacaggtacacata

SEQ ID NO: 946508 - DNA, 120 bp, Artificial Sequence
  ENSG00000261409_37 (sequence is synthesized)
gtcacaggtactgcataacaaatgcaatcttgttctcattatttattagtttacagacaattaatttattcagtattgtgctggaagaatctttgtggaatatgtttaccaacttatcac

SEQ ID NO: 946509 - DNA, 120 bp, Artificial Sequence
  ENSG00000261409_38 (sequence is synthesized)
ttaccttccagctatcagttcatgctgctaagaaaaaacaatgatggaatatttttgtgtgtgtgacctctacatttaatttgatatcaggcatagtcacttggtcgttaaaaactgaaa

SEQ ID NO: 946510 - DNA, 120 bp, Artificial Sequence
  ENSG00000261409_39 (sequence is synthesized)
ctttacagttccaccagctaattacatctgctatttctgcttcacagatatgctttgagttgctttggctttgtcttcctttgtaaatactcttgtactttcttttccttgtaaacatct

SEQ ID NO: 946511 - DNA, 120 bp, Artificial Sequence
  ENSG00000261409_40 (sequence is synthesized)
cgtttgcagttttgggagacgactttgcaactctgtatagtgtttatatatatatgtatatctatatatatctgacttgcctttccatacagctactcacaataaatgtgttcatgtaaa

SEQ ID NO: 946512 - DNA, 120 bp, Artificial Sequence
  ENSG00000261404_0 (sequence is synthesized)
gaattctccaaaaagaatttcaaataacaaaaacaatgattgagaactcaacaatttcacacaaaaaatattaaagccccagaccaggcccagtgggaccttgaatacatactgtatttc

SEQ ID NO: 946513 - DNA, 120 bp, Artificial Sequence
  ENSG00000261404_1 (sequence is synthesized)
tttaattcatgaatgtaccattggaatatatataatcaacaatgatggaacctcatactggcttctcacctattatactagaaaggactaaatggaaagaaacttctggaattcctctca

SEQ ID NO: 946514 - DNA, 120 bp, Artificial Sequence
  ENSG00000261404_2 (sequence is synthesized)
ataccaagagtaaatgaaaagaaataccacatccctgggggaaccatagtgacaaatgtcataagaagccacttgaaagaggtggagaaactgattcctgttgcttcctgacataactct

SEQ ID NO: 946515 - DNA, 120 bp, Artificial Sequence
  ENSG00000261404_3 (sequence is synthesized)
ggctcttcaaagtatatcttaaatcagaaatgacctaagaaattccgattgttggtaaattaatttaaaaagaacttaatggaaaggggcttcaagatggctgagtagagccgcctggca

SEQ ID NO: 946516 - DNA, 120 bp, Artificial Sequence
  ENSG00000261404_4 (sequence is synthesized)
tttgcctcctccacaaaaaaggaccaaaacaatacaagcatagaagccaaatttggaactactagagcctcttgggaatgtagcccaatgggaggaaagcagacatatggaagagagttt

SEQ ID NO: 946517 - DNA, 120 bp, Artificial Sequence
  ENSG00000261404_5 (sequence is synthesized)
taggatatttatgcttcttcacaaacaacacatgtttccagatttaaaaagctttggaacccggttgattttcagaatgctatcaattttagtacgattgcgcaaacagaaccaaagaaa

SEQ ID NO: 946518 - DNA, 120 bp, Artificial Sequence
  ENSG00000261404_6 (sequence is synthesized)
attgcagggagaggctcctccgtgctcctgagaggccgaacacagggtcgccagcacagcttactgctcggtgtctcctgagccacagaggaagacgtggcaggagcacctggtgctaat

SEQ ID NO: 946519 - DNA, 120 bp, Artificial Sequence
  ENSG00000261404_7 (sequence is synthesized)
atatattcatgtctatggcaatgccgaccatctggctggtctgaaccaggataaaagtgaagaattcctctgtgaagacccagctctttctttggctccttttttgaagccatctttgct

SEQ ID NO: 946520 - DNA, 120 bp, Artificial Sequence
  ENSG00000261404_8 (sequence is synthesized)
ctgctctcctctgctgcccaggtgcgctggcagctgattagatggtgcccatccagattaaggatccatgggtgagcagcagtggatgtgcagtgaaattcacagcaggcagatgggaac

SEQ ID NO: 946521 - DNA, 120 bp, Artificial Sequence
  ENSG00000261404_9 (sequence is synthesized)
gtggagaaattctacaaacctttgggagccagacagctccaacctcaagaagccaaatgccagctctacgaggacaggaacattgtctgtcttgttcgttgttgctttcccagagcttgg

SEQ ID NO: 946522 - DNA, 120 bp, Artificial Sequence
  ENSG00000261404_10 (sequence is synthesized)
actaggtctgtgacatgtcacatttaataagtgaaaaaaattaatggatggattgctctacagagaagagatattcaagtcacttctgaataagttctcagacaacaacttcttgtgtat

SEQ ID NO: 946523 - DNA, 120 bp, Artificial Sequence
  ENSG00000261404_11 (sequence is synthesized)
gtaagattatatcggaactgaaaaattcctattacctagtgatgtcttagccatcctaaagtcatagggtagtgcattaccttttctatgtttagataaacaaataccattgttttacag

SEQ ID NO: 946524 - DNA, 87 bp, Artificial Sequence
  ENSG00000261404_12 (sequence is synthesized)
cttttctatgtttagataaacaaataccattgttttacagttgcctacagaattcagtatagtgacacactcaacagggttatagta

SEQ ID NO: 946525 - DNA, 120 bp, Artificial Sequence
  ENSG00000261404_13 (sequence is synthesized)
ttcacacgatgacaaaattgcctaatgactaattcctcagaacatactcgtatctgtaagcaatgtatgactatgttctgtagaattagggaatgcagctgggtggggtggctcacgcct

SEQ ID NO: 946526 - DNA, 120 bp, Artificial Sequence
  ENSG00000261404_14 (sequence is synthesized)
gtagatcatcatcataacagctcccagtgaatcaatgcctccctgcatccacacccctttgtaacatgatattgttgctcttcccatcaagaaatggtctcttttggccgggcacagtag

SEQ ID NO: 946527 - DNA, 120 bp, Artificial Sequence
  ENSG00000261404_15 (sequence is synthesized)
aggctgaggcaggcagatggcttgagtgtaacaatatgttgaatttgccatgggcctttaaagcttcaatgttgtgaagagctctgcatgaaattttaaagagactggacctttcatctg

SEQ ID NO: 946528 - DNA, 120 bp, Artificial Sequence
  ENSG00000261404_16 (sequence is synthesized)
taaagagactggacctttcatctgcacaacagcagggcacctcgctatagggacaagaaaggaagagagagagagaacatttctgaagtaatagtgaaaaataacagcagaagcaattat

SEQ ID NO: 946529 - DNA, 120 bp, Artificial Sequence
  ENSG00000261404_17 (sequence is synthesized)
accatactaaaaaccccacccaggaaggagcttatctgccatttcctacacatgtgacatatggagaagcatgatcagctacttcacagtctctgcctttactctgcctccgcatacaat

SEQ ID NO: 946530 - DNA, 120 bp, Artificial Sequence
  ENSG00000261404_18 (sequence is synthesized)
ggctcagccaactagcctaacgaaagctgttttcaccattgtttgggaggtactgctttgggaaactgccccagctgtcctccttacttgttgtaggtaataaaatccctttgttaaatc

SEQ ID NO: 946531 - DNA, 120 bp, Artificial Sequence
  ENSG00000261404_19 (sequence is synthesized)
ggatcttcgccaccgccgtcatttgtgggcggagaaagggctggagaaaggcgggaatcgcccctcgtccctcgccgtgcgtttccctggacttaagggccgaagggacaccggcgactt

SEQ ID NO: 946532 - DNA, 120 bp, Artificial Sequence
  ENSG00000261404_20 (sequence is synthesized)
gacccctcagaaagccaaccccactaatttactgatgccctaaggggaagtcggccccagaagataagaaaaggaccctgaggtccagagagcttgggttctagaatgcctttaaatctt

SEQ ID NO: 946533 - DNA, 120 bp, Artificial Sequence
  ENSG00000261404_21 (sequence is synthesized)
acctgatgttaatttttctccatcacccctatgggaggtattcattcacagaacaaatgttgatactgaatgcccaccgtatgctaggtacattgttcccgatagggaccaagacatagt

SEQ ID NO: 946534 - DNA, 120 bp, Artificial Sequence
  ENSG00000261404_22 (sequence is synthesized)
caataccctccagcccatgcctttccatctagtagactatacaggtgattgagggggcagttaacatacataaagctgagaattcccctgagatagttcagggtgaacatataggaggct

SEQ ID NO: 946535 - DNA, 120 bp, Artificial Sequence
  ENSG00000261404_23 (sequence is synthesized)
cttttgcttcaggtcaaaatcctccgcgatttctgagaggaactttaaatctctaacataagagcacgcttttaatgtaatttggtctgagatgggacctgaaattctgagcttctaaca

SEQ ID NO: 946536 - DNA, 120 bp, Artificial Sequence
  ENSG00000261404_24 (sequence is synthesized)
acctgaaattctgagcttctaacaagctttcagcagagggagacatctgaccatggacacagtattgctgcttgccagtattctgctggaatgcagtggtgtgattatagctcactgcag

SEQ ID NO: 946537 - DNA, 120 bp, Artificial Sequence
  ENSG00000261404_25 (sequence is synthesized)
agcctcccaagtagctgggactacagatcccgagtgaaaggcctggccacctctgttgacatggtgagcagctaatgaacctttgggaagttgcaaaggggacagtttgcaggtatcact

SEQ ID NO: 946538 - DNA, 120 bp, Artificial Sequence
  ENSG00000261404_26 (sequence is synthesized)
gaaccttctatcattgtgcttcactatggactgcttgttttccaagcatgttgcagagtcatcaacctgggacttccttcagcaccatcctgtgaattcctgtcaccaatcctttgtgtt

SEQ ID NO: 946539 - DNA, 120 bp, Artificial Sequence
  ENSG00000261404_27 (sequence is synthesized)
ggatcgcctaatttttgtatcctgtcttcctcttccttgctttaagctttcagttttgtcataactcatagcttcctgagaaatggtacattggaggtaattttttttgagatcttgcac

SEQ ID NO: 946540 - DNA, 120 bp, Artificial Sequence
  ENSG00000261404_28 (sequence is synthesized)
gttgcttttggagttgctgttgagaggtcaaatgctattctgagttcttatacttagtgtgagacatattttttcactttgagagtttttagatcttttcatttttaaaacagattatgt

SEQ ID NO: 946541 - DNA, 120 bp, Artificial Sequence
  ENSG00000261404_29 (sequence is synthesized)
gctctggagggagtctccttacattcattatattggacaccagctggaaactcatgtcctttaattatgaattttttaaaatatcataactttgataatttccttttccctctatttttt

SEQ ID NO: 946542 - DNA, 120 bp, Artificial Sequence
  ENSG00000261404_30 (sequence is synthesized)
ctttctggacctcatatgaatatctaaactttattcagaatttactgtgtgtggcagactgtcttctaatggctttgcttgtattaggttgcagcaggtatcattatcatcttcattttc

SEQ ID NO: 946543 - DNA, 120 bp, Artificial Sequence
  ENSG00000261404_31 (sequence is synthesized)
cagatgaagaaattgaactcagagaggtcaatgtgtctcagattatgcaggtgatacatagtggaactgggattcaaaccttggctgtgctgaattggggtagggattttaattcctctt

SEQ ID NO: 946544 - DNA, 120 bp, Artificial Sequence
  ENSG00000261404_32 (sequence is synthesized)
tatacaaactttcaagtgccctgaatcccaaactttagagttgtgtggtgtctctcttgagcctttctgaagttgtgcagctatgactagactagattttgctctctctgatcagctgag

SEQ ID NO: 946545 - DNA, 120 bp, Artificial Sequence
  ENSG00000261404_33 (sequence is synthesized)
tgagtctactagtctgacagctttccagttcaaatactttgtagtattaatttattttcagatgtaaaatataaatattatataccatataactaattattgtttcttaatgcattttga

SEQ ID NO: 946546 - DNA, 120 bp, Artificial Sequence
  ENSG00000261404_34 (sequence is synthesized)
gtctgtctcttagtgcaacactcaattagcttaattatattctgtacatctcactttatgtttattgctttcttttaatttttctcatagagttttcatgaggattaaatgacaatatat

SEQ ID NO: 946547 - DNA, 120 bp, Artificial Sequence
  ENSG00000261404_35 (sequence is synthesized)
gtaatgcacatacaacagcgtgtggtacatattacacactatatagataactttcatcattattatttcaaattaaaactagatatctgcaaaagacactattctcccaataaattcaac

SEQ ID NO: 946548 - DNA, 120 bp, Artificial Sequence
  ENSG00000261404_36 (sequence is synthesized)
agttatatgctacctgttggccagaggcctccctcagttctttgctacacaggcctctctggcctccactacaataagcaagaagaaactgccatctctttgtacacctaattgtagaag

SEQ ID NO: 946549 - DNA, 120 bp, Artificial Sequence
  ENSG00000261404_37 (sequence is synthesized)
tgatattccattacttttgccatgttctattagttagaagtgaatcactaggttcagcctacattcaagaggaagggatcacacaaaggtggttccgagatgggtcctggaaaatcggct

SEQ ID NO: 946550 - DNA, 120 bp, Artificial Sequence
  ENSG00000261404_38 (sequence is synthesized)
ttccgagatgggtcctggaaaatcggcttgcaaggaaacaatttcctgctcaggagtcctgcattcctatcatactctgaactccagccactctggcagctgattagatggtgcccaccc

SEQ ID NO: 946551 - DNA, 120 bp, Artificial Sequence
  ENSG00000261404_39 (sequence is synthesized)
tgcctttcccagcccgttgactcaaatgtgaatctcctttggcctcaccctcacagacgtacccaggattgatactttgtatccttctatgcaatcaagttgacactcagtattaaccat

SEQ ID NO: 946552 - DNA, 120 bp, Artificial Sequence
  ENSG00000261404_40 (sequence is synthesized)
gagtcacttcaacctaaagaaactgagtctaccactgcctctctggcagagaaatcatgtgctctctctaacccaggtctttagatgtaaaagaactggtaactgggaggtcaagggctc

SEQ ID NO: 946553 - DNA, 120 bp, Artificial Sequence
  ENSG00000261404_41 (sequence is synthesized)
aatctgtttttgtttcttgagctggcaaaaggcaatctttcccatgtgctcctactcacaaagatttcacaatttgatgatgactcacacatctgcatggaaaaatatgctactaccctc

SEQ ID NO: 946554 - DNA, 120 bp, Artificial Sequence
  ENSG00000261404_42 (sequence is synthesized)
agctgcagtagtttatgcctttcgctcatctagaatgattacccagaagtatgtaatagtcacctaatggggagcaggtgtgagaagaaacagtcattttgaacaaagggaatggacgta

SEQ ID NO: 946555 - DNA, 120 bp, Artificial Sequence
  ENSG00000261404_43 (sequence is synthesized)
cattgcagcatgaaggatttaggttagacatccactcgcggggagaattctcttctgtcagcaagagcagtgaaacactgggatacgggatgaaagcagagttgtggcacattctcaggg

SEQ ID NO: 946556 - DNA, 120 bp, Artificial Sequence
  ENSG00000261404_44 (sequence is synthesized)
catttgaaaagaaaaggccaggtggtttgatttcaatgctttctgaactgctcctctcagagggaggcgaatgaattctgtgatggctgaggatcattttcagttctgtgattcatgagc

SEQ ID NO: 946557 - DNA, 120 bp, Artificial Sequence
  ENSG00000261404_45 (sequence is synthesized)
tccgagttctggggacatctgattaaaaaccaagtcaaagagccgcatattccagaggtcctttctgatcatcctgattgataccgggatttcatttttggcatggtgagggtggccaat

SEQ ID NO: 946558 - DNA, 120 bp, Artificial Sequence
  ENSG00000261404_46 (sequence is synthesized)
aagtatttgttaagaccaattttgtataatgtctttttctttggatgattttttacctgcatcttcaatggtcatagaaatggtctttcctaggggtttaaaacgtattgcaagtagagt

SEQ ID NO: 946559 - DNA, 120 bp, Artificial Sequence
  ENSG00000261404_47 (sequence is synthesized)
atcatctggaatactcaagagatccaaaaagccatcagacattctttctctccgtattatttggaatcgtccaacttttaacaggctgtacaattgtcctttattttcctttctaattgg

SEQ ID NO: 946560 - DNA, 120 bp, Artificial Sequence
  ENSG00000261404_48 (sequence is synthesized)
aatttcaactaggaatgcctgtaggtattgaatgccctcacttcaaatgacttgctgcactaggcaatgataaaggatgcccatacattggcccaaaattgctacactgccatcattttt

SEQ ID NO: 946561 - DNA, 120 bp, Artificial Sequence
  ENSG00000261404_49 (sequence is synthesized)
ggtacgataccatattaaaacctatgtcttgagagacagtgacagtgcctaaaaataatggagatgagattttcccagcttttcggaggatcctgaaaataaaatactacttgccttcta

SEQ ID NO: 946562 - DNA, 120 bp, Artificial Sequence
  ENSG00000261404_50 (sequence is synthesized)
agtgtcatgggaagccactgagggttttcaagcaaggcagtgacatgatctgctagacattttagaaagactgttcttggctctcacatgaagaatggctgaagaaagagctggcaaaag

SEQ ID NO: 946563 - DNA, 120 bp, Artificial Sequence
  ENSG00000261404_51 (sequence is synthesized)
caattccttcccagcaccctccccccgccacccccccaaagtaaatagttgacagtttacttttctaccacccggaagaagttcacttttgcttcaggtcaaaatcctccgcgatttctg

SEQ ID NO: 946564 - DNA, 120 bp, Artificial Sequence
  ENSG00000261404_52 (sequence is synthesized)
agaggaactttaaatctctaacataagagcacgcttttaatgtaatttgattgcagggagaggctcctccgtgctcctgagaggccgaacacagggtcgccagcacagcttactgctcgg

SEQ ID NO: 946565 - DNA, 81 bp, Artificial Sequence
  ENSG00000261404_53 (sequence is synthesized)
aattgtcatgagccctctgcctataatctcatcaaacagcaaagactaactcacaggaaaggagactaaaaaggaaaggga

SEQ ID NO: 946566 - DNA, 120 bp, Artificial Sequence
  ENSG00000261404_54 (sequence is synthesized)
atacccaagaggaaggaatgctacccagagaggccaagaagaatctgcatagacaagccttgtgtgttccccacttagtctatcacaattagattcttctctttgtccagtcatgtttct

SEQ ID NO: 946567 - DNA, 120 bp, Artificial Sequence
  ENSG00000261404_55 (sequence is synthesized)
acctggttgccattcctcattgaacctaaacataaaatcagtttccccttggtgtttaggtcttcatttctgatggctcctgtgtcctgtataactttgattaaataaatttattatgca

SEQ ID NO: 946568 - DNA, 120 bp, Artificial Sequence
  ENSG00000261407_0 (sequence is synthesized)
cgggattcttaggggagagctcctcagcaattggttacatttgacggctttagtccagggacccagacgctactggataaggggtgaaatttgaggtcatatcccgggagagaggaagaa

SEQ ID NO: 946569 - DNA, 120 bp, Artificial Sequence
  ENSG00000261407_1 (sequence is synthesized)
tacgggcctcagttattgtcccactgtcctttcaacccttaaccaacccagttggaggccgcctggaagaatgtagccttggaactagggcctggaattggggctcctaccggttgtgtg

SEQ ID NO: 946570 - DNA, 120 bp, Artificial Sequence
  ENSG00000261407_2 (sequence is synthesized)
ggcttgggcaagtcacttaaccttcccgcatgctcccttcacttggcaactgagggtaacaatagtagttgatgagaagattaaataaactctgataaatgccaacagtggctggcactc

SEQ ID NO: 946571 - DNA, 120 bp, Artificial Sequence
  ENSG00000261407_3 (sequence is synthesized)
aggctgatcagcaccggaccagaaatcattgcatgagctctatctgtcagagacccctgaaacccattccccattctgaaggtgtagacatcacagagtgtggacagaaatagcttctca

SEQ ID NO: 946572 - DNA, 120 bp, Artificial Sequence
  ENSG00000261400_0 (sequence is synthesized)
gagagctgggtgcttccctgcatccaagacagcgtgcttgcaatgaaggaacccctgctttcatcacctgtgcatgagagagacctgttacagcccccaggggtggggtgaaaccagaaa

SEQ ID NO: 946573 - DNA, 120 bp, Artificial Sequence
  ENSG00000261400_1 (sequence is synthesized)
aaaaaaaaaggttttctggctcgatctgaataaaaagaagctggcaccgaagcgatgatctttattgaaatggaatatgctcaccagagtgggtatttagtgacagaagatgagatgtgg

SEQ ID NO: 946574 - DNA, 120 bp, Artificial Sequence
  ENSG00000261400_2 (sequence is synthesized)
aaggagattatgtgaaaaccccaaatgcttgtctataatggtttgacttgacaactctacaatcacctgcaaaattgttgttgttaccttagatacttttggttattaaattgagtattt

SEQ ID NO: 946575 - DNA, 120 bp, Artificial Sequence
  ENSG00000261400_3 (sequence is synthesized)
tagttaagccatcttgagttgacatttaataattcatttaggagccgtgcacagaatattacccagctcaccaaatccaagatgaacaaaattagttttgtgcactaaaaagattttgac

SEQ ID NO: 946576 - DNA, 120 bp, Artificial Sequence
  ENSG00000261400_4 (sequence is synthesized)
aagcctctctcctcctctcctcactctcccctccttctcgtctcctgttctcctccttttctccctctcccttcctggcctctcctcctctcacagttagaagcaagcccgtaaggcttt

SEQ ID NO: 946577 - DNA, 120 bp, Artificial Sequence
  ENSG00000261400_5 (sequence is synthesized)
cttgtcctacagggcaaagacggaagcacatttacagtttttaggctagggtctttaagcccatctaggcgcagtcctaaaaccgtgtaggatgtagataggtcattaatctgtgcttgc

SEQ ID NO: 946578 - DNA, 120 bp, Artificial Sequence
  ENSG00000261400_6 (sequence is synthesized)
tttttttaagcagccctgattttagatctttcatgtccacttccttgagaaacaattttgcctttgtaaagtctgcaccagtaaaatccttcagtgacacccaaaatgtcgacacagcca

SEQ ID NO: 946579 - DNA, 120 bp, Artificial Sequence
  ENSG00000261400_7 (sequence is synthesized)
gcgggagggctgcatggacatgtgggctggtcagccgcaagctctgatatcccggaacacacgtccatcctcccgggtggacggcagtagagccatcagacccacatccgccttcgtcta

SEQ ID NO: 946580 - DNA, 120 bp, Artificial Sequence
  ENSG00000261400_8 (sequence is synthesized)
ccatgtggggaatgctatgcctcgcacagctcaatcctgcatgttcgcgaatcttcaggggtgaaaaggagaggaacggagcattcacagctacaatgaagctacaagcagttgtaggca

SEQ ID NO: 946581 - DNA, 120 bp, Artificial Sequence
  ENSG00000261400_9 (sequence is synthesized)
aaactgtatggtacagcatatgcacagtgcatgccttcccttcacacctcggaaggcagcaggactccccggcaagcgcaagctgtcaccattcccttgggaaggcagctctctgaagaa

SEQ ID NO: 946582 - DNA, 120 bp, Artificial Sequence
  ENSG00000261400_10 (sequence is synthesized)
tacttcttccacctgatggtccaccttccagaatgcagctcctgggaaacagcaacaggccagtctgggaaggcatgtgtttcctcagatgtgttggaacatttcctctgaaaaataaga

SEQ ID NO: 946583 - DNA, 120 bp, Artificial Sequence
  ENSG00000261400_11 (sequence is synthesized)
ggaaaagtggatctgatgtcatactggcaacctctctgatgggactcacatacctgagggtaaaggtggccatggagttagaatcagcattgactccagataaatgcatggccatgttgg

SEQ ID NO: 946584 - DNA, 120 bp, Artificial Sequence
  ENSG00000261400_12 (sequence is synthesized)
ctcatttctccccatcagagtttagacaggggtgaaggaggatggcttcatcacaccatggcgtgtgatgcaccagctgcctgcaggtgatgttgaagatagccaggtgatctctgactc

SEQ ID NO: 946585 - DNA, 120 bp, Artificial Sequence
  ENSG00000261400_13 (sequence is synthesized)
ctaggactttaaatgcttagcagctcgtatcaagagaggttactgtcttgccttggtattgtttttttaaattattcctccaaaatcacatagataaatactgcaatgtataccagctgt

SEQ ID NO: 946586 - DNA, 120 bp, Artificial Sequence
  ENSG00000261400_14 (sequence is synthesized)
tagtgagacattatgatgagttggtttacaaaaaggagatttaattaattcattcaaacaacgaatactttttgggcacctacactattctgggagttttgctaggtctggggggttcca

SEQ ID NO: 946587 - DNA, 120 bp, Artificial Sequence
  ENSG00000261400_15 (sequence is synthesized)
aaataaatatgaaaggtaagtgttatgagtttgctgttgctgcataacagacagcccaaaacttgtggacttaagcagcaatcctgcattaccacccaggtgtctatgagttggctgggg

SEQ ID NO: 946588 - DNA, 120 bp, Artificial Sequence
  ENSG00000261400_16 (sequence is synthesized)
cttggatgatctagaatgggcttgactaagcagctctccatctgggattgctagggtgtctacaatgtctctttccacctgtctctcgcactttttggatcagagaggtaactggggcat

SEQ ID NO: 946589 - DNA, 120 bp, Artificial Sequence
  ENSG00000261400_17 (sequence is synthesized)
gttctccccatggtgataccagaggcacaagagggtctactgaaatcaagggcttctaaatgcctcatctcaaaattggcaccctcctgtctccatctacattccattggctaaaagtaa

SEQ ID NO: 946590 - DNA, 120 bp, Artificial Sequence
  ENSG00000261400_18 (sequence is synthesized)
atcacatagccaacctcagagctcagagttaaggaagcatatgcaacctgtgatgaggccacagcaagggtgtggatgcaagaaggtgtgatggaggtcaacagtgacacctacagtggg

SEQ ID NO: 946591 - DNA, 120 bp, Artificial Sequence
  ENSG00000261400_19 (sequence is synthesized)
aagatatcatttcctattcttcatgctgctgatgggcacaggaatggtattttggtccattaaggctgctataaccaaatactatagactgggtggcccacaaatgacaggtatttattt

SEQ ID NO: 946592 - DNA, 120 bp, Artificial Sequence
  ENSG00000261400_20 (sequence is synthesized)
cagttctggaggctgggaagtccaagaccaaggtgctggcagattcggtgtctggtgaatcagctttctagttcatagacggtgactgcttgctgtgttctcacatggtggaaaagaaaa

SEQ ID NO: 946593 - DNA, 120 bp, Artificial Sequence
  ENSG00000261400_21 (sequence is synthesized)
aaaagagatctctcttgggcctcttttataaaaccaccaatcctgtgcattaggactccatctccatgacttaatcaccttccaaaggccccacctcctaaggccgtcaccttaggggtg

SEQ ID NO: 946594 - DNA, 120 bp, Artificial Sequence
  ENSG00000261400_22 (sequence is synthesized)
aacttcaacataggaatttggggaaaaagcacaaacattcagagagtagcaaatgatgacttcttccctgaaagtattggggggaaaattcccactccattccctctttcctgaaggaca

SEQ ID NO: 946595 - DNA, 120 bp, Artificial Sequence
  ENSG00000261400_23 (sequence is synthesized)
ttaagctacgaaagagttgctattccctgtggtctgcctcaatttttcctttagggaccacaggggaaagatgctgttggcttctgcttccatgtgacagatatccttccccacagcaag

SEQ ID NO: 946596 - DNA, 120 bp, Artificial Sequence
  ENSG00000261400_24 (sequence is synthesized)
tctacggcctggttctgtctctgcctggactctgtcagtggccggagactagacagaggaagacagggaggcttgggctctctgcagatccaatccagctctgcaaacaaccatgctatt

SEQ ID NO: 946597 - DNA, 120 bp, Artificial Sequence
  ENSG00000261400_25 (sequence is synthesized)
ttcatcaacccttgacccttgggtctacttctcatttgtttgagaactcagaggagaaggcctctgattagcatcttagaagttcccaaaatgtcacatggattctgtccttgcagagct

SEQ ID NO: 946598 - DNA, 120 bp, Artificial Sequence
  ENSG00000261400_26 (sequence is synthesized)
cccagggtgatatggggcttatctggggatgacacggggccagggccttgacatccctacacacagaggcatcccccttactgaggttcacaggatgtagcatctacctcctctctgcac

SEQ ID NO: 946599 - DNA, 120 bp, Artificial Sequence
  ENSG00000261400_27 (sequence is synthesized)
ctcaaatattccccaattagtgtccccattgacctagtggggtgaatcttcagcttcgcatcataatgtggaagacaggtggtgcttacatgagaaagagaacagaagagaattaacaca

SEQ ID NO: 946600 - DNA, 120 bp, Artificial Sequence
  ENSG00000261400_28 (sequence is synthesized)
tgatgcaagcaactggatcaatggagacatcccaatttgataaatcaggcccaggtttgtttgtttgtttttttaatcttcatctatgtagtttgtccatccaggtagtaaccaaagaca

SEQ ID NO: 946601 - DNA, 120 bp, Artificial Sequence
  ENSG00000261400_29 (sequence is synthesized)
atgtcctgcctccagtcctactgctggtgccccagctcttctctgcactagctctcatgctttccgcacttctgtccactcacctgcaagatgcaggtgaacacaggaccccctcttcag

SEQ ID NO: 946602 - DNA, 120 bp, Artificial Sequence
  ENSG00000261400_30 (sequence is synthesized)
atgactgtgaacctccgtgagatccagtggatgggaagttcttagcacagtgcagggcacaccggaaggacagatgggccacgagtttcattattgacctagcgcacacattctttgagg

SEQ ID NO: 946603 - DNA, 120 bp, Artificial Sequence
  ENSG00000261400_31 (sequence is synthesized)
tagaggctggcagagactcaagctgcatcctcccccgaacagatgtggaccctgttaatcgtggtctttcatctttgcttacagttatgtgacactgcttctctaagcagatttggggag

SEQ ID NO: 946604 - DNA, 120 bp, Artificial Sequence
  ENSG00000261400_32 (sequence is synthesized)
agatttgttttcataaatcatgtttatatgttaccgaagctttgtttactcatttaggaacaagttaagggcattggggtacatgtctgtggggacagatgggtggggaaaggaagtgtt

SEQ ID NO: 946605 - DNA, 120 bp, Artificial Sequence
  ENSG00000261400_33 (sequence is synthesized)
tgaaggagttctttggtacatacacaaaggtaggaactgacccaagaacctggcttcaaagtcagatgtcgagctgtttcactatgtgacagactgagggccagactcaaagcggggctg

SEQ ID NO: 946606 - DNA, 120 bp, Artificial Sequence
  ENSG00000261400_34 (sequence is synthesized)
ggtaaggcttcttcacccagatcctaaaattacgcaagtccatgaaaatcccgttttgattacatcaagaacttctggcagaaatatttctggtacctaaccttaaactggaggatattg

SEQ ID NO: 946607 - DNA, 120 bp, Artificial Sequence
  ENSG00000261400_35 (sequence is synthesized)
cattggcggtggcggcgctgagagcacgaagcctcagaagtgggacagctgtcggaaatcagatgttgtctatgagagtttattatgctccctctacactgctcaccctcggcaaaagcc

SEQ ID NO: 946608 - DNA, 120 bp, Artificial Sequence
  ENSG00000261400_36 (sequence is synthesized)
aggtgagatcctttcaccaatgaggatgcgtttcctctctagggtttcctgagccacctgtagggccaggagagtccctgaatattcagaatatgcagaaactcctctgacaagcagctt

SEQ ID NO: 946609 - DNA, 120 bp, Artificial Sequence
  ENSG00000261400_37 (sequence is synthesized)
tgcttaagcagagaatgtgatggtgtccaaggtggcttggataaactttacactcacagagaaggctctgagccttcttctgggctgtgggcattaacctgaaccaagtaattgtgtatt

SEQ ID NO: 946610 - DNA, 120 bp, Artificial Sequence
  ENSG00000261400_38 (sequence is synthesized)
ttttttaacttttatacttttctactttagatatgtactcacatgcagaaaagaaatccctatgttattttttgtcaaaacccagtttacttgttattttctttttaaaacttccccgac

SEQ ID NO: 946611 - DNA, 120 bp, Artificial Sequence
  ENSG00000261400_39 (sequence is synthesized)
aactccactggtcacttccatatgaatttcaactctattccccattcatacctctctggcatcaccagcttgtgatggtggtgatgtcatctgactcctggctagagacccacgatcacc

SEQ ID NO: 946612 - DNA, 120 bp, Artificial Sequence
  ENSG00000261400_40 (sequence is synthesized)
ctgagacagcatgtatgtcttcttctttatgtacttccagtgcccaaccaaagccactggttctgagatagtttcagagaaggtggggctgagctgaacgaacacatccagcatgggtct

SEQ ID NO: 946613 - DNA, 120 bp, Artificial Sequence
  ENSG00000261400_41 (sequence is synthesized)
aattatttgaacaagtaattggattggattaaccactagcacgttaaccacctgacgagagtgagttgactaatcttaccgtcttatatataattgagagtagattccgaatgagaggtg

SEQ ID NO: 946614 - DNA, 120 bp, Artificial Sequence
  ENSG00000261400_42 (sequence is synthesized)
agaagagcatctctgcatttttaggggcataagagaggccttgtttattaattcaaccataatcattggttatctaccttgtgtaaggccctgtcataggcacaagtgataggtttatca

SEQ ID NO: 946615 - DNA, 120 bp, Artificial Sequence
  ENSG00000261400_43 (sequence is synthesized)
ctagtactagtataattgttacagcaggtagctagtcagacaggaacagggcaggagagcccccctgactccctccctctctccctcaccaatcaggaatgtcaggcaaccatcaagtga

SEQ ID NO: 946616 - DNA, 120 bp, Artificial Sequence
  ENSG00000261400_44 (sequence is synthesized)
tggtgaggtagttgttaagtatctctctaaaaaaataattgatcaatgacagggaaaggcagtctcccaatacacagaaacacctgtaattgctgatcagcagcttcccgatgacatctc

SEQ ID NO: 946617 - DNA, 120 bp, Artificial Sequence
  ENSG00000261400_45 (sequence is synthesized)
aggagttgggcaagcgggctcaagcatgagcactaagaggcaaaatggcggagtttaaccggtatagcatttggactggtaaaggaagaatgcctcatgtgagcatgcgtacaactccag

SEQ ID NO: 946618 - DNA, 120 bp, Artificial Sequence
  ENSG00000261400_46 (sequence is synthesized)
taaacgcaccacgcatgcagcccctcccaagtgctactgggccactgtacatgggcacagcccaccgcaagggaagaatcaggggagaagtttttaataaactttcactccttctctaaa

SEQ ID NO: 946619 - DNA, 120 bp, Artificial Sequence
  ENSG00000261403_0 (sequence is synthesized)
gcaaagatactcctattaggcattatgtgtcgaagattacctcccaggagtctaggacaaaggtcagacctctttttggtcaacgttaatttttatttgaaactatacaacattgccatc

SEQ ID NO: 946620 - DNA, 120 bp, Artificial Sequence
  ENSG00000261403_1 (sequence is synthesized)
actctgttatcctttctgttttgtcttcaaaataaccctaattggtgggtaaggatattattataaacaagatctcaagagggaagacgctggggcaaggttgcacagtcgatcctggac

SEQ ID NO: 946621 - DNA, 88 bp, Artificial Sequence
  ENSG00000261403_2 (sequence is synthesized)
ccagcctgacaaaaaaaatccagcgtggaggcatgcacctgtggtttcagctactcaagaagtgaggcaggaggattgcttgagcctg

SEQ ID NO: 946622 - DNA, 61 bp, Artificial Sequence
  ENSG00000261403_3 (sequence is synthesized)
acctgtggtttcagctactcaagaatcattatactccagcctgggtgacagagcaaaaccc

SEQ ID NO: 946623 - DNA, 120 bp, Artificial Sequence
  ENSG00000261402_0 (sequence is synthesized)
ggtagcgatctcaccgacacctccctgtgtcacgattccccttagtagtctgtgctgcagtcactaagcatgaccactagatggcgggagaggactgagttgaggttatggcggcggctc

SEQ ID NO: 946624 - DNA, 120 bp, Artificial Sequence
  ENSG00000261402_1 (sequence is synthesized)
ctttctccctgcagggtgggaggaacgctgttgtctctttttcttcctgcccctttgtttgacttcaccattctctgtttccttttcgctccgctgtagttacgtgactcacctttcatt

SEQ ID NO: 946625 - DNA, 120 bp, Artificial Sequence
  ENSG00000261402_2 (sequence is synthesized)
cagtacctcccttcaaggaaagccctgtctcctgtccttggactgggatcacacagagttcttgggatgaccctggctctcccgcgccagccgctctgctgccaagcgcaagcattcgct

SEQ ID NO: 946626 - DNA, 120 bp, Artificial Sequence
  ENSG00000261402_3 (sequence is synthesized)
cccagatgcttcgcccagttctttgcaaatgtcatccaatcagtgtccaggtgttcacggctcatcactggcttactgctctggtctacatagcttgggacattgctgtttatgcaggta

SEQ ID NO: 946627 - DNA, 120 bp, Artificial Sequence
  ENSG00000261402_4 (sequence is synthesized)
aaaaaaaaaagaaaaacaaaagaaagaaggaacggcagcatcacagaatgtgaatcagaatattagtctgtggtactgggagagaaaaagaagattccccagagaggatgaagaccaaac

SEQ ID NO: 946628 - DNA, 120 bp, Artificial Sequence
  ENSG00000261402_5 (sequence is synthesized)
aaacagactgcagacctgccatctctctacactgcacttggattggccatttgctgtatgcacccgggaaaaaaattcagaggaccatgctgttgtgatagctgacctaaagacattctg

SEQ ID NO: 946629 - DNA, 120 bp, Artificial Sequence
  ENSG00000261402_6 (sequence is synthesized)
gagagcacatgagtttgatttttacaaatgacttaataatctgggggaccaagccagggctgcagagtctggaagagcccccgccagcggtgagcagaggaggaggagacccagagtcag

SEQ ID NO: 946630 - DNA, 120 bp, Artificial Sequence
  ENSG00000261402_7 (sequence is synthesized)
gggtggtagaggaacggggtttcccaggcctcttttcacagcaattagaggtctgtgttctccttgaggcaggggcgtaactcccacaagtgttaatgagatttaacgaagagaaaggga

SEQ ID NO: 946631 - DNA, 120 bp, Artificial Sequence
  ENSG00000261402_8 (sequence is synthesized)
gactccagagctgcatttccagtcggggcttccacagcagcagaagaggacagagttctgctgcttccagccggacctggcagagagtcctggaagcctggaccttagcatgttaccttc

SEQ ID NO: 946632 - DNA, 120 bp, Artificial Sequence
  ENSG00000261402_9 (sequence is synthesized)
atcagcaattccacactccagccggcatcgtaagtccccaacctgtggtcgcctagccccttctacgaaccttgtgaagagaagctgcctgtgccttgggctagaaagttctctcgcact

SEQ ID NO: 946633 - DNA, 120 bp, Artificial Sequence
  ENSG00000261402_10 (sequence is synthesized)
ctatccagtgcttaagctcgcctgcctaggtttacatcccagctctgctgagtttccagctaagcctagtttcctcctccaaaaaatggagataataaatggcacctacttcacttgcgg

SEQ ID NO: 946634 - DNA, 120 bp, Artificial Sequence
  ENSG00000261402_11 (sequence is synthesized)
atctaatgaaagtcaagagcttagcacaatgtttgaccatataaagtacctctgagtgatgatgatgatgaatttgggcctagaattgacatcttagtcatatgaggcagaacctagttc

SEQ ID NO: 946635 - DNA, 120 bp, Artificial Sequence
  ENSG00000261402_12 (sequence is synthesized)
taaggaaacacacctcagtgccatgatagaaacatttcatcatgaaaacctaagcagttgtgcaatgaaaatccctgtcatttacaacaattcccccaccccccacgtacttgggataaa

SEQ ID NO: 946636 - DNA, 120 bp, Artificial Sequence
  ENSG00000261402_13 (sequence is synthesized)
ttagaaccaggatgggccaagtttctcgtctcgcctcctcttttcctcagtggcaaccgtgtgatttatggctctgacgggagagccaaccaaactcagttgtttcagctgattgtcccc

SEQ ID NO: 946637 - DNA, 120 bp, Artificial Sequence
  ENSG00000261402_14 (sequence is synthesized)
gtgagttttcaggttgatgtgaaatccaatggggtgtgaactgaaacccaagatctcctgaaagccccatgcactaagctcagtaagggaccaaaccaaaccaaaccaaagctccctccc

SEQ ID NO: 946638 - DNA, 120 bp, Artificial Sequence
  ENSG00000261402_15 (sequence is synthesized)
tcttgcctggcactcctggagctcacaaaaagcctgccacttgtgagcctgtgtgcctggaagggtctgctgcacctggctgggggcccctgggccattgttttcctggcagcagcaagg

SEQ ID NO: 946639 - DNA, 120 bp, Artificial Sequence
  ENSG00000261402_16 (sequence is synthesized)
aggtcttcggctcactcctggagctggccccacaccagcgacctcagaaaccaggcaggctttcatcctggggtctcctaggggttggttacacagagagagtgaggctttgttggaaga

SEQ ID NO: 946640 - DNA, 120 bp, Artificial Sequence
  ENSG00000261402_17 (sequence is synthesized)
ctctcagaggcctggccaggttttcctctcacagccaagaagcaggttctagttctttccaaacccttgataccttctaaactgaaaagcggctgcccactcagaatttgggctaggcca

SEQ ID NO: 946641 - DNA, 120 bp, Artificial Sequence
  ENSG00000261402_18 (sequence is synthesized)
tggagatgctaaaaaccttatcttttaaaagggaattgttactgtctctctgaaaagactgcagggtttctaggagattctgaaatgatgtatacagctagagtctaaaaaggtggaagg

SEQ ID NO: 946642 - DNA, 120 bp, Artificial Sequence
  ENSG00000261402_19 (sequence is synthesized)
agaggtttctgggtagggggttaaaagtgtaagctctggaggcaggcagacctgggagcaagtcccagctcatactcttcatagctgagtgaccttgagaaagtcactcaatccctctga

SEQ ID NO: 946643 - DNA, 120 bp, Artificial Sequence
  ENSG00000261402_20 (sequence is synthesized)
ggttctctttgttcttttgctccctgctcactcttcatcttaccctgtctagcccaacgtttttggtagttcatgttccagtcagaagaaaagaccagtgagaactgggatttataataa

SEQ ID NO: 946644 - DNA, 120 bp, Artificial Sequence
  ENSG00000261402_21 (sequence is synthesized)
ttacaatcatcaaaattaactgagtacagtgctcagcaatttatatcaatttcatgtaatcctgagaacccttttataaggtaggcattgcactgattcacattttaccagtgaggaaat

SEQ ID NO: 946645 - DNA, 120 bp, Artificial Sequence
  ENSG00000261402_22 (sequence is synthesized)
agaagtttaggaaggttgccaaaaacttagaatgacctttctaaaatatgtctggttctattagtctttggtttaaaatcttaccatggatttatcttcaggataaaataaaattcttta

SEQ ID NO: 946646 - DNA, 120 bp, Artificial Sequence
  ENSG00000261402_23 (sequence is synthesized)
acacagaaaaaaggacccttccatgctgtgagccttcaggattcagtggttaaccagtatcatctttctaacttcctgacctgcaagtctccctctgaccacactgagctttcacccttc

SEQ ID NO: 946647 - DNA, 120 bp, Artificial Sequence
  ENSG00000261402_24 (sequence is synthesized)
cctagctgactgaggtgttcttgcacctccaagaatctgcacacaatcttttcttcttccttcatatccttctggatctggctaactctgactatccttcaagacatggttgggtatcgc

SEQ ID NO: 946648 - DNA, 120 bp, Artificial Sequence
  ENSG00000261402_25 (sequence is synthesized)
tttgtctggagaataacctgtatgcccccaaagatggggataaacaccctttctagatgatctggtagtttctgagtctgcttctaacaaggttaactccaaattcctcagcccaagact

SEQ ID NO: 946649 - DNA, 120 bp, Artificial Sequence
  ENSG00000261402_26 (sequence is synthesized)
gaagggaactcctttcactccttttaccctggactctcacccgtgcagctctctggcagccggaagtccaagatgcccatggactcttagcaagccattcacagtcttcatttagggaat

SEQ ID NO: 946650 - DNA, 120 bp, Artificial Sequence
  ENSG00000261402_27 (sequence is synthesized)
tttagtagagtctgctgaatttgtcttaaataggctgactacaatgattttttaaaatgtatacaatcatgcactgcataacaacttttcagtcaacaacagatcaaatatatgatggtg

SEQ ID NO: 946651 - DNA, 120 bp, Artificial Sequence
  ENSG00000261402_28 (sequence is synthesized)
atcccaggacctgaaaatatcctattgcctggtgacattatagccatcagcatgtggtagagcaacacattactcacttgtttgccagttgtaaaaaagaatagcacatacaattacata

SEQ ID NO: 946652 - DNA, 120 bp, Artificial Sequence
  ENSG00000261402_29 (sequence is synthesized)
cagtacgtaatacttgataataataaatgacgatgttactggtttgtatatttactgtactatatttttcacagttattttagggtgtactcctatttattaaaaaaaatgttaactata

SEQ ID NO: 946653 - DNA, 120 bp, Artificial Sequence
  ENSG00000261402_30 (sequence is synthesized)
ccagaagaaggcattgttatcataggaggtgacagctccatgcatgttattttccctgaagaacttccagtgggacagatgtagaggtggaagacaattatactgatgctcctgaccctg

SEQ ID NO: 946654 - DNA, 120 bp, Artificial Sequence
  ENSG00000261402_31 (sequence is synthesized)
ggaagacaattatactgatgctcctgaccctgtgtaggctaatgtacatgtttgtgtcttggtttctaacaaaaaagtctaaaaagcaaaaaatattaaaaattttaaacagaaaaaagg

SEQ ID NO: 946655 - DNA, 120 bp, Artificial Sequence
  ENSG00000250497_0 (sequence is synthesized)
tcagttacaagattcactccaatttgtgatgttaaaaattctagacctcagaatcaatacaatgaaatgtgtcaagagtgtttattcctctgtcatttggtgcaaggcacttctgttgat

SEQ ID NO: 946656 - DNA, 120 bp, Artificial Sequence
  ENSG00000250497_1 (sequence is synthesized)
tctccttttgtccttcaccattctaagacattggttccaatctttgtttttggattcaagtttcctttggaatctggtgaaagttatggacactctagctagaaaaattcacattgcatt

SEQ ID NO: 946657 - DNA, 120 bp, Artificial Sequence
  ENSG00000250497_2 (sequence is synthesized)
gacatggtgtgggatacagcctgacagtctcctgaagccattccacagaacctatatattttatgtattcctgataagacgtaagtcccatttgaagagctcaaatgtttcccacttatg

SEQ ID NO: 946658 - DNA, 120 bp, Artificial Sequence
  ENSG00000250497_3 (sequence is synthesized)
ctgtttctatggaaaggaaaaacaatctgctatccattttacaaacacaaaattaacctctatgctaaagggtggagctttagggtgaaagaacaaaggagtcaaagttacctcctggcc

SEQ ID NO: 946659 - DNA, 120 bp, Artificial Sequence
  ENSG00000250497_4 (sequence is synthesized)
aagctaacagtttcccaacccccactgtcattctcttaggcaaggatcaaattttttaaagttcttaaatttttgaaatgagaaatcctaactatcaaaagcaaaatgaagcaagtgaag

SEQ ID NO: 946660 - DNA, 120 bp, Artificial Sequence
  ENSG00000250497_5 (sequence is synthesized)
ctaattgtgtttagagttagtgcttaaccactcagagaaaagaattatttccattgacttccggagcacagtaattttacagtacatccctctaagaacaaaaatagcaactggaaagga

SEQ ID NO: 946661 - DNA, 120 bp, Artificial Sequence
  ENSG00000250497_6 (sequence is synthesized)
attgtaaactcttttcagtaattatattttcagtttaatattgacattgttatttcaaactataagccttcagcaaagtgttattggagattttcattgcctggatttctgttagtttta

SEQ ID NO: 946662 - DNA, 120 bp, Artificial Sequence
  ENSG00000250497_7 (sequence is synthesized)
aagtagagaaccatggaagatggtcttatgagttggaaaaagagaatgagtgttctaaatctatatccatctcccaaccagctttgtctgtctctaggcaattactccagaacaaacatg

SEQ ID NO: 946663 - DNA, 120 bp, Artificial Sequence
  ENSG00000250497_8 (sequence is synthesized)
ctgtatcacaagaattattaattttatcctaaagtaaacagactcatctccaatgataaaagaaattatctacccacatgacttgaccgatatctttttaagaaatatatccttggtttt

SEQ ID NO: 946664 - DNA, 120 bp, Artificial Sequence
  ENSG00000250497_9 (sequence is synthesized)
actattgtgtgatcaatctgtccaggcttgcctggtacttgtctgtttttagctggaaatccagtgtcttgagatgagcctcacttcggggcaaacagggatggttgatcactgatatgg

SEQ ID NO: 946665 - DNA, 74 bp, Artificial Sequence
  ENSG00000250497_10 (sequence is synthesized)
ggaatcatgggggctggtctttcctgtaatcttcttgtgatagtgactaagtctcatgagatctgatgggttta

SEQ ID NO: 946666 - DNA, 75 bp, Artificial Sequence
  ENSG00000250497_11 (sequence is synthesized)
agtaagaagtgtcttttgcctcccatcatgattctgaggcctccccagacatgtgaaactgtaagtccaattaaa

SEQ ID NO: 946667 - DNA, 79 bp, Artificial Sequence
  ENSG00000250497_12 (sequence is synthesized)
atacagtaaattggtaccagtagagtgggccattgctgaaaatatacctgaagatgtggaagcaactttggagctgggt

SEQ ID NO: 946668 - DNA, 72 bp, Artificial Sequence
  ENSG00000250497_13 (sequence is synthesized)
agaagaagacaggaaaatatgggaaattttggaacctcctagagacttgttgaatcgctttgcccaaaatgc

SEQ ID NO: 946669 - DNA, 89 bp, Artificial Sequence
  ENSG00000250497_14 (sequence is synthesized)
gggaacaggagcaaatggcagcattttgccccaaccttagagatttgtggaactttgaagatgagagagatgatttagggtatctggca

SEQ ID NO: 946670 - DNA, 120 bp, Artificial Sequence
  ENSG00000250497_15 (sequence is synthesized)
aaaaggtgacttgggtgctgttaaaggcattacattttaaaagagaaacagagcataaaagttcagaaaattttcagcccgatgatgcagtagaaaagaaaaaaacattttttttaggaa

SEQ ID NO: 946671 - DNA, 82 bp, Artificial Sequence
  ENSG00000250497_16 (sequence is synthesized)
tttaggaaagagcctaatgttaatccccaagaccatgaggaaaatgtctccaggctatgtcagagatcttcatggcagcccc

SEQ ID NO: 946672 - DNA, 76 bp, Artificial Sequence
  ENSG00000250497_17 (sequence is synthesized)
aatgtctccaggctagcccaggagaaaaaagtgattgtgtgggccgggcccagggtccccatgctatgtgcagcct

SEQ ID NO: 946673 - DNA, 89 bp, Artificial Sequence
  ENSG00000250497_18 (sequence is synthesized)
agcaaaagtttgctgcaggggtggggcgcttgtggaaaacctttgctagggcagtgcagatgggaaatgtggggtcggagcccccaaac

SEQ ID NO: 946674 - DNA, 120 bp, Artificial Sequence
  ENSG00000250497_19 (sequence is synthesized)
ggcagtgcagatgggaaatgtggggtcggagcccccaaacagggtccttactgtggtaccgcctactggagctgtggaaagaaagccaccgttctccagacctcagaatggtagatccac

SEQ ID NO: 946675 - DNA, 120 bp, Artificial Sequence
  ENSG00000250497_20 (sequence is synthesized)
cgacaacttgcaccgcaccgtgcacctggaaaagccgcagacatgcaacacaagcctgtgaaagcagccaggagggaggctttgtaccctgcaaagtcacagagggagagctgccacgac

SEQ ID NO: 946676 - DNA, 84 bp, Artificial Sequence
  ENSG00000250497_21 (sequence is synthesized)
tttgtaccctgcaaagtcacagagggagagctgccacgaccatgggaacccacctcttacatcagcaagacctgaatgtgagaa

SEQ ID NO: 946677 - DNA, 68 bp, Artificial Sequence
  ENSG00000250497_22 (sequence is synthesized)
actgctggatttcagacttgcatggctacccaatacctgtgcccccattgtatctaggaagtaactaa

SEQ ID NO: 946678 - DNA, 120 bp, Artificial Sequence
  ENSG00000250497_23 (sequence is synthesized)
catgattggttttgatatgtgaggacgtgagatttgggggtggcaagggacaaaatggtatgatttggttttgtcccaccccccgcccccaagatctcaacttgaattttatctcccaga

SEQ ID NO: 946679 - DNA, 120 bp, Artificial Sequence
  ENSG00000250497_24 (sequence is synthesized)
atgttgtgggaggggcccaggtggaggtaactgaatcatgagggccagtttttcctgtgctattctcgtgatagtgactaagtctcatgagacctgatgggtttatcaggggtttctgct

SEQ ID NO: 946680 - DNA, 120 bp, Artificial Sequence
  ENSG00000250497_25 (sequence is synthesized)
tcttgctgccaccatgtaagatgtgcctttcactgcctgccatgatcctgaggtctccccagccacgtggaactgtaagttcaattaaacctcattttcttcccagtcctgggtatgact

SEQ ID NO: 946681 - DNA, 120 bp, Artificial Sequence
  ENSG00000250497_26 (sequence is synthesized)
cagcagcatgaaaatggactaatacagtcaccctatcatgcaaacaatttattcatcttcccctgggctgacactctttttaaagcctcccatattaactgaggatagttcttgccaacc

SEQ ID NO: 946682 - DNA, 120 bp, Artificial Sequence
  ENSG00000250497_27 (sequence is synthesized)
aacccctctggaaaagatggcaccatgccaaaatgcctcttttccaatctttatatttcacttttgatagaaggcatggcagagagttgggaatggggtaggatgggaactttcaattta

SEQ ID NO: 946683 - DNA, 120 bp, Artificial Sequence
  ENSG00000250497_28 (sequence is synthesized)
cccaaccatgtgtgccttccctagtgccttatgttctttacttttcttaaaattatttgccttcccaaataagtcatacctccaagacatattctattggctacatggaaggaaaggaaa

SEQ ID NO: 946684 - DNA, 120 bp, Artificial Sequence
  ENSG00000250497_29 (sequence is synthesized)
gaaaatgaacaatttccaaacccagttgagtgagcacctgggacaaagaacataggctctgaaagcatggggttgatacttctgttagtgtatttgagggtggggcaaggcctggaataa

SEQ ID NO: 946685 - DNA, 120 bp, Artificial Sequence
  ENSG00000250497_30 (sequence is synthesized)
agctggaagctggcctcttggggagaaaaaaaaaaaaaaacagggacagcattcaagggcaaaatggaaattaaaaccagacagcttgtccaactaagtcatcaacctgcgggacctgga

SEQ ID NO: 946686 - DNA, 120 bp, Artificial Sequence
  ENSG00000250497_31 (sequence is synthesized)
ggaagaggacatgaccagcaaatggaagcaagattggcactaaggagcaagagggttcaaagagaagcttgggaagcaggatgtggagaaattccatggaaagacagtatggccactact

SEQ ID NO: 946687 - DNA, 120 bp, Artificial Sequence
  ENSG00000250497_32 (sequence is synthesized)
gttcttctgtttggttttaaaatttttattaggaaaattacagacatatataagagcagggggaataatataataaaatcctatgtatgcattttcaactttcaacaattattaatcatg

SEQ ID NO: 946688 - DNA, 120 bp, Artificial Sequence
  ENSG00000250497_33 (sequence is synthesized)
atggctcttgtttcattcatatgcccccatttcttcattccagattgctttgagacatattctagatatattatttcatttattatttcagtatttctctctgaaagataaaagtctctt

SEQ ID NO: 946689 - DNA, 120 bp, Artificial Sequence
  ENSG00000250497_34 (sequence is synthesized)
tataaaagtgtattaataatattattacgtcaaaaaaatacactagctgacatggtttggttgtgtctccactcaaatctcatcttgaattgtagctctcataattcctacatgtcatgg

SEQ ID NO: 946690 - DNA, 120 bp, Artificial Sequence
  ENSG00000250497_35 (sequence is synthesized)
gagggacccagtgggaggtcattgaatcataggggtgagtttttcccatgctgttctcatgacaatgactaagtttcctgagatctgagggttttagcaaagtgagttcccctgcacata

SEQ ID NO: 946691 - DNA, 87 bp, Artificial Sequence
  ENSG00000250497_36 (sequence is synthesized)
agatctgagggttttagcaaagtgagttcccctgcacatactatcttatctgctgccatgtaagacatgacttttctcctcattcaa

SEQ ID NO: 946692 - DNA, 120 bp, Artificial Sequence
  ENSG00000250493_0 (sequence is synthesized)
aggagacatagctctttcatcactgacaatctgtggctctgcctccggccaaatccctttgctccaccctgctgacacctgccccccaaacctcctgtaggaacagctgttttgtaagcc

SEQ ID NO: 946693 - DNA, 120 bp, Artificial Sequence
  ENSG00000250493_1 (sequence is synthesized)
gcttccacatgcccacatgtgcaggcttgattttgcttcaaataatgtctctccttggctccctctatactttctgtctctctcacttgctctgcctttccactgtttagaggccccagg

SEQ ID NO: 946694 - DNA, 120 bp, Artificial Sequence
  ENSG00000250493_2 (sequence is synthesized)
ggttgcagtgaaggaggagaaggtatggatttggacagggccgctgctagcctacaaacagcatcttaatgcagataagaaaaaagcacccctctgggctgatgtggccctgccactgca

SEQ ID NO: 946695 - DNA, 120 bp, Artificial Sequence
  ENSG00000250493_3 (sequence is synthesized)
ccctgggaatgcagagttcgagctggacttcatccttgggtgttgcacaaccagaaccagcaacgcaaagttggacaggagtttaacccggcttctctgctgatgagctacgtgaacttg

SEQ ID NO: 946696 - DNA, 120 bp, Artificial Sequence
  ENSG00000250493_4 (sequence is synthesized)
gggaaacaagcaactgccactgctaccaggaatcctgaagaagagggcacggctgcttatgtcaagaagagaaaggaacctggccactgcccccctatctgcccattctataaggctcag

SEQ ID NO: 946697 - DNA, 120 bp, Artificial Sequence
  ENSG00000250493_5 (sequence is synthesized)
ttgaaggtcacttcctcctacaagaccccacgatattgtttcttcctaaatgtgcctaatattagtccactttgtactgtacaacttgatgagtaggtatgaagcacatggtaagttcaa

SEQ ID NO: 946698 - DNA, 120 bp, Artificial Sequence
  ENSG00000250493_6 (sequence is synthesized)
agcccaaagatgagtaggagcctattcctgtgattacagcaggatggggaagggaggtatgaggagacagggcacaaacaagaggaacatgagacagagtgtggtaggtccacaaaggtc

SEQ ID NO: 946699 - DNA, 120 bp, Artificial Sequence
  ENSG00000250493_7 (sequence is synthesized)
ttcctggggagggttccaaagagggaaacatctggttgggcaatcaagaaagtctttcatggaggatgctgcattggaactgagcactgaaggatggggagtcgctgagaagagggaaag

SEQ ID NO: 946700 - DNA, 120 bp, Artificial Sequence
  ENSG00000250493_8 (sequence is synthesized)
gcattccagagcgtggaactgcaggaacaaagactagaaagtggagagttggaccactcctagaaggagaggagggcagaggaggggcggggctggaggaagcaatccatcactcacatg

SEQ ID NO: 946701 - DNA, 120 bp, Artificial Sequence
  ENSG00000250493_9 (sequence is synthesized)
gcaggggtcctgccatgcggggcctgaaagtcagggaagaggtcagcatagttgtgtgcccacattttcatcttccctattaaaatgcaagcttctcagggcagggaacacacaggacct

SEQ ID NO: 946702 - DNA, 120 bp, Artificial Sequence
  ENSG00000250493_10 (sequence is synthesized)
taatctctatattctgcacagcatctgtcatggggcctgtcgtgtggctggcccctaagacatttgcttgacttgaattaacttctggctgaaatttgcccactacccaataagtggata

SEQ ID NO: 946703 - DNA, 120 bp, Artificial Sequence
  ENSG00000250493_11 (sequence is synthesized)
caatgtttgcagcctgtggggaggggaaagctgggtatcttggtggaggtggtaggagtggaaagacagaagacacctgtccttgaggaacgtgccatctaaggaggagataataccaca

SEQ ID NO: 946704 - DNA, 120 bp, Artificial Sequence
  ENSG00000250493_12 (sequence is synthesized)
aacaaacaaacaaacaaacaaacaaaaccctagcaagtgcaattgactatacactcagtactgtgccaaggccctgagggggtccaggaaggcaggtggaggcctcctgggaggagtggt

SEQ ID NO: 946705 - DNA, 120 bp, Artificial Sequence
  ENSG00000250493_13 (sequence is synthesized)
aaggcaggtggaggcctcctgggaggagtggtgttacagggctagaagtccacacagagtcccattacaaggcaagttccttcactgaaacacgacattccatcactggcgactcaacat

SEQ ID NO: 946706 - DNA, 120 bp, Artificial Sequence
  ENSG00000250493_14 (sequence is synthesized)
tgccccttccgagcctcctctttcaactgatggcatccttgtgagggtcccacatgagacccttgtgagagcacccttgtgagaccaccattccaggggaccaactgcttacagcctgcc

SEQ ID NO: 946707 - DNA, 120 bp, Artificial Sequence
  ENSG00000250493_15 (sequence is synthesized)
tccctcctagccagccctgggacaccggcccctccacggttggatggagggatgctgtctcggggtttttcaagctctccaggcagagtgtaagcagtgtgagacagtgaggtgtcgagg

SEQ ID NO: 946708 - DNA, 120 bp, Artificial Sequence
  ENSG00000250493_16 (sequence is synthesized)
aaagagcttaaaagcatgaacaccaagtccagagtccagatcccagcccctcactatgtgctgagtgatcccaggcatgtgaatccctccaagtgagcaacaatttctgttacctgtaaa

SEQ ID NO: 946709 - DNA, 120 bp, Artificial Sequence
  ENSG00000250493_17 (sequence is synthesized)
agagaagcagcagtccctgcctcacaagtctgtaaaagtgctctgcaaactgccagcgtcagaagacagcattcctgagggcaggggctgtgccccctcaggtccagacagatgttagca

SEQ ID NO: 946710 - DNA, 120 bp, Artificial Sequence
  ENSG00000250493_18 (sequence is synthesized)
ggtgctcaggaagccggtgttgactgaactaagtaaggctccagggagtggtaaggacagggggctacaggcagggtggatgggcttatttcctacccagttttgctacatgttgggcca

SEQ ID NO: 946711 - DNA, 120 bp, Artificial Sequence
  ENSG00000250493_19 (sequence is synthesized)
ggaggcctatgaggggaactgggtgagccagctctggataatctctttaaaaggcaattacagagcaaaacagtcaacaaagtttgtctgttccagtccaagttcacccgcatcacaaaa

SEQ ID NO: 946712 - DNA, 120 bp, Artificial Sequence
  ENSG00000250493_20 (sequence is synthesized)
ctacctggctggtgtatgctttcttcctccctctctctctccctccctctcttgctgctgcttctcctccttgccttgcttctttgctttattcccacttttattcagccactaccatct

SEQ ID NO: 946713 - DNA, 120 bp, Artificial Sequence
  ENSG00000250493_21 (sequence is synthesized)
ggcaggtaccatagacctcaacaccttcccactctccacagagatactggatcaggccactgccctcggcctccgtcgagtctcctgcctcccctgctccaactcccttcctgtctgtcc

SEQ ID NO: 946714 - DNA, 120 bp, Artificial Sequence
  ENSG00000250493_22 (sequence is synthesized)
cttggtcccagagcctcctggaacccgaagactaagcaacaaaggacacccaattctcaccatggggaacagtgcacacctctgcagtcttgctgagctaggatgaggtgggctgagcca

SEQ ID NO: 946715 - DNA, 120 bp, Artificial Sequence
  ENSG00000250493_23 (sequence is synthesized)
ccacactcccgagtccctccatccatcatcttctactctctcttctctgcttccctgctcttcccctttgccctcagctccttcttcatttgattcgccctgcatggtaatgaatgctcc

SEQ ID NO: 946716 - DNA, 120 bp, Artificial Sequence
  ENSG00000250493_24 (sequence is synthesized)
tttgcaagcctacaaccgtccttgtccttccatgtaactcgctttcccctgagcacatgtggctcttttattaatgggcctctcacatgccacagactaatgctgcagattctccctttc

SEQ ID NO: 946717 - DNA, 120 bp, Artificial Sequence
  ENSG00000250493_25 (sequence is synthesized)
cggcttagacaaattgacagcaagttagctgccccaactgaaactggcttctagatccttctgtttggctatttaaatgatgctataaaccaatttctgtcccaccttctcccttgcctc

SEQ ID NO: 946718 - DNA, 89 bp, Artificial Sequence
  ENSG00000250493_26 (sequence is synthesized)
cgaggtcagaggttcgagaccacccttgccaacacggtgaaaccccatctctagtataaatacaaaaatcaactgggtgtggttgtgtg

SEQ ID NO: 946719 - DNA, 74 bp, Artificial Sequence
  ENSG00000250493_27 (sequence is synthesized)
aggttcgagaccacccttgccaacacggtgaaaccccatctctagtataaatacaaaaatcaactgggtgtggt

SEQ ID NO: 946720 - DNA, 87 bp, Artificial Sequence
  ENSG00000250493_28 (sequence is synthesized)
tccatctcagccactcatctgtcttctttcacgaatgaagaaactgaggcacaaggcattcttctcttgcccaaggtcacaaagcaa

SEQ ID NO: 946721 - DNA, 120 bp, Artificial Sequence
  ENSG00000250493_29 (sequence is synthesized)
ggcacaaggcattcttctcttgcccaaggtcacaaagcaaggcctggaggcccagtaccctttgtccagactggcttcctcccctctccacagcactgtcttccacctccctccctccga

SEQ ID NO: 946722 - DNA, 120 bp, Artificial Sequence
  ENSG00000250493_30 (sequence is synthesized)
gaagcctaggttgtcattgctctatcagatttattcttatgcctcatctcccaggacaacttggggcaatctttcattgttgccttctctgcagcagatgggagcatgggactctggcac

SEQ ID NO: 946723 - DNA, 120 bp, Artificial Sequence
  ENSG00000250493_31 (sequence is synthesized)
cggggtgggggcaggaagggatggtgggcaggcttctctaatgccctatgttggggccatcacccagtttgcctcctggaaagactggttgtttgtcctcacgttagcccctcagttaac

SEQ ID NO: 946724 - DNA, 120 bp, Artificial Sequence
  ENSG00000250493_32 (sequence is synthesized)
agccattagccattggctgcctacctagcacccattctccccttcttcctcccatttgatttaggtatccttccctgtcccaaactgtaaggagcttcagaggaggctgagtcagcccca

SEQ ID NO: 946725 - DNA, 120 bp, Artificial Sequence
  ENSG00000250493_33 (sequence is synthesized)
ggtcccagggaatcctgggtggtccaaggtccccatgccaatatgtgatttgggacagtgtgagtgaccccactgaaacaatgagccatgaactgaggcctggaatgaggggcttgcttc

SEQ ID NO: 946726 - DNA, 120 bp, Artificial Sequence
  ENSG00000250493_34 (sequence is synthesized)
tcaggaaagtttcctgtctcctaaaaggacgctcctctctcctctggacatgtctgtgtctggttgggatgcttggactgctgcagccagcccagctccagcctgagcatgaagctgtaa

SEQ ID NO: 946727 - DNA, 120 bp, Artificial Sequence
  ENSG00000250493_35 (sequence is synthesized)
ccaagtggggacacagcagagatggaaaagatttggcctccaacctcaccactccggaatcttgctaagccacgcaataacacatttccgttttctcacaagacgttttgatacagggtt

SEQ ID NO: 946728 - DNA, 120 bp, Artificial Sequence
  ENSG00000250493_36 (sequence is synthesized)
tctgttgccgagagtactctggtaccaaggccctggggatccctttcctctcagaggcattgttgcaccagtccccagtgtctacaggccccctccccaggccccctcttcctccagtga

SEQ ID NO: 946729 - DNA, 120 bp, Artificial Sequence
  ENSG00000250493_37 (sequence is synthesized)
ggctgtgtgctggtccccaagagaccgtcatcacggcagatttgcagaggaagcaccacgccatttctcacatcctcccaccaggcccccagctggttcctgccacacggttgccactat

SEQ ID NO: 946730 - DNA, 120 bp, Artificial Sequence
  ENSG00000250493_38 (sequence is synthesized)
tcccactccgtctgggacatggttttcttggctgatgctctcttattagcacatgatgtggatgctgagatccgtgcatgcctgttggcaatgttctttggcatctctaattccatggcc

SEQ ID NO: 946731 - DNA, 120 bp, Artificial Sequence
  ENSG00000250493_39 (sequence is synthesized)
ttcaagattcttcgagtgcttctagtactaatgccagctagggatgctgggcacagggagcaggtagaaggaaaatcctcaaggttgtggtctcctctccacctgtgtgtggccttcaga

SEQ ID NO: 946732 - DNA, 120 bp, Artificial Sequence
  ENSG00000250493_40 (sequence is synthesized)
ggggtgaaaccactgacgtgtcccccgtaggctctgggcttcacagttcctctctgtggttcagcctgggctggtcagagctgaccctttctaaaccccaaacgtcttctcccccgctgc

SEQ ID NO: 946733 - DNA, 120 bp, Artificial Sequence
  ENSG00000250493_41 (sequence is synthesized)
agtctcctcgggttcctccacccatcaccaggcactgtcttctgcaggctcctgccaatctgcccacgcttctcacctggatccttcaaactgctctgagaattcacctcccaacccttg

SEQ ID NO: 946734 - DNA, 120 bp, Artificial Sequence
  ENSG00000250493_42 (sequence is synthesized)
tgcctgcagctctctcctcacagtcaccaatctcctgccctcaccgaatttctcctctgatggcgtgcgagcctgtcatctctctgcctcatcaatttttccaccttgtttcagatctcc

SEQ ID NO: 946735 - DNA, 120 bp, Artificial Sequence
  ENSG00000250493_43 (sequence is synthesized)
atcccaaagcatctttctccctctcctaattgttttttccctccgctattacttactcatttagctctggaaagcatttggggctacagtcagggagaagcagtttctgttacaaaagcc

SEQ ID NO: 946736 - DNA, 120 bp, Artificial Sequence
  ENSG00000250493_44 (sequence is synthesized)
gggctacagtcagggagaagcagtttctgttacaaaagccctcctggccggacacagtggctcacgcctataataatctcagcactttgggaagccgaggcgagcagatcacgaggtcag

SEQ ID NO: 946737 - DNA, 120 bp, Artificial Sequence
  ENSG00000250493_45 (sequence is synthesized)
aagactccgtctcaaaaaaaaaaagccctccatccatgtctccacttctgggctcatcaggggaaggaggcaccgcccccccccccatttccaccccttctctgctctctcaatacattt

SEQ ID NO: 946738 - DNA, 120 bp, Artificial Sequence
  ENSG00000250493_46 (sequence is synthesized)
ccatttccaccccttctctgctctctcaatacatttccttttcctttctgtctttccatggcctctactcctcatctgtgtgtgcacgcctctcgcttttgtctctgcttctcctgtccc

SEQ ID NO: 946739 - DNA, 120 bp, Artificial Sequence
  ENSG00000250493_47 (sequence is synthesized)
tgtctcttctaaatattaaataccccaaatggctcaatcctcatttaaaatcctctcctctttcttggccccaaaacgttgcttggcaatgaaccctcgattctcttgtttttatatttt

SEQ ID NO: 946740 - DNA, 120 bp, Artificial Sequence
  ENSG00000250493_48 (sequence is synthesized)
catttggttcttcattgttattttcttttgagctgtttgcaaattgtttaggggaatgcaaggctctgtataaattaagatgaatcagttctgactcagggagctgtggctgagttcctt

SEQ ID NO: 946741 - DNA, 120 bp, Artificial Sequence
  ENSG00000250493_49 (sequence is synthesized)
ccccctcccatgacatgaaaataagaatatctcctacatacacacctgtaaccctcatctctctccatgccccagatgacgggattcccaggatcctcccagatgcccatttgtctctga

SEQ ID NO: 946742 - DNA, 120 bp, Artificial Sequence
  ENSG00000250493_50 (sequence is synthesized)
acttctgcagcttaaactctaccccccaatataataccaggacaggaaccattaaaatcccatggaatagttcttacaatctggattttattcaatgaaataaacacttaattacaaaca

SEQ ID NO: 946743 - DNA, 120 bp, Artificial Sequence
  ENSG00000250490_0 (sequence is synthesized)
ttgttttacagtcctgaggttggaagcccggcactgtccccctgggttaaagtggaggtgtcgatagggcgggtcccttctgtagctccaggggaatatctggtccttgcctttcccagc

SEQ ID NO: 946744 - DNA, 120 bp, Artificial Sequence
  ENSG00000250490_1 (sequence is synthesized)
ttctagaggctcctgctttcctcggctagtggcttgtggacccttctgtcttcagagctggcagtgtgcgtttctctgtgcctttctccatagtcatatcttcctctgaccctgaccctc

SEQ ID NO: 946745 - DNA, 120 bp, Artificial Sequence
  ENSG00000250490_2 (sequence is synthesized)
ctgattccatctgcaacctcagtgtcgccttgccacgttacctaacataggcacaggtctggagatcaggacttggatgtttttagtttttttttggaagtactgttctgccttccacac

SEQ ID NO: 946746 - DNA, 120 bp, Artificial Sequence
  ENSG00000250490_3 (sequence is synthesized)
tctctgcagcttttctggtggatgctgcatcagagggcctcgctacctttccaaggcaacatcgttcttggagcacctgctgaggtgctctctgctgggggccgtaagtgagcatcgaaa

SEQ ID NO: 946747 - DNA, 120 bp, Artificial Sequence
  ENSG00000250490_4 (sequence is synthesized)
cttggagcacctgctgaggtgctctctgctgggggccgtaagtgagcatcgaaaaagctgtaaaaagtatccctgctgctctccagggactcacagcatggacggcacctgcattgagag

SEQ ID NO: 946748 - DNA, 120 bp, Artificial Sequence
  ENSG00000250490_5 (sequence is synthesized)
aagacggcaatggtatcgtgatgatctacctctttgctttaaaaaggaagaaaatcctccatccaacaacgtagatggccctggaggatgttatgccaagtgcaagaagaaacgagaagg

SEQ ID NO: 946749 - DNA, 120 bp, Artificial Sequence
  ENSG00000250490_6 (sequence is synthesized)
acaaatgctacatgatctcattcctatgggccctgcaacagccacatccttcttgactgaagacattggccttgccttctatcaggtttcccctctcctggggttcctctgcctgctctc

SEQ ID NO: 946750 - DNA, 120 bp, Artificial Sequence
  ENSG00000250490_7 (sequence is synthesized)
tcaagacacatggaacatgtacacgtgcccaagatggatcggccgctcagccgagcctcccagtgctgcctgccaggctggagggacccgtcttctagggacattgcactcccctgctct

SEQ ID NO: 946751 - DNA, 120 bp, Artificial Sequence
  ENSG00000250490_8 (sequence is synthesized)
tctgagctgacccagtcttgaaccccccctttttttctggctcatgtggtgctgcctggtgtcagagcctggccttctcatatctgccttgtccctgcacagcctgaacgcaggccccca

SEQ ID NO: 946752 - DNA, 120 bp, Artificial Sequence
  ENSG00000250490_9 (sequence is synthesized)
gaatagtcctggctcagggcctggaaaaaaaatcacctagtcagaacaccaaattacaactcagaaggttgcttagtgagcataaaattggagcaaagagaagtggatattctgaaggga

SEQ ID NO: 946753 - DNA, 120 bp, Artificial Sequence
  ENSG00000250490_10 (sequence is synthesized)
tgcttccgatgtgctgtggtagcaagatgcattgttcttttcgactctggggctatttccagaaaaagacctgggaggggacctctaaaattgggacatccatcctcccagacagtgctg

SEQ ID NO: 946754 - DNA, 120 bp, Artificial Sequence
  ENSG00000250490_11 (sequence is synthesized)
aagggcatgaatgcactcctccctctccttcctttgtttaaaatattcctatcattctccaaaggcctccgcaattacagcattatgcattacaggtttcaagattgcatttaatctttt

SEQ ID NO: 946755 - DNA, 120 bp, Artificial Sequence
  ENSG00000250490_12 (sequence is synthesized)
attagttccatctgcatcacttgcttcctgatgagattttgaggagttgccttaatctcatcagccctgtatttacagatcttatcctcataggattgcctctgggaagatttttgctga

SEQ ID NO: 946756 - DNA, 120 bp, Artificial Sequence
  ENSG00000250490_13 (sequence is synthesized)
tgggcaaatctaaccattagagtcaaggcctggatttcatgccactaatcatgtccatagcctgcatgcggacagatcacctgcccccctcgggttcccagggcctcctgctcccaagct

SEQ ID NO: 946757 - DNA, 120 bp, Artificial Sequence
  ENSG00000250490_14 (sequence is synthesized)
aggctttgcttctctcccaatgcaagtgtggcttcctcagaggcaggtctctgagtctcctggccaggaaagaccctctgatatgaacctgtagcactgcacacctcccttcatagtgcc

SEQ ID NO: 946758 - DNA, 120 bp, Artificial Sequence
  ENSG00000250490_15 (sequence is synthesized)
cagccgtcgttattcttcccacctttagggtttgagtagatgactgtgtgtattcatttcctagggctactgtgacaaaacatagattaggtgggtcctacagttctggaggccagaagt

SEQ ID NO: 946759 - DNA, 120 bp, Artificial Sequence
  ENSG00000250490_16 (sequence is synthesized)
ccaagatgaaggtgccctcaggggaggatctgtcccatctctctccctaaggctcccttaagactctagggaggatctgtcctgtgcctctctctgttgcccaggctggagtgcaatggc

SEQ ID NO: 946760 - DNA, 68 bp, Artificial Sequence
  ENSG00000250490_17 (sequence is synthesized)
aactcctgacctcaaacacgcctggccctctcccagtttctgttggccacagaggtcccttggcttgt

SEQ ID NO: 946761 - DNA, 120 bp, Artificial Sequence
  ENSG00000250490_18 (sequence is synthesized)
tctcccagtttctgttggccacagaggtcccttggcttgtttccacactgtgcactctaatcctccatcttcacatggccgtcttctctctgcattgtcacatcatcttctctctgtgta

SEQ ID NO: 946762 - DNA, 120 bp, Artificial Sequence
  ENSG00000250490_19 (sequence is synthesized)
tgatggtgcccacgtttccccttgttttaaggacaccagacatattggttagggcccaaaccctgaggccattaggcctgattttaccttgattatctctgttgggaccttctttccaaa

SEQ ID NO: 946763 - DNA, 120 bp, Artificial Sequence
  ENSG00000250490_20 (sequence is synthesized)
taagatcacattctgaagtccttggagtcaagacttcaacactccatggcatcctaacgaagtcattgactttctttgttgttactttcagcatatcccctgtctggcacaaagggagca

SEQ ID NO: 946764 - DNA, 120 bp, Artificial Sequence
  ENSG00000250490_21 (sequence is synthesized)
cagttgacctgtgaacagtgcagaggttagggactcagacctaccttgcagtagaaaatttgagtataacttttgattcccccaaaacttaagtaccgatagcctctgttgaccaggaac

SEQ ID NO: 946765 - DNA, 120 bp, Artificial Sequence
  ENSG00000250490_22 (sequence is synthesized)
cttactgataatttaaacagaagataacacatattctgtatactatatgtgttatacgctgtatttttacaataaggcaagctaaagaaaataaattgctaataaaaaatcgtaagaaag

SEQ ID NO: 946766 - DNA, 120 bp, Artificial Sequence
  ENSG00000225610_0 (sequence is synthesized)
acacaaactacgaggtatcccaactgctcatgctgcttgcttctcctggaacaccttctccatttctgaatgtccaaacaccgcccatctgtggatgctctgttcagatcactctactca

SEQ ID NO: 946767 - DNA, 120 bp, Artificial Sequence
  ENSG00000225610_1 (sequence is synthesized)
gggaggggcacagtggctctcgcctgtaatcccagcacttcggaggctgagtgatgaaagactgaccagtagaaggtggtgaagatgaagaatagtggaactggcaacgaccttctgaac

SEQ ID NO: 946768 - DNA, 120 bp, Artificial Sequence
  ENSG00000225610_2 (sequence is synthesized)
taacctggaggagaggagattgccttacacgtgcactgctgaccgatgatgcccactgaccatcaccagcacccctaggatgccaaggcacggcaaagacggcgggcaagcatcagcgga

SEQ ID NO: 946769 - DNA, 120 bp, Artificial Sequence
  ENSG00000225610_3 (sequence is synthesized)
ggtataggtcaacagaaaggtcaattctttcatgtaagaagaaaaccgtatggacagggcacctctgtgcatcccaaacatggtttccttcctaatcaaagagttgtctttgccactgtg

SEQ ID NO: 946770 - DNA, 120 bp, Artificial Sequence
  ENSG00000225610_4 (sequence is synthesized)
gactgtgatcacagattgagaacaagctctgataaggaagagctttagtgtcagtcacagaaaatgatgattcttaactgcaggtgagagattgggcttatttaaaaataaatcttataa

SEQ ID NO: 946771 - DNA, 120 bp, Artificial Sequence
  ENSG00000225610_5 (sequence is synthesized)
ataattatttggcaaagataaagtatcagctttctttagcctcaagccactaaagacagtaacaccaattttaaggaaaaaaaataataacctcactttccaacttgctccccatgccta

SEQ ID NO: 946772 - DNA, 84 bp, Artificial Sequence
  ENSG00000225611_0 (sequence is synthesized)
ctgagccagcgagaccatgaacccaccaaaaggaagaaactctgaacacatcttgacatcagaaggaagataacactcaccgcg

SEQ ID NO: 946773 - DNA, 120 bp, Artificial Sequence
  ENSG00000225611_1 (sequence is synthesized)
ttattcataattaccaaaaatgagaaaaaaacaagatgtacttcaataggaccgcggcggctaggtcacctcctccggacgccgacacgcgctgccctggcaaccgtcaccagggaaaca

SEQ ID NO: 946774 - DNA, 120 bp, Artificial Sequence
  ENSG00000225611_2 (sequence is synthesized)
agcgacgtcacttgcgcgttttcaacgctactctacgggggccgagggggcgccaagagttctgaaagtgacagaggcgctgatggcgcgctgggctggatccaagcgagcacgatctcg

SEQ ID NO: 946775 - DNA, 120 bp, Artificial Sequence
  ENSG00000225611_3 (sequence is synthesized)
agtgcgctggagattttaaatcttctggagtatatttttaaaaaagttttgtggaccaaacgttctgcacagagatgcccattccgctctcctgttggggagttaaaaagcgaacgatct

SEQ ID NO: 946776 - DNA, 120 bp, Artificial Sequence
  ENSG00000225611_4 (sequence is synthesized)
caccatgaaatttaaagtagccattcagatatatttgaaaaatgtaaaacagtgtggggaaaggccatgttatgatggtgagtgaaggaagcaggacgcaatatagcaatgctaaataaa

SEQ ID NO: 946777 - DNA, 120 bp, Artificial Sequence
  ENSG00000225612_0 (sequence is synthesized)
gggaagatgggccttctgtcctggaagggccagtctcctgggcagagcgctatgcataagaaggaaagccgtgttactcaatggttctactgaaccactaagcaacaggggctctggggg

SEQ ID NO: 946778 - DNA, 120 bp, Artificial Sequence
  ENSG00000225612_1 (sequence is synthesized)
cactgtggagatagagaacccttaggaaggcgatgctggatcctatgggtctcaacagagggccttacggggccactgtaacaaccaaccacgaatgggaggctcaacacaactgaaacg

SEQ ID NO: 946779 - DNA, 120 bp, Artificial Sequence
  ENSG00000225612_2 (sequence is synthesized)
cacgtcctcacagtcctggaggcccgaactccaaaaccaaggcgccagcagggccacgcttcctccacggagcctcggggagcagacggtcttgagacgagacttgctcccgcaaccctt

SEQ ID NO: 946780 - DNA, 120 bp, Artificial Sequence
  ENSG00000225612_3 (sequence is synthesized)
ctccgccatctctgcctccgtggccacgcggcatcttctccctggcatgggctgaaccaccgcatctcgggcagggaagaaaaaaatgctggcaactaaaccgtgaggtcccttcaagag

SEQ ID NO: 946781 - DNA, 120 bp, Artificial Sequence
  ENSG00000225612_4 (sequence is synthesized)
taaaatggaacctaagaggaagacggaacctaacagagatgtcgggaggagaagcagcatgcatcttagaattgataagcacgatacatgacgacagctactcaggaggctgaggcagga

SEQ ID NO: 946782 - DNA, 72 bp, Artificial Sequence
  ENSG00000225612_5 (sequence is synthesized)
acattgcactccagcctggatgacaagagcacaactctgcctcaacaataaaaataaagaaattaaacataa

SEQ ID NO: 946783 - DNA, 120 bp, Artificial Sequence
  ENSG00000225612_6 (sequence is synthesized)
ggactgggaggcacaggtcccaggaacacgtgtgctgggcacacgtgagtacatgcagggtcaaagctggcaggcagacgggttgagcctctccgtgctcccacggggtctgcatcagat

SEQ ID NO: 946784 - DNA, 120 bp, Artificial Sequence
  ENSG00000260515_0 (sequence is synthesized)
agtgccgggattacgggcatgagccactgtgcgcaatctgattttagatttcaaacagtataggataaaattgagagaaccatttggcaataaaaaatattaaaactgagttttgcagag

SEQ ID NO: 946785 - DNA, 120 bp, Artificial Sequence
  ENSG00000260515_1 (sequence is synthesized)
aagggcatgatctatatatctactattaaaaaccattcaactgaatatatttccatggccatcacaccattattaaaacctctgaaaagactaacatgtaccagagtaaagatccacata

SEQ ID NO: 946786 - DNA, 120 bp, Artificial Sequence
  ENSG00000260515_2 (sequence is synthesized)
agacatgtgtattagggttctccacagagacagaaacaataggatatatgtatatataaaccagagtttattaagaattggctcacacaattagaaggtgaagtcccatgatgactgtct

SEQ ID NO: 946787 - DNA, 120 bp, Artificial Sequence
  ENSG00000260515_3 (sequence is synthesized)
gcaagctggaggagagaagccagttgtgtgtctcagtccaagtccaaaacccttaaaaccagggaagctgacaacgcagccctgagtctgaggccaaaggcttaagacccactgagtggc

SEQ ID NO: 946788 - DNA, 120 bp, Artificial Sequence
  ENSG00000260515_4 (sequence is synthesized)
caccagtgcaagtcccagagtccaaaggctgaagagcctggagtctgatgtccaagggcagcaggaaaggaagcgagcatctggcatgggaagaagaaagattcagaagactaagcaagc

SEQ ID NO: 946789 - DNA, 120 bp, Artificial Sequence
  ENSG00000260515_5 (sequence is synthesized)
aaacgaatcccaccttcctttgcctactttgttctagtcatgctggcagcaaactggatggtaccactcacactgagggtgggtctatttctcccagtctactgactcaaatgtcaatct

SEQ ID NO: 946790 - DNA, 120 bp, Artificial Sequence
  ENSG00000260515_6 (sequence is synthesized)
aacaccctcacagacacacccagaaaaatactcttccagccatctaggcatccttcagttcaatcaagttgatgcctaatattatccattacaatatgtcttgaagggaaccatgaatgt

SEQ ID NO: 946791 - DNA, 120 bp, Artificial Sequence
  ENSG00000260515_7 (sequence is synthesized)
atgaatgtggctgttggcacctggaattttctgaaatccaatgctaagaagtagattaagttgttgtaagagatgtacctccaaaggaatcaccagactgaattaaaagagattccaagt

SEQ ID NO: 946792 - DNA, 120 bp, Artificial Sequence
  ENSG00000260515_8 (sequence is synthesized)
attaaagacttaaaagaacccttggatcaccaaacatttagggttggaagtggtctgagaaagctgtatggacatcaagcaaaatgtattccccgatgcctactttagatgtgtcagata

SEQ ID NO: 946793 - DNA, 120 bp, Artificial Sequence
  ENSG00000260515_9 (sequence is synthesized)
gtatgatggaaaagaaagctggggccatggagaattatggagaatgaggcttcttgcacagagcgtatttaagggctgagctgacatcctcagacctagggtagacctcccaatatcggt

SEQ ID NO: 946794 - DNA, 120 bp, Artificial Sequence
  ENSG00000260515_10 (sequence is synthesized)
tgtaagttaggtgtgtgtggggtaggtaacttgtctttttactgcataactctccagaacaagaggagccacacccaggcccagtttagtgactgggtatcacctgaacaggctgaattg

SEQ ID NO: 946795 - DNA, 120 bp, Artificial Sequence
  ENSG00000260515_11 (sequence is synthesized)
tgtccccccaaattcatatgttggagccctaacctccagtgcatttggagacagggcctttaggaggtcattaagatgaagtcaagtcataagtgggggggccctgatccaataggactg

SEQ ID NO: 946796 - DNA, 120 bp, Artificial Sequence
  ENSG00000260515_12 (sequence is synthesized)
gtgtctttataagaagaggaagagacatcagtaatgcatgcacacagaaaaataagccatgtgaggacatggtgagaagacggccatctgcaagctaagaagagcggacccaggagaaac

SEQ ID NO: 946797 - DNA, 120 bp, Artificial Sequence
  ENSG00000260515_13 (sequence is synthesized)
caaacctgaagataccttgatcttggacttccaccctccaaaattttgagaaagttttattaagcttctcggtctgtggtattttgttatgggggccctagcaaactaacatgctcctga

SEQ ID NO: 946798 - DNA, 120 bp, Artificial Sequence
  ENSG00000260515_14 (sequence is synthesized)
tgaagatagtaccatgcattacccagaggtacttgatccgtgactgaatgagacttttgagttgtctctcctggggagagaataaatgaattttgctcaagaaagaaacactgaactgat

SEQ ID NO: 946799 - DNA, 120 bp, Artificial Sequence
  ENSG00000260515_15 (sequence is synthesized)
catttggtgactggagaggtggattgtagctacatgaggactccagacattcaccaatattccagcatggcaggattatacttccatgtccccttggatgtaggaatggtcatgtggctc

SEQ ID NO: 946800 - DNA, 120 bp, Artificial Sequence
  ENSG00000260515_16 (sequence is synthesized)
acgtggccaattaaatgtaagcagaaatgacaggtgtttcttctaggcagaatcaatcccttaagagctaaagtacaatttgccgtgttcccttcctcctgtcactgcaatctgtgacat

SEQ ID NO: 946801 - DNA, 120 bp, Artificial Sequence
  ENSG00000260515_17 (sequence is synthesized)
tccagatggtagagtgtgagccagcctgtgttcctgaatgcagatgacatggagcagagttccagccaatctgcaatagttgtgggcatgggtgagaaataatgtttaaagttaatgaat

SEQ ID NO: 946802 - DNA, 120 bp, Artificial Sequence
  ENSG00000260515_18 (sequence is synthesized)
ttttggaattgtttattactgtggcataatctagtctattttgactgatctaatcaatattaacggtagggaaaatttccaaaatcctcatagaattcagttgtatggtgtgatcaatta

SEQ ID NO: 946803 - DNA, 120 bp, Artificial Sequence
  ENSG00000260515_19 (sequence is synthesized)
attcaatgtattgggttttgtccttcagtaaataaagaagtagagctgacatccgaggatgcccaccaatcactgagctgtgctttgtattaaaaggtgatgctattgaatctctgtcag

SEQ ID NO: 946804 - DNA, 120 bp, Artificial Sequence
  ENSG00000225619_0 (sequence is synthesized)
agtcaataacctagggcttcaccatgccaaatccaaaatgttctgttgttgatctctggtatcaacagctcagaaactgcagaacagacccctgacagttaccaacactttcctccaaac

SEQ ID NO: 946805 - DNA, 120 bp, Artificial Sequence
  ENSG00000225619_1 (sequence is synthesized)
agcattctgtttactgtttcatgtattctcaggagttcaactttgctccactttgggaagtggaacaaatgctctggtgaagacagggagcacaggacatatttacctggaggggatatc

SEQ ID NO: 946806 - DNA, 120 bp, Artificial Sequence
  ENSG00000225619_2 (sequence is synthesized)
aaagagcagcctcaagacttgcaaaacaaagtcgtcccaatgaattatctgtgcctacagccgcacttggcaccttcggctaagccagcgtctgacaagcagttgttcccacggcagcca

SEQ ID NO: 946807 - DNA, 120 bp, Artificial Sequence
  ENSG00000225619_3 (sequence is synthesized)
cccctgccttccatcttagggactcacccagaaaattctccaacctgctccacgactacaaaactcttctaatgcttttgaacgcccaccatttgttctccattcatccaatcaactttc

SEQ ID NO: 946808 - DNA, 120 bp, Artificial Sequence
  ENSG00000225619_4 (sequence is synthesized)
cactgcacatcttctctctctaccggcgcccaggcaaggggccacttctcatctgtatgctaattattttgccacatggacaaaagtaataatgctttcagacaggaaactaacaggcct

SEQ ID NO: 946809 - DNA, 120 bp, Artificial Sequence
  ENSG00000225619_5 (sequence is synthesized)
gaagtcgaagatggaaattaataagttgacaccactaaacgacagggaagacgggcatgcgtacagcgctctgccgggcgggtgaagtgcagcctccatcaaaaggcagcagacagacag

SEQ ID NO: 946810 - DNA, 120 bp, Artificial Sequence
  ENSG00000225619_6 (sequence is synthesized)
cgccgggctgcgagtcccgcctgtgctgcgtgcatcaggctcacgctcccttagagaccacatcgctgcagcagaagagcctcggaagcatcctgctgacttaccctgtctcaggctgcc

SEQ ID NO: 946811 - DNA, 120 bp, Artificial Sequence
  ENSG00000225619_7 (sequence is synthesized)
tccttgaagcaacacaaaacatatccacttccccaaatcctaaggtgggagggaacttcactgctgatctagatatttttcaagctacagctgtggattaaaccagtaatttctaacctt

SEQ ID NO: 946812 - DNA, 120 bp, Artificial Sequence
  ENSG00000225619_8 (sequence is synthesized)
cctgtgtatcaagcttgcaacacagtcagacacgagtggagatgtgtgcagtatgctgcttgccttgtacccacaggcccctaaatctctagagcagaatgtgtatcatgagcagtgctg

SEQ ID NO: 946813 - DNA, 120 bp, Artificial Sequence
  ENSG00000225619_9 (sequence is synthesized)
tatttaatgtaatagatgagaactgtaaataccggagtcaggctgttagcagctaccagctaggcaatatatctaaaaatatctctcgtatcattgatgttatggtaaattcatgctgtg

SEQ ID NO: 946814 - DNA, 120 bp, Artificial Sequence
  ENSG00000225619_10 (sequence is synthesized)
gccaaagaaacctcacagaagtaagctgaacctacagtattttagatggcattgctggttaacatccaagcaaaacaaaaagaggttccaaaacctgtcacttcttaaaataaaagaatg

SEQ ID NO: 946815 - DNA, 120 bp, Artificial Sequence
  ENSG00000225619_11 (sequence is synthesized)
gtgacacaagagttaactctaaccaattcttaaaatcgttttcgggttgccaacctcactatattattctgtttcagtatgagcttcttgcatcgttttcttttaaaacaaaagctatga

SEQ ID NO: 946816 - DNA, 120 bp, Artificial Sequence
  ENSG00000225619_12 (sequence is synthesized)
aactacttgtctaagaaagttaaaacatttttcaccttttattattgtttgaagaaaaaaatatagaaaaagttttctttgaaaagacaagtcctaatatggtttttaaaatagctaagg

SEQ ID NO: 946817 - DNA, 120 bp, Artificial Sequence
  ENSG00000225619_13 (sequence is synthesized)
aagtgctgattttataaatggcttcttgagtcaagccacagatgttttactctggtggtgaccataccgtttcactctctgcaaacctctctcctataacactcaccgctatgaaaggct

SEQ ID NO: 946818 - DNA, 120 bp, Artificial Sequence
  ENSG00000225619_14 (sequence is synthesized)
acgttaaatcataaaggctactttagcacctcccaccctcgccccaggaaactagccttgaatacacagactcatgtttaacaacaactccgggcagcatgcagacatagcagtgcccac

SEQ ID NO: 946819 - DNA, 120 bp, Artificial Sequence
  ENSG00000225619_15 (sequence is synthesized)
aatggcattacactgaaggagaagctcttttgagagagggtccattgttggcgcgttcacacgcctaaccaagagactttaggaagtgttgtgtatgcaatcaaatgagagctggagata

SEQ ID NO: 946820 - DNA, 120 bp, Artificial Sequence
  ENSG00000225619_16 (sequence is synthesized)
ggcaggcaggtggagaaacaactatttttgaagtacttaagagaagaactgggagctgcaaccaccaggcaaattaagaaaaaaagaaatcctatgtaacctttacaataaaaggaaaga

SEQ ID NO: 946821 - DNA, 120 bp, Artificial Sequence
  ENSG00000225619_17 (sequence is synthesized)
ggtacctttttgtggaagagctggtggccatcaagccaaatcctgttccgcagtctgcttctcacccacgcagggctctgtctgccgtggagagaccatcgcacgtgctggtcacagttc

SEQ ID NO: 946822 - DNA, 120 bp, Artificial Sequence
  ENSG00000225619_18 (sequence is synthesized)
cctctgtgtttccattccattcacccctaccctctggcgcccgcactccaccagcccactatccacagtgagtgagagtcgagagcagaacagcacgagggagcagccactgcaggcttt

SEQ ID NO: 946823 - DNA, 120 bp, Artificial Sequence
  ENSG00000225619_19 (sequence is synthesized)
ccacagagcacagctctgactgtggtttccgtggggagactgacagagaagccccaagttaccaggaacaccctcttccagctctcagaggtaattcctctgaagaccgagctcttccct

SEQ ID NO: 946824 - DNA, 120 bp, Artificial Sequence
  ENSG00000225619_20 (sequence is synthesized)
gatgtgttgggaccagacttactggttactatagaggctgcaattcccttcccatcgagccctgctagacaccactgcagtctgaaagcaaggaaagctttaagagaatgtcctgtacca

SEQ ID NO: 946825 - DNA, 120 bp, Artificial Sequence
  ENSG00000225619_21 (sequence is synthesized)
ttccatcttctcacaacacaatactccttacagtaagactaaaatattcccccccgccaacttttccaataatcaccacgtggggagcagagattattttaaaagaggtacatggtagga

SEQ ID NO: 946826 - DNA, 120 bp, Artificial Sequence
  ENSG00000225619_22 (sequence is synthesized)
aaattttcctagcagaacagcctaatacagcaatgcttatcactctttctctatctaataaataagcattcatgcattctttctagttttataacacctggcttacattttctctgccat

SEQ ID NO: 946827 - DNA, 120 bp, Artificial Sequence
  ENSG00000225619_23 (sequence is synthesized)
ctctgattacttctacagataccctgaggactcattatgatgtcaaagccaaaaacacttccattgtagaaacatgcatagaaaaatcactgtgtatgcttgaacaatgcaggtgtgaaa

SEQ ID NO: 946828 - DNA, 120 bp, Artificial Sequence
  ENSG00000225619_24 (sequence is synthesized)
gaaacacagagagaagagagggtggcaaaacagacaaacagggaccaagttaaagagagagggggcagaagagagagaaaggaaagtggagagaaagagagagaagagacaagacacaaa

SEQ ID NO: 946829 - DNA, 120 bp, Artificial Sequence
  ENSG00000225619_25 (sequence is synthesized)
gatattacaaacagaaccacattgcattgaaatagcccactgatggaaaaaatggatagctgttgcctttaaataatctaatatcagaaaaaatcatgcaataaaatactataaaagtag

SEQ ID NO: 946830 - DNA, 120 bp, Artificial Sequence
  ENSG00000225619_26 (sequence is synthesized)
actgtttcatgtattctcaggcacatgcacacgaagacggatcaagccgctaccccaaaccggcagcaaatgactattcttttgttactgaccatcaggagttcaactttgctccacttt

SEQ ID NO: 946831 - DNA, 120 bp, Artificial Sequence
  ENSG00000244278_0 (sequence is synthesized)
ttgtgtggaaatgacaggacacatcctcaaatcctgccagcatttgtttagcattcataaagctttatctagacaaattcacaaagacagcaacaataatgatgctgccgtggaaaaggc

SEQ ID NO: 946832 - DNA, 120 bp, Artificial Sequence
  ENSG00000244278_1 (sequence is synthesized)
attcctccattctgctgtgtatttcagtgatggattcccttattgctgggagattaggatacacaaaaagagacacgagcaatatgcgtgtgctcaaaggggtgaccacgtgaagaggaa

SEQ ID NO: 946833 - DNA, 120 bp, Artificial Sequence
  ENSG00000244278_2 (sequence is synthesized)
gcaagaaagggccatggacaacccaaagaaagaggcctcagaggagtacagtcctgccaccttgatctcagacttccagcctccagaactatgagaaatacatttctgttgttaaagcca

SEQ ID NO: 946834 - DNA, 120 bp, Artificial Sequence
  ENSG00000229105_0 (sequence is synthesized)
attgtgagcagcaaaacctgtgcgactgcatctgacatcgccaggatgggggcccaaccaagatccccagagacgtgaagatgcatggaataacacgtgaagagaggaaacttcgggcct

SEQ ID NO: 946835 - DNA, 120 bp, Artificial Sequence
  ENSG00000229105_1 (sequence is synthesized)
gtggtcaaaatgtgttcaccacggcagacaactgcttgggtgacagctttggcctctggatgaattctccttggcgagcaatcgtcccacctgtaggtgccttcatgatcgtctgtgtgc

SEQ ID NO: 946836 - DNA, 120 bp, Artificial Sequence
  ENSG00000229105_2 (sequence is synthesized)
agggcaccaagcaggccatctaaagccactaatctcaaagagagcttacccagggacaggactttccaaaaggaaaggagcacaatagaagagaatggctgctgctaagttccatccaac

SEQ ID NO: 946837 - DNA, 120 bp, Artificial Sequence
  ENSG00000229105_3 (sequence is synthesized)
agtggcctcttttgaaaagtcgtcctcatccacagatggtcaacattatgatggaattttgttttcctctcatgtgaatttggagctgatagatgcttctcagctccttgctgggacctc

SEQ ID NO: 946838 - DNA, 120 bp, Artificial Sequence
  ENSG00000229105_4 (sequence is synthesized)
actgacaaacccgctggccccagaactacttgtgacatcaggatgacgcttggtacaagccaggcactgagctgggcattgaggatgaagagatgaaacacaattctagcatctaaatag

SEQ ID NO: 946839 - DNA, 120 bp, Artificial Sequence
  ENSG00000229105_5 (sequence is synthesized)
accttggttggaagttgagttccagagtgggatatcagactcaaggcccagacttcacttctggtctcctgacttccaagtgaacagtgttgcagcttccctgactgcagttataggaga

SEQ ID NO: 946840 - DNA, 120 bp, Artificial Sequence
  ENSG00000229105_6 (sequence is synthesized)
agacagggaggagataaagatgagagtgcctcgggaagagcagggatggaggagacaacctgagtcttctgatccaaaggagtgtgaagatggagtgacattgagagaactgcagaagaa

SEQ ID NO: 946841 - DNA, 120 bp, Artificial Sequence
  ENSG00000229105_7 (sequence is synthesized)
tataatagaatggggaaatcaagtatataaagagtcatgtgaaattggcaagacaagcatcaatttacagaggaggaaactgaggtccagagagatcaattaaactgtctaaagtcacat

SEQ ID NO: 946842 - DNA, 120 bp, Artificial Sequence
  ENSG00000229105_8 (sequence is synthesized)
ggcctgacataaaagtagtggagagtcaaactcagggctatgtacctgcggtggtggacttcatctttccaatcctacttccttatctgtgaagtgggcaaaccaatcatttttacccca

SEQ ID NO: 946843 - DNA, 120 bp, Artificial Sequence
  ENSG00000229105_9 (sequence is synthesized)
gagagctgtgaagaacctgtatcagttatacagaaagttaaagaacttatcgcagtgcctggaagccaggatgtggagccaggagagaaggggcattcaaagggcctgggagacccttgg

SEQ ID NO: 946844 - DNA, 120 bp, Artificial Sequence
  ENSG00000229105_10 (sequence is synthesized)
tgaaaacaatcagttggtttcaacatcccagagagattctcaatcaggtagctcacagagaccaaagttggcacacagcactctcctaacactaaagactctacaactccttcttcatgg

SEQ ID NO: 946845 - DNA, 120 bp, Artificial Sequence
  ENSG00000229105_11 (sequence is synthesized)
gatgtgtgaaagcacagagagatggagacatggctgcttggaaattgtccttaaaggaaccacaggcaagcgggaggtagaaatcaaaaccagggtggctgccacaggcgatgaagctag

SEQ ID NO: 946846 - DNA, 120 bp, Artificial Sequence
  ENSG00000229105_12 (sequence is synthesized)
agtgaaagaggttggctgaggttaaaccaaagaacagtccagaagatgggagaatcccaacaaattttcagtcagtatttcccaaagtgggttcctgaaaattgttcctttagaaaaagc

SEQ ID NO: 946847 - DNA, 120 bp, Artificial Sequence
  ENSG00000229105_13 (sequence is synthesized)
atcatagtcaagcacatttaggaaactttccttaattcccctctctttgaaattcacaagcccctttgacatattaaagtttctgtaaagtcagtgaataaagaaacctgtttacatttg

SEQ ID NO: 946848 - DNA, 120 bp, Artificial Sequence
  ENSG00000229102_0 (sequence is synthesized)
gtttgtttaatgatccgtcttctgcagtagtgagggtgttgtgtcatcctaggacagccttttgggagaggagccaagatggccaaataggaacggctctggtctacagctcccagcgtg

SEQ ID NO: 946849 - DNA, 120 bp, Artificial Sequence
  ENSG00000229102_1 (sequence is synthesized)
ttctaatcacttataactgttgaatatctttatttttttctatctagaacttatgtttaaatctgttttaaaagtttcaaataaaactgtagtttcctccacattgaagaaaacttcaaa

SEQ ID NO: 946850 - DNA, 120 bp, Artificial Sequence
  ENSG00000286229_0 (sequence is synthesized)
gactgaattccaacaacaactatgagtgagcccagaattggagccttcagatgagaccacaaccctggctaacaccttgattgcagctttgtgagagatcctaagccagaggcccccagc

SEQ ID NO: 946851 - DNA, 120 bp, Artificial Sequence
  ENSG00000286229_1 (sequence is synthesized)
taagtgatacatggatttctgacccacagaaactaaaccatccattgcctctaccagagagctgggacgatgtggtttgcatgttgagatcaagaatccaggagaaccagccaaggtgtc

SEQ ID NO: 946852 - DNA, 120 bp, Artificial Sequence
  ENSG00000286229_2 (sequence is synthesized)
tgcagaatctaccagctctaaattgttggaaatgctggtggaattgaaatccccttagtgagatgcagcaactttcatctgagacatatgctgtaattagcagtttcttaattaccgagt

SEQ ID NO: 946853 - DNA, 120 bp, Artificial Sequence
  ENSG00000286229_3 (sequence is synthesized)
gcttgaagtatgtcatactgggaaggggtggcgggaaaatgctgctgcgcttgaagacacaaggtgaccacgttctctcaaccagcttgagaccccaggttcactcttactgcagcacaa

SEQ ID NO: 946854 - DNA, 120 bp, Artificial Sequence
  ENSG00000286229_4 (sequence is synthesized)
atcctgcttgcaagctaacaacttagcctgctgtagtttcttagatgcaggcagaaaacatgcaactcctgggtcagagacaaaaggcttgtattactcaaggcacagcaggcagcatga

SEQ ID NO: 946855 - DNA, 120 bp, Artificial Sequence
  ENSG00000286229_5 (sequence is synthesized)
tcattgtgtttgctgcaggtgccctctctccaagttccctgggagtgatgggaagcagcctgggtagatgctgcagcctcaggaggtttggagcacagctgagtttaagaaatcccaaac

SEQ ID NO: 946856 - DNA, 120 bp, Artificial Sequence
  ENSG00000286229_6 (sequence is synthesized)
ttgtaaagagggcagtctaacctttgcctagagagagacattatcttatagtggtcaggaaacaaacctgccctctgccccaagggagctactatctctatcttccaaggcctttcacta

SEQ ID NO: 946857 - DNA, 120 bp, Artificial Sequence
  ENSG00000286229_7 (sequence is synthesized)
tacaaacatccgaaaaatcgtctgaaacaaaagctactacagaatgtgcagaaatgtaggaaactcatagagaagtacctcctggtaattgcaggaaagaatttggcaaaactggttcac

SEQ ID NO: 946858 - DNA, 120 bp, Artificial Sequence
  ENSG00000286229_8 (sequence is synthesized)
tgatactacattacttacattttaaatatgaaatactggcagttattttcaactaaaggcaaatataaaaacactgtcattggctcaaataatagcaaacaaagagtagcatgggatttt

SEQ ID NO: 946859 - DNA, 120 bp, Artificial Sequence
  ENSG00000286226_0 (sequence is synthesized)
atggggcaaagtaatatgctttgaattacatttctgataaagaatacagtgcccaacttttaacagaaatgataaaaaaagccatgtcaaatcagctacatttatataaagtttttatag

SEQ ID NO: 946860 - DNA, 120 bp, Artificial Sequence
  ENSG00000286226_1 (sequence is synthesized)
tagaaattgatgaattagagcaatataattagctactccaaactgaaattaatatgtatatgtatattatatgaagttcttatcttacatcttcataatttctacattgttttaccacag

SEQ ID NO: 946861 - DNA, 120 bp, Artificial Sequence
  ENSG00000286226_2 (sequence is synthesized)
acagaaaatatagaaaatactcatgcatgagccactgcacctggcctttaaggagacttttaaggagatttgggttcacacgataagttcttgagacatcattcagtccccctcccactt

SEQ ID NO: 946862 - DNA, 120 bp, Artificial Sequence
  ENSG00000286226_3 (sequence is synthesized)
gaattataagataatggtttcccttttgtgcccctgaggatgctaatattcatttattttctttatgatgaccctgcttccaacataagcattaagtttcagagggtctataaggtcaaa

SEQ ID NO: 946863 - DNA, 120 bp, Artificial Sequence
  ENSG00000286226_4 (sequence is synthesized)
accatttttgtaataatatatatttgcctttttcatttggttgatgtttgcattttgatggtgcaaaagcaatgctggttaaaactgctggcactttagcatgaaacaaggcaatgacac

SEQ ID NO: 946864 - DNA, 120 bp, Artificial Sequence
  ENSG00000286226_5 (sequence is synthesized)
ctaactctactaatagtcattgtattctttgatgtcatgcactcacggggggaaaagccaattttaatgaagaatggtcttgaaagaatcaataaaattattactattattaaatctcaa

SEQ ID NO: 946865 - DNA, 120 bp, Artificial Sequence
  ENSG00000286226_6 (sequence is synthesized)
ctttaaatatatatatgttttggttttggaggaggagttgggggtaggatttgaagccagaaggtttctcagttagtcaagttacctcactcagtttccatacccataaacattagaaaa

SEQ ID NO: 946866 - DNA, 120 bp, Artificial Sequence
  ENSG00000286227_0 (sequence is synthesized)
agtgtgatactgaccagacaagggcattgtccccactcagaaatgctccaaaagaactaaggagaaggattagaggagacaaaatgtttttgctaaattcttgcactgaagccagagttg

SEQ ID NO: 946867 - DNA, 120 bp, Artificial Sequence
  ENSG00000286227_1 (sequence is synthesized)
ctcaggaaataacagctcagtttgttagctctgatctctaattccatcccaaattcataacgttattttttttgtttgtttccattgttcatttgttgtgtgcctcttaggatgtccctt

SEQ ID NO: 946868 - DNA, 120 bp, Artificial Sequence
  ENSG00000286227_2 (sequence is synthesized)
tccatctgggcctcaatgaccttccctgggaaatggggtacttgtacttaaccatacccctgcttctaaagacaaactgggaaaattaaatggaaattctaaaagaaagcttcatctttt

SEQ ID NO: 946869 - DNA, 120 bp, Artificial Sequence
  ENSG00000286227_3 (sequence is synthesized)
agttccttagagaactagcattacagttgattacctaggtgatgattcaagctattcaacccttgtcattctgaatgtacttctcttccagcttgccttggaaagaaaatcagccagtta

SEQ ID NO: 946870 - DNA, 120 bp, Artificial Sequence
  ENSG00000286227_4 (sequence is synthesized)
aagaaagcatcagctggaactctctcagctctcagtgactgcagagtgaactatggcattcagcatagaaaatgttcttccagtgctccaataaatagcattcagtttttagccccaggg

SEQ ID NO: 946871 - DNA, 120 bp, Artificial Sequence
  ENSG00000286227_5 (sequence is synthesized)
taagcacgtaaagaaccatcaattttttaaagggcaccaacccagaaagatgagagctgaactcctgtagaacataattacctttccaacattttatctgatctccttgttttacttctc

SEQ ID NO: 946872 - DNA, 120 bp, Artificial Sequence
  ENSG00000286227_6 (sequence is synthesized)
taagatgagctgaacaacagccaatcaaccacccccacaggccacccttggaccatgacatacagggcatctgactgatagtcccaccaagactgcctatgatcataaatgtccagctgt

SEQ ID NO: 946873 - DNA, 120 bp, Artificial Sequence
  ENSG00000286227_7 (sequence is synthesized)
ttgggcagacagcagtcaaggctgtgctgtggtgcagtttactcctgcagagaaagatgtgcctaaaagagaagcagcacctacctggaagactcaggagacaaagagggaaagaaatga

SEQ ID NO: 946874 - DNA, 120 bp, Artificial Sequence
  ENSG00000286227_8 (sequence is synthesized)
atccccaagatttcctgggctgagcctaacaggatatgagaagcagaaacttctggattgtgagaagaaacaaaggaagaagagagatgctctataggagaaaaatcacagacaataagt

SEQ ID NO: 946875 - DNA, 120 bp, Artificial Sequence
  ENSG00000286227_9 (sequence is synthesized)
ggggagagcaagaagacaaagttttgttactttaattcaccactcctatccccagccaccagtggccatcctgtactggattctaaacccagggccctaaataaagtttatagcaggtga

SEQ ID NO: 946876 - DNA, 120 bp, Artificial Sequence
  ENSG00000286225_0 (sequence is synthesized)
aggctagtgtaataattcaagcagagataatcgggagaagatgactgtagctgtagaatttgtgaaaatttgtcagattctgtaggtattctggagggagagagtggccagaatattttg

SEQ ID NO: 946877 - DNA, 120 bp, Artificial Sequence
  ENSG00000286225_1 (sequence is synthesized)
cagagtgtgagtgaaaaagagtcaggaatgactccaaatcttttggattgaggtacttaaagggtagcgatgccattccctgagattgaggagattgcgaaaggggaaaatttggtattg

SEQ ID NO: 946878 - DNA, 120 bp, Artificial Sequence
  ENSG00000286225_2 (sequence is synthesized)
agacaagaccaggagctcggttttggcatgttaagtttgacattactcttagataccaaattgcaggtgataatatcaggagctgaatacatcagcctagactttgagggagaggtctaa

SEQ ID NO: 946879 - DNA, 120 bp, Artificial Sequence
  ENSG00000286225_3 (sequence is synthesized)
gctgatatatatgtttaggtgccttattacattaaaaaattctgaggatgtagaaaaacaagaaacagaactaagaaagagccaggctgagaggtaggagaaaaaccaggaaagtgttat

SEQ ID NO: 946880 - DNA, 120 bp, Artificial Sequence
  ENSG00000286225_4 (sequence is synthesized)
gtcttggaagacagtgaagaaaatgttttgagaagaattttttttcactgtaatatgcagtatattctttaaatcctatatctaggcaaccaatcttgaagaagtatttggctgaatgtc

SEQ ID NO: 946881 - DNA, 120 bp, Artificial Sequence
  ENSG00000286225_5 (sequence is synthesized)
agtaatccaataagccaaaaaacattttctcaatatattaggtgcaagtaaataggcattacctagtccttagccgctaaatttgagatggttctatacgttcattcttgctgagagttc

SEQ ID NO: 946882 - DNA, 120 bp, Artificial Sequence
  ENSG00000286225_6 (sequence is synthesized)
aggttcctggaataatgcacagccaatcaaccatccatcctctcctcaaccttccagaagactgtgagtcctgagagcatagaaactctcctgatgttgctcccagaccgtgacccgtgc

SEQ ID NO: 946883 - DNA, 120 bp, Artificial Sequence
  ENSG00000286225_7 (sequence is synthesized)
gcttgctagtgggcactcagccaacacgctgttagcagaatgaaatccaatcttagagaaaaagtgctgaacctcggctctggatcgcccaagccccatatggattgcgtgtgttttggg

SEQ ID NO: 946884 - DNA, 120 bp, Artificial Sequence
  ENSG00000286225_8 (sequence is synthesized)
ggaagatttggatatggcagtcttttttttcactcttttgaatgggaatgtcaatctatgggttactagaacattttattcttaatataataatcccagctgcaaaacaacattaagagg

SEQ ID NO: 946885 - DNA, 120 bp, Artificial Sequence
  ENSG00000286225_9 (sequence is synthesized)
gaacactgcacctcttctccccacttatgacctggacaattaatacattctcattttttgtgcttctctgaaaatactactttcaatgcaatttccaaccaaattgttactttgaagaat

SEQ ID NO: 946886 - DNA, 120 bp, Artificial Sequence
  ENSG00000286225_10 (sequence is synthesized)
tcatacatagtcattctgaaacatccctgccttgttctgttgtttgctatttgatctttgataattaatctccctaaatctcagttgacttatctttataatgggaaaaataaaaatgct

SEQ ID NO: 946887 - DNA, 120 bp, Artificial Sequence
  ENSG00000286225_11 (sequence is synthesized)
ttcctgacagggatgctgtgaagactcaatgagattcaaagctcttggcagtgtgtggcacaaacaataatgtccaatatatgttaactcctaattttattgctaaaaataatagtctaa

SEQ ID NO: 946888 - DNA, 120 bp, Artificial Sequence
  ENSG00000286225_12 (sequence is synthesized)
tagatttctcactgtgagaaatctcaatatatagcataaaatatttggccccatacgttttggtgtttggggctttgacaggttttctttgatctgtcacatgatatatttctatatttc

SEQ ID NO: 946889 - DNA, 120 bp, Artificial Sequence
  ENSG00000286225_13 (sequence is synthesized)
acatgacatatttgatatatttctatagtatccattttttctaaaatgattaaaaacctctcttcacataaacattacatgagacaaaaaaacaaacaagtaatatgtagagaaatattg

SEQ ID NO: 946890 - DNA, 120 bp, Artificial Sequence
  ENSG00000229108_0 (sequence is synthesized)
agtctgggtctgagctgaaacctgctgcaagtctgacggtaccaaattacatatatatctgtcaaaatgatgtaggacctaaagtctctctgtaagttgatccttttgaccccatgatta

SEQ ID NO: 946891 - DNA, 120 bp, Artificial Sequence
  ENSG00000229108_1 (sequence is synthesized)
ggagcttcacaatgtggtaccacacctggaaacctccagaacaagatctcaaggaaacacaggaaattcctgaaacagcaaaaccccctatgtgaagacgtctgttattcctttgtgtat

SEQ ID NO: 946892 - DNA, 120 bp, Artificial Sequence
  ENSG00000229108_2 (sequence is synthesized)
caggagcatcactgttaattaactgttgatacacttaaaacagcttggttggcaatgtcctttttgaataaagaagagccaggtgtgtttttcaggatgaactagacaatgctgtcacaa

SEQ ID NO: 946893 - DNA, 120 bp, Artificial Sequence
  ENSG00000229108_3 (sequence is synthesized)
gtttacctctacatcttattgccttggaaaaatttcctgcatatcgtggcacaagatggttggctctccaggcagcagttggcgttgtgaatcagtcatctcagcatgtgtctccaagat

SEQ ID NO: 946894 - DNA, 120 bp, Artificial Sequence
  ENSG00000229108_4 (sequence is synthesized)
gcatacctgagagaggaccagaaaatattctgaagcagatggctatttggtccgtgttctgactaaaaggaagccacactctgtcgaaaacaagctttgtaagaaaattttgaagtattt

SEQ ID NO: 946895 - DNA, 120 bp, Artificial Sequence
  ENSG00000229108_5 (sequence is synthesized)
acttatatctaaccattcattccaccttttctcccaaataacactctaatatcttgagacatcttgtctagggccagatttcataaatgcttgtgaggcaggagaataagttccagaggc

SEQ ID NO: 946896 - DNA, 120 bp, Artificial Sequence
  ENSG00000229108_6 (sequence is synthesized)
agttcacactgcctaaagccaattcacactgacttcctataactaaatctaaaggaaaatctcaactttcctcgcccaagtaacaaaagaatcagaggttatactccctttgcaacctgc

SEQ ID NO: 946897 - DNA, 120 bp, Artificial Sequence
  ENSG00000229108_7 (sequence is synthesized)
cccttttctgcctggcagatgaaaaatgaaaagtacctatgactggtcccctcccacgaccagccagactggtcacggatcactacttcatttacatagggcgtaaaccgagtaaccaat

SEQ ID NO: 946898 - DNA, 75 bp, Artificial Sequence
  ENSG00000229108_8 (sequence is synthesized)
ggtggtctccagcaggttgctcaatcttgctgccactctgtgggatgtacttttgtttcaataaatctgtgctct

SEQ ID NO: 946899 - DNA, 120 bp, Artificial Sequence
  ENSG00000286223_0 (sequence is synthesized)
tgatgacataaggttaacagagttgatgtcaagacaaataggtttgaagttatagatgataaatcactttgtcttactgaaccttcccttgattacgttagagagcatccctggtatgct

SEQ ID NO: 946900 - DNA, 120 bp, Artificial Sequence
  ENSG00000286223_1 (sequence is synthesized)
cccagttgaatcttaagcatgatgtgtgtccgggtgatataatcgtaattcctttctgttaatcctcgttctctctcttttttttctttttcttctttttctctggactctgaaaatagc

SEQ ID NO: 946901 - DNA, 120 bp, Artificial Sequence
  ENSG00000286223_2 (sequence is synthesized)
caacaagaatgctttgaaagagctgaaattgtatggatgtttcttcttcttctgccactttttcttcttcctcttcttcaactgaatagggtaagtgtaaaggcacaacaaattaacact

SEQ ID NO: 946902 - DNA, 120 bp, Artificial Sequence
  ENSG00000286223_3 (sequence is synthesized)
gtatcagatctcattccttccaaaaacgtttgagtcctagtttttttctgtcattctcatcaactacccaatgtttgttttgtttattttataattgggaaggttctccaaggcctacca

SEQ ID NO: 946903 - DNA, 120 bp, Artificial Sequence
  ENSG00000286223_4 (sequence is synthesized)
ttctcacgatcatgaagtcatgtataaaaatcaggattaaaacaaaggtcatctgatctccaatcattattgggaagaaagtcaattatattagaaatggttaagagcttgcactctgaa

SEQ ID NO: 946904 - DNA, 120 bp, Artificial Sequence
  ENSG00000286223_5 (sequence is synthesized)
gtcagacggcctgggtttaatctacctgctgcaaccctgaaaaattgtatttacccttggtgaagctccctatctataaaacttaagaatgtcttatcttactggactgttactgattta

SEQ ID NO: 946905 - DNA, 120 bp, Artificial Sequence
  ENSG00000286223_6 (sequence is synthesized)
aaaagatgatgcatagaaagcactaagtataatgcttagcacacattacaataaggactcaacacatagctatcattagacattcagtgaccagctgggtgcagtggctcacgcctgtaa

SEQ ID NO: 946906 - DNA, 120 bp, Artificial Sequence
  ENSG00000232995_0 (sequence is synthesized)
caagagacgccaggcaggtgggactggagttgtcatggaaggggcagggcgcagggcggaaccattgctcgcggagctggcgtcgagtcggaacctcggactgcaggaagtgggagcacc

SEQ ID NO: 946907 - DNA, 120 bp, Artificial Sequence
  ENSG00000232995_1 (sequence is synthesized)
gcggtttcggggaagagaccggggttgagcgtctagcccatctctgcgtgacttccgccagcgtttagagcgttttcggggtccgagttgaagagcaaaaccaagtgaaggaaacttcac

SEQ ID NO: 946908 - DNA, 120 bp, Artificial Sequence
  ENSG00000232995_2 (sequence is synthesized)
taagttcagggtgacaagggaggaagtacagagtgaactattggcatggctcaatccattgacctgttttggttcctgatgaagttttgttaatttaaatgagaaaaataaggacagtga

SEQ ID NO: 946909 - DNA, 120 bp, Artificial Sequence
  ENSG00000232995_3 (sequence is synthesized)
cttcagagggaaaaaggagaaagttaactgaattggtgacacttcgggtctctcacagaggaagattagatgaaggtgaccttccccttcgccaagcagaatctcccatgagactcatga

SEQ ID NO: 946910 - DNA, 120 bp, Artificial Sequence
  ENSG00000232995_4 (sequence is synthesized)
atcctcttgaggccaattacagctatcacttgttaactgttggagtactttcagtcttaaaagagctgctagaaaattaaggctgcaacatgaaagaagaacaaaatggtcaggcatatc

SEQ ID NO: 946911 - DNA, 120 bp, Artificial Sequence
  ENSG00000232995_5 (sequence is synthesized)
acacgtttttatcaaatgatttggtttaggacttgataacctggttagtacttgagcactgaaagatattttgaatttaaagtaagatggagaaagtgatggaagctaaatcacagagga

SEQ ID NO: 946912 - DNA, 120 bp, Artificial Sequence
  ENSG00000232995_6 (sequence is synthesized)
cacagaggaagacctattagagtgctaaggagaagacaagttattagcacccaaaagaagcaccagtgcggatggaaatacaaggttgacattcgctgagctgtgttttttttttccagg

SEQ ID NO: 946913 - DNA, 120 bp, Artificial Sequence
  ENSG00000232995_7 (sequence is synthesized)
gaaatggttattcttgatattttgagcaaactcttcttctctgatcagtgcccagaacaaggaaacagaccttctctttccagtacctcctatctatctagataatacggaagccaggga

SEQ ID NO: 946914 - DNA, 120 bp, Artificial Sequence
  ENSG00000232995_8 (sequence is synthesized)
tgctgtcttcaatgtccataccattagacttgttatagatgagtttctataatgatggctttctggttaattaaaccttctgaatgattctgtgtaacactgacttctgtgattcatcac

SEQ ID NO: 946915 - DNA, 120 bp, Artificial Sequence
  ENSG00000232995_9 (sequence is synthesized)
agaacaagtcttccttctttcatggagtattactgttttcagtgactatatttggttgtttactctttttggcaccaatcacccagtgaatcaacaaccagagttgcaaacaaattaccc

SEQ ID NO: 946916 - DNA, 120 bp, Artificial Sequence
  ENSG00000232995_10 (sequence is synthesized)
tcattgtcttttccgagtcccttaatttactttatttttcatttgttgcaaatgtcattgtttctgctaatgttgttttttaacatctgccaagataaaaaataaaaaaatcacttgtaa

SEQ ID NO: 946917 - DNA, 120 bp, Artificial Sequence
  ENSG00000232995_11 (sequence is synthesized)
ccttagattcctgatctgtaaaataaagattaaggatagttcattttaaacaagggtaatgctattttctaccccttaggcttataagaggatatgtacagagcctggtgagttttatat

SEQ ID NO: 946918 - DNA, 120 bp, Artificial Sequence
  ENSG00000232995_12 (sequence is synthesized)
catctcatcttgaaggcaatcaaaactccttctgggcctccatgacaccctgatggagtgtcagcagttattaaagtaaaagagcaaagataaacaacaggagtctttgatcccagggcc

SEQ ID NO: 946919 - DNA, 120 bp, Artificial Sequence
  ENSG00000232995_13 (sequence is synthesized)
gaagtacagagactgcactttaaattctggatgacagacctatcaggactgagtggacctttgagtgacaagatgggggtgttccaaagagaccatggcagcctgcagctaggactttaa

SEQ ID NO: 946920 - DNA, 120 bp, Artificial Sequence
  ENSG00000232995_14 (sequence is synthesized)
gccaccaggacagcacacagccattccaaaattccagaccaggatcattccagaaaagccttacatctcagtccagtatatggatggttttattagatgaaggtgaccttccccttcgcc

SEQ ID NO: 946921 - DNA, 120 bp, Artificial Sequence
  ENSG00000232995_15 (sequence is synthesized)
ttcctgcccctaacttcagagaaacagacctagaaagagggaaggaaggagtgaaaaagcgtgccatactttatcttctccccttctgttttaaactagacaaatctatattttaattat

SEQ ID NO: 946922 - DNA, 120 bp, Artificial Sequence
  ENSG00000232995_16 (sequence is synthesized)
tataagtaaccagaaagttatatggtctggccaggatggcattaaagaaaatgagagagaaaagtttaagatagcatggttggagacaataagtagaagaaaccaagtagttcaagtttt

SEQ ID NO: 946923 - DNA, 120 bp, Artificial Sequence
  ENSG00000232995_17 (sequence is synthesized)
taacgctctatcttataaacactcttgaaccaataataatgctattactgaaatgctacacacaattgaagactacttgttagaccaagaccttaaaaacttctttactgattattccca

SEQ ID NO: 946924 - DNA, 120 bp, Artificial Sequence
  ENSG00000232995_18 (sequence is synthesized)
atgtgtggccctggtaatcattgaagaatcattgtattgactattaaacatctagggatcacctgtttaaatcaagttaacaaaacacttacttaacaaatatatattgattgcctatta

SEQ ID NO: 946925 - DNA, 120 bp, Artificial Sequence
  ENSG00000232995_19 (sequence is synthesized)
tgaagtagatgctatagtaggtgctggcagtataaacatgaaaagagacattgtgtgtgcatattaatatacagcaaattaaacttcagccagagaagtactttactagaaggttgatag

SEQ ID NO: 946926 - DNA, 120 bp, Artificial Sequence
  ENSG00000232995_20 (sequence is synthesized)
aagtgtggtggtagcttgcaggaggaagcagttagcctccttggaaatgagtaatcttcacagaaagtatgacatttgacctgcttcttggagaagatgcatattaaacctattaaatcc

SEQ ID NO: 946927 - DNA, 120 bp, Artificial Sequence
  ENSG00000232995_21 (sequence is synthesized)
atgtcagcctttaacacctttgctcagattagtttctcgagctgttttcccacctggtgagcagataagagcaggacaggaaagttctgatgaaaggaagaagtgccagagagagaaggc

SEQ ID NO: 946928 - DNA, 120 bp, Artificial Sequence
  ENSG00000232995_22 (sequence is synthesized)
cttgcaagcaaagaagcctgacaggcaggagcccctgagtatcctaaggagaagtaccagcgatttagggaagaaaattgctgccagaagtgcaggaaataaaaattctgacctagatca

SEQ ID NO: 946929 - DNA, 120 bp, Artificial Sequence
  ENSG00000232995_23 (sequence is synthesized)
aaagttgattcacttggtctaatgtggtaggaataggtgaaatactaagactggatcctacactctacttcccatcaggcacccattcttatgaatagagattccataggggccacacac

SEQ ID NO: 946930 - DNA, 120 bp, Artificial Sequence
  ENSG00000232995_24 (sequence is synthesized)
aatcccagtacttttttcccagttaattgagaaaattaaagccatcatacaatatataacttcctccctctccacttctgtcaatgccacatatatccacctgtcttatttgtctgtctc

SEQ ID NO: 946931 - DNA, 120 bp, Artificial Sequence
  ENSG00000232995_25 (sequence is synthesized)
taagttcagggtgacaagggaggaagtacagaggtaatttatagaattccagagtaataataacttgttgaacattgattatgtgccgggttttgttagatgcttataagcatcatctca

SEQ ID NO: 946932 - DNA, 120 bp, Artificial Sequence
  ENSG00000232995_26 (sequence is synthesized)
cacagtagttcacaagtagcatagctgggatatgaacacacatcctctgactctgtgctcataagcacgacttcaagaggtggaaggaacataacagttcatctggtcaaatcctctcgc

SEQ ID NO: 946933 - DNA, 120 bp, Artificial Sequence
  ENSG00000232995_27 (sequence is synthesized)
tttcaccgatatgaaaactggactcagagagaagtgatttgttagaagttatacaactgcactttaaattctggatgacagacctatcaggactgagtggacctttgagtgacaagatgg

SEQ ID NO: 946934 - DNA, 120 bp, Artificial Sequence
  ENSG00000254329_0 (sequence is synthesized)
ggcctggtggagccctcgcagaccctctccctcacctgtgctgtctctggattttccatcacaaccagtgtttcctgctggagctggatccacgagtccacatgggaaggactggagtgg

SEQ ID NO: 946935 - DNA, 120 bp, Artificial Sequence
  ENSG00000254329_1 (sequence is synthesized)
atgaagggagcaaaaattcccacccactccttatgaatccagtcaccatctccaaattcgggtccaaaaaacacttgtttttacagtggagctatgtgagcaacaagctcacagccatgt

SEQ ID NO: 946936 - DNA, 120 bp, Artificial Sequence
  ENSG00000260442_0 (sequence is synthesized)
tggccccccgcgccgcagccggcatcgcggcgggacccggagcccggagttcgggtgggtaacccgagctctccaagctcttgaagccgcgagggtggcttagcttcggtgttttggctg

SEQ ID NO: 946937 - DNA, 120 bp, Artificial Sequence
  ENSG00000260442_1 (sequence is synthesized)
agaacacccttaaagcttaaaataaaacctgcctctggggtgcaggggaggagagaggaggacgcgaatcacacccgctgctgcgcgccagcccgccccgtctgtacaatgggatgctcg

SEQ ID NO: 946938 - DNA, 120 bp, Artificial Sequence
  ENSG00000260442_2 (sequence is synthesized)
ccagcctcacacccccagccagcccccagagaccctcccacacttacgaaggaaatgcatgcggccaggaggagaatccgcaccaggagcagggagctctacccaggaaaaagaagaaaa

SEQ ID NO: 946939 - DNA, 120 bp, Artificial Sequence
  ENSG00000260442_3 (sequence is synthesized)
ggacagattcatttggggttcagcctcatgccccccacacccaagactttgtggctaagagaatcaggccaccttgaggttcatcaagttcatcccattaaaacctcccaaaactctgga

SEQ ID NO: 946940 - DNA, 120 bp, Artificial Sequence
  ENSG00000260441_0 (sequence is synthesized)
agtcccagggtgaagggaggcagcttcagtcctggggccaatagcacatccgaggaaatcagggcccctggaacacagcctgcgggactgggggcacatctgctgcccaatccagagctt

SEQ ID NO: 946941 - DNA, 120 bp, Artificial Sequence
  ENSG00000260441_1 (sequence is synthesized)
tgagatttccactttatctactgtttcttgtgcacgtacttaaccataaatcaaaacagcctctgtgttatcatccttcaatgttcaacacatcgcatcggagtcgccctttccctacag

SEQ ID NO: 946942 - DNA, 120 bp, Artificial Sequence
  ENSG00000260441_2 (sequence is synthesized)
aatataagctctgggtctgggggctaatagtgtggggatccaccatcttgtcttgcccccacctgagacacagatgtggcttctattcgtatgtccctattaaatgcttttctctgagaa

SEQ ID NO: 946943 - DNA, 120 bp, Artificial Sequence
  ENSG00000254321_0 (sequence is synthesized)
atgactattttcaaacaaatttcccatccagaagtgctcagcttctcagagagcccccatgcctggcttcttgctctggccctccaccgagctgggacgcagctggattgcaattccatg

SEQ ID NO: 946944 - DNA, 120 bp, Artificial Sequence
  ENSG00000254321_1 (sequence is synthesized)
gccgtccacttcctgctgctccacgctggactgtggtcatcctcgtgctaaggaaggtcacgggcttgttaattagctggaaagcaaagacagacaggatacaaatgttcctagaaagaa

SEQ ID NO: 946945 - DNA, 120 bp, Artificial Sequence
  ENSG00000254321_2 (sequence is synthesized)
actagcatagtgtgacgtcagtactgttttcaacttttagctgctaccctttcctgtttcctgaggacatttcaacatgacttcgagcacagttaaagtgaactgccaaggttaagcgag

SEQ ID NO: 946946 - DNA, 120 bp, Artificial Sequence
  ENSG00000254321_3 (sequence is synthesized)
ctttccttccttacggaatctcccagcccctaattctataatactactcgcttagtttggctgtggtgaaacccaccttgtcctctactaaagatatggaacgaagacctcgtcagtcaa

SEQ ID NO: 946947 - DNA, 120 bp, Artificial Sequence
  ENSG00000254321_4 (sequence is synthesized)
tcttccatgatcccggccaccgcaattggctcaggtcgttgctgccatgaagtaagagtctgtctggaaatgaaggcgagcagaggccacaaagctgagacatggagacagagagagtcc

SEQ ID NO: 946948 - DNA, 120 bp, Artificial Sequence
  ENSG00000254321_5 (sequence is synthesized)
tgatgttattatttgaaccattgagtccagctgtgcctgaaactcttcagtgagccaagaaattcctttttggcttaagccaattggagtcgtgtttgtgatacttgcaaatgaaaggag

SEQ ID NO: 946949 - DNA, 120 bp, Artificial Sequence
  ENSG00000254321_6 (sequence is synthesized)
ttattgactaataaaactgccatttctatctctccaagaattaggaaatacttctttaaaactgtttatttgcagtatgctttattccttcccacaaaaaagaggcagcttataaaagta

SEQ ID NO: 946950 - DNA, 120 bp, Artificial Sequence
  ENSG00000254321_7 (sequence is synthesized)
aatatgaaaaataggcacaaagggtgtataatacatgaaatacatgtgtatatgtctagcacagtctttatattaagttgacaaaaattattattattattattatttttgcaacagagt

SEQ ID NO: 946951 - DNA, 120 bp, Artificial Sequence
  ENSG00000254321_8 (sequence is synthesized)
gtgctgggattacaggcgtaagtcactgcacctggcccaaaaattattttttaagttacagtacgaactactgctgagggtgctgggtaattaacattgttggagaaattataaactggt

SEQ ID NO: 946952 - DNA, 120 bp, Artificial Sequence
  ENSG00000254321_9 (sequence is synthesized)
gggtaattaacattgttggagaaattataaactggtgcaaaccttctggagataaatttgacaatgcttattcatatccattgtttgtctataatcaaccattcttcttttaggaatgca

SEQ ID NO: 946953 - DNA, 120 bp, Artificial Sequence
  ENSG00000254321_10 (sequence is synthesized)
tctgaaagaaataattacataaataaggagatatgcaaagatttagctatgagaatgattgtttaatcaccagaagttggaaaacagcctgaatatccaatgacataaaaacaaaattgg

SEQ ID NO: 946954 - DNA, 120 bp, Artificial Sequence
  ENSG00000254321_11 (sequence is synthesized)
gtctcaaaaaaaaaaaaaaaaaattatctgtccaccaattggaataccatgtatttattaaaataatgatgtggaattttatttactgacttggaacaatattcatatattgtgaactgg

SEQ ID NO: 946955 - DNA, 120 bp, Artificial Sequence
  ENSG00000254321_12 (sequence is synthesized)
atttactgacttggaacaatattcatatattgtgaactggctttggactaatacatttaaattctccctaggctgactgggcgcggtggtccgtgcctgtaatcccagcactatgggagg

SEQ ID NO: 946956 - DNA, 120 bp, Artificial Sequence
  ENSG00000254321_13 (sequence is synthesized)
cactgccagcagacgcgagtgagggatgggggcgcctgatagcccacatctccaggagcagattgtaagcgtaatctcaaggattcatccgcagggaggatctgggcaagaacaaaagcc

SEQ ID NO: 946957 - DNA, 120 bp, Artificial Sequence
  ENSG00000254321_14 (sequence is synthesized)
cagaagtttctgtttgtgtggcaagatacagaaacagtgtgggctgagaagcagaggggcaggtcctgcctttcgtgtagcaaaatgacaattaccccatctttcagcaggctgtgcagg

SEQ ID NO: 946958 - DNA, 120 bp, Artificial Sequence
  ENSG00000254325_0 (sequence is synthesized)
atccatgaagtcatgcttcacttatgcatcattcagaaaacacttcttggatactcactactcatgaatatgcatgcatatgacttgcagtcaaagccatgagttctcaatagcaaaact

SEQ ID NO: 946959 - DNA, 120 bp, Artificial Sequence
  ENSG00000254325_1 (sequence is synthesized)
agtcaaagccatgagttctcaatagcaaaactgttccagatatactcagagagttaaaatgtttaaaaaacttttttttaaagaaaattttccttttatttttgttgttttgttttgttt

SEQ ID NO: 946960 - DNA, 120 bp, Artificial Sequence
  ENSG00000254325_2 (sequence is synthesized)
cctgcctcagcttctcgagtagctgggactagaggcatgtgccactgcacctggcttagagtataaatttttgtgtcacacaagatatgaagaacatgcacaggcactggacccatctgt

SEQ ID NO: 946961 - DNA, 120 bp, Artificial Sequence
  ENSG00000254325_3 (sequence is synthesized)
ccatctgtgggttcatctttctgtgggacccactaagggacccatctttctgtgaaaaagtcacaagtgaagtcctggccaggaattcaagaccaggctgggcatcatagtgagacctca

SEQ ID NO: 946962 - DNA, 120 bp, Artificial Sequence
  ENSG00000254325_4 (sequence is synthesized)
tctctacaattttttttttaaaggaattggcttctagtcaatgctttgtcaaataccagtcttgggacattagatgaagctccttcatctaatgtttttctaatacataaaacagtaata

SEQ ID NO: 946963 - DNA, 120 bp, Artificial Sequence
  ENSG00000260448_0 (sequence is synthesized)
ccagccagaagcaacatgtagatctaatgaccttctccaggagtcgaggacccactacctcgctgaattctcagagtcaaaatgcgtctctacctgctggtcccagaacagtcccctgct

SEQ ID NO: 946964 - DNA, 120 bp, Artificial Sequence
  ENSG00000260448_1 (sequence is synthesized)
cttacgttgccagcagtaacattctgcatccctcacccactccactgtgtccttttcctcccactgatcttcactctgccttttctaggggaactctgaacagtatttctgagaagggtg

SEQ ID NO: 946965 - DNA, 120 bp, Artificial Sequence
  ENSG00000260448_2 (sequence is synthesized)
ctggcatctcttcatccctagagtgatgctgccatctccgtcttgaatgtctctgctgacatgacctgctaaacttgaactcataggcggggcaatcgcttgagcccaggagttcaaaac

SEQ ID NO: 946966 - DNA, 120 bp, Artificial Sequence
  ENSG00000260448_3 (sequence is synthesized)
gtagtcttaggtgtctggagaagtcgcccggtttctgcttgctggtcgcgaaattttatagctataattaactcagggcggaacagctagcagaatcctcagcgttcgggcaaagggcag

SEQ ID NO: 946967 - DNA, 120 bp, Artificial Sequence
  ENSG00000260448_4 (sequence is synthesized)
gcctgggtgacagagtgatactccgtgtcaataattaaataagtaaataaataagttgaggtcaactttcaaatgatcgtcatgagaaagctacacagtattaagtaagtgtggtttagc

SEQ ID NO: 946968 - DNA, 120 bp, Artificial Sequence
  ENSG00000260448_5 (sequence is synthesized)
tagccagaagaaaaagaaccaggtagaattcacacccagctctcggtagatggcagatttcactttagggaactgctttcctttgaccccctccccacttgctttcttggcctgggatcc

SEQ ID NO: 946969 - DNA, 120 bp, Artificial Sequence
  ENSG00000260448_6 (sequence is synthesized)
aatttgcctgaacatttaaaaaatgacctctcataatttcataatctgaatctttatgtgtctttcttgatccccagggcatagagaaggttacctggcccagactagatgtgcagtaaa

SEQ ID NO: 946970 - DNA, 120 bp, Artificial Sequence
  ENSG00000260448_7 (sequence is synthesized)
tggtttttgtatgtgtgaatgaatggaagactgaagttagttattatagatgagatattatggggccattccgagtccggtattcaaggagtttgcaaagttgcagatgacaagtttgct

SEQ ID NO: 946971 - DNA, 120 bp, Artificial Sequence
  ENSG00000260448_8 (sequence is synthesized)
aatgtgtgctgagtgttcgtgcctagtagcatgttaagtggtttgcttgggttgtttcattcagtcctcacagcggactcgtgaattaagtgctgttattatcacgtttttgcagatgag

SEQ ID NO: 946972 - DNA, 120 bp, Artificial Sequence
  ENSG00000260448_9 (sequence is synthesized)
gaaactgaggctcaaagaagataatgtgcccaaggtcacctcgctaggaaagagtggagctgagatttaaactgtgactttaagcccaagttcaaggcttcttactagttttaactacat

SEQ ID NO: 946973 - DNA, 120 bp, Artificial Sequence
  ENSG00000260448_10 (sequence is synthesized)
tcccataccccttttaatcaatcatgtaaataaaatcttaattcttttaaaaaattaatatgtgtttcagcttgtcctgtagagaagactaatacttacaaatgggaaatattcgtcaag

SEQ ID NO: 946974 - DNA, 120 bp, Artificial Sequence
  ENSG00000260448_11 (sequence is synthesized)
ctttattttttctagtttgtcttatgaaattaagtttttcagcctttcccaatataaagctatattttatattaaatatgctttttatttatttttttgagacggagttttgcgcttttt

SEQ ID NO: 946975 - DNA, 120 bp, Artificial Sequence
  ENSG00000259326_0 (sequence is synthesized)
tgtgagttgtccacgaggatacatgcataagtatgagaatatataccccttcctcagcaattagcacagagaattgaattaagcagtacaaaggttttcagttttaggtttacctgatta

SEQ ID NO: 946976 - DNA, 120 bp, Artificial Sequence
  ENSG00000259326_1 (sequence is synthesized)
ccccttactatactcaaatgcatcccaatacttctgtactcctaaatcaactgacaacctttaagcatatgctcttttgctaggtcttgaagaggaggcacaactgccttcatatgagtc

SEQ ID NO: 946977 - DNA, 120 bp, Artificial Sequence
  ENSG00000259326_2 (sequence is synthesized)
cagtgtgtgttgtcaaaatgtaacttttgaattgttctaaagccacagtaagagaagtaagtggttcaagtttcgtgcctttacatttccaccattgtgctttcctctccctttacccca

SEQ ID NO: 946978 - DNA, 120 bp, Artificial Sequence
  ENSG00000259326_3 (sequence is synthesized)
catacaaaactgagccaggcaatgcctagtttttgtgtgctgaacacagctgtacttacatccaccatcctctggacgtgtttgctaatggtttttggatcaggtttgggagacactcca

SEQ ID NO: 946979 - DNA, 120 bp, Artificial Sequence
  ENSG00000259326_4 (sequence is synthesized)
gaagcccagtccactactactggtggctttgaaggtgttagtggctaaaatgaaatatttagagaaatcctcatgactacaatgcaatattataacctatagctctttcttttcccacta

SEQ ID NO: 946980 - DNA, 120 bp, Artificial Sequence
  ENSG00000259326_5 (sequence is synthesized)
cctgacggttacatttatggacaatcttcaattatgttcagtggcaaggagcagagaacccacaggcaattgaaatctctactaataattttggctaacaaggcattgtgcttacggttt

SEQ ID NO: 946981 - DNA, 120 bp, Artificial Sequence
  ENSG00000259326_6 (sequence is synthesized)
ccagagtgctcttcacatacattatctgcagctacagataatttgaaattctcaatctgcctgagttgcaattccctctccattaaaccctttgtcagagctatcaacaaagagtaaagt

SEQ ID NO: 946982 - DNA, 120 bp, Artificial Sequence
  ENSG00000259326_7 (sequence is synthesized)
ggatcatttatgattcctctctattctccagtcacattttgcagtagaaatgtgaataaggaaaagcttagctaaaaggcaggaaggcacaagaaaaatcatcggaagcctggacaagct

SEQ ID NO: 946983 - DNA, 120 bp, Artificial Sequence
  ENSG00000259326_8 (sequence is synthesized)
tacttacacaaacctagatggtatagcctgctacacacctaggctatttggtatagcctactgctcctaggctacatacctatacagcaggttattatactcagtactgtaggcaattgt

SEQ ID NO: 946984 - DNA, 120 bp, Artificial Sequence
  ENSG00000259326_9 (sequence is synthesized)
gcaattgtaatgatggtatttgtgtatcttaacatatctaaacatagaaaaggtaaaaatatggtatagaaatttttttttaatgttacacctgtatagggcacttaaccatgaatagag

SEQ ID NO: 946985 - DNA, 120 bp, Artificial Sequence
  ENSG00000259326_10 (sequence is synthesized)
ctttcaagattagaaattactgtggcaagtcgtgagtggtgagtgaatgtggaggcctaacattactgtatactcctatatactttataaatactgtacacttagactacactaagtttc

SEQ ID NO: 946986 - DNA, 120 bp, Artificial Sequence
  ENSG00000259326_11 (sequence is synthesized)
ttaaattttttcttcaatgataaattaccttattttactgtaaaagcttttaatttttttaacttttactcttttgttatgacacttagcttaaagcacacattgtatagcttatagctg

SEQ ID NO: 946987 - DNA, 120 bp, Artificial Sequence
  ENSG00000259326_12 (sequence is synthesized)
taccagttatttcctttatagccatattctataaacttttttctattttaaaaatgtttaattttttaaatctttgttataaactaaggtacaattacactcattggcctatgtctatat

SEQ ID NO: 946988 - DNA, 120 bp, Artificial Sequence
  ENSG00000259326_13 (sequence is synthesized)
agagtcaagatcatcaatatcactgtcttccactccacatcttatcctattggaaggtctttaggggcaataacatgcatggagctgtcaccttctggaggacttgcctgaggctgtttt

SEQ ID NO: 946989 - DNA, 120 bp, Artificial Sequence
  ENSG00000259326_14 (sequence is synthesized)
acagttaatttttctaagtagaaggaatgcactctaaaataatgataaaaagtattgtatagtaagtgcataaaccggtaatacttactatcaagtattatgtactgtacgtaagtgtat

SEQ ID NO: 946990 - DNA, 120 bp, Artificial Sequence
  ENSG00000259326_15 (sequence is synthesized)
aacctagactttttacagctcagtaggtttgtttacaccagtataatcacagacatagtgagtaatgtgttgtgctacaatgttacaattgttctgtcactaggcagtagtaatttttct

SEQ ID NO: 946991 - DNA, 120 bp, Artificial Sequence
  ENSG00000259326_16 (sequence is synthesized)
gctccattataatcttaagggaccactgtggtatatgaggtctatcactgaccaaaatgtcattatgtggtgcatgactgtatttgaaactcagcccaaattaaaatctctctgaaaaaa

SEQ ID NO: 946992 - DNA, 120 bp, Artificial Sequence
  ENSG00000259322_0 (sequence is synthesized)
tgcttcatttataaagtcttcttgcatacgacttaatgaagccgagatactgttcaacaattgtgaggtcttacctggttggtcatttccttaaccaaggatcaaggacaaaaggccaga

SEQ ID NO: 946993 - DNA, 120 bp, Artificial Sequence
  ENSG00000259322_1 (sequence is synthesized)
aggcaactctttattatgaagttgttctgacacccttctatggatcagtccctggaacctccttcgcactccctaccaggtggtatggtcttctttcttcctctgaacctagggactcaa

SEQ ID NO: 946994 - DNA, 120 bp, Artificial Sequence
  ENSG00000259322_2 (sequence is synthesized)
ctaacagctaattctatcccatggtttcttcacctcaagtgtgactgcagagagcgaccagtctctgtcctttcctgctctttagagagaaaaaaaccacagctccttttaatattaaat

SEQ ID NO: 946995 - DNA, 120 bp, Artificial Sequence
  ENSG00000258496_0 (sequence is synthesized)
gaaactgcatccagtcagtgcaggtcattaaactcaagcaaaagttcactgaagcaaagacacctattgtttatctcacaaaataactggagggttttccagagagagtggagcacaagg

SEQ ID NO: 946996 - DNA, 120 bp, Artificial Sequence
  ENSG00000258496_1 (sequence is synthesized)
gttatatcctgtgccatccatgtcccttcctacttccccatgacagacgtaagggtaagacttctggctaagggaaaggtgtacagactgtgctcctaaaataaaattaaattaaacact

SEQ ID NO: 946997 - DNA, 120 bp, Artificial Sequence
  ENSG00000258497_0 (sequence is synthesized)
gagcgcaagggccccctgtgacctctggaggggtatcctcctttgattaggtgactaatcgggtgacttggagttaataaaaaaaggagacaatccctggagcctgcatcaggtgagccc

SEQ ID NO: 946998 - DNA, 120 bp, Artificial Sequence
  ENSG00000258497_1 (sequence is synthesized)
tgggccctccctgaaagacatttgaggtgtgagagggctcagatgagaggaagcatccccatgtttggcttttgggttttgaagatgaaggggccacctggcaggaatgcaggcgacctc

SEQ ID NO: 946999 - DNA, 120 bp, Artificial Sequence
  ENSG00000258497_2 (sequence is synthesized)
caggagctgagggtcagcaaggaatgagggcctcatccctacagccacaaggagctcaatccagccagcatatgaatgggctgggaaacgtgttcttccctggggccatcacatagggta

SEQ ID NO: 947000 - DNA, 120 bp, Artificial Sequence
  ENSG00000258497_3 (sequence is synthesized)
caataaatccctggggtcctgaaccacctaggatggaggtggccaacacctgccgtatgaggcatccctggccctgcctgaccgcagagagccagccgagctaggcactggctttgcaag

SEQ ID NO: 947001 - DNA, 120 bp, Artificial Sequence
  ENSG00000258497_4 (sequence is synthesized)
acgtctccagatcatgcagggtcaaacgtttctactttttgcatgcctactaattttttattgtatgctgaacatcatgaatgatacatttcagaccttttgattctgtgtcttcctgtg

SEQ ID NO: 947002 - DNA, 120 bp, Artificial Sequence
  ENSG00000258497_5 (sequence is synthesized)
aagaatgttgatataagtaacttgtggatcacctgactcctgcagagacgtggttttaagctttgtcagggcaggtccatttatattcatgccttagtcctggaatgtagccattgattc

SEQ ID NO: 947003 - DNA, 120 bp, Artificial Sequence
  ENSG00000258497_6 (sequence is synthesized)
tgggatgtggcccttgtgggtttctcatggaattccaaaatgcttataaagaaacaaagataaactctgaaaagcagaaaataaagaacaactgatcatgtacagggagaagtgattaat

SEQ ID NO: 947004 - DNA, 120 bp, Artificial Sequence
  ENSG00000258497_7 (sequence is synthesized)
ggctgacttcttatcagaattaatgataacaagaagacagtcaaatgccattcaatgtgcaaaagaaaaaaactcaaccaaaaattctatagctagtaaatccttcaaaattgaatgagc

SEQ ID NO: 947005 - DNA, 120 bp, Artificial Sequence
  ENSG00000258497_8 (sequence is synthesized)
aataaaaacattctcagacaaacaaaaagaatgagtttctagaaggtctgctctataagaatgagtaaaggaagtgcctcaggctaacaggaaatgtatctacaggaagaaaggaagaac

SEQ ID NO: 947006 - DNA, 120 bp, Artificial Sequence
  ENSG00000258497_9 (sequence is synthesized)
gctggaaatggtaaatatgtggatactatgaaagactgagtacacacatacacaaaagtaaacacatgcttaatgttttttaaacaccagcaagactgtctaaggcaaaaattataacac

SEQ ID NO: 947007 - DNA, 120 bp, Artificial Sequence
  ENSG00000258497_10 (sequence is synthesized)
ctaaatgccttggacgttatatataaaacaaacataagaaatacaaaaaagtgaaaagaagaaagaaagctggctagggacctcaggatctcaagaacaccatggaattggcgtgtacag

SEQ ID NO: 947008 - DNA, 120 bp, Artificial Sequence
  ENSG00000258497_11 (sequence is synthesized)
ctaaatgccttggacgttatatataaaacaaacataagaaatacaaaaaagtgaaaagaagaaagaaagctggctagggacctcaggatctcaagaacatcatggaattgagttccctgg

SEQ ID NO: 947009 - DNA, 120 bp, Artificial Sequence
  ENSG00000258497_12 (sequence is synthesized)
gttttctttttgccttaaatatcccagacttggtgttaaataatctgggaacatggaaatgccaatgtgtgcagaccaaaacagccccaacaaaagcctgttctctcttggtaaaggatg

SEQ ID NO: 947010 - DNA, 120 bp, Artificial Sequence
  ENSG00000258497_13 (sequence is synthesized)
agtaaatgggcaagctagtaatatagaaaatttttagacaagaacctctccacacctgtcaaataccacacaaacagctgcagccctaactccacccttgccctttaaaactgcaggggg

SEQ ID NO: 947011 - DNA, 120 bp, Artificial Sequence
  ENSG00000258497_14 (sequence is synthesized)
agcgtagctctctagccctgtggggttgtaagaaggcacatcagcccctccactggggtagcgtcaaagaaggctgaatgaggagtaaggactttcatccatgccaggggacactacacc

SEQ ID NO: 947012 - DNA, 120 bp, Artificial Sequence
  ENSG00000258497_15 (sequence is synthesized)
ccacagagtcaggggagaccacgtggagagcctggatttccattatcactcatcgctaatgagtgacccctccccatccctactgaagtggaatcaagacataaaggtcagcagtcgcaa

SEQ ID NO: 947013 - DNA, 120 bp, Artificial Sequence
  ENSG00000258497_16 (sequence is synthesized)
ggtcaccccagggtcaatggaagcaatgtggggatgagtgatgaggcatccctgggcctttcagccaaggtttaatcagtgcagccctagcagaggattttaactcctacccctgcccaa

SEQ ID NO: 947014 - DNA, 120 bp, Artificial Sequence
  ENSG00000258497_17 (sequence is synthesized)
cagtaaggaggagtctctcctttccttgcgtctcagtggaggctgagaggaaactttgatttccacctccacctggcagcaacaaaacagcattcctctttctccagtggggcagtgtca

SEQ ID NO: 947015 - DNA, 120 bp, Artificial Sequence
  ENSG00000258497_18 (sequence is synthesized)
gtggaggcctgatgcaataggtttaaatatattctaggatccaaaaatataacacccaaaatgtcaggttttcaatttaaaaattactaattataccaagaaacaaaaaaataacagctt

SEQ ID NO: 947016 - DNA, 120 bp, Artificial Sequence
  ENSG00000258497_19 (sequence is synthesized)
gaatgaagaaagacaatcaacagatgcttaaaccaagactccatagatgttgaaattctcagatgaaggctttaaaacagctatactaaaaatgcctcgaaaaacacgttcaacccaaat

SEQ ID NO: 947017 - DNA, 82 bp, Artificial Sequence
  ENSG00000258490_0 (sequence is synthesized)
ttttttttttttcctggagagagagttttgttctgttgcccaggatggactgcagtggcttgatctcattacacctcagcct

SEQ ID NO: 947018 - DNA, 120 bp, Artificial Sequence
  ENSG00000258490_1 (sequence is synthesized)
cccaagaagctgggattacagaattattcttccagcaaatcatttttagaagactatcattattttagaacttgagtctagatattgtctatacttctttaaatataatttatgtactat

SEQ ID NO: 947019 - DNA, 120 bp, Artificial Sequence
  ENSG00000258490_2 (sequence is synthesized)
agtcaaatatcccaactttgttcttgaaagatacttcactgtcataaagcaagaggagtgaaaattattcctcatttcagtcagatttcattaaaagaaaatatatgatataaaagagaa

SEQ ID NO: 947020 - DNA, 120 bp, Artificial Sequence
  ENSG00000258490_3 (sequence is synthesized)
atgacttttccctatatacgatataatttcagcaaacaaatttgctggagaaaatataatctatgaagaattgttaagaaaagataatacatggttatcttcattaggttgtaatgaggg

SEQ ID NO: 947021 - DNA, 120 bp, Artificial Sequence
  ENSG00000258498_0 (sequence is synthesized)
agtggatttcaggattcctctaagaagctttggaatgccagaagataccacaagtgagaagaaaaaataaaacaagaggaaggatatacttcccataaggggacaaagtacagccgcagt

SEQ ID NO: 947022 - DNA, 120 bp, Artificial Sequence
  ENSG00000258498_1 (sequence is synthesized)
gtcctccgcttgggccatggaacagctgcaggttttgccctgattaccctggtggtaaagtctgattggctatgattcccggtgtccagaagataaacacgggcggtgcagcggagccac

SEQ ID NO: 947023 - DNA, 120 bp, Artificial Sequence
  ENSG00000258498_2 (sequence is synthesized)
acgcatgcctgtgcatggccacgccaggtcggaaacccagcccctctgcttgggaggcacgcagggctctggctgaagcctgaagcttgggatcctcagagcacagatgtcccagggttg

SEQ ID NO: 947024 - DNA, 120 bp, Artificial Sequence
  ENSG00000258498_3 (sequence is synthesized)
tgtgaagttagtgagacgaggtgtacggagagagctcggagaggagagggagtctcgattgctgtggctgtggctcggagatgcctgcaagagggttgcacatggcagaaacttaatcca

SEQ ID NO: 947025 - DNA, 120 bp, Artificial Sequence
  ENSG00000258498_4 (sequence is synthesized)
caccaacttcagcgaagaaggaatgtactggctccagtcagtgaaaagtccaggaggagccatgccttcaggcacggctgcatccaggcactcaacaggtgtatccaggcactcaacagg

SEQ ID NO: 947026 - DNA, 120 bp, Artificial Sequence
  ENSG00000258498_5 (sequence is synthesized)
tgcagccaacaccttgccccgcaggctgtcagctcctgccttctgctgcgtccacgtcactgtaggtggatttctctgcacatgggtgagatggccccagaagctctggctcatggagtc

SEQ ID NO: 947027 - DNA, 120 bp, Artificial Sequence
  ENSG00000258498_6 (sequence is synthesized)
cttgtagcacctgtcctggccatccccagatgagaaagcatcatttcccatggcagaaatctggtggaaacaggagggagggggtcggctctctttggtcggatctgggtctcgtgccca

SEQ ID NO: 947028 - DNA, 120 bp, Artificial Sequence
  ENSG00000258498_7 (sequence is synthesized)
tctctgggagagaaaagtccccattcacagaaactgagcagatcctggattggatggggaaggagagatgctggcagatacacacacattcactgcactccctgcaaggatagtgacaat

SEQ ID NO: 947029 - DNA, 120 bp, Artificial Sequence
  ENSG00000258498_8 (sequence is synthesized)
agtagaagctgctctttcttgagaagttatgacgtgtgccagaaaattctaccttttaaggatatagagaggcttttatcatccccattttacagatgacaaaactgaggctcagagagg

SEQ ID NO: 947030 - DNA, 120 bp, Artificial Sequence
  ENSG00000258498_9 (sequence is synthesized)
tgaagtgatttgcctatggatgcatagctaaggtctgaccccacaactcacactcacaagttagcaagaggtgtttcaccagggtagtctgggggcagaaggagcctgcctggtgaggga

SEQ ID NO: 947031 - DNA, 120 bp, Artificial Sequence
  ENSG00000258498_10 (sequence is synthesized)
tggggagggaaccctggagaagaggaggtttatgggggaggctgctgagttttttgggcacatatgctaagttggaggtgcccatggtcctcaggagatgttcgggatttgggggtcaga

SEQ ID NO: 947032 - DNA, 120 bp, Artificial Sequence
  ENSG00000258498_11 (sequence is synthesized)
ggcatgagcctcggcatcctgggaatcatggctgtttgctttgctttgggaatttcacagtggtggggggaaggcggctgctgacaggaagcacttcccatttggtggagaaggcagcca

SEQ ID NO: 947033 - DNA, 120 bp, Artificial Sequence
  ENSG00000258498_12 (sequence is synthesized)
gaacctgcatggcagaagctgcggcctgggcctgtgacagtgtctacaactgtggccacaggttcaaggcccttgtagttggcagacacagggcctgaagttctctggccgttgttttag

SEQ ID NO: 947034 - DNA, 120 bp, Artificial Sequence
  ENSG00000258498_13 (sequence is synthesized)
ggcaaacaccttgagaatggcatttccaaggcccttgggctgtgccagggcaccaacgccagtcgaggaccacgcctttctgagggatgcttggaatctcacagacaggggttcacattc

SEQ ID NO: 947035 - DNA, 120 bp, Artificial Sequence
  ENSG00000258498_14 (sequence is synthesized)
cgactctgcttcctagaggctatgtggccttgggcgtgtctggaacctctctgggccacagtttgcttatctgtgaaagagtcatggtagcctctccttatgggtttatggggagcttcg

SEQ ID NO: 947036 - DNA, 120 bp, Artificial Sequence
  ENSG00000258498_15 (sequence is synthesized)
gatatggagggtggggcagcacacagggctcaagctgcagctcttagttacctgcttttcctttgcaggtgtcctacgggcctgatggaaaggtggcaggcgaaatgcacctggcctcag

SEQ ID NO: 947037 - DNA, 120 bp, Artificial Sequence
  ENSG00000258498_16 (sequence is synthesized)
cgtcaggggctgtgaatgcagtagcacttgtagctatgaggtcagagtggactaggatggtccttccaccaagaagcctgggccttcctgctcttcgttgtccagctgcagaaactgatc

SEQ ID NO: 947038 - DNA, 120 bp, Artificial Sequence
  ENSG00000258498_17 (sequence is synthesized)
tcatccctcagggcttggcacaactgccccttcctcctcacattcccaaatatacctacccctccccaactcaatcctcctcaccagactgtggctccaggatgacagggcagagttgga

SEQ ID NO: 947039 - DNA, 120 bp, Artificial Sequence
  ENSG00000258498_18 (sequence is synthesized)
ctcacctgtgtctgccaggccagctcaccgtgggggcaggtcccaagaggcctctggatttggaccaacttccagtgtgaccttgaacaaggccttcgcctccctcagcctccgttgcat

SEQ ID NO: 947040 - DNA, 120 bp, Artificial Sequence
  ENSG00000258498_19 (sequence is synthesized)
gaggggttgtgctggcacatctcagagcaggtagcgctacctggtgagttgagggctctgtccatcatctttgtcactgtaatgctgggtaacaaataaacacgaaacaatgagtgctcg

SEQ ID NO: 947041 - DNA, 120 bp, Artificial Sequence
  ENSG00000258498_20 (sequence is synthesized)
gctgggcgcacccgtcccgttcgtccccggacgttgctctctaccccgggaacgtcgagactggagcgcccgaactgagccaccttcgcggaccccgagagcggcggcgcgactcaccgc

SEQ ID NO: 947042 - DNA, 120 bp, Artificial Sequence
  ENSG00000258498_21 (sequence is synthesized)
ggaggcgcccggacgcgtcaatgtcccccagggcaaggcctgaaccaggtcgcgagggtctgtctcccgtctggggagctgaactgcccgagacactgtcgcagtcgcggggacttgtct

SEQ ID NO: 947043 - DNA, 120 bp, Artificial Sequence
  ENSG00000258498_22 (sequence is synthesized)
ggagacagcgctcgccgcccgggccgaggtaggagctggctgggctcggtagagcgcgggcgaatcgctttcggcagcgaaggaacgtgtcgggagaagccaactgcaggaccagggccc

SEQ ID NO: 947044 - DNA, 120 bp, Artificial Sequence
  ENSG00000258498_23 (sequence is synthesized)
cagcgggcgcgcagagacgcctgccttgggcggaggtccccccctccggttttcgtggctctggtagggccctctgtcccgtgagctcctcactggacctgaggctacaggcttcagcag

SEQ ID NO: 947045 - DNA, 120 bp, Artificial Sequence
  ENSG00000258498_24 (sequence is synthesized)
aaagcagcctttctttagggctgtcatctgttctggggatctgttgctgtttcttgggcccacagaatacactccacacctcgggactccataatattggacaaggctggaaggcccatt

SEQ ID NO: 947046 - DNA, 120 bp, Artificial Sequence
  ENSG00000258498_25 (sequence is synthesized)
tcgggcaggagctggtgcacacctggaggagagtgctggtgaatggcagtcatcctcttcagcggtcctcccagagctgtcctcagcatggcagcctccacagcccctgggtgtcacccc

SEQ ID NO: 947047 - DNA, 120 bp, Artificial Sequence
  ENSG00000258498_26 (sequence is synthesized)
cggtttcgtgtctgcctcggactccagacctgcccctcccaggctggcccagatggatcctctacagtgactaacccaaaccagcaccaggcagggacccaataaacctttgtgaatgga

SEQ ID NO: 947048 - DNA, 120 bp, Artificial Sequence
  ENSG00000258498_27 (sequence is synthesized)
ggggccctggccggccctgccgcggcgtccgagaccttctgatccctcgctgcgcgcggcgcggggttggcgacttgggctcaggggcggcggggcggggaggtgccttgacctagggac

SEQ ID NO: 947049 - DNA, 120 bp, Artificial Sequence
  ENSG00000258498_28 (sequence is synthesized)
tcccgtgcgcctgccgccccgggaccagccgcgaaacttcttctcgggacggagacagcgctcgccgcccgggccgaggcccagcccaataggaagcacctgatccacactctttctagc

SEQ ID NO: 947050 - DNA, 120 bp, Artificial Sequence
  ENSG00000258498_29 (sequence is synthesized)
tgcacacctggaggagagtgctggtgaatggcaggtgtgtgcctcagtgtccttgctgccagggtgtcagccctgcttcaccactggccgtttgtctctgtcccctccactggcctcttg

SEQ ID NO: 947051 - DNA, 120 bp, Artificial Sequence
  ENSG00000258498_30 (sequence is synthesized)
aagcacagagaccctccgggtactttccttcctctgggcttccactcatgctattccctgctccctttttctacctggagacccccattcctcctcctcctctgctgccctcacctccac

SEQ ID NO: 947052 - DNA, 120 bp, Artificial Sequence
  ENSG00000258498_31 (sequence is synthesized)
ttatgcaggtgaggacagacccaaggtccaggcaatgctggcctttggaacacagaacctggctcactgactcccactccagttgtcttttccctctgcctctggagcaaccctctctcc

SEQ ID NO: 947053 - DNA, 120 bp, Artificial Sequence
  ENSG00000258498_32 (sequence is synthesized)
tccagagcaacccctgtccctccttcctacctctctctagggctgcacccccagctcaccttagacctggcccttcctacctgttgcccctactgtcttgtcccatcccagtggtcagga

SEQ ID NO: 947054 - DNA, 120 bp, Artificial Sequence
  ENSG00000258498_33 (sequence is synthesized)
gggagagtactggccaaaggcccagctccacctgtgacttaggggagtgccaggcatcacccagaggtcccggccctcgggggcctggcaggctctgctgtgggggaagcagagttagaa

SEQ ID NO: 947055 - DNA, 120 bp, Artificial Sequence
  ENSG00000258498_34 (sequence is synthesized)
gtcccccagcctggctgggcctcccccacctccctttctgcctgccctcttacaactccagcagggggcgggcaggggaaagaaaaggagggacaagttggatggggtccatttggtgtc

SEQ ID NO: 947056 - DNA, 120 bp, Artificial Sequence
  ENSG00000258498_35 (sequence is synthesized)
caggaacaacttggagagaggcggggaggggacaggcagcagggccctggcagagccaggggagggctggcctttggatggccttctgatcccaagcccatcctcctggggcagtcttcc

SEQ ID NO: 947057 - DNA, 120 bp, Artificial Sequence
  ENSG00000258498_36 (sequence is synthesized)
cttgaaagggagggtttggtgaaccctggtgcggacccccccgccggacctcactgccccagtgcggggcgtggtaggcgggtttgcaatgggtacagcctctctctccattccagtaga

SEQ ID NO: 947058 - DNA, 120 bp, Artificial Sequence
  ENSG00000258498_37 (sequence is synthesized)
tgcctggaggattggcggcggggtggcatgagaaggtggcccctcttctccatctcccagtcaggcgatttctctgctgtctggggcaggggcgcacaccccaggaacttactacgtaga

SEQ ID NO: 947059 - DNA, 120 bp, Artificial Sequence
  ENSG00000258498_38 (sequence is synthesized)
gggaagccagcctggtctctcccccttgcgtcagtgctcctaagctgcccctcaccactctgggtaggggtctttcaggtgggctagggaattctccttggaagtccccttgtttgctcc

SEQ ID NO: 947060 - DNA, 120 bp, Artificial Sequence
  ENSG00000258498_39 (sequence is synthesized)
cctccatcagggcacctctgagttagccaatcatcctcttttctggcctcttttttgcggggaggagagtagagagagaagcctcctactcggcaggtctctgagaggaggtttgggggg

SEQ ID NO: 947061 - DNA, 120 bp, Artificial Sequence
  ENSG00000258498_40 (sequence is synthesized)
gcttctgaggttgctcctcctgggcagagtcaaggggtgttgagggttccaacttttactggacaatctctcaagctctgattccctgatttctgggaggtgtcagtgtagggcttgtgt

SEQ ID NO: 947062 - DNA, 120 bp, Artificial Sequence
  ENSG00000258498_41 (sequence is synthesized)
cctgccccacccacacagcatttggtgcaggcacatgggatggttccccaagcccttttcccacagttagtttcagaaaatgcataagccacctaaggctgggagagcctttctgtgctg

SEQ ID NO: 947063 - DNA, 120 bp, Artificial Sequence
  ENSG00000258499_0 (sequence is synthesized)
gaagttttgggaggtgaggggtgtgtgttcactgttttgattgtggtgatgacttcacaggtatatacatatgtcaaaacttaccaaattgcgcactttaaacatgtacaaatgtatgtc

SEQ ID NO: 947064 - DNA, 120 bp, Artificial Sequence
  ENSG00000258499_1 (sequence is synthesized)
gataaagctgtttttaaaacagaggctgccacgagcatagaggcaaaacagtcgatgcctcccagtttcaagctggtttggtcatcatgggagagcgttgctgtcctcatctcacccaca

SEQ ID NO: 947065 - DNA, 120 bp, Artificial Sequence
  ENSG00000258499_2 (sequence is synthesized)
cagaacctggaacccagaggggttaagtgctagtccgggcagagcccatggccagattctttcttctcaggatccagcgctttctttgcaaagcactgagtgtgcttccaggagcctccc

SEQ ID NO: 947066 - DNA, 120 bp, Artificial Sequence
  ENSG00000258499_3 (sequence is synthesized)
agaacctatcggcatgccctgagctgagggacatggtgtccctgccacctgaagggccctccacagcatttggagtcagagctggcgtgggatcctggaaaagctgaatgaacgcaggct

SEQ ID NO: 947067 - DNA, 120 bp, Artificial Sequence
  ENSG00000258499_4 (sequence is synthesized)
ttgtgtgtggacggacctgggtatgcatcctggcaccagctgggtctcagtgaccacccctgtgaaatgggggtaacaacggtcccttccccatacgaccctgccatgtaaggttcagtc

SEQ ID NO: 947068 - DNA, 120 bp, Artificial Sequence
  ENSG00000258499_5 (sequence is synthesized)
gagaagggacaagctgaggcaggaggccttgagccttgagagtggatgggagaaggagaatgtggagaaatggggcagctgtgtttgctgagcacttcctgtagcccagtactagacaga

SEQ ID NO: 947069 - DNA, 120 bp, Artificial Sequence
  ENSG00000258499_6 (sequence is synthesized)
gcactttacacgctctatcccctttaatccccacaacagccctgtgaagtattcactgtcctcccagcttccccaagaagaacactgaagcctcccaagagcaagtcactcatccaaggt

SEQ ID NO: 947070 - DNA, 120 bp, Artificial Sequence
  ENSG00000258499_7 (sequence is synthesized)
cacagaaagtagacaggggcaaatataggccttgaacccaggcagcctgacttccaagtccctgtcttgtggctgaaattccccaccagttttctggggtctttgcatttctgagtcccg

SEQ ID NO: 947071 - DNA, 120 bp, Artificial Sequence
  ENSG00000258499_8 (sequence is synthesized)
accccactagttgagatgctttccccagcagtgatccaagttcagattctctctgcaactccttgttacgcaagccaccctatgatccctcacgtgtgcggagcactctacagtttacaa

SEQ ID NO: 947072 - DNA, 120 bp, Artificial Sequence
  ENSG00000258499_9 (sequence is synthesized)
agaactctttcattactacttatgccatgggtggttccgaatcccttgaaacaagagaggactgttgttgttatcccggtgtctaccatgaagatggtatggatcccttcctagggagaa

SEQ ID NO: 947073 - DNA, 120 bp, Artificial Sequence
  ENSG00000258499_10 (sequence is synthesized)
atggacattgacgcacactggaccattttatctgcacaacaagtaaacagtattaggcccagtttacagatgttaaaactgaggcctggaagaattaaacagcttgcctaagttcatgaa

SEQ ID NO: 947074 - DNA, 120 bp, Artificial Sequence
  ENSG00000254497_0 (sequence is synthesized)
atacaaatgacaaggagaggggggttatggagccacagctggaaggagtctggtccttgaatcaccatttggagaaaaaacctgcagatgatcccatcctgcctgcacagcttctccagg

SEQ ID NO: 947075 - DNA, 120 bp, Artificial Sequence
  ENSG00000254497_1 (sequence is synthesized)
aagaaagtcgaaatcgtcactgccacccacactggggttctgctttcctgattacacctttctcatctctatcacctatgccaggaacccaaacccaagtcttcccagctgtgtgcagaa

SEQ ID NO: 947076 - DNA, 120 bp, Artificial Sequence
  ENSG00000254497_2 (sequence is synthesized)
tcacagtggccacaccaagacaacaggtggggtcaatgtcacagcccattaggctgcatctgtgtccactggctccctcatcaaccacacaaaacaaaacagagactacacaacaatcta

SEQ ID NO: 947077 - DNA, 120 bp, Artificial Sequence
  ENSG00000254497_3 (sequence is synthesized)
ggaagtgacgtccaccaagtccagctgcagatgatcccatcctgcctgcacagcttctccaggggagatagacacacagaagcccacgagagtcaaataagagccataccttccaggcga

SEQ ID NO: 947078 - DNA, 120 bp, Artificial Sequence
  ENSG00000254495_0 (sequence is synthesized)
acacacctttgagttaaatcaggggttaataagaagaaaataattctgagaaatatacgttcgttcttaagatggcataaatattaaactgtattcacacaatactttttctggaaaacg

SEQ ID NO: 947079 - DNA, 63 bp, Artificial Sequence
  ENSG00000254495_1 (sequence is synthesized)
caacactttgggaggccgaggtggacagatcgcttcaggtcaggaattcgaatgggcacggtg

SEQ ID NO: 947080 - DNA, 120 bp, Artificial Sequence
  ENSG00000254495_2 (sequence is synthesized)
taaaaattcaaaaaaattagctgggcacggtggcacacgcttgtaattccagctgctgggaggctgagggacttcgtctcaatcaatcaatcaataaataaagcactttttctaaaatca

SEQ ID NO: 947081 - DNA, 120 bp, Artificial Sequence
  ENSG00000254499_0 (sequence is synthesized)
ctcggctcagctgcggacgggatctgctgcagctgggtcacacctggggccctccgtgagcctggtctggtacggaagaaattccccctactcttctagaactcatctggtgtcgagtgt

SEQ ID NO: 947082 - DNA, 120 bp, Artificial Sequence
  ENSG00000254499_1 (sequence is synthesized)
gagagagagacagcttggttatggacagagctctagagcgacagctacacccgtcttgaatggagaggtacctgccggacactccaggaagcctgaaatacagggatgcctatgacccac

SEQ ID NO: 947083 - DNA, 120 bp, Artificial Sequence
  ENSG00000227619_0 (sequence is synthesized)
agtccaccacgtaaggacacagcaagaaggcaccatctatgaaccaggaagcaaaacagtcctcatcaggcaccaatctgctggcaccttgatctcggacttcccagcctccagaactgt

SEQ ID NO: 947084 - DNA, 120 bp, Artificial Sequence
  ENSG00000227619_1 (sequence is synthesized)
gagcaataaatttgttgtttttaagccgcccagtctgtgatgttttgttttagcatcccagactaagtaagggtttaaaagaggtgattaagttaaaatgaggtcatcagggtgcacccc

SEQ ID NO: 947085 - DNA, 120 bp, Artificial Sequence
  ENSG00000227619_2 (sequence is synthesized)
agtccgacatagctgatgtccttataagaagaggaaattaggacacagacatatgccatgtgaagacgcagggagaatgtgacatctgcaagccaaggagagaggctgcaggagaaacca

SEQ ID NO: 947086 - DNA, 120 bp, Artificial Sequence
  ENSG00000227619_3 (sequence is synthesized)
gctctgctgacactttgatctcaagctctggccaccagaactgtgagcaaataagtgtctgttgtttagggcaccctgtccatggcaccttgctccgatagccccaggaaacgaatccac

SEQ ID NO: 947087 - DNA, 120 bp, Artificial Sequence
  ENSG00000227619_4 (sequence is synthesized)
agcacaggtttgtgctcagaagcccctacaccagctgctgcgtgatggagaacaggagtcaaagcacggaggccggcagaaaatcaagaggccggtcctgtgcatgggcaagaggcctca

SEQ ID NO: 947088 - DNA, 120 bp, Artificial Sequence
  ENSG00000227619_5 (sequence is synthesized)
gggatatattagctgaggaggaagccgaggttgggaaaggtggagggacttgcccaagtcacacaaacgacaactcagcagagctgagaattggcacccagggcaactggagtccatcct

SEQ ID NO: 947089 - DNA, 120 bp, Artificial Sequence
  ENSG00000227619_6 (sequence is synthesized)
gagcttgtcactgctgggctctgagacctcctggtgaagaaggacagtggcagagacagcccgacccagagaaacccagcaacgctactttctaagggcatttttccctctcatttggaa

SEQ ID NO: 947090 - DNA, 120 bp, Artificial Sequence
  ENSG00000227619_7 (sequence is synthesized)
ggagaaaccacagatggaaagtcccagccatgggctccgtgtgacctggtggccttaagaagctccccccaccgcccctcagccctttaatcatttacaaagcagggccacacagagcat

SEQ ID NO: 947091 - DNA, 120 bp, Artificial Sequence
  ENSG00000227619_8 (sequence is synthesized)
ctattttctttctggaacatcagagctggctgggaactgggagaagagctggagcaacagcctgcatccatttcctcttgctgcaataacaactgatcacaaggtcagtggcttaaacaa

SEQ ID NO: 947092 - DNA, 120 bp, Artificial Sequence
  ENSG00000227619_9 (sequence is synthesized)
cacagatttactctcttacagtctgaagtaagagccaagatgtcagcggggccgtgttgcttccagaggccctagggaaatccatttccttgcacttccagcttctagaggccacctgcg

SEQ ID NO: 947093 - DNA, 120 bp, Artificial Sequence
  ENSG00000227619_10 (sequence is synthesized)
ttccttagcttgtggcctcatcctcattcttcaaagccaggcatgtagcatcttccggctcctctctctcgctctgaccttcctgcctctctgttacaaggatccacttttgtggctaaa

SEQ ID NO: 947094 - DNA, 120 bp, Artificial Sequence
  ENSG00000227619_11 (sequence is synthesized)
atgggtccatcctccccagcctgaatgtgaagaccccctcctccacggcaccccattgcccaggacaaggatggggcccatcactgctgcccagaggatagggagaccctctccaggttt

SEQ ID NO: 947095 - DNA, 89 bp, Artificial Sequence
  ENSG00000227619_12 (sequence is synthesized)
tcactgctgcccagaggatagggagaccctctccaggtttcctgggaaggcatcaagatgttcccaaggctcaaagaaaaaagaaatga

SEQ ID NO: 947096 - DNA, 120 bp, Artificial Sequence
  ENSG00000227619_13 (sequence is synthesized)
ggagaccaaggcaggagaaccacttgagcccaggagtttgaaaccagcttggacagtgatgggcaaaccccatctctacaaaaaataaaaaagttagctggatgtggtggtgcacacctg

SEQ ID NO: 947097 - DNA, 120 bp, Artificial Sequence
  ENSG00000227619_14 (sequence is synthesized)
gaggccttgaggctgggaggttaaggctgcagtcagccatgactgctccactgcactccagcctgggcaacaccgtgagccctgatctcaaaaataaataaataaacaaataaagatgct

SEQ ID NO: 947098 - DNA, 68 bp, Artificial Sequence
  ENSG00000227619_15 (sequence is synthesized)
acctcaggtgatccgtgccacaaatgtggtttttaaatgtggtttttaaaaatatcttgatagccata

SEQ ID NO: 947099 - DNA, 120 bp, Artificial Sequence
  ENSG00000227619_16 (sequence is synthesized)
cagtgactcggtttcctgtgtaatcctacgtatttgttatgcatgtacaaagaagacagggcatgaaggtgtcaccagatgccacagcagcccacagcacagaaaaggtcacaaccacct

SEQ ID NO: 947100 - DNA, 120 bp, Artificial Sequence
  ENSG00000227619_17 (sequence is synthesized)
acttcagagaaaggcactggggaccttggctatgtggacaagaaccaggagcttgggcttcccaggcacagcagggaagcctgcaggggcctgacaggtggataacctagtgcccaaggc

SEQ ID NO: 947101 - DNA, 120 bp, Artificial Sequence
  ENSG00000227619_18 (sequence is synthesized)
gagtggcaccctctgattgtctgaggtctctatctctagaggacagtaccacagattggaagccaggtctttccagagtccctgtgacctcctctttctgcatgaaacccagattgagta

SEQ ID NO: 947102 - DNA, 120 bp, Artificial Sequence
  ENSG00000227619_19 (sequence is synthesized)
ggaaaatgtccccaggaggaagcagccactgcccaagggagacagctagagactcgctgggcaggctacatccctgggcttctctcggacccgacaagagcctgtccatcccttcacctc

SEQ ID NO: 947103 - DNA, 120 bp, Artificial Sequence
  ENSG00000227619_20 (sequence is synthesized)
cactaagatcagggcaccccaggagtctcggcagggccaccccaggctctgctctgccctggaaaggtcctcgtttcacactgactcagtttcagttttggaaggaggtcagaggttgcc

SEQ ID NO: 947104 - DNA, 120 bp, Artificial Sequence
  ENSG00000227619_21 (sequence is synthesized)
tccatgtcccttctccccactggttctctggaaccctccatcatagatgtccctgcccttccttccctgctcaggagcaaaacccccaacccccaggagctggtctctctaagtcctctt

SEQ ID NO: 947105 - DNA, 120 bp, Artificial Sequence
  ENSG00000227619_22 (sequence is synthesized)
ggatcaggccaggctcagccctggaggccacagctcaggccctgagccagcccaaggggcagggcgaggaacctacattgttgtgtgcccagcccctttaaggggcccatacggacaaga

SEQ ID NO: 947106 - DNA, 120 bp, Artificial Sequence
  ENSG00000227619_23 (sequence is synthesized)
gcaaattcagtaggttgcgtcatccactctatagtgattaaacagggatggtggagaagtagagaagtgtcagctctggaaccaggtggccctagattgaaatcctagctctgctattta

SEQ ID NO: 947107 - DNA, 120 bp, Artificial Sequence
  ENSG00000227619_24 (sequence is synthesized)
ccagccaggtggccttggataggtgatttgaccaataccgttcctccgtttccccaccttgagtgttattgcaaggattaaatgagttactacaaagtaaagtactaaatacatatcagc

SEQ ID NO: 947108 - DNA, 120 bp, Artificial Sequence
  ENSG00000227619_25 (sequence is synthesized)
tattattattattactactactattattattatgagccaggagatggggactgtgacataggctgctggtctcttctctcctcttccataagaatagttcaccccatccttagctgggtg

SEQ ID NO: 947109 - DNA, 120 bp, Artificial Sequence
  ENSG00000227619_26 (sequence is synthesized)
tatggccacctggcccaaaactacatttcccagcatcccttgctgctagatgtgaccatgtgatcaagttctggccaatgagatgccaggagaagtggtttggcccacttcctgggagtt

SEQ ID NO: 947110 - DNA, 120 bp, Artificial Sequence
  ENSG00000227619_27 (sequence is synthesized)
ttctttaaaggacaggggcaatgccttctccttttcttctcctttctgctgaccagaatgtgagcatggagtctggagcaggagcagctgttgtgcactgtgaggttgaagccgtgtgtt

SEQ ID NO: 947111 - DNA, 120 bp, Artificial Sequence
  ENSG00000227619_28 (sequence is synthesized)
gagaatagcagagcaacaaagcaataggagctggagcccctaggggccatgaagcccctaccagccctggactgcttagatttacttgagcaagaaataaacccttgattgtttaaaccg

SEQ ID NO: 947112 - DNA, 80 bp, Artificial Sequence
  ENSG00000227619_29 (sequence is synthesized)
ggagcaacagcctgcatccatttcctcttgctgcaataacaactgatcacaagatggagtctcactctgtcagtcacctc

SEQ ID NO: 947113 - DNA, 120 bp, Artificial Sequence
  ENSG00000287470_0 (sequence is synthesized)
agtctcctcaaattctgcacacataaaacttcagagcctgggagcgacccatgaaacgcaggtttttaaggacaaaacaataggacaaaagtgctgtatattgtccttaagatgacacat

SEQ ID NO: 947114 - DNA, 120 bp, Artificial Sequence
  ENSG00000287470_1 (sequence is synthesized)
gaatttaaaatgcatagtgtttggattattcatgagagccccgcaagaacgatgtcccaggggtttttgccaggaacatgcctgagattgtagataagaatcaagcatctggggctgccg

SEQ ID NO: 947115 - DNA, 120 bp, Artificial Sequence
  ENSG00000287470_2 (sequence is synthesized)
cacaatggaaaactccagcactccatggaacttttccatctgcagcagtcggaggatttgcctgagaacatacgcggcatgaagacactctcagccctcaagggcacccagtcagcgctg

SEQ ID NO: 947116 - DNA, 120 bp, Artificial Sequence
  ENSG00000287470_3 (sequence is synthesized)
cacaactcctagaactgcacagtctaaatggcaaccactagcccctgtgacaactgatcacttgaaaaattctttagacgacagccatcaagcagcaaatacctcgcaggaggccattgt

SEQ ID NO: 947117 - DNA, 120 bp, Artificial Sequence
  ENSG00000287470_4 (sequence is synthesized)
gtttctatttgaacttctatggatgtcaagctctgttcttcaaaatttagccctacagatgggtggcccaccggagagaattaatctcactatgcagccaacactaccctttctggatct

SEQ ID NO: 947118 - DNA, 120 bp, Artificial Sequence
  ENSG00000287470_5 (sequence is synthesized)
ttccccagtagtgtggattctgctctagtccagaattatgcagaataagtatacttcatcttagacaccataattcttcaaatatctaaaatgtatattatgctctccaaatcctggtca

SEQ ID NO: 947119 - DNA, 120 bp, Artificial Sequence
  ENSG00000287470_6 (sequence is synthesized)
tctccaggttaagtatctctcaaaaacagtccatcagataatatgattttaaatctttatccccttggtcatatacccacaatctcattctatttaccaatatccctactgatgcataaa

SEQ ID NO: 947120 - DNA, 120 bp, Artificial Sequence
  ENSG00000227610_0 (sequence is synthesized)
ccacctgctcagaaaatcgaaccttcacaggattggacctcaacttggccttcttcgcagcactgatgaaagcagatttgggggactggaaaaagaacagagagatggtcttcatggccc

SEQ ID NO: 947121 - DNA, 120 bp, Artificial Sequence
  ENSG00000227610_1 (sequence is synthesized)
cagtgggctggaatggagacacctgtcacccattctagcaggtcaggagggagcagggggagagaccaaggtcatctttcctttcacaaatacctggaaacctggagtcaccttgcaaaa

SEQ ID NO: 947122 - DNA, 120 bp, Artificial Sequence
  ENSG00000227610_2 (sequence is synthesized)
gaccaaccccataatgcttcaaagagggaactgcagaggaccctctatacagctgtcccctcccctgtcccctcctccctcctgaagctatagtcaataaattcagacatgttgtctaat

SEQ ID NO: 947123 - DNA, 120 bp, Artificial Sequence
  ENSG00000227611_0 (sequence is synthesized)
cagactaggaaattctcctaaatatatctccaacagagtaaacaagagattaggaaacttgtccttcattcaattacacctggcaggtgaatgggagtggagcagtaagagatgctgctt

SEQ ID NO: 947124 - DNA, 120 bp, Artificial Sequence
  ENSG00000227611_1 (sequence is synthesized)
ccagtagttttctacctctcaatccttgctattcaaagtatggtccacagtccagcagctttggcatcacctgggaacttgatggaaatgcagataagttcaaattcccactactgatat

SEQ ID NO: 947125 - DNA, 120 bp, Artificial Sequence
  ENSG00000227611_2 (sequence is synthesized)
cattctatatcagcttgcaaaatgaaagcaagaagaaacaaaacaaagcattagccagtttggattttctgaagtgcactaaatgtcaaactcaagaaaaggtagtagaaaataaatttc

SEQ ID NO: 947126 - DNA, 120 bp, Artificial Sequence
  ENSG00000227611_3 (sequence is synthesized)
tcttcaaccaagtcattagtatggaatcatctactctgttttgaggcgacaccagccaataccagccacattttcggaatcatcattttctggtgaaataaactgacttgcataatttaa

SEQ ID NO: 947127 - DNA, 120 bp, Artificial Sequence
  ENSG00000258140_0 (sequence is synthesized)
accgtccagacagatgcatgtagtttctgaagaactgagaggcttttctagaagcctaagcagacatttccttgagcttcatcagctgtattgaacatgaccatccctaaacaaataact

SEQ ID NO: 947128 - DNA, 120 bp, Artificial Sequence
  ENSG00000258140_1 (sequence is synthesized)
ggtatctaggaaatgaagttggagctgagggtagctgtccccaaagaaaatcaagaaaaggaatgaatctggggcagtggaaacaatgtctatcaaatcttcctacctgtgtacatttac

SEQ ID NO: 947129 - DNA, 120 bp, Artificial Sequence
  ENSG00000258140_2 (sequence is synthesized)
cctgttttccacaattccctgctctacctgagaaacccttgctcatctaaactgataatatttcagtggaaggagagcgagtagtgtcaggatggctaaaccattagatgaattgttgaa

SEQ ID NO: 947130 - DNA, 83 bp, Artificial Sequence
  ENSG00000258140_3 (sequence is synthesized)
atggctaaaccattagatgaattgttgaagctgaagagatggggtctcgccatgttgcccagactggtctccaattccttggc

SEQ ID NO: 947131 - DNA, 120 bp, Artificial Sequence
  ENSG00000258140_4 (sequence is synthesized)
atcaccctggtagtatgtacaagagcatgtgatatgggcttaatgtgcagcctccaacttagaatctggagagaatgtgtgaaggaaccaaattcagagttatatgaagtggctacagct

SEQ ID NO: 947132 - DNA, 120 bp, Artificial Sequence
  ENSG00000258140_5 (sequence is synthesized)
gtcaaagttgcagcagtctatcagtgagtgaccacaagtggtggagaacaataaagtgatatcaagagtccagtgacatgacacaagtagtagctttctaagcagtttatctctgtggca

SEQ ID NO: 947133 - DNA, 120 bp, Artificial Sequence
  ENSG00000258140_6 (sequence is synthesized)
tgatcttgactctattatgcctcatttagtttctgcctgttttctaagcttggttctcaagctgcttagtcaattttgtgagttcactgatagtctcacaataaatcgccttactgttta

SEQ ID NO: 947134 - DNA, 120 bp, Artificial Sequence
  ENSG00000258140_7 (sequence is synthesized)
atctactgccaaggtcttaaataccatccaggtgacatgcctctttaaagaaatcctttcagtccagacctttctcctgaatgtaaaaaaagatgttctcaaccatctactagatatcca

SEQ ID NO: 947135 - DNA, 120 bp, Artificial Sequence
  ENSG00000258140_8 (sequence is synthesized)
actagatatccacatttgtttttctcaaaagcatttcaaactattgtggggttttgtttgtttgttttctttttgagacagagtctcactcttgctggagtgcagtggcacgattttggc

SEQ ID NO: 947136 - DNA, 120 bp, Artificial Sequence
  ENSG00000258140_9 (sequence is synthesized)
gtgccaccatgccagcttaattttttggttgagacaagatttcaccatgttttctaagctggccttgaactcctgggctcaaacagtctgcctgccttggcctccccaagtgttgggatt

SEQ ID NO: 947137 - DNA, 120 bp, Artificial Sequence
  ENSG00000258140_10 (sequence is synthesized)
acaggcgtcagccaccacatccagccaccaaagtattctttttaaaaaagaagccttatattttagaggtagatggtaaaatctttacagaagaaatgatatgatatttgggatttgctt

SEQ ID NO: 947138 - DNA, 120 bp, Artificial Sequence
  ENSG00000258140_11 (sequence is synthesized)
atgatatttgggatttgcttcagaatatttcagtggaaggagagcgagtagtgtcaggatggctaaaccattagatgaattgttgaagctgaagggtcttgctctgttgcctaggctgga

SEQ ID NO: 947139 - DNA, 120 bp, Artificial Sequence
  ENSG00000258140_12 (sequence is synthesized)
aatcttatcacaccacttctcaccacatcatgatggaatcttacttacatttgtttccctcagcactgcctcctaaaatggcccccacagagcagcacattaaaaatatttgttgaatag

SEQ ID NO: 947140 - DNA, 120 bp, Artificial Sequence
  ENSG00000258144_0 (sequence is synthesized)
ggaccaccccgcacacgcgtcctcagcgccggaccctgagccggccgcgaacacggatccgacgtcaagaactgggcacttcccgctccgttttgtccgtgcccctcggtgctggatcac

SEQ ID NO: 947141 - DNA, 120 bp, Artificial Sequence
  ENSG00000258144_1 (sequence is synthesized)
cagggaagtgaaggaaagccagcagccacaggcctcacccagctcccacacagcctgcatcctgaaaggctggtctcactcctactgtgctcctgcaacagcaccaagtatatttccagg

SEQ ID NO: 947142 - DNA, 120 bp, Artificial Sequence
  ENSG00000258144_2 (sequence is synthesized)
caactggtgagcagggctgagaacttgccccagaccacaagtctcccagctgagaaagcacagctcctcagttgtcccacagagcctgcagtggcaatccacctccttcaaaagttctgt

SEQ ID NO: 947143 - DNA, 120 bp, Artificial Sequence
  ENSG00000258144_3 (sequence is synthesized)
gaattctctcagctttcctggacaggctagatgctgacagcttgatcttggacctcaagttttccgaattgtgataaatagatgtttataataaagccacccagtctgtggtatcttgtt

SEQ ID NO: 947144 - DNA, 120 bp, Artificial Sequence
  ENSG00000258144_4 (sequence is synthesized)
gtgatagctggacctgactaatacacagggcatgtggcaagtttaaggggaagatgtctttctgaaacatttgaatcaatcagaagttcttttggaacaactaaggaaagatgtcagctt

SEQ ID NO: 947145 - DNA, 120 bp, Artificial Sequence
  ENSG00000258144_5 (sequence is synthesized)
agaaaatagaaaacagatttttcttttctccgaagaaatagaaaactttcctctgtactccaagggatatacaggaagaatagaaatatgaatttgaactgtgactaagagtcagcatgt

SEQ ID NO: 947146 - DNA, 120 bp, Artificial Sequence
  ENSG00000258144_6 (sequence is synthesized)
actttcccttctctggaaaaagaaaagaaaaaagctggagaagtaaagctcagaagcacggttgggtatggctgagttaagtagactacatgaaaaataaacagtcaacaatcttacaga

SEQ ID NO: 947147 - DNA, 120 bp, Artificial Sequence
  ENSG00000258144_7 (sequence is synthesized)
gaaaatgaattttgctctttgatgtaagaaaaagcccactcacctttatttttaaaatgtcctgagttgaggtaaacaatatctatttttgctattaaaaaattctatttctgtctgata

SEQ ID NO: 947148 - DNA, 120 bp, Artificial Sequence
  ENSG00000258144_8 (sequence is synthesized)
tttttcccaattgatagaaatcagaagaacactcctagagaaattaacactaaaatgcaaaagcactgtaatagctcctctttgatattatgaattgactttaacctgatttgctctcta

SEQ ID NO: 947149 - DNA, 120 bp, Artificial Sequence
  ENSG00000258144_9 (sequence is synthesized)
cctgatttgctctctaaatttcttaggttatttctgaattttgtttatagtttattagcatgttaaatattttttgtggttttgatttgcatacatatacaatattttggttatattaaa

SEQ ID NO: 947150 - DNA, 120 bp, Artificial Sequence
  ENSG00000258144_10 (sequence is synthesized)
cacacgcgtcctcagcgccggaccctgagccggccgcgaacacggatccgacgtcaagaactgggcacttcccgctccgttttgtccgtgcccctcggtgctgggacaggctagatgctg

SEQ ID NO: 947151 - DNA, 120 bp, Artificial Sequence
  ENSG00000223979_0 (sequence is synthesized)
tatttaatcacatctgcaaggaccctctgaatgctgtcttgcctcaactcattttacagataagaaaatcaaggctcagagaggtgaagtcactgatccaaagtcacacagcaggtcaaa

SEQ ID NO: 947152 - DNA, 120 bp, Artificial Sequence
  ENSG00000223979_1 (sequence is synthesized)
aggagatcatgtttcctgcctggaggagaggccccggtggactggaataggagaaagtggagggggtgtatttcaggatagaatcctgcaccctgccagggaccacgcttatccttggct

SEQ ID NO: 947153 - DNA, 120 bp, Artificial Sequence
  ENSG00000223979_2 (sequence is synthesized)
agggatgcggggaagtggaggcagtgatggggaagcagagccaggagagacccttgggcttccttccttcaaggcctctggtctctagcagagagaagagagggagcagtgctctcttgc

SEQ ID NO: 947154 - DNA, 120 bp, Artificial Sequence
  ENSG00000223979_3 (sequence is synthesized)
ccttctgccttccaccatgggatgatacagcatgaagacccccaccagatgctggtgccatactcttggacttcccagtcttcagaagcatgagccaaataaatttctattgtttacaaa

SEQ ID NO: 947155 - DNA, 120 bp, Artificial Sequence
  ENSG00000223975_0 (sequence is synthesized)
ttttggaagagtccctattctgtacagccacgcactgaggcaagagcacaaggaaacaagcagaaggaattcagagaaacagctccaggctccagctcaaaggccgacaccaaaagcgaa

SEQ ID NO: 947156 - DNA, 120 bp, Artificial Sequence
  ENSG00000223975_1 (sequence is synthesized)
cacagacgcagcatccacccctcgcagggaacctcagttcctggcctgtggtcccatgaaggacatcaggctggcagattggagcacaccccttctttctaacccctcttgaaagcttcc

SEQ ID NO: 947157 - DNA, 120 bp, Artificial Sequence
  ENSG00000287473_0 (sequence is synthesized)
acagagggaaataagcagaggtccagaaacagggctacccaccaatcgcgtggtgacagaggagagagggtcctaaggacagatgaggatgttcttgattttgtactccaagtaaatgta

SEQ ID NO: 947158 - DNA, 120 bp, Artificial Sequence
  ENSG00000287473_1 (sequence is synthesized)
attgacagagttcaaacaccaaaggggcatttgagaactggagctgcccgatggcaagagggcacttgtatcagaagcttcactgcacaggcctacaataaatggtgccttgacatcaaa

SEQ ID NO: 947159 - DNA, 120 bp, Artificial Sequence
  ENSG00000225408_0 (sequence is synthesized)
tgaataagatgaagaagtccatcagaagtagcaaccaggagatcttccaacacagactgcaaactgtgctatactgtgtgctggatattcgaggatgaataaaatattctccgtcttcag

SEQ ID NO: 947160 - DNA, 120 bp, Artificial Sequence
  ENSG00000225408_1 (sequence is synthesized)
aggacttctcaggcaagaaatcaaaaatagttacatagcatgatctcatcacttatcaatatttatgaagatattcagcatttacttctttaatggggaaatagcctgttttgctcacct

SEQ ID NO: 947161 - DNA, 120 bp, Artificial Sequence
  ENSG00000225408_2 (sequence is synthesized)
gcaagaagagggaaagggttagaggaaagaggaacccataaatgagaccgcaaaggtactggcacaaagaaaaagacaaccagggaaaccagtagaaactgatatcaagaaagccaagga

SEQ ID NO: 947162 - DNA, 120 bp, Artificial Sequence
  ENSG00000225408_3 (sequence is synthesized)
gccaaggaagtaagatgaatttaagaaagagtgttcaaagtatcaaatactatataaggaaaaacaaaaaatgttatgtgtatattatatataccctattaaatactattaaattccttt

SEQ ID NO: 947163 - DNA, 120 bp, Artificial Sequence
  ENSG00000257677_0 (sequence is synthesized)
acatcatacattccaagtaatgcagcacactactctggaccacggtgaccttttaaatattctgcaaattgatttccaggccattcccactctcccttgtttatagccttggtaacccag

SEQ ID NO: 947164 - DNA, 120 bp, Artificial Sequence
  ENSG00000257677_1 (sequence is synthesized)
aagaaaatgagactggccagctgtgattcctgcatttctgttctcatcagtgctcagaattacatttctttctctcccaaaggcttcatgacaacgcttactgttgatctagagagcagc

SEQ ID NO: 947165 - DNA, 120 bp, Artificial Sequence
  ENSG00000257677_2 (sequence is synthesized)
agcaccaagaatcttcaataaggacaagtttaagagctataagcagttgtgtggactccttagagccttctgcctgagatgatgctgccagagggcccttgccagatattgccaccttga

SEQ ID NO: 947166 - DNA, 120 bp, Artificial Sequence
  ENSG00000257677_3 (sequence is synthesized)
tattagacttcccatcctccaaaactgtgttatcaaaaggtctcatcaaattattttatgtagaagagcacccaaatgttatttcttgctgttcctcttcttttcctcaagagaaagaag

SEQ ID NO: 947167 - DNA, 120 bp, Artificial Sequence
  ENSG00000257677_4 (sequence is synthesized)
gatcatgtcttcccttcacccatggggacttttcatttatcgctgccactccagcatgttcactattctctgtagcatgaaaatctgataaagctcatgaggggagagaaaacttaactt

SEQ ID NO: 947168 - DNA, 120 bp, Artificial Sequence
  ENSG00000257677_5 (sequence is synthesized)
caatattttcctgctgagcctgagagtgctttgtataccctagcaagatgaaaatcttagctgcagcatcaggaagaggacacctcactttatcctacattcctatctcagtcaggaaag

SEQ ID NO: 947169 - DNA, 120 bp, Artificial Sequence
  ENSG00000257677_6 (sequence is synthesized)
tagctctagagaaggaactaagaagtcaaggccttttgtgaagttgctctgttatctctgtggccccaaagaccaaaatgatggagaaaatgaaaccaggatgatttctgacatctgctt

SEQ ID NO: 947170 - DNA, 120 bp, Artificial Sequence
  ENSG00000257677_7 (sequence is synthesized)
ccactccaccttctttaaccacttcatccacatctctcttagcttctcacataagtctcacctggaatcatcttatttacaccaataaatttacctaccacctgcctgttgattgccaaa

SEQ ID NO: 947171 - DNA, 120 bp, Artificial Sequence
  ENSG00000257671_0 (sequence is synthesized)
ggagcctcgctggcctctgcggccccaagcccaggaagcaggcagagcaaaggctgagggaaagagagaggtttgctgaaagcttccagggggcttgcttaaatggcccctgctggtgct

SEQ ID NO: 947172 - DNA, 120 bp, Artificial Sequence
  ENSG00000257671_1 (sequence is synthesized)
gggagttgctggcacttgtgggtggggagagggagccaggttgcagtcaggcagcaactcgaagaatttctggtacgatgcctaaggaactcagacggaagaggcctgaatgtccaaggc

SEQ ID NO: 947173 - DNA, 120 bp, Artificial Sequence
  ENSG00000257671_2 (sequence is synthesized)
tctagtgatctgtgtgacttttctcattctaagaataatactcagaaaagaataagttcttgtatacactcagcattttacaaatgtaagttactggtctctgggggtttcctctgtgga

SEQ ID NO: 947174 - DNA, 120 bp, Artificial Sequence
  ENSG00000257671_3 (sequence is synthesized)
tgttttgtctcctccaccctctgcaacctccctgagggcagaaacatgtcctacgtattctctgttgccatggtgtcttataacaagccaagaatgaagaggttgagttcgaacccaaca

SEQ ID NO: 947175 - DNA, 120 bp, Artificial Sequence
  ENSG00000257671_4 (sequence is synthesized)
atatgcccatgaaggcccagctgcatagacagaggtggcatgcggttcatgaagaatgtgctatcagactcccccattccagcctcctctctgactgcaagtgagtctgcaaatatctct

SEQ ID NO: 947176 - DNA, 120 bp, Artificial Sequence
  ENSG00000257671_5 (sequence is synthesized)
ggggacaaacaaaacgatccccctccaccacagtcagttagccccacatgatgtagcacttagttctgtagtgagaagcagcctggcgtcctggaagatccttggagcaggaatcagcac

SEQ ID NO: 947177 - DNA, 120 bp, Artificial Sequence
  ENSG00000257671_6 (sequence is synthesized)
accctgactgcactctggccctattccctcaattaatgaaactcaaccacagctttcccctctggagactaaggaatcaatcgtctctgacctgactacctgaatgtgtgctgaggatca

SEQ ID NO: 947178 - DNA, 120 bp, Artificial Sequence
  ENSG00000257671_7 (sequence is synthesized)
taagaagccgcacacacaaagggactgttatcatttcaacctgcccactgagcttcacactccatggtctttccttctagaaggtcatctcattgaaggcaaagaggcaagcatcagctc

SEQ ID NO: 947179 - DNA, 120 bp, Artificial Sequence
  ENSG00000257671_8 (sequence is synthesized)
tgtgttccctgcatccccacacccagtgccctgcagaggaggggcatacaggaaatgcttgtaaatggatgaatgtcaagccccaaaccccacggagccctagaagcatcccctttccag

SEQ ID NO: 947180 - DNA, 120 bp, Artificial Sequence
  ENSG00000257671_9 (sequence is synthesized)
gttccttgtcctcaccggctctcctcgccctccagcagcttgcggtaggtggcgatctcgatgtccagggccagcttcacgctcatgagttcctggtactcacgcagctgccgtgccata

SEQ ID NO: 947181 - DNA, 120 bp, Artificial Sequence
  ENSG00000257671_10 (sequence is synthesized)
tcctgcttgccccgctgcagggcggcttccagctcctcctgcttggcacgagcatccttgagcgccagctccccacgctcctcagcctcggcaatggcggcctccaacttggcacgctgt

SEQ ID NO: 947182 - DNA, 120 bp, Artificial Sequence
  ENSG00000257671_11 (sequence is synthesized)
gggcagcagtgcagctgtaagctggggctcaccagtctgccttcctgcctgcccatcctgcagtgagcacccgggcaacttgcttaaggtggcttcattggcaccacctactcccccaag

SEQ ID NO: 947183 - DNA, 120 bp, Artificial Sequence
  ENSG00000257671_12 (sequence is synthesized)
taccagagaatcctaagggttaaacacataggtttggatatccaacgcctatgttccagttctggctctgccacttactagctgtgtgaccatggatgaatcaaccctgctaagccaaag

SEQ ID NO: 947184 - DNA, 120 bp, Artificial Sequence
  ENSG00000257671_13 (sequence is synthesized)
tcccctcttttctaagagaacatcaggagattttgaggatgaaatgagataatatacaagatgtccgtggcacaatgtctagcacacagcaagtgcttaataaatgctattgtgatcatt

SEQ ID NO: 947185 - DNA, 120 bp, Artificial Sequence
  ENSG00000186019_0 (sequence is synthesized)
attcccagaattgcttgtatcctccttctggagccagtgtgtacgactccacagagcatttggattacactcctccgaatgctgaaggaaaaacgctcaaaatctcattcttcaggggga

SEQ ID NO: 947186 - DNA, 120 bp, Artificial Sequence
  ENSG00000186019_1 (sequence is synthesized)
agcgttgccactccgaggtgcccactgggaacgaatcccaaagccacgagcgcctgcctagtggggaatgtgaactgttatcctgagagtcgtccttctctctccctggtccaggacaga

SEQ ID NO: 947187 - DNA, 120 bp, Artificial Sequence
  ENSG00000186019_2 (sequence is synthesized)
aaatactgaatagacaggaatttctgaagtctaaacgcctccaatgataacaggagtgttattggaaagggaacaagcgagaagacacagtcttcgaggagttaagttttgctaatctaa

SEQ ID NO: 947188 - DNA, 120 bp, Artificial Sequence
  ENSG00000186019_3 (sequence is synthesized)
tgatgagactgcattcatgaagactgagtgaagactttattgcaccatcacatcactaaggtttttctccaacatgaacattctgatgaagtcgaaggcttgaggcctgactaaagcaca

SEQ ID NO: 947189 - DNA, 120 bp, Artificial Sequence
  ENSG00000186019_4 (sequence is synthesized)
tatcacactccctacacttccatgttttctctcccatgtggaccctctgatgcatatcaagattcaagcgcctgttgtagcccttcccacagtcctcacatttgtatggcttttctacac

SEQ ID NO: 947190 - DNA, 120 bp, Artificial Sequence
  ENSG00000186019_5 (sequence is synthesized)
tgtgaactttttcttgcactttagagaatgaattctgtacaatgttcttcccatgctgctcacatttgagaggtgtttctctgctgtggcgtctctgatgggtcagacgagttgaggacc

SEQ ID NO: 947191 - DNA, 120 bp, Artificial Sequence
  ENSG00000186019_6 (sequence is synthesized)
agctgaagcccttcccacactcatcacatttgtatggcttttctccagtgtgcactctttgatgagaatgaagctgtgaattctgagtaaatcttttcccacactcttcacatttgaatg

SEQ ID NO: 947192 - DNA, 120 bp, Artificial Sequence
  ENSG00000186019_7 (sequence is synthesized)
gtttttctccactgtgcagtctctgatgtttcaaaagacacgaggcccagccaaaactcttcccacattccttacaattgtatggtctctctcctgtgtggaccttctggtgcatatcaa

SEQ ID NO: 947193 - DNA, 120 bp, Artificial Sequence
  ENSG00000186019_8 (sequence is synthesized)
gattaaacttactattgtagccctttccacacttctcacatttgtatggcttttctccagtgtgaactctctgatgggaatgaagatgtgaattttgagtaaatctcttcccacactctt

SEQ ID NO: 947194 - DNA, 120 bp, Artificial Sequence
  ENSG00000186019_9 (sequence is synthesized)
cacattggaatggtttttctccactgtggagtctctcatgtttcaaaagacatggggcccgactaaagctcttcccacattccttacaattatacagtttctctcctgtatggacgcgct

SEQ ID NO: 947195 - DNA, 120 bp, Artificial Sequence
  ENSG00000186019_10 (sequence is synthesized)
ggtgaaagtcaagatccaacctccttttgtagcccttcccacactccacacatttgtatggtttttctccactatgggatctctggtgggaatagcattgtgaatttgtgtaaaatcctt

SEQ ID NO: 947196 - DNA, 120 bp, Artificial Sequence
  ENSG00000186019_11 (sequence is synthesized)
tcccacattcttcacatttgaatggtttttctccactgtggactcgctgatgtttcaaaagacacgaggcccatctgaagctcttcccacactctttacaattatatggcttttctcccg

SEQ ID NO: 947197 - DNA, 120 bp, Artificial Sequence
  ENSG00000186019_12 (sequence is synthesized)
tgtggaccatatgatgcgtataaagatctcgcctacaaataaagccttttccacactcctcacatttgtatggtttctctcctgtgtggatcatgcgatgactattaagtgctgatctct

SEQ ID NO: 947198 - DNA, 120 bp, Artificial Sequence
  ENSG00000186019_13 (sequence is synthesized)
gacgaaagctcttatcacacgtatcacatcggaatggtttctctgccgtgtgaaccatggaatgcctattaagtcttgatctaccacagaagctcttaccacatatatcacatttgaatg

SEQ ID NO: 947199 - DNA, 120 bp, Artificial Sequence
  ENSG00000186019_14 (sequence is synthesized)
gcttctcccccgtatggattctctgatgttcttgaagctgggaatcgtgaatgaaggccttcccgcattcctcacaattataaggtttctctcctgtgtgtaatttatgatgaacattaa

SEQ ID NO: 947200 - DNA, 120 bp, Artificial Sequence
  ENSG00000186019_15 (sequence is synthesized)
gtgctgatctacgactgaagcctttcccacattccacacatttgaacggtttctctccagtgtggactctctgatgagtttgcagatgtgaactctgactgaattccttaccacacacgt

SEQ ID NO: 947201 - DNA, 120 bp, Artificial Sequence
  ENSG00000186019_16 (sequence is synthesized)
cacacttatagcatttctctcccatgtggactctctgatgaatacgaagggctgagatgtaacaaaagttctttccacactcatcacacgtatgagatttctctcctgagtgtaattgtt

SEQ ID NO: 947202 - DNA, 120 bp, Artificial Sequence
  ENSG00000186019_17 (sequence is synthesized)
gatgaaaatcaaagtgggagacatcactgaaggatggtttatatccattgccctgggaagatttctgtcttgtgtgaattacagatagtcctgcctcagtctggcaggggaaatcacctt

SEQ ID NO: 947203 - DNA, 120 bp, Artificial Sequence
  ENSG00000186019_18 (sequence is synthesized)
ctttggagaactgagagctatttatcatcaagtcttgagacctggttaaatcacttgcaattttttcccagatttgctggaaggaccactcttgatgtgttcctgcttctgaaacagtct

SEQ ID NO: 947204 - DNA, 120 bp, Artificial Sequence
  ENSG00000186019_19 (sequence is synthesized)
ccatctcagtttggatcttgtctcctatcagaatacagaattaaaagatgaggacaagtgaagcctttgttcagtgttatcaagatttcacttaggccatggcaggaaactctcatgagt

SEQ ID NO: 947205 - DNA, 120 bp, Artificial Sequence
  ENSG00000186019_20 (sequence is synthesized)
atagacaacattcagtttgtatttttcaagtgcaccataatctttggtttggatgaggccaatttcgaactaaaccaagtatcatatgtaaaatacttgatagaaataaaagacgaaaaa

SEQ ID NO: 947206 - DNA, 120 bp, Artificial Sequence
  ENSG00000186019_21 (sequence is synthesized)
caatagatgttgacatgggtgtggtgagaagaaacgcttatacactgctgctggtgtgaatgtaaattagtacaacctctatgaaatacagtatggagattctctaaagaactaaaagtg

SEQ ID NO: 947207 - DNA, 120 bp, Artificial Sequence
  ENSG00000186019_22 (sequence is synthesized)
taccatttgatccagcaatcccactactatctacccaaaggaaaagaagtccttacatcaaaaggacacctgcatgcctatatttattacagcacaattcacaatttcaaagatatggaa

SEQ ID NO: 947208 - DNA, 74 bp, Artificial Sequence
  ENSG00000186019_23 (sequence is synthesized)
caaccaatgagtggataaagaaaatatggtatatattcaccagggaatactattcagccataaaaattattcta

SEQ ID NO: 947209 - DNA, 120 bp, Artificial Sequence
  ENSG00000186019_24 (sequence is synthesized)
ccgtgttttcacttataagtgggagttaagctatgggtatgcaaaggcatacagagtgatataatggactatggagactcaaaatggggagggtggaaggtagggtaagggataaaaagc

SEQ ID NO: 947210 - DNA, 120 bp, Artificial Sequence
  ENSG00000186019_25 (sequence is synthesized)
tacaagttgggtacaatgtacactactcaggtgatgggtacactaaaatctcagacttcaccattagacaattcaaccatgtaaccaaaaaccagtatatactttaataaaaaaagacta

SEQ ID NO: 947211 - DNA, 120 bp, Artificial Sequence
  ENSG00000186019_26 (sequence is synthesized)
ctgaaataaaatttttaataaaaataaaagacaataataaaattaatatgatacaaacattatacctgctactcttcctagtgaatttcctaatcagtctaaaatcttgcatggtaaatt

SEQ ID NO: 947212 - DNA, 120 bp, Artificial Sequence
  ENSG00000186019_27 (sequence is synthesized)
atgaagctaataaattgtgtatataataaaatatgaatcaaaaccaattttaaacaaaagtaatataatcaagacttggtacatttgtgtttatattgtgtatccttacaaagtaaagat

SEQ ID NO: 947213 - DNA, 120 bp, Artificial Sequence
  ENSG00000186019_28 (sequence is synthesized)
attaaccttactcaaaatgaggtctagatgttttcctcaggatctgagaggtaatgtctaggagtttatgcctgaggagagtgtctttgtttgcttgagagtaaaactaggtcactggaa

SEQ ID NO: 947214 - DNA, 120 bp, Artificial Sequence
  ENSG00000186019_29 (sequence is synthesized)
agtgaaacaatatgatttagggttgtagctggccacgcctttgggggtcggtgccccctatgtcacaaagagcaacgtgatttaaggtgaggctttaggttacatggaatcagtggccca

SEQ ID NO: 947215 - DNA, 120 bp, Artificial Sequence
  ENSG00000186019_30 (sequence is synthesized)
atcagtggcccaggagactgactagccacatgggaatcaatcaacaaataatggctatgtaatggagcctcaaaaattacttgtaaaaccagggctcggctgggcgcggtggctcacgcc

SEQ ID NO: 947216 - DNA, 120 bp, Artificial Sequence
  ENSG00000186019_31 (sequence is synthesized)
ccgtctcaaaaaaaaaaaaaatacagggctcaggtgagcttccctgattcgctgtaccctctacgtcacaccttaattctgggaatttaacgcatcctactctatggggagaatacaata

SEQ ID NO: 947217 - DNA, 120 bp, Artificial Sequence
  ENSG00000186019_32 (sequence is synthesized)
caagatcctcatttggtacttcccagaactgtttcttatttttctcttggtgaaatgtaatgtgcatctctaccctgtaaatatccgtaacttttagtataaaagcattcagtgagttct

SEQ ID NO: 947218 - DNA, 120 bp, Artificial Sequence
  ENSG00000186019_33 (sequence is synthesized)
gcttatctttctaggtaattactgaatgtgaaggtagttttgggaaatccccacacttgcagttggtgtgaagtgagagcgatcttctgtaaactcttgctctaaactgtgcagccagtt

SEQ ID NO: 947219 - DNA, 120 bp, Artificial Sequence
  ENSG00000186019_34 (sequence is synthesized)
aaactcttcacaataatatcaaaggcctaggagtgtttatatctacatattcataatattcctacacaagaatttggcataacatgtatctttaattttatttttctgtagatgtgaaca

SEQ ID NO: 947220 - DNA, 120 bp, Artificial Sequence
  ENSG00000186019_35 (sequence is synthesized)
ataatttggttaactgagataggtaagaaacagacaaccagttttgatgggaatctgaaaggttggacctgacaggggtaaagaaagggtgatgctcctgatgagacaatgaaaggtggt

SEQ ID NO: 947221 - DNA, 120 bp, Artificial Sequence
  ENSG00000186019_36 (sequence is synthesized)
gagaacacttgggataaaaagaatgcctgaggggtcatgccctgggttggttccatgtggggatattagactctcattaaaataaaaaagaccagaggctaggcacagtggctcatgtct

SEQ ID NO: 947222 - DNA, 67 bp, Artificial Sequence
  ENSG00000186019_37 (sequence is synthesized)
cagaggctaggcagcttgagcccaggagttggtgaccagcctgattaacatggtgaaaccctgtctc

SEQ ID NO: 947223 - DNA, 90 bp, Artificial Sequence
  ENSG00000186019_38 (sequence is synthesized)
tggtggtgcacacctataatcccagctacgtgggaggccgaggtatgagaatcatgtgaactcatgccaatgctctccagcatgggtgac

SEQ ID NO: 947224 - DNA, 120 bp, Artificial Sequence
  ENSG00000186019_39 (sequence is synthesized)
tgagaccctgtctcaaaaaaataaaaaaagaagaaaaaagagggcagaaaatatatgatatagataaatactcctttatacttatttccaaatggaagaatatagacaaaaagtgagcta

SEQ ID NO: 947225 - DNA, 120 bp, Artificial Sequence
  ENSG00000186019_40 (sequence is synthesized)
gctataaaataaatttaaaaccttctaatgagcatttagaaaaaaagaactagaaaagaaatgatcacatcttcatgacaagcaagaaaggtatcatttcatgaaatgcctactgaagta

SEQ ID NO: 947226 - DNA, 120 bp, Artificial Sequence
  ENSG00000186019_41 (sequence is synthesized)
acccatagacatctacatgcatgaaaaatgtttgtcctggttatggtgaaagatgtgtttcttactatgactcacaatcataaaaatgttgacaactttggtcaggatattaccaagtcc

SEQ ID NO: 947227 - DNA, 120 bp, Artificial Sequence
  ENSG00000186019_42 (sequence is synthesized)
taaattaagtcagtcaaatggaaagttaacttccaaggttgaatcttggaaaaacagtaataggtaaatatgtacccaatggtacacgctggaatatggatatatttaacacactgttac

SEQ ID NO: 947228 - DNA, 120 bp, Artificial Sequence
  ENSG00000186019_43 (sequence is synthesized)
ttaagaggtttttggggagaagagagagtctctttcaggatgtcagtattttgagagggcagtttcctgattccttccaagttataaagttgaaaatagagcactaggtctctaaaaaat

SEQ ID NO: 947229 - DNA, 120 bp, Artificial Sequence
  ENSG00000186019_44 (sequence is synthesized)
aaaggaaaaattatgttgtaaaatctgtattcttttatgtttttaacaattaaatctgtatacaatgaaggtgcagaaatatacatatttttgaacaaagatgaccagaaatataggcaa

SEQ ID NO: 947230 - DNA, 120 bp, Artificial Sequence
  ENSG00000186019_45 (sequence is synthesized)
ctatttgcataagaagattagggtggggcgaccagccttccccacgcactatgtaaacgtcataactgatcgaaccaatctatgacccctatgtaaatcagacactgcctcctcaaactg

SEQ ID NO: 947231 - DNA, 120 bp, Artificial Sequence
  ENSG00000186019_46 (sequence is synthesized)
gtctgtaaaactcagcacattcactgccagccgacccttttccgctcggagaccccttcctctatggaggaacccgtttctctttctcttcttcctattaaacctccgctcctaaactga

SEQ ID NO: 947232 - DNA, 120 bp, Artificial Sequence
  ENSG00000283304_0 (sequence is synthesized)
gcacactctcaccttctgccatgtaagaagtgccttttccccttcagccatgattatgctccttgacttatgatggcgctacatctggataaacccatcatacgtcaaaaaagaagtcaa

SEQ ID NO: 947233 - DNA, 120 bp, Artificial Sequence
  ENSG00000283304_1 (sequence is synthesized)
aactgacataaagctctcaacttacaatatgaagttacgctttccactgaatgcagatcactttcatgccatcaaagagttgaaaaatcacaagtggaaccactcatctcgtcggtgtga

SEQ ID NO: 947234 - DNA, 120 bp, Artificial Sequence
  ENSG00000283304_2 (sequence is synthesized)
tctcatgaaaagggctgaaggcatgattgcaaacaccgtggcgtcgggcttctgcccacgatggggagaatctcatcagatcaaatctcaggtggataaaatgccaaggtgtggaatcag

SEQ ID NO: 947235 - DNA, 120 bp, Artificial Sequence
  ENSG00000283304_3 (sequence is synthesized)
tctttggatggaggacgctttctaccataaagagagaaatggtttccttctgcagcctcgaggaaagaagcgttctataagctttggtgtttattttcttctcatctaatgctagaggcc

SEQ ID NO: 947236 - DNA, 120 bp, Artificial Sequence
  ENSG00000283304_4 (sequence is synthesized)
ggaaggtgctgtaatctactgcaaactcagagtgctgcaaacatgcccttcagataagcagtgttcagcagacttggcactgcgactcaacctgtttgccgtaatccagcaactccacgc

SEQ ID NO: 947237 - DNA, 120 bp, Artificial Sequence
  ENSG00000283304_5 (sequence is synthesized)
tactccataaaaaaaaaaatccttgcaagaagctgaaggacaggaagtgcactgacatcctacaagtgccttttgattgacaatctgacattgaattcctggatggccctccccgttcag

SEQ ID NO: 947238 - DNA, 120 bp, Artificial Sequence
  ENSG00000283304_6 (sequence is synthesized)
caaaacacagcaatcttgagatggcagagatggtcaccaaagctggccatggtgtcaggactaagttgaacatcacttacaagccggcacaagacgaggcatggcattagaaagttctag

SEQ ID NO: 947239 - DNA, 120 bp, Artificial Sequence
  ENSG00000283304_7 (sequence is synthesized)
ctctagctccttttcaaggtgaaaacagtcccttggtttatcttaggaacgacatcatacgcttaatttttcccaagcttttcattttcaaatagacagaggcatcctattgagcagggt

SEQ ID NO: 947240 - DNA, 120 bp, Artificial Sequence
  ENSG00000283304_8 (sequence is synthesized)
tttctccctcagcgcctcagggtgggtctgtgttacactccaataggactggaaggctcactgcaccttttcccaccttttgtgtgtgaagtggcagccgtgaatttaatagagggagaa

SEQ ID NO: 947241 - DNA, 120 bp, Artificial Sequence
  ENSG00000283304_9 (sequence is synthesized)
tgctgtgattacttaatggtttcccagacagcgatggcctggagaattaaatttcacatctgctttcatggcgttaatctctcttctcacactccgcctgttatgatgtgcacacgagag

SEQ ID NO: 947242 - DNA, 120 bp, Artificial Sequence
  ENSG00000283304_10 (sequence is synthesized)
ataatgtttaaactgactaaagcaaagtaaaccagacaagtctgttattggctttataattacataattaactttttgtctctaatcgttatggaggtaatggtgctgttaaaatgggct

SEQ ID NO: 947243 - DNA, 120 bp, Artificial Sequence
  ENSG00000283304_11 (sequence is synthesized)
tctcttgagcagaaactaaatcaaaaatcaataatccatagaatgccattaaggcctgtaacagcccttgttggattcactcaaatttttgtactgcaaatgaatttcattaggacgcag

SEQ ID NO: 947244 - DNA, 120 bp, Artificial Sequence
  ENSG00000283304_12 (sequence is synthesized)
aatgttatcgcacaagctgactttcaactgatagcaaagagcagagcatcgtaatcagccacacgcaggaaaatggacaaatgttgccgtaaattacaccatgcttgtaatgcagttact

SEQ ID NO: 947245 - DNA, 120 bp, Artificial Sequence
  ENSG00000283304_13 (sequence is synthesized)
gtagagtgattgacctcctcgaaattaattctattttccatgaaccctcctttatttctaatttacattacgatcatatatgtctgaaaaatgatataataaaaaagattaatgtactaa

SEQ ID NO: 947246 - DNA, 120 bp, Artificial Sequence
  ENSG00000283303_0 (sequence is synthesized)
aacatcacttcctccttctgttctgacatcatcaatccactttgtagtttgctggaatgagttaacatttgtgatatcgtaaactactacagctgcagcagaatcacggatgtacctggg

SEQ ID NO: 947247 - DNA, 120 bp, Artificial Sequence
  ENSG00000283303_1 (sequence is synthesized)
gtctccgcccgcggacatggtggaactagaggagctgtcgccgcctcagcccagagacctcccggaccgatgctgctccagccggctgacgaaaaaggaaataccaatttttttagtatg

SEQ ID NO: 947248 - DNA, 120 bp, Artificial Sequence
  ENSG00000283303_2 (sequence is synthesized)
gcaagtgtttccaagcattgagaagtggagagtgtaggatatccactgcagaatgaggtctgcttgtcatcctcttagtctccactgctatccctccctcatctctctctgtttcattga

SEQ ID NO: 947249 - DNA, 120 bp, Artificial Sequence
  ENSG00000250371_0 (sequence is synthesized)
atgggtatgttacttggctgctggaaaggtcatgttactgaagacaaagcagatacctgttaccactactttaatggtttgatgattcagaggcattggagatatacacataaaaataac

SEQ ID NO: 947250 - DNA, 120 bp, Artificial Sequence
  ENSG00000250371_1 (sequence is synthesized)
agagtgcttaaaggagacacagctagtcagataagcatttgtaaatagtccagaacaccatgggagtgtaaacagaacatgaacacctacctcaagctcaagccaacacttgatctgaat

SEQ ID NO: 947251 - DNA, 120 bp, Artificial Sequence
  ENSG00000250371_2 (sequence is synthesized)
cttaaagtctcagtgggagttaactatgcaaacacagatgacagaggaagggcatcaaattatgatggaatagtgtggacacatgtagatgcaagaaacagcctttgtgtttcacaattc

SEQ ID NO: 947252 - DNA, 120 bp, Artificial Sequence
  ENSG00000250371_3 (sequence is synthesized)
taagaagttccgttaacattttattctgtgtgcaccaatttttgcaggacagcaatcatgtgggaaacagcataatttaatttcattagattttggaaaagaaagagctggagaagccta

SEQ ID NO: 947253 - DNA, 120 bp, Artificial Sequence
  ENSG00000250371_4 (sequence is synthesized)
cccgtagaagaatgttctggattttagaataattaacacaatgcaggggattcagatatgggaaggatgaagtaagaatactccatcctggattttccatggaaagcagctataaaacct

SEQ ID NO: 947254 - DNA, 120 bp, Artificial Sequence
  ENSG00000250371_5 (sequence is synthesized)
ggactgagtgaatggagaagatactttgagtactctaaaaaataactagtagcaggaggggtggcgaagaaggccaaaattcaatgtatcactgaatcagcagtgagtttttcattcttt

SEQ ID NO: 947255 - DNA, 120 bp, Artificial Sequence
  ENSG00000250371_6 (sequence is synthesized)
tttactttggtatccacgtggcctggtgcaacccaccccagaacatgaaagaactcaagagaagtactctcgttacagcttgagtagtaaggacagatttcctaatggccagagagaata

SEQ ID NO: 947256 - DNA, 120 bp, Artificial Sequence
  ENSG00000250371_7 (sequence is synthesized)
cagtaaatgcttatttgcaaaatatcttatatttcagcctgtagcttctcacaaacacctagaattctgagtagaagcttcctgttggatacagaagctgtgctttgaagagggaggaga

SEQ ID NO: 947257 - DNA, 120 bp, Artificial Sequence
  ENSG00000250371_8 (sequence is synthesized)
aaactcttatttctatacccccacccctaccttttctgtcctccacagcttaaccccagacctgtgcacagcaaaggggagtatggaagactccggtgaataaatcagcttttagaatag

SEQ ID NO: 947258 - DNA, 120 bp, Artificial Sequence
  ENSG00000250371_9 (sequence is synthesized)
taggctaaaaagaggggtcctaggaaatgagaagattttgagatttcagagaggaaggacttccaaaaattcacctaaaaattatttgtgaatttctggacacaccccaagctgtgcatg

SEQ ID NO: 947259 - DNA, 120 bp, Artificial Sequence
  ENSG00000250371_10 (sequence is synthesized)
catggatctactaacactaaaagcttaagattatccatatggtttaagcaagacttagtatctcataaggtaatactcaaaatatctacaacacaatccaagcattactcaatatataaa

SEQ ID NO: 947260 - DNA, 120 bp, Artificial Sequence
  ENSG00000250371_11 (sequence is synthesized)
aattatctggcagactcaaaatagctatttttaaaatgcttcagtaggttaaggtaaacgttgttgaaataaatgggcaggtagaaggtcttaacaaaaacaaatagaagatataaagaa

SEQ ID NO: 947261 - DNA, 120 bp, Artificial Sequence
  ENSG00000250371_12 (sequence is synthesized)
gaaatgactggaaattaaaaacagaaaaacacattaaccaaagtaaaagtatcacagaaggggcttactagcagaatgaatatgctaggagaaaaagtcagtgaacttgaaatatgtcat

SEQ ID NO: 947262 - DNA, 120 bp, Artificial Sequence
  ENSG00000250371_13 (sequence is synthesized)
tagaatttatttaatttgaaaaacacagagagaaaagatggagaaaaaggaacagagtctcggagactaatgggaagatataaaaatctaacatttatgtcaaagaagtcccagaaggag

SEQ ID NO: 947263 - DNA, 120 bp, Artificial Sequence
  ENSG00000250371_14 (sequence is synthesized)
atgaaaaatagtgtgcagagaaaatatttgaagaaataatagtaagaaagcctctcaaatttgacaaaacccataaacttacagatttaagaggttgaacaaactccaaacagaaaacaa

SEQ ID NO: 947264 - DNA, 120 bp, Artificial Sequence
  ENSG00000250371_15 (sequence is synthesized)
acgaacaaacaaacaaacaaattcacacttggagacattataatcaagctgctggaaagtaaagaaaaaatattgaagacgacagagaaaatgatgcattacttaggagagcaacaattt

SEQ ID NO: 947265 - DNA, 120 bp, Artificial Sequence
  ENSG00000250371_16 (sequence is synthesized)
caatgactgtagatttctcatcagaaaccatggtagccagaaagaagtaaaaaaagcatttttaaagggcctaaagaaaaacacagtcaaactccatcgagtgaaaaattcctgcagaaa

SEQ ID NO: 947266 - DNA, 120 bp, Artificial Sequence
  ENSG00000250371_17 (sequence is synthesized)
tgacagtgaaataaagctgtctcagataaagaagaactaagagaatttgttgccagcagacttcctctaaaataactgttaaagaattttgttttcagaacaaagcttttcttttaaaaa

SEQ ID NO: 947267 - DNA, 120 bp, Artificial Sequence
  ENSG00000250371_18 (sequence is synthesized)
gaaaactatcgttaacatttagctatattagtatcagacaaagtagacttcagagcaaagaacaatagggataaagtgagacataacataatgataaggtcaatttctcaagaagccata

SEQ ID NO: 947268 - DNA, 120 bp, Artificial Sequence
  ENSG00000250371_19 (sequence is synthesized)
aaagtcctcaatgtgtaaaataagtactgacaatagaatttcaaaacatatgaaacaaaatttgacagaactgaaagaagtatacaaatccaccattatatttagatgtattacctctgc

SEQ ID NO: 947269 - DNA, 120 bp, Artificial Sequence
  ENSG00000250371_20 (sequence is synthesized)
tctcagtaattcaacctccgttctcagtaattgatagattcagtggatactgagtctgcaaggatatagaaaaactgaacaacatcatcaaagctggatgttttcacactgacgttttac

SEQ ID NO: 947270 - DNA, 120 bp, Artificial Sequence
  ENSG00000250371_21 (sequence is synthesized)
atatcaaccaacaaccgaagaatgtacatccttgtcttcaagtggacagagatcattcaccaagatagaatgtattccaggtcacaaaacaaatttaaaaattaaaatcacttgaaatca

SEQ ID NO: 947271 - DNA, 120 bp, Artificial Sequence
  ENSG00000267498_0 (sequence is synthesized)
gggctacaagccgtcgctgggggcggggcttgcggcccacctgtaggtcccggtgccacctcgtcagtgtcccgagagatccccagaagaacgagagggctgaacaggggaccccactga

SEQ ID NO: 947272 - DNA, 120 bp, Artificial Sequence
  ENSG00000267498_1 (sequence is synthesized)
cgtccggtctctatgaagtcagagctattactatcagcattttacccatgaagaaaccgaggtttagagagattcttttccaggaactggatagccagcaagatgtgaagcaggatgaag

SEQ ID NO: 947273 - DNA, 120 bp, Artificial Sequence
  ENSG00000267498_2 (sequence is synthesized)
aaactaagactcagagaagacaaatgacatgcccaaagacacattgataagaacgcatctggtagtggtgttcgagtccagcgttgcagcagagagatgggtaactgtatggccgaacag

SEQ ID NO: 947274 - DNA, 120 bp, Artificial Sequence
  ENSG00000267498_3 (sequence is synthesized)
ctgtcttctcgtggaagaaggaggccaatgtccaggagtggcaggcatactggaacttggacttctgtaggccaacctgggttccacttggtagatgggggtcttgctgtgttgcccagg

SEQ ID NO: 947275 - DNA, 120 bp, Artificial Sequence
  ENSG00000267498_4 (sequence is synthesized)
agcctccagagtagctgggactacaggtacacaccactgcaacccctcagtggttgttatttaactgaagggggttttagctttcatgtatcagctcactctggagccagacagcctggc

SEQ ID NO: 947276 - DNA, 120 bp, Artificial Sequence
  ENSG00000267498_5 (sequence is synthesized)
ctttcatgtatcagctcactctggagccagacagcctggccttcatggcagctctgccccttactacctgtgtgacatcgggcaacgttactgagtgtcagatttcttatttgtaaaaca

SEQ ID NO: 947277 - DNA, 120 bp, Artificial Sequence
  ENSG00000267498_6 (sequence is synthesized)
aatagccacaggcctgggaacataaatgcttggtaagcttctcagttccctggaagtctgacacgcaatgtgtatgtatgaacaaggcaggaggaagcatgacaccaagccttcctttta

SEQ ID NO: 947278 - DNA, 120 bp, Artificial Sequence
  ENSG00000267498_7 (sequence is synthesized)
acaaacactgtttaaatcagaggtcggaagtcatggactggagattcattctctccccactcatttctgcccagagacacctggtgatctggcatacacagtgctatgaacctcagaatt

SEQ ID NO: 947279 - DNA, 120 bp, Artificial Sequence
  ENSG00000267498_8 (sequence is synthesized)
atttgctagcatttacaaattgtgagtactcccacatacaaactgtggtagatggaataatgcctccccacaaaaatgtccacagcctaatccctggaacctgggaatatgttactttac

SEQ ID NO: 947280 - DNA, 120 bp, Artificial Sequence
  ENSG00000267498_9 (sequence is synthesized)
gaacctgggaatatgttactttacacagcaaaggaatgttgcagctgtgattggagattgagatagggagagtgtattagtctgttgtcatgcggctatgaagaaatacctgagactggg

SEQ ID NO: 947281 - DNA, 90 bp, Artificial Sequence
  ENSG00000267498_10 (sequence is synthesized)
taatttacaaagaaaagaggtttaattcacttacagctcagcacggctggttgggggggcgccctcaggaaatttacaatcatggtagga

SEQ ID NO: 947282 - DNA, 86 bp, Artificial Sequence
  ENSG00000267498_11 (sequence is synthesized)
gggtggcaggagagaaaataagagcagagcgaagggggaaccccttataaaactgtcagatctcatgagaactcactgatccatca

SEQ ID NO: 947283 - DNA, 120 bp, Artificial Sequence
  ENSG00000262482_0 (sequence is synthesized)
ctgacaccttgagtgcagcctgtgagaccctgagcagaggttcagcagtcccctccccggactcctgccacacagaagccatgaggcatccccatcacacactaggcttggtgactgcac

SEQ ID NO: 947284 - DNA, 120 bp, Artificial Sequence
  ENSG00000262482_1 (sequence is synthesized)
ttgagggactcacaggacttagcctaccatcatactagtggctgggatttactacggtgaaaagatgcgacgcagaattagtaacaggaagatgcatttggggtgagggccggaggaaac

SEQ ID NO: 947285 - DNA, 120 bp, Artificial Sequence
  ENSG00000262482_2 (sequence is synthesized)
ttaacgacgccctcaaggctgtgaggagaaagacaaccgggtgaagcaacgctgggaattcaacgcatcaattaccttcccaggtaacagcagctacttgagctcctaagagttgacctt

SEQ ID NO: 947286 - DNA, 120 bp, Artificial Sequence
  ENSG00000262482_3 (sequence is synthesized)
cagctgctgtcatggaaaatagtgggggtcaactagacatcaaagatgaaaggccaggcctccagcacaactttctctgtaagctcgatagtggctttctcaaagaaatccttttctcaa

SEQ ID NO: 947287 - DNA, 120 bp, Artificial Sequence
  ENSG00000235927_0 (sequence is synthesized)
tttcacaatttacaaacagctggaatggtttggcgttttcaaaagcatataggcaaagggagttctcaagagagaccgatcagaaaggatttcttaactggcactgctggcagagacgga

SEQ ID NO: 947288 - DNA, 120 bp, Artificial Sequence
  ENSG00000235927_1 (sequence is synthesized)
gaccgcggctggggcaagtggtgggggacggcactgaacttccctaaggaccccaagggttcagccgagggatcggcacccactccgctcacagagggctccctccctacagtagggaac

SEQ ID NO: 947289 - DNA, 120 bp, Artificial Sequence
  ENSG00000235927_2 (sequence is synthesized)
gcacccgaaactcagccgacaaggcgcaggggagcagggcaaagacattgcaaccagaagcccaaggccggccgacactttcagaccctggggcagcccctggtaggcaccccgccgagc

SEQ ID NO: 947290 - DNA, 120 bp, Artificial Sequence
  ENSG00000235927_3 (sequence is synthesized)
ccgcaggatgcggctccaaggcagggttcgcccgggccggggccagcgcggaccacagctgtatggcgcccggcgccctccggagctgcagcggagcacggccagaagccgcagaccccg

SEQ ID NO: 947291 - DNA, 120 bp, Artificial Sequence
  ENSG00000235927_4 (sequence is synthesized)
agcgcctctctgcagccgccgttcccgcccccgcccccaccaggggacccgacacctccgtctccactccccccagcccacgttcccccaactcttctcaccctgcaggagccggtgacc

SEQ ID NO: 947292 - DNA, 120 bp, Artificial Sequence
  ENSG00000235927_5 (sequence is synthesized)
ggcgaaggtacttctttccgcgtggagggactgtgcgcgtcccgcctggctgtgggtaggggtctgggagctctggccgctaacacttctgctccagccgctgggagtcctctggctgcc

SEQ ID NO: 947293 - DNA, 120 bp, Artificial Sequence
  ENSG00000235927_6 (sequence is synthesized)
gctgccgccgccgccgccgccgtctccagcagcaagtttccataaaagtcctggtgtgcagcctgttcccgcattccaggcgggcccagcgccggctgcagctgttccaaaacacaaggc

SEQ ID NO: 947294 - DNA, 120 bp, Artificial Sequence
  ENSG00000235927_7 (sequence is synthesized)
cagttcccccaaccccccacctccgccgttatcacccggagtgggggtggagagttgaggagaaaagcaggggagggggaccgtggctgccaactttccgccagaatttgtctgtctccc

SEQ ID NO: 947295 - DNA, 120 bp, Artificial Sequence
  ENSG00000235927_8 (sequence is synthesized)
ggccctaggtgcgcgagctgaccccctaactttgggcctgcctccacctccagccaggcctggggaaggaaggctgcctccgccatgggaaaggaatgaggctgaaatgggcttcattac

SEQ ID NO: 947296 - DNA, 120 bp, Artificial Sequence
  ENSG00000235927_9 (sequence is synthesized)
ggctccccctacccgcaaccagtttgctctggggcccacttctctcagctactctacccgtcctagtttccagtcaagaagccaagccactacatatcttctactaccctaagcattgac

SEQ ID NO: 947297 - DNA, 120 bp, Artificial Sequence
  ENSG00000235927_10 (sequence is synthesized)
ctttggccaagttttcctttattacaaagagcgtggggcagcaatccgggaacacttcatctgtctattgctcccctgttcttagctccagtctttaactctaaaaggagagttaaaaaa

SEQ ID NO: 947298 - DNA, 62 bp, Artificial Sequence
  ENSG00000235927_11 (sequence is synthesized)
ttgaaggcagaggaggaggaggagaagaaaagaaggaatatatttatataagtacaaatatc

SEQ ID NO: 947299 - DNA, 120 bp, Artificial Sequence
  ENSG00000235927_12 (sequence is synthesized)
agaagaaaagaaggaatatatttatataagtacaaatatctttatattccacctttttcttaattgaaggcaaaccatatctggtctttctaaagcttcataaaggcatctttgactatt

SEQ ID NO: 947300 - DNA, 120 bp, Artificial Sequence
  ENSG00000235927_13 (sequence is synthesized)
agacacccacagacctttttcaacttggaccgccagcctgtcaaacccatcagacaataccatattaaaacccgaaatgcacactcggagtatttttggtggacgagatctttaattctt

SEQ ID NO: 947301 - DNA, 120 bp, Artificial Sequence
  ENSG00000235927_14 (sequence is synthesized)
acactcggagtatttttggtggacgagatctttaattcttcactgcacttgaaaaaaaaatcgaaatgacatccagataaagaataaagatggattctcgctctgttgcccaggctggag

SEQ ID NO: 947302 - DNA, 90 bp, Artificial Sequence
  ENSG00000235927_15 (sequence is synthesized)
cgagtagctgggactacaggcacgcaatgccacgcccggctcattttttgtattttagtggagggcgaacttctgagctcaggcaatcca

SEQ ID NO: 947303 - DNA, 120 bp, Artificial Sequence
  ENSG00000235927_16 (sequence is synthesized)
agcctcccaaagtgctgggattacacgccgtgagccaccgcacctggcccctgggaccattctcacacagagttattattaaataagaattagcaaagttcagaaagtcatatatttcaa

SEQ ID NO: 947304 - DNA, 120 bp, Artificial Sequence
  ENSG00000235927_17 (sequence is synthesized)
aaataagaattagcaaagttcagaaagtcatatatttcaagtgctttctaattcaaagtgcttctctatattcaagtactatggtatcatttcaaacatagcaaattataaaagttctgt

SEQ ID NO: 947305 - DNA, 120 bp, Artificial Sequence
  ENSG00000235927_18 (sequence is synthesized)
aatttcctaaatataaatgtactttgtgaaaggcttctgtgacacacataaaagacatatttgatgtaccagttgctttgctgtggcttttaagtaaagaataaaaagtgtcatagaagg

SEQ ID NO: 947306 - DNA, 120 bp, Artificial Sequence
  ENSG00000250379_0 (sequence is synthesized)
acacaccgggttctgccaccgaagcggtggagcgactggcagcgcccgcttcggcctgccccactggccggcatcccagggttaacaaacaattgtgtttattgacaagttcatacatca

SEQ ID NO: 947307 - DNA, 120 bp, Artificial Sequence
  ENSG00000250379_1 (sequence is synthesized)
gtacaaacgggcacgttaaaaacagcgcccccgccccatgcagccgaggatgaggcaggaagcgccgcgacctgcacaaagtgttccacataagccagggtggtgaagctgaggcaggat

SEQ ID NO: 947308 - DNA, 120 bp, Artificial Sequence
  ENSG00000250379_2 (sequence is synthesized)
ggctgctgcctgggctggacagcactgccccagccacagcttccagctcctgtcgcactgaagagaaggtgtctctgaggagctgggcaatccgactttgctctgctgagggcatcttgc

SEQ ID NO: 947309 - DNA, 120 bp, Artificial Sequence
  ENSG00000250379_3 (sequence is synthesized)
agccagccacctgaaatagcacccccagaagtgaggtggaggagcctgtcaacagacatataaaagggaggggccccacctgggtccagcctgcctcagaagggactagctgggaactct

SEQ ID NO: 947310 - DNA, 120 bp, Artificial Sequence
  ENSG00000250379_4 (sequence is synthesized)
tataaaagttataaataaggggctttcaaaacaaggcgggggcaaatctggagtggggcggcggttgccggtggcctcagacatgcagaaggggacgggggatgttccaacacaggcttc

SEQ ID NO: 947311 - DNA, 120 bp, Artificial Sequence
  ENSG00000250379_5 (sequence is synthesized)
tggcctctgggctccagcagccggctggggtccagggtggaggacagggaagaacaaggggctgaggaaaggaggccagagcttcatgtttgcccaggtgagggcttactgtcctgcagc

SEQ ID NO: 947312 - DNA, 120 bp, Artificial Sequence
  ENSG00000250379_6 (sequence is synthesized)
aacatcccacagctggctcaagttctggccaggagagtaaggggtcacagggaaatacaatgctgggcccctcttggagggagaatgggagtggaatgtgcgggctcaggtccaaatacc

SEQ ID NO: 947313 - DNA, 120 bp, Artificial Sequence
  ENSG00000267491_0 (sequence is synthesized)
gtcagggacagctgtgagccagccagggggcaagcgtagacggggttttaccatgttggctaggcgggtcttgaactcctgacctcaagcgattcccctgcctcgacctcccaaagtgct

SEQ ID NO: 947314 - DNA, 120 bp, Artificial Sequence
  ENSG00000267491_1 (sequence is synthesized)
aggattataggcacgagccaccgcccccagcccaagatatgttttagtaagccgccagttggatcatctgtaagcaactcactagaagcttccagcatcctccacaaatttgacaactga

SEQ ID NO: 947315 - DNA, 120 bp, Artificial Sequence
  ENSG00000267491_2 (sequence is synthesized)
gaaatgtggctgggaaatcatgatttgggtccgaagaagtgaaagcaacaatcctcaggttgttgtttcttgagagaagaaggtaaacagcaggaattcggctgaggtgtccaaatctcg

SEQ ID NO: 947316 - DNA, 120 bp, Artificial Sequence
  ENSG00000267491_3 (sequence is synthesized)
attctccctgcaggaatgttctcgatcacagtccaccaccacccccctacccccgcccacttttggagtccatcttcgcagcccttgatgattcattttatgtcagcttgacgggctaag

SEQ ID NO: 947317 - DNA, 120 bp, Artificial Sequence
  ENSG00000267491_4 (sequence is synthesized)
ggatgctcagatagctgggaaaacgtgatttctgggtggctctgggaagagactggcatctgaaccgggggactgagtaagaagatccctcctcgccaggtggggcaccatcactcaatc

SEQ ID NO: 947318 - DNA, 120 bp, Artificial Sequence
  ENSG00000267491_5 (sequence is synthesized)
tggggcaccatcactcaatctgttgaaagcccggacagaacaaagagacagaggcagaggcaggcaaaccctccctctgcaagagctgggacatccaggctgggcgcggtggctcacgcc

SEQ ID NO: 947319 - DNA, 120 bp, Artificial Sequence
  ENSG00000267493_0 (sequence is synthesized)
aaaatgcctcctgagactggggggggggctggctgtcagggaggccgccccgtcctggggggcacctcagggcaggtactgacttccatagccaggacctaggccgggaatcgggaaggg

SEQ ID NO: 947320 - DNA, 120 bp, Artificial Sequence
  ENSG00000267493_1 (sequence is synthesized)
atggccccggaagtgataaggcaggatttccaggcaggggaagtggcatttaggagaactggctatttaagggggcggtcagtgctgacacagacaaagcattcactggctgggaatggc

SEQ ID NO: 947321 - DNA, 120 bp, Artificial Sequence
  ENSG00000267493_2 (sequence is synthesized)
cgccacccagtggctctgagaactagacttggaagtctggcactgggagctgtgccaacttggaccaaactttgggcgcaaagcacgacgtggcagacgaggaaccacactagaacgggc

SEQ ID NO: 947322 - DNA, 120 bp, Artificial Sequence
  ENSG00000267493_3 (sequence is synthesized)
cacgcctacccaagatttacgaggccgtcctttccctcatgcaatcgcaatgggaaaaggaggaaactaaggctcggcctcccctactgagcctggttggcggaggggagtcttaaagcc

SEQ ID NO: 947323 - DNA, 120 bp, Artificial Sequence
  ENSG00000267493_4 (sequence is synthesized)
gccgccatctggagaaccagctttacaaggaccctcactcactactcttcggcggccccaaagcctctggggggccctctatggccaccacttgctcctcgcccaggagtcatctcatgc

SEQ ID NO: 947324 - DNA, 120 bp, Artificial Sequence
  ENSG00000267493_5 (sequence is synthesized)
cggacccctgcctctctgccccagaaagtcttcggagggatgaccctctgctgacaagctgggggaagttggcgtacagagacccccgctttgctgctcatcccagggaaatcccggccc

SEQ ID NO: 947325 - DNA, 120 bp, Artificial Sequence
  ENSG00000267493_6 (sequence is synthesized)
cactcctgacctcagactcacttccaccctcaagtggatcgaggtgggggtagccaggggcgctgtctccagtgacaaggtctctgggacccctcatgggctcaagaccccctcccccag

SEQ ID NO: 947326 - DNA, 120 bp, Artificial Sequence
  ENSG00000267493_7 (sequence is synthesized)
gcagcagctgtgtgattcatcaccaccccctctgcacctcgggcccccccactacagccgccccactccccgtcagcggcagccggctgctgcgtcagccactcacgcagggtggttatt

SEQ ID NO: 947327 - DNA, 120 bp, Artificial Sequence
  ENSG00000267493_8 (sequence is synthesized)
aaaggagagagacatcagcaccgagctcccctgcgcccgccgtccatgcgggaggggccacccacccactggagccccagacgcgggcgccacatgcccagcctgggagcaattcaggcc

SEQ ID NO: 947328 - DNA, 120 bp, Artificial Sequence
  ENSG00000267493_9 (sequence is synthesized)
cattctttctgatctgcgcccccagcccccagccccagcagtcagcgcggtggacgttctctgacccagagcagcccttgtagggggggagttggagggggtgcctggtagtcacagcgg

SEQ ID NO: 947329 - DNA, 120 bp, Artificial Sequence
  ENSG00000267493_10 (sequence is synthesized)
cccctgcataattgcgtaattcttgccgctccccccagcccatcgttccctggttctgtgagcctctgccttttcctggttttgcgaagcgccgtgttcattcattcattcattcattca

SEQ ID NO: 947330 - DNA, 120 bp, Artificial Sequence
  ENSG00000256232_0 (sequence is synthesized)
caaagggcttctattgtttggtgtgatttaaccttaagatggaaacatctgagccttgctagagaggcttccccggaacaacggctgggggtggggagctgtgacttatcagcttcccta

SEQ ID NO: 947331 - DNA, 120 bp, Artificial Sequence
  ENSG00000256232_1 (sequence is synthesized)
tgtttattttcatttcctgatggagagtaaatcttataaacaaatgaaaaacctgtggacttatctttaaagactacaaggaaaaggggaactgggcaaactattgcaactcaaagtcgt

SEQ ID NO: 947332 - DNA, 120 bp, Artificial Sequence
  ENSG00000256232_2 (sequence is synthesized)
ggaaaggcaggagggggagtggggaatttagaaagatatttccaagagatggcagataggtccctgggggcctgtggccagcctggagagggagagaccaagccagaggctgtggaaagc

SEQ ID NO: 947333 - DNA, 120 bp, Artificial Sequence
  ENSG00000256232_3 (sequence is synthesized)
tgttggtggcagagcttacatggccagggatcccggaggacctggaaggggttttaatggacttttgagaatcaaagtgaactgccagggacaaacaagagtggcgaggaaatggaagca

SEQ ID NO: 947334 - DNA, 120 bp, Artificial Sequence
  ENSG00000256232_4 (sequence is synthesized)
gtcataccactcaggctggaaaatcgctctaggaatggcaagaagggctctttctcacttggatggtccccagaaagtcagctgccatgtcacgaagtgccctgtgagaaggacctgtaa

SEQ ID NO: 947335 - DNA, 120 bp, Artificial Sequence
  ENSG00000256232_5 (sequence is synthesized)
ggagggacggagggaggcctctaaatgacagccttcgaggaactgaatcctgctggtgaccatgtgagggagcttggactccggtccccctgtgttgagccttcagatgagttggcagcc

SEQ ID NO: 947336 - DNA, 120 bp, Artificial Sequence
  ENSG00000256232_6 (sequence is synthesized)
ccagctggtggcatgactgtaacgtcctgaaacaccttcagccagaaagcattcagctaaaccacacctgtatttctgacccaaagaaattgtgagataataaacatttcttctcttgaa

SEQ ID NO: 947337 - DNA, 120 bp, Artificial Sequence
  ENSG00000256234_0 (sequence is synthesized)
catcttcagcacaaacacagatgcctgcaggagcttgtgagaagtcatcagcctgcaacccagaagaggaccttcaccaggaaccgtatcagctgacaccgtgatcttggacttctcagc

SEQ ID NO: 947338 - DNA, 120 bp, Artificial Sequence
  ENSG00000256234_1 (sequence is synthesized)
ctccagaactgtaaaagcaagataaaggaacacaaaatgtactctttccctaattggataaagtgagaaaggatattagaaaaccacccaatggaactgataaaaatgagttggaacttg

SEQ ID NO: 947339 - DNA, 120 bp, Artificial Sequence
  ENSG00000256234_2 (sequence is synthesized)
aagatctgtaagacgtgtgccagcacaaagtgactacaattcaaaagttccaaaaaccttgcttgaaacaattgcaaatagctcatcattttaaaccagtgaacccaaggctgagtgttt

SEQ ID NO: 947340 - DNA, 120 bp, Artificial Sequence
  ENSG00000256234_3 (sequence is synthesized)
catcaatttacagaaaaccaagaagagaaatctgacagctatcccagtgtatgacttaccatggagatcttcaaatagaatcactttggtttgggtctcattttcatattataacacaaa

SEQ ID NO: 947341 - DNA, 120 bp, Artificial Sequence
  ENSG00000256234_4 (sequence is synthesized)
tttgtgtatgtgggttaagattcatatttgataggaactgctgggaattcttgcagttatatcctcaaaagacaaaataagcataaccaacagaattgtgaagcaataaagttgattatg

SEQ ID NO: 947342 - DNA, 120 bp, Artificial Sequence
  ENSG00000256237_0 (sequence is synthesized)
agagaaagtggctgcctgcaaaccaggaggagagccctcaccaggaaccaatctagctgacactttgaacttggacttcaaacctccagtattgtaagaaataaatatgttttcaaagtc

SEQ ID NO: 947343 - DNA, 120 bp, Artificial Sequence
  ENSG00000276854_0 (sequence is synthesized)
attatctgatgaggagagtgagctttgaagaagttaaataaattgcccaggaccacacaggcagaatcaggacgttaaccagcacagactgaatctcgagtccacactgtgctgcatggc

SEQ ID NO: 947344 - DNA, 120 bp, Artificial Sequence
  ENSG00000276854_1 (sequence is synthesized)
caccctctggaggcctgtgatgtcccctctgactgctgccctacagccagcagagacgatcactgaacccaggcacttgcacagcccaatgctgaagaaggcaggtgtggatgcatgaat

SEQ ID NO: 947345 - DNA, 120 bp, Artificial Sequence
  ENSG00000276854_2 (sequence is synthesized)
cctcaactggtgaactgtaatgggggaggagaagacaaaagaaggccaactggaagaaatgaaaatggtgtgtctccttaaggaggttggatcccagagaaggaagataatgggagagag

SEQ ID NO: 947346 - DNA, 120 bp, Artificial Sequence
  ENSG00000276854_3 (sequence is synthesized)
agaggtgtggcttttgttgggcttcctcctaactatccattttggtgatggctgagtgtgtcctgaagagaaaggattacatgtaactcaaacctgatccacaaaacttctgtagtccaa

SEQ ID NO: 947347 - DNA, 120 bp, Artificial Sequence
  ENSG00000276855_0 (sequence is synthesized)
tagaatgatgaattcaaagtagatgaggaaaatcaggcacagagaagtaaaggtaggtacagacccaaattcacacaagataatgacatcaccagcgtttaagttgatcatcaaaggctg

SEQ ID NO: 947348 - DNA, 120 bp, Artificial Sequence
  ENSG00000276855_1 (sequence is synthesized)
ggctggatttgtcttgctgtatgtgtcaggaaatttatacctattacattttccattttctcaaaataagtcacatgattgtaatgtttagctgcaacttttctcctaataaatagtgtc

SEQ ID NO: 947349 - DNA, 120 bp, Artificial Sequence
  ENSG00000276855_2 (sequence is synthesized)
ttgaaggccatgatataaacaaatttgcatgttgaagcctgtataaaacatggtacagtgagtgaatgcccccatccccaagaacactttatacatattaaatggatatatgattactgt

SEQ ID NO: 947350 - DNA, 120 bp, Artificial Sequence
  ENSG00000276855_3 (sequence is synthesized)
gcaaaaattcattctggaaatgaacatatatttgagcactaatatgtaatgtacatcttctgccctaaggagaaaataaatcataaaacttgttttacattcaaaattactttcccgagc

SEQ ID NO: 947351 - DNA, 120 bp, Artificial Sequence
  ENSG00000276855_4 (sequence is synthesized)
atgtcttagagtaatctacgtgttgatgtatgtaaattgtattttaggtaggcaaagaaacaagtctggttatttatgtaaaaactagtctaataaagtgagtggctttatcactttgaa

SEQ ID NO: 947352 - DNA, 120 bp, Artificial Sequence
  ENSG00000276853_0 (sequence is synthesized)
tctttcttaaagaacaccattatcgaaatgatgtcatatggctggttttaaaagttttctgcatgatgtattgtgaaattcaaaacaatttttaaaagaatattataagcttgttagtaa

SEQ ID NO: 947353 - DNA, 120 bp, Artificial Sequence
  ENSG00000276853_1 (sequence is synthesized)
aactcatttgtatatgtgacaattctcttttagccctgaaagactatttgcgcagatgccagttacttaacaaatttgaagtattaggataaggcacattataaatgtagtgtttttcca

SEQ ID NO: 947354 - DNA, 120 bp, Artificial Sequence
  ENSG00000276853_2 (sequence is synthesized)
ataatattaactgtatgcataaattcggattaaatattttgtggtattaactgtatgtataatttctttatagtgaatgaatataaaaaagcagcaaggcacacctcttaatttatttcc

SEQ ID NO: 947355 - DNA, 120 bp, Artificial Sequence
  ENSG00000276853_3 (sequence is synthesized)
cagcccaaagcactttccctatcatctgtacaaaaagtagtggtagggcagtgcaggagcttgcagtcagatttccttggattggtttccaggtcctactatttacttgctaaatgactg

SEQ ID NO: 947356 - DNA, 120 bp, Artificial Sequence
  ENSG00000276853_4 (sequence is synthesized)
taggcaggtgtgttcattgtcataatcaaagtatctctgcccttaaacacaaaaagaagatgaatacagaccattttgtgttctctgaaggaaataaagatgagtaattggcgtacacaa

SEQ ID NO: 947357 - DNA, 120 bp, Artificial Sequence
  ENSG00000276850_0 (sequence is synthesized)
gtagcgctgccctgggcgggcttgcacccccacacccaagtgagcggcctgctcactcctcagctgcaggagccagacatgtggagtcccagcagaggccaacctgtgtctcttcatctc

SEQ ID NO: 947358 - DNA, 120 bp, Artificial Sequence
  ENSG00000276850_1 (sequence is synthesized)
cgtgagaaaggtgcccccgaagtgaaagagatggcctggtggaaagcctgggactcaggaattctcccactccggaatgccttgctgctggggtgaccaggtcttcacttgtgaaacagg

SEQ ID NO: 947359 - DNA, 120 bp, Artificial Sequence
  ENSG00000276850_2 (sequence is synthesized)
agtcggccacctcagccctgcgcctggcctggtggaacatgggtcaccgccccaacctggggcagccgccccatcccaacgcagttgctgccgctctccatgcctccctgtgcccagcta

SEQ ID NO: 947360 - DNA, 120 bp, Artificial Sequence
  ENSG00000276850_3 (sequence is synthesized)
accgggggacttgtcccctgggaaaacctgggtacccaggctgcctttggtttcagcccctactcctcttcccgggctgcctgtgctccccggacggcccctttccccgggctgtgttca

SEQ ID NO: 947361 - DNA, 120 bp, Artificial Sequence
  ENSG00000276850_4 (sequence is synthesized)
catcagctgggaagggtcccttgcagacagatcttggacgaggtcgcgtcccccctcgtgaccagcaaactcctaaaagcggcccttgccccagagcccctgtagcctccaaccggcagt

SEQ ID NO: 947362 - DNA, 120 bp, Artificial Sequence
  ENSG00000276850_5 (sequence is synthesized)
caggaggcagcgccgtctcagcgccgcttagtggcgccaggcgtgcctggaaatccgctttcgcagcgccccctcgtagccgcctccgcccgcagaaaggcgttccctggacagagaagc

SEQ ID NO: 947363 - DNA, 120 bp, Artificial Sequence
  ENSG00000276850_6 (sequence is synthesized)
gggcgcgcgggggcgggcgcgcggggccttgccggagaacctgactctccgcagcagcagtggaagccggagtgacgcgttgtgttgaacaccagttttctggagcgctgtgtgttctca

SEQ ID NO: 947364 - DNA, 120 bp, Artificial Sequence
  ENSG00000276850_7 (sequence is synthesized)
acagctgagcagtctgtttctccaatcaggtttcaaagccacttcaactgcactggcccctgtgggtcactgctgcaccgccctggcccatgtgggtccctgaggagcgacctgccgggg

SEQ ID NO: 947365 - DNA, 120 bp, Artificial Sequence
  ENSG00000276850_8 (sequence is synthesized)
tgagaaaaaaacttcatcagtaagaaacaagtcaatagacaagtaaaagactaggagaaaatatgcataaaacataaaaaagtgacttgattcctgattctggagtatttaagaattcct

SEQ ID NO: 947366 - DNA, 120 bp, Artificial Sequence
  ENSG00000276850_9 (sequence is synthesized)
ataactcaacaaaaagttcagttttttaaaatgagcaaaaggcttgggtaaactattcacaaaggaacgtagacaaatgccagtacacacatgagaagcgcatacacatccacaaacttc

SEQ ID NO: 947367 - DNA, 120 bp, Artificial Sequence
  ENSG00000276850_10 (sequence is synthesized)
aaacaagcccacctcatgtatttctagtgagtaaggaaaagaacgcaaacacttttgaaaattgtttggttgtttcttgtaaatttaaacaaataccctattatattatccagcgagtcc

SEQ ID NO: 947368 - DNA, 120 bp, Artificial Sequence
  ENSG00000276850_11 (sequence is synthesized)
atccttaggtttttatccaaggataaagaggtgaaaactcatatctaacaaatagacttctgaaaagatgaaaatagaagctttattcataaaagacaaaaactggaaataacccaaata

SEQ ID NO: 947369 - DNA, 120 bp, Artificial Sequence
  ENSG00000276850_12 (sequence is synthesized)
ttcattcacaggagaatgaataaacagactaggttgaatccatacaatggaatggtagcagacaataaaaagaaaatgaactattgatgccccctactgcacagcagaagctctgaatcg

SEQ ID NO: 947370 - DNA, 120 bp, Artificial Sequence
  ENSG00000276850_13 (sequence is synthesized)
tgttcctgaatgaaagaagtcaggtatgaaagaataaacattgtatgattccatttatatgaaaatgaatctgtgatttaaaaatcagactagtattaggttggtgcgaaagtaattgcg

SEQ ID NO: 947371 - DNA, 120 bp, Artificial Sequence
  ENSG00000276850_14 (sequence is synthesized)
ttttttgcctttttttttttttaatagttgctttggggtttatggatggagtggcatggtagaggttagctgaagggggcatgaaataactttttgggggtgctagagtgttgtaaatct

SEQ ID NO: 947372 - DNA, 120 bp, Artificial Sequence
  ENSG00000276850_15 (sequence is synthesized)
tacagtgggggagggacaggagtgcaggcatttgacaaaacacattgaattgtgaaatttaagatttttgaatttctttgtatgtaaattacctgccaataaaaacatgacgaatagagc

SEQ ID NO: 947373 - DNA, 120 bp, Artificial Sequence
  ENSG00000276850_16 (sequence is synthesized)
agatgaaaagatgggccaggagtccagtttctggaaggccaagaatcgaagtagtaagctgcagccgttttccagacaagcaggatgtggggatgcagaagaattcaggactggaggggc

SEQ ID NO: 947374 - DNA, 120 bp, Artificial Sequence
  ENSG00000276850_17 (sequence is synthesized)
aaactccgtaagcaggggctgtcacgattcccatctccctctataaacctctctcttttcatgtcatactgttccatgttatatgtaactgttttaaagctacatactggacaaaaagtg

SEQ ID NO: 947375 - DNA, 120 bp, Artificial Sequence
  ENSG00000276850_18 (sequence is synthesized)
gtgtcagagcagatctgaagtagagcttctaacgactcccaggagtgctgagtgaccgaagccaggtacctgcaggacctatttgtgttcgttgatctctcagagcagttggaagtcatg

SEQ ID NO: 947376 - DNA, 120 bp, Artificial Sequence
  ENSG00000276850_19 (sequence is synthesized)
gttgaatccatacaatggaatggtagcagacaataaaaagaaaatgaactattgatgccccctactgcacagcagaagctctgaatcgtgttcctgaatgaaagaagtcaggttcttcag

SEQ ID NO: 947377 - DNA, 120 bp, Artificial Sequence
  ENSG00000276850_20 (sequence is synthesized)
gagggattccagaacaaggcactctcatcacaggagatgacagctccatgtgcatgacggccccagaagaccatctggtaggacaagatgtggaggtggaacgcagtgatattgataatc

SEQ ID NO: 947378 - DNA, 120 bp, Artificial Sequence
  ENSG00000276851_0 (sequence is synthesized)
cctgagtctcggttttcttatctatgaaatgaggctaagaataataaaatagagaattaaatgagataatgcctgtaaacagtgcctggcatatagcttattattcatccagctaagagg

SEQ ID NO: 947379 - DNA, 120 bp, Artificial Sequence
  ENSG00000276851_1 (sequence is synthesized)
cccttccatatgtgaagctttgctctgtgaggtctgtattacaatcacattcagttatagctaattatttacttatgtagctatctctgaaacttagaaatgaaatcatcgaggaaaaag

SEQ ID NO: 947380 - DNA, 120 bp, Artificial Sequence
  ENSG00000276851_2 (sequence is synthesized)
ccctaaacccacgatgggagataccacattcggccacaagagggcgcgtcacattttctccaagagaagctgggccgctgatgaaggacgggctccgggcctcccagagacacttcacct

SEQ ID NO: 947381 - DNA, 120 bp, Artificial Sequence
  ENSG00000276851_3 (sequence is synthesized)
cctgggatcttgctctaaggaagcccggtgcgaaggaggtggctttctcaggtggtcgcgctagatgtccaaggctttatgttcggtcagatgagctgtataataaaatgaaagtgttaa

SEQ ID NO: 947382 - DNA, 120 bp, Artificial Sequence
  ENSG00000286718_0 (sequence is synthesized)
acggctcccctcagaactcggcccgtcgagggagctgagagcagctccactggcccgaccccgcgggatgagaagacagcttggctccccgcaggggccgtcggaaaatacccctggggt

SEQ ID NO: 947383 - DNA, 120 bp, Artificial Sequence
  ENSG00000286718_1 (sequence is synthesized)
tttcagcccgcctcaggactgtgcgcctgcgcgaagtgcactggctgtgagctggacctgggctgtcttgtgtatttggagttggacagccaactacgtgactgcagccgggactgggga

SEQ ID NO: 947384 - DNA, 120 bp, Artificial Sequence
  ENSG00000230138_0 (sequence is synthesized)
gcctcgggccatgcagctggctgagtgagagctcctaacttgtactttctcccctccccggaagctttggtttgttgggggaagcagattcatatcagacccaaggcaactcagctgtga

SEQ ID NO: 947385 - DNA, 120 bp, Artificial Sequence
  ENSG00000230138_1 (sequence is synthesized)
ttgagatagacattgagtcttttgggagacagaagggagggagagtgccagtcaaaagggtttcgtgaagaaggttgcatctgactgggacagttaggcctctgtgtaccactttaaaag

SEQ ID NO: 947386 - DNA, 120 bp, Artificial Sequence
  ENSG00000230138_2 (sequence is synthesized)
gtgttgacttttctagtaaatatcctccatgtcaaagtctatctcaagatctgttccaggacaaccccgcctgcaacagggcccatttatgttccagccagcacggtgatcctgagtctg

SEQ ID NO: 947387 - DNA, 120 bp, Artificial Sequence
  ENSG00000230138_3 (sequence is synthesized)
cacagactgcttttgtgagcagcatgccttcagtggccagtccccaagcccctcaactccatgtggagcaaggaccaaccaccccatggagaagaggaacccgcctgcaaggcgagccaa

SEQ ID NO: 947388 - DNA, 120 bp, Artificial Sequence
  ENSG00000230138_4 (sequence is synthesized)
gaagggacctttggaaccagccacactggactctgtagggggctggatggctggccccaaaaggataggtccatgtcctaagccccagaacccgtaaatattgccttatttggaaagaaa

SEQ ID NO: 947389 - DNA, 120 bp, Artificial Sequence
  ENSG00000230138_5 (sequence is synthesized)
ttctttgtagatgtcattagggattttgagatgaagagatcatcctgtattatgcaagtgggccctcaatccaatggcaagtgtccttacaagagtaaggcagggctgggtgtggtgtct

SEQ ID NO: 947390 - DNA, 76 bp, Artificial Sequence
  ENSG00000230138_6 (sequence is synthesized)
agcttgaggccaggagttcaagactggcctgggcaacgtagtgagaccctccatctctacaaaaaaaaaaaaaaaa

SEQ ID NO: 947391 - DNA, 120 bp, Artificial Sequence
  ENSG00000230138_7 (sequence is synthesized)
gagatagacattgagtcttttgggagacagaagggagggagagtgccagtcaaaagggtttcgtgaagaaggttgcatctgactgggacagttaggcctctgtgtaccactttaaaagga

SEQ ID NO: 947392 - DNA, 120 bp, Artificial Sequence
  ENSG00000230133_0 (sequence is synthesized)
atacgacaggaaaaatggagaatggatagtgaggcgtgatcagcaggctcttccatgacaaccagcagtgccttcttgctgcatcctctggagagaaggagccctgcgtcctcagggaag

SEQ ID NO: 947393 - DNA, 120 bp, Artificial Sequence
  ENSG00000230133_1 (sequence is synthesized)
gcagaagggcaggcaagccggatactgtgatggtgcctcttccattcacaagggaggagccctcacagccttgtcatcacctcctaaaggccttgccttttaatttgatcacatgggcca

SEQ ID NO: 947394 - DNA, 120 bp, Artificial Sequence
  ENSG00000230133_2 (sequence is synthesized)
tgaagtttcaacacctgaattttggcagaaatgcattcaaaccacagcagacccattatcctatttctaaggaacctgggataagacaagtccataggacaggcatggacaagcgtcctg

SEQ ID NO: 947395 - DNA, 120 bp, Artificial Sequence
  ENSG00000230133_3 (sequence is synthesized)
agccctggggccaggggaaatccaaggtaacaagggaaattggcgatcccagccaggtgcatggctagagcagttctttccttcggaagggcagcgatggaaatttcagctctacttttt

SEQ ID NO: 947396 - DNA, 120 bp, Artificial Sequence
  ENSG00000230133_4 (sequence is synthesized)
ccttttcccgagctgtgtgatcttgagcagcttccttgcagctcatccttcatgtcctaaaacagatgatacagcaacatcagcaaggtggcagactaaggaacttcagacactacttac

SEQ ID NO: 947397 - DNA, 120 bp, Artificial Sequence
  ENSG00000230133_5 (sequence is synthesized)
tacccccagaaacatttttttaaaaacaattagaggacctttggaaaatagtgaaaaggtacaggagccaagcaactgcccattcaagaaaaagcaacattcaaaatgcaggagattttg

SEQ ID NO: 947398 - DNA, 120 bp, Artificial Sequence
  ENSG00000230133_6 (sequence is synthesized)
tggatttgtactccccctttctgcacccttccctggcactgagcagtgttggtttggaggaggtggcagcccagctcccagttctttccctctaatgttagtgagcagagtctaacctgt

SEQ ID NO: 947399 - DNA, 120 bp, Artificial Sequence
  ENSG00000230133_7 (sequence is synthesized)
ctggggatggcttgaaggattagtcctgctttgttcaactcagagctcagaataagagaagcagtttaattcagattgcaggctgagaaaaagctatggaaagcagcaggaactgctctt

SEQ ID NO: 947400 - DNA, 120 bp, Artificial Sequence
  ENSG00000230133_8 (sequence is synthesized)
aaaaactgcagggaggctacagagactgaagatgcctgggcaagagatttcaaatggaagcatgtaataaaccctctaagggcacacaaagaagctggaacaagacttttggaaaattaa

SEQ ID NO: 947401 - DNA, 120 bp, Artificial Sequence
  ENSG00000230133_9 (sequence is synthesized)
gctactccttgggctgactccaaggctcagaacatgtcctgagaattagtgaagatcttccccatcacatagcctgtccgcaaatactaggagaagtggctgttttttcaaattcttaat

SEQ ID NO: 947402 - DNA, 120 bp, Artificial Sequence
  ENSG00000230133_10 (sequence is synthesized)
tctcaacaacgacaacaaaaatcacaaggcgtacaaagacaccagaaaatacaacttcttcagggaagaaaatgaattgtcggaaaccacccgtaaatccaagaaaatgatggagggact

SEQ ID NO: 947403 - DNA, 85 bp, Artificial Sequence
  ENSG00000230133_11 (sequence is synthesized)
acggcagagaccaagagaaaatactgttacatggttacaagatcaagttcacaaggacataaacaagatggagacctcatcccgt

SEQ ID NO: 947404 - DNA, 120 bp, Artificial Sequence
  ENSG00000230133_12 (sequence is synthesized)
agttcacaaggacataaacaagatggagacctcatcccgtttcttcgtttgtttcagggatctgtaacaaagtttattactgaccagcttgctgggctatcttgaacagcaagcttatgg

SEQ ID NO: 947405 - DNA, 120 bp, Artificial Sequence
  ENSG00000230133_13 (sequence is synthesized)
ggtcctaagctcatgttctattttaaggtacctctcttcatggcagaatgacacagaaagacaaattcacagcacaaagttcaccagattcgttacagcttaagactagcctcatgaatc

SEQ ID NO: 947406 - DNA, 120 bp, Artificial Sequence
  ENSG00000230133_14 (sequence is synthesized)
ctttttcctattaattaaaactttgcaagagatagtgatttttaccattcccgcatccattttgcacagtgaaggagtgagagagagaagaattgtctgcgctatctaaggtgaggagtt

SEQ ID NO: 947407 - DNA, 120 bp, Artificial Sequence
  ENSG00000230133_15 (sequence is synthesized)
caggggggccagagaaagacccacccattgcagagacactgaattaatagttcaggtggcagctggttggttgataaagaatcttttccagtcccatcagctctcaacttttcccctttg

SEQ ID NO: 947408 - DNA, 120 bp, Artificial Sequence
  ENSG00000230133_16 (sequence is synthesized)
cagtcccatcagctctcaacttttcccctttggggagaaaaagttctccatgttccaaagtcctgtatatgcctaatcctgtcagccatagctgccagcaaagagtgcaaggcagattaa

SEQ ID NO: 947409 - DNA, 120 bp, Artificial Sequence
  ENSG00000230133_17 (sequence is synthesized)
gccaagtccacttttgaccaagagggactttactgcaccccatcccatcctttacctaggtaaaatgtaccccattgcttacccaaagtcagccaattggtactgcagtctatttccttt

SEQ ID NO: 947410 - DNA, 120 bp, Artificial Sequence
  ENSG00000230133_18 (sequence is synthesized)
ggaatgggatagcaacttagctaaaaggttagcagatttaatttttttaagtatatttgtcacttaagctttttatttgcctttcacaaagtcgttaaataaaaatgccaaaatcttttt

SEQ ID NO: 947411 - DNA, 120 bp, Artificial Sequence
  ENSG00000230133_19 (sequence is synthesized)
gcttattggatggtgagagggatacggcctggtcacccctatgccctggccctcagcgtgccagatgggaccatctagttgcagggaaacaagctgggggctccccttgttctacattat

SEQ ID NO: 947412 - DNA, 120 bp, Artificial Sequence
  ENSG00000230133_20 (sequence is synthesized)
gagaaagctgttctggagcttggaggatgtgctccaccaaaacaaggggctaaactgagaaacaggaagacgagagatccagaaaaggaggtaaaacttgagagagagagttaaagtgga

SEQ ID NO: 947413 - DNA, 120 bp, Artificial Sequence
  ENSG00000230133_21 (sequence is synthesized)
tccccagcatgacaaaatgaccctaggatggcagctgtgctccagttccagaggatgagcagttttaaatgaaacaggctacagagaccctggggagatgttaagaaaatgcagttggtg

SEQ ID NO: 947414 - DNA, 120 bp, Artificial Sequence
  ENSG00000230133_22 (sequence is synthesized)
gaatacctgttacaggtgttttcagagactctgcaacctggacagagcttaaggaggcctctgggtccaacctacttctgagccacggaagacaagtgtgagcagtcttatccttaatca

SEQ ID NO: 947415 - DNA, 120 bp, Artificial Sequence
  ENSG00000230133_23 (sequence is synthesized)
taagttatctttagtaagattttaccatttctgtaaggctttggtgcttccagggcctaatacttattattcatgtataagccagaaggaactcagttcttcagaaattaaagattccat

SEQ ID NO: 947416 - DNA, 120 bp, Artificial Sequence
  ENSG00000230133_24 (sequence is synthesized)
ttttatctaagatattggctttgctcacaggttcccttgattaacttagccagtgatttttcttttcctacctaagtactcacgaaaaatgaaacaaaggggtaaaacacaaaaatcccc

SEQ ID NO: 947417 - DNA, 120 bp, Artificial Sequence
  ENSG00000230133_25 (sequence is synthesized)
gtgaatttccaaaagccaaattttacaccccctacaacattaccatttactaccagtacctttctgacccagtcagacctaagagacctgtaactggattcaagccagttaattagtcaa

SEQ ID NO: 947418 - DNA, 120 bp, Artificial Sequence
  ENSG00000230133_26 (sequence is synthesized)
tcaaacccactcctagacccagtccagtttctgtcatgacttccaaaccgagtttgggtcagaaattagctcaaagaaactcagagaactcaaagcacaaatccatggagctctaaaact

SEQ ID NO: 947419 - DNA, 120 bp, Artificial Sequence
  ENSG00000230133_27 (sequence is synthesized)
caagagagaacttaccatgatccccagtggctctgagagatcaatggacacaaatggatcctgttggtacctcacttgttcacttagcgcccctgggggtcgttagaagctctacttcag

SEQ ID NO: 947420 - DNA, 120 bp, Artificial Sequence
  ENSG00000230133_28 (sequence is synthesized)
accttgcttctgacatcatctgataaaagaaaaacctcagccaaattaaatttgaaggagtgcaatggagcaatgaacgactcgcgaattgggcagccttccctgacagagtaggcttgg

SEQ ID NO: 947421 - DNA, 120 bp, Artificial Sequence
  ENSG00000230133_29 (sequence is synthesized)
aggctccggcacagccacatggtggaagaagatttatggacagaaaaaggaaagtgacacacagaaaatggaagtgagacacaggaacagctggattggttacagcttggtgtttgcctt

SEQ ID NO: 947422 - DNA, 120 bp, Artificial Sequence
  ENSG00000230133_30 (sequence is synthesized)
atttgaacatggttcaaacagttagctacatttgattggtgaaaactgggtgactggcacgagtgtaggctatggtctgtttacaactccacttgttatagttcacgatgtacagataaa

SEQ ID NO: 947423 - DNA, 120 bp, Artificial Sequence
  ENSG00000230133_31 (sequence is synthesized)
ctcttagaccaaacttaaaatacacagggaggcaactttaggctaaacttgatttaacaggtctaacagataactgttcaagtatcagccaagtatttgattgtgcgtgtttataagaaa

SEQ ID NO: 947424 - DNA, 120 bp, Artificial Sequence
  ENSG00000230133_32 (sequence is synthesized)
aatgaacaactggaaagatacaaagaaagggatgggagaaaggaattaggattattttgttattataaggtgcctacattgtctatgaagtactatgatcttatttgagagtggatttgt

SEQ ID NO: 947425 - DNA, 120 bp, Artificial Sequence
  ENSG00000230133_33 (sequence is synthesized)
agtttttgtaaactgcaaactctacagcaaccactaaaaaagtacaacttgtatactaagataggaggcaaaatggaaaaaatcaaatagttaaaaccacaaaaggcaaaaaaaaaaaag

SEQ ID NO: 947426 - DNA, 120 bp, Artificial Sequence
  ENSG00000230133_34 (sequence is synthesized)
gtgcacactagacagactcatctcccatggaatctgctgacagatctctctggggacccctgggcagctatgtgtccagcaccaccagtggctccccatttctgtgtcttcttagaagat

SEQ ID NO: 947427 - DNA, 120 bp, Artificial Sequence
  ENSG00000230133_35 (sequence is synthesized)
ctgacaacccagcatacctcttgctgatgttatggatctgctggctctgtaaactataaattggcaaactagattaatcaaagaggaagctttctgcatgtgtgctaacagtcccaactc

SEQ ID NO: 947428 - DNA, 120 bp, Artificial Sequence
  ENSG00000230133_36 (sequence is synthesized)
tctaatctcacaaggcaccaatgtgacacttcttgctaaagaatgtggttattaatatatctgtctttggttttcttttctgctcttggagtggaaagcccctagagaaatagttccaaa

SEQ ID NO: 947429 - DNA, 120 bp, Artificial Sequence
  ENSG00000230133_37 (sequence is synthesized)
aagaatttataatatacttgctggagaaataagatttaagagggcaggctttcacatcaaagtttcagcatatggtaatgaaggtttctgttcagacaggtggaggaggagctgcctaca

SEQ ID NO: 947430 - DNA, 120 bp, Artificial Sequence
  ENSG00000230133_38 (sequence is synthesized)
tttcctgcggggggtggaggggaagtaggcatggcggtgagtcctgggctctcagactttgcttatcatattgtaacagctgaccttggtcccctttttggctctgtctctaacccacag

SEQ ID NO: 947431 - DNA, 120 bp, Artificial Sequence
  ENSG00000230133_39 (sequence is synthesized)
gtcagcctaggatgtcactgattcaatttatttcaatgtcaggttgtcagatataatttacatacagtaacattccgttcccccttttcagtatgcagctctatacgttgtgacaaatgt

SEQ ID NO: 947432 - DNA, 120 bp, Artificial Sequence
  ENSG00000230133_40 (sequence is synthesized)
atgccattctataaccaccatgatgaagacacggaacatttccatcacctcagaagttcccttgtgccccttgtagtcagctcctcttctcagacccaccccaagctggcaaccacgggt

SEQ ID NO: 947433 - DNA, 120 bp, Artificial Sequence
  ENSG00000230133_41 (sequence is synthesized)
ctgctttctatacctatagttttcctttttcaaaatatcatataaatagtccataggcattttaacagccaaggtgcctaataaatagtgcactgtgactatcattgtttttcttgaatt

SEQ ID NO: 947434 - DNA, 120 bp, Artificial Sequence
  ENSG00000230133_42 (sequence is synthesized)
aaaaagcccaccgtggaggtgggtacgtggagcctctcctaactccagcttccataagcagacatgtttcaacagatatccttttcttctttaacagattcattgggttcaaattctagt

SEQ ID NO: 947435 - DNA, 120 bp, Artificial Sequence
  ENSG00000230133_43 (sequence is synthesized)
tcactcagtagctaaatatctttggatattttatttcaattctcaataactttgttttcttatttgtaaaatgagaattttagaatacctatctttggaagcaaacaaacaaactaaagt

SEQ ID NO: 947436 - DNA, 120 bp, Artificial Sequence
  ENSG00000230133_44 (sequence is synthesized)
gagggacaacaaaaacaaaagaaaattgcattgttcttgggatcttagaaaatagcaacatgaagttactttattttaaaatttattcagctgacaatacaggaatggcattcaaagcaa

SEQ ID NO: 947437 - DNA, 120 bp, Artificial Sequence
  ENSG00000230133_45 (sequence is synthesized)
gttacttaaattctgtgtgcctcaaattctgttgtgtaaattggggaaacaagtgtacttcccttataagattgctgttttgatattaaatgagacatgatccatataaggtcttttgag

SEQ ID NO: 947438 - DNA, 120 bp, Artificial Sequence
  ENSG00000230133_46 (sequence is synthesized)
caaccttaagctcaaaagaaaatactcgaaatatgtgacttgtcagaattacatttgtatttatgtagcccaaatgcagcatacatttaagaatgctttataatcttgctgctgaattgt

SEQ ID NO: 947439 - DNA, 120 bp, Artificial Sequence
  ENSG00000230133_47 (sequence is synthesized)
ccatcaactgatatatttttctttcaattatttattctaactcatgtgtcctaaaattcatcttttcaaagtacacatttcagtggtttttagtatgttcaagatgttgtaatccgtccc

SEQ ID NO: 947440 - DNA, 120 bp, Artificial Sequence
  ENSG00000230133_48 (sequence is synthesized)
cattatctaattcttgaacattttcatcacaaaagcaaccctgtgcccattaacagttactccccattccactctcacatcagcctgtggaagtcactcattagttttctgtttctgtag

SEQ ID NO: 947441 - DNA, 120 bp, Artificial Sequence
  ENSG00000230133_49 (sequence is synthesized)
atttgcccattcttggtatttcatataaaaggaatcacacggtatgtggctttttgtgtctgccttatgtcactaagcataatgttttcaaggttcatctacattgtagcatgtatccat

SEQ ID NO: 947442 - DNA, 120 bp, Artificial Sequence
  ENSG00000230133_50 (sequence is synthesized)
acttttttcctttctatggttgaataatagtctatggtatagataatattacattttgtttatctgttcaccaattgatccaactgatgggcattttggtcatttccaatttggggctat

SEQ ID NO: 947443 - DNA, 120 bp, Artificial Sequence
  ENSG00000230133_51 (sequence is synthesized)
tatgaataaagtacctatgaacatttgtgtatacatttttctgggggtatgtttcacctctctcttgggtagataactaggagtggaattgccaggtcatttggtagctctatgtttaac

SEQ ID NO: 947444 - DNA, 120 bp, Artificial Sequence
  ENSG00000230133_52 (sequence is synthesized)
tttttgagaaactgacaaactgttttccaatgcagctgtaccattttccagtgcacccaccagcaatgcaggaaggtagcaacttcttcacatctactccagcacttcacttgtagtggg

SEQ ID NO: 947445 - DNA, 120 bp, Artificial Sequence
  ENSG00000230133_53 (sequence is synthesized)
ctatgatttgttctgatacccagcctagtggctataatgttatatctcactggggtttttaattgtgtttgcctagtgaaaaatgatgtcgagtattttttgcctgtttttaaattggat

SEQ ID NO: 947446 - DNA, 120 bp, Artificial Sequence
  ENSG00000230133_54 (sequence is synthesized)
tacttgtcttttttatgattgagttgtaagtgttctttaatgtctgggtacctgtaagatacatatttcctcccattctgtgggttgaattttcactttcttcatggcatccattgaagc

SEQ ID NO: 947447 - DNA, 120 bp, Artificial Sequence
  ENSG00000230133_55 (sequence is synthesized)
acgacaggaaaaatggagaatggatagtgaggcgtgatcagcaggctcttccatgacaaccagcagggcctgctgaatcattcctgctcctgtggagatgagtttggagttttatgctaa

SEQ ID NO: 947448 - DNA, 120 bp, Artificial Sequence
  ENSG00000230133_56 (sequence is synthesized)
catcatctctgcttcactttttctccatggcgagtaatttgaaggggatcactgaccgtgccatggcacacaaaagcacaacttcagaaacaagatgtggctcggggacaacttagaggt

SEQ ID NO: 947449 - DNA, 120 bp, Artificial Sequence
  ENSG00000230133_57 (sequence is synthesized)
tatttgagacgctgcaggttttcagcaggtgcttccaatccatggacttggagaagaatgtcagctaatggctgccactgtgctgccaggcttccatccagggactttagtaaagttctg

SEQ ID NO: 947450 - DNA, 120 bp, Artificial Sequence
  ENSG00000230133_58 (sequence is synthesized)
ctgaaagagatgtaaaccgggagagggatggaggctggatcctggagtgtgaatatttgaccatcctttaccccagcagcacctccacgcaaggttttacatagcagtgggtttgtgttc

SEQ ID NO: 947451 - DNA, 120 bp, Artificial Sequence
  ENSG00000230133_59 (sequence is synthesized)
ccatcaaactgggcctggtcagggtcaagcaagcccaagcctctgcccccgcatgctgagtaggggggcagtactcctgaaggtgttctcaccagttcgaggcctgctctgcatagcctg

SEQ ID NO: 947452 - DNA, 120 bp, Artificial Sequence
  ENSG00000230133_60 (sequence is synthesized)
ggcactgcccaaccaggaggatgtgtgtttaggaatgtttccctgcagaactagctaagtctggctgtgcctggttgaagcctcctacattccagaacataagctgtgatccccaaatga

SEQ ID NO: 947453 - DNA, 120 bp, Artificial Sequence
  ENSG00000230133_61 (sequence is synthesized)
gcacggttgtcctgcgagagatgtactttgctctagtggtctgtggaagggtagagatgcaacaccctcttggttaaaatgacaactcactttaagagacaccgaaactgtacaatccat

SEQ ID NO: 947454 - DNA, 120 bp, Artificial Sequence
  ENSG00000230133_62 (sequence is synthesized)
agggtctgggggcttcattatttatagggaaaacagcaggcagtaggtgaaagaggaagagagaaaaaaagggagggtaggtaaggcgagcagttgcattcctttcagtcttttgattat

SEQ ID NO: 947455 - DNA, 120 bp, Artificial Sequence
  ENSG00000230133_63 (sequence is synthesized)
tttcactgagtccacatttttcatgtgaaagaagccggctaaggaaaagtcaattatgcattcttctggttccgtgaatctgcgtttttaacataagataaaataatcatagagtatagg

SEQ ID NO: 947456 - DNA, 120 bp, Artificial Sequence
  ENSG00000230133_64 (sequence is synthesized)
aagcagtcaggtacggatttgtctcagttgagcagagagaggactttttgttctgtcctttgccctatgcctgtgaagataagctgttaataatgtacattgtcagggtgaaatttaaca

SEQ ID NO: 947457 - DNA, 120 bp, Artificial Sequence
  ENSG00000230133_65 (sequence is synthesized)
gaaccactttagggtaaagatcttggggcccataggaaattttcttgtgagaaaaacttgaggaaggatgtagccatctatttgggaacaaaataggaggcaggtttgcatgacccagct

SEQ ID NO: 947458 - DNA, 120 bp, Artificial Sequence
  ENSG00000230133_66 (sequence is synthesized)
cccagcttgacttttgcctttggcttagtgagcttcaggtactgagattgtatttttctttcacacacccttgaagaaacatgcaaatatcaattaaaagagaggaagtgtggctatatt

SEQ ID NO: 947459 - DNA, 120 bp, Artificial Sequence
  ENSG00000230133_67 (sequence is synthesized)
aacatgaaataaaatacactttaagtcaaaaactgttacaagacacaaagaaggacattaaatatagttgaagggtgacttcatcagggagcaatgacaattataaacacatatgcacca

SEQ ID NO: 947460 - DNA, 120 bp, Artificial Sequence
  ENSG00000230133_68 (sequence is synthesized)
aacattagagtgcctaattatttgaagcaaacattgacaaaattgaagagagaaatagatagttctacaataatggtaagacacttcaatgaccctactttccacagtggatgaaacagc

SEQ ID NO: 947461 - DNA, 120 bp, Artificial Sequence
  ENSG00000230133_69 (sequence is synthesized)
cagaaagaacatagataagaaaatagaggacttgaacagcactatagaccaattggatctaataaatatatgcagaacactccacacaacatacgaggagtacacattgttctcatgtaa

SEQ ID NO: 947462 - DNA, 120 bp, Artificial Sequence
  ENSG00000230133_70 (sequence is synthesized)
tacacattgttctcatgtaaatgtgaaacattctccaaaacagcccatatgtgtgatattatatatataacatacatattttatatgtatcatagatattatatatctctctatagaatt

SEQ ID NO: 947463 - DNA, 120 bp, Artificial Sequence
  ENSG00000230131_0 (sequence is synthesized)
ttggaagcaaagacagagagggcacctggagaatggttgccagagtgaaattccccagacaatagagataatttggaactgtttaaagaacaagggaagaagagcccaaggaccgtagca

SEQ ID NO: 947464 - DNA, 120 bp, Artificial Sequence
  ENSG00000230131_1 (sequence is synthesized)
aggccctgattctgggagacgagagaacacgctgacttagaatgcttgtctctgcatcctggtcagaaagtagatggacgacactttcatctccgactggattttggtgagagatgggca

SEQ ID NO: 947465 - DNA, 120 bp, Artificial Sequence
  ENSG00000230131_2 (sequence is synthesized)
aaccccgggctctaggctggagcagcagctcttgtatccacacaaaatcaggactggtggagggagccatcttcaaacataaatttgcgtcttttggcaatgcactccttgggtttggaa

SEQ ID NO: 947466 - DNA, 120 bp, Artificial Sequence
  ENSG00000230131_3 (sequence is synthesized)
ccagccagcaaacagcccatgcgccctggagcagatggactgtgggtacacgagcctctgaactcttgggcagcatgggcacaacatccttttggcctcacccaatgacctggctgtgag

SEQ ID NO: 947467 - DNA, 120 bp, Artificial Sequence
  ENSG00000230131_4 (sequence is synthesized)
gccagaggagctccgtgctgctaggagatccaggcagaaacatccaggagtggaagctcagcccagcggctgggaggctgtggcacctcctgtccacatggcaggccaggccgaggtggg

SEQ ID NO: 947468 - DNA, 120 bp, Artificial Sequence
  ENSG00000230131_5 (sequence is synthesized)
ctggctacacagtggggctccccctctctgataagggatcgaacggatgcttgaaaataaatggcacctgtggagaaagtgccccatccctgattatgtcatcggagcctctggtcccca

SEQ ID NO: 947469 - DNA, 120 bp, Artificial Sequence
  ENSG00000230131_6 (sequence is synthesized)
atccaataggctcgtggtccctgatggtcctggaccactgatttgaggcctttctgcttcctttgattcagtctttggcagagacccaggagcaggagtccttgatggcacctggccctt

SEQ ID NO: 947470 - DNA, 120 bp, Artificial Sequence
  ENSG00000230131_7 (sequence is synthesized)
tctagtcaccgacaagggaaacctgagaaaccattctcagaaatggaactaaattgacacagcatttgtctcctccagaggatacagcaccaaggcgccatcttggaagtagactggagc

SEQ ID NO: 947471 - DNA, 120 bp, Artificial Sequence
  ENSG00000230131_8 (sequence is synthesized)
tcttagcagaccagaacctgtgggtgtgttgatcttgtacttcctgacctccagaactgcatattatgaatattcagtgaaacaacgtgtgtgctcaccaggcaggaagagctcagcaaa

SEQ ID NO: 947472 - DNA, 120 bp, Artificial Sequence
  ENSG00000230131_9 (sequence is synthesized)
tcctcagccttattgtcatcatcatcaacctcatcagtgtcatcatcagcctcatcaacgtcatcatcagcctcatcactgtcatcatcagccctttgtcatcatcatcatccaccttgc

SEQ ID NO: 947473 - DNA, 120 bp, Artificial Sequence
  ENSG00000230131_10 (sequence is synthesized)
tgttctcttccttgttgacatcattatcctcatcctcctcatcaccatcaacagcattatttttattttttattcttccacctgtaagagtttcttttcctccctcttattgttttcctc

SEQ ID NO: 947474 - DNA, 120 bp, Artificial Sequence
  ENSG00000230131_11 (sequence is synthesized)
ttgggatgactagtggtgaaggaagtgtcagaggcaatgacctcacagctgtcgttgccatgggtgacacctcccagaaagagcttattggaactttcagtccaggggagtttctgctgt

SEQ ID NO: 947475 - DNA, 120 bp, Artificial Sequence
  ENSG00000230131_12 (sequence is synthesized)
tccaggatggaggaaatgttcaagaactgtggagcatctgagatttttttcctacttttgatgtccacctagtcaaagttcaggtaggcttattgtctattataaaagctccaggttccc

SEQ ID NO: 947476 - DNA, 120 bp, Artificial Sequence
  ENSG00000230131_13 (sequence is synthesized)
ggtgacatcagcaaaagggagccaactccttccccgtctgccgttttgtactcttggcctaacgttgactcaaaacagcaacttggagccttccctgacctgttggaagaagagcccaag

SEQ ID NO: 947477 - DNA, 120 bp, Artificial Sequence
  ENSG00000230131_14 (sequence is synthesized)
cctcagaagatttacttcaacatctgtagaagtattttaatttcttccttgagtaggtttggcttggccaactgaaactgtggttaaactatttttaatcatgttaataagaaaattgtc

SEQ ID NO: 947478 - DNA, 120 bp, Artificial Sequence
  ENSG00000230131_15 (sequence is synthesized)
gggagggctttaggaattcccgctaaacgacatctatacagagcctttctgctgacacgggccagcaagtggttaatatcaaaaagcagacatctgaagaggcactgacaccctcccact

SEQ ID NO: 947479 - DNA, 120 bp, Artificial Sequence
  ENSG00000230131_16 (sequence is synthesized)
agaaaaggcggtgacatcagcaaaagggagccaactccttccccgtctgccgttttgtactcttggcctaacgttgactcaaaacagcaacttggagccttccctgacctgttggcattc

SEQ ID NO: 947480 - DNA, 120 bp, Artificial Sequence
  ENSG00000230131_17 (sequence is synthesized)
ctttatcatccaactcctgcttcgggaaaatttgtttctgtctgtctccaagatacaaaatcaaaaaggtgttttaatcctgaggaagagtgtgagtctgggaaaattttggatcaccga

SEQ ID NO: 947481 - DNA, 120 bp, Artificial Sequence
  ENSG00000230131_18 (sequence is synthesized)
ggtgcagccataccttccacagccatcactgttgcttacaactcacatgccaagaattgcaagatgaagatggtgatcaggaggcatgacttgtaactacttggttagtgtaaagcagag

SEQ ID NO: 947482 - DNA, 120 bp, Artificial Sequence
  ENSG00000230131_19 (sequence is synthesized)
aacatttctgatcaatgacactgctgatctgatgcatcataacagaaaccagtcatcaaggtacaacaaactgttccaaaccactgagaaatggcttgtctgtgggctcccagttcaaat

SEQ ID NO: 947483 - DNA, 120 bp, Artificial Sequence
  ENSG00000230131_20 (sequence is synthesized)
gctcacaaacctgggaggctggttgatcagggttgggagggagggtctagccatagctcagcagcttccctaaggttgttgtgcatgtccctagctggcttagtttgggctgatgtcttt

SEQ ID NO: 947484 - DNA, 120 bp, Artificial Sequence
  ENSG00000230131_21 (sequence is synthesized)
tacgtgtagttctagatggtttgaacatattggctgtttctcgttttcttctgtttaagcgtcttttggcaatgcactccttgggtttggaagcttccctccaagatgctgagcccaatg

SEQ ID NO: 947485 - DNA, 89 bp, Artificial Sequence
  ENSG00000230131_22 (sequence is synthesized)
gcgccatgattgtgaggcctccccagccaagtgtaactaatcccccagcggtcacccagggccactcttctcttcccggggactttgtt

SEQ ID NO: 947486 - DNA, 120 bp, Artificial Sequence
  ENSG00000230131_23 (sequence is synthesized)
tatcatcatgatcaccatcatcatcaccatcatcatcgtcatcaccaccatcaccgccaccaccatcatcatcatcctcgttgtcatcatcatcaacatcaacatcatcttttactaaag

SEQ ID NO: 947487 - DNA, 120 bp, Artificial Sequence
  ENSG00000230131_24 (sequence is synthesized)
tgagagatagggccaagtccattgaactgtgtacctttaattccgacaagctttcccttcctctcactttctccagcacttttctgagcttctggtataacaagttttagaatttgatta

SEQ ID NO: 947488 - DNA, 120 bp, Artificial Sequence
  ENSG00000230131_25 (sequence is synthesized)
cagcaccatctactgggtactagacttcccatttttctaggcctttcctatacgttgatgtttgcttcttctttctgtttttcctccgctctctcctgctttttcccccatgaaagtaac

SEQ ID NO: 947489 - DNA, 120 bp, Artificial Sequence
  ENSG00000230131_26 (sequence is synthesized)
aattgttagtttgaaaaggttccatcaattaattcctaaaagtgaagctcttctaaaatgaggaaaagcttaacatcccttgccaataaatacaaagacaatggccgatgcttactgcaa

SEQ ID NO: 947490 - DNA, 120 bp, Artificial Sequence
  ENSG00000230131_27 (sequence is synthesized)
aggaattcccgctaaacgacatctatacagagcctttctgctgacacgggccagcaagtggttaatatcaaaaagcagacatctgaagaggcactgacaccctcccactcacagaagatc

SEQ ID NO: 947491 - DNA, 120 bp, Artificial Sequence
  ENSG00000230131_28 (sequence is synthesized)
gaaaaagcatccagggacacctagacctcaaaagttacctggcaaagttttttgcatctgccaaagtttgtttccaaggactctggcgggcttccgtaatgtattgtaatgcttatccga

SEQ ID NO: 947492 - DNA, 120 bp, Artificial Sequence
  ENSG00000230131_29 (sequence is synthesized)
ttacagcatcacaaacagactaagacaatctcctagaggagaaatcctctcttccactacatgcattgtgtctgtgtatggtagctggagctggagcagccacgctgcaacccaggggcc

SEQ ID NO: 947493 - DNA, 120 bp, Artificial Sequence
  ENSG00000230131_30 (sequence is synthesized)
agccaagggcaaggctgagagtgttatcactgatgtgtcaggtggttctttgttgttttgagaaagaactttaattgagataatttatgtaacataaaatttactgttttacagtgtaca

SEQ ID NO: 947494 - DNA, 120 bp, Artificial Sequence
  ENSG00000230131_31 (sequence is synthesized)
acaccgaataatcttggggaatagctgtgcgaccatcctttcccagcatgctcaggattctgcaaatgtcctctgccttctctaaggcccccatctccctttcagggttctgtagcgtgt

SEQ ID NO: 947495 - DNA, 120 bp, Artificial Sequence
  ENSG00000230131_32 (sequence is synthesized)
gttcaacttctggcctgtgtctttcactgtgtcggggtatttttagggggatagaatagggtgagaagcaacaggaactatcatgactggggggaataggcaggcccagtattaacgtgg

SEQ ID NO: 947496 - DNA, 120 bp, Artificial Sequence
  ENSG00000230131_33 (sequence is synthesized)
ttgtgtgaatgtgtgcatgtgtgtgtttgtgtttgtgcatagcacctcaagtgtaggcatctttattcccaagacagcccttgccaaagacagggtcaagtcacatgctcttagacctga

SEQ ID NO: 947497 - DNA, 120 bp, Artificial Sequence
  ENSG00000230131_34 (sequence is synthesized)
taattctgcttatgtgattttcacttcaaatgatttcctgttaggcataaaggtttctactaaagaaaaatttaaggtcctcacacaagccacttctgctcctccacttcttaaagaacc

SEQ ID NO: 947498 - DNA, 120 bp, Artificial Sequence
  ENSG00000230131_35 (sequence is synthesized)
aagttagattttagtgcattcagcatggggcaaaacagtgtctattaattagactttcatttctattgacaatggggcctacaggccttgcactgaggtggacacagaccttttgtggtg

SEQ ID NO: 947499 - DNA, 120 bp, Artificial Sequence
  ENSG00000230131_36 (sequence is synthesized)
ccctgttgatcctggttctgctcgtggaaaattaggcctgattgccctatgaaggccccttctctagtttccctctctcacctgctaagtctccattcttcctctaactgctttaaatag

SEQ ID NO: 947500 - DNA, 120 bp, Artificial Sequence
  ENSG00000230131_37 (sequence is synthesized)
gtcagctgagtttcattcttacagtcatcaggcctttggtgaaggcatctgtgctcttgctgaagtctgcaacatttcccaacatgcaggccaagggcccttctctttcggtctgaccac

SEQ ID NO: 947501 - DNA, 120 bp, Artificial Sequence
  ENSG00000230131_38 (sequence is synthesized)
ttgtctgttcatgcatgcatgctttcattcattcagaaaatgtgtcaagaaaagagcacatgatttggaggcagacgtaattcagtggtgtgccggagtgggatatttccagcttgcaaa

SEQ ID NO: 947502 - DNA, 120 bp, Artificial Sequence
  ENSG00000230131_39 (sequence is synthesized)
agcggattgctaaatttgtaagtgttttgcagctggtttttaaacatatattaaaaatgaaattgtagaaaattgcaattaaataaattatatcaaaaacagaaaataaatactcaaaac

SEQ ID NO: 947503 - DNA, 120 bp, Artificial Sequence
  ENSG00000253773_0 (sequence is synthesized)
ggagtctgcgctgagtgaagaggtgccagaatccgcgaagagggtcgacgaatgcgctgccgcggaggtgggccaaataatcatggcaacaggacttttagaagcacgtcctctgaaagc

SEQ ID NO: 947504 - DNA, 120 bp, Artificial Sequence
  ENSG00000253773_1 (sequence is synthesized)
cattttctgcctgtggttggaaagggactgtgagtctttcctcaggaagtcagtagccctacctggtgaggtgatcaagagtttgctagcacaagagatgaagcaacaatggccatgagg

SEQ ID NO: 947505 - DNA, 120 bp, Artificial Sequence
  ENSG00000253773_2 (sequence is synthesized)
gattcaaggattatgcgtctctgcaccctacaatacaccaactggcagttccatcatttgaaagaaaatcttcaaggtaaagacatttacaatgacacaaaaacctttcaaaggcatcat

SEQ ID NO: 947506 - DNA, 120 bp, Artificial Sequence
  ENSG00000253773_3 (sequence is synthesized)
ggtcctaaagggctttccccaagggacagcacagtgtgttccaggccctgacaagaggtgagtgtgtgggcacgggtgtctcgtgagcctgacgctctccatccctctctgaccatttat

SEQ ID NO: 947507 - DNA, 120 bp, Artificial Sequence
  ENSG00000253773_4 (sequence is synthesized)
gcctttgtctgtctgtgctttcaaaggtcagacccttgtgagaaatacttgctctattaatcatcttggaagactgctccagacacattttcagaagggatgcagtaagttttgtctgca

SEQ ID NO: 947508 - DNA, 120 bp, Artificial Sequence
  ENSG00000253773_5 (sequence is synthesized)
cagtgcaccctgggaaaagagtttcccttctgaaaagcaatcttgctttcagccaagtcttgtcttttcctttttttttttgtaaagcaatgaagttattgcatgttccaaaggcatcgt

SEQ ID NO: 947509 - DNA, 120 bp, Artificial Sequence
  ENSG00000253773_6 (sequence is synthesized)
gaggtacggccacccctttggcatggcatgtctgtatgcccaggatgcatatacccaattagtgagttccacatgactgctggtgttggcaaacatctacatccagctggtgctcagact

SEQ ID NO: 947510 - DNA, 120 bp, Artificial Sequence
  ENSG00000253773_7 (sequence is synthesized)
tttggggatcagtggaaattttaacaattatttgacacagacttattcggtcagagaaacggttgtatcacagagagctaaatgtccagagctaatgaaagatgatgcagtgattagatt

SEQ ID NO: 947511 - DNA, 120 bp, Artificial Sequence
  ENSG00000253773_8 (sequence is synthesized)
gacttgcaatctgggtaataatttttatacttgcattttgaccacataaataaaagaatgggactgattttccgactgcattgcatatgaagggaggagaacgttattctctcttccctc

SEQ ID NO: 947512 - DNA, 120 bp, Artificial Sequence
  ENSG00000253773_9 (sequence is synthesized)
ttcatctgaatattagaactttttaaaccttcaaacatggcaggggcacttccacccatcatttgaatgaaagccagtctcacctgtctgtctttccattcagcagggaatcacttcatg

SEQ ID NO: 947513 - DNA, 120 bp, Artificial Sequence
  ENSG00000253773_10 (sequence is synthesized)
gacctaatatcctattcctcatggccaactcttgataacaatgagaaaacaagtcctgataaatgtgttatgtattcattaagcatttctatcttgtaagactttttcgtttttgttttg

SEQ ID NO: 947514 - DNA, 120 bp, Artificial Sequence
  ENSG00000253773_11 (sequence is synthesized)
tttttgcaaaatcatgacaatatctgctatatttcagatattgttttaacaaatctgtaatctgaatgaaagcaggattcgttctataattctcagtttggatgagaaataaatgataaa

SEQ ID NO: 947515 - DNA, 120 bp, Artificial Sequence
  ENSG00000253773_12 (sequence is synthesized)
caatgtcccactggaagagacccctccaaaacatcatgccaaaggagggagaccaccatattcagtgaaaatatttaacaccttggactgtttcccagtgggatgcagaccagacaagaa

SEQ ID NO: 947516 - DNA, 120 bp, Artificial Sequence
  ENSG00000253773_13 (sequence is synthesized)
gaacaattcaggctgcttaggagactgtctggggatctctgtgaatggcatctgcactggatagatatttcttcccctcagattcctgctcctgtgtatgtgcacgacttacagctgagt

SEQ ID NO: 947517 - DNA, 120 bp, Artificial Sequence
  ENSG00000253773_14 (sequence is synthesized)
catacttttcaagaatgaatgtgggtgtcacagtcagtgatctgtgatctattcctgctcctgtgtatgtgcacgacgtacgaatgagtcatagttgtcaagaatgaatgtgggtgtcat

SEQ ID NO: 947518 - DNA, 120 bp, Artificial Sequence
  ENSG00000253773_15 (sequence is synthesized)
caacagtgatctgtggtctatcatttcataaatagattgttccaaaagtactttaggcacaactgagcacagatagtctttggatggctttaatccaagcccatttcaatatgcctcttt

SEQ ID NO: 947519 - DNA, 120 bp, Artificial Sequence
  ENSG00000253773_16 (sequence is synthesized)
ttattgtccacacttctttctactaccactaacttaaataattcatataatcagctagaagagttttcaatgaaaactcatctttgaacacaagaaataaggactgagaagtggtgaaca

SEQ ID NO: 947520 - DNA, 120 bp, Artificial Sequence
  ENSG00000253773_17 (sequence is synthesized)
acttgcaactgaggtattctgaaaatagtcctaacataatgtcccccaggtgtagccatatatggtaatttggtaaatcaacaatgaagtcttatgcaacagtgagaatctaagtatcaa

SEQ ID NO: 947521 - DNA, 120 bp, Artificial Sequence
  ENSG00000253773_18 (sequence is synthesized)
gcactagatgaggtactgggcaagagaaatacaaaagagaacactgctttaccccatccccaaggagatctcagggacagaaatgtcagcatctacctcaatacaatgacagctgagtga

SEQ ID NO: 947522 - DNA, 120 bp, Artificial Sequence
  ENSG00000253773_19 (sequence is synthesized)
gtgactatctcaagtgagaactgaagaacgtatcacaggagagctgatcttggagaaagaagaggagttggcttattagaaaagagagcctggtcgcgggtgcctgtaatcccagctact

SEQ ID NO: 947523 - DNA, 120 bp, Artificial Sequence
  ENSG00000253773_20 (sequence is synthesized)
acttgcacccagagaaagagagagagagccagagctgtcggtctttgcagatggacagggggagccaggacacagctcagcctactcatgcccagagagagaaagagttcagctgctgac

SEQ ID NO: 947524 - DNA, 120 bp, Artificial Sequence
  ENSG00000253773_21 (sequence is synthesized)
cctgaaggcaagggagagctggccacgcaggtgtgtgtgggagctggctgctgagaggagccgccgagctggagcaggcagccaaaataaaggtgaacagtgtaaacgagctagtgtaag

SEQ ID NO: 947525 - DNA, 120 bp, Artificial Sequence
  ENSG00000253773_22 (sequence is synthesized)
catcccctcttttcggacctcagctgggactggaccccaaccctgagcataacaacaagtgatacttttgttaggtccattttcacttcatcagaaatgtcctgagctctccctgggcac

SEQ ID NO: 947526 - DNA, 120 bp, Artificial Sequence
  ENSG00000253773_23 (sequence is synthesized)
tgtcctgtggctggtaagaggcagagggcaggaaccgtgtcagtcttgttccttgttgtaacccagtgccgggcacatgtgggccaaataatcatggcaacaggacttttagaagcacgt

SEQ ID NO: 947527 - DNA, 120 bp, Artificial Sequence
  ENSG00000253773_24 (sequence is synthesized)
caacaatggccatgagggattcaaggattatgcgtctctgcaccctacaatacaccaactggcagttccatcatttgaaagaaaatcttcaaggtttaagacctgtgacacagactgaag

SEQ ID NO: 947528 - DNA, 120 bp, Artificial Sequence
  ENSG00000253773_25 (sequence is synthesized)
ctctcctggcatactctgaagctctcctggcaccctcccctttatgcttcacaggtgtttctcctaataaatttcttgtatgtctcatcccatctgggaatctgcttctcagaagactca

SEQ ID NO: 947529 - DNA, 120 bp, Artificial Sequence
  ENSG00000253773_26 (sequence is synthesized)
aactaacatatctgcccactatgtatcaggcactgtgctaggtgctggagacctaaaaatggataaaacagacaagagcccttcattcatggtgcttgcatcatagtgggggtaaatatt

SEQ ID NO: 947530 - DNA, 120 bp, Artificial Sequence
  ENSG00000253773_27 (sequence is synthesized)
ccataagcaagagaataaatagataagataaatttaaaaactagagaatgacttgttataaattgattggtaatcagggaaggtcttctgaggagatgacacttaagctgacacctgaat

SEQ ID NO: 947531 - DNA, 120 bp, Artificial Sequence
  ENSG00000253773_28 (sequence is synthesized)
gagaagaaggggctggtcaactgaagacctagatgagagtattgtaggcagagggaagagcaaggaccacaggttgagaaagaaactagtttgacatatttgatgggggaaaagccagtt

SEQ ID NO: 947532 - DNA, 120 bp, Artificial Sequence
  ENSG00000253773_29 (sequence is synthesized)
ataaaaaagggaatgaatggaataaacaaggacattaaagaactagagaggagcctgatcatcacagtaaggcatttagaataggttagggagaagaccattctctatcagggtagaact

SEQ ID NO: 947533 - DNA, 120 bp, Artificial Sequence
  ENSG00000253773_30 (sequence is synthesized)
gaaaaggctacgtctgctgctaaatgctgctataaaaagacaagggctttcatatactacagatgcaatcttttggatccacttatattgagcagacttcgtggaccctcctaagaaagt

SEQ ID NO: 947534 - DNA, 120 bp, Artificial Sequence
  ENSG00000253773_31 (sequence is synthesized)
tgagcagacttcgtggaccctcctaagaaagtaggcaccacaaaaatattacatctatacaaaatgcagggctccaagccatagatgtatatatcacattgtgtgtgtgtgtgtgtgtgt

SEQ ID NO: 947535 - DNA, 120 bp, Artificial Sequence
  ENSG00000253773_32 (sequence is synthesized)
gtaaagccagccagtttgtaagctgaacatgactcccacatgctttcagagagaagagaaaagagagaggaccgtgtactggaataagccctaagaacttcttggaagaaggggaagtta

SEQ ID NO: 947536 - DNA, 120 bp, Artificial Sequence
  ENSG00000253773_33 (sequence is synthesized)
gctgatcaaaattatgttgctttctagaaaagaagtaaaaagccaggcagtttcttttgctagaactgtctgggtagatttccattctaagaaaattacaacaatgtatagttttaaata

SEQ ID NO: 947537 - DNA, 120 bp, Artificial Sequence
  ENSG00000253773_34 (sequence is synthesized)
gctagaaggagaatactgaatgttcccaacacaaagaagtgataaatatttgaaatgacggatatattcatagtccttatctgattgctatacacaatatgtattgaaacatcattatgt

SEQ ID NO: 947538 - DNA, 120 bp, Artificial Sequence
  ENSG00000253773_35 (sequence is synthesized)
agtgaagaggtgccagaatccgcgaagagggtcgacgaatgcgctgccgcggagggccgtggaagaacttgccgatggagggaccacagagggatctatgggagaacaacggcaactgca

SEQ ID NO: 947539 - DNA, 120 bp, Artificial Sequence
  ENSG00000253773_36 (sequence is synthesized)
gaccacacttccagttctgtttcacttccagattttcccagttttccatgccttttctctggtgatggcagaagaagcactgatctgattcaagggcaggcaggagaggagaaagccaaa

SEQ ID NO: 947540 - DNA, 120 bp, Artificial Sequence
  ENSG00000253773_37 (sequence is synthesized)
tcaagagcctgaataagcaatacccagcataatttcattgaccacattcagtctatcagtcttttgggaaatatttatatttttccttctccctgcctttgtcaccaaaaaatttcattt

SEQ ID NO: 947541 - DNA, 120 bp, Artificial Sequence
  ENSG00000229925_0 (sequence is synthesized)
agatatgatcagattgctttgaggactgaagttgacttttgtggagctgataaaatgtcccttggagagactggccttgtaccttgtctacatgattcccttacaagcttcctgattttg

SEQ ID NO: 947542 - DNA, 120 bp, Artificial Sequence
  ENSG00000229925_1 (sequence is synthesized)
ggggacaggcctccacaagtccaatgaagttggctgcgtttctgattcacttctctatccaagaataaaaataggggctgatctactcaaacgatcctgggagattaaaagattttgaag

SEQ ID NO: 947543 - DNA, 120 bp, Artificial Sequence
  ENSG00000253776_0 (sequence is synthesized)
gctagttgtacgaaagtttccagtggatggatgtgtcacagagaaaggggcactggtacaaccttggtgtatgacatgagtatctggaatacctgctcagttctcaagaaattgtagaat

SEQ ID NO: 947544 - DNA, 120 bp, Artificial Sequence
  ENSG00000253776_1 (sequence is synthesized)
gtgctggactgcaaaatcctgagatggggctgtactggtgagaacgatctgggatctattcttctctcccttagaagcagaatgttcctccaggttttagcagcatgtcatgtcgcccct

SEQ ID NO: 947545 - DNA, 120 bp, Artificial Sequence
  ENSG00000253776_2 (sequence is synthesized)
agctgctttcctcagccttgggagaccagctcacaataaatcctaagcctccgttgtcccttgctatctacttataagtaatacatccactttgtgtaacttgtacgcactggtgttgtg

SEQ ID NO: 947546 - DNA, 120 bp, Artificial Sequence
  ENSG00000253776_3 (sequence is synthesized)
tctcaccagattcacacgagtttgtaatcagtgcatcgtgaatcgacttcatatataaataagctatctaaaataaatttataataactcatgcataataaagtataatttactttttca

SEQ ID NO: 947547 - DNA, 120 bp, Artificial Sequence
  ENSG00000229923_0 (sequence is synthesized)
tccctgaccaaaactctggtgcttctgaattgttaaagacagggttgcaacttaaaatttggaaataagtacaggccagaagaatggaagtaaacctcccccttataaataagaagagtc

SEQ ID NO: 947548 - DNA, 120 bp, Artificial Sequence
  ENSG00000229923_1 (sequence is synthesized)
tccttctgcctctatatattttccttatgtgtaaaataataataataataactattatagtgttgtgaggatttatacaattctcatgtaaaataagaaagaaaaataaactcatgctaa

SEQ ID NO: 947549 - DNA, 120 bp, Artificial Sequence
  ENSG00000253774_0 (sequence is synthesized)
aatatacacaagagaattgataacagatattcacacagaaacttgtacataaatgtttataagagcattatgcaaaacagccaaaaagttgaaacaaccagccgggcgaggtggctcaca

SEQ ID NO: 947550 - DNA, 120 bp, Artificial Sequence
  ENSG00000253774_1 (sequence is synthesized)
taatcccagcactttgggaagccgagatacttctaaagctgctgtgctcataactagggaagcagaagaggagatcgtcctcctgccctggcaaccagggatgatggcacgtgcctaggc

SEQ ID NO: 947551 - DNA, 120 bp, Artificial Sequence
  ENSG00000253774_2 (sequence is synthesized)
agtccttttcatattaagttaaccagacttgatttctgtagcttgcaatcaagaatcttaactgatgccaaaagagtgaggaattttgaaaaacactgacatgccatttcagattaaaca

SEQ ID NO: 947552 - DNA, 120 bp, Artificial Sequence
  ENSG00000253774_3 (sequence is synthesized)
aacagacatgcaaacaagcacagaagaactgtgagcacagttccaaagcaatgagacagattttcacaaatgcgtattctttctgcagtgaggactacagcaaatctcagaggtcacaat

SEQ ID NO: 947553 - DNA, 120 bp, Artificial Sequence
  ENSG00000229921_0 (sequence is synthesized)
gtgcctcacagcagccggtcccacttcctgcatcgccaccaatgtggcccaggccaccagcccccgtgacactgcagccatcccctttgctccccgtcgtggcctcccgaccgagcagcc

SEQ ID NO: 947554 - DNA, 120 bp, Artificial Sequence
  ENSG00000229921_1 (sequence is synthesized)
agagtgaccccgaaagcctaaatcagcctgcggcgccctcacccgtcctccagctgccatcgcctcctgggtgaagaggacgcagctggtgacgcgcactgacgtcctgcaaggcccgct

SEQ ID NO: 947555 - DNA, 120 bp, Artificial Sequence
  ENSG00000229921_2 (sequence is synthesized)
ccaggtgcgccacctttgactggcatgctgaaaggacaaagggacggaggcattttaccggagaggacatccatggggcccagcaggtcaaattcctttctctaagtatgggagacattt

SEQ ID NO: 947556 - DNA, 120 bp, Artificial Sequence
  ENSG00000229921_3 (sequence is synthesized)
ttaaaaataatggagtcctccagggccggctgcgtgctgtggcctgtgctcctcactgctttggacccaggctgcgctgtctccaccacgaccaaggactcacagagctcgcctggggga

SEQ ID NO: 947557 - DNA, 120 bp, Artificial Sequence
  ENSG00000229921_4 (sequence is synthesized)
cctggccccacagtcaccccgtccgtcatcagcctcaaatgccatcagcccgtgaatgctgctccatcgtctgcatggcagccaaggaggatggtgccaggtgatgtggcgatgagtggg

SEQ ID NO: 947558 - DNA, 120 bp, Artificial Sequence
  ENSG00000229921_5 (sequence is synthesized)
catcgcgtgggggccttggacgagcgtggacaccccaatccccagactggccattgccgtggaggcagcgtgagtgtgacatggagctcggtgtcgtgctgcagaggacgcctcgcggct

SEQ ID NO: 947559 - DNA, 120 bp, Artificial Sequence
  ENSG00000229921_6 (sequence is synthesized)
gtacgcgtcatgatagccagggacccctccacatgtcacttagccaaaggatgcagcccagcctggggctttctaccccaggcccgaggacctgcagggacaaggacccctcagcgcaga

SEQ ID NO: 947560 - DNA, 120 bp, Artificial Sequence
  ENSG00000229921_7 (sequence is synthesized)
tgcagctctcatgaggcctgaaaccaagctggacttgcagaactgcgcacgctccctttctgaaagaaacacccgttaccgggtccagactgaatgtgggcgtaagaaagcgggaagggt

SEQ ID NO: 947561 - DNA, 120 bp, Artificial Sequence
  ENSG00000229921_8 (sequence is synthesized)
cccccacagcaagagagagaccctcccagtcacttggtcatctgagccttgagtgtgtccggccccagccaccagcctgtccccactatccctcttgtcagcacggctgaaaggagctgc

SEQ ID NO: 947562 - DNA, 120 bp, Artificial Sequence
  ENSG00000229921_9 (sequence is synthesized)
ctgggcacctgaggtggctgaggctcatctttgaggagcatggaactcgaggggagaagtcgcgcccccagggaagccaggaaactctgacacagaacgcccaacgtggacacaggtgcc

SEQ ID NO: 947563 - DNA, 120 bp, Artificial Sequence
  ENSG00000229921_10 (sequence is synthesized)
aagaccggggaagtgccctgtggtgaccaggagaacaaggagctcctccagcaagcagggctgcagtgggagctgggagggagcagtgcacctgccagcgtggccgagtcacacagtgcc

SEQ ID NO: 947564 - DNA, 120 bp, Artificial Sequence
  ENSG00000229921_11 (sequence is synthesized)
tgccctcacctgtggaatttggtgtcagctaaaaggaagaagaaatggaaacttaaattctagccggtcattttcttaaaactgcaaacatttctctcgagtgtggactggcccggcttc

SEQ ID NO: 947565 - DNA, 120 bp, Artificial Sequence
  ENSG00000229921_12 (sequence is synthesized)
ggtgaaaggtgccctcctacctagcagggtctcggcactctgctgtgttctttgcaccgcggtcactatttcagaaacacggtcctgatactcatcctgataatctcttaagagcgcccg

SEQ ID NO: 947566 - DNA, 120 bp, Artificial Sequence
  ENSG00000229921_13 (sequence is synthesized)
agaagaagaatgaaacgcctgtatatcctggttaagtttctataaaataagaacatacacgattcataaaattatatgattaatgatcacagtataattacataagaatttgttatatat

SEQ ID NO: 947567 - DNA, 120 bp, Artificial Sequence
  ENSG00000229921_14 (sequence is synthesized)
gtttctatagaataataacatacccacacaattaatataagggatatgttgttaactggaagggtgtaaagcagaagttcttcggcccgggcctgtcgatgcccgccaggactgttttca

SEQ ID NO: 947568 - DNA, 120 bp, Artificial Sequence
  ENSG00000229921_15 (sequence is synthesized)
tgctgcctgtgcctcggctcacttacagaagttctgactcaatacatctgggatttctactttcaaagcagtacatgtgattttatgcccttaaagtatttaagaaacagaaagtcaagt

SEQ ID NO: 947569 - DNA, 120 bp, Artificial Sequence
  ENSG00000229921_16 (sequence is synthesized)
gtttcaccaatttccgtaggaagggccgctcactgcacggtggggcgatgctgggcgcgagccgtgtttccgtctattgttgacttcctcacgatgctggctcaggctcagagcctctca

SEQ ID NO: 947570 - DNA, 120 bp, Artificial Sequence
  ENSG00000229921_17 (sequence is synthesized)
tcaccgcctgtgaaatggggaccaccctcctaatctactatccagacctgccttctggaagctcaattatcacgagcacatggtggaaaacgtgggccggtgaaaacaacttaacatgta

SEQ ID NO: 947571 - DNA, 120 bp, Artificial Sequence
  ENSG00000229921_18 (sequence is synthesized)
aatgtacataataaaattccaggcacaatacatatgaacgcttttagagaactttgggagcaaagcaactgatgtcctgcgtggaaagtcctcttctccccatgaaattatctcaaggat

SEQ ID NO: 947572 - DNA, 120 bp, Artificial Sequence
  ENSG00000229921_19 (sequence is synthesized)
cttccatgggaagatgtgacagaaccaggacactactgcttaatatttaatatcagatactcttaaatcacaggagcataactaaagtattcttcgtttctttagtcaaatctccttttc

SEQ ID NO: 947573 - DNA, 120 bp, Artificial Sequence
  ENSG00000229921_20 (sequence is synthesized)
acctctctgtccacccctgctgtccccccccgctgtcccccccgctgtcacacccccgctgtcccccccccgctgtcccccctgttgtccccccgctgtccctcccgctgtccctccggc

SEQ ID NO: 947574 - DNA, 120 bp, Artificial Sequence
  ENSG00000229921_21 (sequence is synthesized)
gaggaggcttctgcacgttctgcgtgggcctctccccggggccgccccaggtctcccctgacgcccacacccaccaccaggctgttgtgcgggaccttccttctctgcctctccagctgg

SEQ ID NO: 947575 - DNA, 120 bp, Artificial Sequence
  ENSG00000229921_22 (sequence is synthesized)
aaggtgctgggattacaggcatgagccatcgggcctggccggctagtgcaatttggacgatgagtttaaaactgcagaaccaaagtaacctcttccacaggcttcaagcacagtagctga

SEQ ID NO: 947576 - DNA, 120 bp, Artificial Sequence
  ENSG00000229921_23 (sequence is synthesized)
acaggcttcaagcacagtagctgaagataataaatccattataacaaaagagtagccaaaatgctgtggcattcttagaaatgaagaaagaactgaactgataagacaaaaaaaaaaaaa

SEQ ID NO: 947577 - DNA, 120 bp, Artificial Sequence
  ENSG00000253778_0 (sequence is synthesized)
gggtgattacacagtggttctcaaagtatggacctccaaccagcagcatcagcagcatctggatacttgctagaaatggaaattctctggccctattccaggccttccaagttggaaact

SEQ ID NO: 947578 - DNA, 120 bp, Artificial Sequence
  ENSG00000253778_1 (sequence is synthesized)
ttgtgatggggcccagcactctgtgttttaacaagccctctagccttaaggaaaacaactctgaggacttttgtcacggacttgaaattctcatctgtgcttggacaagactctgaaaca

SEQ ID NO: 947579 - DNA, 120 bp, Artificial Sequence
  ENSG00000253778_2 (sequence is synthesized)
taccaactgtgtattttcctgcctttggtaaatctggagctattaactgattctaaagaacatttgacttaaaaagactatggaaagcccaaagaataaagggacacttgtcactggatt

SEQ ID NO: 947580 - DNA, 120 bp, Artificial Sequence
  ENSG00000253778_3 (sequence is synthesized)
acttaactacatttgcaaagacccaatttccaagtaactggaacattctagataatgaagaccccagtggattattattagcaaatgaaaactggatatcaagaagggcaaaatcttcaa

SEQ ID NO: 947581 - DNA, 120 bp, Artificial Sequence
  ENSG00000253778_4 (sequence is synthesized)
ccttatcagcagaaagagtttatgtaaaaatataccacatagaataactaaaaaaataagcaagtgataccttatctgagctcaaaatatctgtttctttgcaaatggataaaggattta

SEQ ID NO: 947582 - DNA, 120 bp, Artificial Sequence
  ENSG00000253778_5 (sequence is synthesized)
ttatattatagcaccttgaggacagagactttatgtttctaactacccatcccagcatcatctagttcattcctatgctgaacagcccctaacacattgcctaaataaatactaacatta

SEQ ID NO: 947583 - DNA, 120 bp, Artificial Sequence
  ENSG00000248627_0 (sequence is synthesized)
aaaggataaagaaaattggggctaaagttccctgctcacctcctaacagagattgagcaggtatctgtgaaaacatcctttaaaaaagcagttagttttccatgtcatgatggctgctcc

SEQ ID NO: 947584 - DNA, 120 bp, Artificial Sequence
  ENSG00000248627_1 (sequence is synthesized)
cagccaccaataagctaacagcggaagctgctgcctaaaactattctttttaacatccaagattttgaaaatagttcatcctttcactatgctattaataaaaattcataatacaatttc

SEQ ID NO: 947585 - DNA, 120 bp, Artificial Sequence
  ENSG00000229928_0 (sequence is synthesized)
aggactttgccaaaagcttcaagaagtagccaacataactcaacatccaaaatgtctcctgccatttcccttaacactacagcctcagctggcacgtgattggaatctcaaggcatgaca

SEQ ID NO: 947586 - DNA, 120 bp, Artificial Sequence
  ENSG00000229928_1 (sequence is synthesized)
agcaagagtccaacgcaaatgtcttgccgccacccagcaagtgttacagacatccagcctattctagctggaccctcactgctctctgccctgccacctcaactcagccattctgtattt

SEQ ID NO: 947587 - DNA, 120 bp, Artificial Sequence
  ENSG00000229928_2 (sequence is synthesized)
acagaggataggtcaataaaaaggattttatttagtctacaagaaatctggacaaaggtggttccaggagtgggaggaggacaaaggcggagagcgatttggagcacagccagacagcag

SEQ ID NO: 947588 - DNA, 120 bp, Artificial Sequence
  ENSG00000229928_3 (sequence is synthesized)
cgtttgccatgggatcatgcctattgatcttagttttccaacctccaacttggaaatagataaaccatctgtcttcccttcctggggagtagcaggttatgaataaattatgctgccaga

SEQ ID NO: 947589 - DNA, 120 bp, Artificial Sequence
  ENSG00000230684_0 (sequence is synthesized)
gggccctagacgtgaactgtggaagacgctgaataaggaccaacatgtctacagtccagcctagaaaacaggatgcctgtaatcattattcagtgagcagcaacctgcagcagctcctcc

SEQ ID NO: 947590 - DNA, 120 bp, Artificial Sequence
  ENSG00000230684_1 (sequence is synthesized)
cccagaggctggggacacagcaagaatccagcacagcaccgatcccgattccctcctccccaaactacctgagccatggacctcattttgtggacaaaattaaacttgccactttcacaa

SEQ ID NO: 947591 - DNA, 120 bp, Artificial Sequence
  ENSG00000230687_0 (sequence is synthesized)
tctgggcgcagcaactgctcctctgtctcatcaggcagtgtcccctgtgttcctgacctcctgaggagctgctggatggcttagccccttgacactggagggctgaccatgagctaggca

SEQ ID NO: 947592 - DNA, 120 bp, Artificial Sequence
  ENSG00000230687_1 (sequence is synthesized)
ccaccaatcaaatgcacataatcaagactttaaattggaaactagtgatacatcaaagcagaagtcactcgcaatgggaacaactccatccagcttgctgatgcatcagtggcagcagat

SEQ ID NO: 947593 - DNA, 120 bp, Artificial Sequence
  ENSG00000230687_2 (sequence is synthesized)
tcaagggtggtttccagcatctactgtcagtgtggcatgaggacaagcttcagtatctgcacccagcaggagcagcactggattttcaccaggccagttctccagcacaatttgcatatt

SEQ ID NO: 947594 - DNA, 120 bp, Artificial Sequence
  ENSG00000230687_3 (sequence is synthesized)
gagccagggccagcttcatagctatgcaacctgtgccatcacacaggaccccaggttcagcacggccctgtgcttggtttaatgctctgctgttgccatcttgcaattcttacagttctt

SEQ ID NO: 947595 - DNA, 120 bp, Artificial Sequence
  ENSG00000230687_4 (sequence is synthesized)
ttaacaagaggcctcacctttccattttgcttggatcttgaaaattatgtaaccaatcctgctacgagctagctaatatgctttaggtcagggagttcttaacctcttatgctcatgagc

SEQ ID NO: 947596 - DNA, 120 bp, Artificial Sequence
  ENSG00000230687_5 (sequence is synthesized)
ccttggtagtctggtgaaacctataaagcttaggaggaatgtttttaaatgaaatgcacaaaatgaaatacataggaaaccaattatattaaaatatagtttaaaatttaaaaaaacaaa

SEQ ID NO: 947597 - DNA, 89 bp, Artificial Sequence
  ENSG00000230686_0 (sequence is synthesized)
gcgaggttcaaacgattctcctccctcagcctcccatcaactggacaacatttaaaacaataaatgcaactacttgtattggatttaaa

SEQ ID NO: 947598 - DNA, 120 bp, Artificial Sequence
  ENSG00000230686_1 (sequence is synthesized)
atttaaaacaataaatgcaactacttgtattggatttaaaagagcaacaaatgacagggtacactgtcaccagcaatcaatcagaagcaacagatgtgacattgtgacatttagagtcta

SEQ ID NO: 947599 - DNA, 120 bp, Artificial Sequence
  ENSG00000230686_2 (sequence is synthesized)
ccgctctcaaaaccctgcccagcctccatgagaagtccggctagcttgcaggagcatgagagaccacacagaccacagttgaatcacagtagttgttcaagtttagacctcagatttatg

SEQ ID NO: 947600 - DNA, 120 bp, Artificial Sequence
  ENSG00000230686_3 (sequence is synthesized)
agagaacccaggcaagataaagtgggggcctgacccaggtgaactgaactccccagcataccctagactcacaagcactgataaatggttgatgttttaccaaagttttgggaatagttt

SEQ ID NO: 947601 - DNA, 120 bp, Artificial Sequence
  ENSG00000230686_4 (sequence is synthesized)
cgtctgttatgcagcaatagatcactcataaagaatttatgaaatgaagcaaaacatcctacaactgaattctaaaacaagtaagtggaacttaattaagtggaacaggtccattgccct

SEQ ID NO: 947602 - DNA, 120 bp, Artificial Sequence
  ENSG00000230680_0 (sequence is synthesized)
agaaaagcttagacattcataggaataagacctccagctatttatgggttgattacaagctcagtatgattcaattgatgattagatagtagacatcacctgttacgattggagccctgt

SEQ ID NO: 947603 - DNA, 120 bp, Artificial Sequence
  ENSG00000230680_1 (sequence is synthesized)
ggccaagaggacgcctgtgaactatttcacctgattaggccacgctgggattttttgcttgggtgagaggtcgtgcttccccaggacacgggcagcagcctggagagaggagtctcagag

SEQ ID NO: 947604 - DNA, 120 bp, Artificial Sequence
  ENSG00000230680_2 (sequence is synthesized)
tatctttttctggggattccagatggcagaaaattaggcccacactgctgagcgggatttgagtgtgagaatccaagtacagaagctgaatttgggaaaatagtcttgctaaagaaagtg

SEQ ID NO: 947605 - DNA, 120 bp, Artificial Sequence
  ENSG00000230680_3 (sequence is synthesized)
gcagattttcccaattccacattttggaagtatcaagagctgtttcatgagataagctggcgagaggaaatagactactctggtaggaaactagagcaggtgggcaggagtgactttcct

SEQ ID NO: 947606 - DNA, 120 bp, Artificial Sequence
  ENSG00000243701_0 (sequence is synthesized)
atgatcgaacattatttctggttgtgttcatgaagctttttctggaggaaattcgcatttgaattgatggactgaataaagcagattgcagtccccagtgtggatgggcttgatccagtc

SEQ ID NO: 947607 - DNA, 120 bp, Artificial Sequence
  ENSG00000243701_1 (sequence is synthesized)
ttctaaggacccaaataaaataggtggaggaagcttgaattttctgcctgactgtggcgctgggacacccatcttctcctgcccttgaactgggactgacaccatcagtgctcctggttc

SEQ ID NO: 947608 - DNA, 120 bp, Artificial Sequence
  ENSG00000243701_2 (sequence is synthesized)
tctcggcctccattattgtaggagaaaatgagacactgagtgggactcagggattgctccaggccacacagtcagcaggaggcaaagcccagattcaaatgcagattactcagctccaca

SEQ ID NO: 947609 - DNA, 120 bp, Artificial Sequence
  ENSG00000243701_3 (sequence is synthesized)
atccacatcctcacaggaggctgcactccttgcccaagcgtcagacaggagcaaagagaaagaaggcaaccagctggctactttcttcccttcttggatgcctccaacagggtgagaagg

SEQ ID NO: 947610 - DNA, 120 bp, Artificial Sequence
  ENSG00000243701_4 (sequence is synthesized)
actaaacaaatgaccaagtgtcatcccattttggacatacttaaaacaccccatggaatttttattctgactttcttctgcctgtgtggcatttatgtttaaataaaagagaattcaact

SEQ ID NO: 947611 - DNA, 120 bp, Artificial Sequence
  ENSG00000243701_5 (sequence is synthesized)
tcccaaagttgcagacagcccggcgaaccgcgcaatgcgcttcttctgcctgcagcagagaaaaggaaagaaaactccgcaggggctccgttggcttctccacgagtgacaaccatgttt

SEQ ID NO: 947612 - DNA, 120 bp, Artificial Sequence
  ENSG00000243701_6 (sequence is synthesized)
tcccagatagaagaccggagccctgctcctttgcgatccgccgagggctgcagagagcatcctcatccatttgggcacccctgcccaggaagagcccggccatccctttccggactggat

SEQ ID NO: 947613 - DNA, 120 bp, Artificial Sequence
  ENSG00000243701_7 (sequence is synthesized)
ccttaagaggtgaattttcttccgtggattccgatttgctccgtctgaccagcctaggcaatccagcatcgcgtggtaccagtgccgctgggcacactggcttcacgccggctccgcctc

SEQ ID NO: 947614 - DNA, 120 bp, Artificial Sequence
  ENSG00000243701_8 (sequence is synthesized)
accagcaagcgcattcccaggtggtcaggctcaggatggaccatgagctttcaaaaaggaaaaaggtggaaatcctcaactatgctgccatctgaataagtgtttctttgtagatgcaca

SEQ ID NO: 947615 - DNA, 120 bp, Artificial Sequence
  ENSG00000243701_9 (sequence is synthesized)
gagtcaaggaaaattacatccctgcattatgtaatgtaccaacaacgcacttacccactgttttaatctaggttattcttgaaagcagagcctgagacaaaggtagacacattctattta

SEQ ID NO: 947616 - DNA, 120 bp, Artificial Sequence
  ENSG00000243701_10 (sequence is synthesized)
tgagtctaacacccaggagcaggaatgagagataggggagtgaactggggaaaagggaaactaagtccgagcaaaaccagatactgctcttatcaagtggtccacccctattaatggcta

SEQ ID NO: 947617 - DNA, 120 bp, Artificial Sequence
  ENSG00000243701_11 (sequence is synthesized)
cataatgcagaactttctcaggattcttcttaaactttatctcagaactgtctgcctcagggagaaaggagaagtatttctccatcagcagccacctcctgtgtgttgagggctgctcct

SEQ ID NO: 947618 - DNA, 120 bp, Artificial Sequence
  ENSG00000243701_12 (sequence is synthesized)
cagtccagctggtaccttagcatcacacattgctgcatcagagaggtcttaagacaggaagctagagtcttggtgcatgctcgaagtgagacggtgtcagcacagagcagggtaaaatct

SEQ ID NO: 947619 - DNA, 120 bp, Artificial Sequence
  ENSG00000243701_13 (sequence is synthesized)
tcccgttaactcttcaccagagctatgactggaatcagaggttgaaaagatgtgagactgtacccaagaagcatcttataagcctacgtaatatactgttagactcatcgaaatctattt

SEQ ID NO: 947620 - DNA, 120 bp, Artificial Sequence
  ENSG00000243701_14 (sequence is synthesized)
cctcccttctttataatcaaaacttcagtgtccagaataaagttggcagaagggttaaattggaaagttaaatgtactagaaggtgtacatttataagttttgaccttgagtcgtgttca

SEQ ID NO: 947621 - DNA, 120 bp, Artificial Sequence
  ENSG00000243701_15 (sequence is synthesized)
aggagaaagtgacattggaacttggaaaatttaaaaatgattctacttgaaaaatttgaccattgcatagaaatattagctatcgtctaatcttttgtaatcttagaaacaatcgtgaat

SEQ ID NO: 947622 - DNA, 120 bp, Artificial Sequence
  ENSG00000243701_16 (sequence is synthesized)
cagagaagaaatttaactgcaaatttggttaatgaccatggattcctaatgagaagaaaagctagacactgagagtttagaataaactcaagaatcttaaaaattttcccatggaactgc

SEQ ID NO: 947623 - DNA, 120 bp, Artificial Sequence
  ENSG00000243701_17 (sequence is synthesized)
gcctttggacaaaattagagtgatttaattttacaataaaaacaactctatgtctttttcttggttctgtcatcatgtaaaaaataatgcttgcaaaattttttattaacacaacacttg

SEQ ID NO: 947624 - DNA, 120 bp, Artificial Sequence
  ENSG00000243701_18 (sequence is synthesized)
ggcttaatttccaataatttctatttttaaaatgtcttccattagtgtcttggatcttggaagatataattctgtctggaaaatttttaagacaagataaaaaatatatatatatacaca

SEQ ID NO: 947625 - DNA, 120 bp, Artificial Sequence
  ENSG00000243701_19 (sequence is synthesized)
cacacatacatacatatatatgtgtatatataaataatttaaatgaaattgtcttgacacatgtttttcaaagagtataatcttgtgaacttttctaatactacaaatcacaggatttaa

SEQ ID NO: 947626 - DNA, 120 bp, Artificial Sequence
  ENSG00000243701_20 (sequence is synthesized)
aaatcacaggatttaatcttctgacttaaattgtactttccagatatttagtcactctaagatgttaaactaatgttaaattgttttatttaatgaataatctttggatatataattttt

SEQ ID NO: 947627 - DNA, 120 bp, Artificial Sequence
  ENSG00000243701_21 (sequence is synthesized)
aaaactttgattattagatataattttaaatttcttttacctttatacataaaatcactacagattaaggagatgtacaaatgtccttaaattatattaaatgcacttactttgccatct

SEQ ID NO: 947628 - DNA, 120 bp, Artificial Sequence
  ENSG00000243701_22 (sequence is synthesized)
taaaatttatttaagtaaaataacatatatgctcataaaaatagttttattgatcttggttacctatcttctagttttctcttgtgtctggaaaaataaaagttggttaattttgttaaa

SEQ ID NO: 947629 - DNA, 120 bp, Artificial Sequence
  ENSG00000243701_23 (sequence is synthesized)
tatgaaccgcctgaagtctgcatcatgacttgatggttacccaggggtttatgtgtgtccaactgaacaccgtggttctgggattgaggatccgcacaaacacaggcaggagtttggagg

SEQ ID NO: 947630 - DNA, 120 bp, Artificial Sequence
  ENSG00000243701_24 (sequence is synthesized)
gaagaagggggcacagcaggagtgtatctcaagcccacctcaaaggcagcagagcattccaagttgctgaaaacctgtgcaaatggggcctctaaaacaaacattgtactgtgagctctc

SEQ ID NO: 947631 - DNA, 120 bp, Artificial Sequence
  ENSG00000243701_25 (sequence is synthesized)
tttccaagaaataaaaactgcagtaggaattctacaaaactgaaaaatcttcaggactggaagatctatccagaaaagcccagtggattataataacttattaaaatatttgtttggcaa

SEQ ID NO: 947632 - DNA, 120 bp, Artificial Sequence
  ENSG00000243701_26 (sequence is synthesized)
acctttatagaccaatgtcaccaacttttcctaaggtaattgtttcctactgtcaaatagctctagtgatataaatcttaacaatcaatgaagggaaaactggtggaaacataggaggaa

SEQ ID NO: 947633 - DNA, 120 bp, Artificial Sequence
  ENSG00000243701_27 (sequence is synthesized)
aaatactgggataattttcatcacaaagtattggcattaacattggttagaataggggagaaactgcatgacttgacaactggacattcctgtatgttgtatgaggccctgtcttaacag

SEQ ID NO: 947634 - DNA, 120 bp, Artificial Sequence
  ENSG00000243701_28 (sequence is synthesized)
aaatagtgatgtcatcatcatcctctcttatttggtcttgaattgccaccaatcggataaaacctttgaattatttaactcaatatatgttaagtttctactatgtgctgtgtattggta

SEQ ID NO: 947635 - DNA, 120 bp, Artificial Sequence
  ENSG00000243701_29 (sequence is synthesized)
ctataaatatgaataagacataagatattacattcaaaaacatcagaatacatgttcttttaaagtataccccaaaacatttaccatgtgttctggggcgcatgttaggctggatcacaa

SEQ ID NO: 947636 - DNA, 120 bp, Artificial Sequence
  ENSG00000243701_30 (sequence is synthesized)
atcaagtctcaagaatttcaaaagattgaaatcatatagagtatgaattaaaccagaaatcaagtacataaaggtaacaaaaaatttccaaaatgcattaatttaaggaacatacacctc

SEQ ID NO: 947637 - DNA, 120 bp, Artificial Sequence
  ENSG00000243701_31 (sequence is synthesized)
atgacccatgagccaaaaaataaatcacggcaaaattgcaaaaatattttgaaatgaattttaaagaaaatacttagcatattaaatacttagcatattaaagctctaagtacatatgtt

SEQ ID NO: 947638 - DNA, 120 bp, Artificial Sequence
  ENSG00000243701_32 (sequence is synthesized)
agaaattttaccgaaaggttggctatcagtgtttccagaagccagggaaaaagtttatacaatttgatcgctgaggcagggaaacaaagtgagacctccgatcgccctgcctttctgagg

SEQ ID NO: 947639 - DNA, 120 bp, Artificial Sequence
  ENSG00000243701_33 (sequence is synthesized)
tgagcactctggatcccatcgcaggagatcagagtcttgctgagttgaggagaggaagattggagttgatactgagatagcttgaattttcaggacaaagtatcaacaaggaggaaggta

SEQ ID NO: 947640 - DNA, 120 bp, Artificial Sequence
  ENSG00000243701_34 (sequence is synthesized)
gacaaaaaaatccagaaatctatgtagagaccccattgtgtacattgcggaacactaagcctaacaattctcaaaattagcgtgagattgggaaatatctaatttccatccagccacagt

SEQ ID NO: 947641 - DNA, 120 bp, Artificial Sequence
  ENSG00000243701_35 (sequence is synthesized)
ggagagtcctgactgaaaaccaggcattcgctaaagatcccagaaaggttgtgtgttacatacgtagggctaaactatcctgactaaaaactacactacacttgctcctcacccccacaa

SEQ ID NO: 947642 - DNA, 120 bp, Artificial Sequence
  ENSG00000243701_36 (sequence is synthesized)
aaagcttaaaaacaagcctcaatagtataaagctgatctgtaagtaactaaactacctgcagaacaaagtccaaatttattagttccagtactccaaaaaaaacacatgtaaaaaaaaaa

SEQ ID NO: 947643 - DNA, 120 bp, Artificial Sequence
  ENSG00000243701_37 (sequence is synthesized)
agcaagcgcattcccagatggagtctcactctctcgcccagactggagtgcagtgaagcaatctcagctcactgcaacctccaccctcccgggttcaagtaattctcctgcttcagcctc

SEQ ID NO: 947644 - DNA, 120 bp, Artificial Sequence
  ENSG00000243701_38 (sequence is synthesized)
catcatacctggctgtagcccttattttaaattcaatgtactgtaatgatttacttggtttattgtcttaactttctgttccactggaatacaggttcaataaggagggattttaatcaa

SEQ ID NO: 947645 - DNA, 120 bp, Artificial Sequence
  ENSG00000243701_39 (sequence is synthesized)
ttttgttctctgaagtgtcttcagaaccaaatgagtaaaaaattatcattgttgacgttttcacttcgtgctagcatatgggcaatctcaatttatttctaataactccctgtatctttc

SEQ ID NO: 947646 - DNA, 120 bp, Artificial Sequence
  ENSG00000243701_40 (sequence is synthesized)
gatatcttcatgactagtttgccagggatagtccccatgtacactttgttgtatcgttgacctgttcagtttagcatttgctcagggatttccatttttaacctagtgctattagcaaca

SEQ ID NO: 947647 - DNA, 120 bp, Artificial Sequence
  ENSG00000243701_41 (sequence is synthesized)
tgtgttaaacatgctaagatgggtctggtgaactttgacttttcgagcttcagtctggtctcagcaaggagtaactgagattttgtgcagtgagcagagttccgactttaacacatggtt

SEQ ID NO: 947648 - DNA, 120 bp, Artificial Sequence
  ENSG00000243701_42 (sequence is synthesized)
aaatctgattgacttccaaccctctctaaacacaaagtaactaacagcaacttcccaagtacattgctacaagctgaatatttatgttccctccaacattcagatgctgaactccttacc

SEQ ID NO: 947649 - DNA, 120 bp, Artificial Sequence
  ENSG00000243701_43 (sequence is synthesized)
ccagtgtgagggtatttggaggtgggacctttgggagattcggtcttcataaatgggattagtgcccttataaaagaaatcacagagagcttcctctctccttctaccatgtaaggatgc

SEQ ID NO: 947650 - DNA, 120 bp, Artificial Sequence
  ENSG00000243701_44 (sequence is synthesized)
gatgagagtggatatatttgccttgttcctgattttagatgataaacattttgtctttcactttagatatgatgttagttctaggggctttttgaagatgagcattattatgttgcaaag

SEQ ID NO: 947651 - DNA, 120 bp, Artificial Sequence
  ENSG00000243701_45 (sequence is synthesized)
gttccatcctccttctagtttgtgaggaaatttttatcttaaatggacattgaattttatcaaatgccttccctgcgtctattgatatgaccacatggtttttcttaagtctattagtat

SEQ ID NO: 947652 - DNA, 120 bp, Artificial Sequence
  ENSG00000243701_46 (sequence is synthesized)
ccatttttctgtatggttctatgagtgtaacacatgcacagattcttgtaagcttcatcacaaataggttatagaacaattccacaccttccccaaaatgtctcttttcctgctcagtag

SEQ ID NO: 947653 - DNA, 120 bp, Artificial Sequence
  ENSG00000243701_47 (sequence is synthesized)
atagtcaaactctcccctcaggcctaagccttgcaaccactgatcttctttccctctatttttgccgtttttagaatgtcatacatatttagccttttaagatttacttctttaacttag

SEQ ID NO: 947654 - DNA, 120 bp, Artificial Sequence
  ENSG00000243701_48 (sequence is synthesized)
taaatgcatttgagattcaatcatgttgttgcatgtaccaataatttatttctttttattgctgagaagtatttcatgggttgtttatccatttacccactgaagaacttttagtctgtt

SEQ ID NO: 947655 - DNA, 120 bp, Artificial Sequence
  ENSG00000243701_49 (sequence is synthesized)
tttgggcaatatgaataatgtggttctgttataaacattcatgtccaggtttttgtgtgaatataagtttttatttctctacagttaatacctaggaatcagattcctgggttatatgat

SEQ ID NO: 947656 - DNA, 120 bp, Artificial Sequence
  ENSG00000243701_50 (sequence is synthesized)
aagtgtatgtttaactgccaaacatttctaaagtagctatttcattttgcatttccaccagcaatttataggagtttcaattgctccacatatttgccagcattgatattgtcattaaga

SEQ ID NO: 947657 - DNA, 120 bp, Artificial Sequence
  ENSG00000243701_51 (sequence is synthesized)
aaagtcattctaataggtgggtggtggtatctcattttggttttcatttggagttccctaatgactaatgatgttgagcatatttgatgcacttatttgacaatcatattttttctttga

SEQ ID NO: 947658 - DNA, 120 bp, Artificial Sequence
  ENSG00000243701_52 (sequence is synthesized)
taaagtgtctctttaaatcttttgacttttttttcaattgggttgttttattattgttgagttttgagaattctttgaatattctgaactcaagttctttgttggatatatgattttcaa

SEQ ID NO: 947659 - DNA, 120 bp, Artificial Sequence
  ENSG00000243701_53 (sequence is synthesized)
attatttcctccctatctgtggcttttcactctcttaaaaaagaacacagggcaaatgttttaaatttttatgaggttcaatatattgatttttcttttatgactcttgcttttggtgta

SEQ ID NO: 947660 - DNA, 120 bp, Artificial Sequence
  ENSG00000243701_54 (sequence is synthesized)
atatctaagaactctttgcctaacctgaggtcacaatgattttctcctgttttcttttaaaatttttatatatttaccttttatttttatgagttaaattttagtacatgatgtcaggta

SEQ ID NO: 947661 - DNA, 120 bp, Artificial Sequence
  ENSG00000243701_55 (sequence is synthesized)
agagtggatgatcattttattggcatatgaatgtccaattgttctagtaccatttgtcaaggctatacttttcccattgaattgcctttgcacctctataaaaaattaattgaccatatg

SEQ ID NO: 947662 - DNA, 120 bp, Artificial Sequence
  ENSG00000243701_56 (sequence is synthesized)
gtaagtaaaatgtgagtttatgtctagaatccagatactgatccactggtactgttctattgatccttttgccaataccacaagatcttgacaactctgaccttatagtgaatcttaaaa

SEQ ID NO: 947663 - DNA, 120 bp, Artificial Sequence
  ENSG00000243701_57 (sequence is synthesized)
ctgggtagtgtgagttttccaactttgttttcatacaaaataattttggccattctagtttctttgcactttcatgtaaattttagaaagagtttatctatatccaccaaaaaatcttcc

SEQ ID NO: 947664 - DNA, 120 bp, Artificial Sequence
  ENSG00000243701_58 (sequence is synthesized)
tgggattttaaatgggagtacattaaatctataggtaaagttggagagaattggcattttgccaatgttgagtttttcaactataaatacactgtatttctacatttattgggattttcg

SEQ ID NO: 947665 - DNA, 120 bp, Artificial Sequence
  ENSG00000243701_59 (sequence is synthesized)
ttgatattgttcatcagtgtttagagacttctagcagatagatcctaaaaatattttgttagattatacctaggtaaattttcagtcttttgaaaaatgatcctgattttaaaactttga

SEQ ID NO: 947666 - DNA, 120 bp, Artificial Sequence
  ENSG00000243701_60 (sequence is synthesized)
tttctagttgttccttgctagtgaattagttcttggatttttaaaattaattctttaggattttctgtgtaaacaatcatgctctctgttaatatgtattattttatttcttcttttctg

SEQ ID NO: 947667 - DNA, 120 bp, Artificial Sequence
  ENSG00000243701_61 (sequence is synthesized)
cccagcctccagaactacgagaaatacatgtctgctgtttataagttgcccagattttgatatgttgttattgtagcctgaacaaactaagacagacatcatgcaggactcagtaacaaa

SEQ ID NO: 947668 - DNA, 120 bp, Artificial Sequence
  ENSG00000243701_62 (sequence is synthesized)
aggaaatgcacacaaacgctgtcttggtgtttgctgccctgtcagcttactggtggcccattcagtggagcatggccgatgcacaggttcttaccacaggcctcgccacagctaacaaga

SEQ ID NO: 947669 - DNA, 120 bp, Artificial Sequence
  ENSG00000243701_63 (sequence is synthesized)
tacctgaaactgtcaacttgccagttggtggagtctttgagaaatagggaaaagtatagggttaattaagatgagatgtgcaggggaaataaagacagagatgtcctaacccataggtaa

SEQ ID NO: 947670 - DNA, 120 bp, Artificial Sequence
  ENSG00000243701_64 (sequence is synthesized)
tggcagaaatactacatagaaagtctagatccttgggtcaccatttggaagagagctgcctgaccaggaacatatgtaattgactctgcctacgtggaaaataaatttatactataataa

SEQ ID NO: 947671 - DNA, 120 bp, Artificial Sequence
  ENSG00000243701_65 (sequence is synthesized)
cattattgtgtaagccaattccttataataaataagggtttatttattgataaatccttataggttgattataaatccttattaattgattgatagagccataggttttattgatcctgt

SEQ ID NO: 947672 - DNA, 120 bp, Artificial Sequence
  ENSG00000243701_66 (sequence is synthesized)
ttctctggagaaccctgactaatacagaaggagagagggaagaaaggcgggttgagtagcagaaagcttaggctgtagcacaattccgataaagtttaaggtcagctgatgaagaacact

SEQ ID NO: 947673 - DNA, 120 bp, Artificial Sequence
  ENSG00000243701_67 (sequence is synthesized)
caaaccaaagtcgcccattggaggagccccctacctcacaggaataggcctgcattattagtataccttcttcattcagttattgttattcttatggaaacaacccatgggaaatgtagc

SEQ ID NO: 947674 - DNA, 120 bp, Artificial Sequence
  ENSG00000243701_68 (sequence is synthesized)
cttggcatgactgtatcaatggattcagagagcagtagcggggacccccccagtcaattacgttccacagcaagagatctcagtggtgcatatccactgctggctcagtccaccccttgg

SEQ ID NO: 947675 - DNA, 120 bp, Artificial Sequence
  ENSG00000243701_69 (sequence is synthesized)
gctgcacagctctattcaggcctagctgccaggaagattactaggtatcattgtcaactcaggctctgtgcccagtaaacctggaaatgtctggatattcttccttgccagcatatagtc

SEQ ID NO: 947676 - DNA, 120 bp, Artificial Sequence
  ENSG00000243701_70 (sequence is synthesized)
ataaatctatttggggaagaacttgccatttcatcaaagtctgtacatgtatagcagggttcttcctcctagtgacctgtgacctagtaacccagccacctatgggttcttccatctgtg

SEQ ID NO: 947677 - DNA, 120 bp, Artificial Sequence
  ENSG00000243701_71 (sequence is synthesized)
gcttccttacctgaaaagtgcttcaggtctaggaactgagaaagggattgtgatgtgtcattggagccagtgcggttccattcgtgccttatttggttataggcgttaagcagcattctt

SEQ ID NO: 947678 - DNA, 120 bp, Artificial Sequence
  ENSG00000243701_72 (sequence is synthesized)
gttagatgcccatctattttgcctataggggtgttactttcaattaattatctcctaaacaccctgtgaatcaaacccccttaactacccctccaatttcaccagttgttatagtaatta

SEQ ID NO: 947679 - DNA, 120 bp, Artificial Sequence
  ENSG00000243701_73 (sequence is synthesized)
tggcctcttgacttttggtaattaagcactagtcctccagagccctctattacttgagggtccattacccctgaatcatattaacaatcccagctctgtgaccacctcatttaccatcag

SEQ ID NO: 947680 - DNA, 120 bp, Artificial Sequence
  ENSG00000243701_74 (sequence is synthesized)
ccctggtctaaagagtaaagccactactgcacttagtgatactggtaccttctcacaggctcattcttggtggccttagtgaattgtcactatttcatgacatattcatcacagtatatc

SEQ ID NO: 947681 - DNA, 120 bp, Artificial Sequence
  ENSG00000243701_75 (sequence is synthesized)
catcacatattcattcatctgacccttatgaaggtgtgatggttaatttcatcacagtacatacatgccattgtatagcaggtccttaactaatatagcaacaccaacgttctcaggcag

SEQ ID NO: 947682 - DNA, 120 bp, Artificial Sequence
  ENSG00000243701_76 (sequence is synthesized)
aaccaatagaccctgttgaagggcaggcaagcccagagcaaaccatctatatgcagttcttttaacagcctgcaaggcactgtaagattagggagacgtttatcgaattatgttctgtgg

SEQ ID NO: 947683 - DNA, 120 bp, Artificial Sequence
  ENSG00000243701_77 (sequence is synthesized)
aaaactagttccataggatatgaactgatgtcaggagaaaaattaaattagaaatttgcttcagtgccagattctcaaagccattcgtatgtgaatgtttagtgcaactctccaaaagag

SEQ ID NO: 947684 - DNA, 120 bp, Artificial Sequence
  ENSG00000243701_78 (sequence is synthesized)
atgatttgatgtgttacatgtggcagtagtatgatgtgcagcccagatcccccttcaaagaacggcttgctccccacttgctgggtgtgatgttagcaggcagcctgcagctgtcagccc

SEQ ID NO: 947685 - DNA, 120 bp, Artificial Sequence
  ENSG00000243701_79 (sequence is synthesized)
tcttcaggaattggcatagctgtagaaaaccacttcacctaaggtcacacttttttgtggagtggcccatagccaaggattgatcagtgtggagatacaaagttgttctcttgcccatct

SEQ ID NO: 947686 - DNA, 120 bp, Artificial Sequence
  ENSG00000243701_80 (sequence is synthesized)
gaggacatctccgagggccgttttaactccagagctccctgtggggttggccaaggctgtcattggacctacattataactcattttctcccaattccgcttctctctctctttgaacaa

SEQ ID NO: 947687 - DNA, 120 bp, Artificial Sequence
  ENSG00000243701_81 (sequence is synthesized)
atgtttggcaaaaggcacttcttaataaatatcctgcaattaaagtatatctcagaatctgcatcctggagaatactgtctgagacaccccactttctaattttgtttgcccatcaaagc

SEQ ID NO: 947688 - DNA, 120 bp, Artificial Sequence
  ENSG00000243701_82 (sequence is synthesized)
tgagacaccccactttctaattttgtttgcccatcaaagcccattccccgccccccttttttttttgacagaggcttcttctttcacctggaagggagtgcagtggtgcaatctcggctc

SEQ ID NO: 947689 - DNA, 72 bp, Artificial Sequence
  ENSG00000243701_83 (sequence is synthesized)
tctaactttttgtatttttagtgtagatgggggtttcaccatgttagtgaggctagtctcaaattcctgacc

SEQ ID NO: 947690 - DNA, 120 bp, Artificial Sequence
  ENSG00000243701_84 (sequence is synthesized)
ttgataattaagggggcattttcttgaggcggcagatgaggagggaggcttactatttttaatcccctcagccccaggacatgataatcagaggagatcatgtccaatcttgaatcaatt

SEQ ID NO: 947691 - DNA, 120 bp, Artificial Sequence
  ENSG00000243701_85 (sequence is synthesized)
ccctgttcaaaaagaggtgctaataccccagggaccagactctgaaaataccatgaaaatactctgaaaataccgtgctggtcattcctgagtccctgttctatgccctacaacatatta

SEQ ID NO: 947692 - DNA, 120 bp, Artificial Sequence
  ENSG00000243701_86 (sequence is synthesized)
tttgggcctggaactgtctctgtagcgtattcgtctttgttttgaaaatgtaaaaaccactcttagctgctggccttacaaaaatagaatcatgaggactgtgaagattagagcctaatc

SEQ ID NO: 947693 - DNA, 120 bp, Artificial Sequence
  ENSG00000243701_87 (sequence is synthesized)
actaattcacccagcacagaggctagagcgccagtgagtcctccgccccttcccaggcccgaccatagttttgcagttaggacccaggttttgtgaggactgggacccacccaggtttag

SEQ ID NO: 947694 - DNA, 120 bp, Artificial Sequence
  ENSG00000243701_88 (sequence is synthesized)
ttcacagtctcttgaatccctccctgcacctgcacctctgctcctccccctaggccggtggcccttggtgagtttctggcagtctcctaggccaccaggaaacactccgaccaactgcca

SEQ ID NO: 947695 - DNA, 120 bp, Artificial Sequence
  ENSG00000243701_89 (sequence is synthesized)
cgccctcctttgctccaaaatgacaagctcttttcatctgggagcaaaagctgaagtccccacatttgaactaaattagtttagtgtaaaagtagtacaagattatctcagacaattgta

SEQ ID NO: 947696 - DNA, 120 bp, Artificial Sequence
  ENSG00000243701_90 (sequence is synthesized)
ttttaatagtatttttttctagtgataaatgtaatatatgtctactatggtcatttggaaaattctgagacgtatagagcagaaaagaaattctccataaccctaacccacaaaaaataa

SEQ ID NO: 947697 - DNA, 120 bp, Artificial Sequence
  ENSG00000243701_91 (sequence is synthesized)
aagaacctgggttatgcccccaaattgaagaaagaacaacaggaacgagggcccctgtggggacagcgccagaaacaagaattcaaacattgtcagccctgtctgctttgtctctctctg

SEQ ID NO: 947698 - DNA, 120 bp, Artificial Sequence
  ENSG00000243701_92 (sequence is synthesized)
tttgccctattttattcatcaccgcataatgccactgctctcagttttttcatgtggcagggaacatcccacattttcacagctcctgaacacatagaaaagacacattttctctcccag

SEQ ID NO: 947699 - DNA, 120 bp, Artificial Sequence
  ENSG00000243701_93 (sequence is synthesized)
cttctgattagaactccctagagaaggatgctggccaacctgctctagacccctggctgcccctggccaggccacagaaaccactgtgattggctcagtctggctggttatctacttctg

SEQ ID NO: 947700 - DNA, 120 bp, Artificial Sequence
  ENSG00000243701_94 (sequence is synthesized)
tgaccagggcattgggtgtgtgattatgggattgtctgcccctggcaaaaccacagggcacttcccccaaaggagcagagtggcagggtacagcaacagaaccacaatcattttggcttc

SEQ ID NO: 947701 - DNA, 120 bp, Artificial Sequence
  ENSG00000243701_95 (sequence is synthesized)
ggaatagctctctttgctatcagccccaggaaagttatttatcccattcataaatgagaaaacataataaaacacaaattaagacacacacacagtggaaatagatggagtcaaatcata

SEQ ID NO: 947702 - DNA, 120 bp, Artificial Sequence
  ENSG00000243701_96 (sequence is synthesized)
ttcgtgacattcaaacaatatcacttttgaagattttaataaatataccttccttagcaatctgctactgatatagttagattttcagaaattttgttttaggaaaaattgagaatttca

SEQ ID NO: 947703 - DNA, 120 bp, Artificial Sequence
  ENSG00000243701_97 (sequence is synthesized)
gaccttaaaatggattaatcaaatactcacttttggaggggtcagggaagataggagaaaatttccaatacattgttcagcagtctggggacgtgttagtcaatatctgtagtgactcag

SEQ ID NO: 947704 - DNA, 120 bp, Artificial Sequence
  ENSG00000243701_98 (sequence is synthesized)
aatacagaagtgaggtggtgttttgagtatgctttatctctgtgcacaatggttccccttcttacaggttctgtttccagagaacaggaaatattctgtgctttctagattaactcacac

SEQ ID NO: 947705 - DNA, 120 bp, Artificial Sequence
  ENSG00000243701_99 (sequence is synthesized)
atgctgtcattggttgtgttttgttttgtttccagtaaaagaaacttacttagctgagttcgggtctctgacaaatgatcagtagctatttggaagtgcctaatggtctaacatctaaaa

SEQ ID NO: 947706 - DNA, 120 bp, Artificial Sequence
  ENSG00000243701_100 (sequence is synthesized)
ctttgtattatgcataaaatttttatttttacttaactgggtggttcaacgggacagataaaaattgagacatcattatgagccaggaaaaatatttacttttttttctgtgtatttctt

SEQ ID NO: 947707 - DNA, 120 bp, Artificial Sequence
  ENSG00000243701_101 (sequence is synthesized)
gcaatctaaatgagatcaagttatttatgagaaaagagaaatcctaataggaaccaaaggcaaagcttattcaaaaacactccaggctttagaaaattaagtcaaattagatgaattatt

SEQ ID NO: 947708 - DNA, 120 bp, Artificial Sequence
  ENSG00000243701_102 (sequence is synthesized)
aaacttcatgcatgcaaaagtaaaaaagcaaatattaaataaaagtgtcttaactaattgagtataaaccaggttgaaaccaaattttagggaaaggctttgatttgatgtaatcataaa

SEQ ID NO: 947709 - DNA, 88 bp, Artificial Sequence
  ENSG00000243701_103 (sequence is synthesized)
caaattttagggaaaggctttgatttgatgtaatcataaacagtcatgtaatcaaagtatcaccaaaagctcacaaatcaccactata

SEQ ID NO: 947710 - DNA, 120 bp, Artificial Sequence
  ENSG00000243701_104 (sequence is synthesized)
ttacatatacttgagttttttaataagaataatgctacttgtctagcccagggttaatacagatatttttctccctaacataaattagaataatttgataacatttgggttttatgaata

SEQ ID NO: 947711 - DNA, 120 bp, Artificial Sequence
  ENSG00000243701_105 (sequence is synthesized)
atacagagatgaaaccacctcacataatttagtattaaatcacttaatccataaacatttgtacctgatttctcataggaaggtaatgattcaaaataacctctcaggcaaagttaaaac

SEQ ID NO: 947712 - DNA, 120 bp, Artificial Sequence
  ENSG00000243701_106 (sequence is synthesized)
tgttattttggaagcatagggatattctgatgatgagccatagtcagataatatacaggggtctgggatactaaattctgttcttgtattttagaaaggccagaacaggaagcagtgtga

SEQ ID NO: 947713 - DNA, 120 bp, Artificial Sequence
  ENSG00000243701_107 (sequence is synthesized)
tgtaaaggaaataacactcaactaggagataggacgtttggactttgatgccttctacaaccaaatagtcagatgaccttggatgagccacttaaatgctttgtgacatagttacttctg

SEQ ID NO: 947714 - DNA, 120 bp, Artificial Sequence
  ENSG00000243701_108 (sequence is synthesized)
taaaataagaaggtttgagagatgatctcaaagtccattccagctctgtaattccacgactccttacatgtaaatgtgattagcatgctgcttagaccatggaaaataattttaaaatgc

SEQ ID NO: 947715 - DNA, 120 bp, Artificial Sequence
  ENSG00000243701_109 (sequence is synthesized)
tactatatcttctttctttccttttctttcttttttatcttaatcctttttatgaatccaaccacattcccaatccatattgatttctgtatctccaatacacatctagtacagaagctg

SEQ ID NO: 947716 - DNA, 120 bp, Artificial Sequence
  ENSG00000243701_110 (sequence is synthesized)
gcaaaaactgttatctattaaaagggtagtatctgttgtcaaggaactcagtctaacagggcaaatgtgtaagtaaattgcattactgtgattgaagtccaaaaacattagtaatttatg

SEQ ID NO: 947717 - DNA, 120 bp, Artificial Sequence
  ENSG00000243701_111 (sequence is synthesized)
ttccttacaaaacagtacatcaaagagactgatgagctattctttaaggtaggccagagacaattaagcagagaacatctcaatatctgaaatatattttttaaatgattaggagctagt

SEQ ID NO: 947718 - DNA, 120 bp, Artificial Sequence
  ENSG00000243701_112 (sequence is synthesized)
agatggtgtggaatgtgaagggtcctggaggtctgccagagtggatctccatcctgcaggggctgaggcacccagctgctaccagtactaccaccatgtcacgtggaccttcttttttct

SEQ ID NO: 947719 - DNA, 120 bp, Artificial Sequence
  ENSG00000243701_113 (sequence is synthesized)
tctaaatctcaaccatattatctatatggctgtgcaaggaagatcaataaggaggagctctaacaatttccattggttttctgcaatccaaaccgagatgatccaggcttaaacaagacg

SEQ ID NO: 947720 - DNA, 120 bp, Artificial Sequence
  ENSG00000243701_114 (sequence is synthesized)
acacaagcatttaaaataatggctctaaaaatagacatctctagagtctagaaagatacaaaggaagaagtaactttgcctgggtgggtaaacaaaggcagcacagagccctataaaatc

SEQ ID NO: 947721 - DNA, 120 bp, Artificial Sequence
  ENSG00000203434_0 (sequence is synthesized)
gcatgacctctgctaaaaaaagtaggatgaatcctaaggaagttaatagctgaaggctgcagctactagattccagagagtggcctggggcacaagatactcaaccagagcagacagtgt

SEQ ID NO: 947722 - DNA, 120 bp, Artificial Sequence
  ENSG00000203434_1 (sequence is synthesized)
tcaaccagagcagacagtgtcagcctctgtcatggaaagcacagagcttcctatcctacatgattgtctattgtaatgccaaattacaagcaatggagtctcactgtgttgcccaggctg

SEQ ID NO: 947723 - DNA, 62 bp, Artificial Sequence
  ENSG00000203434_2 (sequence is synthesized)
attacaggcgcacgccaccacgcccctaactccagacttcaggtgatctgcccaccttggcc

SEQ ID NO: 947724 - DNA, 120 bp, Artificial Sequence
  ENSG00000203434_3 (sequence is synthesized)
gccaccatgcccagccaatttccatatattttttatactgggatttcagagagtaatttcctcttcatgtgtaaccagttatgtgaattaaaacagattcagccttcttttacggttgtg

SEQ ID NO: 947725 - DNA, 120 bp, Artificial Sequence
  ENSG00000237480_0 (sequence is synthesized)
catcttgtgctgttttatgttctgagaaggattgattaccacaaagacagatctatagagaatgtgagtggaaactatacgagctgctaacgggacaaggcatttaagaatcatccgagt

SEQ ID NO: 947726 - DNA, 120 bp, Artificial Sequence
  ENSG00000237480_1 (sequence is synthesized)
tctgctcttcttgctggctggagctaagaattcaagaacaaacaccagcaaagagattcaatacaaatatccaattttgagataagggatggataaccatagtgcatgccctcagaactt

SEQ ID NO: 947727 - DNA, 120 bp, Artificial Sequence
  ENSG00000237480_2 (sequence is synthesized)
ttaatctttatgaaacatttgaagacctcgagaaaggacaatacccttggttctatacagatgctgtcatgaattcatcttatatcagtttcataatccatgtagtcaaataccattgag

SEQ ID NO: 947728 - DNA, 120 bp, Artificial Sequence
  ENSG00000237480_3 (sequence is synthesized)
gatagttgtgtggtcactatgttgtaatatcagacaaagatgacagtgaatctgcaaaagaagaaagcattctgagaaccactgattccagagcaggtgaaggaaatttgaaaacgtatg

SEQ ID NO: 947729 - DNA, 120 bp, Artificial Sequence
  ENSG00000237480_4 (sequence is synthesized)
aagaaagagacaaacattggagttatgctgccaacaaccaaggaacatctggggctacaaaaagctggaagaggcaaggatggacctttctctacaagtttcagaaggagcacggcccag

SEQ ID NO: 947730 - DNA, 120 bp, Artificial Sequence
  ENSG00000237480_5 (sequence is synthesized)
ttctgttgttgaaagccactccatttgtggtattttgttatggccctagaaaactaatcaatagatattaaggtgagaaaaatagtttcattgcaaaataatttctccacagcaagttct

SEQ ID NO: 947731 - DNA, 120 bp, Artificial Sequence
  ENSG00000237480_6 (sequence is synthesized)
aagagtgaacatacttttaaatgcagctaaataaaaatgaagaatgtctcagtgactttactgtattaatggctatcttgatgctcctagaggagaattgtaacataaaatattttcatt

SEQ ID NO: 947732 - DNA, 120 bp, Artificial Sequence
  ENSG00000237480_7 (sequence is synthesized)
tcttaattagttttgtttgttagtttttgtttttttagatacagagcactctcctgttgccccagatggaaggtaatggtgcaatcatgcgcaatcacacctcactgcagcctcaacttt

SEQ ID NO: 947733 - DNA, 120 bp, Artificial Sequence
  ENSG00000237480_8 (sequence is synthesized)
tgcctcagcctcccatgtagctgggaacacagatttgcaccacagcaccaggctaatataaaaatatttgttagtggaacaaaacattttccatactggtcatgtcacataactactact

SEQ ID NO: 947734 - DNA, 120 bp, Artificial Sequence
  ENSG00000237480_9 (sequence is synthesized)
catgtcacataactactactcaatggaagctaatttgggaaatgcagaatgtcaaaattaaaataattaccataatacctagaaaattcaaagcaacttcttattttcctccaggcaaag

SEQ ID NO: 947735 - DNA, 120 bp, Artificial Sequence
  ENSG00000237480_10 (sequence is synthesized)
ggggtccttcagcagcagtgcaatgaggagcatgcacaggagagattctattttccttggatggctttcttgagccttggaaatctggctcaccaggaattctaggcttctgttgtccct

SEQ ID NO: 947736 - DNA, 120 bp, Artificial Sequence
  ENSG00000237480_11 (sequence is synthesized)
tgcttcctatctccagctgcaattataaagatgcacacacacaaaagagaaagaggagcaaaaagagtgaagaaaacatgtccatttatcagaaaataaatatacaagtacaatagaaga

SEQ ID NO: 947737 - DNA, 120 bp, Artificial Sequence
  ENSG00000237480_12 (sequence is synthesized)
aaagggggtagaaaacattttgaagatttagaaagatccttcgagtcgtatctcagaaaagagagaaatggcttatccaatatttaagcagagacaaatggcatatgaagaggacttatc

SEQ ID NO: 947738 - DNA, 120 bp, Artificial Sequence
  ENSG00000237480_13 (sequence is synthesized)
agggcagtggagagaattggtgatgaaaattggtaggggaccaaaagcacaatgatgcctttctttttactcacatttgatgacatccatagtgagaaacagcagttccactgtccaaca

SEQ ID NO: 947739 - DNA, 120 bp, Artificial Sequence
  ENSG00000237480_14 (sequence is synthesized)
ggataaccatagtgtgagttgagccacagaaatgtggatgaattcaataaatatttggatgattgtttaacattacttcataattgatgggaataaaaaagtataacaaagagaagaaat

SEQ ID NO: 947740 - DNA, 120 bp, Artificial Sequence
  ENSG00000237480_15 (sequence is synthesized)
caaggctgcagcatgacaaaaggtttatattttaacttcaagaaatcacacatactctgttttttcctctactgaaagattagactaacaatccaatttacctggacaaaataagcttct

SEQ ID NO: 947741 - DNA, 120 bp, Artificial Sequence
  ENSG00000237480_16 (sequence is synthesized)
gggagattctgaaagtttgttatcttccttatccttgcctttttgtatttgagaattatatcaccattctcaccattctaggatgttttcactaataatttttgagatttaatttataaa

SEQ ID NO: 947742 - DNA, 120 bp, Artificial Sequence
  ENSG00000237480_17 (sequence is synthesized)
tatcaagcttcctggttcttgaaacctacccatagttaacaactgattcctagttctagggttaacaactgattcctagtttcagggttttcctgaatattatctttatgccagctttat

SEQ ID NO: 947743 - DNA, 120 bp, Artificial Sequence
  ENSG00000237480_18 (sequence is synthesized)
agcattttggaaggctcatttatcccacattatgatattctcctgctttcaatttctctgtgtcttctcgtttctcttaaggctaagctggacattgcaaacaggatagtctcttctatc

SEQ ID NO: 947744 - DNA, 120 bp, Artificial Sequence
  ENSG00000237480_19 (sequence is synthesized)
ttgcccagccttttctcctatcccatttttgcattctctctattctctgatcacagaattgttttcatttctgaaggtacaactagtgtcacatcttatgcacatgctgttccctttact

SEQ ID NO: 947745 - DNA, 120 bp, Artificial Sequence
  ENSG00000237480_20 (sequence is synthesized)
aggattatacttttcccttaaattatctaccctttgcttgctttattctgacttaacttcagattatggctcaaatgtatttcctcatagaattcttccttgacacctcataataaataa

SEQ ID NO: 947746 - DNA, 120 bp, Artificial Sequence
  ENSG00000237480_21 (sequence is synthesized)
aaagctccgttctttcaagtgattttttcttaaaatttccctttgtgttctgaatttgcctataaactattgctgaaactatctcagacagtatatttttaatgatttaattcttagaga

SEQ ID NO: 947747 - DNA, 120 bp, Artificial Sequence
  ENSG00000237480_22 (sequence is synthesized)
atctcctctgggtgaacgctaggggcagggattgttctatagatggcaatggtaataggcaaagaggtaataatttgagtgttagataaaaatccaggtcaaagctgctttactactcta

SEQ ID NO: 947748 - DNA, 120 bp, Artificial Sequence
  ENSG00000237480_23 (sequence is synthesized)
tctatttcaaatcatctttaaaagctatcattagatattgtctttactgattaatattaaaagactactagcagtattaaattatacaacaattagtactttctgtaagcaatattacca

SEQ ID NO: 947749 - DNA, 120 bp, Artificial Sequence
  ENSG00000237480_24 (sequence is synthesized)
gaatagggaaaactagtatttagtttacatagagagtttggagtatatccctatgtttctcagaaaacatcctattgttttgtgtatgttctgtataactcgtttgttttttaaaaaatc

SEQ ID NO: 947750 - DNA, 120 bp, Artificial Sequence
  ENSG00000237480_25 (sequence is synthesized)
ataccaagagatagaaatttttagtgcctgccagtgtgtagcatttacttttctaaaaactaaaaattgtatgtgtttatggtataaaacgtattttgacatatatatacattgcagaat

SEQ ID NO: 947751 - DNA, 120 bp, Artificial Sequence
  ENSG00000237480_26 (sequence is synthesized)
acttttaaatacagaatacattgttcttaactgtagtcaccttgctgggtctcttgaatttattctttctgtccaactgaaattttgtatcctctgaccaacagagaaatagaaatacta

SEQ ID NO: 947752 - DNA, 77 bp, Artificial Sequence
  ENSG00000237480_27 (sequence is synthesized)
aattttgtatcctctgaccaacagagaaatagaaatactaaaaggatgaatgtatgtatcacacatcattcatcagg

SEQ ID NO: 947753 - DNA, 120 bp, Artificial Sequence
  ENSG00000237480_28 (sequence is synthesized)
aaagtataataataataatttaaaaaaatcagtttatcaatatccacaaaataacttgctggtattttgattgggattgcattgaatttatagattaattttggaagaactgacatcttg

SEQ ID NO: 947754 - DNA, 120 bp, Artificial Sequence
  ENSG00000237480_29 (sequence is synthesized)
attgaatttatagattaattttggaagaactgacatcttgacaatattgagtcttcctacccacaaacatggaacatctttacttagttcttttgtgatgtctttcatcagttttgtact

SEQ ID NO: 947755 - DNA, 120 bp, Artificial Sequence
  ENSG00000237480_30 (sequence is synthesized)
ttttctcatatggatcttgtacatgttgtcttaaatttatacctaaggatttcatgggggggttaatgtaaataatattgtgtttttaatttcaaattccacttgttcatttctagtata

SEQ ID NO: 947756 - DNA, 120 bp, Artificial Sequence
  ENSG00000237480_31 (sequence is synthesized)
tagaaaatgattgactttttttgtattaaccttggatcctacagcactgctataatcacttattagttcttgccgttgtctttactttttaatatgcacaaaagtgcacattaaatggaa

SEQ ID NO: 947757 - DNA, 120 bp, Artificial Sequence
  ENSG00000237480_32 (sequence is synthesized)
gtgactctcatctttaaaaagaaaatggtactatttgaaaaatgtctaaccattgctgttaatcttgaatctgctgcactcctaatatcacatattttgtcatctttcaataattgcttg

SEQ ID NO: 947758 - DNA, 120 bp, Artificial Sequence
  ENSG00000237480_33 (sequence is synthesized)
tccttctggtgggttcctggtctcgctgacttcaacaatgaagccgcagaccttcccagtgagtgttaccgctcttaaagatggtctgtccagagtttgttccttcagatgtatctggag

SEQ ID NO: 947759 - DNA, 120 bp, Artificial Sequence
  ENSG00000237480_34 (sequence is synthesized)
tccagagtttgttccttcagatgtatctggagtttcttccttctggtgggtctgtggtctcgctgacttcaggagtaaagccacagaccttcacatctcactctgtggcccaggctggag

SEQ ID NO: 947760 - DNA, 120 bp, Artificial Sequence
  ENSG00000237480_35 (sequence is synthesized)
atctcagctcactgcaacctctgcctccttggctcaagcaattctcctgcctcaaccccctgaagtagctgggattacaggaaatatttggcaacattttcagacatctttgatcatcac

SEQ ID NO: 947761 - DNA, 120 bp, Artificial Sequence
  ENSG00000237480_36 (sequence is synthesized)
ggggtgggggctgtccacttggggcccctgatgagccgagattctcccacgaaccctcgggctctggggctcatctgcttgcacgggctctgaggacctgtccagggctggagccgggag

SEQ ID NO: 947762 - DNA, 120 bp, Artificial Sequence
  ENSG00000237480_37 (sequence is synthesized)
ctcatcatccgcatccgtgtagggccccccgctagccgtctgtgtagcgctcgccatcagtgtacgcgccgccctcgccttccgtctcctccagtagtcgctgttaacacggctgtcgca

SEQ ID NO: 947763 - DNA, 120 bp, Artificial Sequence
  ENSG00000237480_38 (sequence is synthesized)
tcagcagagctgtcggccaggccgcggtgagggttgtcctccaaggagccatccagcttatcttccgccgtccagatgggccgcgtctgctgctctcgaatgatagccttgaactcctgg

SEQ ID NO: 947764 - DNA, 120 bp, Artificial Sequence
  ENSG00000237480_39 (sequence is synthesized)
taccaggtgtcactcgtgccattcagagggatggtggctgtgaagaggtggctgctctgcttccgcagcttctgggcttgtgcgtagaggcggcgggtactgcggcaggaggcaggcgcc

SEQ ID NO: 947765 - DNA, 120 bp, Artificial Sequence
  ENSG00000237480_40 (sequence is synthesized)
agccaacttagctccttctaaattgtcctcatacatccagtgattttcagatcattttcattcaaagactgattgagaaaatctcagaagattaaagagaataaaggatctgacttgaaa

SEQ ID NO: 947766 - DNA, 120 bp, Artificial Sequence
  ENSG00000237480_41 (sequence is synthesized)
gacctcctagcatagtgactttaataataactagagaaattatataaaaagtaatagaaaaactatttaatgttataaaattacctttaatatgacgagagacatatctcctttatgtca

SEQ ID NO: 947767 - DNA, 80 bp, Artificial Sequence
  ENSG00000237480_42 (sequence is synthesized)
caaattacagatcattttcattcaaagactgattgagaaaatctcagaagattaaagagaataaaggatctgacttgaaa

SEQ ID NO: 947768 - DNA, 120 bp, Artificial Sequence
  ENSG00000237480_43 (sequence is synthesized)
gctatatttcgaaggatagatttttcaaaaatctttccaataattaataatcatgggatttagagttctaaaactatgtttctacccattatatgcatagagtaaaactattaaacaatt

SEQ ID NO: 947769 - DNA, 120 bp, Artificial Sequence
  ENSG00000237480_44 (sequence is synthesized)
gctagatgtctcatttatgctatgagtaatcagaatgttgagaaaataactttcactggatataatcataaagcaacattatttcctaaactgcattgggggagttctttcttgggtact

SEQ ID NO: 947770 - DNA, 120 bp, Artificial Sequence
  ENSG00000237480_45 (sequence is synthesized)
gcattgggggagttctttcttgggtactagatacaaacacgcagttccatgcctttgcagataattcttagattaaatacaaataatattaatccaggctgggcacagtggctcacgcct

SEQ ID NO: 947771 - DNA, 82 bp, Artificial Sequence
  ENSG00000237480_46 (sequence is synthesized)
ctccgagtagctggaattacaggtgcgccacaacacctgggcattggccagagtggtctcgaactcctgacctcaggtgata

SEQ ID NO: 947772 - DNA, 120 bp, Artificial Sequence
  ENSG00000237480_47 (sequence is synthesized)
gagccaccgagtctggccgttttttagattctttaaggtcgccacaaacattgaatcagcaaatactgaactactgttcctaagggaaatgcagggttaggatctttagagcctctagtc

SEQ ID NO: 947773 - DNA, 120 bp, Artificial Sequence
  ENSG00000237480_48 (sequence is synthesized)
atatattggtcaagtgaaacaccatttgtcttgtatagattcctttgccaagcgtccatgtaaaacaaaccactgtcatcagcattgaaaatctgctcttttataaaaccctttctttgt

SEQ ID NO: 947774 - DNA, 120 bp, Artificial Sequence
  ENSG00000237480_49 (sequence is synthesized)
atacatttcacaggtatttaaaaaattcttccacatcctcttgatctgcagaaacttcctcacctgcaagttaacatttttcatgccatatcaccttctgaaacatggaaagcagccagt

SEQ ID NO: 947775 - DNA, 120 bp, Artificial Sequence
  ENSG00000237480_50 (sequence is synthesized)
actagccagagtgtttaacatgacaaatttctttgcctttcagcctcacaacaattctgtccactatacttttttgaaatcagttgttgtctcatgaatccacagatgtagctgcttttc

SEQ ID NO: 947776 - DNA, 120 bp, Artificial Sequence
  ENSG00000237480_51 (sequence is synthesized)
catctttcatgtaccgtggtgttactttgacactttctggagcagccttacatgcagatccatgaatttcctcttccttttctgaatataaggcattgttgattcattaacattgaactc

SEQ ID NO: 947777 - DNA, 120 bp, Artificial Sequence
  ENSG00000237480_52 (sequence is synthesized)
gtggccaacaacactataattcatgggtgaacaatgcttatctaacaccagtattttctccataagtcacatcacatctttcttgcacttggaaacaccagacaccacatcagctttact

SEQ ID NO: 947778 - DNA, 120 bp, Artificial Sequence
  ENSG00000237480_53 (sequence is synthesized)
tgaagggtcatttaaagtggcaaagttgtgaagaaaaagcacaaaaaaatgcaaatatgtgatagcaaatagattttgaaaagcaaactttttattacacttcaaaagttgaagaagaag

SEQ ID NO: 947779 - DNA, 120 bp, Artificial Sequence
  ENSG00000237480_54 (sequence is synthesized)
acggagcactgtctcattcgacttgaactgggaacatgtgagttgggtgattcaattttttgtcagttctgcagatgtatggaaatgactgcaaatgcatcaagaatgtcacttttagag

SEQ ID NO: 947780 - DNA, 120 bp, Artificial Sequence
  ENSG00000237480_55 (sequence is synthesized)
gttcaaatacattttagcgagtaggcagatttgcatatacagattctgcacattataaggatcaactctattttgcttttcttttacaattttgggatattttataaaattttataaagt

SEQ ID NO: 947781 - DNA, 120 bp, Artificial Sequence
  ENSG00000237480_56 (sequence is synthesized)
aaggggaggaatagagccttctcagtcctttcctgggttttcacacactcctgcacatgatcatatccttctagactcccaggaatacgtcgagttcttccaagccaccatggatgtctc

SEQ ID NO: 947782 - DNA, 120 bp, Artificial Sequence
  ENSG00000237480_57 (sequence is synthesized)
atttgacagattttcctttaagtttttgccaagcttcttgtttgtccaactagtgttgcctcctcaggcagctgcagtgttaaggcaatgctgctgatttttctttctttctattttatt

SEQ ID NO: 947783 - DNA, 120 bp, Artificial Sequence
  ENSG00000237480_58 (sequence is synthesized)
ttttattttttttttttttggacaaaaccctgggtatagggcttttatcactaagtggactctgaggcggatcaaataaagacaagccctgggaatggaactttttcaaggacctggtaa

SEQ ID NO: 947784 - DNA, 120 bp, Artificial Sequence
  ENSG00000237480_59 (sequence is synthesized)
acaggtcaaatagtaacaattctcttgggatgtagctttttgagaagtttcaaacctattctgtatcctctagtcattgctaaactgtttattttcaaagcttgctggttgcatgactga

SEQ ID NO: 947785 - DNA, 120 bp, Artificial Sequence
  ENSG00000237480_60 (sequence is synthesized)
ttgctttaaagtctactaccctagagctgaagagaaaggaggggaatagaataagacaaaatgctcaaacttgcagttcttcccccagtttaatcattgtccttgagtaaatactcctca

SEQ ID NO: 947786 - DNA, 120 bp, Artificial Sequence
  ENSG00000237480_61 (sequence is synthesized)
tattatagcaaccatttagttaattaccaggactcaaaaatagttgatattgactatttgtgacagtgttctctttctttttagagatttttagatgtccttacactgccatttctaaaa

SEQ ID NO: 947787 - DNA, 120 bp, Artificial Sequence
  ENSG00000237480_62 (sequence is synthesized)
gtaaaatagagcttaacagaaaagatgaatcaatctgaaacgtataattaacaagcaaattttattttaaaaacccattaaatttatgctgagagatgataaatttaaatacaaaaataa

SEQ ID NO: 947788 - DNA, 80 bp, Artificial Sequence
  ENSG00000237480_63 (sequence is synthesized)
cgtagaggcggcgggtactgcggcaggaggcaggcgccagccaacttagctccttctaaattgtcctcatacatccagtg

SEQ ID NO: 947789 - DNA, 120 bp, Artificial Sequence
  ENSG00000237480_64 (sequence is synthesized)
agtctgaaaaatgaggagcttgtattctgtatgaggaggaaaaatgcagcccgtctttcccctgaggagaaagctttgaaattcaacgattctggaatttgaatcccagaatagcactta

SEQ ID NO: 947790 - DNA, 120 bp, Artificial Sequence
  ENSG00000237480_65 (sequence is synthesized)
ctacctgtctgacctttattgagttttttttttttacctatcccagcttcaatttctttaattgaaacccaaagttgatagtattgtttatcttataggtcacttgtgaagataaaatga

SEQ ID NO: 947791 - DNA, 120 bp, Artificial Sequence
  ENSG00000237480_66 (sequence is synthesized)
gataatgagcataaaattcctaaagtcttgaaaagtatgatacattttatccatctatcatctatctatctatcccccctttttaagtcactcttctgtatttctctctctctctcacac

SEQ ID NO: 947792 - DNA, 120 bp, Artificial Sequence
  ENSG00000237481_0 (sequence is synthesized)
tgtcacttcagttttcaaagcttttgcagtgctatttggattcatcccatatgggccccatcttgtggtctgaggcctgacagggctcacctgcaagctcggttctctgctgtctttgat

SEQ ID NO: 947793 - DNA, 120 bp, Artificial Sequence
  ENSG00000237481_1 (sequence is synthesized)
atggacttaggatcagctctacccataagcactgtgaacatgtgagtaggtggggaagggctagtgttcataaaaaactttgtggagtcactttcttaagctcttctctctctgctctct

SEQ ID NO: 947794 - DNA, 120 bp, Artificial Sequence
  ENSG00000237481_2 (sequence is synthesized)
tcctgtggcccaaaattgcccacttctgcaattaagccatatccttcagagaggaaaaaaagcgcatcagctcagccccgcgctcttggtgatgcagctgtacttggtggagatgtgcga

SEQ ID NO: 947795 - DNA, 120 bp, Artificial Sequence
  ENSG00000237481_3 (sequence is synthesized)
ggctgtccctcaggcttccgactcctgcaggctcccactggcagccagggggtgacctgggagcttcagcacgaaaaaatggggaaaaggagaggttgtcccaagaattaggaacatgat

SEQ ID NO: 947796 - DNA, 120 bp, Artificial Sequence
  ENSG00000237481_4 (sequence is synthesized)
tacaaccacattcatttctagaatgaaaagaaagaattaggaccatcagactgttaacaactatcaaattttcacaggttcaaaaggtaattgacactctttaaaaaagaaagaaaagaa

SEQ ID NO: 947797 - DNA, 120 bp, Artificial Sequence
  ENSG00000237484_0 (sequence is synthesized)
gtgactgtaggtttagatgaatggaaaatgaacttgccagttcacagctatgtccttcccaatttaggaggttaagggcaggaaaaacatgagaaactcttttgagaagctgcacaagct

SEQ ID NO: 947798 - DNA, 120 bp, Artificial Sequence
  ENSG00000237484_1 (sequence is synthesized)
gacatggaggatcaaggatttcaaaagctttgaatataaagaggtgtcagacttacatcagagcctgagacttgacatgcctatttttgcactcgctcatttttcaaatttcataggcat

SEQ ID NO: 947799 - DNA, 120 bp, Artificial Sequence
  ENSG00000237484_2 (sequence is synthesized)
tgctccctccaaatcaccgctcttctaattttatcctggagtgtgcatcccagaagacataagctgacacaattgggaactgaagttgcttgaaaaagctggtggtaagattagggatca

SEQ ID NO: 947800 - DNA, 120 bp, Artificial Sequence
  ENSG00000237484_3 (sequence is synthesized)
gcatcatatatcactatttctcaaagattatctggtctcttgatggcaaatctacaatattgaaacctttgaaagagaaattgtgttttgtgagttacatgactaccgtttgcatccaag

SEQ ID NO: 947801 - DNA, 120 bp, Artificial Sequence
  ENSG00000237484_4 (sequence is synthesized)
ctctgtagtcaagagaagaatgcagaaactacatgtccaagaatctctttccagactctagacagcttatacgtatttggacaaggcaacgtgatgaagaaataatataattgtaggatc

SEQ ID NO: 947802 - DNA, 120 bp, Artificial Sequence
  ENSG00000237484_5 (sequence is synthesized)
acctctgtccagtagctgttatccaacatctgcatacttagatttctggagaggtaggtaaactactgtattagaaaacactagaagtgcatgattgtatttttcatgtccaaagtctaa

SEQ ID NO: 947803 - DNA, 120 bp, Artificial Sequence
  ENSG00000237484_6 (sequence is synthesized)
cacattaaaagagaaaaggattcgaaaattatctactttgaaagttttaaacaaaagtgaattttcttggttaaatatcctatttaattgcctttctaaaaatagcctaaatgtccattg

SEQ ID NO: 947804 - DNA, 120 bp, Artificial Sequence
  ENSG00000237484_7 (sequence is synthesized)
tttgatatatgtggtgagatattttttaaagtacttaattataatgttttatttgatgagactagctatttggtatttttttaaatggaaagggggcaaacatacttaataaaatgcaaa

SEQ ID NO: 947805 - DNA, 120 bp, Artificial Sequence
  ENSG00000237484_8 (sequence is synthesized)
aatagtactggaaaaatattttaaatgattgctaagtattttagtgaatacctaattgcattaatttgctgagactgccataacaaaataagacacattaaatggcttgaacaacataaa

SEQ ID NO: 947806 - DNA, 120 bp, Artificial Sequence
  ENSG00000237484_9 (sequence is synthesized)
aaaaatcattttcaaatgttcactggcaaatctggataacagcaggctcctcccacgcatgcagaccctgaccacaaagcagacaaattctcctgtttcccaggctggagtgcagtggtg

SEQ ID NO: 947807 - DNA, 120 bp, Artificial Sequence
  ENSG00000237484_10 (sequence is synthesized)
ggctcaagcgatcctcctgcctccaccactggaataactgggactacaaactcacaccaccatgcctagttaatttctgtatctttttgagtagagatagtgttttgccatgttatccag

SEQ ID NO: 947808 - DNA, 120 bp, Artificial Sequence
  ENSG00000237484_11 (sequence is synthesized)
cggcctcccaaagtgctgggattgcaagcatgagccactgcactggctaattctttattttaatgttcatgttttcattaggcaatttcagtacacccaagtgtattttgagaagtgatt

SEQ ID NO: 947809 - DNA, 120 bp, Artificial Sequence
  ENSG00000237484_12 (sequence is synthesized)
ggcaatttcagtacacccaagtgtattttgagaagtgattcacttttaatctctcctagtttctttcaattatggccgcaaaattcattaacgttgtatgactgatttaaggaaatgctg

SEQ ID NO: 947810 - DNA, 120 bp, Artificial Sequence
  ENSG00000237484_13 (sequence is synthesized)
ttgcattagtgagtatctacttttataaacctaaaatagtttcttacctcatgtctccttacaatcatctgattatagacagtatcaattctatgaacttgcatacttccaaaaagaaaa

SEQ ID NO: 947811 - DNA, 120 bp, Artificial Sequence
  ENSG00000237484_14 (sequence is synthesized)
ataaagaggtgagaatttttattttatttttttactattattctggtctgttggttgagctctgaggttaacatcttacaacactttaaagtgaaactaaaacaaacacatcatttttaa

SEQ ID NO: 947812 - DNA, 120 bp, Artificial Sequence
  ENSG00000237484_15 (sequence is synthesized)
aattggccatatccggagcccagaaaaatattacaaatagtaacgtgtcctttcggacacctcataaaaatttagggaagagatatatggaaataccttttaaacacttggcaaatagaa

SEQ ID NO: 947813 - DNA, 120 bp, Artificial Sequence
  ENSG00000237484_16 (sequence is synthesized)
agagatatccatgaatgaccatgaaagtacagcaagtgattttcaagctgcaaacaaattttagcaagcaaatggaagaagaaagaggagagtggtggtgtgtgctttccctttaatggc

SEQ ID NO: 947814 - DNA, 120 bp, Artificial Sequence
  ENSG00000237484_17 (sequence is synthesized)
cccaattccatgtatacatggaagagaggcttattaaagtagccttcagttgctggacagagttccatccaaaactacagttaatagacaaattctcctgtttcccaggctggagtgcag

SEQ ID NO: 947815 - DNA, 120 bp, Artificial Sequence
  ENSG00000237484_18 (sequence is synthesized)
ggacagagttccatccaaaactacagttaataggtaagtcgagaacttacattaagtgataaatggcagtctctgccaaggaaaatattcttatccatgctcatggataagaagaatcaa

SEQ ID NO: 947816 - DNA, 88 bp, Artificial Sequence
  ENSG00000237484_19 (sequence is synthesized)
ttggtgctggtaccaaaacagatacatagaccaagggaacagaacagaggcctaagaaataacaccacacatctacaaccattgaaac

SEQ ID NO: 947817 - DNA, 120 bp, Artificial Sequence
  ENSG00000237484_20 (sequence is synthesized)
ggcctaagaaataacaccacacatctacaaccattgaaactttgactaaccagacaaaaacaagccatggggaaaggattccctatttaatacatgctgatggaaaaactagctagccgt

SEQ ID NO: 947818 - DNA, 89 bp, Artificial Sequence
  ENSG00000237484_21 (sequence is synthesized)
ccctatttaatacatgctgatggaaaaactagctagccgtctgcagaaaactgaaactggaccttatacaaaaattaaagatcaaagat

SEQ ID NO: 947819 - DNA, 120 bp, Artificial Sequence
  ENSG00000237484_22 (sequence is synthesized)
tcccgagtagctgggactacaggagcgtgtcaccacgcccggctaatttttttttgtagttttagtggagactgggtttcaccatgttaaccaggaagatttttgcatgctgaatattta

SEQ ID NO: 947820 - DNA, 120 bp, Artificial Sequence
  ENSG00000237484_23 (sequence is synthesized)
tgttaaccaggaagatttttgcatgctgaatatttataaactttattgtatgcagttttcttgccaatcctctattcctccctacacaaatcaaaaatgtccaatatattttacataaaa

SEQ ID NO: 947821 - DNA, 120 bp, Artificial Sequence
  ENSG00000237484_24 (sequence is synthesized)
gaaatctaaaatcaaaactgagagataaagatctagtgaagaaatctgtcaccttaaaaataaacatgattattggtggcaatagtaattcagaatcacttgcaaagttaaaattcggag

SEQ ID NO: 947822 - DNA, 120 bp, Artificial Sequence
  ENSG00000237484_25 (sequence is synthesized)
ctaaaccgtgtacattttgtaagcaaatataacagtaaactctttaatttgaacattgaactagaaatctatctcccaaaaaattacaattttgtgaaacaggaaccaaaactatatact

SEQ ID NO: 947823 - DNA, 120 bp, Artificial Sequence
  ENSG00000237484_26 (sequence is synthesized)
aagataacagtaattcatcaggtacttttttggatattatttactatacacatttttgttctaccttacaaaagttaataatctttcattaacattaaatagaattaatcaattcaacaa

SEQ ID NO: 947824 - DNA, 120 bp, Artificial Sequence
  ENSG00000237484_27 (sequence is synthesized)
gagactgctgacaccatcataggagcaacatgtttattgtgtaatctcttgagacttatctcaagttagaaagaaggaggaatagattctactgcccacagacaaagattctttgaactt

SEQ ID NO: 947825 - DNA, 120 bp, Artificial Sequence
  ENSG00000237484_28 (sequence is synthesized)
tggattttgatggatctaagcacaatatttaattccctatgccttcacaagaacaagttcccacaccagggtcaagaaggaaaccgtaagtcaagacaaaagtgcccagtgaaggcagaa

SEQ ID NO: 947826 - DNA, 120 bp, Artificial Sequence
  ENSG00000237484_29 (sequence is synthesized)
gatgaggggtctcaggttgcatcttcggaggcacgaggattcaaaggtgaacaaagcacacagtacatcatttgatgtgccattttatctgactgaaagattatagaaatatgtgcacaa

SEQ ID NO: 947827 - DNA, 120 bp, Artificial Sequence
  ENSG00000237484_30 (sequence is synthesized)
ctggactgaatacttgattgtatagttaactcatagtgatgccagcctctaaaatggcttacatgatgaaatgaagaagtatctctgctataaaggctttggagtaatgtatttgtgacc

SEQ ID NO: 947828 - DNA, 120 bp, Artificial Sequence
  ENSG00000237484_31 (sequence is synthesized)
atatttgttcatgtttgtaacaacatcagactaaaatggagagttctgatcggctgcacaataaccactgtgcaaacattcagcacagtcatcaaaatatcaaaaacagaaaaaaaaaaa

SEQ ID NO: 947829 - DNA, 84 bp, Artificial Sequence
  ENSG00000237484_32 (sequence is synthesized)
tgttatccaacatctgcatacttagatttctggagaggttggagtgcagtggcaccatctcggttcactgcaacctccaccttt

SEQ ID NO: 947830 - DNA, 120 bp, Artificial Sequence
  ENSG00000237484_33 (sequence is synthesized)
ttttgtagtttttagtagagttggggttcaccatattggacagactggtcttcaactcatgacctcaagtaatctgcctgacttcgcttcccaaagtgttgggattacagacataagcca

SEQ ID NO: 947831 - DNA, 120 bp, Artificial Sequence
  ENSG00000237484_34 (sequence is synthesized)
tcccaaagtgttgggattacagacataagccaccatgcctggtccaatacaatgatattaagaggttgatgcttgtatacatgtgtaactagcctgcacattgtggacatgtaccctaaa

SEQ ID NO: 947832 - DNA, 76 bp, Artificial Sequence
  ENSG00000237484_35 (sequence is synthesized)
aagacagtgtggtgattcctcaaaaatctagaactagaaataacatttgaccctgaaatcacattactgggtatat

SEQ ID NO: 947833 - DNA, 89 bp, Artificial Sequence
  ENSG00000237484_36 (sequence is synthesized)
ctttagaaccaacccaagtgcccatcaatgatagactggactaagaaaatgtggcatatgtacaccatgggatactatgcagccataaa

SEQ ID NO: 947834 - DNA, 120 bp, Artificial Sequence
  ENSG00000237484_37 (sequence is synthesized)
catcacacactggggcctgtctgggggttgggggcaatggaaaggatagcattaggtgaaatacgtaatgtagatggtgggttgatgggtgcagaaaaccaccatggcacatgtacacct

SEQ ID NO: 947835 - DNA, 120 bp, Artificial Sequence
  ENSG00000237484_38 (sequence is synthesized)
acctatgtaacaaatctgcatgttctgcacatgtatcttagaacttaagcataacaaaaaaatatatttctgggcagaggaaaaatactttgaaatttacatttaatccagtaaaatttc

SEQ ID NO: 947836 - DNA, 120 bp, Artificial Sequence
  ENSG00000237484_39 (sequence is synthesized)
agtgcattaaattaaagcttgtaatataataatgataataacagacagcatttaaagagcacctcttgtggataatcaagttattgagaaattatgtgtgttatctctgggataaagatt

SEQ ID NO: 947837 - DNA, 120 bp, Artificial Sequence
  ENSG00000237484_40 (sequence is synthesized)
gctgcatccttatattcttgtgtataaacagaccctgtatatgtaaaaaaaggaaagagaaaagtatttttaaatgcactaatttgtaattaccacataaactattactcatggaagatt

SEQ ID NO: 947838 - DNA, 120 bp, Artificial Sequence
  ENSG00000237484_41 (sequence is synthesized)
tgtaccaccatccagggacatggtcacatttaatttctcaaagctgaaggaaatatgatgatcaggatatgaagaagaaaacaataaaaaaatcatgtctagcaagaacagaggtcacct

SEQ ID NO: 947839 - DNA, 120 bp, Artificial Sequence
  ENSG00000237484_42 (sequence is synthesized)
ccaatggagacacttcaggaattgctcgggaaagaacatcaagtggtcaaacaggaggatatatgtggttcaagctacagaaacagcaacaggctgagcagccaacataagaatagaaaa

SEQ ID NO: 947840 - DNA, 120 bp, Artificial Sequence
  ENSG00000237484_43 (sequence is synthesized)
tatgggaaaatttcccactcactttatgagacttttataactttggaattaactttatggggacattacaattcaggagaattacaagccaattttattaatgaatgcaagtaaaatcct

SEQ ID NO: 947841 - DNA, 120 bp, Artificial Sequence
  ENSG00000237484_44 (sequence is synthesized)
acataaaatatgaagacatcaaatgtaccaatttatgaaagggaaactgtgatggacattacccataaactttttataaggaggttaagggcaggaaaaacatgagaaactcttttgaga

SEQ ID NO: 947842 - DNA, 120 bp, Artificial Sequence
  ENSG00000237484_45 (sequence is synthesized)
aagttttggtgaatcaggtctaccttaaatcagtaaggtctgtggctgtccagatgcacatcataatcggcacagaactctaccatttggtcaaaaccaaaaactaactgggacgcctaa

SEQ ID NO: 947843 - DNA, 120 bp, Artificial Sequence
  ENSG00000237484_46 (sequence is synthesized)
agaggtctaccttaaatcagtaaggtctgtggctgtccagatgcacatcataatcggcacagaactctaccatttggtcaaaaccaaaaactaactgggacgcctaagactgtaacagac

SEQ ID NO: 947844 - DNA, 120 bp, Artificial Sequence
  ENSG00000237484_47 (sequence is synthesized)
ccctggagacttcccactggactcccctgaggcagatattttgcaaaagaaaacttcccgccatgagatcttttcccacattccctcttggcaacttaaccagaagataaggttaagttc

SEQ ID NO: 947845 - DNA, 120 bp, Artificial Sequence
  ENSG00000237484_48 (sequence is synthesized)
atttccacggcctttagaacctctggaccttatacatgagaaaagacatcattcatggttggagtcactggacctggttaatatgtaccaaaaggaaacagaaaaagcagttctggtggc

SEQ ID NO: 947846 - DNA, 120 bp, Artificial Sequence
  ENSG00000237484_49 (sequence is synthesized)
tacatcttgcaagtactagaccagaatataaagctggatgagagagactttgatgatatgaagtactagggtttaaagggaacaccgaactcagtggattgcaagagcatctgacatcag

SEQ ID NO: 947847 - DNA, 120 bp, Artificial Sequence
  ENSG00000237484_50 (sequence is synthesized)
ccctactgtgctttaggcatggctcttggaaatatgacagaccacagtacatagtgtgaagtttctagacctgccctgatacagtgttgtggaaccaatataaagactgagtcactggac

SEQ ID NO: 947848 - DNA, 120 bp, Artificial Sequence
  ENSG00000237484_51 (sequence is synthesized)
aagctagagtgactgtgtacttcaggattaacaaaaacattagtttcactaagtttataaagattgaaatttttacaggcttaacagtggctgttgtctataggccaagaaggattagca

SEQ ID NO: 947849 - DNA, 120 bp, Artificial Sequence
  ENSG00000237484_52 (sequence is synthesized)
agtaatgctcttatgaaacaaatgttgaagatgatatacaattctagaagagcaaaggaaaggtggtagcatgtaatcagtacagagagataaggaccaacataatttccatgccagtta

SEQ ID NO: 947850 - DNA, 120 bp, Artificial Sequence
  ENSG00000237484_53 (sequence is synthesized)
tcagcaactcaacagctgaggaactctattatgtaggaatctaagatcatggatgagctatcatcacagtttttaggggaactatagaaaggcttccaataaggatttttgtacatgtac

SEQ ID NO: 947851 - DNA, 120 bp, Artificial Sequence
  ENSG00000237484_54 (sequence is synthesized)
cagctaatgtggagaagcagaaggtcgatgtcagccactccagtggaaatttcaatcactcatctactttccaagcttgagccaactttcagactgagagtccaataattaaagcagaag

SEQ ID NO: 947852 - DNA, 120 bp, Artificial Sequence
  ENSG00000237484_55 (sequence is synthesized)
ctctgtttttctgagaaatgacctgatggcagagcaaatatatactgtaaagataattctcttcctctactcaaagtgtctgtagccgcaggtacatatggaaaagggagcacccacatt

SEQ ID NO: 947853 - DNA, 120 bp, Artificial Sequence
  ENSG00000237484_56 (sequence is synthesized)
ttttgatatagtgtgtgaattgaaggaaagtcaacttttaccatagcctcccttcaagagtgggtacatatgaaaatcaggtaataaatttagtttaaccacgaattcatttcacaatgg

SEQ ID NO: 947854 - DNA, 120 bp, Artificial Sequence
  ENSG00000237484_57 (sequence is synthesized)
gtccaatgagtccatatatgcacaataaaactttatttcctgaattcataatttagatatacatacatagtaactggcagaacactcactctagttccttgaaatgtgaatgaataataa

SEQ ID NO: 947855 - DNA, 120 bp, Artificial Sequence
  ENSG00000237484_58 (sequence is synthesized)
ttgtcataggaaaggtcaaggaaaagactgaaaaatgtctttataccacagccaagagacttcataaagcaatattgccttccagatacaatagaagagatcagtgccatttttaaaaac

SEQ ID NO: 947856 - DNA, 120 bp, Artificial Sequence
  ENSG00000237484_59 (sequence is synthesized)
ctaaaaagttgcagaggcagtttctactgtattctcatttcagtcacttgtgtggccacacaaaaatcaaatacatgatggcagattgcagtgaactctaggacacatacccaaatggta

SEQ ID NO: 947857 - DNA, 120 bp, Artificial Sequence
  ENSG00000237484_60 (sequence is synthesized)
gacatacaaagctgttctgacaagtgtgatattactggaatgggtagacttgggtatgtgatacgtgttaattcttatttttagttgcagaattataattagacacttttttataaattt

SEQ ID NO: 947858 - DNA, 120 bp, Artificial Sequence
  ENSG00000237484_61 (sequence is synthesized)
aagattttggttaaaaataatatatttgcttaaacataaaacacagtatgtatttttttattgctacaggtgacgatgtttctccagtttatagtgatcaaattttgttatccattgagt

SEQ ID NO: 947859 - DNA, 120 bp, Artificial Sequence
  ENSG00000237484_62 (sequence is synthesized)
tctaggaaagtcttgaattttaatgtttttagacagaaagtttcaaaggcatctttattgtcaataagctcttcagcttggataaaaggtaaaaactaataaaggattccatttacattt

SEQ ID NO: 947860 - DNA, 120 bp, Artificial Sequence
  ENSG00000237484_63 (sequence is synthesized)
aaaaaattaattgaataataaatatcaccatagggaaacaacattatttgaatatcaccatccttctggcttgaatcccagaatgaaggaaactgatggattttcagaaaggttctagag

SEQ ID NO: 947861 - DNA, 120 bp, Artificial Sequence
  ENSG00000237484_64 (sequence is synthesized)
gccaccagcatgtctcagcttgtgtctccacatccctccaaattctacttcttctcattacatctttttttgactctgatcctctgactccatcctataaggaccttgtgatcacatgca

SEQ ID NO: 947862 - DNA, 120 bp, Artificial Sequence
  ENSG00000237484_65 (sequence is synthesized)
gggtaacctctccatctaaagatcctcaactcatcacatccacaaagttccatatacaatgtaaagtaatatcagtatcagatattaacaggtagaaatcgttttggaggagatcccaca

SEQ ID NO: 947863 - DNA, 120 bp, Artificial Sequence
  ENSG00000237484_66 (sequence is synthesized)
gccagtttttaatttgggcattgggtgttggcagaggaaccaagtgtaaattataccccacctgtttaaattctcatagattggtgggataataattatcctgtacatcgatttactgta

SEQ ID NO: 947864 - DNA, 120 bp, Artificial Sequence
  ENSG00000237484_67 (sequence is synthesized)
cttctactaacaagatgcttcacctgtctgtttgaatatctgtaggaatatgcctcatttttcatcttgaatcagtgtccatgatctttcccaaatttgacctcctttaacatgttgtcc

SEQ ID NO: 947865 - DNA, 120 bp, Artificial Sequence
  ENSG00000237484_68 (sequence is synthesized)
aactgtttgctgagtttgtgtaatctatttttaaatctatattatgtgttcaaatttcttgacactttttaaatatcatcccttctaattagccaataaaatcaacgttttttccctcaa

SEQ ID NO: 947866 - DNA, 120 bp, Artificial Sequence
  ENSG00000237484_69 (sequence is synthesized)
catgtttggttgggtgcagatagtttttgaaactaggtggtgacccaacttacaaatatgtcaccagtggtgacctaggaaaacagactgatataagggaaagctcttctcagtgagatg

SEQ ID NO: 947867 - DNA, 120 bp, Artificial Sequence
  ENSG00000237484_70 (sequence is synthesized)
atttagacatttgaaagggcaagggcaatgaatggggtatgcatgttaggataatgaaattaacttctaaagcctaaggtgtattgagataccacaaagaaatgataaaaaaaaaaaaaa

SEQ ID NO: 947868 - DNA, 120 bp, Artificial Sequence
  ENSG00000277067_0 (sequence is synthesized)
taaatttatgtaatttgacaattaatctacctcatgtgcttgcagatatgtattcatttcctaccaccgtagtggaagagagattttccctatctttacaactgatagcatttccaacag

SEQ ID NO: 947869 - DNA, 120 bp, Artificial Sequence
  ENSG00000277067_1 (sequence is synthesized)
acagtaagctgtgagattctgcttgaaatcacctctcaaacaaataaaaaacagacctgggagacatgctacactcattctgctgaggaaataggcatcatagctgggaaacggattcac

SEQ ID NO: 947870 - DNA, 120 bp, Artificial Sequence
  ENSG00000277067_2 (sequence is synthesized)
cccaggctgttccctacatatgtttcctcctccgacatcagttcatcagtcaatcaagccatgtgagagtggaggccttgtattccctattattcttgggcactctactccaagtaggaa

SEQ ID NO: 947871 - DNA, 120 bp, Artificial Sequence
  ENSG00000277067_3 (sequence is synthesized)
aaggccaggaggtcctgttaaaggatgcactcagagcccgggctccctaacatatgagagtgctaaccagcaggtgtagacttttcaggagtgaagaatgaggcaggcattccaaacctg

SEQ ID NO: 947872 - DNA, 120 bp, Artificial Sequence
  ENSG00000277067_4 (sequence is synthesized)
gaccttcatcaccttttgtttcatctcaagacaattctgagggactgttttggagcgtgtctggaaggtgaaccttgaagaagagtgtgggctttgatgtgactcagttgagatctttca

SEQ ID NO: 947873 - DNA, 120 bp, Artificial Sequence
  ENSG00000277067_5 (sequence is synthesized)
tggggaggcaggaattcaatgcccagaatctgggctggtgtctttgaggtcagtaggttgcgtctttgtatccaagtccattgttactaggttggaggctggagattctaaatggcttcc

SEQ ID NO: 947874 - DNA, 120 bp, Artificial Sequence
  ENSG00000277067_6 (sequence is synthesized)
agaccatctctctgattctctttgggagatggggtctgaaagacaatgtcagtagttttgggaaattctagaaagtgtgcttggaaacgtgggaagagctcttgcctagtgcctaaatgc

SEQ ID NO: 947875 - DNA, 120 bp, Artificial Sequence
  ENSG00000277067_7 (sequence is synthesized)
tccatttgcagctctagccaagtagatacttggtaggtatagagccgggtttgcgtttatatcagcaaaacctatgtcagagttgaagaagtagtcaggaaaaagcgtcttggtcgcagg

SEQ ID NO: 947876 - DNA, 120 bp, Artificial Sequence; identical to SEQ ID NO: 913223
  ENSG00000277067_8 (sequence is synthesized)

SEQ ID NO: 947877 - DNA, 120 bp, Artificial Sequence; identical to SEQ ID NO: 913224
  ENSG00000277067_9 (sequence is synthesized)

SEQ ID NO: 947878 - DNA, 120 bp, Artificial Sequence; identical to SEQ ID NO: 913225
  ENSG00000277067_10 (sequence is synthesized)

SEQ ID NO: 947879 - DNA, 120 bp, Artificial Sequence; identical to SEQ ID NO: 913226
  ENSG00000277067_11 (sequence is synthesized)

SEQ ID NO: 947880 - DNA, 120 bp, Artificial Sequence; identical to SEQ ID NO: 913227
  ENSG00000277067_12 (sequence is synthesized)

SEQ ID NO: 947881 - DNA, 120 bp, Artificial Sequence; identical to SEQ ID NO: 913228
  ENSG00000277067_13 (sequence is synthesized)

SEQ ID NO: 947882 - DNA, 120 bp, Artificial Sequence; identical to SEQ ID NO: 913229
  ENSG00000277067_14 (sequence is synthesized)

SEQ ID NO: 947883 - DNA, 120 bp, Artificial Sequence; identical to SEQ ID NO: 913230
  ENSG00000277067_15 (sequence is synthesized)

SEQ ID NO: 947884 - DNA, 120 bp, Artificial Sequence; identical to SEQ ID NO: 913231
  ENSG00000277067_16 (sequence is synthesized)

SEQ ID NO: 947885 - DNA, 120 bp, Artificial Sequence; identical to SEQ ID NO: 913232
  ENSG00000277067_17 (sequence is synthesized)

SEQ ID NO: 947886 - DNA, 120 bp, Artificial Sequence
  ENSG00000277067_18 (sequence is synthesized)
aggaacttgggatccgtctcctctttcgcctcctccgctttgggagccccgggctactctttcacagcccctgttgccctgtgatctgtaggtccttggggacgcacagttaagatgaca

SEQ ID NO: 947887 - DNA, 120 bp, Artificial Sequence; identical to SEQ ID NO: 868096
  ENSG00000277067_19 (sequence is synthesized)

SEQ ID NO: 947888 - DNA, 120 bp, Artificial Sequence
  ENSG00000277067_20 (sequence is synthesized)
ccccgaactccagatatgcgatggggcaaatcctgaagcgtacatggctatctctcacagctaaagcacccctcacccctatccagcgcttcttacccctggcgcaagagagtcacctgc

SEQ ID NO: 947889 - DNA, 120 bp, Artificial Sequence
  ENSG00000277067_21 (sequence is synthesized)
ggggaggaaaactatcaaaatcccttaaacccaagttgtaaccgcacaactaaatcagaatccttggagctggatctgaaaaaaatacggttgaaagttgtgcaggtgattacaatgtgt

SEQ ID NO: 947890 - DNA, 120 bp, Artificial Sequence
  ENSG00000277067_22 (sequence is synthesized)
aggcaagccagaaaaccatggctttaacgagcagcttttgttagaaatgatttctcaaatgaatgtaaaaacgtttgctgctgaattgtgacctttcaattttacctgcttttcctgcaa

SEQ ID NO: 947891 - DNA, 120 bp, Artificial Sequence; identical to SEQ ID NO: 913214
  ENSG00000277067_23 (sequence is synthesized)

SEQ ID NO: 947892 - DNA, 120 bp, Artificial Sequence
  ENSG00000225421_0 (sequence is synthesized)
atcctcatggcaatcctgggatggtggttttattatccctgctttaacagagggaggacttgaatctcgagttaaagtaatttgctcaggattgtaaggtcttttgtgaagactttgaag

SEQ ID NO: 947893 - DNA, 120 bp, Artificial Sequence
  ENSG00000225421_1 (sequence is synthesized)
ttgcaggttcattctgccgccatatacgtaacattctaaggtctgctttttataagacataatagctgacactatgagcaaaagagacagagctgttgccattatgtggcttacagttta

SEQ ID NO: 947894 - DNA, 120 bp, Artificial Sequence
  ENSG00000225421_2 (sequence is synthesized)
acaagtaaatctatacctacaaagtatgagaagtcctgaaaaaggaaggtacaggtaactgggaaggaatacatgattaactctatggtgtcaggggggcttcattccctccaattaatg

SEQ ID NO: 947895 - DNA, 120 bp, Artificial Sequence
  ENSG00000225421_3 (sequence is synthesized)
ttttcttccagaatttcctttactagatatattctacaaacgtcagatatattttcaagtttttaaacaaatttgatccatactttaattagagttgaattaaatttgtaattgaattca

SEQ ID NO: 947896 - DNA, 120 bp, Artificial Sequence
  ENSG00000225421_4 (sequence is synthesized)
gagtgagaagagatcagaggaacgtttgcatccaagggaatggagaactccactgtaaagaggggaagaagcaagaatgaagacaaatgtcttttgtgaagactttgaagttgcaggttc

SEQ ID NO: 947897 - DNA, 120 bp, Artificial Sequence
  ENSG00000225421_5 (sequence is synthesized)
attctgccgccatatacgtaacattctaagggtttcactggtgccttgagaacctttgacacctgtttgcagctcgaaagtccatggagcacctttatgaccaataaaagagaaggacca

SEQ ID NO: 947898 - DNA, 120 bp, Artificial Sequence
  ENSG00000225421_6 (sequence is synthesized)
atgtataaatatttttttcttctctgaggatgggcaattctgagatgcattgcataaagcatcaagttaatatttaatcagttgaagtataagatattgcaactcccacatacctggctt

SEQ ID NO: 947899 - DNA, 120 bp, Artificial Sequence
  ENSG00000225421_7 (sequence is synthesized)
aaggcaggatacaaaggcatagaatagaaattgaatctgagaacatccaaaaagatgtcatgagtctcattgttttatggactctggccataaaacaatgagactcgtgaaggtataaaa

SEQ ID NO: 947900 - DNA, 120 bp, Artificial Sequence
  ENSG00000225421_8 (sequence is synthesized)
atcatgaataattttcataattctccttctccaaggccccaaataaatcctttcacttcctgaaggaaccaattgactttttctttttctcaagattgtcaagagagatttttatcctcc

SEQ ID NO: 947901 - DNA, 120 bp, Artificial Sequence
  ENSG00000225421_9 (sequence is synthesized)
cagacttgaatgtcttctgattagagaaatatctgcccaaaaaacgtcaaaaaaggagaaaaagaagaacctaaggaacatgaacgtgtcatagaaatttctctgggtggtaacccagcc

SEQ ID NO: 947902 - DNA, 120 bp, Artificial Sequence
  ENSG00000225421_10 (sequence is synthesized)
tcaaacggaccaactgtgtgcaaagctgttccccattttcctaaaggaacaatgctgctcttaatagtacttatttttcagggggcccaatttcagatatgttggttttggcaggcttct

SEQ ID NO: 947903 - DNA, 120 bp, Artificial Sequence
  ENSG00000225421_11 (sequence is synthesized)
tttttttcctactgaattacagtaagaactaagtattagaggctgtaattaaaggttggtgaggcaaaactggaaatgtgctcaatgggctgcactcagatccaactgatccggatacat

SEQ ID NO: 947904 - DNA, 120 bp, Artificial Sequence
  ENSG00000225421_12 (sequence is synthesized)
caaaatattggtcaaaactccccatttatgaatcagctcagttctggactgaagagaagcttttgagaccctctggatgctttctcccaggttctctgttatgggttgaattgtcatagg

SEQ ID NO: 947905 - DNA, 120 bp, Artificial Sequence
  ENSG00000225421_13 (sequence is synthesized)
tcttcataaaggttattaagttataataaggccaaatggttgaggccctaattcagtatgtctagtattgctagacataagaacaaaagacaccaggatgtgcacatacggaggaagggc

SEQ ID NO: 947906 - DNA, 120 bp, Artificial Sequence
  ENSG00000225421_14 (sequence is synthesized)
catgtgaagacacaggaagaagccgtcatctgcgagccaaggagagatgccccaagaggaaccaaacctaatgacactatgatcatggacttctagtcttcgaactgtgaaacaatcaat

SEQ ID NO: 947907 - DNA, 120 bp, Artificial Sequence
  ENSG00000225421_15 (sequence is synthesized)
ctctgttttttcagccacccagtctgtggtattttgttctggcagccctagctgacttggatagtctcccatggtgaaggtgccctgtgggccaggcagagattcttgttcccagagcat

SEQ ID NO: 947908 - DNA, 120 bp, Artificial Sequence
  ENSG00000225421_16 (sequence is synthesized)
ggcacggcctttcctgtctactggcttttgcatgtgatactcatgtcagtaggataccctcctttatttcttcacatatccaaatcctactgtctttccatggaaagggaaagcccctac

SEQ ID NO: 947909 - DNA, 87 bp, Artificial Sequence
  ENSG00000225421_17 (sequence is synthesized)
caaatcctactgtctttccatggaaagggaaagcccctacactactggtaaactgcaacagggtctccctatgttgcccaggctgac

SEQ ID NO: 947910 - DNA, 120 bp, Artificial Sequence
  ENSG00000232715_0 (sequence is synthesized)
ggacgacctggagaggtctgttgcctgaatgagagtcactgagtttacactgcaggagagcagctcccaagaccaaggccctgcgattcccagaggccgtcggactgccgcatcccttgg

SEQ ID NO: 947911 - DNA, 120 bp, Artificial Sequence
  ENSG00000232715_1 (sequence is synthesized)
tggagcctacatcctggaggactgtggccctgaactttggttaaacacaaacaagccccaagaaaagggaaagcgaaaaccagaggcactggaggaatcacaacaaaaagcaccttgaga

SEQ ID NO: 947912 - DNA, 120 bp, Artificial Sequence
  ENSG00000232715_2 (sequence is synthesized)
agcacctacaagacagcagcgcagcgtggccagctccctgcctcaagcaccaggcaggctaacccaggttccgagagggggcaggtcaacactggataaaataaactccaggaggccggg

SEQ ID NO: 947913 - DNA, 120 bp, Artificial Sequence
  ENSG00000285919_0 (sequence is synthesized)
ccctatggagtctctttctgtcgtgtggaaggtttgttctttcgctttttgcaataactcttgctgctgtttactctgggcccacactgcctttataagctgtaacactcgctgcgaagg

SEQ ID NO: 947914 - DNA, 120 bp, Artificial Sequence
  ENSG00000285919_1 (sequence is synthesized)
ctcctgaagccagtgagaccacgaacccaccgggatgaatgaacaactcagatgggccaccataagagctgtaacactcaccatgagggtctacagcttcactcctggtccagctagacc

SEQ ID NO: 947915 - DNA, 120 bp, Artificial Sequence
  ENSG00000285919_2 (sequence is synthesized)
aacacatccgaacatcagaaggaacaaattccggacatgctgcctttaagaactgtgacactcaccacgaggatccacggcttcattctttaagttagaccaagaacccaccaattccgg

SEQ ID NO: 947916 - DNA, 120 bp, Artificial Sequence
  ENSG00000285919_3 (sequence is synthesized)
caagaacccaccaattccggacacatgttgaggaaccaatgtctccagccaacagccagtaaggacctgaggcctgacaacaatcagggacttttcacagtgcctggcagagtttggaca

SEQ ID NO: 947917 - DNA, 120 bp, Artificial Sequence
  ENSG00000285919_4 (sequence is synthesized)
tgcctggcagagtttggacactacgtatgtgctgaataatatgtgaaattttctgatgggtgccacgaagtcaaatagaagatgactttggggaaggatactgcaagtgcagtgccatgt

SEQ ID NO: 947918 - DNA, 120 bp, Artificial Sequence
  ENSG00000285919_5 (sequence is synthesized)
gcttcattcggcctcacatcaggtggcacaacgtacctgacagtggcagccttagcagtgctgagctgagtaacacagagtaaaccactcagcctttaaatctatgatataagcctttat

SEQ ID NO: 947919 - DNA, 120 bp, Artificial Sequence
  ENSG00000285919_6 (sequence is synthesized)
atcatttttaatatgtgaaataatcaaagtcagattttacaattaccttagaaagaaactgcaaacataagttctatttgtaaaatattggagggagggtattttctaatatatgttgta

SEQ ID NO: 947920 - DNA, 120 bp, Artificial Sequence
  ENSG00000285919_7 (sequence is synthesized)
aaaaaatgtttaaatggtgagcatgtagttggttatataagctttttgaatacttcaacttacaaagtgattgattcaaacttggtacaattagaacggcatccagagaagccttcttta

SEQ ID NO: 947921 - DNA, 120 bp, Artificial Sequence
  ENSG00000285919_8 (sequence is synthesized)
agagaagccttctttaattttctataccacatagaaaaatgcatcgtcaaaatgggtgaagctgggctgcctctgaaaacagaactataatgcatttgtttttttgttttttttgtttgt

SEQ ID NO: 947922 - DNA, 120 bp, Artificial Sequence
  ENSG00000285919_9 (sequence is synthesized)
attatcagttcagaaatttcccaataccaaattctaccactctgtctaaggaaggactctctccatattttagctcctagatcaccctccctaatctttatactacgtaaaataagctgt

SEQ ID NO: 947923 - DNA, 120 bp, Artificial Sequence
  ENSG00000285919_10 (sequence is synthesized)
ctgcctctgctcaaaagggctgaatgggatacatggatacatgaattgatagggttttaatggattcttttggaaaggggacggtcccacaccatgctatggccttcgatgttatttttt

SEQ ID NO: 947924 - DNA, 120 bp, Artificial Sequence
  ENSG00000285919_11 (sequence is synthesized)
aacaacttctaaataacaacatgttgttttttaaatgtgcctgaagatgtatatttaccatccaagagagtacaaatttgagactccaacttcagcgctactccactacatggcttctgt

SEQ ID NO: 947925 - DNA, 120 bp, Artificial Sequence
  ENSG00000285919_12 (sequence is synthesized)
acaccttagtgaattgtggcacttgtgagggtcaacaaaactcaccctgtggctggctggcacatgatggatggacgtcgaagagggtcaaatcgttttatggtacacgatggctaaaac

SEQ ID NO: 947926 - DNA, 120 bp, Artificial Sequence
  ENSG00000285919_13 (sequence is synthesized)
atggataggaatgtcaggttgtctgatactaaactattttgaaattctgaggttgcaacctcagtctttagagtctacacccaaagctttctatggccctgttcttcccccaaagacacc

SEQ ID NO: 947927 - DNA, 120 bp, Artificial Sequence
  ENSG00000285919_14 (sequence is synthesized)
agatgttggagaagtagggtcccatgagccttttcattaacgtttcatgagggagacttatccttctgtatggatgtcatcaaaacaccctgagaatatacttacagttgaaccattttt

SEQ ID NO: 947928 - DNA, 120 bp, Artificial Sequence
  ENSG00000285919_15 (sequence is synthesized)
tctcacttgaataaaattaacctgagtacagtagtccccccttatccacagggggtgtgttccaagacccccagtacatgcctgaaaccatggatagtaccaaaccccatatattctatg

SEQ ID NO: 947929 - DNA, 120 bp, Artificial Sequence
  ENSG00000285919_16 (sequence is synthesized)
tttttgctattcacacatacctatgataaagtttaacttataacttaggcacagtaagagattaacaacagtaactaatagtaaaatgaaacaattataacaatattctgtaataaaagg

SEQ ID NO: 947930 - DNA, 80 bp, Artificial Sequence
  ENSG00000285919_17 (sequence is synthesized)
gtaaaatgaaacaattataacaatattctgtaataaaaggcatataaatgtgatctctctcccaaaatatcttttcctca

SEQ ID NO: 947931 - DNA, 64 bp, Artificial Sequence
  ENSG00000285919_18 (sequence is synthesized)
tgtatttttaggagagacagggtttctccatgtcgaccaggctggtcttgagtcctgacctcag

SEQ ID NO: 947932 - DNA, 120 bp, Artificial Sequence
  ENSG00000285919_19 (sequence is synthesized)
ttttaatttatttttaattttttgggtacacagtaggagtatatatttacggggtgcgtgagatattttaatacatgcaatgtataataatcgcatcaggttaaatgcaattatttacct

SEQ ID NO: 947933 - DNA, 80 bp, Artificial Sequence
  ENSG00000285919_20 (sequence is synthesized)
caaatttttactatagtcactctgttatactagcaaatactagatcttattcgttccaattattttttgtacccctaaaa

SEQ ID NO: 947934 - DNA, 120 bp, Artificial Sequence
  ENSG00000285919_21 (sequence is synthesized)
gttccaattattttttgtacccctaaaatatcttattttactataccgtgagtaactaaaacctcggaaagtgaaagcatggaatactgcgtatttcccaccctcagcgtgtgtgtgtct

SEQ ID NO: 947935 - DNA, 120 bp, Artificial Sequence
  ENSG00000285919_22 (sequence is synthesized)
taacaaagtcagccagggcacctgcccccctccttctcatcaggccttcttagcaaaatagcatccttgtggagggccagggctgtgtcctgtgggttagtgatatgatcaagattccta

SEQ ID NO: 947936 - DNA, 120 bp, Artificial Sequence
  ENSG00000285918_0 (sequence is synthesized)
attcatccaacccctcaacttctccatgtataatagccctagctgcatccactaattttcagctgatgagagggagaggggttgcaagagaggaccggaaaagctgccaaaacgaccaga

SEQ ID NO: 947937 - DNA, 120 bp, Artificial Sequence
  ENSG00000285918_1 (sequence is synthesized)
gtggccaagtgacttgccattaactcccgagtggtgggagaatccagctcacccatttcaagtccagcctcccgccctctatgccacaatggttatactattcagcattcaaacgtcatg

SEQ ID NO: 947938 - DNA, 120 bp, Artificial Sequence
  ENSG00000285918_2 (sequence is synthesized)
acagactggcctttcactgttctgccaagcgtgaggaaagaccaaagcagtccgtttgggaaagcaaaaagcagaattcttcctaacctgataaaatattttgccactatgacctactgt

SEQ ID NO: 947939 - DNA, 120 bp, Artificial Sequence
  ENSG00000285918_3 (sequence is synthesized)
aatgataccacgttgcactcttgcattactggaatggtatttttgctaagaaattctgcagtcccattgattcagaatgccattgttgcaggagctggggacctaccttttccttccacg

SEQ ID NO: 947940 - DNA, 120 bp, Artificial Sequence
  ENSG00000285918_4 (sequence is synthesized)
gaatctaaaggcaattacaactggcttcatttcatgccaacctacatttggctacaatgctgagagccatacctttttgaaaagcctaactttttatcaggagatggctttgattccttt

SEQ ID NO: 947941 - DNA, 120 bp, Artificial Sequence
  ENSG00000285918_5 (sequence is synthesized)
atttaccatctaaattccatcacaagtggctctggctttgtagaacacagtacacaggaggggcacccgaaagcaaagacgaccttctctactccaaaaatcaatcgtccacctttggca

SEQ ID NO: 947942 - DNA, 120 bp, Artificial Sequence
  ENSG00000285918_6 (sequence is synthesized)
aattctccttctcagattcatgcttggtgctcatgggtactcactctactttcctcccttgctggacaattaagcagtaacaatatcttgttggtcccatacacaccacacctttggtct

SEQ ID NO: 947943 - DNA, 120 bp, Artificial Sequence
  ENSG00000285918_7 (sequence is synthesized)
cttggagaattttcagccgtaccaatggcaacctctgagtgacatcttaatatgatcagatgtgatgacagtttagtaacaggttctcatttttggctcaccagcttttcggcctacata

SEQ ID NO: 947944 - DNA, 120 bp, Artificial Sequence
  ENSG00000285918_8 (sequence is synthesized)
tcatcagaataagactgaggcacattagtgaaatctcaatagtaaacaagcaggtactgccaataaaagagaaagcattcttaaactgattaaaaaaaaaatttaaagagcactttaatc

SEQ ID NO: 947945 - DNA, 120 bp, Artificial Sequence
  ENSG00000285918_9 (sequence is synthesized)
accatcagatgactttcattcataccaccttttggggcatcagttcataatgcagaaaagatgaaagagccatctaaaggaaataatgttaacaactccgttataaaatatctgaagcaa

SEQ ID NO: 947946 - DNA, 120 bp, Artificial Sequence
  ENSG00000285911_0 (sequence is synthesized)
agtccctccgaggccggacgccactcgctgcggtcactgtggcaggaagaccttcccggctgctggagcaggttgggccgcccagtccccgggggagcacttctatttagaataaataat

SEQ ID NO: 947947 - DNA, 120 bp, Artificial Sequence
  ENSG00000285911_1 (sequence is synthesized)
tccttggaagcaagggccatcactcctcatctctatctcctgctgctagcctggtgctgacataaagcagtgctcagcatatatttgttcaacaatgttgttgagggctctccccatggc

SEQ ID NO: 947948 - DNA, 120 bp, Artificial Sequence
  ENSG00000285911_2 (sequence is synthesized)
tgtccaccatttgaatgaatccagaacacctcagcaccaagttcaggcttccatcttgcagcaaggttctgcaacttgtgttggaattctcaggaaaaactgccagaagcagtacgacta

SEQ ID NO: 947949 - DNA, 120 bp, Artificial Sequence
  ENSG00000285911_3 (sequence is synthesized)
acgatgatgaggatggtggtggttgtgatgatgaggatagttaacatttattgagagtctactatgtaccaagaactgtttaacttttataatgtattagttaattcctgacaagaagtc

SEQ ID NO: 947950 - DNA, 120 bp, Artificial Sequence
  ENSG00000285911_4 (sequence is synthesized)
tatgaataaggtattatcttcatcttacagatggggaaactaagacaggaataagttgcccaacatcatataactatgaagaaatacaaatacatgagaccaaaagaatatatatagtgc

SEQ ID NO: 947951 - DNA, 120 bp, Artificial Sequence
  ENSG00000285911_5 (sequence is synthesized)
cttgatacagagacttgatctgacaaaaaaaaaataggtttactcttgcactttttctgacctcccctcttcttcctatctaccaagtctttaataaatatatgccagattttattttct

SEQ ID NO: 947952 - DNA, 120 bp, Artificial Sequence
  ENSG00000285910_0 (sequence is synthesized)
aggacccacatggtggtccagagcgtcaccacagcttcaggcctggggggcttcggccactgagatgaggggttcaggccaggtttcagagtcccaccaggcctccctcttgcaacagaa

SEQ ID NO: 947953 - DNA, 120 bp, Artificial Sequence
  ENSG00000285910_1 (sequence is synthesized)
ggaaagtccacactgaggaggatcatggcctgctacggtcgaagtgcaaggcacgcgtcagaagcagtggctccttctgcagcaggactcacctactgactcagaaggacgtcctccagg

SEQ ID NO: 947954 - DNA, 120 bp, Artificial Sequence
  ENSG00000285910_2 (sequence is synthesized)
gacagccagctcctcctctgagcgcacagcccatgtcctctgctgtgcgctcctcgcgcgaaccgaccccacctcggaccggaagccaccttgggctggaggatgccatgaagtctctct

SEQ ID NO: 947955 - DNA, 120 bp, Artificial Sequence
  ENSG00000285910_3 (sequence is synthesized)
ggttcaacgtgcatgcaccgtctcacttaacctgggttactctgtatgagttgcacagaaaaggccaacatggacatctgaggacagacagcacaggagtacaggaactaatgcaaattg

SEQ ID NO: 947956 - DNA, 120 bp, Artificial Sequence
  ENSG00000285910_4 (sequence is synthesized)
catttcacacacctgcttgggactatccttcctggaggccactggaacttctggagccacctgcagcacttctgatgcatttcctaggtggtgatttcccagccctgacactggtgacag

SEQ ID NO: 947957 - DNA, 120 bp, Artificial Sequence
  ENSG00000285910_5 (sequence is synthesized)
ctgtgggtcttactccaccatagccagaggagaatgtgtctgccactgcatcagcggaaggagagggagttgggggtggtcaccagcttcccaggcttcactttccccacttataaatga

SEQ ID NO: 947958 - DNA, 120 bp, Artificial Sequence
  ENSG00000285910_6 (sequence is synthesized)
ggggctggaacttttcagtttccttggaccttttaattcagccctctcagatctgatggcctcgtggtaggaatgcccttcctctaagggaattacagtgaaaatgactgactccatctc

SEQ ID NO: 947959 - DNA, 120 bp, Artificial Sequence
  ENSG00000285910_7 (sequence is synthesized)
aacatccaccagccccgtgaaaatgtgccccacctccttctgctaattttggcttgggggcctcctggacctgcagtagagcttcccttgcttggctgagcagttgttaaatgagctgcc

SEQ ID NO: 947960 - DNA, 120 bp, Artificial Sequence
  ENSG00000285910_8 (sequence is synthesized)
ttctagccaagcatagcacatgagcccactggcctatctattaggaaagaaggtctaagagaaatcagggtctcaatgcaaagctgcattataaagtaaaaaattatctatgtatatata

SEQ ID NO: 947961 - DNA, 120 bp, Artificial Sequence
  ENSG00000285915_0 (sequence is synthesized)
gcgcggagcctggcccagcagggacgttggtccagcgtggccctcccaggccagcccagggatttacgctccgccctggctctgcaagccctttgtgagtctctggtggccagctcagaa

SEQ ID NO: 947962 - DNA, 120 bp, Artificial Sequence
  ENSG00000285915_1 (sequence is synthesized)
tgaccaaagcagggcgggctttctatggtcatttctttaccgcacatgacataaaccacccgagagccccagtgaacggcaggagaaatgaacatctttgggaaagtttggtggaaaacc

SEQ ID NO: 947963 - DNA, 120 bp, Artificial Sequence
  ENSG00000285915_2 (sequence is synthesized)
agcccgtagagccgtgagagacacaggattcacttttggcactctcgcctggctcagccacctggaatcaaggaagacagcacagtgctgaccccacgctcctgccaatgctcacttcct

SEQ ID NO: 947964 - DNA, 120 bp, Artificial Sequence
  ENSG00000285915_3 (sequence is synthesized)
aggcacccacactcattctcatctggttccttgtaagtcttctattgcaaaatcttctcaggacttggagacatgctattctcggtttccccaataacaaaatgaaagtgcaaaggtgcc

SEQ ID NO: 947965 - DNA, 120 bp, Artificial Sequence
  ENSG00000285915_4 (sequence is synthesized)
gtgtcagcaggtgggccgtggacttcgcacctgggtgatggtgaacctgcctccaaaattgccatgggtccaaagaggcgccaattcctggcaaaactgatgacatttatgaattttatt

SEQ ID NO: 947966 - DNA, 120 bp, Artificial Sequence
  ENSG00000285915_5 (sequence is synthesized)
tctggttgcaacctgattttgttatggacctatactgacgtcagtaataaacaataataagattgtaaactattgctctttataataaaataatgcctcttggctgtattataaatctaa

SEQ ID NO: 947967 - DNA, 120 bp, Artificial Sequence
  ENSG00000285914_0 (sequence is synthesized)
cctcaaacaccccggtgaggaaagcgttattatccctgttttccaaatgaggacactgaggctcagggagctgggtgatgtgtcaaaagttgcccagctgcagagtggcaatgctggaat

SEQ ID NO: 947968 - DNA, 120 bp, Artificial Sequence
  ENSG00000285914_1 (sequence is synthesized)
ttgaagccaggcttttctgattctgaattccatgttttcttacttgcctttttcttctgctccagcttgcagtgcctcggagaggtggcgctggctagcctgggacttccaacatacagc

SEQ ID NO: 947969 - DNA, 120 bp, Artificial Sequence
  ENSG00000285914_2 (sequence is synthesized)
ctacattgatggcctgagacttgtggcaaaaaagactttcaaaatctaatttgctcacatacatgaacacctgccaggaaggaatttgaggcctttgttctaaacatggaaaagctgagt

SEQ ID NO: 947970 - DNA, 120 bp, Artificial Sequence
  ENSG00000285914_3 (sequence is synthesized)
tcatttgccccagagggggcacctgcagggaaaaggaaaaatggttttaaccctttccttgagtcagaaaatgaggccaccagattctcctttcatccttcaagtatcagaaaggtctgt

SEQ ID NO: 947971 - DNA, 120 bp, Artificial Sequence
  ENSG00000285914_4 (sequence is synthesized)
gctgtgaattccacagatgagattcattgcaagatgtgagggcagaggaaatccatggaaatgaaatccacattcaaactggatgcatgcgttcagcaactggaagctgagttcatattt

SEQ ID NO: 947972 - DNA, 120 bp, Artificial Sequence
  ENSG00000285914_5 (sequence is synthesized)
cattgcccaactaccctgaccacttgggaatcgcaggtttggaaggacccacagccattctgtggaaatggatctgctttcaggaccgaatctcagacttcttggggaaggtttcagtgg

SEQ ID NO: 947973 - DNA, 120 bp, Artificial Sequence
  ENSG00000285914_6 (sequence is synthesized)
ctgcctttgctgtgcagacctggagatgggtctgatgatcggacacctgaattatctgtgtggctgagtttcaagaagacctgctggggtgaaatgaaaatggtgcctactagaagcccc

SEQ ID NO: 947974 - DNA, 120 bp, Artificial Sequence
  ENSG00000285914_7 (sequence is synthesized)
agtggctttgctggtggaggctagcttgctcatgtcctcatacagaagcagagatgcaagcaagtgagaaggtggaaggactcaggtcttgggccttactctgagaactataacaccatt

SEQ ID NO: 947975 - DNA, 68 bp, Artificial Sequence
  ENSG00000285914_8 (sequence is synthesized)
gtgtgttctcactcatagatttgctcctccactggctcttcttgtagacacacgactgctacagtatc

SEQ ID NO: 947976 - DNA, 120 bp, Artificial Sequence
  ENSG00000285914_9 (sequence is synthesized)
ccactggctcttcttgtagacacacgactgctacagtatcaagggtctgatgcagacatgacaatgtcaagaggaagaggagagcctcgctcttcccaggcttttgcttttaagagcaga

SEQ ID NO: 947977 - DNA, 120 bp, Artificial Sequence
  ENSG00000285914_10 (sequence is synthesized)
aaaactttccccagagttccaccagctcacttctcatcttacttctttggccagaactggcccttgtgcccatattgtcagtcaaatgccgacaaaggaaaggggccactatgagtggtt

SEQ ID NO: 947978 - DNA, 120 bp, Artificial Sequence
  ENSG00000285914_11 (sequence is synthesized)
ctgatggatggctagcaaaatcagatgtgggctctgtcctcatggagcatacagtcagaaggggaagatttacctaattacactaacaaacttataactgtggtcagtgttctgaaggaa

SEQ ID NO: 947979 - DNA, 120 bp, Artificial Sequence
  ENSG00000285914_12 (sequence is synthesized)
aggaaatccagttgtatggtaacgtataacaaagaaactgaactaggatggagatgggggtggtaagtgtagttggggaagccagggacatgatctgtaagatggctggcctggattcaa

SEQ ID NO: 947980 - DNA, 120 bp, Artificial Sequence
  ENSG00000285914_13 (sequence is synthesized)
attccactccacttacttgctgtgtgattttagattagtcgcttctcctctctgagctcaacttcatctataacaatctttcctagggttgttaaaggattgaatgagccactctatgta

SEQ ID NO: 947981 - DNA, 120 bp, Artificial Sequence
  ENSG00000285914_14 (sequence is synthesized)
accacttgacacatattaggcacttcagtggctccttttccagattaaagaaggagaaaacgtgtatgtttggagttagcacaagacaggatgattcctcatgtttgttttggaaaacaa

SEQ ID NO: 947982 - DNA, 120 bp, Artificial Sequence
  ENSG00000285914_15 (sequence is synthesized)
gtcttaaactcacagccatgacagagtctgacatcatcagacatcaggcgtgttaagaattgcactcttaattgaaaatgtccagagtttgtgattaattgcaatccttttcagatcctt

SEQ ID NO: 947983 - DNA, 120 bp, Artificial Sequence
  ENSG00000285914_16 (sequence is synthesized)
tccctaagaatttaatttttctccccacccacccggaggtcaggcttttaatgtaacaagtacaatcaatcttccactgaagatggcctctctctagtgcaagctggagcaggactcatc

SEQ ID NO: 947984 - DNA, 120 bp, Artificial Sequence
  ENSG00000285914_17 (sequence is synthesized)
tggattagaagcctagacggtttggagtcacctggtgaggtttacgtgcacagctggggcccagcctacctaattaggaccagagagtggttgagaaggggaccggcgcgtattctaggc

SEQ ID NO: 947985 - DNA, 120 bp, Artificial Sequence
  ENSG00000285914_18 (sequence is synthesized)
gccctcctccagtgtctgtttctaataatggcagaaagtagcagaggcggcggggtgagcttggagcgtggtgacatcatccctccagctgttttacacatctgtgacatggctcattag

SEQ ID NO: 947986 - DNA, 120 bp, Artificial Sequence
  ENSG00000285914_19 (sequence is synthesized)
gactctcttaacacctcatccttccctgctccacacagctccagttgcatgagaaaaggtgctcttgcatgtgaggggccccaagactggggctgacttcagggtcaaagattcgcttgg

SEQ ID NO: 947987 - DNA, 120 bp, Artificial Sequence
  ENSG00000285914_20 (sequence is synthesized)
gcactctaccagtcatcagaattttcacagagacacccccccaacacacacacccgcagcatgcgctccttgaaagtgctaatagcttcaatatgaggctggcacttctgcatgactgtt

SEQ ID NO: 947988 - DNA, 120 bp, Artificial Sequence
  ENSG00000285914_21 (sequence is synthesized)
ggtgttcagggccagcctagtcttggggagtaggccatctgtagcagctgcagaaatgtttttgcttattttgagcattctaagtttttcctagccatgaataacaacaatcgaataaat

SEQ ID NO: 947989 - DNA, 120 bp, Artificial Sequence
  ENSG00000285917_0 (sequence is synthesized)
ccccgttgtccacatggctgggccctgcatgggaggaaagagggggcatgaagacaaacagcgaggaaattggggtttcggagggcaggcctgcccagaatgcattcctataaattctga

SEQ ID NO: 947990 - DNA, 120 bp, Artificial Sequence
  ENSG00000285917_1 (sequence is synthesized)
aggaagagggtgggagagacccaccattctgctttacatatgcaaggaatacgtgaggagcctgaattcctaggaaaggtgagacatcggggcagataccggcccattcgccatgctcct

SEQ ID NO: 947991 - DNA, 120 bp, Artificial Sequence
  ENSG00000285917_2 (sequence is synthesized)
ttctcgctgtgggtgaagagaagacggtgatggacactctggcttccgctgcaggagctccacagccagggaacccctctgctcccttcgccgtgtgaaatcgcatctagctcctccacc

SEQ ID NO: 947992 - DNA, 120 bp, Artificial Sequence
  ENSG00000285917_3 (sequence is synthesized)
taggagcagtcagtgcagataggagcagcacagcaatgacaccacacccacaaaaccgggcaaacataatgaataagagaactaaaagtgaacgcggcagcagctttacatctcagtgcc

SEQ ID NO: 947993 - DNA, 120 bp, Artificial Sequence
  ENSG00000285917_4 (sequence is synthesized)
aatttgagattggtattgccatcgagagtcagcagcctcgcccggacgctccgccgtgcccactgtgctatgaaaccgcctgagtcatcgctttcctccctgccattttacgtaatagtt

SEQ ID NO: 947994 - DNA, 120 bp, Artificial Sequence
  ENSG00000285917_5 (sequence is synthesized)
atttcaaatatcctccagcatcctcacaccaccacagggttccctgcctcgggaaacagaaaaaacacagaagccacatgcaaatttcttttacattttatattaaagcctaaaaagtta

SEQ ID NO: 947995 - DNA, 120 bp, Artificial Sequence
  ENSG00000249532_0 (sequence is synthesized)
taggaattctgctttaacttgttcctgcttgtggtgcatactacagaatgaaattaacagctctaaatactctgaagtccaaagaagttgtatgttgggtgggctcccttcaactttaac

SEQ ID NO: 947996 - DNA, 120 bp, Artificial Sequence
  ENSG00000249532_1 (sequence is synthesized)
atggaagtgctttctgtgactttaaaagatctggacttacctcaattgcttttgctgcttgttcttttgtttcaaattccacaaacgcaaatccctttggatctccagtagacttataat

SEQ ID NO: 947997 - DNA, 120 bp, Artificial Sequence
  ENSG00000249532_2 (sequence is synthesized)
tactctttcaatccagctgtgattaacatttttgggaagtaactcctattataaattaaaagcaatattagagtttttcacaatcagaatgtcaataaatttttaacttaattatattgt

SEQ ID NO: 947998 - DNA, 120 bp, Artificial Sequence
  ENSG00000249532_3 (sequence is synthesized)
ttctgtgccagtttctgactggggacccgggttcttaagcttaccacatacactgtgcgttcatcctcatcctttggtctttcccccagaggttttttcctccggattctggtgccttcc

SEQ ID NO: 947999 - DNA, 120 bp, Artificial Sequence
  ENSG00000249532_4 (sequence is synthesized)
tccggattctggtgccttccaaatcaagctttaaaatagtatattacattaataaaactaatattatttataattgtaagctataatcatataataatcattacgttaacattctttata

SEQ ID NO: 948000 - DNA, 120 bp, Artificial Sequence
  ENSG00000249532_5 (sequence is synthesized)
acccttctggaggagaacacgaatctttgggaactagttcaggaagggattctgcatcttcagagctgcttctcttcctcttccctgttctgacttcaggatctggacttacctcaattg

SEQ ID NO: 948001 - DNA, 120 bp, Artificial Sequence
  ENSG00000249534_0 (sequence is synthesized)
gctgaggagaagcctgatgggttacgcttcagaatttcatgtgctcatgggtaggctggaacttggatgtgcattggcaggtctgcattggcagaccagatgtcaccatacagacaacaa

SEQ ID NO: 948002 - DNA, 120 bp, Artificial Sequence
  ENSG00000249534_1 (sequence is synthesized)
tatcctacaggacagaaaagcttgaaagtaaaagaaactttggtgtttgaataaaccacacatttgtcctggacaacctgcctatcgttgaactgttacatgagagaaaaagagatttct

SEQ ID NO: 948003 - DNA, 120 bp, Artificial Sequence
  ENSG00000249534_2 (sequence is synthesized)
ctcttatttgaacaattgcattttcaagtctttttgttacagcagcataactgataccctaaccctgacaaatacatttttaaacaaaaggaggaatgctactatcgtactctatgctgg

SEQ ID NO: 948004 - DNA, 120 bp, Artificial Sequence
  ENSG00000249534_3 (sequence is synthesized)
tccagtcttacttggggtgcagtattctcatctgtgaatcacatttcaaggggcctaaagacaaagtagaagtgttcagataacagcaacatgattggtgagaaattcaaagttgaagaa

SEQ ID NO: 948005 - DNA, 120 bp, Artificial Sequence
  ENSG00000249534_4 (sequence is synthesized)
actggaagagcagatttagagtaagtaggagtgccactttcaaatgtctgaggaactggcctgtgaaagaatgattcactttgttctgtgtagtttcagtagatagaagtatggttcaac

SEQ ID NO: 948006 - DNA, 120 bp, Artificial Sequence
  ENSG00000249534_5 (sequence is synthesized)
tgattttgctgaagagaaagatttctggctgtcaggtctgcatagacattggaggcactgagttccctgctcatggagatatttttcacagagcctggataatcatttggctggatttgt

SEQ ID NO: 948007 - DNA, 120 bp, Artificial Sequence
  ENSG00000249534_6 (sequence is synthesized)
aacaactgtgtatcatacagcatgaaaatgcattttctagcttcccttgaagtgaaatgtgagcaaaaatgatgccagccactcccagaccggcccatagaaacctcccatattctttct

SEQ ID NO: 948008 - DNA, 120 bp, Artificial Sequence
  ENSG00000249534_7 (sequence is synthesized)
tcttctgctgctggatattgacacaggggatgactttgaaagctgagtattgaagatggcagaagctgtctttcagccttggtccctgaacaacatgttgagcagatcccgtggtaatct

SEQ ID NO: 948009 - DNA, 120 bp, Artificial Sequence
  ENSG00000249534_8 (sequence is synthesized)
ggaactgccctggactgtaggaatcaacttctttatacaacaatggcagagaagttctacaatatggagtcctgtgataaaaggtccagctgactgacccaccagctggtgaccagcaga

SEQ ID NO: 948010 - DNA, 120 bp, Artificial Sequence
  ENSG00000249534_9 (sequence is synthesized)
gcagaggaggagcaagcacaggaccttcacctttcctgccaggtgtgggcgccagtcaaggtgggctccaggctctgatgcaggcatgagaggatgttgcagcagatgtgctgcttgctt

SEQ ID NO: 948011 - DNA, 120 bp, Artificial Sequence
  ENSG00000249534_10 (sequence is synthesized)
ttaaagctctggaacacaacaaagatgaggttttctgtagatgtgtacatgattttcatatagaaagatttcctttttcctaaagtctagaaaacaagtaaataccaagtgaatcactga

SEQ ID NO: 948012 - DNA, 120 bp, Artificial Sequence
  ENSG00000249534_11 (sequence is synthesized)
aggcacttcctgctggctccttccagacaaggagcctctgttcgccttgggactggggagcaaacagcctctgactgtcccagctgggtaggctggaacttggatgtgcattggcaggtc

SEQ ID NO: 948013 - DNA, 120 bp, Artificial Sequence
  ENSG00000249534_12 (sequence is synthesized)
gagtgagacataaactcttactatgcttgagccattttacatgtaacagcagttagctttccttacttaatgctctttataccctgctactaaatagcaagaattgtaactttagatcac

SEQ ID NO: 948014 - DNA, 120 bp, Artificial Sequence
  ENSG00000249534_13 (sequence is synthesized)
gaattgtaactttagatcacaggactatgtgaatagtcattatatttgtcaacaactctaacaggctgaactttttattcctcagttatttaaaattgtggtaaaatacacataacataa

SEQ ID NO: 948015 - DNA, 120 bp, Artificial Sequence
  ENSG00000249534_14 (sequence is synthesized)
agtgatgacctagttgtcttgagggccaggctgaggagaagcctgatgggttacgcttcagaatttcatgtgctcatgggagaagagtccctgactgcagaacccctgaggtcctgaaag

SEQ ID NO: 948016 - DNA, 120 bp, Artificial Sequence
  ENSG00000249534_15 (sequence is synthesized)
cactctctggcaaactcaggcgtgattctttccttgctaagcctcagtttcttcatctacaaagggagggcaaggataagctggggactatgtgctgatggaatgactgattccttctgt

SEQ ID NO: 948017 - DNA, 120 bp, Artificial Sequence
  ENSG00000249534_16 (sequence is synthesized)
tcttgggcatcagtggacacccaacacagcctcattcaaggagaactggtcactttcaactcctttcttcagcagaggatccttccttccttccctccccactgggtcatgtgaggacag

SEQ ID NO: 948018 - DNA, 120 bp, Artificial Sequence
  ENSG00000249534_17 (sequence is synthesized)
aaggattgtgctatatcagttttgggggattccacattctcatttagaggaaaaagaacctgcttccagttttacccctggaactagaaaattaatctttgatcagaccaatcccattta

SEQ ID NO: 948019 - DNA, 120 bp, Artificial Sequence
  ENSG00000249534_18 (sequence is synthesized)
agaaatttgttttgtttggctggcaagtatttgaaattttaaataattatttgccacacttctaaattgggaagttttacaaaaatatctggatatatgacttctcttaaaccatcagaa

SEQ ID NO: 948020 - DNA, 120 bp, Artificial Sequence
  ENSG00000249534_19 (sequence is synthesized)
gttccagcaacagttctaagtatattccacatagaaaagactgattggagctgaacagttgttgtgccctttcaaagggtcatatgctctgtgtttactcatagtctccacacagccctc

SEQ ID NO: 948021 - DNA, 120 bp, Artificial Sequence
  ENSG00000249534_20 (sequence is synthesized)
tccgctcactcatccagccactttcagcatttgagtttacaacccccagtctagatcagtgtttttcaaactataggtcatcccattgtgggagtcattaaatcagtgtcttggataacc

SEQ ID NO: 948022 - DNA, 120 bp, Artificial Sequence
  ENSG00000225427_0 (sequence is synthesized)
aacagtgcccaaaggaaccaagtgaaattaccaaattagaagtgataagaggttgactctctccagaaatttattgtaattagaaagaggtaatggtgtctaaataagatgaaagaagat

SEQ ID NO: 948023 - DNA, 120 bp, Artificial Sequence
  ENSG00000225427_1 (sequence is synthesized)
taacaaaaactactagaatgaggtgaagccagaaaggaagagtcataatcaaagaagagagtgatcaagaatccaaaatagacagagagagcaggctcttagagaaatgggagaactacc

SEQ ID NO: 948024 - DNA, 120 bp, Artificial Sequence
  ENSG00000225427_2 (sequence is synthesized)
gcactgactctgcacgtaggagacaggcaggagaggagcgccccagccagagctcaacatgcgcaaacaggaagtgtgtccgaggttttctggagctcacaggagccggggacccacagc

SEQ ID NO: 948025 - DNA, 120 bp, Artificial Sequence
  ENSG00000225427_3 (sequence is synthesized)
ctaccatgtgtggacacagcaagaaggcagcatctataagctaggaaggaggccctcaccagacttggaatctgctggcttcctgatcttggcctttctagcctccagaactgaacatgg

SEQ ID NO: 948026 - DNA, 120 bp, Artificial Sequence
  ENSG00000225427_4 (sequence is synthesized)
gatgccagctgacctcggatggagatttagtgctagatgtaaaaggctttgtttacagacaattaaaaaccacataaatttaaattgtcaaagaagaaatggtttccaaagcttctaaca

SEQ ID NO: 948027 - DNA, 120 bp, Artificial Sequence
  ENSG00000225427_5 (sequence is synthesized)
gcctggtagcccctcctcagccctgtgcaggaaaggcccagaggcaaatacaaagccaccaacccaaatgcctgtggagtttgccagaaagccagatcctgctgcttctgctgcttgtta

SEQ ID NO: 948028 - DNA, 120 bp, Artificial Sequence
  ENSG00000225427_6 (sequence is synthesized)
ctgatgttgaaaaataaaatcttatacagcttcaaatgtaggttctttgagtgctaatcaaacagcaagaaggcaacagatgaccacggaggaggtggctgcacgaaagtacgccacaaa

SEQ ID NO: 948029 - DNA, 120 bp, Artificial Sequence
  ENSG00000225427_7 (sequence is synthesized)
gtatggaattactgcaagtaggcctttcggcaatcaatgtgtctgaaccttttgtgtgctctccattttttcccaccgaaggaactagatgcaaagattaaaaagtgacacaaacacaaa

SEQ ID NO: 948030 - DNA, 120 bp, Artificial Sequence
  ENSG00000225427_8 (sequence is synthesized)
ctaccatgtgtggacacagcaagaaggcagcatctataagctaggaaggaggccctcaccagacttggaatctgctggcttcctgatcttggcctttctagcctccagaactgagagcct

SEQ ID NO: 948031 - DNA, 120 bp, Artificial Sequence
  ENSG00000225427_9 (sequence is synthesized)
gggcaggttttctattctcctgagtggaaccatcagacttttcttgagggattggccctctagtgaagagcatggagtggactgggccagggaaagatcctcagataatccttacatact

SEQ ID NO: 948032 - DNA, 120 bp, Artificial Sequence
  ENSG00000225427_10 (sequence is synthesized)
ctacatcctaggtttgaggaaactgtgaggacatctaagtggcaatttccaaaaggcagctgaattaatgtgtctggagataagaaaaagactagaatgaggtgaagccagaaaggaaga

SEQ ID NO: 948033 - DNA, 120 bp, Artificial Sequence
  ENSG00000225427_11 (sequence is synthesized)
cttcaggtaagcagctctgcttactcatctcgtactcctgcctagtaagagcccagaaaaccttcagctctcaatacattctgaataaaatttccaacggaaagagtaaagaagattcca

SEQ ID NO: 948034 - DNA, 120 bp, Artificial Sequence
  ENSG00000225427_12 (sequence is synthesized)
taccatgtgtggacacagcaagaaggcagcatctataagctaggaaggaggccctcaccagacttggaatctgctggcttcctgatcttggcctttctagcctccagaacttattataaa

SEQ ID NO: 948035 - DNA, 120 bp, Artificial Sequence
  ENSG00000225427_13 (sequence is synthesized)
accatgtgtggacacagcaagaaggcagcatctataagctaggaaggaggccctcaccagacttggaatctgctggcttcctgatcttggcctttctagcctccagaactattgcccggg

SEQ ID NO: 948036 - DNA, 120 bp, Artificial Sequence
  ENSG00000225427_14 (sequence is synthesized)
ttgccttctgcactgcagcctctgaattgcttgctactttcttacttgtgcacagcaagggggcataattacccattggcaagtgcttctggcctctggacttcagggacctagacgttc

SEQ ID NO: 948037 - DNA, 120 bp, Artificial Sequence
  ENSG00000225427_15 (sequence is synthesized)
aaagcctgctggaataaaagaacttcctaaggttcagaacacaacctaacaccagcattcagggaaacaacacaaagacttgtccatgatggttacagccacccaaaaaagccatcttca

SEQ ID NO: 948038 - DNA, 120 bp, Artificial Sequence
  ENSG00000260651_0 (sequence is synthesized)
ggaaattcccactgacgtcgagagagcatacagacagacggacacacgcgcgcacgcagcgggggcgggaggtagggtcgctgccgggggtgggggaagcccgcacttctaggggcgctg

SEQ ID NO: 948039 - DNA, 120 bp, Artificial Sequence
  ENSG00000260651_1 (sequence is synthesized)
gcttcctagcagggcgctcccgaatcccaagggctggagccggtagggaagcccccaggaagcgcctgccgggcccaatcaatggtcggggaacgcaggcagcacggaggcggcggcggt

SEQ ID NO: 948040 - DNA, 120 bp, Artificial Sequence
  ENSG00000260651_2 (sequence is synthesized)
ggcagtgccgctgatagagtcatgcggtccatagcccctaagggcaggcccgagcagctggagggtcggcatggatccaagcatgccagatataaaaataaagctcatctgtatattcca

SEQ ID NO: 948041 - DNA, 120 bp, Artificial Sequence
  ENSG00000179219_0 (sequence is synthesized)
gttggacatcagctggggctggagtcacctgcaggctggcctggggtcgggcagggggatctgcttccaaggctctgcttcagaggcggctccctcccacggtaggcgcatggtttcctg

SEQ ID NO: 948042 - DNA, 120 bp, Artificial Sequence
  ENSG00000179219_1 (sequence is synthesized)
tctccaaagtgggcctctgcacaaggctgcttggatgacctcatgatatggtggctgctgaccagggtagaggctggaaccccttggatggcccaacctgggaggtactagccatgcctc

SEQ ID NO: 948043 - DNA, 120 bp, Artificial Sequence
  ENSG00000179219_2 (sequence is synthesized)
tgccattgggcccggccacacaggttcctgccctcttctccgctgcccttgtgcctcccgtgtcctcgctgcgtcctaaccaaatgctggactggcagagactgaaaacgccccacgggg

SEQ ID NO: 948044 - DNA, 120 bp, Artificial Sequence
  ENSG00000179219_3 (sequence is synthesized)
cccctgtggcttgctcactcgggctctccggagagtgggtgccaaccccctgcgccctgagcatcttggctctgcttggcttgcagctggatcccctttttggactttggggctgcacac

SEQ ID NO: 948045 - DNA, 120 bp, Artificial Sequence
  ENSG00000179219_4 (sequence is synthesized)
gcaccttgttctggagcgaatgggctcgtgagagccgcaggccctgaggcatggcctaactcaggcagagtagttggcgaaggccccagagggacccaggctatcgtcctgcagctgccg

SEQ ID NO: 948046 - DNA, 120 bp, Artificial Sequence
  ENSG00000179219_5 (sequence is synthesized)
gcaaaaccatcaacggatgctgacatcagcgagcaaaagtgtgatgaagaacggcgatttgcatcgtttcaaagtatctctccatgagatacttactaatttcaaaggggacaatggcca

SEQ ID NO: 948047 - DNA, 120 bp, Artificial Sequence
  ENSG00000179219_6 (sequence is synthesized)
gcctggcagatgtcacttacactgagtgatccatgttgccatctccagggtgacacggtgtgcctgtgacatgaagcgccaaggggaacccaatgtcatttctggggttcttcctgcccc

SEQ ID NO: 948048 - DNA, 120 bp, Artificial Sequence
  ENSG00000179219_7 (sequence is synthesized)
aaacagtccatttggttaaactcacgagagtgtgtgcttgtcgatgtagctgattctgtatgggtggggatttggaccagcccttcactactcaaagtggggtctgtacaccagcagcag

SEQ ID NO: 948049 - DNA, 120 bp, Artificial Sequence
  ENSG00000179219_8 (sequence is synthesized)
tcactactcaaagtggggtctgtacaccagcagcagggttacctccttaaccccgagcttgtaagaaagcacagccaagcatggtggctcatgtttgtaatcctagcactttgggaggct

SEQ ID NO: 948050 - DNA, 120 bp, Artificial Sequence
  ENSG00000179219_9 (sequence is synthesized)
agagtctcgggccctgccccagacctagaatcaggacctgcatgttaacaaaccccacatctgtgatccctgtccacagtaaaggctgagaatgcttaatccaaaacaccttccgcctcc

SEQ ID NO: 948051 - DNA, 120 bp, Artificial Sequence
  ENSG00000179219_10 (sequence is synthesized)
cagagcttgtggctttgatgccatttgtctgaacatcacaaggaaccacgtgggaaaacaggacttcgtggcgtgccctggcagacaagccaaagcaactgtgggcatcaggctgtgggg

SEQ ID NO: 948052 - DNA, 120 bp, Artificial Sequence
  ENSG00000268854_0 (sequence is synthesized)
tgcgtgtcgatctgggggacagtttaataaactgccacacaacacagctgagctccacacagccacatgaggatggggacagccattccttgggtttctgaataacgtatcaagtgagca

SEQ ID NO: 948053 - DNA, 120 bp, Artificial Sequence
  ENSG00000268854_1 (sequence is synthesized)
gcttgtacatcaggaccgtcttgccaaaacaacagttgcttttggctgctggaagctgtagcttttcaaaacgttcacacatttcaatgtatcgtcgatgtttttaaatagacttacagg

SEQ ID NO: 948054 - DNA, 120 bp, Artificial Sequence
  ENSG00000268854_2 (sequence is synthesized)
gagggtggcacacagcaaaggcccgcagggacaaaggaggagacatagccaccagcttccaggccatccagggccccgggtcgccttgggatccggacccggtacaggccattcagggct

SEQ ID NO: 948055 - DNA, 120 bp, Artificial Sequence
  ENSG00000268858_0 (sequence is synthesized)
gctgcgccctccccactccacagatgaggaagctgaggttaaagtcacttgccccaggtcactccgcaagttgaagcgcaaccaggatactctggaacaggatgcctgacttcagaggag

SEQ ID NO: 948056 - DNA, 120 bp, Artificial Sequence
  ENSG00000268858_1 (sequence is synthesized)
aggcgcgtaaccaccaggcaactggccccacgaaaacaagtcccgcaacttcccttctttggctcctacttgctcccggaagaaaagccttaaacggtattcaagccctttaggatctga

SEQ ID NO: 948057 - DNA, 120 bp, Artificial Sequence
  ENSG00000268858_2 (sequence is synthesized)
tgtcctaggactccactctgggcttccagcctggggtggtactggtccctaggcatggaagctcctcccactgccccttccttcacccggccacctcctcccacaggtgtcttcctggta

SEQ ID NO: 948058 - DNA, 120 bp, Artificial Sequence
  ENSG00000268858_3 (sequence is synthesized)
ctcttgcacaggcccgagtcccttaccaccacggccttagcctgctctcgtgctctcagtaatgttttctccatttgctgcctttcattctttccagagattcttgctcaacccaaccag

SEQ ID NO: 948059 - DNA, 120 bp, Artificial Sequence
  ENSG00000268858_4 (sequence is synthesized)
gccagcccggggactagggacatgtagggacaatagtccctgcttcaggcagttcagggcagaccacagagatgtgacattacagaccattgtgagcagaggccttgtcccattctgtgt

SEQ ID NO: 948060 - DNA, 120 bp, Artificial Sequence
  ENSG00000268858_5 (sequence is synthesized)
tgcatccctaagccaggaacaaagtccagcccaggcctggctccaggggacacgcagtagtatcctctggcctgtgcaagtgtatctgtagcctcacatgccaccatgtgagtctgcaat

SEQ ID NO: 948061 - DNA, 120 bp, Artificial Sequence
  ENSG00000268858_6 (sequence is synthesized)
ctgtctgtgaatgccctggtgtagaagccaggagtttggaggtgggagggagccctacagaatgatagccagtgctaactcctgggaatgtccagccactaagacctgcccacagccctg

SEQ ID NO: 948062 - DNA, 120 bp, Artificial Sequence
  ENSG00000268858_7 (sequence is synthesized)
ccatgccaatgtcctccttttcacgggagcagcttgcacagactttcagcgcacagctggcattgtcttcccaggagccatcctgtaacccaggccaggtgaagggctcctccctgggac

SEQ ID NO: 948063 - DNA, 120 bp, Artificial Sequence
  ENSG00000268858_8 (sequence is synthesized)
cccacagccccgttcccatcatccttttgtggtgatcaaggcacccatcacacagtattgccataaaccgggtcaggttaacctttcattcccttaggagctgggtgggggcagccaaaa

SEQ ID NO: 948064 - DNA, 120 bp, Artificial Sequence
  ENSG00000268858_9 (sequence is synthesized)
gtatttgtaggaggaagagagaaaggaggggacagagctaggaagaatgggaggacggtcagaacgcccctgtgaaggaaggagagcaccaagtccccgtgttctgcctaccctccccca

SEQ ID NO: 948065 - DNA, 120 bp, Artificial Sequence
  ENSG00000268858_10 (sequence is synthesized)
gacagcagatcaggagcaccccgcgcgcccccccccgccccgccccgcgtcggcgccggccccctgcaatggttggcggtatggggaggtgaaccaagaaggccaggagttcaagtgcgt

SEQ ID NO: 948066 - DNA, 120 bp, Artificial Sequence
  ENSG00000268858_11 (sequence is synthesized)
gatcccccactggggcatataggttacagccgccagggcaactgaaactcctcaggctccagagggctgaagtgagtcgcctccacgttcttgaggtgcttccgagccaggaacagtgcg

SEQ ID NO: 948067 - DNA, 120 bp, Artificial Sequence
  ENSG00000268858_12 (sequence is synthesized)
cctccagctcctcttcgcagcgtgcacggtaggagcgcagcagcgccaggcaccagtcctcgtccacgcggtagcgtgcatagaaggcggcctcctgcgccaagctgccagcgcgcagcc

SEQ ID NO: 948068 - DNA, 120 bp, Artificial Sequence
  ENSG00000268858_13 (sequence is synthesized)
agcgggtgacgacggcgcggccctctcgcgccatcacgacggggtagcggtgctccagcaggcgcagcagcagctcattgccccggttgccctccacgtcaccaggtgacagggggcgca

SEQ ID NO: 948069 - DNA, 120 bp, Artificial Sequence
  ENSG00000268858_14 (sequence is synthesized)
ggcggcccgaagtgctgaccacgtcatcctgcgtgcgtcggagcagcagcaccggccccgggtagcagcacagctgctcggccacgttgaggttgaagtgctcgcgcacggtgcgcacca

SEQ ID NO: 948070 - DNA, 120 bp, Artificial Sequence
  ENSG00000268858_15 (sequence is synthesized)
ccagccccttccaactgtggggcatgaccttcagcgccagcggcacaaggtcgtcgaaggtggcgtccagcaccagtgcacccagctccgggtaggtcatggtggcccaggtggccgtga

SEQ ID NO: 948071 - DNA, 120 bp, Artificial Sequence
  ENSG00000268858_16 (sequence is synthesized)
agccgccaacagaccagccgtagaccaccaggtgcgcgggcgggaagtgcaggcggtgcagtgcgtactcgaccaccacgtccatggcgttggcgtcgtgctgagggaagggcacgccag

SEQ ID NO: 948072 - DNA, 120 bp, Artificial Sequence
  ENSG00000268858_17 (sequence is synthesized)
tgctgctgccgaagccggggtggttccagcccagcacggagtagccggcctcgagcggtgcagacagacagcccatctcgtagaagcccgcgttgccttcgcagcagatgacgaggcgcg

SEQ ID NO: 948073 - DNA, 120 bp, Artificial Sequence
  ENSG00000268858_18 (sequence is synthesized)
gcccgtgcacgtggctgcccgggtgctggcggcggtccatgaacatagtgtcgatctcgttgccgtcacaggccaccagcttggcgcgccggccgtggtagcgctccacgaggcgctctt

SEQ ID NO: 948074 - DNA, 120 bp, Artificial Sequence
  ENSG00000268858_19 (sequence is synthesized)
ggccctgctgcagcagcggcagcagcgcgcgcgtcatcagggacacggagccggggtacacgagccagcggcccagcgagtgggccagcgcgtagctagcgagctggccgggcagctcgc

SEQ ID NO: 948075 - DNA, 120 bp, Artificial Sequence
  ENSG00000268858_20 (sequence is synthesized)
ctgctgcaagaggcactgcgcctggctgcgcgccccacgtggaggccgccccagcgcatccccgcccagcgtctcgtcccgcagcaaccacacgcccgccgcggctgccgcgcaggtcag

SEQ ID NO: 948076 - DNA, 120 bp, Artificial Sequence
  ENSG00000268858_21 (sequence is synthesized)
tcagcgcccggtggctgctgctccggcccacggcgcgcacgtcatcccagcggaaggccacgggccagccgcggaatgggtaggtgtagctggcggtcaggtagatcttgaacacgcgca

SEQ ID NO: 948077 - DNA, 120 bp, Artificial Sequence
  ENSG00000268858_22 (sequence is synthesized)
ccagcgccttcacgaagcagatgacgcacatgagcggtggccctaacgcccagccgctgggccgggatcgccgcgagaggcacagggcagtcttaggggataccggctcccggacaagcc

SEQ ID NO: 948078 - DNA, 120 bp, Artificial Sequence
  ENSG00000268858_23 (sequence is synthesized)
ctgatggcctttgtgacctggccttccagggcggagggaaggctgcatcctgttgctaggtgatgggtgcacaaagggttcccagagatgatgaacccaaggttctgcccgtcccccgcc

SEQ ID NO: 948079 - DNA, 120 bp, Artificial Sequence
  ENSG00000268858_24 (sequence is synthesized)
ttcgccaagaccccaccagctaaacgctcccaggcccagctttcccacccatgatttgagcagctactgtctccctctttcttccttatttatttattaaattgagatggggtctcacta

SEQ ID NO: 948080 - DNA, 120 bp, Artificial Sequence
  ENSG00000276007_0 (sequence is synthesized)
agggagcagcctgttctgccaaatcacacaagggcatgtgttttcatgacattattgcttttgagtgtgctggcctagcaataatatgatttttttttcctaagtggaaattgtaatatt

SEQ ID NO: 948081 - DNA, 120 bp, Artificial Sequence
  ENSG00000276007_1 (sequence is synthesized)
ataatatgatttttttttcctaagtggaaattgtaatatttaagtattaatacctctgtttaaggttcattttgaacgccttggtgaccctatgtttttttctttgttttttgttttgtt

SEQ ID NO: 948082 - DNA, 120 bp, Artificial Sequence
  ENSG00000276007_2 (sequence is synthesized)
ggcgtgagctactgcacccgcaaccctatgtttttttctaagaatatagtgtcccttgccccctgctacaagccttacccagtgttacataatttattgtaattaaattgtttattaatg

SEQ ID NO: 948083 - DNA, 120 bp, Artificial Sequence
  ENSG00000276007_3 (sequence is synthesized)
atacattcttgctgtagaagaaaacgtgtccttttgggctcagtacagtatatgtttcttaagtaagagggatcatattaaaccagctacttaatgtgaagcagatagccagtgttctcc

SEQ ID NO: 948084 - DNA, 120 bp, Artificial Sequence
  ENSG00000276007_4 (sequence is synthesized)
atgtacaatcttagggagggtaatttttgttttggctgtgtaattatggtttgaggcagcccattaatcgcatatttcagctgtcaaatagaaatttggcccagaaaggaatacactttg

SEQ ID NO: 948085 - DNA, 120 bp, Artificial Sequence
  ENSG00000276007_5 (sequence is synthesized)
gctttacaaaactgcttattttcaaatttttaaatggggacaaaaacgaatatgctatattatatacttttatttatataatttttttttcagcaactttttctcttttgaaaatgcaag

SEQ ID NO: 948086 - DNA, 120 bp, Artificial Sequence
  ENSG00000276007_6 (sequence is synthesized)
agcctgaaaaacattgtgaatatacttgtaacattgcaaagctatttcaccagagtaaagatattttggttgttcatatacgagtgtgttcgttgtttatctaataaattgttaaaacta

SEQ ID NO: 948087 - DNA, 76 bp, Artificial Sequence
  ENSG00000273747_0 (sequence is synthesized)
tgattaaggctgaagtgagctgtgatcgcaccactgctcttcagcctgggcgaccaagtgagaccctgtctcaaaa

SEQ ID NO: 948088 - DNA, 120 bp, Artificial Sequence
  ENSG00000273747_1 (sequence is synthesized)
ctcttcagcctgggcgaccaagtgagaccctgtctcaaaaaaaagtaaccaagaataaagcagggtctgctcagccccttggaagtcacaggatgctcacaccagttacaagaaatttag

SEQ ID NO: 948089 - DNA, 120 bp, Artificial Sequence
  ENSG00000273747_2 (sequence is synthesized)
ggacaaagaagagctccttatatgctactgcttttgtgaaggaccccaattttctgcaaccagactttttagatcaactctaaaacagaactctttatgcttacaatgctactaaggggc

SEQ ID NO: 948090 - DNA, 120 bp, Artificial Sequence
  ENSG00000273747_3 (sequence is synthesized)
cttctgattgctttgacaattatattgaaatttggattctgtcaaaacaatatcttaaagttacctgtttgtgttatttcaaaatgatatatggtgggggaggaaactgtacctgtatat

SEQ ID NO: 948091 - DNA, 120 bp, Artificial Sequence
  ENSG00000273747_4 (sequence is synthesized)
tcacttgataatctgtagggccatgaatagatccatacaagccaaatccaactatagagatccttctattaactgtgaatctgagagaaagaagccaaaaataaaatataattaatccca

SEQ ID NO: 948092 - DNA, 120 bp, Artificial Sequence
  ENSG00000232712_0 (sequence is synthesized)
agagatgtctgggccttgaccaatgagatcttcaggagtacttcagcagctgtttcggatttttctctgtggatgtcctcatgggactaagtggaaattggaaaagtatcatcaaactct

SEQ ID NO: 948093 - DNA, 120 bp, Artificial Sequence
  ENSG00000232712_1 (sequence is synthesized)
tcttgagattcctttttgataaggaagattgcagaaaaatttgtggctgaagaggatgcactgagaagaaagataactgcccttattctaaatcccaatcttcaatcaagtactaagatg

SEQ ID NO: 948094 - DNA, 120 bp, Artificial Sequence
  ENSG00000232712_2 (sequence is synthesized)
tgggaaaatgcactgaccagtcatcagcaaattctagcccattcagcaggttgaaaagctactgaccaggaaggtcatttccagcatttcccatagcttcaagattactagtacagacgc

SEQ ID NO: 948095 - DNA, 120 bp, Artificial Sequence
  ENSG00000232712_3 (sequence is synthesized)
agaagctgggcaatctcgttccacattccacctgaatgacaggtatgctagataatcttaacagcagaaaaggctaattttatattgtcaatcataacaaagttagatccccacaactcg

SEQ ID NO: 948096 - DNA, 120 bp, Artificial Sequence
  ENSG00000232712_4 (sequence is synthesized)
taagcagaatcctgtaaatatcctccctatttatatctttaacataaaacagcctaagtggcacatgacaggtgaggagaacagcactatgttgtaggctaagcagacccaaagccactc

SEQ ID NO: 948097 - DNA, 120 bp, Artificial Sequence
  ENSG00000232712_5 (sequence is synthesized)
actcactcactcagccagccaaacaaggtcccttcagaggggctttcacagacatgcatctactgaccactcctgagtaataatctattctctgctagtaaacagtgcagatgtatttta

SEQ ID NO: 948098 - DNA, 65 bp, Artificial Sequence
  ENSG00000232712_6 (sequence is synthesized)
taatctattctctgctagtaaacagtgcagatgtattttaataagaggattgcggcctggcacgc

SEQ ID NO: 948099 - DNA, 81 bp, Artificial Sequence
  ENSG00000232712_7 (sequence is synthesized)
attaataagaggattgcaactttgtgatctttttgattttggagcattcggaaacaagaatggccatcccaccacgacagc

SEQ ID NO: 948100 - DNA, 120 bp, Artificial Sequence
  ENSG00000232712_8 (sequence is synthesized)
gagcattcggaaacaagaatggccatcccaccacgacagcaatgtcaagccagtaagccctgacttgcttttcatagctgccacccccaggtaggagtcctgggagctggtgaaggacag

SEQ ID NO: 948101 - DNA, 120 bp, Artificial Sequence
  ENSG00000232712_9 (sequence is synthesized)
ctgctctgtgagcttcaaggtcttctttcagaatgccattgtgattacagagcctataaaataaaaaagatgctgcaggagatgcttatttaagcacagatcaccagcttctagaatcta

SEQ ID NO: 948102 - DNA, 120 bp, Artificial Sequence
  ENSG00000232712_10 (sequence is synthesized)
tgatggttcttcatggtttactgaaatatatctgtaatataatctggacattaaaatgcagcaactatactgtctctcaacaaagacataaaatggggcagtttgaaaaacttgtttgcg

SEQ ID NO: 948103 - DNA, 120 bp, Artificial Sequence
  ENSG00000232712_11 (sequence is synthesized)
tgtatgcggcaattttaaatccatcagaggaagtaacttttaaccctttgttgactttaatgatgttcaaatccacagctgggcaatctcgttccacattccacctgaatgacaggtatg

SEQ ID NO: 948104 - DNA, 120 bp, Artificial Sequence
  ENSG00000232712_12 (sequence is synthesized)
ctagataatcttaacagcagaaaaggctaattttatattgtcaatcataacaaagttagatccccacaactcgtatgaaatttacttaaattgtcactgctaagaaattgaaaacttctg

SEQ ID NO: 948105 - DNA, 120 bp, Artificial Sequence
  ENSG00000232712_13 (sequence is synthesized)
gctgaagtataggttacatcctctatttctgaatgtagaaaaatgactattagttttccattcagatcctattgcagtcaaattttctttattcttaatcagaataggaaggcatggaaa

SEQ ID NO: 948106 - DNA, 120 bp, Artificial Sequence
  ENSG00000232712_14 (sequence is synthesized)
gagggatttatcttttattatctatatccagtctactgagtaagtgataagagtctaaaaatttggtcactgttttaggttaggtctgtcgttgtatcacagtagccttcaaatagatta

SEQ ID NO: 948107 - DNA, 120 bp, Artificial Sequence
  ENSG00000232712_15 (sequence is synthesized)
gttaccatcttttaaaaaatgactattttgagggatgcatgattctaaaaagctataggagaagacaaaacagtgtttctactttaaaggagctgttcacatttgtagttgggaatattc

SEQ ID NO: 948108 - DNA, 120 bp, Artificial Sequence
  ENSG00000232712_16 (sequence is synthesized)
aacacacaccccaaaaagaaaatgaagattagttacaaagcaacttataaagcaatatgttaatttgcaaggtactaatttgtaaatagcactacagttggtgaagttactggacctagt

SEQ ID NO: 948109 - DNA, 120 bp, Artificial Sequence
  ENSG00000232712_17 (sequence is synthesized)
tgatggctatgtgcctgatgtgataaggatgaaggagatgtggtccatctattggagggtgagtgacaactgcagactcaggcttagccctactctgaagtgtacctttatgctgggaag

SEQ ID NO: 948110 - DNA, 120 bp, Artificial Sequence
  ENSG00000232712_18 (sequence is synthesized)
gaataataacaggcacacaagattcaagtgctattcctgacccttatccacactgttggtgctccagctccttgccaattcccaggcttctgtctaaactctaagcctggattctcagtt

SEQ ID NO: 948111 - DNA, 120 bp, Artificial Sequence
  ENSG00000232712_19 (sequence is synthesized)
cttgtaggtcagaccccgagttgggtccttcactcctgggttctgctgccccaaagcttccagacttcaggcctatctgacttatagtacctatgaatacctcttattgcctaggcaaaa

SEQ ID NO: 948112 - DNA, 120 bp, Artificial Sequence
  ENSG00000232712_20 (sequence is synthesized)
tctggatcctaattcttcctggaagcctttatcttgtcatcactcaatttccagaataacagctgcccttaagaggtcccaccaatggtgagccaatttcagagtagtaaaagagagcct

SEQ ID NO: 948113 - DNA, 120 bp, Artificial Sequence
  ENSG00000232712_21 (sequence is synthesized)
ggcttcactaaggaggaggaacgtgagccaggcaggttttagagagaaggggagatgacatttgaaactaaggagagacacaggcaaaggtgatgggaaatgacagggtaagagtggtgt

SEQ ID NO: 948114 - DNA, 120 bp, Artificial Sequence
  ENSG00000232712_22 (sequence is synthesized)
ggggaccagcaagggagacaagtttggctgggtaggggttgctgttggtcatagtaggatagcaatggaaaattaaattcaatatgaaactctggaaagaatacagcaataagcttgtgg

SEQ ID NO: 948115 - DNA, 120 bp, Artificial Sequence
  ENSG00000232712_23 (sequence is synthesized)
atttctgagccattgctggtttctcgaaagcagtgtttttcagagggttagcctggcagccttgcaaggatggagttggtgaggagagagacctgaggcccagagaccagtcaggagact

SEQ ID NO: 948116 - DNA, 120 bp, Artificial Sequence
  ENSG00000232712_24 (sequence is synthesized)
gactttgtgctgtaggtggcagaggaagagcaggtaagtgggtgaggcaagggaggaagaaacagtccttcatcgctcacctggggagcactcagctgactacagggaaggtaacggaga

SEQ ID NO: 948117 - DNA, 120 bp, Artificial Sequence
  ENSG00000232712_25 (sequence is synthesized)
ccatgctggctgctggtggggtggggctgtggagagctggggccagtgcctccatcaaaagctccccctgaggagtgtgtgtcccagtgaacctagatcttctcagtttttaagagaagc

SEQ ID NO: 948118 - DNA, 120 bp, Artificial Sequence
  ENSG00000232712_26 (sequence is synthesized)
tggaagtttataattgcaagttttgtttttatttaacagctcccaatttttaaaatgtggtgactaattcaaaaggttgcctacccactgacaggacaaagagaacctatctgcagccca

SEQ ID NO: 948119 - DNA, 120 bp, Artificial Sequence
  ENSG00000232712_27 (sequence is synthesized)
aggtaggcctgcaggccaccagcttatgatctccaagcttagattccctttagtcccacttcccaaaccaggatgcaaacctggagcaaggaccatggcttaatgtttttggatatcttc

SEQ ID NO: 948120 - DNA, 120 bp, Artificial Sequence
  ENSG00000232712_28 (sequence is synthesized)
taaaaggttagtactgtgcagtactggaaactggctgacactccatggtgctggtggatgctgcagtgggagcaggttccctccatggtaaggtgtattttatctttgccatccttagga

SEQ ID NO: 948121 - DNA, 120 bp, Artificial Sequence
  ENSG00000232712_29 (sequence is synthesized)
atggtgacaacagaaggcagactgacttttagtggtctcgttattgtttttaaattcttccatagaatgcacctacttattacctgcatctgcactcctccgacatcccctcactaccac

SEQ ID NO: 948122 - DNA, 120 bp, Artificial Sequence
  ENSG00000232712_30 (sequence is synthesized)
catggcatgcatgccagtgctcagtaatgcttgattgtcctgccaggacaaatcccagataacctttcttctttgccgatcttatcaatataagtgtcaggcttacttagactagctcat

SEQ ID NO: 948123 - DNA, 120 bp, Artificial Sequence
  ENSG00000232712_31 (sequence is synthesized)
ctcatcaccctctagaagcttccctgactaccttactcatagggatctttcttacccctgaattctttagcacaaaagagacaccatcttacctcttaccttgtgctattccatagttaa

SEQ ID NO: 948124 - DNA, 120 bp, Artificial Sequence
  ENSG00000232712_32 (sequence is synthesized)
gtcacctctgccgagtcttctcaacaagagcaaaagcctggtgagaatagcaactgcacttctaaattttttacttttatttctcatagcattcggcacaatgctgagcatacaacttaa

SEQ ID NO: 948125 - DNA, 120 bp, Artificial Sequence
  ENSG00000232712_33 (sequence is synthesized)
tgatactacatgtcaaatgacaagctgaaacttaaacccagatgaaagaaattcatatgacacacttatctttacagtatttttttttttttaataaaaatgagatggggtcttgctttg

SEQ ID NO: 948126 - DNA, 120 bp, Artificial Sequence
  ENSG00000232712_34 (sequence is synthesized)
tcccaccttggcctcccaaagttctgcgattacagacatgagccaccacacctggctgacagtatttttataatggttgttgttacaccagtccagggtttcccccttggtactgggtga

SEQ ID NO: 948127 - DNA, 120 bp, Artificial Sequence
  ENSG00000232712_35 (sequence is synthesized)
tgttacaccagtccagggtttcccccttggtactgggtgatcaatcagctggccacaagcactatgcacagagcttatgatctactctaactcagaactttctcggactaaaagatgagc

SEQ ID NO: 948128 - DNA, 120 bp, Artificial Sequence
  ENSG00000232712_36 (sequence is synthesized)
tggtttatgctgaggatttctaacagtgctcttcccagatagcagactttagtttataaaatattcatcagttcttttgctcaaaagaactcaactaaagaattcaaacgctgtatggaa

SEQ ID NO: 948129 - DNA, 120 bp, Artificial Sequence
  ENSG00000232712_37 (sequence is synthesized)
ttaaatattaaagactatgtgttatagaaacactgtaactattttagaactcaagacctcaattcctttttctatgtgcgttcctgccaaaatcattccagctagaagggcactggcctg

SEQ ID NO: 948130 - DNA, 120 bp, Artificial Sequence
  ENSG00000232712_38 (sequence is synthesized)
aggaacctgtgtccagtctctggcaccaacatgctagccctaccatcaccttgttctctgtgaggtctggcaggtggaggaacctgctgaatgacaagtaacttgtggacacaaatggca

SEQ ID NO: 948131 - DNA, 120 bp, Artificial Sequence
  ENSG00000232712_39 (sequence is synthesized)
ctttaaagatgcatagcttatcttatccaacgacagttaaagcacataataaatgtaaaaaatttggccaaattaaaaataattgctttctagcttcattttcagtcacacaggatttag

SEQ ID NO: 948132 - DNA, 120 bp, Artificial Sequence
  ENSG00000232712_40 (sequence is synthesized)
gagacaactccactccaggctattgggaacactgaaattaagggcttttgtgactttggttccctgtgagcaagatgatctgcaagtggcgacatgaactgattaccaatcactgacttc

SEQ ID NO: 948133 - DNA, 120 bp, Artificial Sequence
  ENSG00000232712_41 (sequence is synthesized)
tggaggctgggaagtccaagatcaaggcaggcgccagcagactctgggtctgacaagggaatgagaagcagcaagttaaatgcagaacagaaatgaagctgttagaccaaattttcagct

SEQ ID NO: 948134 - DNA, 120 bp, Artificial Sequence
  ENSG00000232712_42 (sequence is synthesized)
gaccaaattttcagcttctcacatggtacaattattgtttttaatttctatgtaagcaagttcttaagtcacattgagaagatttttaaaaatccattaacaataatttacatccaacaa

SEQ ID NO: 948135 - DNA, 120 bp, Artificial Sequence
  ENSG00000254819_0 (sequence is synthesized)
cataggtaaacgtatgccatggtggtttgctgcacagatcaccccatcacccgggtattgagcccagcagccattagctattgttcctaatgctctccctccccctccaacaggccccag

SEQ ID NO: 948136 - DNA, 120 bp, Artificial Sequence
  ENSG00000254819_1 (sequence is synthesized)
tgtgtgttgttcccccattgtgtccgtgtgttctcatcattcagctcccactttgaagtaacttttgaaagaccaaactgcagtggccaaaataggaccagaagctagctgaacacattt

SEQ ID NO: 948137 - DNA, 120 bp, Artificial Sequence
  ENSG00000254819_2 (sequence is synthesized)
ttcagtaggatctcctttcctccatctatctctgctccctgattcaaagccctaagttcttcctggaagatgtaagatgttattgaacagacacatcgtgagagtccgttgcttcctcag

SEQ ID NO: 948138 - DNA, 120 bp, Artificial Sequence
  ENSG00000254819_3 (sequence is synthesized)
ttttgaagttttatggaatcaactcagaatcagcttccactgcacatctccctgcagctctccaaacagaccatcttcctgtggactcttccaccaaacacggagagactcttccattga

SEQ ID NO: 948139 - DNA, 120 bp, Artificial Sequence
  ENSG00000254819_4 (sequence is synthesized)
agtgcaatcagaaacattggcaatgcaaaaaagcgacaaaactatttagtgtgaacaacgcatagtatatctggagaagaatgtagaagagaaattaaattgacagaagattctcatgag

SEQ ID NO: 948140 - DNA, 120 bp, Artificial Sequence
  ENSG00000254819_5 (sequence is synthesized)
ttggataaatcactcgacctctctgtgcttcacttcctgtatctctaaaatggatattgtcatctgctttactgggttgttgtaaatagtaaatgaatcaataaacagatgtaaggtact

SEQ ID NO: 948141 - DNA, 120 bp, Artificial Sequence
  ENSG00000254819_6 (sequence is synthesized)
tagaccactgcttggcacatggatttagaatgctgacctgcttattttcatatggaagacaataagctgattccctgtagattgagctaacggccatctgttatgatgggacaatgctga

SEQ ID NO: 948142 - DNA, 120 bp, Artificial Sequence
  ENSG00000254819_7 (sequence is synthesized)
ttcaagaagtgtcatttgccactttatctgatgtcaggaggcaacacatgaaatctgaggacctttaataactcacaacaccttgtgtgtaagatccccggggaaaggcaaccccaaatt

SEQ ID NO: 948143 - DNA, 120 bp, Artificial Sequence
  ENSG00000254819_8 (sequence is synthesized)
agaaacatgtttcactggaagggcactcacttactgatacctcagggactccactttgagggatgcctttatcattcatacctttccatggcatgaatggaaaactgctgcaatgctgct

SEQ ID NO: 948144 - DNA, 120 bp, Artificial Sequence
  ENSG00000254819_9 (sequence is synthesized)
tctgtcctaatgcatttcatgagtcagcatatgacaaagggaagggacacccaggtcagccccatcattgtatctgaaaccaacacttcgaatataattggaatgattacatacgattct

SEQ ID NO: 948145 - DNA, 120 bp, Artificial Sequence
  ENSG00000254819_10 (sequence is synthesized)
agatgttgagtgattagcacagcaagtggtgcccagttggttgctattattactgttgttgttgacattatgattatgcttattttgtgttatttattaaatgaatatacttatcccgta

SEQ ID NO: 948146 - DNA, 120 bp, Artificial Sequence
  ENSG00000233569_0 (sequence is synthesized)
gctaccttaccctgaggacttggacattccagcgtatcgcagaaccggaattcagctcccattgcccacaacagtgcttccctgcctcagtttcatagaaatgatcccttcgtaactcag

SEQ ID NO: 948147 - DNA, 120 bp, Artificial Sequence
  ENSG00000233569_1 (sequence is synthesized)
cagctcatatacagtgataaagtatcaagtccatcgttttcccaaatcaagagcaatgcatcccacacaaatgggcaagaattgcagctgacagaggaatctccctatctttgaaccttc

SEQ ID NO: 948148 - DNA, 120 bp, Artificial Sequence
  ENSG00000233569_2 (sequence is synthesized)
aggattttgcagtgatgtcaaggtttacacccatgtcttcactcccaaaatttggatttgagcctcagatctactatttactaactctatgatctttgacaaatcactcgaattcctgat

SEQ ID NO: 948149 - DNA, 120 bp, Artificial Sequence
  ENSG00000233569_3 (sequence is synthesized)
gccttaagaatccttttgttcctgagcagagtgacacagtctcctgcagttgaggatcattgatctagagcattgattacaacggaaggcgtctaaaggatgaggcaaaagtgaaagcca

SEQ ID NO: 948150 - DNA, 120 bp, Artificial Sequence
  ENSG00000233569_4 (sequence is synthesized)
gattatggttgtatgtttttcctgtaagccaccacaaaccttttgtgcaatgagataggtgatgaataaagcatggatgaatccacgcattagatgagtatgtgaagtggatatggagag

SEQ ID NO: 948151 - DNA, 120 bp, Artificial Sequence
  ENSG00000233569_5 (sequence is synthesized)
gattatgtatcaagaaagttggggtctaggtgagagtcttgtgatttggttgaattaaaattaatgcagcacttccagccctgcagtcattcaggagtccccaacttactaccagtggga

SEQ ID NO: 948152 - DNA, 120 bp, Artificial Sequence
  ENSG00000233569_6 (sequence is synthesized)
gccaggttgagaacacacagacctcccagccagctgtctctgtatctacagagttgaactggacttagtttttgtatgatatctcttgaatgaacaaacttggatattatggggaaaaac

SEQ ID NO: 948153 - DNA, 120 bp, Artificial Sequence
  ENSG00000233569_7 (sequence is synthesized)
tatgttttgattttataaatgttgttattgataggtgacagggaggtaataactgcttattagcatttaatgtgtctgatcattcaattaatcttgtagaaattactcttagactttcaa

SEQ ID NO: 948154 - DNA, 120 bp, Artificial Sequence
  ENSG00000233569_8 (sequence is synthesized)
caacatgtaactataagcacatatcatttgtttcaatttaatacagtggctgaaaaggatatctaagaattgtttgtacctctgggcatatcttagtgagagacttctcatagcatttgt

SEQ ID NO: 948155 - DNA, 120 bp, Artificial Sequence
  ENSG00000233569_9 (sequence is synthesized)
ttaaaccttatgaaaactgtatttagtcatggactgacatgaattgttcattggattcattagggattatatctaagataagatttattgcatttataataaaatgtgtgaatgaagaaa

SEQ ID NO: 948156 - DNA, 120 bp, Artificial Sequence
  ENSG00000235242_0 (sequence is synthesized)
aagccaaggctctagaagctgtttttgtctaacagttgagagttgcaaccgctgaatgggaacagatgaggcaagcgaacctcatgtgcaattaggccaatgtggagctattcacatttg

SEQ ID NO: 948157 - DNA, 120 bp, Artificial Sequence
  ENSG00000235242_1 (sequence is synthesized)
cagacacgctgcggaaacaggcatcggagggtctctgccggtgagcaaaaagaccttgagagtctaaggacaagttatatcaggaagtcaaaatgtacttcaggcttgtggaggaccaag

SEQ ID NO: 948158 - DNA, 120 bp, Artificial Sequence
  ENSG00000235242_2 (sequence is synthesized)
ggcaacagagcaagaatgatttccagccccagcagcccaacaggacacccaccaagaggggaggagggctgagtgcagacttctaaagctagatttccccagaggcaccggttggtgagg

SEQ ID NO: 948159 - DNA, 120 bp, Artificial Sequence
  ENSG00000232211_0 (sequence is synthesized)
aagatgctctttgtggagtgaatcgttaactggggaggaggccacctagattcagttatagaacatcgtggattagattgtcatacatcaaggagccgaggaccattccctgggtagcga

SEQ ID NO: 948160 - DNA, 120 bp, Artificial Sequence
  ENSG00000232211_1 (sequence is synthesized)
aggacttcactggacctccagaatcttcttcatggatattcattgcgccttcaggacctggacttcctttggaaagtccaaacttcctttggaaaaaagactaagaggaattcttcctga

SEQ ID NO: 948161 - DNA, 120 bp, Artificial Sequence
  ENSG00000232211_2 (sequence is synthesized)
tcagaaagaagagagacttctagataaagcgaggtgatgctggcttcaaaccaaattaaaaaaaaaagctggagatatgcaagttgctaaaccagcccttccctcaggctcaaatcagag

SEQ ID NO: 948162 - DNA, 120 bp, Artificial Sequence
  ENSG00000232211_3 (sequence is synthesized)
gacaattggtaacaaccacctttctctcatttggttttgcagctcaaacaaaactgtcaccctcgccaaaacccctgaaatacagaaatgtggtattaaaacagttatgactggaaaaga

SEQ ID NO: 948163 - DNA, 120 bp, Artificial Sequence
  ENSG00000232212_0 (sequence is synthesized)
aaaaatagaatgactcatccactgacgtgtttggaaagattaaattggacatactcatttcagctctacaactttttctggaatggagcagcttgtaagaggacatcattaattattctg

SEQ ID NO: 948164 - DNA, 120 bp, Artificial Sequence
  ENSG00000232212_1 (sequence is synthesized)
tgtacctctcaccttaggggaatggagaacagcttccttacccatgtcctgtcactaaaatagagcaactgagtacagtagtgcccccttgtccatggtggtttcattttccatggttac

SEQ ID NO: 948165 - DNA, 120 bp, Artificial Sequence
  ENSG00000232212_2 (sequence is synthesized)
agttatgcacagccaactgcattcagaaaataacctctttatagactcatcattgagatgccaaattatcacccatgttctctgtacaactggatattaaaaaaaaaaaaaaagcaggaa

SEQ ID NO: 948166 - DNA, 120 bp, Artificial Sequence
  ENSG00000235245_0 (sequence is synthesized)
cggtattgaggctgccttgcctccctttgtccgcactgtccctgtccccttgtgccacctgtgcagacttgagaatggagctcactgtggtgttcatgccggggcctgtctagctcctca

SEQ ID NO: 948167 - DNA, 120 bp, Artificial Sequence
  ENSG00000235245_1 (sequence is synthesized)
ccccacgatttgaccagtgccacaccacgggaccttgtgtgacctcgggcctgcgtcctctggaaaacagctgtggagtggtgtgatgaggacaggtgccttggaaagcatcaggacctt

SEQ ID NO: 948168 - DNA, 120 bp, Artificial Sequence
  ENSG00000235245_2 (sequence is synthesized)
ccacgttcccgccatgctctcctcaccgtgtgggcatccacctggccagcgccgcctccgcagtgcccctccctctggtcgctcccgcgcagcatgcgaaggtgttatctgcccgcgtcc

SEQ ID NO: 948169 - DNA, 120 bp, Artificial Sequence
  ENSG00000235245_3 (sequence is synthesized)
ttatctgcccgcgtcctgccttttccccacaccggcacggaggagccacgtgttcggtggtcgttcggacgtggtgatttgcagggtctcacttcgttgcctaggctggagtgcagtggc

SEQ ID NO: 948170 - DNA, 86 bp, Artificial Sequence
  ENSG00000235245_4 (sequence is synthesized)
tctcagctcactgcagcctcgacctcccaagctcagtagagacggggattcgtcaagcgatctgtccaccttggcctcctaaagtg

SEQ ID NO: 948171 - DNA, 120 bp, Artificial Sequence
  ENSG00000268149_0 (sequence is synthesized)
ccccacccctgctggagcttgtcacacgtcctcaaacccccacatccactccctctgccctccatccctgactccctccggacccctcccttggccccgctccgtcaccgattccctccg

SEQ ID NO: 948172 - DNA, 120 bp, Artificial Sequence
  ENSG00000268149_1 (sequence is synthesized)
ggagggtgacgggagagccagacaaggacagagaggtagagcaggggacagagggcgacggaagaggaacgggcgcgtgggagtggcgaaggacacagcacgctgggagcgtgcatggtg

SEQ ID NO: 948173 - DNA, 120 bp, Artificial Sequence
  ENSG00000268149_2 (sequence is synthesized)
gctgcgggactccagggctctctcctggcccctgggggccgccccggcccagaggctgcggctgaatgaacagcgactctgatcgcggcctgctgtcttccgttcacagtgtctgtcggg

SEQ ID NO: 948174 - DNA, 120 bp, Artificial Sequence
  ENSG00000287390_0 (sequence is synthesized)
gaatcccggtgagactgtgaagatattgtgagcgttcttggagatcagagcagaaaacatccatcggagaatggccctgtctgagagatatgttaccctaaacaccaagactcaatatat

SEQ ID NO: 948175 - DNA, 120 bp, Artificial Sequence
  ENSG00000287390_1 (sequence is synthesized)
atgacttaagaaaaaaaagatccttatgcactatctgaaggtgatgcttcctgacttttgcaacagaaagaatgctgtcttcctgtgcctgcggagatgataatcaagctggcacactga

SEQ ID NO: 948176 - DNA, 120 bp, Artificial Sequence
  ENSG00000287390_2 (sequence is synthesized)
caatcaatgtaaattcattaaacaaaacaggaagtaaacaggtaggacatctttctcctctgtgctccttccttttcctcatgagagaagaatggactaacctcattgattgagattgtc

SEQ ID NO: 948177 - DNA, 120 bp, Artificial Sequence
  ENSG00000287390_3 (sequence is synthesized)
atgacaatgtgtctcctcccctttcctttctggaatgtgctgatattttctgcctctgcactcttctcagaccatatggagtgtttcatcattacaggacctgcttacattttctctcta

SEQ ID NO: 948178 - DNA, 120 bp, Artificial Sequence
  ENSG00000287390_4 (sequence is synthesized)
ccatgaagccttgcagctcaccctatagatccctcactcggctgttgtgttggtctacatcacttgtttggtctttatctttaatgcccaaatagtattaattttatttgcattcatttt

SEQ ID NO: 948179 - DNA, 120 bp, Artificial Sequence
  ENSG00000287390_5 (sequence is synthesized)
tctctccattcagatggcaaacatggaagcgggcagggaccctgatttttaaaattccctccatgttctattataatgctttatgttatgtatactgaatagatgttagtttttttgatt

SEQ ID NO: 948180 - DNA, 120 bp, Artificial Sequence
  ENSG00000287390_6 (sequence is synthesized)
gattgaaagaagacagctaaggaattaaagatacctgaacatttcacacaaacattcatatttttgtgtccaacttgggcactgcttagactgagatgttagctatttgttcaaaccccc

SEQ ID NO: 948181 - DNA, 120 bp, Artificial Sequence
  ENSG00000287390_7 (sequence is synthesized)
tgggtctggtagagtgctgctcaatggatggcttgcagaccctgctggaacatgaactgattgctagcagcccatgccaagataaagagtttatatcagaaggtaaatgaacagtgtcac

SEQ ID NO: 948182 - DNA, 120 bp, Artificial Sequence
  ENSG00000287390_8 (sequence is synthesized)
ttagcacattgtagagttcaactgacattttatttatttatttttatcatttttagcttgtcaaggtataactgacatacaaaaaattgcacacatttaatatgttcttagttaaaaaaa

SEQ ID NO: 948183 - DNA, 120 bp, Artificial Sequence
  ENSG00000287390_9 (sequence is synthesized)
ccccaaagccaaaacccaaaactaccccaacagacacacacacatgcacacatgtgcacatacacacacacatacacacacaaattagttttagcaggtgatggatatgtttagtacctt

SEQ ID NO: 948184 - DNA, 120 bp, Artificial Sequence
  ENSG00000287390_10 (sequence is synthesized)
tttatttttattttttgttttttaaagcaatactttaaactagcaaaacttgtttttttttaattgtttttttttagggtttcaggtgatgttgtgttttctttttctttttttttatta

SEQ ID NO: 948185 - DNA, 120 bp, Artificial Sequence
  ENSG00000287390_11 (sequence is synthesized)
tactttaagttttggggtacatgtgcacaacatgcaggttttaaagcaagacttgatgaagaaattattgacacagtgagaaatactgtgataatatttggtgattatagtgaggataac

SEQ ID NO: 948186 - DNA, 120 bp, Artificial Sequence
  ENSG00000287390_12 (sequence is synthesized)
agacatgttctggttgacaactctgatatattaatagaaaaatgaattgtgattcatttgacttacattctagcccgtttcttacctcacgttgaagctattaaaaataattcagacctg

SEQ ID NO: 948187 - DNA, 120 bp, Artificial Sequence
  ENSG00000287390_13 (sequence is synthesized)
ctaagttgagcagtgctggtctttgcactcctcccctgcctaatgagtgattggaggggagcatattgcatgtattttgtataatactatgtaaaaactttactttctcgaatgtatagt

SEQ ID NO: 948188 - DNA, 120 bp, Artificial Sequence
  ENSG00000287390_14 (sequence is synthesized)
tttcttaagcttcagtttcttcatatataaaatgggactaatcatattttcttcacagaactgttgtcagaattaaaattttaaaagtgcataaaaatttttttagcccaggatctggga

SEQ ID NO: 948189 - DNA, 120 bp, Artificial Sequence
  ENSG00000287390_15 (sequence is synthesized)
tatatgaacacgaaataattggtgcctgtgattactattgaagctatatcctatgtgccatatgccgttctagcagaatgcattagttagttataaaatttaacattattttattatatt

SEQ ID NO: 948190 - DNA, 120 bp, Artificial Sequence
  ENSG00000287390_16 (sequence is synthesized)
taattgtaaatataattaaaccatttaaatctactgaataaacttttaagaaattgatgaagtttctcatgggaagatgcaggctttgggagatataagcatgttctatcatgactgaaa

SEQ ID NO: 948191 - DNA, 120 bp, Artificial Sequence
  ENSG00000287390_17 (sequence is synthesized)
gttgccttaataaagaaggaaatagtgccatataagacaacatggatgaaccttgaggatactatgttaagtgaaattagcccgtcatggacaagtaatgcataattccacttacatgag

SEQ ID NO: 948192 - DNA, 120 bp, Artificial Sequence
  ENSG00000287390_18 (sequence is synthesized)
gtatctaaaataatccactagatagaagcaaagagtaaaacagtgattgccagcatctggggaggaggcagtgttggggcattgctattcagcaggtataaagtttcagtatgcaagtca

SEQ ID NO: 948193 - DNA, 120 bp, Artificial Sequence
  ENSG00000287390_19 (sequence is synthesized)
ttaagttctagagatttgctgtacaacattgtgtctatgttgttaacacagtcagcaacactgtattgtatacttgaaaatttgttaacagggtagatctcatgttaagtgttcttaaca

SEQ ID NO: 948194 - DNA, 120 bp, Artificial Sequence
  ENSG00000287390_20 (sequence is synthesized)
tgattttagaaaaaagtacatataagtttatgcacttttatgcagtaccttaggttcagaatatgtgaaaccgtattatgcactgtagaaattttaagatcaatttaaaaataactaata

SEQ ID NO: 948195 - DNA, 120 bp, Artificial Sequence
  ENSG00000269439_0 (sequence is synthesized)
gagtcgaagtgagttcgggaagccagtgcccgaatgctcaaccttgctgtatcagggagggccggagaggggagctcaagaagaggacgtcctatcgaggtggcagggattttctgaagg

SEQ ID NO: 948196 - DNA, 120 bp, Artificial Sequence
  ENSG00000269439_1 (sequence is synthesized)
agggcgtattttggaaactgacagaatgagcttccaaggcccaggagacagtaagtagtaaccaatgcaagatggtgtgtcaaggacaaagagagaccatcagacatgacgggcttccca

SEQ ID NO: 948197 - DNA, 120 bp, Artificial Sequence
  ENSG00000269439_2 (sequence is synthesized)
gtgggaggacaccacaccacccataaggaatctttgccaaaaaagttgagtttgaagccgataaaatatatagaccagcgattctcaagcggggaccattctgtcccccagggacactta

SEQ ID NO: 948198 - DNA, 120 bp, Artificial Sequence
  ENSG00000269439_3 (sequence is synthesized)
gcaacatctagacacatttttttaattgtcacaacttgggggaaggggactgctactggcatctggtgcagggaggccagggatgttgctaaatatatgctacaatgcacaggacacgtc

SEQ ID NO: 948199 - DNA, 120 bp, Artificial Sequence
  ENSG00000269439_4 (sequence is synthesized)
ctgttctggacactatctcaatttctgtaataaataaattccaagagggaagagagacagacagaaagagaaaaggcacctacagatgaaatattttcttttcttttcttttcttttttt

SEQ ID NO: 948200 - DNA, 86 bp, Artificial Sequence
  ENSG00000269439_5 (sequence is synthesized)
agataggggcttgctctgttgcccaggctagagtacactggcacaatcacggctgacagcagccttgacctcctgggctcaagcaa

SEQ ID NO: 948201 - DNA, 120 bp, Artificial Sequence
  ENSG00000269439_6 (sequence is synthesized)
acaaaccaccacaaccagctagattttcaatttttttgtagagatgagggactcactatgttgcccaggctggtctacaactcttgggctcaagcgatcctcccgcctcggcttcccaaa

SEQ ID NO: 948202 - DNA, 120 bp, Artificial Sequence
  ENSG00000269439_7 (sequence is synthesized)
tgggattacaggcatgagccattgcgctcagccaagaattcttacaagacacatcaaccagtcataatgctggttgtgtatttaattatggaaataagaaaaaacacatttttgacattg

SEQ ID NO: 948203 - DNA, 120 bp, Artificial Sequence
  ENSG00000269439_8 (sequence is synthesized)
attgtgagacagaattgagccactgcccagattcctgatgacactgagatatcactgtcacttaaaaacaatgcttaccagacacaaaaggcgacagtgtctgactccattgatctgaaa

SEQ ID NO: 948204 - DNA, 120 bp, Artificial Sequence
  ENSG00000269439_9 (sequence is synthesized)
cccaggaggagaagactgcagtaaactatgattgcattattgcattccagcctggacaacagcaagatcttgtctcaaaaaataaataaaaatttagaaataaagttttattggcacaca

SEQ ID NO: 948205 - DNA, 120 bp, Artificial Sequence
  ENSG00000269439_10 (sequence is synthesized)
ttgaattttttaagctaaccctcctagtgtggtggtgtgtccctctgagtgcccagaaaggcctccaatcgagttcttgcctggacagagggctggaaggggaagaaggcctggtgggcc

SEQ ID NO: 948206 - DNA, 120 bp, Artificial Sequence
  ENSG00000269439_11 (sequence is synthesized)
tggggaggctgggccacttctgagagtgggatatttcagtgatgtgtgtaagcgcagttcaactcacacaggtagtggattttaaaatcagtagcaaattaagaaaacaattccatttac

SEQ ID NO: 948207 - DNA, 120 bp, Artificial Sequence
  ENSG00000269439_12 (sequence is synthesized)
catagcatcataaagtataaagtaggcataaatttaataaaagaagtacaagactgtacttcttgagagctgtagctgggcttggtggctcacagctgtaatcccagcacgttgggaagc

SEQ ID NO: 948208 - DNA, 85 bp, Artificial Sequence
  ENSG00000269439_13 (sequence is synthesized)
ggctgtggtgggaggatcacttgagcccaggagactaaggctgcagtgagctgtgttcctgccattccgaaacaagcaaaagaac

SEQ ID NO: 948209 - DNA, 120 bp, Artificial Sequence
  ENSG00000269439_14 (sequence is synthesized)
aaacaagcaaaagaactaaaactttggtgaaaaaaaaaattaaagatgatctaaataaatggtaagacattccacgttcatggattggaaagtataatattgttaagatggcagtactcc

SEQ ID NO: 948210 - DNA, 120 bp, Artificial Sequence
  ENSG00000269439_15 (sequence is synthesized)
acaaattggtctacggatgcaatgtaatccctttcaaatttacaatgtttttgttgaaattgacaaattgatcctaaaattaataataaattgcaaatggccccaaaatagccaaaacaa

SEQ ID NO: 948211 - DNA, 120 bp, Artificial Sequence
  ENSG00000269439_16 (sequence is synthesized)
agcgcgctaagctagctggcccggcaggggcgacggcggcgggtagctcgcgggctagcatcgagacgaggctcccgcccgacaggccgagcgcgaaacgggcgcgggcccctgccaggc

SEQ ID NO: 948212 - DNA, 120 bp, Artificial Sequence
  ENSG00000269439_17 (sequence is synthesized)
agcatgctgcgcgctgggccaccagctgcgctagcgccgcacccagctcctgggaactcgagaacaccgagatgaggcccggggccggcgcggccatggcgagggcggcggcggggagga

SEQ ID NO: 948213 - DNA, 120 bp, Artificial Sequence
  ENSG00000269439_18 (sequence is synthesized)
ggaagcgctccctacggccgtcgctagtacgcctgcgcaagggccggccctgccgcttggtttcgagtactttgggtgattgtctttggcacatgcgcagtgaggcaagtgaagcaccgc

SEQ ID NO: 948214 - DNA, 67 bp, Artificial Sequence
  ENSG00000269439_19 (sequence is synthesized)
agaggacgtcctatcgaggtggcagggattttctgaaggagggcgtattttgatggaagcctccgct

SEQ ID NO: 948215 - DNA, 120 bp, Artificial Sequence
  ENSG00000269439_20 (sequence is synthesized)
agctgggattacagtcgtcccagaagcggctggccgagaatttcttgcggaggacgactgtcagcccatagatgagacactgccccacgccgatgatgtttcctgcagagggtggccttg

SEQ ID NO: 948216 - DNA, 120 bp, Artificial Sequence
  ENSG00000269439_21 (sequence is synthesized)
tataccccaagatgctcagcccagagcccccaacccctgctcagctgtgtgacctggcctgaatctctctgggccccatctgtccaatctgcatctgccaacttgccacagtccctggac

SEQ ID NO: 948217 - DNA, 120 bp, Artificial Sequence
  ENSG00000269439_22 (sequence is synthesized)
aacctctcacccaatccttcccagtcagccttgctattccctccgggctccatacctgtttcctgtacctcccgcctgtatttcctgtatcctgccccacattacagcactgaaaccctc

SEQ ID NO: 948218 - DNA, 89 bp, Artificial Sequence
  ENSG00000265728_0 (sequence is synthesized)
agaaaaacaatgaaggccaatctcatctctacaaaaaataaaaaatcaaaaatcagccagatatgggatcttgctatgttgcccaggct

SEQ ID NO: 948219 - DNA, 120 bp, Artificial Sequence
  ENSG00000265728_1 (sequence is synthesized)
gttgcccaggctggtctcaaactcctagcaccaagcaaccctcctgcctcagcctcccaaattcctaggattacaggcacatcacagccttcttgctcttaggaacactagccagcacga

SEQ ID NO: 948220 - DNA, 120 bp, Artificial Sequence
  ENSG00000265728_2 (sequence is synthesized)
tcttaggaacactagccagcacgaaatcactgtgcttggggccttttcaacagcaaaatcaacaggaagcacaaaaatgtggcaaaatgacactaactagaccatgctaaggaagcttgt

SEQ ID NO: 948221 - DNA, 120 bp, Artificial Sequence
  ENSG00000265728_3 (sequence is synthesized)
aaacaagaaggccgagcatcgccttgttccacctcagctgggaacgtgcatttgagcaactcaaatcttgtgtcactcatgcatgcctgtgaattacctcaaaagcactgtctccaagga

SEQ ID NO: 948222 - DNA, 83 bp, Artificial Sequence
  ENSG00000265728_4 (sequence is synthesized)
gcatgcctgtgaattacctcaaaagcactgtctccaaggaatgctgtttcctgcctgtcgtgagagacacatctcaggggctg

SEQ ID NO: 948223 - DNA, 85 bp, Artificial Sequence
  ENSG00000265728_5 (sequence is synthesized)
cctggaaaagagctaccatgcagcctacgcctggtcaactggaggaccaccttagtggaaacgaaataacaattgcttttgttta

SEQ ID NO: 948224 - DNA, 120 bp, Artificial Sequence
  ENSG00000265728_6 (sequence is synthesized)
atgtgcacaagaataacaattgcttttgtttaacatgcagaaggaatatttgatcaattttaaccagctgcaggcctgagtggactgctcccgggaagccactttcatggcgtcccctct

SEQ ID NO: 948225 - DNA, 120 bp, Artificial Sequence
  ENSG00000272836_0 (sequence is synthesized)
ttcctgcccagaacgagggttccgcagcagaagccaggactgtgtgactgcacagtggggacaaagggcctggggcagccctgccccatgggacacaacagcctttgcaccaggatgggt

SEQ ID NO: 948226 - DNA, 120 bp, Artificial Sequence
  ENSG00000272836_1 (sequence is synthesized)
gctccgacagcgctggcctcaggccactcagccacttctgacccccaggtctcgcattcccttccccacaggtcttcgggtccccggcctcggcctcatgtcctgcagaactgccgaggc

SEQ ID NO: 948227 - DNA, 120 bp, Artificial Sequence
  ENSG00000272836_2 (sequence is synthesized)
cagggaatcggacaggcatggggaaggggatgtgagatctgagggccagatgactgccccctttttcttcaattattttcactgtggtaaaatacacataaaataaatttaccatcttaa

SEQ ID NO: 948228 - DNA, 120 bp, Artificial Sequence
  ENSG00000272831_0 (sequence is synthesized)
ggtggtagcgcgaatgggaggtggagcggagctactgcgccgagggacgcttcagaaactctgtttcagtccttcgcggatcctaggatgtgacaggtgttcgagttaaaaggtcttaag

SEQ ID NO: 948229 - DNA, 82 bp, Artificial Sequence
  ENSG00000272831_1 (sequence is synthesized)
tcctaggatgtgacaggtgttcgagttaaaaggtcttaaggcgatcggttgatccaaaagcagctgaatctttaggaggccc

SEQ ID NO: 948230 - DNA, 120 bp, Artificial Sequence
  ENSG00000272831_2 (sequence is synthesized)
tgatagcccaggaagttgacggtgcagagatccctccactgaactccaggccgggtgacagcagagcgagatcctgtctcaaaaaaaacataaccgacatccagaagtgaaataaattag

SEQ ID NO: 948231 - DNA, 120 bp, Artificial Sequence
  ENSG00000272831_3 (sequence is synthesized)
ccagtgtcacaaagtattaatggttgagtcacaaattgaatcctgtttacctgattctttacgtgattcccatgtaaggaatgttaaaaacagtaaatactaattcctctgcgtcctgaa

SEQ ID NO: 948232 - DNA, 120 bp, Artificial Sequence
  ENSG00000272832_0 (sequence is synthesized)
acaccttaattttggacttctactctccagagctgtgagaggatacatttcggttattttcagccacccagtttacggactttgttatggcagccttgggaagcaaatgcactcagtaca

SEQ ID NO: 948233 - DNA, 120 bp, Artificial Sequence
  ENSG00000272832_1 (sequence is synthesized)
tgggtctctggtgtacaccacggcctgcccttgagcatgctggggtgctcagcacgggggtagccctgcagcctgactctctgtagacagatcaggatcggtctaacatggaattatgaa

SEQ ID NO: 948234 - DNA, 120 bp, Artificial Sequence
  ENSG00000272832_2 (sequence is synthesized)
gtggagccagggtcagctttgggccacgcctgccttctgtgccggccttggattatgttcaaattcatctcatgctaccccagcagaaaagagtgtcttcaataaattcactcaaaagga

SEQ ID NO: 948235 - DNA, 120 bp, Artificial Sequence
  ENSG00000272839_0 (sequence is synthesized)
caagaactggttaaattttttaaagggaagaaagtatgacacatggagaaaaaggtgcagcccatttcccagcctgaggactggccggggaaataactctgagccctcgagatgaggggc

SEQ ID NO: 948236 - DNA, 120 bp, Artificial Sequence
  ENSG00000272839_1 (sequence is synthesized)
tatgccttcccttgctcactccctccctcacccacctgcccactcgcccatccactcaacagcggtcgttcttcattgtattgtgagctccctctgggctgtgcactccgggccatgcgt

SEQ ID NO: 948237 - DNA, 120 bp, Artificial Sequence
  ENSG00000272839_2 (sequence is synthesized)
tgctcgacatggaaaattctgcttgatcatctgagatgccacctcagtcttggggaactcaaggccaggagggtcacacaacccatttagcattgcctagcaccagtggtgaggccaggc

SEQ ID NO: 948238 - DNA, 120 bp, Artificial Sequence
  ENSG00000272839_3 (sequence is synthesized)
ctcccgcgccctccatctttctgccaccacagtcgtttggggactcagttccatgtagaaccagatgaagattcataaaggccagtgggataaagacttcccaatgtcccgaaacaccct

SEQ ID NO: 948239 - DNA, 120 bp, Artificial Sequence
  ENSG00000272839_4 (sequence is synthesized)
gacacgtgtaattccaaatctgtaagtactaagttttaaaatgcgtgtgagcaagtcaaatttctgatgtttccctggatgacaagatgttttctttattaaaatatcaaggtctttcta

SEQ ID NO: 948240 - DNA, 120 bp, Artificial Sequence
  ENSG00000287399_0 (sequence is synthesized)
ttttttgcctaagccctgagtattttgcatagtataacatattaccaggcccaacacctataaaatgggaggcttctgcctgggcctttcaacagagggccttgtgacatatctctgcat

SEQ ID NO: 948241 - DNA, 120 bp, Artificial Sequence
  ENSG00000287399_1 (sequence is synthesized)
caatcacctaggagctgtgactttctgttattgcctttactctgctcacaagaaaaattacgaattatcactaggcccagctaccaggtgatgtgtctctcttgcatgggtcttgactat

SEQ ID NO: 948242 - DNA, 120 bp, Artificial Sequence
  ENSG00000287399_2 (sequence is synthesized)
agaaagcgttattagctattgctgggctcagcacccaggtgatgtgactctgctgcctgtgttttgctttcaggagaaggttgtaacatattcctggctgagtattaaagttatgtgaca

SEQ ID NO: 948243 - DNA, 120 bp, Artificial Sequence
  ENSG00000287399_3 (sequence is synthesized)
ctcctgtctgatccctgccctcagtaaagattgtgatgtattcctggccaaaaacccaggtgatgtgactctccttctctctgcctattcacaggtgggattgtaaaatatagtttggcc

SEQ ID NO: 948244 - DNA, 120 bp, Artificial Sequence
  ENSG00000287399_4 (sequence is synthesized)
tagctcacaggtgcaatggtgactttcatacctctacccacctaacaggagagatgctgtcttttgtagctaggcctatggtaatgattataatcctgagtctcccttttgtacaaagtc

SEQ ID NO: 948245 - DNA, 120 bp, Artificial Sequence
  ENSG00000287399_5 (sequence is synthesized)
ataggaaattaccaatttcttgcatactatataaatctcttgtggtacagagagtgtcttcccagggttcagcacacagggagattgtagttcttatgtgcaatgtgcacagcccaccag

SEQ ID NO: 948246 - DNA, 120 bp, Artificial Sequence
  ENSG00000287399_6 (sequence is synthesized)
ctgttgggattgtcaccctcacacttggatagagcacactggtgaggccctgaatttcacacagacacagtccacagtagaaactgtgaactctcatatgtgaacatccagtcagggttg

SEQ ID NO: 948247 - DNA, 120 bp, Artificial Sequence
  ENSG00000287399_7 (sequence is synthesized)
aaatgatgactgatttatgaacccagtacattggaaggtgagaattctatctgaacccatgaaaattctacctgggcttagggctagagtgaacacagtttacaggaggaatgaagggtc

SEQ ID NO: 948248 - DNA, 120 bp, Artificial Sequence
  ENSG00000287399_8 (sequence is synthesized)
ctaccttacttagacccaacatagaaaatgtggtgactctcatacctagaactgagacctgtgcaggattgttaattcactactggactttcctgcacgagtgattattacatatgccta

SEQ ID NO: 948249 - DNA, 120 bp, Artificial Sequence
  ENSG00000287399_9 (sequence is synthesized)
tgttcagccctgagtgatttgattttgctgcatggtcccagtctgaaggtaagattgtgattcatcactggatccagcacctcggtgatttgactcttctttttttggggaccccacaaa

SEQ ID NO: 948250 - DNA, 120 bp, Artificial Sequence
  ENSG00000287399_10 (sequence is synthesized)
ttttaagtattgtcaattttggctgaatcctgcacccatgttatatgactctcccaaatgtgccttacatgttgtgccgtattggggctcaatatatcacattagacattgttacatatt

SEQ ID NO: 948251 - DNA, 120 bp, Artificial Sequence
  ENSG00000287399_11 (sequence is synthesized)
gctgggttcaacacccaggtgatgtaacttttttttctgggactgcctgcaggggaccttgtgacataactcaatgtccatcaccatactgacgttactctcttctcctgcctggtctct

SEQ ID NO: 948252 - DNA, 120 bp, Artificial Sequence
  ENSG00000287399_12 (sequence is synthesized)
gctcacagagaaattgtgacagattactggcctagcatctaggtgatgtgactctcctctttttctcaggctctacacatttgggtattgtgacatattgctgaactcaactcctaaggg

SEQ ID NO: 948253 - DNA, 120 bp, Artificial Sequence
  ENSG00000287399_13 (sequence is synthesized)
atgggagtctcctacttgggaccttcctacaggggacattgtggcatgtctctgcattcctcacctagcagatgtgactctcctcttctgcctgcaccctgcctacatggaaagttgtgg

SEQ ID NO: 948254 - DNA, 120 bp, Artificial Sequence
  ENSG00000287399_14 (sequence is synthesized)
cacattgctgttgtcagcaaccagatgatgtaattctcctgcctgggtctttattacaggaaagatgattgacatattactgagcccagcatccaggttttgccttcaggtgacattgtg

SEQ ID NO: 948255 - DNA, 120 bp, Artificial Sequence
  ENSG00000287399_15 (sequence is synthesized)
tcataatgctggtccctgccctgacaatttgtgactcttctgcctgtgatttgcccatttgggccattgtgacatgttgctggattcaacactcaggtgatgtaacttttatgtctgggc

SEQ ID NO: 948256 - DNA, 120 bp, Artificial Sequence
  ENSG00000287399_16 (sequence is synthesized)
ttcaacactcaggtgatgtaacttttatgtctgggccttgcctacagggtcattttgaaatgtctctgtggctgggcgttgtggctcaaacttgtaatcccagcactttgggaggatgag

SEQ ID NO: 948257 - DNA, 79 bp, Artificial Sequence
  ENSG00000287398_0 (sequence is synthesized)
atattgaactcgagttggaagaggcgagtccggtctcaaaatggagtaaatagaggccaggtgcaatcccttacagcct

SEQ ID NO: 948258 - DNA, 120 bp, Artificial Sequence
  ENSG00000287398_1 (sequence is synthesized)
aagcctgggagatgaggctacagtgagctgtgacagccccactgcactccagcgtggacaacagagagagacgctgtctcaaaacaatcttgaagaccagacagaaaaccaggctatgaa

SEQ ID NO: 948259 - DNA, 120 bp, Artificial Sequence
  ENSG00000287398_2 (sequence is synthesized)
tcaaagaaaaaaatcaaaatcacacttcataactgcttcagtaacccttggcaacagacaacacactggattttggctaataacactaaaatttttgctggtgaggtcttcagaaaccgg

SEQ ID NO: 948260 - DNA, 120 bp, Artificial Sequence
  ENSG00000287398_3 (sequence is synthesized)
gtcaaaaactggcatgtatatacttaatcggtgacatgtaagtcacatgcctttatcccaaatctaagagaagttgagaacttaatttctggcttctaccttgggaagggtcagactcat

SEQ ID NO: 948261 - DNA, 120 bp, Artificial Sequence
  ENSG00000287398_4 (sequence is synthesized)
aagctggaaaattagccaacatacacaggatattcaaagcttccaggcagacaaaatactgtcaagtggtaaaacagatatgaaaaaacctttttttctctcctaaatttaaaaaaatgt

SEQ ID NO: 948262 - DNA, 120 bp, Artificial Sequence
  ENSG00000287398_5 (sequence is synthesized)
aattttcctaaaacattgtatgtggctttccataaaattaaaagagtcttgggagagagaacatctcatatgcttcctagtgaattacttccacaataaagcaattaatgaaaatgaaaa

SEQ ID NO: 948263 - DNA, 120 bp, Artificial Sequence
  ENSG00000270095_0 (sequence is synthesized)
atgctgacctgtattgtttcatttcaagttttggtatttagcagtacgatctagtccactaaggaaaattaggctgccagagagaaaatataaccgcgctctgtagcttaggttgcagta

SEQ ID NO: 948264 - DNA, 120 bp, Artificial Sequence
  ENSG00000270095_1 (sequence is synthesized)
tgcaagctaccacgctgtaatactttaacatattacgcagttccagaaacctgtaagagtattaaaactaggattgccattttaaaacttttacgtttgaaatttatttaaagagcattg

SEQ ID NO: 948265 - DNA, 120 bp, Artificial Sequence
  ENSG00000270096_0 (sequence is synthesized)
ctctatgttttattactctttttagtggtggaatttttgttagtccttttgcaaattttgagaattttaacatctactttttccccctcgttctttccaaatgaaaactgttaccattat

SEQ ID NO: 948266 - DNA, 120 bp, Artificial Sequence
  ENSG00000270096_1 (sequence is synthesized)
ttctgttttgaaagtagtatcaaaggctgtctgtatttatgtgagcaacatgccaaatattttgatagcttgtactctatctctcccattccatattttggtataattattagggagcag

SEQ ID NO: 948267 - DNA, 120 bp, Artificial Sequence
  ENSG00000270096_2 (sequence is synthesized)
atcagaaattttgctacatctgatcaataattatgatttttcttaaccttagaggaattagaactgtgtcattcagtgatgtgtaatactaatacatagttttaatatctttggttattt

SEQ ID NO: 948268 - DNA, 120 bp, Artificial Sequence
  ENSG00000270096_3 (sequence is synthesized)
gaaccaccaaactctctagtagttaattttaagacttatgttaattatcaaaactgcagtgtctcactgtgtaaccatttctgaggcacctgtaaataatatctgatgttacagagatga

SEQ ID NO: 948269 - DNA, 120 bp, Artificial Sequence
  ENSG00000270096_4 (sequence is synthesized)
tcccagaaaaagccttcagtgaaggaaaaaacttaaaacttactatacacgtagcctcatcaaatttgtttccccaaatgtagatatgagagaaagtgagatttgttttcattgattgtg

SEQ ID NO: 948270 - DNA, 120 bp, Artificial Sequence
  ENSG00000270096_5 (sequence is synthesized)
gaaaccaataattccacaaggaaagaatacaaaaattagcaacatttattacaaacactttcttgtgtagtcttagcattattcttcagtatgttgtaatgtagtggtaaaaatactgac

SEQ ID NO: 948271 - DNA, 120 bp, Artificial Sequence
  ENSG00000270096_6 (sequence is synthesized)
catttaattcctaaaatccaagaaacttagttttctaattagatccttaaggtacttagtagagctaactacattttgaaagtcttctgttttatattattcagtaaatgtttgggtgga

SEQ ID NO: 948272 - DNA, 120 bp, Artificial Sequence
  ENSG00000270096_7 (sequence is synthesized)
tagcagatatatttttctggataaatgcatccaagtattttattctttagttcattcttacttttaaaagtcttgatcatattgaatgcttctgagttttctattagaattcaggataag

SEQ ID NO: 948273 - DNA, 120 bp, Artificial Sequence
  ENSG00000270096_8 (sequence is synthesized)
taatataagcaatgcaaattttctcattaatttgaaggaatcgttaatagaatcagtctaattgtaaaagacattacatttgaaaaatagaaatgtaaatgtttactgtaacttaatact

SEQ ID NO: 948274 - DNA, 120 bp, Artificial Sequence
  ENSG00000270096_9 (sequence is synthesized)
atgtcagtttagaagctgagttttcatatttcattataatcttaagagttaaggggattgaggttagtatttaaaaatttgcttttctgttattttgattaaatataaaaccatactaac

SEQ ID NO: 948275 - DNA, 120 bp, Artificial Sequence
  ENSG00000270091_0 (sequence is synthesized)
tcacttcattcccaccccaggaacatcactgtccatgatggcagtctgcccggcaatctggcctgttcccaagactggcgtttcactcctcgattgcacctgtaaccaaacttggtgatc

SEQ ID NO: 948276 - DNA, 120 bp, Artificial Sequence
  ENSG00000270091_1 (sequence is synthesized)
tcctgcaactgctctacctctggtttctcctaacatactacccacagcaacctcaaacaatgaagttttgtaccattatagagtcctcttattggaatggattagaggggaaggaagaaa

SEQ ID NO: 948277 - DNA, 120 bp, Artificial Sequence
  ENSG00000270091_2 (sequence is synthesized)
caaaagcaataagtaattttgttgtaaggattacaaatacacctacatgataaattgggggccggggaggatggtcctaatgtggtaacttgggtcaaacttgccagtgagtcagacatg

SEQ ID NO: 948278 - DNA, 120 bp, Artificial Sequence
  ENSG00000270091_3 (sequence is synthesized)
tatttgagaagtgctgcatctcagacagcttagatgcaagtgaaggagatacactttgagaaatggactgtagataccatgaagacgttgatgtccaagatgcatgtagagagtgaataa

SEQ ID NO: 948279 - DNA, 120 bp, Artificial Sequence
  ENSG00000270091_4 (sequence is synthesized)
tgcatgtagagagtgaataaaattgttacttgaaatgtgagaatgggaaaaaagcaatattttgtattaatgtattatatatataatgttattttaaatatgcatgtgtaactaaagtaa

SEQ ID NO: 948280 - DNA, 120 bp, Artificial Sequence
  ENSG00000234111_0 (sequence is synthesized)
tgtgcctcatggagctgtcgtaaggaatcagttgattaattgagaattctacgctccagcaatagcagagatagatgacacaaatgacattcgcccgcccatggctgcccatggaccaat

SEQ ID NO: 948281 - DNA, 120 bp, Artificial Sequence
  ENSG00000234111_1 (sequence is synthesized)
tggcatgtgcttccttccctctgaggcccatagaagccctggactcaatctgactcaaggagatgatgggactacaagctgcggaaaggagctacccactccaaggtctctgctgagagc

SEQ ID NO: 948282 - DNA, 120 bp, Artificial Sequence
  ENSG00000234111_2 (sequence is synthesized)
tgaacactcatcaagacaccctgcctgcagggaggagttacccaatgcaggtctcctctgagctgttccattgctcaataaaactcctctttgccttgctcaccctccacttgtccgtct

SEQ ID NO: 948283 - DNA, 120 bp, Artificial Sequence
  ENSG00000234111_3 (sequence is synthesized)
acctcattcttcctggacacaggacaagaactcgggacctgcaaaagggctgtaacacaaacagggctgaaacacatcccttgctcgccatattgtaggtgacaagaaggagagacaaga

SEQ ID NO: 948284 - DNA, 120 bp, Artificial Sequence
  ENSG00000234111_4 (sequence is synthesized)
ggctatgacaccctctttggggctctatggttcctggtgtctccaagcttccggatgccactgcattcctcagtgccagccgtggaagctgctgtggtacatttggtccagccacagcct

SEQ ID NO: 948285 - DNA, 120 bp, Artificial Sequence
  ENSG00000234111_5 (sequence is synthesized)
tgcagggagctggctcccatgctggtgcctatagctccccgccccaccacagccagcttgcctggccatgcacagtggccagacctcatgctcactcatgcacccttcgccactccgcac

SEQ ID NO: 948286 - DNA, 120 bp, Artificial Sequence
  ENSG00000234111_6 (sequence is synthesized)
ctggcccgcccttggcaggtatgggattcagggatccagccccagccgattgcagcctgccaggccgagtgggtggaatgagacctgtgggcccaagcaaaactcaggcaaaggcaccac

SEQ ID NO: 948287 - DNA, 120 bp, Artificial Sequence
  ENSG00000234111_7 (sequence is synthesized)
tggccacataggtttccagctggtgaagtgacaccctgagaatcccatgacattatcatacactcttcttaaaaactgaacccgagggaaaaaatgatacccttgaacggtgaggcataa

SEQ ID NO: 948288 - DNA, 120 bp, Artificial Sequence
  ENSG00000234111_8 (sequence is synthesized)
tagaaaacaattgcttctttacacattataaatgtaacctggcattatatttaagctaagaacatgcatgtttttaatactcgaatttcaactcaagagaaaaaaaagttctatgttaca

SEQ ID NO: 948289 - DNA, 120 bp, Artificial Sequence
  ENSG00000234111_9 (sequence is synthesized)
ctagtgtgatggattttttaattactaaatgctaatattaagggtaatttgaggtaaaacaaaaaataaaaagttcatgtagtaatcaaagcatctactctaggttgttaaaaataaaaa

SEQ ID NO: 948290 - DNA, 120 bp, Artificial Sequence
  ENSG00000234111_10 (sequence is synthesized)
tgtgcctcatggagctgtcgtaaggaatcagttgattaatgtatataaactgcttgtgttctgttgctgcttcttttaccatttcatctcccctaaagtttttttcatagttcttacatc

SEQ ID NO: 948291 - DNA, 120 bp, Artificial Sequence
  ENSG00000265091_0 (sequence is synthesized)
acccacgacggcgaagacccgctacagcgcgtccacgaagccccagtactgagccaggacggggctctccctctcgatgtaggcgactacgaactgctccgccagccggtgaggcagcta

SEQ ID NO: 948292 - DNA, 120 bp, Artificial Sequence
  ENSG00000265091_1 (sequence is synthesized)
attaagaaagccaccttcaggatgtctttcgagaatctagcctcgaagaaagtcatgtaagagaacgcctgcatcaaaaagtcgggaggccgggcggagtcgccgttaaacgtccaggga

SEQ ID NO: 948293 - DNA, 120 bp, Artificial Sequence
  ENSG00000265091_2 (sequence is synthesized)
caggtgggccggcgaacgctcccgggccagcagcgccatcttcttggaaacttctgcaccatgagagccaagcagagaaagaagtgaatgcgcaggctgaaacgcaaaagaagaaaggtg

SEQ ID NO: 948294 - DNA, 120 bp, Artificial Sequence
  ENSG00000265091_3 (sequence is synthesized)
aggcagagggccaagtaaactgctagcttgtgcacccgcggaggccacagcagcagaaacatgaagtgccagaggctggggatgctggcacaagttgttggactgcatgctactgtctag

SEQ ID NO: 948295 - DNA, 120 bp, Artificial Sequence
  ENSG00000265091_4 (sequence is synthesized)
agcttgtctcaatggatctagaactttcattgccatctgatcgctgagaccacctctgagacccaccttgctcataatcaaaactgtccatcttggtcctttgccctggaactgtgacat

SEQ ID NO: 948296 - DNA, 120 bp, Artificial Sequence
  ENSG00000265091_5 (sequence is synthesized)
aagccaccaggtgggccggcgaacgctcccgggccagcaggtatatattagaaaataaaattttaaaacaacgtggccagatatatgacagatcttcaatagatattttatattctgtat

SEQ ID NO: 948297 - DNA, 120 bp, Artificial Sequence
  ENSG00000265091_6 (sequence is synthesized)
gtgataattctgaatccttgagaatcaatatctgttgtttctgatggctctcataatggcatgtttctttatgtgtatcatgagtttatatatatgaacaattgtctactaagtctttca

SEQ ID NO: 948298 - DNA, 120 bp, Artificial Sequence
  ENSG00000265091_7 (sequence is synthesized)
agttataataataataacttataataacaataagttataataatcagccatcctcagttgcctggtccatgtcacagttattaagtggtagagttcagaattaaattcaggtctgtctga

SEQ ID NO: 948299 - DNA, 120 bp, Artificial Sequence
  ENSG00000265096_0 (sequence is synthesized)
agagaactagaggctgcagcggcagcagttggagcatctcactgcggggctcgggaaggaggaaaggagtgagcatgtcctgctcctgcatgtccctgcttaagctcaggactggccctt

SEQ ID NO: 948300 - DNA, 120 bp, Artificial Sequence
  ENSG00000265096_1 (sequence is synthesized)
ccaggccaaggaccccagcatagaccccaggacagggccccaaggatccctggctcatgagagcggcttgctgggctgccccaagagagcctgaaggaaacacattgttgagctgagctg

SEQ ID NO: 948301 - DNA, 120 bp, Artificial Sequence
  ENSG00000265096_2 (sequence is synthesized)
tccacagagcttcggagaagctgctaagatggaaaagtggaaacttggcagacagatccagcctccctggccactggcccatgctcgtggctcctggatggcgctgccacgttctgagca

SEQ ID NO: 948302 - DNA, 120 bp, Artificial Sequence
  ENSG00000265096_3 (sequence is synthesized)
gcttgggacaggtggagatcaggactggcagctgcaaggacacaccaggtgaataggtttctttatggtcctcacacctgcagaaaaccaggaggagccacagaaactaaagagaatttc

SEQ ID NO: 948303 - DNA, 120 bp, Artificial Sequence
  ENSG00000265096_4 (sequence is synthesized)
gagaatgaaaatccaatgaaagcctgattgtatttgttgaccttaaggaaagtgattttatggtacagcctctctggaagggagggtgtgttcgctcacagaatgcaaataccctttgac

SEQ ID NO: 948304 - DNA, 120 bp, Artificial Sequence
  ENSG00000265096_5 (sequence is synthesized)
cccctaatctttcttctaggagtttctcctacagataaacttagaagggtgctcaaataagtaagttcaaggatatcctctgaagcattgccgtagtataaaaaaagcacagataccctc

SEQ ID NO: 948305 - DNA, 120 bp, Artificial Sequence
  ENSG00000265096_6 (sequence is synthesized)
aaaggacatcattaggggcctggtaaaataaattccacacagtggaacaccgtgtagctctttagagaataaacagctctctatatgtgatctggaacaatctccaagctatattgtgaa

SEQ ID NO: 948306 - DNA, 120 bp, Artificial Sequence
  ENSG00000265096_7 (sequence is synthesized)
aaaaaaaaaaaaaactcagttctcgctcaattaagctatagattccaagcaattccattcaaaatcccagaaggttgaaggtgggtgaggtaggaggggacttgtcctacatcataggaa

SEQ ID NO: 948307 - DNA, 120 bp, Artificial Sequence
  ENSG00000265096_8 (sequence is synthesized)
ggcttattataaagacataataatgaagatactggtattggaacagatgtgatcaagtatattagttcaacatgatagaaggcccacccgacaaagacccatgtgtgtatgaaaacttga

SEQ ID NO: 948308 - DNA, 120 bp, Artificial Sequence
  ENSG00000265096_9 (sequence is synthesized)
tctatgacaaaattggcattgcacgtatatcaatggggatgggatggatcaattcctaaaaacacacaagatgatggggaatccacagaaaaagaaacgtaaacagccaaaaagtgtaag

SEQ ID NO: 948309 - DNA, 120 bp, Artificial Sequence
  ENSG00000265096_10 (sequence is synthesized)
aaaagatatacaacctcacagtaatcaggcaaggagaagacactgattaccatcagattggcaaaattaagccatctgatgatgtctgtggagctgttactggaaagggtcccaaaccag

SEQ ID NO: 948310 - DNA, 120 bp, Artificial Sequence
  ENSG00000265096_11 (sequence is synthesized)
accccaagagagggttctttgatcttgagcaagaaagaatttgggataagtccacagggtaaaatacaagcaagtttatcaagagagtaaaggaggccggacgcagtggctcatgcctgt

SEQ ID NO: 948311 - DNA, 89 bp, Artificial Sequence
  ENSG00000265096_12 (sequence is synthesized)
aagagagtaaaggaggccggacgcagtggctcatgcctgtaatgccaacacttcagaaggccgagacaggcagaccacctgagatcccc

SEQ ID NO: 948312 - DNA, 120 bp, Artificial Sequence
  ENSG00000265096_13 (sequence is synthesized)
attacccctatttacccctattcctgcctaacctcccaggaatacagcccagcaggtctcagccttattttacccagcccctgttcaagtagcatgcctgtaatcccagctactcagaag

SEQ ID NO: 948313 - DNA, 86 bp, Artificial Sequence
  ENSG00000265096_14 (sequence is synthesized)
taatcccagctactcagaaggctgtggcatgagaatcacttgaacgtgggagatggaggttgcagacaatagagcaacactgtgcc

SEQ ID NO: 948314 - DNA, 120 bp, Artificial Sequence
  ENSG00000265094_0 (sequence is synthesized)
atgatactgtttaagagaaaatgaaaaggattacaagttttttatagtatttgactttgtgatgctctattatagcaatatttaatttagaaatctgagaaaataatttttgaaattttc

SEQ ID NO: 948315 - DNA, 120 bp, Artificial Sequence
  ENSG00000234116_0 (sequence is synthesized)
tagaccttagtttaggtattggggccaaaggatggatgaccatttcaaatgatccaggctaaaccagcctggaggagagctcaaagtctgatctggtacgttgcaaggatagagggacag

SEQ ID NO: 948316 - DNA, 120 bp, Artificial Sequence
  ENSG00000234116_1 (sequence is synthesized)
aatgaaagtagcagtactcttttcctaattcaaccatagatggatgaccagaatttgtaatccataaggtagaagctgctgtgcctgaggaaatagaaagtgggcagaggtggaggggca

SEQ ID NO: 948317 - DNA, 120 bp, Artificial Sequence
  ENSG00000234116_2 (sequence is synthesized)
gtctagtcagcagagtcccaaagaagcttgtcattctctaggcatttgtgcttacattctgatgggcctgatagcagggagatgacatggagcccaggcagaacagctgagatttctact

SEQ ID NO: 948318 - DNA, 120 bp, Artificial Sequence
  ENSG00000234116_3 (sequence is synthesized)
gggagatgacatggagcccaggcagaacagctgagatttctactggtcatgacctccatcttctccttcatacctttcctacctttctttttccatgcattcaacagacatttattaccc

SEQ ID NO: 948319 - DNA, 120 bp, Artificial Sequence
  ENSG00000234116_4 (sequence is synthesized)
agtgccagatagtaagccaggacctggggagagcagatgagtaagacaccgtctctgtctctcaggaactctcagattcttagggacacatgtacatcctaataaacacagtgcatctca

SEQ ID NO: 948320 - DNA, 120 bp, Artificial Sequence
  ENSG00000251675_0 (sequence is synthesized)
aaatccacagtaatctttgacctgacgtccttgagctgctgaaccaacatcccagattggctttctttctatgtctgtgatgcttaaaacagtcactaacaacatctttcaagtttccaa

SEQ ID NO: 948321 - DNA, 120 bp, Artificial Sequence
  ENSG00000251675_1 (sequence is synthesized)
actccttggttcaagacagcagccatttcgaagaaatttccagaaagacactgattgtccagcttagatggaaagtccactcttggatcaattaactgaagctatgacaggagagttgta

SEQ ID NO: 948322 - DNA, 120 bp, Artificial Sequence
  ENSG00000251675_2 (sequence is synthesized)
ggaggtgccgctgtgaagacgtaatgctttttcagacccactcaggcacagggcgccagtccctgccccggggacactgttcaaaagatggcactttccaggctgtaggcccacaaagcc

SEQ ID NO: 948323 - DNA, 120 bp, Artificial Sequence
  ENSG00000251675_3 (sequence is synthesized)
caggggaccgccgatatcatcacacagagaactcccgggtggggcagcagaggggagcgaccagcgtacacaggtacaacagcacgcatatccagcaggaggccatcttgacccagaaga

SEQ ID NO: 948324 - DNA, 120 bp, Artificial Sequence
  ENSG00000251675_4 (sequence is synthesized)
tggaccagctcccgctgaagaagctctcgatgttggcactttcgtagctgtggaaacaagacacctagccgcggtcaaagcaggaatatattgagatacaattcactaattcacatccat

SEQ ID NO: 948325 - DNA, 120 bp, Artificial Sequence
  ENSG00000218018_0 (sequence is synthesized)
tgccgtggggggaaccaggggcgaaaggggcagacggctccgccctggcaccggatgctgccacccctctcttcccttcctctgagggtgcctgtgacccagggtccttgagccaaagct

SEQ ID NO: 948326 - DNA, 120 bp, Artificial Sequence
  ENSG00000218018_1 (sequence is synthesized)
cctctgaaccctacctggggctctcccacaaagatgcctcctggattccagctcctcccgtcaaagttcaaggcctgggaaatgtggccttcaaggacaaaaataatcccctgcggggat

SEQ ID NO: 948327 - DNA, 120 bp, Artificial Sequence
  ENSG00000218018_2 (sequence is synthesized)
ggagtttgcgacgctatgcttggaaggactttaacgccaggataactgccttgggtcccttggtcagaattagttctgacctgagaatgcttcacagaaaggaggacatctgacctgcgg

SEQ ID NO: 948328 - DNA, 120 bp, Artificial Sequence
  ENSG00000218018_3 (sequence is synthesized)
ggtatcatggggatgaaggaggacaccccgccccacatggaaggagcaacagacacggagcacagcagaggcatgaacggtggcatgccaagaaagctctagaagttttgctcaacagtg

SEQ ID NO: 948329 - DNA, 120 bp, Artificial Sequence
  ENSG00000218018_4 (sequence is synthesized)
actcccaacctccaggccccatggccacttcctccctcctgcgaggacagctggcaactggggtgcagtaccctccctgccccccgcccccttctttgggccacacgctgtgagaagggg

SEQ ID NO: 948330 - DNA, 120 bp, Artificial Sequence
  ENSG00000218018_5 (sequence is synthesized)
tctagatcctcgagggggggatggctgccctgtgccggctctgcaggcacatgatagccgactgccactgctggggcgaggagggggggcctctttccacccgacagataccgacaccca

SEQ ID NO: 948331 - DNA, 120 bp, Artificial Sequence
  ENSG00000218018_6 (sequence is synthesized)
atatagaaaccgagaagagccaggcaggaaaacacaagctctcacccgtctggaggctccgcggcttggcgcccagatatgccaggttcacgttggccttgcggccgtcgatgatggggt

SEQ ID NO: 948332 - DNA, 120 bp, Artificial Sequence
  ENSG00000218018_7 (sequence is synthesized)
cttccacaccagtcaaggtactctcacagcaaagccccaccgaaggggcccacaggttggattcgaggtacgtgaagtcccaagagatgacatgaagccccaaatggatgccctggctcc

SEQ ID NO: 948333 - DNA, 120 bp, Artificial Sequence
  ENSG00000218018_8 (sequence is synthesized)
ccagcaccagagggaaacgccccctcaccgaagacagtggcaagtgccatgcttcaagtaacacagggagcggcctccagtgcacctgttttagcagccagtcctggaggcagaaagatt

SEQ ID NO: 948334 - DNA, 120 bp, Artificial Sequence
  ENSG00000218018_9 (sequence is synthesized)
tacaagggagtggaaaggctggcaaacacaggacacatggagatgcccaaagtcagtgggggtcagggttcaacctggaaatgcagtcttctcagctgaggaaggcagtgagtcctggcc

SEQ ID NO: 948335 - DNA, 120 bp, Artificial Sequence
  ENSG00000218018_10 (sequence is synthesized)
aggaagccggtccaagcccctgcctcgtccccagttcacctcgtgaaagctgatgaatgaccaatgcttgcagaggggtctggagtaatggcggcaccgtattaaggggcgatcaggctg

SEQ ID NO: 948336 - DNA, 120 bp, Artificial Sequence
  ENSG00000218018_11 (sequence is synthesized)
tatcttgacactgggattcataagaggaggaagaaacctatcatgctgacgggtagtgaagaagagaaatgaaagacaaaagacacaagagaaggccaggtgcagtggttcactcctgta

SEQ ID NO: 948337 - DNA, 63 bp, Artificial Sequence
  ENSG00000218018_12 (sequence is synthesized)
gcgcactgagctgagatcacgccactgcagtgcagcctggacgacagggcgagactcagtctc

SEQ ID NO: 948338 - DNA, 120 bp, Artificial Sequence
  ENSG00000284633_0 (sequence is synthesized)
gtggcagaggcgggcgcgcgacctggccgcggtagtgcgtgcccgtcgctctgcgcgcccgcccgccggagcgcagcatcgcctccggccaggagtgtgcatgcgtggggcgcagtgtcc

SEQ ID NO: 948339 - DNA, 120 bp, Artificial Sequence
  ENSG00000284633_1 (sequence is synthesized)
cagcacggggctcctgtctccactatctctcaagagttcctcggaaccccagtttcctcatcatcggtgtgactgaccatagttccagtttcctccaaccgtgtggttgtgaggattcaa

SEQ ID NO: 948340 - DNA, 120 bp, Artificial Sequence
  ENSG00000284633_2 (sequence is synthesized)
tgacaggctgtcatttgcatagacatttctccaaaagagatctacaaatggctaataagtgcatgaaaagatgctcaacatgactgctgattacggaaatgaaaatggaaacctgtccct

SEQ ID NO: 948341 - DNA, 120 bp, Artificial Sequence
  ENSG00000284633_3 (sequence is synthesized)
tcagtggtgggaccatgtcacacccactagcatcgctgtgatcaaaaagacagggtccagcgttggtgaggatgtggggaaactggagtcctcccaggttgctggtgggaatgcaaaatg

SEQ ID NO: 948342 - DNA, 120 bp, Artificial Sequence
  ENSG00000284633_4 (sequence is synthesized)
attcagccgctctggaaaccagtttggcagttcctcaaaatgttaaacatggagctgccacatgacccagcaattttcctcctagatatttacaaaggagaaatgaaaacatacgtccac

SEQ ID NO: 948343 - DNA, 120 bp, Artificial Sequence
  ENSG00000284633_5 (sequence is synthesized)
acaaaggcatgtacaagaatgctcacggaaatattatttttaatagtcaaaaggtgaaaacaacccaaatgtacatcaacggataagtggacacacaaattgtggtatgtccttacaatg

SEQ ID NO: 948344 - DNA, 120 bp, Artificial Sequence
  ENSG00000284633_6 (sequence is synthesized)
gaatattacttggccatgaaaaggaatgttctttccagctgctctagtggaagaactagcaacaaacaacaaggaatggaggagtgacacatgccacaacatgatgctcactgaaagaag

SEQ ID NO: 948345 - DNA, 120 bp, Artificial Sequence
  ENSG00000284633_7 (sequence is synthesized)
ccagtcacaaaaggctacacattgtaggattccatttatacgaaatgtccagaacagagaactctctagagacagaaagcagaggagcgttccaggggctggaggaggggaacagggagt

SEQ ID NO: 948346 - DNA, 120 bp, Artificial Sequence
  ENSG00000284633_8 (sequence is synthesized)
ggctgctgatgggtgttgcgtttctttgcgggatgatgtaaatgttctagaattagattgtggtcatggttgtacaactctgtaaatatactcaaaaccactgactcatatactttaagt

SEQ ID NO: 948347 - DNA, 120 bp, Artificial Sequence
  ENSG00000284633_9 (sequence is synthesized)
gggtaaattttagggtatgtaaattatctcccaagaaagtgctgtaaaaaatgggctcgtccaagtccaggctggacagcctgcagttcaagcccaggaggcaggagctaccgtggatct

SEQ ID NO: 948348 - DNA, 120 bp, Artificial Sequence
  ENSG00000284633_10 (sequence is synthesized)
gcaattcaagttttggagaaggaggagacccactacttccctggtcttctggacagacaacagcagggtgagactggctgggggctcagtgagcttcaattccacatgccggggctctgt

SEQ ID NO: 948349 - DNA, 120 bp, Artificial Sequence
  ENSG00000284633_11 (sequence is synthesized)
agtagacttggggaggggggactctaaggtctccaggcctctgaccctcctacccccccaactgcaggcctctgttttcccatctagcaaaagggctccatcagtggttttcaaactgtg

SEQ ID NO: 948350 - DNA, 120 bp, Artificial Sequence
  ENSG00000284633_12 (sequence is synthesized)
ctccaaggcaccctggggccaagaagagtttgcaaccaccctgaagagaggatgtccccaaggtcctcctgggatcccacccacctccctgcctccccttcagtcctggtccacccctga

SEQ ID NO: 948351 - DNA, 120 bp, Artificial Sequence
  ENSG00000284633_13 (sequence is synthesized)
gtccacccctgaaaggcaggatgtggctgccaaagatggagtcacgttctgtcacccaggctgaagcacaatggtgtgatcttggctcactgccacctctgggttcaagcgattctcctg

SEQ ID NO: 948352 - DNA, 120 bp, Artificial Sequence
  ENSG00000284633_14 (sequence is synthesized)
acaggcgtgagccactgcgcctggccccaggctggtcttgaactcctgccctcaagcgatcctcgtgcatcgacagctcaaagtgctgaaattacaggcataggccaccgtgcccagcca

SEQ ID NO: 948353 - DNA, 120 bp, Artificial Sequence
  ENSG00000284633_15 (sequence is synthesized)
tacaggcataggccaccgtgcccagccacaagcagcatcttgcagatgagaacactgaggctcaggggaagcaacacgtgcagtccccgagaggcaagtagcccagctcagactcaagcc

SEQ ID NO: 948354 - DNA, 120 bp, Artificial Sequence
  ENSG00000284633_16 (sequence is synthesized)
cgtctccgaattccagattccaggaaggacgcttccatgaagctattcctttgctttgaaaaaaaaacaaccttccctttacagcctcgtcaaataacaatggaacacccacccatacac

SEQ ID NO: 948355 - DNA, 120 bp, Artificial Sequence
  ENSG00000284633_17 (sequence is synthesized)
cgcagctcaaggaagctgtttctgtgctgatgcctgccattctccaagaaaaaactccgccattcacagggtgtgtttaaggcggagaagagaatacaaatgcatctccccgcgtacccg

SEQ ID NO: 948356 - DNA, 120 bp, Artificial Sequence
  ENSG00000284633_18 (sequence is synthesized)
cctagggcatctctgggaaaatatactcaaatactcaagaaacggtgggggaacggggtgggaggaggacttctctctcactgcatatcctttgagtattttgatgatttggacatgtga

SEQ ID NO: 948357 - DNA, 120 bp, Artificial Sequence
  ENSG00000284633_19 (sequence is synthesized)
ctcgtctctgtaccccagggcctggtacagggcttggcacaaggatagactggtgataaatggaaagctattcaggtccaattgacacattctccactggcctgcttgcctggcccgtgc

SEQ ID NO: 948358 - DNA, 120 bp, Artificial Sequence
  ENSG00000284633_20 (sequence is synthesized)
tgggcatagaagccaggactctgacagatggctccactcacgttcatgggcaaagaacccattcccaagtccagggtcctggagtgtgcctgggctctgcactaatctgcgacgtgaccg

SEQ ID NO: 948359 - DNA, 120 bp, Artificial Sequence
  ENSG00000284633_21 (sequence is synthesized)
tggaaagccaccggtctctgctgggcttctccttatcgccagagcagcagctggaagagtctatgcgtgagtcacggtgtgggcctgatccagacagcctgggtttgaatcctgcctgcc

SEQ ID NO: 948360 - DNA, 120 bp, Artificial Sequence
  ENSG00000284633_22 (sequence is synthesized)
cgtgcccgtcgctctgcgcgcccgcccgccggagcgcagcatcgcctccggccaggagtgtgcatgcgtggggctccagacaaggaagaggatgtttggacggggcagcttggacctatc

SEQ ID NO: 948361 - DNA, 120 bp, Artificial Sequence
  ENSG00000284633_23 (sequence is synthesized)
tgccctgcaagctggctggaattcgagtgaaaccgtcctggggtgaggggagctgggccagatgggctggaggatgaccctatcgggggtctgggccccccctccccaccttgatgcttg

SEQ ID NO: 948362 - DNA, 120 bp, Artificial Sequence
  ENSG00000284633_24 (sequence is synthesized)
aagtctggctctccccagagaaggcccatcctgacagcgtcctttgctgcctgcctcttgggcctggagtgagcccgtcatcaggacagcctcccttgcagagcattcaccctgggccaa

SEQ ID NO: 948363 - DNA, 120 bp, Artificial Sequence
  ENSG00000284633_25 (sequence is synthesized)
tcgtgctcttgagctgacagcctgaggaaggcggtaggacagtgattaccatttgaccagcaaagaaagagagcctggctgagccctgacccactcctggtgctctgatctgttcatccg

SEQ ID NO: 948364 - DNA, 120 bp, Artificial Sequence
  ENSG00000284633_26 (sequence is synthesized)
ggggaggagaggagactgaggctccgagaagcctgctggctttcccaccgccacccagcaaggaagcagcagtgtcgggatttgatccaaggctgtgatgccgaagcccacagctttgcc

SEQ ID NO: 948365 - DNA, 120 bp, Artificial Sequence
  ENSG00000284633_27 (sequence is synthesized)
acctcccagccacacgatgcctccctgtgtgcctagatggcagctgcctagccttcttcatgccatgatgcatacatacaaaattatacggactacatggagaggctatgcagggctgga

SEQ ID NO: 948366 - DNA, 120 bp, Artificial Sequence
  ENSG00000284633_28 (sequence is synthesized)
ggcagtgggcccaaggattcgggggggccccgggtccacccccaccccagagacagaagccatttgcttgtggtgggtccacaggtgggaaacgatggaataggtatgggttagccagcc

SEQ ID NO: 948367 - DNA, 120 bp, Artificial Sequence
  ENSG00000284633_29 (sequence is synthesized)
gaagggatggagctgggaagcagagacggacaggcagtgagcgggcacccctcttggtggggatcccagcttgctagaggagactgcttgtaactgcaggaagcatggtgagcctatcaa

SEQ ID NO: 948368 - DNA, 88 bp, Artificial Sequence
  ENSG00000284633_30 (sequence is synthesized)
agactgcttgtaactgcaggaagcatggtgagcctatcaaaagaatgggaagccagccacagtataaaagtcacaaacttaggcagga

SEQ ID NO: 948369 - DNA, 120 bp, Artificial Sequence
  ENSG00000284633_31 (sequence is synthesized)
gcccaggagttggagtccagcatgggcaacacagcaaaaccccatcgctacaaaaaaaatagtaataatacaaaaatcagcctggtgtggtagcgtgcatctgtagtcccagctactcag

SEQ ID NO: 948370 - DNA, 74 bp, Artificial Sequence
  ENSG00000284633_32 (sequence is synthesized)
ccacttcaaaaaaaactaaaagtcacaaactttccaccagtattcataagagcaaactctgtgtagccttggcc

SEQ ID NO: 948371 - DNA, 120 bp, Artificial Sequence
  ENSG00000284633_33 (sequence is synthesized)
caccagtattcataagagcaaactctgtgtagccttggccgtgcagttgggcagccggctctgcacctgtaggtgcaataactcatttgagctgcacgacacgtgggcatgagaggagct

SEQ ID NO: 948372 - DNA, 120 bp, Artificial Sequence
  ENSG00000284633_34 (sequence is synthesized)
cttgccacccccatttcacaaatggggaaaccaaggtccacaacagctctgccaaagtcagggatggctgagggcagagccaggacttgaacccaggcagctcagtgccaacatccctgc

SEQ ID NO: 948373 - DNA, 120 bp, Artificial Sequence
  ENSG00000284633_35 (sequence is synthesized)
cctgcacttctctacccatctgccaggcaggcaaagatgaaaacacacccgcccagttcactggggcctcaccctcactcacccatagattcccatgggctatctctgtgccttcctctc

SEQ ID NO: 948374 - DNA, 120 bp, Artificial Sequence
  ENSG00000260348_0 (sequence is synthesized)
ggcctccccaagctcatgtcccttgacaccacgcaagccagggctggcagaaggattgcaggtgcactgctggacaactgcacccggtcccactctgtcactgaccagcagcgtgacgtg

SEQ ID NO: 948375 - DNA, 120 bp, Artificial Sequence
  ENSG00000260348_1 (sequence is synthesized)
cagtttcctcctctgttagatgggggtagtgctgctacctccctccctcctggaagggcgctgacaagggagctgaggttcaggaatctctcatggtgacccagagaggagctggcgtcc

SEQ ID NO: 948376 - DNA, 120 bp, Artificial Sequence
  ENSG00000260348_2 (sequence is synthesized)
aacagcacgtgtgtccactttttgtgacacttacctgtgccactgcaggtcaggggcttggccccgtgcacagtaagtgcttacagttagcatcattattcagggtggactatgagtgct

SEQ ID NO: 948377 - DNA, 120 bp, Artificial Sequence
  ENSG00000266554_0 (sequence is synthesized)
ggtgatatggcttcagcctggttctcttgggatgatcactcttagaagaaatttgaagaagcccaaatagccacatggagaagccacaaacagatattctggctggcagcccagcagagg

SEQ ID NO: 948378 - DNA, 120 bp, Artificial Sequence
  ENSG00000266554_1 (sequence is synthesized)
tcccagccagcagccagcatcaactgccatgtgaagaagtgtgcctgcagggggtttcagaccccagctgccaagctgcttccagcctcccggtcttccaagctgaggatgcagacagtg

SEQ ID NO: 948379 - DNA, 120 bp, Artificial Sequence
  ENSG00000266554_2 (sequence is synthesized)
tggagcagagataagccaccctacagtgctgttctcagatccctggctcgcagaactcaagagcactataaaacagttgctattttacattgccaagtttggcattgcttgtggcatcaa

SEQ ID NO: 948380 - DNA, 120 bp, Artificial Sequence
  ENSG00000266554_3 (sequence is synthesized)
ggacaggaaattccaagctctcggtcaatgagagcccacggaggagagagagatggctaaaacaagaagagatcggtggatgactacatctgccggccagaagaccactctgatagcttt

SEQ ID NO: 948381 - DNA, 120 bp, Artificial Sequence
  ENSG00000266554_4 (sequence is synthesized)
catgaggatgactgcgtctcccagccaaaaggccactctgatagcttccatgaggatgactgcatctcctggccaaaagaccactctgatagcttccatgagctctccctggggcatcca

SEQ ID NO: 948382 - DNA, 120 bp, Artificial Sequence
  ENSG00000266554_5 (sequence is synthesized)
tggagaagatatttttgagggagaaatccccaatgcttcttgaatcttgcagcccacacagggatttcctacaagcaacccagccttgagctataaagacctgatcactttcctgggtga

SEQ ID NO: 948383 - DNA, 120 bp, Artificial Sequence
  ENSG00000266554_6 (sequence is synthesized)
agacagcagactgactcagttattctgtggataggtgacttgatcaatgagttggcgagagttctaagatgtgtctttcaggcacatatctcagatttgtaaaattattatttatttatt

SEQ ID NO: 948384 - DNA, 83 bp, Artificial Sequence
  ENSG00000266554_7 (sequence is synthesized)
tcagatttgtaagataatttaaacaagactcagtgtctctgcatctcacactggttgtatattgcattaaaatggtgataatt

SEQ ID NO: 948385 - DNA, 120 bp, Artificial Sequence
  ENSG00000266554_8 (sequence is synthesized)
tctcacactggttgtatattgcattaaaatggtgataattctcccctaatcaaactgtgcccaatgctggcaaggacactaatgttatgaagacaagaggtagctgaaaaataaagagac

SEQ ID NO: 948386 - DNA, 120 bp, Artificial Sequence
  ENSG00000266554_9 (sequence is synthesized)
aatagccacgagacagacccagaggtcaggcagggcagggttgccgtgaggacatggctcgtcccacaggacctgggaactggtggtcacagcagtgcaaggtcctgttctctcctctgc

SEQ ID NO: 948387 - DNA, 120 bp, Artificial Sequence
  ENSG00000266554_10 (sequence is synthesized)
agggacagacaggccaccagcctgacagagacggcattagtgggcagctgccaggaactagcagggattgcactagactttatagcgccatagttcagaattgctggatttggagacaaa

SEQ ID NO: 948388 - DNA, 120 bp, Artificial Sequence
  ENSG00000266554_11 (sequence is synthesized)
atccaggtttgaattgtgattctatttcttactgctccgtgtcctggggcagccaggtcagctctctgagccctatggtctccatggctgagtgagaatgcccgcctccactcagaacca

SEQ ID NO: 948389 - DNA, 120 bp, Artificial Sequence
  ENSG00000266554_12 (sequence is synthesized)
gccagtgtggtgccagcaacctatctaacacaagcaaagaggatttcttaatgaaaacattttgtcttgcacaaaacaatactcaatttaagaaacagcaaatgcagaaaaggaaaaaga

SEQ ID NO: 948390 - DNA, 120 bp, Artificial Sequence
  ENSG00000266554_13 (sequence is synthesized)
acttcaggccactcctgcaccccgggactttcactctgagaaatcctttaccgtggaagcaggttatgctgtacaattggaggcattgtactgatctcttcctaccacactgaatatcgc

SEQ ID NO: 948391 - DNA, 120 bp, Artificial Sequence
  ENSG00000266554_14 (sequence is synthesized)
atgatatcctgaaagtgatctagatgaagttgtgccaacaacatcatgacctgctggattccacacttcccagtgcagcagagccctgacctcactctcacatgccttatgtccctggaa

SEQ ID NO: 948392 - DNA, 120 bp, Artificial Sequence
  ENSG00000266554_15 (sequence is synthesized)
tcacgtaacagccaccgccaggcagtcatcgcagagaaaacaaggaaaacaccacgtggattccctcgggatgagatcaggtgcacgctgccagctcaatgggtccaccacccaccagag

SEQ ID NO: 948393 - DNA, 120 bp, Artificial Sequence
  ENSG00000266554_16 (sequence is synthesized)
actccagcccagtgtcgcagccggcggggcggcacccactgctctcccactccagacctgatttcacattcacatggagccacggtcaggtggtcttcggtcccataaagcctatgcatg

SEQ ID NO: 948394 - DNA, 120 bp, Artificial Sequence
  ENSG00000266554_17 (sequence is synthesized)
gttttgcagatgctctttaacaggttaaggaagatcccttttattcttagtttgctgtgtgttggtattatgaaggcgtgttggattttgtcaaatactttttctaactatattgagttt

SEQ ID NO: 948395 - DNA, 120 bp, Artificial Sequence
  ENSG00000266554_18 (sequence is synthesized)
caacaagcgtgcttcgaaagacagagaagaaagagggattatggcaaaagcagtgataagagtttcttgcatcttcacagatcaagcatcttggtctgcaaccaggtttttctgaacaaa

SEQ ID NO: 948396 - DNA, 120 bp, Artificial Sequence
  ENSG00000266554_19 (sequence is synthesized)
gggttaggagccaaagtttggggtggtgaaagccatggggcccatgttaggatgaggacaagtgtgcatatgggtggcaggtggttttgcccagaatgaactggagggtgatgatcctgg

SEQ ID NO: 948397 - DNA, 120 bp, Artificial Sequence
  ENSG00000266554_20 (sequence is synthesized)
atctggcagtgaagcggcagtgtctgctcagcaggagcgggaggtgtggagccacttcgtcacactctcagctgcacggctttgggccacagcctgtagacactggtggaatctgcttag

SEQ ID NO: 948398 - DNA, 120 bp, Artificial Sequence
  ENSG00000226179_0 (sequence is synthesized)
ataacggggctcgtctttctacgttactttatgtgggagtagttgtaaaacagaatgagggagaccgcggggattgtgcggaaatgtagccaccgtttacatgtcgggaggctgaggtgg

SEQ ID NO: 948399 - DNA, 86 bp, Artificial Sequence
  ENSG00000226179_1 (sequence is synthesized)
accagcctgggcaacatggtaagaccccttctctaccctcccccccaaaaaaaaaattttagtgtcgggacgctgaggtgggagga

SEQ ID NO: 948400 - DNA, 120 bp, Artificial Sequence
  ENSG00000226179_2 (sequence is synthesized)
catgggcaatatggtaagaccccattatctacaaaaaaaaaaaaaaaagaaaagccgggcgtggtggtgggtgcctgtggtcccagctgctcgggacgctgaggtgggaggattgcttga

SEQ ID NO: 948401 - DNA, 120 bp, Artificial Sequence
  ENSG00000237331_0 (sequence is synthesized)
acaggaagctgaggtggaaggactgcctgagcctgggaagcagagtctgcagtgagctatgattgtgccagtgcactgtaccctgggagacagaatgaaaagctatccaaaaaaaagaga

SEQ ID NO: 948402 - DNA, 120 bp, Artificial Sequence
  ENSG00000237331_1 (sequence is synthesized)
gagagggatacaggtcaagtcccagagataaaagcagtcatcagatcatgtccatggtggttggccagaaacaaatgccttttggtccactgcttgagtggcagtaaaccagcagcagaa

SEQ ID NO: 948403 - DNA, 120 bp, Artificial Sequence
  ENSG00000237331_2 (sequence is synthesized)
tttggtccactgcttgagtggcagtaaaccagcagcagaagagaagggctgagaaacacaggtgatacctgattgctacttattgggtttctttttttgtgatggagtcttgctctgtca

SEQ ID NO: 948404 - DNA, 120 bp, Artificial Sequence
  ENSG00000271874_0 (sequence is synthesized)
aatgctgggatttaaacgagggtaagctgactccagaggcatcattcttaactgctgtgcaacactctctgctaagagctaacataggattgaaattttagtaggtgggagatttttctt

SEQ ID NO: 948405 - DNA, 120 bp, Artificial Sequence
  ENSG00000271874_1 (sequence is synthesized)
agcaacttgcccaagtcgtaaaaccagaaagagtggagccgagaatcaaagcttggatgcctgaccagagtggacctttgaaacactcctctgtatattgtcttcaggctgcctgtattt

SEQ ID NO: 948406 - DNA, 120 bp, Artificial Sequence
  ENSG00000271874_2 (sequence is synthesized)
acaaactctgatattgacctcattacttctccccgttctgcaggcagaagactgctatgagagcacttaggacccaagcgacatcagccttggaacaggcaaataaaaatggaaagctaa

SEQ ID NO: 948407 - DNA, 120 bp, Artificial Sequence
  ENSG00000271871_0 (sequence is synthesized)
ccaaaggctccataggagtttggcaagtggaaagagaatgaaggtctgggcaaggggtggggaggttttcaggcagaagcactgcacactgaaaggctggaagagaaggtagagtttcag

SEQ ID NO: 948408 - DNA, 120 bp, Artificial Sequence
  ENSG00000271871_1 (sequence is synthesized)
aaagactggagaatggagtaggggatgggtgagatatcacggccagaccctataggccattggaagggagaggcaacagatcaagtcctgggaggcggagttctagttcaaggccatttg

SEQ ID NO: 948409 - DNA, 120 bp, Artificial Sequence
  ENSG00000271871_2 (sequence is synthesized)
tagcttattgtatagcattagacaggtttttagacctcctcagacctcagtttcctcatctctaatagggggctagaaatacccacacgccttcttctcagtgttgtcacgattaaatgg

SEQ ID NO: 948410 - DNA, 120 bp, Artificial Sequence
  ENSG00000271871_3 (sequence is synthesized)
ctctgtgcagcttgaggtaggaagtgtcaacctcagaggagagttggaagaggagatggccaggactggggtttcactgtgacttgggagactcggggtcttattgcctgcctcagggaa

SEQ ID NO: 948411 - DNA, 120 bp, Artificial Sequence
  ENSG00000271871_4 (sequence is synthesized)
gatcccacctcccagcccaggcccagaagccctcctaagatacctgccaccctttgctcaagtgacagctgccttttcatgacatgactccctacatgccaagccctatgctgagcactg

SEQ ID NO: 948412 - DNA, 120 bp, Artificial Sequence
  ENSG00000271871_5 (sequence is synthesized)
tcattcagggtcacttcacagttacagcccagactcgaatcagtcagactcaggttcaaatcctaaatatgtccctgccccagttcccatcagtgtggccttgaggaattacttaagcat

SEQ ID NO: 948413 - DNA, 120 bp, Artificial Sequence
  ENSG00000271871_6 (sequence is synthesized)
tctgagaaaattactcagtttcctcaacagtaaaaaaagtgcatattaatgagacccaggtcatatggtgggttacgaggtttaaatgagcttattaataaatcccatgataaacagtga

SEQ ID NO: 948414 - DNA, 120 bp, Artificial Sequence
  ENSG00000271870_0 (sequence is synthesized)
cagttgattattttgcagaaagcagtttccttaccttcttgatttacaactgatggatttgtcataaaatgattttcaaacactgttatatcagagcatcagtatgtgttcagaagcatg

SEQ ID NO: 948415 - DNA, 120 bp, Artificial Sequence
  ENSG00000271870_1 (sequence is synthesized)
tcctactttggccctatatggcaaaactgatgactgaaatgtaatttctgaagcatctatgttagggcctaattgaagacagtctaatatatagattgtcaacaagaattagggggaaaa

SEQ ID NO: 948416 - DNA, 120 bp, Artificial Sequence
  ENSG00000271870_2 (sequence is synthesized)
ttttactttaccatgctcattacctgtgaataatccctgacatgcattgttgctctgagtacccaatctggaagatggtcttagcaaaagtgagctaattccctatatttcatttgctaa

SEQ ID NO: 948417 - DNA, 120 bp, Artificial Sequence
  ENSG00000271870_3 (sequence is synthesized)
atgtttgtaactttaaggtactggaggaaagtttatggaaaacagaaatacagtcttcattataattctgataaggcaagtatattaaaaacgtaataaagaccttacctgaatatttca

SEQ ID NO: 948418 - DNA, 120 bp, Artificial Sequence
  ENSG00000237338_0 (sequence is synthesized)
cctttgtgccgagcaggttgatgttaaaagcaatgaggaacttcctcgcccccgtggccgtggccccccaactggggacaaaggagctgggaccaaagtcgggcgcccagtcggcctgct

SEQ ID NO: 948419 - DNA, 120 bp, Artificial Sequence
  ENSG00000237338_1 (sequence is synthesized)
ggagctgtgagcaagttcgctctgggaaccgcaagcaaccacataaatataacggcagagaagaggaaaaactcgtgaacccgcacaccagtgtgactgtgacgtgggccctgcgtcggg

SEQ ID NO: 948420 - DNA, 120 bp, Artificial Sequence
  ENSG00000237338_2 (sequence is synthesized)
catgaccgtgacgggggttacgtgtgccctgcatgccggcgtgaccgtgacgggggttacgtgtgccctgcacgctggcgtgactgtgacctacgtccctgcctcgggatttctttccag

SEQ ID NO: 948421 - DNA, 120 bp, Artificial Sequence
  ENSG00000237338_3 (sequence is synthesized)
gagcgctgggttggtgcagcctaggggtgggtatgcactttgtcccgtttgtctctgtttgtttcatatcattttcttgatttagttaatttcccaaagtgaaattattctgctctagaa

SEQ ID NO: 948422 - DNA, 120 bp, Artificial Sequence
  ENSG00000272541_0 (sequence is synthesized)
attagctcaagtggtagagcgcttgcttagcatgcaagaggtagtgggatcgatgcccacattctccaagctttattatttagacatcgtgtctccaaacactcaggtctccaaacccaa

SEQ ID NO: 948423 - DNA, 120 bp, Artificial Sequence
  ENSG00000272541_1 (sequence is synthesized)
gttagtgtctgagaacaggatgctgctttggttcaagacgtaggagcagcaataatagagggctggtgatggctccctcttggcattcagtatagtgtagatctaccatgtaattaattc

SEQ ID NO: 948424 - DNA, 120 bp, Artificial Sequence
  ENSG00000272541_2 (sequence is synthesized)
gaaaagtgcagggcagagccacttgggtaaatacagccccggctttctgctcaggggacagagtttgaggcactgcagaggaaccagccaaagtatgagacccatatgttgagagtgaca

SEQ ID NO: 948425 - DNA, 120 bp, Artificial Sequence
  ENSG00000272541_3 (sequence is synthesized)
gtgtaaagttcaaaaaaatcaaaatgtttaaagatttatcatgggtcttgatgacatgatggaatctctctactctctggactgattatgtgtggtaataaatttactttttaaaagcca

SEQ ID NO: 948426 - DNA, 70 bp, Artificial Sequence
  ENSG00000277715_0 (sequence is synthesized)
cactcaggaggctgagacaggaggatcgcttgagcctgggagttcaaggttatagtgagctatggaaaaa

SEQ ID NO: 948427 - DNA, 120 bp, Artificial Sequence
  ENSG00000277715_1 (sequence is synthesized)
aaaaaaagcagactgtaggccagatatgagaatggacggtttctcaatttttacctctactgagcactgaatgaatgaatagagagtaggacgatgggactgttaatattttcagcattt

SEQ ID NO: 948428 - DNA, 120 bp, Artificial Sequence
  ENSG00000277715_2 (sequence is synthesized)
ccctctcattcttttcctctgggagatagtacatacaatggttaagacacaggctatagaatagactgacttgggttcaaattcagctccatgactgactttggagtgtgacctctctga

SEQ ID NO: 948429 - DNA, 120 bp, Artificial Sequence
  ENSG00000277715_3 (sequence is synthesized)
acctcagtatcttcagctataagacaggagtaattgctacctcactaggccaggtgtggtggctcacacctataatcccagtacttggggaggccgaggcagatggactgcttgagccca

SEQ ID NO: 948430 - DNA, 120 bp, Artificial Sequence
  ENSG00000277715_4 (sequence is synthesized)
agagttcaaaacaagcctgggcaacaaggcaaaaccctgtccctacaaaaaatacaaaaaaaaattatccaggcatggtggagtgtgactgtagtcccagctacttggggagctgaggtg

SEQ ID NO: 948431 - DNA, 120 bp, Artificial Sequence
  ENSG00000277715_5 (sequence is synthesized)
agaggatcacttgggcctggaaagtcaaggctgcagtgagccctgttcaccattgcactccacccaaaaaaaaagaacaaccttgctgttatgcggattagacaagagacaccatatgat

SEQ ID NO: 948432 - DNA, 120 bp, Artificial Sequence
  ENSG00000277715_6 (sequence is synthesized)
actgggcatatggcaatgctcagtgaatattggacagctaatacaatttgcagagtcactgaggaaaagtatagcttcagagagcttctgtgtccagatttcaacgattttctttcatca

SEQ ID NO: 948433 - DNA, 120 bp, Artificial Sequence
  ENSG00000277715_7 (sequence is synthesized)
ttatttcgtggggctcccaggaccatatgtggctcacaaaccacaggctaggatgtgtttaacgttaaaagcaagcagtgtgtttctctgaagtgtggctccaccatggtgttcggttac

SEQ ID NO: 948434 - DNA, 120 bp, Artificial Sequence
  ENSG00000277715_8 (sequence is synthesized)
acagcatgaatctagaggagtttctcttctgcttttcctcctagttttgtttcctctatcccttttccttgctaaagtgtgttggatggtcaggaatgtgggcggagaagagggggagct

SEQ ID NO: 948435 - DNA, 120 bp, Artificial Sequence
  ENSG00000277715_9 (sequence is synthesized)
ggagacatctcatcctttcatccagcttgtgtaaaaatgcctcagaactccctcataccacatgcaccataaattataaggtcaagctttgtaagcctgcagccctcttggctttttgca

SEQ ID NO: 948436 - DNA, 120 bp, Artificial Sequence
  ENSG00000277715_10 (sequence is synthesized)
tgttggttagaatgcctaaatagaaagcctctgttaatgttgattgcctcttgtctgttccaggttggcaaggcccccagtggccaaggcatgagcctggatgccctgcaaattgagtac

SEQ ID NO: 948437 - DNA, 120 bp, Artificial Sequence
  ENSG00000277715_11 (sequence is synthesized)
gtgttagggatgggggccattctttatagtttgactctggagagctaggaccacctttcccagcctcaggggtgcacatcctcaggagctgcctacctccagatattgtaagtccatgca

SEQ ID NO: 948438 - DNA, 120 bp, Artificial Sequence
  ENSG00000277715_12 (sequence is synthesized)
gaagaggaagggcccagctggggcacctcttggttgaggaatgagtatgtgacattttcatgtgggcacattttgatactactttaaaaatagaccaagcacagtggctcacacctgtaa

SEQ ID NO: 948439 - DNA, 62 bp, Artificial Sequence
  ENSG00000277715_13 (sequence is synthesized)
acactccagcttacactggacatgatgaggaggaggaggatgatggtggtgattatgataga

SEQ ID NO: 948440 - DNA, 120 bp, Artificial Sequence
  ENSG00000277715_14 (sequence is synthesized)
tgatgaggaggaggaggatgatggtggtgattatgatagaaatggtgatggtgatgatgacaatggtgatagtagggatggtcttgctctgtcgcaatcaataaatgaatgcataaacac

SEQ ID NO: 948441 - DNA, 120 bp, Artificial Sequence
  ENSG00000212855_0 (sequence is synthesized)
aggcttgccatcaccacagatggcctctgagacactgtttgaaccacatctgcacctgtgagaggccagtttgaggtatgagaacactgtttcaatttggacttgcctttgtcttggttc

SEQ ID NO: 948442 - DNA, 120 bp, Artificial Sequence
  ENSG00000212855_1 (sequence is synthesized)
ctgcttttcccagatagcacctacccaacccaggatgaatgagtgcagagaggtcaagtgccaggccatcttttgctgacacccttttctggtatttcaggtataagtccatcatccaaa

SEQ ID NO: 948443 - DNA, 120 bp, Artificial Sequence
  ENSG00000212855_2 (sequence is synthesized)
gactgctcaacatctcaccagaatatatttcaatcctcatggggcatgattctttcacaaaacccctttcaggaatggagtcagaagagtagtttccagagacaacctcacagtcttgaa

SEQ ID NO: 948444 - DNA, 120 bp, Artificial Sequence
  ENSG00000212855_3 (sequence is synthesized)
acggctctgcctcccatgtgatctgaccatggagatggcatataagggccctaagtttgagacttttagggtactgcaatgcgttatcacaggcagcctttatcctgataccaagccagc

SEQ ID NO: 948445 - DNA, 120 bp, Artificial Sequence
  ENSG00000212855_4 (sequence is synthesized)
tctgcctgtaccattttcctctgcttaggcaggctgacagccctgacaccctggtgctccagtttgagtcactatatgtggatgtgctagtcttagggcaatggacctgagctgtgagct

SEQ ID NO: 948446 - DNA, 120 bp, Artificial Sequence
  ENSG00000212855_5 (sequence is synthesized)
gtagctagtgtcacaatgaatgccagctttgctagtaacaattccctttggcttggtagagaaggagacctctgtggaggtacaatggtggtgcactgtcacctgtcttctctgtgggat

SEQ ID NO: 948447 - DNA, 120 bp, Artificial Sequence
  ENSG00000212855_6 (sequence is synthesized)
ccatgggacagttccatgatcctaggagagggtagatgtgagccagcctgaagaaatgtcaagcagagccccaggaatgaagcacaaaatcactacagatccaaaaggatctgcagaatt

SEQ ID NO: 948448 - DNA, 120 bp, Artificial Sequence
  ENSG00000212855_7 (sequence is synthesized)
tgtcaggcctgcctagacattgtaggggttagtcttattgaaatgtgtcccactgtaatttccaacttcagccttcctgtgttcccagcagtttctctctcccaggtggggctttctgca

SEQ ID NO: 948449 - DNA, 120 bp, Artificial Sequence
  ENSG00000212855_8 (sequence is synthesized)
gaatgacacagcctcagaagctactgggctgtgtgttactgtgggagtgttgcgagtgttggatgtcagcatgtgtgtgtggctttgtgtgtttgtgtatgtgtctgtgtgtgtgtatgt

SEQ ID NO: 948450 - DNA, 120 bp, Artificial Sequence
  ENSG00000212855_9 (sequence is synthesized)
aaatgaattctgtggatcaggaatcagcaatgactagttaagctgtctgtgaccagccgggttccccatcgtctgcccctgccaaaaaaacaggtactcttctacaaagaagaggagagc

SEQ ID NO: 948451 - DNA, 120 bp, Artificial Sequence
  ENSG00000212855_10 (sequence is synthesized)
accacacccaagaacagacatctcccagtgttgcattataaagcagccaacccacagacactagcactctggtctgcatagcccctttaatttacctagaattcagttcccagccaagta

SEQ ID NO: 948452 - DNA, 120 bp, Artificial Sequence
  ENSG00000212855_11 (sequence is synthesized)
ggtgcttcatgtcctgagggtgcaatcctccatcatcttgagatttcatgctggtacagagagtgtgacagcaataaggtcagataggggtgagtatacaacctggtgaagggtggatgg

SEQ ID NO: 948453 - DNA, 120 bp, Artificial Sequence
  ENSG00000212855_12 (sequence is synthesized)
ggtcccgtaccttcaccagcaaaaagggtgaaaatagatgacacagaatgtgcttccaactccatccccacattcccataattgcaaaatcagtcaacaacatggcctggtgtttaggtg

SEQ ID NO: 948454 - DNA, 120 bp, Artificial Sequence
  ENSG00000212855_13 (sequence is synthesized)
tctggaaaactcctggtttgagggttttaatacctgtagtcaaatggaagtggaatagattgatgctgggtgggttgtggcctccacatttgtgtcctcttttactgacttccattgtcc

SEQ ID NO: 948455 - DNA, 120 bp, Artificial Sequence
  ENSG00000212855_14 (sequence is synthesized)
tcattggtgtagggcttcctggatctggctcaacatcttccacactaaactcttccctgttcacagaagaccatcataaaaatgcattgtagaggccctgcaaggaccaggatgaaggga

SEQ ID NO: 948456 - DNA, 120 bp, Artificial Sequence
  ENSG00000212855_15 (sequence is synthesized)
gacagtgaggtcaagagcccagccatctttcactgacacccacttctgggttctcaggctggctgacaggtctgacagcccatcacgaaagcctgcatactcttagacacaaggactgag

SEQ ID NO: 948457 - DNA, 120 bp, Artificial Sequence
  ENSG00000212855_16 (sequence is synthesized)
ctatgggctccagctagcatcacaatgaaggccaccattgcctagggataagtccctgtgactttgtggataagaactccgtggagccaatccaaggagagacactatcattcatctcta

SEQ ID NO: 948458 - DNA, 120 bp, Artificial Sequence
  ENSG00000212855_17 (sequence is synthesized)
ccgggcctattaaatttacctcgaatttgattcccagaggagttggtgcttcacatcatcagggggaacttctccattgtcttgggatttcagtctgggatagagactttgaacagcaat

SEQ ID NO: 948459 - DNA, 120 bp, Artificial Sequence
  ENSG00000212855_18 (sequence is synthesized)
aagtttccttggtctggctcaacgtcttctaaactcaacattccccagttcatggaaaatgatcctcatgggattctattgtaaaagctgcatgattcctggagaatgttttattgtcct

SEQ ID NO: 948460 - DNA, 120 bp, Artificial Sequence
  ENSG00000212855_19 (sequence is synthesized)
gaagtcaacccaaaaatcaacactaccagtcatgttgcagagctccttgaattaaccttgaattcagtttccagctgagcagctgcttcacgttgtgagggggcaatcctccatcatcct

SEQ ID NO: 948461 - DNA, 120 bp, Artificial Sequence
  ENSG00000212855_20 (sequence is synthesized)
gggatttcattctgggacacagagtttgagcagcaataaggctgggtccacattgcccctcaacagcattagtggacatgattgtcagacttgcaatttccgcagacaccttctgtgaac

SEQ ID NO: 948462 - DNA, 120 bp, Artificial Sequence
  ENSG00000212855_21 (sequence is synthesized)
atttttcaacatcatctacatgagtgagagacccgttcgacatgtaagaatactgcttgactttggacctgcctttgtcgtggttcctgcctttctcatagatcccctgccaggcccagg

SEQ ID NO: 948463 - DNA, 120 bp, Artificial Sequence
  ENSG00000212855_22 (sequence is synthesized)
atgataggaggcaatgaagtcaagggccgagccccattcattgaaagctgactctggggtctcgggtataattccatcacataaaatcccctcaacaactcaccagactatattccaatc

SEQ ID NO: 948464 - DNA, 120 bp, Artificial Sequence
  ENSG00000212855_23 (sequence is synthesized)
tccatggaacctgattcttgcacacagcctctttcaggaatggagtcagaagagcagtcttcagagaccacctcagtttggaaaagcctcctccttcagtggttcccagccatggagtca

SEQ ID NO: 948465 - DNA, 120 bp, Artificial Sequence
  ENSG00000212855_24 (sequence is synthesized)
tcgtgaaggggctccatggtcaataattttacggtactgcacttggttatcacagacagactttttcatgatagcatgccatctctgtctatatcattttcctctgcttaggcaggctga

SEQ ID NO: 948466 - DNA, 120 bp, Artificial Sequence
  ENSG00000212855_25 (sequence is synthesized)
caactctgacagccaggggcccgaatctacctggcaaatgtgcatgctctactctcagtgcaaaaggcctgtttgggagttctgactagtgtcacaataaatgccgccattgcctagtga

SEQ ID NO: 948467 - DNA, 120 bp, Artificial Sequence; identical to SEQ ID NO: 948441
  ENSG00000212856_0 (sequence is synthesized)

SEQ ID NO: 948468 - DNA, 120 bp, Artificial Sequence; identical to SEQ ID NO: 948442
  ENSG00000212856_1 (sequence is synthesized)

SEQ ID NO: 948469 - DNA, 120 bp, Artificial Sequence; identical to SEQ ID NO: 948443
  ENSG00000212856_2 (sequence is synthesized)

SEQ ID NO: 948470 - DNA, 120 bp, Artificial Sequence; identical to SEQ ID NO: 948444
  ENSG00000212856_3 (sequence is synthesized)

SEQ ID NO: 948471 - DNA, 120 bp, Artificial Sequence; identical to SEQ ID NO: 948445
  ENSG00000212856_4 (sequence is synthesized)

SEQ ID NO: 948472 - DNA, 120 bp, Artificial Sequence; identical to SEQ ID NO: 948446
  ENSG00000212856_5 (sequence is synthesized)

SEQ ID NO: 948473 - DNA, 120 bp, Artificial Sequence; identical to SEQ ID NO: 948447
  ENSG00000212856_6 (sequence is synthesized)

SEQ ID NO: 948474 - DNA, 120 bp, Artificial Sequence; identical to SEQ ID NO: 948448
  ENSG00000212856_7 (sequence is synthesized)

SEQ ID NO: 948475 - DNA, 120 bp, Artificial Sequence; identical to SEQ ID NO: 948449
  ENSG00000212856_8 (sequence is synthesized)

SEQ ID NO: 948476 - DNA, 120 bp, Artificial Sequence; identical to SEQ ID NO: 948450
  ENSG00000212856_9 (sequence is synthesized)

SEQ ID NO: 948477 - DNA, 120 bp, Artificial Sequence; identical to SEQ ID NO: 948451
  ENSG00000212856_10 (sequence is synthesized)

SEQ ID NO: 948478 - DNA, 120 bp, Artificial Sequence; identical to SEQ ID NO: 948452
  ENSG00000212856_11 (sequence is synthesized)

SEQ ID NO: 948479 - DNA, 120 bp, Artificial Sequence; identical to SEQ ID NO: 948453
  ENSG00000212856_12 (sequence is synthesized)

SEQ ID NO: 948480 - DNA, 120 bp, Artificial Sequence; identical to SEQ ID NO: 948454
  ENSG00000212856_13 (sequence is synthesized)

SEQ ID NO: 948481 - DNA, 120 bp, Artificial Sequence; identical to SEQ ID NO: 948455
  ENSG00000212856_14 (sequence is synthesized)

SEQ ID NO: 948482 - DNA, 120 bp, Artificial Sequence; identical to SEQ ID NO: 948456
  ENSG00000212856_15 (sequence is synthesized)

SEQ ID NO: 948483 - DNA, 120 bp, Artificial Sequence; identical to SEQ ID NO: 948457
  ENSG00000212856_16 (sequence is synthesized)

SEQ ID NO: 948484 - DNA, 120 bp, Artificial Sequence; identical to SEQ ID NO: 948458
  ENSG00000212856_17 (sequence is synthesized)

SEQ ID NO: 948485 - DNA, 120 bp, Artificial Sequence; identical to SEQ ID NO: 948459
  ENSG00000212856_18 (sequence is synthesized)

SEQ ID NO: 948486 - DNA, 120 bp, Artificial Sequence; identical to SEQ ID NO: 948460
  ENSG00000212856_19 (sequence is synthesized)

SEQ ID NO: 948487 - DNA, 120 bp, Artificial Sequence; identical to SEQ ID NO: 948461
  ENSG00000212856_20 (sequence is synthesized)

SEQ ID NO: 948488 - DNA, 120 bp, Artificial Sequence; identical to SEQ ID NO: 948462
  ENSG00000212856_21 (sequence is synthesized)

SEQ ID NO: 948489 - DNA, 120 bp, Artificial Sequence; identical to SEQ ID NO: 948463
  ENSG00000212856_22 (sequence is synthesized)

SEQ ID NO: 948490 - DNA, 120 bp, Artificial Sequence; identical to SEQ ID NO: 948464
  ENSG00000212856_23 (sequence is synthesized)

SEQ ID NO: 948491 - DNA, 120 bp, Artificial Sequence; identical to SEQ ID NO: 948465
  ENSG00000212856_24 (sequence is synthesized)

SEQ ID NO: 948492 - DNA, 120 bp, Artificial Sequence; identical to SEQ ID NO: 948466
  ENSG00000212856_25 (sequence is synthesized)

SEQ ID NO: 948493 - DNA, 120 bp, Artificial Sequence
  ENSG00000212856_26 (sequence is synthesized)
tttttttttttttttttgagtctcctaaccttttgttggcctgtctgtgtggttctgcttgggctgcagggctcagtgttctttatttttctgtggttcattaattgaaaatgaattgag

SEQ ID NO: 948494 - DNA, 120 bp, Artificial Sequence
  ENSG00000212856_27 (sequence is synthesized)
agacaggctggcctccaaatcacctccccatgcaaaaaaaggcacccttctagaagtaagaggagcacaccacaccaaaaagacaaacctctcccagagattcattgtcctgcaggaaac

SEQ ID NO: 948495 - DNA, 120 bp, Artificial Sequence
  ENSG00000212856_28 (sequence is synthesized)
ccagggagcacactagcagtcttgtccacaggccttttgaatttacctcatattcggttcccagccagctaggtgcttcacgtcgtgagaaggcaccctccatcatcttgggatttcatt

SEQ ID NO: 948496 - DNA, 120 bp, Artificial Sequence
  ENSG00000212856_29 (sequence is synthesized)
gtaggacatagagtgtgacaatcaataaagtcagataggagtgaggatacaatctggtgaggggcagatgcggtccagcaaaaaaaaatgaaagatgatacagaaggtgcttctaactcc

SEQ ID NO: 948497 - DNA, 120 bp, Artificial Sequence
  ENSG00000212856_30 (sequence is synthesized)
atccccacattcccttaattgcacaaccagttcacaccaatgccccactgttcaagggggagtactccaatgtgcaaggaagatttggagtgcaaattgaggccatcctggaaaactcct

SEQ ID NO: 948498 - DNA, 120 bp, Artificial Sequence
  ENSG00000212856_31 (sequence is synthesized)
gatttaaggactttcattgctatagccaaatgaaagtggaatagattgatgccggctgcaaaccagcctgaagaaacatcaagcaaagccccaggaataaactgtgaaatccctaaggat

SEQ ID NO: 948499 - DNA, 120 bp, Artificial Sequence
  ENSG00000212856_32 (sequence is synthesized)
ccaaaaagatctgcaaaagacctcaagccttcttagacattgtattggatagtcccacgatcctaggggagagcagacaagagccagctggaagatacgtcaagcaaaccccaggaataa

SEQ ID NO: 948500 - DNA, 120 bp, Artificial Sequence
  ENSG00000212856_33 (sequence is synthesized)
accgcgaaatccgtaaggttccaaaaggatctgaagggtgcctcaggcctgcctaggtgtgcagaggtttgcaatcgccacagacagcctctgagacactgtctcaacctcatctgtacc

SEQ ID NO: 948501 - DNA, 120 bp, Artificial Sequence
  ENSG00000212856_34 (sequence is synthesized)
tgtgagaggccagttctaggtgtggttcctgcttacccgagagagatcctgtgaggtccaggatgaagtgaggcactgcggttaagggcctggtcgtctttcattgacactcatctctgg

SEQ ID NO: 948502 - DNA, 120 bp, Artificial Sequence
  ENSG00000212856_35 (sequence is synthesized)
ggtctcagcaaatacagggggagacactagcagtcctctccacagggccacttgaacttacactgaatttggttccaagcccagcaggtgcttcacataatgagggggcactcctccatc

SEQ ID NO: 948503 - DNA, 120 bp, Artificial Sequence
  ENSG00000212856_36 (sequence is synthesized)
atgttgggattttatcctgggacctagagtgtgagtagcaataaggtcagatacaggcttgccataaccacagatggcctcggagacattgtcttagcctcatctgcacccattggaggc

SEQ ID NO: 948504 - DNA, 120 bp, Artificial Sequence
  ENSG00000212856_37 (sequence is synthesized)
cagtccaatgcgtgaggacactgctcctccttgtacttgccttgtcatggtaactgcctttcccagagatcccctgttagtcccaagatgaagggaggcagtgaggtcaagaactcggcc

SEQ ID NO: 948505 - DNA, 120 bp, Artificial Sequence
  ENSG00000212856_38 (sequence is synthesized)
tcaccacagacagcctctgagacactgtctatactcatatgcactagtgagaggccaatccgaggtacaagaacaccactccaacttggaattgcctttgtcttggttcctgcttttccc

SEQ ID NO: 948506 - DNA, 120 bp, Artificial Sequence
  ENSG00000212856_39 (sequence is synthesized)
agagagccctgtgaggctcagaataaagggaggaagtgaggtcaagaacctggacatctttcactaacacccaactctgggatctgaggtattattttatcaccaaaagaaccctcaaca

SEQ ID NO: 948507 - DNA, 120 bp, Artificial Sequence
  ENSG00000212856_40 (sequence is synthesized)
acacaccagattatatgccaatccccgctggacccgattcttgcacataggtctttcctgaatggagtcacaagagcagtttcctgtgaccacctcacagtaacataaagcttctgcctc

SEQ ID NO: 948508 - DNA, 120 bp, Artificial Sequence
  ENSG00000212856_41 (sequence is synthesized)
tggcatgacccgatcaccaagatggactggagagtccatcagtttgacagttttagggtcctgaagtggaggtttgcaggcagcctttttttttgataccaggcttgctctgcctgtacc

SEQ ID NO: 948509 - DNA, 120 bp, Artificial Sequence
  ENSG00000212856_42 (sequence is synthesized)
atttttctgtgcttagatagggtgacagctctgacagcacagtacctaagcctccctcacaaatgtgcatgtgctagtctcagggcacaaggcctgattctgagctctggctagcatcac

SEQ ID NO: 948510 - DNA, 120 bp, Artificial Sequence
  ENSG00000212856_43 (sequence is synthesized)
aatacatgtcaccattgcctagcaacaagtccctgtgtcttgttggagaagaagatttccatggaagtgtgttggctttggactgttgcctgtcttctctgtgggatccatgagataatc

SEQ ID NO: 948511 - DNA, 120 bp, Artificial Sequence
  ENSG00000212856_44 (sequence is synthesized)
ccatgttcccaggagggtacagatgtgagccagcctgaagtaacgtcaagcagagccgcaggaataaaccacaaaatccccaaggatgcaaaagatctgcaggattcctcaggactgcct

SEQ ID NO: 948512 - DNA, 120 bp, Artificial Sequence
  ENSG00000212856_45 (sequence is synthesized)
agacattgtaggggtctttcactgggctgttgctggatgggactgcctctcaccacagatctattggctgccagggatttcaaggatgaaaagaacttcagagaatccacagtaccctac

SEQ ID NO: 948513 - DNA, 120 bp, Artificial Sequence
  ENSG00000212856_46 (sequence is synthesized)
aaatgcactgctggtcagtttcaggcttgctatcaccacagagggcatctgatacattgtctcaacctcatctgcacccgtgagagaccagaccgaagtgagaacactgacccatgttgg

SEQ ID NO: 948514 - DNA, 120 bp, Artificial Sequence
  ENSG00000212856_47 (sequence is synthesized)
acttctctttgtcatggtttttgccttttgcagagggccccatcaaggcccaggctgaagagagacagtgagggcttcctggatctggctcaacatcttccacactaaactcttccctgt

SEQ ID NO: 948515 - DNA, 120 bp, Artificial Sequence
  ENSG00000272068_0 (sequence is synthesized)
agccttccatctagactgcaccctaggtccctcttgggaactctggactgctccccactgaatgtgccaacgcccccactcaccactgcctggctttcactcccagtgccatggacttgg

SEQ ID NO: 948516 - DNA, 120 bp, Artificial Sequence
  ENSG00000272068_1 (sequence is synthesized)
ttccaaagggctttgagaacctcacataaaaacccactccaaatctttgagggtctaaagggaagattctggccccttcccagagacccatctactgtagggacaggaaaagaagacctg

SEQ ID NO: 948517 - DNA, 120 bp, Artificial Sequence
  ENSG00000272068_2 (sequence is synthesized)
gggggtagggaggggtagatggtaaatttccttaccaagaaaaatgccagccaggtgcggtgtctcatgcctataatcccagcattggaaggccaaggtgggcggatcacctgaagtcgg

SEQ ID NO: 948518 - DNA, 68 bp, Artificial Sequence
  ENSG00000272068_3 (sequence is synthesized)
gtgagctgagatcgtgccactgcattatatcctgggtgatagagtgaggctccgccccagaaaggatg

SEQ ID NO: 948519 - DNA, 120 bp, Artificial Sequence
  ENSG00000272068_4 (sequence is synthesized)
gaaaagaaaagaaaaatgccccagaaaggatgcaagactgaaggggacagaggaaggtgcctgggacagtctggggaggaagggacctcgatctatttacttcgttagaccaatatgagt

SEQ ID NO: 948520 - DNA, 120 bp, Artificial Sequence
  ENSG00000272068_5 (sequence is synthesized)
tgaattgaattccagctgtggaccaggaactgctcgaggcctggaaatgcagttccaattcttctagtagaaagagcggatctgagaaggccttcggggacagatctgggcagccttagg

SEQ ID NO: 948521 - DNA, 120 bp, Artificial Sequence
  ENSG00000272068_6 (sequence is synthesized)
atgtctttttgctccccttagaagttgcatttcagagctgcaagaaaaccccccttcctcaggacagtctcagcatggatgcatgtgtccagcctacctccacactggctctacagggct

SEQ ID NO: 948522 - DNA, 120 bp, Artificial Sequence
  ENSG00000272068_7 (sequence is synthesized)
tgaggccagccaggctgagccaggcaaccaagcggctgaaatttaatcccagtggtggctcagatgtaaccacagttcttgcctcagggaaacctggctgtgaccagagaaggcagagaa

SEQ ID NO: 948523 - DNA, 120 bp, Artificial Sequence
  ENSG00000272068_8 (sequence is synthesized)
agtgaccttccttaccacctctcctcatgaccagaaggattggcactcacttcggtgccctgggggaatccacccttgactgaggccagcagcacctgggtctggacaagggctggtacc

SEQ ID NO: 948524 - DNA, 120 bp, Artificial Sequence
  ENSG00000272068_9 (sequence is synthesized)
agacagtctgttccaaaaagcagatccctggtgggagaccagacgtggtgagagaacagacagctgctgttgcgcagacgaggactctggcatcacaggcactgaggtcaaattcctgtt

SEQ ID NO: 948525 - DNA, 120 bp, Artificial Sequence
  ENSG00000272068_10 (sequence is synthesized)
ttgtcatttgcagtggcaaacctcagaaagggccccgttcctcctctgaaactctctcttctgaacagtgggctgaataatatctactgcactgggcaatatctactgtacctgttctag

SEQ ID NO: 948526 - DNA, 120 bp, Artificial Sequence
  ENSG00000272068_11 (sequence is synthesized)
gcaagggaaacccctggcccatgactcgggcttagcaaaatctagttcttttcctttcccagtcacacacacttgcgcacacacacagcaacctaatctgcccagatctcctggccagga

SEQ ID NO: 948527 - DNA, 120 bp, Artificial Sequence
  ENSG00000272068_12 (sequence is synthesized)
tttccagctgagaaaatttatactgaaggctaacctgcagtttgaaccagcaattgctgatcagagactctctttacaattacggacacttggccatatgtgtcttcccccgtttctatt

SEQ ID NO: 948528 - DNA, 120 bp, Artificial Sequence
  ENSG00000272068_13 (sequence is synthesized)
tactttctgagaggaggcaagaatcagcctcctccagaggcaagaaccccctccagaggaggggctctgcctagcccctccagatctcagaaagagatccctggggattggctgaaagca

SEQ ID NO: 948529 - DNA, 120 bp, Artificial Sequence
  ENSG00000272068_14 (sequence is synthesized)
aacagaatcaatggcagcgggaagaatgaaagtcagatttcaggtagaacctcctgtctcagtaacaggagaaaaattcctccagtaaccttgaatatcttctgaacacggaaactgaga

SEQ ID NO: 948530 - DNA, 120 bp, Artificial Sequence
  ENSG00000272068_15 (sequence is synthesized)
cccaaagaggtcaagcaactgtccagagtcacacagcatggaactggctgaaccatgaccaaaaatcaagtctcctgactcccaggccaaggttcttgccagggctccccagatgtctat

SEQ ID NO: 948531 - DNA, 120 bp, Artificial Sequence
  ENSG00000272068_16 (sequence is synthesized)
caggggagggagaaagagggaggtggagagaagaaagagagagagggagagcgtgggcagctctcctccctctcccacgtgcagcccagctggctgcctcccagtctcctgggccctggg

SEQ ID NO: 948532 - DNA, 120 bp, Artificial Sequence
  ENSG00000272068_17 (sequence is synthesized)
gaattttccagcctctctggatgagaacaatcaatctcctgcctccaccggacccccaacatcccccatccatgccaaagctgaggccatgacccaagttgagaaaagagaatctgccct

SEQ ID NO: 948533 - DNA, 120 bp, Artificial Sequence
  ENSG00000272068_18 (sequence is synthesized)
ccacgctcctgcatcctgagttccccccatctccagtgttagccttgggccttcctcactggattctattccacagtggccactgggagagcctgtcctgccaacctccttgaacacctg

SEQ ID NO: 948534 - DNA, 120 bp, Artificial Sequence
  ENSG00000272068_19 (sequence is synthesized)
ccccctttctcccagacttggagtgggggcctaggcagctgagttcctctccgaggccctgcacgggcatctgggtcttgtgccataggcatgtgggagtagggctgaagagggggatgt

SEQ ID NO: 948535 - DNA, 120 bp, Artificial Sequence
  ENSG00000272068_20 (sequence is synthesized)
ggctctgaatgctggcacagctgtgttcagagaatgggggctttgatagcttctgaaagaggccaggaagcacgggaccccagcccaggcaggagggggtggggggcagaaatggctgag

SEQ ID NO: 948536 - DNA, 120 bp, Artificial Sequence
  ENSG00000272068_21 (sequence is synthesized)
tgtggctctgagggctcttgctgccgcagacagggagtgtggagtgggaggggatgtggagcagtagggagacagcaatggggactacaggctgaacagcatcatcagagagcccccctg

SEQ ID NO: 948537 - DNA, 120 bp, Artificial Sequence
  ENSG00000272068_22 (sequence is synthesized)
ctgcaccagcaggagccagcgtccccatgagctggtcagaccgcgctttgagggttgcaaacccatgtgttcagaggagaccatcagcttgttgcacaaagaacagcgggaggaactgga

SEQ ID NO: 948538 - DNA, 120 bp, Artificial Sequence
  ENSG00000272068_23 (sequence is synthesized)
gggctggagcccgagtacatctgaatttacctcttgaggtcccaccagaaggctgcctgtagtgcctctcccagcctcctatggggaaggaccactcatttgtctgtgatgttggggcag

SEQ ID NO: 948539 - DNA, 120 bp, Artificial Sequence
  ENSG00000272068_24 (sequence is synthesized)
gtactaatctccctgtgcttcagtttcttcacctgtaaaatggtaataaccccttgttgtatggttttgatgttggagccatgtaaatattttatataattaaaatacgaaattaattag

SEQ ID NO: 948540 - DNA, 120 bp, Artificial Sequence
  ENSG00000236188_0 (sequence is synthesized)
gattcctgcccctcagcagctgggtggctgaagggagctcaggaagctcagggcaaatcagcctcactaatttggagacgccttaccgtagaagttggtcctcctctctccagagcccgc

SEQ ID NO: 948541 - DNA, 120 bp, Artificial Sequence
  ENSG00000236188_1 (sequence is synthesized)
cataaagctgggcttttgtggtgagaagaagaaaatgagccatcctcatcccatctcctccaacatctatgccatgtgaggctccagaacggctctactttccgacctggctgcactgca

SEQ ID NO: 948542 - DNA, 120 bp, Artificial Sequence
  ENSG00000236188_2 (sequence is synthesized)
cccctacctcttgccctccagagctggtaaggccccttttccacgtatcgctgggactcttctcaccctacgcagttctccttagaccaaggcactggaaggcttggcatcaaatggaaa

SEQ ID NO: 948543 - DNA, 120 bp, Artificial Sequence
  ENSG00000236188_3 (sequence is synthesized)
actccattcagaagacactacagttgcattctcttgcaagaacttaaacctcccttttcatacatagaaaaagggaatcaaggtaaaaaataataaaaaagaaaaatatagataataaaa

SEQ ID NO: 948544 - DNA, 120 bp, Artificial Sequence
  ENSG00000264254_0 (sequence is synthesized)
aagcatgcataggagtttcacatggctagatgcaatgaacctggagattttcccaagaatgagcctttcaatcatagagagactgaaagactgagactgcatttatttcagaaagtgatt

SEQ ID NO: 948545 - DNA, 120 bp, Artificial Sequence
  ENSG00000264254_1 (sequence is synthesized)
aatcctagtgatggcaatttcttcttgcaacaaagaaagacagtgacaccaaaggagaaatattcaaagtgggatgaaaggggttgacattagaaaagacttcatggtgattggaaaaaa

SEQ ID NO: 948546 - DNA, 120 bp, Artificial Sequence
  ENSG00000264254_2 (sequence is synthesized)
atggaaaaagattttgaaagcactccatcacagggcacactacaatcacaaacttcatgccttacacagtttcctttcctgtcatactaactgtgcttcttcaacatctcctgggaacca

SEQ ID NO: 948547 - DNA, 120 bp, Artificial Sequence
  ENSG00000234961_0 (sequence is synthesized)
agggttggtactcacggttcctttaagggcatccacttcacaggtgagggactgcacctgtctccggtactcagtggactcctgctttgcctggcgcagggcgtcattgttccggttggc

SEQ ID NO: 948548 - DNA, 120 bp, Artificial Sequence
  ENSG00000234961_1 (sequence is synthesized)
agcctcagagaggttcttggcagccacactttcatattgctgacgtacgtcacgcagggcagccgtgaggtcaggcttggaaacatccacatcgatttggacatgctgttcctgaatctg

SEQ ID NO: 948549 - DNA, 120 bp, Artificial Sequence
  ENSG00000234961_2 (sequence is synthesized)
acctcttcgtggagtttcttcaaaaaggcaatctcttcttgcaaagattccactttgcgttcaaggtcaagacgtgccagagacgcattgtcaacatcctattttgaacagagaaaagac

SEQ ID NO: 948550 - DNA, 120 bp, Artificial Sequence
  ENSG00000234961_3 (sequence is synthesized)
aggacatggaggatgtaaaagtgtatggcttatctcatttatttgtcttagattaaccatctgaacctagtctccttactatagaaaagccgttgacacattttatgaccctggaatagg

SEQ ID NO: 948551 - DNA, 120 bp, Artificial Sequence
  ENSG00000234961_4 (sequence is synthesized)
tttataaatcattcagtgctataatatgctgtgctttctcctgctcactaatatattttaattgtgactgcttgtgttttactcaaggtggtgatcagacaattttaaaataaataaatg

SEQ ID NO: 948552 - DNA, 120 bp, Artificial Sequence
  ENSG00000234962_0 (sequence is synthesized)
gacacaggcaaagtgcctgtaaataaaccctgagtgggcaacatgaatggccgcagaccagacaaaatgagaatccagttaaacaagtgcatgaaatatgccccttagtccactcagcct

SEQ ID NO: 948553 - DNA, 120 bp, Artificial Sequence
  ENSG00000234962_1 (sequence is synthesized)
gcaacacaaaagcacagaacaggcagcttctaaaccacagacattgacttccgttctggaggccggaagtccaagatggagggtcccgcagattccgtgtctgaaacattggcaaaatca

SEQ ID NO: 948554 - DNA, 120 bp, Artificial Sequence
  ENSG00000234962_2 (sequence is synthesized)
tcttcattgttcatagattgttgcagcagatccaactgaaggatacaccaaccattttaatcggacacaaaagaacaggctgtcctcacctgaccaccacccacaacaaccgaactttaa

SEQ ID NO: 948555 - DNA, 120 bp, Artificial Sequence
  ENSG00000234962_3 (sequence is synthesized)
acttctctaccatgttgtggcaaagatcatctcctgcgttttccaatagcatgttcctatttccgtctgagccctccccagaatcacctttaacatccatatgtctaccaactgtatctt

SEQ ID NO: 948556 - DNA, 120 bp, Artificial Sequence
  ENSG00000234962_4 (sequence is synthesized)
cagaacaattgagtcttcttctgacataaatgttaaaactctctctgcctctaaccgttacccagttccaaagccaccccggcattgtcagatttacaatcggaagcctctgctggtgaa

SEQ ID NO: 948557 - DNA, 120 bp, Artificial Sequence
  ENSG00000234962_5 (sequence is synthesized)
aatatggaagtcaatactgaatgtccctttctttgccataaaactgccatcacacagaagagagaacttaccaagcaataccaacacattcattctccaataaaattattaatttcttca

SEQ ID NO: 948558 - DNA, 120 bp, Artificial Sequence
  ENSG00000234962_6 (sequence is synthesized)
ggcagggtgagtccatttagagtctcgagaatttcagacgtgcattcactttaaagcagggctcaggaccatgaccccaggctgaggactgagggtaaagtgccacttgccacatggggc

SEQ ID NO: 948559 - DNA, 120 bp, Artificial Sequence
  ENSG00000234962_7 (sequence is synthesized)
ctccgggggaagtcgggaagaaacctgcacaaggatgagaccgtcccccagcaggactccaggactccatccccagggccatggccaccccagggccatgcatgcccagaaacaccctcc

SEQ ID NO: 948560 - DNA, 120 bp, Artificial Sequence
  ENSG00000234962_8 (sequence is synthesized)
attccctgcaggcaggaacagcaggtgcagctcctctgcctgccagctttgggacctctaggactgaccgcttcctgtctggacaccagtcctgtaatgctctcatccttgctgtctgag

SEQ ID NO: 948561 - DNA, 120 bp, Artificial Sequence
  ENSG00000234962_9 (sequence is synthesized)
ctcgagaatttcagacgtgcattcactttaaagagtgcaccagaagtgtgatttgaagaggacaaatggttttctagctccagagtggttaaaatataatctgggtaagtaaggagaaat

SEQ ID NO: 948562 - DNA, 120 bp, Artificial Sequence
  ENSG00000234962_10 (sequence is synthesized)
ggaagtgcctaacgaatccaacgtgtgagaaaagctggtgaagacaattcatgggggatttgatgctctgtgtaaaacagagaaggaagaaagccatttagttgtgaaggaggcccttcg

SEQ ID NO: 948563 - DNA, 120 bp, Artificial Sequence
  ENSG00000234962_11 (sequence is synthesized)
caaataccagcaaaggcagcccaggacagggacgctggccaacctctgctagaatcacgttgctgctagataatgcaatgcacaaataaagtaacagatccaataatgcaaattttaaaa

SEQ ID NO: 948564 - DNA, 120 bp, Artificial Sequence
  ENSG00000234962_12 (sequence is synthesized)
gagaatttcagacgtgcattcactttaaagtgatttgggagattattttgatagaagtttccagtgaaggaaataatatgtatttttttctaacatgacttgtgtgtgcatgagcaggac

SEQ ID NO: 948565 - DNA, 120 bp, Artificial Sequence
  ENSG00000234962_13 (sequence is synthesized)
aatgtgcttccctaggtgaggagaaagagtagagccaacagtagttatctactctgcctctgagcacaccttggaaataaaccacccatgagaagaagtcccccttctgatgtggggggt

SEQ ID NO: 948566 - DNA, 120 bp, Artificial Sequence
  ENSG00000234962_14 (sequence is synthesized)
ttggaagagacgcagggacagtgttcacagtggatggagagaagtaactgcactacgcagtggatggggcaaagtaactgcacccgccgggaaggaaggaactgctgtggacatgttctt

SEQ ID NO: 948567 - DNA, 120 bp, Artificial Sequence
  ENSG00000234962_15 (sequence is synthesized)
cctgttgggatgagccaccgccaacttgaacattcatcgtctatggtgaaagtagacattaatcatcaataacttgccaagttctccctccaaatatattccagaccccagttgccataa

SEQ ID NO: 948568 - DNA, 120 bp, Artificial Sequence
  ENSG00000234962_16 (sequence is synthesized)
acaccttgtggcctccttcctacacacaatgagaatcctgtatcttgttccacgtttagccttggccacctacagacacagaagcacactgttagttcaaatttattgtctgtgggccaa

SEQ ID NO: 948569 - DNA, 120 bp, Artificial Sequence
  ENSG00000234962_17 (sequence is synthesized)
ggcaccatgcacataattaaatcagttttttaatactttaaaatcaaaaggtaagatatttcagacactcggttatgaaatagactttcttagaaaaaggacataattctcttgaaatct

SEQ ID NO: 948570 - DNA, 120 bp, Artificial Sequence
  ENSG00000234962_18 (sequence is synthesized)
tgttagacaaacagttaattttttaaaatcatatccccaccttgcattggattttatctttctcatttcctcattaaaaacctccacattttgttaataataccagaaagtcactactaa

SEQ ID NO: 948571 - DNA, 120 bp, Artificial Sequence
  ENSG00000234962_19 (sequence is synthesized)
tcaattcccagaaatctccagtgagatttgcctgtttctactcaacttctgaattctgcaatgcccaggctgtctctctagagagtctgacctgggctttcctggccttacgcaagtgat

SEQ ID NO: 948572 - DNA, 120 bp, Artificial Sequence
  ENSG00000234962_20 (sequence is synthesized)
ggagctcatgactccagccattaaccccttccctggactcctgtctgatttcttccactttatcttgttcaaaggatgcagtaggcaaagaggctaaaatggacactttgtaacagacac

SEQ ID NO: 948573 - DNA, 120 bp, Artificial Sequence
  ENSG00000234962_21 (sequence is synthesized)
actggaattccagtgactgtcctgctccttccctcttcagccctcttgagaaacttagttaacctctttaaaaaactaatttcctcaagtggcaaaataggatgatgatagtgacagaca

SEQ ID NO: 948574 - DNA, 120 bp, Artificial Sequence
  ENSG00000234962_22 (sequence is synthesized)
catagatatttccttctgagtttatttcttcctcttgtttcctaagtgtggattttccttaagattcagtttgatccttcctgaacctacctttcagaaccttctggagagctttgtaaa

SEQ ID NO: 948575 - DNA, 120 bp, Artificial Sequence
  ENSG00000234962_23 (sequence is synthesized)
agcaagcatcttggggttttcagcccattactgaatcagaatccctccagatggggctgagatccatgtttgaaacccgttgctttagctgacgttgtgccctattcatccttcccgtcc

SEQ ID NO: 948576 - DNA, 120 bp, Artificial Sequence
  ENSG00000234962_24 (sequence is synthesized)
cagggctgtgaccgctacctccatggtgtggctctgcacattgggggtcccacatactgggggtcccgctctctctgcccctgaaccaaatgcatcctcaggtcacacagaccctgcctg

SEQ ID NO: 948577 - DNA, 120 bp, Artificial Sequence
  ENSG00000234962_25 (sequence is synthesized)
tctgcagactattagcacatattttccttttctgtcacattttatgtcaatttgtttagcataatataattctatgcaatgtaatcttccaagcatcctgaaataaaaccatgcctccca

SEQ ID NO: 948578 - DNA, 120 bp, Artificial Sequence
  ENSG00000234962_26 (sequence is synthesized)
aatggagatgcagagaaagaaggaacattcgctgggtggaggcaccttaagagaggtttcgtgaattctttcttgaggtagagaagcgctgtggggagaaagcatgcactcaccagtgcg

SEQ ID NO: 948579 - DNA, 120 bp, Artificial Sequence
  ENSG00000234962_27 (sequence is synthesized)
ccgagcagaacctcacctgaatatgtaaaacagtgaagaaggagagttttgaacagggctattgaagcgtgagttaggtggatctgagagactgatgactggaccttactggaaatgccg

SEQ ID NO: 948580 - DNA, 120 bp, Artificial Sequence
  ENSG00000234962_28 (sequence is synthesized)
ctggaagcagggtcaggacggagcccgcaggaaacgcgcctgtgtggatgggctgagtcacgattttcccgcctggcatatatgctcttatatttgctcactggtttagagtgagtctat

SEQ ID NO: 948581 - DNA, 120 bp, Artificial Sequence
  ENSG00000234962_29 (sequence is synthesized)
ttgtaacaacaacaacaacaaaaataaaacacttcaaataaacaggactcctttatttatgaaggacagctctttatttacgaaggacagctttactcagaacatcttgaatgataaaat

SEQ ID NO: 948582 - DNA, 120 bp, Artificial Sequence
  ENSG00000234962_30 (sequence is synthesized)
ccacaggcagtatgatttcgtttggtagttaatgctattttcttttacaacaaaatagcttgccggactttctgaacagcatggtgtaagaggtaagaggcattttgtctctgcctctcg

SEQ ID NO: 948583 - DNA, 120 bp, Artificial Sequence
  ENSG00000234962_31 (sequence is synthesized)
cgagaatttcagacgtgcattcactttaaagagtcttgctgtgtcaccaggctgatctcggctcaccacaacctccgccgcccaagttcaagtaattctccagcctcagcctccccagta

SEQ ID NO: 948584 - DNA, 120 bp, Artificial Sequence
  ENSG00000234962_32 (sequence is synthesized)
gagccaccgtgcctggccctggtttcctttttcttagcaatcttttcttcaatatactttttccaactctcacattttactatgagcagcaagaagaaaccaggctcttccttcaacatt

SEQ ID NO: 948585 - DNA, 120 bp, Artificial Sequence
  ENSG00000234962_33 (sequence is synthesized)
acaggaacacacaccaggggacttaaagccaaagaaacccactgtcgtagagttgtgaggtctagaagtccaaaatcagagtgttgtcagggccaacctacacctcgtgctgtaaagggg

SEQ ID NO: 948586 - DNA, 120 bp, Artificial Sequence
  ENSG00000234962_34 (sequence is synthesized)
gccctcccttgcctcttcctcctcctggtcaccccaggcattactcaccctgttgacgggtcctaatctctgcctctgacttcacgtggattcttcctgtgtgtgcatctgtctccaaat

SEQ ID NO: 948587 - DNA, 120 bp, Artificial Sequence
  ENSG00000234962_35 (sequence is synthesized)
gtccccatttcataagggcacttctttaggcatttcattaaggctcaccctagtgatttcactttgaattgtttgcttaagatcacattttgaggtagtgggggttaggctttctacata

SEQ ID NO: 948588 - DNA, 120 bp, Artificial Sequence
  ENSG00000234962_36 (sequence is synthesized)
tctgttttagataaaaattccaaattcagacaaaattcaacctatgacaaagtcatgctattgctattacatactcgacctataacgaagttacactattaactcactactacatactca

SEQ ID NO: 948589 - DNA, 120 bp, Artificial Sequence
  ENSG00000234962_37 (sequence is synthesized)
gtataacaaactcactctaatactcactactacatactcagtataacaaagtcatggtaatactcactactacatacttggtataacaaagtcacgctaatactaactactacatactcg

SEQ ID NO: 948590 - DNA, 120 bp, Artificial Sequence
  ENSG00000234962_38 (sequence is synthesized)
gtacaaagtcatgctaatactcactactacatacttgacctatgacaaagtcacactattaccactgcccaaccaacctataacgcagtcacactattactcactgctacacactcgacc

SEQ ID NO: 948591 - DNA, 120 bp, Artificial Sequence
  ENSG00000258308_0 (sequence is synthesized)
gtcccttttcccctctgtgtctctatttcaccatgtagggacacagcattcatcccatttggaggaagcagtgttcaaggcaccatcctggaagcagagactgggccatcaccaggcacc

SEQ ID NO: 948592 - DNA, 120 bp, Artificial Sequence
  ENSG00000258308_1 (sequence is synthesized)
aaaccagctggcaccttggtcttagacttcccaacccccagaacttgcctcttcttgcccatggaaggacatgcagcttcttactcctctgctgcccaacacagtttactggctggccac

SEQ ID NO: 948593 - DNA, 120 bp, Artificial Sequence
  ENSG00000258308_2 (sequence is synthesized)
tccatggctaggatccttcacactacctgagacctgatgtctctggctccaaaggacgcagctctgctcatcccccagtgaggcctgtcatgagttgctgtggctgtggaagcctgccat

SEQ ID NO: 948594 - DNA, 120 bp, Artificial Sequence
  ENSG00000258308_3 (sequence is synthesized)
cctgggatggagacttttcccaccaccctgtccctttaatttcagcaggcacatcatcccgcctcatgtggatccccagagcagcagatctggaatctcctgtgatgctgaggccttcag

SEQ ID NO: 948595 - DNA, 120 bp, Artificial Sequence
  ENSG00000258308_4 (sequence is synthesized)
acgtggctgccctgaggtttgggctgaaacaacatgaccgtcataccttcccagagtcctcccaagaatggtctctaggttctccttcgcacagtggggtacgatgggctactctgccca

SEQ ID NO: 948596 - DNA, 120 bp, Artificial Sequence
  ENSG00000258308_5 (sequence is synthesized)
atctgtgtactctccttgggctactctgcccaaactgtgatttggggcatatagctatgccttctctggttcctctgtaccaaggtctctccagtggctacctcttctactcagcaggac

SEQ ID NO: 948597 - DNA, 120 bp, Artificial Sequence
  ENSG00000258308_6 (sequence is synthesized)
agagaagctctcttggtttttattcttaggatccaggttcagaaaacaaataaacaaacaaacaaacaaaaaacctcatggtagctaatctgccccctcccttctctatgaaatgggcag

SEQ ID NO: 948598 - DNA, 120 bp, Artificial Sequence
  ENSG00000258308_7 (sequence is synthesized)
gcagagaaaatccccctggccctgcctagcccatccattcctaagggaccttcccatagccagattgcaagaggagagcaaatttaaatgaaataaatatgaatttcctcctaacaataa

SEQ ID NO: 948599 - DNA, 120 bp, Artificial Sequence
  ENSG00000258308_8 (sequence is synthesized)
agcggggtgccatggctcacacttgtaatcccaaaactttgggaggcccagaatattgctgctgccaaccactgatttaggaatgtttagaggtatatgccaactcaataatcaaaatca

SEQ ID NO: 948600 - DNA, 120 bp, Artificial Sequence
  ENSG00000258308_9 (sequence is synthesized)
ttttggtactgggaacccaaccacagtctctgtagaccagtggaatttattgcttgctccagtttattaagtaagagtaccaacagcattttgaataaaaaagagtctgataagatgtga

SEQ ID NO: 948601 - DNA, 120 bp, Artificial Sequence
  ENSG00000234967_0 (sequence is synthesized)
gtgatgcaaagttcacatgtctgagcacacataagggactctgtgaatatgtgtgtatttgttgtgtgcatgcccgcagaatgggatacagagactcactctattcatcagggatttgtt

SEQ ID NO: 948602 - DNA, 120 bp, Artificial Sequence
  ENSG00000234967_1 (sequence is synthesized)
ttaatcaggaattggcaggcatgggaagagcacgctgtccagggtcggcaaggcctggaaatgtcagagcatcagaatactgaaaataaaagacatggtcagtactcatacatagacatg

SEQ ID NO: 948603 - DNA, 120 bp, Artificial Sequence
  ENSG00000234967_2 (sequence is synthesized)
acacacacatatacacacatacgcagactcacacatgtcaacagctgaatgaaaaatgtctttcattcctggaagcaggagtcatatcactttctccaaagcatgtctttttctatgcaa

SEQ ID NO: 948604 - DNA, 120 bp, Artificial Sequence
  ENSG00000234967_3 (sequence is synthesized)
tggtgtgctttaggtgcaagaacactcgagaagcggcaaagataaagttaaacaaatccaagtgttataattctgcattatgcatatgttttgacttttcatcttttattcagagagtaa

SEQ ID NO: 948605 - DNA, 120 bp, Artificial Sequence
  ENSG00000234967_4 (sequence is synthesized)
gataaccaaatagagtaaaggaagcccagccaaccagctcagtttcatgtgggcagaaccagcaggaaattgaaaggggagagaagccccttgccaaagccgcctccacttgcactggga

SEQ ID NO: 948606 - DNA, 120 bp, Artificial Sequence
  ENSG00000234967_5 (sequence is synthesized)
agcccaccacaggccaccacctgggctgggagatttgtcagcaggcgttggcctgtgacagtcacacttcctgctcctcagtctgagatgccccaaccagatggcggaggcccgatgggg

SEQ ID NO: 948607 - DNA, 120 bp, Artificial Sequence
  ENSG00000234967_6 (sequence is synthesized)
aaggagcagcctccacggaggcccgcctggttttccagccttggacttgcagccgggacatgagggctccctcctactctcccacccctcctgctggtgaagcaagcccctcctactcag

SEQ ID NO: 948608 - DNA, 120 bp, Artificial Sequence
  ENSG00000234967_7 (sequence is synthesized)
cctggactcactgaccttccttctgtgccacaaacagccaggttcattcccaacccagggaccctgtgtgactgaccattctcctcctggatgctgtccccagccctgtgcatggctgcc

SEQ ID NO: 948609 - DNA, 120 bp, Artificial Sequence
  ENSG00000234967_8 (sequence is synthesized)
ccttctcacctttcagggctctgccaggtgccacctcctgggtgagcacttccctggccaccctgtccccaggagccctctccaccaaggcacttcctagcatctcaccccatttcctct

SEQ ID NO: 948610 - DNA, 120 bp, Artificial Sequence
  ENSG00000234967_9 (sequence is synthesized)
tctcaagatccctcatcaccatctgaaatgaatttgagcatgtgttgacttggggaacatatctccccctccttacctgtgtgtgagctccaaggaaaatcagtgtccgacctgacttac

SEQ ID NO: 948611 - DNA, 120 bp, Artificial Sequence
  ENSG00000234967_10 (sequence is synthesized)
gaacctgtgtccccagagcctacagcgatacccagcccagaggtgctggctgcacatgatgctgatgactcctagggtgagcctggcatctgagtcctgggttcaagtcctgattcagct

SEQ ID NO: 948612 - DNA, 120 bp, Artificial Sequence
  ENSG00000234967_11 (sequence is synthesized)
gttcccaggcacctgactttgggagagatgcctcctctctgggtcaagtttttttcctttgtggcatgaacctatattccaatatccatcagtcacgactgctggggctcaaagaccaag

SEQ ID NO: 948613 - DNA, 120 bp, Artificial Sequence
  ENSG00000234967_12 (sequence is synthesized)
gtgacatatgtcaaggtgcttggccaactcagagagttgtgcaaagagaaatgaccacgttaagttgctggcccacgcctgggtagaagtcagggaatgggctaaggaagagcatggtga

SEQ ID NO: 948614 - DNA, 120 bp, Artificial Sequence
  ENSG00000234967_13 (sequence is synthesized)
tggcccgcctggcggaagtctgcagtgtgtgggtgtgtgtgtgcggatgtgtttgtgcatgcgtgttattaatgttgtttaattgccattcaggctccataaatagtagctaattcttcc

SEQ ID NO: 948615 - DNA, 120 bp, Artificial Sequence
  ENSG00000234967_14 (sequence is synthesized)
gatcaatctagaatgtgtggaggagtggacagcagtttttaatcagacaagaccttcaaccccggcacagaccatcaattggcaggttctcctgggacatggacgtggtgcatggggctg

SEQ ID NO: 948616 - DNA, 120 bp, Artificial Sequence
  ENSG00000234967_15 (sequence is synthesized)
cgttcacctgtggtggggacatgtcaactcgttctggggtttcagggctccacttgaacagaaccagttctcgtgacactgtaggcagaagagagcagcacatgtcacatggggctgggg

SEQ ID NO: 948617 - DNA, 120 bp, Artificial Sequence
  ENSG00000234967_16 (sequence is synthesized)
ctgaggtcttctgaacaccctgaaggggcatctctgggtttcacctacctggatagtttctctctgttttcctagttcttagcgggcttcccttgtgggaaacaaccttcctccactatg

SEQ ID NO: 948618 - DNA, 120 bp, Artificial Sequence
  ENSG00000234967_17 (sequence is synthesized)
gcaagtgacccagacccagccaatcaaacatactctgtgatggcatcaggaggtgggttcgtgagcccagcttgtctgatctgagtcagtccctggacctctgctggggaattggggaag

SEQ ID NO: 948619 - DNA, 120 bp, Artificial Sequence
  ENSG00000234967_18 (sequence is synthesized)
aggcttctcttttctactgaccttgctgggctgatgggaggatcaggatctgctggggcatctttgccacctcatgagaactgtgtgacccagaagggagcccacccaggaggacgccag

SEQ ID NO: 948620 - DNA, 120 bp, Artificial Sequence
  ENSG00000234967_19 (sequence is synthesized)
cctgagaaatggaagagaacccttcctgatgatgtcattttgcaccaagatccagctgtgcctgtagtcaaatactgccgggacattaagtttctggagtgaagatattcatgttttcac

SEQ ID NO: 948621 - DNA, 120 bp, Artificial Sequence
  ENSG00000258302_0 (sequence is synthesized)
gcaaacctttcattggagaacagtcttcccccacaccatcccatagaaatactgttcactatatctggttcaggaggactgactctcccaactcctttctccaggagtggatacatgatc

SEQ ID NO: 948622 - DNA, 120 bp, Artificial Sequence
  ENSG00000258302_1 (sequence is synthesized)
caggactggccagaattctacatcaagcagcccgtaggcacggaggagaatacaaattagaggatcagccagcaaacttgatgggtgatgagaactgttcaagacaaccctgaagatgtt

SEQ ID NO: 948623 - DNA, 120 bp, Artificial Sequence
  ENSG00000258302_2 (sequence is synthesized)
gcttatttgataaggttgctggtgctgctgctactgaagatagaacaacagttaagctttctgtgtatgtgtgtgttttccatctgtttttctttgtaatcagtcggtataaaagtgagc

SEQ ID NO: 948624 - DNA, 120 bp, Artificial Sequence
  ENSG00000258302_3 (sequence is synthesized)
agtgaagaatcggggggaaataaatgtactttttaaacatgttaaatttggaaaatatctagagctcagaagaaaagtgtaaacttaagttagagatttgagagttagtgaagctctaag

SEQ ID NO: 948625 - DNA, 120 bp, Artificial Sequence
  ENSG00000258302_4 (sequence is synthesized)
aggggcagagtgtaaaggtgagggcaacaagtatatgtgcacacacaatcacacacatacaccggtggcaggcaaagaaagattaaatcccttcttagcaaaacttcaattctgagaaga

SEQ ID NO: 948626 - DNA, 120 bp, Artificial Sequence
  ENSG00000258302_5 (sequence is synthesized)
tttttcctatctgaatttgttgaacaatattagagattttttttttctaaccacttcataaataataaaactgagcaacagagaggatgggtggctgacttgttaaggaactcctaatta

SEQ ID NO: 948627 - DNA, 120 bp, Artificial Sequence
  ENSG00000258302_6 (sequence is synthesized)
gtgctaaagagtcttaaaacctaggtttctgggctcccaattccaggttccttggaagtcaagagaagacaaaaacatacgatcatttactttatccctaacttcacttgaataaaacat

SEQ ID NO: 948628 - DNA, 120 bp, Artificial Sequence
  ENSG00000258302_7 (sequence is synthesized)
ctgacacatctatttaagccatatgtctggttagtttcagcacgttactaggccagttcagcaatgctcgaaagcaattcaattttcaaagaacagttctcgagatacatacaataaagc

SEQ ID NO: 948629 - DNA, 120 bp, Artificial Sequence
  ENSG00000258302_8 (sequence is synthesized)
tcagattaaccaggaatcatcgaaccagagttgttttactttctacttataaagaacataagaaagcactcttgatctaaggcatgacactgagctggctcacacctgctctgatcttta

SEQ ID NO: 948630 - DNA, 120 bp, Artificial Sequence
  ENSG00000258302_9 (sequence is synthesized)
ttactttctgtatgtaaaattctcacagtacagtaactgtgaggaaaataataattttgtgcacaatactttaggtaggaaggaaactatattaataataattcaatttaagtagaaata

SEQ ID NO: 948631 - DNA, 120 bp, Artificial Sequence
  ENSG00000258302_10 (sequence is synthesized)
taagtaaacttaattacaggcttttgaaaatccaagcctatttattttatccagttttaaaattcaattcctatttattaactatttaaacctactctgtggagcatacttatacccctc

SEQ ID NO: 948632 - DNA, 120 bp, Artificial Sequence
  ENSG00000258302_11 (sequence is synthesized)
gaaattatcagaattaagaaaaattcagtaattcctgtgtcaaaaatattctgtaaaagtaaactgttcaacagagaaaaaaaaaaacaaaaatactgcatgaagcacatatggtaaaca

SEQ ID NO: 948633 - DNA, 120 bp, Artificial Sequence
  ENSG00000258302_12 (sequence is synthesized)
aaaaaactgaagtgattatcataatcatgaattttaagaaactgaaaatgattatcaaggtaaacaatatatgaaatataacaaatccaaacaagatcatgtacctacaaaaccaatttt

SEQ ID NO: 948634 - DNA, 120 bp, Artificial Sequence
  ENSG00000258302_13 (sequence is synthesized)
tctaaataccatcctaacttttaatagcagaaaataacattgtttactgcctaaaacattgtacagaagagagagctctaaaatactaatcacaagccaataaatcttaccttctacaac

SEQ ID NO: 948635 - DNA, 120 bp, Artificial Sequence
  ENSG00000258303_0 (sequence is synthesized)
ccactctgctgaaattagaggagaaaaaaatagggagtctcgctgtgtcgcgcagactggagtgcagtggtgcgatctgcacactgcaacctccacctcctgagatcaagcaattctcct

SEQ ID NO: 948636 - DNA, 73 bp, Artificial Sequence
  ENSG00000258303_1 (sequence is synthesized)
acactgcaacctccacctcctgagatcaagcaattctcctgcctcaacctcacgggtagctgggattacagac

SEQ ID NO: 948637 - DNA, 120 bp, Artificial Sequence
  ENSG00000258303_2 (sequence is synthesized)
gggattacaggcatgagccaccgggcggtttccatgtgtgatctttaaaaggcagaaacaaataagcaaaaatcattactaaaggcccacgagggttgtttctatcttagaaaatgtgta

SEQ ID NO: 948638 - DNA, 120 bp, Artificial Sequence
  ENSG00000258303_3 (sequence is synthesized)
tggtttgatttaatgagaagtcaaaaatcataagatctgttgaaaataacaaaatcacttctaaaaaagataatatgttttattgaaataaagccttagaagtcatctggttttaccttt

SEQ ID NO: 948639 - DNA, 120 bp, Artificial Sequence
  ENSG00000258303_4 (sequence is synthesized)
tacaaagaagaaagcagtctaagagaggccaaatgacttatcccaagctatacggctaggtagtagcagattcaaatttatactacccaggcttcctaattcttagcccagagctgtgtc

SEQ ID NO: 948640 - DNA, 120 bp, Artificial Sequence
  ENSG00000258303_5 (sequence is synthesized)
caccctaccacccaccttttaattcagtgcgagctcaattattgctaacagttttattgttgaccttccatggactcgatagtcaaatcaagtcttccattacaataaatgggatttatt

SEQ ID NO: 948641 - DNA, 120 bp, Artificial Sequence
  ENSG00000253274_0 (sequence is synthesized)
atggagtggacttggaggatcctaattttggtggtcgtagctgcaggtgcccagtcccaggtgcagctggtgcagtctggggatgagatgaagaaggctggggcatcagtgaaagtctcc

SEQ ID NO: 948642 - DNA, 120 bp, Artificial Sequence
  ENSG00000253274_1 (sequence is synthesized)
ctacgcagagaagttccagggcagagtcaccatgaccagggacacatccacgagcacagcctacatggagctgagcagcctgagatctgaagacacggccatgtattactgtgggagaga

SEQ ID NO: 948643 - DNA, 120 bp, Artificial Sequence
  ENSG00000233605_0 (sequence is synthesized)
caagtattcagcccaagtttattaccacagtggactcgggttataattaccaacagaggagagaataactataagttattttgatgtaaaaagcatattatcctaagccaacataataac

SEQ ID NO: 948644 - DNA, 120 bp, Artificial Sequence
  ENSG00000233605_1 (sequence is synthesized)
acagtttttatgaagcacaataattactttgaagactcacagaagtgcatttttctaaaagaaggagaaacagattaacagaaacagaaacagcaacactagagaacagcaaaatagtaa

SEQ ID NO: 948645 - DNA, 120 bp, Artificial Sequence
  ENSG00000233605_2 (sequence is synthesized)
ggtggtatccacttactgtctactgcctccataactcctaaagtcttctgaagatttattaatgctttgaatatatgagccaccgtttcttttcacagccttttcacaactgggaattct

SEQ ID NO: 948646 - DNA, 120 bp, Artificial Sequence
  ENSG00000233605_3 (sequence is synthesized)
ttagagaaaggcaatcttacctcatttacttacttcatcagtaatgccattactatgcctacctaagaagaaaatatatcatgtggcagaggactagaaagaaaaaacaacaacaaaagg

SEQ ID NO: 948647 - DNA, 120 bp, Artificial Sequence
  ENSG00000233605_4 (sequence is synthesized)
ctgtgaagatttgatcatatgcctacgtgtgtggtgaatacaatatttctttaatcgcaatcaggaatataaatcttattttgatgctatgacataataaagtgcattattttcctgaaa

SEQ ID NO: 948648 - DNA, 120 bp, Artificial Sequence
  ENSG00000236230_0 (sequence is synthesized)
ctggcgctgtggaggttccaatggccgccatgttgtctcagagggacacaccacaggcttctggaactctggctccattttgtgggtgcaagtttctggcttccgttttaaagagcaaga

SEQ ID NO: 948649 - DNA, 120 bp, Artificial Sequence
  ENSG00000236230_1 (sequence is synthesized)
gaacctatcagcgttgtcaattctaagaaagtgagtgccaagagcaggctgtacaagaagcatggcacaagaatctgcttctgaagagggcttcaggaagcttccactcatggtggaaaa

SEQ ID NO: 948650 - DNA, 120 bp, Artificial Sequence
  ENSG00000236230_2 (sequence is synthesized)
gagacaccaggctgcatgttagaaacggctgtgctccggaaggctaccagggtcatcgtgagggccttgcagatttcagaaatgaagtgacctgccttgagtcttccctcagcctcctca

SEQ ID NO: 948651 - DNA, 120 bp, Artificial Sequence
  ENSG00000236230_3 (sequence is synthesized)
ctccactgtagtctcaggagagtgaggacaacaaaactctcttctccccacattaccacttcagcgctgacctgtggcttgagaatctaatctgtgtgcaccgtggcaaagtcttggttt

SEQ ID NO: 948652 - DNA, 120 bp, Artificial Sequence
  ENSG00000236230_4 (sequence is synthesized)
tacaggtctcacctgacagctagtcctgatttttccatgatgtgtgggtaaaaagtgggttcttgaagggaaacctcaatgtagcttagctcttgagaaaacagtatgtgcatatgcttc

SEQ ID NO: 948653 - DNA, 120 bp, Artificial Sequence
  ENSG00000236230_5 (sequence is synthesized)
gagcatgtcatgctgagaatgcacatagagaaagctatgagagatctcacttcaagcacattatctatgaaagtgcatcaacactcaaacttccttagcacctctatccccttttgatct

SEQ ID NO: 948654 - DNA, 120 bp, Artificial Sequence
  ENSG00000236230_6 (sequence is synthesized)
ttgggtgatggtaaaatggtgtccaagcaagagaacctatcagcgttgtcaattctaagaaagtgagtgccaagagcagatcgtatcgtcaatgaggctcaagacatccattccaagtct

SEQ ID NO: 948655 - DNA, 120 bp, Artificial Sequence
  ENSG00000236230_7 (sequence is synthesized)
tcaaactctattataaaatctggcacaaagtgaatgttcaataattgcaaatgaatgatagtcatcagtgtggttttggggtccaagcctcagagatcatgcccagggaaatccaggacc

SEQ ID NO: 948656 - DNA, 120 bp, Artificial Sequence
  ENSG00000236230_8 (sequence is synthesized)
actgggaaaaggattcacacatttaattgtgttggctttttgcacctctgtctgttctacacctactgtctgccagatactggatggttgaagtggagcataaagatggaaggttcctat

SEQ ID NO: 948657 - DNA, 120 bp, Artificial Sequence
  ENSG00000236230_9 (sequence is synthesized)
cctaagatagaaggccaatacacatagaccaacattttgagtctgggaagtccaaggtcaaggtgctggcagatttggtgtccgatgagggcctgtttcctttgcagatggacctcttct

SEQ ID NO: 948658 - DNA, 120 bp, Artificial Sequence
  ENSG00000236230_10 (sequence is synthesized)
caagttctagatgctgggaagtccaagagcatggtggcagcatctggtgaggatcttcttgctgcagcatctcatggaagaaggctgaagggcaagagtgtgcttttgttccactccata

SEQ ID NO: 948659 - DNA, 120 bp, Artificial Sequence
  ENSG00000236230_11 (sequence is synthesized)
gcttagctcttgagaaaacagtatgtgcatatgcttcttggatagaaaaagaaaaaggaatgagagaggaaaacgaagtcttatagaaaaacctggccggatgcggtggctcacacctgt

SEQ ID NO: 948660 - DNA, 120 bp, Artificial Sequence
  ENSG00000236231_0 (sequence is synthesized)
acttttttcatagcaaaattcctgcaaggctgctactgctttatggaaaaggttcagaaccatacctggaaggttatccaaagactccaaagaggaaataatcaatctatttttataagt

SEQ ID NO: 948661 - DNA, 120 bp, Artificial Sequence
  ENSG00000236231_1 (sequence is synthesized)
cttccaacccaactttgtctacttaagaaaaatcagtctcactccaaatgagatttattgaaatgttcctaaaatgcctcctatttacctatcacaagtgaaacattattcaaaatgtgg

SEQ ID NO: 948662 - DNA, 120 bp, Artificial Sequence
  ENSG00000236231_2 (sequence is synthesized)
aagtggtttgtggagatgggtcttttcaatttaagcctgcttgtacaatcttcactgggatcgtgtgactgcagaccctggtttcacgagcaactgtttgacatatcttctccagacagc

SEQ ID NO: 948663 - DNA, 120 bp, Artificial Sequence
  ENSG00000236231_3 (sequence is synthesized)
cttccagctgctgtggatacatgtaatgactgattttatttaataagaaagctcaaaatatttcccaattcagaacataaccctgcatgctgctccctctagtctaaccagaaatcccat

SEQ ID NO: 948664 - DNA, 120 bp, Artificial Sequence
  ENSG00000236231_4 (sequence is synthesized)
tctcctcctcctctaactcaataaaccaaatctaattggagaataattataaaatacactgatgtgcaatttgtttcacttgctcaataattaattaatacactacttatgattcagaag

SEQ ID NO: 948665 - DNA, 120 bp, Artificial Sequence
  ENSG00000236231_5 (sequence is synthesized)
agctcttaagacacagcacaaattccactggatgaaggagaataccaaagatataagccaggggcagcatctttacataagatgggccaagagaaaaagataagagggaaaagaagacaa

SEQ ID NO: 948666 - DNA, 120 bp, Artificial Sequence
  ENSG00000236234_0 (sequence is synthesized)
cctggtagcactacatggctcgcagctatggcactggacacacagatctaggacattttcatcatcacagaaagttctattggacagcactgaatagcacgagcccatttttataattaa

SEQ ID NO: 948667 - DNA, 120 bp, Artificial Sequence
  ENSG00000236234_1 (sequence is synthesized)
aaaaaagggtgtacacttataaaagcagcagaaatatttggaaggaaaccatgcccctgctctgaaagaacaggacggtagagcaagaagaaaatgaagcaggctgggactccctgagca

SEQ ID NO: 948668 - DNA, 120 bp, Artificial Sequence
  ENSG00000236234_2 (sequence is synthesized)
agaaaatgaagcaggctgggactccctgagcagcgcagcccctttacagaaaacctgtttgaagaggcatcaaaactgttcatcttggccggaagcggtggctcatgcctgtaatcccag

SEQ ID NO: 948669 - DNA, 120 bp, Artificial Sequence
  ENSG00000236234_3 (sequence is synthesized)
agtgcctggcacatcacagagcctcaataatatttgctgaatgaatgagcagcaccccgccctttaacagtggagagaaaccatcatcgacgaaggatctataccagagctgcaactgcc

SEQ ID NO: 948670 - DNA, 120 bp, Artificial Sequence
  ENSG00000236234_4 (sequence is synthesized)
accagcgacccaagacagagaaatgccaccttgcgttactaaagggctcatgacaccatatacaacagctgaatccccaagaggagtgtggctgaggagtgagacgaaggtctctgggac

SEQ ID NO: 948671 - DNA, 120 bp, Artificial Sequence
  ENSG00000236234_5 (sequence is synthesized)
actttcagaaggatgagactttgtccagccagtcctcattatgccaggcaaaggaactgcctgtactcataactgtggaaggggaaccacataccatgggcaggtggtccatgggggcag

SEQ ID NO: 948672 - DNA, 120 bp, Artificial Sequence
  ENSG00000287979_0 (sequence is synthesized)
atacttacctggcaggggagatactattatcaaacgaaggtggtttttctcagggcgagggttatccattgtgttccggatgtgctgacctctgcgatttccccaaacgtgggaaactcg

SEQ ID NO: 948673 - DNA, 120 bp, Artificial Sequence
  ENSG00000287979_1 (sequence is synthesized)
tagtgggggactgcgttcgcgctttcctctggtgcttttgtggtgcgaatagtaggtgagccgtaagtgtttttgtaattcagggtgcgggctcgtgttttgtggctgtgttctgtccgg

SEQ ID NO: 948674 - DNA, 120 bp, Artificial Sequence
  ENSG00000287979_2 (sequence is synthesized)
gctgtgttctgtccggtcagttgtttccgttcgcaacggttagttttcgtttgtgaggccatgtttggggacagcttagaactatccacttactctcttgggaggcgaatttcagtctct

SEQ ID NO: 948675 - DNA, 120 bp, Artificial Sequence
  ENSG00000287979_3 (sequence is synthesized)
gttggttggggtgttctcccaggttagctgccgctgtacttgctaggtggagctcagggatcaagggtcgggagctttctggtttgttcagtgctcccagggcttctaacatctcttaaa

SEQ ID NO: 948676 - DNA, 120 bp, Artificial Sequence
  ENSG00000287979_4 (sequence is synthesized)
aactctggtgttttctgtcatcctcggagttacctcttagcctctgttttttttgttgtttttttccccccctccctaagacaagtctcgctgtaccgtccagtctggagaagtggcgcg

SEQ ID NO: 948677 - DNA, 120 bp, Artificial Sequence
  ENSG00000287979_5 (sequence is synthesized)
cgtagcggtttcaccattctgctcaggctgggctccaactcctgggctcaagtggtccgcccagccttctgaagtgctgggattacaggtgcgatccatcttgccctggcagctcctgct

SEQ ID NO: 948678 - DNA, 120 bp, Artificial Sequence
  ENSG00000287979_6 (sequence is synthesized)
tttcaccacagcattcacgggagtttgtaggatttctgtgttggggaaacgtgtactcagttaatagagccaggtggaagttgtactcagaactggtggttttctttggaatgaaaaccg

SEQ ID NO: 948679 - DNA, 120 bp, Artificial Sequence
  ENSG00000287979_7 (sequence is synthesized)
tgcatgttgggggctcttagtgtccccgttcggttgtagacataacacccttgctttgtgtagggggagggctttgcccatgccctggtgccctggcgcagggcatcgaggcctgcaggt

SEQ ID NO: 948680 - DNA, 120 bp, Artificial Sequence
  ENSG00000287979_8 (sequence is synthesized)
cagaaccgcagtctaacctatgtcttggcggaataccctgctaattctccctggaatgtaagatgggaggtcttgtgaggaggtttctacaagtaagaaaacaaatttccattcggtttt

SEQ ID NO: 948681 - DNA, 120 bp, Artificial Sequence
  ENSG00000287979_9 (sequence is synthesized)
tattgacaaaattgaaaattataataactgagtccagcctctcagatgacaaatgtcttttgcactgagagctgggaaccgccgcttgcctcagctcctgcatgcaggtgcagccctcgc

SEQ ID NO: 948682 - DNA, 120 bp, Artificial Sequence
  ENSG00000229498_0 (sequence is synthesized)
aaattgctccagatcctagaaaataaaagcaggaaaggaaaggttggctgaacagggaaggaaaatatgtcaagaacaaaagacaaatgattatctcaggaaaagttcctgcccctctaa

SEQ ID NO: 948683 - DNA, 120 bp, Artificial Sequence
  ENSG00000229498_1 (sequence is synthesized)
actctgtgctgggcagccacacgtgcccgtgggaaagtgctgtgtccttggagtgccctgcacgctgcaactgaagccaacaagacacggcccagacagggagcaggttctgctaacagt

SEQ ID NO: 948684 - DNA, 120 bp, Artificial Sequence
  ENSG00000229498_2 (sequence is synthesized)
ggggaggggacatctggcagcatctctcccaagcagcaacggtagcagtggtggcagcaacagcagcagcagctggggagtgtccctccaacttcagagtgagcagcagcagctgaccag

SEQ ID NO: 948685 - DNA, 120 bp, Artificial Sequence
  ENSG00000229498_3 (sequence is synthesized)
attggaggacatttccactgtcttccctggcagctgtgatgtgttgtgcggtggcagctgaggattgcctgcgtgtaatctttgaggttccaagatgcttgttggaagtggagcctggtc

SEQ ID NO: 948686 - DNA, 120 bp, Artificial Sequence
  ENSG00000229498_4 (sequence is synthesized)
aagcagcagaaaggacagctggatccatgctgggtggggtgaggtggggtgcttgtcagggaagttggcttcagctggaactggaggttggctccagcaaaggaggttgaacatcactga

SEQ ID NO: 948687 - DNA, 120 bp, Artificial Sequence
  ENSG00000229498_5 (sequence is synthesized)
ttcctgacctgcagcacccaaatggccacaaagagatgtcatgggttttgaggaggccacagagccaacagctttagtgtcttcagaaggatgaagaaaacttgaacaacattttaaaat

SEQ ID NO: 948688 - DNA, 120 bp, Artificial Sequence
  ENSG00000229498_6 (sequence is synthesized)
agcttgagatataattcacatcccagagagtgcatccatctaaagggtacaattcaatggattttagtatatttacggagctgtgcattcatcactacaattaattatagaacttcttca

SEQ ID NO: 948689 - DNA, 120 bp, Artificial Sequence
  ENSG00000229498_7 (sequence is synthesized)
atcaccctgattcctctatctcccccagccctaggcaaccattaatcttttttgtatccatagatttgtctatcctagacatttcatataaatggaatcatgcaatatacgacccttctt

SEQ ID NO: 948690 - DNA, 120 bp, Artificial Sequence
  ENSG00000229498_8 (sequence is synthesized)
tcactttgtgtaatgctgtcaaggtacatccacgtgatatcagttcctcattctttttatggccaaatcacattccattgtatggatatattacattttatttatctgttcatcagttgg

SEQ ID NO: 948691 - DNA, 120 bp, Artificial Sequence
  ENSG00000229498_9 (sequence is synthesized)
tggacatttgggttggtttccatgtttttggctgttaggaatgatgtccccatgaacattcatgtacaagtttttgtgtggacatgtgttttcatttctcttggacatatgcctaggagt

SEQ ID NO: 948692 - DNA, 120 bp, Artificial Sequence
  ENSG00000229498_10 (sequence is synthesized)
ggaattgagtcacatggtaactttataaccatttgaggaacttccagactgtttttcaaagtggctacaccattgtacatccccaccagcaatgtacaagggttccagtttctccacatt

SEQ ID NO: 948693 - DNA, 68 bp, Artificial Sequence
  ENSG00000229498_11 (sequence is synthesized)
ccccaccagcaatgtacaagggttccagtttctccacatttttttcaactttttttttaatcatttga

SEQ ID NO: 948694 - DNA, 120 bp, Artificial Sequence
  ENSG00000229494_0 (sequence is synthesized)
gagataccagaagggaaactgggaagctggaggagaaggggagaggaccatgccttccctgacaccctcaggaaagctggagcttctaattcttccagtgatggaactcagcatatgtct

SEQ ID NO: 948695 - DNA, 120 bp, Artificial Sequence
  ENSG00000229494_1 (sequence is synthesized)
gaggagcagagaattcagaagctcccatgggcctcccacagctggaatctaaaacaaccacagaagtctcagaaaagagaatataaaagcatacaacaaaataaaggactcataagagta

SEQ ID NO: 948696 - DNA, 120 bp, Artificial Sequence
  ENSG00000229494_2 (sequence is synthesized)
cagggatcacatacatgaagttgaacaatgttcggttttaattcttcacaattatcatttgtaagattgtaggcattggccatggaaccccaagtctccagccatctccagttctctgca

SEQ ID NO: 948697 - DNA, 120 bp, Artificial Sequence
  ENSG00000229494_3 (sequence is synthesized)
ggcactgaatgtatgtgctaaggcaagccatctgcagctgctgcttgaagggaggtacagatacaacagttggaaaccttggtcaccacagcagaggtgtggggccaatccacaatgcag

SEQ ID NO: 948698 - DNA, 120 bp, Artificial Sequence
  ENSG00000229494_4 (sequence is synthesized)
cggagcccatccgagcagcacagctgccactgggtaccacaacccatgttgcagccacgtggctggcccagaagcagcagggaatgaaggctcactcacctcgggatcctcttcgtaatg

SEQ ID NO: 948699 - DNA, 120 bp, Artificial Sequence
  ENSG00000229494_5 (sequence is synthesized)
ccagttgtcggttctaactgaggtgcgaggggagttggtgggcaagtggcagttggcttagaattacaatcaggagaaaggaatgttcttttgctaatgaaagaggagaaattggcaatg

SEQ ID NO: 948700 - DNA, 120 bp, Artificial Sequence
  ENSG00000229494_6 (sequence is synthesized)
ttccagtcccaagtctaggcctcgggaggcttgcattttgccaaattatgatccccttctcagctgctgctctttcagcatggacgctatcacaaacacatggaaaatggccttccctag

SEQ ID NO: 948701 - DNA, 120 bp, Artificial Sequence
  ENSG00000229494_7 (sequence is synthesized)
ttaatcccagccaaaccaaacccaggtgcaaactagagccacacagccaaacccaccctacaccaaccattcccagctgaactgtatccatgagaataaattattgtggtttttcaggca

SEQ ID NO: 948702 - DNA, 120 bp, Artificial Sequence
  ENSG00000229494_8 (sequence is synthesized)
aagagataccagaagggaaactgggaagctggaggagaaggggagaggaccatgccttccctagacaaaagacaaagccttttgcttctgctataaataggacaccctcaggaaagctgg

SEQ ID NO: 948703 - DNA, 120 bp, Artificial Sequence
  ENSG00000229494_9 (sequence is synthesized)
tcacatgtgggagatgcttgaagtggagaagtgtgtctccaaaagtgtgatatctacaatgaatcatttggaaagagtcctcagcaagctgtggtgtcttatgcctgtaatcccagcagt

SEQ ID NO: 948704 - DNA, 120 bp, Artificial Sequence
  ENSG00000229494_10 (sequence is synthesized)
gctgggcatggtggcgcatacctgtagtcccatctcctcgagagaggctgaggcattggccatggaaccccaagtctccagccatctccagttctctgcaggcactgaatgtatgtgcta

SEQ ID NO: 948705 - DNA, 120 bp, Artificial Sequence
  ENSG00000229494_11 (sequence is synthesized)
gagataccagaagggaaactgggaagctggaggagaaggggagaggaccatgccttccctgtgtgtttcccagacaaaagacaaagccttttgcttctgctataaataggacaccctcag

SEQ ID NO: 948706 - DNA, 120 bp, Artificial Sequence
  ENSG00000229495_0 (sequence is synthesized)
gacctgcatgggctatatcagtaggaagattgactaagttcttcctggtggaatgggttccttcctgcttagtgtatacgttgagtatgtgatcactcaatttgtagcaagaagataaca

SEQ ID NO: 948707 - DNA, 120 bp, Artificial Sequence
  ENSG00000229495_1 (sequence is synthesized)
tctctgacatcattgacttcttctgcatatcttacagaagctctaagaagaatggaagagataacagaacacatctggaagaacaatctgttacctctggacaaacccagctataggatc

SEQ ID NO: 948708 - DNA, 120 bp, Artificial Sequence
  ENSG00000229495_2 (sequence is synthesized)
cgtggggccgaatacaaatgaaaatgcagaatcccttgttcaaagattattgaaagtttcatgatggcagcagcagaacattaaaccaagtgggggattcttataggtgcagggcactgt

SEQ ID NO: 948709 - DNA, 120 bp, Artificial Sequence
  ENSG00000229495_3 (sequence is synthesized)
ttgactatacatgtctcccacccatgaagttggccctgcctccggctgtgctccccaccttccttcctattcaactactgatgtctgccattctatcttttacacttaaaccctcccctt

SEQ ID NO: 948710 - DNA, 120 bp, Artificial Sequence
  ENSG00000229495_4 (sequence is synthesized)
ggtaagcttcaattgctcctcagttatcagtcactgtaatctcagtgaatgtgagtttcatggaagctcacagctgagagcaggtttgatatatggtaggatagagataagtcagggttg

SEQ ID NO: 948711 - DNA, 120 bp, Artificial Sequence
  ENSG00000229495_5 (sequence is synthesized)
ggagaaagatgaaggatagcaggctacaggaggctgccagggtatggcatggggatcttgagtaccttataaggaagatgcctttattcagagtaggattcctggaatggcctagtagaa

SEQ ID NO: 948712 - DNA, 120 bp, Artificial Sequence
  ENSG00000229495_6 (sequence is synthesized)
gtagaagtgggctgaagaaaagcttttatgttttgcgcttatgtagattttgtgttgtggtggacctttttagatagagtagatggtggtgggctaaagtgctgatgtaggtaagtttgg

SEQ ID NO: 948713 - DNA, 120 bp, Artificial Sequence
  ENSG00000229495_7 (sequence is synthesized)
acgtctctatgcatgtgctgaggacttctaaactggaggtattaagggtgaaagaaaccactcctctagtctgcaaatgctaaggtcctcttttatgccttaacagattcagtagcagtt

SEQ ID NO: 948714 - DNA, 120 bp, Artificial Sequence
  ENSG00000229495_8 (sequence is synthesized)
tactcatgctcatgtctagcaactccaaagatggtcctgggaaaagctttcaccctgacttacagtatagctaaccattacttagaagcttaggttgtgtatttttaatgtgggaaaaca

SEQ ID NO: 948715 - DNA, 120 bp, Artificial Sequence
  ENSG00000229495_9 (sequence is synthesized)
agaaggaatctgagttttcatagtaaaacatctactactcataaacctgtgtggtatacaaatcatgttgctctcgtctattaatatatagaaggaaagtgtattagttacacggattag

SEQ ID NO: 948716 - DNA, 120 bp, Artificial Sequence
  ENSG00000229495_10 (sequence is synthesized)
gcttgctcatgtatctgtcagctaggcagctctgctgttcttggctggacttgcttccatgattgtgtgccagcaggctgttggttgatctagtcattcttgcaacattggatgacttgg

SEQ ID NO: 948717 - DNA, 120 bp, Artificial Sequence
  ENSG00000229495_11 (sequence is synthesized)
tttcactccatgtgtcttatgtcctccagtaggccaaactggacatgttttcatgacaatggccgtgggcaataggtaggcagagacatataaataaaatttcaggcttctgcttgcatc

SEQ ID NO: 948718 - DNA, 120 bp, Artificial Sequence
  ENSG00000229495_12 (sequence is synthesized)
acatctgataacatttattggcttgagcaagttgcaaaaccagcccagaacaggagagctttccaaattccaaaggtaaggaggtggaccctgcctttttagggggaagaactgcaaagg

SEQ ID NO: 948719 - DNA, 120 bp, Artificial Sequence
  ENSG00000229495_13 (sequence is synthesized)
catgtggcaaaaaacatgggtaaagagaggaaggaaggattggagtcatttatagcttccatttaccatagtctgtcaaaaactctgctaagacttgatgtttagattacagtgatatac

SEQ ID NO: 948720 - DNA, 120 bp, Artificial Sequence
  ENSG00000229495_14 (sequence is synthesized)
taagtttttgttcctttatatcattaaatgaagccgaatcaccagaaaaatctgacacctatatatcagtttttaatgtattgtctctcagctccaactaccattctgtgcactgctttg

SEQ ID NO: 948721 - DNA, 120 bp, Artificial Sequence
  ENSG00000229495_15 (sequence is synthesized)
tgaaactggagctgaacctggtaaagatttctctttctccagctggcttgatgctaagctttatcaacagagggtgctagagggacattgttgaggggatgatggcaggagggtgcttcc

SEQ ID NO: 948722 - DNA, 120 bp, Artificial Sequence
  ENSG00000229495_16 (sequence is synthesized)
cttccaggttccagtcctcattccttgttattcattgtgaaagtcagtagatcagtgtgcagatggcctagtggagctgatcatcaagaccaactcctccctctcacctaggggctgttt

SEQ ID NO: 948723 - DNA, 120 bp, Artificial Sequence
  ENSG00000229495_17 (sequence is synthesized)
tactggcagttctgtacacacacttagggagctgtcttcctacctagctggaccacttttatatttcaggtcagatctgttccctctgttgtttcttcccctctgacagaaagtggtagc

SEQ ID NO: 948724 - DNA, 120 bp, Artificial Sequence
  ENSG00000229495_18 (sequence is synthesized)
cctaccctcttcaaaattcttggttcttcatttcctgtaccccttcagcctaataattttttttccgtaagtgctatttctgaatctcttagagcaggggttggtaaactatgattagtg

SEQ ID NO: 948725 - DNA, 120 bp, Artificial Sequence
  ENSG00000229495_19 (sequence is synthesized)
gacaaaataaggggatatcattctatacttatcaaactagctaaatattcagacttatgacaacacacttatgggaaggttgtggggaagcaaatatcctaataaaatgctagaagtata

SEQ ID NO: 948726 - DNA, 120 bp, Artificial Sequence
  ENSG00000229495_20 (sequence is synthesized)
ctatcttttgggaggtcactataaaatatataacatgtaattatatatacaatatgcaataaaacacttaaaatgtgcatattcttcttaactcagcaatttaaaaaataattaaaagga

SEQ ID NO: 948727 - DNA, 120 bp, Artificial Sequence
  ENSG00000229491_0 (sequence is synthesized)
gctttgtgggctgtgttggagtttagaccttatgctaaaggagataggatgttgctgaaaggtttgaactagggaaataacaatcagatttatggtttagaaaggtcgttccagactggt

SEQ ID NO: 948728 - DNA, 120 bp, Artificial Sequence
  ENSG00000229491_1 (sequence is synthesized)
ggttgggagagcagtctgctgaacactgacacagtacctggagatacacagatggatatggtggtacccaagagtgcccacactctagtgtgggaaaaactacattaaaaattgtcccat

SEQ ID NO: 948729 - DNA, 120 bp, Artificial Sequence
  ENSG00000229491_2 (sequence is synthesized)
gatgtcatgtgaaggagatcttaaggattgaagataatgcattaaagtgcctgaggcttgtgcctatgaataaagtgcctactactggttactgttggagcagccatgtctacatgttca

SEQ ID NO: 948730 - DNA, 120 bp, Artificial Sequence
  ENSG00000229491_3 (sequence is synthesized)
agacatcacatgtatggaggtgccattcacactttagacatatgatgtatatcaatgcagacccaaatagaaatctgatacagtcacccctcccactttggcagggaaggttcagtaaat

SEQ ID NO: 948731 - DNA, 120 bp, Artificial Sequence
  ENSG00000229491_4 (sequence is synthesized)
aggctgttattaccaggagcctgcatgactcaagcaagcagctggggcctgagcagtgagcagaatggaatgtctatcaggacagccgtagatttccacagcttcctgctttcgtcagct

SEQ ID NO: 948732 - DNA, 120 bp, Artificial Sequence
  ENSG00000229491_5 (sequence is synthesized)
tcagcttaacatctattattgtgaagagtagggtcttccaagtttataagaagaatcagatttccaagagcaatttacccctttcttcattctgttaggcattatttggaatggcttttc

SEQ ID NO: 948733 - DNA, 120 bp, Artificial Sequence
  ENSG00000229491_6 (sequence is synthesized)
aggtgttgggactttgatgggaaaaaggtgaagcaaaatgtggtaaacaggaatgaaaagccagaatgaataaaggaagccttcattgttctgagtgagttccccagcctgagagattca

SEQ ID NO: 948734 - DNA, 120 bp, Artificial Sequence
  ENSG00000229491_7 (sequence is synthesized)
cagagacctggcaaatgatattgctgaaccatgggcagtgaatgcagagaacagaaaagggcatacacctttggatctctgagccatcatgtaagaagttcagctaccctgaagccacca

SEQ ID NO: 948735 - DNA, 120 bp, Artificial Sequence
  ENSG00000229491_8 (sequence is synthesized)
ttccaagagcaatttacccctttcttcattctgttaggcattatttggaatggcttttcttcgatgaattcaattaacaggctggagtgcagcggcgtgatctcggctcactacaacctc

SEQ ID NO: 948736 - DNA, 120 bp, Artificial Sequence
  ENSG00000229491_9 (sequence is synthesized)
aggtgttgggactttgatgggaaaaaggtgaagcaaaatgtggtaaacaggaatgaaaagccagaatgaataaaggaagccttcattgttctgactggggcctgagcagtgagcagaatg

SEQ ID NO: 948737 - DNA, 120 bp, Artificial Sequence
  ENSG00000229491_10 (sequence is synthesized)
atactatagtcttcagaaaagaatcaattaaagtgatgagaaatttcaaatatattaactacaaactgcaactttgaaaaatattgcaggcaattttattaagttctacagagaaatgtc

SEQ ID NO: 948738 - DNA, 120 bp, Artificial Sequence
  ENSG00000229491_11 (sequence is synthesized)
tgtcagtaacatggtattagaaataaatatagctgataaacagattaaagtttatgaatatataccaagaataattattctgcttatgtaattttaattttggaaaaccattttgaaaag

SEQ ID NO: 948739 - DNA, 120 bp, Artificial Sequence
  ENSG00000229491_12 (sequence is synthesized)
aaaccattttgaaaagtttgttacatgaaatgttatttttaaaagaatttcatatttgaaaatagtttgaatatataatttttaagtattttcaatgcaattagtccaattttctgatca

SEQ ID NO: 948740 - DNA, 120 bp, Artificial Sequence
  ENSG00000235760_0 (sequence is synthesized)
aggcctgccctgcctgacctactcttgtgaggccaaggccatctcctccactctctgggggcctcttctgactcctccaaactcttccatgtctggactcctggcttctgcccaaggcca

SEQ ID NO: 948741 - DNA, 120 bp, Artificial Sequence
  ENSG00000235760_1 (sequence is synthesized)
catgctccctcctcacaagggtgtggctttatccgagggcctcagcaaggcaaccaacaccagacatgaagctgagcacactcagctcatcctgggagacaaggtgggggtggaggatgg

SEQ ID NO: 948742 - DNA, 120 bp, Artificial Sequence
  ENSG00000235760_2 (sequence is synthesized)
tccatccttcttccgcatcaagatgggaagtcttgactcattacccgctggagacttttcctgctgggctctgcactgtcaactgtgagagagggaaataaaacgtactgtacagtccaa

SEQ ID NO: 948743 - DNA, 120 bp, Artificial Sequence
  ENSG00000235760_3 (sequence is synthesized)
ctcagcaaggcaaccaacaccagacatgaagctggaggagattttaaaaggaagtctctggtggtttgtaaagcaacaaatcctgctctcaagtggatagttccaagccctctcaatgaa

SEQ ID NO: 948744 - DNA, 120 bp, Artificial Sequence
  ENSG00000235760_4 (sequence is synthesized)
cagttttatacacctggagaagcacagcctcgtcctttccatggagctacaagccacatctgggggcgctcagtgcccaggctgagggggcacgcagagccctcggggacgactcaatgc

SEQ ID NO: 948745 - DNA, 120 bp, Artificial Sequence
  ENSG00000235760_5 (sequence is synthesized)
acagaggccactccttaagggcccggctccctcaaactgaggtgtccccatgcttggtcttcccacagaagccagcctggttggctgcttcaaaggaggaataaagatgaggagccatga

SEQ ID NO: 948746 - DNA, 120 bp, Artificial Sequence
  ENSG00000235760_6 (sequence is synthesized)
agaaactgcaggttaaagggtgaaaagcagttgcgaagtccccacagcttggaaatggtggagccgagactgaaacccaggtgtgctagcatctaaagttcatgctctttccaccacatt

SEQ ID NO: 948747 - DNA, 120 bp, Artificial Sequence
  ENSG00000235760_7 (sequence is synthesized)
agactgtattctgagggcaccaaggaagctccatttttcttaagaaaccaaattgcagtcctccaggaccacagccaggggagcatcttcgtgggagagtggctgctgctcagagttgtg

SEQ ID NO: 948748 - DNA, 120 bp, Artificial Sequence
  ENSG00000235760_8 (sequence is synthesized)
actcccatccttaagagtcctctgtcctctctggcctcctttctactgatcattgctgtccccttcacaggggagaggggccatggcctatcccctaaagagtctgccaaggtagactca

SEQ ID NO: 948749 - DNA, 120 bp, Artificial Sequence
  ENSG00000235760_9 (sequence is synthesized)
acaccagacatgaagctgacagatgggaagtcttgactcattacccgctggagacttttcctgctgggctctgcactgtcaactgtgagagagggaaataaaacgtactgtacagtccaa

SEQ ID NO: 948750 - DNA, 120 bp, Artificial Sequence
  ENSG00000234149_0 (sequence is synthesized)
agagcaggcagtgacatcttctttctgatgcaactgaaatgatcttaagatagaggctgcatttcagcaaaagtaccagacctcgaaagaagacagggcatacctagcatcatttggaag

SEQ ID NO: 948751 - DNA, 120 bp, Artificial Sequence
  ENSG00000269376_0 (sequence is synthesized)
caagcatcctccttactgaatttagattttgttccgattttgtggcctgcgtttcttcttactgccctgctctgtggccctgttcttcctgggtttggagatcctcaaggatgggcttcg

SEQ ID NO: 948752 - DNA, 120 bp, Artificial Sequence
  ENSG00000269376_1 (sequence is synthesized)
ggaaggcctctggccggatgatctggtgacgtaatcccatctgacgctcagccttggactttgaaaaggcacgactgtcctgtctgatggacaggatgcagaagcctttgggaatgggca

SEQ ID NO: 948753 - DNA, 120 bp, Artificial Sequence
  ENSG00000269376_2 (sequence is synthesized)
cccatggccccaggctgctgtgtggagagacttgtcctctcctctgcccacggtcaccagtgagcaccagggacggggtttcctgctgcacctgggcctcttcctgctgccaggagctgc

SEQ ID NO: 948754 - DNA, 120 bp, Artificial Sequence
  ENSG00000269376_3 (sequence is synthesized)
cttgctgcctccacctgtgacagtccaccccccataccccccccacccgcaccatgagaggatttccagggcccacccgcctccagtccccgttctctctgctgctttcgaggtcaccct

SEQ ID NO: 948755 - DNA, 120 bp, Artificial Sequence
  ENSG00000269376_4 (sequence is synthesized)
gggctggaaggggtgcctgggatactgctcagacgtcttggccgccctcccaccccgcaacaccccgctcctggttttcaggatgaaattgtcctcaaataaagcaagcttttgagtcaa

SEQ ID NO: 948756 - DNA, 120 bp, Artificial Sequence
  ENSG00000269371_0 (sequence is synthesized)
ggcagctgcagcagcggctgcaccctcatgcacccgtttgtgcttggtgaggctggaggcctggccgaaggccttcccgcagagctgacagcgatagggacgctcgcccgaatgcacgtg

SEQ ID NO: 948757 - DNA, 120 bp, Artificial Sequence
  ENSG00000269371_1 (sequence is synthesized)
acttgtggggccgcgggccgccgtgcgtgcgcaggtgctgtgccaggagcgagccgtgcccgaaggccttgccacacaccgggcagtggtgcggcttctccccgctgtggctgctgcgat

SEQ ID NO: 948758 - DNA, 120 bp, Artificial Sequence
  ENSG00000255191_0 (sequence is synthesized)
caaaaagccgagggggaggagcggcgcggccgtgagcgagggcagccaagtttggctacagcacgcgcggcttcgctcctgcctctggggaggagagaggggacagtcccctcccgagct

SEQ ID NO: 948759 - DNA, 120 bp, Artificial Sequence
  ENSG00000255191_1 (sequence is synthesized)
gctaggtcccgggtgcaccggagtcgcgcagcgaacgcgccatgcaggagggcgacatcggcctggaggggctgccccccagggaagtccccacagtcgggcactgtgccgagtggtcgg

SEQ ID NO: 948760 - DNA, 120 bp, Artificial Sequence
  ENSG00000255191_2 (sequence is synthesized)
agatcacctcctcggctcctggctcatcactgggaaagatgggagcacccagggactgcagcagctgtggtccccaggtcctcggatacgtcatcctgcagccccacaagggacccagaa

SEQ ID NO: 948761 - DNA, 120 bp, Artificial Sequence
  ENSG00000260969_0 (sequence is synthesized)
agtgtagctatggggaattcacccaaaacatttgcttttgctttatcagtggcatttgtctgcctcaaaagccttgtgagggagagggctactacgtgacgctgccaggcaatgctgttg

SEQ ID NO: 948762 - DNA, 120 bp, Artificial Sequence
  ENSG00000260969_1 (sequence is synthesized)
gaggcagctgatttgatggacaagaaggggagcagtgaccacctgggtcactctgactccgccctctctgagccaagtgaatctgagcaatgatgtcataataatcatcaatagcaacag

SEQ ID NO: 948763 - DNA, 120 bp, Artificial Sequence
  ENSG00000260969_2 (sequence is synthesized)
catctctactaaaactacaaagaattagccaggcatggtagcacatgcctgtagtcccagccactcaggagcctaaggcaggagaattgcttgaacttccccagcttcaagaggaagagt

SEQ ID NO: 948764 - DNA, 120 bp, Artificial Sequence
  ENSG00000260969_3 (sequence is synthesized)
ctgcactccagcctgggtgacaagagtaaaactccctctcaaaacaaacaaacaaaccaaaaaaacaaatagcaacagcaaccacaatcatcatcaccatcaaggctggaacaaggatga

SEQ ID NO: 948765 - DNA, 120 bp, Artificial Sequence
  ENSG00000260969_4 (sequence is synthesized)
ggggaaaaaaaaacacaaatgataataatagatgctgacatttacggagcacttactatgtgctgggaaccatgctgacggcacaccgaatccactgaacagatctctttgggttttgga

SEQ ID NO: 948766 - DNA, 120 bp, Artificial Sequence
  ENSG00000260969_5 (sequence is synthesized)
ataacaaaaaagggactgtacatggatatttccaagctggaaccgaggcactttctagacgaaggcagccttatccccaggagatgattgaaaatgtaagaactattctgagcctgcagg

SEQ ID NO: 948767 - DNA, 120 bp, Artificial Sequence
  ENSG00000260969_6 (sequence is synthesized)
ccatagccaaagaggacctactgttaagttttcaagaccacccagaaagaaatttgaagttgggtttatatccttaatccctcagttagaaaaaaaagaaaagtgaagaaactgcatctc

SEQ ID NO: 948768 - DNA, 120 bp, Artificial Sequence
  ENSG00000260969_7 (sequence is synthesized)
aaactgcatctccaagatcctgctatatcaacttcagttttttgaagttaaatttgatttttaaatcccttggctgatgagacctgtgtgggtttttttttgttgtttttttgttttgtt

SEQ ID NO: 948769 - DNA, 120 bp, Artificial Sequence
  ENSG00000260969_8 (sequence is synthesized)
atcattgtacctctattttaaaaatagagacttgtggttctttttccaaaagcagtccaacagaaagtgaatggtggtcaatgcataataaaatgagagttaccttttgacttggaagaa

SEQ ID NO: 948770 - DNA, 120 bp, Artificial Sequence
  ENSG00000260969_9 (sequence is synthesized)
gcttgtgactgctggtctaggtcattccaggtcaaccaggggcctctcccagagtgagaaccactggtgattccccagagtgggaccaagtgaaagcacttggctggatcagagggatag

SEQ ID NO: 948771 - DNA, 120 bp, Artificial Sequence
  ENSG00000260969_10 (sequence is synthesized)
gagcctggctgctcctaaaacaagacactacttgcctttgatgttcaagtcatttaagaacgcaattgcttcctactcaatttttcaaaaccaaaataacaaatacgatatgagccataa

SEQ ID NO: 948772 - DNA, 120 bp, Artificial Sequence
  ENSG00000260966_0 (sequence is synthesized)
gagataaatatatttggaagtcatcagtgtgtaatcttattttaagtcaggacatggatgaaaccacttagagagtaagtgtagccagaggatagaacttaattgaagacatatgatcga

SEQ ID NO: 948773 - DNA, 120 bp, Artificial Sequence
  ENSG00000260966_1 (sequence is synthesized)
tgaaattcaaggccaacttttgtgatttttcaaatagaaataaaatgttaacattttctaccacacatatacaaaccattactttctatagtgttgtagaagcactaagatttaaaaagc

SEQ ID NO: 948774 - DNA, 120 bp, Artificial Sequence
  ENSG00000260966_2 (sequence is synthesized)
aagattgataatagttgccaaatatgtaaacaaatggcaaattaaattgaggagggagtgtcactttattcttggaataaagtttttgttttgaagtaatacagttttttatattaagaa

SEQ ID NO: 948775 - DNA, 120 bp, Artificial Sequence
  ENSG00000260966_3 (sequence is synthesized)
taacaacatctggagtgctagtttctttttctcattgttggaaattgctattccaattcaatttgacagttttagcactagagggcaggcttgcttctagattgtgaagagttctacatg

SEQ ID NO: 948776 - DNA, 120 bp, Artificial Sequence
  ENSG00000260966_4 (sequence is synthesized)
aattaatatagccaaacagcgcaggttgaacatccttaacttgaaaatctgaaattcaaaatgcttcaaaatccaaaactttttgagtgttgacatgatgccacaagtggaaaattccac

SEQ ID NO: 948777 - DNA, 120 bp, Artificial Sequence
  ENSG00000260966_5 (sequence is synthesized)
acctgacctcatatgatgggtcacagtcaaaatgcaggtgtacaacagtttactctgttcccaagagaaaaataaaattagctgcaggctatgtgtaaaaagtgtatatgaaacataaat

SEQ ID NO: 948778 - DNA, 120 bp, Artificial Sequence
  ENSG00000260966_6 (sequence is synthesized)
gaatttcatgtttagacttgggtcccatccccaaggtatcttattatgaatatgcaaatattcaaagatcaaaaaaaagaaatctaaaacacttccggtcccaagcattttggataagag

SEQ ID NO: 948779 - DNA, 120 bp, Artificial Sequence
  ENSG00000260966_7 (sequence is synthesized)
atattcaacctgcacctacattcaatctcaattaatgaatgcagttgtttcttatgtgacaggtttgccatctactatgtttttttctagtgctaggaaagcataaaataaggctaattg

SEQ ID NO: 948780 - DNA, 120 bp, Artificial Sequence
  ENSG00000260966_8 (sequence is synthesized)
attttagtacatctaggactggcagttgacgctaatatacatttgaatataaatgtatatttatattccaaggagtttccaaggaaactcaagtgtagcttaattatactcagatttgat

SEQ ID NO: 948781 - DNA, 120 bp, Artificial Sequence
  ENSG00000260966_9 (sequence is synthesized)
atagagggtcttccaccacatatatgaatattaaagccagtcagaagaaatcctggacatgaaaacattttttcaggaaataattaactatgtgctgggtattattatatgagcgtggct

SEQ ID NO: 948782 - DNA, 120 bp, Artificial Sequence
  ENSG00000260966_10 (sequence is synthesized)
acaaagatgaataaaatatagtccctgcctaaataagctttgttgtagcatcttacagcacttaatatcttgtgctgtatctatttaaatgtctttttcccttcaataatagaaatcctg

SEQ ID NO: 948783 - DNA, 120 bp, Artificial Sequence
  ENSG00000260966_11 (sequence is synthesized)
actcacttatttttggtgcctccaagtgcccatcacacaattcagtttacagtgtttgaacatgtgaataatgagagagagaaaaataagaaaacggtcagggaattggggcctttgaaa

SEQ ID NO: 948784 - DNA, 120 bp, Artificial Sequence
  ENSG00000260966_12 (sequence is synthesized)
aaacttattttcacatttttacccttagagagatgcttttcctattaacacgtctaaagattatggagacaattctaaccttctatctttgctcccactacttcttcaagcagactttaa

SEQ ID NO: 948785 - DNA, 120 bp, Artificial Sequence
  ENSG00000260966_13 (sequence is synthesized)
ccccattcctcaagagcagttattggcagccatagagagtgggaggtcaagccttttttagtcattggagtaaacaggagacatagatgtggaaattgggaggttctctctatctggctt

SEQ ID NO: 948786 - DNA, 120 bp, Artificial Sequence
  ENSG00000260966_14 (sequence is synthesized)
acgtcagtttgagaagtttgacatgaaatggaaccttctggaatgaggttctttttcctgcttttcacctggaaagttttcccatacatggtcctcttgcacccctagtccttttagggt

SEQ ID NO: 948787 - DNA, 120 bp, Artificial Sequence
  ENSG00000260966_15 (sequence is synthesized)
acctatttctgtgtgctagttctttcatttccttgtctgtaacatgaggataataatagtccttatctaatagcattattttgaggatgaaatgaaatacaggcagtaaatattagttac

SEQ ID NO: 948788 - DNA, 120 bp, Artificial Sequence
  ENSG00000260966_16 (sequence is synthesized)
tctttgctatctggaaaaacatcaattgaacctcataggatggacttgtgttcaataagtgttatatatagtagagtcaaatggaaaaattgaaccactcagatacatttttttcattga

SEQ ID NO: 948789 - DNA, 120 bp, Artificial Sequence
  ENSG00000260966_17 (sequence is synthesized)
tacataatagatgtatttatttggggggtacatgtgataatatgatatattcatataattaaaattcattgatacatgatgtatttatttgggggtacatgtgatagtatgatatattca

SEQ ID NO: 948790 - DNA, 120 bp, Artificial Sequence
  ENSG00000260966_18 (sequence is synthesized)
tataattaaaattcattgatacataatgtatttatttggggggtacatgtgatagtatgatatattcatataattaaatgaagataattgggatatccatcaccttaaatatttatgttt

SEQ ID NO: 948791 - DNA, 120 bp, Artificial Sequence
  ENSG00000260966_19 (sequence is synthesized)
tctttacactaggaacattcgaattctctttagctattttgaaatgtacaatagtttagtgttaatagatcagtcatcctactgatatatcgaacaccaggtcttatttcttctgtctac

SEQ ID NO: 948792 - DNA, 120 bp, Artificial Sequence
  ENSG00000260966_20 (sequence is synthesized)
atagacatatttagaaatgcaaatctcttaggaaattaatctgtaatgtcaatgatgcacactgatttgtattacttgctttctttgtaggcagtatagtgaaatggttcattaaatgga

SEQ ID NO: 948793 - DNA, 120 bp, Artificial Sequence
  ENSG00000260966_21 (sequence is synthesized)
tatggctgtctttaaaagtggattggtttgacttcataggaaggactctatttttaaaaaagagaaatattaaaaaataaaaagccaaaattctatgatgtcttattacattgagtctct

SEQ ID NO: 948794 - DNA, 120 bp, Artificial Sequence
  ENSG00000260966_22 (sequence is synthesized)
taaatcagtttttttttaattaagtagcaggaccctattgcaaaataagttttacctagaagcacagtatttaaaacagaaagctaaaatactctggttaagtgggaagctccctgtctt

SEQ ID NO: 948795 - DNA, 120 bp, Artificial Sequence
  ENSG00000260966_23 (sequence is synthesized)
cctcgctgctagtattatttctgaaaaacctcaaaggaactccttgctctctgaatagcaggttttaaaaaccactacttgcacatttgcaccttgacatcaaacatgtgaacaaagtaa

SEQ ID NO: 948796 - DNA, 120 bp, Artificial Sequence
  ENSG00000260966_24 (sequence is synthesized)
tagagtgagaaaactgaatttctatttaggaatttctattttattctctctataaaaagccaagaagtggttggtgtttggaataacatgaaaaatattccaagtatctttggaaatact

SEQ ID NO: 948797 - DNA, 120 bp, Artificial Sequence
  ENSG00000260966_25 (sequence is synthesized)
tacactagaactataaggtttatgataattctatcttagattcattatctagagctggtctaaaaaaggatgatatgtaagaactaccaagagagacttggagtagatacaagaatgaag

SEQ ID NO: 948798 - DNA, 120 bp, Artificial Sequence
  ENSG00000260966_26 (sequence is synthesized)
gaatgaatcaatatccaataaatatccataggcccaggctttgctatgccctcttattacacaggataaaacagtgtagttgttagtttctacctttgaagattatgatccttaaaaagg

SEQ ID NO: 948799 - DNA, 120 bp, Artificial Sequence
  ENSG00000260966_27 (sequence is synthesized)
aaacagctctgtgaacagagaccatgttattcataggtgttcctcacttgtttccaccacataataggtatttaatgaatgaaaaaattcacgtctctctttgatcctagactgcaagtt

SEQ ID NO: 948800 - DNA, 120 bp, Artificial Sequence
  ENSG00000260966_28 (sequence is synthesized)
acttaaaagaaatggaccgtattttacttatctctcatggcctgcaaattgagtttgcttactgaattaatgaatgaatgaccaattgtacacatatgtctgtaaaacgtttacatatcc

SEQ ID NO: 948801 - DNA, 120 bp, Artificial Sequence
  ENSG00000260966_29 (sequence is synthesized)
acattcccattagactgagattcttgagggcagaaaccatgtcttcagctctcagcatggtgcctgactcatggtaggttgtcaaaagcatttgcagaactgaataaaacttacgtttaa

SEQ ID NO: 948802 - DNA, 120 bp, Artificial Sequence
  ENSG00000260966_30 (sequence is synthesized)
gtagtactggagcagtctcacataaccgggcacagtgtcttctaaatagacactaaaattatttcataattaaagacagatctcactaagcattttctgagttagtgccagttgaataat

SEQ ID NO: 948803 - DNA, 120 bp, Artificial Sequence
  ENSG00000260966_31 (sequence is synthesized)
atgacaataagctataggagttcagaggagagtgagttctgtggactgaaatagtcaaagtggattttcagagcagatgagacgcgatgaaggctggggctactttggtgttttaagaac

SEQ ID NO: 948804 - DNA, 120 bp, Artificial Sequence
  ENSG00000260966_32 (sequence is synthesized)
attaattaggcagcaggaaaatctgaggacagggagactagtaaggaaggctggaaagagccctgggtttggagttcagagatctgtgttcagagtcctttgcttcttagtgactatgtg

SEQ ID NO: 948805 - DNA, 120 bp, Artificial Sequence
  ENSG00000260966_33 (sequence is synthesized)
accttgagaagataacttgagctccctttttcctcttctgtgaggtagaggtaagattgatgtgcatattgatattgtacttaaaagtgtttgtaaaatgctaagtaaaacctaatgcta

SEQ ID NO: 948806 - DNA, 120 bp, Artificial Sequence
  ENSG00000260966_34 (sequence is synthesized)
tgctttgaatgtagtgggttccaaatatttgtttaatgacaaagaataaatgatattgactaatgaaaataatggagccactggaatgtcacctcctgcatctgccagtaaacctgttaa

SEQ ID NO: 948807 - DNA, 120 bp, Artificial Sequence
  ENSG00000260966_35 (sequence is synthesized)
cacaggggtggcgggggggggggggaagtaaatatgtgaagccaccaaatctcatgatcaggagaaaaactttggaactcccatgagactccaaagttatgtcacaggtgaataagtcat

SEQ ID NO: 948808 - DNA, 120 bp, Artificial Sequence
  ENSG00000260966_36 (sequence is synthesized)
gaacttttcatgctgatatcatttctaaggttgctgccttgtcagaagaagcaaaccacaagataaaccatgcagaaaatctttttttaaaaaagtttcctgaaggatggatggttcatt

SEQ ID NO: 948809 - DNA, 120 bp, Artificial Sequence
  ENSG00000260966_37 (sequence is synthesized)
tgttctgcttgtcactttacttactaatgagtcatttttttccttaaccagtaatttgttttaaatttggtcataagatggtatgttgactagtccaatgttacaaaataattggaaaaa

SEQ ID NO: 948810 - DNA, 120 bp, Artificial Sequence
  ENSG00000260966_38 (sequence is synthesized)
agatgacagaccaccaactgaataagggaaatctggttcttgaacttccaatgtatgaattggtgatggtaagcttagtctttatgatgtaagattggatttattggaacttctttatgt

SEQ ID NO: 948811 - DNA, 120 bp, Artificial Sequence
  ENSG00000260966_39 (sequence is synthesized)
ccagaagttgcagcacctttctttgtctctggaatgcccaagatctctactgcatcctgtagacatggagggtttccccccttattctgggtctgattatttttaaagaaacaccctttc

SEQ ID NO: 948812 - DNA, 120 bp, Artificial Sequence
  ENSG00000260966_40 (sequence is synthesized)
cttacccatcatggagacactactaaccttgtatatacttttattagagtgctgataacaccatattacagtagcatacttacatatctgttttcttaactgtgagctccttgagagcag

SEQ ID NO: 948813 - DNA, 120 bp, Artificial Sequence
  ENSG00000260966_41 (sequence is synthesized)
ggactgtgtgtttttgcttttatttcaccagtactcagaactatccacagtatagaaaagcactcaataaatggaataaatgaaaatgaatagataaataaatgatttcacttgtataag

SEQ ID NO: 948814 - DNA, 120 bp, Artificial Sequence
  ENSG00000260963_0 (sequence is synthesized)
acaacctattgaatctcacaacatatgtttggatagcacttcccagcctacaacgcactttctcagggattctcaaacttcctcccacctcacatccttttaaggcaagtgagtgtggga

SEQ ID NO: 948815 - DNA, 120 bp, Artificial Sequence
  ENSG00000260963_1 (sequence is synthesized)
actctggttcagggaagttaaatcacttgcctaaggtcatgcagatcattaatgccatagccaagacctgagcacgttctcctaaagccaggtcaggcctcttgtcacatactccattga

SEQ ID NO: 948816 - DNA, 120 bp, Artificial Sequence
  ENSG00000260963_2 (sequence is synthesized)
ctctagtgcctaacccatgctcatcacagagctcacattggaaccattgttaaacagactctaatggaaatgacttcgttcagctggtgaacattttggaagattccagaaaaacatgaa

SEQ ID NO: 948817 - DNA, 120 bp, Artificial Sequence
  ENSG00000260963_3 (sequence is synthesized)
caagtgtttgagtgctcttaaggggattgtctaatatcttggctcctgactcatccttagaagtcttccagccaccttgtacccatttcaagcccaagggctctttaacgtaaatgagtt

SEQ ID NO: 948818 - DNA, 120 bp, Artificial Sequence
  ENSG00000260963_4 (sequence is synthesized)
ttgcatggccaccttctcattgagttcagccatatgatttcagaaaagactttgcttttgtaatttgccatcctctaggctcctaatactactacctgtgttacctgcagaaaagaacag

SEQ ID NO: 948819 - DNA, 120 bp, Artificial Sequence
  ENSG00000260963_5 (sequence is synthesized)
agaaagatccagtgcaaaaactcataggaaatgatcaattcatgccaagtgatgagaactagagaagagagatgagagcattgttcatacacgatggtctaggtctcctaccccaagaga

SEQ ID NO: 948820 - DNA, 120 bp, Artificial Sequence
  ENSG00000260963_6 (sequence is synthesized)
acttgcaacaaagcccaaagtacaacagccacgtttaaagagaagattccatttcagccagacaacatgattcatcatatttatttaatattgttaatttgaattttattagatctgtac

SEQ ID NO: 948821 - DNA, 120 bp, Artificial Sequence
  ENSG00000260963_7 (sequence is synthesized)
atctgtactgatgtttgtatttaatttctaatttgttttggtttcataattcactaaaacaataagcacaaagagtttctatctgactttatatattaacattttaataaaagtctttta

SEQ ID NO: 948822 - DNA, 120 bp, Artificial Sequence
  ENSG00000260963_8 (sequence is synthesized)
cgcagagttctataaggaagatggacttcagaaaagcaactagcacaccaagccccaatgttagggccagagatgtgttgtctcagtggtagcagaagcaaatgttattagctccacttt

SEQ ID NO: 948823 - DNA, 120 bp, Artificial Sequence
  ENSG00000260963_9 (sequence is synthesized)
atagctaaggaaaattaagcccaggaaatgagtccagtggaaggaaggctttcattccttcataaatattaattcaataattcaatagagtctccatacctgcactgtcttaggtgcagg

SEQ ID NO: 948824 - DNA, 120 bp, Artificial Sequence
  ENSG00000260963_10 (sequence is synthesized)
gagataccatgataaaagggcagacaatgttgctgccctcaaggagctgacattctagtggaggaagacagatgcaaaaaggaatgtatgcccacatcacacaactaaattgtggcatga

SEQ ID NO: 948825 - DNA, 120 bp, Artificial Sequence
  ENSG00000260963_11 (sequence is synthesized)
tggagttcaacaaaatatggatacagagagcaaggtttgagggtaaatttaaccaaggtagggtaatcagaggagcctgatctgaaaaggcaggaattaaaataagctctaaaggattat

SEQ ID NO: 948826 - DNA, 120 bp, Artificial Sequence
  ENSG00000260963_12 (sequence is synthesized)
ggcaatttgaagaattgaaatgaaactctaggactgggcacggagaatgtgaagaagtgaggaggggttggagctggagagataggtgggactggatcccatacaacttgaaaagaacag

SEQ ID NO: 948827 - DNA, 120 bp, Artificial Sequence
  ENSG00000260963_13 (sequence is synthesized)
tggagaggctgagtcaaatcaatctcctcacctgaggacttcctaagaccagcgcactgaaggaccagcagcaacaacaacaataatgctaatgctcccttatggacaagactgcaattc

SEQ ID NO: 948828 - DNA, 120 bp, Artificial Sequence
  ENSG00000260963_14 (sequence is synthesized)
tctgcctgctgaagctcagctatgaccacgtgacttgccttggccaatgaaagaggaagagtatgtaacactgctgaatggaagcaagtggcccctgcccctgctgcagagattctagac

SEQ ID NO: 948829 - DNA, 120 bp, Artificial Sequence
  ENSG00000260963_15 (sequence is synthesized)
atgtgtgccatgctggagcaaggagacagggagtcctggagaaaggagacatggaacagagctcccagcccagtcaatatgtaacatgagtgagaaataaataacactttgttgctagaa

SEQ ID NO: 948830 - DNA, 120 bp, Artificial Sequence
  ENSG00000260963_16 (sequence is synthesized)
aggttaatgggacctggactggaaaaggattgtttgtgtgggaatcattcatggcaaaggcagtgacacctccttcaaaaacctgtgtctttctggcagagtgttgctggagatggccac

SEQ ID NO: 948831 - DNA, 120 bp, Artificial Sequence
  ENSG00000260963_17 (sequence is synthesized)
caatgcaaattgctttggcttccacacagctcctgtcgcttcaagtgcggatggtaaatagccttccttgggattactatcaagtattcattttaacaacattaatttacaacgtgctat

SEQ ID NO: 948832 - DNA, 120 bp, Artificial Sequence
  ENSG00000260963_18 (sequence is synthesized)
ctgaagtataactcagcttcccctgacccatgcagaaagtcatctatcaatgttaagtatcactaaatttattttacagaagaagaatctaaagctcagagtagtggtctcaatatcact

SEQ ID NO: 948833 - DNA, 120 bp, Artificial Sequence
  ENSG00000260963_19 (sequence is synthesized)
cagcaattatgtgatggaagcatactgaaggcccacgttttaaagtggacaccaaggggaatatagcataaatagaaattttctaactgcagggaattcttgctatacaactgcaaagaa

SEQ ID NO: 948834 - DNA, 120 bp, Artificial Sequence
  ENSG00000260963_20 (sequence is synthesized)
ttcttgctatacaactgcaaagaataggccccactacttcctagctgtgcctcaatttcctgatcagttaaatgggactaataaaagagcagctagtggctgggtgcggtggctcacgcc

SEQ ID NO: 948835 - DNA, 86 bp, Artificial Sequence
  ENSG00000260963_21 (sequence is synthesized)
ctagtgcaagagatggagaagggattaaatgaaaatacatgtaaattgctcataagattatctagaataaaccgaacattcaaaaa

SEQ ID NO: 948836 - DNA, 120 bp, Artificial Sequence
  ENSG00000260962_0 (sequence is synthesized)
aaggaaatgatattctgaaacaaaaggccaactctaaaccttgggagatggtgacagttacaaaatgcaggcctgtgaaggaagtgtgtccataaaatgctgacaccatcttctttctca

SEQ ID NO: 948837 - DNA, 120 bp, Artificial Sequence
  ENSG00000260962_1 (sequence is synthesized)
tcagatgggtagagagagtttagaagctcaaaaccaccatcatcctttcactgttcctttctgagtgtcttctcagtaagtggaagatccttttctcaccttgagcttaacataaaatct

SEQ ID NO: 948838 - DNA, 120 bp, Artificial Sequence
  ENSG00000260962_2 (sequence is synthesized)
ttttgaaagtgacaattttttgttgttgttagtggtagttatggatttgctataagaatacagcaattgctaatatattgccatcaaaacaattaatataaataataatataggatgaca

SEQ ID NO: 948839 - DNA, 120 bp, Artificial Sequence
  ENSG00000260962_3 (sequence is synthesized)
atatagcatataactaacagtgtgaaccttggattcagaaaagcttggctttgaatcctgggtccattattactagctgtgtgcaaattattgaaaccctctcacctcaattttgcatcc

SEQ ID NO: 948840 - DNA, 120 bp, Artificial Sequence
  ENSG00000260962_4 (sequence is synthesized)
ataaaatgggatcataataacgattattcaaattcaacttaaagggaagtctgaattaaatgtgaaaatgtatgtataaatcacacaagtactcagtaaacagtcactattaacattgtc

SEQ ID NO: 948841 - DNA, 120 bp, Artificial Sequence
  ENSG00000260962_5 (sequence is synthesized)
agttcaatattctgaacaaatgtgttatatacattctatcaaaatcacgaatcagttgtatgtttttaatttgtttgtaaatatttgtcatgttgtcatttttagagaatttaaaaggaa

SEQ ID NO: 948842 - DNA, 120 bp, Artificial Sequence
  ENSG00000260962_6 (sequence is synthesized)
aaatagtgtcttgactaataccaagcattccacttacaagcatgttttccttttagcactgcctcttgttgcatatgggtccaatgccctgattttcaaaatgtggtaggaaactagtga

SEQ ID NO: 948843 - DNA, 120 bp, Artificial Sequence
  ENSG00000260962_7 (sequence is synthesized)
actggtatcaatgaatatcttgtagtttgtcctgttctcattcaacttgtaagttcactggatacatgcatgagtattttaattggccagaaaggcagttattgatctgggtcacatctc

SEQ ID NO: 948844 - DNA, 120 bp, Artificial Sequence
  ENSG00000260962_8 (sequence is synthesized)
cacaagattttatagagataggtttgaataaagtagtcctaaggcttaaatatcagaggcataaagggaagaagacattttgccacacactgtaaaaacaaataatcttgatcatgcaga

SEQ ID NO: 948845 - DNA, 120 bp, Artificial Sequence
  ENSG00000260962_9 (sequence is synthesized)
ctccatatcttacaatattgttaatttacattccacatcttagaacacttagactccaccacctactatggcaggcagaaaaggttcataacaataaaaaggattcctaaagatgtacaa

SEQ ID NO: 948846 - DNA, 120 bp, Artificial Sequence
  ENSG00000261618_0 (sequence is synthesized)
tgggaagatgaatggaaacagtcatagcttatctttgtatggcagagttgtgagaatggaatcaacactaagctgcatagatacttgtcttcagaatcttgatttttagccacaatcctc

SEQ ID NO: 948847 - DNA, 120 bp, Artificial Sequence
  ENSG00000261618_1 (sequence is synthesized)
actcccaccttctatacaacctgaaaaagagctttttgctaagagaaacccattgtcttctaattagatcacctctgaaggcacttttaaaaaatcacttcttttactaagtctgttacc

SEQ ID NO: 948848 - DNA, 120 bp, Artificial Sequence
  ENSG00000261618_2 (sequence is synthesized)
actctcatctttcgaaaatttgttgacatctattctctccccttctattctcattgcctcagtggaattttataatttttatttctttaaatttggggtggtttctagacaaagcagaaa

SEQ ID NO: 948849 - DNA, 120 bp, Artificial Sequence
  ENSG00000261618_3 (sequence is synthesized)
gtttctagacaaagcagaaataaaggtatatttcaattttctatcaagggatgtgaaggacctctttaaggagaactgcaaaccactgaccaagcaaataagagaggacacaaataaatg

SEQ ID NO: 948850 - DNA, 82 bp, Artificial Sequence
  ENSG00000261618_4 (sequence is synthesized)
taactcaagatggattaaagacttaaagtaagacctaaaaccataaaatcccttgaagaaaatttaggcaatgccattcaga

SEQ ID NO: 948851 - DNA, 120 bp, Artificial Sequence
  ENSG00000261618_5 (sequence is synthesized)
atcaaaagcaatggcaacaaaagccaaagttgacaaatgtgatctaattaaagtaaagagcttctgaatagcaaaagaaactatcatcagcatgaacaggcaacctagagaatgggagaa

SEQ ID NO: 948852 - DNA, 63 bp, Artificial Sequence
  ENSG00000261618_6 (sequence is synthesized)
attagagaaatgcaagtcaaaagcaacagatgctggagaggacatgcagaaataggaacactt

SEQ ID NO: 948853 - DNA, 81 bp, Artificial Sequence
  ENSG00000261618_7 (sequence is synthesized)
gcaacagatgctggagaggacatgcagaaataggaacacttttacattgttgatgggagcgtaaattagttcaaccattgt

SEQ ID NO: 948854 - DNA, 87 bp, Artificial Sequence
  ENSG00000261618_8 (sequence is synthesized)
tctagaaccagagatatcatttgaccagtataaataattctactttaaagacggatgcatatgtatgtttattacagcactattcac

SEQ ID NO: 948855 - DNA, 76 bp, Artificial Sequence
  ENSG00000261618_9 (sequence is synthesized)
aaccaacccaaatgctcatcaatgataggctggatgaagaaaatgtggcccatatacaccacaaaggacatggatg

SEQ ID NO: 948856 - DNA, 76 bp, Artificial Sequence
  ENSG00000261618_10 (sequence is synthesized)
aaaaaaggataagttcatgtcctttgagacaggaacagaaaaccagataccgcatgttctcactcataagtgggag

SEQ ID NO: 948857 - DNA, 80 bp, Artificial Sequence
  ENSG00000261618_11 (sequence is synthesized)
ggagttgaacagtgagaaagtggagggatagcattaggagaaatatctaatgtatatgatgggttgatgggtgcagcaaa

SEQ ID NO: 948858 - DNA, 120 bp, Artificial Sequence
  ENSG00000261618_12 (sequence is synthesized)
acgttctgcacatgcatcccagaacttagagtatatatatatatatataaaaatcctattgaccttaaaaaaaatcagatgaaattagctctttaaatgttttgtcctagctcccatcca

SEQ ID NO: 948859 - DNA, 120 bp, Artificial Sequence
  ENSG00000261618_13 (sequence is synthesized)
cccatccattgtcatgttttctgtggccacgtttaggcttgttctcagatctgtatttccaatctaaatcccatttctattctattattattactactacaaaaatagtaataaaaacaa

SEQ ID NO: 948860 - DNA, 120 bp, Artificial Sequence
  ENSG00000261618_14 (sequence is synthesized)
acatttaaataatatctaataaataccaactattcttctaagaacttgacatgtataaactcatttaagcttcaactctgtgaaatagggtatcagttatgtattgccaaaataacgcta

SEQ ID NO: 948861 - DNA, 120 bp, Artificial Sequence
  ENSG00000261618_15 (sequence is synthesized)
tatagcaaactaccccaaaacataaaactgtaaaaacataattacaacaatagacctttttatcctttctcacaagccactgtttttgctgatctgggccaagttcaaaagacattgact

SEQ ID NO: 948862 - DNA, 120 bp, Artificial Sequence
  ENSG00000261618_16 (sequence is synthesized)
tggcctcagttaggactgcttggctgttctctagaagttctctcattttcacaatgctagcctggacttatttccattgccataggagggttctaacagagagaaagagagcggaagcag

SEQ ID NO: 948863 - DNA, 120 bp, Artificial Sequence
  ENSG00000261618_17 (sequence is synthesized)
gcaatgcttcttaaagcctaggtttggaatgcacactgttacttcccacgtatggtattggacagagcaagtgaaaacacctagtgccaagagtatgcatccaggaaggggtaaagaaca

SEQ ID NO: 948864 - DNA, 120 bp, Artificial Sequence
  ENSG00000261618_18 (sequence is synthesized)
ggactagttttgccatttattaaggtattattattaatccttattttagaagaaactgatatatagaggagttaagcaacttgctcaaggtcgtggactaatgaaacaatggcactagta

SEQ ID NO: 948865 - DNA, 120 bp, Artificial Sequence
  ENSG00000261618_19 (sequence is synthesized)
tttaaatactgtcagtctggtttcattctgtgctgttaacttctacatggtgctgtcaacttctacatggtgctgtctctcagctgaaggaacgatagaggaggaaaggcaaaaggcaac

SEQ ID NO: 948866 - DNA, 120 bp, Artificial Sequence
  ENSG00000261618_20 (sequence is synthesized)
aatgggctttgaagtaactctactgagataattaaaagaccacataaaagaaggaaaacgtatcttacttcaggaattcaacactaagaatcctactcccttcgtgaaatcagaaaaggt

SEQ ID NO: 948867 - DNA, 120 bp, Artificial Sequence
  ENSG00000261618_21 (sequence is synthesized)
ttgcatgaaccctgtgggcctttgaaagagagaaggcatactgttgatggtcaccaacttactgaagcctgcagcttgcaggaacccatctcatcagagtaactgaaagagaacacagta

SEQ ID NO: 948868 - DNA, 120 bp, Artificial Sequence
  ENSG00000261618_22 (sequence is synthesized)
tccaaaaacaaaaacaacaaaagtcacgtgctgggataagttcttgatagtgtgaatagtcagaaaaaaatgttctgaaacttcttgtcccagctgcgttattaactgtgaatttcatca

SEQ ID NO: 948869 - DNA, 120 bp, Artificial Sequence
  ENSG00000261618_23 (sequence is synthesized)
tatggttgattaagttgctttataagactaaatttttataagatgtgtacataggaatatgacttccctctcctaagttaacataacaggtattcccaaatgtgttgtgaagtcgacatt

SEQ ID NO: 948870 - DNA, 120 bp, Artificial Sequence
  ENSG00000261618_24 (sequence is synthesized)
cttgttctaatttatagttgtattgctccctgcaatagcatcttctttcatttcccagtctccagtttttccattttgtttacagtagccagagaaatctatcaagatgcacacttgatc

SEQ ID NO: 948871 - DNA, 120 bp, Artificial Sequence
  ENSG00000261618_25 (sequence is synthesized)
acagcatccttcggtaaatcaccattatcttcatactgacaaaggtcagtctttaaggacctttatcaggtgtcctctctttagttccccaacctatttcttaccatcctttatccccca

SEQ ID NO: 948872 - DNA, 120 bp, Artificial Sequence
  ENSG00000261618_26 (sequence is synthesized)
cccagctaaataacttggagaattccaagtgcgtcatccactgtattagtctgttctcacatcgctaacaaagacatacctgagactggggaatttataaaggaaagaggtttaatggac

SEQ ID NO: 948873 - DNA, 83 bp, Artificial Sequence
  ENSG00000261618_27 (sequence is synthesized)
aagaggtttaatggactcacagttccgcagggctagggaggcttcacaatcatggcagaagacaaagcaagagcaaagggaag

SEQ ID NO: 948874 - DNA, 120 bp, Artificial Sequence
  ENSG00000261618_28 (sequence is synthesized)
atcagatcttgggagatgtgttcaatacgatgagaacagtgtgggggaaaccacccccatgatgccattatctccacttgtctctgtccttgacacatgggaattattataattctaggt

SEQ ID NO: 948875 - DNA, 120 bp, Artificial Sequence
  ENSG00000261618_29 (sequence is synthesized)
gagatttgggtggggacacagagccaaacaatatcatccaccttcatgtctctttctctttactcacctgctttcttgacaagaaatatcttcatcagcccttccttccttccctccctc

SEQ ID NO: 948876 - DNA, 120 bp, Artificial Sequence
  ENSG00000261618_30 (sequence is synthesized)
cctcctttctttctttcttgcttgcttgcttttccttcctttttcttctttatttcctttgccaatttgagagattggcaaggagagtaatgctggaattggagacacatataactaata

SEQ ID NO: 948877 - DNA, 120 bp, Artificial Sequence
  ENSG00000261618_31 (sequence is synthesized)
ccagccaaaataattgtgagcagaagtgatatgccttctgagccaaggcagagaaaagattatatgtgattctcagacctcttctcatcctcattggctaagaagggcataggtcccaga

SEQ ID NO: 948878 - DNA, 120 bp, Artificial Sequence
  ENSG00000261618_32 (sequence is synthesized)
tggaacagctatacgttaatggggccttcctccatttggatccctaagtaactgaaatggagcccctctccaacctgtgataaaattgtgctacaaaggagaactcaattttcttgtgct

SEQ ID NO: 948879 - DNA, 120 bp, Artificial Sequence
  ENSG00000261618_33 (sequence is synthesized)
aaaatactgagatttggaaattaatgtgtgctgcattataacctaggttattataaagatattattgaaaattacttttaatattcatttttgtcattattggtgaatttgaagtttcat

SEQ ID NO: 948880 - DNA, 120 bp, Artificial Sequence
  ENSG00000261618_34 (sequence is synthesized)
ataattattgaacacttatatgtcatttatatatttattatacttagttctttggcaaaatgctgtttatgtcctttgcctatttttctactagactgtttatgttgatttataaaacat

SEQ ID NO: 948881 - DNA, 120 bp, Artificial Sequence
  ENSG00000261618_35 (sequence is synthesized)
atttatatattaggctacagtaaccctttcatgtcattggtactgtttccaatttattaactgccttttattatcactttatgatgtattttatgtccaaaggtttaaaaattatatact

SEQ ID NO: 948882 - DNA, 120 bp, Artificial Sequence
  ENSG00000261618_36 (sequence is synthesized)
gagtaatcgataattatttaaaaattttgttcttattttatgagaaaggccttctaaaatctgataggttggtttttctctggatatactattttctattttttaaaacatgaaattcta

SEQ ID NO: 948883 - DNA, 120 bp, Artificial Sequence
  ENSG00000261618_37 (sequence is synthesized)
tactccattatgatttatgttgttgcatgctatctggtcggaatatagctttgtaatgaatacattcgtcttaaaactgacttggctttttctcctaaattaaaaagacaactctgatga

SEQ ID NO: 948884 - DNA, 120 bp, Artificial Sequence
  ENSG00000261615_0 (sequence is synthesized)
agatgatgtgactctcatttcctacctggtccctgctcacatggggaattttgacatctcacttgtcccagtgccaaacaaatgtgactcttcataagttctgcttgcgagagatattaa

SEQ ID NO: 948885 - DNA, 120 bp, Artificial Sequence
  ENSG00000261615_1 (sequence is synthesized)
gacatcttgtggagcttaacaacaatgtgacattactgttttgtcttggcctggacctcaaaaggcattgtgacatattgctgggcccagcaacaaggtgtgattttgacatacacctct

SEQ ID NO: 948886 - DNA, 120 bp, Artificial Sequence
  ENSG00000261615_2 (sequence is synthesized)
gccttgcacctgagtaatgtgactctttagcaccagcacagcctacagataggattgtgccacactgctggacccagcacctaggtgacgtaactctattctcctgctttggtgctaccc

SEQ ID NO: 948887 - DNA, 120 bp, Artificial Sequence
  ENSG00000261615_3 (sequence is synthesized)
ctacttatggctgggccttgacaaaaagagggattgggacatatccctggacgctgaacctaagaggtggaggttgccgtggtgacagagtgagacttcgccaaaacaaaacaaaaaaaa

SEQ ID NO: 948888 - DNA, 120 bp, Artificial Sequence
  ENSG00000261615_4 (sequence is synthesized)
caacaacaaaaaggggtactttctgcccacaaatgagattgtggcatctaaccctaaggtgatgttacttctttgctctggctgtgcccttagaaaacactgaaacatactgctgggtcc

SEQ ID NO: 948889 - DNA, 120 bp, Artificial Sequence
  ENSG00000261615_5 (sequence is synthesized)
agcaccaagattatgtgagttttctgcctgaaccctgaccacaggaagcattgtaacatatctcttgacccattgcaatttctcctatgggcaaagcccaggtaaatgccttcttttttc

SEQ ID NO: 948890 - DNA, 120 bp, Artificial Sequence
  ENSG00000261615_6 (sequence is synthesized)
tttagcacagctcatggttgtgatgatgacacttacgccacaaaacagccaataggagagatactgccacttgtagctagacttacagaaatgaataaactcctgagtcttctgtagtaa

SEQ ID NO: 948891 - DNA, 120 bp, Artificial Sequence
  ENSG00000261615_7 (sequence is synthesized)
ggaggaaattgtaacgtatctctgaccaaccacccaggtgataacacttctgcctgattcctgttctcagggaagattgtgacatatccctggcccagcacccagatgacgtaactctcc

SEQ ID NO: 948892 - DNA, 120 bp, Artificial Sequence
  ENSG00000261615_8 (sequence is synthesized)
tgtgcatgccctatccacacgtgtgattttgacatacacctctgccttgcacctgagtaatgtgactctttagcaccagcacagcctacagataggattgtgccacactgctggacccag

SEQ ID NO: 948893 - DNA, 120 bp, Artificial Sequence
  ENSG00000261615_9 (sequence is synthesized)
cacctagaagcaggatatgtacagaattgttgatctcatctgtggaccttcctgcaagcacgattgtgccatatgcctctgtatacgcaagggtgattgtgccatatgcctctgtatagt

SEQ ID NO: 948894 - DNA, 120 bp, Artificial Sequence
  ENSG00000261615_10 (sequence is synthesized)
ttgtctacagtgggaattgtgatatgactcttctttcattcttgggcccttttcagtggggtgattggaacataaagctgagccccatatctaggttatgtctttcctcttgtttatgag

SEQ ID NO: 948895 - DNA, 120 bp, Artificial Sequence
  ENSG00000261615_11 (sequence is synthesized)
ccctacccacagaaggcattgtgacatatccctagccttttacctagataatatgacatttttgcctaggccttctcctcagggggtattgtgaaatattgctgaactgagaacctaggt

SEQ ID NO: 948896 - DNA, 120 bp, Artificial Sequence
  ENSG00000261615_12 (sequence is synthesized)
gatgtgactctcctctgctgcctgggccctgtatacgttgtgtattgcaacacatctctgtgtccaacactgaggtgatgggccctcccacagatatattaaacacatctttgtatttat

SEQ ID NO: 948897 - DNA, 120 bp, Artificial Sequence
  ENSG00000261615_13 (sequence is synthesized)
atatcgctgctgtcccctacaagttatgtgactctcttgcctgtgctctgccaacatgggccattgtgacatgttgctgggtccaaaacctaggttctgcctgcagaagagattgtaaca

SEQ ID NO: 948898 - DNA, 120 bp, Artificial Sequence
  ENSG00000261615_14 (sequence is synthesized)
tgttgctgggcaccttgggcctgccctcagaaggcattatgacatattcctgggtccaacaccaaggtgatgtgcgtctcctggctggaccctgcccacagtgggcactgtgacatatct

SEQ ID NO: 948899 - DNA, 120 bp, Artificial Sequence
  ENSG00000261615_15 (sequence is synthesized)
cttggcccatcagattgttcatgttatccccttccctttttttcctggtgtttgcccatgagagacattgtgatgcatttctggacctagcacctaggtgatatcttcctgggacctgtc

SEQ ID NO: 948900 - DNA, 120 bp, Artificial Sequence
  ENSG00000261615_16 (sequence is synthesized)
caatcattaggcccagcaaccagagcccactggtgaggtcctgaatcacacgtgaatgccgttcacagttggaattttcactgtcataagtgaacatctggccacagttgggatggtgac

SEQ ID NO: 948901 - DNA, 120 bp, Artificial Sequence
  ENSG00000261615_17 (sequence is synthesized)
tcatttctaaacccagcttgtaggaaggtgaggactctcctatctggactcaaccaattggagagatgttgactgtcatatctggacgtagaaccacagggaagactctggatctccttc

SEQ ID NO: 948902 - DNA, 120 bp, Artificial Sequence
  ENSG00000261615_18 (sequence is synthesized)
ctgtatgaaggtcacagaggatcaccattcttgcatattgtataaagccttcaggtgacacagagagtgtcataagagaacacagcacacaggtgggctagtgactctcagaccaagatt

SEQ ID NO: 948903 - DNA, 120 bp, Artificial Sequence
  ENSG00000261615_19 (sequence is synthesized)
cagcacacatgtgaggctgtaactgcactgaaaggacaagtctgcagaataaactgtggctgtcttgcaaaaattctgtcaaccattgagactgtgactcacacacttagatccaacatc

SEQ ID NO: 948904 - DNA, 66 bp, Artificial Sequence
  ENSG00000261615_20 (sequence is synthesized)
actcacacacttagatccaacatcgcaggcggatcaccggaggtcaggagttcaagaccatcctgg

SEQ ID NO: 948905 - DNA, 79 bp, Artificial Sequence
  ENSG00000261615_21 (sequence is synthesized)
cacaccattgcatcaaaagcaaaaacaaaatagataaatagatccaacatccaggaggtgttgactctcatacctagaa

SEQ ID NO: 948906 - DNA, 120 bp, Artificial Sequence
  ENSG00000261616_0 (sequence is synthesized)
gtggacagcatgcccatggcctgctgggtggccagagtccttttgtcctgcggtccatataagagggtctggatctggagacactgtagaacaccaagcagctatcatgaggctatggaa

SEQ ID NO: 948907 - DNA, 120 bp, Artificial Sequence
  ENSG00000261616_1 (sequence is synthesized)
gtgtcgctgagagcaggaaactaaggtctcccttgaatgagagaaagatgacctcattcttaggccctgctgtgatggaattagcatgctcctgggatgtctcctagtgactgacctttg

SEQ ID NO: 948908 - DNA, 120 bp, Artificial Sequence
  ENSG00000261616_2 (sequence is synthesized)
gtttggatgttctgagggatctaggcaaaagtgaacagttttagcactatttcacaaaactctctgtgactatctgtatgcaaaaaatagatttaaaagtagtatttttaaaaataaagg

SEQ ID NO: 948909 - DNA, 120 bp, Artificial Sequence
  ENSG00000261616_3 (sequence is synthesized)
caagaaccttggtactgaccagaggatgggctccagtttctatttttaaatgtggcccttgttatagcctggaaaagatttaaaaaaatagttttgttttttttgtaaacacatactcta

SEQ ID NO: 948910 - DNA, 120 bp, Artificial Sequence
  ENSG00000261616_4 (sequence is synthesized)
cttttattaatatataggctgtctatactcttgactacacagcaatgtcttagttattaggaaccaaatattcagcttatggactacccagggctggctttggcttgatttctcccttct

SEQ ID NO: 948911 - DNA, 120 bp, Artificial Sequence
  ENSG00000261616_5 (sequence is synthesized)
gcttactttaagtcttgccatttgattgcttgtagtaggctagggcaaatcaaggagaggagaaagattaaagttgtgcccaaaatggccaaaataattttgagaaagaatgaggtggag

SEQ ID NO: 948912 - DNA, 120 bp, Artificial Sequence
  ENSG00000261616_6 (sequence is synthesized)
aggtggaggaacttgctttactgaatgccaaagacccttttatttttttaaataaagtaattaagacagcatgtttgtcacccggggtagacaaaaagaccagtggaacagggcagagag

SEQ ID NO: 948913 - DNA, 120 bp, Artificial Sequence
  ENSG00000261616_7 (sequence is synthesized)
cccaagccttgacagatgacagaaatggccttgcgggattggtgaggaagaggtgggctagtcaataaatgggtactgggaccgctggttttccaaatggaagaaaatggatcactaccc

SEQ ID NO: 948914 - DNA, 120 bp, Artificial Sequence
  ENSG00000261616_8 (sequence is synthesized)
caaatcaaacacaaatattaagctcaagaaagatttgaaggactaagtgtgaaatgcaaaacttggagcttttagatgaaaatactggaaaatatatatatatatattttttgatggagt

SEQ ID NO: 948915 - DNA, 120 bp, Artificial Sequence
  ENSG00000261616_9 (sequence is synthesized)
aatacgatcttgaggtagggaagtatttcttagacaagatctagacaaagcaaaagtgaaagactgataaaatgtaactatgtgaaaacctaaaatatttgtgcaccaaaattcaccata

SEQ ID NO: 948916 - DNA, 120 bp, Artificial Sequence
  ENSG00000261616_10 (sequence is synthesized)
agcaaagtagaaagacaagccacgctgaggaaagattcttgcagtgcacagaaatgagaaaggtttaacattcagaatacatgaagaattcctataaggtaatgagaaataccaaaccaa

SEQ ID NO: 948917 - DNA, 120 bp, Artificial Sequence
  ENSG00000261616_11 (sequence is synthesized)
accaaaacctctcaatagaataacactcaaaagatataaacagattattcaaagagttgaaatctgatgaaataaacatgcttaatctcattaacaaccagaaatacaaactaaaacctc

SEQ ID NO: 948918 - DNA, 120 bp, Artificial Sequence
  ENSG00000261616_12 (sequence is synthesized)
aatgagggggatctgtgaaaatgtgcagctgttactcagggccattttcatagcagcatcctgcagaagtagattggtggtgtctcccttcctcccttaacctcctgcctaaggtcccag

SEQ ID NO: 948919 - DNA, 120 bp, Artificial Sequence
  ENSG00000261616_13 (sequence is synthesized)
aattgcatcataacatctattgaggaatttcagatgatgaaggtactgatggaacacatcctatttattcatggagacagtgcagcaaggactgcaactagagggtcatttaagttacaa

SEQ ID NO: 948920 - DNA, 120 bp, Artificial Sequence
  ENSG00000261616_14 (sequence is synthesized)
ggctacgtgactccataatagaaaattgagaaaagcatactattcatttctggtaaggttccaagccaggctcgtcaagctattacttgtattttgtacttacatgaaatgaaaaagcta

SEQ ID NO: 948921 - DNA, 120 bp, Artificial Sequence
  ENSG00000261616_15 (sequence is synthesized)
aagaaaggtaaattttaaaaaattgctctaatgctgaggatctgaaatcactactcttctttatacacattatccaatgccagattacgtccacgggggagaaattactcagaaacttga

SEQ ID NO: 948922 - DNA, 120 bp, Artificial Sequence
  ENSG00000261616_16 (sequence is synthesized)
aaattgtgcttctgttttcatgtcaattctcaaggctgatactaagagaaaaggtgacttcggaagccttactacgtggaagcgtgaaatgtgataaatctttcaagaaatacaagtacg

SEQ ID NO: 948923 - DNA, 120 bp, Artificial Sequence
  ENSG00000261616_17 (sequence is synthesized)
ctttcatttaccaaccattacaaggcaggcagaaatgactaacttgggggaattgaaggaataaaccaaaacgtaattcatcagacaggcttcccctacagaaacacagtcaggggtagt

SEQ ID NO: 948924 - DNA, 120 bp, Artificial Sequence
  ENSG00000261616_18 (sequence is synthesized)
gggtggtttttctgagccacccagataccagcctcatcctggctggacccacgtctttgtccacattcgccacttcctgaagcagctgtctgctgaacaccagcaacacgccaaccctgt

SEQ ID NO: 948925 - DNA, 120 bp, Artificial Sequence
  ENSG00000261616_19 (sequence is synthesized)
ggctacttcggggatggagtggagaatgggcagaagtgagccttgctctcagggggcttctaatggagtagcggagaaagatatttttaaaatacataaataaacgtgtcaacaacttgt

SEQ ID NO: 948926 - DNA, 88 bp, Artificial Sequence
  ENSG00000261617_0 (sequence is synthesized)
ccatgctcttctctcgaaagtgagtgttcctcccccttggctcagcacttacccttcctgccgccctgtgaagaggtgccttccacca

SEQ ID NO: 948927 - DNA, 120 bp, Artificial Sequence
  ENSG00000261617_1 (sequence is synthesized)
tgaagaggtgccttccaccatgattgtaactttcctgaggactcccaagccatgcagaactggcttctatgaggctgtcttgtaggatgcccatgacgatcctccagacactaagatgag

SEQ ID NO: 948928 - DNA, 120 bp, Artificial Sequence
  ENSG00000261617_2 (sequence is synthesized)
cactaagatgagaaaactaaggcccaaagggacacctggctttcctaagacctgtaagtggaagagtcagcatttgaatggagaactcgcagctttcggagtctagacttgttttacctc

SEQ ID NO: 948929 - DNA, 120 bp, Artificial Sequence
  ENSG00000261617_3 (sequence is synthesized)
accagactgcttctactcctagtgattccttcccttagattaagccttgctctcttcccgtgcaatcatgaagaggattatattagtaaatccctgaacattccctgattggggagtgag

SEQ ID NO: 948930 - DNA, 120 bp, Artificial Sequence
  ENSG00000261617_4 (sequence is synthesized)
ggtcaaaccaaggcaaatggcaggattgacactcacatcaagggctggctcattaagggctcgggacctggcgatcgagttgcattgcagattttggaagtatgcaagaccacgccagcc

SEQ ID NO: 948931 - DNA, 120 bp, Artificial Sequence
  ENSG00000261617_5 (sequence is synthesized)
acctttccagggagagaccatgcaaagaaggcaggtgatccaagggctgggagtggtgaggactgctccagcccctgagcagctgtcatcccagcacaaagtgtcagaagagacctcaaa

SEQ ID NO: 948932 - DNA, 120 bp, Artificial Sequence
  ENSG00000261617_6 (sequence is synthesized)
gtgtggtctgcagacgaggcagcatctgcatcacctgggagcttgttagaaatgcagaatcttctgagagaaccagacctgctgcatcaaaatctgcattttaacaagattgtaacttag

SEQ ID NO: 948933 - DNA, 120 bp, Artificial Sequence
  ENSG00000261617_7 (sequence is synthesized)
atacacagtaacacttaaaaaggatggggcagagaggctaagtcagcagcttctcatcacactccaatctgatgctgctagtgctccaaaaagctctcatatcctcactgactagcctag

SEQ ID NO: 948934 - DNA, 120 bp, Artificial Sequence
  ENSG00000261617_8 (sequence is synthesized)
ggctgtgtctatcaatgcattatatgacacagatgaagactattgtgtaccttcctcaatttttaccccattgtttcagccttttgtacatctttaatgcaaacatccatgcgagaattc

SEQ ID NO: 948935 - DNA, 120 bp, Artificial Sequence
  ENSG00000261617_9 (sequence is synthesized)
ttgtgacattaattttttggaacaacctgttttgcagagcaaatttcattaagccattttaatccagagtttaattttttatacagctcgactcaatcatttccattttttttccattag

SEQ ID NO: 948936 - DNA, 120 bp, Artificial Sequence
  ENSG00000261617_10 (sequence is synthesized)
aatgtctatttgtagtaacattattttcatgggatcaattattttctgtttaaatttacaacaggcatttgactcatcagtctctttttatataccatctttttgctgattctgacttct

SEQ ID NO: 948937 - DNA, 120 bp, Artificial Sequence
  ENSG00000261617_11 (sequence is synthesized)
gctatttggagaggttttcttgtttgtgtgtttgattcttttgtggccattctttctattaagtgaaaatcgtctggatcaaattttgtagatttaaattttgttattagtgatacctgt

SEQ ID NO: 948938 - DNA, 120 bp, Artificial Sequence
  ENSG00000261617_12 (sequence is synthesized)
tttttttccctgtcaattttagctcattacacattctagtcattttaaccctgctagttttgttagttgctgatcacttttaccataccagtaatacgtggtagaaataatcaccagaat

SEQ ID NO: 948939 - DNA, 90 bp, Artificial Sequence
  ENSG00000261617_13 (sequence is synthesized)
ttttttttttgtttttttttttttcctgccttatacttgagacttagtgcatggcacatagaaagtgctccatatgttgcactttgggaa

SEQ ID NO: 948940 - DNA, 120 bp, Artificial Sequence
  ENSG00000261617_14 (sequence is synthesized)
gcctgggtgacagagcgaaactccatttaaaaaaaaaagaaagaaagtactccataaatatttgtaggtggaaagaatgatattcacatatgatttaatcaaagactgacagtttatcta

SEQ ID NO: 948941 - DNA, 120 bp, Artificial Sequence
  ENSG00000261617_15 (sequence is synthesized)
tttgataaaaagactgtgagaagcagagattgatggagacaggagagaaagtggaggagaagagaagatggagacagcacacacacatgcacagacttgaacatgcagacacacattgca

SEQ ID NO: 948942 - DNA, 120 bp, Artificial Sequence
  ENSG00000261617_16 (sequence is synthesized)
catgcacatgcatgcacacagccacacacgtatacacaaacacacatgcgtgcacacagccacacgtatacacaaacacatgcgtgcacacaccacacacatatatgtaagcacacatgc

SEQ ID NO: 948943 - DNA, 120 bp, Artificial Sequence
  ENSG00000261617_17 (sequence is synthesized)
atgcacacaggcatacacatatacataaacacgcatgcacacagccacacacatatacacacaagcatgcacatacacagaggcatatatacacatgcactaacatacgcatagtcacag

SEQ ID NO: 948944 - DNA, 120 bp, Artificial Sequence
  ENSG00000261617_18 (sequence is synthesized)
atacacctgtaggtgcaaacacctatatatgtgttcacattcatacacgggagttattatatttgtgctcacacatgtagagggtagaattgtggttattagatgctgggaagagtagag

SEQ ID NO: 948945 - DNA, 120 bp, Artificial Sequence
  ENSG00000261617_19 (sequence is synthesized)
gaagagaagatagggagaggctggttggtggatacaaagttacagctgaatgagagataattttgactgttctgtatactgtaggatgaatatggttaacaataacttagtgtatatttt

SEQ ID NO: 948946 - DNA, 120 bp, Artificial Sequence
  ENSG00000261617_20 (sequence is synthesized)
gatcttgaatgttcacagcacaaataaatgataaatgtttgaggtgatggatatgctactctgatttgatcattacacattgtataaatgtattgaaaaatcactctgtatcccataaat

SEQ ID NO: 948947 - DNA, 120 bp, Artificial Sequence
  ENSG00000261617_21 (sequence is synthesized)
atgtataattattatgcatcaactaaaaattaaagaccacacatatatgcacacatagacatgcacatgaacacacatactcatgcatatgtgtatacatgcagagttacacatatacac

SEQ ID NO: 948948 - DNA, 120 bp, Artificial Sequence
  ENSG00000261617_22 (sequence is synthesized)
aaacacacatatatgcacacatagacatgcacatgaacacacagacatactcatgcatatgcgtatacatgcacagttacacatacacacacatgcacacatagacatgcacatgaacac

SEQ ID NO: 948949 - DNA, 120 bp, Artificial Sequence
  ENSG00000261617_23 (sequence is synthesized)
acagacatacacatgcatatgcgtatacatgcagttacacatatacacaaacacacatatatgcacacatagacatgcacatgaagacactatgcacatgtccacacatgcacacagcca

SEQ ID NO: 948950 - DNA, 120 bp, Artificial Sequence
  ENSG00000261617_24 (sequence is synthesized)
cacacatacatatatacacaaatacccataaatatgcacatgtagacagcatgcacacagagatacatatgcacacacacagccacatgtatacacacttgtgcaaatgtatgcacacac

SEQ ID NO: 948951 - DNA, 120 bp, Artificial Sequence
  ENSG00000261617_25 (sequence is synthesized)
agacacacatatgcccatacataggcatatacacgtacagattcagatataaacacatacaaacactcatgtacatatgcaaacacatgtacacacacagtctgctggcatagtgatggc

SEQ ID NO: 948952 - DNA, 120 bp, Artificial Sequence
  ENSG00000261617_26 (sequence is synthesized)
taaaccaatgcagggtagggtaaaatgtctctggtgcaaggtcagtaggataaaatctgcaggatcaaatggaatgcttaacaacactcctctgtggggtatcagtgtctccattttaca

SEQ ID NO: 948953 - DNA, 120 bp, Artificial Sequence
  ENSG00000261617_27 (sequence is synthesized)
accagtgcttaatcaaatgcacattgagttgaactgaatattggaaaatgaattgctacctttgaatgaatctactgaaaaattatacttgtcctgggtcagaccgtgtgaaaagcactg

SEQ ID NO: 948954 - DNA, 120 bp, Artificial Sequence
  ENSG00000261617_28 (sequence is synthesized)
ggtattggagatgaaaagtggttggccctttttctttgaaagcttagtccagtggggaagatggatgtggaagctgagcaattaaaatgcagcttgataaaagctgtgctgaaaaaccct

SEQ ID NO: 948955 - DNA, 120 bp, Artificial Sequence
  ENSG00000261617_29 (sequence is synthesized)
cactgagctgagcagtgggggctgggagggagcaggtcttaaactgaatgatcaggtttagtgggagctgtttaaattctgagccatcaggcatttttgctggattcctttcggtgcgct

SEQ ID NO: 948956 - DNA, 120 bp, Artificial Sequence
  ENSG00000261617_30 (sequence is synthesized)
tgttaatcaattataaaataataataatgaacacttcaggagagaggatggaggttgaaagacagtggagggctggacttgaggttggaagatttgcagagacctggattgtgcattcga

SEQ ID NO: 948957 - DNA, 120 bp, Artificial Sequence
  ENSG00000261617_31 (sequence is synthesized)
cctttacaaattgaagcgagaggctttgcatctctgaacatcaggattccactctataaaaaggagaatgaaagcattcagtttataggtttgctgtgagggctcaacgagaatgtggat

SEQ ID NO: 948958 - DNA, 120 bp, Artificial Sequence
  ENSG00000261617_32 (sequence is synthesized)
ccaaaaaagctttggaaaccaaaataccgctagttagcttgctgctttattatccaaaagaggctgcaaagatttgaggtttgtttgtagtttgtttgtagattagtcagtgtctactaa

SEQ ID NO: 948959 - DNA, 120 bp, Artificial Sequence
  ENSG00000261617_33 (sequence is synthesized)
aataacactgtgtaacaaccatgcccaaatcttggtggcttaataccttaaacgttatttttctcattcatgaggctgtaggtgggttggaatttggcagatgtaggctggaattagctg

SEQ ID NO: 948960 - DNA, 120 bp, Artificial Sequence
  ENSG00000261617_34 (sequence is synthesized)
gacctgcctccaggaccagggttggacccaagtcttctgtacgtgtcaccttcttttggtgccagtgctacctgggattttaatttcatggttttgcagaagcgtaagagggcatgccaa

SEQ ID NO: 948961 - DNA, 120 bp, Artificial Sequence
  ENSG00000261617_35 (sequence is synthesized)
ccacgtgaacacttttaaagcctaacatcctataggccaaagccagccacaggtccaaactcaacttcaataggcagggaaagtcctccacctactttaccaggggagtactgcagagca

SEQ ID NO: 948962 - DNA, 120 bp, Artificial Sequence
  ENSG00000261617_36 (sequence is synthesized)
atgaccgaggaaggaaatgtttaatcctattagggagggagggggggaccaggaacacaaatccctcaaggcaggacgagtaatggttggctgcccaaggttgacagactgggtctcagt

SEQ ID NO: 948963 - DNA, 120 bp, Artificial Sequence
  ENSG00000261617_37 (sequence is synthesized)
tcctggcactgctcctctctagccatgagactttaggcaagtcaacatttcagagcctcagtttcctcatctgtaaagtgggtataataatagaattctcacagaatttcagtgaggatt

SEQ ID NO: 948964 - DNA, 120 bp, Artificial Sequence
  ENSG00000261617_38 (sequence is synthesized)
gcctgattcatgacaacagccttataagtggtccccttcttttacctcgcatcttctgtaatctcttctctatgcttcatcctttaaatacaaaagtcacccgtaaagacagaaaacaga

SEQ ID NO: 948965 - DNA, 120 bp, Artificial Sequence
  ENSG00000261617_39 (sequence is synthesized)
ttagtggtggccagaggtggtggagggagagagggggagaaatgagagaagtgctaaggggtatgaggtttccttttggggcgatgaaaatgttctaaaatcgatgtggttatggttgta

SEQ ID NO: 948966 - DNA, 120 bp, Artificial Sequence
  ENSG00000261617_40 (sequence is synthesized)
caactgcaaatatacaatccctctgcctggaaccttttccccaagaaatctgcccccaccgtaaatcctcacttgcatactgtataatgaggcttttctggaccaccctatttaattacc

SEQ ID NO: 948967 - DNA, 120 bp, Artificial Sequence
  ENSG00000261617_41 (sequence is synthesized)
cactcctttctgtccatgcctctctctcgatatattttctctgaatgtttgtagcaacttgacatattttgcatgcttatacactatgtactttatattaaagcacagttatgtaattta

SEQ ID NO: 948968 - DNA, 120 bp, Artificial Sequence
  ENSG00000261617_42 (sequence is synthesized)
gtgacagtgctgatctaatccatgagcaaacagcgtggaccaaaacagtccccaggagaggctggtgcaggaaggctcagacactgtgttctctgacataatttatagacggggtctcac

SEQ ID NO: 948969 - DNA, 120 bp, Artificial Sequence
  ENSG00000261617_43 (sequence is synthesized)
cttctgacctcaagtgatccacccacccccgcctctccaagtgtggaattacagggcttctatgaggctgtcttgtaggatgcccatgacgatcctccagacactaagatgagaaaacta

SEQ ID NO: 948970 - DNA, 120 bp, Artificial Sequence
  ENSG00000261617_44 (sequence is synthesized)
gtcccgccaacaaccacatgattcattttggaagcagatcctcccctacatgagccttcagatgatcacagccacatatgacagcttgatggcaacctcatgagagagacagaactgaaa

SEQ ID NO: 948971 - DNA, 120 bp, Artificial Sequence
  ENSG00000261610_0 (sequence is synthesized)
gtaatacgtgctcattccatcttcaatggaacaaatgaatgttgctgcatcgagcatctgtttactcacatcttcattctctaaccactctattgattctttatcttgacccgcaagcat

SEQ ID NO: 948972 - DNA, 120 bp, Artificial Sequence
  ENSG00000261610_1 (sequence is synthesized)
acttacgtctcatcttggtgacaaagagccctcccgtggcccaggcacctcgctgaactgctctcttatttttaaccgcactgactttgcccactcaacacttcaactctgggcttttgg

SEQ ID NO: 948973 - DNA, 120 bp, Artificial Sequence
  ENSG00000261610_2 (sequence is synthesized)
tcctccaggcatcttgctgaaactactctcttgaaggccgccagtgagttcctacaaagtgttactgtctgtctgaaatccctaaaatttccaacaatttaaaattgttctcccctttaa

SEQ ID NO: 948974 - DNA, 120 bp, Artificial Sequence
  ENSG00000261610_3 (sequence is synthesized)
cattttcttcttgattgcccgcatttctgagcgaggcataatgatgtatgcaggggctggatgccatggggcctggggtttgtggtaaaatgtcggtaaagtaaccacacagcaaaaggg

SEQ ID NO: 948975 - DNA, 120 bp, Artificial Sequence
  ENSG00000261610_4 (sequence is synthesized)
atagtatggccctcatcttaatctctgctgattatttatgaatgggcacgggtgggggttcattatatctgcacttttgagtgtgtatggtttattttaggtcgtctcactctgtcgccc

SEQ ID NO: 948976 - DNA, 120 bp, Artificial Sequence
  ENSG00000261610_5 (sequence is synthesized)
ggcctcctgcctccttgctgctgctttgccggagttcaccttcctcctgcttctcccgggctctgcctttgccctcctttctctctctgcagtctctcttggctacttccgccctgccag

SEQ ID NO: 948977 - DNA, 120 bp, Artificial Sequence
  ENSG00000261610_6 (sequence is synthesized)
gatttcagtgatcattcctgtgtctctaattcccacagccctcaattgtctccccgggtccctggtcctgagtttctaatgatctgccgacatcccctggatatgccctgtgtactctct

SEQ ID NO: 948978 - DNA, 120 bp, Artificial Sequence
  ENSG00000261610_7 (sequence is synthesized)
gtctcacacctgacccttttgtatatatacagttcttacttgtccttcaagatcttgcttgagtgccacttcctccaggaagcccttgctgatttctcagtcagatgtcatttctcccac

SEQ ID NO: 948979 - DNA, 120 bp, Artificial Sequence
  ENSG00000261610_8 (sequence is synthesized)
ttcattattcttaaatgacttcagcatggtctgaccttattacttagattttgtattctagttttgtgggaactgttcctggaatactagggttgtgttttccagagatccaacatgttg

SEQ ID NO: 948980 - DNA, 120 bp, Artificial Sequence
  ENSG00000261610_9 (sequence is synthesized)
tgggaccttgtacactggaggcaattcatactttgtagaccagttatgatggtaaatggaaaaatctgaaaaaaaaaaagctgagaaaaatggttccaccaaagtattcaaaattgcttt

SEQ ID NO: 948981 - DNA, 120 bp, Artificial Sequence
  ENSG00000261610_10 (sequence is synthesized)
tcatatttcagaattgacatataagagtaaaaagaaagtaacccaaactgcagtggtgctgtggggctagcataaaatgttaatcaggtaaataggaactcaaaggaaatttaccaaatt

SEQ ID NO: 948982 - DNA, 120 bp, Artificial Sequence
  ENSG00000261610_11 (sequence is synthesized)
gagctcatttacatgtgtaattacccatctgtgatcattctactgttctatttattctgtctttctcctcccacactgggttaaaaatactttgtattaaagattttcttcataaccaaa

SEQ ID NO: 948983 - DNA, 120 bp, Artificial Sequence
  ENSG00000261613_0 (sequence is synthesized)
cactattttgcttatcaaagtctcttaaaggaggtgacttacctacgctatggacccaattactcagccaataagaggacacggtccctgcccatagaaagctgatgtccagcctgacct

SEQ ID NO: 948984 - DNA, 120 bp, Artificial Sequence
  ENSG00000261613_1 (sequence is synthesized)
caatacaaaaccatccagttaaagtggtgggggtggctatgcagagacgggcgggtgccgggagagtcaagggcagccccttggctggccaggggctcagacagaccagctggggagatg

SEQ ID NO: 948985 - DNA, 120 bp, Artificial Sequence
  ENSG00000261613_2 (sequence is synthesized)
catcactcgcccaggaaaactgatgacagcttagatggcactgcaagagcagggaggatcacactcatgtccagaaagtgaaacataaaacagctaaacatgtaccacacagctttcata

SEQ ID NO: 948986 - DNA, 120 bp, Artificial Sequence
  ENSG00000261613_3 (sequence is synthesized)
aacatgtaccacacagctttcatacaaaaattttatatacacaaattttgaaaaaatagagatggggttttgcttgttgtcccggctggtttcgaactcctgaactcaagtgatctgcct

SEQ ID NO: 948987 - DNA, 120 bp, Artificial Sequence
  ENSG00000261613_4 (sequence is synthesized)
attacaggcatgtgccaccatgcctggtgactttttttctgttttgagacggggtctcactctgtctcccaggctggagttcagtggcatgatcatagctcactgcagtctcgacctcct

SEQ ID NO: 948988 - DNA, 120 bp, Artificial Sequence
  ENSG00000261613_5 (sequence is synthesized)
tcctcccacctcagcctcctgagtagtgggaccacaggtgtgcaccaccgtgtccagctaatttttgtagagatggggtctcatcatgctgcccaggctggtctcaaactccagggctcg

SEQ ID NO: 948989 - DNA, 120 bp, Artificial Sequence
  ENSG00000261613_6 (sequence is synthesized)
ctccagggctcgagtgatccgccatccttggcctcccaaagtgctggattacagacctgagccaccacaccaggctgccccacacattgtaaagtttcgcttccctctaatgtcagattc

SEQ ID NO: 948990 - DNA, 120 bp, Artificial Sequence
  ENSG00000261613_7 (sequence is synthesized)
caaagacagcagccttcatgagtcagaaagaaacatcggtcattttgaaatcaacatccaactgaagtgtagaaaggcctctggatttttgaaacggcaacaacagatgatgtaatacaa

SEQ ID NO: 948991 - DNA, 120 bp, Artificial Sequence
  ENSG00000261613_8 (sequence is synthesized)
aaagcgaatgcagtcccatcaagaccacagcattggctgagcagctactccatgctgggcaccgtcctgggcactggaagtacagcagagaacgaaaccaagaccacaccctccagaagc

SEQ ID NO: 948992 - DNA, 120 bp, Artificial Sequence
  ENSG00000261613_9 (sequence is synthesized)
ctgcattccagcaggacagacagacttccatacacagagcaggaaaatgcacagcgtgtcagatgatgatgattactatgagaaaaataaagcaggcaaagagaacaggactatttggat

SEQ ID NO: 948993 - DNA, 120 bp, Artificial Sequence
  ENSG00000261613_10 (sequence is synthesized)
gagggtggtgcaaattcaaataatcagacagcctttgctgggaaggtgatatctgagcaaagattcgagaaggtggggagagccccggagccttccccgcagagcagaggaggcccggga

SEQ ID NO: 948994 - DNA, 120 bp, Artificial Sequence
  ENSG00000261613_11 (sequence is synthesized)
agctctggactcatagcggttcagcacggccacgacacggccacttccagacagagcccctggctgctgggtagggaccgcagcacctcagagaaccctttctggggtcacttctggcac

SEQ ID NO: 948995 - DNA, 120 bp, Artificial Sequence
  ENSG00000261613_12 (sequence is synthesized)
cctctgcaaacctcaagggggagcgtgaggctgggggctgtccatcagggtccaggcacctcctgaaggaacctctcaaagccagccgatcaccggctccagacccacgctgtcagacat

SEQ ID NO: 948996 - DNA, 120 bp, Artificial Sequence
  ENSG00000261613_13 (sequence is synthesized)
ctctgtggccaccagaccactgccactctcacgggtgtgatgacatgggacctgcctactggtagtcttctgccttcgtggaattctgcaacttccttcctgcctcggccacagcatgtc

SEQ ID NO: 948997 - DNA, 120 bp, Artificial Sequence
  ENSG00000261613_14 (sequence is synthesized)
agccaagcacctgtcagggtccctccctggcaggacgatgtttagaagctcaacaccttgctcctgcctcctcttcagacccatcagaacttgctaccatgggtgtgttttaataaataa

SEQ ID NO: 948998 - DNA, 120 bp, Artificial Sequence
  ENSG00000261613_15 (sequence is synthesized)
cttcatttctgcagcaaataaataaataaataaatgtagttgcaatattgcctttaaaagcacttttaagcatcaattgtgaaataaaaagcccgagcaaaagccctctttgagcgtgaa

SEQ ID NO: 948999 - DNA, 120 bp, Artificial Sequence
  ENSG00000266495_0 (sequence is synthesized)
ggcttgtgtgaagcggccgccccaagctgagcctgcagctgataaccacagacaccctggcagggaaatctgtgatcggaacaacaaaatgccaaggaaaacaaaacccatttgcatttg

SEQ ID NO: 949000 - DNA, 120 bp, Artificial Sequence
  ENSG00000266495_1 (sequence is synthesized)
agaagaaatggcccttggctgtcctcggggccagtgctaggaactctggaccagccgtctgtagtggggcatgacttcgtgctcgggcaagtggagggcgaattccaaggccactaacac

SEQ ID NO: 949001 - DNA, 120 bp, Artificial Sequence
  ENSG00000266495_2 (sequence is synthesized)
cgggaattcaaaggcaatcagttctcgcctgttcagccggaacttctcttccagtttctgcaacaaaaagaaaatcaaaagcatgttcattttgaaattaaaatcctagtctttctgcaa

SEQ ID NO: 949002 - DNA, 120 bp, Artificial Sequence
  ENSG00000266490_0 (sequence is synthesized)
gcttatgtatgctctatgcacttcactctgcttcctgaggcaggtgagatgttttaatatctacttgcctgaatgttaatgtctgcccacagaaataagtcggagctctggagtagagaa

SEQ ID NO: 949003 - DNA, 120 bp, Artificial Sequence
  ENSG00000266490_1 (sequence is synthesized)
gaaaactgttagaatctcttgagggatatcttcaatacagacacgttaaataaaacatggaaatgggagactactcttaggggccatggtcaagttcaataaaataaaagattccattaa

SEQ ID NO: 949004 - DNA, 120 bp, Artificial Sequence
  ENSG00000266490_2 (sequence is synthesized)
cagggtatcatgatcagtcccacaaattacaaaagattttagtatattcctgcataattttgacataataaatcacacaagtgttatctcttatctaataaaatcattgtacaagcataa

SEQ ID NO: 949005 - DNA, 120 bp, Artificial Sequence
  ENSG00000266498_0 (sequence is synthesized)
ctgctggttaagatccgttatagtgctttgtttatttagagtgcccttacttagtggcctctttaattctccacggtgctatgagaacaccataggaagtagggttgaaatagggccagg

SEQ ID NO: 949006 - DNA, 120 bp, Artificial Sequence
  ENSG00000266498_1 (sequence is synthesized)
gcgcaccacgggtggtggtgaggtcactgtccaggtctgggactcagccattgtgggagggggacatgaacagacactctaccacatcagggaatttgaatactgtctttggatatgttg

SEQ ID NO: 949007 - DNA, 120 bp, Artificial Sequence
  ENSG00000266498_2 (sequence is synthesized)
accagtttgttttcttcagcaaacacctggtagagattggaattgaacagtgagtgaagaatgacctcacgctgcccagaattctgattccatgtgtaatgcgaattctgagaggcctct

SEQ ID NO: 949008 - DNA, 120 bp, Artificial Sequence
  ENSG00000266498_3 (sequence is synthesized)
gtttctcagcttttgggtggtattcagagaggtctagtaacacttggtgtcacctggctggtgagggcaggctccggtgaccgcaaagctaagtgctctgtagggcacctccctctcttt

SEQ ID NO: 949009 - DNA, 120 bp, Artificial Sequence
  ENSG00000266498_4 (sequence is synthesized)
caggggctgcctgggcctctggtgcacatgatccatggagtcagagtcagagctctcgtctgacaagtgcttttgctttctttctttctttctttcttttttggagacagaatctcattc

SEQ ID NO: 949010 - DNA, 120 bp, Artificial Sequence
  ENSG00000233529_0 (sequence is synthesized)
tgctgtttgattctggatggagttacgtttaggagcctggcagcaaactggggcacctgttcaattagtgatgatgccatactctgtcccggaaatagaaattgtgagtccggttcctca

SEQ ID NO: 949011 - DNA, 120 bp, Artificial Sequence
  ENSG00000233529_1 (sequence is synthesized)
tccaggaaaggggcagagcatggaagagccagggctgggcgcctactccaagatcaccgtggggaagggatctggcccatgccaagattctgctgctccatcaggtctcttaagtgctct

SEQ ID NO: 949012 - DNA, 120 bp, Artificial Sequence
  ENSG00000233529_2 (sequence is synthesized)
tccatgttctcgactgtaaataaccatgatgctgactgcaccagcttaatgtgaggattaaaggaagtatggaccatggaagactctggagcacagaagctatttaaatgtttgttgaat

SEQ ID NO: 949013 - DNA, 120 bp, Artificial Sequence
  ENSG00000233529_3 (sequence is synthesized)
ccacattgtagtctctgaaataatctcgtgctttgccctgtccttctcctggtagtaaggggagcctgagcagtagccctacccccctgcctgctccatccacctctcacctgctgtggc

SEQ ID NO: 949014 - DNA, 120 bp, Artificial Sequence
  ENSG00000233529_4 (sequence is synthesized)
caccttcttgaaaacagcagcctctgcattcctgggccactttctctgctgtgttttaataacacagcactcatcactttctgatatgtgataaatacaattaaatttccacaatggcaa

SEQ ID NO: 949015 - DNA, 120 bp, Artificial Sequence
  ENSG00000233528_0 (sequence is synthesized)
aggtcttccttgttcagcagttgattttaatttgcttaatgaaaactttatccacagagcagagtgttcttctagggctcctcattgaccaaagcaaactgaaagccagagatcaaggat

SEQ ID NO: 949016 - DNA, 120 bp, Artificial Sequence
  ENSG00000233528_1 (sequence is synthesized)
gctactaggtggagctcatataggtcagccgctcaaaacacagggaagggtgaagaagaatggataatagatcctggatgtgaaaggaaaaaaaattgtgacactccgtttttaataaga

SEQ ID NO: 949017 - DNA, 120 bp, Artificial Sequence
  ENSG00000233528_2 (sequence is synthesized)
atacgtaaagaaaacttacagtaatatgagtgtcataacaagagtggaaatgaaaaatactataagtactgtaaatagagcatagaacaactgatgacagagtaaatcaatctctacatt

SEQ ID NO: 949018 - DNA, 120 bp, Artificial Sequence
  ENSG00000233528_3 (sequence is synthesized)
tagcaaaaatgtttataacaagaagaaagcaaatgaagattattttgttttaatcttaagatgcattagttaggagtttgaaaagaaggtaatactaaaagtgaaaaataaaatctctgt

SEQ ID NO: 949019 - DNA, 120 bp, Artificial Sequence
  ENSG00000233528_4 (sequence is synthesized)
aaaggtcaagggcccacaaaggaaggtcaggtcttccttgttcagcagttgattttaatttgcttaatgaaaactttatccacagagcagagattggtggaaccaagcctgtaacctcag

SEQ ID NO: 949020 - DNA, 120 bp, Artificial Sequence
  ENSG00000233528_5 (sequence is synthesized)
attaagaagtggattccacatgacaggatccaagatctaaccagatcaagctctggcttcaccccatggcaggatccagtcagtgttcttctagggctcctcattgaccaaagcaaactg

SEQ ID NO: 949021 - DNA, 120 bp, Artificial Sequence
  ENSG00000225138_0 (sequence is synthesized)
gtgcccacctcctgccgcggcttgtacaggccaggagccaccacagccctgtctgtgactctcagctcccgaggctgggctcttccccagggaagctgcatgaccatggccacatacagg

SEQ ID NO: 949022 - DNA, 120 bp, Artificial Sequence
  ENSG00000225138_1 (sequence is synthesized)
aggtaggagacagaggcctccacggtggacgatcgtggcgtgaagtccacgttgaccacgttgtcggtgctgggggagcggatgaaggccagggacccgcggcgctctccctgtggtcag

SEQ ID NO: 949023 - DNA, 120 bp, Artificial Sequence
  ENSG00000225138_2 (sequence is synthesized)
cattcaggatccggtctcgagacttctgggccgaccgtctcatgaggaccctgctgaggaacttcctgtcgaagtgggaccacctgtagggacagaccttgggtgtgagcctcaggtgac

SEQ ID NO: 949024 - DNA, 120 bp, Artificial Sequence
  ENSG00000225138_3 (sequence is synthesized)
aggcgccctagagcccgccggacgcgtggcccggccccttctctcctgaattttgtttgctatagtgaccctgtaggcgcgtttaaaatgagggaagcagcccctgccacacgcccaggc

SEQ ID NO: 949025 - DNA, 120 bp, Artificial Sequence
  ENSG00000225138_4 (sequence is synthesized)
cgttagacgcatatgaaactgcatgccgcctcctccagagggtggctcaggacacgcctaacggaattagagtattcgctggttatccagatcagaagggacggtggcctggccggactt

SEQ ID NO: 949026 - DNA, 120 bp, Artificial Sequence
  ENSG00000225138_5 (sequence is synthesized)
agaggaaactctggggcacaaggaggtgatgcctgtcacttggacatgggtgcagccgccagagccgccctccagggcacagggtgggcccgggtgagcttgtgtgctcacacctgggca

SEQ ID NO: 949027 - DNA, 120 bp, Artificial Sequence
  ENSG00000225138_6 (sequence is synthesized)
ggccccgcggcagcaatggcagctctcctgtacaggctgagtttcagccacaccaagaagtcaaagctaaccgaggctgtgccttccgagacccccgggatggcccctgggaggccaagg

SEQ ID NO: 949028 - DNA, 120 bp, Artificial Sequence
  ENSG00000225138_7 (sequence is synthesized)
ggcctcatgtccagaactgaatcaggtagagaacggagcagagcccgatggggcacagaagccacacagctgagtgccagaggatggaagtggggccgcctatgtgtcctcagaccccac

SEQ ID NO: 949029 - DNA, 120 bp, Artificial Sequence
  ENSG00000225138_8 (sequence is synthesized)
ccgcctgatggcagggcctggagagcatgaggttgtgcaggagcacagggcagagtgggcttatggctggagtcagggtccccagggccggcaggggcacgggtgtggagggaacgtcag

SEQ ID NO: 949030 - DNA, 120 bp, Artificial Sequence
  ENSG00000225138_9 (sequence is synthesized)
gatgcggcccccagttcactgcccactcgggggggatttgagggtcattggttctgagggccctccgcctgctcttttgcttctaaatccagcatcttctgtatgacctttgtcccgctc

SEQ ID NO: 949031 - DNA, 120 bp, Artificial Sequence
  ENSG00000225138_10 (sequence is synthesized)
ctgccaccccacgaagacagacgtgagggtcaggggagccacggtgctaactgccactctgggcgggcacaggcgagggctgtgcagcacccgggcacgtggggtcttcggaggggctgc

SEQ ID NO: 949032 - DNA, 120 bp, Artificial Sequence
  ENSG00000225138_11 (sequence is synthesized)
tccccacaccacttcccctgcccctgccgagccctgccgtggggtgggggggcgcagggagagaaagcagccgccctgggtgagagccaggagggacactgggcaggcagatgccacccc

SEQ ID NO: 949033 - DNA, 120 bp, Artificial Sequence
  ENSG00000225138_12 (sequence is synthesized)
aggtgtggggacccccgctactgagtggccgggaggagcccacaggctccccacatgcagctgagcccagggttgtggtcgtgggtcgtgggtcaaggatggtggctggtgtggttgggg

SEQ ID NO: 949034 - DNA, 120 bp, Artificial Sequence
  ENSG00000225138_13 (sequence is synthesized)
cgtgggcgaggcggggctcggggctcgcggtcgctgtagccgcgcggggatctggggtttctctgggacagcggcggcggcggtgggcggaccgtggcgcggggacgagcggccggttag

SEQ ID NO: 949035 - DNA, 120 bp, Artificial Sequence
  ENSG00000225138_14 (sequence is synthesized)
ttagcggcgtgtcggagccggtgtcacctgcgggagaggaaggcgagagagggcagcggctagtcagccttcggagagccccacggcggcaggggagacctcgccggggccgtcacctgc

SEQ ID NO: 949036 - DNA, 120 bp, Artificial Sequence
  ENSG00000225138_15 (sequence is synthesized)
tgggtgccttggaaagttagggtcaccgggaaggttagggtcacgtgcctttcaggttgcgggcccttcccccacatccatgaccccacacgccacaggcagcacagcttggccgccttc

SEQ ID NO: 949037 - DNA, 120 bp, Artificial Sequence
  ENSG00000225138_16 (sequence is synthesized)
ttgttctggttgagccccagcttggtcgacttgaaggactccaggcgcttccgcatggtcctgtggaagatttcccggtcctgtttctcgtcctccgtgggcgtgagctcgtgtcggctg

SEQ ID NO: 949038 - DNA, 120 bp, Artificial Sequence
  ENSG00000225138_17 (sequence is synthesized)
tacagatgcttgtactgcgggatcaggcacggaggtcacagctgtgcccaccgccggacattctcgccctcctgccgcaggagctgagcacggatcccccgtggtcccaggaggggacga

SEQ ID NO: 949039 - DNA, 120 bp, Artificial Sequence
  ENSG00000225138_18 (sequence is synthesized)
ggaccaggacaggctgctgcgggccaggggcaaacacgtcaggcctggcccccagtccgctgctgcccctccctttcaccttccatccagcactaagggagtctggccacggcctaatat

SEQ ID NO: 949040 - DNA, 120 bp, Artificial Sequence
  ENSG00000225138_19 (sequence is synthesized)
tattgggaccaggtcccgtaacagcctgcctgcttaccgtctgctcccatccctggggaaagcaagggagctcggggtcctaggacctgacctcagcgctcacccccaccagcaccacag

SEQ ID NO: 949041 - DNA, 120 bp, Artificial Sequence
  ENSG00000225138_20 (sequence is synthesized)
tcaccaggactctgtgactcagtttaccccacgagagcccctgggattcccagggcatcagaaggcccatcagcctcccgtgaactgctggggtgggcctggccttgggacgcgggtgca

SEQ ID NO: 949042 - DNA, 120 bp, Artificial Sequence
  ENSG00000225138_21 (sequence is synthesized)
ggggcctctcctcactgccccatggcacccacagccagtgccagagcctgctgcagccccgacccggcagagcaagcggctctgctacctcagccacgtagctgatggcatccttcaggt

SEQ ID NO: 949043 - DNA, 120 bp, Artificial Sequence
  ENSG00000225138_22 (sequence is synthesized)
cccccactgtcccttcccaccctccagccaggctccaggcctcctagggccagagtatctgagctttctctcgcttgccgggcctgtggtttgggggtttgtgtggagcctggtccagga

SEQ ID NO: 949044 - DNA, 120 bp, Artificial Sequence
  ENSG00000225138_23 (sequence is synthesized)
gccctccttcctgatctgcactggctggccctcctgacagccccaggcccccgtgccctctgccaggaggtgccttgccacttggcatggccccagtcacgggtggcacatctggggtga

SEQ ID NO: 949045 - DNA, 120 bp, Artificial Sequence
  ENSG00000225138_24 (sequence is synthesized)
atgcacgtcagtggaggcagaatcattctgtctgaatgaatggagtttccaggcccccactggccctctgtgtgagggtctgcagggtttggcaggacaggtctttctctccggcgagag

SEQ ID NO: 949046 - DNA, 120 bp, Artificial Sequence
  ENSG00000225138_25 (sequence is synthesized)
cacccaccctgaccggctgctggatgagggcaccaaagctcgctagggagggctctgtccttagggaggagctgcggaatccctgcagctgtgcccccaggccctgccttgcacacttcc

SEQ ID NO: 949047 - DNA, 120 bp, Artificial Sequence
  ENSG00000225138_26 (sequence is synthesized)
acacttcctgcagccagggcgcccctggggaggtcagggcaggccggggaggctgaggcccacctgccatagtgggcaggtgcgggagccagggcggcagtggcctcggggctgggtggg

SEQ ID NO: 949048 - DNA, 120 bp, Artificial Sequence
  ENSG00000225138_27 (sequence is synthesized)
cctctggtctctggagcagtcaggggctctgcagacgctgagaggcctgctcatagtggactgggagatgctggagcagcctcagagccatggccggcccacagcgggagacggccctgc

SEQ ID NO: 949049 - DNA, 120 bp, Artificial Sequence
  ENSG00000225138_28 (sequence is synthesized)
agacgcatatgaaactgcatgccgcctcctccagagggtggctcaggacacggtgggtgtcaggcctggtcaggcaagggggctttggccacatggggggcaccttcaggtgcacaggag

SEQ ID NO: 949050 - DNA, 120 bp, Artificial Sequence
  ENSG00000225138_29 (sequence is synthesized)
gaagggcaggggcggacagacaccctgagcccttagacttgtgggagccaagctgaccagagtgaggttttttttagcctaacggaattagagtattcgctggttatccagatcagaagg

SEQ ID NO: 949051 - DNA, 120 bp, Artificial Sequence
  ENSG00000225138_30 (sequence is synthesized)
ccaagcaaacacagatcgctcagaaaatgggaacccagggcaaattgtatgtgctccttactgggtttattataagtgtcacatgttttttataataaaacataggtgatttcaccttaa

SEQ ID NO: 949052 - DNA, 120 bp, Artificial Sequence
  ENSG00000225138_31 (sequence is synthesized)
ccacatccatgaccccacacgccacaggcagcacagggctctccatgggcagcttcccattggggatgctgctgtttctctgcggagcaaacgtgaagctgctcacaccccgacacagcc

SEQ ID NO: 949053 - DNA, 120 bp, Artificial Sequence
  ENSG00000225138_32 (sequence is synthesized)
ccccagagggagctcagaaagcccagaccccacggcccgcccctctccctgctctgagctggaggcagagtccgggtctgcggggccggccctccctgtatccctgtgagagggtcgggg

SEQ ID NO: 949054 - DNA, 120 bp, Artificial Sequence
  ENSG00000225138_33 (sequence is synthesized)
tctcaggcggccctagtgccctcagctccgtgggagcagcagagacgccagagtatctctgtccgggctcctgagggaggagagagggcagcggctagtcagccttcggagagccccacg

SEQ ID NO: 949055 - DNA, 120 bp, Artificial Sequence
  ENSG00000229550_0 (sequence is synthesized)
ggctcccactcggcaagggaggaaaataaaaggagaatcaagtgaagggaaaggagaaaggaggcagaagagaacacaagaagttccctttaacaggaggaaaatggctttttaggaaac

SEQ ID NO: 949056 - DNA, 120 bp, Artificial Sequence
  ENSG00000229550_1 (sequence is synthesized)
agcgatgatctaaaggacaaagaagttgattctacagaaaaccatgagaatctacaaattccaccgtttaaacaggtcagcttcacctgttatgattagagttaacagagaaatggatat

SEQ ID NO: 949057 - DNA, 120 bp, Artificial Sequence
  ENSG00000229550_2 (sequence is synthesized)
tttccaggaaataagtctggtgatgcaatcacaaaagatgatacctcactttaaatctgatgacttcaaagtaggcctgagatgactaccctcaaataggttgattttggcatcagtaac

SEQ ID NO: 949058 - DNA, 120 bp, Artificial Sequence
  ENSG00000229550_3 (sequence is synthesized)
actacaggtaaaagcgtgcattaaaactgaagccacagcctgcacatttgcttctgtagtccagcatttagcttgtctgctgaagaacggttttaaaaatatcccagagaagatgacacc

SEQ ID NO: 949059 - DNA, 120 bp, Artificial Sequence
  ENSG00000229550_4 (sequence is synthesized)
acttatactctttgacaaatgaattgggagatgaacagacattgaaaagaatataggaaatgtatcacattgtttaaaaataaagtcaaaaacatcctttagaagcttcagaaacaaaag

SEQ ID NO: 949060 - DNA, 120 bp, Artificial Sequence
  ENSG00000286583_0 (sequence is synthesized)
gaccccgcagggggcgaggcggggctgagaggggcgaacgcagagccagaccccccgccgccgcaggccgcccacctccaggcagggcttcgtgccagacccggctgtagttatcagctg

SEQ ID NO: 949061 - DNA, 120 bp, Artificial Sequence
  ENSG00000286583_1 (sequence is synthesized)
ggtggagggcagtgccagctgcaggcgtccccgaggcgcaaacaccacccctggccccagcctccttccctgcagccttctaccttctaccggaaacagagccacggggagctaaaggag

SEQ ID NO: 949062 - DNA, 120 bp, Artificial Sequence
  ENSG00000286583_2 (sequence is synthesized)
gatccagcaacagtggaggcagggactccacctcagaggcagggccgcactgaagcccagctcacctacctgctgggtgaccttgggcaagtgacttctctatgcctcagttgttgcatc

SEQ ID NO: 949063 - DNA, 120 bp, Artificial Sequence
  ENSG00000286583_3 (sequence is synthesized)
tgtaaaattgagatagtaatagtattcacctcactgagtgctgcggtttggtgcctggcacataatagggacttcatagacagttgttactattattacctcttcccccacatttggggt

SEQ ID NO: 949064 - DNA, 120 bp, Artificial Sequence
  ENSG00000286583_4 (sequence is synthesized)
ttggcagagggatgtattggctacatggtcattaaggatctgttaagcacctcctatgcacgagggagatcacatggtatggtccaagagtcttggagttagatgtggggttgaatcctg

SEQ ID NO: 949065 - DNA, 120 bp, Artificial Sequence
  ENSG00000286583_5 (sequence is synthesized)
gccctgtcacttcatagctgtgtgtgaccttgtaaaattctgtctcctctctgagctgaagttcccccacaggaaaatagggaccgtaatgcccatcttccggggccaatgctggattca

SEQ ID NO: 949066 - DNA, 120 bp, Artificial Sequence
  ENSG00000286583_6 (sequence is synthesized)
atgagataatgtacagggagtgcccagggcagttctcagcacacaatagtgcctctcagtaaataagagacgcaggatggagaggacaggctcagtttctgctacagaagagctctgggc

SEQ ID NO: 949067 - DNA, 120 bp, Artificial Sequence
  ENSG00000286583_7 (sequence is synthesized)
aggcataaacatggcttcttatgcctatcccccttctcagagcagctcagaacacttatcacacctttctccttgaccctcacctctctggaagattagaagcagaagatttattggatc

SEQ ID NO: 949068 - DNA, 120 bp, Artificial Sequence
  ENSG00000286583_8 (sequence is synthesized)
aacttctcagctgtggaatctgagcaaacagaagggaagtggctgagggaggcctcagaccagctgtatccctggaccagaggtcacagcgctggctaaggaaaccttccatgcaggagt

SEQ ID NO: 949069 - DNA, 120 bp, Artificial Sequence
  ENSG00000286583_9 (sequence is synthesized)
ctggcagacctgcctgggctgtagcagagcctccccactcagtggacaagggacaggagggatcaaaggttgaggaaagatattatttcaatcaagataatgattctacttcttgaacgg

SEQ ID NO: 949070 - DNA, 120 bp, Artificial Sequence
  ENSG00000286583_10 (sequence is synthesized)
aaatgagattttttttcattgcctcatgggggtgccaccaacatctgtctccgggctggaacaggtcatgaacaagttagaggattttcttgtaacctgagagagagtgtaaacatgaag

SEQ ID NO: 949071 - DNA, 120 bp, Artificial Sequence
  ENSG00000286583_11 (sequence is synthesized)
gagaactgaaagaagggagcttgcttgcaagagaaaaacatatctgccaggcctccacgattataaaataagctcaatttggaaaatgtacactggcattgaacagagcattcaagaccg

SEQ ID NO: 949072 - DNA, 120 bp, Artificial Sequence
  ENSG00000286583_12 (sequence is synthesized)
aacttcagaaggaagcccaacctaagtcagtcaccagtggctcaaaatgaagccctccagcatcttttcagagggttgtcccaggagttggaagcacacgtgagccttcctccttgaagg

SEQ ID NO: 949073 - DNA, 120 bp, Artificial Sequence
  ENSG00000286583_13 (sequence is synthesized)
cagcaccataaccaccttcctgccttgccgaagaccaccagtctgacataatacagcccacgaaagccagcaacagcaaaacatggacatccagaacagacagagttctgacaactggac

SEQ ID NO: 949074 - DNA, 120 bp, Artificial Sequence
  ENSG00000286583_14 (sequence is synthesized)
cccgtggcgcagcacaatgatgactcttcttccccaggatgaataagcaggaggcaagggctgagccaaaaggacctgttgcataatctgagcaatgtccagttatgtgcagcggaaagt

SEQ ID NO: 949075 - DNA, 120 bp, Artificial Sequence
  ENSG00000286583_15 (sequence is synthesized)
cagtgtggacgtcttaggcagctctaccacttactagcagagcaaactagagcaaatattgaatgattctgagcctcagtttcttcatctgcaaaatgggaatactggatagagcctttg

SEQ ID NO: 949076 - DNA, 120 bp, Artificial Sequence
  ENSG00000286583_16 (sequence is synthesized)
taaagcacctatgaggcagtaccttcaagagtgctgcaaattgctcatccaatgtgaatactggctgttgttatggagatttataactagctaccttctcctgcttgcttgggacaaata

SEQ ID NO: 949077 - DNA, 120 bp, Artificial Sequence
  ENSG00000286583_17 (sequence is synthesized)
ttaattaatcatcattaaataaatatatcccagctgcccctcatcctgagcacagtacctagagctccctgcgtgagaagtggctctgggggaaaggcaagtggacaattgggagtgctg

SEQ ID NO: 949078 - DNA, 120 bp, Artificial Sequence
  ENSG00000226445_0 (sequence is synthesized)
tcgcacggagtcatcgaggtccagggacaccttcctcccagaaatcccaacaagagcagctggagctgctaaagaaaccccagcgttctgtgctgctgccattgcctcctccaactggtg

SEQ ID NO: 949079 - DNA, 120 bp, Artificial Sequence
  ENSG00000226445_1 (sequence is synthesized)
agcccgatcggcccatttttaggcagtgctgtggttggaaatgggcccttcctctggggtccgctacttccctccacctgactcagaagaatgagtcaagagggaagaacagctcgtatt

SEQ ID NO: 949080 - DNA, 120 bp, Artificial Sequence
  ENSG00000226445_2 (sequence is synthesized)
agggagagggtcccgtgtgctgttgcctttttcggaatcatttcaatcatgtttgccaaattccctacgaagttctgttccctcgtttgacaatgagcagaggcaggagagatgaattgc

SEQ ID NO: 949081 - DNA, 120 bp, Artificial Sequence
  ENSG00000226445_3 (sequence is synthesized)
taaatggttgtatcccacaccgtgctgggaggctcagcagaacagagacctgtgtcaagcagggcttccttctccaccaggcccttcagcctgcattttaacctgtgacttgcgaggaga

SEQ ID NO: 949082 - DNA, 120 bp, Artificial Sequence
  ENSG00000226445_4 (sequence is synthesized)
tagcccgtgatcacaccacaggcctacttacatgacaggaagcaaaatgccaattccttctacccctttcccccaccccggtagaaaccctgctagttctttttaaaaaagggagagaga

SEQ ID NO: 949083 - DNA, 120 bp, Artificial Sequence
  ENSG00000226445_5 (sequence is synthesized)
tcatgtatagaaaaccttttttacaatttatttcctgttgttaatctttaaaaatgaggttctagctaagtgcagggtttcagtggtgaaattttgaccatgtgaacacataaataaata

SEQ ID NO: 949084 - DNA, 120 bp, Artificial Sequence
  ENSG00000226445_6 (sequence is synthesized)
tttacagtctttggcaaaacacatgacgtttcatcaacctatacgataaatttgtttagaaaaacataaataatttacaaaaaatatggtacattctaaatactcacatcatcgtcactc

SEQ ID NO: 949085 - DNA, 120 bp, Artificial Sequence
  ENSG00000226445_7 (sequence is synthesized)
ccacaccattgtacggttgaccccacaacacagaaacagaaaacctgcacgctgttgacagtcgctacatttaatgaagtatcccaacgcttcgttggtctcgggaatacagctccacac

SEQ ID NO: 949086 - DNA, 120 bp, Artificial Sequence
  ENSG00000226445_8 (sequence is synthesized)
gcaaaaaagtaaaaagtgcagcaaaacaacaacacaacgatcaacctcaaaggaaacaacaaaattaattttatcaaaatgcaatgtgtacattaagactaaagttatggattgttcctg

SEQ ID NO: 949087 - DNA, 120 bp, Artificial Sequence
  ENSG00000226445_9 (sequence is synthesized)
tttggcatagaaatgtgatgactattaacagaaaggggaaaaagatttgccccctatccatcatcagacagacagacttctcttactaaaccccttatgtggagtgggatgagtgactat

SEQ ID NO: 949088 - DNA, 120 bp, Artificial Sequence
  ENSG00000226445_10 (sequence is synthesized)
tgactgattattgggtgtgcctggcaagactaaatgctgattcttttcagcgtttgaattaaaagaattccatatacagcagatagataacagtaacaaatattgaactaaaatcgctgg

SEQ ID NO: 949089 - DNA, 120 bp, Artificial Sequence
  ENSG00000226445_11 (sequence is synthesized)
caacattatatatttaaggttccatcataaactcctcattattctctatgtattctgttacagcttctagcatgcttcatcgtgacaacctaatattatcaagcctcatattttcacagg

SEQ ID NO: 949090 - DNA, 120 bp, Artificial Sequence
  ENSG00000226445_12 (sequence is synthesized)
caggattatatacttattagatgtttgtttctagaaattatactacatatgtgttactaggcatatttaaaataagttactggtaaatggagttgcattctatagtcacttaataaatat

SEQ ID NO: 949091 - DNA, 120 bp, Artificial Sequence
  ENSG00000226445_13 (sequence is synthesized)
aaaatatttataactggaaccttaatgaaatgtatcatcaaatcaggtaaaagcaacttgtccgcagttaccaaagcctagatacgcgttagatgcgccttttccggcctgtgcgtctgc

SEQ ID NO: 949092 - DNA, 120 bp, Artificial Sequence
  ENSG00000226445_14 (sequence is synthesized)
tctggttcctctcaggcagcaaagctggggaaggaagctcaggcaggagcctccccgacgccacagcggcacaagcagcagctaaagcaccgcactttgctctgctaaccttttacttaa

SEQ ID NO: 949093 - DNA, 120 bp, Artificial Sequence
  ENSG00000226445_15 (sequence is synthesized)
atgaggttttgccaaatccacatctggaaccgcgtcacacccatttgcaaggatgtttgttctttgatgaaactgcatctctactgcacatgagggctttcattgtaggacaagaggaga

SEQ ID NO: 949094 - DNA, 120 bp, Artificial Sequence
  ENSG00000226445_16 (sequence is synthesized)
gttcgtttatttttgtaactgttttacatgttccgattagttaatcggtagcttatgtcatttgctatgcctgttgtcttctaatctctccttactaaaacattacttcaaatttgaatt

SEQ ID NO: 949095 - DNA, 120 bp, Artificial Sequence
  ENSG00000226445_17 (sequence is synthesized)
gacccttgtttataatttatttaatgggatttgtgtgtcattgtagagcaactctaattcaagaatagtgacaactttaagcaccaaaagtagttcagcaatatttttcatgcttaattt

SEQ ID NO: 949096 - DNA, 120 bp, Artificial Sequence
  ENSG00000226445_18 (sequence is synthesized)
atcataatggcttatgcacagtattcccttcaactccatatacacataaatacaataagtaattacattttatatgtaaacgtcattctttttaaacaaacaagaaaaagcaatgtaatg

SEQ ID NO: 949097 - DNA, 120 bp, Artificial Sequence
  ENSG00000226445_19 (sequence is synthesized)
gcatgcccaattttcactccacataaagtctcatatatcaccaaactggtttcctctagtgggttagatgttcatctctgagttccattgatatttatcctctgaaggcacttgggtttg

SEQ ID NO: 949098 - DNA, 120 bp, Artificial Sequence
  ENSG00000226445_20 (sequence is synthesized)
gggttgctggcaggaggtgaagaaccatcagagttaaggtcaagggacaggaggtgctgctagagagagaagccacaaggaccacaatgaactgaggtgtctagggaccatggcatgcac

SEQ ID NO: 949099 - DNA, 120 bp, Artificial Sequence
  ENSG00000226445_21 (sequence is synthesized)
ctgctgcaggggcggcgggcgccctgggtgggccacgaggcagggacagccgaggctccgcgctcaccccacccgcaaggggccaagcgcagactcaggggagccagaggggccggaccg

SEQ ID NO: 949100 - DNA, 120 bp, Artificial Sequence
  ENSG00000226445_22 (sequence is synthesized)
ctgagcaagggctggggaaggatcccacgcttggatacttgggagtgaagatgtgttatttcacccaccgactcgttccacacgaccaaggcctgtgcctgccctgagggcgagttggtt

SEQ ID NO: 949101 - DNA, 120 bp, Artificial Sequence
  ENSG00000226445_23 (sequence is synthesized)
gagccttgtacagacaactctcagagcgtgggcctgggccgaacctttccctgtgagcagcagcatcagcgtctagaacgacggccctcccggtccacggtggaaggtgcggagctcccg

SEQ ID NO: 949102 - DNA, 120 bp, Artificial Sequence
  ENSG00000226445_24 (sequence is synthesized)
tggtgtgctggcagcgattcgcagaagggagatggagggccacagggcaggtgctcgcacggagtcatcgaggtccagggacaccttcctcccaggagtgtgtgtacagtgatcacttgc

SEQ ID NO: 949103 - DNA, 120 bp, Artificial Sequence
  ENSG00000226445_25 (sequence is synthesized)
tgccataacacagtcacagatctacgtgtgttctctgactctcagctggggctccatcggggcctgctctgggctcacctgcgtgaccactgggctcagcttcctcgtctgagaagcatc

SEQ ID NO: 949104 - DNA, 120 bp, Artificial Sequence
  ENSG00000226445_26 (sequence is synthesized)
aggactggccttcccacccccgcgttcccagggcttccacactcctttctagccatgagtcagtcctcagtggatgaccagtggcctggggtggccctctgattctctcacctgtactca

SEQ ID NO: 949105 - DNA, 120 bp, Artificial Sequence
  ENSG00000226445_27 (sequence is synthesized)
gggggctgaacctcactcttctctgccaaaaccaaccaatgaataaataaacaaacaagcatggaattcctaaaaatgcaggatgcgcttgccggctggcgatactcacagtggaggcag

SEQ ID NO: 949106 - DNA, 120 bp, Artificial Sequence
  ENSG00000226445_28 (sequence is synthesized)
gaagggcagcattcgccttccacaaaggatggactggcgcaggttgcaggcgggcaggtgatttggtggcaaatggttttaaatttctacaagtgaagaaaggcatgcatggaacactca

SEQ ID NO: 949107 - DNA, 120 bp, Artificial Sequence
  ENSG00000226445_29 (sequence is synthesized)
ctcccattagtgctgacagcctaacaagaacagggcccccagatggctctttgcatccattccattcctttctcccttcactgagcagcaaggatgcaacagagagctccaagcttcctg

SEQ ID NO: 949108 - DNA, 120 bp, Artificial Sequence
  ENSG00000226445_30 (sequence is synthesized)
gaaggagggaagaaaagacgggcagcaggaactcctgttatctaaggtaatgctgaggccattgtcagcagaaatagagtaacattaaaagctaaattgtctgtctgtaagacttcaggc

SEQ ID NO: 949109 - DNA, 120 bp, Artificial Sequence
  ENSG00000226445_31 (sequence is synthesized)
agtggcttgtatttcccccaaacgtttctgctgagcctcaggctctgttggaaccggatggaattaaatgcagagtctagggccatgtctggcttctctgttcctcctgtttctaaccaa

SEQ ID NO: 949110 - DNA, 120 bp, Artificial Sequence
  ENSG00000226445_32 (sequence is synthesized)
ctggggacgctggccaggttgctccccctctctgggctctggttctttatgtgcaaacaaagaggttgattcaagtcctaaatacggttcctggcccttctgtgtttcttacactgaaat

SEQ ID NO: 949111 - DNA, 120 bp, Artificial Sequence
  ENSG00000226445_33 (sequence is synthesized)
ttcctcacatagctgaaccggtttcacacatcagcactgaacgctggcatttccaggcagtcaggttctgccaagtgtccgatggtggcctcttcccccaagagccgtgttctggggcct

SEQ ID NO: 949112 - DNA, 120 bp, Artificial Sequence
  ENSG00000226445_34 (sequence is synthesized)
caccttgcaggtacacgtggtgcagctgtccaccacccacgtttcattttccgcaaagaaccggccatcctgccagcaagctgacatgttccttgtcttaggagggccaccaatgagctc

SEQ ID NO: 949113 - DNA, 120 bp, Artificial Sequence
  ENSG00000226445_35 (sequence is synthesized)
ccagagaaactggttatcattcgactggaaaatcaagtgaaacatttaagtgtagacaataatactacatatttagtcatcatgcttgtggatgaaaaacaaagttcctccttcattaaa

SEQ ID NO: 949114 - DNA, 120 bp, Artificial Sequence
  ENSG00000226445_36 (sequence is synthesized)
aagctctaaagtcaagtaagacttgactcatccctgggtggaagttccggaagttgtcctccatcctcacggggctttctgagccacagcttcgtcactgcctgggcttctggggctccc

SEQ ID NO: 949115 - DNA, 120 bp, Artificial Sequence
  ENSG00000226445_37 (sequence is synthesized)
catccacctgccttcctggagagcggaaatcgcgtggctcacatcacacctggaccagtgcagagcaacgctggggctccttcgactggggacgccaggtgggactggggtgggaactag

SEQ ID NO: 949116 - DNA, 88 bp, Artificial Sequence
  ENSG00000226445_38 (sequence is synthesized)
gtgtgcgctggaggccggaaagtcgaatatcacttcccatcctgcatttgatgtgctttggggttgaaaaagcccttatgtggtggca

SEQ ID NO: 949117 - DNA, 120 bp, Artificial Sequence
  ENSG00000226445_39 (sequence is synthesized)
cccggacctgcaaagtgtaactgaagagtgggctacgcaccccggttctgaagtaggcggtgggatcacagagtcattgtgcaccaaagataccaaatctcacatattcctgatgtatag

SEQ ID NO: 949118 - DNA, 120 bp, Artificial Sequence
  ENSG00000226445_40 (sequence is synthesized)
attcatgacataacagtttacgcttgtcataatttggaattgaaatggcctggccttcgtgtgcacacggccacaccgtgtggcagacgtgagctccgctttgaggctgtcagacagacc

SEQ ID NO: 949119 - DNA, 120 bp, Artificial Sequence
  ENSG00000226445_41 (sequence is synthesized)
caggcagcagccctgctccctgctcactggggagctcaacatggcagccacacagcactcccttgggtgccagccttcatctttgtaaaatgaagaaagtgaaagtgcccatctcacgta

SEQ ID NO: 949120 - DNA, 120 bp, Artificial Sequence
  ENSG00000226445_42 (sequence is synthesized)
gtcattctgaagattagatgatgtacggcatttaatgaacctgtcatagtgaccttcagaattaaatgctcaagaaaatattggaaagtgtgcttggaaatatgattcacaattgtaact

SEQ ID NO: 949121 - DNA, 120 bp, Artificial Sequence
  ENSG00000226445_43 (sequence is synthesized)
aacagaaaagatgagatcatctgtcaatgatttaagtagcatagatttccatcatatgatggagtcaacaactatgaacagtataagaaaacttctaggccgggcgtggtggctcacacc

SEQ ID NO: 949122 - DNA, 120 bp, Artificial Sequence
  ENSG00000286581_0 (sequence is synthesized)
gagtctcaaacaacagctctggactcagagctaatagacttcctgagtccaaccaattcaagcagccaatgaggcatcctggcaaatgaggacatttctccaggggatgaggctgtcctt

SEQ ID NO: 949123 - DNA, 120 bp, Artificial Sequence
  ENSG00000286581_1 (sequence is synthesized)
ggtgcccttgctcccctctgccagcaggataggttctactgtggaggattcaccaccagactgggaaacaacagcctgggctccagagttggacactcaccaccagactgggaagtaaca

SEQ ID NO: 949124 - DNA, 120 bp, Artificial Sequence
  ENSG00000286581_2 (sequence is synthesized)
cggcctcatgaagcttcggtgcggtctgggaccctatctctttttgtaacgagttgtttggcatgaggtccagtcaggagggcccttcgcaactgggctcaaggaacacaaaaaggtcaa

SEQ ID NO: 949125 - DNA, 120 bp, Artificial Sequence
  ENSG00000286581_3 (sequence is synthesized)
tctgttgtttttcaataactaatgtacaggaatagattgaaatagagatttttctgaaacagcgctggatgaatgcctcaaggggctcaaacaacctgttccaggacttggtgactattg

SEQ ID NO: 949126 - DNA, 120 bp, Artificial Sequence
  ENSG00000286581_4 (sequence is synthesized)
tttgtgttcatgtttaattgagttcaaatttaatatttaacttttcctccacaatgggtgagtttgtattactatgttttactgtctcatgaataaaatcctaaaataaaagccacaaaa

SEQ ID NO: 949127 - DNA, 120 bp, Artificial Sequence
  ENSG00000226447_0 (sequence is synthesized)
tgcaccctgcacgtctgggcttgaagacagaaatccaccgtgaggtgctccaaggaacactgatgggcagttttgttaaagtgattgaactccgtgggtacaggagtacgtggagtaatg

SEQ ID NO: 949128 - DNA, 120 bp, Artificial Sequence
  ENSG00000226447_1 (sequence is synthesized)
tgaaatgaagaagagaaccacctaggagactatcaccctgacctgaggacttcactagggattcaggaaagaagacacagaaagaaagcaatcctcaaggatcagaatggccagcaggag

SEQ ID NO: 949129 - DNA, 120 bp, Artificial Sequence
  ENSG00000226447_2 (sequence is synthesized)
gccatatgcacctaaaccagatggaagaaaatggcccggggtgaccagctggctctctttatcaagctcagactcctcaagtccccgcttggaagaacagtcacagattccatatacagg

SEQ ID NO: 949130 - DNA, 120 bp, Artificial Sequence
  ENSG00000226440_0 (sequence is synthesized)
tcccctttggagatcactggaaacagcttctggaccacaaatggggtgaactactgtatcgagaaaggagagagtaagacttgagagctatctttttagctcagggtgcagagtgttggg

SEQ ID NO: 949131 - DNA, 120 bp, Artificial Sequence
  ENSG00000226440_1 (sequence is synthesized)
tggctggagcccatactggcagctcagagttcaagctggggaccctggacagaaggccattccattgccgggcacgctcacacacacacagccacactcactaagactggaaccatgcag

SEQ ID NO: 949132 - DNA, 120 bp, Artificial Sequence
  ENSG00000226440_2 (sequence is synthesized)
ggagaaaactcacgactggactaagaactcagttaagtgaagcaagcaagaatttcccaagtgatgccaactcaaaatgaattatatcaagaaaggaaaagcagctttttcatctggaaa

SEQ ID NO: 949133 - DNA, 120 bp, Artificial Sequence
  ENSG00000226440_3 (sequence is synthesized)
gaactggagaccttgaacctaggcagcatgtgccttgaacctaggatcagtaaacaacaaggatggaaaagacagtaagaatttggtcagatcaccatatctttccgttgtgcctttaga

SEQ ID NO: 949134 - DNA, 120 bp, Artificial Sequence
  ENSG00000226440_4 (sequence is synthesized)
acaaaaggaaagaaaatatctctttggctcacagagaaaatatgttgagaaatgaagtacaacccctcactgtgctgggcacagagcaggtgctcggtaaataaatagtgtacgtgttcg

SEQ ID NO: 949135 - DNA, 120 bp, Artificial Sequence
  ENSG00000226440_5 (sequence is synthesized)
tcccctttggagatcactggaaacagcttctggaccacaaatggggtgaactactgtatcgagaaaggagagagtaagacttgagagctatctttttagctcagggtgcagaagctcacc

SEQ ID NO: 949136 - DNA, 120 bp, Artificial Sequence
  ENSG00000226440_6 (sequence is synthesized)
agaatccatgctgtgtgcgattgtgaccctggaacccagcccatttcaatgtattttgcatgtcctcctctgaagcatgctggagataaagaatgatgaacgagcaagagaccttccacc

SEQ ID NO: 949137 - DNA, 120 bp, Artificial Sequence
  ENSG00000226440_7 (sequence is synthesized)
tcccctttggagatcactggaaacagcttctggaccacaaatggggtgaactactgtatcgagaaaggagagagtaagacttgagagctatctttttagctcagggtgcaggaccttcca

SEQ ID NO: 949138 - DNA, 120 bp, Artificial Sequence
  ENSG00000226440_8 (sequence is synthesized)
ccactgcaccatagctatccacttggcacacattaagtactcaacagatatttgttggatggatggatacatgaagaaaggaggaatagaggaatgaacaaatgggtaaatcactttcca

SEQ ID NO: 949139 - DNA, 120 bp, Artificial Sequence
  ENSG00000226440_9 (sequence is synthesized)
attagtggaggggtatatgtggcaagcctcaaataattcatgactacagaacataatatgtgagacagaaagcggggaagagcctgccaatgagcctgggttagatctgcagtacagatg

SEQ ID NO: 949140 - DNA, 120 bp, Artificial Sequence
  ENSG00000226440_10 (sequence is synthesized)
gggagccagcaaaggatttcaaggatggtcacatttctggtatctgtgtagaaattagattcagcattgatcttcaaccttggctgcatgctggaattacctgaagaactttaacaagac

SEQ ID NO: 949141 - DNA, 120 bp, Artificial Sequence
  ENSG00000226440_11 (sequence is synthesized)
agcttctggaccacaaatggggtgaactactgtatcgagaaaggagagagtaagacttgagagctatctttttagctcagggtgcagctcacatggagcaatacagcatgccagagtttg

SEQ ID NO: 949142 - DNA, 120 bp, Artificial Sequence
  ENSG00000226440_12 (sequence is synthesized)
agcttaggagaacctcaggaaggccttcagccaagcacctcccactgctccatgcttgccttaatatttttcttcattccctctgaaggagaattgcagaataaccattcatataaatcc

SEQ ID NO: 949143 - DNA, 120 bp, Artificial Sequence
  ENSG00000226440_13 (sequence is synthesized)
aagtaaagagaatgtatttttagaatatcttcccatccacacattgaacctctcccatgaataatgtgtccgtgttctctttctctctccacatatacacaaatacagtctcctgagcca

SEQ ID NO: 949144 - DNA, 120 bp, Artificial Sequence
  ENSG00000226440_14 (sequence is synthesized)
tcccctttggagatcactggaaacagcttctggaccacaaatggggtgaactactgtatcgagaaaggagagagtaagacttgagagctatctttttagctcagggtgcagatggagtct

SEQ ID NO: 949145 - DNA, 79 bp, Artificial Sequence
  ENSG00000226440_15 (sequence is synthesized)
tttttagctcagggtagcgcagtctcggctcattgcaacctctgctttccggtttcaagctattctcctgcctcagcct

SEQ ID NO: 949146 - DNA, 120 bp, Artificial Sequence
  ENSG00000226440_16 (sequence is synthesized)
taaccatgctttttctggttttggacggaatcttaaatccaagtttttaaaagggtcttactttcttaatatagttttagattagattttagaatcagcacattatgcacgaatctaaga

SEQ ID NO: 949147 - DNA, 120 bp, Artificial Sequence
  ENSG00000226440_17 (sequence is synthesized)
aatagacattttgcacaatccaaggtggaggttagtcatcattttgcctctctctacagtttgtgagagagaaattatagcaaccagaacagcactctagtcctctagagagcaatgttt

SEQ ID NO: 949148 - DNA, 120 bp, Artificial Sequence
  ENSG00000226440_18 (sequence is synthesized)
agcttctggaccacaaatggggtgaactactgtatcgagaaaggagagagtaagacttgagagctatctttttagctcagggtgcaggatttcatcttgttctttactagctgccaatta

SEQ ID NO: 949149 - DNA, 120 bp, Artificial Sequence
  ENSG00000226440_19 (sequence is synthesized)
atcacacactttttaatttaatctgggccctcttctgtctgcctgcccagtgctggtaggagtgtattcgtccaagacctatggacttcttatttttggttaaatatgtgctcccagctc

SEQ ID NO: 949150 - DNA, 120 bp, Artificial Sequence
  ENSG00000226440_20 (sequence is synthesized)
tgtataaaataaaacagggttcaaatcctgggtctgcatgtagtacttttgggagcttggcatgtaacttagtccctctgaaagtttccttccctgtaaaatgggcataatgatgccttt

SEQ ID NO: 949151 - DNA, 120 bp, Artificial Sequence
  ENSG00000226440_21 (sequence is synthesized)
ttgtcataggcatttcaactagagcaattccatcttgaataggggctgggtaaaataggactgagacctactgggctgcgtttggaggaggttaggcattctaactcactggatgagaca

SEQ ID NO: 949152 - DNA, 79 bp, Artificial Sequence
  ENSG00000226440_22 (sequence is synthesized)
ggagatcagcacggtaaagaaggcagtcaaatcccaacaaaaccaaggtggtgaccttggtcggactcactgctcatta

SEQ ID NO: 949153 - DNA, 120 bp, Artificial Sequence
  ENSG00000226440_23 (sequence is synthesized)
agtagagaaagacaactgacctcagagccaggaaacttggttgtggttccagttctagaaaccctgtgtgggaacttggggaagtgactcaacttctagctctggtttcttcctcttcaa

SEQ ID NO: 949154 - DNA, 120 bp, Artificial Sequence
  ENSG00000226440_24 (sequence is synthesized)
tgatgttagcagcatgatgatttccaggctcttcacattctaacagtctagaactctgtgaaacttcctgctgtctcaacaagtttccacgctaggagactttgggcttatcatttaaca

SEQ ID NO: 949155 - DNA, 120 bp, Artificial Sequence
  ENSG00000226440_25 (sequence is synthesized)
tttccatgctttcataaattagatgaataacctccggactgcctggtttgtaagatggttgtgaagattaaaggtggaaatatataggaaaacactttgtaaatcatgaaagcttaataa

SEQ ID NO: 949156 - DNA, 120 bp, Artificial Sequence
  ENSG00000226440_26 (sequence is synthesized)
gtatcaacactattttctacctgagtcagtagtcattggaaattccaatatttggcagttgtgaataactgccaatttaacagttgttcaatatcaacagctttttaaaagctgaggtct

SEQ ID NO: 949157 - DNA, 120 bp, Artificial Sequence
  ENSG00000226440_27 (sequence is synthesized)
tcaagctacaggtagaaggagataaaagaagctttcctaattcattagaacatcagttctccccagacataatgttcatcatggaagtacttttcccctttggagatcactggaaacagc

SEQ ID NO: 949158 - DNA, 120 bp, Artificial Sequence
  ENSG00000226440_28 (sequence is synthesized)
agagtagtgtctccatacaggcaagccttttaatccccagtaaaacaaaaagatggcgataaatattcagtatcttaaaaatttaagtaaatatgcagtgtcctacctctcactcacatc

SEQ ID NO: 949159 - DNA, 120 bp, Artificial Sequence
  ENSG00000226440_29 (sequence is synthesized)
gcaaatgatcttagtttgttccttggagaggaaccaaatgctttagtggatggtagcacattctctctccctttgcttgtatagacctgacctaacttaaaaataaatgtttagttaaga

SEQ ID NO: 949160 - DNA, 120 bp, Artificial Sequence
  ENSG00000226440_30 (sequence is synthesized)
tcccctttggagatcactggaaacagcttctggaccacaaatggggtgaactactgtatcgagaaaggagagagtaagacttgagagctatctttttagctcagggtgcagctttgcaag

SEQ ID NO: 949161 - DNA, 120 bp, Artificial Sequence
  ENSG00000226440_31 (sequence is synthesized)
tccccctgagtgatgtcacccaatctcttggcttgagcgccaccattttctctacaattcctgcctccagcttgatcttctcatctaggcaccagacacagacttccaaataagtgtgga

SEQ ID NO: 949162 - DNA, 120 bp, Artificial Sequence
  ENSG00000226440_32 (sequence is synthesized)
actgctttagctggaagacctgaagcacctcaaactcagcacagccagagctaaaaccattatcttctttctaaagcctgtcttttgatttgtgctttttatggacattggtaaatgttc

SEQ ID NO: 949163 - DNA, 120 bp, Artificial Sequence
  ENSG00000226440_33 (sequence is synthesized)
gcatcttaaaacatcagagtccttcaagtcttccttctacctcactctaatatttaatcatttcagggattcttttcccaaatcttaagaaaacttcagacacaccgaaattgagggatg

SEQ ID NO: 949164 - DNA, 120 bp, Artificial Sequence
  ENSG00000226440_34 (sequence is synthesized)
ttctacaaaatatctgacactcctaaagagtgtcaaagccagtaaaaacaagaaagattgagtaactttcacagattgaagatgactaaggaggcacgatgaatacaagcaaggtcatac

SEQ ID NO: 949165 - DNA, 120 bp, Artificial Sequence
  ENSG00000226440_35 (sequence is synthesized)
cctggaccagatcccttgaaagtaaaggacattagtggtcaaatgtgaacgaaatctgtagttcgttaatggtaatgtgccaatgttaatttcagttttttacaaatgttctgtgggtct

SEQ ID NO: 949166 - DNA, 120 bp, Artificial Sequence
  ENSG00000226440_36 (sequence is synthesized)
agcagatataaagattagggaaagctgggtgaaaggcataaggaaactctatgctatcttagctacatttctacaaatcaacaatttttctaaaacaacaactaaaaagcaaaacaaaaa

SEQ ID NO: 949167 - DNA, 120 bp, Artificial Sequence
  ENSG00000226441_0 (sequence is synthesized)
tcaggtctgcccatggacattctctgcacacagctattatggtcagtacctgaaagctcagtccctctcctgttctacacaaacaccaatgtctccccagtgcctcacacaccaacttga

SEQ ID NO: 949168 - DNA, 120 bp, Artificial Sequence
  ENSG00000226441_1 (sequence is synthesized)
catccagacatgagattacacctgacaactagatcccctcctgcattcatgcacaaggctcttctcctaaaacaggctgatgtgatgatattaaacgcttttttatctgactttccacta

SEQ ID NO: 949169 - DNA, 120 bp, Artificial Sequence
  ENSG00000286585_0 (sequence is synthesized)
acgtggggtctgaagtcttcgtgggtgtaggtttcttcgttatgctgacgacaggcagtgcccgaactctaggctgggagttgtgccatgctgctgctttcgtgggctgaccagaaaagg

SEQ ID NO: 949170 - DNA, 120 bp, Artificial Sequence
  ENSG00000286585_1 (sequence is synthesized)
gtagaaggattgacgtttacgaagtttttgaatcaggaggcaaggtcgccttgtgcccccaaaaggatagaaaaaggcctggcaaactggagaatcgcgtccttacggtatcctgtgttt

SEQ ID NO: 949171 - DNA, 120 bp, Artificial Sequence
  ENSG00000286585_2 (sequence is synthesized)
acggtatcctgtgttttccagttgaaagcttgtgaaaattcgctttatccttgaagttcagaattttcaccaggatgtatgaagaccctgtcctcgatggatcagctggcaccacccaga

SEQ ID NO: 949172 - DNA, 120 bp, Artificial Sequence
  ENSG00000286585_3 (sequence is synthesized)
gcccccatccaggaagtgactcagtgtaagaagacagcttcaactccctatgatttcatctctgaccaatcagcactctcggctcactggcttcctccaacccaccaatttgttcttttt

SEQ ID NO: 949173 - DNA, 77 bp, Artificial Sequence
  ENSG00000286585_4 (sequence is synthesized)
ggctcactggcttcctccaacccaccaatttgttctttttttttttgagaccaagtctcaagcaacctccgcctcct

SEQ ID NO: 949174 - DNA, 76 bp, Artificial Sequence
  ENSG00000286585_5 (sequence is synthesized)
caatttgttcttaaaaactctgatccctgaatgcttagggagactgatttgagcagtaataaaactctggtctccc

SEQ ID NO: 949175 - DNA, 120 bp, Artificial Sequence
  ENSG00000286584_0 (sequence is synthesized)
ctctctcttccgctggactttaacaagcaagcacatgacgggcttcatcagtcctggacgagaaagctgagatgaaaataacttgagtcttggatgaaatcagtgaccctatgatatcat

SEQ ID NO: 949176 - DNA, 120 bp, Artificial Sequence
  ENSG00000286584_1 (sequence is synthesized)
cacatctagagctgactctaactggacttccagctatatattcaagaaacaagacctgcaaacccctctttgctgattcaagtatgcctggcgaagatccacaaagtagaaggcagaagg

SEQ ID NO: 949177 - DNA, 120 bp, Artificial Sequence
  ENSG00000286584_2 (sequence is synthesized)
tcagctcagtacccaaggcacttcctgtggaaagttactcacttaatcccaaaggcaagacaagggcaaccctttaatattcatttggaaaaatcaaaaagggagagtagcatagatagg

SEQ ID NO: 949178 - DNA, 120 bp, Artificial Sequence
  ENSG00000286584_3 (sequence is synthesized)
gtctaatgcaaatatttccttcatttagctgttcacttcatttggtttaaataaagataaaccacatcaagatacaaacatctaaactcttttctaaaagactcaaaggaagaatacatt

SEQ ID NO: 949179 - DNA, 120 bp, Artificial Sequence
  ENSG00000286584_4 (sequence is synthesized)
tatagaaaagtttggaaagataaccaaaaacgaagccattcaacctttcaattatagcagcccatagcattgttacgacttttgcgactgactacataacaaaaggggctgtgtggtgga

SEQ ID NO: 949180 - DNA, 120 bp, Artificial Sequence
  ENSG00000286584_5 (sequence is synthesized)
agaccctggatttaaacctgtttgattatatctctggatgtaaagtctttgactggagggataatctttctctcctcagtattttccagggtcttaataaatatctgctgaatgaacaaa

SEQ ID NO: 949181 - DNA, 120 bp, Artificial Sequence
  ENSG00000286589_0 (sequence is synthesized)
aatcccattccttcgtcagctccgacagaccaaccagcatccccctcccacttgccactttgataggggtgactggtatctccatctccttatctttgttgatcatgtttctgggtttcc

SEQ ID NO: 949182 - DNA, 120 bp, Artificial Sequence
  ENSG00000286589_1 (sequence is synthesized)
aattgcgtcaatttaactggttgccaataattctgtcatctgaggggaaagcagaatctcaactgaacatgcagatgtcctattgagactttgcccataagggagcgtctttggtgctta

SEQ ID NO: 949183 - DNA, 120 bp, Artificial Sequence
  ENSG00000286589_2 (sequence is synthesized)
atagttcacagaatctctggaggagcggggggctagaaaaccagacttgaagactacacagagagactccgagtccccctgggactgacctgagatgaccagggagctggtatttttagc

SEQ ID NO: 949184 - DNA, 120 bp, Artificial Sequence
  ENSG00000286589_3 (sequence is synthesized)
ttccagaggagcctcaaaattacagttaagtctacagtcagacagaaggaaactggcatttattaaacaccaactttgtgcctggaagattcacttacaatatcataatctttacaataa

SEQ ID NO: 949185 - DNA, 120 bp, Artificial Sequence
  ENSG00000286588_0 (sequence is synthesized)
ggcatgatctcagcttactgcagcctcaacctcctggactcaggtgagaggaactacaggtacatgccaccatgcctggctagttttcatattttctgtagagacagggtttcaccatgt

SEQ ID NO: 949186 - DNA, 77 bp, Artificial Sequence
  ENSG00000286588_1 (sequence is synthesized)
ctgatcttcaactcctggccatgcctggcctggaggatatttctgaaacgggtcacttacacagccattggcaggcc

SEQ ID NO: 949187 - DNA, 120 bp, Artificial Sequence
  ENSG00000286588_2 (sequence is synthesized)
ttgagtgttctcttgacatgacagctggcttcctccagagtgagtaatttgagaagaggcaaggtggggggccataatgccttttatgacctagtcttagaaaatgacaacactttcatc

SEQ ID NO: 949188 - DNA, 120 bp, Artificial Sequence
  ENSG00000286588_3 (sequence is synthesized)
tccacaatgtcctactggctacacaggtaaaaccctattcaatgcaggaagggacaagaaagttgtgaataccaggagataagaatcactgggggccattttggagcctagctgacacaa

SEQ ID NO: 949189 - DNA, 120 bp, Artificial Sequence
  ENSG00000283562_0 (sequence is synthesized)
atgttgtttgggctgagctgggctttccttgttactattttaagaggtgtgcagtatgaggtgcagctggtagagtcttttttttttttttttttcactttttagcgaacatccatgggt

SEQ ID NO: 949190 - DNA, 120 bp, Artificial Sequence
  ENSG00000283562_1 (sequence is synthesized)
attttcctcttgcttataaggttttaaccagaagaatgctgtcatcatctttcctgttcttttagaaggaatgccccctcaactcatctccacttgtctgcatgtatttctatttgtctt

SEQ ID NO: 949191 - DNA, 120 bp, Artificial Sequence
  ENSG00000250511_0 (sequence is synthesized)
tttctatatgtgagttttcaaatatagtgtgatttatccccagaaaaaattcccagtcttctaatcccgtaactgggagccacttggagtttgccagtaaactttcctaagttcctgctg

SEQ ID NO: 949192 - DNA, 120 bp, Artificial Sequence
  ENSG00000250511_1 (sequence is synthesized)
tatcactcctctgttgctttctagaattgtcctgactgaaagtggaggtctttgatagaaaatggaaccatcttcagtgttcttaatgttaactttgcacatatcattttcactctaagt

SEQ ID NO: 949193 - DNA, 120 bp, Artificial Sequence
  ENSG00000250511_2 (sequence is synthesized)
tgctataattttcagtaggtgctgtacctaaatcacgttacctcctaaattcctcttcttttcagacatagagataaaacagtattagaaggactccaagaagcctggaagagggatgaa

SEQ ID NO: 949194 - DNA, 120 bp, Artificial Sequence
  ENSG00000250511_3 (sequence is synthesized)
gccactttggaatgctgcctccatatttgttcttttggttaattcacttcttggcactaccaccagagggcaggcaaaggaagggagaagcagcaatcacttttagtgggaagtctacca

SEQ ID NO: 949195 - DNA, 120 bp, Artificial Sequence
  ENSG00000250511_4 (sequence is synthesized)
tctgcaagcccggaagagaggcttcaccagaaacggaatcagccagcactttgatcttggactttccagcctccataactgcaagaaaaatgcatttctattgtttaagccacccagtct

SEQ ID NO: 949196 - DNA, 120 bp, Artificial Sequence
  ENSG00000250511_5 (sequence is synthesized)
atggtatttccttatggcagcccaagctgactaagacacatgatattccatcaaaaacagatgttatttcatcaggggttgtcacagtcacaataattggatgcgaagacatcaaagaat

SEQ ID NO: 949197 - DNA, 120 bp, Artificial Sequence
  ENSG00000250511_6 (sequence is synthesized)
ttgaacagatgacaggccgagaagacatcaacttctgtgaattctgcttctgcgacttctgtgtgacttttggatatgtgccaaacttttcaagccctatttctatatctgtgcaatgag

SEQ ID NO: 949198 - DNA, 120 bp, Artificial Sequence
  ENSG00000250511_7 (sequence is synthesized)
aatgatgacatcactccacagatttggtctaagaattaagagaggttgcatatcaatttgccaaatattgatgttcaggtttttctaatattaacttgttattggaatttggatacttca

SEQ ID NO: 949199 - DNA, 120 bp, Artificial Sequence
  ENSG00000250511_8 (sequence is synthesized)
taattaatgaaagaaaatattggcagtttatcctttagttctaatcacctctcgtttccctcctaggtcttgtcagcaatacagactggttgacaggcctagcagtactgtcagatttcc

SEQ ID NO: 949200 - DNA, 120 bp, Artificial Sequence
  ENSG00000250511_9 (sequence is synthesized)
ttggttcaaagctcagtctttttactttctagatatataagtttaagcaagtttcctcacccattaaatagaagtaattatggcctgtactttttggaactgtgcacaggactcagtgat

SEQ ID NO: 949201 - DNA, 120 bp, Artificial Sequence
  ENSG00000250511_10 (sequence is synthesized)
aaaattcatggttagtacttggcatagtacctggcacagaatgagaacctaacccattagctgctatagttattttgactcttaagcagtaagattctgaaatctaactctgctaaatca

SEQ ID NO: 949202 - DNA, 120 bp, Artificial Sequence
  ENSG00000250511_11 (sequence is synthesized)
ctactaactttaaaaatttcattggctctacttaattaaaaatatttccaaaacaggagtatgttgtattggcttacattttccaattatgcgggtttcatttataacaggaaaggtact

SEQ ID NO: 949203 - DNA, 120 bp, Artificial Sequence
  ENSG00000250514_0 (sequence is synthesized)
aaagcgcttgcagccgggagctgcgcggccgcgctgagagtcacgtggtgcgccaggaagccgcctagcttcttggagagctcactgcctcgctccgctcctttcctggcgggaggctct

SEQ ID NO: 949204 - DNA, 120 bp, Artificial Sequence
  ENSG00000250514_1 (sequence is synthesized)
gagccacccccacctgcgcagggcggccaggggttaaaacaaagtcacaagtctgacccacactcaaagggagaagattatgcaagagcaaaagcacgagatggaaaccatggggccatc

SEQ ID NO: 949205 - DNA, 120 bp, Artificial Sequence
  ENSG00000250514_2 (sequence is synthesized)
ttatagtctgtctgccggagaaagatgaacacaaatcctgtgacaccaggtggagggtgactatggaacatggaacacacgcagtgtaataatgtaggagcagagtcctccattctcctg

SEQ ID NO: 949206 - DNA, 120 bp, Artificial Sequence
  ENSG00000250514_3 (sequence is synthesized)
tgacacccattcccattatacacttagaacctccaagcttgtgcataattatcaatggataagagacagaagaagcaatatacacagcatctgggaggctcctaatccacagataaggct

SEQ ID NO: 949207 - DNA, 120 bp, Artificial Sequence
  ENSG00000250514_4 (sequence is synthesized)
tcctaagcttcctttcctatgctagacatattttggtgatggagtatgacaagcacacgggacacattagccatggaggctgctgagttctggagttccactagacacatggtcttgctg

SEQ ID NO: 949208 - DNA, 120 bp, Artificial Sequence
  ENSG00000250514_5 (sequence is synthesized)
tggttatatgtataacttgcatgcttcagctcagcttcccatgattttcaggataatttaatatgagcagtctaaatagaccaggacgtaatgctgaaatgatttctagatcagtagtca

SEQ ID NO: 949209 - DNA, 120 bp, Artificial Sequence
  ENSG00000250514_6 (sequence is synthesized)
gcgcgtagccaaccctttcaggaccctcatttgtcttctatgttagtgtattccatcagtcgatatttgcaaagaattctgttcagagtcaaaacttcttcagagatccctaaggaggga

SEQ ID NO: 949210 - DNA, 120 bp, Artificial Sequence
  ENSG00000250514_7 (sequence is synthesized)
ggaataaattacaggcccatggttactctttcatataatatctaaaaggccattatgtgaaaagattgtctctgaaatctaattcttgcctcagccaggtcaatttaggaaaactgcact

SEQ ID NO: 949211 - DNA, 120 bp, Artificial Sequence
  ENSG00000250514_8 (sequence is synthesized)
ggcagcagccagctctgtaatgctgcccaagcagataaaagcttgtagatttgaataaggcccagaccgcgcttgctgcctctgtggaaacagatgttttcctgtgtgaaaacagccact

SEQ ID NO: 949212 - DNA, 120 bp, Artificial Sequence
  ENSG00000250514_9 (sequence is synthesized)
acagatgtcttcaattttttttttcactgtaatgatactgcagtgaacagcttctgagatggcccctagcaatcctgcctccacatccaggcctttgtcccttccctgtgaatgggtgct

SEQ ID NO: 949213 - DNA, 120 bp, Artificial Sequence
  ENSG00000250514_10 (sequence is synthesized)
ggctgagtagtttgtttcaaaccagcagaatatggcaaaagttgtcactcccatgattaggttacatgatatagtcgagtagaatgtattcctttgctggctttgatgaggcaagttgtt

SEQ ID NO: 949214 - DNA, 120 bp, Artificial Sequence
  ENSG00000250514_11 (sequence is synthesized)
ttatcaggaaggtccacatggcaagaaactgagggcaacctctgaccaacagccagctagaaaacgaaccctcaacccaacagctcatgggaactggatcctgccaatgatcatataagt

SEQ ID NO: 949215 - DNA, 120 bp, Artificial Sequence
  ENSG00000250514_12 (sequence is synthesized)
gggcttggcagttgatcctttcccagtcaaaacttcagacaagaacacaaccctggctgacaacttgattacagcctatgagaaattctaaaggagagagcccaggtaacactcatagaa

SEQ ID NO: 949216 - DNA, 87 bp, Artificial Sequence
  ENSG00000250514_13 (sequence is synthesized)
cctagacaccaggaggttgaggggaaggagtggctttgggtataagtgcaatttaggctgaatcctggaggaaacctaacgttcctt

SEQ ID NO: 949217 - DNA, 120 bp, Artificial Sequence
  ENSG00000250514_14 (sequence is synthesized)
gcaatttaggctgaatcctggaggaaacctaacgttcctttgaaagatttgaggtttataattaaaagcagagattccatagacttggcaatttaaaaataccagatgttgcattgtgag

SEQ ID NO: 949218 - DNA, 120 bp, Artificial Sequence
  ENSG00000250514_15 (sequence is synthesized)
caggaggatatcagttcagcacctctaccccccaaaaagaaaagaaattcagggagggagcaaagaaacattcctaaaatgaattggagctggaggccattatcctaagtgagttaatgc

SEQ ID NO: 949219 - DNA, 120 bp, Artificial Sequence
  ENSG00000250514_16 (sequence is synthesized)
aagaagagaaaaccaaatactgcatgctctcatttataagtgggagcttaacactgagcacacatggacataaacatgagaattacagatactatggaattctagagtggggagggaggg

SEQ ID NO: 949220 - DNA, 120 bp, Artificial Sequence
  ENSG00000250514_17 (sequence is synthesized)
agggagggagcatgggttgacaaactacttattgggtgctgtgctcgctacctgggtgcaatatgcctgtgtaaaaaaactgcctatatatgccctgtatctaaaataaaagttgaaatt

SEQ ID NO: 949221 - DNA, 120 bp, Artificial Sequence
  ENSG00000250519_0 (sequence is synthesized)
gacttagccaagctctgcattttgagcctgctgactttcatttaaaaggaatgaaaggctgaaaatccaggctgctgtgtctgtagataaaggtcaaaccatgtttgagttcttcactgt

SEQ ID NO: 949222 - DNA, 120 bp, Artificial Sequence
  ENSG00000250519_1 (sequence is synthesized)
tgtgtccacctaaataaaactgagtcgtttgaattgacttctgataggcaacagtgccttgtttccgatgagtttgatgtcaggatccatgagagaagagtggtaagccagcatcttggc

SEQ ID NO: 949223 - DNA, 120 bp, Artificial Sequence
  ENSG00000250519_2 (sequence is synthesized)
ggcgcccgggtttcaacccagaggagcaggatcggaagcattgttaagtacagaggtctttggagttccttatcatctttgacagtgctaggactgcttttttctatatcagacacgtgg

SEQ ID NO: 949224 - DNA, 120 bp, Artificial Sequence
  ENSG00000250519_3 (sequence is synthesized)
gctcctgctgtgtcttcctggaaagcagaggccaaggatggagcagaccaagaggatgccaggaaaaatcacaaagaagcccagaaagcacagctggaagccaagaaccctatttttggt

SEQ ID NO: 949225 - DNA, 120 bp, Artificial Sequence
  ENSG00000250519_4 (sequence is synthesized)
tcatttgaaagagaatggagtacatcagacctgtgtatttaggtgaagtatgataaacatcatcatacttcaaagattatgaacatcaaagattatggaaaggaacatgactgcttagtt

SEQ ID NO: 949226 - DNA, 120 bp, Artificial Sequence
  ENSG00000250519_5 (sequence is synthesized)
tattccattaccagtgatctgcttgtttgttcatttgcttacccatccattcatttattcattcattcctccatccattctctttcacttattctacaatcatgattgtatgcctaccat

SEQ ID NO: 949227 - DNA, 120 bp, Artificial Sequence
  ENSG00000250519_6 (sequence is synthesized)
atcgctagagagagggcaggaaaagatccaaggatgtgaatacaatcttctgcttcatgatgagagctaaaggaatctgtaaagactttgtctttttcatttttctctctcctacataga

SEQ ID NO: 949228 - DNA, 120 bp, Artificial Sequence
  ENSG00000250519_7 (sequence is synthesized)
ccctggaaaatgttttatttcttataatttgcctgaggtttactcatccactaccagagctctgaaaacactcttcagaacactattttaaaataatgacaatgacaataatagataaca

SEQ ID NO: 949229 - DNA, 120 bp, Artificial Sequence
  ENSG00000250519_8 (sequence is synthesized)
tatattcagtgttttttgtatgtgaagcaatgtaataaccatttaaaatgattgtaactatactttataagagtatgatgaaacaggcactattaaaatgctagtttttcacacagctaa

SEQ ID NO: 949230 - DNA, 120 bp, Artificial Sequence
  ENSG00000250519_9 (sequence is synthesized)
catctgagagttgttatttcctttgacgacaaaacagaaagcatgtgtccttcctcctgctgagtggcaaaacaagatgcccatcctacacactgtccagaacagcaggtcctcacagtc

SEQ ID NO: 949231 - DNA, 120 bp, Artificial Sequence
  ENSG00000250519_10 (sequence is synthesized)
ttctcagaaaatccaggccgaatgaagagaaaaaggaaggccaatgccagccagttgcatctttcatagaatgagttaagcattggcctagcataaggtacacaggcaggctgacatggc

SEQ ID NO: 949232 - DNA, 120 bp, Artificial Sequence
  ENSG00000250519_11 (sequence is synthesized)
tgatgggctcctgatgccacatcattagtactctgaatgactcagatactgttattttctggtaggtcatgttgacttgagatctagaagaaacactggtccagaagtcataatgcctgg

SEQ ID NO: 949233 - DNA, 120 bp, Artificial Sequence
  ENSG00000250519_12 (sequence is synthesized)
gtttcaatggatccaataatagctaccacttatggggtccttgctgtgttttagatcttcctgggcactttttatacatcatgtcaagtatctcttttggaataagatatgaatttctgt

SEQ ID NO: 949234 - DNA, 120 bp, Artificial Sequence
  ENSG00000250519_13 (sequence is synthesized)
gcctataaattttatatatatttctattttacaggcaattttacagatatctccattttacagataaagacattgaggctctgactgctatatgctcaatagtatgctagtccctcccgg

SEQ ID NO: 949235 - DNA, 120 bp, Artificial Sequence
  ENSG00000250519_14 (sequence is synthesized)
caatcggggaatcacacccaatagcatacaaagttagatggagatggagtgtcccggctgcagagagtgggagtgagagtcacacccagcctgagaggcctggattgccaggagagacaa

SEQ ID NO: 949236 - DNA, 120 bp, Artificial Sequence
  ENSG00000250519_15 (sequence is synthesized)
ataccaaggagatatcaggaagaatattgtccccagtaaataccaagtcacatcaggaagaatattgtggagagagaggtaaagaatcaggatggaaacagaaaataggccgaacaatgg

SEQ ID NO: 949237 - DNA, 120 bp, Artificial Sequence
  ENSG00000250519_16 (sequence is synthesized)
aagtaaggtagaaagcagagtgctttctacaagccaagaagtggccccccaacagataccaagctctggacctcctggtgccttgattttggacttcccagcctttttcagacctgtgag

SEQ ID NO: 949238 - DNA, 120 bp, Artificial Sequence
  ENSG00000250519_17 (sequence is synthesized)
aaaggtccgccgcatcttggaaggaaacttcaaagctcatttaaagtcagcctctcacatagccctgctggtctaactttcttctgaatgtgatttcagaagtaaaaccaggccaggggc

SEQ ID NO: 949239 - DNA, 120 bp, Artificial Sequence
  ENSG00000250519_18 (sequence is synthesized)
atttggagcctccattcatggccattatatggtctgtctaatgaatgaaatgtttgaccttagagaaaacttgaaatgcatagttttctttgctgacttgaatgatataagtttaaaaat

SEQ ID NO: 949240 - DNA, 120 bp, Artificial Sequence
  ENSG00000250519_19 (sequence is synthesized)
ccgatagtggttgctagttgaaaattcctattccttgggaaactgttgaaagtctgtttagtactaacccccctcattaatggccatttgcaaagccaggccaagtttagtcttctacca

SEQ ID NO: 949241 - DNA, 120 bp, Artificial Sequence
  ENSG00000250519_20 (sequence is synthesized)
gcactgaagaaacacatttttacccagaagaaatgagggtgaaatcctctgataactggaagatgctggatgttctggaaagaaaagtaatttttttttcaatctctggaaattgctttt

SEQ ID NO: 949242 - DNA, 120 bp, Artificial Sequence
  ENSG00000250519_21 (sequence is synthesized)
tttgttttaagtaagggtggctcagtagatgctaacagagaagctgggatcagctaatctggagaagattctgagagaatgagttggggaagctcacactgagaaaatgagaagattggt

SEQ ID NO: 949243 - DNA, 120 bp, Artificial Sequence
  ENSG00000250519_22 (sequence is synthesized)
aggaagggcggtttcttgctgtgtccaagaacaggaattgagaaatggtattaagctgaaggtgagaggggaacaaagaagactttgaaagttgcatacaggtttgaaacaaagtatacc

SEQ ID NO: 949244 - DNA, 120 bp, Artificial Sequence
  ENSG00000250519_23 (sequence is synthesized)
acaaggaatgggaacatgtagagctgttttaaaaatgtttctgtgtttgtgtgagtgtgtgtactagatatatttttaaaatgacttttctcggaattacatcatactttgaagatcagc

SEQ ID NO: 949245 - DNA, 120 bp, Artificial Sequence
  ENSG00000250519_24 (sequence is synthesized)
gatcctgaaggtctgtgaggcagttatcactatgtatggtatattttcaaagaaagcaaataaaacccaatgtgactaagaaagatgctaaagtcatacagctaattagctgtgggtcca

SEQ ID NO: 949246 - DNA, 120 bp, Artificial Sequence
  ENSG00000250519_25 (sequence is synthesized)
ggattcaaaccagtgcacccagcacatggtcttcaataaatatttattgagcagtgaatacatgaatgagtaaataagatgaagcaagcaagcaagcaggtaggcttgtctaacccaagt

SEQ ID NO: 949247 - DNA, 120 bp, Artificial Sequence
  ENSG00000250519_26 (sequence is synthesized)
gttcatgttctatcctctgtactggtggtttttaaattgtgtgccacaaaggccttgggtaacatgaggagggttagtatgagtggctgtctagcagcatggggccccaggctccctatc

SEQ ID NO: 949248 - DNA, 120 bp, Artificial Sequence
  ENSG00000250519_27 (sequence is synthesized)
tctactccaaccagggcatctctgcttctgtttgtgttaaacattgggcttttgcctgaggtttcatttgaagaagagggccttcttctagaaagtgtttattactcctgccccatgccg

SEQ ID NO: 949249 - DNA, 120 bp, Artificial Sequence
  ENSG00000250519_28 (sequence is synthesized)
tgttccctcctaagtatgcattatgaactagttaagtttaataaagacatatattactgtaaagttggaatttataccagtgtctgaattccagtagcagcccccatatcttggtaatcg

SEQ ID NO: 949250 - DNA, 120 bp, Artificial Sequence
  ENSG00000250519_29 (sequence is synthesized)
aaagccaactgtttctaatatccggcatgctgctgaggccattaacaatagatgagccatctagggcattatggctagcagccgggactacaacttcaagctgtctaggttcaactgtgg

SEQ ID NO: 949251 - DNA, 120 bp, Artificial Sequence
  ENSG00000250519_30 (sequence is synthesized)
ctctgccatgacctggtgaaatctcaggtaaatgattcgacctctccacactttagcttcctcatccatgaaatgtgatagctaccttatacagcatggaaactttgtgctccagtaata

SEQ ID NO: 949252 - DNA, 120 bp, Artificial Sequence
  ENSG00000250519_31 (sequence is synthesized)
tgaatgggctcactatagccaagtgcacttagttcccttgatctcacgtttttgtttatgctggctcccaacttaatgtggtcttctcacttttcatctgactgtgaaaactccaaccaa

SEQ ID NO: 949253 - DNA, 120 bp, Artificial Sequence
  ENSG00000250519_32 (sequence is synthesized)
aggtacttatattcctcccactcaataaatatgatggccttggtgtcagtaaggcgacatgtgaagagagatatcagtctggcttgccatacattacaagaatttgcaggcttaccctga

SEQ ID NO: 949254 - DNA, 120 bp, Artificial Sequence
  ENSG00000250519_33 (sequence is synthesized)
cagtcctagtccatgggagtgggtgatggggtactattgtgtcactgtccggggtcctgaataattaaagagtgcacagtggcttttacaagaatactaagaattatttatttgttaagg

SEQ ID NO: 949255 - DNA, 120 bp, Artificial Sequence
  ENSG00000250519_34 (sequence is synthesized)
taacactatctgctgtagtaggtaaccctctctacccccaaatctgagtagcttaccatattagaagtcttttcctgttctcatagggttccattggtgctgggggtgaggaggggaggt

SEQ ID NO: 949256 - DNA, 120 bp, Artificial Sequence
  ENSG00000250519_35 (sequence is synthesized)
ggtaaaggggtttgttccacacaaccattcagagattcatattgatgaagacggccatcttcaacatatagtttccagagttgttctgggctcagtatttagactccaggtggtatatca

SEQ ID NO: 949257 - DNA, 120 bp, Artificial Sequence
  ENSG00000250519_36 (sequence is synthesized)
gaggagagaaggagagtagagaactgtgtggcagatttttatgaaccagatctagaagggacattcatcactgtcactgggatgctgttaattaaaactcgagcatacaaccattcctaa

SEQ ID NO: 949258 - DNA, 120 bp, Artificial Sequence
  ENSG00000250519_37 (sequence is synthesized)
gaataaaagaggcagtgggatgttgcttatttgtgagttcattggaaaatcactagcttgtttttgccacaaaatattttttatgttgttacccaatacccccccccactgagacacaca

SEQ ID NO: 949259 - DNA, 120 bp, Artificial Sequence
  ENSG00000250519_38 (sequence is synthesized)
cacacactcaacacaaatacaactagagcaaaaaattcattaaataatcctctgtgtgtgatatagtctcatagtttctattctattttattgttttaaagtgctgtcatgacccattaa

SEQ ID NO: 949260 - DNA, 120 bp, Artificial Sequence
  ENSG00000250519_39 (sequence is synthesized)
gtgcttgcttctcccagcttgccacctccatctgggtcaggaggagcaattggaagcagaagctccaagagaaaggtgggaatgttggtaaacccaggtgaaaaaaagcaacaaggaggg

SEQ ID NO: 949261 - DNA, 120 bp, Artificial Sequence
  ENSG00000187979_0 (sequence is synthesized)
aagccttccaaaaagcgtgtgaaaaggaagccctactctactaccaaggtgacttcagggagcacattcaatgagaatataagaagatatgctgtgcacaccaaccagtgtaggagacct

SEQ ID NO: 949262 - DNA, 120 bp, Artificial Sequence
  ENSG00000187979_1 (sequence is synthesized)
cattcaatgagaatataagaagatatgctgtgcacaccaaccagtgtaggagacctcatggctcccgggtaaagaagaagaggtacccacaagaagatgacttccatcatacagtcttca

SEQ ID NO: 949263 - DNA, 84 bp, Artificial Sequence
  ENSG00000187979_2 (sequence is synthesized)
gagggtggtgcaggtggcccctctgaggcttgaatctagagccattgacactggagaatgatacctaccctgaaataactcact

SEQ ID NO: 949264 - DNA, 120 bp, Artificial Sequence
  ENSG00000187979_3 (sequence is synthesized)
ttgacactggagaatgatacctaccctgaaataactcacttcctgaggaaaaaacgccatctctagggtacagaaacctgattctgggctccttttgggaaggaggatttggagtctggt

SEQ ID NO: 949265 - DNA, 120 bp, Artificial Sequence
  ENSG00000187979_4 (sequence is synthesized)
gagagcaaatgattttgcaagtataaaacaatgtccagagaggctgtagggatatctgtgagcccagaggaaacaccaggggatcctgtgcgaagcaccatggcttcagctagggtggga

SEQ ID NO: 949266 - DNA, 120 bp, Artificial Sequence
  ENSG00000187979_5 (sequence is synthesized)
ggagtgggtgggcctctctctaatgacttatcctggtgtttgtgtttctaaagatttgattgtggagagcatatctgatgatggggatttgtaggtaggtaactactttccacgtaagat

SEQ ID NO: 949267 - DNA, 120 bp, Artificial Sequence
  ENSG00000187979_6 (sequence is synthesized)
gagggggcatgaaatcaaaaggaaacaggaaatatgtgtcatattggatttggtcttttccgggtttattggcataatagttagaactgtctctctgggctatgagggtgctgtgatatt

SEQ ID NO: 949268 - DNA, 120 bp, Artificial Sequence
  ENSG00000187979_7 (sequence is synthesized)
tcgagtgtcacctgtggtgaacagaatctgagggacacaactctctcacaggcacttccttcaacctggagacagagttctcctggtgtgtgcccaggggtggaggagaaattgacagtc

SEQ ID NO: 949269 - DNA, 120 bp, Artificial Sequence
  ENSG00000187979_8 (sequence is synthesized)
tgcctctgaactttcaggactttaaaaagcactcatgtttccatcctcactgttgactcctggcttaaagggatctcccggggtgagtgaggaggcgggatcggaccctggcagtctgac

SEQ ID NO: 949270 - DNA, 120 bp, Artificial Sequence
  ENSG00000187979_9 (sequence is synthesized)
ggcagcacctgtgttcctctgcactgggccgtggatgacattacacaccttgccactcccacggtcctgtgtgttccggatattttaaaataatggctataaggttgagcacttcaggat

SEQ ID NO: 949271 - DNA, 120 bp, Artificial Sequence
  ENSG00000187979_10 (sequence is synthesized)
acgctgttttgctgtgtgcagatggaggcagtggctggagtgaatgaacggcaacacttgctggcaaccggcagaagctgagagacagggaacaggctctcctccagagcctccaggagc

SEQ ID NO: 949272 - DNA, 120 bp, Artificial Sequence
  ENSG00000187979_11 (sequence is synthesized)
caggcctttggacaccttgaatgtgggcttctgggagaccatgcgtttctgttataagcagcccagtctctggcagtttttacggctgccccggaacactcatctatacctgtctgacaa

SEQ ID NO: 949273 - DNA, 120 bp, Artificial Sequence
  ENSG00000187979_12 (sequence is synthesized)
ggtcaagctccaaggaagggactctctacatatctacattgtttgcagattttacaataatcatttattcttgcatggctgatcattgttaaccaatacaaataaaataataaagaaatg

SEQ ID NO: 949274 - DNA, 120 bp, Artificial Sequence
  ENSG00000283692_0 (sequence is synthesized)
ggggccggggcggaggcggcgaggccaggcgtttcggaagtcggggctccagctcagctgtcctcgggcccctcgtcggggctcccagggtccctgtccacacaccaagttcttgcaagt

SEQ ID NO: 949275 - DNA, 120 bp, Artificial Sequence
  ENSG00000283692_1 (sequence is synthesized)
ctctgtcgaggctcgggcggggggggaagggacctcatttcctagggtcaattctctcgcggtctctgcccgctgaccctttgacctccacctacagggcccttggcggccgtaagccgg

SEQ ID NO: 949276 - DNA, 120 bp, Artificial Sequence
  ENSG00000283692_2 (sequence is synthesized)
cggtcgcccgggctccgaggacgcttcgcgccccatcgcctcccagcctcattaggccggcggggctgtaaagcaggaatcagcctctgcctaatccggacctggggtcaatacgagccc

SEQ ID NO: 949277 - DNA, 120 bp, Artificial Sequence
  ENSG00000283692_3 (sequence is synthesized)
cctggggtcaatacgagcccaaacaatgggttttgcactgttgcccaggctggagtacactggtgcaatctgggcttactgcagcctcccccgtggttcaagtgattctcctgcctcagc

SEQ ID NO: 949278 - DNA, 120 bp, Artificial Sequence
  ENSG00000283692_4 (sequence is synthesized)
ctctgtcacccaggctggagtgtagtggggcgaacatagctcactgcagcctctgactcctggactccagcagtcttcccacctcagcctcctgaaaggatcatttgttcaactcagcca

SEQ ID NO: 949279 - DNA, 120 bp, Artificial Sequence
  ENSG00000283692_5 (sequence is synthesized)
tgaagagaccacatggagaaacatgtagagaggaaccaaggcccttagctgatagccagcattaggcatcaagcatgtgaatgaatgaaccttcagatgattcctgctctctgtcagtga

SEQ ID NO: 949280 - DNA, 120 bp, Artificial Sequence
  ENSG00000283692_6 (sequence is synthesized)
gtcttccacttgtgaccccagacatggtagaggagatacaagccgtcttcactgtgcctgtttggattcctgagtcacagaaactgtgaaagataaactcactctagggtcttgctttcc

SEQ ID NO: 949281 - DNA, 120 bp, Artificial Sequence
  ENSG00000283692_7 (sequence is synthesized)
tggttggttttgatgaaccaagctgccatgaatcttacaaccacaaggaaatgaattctgccaacagccagagtgaacttgtaagcagaccccagttgagcctgacgatgagaacagagg

SEQ ID NO: 949282 - DNA, 120 bp, Artificial Sequence
  ENSG00000283692_8 (sequence is synthesized)
cctagctcacactttgatggcagtgtcacagagaaaattgctaagccatgcatagacttactgaaccacataaactgtgagataataaatgtatgtgttattttaagccattacaattgt

SEQ ID NO: 949283 - DNA, 120 bp, Artificial Sequence
  ENSG00000283692_9 (sequence is synthesized)
gctaatttgttatacagcatagaaaactaacacaaaagtgatggatcctctccaagaaaaatgtagagactcacatatacatagaattcttatgcaatatttttgggtgttgctggaccc

SEQ ID NO: 949284 - DNA, 120 bp, Artificial Sequence
  ENSG00000283692_10 (sequence is synthesized)
ctgatttccatgaatggtgcctagtttaagaaccactgctctagaatgtttgtcctgcagtaacatgcagaagagtgcaatgcctagaaaatttcctttgtgatgttttgtattaagtat

SEQ ID NO: 949285 - DNA, 120 bp, Artificial Sequence
  ENSG00000283692_11 (sequence is synthesized)
agtacatcaccctgacagtaaagagcaaaggaaaagtgacgtctgctacacagctttaagagagtgctgggtacctgaaggccggctcctactgggactaattccatccagacagctcca

SEQ ID NO: 949286 - DNA, 120 bp, Artificial Sequence
  ENSG00000283692_12 (sequence is synthesized)
gacttgtaatatatttttaaaaaaatcatagattcattagaaaatttgatgaaaactaaagtgacctccatgacccccatattctggtgttcatacccatgtataatctccttctcttag

SEQ ID NO: 949287 - DNA, 120 bp, Artificial Sequence
  ENSG00000283692_13 (sequence is synthesized)
caatatcttatcactgagtattttccacttaaatacttgcagaagattgaatttctcttctgcatctttggaggtagatcattggaacagcatcatattatttttccagtcatagaagta

SEQ ID NO: 949288 - DNA, 120 bp, Artificial Sequence
  ENSG00000283692_14 (sequence is synthesized)
atccactctcagtcagtttccccacctcccactcctctctttcaggagaaaaaactaggtggaagatcagcagacatcagtaaacagtagacaaacaggaacagtaggtagagtgatgct

SEQ ID NO: 949289 - DNA, 120 bp, Artificial Sequence
  ENSG00000283692_15 (sequence is synthesized)
attgagttaattattgcatggatactaatgaatacaactcagtaaatggtttacatttttttctatttttcattggcaagttaaatttaaaataaagcaaagttctttcttttgatcata

SEQ ID NO: 949290 - DNA, 120 bp, Artificial Sequence
  ENSG00000283692_16 (sequence is synthesized)
tcaaaaataaaattacttcctggaagaatgacagagattattgcctcccttaaaactctgaaggatgcagaaataaggatcatttgttcaactcagccactgtgctgtgaaaaatgccaa

SEQ ID NO: 949291 - DNA, 120 bp, Artificial Sequence
  ENSG00000267726_0 (sequence is synthesized)
gcctccagagctatctttgcttgaaagaatgaaacttcaggaatgaaagtttgcacataaagcaagcccatgagaaagacatttcgggaaaactagaatcctgttaagttatgggatttt

SEQ ID NO: 949292 - DNA, 120 bp, Artificial Sequence
  ENSG00000267726_1 (sequence is synthesized)
tggcaagaggaagactgttaattgcgagaaagctgggtcttgaagatgattccatatcaacatacagggagttccaccactgaatggtctatcggttgggaatgccatcatttattttca

SEQ ID NO: 949293 - DNA, 120 bp, Artificial Sequence
  ENSG00000267726_2 (sequence is synthesized)
ccagtggggaagaattggtattaatatcaaaaccacagtactgtcatacccagctataatttgcaatgtttatatgcctgtacgaatgaataattaacagttaaatgaatcaatatatat

SEQ ID NO: 949294 - DNA, 120 bp, Artificial Sequence
  ENSG00000267727_0 (sequence is synthesized)
aaaccactccctgggtccccgccggaggctggcccagggcggtcccacagccgcgcgcctcacgcgcagttgcccatggccttgaccaaggagctctctggcagctggcggaagatgccc

SEQ ID NO: 949295 - DNA, 120 bp, Artificial Sequence
  ENSG00000267727_1 (sequence is synthesized)
cgcagcgtgtccagttcgcggctcagctgttccacccgcttgcgcaggcggtcattgtcactggtcagctccagcaccttctgctgcgtctccacgttgcgctgcttggccttgtcgcgg

SEQ ID NO: 949296 - DNA, 120 bp, Artificial Sequence
  ENSG00000267727_2 (sequence is synthesized)
cttgcgcaccgcgatgttgttgcgctcgcgccgcacccggtactcgttgctgttcttgtccaccgacttcttggccttgcccgcgccgctgccgccactcgcgcggaggtcggggtgcgc

SEQ ID NO: 949297 - DNA, 120 bp, Artificial Sequence
  ENSG00000267727_3 (sequence is synthesized)
gggcggcgggtgcgggtgcgggtgcgagggcggcggcggcggcggcggctggtaagggaagaggccggccagcgccagctgcttggcttcatcctcctcgcggggctcctgcttgatcac

SEQ ID NO: 949298 - DNA, 120 bp, Artificial Sequence
  ENSG00000267724_0 (sequence is synthesized)
aaatgggacagccagaaaatgaagcctaagaaacttcagttactaaacttcctccatgaggcccaaggcagactaaccagctgagactaacatggattggaatgtttataagtaagattt

SEQ ID NO: 949299 - DNA, 120 bp, Artificial Sequence
  ENSG00000267724_1 (sequence is synthesized)
ttagttattctcatgaaccttactgtgggccggtcagttagcaagtcctatataatgcttgttaaagatctcaaactaagattttcagggctcacagggattaagtggaatggaagaatg

SEQ ID NO: 949300 - DNA, 120 bp, Artificial Sequence
  ENSG00000267724_2 (sequence is synthesized)
gagagaagccatttctcccggctgagtccatcatgctcaggagacttttaccctcttcacttcctgacccatcaatgatgttcccttcttggctttagctctaacctgtctccagagcat

SEQ ID NO: 949301 - DNA, 120 bp, Artificial Sequence
  ENSG00000267724_3 (sequence is synthesized)
ctgatccattacttccaagtgtttatttaatggggcctcccctatgggcaactttaagacaacaagtctaaaatgaacattttctcctgcccactcaaagctatgctttctagcattaca

SEQ ID NO: 949302 - DNA, 120 bp, Artificial Sequence
  ENSG00000267724_4 (sequence is synthesized)
ttcctaagatatttagtttttattggttcagtaaccatttgagtgcttacctgtgttgcagcagatataggaaagaatgatgaaactcaaatttaactgggtagcaaaattaaaatttaa

SEQ ID NO: 949303 - DNA, 120 bp, Artificial Sequence
  ENSG00000267724_5 (sequence is synthesized)
aaaaatgagatgcagccctgtctagtggggagaagagcatgtgaagacataagtacactcttcaagtgccacacggacatgaaggaggggacaccttgccccatcctgaagtcagggacg

SEQ ID NO: 949304 - DNA, 120 bp, Artificial Sequence
  ENSG00000267724_6 (sequence is synthesized)
acatcagaggacaggaacgcctctgtgtgtattcttttccttagctcttcaactgaaaaggatccttgaggcaaaatctttttcttaatatgcttatttcccaccataatcagggcactc

SEQ ID NO: 949305 - DNA, 120 bp, Artificial Sequence
  ENSG00000267724_7 (sequence is synthesized)
agtgcacagcaactagcaaacacttgataatgcttgggccaaggcatcactgacccaggtgcccaagcaacagggcaaaattgaaggcagcccacccaccaggcaccacgcagagctctc

SEQ ID NO: 949306 - DNA, 120 bp, Artificial Sequence
  ENSG00000267724_8 (sequence is synthesized)
taatccttaggaagactttctccactgagataaatgtaaagataaattctaccaacctttttcagactgttaaatgtggagagtcctgcttcatcatcatcatcatcacaaacgcacagc

SEQ ID NO: 949307 - DNA, 120 bp, Artificial Sequence
  ENSG00000267724_9 (sequence is synthesized)
actcatcatttgcccaatgatattctaagtacttaatatatagttcatgcacgtaatgctcacaccaaccgtatgtggtgggcactatcattatccccattttatagataaggaaagaag

SEQ ID NO: 949308 - DNA, 120 bp, Artificial Sequence
  ENSG00000267724_10 (sequence is synthesized)
gcatgagaggtgaggtgacttgcccaaggccagagagctaattttgtgttaccaggatccagagtatactcttagccactccgctcatccttctgatttggggtggtagtcatatcacat

SEQ ID NO: 949309 - DNA, 120 bp, Artificial Sequence
  ENSG00000267724_11 (sequence is synthesized)
ctgtcttttgcactctgggatatagaagtactaagatgaggcatttgcaaaaacaaaaacacagtgctcaccaaactaacatttatttagctttgttccctcccatccaagactgctgat

SEQ ID NO: 949310 - DNA, 120 bp, Artificial Sequence
  ENSG00000267724_12 (sequence is synthesized)
ctctaaacaagcatcaaaacccgaagctcattaacatcagagtgagcttcaataaggtgaacactacaatgatgtacaattacatcctaataattcaatgcccaagagccctgtagaact

SEQ ID NO: 949311 - DNA, 120 bp, Artificial Sequence
  ENSG00000267724_13 (sequence is synthesized)
attgcaaggcccaggattatcacagtatgcaaatgcactaggaaaatcattacctatttagtcccctttattttggtgggtttaacatgagaagaataatccatgctacaagacgagatt

SEQ ID NO: 949312 - DNA, 120 bp, Artificial Sequence
  ENSG00000267724_14 (sequence is synthesized)
tcattttacagctgtagtaaccaagtgcataaaagcttgaatctgtcccaatagcttctaaaaaatttttcccatagtgtcagaggcaaaaataatgaaatcttgcaaatgtacagttaa

SEQ ID NO: 949313 - DNA, 120 bp, Artificial Sequence
  ENSG00000267724_15 (sequence is synthesized)
taggaccctagtggacactaacttcaaaaatgcatggtctataagatattataaggcttgattctagtttctgcactgttcctgttaataacaatgtctaattaaaacatctgtaaaata

SEQ ID NO: 949314 - DNA, 120 bp, Artificial Sequence
  ENSG00000267724_16 (sequence is synthesized)
ctgatagttttaattttacataaaatttccaaaacaactgttacacagtataataggtatctgcaatgaataggttattaatggaaatattaatttaaattaaaatctggttctaaattt

SEQ ID NO: 949315 - DNA, 120 bp, Artificial Sequence
  ENSG00000267722_0 (sequence is synthesized)
attgcggctggccacattgcaggttatatgcacttaaatccctatgtggactcgacttctgtatatgcggactttttattaaattttctgtactctacaaaggccatctgggactggagg

SEQ ID NO: 949316 - DNA, 120 bp, Artificial Sequence
  ENSG00000267722_1 (sequence is synthesized)
attccggcagatcggctttgaaagtcaaagaagatggccatggagacagcagcgtggttgaagtggtaggaggcggccgtcagcaagagctgctctgtgcctggcagctggaggctagag

SEQ ID NO: 949317 - DNA, 120 bp, Artificial Sequence
  ENSG00000267723_0 (sequence is synthesized)
gtgctggagagagagagagagaaggttgggagaagcagcgcccctcaccttctgagctactcaagagatgggggacaggagcagtactgccaagaacagttgtgcaagttgcacactgca

SEQ ID NO: 949318 - DNA, 120 bp, Artificial Sequence
  ENSG00000267723_1 (sequence is synthesized)
caagcataccagacagaagctagagcagaagctgacgtcgtctgttcccctcaccacacattgcatctgcccagaggaagaggtgccgtgctgggcagtgaatgaatgaaccttgccctg

SEQ ID NO: 949319 - DNA, 120 bp, Artificial Sequence
  ENSG00000267723_2 (sequence is synthesized)
acaaaccccacaagcactgcatacgcagccaacaaagaaaaaggcttccttcattgacttctgtggggattcaatgacgtcgtacacataaagcacttagcatatgcctggtacatggca

SEQ ID NO: 949320 - DNA, 120 bp, Artificial Sequence
  ENSG00000267723_3 (sequence is synthesized)
gcattctttccatctctcacctcctcatgcctcctgtggaaaaaatgaatggacagatgagaaaagttggagctggagaaagaccgtgttcctcgtgttcggtgggacctgggaaggctg

SEQ ID NO: 949321 - DNA, 120 bp, Artificial Sequence
  ENSG00000267723_4 (sequence is synthesized)
ctaaaacccagggagcaggagttctcctccctccatccttatccacagtctgggtcccatccagaccctcctctccaaaccgggggtttgggacaaagcaggtgagggaggcatttcatt

SEQ ID NO: 949322 - DNA, 120 bp, Artificial Sequence
  ENSG00000225791_0 (sequence is synthesized)
gatcagtgaatggagattactcaagtatttatcgagaacttgcagtgggctaggcacagttcaggtagatcaacaaaccgaaagaccctgccctaggggagctttcgctccaatgcgggg

SEQ ID NO: 949323 - DNA, 120 bp, Artificial Sequence
  ENSG00000225791_1 (sequence is synthesized)
agagggtggatgattgcagttttgcccagtaatttttgggaccctcatgccaccattaattagctacacacatttcaccgaaagtctaccttacatattaatcagaagaagtggaagaat

SEQ ID NO: 949324 - DNA, 120 bp, Artificial Sequence
  ENSG00000225791_2 (sequence is synthesized)
aaacacagaagaagcaaaaaaggaaggaactttctcactgaaagtttctatttaatattaagtcttaaaagtactcctggaaggacaaaaggtgttcttaataaattatattcgcaaata

SEQ ID NO: 949325 - DNA, 120 bp, Artificial Sequence
  ENSG00000225791_3 (sequence is synthesized)
ttggatttaatcctaccagtaatgaagcagtcagttactttctagatgtgcagaaatacgtaatgaacaaaaaaaactaattcctattccattttttattaggtccacagttatttcact

SEQ ID NO: 949326 - DNA, 120 bp, Artificial Sequence
  ENSG00000225791_4 (sequence is synthesized)
tctaaataaatatggttttttaaaagtggcacgcggtggaatgtaattgagacaggatggagttcctagagaaattttacttcctcaatctgcactccaccttacttaaaatacagtctt

SEQ ID NO: 949327 - DNA, 120 bp, Artificial Sequence
  ENSG00000225791_5 (sequence is synthesized)
gggtctgtaattcccttatctgactctcaaggaaatgacaaagtaatgcctagattggactaaacctcatttaacttcaaggctgacctttctcaaagttgaaccttcgtcttgtgagga

SEQ ID NO: 949328 - DNA, 120 bp, Artificial Sequence
  ENSG00000225791_6 (sequence is synthesized)
ctgtgaagatgtgttcaaatttgcaacgtgcggccacacctatgaggttgaactttatacaattggtttctttataggtttagatggttgaatttaagttacccccactgctattattat

SEQ ID NO: 949329 - DNA, 120 bp, Artificial Sequence
  ENSG00000225791_7 (sequence is synthesized)
tgaatttaagttacccccactgctattattattattttgagacagagtcttaactctgttgcccaggcaggagtgcagtggcgagatctggactcactgcaacctctgcctcctggcttc

SEQ ID NO: 949330 - DNA, 120 bp, Artificial Sequence
  ENSG00000225791_8 (sequence is synthesized)
actacaggtcactccctctggaggaaaccagctgccactttgtgaggatactcatagtcctgtggaggcatatcctccatatggctgagacctcctgcgaacaaccatcactgacttgcc

SEQ ID NO: 949331 - DNA, 120 bp, Artificial Sequence
  ENSG00000225791_9 (sequence is synthesized)
agacatgagtgtgccaccttggaagcagattttccagccccagttaagccttcagatgacatcagcccctgctaatctcttgactacaacctcatgagagaccctgagccagaactagcc

SEQ ID NO: 949332 - DNA, 120 bp, Artificial Sequence
  ENSG00000225791_10 (sequence is synthesized)
aggaccagcttgaagtgtttcaggacacttctctctgtgtgtgcctcttgattttgttcagaagcccagtactatggaatactctatcgcagtgataattaactactcgatatgcaaaac

SEQ ID NO: 949333 - DNA, 120 bp, Artificial Sequence
  ENSG00000225791_11 (sequence is synthesized)
acagacaaatctcacaaacataatgtggagcaaaagaagccagaaacagaagagtactgtgaaatcccatttatgtcaagctcaaaaccaggcaagaccaatctgtgatgttagaagtca

SEQ ID NO: 949334 - DNA, 120 bp, Artificial Sequence
  ENSG00000225791_12 (sequence is synthesized)
ggatagtggtccctttgttggtggttgtggctgggaggggctagagggctccaggagtgctggtaatgcactaattctttgtctgggtgctgtttacacaatgtggacatactgggctgt

SEQ ID NO: 949335 - DNA, 120 bp, Artificial Sequence
  ENSG00000225791_13 (sequence is synthesized)
tccccatgccttattggccagattgtatcccatgcccatttctaaaccaatcattggcaaagtgagtggaattgacgtgattagattaactttaccaagaatgcatcctcagagaggctg

SEQ ID NO: 949336 - DNA, 120 bp, Artificial Sequence
  ENSG00000225791_14 (sequence is synthesized)
agaaaaagtccagcctcctttgaagagcctggctacctttcacctgaacaaaacaagaattctgatgaaaaatggagaatgtatgtggagcaggcacccggagtgtctatgccaggattt

SEQ ID NO: 949337 - DNA, 120 bp, Artificial Sequence
  ENSG00000225791_15 (sequence is synthesized)
tttttcagtgcgtttcaccggttatatttttgtctctttaccttacaagatatgtggcacgtttgcctaaaacaagccttgctttctgatttctgtgcactaggcacttaaaccttgcaa

SEQ ID NO: 949338 - DNA, 120 bp, Artificial Sequence
  ENSG00000225791_16 (sequence is synthesized)
atgtcgcttacctaacagtcactgtcaaggagtacctggctaaagaatctccagctagacaaagtagaagtgtctgtgctctggcagttgaatatattgtatcaggctcaacagcacctt

SEQ ID NO: 949339 - DNA, 120 bp, Artificial Sequence
  ENSG00000225791_17 (sequence is synthesized)
tcaccaaaggatgagacttcacaaccattagatcttcttttattttgtttttattaaaaaaaaaaattttaacacaccattgctaacttgaagccattagatcttcttacccccaatacc

SEQ ID NO: 949340 - DNA, 120 bp, Artificial Sequence
  ENSG00000225791_18 (sequence is synthesized)
acaaaagtttagtggaatcaggggtataccaaggcaggtggagtaggggagctgggagtggtcagcccccagggcaggcaatgagggattgtgaatctgtgaagaattttaaagcaatga

SEQ ID NO: 949341 - DNA, 120 bp, Artificial Sequence
  ENSG00000225791_19 (sequence is synthesized)
tacagctctaaatgcaatgtactatcctggacttagccctggaaaagaaaaaagatattagtggaaaaactggtaaaattcaaataatgtctgtagtttggttaatagtattataccaat

SEQ ID NO: 949342 - DNA, 120 bp, Artificial Sequence
  ENSG00000225791_20 (sequence is synthesized)
gttaatttctgtgttttgataaatgtaccatggttatgtaagctggatgaaagatatgtgggaaatctctctactatttctgcaactctcctgtaaacctaaaaatgtttcaaaataaaa

SEQ ID NO: 949343 - DNA, 120 bp, Artificial Sequence
  ENSG00000225791_21 (sequence is synthesized)
cagcgccgcgcccggccgcattctcggggcccgaggctcagccgctcgcggtggagaaagcaggccgcggaggaggcgggcgcccaggcctgcccggacaggaagtgggcccagctttcc

SEQ ID NO: 949344 - DNA, 120 bp, Artificial Sequence
  ENSG00000225791_22 (sequence is synthesized)
caggcctgcccggacaggaagtgggcccagctttcccactcctcgctccgctccttcctccgcgggaagggcaggccccggaggcagcgagcgccccgggggtggccgggcagccggatg

SEQ ID NO: 949345 - DNA, 120 bp, Artificial Sequence
  ENSG00000225791_23 (sequence is synthesized)
agaaagtgtgtgctgttcctgagatgtgatttttcaacagtgtagactgtactatttgactaggggtgggaaaaagaggagcgggagttgattgtgctttcttttggttttgtttttaat

SEQ ID NO: 949346 - DNA, 120 bp, Artificial Sequence
  ENSG00000225791_24 (sequence is synthesized)
tttgaaattcttctctccaagggggccttgccttggactatgtccagctttgctgaatagccatgtctgcatgaccagtggactggggctggccagcaatcccagggccacaccaaagcc

SEQ ID NO: 949347 - DNA, 120 bp, Artificial Sequence
  ENSG00000225791_25 (sequence is synthesized)
tgccccgctattccacttctgccctgacctcagtgtcttgcattgagacatttgaagagtgtggttcaaggaaagagcatgtttgttcccagctgaacaaggctcagggagactagcagt

SEQ ID NO: 949348 - DNA, 120 bp, Artificial Sequence
  ENSG00000225791_26 (sequence is synthesized)
gccagagacaggagtgggcaacatttctgtgtgaattaagccatgcagtgtgcaagttccccatggcaaacaccacctttccctgggaagacagccaaggcctggagccccatgtaggaa

SEQ ID NO: 949349 - DNA, 120 bp, Artificial Sequence
  ENSG00000225791_27 (sequence is synthesized)
atctcctgtgagaggcccttcctgagctccacagaaaatgattcttttcataggcactgagtcccctttttttctagccataaatgcccacatcacagtcccccttcctggccttctaca

SEQ ID NO: 949350 - DNA, 120 bp, Artificial Sequence
  ENSG00000225791_28 (sequence is synthesized)
ctctgctcccgtgccaagtgccctcacccaggccccctcatagctcatgcacccctttcccttcctttccacactcaactggcctccccaagccctcagaaagcctattcctttcccctg

SEQ ID NO: 949351 - DNA, 120 bp, Artificial Sequence
  ENSG00000225791_29 (sequence is synthesized)
ctgtgctgttgactctccctccatcctgcactctatgcctctcacttgaaactgctccatgccgtgacctaacatctccagaggctcctctcgggttgaacagacatgatttgttgactt

SEQ ID NO: 949352 - DNA, 120 bp, Artificial Sequence
  ENSG00000225791_30 (sequence is synthesized)
tgccagattagcaaagggagcaaattccatagattcctctgcccctaagtctcaaagtgcagaccttcatcttgatagcaggagcgaggtgatggaggcagcctgggattgcataaaaca

SEQ ID NO: 949353 - DNA, 120 bp, Artificial Sequence
  ENSG00000225791_31 (sequence is synthesized)
gtaacagcaatatgatgactctgtagggacaattactccctggcaggtctaagggctaagccttaatctttccaacaaggctctgcagtaggtattattactagcctcattttgtagtcg

SEQ ID NO: 949354 - DNA, 79 bp, Artificial Sequence
  ENSG00000225791_32 (sequence is synthesized)
ctctgcagtaggtattattactagcctcattttgtagtcgagagaatggaaggccatgggcagatcacttgaagtcagg

SEQ ID NO: 949355 - DNA, 120 bp, Artificial Sequence
  ENSG00000225791_33 (sequence is synthesized)
aataaataaataaataaaaggaaaaagaaagatgttaagtgactttttcaaggccctgagtttgcaaaagacagacccctagcatgcctggggaggggctttgtgcactcatccggctgc

SEQ ID NO: 949356 - DNA, 120 bp, Artificial Sequence
  ENSG00000225791_34 (sequence is synthesized)
ctttcctggcatgccctggggatggcaggaaacctggatccctgcccagctctgctgtttctaggtaggttacctcaggtcagacacattcatttcccaagtttctgttttctaatcaga

SEQ ID NO: 949357 - DNA, 120 bp, Artificial Sequence
  ENSG00000225791_35 (sequence is synthesized)
aaaactgtgggatttgaggtgatttcttagggccttttccatatggtgatgctgtcattttttttcctaatgataaaagtattcagaaagctcttcaaattttctggactcagggtcagt

SEQ ID NO: 949358 - DNA, 120 bp, Artificial Sequence
  ENSG00000225791_36 (sequence is synthesized)
cctaggcaaagagaagaaataggaggcaacattgatctttggtgacacctaaaggctctgtgcaaccttttcctctgtccagagtaagcctttggtgtaatccctgctgcctctggggac

SEQ ID NO: 949359 - DNA, 120 bp, Artificial Sequence
  ENSG00000225791_37 (sequence is synthesized)
cccagggcaaagtcttggggagggcgcaaagagggcttgtccatcacttgaggacgcagaggacgcatgtgccctgcacatcaggatgagtaaacctgagctccttactaaaataaagct

SEQ ID NO: 949360 - DNA, 120 bp, Artificial Sequence
  ENSG00000225791_38 (sequence is synthesized)
cctgggaagcactgatcttggatttggctgctgtgtgggagaccagtgttcctcttagctgatggtggagactcacgtcagtgcaggctgcagcgatgactctcaaactgtgaacaatgc

SEQ ID NO: 949361 - DNA, 120 bp, Artificial Sequence
  ENSG00000225791_39 (sequence is synthesized)
tccccagtgtgtgcacgggagggccagcatatggagacctcgcggagagccaaacgcgggctctctgcacttccttcagttttgtttaaatacaggatccggtttgcctttgtcacccgc

SEQ ID NO: 949362 - DNA, 120 bp, Artificial Sequence
  ENSG00000225791_40 (sequence is synthesized)
tgtagcaccaccaggcttcattcactgtgaagccttgccagatctctgtaataaattacctgggaggccaaggcgggaaaagaggaaagaacaaggtaaagcgctttgaaatctgacttt

SEQ ID NO: 949363 - DNA, 120 bp, Artificial Sequence
  ENSG00000225791_41 (sequence is synthesized)
ctccctggagtgttcagtgttgcctatttagaaggtgcagggttgtgctaaggtgtgtgctgggagctttgtaggctaaagtttgtagaaaaagtttggttcatttcagtcatcacttac

SEQ ID NO: 949364 - DNA, 120 bp, Artificial Sequence
  ENSG00000225791_42 (sequence is synthesized)
aaattttttctattaagtgtttaagatttccaaacttaaaaaaaaaaaaaaacaggttcagagtatttttaaaaaggcattggtcatttgtacagcttacatttcactaaatctttacaa

SEQ ID NO: 949365 - DNA, 120 bp, Artificial Sequence
  ENSG00000225791_43 (sequence is synthesized)
caattttgagaggtaggtaatactagtatccctcattttatactgaggaaactaaggctcaaagaggctcaatgcttgtctggtatcatatagtcagtaaggaataaaaccaaatcttga

SEQ ID NO: 949366 - DNA, 120 bp, Artificial Sequence
  ENSG00000225791_44 (sequence is synthesized)
cttttcctagcagactgaccatcaaggctggacatccctttcagttcttttgagaacagactagttggctagatgtgaagaaaacaagctttggagtaatcttccctctgcacagcctgt

SEQ ID NO: 949367 - DNA, 120 bp, Artificial Sequence
  ENSG00000225791_45 (sequence is synthesized)
gatattgggatccagtgagtgacggtgagaggtggagatgtatgaacgagacctgagacgttggacctgaacatcacagcaatcacttgcagggctaagattcagggccagctgtccatg

SEQ ID NO: 949368 - DNA, 120 bp, Artificial Sequence
  ENSG00000225791_46 (sequence is synthesized)
gattctcccgagttggatcgtctttcacacacctgcttcctgaggttacatctcttttccagcctaggagcaaccaataaagagcagagagcaaagaaaagcagacacacaaatcatctc

SEQ ID NO: 949369 - DNA, 120 bp, Artificial Sequence
  ENSG00000225791_47 (sequence is synthesized)
tagactatgtcaagggtatccccaaaatgggaaagaaattcatgaatgtacacacaaaatgtcacgtatttttgttttacattaaaaacactgtgtcccagaagtaaggagtagaatggt

SEQ ID NO: 949370 - DNA, 120 bp, Artificial Sequence
  ENSG00000225791_48 (sequence is synthesized)
ggttgccaggagctgaggggttggggacatggagatgctggtcaaagggtacaaaatttcaatatgcagaatgaatgagttctggagagctaatgtacagcatggtgaccataggtaatc

SEQ ID NO: 949371 - DNA, 120 bp, Artificial Sequence
  ENSG00000225791_49 (sequence is synthesized)
atgtggtattatattgtgacatttgctgagagtaggtttcaaatggtctcaccacaaaaaggaaaatggtaaccatgtgaggtgatgtttatgctaattagcttgattgtggtaatcatt

SEQ ID NO: 949372 - DNA, 120 bp, Artificial Sequence
  ENSG00000225791_50 (sequence is synthesized)
tcacaacatgtatgtatatcaaaacatctcattgtacacctaaatatatacaatttgatttgtcaattgtacatcaataaagctggaaaaatgtattcaatcctatataatagattggga

SEQ ID NO: 949373 - DNA, 120 bp, Artificial Sequence
  ENSG00000225791_51 (sequence is synthesized)
aattacatagccatatctgattatgaattcagcaaagcttttaaatatgtttttattttactattcacaagagcaccttggtgcatttgaaattaaatccttcaatgtggagaaaacaaa

SEQ ID NO: 949374 - DNA, 120 bp, Artificial Sequence
  ENSG00000225791_52 (sequence is synthesized)
acactgtctcactgagcacaaagcttgttcaatatttttgtcagcgcgatgtatttttgttagcaatgttgaccactgaaatgatttccttagcagataattttccagtaaacctcccac

SEQ ID NO: 949375 - DNA, 120 bp, Artificial Sequence
  ENSG00000225791_53 (sequence is synthesized)
atcattgcaaacttcctgttcccagctgctcttcctcttcttaagcccctcattataggcagtaggagagctgataatcagcagaaaattaagctggcagggtgtgtgcttaaaggcgtc

SEQ ID NO: 949376 - DNA, 120 bp, Artificial Sequence
  ENSG00000225791_54 (sequence is synthesized)
aatttccaagggaaggaagtgttcattttgttttgttttattttgtttttatgaagcattgctttttacttgtgttgtgccttttgaacttaagcattattttttgacaatggagacttt

SEQ ID NO: 949377 - DNA, 120 bp, Artificial Sequence
  ENSG00000225791_55 (sequence is synthesized)
tggtttagtgcagttctctgtaactggacagtactcaatagaaattgttgaattgaatgtttaacatatgcttctctttgaccaaataaggaatattttatgggccatttttcattttag

SEQ ID NO: 949378 - DNA, 120 bp, Artificial Sequence
  ENSG00000225791_56 (sequence is synthesized)
atgagcttataggaataggcactctttggaaattggagaaattaattcttagggagtgtagtccaagtttaattctgggtctttgagtgatacttttaaaacaagtgcctttgacccttg

SEQ ID NO: 949379 - DNA, 120 bp, Artificial Sequence
  ENSG00000225791_57 (sequence is synthesized)
attaagtacaaaataagcacatagctaatgtaaacctcttaaatcagtggttatcaggcttggctgcacagtggaataacctcaagtgggatgtgtgggagaattaaaaaaaaatactgc

SEQ ID NO: 949380 - DNA, 120 bp, Artificial Sequence
  ENSG00000225791_58 (sequence is synthesized)
tgcccgggtctcagactcagaaatccttatgtaattggtctaatctacagcctgtcttcagggtttttaaaagcttcccaggagatgctaatggatagccaaagctgacaaccattgtct

SEQ ID NO: 949381 - DNA, 120 bp, Artificial Sequence
  ENSG00000225791_59 (sequence is synthesized)
ttaatgaatgaacacatttaatcagcctgtactaagtactaggcactgacgctaggcacctgtttctgttatcttttattaatgtggaaattggcactcatagaagttgatttgtttacc

SEQ ID NO: 949382 - DNA, 120 bp, Artificial Sequence
  ENSG00000225791_60 (sequence is synthesized)
atcacagagcagaaaactgttgaagatggaaagcaaacaacaacaacaaaacctaacagtcctatggcctccccacattctttgccatttacatcatagtagttaaaaaatatgctggtg

SEQ ID NO: 949383 - DNA, 120 bp, Artificial Sequence
  ENSG00000225791_61 (sequence is synthesized)
actgcaaaagccaatgtatcaacctttaaaatgaagaaataatgaaatgaaaactaactttgttgaagattaggacagtccttgggatggtatgtgatataagttttaaactctgtgtaa

SEQ ID NO: 949384 - DNA, 120 bp, Artificial Sequence
  ENSG00000225791_62 (sequence is synthesized)
cagctccaggtgttctatcctttaacacagaataactcaaacaacaagacccaatattcagacaagaaggaaagggacttttggagagtgaagaaaactttcctagaaacctcaaacttc

SEQ ID NO: 949385 - DNA, 120 bp, Artificial Sequence
  ENSG00000225790_0 (sequence is synthesized)
acacttgagaaaccacattcatacttggacctgatttagatgacgagattatggacttgaagctgatattgcaatggaatgagaattttgaagtctttgggggcaggccactgtcataag

SEQ ID NO: 949386 - DNA, 120 bp, Artificial Sequence
  ENSG00000225790_1 (sequence is synthesized)
gacgcctggaagagtgaagaaaggcctgattgatcacaaggtcctatcaaatgtcaaagctggccctggctgacctcccatctattcagagctgctttgatttaatctccaaactggctg

SEQ ID NO: 949387 - DNA, 120 bp, Artificial Sequence
  ENSG00000225790_2 (sequence is synthesized)
cttctccaggctagaagagaattgaaaatttcaagaaggcaaaggtgatggaagtgtcttcatgagacccttgggtaacataaattggcaaagaattggatgatctgggttctaagatct

SEQ ID NO: 949388 - DNA, 120 bp, Artificial Sequence
  ENSG00000225790_3 (sequence is synthesized)
ggccttaaaactagccatctattgactgagtaagttacttcactttttggtggtcttagtctcttgatattcaccacacagggtttggaaaaaatgtatttctttgttcctactatggct

SEQ ID NO: 949389 - DNA, 120 bp, Artificial Sequence
  ENSG00000225790_4 (sequence is synthesized)
aaattatatggattttttctgtcctgtattcagaatcaaatactagtttttccttcatacctcaataatgtgtataagcacctagggccagatacattctaagtgttcaataagtatttg

SEQ ID NO: 949390 - DNA, 120 bp, Artificial Sequence
  ENSG00000225790_5 (sequence is synthesized)
ttgagtgaatggatgtacttagttgtctgcctggatcaatagctcctttaacactccattattaaagcttgatattttccacacctagacttaagcaaagtattaaaacatggatgtttt

SEQ ID NO: 949391 - DNA, 120 bp, Artificial Sequence
  ENSG00000225790_6 (sequence is synthesized)
tgatgcaggtgaaatattttgctacagagtggtagaggatcactaggcacaaccctctgctcttgagttgctaaaagggcctacttccagagatggccaagaaagtttgggactctagca

SEQ ID NO: 949392 - DNA, 120 bp, Artificial Sequence
  ENSG00000225790_7 (sequence is synthesized)
ctcagctgattttcctaaagaaaagccctcaggatgtgctcaaagacctggatcaggcacactgaggtgatgatgggaggtcaggaaaatggccagaatggaactaagatttaacttccc

SEQ ID NO: 949393 - DNA, 120 bp, Artificial Sequence
  ENSG00000225790_8 (sequence is synthesized)
agaacactcatatatgatttttctgaaaagttttttccgcaccttagcaatattaactactttgaatactcaagtccagaataattacattttccttctttcacattctgacacttatat

SEQ ID NO: 949394 - DNA, 120 bp, Artificial Sequence
  ENSG00000225790_9 (sequence is synthesized)
atatatcacttatgagatatttaatactactcttttgagaataaatagtttatttttagtgtgatgatgtctttttaatccaatgaaactgttagcatcaataaggacagagatactacc

SEQ ID NO: 949395 - DNA, 120 bp, Artificial Sequence
  ENSG00000225790_10 (sequence is synthesized)
tttatttctggcacacagttctctgtatctcgcaaactccagcacagtataatctactcagcatcagacacatgggaaaacactatctaaacaggaaagcattgtacaaacattagtagt

SEQ ID NO: 949396 - DNA, 120 bp, Artificial Sequence
  ENSG00000225790_11 (sequence is synthesized)
tgttattatgattagaattgatgtttcaggtaatttaataattactcttacttctggtacataccctcctccaggaatgtaaaagctcgtcagtgtttactgggcttagcatagatgtcc

SEQ ID NO: 949397 - DNA, 120 bp, Artificial Sequence
  ENSG00000225790_12 (sequence is synthesized)
tttctaagatttcaaactgtacaagaatatacaaaagaacatttatcatgctctccattcagaaggataatattaaaaattaataagcattttagtctgctgggatgcaacataattcag

SEQ ID NO: 949398 - DNA, 120 bp, Artificial Sequence
  ENSG00000225790_13 (sequence is synthesized)
gggaggggaggaggtccgtcgctatctttttcaagggcaattcacaacaacactttgcatgataaattcctgaagcttgatgttctcctcaccattatacaatgtgagtgctgacaaggt

SEQ ID NO: 949399 - DNA, 120 bp, Artificial Sequence
  ENSG00000225790_14 (sequence is synthesized)
cttttaaaaataacaatactttattttaaattagttcatctgtttggggaaaaaggcagcagtgtgcacctatataggtgtcatatcctttagtcccataaatttcacaactaaaactat

SEQ ID NO: 949400 - DNA, 120 bp, Artificial Sequence
  ENSG00000225790_15 (sequence is synthesized)
aatttcacaactaaaactatatcttctttttttgtttgtttgaaatggagtctcactctgttacccaggctgaaatgcagtggcacaatttcggctcactgcagcctccacctcctgggc

SEQ ID NO: 949401 - DNA, 78 bp, Artificial Sequence
  ENSG00000225790_16 (sequence is synthesized)
gcagcctccacctcctgggctcaagtggccaccaccgcacccagctaatgtttgtatttttagtaaagatggggtttt

SEQ ID NO: 949402 - DNA, 120 bp, Artificial Sequence
  ENSG00000225790_17 (sequence is synthesized)
gcctcccaaagtgctgggattacagaaatgagccaccacgcctggcctaaaactatatcttaaaaaaaatagttcacgtaagaaacaaaaatcttaaggaaggaatgactttacttgtga

SEQ ID NO: 949403 - DNA, 120 bp, Artificial Sequence
  ENSG00000225790_18 (sequence is synthesized)
atgactttacttgtgacttattgatgataaaaggaacttggaaacaatttggatgcccaatattagaaatgcttaaataaattatactagcaagaaaacacattagaaagatgttaacat

SEQ ID NO: 949404 - DNA, 120 bp, Artificial Sequence
  ENSG00000225790_19 (sequence is synthesized)
ttagcactttagagcttagacaaatatatagaaaaattttttttggaaaagcttaatgcgatatttgtacacaagtatgtgaaatgctatatatgaatgctaacattccccaaaagcaaa

SEQ ID NO: 949405 - DNA, 120 bp, Artificial Sequence
  ENSG00000225790_20 (sequence is synthesized)
gacttattttactgggtaggctgtttgcattgtataaaaaacatgagtttagaattagagctagatttaaattccagttcttccataagctgtgtgacacttgcaaattattaatcctct

SEQ ID NO: 949406 - DNA, 82 bp, Artificial Sequence
  ENSG00000225790_21 (sequence is synthesized)
caaagccactttaagagtctaggacatagtaggagctcaatgctattatttccctttccctttactaaatacctgagactcc

SEQ ID NO: 949407 - DNA, 120 bp, Artificial Sequence
  ENSG00000225790_22 (sequence is synthesized)
ctattatttccctttccctttactaaatacctgagactcccttggtttaaaaagttttgttcaaattgactgacttttatagaaatttcaatgtcgttgtttttgacccatgcaagaatt

SEQ ID NO: 949408 - DNA, 120 bp, Artificial Sequence
  ENSG00000225790_23 (sequence is synthesized)
tctaacagatgagactctattaattaatgtgatgattctcctgtaattggtcaataatctttacatttgaatagatttcagaacagtattaaatatcttgggttggaggttaatttctat

SEQ ID NO: 949409 - DNA, 120 bp, Artificial Sequence
  ENSG00000225790_24 (sequence is synthesized)
aaacagaaatgtatatccaacagtgttgcattttagctgatcttgactataaacgagtgcaatttgtgttcatttcccatatatcattgacactaaattttggaacacttacatctgggt

SEQ ID NO: 949410 - DNA, 120 bp, Artificial Sequence
  ENSG00000225790_25 (sequence is synthesized)
gtgtatgtcttccctagcaggcagagaaacaaacagcacaaactaagcttgaccttgttggaaatacagtttatccacagagtgaatgttggctaaaatttaatcttatgacatcaggaa

SEQ ID NO: 949411 - DNA, 120 bp, Artificial Sequence
  ENSG00000225790_26 (sequence is synthesized)
tgagatatgacctgcttcacgctccattcatctcatttgaaggacggaaattaaactcgagggtcgaagaggggaactgctcaaaatacacacacacattaactgaagccttttgtagaa

SEQ ID NO: 949412 - DNA, 120 bp, Artificial Sequence
  ENSG00000225793_0 (sequence is synthesized)
agagctacggtgacacttcgcgtgcggtgtaggcgcatcttcgctctgttggccgtggctttagtaagcacacacctgcctgctactctggttatcgtggcgacggcaggtctggattgc

SEQ ID NO: 949413 - DNA, 120 bp, Artificial Sequence
  ENSG00000225793_1 (sequence is synthesized)
cagacaggtttttctttttacctcgaggctttctctgaagggagtcggagcatttaaaaggcggcctcaaggtggattgagtcgggggaggattagcagtatttgcttaggttgtaaaac

SEQ ID NO: 949414 - DNA, 120 bp, Artificial Sequence
  ENSG00000225793_2 (sequence is synthesized)
tttaaacagaggacttaatcatagcatggacagaaaaggctcaccatctatctaaatgactctgattgcaccatcatcctcattgttcttgtggagtctcgctctgtcgcccaggctggg

SEQ ID NO: 949415 - DNA, 120 bp, Artificial Sequence
  ENSG00000225793_3 (sequence is synthesized)
tcgccattcaaggtgcaaatacaaacttggaacagagatgtaaatgaattcctcaaggtcagagactgtttttattcatttctacatctccaacacctggcaaagtgcctcggccataaa

SEQ ID NO: 949416 - DNA, 120 bp, Artificial Sequence
  ENSG00000225793_4 (sequence is synthesized)
agataatctgcctctgaaaccttccgtgggcacagaaatttctgcaaggaaagcatcagcaaccagaataatttggtgaggaagatttggcacagaataccctgactgaggtattgctcc

SEQ ID NO: 949417 - DNA, 120 bp, Artificial Sequence
  ENSG00000225793_5 (sequence is synthesized)
aaaaggagcaatcctctggggttaggagtcaattattaggtgcctacaaaacactctgttatttcgactaaacatgccttgctgtcaaggagaagaaagaactgtgcactgaaaaccaga

SEQ ID NO: 949418 - DNA, 120 bp, Artificial Sequence
  ENSG00000225793_6 (sequence is synthesized)
acagccaaaaaagaatgtggctgtggtcatgggaaaggtctttgaataacagggaaaaggagacagggcagttgaaggaaggataagaaaaggctacttcctagcaggaattaataaact

SEQ ID NO: 949419 - DNA, 120 bp, Artificial Sequence
  ENSG00000225793_7 (sequence is synthesized)
ttattatttaatagaaacccattcctttctttcaaataaggcagagataagttaggattggatgtagctatatagatccctatttctggcacaggctgatagcaataaaggaagtcagaa

SEQ ID NO: 949420 - DNA, 120 bp, Artificial Sequence
  ENSG00000225793_8 (sequence is synthesized)
cacaaccccactctcacccacatcccactttgcaaaaaccatgacccaaatgcctctgtagatactgggctgtggactgctggcaaagcctcaggagcctttgctctactgagtgatcta

SEQ ID NO: 949421 - DNA, 120 bp, Artificial Sequence
  ENSG00000225793_9 (sequence is synthesized)
cctttagattgacagcagcggctgtggagtaacatctgaatgttgattgacagtgcagtttgtgggaataaagcagggagggaaaccctttaaccagtttccatttcttggtgtcttaaa

SEQ ID NO: 949422 - DNA, 120 bp, Artificial Sequence
  ENSG00000225793_10 (sequence is synthesized)
gttttcatcttactaaagaatcaaaccgttgtgtaatccagaggaagagcatccctcatcctggcagccctgctctaccacatctgcctatccatagtgaaagacaccatatttttaaga

SEQ ID NO: 949423 - DNA, 120 bp, Artificial Sequence
  ENSG00000225793_11 (sequence is synthesized)
aaatatgaaatgcagagatgaaaactattttggagcaaatgattttaaataaaaaggttgcatactcattttaaatgattttaattttctgaatattatgttccaactcaagatattgca

SEQ ID NO: 949424 - DNA, 120 bp, Artificial Sequence
  ENSG00000225793_12 (sequence is synthesized)
caatgctttaatattacacttgttatttttctcacactagtgagattttgataaacatagttgactttggaagtaacagagaatgttttcattggttaaataatttcaatgacctgtgag

SEQ ID NO: 949425 - DNA, 120 bp, Artificial Sequence
  ENSG00000225793_13 (sequence is synthesized)
gaactgaaagcaagctattacattcatataaaagataagtacatatccataaattcacttggattcaatgaaaaataataaacttctcgtgtacttaataaaacttaaaaggaaacaaaa

SEQ ID NO: 949426 - DNA, 120 bp, Artificial Sequence
  ENSG00000225793_14 (sequence is synthesized)
taaatgactctgattgcaccatcatcctcattgttcttgcctgcgctttggagcctcttctactcaccactgactgggttcctcgagcagatgacgttgtgaccggtgttatggtgatag

SEQ ID NO: 949427 - DNA, 120 bp, Artificial Sequence
  ENSG00000225793_15 (sequence is synthesized)
tgctcgtcactttgcttgcaccaggccgtgaggagaggtgattcctgggagagcgaaggacagtgccggtggaaacctccttttcggctgtcacgtttactggtcggacagtaataactg

SEQ ID NO: 949428 - DNA, 120 bp, Artificial Sequence
  ENSG00000225793_16 (sequence is synthesized)
gactgactccttcacctgaagtcccaggggaccgtttaaactgagaccctaagtgaatgtgaattttattgtcctctgtggttatgatattggcattggagttgtatttccgtactggag

SEQ ID NO: 949429 - DNA, 120 bp, Artificial Sequence
  ENSG00000225793_17 (sequence is synthesized)
ttggaacagtctgtttttctggggtgactttgaggattgtccgtcccatgggcatttcctgggattcgggagaaactgcaatctcagctggtgctgctgatgtagacaccgtcattatct

SEQ ID NO: 949430 - DNA, 120 bp, Artificial Sequence
  ENSG00000225793_18 (sequence is synthesized)
gaataggggatgtgggcctgtctgcaaatgcgcctcttccactttctggagtcttctctctggaaaatgtagtaattgtgactggggacatggctcgttctgggccaagagtagtatctc

SEQ ID NO: 949431 - DNA, 120 bp, Artificial Sequence
  ENSG00000225793_19 (sequence is synthesized)
cacttttttgtttttgaggcataacgtttggtgatggaataatggttattcttggtttctgattccctaaggtaggaatgacagtggtactagaaaaaaattcttcagatgtcgggcttg

SEQ ID NO: 949432 - DNA, 120 bp, Artificial Sequence
  ENSG00000225793_20 (sequence is synthesized)
ttatctccaaagtcgcagtgctgttctcgtggtctggtgtcactcgaatatgcaggggctggccctgctttggtgaaaggactacctctcctgggtgccctggactggaatttgttcggg

SEQ ID NO: 949433 - DNA, 120 bp, Artificial Sequence
  ENSG00000225793_21 (sequence is synthesized)
gccctttctcctgagtgatggaggggccgttttccctctttctcatccatggaatccaagactttctcatagtgagctcatttgctgctggaggatacctgtctagaacagaagatcttt

SEQ ID NO: 949434 - DNA, 120 bp, Artificial Sequence
  ENSG00000225793_22 (sequence is synthesized)
ccacgggtttcttcaatcccacctgccgaagattactcataatatgattttcttcctggaaggatttccgtatgaatacagctggcgtttcttcctctgctgcttcaccgctgactgcat

SEQ ID NO: 949435 - DNA, 120 bp, Artificial Sequence
  ENSG00000225793_23 (sequence is synthesized)
cagtttggactccagttgacgtcacaggaacatccaccattcttcttccattcacactgggcctaagagctctgctgtagcgcttggaaagctccaactctttggtcagattgagaacct

SEQ ID NO: 949436 - DNA, 120 bp, Artificial Sequence
  ENSG00000225793_24 (sequence is synthesized)
gagaaagctgatcttctttgttcattaattcgtgaatcttctctttaagagcttgtacttcggcttttaagtctcgacttttagcttcttccaaccgaaatctgtgtctcagttcagctt

SEQ ID NO: 949437 - DNA, 120 bp, Artificial Sequence
  ENSG00000225793_25 (sequence is synthesized)
cctggctcacaacctcacccttctctattgctttattcttggcaatttggtgcttgatctcctctagttgttgagagaggaagttagccttatcctgctcagttctaaatttctgttcca

SEQ ID NO: 949438 - DNA, 120 bp, Artificial Sequence
  ENSG00000225793_26 (sequence is synthesized)
gctgatcatactcatcttctgtcttcatcaaatccccttcgaccacttccaattgttggagacgtttcttcagtctctcaatttcaagtgttagttccttaatcttattatcttccgggc

SEQ ID NO: 949439 - DNA, 120 bp, Artificial Sequence
  ENSG00000225793_27 (sequence is synthesized)
aggtgagctcagacccttttcgtgaccttcctcttgttatttctctttccacttcctctataccatcaagtctcttctttagtaagtcaacactgcagcttaattcagaggatttttctt

SEQ ID NO: 949440 - DNA, 120 bp, Artificial Sequence
  ENSG00000225793_28 (sequence is synthesized)
cttcacttttcaatttgcctatcaactcatctctttctcttgtcaagttgtatactttttcctccatttcagattttagttttaaaagtttcttactttcttcaattagtttttcagtta

SEQ ID NO: 949441 - DNA, 120 bp, Artificial Sequence
  ENSG00000225793_29 (sequence is synthesized)
catccataacttttccttgttccaccttaaaatttttattgagtccatccacttttctctcttcttgttttattttttccatcatatttttcctttcatcaaccagcatcacggtaaatg

SEQ ID NO: 949442 - DNA, 120 bp, Artificial Sequence
  ENSG00000225793_30 (sequence is synthesized)
acttcaacttggtaagatcatcttttaggcttaattcagccttttccaatctactttcagaacattccaattctttaactcgactcttgaccacctccaattcatttagcaggtctttgg

SEQ ID NO: 949443 - DNA, 120 bp, Artificial Sequence
  ENSG00000225793_31 (sequence is synthesized)
ttaagttcttttctttctccagatttaaatgtagctgggtgcactcagatttactcttgctaaatgcttcttccaatttctctagttcagacattctcttctgtagcttctcaacttcaa

SEQ ID NO: 949444 - DNA, 120 bp, Artificial Sequence
  ENSG00000225793_32 (sequence is synthesized)
gtctgagctccttactatggtgttcttcctcttgcagcttcttcctcaattccctacactgggattcagttttagtgatctcctcatctttaccttccatttcaagcacacgctttcgaa

SEQ ID NO: 949445 - DNA, 120 bp, Artificial Sequence
  ENSG00000225793_33 (sequence is synthesized)
gattttccacttctgccatgaggctagagtttccacattctcctttggcaattttatctcttaattcttgaagttcttcctctgccttctgcagatttttgttggtctcttctagctcct

SEQ ID NO: 949446 - DNA, 120 bp, Artificial Sequence
  ENSG00000225793_34 (sequence is synthesized)
cgattctttgggttaagccaaccagcttgagtctaagttgcctattgtgagactcttgattagccagtttagcgttcatctcttcatgctcttgagaaaacctcgaagccttgtgttcaa

SEQ ID NO: 949447 - DNA, 120 bp, Artificial Sequence
  ENSG00000225793_35 (sequence is synthesized)
agtccacttctaacttgagcaatttctgtctgtcttctttggatttggaagtaatggctttgagcttctcttcttcttccctcagcttctgagtaagatcctgtactttctggctttgca

SEQ ID NO: 949448 - DNA, 120 bp, Artificial Sequence
  ENSG00000225793_36 (sequence is synthesized)
ggccaagttgttcaatgtgcatttgtctttcatccaccagcatgagtgcaaaggatttgagtttaacaagctcatctcttagtttattgagtcgtttagcattttccttttctttgcggg

SEQ ID NO: 949449 - DNA, 120 bp, Artificial Sequence
  ENSG00000225793_37 (sequence is synthesized)
tattcttataaaaataaatttaaactagattgaggtagtaattacaacagtccagcacattatggataattaatatttatatttatttggctggtttttcttttatagtaaactttatgc

SEQ ID NO: 949450 - DNA, 120 bp, Artificial Sequence
  ENSG00000225793_38 (sequence is synthesized)
atagtaaactttatgccttaatgaacatttatcagtatgactcacttcattcagtcattgaataactatttattgaggctgtatactgtgctaggtaggcatggaactacatgcatgatc

SEQ ID NO: 949451 - DNA, 120 bp, Artificial Sequence
  ENSG00000225793_39 (sequence is synthesized)
aacttcaaatagtttcttcatccaaaaaatttattattagtacctccttgtcaacatatggtatatgttgtgagtgcagaaacttagggtttatcaataacatgaagaaatttctaccta

SEQ ID NO: 949452 - DNA, 120 bp, Artificial Sequence
  ENSG00000225793_40 (sequence is synthesized)
ttattttcacatccatcccaaatacctagtatttaagttttatttttacttatgtagttagtatataagtaaacattaattaaatcgtattatgccatagacttataggttcatagtaat

SEQ ID NO: 949453 - DNA, 120 bp, Artificial Sequence
  ENSG00000225793_41 (sequence is synthesized)
tacacacagtgcatgattacctgccaaaaagaaaatgttttcttaatttggtgtcgttaactttacctcatgatgaccaataggtggagctatttccattttttccctcagccttttggc

SEQ ID NO: 949454 - DNA, 120 bp, Artificial Sequence
  ENSG00000225793_42 (sequence is synthesized)
ttgaatttgaggtagataagaaagccaagtaagatgaactatagaatgtcttatatacctaagaatatttagctatgaaggttttctgaagctcttaagacatacatactatattgtact

SEQ ID NO: 949455 - DNA, 120 bp, Artificial Sequence
  ENSG00000225793_43 (sequence is synthesized)
ataccagaagcccttataaaccatctcgtttttttcattgaaaaaatattccagcttcaacttcaaatgcctaaaaatatatcaaaatcttcaggcaaacaattttaagtactaattaat

SEQ ID NO: 949456 - DNA, 120 bp, Artificial Sequence
  ENSG00000225793_44 (sequence is synthesized)
tccaaaattaaaatgatgtttctcactaatttaaaaaaaaattctgcagtagattccaaagagtaaaaagacccaagtctcaaatctccctggtaaaattaaagttatctccaatttcct

SEQ ID NO: 949457 - DNA, 120 bp, Artificial Sequence
  ENSG00000225793_45 (sequence is synthesized)
tcccttaagaaagcatagataaagagtgaaatcagaattgttcttattgtggatgtaattcagaaatcttctgcctttgtttccacagtacaaaataagggtattagagagcatctcaaa

SEQ ID NO: 949458 - DNA, 120 bp, Artificial Sequence
  ENSG00000225793_46 (sequence is synthesized)
aatccctttcagggttaacattttgtattactacaataccttctttctccttcagtgtgcagcagtggaaatttacaaaatgctaggattaaggcaatttagagttgccttgtcttaatc

SEQ ID NO: 949459 - DNA, 120 bp, Artificial Sequence
  ENSG00000225793_47 (sequence is synthesized)
ctagcattttgcacaacttagagttgccttgtcttaatcctagcattttgcacaacttaagagttgccttgtcttaatcctagcatttcaaaatctccatcatagtaataagggtccgta

SEQ ID NO: 949460 - DNA, 120 bp, Artificial Sequence
  ENSG00000225793_48 (sequence is synthesized)
cacagaagaaacaatgtcttggttggaccataacatttaattactgtatttaaattagcaaactcataatccatgcatcctatgtatgctaatgctattaatcaaatgtgttattaaaac

SEQ ID NO: 949461 - DNA, 120 bp, Artificial Sequence
  ENSG00000225793_49 (sequence is synthesized)
tgctattaatcaaatgtgttattaaaacaaatgtctcagaaatacttgataatgctaaataagagtttatcttatataaattgtactttaataaagggtggtatttaatacttatgtaca

SEQ ID NO: 949462 - DNA, 120 bp, Artificial Sequence
  ENSG00000225793_50 (sequence is synthesized)
gcccaaattatgttgttttatatggagaccaacttcattttatttctagagatagtgagataaaatctgtatgatactggctctattaattgaaacttattaaacagatttactaaatct

SEQ ID NO: 949463 - DNA, 120 bp, Artificial Sequence
  ENSG00000225793_51 (sequence is synthesized)
atagttgcttattagctatgttttccccaagtctctgctgaacttactcaataagaatcacctagccaatgcacaaaattgtgataaatttttaaaatattgctttaaagccaggcttgg

SEQ ID NO: 949464 - DNA, 89 bp, Artificial Sequence
  ENSG00000225793_52 (sequence is synthesized)
gtaatcccagttactctggaggctgaggtgggagaatagcttgaatccaggaggcggaagttgcagcgtgccgagataagagactcagt

SEQ ID NO: 949465 - DNA, 120 bp, Artificial Sequence
  ENSG00000225793_53 (sequence is synthesized)
cagagagagactcagtctcaaaaaaaaatattgctttaagccattacattttgaagtaactcattatacagcaaaactgtctgaggcacatggagtccatgttgccagcaaaaaaaaaaa

SEQ ID NO: 949466 - DNA, 120 bp, Artificial Sequence
  ENSG00000225793_54 (sequence is synthesized)
caaaaaaaaaaattaaataaatttttaaaaattagtgctttggggattaatgccattatttgtgtaaaaaaaaaaacagacttgaattcccaagtctgttcctgtctttttgtatatagt

SEQ ID NO: 949467 - DNA, 120 bp, Artificial Sequence
  ENSG00000225793_55 (sequence is synthesized)
aacagatttaagcattgatattaaataaaaaacaaaaagccactacaataaatcccttatcaattgctataatttcaatgtttaaagaatagccattaatgaaatgaatgggaagtcaaa

SEQ ID NO: 949468 - DNA, 120 bp, Artificial Sequence
  ENSG00000225793_56 (sequence is synthesized)
atattagttacccttaggggtagtggctagaagggggcatgaggagggctttgagtgtaactagtttctcttttgtaatttgcatgcttgctatacaggattgtttagcttaccttatga

SEQ ID NO: 949469 - DNA, 120 bp, Artificial Sequence
  ENSG00000225793_57 (sequence is synthesized)
aatttcagtaagctgaacacttccgagtatctttctgcatatgtattatactttaatacagtagccattaagtaaaacttaggttgtgcaataataatgactatttacataatgtcttct

SEQ ID NO: 949470 - DNA, 120 bp, Artificial Sequence
  ENSG00000225793_58 (sequence is synthesized)
gtatccttggtgttagcatttactttattctcagagtaaccctatgagatatgtattgctactatcatcaccatgaaaaaacatgagatacaggggaattatgtagcctgctacagatcc

SEQ ID NO: 949471 - DNA, 120 bp, Artificial Sequence
  ENSG00000225793_59 (sequence is synthesized)
cagagtcagtaagtggcagggctgggtttcaaacttagccaggaagccttcaaaattattgctctccacctctgcatcatatgatttgaggagataaatttactttaaatgatggtaaag

SEQ ID NO: 949472 - DNA, 120 bp, Artificial Sequence
  ENSG00000225793_60 (sequence is synthesized)
gttcagaaaagaagcagctttgggttttcttattttaaacccttgacgtaaactacgtaactgtcacctggaagggacaaagtatgactggctttctgatacaaacactgatttacataa

SEQ ID NO: 949473 - DNA, 120 bp, Artificial Sequence
  ENSG00000225793_61 (sequence is synthesized)
attgattttagttcacaccagaactggcacaggatttttttatttaaacaatacttttttaatcaagaactagatagcaagaaaatctgtatatcaatacaaaaatgtggcagccacagg

SEQ ID NO: 949474 - DNA, 120 bp, Artificial Sequence
  ENSG00000225793_62 (sequence is synthesized)
aattattgtttcacttgtgtgaaatacattttctctatggcatttatgaatatctgtaaaaagtaggaatataaatatgctgaagtagctatttaccattcttgggttggtcagttaact

SEQ ID NO: 949475 - DNA, 120 bp, Artificial Sequence
  ENSG00000225793_63 (sequence is synthesized)
tgtactaattttaatagtttttttatttacccataaaacaaaattataatcatatttgccatgttagtgtaagaatgcattttagtaattaataggtttataagggaagcaagttataaa

SEQ ID NO: 949476 - DNA, 120 bp, Artificial Sequence
  ENSG00000225793_64 (sequence is synthesized)
caaccaatgacatgcacttatttaagtataatagattttattctttcagtgtattttgctcctttactattctgactgattaatttcatatttatgactagattagctgttagccaagta

SEQ ID NO: 949477 - DNA, 120 bp, Artificial Sequence
  ENSG00000225793_65 (sequence is synthesized)
aatagaatttaatagtctctcattgcattgtgtaagaaatatttgtgtgttttttttttacttgtcactgactgaaagctggtgtacaagaaatatttgaacatacattagtaaagcaca

SEQ ID NO: 949478 - DNA, 120 bp, Artificial Sequence
  ENSG00000225793_66 (sequence is synthesized)
atagaagctattaataattaaatacagtgtgagataagtattacagaaatggctctgatcatgtcgttaagattttttcatagaatttacttttataaagcatgattgtgtctcagcatc

SEQ ID NO: 949479 - DNA, 120 bp, Artificial Sequence
  ENSG00000225793_67 (sequence is synthesized)
tctaaactaatgcataccctccaaaaatcattatgactttattcctaaaataggaggaaaatatgatcttcaagtcctactgatttgcctaatactgtaacagcatcactaaatgtggtc

SEQ ID NO: 949480 - DNA, 120 bp, Artificial Sequence
  ENSG00000225793_68 (sequence is synthesized)
cttacatgtagaaaacagcattttattgaccatgttctctttttactaaaagttgaaacaagtgaaataatgtcatagaaccatagattaggggagaaacttttcaggatattttcaaca

SEQ ID NO: 949481 - DNA, 120 bp, Artificial Sequence
  ENSG00000225793_69 (sequence is synthesized)
taaaataccattttcaaattccttgcccttaactggactgttagagattaatttattgaaaacgttactgcttccaattctaagcttaacatgttaaagcttctaaaaatatatttttag

SEQ ID NO: 949482 - DNA, 120 bp, Artificial Sequence
  ENSG00000225793_70 (sequence is synthesized)
gaatactatgcctctatactgttagaggcagtggattggagtgactacaacataggttttggagtcagacaatcaaatctgaattctgactctgtcactttctaactgtgtaatctctgg

SEQ ID NO: 949483 - DNA, 120 bp, Artificial Sequence
  ENSG00000225793_71 (sequence is synthesized)
ccaatcactgaaactctctgattctcaattttttcaccagtagaggaaagagggagggatattaacccatttatgctggaggttgcaattttttgtgtgtgaaaaatcagaccttggtga

SEQ ID NO: 949484 - DNA, 120 bp, Artificial Sequence
  ENSG00000225793_72 (sequence is synthesized)
gcttagcgttccaataatggaacactaataccaaccatatagaattgttgtgaagattaattgaaatagtagaagtaaagtgacagatacatagactcaatacatgaatgtaataaagca

SEQ ID NO: 949485 - DNA, 120 bp, Artificial Sequence
  ENSG00000225793_73 (sequence is synthesized)
agatacatagactcaatacatgaatgtaataaagcacaaaaagataagaactattgtatatgctattggcttcatctggaaagactgtcagtgctttctatatttaaccaataaatattt

SEQ ID NO: 949486 - DNA, 80 bp, Artificial Sequence
  ENSG00000225792_0 (sequence is synthesized)
cgcgtgtgcgggacgcagcgcgggggatgcgcgcgggccgcggaggcgccgcaaccaacaggcggccgagggtgcagccg

SEQ ID NO: 949487 - DNA, 120 bp, Artificial Sequence
  ENSG00000225792_1 (sequence is synthesized)
agggtgcagccgcgggagcgccaccgccagtggggtggggggcaaagctataaagaaggcccagaggattcctgcggagctgtatttactttacatccatgtgaactgctgtcatcacta

SEQ ID NO: 949488 - DNA, 120 bp, Artificial Sequence
  ENSG00000225792_2 (sequence is synthesized)
cccagaggatgaactggaaaagaagagagggggaaaataataaaaagaggaaattggttttcacaacacactcaaagcctgagtaacagaggagaactttaattatctccagtcacaaag

SEQ ID NO: 949489 - DNA, 120 bp, Artificial Sequence
  ENSG00000225792_3 (sequence is synthesized)
agagacaggaaatttggacttttaattagccatttggagtgcagttgggtatttttttagctagataatttaaacgcgaataattcaagtctgactaaatgaaagtcacataatcagaat

SEQ ID NO: 949490 - DNA, 120 bp, Artificial Sequence
  ENSG00000225792_4 (sequence is synthesized)
gcaaataattgaatttctactgcattcattaattcagtgtggaggtgtgtgtgaagactactatgatgagctgtcacagctcaataaaatctcagtcaattaattttttcattatcttag

SEQ ID NO: 949491 - DNA, 120 bp, Artificial Sequence
  ENSG00000225792_5 (sequence is synthesized)
tgtgtatatatatctatacacgtgcatatgtgcatactatgtattatataaatacatatacattaaatcaaaatgcaaggaaatacctttctgaatcataatctatatcattttcttttt

SEQ ID NO: 949492 - DNA, 120 bp, Artificial Sequence
  ENSG00000225792_6 (sequence is synthesized)
tcttcagggaaacgtctattcattaaggcaaacttgtgaattgcttcttccacagagtacttagtctgcccagaaacacacgcctcaatgtcttctgaattcagatggctctgtaagaag

SEQ ID NO: 949493 - DNA, 120 bp, Artificial Sequence
  ENSG00000225792_7 (sequence is synthesized)
aggtgaaggctgctatctgaaagcaaaagtgcattctgtaggactctatattaaaaaaaaaaggaaaaataattggtgaacaggatggtcagtgatagggtagaagaaagaaaaacatta

SEQ ID NO: 949494 - DNA, 120 bp, Artificial Sequence
  ENSG00000225792_8 (sequence is synthesized)
gaaaagtaccactgaaggtaatttctctactgtggtaaactttgtatcaattatgggctctgcccattaaggggaggaaagcatatgttaacttttattcaattatttggaaatttaggt

SEQ ID NO: 949495 - DNA, 120 bp, Artificial Sequence
  ENSG00000225792_9 (sequence is synthesized)
gggtaaaaacatgaagctaatagttaagaacatctgttaaaagaataacttcaaggacatttcttcaatttacccatctcttattaccatgtggattaattatggaaatattttgcttat

SEQ ID NO: 949496 - DNA, 120 bp, Artificial Sequence
  ENSG00000225792_10 (sequence is synthesized)
atagtcatagaaagttattctactttaaaaaatttactgccaacagcatgtcaattcagtgatctttatgggataggctgtcatgaaacatcaaaactttcaactactattaaaaattat

SEQ ID NO: 949497 - DNA, 120 bp, Artificial Sequence
  ENSG00000225792_11 (sequence is synthesized)
atgaagaaaatacaattctcagcatattttacattttaaaactttacagttatatacttaagggcatgtttacgacagctcatgagagagatggctttttttaatacttaaggttaactg

SEQ ID NO: 949498 - DNA, 120 bp, Artificial Sequence
  ENSG00000225792_12 (sequence is synthesized)
taaatttctccaaaatctttaggagcactgaatctctgtgttgtcaaaatgagcaaccaaataaaattgatcccagccaactttaccatatatataattaaaatatgataattttgtgat

SEQ ID NO: 949499 - DNA, 120 bp, Artificial Sequence
  ENSG00000225792_13 (sequence is synthesized)
agaagaaagaaaaacattagaaaagtaccactgaagattaagagaagagttatagagcaacaatccattaatacgaacttggatcgtgaagtctgtgaagtctgagcagagtgtttcctg

SEQ ID NO: 949500 - DNA, 120 bp, Artificial Sequence
  ENSG00000225792_14 (sequence is synthesized)
tggcctctgtcagcggtttcctgcctgccataagtacaaggaactgttcatgggattgtactcgtggctttgtttctgttggaaatgtgttttattttctttataaaataatgggtaatc

SEQ ID NO: 949501 - DNA, 120 bp, Artificial Sequence
  ENSG00000225792_15 (sequence is synthesized)
tttaaaattgattttagatggtttgaggcattacaccacaacagtaatgagcactaatgccaatgatattggacacaaattcattttagctttatttcatgtctgaagcaattctactga

SEQ ID NO: 949502 - DNA, 120 bp, Artificial Sequence
  ENSG00000225792_16 (sequence is synthesized)
gccttgaactgctcacgtgttgttattaacttgctagtaacttaacacatgggtacagcaaacaaaagtgatcagagtccaggttgatcgggacctcaaggctactgtcctttttcttga

SEQ ID NO: 949503 - DNA, 120 bp, Artificial Sequence
  ENSG00000225792_17 (sequence is synthesized)
ccaattttactgtacattagactcattatttcccagcgttttctttttctgctcaatactgccatctggaggacacacagatgaaaagagaaggagccaggctcacccagctcacaattc

SEQ ID NO: 949504 - DNA, 120 bp, Artificial Sequence
  ENSG00000225792_18 (sequence is synthesized)
caaagagccagaaagatgtggctggggaggggacatctgaacactcccccaggcctagagttcaaaccagtgagtcggctaggtacagttttggtttttggaatctcctctgtttctctg

SEQ ID NO: 949505 - DNA, 120 bp, Artificial Sequence
  ENSG00000225792_19 (sequence is synthesized)
gctaaattcatgccaccatactccatgagttttaaataagcaaaaataatttttaaatgtatttatatgcttattttagtcagatagttcattctgaaatttaaaatgaaaatttttgag

SEQ ID NO: 949506 - DNA, 120 bp, Artificial Sequence
  ENSG00000225792_20 (sequence is synthesized)
agtgttttcccatctggttaggtgagcataattaatttattttgagtactatttggcttactatcagagagggctgtgactgccaccatcataatattaaatactattttttccttagtc

SEQ ID NO: 949507 - DNA, 120 bp, Artificial Sequence
  ENSG00000225792_21 (sequence is synthesized)
ccgcccctcaaccaacccccaggcggcaaggccctctccacgcgcgctctccagcctggcggggccctggaagccgggacacgcggaggccgggagggtcatcggcgtttaaggcagcct

SEQ ID NO: 949508 - DNA, 120 bp, Artificial Sequence
  ENSG00000225792_22 (sequence is synthesized)
cccacaccaagtgcaccgcccggatcccctctgcacgagggctttctgcttattgctcttttccccagcagccagaatcgtcaccgtagcgcgggaaggggcctcgcgggccgtctgcag

SEQ ID NO: 949509 - DNA, 68 bp, Artificial Sequence
  ENSG00000267729_0 (sequence is synthesized)
caaggttacacattaacccctgtgggactcttaagtcaaccaaagcccagtcggtttctagatggagg

SEQ ID NO: 949510 - DNA, 120 bp, Artificial Sequence
  ENSG00000263612_0 (sequence is synthesized)
ggccctagattcttcggcgccttaaacctggggttccggaagctgtagcccccgtttcaaaatccgccggaagcgcctgacccccagaagtcgcgctctgccctgacctgccggagagcg

SEQ ID NO: 949511 - DNA, 120 bp, Artificial Sequence
  ENSG00000263612_1 (sequence is synthesized)
ggggccgcgcggagtttccgcgggacttcctgctgtggaggttaaagcacggtttgtcaaaacgccttagaacttgcaatgccggccattcgcgtcggggtggggtccccagaagcagac

SEQ ID NO: 949512 - DNA, 120 bp, Artificial Sequence
  ENSG00000263612_2 (sequence is synthesized)
cctgaggtgaggcttcctgtattcttggcttattgggaggcgcaggctcggccagtgaggactgggaagaagaggaggccagcccgggtgagcgtcgtgcagaggccgcggggtgaccgg

SEQ ID NO: 949513 - DNA, 120 bp, Artificial Sequence
  ENSG00000263612_3 (sequence is synthesized)
actgttccaggaagaggtgagcagcggcggccctcgacccagagaagcaggggccacaaggaactgggtgcaggaaggtggtgaagggcccaaaggacgcgtgcgtggcctcaggaagtg

SEQ ID NO: 949514 - DNA, 120 bp, Artificial Sequence
  ENSG00000263612_4 (sequence is synthesized)
ccggaagaaagcctgagtctgaatctgagaatttctccaggtttaccttcttgaggggtcgccaaactgttttccaaagcagctgcctcattgtaccttcccattctgtatctgttcatc

SEQ ID NO: 949515 - DNA, 120 bp, Artificial Sequence
  ENSG00000263612_5 (sequence is synthesized)
catacagccatacatgacagtttctccacatccttatcaacacttgttattggcctttttttaaaaaatcatagtcatagctggtgggtgtgaagtggtgtcgctttgtggttttgattt

SEQ ID NO: 949516 - DNA, 120 bp, Artificial Sequence
  ENSG00000263612_6 (sequence is synthesized)
gtatttccttgataagtaatgatgttaagcatcacctcacatgcttaatggccatttgtgtatctttgaagaaatatctattcaaatcttttgcccatttaaaaactacttgtcttttta

SEQ ID NO: 949517 - DNA, 120 bp, Artificial Sequence
  ENSG00000263613_0 (sequence is synthesized)
tgagctggagctcactctggcctcaccccaccgcagcacctgcctcattcctgcccagccggtggcattaaacatttatggagctgtggaggatcaaaggcctcggctgggggtggtggg

SEQ ID NO: 949518 - DNA, 120 bp, Artificial Sequence
  ENSG00000263613_1 (sequence is synthesized)
caggctggaggcctctgtttggagatggaaagtagctcacatcaaaccactttctgctgctgtctccatctaccctgagctcttcctgcagtcaatcctggagcaagagcaaatgcctgg

SEQ ID NO: 949519 - DNA, 120 bp, Artificial Sequence
  ENSG00000263613_2 (sequence is synthesized)
cctgcccctaaattcaatgggttgactttgggtaatgcagggagccctggctggagcactggcatccctgactgttccaggagctgcaaggtctggaatcctgctccatgaagtgggttg

SEQ ID NO: 949520 - DNA, 120 bp, Artificial Sequence
  ENSG00000263613_3 (sequence is synthesized)
agaaagcaagtgtcatctcagcagagacttcaaaataagtcaccaatgtgcctgtgatcctacagattgatgggctgtttggaactggggaagtaaagctggcttctccagcttcaatgg

SEQ ID NO: 949521 - DNA, 120 bp, Artificial Sequence
  ENSG00000263611_0 (sequence is synthesized)
tgcagattccagacttgctggcctccatagtaatgtgtcaacaattttggcattgcagaagaccatggagacaacttttttatttctccatcacacaaggactgaagatacaaaaatgag

SEQ ID NO: 949522 - DNA, 120 bp, Artificial Sequence
  ENSG00000263611_1 (sequence is synthesized)
actgactcttgtactttttagctataagaacctaagcacgaacttcgcagagctccagtgcttctgttttgaaaagagataatatttcctatgggatagggttgtctgggggtactaaat

SEQ ID NO: 949523 - DNA, 120 bp, Artificial Sequence
  ENSG00000263611_2 (sequence is synthesized)
gagaactacatacaaagtacttaatggaaggtatgtaggactcaatagaggtagctattaaattgtatgtaagtaacaaatcctgataatgttcaattctgaataaaacttagcaaggta

SEQ ID NO: 949524 - DNA, 120 bp, Artificial Sequence
  ENSG00000263611_3 (sequence is synthesized)
aggttgaagtgttcattgtagtgagcctgtggcatgaaggtcctccccagtaaacatcagcctgcaaacagaatcactagtgcttagcaacagtgtcatagtgccactggaatggtggta

SEQ ID NO: 949525 - DNA, 120 bp, Artificial Sequence
  ENSG00000263611_4 (sequence is synthesized)
gaaggatctcttcacccctagactaccacggcagattggaacccaggaatccgcagagaaaacataagatttctatctagaaaaagggagcaaaagagaaaggaagggagtggatagggc

SEQ ID NO: 949526 - DNA, 120 bp, Artificial Sequence
  ENSG00000263611_5 (sequence is synthesized)
aggactgtgtacttcaggggcctgcagtctctgcaccaggacaccaggagacctgactcagagaagagactagaaaccaacagaaagaaactaaacagctgtctgatacatatacagata

SEQ ID NO: 949527 - DNA, 120 bp, Artificial Sequence
  ENSG00000263611_6 (sequence is synthesized)
agaaaattaactgaggaacggactatggggtcgttgatcttccttctcatcaaacttgcatcccaccaacttcgggcctgctgcagctaattattcttgaagatatgtttaaattgcaga

SEQ ID NO: 949528 - DNA, 120 bp, Artificial Sequence
  ENSG00000263618_0 (sequence is synthesized)
ctcctctagacctggcaaagacctagaaagggaaagagattctaaagatgcaaaattttaccccacaaaaggctttgcagggccatttcaacatatgtcagataaatatattttgaagta

SEQ ID NO: 949529 - DNA, 120 bp, Artificial Sequence
  ENSG00000263618_1 (sequence is synthesized)
aagtgtgttaatttctttcagggtctgctgtcatgtgatgctataccagagtcaagctggaatttggcatcttagtgccaaagggtctgtttcatccatgaagggatgtctattttaatg

SEQ ID NO: 949530 - DNA, 120 bp, Artificial Sequence
  ENSG00000263618_2 (sequence is synthesized)
tgctgcaggtcaagcagtacctgagagcactgaggagcacctggacccagtaacttctctaaatctagtgtgggggaagatgcgcccctgccatggagccatgttctatggcaggcaacc

SEQ ID NO: 949531 - DNA, 120 bp, Artificial Sequence
  ENSG00000263618_3 (sequence is synthesized)
aaccactggtcaataaaaaaaaatcagatgatgtcaagtgtatatctaattgacattaaaatacacatttgaaaatttggaaatccttttttaaataaaatttttaaatttcatttttaa

SEQ ID NO: 949532 - DNA, 120 bp, Artificial Sequence
  ENSG00000263618_4 (sequence is synthesized)
tgatcagcacttggttgaaagaatttagctttgtctaaagacagtagaaagaaatgcttgagttaagaaaaggaaggttatggaagccaaggttcttgttatgtagatgaagcctctagg

SEQ ID NO: 949533 - DNA, 120 bp, Artificial Sequence
  ENSG00000263618_5 (sequence is synthesized)
atgctgggcctagtatgaggtgagtgcctaggcattgccatgtagacgctgtctgagagatgaaggtcattctccaaggagcagagaaaatgagtatcgtcctcatcaaccaagctactg

SEQ ID NO: 949534 - DNA, 120 bp, Artificial Sequence
  ENSG00000263618_6 (sequence is synthesized)
caattgttctccttggatactccctctggtctctatgtagacagagaacgttctcctccagcctctgttgatctctgaaggtctttaattcaaaatgcacgttacatcagggaccactat

SEQ ID NO: 949535 - DNA, 120 bp, Artificial Sequence
  ENSG00000253152_0 (sequence is synthesized)
gtggacagtcagcaagggtaacctgccagggagaaaacctaagaagccatggtacaaactggtaccagcagaaccctgccagatgcctgtgcaggtcatacatggtaacaacaaccagcc

SEQ ID NO: 949536 - DNA, 120 bp, Artificial Sequence
  ENSG00000253152_1 (sequence is synthesized)
gggatcccagaccgattctctggctccaagtcaggaacacagccaccctgaccatcactggggctcaggttgaacatgaagctgactattaccgtcactcatgggacaacagtggtactc

SEQ ID NO: 949537 - DNA, 120 bp, Artificial Sequence
  ENSG00000259177_0 (sequence is synthesized)
aaaaagaaaagaaaaaattcaggatatcctttatccaggtgcttggataaaagtttattgagttcaggccgggcgcgtgagccaccgggccaggtcagttactccttaagtatgcaaaag

SEQ ID NO: 949538 - DNA, 120 bp, Artificial Sequence
  ENSG00000259177_1 (sequence is synthesized)
aaaagacgctctagagtagctgaaaataaaatgcctggctaatgcagaacctgatgaagaaataggatgaagtgtaacattctactgaggtcatgatatcccagcataaggcagagtttt

SEQ ID NO: 949539 - DNA, 120 bp, Artificial Sequence
  ENSG00000259177_2 (sequence is synthesized)
aaatcttgtttctcaacagggggaggagtgggggccaaggaaggagcatcggaatcactagagacatttaaaatacagtcggccctccttatccatgggttctgcatccatggattcaac

SEQ ID NO: 949540 - DNA, 120 bp, Artificial Sequence
  ENSG00000259175_0 (sequence is synthesized)
gggagagcagttttgcaatgggaactcctccgtctaccttctggtgaaatggggtgctgcatctgggtcattctgtaaccacgaaacacaagatgaaatgccatggggttaccaggaggg

SEQ ID NO: 949541 - DNA, 120 bp, Artificial Sequence
  ENSG00000259175_1 (sequence is synthesized)
cgaggagagatgacctgcagtcaggatctgaagacggctcctggagggaaatggggtttggaacacagttggaagggctgaagcaagatgtgagagccctgtggagagaggaggtgtgtt

SEQ ID NO: 949542 - DNA, 120 bp, Artificial Sequence
  ENSG00000259175_2 (sequence is synthesized)
ctctctctcacctcagctgaacctgggctcaggaagctgaaactcctccatgtgaatcctggttctctcattcatcacctgtgtggcgggacggtgcttttaggtcaccaagcctcacta

SEQ ID NO: 949543 - DNA, 120 bp, Artificial Sequence
  ENSG00000259175_3 (sequence is synthesized)
cactcacctgtaacatgaagatgatgatgcctacctcctccgactactgtgcagatttaatagtgcatgggacaaggcttcccatatgtttggcacacagtaggtgctcggtacacagca

SEQ ID NO: 949544 - DNA, 120 bp, Artificial Sequence
  ENSG00000259175_4 (sequence is synthesized)
gctaacagtcacgatgtgcatgacactgttactcaggtggccaccctcttgggctcccaggtcatcctaaatccctctctctcttcaccatgtctatccaaagcatcagcactcatcaaa

SEQ ID NO: 949545 - DNA, 120 bp, Artificial Sequence
  ENSG00000259175_5 (sequence is synthesized)
caactgtctcctcaagttgccccctatttcaaattcccactgctcctgcccatattctggccacatcacctcttacttggacaattttaaagcctcttgtctttgtttccagttatttcc

SEQ ID NO: 949546 - DNA, 120 bp, Artificial Sequence
  ENSG00000259175_6 (sequence is synthesized)
tccacctgtctcttctgcaaacctgggctactaaagtggtttttcaaaacactgctctgcctaaaatcctcaaagtcatcctcgcttacctttatttgtattttatttttctttctttat

SEQ ID NO: 949547 - DNA, 88 bp, Artificial Sequence
  ENSG00000259175_7 (sequence is synthesized)
tgggattacaggcgtgaggcaccacacccggtctcttaactttgtattgattgagtgagtgagtgagtgagaagtgcagtggtgcaat

SEQ ID NO: 949548 - DNA, 88 bp, Artificial Sequence
  ENSG00000259175_8 (sequence is synthesized)
cagactgaagtgcagtggtgcaatcttcatattcccctgcctgagcctcccaactagctgggtctacaggtgcgtgccaccatgcctg

SEQ ID NO: 949549 - DNA, 120 bp, Artificial Sequence
  ENSG00000259175_9 (sequence is synthesized)
cctcacttacctttaaatgactgaggagagaatccatgttcttcagcatgggttaagaggcctttcataacttggctgtaccaggctcattctatcaccactgcccacctcctccaagtc

SEQ ID NO: 949550 - DNA, 120 bp, Artificial Sequence
  ENSG00000259175_10 (sequence is synthesized)
agccagtgtcactccagccactaggaactgcttaggattctcccttttgcatctctagggctgccccttcagtctagaatgttcactcatttattctatgctcatcctttaagacccatc

SEQ ID NO: 949551 - DNA, 120 bp, Artificial Sequence
  ENSG00000259175_11 (sequence is synthesized)
ccagttattctctcccctggaacaattcctgcctcttccccatgcagttaacctctccagcctctgtgctctgcaatgtttttcttcatgaccctttagagttctcctcctattacatag

SEQ ID NO: 949552 - DNA, 120 bp, Artificial Sequence
  ENSG00000259175_12 (sequence is synthesized)
tacttatttactgatgtgtgtctgtcttccctactagactgtgagtgacttcctagcaggggccctgagtgaggccataggtaggaccttgcagcctgcctggcacatagtaggactaat

SEQ ID NO: 949553 - DNA, 120 bp, Artificial Sequence
  ENSG00000259175_13 (sequence is synthesized)
gtcctgccagccacatccacaggtgcccagactatgcatcagctttaagtgggtactggcagtatgtacctgctggaagctctcacgcagatggctttgatcctcagggtggcagaattc

SEQ ID NO: 949554 - DNA, 120 bp, Artificial Sequence
  ENSG00000259175_14 (sequence is synthesized)
caaaatgtcctttcccagaagatcctaaataaaagagacaagctttaataatcccagatccatttgtaattatttgtatactcactgtgatacaacagtgttcatttccatctcctttaa

SEQ ID NO: 949555 - DNA, 120 bp, Artificial Sequence
  ENSG00000259175_15 (sequence is synthesized)
ctcatctcctttagcctgtcccaccccagattttttgaaaaagtgagtgcaaaatttccctgggagccgtcagagaactggcttcttggtattcactctaagttcttctggcatgctcaa

SEQ ID NO: 949556 - DNA, 120 bp, Artificial Sequence
  ENSG00000259175_16 (sequence is synthesized)
tatccatttctaattttgctaaggcactacatcagtagcttcagaatgcaattttatttttgtttgtcttggagaggcaaactgcaataaacatactttaataacataaaaagaaagcaa

SEQ ID NO: 949557 - DNA, 120 bp, Artificial Sequence
  ENSG00000259175_17 (sequence is synthesized)
aatgatagcctgaggacagatgtgttgcttatgaaaactggaattgtttaaatgtggaaattgtagctctcctgtggctgaaaaaatgaggttatcataaaataactgtacttgttaaaa

SEQ ID NO: 949558 - DNA, 120 bp, Artificial Sequence
  ENSG00000259172_0 (sequence is synthesized)
cggagtctggaggacccctgattccagacgttggtgtttaaaagttaaggcgaatgtggaaacacccgaggggaactttctcatgcattagcgcacctcgaggtgggaggggaagcggtg

SEQ ID NO: 949559 - DNA, 120 bp, Artificial Sequence
  ENSG00000259172_1 (sequence is synthesized)
actgtcctccctccaccagccgtcgcgggaacccgtggggttcagtgaagggtccagcagttcaggtgcccgccccgggcctgggccttggctccgggctacagtgtgagatcccgggct

SEQ ID NO: 949560 - DNA, 120 bp, Artificial Sequence
  ENSG00000259172_2 (sequence is synthesized)
aggtggcccgcctggggcaggtcgccgggacaaccccaccgccccgcaagtccagcccggcctcgggcacgccaaaggattcctagcaagtacaagcttctgacttcacagagaggccat

SEQ ID NO: 949561 - DNA, 120 bp, Artificial Sequence
  ENSG00000259172_3 (sequence is synthesized)
ggtaaacatcccaaggagtgcatcagccatgggttcagggatttcagccactgcatagaagacaagctgtaacctaattcaatcacacttggcagcaaccggtgaagaggcagtctgggc

SEQ ID NO: 949562 - DNA, 120 bp, Artificial Sequence
  ENSG00000259172_4 (sequence is synthesized)
tctggggagctcccccgtgacagatggaaggggcccctacatctggagaggctctagaacctcctcccagtgaggctaacgtggtctgaaggggtctctttgcccagtgacattctgggg

SEQ ID NO: 949563 - DNA, 120 bp, Artificial Sequence
  ENSG00000259172_5 (sequence is synthesized)
ttgggatctgggatttcctccattgcttccttacatcaacatttgctaaagctcaaaagaagaccttccacgtaatgacatcaaacagatctgaaaccacagttaaagtaacgtccactt

SEQ ID NO: 949564 - DNA, 120 bp, Artificial Sequence
  ENSG00000259172_6 (sequence is synthesized)
aacacttggtcagcactcatgtttcattttgtgtgccgtggaaagaaatacaggctcctgtgccatgggatgttaactcttttattaatttagggttaacattgtacttgcttcattgat

SEQ ID NO: 949565 - DNA, 120 bp, Artificial Sequence
  ENSG00000259172_7 (sequence is synthesized)
ttctctttcagagttgtagattcaataaacaacatctgggttctctccagctcacaggtgacaaggcaaatgcactgtcgtcaaacaggggagcaggacaatatggagaaagacgaggtc

SEQ ID NO: 949566 - DNA, 120 bp, Artificial Sequence
  ENSG00000259172_8 (sequence is synthesized)
gaaaaaatttaaggcaaatgttacttccctattcaagggaattgatcaagcagatctgtgcatttcaatgaaaatatatgaaatatttgtcaaaataattaacatcggtaaaaattagaa

SEQ ID NO: 949567 - DNA, 120 bp, Artificial Sequence
  ENSG00000259172_9 (sequence is synthesized)
catgtagcttataaaatgcctacacaggtttggcagaataaatccaactgtgtcatgtaggcttgtaatatacacagacacaggagtttccaccttaaaaacgagtcttctgaagggcag

SEQ ID NO: 949568 - DNA, 120 bp, Artificial Sequence
  ENSG00000259172_10 (sequence is synthesized)
tttacattttgttcagaggaattgcttggccatcggggtaccttttggctggccacagaatgcctcctgttgcctctcctcagaaggctctgcatcaggtcgaggtggtcgttcaggcca

SEQ ID NO: 949569 - DNA, 120 bp, Artificial Sequence
  ENSG00000259172_11 (sequence is synthesized)
tgagactcctgaagacacagacagaacacggtaacaaggagagctcggcttgctcaaaggagagcgctgcgggggatagaatcttctggtctggctttggaattggactttctaagccac

SEQ ID NO: 949570 - DNA, 120 bp, Artificial Sequence
  ENSG00000259172_12 (sequence is synthesized)
tgctgcagtttcagaagtagctgactatgtagaaatagatactccggccccagtggtcatacattttatgccctcaaacctatcttatttatagtctgaccaaaccgtccccagactgct

SEQ ID NO: 949571 - DNA, 120 bp, Artificial Sequence
  ENSG00000259172_13 (sequence is synthesized)
cagtggcaggcaacgagcaggtagactgctggccctttgtcacatgtgaggatggcccagggttcgccagctgggccggggagatttactacacagccgcagaaaagcacggggagaaga

SEQ ID NO: 949572 - DNA, 120 bp, Artificial Sequence
  ENSG00000259172_14 (sequence is synthesized)
gtgatgtgtgatgccaagcgcctttcttttctgctttggtcttgaagattcagtaaacttatggtcccagaagctgctccaaagccagagctgtggattcccagaattcattttgttcct

SEQ ID NO: 949573 - DNA, 120 bp, Artificial Sequence
  ENSG00000259172_15 (sequence is synthesized)
gttagtttgtcggaagactggagccaacaagcagcatttgagaggatatcaccattttaggaacacctccttaagagccaccacccacctggcttgggtgctcagagatgctgctcctgg

SEQ ID NO: 949574 - DNA, 120 bp, Artificial Sequence
  ENSG00000259172_16 (sequence is synthesized)
ggagataaagctgtcaggtgcagggcgccgctcctgaaacagactctggccgacagtctggaggaaggtggacggatggatggatgggagtgcctgccctctgtgggcagctaggcaccc

SEQ ID NO: 949575 - DNA, 120 bp, Artificial Sequence
  ENSG00000259172_17 (sequence is synthesized)
ttacccggccaggaggcacgtgcggcagcagaactgaatgaagagcttccgttcgcacagccggttggacttcaccatctcgcagaatgtctcgtcagctggggccccgcatcaggaaag

SEQ ID NO: 949576 - DNA, 88 bp, Artificial Sequence
  ENSG00000259172_18 (sequence is synthesized)
cgcagaatgtctcgtcagctggggccccgcatcaggaaaggcaaaagagggaaaggtcagtcttcggtgcctgtgaagattgtttcaa

SEQ ID NO: 949577 - DNA, 120 bp, Artificial Sequence
  ENSG00000259170_0 (sequence is synthesized)
ctctgagtgggtcaaatggggactggaaaaattccacccactagctcagctaatgggtaaaaatgctggacatttatctggagctgcagggggtaaagtgtcatccttgggaaattcaaa

SEQ ID NO: 949578 - DNA, 120 bp, Artificial Sequence
  ENSG00000259170_1 (sequence is synthesized)
gctggcctgtacctgctgagagcaccagggatatggtcacattgcaagcctgttgccagcaccccaggcagagtcatcaacaattactttggaggagggccacttccaccttccagggca

SEQ ID NO: 949579 - DNA, 120 bp, Artificial Sequence
  ENSG00000259170_2 (sequence is synthesized)
taggtgacccctgtggaaaacaagtacccctggaacatcctagaagtggaggtggaccataaactagccactggaatgagaatgcagtaaaacagcttgcctcagagtggtcttccctgg

SEQ ID NO: 949580 - DNA, 120 bp, Artificial Sequence
  ENSG00000259170_3 (sequence is synthesized)
aacacacagcttctgttaagcattcatgattctgacgggccagtcatcccttcattgactttgtccagcagctccaccattacagtctcattttagaaaataaagacacttggaaacaaa

SEQ ID NO: 949581 - DNA, 120 bp, Artificial Sequence
  ENSG00000253158_0 (sequence is synthesized)
catggaagctgcagctcagctgctttgattcttgttactctggctcagataccaccagagaacttgtgatgacagtctccagcctccctgtctttatctctaggggaaaaagccaccctc

SEQ ID NO: 949582 - DNA, 120 bp, Artificial Sequence
  ENSG00000253158_1 (sequence is synthesized)
atccaccaggaccaccaatgtcccagcctggtggagtggcagtgggttcggggaaaacttcagtctcattatcagcaggctggagcatgaagattttgcactttaacactgttatcagca

SEQ ID NO: 949583 - DNA, 120 bp, Artificial Sequence
  ENSG00000259178_0 (sequence is synthesized)
aggagcagaaaagcagcaagccaagcatgctgggttcccagaagaccaacactatattctgaagacaccaagaagatattcagtttttccccactcagagatgacatgattgcagacatg

SEQ ID NO: 949584 - DNA, 120 bp, Artificial Sequence
  ENSG00000259178_1 (sequence is synthesized)
actagtgacatcggctggtctaaaggaccccacaagcagttgactcaaagaacaaagtttccaagttctgattttcataccccttcctcgatcaatcaacaaccacaattttctagcccc

SEQ ID NO: 949585 - DNA, 120 bp, Artificial Sequence
  ENSG00000259178_2 (sequence is synthesized)
ttgcccttcataattctcttaaaaaccccagcccagaacccctcagagatggattcgagggtctccttccatctccttgctcagccaccctacaatcattaaaggctttctctgctgcaa

SEQ ID NO: 949586 - DNA, 120 bp, Artificial Sequence
  ENSG00000250101_0 (sequence is synthesized)
acgtcggcctcacccgggcaggcatggggcggtcgggcttagcgccgcaccccgccggccagagccaccgtctctccagacgcggccccagcgcccactggggatggcaaagacgacatc

SEQ ID NO: 949587 - DNA, 120 bp, Artificial Sequence
  ENSG00000250101_1 (sequence is synthesized)
cggtgcgccgaggctgctcacaaaatgtacaaaacgcagcgcctgcaggtgtgctcagaagaggaactccgcagagtggaggtaagtctccgacatgggagagagggagaggatcccctc

SEQ ID NO: 949588 - DNA, 120 bp, Artificial Sequence
  ENSG00000250101_2 (sequence is synthesized)
ggtccaagacaaatctccagcttctggctccctgctgggcactcggtaggtgcctgataaatatttgcaggattctgtaagaatcagaattccagttgtgctatctgaggagtccgacag

SEQ ID NO: 949589 - DNA, 120 bp, Artificial Sequence
  ENSG00000250101_3 (sequence is synthesized)
aaaagcagaagaggttataccagtggagggaaggtggtcttggggtctgaacagttcgtccactgctgctcaggtaggtggtttcacccagggtcagttttgtcttctggagataggcca

SEQ ID NO: 949590 - DNA, 120 bp, Artificial Sequence
  ENSG00000225867_0 (sequence is synthesized)
gaatggcctggtgagaatccactgtcaatctcctttggaacggtggtgtgggacttcagggagaaattcttggctggcagagctgtcctcttgggggagtggtgagcttccagtcaccaa

SEQ ID NO: 949591 - DNA, 120 bp, Artificial Sequence
  ENSG00000225867_1 (sequence is synthesized)
agggatgtaagtagaggcaacagccatcagtcagggttgcttctgaacaattcctgccccagaaggatgtgtatacaggacgtgaggttcctcctcacccctggagaccggaggagatca

SEQ ID NO: 949592 - DNA, 120 bp, Artificial Sequence
  ENSG00000225867_2 (sequence is synthesized)
tcccagagcctttgccctcaaggcagcaggccactgagaggcgacagacctggactcaaatccagcgtgaccatttccaagccatgagacgttacttcacctccttggcctcagtttcct

SEQ ID NO: 949593 - DNA, 120 bp, Artificial Sequence
  ENSG00000225867_3 (sequence is synthesized)
catctgcacaatggcgttgtgaggatcagagcaaatataagtggaacttcaagctctgagctgtgtctggcaatcaggagatgctcagttaatgctcctcctgcttctgctcttcttctt

SEQ ID NO: 949594 - DNA, 120 bp, Artificial Sequence
  ENSG00000250103_0 (sequence is synthesized)
agtcccctcgcccctcccgcccctgcacgggtccccctctagccgtcgctgcaaccaccacctcggttccactcaaccgatttttgctgcatgtcaacacttattaccgctgttacctaa

SEQ ID NO: 949595 - DNA, 120 bp, Artificial Sequence
  ENSG00000250103_1 (sequence is synthesized)
acaacaaactagacacacttcactgcaaacagtgggaagaatggtgttacctttgatgaaacatccatggaacatttgcatttcatgagcagctttatggtgagaaattgaaacctcctg

SEQ ID NO: 949596 - DNA, 120 bp, Artificial Sequence
  ENSG00000250103_2 (sequence is synthesized)
gagtgagcttggaagcagattctccagctcttcaaataatggcagccccagaaaacaacttaaatgcaacctcctgagagtctctgagctagaactacctagctaaactgctgtgagatt

SEQ ID NO: 949597 - DNA, 120 bp, Artificial Sequence
  ENSG00000250103_3 (sequence is synthesized)
cttcaacctcaaaactgggatgagataacaaatatttattgttttaaggaatcttcaaatgataattttgaaaagagaagcagtccttttcatgatgaagagatgagttgtcaaaagccc

SEQ ID NO: 949598 - DNA, 120 bp, Artificial Sequence
  ENSG00000250103_4 (sequence is synthesized)
cccatccagcgagagaaacctagctcccagagccggtgcagtcagtcccctcgcccctcccgcccctgcacgggtccccctctagccgtcgctgcaaccaccacctcggttccactcaac

SEQ ID NO: 949599 - DNA, 120 bp, Artificial Sequence
  ENSG00000250103_5 (sequence is synthesized)
gtcctatggagaatttcattggtaagaaactgagctagaatgaacttgacagccttgtgagagagccatcttagaagcagaccttcagcctcagacagctttcagaggattgtagcccca

SEQ ID NO: 949600 - DNA, 120 bp, Artificial Sequence
  ENSG00000250103_6 (sequence is synthesized)
gctgaaacatcaaccacaatctcatgagagacactgaaccagaatcacccagccaagctgttcccaaattcctgagccatagaaactgtgtgagataataaatgtttattgttgttctca

SEQ ID NO: 949601 - DNA, 120 bp, Artificial Sequence
  ENSG00000229373_0 (sequence is synthesized)
tgcttctatcacactccagtgcttttaagcaggttttccccccatattttacctaaagtttatagctgttacctgtggaaaggttggttcagtgggggctattctgccattaccaaaagt

SEQ ID NO: 949602 - DNA, 120 bp, Artificial Sequence
  ENSG00000229373_1 (sequence is synthesized)
tgggtcctgttctctactttttaattggccggaaaagaggcataaactcggagaacccaagaccccggcctggcgtgcagccccagcagccggaccagccttgggcaacagcgtgcgacg

SEQ ID NO: 949603 - DNA, 120 bp, Artificial Sequence
  ENSG00000229373_2 (sequence is synthesized)
ttcagctgtctgtgtctccagtgctcccattccatcgcacctgaatgagggatttgggaggtaaaacagggctgagcgtgcgttcgagcttctcctgcatcatgaccaggatgctctggg

SEQ ID NO: 949604 - DNA, 120 bp, Artificial Sequence
  ENSG00000229373_3 (sequence is synthesized)
acaccttgtccacgtctgtgtccaccagtcctgctcagaatctccccaggggcttttccacgatgcccatccaggcgtcaccctcactctaggccaggaggagaaggcatgccctgagga

SEQ ID NO: 949605 - DNA, 120 bp, Artificial Sequence
  ENSG00000229373_4 (sequence is synthesized)
ttcagcctcttcttcttcatccctcccagcacccagtgtgttgggtgcacacattatggttccaaaccagagtttccctaggaaataaacacggaggggctgaaaggacctggggccatc

SEQ ID NO: 949606 - DNA, 120 bp, Artificial Sequence
  ENSG00000229373_5 (sequence is synthesized)
gggggtggatggccatatcctggggccttgatgccagtgccgactgttccctgcacgcttccacgtccacgccaacattgcaaggctatgtcacggactggaacagctacagtgatgaca

SEQ ID NO: 949607 - DNA, 120 bp, Artificial Sequence
  ENSG00000229373_6 (sequence is synthesized)
caagtgcatgtggaatctagaaacttcacagctgagcctgcaaaggtgctcatggcatgcagaagtgtttctggatccagtggtaggaagtcatttcaagcagcttgtgaacattcacag

SEQ ID NO: 949608 - DNA, 120 bp, Artificial Sequence
  ENSG00000229373_7 (sequence is synthesized)
aagcagctcaggatcatcctgctgcttctgagagcaggtgtcgggccccaggctggaggccacgtgccaggctggcaggatttgtccactgtgaagctcgacgcccccgcaggccctgtg

SEQ ID NO: 949609 - DNA, 120 bp, Artificial Sequence
  ENSG00000229373_8 (sequence is synthesized)
ctgcccgcccggatccccctgcctcaggatgccctccacaccctccgaattcccagccgctgctctggggcctgcacagagggcttgggcccagcacctggaaactccaaagaggcaaac

SEQ ID NO: 949610 - DNA, 120 bp, Artificial Sequence
  ENSG00000229373_9 (sequence is synthesized)
gggttcatgtccaggttttgtcagatcgcttccgaggctgccctcttcgccgtggctgctgagtgcagagctgggcatctgagtggacagagtggtgctccgcttccttgcatctcctgg

SEQ ID NO: 949611 - DNA, 120 bp, Artificial Sequence
  ENSG00000229373_10 (sequence is synthesized)
gccatgcgtggtgacctgtgcccactgcatcgctcctgtgtgccctgtgcatgtgaccgtgtctttcccgtgtattcagtgctgcttcatgtcttccagttccgctttgtggtttgtgag

SEQ ID NO: 949612 - DNA, 120 bp, Artificial Sequence
  ENSG00000229373_11 (sequence is synthesized)
tgaccagtgcatcccgttcctgctgcagcagctgcaatgtgcactgtcctgcaggaagccctcggggtagggcctgggggctgtgggaagctcagcaacaaggtaagggaatgggcagct

SEQ ID NO: 949613 - DNA, 120 bp, Artificial Sequence
  ENSG00000229373_12 (sequence is synthesized)
ttgttttatttatttatttatttttactatttaattatctcaccttattacactttaattaaaatatcgatctttacacaatacacttgaactgtggaataaagcaggaccagatgtgga

SEQ ID NO: 949614 - DNA, 120 bp, Artificial Sequence
  ENSG00000229373_13 (sequence is synthesized)
acctctagggaggggagaaggctgaaggtcaagttgatcaccagtggacagtgatttaacaaatcatgcctacatgatagcctccataaaatcccaaaaggacagagttcagagagcttc

SEQ ID NO: 949615 - DNA, 120 bp, Artificial Sequence
  ENSG00000229373_14 (sequence is synthesized)
tgctcccattccatcgcacctgaatgagggatttgggagagacacagcctctcgtcggaacgctcctgcacacccttctcgcaacccccaccacctgccccccactcccgaccagagcag

SEQ ID NO: 949616 - DNA, 120 bp, Artificial Sequence
  ENSG00000229373_15 (sequence is synthesized)
gtgcagcctacattgtgctactctctcagatccagtgtgcagctctcctcctgggacttccctccacaacttttctcagttgaatccactatgtgttggatcccaggtcttcctctttat

SEQ ID NO: 949617 - DNA, 120 bp, Artificial Sequence
  ENSG00000229373_16 (sequence is synthesized)
tttctccttcattttgctggagcacatcctcaagtaactttctaaaataagtttaaacaggtaaatgttttggaaggttgaatgccacaaaacatctttattctaccttcatacttgact

SEQ ID NO: 949618 - DNA, 120 bp, Artificial Sequence
  ENSG00000229373_17 (sequence is synthesized)
ccaatttctaagttcaaaatcatttttcaggagctaggaattgaactcaacctatctaattccaaaattagggttattttatttgacacgatctctggctaggaagcaagcacaacagct

SEQ ID NO: 949619 - DNA, 120 bp, Artificial Sequence
  ENSG00000229373_18 (sequence is synthesized)
ccaccgttattggcaagttactgaaagcaaccctttgacagcagccgcagatccacagccatacagaattttcctttttaaacaagttgctcaccattaggatgctctgatttctccatt

SEQ ID NO: 949620 - DNA, 120 bp, Artificial Sequence
  ENSG00000229373_19 (sequence is synthesized)
tgtaaaatgaagattctctgtcaacttttggttttagtttttggtctggcatatttggtaagctacaagtgatctttggctgaaaatcagtcatgtgtggcgggtcgtttcaccaggtgc

SEQ ID NO: 949621 - DNA, 120 bp, Artificial Sequence
  ENSG00000229373_20 (sequence is synthesized)
cctgcacccagagatctagggccctcaatcgtccttcagttgctgtcagtgcaagggcaatctcacccaaccctccacagggaaaggcaactgccacacgcctctgagagcagggatgca

SEQ ID NO: 949622 - DNA, 120 bp, Artificial Sequence
  ENSG00000229373_21 (sequence is synthesized)
gcaagcgctgactctgggcttacaggggtcccgcccataacagcgcaccacagaccagggctcaccccacaaacatttttctcgctcagtcctggaggcagaaaggccaacatcagggtg

SEQ ID NO: 949623 - DNA, 120 bp, Artificial Sequence
  ENSG00000229373_22 (sequence is synthesized)
ccagcatggctggcgtctggtgaggctctcttcctggtttgcagactgttgccatggtattgtgataataacaaaatatagatttggtcttcgtcccagattcccaacaccagagcttct

SEQ ID NO: 949624 - DNA, 120 bp, Artificial Sequence
  ENSG00000229373_23 (sequence is synthesized)
aagagacctggaacctcttgagtgatgagcgtgtcttttgtgtgctgacgagaggacagagctggtgacccttgggcagcttcaggaagggactgctccccagaaagaccaaggcaggac

SEQ ID NO: 949625 - DNA, 120 bp, Artificial Sequence
  ENSG00000229373_24 (sequence is synthesized)
ttataggtgaggactttcagatccaccccaacctccaggaagcgggaggggagagaggacaggagctgaagatggaactgattaccgatggccaagaatttaatccattattctgttaat

SEQ ID NO: 949626 - DNA, 120 bp, Artificial Sequence
  ENSG00000229373_25 (sequence is synthesized)
gaaaaaccaaactctgtaaaacattttaaagaggtttattgggacccctaatacggtgaccacagcttggagaaaaaacaaacccaagaagcctagagtgagtgttcctgaggtgcctgg

SEQ ID NO: 949627 - DNA, 120 bp, Artificial Sequence
  ENSG00000229373_26 (sequence is synthesized)
attacagtctggcttcatgcactttaggggacaggcgttacaggtggacgagatatatattggctcagctcgaacacgcgggatatctggaagcaagccttatcggttataggtggattc

SEQ ID NO: 949628 - DNA, 120 bp, Artificial Sequence
  ENSG00000229373_27 (sequence is synthesized)
agagagtcttcagtttgcggctggttaaaggagcaaagctttatctaaaacctagagtcagcgatgaggacatctgcacccgaaacatggggcaggggtgactaacagggtgcatgactt

SEQ ID NO: 949629 - DNA, 120 bp, Artificial Sequence
  ENSG00000229373_28 (sequence is synthesized)
gacttaaccctcgtctgacatggtcttgggtcctgtttgtaactggggctcttattgccacggtcagttctgtcagccttctgatctctgttttgacattaatgcctaaattccaaaggg

SEQ ID NO: 949630 - DNA, 120 bp, Artificial Sequence
  ENSG00000229372_0 (sequence is synthesized)
gtaccaggagaccgtcatggataggaagcagtcctgagggaggagccacaggcctgagtcttctgtgccagtcacctcagattcctgtgccctctgccctggctgccagtggaattcctg

SEQ ID NO: 949631 - DNA, 120 bp, Artificial Sequence
  ENSG00000229372_1 (sequence is synthesized)
gcacctatcccagctctttcgggagcccacagttccttaccagctgggggtcgatgtccccaatggatttggcatggactgcttctaggagttcctccagctctgccagggccaggcgcc

SEQ ID NO: 949632 - DNA, 120 bp, Artificial Sequence
  ENSG00000229372_2 (sequence is synthesized)
gagccagccgtgctcgtgccatgcccacctctgcagccagtggtgggaacagaggagccggtccaggcgctagaataagccctgaggcctccccagggctgccagctgaactcccaggag

SEQ ID NO: 949633 - DNA, 120 bp, Artificial Sequence
  ENSG00000229372_3 (sequence is synthesized)
cctctggctcagggggcagtctgggtggcttccggaagcggcgcatgtcagcagtgagcctggggaagagctctcgctggctgggtgcagcacagtgacagacaagcagagacacatcaa

SEQ ID NO: 949634 - DNA, 120 bp, Artificial Sequence
  ENSG00000229372_4 (sequence is synthesized)
agtcatcctggtgtcgaagtccctcagagtccaggtaggagccagaactgtgcaggacgggttggggagatgtcaactctggggttctaataaaacaaacctcacccctgcccaagaaaa

SEQ ID NO: 949635 - DNA, 80 bp, Artificial Sequence
  ENSG00000229370_0 (sequence is synthesized)
ggggtgatataatttgactgtaatttctcacctggcaagagtgggaccaggtggagacaattggatcatgggggcagttt

SEQ ID NO: 949636 - DNA, 120 bp, Artificial Sequence
  ENSG00000229370_1 (sequence is synthesized)
aagtgtctggcttttctcctacttgcactcactccatcctgccaccctgcgaggaaggtgcctgcttcttctttgccttccgccgtgagtgtgagtctcctgaggcctccccagcaatgt

SEQ ID NO: 949637 - DNA, 120 bp, Artificial Sequence
  ENSG00000229370_2 (sequence is synthesized)
ggaactggatacgtcatggaacagagggcaacctgcctcctggaaatgtggagtgtctagggagtcacagctgagatcttccttggattaaaggctgcgggtgtcacaaacaggtaggaa

SEQ ID NO: 949638 - DNA, 120 bp, Artificial Sequence
  ENSG00000286059_0 (sequence is synthesized)
ggaggattggaaagtaggtagcacactggctgttctgctcttcatgtctgctggcaaagtcaggaaaaaggatggatgtatcctcaccattttttcaagaggaacctgcagaggagagca

SEQ ID NO: 949639 - DNA, 120 bp, Artificial Sequence
  ENSG00000286059_1 (sequence is synthesized)
catggaattccaaacacctgtgccaggctcccggcacacagaaacactggattaggtgcaatgctaattctcaaggaatctactgtttggtgggaaagacagatgttaaacatgttgaaa

SEQ ID NO: 949640 - DNA, 120 bp, Artificial Sequence
  ENSG00000286059_2 (sequence is synthesized)
agaaacgacacgaagatcggtatgaggatgagaccgaggccctacgtgaattcacatatggaaaccaacacttgtgcaaggcggggaaataacatcaaagaaatgtcaccaaagcaagag

SEQ ID NO: 949641 - DNA, 120 bp, Artificial Sequence
  ENSG00000286059_3 (sequence is synthesized)
ggcacttcttaatgttactaaatgaactcaccaataggagtccatctgatatttagatattatatttcctactttgctgccaaaatcacagcctagagaggctaaggaactcgctcagca

SEQ ID NO: 949642 - DNA, 120 bp, Artificial Sequence
  ENSG00000286059_4 (sequence is synthesized)
agtggcagacctcatgattctgagcccgagtcagttgcttctccccacatcactctgcttcttcagatcccacagaggtcctacagtctcagatgtggaagggattcaagacacatcatt

SEQ ID NO: 949643 - DNA, 120 bp, Artificial Sequence
  ENSG00000286059_5 (sequence is synthesized)
aatttctcaagaagcatttcctttccttcatttataaattcgaatagcaacttgagtgggccaagggggtgagggcactatgaaatcaagcacccaggaaatgttaaaatcccccaggtt

SEQ ID NO: 949644 - DNA, 120 bp, Artificial Sequence
  ENSG00000286059_6 (sequence is synthesized)
gcatttttgttgcagggaaaagcataatctaggaaaaagatgtggtccatcattcaaggaatattgaatatactacaatcatgtttttaaaaaggaacagagtgatgtcatttgtcttga

SEQ ID NO: 949645 - DNA, 120 bp, Artificial Sequence
  ENSG00000286059_7 (sequence is synthesized)
agagatttccacaaagtaaaagagaaagcaaaatgcagaaaagtatgggaaacagaatattgtttttgtaaaaccaggaacgaagaaaaaagcccccaaacatacatatgcctaccctat

SEQ ID NO: 949646 - DNA, 120 bp, Artificial Sequence
  ENSG00000286059_8 (sequence is synthesized)
ttcattaaacctcagattgtaagaaattgcagtttcagagatgttaaaaagtgaaaaaaatgacatctcaggtttgatgtaatacagtgtgtgtacatagcacatggaccaaataaaagc

SEQ ID NO: 949647 - DNA, 120 bp, Artificial Sequence
  ENSG00000286059_9 (sequence is synthesized)
agaaagagacacagcagtttattaacatagcttgagaggccttgtctttagagtaaaggttgagaaagtccgtagggagactaacaaagaaggaaaaaaaggctcaacttaaaaagtaca

SEQ ID NO: 949648 - DNA, 120 bp, Artificial Sequence
  ENSG00000286059_10 (sequence is synthesized)
cacacacacacacacacacactataatattccatttctgtgaaatacgtgtgttcacaagaaactaggctgaaaacaagatctatgtctaagattaacttgcaggaatgcccatgagaaa

SEQ ID NO: 949649 - DNA, 120 bp, Artificial Sequence
  ENSG00000286059_11 (sequence is synthesized)
gcccatgagaaattctaaaaaaaaaaaaaagcaaattgtaaggtgatgaacacagtaggattccatttggataaaaacaaacaaaacacctgcatacattcatatctttatgggcatgaa

SEQ ID NO: 949650 - DNA, 120 bp, Artificial Sequence
  ENSG00000286059_12 (sequence is synthesized)
gaaggtcgtggaagattatactctagattgggcaggattattctttatgtagtcccacttgtgataagcattattactttgtgattttatacaactaaataaaataaaaatggacaaaaa

SEQ ID NO: 949651 - DNA, 120 bp, Artificial Sequence
  ENSG00000286055_0 (sequence is synthesized)
gcctgggcaatatagcaagaccccatatttacaaattaaataacaaaaaaattagtcaggtgtggttgagcacacctgaagtctcagctacttgagaggcagaagctggagaatcacttg

SEQ ID NO: 949652 - DNA, 120 bp, Artificial Sequence
  ENSG00000286055_1 (sequence is synthesized)
tacttgagaggcagaagctggagaatcacttgaatccagcagttcaagactgaagtaagctatgactgtgccgttgcagtccagcttaggccacagagcaaaatcttgtctctaaaaaaa

SEQ ID NO: 949653 - DNA, 120 bp, Artificial Sequence
  ENSG00000286055_2 (sequence is synthesized)
attaagttgtataaaatggagagaatatatcaaagtacatcacacagaattagggaaggtattattttgtggaattttatttcagacaagtgtgtgtgtgagtctgtgtgctgtgatttg

SEQ ID NO: 949654 - DNA, 120 bp, Artificial Sequence
  ENSG00000286055_3 (sequence is synthesized)
tagtgcacattaactatttgcctcaaatagctgtactattcatgttttatgttttgtatttatttccttctattttggtttttaaaaatataatgatgactgggaaataagtgataacat

SEQ ID NO: 949655 - DNA, 120 bp, Artificial Sequence
  ENSG00000286055_4 (sequence is synthesized)
ttccttagctgcaccacgtgaggaagacagaccgtcaaccttcattaaagtcttcagcttggtgaaagcacaagcagaacactgagtgacaatgttgtaagagtaacggagccaatcctg

SEQ ID NO: 949656 - DNA, 120 bp, Artificial Sequence
  ENSG00000286055_5 (sequence is synthesized)
gaacatcactaggtatggtacaggcaacataacatattctccaagtgcacagattctgcagtggaactgcctaggctcaaactaattcctctagcaactacctgagaccttgcaaaattt

SEQ ID NO: 949657 - DNA, 120 bp, Artificial Sequence
  ENSG00000286055_6 (sequence is synthesized)
acttaatctctatatttttgttccatcattatacatggattagtctctaccttatagaattattgaacagattaagttaaaatgcgcataatttttttgcaagaatggaaaacctaatcc

SEQ ID NO: 949658 - DNA, 120 bp, Artificial Sequence
  ENSG00000286055_7 (sequence is synthesized)
taaaatttctgtgaaattattagggatctaaatagccaaaacaatcttgaagaagaacacagtttggtgaatcatacttcatgaatgcaaaacttataaccaagtaacagcaataaaatc

SEQ ID NO: 949659 - DNA, 120 bp, Artificial Sequence
  ENSG00000229379_0 (sequence is synthesized)
tcagtataaatttaaaagaaacagcttaatgaaatacaagtcagtttatttgatattcagcctacagctttccaaagcagcagttgaacatgttgttgagtttataccattcattcattc

SEQ ID NO: 949660 - DNA, 120 bp, Artificial Sequence
  ENSG00000229379_1 (sequence is synthesized)
gctggctgtgtggatgagagcaacttgctttttacaataattatttgttattgtaaattaacaatttgctcttctggtattatatggaagtatttgatcctgttgatggcactgcctttg

SEQ ID NO: 949661 - DNA, 120 bp, Artificial Sequence
  ENSG00000286056_0 (sequence is synthesized)
agaaggtagaacatgaggagccgatgggaccccaggggagagcccaggaccccccacaacagtggtggaacacacttcttatagtgcttatacccccactgagttgcaggagttgagtaa

SEQ ID NO: 949662 - DNA, 120 bp, Artificial Sequence
  ENSG00000286056_1 (sequence is synthesized)
acagtgttggcagcgcccaggggagcccctgccagcctggctactccgtttttgggatgagggggctgatagcatttcttgctctgcctccgagatggagaagctggcctctattacaac

SEQ ID NO: 949663 - DNA, 120 bp, Artificial Sequence
  ENSG00000286056_2 (sequence is synthesized)
tcactcctcccttcgtcagacactgcagctgtgccaatcattggcacacgggcaaggtgtggacattaatagagtggctgatggcagccatatggactgtttggaatgatgccagagaga

SEQ ID NO: 949664 - DNA, 120 bp, Artificial Sequence
  ENSG00000286056_3 (sequence is synthesized)
tatcaaaaattgtgagtaaatggcaatcatattctgatttggtgcaggtactctgggagatgggcaggtgacaggctatgttttatctgaatatccaggggccagaacgttttacctccc

SEQ ID NO: 949665 - DNA, 120 bp, Artificial Sequence
  ENSG00000286056_4 (sequence is synthesized)
acatgagggatcttgtgctgggctcagcgcccccgagtgcttttggctagagtgcttttagcacccccatatatggggcaccgcatatatgaagtgactactggctgaggtagtagacac

SEQ ID NO: 949666 - DNA, 120 bp, Artificial Sequence
  ENSG00000286056_5 (sequence is synthesized)
aacacagagaagctccccacctggctctcagctactattgtttgtgtagggtataaatgtaacgctgaccctgtgaggggctgctgaattggcttgtaggcgattggcccatttggggct

SEQ ID NO: 949667 - DNA, 120 bp, Artificial Sequence
  ENSG00000286056_6 (sequence is synthesized)
aagcgatgtggcaagacctctgggaaataggtcatcagaaataggtaactattatgtgtcaggtcatgtgcctttggccaccccctgtaatgttgaggcggatgccttagccaaggtctg

SEQ ID NO: 949668 - DNA, 120 bp, Artificial Sequence
  ENSG00000286056_7 (sequence is synthesized)
atggttagagtcggcacctacacaagatgtagctttgtggctacacaggaaactgggacagtttctgaactgatgtactgaactgatgtaacaggtcagtaggtactggggtctgtcttt

SEQ ID NO: 949669 - DNA, 120 bp, Artificial Sequence
  ENSG00000286056_8 (sequence is synthesized)
gccttcgcaggacactttggaggcctgccggaagtgccaggcatgcgcccaggcataccccagacggagacagctgcccactgtaacacagcgagtgacgtggtagattggcggctccaa

SEQ ID NO: 949670 - DNA, 120 bp, Artificial Sequence
  ENSG00000286056_9 (sequence is synthesized)
gtctccaactgttggatctgcaccgcccttccagcagcagctgcagacagctggccctggcatgtgcatccagcttctgtgaagaaccggacatagctagagacttgaggtcccacagac

SEQ ID NO: 949671 - DNA, 120 bp, Artificial Sequence
  ENSG00000286056_10 (sequence is synthesized)
aatgcgtgggatgcaacacagtgggctttggatgggggcatggcaaaccccatggcgagcctgccccctggctgactcgcagtgtccatgatgaatggggctggttaatgggaaacacat

SEQ ID NO: 949672 - DNA, 120 bp, Artificial Sequence
  ENSG00000286056_11 (sequence is synthesized)
agtgcccccattgcaggtaccatgatgtatagagaagcactggggtaatgtcactgtaggatggttgcctgctgaggtttgtgcaaataaaacatgtgtcaccacaccaagggtgtggag

SEQ ID NO: 949673 - DNA, 120 bp, Artificial Sequence
  ENSG00000286056_12 (sequence is synthesized)
gaacaagcgaccttaccaaggccgggcccccatggactttgtgccccctgggaatttatgggtctgtggggacacaggatggccaaatctgccagccaattggactggacgttgtacctg

SEQ ID NO: 949674 - DNA, 120 bp, Artificial Sequence
  ENSG00000286056_13 (sequence is synthesized)
ggggtggccttatgtgcctgccatcatgcttcccacattgcctagttgcccacataattgggaggcactgcattcccactttttctgagtgcagggcaccccctggtggttttatccctt

SEQ ID NO: 949675 - DNA, 120 bp, Artificial Sequence
  ENSG00000286056_14 (sequence is synthesized)
agcaatacgtatccctggagcaggtgtcattactttggaaaagcaggttacagcctttgcagagcacacagctggggccctaaattacacccaagttgctctccttttgttaactaatga

SEQ ID NO: 949676 - DNA, 120 bp, Artificial Sequence
  ENSG00000286056_15 (sequence is synthesized)
agttgaccaggtcaggaaggtggtgctgcaaaacacgatggccttagacatagccttagacatgcaaggacataggtggcccctgtgccttgtagggacacaatgttgtacatttatccc

SEQ ID NO: 949677 - DNA, 120 bp, Artificial Sequence
  ENSG00000286056_16 (sequence is synthesized)
tgaaaaccactggaatgtaacggcagctttgcaaggggtgtcataggagattaaggcaattgagcaccttactgatgaccccctacagagatggtgggcgtcttttgggctctggcctat

SEQ ID NO: 949678 - DNA, 120 bp, Artificial Sequence
  ENSG00000286056_17 (sequence is synthesized)
gttgggctctcataatcataagtagcatagcaggatattcctggtaggttgttgctctctgtgtggttgctgtggcctatgggtccagggtactgccatatgtgcacaggtccccaccaa

SEQ ID NO: 949679 - DNA, 120 bp, Artificial Sequence
  ENSG00000286056_18 (sequence is synthesized)
gaggatccccttggcctagaggatggagtgtaaggaacatggctgtgctgtagccaagcaggcatagggcagcaggcataggccaaggtaaacagcctaaatgactcagagggattgggg

SEQ ID NO: 949680 - DNA, 120 bp, Artificial Sequence
  ENSG00000286051_0 (sequence is synthesized)
ggcgtcacatcctggcaacggtactaccctgggttccgggcaggggtggaactggattctgcctggatggggatcggatgggggtggaggtttgatttgggaagcagagcacagcagccc

SEQ ID NO: 949681 - DNA, 120 bp, Artificial Sequence
  ENSG00000286051_1 (sequence is synthesized)
aaatttgttgtaatggcggcggctacagaattgattttgggaacagaacacagcagcctgaacttgattgttattttggcagctacaggcagaacaagaaggccaaacagaagcctccac

SEQ ID NO: 949682 - DNA, 120 bp, Artificial Sequence
  ENSG00000286051_2 (sequence is synthesized)
caattgtcctccctgcaggaagatcaaattgaacaactatccacacaaagaagcactttaatgagaatgaaaaatcaggtgaatgatcatagtacctggttctaacttcataccactgaa

SEQ ID NO: 949683 - DNA, 120 bp, Artificial Sequence
  ENSG00000286051_3 (sequence is synthesized)
aggggcactgaagatggtaggagagacagtcttgaattgctaacaccatccctgccccatctcccagtagttgctgtgtggcacggaaagagaatctgtgtgtttaagggagagagaggg

SEQ ID NO: 949684 - DNA, 120 bp, Artificial Sequence
  ENSG00000286051_4 (sequence is synthesized)
ttgtgggactttgcgttggaactcactactgccctgttacagcagaaagcaacaccaggcataactcagccggtacccacagagggagcatttagaccagccctaaccagtggtcagaac

SEQ ID NO: 949685 - DNA, 120 bp, Artificial Sequence
  ENSG00000286051_5 (sequence is synthesized)
ctgagttccacaagcctcaccactgtggactaaagtggtccgtggtgctaaatgaaaggcagtctaggccacaaggattacaattcttgggcaagtcctggtgctgggctaagctcagag

SEQ ID NO: 949686 - DNA, 120 bp, Artificial Sequence
  ENSG00000286051_6 (sequence is synthesized)
ccagtggacttagggggcatgcaccctagtgagataccaactggggtggccaagcgggtgctcgtaccacccctccctcaactgcaggtagtacagcttgcagcttgcctgtagtctcag

SEQ ID NO: 949687 - DNA, 120 bp, Artificial Sequence
  ENSG00000286050_0 (sequence is synthesized)
agggcagaaggatgtaggctgcagttgagggaattgtttgtgcatttctttcagagtgtctgtgagttggatacatggagagcagctgcagcagagaggggagagattgagacagggtct

SEQ ID NO: 949688 - DNA, 120 bp, Artificial Sequence
  ENSG00000286050_1 (sequence is synthesized)
tgctccatcacccaggctggagttcagtggcatattcacagctcactgcagctttcaccttccaggttcaagttgtcttcccacctcagactcccaagtagctgggaccacaggaggaaa

SEQ ID NO: 949689 - DNA, 120 bp, Artificial Sequence
  ENSG00000286050_2 (sequence is synthesized)
tctcttcactgctggcactgacaatggaagactgagggtgcccgggatccttcacccccacatccagtgagtccacggaacccagggtaactgggatggtatctggtctcaaaacttttc

SEQ ID NO: 949690 - DNA, 120 bp, Artificial Sequence
  ENSG00000286050_3 (sequence is synthesized)
ttttgagttattgatagcttttaacaatttattttactcctaaggacaaaatttggggcatatttgtttctctcgacctgatttctgcagaatttggaaactatttgaatcaaacttgac

SEQ ID NO: 949691 - DNA, 90 bp, Artificial Sequence
  ENSG00000286050_4 (sequence is synthesized)
attgtacataagccactttcatacctgcctactgatatatggacttcagagtattgtggactatattgattttccagaattgttcttttg

SEQ ID NO: 949692 - DNA, 120 bp, Artificial Sequence
  ENSG00000286050_5 (sequence is synthesized)
gtattgtggactatattgattttccagaattgttcttttgtttgttattacttttctccctttctccccctgttttttttttcacaacaaattgcttttattttggtatgcatccacatt

SEQ ID NO: 949693 - DNA, 120 bp, Artificial Sequence
  ENSG00000286050_6 (sequence is synthesized)
tcagcatttagtggtcctgaacagaaagtggaaagacacagcaattcaatccccccaattttggggatctgctgtgcacactaggttctttcttaatccctgctgaggaacttgagaagc

SEQ ID NO: 949694 - DNA, 120 bp, Artificial Sequence
  ENSG00000286050_7 (sequence is synthesized)
agcagcagcaccaaaaccaaggcatgcaccggattcaaggttctttttgttccagttgtcagattccaaactagaccccaatgtattgcaagtatgaccaaataaaagccctgtttaaaa

SEQ ID NO: 949695 - DNA, 120 bp, Artificial Sequence
  ENSG00000286052_0 (sequence is synthesized)
tggtcactccagcctggccttagactctgaggtgagtggtgccaggacctgccggtcagcctggattcatcatagcctctgttgtccagtaggcttggcaagaagggtctgtggaagttt

SEQ ID NO: 949696 - DNA, 120 bp, Artificial Sequence
  ENSG00000286052_1 (sequence is synthesized)
ataaaagtgacaccccccagcccccaacctggggagcagccaggagccctatgtcagaatgtgcggcccctaatgaaagtgctcttccagccactctatttaagccaggccattcaggtg

SEQ ID NO: 949697 - DNA, 120 bp, Artificial Sequence
  ENSG00000286052_2 (sequence is synthesized)
tcttcgctctttcattcaacaacatcaagcacctactgtgtgccaggtgccgtattaagtgtagaggacagagtggtactaaaagacaacacagtccttgctgccaaggagccaacagtt

SEQ ID NO: 949698 - DNA, 120 bp, Artificial Sequence
  ENSG00000286052_3 (sequence is synthesized)
ataatgacagcaacacacaccagttcaggtctatgtccctgtaataagaactgaggcttcctgggtgccttgcactgcagccagccacgttccagggagcggcagctcctcgaaccagaa

SEQ ID NO: 949699 - DNA, 120 bp, Artificial Sequence
  ENSG00000286052_4 (sequence is synthesized)
gttctgagattgaatcctgggactgtaacctggtaactgcactagacaaatctggttcaacttttatgtaacaaagttgtgagttgttttcagttgccatgaacccccaggttgaaggtc

SEQ ID NO: 949700 - DNA, 120 bp, Artificial Sequence
  ENSG00000286052_5 (sequence is synthesized)
acataacctgggcatgcccagacacaccaagcatgcagccagggacggaacctaagtgctcgagccaggatgcggggactgaattaagaagtggacactgcatggcaggatccaggatcc

SEQ ID NO: 949701 - DNA, 120 bp, Artificial Sequence
  ENSG00000286052_6 (sequence is synthesized)
ctggcatcacctgatgggaacagccaatcagatcacacctcattatcctatgcttataaaacctgacctagcccccagccgggagacagatttgagtgtttcctcctgtctccttgccac

SEQ ID NO: 949702 - DNA, 120 bp, Artificial Sequence
  ENSG00000286052_7 (sequence is synthesized)
tcacagtaaacctttctcgctgcaaaaacgcagtgccttggtgtttggctttctgctgcatgtgggcaatagacccagttcggttcagtgactgacctagttggcagtgagctcagcaca

SEQ ID NO: 949703 - DNA, 120 bp, Artificial Sequence
  ENSG00000286052_8 (sequence is synthesized)
tgacgcagtggctcaggactccactcagcaagttccctgggactgcatccctttattgtcccattttccagggaggaaaccaaggctcaccatggcgaaggggatgcccgtggtcacagc

SEQ ID NO: 949704 - DNA, 120 bp, Artificial Sequence
  ENSG00000286052_9 (sequence is synthesized)
gagtgagtggaggagcgagatctctaacccaggcgtgtggcatactcgaccctgagcaccaaaacatgcttgctagaaccatgacaacaacgtcaacaacgacaaataacagtgactggg

SEQ ID NO: 949705 - DNA, 120 bp, Artificial Sequence
  ENSG00000286052_10 (sequence is synthesized)
tgtttgccgtgtgccaggcattgttctaagtgctccgtgggaactacgctgaccaccccatgaaggaagtgctctttcagatcccattttgcaaatgaggaaaccgaggctagcaagcag

SEQ ID NO: 949706 - DNA, 120 bp, Artificial Sequence
  ENSG00000286052_11 (sequence is synthesized)
tcagactggaatgggagcccaggaggcctgcctgcaggagccgagagctcaccactgcaccatgcatttcattcattatcctatgcttagtgtttagtgtttatcctacgtttagatgtt

SEQ ID NO: 949707 - DNA, 120 bp, Artificial Sequence
  ENSG00000286052_12 (sequence is synthesized)
tagtggaccgttctgtcctctgaccccagccgacaagctctcctaggttctggtggtgagagttacattggtttctatgatgtgtaacaaattatcacaaacttagtggcttcaacaaca

SEQ ID NO: 949708 - DNA, 120 bp, Artificial Sequence
  ENSG00000227421_0 (sequence is synthesized)
gagccgagatcgcgcaactgccctccagcctgggcgacggactccatctcaaaaagaaaaagaaaaacaaatacaattcacttgcttaaagtgctgtgagaataacaaacttcttcttcc

SEQ ID NO: 949709 - DNA, 120 bp, Artificial Sequence
  ENSG00000227421_1 (sequence is synthesized)
ccacccccaataagacaatgtgaaaatactttcacttcaaccccatgaagattacatagaagaaaatgccagatgaagttccttattgtttctcattcacagaatttatttccactaagt

SEQ ID NO: 949710 - DNA, 120 bp, Artificial Sequence
  ENSG00000227421_2 (sequence is synthesized)
tattaaaaaaatgggcaaaagaaagtggaacttcaactgttccttaggacaatacggacttgtgtttttgaagaagcaaagtggaaatgattaggcagcagggactctttgcagaaaaac

SEQ ID NO: 949711 - DNA, 120 bp, Artificial Sequence
  ENSG00000227421_3 (sequence is synthesized)
gtaaggagcaaagaaaaatttctcagaaaaggagatttgaagcacaattgtcatcagttcacagaagaattttgaagttctgtttccagaggcctctctctgcctgcccagagactgtac

SEQ ID NO: 949712 - DNA, 120 bp, Artificial Sequence
  ENSG00000227421_4 (sequence is synthesized)
gcaaaactctgcactctgcaaaatcagcaccctctgtctaatcaaaagttaacttggcccaggttttagtttctctgtaagttttgttggaaagtaatataataaatcttattacaagat

SEQ ID NO: 949713 - DNA, 120 bp, Artificial Sequence
  ENSG00000227421_5 (sequence is synthesized)
acagctgattatgtatacattatgtctttggagaaatttgcattttaagaggaaggtcaaggatgccttaattacaaacattgcatttttggttatttaaatagtatctgggaaaacggt

SEQ ID NO: 949714 - DNA, 120 bp, Artificial Sequence
  ENSG00000227421_6 (sequence is synthesized)
gaagatatataggaagttaagaaagatacctgtatctaccacgtgtgaaagattatctcagtaaatagaattggctacatattcatctattataataataccaaaaaagaagatatatat

SEQ ID NO: 949715 - DNA, 120 bp, Artificial Sequence
  ENSG00000227421_7 (sequence is synthesized)
cttcaaagcgtcacaatttttgtagtcagcaaaatgaatggcaaagataatgagagaataaagatacaaaaatgagtatttaaaaatagaattccaatgggaaaactgttaattttaaaa

SEQ ID NO: 949716 - DNA, 120 bp, Artificial Sequence
  ENSG00000227421_8 (sequence is synthesized)
attatatgtaaagatgaggttgctgttaagcattttacaccaatagagatatcaattggaatattttatgtgaagaaaagaaataatgacttaactttgtcaataaagaaagcatctact

SEQ ID NO: 949717 - DNA, 120 bp, Artificial Sequence
  ENSG00000267027_0 (sequence is synthesized)
gcgcagctgtgggaagaagcaagtgccctcttcccatgcagcctggctgtggcagtgtgaggctctacgactccagcaatgattaagaagcaggtcttggccaggcatggcggtcacacc

SEQ ID NO: 949718 - DNA, 120 bp, Artificial Sequence
  ENSG00000267027_1 (sequence is synthesized)
tgtaatcccaacacttttggagaccaaggtgggatcattgcttgaagccaggagatcaagaccagattggacagcacagcaagaccctgtctctaccaaacactttaaaaaataaacttt

SEQ ID NO: 949719 - DNA, 120 bp, Artificial Sequence
  ENSG00000282772_0 (sequence is synthesized)
aagatgcaacgcgacctccttcccacagcaacgaaagactgcgactccccggactatcaggccgggagagtccacttccagctcacctcggagctccgggagcctttcagcacctgcttg

SEQ ID NO: 949720 - DNA, 120 bp, Artificial Sequence
  ENSG00000282772_1 (sequence is synthesized)
gtgagcgcgattacgtcagtaccacaggtggtcaccttctccgtgagaagccccttcacggactgaccgaaccgcgcttgagactctggcgttccagtcgccatcatttcagttagcgaa

SEQ ID NO: 949721 - DNA, 120 bp, Artificial Sequence
  ENSG00000282772_2 (sequence is synthesized)
atgcccggccaggaattctctcaattatgaaatcttgcagagaagttatttttctttctcaaaatccagatgatgacaatattccttactccagatctggcattttttcatcatcactgt

SEQ ID NO: 949722 - DNA, 120 bp, Artificial Sequence
  ENSG00000282772_3 (sequence is synthesized)
cagcctcccaagtagctgggactacagatctggcattttttcatcatcactgtcttgtgaatgatcatctgctccatctgctaaatctacatcctcttcaccacccatgtggttcatcat

SEQ ID NO: 949723 - DNA, 120 bp, Artificial Sequence
  ENSG00000282772_4 (sequence is synthesized)
acatcctcttcaccacccatgtggttcatcatctcagagaaataatcaaaatcagacatggcttcatctgaaccatcttcccagtctttccaatgattggagtccacactaagccagtta

SEQ ID NO: 949724 - DNA, 120 bp, Artificial Sequence
  ENSG00000244757_0 (sequence is synthesized)
gtaatctcttgctgcagaggaggaacacgggatccccagccagatggtccgtgggtgacttcacagcacatgtgctacctccaagagttcttcattcccatggtccacatgaagaaaatg

SEQ ID NO: 949725 - DNA, 120 bp, Artificial Sequence
  ENSG00000244757_1 (sequence is synthesized)
gaccccaaaggaacaaaagcaacaaagataaaaattccttctcctcccatgggggtgggaggtgaagaacgaagcaagcaaacactcatagagaaatgtgcagggttctctgaggaacaa

SEQ ID NO: 949726 - DNA, 120 bp, Artificial Sequence
  ENSG00000244757_2 (sequence is synthesized)
ggaccttccagagtgatgcttttccctagtggcagccttggccagggcaacagacatctgcacaaacgcagggtgttgaagcagctgttctgagatgcagtgcctgagaatctgggatcc

SEQ ID NO: 949727 - DNA, 120 bp, Artificial Sequence
  ENSG00000244757_3 (sequence is synthesized)
aacttctcaacaacccctgcacctgccacttccctgaatcttccactaagcaccagaagacacatgcattttaaatcaaaggaatggctcccatgcagaaaccagagtgttaaaatggat

SEQ ID NO: 949728 - DNA, 120 bp, Artificial Sequence
  ENSG00000244757_4 (sequence is synthesized)
ccctcccaccctgaactctgactggtttggttcacctcaaagaccatcctcctgctatatggtttcgataagtctaaaaagatgagccattcaagccacagtgtcttctatctccaagct

SEQ ID NO: 949729 - DNA, 120 bp, Artificial Sequence
  ENSG00000244757_5 (sequence is synthesized)
ggtgagacacactgcagtcctctacagaacagaagagagacagtgcacaagattgctcttgggtaagttttctttttcttatgtaatgaatgggttactcttcagcccttagaataaaaa

SEQ ID NO: 949730 - DNA, 120 bp, Artificial Sequence
  ENSG00000254516_0 (sequence is synthesized)
aggacatctccccaagaattatcttagtgactgatgaatcagagggatacctaaatacaaaaactgagtgaaaacaccaaaggatgagccaagtttgccaatgatagagatgatatccta

SEQ ID NO: 949731 - DNA, 120 bp, Artificial Sequence
  ENSG00000254516_1 (sequence is synthesized)
agcaactaatacaatgcttcatacatggttccctcttgtgatgttcatcttaagctgactttttccagatacgaatgttgtgggtggcagcagaaaaacccagcacctgggctcacatag

SEQ ID NO: 949732 - DNA, 120 bp, Artificial Sequence
  ENSG00000254516_2 (sequence is synthesized)
tgcttatgcccagtctcaatcttgatgcacatgcaccccgtgtatacttcccctgtctgtctaatatcactgagtttccttataacttcagttcttaaaagcttcatcaccataacatca

SEQ ID NO: 949733 - DNA, 120 bp, Artificial Sequence
  ENSG00000254514_0 (sequence is synthesized)
tgggctgaaggcagcagtagggcgatggaaagcctggccaagggcttctagaacttgaagctcaccatttttggatgacattctgtgaacgaagtgttctctatgagatactaagagcaa

SEQ ID NO: 949734 - DNA, 120 bp, Artificial Sequence
  ENSG00000254514_1 (sequence is synthesized)
tatagggtaatcactggtgacagaaacatctgctcatgcaggttcatgtcaaagtccagggttgaaggagaacccctcatcccaggtgtggcagaattgatgccctataacttctgagtg

SEQ ID NO: 949735 - DNA, 120 bp, Artificial Sequence
  ENSG00000254514_2 (sequence is synthesized)
gaaagcccagggcaccgcagagaccacatgtgggtgttccagccaacagccccagctaggtccccatggagagcccacaccaaccaccagatatgagggttcagactccagcccacagtc

SEQ ID NO: 949736 - DNA, 120 bp, Artificial Sequence
  ENSG00000254514_3 (sequence is synthesized)
ttcaagtcttccagctgcagtcccagacatcatgaaaccattctgctgtgacctgtcagaatttctgaccccagaaactgttggagataataaataattactgttgttttaatcctctaa

SEQ ID NO: 949737 - DNA, 120 bp, Artificial Sequence
  ENSG00000254511_0 (sequence is synthesized)
aaattgctgtaatctgagtatggactatcttgagagtgataatcccttaagagcttcagtattagaggggcctgccacattcacggcctttatctacagttatctcaccagatactcaca

SEQ ID NO: 949738 - DNA, 120 bp, Artificial Sequence
  ENSG00000254511_1 (sequence is synthesized)
aagacactaacagcgtcttctaatgtccatgaggtaaaagaactgatggctggagagcattgaaacagacagatgaaaattaaagaagaaataaaaataaaattaaaaagggaaaaacaa

SEQ ID NO: 949739 - DNA, 120 bp, Artificial Sequence
  ENSG00000254510_0 (sequence is synthesized)
gggagctgcccccgcccccgagccgcgagccccgcgccgggccggggagtccccggcgccacacgcccccaccacccccatcttagcgccccccaccctctatggagacatttcaaccag

SEQ ID NO: 949740 - DNA, 120 bp, Artificial Sequence
  ENSG00000254510_1 (sequence is synthesized)
ggagaagggaagtcctgcccttgcccctcgcccccgccctgctcctccaacaggggagacttctgtccaaaccttggaaagaaacgagatgccaggcctagcgccttcggggatcctctc

SEQ ID NO: 949741 - DNA, 120 bp, Artificial Sequence
  ENSG00000254510_2 (sequence is synthesized)
tggacaaggccacagggtgaaaacaccagcacttcctggaggcgtttgaccgggacctgggagggcagctgagaagtgcctgaccattctcaaggagctgcgtggattccagacatctct

SEQ ID NO: 949742 - DNA, 120 bp, Artificial Sequence
  ENSG00000254510_3 (sequence is synthesized)
ccctgggaccttgaaagactgaagctaagaagtgctggagacagcagttgctttagccacaggctgtgtagaccacctgaggatgacctgggggtctgttttgtgcaccttggaacccat

SEQ ID NO: 949743 - DNA, 120 bp, Artificial Sequence
  ENSG00000254510_4 (sequence is synthesized)
cggatccctccaatgacacatttgtccagagcaagacaagatcacactttgacagccctctgtcaagatccttgctccaaatctccagactagcagccaggagtctccatgctgttctga

SEQ ID NO: 949744 - DNA, 120 bp, Artificial Sequence
  ENSG00000254510_5 (sequence is synthesized)
agaagcagattcctcacccacccttcaactccttcccaggaggtaatcctcctccaaatctctggaaaagatacacctcctcttctctgataaaggctggggggtgatgcccctccccca

SEQ ID NO: 949745 - DNA, 120 bp, Artificial Sequence
  ENSG00000254510_6 (sequence is synthesized)
gtttcccaataaagctatgcaagacaggagcaagggatctcacggcctgtttttgctacaaaaaccctttttcggaaaaaataataaagaaaggaatcagccaatccctcctcgatgcca

SEQ ID NO: 949746 - DNA, 120 bp, Artificial Sequence
  ENSG00000254510_7 (sequence is synthesized)
tttggaaaagcttctggatgccacggactccacgaccaaccaactaggttgctgctgcttgcaaacatcgcctccattgaaggattcctgcagccaccagctctggaactttctggaacc

SEQ ID NO: 949747 - DNA, 120 bp, Artificial Sequence
  ENSG00000254510_8 (sequence is synthesized)
atgaaccaaggacctggtccgggtccacctccaccaagtgctggccgtgtgtcactggggtcactccactctctgcattaggtctcagtcatccaagaccatctttcaagggccgtcact

SEQ ID NO: 949748 - DNA, 120 bp, Artificial Sequence
  ENSG00000254510_9 (sequence is synthesized)
ccaattatgagtctgggattttctgaaattgagcattttggccaggctgtggggtccctctatgactgcctgtaagacactgccaaggggactttcttcctttcaccagactgaagctaa

SEQ ID NO: 949749 - DNA, 120 bp, Artificial Sequence
  ENSG00000239991_0 (sequence is synthesized)
gctcaagaaaaatatagtgacaaggtgtgttagactgcctctcgtccacaggagaaaagacagaccaacctggatttccactttatatctaccactgatgagctgtgtgaccttgggcaa

SEQ ID NO: 949750 - DNA, 120 bp, Artificial Sequence
  ENSG00000239991_1 (sequence is synthesized)
accacctcacaatctatggagatgccaggcagtgcacaaaccactcagccatatgcagcactctgcaggcatgaagactcagaggcaaaaaaacaagaagtgaaaaactccatttggcta

SEQ ID NO: 949751 - DNA, 120 bp, Artificial Sequence
  ENSG00000239991_2 (sequence is synthesized)
gagtggaggctttctgaagcagatataaaagtctaagacttgtgctgtccaatataatagccccttaccacacgtggctatttaaatttcaatgaattaaaattcaatacaattgaaata

SEQ ID NO: 949752 - DNA, 120 bp, Artificial Sequence
  ENSG00000254519_0 (sequence is synthesized)
aatgagcagcaccccctgacacaaacggaggttggaggacaggccaatcgctcccagctatttgagccaatggagaagttcctgatgcccacacctgctggtctcaccgctagggcctgg

SEQ ID NO: 949753 - DNA, 120 bp, Artificial Sequence
  ENSG00000254519_1 (sequence is synthesized)
gcatcacaggcagggggaatggggaggggacggtagcgtcagcctacacccacacgcagtttcctgataaaaggtcctttggaaactttgattctcttctcaccaagttgaacggagatg

SEQ ID NO: 949754 - DNA, 120 bp, Artificial Sequence
  ENSG00000254519_2 (sequence is synthesized)
gtagtggtcccagggaggagctttaacctgagcaccacccacagaaggcagaccaccctcccagccgcagtgcaaatgaatgttggcccccacccaggtccccaagtgctttcccagtca

SEQ ID NO: 949755 - DNA, 120 bp, Artificial Sequence
  ENSG00000254519_3 (sequence is synthesized)
cgccccagctgccaggtttttttctccaggcctactacagatgggttaccctgactccacccccaacaccctccaatgattagaaccactgactcctccctcccatgcctgcctccatgg

SEQ ID NO: 949756 - DNA, 120 bp, Artificial Sequence
  ENSG00000254519_4 (sequence is synthesized)
caggcccctgcagaaaccaaacatagtcaccttagactctggcatactgagaccagggcttgatcctggcccccttgcctccctggcaatttatcatttaataaaaatattgttaaaaaa

SEQ ID NO: 949757 - DNA, 120 bp, Artificial Sequence
  ENSG00000254519_5 (sequence is synthesized)
gcctcagaagctgacaatgactgttgggcttttccaatgaataccagaacaccatttcctgcagcctgaaaagaagacagtataattgtttggcagcaagaggtgagcatgggccaagca

SEQ ID NO: 949758 - DNA, 120 bp, Artificial Sequence
  ENSG00000254519_6 (sequence is synthesized)
acccacacgcaggttagagccttggacggggaagcggaaaaggcttagcagctactaatgggttctattaatagtagtagtgttagtttcctgataaaaggtcctttggaaactttgatt

SEQ ID NO: 949759 - DNA, 120 bp, Artificial Sequence
  ENSG00000254519_7 (sequence is synthesized)
gacaggatctcgctgcgttgctcagactggtctcgaactcctgggcttaagggattctcctgcctcaatcacagcctcccaagtagctgagattaaaagtgctcaccaccgtgccagcga

SEQ ID NO: 949760 - DNA, 120 bp, Artificial Sequence
  ENSG00000254519_8 (sequence is synthesized)
gttcagtttttgagggtggagccaagactctgaggagagggctgaactgtgaacctagaagtaccatctccccctgcacacacctttggtcaagttgaccccaagaagaaggacaagtcc

SEQ ID NO: 949761 - DNA, 120 bp, Artificial Sequence
  ENSG00000254519_9 (sequence is synthesized)
tctgcacggcgatgaggccatacacacagtctgtggcccggctttgggagactgatgggacaaaggatgttttgcacgatccttggtctctgagcaaatatatacatgggttaacacaaa

SEQ ID NO: 949762 - DNA, 120 bp, Artificial Sequence
  ENSG00000254519_10 (sequence is synthesized)
agcccaagccatgtggagaagccacgtctagggactccagttaacactctcagctgagtccccagctgacagtcagcatcaactgccagccacctctgtctaaaagtgggctatcttggg

SEQ ID NO: 949763 - DNA, 120 bp, Artificial Sequence
  ENSG00000254519_11 (sequence is synthesized)
catccagcccagtcaagccttcagatgagtccagtcccagccactatctcacacaaccacacgagagacatcaagaactcccagtggagtccagtcagcccatggaactgcaagagataa

SEQ ID NO: 949764 - DNA, 120 bp, Artificial Sequence
  ENSG00000254519_12 (sequence is synthesized)
ttagccataagcgtacctgagtacatttttcatgtcaagaagacaatggcttcaaaggaagggaaagggcagccccacaggaggcccagaaaagaaggccaggtgaaaaaagcaaagcct

SEQ ID NO: 949765 - DNA, 120 bp, Artificial Sequence
  ENSG00000254519_13 (sequence is synthesized)
cccagggaaacattcacatttcctgaatgatctgtcatcaaaaatgcatgtgcatgcagaggggcaaccaacagagtcagggcaaacgcagccaggctggcccctgctcccaactgtgcc

SEQ ID NO: 949766 - DNA, 120 bp, Artificial Sequence
  ENSG00000254519_14 (sequence is synthesized)
ttttttttcaggctcctaaatttaagcaacattaattttttaaaggcctgtcctgctctctatactgcaatggaagattcaggggagcagcatttcatggtaagattagaaccaggccat

SEQ ID NO: 949767 - DNA, 120 bp, Artificial Sequence
  ENSG00000254519_15 (sequence is synthesized)
tctgttcttaatccttaccttggagttgatgtgaaaaggtgttggcttcacacttggatagtcctgggactgggcccagtattcccttgttgtatgttctggagcattgctgtgagaagc

SEQ ID NO: 949768 - DNA, 120 bp, Artificial Sequence
  ENSG00000254519_16 (sequence is synthesized)
cattattttttgcttatgtccctggggctttatttacttcacctcgtgtttaatcttcccagcaaccctatgagggaagtatattacctcatttcaagggtaaggagattagtctcaaaa

SEQ ID NO: 949769 - DNA, 120 bp, Artificial Sequence
  ENSG00000254519_17 (sequence is synthesized)
ttagtctcaaaaagaaacacacactccaaataacagatgggattcaaaccttggcctgcccaattccagagatctgctctaatatggttttgctgtgtccctacccaaatctcatcttga

SEQ ID NO: 949770 - DNA, 120 bp, Artificial Sequence
  ENSG00000254519_18 (sequence is synthesized)
tgtgggagtgacacggtgggaagtaactgaatcatggggacaggtctttcccaggctattctgatgatagtgaataagtatcatgagatctgatggtttttaaaaggggagtttccctgc

SEQ ID NO: 949771 - DNA, 89 bp, Artificial Sequence
  ENSG00000254519_19 (sequence is synthesized)
tcatgagatctgatggtttttaaaaggggagtttccctgcacaagctctactttcacctttcaccacaattgtgaggcttccccagcca

SEQ ID NO: 949772 - DNA, 120 bp, Artificial Sequence
  ENSG00000254519_20 (sequence is synthesized)
acacgcaggttagagccttggacggggaagcggaaaaggcttagcagctactaatgggttctattaatagtagtagtgttagaagctgacaatgactgttgggcttttccaatgaatacc

SEQ ID NO: 949773 - DNA, 120 bp, Artificial Sequence
  ENSG00000254519_21 (sequence is synthesized)
aagttgtgaagatgataatggattgactctatgaatggccacatttttttatgcctcccttttcccttgtcctcgggcagtgtcctccgacactgactctgtgcttggccctgtgacttg

SEQ ID NO: 949774 - DNA, 120 bp, Artificial Sequence
  ENSG00000254519_22 (sequence is synthesized)
ctttggccaatggtacagcagcaaacttgatgcaaacacaacttgaaaaagaagaggacagccaagtcatcccagccaaggccaccctggaccagccagcctcttgccaagctgccagtg

SEQ ID NO: 949775 - DNA, 120 bp, Artificial Sequence
  ENSG00000254519_23 (sequence is synthesized)
accacagagtccaattaacaacagccagtcctggcccaggtcagcacacccatgagaaagaacttgctatcatttaaagccatgggtttgggggtggtttgttgcacagcaataactaac

SEQ ID NO: 949776 - DNA, 120 bp, Artificial Sequence
  ENSG00000254519_24 (sequence is synthesized)
taatacagaaacttacattctacaaaaatgctattaatcaacaagcatattaagatgcaatctcggcctggtgcagtggctcacacctgtaaacccagtactttgggagtcggaggcggg

SEQ ID NO: 949777 - DNA, 120 bp, Artificial Sequence
  ENSG00000254519_25 (sequence is synthesized)
ggcccaggccaagctcatatgccaatttcctcatggaacctttcactcctccatctcttcgccaagttgaaatgttaacttctgcttctctgggatacttcggacctttgtttaaagctc

SEQ ID NO: 949778 - DNA, 120 bp, Artificial Sequence
  ENSG00000254519_26 (sequence is synthesized)
tcccatctgctttctgcgctatgtttagggttatgtctggatgggaataggtctgtctcttgccactactggtaaaattggttcttgcttagcatgatgtgggctccccacatctggcac

SEQ ID NO: 949779 - DNA, 120 bp, Artificial Sequence
  ENSG00000254519_27 (sequence is synthesized)
cccaactaacaccagggcctcccccctgtaccccattcatatgcctcagaagctgacaatgactgttgggcttttccaatgaataccagaacaccatttcctgcagcctgaaaagaagac

SEQ ID NO: 949780 - DNA, 120 bp, Artificial Sequence
  ENSG00000254519_28 (sequence is synthesized)
cggagctgggactaggacgaagtgagtgaagcacccatctgagatgcaaacatgcaagggagtgccaaaaaattcacccattgaaatgtcaatttcaaataaagacgagatccaaaccta

SEQ ID NO: 949781 - DNA, 120 bp, Artificial Sequence
  ENSG00000254519_29 (sequence is synthesized)
gagccaatggagaagttcctgatgcccacacctgctggtctcaccgctagggcctgggcatcacaggcagggggaatggggaggggacggtagcgtcagcctacacccacacgcagaagc

SEQ ID NO: 949782 - DNA, 120 bp, Artificial Sequence
  ENSG00000254519_30 (sequence is synthesized)
tcccagatattccaggcataacacaggagtgactgcatgtttggggacagtgcggaggccactctgattagatcagaggatgtggactggttcatgatgtaaaagctgaagggaggccgg

SEQ ID NO: 949783 - DNA, 120 bp, Artificial Sequence
  ENSG00000254519_31 (sequence is synthesized)
ctccagcctgggcaacaaagcgagacgctgtctcaaaaaaaaaaaatgctgaagggagggtggtaatgaagggaagaagactccagggtttcaagtgccatggattaagggagggagtaa

SEQ ID NO: 949784 - DNA, 120 bp, Artificial Sequence
  ENSG00000254519_32 (sequence is synthesized)
ttaagggagggagtaaaggcagagggccaggacagatggttggatctgtcttagaggtgaggtaccttcaagatgcctcagggaaaatggccagtagtccatcaggactcaagagtaaga

SEQ ID NO: 949785 - DNA, 120 bp, Artificial Sequence
  ENSG00000254519_33 (sequence is synthesized)
tcaagagtaagactccaggaagacacttgaaatgggaagagagctaagaaaataatccacatagaggtgatcattaaaggcgtaaagaataaagcaataacgtaaaaaaaaaaaaaaaaa

SEQ ID NO: 949786 - DNA, 120 bp, Artificial Sequence
  ENSG00000254519_34 (sequence is synthesized)
tgctcagttgccttttcataaagaaagggttgattccccatgatctgttgactcctttgcttttggatattttggaagacgccctgcgtcacgggctagttaattgtgaacgtcagggaa

SEQ ID NO: 949787 - DNA, 120 bp, Artificial Sequence
  ENSG00000254519_35 (sequence is synthesized)
agcaccagagtagagaagcacttccaggatccagagccaggaggatgctcaaaaggaagggaggagagatgcccttcggccaaagggagagcttggagggtgaggggaagtggttgctta

SEQ ID NO: 949788 - DNA, 120 bp, Artificial Sequence
  ENSG00000254519_36 (sequence is synthesized)
caaagggagagcttggagggtgaggggaagtggttgcttaccagaagggcctcggagtgtgaactcaaaagatagaggatggccgagcgtggaggctcatgcctgtaatttcagcacttt

SEQ ID NO: 949789 - DNA, 72 bp, Artificial Sequence
  ENSG00000254519_37 (sequence is synthesized)
taaaaaaataataataatagaggaagcgttttggtccactgtccactcacacagggttaggcggagaggaaa

SEQ ID NO: 949790 - DNA, 120 bp, Artificial Sequence
  ENSG00000254519_38 (sequence is synthesized)
ggtccactgtccactcacacagggttaggcggagaggaaaaagctactgagactgaagaatgccctttaaccccacttactggttgttttgattctttcctgtagtttcctgataaaagg

SEQ ID NO: 949791 - DNA, 120 bp, Artificial Sequence
  ENSG00000254519_39 (sequence is synthesized)
cagcgaaattttttccacttttcactcccgcctgagaatttccgggggcctgaaagaagacctgttccctagcactagttcatcgtctgctccactgagaaataaccagctaccagaaag

SEQ ID NO: 949792 - DNA, 120 bp, Artificial Sequence
  ENSG00000254519_40 (sequence is synthesized)
tttgagaaattgatttgcagaaagagggcaccaaatcagtttagagtcagggtctgtagtcagtagagttggcaaatgccatttccctgacccactgggtatctgaatacttgtcattgg

SEQ ID NO: 949793 - DNA, 120 bp, Artificial Sequence
  ENSG00000254519_41 (sequence is synthesized)
cccttgagagctcatcaactgtggatgtgcaataagcttgtccaggaccaaaagtgtctcttgctgcttaaatatccaccaaaaagattccacttgtcaaagcacctgcctccctgcact

SEQ ID NO: 949794 - DNA, 120 bp, Artificial Sequence
  ENSG00000254519_42 (sequence is synthesized)
gacttcttttaccttctgtctcttttttctcactttcacactgttctctttttctcttttcctgtgcccttctctctctctggtttgatttcttttttccaggccaagcaggaaactaga

SEQ ID NO: 949795 - DNA, 120 bp, Artificial Sequence
  ENSG00000254519_43 (sequence is synthesized)
cctgggcgacaagagtgaaactccgtcttaaaataaaaattttaaaaaattggtttccctgggcacaggacattgcaccggattggggagcatttcccctactctgttaggacattatgt

SEQ ID NO: 949796 - DNA, 120 bp, Artificial Sequence
  ENSG00000254519_44 (sequence is synthesized)
ggggagcatttcccctactctgttaggacattatgtaacaaagactgagggttcttgtgttatttataacaaaaggccaaaaatagttacatttgagttggttcatgtagtgaactattg

SEQ ID NO: 949797 - DNA, 120 bp, Artificial Sequence
  ENSG00000254519_45 (sequence is synthesized)
tgtagctgttaaaaggcatttgaagactttttcatgacagaaggaaaaaggcatattccaaaactgtatgtacagtatgttcataattttataaagtatctatgtgcataggaactttgc

SEQ ID NO: 949798 - DNA, 120 bp, Artificial Sequence
  ENSG00000254519_46 (sequence is synthesized)
agaaagacaccaaaatctccagaagttggaattctggctgatttttattttatcatttttttttattttccacaatgaacattattatcatgagaataaaagaaatcccatattataaaa

SEQ ID NO: 949799 - DNA, 120 bp, Artificial Sequence
  ENSG00000254519_47 (sequence is synthesized)
gaagctcatgtctgtgtagtctctcagccaagcatggaaggatctctcagcttcatccagagtcttacaccctcctctttttccaagctgtggagaaaaatttctgacctgagatcacct

SEQ ID NO: 949800 - DNA, 120 bp, Artificial Sequence
  ENSG00000254519_48 (sequence is synthesized)
cagcagcactcccaggacccatccagccatttcccccatccccaaaatttgcaggaggaagggttatttcaataaagcaaaaacctgttgcctgaagcatataaaaagattcttctcttt

SEQ ID NO: 949801 - DNA, 120 bp, Artificial Sequence
  ENSG00000254519_49 (sequence is synthesized)
tgcactcaaaaagaaaaacactgacaaatgtgttagagtggagcatattccaaataagaatcacaagcctcgaagaggggcttctggagagttcagagacttacaggctaaagatgacag

SEQ ID NO: 949802 - DNA, 120 bp, Artificial Sequence
  ENSG00000254519_50 (sequence is synthesized)
acctcgaagtgagccagacccactgtgtacagaggctggatttggtcaggcagtttcttgggactcaaaagaagtagaatcaaaccagaaacaaaagaacaaaatttccagaaatgctgg

SEQ ID NO: 949803 - DNA, 120 bp, Artificial Sequence
  ENSG00000254519_51 (sequence is synthesized)
ggtcttgggtgtgcagactgatcaggattgagtgctgttgcccagttctgggtcttctttttctcccccagctttatagagatgtaattgacaaaaattatatatatttaaggcatgcaa

SEQ ID NO: 949804 - DNA, 120 bp, Artificial Sequence
  ENSG00000254519_52 (sequence is synthesized)
tgccagcgagttcagtttttgagataaggggaaattggagctcagagatttaagccacctgccagaggtcacatggcccataaaagccaggtgcggtggctcatgcctgtaatgccagca

SEQ ID NO: 949805 - DNA, 120 bp, Artificial Sequence
  ENSG00000254519_53 (sequence is synthesized)
gtagtcccagctactggagaagcaaaggcaggaggatttcttgagcccaggaggtggaggtgtcagtgagctgagatcaagcgactgcaccccagcctgggtgacagagtgaaaccctgt

SEQ ID NO: 949806 - DNA, 120 bp, Artificial Sequence
  ENSG00000254519_54 (sequence is synthesized)
ctcagctccataaactactatctgattcagtatcagaggacagaggatccaagttgtgaaatcataaaatgtcagcatctaaccttctaatgtagcaaaagtgatgtctcagtacctcca

SEQ ID NO: 949807 - DNA, 120 bp, Artificial Sequence
  ENSG00000254518_0 (sequence is synthesized)
ggcgacgttactggggctgcacggtgcttgtagctgggcagtcttatcatcagagtggagcctggtaaccacgacctccccgccaggtcctgtgtgttgctagctggagaagggtagttg

SEQ ID NO: 949808 - DNA, 120 bp, Artificial Sequence
  ENSG00000254518_1 (sequence is synthesized)
aaaactcagaccaagcacagtgtttatatcggtcaaaactggaaaactatgtccgggcgcagccgaggctggaggatcccttcaggccaagagcaacctagcaatatggcgcgaccggat

SEQ ID NO: 949809 - DNA, 120 bp, Artificial Sequence
  ENSG00000254518_2 (sequence is synthesized)
tgaaggctccagtgagctatgatcccaccacagcattgcagcctgccagactgagggcttgaggatcagccaggtttcatgagttcaatgcagacctgaatcataccaagctgagactgg

SEQ ID NO: 949810 - DNA, 120 bp, Artificial Sequence
  ENSG00000254518_3 (sequence is synthesized)
ggtacacactctcctctactgaaaagtagtgagggattccaacttggtgagagggagagtgggggagagccagaccagacaagagtgctcacctggaaaaagcctgccatcaaaggccat

SEQ ID NO: 949811 - DNA, 120 bp, Artificial Sequence
  ENSG00000254518_4 (sequence is synthesized)
tacttgaaccccaaggttgaaggctccagtgagctatgatcccaccacagcattgcagcctgccagactgagtttcacacttgttgctggagttgcaatctcggctcaccacaacctctg

SEQ ID NO: 949812 - DNA, 84 bp, Artificial Sequence
  ENSG00000254518_5 (sequence is synthesized)
ctgcccagctggagttttgctcttgtcgcccatgctggagtgtgatcctggctcactgcaatctctgcctcccaagttcaagcg

SEQ ID NO: 949813 - DNA, 120 bp, Artificial Sequence
  ENSG00000242759_0 (sequence is synthesized)
ggcagaaaatgaatccatggagattttgacaagacccctctaagcaagatctaaagacaacatcagatggagttgtctgtggattatgaggatgcagcattcaaggttctatcttggaag

SEQ ID NO: 949814 - DNA, 120 bp, Artificial Sequence
  ENSG00000242759_1 (sequence is synthesized)
cagagactgtgccctcaccagatgctgaacctgctgagcaccctgatcttccacttcaccttcatcagaactactggggctgtggctgagatgtcacatggcagataggatcacaaattt

SEQ ID NO: 949815 - DNA, 120 bp, Artificial Sequence
  ENSG00000242759_2 (sequence is synthesized)
aagaacctgaaatgtttggagcctaagactgctgtgattgcacctgccatcttatgcagaaatgacctgaagacagactgaaacaacgtgttctacagcctgaaaatatctaccttgact

SEQ ID NO: 949816 - DNA, 120 bp, Artificial Sequence
  ENSG00000242759_3 (sequence is synthesized)
tacagttttattaatgctggtgtgatcagactggacaaaaattagcatatgttattaactgatctaattcaagtgccaattcttaatagaaacacaaaacaataaaagcaattcagaaaa

SEQ ID NO: 949817 - DNA, 120 bp, Artificial Sequence
  ENSG00000242759_4 (sequence is synthesized)
tgtcacatggcagataggatcacaaatttctgttgtatctggatggagatcagcaggaggatctatgggtgagaagaagcacagttacagatggattctagagcctgcttgctgacacag

SEQ ID NO: 949818 - DNA, 120 bp, Artificial Sequence
  ENSG00000242759_5 (sequence is synthesized)
tcagctagcataataccataaatgcataagaaactaagtattcagtcttacgagaaatgctatcttgacctgaccctttctccaaataaattgacaaaatatctcatcgtctaggatgcc

SEQ ID NO: 949819 - DNA, 120 bp, Artificial Sequence
  ENSG00000242759_6 (sequence is synthesized)
agacagaaataccagttgcaatgttttgttgcataaagtttatcctaatttaaattagtggcatataaagtcatcatcttgcttgaacaaacatcttattaaattgagcatgtcttttat

SEQ ID NO: 949820 - DNA, 120 bp, Artificial Sequence
  ENSG00000242759_7 (sequence is synthesized)
cccatgaaatgaaattaattttgagatagttatttttcagttggaaatttattgagttgatagaaaacaagttatatagtcttccaaagaatatgttacatccatttgcattttgttttt

SEQ ID NO: 949821 - DNA, 120 bp, Artificial Sequence
  ENSG00000242759_8 (sequence is synthesized)
cttcagcaatgtttggtttttagaaaatcttacaagttaaatatactaatgtagaaattgaaagaaaataatcagagatagagcaataaatttgcaaataaagattattcttaaaacaaa

SEQ ID NO: 949822 - DNA, 120 bp, Artificial Sequence
  ENSG00000242759_9 (sequence is synthesized)
gggtcccctaggtcgcggggcagccggggcggaaggggcttgttcattattttgagagtttgttgtgaacgtcataacctttcgtccttaaatattgccgatacttgacctacgcaagag

SEQ ID NO: 949823 - DNA, 82 bp, Artificial Sequence
  ENSG00000242759_10 (sequence is synthesized)
accagatgctgaacctgctgagcaccctgatcttccacttcaccttcatcagaaccggacctcccttaggagatcaatcccc

SEQ ID NO: 949824 - DNA, 120 bp, Artificial Sequence
  ENSG00000242759_11 (sequence is synthesized)
aacatctcaccaatttcaaatccgaaatccttcatctaatctggcaaacacatgtggcaggtttttctcaccgcataaaatatgttatagagtagtccatctatttctcttccatggaag

SEQ ID NO: 949825 - DNA, 120 bp, Artificial Sequence
  ENSG00000242759_12 (sequence is synthesized)
ctcttccatggaagagttcatctggtagattggactaccacttttccttcaggtcccgagttctcatcccgcatccaggaagaatgaggttatgtggacacctggagggtgagcgaggct

SEQ ID NO: 949826 - DNA, 120 bp, Artificial Sequence
  ENSG00000242759_13 (sequence is synthesized)
gagaaaagctttattgggcaaccagacagctctcagaagagaggtgacctgaagcagccataattttagcttgtctaaactgcttacctggtgtgatgaccaagagcttaatctctgaaa

SEQ ID NO: 949827 - DNA, 120 bp, Artificial Sequence
  ENSG00000242759_14 (sequence is synthesized)
ggatgagagacgttgagctccaaactcagactaagaaactataagaaatatgcttcaatgaagaagctgttcaaaaatgagtaagattgtttccttgaggcaagaaagaaatgcagaagt

SEQ ID NO: 949828 - DNA, 120 bp, Artificial Sequence
  ENSG00000242759_15 (sequence is synthesized)
gcagaagtcttgacaaacaaaagaagagattgccttagggaaggggactacagtgaacactgagaacttcttcccacgctaagacaatctttacagagcaagactccgtctcaaaaaaaa

SEQ ID NO: 949829 - DNA, 120 bp, Artificial Sequence
  ENSG00000242759_16 (sequence is synthesized)
aagcagagactgtgccctcaccagatgctgaacctgctgagcaccctgatcttccacttcaccttcatcagaactgtctttgaggaattgtcacactgtcttctgcaatggatgaactaa

SEQ ID NO: 949830 - DNA, 120 bp, Artificial Sequence
  ENSG00000242759_17 (sequence is synthesized)
atggatagaattcttagtcttctttgggccaggtgtgttagccccttgggaaaggataaagttttggaatatatttttattcatgaacctgctctctttaagacttctgaggaaaagagc

SEQ ID NO: 949831 - DNA, 120 bp, Artificial Sequence
  ENSG00000242759_18 (sequence is synthesized)
tgctgggcagatgagtagaatatgttactactgttccgacatgtctacccatcaaaactagctgatacagtacactttaatgacccttctatagtcaaaactgacattgacattgacatt

SEQ ID NO: 949832 - DNA, 120 bp, Artificial Sequence
  ENSG00000242759_19 (sequence is synthesized)
aacagaaaagatttgggacaaagaactgtgttcatgcagcaaatcagcctcaaacttcaccacaagctgcacattttatgctactgtattctgcttaagcacttatttgtatttatgtaa

SEQ ID NO: 949833 - DNA, 120 bp, Artificial Sequence
  ENSG00000242759_20 (sequence is synthesized)
actgaatgatcctttaatacttaaggactttattctgggtgagttagaatcacactgttttggcaggaaaactctttgataggaaaaactgtatggcttgataatttaagagctaaaagt

SEQ ID NO: 949834 - DNA, 120 bp, Artificial Sequence
  ENSG00000242759_21 (sequence is synthesized)
agccaaatcaggaactactgaaattcttcagtatctgttagaatatctcctgtttgagccatgtttgtaaatgatgttcaaaggcatttcaaaagcatgtaaattaaaaaaacaattcat

SEQ ID NO: 949835 - DNA, 120 bp, Artificial Sequence
  ENSG00000242759_22 (sequence is synthesized)
attgcagcctctgctgacttcactccagtgctcatggtatggagcagcttcacactcagctgcttcaggaggatgcagcattcaaggttctatcttggaagcagagactgtgccctcacc

SEQ ID NO: 949836 - DNA, 120 bp, Artificial Sequence
  ENSG00000242759_23 (sequence is synthesized)
tgccaggcagctgtgagacaaaatcgtggatctccgcactgtaaacccccagacccaggacttacataacctagggaaatgttgtttcagaagggatgtgtaggacagttgaagtacaag

SEQ ID NO: 949837 - DNA, 120 bp, Artificial Sequence
  ENSG00000242759_24 (sequence is synthesized)
aacatcaaggtcatttcacccaagggcagaatttatggaggatgcagcattcaaggttctatcttggaagcagagactgtgccctcaccagatgctgaacctgctgagcaccctgatctt

SEQ ID NO: 949838 - DNA, 120 bp, Artificial Sequence
  ENSG00000242759_25 (sequence is synthesized)
ttggacccttttctttcaccatatacaaaaactcactcaagatgggtgaaagacttaaatgtaaaacctaaaactgtaaaaaccctaggaaacctacgaaatgtcattctggatatagac

SEQ ID NO: 949839 - DNA, 120 bp, Artificial Sequence
  ENSG00000242759_26 (sequence is synthesized)
atgtcattctggatatagaccctggcaaggatttcatgataaagactccaaaagcaattgcaacagaaacaaaaattgacaagtagaatataattaaagagcttctgcacagcaaaataa

SEQ ID NO: 949840 - DNA, 75 bp, Artificial Sequence
  ENSG00000242759_27 (sequence is synthesized)
ctctacaagaaaaaacaaacaaccccaccaaaattttcttagaatagtcaaaaaaatagacaaagaacatgaaca

SEQ ID NO: 949841 - DNA, 120 bp, Artificial Sequence
  ENSG00000242759_28 (sequence is synthesized)
ttcttagaatagtcaaaaaaatagacaaagaacatgaacagagaagacatgcatgcagccaagagaagacatgcttctcaagagaagacatgcatgcagccaacaagcatatgaaaaaaa

SEQ ID NO: 949842 - DNA, 120 bp, Artificial Sequence
  ENSG00000242759_29 (sequence is synthesized)
agtcttgcatatgtctttttctgctacagatggtacaatggttgatttggtacaaggatcataccaaatatgtatgcaggaagccaaaaaatagaatcaaatcaaacatgattttatagt

SEQ ID NO: 949843 - DNA, 120 bp, Artificial Sequence
  ENSG00000242759_30 (sequence is synthesized)
tgttattattcctaaaaatatctgtgctcctgtaggcatatgtcttagataggagaatgctgttggaatttctggtctctgcattgaggggctgttggtcttttggaaagatgtgcttat

SEQ ID NO: 949844 - DNA, 120 bp, Artificial Sequence
  ENSG00000242759_31 (sequence is synthesized)
acaccattccaggaagtgacagccacctaggacctcccccatggatgcttcattccctttgctcatttcttggtctttcagctcctgatctggctccccacatgtttcgtggtagccagg

SEQ ID NO: 949845 - DNA, 120 bp, Artificial Sequence
  ENSG00000242759_32 (sequence is synthesized)
tctatgcaaacctacccccaagtccatggcagctgacaggctaaagaaagaggatgacaaatccagtttcttagaaagaaacatttaatagagactcacgaacggaagccatgtctgtgt

SEQ ID NO: 949846 - DNA, 120 bp, Artificial Sequence
  ENSG00000242759_33 (sequence is synthesized)
cctggatggtggctagacaagatggcggatccccactgcaaaagtttctctaagtttcaaaaggtcaaggcctagatcagcactagcaaaagcagcaggaacaactttagtgaaatcact

SEQ ID NO: 949847 - DNA, 120 bp, Artificial Sequence
  ENSG00000242759_34 (sequence is synthesized)
acgttttatctgtggacccaaaactctggcgctggtcgcagactgggaaggcagcctttccttggtgtttaatcattgcaaggatgcctctctgattattcacccacatttcagaggtgt

SEQ ID NO: 949848 - DNA, 120 bp, Artificial Sequence
  ENSG00000242759_35 (sequence is synthesized)
tgattattcacccacatttcagaggtgtcagaccatgcaaggacacctgccttggtccttcatccttagcggcaagtcccgcttttctggaggaagggcaagtaccccaaccccttctct

SEQ ID NO: 949849 - DNA, 120 bp, Artificial Sequence
  ENSG00000242759_36 (sequence is synthesized)
ccatctatttctcttccatggaagagttcatctggtagattggactaccacttttccttgtggagacctattctgttgggttagagatgacagaaaatcttatttgtcggttggtttgtt

SEQ ID NO: 949850 - DNA, 120 bp, Artificial Sequence
  ENSG00000242759_37 (sequence is synthesized)
tgttcaagaatacactgaccttctacaagaaaggagagctctttgacacctggaaattttacagaagcttgggacagctctgaatggcaacacggtcctgagatatgtgattacctggga

SEQ ID NO: 949851 - DNA, 120 bp, Artificial Sequence
  ENSG00000242759_38 (sequence is synthesized)
atgtgattacctgggactttcattggacctgcatttcagctctactctcctcactgccctatgctgctttgaccctaaaagtgaagccagcttggccaggtgcagtgactcacacctgta

SEQ ID NO: 949852 - DNA, 86 bp, Artificial Sequence
  ENSG00000242759_39 (sequence is synthesized)
tttgggaggccgaggtgggcaaatcaagaagtcaggaaatcgagaccaccctggccaacattgtgaaacaccatctctactaaaac

SEQ ID NO: 949853 - DNA, 120 bp, Artificial Sequence
  ENSG00000242759_40 (sequence is synthesized)
caaaaaaaacaaaaagtgaagccaactcaattgtctcatagaactgatctttacggtgtttttaaataaacatagaaattggccctcccagtcttaaaacttcaaaaacttacatttgtc

SEQ ID NO: 949854 - DNA, 120 bp, Artificial Sequence
  ENSG00000242759_41 (sequence is synthesized)
ttacctcagttcctttctcaggaatccaatcatcaaggctcccagatagtatcaatgaacggaaacttaccagatcacgatatctggacaatgagatgtcagatccccctcatccatcct

SEQ ID NO: 949855 - DNA, 120 bp, Artificial Sequence
  ENSG00000242759_42 (sequence is synthesized)
gattacctaactgactacctgcttcctgttggccaactactcttccttacccctccctaattcttgttttcccacaaatggttacatttctgtcctgctatagaagcccttaattttaat

SEQ ID NO: 949856 - DNA, 120 bp, Artificial Sequence
  ENSG00000242759_43 (sequence is synthesized)
tggtcgaggagatggatttgagactgattttttgctctccttggctgttgcacctgaatagcctttttccctggcaatactttttgtctcagtgattggctttctgtgcagtgagcaatg

SEQ ID NO: 949857 - DNA, 120 bp, Artificial Sequence
  ENSG00000242759_44 (sequence is synthesized)
ggaccaaacttctggtgttttggtaacaaattttggtttcctgactgtgaatgcattgcttgtgactcagctgccatgagctgggagagtttcaaaagccctctaagcagctacctgacc

SEQ ID NO: 949858 - DNA, 120 bp, Artificial Sequence
  ENSG00000242759_45 (sequence is synthesized)
attttggccagaggtggattttcgtctctccccatttgggcccacttctgccaaccccaaccatgttcctgattgcctaggaagaacagcctttgaaatttgacgtctatgtacagaaag

SEQ ID NO: 949859 - DNA, 120 bp, Artificial Sequence
  ENSG00000242759_46 (sequence is synthesized)
actgaggttgactgtgaggtaactgaaaccacggaaagcaaaactgccaacaagaatgaatagggaggaccacaagacatttgtcacattccaccatagcctacttccatatttgagagg

SEQ ID NO: 949860 - DNA, 120 bp, Artificial Sequence
  ENSG00000242759_47 (sequence is synthesized)
tacatgagctctctcttgcttgccaccaggtagctgtccctttgctcttcatttgtcttccaccatgattgggaggcctcccctgccatgtggaactgaggatgcagcattcaaggttct

SEQ ID NO: 949861 - DNA, 120 bp, Artificial Sequence
  ENSG00000242759_48 (sequence is synthesized)
attggactaccacttttccttgaagaggaagaagaagagggaggaaggagagaaaaaaggaaggaaggaaagaagaaaagaaaaaagaatgagagagagagaacaaaagcatcaccaata

SEQ ID NO: 949862 - DNA, 120 bp, Artificial Sequence
  ENSG00000242759_49 (sequence is synthesized)
aggatgcagcattcaaggttctatcttggaagcagagactgtgccctcaccagatgctgaacctgctgagcaccctgatcttccacttcaccttcatcagaactagatggagttccaccg

SEQ ID NO: 949863 - DNA, 86 bp, Artificial Sequence
  ENSG00000242759_50 (sequence is synthesized)
gcctcccaagtagctgggattgcaggctcccaccaccatgcctggctaattttaaaaatatttttagtagagacggggtttcacat

SEQ ID NO: 949864 - DNA, 89 bp, Artificial Sequence
  ENSG00000242759_51 (sequence is synthesized)
cacaacttctttctaaataatctttatgcaacttataagttataatccttattatcctgacttacgagtatgacccaatctttgaattt

SEQ ID NO: 949865 - DNA, 120 bp, Artificial Sequence
  ENSG00000242759_52 (sequence is synthesized)
tattatcctgacttacgagtatgacccaatctttgaatttagtttctttgtttactcgtcaaataatctctcatttttaattgtaagaaattagttctgtaacataagtgagcctgaaag

SEQ ID NO: 949866 - DNA, 120 bp, Artificial Sequence
  ENSG00000242759_53 (sequence is synthesized)
aaagagaacaggctccgataatggagtagtttttatcagacttatcttcccagtagtcccacactgtcccactcacacacagtcacactcagtgccttcccaggggcagcccatagcaga

SEQ ID NO: 949867 - DNA, 120 bp, Artificial Sequence
  ENSG00000242759_54 (sequence is synthesized)
ataggatgcacactactctgggatggaaggaaaggcaagacttcaaggactgggctgcctagccaaacctctttggtgtgttgcatgaaatttttgaagtttttatggatattggaggca

SEQ ID NO: 949868 - DNA, 120 bp, Artificial Sequence
  ENSG00000242759_55 (sequence is synthesized)
agaagagatacaataagaagctcaattaactaaatgacttttttatcaaaacttcatctcaccctaaatgggctttcagtcatctccctagtctcacaagtgagcactgagggatccttg

SEQ ID NO: 949869 - DNA, 120 bp, Artificial Sequence
  ENSG00000242759_56 (sequence is synthesized)
ccctggaattagtcagttctctatgaataggcatttaagaacatttctctctgtagctagaatgtcaggtcagctacctgggcatttacttggtttctgtcctgatagagcccaagtgct

SEQ ID NO: 949870 - DNA, 120 bp, Artificial Sequence
  ENSG00000242759_57 (sequence is synthesized)
tatgtgataacctaattctctcaccttgtcctcctgttcttatgatatttaaaaagtcttttccttgacttattcttcaataattgtgtcattttggttcctgccaggttagcggcttcc

SEQ ID NO: 949871 - DNA, 120 bp, Artificial Sequence
  ENSG00000242759_58 (sequence is synthesized)
ttgctttcgattctgacttcattgtgtcccctaatccctaaatgccttcttgatttcagcccacttcctttctgacctccagtggcactggcgtgtgtacagacacactgagttccattt

SEQ ID NO: 949872 - DNA, 120 bp, Artificial Sequence
  ENSG00000242759_59 (sequence is synthesized)
acatgtgcctaggactgtgcactcacttagcctcacactcatccacactcacatccccactttcccacaatcactcacactcagtgtcctccatttactcagccccactcactctcgccc

SEQ ID NO: 949873 - DNA, 120 bp, Artificial Sequence
  ENSG00000242759_60 (sequence is synthesized)
gcctccatttagtactactcggtctcacccagccctacccatatgcacaccagagtcagctcactcacagtcgcacagtcagtccctcaaatgcagtcactccctcaggaactccttccc

SEQ ID NO: 949874 - DNA, 120 bp, Artificial Sequence
  ENSG00000242759_61 (sequence is synthesized)
tctcactcaggtacaatgtctcattcatcctcagtgcccttcacacacttcatatacacactgggcatgtgtcacacccactcacacaaacttcaggcacagccagtcctacccacactt

SEQ ID NO: 949875 - DNA, 120 bp, Artificial Sequence
  ENSG00000242759_62 (sequence is synthesized)
attcacgcttatttcactcatgcccagccccacccactcacacctagtcacactcacatgtggtcccaaacagttccagtatacctagactcacacagtcctactcatacctagtcacac

SEQ ID NO: 949876 - DNA, 120 bp, Artificial Sequence
  ENSG00000242759_63 (sequence is synthesized)
tcagtcacgctcacacatggtcccgcacagttccaatacacctagcctcacacagtcctatgcatacctagtcacactcagtcacatgcatacatggtcccacccactcacactcacacc

SEQ ID NO: 949877 - DNA, 120 bp, Artificial Sequence
  ENSG00000242759_64 (sequence is synthesized)
tagtcacactcacatatggtcccacaccgttccaatacacctggtttcacacagtccttctgacacctagtcacactcagtcacactcacacatggtcccacacaatcacactcacacta

SEQ ID NO: 949878 - DNA, 120 bp, Artificial Sequence
  ENSG00000242759_65 (sequence is synthesized)
gtcatactctattctactacctctcagagaattccactctattctactctctcggtgtcatttgtcccctcaggaggatgcagcattcaaggttctatcttggaagcagagactgtgccc

SEQ ID NO: 949879 - DNA, 120 bp, Artificial Sequence
  ENSG00000242759_66 (sequence is synthesized)
ccagatgctgaacctgctgagcaccctgatcttccacttcaccttcatcagaacttctttctcatcttagaaaagagccccccatctgccagaggagtcatctccaggttctgccttttt

SEQ ID NO: 949880 - DNA, 120 bp, Artificial Sequence
  ENSG00000242759_67 (sequence is synthesized)
catccactcccacatttactccaacaccaatcctgtcaactcagcttctgaaacaccattccaccacctccagcatggccacctagccaccattgtttctagatgattctgtgacaacag

SEQ ID NO: 949881 - DNA, 120 bp, Artificial Sequence
  ENSG00000242759_68 (sequence is synthesized)
ctgtgacaacagccttctatgtctctccatatccacttttgcttctacaatccattttccacaatgcggacagagaagcttcttaaaagtgttttcgtatcaggatgatgctggcctcat

SEQ ID NO: 949882 - DNA, 120 bp, Artificial Sequence
  ENSG00000242759_69 (sequence is synthesized)
tatgtgtccctacctgttattatttgacttacactctctctgtccctgagagtattcctcgtgcattagcgttgggattggatacacaatttatatgagaaataaatctttgttgttgca

SEQ ID NO: 949883 - DNA, 120 bp, Artificial Sequence
  ENSG00000242759_70 (sequence is synthesized)
gctattataaaaagtcaaaaaataacagatactggtgaggttgtgaagaaaagggaatgcttatacactgcctgtgggaatgtaaattagttcagccactgtgggaagcaatttagagat

SEQ ID NO: 949884 - DNA, 120 bp, Artificial Sequence
  ENSG00000242759_71 (sequence is synthesized)
ttctcaaagaacttagaacttccactggaattttgataaggattgcattgaatttggtctctctttgggtaccatgaacactttaacaatagtaatccataagcatgtggtatttttcca

SEQ ID NO: 949885 - DNA, 120 bp, Artificial Sequence
  ENSG00000242759_72 (sequence is synthesized)
tatatttgcttccattcaaatttttgaacactttgaagtttacataaatctttcttttcttttcattcctctttctttctgtctcttactttctttgttcttccttccttctttccttcc

SEQ ID NO: 949886 - DNA, 120 bp, Artificial Sequence
  ENSG00000242759_73 (sequence is synthesized)
ttccttcctcttcttcttacttctagtggcaataagaacatattctagctttaatctggtgatttatatttagtgaatttttaaaaattgagaataatgattgaactgtaattggaaata

SEQ ID NO: 949887 - DNA, 120 bp, Artificial Sequence
  ENSG00000242759_74 (sequence is synthesized)
acttcaccttcatcagaactgtgagaattaactttctattatttataaattactcagtctaagatattttgttatagcagcaggatcagattgagacaaggaatttataccaatttagac

SEQ ID NO: 949888 - DNA, 120 bp, Artificial Sequence
  ENSG00000242759_75 (sequence is synthesized)
tccaagtggcacaagaatctagcaccaaaatggcagctcagggaaagctgattcagtttaacgttcaaaagaagaggcaaaactaattctagaaacttgttcccttgagatgctcggaga

SEQ ID NO: 949889 - DNA, 120 bp, Artificial Sequence
  ENSG00000242759_76 (sequence is synthesized)
cgtgccctggtttagaaagaaaatacagaatggaagctttgctctaaaagacaggttcttgcattagaaaaagggttacttcggactcactggctctaaataaattagtcaggagaaaac

SEQ ID NO: 949890 - DNA, 120 bp, Artificial Sequence
  ENSG00000242759_77 (sequence is synthesized)
taatgaatgttaccatggaattatccataggacttaaccttctcaaaatagttgtgagtgggatgaaagagcaacaatgagttaaccagagacactggaaggtgttaattagaaaaaaaa

SEQ ID NO: 949891 - DNA, 120 bp, Artificial Sequence
  ENSG00000242759_78 (sequence is synthesized)
caccttcatcagaactggtgctaagaattctgaatttattgaggaaataaatgtctgattgcaacaaaagaaaacttgtctggctttgggaaggaagaggcttaggaaaaaaattaaagg

SEQ ID NO: 949892 - DNA, 120 bp, Artificial Sequence
  ENSG00000242759_79 (sequence is synthesized)
gggccaaaaattaaactatttaattcctctagaatcagggattattacagaagagacagtgggggcttgagattgtaagggccaattttgaagaataaaattagttcagaccctccaatt

SEQ ID NO: 949893 - DNA, 120 bp, Artificial Sequence
  ENSG00000242759_80 (sequence is synthesized)
ttatctatgttattaaacatcatagtatcccataacactcctcctcagcatgaagcagccggaaagatctatgcccagattccccatgattgaggaattgataaatagaaaagagtaact

SEQ ID NO: 949894 - DNA, 120 bp, Artificial Sequence
  ENSG00000242759_81 (sequence is synthesized)
gatactggcccagttgtcccatagaactgatgtttatggtttcttgaatgaacatagaaattgacccttccagtcttcaaacttgagaaacttacatttgtcttatctgagttcctttct

SEQ ID NO: 949895 - DNA, 120 bp, Artificial Sequence
  ENSG00000242759_82 (sequence is synthesized)
caggaaactaaacatcagaccttccagagagtatcagtgaactgaaactcaccagatcaccacatctagacaataagacaccagacccctcttcggtcatgattgcttaactgaccacct

SEQ ID NO: 949896 - DNA, 120 bp, Artificial Sequence
  ENSG00000242759_83 (sequence is synthesized)
ggcttcctgttggcctaacacctctcccttgcccccatcccccaactaattgctgttttcccacacatagttacatttctgtcctgctatagaaaaccttaattttagttggttggggag

SEQ ID NO: 949897 - DNA, 120 bp, Artificial Sequence
  ENSG00000242759_84 (sequence is synthesized)
atgcatttgaaaccgatatcctgttttccttggctgcagaatctgaataaccttcttccctggcaatacttgttgtctcagcgattggctttctgtggagggaggaatgggacttagact

SEQ ID NO: 949898 - DNA, 120 bp, Artificial Sequence
  ENSG00000242759_85 (sequence is synthesized)
gagcccctggtatttcagtaacaaaagtattccctgataatcttccttcatgtttatctccatatcaatatctcctcactgggaaatctagcctggggcacttttggttttctatctaac

SEQ ID NO: 949899 - DNA, 120 bp, Artificial Sequence
  ENSG00000242759_86 (sequence is synthesized)
cactttaagaaagtataaaaagaatgtgtgcattgtatgcatttatgaaatttctggtatgctcaaatcttgcgtatgacagatagctctcaattacctatgctctagtaatcagaaata

SEQ ID NO: 949900 - DNA, 120 bp, Artificial Sequence
  ENSG00000242759_87 (sequence is synthesized)
aaaattagttgttttgttaaaagtgatatagtgcatgggtgattgcaacttactaggagcaatagtggcaaagacatttgcctgtgtacacagattctgagatgtattttctaatcaaga

SEQ ID NO: 949901 - DNA, 120 bp, Artificial Sequence
  ENSG00000242759_88 (sequence is synthesized)
gaaaattggtcttatagaaacatgtgttgatgcagaacattctatttgataggtcttgagaatgtcacagacaattttactgaggaaactgcaatcggtaacatgagtttgatcctcggc

SEQ ID NO: 949902 - DNA, 120 bp, Artificial Sequence
  ENSG00000242759_89 (sequence is synthesized)
agaaaattctgaaagcaagatgtaggtagaaatctttggcatctaagcaacaattcaggaaaggtgaccaacgttaattacaagtaaacaaattttatttcccagcctctctcaatggag

SEQ ID NO: 949903 - DNA, 120 bp, Artificial Sequence
  ENSG00000242759_90 (sequence is synthesized)
agttacttgaacagtatttatttttcaaaagactggaaatagatgcagatggctgaggctccaaccctgatttgtccattacctttttgcatgttttgtgcaaatccacagccttatgat

SEQ ID NO: 949904 - DNA, 120 bp, Artificial Sequence
  ENSG00000242759_91 (sequence is synthesized)
tatcactgttcttactggaattattagcaaatagttttgtaatttctattatccaaatatcttatcacctgatccttgcctaacacttccgtttcaccccttctgctcctttcttgccca

SEQ ID NO: 949905 - DNA, 120 bp, Artificial Sequence
  ENSG00000242759_92 (sequence is synthesized)
tgcccttcccatcctacaaaccacatatgtagcttctgatactgaaatattctctgtgctcctgctccaagagacatcaaggggttaagagggtgaaccctgcagccagccgagtccctg

SEQ ID NO: 949906 - DNA, 120 bp, Artificial Sequence
  ENSG00000242759_93 (sequence is synthesized)
cattttctctgtcatttcccaactgtgtgacttacagcaagttacttaccctctggtgcctcagtttacttatctctaaatagagatcaatatcagcatctacgttatttggttgtgaca

SEQ ID NO: 949907 - DNA, 120 bp, Artificial Sequence
  ENSG00000242759_94 (sequence is synthesized)
aggattaagtaaagagtacttgtttcatagtagctcaagtattctttggtgctttattatttgttagcaatgacatgttcctgtttaggaattctgctgctccattttgcactctgaatc

SEQ ID NO: 949908 - DNA, 120 bp, Artificial Sequence
  ENSG00000242759_95 (sequence is synthesized)
tattactgtgtgagcgtatttttcaaattctactttatgaatatgtatgatgaaaggtatttgatagagtacttgcacgtgtaaattattgcataattgttgagaaattaatgaaaattt

SEQ ID NO: 949909 - DNA, 120 bp, Artificial Sequence
  ENSG00000242759_96 (sequence is synthesized)
tatttaaaatgttcctgttgcctagaaacagcatagatgccgaaaagtacttctcccaagtttgtattgaacaactgagagatgtatgtgaattcgtttctttccattaaaagaattaaa

SEQ ID NO: 949910 - DNA, 120 bp, Artificial Sequence
  ENSG00000242759_97 (sequence is synthesized)
tctgctatggtttaaatatatatatccctccaaaattcatatgttggaacttaaaccccaaggtgatggtgttaagaggtgagggctttgggagttattataattaggccaggagggctc

SEQ ID NO: 949911 - DNA, 120 bp, Artificial Sequence
  ENSG00000242759_98 (sequence is synthesized)
tgtcctcatgaatggcattaatgccattataaaggagacttcagaaagctgcctggcctttttctgtctcttctgccctgtaagtacacagcattcatcccttttgccctcccacctttt

SEQ ID NO: 949912 - DNA, 120 bp, Artificial Sequence
  ENSG00000242759_99 (sequence is synthesized)
gccatgtgaagatgcagtaacatgaaggcaccatcttggaggcaagagcacagctctcaccagacactgaatctacctgcaccttgatcttggacttcccaacatccaactatgagaaat

SEQ ID NO: 949913 - DNA, 120 bp, Artificial Sequence
  ENSG00000242759_100 (sequence is synthesized)
aaatttttattatttataaattacccaatcttagtgttttgttatagcagtacaaacaaacagagacagattttgacagtcatataaaacctcaagtactttgtaaaaagaaaatataaa

SEQ ID NO: 949914 - DNA, 120 bp, Artificial Sequence
  ENSG00000242759_101 (sequence is synthesized)
ggaaatacacagagaaactggcagaaaatgaatccatggagattttgacaagacccctctaagcaagatctaaagacaacatcagatggagttgtctgtggattatgtacgtattgtcag

SEQ ID NO: 949915 - DNA, 120 bp, Artificial Sequence
  ENSG00000242759_102 (sequence is synthesized)
agacattcatgcaaaataatgggtttggtggtgacagggttacagccacaacaagaaagtgagatacagttagtggaattctcaagtgctctcttaggatgaataaaccttaagaaagaa

SEQ ID NO: 949916 - DNA, 120 bp, Artificial Sequence
  ENSG00000242759_103 (sequence is synthesized)
caaactgatggagagaggataataccttgactgattcagtttgaacactcttggggcttgttcattgctacagaagttggattgtgttttggtgattgtttgcttgtgtatgtctatgta

SEQ ID NO: 949917 - DNA, 120 bp, Artificial Sequence
  ENSG00000242759_104 (sequence is synthesized)
gttatgggatgtcagggtttgatcccagagtgcagcccacatgggtgcattctttgggttagtctgtatgtagttgtgggttgacagagcaggggaaattctacagccataccactctga

SEQ ID NO: 949918 - DNA, 120 bp, Artificial Sequence
  ENSG00000242759_105 (sequence is synthesized)
gtgtggctgatcttgtctgatcgcgatgtctttgcattgtagtgctgtcttacaattgaattcattttgctgttgaatgggaaagcaggatggaggtccatgtatgtatgcttttatgct

SEQ ID NO: 949919 - DNA, 120 bp, Artificial Sequence
  ENSG00000242759_106 (sequence is synthesized)
gctgctctgaacagggttgggcctgattagtactgtgatgctcttctgtggtgctgtttggccccagtgttctttggaatccggggaattttggcctttaaaagttaaactgccatggga

SEQ ID NO: 949920 - DNA, 120 bp, Artificial Sequence
  ENSG00000242759_107 (sequence is synthesized)
actgatttacccagttttagttcatagccttcattgtattatctatcagggcaaaaaagttagccgtgtgaacatgttcgtaaaccagtgagtttgtattgctatctcatgcctagaatt

SEQ ID NO: 949921 - DNA, 120 bp, Artificial Sequence
  ENSG00000242759_108 (sequence is synthesized)
ctaaagtaaaaactattgggtctttgtttgtatatatgtatatgggtctaaatgttatgtgttgtttttacagggtacagattggctcataaataaaagagcactcataaattaagtgaa

SEQ ID NO: 949922 - DNA, 120 bp, Artificial Sequence
  ENSG00000242759_109 (sequence is synthesized)
ctgttcctgttgttcagcaaagagttgatactacagtgaaatagaactatagtttctttgttgaaaaaaatgagactgtaaatttaatctcaggtttgtaatttcttcagtagacaatgg

SEQ ID NO: 949923 - DNA, 120 bp, Artificial Sequence
  ENSG00000242759_110 (sequence is synthesized)
tgaatctttaaagagaggatgacggtgacctgaagtattcttaaagacataattttgtaagcactgtggaggttggcattgagagtgaagagacaagaaacagaattcccactcctggaa

SEQ ID NO: 949924 - DNA, 120 bp, Artificial Sequence
  ENSG00000242759_111 (sequence is synthesized)
aattatttctgatctctgtgcttaattagagaaggggttcagcaccagctcttggttttgacattcacttatcccaggaagccttcctaattctcaggtgtggattaggacaaaattata

SEQ ID NO: 949925 - DNA, 120 bp, Artificial Sequence
  ENSG00000242759_112 (sequence is synthesized)
attatcaaggtatttgtccctatctgccttggactatccactccattaaaacatttaacatgtctgccttattcaccattctctattttctttctcattcctggcccttgctggatattt

SEQ ID NO: 949926 - DNA, 120 bp, Artificial Sequence
  ENSG00000242759_113 (sequence is synthesized)
ggtccgtatttattagataaataagtaaagagatgtgtgaatattttgaataaatcagttggaaaaaaaaggcgtaagaaaaatgcctataagaatgaaaacaccagaaacgtggaaaat

SEQ ID NO: 949927 - DNA, 120 bp, Artificial Sequence
  ENSG00000242759_114 (sequence is synthesized)
agtatccaaaggattggagatatgtaagatgtggaaagggagggattaatttaaagatgcctcccatgtgtctatcctgggttttgagataggatagtaggatagtgatgctacctgaat

SEQ ID NO: 949928 - DNA, 120 bp, Artificial Sequence
  ENSG00000242759_115 (sequence is synthesized)
tatccagttagagtttggttacctttcatatagtatctcctccctctacaaacagggttctggttgaactgtttgaagagtccttatttgttacaggaatgtgaccatagtctacccata

SEQ ID NO: 949929 - DNA, 120 bp, Artificial Sequence
  ENSG00000242759_116 (sequence is synthesized)
taaataccctccaggccaattcctgagatgggaaggtatgaataagatcctggtgccaactgaacagggtctgatactcttcttgaaagtgattccttactgatatgttttggctctgtg

SEQ ID NO: 949930 - DNA, 120 bp, Artificial Sequence
  ENSG00000242759_117 (sequence is synthesized)
tttggctctgtgttgccacccaaatctcatattgaactgtaatccccacatgttgagggaggtcctggtgggaggtgattggatcataagggttgttttccccatgctgttctcatgata

SEQ ID NO: 949931 - DNA, 90 bp, Artificial Sequence
  ENSG00000242759_118 (sequence is synthesized)
tcatgagatctgatggttttataagtggcagtttccctgcgctctctccctctcctgctgccttgtgaagaaggtaccacatttcctgag

SEQ ID NO: 949932 - DNA, 120 bp, Artificial Sequence
  ENSG00000242759_119 (sequence is synthesized)
gccttcccacccatgtggaactgctagtcaaataaagcagtgggagtggaaaaggatcaaagaaatctgtaaccggttatgatcaattagttgtaaacaccactgcacgaggaccagccc

SEQ ID NO: 949933 - DNA, 120 bp, Artificial Sequence
  ENSG00000242759_120 (sequence is synthesized)
aaagctgctacttaaccaagtgactttctgattgctcaactgtgtttccactgagaaaaatgcattgaaatgaaacatctcatttccagtactgtcctgaggcaaaaagagacaatgata

SEQ ID NO: 949934 - DNA, 120 bp, Artificial Sequence
  ENSG00000242759_121 (sequence is synthesized)
caaataaagaagtcacattgtaagtgtaaaacgacgttaaccttaaaggagacatttccgccctgtataactatgcacagcttcaactaatggtatatgaactgtgtctacaaaccaaag

SEQ ID NO: 949935 - DNA, 120 bp, Artificial Sequence
  ENSG00000242759_122 (sequence is synthesized)
gacatttttctaaagaaactttaaatatagaaaattaactcaaaccttaccttagagcttcctcctctattgtcttttcctgtagtggtagtctctgtggcacttacaggtggtaaacaa

SEQ ID NO: 949936 - DNA, 120 bp, Artificial Sequence
  ENSG00000242759_123 (sequence is synthesized)
ataaaaaagtgtcttattgaattaacttgattgccatattgatcagttttatgtgtttttattcttaagcataacaataaaagaaaatgattaagcaatgttttgcttaaaaaaaaaaga

SEQ ID NO: 949937 - DNA, 120 bp, Artificial Sequence
  ENSG00000242759_124 (sequence is synthesized)
tttcatggcagagaagcaattgagtccagttaagagacagttaagaacatttttcagtttggagcttttgttttgtgatgagaactttgccagttagtcacaaatgaacttgagcacatt

SEQ ID NO: 949938 - DNA, 120 bp, Artificial Sequence
  ENSG00000242759_125 (sequence is synthesized)
ttcttgagcgtgatggctgaacagatgagccacacacactttatagtgagttttactgcactgagtctttacctactattcctagtagttacacatattaaattattaataactgatcaa

SEQ ID NO: 949939 - DNA, 120 bp, Artificial Sequence
  ENSG00000242759_126 (sequence is synthesized)
cattttaaaagaaggtttcaaaagaaatgtaattagattttatagttgagttttagctaatgtgtgattccacaaaagttcaggtgccgagattacatttcaatttatacttgccatctg

SEQ ID NO: 949940 - DNA, 120 bp, Artificial Sequence
  ENSG00000242759_127 (sequence is synthesized)
ctagaatattcccctctgtctacagcatcctgaccagatctccaaattttgaaatctgttttcattattcaagactcattgtacatttcaaataccaggttgatttcttagtctccatgt

SEQ ID NO: 949941 - DNA, 120 bp, Artificial Sequence
  ENSG00000242759_128 (sequence is synthesized)
tgatttcttagtctccatgttctccatgtctgcttatgactttacagaaaaaatgttatttactatgcatattaatattgagattctttactatgctgtatctttttttttttttttttt

SEQ ID NO: 949942 - DNA, 80 bp, Artificial Sequence
  ENSG00000242759_129 (sequence is synthesized)
agacagggtttcactttgttagccaggatgggagctcgtaatccgcccacctcggcctcccaaatgctgtattcttatag

SEQ ID NO: 949943 - DNA, 120 bp, Artificial Sequence
  ENSG00000242759_130 (sequence is synthesized)
tgtgcctggcctactatgctgtattcttatagttaacagcatgctctttgataatatctcattggaaatatttatgctctgaaacattattttttgaattgttaaatataaatcatttat

SEQ ID NO: 949944 - DNA, 120 bp, Artificial Sequence
  ENSG00000242759_131 (sequence is synthesized)
acagcaatactttatgggagaagcatatgctgaattttaatggtgtttactttgcaatccaaaattgtgaatacatacatgtaaaactatgaaattgctaattaaatatttccatctatc

SEQ ID NO: 949945 - DNA, 120 bp, Artificial Sequence
  ENSG00000242759_132 (sequence is synthesized)
gtcctgttggtgagtgtgcttattcagatggagcctagacagtttgtgaacactgattctgctcttatggagcttcttggtactggcactgaatggtgtgccttaaagtgaagcctgaat

SEQ ID NO: 949946 - DNA, 120 bp, Artificial Sequence
  ENSG00000242759_133 (sequence is synthesized)
gtctcagattgatttcaaacaaatgcagcaacaaatcaaggtgttcttccttgggaagtgatgggtgttttgcctactgtcaatctctggacaaagttggtgccccacctacatcccttc

SEQ ID NO: 949947 - DNA, 120 bp, Artificial Sequence
  ENSG00000242759_134 (sequence is synthesized)
taagcaccgtgtctttatgtctaagagagcagtctgacccgtgagtggtacagggcaaacgtgctggagaattaatgttcccataagcaactatcaaccaatgagggattgaggctggta

SEQ ID NO: 949948 - DNA, 120 bp, Artificial Sequence
  ENSG00000242759_135 (sequence is synthesized)
gataaaattctgtagcaggctttgtaggtcctggaattctgaggtgtactctatatggtctctcagagggcacctttccccagttttcctacttcctcattttgctgcctcctaaataaa

SEQ ID NO: 949949 - DNA, 120 bp, Artificial Sequence
  ENSG00000242759_136 (sequence is synthesized)
aggatgcagcattcaaggttctatcttggaagcagagactgtgccctcaccagatgctgaacctgctgagcaccctgatcttccacttcaccttcatcagaactgtacttcaaagaggac

SEQ ID NO: 949950 - DNA, 86 bp, Artificial Sequence
  ENSG00000242759_137 (sequence is synthesized)
gttcaagagcagactggccaggagactccttcaaaaaaaaaaagaaaaatctaggttgctcaattaaaaagaaaattaaatccaaa

SEQ ID NO: 949951 - DNA, 120 bp, Artificial Sequence
  ENSG00000242759_138 (sequence is synthesized)
aaatctaggttgctcaattaaaaagaaaattaaatccaaaatccaaaatggaaaagaaccttaaatatatctaacgttttctttttgagtggaatatctaattcataatttcattattta

SEQ ID NO: 949952 - DNA, 120 bp, Artificial Sequence
  ENSG00000242759_139 (sequence is synthesized)
taaattatcagttttgttctgaacactctttagctgcatcttgtcaactctaatgtcatgttttcatttttttctagaaattctcattagcaattgatatttccctttgagacaagctat

SEQ ID NO: 949953 - DNA, 120 bp, Artificial Sequence
  ENSG00000242759_140 (sequence is synthesized)
gtttaataggaaaattttaaatttcaaaatggggctttcttatgttttgattataaatttctggttttatcatattatggtgaatatttagatcatttttatgtgatttactggggcata

SEQ ID NO: 949954 - DNA, 120 bp, Artificial Sequence
  ENSG00000242759_141 (sequence is synthesized)
catgtctgtattgtaaattagagtcaattttctaagtgtttttgtatttttttgtctaattaagagaaatgtactatagtctgctattattagtgtatttcaatttctctttgaatctct

SEQ ID NO: 949955 - DNA, 120 bp, Artificial Sequence
  ENSG00000242759_142 (sequence is synthesized)
tataattcctactgtatgaaagtagctgctgtgttattcactgcataccttttcataaatcttttattttcactgggaattgtagcctttaggattataagatgttctttgtctcaataa

SEQ ID NO: 949956 - DNA, 120 bp, Artificial Sequence
  ENSG00000242759_143 (sequence is synthesized)
aaagtaataccaaaccattactttttaattgttctatttgtaatatttacattctattgaataactaagggaattcaaaatcctttgcttatatgttaagtttttaaaatggaaaataaa

SEQ ID NO: 949957 - DNA, 120 bp, Artificial Sequence
  ENSG00000242759_144 (sequence is synthesized)
cttcagaaaaaaaacgtaaacaaaagacagagattggaagcatcagaattttattccagtgactcaatccccattgtgtgaagtagaccagaatgaataaattgaacttactcagcacct

SEQ ID NO: 949958 - DNA, 120 bp, Artificial Sequence
  ENSG00000242759_145 (sequence is synthesized)
caattattaaatgtatccacagaaattcattctgtcaagttaactgtggaggttgttgttgctattgcagactaaatggttttcctgggaactctgactctggccacaagatcaagactg

SEQ ID NO: 949959 - DNA, 120 bp, Artificial Sequence
  ENSG00000242759_146 (sequence is synthesized)
acaaatttcctttctctgtttatggagggagacttcacaacattcactgaaagaggagcaaaggacctggtttttgccatgactggctttggccccgtgaatgaatgtttttctggcatt

SEQ ID NO: 949960 - DNA, 120 bp, Artificial Sequence
  ENSG00000242759_147 (sequence is synthesized)
ggaaagcggatagcaaagagagcagaaccacaaatgggctatgaggaaatgtgttcaatgaagaaaacaaaatctctgacaagatccaacataggacaacatctcagcatcttctgtgat

SEQ ID NO: 949961 - DNA, 120 bp, Artificial Sequence
  ENSG00000242759_148 (sequence is synthesized)
ttgtgaacccaagtaaagcacttcttagagttatctggcacattcgcaactaatagctttctgtgaataaatactgtggcaaccacgttaactgtacaaaaacaaattgcttatttctta

SEQ ID NO: 949962 - DNA, 120 bp, Artificial Sequence
  ENSG00000242759_149 (sequence is synthesized)
tatccatgctggaagattatctggctgaccttatcagctgtgatgtcaggaatgtcagccagttatcctgtggtgcattcagctgggtcattgtaccccatcagtgaggcaattgcaaag

SEQ ID NO: 949963 - DNA, 120 bp, Artificial Sequence
  ENSG00000242759_150 (sequence is synthesized)
ttccatctggacagaggtagaaaaaattatattcactttgagttttggatttttttctcttaattttcaaagataaagacaattgcttttggcttttaagagacacatctggtatgcctt

SEQ ID NO: 949964 - DNA, 120 bp, Artificial Sequence
  ENSG00000242759_151 (sequence is synthesized)
gggctggatgccagatatttctgctgttgagtttttataacattatataggcctcaatattttagaactagtatacatttgataaaagtgacttttctaaagttttagggagaatctttt

SEQ ID NO: 949965 - DNA, 120 bp, Artificial Sequence
  ENSG00000242759_152 (sequence is synthesized)
gcttaggtgcagctgagtatttttagttcagtactacagatggcataccaaatttaagaggagttgagtgactgcttcaaggttgcacagctagttcttggtagatctggaaaaggacca

SEQ ID NO: 949966 - DNA, 120 bp, Artificial Sequence
  ENSG00000242759_153 (sequence is synthesized)
acatctcttggccctttgtcagatattctttctttgatttcacactgtttttaaagatgcttaatacattttaaattaaaatggttatttgaatctgcttaaactagacaatactaattg

SEQ ID NO: 949967 - DNA, 120 bp, Artificial Sequence
  ENSG00000242759_154 (sequence is synthesized)
tcaaacatccattacctgctttttctctagtaacagattggtgcaaaaagaattgcggtttttgccattacttttaatggcattaattacttttaatggcaaaaaccttagttccttttg

SEQ ID NO: 949968 - DNA, 120 bp, Artificial Sequence
  ENSG00000242759_155 (sequence is synthesized)
caccagcctaataataaaacccctaattttaacttggcacgtggccaaccagaatagaaactacatgttcctgctttgctttcagtagcattagctgaagtaatcttcaatggggatagg

SEQ ID NO: 949969 - DNA, 120 bp, Artificial Sequence
  ENSG00000242759_156 (sequence is synthesized)
aaaaatgaggtgcacaactgcctggttgcactcttataggaaaggcataaccctccatttcccttttatcttttccactcactagagtagtgatctggtcataattcattctggaccatg

SEQ ID NO: 949970 - DNA, 120 bp, Artificial Sequence
  ENSG00000242759_157 (sequence is synthesized)
ttgacagggcaatatactggagattgtagagaagaagtcagaagggacttggatccctgatactatggaactgtcttgcagccctagtttgcttatgtctagacttttatgcaagagaaa

SEQ ID NO: 949971 - DNA, 120 bp, Artificial Sequence
  ENSG00000242759_158 (sequence is synthesized)
aaataaacatttctttgttttaactactgatacttagatcttagctacagcaactgaacacacaatgctatttaataatttgcaaatgttatactgccagttgatattttataactacca

SEQ ID NO: 949972 - DNA, 120 bp, Artificial Sequence
  ENSG00000242759_159 (sequence is synthesized)
aatttaagtgcagtaaatgggcattatgcttgtttaaatgtctggcaatcttggaattataccattaccatcatatgttgcatgagatggttttccattccatttagagtccgtacaata

SEQ ID NO: 949973 - DNA, 120 bp, Artificial Sequence
  ENSG00000242759_160 (sequence is synthesized)
atcttctcggcttagtggctgaagactgacgctgcctgattgcctcggaagccccctagaccatcacagatgccgagcttcagaaatccttcatctaatctggcaaacacatgtggcagg

SEQ ID NO: 949974 - DNA, 120 bp, Artificial Sequence
  ENSG00000242759_161 (sequence is synthesized)
ggtgcctcagcccctgcaggatggagatccactctggcagacctccaggacccttcacattccacaccatctgaaaaatctcaagagatatgtaataaggacttatgaacagaagacatg

SEQ ID NO: 949975 - DNA, 120 bp, Artificial Sequence
  ENSG00000242753_0 (sequence is synthesized)
tcacaccactgcactccagcctgggtgtcagagcaagactctggtttgtttgtttgtttatttgtttgttaaagctattctgtagggcagagggcactattccagagtctgatgcaagag

SEQ ID NO: 949976 - DNA, 120 bp, Artificial Sequence
  ENSG00000242753_1 (sequence is synthesized)
tgcaagagaagataaggaagacaagatctcaaccactttcagcaaagctttgcggagaatgcaacatccttcaagacaccatgaagctccacgcatctggtcatcttgtttcttcaggga

SEQ ID NO: 949977 - DNA, 120 bp, Artificial Sequence
  ENSG00000242753_2 (sequence is synthesized)
aagaagcctttcttgtgaatggaggatggatgtggagctggtccgagcagtctgcctactgcatctgctatgacacccagcaaactggaagggaaaagcagttacaaagtttccaaccag

SEQ ID NO: 949978 - DNA, 120 bp, Artificial Sequence
  ENSG00000242753_3 (sequence is synthesized)
cacaaattccatagtcaggttttccacatgtggggaaatgacaggggtcagcacatccaacgtgcaatggacaagccttgcactgggtaaaccacgttcatggtcatggaatctcattta

SEQ ID NO: 949979 - DNA, 120 bp, Artificial Sequence
  ENSG00000242753_4 (sequence is synthesized)
ccagaaagaccatctggaaaaaatctccagggccacacctctgatgtcttctttgcaataggcagcttgactgcagcgttgcattgcagaaagagattgaagatatttacatttattgta

SEQ ID NO: 949980 - DNA, 64 bp, Artificial Sequence
  ENSG00000242753_5 (sequence is synthesized)
ccaacaaccatctgatctttgataaagttgacaaaaacaatggagaaataactccctattcaac

SEQ ID NO: 949981 - DNA, 120 bp, Artificial Sequence
  ENSG00000242753_6 (sequence is synthesized)
tgtaaaaccccaaaccataaaaaccctggaagataatctagcaactaccatggtggacatagaacctggcaaagatttcatgacaaagacaccaaaagcaagtgtgacaaaataaaaaat

SEQ ID NO: 949982 - DNA, 71 bp, Artificial Sequence
  ENSG00000242753_7 (sequence is synthesized)
gtgggagaaagtatttgtaaactatgcatacaacaaaggtctaatatccagaatctgtaaggaacttaaac

SEQ ID NO: 949983 - DNA, 120 bp, Artificial Sequence
  ENSG00000242753_8 (sequence is synthesized)
aacaaaggtctaatatccagaatctgtaaggaacttaaacaaatcaacaagcaaaaaacaaatcccattaaaaagtgggcaaaggacagaatagacactctcagaagatacacatgtagt

SEQ ID NO: 949984 - DNA, 120 bp, Artificial Sequence
  ENSG00000242753_9 (sequence is synthesized)
caacaagcatatgaaaaaatgttcaacataactagtcattacagaaaggtaaatcaaaaccaggatgagatgccatctcacaccagtcagaatggctattaataaaaagtaaaaaaataa

SEQ ID NO: 949985 - DNA, 120 bp, Artificial Sequence
  ENSG00000206129_0 (sequence is synthesized)
cagagttctagccaggaaagtgaataccagtctgcaacttcaacctcaatgggtgactatctgtgaagctcctctgctgggggagagtgggcagcctctcccttgcccactgggagaaaa

SEQ ID NO: 949986 - DNA, 120 bp, Artificial Sequence
  ENSG00000206129_1 (sequence is synthesized)
gggagtgaccccggcaagaccaattcctcctctcccctgtcctcctcctcgcctactccacatgaagacaacgaggatgaagaccttcatgatgatccatttccacttaatgaacagttt

SEQ ID NO: 949987 - DNA, 120 bp, Artificial Sequence
  ENSG00000206129_2 (sequence is synthesized)
aattagcgtgggaggaagagacagtgaagcagccccttaaaaatggtctttcgggtggaaacactttatttgggaagcaaagtgcaagattcagcaatagaaaccactcagtgtccttgg

SEQ ID NO: 949988 - DNA, 120 bp, Artificial Sequence
  ENSG00000206129_3 (sequence is synthesized)
tgaatgatttgatcctggccatcagaacctttacttcagccagcaataaactcttagaaacagaagcttcgaggtatgtactcctgttctgcacgaacaagttttctggttgaacatgct

SEQ ID NO: 949989 - DNA, 120 bp, Artificial Sequence
  ENSG00000206129_4 (sequence is synthesized)
gaacctcttaaaaaattcagaacaagttttctcagagtttacaaagggatttcaatcacatgaagagaggaaaacacactgagtcgtaacagtgacatcaaaatacttttgaagttgact

SEQ ID NO: 949990 - DNA, 120 bp, Artificial Sequence
  ENSG00000206129_5 (sequence is synthesized)
gaaaatgtggttgcttttgtttgagaatggcaaattaaagaattggatattgggttcttatctcagaagaaacaaaggaggagaccctgaaaaactgaacatgaagaggaagaagtggag

SEQ ID NO: 949991 - DNA, 120 bp, Artificial Sequence
  ENSG00000206129_6 (sequence is synthesized)
ttatgcaactcttcataagaaaatctccatctgtttggagaagtactgcgtccttccggattatcttctacactatgccttattgttatctggctggttccaccaccggtcagaagaatg

SEQ ID NO: 949992 - DNA, 120 bp, Artificial Sequence
  ENSG00000206129_7 (sequence is synthesized)
aaaattgcagatacctattctgtgtgtttctctccagaatggtggatgttagagaccctactaaggatttgtggactcactaacgtagtctctaaaaggttggacatccctacccaaggc

SEQ ID NO: 949993 - DNA, 120 bp, Artificial Sequence
  ENSG00000206129_8 (sequence is synthesized)
tcaaatggtaacaggtccatgccttacttgtgtcagttctcttattgaaagagcatctcctaaccatcctaccaataagggtcttactctgttgccctggctggagtgcagtggcccaat

SEQ ID NO: 949994 - DNA, 120 bp, Artificial Sequence
  ENSG00000206129_9 (sequence is synthesized)
catagctcactgcagccttgacttcccagcctcagttgatcctcctaccttaatctcccgagtagctgggactgcaggtttacttatactaagattttcttctgcctctgccaaccctga

SEQ ID NO: 949995 - DNA, 120 bp, Artificial Sequence
  ENSG00000206129_10 (sequence is synthesized)
gacagcaagaccaattcctcctctcccctgtcctcctcctcgcctactccacatgaagacaacgaggatgaagaccttcatgatgatccatttccacttaatgaacaaacttcaggaaat

SEQ ID NO: 949996 - DNA, 120 bp, Artificial Sequence
  ENSG00000206129_11 (sequence is synthesized)
tattcaagaagagaggcatggtggtatgctggaaagtctgctgagcttgaaagtaggtaacccaggctcctgttcctgttctcattgatgagttccctgacttcaggtgagtcacagctt

SEQ ID NO: 949997 - DNA, 120 bp, Artificial Sequence
  ENSG00000206129_12 (sequence is synthesized)
catttctaggatcttttccagccctgagattgtatgagctgcaatagctaagagatatgggaaagtgggtcattggaaagttgttttcctaactccacaggcaacaatgtgcctcattct

SEQ ID NO: 949998 - DNA, 120 bp, Artificial Sequence
  ENSG00000206129_13 (sequence is synthesized)
tagtcatcaaaggcaaatacgaagggatgggaagcactctcttcactgtccatttgcaagcagaatcactcttcacttgattgtccagtgtctgtatagtctctcacagagcccagcaca

SEQ ID NO: 949999 - DNA, 120 bp, Artificial Sequence
  ENSG00000206129_14 (sequence is synthesized)
tgtgggcattctgtaaatggccattgagaactgccaggtctgtggctgctacagagcacaatgatgatgataatggtgttgatgatcatgatgatgatgggctggtgtatcgaggcacag

SEQ ID NO: 950000 - DNA, 120 bp, Artificial Sequence
  ENSG00000206129_15 (sequence is synthesized)
acccaaggaaggctaatgagaatgtttctagggaagcttcctgcatgtcactcttcttccttctacttcctctaggttcatcttccctgactaacagggagccagggctataataacggg

SEQ ID NO: 950001 - DNA, 120 bp, Artificial Sequence
  ENSG00000206129_16 (sequence is synthesized)
aaggaagtcatcatgtgattctacctagaaacgcaggcatcaacttgaaatgttttctctttctcttgtaactctggaatatggctccttggattggaggtggcaaataccacgggttaa

SEQ ID NO: 950002 - DNA, 120 bp, Artificial Sequence
  ENSG00000206129_17 (sequence is synthesized)
ttaaacaatgtcattctgagctcttttagtactgaataatgcaatatataccatattctaccctcttaaagaaggagtgtatcagctatgtgcctgatatggtttggctctatgtcccca

SEQ ID NO: 950003 - DNA, 88 bp, Artificial Sequence
  ENSG00000206129_18 (sequence is synthesized)
tctatgtccccacccaaatctcatcttgtagcacccataattcccaggttttgtgggagggacccggtgggagatgggtcttctgata

SEQ ID NO: 950004 - DNA, 120 bp, Artificial Sequence
  ENSG00000206129_19 (sequence is synthesized)
cacaagatctgatggtttttgaaaacaggagtttctctgcatgagctctctctgcctgctgccatccacttaagatgtgacttgctcgtccatcgccttctgccatgattgtgaggcctc

SEQ ID NO: 950005 - DNA, 120 bp, Artificial Sequence
  ENSG00000206129_20 (sequence is synthesized)
gccacgtggaacttagctcaggacagcaaccagacctgagattcttttcaacttatacgctgttgatgaatgtggtttctggatgaaaaactgagaacagactgaccctctggccacagc

SEQ ID NO: 950006 - DNA, 120 bp, Artificial Sequence
  ENSG00000206129_21 (sequence is synthesized)
tactcgcgtcagggacgcatagttgcaggtgcatgctgtctggtttggtttgccaagtcaaaatagttgtgtttcccgctgtggtgagagtttccaacttcagacggggcaagagaaatt

SEQ ID NO: 950007 - DNA, 120 bp, Artificial Sequence
  ENSG00000206129_22 (sequence is synthesized)
ctaaacagtttgccctttgcagatgtattgaaatagtactgaaatttactgattttccctcatgttttttttccgtgcttttatcactaccctgaaaataaacaaggagaaaaggcaagc

SEQ ID NO: 950008 - DNA, 120 bp, Artificial Sequence
  ENSG00000256915_0 (sequence is synthesized)
attttggtaaagacattcatctcagtcgtttctctctcccagcttgaccttaggttaatatttcatttgggtcaagaaaagaatatgtaggagagctatgttgctttaacaagaaaatgg

SEQ ID NO: 950009 - DNA, 120 bp, Artificial Sequence
  ENSG00000256915_1 (sequence is synthesized)
acaaaaatggatagtttgcctcattaaagaacacgcatgctcgcagaagccattacaatcccgtcgtgcagcagcctgtgctattgaccagcctagaagtcatttttcgactcaagggga

SEQ ID NO: 950010 - DNA, 120 bp, Artificial Sequence
  ENSG00000256915_2 (sequence is synthesized)
gccatgagatgctccagcggagctgggtccaaggcctggcgctcaccaaagattgcactactctcagcatggtacaggaagacaactgatgggacaatgcaagctgggacaatctccaac

SEQ ID NO: 950011 - DNA, 120 bp, Artificial Sequence
  ENSG00000256915_3 (sequence is synthesized)
ccaaagggtatctcagaaaacagcactagagtctgaaatgattccacctggtcttagcagaaagctggcccggaagttgtaatacatgaagatccaacagccaccacgtgaccaagagaa

SEQ ID NO: 950012 - DNA, 120 bp, Artificial Sequence
  ENSG00000256915_4 (sequence is synthesized)
gcaaagcccaacggcagagatgaatgccttgtccgctgtacagaagcactgcagttatatgacaaggcgtgtggatgcaaatgcttttataggtctgctgttgccctggaggtgctgtca

SEQ ID NO: 950013 - DNA, 120 bp, Artificial Sequence
  ENSG00000256915_5 (sequence is synthesized)
gtggagtctaagatttggttcccttgtttgtcaatattcatcaatcagaattcttgagcatctgtcacggtgaggcactgtgctaagcactcagcataaattgactgaagaaaacagaca

SEQ ID NO: 950014 - DNA, 120 bp, Artificial Sequence
  ENSG00000256915_6 (sequence is synthesized)
cagtccctgccttccctgagtgtgcattctagtgggagcaacagaccttaaatgagacctttctaaaattgagtataaaaggaactaatgagatagaaactcagaaggacaaagacaaca

SEQ ID NO: 950015 - DNA, 120 bp, Artificial Sequence
  ENSG00000256915_7 (sequence is synthesized)
ggtgatgagagagagaattgtgactgcaaagagtgaacatatttttggaagataaaaagtggaaggaggagtgagcaaaagtaagaatgctgtataccaagtgtgagcaaactggatgcc

SEQ ID NO: 950016 - DNA, 120 bp, Artificial Sequence
  ENSG00000256915_8 (sequence is synthesized)
tcacagcatctaacccccctagtccaggcaagtgttcctcctcaccctgccaggatgccagaatcttactattctgtggagaagttgaactggagtggctccacaaccaggatgccggcc

SEQ ID NO: 950017 - DNA, 120 bp, Artificial Sequence
  ENSG00000256915_9 (sequence is synthesized)
aaaaggagctggaggatgcaattcattgatgtatagaaagttttaaaaagtaaaaactgaaatacagaaaacaaagtttgcaatgtgtaagaaataaaggactgaaatttgtacctacaa

SEQ ID NO: 950018 - DNA, 120 bp, Artificial Sequence
  ENSG00000256916_0 (sequence is synthesized)
cagctccagaagaatgagcctgcacagcttggactgtcacctctggcaggttcctgctctttgatgaagcctcgtcataattacaggtgtttgaaagttcctccattgatcttctctctc

SEQ ID NO: 950019 - DNA, 82 bp, Artificial Sequence
  ENSG00000256916_1 (sequence is synthesized)
ttacaggtgtttgaaagttcctccattgatcttctctctcctgctgccttgtcaagaaggtgcctgcttcccctttgccttg

SEQ ID NO: 950020 - DNA, 120 bp, Artificial Sequence
  ENSG00000256916_2 (sequence is synthesized)
aacaaaaagaatctttgaaacttcccttcaactggtcatcctcttccctttttctctcctttaaacactgttccaattcattatgatggccccaaagcaaagacagacatggaagtgaac

SEQ ID NO: 950021 - DNA, 120 bp, Artificial Sequence
  ENSG00000256916_3 (sequence is synthesized)
gagcaaaggtctgctttctttctatcattcttgtatcaactctaaattgaaacccaaatcactgaaatctaaaaaatcacatgaaagcaagtcaatgactaaaagaaaatgaaatgagag

SEQ ID NO: 950022 - DNA, 120 bp, Artificial Sequence
  ENSG00000256916_4 (sequence is synthesized)
atcctatcagagaaatatgaaagggaaaataccactgattaaataagttatgggaaaaataaatcattacaccattaaatgtatacgtcgacatactgtatgttgttatgtgcttattgt

SEQ ID NO: 950023 - DNA, 120 bp, Artificial Sequence
  ENSG00000256916_5 (sequence is synthesized)
ctttcaccagtagaatgtaagtcccataagggtaaggactttatatattcttttcacagcagtgtctctagtgcatggaacagttcctagcacaaaataaacagttgttgaataagtgaa

SEQ ID NO: 950024 - DNA, 120 bp, Artificial Sequence
  ENSG00000256916_6 (sequence is synthesized)
taatagtactcacctcagaaggctgttgtgagaattaaataattcctgtaaagcaggtagcagagtgcttggcacatagcatccaggaaaaactgagcgagttcttgtgaaactgaagta

SEQ ID NO: 950025 - DNA, 120 bp, Artificial Sequence
  ENSG00000256916_7 (sequence is synthesized)
cactgaaggtgtttgctatttaaaggtatcttctggtggatcgtcttggaaaacatggacccaaatcttgcgagagctatcagtgagtctcctctcctgctctgcatctctcaggactgt

SEQ ID NO: 950026 - DNA, 120 bp, Artificial Sequence
  ENSG00000256916_8 (sequence is synthesized)
gtcccagctccagaagaatgagcctgcacagcttggactgtcacctctggcaggttcctgctctttgatgaagcctcgtcataattacagctgtgccaaaatatgtgctttgcctcctgg

SEQ ID NO: 950027 - DNA, 120 bp, Artificial Sequence
  ENSG00000256916_9 (sequence is synthesized)
ggcagtgactttccagggcacaaggacctccaaaggcaagtgtttgagctcagcccttctcggtggcccacaggaatcgcttcccattggaacactgccaccaaggctctggagctgagt

SEQ ID NO: 950028 - DNA, 120 bp, Artificial Sequence
  ENSG00000256916_10 (sequence is synthesized)
ttgtgacatggagacattcatggcatttttcctgtccctcaagggtcaggcagatctggtgctttccccctcctggaaatggatagagctggctgaaagcttcttgggatgaaatttgtc

SEQ ID NO: 950029 - DNA, 120 bp, Artificial Sequence
  ENSG00000256916_11 (sequence is synthesized)
ttttgtgcctcaggtgaaatctgactgattttgaatggtgtgcccatttctgggcttcccaccctccagatcccctggggccagattcctagcaccccaggaagctgttgggggatctgg

SEQ ID NO: 950030 - DNA, 120 bp, Artificial Sequence
  ENSG00000266934_0 (sequence is synthesized)
gcctgggcacagtgctgtctcctcagggtcagggagacactttcagaaggagtaggggcactaactcaccacccccacccctgttgaacccccagcacactgtcttgctcggctgcaagc

SEQ ID NO: 950031 - DNA, 120 bp, Artificial Sequence
  ENSG00000266934_1 (sequence is synthesized)
ccgcagctttggcctcagctgttaatcctctcagaataggacggaccagtggcagggaggaacgcgcgtctgcctgtggaatgagagactgtgatttcttaaccttgatggaaaagggga

SEQ ID NO: 950032 - DNA, 120 bp, Artificial Sequence
  ENSG00000266934_2 (sequence is synthesized)
ccactctcctgtggtctgcagggctcagtgctatctcgtcacgctggagggtagctcggggagaccccttcctgggaactaggagccgtacacgcccagtgaggtcactagagcagaccc

SEQ ID NO: 950033 - DNA, 120 bp, Artificial Sequence
  ENSG00000266934_3 (sequence is synthesized)
tcccctcctgtgccacagatgctgacgcagatgagaagtgaagtgacttgcccaggtcatttggcacatctgtgacagaactgaggccagagtgaagtctcggcctcctcgcacagtcct

SEQ ID NO: 950034 - DNA, 120 bp, Artificial Sequence
  ENSG00000266934_4 (sequence is synthesized)
cctcctccctgggccatccacagggagtggtagggcagggcttctcccacatctggccgatcctgagcatggctccagccagtcctcagatacatccaaaccagcgacagaggagctggg

SEQ ID NO: 950035 - DNA, 120 bp, Artificial Sequence
  ENSG00000266934_5 (sequence is synthesized)
gaaagaaaccatgaacagaagatcctccagtgggaagggaagccgggaaaagcagccctccagggaccattctgcctggatttggatatggggaagtcctgggcaggaggccgaggggca

SEQ ID NO: 950036 - DNA, 120 bp, Artificial Sequence
  ENSG00000266934_6 (sequence is synthesized)
gaggcactgaagcctgaaacagggcaccccctctcacagaggactgcaccttggaccctgctgtcccttcagctgtccagagcccttccaggccagaagtggcaaacagtcctgagagac

SEQ ID NO: 950037 - DNA, 120 bp, Artificial Sequence
  ENSG00000266934_7 (sequence is synthesized)
ccatctctcatacctctcctccttcgtgtacagggagggggcggggagaggggcgcctccttgccgcagtcccagggccccaaggtgagaagtaagaggtggggaagggcctcaccgtgt

SEQ ID NO: 950038 - DNA, 120 bp, Artificial Sequence
  ENSG00000266934_8 (sequence is synthesized)
cctgggctgtagggccgggccaggccaggtacagggaggtccttgtcccaaagactccagaatcgtaaccctcaagcacttcctactgtgaggagctacaaagcaagccggggtctcctc

SEQ ID NO: 950039 - DNA, 120 bp, Artificial Sequence
  ENSG00000266934_9 (sequence is synthesized)
agcagggtattatgacaccctcacatcccagcagtggaaggacactggtgtgtcactgagcacactgtcttgctcggctgcaagcccgcagctttggcctcagctgttaatcctctcagg

SEQ ID NO: 950040 - DNA, 120 bp, Artificial Sequence
  ENSG00000266936_0 (sequence is synthesized)
aaaaaaaaaagaaaagaaaagaaacaaccaaattgaaaaccagagagagctgttctttggttggagttgtactggttgtcttgtggggccttgtaatgagctctggatggcaggccgcat

SEQ ID NO: 950041 - DNA, 120 bp, Artificial Sequence
  ENSG00000266936_1 (sequence is synthesized)
ggccttgtaatgagctctggatggcaggccgcattaagagcatgagcagctctgtttcgtgactgtcccaagtcaggcccaggtgaagagcttcagagccaccaacttttcaccctcaca

SEQ ID NO: 950042 - DNA, 120 bp, Artificial Sequence
  ENSG00000266936_2 (sequence is synthesized)
caggacctgctacctcatccccagaagaaagagcggagtccagggctgccggctcctagatctaagctcctgacgctcgccgtttcacaccacacagagctcaggtaacctgtcctgagc

SEQ ID NO: 950043 - DNA, 120 bp, Artificial Sequence
  ENSG00000266933_0 (sequence is synthesized)
gtgggccaggcgaaggtgccatagcgcgcggcccaggcgctgctgctgcagcaggagctggcccgggggctccccggcgccgccgtttacaggcgagcgcaggcccatgttctcgaagta

SEQ ID NO: 950044 - DNA, 120 bp, Artificial Sequence
  ENSG00000266933_1 (sequence is synthesized)
gtgagccaggaaggcgatcggctcctcgggccgcgcctccagcaccttcagcagggccgcacgtagcatttccgtcacgccgacctgccgcaggaagtcctcctcgctctcggccgcccc

SEQ ID NO: 950045 - DNA, 120 bp, Artificial Sequence
  ENSG00000266933_2 (sequence is synthesized)
cgccgcccgggataccgactggcggccgctgtccgtgaaaccggccggcggtggtaccgcttgccgccgcttctccactgccgccatcttcgctgagggcagcgggaccggaagcaccgc

SEQ ID NO: 950046 - DNA, 120 bp, Artificial Sequence
  ENSG00000266933_3 (sequence is synthesized)
tgtgcgctagagcccccccaaggcggccatcttgattaagggcagagggcaccggtatcccgctgggagactttgggaagtgacaagggcttgcctctcctgcctcaatctccgcatctg

SEQ ID NO: 950047 - DNA, 120 bp, Artificial Sequence
  ENSG00000266933_4 (sequence is synthesized)
tgacaagggcttgcctctcctgcctcaatctccgcatctggatgaagggcttggaccagaacccctccaagccccttccctggaccactctgctggagtttcactcttgtcgcccaggct

SEQ ID NO: 950048 - DNA, 74 bp, Artificial Sequence
  ENSG00000266933_5 (sequence is synthesized)
atctcggctcactgcaacctccacctcacgggttcaagtgattctactgtgacggccttccaagtaggtgggac

SEQ ID NO: 950049 - DNA, 82 bp, Artificial Sequence
  ENSG00000257354_0 (sequence is synthesized)
gtaagatggcggcgcggggggcggcctggcggggcggtcacgtggtgaggagtagcgcgcgagcctccttaagtgatctcta

SEQ ID NO: 950050 - DNA, 120 bp, Artificial Sequence
  ENSG00000257354_1 (sequence is synthesized)
gggattacaggcacgagccaccatgccggacctattagtgtatttactggatatcaagatgactaagaaatagcacttgccttgaaggagcttttctatttgaggaaaaagacatgtata

SEQ ID NO: 950051 - DNA, 120 bp, Artificial Sequence
  ENSG00000257354_2 (sequence is synthesized)
tgaggaaaaagacatgtatataaataactgcaaacagaatgaaacaagtgttatgtagatctacatacagtgacatgccatgggaatgctgaacactgagcaacagtttcaactagcgaa

SEQ ID NO: 950052 - DNA, 120 bp, Artificial Sequence
  ENSG00000257354_3 (sequence is synthesized)
ttggcacaggaaacatgaaaaataagcgtattttcaatatgacaagaatggtcatttctggatataagaacaagagaaaagtcatgggtatatggaaaggcatggactcttcaaggaaga

SEQ ID NO: 950053 - DNA, 120 bp, Artificial Sequence
  ENSG00000257354_4 (sequence is synthesized)
gcaagtagtctaatgtagatgctgtataggaatctggggacaaagggacagataagtggtgtagacaaagaggctggaaatagggttatgggctagatcatgagtgacctgtaagcatta

SEQ ID NO: 950054 - DNA, 120 bp, Artificial Sequence
  ENSG00000257354_5 (sequence is synthesized)
ggagttttgatttattttggaataagaaacatttatggcttttgagaaggaaaattacacaagggaaaagaaaggatttttattttttatttttatttttggagagatgagatctcacta

SEQ ID NO: 950055 - DNA, 120 bp, Artificial Sequence
  ENSG00000257354_6 (sequence is synthesized)
cttgaactcctgaactcaagcaatcctcccggctcggcctctgaaacttctaggattataggcgtgagccactacgcccagccaggattatgtttttttatgggagggatgagaatattg

SEQ ID NO: 950056 - DNA, 120 bp, Artificial Sequence
  ENSG00000257354_7 (sequence is synthesized)
agggatgagaatattggtaggtgggtagaggataaatgagagagaatatgtatatgtgagattgaatatataatagaaaaaattgataggacaagtcctgcgttattactacattttatg

SEQ ID NO: 950057 - DNA, 120 bp, Artificial Sequence
  ENSG00000257354_8 (sequence is synthesized)
aggaaaatctatatattagaagcactttaaaggtatatttgctattctagctgtggaaaccatctgaaaacacatttgaaagtgctttgaaacaggggtcaacttctctgcaaagggcca

SEQ ID NO: 950058 - DNA, 120 bp, Artificial Sequence
  ENSG00000257354_9 (sequence is synthesized)
gagtatgtttagctttgcgggccacagatggcctctgttgcatatgctgctgggtctccaccttcctcctccttttcttcccttcctcttccttctttttcttcttctctttcttctttc

SEQ ID NO: 950059 - DNA, 120 bp, Artificial Sequence
  ENSG00000257354_10 (sequence is synthesized)
tctttaaaagcataaaatcattctcagctcttgggccatacagaaacaggccataggccagatttgacttctaggccatagtttgccgaccctccattttagaacttagctttcctgaaa

SEQ ID NO: 950060 - DNA, 120 bp, Artificial Sequence
  ENSG00000257354_11 (sequence is synthesized)
gagcatttgggtctctctctctctttccctttctctctctctgtctctctctctctctctttcagtaagtgaagtaagaaataggtctttcttgaggaacaaaaagctgaaataatttca

SEQ ID NO: 950061 - DNA, 120 bp, Artificial Sequence
  ENSG00000257354_12 (sequence is synthesized)
tgcatttgaatatgacccttgacctgtttttgtccatcatcactcagatttgtggctgcaaccaccaaccaatttggtgccataggatatagcataatttttcagcaacagttcataagc

SEQ ID NO: 950062 - DNA, 120 bp, Artificial Sequence
  ENSG00000257354_13 (sequence is synthesized)
ttttctttttgttctttttccttcttccagttgtggtggtttaaaaacatgtctgcaaaatctttgacacttctcagtaaaaaatatagtcttgtgttcccttttcttgaacctaagtgg

SEQ ID NO: 950063 - DNA, 120 bp, Artificial Sequence
  ENSG00000257354_14 (sequence is synthesized)
cctttgtgctgcctcaacaaatagaatatgacagaaaagacactatgtgacttttgagacagggtcataagaggtgatacagcttccccatgcccctgcattttagagctctgggttgcc

SEQ ID NO: 950064 - DNA, 120 bp, Artificial Sequence
  ENSG00000257354_15 (sequence is synthesized)
atgtaagaatagctaccctgaagctaccatgctgaagagaccacagggaaatcacatagagttagaaagaggtgtctgaagaagcccagctgctcccaatcccagctatttaagtcctcc

SEQ ID NO: 950065 - DNA, 120 bp, Artificial Sequence
  ENSG00000257354_16 (sequence is synthesized)
cagaccaggtgccatatatatgagtgagcaagccttcagatggttccagcaccagccaccatctagctgtaagctcatgagaccccttcaacgaaaaccatctagattagcttagtcaag

SEQ ID NO: 950066 - DNA, 120 bp, Artificial Sequence
  ENSG00000257354_17 (sequence is synthesized)
ccccagaaccgtgaaagacaatagacttgctatggaggtcgccacatgcctcttttttctccctttgtgaatgggattatttataatggttaccccatacctactccactatgtatattg

SEQ ID NO: 950067 - DNA, 120 bp, Artificial Sequence
  ENSG00000257354_18 (sequence is synthesized)
ggtatgagggagagataatttgtctcactagctgacagatttttcagacctcaaggaatgccacgtgagctgtactcacaggaccacacacaagtatctttatccacacgtgacctgatt

SEQ ID NO: 950068 - DNA, 120 bp, Artificial Sequence
  ENSG00000257354_19 (sequence is synthesized)
tcactgataaagtcctggaccttgagcctgagcccaatgtcttaataaatgagaatttcagaaggtcttgggagggggtgagtatattttgcatgtgggaaggatgtaaataatatgtgg

SEQ ID NO: 950069 - DNA, 120 bp, Artificial Sequence
  ENSG00000257354_20 (sequence is synthesized)
cctgagagcagattatggtggtttgaaaatgtgtccaccaattctttaatactactctcaacaagaggtggaatctgtgtctcttcctttggaacatgagtggacctttgtgattaaatg

SEQ ID NO: 950070 - DNA, 120 bp, Artificial Sequence
  ENSG00000257354_21 (sequence is synthesized)
cagcagaaggatgctgtgtgaactctgagacagggtaataaggggtgatacagctgccacctagttctttctcagaacatgtgcctttggagccctgagctgccatggaagaaaaccacc

SEQ ID NO: 950071 - DNA, 120 bp, Artificial Sequence
  ENSG00000257354_22 (sequence is synthesized)
taccctgaagccacaacactggaaagaccatgtggaagaaccacagagagagagaagaggaccaaatgtgtgagccttcccagcccaggctccaaatatgcaagtagtaagccttcattt

SEQ ID NO: 950072 - DNA, 78 bp, Artificial Sequence
  ENSG00000257354_23 (sequence is synthesized)
cagcccaggctccaaatatgcaagtagtaagccttcatttctttttggttttaatttttttttttaaataaatcgaaa

SEQ ID NO: 950073 - DNA, 120 bp, Artificial Sequence
  ENSG00000257354_24 (sequence is synthesized)
aattgtaggcatgagccaccatgcccggctgcaattagtaagtcttcagatgcttccatcaccagccaccatccgatgacaaccccatgaatgaccctcagcaagaactacctagctgaa

SEQ ID NO: 950074 - DNA, 120 bp, Artificial Sequence
  ENSG00000257354_25 (sequence is synthesized)
tccagccaaactccagacccatgagagagaaataaaattgttgtttgagtcactaaatacggagtaatttatattatcaacagataactggaaccacaagtgtaattgttaaaggtaaaa

SEQ ID NO: 950075 - DNA, 120 bp, Artificial Sequence
  ENSG00000257354_26 (sequence is synthesized)
ctttgaatacatttatatttgccttctgccacattccataattgacttttgttcatgaacctattggcaagtttgccttattgcttttccttcttccctcttttttttttttgtaactta

SEQ ID NO: 950076 - DNA, 120 bp, Artificial Sequence
  ENSG00000257354_27 (sequence is synthesized)
aaaaatcatataataaaacaacacaaaaatgtatttgaatgtaggttgagtgaccgtaaataagcacaaaacttctccttcctgtgactctcttgtctgtatatgccaagtatctaacac

SEQ ID NO: 950077 - DNA, 120 bp, Artificial Sequence
  ENSG00000257354_28 (sequence is synthesized)
aaggcctgcctggcacataatttttttttttaaatgttagtctcttttatcattctttttccctgtcagtggtattatctttacccatggaatccagcaccctcatgctgacttatagtt

SEQ ID NO: 950078 - DNA, 120 bp, Artificial Sequence
  ENSG00000257354_29 (sequence is synthesized)
ccccaaagtccctaacctctacagtcctctccaacccccaccccaggcctctctctatgttccagacattttctggctttttaccattatccaaactctgaacttatctacttagttttt

SEQ ID NO: 950079 - DNA, 120 bp, Artificial Sequence
  ENSG00000257354_30 (sequence is synthesized)
ataaaaaaacacagagtgactacatagctaatataaataatgccagtgttaacacaaaaatttgacttgaatgattacaatagcaaacttcaatgtttaccccatggaataggcagaaaa

SEQ ID NO: 950080 - DNA, 120 bp, Artificial Sequence
  ENSG00000257354_31 (sequence is synthesized)
tttcaagcacttttctaggccacctgagtctattttgagtaaggatccttaagttgatactcaagtaatgacattgatgcaatgtagaagactatgctaaaatttgtcctggcttctctc

SEQ ID NO: 950081 - DNA, 120 bp, Artificial Sequence
  ENSG00000257354_32 (sequence is synthesized)
catgctatgggccatctgtaaagctttggagtctaggtcagatgtatgcgttgtctcctctttgctaccatttttgtacagatttctaatctaaataaaattaatggcaataacagtgtg

SEQ ID NO: 950082 - DNA, 120 bp, Artificial Sequence
  ENSG00000257354_33 (sequence is synthesized)
gaaagggaaagcctaaaagaaagagggtttttgaagagtgggggaccagaaaagaagaggacaattttacctgaattgttttactttagaaaataaatttgttcatgtgattctgtgagt

SEQ ID NO: 950083 - DNA, 120 bp, Artificial Sequence
  ENSG00000257354_34 (sequence is synthesized)
caatttacacatgtatataaatacacatttctttatttaaccattattattatcactatgtgatccctcaatgtgctggctaccacgggtgtaagataaattacagaaactccttattct

SEQ ID NO: 950084 - DNA, 120 bp, Artificial Sequence
  ENSG00000257354_35 (sequence is synthesized)
cctctgatttgccataccttaggaaaggtctttgcatgatactaggccatgtctcttactacaatgatgagcattcttagatttaaaaataataccaagctgtcaggaaaactgaattcc

SEQ ID NO: 950085 - DNA, 120 bp, Artificial Sequence
  ENSG00000257354_36 (sequence is synthesized)
atcaataataacatcttttcataaactgaaagcttgcaaagccttaattaaaaaaatgaatttattactaagtgaatttaattcacaaaaggaattttccccaatatttaggctgttgtt

SEQ ID NO: 950086 - DNA, 120 bp, Artificial Sequence
  ENSG00000257354_37 (sequence is synthesized)
ggttttggctttgtttttaattaacatttttagttgtatggtttgatcaaatactgaatttgagttcaaagatacatttcctctgaggatgcagtctaaagaggccaagtaaataataga

SEQ ID NO: 950087 - DNA, 120 bp, Artificial Sequence
  ENSG00000257354_38 (sequence is synthesized)
aaatcatagtttccaagtttcgcagaacaaagctcagtagttccatgactttttcagtgttctacagaattgagctactccctcttacacaaaaaagtgctctaattttcatttttttct

SEQ ID NO: 950088 - DNA, 120 bp, Artificial Sequence
  ENSG00000257354_39 (sequence is synthesized)
tctttgctcagtttcttcatttatttgcctactttcttaatttcttcctaagtaaatatatagctatctttgaggagaagtgatgtaacatcagaaacaaagagtagactcacaattaga

SEQ ID NO: 950089 - DNA, 120 bp, Artificial Sequence
  ENSG00000257354_40 (sequence is synthesized)
gcccactgactcatgggactttagataaaccactaatcaggaaactgggggtgttaatgctgtttagttagttgattgaggaggtgaggacaaaacctggtgacttcagggcctcagcaa

SEQ ID NO: 950090 - DNA, 120 bp, Artificial Sequence
  ENSG00000257354_41 (sequence is synthesized)
cagaactcctacctatttccattgctaccacttaccttatgggcattagataattctgcagtgagttattctgtgcatgagggggcaaaggctttagagtcaggtagctggggagttatt

SEQ ID NO: 950091 - DNA, 120 bp, Artificial Sequence
  ENSG00000257354_42 (sequence is synthesized)
ttctctctctgctatttaatagctgtatgacctcaggtgaatttcttaatctccgtttccttgtttgtaatacccatcatgagaagttgttctgaggatcacagatactatacctaaagt

SEQ ID NO: 950092 - DNA, 120 bp, Artificial Sequence
  ENSG00000257354_43 (sequence is synthesized)
acccaacaaagtcctgacacaaggaaggtgttccataaacggtagctatttgaagtagtctaaaaggtccctttcaaatgtttaatacacccatataatcccaatcttaatctctcactc

SEQ ID NO: 950093 - DNA, 120 bp, Artificial Sequence
  ENSG00000257354_44 (sequence is synthesized)
tcttgttggcccatcattagagcaccagatccccttgactgctttccagggtaaggatgcaagaccactgagaactgtgccgcgctggtaagaagaggtgctgatggcatgctgttgcct

SEQ ID NO: 950094 - DNA, 120 bp, Artificial Sequence
  ENSG00000257354_45 (sequence is synthesized)
ctgccagacagactctgtctttgctgaagtgtttagtattgctattgtggcaaatgccattttagtcaaaggcaataaatcttcctttgtttaaatgacagatggctaggattgttactt

SEQ ID NO: 950095 - DNA, 120 bp, Artificial Sequence
  ENSG00000257354_46 (sequence is synthesized)
ctgtttctagcaaacccagaaagggaaaaaataaattactgacattcagagttcttgttttttaagaatattagggggaaaatgaaaatagtatagtttcagcaaagttatatagttttt

SEQ ID NO: 950096 - DNA, 120 bp, Artificial Sequence
  ENSG00000257354_47 (sequence is synthesized)
gcagtcaacagaataatgggccccctaatgatgttcacgtcctaacccctagaatctatgaatatgttaggttacagggcaaaggggaattaagagtgcaggtggaattaagattaatta

SEQ ID NO: 950097 - DNA, 120 bp, Artificial Sequence
  ENSG00000257354_48 (sequence is synthesized)
gctgaccttaagatagggaatgtagcataatttatccaggtgagcccaatataatcacaatggaagacagagacagaagaatcagagtcagagaagacgtggctacagaggagagagtga

SEQ ID NO: 950098 - DNA, 120 bp, Artificial Sequence
  ENSG00000257354_49 (sequence is synthesized)
tgagatgtgaggattctgcctgccattgctggctttcaagatgaaggaagggggccatgaaccaaggggatgcctctagaagctggaaaaggtaaggaaacagattctcacctagacttc

SEQ ID NO: 950099 - DNA, 120 bp, Artificial Sequence
  ENSG00000257354_50 (sequence is synthesized)
cagaaagctctgctgttgccttgattttagcctagtgagacccatttcagacttccgacctccagtacgtgaagataatacatttgtgttgttttaacctattaagttctaaaatggtga

SEQ ID NO: 950100 - DNA, 120 bp, Artificial Sequence
  ENSG00000257354_51 (sequence is synthesized)
acccaatttcatttcttctctccctttacaaggtaggtgctattaacagtgaaatgacaatgcaaaagcaaagcagaggaaagcaccagcaaaggacatgcctcgctgactgcagattac

SEQ ID NO: 950101 - DNA, 120 bp, Artificial Sequence
  ENSG00000257354_52 (sequence is synthesized)
agtgtcctctactcaattcctatcttaatatgtatcacatgccctgcctgagataatgaggactctcccattccctcagtcttcaggttgcctctacttctcttccattttctttttcct

SEQ ID NO: 950102 - DNA, 120 bp, Artificial Sequence
  ENSG00000257354_53 (sequence is synthesized)
tgatatgatcctcttctttctcattcttctcttctttcatttcctgagttgttttctctccacttcttccccctctactctgataggaaatattatagcagtagcccaagctagaagaaa

SEQ ID NO: 950103 - DNA, 120 bp, Artificial Sequence
  ENSG00000257354_54 (sequence is synthesized)
aaggacacacctaccagctccctccctccctcacaacacctacacggctgctggggaagccttgaatgaaagctagaaaagaacaaataggaaaagaggcatttgaaaacagaacagaaa

SEQ ID NO: 950104 - DNA, 120 bp, Artificial Sequence
  ENSG00000257354_55 (sequence is synthesized)
tagtcacagacgggtgacaggcaggagatgccacctcattgacagctgccaccattttccatagagaagttattccattgtagtatacaccagggctgggtttaaatatttttcctatgt

SEQ ID NO: 950105 - DNA, 120 bp, Artificial Sequence
  ENSG00000257354_56 (sequence is synthesized)
acttggtagtatagtggaagctcctccatttctctaaatagttaactgcatacttagagctcttggtagcgtttagaacacggagttaattattctgagtgtacctagccccatcactgt

SEQ ID NO: 950106 - DNA, 120 bp, Artificial Sequence
  ENSG00000257354_57 (sequence is synthesized)
ctgtaatctgtacaaaatttgataagcccttttaaggtagttagatatttattgagactctgctgtatatttggcagtgccccagatataggtagtggtggtgacagcaagcaataggac

SEQ ID NO: 950107 - DNA, 120 bp, Artificial Sequence
  ENSG00000257354_58 (sequence is synthesized)
cagtggagcctgctttttaatagagagtgatctctctggtattgttgtaagtacagcatataagcaacttgaggtgttgtcttaaagatgtgagctcacctaatttacacaagagcatca

SEQ ID NO: 950108 - DNA, 120 bp, Artificial Sequence
  ENSG00000257354_59 (sequence is synthesized)
aagccagaattcctccccttgctgatgttagcctgtaactctgtgcctctcaagtgtataacttcttctgtgggaatcatgcttctgaagcatgaggaaagaacacacccgtgtttccac

SEQ ID NO: 950109 - DNA, 120 bp, Artificial Sequence
  ENSG00000257354_60 (sequence is synthesized)
tttctctgctgctttgcatgtgatccctccaggtatgcaaaataatgcctcaatatcattttgacctgtgttgtcattttacatattttatcagaagacttcatatcggatggaagcaaa

SEQ ID NO: 950110 - DNA, 120 bp, Artificial Sequence
  ENSG00000257354_61 (sequence is synthesized)
tctttagaagggttgttataacaacttgaacagcccatcatgctctaggcatgctccctatcacggctatgttttcattcattagagatggaggaggaggcggcttaaaatgtgtaattc

SEQ ID NO: 950111 - DNA, 120 bp, Artificial Sequence
  ENSG00000257354_62 (sequence is synthesized)
taatcacctattcctacagctctctaactggtctccgtggcttctcttgccttcctccagtcttgcccgtgaaccttgattagaggacaacacaacactaacagccactcctccctctcc

SEQ ID NO: 950112 - DNA, 120 bp, Artificial Sequence
  ENSG00000257354_63 (sequence is synthesized)
ctcctgactccttatttgagttagaggctctcgtaacacctgcgtcttcccctttgtcagcagtcatcacaacgaattgtgattgcctatttactcatctgcatctcccactgaattctg

SEQ ID NO: 950113 - DNA, 120 bp, Artificial Sequence
  ENSG00000257354_64 (sequence is synthesized)
atccatggtggctggcccatgcctgtcttgtgtacatttgcatgtaaaccacttaacccaagtgccaggaagcaaacagtacacgcaggtgtgtggagtgattgaaagctaatttgctac

SEQ ID NO: 950114 - DNA, 120 bp, Artificial Sequence
  ENSG00000257354_65 (sequence is synthesized)
ctaagaatgtacagtgattcctcagtgtttattagatcaggcccagactcttcatttcagttttcaactcctctgatttttcttttatacaagctttcagatctcctcttggttctcatc

SEQ ID NO: 950115 - DNA, 120 bp, Artificial Sequence
  ENSG00000257354_66 (sequence is synthesized)
tagctcttgcatctttatgccgtgggttgattcctctgcctgcctatctgtagtagcttgtctcctaggatggctgccatcaatttcttctcttctgtatacacatgccactcccgcatt

SEQ ID NO: 950116 - DNA, 120 bp, Artificial Sequence
  ENSG00000257354_67 (sequence is synthesized)
gagagatggagtcttctttccccctggaatctggtctggcctgtgactaatttcaataatagaatcttgcatttctattgaaactaccaaaaaaaaaaaattgtgtcagctactacagct

SEQ ID NO: 950117 - DNA, 120 bp, Artificial Sequence
  ENSG00000257354_68 (sequence is synthesized)
actaagttttgggatggtttgttatatggcaatagatatcctcaataccattcttcaaagtcccaaacctacattttctgtgaagccttaccttgctagtctagttaacactgatctcct

SEQ ID NO: 950118 - DNA, 120 bp, Artificial Sequence
  ENSG00000257354_69 (sequence is synthesized)
ccttctctgaagttctgtgggaatagaactttgttgatgccacacattttgttatccaactgtatgtattattacttttcctttcctgaatgccagtatgaactccatgaccaaattata

SEQ ID NO: 950119 - DNA, 120 bp, Artificial Sequence
  ENSG00000257354_70 (sequence is synthesized)
tggtctttgaagataccaaatagtggaaataggtcttttgtaatcccttcaacaagtcctagtactgaataaaaatgtaatggctgttgaattggattaaaagtaaaaatattcttggcc

SEQ ID NO: 950120 - DNA, 120 bp, Artificial Sequence
  ENSG00000257359_0 (sequence is synthesized)
agccagctactgctccccgagtcaccaggccaggctgtgtccagagaggcgtggagacagccaggagccaaggccatgaagccaaaggtcattttaaaaagcacttctgctgctggcccc

SEQ ID NO: 950121 - DNA, 120 bp, Artificial Sequence
  ENSG00000257359_1 (sequence is synthesized)
aagttgggagacaaaagaaagatgggaaagaaaaaaataaggacatgcccataaaatctgagagtctgagccctgctggtctctagcatgaacaaagagctttaaaccagaggcttgata

SEQ ID NO: 950122 - DNA, 120 bp, Artificial Sequence
  ENSG00000257359_2 (sequence is synthesized)
gctctgctgggtccttttccatgggttctgaaggtgtgtcttggagctttttcttctgtggggctgtgctggagaagacgccaactggagcccactccagatagagggggacatgatgga

SEQ ID NO: 950123 - DNA, 120 bp, Artificial Sequence
  ENSG00000257359_3 (sequence is synthesized)
actgcagagacaagagtgatggccctgtgggtcttcattacaacacactgctggggagggactcagtcccatgcagatcacagcccaagggtcacagaggatgggcaactcacccaagaa

SEQ ID NO: 950124 - DNA, 120 bp, Artificial Sequence
  ENSG00000228959_0 (sequence is synthesized)
ttacaggtgagactcatcttagacccagtcaacctgagctgagaaagacaaagaataggaatagcggaagaaatttacatggctaaagaggaccaacgatgaaattacttttaaaagaac

SEQ ID NO: 950125 - DNA, 120 bp, Artificial Sequence
  ENSG00000228959_1 (sequence is synthesized)
gcggacggatcacgagtcaagaggttcctaataatgctggacaacttccagtttggaaatgaccaactccccgggtgttgtctaatcacattgtccaaatgctacgacaacaacttcttg

SEQ ID NO: 950126 - DNA, 120 bp, Artificial Sequence
  ENSG00000228959_2 (sequence is synthesized)
agaaacatccacaaactcaggtgatcttacgcctgagtgaagaatataattgttactctaaaatgtatttggcgtattgaaattatatggtactgcaaaataaagcattctcagaatgat

SEQ ID NO: 950127 - DNA, 120 bp, Artificial Sequence
  ENSG00000228956_0 (sequence is synthesized)
atgaagagacttcaggtcaggaaagcctgaactttctcatccaacacccgttcaagtcggaggatgctgattaattcatgatggaaaggtatcaatttcacagcccagacctctacattc

SEQ ID NO: 950128 - DNA, 120 bp, Artificial Sequence
  ENSG00000228956_1 (sequence is synthesized)
ttgaaatgctcttctcatgggagacattaaataagctttgaattaactaaaaatatccaacccgagcaggataaaactgatcatcctgaggatattgcccttggagttaattttttgaga

SEQ ID NO: 950129 - DNA, 120 bp, Artificial Sequence
  ENSG00000228956_2 (sequence is synthesized)
gaaataaaacaataaacatcataagacacaaaccccaagcaactgatctcactgttaaaatccaacctgagaacaatggaatgggaagctgcataaaacaccagtgagctctatcccaac

SEQ ID NO: 950130 - DNA, 120 bp, Artificial Sequence
  ENSG00000228956_3 (sequence is synthesized)
aaaaggattggacagggctagtagaagtctatatgttgtggtggaaaacaacctcagccctatagtccaacatttgcctatcaaaacttgtcctatgatttacaaaactagaacctcact

SEQ ID NO: 950131 - DNA, 120 bp, Artificial Sequence
  ENSG00000228956_4 (sequence is synthesized)
gcatgtacctctggagtcctgagccacaaagtaagaaactcagctaccctgatgttgccatgttaaagagactatctggaaaagccacaaaaagatagagaaagatgctaaaggggcctc

SEQ ID NO: 950132 - DNA, 120 bp, Artificial Sequence
  ENSG00000228956_5 (sequence is synthesized)
tgctgttctggcccccacctaattgagccatcagacagcatgaaccatcagatatatgaatgaacaaggcttcaggtgattccagtcccacctacaatctgattcagccatatagagact

SEQ ID NO: 950133 - DNA, 120 bp, Artificial Sequence
  ENSG00000228956_6 (sequence is synthesized)
agtaaactgttcctgtttctccatcttgacaggaagcagaagttctccttagctgatttttcttcttgccttatactgggttctttaacaccagaacaaaaataaataaataaaagaatc

SEQ ID NO: 950134 - DNA, 120 bp, Artificial Sequence
  ENSG00000228956_7 (sequence is synthesized)
ttttcatctctgttgataggaagaaccaatgatgtgatccctggatactggcaattgttgcccaagaaaacctctccccttgctgtgggactgctgggcacccaaataatgcacccaaat

SEQ ID NO: 950135 - DNA, 120 bp, Artificial Sequence
  ENSG00000228956_8 (sequence is synthesized)
aatttgatagctcttgttacacagctcttcttggactaaaaggccctcagcattcctgtcaatttctacactcctgaagcttcatctggagacctctgtggattctataactcaaagacc

SEQ ID NO: 950136 - DNA, 120 bp, Artificial Sequence
  ENSG00000228956_9 (sequence is synthesized)
caggctgacggctggtggaatagctaccatctcaaacatggcgtgatgctgcatcagagagaaaaataagctcttgcattgacaatgaaatgtctaccctgtagtgacttgtgcttactt

SEQ ID NO: 950137 - DNA, 120 bp, Artificial Sequence
  ENSG00000228956_10 (sequence is synthesized)
gggagcttagatgtggaagctctttggaaaccaagaaacactctgaaaatgaaaaggcataagaatgtttatcacagcatggcatatattggaagtttagtaaatgaagatacatccaat

SEQ ID NO: 950138 - DNA, 120 bp, Artificial Sequence
  ENSG00000228956_11 (sequence is synthesized)
ctgacattctattcacaaccacaaagagataatgtagaaacatatttagtaatgtgagaaaatactaaatattaagtgaaaaagggtcttttattatgtcttccttgaagtgctctgatc

SEQ ID NO: 950139 - DNA, 120 bp, Artificial Sequence
  ENSG00000228956_12 (sequence is synthesized)
agatctgcaatactggagatgtaaattcaactctactttttttttcttttaaaaagaagagcaacataatccttagtgatcctaaatattattcaacttatcttaacattcaatttcttt

SEQ ID NO: 950140 - DNA, 120 bp, Artificial Sequence
  ENSG00000228956_13 (sequence is synthesized)
acatattctgaaaggttatgttgtacattcttttaagaagacttcagggttttctactgaaagaatttgaaaatcaagacttggaagggtcctgagagcaacattctatagaggaaaagg

SEQ ID NO: 950141 - DNA, 120 bp, Artificial Sequence
  ENSG00000228956_14 (sequence is synthesized)
ctaaaaagtaccccaggatcttcagtagcagtgatagtatggctttgttttccttcactggactaggctccataactaagcgtcttatatttggaagtcaaaatgcatttgtttgtcttc

SEQ ID NO: 950142 - DNA, 120 bp, Artificial Sequence
  ENSG00000228956_15 (sequence is synthesized)
ttacaacatagagaacacatgcttacaaaatcaaaggagagcattgactattgtgacctgtttaacatatttctccgctttgcttcggatgagagatttcaaatctcatcattaatgtgg

SEQ ID NO: 950143 - DNA, 120 bp, Artificial Sequence
  ENSG00000228956_16 (sequence is synthesized)
gggagcttagatgtggaagctctttggaaaccaagaaacactctgaaaatgaaaaggtctttcccccaaatgtgataagaatacatagctacagagggaggagccaagatggccgaatag

SEQ ID NO: 950144 - DNA, 120 bp, Artificial Sequence
  ENSG00000228956_17 (sequence is synthesized)
ccccaatactaacaacaattgcagaagaatcaatgacttaaacaaaaatgtggccattgaaggaatagaaaatatagtgagtttagtgtaaatttaaaagtgatttataagtaacataca

SEQ ID NO: 950145 - DNA, 120 bp, Artificial Sequence
  ENSG00000228956_18 (sequence is synthesized)
tcatgtaagcccttaagtaaaagtgccatcaaatgatttctcagaaattataaagaaacaaaaggaccataaacaagataaggtggcatgaggaaacattacaagtacctttcagagctg

SEQ ID NO: 950146 - DNA, 120 bp, Artificial Sequence
  ENSG00000228956_19 (sequence is synthesized)
actggcaaagaaactcctgaggtgacggttctaccccaatattacttcttcgaagagcaacctaactcttaggtggcctagaggggcaagactggtgtggcaaattgggatcagcagtgt

SEQ ID NO: 950147 - DNA, 120 bp, Artificial Sequence
  ENSG00000228956_20 (sequence is synthesized)
acagatgagaaaactgaaacattgagaagtcaagtaacttgctcaagattatatagctagtgcatagaggggcaaagatttgaaccagattgcctggttccacatgcactttaacctgct

SEQ ID NO: 950148 - DNA, 120 bp, Artificial Sequence
  ENSG00000228956_21 (sequence is synthesized)
ttatttaggcttttgaaagcaacctaaatagctaacattgactaaataagtgcagtatacctggtctgtgtgacattttgcaggtattaaaaagtgaacattctgaacccttttagcaat

SEQ ID NO: 950149 - DNA, 120 bp, Artificial Sequence
  ENSG00000228956_22 (sequence is synthesized)
atggcaaatacttctgatgtgatgtatgcatataaatatgatcgaaagcaaatatcccaaaaggttgatggcagttatgtcaggttagtagcacaatagtttcttttctcattttctcac

SEQ ID NO: 950150 - DNA, 120 bp, Artificial Sequence
  ENSG00000228956_23 (sequence is synthesized)
atgtattagatcagagcatgggctcagactgcctgtgtcatctcttattagatgtatgaccagggacaagttattgaccttttgtttctaagtctctaagtttatcctgtaaaatgaaga

SEQ ID NO: 950151 - DNA, 120 bp, Artificial Sequence
  ENSG00000228956_24 (sequence is synthesized)
taattgtagtaactacctaataacatgattgtaaggattaaattatttagaacactatttgttacttggaaaatatgcaatcataagctattttgttgttattgttattttactaccaaa

SEQ ID NO: 950152 - DNA, 120 bp, Artificial Sequence
  ENSG00000228956_25 (sequence is synthesized)
gcttattgtttcagagcccctaggtgaccaggcaaaatggcagttccttccagctggtcctcagatgggcacatctattagcctctgctcttgtaagaagttagctgcagaacccacatg

SEQ ID NO: 950153 - DNA, 120 bp, Artificial Sequence
  ENSG00000228956_26 (sequence is synthesized)
tgaatccttgtagtgctttatcaaatttctactatgaactaagaactgagtgctatgggagacacaaaggagagtcaggactctggagaagatcaaatgggagcttagatgtggaagctc

SEQ ID NO: 950154 - DNA, 120 bp, Artificial Sequence
  ENSG00000228956_27 (sequence is synthesized)
gtttttagctctcacctgtggtctttcttcatcatgcacctcctagattcaaaagttcagcagggacatgtcaagctatataaataaaaacaaactaagaaaaaatgtaacattccatac

SEQ ID NO: 950155 - DNA, 120 bp, Artificial Sequence
  ENSG00000228956_28 (sequence is synthesized)
tgaaagaccctgaaggacttgagacgtgaagattttctaccacggtctttgcctgtattatttctgacagctgttcctttctactccctcttgcacacatctttagttactccctgttct

SEQ ID NO: 950156 - DNA, 120 bp, Artificial Sequence
  ENSG00000228956_29 (sequence is synthesized)
ttctccatccctctgataaaatctagagttcccccctcaaattagaaaattaaaaaaaattaaaaatctaaaattaaaatttaaaaaatttttaaaaatctagagtttaaaaaaaatgtt

SEQ ID NO: 950157 - DNA, 120 bp, Artificial Sequence
  ENSG00000228956_30 (sequence is synthesized)
ctcaggcttgtgaaccatattgttagttcacaattaagaatgatgtacatctattggacaagttttaattaattctttcccttggctgattagtaaatttctgcagtgagtacaaatgtt

SEQ ID NO: 950158 - DNA, 120 bp, Artificial Sequence
  ENSG00000228956_31 (sequence is synthesized)
gcaacatctcagaaatgaaattacaatttagttgggataaattgtcttataacttcatttttttacattaaagctataattgaggggtattatatgctgtttatcactgcaatgaaaatg

SEQ ID NO: 950159 - DNA, 120 bp, Artificial Sequence
  ENSG00000228956_32 (sequence is synthesized)
tagtcagaatgaacttctcgaggctgttaaactgcctcttattagcattgaaactatactcacagcctattatcttaggctatattttttggtataagggaattgctatcaaagtgtact

SEQ ID NO: 950160 - DNA, 120 bp, Artificial Sequence
  ENSG00000228956_33 (sequence is synthesized)
taccaacttcatctctctttaagaatacaatattagtttaaaagattgttcaacttaaagcaatcttgtagagattgtcacccatgattgatgctggcataagaatgtttatcacagcat

SEQ ID NO: 950161 - DNA, 120 bp, Artificial Sequence
  ENSG00000228956_34 (sequence is synthesized)
acccaggaacagaaaaaaggcattagtggaaaactggcaaaatctgaataaagtctgtaattcaggtaatgatattgtaccaatgttaatttcttacttttgatcattgtaccccggtca

SEQ ID NO: 950162 - DNA, 120 bp, Artificial Sequence
  ENSG00000228956_35 (sequence is synthesized)
tgtaagatgctaacattagaagaacctgagtgatgggtatatgggagctcagtgctatctttacaaatctgtaaatgtacaattatttcaaaataaaaagttaaacatacaaaacatcta

SEQ ID NO: 950163 - DNA, 120 bp, Artificial Sequence
  ENSG00000228956_36 (sequence is synthesized)
cactcacaagtgattgcccagagctacttacctggctccaatctaccactggtgccatgacacccaggatgcagctgtaggaacaccactgggtccctggatgtcatgtaagcccttaag

SEQ ID NO: 950164 - DNA, 120 bp, Artificial Sequence
  ENSG00000228956_37 (sequence is synthesized)
gagtctggaggttgcttttaacaaactgaattgtattgctgctgggctagttaacattcatattagactttcaaaacagtgtggagaaaacagtcagctctttgatggcatttatgatgg

SEQ ID NO: 950165 - DNA, 120 bp, Artificial Sequence
  ENSG00000228956_38 (sequence is synthesized)
acacacagctgggctaatgaagacaatatgtcaaggcttgaagagcaatgattttacagatttttgagacatctatttgggtttatagagctgatttcctctttggaggctgcattctga

SEQ ID NO: 950166 - DNA, 120 bp, Artificial Sequence
  ENSG00000228956_39 (sequence is synthesized)
attaatgataaccacctttatagagaaaacattgaatatgaagtgtccaaggaatttaggctaaagaagtaattctaggactagtcagacaaagagaaatactgtctgaaatgactgaat

SEQ ID NO: 950167 - DNA, 120 bp, Artificial Sequence
  ENSG00000228956_40 (sequence is synthesized)
cgtaacccccaagaggaaaggagcttggagccctgaatcagagtagaagacaggctgaatgaataccagccttggactgttgtgtgaatgaaaaacaagttttgagatttgtgtggttta

SEQ ID NO: 950168 - DNA, 120 bp, Artificial Sequence
  ENSG00000228956_41 (sequence is synthesized)
ctctgaaaatgaaaagggatctcaacttttctcttcccgctccagctgcactatgtatccgtgcttggctctcagttgttggattctcatgtctcctttttcacagtggctcaggtggaa

SEQ ID NO: 950169 - DNA, 120 bp, Artificial Sequence
  ENSG00000228956_42 (sequence is synthesized)
gcatggatgtagttgtactccagtacaactgcaaaaagcagacagctggctgggtttagcctacgggccatagtttacacaactcaatctaggtgattgcctggtaactttgtgattgta

SEQ ID NO: 950170 - DNA, 120 bp, Artificial Sequence
  ENSG00000228956_43 (sequence is synthesized)
acattaaataagctttgaattaactgaatgtacagggtgtaccatgaacaattctgacatgtgatttaatctatgtgggactacattttaaatacatttgggaaggattgaacaatgaag

SEQ ID NO: 950171 - DNA, 120 bp, Artificial Sequence
  ENSG00000228956_44 (sequence is synthesized)
caatattggtactgaaaatgagacatgtgcaccaatgaaaagtccatcagggatttgctctgccatatgggaatcaatgctccatcagacagctttacaaagctgccatgtgtgattcat

SEQ ID NO: 950172 - DNA, 120 bp, Artificial Sequence
  ENSG00000228956_45 (sequence is synthesized)
attcgcaaactgtgtattatttttattgtctatttttctaattttttctcatccctgaatccttggtaaagtttggtttacatattctttcatcacctcagtaaaaaaagaaatacaaat

SEQ ID NO: 950173 - DNA, 120 bp, Artificial Sequence
  ENSG00000228956_46 (sequence is synthesized)
ataatggaccctttgaaaccagggtggtggtaactatgataatatttcatagatttccaggaaaatgtaaatctcagggaagagaatttaagataaatgtccagatgcttattagaagta

SEQ ID NO: 950174 - DNA, 120 bp, Artificial Sequence
  ENSG00000228956_47 (sequence is synthesized)
ccaatctaccactgggtcagacgtttgctgaattcagttctgagcttttgaaccaaaagcagatcttcagaacaagaaacaagataataaaagagaaacatgaagaaactgaagatgatt

SEQ ID NO: 950175 - DNA, 120 bp, Artificial Sequence
  ENSG00000228956_48 (sequence is synthesized)
ggagaaatatgaatcaagatgattagacctagcagagggctggctggatggcatttatgttgacaatggactcctacacagaggatgatcatggtctaggacataatagtcattcaatca

SEQ ID NO: 950176 - DNA, 120 bp, Artificial Sequence
  ENSG00000228956_49 (sequence is synthesized)
cttcccatattgagtcattgtctgtttgtaacttccaaacaagaaaaagatattaatggtcaccttggctgtttccttgtgacctccaacatggctcgcatttaaaattgaatctggact

SEQ ID NO: 950177 - DNA, 120 bp, Artificial Sequence
  ENSG00000228956_50 (sequence is synthesized)
ttgaaatgctcttctcatgggagacattaaataagctttgaattaactgcacctgttcattccattccaacctggctgttctcaagggcattagaagaagcaagaaaagaagatattgtg

SEQ ID NO: 950178 - DNA, 120 bp, Artificial Sequence
  ENSG00000228956_51 (sequence is synthesized)
accagtggttcacagcaatgcccagaagagttaaaagtggtctgatgaagagtgtctagccctgcagtgttgggaggtaggaagcaggatgttgcagaaactcagcagcctgggtgtcaa

SEQ ID NO: 950179 - DNA, 120 bp, Artificial Sequence
  ENSG00000228956_52 (sequence is synthesized)
ggcacataagtcaagaaggccactttgggcagcaaataaagaaaccaagctgacacccagatatggatagtgagaaaagctactgttaagtgaagtacacaggactttgggacgtaggta

SEQ ID NO: 950180 - DNA, 120 bp, Artificial Sequence
  ENSG00000228956_53 (sequence is synthesized)
tacataataaatcattagagaaatgtgaattaaaaccaatgagttattactacagagtcactagaatggctacaactaaaagactgacaatactaagtgttgttgaggatgtgaaacaag

SEQ ID NO: 950181 - DNA, 120 bp, Artificial Sequence
  ENSG00000228956_54 (sequence is synthesized)
tggaatcaccatacactgataatgagagtataaaatgacaaaacgacctaggaattagtctggcaatttctcatgtaaacatacacctgtcctacgactcaccatttatgcttttaggtt

SEQ ID NO: 950182 - DNA, 120 bp, Artificial Sequence
  ENSG00000228956_55 (sequence is synthesized)
ttactaaaaagaagtgaagacatgtgtcaacaaaaagatttgtacaagaatgtttaaagcatccttattcataatagccagtcactccaatgtccatcaataaaacagtagataaacaaa

SEQ ID NO: 950183 - DNA, 120 bp, Artificial Sequence
  ENSG00000228956_56 (sequence is synthesized)
catgtgatttgtttgaacttccaaggctaatactttcagctcaacagttatctatattataacataccgtaatgccttatggagagttaaaaattctcatttcaactgtcctcttctgca

SEQ ID NO: 950184 - DNA, 120 bp, Artificial Sequence
  ENSG00000228956_57 (sequence is synthesized)
aagctttaataagtaatgcaaaaaactcaccccctttcatgtattgatgaatataggtagataaaaattttagagggaaaaataggggctgggtcaccaatatgagaacatagataagta

SEQ ID NO: 950185 - DNA, 80 bp, Artificial Sequence
  ENSG00000228956_58 (sequence is synthesized)
gccggggcgtcccccgcgggagcccgcagccacccgggacgcgcatccagacgtggcgcttcggaccgggcacgctgcgc

SEQ ID NO: 950186 - DNA, 80 bp, Artificial Sequence
  ENSG00000228956_59 (sequence is synthesized)
ggcccgcctccccagcgcccgcccggcttctccccctggcggtgggagcctcggcggccgctggcgacactaggcgcact

SEQ ID NO: 950187 - DNA, 80 bp, Artificial Sequence
  ENSG00000228956_60 (sequence is synthesized)
cactgaagcccgagccgagccgagcccgagccgccgccgccgccgccgctgctgcgcaccgctcccgggctccctcccag

SEQ ID NO: 950188 - DNA, 120 bp, Artificial Sequence
  ENSG00000228956_61 (sequence is synthesized)
accacattttcttgatgttgagcagaatccagttcacagactagaaaatgttttattccttgtaggctcagcagtacagaaacaaggtggggaaaggaaaacaatttctaaagagtgaat

SEQ ID NO: 950189 - DNA, 120 bp, Artificial Sequence
  ENSG00000228956_62 (sequence is synthesized)
ataaatgcccatgccacctgctttacttctcataattcactaaacctcctttacttctcataattcactaaattcactatgctctgcatttcatctgtggtgtgatgagttaaaattgcc

SEQ ID NO: 950190 - DNA, 120 bp, Artificial Sequence
  ENSG00000228956_63 (sequence is synthesized)
ttgttgggaattttttcagaacatttgtccacttgaacaaaaatcaatattctgtctcttaaacagaagcatttgaacaagttgcactatgcggaggtgagaacaataattatattggta

SEQ ID NO: 950191 - DNA, 120 bp, Artificial Sequence
  ENSG00000228956_64 (sequence is synthesized)
catgtcttaaaaattacccagaagcagatgagaatttgtgaataaatgactcattaagaaagtgtccccagaagaagtcagtaagtgagtgggggcatgaggagaggaaaagggaagtca

SEQ ID NO: 950192 - DNA, 120 bp, Artificial Sequence
  ENSG00000228956_65 (sequence is synthesized)
gaagctctttggaaaccaagaaacactctgaaaatgaaaagggaacagtttgtggacttgcgctggcccttggaccacacttcgagtgacattgttatagatgacacggtctcttatagg

SEQ ID NO: 950193 - DNA, 120 bp, Artificial Sequence
  ENSG00000228956_66 (sequence is synthesized)
ccatctcattcccaacatagatctgggtacatgagtggggtcttattataatcttgtgacacccttggatcatgcactaccctctaaataatcaatagtttctactatagagaggctcaa

SEQ ID NO: 950194 - DNA, 120 bp, Artificial Sequence
  ENSG00000228956_67 (sequence is synthesized)
tttatcttctccctggaattgggaccactgaaatataactagaacccaactgatcttttgagatgttgtgtgcttgcccttactgctactgccgtagttctgaacatttccccaagcatc

SEQ ID NO: 950195 - DNA, 120 bp, Artificial Sequence
  ENSG00000228956_68 (sequence is synthesized)
aaaaaggccccatggcctcttttcccctagacctctgccagtccaccaacactctcagtggggaagtaagaagcctggtggatcctgcttcccacacaaaggccatgatgagacagatgc

SEQ ID NO: 950196 - DNA, 120 bp, Artificial Sequence
  ENSG00000228956_69 (sequence is synthesized)
tttctaagtccgatatatctacccactttctgctgtcacctctgtacctcctgagtcacatggaatgtggtgctgagccaaatggtcagtcttctagaagcagtggaatgttggaggcag

SEQ ID NO: 950197 - DNA, 120 bp, Artificial Sequence
  ENSG00000228956_70 (sequence is synthesized)
cttataccttagctgattcttaaattttcaggaattttgtgagccagtttttaaacacagccattgttgaaaattaaacaatataaacttataatcaaatatattaaaaataaagataat

SEQ ID NO: 950198 - DNA, 120 bp, Artificial Sequence
  ENSG00000228956_71 (sequence is synthesized)
ttctgaattctttcccagaggcagtgacaaaaatcaaacatccgatgtgttctttacctttcagtaagctcagcctccctgcttgtgtcacatctctaaacatacgtacatgcgtgattg

SEQ ID NO: 950199 - DNA, 120 bp, Artificial Sequence
  ENSG00000228956_72 (sequence is synthesized)
aaactgtctattgaaagcaatattacattaacattatcaatactgaattagagaaaatatctatcaatgtcaccaattccacctgtctcttgatgtatgactttttacctgacaggctaa

SEQ ID NO: 950200 - DNA, 120 bp, Artificial Sequence
  ENSG00000228956_73 (sequence is synthesized)
ataacaatagaaagttctttttaaaaaatagaagagttgctatgcagggacttttttggaattaagtgccccagagaacctagaaatgtgctttaaaactttttgtttcacctggcagat

SEQ ID NO: 950201 - DNA, 120 bp, Artificial Sequence
  ENSG00000228956_74 (sequence is synthesized)
ccaaaaaaaatttggaagcttttggttgaattccctcattacttgaagttgttttatgaaaattgaatatatatatctgttaggttaccaagacttatggttagctatcttaatggctag

SEQ ID NO: 950202 - DNA, 120 bp, Artificial Sequence
  ENSG00000228956_75 (sequence is synthesized)
ccctaccaatggaactgacaggattttaccagggaggatattgcagtacctgtaagaggaagggatacaaattggcacttcatacatttgtgagaacaattgcctttaatgtgtctattt

SEQ ID NO: 950203 - DNA, 120 bp, Artificial Sequence
  ENSG00000228956_76 (sequence is synthesized)
aaccaagaaacactctgaaaatgaaaagggtatctttttttccttttctccctttaccataaatttcatgatggcacttaacagagccagtcgttttggtatttaaaaaatgtttggtga

SEQ ID NO: 950204 - DNA, 120 bp, Artificial Sequence
  ENSG00000228956_77 (sequence is synthesized)
aataattagttattggttgaatgaatgaatttataagtgaatacatgaattaaacaaaggtatggagtaggaaagcacataatatgagcagagaataagggattctatttggaagcatgc

SEQ ID NO: 950205 - DNA, 120 bp, Artificial Sequence
  ENSG00000228956_78 (sequence is synthesized)
ttgaaatgctcttctcatgggagacattaaataagctttgaattaactgtaagtaaataaatattcaattatttgaatagcactatattctgtttcattaaaaatatttcttacttgatt

SEQ ID NO: 950206 - DNA, 120 bp, Artificial Sequence
  ENSG00000228956_79 (sequence is synthesized)
tttctcaccaataaaagtattcaaaaatgtttaattcaatcatcatcacatcaagaattacgatattatctccgaattatataagtgattttctggtcatgcacataccagttgttctta

SEQ ID NO: 950207 - DNA, 120 bp, Artificial Sequence
  ENSG00000228956_80 (sequence is synthesized)
gcacataccagttgttcttactctatataaatgtacttttttgttaaaatataatcatttagtttaaaattgagatatccttgttactggagaatttcaaatatatttaacaacaacaat

SEQ ID NO: 950208 - DNA, 120 bp, Artificial Sequence
  ENSG00000228956_81 (sequence is synthesized)
aaagtttaatgtaacaaaaatggcataaaaggagtcaaaagtttttaaaaaatatgttaatgcagtagattaggtgctaattttcttaatatactaataactcaataagagaaattttgt

SEQ ID NO: 950209 - DNA, 120 bp, Artificial Sequence
  ENSG00000228956_82 (sequence is synthesized)
gcttagatgtggaagctctttggaaaccaagaaacactctgaaaatgaaaaggtgtacaaaaagggaattgaagaggaagtcaaataaagaaaagaaaatactacccgtgcaacttgcaa

SEQ ID NO: 950210 - DNA, 120 bp, Artificial Sequence
  ENSG00000228956_83 (sequence is synthesized)
catagatgtaccaactgaaaaatgacatacagatggtccccgatttatgatggctcaacttaagattttttgactttacaatggtgtgaaaacaatatacattcagtagaaactgtactt

SEQ ID NO: 950211 - DNA, 120 bp, Artificial Sequence
  ENSG00000228956_84 (sequence is synthesized)
agagtacccataaaatcattccgtttttcactttcattacagtattcaataaactccatgatatattcaacattttgttataaaataagccttatattagaggattttgatcaaccgtag

SEQ ID NO: 950212 - DNA, 120 bp, Artificial Sequence
  ENSG00000228956_85 (sequence is synthesized)
cttggaaacagtttgatcttttctacccttgtttttaggcattgctaggtagaccagagtagtgttagtcatgggttaattattcattactactgaatcaagacccttcagaataccata

SEQ ID NO: 950213 - DNA, 120 bp, Artificial Sequence
  ENSG00000228956_86 (sequence is synthesized)
ctcaatgccacataaatcttgaggttttccagtcttcctggtggatggcaggcactattctccccagtgagtgctcactaggtacattttgggtggtcctttctctggtcgtaggtagta

SEQ ID NO: 950214 - DNA, 120 bp, Artificial Sequence
  ENSG00000228956_87 (sequence is synthesized)
tctttacatgaatgcatttacccatactcagaatgagggacattttgtagaaatctgaagttctctctctgcacagctctttcttttctggtaatctgttctgtgaactcaagctgtttt

SEQ ID NO: 950215 - DNA, 120 bp, Artificial Sequence
  ENSG00000228956_88 (sequence is synthesized)
aactcccttaaggtagtaaggtagaggaatcacagagtccacatcacttgtttcacatatctgagggctcagtatcctgcattgcctggtgactcagtgtcttaaaaactattgttcata

SEQ ID NO: 950216 - DNA, 120 bp, Artificial Sequence
  ENSG00000228956_89 (sequence is synthesized)
agcacacgtgaatgacctaaagatcttatacgaatgcagattttgattctggaggtcttggatgggcccgacagtctgcatttctaataagctcccagaaaaatatccaacccgagcagg

SEQ ID NO: 950217 - DNA, 120 bp, Artificial Sequence
  ENSG00000228956_90 (sequence is synthesized)
ataaaactgatcatcctgaggatattgcccttggagttaattttttgagagaaataaaacaataaacatcataagacacaaaccccaagcaactggtaaccctgggatataaaaacatat

SEQ ID NO: 950218 - DNA, 120 bp, Artificial Sequence
  ENSG00000228956_91 (sequence is synthesized)
ccattgatatttaacctaccacagattggcactaaatgtaacaacagtaggactaggacaacttgggatcatgtgaacagaccagaaactacagactgcaacagaaatgtgcagattgcc

SEQ ID NO: 950219 - DNA, 120 bp, Artificial Sequence
  ENSG00000228956_92 (sequence is synthesized)
gtttctacagccttgcagcgatgaaaccccatgtcttatatacttggtgtttcctctgtttgattctaatgagcttctaatctctactgatggtgtttctctttctacctcatcagccca

SEQ ID NO: 950220 - DNA, 120 bp, Artificial Sequence
  ENSG00000228956_93 (sequence is synthesized)
gggctcattcattttatcctgtttcacctatgctatagataatagaaaacccaaggccactcaaacataagtagcttgatcaatgctaattcctgatcaagtcaacccaatatccagcat

SEQ ID NO: 950221 - DNA, 120 bp, Artificial Sequence
  ENSG00000228956_94 (sequence is synthesized)
caattagataatgtaaattgtatttcctcactaatttattataaattataataaaatgtaaagcatagtgtttataatataccagacattatcctagctcttttgcatgaattgactttt

SEQ ID NO: 950222 - DNA, 120 bp, Artificial Sequence
  ENSG00000228956_95 (sequence is synthesized)
actacattttaaatacatttgggaaggattgaacaatgaagtggagcccatcaatattggtactgaaaatgagacaatgtggaaactgaggcaaagtgaagttatgctgaaggctacata

SEQ ID NO: 950223 - DNA, 120 bp, Artificial Sequence
  ENSG00000228956_96 (sequence is synthesized)
ataaatagctgttgagcaaaatgggattcaaactactcaagatgcctagctcctaactcatgctaataataataataatttgatgccatgacacccaggatgcagctgtaggaacaccac

SEQ ID NO: 950224 - DNA, 120 bp, Artificial Sequence
  ENSG00000228956_97 (sequence is synthesized)
taaaaaaatgtgtgacattcagaataaaataaaaatgaaatactggttttcagccatcacttgagcaaaactgcaaagatacaatgagactcaggcattcccatatactgtggatgggag

SEQ ID NO: 950225 - DNA, 120 bp, Artificial Sequence
  ENSG00000228956_98 (sequence is synthesized)
ccgtgggcgtaggaccctccgagccagttcttaagatctgctatgaaaaatagataaggattttgaagttatccatggacttttggagtattgttaataagaagtccagaatcatcatga

SEQ ID NO: 950226 - DNA, 120 bp, Artificial Sequence
  ENSG00000228956_99 (sequence is synthesized)
ttttggagtattgttaataagaagtccagaatcatcatgactttcagtctttgatatgtgacttgttctttctagaaccttatgaaaaatatccaacccgagcaggataaaactgatcat

SEQ ID NO: 950227 - DNA, 120 bp, Artificial Sequence
  ENSG00000228950_0 (sequence is synthesized)
ataatcctgccggaacacactcttcttgctgcattaggatccaactggaaaacataaagatgaattgctgtaggctggaaaatcaattaggaaaaagagggatgtgattcagacacagga

SEQ ID NO: 950228 - DNA, 120 bp, Artificial Sequence
  ENSG00000228950_1 (sequence is synthesized)
gggaccttgggtgccagcttgctgggtccttacttacttggtccatcttctggctggaaggagcacctgggctctcagagtgccccccgactctcagcagctccttttctggcccaagag

SEQ ID NO: 950229 - DNA, 120 bp, Artificial Sequence
  ENSG00000228951_0 (sequence is synthesized)
ggccgtgaataacaggctaccttgaattggtgtttcctttgcgtattttgtttctaagcaaatcgagtcccaggtagagttttgcccttgagcagcttcatgaggtcaaggaggggcgct

SEQ ID NO: 950230 - DNA, 120 bp, Artificial Sequence
  ENSG00000228951_1 (sequence is synthesized)
cactccactctgcacggaaacactgagtggaatgaaaatacaaccggagagaatgtcctccccaccagaaggtcgcctcgagacaggcctccacgcatcgttgctgacctcacacagtga

SEQ ID NO: 950231 - DNA, 120 bp, Artificial Sequence
  ENSG00000228951_2 (sequence is synthesized)
tacctctgcatgccggggagcaattccatccaagaatgtctgagacgcgctctgcaagatgagttggcagcatctctgtgcctctggttttgccaggctccaccaacatcccgctaagaa

SEQ ID NO: 950232 - DNA, 120 bp, Artificial Sequence
  ENSG00000228951_3 (sequence is synthesized)
ctcttcaccctcaagtgcactgaggggaaccccagtgaaggccaatgagggaaaccacacatcactgagggccgacggaggcccccaaagctcagatcgctgtgctcgccagtaggtccc

SEQ ID NO: 950233 - DNA, 120 bp, Artificial Sequence
  ENSG00000228951_4 (sequence is synthesized)
cggaggggaggactgcgccagcatgagaagaccagagagcaagtaaatggaaatttggcgagatcctgtggctgctgttggtggctgcagccagacaggaaaactgagatggtgtgagca

SEQ ID NO: 950234 - DNA, 120 bp, Artificial Sequence
  ENSG00000228951_5 (sequence is synthesized)
gaaagggctggaaggagttggctttttccaagaaattacagcggaatcttcttccaagaggctgggggcctctgcagacatgatctcattacttaccccccaaatcccccagcttcccta

SEQ ID NO: 950235 - DNA, 120 bp, Artificial Sequence
  ENSG00000228951_6 (sequence is synthesized)
cggaccaaggaccaggggtctctgcccagtcctagctccaaggaaactcacacttggcagattttcctaatcggagctggccttgaagtttgctcactgataatcaccagaaagtcaccc

SEQ ID NO: 950236 - DNA, 120 bp, Artificial Sequence
  ENSG00000228951_7 (sequence is synthesized)
caacaatgggtgatgccagagtgtcctcaagcttcaagggtccgtaaaaacacttgactcccccaggacaaaaatgactgggggaaacatgcagttcttcaaagagaacggtttcattct

SEQ ID NO: 950237 - DNA, 120 bp, Artificial Sequence
  ENSG00000228951_8 (sequence is synthesized)
agaagcacagcatctgtgaagctttcggaaattatccctctggctccagccctttctagagatctccacgcacatctctgcatgaaggtttcagagtcactggatttcccagggccttct

SEQ ID NO: 950238 - DNA, 120 bp, Artificial Sequence
  ENSG00000228952_0 (sequence is synthesized)
ttcaggccatctactgattggatgaggcccaccagcattctgaaagacaaggaatctgagacctggctgggagaagaggacttgcctaaagttatcccacacagcaaattagttggaaaa

SEQ ID NO: 950239 - DNA, 120 bp, Artificial Sequence
  ENSG00000228952_1 (sequence is synthesized)
tagttgagtaaatatcctggagcccagccaagtaatgaagccagaattcagaaagctgttttggctagatcttggatttttacaataaagggtctgtaagggatatttgtgaaaaatgtt

SEQ ID NO: 950240 - DNA, 120 bp, Artificial Sequence
  ENSG00000231453_0 (sequence is synthesized)
tggttctgtgttcttgacgtaattaggaggccacgcagctctccaacactccgttaaacaaatatctctttcttaggaagcggagagaggggcagaaaacgtgcacctcgccacccaccg

SEQ ID NO: 950241 - DNA, 120 bp, Artificial Sequence
  ENSG00000231453_1 (sequence is synthesized)
gacaagccgagaggaccttgtctttgcttgaaaagttttctagataaatcgctcgggtggttctaagctatgacgaactagaggctgggcccggttcttctccagaacagcgtgtggatg

SEQ ID NO: 950242 - DNA, 120 bp, Artificial Sequence
  ENSG00000231453_2 (sequence is synthesized)
taaaggagatgaaatcgtcctcccccactgctttctttttcttccccatataaatcagtcatataattcattcgcattgtttaaggtacattgatcaatctaatggcttgtaatagtctc

SEQ ID NO: 950243 - DNA, 120 bp, Artificial Sequence
  ENSG00000231453_3 (sequence is synthesized)
ctaattgccacttgcagactcctgcaggctcagatttgaagagggaaggttccagccaagtccaccttaagcctgagtttgggcgactacagaatccaggaagaaaatctagatggcatg

SEQ ID NO: 950244 - DNA, 120 bp, Artificial Sequence
  ENSG00000231453_4 (sequence is synthesized)
gtcgctccggtctcagttctacaggggagggaagaaagggggtgttagtggggatatttgctgttcatttttcccgcaatctcccttccaaatcagtcactgattaatgagcaaagccca

SEQ ID NO: 950245 - DNA, 120 bp, Artificial Sequence
  ENSG00000231453_5 (sequence is synthesized)
tgccacaagttatagattactgtggactgaggatcattttgttaatatcaggcaagaaacttgccttacttgcatccctgtgtctgtatttacagtaacaacttccttagtcacaaactg

SEQ ID NO: 950246 - DNA, 120 bp, Artificial Sequence
  ENSG00000231453_6 (sequence is synthesized)
tgggggaggggtgtgttaaagggaaggaaggaaaagccatcctttatcccagagtgtcctggaggtatgcctacactcctgtttaacatcttgtggttgtagtgccttctccaagccctg

SEQ ID NO: 950247 - DNA, 120 bp, Artificial Sequence
  ENSG00000231453_7 (sequence is synthesized)
gatggaggaggaaagagttggaagcctcctcaaatctgcctatgaaagggtaaaactgaggaaactggtaccctagctatgagaagctgagtaatgatcagaatcctctggcctctggct

SEQ ID NO: 950248 - DNA, 120 bp, Artificial Sequence
  ENSG00000231453_8 (sequence is synthesized)
tttcttgatattagttcaggtctatgcaaaaaaattgctttagtgtctccaaaggtggttccattagagttggctgagacaatacatgtgcatcattttggaagagatgctcttaaaaag

SEQ ID NO: 950249 - DNA, 120 bp, Artificial Sequence
  ENSG00000231453_9 (sequence is synthesized)
aagaaagccactacagaatgccacatttgcttaggtctaagacccttctgtggtagtcggtgagggagggaggaaagtaaaaccccaagctgaataggccccccatagtttccgagtgat

SEQ ID NO: 950250 - DNA, 120 bp, Artificial Sequence
  ENSG00000231453_10 (sequence is synthesized)
gcagtaaacaaatctatgatgcttgttgaataatcttccaataattgcagtcattaaaatcatcacacagtctacagtcaccttccttcctttgacacaccagtctttcccttaattgtt

SEQ ID NO: 950251 - DNA, 120 bp, Artificial Sequence
  ENSG00000231453_11 (sequence is synthesized)
aatgcatttttggctcagataaacacatagaggccagcttaaaatatatggcccagatacatctaacagcagaaaattagttgtgtaacaaacgtttggactgtgcttaatagactaggg

SEQ ID NO: 950252 - DNA, 120 bp, Artificial Sequence
  ENSG00000231453_12 (sequence is synthesized)
aatagactaggggttttcaatttcttcagcagaccctacagaggcaagaaagatttgcatcttctaccactgctaaatagcagtgacgcctctgagatacaaaaaaaaaaaaaaaagaaa

SEQ ID NO: 950253 - DNA, 120 bp, Artificial Sequence
  ENSG00000231453_13 (sequence is synthesized)
cagagaaagaggaaccagaagaaagagaaactcgcgacaacagagttgccgaaagagaagtgttggcgcctcaaacttgaggatcagcttcttgggccccactccagggtgtcgcggggg

SEQ ID NO: 950254 - DNA, 120 bp, Artificial Sequence
  ENSG00000231453_14 (sequence is synthesized)
tcgggttctttccgccgccccccgaaagattctcagctaaccctttccccgccgagaccaagaggccctcactctgacaccactccgggagccaagctactgtaaggagctgataccacc

SEQ ID NO: 950255 - DNA, 120 bp, Artificial Sequence
  ENSG00000231453_15 (sequence is synthesized)
cctcgccggcgcgaaccgcccatctccccagacccgcccaccccctgctgcgaatccctgacgttctagcccggcgaaggtcctcttaaattaggaaacaatagctatttaagaagaagc

SEQ ID NO: 950256 - DNA, 120 bp, Artificial Sequence
  ENSG00000231453_16 (sequence is synthesized)
gcaaataacccgcgctctgcgcgcccaatcgtgggattcttgggagttccccgcgggcaaggaagtctgctgctccccgcagctgcggaggagaggagggagcctgcgtgctggggcagg

SEQ ID NO: 950257 - DNA, 120 bp, Artificial Sequence
  ENSG00000231453_17 (sequence is synthesized)
gtgtcgcgaacttggggcaacccacctccagagccccgcccccgctttcccgcctgccggggacctgccgaacgcggaaccaccctccttcctgaggcaaatttgggaggggagaggtcc

SEQ ID NO: 950258 - DNA, 120 bp, Artificial Sequence
  ENSG00000231453_18 (sequence is synthesized)
agaagctgtagagtcggggcgccaagcgccagattctgccgctcggaagttgggggcagtccccagtcccgcctcaggcccccgcgctcacagggcgctccgccgagggcgcgggccagg

SEQ ID NO: 950259 - DNA, 120 bp, Artificial Sequence
  ENSG00000231453_19 (sequence is synthesized)
cgcgcggtgtcacctccacgaagtcatttacttgccctgaaggagctggccctcgaccccttggaggatggagattcctcccattccctcctccgcctcccccaggtcggcgaagagacg

SEQ ID NO: 950260 - DNA, 120 bp, Artificial Sequence
  ENSG00000231453_20 (sequence is synthesized)
tggaattgagctggaccgatgattccgcgagctctgtaattatgcacacactgaaatcttcaccgttgacttaagttacttggcgctgcgagggctggggccctgcatattgattaaatg

SEQ ID NO: 950261 - DNA, 120 bp, Artificial Sequence
  ENSG00000231453_21 (sequence is synthesized)
cagcctctatttacctaaacaataaatgtagagattagcaacgttcacttgatcacaataatgggattgacaattaaggggcaatgcatcccagatgtagcggaacctatgggctgcgtg

SEQ ID NO: 950262 - DNA, 120 bp, Artificial Sequence
  ENSG00000231453_22 (sequence is synthesized)
cagcaggcagagggcttctcagagaggggcgctgggcagttgcggcggcggaggtagtgcagagcaggaagcagcgcggaagcacagcgggaggcggagggggacgcccagcctcgtcaa

SEQ ID NO: 950263 - DNA, 120 bp, Artificial Sequence
  ENSG00000231453_23 (sequence is synthesized)
ggtcttcggccaccccgcccgggaggctcgaaactggctttggggtacctgaatgcctcgactcccagggagacatcgggagctcggagccactctccctgtggcgatggcacctgcctc

SEQ ID NO: 950264 - DNA, 120 bp, Artificial Sequence
  ENSG00000231453_24 (sequence is synthesized)
aaggccgtctcgcttgctgatgcctggccgggaaggaggatggacgccgctggcatgtgccctggctctggaaaaactggcaggaatttccttgtcgtgagaagatggacgagtgtgtct

SEQ ID NO: 950265 - DNA, 89 bp, Artificial Sequence
  ENSG00000231453_25 (sequence is synthesized)
aggccctgctttgatcgctccagctctgttgtaattttgtcttcgccagatagattagctggaaccgccagccctagcttggagttccg

SEQ ID NO: 950266 - DNA, 120 bp, Artificial Sequence
  ENSG00000231453_26 (sequence is synthesized)
gattagctggaaccgccagccctagcttggagttccgttccacggagtaccctccctccccacccccagcgtcatctcgcgcctggagccgggtcgccgctccttccgaagtctcgctgg

SEQ ID NO: 950267 - DNA, 120 bp, Artificial Sequence
  ENSG00000279873_0 (sequence is synthesized)
gcggccgccgcggcagtcttgccggtggagcccgggctcgtttctccgccccctccccgcccaggctcagtaaacagggcttgagcgccggggcctgccgggcagggctgagtgtctgag

SEQ ID NO: 950268 - DNA, 120 bp, Artificial Sequence
  ENSG00000279873_1 (sequence is synthesized)
gacaaggcgctggctttgctaatcacatcacaagaccttgagccagggccaaaggcgcggagtggcgcgggacgtcccgggcgggggagctgactctgaggacaggaggaaaggccggga

SEQ ID NO: 950269 - DNA, 120 bp, Artificial Sequence
  ENSG00000279873_2 (sequence is synthesized)
gagccgtgcgggcttgaaggcgacttagcgccacctttccgtctgctggtcgggccggccttccccagccctctggggctgggggtgcagctgcctgccgaggctccccgcccggcacag

SEQ ID NO: 950270 - DNA, 120 bp, Artificial Sequence
  ENSG00000279873_3 (sequence is synthesized)
cctgggcctgttgcgtcctcccagcctcttccctccccggcagtgggggcgccgcgcccagcctttgctcgatgagggctgcaggatccggctgagaccaacccgcggcgcaggtggggc

SEQ ID NO: 950271 - DNA, 120 bp, Artificial Sequence
  ENSG00000279873_4 (sequence is synthesized)
tgcacagacgctgatggtgggcgcgccaccctctgttttccctcactcgccagccccgcaccccaacagcttgcgctggaaaatgcgctttgccagcgggcgccccgccttcgtccgggt

SEQ ID NO: 950272 - DNA, 120 bp, Artificial Sequence
  ENSG00000279873_5 (sequence is synthesized)
acggaggggacactcccatctagcgcccagtgaggctaaagccgctgacagccccactaggaacgatctggagtctggtctagggcacttctccctccgcgttcatacaggttgccacaa

SEQ ID NO: 950273 - DNA, 120 bp, Artificial Sequence
  ENSG00000279873_6 (sequence is synthesized)
atcctgcatttcccactactgtactcccctcatggcccagggagccagagtccagggtaaggatcaggaatgctgggctggagttcaggtcctgccccagagaaatcatgtggtcttagg

SEQ ID NO: 950274 - DNA, 120 bp, Artificial Sequence
  ENSG00000279873_7 (sequence is synthesized)
caaatcacatcatctctttggtacttgggtttccttgttaaacgaagataatattcttgctttattcatctctcacctttggcaaggtgcaaatgatatctgtgaaggtgtttaaaagac

SEQ ID NO: 950275 - DNA, 120 bp, Artificial Sequence
  ENSG00000279873_8 (sequence is synthesized)
aagcaagaactaaaccatctttatgtattaaaccaaattgacaaaagcgtaagggtggagaaagcctggcttctgaactgtggccagatggacagagagccacagaatcatgagtgcaga

SEQ ID NO: 950276 - DNA, 120 bp, Artificial Sequence
  ENSG00000279873_9 (sequence is synthesized)
gctgtgggggcacccaagtcctggaccctaggactcacagccaagagcaggtgacctcagagggaccagtttcacttttagcacctaccctacactgaccccttgacatacctgggcaac

SEQ ID NO: 950277 - DNA, 120 bp, Artificial Sequence
  ENSG00000279873_10 (sequence is synthesized)
tgtggtctggtttgttctttggtgagatgaccccaaacatctcaccaaactgtgaaacagccacttccctaggcactcctattaggttagtaacaagatttcagatacagaaccagtgga

SEQ ID NO: 950278 - DNA, 120 bp, Artificial Sequence
  ENSG00000279873_11 (sequence is synthesized)
aacatctgtttgaaacaacgtccaaatctggggtgagtcccagtcaacagctgtgagaacacccactttgcagattaggattctggagataacatgtggacatgttacgggacatgcttg

SEQ ID NO: 950279 - DNA, 120 bp, Artificial Sequence
  ENSG00000279873_12 (sequence is synthesized)
tgtacagagtacctgctagtataaaatgtctaatgtagctgcttttatttcattttaaatggagaaaaaaagaagtgctggccatttccaatgagctgggctttgttgggccagtttcat

SEQ ID NO: 950280 - DNA, 120 bp, Artificial Sequence
  ENSG00000286481_0 (sequence is synthesized)
gtggtagatataggtctgtttatttttaaatgtgtttttctttgtactttttcgttctgaaaactcttgcattttcatttaatatcactcattataaagtttatctctgaagtaggatgt

SEQ ID NO: 950281 - DNA, 120 bp, Artificial Sequence
  ENSG00000286481_1 (sequence is synthesized)
attttctgatcatattttcatttcttagaaatatattgtattttaatacctcaattttatcagtatttttatatatacttgtttgcttgggggaagatatgagtgagagaagctttgcac

SEQ ID NO: 950282 - DNA, 120 bp, Artificial Sequence
  ENSG00000286481_2 (sequence is synthesized)
ttctttctctatgggtaaaaaaataaaaagttaattttagcattagaatttattttagcttactatattcaggggaatgcaaatagcaaaatttctattcttctcaacactctttccaag

SEQ ID NO: 950283 - DNA, 120 bp, Artificial Sequence
  ENSG00000286481_3 (sequence is synthesized)
atgaaatgtgctcagattgttcaaacctaacttaatagctattagaatctgtcttgtcgaaagtctcagattctttattttactctttgtagcagcaggactctttggtccaactgcccg

SEQ ID NO: 950284 - DNA, 120 bp, Artificial Sequence
  ENSG00000286481_4 (sequence is synthesized)
aaaaactattgtcaagaaaatgcccagtgacctccaaactcctgacctttcaattacctcagtggatggaccgagagaaaggtgacttttaataaaacacaaataatatcactaaaccat

SEQ ID NO: 950285 - DNA, 120 bp, Artificial Sequence
  ENSG00000286481_5 (sequence is synthesized)
caaaaattgaatcccaagacggtttctcactaaattttattttccctgcctccctcaaaggaactgtgtattgaagttctccatctgctgatgatctcttaggcttatctcggtgtagta

SEQ ID NO: 950286 - DNA, 120 bp, Artificial Sequence
  ENSG00000286481_6 (sequence is synthesized)
catccatttagcaatgcagataatcagcatttgcagaatggcactcagttttgcagctgaaaagattagagtatacaatccaccattcattctcaagggaaggagtcatcgcattgaagc

SEQ ID NO: 950287 - DNA, 120 bp, Artificial Sequence
  ENSG00000286481_7 (sequence is synthesized)
agtctaattatggccatcagtccaaatggcatggtggccaaggatcaaccccaccagcataggaagttccaggctccaagaaagcccagaggttttggaattagtgagctaagtgagttt

SEQ ID NO: 950288 - DNA, 120 bp, Artificial Sequence
  ENSG00000286481_8 (sequence is synthesized)
gcctcattcccacacatcttgctcctcacttcctttactgtgccctgtggttggtgacatgactgcatatctgccacttctcaccactttgtatattcaccctgccttgtcttgatttct

SEQ ID NO: 950289 - DNA, 120 bp, Artificial Sequence
  ENSG00000286481_9 (sequence is synthesized)
catcttgataattctcccatcttttgctcaagacacttttaaacaactctcagagtaacatccttctttggccctagtgagcatttgaaatatgttctatattctaaagatccagaacat

SEQ ID NO: 950290 - DNA, 120 bp, Artificial Sequence
  ENSG00000286481_10 (sequence is synthesized)
gtgggcattttcacgatccagcctgtcaccatgtgttgtttagccacacgtgttcaaagcagatttcgagttgagttatttctagctgggcacaaacagggttccattttcataggcctc

SEQ ID NO: 950291 - DNA, 120 bp, Artificial Sequence
  ENSG00000286481_11 (sequence is synthesized)
actcttccctactgcattacatggtttcttcttcacttctactacactactccttctttaaattacagaagcttaaacataaacaaaagtagaacaaagtggcataatgaaacaccacaa

SEQ ID NO: 950292 - DNA, 120 bp, Artificial Sequence
  ENSG00000286481_12 (sequence is synthesized)
atccattactttgcttcaaaatttcttagtacaaagctattattttttatacctacatgcctgtgctgtaaaatagatggactactttgagccaaatcaaagacatcttataacttcatt

SEQ ID NO: 950293 - DNA, 120 bp, Artificial Sequence
  ENSG00000286481_13 (sequence is synthesized)
ggtaaatagcttgtatttataagtaggtaagagacgttcactttaaaaagcacaaatcaaatatcaattaaacattcaaatctcaagaattctcacaatccccaccccacccaccctcct

SEQ ID NO: 950294 - DNA, 120 bp, Artificial Sequence
  ENSG00000286481_14 (sequence is synthesized)
ctatcttctccatccccattacactatcactcttcatttgactggttcaaatcagaagtcaaatgaagttgacacgttgtgtttggttgatatgtcaacaaagtcacttataatttatca

SEQ ID NO: 950295 - DNA, 120 bp, Artificial Sequence
  ENSG00000286481_15 (sequence is synthesized)
tttcttatcttgtaatttctttttgaaaatgttgagtttatcacatttgcccttttcccagcaaaaggcatcccagtgtctcctcactatggagtggaaggagcaagaggtttataatag

SEQ ID NO: 950296 - DNA, 120 bp, Artificial Sequence
  ENSG00000286481_16 (sequence is synthesized)
catcttgttatattgaagtcacaagctaccagcatcttcttatattgaagtcacaggcaggatttaaattcatcttatatgtaagtatggtatcccagtgtgtcagtgaagagacagatg

SEQ ID NO: 950297 - DNA, 120 bp, Artificial Sequence
  ENSG00000286481_17 (sequence is synthesized)
ccagggacgcatctcctaatatctgcaaggatgtcctgtataccaaaagtatagcttcattccttctaatcccaaagactctcaaataaagcaaatctgcgggaggacaaagatgatggt

SEQ ID NO: 950298 - DNA, 120 bp, Artificial Sequence
  ENSG00000286481_18 (sequence is synthesized)
aagcacagaggagaatgggtatcaatcacttacatcattaggaaggagtgaaatcttacaatgatctttccctctgctttcttcctttcaggtgatctaacttcctgtgccagcatcatc

SEQ ID NO: 950299 - DNA, 120 bp, Artificial Sequence
  ENSG00000286481_19 (sequence is synthesized)
attttacaataagatttgactttggttaaagtttgaaattctcctctgaggaaacacatttcaggatgttatctttcatgcataccttatcatgaagaaaggatccaactattcataatc

SEQ ID NO: 950300 - DNA, 120 bp, Artificial Sequence
  ENSG00000286481_20 (sequence is synthesized)
tagatttccactgatttctttaaccacagtttgataacaaccaccagtgaggtagtcaggtccaggtcttatggaactttattctgttcattgggaatgtgggttttattgatgagggag

SEQ ID NO: 950301 - DNA, 120 bp, Artificial Sequence
  ENSG00000286481_21 (sequence is synthesized)
tgataaactattggagaattctcaattgtggcgtcatgtcttctgagttatacttttacaggaatgattctggttgctctgaaggaacagatagatgtggggagacaagaataaaagcaa

SEQ ID NO: 950302 - DNA, 120 bp, Artificial Sequence
  ENSG00000286481_22 (sequence is synthesized)
ggaggcttgtaactggctgttttcatactagaggaacttcaggactgaatcctgcagtagaagcaagaacaggctattgggagactctggtcctcaactgcacaaagaagggcccatatc

SEQ ID NO: 950303 - DNA, 120 bp, Artificial Sequence
  ENSG00000286481_23 (sequence is synthesized)
ctcaactctgccacagacctctttgattccagttggaagcctggagatttcactgctgctgaggagggttccagggactgggaaacctgagctgtgagctgagcttgggtgatctgtttc

SEQ ID NO: 950304 - DNA, 120 bp, Artificial Sequence
  ENSG00000286481_24 (sequence is synthesized)
catctgtggtctggtgctgatggtttccaaggcaggaatcaagtcagtccttgaagagctacaacagagcaaaagtgcaggtaaacaaagcaacacgaaggctaaataaaagtcatttcc

SEQ ID NO: 950305 - DNA, 120 bp, Artificial Sequence
  ENSG00000286481_25 (sequence is synthesized)
ccaagcaaaataagggtagggaccttcagatggacagattagcctggattaagcagatggagaagccgaggatcaaggatcgggccaggagccaaggaatactgccacctctagaagttg

SEQ ID NO: 950306 - DNA, 120 bp, Artificial Sequence
  ENSG00000286481_26 (sequence is synthesized)
ggaacggccctcagcttacagccactaagaaaagggggattttggccctctagctgcaaggaatctaattccacttgaattaacaaggaacatccaggcaggaatgtagccctgacaaca

SEQ ID NO: 950307 - DNA, 120 bp, Artificial Sequence
  ENSG00000286481_27 (sequence is synthesized)
ccctaatttaggccagtcaggcccggacagacttctgacccacggaattctaaaataatttgtgtttcttaaaccatcaaatttgttgtaatttgttatggtagcaacaggaatcaaata

SEQ ID NO: 950308 - DNA, 120 bp, Artificial Sequence
  ENSG00000286481_28 (sequence is synthesized)
tacctctctacttttacaagatattgttgtctgcagcctgtttgaagtcggtgactaaacacagctggttactatggcaggcccattctgaagagttgcaggacaccctcgggagtactt

SEQ ID NO: 950309 - DNA, 120 bp, Artificial Sequence
  ENSG00000286481_29 (sequence is synthesized)
tggtttgaagcctcctcatcacctcggctgccgtttctgggatctgggttgcagtctgaggctcatttttccaattcccaatacttcctactgatgatattcttgagagtcaggctttat

SEQ ID NO: 950310 - DNA, 120 bp, Artificial Sequence
  ENSG00000286481_30 (sequence is synthesized)
caagagagaaaaaggactttaaaattttcaaactcctttttaaatatcagagatttttttggcctactttgattacaggtccttacttataagtctctccttcctagggagaaaatagaa

SEQ ID NO: 950311 - DNA, 120 bp, Artificial Sequence
  ENSG00000286481_31 (sequence is synthesized)
agctttaagagacagattacactttacctgacattcatttttgcatgccttgttaaacatgaaagaatgtgttaaggccattttttattgtttaatttgttgttttgactttgggtgtgt

SEQ ID NO: 950312 - DNA, 120 bp, Artificial Sequence
  ENSG00000286481_32 (sequence is synthesized)
gtgtttgtgtcaattattttttaatctactagaacattcattatcctttttattttggaaaacaagggtgagaaaggttacgtgatctggaggtaaaaatacaccattatgtaaagttga

SEQ ID NO: 950313 - DNA, 120 bp, Artificial Sequence
  ENSG00000286481_33 (sequence is synthesized)
agtgtcatcccctgaatccacattgcacatctataaagtagaagaacttgtcttactccagtgtttagtattcgttaggttaatgtttttcaaacaagcttgatagtaagaagcatttga

SEQ ID NO: 950314 - DNA, 120 bp, Artificial Sequence
  ENSG00000286481_34 (sequence is synthesized)
gacttttgtttaaaatacatccccctctaccactgaaagtttaatttggtaagtttgtttggacatacagattctgtatttctaagaaatatttagatggtttttatcagacttggaggt

SEQ ID NO: 950315 - DNA, 120 bp, Artificial Sequence
  ENSG00000286481_35 (sequence is synthesized)
agctatcaacggagtattcacagtacgctgctcacagttctaaccgcggaggatagagttgaggcccacacgacagcccctgctctcacagaactgatgtctctagaagagtcttccctc

SEQ ID NO: 950316 - DNA, 120 bp, Artificial Sequence
  ENSG00000286481_36 (sequence is synthesized)
agtgagaacgttctgatttctagaacattctttcttctgatgagtgaacagcctcaccggaacttccccatcctcctggcttggttcctgaagtggcccaaggctgccttctccctcccg

SEQ ID NO: 950317 - DNA, 120 bp, Artificial Sequence
  ENSG00000286481_37 (sequence is synthesized)
tgggtgaacagggtcactgcttcctctcttgtccaggccccctggcctgaccctgagtcccgggcgtaacggcgttgttgaaccaccacaaccccaggcggcgccttcctcttggcccag

SEQ ID NO: 950318 - DNA, 120 bp, Artificial Sequence
  ENSG00000286481_38 (sequence is synthesized)
gggctctcttggggacagtgtgcagtactccccaagggggctttgctgtgcaaaagcagcccctgccgatgctgcggctcccgtggatggagcactgccgtgggaacagagttggaactc

SEQ ID NO: 950319 - DNA, 120 bp, Artificial Sequence
  ENSG00000286481_39 (sequence is synthesized)
atccaaaagaataaaagacaactgtgttggaagattgccaaggtttgtagctgtgccaccgcagacttcagagatgaacactgccttggagacgaggaggattcaagttgcagaagcatt

SEQ ID NO: 950320 - DNA, 120 bp, Artificial Sequence
  ENSG00000286481_40 (sequence is synthesized)
tagaaacctcaaacttgagacacggtgggaaatcaggaagacatgaggctttgctcaacactggagaacaccagttcttttcagtttgtatgcatctttatcagataattgtgctacaaa

SEQ ID NO: 950321 - DNA, 120 bp, Artificial Sequence
  ENSG00000286481_41 (sequence is synthesized)
attgatgccatacaaatggacaaagaatttgcagccaaaaatgtacaaaaaaggtttgtccaatagaacataaaactgtgacgcttgaagataaacgtgaccttgaccagccctgaggaa

SEQ ID NO: 950322 - DNA, 120 bp, Artificial Sequence
  ENSG00000246273_0 (sequence is synthesized)
tgcctctgggttggtgaacacatcagatgctgggcaggtggtgtgttgcctccctccataccatgcatctcttccctttggctgatcctgaggtgtatcccttagaaataagctggtaaa

SEQ ID NO: 950323 - DNA, 120 bp, Artificial Sequence
  ENSG00000246273_1 (sequence is synthesized)
taataatgctgtgtgctccctctttgcctgctactgaacaatgacgtctcttgttgtgaaccccactggcagagcacggaccatggaagcatcttttggcagcaccagagaactgagcat

SEQ ID NO: 950324 - DNA, 120 bp, Artificial Sequence
  ENSG00000246273_2 (sequence is synthesized)
gaccatgggcatcaggcatcagagatacaactctggatcttgtccatccattgctgggcactctgtccatcctgggcgcagaagttatacacacgtttgctggtcttgagctacaaaacc

SEQ ID NO: 950325 - DNA, 120 bp, Artificial Sequence
  ENSG00000246273_3 (sequence is synthesized)
aaatgacagtgaaccagagatgaagggcagggctgttttatggatttgggagtctactgctaagatttcagcatgtcctgtggctgagttaatcagagttatgacaggaaggtaccgggc

SEQ ID NO: 950326 - DNA, 120 bp, Artificial Sequence
  ENSG00000246273_4 (sequence is synthesized)
acaccatcgcaatgctccatcaatgctagtatgttgtgttctttccttcatatcaagtcaactcaagcttgctctacttacctggtgtacacagtctaagaactgtaagaagactggagc

SEQ ID NO: 950327 - DNA, 120 bp, Artificial Sequence
  ENSG00000246273_5 (sequence is synthesized)
gggcgcgcggggccgactagggtcgggtccagtgtgcggtggtcgctccgctccgggccgctccgctctgggcgtcagggcgcggggagctgccccggggttctgtccaccggggaggaa

SEQ ID NO: 950328 - DNA, 120 bp, Artificial Sequence
  ENSG00000246273_6 (sequence is synthesized)
ttctgtccaccggggaggaaagccacgagcactgagcgcctcctgagagccagccctgacgtgaactcattttatctgccacgacccagaaggagtctactgctaagatttcagcatgtc

SEQ ID NO: 950329 - DNA, 120 bp, Artificial Sequence
  ENSG00000246273_7 (sequence is synthesized)
caaccaacatctggaagccttcaagtgtcctataaaagggatcactgagtaactgaaccagggatgtcacctagggcataagcaggatggattgtcattaattttagttctgaaaaaggc

SEQ ID NO: 950330 - DNA, 120 bp, Artificial Sequence
  ENSG00000246273_8 (sequence is synthesized)
ctattactaagataaaagcacttccttctgatgatagctaattcacaaatttacctggacagcaaatttgttcactaaccattccaggatggccaataaaattaattttgtaaacttgcc

SEQ ID NO: 950331 - DNA, 120 bp, Artificial Sequence
  ENSG00000246273_9 (sequence is synthesized)
agtaaaaactaaagctcaaattcattttggctacaagtttactttcagggaattgagactttaatccttaactggccagtttgctgacagcaaccttttcctaagttaatcagaggccag

SEQ ID NO: 950332 - DNA, 120 bp, Artificial Sequence
  ENSG00000246273_10 (sequence is synthesized)
aggatcagttaaaatcaattctactttttggcagatgcagattaatgtcttaatgtagtctgaactcacacttttcactctggagtgagttaaggcggggcttatagagagccaggggat

SEQ ID NO: 950333 - DNA, 120 bp, Artificial Sequence
  ENSG00000246273_11 (sequence is synthesized)
ggactgacaaaacccaggaaggatggtccacgcctcacactgctggtcaagggctccatccgcaagcctgcatggtacatctgtggatgggagagcttgatgcccggagccagagctcca

SEQ ID NO: 950334 - DNA, 120 bp, Artificial Sequence
  ENSG00000246273_12 (sequence is synthesized)
ggctgcgtaggggctaagagctcatggtacggagttttctgatggataccaggtgctgtttaacacaggactttctctgtccataaacacattagtcattatacaaaagagtcatctgaa

SEQ ID NO: 950335 - DNA, 120 bp, Artificial Sequence
  ENSG00000246273_13 (sequence is synthesized)
gaatttaaaaatgaccaaatggaaatataaatataaaatatcaaaaaatatgtctaatagtttacttgtgcagtgatgtcccagccttcctccaaacagaccaaaactgaggaaccattc

SEQ ID NO: 950336 - DNA, 120 bp, Artificial Sequence
  ENSG00000246273_14 (sequence is synthesized)
caattagaccaagcgctttctgagtgcagaagtcagagagagttgctttcaaccctggataatcaaacgacttagggataaagcgcttgcacaaaagaaccacataatgttttaaatacc

SEQ ID NO: 950337 - DNA, 120 bp, Artificial Sequence
  ENSG00000246273_15 (sequence is synthesized)
aagcgcttgcacaaaagaaccacataatgttttaaatacctaaagttctttcaaatcaagattaaacaatgacacttttgactggatgcaatgactcatgcccataatcccagcactttg

SEQ ID NO: 950338 - DNA, 120 bp, Artificial Sequence
  ENSG00000246273_16 (sequence is synthesized)
agaccagcctgggcaacataagcaagaccctgtctcgaaaaataaaaataaaaaagatactcctatttgtctatactgtgtactaaatgagaaaaaaactttcaatatatttgtgctaag

SEQ ID NO: 950339 - DNA, 120 bp, Artificial Sequence
  ENSG00000246273_17 (sequence is synthesized)
tttttaaagccacatcaattggctcaaagtccttaataaacaattaaggtatgagaatagtatatagattttaaaaccagatgtataacattgtaattttaaaaaatattttaatgatca

SEQ ID NO: 950340 - DNA, 120 bp, Artificial Sequence
  ENSG00000246273_18 (sequence is synthesized)
tcagacataatttgcaatttgaatccaactctgaacaagaacaaaaatgaaaaaacccatctcttaaacagagctaggctactttaaacacaggaataaggcaaatgccctactcagtaa

SEQ ID NO: 950341 - DNA, 120 bp, Artificial Sequence
  ENSG00000246273_19 (sequence is synthesized)
cctactcagtaatgagaagctcctcatgtaactgtttctacaacatagctatcaccaggcctgaattcttttgggctcagaatttgttctaagaaatggctattattaaaaagtcaaaaa

SEQ ID NO: 950342 - DNA, 88 bp, Artificial Sequence
  ENSG00000246273_20 (sequence is synthesized)
catttagaaagtagtttggtgatttctcaaataacttaaaacagaattaccatttgacctagcaatcccattactgagtatataccca

SEQ ID NO: 950343 - DNA, 86 bp, Artificial Sequence
  ENSG00000246273_21 (sequence is synthesized)
aaggaatataaattgttctaccataaagtcacatgcacacacatgttcagtgctgtatatgcccatcaacggtagactggataaag

SEQ ID NO: 950344 - DNA, 76 bp, Artificial Sequence
  ENSG00000246273_22 (sequence is synthesized)
gcttatgtcctttgcagtaacacagctgaagcaaactaacacaggaatggaaaaccaaatactgcatattctcact

SEQ ID NO: 950345 - DNA, 77 bp, Artificial Sequence
  ENSG00000246273_23 (sequence is synthesized)
aggaatagacgcctggggcgtatttgaggttggaggtgagaggagggtgaggatagaaaaactacctatcaggtact

SEQ ID NO: 950346 - DNA, 120 bp, Artificial Sequence
  ENSG00000246273_24 (sequence is synthesized)
ttttatggatttggacctctggggaaagactgctgctttctgctgggattaccacatctgtgaggcttggaatgatcagtagccatcctttgtgccatgttgggactgacataacacaga

SEQ ID NO: 950347 - DNA, 120 bp, Artificial Sequence
  ENSG00000246273_25 (sequence is synthesized)
gagagggcaaagcagagccaggaagtggatagaagatactgtgtgagaagctagcatacccttggctgtcctagcttatgagtctactgctaagatttcagcatgtcctgtggctgagtt

SEQ ID NO: 950348 - DNA, 120 bp, Artificial Sequence
  ENSG00000246273_26 (sequence is synthesized)
ttcctgtgacctttcttttccatactgccccagaacgtctgtatgaatttttcttcctcaactaccatactgttattgcctttacttttgtggtctctagagtcataggggatgttgata

SEQ ID NO: 950349 - DNA, 120 bp, Artificial Sequence
  ENSG00000246273_27 (sequence is synthesized)
gaagggtactggcaggaaagggagacacactgggagcgccttattttgcattttcttagtgtcgtctttgactaaggaggaagggtcagcaatgaatggtgcctttaacctttcccatgc

SEQ ID NO: 950350 - DNA, 120 bp, Artificial Sequence
  ENSG00000246273_28 (sequence is synthesized)
agagatgaagggcagggctgttttatggatttgggcatggtatgagcagggctaagtggaaaaaactgtatctatctttcatgttaaagaagtccagaagactgggaaacagatccagat

SEQ ID NO: 950351 - DNA, 120 bp, Artificial Sequence
  ENSG00000246273_29 (sequence is synthesized)
ggaggaaacatctgataaagtttgcctaagcagccagcagtctatcaatcatgactcttccaaccctcatcctgcatctatatctagattcaaagaagtccatgcaggaggcagtctaca

SEQ ID NO: 950352 - DNA, 120 bp, Artificial Sequence
  ENSG00000246273_30 (sequence is synthesized)
cttttcaagagaaaatggaaggacttcagagttgatttgatgaagctcagtaaaaaacataattttatgtttctcttttaagttgttggctgtttgtttattatgaagccatttaaagag

SEQ ID NO: 950353 - DNA, 120 bp, Artificial Sequence
  ENSG00000246273_31 (sequence is synthesized)
ttttcttgtttagcagtgtatatatactgcagatcatggttactgagactctagatgacagaagcgtgtagtctgtgtccttgggtgacttaaaaataaaagcagaacttttataccttt

SEQ ID NO: 950354 - DNA, 120 bp, Artificial Sequence
  ENSG00000246273_32 (sequence is synthesized)
aagtagacacattttaaaacaatacattctagtaatacataatgaaataaaattaccttacatgattcccccaaaagtaggtgagctataattccatagagtacaaaaaacagagattct

SEQ ID NO: 950355 - DNA, 120 bp, Artificial Sequence
  ENSG00000246273_33 (sequence is synthesized)
atgtggacttcccaacaaaagacggaaattcagatgaattttattggatttaaaatttgtttttccatgatgtagtaagttttgtttcagacattttttttttttttttttgagacaaag

SEQ ID NO: 950356 - DNA, 70 bp, Artificial Sequence
  ENSG00000246273_34 (sequence is synthesized)
tgcctcagcctcccaaagtgcgtggtggcatacctgggagatcgaggctgcagtgagctgtgattgtgcc

SEQ ID NO: 950357 - DNA, 120 bp, Artificial Sequence
  ENSG00000246273_35 (sequence is synthesized)
ctggctatagagcgtggctgctcttcgctccactccattggatggggagatgctggaattctgttcctcccccatgctgctgtctgggagatgtagcagagacctcttctgataggaagg

SEQ ID NO: 950358 - DNA, 120 bp, Artificial Sequence
  ENSG00000246273_36 (sequence is synthesized)
cacctgcctcagcctcccaaagtgctagcattacaggcgtgaaccaccacgcctggcctatttcaggtattcttaattttttgggaattagatagtggtgatagttacacaatgttgtgg

SEQ ID NO: 950359 - DNA, 120 bp, Artificial Sequence
  ENSG00000246273_37 (sequence is synthesized)
acaatgttgtggacataccaaaaagcgttgagttgtgcacctttatcataaggataaattttatggtaagtgaattatatgttaaaaaagaaactcctggctgggtgtggtggctcaacg

SEQ ID NO: 950360 - DNA, 84 bp, Artificial Sequence
  ENSG00000246273_38 (sequence is synthesized)
taatcccagcactttgggaggttgaagcaggagtagtgcttgagctcaggagtttgagacccatacaaaaaccagccaggcgtg

SEQ ID NO: 950361 - DNA, 120 bp, Artificial Sequence
  ENSG00000273702_0 (sequence is synthesized)
tttagactcatcactttcgccagtcttctctttctccccccactttttttttttcattttgccacatcatgcgactcggggcgaccgacgtcacttccgtgggcgctttaggtcccaccc

SEQ ID NO: 950362 - DNA, 120 bp, Artificial Sequence
  ENSG00000273702_1 (sequence is synthesized)
acgtacttccaggtgcacgtgatactgatggggaagggtcggctgattgctgccagaaatggagagctcgttttaaggaaatgcggcgtctcctgggagtgaagaggcttttgggccacc

SEQ ID NO: 950363 - DNA, 120 bp, Artificial Sequence
  ENSG00000273702_2 (sequence is synthesized)
ttgaggcatgacgggtgccgcttcgtttccctgcgaccgctgcctgtttcgactgagcccctcacaggaggacgtggcgggggcagacgggcgcagcctcccgccctctccgtgactcag

SEQ ID NO: 950364 - DNA, 120 bp, Artificial Sequence
  ENSG00000273702_3 (sequence is synthesized)
ggaaacggcctcgccgcagagcgctccctcggcagctggctgcagcactcctcccccgccgggcttcagagtgggtggtttcctacagcctagggagggggcctgaaacggggtttaaaa

SEQ ID NO: 950365 - DNA, 120 bp, Artificial Sequence
  ENSG00000273702_4 (sequence is synthesized)
gtgttagataattaactcaaaggacagcgaaggccttttatgatgtctttcaagctggccttatgacagcttttcttaacgtttctgcggacattttggcggacttgtgtcggcctagct

SEQ ID NO: 950366 - DNA, 120 bp, Artificial Sequence
  ENSG00000273702_5 (sequence is synthesized)
cagtgatcagtttcgttaaagaatttgagtatccgaacattaaaggattggacctaaattctagcaggaggatttttagccacatcaaataatttacgtctcaaagatttagataattag

SEQ ID NO: 950367 - DNA, 71 bp, Artificial Sequence
  ENSG00000273702_6 (sequence is synthesized)
cacatcaaataatttacgtctcaaagatttagataattagggtaaggatgcttagtaaaacccgaaggttc

SEQ ID NO: 950368 - DNA, 120 bp, Artificial Sequence
  ENSG00000273702_7 (sequence is synthesized)
ggaaagagatgaactattagccgtgtatttcggtgggaccacctcaacataggttcctgtaggttagcaatgtagaaatgtagcgcttcaaagccggagcatcctgtcttcaaagagcat

SEQ ID NO: 950369 - DNA, 120 bp, Artificial Sequence
  ENSG00000273702_8 (sequence is synthesized)
gaaggtatcaacggcattcattgtcgattaataataacctttctggtactttcttgctaaagtataagccataataatatttcataatcgcaccaatacaataaaggatgaaagacgtta

SEQ ID NO: 950370 - DNA, 120 bp, Artificial Sequence
  ENSG00000286484_0 (sequence is synthesized)
atgtcacaatgtgctccttgaggcatggccctactgaaagactaccatcatctgtgtgcctagactagcaatatgtcactatccagatgcagaaaaagtatttggaaaaatttaacatgc

SEQ ID NO: 950371 - DNA, 120 bp, Artificial Sequence
  ENSG00000286484_1 (sequence is synthesized)
ctttgtgattaaaacaactgaacaaattacgtatagaaggtctgtgtctcaacacagttaaggcaaaatatgacaaatcaatagctgatatcacactgaacaagaaaagaagaaagcttt

SEQ ID NO: 950372 - DNA, 120 bp, Artificial Sequence
  ENSG00000286484_2 (sequence is synthesized)
ttatttaagacctggaacaagacaatgatgtctgcttttacttttatttaacagagtactggaagtcccagccagattatttatgcaagagaaagaaataaaagacatccaaataaaaaa

SEQ ID NO: 950373 - DNA, 120 bp, Artificial Sequence
  ENSG00000286484_3 (sequence is synthesized)
ggagaaattccaattgtctttgcagatcacataattgtctttatagtaaaacttaaatactacactaaaaatggagaactaataaagaaattcagtaaagtggcagaatatgaaattaac

SEQ ID NO: 950374 - DNA, 120 bp, Artificial Sequence
  ENSG00000286484_4 (sequence is synthesized)
atgcttgtggtaaggttcagctttattttttatcatttggatattcagtattctccaacccgtttgttaaagagactgttcttttctcattttgagtgatagagacaggagatagccaaa

SEQ ID NO: 950375 - DNA, 120 bp, Artificial Sequence
  ENSG00000286484_5 (sequence is synthesized)
ggaccttttcccactttgagtgttagagacaagagacagtcaagggtcctgggcgaaactcctcttttaagcctaaagcagcctgaaggctgaaaaattggactcccggtttaggatgaa

SEQ ID NO: 950376 - DNA, 120 bp, Artificial Sequence
  ENSG00000286484_6 (sequence is synthesized)
gccagccctttcctgactgtttctctctgaataacgcccacctgtgcactgggaaaaggaggtggagccatggaaattcacaccttttggcaggggaggagcctggactattcagttgct

SEQ ID NO: 950377 - DNA, 120 bp, Artificial Sequence
  ENSG00000286484_7 (sequence is synthesized)
atgtggttacctggtgttcatcaatctgtgaggtggtggcctgttaacaggagtctgtctcactttgctgacagtttttcttttctttttcctttttgcccaataaactttactcctcaa

SEQ ID NO: 950378 - DNA, 120 bp, Artificial Sequence
  ENSG00000256008_0 (sequence is synthesized)
gcgggtatgagggaggctagcggggagggccttgccccaagaggcccggagcgtggacagcgcacggggtgctgaatcaggcacggggaggaggagtgccggcaagggcgccggcccggg

SEQ ID NO: 950379 - DNA, 120 bp, Artificial Sequence
  ENSG00000256008_1 (sequence is synthesized)
gaggacgagcatttccaattaatcttggaatgagagccgagggcaagaagccagcggtgcctgagggatgctaaagagccaaccgatccagggaaacaaatgccagcgagggaccccaca

SEQ ID NO: 950380 - DNA, 120 bp, Artificial Sequence
  ENSG00000256008_2 (sequence is synthesized)
gcaaagagacagacactgtgagcaactctcctgttaccatgaggcttgcgaggcgtgtgtgcgggtctccgcattggcaccatctgccaattcctcaggaggacagaacaaaccagtgag

SEQ ID NO: 950381 - DNA, 120 bp, Artificial Sequence
  ENSG00000256008_3 (sequence is synthesized)
gcatgaagattagattatgtaacgctcgaggattgctgttttcaaagaggaaacaaatggaatgaattgatttgcttgtcaaagtcatgtcactaaaggagatctattccctccccttct

SEQ ID NO: 950382 - DNA, 120 bp, Artificial Sequence
  ENSG00000256008_4 (sequence is synthesized)
acaatccactccattcataagagcaagtccactttccagagtcacactcacacattctattctggtccccgggcctgaaaaaatgtccatccagctacaacctaaagggtactgacctgg

SEQ ID NO: 950383 - DNA, 120 bp, Artificial Sequence
  ENSG00000256008_5 (sequence is synthesized)
agctacaacctaaagggtactgacctggtgaggaacataattgtcagctgctagccataagattcagagccggaggccaggcgtcatggcttatgctggtaatcccagcactttgggagg

SEQ ID NO: 950384 - DNA, 65 bp, Artificial Sequence
  ENSG00000256008_6 (sequence is synthesized)
cacctgtaaccccagctacttgggaggccaacgcctgagaatcacttgagcccaagaggcagagg

SEQ ID NO: 950385 - DNA, 120 bp, Artificial Sequence
  ENSG00000256008_7 (sequence is synthesized)
gggcggcccctggcggcgaaggggacgctgcaacgcggagcgggagcacgaggagggaaggggcttggcaatgggccccaaagaggccgagaccccgggagtgccggcagcgctctttat

SEQ ID NO: 950386 - DNA, 120 bp, Artificial Sequence
  ENSG00000256008_8 (sequence is synthesized)
cacgcctggaggctcctgcagagccccggaaccgcccgaacctccagaaatgcaggcagggtgcactccccagggggtacaactttggcaatgaggactacagaggtccggggagaaccg

SEQ ID NO: 950387 - DNA, 120 bp, Artificial Sequence
  ENSG00000256008_9 (sequence is synthesized)
gagacccgaggagcatgaaggcactctgtgacatcactgcctacaaacgcaggggccggaatgcagtgacaggacactgctgggaggaaagtctcccagcgcctccgtgtggggctgcct

SEQ ID NO: 950388 - DNA, 120 bp, Artificial Sequence
  ENSG00000256008_10 (sequence is synthesized)
tgggggacagagtgagacgctgtctcaaaaaaataaaaataaaaaatcagaacctgtgagttttgcctgaactttcttgcttctggggaagcagtgtctcgttctgagaccagtgggatt

SEQ ID NO: 950389 - DNA, 120 bp, Artificial Sequence
  ENSG00000256008_11 (sequence is synthesized)
gtattcactattcagagctctaaacaagtgctcttgatagaggaggggtgtgttcttaaaaatatagcatcagaaaaaaaaaatatatatatatatgcatcaggaaggaaaatgcattga

SEQ ID NO: 950390 - DNA, 120 bp, Artificial Sequence
  ENSG00000256008_12 (sequence is synthesized)
tttctcagagtgctttgccattgctgggcttctctcaaatgcccagcacaatactttttctagtatcctcaggagatctgaggaatgaacaaatgagaaccctgaacctgctgccatagt

SEQ ID NO: 950391 - DNA, 120 bp, Artificial Sequence
  ENSG00000256008_13 (sequence is synthesized)
tccatcccttaaggtttcacagcctccctaagataccaggatttaaatatcaagtctttatccaggatgcaaatgaagtctcctgtaccagatagtttccatttgccctccagatccact

SEQ ID NO: 950392 - DNA, 120 bp, Artificial Sequence
  ENSG00000256008_14 (sequence is synthesized)
cttccacccttctccgtgctgcccttggccctggcgggctgacctacatggactgcagcagctcactctcctgccctctagcttccaggcgggtacagccaatgggagcggcagcaggag

SEQ ID NO: 950393 - DNA, 120 bp, Artificial Sequence
  ENSG00000256008_15 (sequence is synthesized)
atgggagggcaggaggacagcatgggtgaagtgtttctttccccacttccctcctgccagatggccttaggttggttgtgccttttgataaaaggtcacccctctttctcaaggcagcct

SEQ ID NO: 950394 - DNA, 120 bp, Artificial Sequence
  ENSG00000256008_16 (sequence is synthesized)
gctctacacaactctctctgggttctgtcatttctccctcccctcaaccttcagatctaagagtggtaaaggccccatggctactgcactatcccttatagcttccccactttctgcttc

SEQ ID NO: 950395 - DNA, 120 bp, Artificial Sequence
  ENSG00000256007_0 (sequence is synthesized)
aaaatatacagatatatttatattatcaaaaagtccccaaattggggaaggggcatcaggtagtctggaccccccactcagcccagactggaaggaaggctgaagtccccaaagcgcagc

SEQ ID NO: 950396 - DNA, 120 bp, Artificial Sequence
  ENSG00000256007_1 (sequence is synthesized)
gctccctccccgtgagctgagtgctcctctacagcacccgctttctgctgttctggagtttgttgggaggagcagggggctcccttccggcagggccccagggcctcacgcctctgaaag

SEQ ID NO: 950397 - DNA, 120 bp, Artificial Sequence
  ENSG00000256007_2 (sequence is synthesized)
ggtggtggtcctcccaagttcctgacttatgcccatctctccagccccacaaggacagtgaacccggtggggtgagcaggatgggcagcaccttctccgcaaagtgcagggggcgctctg

SEQ ID NO: 950398 - DNA, 120 bp, Artificial Sequence
  ENSG00000264012_0 (sequence is synthesized)
ggtcggcttgagtcccctgacccctactctcaggctgtcccggagcttttaaagactgaaatccatcatcattacagtacgtcgttgccaaacccgagcaagccacacagaaatactgac

SEQ ID NO: 950399 - DNA, 120 bp, Artificial Sequence
  ENSG00000264012_1 (sequence is synthesized)
ggatactgcaacttacaacacatcacaaaggtttattcttctccgccctaaaagccactattgactacggtaatcagtaaaatgctcaggtcttcaaggacactgaagttaaacaaggta

SEQ ID NO: 950400 - DNA, 120 bp, Artificial Sequence
  ENSG00000256001_0 (sequence is synthesized)
gagttgggcaggcggtaggggcgacctgggagaaggtccctgctgcagacgtggaaatgcatcttgttccagtacatcacattccagggagcaaagaattcttttacaaagccgggtgtc

SEQ ID NO: 950401 - DNA, 120 bp, Artificial Sequence
  ENSG00000256001_1 (sequence is synthesized)
cattttcttagaagaagaaccattgcaacagggctcaaagttgactctgctggaaaggcaagggacagggaaatgatgataacataagcagccggctgtgtcattccttccatttgtatc

SEQ ID NO: 950402 - DNA, 80 bp, Artificial Sequence
  ENSG00000256001_2 (sequence is synthesized)
ttccatttgtatctttttttcccagtaatttgtgcccatggctttgtttagagtctcctgcttgtttacctactcgctat

SEQ ID NO: 950403 - DNA, 120 bp, Artificial Sequence
  ENSG00000256001_3 (sequence is synthesized)
ctactgataaatcagcgttcccatcacagattgcccttcatttctaattaatggggaattctaaagagggaaagctgtgagctggaagcattccctgaatagcaagtgcataagaaatgt

SEQ ID NO: 950404 - DNA, 120 bp, Artificial Sequence
  ENSG00000256001_4 (sequence is synthesized)
ttttgttgcatgtaatttgtatgaaggtgcctaaagtaaggcttcatcaagttttagtttcaagttttagtttatttgtgaaaactgatttccaatttaagccatttattaattctgttt

SEQ ID NO: 950405 - DNA, 120 bp, Artificial Sequence
  ENSG00000256001_5 (sequence is synthesized)
ttcagagaaacttgaccgagcacttgccgtgcttcaggcatcgttcaaggcaacagggttatggtcttgaataggagagacagagttctcatctctagacagactggcagtaagcccgaa

SEQ ID NO: 950406 - DNA, 120 bp, Artificial Sequence
  ENSG00000256001_6 (sequence is synthesized)
aatagatcaatacacaatataatttcagatagtgactttttgctacaaagccaaaagtaaattaaggtgaacagatagcgtatttttagagggggtgctacttgagatacagacgcgagg

SEQ ID NO: 950407 - DNA, 120 bp, Artificial Sequence
  ENSG00000256001_7 (sequence is synthesized)
cttatatcttactcatgcaacctgcctttcgaatggagctggagtgctgtactttgcattgttctcatctcaggactgtcagacattatagaacaaaggagagaactggcagtacttgca

SEQ ID NO: 950408 - DNA, 120 bp, Artificial Sequence
  ENSG00000256001_8 (sequence is synthesized)
tgggagagaatgtagaatcccaccatgtgccccaaataagagaaagccagaatatgtatgagcagtcctaatgattataacacatgaaaacatctccccaaaatcgctgcctagagagga

SEQ ID NO: 950409 - DNA, 120 bp, Artificial Sequence
  ENSG00000256001_9 (sequence is synthesized)
caatatactattctcatttcccctaaattgaaaggggaactggttataaatacagaatattttaggatggtgcagccacagtgaaaaatgtaactcgaaggagaggggttggaatagcga

SEQ ID NO: 950410 - DNA, 120 bp, Artificial Sequence
  ENSG00000256001_10 (sequence is synthesized)
tggtggtggtgattctgcacattgagtatttattttcagactgccacgacctttctacctcatgctactataatttgcatatatagttattcatgatcctgtatgctgtggagggcacca

SEQ ID NO: 950411 - DNA, 120 bp, Artificial Sequence
  ENSG00000256001_11 (sequence is synthesized)
agatagcatcctaagcagtggtttacagaggtagcaactgtgaattccagatgcaaagtttggcatgaagctggggttgggaaatataatcaaagctctcacagtgataaatgaggtaca

SEQ ID NO: 950412 - DNA, 120 bp, Artificial Sequence
  ENSG00000256001_12 (sequence is synthesized)
taattttatgtctgtcactgggtagctttgaaatattaaccacaaaaacctctctgaactgtaaagttttgcaagcagatatctcttctgtgtaatgaaggtggcaagaagttacatcta

SEQ ID NO: 950413 - DNA, 120 bp, Artificial Sequence
  ENSG00000256001_13 (sequence is synthesized)
gaacaaaagcattgctcatgaagtggaagtgtaattttgtcttgtgacagtaatgcaatagtgtcaaaaactcagatctccataaggaaaaaaagatcatcagaaaaagataaaactatt

SEQ ID NO: 950414 - DNA, 120 bp, Artificial Sequence
  ENSG00000256001_14 (sequence is synthesized)
gttctttcttgtaattggactaaatggtaactgttaaagtaacaatattaacaatacattgggtgattatagtttttggataagtgaagtcagtaacagtaatgtcatatgaatcagtca

SEQ ID NO: 950415 - DNA, 120 bp, Artificial Sequence
  ENSG00000256001_15 (sequence is synthesized)
tattgtattggaagatttctgtactacatgtgaaatagtataatgctatttgaaggtggacttcgattatttgtgaatgtatattgcaaactctagggcaagcatacacaaaaattaaaa

SEQ ID NO: 950416 - DNA, 120 bp, Artificial Sequence
  ENSG00000256001_16 (sequence is synthesized)
agaactataattcacatactaagaccaaataaaatatagaatcaaataaaatgcccaattaacaccagaaaaggggaggggcagggccaagatggccaactagaagcagatgcattcaga

SEQ ID NO: 950417 - DNA, 120 bp, Artificial Sequence
  ENSG00000256001_17 (sequence is synthesized)
gacgcagtgagtgagcatgccacccagcctaggaaactgtgcttatcccacggaagtatgcaacccacggatcggaagatcccagtcacgaacccaccccaccagggcctagcctcccaa

SEQ ID NO: 950418 - DNA, 120 bp, Artificial Sequence
  ENSG00000256001_18 (sequence is synthesized)
ccctggaacacgcagattcttacatcctctcagctggaatctgcttaagcctgaggaactcctaatgggaggggcgacttgcacctgcttcagctgcctgctctctaagccttttagcct

SEQ ID NO: 950419 - DNA, 120 bp, Artificial Sequence
  ENSG00000256001_19 (sequence is synthesized)
agctccatgggcaggggaagggtgccacccatttctatagctccaggctgcgtttttctgctggtggagccaaggaggctggacagcttggtcccaagacttgtcccacagctcaacgca

SEQ ID NO: 950420 - DNA, 120 bp, Artificial Sequence
  ENSG00000256001_20 (sequence is synthesized)
tgggctgtgccagtctgtggccagagtgcctcttcaggtctaaccctgacccatccttcttcagtgggcggggcttccctgcagaatctccaataactccagccagaggatctccctggg

SEQ ID NO: 950421 - DNA, 120 bp, Artificial Sequence
  ENSG00000256001_21 (sequence is synthesized)
cctgagcccccagggggaggggtggccacagtctgcagatcagcagacttagcctctcctcttggtagttctgaggaatctgggcagcctagacaagtgggcttcccccagtgaaacaca

SEQ ID NO: 950422 - DNA, 120 bp, Artificial Sequence
  ENSG00000256001_22 (sequence is synthesized)
ccctctccaccaagggacaaagtgctttgttaaatgggtcctgctccctgtgtcacccaactgggtgagaccctccagcaggggttgttagacaccccatacaggggcaatcctactggc

SEQ ID NO: 950423 - DNA, 120 bp, Artificial Sequence
  ENSG00000256001_23 (sequence is synthesized)
ccccttgaggtcagaggtcccagaagaaggaggaggaaaacatcttggctgctctccagccttgtcgagtggcatttccaggcacaggaccgaatcagatgaataagacctgaaatgaac

SEQ ID NO: 950424 - DNA, 86 bp, Artificial Sequence
  ENSG00000256001_24 (sequence is synthesized)
gtggcatttccaggcacaggaccgaatcagatgaataagacctgaaatgaacccccagcaaattgcagccagtaaacaagcagaaa

SEQ ID NO: 950425 - DNA, 120 bp, Artificial Sequence
  ENSG00000256001_25 (sequence is synthesized)
aggacgccccgcgactctaggcggcgggttctggaatccacgctggacatggcccgcagctagactccctcccgggctgagtccaccgtgtcgtgctgcgggtctacacggccgccagcg

SEQ ID NO: 950426 - DNA, 120 bp, Artificial Sequence
  ENSG00000256001_26 (sequence is synthesized)
tactccccgccctgtctccacactacgcctgattggcgagccgcggggcgacgacctcgtccgcgcgtctcctggagacgtggaaatgcatcttgttccagtacatcacattccagggag

SEQ ID NO: 950427 - DNA, 77 bp, Artificial Sequence
  ENSG00000256001_27 (sequence is synthesized)
aacagcatcaacaacaacaacaacaacaaaaaggcccgcataaaaaccccatccaagggtcagcagcctcaaaaacc

SEQ ID NO: 950428 - DNA, 120 bp, Artificial Sequence
  ENSG00000256001_28 (sequence is synthesized)
caaatgatcccaacatctctccatcaagggcacagaactggacagagaatcagatggacgaattgacagaagtaggattcagaagatgggtaataaaaaactatgatgagcttttttttt

SEQ ID NO: 950429 - DNA, 120 bp, Artificial Sequence
  ENSG00000256001_29 (sequence is synthesized)
ttttatgagctaaacaagcatgttctaacccaacatgaagaagctaagaaccttgataaaacattagaggaattgataactagaataaccagtttagaaaggaacataaatgacctgatg

SEQ ID NO: 950430 - DNA, 120 bp, Artificial Sequence
  ENSG00000256001_30 (sequence is synthesized)
aagctgaaaaacacagcaagagaactttgtgaagcataccgaagtatcaacagctgaactggccaagtggaaaaaagaatatcagagtttgaagaccacgtttactgaaataagacatgc

SEQ ID NO: 950431 - DNA, 120 bp, Artificial Sequence
  ENSG00000255269_0 (sequence is synthesized)
gaagtcccagcctgttttgtctcttgcagtagccactccttacagagcctgaaagagaaggggagcgtccagccgccatcttgggctctgtcttgtcatcccttgaacaagtctgtcttc

SEQ ID NO: 950432 - DNA, 79 bp, Artificial Sequence
  ENSG00000255269_1 (sequence is synthesized)
cgttaaccagagagaatgggcaaggggtcatcgatggaccggagatgggatggtagggacagaaactgcagggtccgca

SEQ ID NO: 950433 - DNA, 120 bp, Artificial Sequence
  ENSG00000255269_2 (sequence is synthesized)
cggagatgggatggtagggacagaaactgcagggtccgcagaaggaactgctcaccgaaagccaacaagcttgccctgtggaatcccagaaaggcccaggaacttcgggacatcactgaa

SEQ ID NO: 950434 - DNA, 120 bp, Artificial Sequence
  ENSG00000255269_3 (sequence is synthesized)
ggcagagtgaagagaggaagagaagacagagaaatggaggggagaaaactattaaaataagtaataagaaaactttccccagaagtgcagaatctgaatttccagtataaaagggtccat

SEQ ID NO: 950435 - DNA, 120 bp, Artificial Sequence
  ENSG00000255269_4 (sequence is synthesized)
tgagcgccaagaacaatgaaggaaaaaaggtcccactcaggcctacgtatcattgtgaaatttcagaactagagggataaagaaaagatcctaaaagcttcccgagagataaaaaagaag

SEQ ID NO: 950436 - DNA, 120 bp, Artificial Sequence
  ENSG00000255269_5 (sequence is synthesized)
ggatcagcaatcagaattgcctcagactgctcaataaaaacatcagaagctagaagaaaatagaatgaggcatcaaaatcctgagggaaatgattcccacctataatttcatattctgct

SEQ ID NO: 950437 - DNA, 120 bp, Artificial Sequence
  ENSG00000255269_6 (sequence is synthesized)
caattatcaattgagtattgaagggaaataaagacatttttagacatgcagtttctccacttgatcttagcccaaaggccgagaggcaatgacatgcagtttctcaaaaggtttgcttcc

SEQ ID NO: 950438 - DNA, 120 bp, Artificial Sequence
  ENSG00000255269_7 (sequence is synthesized)
cactttcttggaaaaaaccaagaaagagggggcctggggaaccaggggatcccaacacaggagagtggcagaggaagctcccaggatgatggaaaatggaagcaaaccagcccagatgga

SEQ ID NO: 950439 - DNA, 63 bp, Artificial Sequence
  ENSG00000255269_8 (sequence is synthesized)
tagcctagccaacatagtgaaaccctgtctttaccaaaaaatacaaaaattagccgggtgtgg

SEQ ID NO: 950440 - DNA, 87 bp, Artificial Sequence
  ENSG00000255269_9 (sequence is synthesized)
gactccatctcggacagagggttccaggaggatgatcagtgagaaaaaaatggaatgggtagattatctgaatttcttggtgtgtgg

SEQ ID NO: 950441 - DNA, 120 bp, Artificial Sequence
  ENSG00000255269_10 (sequence is synthesized)
aaatggaatgggtagattatctgaatttcttggtgtgtggaaatattaaaaggctcttagaagatctaagaaaagttattgttaggtatctagaatagtaagcaaattttaaaaaagaaa

SEQ ID NO: 950442 - DNA, 120 bp, Artificial Sequence
  ENSG00000255269_11 (sequence is synthesized)
caggcgtgagccactgcgcccggccacaagtctgtcttctctttaatgcctcatttgtcttggcacaaagacacatgattaggctcagagtggcatgttttggcaaggagagaatgggca

SEQ ID NO: 950443 - DNA, 120 bp, Artificial Sequence
  ENSG00000255269_12 (sequence is synthesized)
atggctaaatggttctttaggaagaagagtcaggcgcctctggaagggatggtttggcctacagagagaaaacaggactgatccgggtcagactggcccagagggcaaaaaagcatttgc

SEQ ID NO: 950444 - DNA, 120 bp, Artificial Sequence
  ENSG00000255269_13 (sequence is synthesized)
aggaagaagagtcaggcgcctctggaagggatggtttggcctacagagagaaaacagataggactgatccgggtcagactggcccagagggcaaaaaagcatttgcttcgaaagccccat

SEQ ID NO: 950445 - DNA, 120 bp, Artificial Sequence
  ENSG00000238287_0 (sequence is synthesized)
gcagaaatccgtctctgtgagcggaggagggtgtgcttatgcgagagcaggttttgggagctcactaaagcaggtccctgattctggtcttgaatagcggaggaggaaaagaagatgatg

SEQ ID NO: 950446 - DNA, 120 bp, Artificial Sequence
  ENSG00000238287_1 (sequence is synthesized)
ggggaaaagaaaagaagccatttatgcatccctccctaattcagtatccgagcatgagggagtgtcaagctagtggggaagaagagagggtttagttttgaatgaagttgggagttttta

SEQ ID NO: 950447 - DNA, 120 bp, Artificial Sequence
  ENSG00000238287_2 (sequence is synthesized)
gcactgaactaaataggcattttactaaagtcaagactgttcttgttatttaaaggaacgggatcatcaatggaactctttgagatttcatccagaggctgggaaagaacattcatggta

SEQ ID NO: 950448 - DNA, 120 bp, Artificial Sequence
  ENSG00000238287_3 (sequence is synthesized)
gcttttattattattttcattattgtaagttgaggaagagaaaacccaggaaaatatacaaagagtgattggaattaataagagtaaaacaaggtggctgtataaaaggtcaatattcaa

SEQ ID NO: 950449 - DNA, 69 bp, Artificial Sequence
  ENSG00000238287_4 (sequence is synthesized)
agagtaaaacaaggtggctgtataaaaggtcaatattcaaaatcaattttgttattacttactagcaac

SEQ ID NO: 950450 - DNA, 120 bp, Artificial Sequence
  ENSG00000255260_0 (sequence is synthesized)
acagcccgagggtacccaggccaggagggccctgcttatccccatttgaaatgggaaaaagcctctgattaaaccgcttgcccaagtctcctggcagtaagtggtggagcaggatttcgt

SEQ ID NO: 950451 - DNA, 120 bp, Artificial Sequence
  ENSG00000255260_1 (sequence is synthesized)
cttcactattggaccagatgagcctctcggatccatcccagcctggcacgtctagatcctgcctcccaacgcaggctgctgagatgttcacttgaatctctcaccatggacattacccaa

SEQ ID NO: 950452 - DNA, 120 bp, Artificial Sequence
  ENSG00000255260_2 (sequence is synthesized)
acattacctaatgttttccagagagaagaatcctatttctttctgtgttttagattccaaaccaaaaagggacataattgtgtggtgaaaataacaagggacttcaaatcagaaaaccca

SEQ ID NO: 950453 - DNA, 120 bp, Artificial Sequence
  ENSG00000255267_0 (sequence is synthesized)
tggctccggttgccgagctgctcccaggagattcgttttcagaggatctgagaaaaacccggcagggttgatggcagctctttcttctcggtgccctcgcagtgcagcaggccccgctta

SEQ ID NO: 950454 - DNA, 120 bp, Artificial Sequence
  ENSG00000255267_1 (sequence is synthesized)
tttgcaagaagcagccaggtcagcccactgggcctccccacctcttgtgccccttcgcacatttcagagctctctcttttcctctgggtccttccattcaagagaggaggaggaggaggg

SEQ ID NO: 950455 - DNA, 120 bp, Artificial Sequence
  ENSG00000255267_2 (sequence is synthesized)
ggtgagcctgttgcgaacggcgttggtggggcaggggccggttcccctgtttctggggagccttttctgtgctggttgcaggcaggggccctcagtgtggagctgtggtgagcctgtgcc

SEQ ID NO: 950456 - DNA, 120 bp, Artificial Sequence
  ENSG00000255267_3 (sequence is synthesized)
ccgtcgtatttgggtcacagcctccgtgacccctagcccccgccaggcactccacccctgcagtgattcgcttgatattttaaaagcactccatcttctgcctgctgccttctctccatt

SEQ ID NO: 950457 - DNA, 120 bp, Artificial Sequence
  ENSG00000255267_4 (sequence is synthesized)
catctgggtccaggttttcgccgagccatctaataaagaatccaggggggagaatgatgggggcgaggagagggaaagtgctaacatttattaagtgcccgctgggtgcccagcacttcc

SEQ ID NO: 950458 - DNA, 120 bp, Artificial Sequence
  ENSG00000255267_5 (sequence is synthesized)
tcaacaactagagcagcggtctttctgctttctttcagctgcataaccctttcctccatccaaaatcgcaagcctaacctggccgtgtaaacaaacaccagggaagcgcctctgatggaa

SEQ ID NO: 950459 - DNA, 120 bp, Artificial Sequence
  ENSG00000255267_6 (sequence is synthesized)
ggggatggggcacctaaggccctgtctctcaccatgtagcatcctccccactcctaacagacactttggtgcttccatgaaacctggatctaaaagctctgtgctcattaaatctacata

SEQ ID NO: 950460 - DNA, 120 bp, Artificial Sequence
  ENSG00000255267_7 (sequence is synthesized)
taactctccaaggaaatagtatccccatttttataataccaagctaaaggccagagagggagagtgtaggatcacacaatttttttttttttttgagatggcgtttcactgtcacccagg

SEQ ID NO: 950461 - DNA, 120 bp, Artificial Sequence
  ENSG00000255267_8 (sequence is synthesized)
gcccatgcttgccctggctctgccgggaagacagtaggtgctttgcttcctgagaaaggtcaggaagaggcgtggctcctccagctgtacagacgaccaggccagatccacatggccccg

SEQ ID NO: 950462 - DNA, 120 bp, Artificial Sequence
  ENSG00000255267_9 (sequence is synthesized)
tttggtgcttggatgtctggtaaactgcctgccaaggaggaacgcagaggtgaagcacctggtccgacccatcatttcacgctgaatcgcctgttgacccatctcacttgactgactcct

SEQ ID NO: 950463 - DNA, 120 bp, Artificial Sequence
  ENSG00000255267_10 (sequence is synthesized)
gggatggaggcctggctccctccaaggcagccccttgcgttggaagaaaggcaatggtgtgaagcctgtctggttgtaccctccagctgcgggtccttactccagctctcagaaccagaa

SEQ ID NO: 950464 - DNA, 120 bp, Artificial Sequence
  ENSG00000255267_11 (sequence is synthesized)
ggaatctgtctaattgctcatctactggagagcccttgagaggggcttcttcaaggtcctgggaactccagaatgttcccctccacttaaaaaacacaaggatggtctccaggcacctga

SEQ ID NO: 950465 - DNA, 120 bp, Artificial Sequence
  ENSG00000255267_12 (sequence is synthesized)
ggaaacacagtctcctgccctttaggatcagccacctctgaggccaagacctgacccagattccggtacccttcacagaaggagccaccacagtggagaaggaagctcatggcttttggg

SEQ ID NO: 950466 - DNA, 120 bp, Artificial Sequence
  ENSG00000255267_13 (sequence is synthesized)
caagagcctctttgaaaaggaggaagagctcgcaaagggtgacggcagagagatgcccagaatcttgcaggaggaaggagaatgcagcctaacttgctggaaggattcaggagacgtgtg

SEQ ID NO: 950467 - DNA, 120 bp, Artificial Sequence
  ENSG00000255267_14 (sequence is synthesized)
agtaagagccaagatttcccagatcagcctacagccaagataagcacagctttctacccaacctgcacctcaccacagagaatggaagaatcactcagccatcctgtatattgtagcaat

SEQ ID NO: 950468 - DNA, 120 bp, Artificial Sequence
  ENSG00000255267_15 (sequence is synthesized)
aatgtatggttattttttctaggcactgagttttgggatgatttgttatgcagcaacagctggctgctacagagattgtgcccaccctcacagccccctggatctgtgtgctcgcactga

SEQ ID NO: 950469 - DNA, 120 bp, Artificial Sequence
  ENSG00000255267_16 (sequence is synthesized)
gttttgggatgatttgttatgcagcaacagctggctgctacagagattgtgcccaccctcacagccccctggatctgtgtgctctcactgaaaagcaaaagtaacttctgtttttctctt

SEQ ID NO: 950470 - DNA, 120 bp, Artificial Sequence
  ENSG00000255267_17 (sequence is synthesized)
ctctgtggccaccagggctgctgcccaaacagaaaggcaatttgcttagtggtggaggttgtgacctccagagtcagacagtcctggaatcctatcccagctgtgtgacctgcagttggc

SEQ ID NO: 950471 - DNA, 120 bp, Artificial Sequence
  ENSG00000255267_18 (sequence is synthesized)
ttcttaaccactctgtgcctcagtgtctccatctacaaaaggcacagtttctaccccatcaggttgtggtaaggactagaaaagacattggaagtaaagtgcatgacaccaaagtgctcc

SEQ ID NO: 950472 - DNA, 120 bp, Artificial Sequence
  ENSG00000255267_19 (sequence is synthesized)
agtgcgtccaaggtcagccattgcccagccttgcatactgaacggggctgtcgcttttgaggactgtcctgcccctaccaccacagacctggggtgaagtggtgggggtggggggctccg

SEQ ID NO: 950473 - DNA, 120 bp, Artificial Sequence
  ENSG00000255267_20 (sequence is synthesized)
agccctccagagcctgtagaggcctgatgactgcacaccaggccccttagcagacacaggagaggggggaggtgatgcctctgtgcaccagcacccagtgtgaagaactggaaacgtatt

SEQ ID NO: 950474 - DNA, 120 bp, Artificial Sequence
  ENSG00000253637_0 (sequence is synthesized)
ccagcctgtgctgactcagtcacccactgcatctgcctccctgtgggagcctcggtcaagcttacctccactctgagcagcaaatacagcacctacattattgagtggcatcagcagtag

SEQ ID NO: 950475 - DNA, 120 bp, Artificial Sequence
  ENSG00000253637_1 (sequence is synthesized)
ccagttacagttctcaggatccagctatggggctgatcggtaggtcaccatctccaacatccagtttgaggatgaagctgattgtatctgtggtgcagatcatagcattggtgtgacata

SEQ ID NO: 950476 - DNA, 120 bp, Artificial Sequence
  ENSG00000253636_0 (sequence is synthesized)
attgcatgtaatagataaggaatcaagcttcagttattttgacttgcccaaaattgatttggtaagtgacagaactttatttgctgatagtccacaattaaaacttttcattattcaggt

SEQ ID NO: 950477 - DNA, 120 bp, Artificial Sequence
  ENSG00000253636_1 (sequence is synthesized)
agaattcttttcccttttattctatacatgttgatatgcttgttataaagaagcctaggcctgtgatctcgatacccgtggagctctgcagctgcagcagatagtagaatgtatgggaat

SEQ ID NO: 950478 - DNA, 120 bp, Artificial Sequence
  ENSG00000253636_2 (sequence is synthesized)
tcacccaaatgcacctacagtagaagtattattcattatttcagagatgctttttcctctgtgtctggttatagatcagttggcatggcatcaagcaggttgatgttcctcttatcccaa

SEQ ID NO: 950479 - DNA, 89 bp, Artificial Sequence
  ENSG00000253636_3 (sequence is synthesized)
ttgagacagtctcacactgttgctcactgcaccctctgactgctggattcaagtgattctcctcctcagcctcccaagtaactgggacc

SEQ ID NO: 950480 - DNA, 89 bp, Artificial Sequence
  ENSG00000253636_4 (sequence is synthesized)
ggcacgatctctgctcactgcaccctctgactgctggattcaagtgattctcctcctcagcctcccaagtaactgggaccacaggtgct

SEQ ID NO: 950481 - DNA, 74 bp, Artificial Sequence
  ENSG00000253636_5 (sequence is synthesized)
ccagccctttttacttttaccaagtggttaccacaacaactttgatgagctgttattcaaaggaatcctgtgat

SEQ ID NO: 950482 - DNA, 120 bp, Artificial Sequence
  ENSG00000253636_6 (sequence is synthesized)
aacaactttgatgagctgttattcaaaggaatcctgtgatgagcaattttgaaaagaaaaatgatctctgtattatatatttggaattttgaataggaagtaggttaaacatgtgtttaa

SEQ ID NO: 950483 - DNA, 120 bp, Artificial Sequence
  ENSG00000253636_7 (sequence is synthesized)
cacttaacacatcccaggggcctctcaattgtggcacagtgtgacccctacatgctgtatgtgtatgaagcacagcagaagcacagaggcaaaacacacctcagtcggcttcccttgagt

SEQ ID NO: 950484 - DNA, 120 bp, Artificial Sequence
  ENSG00000253636_8 (sequence is synthesized)
gcaaaacacacctcagtcggcttcccttgagttcccttttaaagagtcttttctatatttctggatcattcctttcttttttatgttttttttggttttgttttgttttgagacagggtc

SEQ ID NO: 950485 - DNA, 87 bp, Artificial Sequence
  ENSG00000253636_9 (sequence is synthesized)
tcacccaggttggagtgcagtggtgcaatgactcactgcaacctctgcctcctggactcaagcaatccacccaccttggcctccccg

SEQ ID NO: 950486 - DNA, 120 bp, Artificial Sequence
  ENSG00000253636_10 (sequence is synthesized)
aaacctattacagtaactccctgagatgaagatgagacgtttagcttcctcacactccctcctcctcctccttccccatgcacctcccatgctttgttcaatgttactctccttttactt

SEQ ID NO: 950487 - DNA, 120 bp, Artificial Sequence
  ENSG00000253636_11 (sequence is synthesized)
gcttaaggtactctttcttatgccattgactttagacggaattccttggctttactgagtaagatggggaaattagaaatctgcagtccccaatgttaacactcactcattttgttagct

SEQ ID NO: 950488 - DNA, 120 bp, Artificial Sequence
  ENSG00000253636_12 (sequence is synthesized)
atgactatttcattgtcaagcggttggttggttggttagttggttggttggtttgttttgttttggtttcaccattcatacacagtctgtccactaattataattttttgtgctttatgt

SEQ ID NO: 950489 - DNA, 120 bp, Artificial Sequence
  ENSG00000253636_13 (sequence is synthesized)
gtgggtagattctaaaaagtcagaaaccaataaacctgtattatgattatatagtatattattcacattagttcctagaagtgtggttgactcattaaaaatgtaatcctatattacaaa

SEQ ID NO: 950490 - DNA, 120 bp, Artificial Sequence
  ENSG00000253636_14 (sequence is synthesized)
ccacatttaagcttcatattttgatcatgtttttattttcagtttcatcctgaaacttttatttccagttttatgaaagtagtacatgttcacacttttaaaactgaaatagttccacat

SEQ ID NO: 950491 - DNA, 120 bp, Artificial Sequence
  ENSG00000253636_15 (sequence is synthesized)
ggcttaaaatgcaaaacacgcttccctttcactaccctttggtgcttcctaaaagccaccattctcaactcttttagctcttcccttagctattgatttttgtatttgttaaaaacatgc

SEQ ID NO: 950492 - DNA, 120 bp, Artificial Sequence
  ENSG00000253636_16 (sequence is synthesized)
gctattgatttttgtatttgttaaaaacatgctcttactgctgtttgttgtttttcagtttgagatattatattatgattattattattaatattagagacagggtcttgctctgttgcc

SEQ ID NO: 950493 - DNA, 78 bp, Artificial Sequence
  ENSG00000253636_17 (sequence is synthesized)
cgaccgttttttgttttgttttgttttgtttttaaggacacagggtttcaccacgttgcccagactggtctccatctc

SEQ ID NO: 950494 - DNA, 84 bp, Artificial Sequence
  ENSG00000253636_18 (sequence is synthesized)
cacgaccgttttttgttttgttttgttttgtttttaaggacacagggtttcaccacgttgcccagactggtctccatctcctgg

SEQ ID NO: 950495 - DNA, 120 bp, Artificial Sequence
  ENSG00000253636_19 (sequence is synthesized)
taatatcttattgacctcctctatatgggatgctgtgcccggccacacctcacatacacacattgcactcacacatgtgcttctcctccccagttccttcagcatgtttatgccagtttt

SEQ ID NO: 950496 - DNA, 120 bp, Artificial Sequence
  ENSG00000253636_20 (sequence is synthesized)
tgttgaatcagtagtaagtgttcatattatgttaactctgtaattgttctttacacctgagctgtgtagtttctatgtacatgtcacttattcatctccaaattctccaaccaaattgaa

SEQ ID NO: 950497 - DNA, 120 bp, Artificial Sequence
  ENSG00000253636_21 (sequence is synthesized)
aatctcagaacataatgaaagatgtaggccctccttcggattgcattgttttttggagccatccctgcccctgctcccaggtagtctggctgctctgcaggcctgctgcaagctgtcagg

SEQ ID NO: 950498 - DNA, 120 bp, Artificial Sequence
  ENSG00000253636_22 (sequence is synthesized)
cttacattgcccttcgtctgcactctggggatcctcatttctctcccaggttgtgttccttattacctggaccctcttgcttggtttacactcctgtttagatagagcacctcctcctgt

SEQ ID NO: 950499 - DNA, 120 bp, Artificial Sequence
  ENSG00000253636_23 (sequence is synthesized)
accttcacagaaaaagcacagagaatggaaaactcatatcttgcatgtctgaaaaaatccttattctgccttacatttgaataataattttataggatatagaattttagtttggaaaac

SEQ ID NO: 950500 - DNA, 120 bp, Artificial Sequence
  ENSG00000253636_24 (sequence is synthesized)
attttccttccgaattttaaaggcattgctctgttgtcttctagtttcaaatgttgctttacataaatattctgatgcaattctaattactgattatttgcacatgacctacttttttct

SEQ ID NO: 950501 - DNA, 120 bp, Artificial Sequence
  ENSG00000253636_25 (sequence is synthesized)
ctctggaatattttagattcttgggtatctgataatctggaatttcatggtaagatgccttgttgtgaacctttttttattttttatttttattttttgagataagttcttgctctgtca

SEQ ID NO: 950502 - DNA, 87 bp, Artificial Sequence
  ENSG00000253636_26 (sequence is synthesized)
tttttatttttattttttgagataagatgtaatcacagcttgctgcagtcttgacctcttgggctcaagtgatccttctgcctcagc

SEQ ID NO: 950503 - DNA, 120 bp, Artificial Sequence
  ENSG00000253636_27 (sequence is synthesized)
cagctgattttttaaacttttggtccattccaagatggccgaataagaacagctctggtctgcagctcccagcgtgattgacgcagaagacgggtgatttccgcatttccaactgagcga

SEQ ID NO: 950504 - DNA, 120 bp, Artificial Sequence
  ENSG00000253636_28 (sequence is synthesized)
gaaggcatccatctccaaaccaaggagagggccctcaccggacatcagatctactggtaccttaatcttggactttccagcctccagagctgtgagaaataaatgtttgttttttaaacc

SEQ ID NO: 950505 - DNA, 120 bp, Artificial Sequence
  ENSG00000253635_0 (sequence is synthesized)
cagtgattgattcaagtggaagttctcagtgatattctgcatcagcataatgaagattcacaattcccagggacaccaattaccagcacagtctcccttaaaataatctacttggaagct

SEQ ID NO: 950506 - DNA, 120 bp, Artificial Sequence
  ENSG00000253633_0 (sequence is synthesized)
gctgtgtgctttgttgtgcgctgtgttctacgtgctctgtgctgtgcgctgtgctgtgtgctgagctgtgctggcatcgttctcactcctcctggtggctgtgggaggatggactgttta

SEQ ID NO: 950507 - DNA, 69 bp, Artificial Sequence
  ENSG00000253633_1 (sequence is synthesized)
caaaaaagaaatgaagatgaaaaaaatcaaggcccatggcccagttgaaactcttttgaatgaagtgga

SEQ ID NO: 950508 - DNA, 120 bp, Artificial Sequence
  ENSG00000253633_2 (sequence is synthesized)
aggcccatggcccagttgaaactcttttgaatgaagtggaggaggcaggatctgtgtgatttgagagtccaggctctgagtcaggactgcctcccggcaacacacaacagcaacaaacac

SEQ ID NO: 950509 - DNA, 120 bp, Artificial Sequence
  ENSG00000253633_3 (sequence is synthesized)
tgccaagaccttcaccttgagcgtgtgcatgcgctgctctacagaacccaggaggcgccttccgcccacccacagcatcacttcactgaacatggagttgggaagagacctgcgcaatcg

SEQ ID NO: 950510 - DNA, 120 bp, Artificial Sequence
  ENSG00000253633_4 (sequence is synthesized)
gttctttctgttggcaggcgcctcccccagcacacctctggatagttccccgtcttcagagaagagcttcctgcaattataccgtagtatctgcagcagcatcaccaaaatgtggccata

SEQ ID NO: 950511 - DNA, 120 bp, Artificial Sequence
  ENSG00000253633_5 (sequence is synthesized)
ctggaatccctgaggcggagcagctggacccgagggctcactgattgtgcggttgggagcgggcgtctcgcaggcttgcagagatcagcttttgttgcgccaggagctgatgcttaatgg

SEQ ID NO: 950512 - DNA, 120 bp, Artificial Sequence
  ENSG00000253633_6 (sequence is synthesized)
gtgcgctgtgttctacgtgctctgtgctgtgcgctgtgctgtgtgctgagctgtgctggcatcgttctcactcctcctggtggctgtgggaggatggactggtggttttggaggaatcca

SEQ ID NO: 950513 - DNA, 120 bp, Artificial Sequence
  ENSG00000253633_7 (sequence is synthesized)
gagaaatggctgaatcccacctctgagctggagcagagaagggaaaaaagaagtctggttggtctgagaatgaaccccacagtccagaggcagcagtgagctcctgggaatctggataaa

SEQ ID NO: 950514 - DNA, 120 bp, Artificial Sequence
  ENSG00000253633_8 (sequence is synthesized)
ttcatgcatatatatacatgtatgtgatttgtaacatgtatattatgtggtttatataacagatgcatgacataaacatgtaccggtagagacgtagagaattctttataaaaagtgaca

SEQ ID NO: 950515 - DNA, 120 bp, Artificial Sequence
  ENSG00000253633_9 (sequence is synthesized)
cgctcataaagacgaagagttcacaataaaggaaatggagatgctgcgggccgccccggtacactgacaaaccgattcttcacagtttgctgcagccagaggcagagggcaggctctgca

SEQ ID NO: 950516 - DNA, 120 bp, Artificial Sequence
  ENSG00000253633_10 (sequence is synthesized)
caacctgacttggagtggaatggaaaatatccaattaatcattcaaatttgtgtctaaggaaccatgatactcagttatgaatttcaagcacttttaaaaactgcttttgggagagatgt

SEQ ID NO: 950517 - DNA, 120 bp, Artificial Sequence
  ENSG00000253633_11 (sequence is synthesized)
gaggtttctgggaaatatttcatttgtgtaactgaagaaacattgtaggaggtgatgggggaacaacacgcacaaaaatgcagagcccgggtttgagggaaatatctttcccctttttct

SEQ ID NO: 950518 - DNA, 120 bp, Artificial Sequence
  ENSG00000253633_12 (sequence is synthesized)
tggccctcatggagagatgcttggctctgaaatggaaactagccacttcgtacaactcagttcctatgtcccattaacgtgctgagcacattaggtgtgaaaagcaaggagtggaaagac

SEQ ID NO: 950519 - DNA, 120 bp, Artificial Sequence
  ENSG00000253633_13 (sequence is synthesized)
agcagaaaacatggactgccgtattttcaagtccctttctgtcttgagaacccctgcccagggtgtgtgagtgcttttggggtgggggtgaaggcatgctaggaaaataccattttattt

SEQ ID NO: 950520 - DNA, 120 bp, Artificial Sequence
  ENSG00000253633_14 (sequence is synthesized)
ttaaaaacaagcaaacaagatcctgccatataatgtgctactaaaaatatttgctcctggcattgactgtcaagcagtggcatgctgcagccagcttgcgttggctcataaaagccaatg

SEQ ID NO: 950521 - DNA, 120 bp, Artificial Sequence
  ENSG00000253633_15 (sequence is synthesized)
gtacacatctcttcttaacctgatattcagaaatatcacactgataacttgaaattggccatagtggaagtatttacaccatggtaattgtgaaatcctacaaaccaggtcgtttgtcct

SEQ ID NO: 950522 - DNA, 120 bp, Artificial Sequence
  ENSG00000253633_16 (sequence is synthesized)
tggagaactggttgttaaagatctatcatcacagagctgctggcaggttatcctactgagagatcggatcataaccatgtatattagtcagcttgggctgccataacaaaatgccacagt

SEQ ID NO: 950523 - DNA, 120 bp, Artificial Sequence
  ENSG00000253633_17 (sequence is synthesized)
ctgggtggctgatacaacagccatttatttctcatagttctggaggctgaaagttcaagagtaaggtgtcagggagtttggtgtctcctgaggggaggcctttttctttggcttgcaggc

SEQ ID NO: 950524 - DNA, 120 bp, Artificial Sequence
  ENSG00000253632_0 (sequence is synthesized)
ctttacacaaagaacactttgtctcttgaggcgaaatgatgtatccagctagcgccatcgaagacatttggaaaactcaggtttcttcatggcttgcaagattacctagcatctggaaga

SEQ ID NO: 950525 - DNA, 120 bp, Artificial Sequence
  ENSG00000253632_1 (sequence is synthesized)
ggctctgggagggtccaaacaacaaaccacgcggcgttctctggtggctgtgctgggacgagtgggcggaaacagccgcaggtctctctcttctcttcagcctgaaactcactgcacaaa

SEQ ID NO: 950526 - DNA, 120 bp, Artificial Sequence
  ENSG00000253632_2 (sequence is synthesized)
ctccccccaaccccgcccctaagccagaggaagtgcttgaggaagtaatgtgtttaaagaatgtgggggaggggagcttacattaggaagcaggactcttagcgtgtagccagaaacccc

SEQ ID NO: 950527 - DNA, 120 bp, Artificial Sequence
  ENSG00000253632_3 (sequence is synthesized)
aataacctttaagctgttaacccttgaggatacggctcaatggtgtacccacgtggagttcattatttatctccgaaagccctgtctgtctctcattccgacccttaaacgaatcatctg

SEQ ID NO: 950528 - DNA, 120 bp, Artificial Sequence
  ENSG00000253632_4 (sequence is synthesized)
cagtttggccaacaattcagttccagctccctgggaataccagcaaatcccgggacagctgttccttctgctgaaaacaccaggaaaatccgcccaggagctcaggctgtttgaccagaa

SEQ ID NO: 950529 - DNA, 120 bp, Artificial Sequence
  ENSG00000253631_0 (sequence is synthesized)
atggcctggactcctctccttctccttctccccaggtcaaattctcaggctgtgatgactcaggaaccctcactgactgtgtccccaggagggacagtcactctcacctatggctccagc

SEQ ID NO: 950530 - DNA, 120 bp, Artificial Sequence
  ENSG00000253631_1 (sequence is synthesized)
ggacccctgcccagttctcaggctcagtccttgggagcaaagctgcccagacactcttgggtgtgcagcccgagaggtgaagctgagtactactgcttactgcaccatagtcgtgcttgg

SEQ ID NO: 950531 - DNA, 120 bp, Artificial Sequence
  ENSG00000284968_0 (sequence is synthesized)
aacagagactggttcaagggagattcggacacatctccacctccaaagccaagtgccttcccgggatgatctgcataacaatttgcgggtgctggtggtggagaagctccgggaagagaa

SEQ ID NO: 950532 - DNA, 120 bp, Artificial Sequence
  ENSG00000284968_1 (sequence is synthesized)
aactagccggacggtatcgaaccgcccgcaggcccgtcgcagctccattaatgcaactaccattacactaagtatctcctatagggctcttcaaactgtggtcaacttagtaaatgatgt

SEQ ID NO: 950533 - DNA, 120 bp, Artificial Sequence
  ENSG00000284968_2 (sequence is synthesized)
tgacagtggaagtgtgatcattttattttcctgcctttggaattgaagattgtaattttgcaaaaattttgttgaagatgatgtagctttggttcagagagctggagtacaatggcacca

SEQ ID NO: 950534 - DNA, 120 bp, Artificial Sequence
  ENSG00000284968_3 (sequence is synthesized)
ccgagtagctgggattacaggttccaagtctcttcttcggcctctcaaacatggtaccatccctaatgaagtcaacgggtccagcatgacaggatggaagtacaagtgtcagcacctatg

SEQ ID NO: 950535 - DNA, 87 bp, Artificial Sequence
  ENSG00000284968_4 (sequence is synthesized)
ccagcatgacaggatggaagtacaagtgtcagcacctatgtgagtcccaagaggggaaattagaaacaaaaaggaagaagaggacat

SEQ ID NO: 950536 - DNA, 120 bp, Artificial Sequence
  ENSG00000284968_5 (sequence is synthesized)
ctgaaatcttctagaaagaaagaacatgttatctatgaaggaacaaggatcatattgatattagatttctcaacagcacatgtgctgcaagaagacaaaggagtaatattaagtattgtg

SEQ ID NO: 950537 - DNA, 120 bp, Artificial Sequence
  ENSG00000284968_6 (sequence is synthesized)
gagtaatattaagtattgtgaaacaaacctagagcttagaatttcatatttaaaattctaaataaattatcattcaaattgttatagtttgggggccaggtgtggtggctcatgcctata

SEQ ID NO: 950538 - DNA, 120 bp, Artificial Sequence
  ENSG00000284968_7 (sequence is synthesized)
atcacttgagctcaggagtttgagacgagcctggcaaacacggcaaaaccccatctcaaaatacaaaaattagctagatgtggtggtgcatgcccataatcctagctacttgggaggctg

SEQ ID NO: 950539 - DNA, 120 bp, Artificial Sequence
  ENSG00000284968_8 (sequence is synthesized)
tgagactcggtctcatatatatatgagactgacaaattgatacagtttggatatatgtccctgccccagtctcatgttgaactgtaatctgcaatgttggaggtggggcctggtgggagg

SEQ ID NO: 950540 - DNA, 120 bp, Artificial Sequence
  ENSG00000284968_9 (sequence is synthesized)
ccatgaatggtttaacaccatcttcctggtttgtcctcatgacagtgagtgagttcttgagagaactcatcatttaaaaatgtgtggcacttcctctctttctctcttgctcctgctctg

SEQ ID NO: 950541 - DNA, 120 bp, Artificial Sequence
  ENSG00000284968_10 (sequence is synthesized)
ggtatgtgacgtgcctgctccccctttgcctactgccataattcagagtttcctgaggcctcccaagaagataagccgatgccagcaccatgcttcctgtaagctggcagaaccatgagt

SEQ ID NO: 950542 - DNA, 120 bp, Artificial Sequence
  ENSG00000284968_11 (sequence is synthesized)
aaattaaacctcttttttaaataagttacccaatctcaggtattttttatagcaatgtgagaatgtgctagcacacaaatatgttaccacttaaattatcattcaaatataaaagcatag

SEQ ID NO: 950543 - DNA, 120 bp, Artificial Sequence
  ENSG00000284968_12 (sequence is synthesized)
taaagctgacattaagcctcaagcatacaagttcacagaaaatttgtcacacaaggacccacattataagagaagcagaaattcatactgctttaagagatatcagaggctgggtgtggt

SEQ ID NO: 950544 - DNA, 120 bp, Artificial Sequence
  ENSG00000284968_13 (sequence is synthesized)
acagggaagggtcccggggtgcaggagagaagaaccccacttttccccgccccctccccccgagaaacttctgggactcattacgcaactcaagtagcaggtcccaacaacgggacagct

SEQ ID NO: 950545 - DNA, 120 bp, Artificial Sequence
  ENSG00000284968_14 (sequence is synthesized)
ctccgcaaaacgcggggtgcacaggcaaacgtctgacttgggggctgcgcgtgagggaggagcatgggtctcttcccatgtccccgtcccctgtttttctacgcgctacctgccgcggga

SEQ ID NO: 950546 - DNA, 120 bp, Artificial Sequence
  ENSG00000284968_15 (sequence is synthesized)
ggttcagagagtaagtcattccatttatatcaatattcttaaggcaatgtgctaggtgacgagccatattgatgacaaagacagagctcctattttcatgacattccagtgtggtggcag

SEQ ID NO: 950547 - DNA, 120 bp, Artificial Sequence
  ENSG00000284968_16 (sequence is synthesized)
aaacaagcaagtaaataattccagtacacacttctgttgatttatttcgtgaatggtgactggctatttaaaaagactaaatcaaattaattttctgataatgaataaaaaaggatagcc

SEQ ID NO: 950548 - DNA, 120 bp, Artificial Sequence
  ENSG00000284966_0 (sequence is synthesized)
actggaatccactgtgtgtgctgtcgtgtctcctactggcctcttcgatctcagcaaaaccaaagtgctgtgctacctaattgcttttttcttttttcctttccaactttctgtttcaga

SEQ ID NO: 950549 - DNA, 120 bp, Artificial Sequence
  ENSG00000284966_1 (sequence is synthesized)
ggcagcagcagtgagctgcaattgcagccagccctttccccagccccactcccttctatgaactcctagccttcttcgcagacagcctagcatctggctaaagggcaccttgttagcaaa

SEQ ID NO: 950550 - DNA, 120 bp, Artificial Sequence
  ENSG00000284966_2 (sequence is synthesized)
cacaatttctatgaacggattacccatggactgaagctgttgttgccagcggctggaggaggggactccagacatgagtgttccatgagtgatgcagatgtggagtggaggtctcagagg

SEQ ID NO: 950551 - DNA, 120 bp, Artificial Sequence
  ENSG00000284966_3 (sequence is synthesized)
cctgagtgaccgcagcacatggcttcgaggaggagacgtgggacgcggcacagcagtccgaatgggcgtcttctgcacagtcttccagcttccagggagcgtgtgtgttcaccaaggccg

SEQ ID NO: 950552 - DNA, 120 bp, Artificial Sequence
  ENSG00000284966_4 (sequence is synthesized)
aatgctacaagactagatcacagacatgataggaattctgaagacagaaccactgagtcggtacaggacacactgaggaggagagactggatttctgaagatgccctcccaggcacactg

SEQ ID NO: 950553 - DNA, 120 bp, Artificial Sequence
  ENSG00000284966_5 (sequence is synthesized)
gcatttctggagagcaaggagccctgcagatgcagtttctgacccttcctctctggaaaaagttctaagtattggcagtcttctacaatccctctctacttaaaatgcaaggcaatcagc

SEQ ID NO: 950554 - DNA, 120 bp, Artificial Sequence
  ENSG00000284966_6 (sequence is synthesized)
cacctccagaaccactaataatacaaacacagctgcttttgagcacttgcttttggctcagcactgtccaaagccccatacatcccatgttcttcatttcagcatgacgcatggacctaa

SEQ ID NO: 950555 - DNA, 120 bp, Artificial Sequence
  ENSG00000284966_7 (sequence is synthesized)
cacacaaaacaggtgaagacacactggtgcccaatgagcatgacaggaaaagccccctttctctgcacacatttcagttttgactgcagcacattcaattataactccagcattgggaaa

SEQ ID NO: 950556 - DNA, 120 bp, Artificial Sequence
  ENSG00000284966_8 (sequence is synthesized)
cacatttttttcccccaaatcaagctgttcatagataagccatgaagttaagggaaatcaagacacgcacatgtgagcgtcacatggagagccagggaaagtctagctccacaccaagca

SEQ ID NO: 950557 - DNA, 120 bp, Artificial Sequence
  ENSG00000284966_9 (sequence is synthesized)
cacatcagtggtgcctgaagggaagaggcttcttccgaggcagtcatctgagaccacggctcagatgtgcaacccttccccaggaggccaggaaccaaaaggtgaggaagaaacagacca

SEQ ID NO: 950558 - DNA, 120 bp, Artificial Sequence
  ENSG00000284966_10 (sequence is synthesized)
gctacatggcatttgtgttttacatttaatattacatatggactccagacaattatgcaaatagcagaatatatatgaaaagaaaatggggtgagtttcctaatagtatcattttttaat

SEQ ID NO: 950559 - DNA, 120 bp, Artificial Sequence
  ENSG00000284966_11 (sequence is synthesized)
ggaaaacaattgagttccatatgttataatcaagtcagtaaacagagttcctattttggaagtgatggggtttatatttgaattctgttgctttgattgcttagacacattaacaaatca

SEQ ID NO: 950560 - DNA, 120 bp, Artificial Sequence
  ENSG00000284966_12 (sequence is synthesized)
aactacacagcacatctatctatgccctaaatattttgtaatattcaacaatacacttctcctatgctgactttgaaagtgttaaaaagaattatgatgatgataactggctaagtttaa

SEQ ID NO: 950561 - DNA, 120 bp, Artificial Sequence
  ENSG00000284966_13 (sequence is synthesized)
attactaaactgactttccattatggatgccaaatacagatttctttctgtgtgttcagataatgttcatcttgtaaccaaaaacagcagagggaaaccgccacagttacaacccatacc

SEQ ID NO: 950562 - DNA, 120 bp, Artificial Sequence
  ENSG00000284966_14 (sequence is synthesized)
acatggggggaggctgttcttgttaaacttcgcccagacagagagtggttagagagaggtgtcatttaataaagtctgctgattttaagcccaaataaaaagcaaagaccaccaagagtg

SEQ ID NO: 950563 - DNA, 120 bp, Artificial Sequence
  ENSG00000284966_15 (sequence is synthesized)
attcatgtcccacacaggagagagaactgagccagaccagttccatccctgagcgaagtcagagcaggctctctactatcttcctgggaggggaaggctgcctcttcctttccatcaaga

SEQ ID NO: 950564 - DNA, 120 bp, Artificial Sequence
  ENSG00000284966_16 (sequence is synthesized)
caatctccaggttcaggactgcttcccaggccatggcgtgtggcttggtgcattctcactggagggcctgcctgggaaccatgggaagctactctaagagtgaggcatactgagtggaaa

SEQ ID NO: 950565 - DNA, 120 bp, Artificial Sequence
  ENSG00000284966_17 (sequence is synthesized)
taggcaactccagtggcttttcccagtgaatcagtcctaagcaagacaatagatgccctgcctttgaatcaaatatagacacaatataatgtggaaaaaactggaaacactcaagtaggg

SEQ ID NO: 950566 - DNA, 120 bp, Artificial Sequence
  ENSG00000284966_18 (sequence is synthesized)
cttccaaacttaacatgactatggtgaaaagatctgatattggaatctgtttttactcttggattacctattgaacttaagccaagctttttcaagtttttcaccaatctagactctaat

SEQ ID NO: 950567 - DNA, 120 bp, Artificial Sequence
  ENSG00000284966_19 (sequence is synthesized)
acttctacatggatactttggctaagtctaatcatctcaattagacataaatatttagtaatctaaactggatctctaataatttagacatttcaacttcacagtcataattgtaaaaac

SEQ ID NO: 950568 - DNA, 84 bp, Artificial Sequence
  ENSG00000284966_20 (sequence is synthesized)
ccgtctctattaaaaatacaacacttactcggaggctgagacagagaattgcttgaatccgagaggcggaggttgcagtgagcc

SEQ ID NO: 950569 - DNA, 120 bp, Artificial Sequence
  ENSG00000284966_21 (sequence is synthesized)
cagagcaagactccgtctccaaaaaataaaaaaattagtcattatgcaacacaatattctttaatattaatagactagaacacagcataattaatgaagacaacagaaagttttaaccta

SEQ ID NO: 950570 - DNA, 120 bp, Artificial Sequence
  ENSG00000284966_22 (sequence is synthesized)
cacagcataattaatgaagacaacagaaagttttaacctacactacgagcacatgcttgtttaaaacacgggcctaatacactgaaaacataaaccagccacttagagttcagaggtcac

SEQ ID NO: 950571 - DNA, 120 bp, Artificial Sequence
  ENSG00000284966_23 (sequence is synthesized)
ggaggcagtggtcgcctgatctatttctgcactttgcccagtgtaataggaggatccgtgggaagccagcagtggagaagtttatggagagctgtgtagtgaacccgaaattgcactccc

SEQ ID NO: 950572 - DNA, 120 bp, Artificial Sequence
  ENSG00000284966_24 (sequence is synthesized)
tgcttcccctcccacccacggccactccattttccctgcttctttcttcctctgaccatactacacgcaccttagcacaaacatctgatgccttcttacaagttttctcacggttggcca

SEQ ID NO: 950573 - DNA, 120 bp, Artificial Sequence
  ENSG00000284966_25 (sequence is synthesized)
aagagtgtagattaaccgagaagaaaacccaaatcgctggggggccacttgatgctgctgtagtctctgaaaatacatgcgaaatgtgtgacaatatacctggtggctctcctgagagac

SEQ ID NO: 950574 - DNA, 120 bp, Artificial Sequence
  ENSG00000284966_26 (sequence is synthesized)
gcgacaggtccacggaaggaaaccatggaaggatatgccaaagtttccaaacaaggatgagttaatatgttagtaactgactgcaagaatatttagctgacacagaataaagagatcaga

SEQ ID NO: 950575 - DNA, 120 bp, Artificial Sequence
  ENSG00000284966_27 (sequence is synthesized)
acaaaaaagatacaaacaggaactaccagtttctacacccagacagataactaggccaggtaaaccccaaatcgagacagacacgatgacagtgcttggaaatgttgtgggaaagcttct

SEQ ID NO: 950576 - DNA, 120 bp, Artificial Sequence
  ENSG00000284966_28 (sequence is synthesized)
atttaaaaagcatcagattcgatccagagccacttctacctaatattacacacgtaaagatctatttaaatatttaatatttatgtgtaattatggcagttatcatgcacttgagaatca

SEQ ID NO: 950577 - DNA, 120 bp, Artificial Sequence
  ENSG00000284966_29 (sequence is synthesized)
gggccatgttactcatgtaacaggacaaggtgagtcctgacatggatgctggtgcaagtgtgagcagaataaatgtgtggggggggaggaggcccacacataaagctcttctacctctag

SEQ ID NO: 950578 - DNA, 120 bp, Artificial Sequence
  ENSG00000284966_30 (sequence is synthesized)
agcaaactgccaagcagggcgagattcataagtcaattcgcattactctccacaaagaattattttatttttcttttcatttcaaaattataccattagtgtatatgatcattgtaagca

SEQ ID NO: 950579 - DNA, 120 bp, Artificial Sequence
  ENSG00000284966_31 (sequence is synthesized)
gatggctaatttcagttgaaaatatacacatcaataatatatggcatgttgttctgtttattttgctgactgcacggagacaaccataaacaaatggtcacacacaccgcctttacctga

SEQ ID NO: 950580 - DNA, 120 bp, Artificial Sequence
  ENSG00000284966_32 (sequence is synthesized)
gaccactttgggctactgaatggtggacttagaatgatttttagctttctgtgttttctttgcaataaatagtcaatgcttttgtgataagattaaaacattatttttttaatgtagttt

SEQ ID NO: 950581 - DNA, 120 bp, Artificial Sequence
  ENSG00000284966_33 (sequence is synthesized)
cagaaaaactttgtgctatctttcataattgactttaaaaataagcatttaaaatatttaatgcctacagacttaaacttttgatgcaattccctaacaagcagataaataaaattatcc

SEQ ID NO: 950582 - DNA, 120 bp, Artificial Sequence
  ENSG00000284966_34 (sequence is synthesized)
tagttgaagttgtggcctatttaatacataaatctctgagtccacagaagctgtagtaacaaacttgtttactcaaataagtgaaaaaaagggaatatatacaatttatgcttaatcatt

SEQ ID NO: 950583 - DNA, 120 bp, Artificial Sequence
  ENSG00000284966_35 (sequence is synthesized)
gaactgtacaaacatttcaaagattctaaatcccagctttacaaagaggctcagcctagcagttgcaaaccaaaagtcatgtaatatcacaggtttattcccaagccagtgttctgtatc

SEQ ID NO: 950584 - DNA, 120 bp, Artificial Sequence
  ENSG00000284966_36 (sequence is synthesized)
aagtatacttcgaatttaccccattttggaaaacatgtactttttccataaaaggctttaatttttaattaaatgtcaaagcctacagtgaagaagagaagtcgagtacaaactggttca

SEQ ID NO: 950585 - DNA, 120 bp, Artificial Sequence
  ENSG00000284966_37 (sequence is synthesized)
tctgcaattccgaatgcagatgagcagtctgcagttctgctgtaattggctggtgtttccagtcacctcctgacaaaggatgcacgctgctctggataagcccaaacccttgacccttca

SEQ ID NO: 950586 - DNA, 120 bp, Artificial Sequence
  ENSG00000284966_38 (sequence is synthesized)
ccccaccatgtactttgggcctgccacatctatacggagctaggagagcattaacaccaaagaccaaggctcctttccgaagtgctctgtgcacttgggaatacgaatactcccaaagaa

SEQ ID NO: 950587 - DNA, 120 bp, Artificial Sequence
  ENSG00000284966_39 (sequence is synthesized)
ggactctgcatcatgagcatgtgaatttgatggcacacttcataaacaggcaggatcttcagtcttgcatgtcttccatttaatgctagattgctgcaacagcttaataaggtattctct

SEQ ID NO: 950588 - DNA, 120 bp, Artificial Sequence
  ENSG00000284966_40 (sequence is synthesized)
gaatgccccaaacataagagttttgttataaaatgaataaataaaggcagggcctacgaaagacacaggcagtaataagaaatacttggaaaatgtttttccttttttgtggatagcact

SEQ ID NO: 950589 - DNA, 120 bp, Artificial Sequence
  ENSG00000284966_41 (sequence is synthesized)
ttactgcccccttttgcactttaacatcagaacaagtttctacgcagacttattctgaaatcagagaaatactggggtgtagcgatagggtgtcaggtttatacggaattaggttaccag

SEQ ID NO: 950590 - DNA, 120 bp, Artificial Sequence
  ENSG00000284966_42 (sequence is synthesized)
atactactgcttagagtaaaaagtaattaccttaaaacttccagcgagggcaccactatcttctcagcggctttaaacctccaagaaataaggtagtgattggaggctttgacattttct

SEQ ID NO: 950591 - DNA, 120 bp, Artificial Sequence
  ENSG00000284966_43 (sequence is synthesized)
gctttaatttggatgtatatgtgtgttggaacaattgcgtgttttcacaggtgccccttctttcacactttcctaaaacaaatatcgtctgcaacatgaacctgatttattcaaggaaaa

SEQ ID NO: 950592 - DNA, 120 bp, Artificial Sequence
  ENSG00000284966_44 (sequence is synthesized)
gaaaaggggtctaagagcaggctatacaatttggaaccattaaagtgttataaatctgagagcaaagactagatgggtgggggtggggggtacaattcacaccaatgacaagcaaaatct

SEQ ID NO: 950593 - DNA, 120 bp, Artificial Sequence
  ENSG00000284966_45 (sequence is synthesized)
tttcaagaaaaggaaagatgagaagcacagaaattcaaacacacggtgaactgatcggcacacaaaccagtttagcaactcttcaaggtgaggtgtatttgtgcctcttcatcacgcata

SEQ ID NO: 950594 - DNA, 120 bp, Artificial Sequence
  ENSG00000284966_46 (sequence is synthesized)
cctttgaaaaaaagtaattaaactacagtctaaaggaaagttttatttgtcaaacttgaatctgcaataacagagctagagggcccccagttcctggcccaaagacctcaacttgtattt

SEQ ID NO: 950595 - DNA, 120 bp, Artificial Sequence
  ENSG00000284966_47 (sequence is synthesized)
gatacagctgcgtgtgatgctgtgtatccttttatttaaacacaatccattttcctctgtcagtctacaattagcatatgagtcaaaataatattaaatttcacagcccacagtgctgca

SEQ ID NO: 950596 - DNA, 120 bp, Artificial Sequence
  ENSG00000284966_48 (sequence is synthesized)
ggaggagtgtccctctcccccggtgctgtgcttcagtcaattctccagcacgcgggctctcaaaccctcaagggaggcatcgggacattaggtgtcctctgggaaagcacaggtaccacc

SEQ ID NO: 950597 - DNA, 120 bp, Artificial Sequence
  ENSG00000284966_49 (sequence is synthesized)
agggtccctctcagaccttgtagtaaatgttcgccgggctctgcgggggcatctcctggacgatgtacaccgggtgcccgtagtccccgctgaccttctcgtagtgagggcagaagacgc

SEQ ID NO: 950598 - DNA, 120 bp, Artificial Sequence
  ENSG00000284966_50 (sequence is synthesized)
tgtccgcagtccttagcgggatgataatgtcactgggctctgagccgttgttgttgccgctgcgcttgggtgtggccagtgtgctgagcgacagcgtggtcgtgtgctgcggcgagtgct

SEQ ID NO: 950599 - DNA, 120 bp, Artificial Sequence
  ENSG00000284966_51 (sequence is synthesized)
tcctgtgtctcctccggtacttcagcaagaggaccaccagcgtgatgatgatgacgatgaagatgatgcatcctgaagcaatccctgcaaataaggccacttcggaaccgaggatgttgt

SEQ ID NO: 950600 - DNA, 120 bp, Artificial Sequence
  ENSG00000284966_52 (sequence is synthesized)
tccccgaatgtccggcgctgttgccgtctgtgctagaacctgcagacgcggagacagaaaaggtcagagatagttactgctgtcccagtgcagacggactgcttttatgacccttaaaaa

SEQ ID NO: 950601 - DNA, 120 bp, Artificial Sequence
  ENSG00000284966_53 (sequence is synthesized)
tgtgaaaaataagccaggcttattactaactagaagctggactttgcctcgccaatacctcgtctaagagctcaacgcaaaaggaaatgagaggtatctctaggagggacttccctaccc

SEQ ID NO: 950602 - DNA, 120 bp, Artificial Sequence
  ENSG00000284966_54 (sequence is synthesized)
tcccaagccacagggtttcctttgtatcattatccagcaagagcacagactgtcggtgacagccagcccttgatcttgcttcatcttctaacccgtgtcagccagcctggggcagcggca

SEQ ID NO: 950603 - DNA, 120 bp, Artificial Sequence
  ENSG00000284966_55 (sequence is synthesized)
gggaagaaaaagggaagtggccaattctccaggtcagcggtgagcgtttatgtggtattgctcttccgcctcctttgagaaagggagtttcatgcaaaccttcaaagggcctgccttcta

SEQ ID NO: 950604 - DNA, 120 bp, Artificial Sequence
  ENSG00000284966_56 (sequence is synthesized)
aagaagagccctgcctcctggcagaacagaacagctcgggaacgcggaaggagtgagggggcctgggaaaatgttcagctcgtaactcgtctgtattatttgatttacacttaaaatata

SEQ ID NO: 950605 - DNA, 120 bp, Artificial Sequence
  ENSG00000284966_57 (sequence is synthesized)
tttggaaggcagcagaaactctcacaccgaacagactgccagcccaaatgttaagcactaaaaaactgcctggcatcattatattatccatttatcagtttgtcacaagaatttgacaca

SEQ ID NO: 950606 - DNA, 120 bp, Artificial Sequence
  ENSG00000284966_58 (sequence is synthesized)
tcttgtcattgaaagttagaaataacaacttccctccttgactcttggaaagggatggaatattgctgcagacgataaatttgcacaacgaccaagcaagcacacaacaatcctaataca

SEQ ID NO: 950607 - DNA, 120 bp, Artificial Sequence
  ENSG00000284966_59 (sequence is synthesized)
aagactgttaagaaaacgaaggtcaacgacggacaattttatctggtattctacacttttgtcagggacctgtttaatattttcttttacatggaaaatgtgaaacaaaataacgataac

SEQ ID NO: 950608 - DNA, 120 bp, Artificial Sequence
  ENSG00000284966_60 (sequence is synthesized)
cacctgaaaaaatactattatgcaatatttaaaaatgttaccatttaaaatttagaagaggatcaattaaaccctctgtggcttagatataattagatgagggattagcacattaattac

SEQ ID NO: 950609 - DNA, 120 bp, Artificial Sequence
  ENSG00000284966_61 (sequence is synthesized)
atatacattaacatcagctttaagctggagttgacaaccagcttgataaaatgtcagccaatgaaacctttggcctgacagagtagttctaataactggcacttacagctcatgaactct

SEQ ID NO: 950610 - DNA, 120 bp, Artificial Sequence
  ENSG00000284966_62 (sequence is synthesized)
actcctttgaatatatgactttcattggaatgagttattttgttcttattgagtgtaattaataatgactcactgacagcaaagattcctgatcactgtaacttccagctaatcctaact

SEQ ID NO: 950611 - DNA, 120 bp, Artificial Sequence
  ENSG00000284966_63 (sequence is synthesized)
ggttagaagtctttagactctgccctaccttttaagatactactaagaatgtggtacccacagacctccatacacacagatcatgctgttatacctggatttggttttacaaagggactt

SEQ ID NO: 950612 - DNA, 120 bp, Artificial Sequence
  ENSG00000284966_64 (sequence is synthesized)
gttgtcgaacttcttccatttgtaccagcttctagttctggacgtcttgttggatctttattcctggttgatccagcagaacttgcatctatatgaaaaacaaatgattaattacggcac

SEQ ID NO: 950613 - DNA, 120 bp, Artificial Sequence
  ENSG00000284966_65 (sequence is synthesized)
agacatctgacaatatctagctttaggagctgcatatatatttcaacaggcatgaatagcaatgaacataagagtctttatgcaaagtactgtgaaatacaagaatataatttttctttt

SEQ ID NO: 950614 - DNA, 120 bp, Artificial Sequence
  ENSG00000284966_66 (sequence is synthesized)
aaaacaaaatggttatactagttatttcagaggtttagaacgtgaggccatctgtggaaactatagggattcttgcatttggcaggcaaagcattgcagatgacatttcaatttaactga

SEQ ID NO: 950615 - DNA, 120 bp, Artificial Sequence
  ENSG00000284966_67 (sequence is synthesized)
gcaagttgattgactactataccaatttttaattagaagaataattatttctttctgcacaataggttatctatattggaaaagtcacaatgaacaaaactcttctgtagtcaagattca

SEQ ID NO: 950616 - DNA, 120 bp, Artificial Sequence
  ENSG00000284966_68 (sequence is synthesized)
agtcaagattcagaaatgagcaaaactgcacaagcttttagttttcattctggatattttgattttgaaccaaagtgttttgctttttaaaaagaaatatctatctatctatctatctat

SEQ ID NO: 950617 - DNA, 120 bp, Artificial Sequence
  ENSG00000284966_69 (sequence is synthesized)
tatctatctatctatctatggcaatagacattctaccttgctgatcttaactcttagatctccaataaaagcttagtacattgacttgaggaaatctgtcagtggctcaaagtgcagaag

SEQ ID NO: 950618 - DNA, 120 bp, Artificial Sequence
  ENSG00000284966_70 (sequence is synthesized)
ggtttgctttgaaaactaaaaagaagagcgaatgaaggtgggcatcggcaacattagcaccatactagctgggggctacaccaggtcacagtggcgtcatgaagcagcagatggtcttta

SEQ ID NO: 950619 - DNA, 120 bp, Artificial Sequence
  ENSG00000284966_71 (sequence is synthesized)
ccttgtccaactttcatgaggatcttcatggctcttgtctggcacacccctccctcctggttatccaggccctccaaagacccatttgatgtagctgattaaaaataaaatggacaaaac

SEQ ID NO: 950620 - DNA, 120 bp, Artificial Sequence
  ENSG00000284966_72 (sequence is synthesized)
aaaaaaataaagaaaaatcaggaaatcaataagccaagtttacatgaacatgaaatgtctgaaaacaatttgaaaaataagaattcactcttagtcacaagttttctgaaagtatgggga

SEQ ID NO: 950621 - DNA, 120 bp, Artificial Sequence
  ENSG00000284966_73 (sequence is synthesized)
tctagagaacacttcagcccataaggcaagggaaaacccaacgcagaaataaacgccggaacatcttgtcattgttaaatatatgatgcagtcacatcggcttcctgctctgtggggctc

SEQ ID NO: 950622 - DNA, 120 bp, Artificial Sequence
  ENSG00000284966_74 (sequence is synthesized)
gtacttcctagtctacggttccgtgagatgccttcggaggacttggttatttttgcatttgctctcattattgttctttttggaatgatgttgtttttcccagaagtagctgtccaattt

SEQ ID NO: 950623 - DNA, 120 bp, Artificial Sequence
  ENSG00000284966_75 (sequence is synthesized)
gtttttttaagcgctgagcattgggaccacttaattgccacaaatgaatttcacatcttctggtgtgtactgtgtgcaaccttaaaatatatattagtaaaaatctttcattttatatcc

SEQ ID NO: 950624 - DNA, 120 bp, Artificial Sequence
  ENSG00000284966_76 (sequence is synthesized)
cttgtgttctatatacctattataaatacgtcctatcttccttctccccctggacatcataatttacttccgtcttaaggactctaagaggtctgccgtatgtgcttcaccttgacacag

SEQ ID NO: 950625 - DNA, 120 bp, Artificial Sequence
  ENSG00000284966_77 (sequence is synthesized)
agcagtccgaatgggcgtcttctgcacagtcttccagcttccagggagcgtgtgtgttcaccaaggccgaatgctacaagactagggaaacttgtagatcaatgagctttgctgtagggt

SEQ ID NO: 950626 - DNA, 120 bp, Artificial Sequence
  ENSG00000284966_78 (sequence is synthesized)
tggcaaacttcttagccctgagtcctccacccagcccttatgacagtcccccaaagcaacattcaaatagcctctcgtagtttcaaacttgagaccctcaattctgtattaagaaagatt

SEQ ID NO: 950627 - DNA, 120 bp, Artificial Sequence
  ENSG00000284966_79 (sequence is synthesized)
catttatcccaggctaccatatgcttttgcatggtaaatcgtaactctaaggagagctctgatggccagagtagttcagtaactgcaatgaacctgttagtgtggtatgaagagtttcca

SEQ ID NO: 950628 - DNA, 120 bp, Artificial Sequence
  ENSG00000253980_0 (sequence is synthesized)
cttggtacaagtgaaaaaaggatgcatttgcacaggcattcaacattccatcctgtttcatcacgatcctacaacatattatctccccattttatagatgagaaaattgaagttcacaga

SEQ ID NO: 950629 - DNA, 120 bp, Artificial Sequence
  ENSG00000253980_1 (sequence is synthesized)
ggccaaccctcttaatacgtagaagagcagcgtacaagctccactctatgactccagagcctgataacctaactactatgcttcctggcttagcacttgctgggactttccacagaagac

SEQ ID NO: 950630 - DNA, 120 bp, Artificial Sequence
  ENSG00000253980_2 (sequence is synthesized)
tgactgagcaatgcttatgctggattgcaaaggtggaacacactccctggttcctcagaatagccactcctctttgctccaacaacattggctcttttgctgctggactagcccagcaaa

SEQ ID NO: 950631 - DNA, 120 bp, Artificial Sequence
  ENSG00000253980_3 (sequence is synthesized)
tgtgtcgatgagaagttatgtgtctgctacccatgggaaaaggacatctccacgtttctaaaaaaatagcagttttcagctttctcctctggtaaggcagagtaggggagaactggagct

SEQ ID NO: 950632 - DNA, 120 bp, Artificial Sequence
  ENSG00000253983_0 (sequence is synthesized)
atggccaaagctttcttggaggatgattacctatagtttaatatattgccttttacttgagtttatgggcacagaaacgcatgatacaccagccttcccttctcctcgctgttttccttt

SEQ ID NO: 950633 - DNA, 120 bp, Artificial Sequence
  ENSG00000253983_1 (sequence is synthesized)
taggggagttagcagaatattgcatgttgccagaagagacctcccatggtgcagtctccttgttcacagcacggaagctgccagaataggaaacagagtgggaagacggagcagtggagc

SEQ ID NO: 950634 - DNA, 120 bp, Artificial Sequence
  ENSG00000253983_2 (sequence is synthesized)
gagggtggcccaggacacgcgaggggcccgccatagccatccagcctggtcctgagacctgagctggaatgttggcgtgatggttgaagctgtaacagccatcttcgactacaaaatgga

SEQ ID NO: 950635 - DNA, 120 bp, Artificial Sequence
  ENSG00000253983_3 (sequence is synthesized)
agctgcatgctacaaatgacagaagacaagatcaaaagaacctgtgttcccagcaccacagaactgtccctatggaaatagacatgactgttacataagaaagaaatataccctactatg

SEQ ID NO: 950636 - DNA, 120 bp, Artificial Sequence
  ENSG00000253983_4 (sequence is synthesized)
gtatactaagtaactaatgagaaagaatattttgtgccctggtaaagatggatacttctatatgttatgagaacaatttgatgaggtaattgtaatttagtagaataatatcaaatatta

SEQ ID NO: 950637 - DNA, 120 bp, Artificial Sequence
  ENSG00000253983_5 (sequence is synthesized)
atgtcaaatgactagtttggcattgccacatagtaattgttgggcaagttattaacctgtgtctcagtttcctcactggtagaataacaataacagacaatcgtactagtgtctaacgtt

SEQ ID NO: 950638 - DNA, 120 bp, Artificial Sequence
  ENSG00000253983_6 (sequence is synthesized)
ttactgaacatgtagcttggttcagcgccacacattatttgaattaagtagaataagagagtcctgagtaaatataacccaaatgtaaattatttttaaactttattacatatgtgaata

SEQ ID NO: 950639 - DNA, 120 bp, Artificial Sequence
  ENSG00000253983_7 (sequence is synthesized)
ttattatttgagcttctcatactgacttcttatttacttaactgattctaggcattgaccactcctgagattttgcatccatactccctaaaagttctggtccaaaatttagcacacaat

SEQ ID NO: 950640 - DNA, 120 bp, Artificial Sequence
  ENSG00000253983_8 (sequence is synthesized)
aaatatttaatgagggcatagcttatttttaagtaggtacctctattcacagaatgtttttctcttgattaaaaaaattaattgcattatatacataacataaaattcactattttaacc

SEQ ID NO: 950641 - DNA, 120 bp, Artificial Sequence
  ENSG00000253983_9 (sequence is synthesized)
acagtgtagagttcttcagtttccaggatcggaggtggtgtgtgtgtggttgatgtttttagagtgaggcaatggctcagccccgtgggagcagattgcatgagacaagcacccagaatg

SEQ ID NO: 950642 - DNA, 120 bp, Artificial Sequence
  ENSG00000253983_10 (sequence is synthesized)
tgacatgctgagtgtacgtctcccatcacccaaatgcaagctccttgagagcagcgacgtggtatttccaatgcctggaacagtacgtggcacctgatgagtacagtcaaaggtatttcg

SEQ ID NO: 950643 - DNA, 120 bp, Artificial Sequence
  ENSG00000253983_11 (sequence is synthesized)
gaatgtttgctgagtggtgactgatagcacagcaaagaagctccatgcagactggattgctggcatggggtaaggaggagaagccagccagagtgacctggcccagcgattgggaaccag

SEQ ID NO: 950644 - DNA, 120 bp, Artificial Sequence
  ENSG00000253982_0 (sequence is synthesized)
gctgtccttgacagcagctccgacggcacctctgtggctctgcaggagccgcctccccgcctcgtgggcacacagaatcgacatctagaggagtactcaccacttaattgatgatcaata

SEQ ID NO: 950645 - DNA, 120 bp, Artificial Sequence
  ENSG00000253982_1 (sequence is synthesized)
cacgttccttgaaagaaccgatagcatgcgatcgatacagagcatctgcactgggattgtccgccccgcctgtcagggaggcctcgggggctaatggagctgagggtatagtcggccttg

SEQ ID NO: 950646 - DNA, 120 bp, Artificial Sequence
  ENSG00000253982_2 (sequence is synthesized)
gaccctcgcttttttcctttcctgtactatgaagataactgccttatctccccctcaggactgttttggggattaaataggacgtttaaattaccaacgctctttgaaataaacatttca

SEQ ID NO: 950647 - DNA, 120 bp, Artificial Sequence
  ENSG00000253982_3 (sequence is synthesized)
aaattattataaccctttagtacatgtgggaaaacgttgacattcatgttcaagtttatttttctgctggctcatttaggtttgttgaagccttgagtccctaggattgtctaagaacat

SEQ ID NO: 950648 - DNA, 120 bp, Artificial Sequence
  ENSG00000253982_4 (sequence is synthesized)
gggtaaatgtgtgtggaggcctccctggaggccagagaactgccagcagccttcatgatgttaggggaacaggaacctaggagagccagggtgacatcgttttaaaatcaacaacccatc

SEQ ID NO: 950649 - DNA, 80 bp, Artificial Sequence
  ENSG00000253982_5 (sequence is synthesized)
tggcactcaaaaataaaataaaataaactccatcttaaaaccagtgaaaccaccattgcaaaattataactgagacagtg

SEQ ID NO: 950650 - DNA, 120 bp, Artificial Sequence
  ENSG00000253982_6 (sequence is synthesized)
tcttaaaaccagtgaaaccaccattgcaaaattataactgagacagtgagagatctgacctaaccaactccatcctacttttaacctccaaactgtccttgttcattcctgggtgtaggc

SEQ ID NO: 950651 - DNA, 74 bp, Artificial Sequence
  ENSG00000253982_7 (sequence is synthesized)
ctgggtgtaggccaaactaactttggaagaaacttagtttatggtttcccgaaacaaatccttttcttgtctgg

SEQ ID NO: 950652 - DNA, 120 bp, Artificial Sequence
  ENSG00000253982_8 (sequence is synthesized)
ttctgaccctccctaaattgctcctggggataacatcactattgaaaaacctaacaacagtgcttgagatattttgcagaccttgcacttgctgaattagctgggaccatccagatggat

SEQ ID NO: 950653 - DNA, 120 bp, Artificial Sequence
  ENSG00000253982_9 (sequence is synthesized)
aaactggctcatctgatcttgtggcccgcactcagcaaccggctcaggccaagaggacagctttgatccatacgatttcatctctgatctgacccctcagtgctcccagcttactggccc

SEQ ID NO: 950654 - DNA, 83 bp, Artificial Sequence
  ENSG00000253982_10 (sequence is synthesized)
tctctgatctgacccctcagtgctcccagcttactggccccctacctaccaaattatccttaaaaactctgaactcgactctg

SEQ ID NO: 950655 - DNA, 61 bp, Artificial Sequence
  ENSG00000253982_11 (sequence is synthesized)
gcaaaaactctgaactccgaattcttggggaaattgatttgagtaataataaaactctggt

SEQ ID NO: 950656 - DNA, 120 bp, Artificial Sequence
  ENSG00000253982_12 (sequence is synthesized)
tttgagtaataataaaactctggtctcccgcacagccagctctgtgtggattattctttctctatgcagttcacctgtttggataaatcagctctgtgtaggcaacatgaacctgattgg

SEQ ID NO: 950657 - DNA, 120 bp, Artificial Sequence
  ENSG00000253982_13 (sequence is synthesized)
gcggtggggctccgcgggcagcctggttgcgctgcacccggacggggccgaggggacctgaaagctgcggcagagcctgaccgcgccgttctccagaagagccccggccgcggctgagtc

SEQ ID NO: 950658 - DNA, 120 bp, Artificial Sequence
  ENSG00000253982_14 (sequence is synthesized)
gcgctccgggtgtggacggagccggagcctccccggggctcggtgaggacacagggcccaagccccggaccttcaagtcttgaccgagcgcatccccggcccttctgcgcccacacctga

SEQ ID NO: 950659 - DNA, 120 bp, Artificial Sequence; identical to SEQ ID NO: 915058
  ENSG00000253985_0 (sequence is synthesized)

SEQ ID NO: 950660 - DNA, 120 bp, Artificial Sequence
  ENSG00000253985_1 (sequence is synthesized)
acatcaattcaccatagtagaagctcaaaggaaggatacgtctattgagaaattgcacgccaagtaaaatcctgagataaacaacttcatacaagagaaactgacagtttaccatacatt

SEQ ID NO: 950661 - DNA, 120 bp, Artificial Sequence
  ENSG00000253985_2 (sequence is synthesized)
gtggtgtgctttctttttgtgcaaattatggaatagatgaaagtgacagagtgatgacaccacctaaatggaagcataatgtagacggttattgcagatgccttaccacacagctctgcc

SEQ ID NO: 950662 - DNA, 120 bp, Artificial Sequence
  ENSG00000253985_3 (sequence is synthesized)
agcgcacatgcttcctgcaaacctcctgcaatttaaacccttgggctccttcaactaatgacgctaatttgccaatggagcaatggctttcttcgctaaacactcacctacaaaggagta

SEQ ID NO: 950663 - DNA, 120 bp, Artificial Sequence
  ENSG00000253986_0 (sequence is synthesized)
gggaaagcaaagggaaatgagaatggagaaaagtattttctagataaagcagttggatttgatgggtgagccaggagaccagcagcagggagggtgggtggtccaatgggcagagttatg

SEQ ID NO: 950664 - DNA, 120 bp, Artificial Sequence
  ENSG00000253986_1 (sequence is synthesized)
gctaggaagtgaagagtcaagagcccctgtttcacccacagtccatgactgtaggatccaaggcatgaccccttcccacagcagtgcccctttaagagagggaaatgtgatcaaaagggt

SEQ ID NO: 950665 - DNA, 120 bp, Artificial Sequence
  ENSG00000253986_2 (sequence is synthesized)
agttggtgcttttgtcaacatgctgcttccagatcttcaggttactattaaaatcccaccaaaccctgccactggcgtccgtcgggctttgtggattgattcagatttaaggtgcgcccc

SEQ ID NO: 950666 - DNA, 120 bp, Artificial Sequence
  ENSG00000253986_3 (sequence is synthesized)
tctaggccttagcactggaggtggaaagagcagaagagtaaaacttggtcttggggtccccaaattcagagggagtgaccgcaacaggtaaggtgacagattctaaaccaaattatgtga

SEQ ID NO: 950667 - DNA, 120 bp, Artificial Sequence
  ENSG00000253986_4 (sequence is synthesized)
tacagatcatgaatggtttgcttattccaaattagcaccaaccctaaacaaaacagataaactgaatcctaaaatgtacccagtatgttcacactggcctaggctgataataaatgttct

SEQ ID NO: 950668 - DNA, 120 bp, Artificial Sequence
  ENSG00000253989_0 (sequence is synthesized)
gaagttaactagtggagtcagacaggaaaatactacagaccaagaattctcagactgttctgcaaagcccctggattcactgaaaaaagaacaagtttggtccagcaggattcatggcaa

SEQ ID NO: 950669 - DNA, 120 bp, Artificial Sequence
  ENSG00000253989_1 (sequence is synthesized)
aatgggactcgccttcagtacaaagaagattaacagtcctcagagacactgttcagaagattctcttttaagataataaaactgagagcccaagacaagtctgtgtattactgtgaggga

SEQ ID NO: 950670 - DNA, 80 bp, Artificial Sequence
  ENSG00000253988_0 (sequence is synthesized)
gacaagtcacatttttgaactgggcattgtgccgccaatctcagatgacaactttttgatgtagggactattttggcgtg

SEQ ID NO: 950671 - DNA, 120 bp, Artificial Sequence
  ENSG00000253988_1 (sequence is synthesized)
tcagatgacaactttttgatgtagggactattttggcgtgtcccacacacagcatcaagggaggggggtacaagaagaagcagagtgagaccagagtggagtgggagccaaaacaggtgg

SEQ ID NO: 950672 - DNA, 120 bp, Artificial Sequence
  ENSG00000253988_2 (sequence is synthesized)
gagtactcaaggacataaagatggcaaaagtacaccctggggactactagagaggggagggagtgaggggggcaagggttgaaaaactaattgttgggcactacactcaccacctgggta

SEQ ID NO: 950673 - DNA, 120 bp, Artificial Sequence
  ENSG00000253988_3 (sequence is synthesized)
atgggatcatttgtatctcaaacctctgcatcacgaaatatacccatgtagcaaacctgtgcatgtactccctgaatctaaaataaaagctgaaattataaaataaaaatagaacaatcg

SEQ ID NO: 950674 - DNA, 120 bp, Artificial Sequence
  ENSG00000237856_0 (sequence is synthesized)
agatgagaaggcacagatgttaaggagaatgccatgtgaagacatagacagagattggagttatgctgccaaggaatatctggagccatcagaagctggaagaggcaaggaaagattctc

SEQ ID NO: 950675 - DNA, 120 bp, Artificial Sequence
  ENSG00000237856_1 (sequence is synthesized)
cactggagtcttctgagggatgccaacaggctgcttagttgattcaagagaagactatgagtagggagaaaagttaaaacccagtcccacagattaatccaataaagaatagaagagaaa

SEQ ID NO: 950676 - DNA, 120 bp, Artificial Sequence
  ENSG00000237856_2 (sequence is synthesized)
atttaatttcaaattttgttaatcagaattacttggggacttgttaacacagaagtcactgagccccaattccagagtttctgaagtctggggaaggctcaagaatctgtgtttctatta

SEQ ID NO: 950677 - DNA, 120 bp, Artificial Sequence
  ENSG00000237856_3 (sequence is synthesized)
cacttctgaatatgcttgagaccttaagatgtcaatatggtagtggttttaacttggacagggtatccaaaatgtgatataagtgctaagtcttacccatccagaaagtagagttgagat

SEQ ID NO: 950678 - DNA, 120 bp, Artificial Sequence
  ENSG00000237856_4 (sequence is synthesized)
tgttgataagtttctatctcaggtaagtgtcacgtaaggaactagggttggactgaatgtgtaacaatgaggtgagcgcatcgactcgaagtccaggtgggagatattggggagggaaga

SEQ ID NO: 950679 - DNA, 120 bp, Artificial Sequence
  ENSG00000237856_5 (sequence is synthesized)
catgcttgaaataaatccaggggtctgaaatgttctactccttctgagtggagataagtgtggcgcacaatcttttaaatatacaaaggacagaaacactgctagaacataaaactgaat

SEQ ID NO: 950680 - DNA, 120 bp, Artificial Sequence
  ENSG00000237853_0 (sequence is synthesized)
gaagctcaagttcaccatgagccacagcagtaagccatgctttagcctctgacctgtgctccaattttggtacaatgatttctgccatgttctccaacaggatgtatgtcataaaagttg

SEQ ID NO: 950681 - DNA, 120 bp, Artificial Sequence
  ENSG00000237853_1 (sequence is synthesized)
cttcctttcaagacatttgaatggatcaccaaataattacctacttttctctcacaactcagataaataattaaaaggagatatacacagattggttgcatacttaagagtgagaatcaa

SEQ ID NO: 950682 - DNA, 120 bp, Artificial Sequence
  ENSG00000237853_2 (sequence is synthesized)
gaagctcaagttcaccatgagccacagcagtaagccatgctttagcctctgacctgtgctccaattttggtacaatgatttctgccatgttctccaacagggtgaggaaacagacagcac

SEQ ID NO: 950683 - DNA, 120 bp, Artificial Sequence
  ENSG00000237853_3 (sequence is synthesized)
caaggatgtatgtcataaaagttggatgccttcctttcaagacatttgaatggatcaccaaataattacctacttttctctcacaactcagataaataattaaaaggagatatacacaga

SEQ ID NO: 950684 - DNA, 120 bp, Artificial Sequence
  ENSG00000237853_4 (sequence is synthesized)
gttccctttccagtgaaatttttatttgtacggatgcatgtgtatgtaggcatatgcgcacacaaacacacacatacactttagttaaatcaatttcatatgcaaaagaaaagtgagcca

SEQ ID NO: 950685 - DNA, 120 bp, Artificial Sequence
  ENSG00000237853_5 (sequence is synthesized)
gggctaagttattaaaagaagcctttgaagcagagagtgatgatgtgtgaaagacatacaacaaaagtttatttaaacaaagaacaagcacagagggatgggacaaaagtgaaaataaga

SEQ ID NO: 950686 - DNA, 120 bp, Artificial Sequence
  ENSG00000237853_6 (sequence is synthesized)
taagagaaaaagctggaactcaaaaccaaattaactccaaacttaagttttcccacttcgacaagcatagaggactaggacaatgaaccgtaccttgcacccagcatctcagaaatactt

SEQ ID NO: 950687 - DNA, 120 bp, Artificial Sequence
  ENSG00000237853_7 (sequence is synthesized)
tggggaaaaatttatggaaaatagatttgaaacttccatatgctttctgtgcacttttactaaccaagcataatttaccaatattttcctagaaaaggaactgcatgtgtttttctgcct

SEQ ID NO: 950688 - DNA, 120 bp, Artificial Sequence
  ENSG00000237853_8 (sequence is synthesized)
gaagctcaagttcaccatgagccacagcagtaagccatgctttagcctctgacctgtgctccaattttggtacaatgatttctgccatgttctccaacagcaacttttgcaaagtaaaca

SEQ ID NO: 950689 - DNA, 120 bp, Artificial Sequence
  ENSG00000237852_0 (sequence is synthesized)
agtattatatttctttgacatgtgaagcataaaatgtgaccattaactcttctcaaatgtgagctccatgtggtgaaggaccacatatcatatgtaagcaggaaccctattctgtcaaca

SEQ ID NO: 950690 - DNA, 120 bp, Artificial Sequence
  ENSG00000237852_1 (sequence is synthesized)
agaaagatgaaagtcaacagagtaagaagttggcacaaggagttgattccgtctgctttggaggttttgctttttggcttaactgttacatggtgctattgtttttgttctgggaggtgg

SEQ ID NO: 950691 - DNA, 120 bp, Artificial Sequence
  ENSG00000237852_2 (sequence is synthesized)
gacagtgctgctttatttattttaagaaggcagcaagccaggaacacataattgaaaggaaatttctgtactggcgtattattttttcaactaagatggcaataaataacttgcaacttc

SEQ ID NO: 950692 - DNA, 120 bp, Artificial Sequence
  ENSG00000230490_0 (sequence is synthesized)
atgtactgctttaaacttaaagacctctttggacccgaaattgtaaggttaaccacctgggacggtaaactaccgaagtctgcttctgcttccaaaggagaaccgcagtgaaagtggtgg

SEQ ID NO: 950693 - DNA, 120 bp, Artificial Sequence
  ENSG00000230490_1 (sequence is synthesized)
tactgacagtacctggggcagccggatcaggaaagagtttgtctagccacagttgtcccttgcagtcagctacagaagacccagtgctgtgagaaaatcagacagaagtatttccaagac

SEQ ID NO: 950694 - DNA, 120 bp, Artificial Sequence
  ENSG00000230490_2 (sequence is synthesized)
tttccatgtctgactaaccaaggtaaaatcaggaactaacctaacagcttctgcaccatggcagaagagtttgcagaaatgtacctgttttacttttcaatagattatattttaacactt

SEQ ID NO: 950695 - DNA, 120 bp, Artificial Sequence
  ENSG00000230490_3 (sequence is synthesized)
gggctcttctcggggagtggagtgctatgacagatgagactttcatgcaagaaaataaatcctgcacatttgatgtactgctttaaacttaaagacctctttggacccgaaattgtaaga

SEQ ID NO: 950696 - DNA, 120 bp, Artificial Sequence
  ENSG00000230490_4 (sequence is synthesized)
tcctgagtggcaactggaaaggattcgtggttacttggatctaggaaaatcctgttttatctctgatgggactaagacaaagcactcctgttagtacaacccagcttgcgttcctccctg

SEQ ID NO: 950697 - DNA, 120 bp, Artificial Sequence
  ENSG00000230490_5 (sequence is synthesized)
cctgcagaggaagcatttggatgcttcccttcccgttggaagttgccagtctctcttcagagtgatgagggcagaactggtcattacggaaagagtcggaggaacggtgccacagcatca

SEQ ID NO: 950698 - DNA, 120 bp, Artificial Sequence
  ENSG00000230490_6 (sequence is synthesized)
ttcagcaaaaaatataaactttccctcaagacacaaattagaaaatatggtggtgcggtccctggtgaggaagccatccttccaggcccagaatttcctgccctgtccatttccaactta

SEQ ID NO: 950699 - DNA, 120 bp, Artificial Sequence
  ENSG00000230490_7 (sequence is synthesized)
tcataaatactttcctgacccctaaaatgcaggacactgatcaactcagttaagaagtttttatttcaagcctgctgggctttacaaaggactgcatttgactctgggcatggattcaaa

SEQ ID NO: 950700 - DNA, 120 bp, Artificial Sequence
  ENSG00000230490_8 (sequence is synthesized)
gtccttttgaataaatgacctgcttatctagctgtcaaaatgtggacctcactggcactcttaactatagccctgattcaagtttatgtgccagaaacggaacttctgtctttcaaattc

SEQ ID NO: 950701 - DNA, 120 bp, Artificial Sequence
  ENSG00000230490_9 (sequence is synthesized)
aacaaggtcttcagaccatggccgccttgcacaatatggaccagcagttgctattagagcaactaagggtatttacggtttattcaaataatgtagtgcaaagaataggaggtttgaaag

SEQ ID NO: 950702 - DNA, 120 bp, Artificial Sequence
  ENSG00000230490_10 (sequence is synthesized)
cctggcgaggagtggaagaattgacttccataaatctagggccctaaaaataccttttttgttcaagcgttggaaagaattttgtcgacctttctgcttcattggcatttctttacgttt

SEQ ID NO: 950703 - DNA, 120 bp, Artificial Sequence
  ENSG00000230490_11 (sequence is synthesized)
tcctggtaaccagagacaagttgcacaatcggtgtggcatttggctcctgattctgggggagagggagcgctgtctgctttttcagcaggcccagcacagtggagcgcggagcattcagc

SEQ ID NO: 950704 - DNA, 120 bp, Artificial Sequence
  ENSG00000230490_12 (sequence is synthesized)
actgggggagcctgccagcagctggccctgccaaactaaacaggaatcagcgcggacaaagggaagattatgtggtggaaaaaggataccccgaattaaggcaggaaagccacgtcaatt

SEQ ID NO: 950705 - DNA, 120 bp, Artificial Sequence
  ENSG00000230490_13 (sequence is synthesized)
atatttggaagcggtgtctctcccccgggttacaaagccgtgtctctaagatttctgaggatgttgctgtttcaccgaaagctcacccacaaaaggtcagtgggtggagttcaaacaaaa

SEQ ID NO: 950706 - DNA, 120 bp, Artificial Sequence
  ENSG00000230490_14 (sequence is synthesized)
aatttgtagaactaaaactgcaaacatccagaatcttgatggtgtgccaagccaaatgtcaactggaactcaaccaaaaactaaacctttactgatcacatgtttcctctgtcttgaatg

SEQ ID NO: 950707 - DNA, 120 bp, Artificial Sequence
  ENSG00000230490_15 (sequence is synthesized)
agaggatatttagagaaaatacacatttacaagtaaagcaagatttttaaatcaacaattcctgtactgaaatgttacatttgttaaataaataaatatatcttggactgcagaaataca

SEQ ID NO: 950708 - DNA, 120 bp, Artificial Sequence
  ENSG00000230490_16 (sequence is synthesized)
tcgccacaagtctttctgccaccactgtgcccttccatgcacactagtcacagcaggaggaggacaggaacgcgcgccaggagcggattaggggacgtgagcaggcgaccctggcagagg

SEQ ID NO: 950709 - DNA, 120 bp, Artificial Sequence
  ENSG00000230490_17 (sequence is synthesized)
ttctccgcgcagtggcccgcggtgggctgggcgtgctgagcactgcgtccctgcttcagtcctgatctcagcggaagaaaaataaaaacacaacaaaactcaaaccaacaaaacacctgg

SEQ ID NO: 950710 - DNA, 120 bp, Artificial Sequence
  ENSG00000230490_18 (sequence is synthesized)
gatttcccggccaccagccccagtgagtgcccccacaggataagctcttactaactcctcctggtggccccaggctgacctctgcaaggttactgttgggagttgaaggcaaagcggcct

SEQ ID NO: 950711 - DNA, 120 bp, Artificial Sequence
  ENSG00000230490_19 (sequence is synthesized)
ggcccactgctggtgatacccaggctaggctaagtctcctgaggacacgtggaggctcagcgcaggcgcaggagcagcgcggggctgggagaactggcaaagccacctgcggtgctgtgc

SEQ ID NO: 950712 - DNA, 120 bp, Artificial Sequence
  ENSG00000230490_20 (sequence is synthesized)
ccagggagtccatgattcttctctcctcctgtctcctttttcaaaatgcaaaataaaatgagaaattttgtttttaacaataaaagtaacaaatatatcatcaccaagatgtttagatgt

SEQ ID NO: 950713 - DNA, 120 bp, Artificial Sequence
  ENSG00000230490_21 (sequence is synthesized)
tagtattactggaaacaacttgcttttttttctccttaaataagtaagactttgaagatacagtaaggccccaccttcatccctcccctccccagagtgaacctccttaaatttgtctat

SEQ ID NO: 950714 - DNA, 120 bp, Artificial Sequence
  ENSG00000230490_22 (sequence is synthesized)
attgttcccacgtgatttttcttattttttccatgcatagttttatttaaatatgatcttgcatggtttttaaatttatgtaaatgatatcctttaaatatctttttacaatttacattt

SEQ ID NO: 950715 - DNA, 120 bp, Artificial Sequence
  ENSG00000230490_23 (sequence is synthesized)
gacagatgagactttcatgcaagaaaataaatcctgcacatttgatgtactgctttaaacttaaagacctctttggacccgaaattgtaaggattctataaacctggagagtaatcctaa

SEQ ID NO: 950716 - DNA, 120 bp, Artificial Sequence
  ENSG00000230490_24 (sequence is synthesized)
gaaaaatcatcagaagaaaggaatttgtagaactaaaactgcaaacatccagaatcttgatggtgtgccaagccaaatgtcaactggaactcaaccaaaaactaaagtgctctctgataa

SEQ ID NO: 950717 - DNA, 64 bp, Artificial Sequence
  ENSG00000230490_25 (sequence is synthesized)
caactggaactcaaccaaaaactaaagtgctctctgataacagacccaaagaaagagaacaatt

SEQ ID NO: 950718 - DNA, 120 bp, Artificial Sequence
  ENSG00000230490_26 (sequence is synthesized)
gaagccgtggaccctcgcgcatgtccctgaaatggagcgaaggatacaccaaaggaagagttgctacatcccatctctcctgggaaaggaacatgctgcagggagagagttgcgagagct

SEQ ID NO: 950719 - DNA, 120 bp, Artificial Sequence
  ENSG00000230490_27 (sequence is synthesized)
cttcacccttctaccctgcagcaaaggaaaatgggtctcctcaaggaaggcatttccccacagcaaagctgcaagcaacatgaaataatgcaccatgactatgggttcttggcaaaggat

SEQ ID NO: 950720 - DNA, 120 bp, Artificial Sequence
  ENSG00000230490_28 (sequence is synthesized)
tcctggcctggtacagttagaaattgggctctattctcaagcaaagggttccaacaaaaaaataccgcagcaagcagaccgtggaatgtgcttctccactcttccatacggggtgatggc

SEQ ID NO: 950721 - DNA, 120 bp, Artificial Sequence
  ENSG00000230490_29 (sequence is synthesized)
acagaatcagagttgaacatgggagggaagtggaagggataaaaatgtaatggaattgcagagttgttggcattcagatgtgtaggtggtgggtggcaagtcctgcttattgcctgtggt

SEQ ID NO: 950722 - DNA, 120 bp, Artificial Sequence
  ENSG00000230490_30 (sequence is synthesized)
atgacagatgagactttcatgcaagaaaataaatcctgcacatttgatgtactgctttaaacttaaagacctctttggacccgaaattgtaagtatctccaaagaagagctggtgcatag

SEQ ID NO: 950723 - DNA, 120 bp, Artificial Sequence
  ENSG00000230490_31 (sequence is synthesized)
ctgcctctctcctgcccttcactgctgatcttccactgccaggcatctgcaggggacattctggggaaatgacagagccagagcctttgcagccaacacagagcatgtcttctggttcac

SEQ ID NO: 950724 - DNA, 120 bp, Artificial Sequence
  ENSG00000230490_32 (sequence is synthesized)
cacctctatccacccttcattcgcagcgacaccactttccctggaggccagtgaatgttgtttttctctctgtcagtggggtaattcaaccaagcgagagagaagtaggagaagaaaact

SEQ ID NO: 950725 - DNA, 120 bp, Artificial Sequence
  ENSG00000230490_33 (sequence is synthesized)
gtgtgtgtgtgcatgtgtgtgtgtggcggcggggcagggcggtgtttatcaaaacgcaacagtaatttgaactattcagttctggtacaacatagaagcagtgtagtgacctctcgaggc

SEQ ID NO: 950726 - DNA, 120 bp, Artificial Sequence
  ENSG00000230490_34 (sequence is synthesized)
tcctttcaggattttggatgtaagaaaggagaattttgatttcaaaaaatggctttgaggtatctattcaaatctaataacttctgcaaaaagaaaaaaatagcttgggactaaaatctc

SEQ ID NO: 950727 - DNA, 120 bp, Artificial Sequence
  ENSG00000230490_35 (sequence is synthesized)
ttttagatgtctatttattttgtaaatcaaactttgaaaacaccctggggctatgggtttagaaacggttccaaagttctgggaaacaccccctgatgacaatgagaaatattctatgca

SEQ ID NO: 950728 - DNA, 120 bp, Artificial Sequence
  ENSG00000230490_36 (sequence is synthesized)
tttactgaacagcttctcccattggatcatgaaggcatactttaactgtgaggtaactgaggctgggtaagtcagtaattcatggggtgatctgctccttaaaggagttctgacatgtct

SEQ ID NO: 950729 - DNA, 120 bp, Artificial Sequence
  ENSG00000230490_37 (sequence is synthesized)
ttggcaaaagctttcagatgctatgatgccactcagaattcttagctcagggatataaatcaggttgtaacatgaataaggtatgtaagaaatcttcctttctgttatgaggtaagagaa

SEQ ID NO: 950730 - DNA, 120 bp, Artificial Sequence
  ENSG00000230490_38 (sequence is synthesized)
aaatgaggttatttaaacaatccatgtttatatgatggccatcttttaacaaaaattcttttcaatacattaaaaatgatcattgaatcatcaaatgtagttttgtcctctgatagacaa

SEQ ID NO: 950731 - DNA, 120 bp, Artificial Sequence
  ENSG00000230490_39 (sequence is synthesized)
aagcccagtgtacagaggtcacacagggagccccaagagggtggtcaggagggaaaatgagccctccactgtgcctactcatttaataacaccgccctgggcagagaggcaagactgggg

SEQ ID NO: 950732 - DNA, 120 bp, Artificial Sequence
  ENSG00000230490_40 (sequence is synthesized)
gtgctgtttgcagagtcacgtcaccttctccttgtgaccttagaaaccatgctaaattcttccattctgcaattgcctttcacataaaattgttgaataaaaaaacctggaaccagcctg

SEQ ID NO: 950733 - DNA, 120 bp, Artificial Sequence
  ENSG00000230490_41 (sequence is synthesized)
agaggaaagtacatgataacatctgccttttactttttaaacattattcagaagatgcaatcaaatataacctagttgttatgtgcagtgattacattttaaaagttatgccaatcattc

SEQ ID NO: 950734 - DNA, 120 bp, Artificial Sequence
  ENSG00000230490_42 (sequence is synthesized)
atgtagagctaaacacaaaaaaggaagctgcagatgcaatctgtgaaggacatttagcggcaaatgtgcgttttcttccacttttttcctgcaatttaatatccactaaactggataatg

SEQ ID NO: 950735 - DNA, 120 bp, Artificial Sequence
  ENSG00000230490_43 (sequence is synthesized)
actaagtatatatgtatatctttagaggccagtatatgttgtttctttgtgttaggtacacttggagtcaatcttgtgactaaggcagaagtgagatgatctacgattccatttacaaga

SEQ ID NO: 950736 - DNA, 120 bp, Artificial Sequence
  ENSG00000230490_44 (sequence is synthesized)
atctaatatgaggctctagcattcatttagaacttccatttatgtaccataaaaaagaggatatcaagtgaataaaggaaaccatcaaatctttccttagcactaggcagcatttggatg

SEQ ID NO: 950737 - DNA, 120 bp, Artificial Sequence
  ENSG00000230490_45 (sequence is synthesized)
acaagaggaatttagaaggtgagggctttctaagtacccacaagggtcaaatgcagtaagtggcatgctgaatactacagccaatattatcaagcactttttatcattattgttatttac

SEQ ID NO: 950738 - DNA, 120 bp, Artificial Sequence
  ENSG00000230490_46 (sequence is synthesized)
aacatacccctcttagtaggaattaaataaatttttggagaatttcaagataagtccattgaacaaaataaaaaataacagcctggtctagtgacactgtgcccttttgaagtgacagca

SEQ ID NO: 950739 - DNA, 120 bp, Artificial Sequence
  ENSG00000230490_47 (sequence is synthesized)
ctgacattttctagcattaatgctatgtttattcaggtcttgggttatcatttcattgatcattattcagttccatgaatgatcactgtgctcttgaaagaaattacgtcttgcttattg

SEQ ID NO: 950740 - DNA, 120 bp, Artificial Sequence
  ENSG00000230490_48 (sequence is synthesized)
ctccctcctgctctgctgtccacttgaccactcagtgtctatttttttctgactgtcgtagaacacttgggcaatgtagaaaacagtaaaacacaagtaaaattcccttatagtcatact

SEQ ID NO: 950741 - DNA, 120 bp, Artificial Sequence
  ENSG00000230490_49 (sequence is synthesized)
cccttattagataacctctgttaacattttgtatgtctttgtaattcttttcctactattttaacataattgatcccaaactaaatataatttgcactactcttattagctaaatatatg

SEQ ID NO: 950742 - DNA, 120 bp, Artificial Sequence
  ENSG00000230490_50 (sequence is synthesized)
acaaaggcgtttccttatatttttaaaattcatcataaacattgtttttgttgattgcatactattactatttcaacttttttcacgtacaaaatgaataaactataccctagcagctaa

SEQ ID NO: 950743 - DNA, 120 bp, Artificial Sequence
  ENSG00000230492_0 (sequence is synthesized)
agccatggttgcataccttccaagctccaccgcctcttcttcctcgtgggcagatccctgattttgtgtaggacagcacttgaaatgtatttgtgtgctcaacattggtttcctctctgg

SEQ ID NO: 950744 - DNA, 120 bp, Artificial Sequence
  ENSG00000230492_1 (sequence is synthesized)
aacctgggatcacttcaggggtggacacgtggcccaaccatgactgatgagacatgcggggaaatctgcagaggcaacttctaggaaaggttgggctcttgcagccaccctgtgactatg

SEQ ID NO: 950745 - DNA, 120 bp, Artificial Sequence
  ENSG00000230492_2 (sequence is synthesized)
gcctcaagcaattcactggccttggcatcccaaagtactggaattacacctggctaagcctcttctatttaaaaatagaaataaaagaaaaaaaaaacagatcaaaaccaaaagttatag

SEQ ID NO: 950746 - DNA, 120 bp, Artificial Sequence
  ENSG00000230492_3 (sequence is synthesized)
tgagagtggacaagccctggacaacagcaggcatgaggacttacagcccacatgctcagccaccaggtgcaatctccaacatgtgcgggctttgggaaaacacaatcgggcaagtgaagt

SEQ ID NO: 950747 - DNA, 120 bp, Artificial Sequence
  ENSG00000230498_0 (sequence is synthesized)
gctaaaatgagacaggttataacctgctttaaacttgacagctttctaaagctgctgggaatccaactggtggttattgaagatccaaaatggtttcacctctaccagaatgtgaaggga

SEQ ID NO: 950748 - DNA, 120 bp, Artificial Sequence
  ENSG00000230498_1 (sequence is synthesized)
aaggagagcccttgggaaaagctgtcctcaggcagagcatcgcaggctcctgaatcaccacctggccagaacccggtgttcagttacatcccagctacaggagagggcaacaggcaggca

SEQ ID NO: 950749 - DNA, 120 bp, Artificial Sequence
  ENSG00000230498_2 (sequence is synthesized)
gaaactaacagaagttgtgtgtctggccccctgggtgatgaagatgagaacagacacacagcatgtcttgtaccgagcattcttctatgtgcttcaggtgtcaaaactgttgggcttatg

SEQ ID NO: 950750 - DNA, 120 bp, Artificial Sequence
  ENSG00000230498_3 (sequence is synthesized)
ctggcacacaaataaagaagtgacatagcaacggacaaaaaagggatcccaagttgtctgattcaactccaaaaggacagagtcactgcaagcagagagcaggtagaagctgtacgctcc

SEQ ID NO: 950751 - DNA, 120 bp, Artificial Sequence
  ENSG00000230498_4 (sequence is synthesized)
agacaacagagctggccaagccagggtatgtatctttccagcctgtttccatggccaactcctcaaggtatctaattaaaggccacgcagacacaggagacaagagcctttggagaaaga

SEQ ID NO: 950752 - DNA, 120 bp, Artificial Sequence
  ENSG00000230498_5 (sequence is synthesized)
ggagcttgaagaggttaaacattttgaactgcttgctaccttcggctttggcctaaaggaaccctgagggatgctttgcaaagaacctggcctccggaatcaaaagtacagagacaatct

SEQ ID NO: 950753 - DNA, 120 bp, Artificial Sequence
  ENSG00000230498_6 (sequence is synthesized)
actggaatgtgtggctgctttagtatttggagaataataataagaaaagccagatgtctttaaaaagcaggtttgcggccacatgtgcaggtttgttacctaggtgaactcgtgtcacgg

SEQ ID NO: 950754 - DNA, 120 bp, Artificial Sequence
  ENSG00000230498_7 (sequence is synthesized)
ggatttgttgtacagaattatttcatcactcaggagaagatcacctgaaacaagaagaaaagctccttttttctgtgatcctccagcactgtctattgacaaagcttagcaacatgttca

SEQ ID NO: 950755 - DNA, 120 bp, Artificial Sequence
  ENSG00000230498_8 (sequence is synthesized)
ctgtaaagaagaaattcttaaaggggtcagctccattatcatagaatggtaataagtggattgggggttgagacaatgagttgataactgggaacagtacattcctttagctactcattt

SEQ ID NO: 950756 - DNA, 120 bp, Artificial Sequence
  ENSG00000230498_9 (sequence is synthesized)
tccatatttacccttcactcatgtgagttctgtacaatgaagcaactctgtgtttccacctaacaagatattgctattctcacaagtgaagaaattctcacccttcacaaaataaagaga

SEQ ID NO: 950757 - DNA, 120 bp, Artificial Sequence
  ENSG00000230498_10 (sequence is synthesized)
tgcatagtcctaaccatcactgtatccattggcagctatagtcattactcctcaaattctatcatagtttcattgattattttcttgcctaaagactattatgtatggttaagcaccact

SEQ ID NO: 950758 - DNA, 120 bp, Artificial Sequence
  ENSG00000230498_11 (sequence is synthesized)
agtttgtgtaaaaacaaaaatggaaaaaggagaaacagcctacacacataaacatataatagccaaagagaaaatacacaaagccactacagtcctcatttcagtagctgggcacaaggc

SEQ ID NO: 950759 - DNA, 120 bp, Artificial Sequence
  ENSG00000230498_12 (sequence is synthesized)
gttcagcgggtcaattctttatccagcagagggacctaaaccttccttcagaagggtaaagtccttagtcatctgcctttttattttttttggttgttataagaagtgctaatgggcacc

SEQ ID NO: 950760 - DNA, 120 bp, Artificial Sequence
  ENSG00000230498_13 (sequence is synthesized)
ccagataatcccctggattccacataatcctccttctccccagtgtgtagcagcaactcaatatccctttgataattgagatcaatcactccaaccagtgaagcaactccctatttttgg

SEQ ID NO: 950761 - DNA, 120 bp, Artificial Sequence
  ENSG00000230498_14 (sequence is synthesized)
cctgttggtttagtgacataaacagcctcaaatgaccaggtggcaatgttctcttcaaattcagtgaaattgttgtatctcatgatgaaagcattctccctcttgggggcaaagacctcc

SEQ ID NO: 950762 - DNA, 120 bp, Artificial Sequence
  ENSG00000230498_15 (sequence is synthesized)
aaattagcaaagttcaaagtttccattggatttggcagttccatcactgatagcagtaaaggaaatcatttcaggggagtagtgggaacaaaagccagattacaagggggtttacaatga

SEQ ID NO: 950763 - DNA, 120 bp, Artificial Sequence
  ENSG00000230498_16 (sequence is synthesized)
agagaaggcaaggcagggaagccagtaagtgaatgcagcccactctttcgaaagaaaagctatgaaattaagtagaggagagctctgtaaagcactcagaagaggacacaggattttgag

SEQ ID NO: 950764 - DNA, 120 bp, Artificial Sequence
  ENSG00000230498_17 (sequence is synthesized)
aggaatttttaaaatgaggaaaacttacacatcttataaaattcaaggggaagctcttctatgtaaaaagaaattgaaggaagacatgagtaaacaagctcccaaatgggatgggatcaa

SEQ ID NO: 950765 - DNA, 120 bp, Artificial Sequence
  ENSG00000230498_18 (sequence is synthesized)
taactcaaagcagaggcatctctgcctcagtatctgagcccaaagaagtggggtaggggtgtgatgggagaaaataaaggcaaatttgtagaaggtggagcaggaagttgagctggttac

SEQ ID NO: 950766 - DNA, 120 bp, Artificial Sequence
  ENSG00000230498_19 (sequence is synthesized)
cttctcccagtttaattttcagattacaaagcaaagccttttgatgaaagaactaagttggtagagcaggaagactgaagaaaatgcacaattttgaaaagaacaatagtggaaaataga

SEQ ID NO: 950767 - DNA, 120 bp, Artificial Sequence
  ENSG00000230498_20 (sequence is synthesized)
gaggggcaagagatagagaaatctaatctggttgtctataaatcatgactcaaattttacttcctccttgatgtatgctctgcctcttcaactgatagtaaataaaagattaataatata

SEQ ID NO: 950768 - DNA, 120 bp, Artificial Sequence
  ENSG00000230499_0 (sequence is synthesized)
ggtctaattttcatacacagtggatttgccatggaaacaccgagtatgtgcacaagagtcctgttggatctggaaaagtgaggaactttgaaaatgcatcacactgcctgcgtactgatg

SEQ ID NO: 950769 - DNA, 120 bp, Artificial Sequence
  ENSG00000230499_1 (sequence is synthesized)
ctctctgccggtcaaggacactcctcagcagagtggccctttccgaagctgaaacaacttctgcctctacttgcatggcttcccaaaggctggatccttgtgggaatgcatttcaaaagg

SEQ ID NO: 950770 - DNA, 120 bp, Artificial Sequence
  ENSG00000230499_2 (sequence is synthesized)
gaagaatcaactgatttcggggcatgcaatcaagaccctaggtatcagtatgaaggagttcttcatataatctggatatgagcctcagttaggtatatgtatagtaaagagtttctccca

SEQ ID NO: 950771 - DNA, 120 bp, Artificial Sequence
  ENSG00000248050_0 (sequence is synthesized)
aaacctcagcaatggggaacttcggagggccctcaggcatccactctacccgggggccgccagccgcacgcagcctcggattcgccctgcacatctgccgcccagcaggtttgaagtggg

SEQ ID NO: 950772 - DNA, 120 bp, Artificial Sequence
  ENSG00000248050_1 (sequence is synthesized)
tggcgttggatggagtgactgagaaaagctgcgacatcacagagagacaaaatagagaaagttttcccctggccacccctccttggcctccaggtcttaagtcagcctacagctccccac

SEQ ID NO: 950773 - DNA, 120 bp, Artificial Sequence
  ENSG00000248050_2 (sequence is synthesized)
aactgcctcgcccgagagctgcagagatccctctcgtaccggagcccagccaagccagtgcgtcaggaccgacacagcctctgggttccgggatctgaaaggctgcgatggattctactt

SEQ ID NO: 950774 - DNA, 120 bp, Artificial Sequence
  ENSG00000248050_3 (sequence is synthesized)
ggaaggggttgcatcagaaaggccttcagtggtcagcgcagctccctccggcttggagaagccaggctgctatgtagccagagaacagtcttttccccagcgctgccctgcagctgcccg

SEQ ID NO: 950775 - DNA, 120 bp, Artificial Sequence
  ENSG00000248050_4 (sequence is synthesized)
gctccaggaagtagctccagcacactgctaagggaagagcactggaattgaactcagaaaaacgagttcaagccagcactccaatcggtcccttcagcctgagtgcctttatgcctaaag

SEQ ID NO: 950776 - DNA, 120 bp, Artificial Sequence
  ENSG00000248050_5 (sequence is synthesized)
gttgtttcgttttttgtttttttttttttccgttgctgttgaaacggcatctcgttctgtggcccaggctgtagtacagtggcgcgatcagggctcactgcaacctctaactcctgggat

SEQ ID NO: 950777 - DNA, 120 bp, Artificial Sequence
  ENSG00000248050_6 (sequence is synthesized)
cctgggatcaagggatcatcccgtccaggcctctcaaagtgctcgaattacatgcggatgccattgcatgcgtggcctacgcctacggttcttgacccttctgaacttcaaatttaccct

SEQ ID NO: 950778 - DNA, 120 bp, Artificial Sequence
  ENSG00000248050_7 (sequence is synthesized)
tgttaaattgagggataataatagtgatacctacctctaggatagctgtgagggttaggtgaggaaaacaaacagctctatccagctgattgaacagaactttccaaagggcagctaagt

SEQ ID NO: 950779 - DNA, 120 bp, Artificial Sequence
  ENSG00000248050_8 (sequence is synthesized)
caggtccagatgatccagtcaatatttgttgatgccttttacatgacaggcagaaaaagcatttgtgatgcacacaaatttgtttaagaaagctcgaaaatctgtccaactggggactta

SEQ ID NO: 950780 - DNA, 120 bp, Artificial Sequence
  ENSG00000248050_9 (sequence is synthesized)
gaatagggtacatcagctgggccaagggccttgatttattacaattgctacccttaaatcttatctggtggtggaattcaccatgtataatgacttatataccctttattcagaattgga

SEQ ID NO: 950781 - DNA, 120 bp, Artificial Sequence
  ENSG00000248050_10 (sequence is synthesized)
gaatattccaagcagtgcgacactctgatccttatgcaccagtgtcctacataggaggactgtgctcctcgaaaactgagggtcattgtcccctttcatccatcctccaaacagcatttc

SEQ ID NO: 950782 - DNA, 120 bp, Artificial Sequence
  ENSG00000248050_11 (sequence is synthesized)
tgagtcctcaactctcaagcctaagaatatatgttgtgagtctagagagagcctgaagccagaggattagtggaatcaatttcccttcttcctataactccaaaagagagcttcctccat

SEQ ID NO: 950783 - DNA, 120 bp, Artificial Sequence
  ENSG00000248050_12 (sequence is synthesized)
aagaagaggtgattaattcatactttctacacccacagctgtttcaaatatggacctcaggaaagtgatggtccaggatgattcatacaacttattattcctaaaattatgagcctggga

SEQ ID NO: 950784 - DNA, 120 bp, Artificial Sequence
  ENSG00000248050_13 (sequence is synthesized)
tcatatactgtgagataagaacaaacttttaaagttaatggatgcttctgagttccctacttagaattgagaattgacactggggacctaatagcagaaacaccctccactgagttagcc

SEQ ID NO: 950785 - DNA, 120 bp, Artificial Sequence
  ENSG00000248050_14 (sequence is synthesized)
aagtcagaacctcagtgtcatcgtggacttttttctctcattcacctgacccacacatagcataaaccaccaagtgatctctatgccacccaagtaataacggtcttgaatctgattact

SEQ ID NO: 950786 - DNA, 120 bp, Artificial Sequence
  ENSG00000248050_15 (sequence is synthesized)
tctgtccactatttgtctccattatcttcgtgtagagtgtaaaccacagtcaccctagattattgcaatagtggtctaactcaaggtctcttgctttcagccttgcctcttattcctttc

SEQ ID NO: 950787 - DNA, 120 bp, Artificial Sequence
  ENSG00000248050_16 (sequence is synthesized)
tctccgatcagtgtctccatttttccacaagcctttatgaaaagctaaatcaagtcatgcttctccgtgaaaactcattaatgatttcctgattgtcctccaggtaatactgaaactcct

SEQ ID NO: 950788 - DNA, 120 bp, Artificial Sequence
  ENSG00000248050_17 (sequence is synthesized)
taatgtggcacacaaggctttcctgatctggccgccttgtttacctctccgatctcatttcttgccactcctctcttttgtagatactccctcccctccctaacctgtccctttggtccc

SEQ ID NO: 950789 - DNA, 120 bp, Artificial Sequence
  ENSG00000248050_18 (sequence is synthesized)
tgccactcttcccttacatacaaatggatactgctcaaactgtagcactttcagttctcggaggtggaggttttgtattctctttttcgtcgagactgctgcacctgcctctgtttagaa

SEQ ID NO: 950790 - DNA, 120 bp, Artificial Sequence
  ENSG00000248050_19 (sequence is synthesized)
catttcttgcactacatccacctatcctcctcaactcttaaagatacattgtttcattttagacagcttcttccaggaaacctcccctgatgattccaggacacttatttttacccccaa

SEQ ID NO: 950791 - DNA, 120 bp, Artificial Sequence
  ENSG00000248050_20 (sequence is synthesized)
gagagctgttatgatctcctcagaattccccatttacttgtttgttttcaccaaagcttgtaggcagtgcctagtacaattcctgttatacagttgacactcaatacataactgtcaaat

SEQ ID NO: 950792 - DNA, 120 bp, Artificial Sequence
  ENSG00000248050_21 (sequence is synthesized)
gaattaatgcctgaatgagtgaattctataaccccataaggggcccatcagtgcaagataaagaacatagatacaacttgttttgaaaatgattcagataaagctgcctccacaatgtat

SEQ ID NO: 950793 - DNA, 120 bp, Artificial Sequence
  ENSG00000248050_22 (sequence is synthesized)
ttgtatctgatgattgggtgtgtgcctaaaaaatccaacatgtgttcagtgacagcttttactgcagaagtgcaggcactgagaggctgtgcagtagccttgctgtcgccatagcaacct

SEQ ID NO: 950794 - DNA, 120 bp, Artificial Sequence
  ENSG00000248050_23 (sequence is synthesized)
agcagagggaaaggctgatgatttagtgttcagatgcctcttagctctgtacttttggaacccaagcctgtttttccactgttctaaaaggcaagttttaccgatgataatatctatgcc

SEQ ID NO: 950795 - DNA, 120 bp, Artificial Sequence
  ENSG00000248050_24 (sequence is synthesized)
gccttaatttcattcaagtgtttctcatgtcattagaagaaatgtcttgtaacatttggattataccatcaaagagatataatctaatacagcataatatggtcttctttcccctgcttt

SEQ ID NO: 950796 - DNA, 120 bp, Artificial Sequence
  ENSG00000272263_0 (sequence is synthesized)
ctcagatgatcaagtcccttatataaaagtggtacattggtaagaattaaagatcatagcctcatgccacttcaagtcaagttgtgtgacaaacaggttcctaaaaagcttttggttgtc

SEQ ID NO: 950797 - DNA, 120 bp, Artificial Sequence
  ENSG00000272263_1 (sequence is synthesized)
agagcttggtagatttcagggtcatgggtaaggactgtgggtgtggatttacccatgctcatcccaatgcccaacagacagcatcctccgcgtggccagatgagtggctcttgtggaaac

SEQ ID NO: 950798 - DNA, 120 bp, Artificial Sequence
  ENSG00000272263_2 (sequence is synthesized)
tttactgcaagaatgttctggcactgcagtgccatatatacctccctcttaagaactgggacttttcttggtgccatagagctcagagaaaaccagaaatgagagactgtcaaaactggc

SEQ ID NO: 950799 - DNA, 120 bp, Artificial Sequence
  ENSG00000272263_3 (sequence is synthesized)
ctggccctgtagaagtgtttttttggatggactcaataataagcatatgttaaaaatgtaaacttacaaggcaggtttctatgaataaactaccaattttagtgttttatccacagaaga

SEQ ID NO: 950800 - DNA, 120 bp, Artificial Sequence
  ENSG00000272265_0 (sequence is synthesized)
cctgagttcatcaaatgcatctagcaaagagacgtataaaggcaggagactcaaactatctgctacccatgtctgactgccagactgactataaaacacaaacttcatattgaacagctt

SEQ ID NO: 950801 - DNA, 120 bp, Artificial Sequence
  ENSG00000272265_1 (sequence is synthesized)
tctagccctgtttttagctctgcagtcagcacttgcctcataggtgtgagagaatcaattgaagtggaactgaagaacagccttctagatagtaaacatgtaattgttcatttcacattg

SEQ ID NO: 950802 - DNA, 120 bp, Artificial Sequence
  ENSG00000272265_2 (sequence is synthesized)
cctccccagagtcctagggggataaagttttaaaattacatatttttatttatgagttacttatgtgaatattcctgtttaatgtgatacacatagggaataaagaatgcttgaacacaa

SEQ ID NO: 950803 - DNA, 120 bp, Artificial Sequence
  ENSG00000272264_0 (sequence is synthesized)
gccggtcaccacattgcaggcaacgagaagagttgagcccttctgggagcccacaccttggggttccccaagccagggctgtgacatgctgtaacaccctctttgggactctgaggttgc

SEQ ID NO: 950804 - DNA, 120 bp, Artificial Sequence
  ENSG00000272264_1 (sequence is synthesized)
tggcatctctgagcttttgggttttaccacgtttcccttgcccagacactggtgcctgcagaagctggttgtggtccatctggtccagctgcagccttgcacagagccggtgcctgtagc

SEQ ID NO: 950805 - DNA, 120 bp, Artificial Sequence
  ENSG00000272264_2 (sequence is synthesized)
tcacccttggcaggtgtgggatctgggccagcagcacaagatgagcacagcctactgggcagagtgggcagaatgagcccagcaggcatgagcaaaactccagcagaggcgctgcaggcc

SEQ ID NO: 950806 - DNA, 120 bp, Artificial Sequence
  ENSG00000272264_3 (sequence is synthesized)
atggaagtttccagctggtgaagcgacatcctaagaactttgtgacactatcctttcttcttggtttgcacacatggttgaggcatgaatttctagtaaactcatggtcacctccaccta

SEQ ID NO: 950807 - DNA, 120 bp, Artificial Sequence
  ENSG00000272267_0 (sequence is synthesized)
tccccattgcgacaggcctccagcagttcccgtagggccccgctcactgctgggacccctgtcccaggtcctgctgccccaggccccagtggtgctgtgctgctaactccggccgcctcg

SEQ ID NO: 950808 - DNA, 120 bp, Artificial Sequence
  ENSG00000272267_1 (sequence is synthesized)
gggctctccgccaagctcgatccaggggaggatggagaggaagatgaggaagaagtcggggaagaagaggacgacggtgaattgttactgccactgccggctgggttgggagcgacccca

SEQ ID NO: 950809 - DNA, 120 bp, Artificial Sequence
  ENSG00000272267_2 (sequence is synthesized)
gcggcagatgaagtagaaaccgctgggaccacgggagcggcggcgacggtacagattgtgctggtggtactgcaacagctggtaccgtcaaccgggtccggggatcggggcctgtcgggc

SEQ ID NO: 950810 - DNA, 120 bp, Artificial Sequence
  ENSG00000272267_3 (sequence is synthesized)
caaccgggtccggggatcggggcctgtcgggcggatcccgactgccatccccctccggcagcgctaggccgtgccgcggggaggcgaagggggccaggccgctggccgtgggagaggctg

SEQ ID NO: 950811 - DNA, 120 bp, Artificial Sequence
  ENSG00000272267_4 (sequence is synthesized)
gggggaggaggtggcggcggcggcgctgaagcccctggggcgggctggagctgttgttgatgatggtggtgatgatgctgagagcgacgcgacgccgccatcttcggactcccctagcac

SEQ ID NO: 950812 - DNA, 120 bp, Artificial Sequence
  ENSG00000272267_5 (sequence is synthesized)
agcatccagcgcacaggaaatgatgctaggcggggtagcaggggccaaagagaaggagggaagtattgggagctcagagaacagccaagggaacggggcggggctttgtcactgagaggc

SEQ ID NO: 950813 - DNA, 120 bp, Artificial Sequence
  ENSG00000272267_6 (sequence is synthesized)
gggctttgtgacgtggtggcgggccggctggagagatttgaatgctggaaccagcttctgcctagatgggaaacatttcctgcatttctcactttcagtcggctttctttgccctgctcc

SEQ ID NO: 950814 - DNA, 120 bp, Artificial Sequence
  ENSG00000272267_7 (sequence is synthesized)
gctctgtttcccttagtctccctttgcttgctccagagccagctgttgagatgcagatcagagcaagcagggaatgtgtccgttatcatctattaagcgtccttgtctgaaaaatggaac

SEQ ID NO: 950815 - DNA, 120 bp, Artificial Sequence
  ENSG00000272267_8 (sequence is synthesized)
ttatagtaccaacctcacagaattattagcgggattaaaagagctaacagacaaagcgctctgccagtaaaacacaagtataattagcccgttggtaattttttaaattatagtatttct

SEQ ID NO: 950816 - DNA, 120 bp, Artificial Sequence
  ENSG00000272267_9 (sequence is synthesized)
tttccaggtgtccccttgagctcttgtcccttccctataatttttctcaccctatgtgctttaattcctcgtttttaaatgctggttcagattgctaggattggcgttccagctctgcca

SEQ ID NO: 950817 - DNA, 120 bp, Artificial Sequence
  ENSG00000272267_10 (sequence is synthesized)
tttgttgtttatatatgtacttgctatttcatcactctatgcctgtttttctctgtaaaattgaaataacaatagtgcaataagtgtgaattattaaaattatgatttttttttcctatt

SEQ ID NO: 950818 - DNA, 120 bp, Artificial Sequence
  ENSG00000272269_0 (sequence is synthesized)
gcggcgtcggggtcccatacctgatgctgttgtcgcccctgctggtaaggcttaattggcccctggtggcaacgccgcgtccggatcttgccgccaccgccccctccgactcctccggct

SEQ ID NO: 950819 - DNA, 120 bp, Artificial Sequence
  ENSG00000272269_1 (sequence is synthesized)
cccgaggccatggcggagcctccgccgcttcccgctccggggcgggtaagggggcgggagaggcagaggcggaggccttagagagcctcccccgccgcccggccccggcccaaaagtccg

SEQ ID NO: 950820 - DNA, 120 bp, Artificial Sequence
  ENSG00000272269_2 (sequence is synthesized)
cccgcgctgtccacacagtgggcacaagcaccccaggaaccgcgaggttgcgagcaggagcggagagagggtgagtgctggcagcggggaagggggtggcggccgcagaggccgaggagg

SEQ ID NO: 950821 - DNA, 120 bp, Artificial Sequence
  ENSG00000272269_3 (sequence is synthesized)
ctccggtccggccgcctctgcggacccccgcctctgtgtgtgtcacggtctctatggagatctcccgcagaggacagcacgaacagttccccgcggtgctgaggcctaactcgaccgccg

SEQ ID NO: 950822 - DNA, 120 bp, Artificial Sequence
  ENSG00000272269_4 (sequence is synthesized)
gagttcttccgtcgccctagccgtagctgccgcagttgaagccgctggcgacgcccgcctacccctcccctgtgcgcacagcgcccgccccgccgccgtcgtcgtcgtcgtccctgcagc

SEQ ID NO: 950823 - DNA, 120 bp, Artificial Sequence
  ENSG00000272269_5 (sequence is synthesized)
ctccgccgccgttgcgcctattacccctgctaaggcggctgccgcggtcgcgagccagaatgtcgtcactcatcggcgcccgacgcatttgcatcatcatgctgcgacgagctgataggc

SEQ ID NO: 950824 - DNA, 120 bp, Artificial Sequence
  ENSG00000272269_6 (sequence is synthesized)
aaagaggaagggctggtcgagtccacgctctcggccgcgcggcacgctgggaaacgtagttcaacaacggaacgcggcttctcggaaaggaagagggacggggaaggagatctccggggc

SEQ ID NO: 950825 - DNA, 120 bp, Artificial Sequence
  ENSG00000272269_7 (sequence is synthesized)
gccgcagaggcacaaagccaaggggtacttttgctgttcttggctgtaaattagactttgaaaagacacttaacataaaaacagtaacctcttcccattctccttctccctgtcggttgg

SEQ ID NO: 950826 - DNA, 120 bp, Artificial Sequence
  ENSG00000272269_8 (sequence is synthesized)
ttaagtaggcaggaagtaagcagacagtaaaatcaaagacaagagctaatgatttaagaaggaggaaaaaaaaatctgtggttgaaaaataaagtccatgatccttagaattagaaaata

SEQ ID NO: 950827 - DNA, 120 bp, Artificial Sequence
  ENSG00000271792_0 (sequence is synthesized)
ggagcttggagcagcgggaaggtcaggggcgcccatctgcggcactctcggtttggctcagtttctgcctacaagtgtctgtgcgtgtgaggagaaaataaagtcatgagctcatcacca

SEQ ID NO: 950828 - DNA, 120 bp, Artificial Sequence
  ENSG00000271795_0 (sequence is synthesized)
aggaaatgagccatgggtgagcaagcattaccacctgagctccgccttctgtcagatcactgggggcattagattctcactggagcacaaaccctgttgtgaactgtgcatgtaagggat

SEQ ID NO: 950829 - DNA, 87 bp, Artificial Sequence
  ENSG00000271795_1 (sequence is synthesized)
tggagcacaaaccctgttgtgaactgtgcatgtaagggatctagtttgcatgctccttataaggagcatatatctaatgcccgattg

SEQ ID NO: 950830 - DNA, 120 bp, Artificial Sequence
  ENSG00000271795_2 (sequence is synthesized)
acaatgtaataataatagaaataaagtgtgcaataaatgtcatgtgcttgaatcatcctgaaaccatctcccgtttctcctgcctggtccgtggaaaaagtgtcttccatgaaaccggtc

SEQ ID NO: 950831 - DNA, 90 bp, Artificial Sequence
  ENSG00000271795_3 (sequence is synthesized)
cctaacagatggaaaaggcctagaagccaggtccctgcagcactctcccctggcctcccattggactttctagaggtcagagtacagagc

SEQ ID NO: 950832 - DNA, 120 bp, Artificial Sequence
  ENSG00000271795_4 (sequence is synthesized)
tggcctcccattggactttctagaggtcagagtacagagcgcattccctaacaaggagcccatggcaggtggcctctcctgggattacctgtctcctgtgtaaggatgagggcagttaca

SEQ ID NO: 950833 - DNA, 120 bp, Artificial Sequence
  ENSG00000271795_5 (sequence is synthesized)
ggaagctcctttgggggagaggatgcaagttccaccttccaggcagggtgcaaaagtacagttctcccttccttgttcacagtgcttcccagagaactgtgggggacatttgcagacata

SEQ ID NO: 950834 - DNA, 120 bp, Artificial Sequence
  ENSG00000271795_6 (sequence is synthesized)
gcctaggagaaaaagaagggaggtgagagaccgcactggcctagcagttaaaggagacctggcattggcagactggtgtgtttgtgcagccgttcagttaccatttatttatttggttgc

SEQ ID NO: 950835 - DNA, 120 bp, Artificial Sequence
  ENSG00000271795_7 (sequence is synthesized)
tcccctctgtgcccaataccgtgctgggcattggtgccctgctgaaccaagagcactttggtccctgccctcaaacagcttacagcccaccagagacaacagtcacctaaagaacagtaa

SEQ ID NO: 950836 - DNA, 120 bp, Artificial Sequence
  ENSG00000271795_8 (sequence is synthesized)
taaacaggataacaaccatagacactaacttagtgctagtcactgttccaaggatcttcctgtgttggctcatttgatcctcacgatgaccctgaggttggtgactgtcatcatcctcat

SEQ ID NO: 950837 - DNA, 120 bp, Artificial Sequence
  ENSG00000271795_9 (sequence is synthesized)
caggggacaggtacaaagggatggcagatgaggaaaggaggcacagagaatggacagaatttgctcaagccagtaaatggcaaagctggggttcaaacctagacagctagctataatatc

SEQ ID NO: 950838 - DNA, 120 bp, Artificial Sequence
  ENSG00000271795_10 (sequence is synthesized)
agtatctcagtaattataataaaattaattttattgaagggaaatgctgggaggggtgggggatgaggctagcttactctagggatctgggagctatttcatttgagatctgaaggatga

SEQ ID NO: 950839 - DNA, 120 bp, Artificial Sequence
  ENSG00000271795_11 (sequence is synthesized)
gtagaaattagctaggcaagaagctagagggcaaagagaaaggtgtttcaggcggaagagaagagtgcgtgcaaaggctagggaagggtgtggcatggtcaaggaactcaaaccacacca

SEQ ID NO: 950840 - DNA, 120 bp, Artificial Sequence
  ENSG00000271795_12 (sequence is synthesized)
gggtgggccagcctggtgagggacagggagagtttgaactatggcctgggaggtgcaggagccacatgcagggattgggactctatcctagcagcatggcggccactgagcagttctcag

SEQ ID NO: 950841 - DNA, 120 bp, Artificial Sequence
  ENSG00000271795_13 (sequence is synthesized)
aagctggagaacagggaggaggctggtgccagggtgagaggtgatgggggcttgggacagagggacagcaatggggaaagagagaagtgatggattccttggatattttgcaggtagaaa

SEQ ID NO: 950842 - DNA, 120 bp, Artificial Sequence
  ENSG00000271795_14 (sequence is synthesized)
tgacatgattagccagacaaaaatcagaaaaaggggtaatgcgaagtgttgacaggcatgtcacatgttgacaggcatgtgggtacataggaacctctcatgttgtgtgtgatgtataga

SEQ ID NO: 950843 - DNA, 120 bp, Artificial Sequence
  ENSG00000271795_15 (sequence is synthesized)
atagatggctgagaggcatgtgggtacacaggaaccgctcatgttgcatgtgatgtatagaatagccatgctgagagcaatgtatccctatttagtcaaaataattatttgcatactgtg

SEQ ID NO: 950844 - DNA, 120 bp, Artificial Sequence
  ENSG00000271795_16 (sequence is synthesized)
agcctgtgacttccacccctgggtgtcgggtgtgtgtgtgtgaaggaaactctcacacagcttcacaaggagacatataggagaatgctccctgcagcattgatgatggagatgggtgtt

SEQ ID NO: 950845 - DNA, 120 bp, Artificial Sequence
  ENSG00000271795_17 (sequence is synthesized)
tggagtgcgagggtggagagggaaaatgtgagtgcgtgtacatcatggagtactgagccacagttagaagcaattaatgagaattgctcatggcagcattgacagatcttaaaaatatgg

SEQ ID NO: 950846 - DNA, 120 bp, Artificial Sequence
  ENSG00000271795_18 (sequence is synthesized)
tgctgagcgaaagcgtaaacaacatataccacttatataaattggaaattcaagcatatgaaaaacaacatgtattttgcaagaactcattcaaaaactgtaaatgtttgcctctagtgt

SEQ ID NO: 950847 - DNA, 120 bp, Artificial Sequence
  ENSG00000271795_19 (sequence is synthesized)
tagggaaggggaagggagtggaatataagttaaaggggaatgagaaggagactgtgcatagaccagtgatgacactaaggtatgtgattaattcaaccctctgcccctgaggtccccatt

SEQ ID NO: 950848 - DNA, 120 bp, Artificial Sequence
  ENSG00000271795_20 (sequence is synthesized)
catatcctccctcatccccccagaagtagaaagatagtttttgttgagagggaaggaagactcctggcttcccctagtctagatattgcagattccaacctgttactcacaagttagggg

SEQ ID NO: 950849 - DNA, 120 bp, Artificial Sequence
  ENSG00000271795_21 (sequence is synthesized)
aagagagagaaatttggaaccaggaggctctgagatctccaccctgacatgcttttcccacctgaagagccttctgggataaaccctgggttcagcctggcaccccagccctcacctgcc

SEQ ID NO: 950850 - DNA, 120 bp, Artificial Sequence
  ENSG00000271795_22 (sequence is synthesized)
ccatgggtccatgagcacttcccaccattgaggcatgtgttctggctgcagtagtcactgtggaggcagcactgggtgagggcttgtgtctccagcaagcctgccaccgtcttgccaggg

SEQ ID NO: 950851 - DNA, 120 bp, Artificial Sequence
  ENSG00000271795_23 (sequence is synthesized)
gccagcagatctagagcctcttcgttgaccacgacagcatccaggcagccttcaaagccctgggagacattcgaggaagaatgcaacagaatgaggccgcccagcaagaggtgcctttcg

SEQ ID NO: 950852 - DNA, 120 bp, Artificial Sequence
  ENSG00000271795_24 (sequence is synthesized)
ggcctcagaccacggcagttctctgggaccacaagggaggtgttgcccatgctgtcaaccatcaggcgaatggaagcgtccatctcctccaccaggatggagtgccactcgtggtcattc

SEQ ID NO: 950853 - DNA, 120 bp, Artificial Sequence
  ENSG00000271795_25 (sequence is synthesized)
acatggcgctgggaggaaaggtttccatagaaaccacccagacagtggtattccagctggggcactccactggccagctgcaaaggaaatccaaacagccatcagcaaagccaaggagtc

SEQ ID NO: 950854 - DNA, 120 bp, Artificial Sequence
  ENSG00000271795_26 (sequence is synthesized)
cttgtaaacctgctaagaggctgccagttcaaagaatgttgtttgtatttttatgggtaggaggggggtgtttggctgttttagacatggcatttgcagagcataaaaaccctcaaagtg

SEQ ID NO: 950855 - DNA, 120 bp, Artificial Sequence
  ENSG00000271797_0 (sequence is synthesized)
gccacagccctcgacctacagccttccagaccttcccaccgtacggcgggagagtgggggtaacctcaagcccacttgaaaccagtcagtgccaactgggcggccgcgcagcccccttcc

SEQ ID NO: 950856 - DNA, 120 bp, Artificial Sequence
  ENSG00000271797_1 (sequence is synthesized)
ggcgcccagtttgcggtccgactccgccgcgcctttccgctggagcccgggccttgtgccagcctggctgactgtgccacgagttacctgcttgtctcgagtgaagaatagcgctccggc

SEQ ID NO: 950857 - DNA, 120 bp, Artificial Sequence
  ENSG00000271797_2 (sequence is synthesized)
aaaacctggaggcagcgctggaaaaatcgcacgtgccgatcccgtaagaaatccagccgctctccctcaccgctccctgctagcctctcatcctcagtggccgccatgctgctccggaag

SEQ ID NO: 950858 - DNA, 120 bp, Artificial Sequence
  ENSG00000271797_3 (sequence is synthesized)
gccagtatttgaaaccgctatcatctgggtcctgtgcagcacttcctctctccgatatctccctagctagcgcatgaccctaccttttctactcaaagccctcgaggcttgtaaacacct

SEQ ID NO: 950859 - DNA, 120 bp, Artificial Sequence
  ENSG00000271797_4 (sequence is synthesized)
cgcaggccttgtgaaaatcaagtccacaaatccctccgtcagaatttttatcttgggaagcgcaaggtcaaaagcatcaagtacgctttgagacaattctggctctgtagaacctgagga

SEQ ID NO: 950860 - DNA, 120 bp, Artificial Sequence
  ENSG00000271797_5 (sequence is synthesized)
tggtatatctgaaaacgaggatggatcagtataaacttgctaacagattcatttttggagggccagttttaagccgaacggttagggaaacagaaaaacaaaccagtggagataaatgtt

SEQ ID NO: 950861 - DNA, 120 bp, Artificial Sequence
  ENSG00000271797_6 (sequence is synthesized)
tattgacactacaaaagctcagagactttcctaatcttaatcctttctggataccaggaatcacttaaaaatctgtgtataatgcccccaaacatatacaacatgcatattcatacctat

SEQ ID NO: 950862 - DNA, 120 bp, Artificial Sequence
  ENSG00000274312_0 (sequence is synthesized)
aaggctcttggtttcttctgtgcacactgcctgccttgtatccaagcgtttgactgtgcagaggccagtcatactgggggaccctgagcactacccttggcatttgggtatatcctgatc

SEQ ID NO: 950863 - DNA, 120 bp, Artificial Sequence
  ENSG00000274312_1 (sequence is synthesized)
aatatagccatttccactgcttgacattatgttttgggggctagttttttaaagatcaatgattgaattgctgctcggctgattggatatgtcttctcggagactcacctgtcctccccg

SEQ ID NO: 950864 - DNA, 120 bp, Artificial Sequence
  ENSG00000274312_2 (sequence is synthesized)
tttcttcttctttcatttcttcctgcccagaacagcaaggctgagactgataataaaattcctggaacatggagaaactcatgtggggagaaaagaagaaatgtattgtgacttccatgg

SEQ ID NO: 950865 - DNA, 120 bp, Artificial Sequence
  ENSG00000274312_3 (sequence is synthesized)
gcttttggcacttttggacctccctcctcctcttttccataaaaaatgtattttaagacatattggtataaagatgagattattcatagtacatattaaaatgttttcccctacctaaaa

SEQ ID NO: 950866 - DNA, 120 bp, Artificial Sequence
  ENSG00000274317_0 (sequence is synthesized)
ggagaccaggacactggaggcagcagcttgcagcacaaggagaatggagaaggtcctgagatgcccacactcaggccctgacactgaagcaggatgtttctctgactcattcacgggatt

SEQ ID NO: 950867 - DNA, 120 bp, Artificial Sequence
  ENSG00000274317_1 (sequence is synthesized)
cgtgacaggtgtgcctcctttaccaagcccattgctctcaactcctcacaggagggagcacacaagcaaacaagacgggaactggagtacaggggcgctggaaccagccagcgaactccc

SEQ ID NO: 950868 - DNA, 120 bp, Artificial Sequence
  ENSG00000274317_2 (sequence is synthesized)
tgcaggccccgcggcactttcgggggcgggggatggtgcctgcgatccccaaaaccccaaagggcgttttttacagtgctcttttagctctgctgaccgcggatggcttaagtgttaaca

SEQ ID NO: 950869 - DNA, 120 bp, Artificial Sequence
  ENSG00000274317_3 (sequence is synthesized)
gctcagtgggccctttgccttttctcatgagtcggctgccctgtgccagcaagggcaaagggccagtgtaacagccttttgtatctgcactcgtggctcctgagctcctgttcggcacac

SEQ ID NO: 950870 - DNA, 120 bp, Artificial Sequence
  ENSG00000274317_4 (sequence is synthesized)
gctgtcactgggagctgaaaaggtaatggaaagctgaaaagcggataaggtgggtaggtacctgaagtctggccatctacggcagctggattcttctccaaagttatactgtcaagctgt

SEQ ID NO: 950871 - DNA, 120 bp, Artificial Sequence
  ENSG00000274317_5 (sequence is synthesized)
ccctctgaagccaagccacttctctttgacatccagccgtagtctctgctcctctccaactgagtatgagggagatgtttcctattatccttgataatgtgccatgaacatatgaaaaaa

SEQ ID NO: 950872 - DNA, 120 bp, Artificial Sequence
  ENSG00000274317_6 (sequence is synthesized)
catagaaacatgaagaaaacaagaagacaaaaatcactaacatctggttggctgtatagaaacaaagctgattctggtctcgctctataccccaggttggagtgcagtggtaagatcaca

SEQ ID NO: 950873 - DNA, 76 bp, Artificial Sequence
  ENSG00000274317_7 (sequence is synthesized)
cgctctataccccaggttggagtgcagtggtaagatcacagctcactgctgccttgactcggactacagcttgcaa

SEQ ID NO: 950874 - DNA, 120 bp, Artificial Sequence
  ENSG00000274317_8 (sequence is synthesized)
ctggtgtgtgctgctctcacaaagagaagaaagagtggtgagtggaccatccaggtggacacattgggattcatcaaggaaacaatacacagaaaacagaagaatgagacaggacaatca

SEQ ID NO: 950875 - DNA, 120 bp, Artificial Sequence
  ENSG00000274317_9 (sequence is synthesized)
agagccgggagatggccctcaccatggttagtaagtgagagtccccagggagtcacatttctgccacagacctttgcaaccctgggcccaggcgatcccccatgacacccgtgccccacc

SEQ ID NO: 950876 - DNA, 120 bp, Artificial Sequence
  ENSG00000274317_10 (sequence is synthesized)
agggcctctggactgacatagacagctacatggagtgtgggcagaactgccactcaggcactcatgaaatccttggagcttttcatccccaggcaccctggtaccaatggctgcagctgc

SEQ ID NO: 950877 - DNA, 120 bp, Artificial Sequence
  ENSG00000274317_11 (sequence is synthesized)
ggcaatgggggaggacaggctctcttgcatgtcctcagaataggaacacaatccatggggctaagcagtgggtggactgtggggctcttctacacagcccgttgccagactggcctggga

SEQ ID NO: 950878 - DNA, 120 bp, Artificial Sequence
  ENSG00000274317_12 (sequence is synthesized)
tcctagcatggtcacaaaagtcccacctgggctcttgaggaacagatctgtacttccctggcatggaactcctggaggggatgggcaggctgctgtttttgctgctccacagccctcact

SEQ ID NO: 950879 - DNA, 120 bp, Artificial Sequence
  ENSG00000274317_13 (sequence is synthesized)
cctgttgccctcagtcttgggagtgagcacagtgattggggactaacatagacccccagcacagtgtacagacttgcagaaaagcagccagactcttttccacatgggtcctcacccctg

SEQ ID NO: 950880 - DNA, 120 bp, Artificial Sequence
  ENSG00000274317_14 (sequence is synthesized)
ctactcttcactgggcagcacctcttgaccttggcccccagcacaaccaacccgcccccacatgaacgctttgtcagtgatggctctgtgtttctctgaggagaaaaatccaaaagacaa

SEQ ID NO: 950881 - DNA, 120 bp, Artificial Sequence
  ENSG00000274317_15 (sequence is synthesized)
tctttgacatccagccgtagtctctgctcctctccaactgagtatgagataccaatttagctaacttcaccagaaaaatactttatcagaagtctgctatgtggttcgagcattatcagg

SEQ ID NO: 950882 - DNA, 120 bp, Artificial Sequence
  ENSG00000274317_16 (sequence is synthesized)
aattttaaagaaccaagcacagaaaagtcagaaaattagaaaaggcaaggaacagctaatgtcccatcacagggagatgtttcctattatccttgataatgtgccatgaacatatgaaaa

SEQ ID NO: 950883 - DNA, 120 bp, Artificial Sequence
  ENSG00000274317_17 (sequence is synthesized)
gacttggtccttacactggcccctccagcacaccatcgccaccatatggagaagagcccagtctctcttccccgtaagcccccactcaccactgttcaccaggcaaggcccctagttggg

SEQ ID NO: 950884 - DNA, 120 bp, Artificial Sequence
  ENSG00000274317_18 (sequence is synthesized)
gacagcagagcagctgtcctacccccggatgagaattcccactgctattggctctatattttcctgaggtgggcctcccagaagcaattgacatcccctctgtcactgtcatggcagcag

SEQ ID NO: 950885 - DNA, 120 bp, Artificial Sequence
  ENSG00000274317_19 (sequence is synthesized)
ttctgcccttactgcactcagactggggaaagaacaaacagcctgaggtcttcactcacactcctagcacaacacagtcatgatatggagaggagcccagttgttcctcctggtgagccc

SEQ ID NO: 950886 - DNA, 120 bp, Artificial Sequence
  ENSG00000274317_20 (sequence is synthesized)
ttgacctcctacttttcatcaagtgaagcctccagcttgggctagcagcgtagccaccccacccactggctgaacattctcagtagcaatggcttgcgtttctctgaagtagggctccca

SEQ ID NO: 950887 - DNA, 120 bp, Artificial Sequence
  ENSG00000274317_21 (sequence is synthesized)
gggacaacggaaagcacctctcccactgccactgcagcggtactgccttgctgcccttggactggggaaggggcagagaccttgagtgcttaacccacatgtccaggaagtgacagctgc

SEQ ID NO: 950888 - DNA, 120 bp, Artificial Sequence
  ENSG00000274317_22 (sequence is synthesized)
catctctccaattagtagtggctctgcatttctctagggtggagccccaagagacaagtgaaaggccctctgccacagcaactgccaaggtcccttcccctgttgccttcaagctgggga

SEQ ID NO: 950889 - DNA, 120 bp, Artificial Sequence
  ENSG00000274317_23 (sequence is synthesized)
gggaaaataaagccttagctcgcccctagcagcagtgtgcagcccaggagtgccaaggccagaccttaagccagcactggagtgggaaagggagcccacactttcagagcactgagaggg

SEQ ID NO: 950890 - DNA, 120 bp, Artificial Sequence
  ENSG00000274317_24 (sequence is synthesized)
agcatggctgcaatcatgaagaaatacagaggagccacgtggtggagcaagagcccacctactggccattacacttcagtgccatctactggatcatagcccaaactccaactccaaaaa

SEQ ID NO: 950891 - DNA, 120 bp, Artificial Sequence
  ENSG00000274317_25 (sequence is synthesized)
tgcttgctaatatacccccctctgtgaaaacaacgacaagatttcaacaacaaagaccctgcacaaaacctcggccctcaaaaaacattcaaaaaaggagtctgcactcaattacaccac

SEQ ID NO: 950892 - DNA, 120 bp, Artificial Sequence
  ENSG00000274317_26 (sequence is synthesized)
agttaaaggagcatcagcccacacagatgagaaaaaactggtgcaagagctctaacaactaaactacagtgttttctttcctccaaataactgtactagttcccaaggaagggttcttaa

SEQ ID NO: 950893 - DNA, 120 bp, Artificial Sequence
  ENSG00000274317_27 (sequence is synthesized)
ccaggcagaaagggtggaaatgacagagagagaattcaaaatatggataggaataaaggtcatcaagattcaggagaaagtcaaaacccaatccaaggaatctaacaattacaataaaac

SEQ ID NO: 950894 - DNA, 120 bp, Artificial Sequence
  ENSG00000274317_28 (sequence is synthesized)
aatacaggagttgaaagacaaaatggccattataagaaagaaccaaactgatctgatagagctaaaaaacacactaaagaattccttaatgtaattgcaagtattaacagcagaatagac

SEQ ID NO: 950895 - DNA, 120 bp, Artificial Sequence
  ENSG00000274317_29 (sequence is synthesized)
caagctgaagaaagaatctcagagctcacaggcaacatctctgaactcagtcagacaaaaataagaataaagaagaatgaacaaaacctccgagaaatatgggattatgtagagaccaaa

SEQ ID NO: 950896 - DNA, 120 bp, Artificial Sequence
  ENSG00000274317_30 (sequence is synthesized)
tctatgactcactggcatccttgaaagagaggaggagaaagcaagcaacttggaaaacatatttcaggatatcatctatgaagacttccccaacatcgctatggagaacaacattcaaaa

SEQ ID NO: 950897 - DNA, 120 bp, Artificial Sequence
  ENSG00000274317_31 (sequence is synthesized)
tcaggaaatgcagaaaatccctgtgagattctatataagaagaccatccacgagccacatggtcgtcagattcttcaaggccaaaacaaaagaaaaaatgttaaaggaagctagagagaa

SEQ ID NO: 950898 - DNA, 120 bp, Artificial Sequence
  ENSG00000274317_32 (sequence is synthesized)
gaggcagatcacctacaaaggaaacctcattaggctaacagcagatcattcagcagaaatcccacaagccagaagagattaggagtgtgtattcagcattattaaggaaaagaaatttca

SEQ ID NO: 950899 - DNA, 120 bp, Artificial Sequence
  ENSG00000274317_33 (sequence is synthesized)
accaagaatctcatatctagccaaacttagtttcattagcgaaggagaaataagatcctattcagacaagcaaatgctaagggaattcagtaccaccagacatgctctataagagatcct

SEQ ID NO: 950900 - DNA, 120 bp, Artificial Sequence
  ENSG00000274317_34 (sequence is synthesized)
gaagcaagtgccaaatatagaacagaaagactgttactgaccactgcaaaagcacactaaaaacgtagaccattgacactgtaaagcaaccacacaaataaagctgcataataaccagct

SEQ ID NO: 950901 - DNA, 120 bp, Artificial Sequence
  ENSG00000274317_35 (sequence is synthesized)
aacagcacaatgacaggatcaaatcagcaaataccaatattaaccttgaaagtgaaggggctaagtgccccaatgaaaagtcacagagtggcaagttggataaagagcaagaccctggcc

SEQ ID NO: 950902 - DNA, 85 bp, Artificial Sequence
  ENSG00000274317_36 (sequence is synthesized)
tcacagagtggcaagttggataaagagcaagaccctggccaggcaggtgacacaggtgaatcaagaattcaagaccagtctggcc

SEQ ID NO: 950903 - DNA, 86 bp, Artificial Sequence
  ENSG00000274317_37 (sequence is synthesized)
cctggacatggtggtgctcatctatagtcccaggtactagggaggctgaggcgggcggatcagttgaacccaggaggcagaggttg

SEQ ID NO: 950904 - DNA, 120 bp, Artificial Sequence
  ENSG00000274317_38 (sequence is synthesized)
aaaaaaaaaaaaaaaaaaaagcatgatccaactgtatgctgtcttcaacagacatatctcacatggatccataggcttaaagtaaagggatgaagaaaaatctaccaagccaatggaaaa

SEQ ID NO: 950905 - DNA, 120 bp, Artificial Sequence
  ENSG00000274317_39 (sequence is synthesized)
gccaatggaaaacagaaaatagctggggttgacagtcgaatttcagtcaaaacagactttaaaccaacaatgatcaagaaagacaaaggaagacattacagaatagtaaagggttcaata

SEQ ID NO: 950906 - DNA, 120 bp, Artificial Sequence
  ENSG00000274317_40 (sequence is synthesized)
agacaaaggaagacattacagaatagtaaagggttcaatacaacagaaagatgttactattgtaaatatatatgcatccaacacaggagaatccagattcataaagcaagttcttagaga

SEQ ID NO: 950907 - DNA, 120 bp, Artificial Sequence
  ENSG00000274317_41 (sequence is synthesized)
gacttcaacaccccacagacagtatattacacagatcactgaggcagaaaactcacaaaaatatccaggattcaaactcaacattgaccaaatggactcaatacacatctgtagaactct

SEQ ID NO: 950908 - DNA, 120 bp, Artificial Sequence
  ENSG00000274317_42 (sequence is synthesized)
ccaccaaacaacaccagaatatatattctactcatctgcacagagcacacactgcaaaagagaaaacacaattagccataaaataatcctcaggaaatcaaaaacaaacaaacaaaaaca

SEQ ID NO: 950909 - DNA, 61 bp, Artificial Sequence
  ENSG00000274317_43 (sequence is synthesized)
aggtaaacaaagcagccgggaagctcctgggcggcagggcacagacaaacaaaaagacagc

SEQ ID NO: 950910 - DNA, 77 bp, Artificial Sequence
  ENSG00000274317_44 (sequence is synthesized)
acttccagagtaacgatcagacagcagcattcgcagttcacgaaaatctgctgttctgcagacactgctgctgatac

SEQ ID NO: 950911 - DNA, 120 bp, Artificial Sequence
  ENSG00000224387_0 (sequence is synthesized)
gcatgaccgaggagaggcacgcgctgacccaggagacggacggccagacacagcccgtactgcacggccagacccgttgtcacccctgggactcccaaacagaggagacagcaagaccca

SEQ ID NO: 950912 - DNA, 120 bp, Artificial Sequence
  ENSG00000224387_1 (sequence is synthesized)
tgcctgagcccctcctcctcctgcaggaagccttccctgagcacagaacccccagcagccgctcagacctgaggtctgcaggggaccactctcctggacccgcagatgcatctccaggtt

SEQ ID NO: 950913 - DNA, 120 bp, Artificial Sequence
  ENSG00000224387_2 (sequence is synthesized)
ttgcacaggcccagctggctgcccagcagagccacagatggccactctcccccacctagacaccttgggataaaaataaaggaacgcctctcagctcgggccctgcaagagccacctgca

SEQ ID NO: 950914 - DNA, 120 bp, Artificial Sequence
  ENSG00000274315_0 (sequence is synthesized)
aaaaaatttttaaggtatctttgaggaagagaaaagaaaaacacttgcataaccaaaaatgtattctttttttggtttgttatggaaaagctggagtaaagatttgaattgcattccata

SEQ ID NO: 950915 - DNA, 120 bp, Artificial Sequence
  ENSG00000274315_1 (sequence is synthesized)
gattttattttttgtgtactttgaaaatgatgctgagctgacacaggatcaggaggtggcccagatttatatggattacaaatggagataggatgagttaggaagagaaacctgataggt

SEQ ID NO: 950916 - DNA, 120 bp, Artificial Sequence
  ENSG00000274315_2 (sequence is synthesized)
ttttcaaaatctccatataaagggcctaattggagaaagaaagggagggaaatgatcttcaaatatattagaaaaaatagttttgattgaatataaagaacttagggcactaaaacttgt

SEQ ID NO: 950917 - DNA, 120 bp, Artificial Sequence
  ENSG00000274315_3 (sequence is synthesized)
tagtagaaagagtgtcaagaagattctggtatcatctctggaaatatttcaagtattaggtattcttggagagtttggtatgaccctgttatcaaataaaagattgcatcagtgagtgga

SEQ ID NO: 950918 - DNA, 120 bp, Artificial Sequence
  ENSG00000270055_0 (sequence is synthesized)
cttatattggcagtgtatcatgattaaagttatcctccctctttctctccctcccacatatatattttcgtgtcagtatatgtatatgtgatttgtgccatttgtgtgtgtgtaggtaaa

SEQ ID NO: 950919 - DNA, 120 bp, Artificial Sequence
  ENSG00000270055_1 (sequence is synthesized)
tgaaagtggcatcaagagaatctcacgttaaaaaaaatttgagatagtacaattcttatgcatcatatgttgcataatgtttgactattaagaaatttgcatcacacgtctacttatttc

SEQ ID NO: 950920 - DNA, 120 bp, Artificial Sequence
  ENSG00000270055_2 (sequence is synthesized)
attaaacatgttacagtcaattaatttacttacaccctccatttccttcttccccctctctcgttctcctgttgcagggtcattatacgttcctactcacaaaatgtccttgttttttcc

SEQ ID NO: 950921 - DNA, 120 bp, Artificial Sequence
  ENSG00000270055_3 (sequence is synthesized)
cttactcctgtcattgatcttctgaatctttccggcgaacttaacatggatgttttgatagaaagctctggcattaactctggagttgttttgcaaggaaggttgttcgctttttcacca

SEQ ID NO: 950922 - DNA, 120 bp, Artificial Sequence
  ENSG00000270055_4 (sequence is synthesized)
tttttttttcaggtccttgaagtgttttcacatagatatttcacaagagccatttcagaattgagaacatttggcgtgcactcttcctcttttggtcccacagtttttatgtgtcctact

SEQ ID NO: 950923 - DNA, 120 bp, Artificial Sequence
  ENSG00000270055_5 (sequence is synthesized)
tgaaattatgtttgctcccgtttcaattgtaatattgcacttactcattagtttttagtttgaactctcctgcgaggtctaatgtagagtttggacaagaacacagattcataataaacc

SEQ ID NO: 950924 - DNA, 120 bp, Artificial Sequence
  ENSG00000270055_6 (sequence is synthesized)
gaatgctaatggagagacataggattttcttatggaaacaagaaacaaataacctctgggcagtattagagcccagagagtgataagcctcttctaacttcaatattctatgtacaaatt

SEQ ID NO: 950925 - DNA, 71 bp, Artificial Sequence
  ENSG00000270055_7 (sequence is synthesized)
tgataagcctcttctaacttcaatattctatgtacaaattcacaagacttttttttttcgatggcgcgatc

SEQ ID NO: 950926 - DNA, 80 bp, Artificial Sequence
  ENSG00000270055_8 (sequence is synthesized)
gttcacgccattctcctgcctctgcctcgtgagtagctggaactactggcgcagactgggtttcaccgtgttagccagga

SEQ ID NO: 950927 - DNA, 120 bp, Artificial Sequence
  ENSG00000270055_9 (sequence is synthesized)
gcccgcctcggcctccgaaagtgctgagattaccggcgtgagccactgtgcccggccgagacttttaattatgcaatgccagactgcattgcataaaccaaaggccaacagagaggtgac

SEQ ID NO: 950928 - DNA, 120 bp, Artificial Sequence
  ENSG00000270055_10 (sequence is synthesized)
ccaacagagaggtgacctttcaaattactggcacaagaagagctgagatcagaaagctccaacttaatgcaaacatcgacaagaaatccgacagaaatgacttctgtgtctggtcaactt

SEQ ID NO: 950929 - DNA, 120 bp, Artificial Sequence
  ENSG00000270055_11 (sequence is synthesized)
aacataacatgacatattgtcaagcgcatttggctttttaggtagaattgtctataaaggtttaactgctttagaaaatataaatgtgaagatttgtggtatttgggtttatatataaga

SEQ ID NO: 950930 - DNA, 120 bp, Artificial Sequence
  ENSG00000270055_12 (sequence is synthesized)
tatttctacattgaaaagagactggaaaagcttggtataagatttgtaaaatatgtttgtaataatgctaatggaagaggtgagatttgggtggggtggggtgtagatgggaacatggtt

SEQ ID NO: 950931 - DNA, 120 bp, Artificial Sequence
  ENSG00000270055_13 (sequence is synthesized)
tggggattggggaaagggaagtcatgctgttaataaaatagtgaggcatgttgtataaagtgtgttttatgtctcaattgaaatgttatagagataaatttaaaatagatcatgatgggt

SEQ ID NO: 950932 - DNA, 120 bp, Artificial Sequence
  ENSG00000270055_14 (sequence is synthesized)
tttgaatctgatttctaattttaaaatgttatgagcttttgttgctttcctatttcatacacatttctttatgggtttcacttagactgcatgaaattgcagatgccaattaccttttaa

SEQ ID NO: 950933 - DNA, 120 bp, Artificial Sequence
  ENSG00000270055_15 (sequence is synthesized)
agatgccaattaccttttaacaaaattaaattcacatatatgtataatttgcatgtatatatccatggaattttttattctacacgatatattattttaaaatggtttttcaatgacaaa

SEQ ID NO: 950934 - DNA, 120 bp, Artificial Sequence
  ENSG00000237149_0 (sequence is synthesized)
ggaggaggagctggcgcggcggccacgggcgcccagcgcgccttctcggcgcctggagccagacgcgagtaatcctgggtggcccgcagcggagccgtggccgggctagaggagccggct

SEQ ID NO: 950935 - DNA, 120 bp, Artificial Sequence
  ENSG00000237149_1 (sequence is synthesized)
ggctggactgcgggagtgccgggcggctcgcggtgtccgcctcgggctgctcccctgcgctgcgttctcgcggccccgcgccggcgctgcgctctgcgatgcgagccgctgcgtgtccag

SEQ ID NO: 950936 - DNA, 120 bp, Artificial Sequence
  ENSG00000237149_2 (sequence is synthesized)
ggctctggcgaggaaactcacttcaaaagcagctgcaccaagggggagattaaagcctttgccgccttccaatcaaatgggagcccgaggtgattggagggtcaaggggatgtgacgcgt

SEQ ID NO: 950937 - DNA, 120 bp, Artificial Sequence
  ENSG00000237149_3 (sequence is synthesized)
cccgcgccgccgccgccgccgctgccaggactctcagtgccggttttaatgggcagctccctcttcgccgcccccctgtgtgtcccctccctcgatttcgctgggaggacgagatggaca

SEQ ID NO: 950938 - DNA, 120 bp, Artificial Sequence
  ENSG00000237149_4 (sequence is synthesized)
tttattctacgtttgccatccgccgcctccctcttttttcctcctcgtcgttcttcctttccccagctcgaaaataaactgaaaccttcttttgaaggggggtgcgcgtgaggaacagac

SEQ ID NO: 950939 - DNA, 120 bp, Artificial Sequence
  ENSG00000237149_5 (sequence is synthesized)
cgagatcccgcgcggcgcagcgcagccaccaggaatcgacgggatttctctggctgtcgtttgcgctgcatttatccgaatacatccagctcgcaggcatcctgcaagaaacggctcccg

SEQ ID NO: 950940 - DNA, 120 bp, Artificial Sequence
  ENSG00000237149_6 (sequence is synthesized)
gctcgcgtgtacgccgacacctcggcccaacgcaggactcgaggtggtttctagtgcccgggtggctgcaagtctgccctccgagggaggctggacaagcggcgcccccaggtcgagcgg

SEQ ID NO: 950941 - DNA, 120 bp, Artificial Sequence
  ENSG00000237149_7 (sequence is synthesized)
cctctcgctgcctggcagtgcctggcagcccccacctctgccagtgcttcggaaacccgcctggccaggttcgcccgcggtgaaaaatgaaagcaaattccccaacagaggtagccggaa

SEQ ID NO: 950942 - DNA, 120 bp, Artificial Sequence
  ENSG00000237149_8 (sequence is synthesized)
ctttcctcgacgaaggctccctcctgcgcctgtgtctggagaacccccagagcgctgcaagttagcaagagagattcgatggcggctctggaaggcgcacgaagggtggggcgggggagc

SEQ ID NO: 950943 - DNA, 120 bp, Artificial Sequence
  ENSG00000237149_9 (sequence is synthesized)
aaagaggccactgggtgacccagcctggtccggggtgaaacgctagagaaggcgcctcgccttccttatttcaatgcaactcctcggccccagacggtaaaaatagtttccaagctgccg

SEQ ID NO: 950944 - DNA, 120 bp, Artificial Sequence
  ENSG00000237149_10 (sequence is synthesized)
cggacgcccaggatgtgtttgcagagatcaaactggggaggaggcagctttgtaaaagttgcagaaagattagccgagaagcgtccgcccggcggggctcaagaaagcttggggacagct

SEQ ID NO: 950945 - DNA, 120 bp, Artificial Sequence
  ENSG00000237149_11 (sequence is synthesized)
ccttggggcggaatggcccaagaattggcctgggtaaccccctgcccagttctctgtcctcacttcgagccagtgcttaaataacttcccgccgcctgccctgcaaacttcccggcgcgg

SEQ ID NO: 950946 - DNA, 120 bp, Artificial Sequence
  ENSG00000237149_12 (sequence is synthesized)
cgccgttgaggccaggacacagcaaaggctagcaaaaccccgccgcggcgcgctcggccccggccctgagaggctgcgcgggtgggaggaccagtgtggtttctgctcccactcggctgc

SEQ ID NO: 950947 - DNA, 120 bp, Artificial Sequence
  ENSG00000237149_13 (sequence is synthesized)
ccagaccctcaagaccgatcccccaactcctgggagcgggtgcttccctctgggagccgagatcttgcggggccagcgagggcgcaaagtgcgcgcgctggcccgcgcgggggcggccgc

SEQ ID NO: 950948 - DNA, 120 bp, Artificial Sequence
  ENSG00000237149_14 (sequence is synthesized)
tttggagagaagaggggagtgaggcggtgtgtgcttggggctggtgtttgtcagtgtgagcgtgtaagagcacacctgcattcaagggggtttgtagtgtccgtgcgacatctgagggag

SEQ ID NO: 950949 - DNA, 120 bp, Artificial Sequence
  ENSG00000237149_15 (sequence is synthesized)
gcttttccgccccggctcttcttttgttgtcaagtccttttgataaatggtggggctgggagctctgggagtcgggagccagtctgtgcccgcgtggggggcgggggccgagcctggaga

SEQ ID NO: 950950 - DNA, 120 bp, Artificial Sequence
  ENSG00000237149_16 (sequence is synthesized)
cccggtttcgaccggcgcgcacctggggctgagccgggtgcgcgcgggggtcgggtctggaactgcccttggtatgctcgccctctcctcttggcccatctcactcccctcccccacctg

SEQ ID NO: 950951 - DNA, 120 bp, Artificial Sequence
  ENSG00000237149_17 (sequence is synthesized)
tgtgcgcctgccctctcggtgtcggagagacgcccttccacctctgggagcctcggtctgttggggtcgcggagttcgggcgcggctccgggtacccgagaccagcggcggcaacttcta

SEQ ID NO: 950952 - DNA, 120 bp, Artificial Sequence
  ENSG00000237149_18 (sequence is synthesized)
gagtcctcgcggggcgtgttgcgtgcggaggtcaggctgccaccctctgtagttccctaaccccaaactcggagacttctaagagccacaccaccaaggaacttctagtcctggaggtca

SEQ ID NO: 950953 - DNA, 120 bp, Artificial Sequence
  ENSG00000237149_19 (sequence is synthesized)
atggtggggcaaacctcgcctcaattctttgaccccctcgggtcgtaagcagggctaagaggctgcgaagaagaggcctggccatgggtgtatgggggaagaaacatctcaggctcactc

SEQ ID NO: 950954 - DNA, 120 bp, Artificial Sequence
  ENSG00000237149_20 (sequence is synthesized)
atcgcgggtgtcagggcgaaaaactctctttattgtctgcgtgatggatgggcccggggacgagacaccaaatacttcgtatcgcctttaaatgggaacacattttccgcggccataatt

SEQ ID NO: 950955 - DNA, 120 bp, Artificial Sequence
  ENSG00000237149_21 (sequence is synthesized)
catgttttttaaatagaaagtttgaaatgttgcctatatttcaccagccctgacatatttatgaatcgctccctgcatgcaaatatcattacttaaagcgccggggagagcgcgggggag

SEQ ID NO: 950956 - DNA, 120 bp, Artificial Sequence
  ENSG00000237149_22 (sequence is synthesized)
gggaggaggcgcggttcccggggcgtgggggtggtgaaccggggaaatatcggtggaggggggccatctccctaaagggcagagggtgaggtgcggtgaatagccgtatccggaaaccga

SEQ ID NO: 950957 - DNA, 120 bp, Artificial Sequence
  ENSG00000237149_23 (sequence is synthesized)
gcgtgccccgggcttctttcccgccgccagaccccgcacagccgccctgggacgtttttcgaggcttgggacctaagacgggtccccggaccctgctgggaaaccagggggcgtttttcg

SEQ ID NO: 950958 - DNA, 120 bp, Artificial Sequence
  ENSG00000237149_24 (sequence is synthesized)
tccctctctgaggccattatccaagctgaaaccaccttttataagaaaaaagtttaaagaaaaaaaatttaacaaacacaaataataataataacccaacatgtttcgcgttctttgcca

SEQ ID NO: 950959 - DNA, 120 bp, Artificial Sequence
  ENSG00000224382_0 (sequence is synthesized)
aatgtttttgctcattaattcagcatgtaactcacattccaatggaagcagaagaggttgagcccacaatcaaactgtcactgaattctaaaccaaaactgaagtatggacttcttctca

SEQ ID NO: 950960 - DNA, 120 bp, Artificial Sequence
  ENSG00000224382_1 (sequence is synthesized)
ttagggtcacgttgccaggactatacaatgaaatgcctggccgtgagagtccagcaattttctttgctctcagagttcctgtttggaaaagaaatctgagaacttcatggtgatgaggaa

SEQ ID NO: 950961 - DNA, 120 bp, Artificial Sequence
  ENSG00000224382_2 (sequence is synthesized)
gcctgcagcccccgaaggtcacggatgctgttggagccacgaggaagagccatcagcccagggagaccctgagggtcagggcatctccatggatgaactccgtgtactgctggactcatc

SEQ ID NO: 950962 - DNA, 120 bp, Artificial Sequence
  ENSG00000224382_3 (sequence is synthesized)
caacccttcgtggacatcactttgtagtgaaaatcccttttgttgttgaagaaagcctgagttgggtgatttattactcataaagtatgttaataccttgatgctaatattctcatgaga

SEQ ID NO: 950963 - DNA, 120 bp, Artificial Sequence
  ENSG00000224382_4 (sequence is synthesized)
gaattatactctagtcttatgatagcactaaaagtaacttaaaggccccacgcttctccagataaaaccaacacttgtgaaacccttgctttgccgtttactatctatgttcctggacaa

SEQ ID NO: 950964 - DNA, 120 bp, Artificial Sequence
  ENSG00000224382_5 (sequence is synthesized)
actattaaatgtgccgagtctacacctccacctcagtttaggatcaataatctatatcttttctttttcagtttcaatacataaaaataagtgccatgagtagttcttgtaactgaatag

SEQ ID NO: 950965 - DNA, 120 bp, Artificial Sequence
  ENSG00000224382_6 (sequence is synthesized)
gcacttaaaagtgaaattaggctcttcatttctcctgctttcttatcgtacatctttatgatactttaatttgagctacaacccctgagatcttcttgagagttaatcactgctgagaga

SEQ ID NO: 950966 - DNA, 120 bp, Artificial Sequence
  ENSG00000224382_7 (sequence is synthesized)
caatacagagacaggacaatagacagatcgcatgtgacgacagagctctgacccacaacctctgcagcaattgctccccaacaatggggacttagtgaataactgctacctgccctattt

SEQ ID NO: 950967 - DNA, 120 bp, Artificial Sequence
  ENSG00000224382_8 (sequence is synthesized)
atgcccccaactcaggaacagcaggtcaatccaatatgcttctctaatacccacatagttctcattcttttatttttaatgtttattttgatctacaattaaaataacagctaacaatca

SEQ ID NO: 950968 - DNA, 120 bp, Artificial Sequence
  ENSG00000224382_9 (sequence is synthesized)
tgttgcctaaaattgcacctctgagaaattccagcacactggcatagtgttctggactctcgctgtggtattactgccagcactatgcttccttattaaaaaatgtagaggctcacttgc

SEQ ID NO: 950969 - DNA, 120 bp, Artificial Sequence
  ENSG00000224382_10 (sequence is synthesized)
agcaagcttgatagcaggatgataaaatggcagggtatttttaaacacagattttatgagatgtattacatggaattaaatttagaccatatatcaaggaaatcaccatagagctttgag

SEQ ID NO: 950970 - DNA, 120 bp, Artificial Sequence
  ENSG00000224382_11 (sequence is synthesized)
cgtgattcagatcatcctggcattagttggaccactctgttggctcaacaatgtcattgcctgagtgggaaataaatggccaagtctatgggggcactatcgggttggcttgctggtcac

SEQ ID NO: 950971 - DNA, 120 bp, Artificial Sequence
  ENSG00000224382_12 (sequence is synthesized)
agcatcctccccccacaagatgtctcatctggaagggtatgtagggcagcaattggtggaaatacacagcagaagaagattgtgactctttctccaacacaccccctcctcctcagtaca

SEQ ID NO: 950972 - DNA, 120 bp, Artificial Sequence
  ENSG00000224382_13 (sequence is synthesized)
ctcctcagtacacaacctctgctcccaatgatggtacaaacatcagggatttgacagtacacactcaagaaactgttttttggtggtgtgtttgtttttcttttttcttttttagtttgt

SEQ ID NO: 950973 - DNA, 83 bp, Artificial Sequence
  ENSG00000224382_14 (sequence is synthesized)
tttcttttttcttttttagtttgtttttggtaggatctatctaaatgtaaggttattttgatggttaatattgaatgtcaact

SEQ ID NO: 950974 - DNA, 89 bp, Artificial Sequence
  ENSG00000224382_15 (sequence is synthesized)
tctgggtgggcaccatctaatcagctgctagggctgctacaataaaagcaggcagaagaacatgaaggactagaccagttgatttgctt

SEQ ID NO: 950975 - DNA, 120 bp, Artificial Sequence
  ENSG00000224382_16 (sequence is synthesized)
tggcctccatctttctcccatgctggttgcttcctgcccttgagtattaaactccaagttcttcacctttgggactcttggacatttgaccacacactgaaggctgcaccgtcggcttcc

SEQ ID NO: 950976 - DNA, 120 bp, Artificial Sequence
  ENSG00000224382_17 (sequence is synthesized)
caacttttgaggttttgggacttggaccggctttcttgcttctttgcttgcagacagcctattgtaagacttcaccttgtgatcgtgtgagtcagaactccttaatgaactcttcctcat

SEQ ID NO: 950977 - DNA, 120 bp, Artificial Sequence
  ENSG00000224382_18 (sequence is synthesized)
gtatacagctatcctattagttctgtgcctccagagaaccctgactaatacagttacactcccggtccgcatttgggattctgtatgtaaacctcagaataaattcaacaaaatttgtcg

SEQ ID NO: 950978 - DNA, 120 bp, Artificial Sequence
  ENSG00000224382_19 (sequence is synthesized)
acacccctaaaattctgaactctttgaaaaaacccaatgaggattgaaaaattgacacacctgaaagctagtgtttgggaagacaacaacccagggctgttctgtttctgactcaagata

SEQ ID NO: 950979 - DNA, 120 bp, Artificial Sequence; identical to SEQ ID NO: 825767
  ENSG00000279094_0 (sequence is synthesized)

SEQ ID NO: 950980 - DNA, 120 bp, Artificial Sequence
  ENSG00000279094_1 (sequence is synthesized)
tgggaaatgatttcttccagaccatggctggagaaggaaagaagactgttgcagtgtcaggaccaaggtcaaatgagttatagccaagtctacagtaagatgtggcagtattctgttttg

SEQ ID NO: 950981 - DNA, 120 bp, Artificial Sequence
  ENSG00000279094_2 (sequence is synthesized)
aagcgaggaccatgattggcaagcttgccacttggtcaagtgcttaccctctaaagatgtcttccttggtctttgcctccagctgggtgtcacaaactctgaactggattccaaggcttt

SEQ ID NO: 950982 - DNA, 120 bp, Artificial Sequence
  ENSG00000279094_3 (sequence is synthesized)
caaactctgaactggattccaaggctttcatgaatgcacttatgtttgctgtggcagctgcattatgtcgtgggggatgtggatgcagaacctcccattctgtcgtcttgcttatgttac

SEQ ID NO: 950983 - DNA, 120 bp, Artificial Sequence
  ENSG00000279094_4 (sequence is synthesized)
tttcagattcaaaagttctaaaataaattgctcaaatttacacattatgtaagctgttaataaaatttcttgtaggtgctacatatttattaaaatttttggttgtaattttaagctcac

SEQ ID NO: 950984 - DNA, 120 bp, Artificial Sequence
  ENSG00000279094_5 (sequence is synthesized)
tgtaggcagaaaggaatcattaagatttctattcttttttagtctgtatctaaatgaccatatattttaattccaaatatttactttatacttcagtaatgctcattgtattttgcaaaa

SEQ ID NO: 950985 - DNA, 120 bp, Artificial Sequence
  ENSG00000279094_6 (sequence is synthesized)
tttatattgttcttttatttgaaaatataaggctttttttagctcctgaaatctatattatagtcatatagttttattatagtatttgataagaagagcagcaacatattgagaacagaa

SEQ ID NO: 950986 - DNA, 120 bp, Artificial Sequence
  ENSG00000279094_7 (sequence is synthesized)
taaaattctgctgtctttttaatgattatttattaaattcttctcattaaagcctattattaatgattgtaatgtatttactgtataattttactgcaatttattaaatgccaatgactt

SEQ ID NO: 950987 - DNA, 120 bp, Artificial Sequence; identical to SEQ ID NO: 825768
  ENSG00000279094_8 (sequence is synthesized)

SEQ ID NO: 950988 - DNA, 120 bp, Artificial Sequence
  ENSG00000235202_0 (sequence is synthesized)
agagttctgttggaactctaggaagaaagccattctctgaaacctttctggggctggagcacttgtcaagagtaaacagaaaaggaataaagcttgcctctttttttgaaaaacccagct

SEQ ID NO: 950989 - DNA, 120 bp, Artificial Sequence
  ENSG00000235202_1 (sequence is synthesized)
ggacaatgggcatattcaatggccaaggcctcctctaattgctggcttgggaagaactggagataactcagcaatggagagacaaggagggctcctagggaacaacttggagaccgagga

SEQ ID NO: 950990 - DNA, 120 bp, Artificial Sequence
  ENSG00000235202_2 (sequence is synthesized)
atcttgctgaatgccagcagaaaatctggaagcagagccagtataattcagcattactgagcccactgagctctccagggaagtataaattgagcacagaagctctgaaatggattgtaa

SEQ ID NO: 950991 - DNA, 120 bp, Artificial Sequence
  ENSG00000235202_3 (sequence is synthesized)
ctcttggaaaaaagtttgccaagtggagctggatccacagctgccactcaaggcctgttttccgcagagcgctgttaaagagattttacctgcttcataacccatccagttgtgtaaagc

SEQ ID NO: 950992 - DNA, 120 bp, Artificial Sequence
  ENSG00000235202_4 (sequence is synthesized)
agagggtgtgagggcagccactgcaggggttataagaccctcattccagagtggtactgccctgcgtctgggaagaaggaaggccacacagagagaccaagaagaatcctaacagacagg

SEQ ID NO: 950993 - DNA, 120 bp, Artificial Sequence
  ENSG00000235202_5 (sequence is synthesized)
gcttgcttggtttccccctcagtctcttaccgttagatcagacctctttggtcctaccacgtttctacatggctgtccattcttcatcgaatctaagaataaaaatggatagttttccct

SEQ ID NO: 950994 - DNA, 88 bp, Artificial Sequence
  ENSG00000236432_0 (sequence is synthesized)
gtggtcatgtgacgcggaaaagggcggacgcgtggcccacgcactggaacggctccacgagtctgtcacccaggttggagtgcggtgg

SEQ ID NO: 950995 - DNA, 120 bp, Artificial Sequence
  ENSG00000236432_1 (sequence is synthesized)
ctcccaagtagctgcgattacaggcacccaccaccatgaagaatggcatttttaaaagatggctttcttaaaaaaggatactcagttgctcttctactcataccaagtcctgcagacaca

SEQ ID NO: 950996 - DNA, 120 bp, Artificial Sequence
  ENSG00000236432_2 (sequence is synthesized)
tctactcataccaagtcctgcagacacattctgggactgcaccttatgagtgctgctcactctgtttcctgcagaagacatacagagccgttcgcatagagggccatgattttgattcag

SEQ ID NO: 950997 - DNA, 120 bp, Artificial Sequence
  ENSG00000236432_3 (sequence is synthesized)
caattcttcaaaccactgatgctggttgaccatttgactttgtttttgaagtattttttacatacagtgtacagaacatttccgctggatatttggatactgaacaggagtaacaagagg

SEQ ID NO: 950998 - DNA, 120 bp, Artificial Sequence
  ENSG00000236432_4 (sequence is synthesized)
aacagctcctacctcccccctgccccttccctcacaagcctgtgagtcagggcaggggcagccactgaaagtagcagaggccttcataaaggagaacacttctccatgttgccatcatgt

SEQ ID NO: 950999 - DNA, 120 bp, Artificial Sequence
  ENSG00000236432_5 (sequence is synthesized)
gaagaaggacatgtttgcttctgcttctgccacgagtgtaagtttactgaggactccccagccgtgctgaactgttgaaggcaatggtgatgaaagtaaatatttaaaaacactaccata

SEQ ID NO: 951000 - DNA, 120 bp, Artificial Sequence
  ENSG00000236432_6 (sequence is synthesized)
gctgtcccaaatttcagaaaaacaaggtaccactggaaccatttaattttgttggaacacagaatgaccatcttgtgatcagttttctgcatctttaaaatacctggaaggtcatcttta

SEQ ID NO: 951001 - DNA, 120 bp, Artificial Sequence
  ENSG00000236432_7 (sequence is synthesized)
aggtcatctttaaatagtacaatctgataaaagtttaatacttagtgtagacttatatgaatacttctacattcatacatttttgtatacttatacattttcatactcaattaatgctta

SEQ ID NO: 951002 - DNA, 120 bp, Artificial Sequence
  ENSG00000236432_8 (sequence is synthesized)
tcaaaatactttgattcttgtaagaaaaactgacaaagacaaagagaaggcaatgtgaaaacttctacagttgggataaccttggaggttacaggatgtggactcactgaaagctttctg

SEQ ID NO: 951003 - DNA, 120 bp, Artificial Sequence
  ENSG00000236432_9 (sequence is synthesized)
ctggacttgaacttgaagctgaagtctgaaggacagatgggtgttgcttagcgaagggaaagtaggaagcaaagacccctggacagagtgtagcaggcacagagggagcatgacaccttc

SEQ ID NO: 951004 - DNA, 120 bp, Artificial Sequence
  ENSG00000236432_10 (sequence is synthesized)
gggagagagccgcaagcacctgggcccagatcccagctttagcttcattagccctgtgaactctgtatgtcagccttgacatagaaaaaaagaggatactaaacctccatcttaaaagag

SEQ ID NO: 951005 - DNA, 120 bp, Artificial Sequence
  ENSG00000236432_11 (sequence is synthesized)
acttggaagaagctgggattataggcacaccaccacacctggccccagaaaagggaatccttgacctgcaagaatcgaggaatattgtttctgacatgctcagtggacctactgctggtg

SEQ ID NO: 951006 - DNA, 120 bp, Artificial Sequence
  ENSG00000236432_12 (sequence is synthesized)
ttcttaaccatttccttcctaagtggaacttcttttgagcctcagatgaaaacaaccagttgagctccaagttttctttctgtgggagaactttccttaaaagacaattagaaagcaagg

SEQ ID NO: 951007 - DNA, 120 bp, Artificial Sequence
  ENSG00000236432_13 (sequence is synthesized)
aatgcgaagaaagaaaatgggaagtttcctgcctccaaattatgctgttggttctggcctaaaggaatgttttcaagggaagcctgtctgcctttcattgccatttcaccttgatttaat

SEQ ID NO: 951008 - DNA, 120 bp, Artificial Sequence
  ENSG00000236432_14 (sequence is synthesized)
cattcagcaaagcatttattaatcatcttctgtgtgaaaagtacttaccttagaaccactgcatcctggtacaccgacaagtccgtaaggcccggtattgcctggggtgccctggaagaa

SEQ ID NO: 951009 - DNA, 120 bp, Artificial Sequence
  ENSG00000236432_15 (sequence is synthesized)
gaacaagtctcaatgaggagggtcatcccaagaaacagcactgaacccaagggaaaagatgcactgatttaaatagctcttgaaatataaatgattgtttaaatggttaagtagtaaatg

SEQ ID NO: 951010 - DNA, 120 bp, Artificial Sequence
  ENSG00000236432_16 (sequence is synthesized)
tacattgtggttttacatataatttcagtagcaacaaactaaacaggctgactgatatgaagacttatcaaatgagatgtggatatttcaaataaagcaaacgccttttatccataaaat

SEQ ID NO: 951011 - DNA, 120 bp, Artificial Sequence
  ENSG00000236432_17 (sequence is synthesized)
aatggaacaacatactgcggatctttctgctaccgatgaaagaagaaggttgagttttaccttctagagctttacagtgtaaacaagcagtattagggtttgtttttaccttctcccctt

SEQ ID NO: 951012 - DNA, 120 bp, Artificial Sequence
  ENSG00000236432_18 (sequence is synthesized)
tggccccgtcacagaagcactggcctttgtctttacagacacaaccctaggaagagggaaagagaaagggttttgtttagaaacagctgaataaatcccaaccggcagggtaaaagcaaa

SEQ ID NO: 951013 - DNA, 120 bp, Artificial Sequence
  ENSG00000236432_19 (sequence is synthesized)
tgcatttctctgttcttcgagtattggacactatctgttaggagccaggtgaccttgtagcaatatatcaatagaaatatatcaatatatgaatagcaataaagtagaaaactgagaaca

SEQ ID NO: 951014 - DNA, 120 bp, Artificial Sequence
  ENSG00000236432_20 (sequence is synthesized)
tgttgcataagggagaaatgtcggataagaatacatcatttgtattgtacttgggaattttaagtgttaaagtaatggccgtttttgccattacttttaattacctttgtaccaacctaa

SEQ ID NO: 951015 - DNA, 120 bp, Artificial Sequence
  ENSG00000236432_21 (sequence is synthesized)
taatttatatatggaaacgacaaagctatcctttttttcaggataatatctaattgaatcataagaaattgctgctgtcatagttaaaaagtggtcaaatactggcaaattcttaggttc

SEQ ID NO: 951016 - DNA, 120 bp, Artificial Sequence
  ENSG00000236432_22 (sequence is synthesized)
tacataatgttcatatatgtgtatgtgtatatatgtataatgtatacatgtatatgtaccttttatgtagaacacaatgtatttggttagtgccattacttggacaatttttttgccatt

SEQ ID NO: 951017 - DNA, 120 bp, Artificial Sequence
  ENSG00000236432_23 (sequence is synthesized)
actttcaatggcaaaagccacaataacttttgcaccaaccttatatatatttgtgtagattaatatgcaatatattccataggtgatattaaggttttctttgacttaaataatgtttaa

SEQ ID NO: 951018 - DNA, 120 bp, Artificial Sequence
  ENSG00000236432_24 (sequence is synthesized)
gactgggaagaggatcaatacccattacacatctttaaagagaacaaactaactcattaatgctagtatcagaatgttctttctttttttattctcaaatattttgaacaacagaatgtt

SEQ ID NO: 951019 - DNA, 120 bp, Artificial Sequence
  ENSG00000236432_25 (sequence is synthesized)
ctttcttataaaaccaaaaccaaaacaaaaaattcagctgtgagttagacataccttatcctacctaactagtcactgtgacacacttaccccccagccctcacacctatgcacattcca

SEQ ID NO: 951020 - DNA, 120 bp, Artificial Sequence
  ENSG00000236432_26 (sequence is synthesized)
gctccaatggacatcaaatttttaaaacttttctctgccagcagaggaacaaataaagaaatagtttcaaataatagacttaaaatgtgttttggctgggcacagtggctcatgcctgtc

SEQ ID NO: 951021 - DNA, 85 bp, Artificial Sequence
  ENSG00000236432_27 (sequence is synthesized)
ctgatgaaaccccatctcaactaaaaaatataaaaatcagctgggtgtggtggtgggctcctgtaattccagctactccagaggc

SEQ ID NO: 951022 - DNA, 120 bp, Artificial Sequence
  ENSG00000236432_28 (sequence is synthesized)
tattatatggttacatattaatcctttgctttattattttttcttcaggttaatattaactgaaaattaatttgctttctccagaaaatatgttgatggcagaggccaggcaaatctagg

SEQ ID NO: 951023 - DNA, 120 bp, Artificial Sequence
  ENSG00000236432_29 (sequence is synthesized)
agatatactggatggttagtagggaaaataaaaaaagaaatgctagatattcctaaggtggagaattctacttatgcaaccaaaacaaaaaaacccacacaaacaagagtatctttaact

SEQ ID NO: 951024 - DNA, 120 bp, Artificial Sequence
  ENSG00000236432_30 (sequence is synthesized)
gaatatctttccttagtcttgggcagtaggccttgctgtcattccaggaagggagcacacagtaattttgaggcattcatcatttgacactcatcatgttcatatacactgcagtttata

SEQ ID NO: 951025 - DNA, 120 bp, Artificial Sequence
  ENSG00000236432_31 (sequence is synthesized)
tctacccagaggaaaataagtcattatacgaaaaatacacttgcacactcatatttataacaggactattcgcaattgcaaaaatctggaaccagcccagatgcccatcaatcaatgagt

SEQ ID NO: 951026 - DNA, 120 bp, Artificial Sequence
  ENSG00000236432_32 (sequence is synthesized)
ccagatgcccatcaatcaatgagtggataaagacaatgtggtatatataccatggaatgctactcagccataaaaaggaatgaaataggctgggcacgggggctcacgcctgcaatccca

SEQ ID NO: 951027 - DNA, 60 bp, Artificial Sequence
  ENSG00000236432_33 (sequence is synthesized)
ggaagcctgggtgacaagagcaaaactccattaaaaaaaaaaaaaaaaaaaaggaatgaa

SEQ ID NO: 951028 - DNA, 87 bp, Artificial Sequence
  ENSG00000236432_34 (sequence is synthesized)
gaagtgtaaaagggggtgagggattaaagaccacacactgggtacagtgtacactgtttgggtgatgggtgcatcaaaatctcagaa

SEQ ID NO: 951029 - DNA, 120 bp, Artificial Sequence
  ENSG00000236432_35 (sequence is synthesized)
ctggccttgaaccagctatctttggagcaagaagaccaaagaaggaaccatctgattgcttggataaagtgttgttaaaaaaggagagagacaaaacagaaccatctggtcaaggacttg

SEQ ID NO: 951030 - DNA, 120 bp, Artificial Sequence
  ENSG00000236432_36 (sequence is synthesized)
cagccccctaggagacaggcgacagcaccgcagtcaggggatgcaggcgtggaggcacttctccatgttgccatcatgtgaagaaggacatgtttgcttctgcttctgccacgagtgttg

SEQ ID NO: 951031 - DNA, 120 bp, Artificial Sequence
  ENSG00000236432_37 (sequence is synthesized)
cctgcctttctccaatctctctcccgcagcccagcccagcccagcctggtttaatagcagggggagttggcaccgttcacagctggttaacaccctactgagcaggttttgaatgcagaa

SEQ ID NO: 951032 - DNA, 120 bp, Artificial Sequence
  ENSG00000236432_38 (sequence is synthesized)
agactgagaaaacttcactattcatgtaagaaaaataggctccacgggatcccttgatcaggatggtggtagaggaaatgaacttccatcagcactgtaatgatctcagccttctccacc

SEQ ID NO: 951033 - DNA, 120 bp, Artificial Sequence
  ENSG00000236432_39 (sequence is synthesized)
accccacgaagtttctcatagcaagccacatcttactcatctctacattcctaggaggggggacaagttcacagtgttggggagaggaaagtgtcctcttagctgcctcccatgacttca

SEQ ID NO: 951034 - DNA, 120 bp, Artificial Sequence
  ENSG00000236432_40 (sequence is synthesized)
ggggcccatttgatgataataggacactctctggacaaagcctgcagatggatttgatcaagcaagagagctgaggatgaatgcgaaaaaaaaaaaagtggtcctgatggctccttgacc

SEQ ID NO: 951035 - DNA, 120 bp, Artificial Sequence
  ENSG00000236432_41 (sequence is synthesized)
atgaaataaaggtcatcaatgagggaagacaggagactccaggagcacagagacagtgacaaagcaatggataaaggaattgtgggtaccagtgagatggaaggattatgggatttggag

SEQ ID NO: 951036 - DNA, 120 bp, Artificial Sequence
  ENSG00000236432_42 (sequence is synthesized)
tcctagggacaaagatggaaagactggagggtgcttggagaggaactgtgattggtgatgtcaagatcaagagtactgtcttacaggggaaccagtgacagaggtcaagaagaagatgag

SEQ ID NO: 951037 - DNA, 120 bp, Artificial Sequence
  ENSG00000236432_43 (sequence is synthesized)
accactgcaatggtaatttcatgacatgtacaggtgttgataattcctttgtgctggacaaggtaaaacaaagaggggtgatgactttgaaatgttcttaataaaaaattccagcaataa

SEQ ID NO: 951038 - DNA, 120 bp, Artificial Sequence
  ENSG00000236432_44 (sequence is synthesized)
accacagtgttcacggctgccgccattagtctttcatctttggattgagacccagtctcccagaagaccctatgccaatgcaaatggctactggacagtgataatgtataatgttcccta

SEQ ID NO: 951039 - DNA, 120 bp, Artificial Sequence
  ENSG00000236432_45 (sequence is synthesized)
tccaggttgtcaggtagacctttggattaactccccaaaagcagccccctaggagacaggcgacagcaccgcagtcaggggatgcaggcgtggagggtaagagcacgcgtctagatttca

SEQ ID NO: 951040 - DNA, 120 bp, Artificial Sequence
  ENSG00000236432_46 (sequence is synthesized)
gttcagtctctaccatgttattagctatgccacctgatgcctcagcttcctcatctgtccaatgcggttaattatagcaccagcctctcgggctgatgtgagagataaaggaatggaggc

SEQ ID NO: 951041 - DNA, 120 bp, Artificial Sequence
  ENSG00000236432_47 (sequence is synthesized)
acataagacccttagaacagcgcccaacacacaggccaagggctctgtaacttcacctctcaatggtcaatgatacataatttgatgacattgtctgaagaccaaggtgctggtggcaga

SEQ ID NO: 951042 - DNA, 120 bp, Artificial Sequence
  ENSG00000236432_48 (sequence is synthesized)
gtcaggactgtgggtggtagcgagggagagagaggccctgtgtagtcaggggagtggcccgaggggcagaggaacccagtcagtaaacagagacgttttgtacttcaaagttttgcccat

SEQ ID NO: 951043 - DNA, 120 bp, Artificial Sequence
  ENSG00000236432_49 (sequence is synthesized)
aggcagttctgtgactgaagacggggaggtcgaaagcagaggtggtgacagccgggagtaaccgtgtggtgtggagagtcctggcctggcacacagttgtcaagagaaggcttgtgactc

SEQ ID NO: 951044 - DNA, 120 bp, Artificial Sequence
  ENSG00000236432_50 (sequence is synthesized)
atcctttatttaagcctcaggacactggctataaaatgttgtgtttttttttttttcctttcaaaatttgacttagtggctaatatttttttaaaaaaacaccatgagattttaaataaa

SEQ ID NO: 951045 - DNA, 120 bp, Artificial Sequence
  ENSG00000236432_51 (sequence is synthesized)
aattccaattcctttcttctcatgaaaacttggaagatttattaatgcagggcctgacatgttgcacagtaacaatgggctgcagccaagtgcccgctggcccgttcaaatgtaccctca

SEQ ID NO: 951046 - DNA, 120 bp, Artificial Sequence
  ENSG00000236432_52 (sequence is synthesized)
gtttgtttattgcatttctgcaactctcttgtccccagcacggaggatgttgcaattttttaaagagcatttgcatccttaagaagaaagtgaaataccacatttttctatgactctttt

SEQ ID NO: 951047 - DNA, 120 bp, Artificial Sequence
  ENSG00000236432_53 (sequence is synthesized)
aaaagtaggaacatgaaaaaatggactgagtagggttgtgtcttttgagaaaaaaagggagagagcatatttctttatggaagagaaagagggtgtgtgtttcatgcagctgcttcactg

SEQ ID NO: 951048 - DNA, 120 bp, Artificial Sequence
  ENSG00000236432_54 (sequence is synthesized)
ccttcagttaactgctgttctcttgtaggactctgtgttcacaattcctgcctaacacaatactttgctaggggtcagcaactaaaatggaatagggaaaaataccagcttttcttggat

SEQ ID NO: 951049 - DNA, 120 bp, Artificial Sequence
  ENSG00000236432_55 (sequence is synthesized)
tttggctgactttatgttaatagaatatatgtttttgaaactctccctccaagttcatctaaaccacgttgtgacatccaccaatccaatgcctttattttcttccagtgtattgaccct

SEQ ID NO: 951050 - DNA, 120 bp, Artificial Sequence
  ENSG00000236432_56 (sequence is synthesized)
tttgtgcttgcaaaaacacttgcatgcaaattgtttgtacctgggattccttttacaccatgtaaccctggcaatcctgggagaccgggaggccctgggatataagggcactgtgtacac

SEQ ID NO: 951051 - DNA, 120 bp, Artificial Sequence
  ENSG00000236432_57 (sequence is synthesized)
aggaggcctggttctcctgcaatgagagcatactagcattacttaaaaagctacattgagtcctcagaaagaacaaatattttccaaccacactatcatttattacatttaaacattttt

SEQ ID NO: 951052 - DNA, 120 bp, Artificial Sequence
  ENSG00000236432_58 (sequence is synthesized)
atgtagtgaaaattatctaggacgttatacatattaatttaaaaattcatttattatagatctgcttactttaatgttctgagctatacagttcttctgaaaggggaaattccaaaagtc

SEQ ID NO: 951053 - DNA, 120 bp, Artificial Sequence
  ENSG00000236432_59 (sequence is synthesized)
taacataaaacatctatttcagtgtttctttccttgcatgcaggcaaaaactcacattttagggatatccaacaatttattgcatgggtgccaaataaattattgatttacagataaatg

SEQ ID NO: 951054 - DNA, 120 bp, Artificial Sequence
  ENSG00000236432_60 (sequence is synthesized)
aatacttttagctaatggaaaataagtcatcactgactggtagctatttgggatcattgttatctcagggggaaaaatcagtgataataatgacgatgaaaaaggcttatcctaatacaa

SEQ ID NO: 951055 - DNA, 120 bp, Artificial Sequence
  ENSG00000236432_61 (sequence is synthesized)
cattattgattgaaccaacctttgggcccatcaactcctgggattcctggagaccctagatagcctggcagtccgtgatctccaggtggacccttgcgaaaaacgatgtcacctataaaa

SEQ ID NO: 951056 - DNA, 120 bp, Artificial Sequence
  ENSG00000236432_62 (sequence is synthesized)
atacagcaccaaagacaattttttatttgtgtttttttcaattagcaagtattgtaatatatgtattatttaaaatgcatctctctcatctttgtattggaagcctagtctttagaagtt

SEQ ID NO: 951057 - DNA, 120 bp, Artificial Sequence
  ENSG00000236432_63 (sequence is synthesized)
tatctgcaactgagaaagcatggtgaccagctcttcccttcatattacatagatgtggtatttttaaggtagttgatctttgaaagctcattgtataatttttttttttggtcacagaat

SEQ ID NO: 951058 - DNA, 77 bp, Artificial Sequence
  ENSG00000236432_64 (sequence is synthesized)
atagtgaatgagtgcttatgagatctgatggttttataatgggcttttccccattttgctcagcacttctccatgtt

SEQ ID NO: 951059 - DNA, 120 bp, Artificial Sequence
  ENSG00000236432_65 (sequence is synthesized)
aatgggcttttccccattttgctcagcacttctccatgttgccatcatgtgaagaaggacatgtttgcttctgcttctgccacgagtgtaagtttactgaggactccccagccgtgctga

SEQ ID NO: 951060 - DNA, 89 bp, Artificial Sequence
  ENSG00000236432_66 (sequence is synthesized)
gatatgcacagacaatccctttagcatcttgaggcaaaggatcaactcttattctggatatttttggatacattgtattttcctgatat

SEQ ID NO: 951061 - DNA, 120 bp, Artificial Sequence
  ENSG00000236432_67 (sequence is synthesized)
tattctggatatttttggatacattgtattttcctgatatactgtagatgcttaatatatattgagtaaaagaaaaatggattctgactcagggtatcatctgttttctctttgttgctt

SEQ ID NO: 951062 - DNA, 120 bp, Artificial Sequence
  ENSG00000236432_68 (sequence is synthesized)
gtccacatcaattgagttgtcatccttaaagcaggtctctaagaaagctcttctcagcttccacattatctgctactgtaatgttgcaatgaacagctccttctcttaaactggttaatt

SEQ ID NO: 951063 - DNA, 120 bp, Artificial Sequence
  ENSG00000236432_69 (sequence is synthesized)
tccttcctaagtggaacttcttttgaggttagtagaagctgcaaacagaattatatggaattgaatataagaaaatatacagtgaagagtgctaagaattcctctgaaatgtaatgaaaa

SEQ ID NO: 951064 - DNA, 120 bp, Artificial Sequence
  ENSG00000236432_70 (sequence is synthesized)
ggtagatttcatttagcattcagtatatttatcttgaaggaaaaaaggtggaaatatcaaaggtttgaaaaaaaaaaaacctctttgctttttcatatgctagatggatcaattactttg

SEQ ID NO: 951065 - DNA, 120 bp, Artificial Sequence
  ENSG00000236432_71 (sequence is synthesized)
ttgacttatttaacaagagtcttgtggttaagcaatatatataaaatcacaaaagtattatattaataatataacataataatgtccaccatgaaatctgtaatgatatgcgtgcaccta

SEQ ID NO: 951066 - DNA, 120 bp, Artificial Sequence
  ENSG00000236432_72 (sequence is synthesized)
ccaagtgttgggcacagtgctaagtgatttcacaaaatacttatttaatcttcctggcaactccactaaagtatttaggaactgctatagtttgaatgtgctccctccaaaattcaggtg

SEQ ID NO: 951067 - DNA, 120 bp, Artificial Sequence
  ENSG00000236432_73 (sequence is synthesized)
ttatcaatgtgatagaagtaagaggtagggtctgtaggaggtgattaggccatgagtgtttctctctcattaatgggattaaggccctattaaaagaggctttgagcagcctcaggtcag

SEQ ID NO: 951068 - DNA, 120 bp, Artificial Sequence
  ENSG00000236432_74 (sequence is synthesized)
cttgcccttctgctttctgccatgtgaggatgcagccaaaaaagccctcaccagaccaagggtcagcatcttgattttggacttcccagcctctagaactgtgaaaataaatttctgttc

SEQ ID NO: 951069 - DNA, 120 bp, Artificial Sequence
  ENSG00000236432_75 (sequence is synthesized)
gccagctcgggcggcaggtcgcgggtcgggaagacgtcaacactcacccctgggcccacaggagggtcccggcgaggacccccgccctctggctcccggggcgctcgagtgggcgctctc

SEQ ID NO: 951070 - DNA, 120 bp, Artificial Sequence
  ENSG00000236432_76 (sequence is synthesized)
agaggtggttggctgagagcacggaggcgcccagggacagcaccggcggagcggcccgcagagggccagggcagaagcgcgaaaggcgcgggctggccccttctgggagccgtagcggaa

SEQ ID NO: 951071 - DNA, 120 bp, Artificial Sequence
  ENSG00000236432_77 (sequence is synthesized)
gtgaaggtttgttacatcctcatgtgccatgcatataaatatttgttgaacacagtctcatttctcaaaagtcatttcaaatatctcaaaacttaacatggttttgcaactgcaaacaca

SEQ ID NO: 951072 - DNA, 120 bp, Artificial Sequence
  ENSG00000236432_78 (sequence is synthesized)
tttttcttttttcctttcttgccatgatacatttttcttttattcctttcctgctatgagagtctgatctgcaaatgtaatattttacccagcagttctctgtttttctaaagttgcttg

SEQ ID NO: 951073 - DNA, 120 bp, Artificial Sequence
  ENSG00000236432_79 (sequence is synthesized)
ggattacatttggtcaagaagactgcaagggagggcttctgaaaatttggttttatattggtcgtattgatcatatcatgaaaactgccataaaaagggcccaaataacttgaaataatg

SEQ ID NO: 951074 - DNA, 120 bp, Artificial Sequence
  ENSG00000236432_80 (sequence is synthesized)
tgaatgggtttgaattttagcctagtagccacatctaacaacagtctttctaaagggttaaattttcattgaagcatttctttttagtaattattctccaaaggattttgaacaggagaa

SEQ ID NO: 951075 - DNA, 120 bp, Artificial Sequence
  ENSG00000236432_81 (sequence is synthesized)
gaagtttttagatagaatcagaaaatattattctggtagtctacagaataaagttgaatttgagatggaggtttcaacatcagccagaaaagttttttaatgtggaatttttttaagggt

SEQ ID NO: 951076 - DNA, 120 bp, Artificial Sequence
  ENSG00000236432_82 (sequence is synthesized)
ttaattttccccatacttggcaaagagggagttttgaggcttataatttaaaaactgactgctgatgatttaaatatagcaaattaaaatgcagaattaacttagaaataaaaatgttac

SEQ ID NO: 951077 - DNA, 120 bp, Artificial Sequence
  ENSG00000236432_83 (sequence is synthesized)
acatcgaggaggcaacatgtcgtggaaggtgactcagttctaaggcctgctcagccaccaaccggctgtgtgatgggcaggtaactaaacactggccctcactgtccttatttgtcaacc

SEQ ID NO: 951078 - DNA, 120 bp, Artificial Sequence
  ENSG00000236432_84 (sequence is synthesized)
aaacggatttgcctggataatttattagcctgagaatcagctctgatgtcctgattccaaacaagcaattctttacctttgagacctggttctcctttgtcccctattacgtgggatatc

SEQ ID NO: 951079 - DNA, 120 bp, Artificial Sequence
  ENSG00000236432_85 (sequence is synthesized)
tctgaaggcccgggatttcctttatctccttgttcccccttggctcctggggttcctctctggccctttactcctggaattccagggctccctaacagacaggagtaacaacatcaggtc

SEQ ID NO: 951080 - DNA, 120 bp, Artificial Sequence
  ENSG00000236432_86 (sequence is synthesized)
cttaattcttcaggtagttcatagggattaaaaagttggcagtgcttactataaaacagaacaaatcaaacaaaaaaggctaacagtgctgagaacttgataaatagtttccccaggcag

SEQ ID NO: 951081 - DNA, 120 bp, Artificial Sequence
  ENSG00000236432_87 (sequence is synthesized)
gcagcctcataagggtagtggtgtaagcctacagaaaacaggattccattcaaatggagaaaaggaacatagaaaacagcaaaatcaaatactgttgctctctcagaactatttttccct

SEQ ID NO: 951082 - DNA, 120 bp, Artificial Sequence
  ENSG00000236432_88 (sequence is synthesized)
ccaatgaaacataactttttttgctgcaaaataaatgaacattgtttatgcttcctgctatttagaaagacactctatcacttacccctctgccctggtgtgcctgggttcccagggggc

SEQ ID NO: 951083 - DNA, 120 bp, Artificial Sequence
  ENSG00000236432_89 (sequence is synthesized)
cctggagggccaatggctccaggaaagcccatcatcccaatcactccatcttcacctatggaaacaaattaacacaaagcagcacgtgttgtacagagtgagaaaagcaaaatattccat

SEQ ID NO: 951084 - DNA, 120 bp, Artificial Sequence
  ENSG00000236432_90 (sequence is synthesized)
atactaaaataaattatacttagaagcagagattgggagttgaaaaaatggcctctgtacatagtacaattactgtattagtctaggagatgggtcggtaagtggtcttttaaactcacc

SEQ ID NO: 951085 - DNA, 120 bp, Artificial Sequence
  ENSG00000236432_91 (sequence is synthesized)
tatgtggaagtgattggtagcaaatcatattcatggatgaggatagcatatgtggaagttttggagcattccatcctcccagcccctgaccagtcactttctattctatcccttcacttt

SEQ ID NO: 951086 - DNA, 120 bp, Artificial Sequence
  ENSG00000236432_92 (sequence is synthesized)
attttcttcataacacttgtctcaaattgaacttagattttaaatatttctattattgatcctctactatgagaaggggagacttgtccactgactgatgtgtctctagggcctagaaga

SEQ ID NO: 951087 - DNA, 120 bp, Artificial Sequence
  ENSG00000236432_93 (sequence is synthesized)
atgctggcatgtgatagtagcccaataacatgaatgaaaggataatgtgtcgattaagttgttttaggctcttttccagaggggagatcggtgaggtccttatgccatgagggaacagaa

SEQ ID NO: 951088 - DNA, 120 bp, Artificial Sequence
  ENSG00000236432_94 (sequence is synthesized)
tattctccccaaacatataaacaataaacatagccatgaaattaaaacaattatacagaaatatgatgaacaacaacaacaaatcagataacttataaaaatggacaagtttctagagaa

SEQ ID NO: 951089 - DNA, 120 bp, Artificial Sequence
  ENSG00000236432_95 (sequence is synthesized)
acagaataccaaaactgactccagaagaaatagaaaacctgaatatacctataagaaatgaagagattgaattagtcatttagagacttcccaaaaagaaatgcccagacccagataact

SEQ ID NO: 951090 - DNA, 120 bp, Artificial Sequence
  ENSG00000236432_96 (sequence is synthesized)
tcactggtgaattctaccaaatgtttaaagagcgtcgattcttcacaaactgttccagaaaatacaagaggaggaaacacttcccagcttgttccatcagaccagcattactctgacacc

SEQ ID NO: 951091 - DNA, 120 bp, Artificial Sequence
  ENSG00000236432_97 (sequence is synthesized)
aacaccaaagacatcacaagaacgctacagaccaatatcccttctcaatataaatgcaaaaattctcaacaaaatactagcaagtatattatagtagtcgtatataaaaaggattacaca

SEQ ID NO: 951092 - DNA, 120 bp, Artificial Sequence
  ENSG00000236432_98 (sequence is synthesized)
agagtaaaaagcgtatgcctatgtacagttgacagagccaccttaagaagaagaagaaataagaagaaaaatagaaacacacaaaaggatacctggtggccctaaaattcccggatttcc

SEQ ID NO: 951093 - DNA, 120 bp, Artificial Sequence
  ENSG00000236432_99 (sequence is synthesized)
tggatatcctctttgacccagtggtcccatttcaccttgatgacctggaattcctggtgatccagtttctccaggaaatcctgatctatccaagcctggaattcctgggtctccctttgg

SEQ ID NO: 951094 - DNA, 120 bp, Artificial Sequence
  ENSG00000236432_100 (sequence is synthesized)
gtctccctttggccccgttttacctcttctgcctgtgtacgaataaatgaatgaattaattaacccacaaatgctttcccctactaacttcagaaatatatatatatatatatatatata

SEQ ID NO: 951095 - DNA, 120 bp, Artificial Sequence
  ENSG00000236432_101 (sequence is synthesized)
tatatatatatatatatatatatatttttaagatggaatctccctctgtcttctaggctggattgcagtggggcgatttcggctcactgtaccctccgcctccctggttcaagtgattct

SEQ ID NO: 951096 - DNA, 120 bp, Artificial Sequence
  ENSG00000236432_102 (sequence is synthesized)
ggcatgagccactgcacccggccactttagaaatattttatggctgtaaatatttagctttgtgatttggggtaactgcacacttacgcatgcgtgcgcatgtgtgtgtgtatgtattta

SEQ ID NO: 951097 - DNA, 120 bp, Artificial Sequence
  ENSG00000236432_103 (sequence is synthesized)
tgtatgtatttaatgtcccctctgtaaaatttctgagctcccttctggctctaacattctctgctccaatgatttatgcagtaatacaagtgtagtctttatatctattttctagtcctg

SEQ ID NO: 951098 - DNA, 120 bp, Artificial Sequence
  ENSG00000236432_104 (sequence is synthesized)
agcaaagaacagactaagacaggggctctatgcatccagtgtaaagatgcagatttccaggccccactccaattcctgagttacattactgagcatgggggtctgagaactgcattttta

SEQ ID NO: 951099 - DNA, 120 bp, Artificial Sequence
  ENSG00000236432_105 (sequence is synthesized)
acaggacaccccttcccctcatgacccttttgccaccatgtgccgttttgtttaacctgcatgaccattcacgacagccttgcttggcgcactgaatgtgagaaccactgttttttgagg

SEQ ID NO: 951100 - DNA, 120 bp, Artificial Sequence
  ENSG00000236432_106 (sequence is synthesized)
taggagatgaatggacaccagcactcagagtccgggtcccctttctccttttcgtcagctgcagagtcacagaatataaaatgtggctgctctgcagttaggagctgacatcaaatacat

SEQ ID NO: 951101 - DNA, 120 bp, Artificial Sequence
  ENSG00000236432_107 (sequence is synthesized)
gtccactgggaaggggagcactgcctgctacacagagcttgggccggaatgattgctttttgctgaccatgtattaaacacgttgtcataacccgggcccaggtggagggaggagaagtt

SEQ ID NO: 951102 - DNA, 120 bp, Artificial Sequence
  ENSG00000236432_108 (sequence is synthesized)
gacttcttcatcccttgttgtctcactgtcctctaccctgaaggggcaggatcaccttgggcctgggctgcttagacaaagcttttcttctcttccatagcccatcatgggcatcactag

SEQ ID NO: 951103 - DNA, 120 bp, Artificial Sequence
  ENSG00000236432_109 (sequence is synthesized)
tgccttccagggaccaaatagaaatatttacccgtggtcaaagggacacatagtgaccagctattttctgccctggtttgacaacaaggtaaatgttataatctctctcacacagttaat

SEQ ID NO: 951104 - DNA, 120 bp, Artificial Sequence
  ENSG00000236432_110 (sequence is synthesized)
gagagacactgattcaaaatttccttgctactttaaagaacttgatcaaacatagcattgatattgtctttaatcacacttactggaccacgaaatcctggagggccaatgtcccctttc

SEQ ID NO: 951105 - DNA, 120 bp, Artificial Sequence
  ENSG00000236432_111 (sequence is synthesized)
ttaacattggatttgggaaatggaacaacatactgcggatctttctgctaccgatgaaagaagaaggttaatattaactgaaaattaatttgctttctccagaaaatatgttgatggcag

SEQ ID NO: 951106 - DNA, 120 bp, Artificial Sequence
  ENSG00000236432_112 (sequence is synthesized)
acaaaaggagacgccgaaccacacaaggtgaagaggttcgcccaaaaacacctgcagaagacgctcctctccctcgctctcctcggggactcaaggtcccggggaggaggaaagaccagg

SEQ ID NO: 951107 - DNA, 120 bp, Artificial Sequence
  ENSG00000236432_113 (sequence is synthesized)
tgggctggtcttaacagaaatgcatgcaagaccctgtgtaatgagcacacaaatagtcatcttttacttactagcataagaccaggttggctttgtgaagcagcacactacaaaaactca

SEQ ID NO: 951108 - DNA, 120 bp, Artificial Sequence
  ENSG00000236432_114 (sequence is synthesized)
gaggataatgtgctgtgtgagatgatcagaaatggaaaacctgtggattaagaatccttgccttttttcgtgataagtagcttcttataaattgaattaagattctttgtatcagggatc

SEQ ID NO: 951109 - DNA, 120 bp, Artificial Sequence
  ENSG00000236432_115 (sequence is synthesized)
aaggtactgaaatgcaaggagaaaagaggtgagagcagctagccatgctcttccctgctagggatccttgtgagttccagagaggtgcctaacagtgacccacatgaagaagcagaccag

SEQ ID NO: 951110 - DNA, 120 bp, Artificial Sequence
  ENSG00000236432_116 (sequence is synthesized)
gtttggctttgagattgagtagggtgtgctagctgttacatcatatgaactgtagtctaccttaggtcctctaggtcccatggctcctggaaagccctagaaaaatccacaaatgaaaat

SEQ ID NO: 951111 - DNA, 120 bp, Artificial Sequence
  ENSG00000236432_117 (sequence is synthesized)
tactcacaaagaatcccggaggaccaggtgggccaacaggcccaggaaaacctggagggcctggcaaacccttgaaattgagagaagaataagacctcagatgaaaacaaccagttgagc

SEQ ID NO: 951112 - DNA, 120 bp, Artificial Sequence
  ENSG00000236434_0 (sequence is synthesized)
gcattaaggttcctcatcagcataacagacaaaatacctatcttaataaagggttggaggccagatgcagtcatttagctctgttatcccagctactctggaggctgcgacatgagaatt

SEQ ID NO: 951113 - DNA, 120 bp, Artificial Sequence
  ENSG00000236434_1 (sequence is synthesized)
ccagaagatagggtcaaacatcaaaaacagcaaggtctgatctgatgcgaaaaatctctgaagcattccggttgtttgttaatatataaatgaagcacctataaaatgatggatgttgtc

SEQ ID NO: 951114 - DNA, 120 bp, Artificial Sequence
  ENSG00000236436_0 (sequence is synthesized)
attctgtcttagaagcacaggtaacggtggaagatcatggaagtcttcacagaagacaagatatcaaaacagagccttgaaggctaagtaggtttgtttatttgcttctttgtttttcca

SEQ ID NO: 951115 - DNA, 120 bp, Artificial Sequence
  ENSG00000236436_1 (sequence is synthesized)
gatagaaggggccacataagcaaagatgaagaaacataaaagagcctcagtgtggattttttgaaagaatgagaaagagcacttgatgaagagtctagaagtctgtgtttcagtccaaaa

SEQ ID NO: 951116 - DNA, 120 bp, Artificial Sequence
  ENSG00000236436_2 (sequence is synthesized)
cctgccaataatgctggaaaaccttagaaggtcaacaaaccctcctgaggttaaaattcttcacccctcaaaaagacagggactttctgagcctcctgccccataagattgtcgtcagtt

SEQ ID NO: 951117 - DNA, 120 bp, Artificial Sequence
  ENSG00000236436_3 (sequence is synthesized)
tcagacaagaaccaagttggtaaatgcagtttaaaacctaccatgagccagagcaaaggaaggaagtttccaattttctatagatatttcacatcagacatcatgcagtttcagtatact

SEQ ID NO: 951118 - DNA, 120 bp, Artificial Sequence
  ENSG00000236436_4 (sequence is synthesized)
tagtttcctttgatattatccatagccttggccctcaaatatttcacattcttagattaatttaataatagcctggtgttgctgcttatgtatcctaccatatccacagccaactatgaa

SEQ ID NO: 951119 - DNA, 120 bp, Artificial Sequence
  ENSG00000236436_5 (sequence is synthesized)
gacaataactttctcacctgagaactaaagacttacctggctatagctccatattataatctacttaaattataaattatatggtatcagaccatcatctgaaccattttagatctaaga

SEQ ID NO: 951120 - DNA, 120 bp, Artificial Sequence
  ENSG00000236436_6 (sequence is synthesized)
atatttattaagcaaacactctgcaaagttccagcaacagagacacttggaagtagctagaaactaggaaattaagaaagaatacactttatacaatgtgaattctaggaggattttgtg

SEQ ID NO: 951121 - DNA, 120 bp, Artificial Sequence
  ENSG00000236436_7 (sequence is synthesized)
ggaaaaaaaattttaagggaagatatgttttcagagttttacacttaattattaaaaattacaatgattttcaaaatgtatctttgacagtggagattatgttttgtctggtaatcgatc

SEQ ID NO: 951122 - DNA, 120 bp, Artificial Sequence
  ENSG00000236436_8 (sequence is synthesized)
agctttttcttttaaccaacagttcatctaaaacattttaccaaatccaaagataagagaatttacagtgaagtttggagggtagggaacccaaaatcaactgataggaaactaaagttt

SEQ ID NO: 951123 - DNA, 120 bp, Artificial Sequence
  ENSG00000236436_9 (sequence is synthesized)
ccttggatagagcctgcatgaaatctctgcacttatgtatagacctgctcagagcaatgtctgtggaaatgacttcaaaagctccaagtgccagaaataacaactgctctggatcaagtc

SEQ ID NO: 951124 - DNA, 120 bp, Artificial Sequence
  ENSG00000236436_10 (sequence is synthesized)
caggaacagatattgggactagaaagagggattttccaaaaatctgagtttcatttttatctataatattgttgaaaaatggaaatgctactatgtgaaactctggcacttttttggcta

SEQ ID NO: 951125 - DNA, 120 bp, Artificial Sequence
  ENSG00000236436_11 (sequence is synthesized)
taaaaaagccatgtgtacagtatgagctatcatgctttatcaagtctgaagaacagagaaagccataggggaaccttataatggttaataacctcctaataaagtacatttgtgcattga

SEQ ID NO: 951126 - DNA, 120 bp, Artificial Sequence
  ENSG00000236437_0 (sequence is synthesized)
cggctcgtggggggagcgctcctggccccgagtgtttctgtctctgctcgggagggaggtgatgcatgggccaccgccgacttctgcgggagtctcatgcagtaatactgttttgtggct

SEQ ID NO: 951127 - DNA, 120 bp, Artificial Sequence
  ENSG00000236437_1 (sequence is synthesized)
tagttggtgacagtgtatcaggagcatttccccacccaacaaaactcatttgatgagtgtttcgccaggtgggaaacatggaacagcaggcactcagaagagatctcagcattgacagac

SEQ ID NO: 951128 - DNA, 120 bp, Artificial Sequence
  ENSG00000236437_2 (sequence is synthesized)
ctggattctctcctgcttccagtggagacagaggcccataaaatccattggctggaggggtagccctcgagtcagggcagtgtgcaacccagcgtctcaaggatgtggcaggatgtgtgc

SEQ ID NO: 951129 - DNA, 120 bp, Artificial Sequence
  ENSG00000236437_3 (sequence is synthesized)
aggccagtaggaggtagggagagggccaaggtgccaatcacttggaggctataaaaaaataacaccagaagataaactagaaatgacactagaaatgtaaaggactgccccatcagtcac

SEQ ID NO: 951130 - DNA, 120 bp, Artificial Sequence
  ENSG00000236437_4 (sequence is synthesized)
ttggggtgacagtggaggccaagacccctctccctttaagggatcggcttgagtagtgaccgtaacaaggaaaccatgtctgctttaactgcaaaagtttagtttagctaagctggctat

SEQ ID NO: 951131 - DNA, 120 bp, Artificial Sequence
  ENSG00000236437_5 (sequence is synthesized)
gcaagtctgaggcccttggcctctccaaatcctcaacaaggagccagagaatcttggtttgaagaccttgcctgcactcattgcccatcttatccacacagcacaccagattcaccttcc

SEQ ID NO: 951132 - DNA, 120 bp, Artificial Sequence
  ENSG00000236437_6 (sequence is synthesized)
ttaatgccttctgattgggtcatttgactcctggctcaacaagagcctgactctacctatccagacctttttctgtcttcaaattcagctcaaggtatgttttcctttttcaacaacaaa

SEQ ID NO: 951133 - DNA, 120 bp, Artificial Sequence
  ENSG00000232537_0 (sequence is synthesized)
agtcctaaaggctggtctcactcccatcctgccacgcaacagcacagggtctatttcgagacagccagtgaccagggctgagaacttgccccagaccaccagcctcctcactgagaaagc

SEQ ID NO: 951134 - DNA, 88 bp, Artificial Sequence
  ENSG00000232537_1 (sequence is synthesized)
agaacttgccccagaccaccagcctcctcactgagaaagcaagcagaatcacagttttttggaatctcagggagccttcagcggcaat

SEQ ID NO: 951135 - DNA, 120 bp, Artificial Sequence
  ENSG00000232537_2 (sequence is synthesized)
tcttaagggatatggaaatttccctgggacagctgtgctctgctggctaaggagcccacaaggttaatgaacacccacaaagactgaggaggatagagagcattcttcactggatgatta

SEQ ID NO: 951136 - DNA, 120 bp, Artificial Sequence
  ENSG00000232537_3 (sequence is synthesized)
gcatgccagcattctttcctctgtggtaatgatggtcaagaaggtgcctggtgatagaagggagaatgaagggttgctgcttctgcctcaaacgcttattaaaattcatttccattcaaa

SEQ ID NO: 951137 - DNA, 120 bp, Artificial Sequence
  ENSG00000232537_4 (sequence is synthesized)
acagaccatcgtactcatactctgacttctagatggggtaatggggaagccaggaacatttgatctgggcttgataaatggacacacagatgaaggaagaaacaaatgaagtatggcacc

SEQ ID NO: 951138 - DNA, 120 bp, Artificial Sequence
  ENSG00000232537_5 (sequence is synthesized)
tatgaaggctggaggactcagggacaactcctggatgagatgagctgtgatgaggacacaaagggggtgtcagctgtgaccctcgaaggaaagggatcaccctctttctgaccctatacc

SEQ ID NO: 951139 - DNA, 120 bp, Artificial Sequence
  ENSG00000232537_6 (sequence is synthesized)
atgaaggcagtcagagaaaacttagttaaaaaatttctaaactgctttgctgatttgatctggggccctggagtgccaacatcctgtgatagcggctgattgttgatgcctgggaggata

SEQ ID NO: 951140 - DNA, 120 bp, Artificial Sequence
  ENSG00000232537_7 (sequence is synthesized)
cagcagtgacgatccaaatttacaagactcaacatggttttcaaaacttccttttaaaaaagatgttcctgagttctggaatctgaacaaaatatgtctggttattatataattctaatg

SEQ ID NO: 951141 - DNA, 120 bp, Artificial Sequence
  ENSG00000232537_8 (sequence is synthesized)
gtccttgtggatgctaccattagagttcagttagtgtctcatctatcactgtaatatttgtattgtaacactaatcgtggcaaagtatgatttgataaatgctcattctcaaatctttta

SEQ ID NO: 951142 - DNA, 120 bp, Artificial Sequence
  ENSG00000232537_9 (sequence is synthesized)
agagaggcaatatggatgaaaccatttattagatttataagagctgaaggaaagtggtaaagctatccatcttctatactttattgagaacaggaccaatgactcagactatcaggacag

SEQ ID NO: 951143 - DNA, 120 bp, Artificial Sequence
  ENSG00000232537_10 (sequence is synthesized)
gatttatataaggttgtgtaatccacaaatacgctcatgtgcatcatctcactttaggaagaactcctgaacaattgatgatagagtgagctgccaggcatgtttaagcatagactaatg

SEQ ID NO: 951144 - DNA, 120 bp, Artificial Sequence
  ENSG00000232537_11 (sequence is synthesized)
aatccactagactagatgaacttaaagattgtgtccaactcaggctgtgaatcaacctagaggtgcttccaagtcagcttctaaactgagaggaaacagggaacaaacgcaataacacct

SEQ ID NO: 951145 - DNA, 120 bp, Artificial Sequence
  ENSG00000232537_12 (sequence is synthesized)
gcatcaattcatccttgtgtgtctccgtttatacttttgaaaaaggaaaaaagtgaaaagacaagtttgtctttaccacatggggaactggttgagttagacatctcatcctttaagata

SEQ ID NO: 951146 - DNA, 120 bp, Artificial Sequence
  ENSG00000232537_13 (sequence is synthesized)
ttcaaggggatattggctgcctgtcttcctggggaattctgcactgggtaagaagatggaccacatgccctgaggttccttctaacaccaagactaagggaaagctgtattttatacttg

SEQ ID NO: 951147 - DNA, 120 bp, Artificial Sequence
  ENSG00000232537_14 (sequence is synthesized)
gctctactactttctacactgactttgagagagccttgtttttcactctctggacctcaattatctttcctattacaggaaggtattggactctgtgacctttaagagttttagagaact

SEQ ID NO: 951148 - DNA, 120 bp, Artificial Sequence
  ENSG00000232537_15 (sequence is synthesized)
cacattctaaaattataagattttataaagaatatgtggaagcttcattcttccacattctctaagaaaaattgatcctgagttctggtcctagtgagattatggtggcagtgtagtttc

SEQ ID NO: 951149 - DNA, 120 bp, Artificial Sequence
  ENSG00000232537_16 (sequence is synthesized)
ttaatcttttcaaaactcctccagaaaaccaaacagaaaattagaaatagtgtaaaaatatgcctagattatatatttttaaatactaggtgataggaaacatctctaaaccctacagta

SEQ ID NO: 951150 - DNA, 120 bp, Artificial Sequence
  ENSG00000232537_17 (sequence is synthesized)
gaggtggcagaaacaggaaaagagagtggtgggctcaatgcaaacctttgacaagccctgtaagctatagaacccaagatcacccatgaagactcacccttaaaagaaggcctaatctgg

SEQ ID NO: 951151 - DNA, 120 bp, Artificial Sequence
  ENSG00000232537_18 (sequence is synthesized)
aataaaaatctgtgtggacaagcctgagaataactgtgaaactactattccgatatgctcagagttgcaagtgaaagcaggagcctgcagacagcatcacaagagacctgagagtgaggc

SEQ ID NO: 951152 - DNA, 120 bp, Artificial Sequence
  ENSG00000232537_19 (sequence is synthesized)
agtagagcaaaccctggatgattgccaaaatatccaataatatccttttccagaggggaaaaccgccagaagcagacacgttgagccgggcagtaactctggacagttgagatgcttcta

SEQ ID NO: 951153 - DNA, 120 bp, Artificial Sequence
  ENSG00000232537_20 (sequence is synthesized)
aggactagataaggcaaactgtgacgcagaaagataattatgcagactgctagagttattgctggaagtgcttcaagttctcagcctgaaagttgtcttcacagaccatcgtactcatac

SEQ ID NO: 951154 - DNA, 120 bp, Artificial Sequence
  ENSG00000232537_21 (sequence is synthesized)
aatgggagaggcagccagtcgggggcaaagatgccgttaaacagtcagccctgggcatggacgtgccccctcctactgaagtcctatattcacatctttctgggcctgaaaccagccaag

SEQ ID NO: 951155 - DNA, 120 bp, Artificial Sequence
  ENSG00000232537_22 (sequence is synthesized)
agaataagtgcatacattttaggagaagagggatcaaaggcagaaggaagaaatgcacgggtgtcagctgtgaccctcgaaggaaagggatcaccctctttctgaccctataccaccttc

SEQ ID NO: 951156 - DNA, 120 bp, Artificial Sequence
  ENSG00000232536_0 (sequence is synthesized)
atcacctggtgcccggctcgcgcggtcagccctgcgcggcgcttctctctttttattcttttgcctgcgacgggcagtgggagtcgcggggtgaagactcctttgaggctggagggttcg

SEQ ID NO: 951157 - DNA, 120 bp, Artificial Sequence
  ENSG00000232536_1 (sequence is synthesized)
gggcgtccctgccctttggtaggacactgcggctcctgcctgggactcggcgccggcgagcccgtgcttgggccgcgggtctcaggcgtcttttgggcagccacattgggtcataagaga

SEQ ID NO: 951158 - DNA, 120 bp, Artificial Sequence
  ENSG00000232536_2 (sequence is synthesized)
ctgccgaggaggcttaggctttcccgtgggtcgagggtcctggtgacctccgaggccctccaaagaatttcatcatggtgctttggatgatcagtaacaagaaaaatgaaattctggatt

SEQ ID NO: 951159 - DNA, 120 bp, Artificial Sequence
  ENSG00000232536_3 (sequence is synthesized)
gaggatgagcagtccaggaatgacctctctacaactagagaaagaagaatgcatgcaatgtgttccctgtagtccaagaaccagggtagccctgctggagctctacagagccatgtgcca

SEQ ID NO: 951160 - DNA, 120 bp, Artificial Sequence
  ENSG00000232530_0 (sequence is synthesized)
agtgtccctcccagcctgtgagcttctagaaggcattgcaacccggcacaggagctgacacttacaaatattcaggaacaagccagtcctcgaagtctcatgtaggggaaagatcatgag

SEQ ID NO: 951161 - DNA, 120 bp, Artificial Sequence
  ENSG00000232530_1 (sequence is synthesized)
atctggaggtgaaggagtggccctaactggccctaaacacttcaagtgcccctgggcacgtggtttcatggctctgagcctcgatttcttcctctgggtcttcctctgtcacccaggctg

SEQ ID NO: 951162 - DNA, 120 bp, Artificial Sequence
  ENSG00000232530_2 (sequence is synthesized)
cagtgcagtggcgcaatcatggctcaccgcagcctccacctcctgggatcaagggatcctcccacctcagcaccccgagtagctgggaccacaggcggacgccacagcatctggctgttt

SEQ ID NO: 951163 - DNA, 120 bp, Artificial Sequence
  ENSG00000232530_3 (sequence is synthesized)
agtgctaggattacaggagtgacccaccgtgcccagcaccccctttacctctgagcaatccatctctctccttgggggcaccccatgatctagacaccacccaccttgttctgccttggc

SEQ ID NO: 951164 - DNA, 120 bp, Artificial Sequence
  ENSG00000232530_4 (sequence is synthesized)
caaaataccacctaactgcccccacctatgccaggtgcccctcacccaccctcctccacccttcgctgagtcccacttggctggtgcccaggacagggacagtcccagcccttccagccc

SEQ ID NO: 951165 - DNA, 120 bp, Artificial Sequence
  ENSG00000232530_5 (sequence is synthesized)
atctccccacatcagtacactccggagagccagccaagagtagattctttattcatttctcttttttttcttaaaaaaaaaagtattcatttggtataaaaaataaatattttaaatatg

SEQ ID NO: 951166 - DNA, 120 bp, Artificial Sequence
  ENSG00000232533_0 (sequence is synthesized)
gctgctcgtcttttacggcccttcaacgcccaccacgacccactcctcttggagaccccgggcgacggtggggctcttgggcattctgagactgcgcttggtggagaccccgggcgacgg

SEQ ID NO: 951167 - DNA, 120 bp, Artificial Sequence
  ENSG00000232533_1 (sequence is synthesized)
tggagctcttgggcattctgagactgcgcttggtggagccccctactggccagactggatttctcagcctgcgactcagccccaggctacacgaaagaagccagacctggcttttactgc

SEQ ID NO: 951168 - DNA, 120 bp, Artificial Sequence
  ENSG00000232533_2 (sequence is synthesized)
tccggctacactctactggcaaggagcacctgggccatgttttagagatcatccgaggactaaccccaaaagtttatgaagagaaagcagaggccgagctgaagagatggacccgggtca

SEQ ID NO: 951169 - DNA, 120 bp, Artificial Sequence
  ENSG00000232533_3 (sequence is synthesized)
cacccaggtaaaggcaggatctaaactgaaactggtgtcagatctggttgccttgcacccctgatatcaggtgaagcaacactgggcaggatagagcagagtgaggtcagagtgtgaaga

SEQ ID NO: 951170 - DNA, 120 bp, Artificial Sequence
  ENSG00000232533_4 (sequence is synthesized)
tccagcctgatgcccaaactgacgcctcttcattctcccctgctccatctgtaaacgtcacggttaatccatctactttattgcattatatagagaaataaatgaaatgtcatagctgta

SEQ ID NO: 951171 - DNA, 120 bp, Artificial Sequence
  ENSG00000232539_0 (sequence is synthesized)
cacggtgtggcctcagcatcagggatatttgcaacatccatatggcttccagaacaagagagcagggaggtcggcatctacgattaataagacatagagaagtcattcaccagaagtcct

SEQ ID NO: 951172 - DNA, 120 bp, Artificial Sequence
  ENSG00000232539_1 (sequence is synthesized)
cttagaaaaagcagtgcttttgactggaaaagaatgatgagttgcaaaagtatgatagaggaaactgaggtactgacaggtcagagcgcctccgagagaaaaaggcggtggccttggagc

SEQ ID NO: 951173 - DNA, 120 bp, Artificial Sequence
  ENSG00000232539_2 (sequence is synthesized)
tctggtctccttaactgcaccctgggaagtcttcacacggcctttcttcccctggtggtctaatctggagtcagatccagccgtcagctcttacagacggggaaggaccgggagccaacg

SEQ ID NO: 951174 - DNA, 120 bp, Artificial Sequence
  ENSG00000232539_3 (sequence is synthesized)
ctcctttctgaaaacctagaatgaaaaagtttagcagctcagcgccgcggcctctctccattctctccccaaacacatcggcctgtttgttctctttcatccccgctcttcctgttgcat

SEQ ID NO: 951175 - DNA, 120 bp, Artificial Sequence
  ENSG00000232539_4 (sequence is synthesized)
tctgccggttcaatggggaaggagtgaaaccggatggctggacccagtgcggggaaatgacttcagagccacctttgtttccctcattcctttgagcgcacttggccctgcgtctctatg

SEQ ID NO: 951176 - DNA, 120 bp, Artificial Sequence
  ENSG00000232539_5 (sequence is synthesized)
aaagggcttgtttgaaccattcggaacatccagcaagccagagatgctgcggccagaaccgctcgcatcttttcaggctgcctgagactctgggttaaactgccaaatttttgcaacaaa

SEQ ID NO: 951177 - DNA, 120 bp, Artificial Sequence
  ENSG00000248100_0 (sequence is synthesized)
gcaatctctctcccccactgcaaagccctgtagcaatgatcctttgttccatgctttaacaagtatcattgaataatgttttctttaacttaagttcagagttatcaaatgagttatgtt

SEQ ID NO: 951178 - DNA, 120 bp, Artificial Sequence
  ENSG00000248100_1 (sequence is synthesized)
ccgagttgtcagatggtcttgaaccagagaaaaagagaagagctttttctccctgagaaacatcgatttggaatcacaactagaattccacctctggtacataacaacgtgagtcacaat

SEQ ID NO: 951179 - DNA, 120 bp, Artificial Sequence
  ENSG00000248100_2 (sequence is synthesized)
gaaaagtcatagttggagattcctcatccggactgtagaaaaggtcatgtccctaactccagaatgccaatgataaaggcacacgtacaggcatgttagaaagatggagaagtcagagga

SEQ ID NO: 951180 - DNA, 120 bp, Artificial Sequence
  ENSG00000248100_3 (sequence is synthesized)
agatgtgcacaaagttaaatcgctctgccctttctactatcagatcatcaccaaacactcgtgggatcacactgagaaggatcatccaagtcaagagctgcagaagaaatggtgcacata

SEQ ID NO: 951181 - DNA, 120 bp, Artificial Sequence
  ENSG00000248100_4 (sequence is synthesized)
ttcaagagtctcacctttagcctttcctctacagcagaatcactatgctacattaatttccttctcatctgatgacttcttgagagctttttagtttctgcatctcctatttctagccaa

SEQ ID NO: 951182 - DNA, 120 bp, Artificial Sequence
  ENSG00000248100_5 (sequence is synthesized)
tgcaataaaccagctggcagattatccccttcacatccaatgaccaaatcatcacatctctccaagaggttcagaggtgggtgtttttatacagaacctgtcaccatggcagcttgactc

SEQ ID NO: 951183 - DNA, 120 bp, Artificial Sequence
  ENSG00000248100_6 (sequence is synthesized)
tcttcagtttctgaattaggaacagtgacctacttatatttctactacacccataatggaaacaggttagtaatatcttccaggacttgacattacggagcttccaggtggcaatgcaga

SEQ ID NO: 951184 - DNA, 120 bp, Artificial Sequence
  ENSG00000248100_7 (sequence is synthesized)
taaaggcaaagaatacacagagtccagggggctcactgggaagcgaagtccatggtctgaacacacacccccgatcacctttgctctatgccacgacgaagtcatcaggcttccccacct

SEQ ID NO: 951185 - DNA, 120 bp, Artificial Sequence
  ENSG00000248100_8 (sequence is synthesized)
ccagtccccaaaatacactcaaactactcagatgatggaggagcacaacccattgcctccttcacttactagaaggcagaaaatgcagaagaaaaaccatgttgccttttacagatatga

SEQ ID NO: 951186 - DNA, 120 bp, Artificial Sequence
  ENSG00000248100_9 (sequence is synthesized)
cttaatctgcagttgggaaagagattaggtataactttggctttgtctactcatcccacttatacaacaaaccatgccagttttagacatttgttcagtgcaactggctttcggaaatgc

SEQ ID NO: 951187 - DNA, 120 bp, Artificial Sequence
  ENSG00000248100_10 (sequence is synthesized)
aaagctataacctcctatatttgccttccatccccagggccccctggaaggttctaagtctgagtttgtgtgcctcactcacttgcttgccttttgttacggcgacccattcaactgcat

SEQ ID NO: 951188 - DNA, 120 bp, Artificial Sequence
  ENSG00000248100_11 (sequence is synthesized)
ttatatacacataggatgaatattctgaacgtgcagtaattcatgcttggggaaaattattcaattatgggtcagtcatttcacaaatatagaggctaagccctgttacaccgtaatcag

SEQ ID NO: 951189 - DNA, 120 bp, Artificial Sequence
  ENSG00000248100_12 (sequence is synthesized)
gtgtacatattatccaaggatctcataaacttccaagaggctggagatctgtttatttaatagttcacaaagcagttataatctcttccctcagttttgctaagggatccagactttcta

SEQ ID NO: 951190 - DNA, 120 bp, Artificial Sequence
  ENSG00000248100_13 (sequence is synthesized)
actttccatataaagggacttgccatatgccgggcatttggcgctacccacttgtttctttctcaaagggttagattctttgggacagtatagtagacactatattgctccacccagacg

SEQ ID NO: 951191 - DNA, 120 bp, Artificial Sequence
  ENSG00000248100_14 (sequence is synthesized)
tcctttttagggccaatacacccatccccagctgctgatggttcacaaggaaggtcctcagccagctgcaggacacagcctcacccaaagtgatacccccagaaggggtggccagttgcc

SEQ ID NO: 951192 - DNA, 120 bp, Artificial Sequence
  ENSG00000248100_15 (sequence is synthesized)
aggaattagctgatgtaggcaaacaaaagtccagccccttgctcaaatggggacagctctgaagaaccatccagcgctccccatagaagtggctggggtctcagacgcaaccacatttgc

SEQ ID NO: 951193 - DNA, 120 bp, Artificial Sequence
  ENSG00000248100_16 (sequence is synthesized)
cagtcagcttctcctctgcccaatcttgccttgttccttccttacaggtgtctcctgagagctcacccccaaaatccttcagcaccccactcctggtctcagagtctgcttctagggaac

SEQ ID NO: 951194 - DNA, 120 bp, Artificial Sequence
  ENSG00000248100_17 (sequence is synthesized)
ctaatttaagaccagcagcagttttctaagataactaatgcagagcattatttttctaattgtacgaggaagtcacaggctccttcagaggccctacaaaggctgataaccgtctttgaa

SEQ ID NO: 951195 - DNA, 120 bp, Artificial Sequence
  ENSG00000248100_18 (sequence is synthesized)
aaatactcgtcatacagccactcagtttaaaaactacacatttttgatattcagctcagatcactttctgaacaccaacccagtcaacagggacaggagttaatgcacaggaatacagca

SEQ ID NO: 951196 - DNA, 120 bp, Artificial Sequence
  ENSG00000248100_19 (sequence is synthesized)
agttcacaagtaaaggcggcgagacctagcaaaggtagtgatttgcttgtcccaacatcatgtggcattgaaaactgccaccagagcaaaggaggccacatctggggttcccaaccttaa

SEQ ID NO: 951197 - DNA, 120 bp, Artificial Sequence
  ENSG00000248100_20 (sequence is synthesized)
ccatcagagtatggctgcccacaaaagacatatttactttataacctcaaatcctagcaaatcttcattctaaagctacccggcaagaacagttccacctaagtatgaaactgagtcctg

SEQ ID NO: 951198 - DNA, 60 bp, Artificial Sequence
  ENSG00000249094_0 (sequence is synthesized)
gaggaggtgcgccggttcatgggtcccggagggcccaagtgagccgctcccagaaacgga

SEQ ID NO: 951199 - DNA, 120 bp, Artificial Sequence
  ENSG00000249094_1 (sequence is synthesized)
acctcttgggctccaacgatcctcctgcctcagactcccaagtcgctgggactacagtcgtgcatcaccatgcctggataatttttaaattttttgttaagacagggtctcactatgttg

SEQ ID NO: 951200 - DNA, 80 bp, Artificial Sequence
  ENSG00000249094_2 (sequence is synthesized)
cgcctcagcctccccagcacccctctttggaccagcatgtaccctccccagtgccccccattactgacatttaccttgct

SEQ ID NO: 951201 - DNA, 120 bp, Artificial Sequence
  ENSG00000249094_3 (sequence is synthesized)
cagtgccccccattactgacatttaccttgctgggacccacctattggcttttggattgaattgttcaagaatagaagggcgaggaagagagaaaacagggcgggggagaggtgggaagg

SEQ ID NO: 951202 - DNA, 120 bp, Artificial Sequence
  ENSG00000249094_4 (sequence is synthesized)
aaaaggggaagagccacagaaaccttcagcaagttggctttggctatgggccatcagtttctccccttagcttcccgtagtgtcagggaaatactaccaggcacagaggagccacctcat

SEQ ID NO: 951203 - DNA, 120 bp, Artificial Sequence
  ENSG00000249094_5 (sequence is synthesized)
ctttttggattgttgggtcactgtacttctccatgagttgcaaaccctctctgcaattaatctgtaggaccagcttgaccaatggagttgtaatgtttggaatcaactcagtgtgggtga

SEQ ID NO: 951204 - DNA, 120 bp, Artificial Sequence
  ENSG00000249096_0 (sequence is synthesized)
acaatcatgcttgccagtgtttacagccaatcagtaggaagtggcttctgcctccattctgacttccaaatctcttgcaaatgcatataattggttgaacctaattcacagttagaaccc

SEQ ID NO: 951205 - DNA, 120 bp, Artificial Sequence
  ENSG00000249096_1 (sequence is synthesized)
cagctgcaagtgagactggaaaaatggctctcagagttcccgcctctgcagtagaggaagacactccagaaggagttgagaatgggtgctgagtgcctcttcaggatgtctgtcacacct

SEQ ID NO: 951206 - DNA, 120 bp, Artificial Sequence
  ENSG00000249096_2 (sequence is synthesized)
caggaaacctgccaggaataccaaagggagtgaaaaatccaaggttgggaagccctgggacattgaagttacaactggacgataaaaacagagttttttccttgtgacgtgaccactgtg

SEQ ID NO: 951207 - DNA, 120 bp, Artificial Sequence
  ENSG00000249096_3 (sequence is synthesized)
atgtaaagctgtatctccttcatttcatcaagaaattcttaaaattctcccccaacgtgctttcatctttcccttcattgccaactctgaatacttgtcattgaaattagggcccacctg

SEQ ID NO: 951208 - DNA, 120 bp, Artificial Sequence
  ENSG00000249096_4 (sequence is synthesized)
gataatccatgatgatctcatctcaagatccttaacttaatgacatctgcagagactggtttatcaaataagggactgtggctatatcgctgacctcaagaaaacctgcggacaaaatct

SEQ ID NO: 951209 - DNA, 86 bp, Artificial Sequence
  ENSG00000249096_5 (sequence is synthesized)
agacgggtatttaacacaaacagatgcaaaagatacggggtttcaccgtgttgaccagactgattttgaacttctgggctcaatca

SEQ ID NO: 951210 - DNA, 120 bp, Artificial Sequence
  ENSG00000249096_6 (sequence is synthesized)
ttcactctccaattgagcagccattatatatcaggcactataggagttcctggaggatactggtctgaagttagcatgatcttgactcaagaaacttatagtcctgataagaacttccac

SEQ ID NO: 951211 - DNA, 120 bp, Artificial Sequence
  ENSG00000249096_7 (sequence is synthesized)
cagaattccagataaggcagcacaggccttgctgtttgcccatgcccatgcggtcagctctcttgggtaccgtggcatgcagatgcagacactcacccaagacaccctgtagtgctgatt

SEQ ID NO: 951212 - DNA, 120 bp, Artificial Sequence
  ENSG00000249096_8 (sequence is synthesized)
actggctgaagacactgaatatctgatatagtttggatgtttgacccctccaaatctcatgttgaaactagattcccagtgttggaggtggggcccggtgggaggtgtttggattgtggg

SEQ ID NO: 951213 - DNA, 120 bp, Artificial Sequence
  ENSG00000249096_9 (sequence is synthesized)
attggatcccttatggccatcttggtgccatccttgtggtaatgagcaagttctttatctactagttcctgagcgatctggttgctaaaaagagtctagcagcatcatccgctccctctc

SEQ ID NO: 951214 - DNA, 120 bp, Artificial Sequence
  ENSG00000249096_10 (sequence is synthesized)
tctcctcctctcttaccatgtgatatgcacacaccggctacccttcacctactgctccagcaccacgcttcatgtacagcctgtagaactctgagccaaataaacctcttttctttataa

SEQ ID NO: 951215 - DNA, 120 bp, Artificial Sequence
  ENSG00000249096_11 (sequence is synthesized)
ctcattcacacctgggtggaaacaaagttaaacagatttctctacggcagcaggactcagagcttttttgaattgtctgacgggcagattgctgggaattctttttctatggtcaagtaa

SEQ ID NO: 951216 - DNA, 120 bp, Artificial Sequence
  ENSG00000249096_12 (sequence is synthesized)
agattacaaggctagaattccagcgaagctattttggcaaatactgacctacatgattgaaggggtccagaatatgccaccccaaaatatgccactttgacatacggcttattttgggct

SEQ ID NO: 951217 - DNA, 120 bp, Artificial Sequence
  ENSG00000249096_13 (sequence is synthesized)
gcaagcgattgaaaatgagcagatgcaggatgaatcctctgctctctttttctacctgaaaccagggcgtaacattccctttgtggaaggtgttcctcgactcccatagcaggaagtgta

SEQ ID NO: 951218 - DNA, 120 bp, Artificial Sequence
  ENSG00000249096_14 (sequence is synthesized)
gagcaactcttaccatcaaagatggacagtcagcattgagatgagtctgcataaacaaacttttttttttaaagtttgttccattaatctcccccatgtatttgctagtcactttcccac

SEQ ID NO: 951219 - DNA, 120 bp, Artificial Sequence
  ENSG00000249096_15 (sequence is synthesized)
aatttatcatccctttcctttgttaaaatgatatatacgtccctgagcctaatcactttgcatttcactacttttctgtgaactcctatgcacgtaaaaatataaatacatttgtattcc

SEQ ID NO: 951220 - DNA, 120 bp, Artificial Sequence
  ENSG00000249096_16 (sequence is synthesized)
ctctctctctctctctctctttctctgtctcttcctttcttttcctcccgtttttctttctttttttttggcgggggacagagtttcattcttgttgctcaggctggagttcaatggcac

SEQ ID NO: 951221 - DNA, 120 bp, Artificial Sequence
  ENSG00000249096_17 (sequence is synthesized)
ggcccctcccttctttgtttctaatctctcttccttccttcttttctttctttctcccactgaaatgctgctattaaattgatagagtatcttataattgatggtatcttggaattgggg

SEQ ID NO: 951222 - DNA, 120 bp, Artificial Sequence
  ENSG00000249096_18 (sequence is synthesized)
aaatagagtgtttgtcaggctgcttgacttagcagctgagggttgaagggatggagataatttcaaatcagcgagattactggatttctttttaaaaggtgctggtgagatagaatcacc

SEQ ID NO: 951223 - DNA, 120 bp, Artificial Sequence
  ENSG00000249096_19 (sequence is synthesized)
ataacagagtcaagcgcagataaaaaagatcagcaaaggccagattccctcaacttattttgaatggatggagaaatggtgaatcttcggtttgtgagtatgaccagtgggtcatatggg

SEQ ID NO: 951224 - DNA, 120 bp, Artificial Sequence
  ENSG00000249096_20 (sequence is synthesized)
cagaaaagcaagcggcagtctcaaaagcagagggcatttagaatccaaggttcaagctggaagagatcttggtcacctccttgttgaatgccttaattgaatggatgaggaaaatgggct

SEQ ID NO: 951225 - DNA, 120 bp, Artificial Sequence
  ENSG00000249096_21 (sequence is synthesized)
catatggcagaaataatctgtagagctaggacaggatcctaggtgtccagccccctgttctatggattttcatttggagaagtcagtcatgtacctgcctcagggcctttgcacctcttt

SEQ ID NO: 951226 - DNA, 120 bp, Artificial Sequence
  ENSG00000249096_22 (sequence is synthesized)
tttgcccagatcattcttcccctaaatagccacatggctttcttcctcatctccttcaagtttttgcttaaatttcagtttgtcagtgaggtcttctctgaccatttagaccagaatatg

SEQ ID NO: 951227 - DNA, 120 bp, Artificial Sequence
  ENSG00000249096_23 (sequence is synthesized)
ccatcttaaaatatgagtatggaagacaagaatatgccaccccaaaatatgcttcttgggcataaggattattttgagctgattattttgagaaactgcagacacaggagttctaatctg

SEQ ID NO: 951228 - DNA, 120 bp, Artificial Sequence
  ENSG00000249096_24 (sequence is synthesized)
aaaacagatccctgtgcaggggaaatctatacctatcacggaagtctctgcttgtaagagtgtctccctctcagtatcagggcaagaaggatgcgtggaagtcactggagacttttgtca

SEQ ID NO: 951229 - DNA, 120 bp, Artificial Sequence
  ENSG00000249096_25 (sequence is synthesized)
atgaagcaggtgctgacttaattctccaaaacaaaccttacccttgtctaccctgagtttcctgttgacttccccacagcactccaaccagcaatgaaggagatctgaggtctcggcatc

SEQ ID NO: 951230 - DNA, 120 bp, Artificial Sequence
  ENSG00000249096_26 (sequence is synthesized)
gaatctgattctcctccaagaagcaatgcttctctgaggctttcacctttgctcacatcaaagcccccacactgaataaataccatccttacatgcccttccagagactccactaatgga

SEQ ID NO: 951231 - DNA, 120 bp, Artificial Sequence
  ENSG00000249096_27 (sequence is synthesized)
cgagcttcatccagcaaaagataactggggaaacttcagcaaaaggactgttgatgaaaatttgctgtatttgattatatagctaagactaaaacagggaacatggttggaattatacta

SEQ ID NO: 951232 - DNA, 120 bp, Artificial Sequence
  ENSG00000249096_28 (sequence is synthesized)
agtaaatatgatatgttctcacaaagtagaaagaatgcaactaactaatatagaagaagagggaaagtaaaatagtattgtttacaattttataggtattgggtgtgagttaaattatac

SEQ ID NO: 951233 - DNA, 120 bp, Artificial Sequence
  ENSG00000249096_29 (sequence is synthesized)
gagcccatggcattcaaatttctgtgcccttctctcctctccttggttctctcccatgttttgtcaaacttcccacacccagctccttaaccaaagggactggctaggtcaggcagaggt

SEQ ID NO: 951234 - DNA, 120 bp, Artificial Sequence
  ENSG00000249096_30 (sequence is synthesized)
tgagtcaagagtgctcaggtgtcccaggatgactgtcaagagtggtggcagctctcctatgtctcagccccccaggagcacctcagccctgcaacggcatcaaactgggtggcacacact

SEQ ID NO: 951235 - DNA, 120 bp, Artificial Sequence
  ENSG00000249096_31 (sequence is synthesized)
cggagttgtaaggacagaaagggaagaggaatacacacatttttagctgacggacttggccccagctttgcaggctaactgaaactcccaaggccttgagatttttgaaaactgccatat

SEQ ID NO: 951236 - DNA, 120 bp, Artificial Sequence
  ENSG00000249096_32 (sequence is synthesized)
ttcctctagttgaagactcattttatattttttcacatgttaacatttatgaaattgggatgtgtaatgtacgccctgtcaaaaaattttccagcagccatttagaggagtgacacgtcc

SEQ ID NO: 951237 - DNA, 120 bp, Artificial Sequence
  ENSG00000249096_33 (sequence is synthesized)
acgtggcctacctggcctgtggccacacctccttagccagcttcgtggaagtatctgttcatccattttgtcactttgttttgttattttcattggtggcacagcacactgttaacttag

SEQ ID NO: 951238 - DNA, 120 bp, Artificial Sequence
  ENSG00000249096_34 (sequence is synthesized)
attcatgtccctaattgccactgaaagtgtctttcacaaagataactctgctttacagcattggagcaaaagtcaccatgcgtgcaaaagattgcctggcacatgccaggcattaggcat

SEQ ID NO: 951239 - DNA, 120 bp, Artificial Sequence
  ENSG00000249096_35 (sequence is synthesized)
cgcccccactgcacagagtaaatgacacacttttcaaagcaaggggaaattggtatgactacttcatgcaccattaaaaaaaaaaactattattcaggctccaaaatctttaaaagcttc

SEQ ID NO: 951240 - DNA, 120 bp, Artificial Sequence
  ENSG00000249096_36 (sequence is synthesized)
tagtgattttcaaaagaagctgcttaatgtttatctttaaaataaggaaaaacagaattataagtttggccaaagaggaaatgccaataaaccactaggattctctatgatgccctcaaa

SEQ ID NO: 951241 - DNA, 120 bp, Artificial Sequence
  ENSG00000249091_0 (sequence is synthesized)
caggctcacccctcacattctattcaactgcacaggatagaatgatacatccctctctcacaagagctccctggaaactgcagaggaatcaccatcttcagcaagctttatcaagaatgc

SEQ ID NO: 951242 - DNA, 120 bp, Artificial Sequence
  ENSG00000249091_1 (sequence is synthesized)
tctgtcacagaggctttaaaggagaggctggagagttctcattttcagcaccatctcagctgtcggtatttcccaaacctgcactgatgtctgagaatccacatcaaaacttttgcattt

SEQ ID NO: 951243 - DNA, 120 bp, Artificial Sequence
  ENSG00000249091_2 (sequence is synthesized)
gtcctcaaagaatgtcacaactattattctgaaatgctcattgcatctatttctagggatggtaatgatgactctgtacggactaagataggattaataacaatgcagagttgaactcaa

SEQ ID NO: 951244 - DNA, 120 bp, Artificial Sequence
  ENSG00000249099_0 (sequence is synthesized)
aaactggaggttaagatggccacttggacacctggggctcctcctacctttaagttaacaggctaagaagggagttgcagtgttggctggggtgattgaccaggactatcaagatgaaat

SEQ ID NO: 951245 - DNA, 120 bp, Artificial Sequence
  ENSG00000249099_1 (sequence is synthesized)
cagtctactactccacaactgagccacagggccaagcacgcaactcgccatttgcttcaggagatccagatgttcaccttatttggatgtgtaccaggaattggattgcatagagacaga

SEQ ID NO: 951246 - DNA, 120 bp, Artificial Sequence
  ENSG00000249099_2 (sequence is synthesized)
gaaaggttgaaaatacacaaagtcatctcatcacatgaagaagatcacattagatttagacgacgctagagactgaaaagtgaagacagaagactgaggacgattatgaagaggagtcat

SEQ ID NO: 951247 - DNA, 120 bp, Artificial Sequence
  ENSG00000249099_3 (sequence is synthesized)
gaagaaataagagaataaagacacactggagtagggttgaacactcaaggctccaggggaccatgccctcatgattttgcttggcacagcccaatctgcagctcttggaagttggagtca

SEQ ID NO: 951248 - DNA, 120 bp, Artificial Sequence
  ENSG00000285532_0 (sequence is synthesized)
ggcagacgaggagcaacccccaaaccccgagccccaggccaccgagcgcaggaactggggaggaggagcggttttcgcccctgggggcgtttagtcagaaatgttaggagaaggtgcctg

SEQ ID NO: 951249 - DNA, 120 bp, Artificial Sequence
  ENSG00000285532_1 (sequence is synthesized)
agggaggggccgccagtcgcagcggagactccccgtcccctctcacctcagggcttcggcgttggggtccggcctacaatctcttcttctgcccaagcgaaatccaggggagtgacactg

SEQ ID NO: 951250 - DNA, 120 bp, Artificial Sequence
  ENSG00000285532_2 (sequence is synthesized)
gaggcgtctgcacccacaggggtccagagaggtggggtcctgctgtgtctgcaaaagaaatgaattgctgctgtgggaagaataacaactgtttttagaaaatgttcatagctgaccgat

SEQ ID NO: 951251 - DNA, 120 bp, Artificial Sequence
  ENSG00000285532_3 (sequence is synthesized)
aagcaatgagcactgaaggatgctaaaggaagatggcttgccacctccaaggctcttaaaccagatgtgctgtgggttctgaaagcagtgcccaacaaagagctccagaaacgttttgag

SEQ ID NO: 951252 - DNA, 120 bp, Artificial Sequence
  ENSG00000285532_4 (sequence is synthesized)
caatggcagcaatggaagcacctacacaataagtgacagccttccaagatgacttgatagatgagaacacactaaaatgtttgtgtaagttctggtgtagttgttaacatgcagacatta

SEQ ID NO: 951253 - DNA, 120 bp, Artificial Sequence
  ENSG00000285532_5 (sequence is synthesized)
gttagaccttggttataccgtttcagccctccagctgagagttagggacaaaattattcctaacatattgtacttcaaaaaatggtacatcctttaggtgcatcttgcagatttcacaca

SEQ ID NO: 951254 - DNA, 120 bp, Artificial Sequence
  ENSG00000285532_6 (sequence is synthesized)
ttcacacaaaatgttttaatatttaggatctagatattgttttgaatgatttcaagcattatccaagaaagatgaaaactataactgagataaacatattgagtatgtttttatattttt

SEQ ID NO: 951255 - DNA, 120 bp, Artificial Sequence
  ENSG00000285530_0 (sequence is synthesized)
tcattcctctttactagtctatgaattggcccagtggagctacaaagaaattctcctaaagcgcctatcacaatgcctgggcacctggaaggcgctcaataaaacgctagctgggcctcg

SEQ ID NO: 951256 - DNA, 120 bp, Artificial Sequence
  ENSG00000285530_1 (sequence is synthesized)
gggtacagatggagcaggacggctgagtcgctgcagaagcgcttccaggttctcagcatacggactgcagccatcttaccccggaaatgacaacagtgccgcaaactggagagactctcc

SEQ ID NO: 951257 - DNA, 120 bp, Artificial Sequence
  ENSG00000285530_2 (sequence is synthesized)
tcggcgcggcctatcaggagatgggaaacgcgcctccccctgggcgaccaatagggagggaagaaacgagcctcccacccaacagccaaccaaggagtagggcggagcctgagctaaacc

SEQ ID NO: 951258 - DNA, 120 bp, Artificial Sequence
  ENSG00000285530_3 (sequence is synthesized)
ctaggatctgggacccagcggggagtgaaaagagcctgggggacggaggcggggcagagggcagcccaaatttaacactgctgtgtaaatacagatgcaccaaagataatctttttagtg

SEQ ID NO: 951259 - DNA, 120 bp, Artificial Sequence
  ENSG00000285530_4 (sequence is synthesized)
tatgtgatggggaaaatagagagtgttaaggaaacacaaagaaaggtacttacctcaagaaagttatgttgcagtaggacctgagcgatgagttggaaaacatttccccgtcttcatctt

SEQ ID NO: 951260 - DNA, 120 bp, Artificial Sequence
  ENSG00000285530_5 (sequence is synthesized)
gtagtgtagccgccccaaatacagaaaatagaatatttctatacgttgtagcaaggctctggacaactagttgtttcacaagtccatacagcagtacttcccaatgactgccttttttac

SEQ ID NO: 951261 - DNA, 120 bp, Artificial Sequence
  ENSG00000285530_6 (sequence is synthesized)
tcccatttatgtttttgattaccaaaattggctaatcaatttttttcatgaaagatgaacattacctaatgtctaaaataaacatgttatcatctttctttttacagactgctatcagat

SEQ ID NO: 951262 - DNA, 120 bp, Artificial Sequence
  ENSG00000285530_7 (sequence is synthesized)
gcagctaactagcatatgcaatacatgtcacagacacatgatcttgatttagttgtctcttaaagaaatgtcaaattcaggtcaagtggaactggtaaagaacagatcagagctttcttt

SEQ ID NO: 951263 - DNA, 120 bp, Artificial Sequence
  ENSG00000285530_8 (sequence is synthesized)
taaaaggcaatcttcctcagagcaactaggaaaccaattcctggaaatgtccaggatgacattagtctgttattgcttcttacgtgggaatgaaaatctgcacagatgtctaaggaatta

SEQ ID NO: 951264 - DNA, 120 bp, Artificial Sequence
  ENSG00000285530_9 (sequence is synthesized)
cagagaaaaaaaactggaacaaatacattttaaatgctcaacattgaagattagtggttatgaaacaaaatctcaggtatttcacaacttcattgtttaatatgacccaaacacttttcc

SEQ ID NO: 951265 - DNA, 120 bp, Artificial Sequence
  ENSG00000285530_10 (sequence is synthesized)
ccctcatttgccattttatgtattacacatctacacacaaaaaatcaatgcaaacaataaatcttattatcttttttgtttgtttgtttgtttggtagagatagggtctcttgggccagg

SEQ ID NO: 951266 - DNA, 120 bp, Artificial Sequence
  ENSG00000285530_11 (sequence is synthesized)
actttgggaggctgaggcaggcaaatggcttgagctcagaagttcaagatgggatctctctatgttgcccaggctggtctcaaagtcctggtctcaaactgcgatcttcccatttcagcc

SEQ ID NO: 951267 - DNA, 120 bp, Artificial Sequence
  ENSG00000285530_12 (sequence is synthesized)
ctcaaactgcgatcttcccatttcagcctcccaaagtcctaggattacaggcatgagccactgggtccggcctaaatagctatctttctcagaaaatctagagtagtcaaaagaatttca

SEQ ID NO: 951268 - DNA, 120 bp, Artificial Sequence
  ENSG00000285530_13 (sequence is synthesized)
agtttttacatttccttaaaaatgtttatagacattattaatatatttgataatcccacaagcatgtgtttgtataaaaagcagtggcagttgtacctttgaagtgaatcatctcccttc

SEQ ID NO: 951269 - DNA, 120 bp, Artificial Sequence
  ENSG00000285530_14 (sequence is synthesized)
caagctgctgctatacaactttctttgtcctaatttcgtttttaactgtacctgctcctcagaagataactagtttattttcctttaccgtcttcttatgtcaatggattcttgcttcta

SEQ ID NO: 951270 - DNA, 120 bp, Artificial Sequence
  ENSG00000285530_15 (sequence is synthesized)
agttaattcttttattcgagtttgaaagaaacaaagaccccatttcttctctttttttagatttaaaaatggccagttatgacccaccaattccactcctggatagctacataagagaaa

SEQ ID NO: 951271 - DNA, 120 bp, Artificial Sequence
  ENSG00000285530_16 (sequence is synthesized)
tgacaacagtgttcacacaaagacttgaataggaataatcataacagcataacagccaaaatctagaaacagcccagatgtccattaacaggtgaataaacaaaatgtggtacatccata

SEQ ID NO: 951272 - DNA, 120 bp, Artificial Sequence
  ENSG00000285530_17 (sequence is synthesized)
ttctgaaatattattcatccttaaaaatgactgaattagcgataattgctatgacatggatgaatgtcaaaaaaatattatgctaagtaaaagaatacaagcacaaaagatcacatatta

SEQ ID NO: 951273 - DNA, 120 bp, Artificial Sequence
  ENSG00000285530_18 (sequence is synthesized)
tgttgatttatagagatgaaaaacagattagttttagttatattagttatataataagattatattagtattattaattaataaggttagcattagaaaacaaattcgcctggggctaga

SEQ ID NO: 951274 - DNA, 120 bp, Artificial Sequence
  ENSG00000285530_19 (sequence is synthesized)
agcattagaaaacaaattcgcctggggctagaggtggaaggggcagtgattgcagaggcaagagagattttttttgtggtgatgaaaattttctgttgccactttgtggcaatgattgca

SEQ ID NO: 951275 - DNA, 120 bp, Artificial Sequence
  ENSG00000285530_20 (sequence is synthesized)
taattctgtacatttactaaaaatctttgaattatacacttaagacaggtgaattttatggtatgtaaagtacaccataataaagctgttaaaactgtgttatatgagacaataatgaac

SEQ ID NO: 951276 - DNA, 74 bp, Artificial Sequence
  ENSG00000285530_21 (sequence is synthesized)
taaagctgttaaaactgtgttatatgagacaataatgaacatatgaataaaaacaaatacataagtaaggcggg

SEQ ID NO: 951277 - DNA, 120 bp, Artificial Sequence
  ENSG00000285530_22 (sequence is synthesized)
cactccagcctgggcaatagagcaagattccatctcaaaacaatacaaaacaaatacatatgtcacatgataatataacaaaaacccttgaacctatcactcaactttaagaaatagaac

SEQ ID NO: 951278 - DNA, 120 bp, Artificial Sequence
  ENSG00000285530_23 (sequence is synthesized)
cctatcactcaactttaagaaatagaacctatggaaaaacacattatgtaggttgtctaaaaataaaatacattttaaactaaaaaaaaaagaaatagaatctttcccgttagtgaagat

SEQ ID NO: 951279 - DNA, 120 bp, Artificial Sequence
  ENSG00000285530_24 (sequence is synthesized)
cactgtctgctccttcctttacctctccccttcataagcgttatcttgaattgtgtttttcattcctttgtttattttagaattgaccacatatacatatatggatggatgcctagtaac

SEQ ID NO: 951280 - DNA, 120 bp, Artificial Sequence
  ENSG00000285530_25 (sequence is synthesized)
atattatttacttttgcttgtttttgagtctcataaaaatggtattaaactgtatgtatctttctgcaactagtttttctgacatgatttatttatccattctctactgagtggatattt

SEQ ID NO: 951281 - DNA, 120 bp, Artificial Sequence
  ENSG00000285530_26 (sequence is synthesized)
gtgctatttctagttatttgctattaccgtcagtgctgttatgaacattcttgatcatttctcctggtgcatgttctagggtttctttagcacagcgcttctcagacattaatgagcatt

SEQ ID NO: 951282 - DNA, 120 bp, Artificial Sequence
  ENSG00000285530_27 (sequence is synthesized)
catagcaaccggggatcttgttaacaagcagattctaattcagtaaatgtgggtaaacctgccattctgcatttctaacaagctccaggtgatacaaatgctattggttagccaactaca

SEQ ID NO: 951283 - DNA, 120 bp, Artificial Sequence
  ENSG00000285530_28 (sequence is synthesized)
ctttgattagtaggcttaggataaatacctaaaagttgaattgttgaaacaggggttatgtttatcttcaagtttactctagataatacgagattgttttccaatgtgattgtacaaact

SEQ ID NO: 951284 - DNA, 120 bp, Artificial Sequence
  ENSG00000285530_29 (sequence is synthesized)
acatgcctagctgctgtatgtttattgtttctcatttgatattgtcagatttaaaattttcccccaatttagtaattataaaatgatgttataatcttaatttgaatttccctgattatt

SEQ ID NO: 951285 - DNA, 120 bp, Artificial Sequence
  ENSG00000276216_0 (sequence is synthesized)
atacttacctggaaggggagataccatgatcacgaaggtggtttttctcagggcgaagcttatccattgcgttccggatgtgctgacccctgcgatttccccaagtgtgggaaactcgag

SEQ ID NO: 951286 - DNA, 120 bp, Artificial Sequence
  ENSG00000276216_1 (sequence is synthesized)
cgtgttttgtggctgtgttctgtccggtcagttgtttccgttcgcaacggttagttttcctttgtgaggccatgtttggggacagcttagaactatccacttgctctcttgggaggcgaa

SEQ ID NO: 951287 - DNA, 120 bp, Artificial Sequence
  ENSG00000276210_0 (sequence is synthesized)
cgcccgctgggcatccgctccccgcgcggcacgtgcggcggcccctgcgcgcctggctcagccctggcgccgctccattccgccaggcgcgggcgggcaggagctctggaaaaaattatt

SEQ ID NO: 951288 - DNA, 120 bp, Artificial Sequence
  ENSG00000276210_1 (sequence is synthesized)
aggcgcgggcgggcaggagctctggaaaaaattattctaagagacaaattaaaagaataatctgtaataaggagacgtcaacattccatctcaggaaaaaactgaaaacatgtaatacat

SEQ ID NO: 951289 - DNA, 120 bp, Artificial Sequence
  ENSG00000276210_2 (sequence is synthesized)
acaaagtcctgagaagaaacctcgaagcacaggaagggtctcatgtatagtagcatgttgagaaaactgaagagccctgtaatcctgaggagggggcctaatccaaggagagagaggctc

SEQ ID NO: 951290 - DNA, 120 bp, Artificial Sequence
  ENSG00000276210_3 (sequence is synthesized)
cgggtcctgtggacacacacgggttgcctgcttcaccccatctaggagctgcttcctgaagccttcaggaggcaggaggctgaatttgtttctcaggacaatcttaatcacatccggaca

SEQ ID NO: 951291 - DNA, 120 bp, Artificial Sequence
  ENSG00000276210_4 (sequence is synthesized)
tgaataaagctatgttatgatttatgaatgcaatatggaataattgaatcgagctgattgacatatatatcacctcaaatcctcaaatttttatttttgtgtgtgtgacaaggacatttg

SEQ ID NO: 951292 - DNA, 120 bp, Artificial Sequence
  ENSG00000276210_5 (sequence is synthesized)
aaatttgttcttggatgtttgaaaatgaccaatacactatgtttaaggttacaaatagacatcaatttatgtaaactataggcaatgattgaaaggaatatggattactatatatgtttc

SEQ ID NO: 951293 - DNA, 120 bp, Artificial Sequence
  ENSG00000276210_6 (sequence is synthesized)
tttattataacattaaatataaaagaccacatatatgtataagtttgtgtatttacacatatgtctatagatgtaaattaatgtccctatagctatgtagtagctgatatcaacagatgt

SEQ ID NO: 951294 - DNA, 120 bp, Artificial Sequence
  ENSG00000276210_7 (sequence is synthesized)
ccctatagctatgtagtagctgatatcaacagatgttaacaaaactctaaaaagaacaagtgcaaattattaggaagaattatttcttgaaggtatgtattttaaaaaaataaccttaca

SEQ ID NO: 951295 - DNA, 120 bp, Artificial Sequence
  ENSG00000224228_0 (sequence is synthesized)
gcttggagaagaggaggaggctgaaaagaaggcaaagagtgaagatagagaaacaagatggaagtgggggagaaaaacagggatgagagaatgccatggtggtgctgagaaggaaaggag

SEQ ID NO: 951296 - DNA, 120 bp, Artificial Sequence
  ENSG00000224228_1 (sequence is synthesized)
agacttttctgcttgtaaagggcagaagatggcagaatccagtgacgcaggggcatctggctccagaaataataggtcacttggcacccacttcttcaaaacaactcgtagaggtaccac

SEQ ID NO: 951297 - DNA, 120 bp, Artificial Sequence
  ENSG00000224228_2 (sequence is synthesized)
cttggttgtcttggataaaatctggaataattatctgggttaccaggagagacccttgttcttttcgcttactttctccaaaacatatgaagcctctctctctgtgctgaaccacctgga

SEQ ID NO: 951298 - DNA, 120 bp, Artificial Sequence
  ENSG00000224228_3 (sequence is synthesized)
tatattttggagaagaaaaattttgaaaaccagtcagaattcaatcaactgcagttgggagaaagacagcgagtagcttgagagagatgagaaactatcaaaaagaagttcctgacatgg

SEQ ID NO: 951299 - DNA, 120 bp, Artificial Sequence
  ENSG00000224228_4 (sequence is synthesized)
caacagtgtatcatccaatgaatcaatcgcctcacccaacactgtaacacttcctggcctattgactcagagcatgaggaaaccaaagtgaccagggattaaaagctatctctggagaag

SEQ ID NO: 951300 - DNA, 120 bp, Artificial Sequence
  ENSG00000224228_5 (sequence is synthesized)
atgatgtcagcaagatggcagaatagaaaaatccaggtcctggttccaccacagaaacatgaagtaaacaacaaaggaatggcttaatagccttgtgagagctctagaaaccagtcaaga

SEQ ID NO: 951301 - DNA, 120 bp, Artificial Sequence
  ENSG00000270111_0 (sequence is synthesized)
agttcaggctgcaatgctgggtcccgccccttcttccggctgggttccactacctgcaaggctggaactgacagccactgtgcaaacaaaaaaaggcaacaagcatgctgggaccattct

SEQ ID NO: 951302 - DNA, 120 bp, Artificial Sequence
  ENSG00000270111_1 (sequence is synthesized)
gtctgctgtttgggtctcacttgtcctgacaactaaaaatcatcagtggaaagaagctagagtcatcctaacaagagtgatagtctttccccaagtgagaccaggctgtgctgtctgggg

SEQ ID NO: 951303 - DNA, 120 bp, Artificial Sequence
  ENSG00000270111_2 (sequence is synthesized)
aaaagcattgctggccttgtcgagatgcaccgacgactcagctcagctaaggacttaaccagtacaggacttgctgcagcggagcctgagctggatatggaaagcaaaagaagcaagatc

SEQ ID NO: 951304 - DNA, 89 bp, Artificial Sequence
  ENSG00000270111_3 (sequence is synthesized)
ttagaattattgatgtgagccactgcatgtggtcaattctgtcattcttgacaacaaggatgaagctgggagatactgtgctgagtaga

SEQ ID NO: 951305 - DNA, 120 bp, Artificial Sequence
  ENSG00000270111_4 (sequence is synthesized)
gacaacaaggatgaagctgggagatactgtgctgagtagaataaaccaagcacaaaaagacaagtgcctcatgagctcacttatatgtagaatctgtaacagtcgaactcatcagagagc

SEQ ID NO: 951306 - DNA, 120 bp, Artificial Sequence
  ENSG00000270111_5 (sequence is synthesized)
ggttaccagggactagcagtaggctggagggagaggtggggaggtgtcggtgaaataatataaaatttcagttagaaaaaataagatttaagagatctattgcacaacatggtgactata

SEQ ID NO: 951307 - DNA, 120 bp, Artificial Sequence
  ENSG00000270111_6 (sequence is synthesized)
gttattaacactgtattatattcttgaaaatcactaagattttaatattctcaccacaaaaaataagcatgtgaggtaatgcatatgttaatggctcaatttagccatttccaatgatta

SEQ ID NO: 951308 - DNA, 120 bp, Artificial Sequence
  ENSG00000270111_7 (sequence is synthesized)
aatatttgaaagcagttatataccataaatgtgtacctttttaattaaaaaaattattttctagcaggatgctctgaaattggaactgaatattacttaaaccttgaagtctgggaacag

SEQ ID NO: 951309 - DNA, 120 bp, Artificial Sequence
  ENSG00000270111_8 (sequence is synthesized)
ggacatagtgcttttccaaaactgccagaaaggtgtctcttaatgctctatggatagaagtggccacctgtcttacaggctgacgctggagcccagcaaaagttattttggtagaccctt

SEQ ID NO: 951310 - DNA, 120 bp, Artificial Sequence
  ENSG00000270111_9 (sequence is synthesized)
attgtttagcaatgcaaaaagagaacctacttactttctttgtattaactctggatactgataaactaaataaaaataccttggccagggatattaattattttgtttattcatataaaa

SEQ ID NO: 951311 - DNA, 120 bp, Artificial Sequence
  ENSG00000270111_10 (sequence is synthesized)
cccgctacctgttctcccttcctgcttttccatctccataaatggcagcacatctgtccatgggcttaagaaacaccaggaccttcttatagagtgtcttacagtatccttaaagactcc

SEQ ID NO: 951312 - DNA, 120 bp, Artificial Sequence
  ENSG00000270111_11 (sequence is synthesized)
aataaataaataaataaataaaagactccttctgcacccgttcaaaaccactcaataacctgacaattatttgcctactaattattttctgaattcgttgccctgtcttctttccgactt

SEQ ID NO: 951313 - DNA, 89 bp, Artificial Sequence
  ENSG00000270111_12 (sequence is synthesized)
caataacctgacaattatttgcctactaattattttctgaattcgttgccctgtcttctttccgacttcagctttctaaaatgaacccc

SEQ ID NO: 951314 - DNA, 82 bp, Artificial Sequence
  ENSG00000270111_13 (sequence is synthesized)
gagggaaactccatctcaaaacaaaacaaaaaacaaaatgaacccctccttccctcctatctgggtgactagtttccccagt

SEQ ID NO: 951315 - DNA, 120 bp, Artificial Sequence
  ENSG00000270111_14 (sequence is synthesized)
cccctccttccctcctatctgggtgactagtttccccagtggtctctttctctctctcttcttctggtcttggctcccatctgtatcctccacagagtaatggcagagcactaatgttaa

SEQ ID NO: 951316 - DNA, 120 bp, Artificial Sequence
  ENSG00000270111_15 (sequence is synthesized)
caacaaactctcattttctcacccaatccccttccatcgctcccactgactaaagacaatcaaaactgtttcacatgacattgacccggcctctgccctcctctccaccctcactttcct

SEQ ID NO: 951317 - DNA, 120 bp, Artificial Sequence
  ENSG00000270111_16 (sequence is synthesized)
tcatgctccaaagggatgcctgtgtctagtaattccacgctgcttgttgttgttgcacatgaaggatcttcccacttttgtgtctttgcctgtgcagtcactctttcctgtcattttctt

SEQ ID NO: 951318 - DNA, 120 bp, Artificial Sequence
  ENSG00000270111_17 (sequence is synthesized)
tcctaagtccttcctctgatttttttttttactcatcctattaaaccgcaagcagcctctcttccaggaggcctccaggacaccctaggtgagtttcctgtctctctgcttccatagcag

SEQ ID NO: 951319 - DNA, 120 bp, Artificial Sequence
  ENSG00000270111_18 (sequence is synthesized)
ctgttactaatcttcaccatagcacccaacaccctattcaatctgcgtttgggtctttgctgtactgtaaccattacaaagtcaggaacggatctttcccatctttgaatcttcagtgcc

SEQ ID NO: 951320 - DNA, 75 bp, Artificial Sequence
  ENSG00000270111_19 (sequence is synthesized)
tttgaggccagaagtttaagaccagcctgggcaacatggaaaaacccaccctctattaaaaacgtcaaaaattaa

SEQ ID NO: 951321 - DNA, 120 bp, Artificial Sequence
  ENSG00000270111_20 (sequence is synthesized)
atttgaggccagaagtttaagaccagcctgggcaacatggaaaaacccaccctctattaaaaacgtcaaaaattaactgggtgtagtggtgcgcacctgcaatcccagctactcaggagg

SEQ ID NO: 951322 - DNA, 120 bp, Artificial Sequence
  ENSG00000270111_21 (sequence is synthesized)
ttctctgaggagagaaggccaacattttaacaggattaaatattaggtaatataatttaaggttattgatatgatgctattacttctggtgtagttgtctgctaactatttttcagttaa

SEQ ID NO: 951323 - DNA, 120 bp, Artificial Sequence
  ENSG00000270111_22 (sequence is synthesized)
gacattttttatttaaaagttcttattagacatctcattttgaatcaaacttaaaagctaaaaagaagaatactgaaaagaaggcagtgtcaagttttcaaaagaagacactattgcctg

SEQ ID NO: 951324 - DNA, 120 bp, Artificial Sequence
  ENSG00000270111_23 (sequence is synthesized)
ctctttgcagaacagatttgagcagtttctggatattgttcctgtgggcacatgggggtaacatgctgcataggaacacagagccgtagaccacattgaatccaggaggaaacaatactc

SEQ ID NO: 951325 - DNA, 120 bp, Artificial Sequence
  ENSG00000270111_24 (sequence is synthesized)
ctgggtattaaggaaagagggaaaaataaaccccaagcctttaggttctgtgatctccagtgatgaacccactgcttgctagcctgagctcccagctctgggtggtgcgttccacactcc

SEQ ID NO: 951326 - DNA, 120 bp, Artificial Sequence
  ENSG00000270111_25 (sequence is synthesized)
tcagacgagtaagcgtgccccaccaaacacctcacttaccagaaggaaatgagttatgcagtagggaccactcttcattaaccaatatgagttaaagggttgtgtgttcagaagctattc

SEQ ID NO: 951327 - DNA, 120 bp, Artificial Sequence
  ENSG00000270111_26 (sequence is synthesized)
aatggctttccaaatggcacacatcttacttaacctttgcaaacagagggccagtcagattttgaatctgaggaggagttaaggttatccgttacagccacccatgagctttcttggaaa

SEQ ID NO: 951328 - DNA, 120 bp, Artificial Sequence
  ENSG00000270111_27 (sequence is synthesized)
atatattgctgtctgtgcagggaaggactgcatgactgggtatttaatgtgacaaccattcgtgctttgcaagggcaacacaaaaaggagatttttagaaggtttgctggtctctgatgg

SEQ ID NO: 951329 - DNA, 120 bp, Artificial Sequence
  ENSG00000270111_28 (sequence is synthesized)
tttcacaaatatcaagaatgacatttccattaaaaatggcccaaatgctttcattgcattttaagaacctcagacttcagaaagaagccaagatgtctctctgtcagttccagtcgacca

SEQ ID NO: 951330 - DNA, 120 bp, Artificial Sequence
  ENSG00000270111_29 (sequence is synthesized)
gcagtcactgtcaaaggcaatatctaaatggctacaagatgtgttctgattccatacatgtcaaaaggcaattccgaaatgtaacaccaaaaattttaataactttttttctgcctgaaa

SEQ ID NO: 951331 - DNA, 120 bp, Artificial Sequence
  ENSG00000270111_30 (sequence is synthesized)
atgaatatatacatttatattctcctgtgtattagtaaattgttgaatttttaggagtattaatactgtgttatctttaccagaaatagcaattactataatgggcatttgcatagcatg

SEQ ID NO: 951332 - DNA, 120 bp, Artificial Sequence
  ENSG00000270111_31 (sequence is synthesized)
tcatgtttaagagtgtacttcttcacgttctaatttgatctttataaagcgtttgtgaaatagaaaggagtccattatcttccatttattttacagattgggaaactgtagataagagaa

SEQ ID NO: 951333 - DNA, 120 bp, Artificial Sequence
  ENSG00000270111_32 (sequence is synthesized)
gttaaagttaagaatctgcactgaatttctgatccttgatgatagtctagttttgagagtcatggatgtctgggttggacaaaaacttggtccaactttgattttaaaaaatttgaaata

SEQ ID NO: 951334 - DNA, 120 bp, Artificial Sequence
  ENSG00000270111_33 (sequence is synthesized)
ttaaactctcatacatctattctgctatgagttagttaactaagaaagtcacaatttgacctctaggacctatgacaaggagaacaccatgtggttgatcaagagggccgagtgagctat

SEQ ID NO: 951335 - DNA, 120 bp, Artificial Sequence
  ENSG00000270111_34 (sequence is synthesized)
tttgtaacttaaatatttcatcgtagatattgctcatggataatgaacacaactagccgctgagagaaagaaggctcagtggtgtcctggtgcaaaagtcacagagggttctagagtttt

SEQ ID NO: 951336 - DNA, 120 bp, Artificial Sequence
  ENSG00000270111_35 (sequence is synthesized)
gtagtggggtcccagtgaccttggcactgtgcaaaagctgtggtcagagagatgactagagagcccagaagagaattcacaggtgagtggtattgtgaagcaatggcaagctgggatgtg

SEQ ID NO: 951337 - DNA, 120 bp, Artificial Sequence
  ENSG00000270111_36 (sequence is synthesized)
ggcttggttttgcaaagctctgcttctctcaatttcatgtacctaggaagcgcacttggatcttgttaaaatccagatttgaattcagcggatctgcagggaggcctaagcatctgcatt

SEQ ID NO: 951338 - DNA, 120 bp, Artificial Sequence
  ENSG00000270111_37 (sequence is synthesized)
ttttttttttttttttttggcagcctcctaggtaacactattgatgctggtccacagaccatctttgaatagcaagattataaagaaccacaccaggaacctagcttccctctaacccca

SEQ ID NO: 951339 - DNA, 120 bp, Artificial Sequence
  ENSG00000270111_38 (sequence is synthesized)
gttcagccacttctacttcttggcttacaagtcccaagagctagcttatgagatgggaatggagtaatctccattgttttattttaccagtcatttatcttctccccagagaaaatacta

SEQ ID NO: 951340 - DNA, 120 bp, Artificial Sequence
  ENSG00000270111_39 (sequence is synthesized)
cttagtgtctgctgctcgatgccattccaatccattgccgagaaagagaaatataactcgtagacacagagactgtgtatccacaaatgaaaacatgtttctaaaatccgaaaagagcag

SEQ ID NO: 951341 - DNA, 120 bp, Artificial Sequence
  ENSG00000270111_40 (sequence is synthesized)
tcaagatatacaggtatttctgagagataaagcttcatccctcatgcaaacaggtgaccaaaatatttcctttttttttttcagtcagaaaaacagtagaatagacctgtgcctttgcaa

SEQ ID NO: 951342 - DNA, 120 bp, Artificial Sequence
  ENSG00000270111_41 (sequence is synthesized)
gtaggagagcccctgcctctactatgctcccctcaaatccaactcctagttcaacacaggcttttactcaaaatggctctgtttacaagtggcaaagctgagtcacagtgaactctgtgg

SEQ ID NO: 951343 - DNA, 120 bp, Artificial Sequence
  ENSG00000270111_42 (sequence is synthesized)
ccacacgacgcatccatctatgcatgtggatattctaatgtattctgtaatgaagaagatcttgttttaagatcttctgagatgttcttccctcattaatatgtagagatttttattatt

SEQ ID NO: 951344 - DNA, 120 bp, Artificial Sequence
  ENSG00000270111_43 (sequence is synthesized)
cacagattgcatatttgcgaattcacctactcactgaaatttatttgtaaccctccaaacgaatactcactgttgctttttcagcagtttgcaaacaaatgcagaacaaccaaaaaatct

SEQ ID NO: 951345 - DNA, 120 bp, Artificial Sequence
  ENSG00000270111_44 (sequence is synthesized)
aaagttgcccatctgccttcccaggtgaggttgaataaggcacgaggctgtacctgcgtctcagttctcatactgtaaacaagtctccttctcgtggtctatttttcatggttttgtgcc

SEQ ID NO: 951346 - DNA, 120 bp, Artificial Sequence
  ENSG00000270111_45 (sequence is synthesized)
ttttgttagtgattttactgtttaaaatggcccccaagagtaacgttggaatcttatctagtgcctctaagtgcaagaaggctgtggtgtgccttttggagaaaaatctgtgtgttatat

SEQ ID NO: 951347 - DNA, 120 bp, Artificial Sequence
  ENSG00000270111_46 (sequence is synthesized)
aagctttcttcaggcatgagttttggtgctgtgggccatgagttcaatgttaatgcatcgatatgtatattaaacggctttaaacaagaacatatgcaaaacaaggtcacgtattgatta

SEQ ID NO: 951348 - DNA, 120 bp, Artificial Sequence
  ENSG00000270111_47 (sequence is synthesized)
gttgatgaaaacgttgtaatcagacactcatgggcagctagccctgtatttctcttagcagcaagcgttcagtatttgctaattcagtgtttgcagtgacttcatagaatataactactg

SEQ ID NO: 951349 - DNA, 120 bp, Artificial Sequence
  ENSG00000270111_48 (sequence is synthesized)
aaaagcgccatgaagactcacgtgcagcttcctgaggaatctgtgtttcaccctagaagcaatgggaggccactaagaagctagagtcatcctaacaagagtgatagtctttccccaagt

SEQ ID NO: 951350 - DNA, 120 bp, Artificial Sequence
  ENSG00000270111_49 (sequence is synthesized)
ggtctcacttgtcctgacaactaaaaatcatcagtggaaagaggttgcagcatttgaaaattatcaaaaagcagcagagacaagtttgggtggtttccaggggagaggcactgaaagtga

SEQ ID NO: 951351 - DNA, 66 bp, Artificial Sequence
  ENSG00000270111_50 (sequence is synthesized)
gaaaagaaaatgcttcactctagaattttgatgagaagaagctagagtcatcctaacaagagtgat

SEQ ID NO: 951352 - DNA, 120 bp, Artificial Sequence
  ENSG00000270110_0 (sequence is synthesized)
acacaagagatagcctgaccagacagggcttccatccagcagtgcccatgcctagatatacctggcgcaccgcacaacatcccagcccacacaaggccctgctacctccatccaacatac

SEQ ID NO: 951353 - DNA, 120 bp, Artificial Sequence
  ENSG00000270110_1 (sequence is synthesized)
tgctagactgaccctactgaatccacattcccacatattaccctgactcatatcacctagatcatgacagacaccagatgtggccttgaaccacacctctgaacctccaatctaccattc

SEQ ID NO: 951354 - DNA, 120 bp, Artificial Sequence
  ENSG00000270110_2 (sequence is synthesized)
tctcttgcctcctgactccaggcagggggctcacaagttagcagagcagggcctaacccaattacatagccatagactgctatgggttgtgtttctacagaagtcaaatgttgaagtcct

SEQ ID NO: 951355 - DNA, 120 bp, Artificial Sequence
  ENSG00000270110_3 (sequence is synthesized)
aacttccactatttcagaatatgactgtttttgagatagggcctttaaagaggtgattaatgctaaatgggatcacaagggtggtatctaatccaatataaatgctgtccttataagaaa

SEQ ID NO: 951356 - DNA, 120 bp, Artificial Sequence
  ENSG00000270110_4 (sequence is synthesized)
ggctgtctacaagcaaaggagagaggcctcagaaggagccaaccgtactgacacctggatctcaaccatctagcctccagaatggaacgtctatcctatgcctgcaccaccactgcattt

SEQ ID NO: 951357 - DNA, 120 bp, Artificial Sequence
  ENSG00000270110_5 (sequence is synthesized)
tggaagcacaaaacttgtctggttccatgcttcacaactgaagaagaattttgccttggaatgactcatacttcacctccctcatgcttgacttagatgcgttcagatgagattttgatt

SEQ ID NO: 951358 - DNA, 120 bp, Artificial Sequence
  ENSG00000270110_6 (sequence is synthesized)
ttgagttgatgctggaatgggttaagattacgggctgttaggaaggagtaagtttattttgcatgttagacggtaattaattgtgggaagccagagggcagaatgtcatggtctgaattg

SEQ ID NO: 951359 - DNA, 120 bp, Artificial Sequence
  ENSG00000270110_7 (sequence is synthesized)
agtcccctcaccaaatccatgtatgttgaaatcctaacccctagtacttcacaatgtcactgtattgaaatggtatctttgaaaggtaaaatgaggttgttatgaagggcccaatccaat

SEQ ID NO: 951360 - DNA, 120 bp, Artificial Sequence
  ENSG00000270110_8 (sequence is synthesized)
gtgaccagagtatctacaagccaagaaaagaggcctaaggagaaaccaaccaagtgactccttgatcttggaatttcagactccagaagtctgagaaaataaatatctgctgtgaagtta

SEQ ID NO: 951361 - DNA, 120 bp, Artificial Sequence
  ENSG00000224222_0 (sequence is synthesized)
accaaggggactctgcatgggcacatcccggccctcctccctgcatgttctccaagccaggtctttgaaacctccagtgatgggaatgacagaatctgggatgattttcttctgtttctt

SEQ ID NO: 951362 - DNA, 120 bp, Artificial Sequence
  ENSG00000224222_1 (sequence is synthesized)
atctaaaaaaacaacaaaaagctcagcatacacggactcacacaaaccttttgctagaggcagctctgtagacttaagacgctgtcatttttcagaagaacccagcttgctttggaacta

SEQ ID NO: 951363 - DNA, 120 bp, Artificial Sequence
  ENSG00000224222_2 (sequence is synthesized)
tgtctgtaaagacaatgctgcgatgaatacacctgtgcattcttttttagaacaagtgtaagaattcctatgtggtaagtctgtttaaagagaatttcagattcacgtgtagatgtgtta

SEQ ID NO: 951364 - DNA, 120 bp, Artificial Sequence
  ENSG00000224222_3 (sequence is synthesized)
agtttgagcgatgttgccaaactctcttgaacttataccctctgtaataatatattgggatatttgtttccttttgttcttgtcagttttcatactataaaacttaaacatgtttgacaa

SEQ ID NO: 951365 - DNA, 120 bp, Artificial Sequence
  ENSG00000224222_4 (sequence is synthesized)
aggctggtctcactgtcagcatgctcccccaacagcatcaagtttatttccaggcagcaggcgagcagggctgagaacttgtcccaggctacaagcctccctgctgacaacagaagcagg

SEQ ID NO: 951366 - DNA, 120 bp, Artificial Sequence
  ENSG00000224222_5 (sequence is synthesized)
gctttcaggttttatgcctctctgcctgccacagcttctgtgcttgtatctgcactccctgtttgaccccctccccagattctgtccaggaaacttcatgttcggtagaaattgttataa

SEQ ID NO: 951367 - DNA, 120 bp, Artificial Sequence
  ENSG00000224222_6 (sequence is synthesized)
agtgcccacagggctcttgctgctgctttctctacccctatattttgtgcggctctcagcatttgtctcagctccagaagaacccagcttgctttggaactacagtcagccctgcaaccc

SEQ ID NO: 951368 - DNA, 120 bp, Artificial Sequence
  ENSG00000224222_7 (sequence is synthesized)
agagcattgttgaaggccgtatagtaagaatggcaaagcttccctaccagcccaactgactgttttgtggtgcagaggccatctattatgtgagagagagcaataaatatatatatatat

SEQ ID NO: 951369 - DNA, 120 bp, Artificial Sequence
  ENSG00000224222_8 (sequence is synthesized)
tgtctgtaaagggtctggatgaaggaagggagcctccagcttgtcggctgtacttgcccagaatttagcctttgcaacatggagctgcggggatgggaaatgttgtccactagccttcca

SEQ ID NO: 951370 - DNA, 120 bp, Artificial Sequence
  ENSG00000224222_9 (sequence is synthesized)
gcggctctcagcatttgtctcagctccagggagaagagaaggaaaagcagatgagtgaacaagggcagatggtgctggagaattccatcaagtgggcatcaagaagggactggaggttaa

SEQ ID NO: 951371 - DNA, 120 bp, Artificial Sequence
  ENSG00000224222_10 (sequence is synthesized)
aacctttgggataaagaagaagaaaaaaagacaagctggtaaaaaatggcacctgggcactgtttgctgggcacaaacatggcactgtttcctaggagatgattcctccagttctttaag

SEQ ID NO: 951372 - DNA, 120 bp, Artificial Sequence
  ENSG00000270114_0 (sequence is synthesized)
cacacttatctacaaacagtcttcagagaggtgatcggatggaagatattaacatgattctggagtctgctaggagctgctctgactggtggctactgagataccagtgacgggaaggtg

SEQ ID NO: 951373 - DNA, 120 bp, Artificial Sequence
  ENSG00000270114_1 (sequence is synthesized)
ctacatcgttaacaacagtgcctttcaaaaatgatgaactataatctactgaaaacacaaggacaaaccctactgtgaagcagtggagactggagtcctgcatttgctgaactttctttt

SEQ ID NO: 951374 - DNA, 120 bp, Artificial Sequence
  ENSG00000270114_2 (sequence is synthesized)
ctgtcatcacagatggagaaaaggccaatgtctttccatgctgcctcaccagaaaaggactgagttggtacagaccttcattccagcttaatgtccatgacctcatcacactccaggccc

SEQ ID NO: 951375 - DNA, 120 bp, Artificial Sequence
  ENSG00000270114_3 (sequence is synthesized)
aggcttgagctacatgttctagaaagcccttaacttctctaggtctcaagtctaatctctgcatctgcgccaggttccctgagactactctaaagcttgatgattcactaggattcacag

SEQ ID NO: 951376 - DNA, 120 bp, Artificial Sequence
  ENSG00000270114_4 (sequence is synthesized)
gactcagaaaagcttacttttctgaattagatgtactgttctgatatattacagcaaaaggatatgagttcaaatcagaataaaataaaaggtacatggggcagagtccaggagaaacca

SEQ ID NO: 951377 - DNA, 120 bp, Artificial Sequence
  ENSG00000224220_0 (sequence is synthesized)
ggaagtctcaggaatgggtaagtgctcctgctcccacacagtctacagacctgggtgcaatggtgagaaagacctcagtaaagcaaaggaattacgaaagggagaggattcggaatcaca

SEQ ID NO: 951378 - DNA, 120 bp, Artificial Sequence
  ENSG00000224220_1 (sequence is synthesized)
gctttcttggttctccaggatgcagatggcattaacatgagactcctttacctccatgactgtggaggcagcagctgaggctgtggtgggagaagaatgacaagaactgagcgtgggcca

SEQ ID NO: 951379 - DNA, 120 bp, Artificial Sequence
  ENSG00000224220_2 (sequence is synthesized)
cgggctcttaccttcagcaacttcatcagctcttccagctggaccatcagctcccgcctgctctcctgcagggccgacatcctctgctccagttcatccttcctttgcctatccaagacg

SEQ ID NO: 951380 - DNA, 120 bp, Artificial Sequence
  ENSG00000270116_0 (sequence is synthesized)
cttctcaaagtgtacttttcaaatatgagttggtaactatagggcatttgagagtgatcattgtaattatagtaatcagaacttttcagtttagtcaagaatctggacaaaggaatcagt

SEQ ID NO: 951381 - DNA, 120 bp, Artificial Sequence
  ENSG00000270116_1 (sequence is synthesized)
catatctgtaccttctgcagttccaacagcttatgtaatgtacatgattaggctttgcccacttagtgttcagttcattcttgtgagactcgtggaaaattcagattcttcggtgggatg

SEQ ID NO: 951382 - DNA, 120 bp, Artificial Sequence
  ENSG00000270116_2 (sequence is synthesized)
ttgaatcgtttttgaattgctttggaaactcatgtatttttaaacttggtgtttacttgaactgttggtattcatttaagtatttacccatcacatgataactgccttccatcagatccc

SEQ ID NO: 951383 - DNA, 120 bp, Artificial Sequence
  ENSG00000270116_3 (sequence is synthesized)
aactgtgattggtagcagacagatagactttaactaactcttctcttgttgctttttttcccccctaaatttctggaagactagagatataaagcactgtatgtttctgtgagaatttca

SEQ ID NO: 951384 - DNA, 120 bp, Artificial Sequence
  ENSG00000235166_0 (sequence is synthesized)
ttatagtactaagagtcagcactaatttatgcaaactgaaaataaagtatttaagggaccagggactctcaggatggaatataaactgtgacgaataaatataactgtatggcaaatatg

SEQ ID NO: 951385 - DNA, 120 bp, Artificial Sequence
  ENSG00000235166_1 (sequence is synthesized)
taaaacaaatttcctgaagtgggagaaaaaggtgccgatctaagtaaatctggaaaggagtagaatctataagattaaaggcagaaagaacttcacataagcactctagttggtaaagat

SEQ ID NO: 951386 - DNA, 120 bp, Artificial Sequence
  ENSG00000235166_2 (sequence is synthesized)
aagcaaggaaagtttgagaagctttcacagccaagaagagcctgaagagacatgataaacaaataaaatggtgaatcctggatgcagccctggaaaaacaacaaagcgacctcaggttat

SEQ ID NO: 951387 - DNA, 120 bp, Artificial Sequence
  ENSG00000235166_3 (sequence is synthesized)
gtcttcttttataagactacccactgcctcttctcaagtatatctgaagtatggctggttggagtatatcaggaccctcagaggagaaaagcatataaaaccagcacacctgaacccaga

SEQ ID NO: 951388 - DNA, 120 bp, Artificial Sequence
  ENSG00000235166_4 (sequence is synthesized)
aaagattcgttatgaatccgccaagacaccatactgttttaaatctgaagtaaaagttagtctcaacaagttattgtatcttgtctgcatgagtttgtcattaaatgattctgaaatgca

SEQ ID NO: 951389 - DNA, 120 bp, Artificial Sequence
  ENSG00000235166_5 (sequence is synthesized)
ggcaggggtagcaaggcggagctgtgccctgtcacggcacacagagaatgcccatggattttcacaaatgctgttaaaatgtgaaaagaaggtgtttcttttttcttcaatctgagcttc

SEQ ID NO: 951390 - DNA, 120 bp, Artificial Sequence
  ENSG00000235166_6 (sequence is synthesized)
aagctaatatgggcattcagctaaatccctcctgggtcctgaaacagtatgtggttttggatttcaaagataatccctacaacttctgggagaggtgcaagtatcaaccagttggagaca

SEQ ID NO: 951391 - DNA, 120 bp, Artificial Sequence
  ENSG00000235166_7 (sequence is synthesized)
cagggaaagggtgatataatgcagaaagtgacttgaacaaatttacacagaaggcagtgaagtgtgattcaaattcaagcagtctagactgtgccccacacaactctgcagcataacctt

SEQ ID NO: 951392 - DNA, 120 bp, Artificial Sequence
  ENSG00000235166_8 (sequence is synthesized)
gcagtatgaaaataatgcctctcatgcagatacaagtctgacaggaaaaccactgctgcttctgctgccaatttgttaagcatcgtgacaagaggagtgaccgagaagatggaaaagccc

SEQ ID NO: 951393 - DNA, 120 bp, Artificial Sequence
  ENSG00000235166_9 (sequence is synthesized)
ggtctgcctagtgccccttcagttggcaggattgctggcacagggccgtctaactgtgctggaaggtgttttagaagggacaagtggcactttggggagaggagtcacggatctcctggc

SEQ ID NO: 951394 - DNA, 120 bp, Artificial Sequence
  ENSG00000235166_10 (sequence is synthesized)
attgcatcacccagaaacttttccagggaagcagatactgtgtgtttatctaggcccaagcttttctctctgcagtactgagcaccacaaacagcagcctctattcatcagcaactacag

SEQ ID NO: 951395 - DNA, 120 bp, Artificial Sequence
  ENSG00000235166_11 (sequence is synthesized)
aggaatcttctaaatggtgaactagtcagccaagatgtatggaaaagtccatgtgtgactcattttccaaatagaatgtacatcattagaacaatgcaaataaattctcacaattgtccc

SEQ ID NO: 951396 - DNA, 120 bp, Artificial Sequence
  ENSG00000235166_12 (sequence is synthesized)
aaagaattaaatagaaaaagctaccatttaaaaacattatcacaatgctaaaaatatgttgatttataagatctcattaagttcatgcaattaaagcaaccattatcctcattttacaga

SEQ ID NO: 951397 - DNA, 120 bp, Artificial Sequence
  ENSG00000235166_13 (sequence is synthesized)
tcagggatatgagatccagtgacttacccaaagtttcaaaggaaagatgtaacagagccatctctgaacttctgctcttgggaatctacacactctttccactagttctgaccttagcag

SEQ ID NO: 951398 - DNA, 120 bp, Artificial Sequence
  ENSG00000235166_14 (sequence is synthesized)
ggaggaagggaccctgaggaagaaggaagaacccagtctacaagtgaatggagagagagaagagttaagattgctgaaggactggtggtttactatagcacggatggagctttttattta

SEQ ID NO: 951399 - DNA, 120 bp, Artificial Sequence
  ENSG00000235166_15 (sequence is synthesized)
ccaaaatgactcttcttctaactgaaggaacattaaaaaaatgacgtgttttgcaaaagacttaatccaggatagaaaaggggatagcacagaagaggagtttgaaggagcagaagaaaa

SEQ ID NO: 951400 - DNA, 120 bp, Artificial Sequence
  ENSG00000235166_16 (sequence is synthesized)
gggctggacaattctcctctgtctaagcagggaggaggatgattgctggaggattgtatttggccatcttgctccaccttctcctctcaattctccagacacagcaatcttaaaggtcca

SEQ ID NO: 951401 - DNA, 120 bp, Artificial Sequence
  ENSG00000235166_17 (sequence is synthesized)
gttcaatttgctggagaattttacaaaatgttatgagaagaattaacaccaattctgcactaccactttgagaatacataagagatgtgcttttcactttccaccgtgattttgagtcct

SEQ ID NO: 951402 - DNA, 120 bp, Artificial Sequence
  ENSG00000235166_18 (sequence is synthesized)
gcctattaaggcatcaagtgccaggaatggagttgaacatattcataatacagttaacaatgcaaatgaagcaacagttccaggtcggagaaaatgccgatgcttacctgagaaattcgg

SEQ ID NO: 951403 - DNA, 120 bp, Artificial Sequence
  ENSG00000235166_19 (sequence is synthesized)
gctccattgtattgtgtctgtcctgcaattgactcacagtgagttatcttgtagaaaagtggcatatttgcatatttagatcctgcctgggataagcaagagaaatacatgttctggctt

SEQ ID NO: 951404 - DNA, 120 bp, Artificial Sequence
  ENSG00000235166_20 (sequence is synthesized)
tctgaaatgaaattgagagagaaaaagggggcacatattgctcaatatgctcatttattcattaaaaatacaagtatgtacatctctcaggccttcattgggcaactgcccttgggagaa

SEQ ID NO: 951405 - DNA, 120 bp, Artificial Sequence
  ENSG00000235166_21 (sequence is synthesized)
aatagagacaaataagaataataaaaagccagcagccctgtcctgatggaacttaagatctagtgggagaatcagaaataaattgaataattacccacgttaatataaaattgcaaatgt

SEQ ID NO: 951406 - DNA, 120 bp, Artificial Sequence
  ENSG00000235166_22 (sequence is synthesized)
gtagaagaatttgaaccagttggggacttccctgagaaactgaaattaggctgaggtgggcagtgttcacacttgctcgctgcctaatctgggacagcactgccgacagcttgacctgca

SEQ ID NO: 951407 - DNA, 120 bp, Artificial Sequence
  ENSG00000235166_23 (sequence is synthesized)
aattattgctgaattcattgtatggccagtgcacctgccaggtagacattataaaagagcatgcagggggccaccaagagaatttggaggacaatttctccatcacaaaacccctttgaa

SEQ ID NO: 951408 - DNA, 120 bp, Artificial Sequence
  ENSG00000235166_24 (sequence is synthesized)
ccctgcaatatagcaaggatggattttcaacaaagcaaataaaggactgattttcacaagatctgaaccccgaggagcagattgtcaacctttcttctctgctgaggacaaagacaagat

SEQ ID NO: 951409 - DNA, 120 bp, Artificial Sequence
  ENSG00000235166_25 (sequence is synthesized)
ccattttcaaaacttccatgtttccagaggctccctgtaaagactacaatcctttctctaggggttcacacagtgttttctactcaagagtcacaggggagtttaaaaacatgcatattc

SEQ ID NO: 951410 - DNA, 120 bp, Artificial Sequence
  ENSG00000235166_26 (sequence is synthesized)
ccgagttcaactcttcgattttaattttgcagttggtggtagagttcagcatttctccttcctgccatcatgtgaagatggatgtgtttgctttcccttcagccataattataagtttcc

SEQ ID NO: 951411 - DNA, 120 bp, Artificial Sequence
  ENSG00000235166_27 (sequence is synthesized)
aagcagccgagctgtattcacagttgctcttcacatttgtcagaaacgtggagctgattaaatagagctaattctcaaaggcaataacaactggcctgaaagtgaccctctgcatacaaa

SEQ ID NO: 951412 - DNA, 120 bp, Artificial Sequence
  ENSG00000235166_28 (sequence is synthesized)
tcagccaaccccgagtctacagccccaaccgcttccttttctaactctcccacaccaagccaatgtttcccctgccctacgtcactcagggtcaggaaccagacagctagagaccactgc

SEQ ID NO: 951413 - DNA, 120 bp, Artificial Sequence
  ENSG00000235166_29 (sequence is synthesized)
tggagcccagagcctgcaacattattcaaactggctaatcctaaattgcttactctgccctgcccttcctttctggcagaaaccccaataaaggctgtggcctaggccttctcactcctg

SEQ ID NO: 951414 - DNA, 120 bp, Artificial Sequence
  ENSG00000235166_30 (sequence is synthesized)
caggacagcgtttaaggcagactaaccagagacctgcttccccagcctgcaattgaggagaaaaaagcagactatagcaggaggaatttgcggtggattgtatggtattgctcacatgaa

SEQ ID NO: 951415 - DNA, 120 bp, Artificial Sequence
  ENSG00000235166_31 (sequence is synthesized)
gcttcttggtatttttctttatatgagatcaatttctacacttttcttcaactctttccttcctggacttttatgaggtcaaactacagataaaggcaaactcatagaggcaacaagaaa

SEQ ID NO: 951416 - DNA, 120 bp, Artificial Sequence
  ENSG00000235166_32 (sequence is synthesized)
ctcatgcaggtatgccttattctttttaagagctgcataatattcctttgcatggatgtatcattgatttattttgttcactgttagtgatgtcttagactttttcctacagtttgccat

SEQ ID NO: 951417 - DNA, 120 bp, Artificial Sequence
  ENSG00000235166_33 (sequence is synthesized)
tgtgagcaatgtttcaatttttgaatatttcaccacgcttttgaacccatactaaccgcacatatttgtaaaatcaattaatcaatttatagtagtagatttataggctttttaaacacc

SEQ ID NO: 951418 - DNA, 120 bp, Artificial Sequence
  ENSG00000235166_34 (sequence is synthesized)
aaaagctaattttcttcttactagtagggagatatggatgggacttactgaaacaagtcatataatgcatctctattcttgcagccaaatgaaaatggccccatcaaagtgcaagtgctc

SEQ ID NO: 951419 - DNA, 120 bp, Artificial Sequence
  ENSG00000235166_35 (sequence is synthesized)
actaatgccaaatttcaaaagaaaatattacataccataatcaataaaaacaaaatatcaaacatgtattatgtgggaaagactgagataaatacttggcattgcattacctcaatactg

SEQ ID NO: 951420 - DNA, 120 bp, Artificial Sequence
  ENSG00000235166_36 (sequence is synthesized)
ttggcaaccttcctacgagcctcatgcaattactgctaccactttgcagatgagaaaaagaaaactgatgctaagcaaagtttagtaacttgcccaatatcacaagaagtagtgagtgac

SEQ ID NO: 951421 - DNA, 120 bp, Artificial Sequence
  ENSG00000235166_37 (sequence is synthesized)
agaggaagacttagctcacatctgagtgtctccaaatcccaaatcccaaagcctcatgctctacctttttactggaagttaaaataaatattatgacagatacctttttaaaaccttaaa

SEQ ID NO: 951422 - DNA, 120 bp, Artificial Sequence
  ENSG00000235160_0 (sequence is synthesized)
gtgcctgagtaagccccatgggaacacagccgtggtgggaagcagcttcccagcagccctccccgccatcgggagaatcccctgaggccatgagagggtctcagggaggtggacggccca

SEQ ID NO: 951423 - DNA, 120 bp, Artificial Sequence
  ENSG00000235160_1 (sequence is synthesized)
tcaagtgagaaccgagggcactgtgcactcctgaatcctaggactcctcttagctgtgtcttgtctctacttggggtacaattaatagcagagccagtcatgtcctaccagcattccttt

SEQ ID NO: 951424 - DNA, 120 bp, Artificial Sequence
  ENSG00000235160_2 (sequence is synthesized)
tatacaggctggatatatgtgtcattgactaacaacatcaacaatgaaatgaatctgagaaaacaggaaattgagagcaagagaaaaaaaagttaattatactgattttgtataagaccc

SEQ ID NO: 951425 - DNA, 120 bp, Artificial Sequence
  ENSG00000235160_3 (sequence is synthesized)
ctttgaacacatttttaaaaaatcaaatagaaggtgcccaggtccactgtgccttgtgaatatttgtcttgtatatcctagagatctacgcattcatgtgggaattgaaaaggacccaca

SEQ ID NO: 951426 - DNA, 120 bp, Artificial Sequence
  ENSG00000235160_4 (sequence is synthesized)
ttttactagaagcatcgttcatttttgcctcaaaacaatgcccacatgtcagaagaactttcacaattcacaggaacagtgacctaattaaccaaccataaaattgccaaatccctactt

SEQ ID NO: 951427 - DNA, 120 bp, Artificial Sequence
  ENSG00000235160_5 (sequence is synthesized)
tgaattatcaagtgagcttacactgataaatagatccaatatttaggaatttttaaatcttccattccttttttttttttgtctttttaaaaatagaacattagaatatgtcctccaggt

SEQ ID NO: 951428 - DNA, 120 bp, Artificial Sequence
  ENSG00000235160_6 (sequence is synthesized)
tttagagatgggggagacatgcttccctttatttctcagtaactcagccaaaaaaaatctggagagaatgcaaagacagctactggaaactttgaaaagtagatgtgagcccatcaggga

SEQ ID NO: 951429 - DNA, 120 bp, Artificial Sequence
  ENSG00000235160_7 (sequence is synthesized)
agagctagagaatctgaaatctactcgaaaaagtgagtttgatactttgtgttcctatcctaactccacacagcctgaaacttggaagtgagcatgatggagtggatacagtgagatgca

SEQ ID NO: 951430 - DNA, 120 bp, Artificial Sequence
  ENSG00000235160_8 (sequence is synthesized)
gaagaaatcctccagtttgggctggaagggaaaaaagagacccctaaaactcagagacagtggaagaaattcctggtgtttttttcttctctttttctctgttcttccacatagcaattt

SEQ ID NO: 951431 - DNA, 120 bp, Artificial Sequence
  ENSG00000235160_9 (sequence is synthesized)
agtattgactacagcatctctgttacaatgatagcaccgaaatgttgtaaccatatggcctgcaaagccaaaaatacttatctgaccatctacaggaaaagtttgctgatctggatgaaa

SEQ ID NO: 951432 - DNA, 120 bp, Artificial Sequence
  ENSG00000235160_10 (sequence is synthesized)
tacattgcttggtgtggcagtttcgtgtgcatttttggtgatgatgctccacggaacatctgcagatgtgctgtcaatttggacagctctgactaccgagtgaatgggaagtactaacga

SEQ ID NO: 951433 - DNA, 120 bp, Artificial Sequence
  ENSG00000235160_11 (sequence is synthesized)
gaactgtctgcttgggaactccatgaagttcgtggcttttgtgattgaaatagcatcaataaaaggttgacactgtggaacaacacaagcctgcatggacctggttatctctgacctcgc

SEQ ID NO: 951434 - DNA, 120 bp, Artificial Sequence
  ENSG00000235160_12 (sequence is synthesized)
accactcatgagaccatacctgagccctactccactttggcagaactgttgcatggcctctcttcatataatacctctccgtacaccgtacaccgcagctcaaagaaaggatatatgctc

SEQ ID NO: 951435 - DNA, 120 bp, Artificial Sequence
  ENSG00000235160_13 (sequence is synthesized)
cctgtgaagactaatggaactgtccctcctgatcctcctacagacttcctctggcctaatgggtgcaccattgcattatatctgccatctatacacacatatacctttcaaccctgcact

SEQ ID NO: 951436 - DNA, 120 bp, Artificial Sequence
  ENSG00000235160_14 (sequence is synthesized)
ctctgagatgactggactcatgcctaaataactgatgctgtccctagtgtaaggtaagcactcaatagtttctcaggaaatgaatatgataaatattttggctgtttagaggctttcctt

SEQ ID NO: 951437 - DNA, 120 bp, Artificial Sequence
  ENSG00000235160_15 (sequence is synthesized)
atctacccagtgggcctgctgggactccagttacccgatgcacatacattgcttggtggtcagtaaatattattttgctttctttattcctttgtggaaaaatttcaggtagagaagaaa

SEQ ID NO: 951438 - DNA, 120 bp, Artificial Sequence
  ENSG00000235160_16 (sequence is synthesized)
cctgaaataatttgaagaactttaaaatttttttcacccactaatttatattctcattagcaaaaagaaccgaatattggtagctctatactttataataaagatgtggaacttcttgat

SEQ ID NO: 951439 - DNA, 120 bp, Artificial Sequence
  ENSG00000235160_17 (sequence is synthesized)
gtgcatatgcacagaaagttctagaagaacccaggaggcagtgtgagcctgagaagcaaaaccacaaagagaacagagggaaactcacggacaatggtgggagaagcagagccagtgtgc

SEQ ID NO: 951440 - DNA, 120 bp, Artificial Sequence
  ENSG00000235160_18 (sequence is synthesized)
acagagcagtaaagggcagaaccaggagccgacaagagtctcgaagcctcaggcggggcgccagggaggtctgcagctgacagtgaggggatcagtgccacccaggtcctctatgggatt

SEQ ID NO: 951441 - DNA, 120 bp, Artificial Sequence
  ENSG00000235160_19 (sequence is synthesized)
cctattcactggaatggaatgccttgctgtctgggccctccttgcttcaccttccaatgaactgaaatcatcacactgatcctattgtagcggagagtggtgtgttaaaaccataaccat

SEQ ID NO: 951442 - DNA, 120 bp, Artificial Sequence
  ENSG00000235160_20 (sequence is synthesized)
aaccccgtctggagaccagcctcagctctgtcgctttcttatctcttcagatgcagcagatagttacctctaacttttagtttgcctcagacattaagaataaaatcatattcagcataa

SEQ ID NO: 951443 - DNA, 120 bp, Artificial Sequence
  ENSG00000264643_0 (sequence is synthesized)
tttccccaggatgaagaatgaggccacactgccaaagcaagatctcgtgctatgtgtgattgaatctcctgctgggcgccaagcaggaatctcatcatttccccacaggccctgagagca

SEQ ID NO: 951444 - DNA, 120 bp, Artificial Sequence
  ENSG00000264643_1 (sequence is synthesized)
agggtctgcgtctgcctgcatctgcatggccacttccatctgtggtacttgttagtttattttaaatgtgcgatttgtttggttgcattttctccttctaaatatacagtagtttttgca

SEQ ID NO: 951445 - DNA, 120 bp, Artificial Sequence
  ENSG00000232395_0 (sequence is synthesized)
cagggacagatcccaggtctaaaccctagccaaaaccccttgtgttagaggagctcaccctttactgctgatgaaatctccatgatgaagtgctttcctggtgacacccagagatcgttt

SEQ ID NO: 951446 - DNA, 120 bp, Artificial Sequence
  ENSG00000232395_1 (sequence is synthesized)
gctatgtgaatgcttttcttgctcaaatttcaacaaacatgattgccaaaaaagaaaaaaaaaagaagagaaaagagaacagaaaagaagaaaagaaaagaaagaaaggagaagagagag

SEQ ID NO: 951447 - DNA, 120 bp, Artificial Sequence
  ENSG00000232395_2 (sequence is synthesized)
aaagagagaagagaagagaagagaaaagaagaaaagaaaagaaaagaccagaccagacccatagaatcctatgggatctgctgacatgtttgtctgaacttcgtcttccatatcactgtc

SEQ ID NO: 951448 - DNA, 120 bp, Artificial Sequence
  ENSG00000232395_3 (sequence is synthesized)
ccaaattataactgcatttggttcacacttttccctcctcctgaagtgactttccttcttattccgcttttaaaaactttatcacctgcaaaattcacttcaaaaagagctccctccatg

SEQ ID NO: 951449 - DNA, 120 bp, Artificial Sequence
  ENSG00000232395_4 (sequence is synthesized)
aaggtttaattactctcttggccctaaaggaatgacatctcctgtttggcctgttcacattgctgcactgcactggtaactcttcaacgaaacccatttttactcttacctcttattgtt

SEQ ID NO: 951450 - DNA, 120 bp, Artificial Sequence
  ENSG00000232395_5 (sequence is synthesized)
acttatgtacaggtcttattgcctctctcaacctcaactaaactatttaagagaagtgtactcatctgtttatttcctgctgagtctagtccaatctcttataatttttagaccattaaa

SEQ ID NO: 951451 - DNA, 120 bp, Artificial Sequence
  ENSG00000232395_6 (sequence is synthesized)
tgaaatctccatgatgaagtgctttcctggtgacacccagagatcgtttgctatgtgaatgcttttcttgctcaaatttcaacaaacatgattgtactaaatcgctaacacctggaattt

SEQ ID NO: 951452 - DNA, 120 bp, Artificial Sequence
  ENSG00000232395_7 (sequence is synthesized)
gtggaaaggaaatgagacttggaatcaaaagacttcagtttcaatctaaagtccctgaatgtgtaaactattgtgatttttcttagctacagtcctctcacttataaaatgtttactgtc

SEQ ID NO: 951453 - DNA, 120 bp, Artificial Sequence
  ENSG00000232396_0 (sequence is synthesized)
cccttggctcaccttcccccatccacgcaccaggagcggagagcccggaactaagaactgtagacccagagaggtgagactggccccaagcacctgggtcctcaagaagagtcaccgttt

SEQ ID NO: 951454 - DNA, 120 bp, Artificial Sequence
  ENSG00000232396_1 (sequence is synthesized)
ggaaactgaggctgagagagaaggacgttgaccaaggtcacagggcaggagcagcagagacagagtctcgctatgttgctcagactggtctccaacttctggctcaagcgatcctcctgc

SEQ ID NO: 951455 - DNA, 120 bp, Artificial Sequence
  ENSG00000232396_2 (sequence is synthesized)
cttgacctcgctaagtgctgggattaccgaatgggagccaccatgcccagtctttactcaaaattcaccttctccctgggtcttctctggagaccctagctttaaaaataaacaagtaaa

SEQ ID NO: 951456 - DNA, 120 bp, Artificial Sequence
  ENSG00000232396_3 (sequence is synthesized)
cttctggtggctcgagctccctggcattctgggtcctcactctgtgccaggcgctgtgcaagcactggcctggccagagcaggcattcagaagacattgtggccccaaccccacgcacac

SEQ ID NO: 951457 - DNA, 120 bp, Artificial Sequence
  ENSG00000232396_4 (sequence is synthesized)
aggatcagtgctggggttgggacggggcccatcagccaagcaggtgggtccaggaggagctgggaggcttggagagggggctgcgcttagcctgtgctgccctacccagtggagctgagc

SEQ ID NO: 951458 - DNA, 120 bp, Artificial Sequence
  ENSG00000285538_0 (sequence is synthesized)
aagatcaggagtgggacttggaggaataagctgcatttaggaaatgagcagaagaaaggtagagctaaggccatgagggccagaagagacgactggggagcaaaggacgtaggtgaggga

SEQ ID NO: 951459 - DNA, 120 bp, Artificial Sequence
  ENSG00000285538_1 (sequence is synthesized)
ggaggaaatgaagaatttatactgaaggaacaacaaggatgacttttaggaggagggtggtgaatggaagaaccctgagacaaaggaagacatcaccagccaggggagaccatcccctat

SEQ ID NO: 951460 - DNA, 120 bp, Artificial Sequence
  ENSG00000285538_2 (sequence is synthesized)
gacttgcttatcaagacaggaaaaaaatcgttcatcattgtgcaaaatttcaagtccactaaacgatcacaagcatcctgacctgaaaatatggatttaaattacagaaaaatatgagaa

SEQ ID NO: 951461 - DNA, 120 bp, Artificial Sequence
  ENSG00000285538_3 (sequence is synthesized)
attatttgggaaaatattataaataagaaatagtctgagccatcatattcagaagacatgtgtctctcattctgcagattttcagtacaacactaagagtgcgtcgtttcatgggacttg

SEQ ID NO: 951462 - DNA, 120 bp, Artificial Sequence
  ENSG00000285538_4 (sequence is synthesized)
cttcattctctgcccacattgagtaggcaactatttctccatggcttcctcttccacacccacttctactagaaacagttgggtctaaaaggacccaaagaacaaatgaaatggacgatt

SEQ ID NO: 951463 - DNA, 120 bp, Artificial Sequence
  ENSG00000285538_5 (sequence is synthesized)
acatatattcatagagttctgtcacttggcttcttgtttacttgtccttataatcctatgtgccagactagaatggcaagctctgttgtacagtgaaagatttggtgaatttcaatgctt

SEQ ID NO: 951464 - DNA, 120 bp, Artificial Sequence
  ENSG00000285538_6 (sequence is synthesized)
gcccaagaacacaaggctacttaagtgaggattgctattacagaacctatattccagccccactaatgttacatttcccatgaaagaccaaaagaagagaaatcagatgtgttaagggct

SEQ ID NO: 951465 - DNA, 120 bp, Artificial Sequence
  ENSG00000285538_7 (sequence is synthesized)
tggtggtagctgtgtttttcatctatacagcatgttttcatattgcctttggctattgatcatcagtgaatttccaagttatgtgtgtggataacatgatttgttaagcatgtctgaact

SEQ ID NO: 951466 - DNA, 120 bp, Artificial Sequence
  ENSG00000285538_8 (sequence is synthesized)
ggatctctgtctcttgcaaccaaaggaaccccaatatcaaatacatttacagcagtggagaaatataatgcaatttatccattgtgccctgagatttccaggccatactaagttcagaag

SEQ ID NO: 951467 - DNA, 120 bp, Artificial Sequence
  ENSG00000275549_0 (sequence is synthesized)
gcacaccacagagctcgggaaaaccaacagcatctcagtgtagcggggagatgggcagatgggggatccaggctgggccagccttgtccacagcccatagaagggttggccagccagaag

SEQ ID NO: 951468 - DNA, 120 bp, Artificial Sequence
  ENSG00000275549_1 (sequence is synthesized)
ggtgcatcggggtgcccagagggtcagaaggccaggctggggccccaagtcccaggggaggcctgggaaagccccgggggaggccatggttccactcggtggccgggccaagcaggttgt

SEQ ID NO: 951469 - DNA, 120 bp, Artificial Sequence
  ENSG00000275549_2 (sequence is synthesized)
gcccagctggctctagagcgtgcagaaggggcctgtgtcgtggcgcttgggtctgcgtacaccctggatgaccacgccaggcgccgaagggaagcgcctccttacaggtgctgagccagg

SEQ ID NO: 951470 - DNA, 120 bp, Artificial Sequence
  ENSG00000275549_3 (sequence is synthesized)
aggtgaacgcaggggagcggctcatcgagaaggccggcgagcgggggctctgcaggcggctcccaggaaggatatttcagctttctgcgtgaaggggctttcgctctggaaccacaaagt

SEQ ID NO: 951471 - DNA, 120 bp, Artificial Sequence
  ENSG00000275549_4 (sequence is synthesized)
ctgccatgccctgcggccaccgccctctgtagttggaggatggagagagagaaggctgggagccccacccaggtgaccatgggtccagtgtttgcctccattgatgtaaaaatttgccag

SEQ ID NO: 951472 - DNA, 120 bp, Artificial Sequence
  ENSG00000275549_5 (sequence is synthesized)
gaatttcactgccttctggtcagaattcatcatcagagtctcctggctctcttccccaacggcaccacggagctctgtgacctcactggtaggcccctctgttgctgggactcctgagga

SEQ ID NO: 951473 - DNA, 120 bp, Artificial Sequence
  ENSG00000275549_6 (sequence is synthesized)
agacacattgtctggccctggaggggctgccccgggccccgacccctggtgggcccctcccccactaactagatgatcagcgggtccgcctgggccaggacccccagcctgccccggtga

SEQ ID NO: 951474 - DNA, 120 bp, Artificial Sequence
  ENSG00000275549_7 (sequence is synthesized)
tccccgcaacctttccagccttctcccctctcctgcaccctggggtctcctgggagtctggggtccactctagcaggtctgggaggactgaggcctcagcagagggggtggagggaacag

SEQ ID NO: 951475 - DNA, 120 bp, Artificial Sequence
  ENSG00000275549_8 (sequence is synthesized)
gacccaccggcatccaccaagccctaggagatgcccagctgtgtctggccagccaggaccccctgggggtaggagggaggggcccaggaaggctccctggaggaagaggaggagccgcca

SEQ ID NO: 951476 - DNA, 120 bp, Artificial Sequence
  ENSG00000275549_9 (sequence is synthesized)
ccccatctggatttccacttaagggaaaagcaaatccacatcagatgggtctgacaccagaggcaggccgggccttggagcccagccagggctggggtgtgagggcctacctctcacctg

SEQ ID NO: 951477 - DNA, 120 bp, Artificial Sequence
  ENSG00000275549_10 (sequence is synthesized)
ggggcacagaggctagagggtgtcacagatggccgggctgccagagctgcaaaggaacagccagcctgtgtgagcaagagcccgtgtgggcaccagggccctcactgtgtggtctctgga

SEQ ID NO: 951478 - DNA, 120 bp, Artificial Sequence
  ENSG00000275549_11 (sequence is synthesized)
gctgaccaccagttggtcccagccctgaccttggcccagaatccaccagggcagggcctgtgaacagggccaacttggggccctcctccgccctctctggatgcctccccttcagcactg

SEQ ID NO: 951479 - DNA, 120 bp, Artificial Sequence
  ENSG00000275549_12 (sequence is synthesized)
ggcctgccaggcagacagatggacacgtgcttgaggaaacacgggttttatctgggcgaggggttcacgcctgtgctccggggcccctgcccaggttgtgccgggttcagagttgactgg

SEQ ID NO: 951480 - DNA, 120 bp, Artificial Sequence
  ENSG00000275549_13 (sequence is synthesized)
ctgccagtggaacagagtgtactttgctaatgaagcccttgtcattggacagataggctcctccaggtcctccctgccctgtaataaacgttgccaccgtgaatggtgctgctggacatc

SEQ ID NO: 951481 - DNA, 120 bp, Artificial Sequence
  ENSG00000287089_0 (sequence is synthesized)
ggcagttgcagacaggctgtgccccagagcctcgagacctccctgggcactaactcatgtattcatccctattggagtctcagtttcagacagggtggagcatgaaagtccctttcttca

SEQ ID NO: 951482 - DNA, 120 bp, Artificial Sequence
  ENSG00000287089_1 (sequence is synthesized)
tctccttaggttaaagggaaccaaacatctgcatagatactcagcgtcccctgaagtctaaagtaaaaggcagcagggaggcagagccagcagttccattttccttaggctccactgcct

SEQ ID NO: 951483 - DNA, 120 bp, Artificial Sequence
  ENSG00000287089_2 (sequence is synthesized)
gagttccatgaggcctgcctttttttcttctgggccctaaagaggaggctttggccactgctacatggaccgcagccttgtttcccgcctctgggcgctggctcccattggtccctcgct

SEQ ID NO: 951484 - DNA, 120 bp, Artificial Sequence
  ENSG00000287089_3 (sequence is synthesized)
cttgatctctcaaggcccccagctgagttccaccttttccctgcaggcttccaagcacgctccagcccttggtgattctccttccttgaacctgagcacttagcatcagcaccactgatg

SEQ ID NO: 951485 - DNA, 120 bp, Artificial Sequence
  ENSG00000287089_4 (sequence is synthesized)
gggcaattcatcatgtcctgcctgtgacatctctcttttgtcttcgactgttagttaatttttcatatgttcgtatcttggcaccccagccttctccctggagatggggaggtgctgaga

SEQ ID NO: 951486 - DNA, 120 bp, Artificial Sequence
  ENSG00000287089_5 (sequence is synthesized)
ttcttctgcatgctcgggctcatcgcccagggtggcctcttgtactgcagagcagctcggtaaatatttattggcttgttaatttaaaatttcctccaaaggataggcaggggtgggaaa

SEQ ID NO: 951487 - DNA, 120 bp, Artificial Sequence
  ENSG00000287089_6 (sequence is synthesized)
gatgttgctcatacgagccactgacatatctgagtgatgccagtgaaggcgtgaaggtggccagagaggtggctggaactgggggttatcttgggtcctggtcctttacactttccttgg

SEQ ID NO: 951488 - DNA, 120 bp, Artificial Sequence
  ENSG00000287089_7 (sequence is synthesized)
tatcaccggcataggtcatagtgacctcagccttgctagcagggcaggcagcagggggttcttacctgcatcctctggagttcgccataggtgaagatggggacgaaggcttccgtctgg

SEQ ID NO: 951489 - DNA, 120 bp, Artificial Sequence
  ENSG00000287089_8 (sequence is synthesized)
gaggccagcatggcagctacatgcaccaccagcagagcagccacagccttacgggataccatcttggagctggacaatgacaaggagctcttgtcactaagtttggggtacagtggcaga

SEQ ID NO: 951490 - DNA, 120 bp, Artificial Sequence
  ENSG00000287089_9 (sequence is synthesized)
tttgggcctggtatcagagcttgagcagatgagctctgagcacctttctgccccagagctgtggcagctggccaagctcctgggaaaggccatccagctccctgccacacaccagggagg

SEQ ID NO: 951491 - DNA, 120 bp, Artificial Sequence
  ENSG00000287089_10 (sequence is synthesized)
aatcatttcacttgtccacccttctcttttgttacaggtaaggtcttctggggtcagctggactcataaggcaggagggacctcatctttcagagaaggaatgcctagattatcaacaga

SEQ ID NO: 951492 - DNA, 120 bp, Artificial Sequence
  ENSG00000287089_11 (sequence is synthesized)
actgtgccccaagacccagagagacctccctgccccagtgcctattagaatgacaaaaggggtggacccaagcccagatgaccagggctctgcctggaagtgccaggccaggaccctggg

SEQ ID NO: 951493 - DNA, 120 bp, Artificial Sequence
  ENSG00000287089_12 (sequence is synthesized)
tctgtagagcctctgccattgcaaaggatgagccagatggaaaaattcagcatggagctgtatccctgagccaagagggcacccccttccccgttgggggagcgatggcttgggaacaag

SEQ ID NO: 951494 - DNA, 120 bp, Artificial Sequence
  ENSG00000287089_13 (sequence is synthesized)
ccccccgccccgtgctccagtgcatctagctgcctttggccaccatcctgaaacagcagggagcaggcttcctctttcctcacaccctggaacccagtgattgctgaccaggaagcagaa

SEQ ID NO: 951495 - DNA, 120 bp, Artificial Sequence
  ENSG00000287089_14 (sequence is synthesized)
ccttccaaggctgcaggcttgcatcctgcctctcagccaagacctgtctcctcagtcatctgaaaccaccctaccacgccagacgctccctctgccttcttgctattccagctctctctt

SEQ ID NO: 951496 - DNA, 120 bp, Artificial Sequence
  ENSG00000287089_15 (sequence is synthesized)
cttcccacttcctattttctctccattttgttcaaactccatgaacaagaacaacagagctcagacagcgaaagcctccccatcccagctgtatgcaaattcccagcaggctgaaaggac

SEQ ID NO: 951497 - DNA, 120 bp, Artificial Sequence
  ENSG00000287089_16 (sequence is synthesized)
cacccgcccacccaagaccacctcccaggaagccgaggccttgtgtgcagccccagaggagcttgagctgaacggagaatgggttgaggtgggtgggacccatcactgttcttcccttct

SEQ ID NO: 951498 - DNA, 120 bp, Artificial Sequence
  ENSG00000287089_17 (sequence is synthesized)
cattcctgcgcgttccctgaagagtctctggggcctgcttttccccccagcagagacggatgtgtcacatttatggcatcccatttccttcacagagaggctatagatcctgtttcattc

SEQ ID NO: 951499 - DNA, 120 bp, Artificial Sequence
  ENSG00000287088_0 (sequence is synthesized)
cacagaaggggttttttatgtgaacttagagtgactggctactctgctcatccaacagcccatccacccatcctgttcatccatgcattcatccatccatctgtccatccatcagtccaa

SEQ ID NO: 951500 - DNA, 120 bp, Artificial Sequence
  ENSG00000287088_1 (sequence is synthesized)
tccattcatccatcactaatccatccatccctccacctacccatccattcatccatgcattcatccatccatccacccattcatccatcactcatccatccatccctccatccacccatc

SEQ ID NO: 951501 - DNA, 120 bp, Artificial Sequence
  ENSG00000287088_2 (sequence is synthesized)
cattcatccatccattcatctttctctccatctgttcatctctccacgcatccatccctccatccatccattcatctttctctccatctgttcatctctccacgcatccatccatccatc

SEQ ID NO: 951502 - DNA, 120 bp, Artificial Sequence
  ENSG00000287088_3 (sequence is synthesized)
catccatttgtccatccctccatctgcccatccatctgtcaaaccatgcatcaataaatattcagagcatctgctatgtgccaggcatggctctagacactggactcagcagggaacaaa

SEQ ID NO: 951503 - DNA, 120 bp, Artificial Sequence
  ENSG00000287088_4 (sequence is synthesized)
ggcctctagcctcatggagtgaggtccccactcacacgtgagtggagacacaggcaccgagcagacacccagctggcctgagagcagcaggccctactgaggaaagacagctccggggaa

SEQ ID NO: 951504 - DNA, 120 bp, Artificial Sequence
  ENSG00000287088_5 (sequence is synthesized)
ggggctgcagggcagagtgtgggcatcagctcagcatggtgggggcagcctgaagaggaccgttgggcagggacccaagaccatcagggaggagggtgccaggaggaaacagcaagcgtg

SEQ ID NO: 951505 - DNA, 120 bp, Artificial Sequence
  ENSG00000287088_6 (sequence is synthesized)
aaggccctgtggtagagactccacgcacgctgtaccttcttttcccagttagcacgtccaaggatctgtcaactagagcagtaggacaactggcctggggcagtcccatcccgcagcacg

SEQ ID NO: 951506 - DNA, 120 bp, Artificial Sequence
  ENSG00000287088_7 (sequence is synthesized)
ggtgttgggaaggcagcccctccatactcgccatgaacaggcctttggctctcctccggctgccgacgaagaatcgagctcctttcactgacagggtggctgggaagggcacatcggcca

SEQ ID NO: 951507 - DNA, 120 bp, Artificial Sequence
  ENSG00000287088_8 (sequence is synthesized)
ttctgaaaatatcaaaggactgtgttagggccataggagagtggtcaccccagtttactcacagaaggaacaggaacaagcccctcactaagcagcgtgcatctgtgctgtggctgccac

SEQ ID NO: 951508 - DNA, 120 bp, Artificial Sequence
  ENSG00000287088_9 (sequence is synthesized)
ggcagggtttctccgaaggctccagaggaggacgcttcctcgactcatcagcttctggtggctgcacgtgctccccgtgacctgtggccatgtcgctccagtgtccgactctcccagtat

SEQ ID NO: 951509 - DNA, 120 bp, Artificial Sequence
  ENSG00000287088_10 (sequence is synthesized)
ctgtctcctggtaaggatcctagtcacactggagcagggcccgcctcactccaggatgatctcagcttgacttgatgactgcaaagactctgtttccaggtgaacgtttgtccaggcctc

SEQ ID NO: 951510 - DNA, 120 bp, Artificial Sequence
  ENSG00000287088_11 (sequence is synthesized)
aggcgctgccgccacgtcattcctagctgctgtggcaaagccagaagtcaggcagcattcacgtccagccaggactttctttacggggtgggaagctgctgctaggtcaggttgtcttca

SEQ ID NO: 951511 - DNA, 120 bp, Artificial Sequence
  ENSG00000287088_12 (sequence is synthesized)
gcctgcacagcacgtccctgggaggcttccagctctcaggacctgagaactcatcaccgtcctgagggccctaaagagtttggggtatggtgggagagaggctctgataaaagtgtgttt

SEQ ID NO: 951512 - DNA, 120 bp, Artificial Sequence
  ENSG00000287088_13 (sequence is synthesized)
aagctaagtgcataataaaaatatttatgcgataagtttcataacaaaacagaagatcctacctttgaaagtaatattcgaaataatttaatatttaatagatttaatataaactggatc

SEQ ID NO: 951513 - DNA, 120 bp, Artificial Sequence
  ENSG00000287088_14 (sequence is synthesized)
atttgcaattaaaaagacagaagcgcagccctgctccacagtggtagatcctgacatgggtaaccaactggccgagctaggggactgaggactcctgtccaggggacctaccgtcaggcc

SEQ ID NO: 951514 - DNA, 120 bp, Artificial Sequence
  ENSG00000287088_15 (sequence is synthesized)
acaaaccaggcgacggcaaaaacgagaaacgaactcggcttccaaaagcccccattgtgtccaaggctacaaaggataatcttgtactcatttggagtttctgtcaacatctgctccctc

SEQ ID NO: 951515 - DNA, 120 bp, Artificial Sequence
  ENSG00000287088_16 (sequence is synthesized)
gtccacgaggaacctgccatgtggagtcacggagccaggcctcggcctccagcctggaggttggggaaggagttactctgacttcccgctgctgcctgttgtgatgttagcgccctcccc

SEQ ID NO: 951516 - DNA, 120 bp, Artificial Sequence
  ENSG00000287088_17 (sequence is synthesized)
acagtgccggtcccctgccaagtcccctgagctacttctggaaaaggagtgcgcttggtgtgatcgcccttaccttgttctaagccactgactctgatgtgcagcgggttttgtgtttaa

SEQ ID NO: 951517 - DNA, 120 bp, Artificial Sequence
  ENSG00000231846_0 (sequence is synthesized)
gacatgctctggaaaacacagacattctcagaaaactgcagtctgctgaaaatgccaggagagttcaggagactggactcttcattaggccttggcatgtttcattgtttttgcataggg

SEQ ID NO: 951518 - DNA, 120 bp, Artificial Sequence
  ENSG00000231846_1 (sequence is synthesized)
ctgtatgtccaactctttttttctaatcctgtttcaaatggacaagatcttaggacacaagagaagatgtgtgcttgggacaaagcatatgaccattgctggacttctgaaatctaaatc

SEQ ID NO: 951519 - DNA, 120 bp, Artificial Sequence
  ENSG00000231846_2 (sequence is synthesized)
agatcatcactgcagctaatagatgctggccttttttgcagtgagttacctctaatatacacttactgaaagcacacatcttcacagctgaaaataaaaataaaatatattccattacaa

SEQ ID NO: 951520 - DNA, 120 bp, Artificial Sequence
  ENSG00000231840_0 (sequence is synthesized)
ggagactgagagcgcgacaaggccctggacagatgcccgcgcggggaaggaaggctggcttaggagggggcgtcagctatggtttagcagcttccagcgaccgaaacctacatcacagcc

SEQ ID NO: 951521 - DNA, 120 bp, Artificial Sequence
  ENSG00000231840_1 (sequence is synthesized)
gcagcacacaattccaggaaacctggtgctcaatattgggatctcaggaatcaggaccggcggctggggtgaaagcctagcggtcagagcttaggagtgaggcagaagctgttagagact

SEQ ID NO: 951522 - DNA, 120 bp, Artificial Sequence
  ENSG00000231840_2 (sequence is synthesized)
cttcgcaagtgaccccggggctacatatggatgattcaagagggagtctcctcgccagaaagttcacatgtttcactccttctggccttcataccaacccattgttaaaactggaagtcc

SEQ ID NO: 951523 - DNA, 120 bp, Artificial Sequence
  ENSG00000231840_3 (sequence is synthesized)
ctccacctggggtcactgactccactgttttcagataggatggggaccctgcactggagactgctctctagcccctgggcaggagaggcacagacactgctacgcacgcggagcagggat

SEQ ID NO: 951524 - DNA, 120 bp, Artificial Sequence
  ENSG00000231840_4 (sequence is synthesized)
caccagcgctttgactgactttgctcgtccaggaggctggggacatgcgtgcccatgctcagcccaccccctctgtagacacaattggtcgcccattctgtttataggaagtcttccatc

SEQ ID NO: 951525 - DNA, 120 bp, Artificial Sequence
  ENSG00000231840_5 (sequence is synthesized)
ctgcaccagcagctgtccctagacagggattgggagacatgcaagttgcttggcttcctattaccttgtgttgaaaacacaataggctttgggatcaggagttcattccagttattttaa

SEQ ID NO: 951526 - DNA, 120 bp, Artificial Sequence
  ENSG00000231840_6 (sequence is synthesized)
aacagctcgaacagcacctggaacagaagcaatagccgccactcagaggttacttcttccttctccgccttctctggatcacctccctacctcatcctcaatctaacgctggaaatattg

SEQ ID NO: 951527 - DNA, 120 bp, Artificial Sequence
  ENSG00000231840_7 (sequence is synthesized)
gatatggggttcttcaatctcaaataaatcatctgtagagtcccctccagttccgaaattctctctatgtcttggagtgtgtggaatagccaggaaaccagcccaggagctttgactccc

SEQ ID NO: 951528 - DNA, 120 bp, Artificial Sequence
  ENSG00000231840_8 (sequence is synthesized)
agccattctgatgactccacctggaccagtgactcctctgtggcccgcatccaaatgcaactcggtgcactgaggacggttttccacacccctgtgattgcatccccaaccaattagcag

SEQ ID NO: 951529 - DNA, 120 bp, Artificial Sequence
  ENSG00000231840_9 (sequence is synthesized)
tttccacacccctgtgattgcatccccaaccaattagcagcacccattctctagccccttgcccatcaaactatcattaaaaaactctagccggcgggcatggtggctcacgcctgtaat

SEQ ID NO: 951530 - DNA, 120 bp, Artificial Sequence
  ENSG00000231840_10 (sequence is synthesized)
ttgattggagctcttccagggcttccttcctgggccatggacccctctgaggccattcgcctctgttccagtttggctctcctggacccctctggatggctaggttgttcctcctcagtc

SEQ ID NO: 951531 - DNA, 120 bp, Artificial Sequence
  ENSG00000231840_11 (sequence is synthesized)
tgcattgattggagctgggaccgaagcccccattccagaaaccggaccaggagataggcaaacaagaagaagccacccaatgtgagaaagaaataagcaacgggggtgatgtccgtcttt

SEQ ID NO: 951532 - DNA, 120 bp, Artificial Sequence
  ENSG00000231840_12 (sequence is synthesized)
ctcatgactgtagtctcagctacatgggaggcaaggcgagaggatctcttgagcccaggagttcgaggccagcctaggcaatgtagtaagaccctgttcttaaatttttttaaaaagcaa

SEQ ID NO: 951533 - DNA, 120 bp, Artificial Sequence
  ENSG00000287081_0 (sequence is synthesized)
ggaaatataggagcctgaatacagaagaaaagcaaagcaaattgacagagagtcttcatgggctgatttgggccctagtctcagctgggaataaagccaatgccatccctcagagatcaa

SEQ ID NO: 951534 - DNA, 120 bp, Artificial Sequence
  ENSG00000287081_1 (sequence is synthesized)
aggtccaaaagttgggaagtgtggagagccagagaacacaggaagattttctgtgatgttagaaacaaaatggtgtaatacaagctgggagctcataaagaagacataaactactgtgcc

SEQ ID NO: 951535 - DNA, 120 bp, Artificial Sequence
  ENSG00000287081_2 (sequence is synthesized)
tcctccccaaagcagaaggtctgccttttagagcattttatctcttttagtaattatgaaatgcattaaaaaaaacttaaggatgtttataagtaattcacatgaaagaaactgcgtgta

SEQ ID NO: 951536 - DNA, 120 bp, Artificial Sequence
  ENSG00000287081_3 (sequence is synthesized)
gaaaataaccacatatgaaaatattcgaactagttattgaggtacaaagttaaaataataacaaaaggattacaacataaacctggtgaggctgtggtaaaacagatatacacaaatact

SEQ ID NO: 951537 - DNA, 120 bp, Artificial Sequence
  ENSG00000287081_4 (sequence is synthesized)
tttaaggaaatcaacgtagtgattatttcttattttgagaatttctaactctctggaagtctgttaggtgggactctaagctcttggtaaatacccttaccaaactgcaattctcaagtt

SEQ ID NO: 951538 - DNA, 120 bp, Artificial Sequence
  ENSG00000287081_5 (sequence is synthesized)
tatgtttaagtgctctgaagttctacaagccttttgagaaaccatcatctaatgtaagactttttaatttcagggcatgaattacaattttagatgcctgcaatttctatgtttcaaaga

SEQ ID NO: 951539 - DNA, 120 bp, Artificial Sequence
  ENSG00000287081_6 (sequence is synthesized)
caattcacttccaagaaacagaaggggttgagagtctgattttcataaaatgtggagtaagaggaaaatttgtaactaacaatatattaatgccatttaacatattatcactatttagct

SEQ ID NO: 951540 - DNA, 120 bp, Artificial Sequence
  ENSG00000287081_7 (sequence is synthesized)
agctgatgattttgcaactctgaaaagagagaactatataaccaagcacatgtttttaattaggtaaacttaattatattaaaattatttaccatactaggatttaaaaaatttttatct

SEQ ID NO: 951541 - DNA, 120 bp, Artificial Sequence
  ENSG00000287081_8 (sequence is synthesized)
atgaaaatagataaattcgttggctaaatctgggtagttttatgtggttctgctagagcttctgtaattctgctatatctcaaaaatccaaatggaaattctattattcagatacataat

SEQ ID NO: 951542 - DNA, 120 bp, Artificial Sequence
  ENSG00000287081_9 (sequence is synthesized)
aaacaccaagagtcattaaactttaaacttatctgtattcagaaatcagtaaatgcattatgctgacatacaaatgaatatgctcctaggagtgagataaacaagactgatgattttatt

SEQ ID NO: 951543 - DNA, 120 bp, Artificial Sequence
  ENSG00000287081_10 (sequence is synthesized)
tatggtaaataaccattatatatagccaaaacaatggaagtaaaatatgcttgacctgtgatgggggtgatactagttcaaggtagatcttgttgttcttggtgaagggaatgcaagtcg

SEQ ID NO: 951544 - DNA, 120 bp, Artificial Sequence
  ENSG00000287081_11 (sequence is synthesized)
aattaattaattaattttacttttataaattggcatgactttcattctaatatgccttttacttattttctcaaactaatttacttgaatattttctctctgatgacctgtcttgtgatt

SEQ ID NO: 951545 - DNA, 120 bp, Artificial Sequence
  ENSG00000287081_12 (sequence is synthesized)
tcaaagattcatttatttcatatatacttattaggtaactactacaggccagatattgttctaggtgctagaaatagacgagtaaggagacagagaataaacttgatagctcgggaaggc

SEQ ID NO: 951546 - DNA, 120 bp, Artificial Sequence
  ENSG00000287081_13 (sequence is synthesized)
caactagtttagattggccagcctggaaggctgccgtgaaaaagtgatgatggaggtgagtcccaattgaacaaagccgtgcgaagatctggaattaaagaggtccaggcccaagaacca

SEQ ID NO: 951547 - DNA, 120 bp, Artificial Sequence
  ENSG00000287081_14 (sequence is synthesized)
caggggcaaaagccctaagacaggaatgaattttgattgaacgagtttagtgtgctacggtatcagaaagaaggctttgtggtaggagggtggtcaaagagaacaagatgatagagatga

SEQ ID NO: 951548 - DNA, 120 bp, Artificial Sequence
  ENSG00000287081_15 (sequence is synthesized)
ggtcacagaaagaggcagggtcagattatgtgggactttctaaaccacggcaaatggcttccgttttatccttagtgcaatgtcaagacattgaaagattttagccaatgatataattta

SEQ ID NO: 951549 - DNA, 120 bp, Artificial Sequence
  ENSG00000287081_16 (sequence is synthesized)
tataaataggcattttttcttccacttctacctaccaaatttttaataacttgaccaagacttcagtcaccctaccttgcagtagatgctaagtgctagagaaacaaggatgaccaagac

SEQ ID NO: 951550 - DNA, 120 bp, Artificial Sequence
  ENSG00000287081_17 (sequence is synthesized)
agaccccactcctgctgttacagagctttggatcaagcaattcttagcatcattaattcaccaattaagggcatgcaagatgtgtgtcatggctccatcttgtctctcctgtttccccat

SEQ ID NO: 951551 - DNA, 120 bp, Artificial Sequence
  ENSG00000287081_18 (sequence is synthesized)
tgtctgacacacaataatgaataagtcaatgcaataaatatgtgaatttataggtctcaagtcatagaagcttacatgtaaacctgatagaattcatctcatttaattgaacccattatt

SEQ ID NO: 951552 - DNA, 120 bp, Artificial Sequence
  ENSG00000287081_19 (sequence is synthesized)
tcgacatattcaggttattttggatcttgattctgtcagtgatactatgggctatttcttctagatgtgtgtctttcatggtgacaaaactctttcgactttgatctaaagtactgacaa

SEQ ID NO: 951553 - DNA, 120 bp, Artificial Sequence
  ENSG00000287081_20 (sequence is synthesized)
taacattgtataggagaagtccagagcaatggagacctccttctaactggacttcttaacatgaatcaaacaccctgtaagtatgaaattgaaatcctttaatgacttccataataagtc

SEQ ID NO: 951554 - DNA, 120 bp, Artificial Sequence
  ENSG00000287081_21 (sequence is synthesized)
catgctgtgttactaatggcttgtaaagatagtacagagtccatgtggagagagtgaggtgtcagagaaagacctgagctaagggatgcagagatgttaatcaggcacagagggcgcagc

SEQ ID NO: 951555 - DNA, 120 bp, Artificial Sequence
  ENSG00000287081_22 (sequence is synthesized)
aagagagtggtcccggcagaagcaacagcattagttagagaaggtggtatattcccgtgatctaggctgctgccttggtcagatgttatatatttataccttggaggatctcatctggat

SEQ ID NO: 951556 - DNA, 120 bp, Artificial Sequence
  ENSG00000287081_23 (sequence is synthesized)
gagctactccattacatagagctcctgctctctccttatgacgatacaatagtcttttagttattaaaactttaagatgtagtttacgtctgacagatttatttttgccctctgtattac

SEQ ID NO: 951557 - DNA, 120 bp, Artificial Sequence
  ENSG00000287081_24 (sequence is synthesized)
tcttttatgtcagcattttcataactgtactctgttttttattcttcatatgaaccttaaaataattatgttaaattcaaaaaagaaatagggagagaaattgattcaaattaaattaaa

SEQ ID NO: 951558 - DNA, 120 bp, Artificial Sequence
  ENSG00000287081_25 (sequence is synthesized)
tgtactaagaaaaagttggcatctttaaaatatccaatcttcctataaaggaatacgaaatgtatgtccagttgtttaaatctttatttttatctttaagaaattccatagtttttcttt

SEQ ID NO: 951559 - DNA, 120 bp, Artificial Sequence
  ENSG00000287081_26 (sequence is synthesized)
tatttttatctttaagaaattccatagtttttctttgttctttcttttagaaaaagggtctcactctgtcacctgggctagagcgcagtaatgcaatcatagctcactgtaacctcaaac

SEQ ID NO: 951560 - DNA, 120 bp, Artificial Sequence
  ENSG00000287081_27 (sequence is synthesized)
aagtgggctgagaacacaggtgccaccatgacaggctaaattttttacttctttatagagacggggtccagctggtcttgaactcctggcctcagtagatcctcctgccttggcttccca

SEQ ID NO: 951561 - DNA, 120 bp, Artificial Sequence
  ENSG00000287081_28 (sequence is synthesized)
ggattacaggcatgagccatagtgcctggccaacaaatatgttgcaccctctgaagtttgtagttttctatatttggatacttaacatttcttaagatccttgaatattttagttatgct

SEQ ID NO: 951562 - DNA, 120 bp, Artificial Sequence
  ENSG00000287081_29 (sequence is synthesized)
gttatgctaaatggttaatggaattttaaaacttgtatttctatttgtaacccaggcatttaactgaatattcattaatattaatagcttttggggaatgttttaaaaagttttctaggc

SEQ ID NO: 951563 - DNA, 120 bp, Artificial Sequence
  ENSG00000287081_30 (sequence is synthesized)
aaaataatccactattcccaaatattgatatttttgttccctttctccttacctatatatagattctcctttcctatatatagtcctgttctaaccattgcaataacatgagaatatata

SEQ ID NO: 951564 - DNA, 120 bp, Artificial Sequence
  ENSG00000287080_0 (sequence is synthesized)
atggctcgtacgaagcaaacagctcgcaagtctaccggcggcaaagctccgcgcaagcagcttgctactaaagcagcccgtaagagcgctccggccaccggtggcgtgaagaaacctcat

SEQ ID NO: 951565 - DNA, 120 bp, Artificial Sequence
  ENSG00000287080_1 (sequence is synthesized)
gaaatcgcccaggacttcaaaaccgacctgcgtttccagagctctgcggtgatggcgctgcaggaggcttgtgaggcctacctggtgggactcttcgaagacaccaatctgtgcgctatt

SEQ ID NO: 951566 - DNA, 120 bp, Artificial Sequence
  ENSG00000287080_2 (sequence is synthesized)
cacgctaaacgcgtcaccatcatgcccaaagatatccagctggcacgtcgcatccgtggggaaagggcataagtctgcccgtttcttcctcattgaaaaggctcttttcagagccactca

SEQ ID NO: 951567 - DNA, 120 bp, Artificial Sequence
  ENSG00000287083_0 (sequence is synthesized)
gccgccaccggccaggctgctgtcaccgctgtcaccgctgccgccgccgccgctgcttcaaaaccatagcggctactgcaaagaaagggttactcctctcttggagtcaagtggctgcaa

SEQ ID NO: 951568 - DNA, 120 bp, Artificial Sequence
  ENSG00000287083_1 (sequence is synthesized)
acttcacctgcttttcatgtaccttctcctgcaaacttgtacgtccttccgtgcagaaggagcaaggaaaaccattaccagcatcacagggaacatcataatgaaggacacccccggaag

SEQ ID NO: 951569 - DNA, 120 bp, Artificial Sequence
  ENSG00000287083_2 (sequence is synthesized)
gaattcatgatttcagtcacaaaagggggaaaaattaaaaggaagtaagtctacaatagatctgcataaatacagccagttaactaagcagcatcacaaaggctgcaatgtaaatctcac

SEQ ID NO: 951570 - DNA, 120 bp, Artificial Sequence
  ENSG00000287083_3 (sequence is synthesized)
gccttggaattggaggcaggttggtttcctcagcgtttgccctccgaagtcctcacagccttggactgcattgtacaaggtctacagatacaggaagatggtgacactggagtccttgcc

SEQ ID NO: 951571 - DNA, 120 bp, Artificial Sequence
  ENSG00000287083_4 (sequence is synthesized)
ctgatccgtcacagtatgcatattttttacagcagcaccagaatgacagaagatctgtattgggttctgagttggatagtaactgcctcttcacctcacttgccttcactatcaacttcc

SEQ ID NO: 951572 - DNA, 120 bp, Artificial Sequence
  ENSG00000287083_5 (sequence is synthesized)
ataaccagtgaaaaataatgaaataatggcaatcaatcctcttctgctcttggcatctcagcttttcccaagccttaactctccacctcaactgaacatggaaaataatcttaatgagtc

SEQ ID NO: 951573 - DNA, 120 bp, Artificial Sequence
  ENSG00000287083_6 (sequence is synthesized)
acaagaaacataagattgaagcaactcataatatcacagaagaagctattccatcttaaacatttctggaagaatttctcacctcaatttaccagctcactaattttcacgttgccaata

SEQ ID NO: 951574 - DNA, 120 bp, Artificial Sequence
  ENSG00000287083_7 (sequence is synthesized)
gctcatgagaattttaattaaaaaatgagctttggatagcagatgtaagaacttctggattttgttcagggtctcagcagtcctgtgactattgcctgaggaacatagaaggagtgccag

SEQ ID NO: 951575 - DNA, 120 bp, Artificial Sequence
  ENSG00000287083_8 (sequence is synthesized)
ggtgctgaagctgacctgacccttgtttctgttcctatagagtggataaactatgaaatatgcatttttaaaaactttaaatacattgtaagtttatactgatactcttaagtaaaaaaa

SEQ ID NO: 951576 - DNA, 120 bp, Artificial Sequence
  ENSG00000287083_9 (sequence is synthesized)
ccataggattttattttcccttatccatcttatacctgaatcttttatctcttcactaattaatctagttgccatttaagccaacatattttactgaaacacatttcatagttggagaat

SEQ ID NO: 951577 - DNA, 120 bp, Artificial Sequence
  ENSG00000287083_10 (sequence is synthesized)
accaatactgagaagggaaacaaacaaagaacaatagcaacaacagtgccatgatggccaactgctggcctttggcaaccaacagctaggccatgatgttcttcttgatctaaaaatgtt

SEQ ID NO: 951578 - DNA, 120 bp, Artificial Sequence
  ENSG00000287083_11 (sequence is synthesized)
tctaaaaatgtttctgaagaagatcaacaataatcagacagactcattttgaccacggtagaataagataaaagcaaaatgactcttttttcttgttttgttttgagacagagtcttgct

SEQ ID NO: 951579 - DNA, 67 bp, Artificial Sequence
  ENSG00000287083_12 (sequence is synthesized)
gctgaagtgcagtggcacgatcttggctgactgcaacctacgcctccggattccaccactcccggct

SEQ ID NO: 951580 - DNA, 74 bp, Artificial Sequence
  ENSG00000287083_13 (sequence is synthesized)
acggcctcccaaagtggtgaaattacaggcgtgagccaccaggcccagccaggcaaaattactctttaatccca

SEQ ID NO: 951581 - DNA, 120 bp, Artificial Sequence
  ENSG00000287083_14 (sequence is synthesized)
gccaccaggcccagccaggcaaaattactctttaatcccatctgaacacagaaacaaggatagatgccattatgtaaataatcaaataaacctctcttccagctgacatgcatgactact

SEQ ID NO: 951582 - DNA, 120 bp, Artificial Sequence
  ENSG00000287083_15 (sequence is synthesized)
cttccatttcttgtaaaaactattgtcctaggttgttccttctgcctcttcctaaaaattgttaagacctccagtctcctatttattacaattgccgattggtctcaatacaagacaaac

SEQ ID NO: 951583 - DNA, 120 bp, Artificial Sequence
  ENSG00000287083_16 (sequence is synthesized)
tttcctttgaactttaaaaaaactgcctatgataaatcatcatctgtaataaatgtctcataactccctcttactgaaacactttatcgtttctctgatcaattcttgttttctatggca

SEQ ID NO: 951584 - DNA, 120 bp, Artificial Sequence
  ENSG00000287082_0 (sequence is synthesized)
tggcaaacagaggcagagccacagaggggctgctcgtccccaaatgtctctccagccgctctgaagctgctgcgggctgctgtgctggtccatggagaaggtggaacactggactaaaga

SEQ ID NO: 951585 - DNA, 120 bp, Artificial Sequence
  ENSG00000287082_1 (sequence is synthesized)
gacaggctgaggaagccctcaagtcacccctgatggaggccagaccttgaatgttacaatccctctgcttatcgacccttaataaaaatctgagcaggtcttctctgcaggacacaggag

SEQ ID NO: 951586 - DNA, 120 bp, Artificial Sequence
  ENSG00000287082_2 (sequence is synthesized)
gctttctggaaaaaaaaacatggaaaaaaagtccggaagtgctcgaccaagagatcgcgagatgggagcagagagtacaggaaaggaaggaggagaaagaaaggctggaaacctttgaat

SEQ ID NO: 951587 - DNA, 120 bp, Artificial Sequence
  ENSG00000287082_3 (sequence is synthesized)
gcacaaaaaaaacaggtcatgaaagataccacgagccaactaaaatctctggctgaaaatgtgctggacaccatgcagttggaagatttcactagggaccgcagtgatgaggggaacttg

SEQ ID NO: 951588 - DNA, 120 bp, Artificial Sequence
  ENSG00000287082_4 (sequence is synthesized)
tatacagaaaagatatctaaattgtatgcacgcagaaggagcattgcccccacaaggaacagttcatgctaaatggtgcagatgaagagactttgacaaaggaagtttcctgagctgtgg

SEQ ID NO: 951589 - DNA, 120 bp, Artificial Sequence
  ENSG00000287082_5 (sequence is synthesized)
gcagggatgagagctcagacaaatgatgggaagcctcccagatgccaaggtttcccacccccaggtttcaagggaggagagaggaagtgatgtcatctgagcccagtgaggccctgtcaa

SEQ ID NO: 951590 - DNA, 120 bp, Artificial Sequence
  ENSG00000287082_6 (sequence is synthesized)
gggaccagggaaaactgcccccactttttgctcccatcctctcattgactgcaggtgcacaggcagctgcctgaaagagggcctgcgaagtgcaagccagaggagttggcctccatggca

SEQ ID NO: 951591 - DNA, 120 bp, Artificial Sequence
  ENSG00000287082_7 (sequence is synthesized)
cagagcaggcagaaaacaaatttggagaatgaccagcactcttgggtttatttgactgaaagtgcttgttttattgcattcactcacatccatttatttaataaatatccatggagtgtc

SEQ ID NO: 951592 - DNA, 120 bp, Artificial Sequence
  ENSG00000287085_0 (sequence is synthesized)
ccacactgaggcttaactctggtttatacttggactgagagctggagatccaaacactgctgcttccatggctaattgcatctcacctggtacgacagccctccccatcgacagccctcc

SEQ ID NO: 951593 - DNA, 120 bp, Artificial Sequence
  ENSG00000287085_1 (sequence is synthesized)
ccatcgggccctcgacaaaggcctaggcttatcaaaatgtgagggcacattcagcccacaatcgaaactgaagtctgtagaaagaggaatccagtggctgtacttcttccactcaaaagt

SEQ ID NO: 951594 - DNA, 120 bp, Artificial Sequence
  ENSG00000287085_2 (sequence is synthesized)
ctggaaaagccacctaattatgttaatgtattcagtttgtttcgagagtctagtgtttcagagtgtggactccggagcaagcgggctgacctccaacctctgaatcctaacttggccact

SEQ ID NO: 951595 - DNA, 120 bp, Artificial Sequence
  ENSG00000287085_3 (sequence is synthesized)
gactgactatagaaccctgggcaaggtggtttatctctgtgcctcagtctcctcatccataaaacggtgctgatattagtacctatgtcaatcaggtacagattaaacaaattagtatgc

SEQ ID NO: 951596 - DNA, 120 bp, Artificial Sequence
  ENSG00000287085_4 (sequence is synthesized)
aaattagtatgcataaaaacactggtcacaataaggatccaattagcatggacccctcaagctgaagaagtgtcagaaatgtgaacacaggcagggtgcagtagctcatgcctgtaatcc

SEQ ID NO: 951597 - DNA, 66 bp, Artificial Sequence
  ENSG00000287085_5 (sequence is synthesized)
aggcagaagaatcgcttgaacctgggaggagcaggttgcagtgaaccaagatggtaaaaaaactga

SEQ ID NO: 951598 - DNA, 120 bp, Artificial Sequence
  ENSG00000287085_6 (sequence is synthesized)
cctccaacagaatacagggaaagacacagcattttagcagttatctcctcccatggttttcaaacttttctacaacctggaatgttttattcaacaaaatcttactccaagcgtagaagg

SEQ ID NO: 951599 - DNA, 120 bp, Artificial Sequence
  ENSG00000287085_7 (sequence is synthesized)
cagaacaaaagtagagctgtgccaactgaggatggggtaagggcatgacctggagacccagcgacctgccacatcccagaagaaccttcaaaatccaccgccatgggtaatggacacatg

SEQ ID NO: 951600 - DNA, 120 bp, Artificial Sequence
  ENSG00000287085_8 (sequence is synthesized)
gagcagggacatcacctcatgatcttgtcctgtttgtaaagatgacaaccgtcaatgattttaaggaacgagtggacaggtaagaggctatgagcttttgtgagagcttgggcaggagac

SEQ ID NO: 951601 - DNA, 120 bp, Artificial Sequence
  ENSG00000287085_9 (sequence is synthesized)
agtgaagtcaggcagaggagactgcgatgggaggtcagacagcaggaggagatgccacatggggctgacttaagtgagaagggaggagtagggaggagctgaggatggctctgctcctgg

SEQ ID NO: 951602 - DNA, 120 bp, Artificial Sequence
  ENSG00000287085_10 (sequence is synthesized)
cccctctaactatggcaacttctggctgtgcatggtatatgcagcagtctggataatgaagatgagccaatctttttttaaacaaaaattttaggagaatgaatggtttttcgaataaac

SEQ ID NO: 951603 - DNA, 120 bp, Artificial Sequence
  ENSG00000287085_11 (sequence is synthesized)
aatctaattaaaatcagaaaagctttttagttttcatctttaagtataacactgaaatgtcttactaaatttctaactgctgtaactacaaaacatgaaaagcctttagtacctgaaggt

SEQ ID NO: 951604 - DNA, 120 bp, Artificial Sequence
  ENSG00000287085_12 (sequence is synthesized)
actgttgtctccacgctccacggaacactgcaaaaggagagaactgagctggctctgtcctcacttcgttatgttaatcagaagggaaactgttgttgatttgttaaatccttcagtttt

SEQ ID NO: 951605 - DNA, 120 bp, Artificial Sequence
  ENSG00000287085_13 (sequence is synthesized)
tcttgtgtcttgcctctttcttattaatgtaaagcaaagaaaaaaacaaggcttaactacaagttctgattaatacaggctttatgcatttggtttagaaatgtgtataattttctgcaa

SEQ ID NO: 951606 - DNA, 120 bp, Artificial Sequence
  ENSG00000287084_0 (sequence is synthesized)
atagaagaagaagtatgccctccattctgctggcagaagtgtgagcataccacaagatggaagccacgtgtgaaggcaacagagcaagaagacaggatgagcctgggtcccttgagactt

SEQ ID NO: 951607 - DNA, 120 bp, Artificial Sequence
  ENSG00000287084_1 (sequence is synthesized)
cccagggcagagccacccacatttaaacaagcatggcaggtgctgggaatacgatgggagtaagccaagaatttgccctaaggaagcttatattttagggagaaaatgacgaggaaagaa

SEQ ID NO: 951608 - DNA, 120 bp, Artificial Sequence
  ENSG00000287084_2 (sequence is synthesized)
tctctctatagcaaaaaagcagccagccagggaaggaatactacaccacatcagcttgggcttacagacttctgaataactgagggcaacagagccccacattggatgagtgatgtcaga

SEQ ID NO: 951609 - DNA, 120 bp, Artificial Sequence
  ENSG00000287084_3 (sequence is synthesized)
aatacaactctgtgtgaagccgctgaggtgtggggtgatttctgacagcagtagtcttctctggctaattcagcgaataaagaaatcgagcgataaggacaagctccacttcttcatcta

SEQ ID NO: 951610 - DNA, 120 bp, Artificial Sequence
  ENSG00000287084_4 (sequence is synthesized)
gtcctgtgaagcagttgatctttttcaatgtctcagttatgacatctctcatgtgaaaagcatcaacgccaggagcttctccatgtcctctgagcaagggatgcatcccatccatttaca

SEQ ID NO: 951611 - DNA, 120 bp, Artificial Sequence
  ENSG00000287084_5 (sequence is synthesized)
gactataaaaactcagggggagggtttcattgctcaatgaggggcttgaattttctttgatcccctactgatggcgaatgatctctttattccttacacggggagggaggatgaaacctg

SEQ ID NO: 951612 - DNA, 120 bp, Artificial Sequence
  ENSG00000287084_6 (sequence is synthesized)
gggcaattacattagattccgttgacatgtgaagcaattttggcaaacccagcgagccttttggttgtgatttatatctagtcagggagaaatgacatctgggatgtctgatttattcac

SEQ ID NO: 951613 - DNA, 120 bp, Artificial Sequence
  ENSG00000287084_7 (sequence is synthesized)
tagcaaaatgctggctgaacctaaaataagaaaatagagatttatgtaacagattgcagagccttaatttaagaatggttaggaaagcagcagacactccaaggctccgctctgcttgga

SEQ ID NO: 951614 - DNA, 120 bp, Artificial Sequence
  ENSG00000287084_8 (sequence is synthesized)
atcacatgctgcaagttaatattacctttcttaaagtattaagtgacatgttgagaattagagcattatttcttcaaaattcaacacctgaatcttttcaagatgactgtttcatatcca

SEQ ID NO: 951615 - DNA, 120 bp, Artificial Sequence
  ENSG00000287084_9 (sequence is synthesized)
aataagtcctggcattcctttacatattgactgccatagagaagcaaacagctctgtgaaatttagcagacagctacagtctattgtagttctacctgcaaccccacaagcaacttcata

SEQ ID NO: 951616 - DNA, 120 bp, Artificial Sequence
  ENSG00000287084_10 (sequence is synthesized)
ctaatctccatgccaggagaacctggaaagtactgggacttggtgaataaggaattctgtcccctctgttaagagaccacgtggagtcagcgccataattgtttcctcttcaaaacctaa

SEQ ID NO: 951617 - DNA, 120 bp, Artificial Sequence
  ENSG00000287084_11 (sequence is synthesized)
caagatttttctggaaaagactcaatgttgaaaacaccaaaatgcaatttctttccggtctcagtgcccacagtagatgtgctcctgcatgtagtgctcactagacaagccactgattta

SEQ ID NO: 951618 - DNA, 120 bp, Artificial Sequence
  ENSG00000287084_12 (sequence is synthesized)
ttcttgcctggtgacacagtcctgtttcccgcttcctgctttacattggcctttggaaagctcagagtcaagaggcaatccccactgagaatgcagaggactccaaggcacaaatgtgat

SEQ ID NO: 951619 - DNA, 120 bp, Artificial Sequence
  ENSG00000287084_13 (sequence is synthesized)
atctaacttgattccttgcatttctctcttttctgacttggtttcacacgttctcatctatgcatcagttgatcaagcaattcatttatcatctcagctggctgaaattctgaataaggt

SEQ ID NO: 951620 - DNA, 120 bp, Artificial Sequence
  ENSG00000287084_14 (sequence is synthesized)
tccaatccaagttcttaaggcaaggacgggagcaagatagagctgcagaatctgtcaatatggacttttatgggaagatgaaaagcatgtcctgaaaactcaggcagggatcattgaagc

SEQ ID NO: 951621 - DNA, 120 bp, Artificial Sequence
  ENSG00000287084_15 (sequence is synthesized)
ccagtcagttctgtcttttgaactcagagcactacaattcatccacccactcctctcccaggaccttctagtgtaacaagactgagttctcacagtgacccctaagcatctaagaaggat

SEQ ID NO: 951622 - DNA, 120 bp, Artificial Sequence
  ENSG00000287084_16 (sequence is synthesized)
tgccttctttgcctggttactcccactttcctccctgtgccacatgtgtgcttccaaaatgaggcccgactacaagaatcaagtaacagtcaacaactcaatcaactgtccctccaccaa

SEQ ID NO: 951623 - DNA, 120 bp, Artificial Sequence
  ENSG00000287084_17 (sequence is synthesized)
caaccagagacagatgaagtgacatctgcagctgaggagctgacatagaagaaaacatggggcagcatgggctcgtgactccccaccccactccacttgaaggaggaaccccggccacgc

SEQ ID NO: 951624 - DNA, 120 bp, Artificial Sequence
  ENSG00000287084_18 (sequence is synthesized)
atccaagcaagaggagaagagatcctctctgggaaaagaacccagtttggttgtgtaaagaacaaagcttttgactgagaaaaatctgggctcaaatatgggttctaccctttagaaccc

SEQ ID NO: 951625 - DNA, 120 bp, Artificial Sequence
  ENSG00000287084_19 (sequence is synthesized)
ctgagatattatgcaaattaatccctactctgcttcttggcagagtcctttctgtaaaatggtaggtattccttccttgcaaagtccccatgaggagcctaggagttcctgctctccttg

SEQ ID NO: 951626 - DNA, 120 bp, Artificial Sequence
  ENSG00000287084_20 (sequence is synthesized)
acacctctcccaaatgcaataaattactcgctaagatacttgggggatggacaggaaatggcagaaaggccaggggagacatcctaggagtccaaagatttttctgctacagcccagtat

SEQ ID NO: 951627 - DNA, 120 bp, Artificial Sequence
  ENSG00000287084_21 (sequence is synthesized)
cttattatgctccacatgccagatcaagcaagtgagaggagacagacatgctaggagcgcaggtccactattctctacccactctcctctcctggtgtcccagaaggtgatcctgtcaaa

SEQ ID NO: 951628 - DNA, 120 bp, Artificial Sequence
  ENSG00000287084_22 (sequence is synthesized)
tacagtgtcatgggtcaacctcaaagcctaggagtcactcaggcctcagtagaatctcaacaccatcacagagggtgagtgagcctactgatgtgtgatacagggaccatcctacttatg

SEQ ID NO: 951629 - DNA, 120 bp, Artificial Sequence
  ENSG00000287084_23 (sequence is synthesized)
acatagaattattgtaagaaaaaatgagatgacacagaaaggtctcacccagtgacaatactagtgtcactcttctttttcttattaacatcttctgtccactcgctaagaaacctttca

SEQ ID NO: 951630 - DNA, 120 bp, Artificial Sequence
  ENSG00000287084_24 (sequence is synthesized)
ataaataacatctgttatgagatttttccttttccttcttgtttagttggttttatttgtaaacttttcaaaactttttttagagacagggtctcattctattgcccaggctggaatgca

SEQ ID NO: 951631 - DNA, 120 bp, Artificial Sequence
  ENSG00000287084_25 (sequence is synthesized)
tttttttttttttttgtagagaggcagtctcactgtgttgcacaggaaacaagttttttagcctctttctgagtatgttcaacagtgtgtgaattccattaatccactaacttggaatct

SEQ ID NO: 951632 - DNA, 120 bp, Artificial Sequence
  ENSG00000287084_26 (sequence is synthesized)
aaataatctccagccattccaaagcagctccaaaatataagaatccactaacaacagatctgcttccatggagctaagagtgaacatcccgacacacactgcaaagcaaactgtgtgcag

SEQ ID NO: 951633 - DNA, 120 bp, Artificial Sequence
  ENSG00000287084_27 (sequence is synthesized)
ggtatatgcttataaacagtctcaccttcacccaggataccatcttttattattattattactctctgttttcctcttgaatgctgacaagttgcactaggtatttccttctctcttaga

SEQ ID NO: 951634 - DNA, 120 bp, Artificial Sequence
  ENSG00000287084_28 (sequence is synthesized)
tacgaaaataaagcctcttccaaacttctggctgttgagctgctatgccagggtgtcagagccagcccctgagtcactcagccgaaagccaagctgaggggaggtggttttcattgcagg

SEQ ID NO: 951635 - DNA, 120 bp, Artificial Sequence
  ENSG00000287084_29 (sequence is synthesized)
aacttgggttagcttcctggagacaaaacacagcgacatcaataaatagggtagaaaggaggcagtgataaaaggtgaatttaaacctcagtttcaatattagctaaaaagcatacaata

SEQ ID NO: 951636 - DNA, 120 bp, Artificial Sequence
  ENSG00000287084_30 (sequence is synthesized)
gttaaacatagctatacaatagaatgcatttctatacagtggaagaaaaaggtcaaagtcaaaggcagaacaggctttgattcttccatacacgcagtctacatggacagaaatagcatt

SEQ ID NO: 951637 - DNA, 120 bp, Artificial Sequence
  ENSG00000287084_31 (sequence is synthesized)
ttcttaaatccacagcctttttatggcaatagcccagcctgtttctaatgggtattttcaagttcctttttttcattcattctgtaaatatttataagtgcctcctatgtaccagatgct

SEQ ID NO: 951638 - DNA, 120 bp, Artificial Sequence
  ENSG00000287084_32 (sequence is synthesized)
ggggatactacagagaagaagacactgaagttccctgacttcatggagtgtctattttaccggaaaagatagattataaacaatgcacaccaagggatgatgaacaaactgtgaccctgg

SEQ ID NO: 951639 - DNA, 120 bp, Artificial Sequence
  ENSG00000287084_33 (sequence is synthesized)
gaaagtgtcttaatcatcctatgccacctatttctcatctgcttaagggggctgctaatagtcccgacatgacttggtgtgtaggcttggcgtgcggatgaatgagtgttatgtgtttga

SEQ ID NO: 951640 - DNA, 120 bp, Artificial Sequence
  ENSG00000287084_34 (sequence is synthesized)
ggctaagcacagtgcctggctctgggtcagctttgcccatgtgcaggctgttatagccccattggaatggaagctcagagagtagggacctcttgtctgttttgtccattgtcatcccag

SEQ ID NO: 951641 - DNA, 120 bp, Artificial Sequence
  ENSG00000287087_0 (sequence is synthesized)
atatcccattttgtttatccatttattggtcgggttctactttttggctattataaataatgctgctttttatgagcagttttgtgtaaacacatgttttcatttcttttgggtatatat

SEQ ID NO: 951642 - DNA, 120 bp, Artificial Sequence
  ENSG00000287087_1 (sequence is synthesized)
ctagggatggaattcctgggtcatgtgttaaatctatgttgtcaaatgcttttcctgcatttgacatgatctattaacatgactgtatgatttttatcttatagtatattaatataatgt

SEQ ID NO: 951643 - DNA, 120 bp, Artificial Sequence
  ENSG00000287087_2 (sequence is synthesized)
gttacactgatttttgtatgttgaaacaactttatatcctgagataaactatgcttgattatcatatatataattctcttttatatgttgctggattaatttgttagtacagttgatcct

SEQ ID NO: 951644 - DNA, 120 bp, Artificial Sequence
  ENSG00000287087_3 (sequence is synthesized)
tgaacaacatgggggttggggtgctgacggccacacagtcaaaaatccatgtataacttttaagtcccccaaaacttaactactaatagcctactgttcactggaagccttgccaattaa

SEQ ID NO: 951645 - DNA, 120 bp, Artificial Sequence
  ENSG00000287087_4 (sequence is synthesized)
ttcactggaagccttgccaattaacataaattttgtatattatatgcacattacattattacaataagataagctagagaaaataaaatgtcattaataagataataaggaagataaaat

SEQ ID NO: 951646 - DNA, 120 bp, Artificial Sequence
  ENSG00000287087_5 (sequence is synthesized)
gttgagcacgctgaggaggaggaggaagagaggttggtcttgctatctcacaggtggcagaggcagaagaaaatctgcatataagtggacccacacagttcaaacccatgttgttcaaga

SEQ ID NO: 951647 - DNA, 120 bp, Artificial Sequence
  ENSG00000287087_6 (sequence is synthesized)
gtcaaatatattggttgagagatttttgcatctatattcacaaggaatattggtctttaacttttttttgtaatgtatttggttttagtatcatagtaatcttggttttgtggcatgagt

SEQ ID NO: 951648 - DNA, 120 bp, Artificial Sequence
  ENSG00000287087_7 (sequence is synthesized)
atagtaatcttggttttgtggcatgagttgggaagttttccctcatttttgctttgttagttgattaaatatttgtcaaactggctgtgcgtcttggctcacaccagtaatcccagcact

SEQ ID NO: 951649 - DNA, 73 bp, Artificial Sequence
  ENSG00000287087_8 (sequence is synthesized)
ggatcatgccactgcagtccagcctgggtaacagagtgagactctatcccaaaaaaaaaaaaaaaaaaaaaaa

SEQ ID NO: 951650 - DNA, 120 bp, Artificial Sequence
  ENSG00000287086_0 (sequence is synthesized)
aaaacaaaacaaaacaacaacaacaaaaaaacccaaatcaatcaggaatgtcacatatttacaaaaaggaacagaaatactcacatttagcaaaaacttatttgtccattaatactataa

SEQ ID NO: 951651 - DNA, 120 bp, Artificial Sequence
  ENSG00000287086_1 (sequence is synthesized)
tccattaatactataatcaaacatgcagattttctcgtattttctgtgcggatggcaagttacaaaaatgctattatcacaactgtagaatgtcaatcctagtttagaaacagtaataaa

SEQ ID NO: 951652 - DNA, 120 bp, Artificial Sequence
  ENSG00000287086_2 (sequence is synthesized)
ttcactgtacacattttaaggtcccctctcccaccccccaacaaaaatagaggcagaacctctaagcactttctaacaaagtgtcccctggtttgttcctctgacaaaccctgactgaag

SEQ ID NO: 951653 - DNA, 120 bp, Artificial Sequence
  ENSG00000287086_3 (sequence is synthesized)
gctcatgatgtgcaggcactggggtctcaaagaggagaaagacttgtccctgcctcacggatgcctcagtcttcccaaagcaggaggcagacaagtcaccaaccgctacggatgtagaat

SEQ ID NO: 951654 - DNA, 120 bp, Artificial Sequence
  ENSG00000287086_4 (sequence is synthesized)
ggatgtattatacatccattaaaagcagatgccaatgccttcttaaaattaaacgatatgctgcaattcccactgaattacttatacaaacctccttacatacaagctgtcctgacttac

SEQ ID NO: 951655 - DNA, 120 bp, Artificial Sequence
  ENSG00000287086_5 (sequence is synthesized)
taggaagcaaaaatgccaccaccttctcctgataaatacttctctaatgggcaggcattaaattacattttgtgatgtttgcccctaaacatcacaatgcctagtgaagtcagttaactt

SEQ ID NO: 951656 - DNA, 120 bp, Artificial Sequence
  ENSG00000287086_6 (sequence is synthesized)
tcttttaagcaatggtgcctattttactctgagaatgagacactttgaaactaaggaaggaaccagtcctgtatctagatcaagactcatcagtaccatcaaaagctgagatgaaacagt

SEQ ID NO: 951657 - DNA, 120 bp, Artificial Sequence
  ENSG00000288253_0 (sequence is synthesized)
tcttggagcagcgggattagcttctaaagtctctttcatctctcctaaggaagaagcctagaagaggaggaagaggaaagaaaaggagtcaggaatgcctcttagtgactggtgctgtgg

SEQ ID NO: 951658 - DNA, 120 bp, Artificial Sequence
  ENSG00000288253_1 (sequence is synthesized)
agggccaggtctggaggcactgccagctctgtagactggattatggaagctgctcgtggaagtcttaatgtgcacaactgcctgataaaatttggaagaagagattaggaagaggaaatc

SEQ ID NO: 951659 - DNA, 120 bp, Artificial Sequence
  ENSG00000288253_2 (sequence is synthesized)
ttttctgcctgattttatactccatttgtagtaaatgtttaacagcaagagattctttaaaccattctaagtacatccatcctatggagattgtggtattcctgcagagactcttgtgaa

SEQ ID NO: 951660 - DNA, 120 bp, Artificial Sequence
  ENSG00000288253_3 (sequence is synthesized)
gcgtggggagccggtcttggagcagcgggattagcttctaaagtctctttcatctctcctaaggaagaagcctagaagaggaggaagaggaaagaaaaggagtcaggaatgcctcttagg

SEQ ID NO: 951661 - DNA, 120 bp, Artificial Sequence
  ENSG00000288253_4 (sequence is synthesized)
ccctctgatgtcacttaaattccatctcacagtgactggtgctgtggaatttgtgaagaggctccattgggaagggcttatacccagacatggatggagacggggtgtgggccccatggt

SEQ ID NO: 951662 - DNA, 120 bp, Artificial Sequence
  ENSG00000288253_5 (sequence is synthesized)
agctgcaggggtacctctcctatcaagaacatgtgaaattttgccctcattaaaaaaaaaacaacaacttgctactatgtttatatatatatatattttgaaaatctgggaaaaatgaca

SEQ ID NO: 951663 - DNA, 120 bp, Artificial Sequence
  ENSG00000288253_6 (sequence is synthesized)
tttccctttgtctagattagatccgcttccagcgcttctgtacctggtgttggcggaggggttcttacggatcttaaaatcctcccgccgttccctccatcctaggactttcttgtctgc

SEQ ID NO: 951664 - DNA, 120 bp, Artificial Sequence
  ENSG00000288253_7 (sequence is synthesized)
gtggggagccggtcttggagcagcgggtgagtttccctttgtctagattagatccgcttccagcgcttctgtacctggtgttggcggaggggttcttacggatcttaaaatcctcccgcc

SEQ ID NO: 951665 - DNA, 120 bp, Artificial Sequence
  ENSG00000288253_8 (sequence is synthesized)
gttccctccatcctaggtatattaatacgtcgccaagaaattcggaggttaaaatcgcttggaggctgctggtcctttccctgagctctctgccttcgggccacgtagacgcttttcgtc

SEQ ID NO: 951666 - DNA, 120 bp, Artificial Sequence
  ENSG00000288253_9 (sequence is synthesized)
ccgtttacctgcttaaaaccctttactgaccactccttcggtcccgcgtcatgtaaaagccctcacccatgaggtgtattcacgcccagtgggtcctccaagcctcgcccttctggcctc

SEQ ID NO: 951667 - DNA, 120 bp, Artificial Sequence
  ENSG00000288253_10 (sequence is synthesized)
ttggagctcggtcccgcagtctcgatgcatcagcgccgtgtcctctgcccggccctgggattttggaaaccccacccctctcctaatccacccccaaccttgtcctccttgggctgggcc

SEQ ID NO: 951668 - DNA, 120 bp, Artificial Sequence
  ENSG00000288253_11 (sequence is synthesized)
cttgtgttccccaggtttccccttcacaacccacattccttaccccgcattgagggaggtgacggggcctggcttttgacactcagtgtttttccgttccaaattgcacccgctggaaaa

SEQ ID NO: 951669 - DNA, 120 bp, Artificial Sequence
  ENSG00000288253_12 (sequence is synthesized)
tgtgctcttccagaggaaaaacgattgatttattctttcctcctctgaaactcaacacggtagtaaacactgaacccagaatacttcacttgtggtcaccgaatgtgtggggatttctcc

SEQ ID NO: 951670 - DNA, 120 bp, Artificial Sequence
  ENSG00000288253_13 (sequence is synthesized)
ccactaacaagcagttctctatcagacatcaactcggtgtcccataatttacctcacttctgacagctgtacctggtgtaagcatcggatcccacagattaaaggctcagtccacaagac

SEQ ID NO: 951671 - DNA, 120 bp, Artificial Sequence
  ENSG00000288253_14 (sequence is synthesized)
ttctccacttcagatgtcggttacaagtcccagattggaacctgaacttctaagctactggatataaattgaggattcccatgacccagtcttcagtatttattaatttgccagagtagc

SEQ ID NO: 951672 - DNA, 120 bp, Artificial Sequence
  ENSG00000288253_15 (sequence is synthesized)
tcacagaactcagaaacgttttagttgggtttactcatttgttttaaaggatattacaaaggttgcagatagacagatggaatagcagttctagaaaattagttgaatgcaggagaggat

SEQ ID NO: 951673 - DNA, 120 bp, Artificial Sequence
  ENSG00000288253_16 (sequence is synthesized)
ttgggaaccgtggtgtttatctggtcagtcagaagtagaggtgaaaactactacttgtgtacagcttctaaggtgaagggtagtcttgtgggactgagcttttcacccatgggatctgac

SEQ ID NO: 951674 - DNA, 120 bp, Artificial Sequence
  ENSG00000288253_17 (sequence is synthesized)
actatctccttgtagatagtgtaagaattgagttaaattttaggattcccaggtggaagtctgcaaggaactggtcagtgtagggaaaccacacattttcttgaccagaagtaaagtatc

SEQ ID NO: 951675 - DNA, 120 bp, Artificial Sequence
  ENSG00000288253_18 (sequence is synthesized)
ctgtgttgagcacgagagcaatgaaaacagtttggttttttcctgtctcagtgaagggaagatatttgtaacaggctcacttacctgtctcaagccccgtgctttctactcagtattgac

SEQ ID NO: 951676 - DNA, 120 bp, Artificial Sequence
  ENSG00000288253_19 (sequence is synthesized)
tgggaaggatctgtccctgctctttgttttaattttcttgatgtcatcttcatctcttaccgtttttctctgctgatgtgtcctgactcactgttttctgaatgtgggaatgacccacag

SEQ ID NO: 951677 - DNA, 82 bp, Artificial Sequence
  ENSG00000288253_20 (sequence is synthesized)
tcctgactcactgttttctgaatgtgggaatgacccacagcttagtcctccaaccacttttcctctctgtccacgtctactg

SEQ ID NO: 951678 - DNA, 67 bp, Artificial Sequence
  ENSG00000288253_21 (sequence is synthesized)
taccacacccagctacttttgtgtttttagtagagatggattctccatgttggtcaggctggtcttg

SEQ ID NO: 951679 - DNA, 120 bp, Artificial Sequence
  ENSG00000288253_22 (sequence is synthesized)
ttctttatcatttcatctcatggttttaaaccctacctttatgtctccatccctcatagacctctctcctaatttctagaattctgtgtccagttgtctcctcaactttcttctgggaca

SEQ ID NO: 951680 - DNA, 120 bp, Artificial Sequence
  ENSG00000288253_23 (sequence is synthesized)
tccaacaggcatctccatatttacgtgtccactagtgacttcctgagttctccgatgtatgctcccttgcagtcctacccatctcagataagggtgaccccatacttctgggagcttagg

SEQ ID NO: 951681 - DNA, 120 bp, Artificial Sequence
  ENSG00000288253_24 (sequence is synthesized)
tgaacatattggcatatatttaaaatctaggacatagttccttgtttgaaaatgttttagggaataatataaagaaaaaattacatgattgcttaaaatgggtgaggaactagcatttcc

SEQ ID NO: 951682 - DNA, 120 bp, Artificial Sequence
  ENSG00000288253_25 (sequence is synthesized)
aaaattcttttgagttgagggagaaaaatgtttaaaggcctccaccctatctgatctgcacccccaggacctctctgacctcatccgctacctgtgtcggccttgctccctctgctgtag

SEQ ID NO: 951683 - DNA, 120 bp, Artificial Sequence
  ENSG00000288253_26 (sequence is synthesized)
ctacacagatctcattccttttcctggagctgaggttgctcctgtctcaggaccttcacctgggctgtccctctgcctaggactctttagcccctcagttgcaggtgacaaacatccttc

SEQ ID NO: 951684 - DNA, 120 bp, Artificial Sequence
  ENSG00000288253_27 (sequence is synthesized)
cccctagatgtttctttctgctcttttgctgtccactgtctggatcctggtgacaacaaggacccaaggggagaccagagccagaagataggggttgttctgggcttgctccctctgagt

SEQ ID NO: 951685 - DNA, 120 bp, Artificial Sequence
  ENSG00000288253_28 (sequence is synthesized)
ttagctcaaccctggattcgcattagaatgctgagacattttgcaaatatatctcttgtgcctcctttccagagattcccatgcatgtaggttcaagcgcagtgtcccacatgattctaa

SEQ ID NO: 951686 - DNA, 120 bp, Artificial Sequence
  ENSG00000288253_29 (sequence is synthesized)
tctgtattcatcattgaacatcagggtgctgtgtcttccatttctgaaagctgatatcggcctgtgatccacagagaggggagaggctgtgctctgcatggggtttggtcagggccagat

SEQ ID NO: 951687 - DNA, 120 bp, Artificial Sequence
  ENSG00000288253_30 (sequence is synthesized)
ctgtgccctgaaggggagctcagtccagcccagcaccccacagctgcagcatgtatgtgggcttctccaggtggggagtaagctttgaagaactcaaaaactgacttgttcttcctgtag

SEQ ID NO: 951688 - DNA, 120 bp, Artificial Sequence
  ENSG00000288253_31 (sequence is synthesized)
gactttcttgtctgcatcatccctggtgctgtgggcagcagagggccatctttccacagggcgaggtctttcctgtgtatgtggttgtggcacagggagggggtgtgttgattttgagca

SEQ ID NO: 951689 - DNA, 120 bp, Artificial Sequence
  ENSG00000288253_32 (sequence is synthesized)
gtaaacagcatattttgaacactcaggattaacttgttttttaaaaagttttctttttctttttctttcaggattagcttctaaagtctctttcatctctcctaaggaagaagcctagaa
